United States Patent Application Publication US 2007/0048756 A1 - sequence listing, part 4

SEQ ID NO: 108048 - DNA, 33 bp, Homo sapien
aggccctggcaaccacgattagccttcctgtct

SEQ ID NO: 108049 - DNA, 33 bp, Homo sapien
ggagtagtaaagaagacggacgcatgaaccact

SEQ ID NO: 108050 - DNA, 33 bp, Homo sapien
ggagtagtaaagaagatggacgcatgaaccact

SEQ ID NO: 108051 - DNA, 33 bp, Homo sapien
tcaacaagtatgattaaaagctcaaatgtctta

SEQ ID NO: 108052 - DNA, 33 bp, Homo sapien
tcaacaagtatgattagaagctcaaatgtctta

SEQ ID NO: 108053 - DNA, 33 bp, Homo sapien
gttaaaggtcgccagccgccggttatccttccc

SEQ ID NO: 108054 - DNA, 33 bp, Homo sapien
gttaaaggtcgccagctgccggttatccttccc

SEQ ID NO: 108055 - DNA, 33 bp, Homo sapien
ttcccgaaagtccccacgaaagaaggctaagtg

SEQ ID NO: 108056 - DNA, 33 bp, Homo sapien
ttcccgaaagtccccatgaaagaaggctaagtg

SEQ ID NO: 108057 - DNA, 33 bp, Homo sapien
tccaattcctgacccacgcaattcgagagcata

SEQ ID NO: 108058 - DNA, 33 bp, Homo sapien
tccaattcctgacccatgcaattcgagagcata

SEQ ID NO: 108059 - DNA, 33 bp, Homo sapien
gttattagcgtgtgcccatagtaattttcctag

SEQ ID NO: 108060 - DNA, 33 bp, Homo sapien
gttattagcgtgtgcctatagtaattttcctag

SEQ ID NO: 108061 - DNA, 33 bp, Homo sapien
tgcctacagagcagtgcagcctttaaacctaat

SEQ ID NO: 108062 - DNA, 33 bp, Homo sapien
tgcctacagagcagtgtagcctttaaacctaat

SEQ ID NO: 108063 - DNA, 33 bp, Homo sapien; identical to SEQ ID NO: 108061

SEQ ID NO: 108064 - DNA, 33 bp, Homo sapien; identical to SEQ ID NO: 108062

SEQ ID NO: 108065 - DNA, 33 bp, Homo sapien
catgcggttatgacaacgccaggtgtgtagtgg

SEQ ID NO: 108066 - DNA, 33 bp, Homo sapien
catgcggttatgacaatgccaggtgtgtagtgg

SEQ ID NO: 108067 - DNA, 33 bp, Homo sapien
ttgcccacacttctgtaaatccataacgtacac

SEQ ID NO: 108068 - DNA, 33 bp, Homo sapien
ttgcccacacttctgtgaatccataacgtacac

SEQ ID NO: 108069 - DNA, 33 bp, Homo sapien
tacaaacattgtgtggaaagcaaaaataagtgg

SEQ ID NO: 108070 - DNA, 33 bp, Homo sapien
tacaaacattgtgtgggaagcaaaaataagtgg

SEQ ID NO: 108071 - DNA, 33 bp, Homo sapien
gccaaggatataccagacacattgctgttcttg

SEQ ID NO: 108072 - DNA, 33 bp, Homo sapien
gccaaggatataccaggcacattgctgttcttg

SEQ ID NO: 108073 - DNA, 33 bp, Homo sapien
tgttgcatccttgttgaaataaatatcatcgtg

SEQ ID NO: 108074 - DNA, 33 bp, Homo sapien
tgttgcatccttgttggaataaatatcatcgtg

SEQ ID NO: 108075 - DNA, 33 bp, Homo sapien
tggagctgctcttgtggaactcccagtccactg

SEQ ID NO: 108076 - DNA, 33 bp, Homo sapien
tggagctgctcttgtgtaactcccagtccactg

SEQ ID NO: 108077 - DNA, 33 bp, Homo sapien
cacagaccgtactgtaggtttgtattgtgctcg

SEQ ID NO: 108078 - DNA, 33 bp, Homo sapien
cacagaccgtactgtatgtttgtattgtgctcg

SEQ ID NO: 108079 - DNA, 33 bp, Homo sapien
taaatagctccatagcacttcgtaaatgctcca

SEQ ID NO: 108080 - DNA, 33 bp, Homo sapien
taaatagctccatagcgcttcgtaaatgctcca

SEQ ID NO: 108081 - DNA, 33 bp, Homo sapien
gctactctgtgtataccatgatgtataactcca

SEQ ID NO: 108082 - DNA, 33 bp, Homo sapien
gctactctgtgtatacgatgatgtataactcca

SEQ ID NO: 108083 - DNA, 33 bp, Homo sapien
gcaattaggtgggcgccattactcttgcaccca

SEQ ID NO: 108084 - DNA, 33 bp, Homo sapien
gcaattaggtgggcgcgattactcttgcaccca

SEQ ID NO: 108085 - DNA, 33 bp, Homo sapien
gttttcttaatttggacactccattaacgttga

SEQ ID NO: 108086 - DNA, 33 bp, Homo sapien
gttttcttaatttggagactccattaacgttga

SEQ ID NO: 108087 - DNA, 33 bp, Homo sapien
ctctcctgataattacaaatgctttacaaatat

SEQ ID NO: 108088 - DNA, 33 bp, Homo sapien
ctctcctgataattactaatgctttacaaatat

SEQ ID NO: 108089 - DNA, 33 bp, Homo sapien
tcgcttcctggttgaacgatgaaaaatgattgt

SEQ ID NO: 108090 - DNA, 33 bp, Homo sapien
tcgcttcctggttgaatgatgaaaaatgattgt

SEQ ID NO: 108091 - DNA, 33 bp, Homo sapien
gccttcctgacctggaaagaggtgttggtcttc

SEQ ID NO: 108092 - DNA, 33 bp, Homo sapien
gccttcctgacctggagagaggtgttggtcttc

SEQ ID NO: 108093 - DNA, 33 bp, Homo sapien
gcactagcctgctgaaaaatatctctctgtttg

SEQ ID NO: 108094 - DNA, 33 bp, Homo sapien
gcactagcctgctgaacaatatctctctgtttg

SEQ ID NO: 108095 - DNA, 33 bp, Homo sapien
ataagtgtacttgaccacagagctttttcagtc

SEQ ID NO: 108096 - DNA, 33 bp, Homo sapien
ataagtgtacttgaccgcagagctttttcagtc

SEQ ID NO: 108097 - DNA, 33 bp, Homo sapien
acataaggccagaccccgatgacgtagcagact

SEQ ID NO: 108098 - DNA, 33 bp, Homo sapien
acataaggccagaccctgatgacgtagcagact

SEQ ID NO: 108099 - DNA, 33 bp, Homo sapien
cctccttcaaaaagaaagtgaatagtcacatgt

SEQ ID NO: 108100 - DNA, 33 bp, Homo sapien
cctccttcaaaaagaaggtgaatagtcacatgt

SEQ ID NO: 108101 - DNA, 33 bp, Homo sapien
aaagcacttgtcgatccattacctctccgtcag

SEQ ID NO: 108102 - DNA, 33 bp, Homo sapien
aaagcacttgtcgatctattacctctccgtcag

SEQ ID NO: 108103 - DNA, 33 bp, Homo sapien
agctcagctcagtcaaaggaccttaactaactt

SEQ ID NO: 108104 - DNA, 33 bp, Homo sapien
agctcagctcagtcaagggaccttaactaactt

SEQ ID NO: 108105 - DNA, 33 bp, Homo sapien
tgggacccagcatcttcaaccctacatcttata

SEQ ID NO: 108106 - DNA, 33 bp, Homo sapien
tgggacccagcatctttaaccctacatcttata

SEQ ID NO: 108107 - DNA, 33 bp, Homo sapien
gtgaagcacttagcaacggcaagggcttccatg

SEQ ID NO: 108108 - DNA, 33 bp, Homo sapien
gtgaagcacttagcaatggcaagggcttccatg

SEQ ID NO: 108109 - DNA, 33 bp, Homo sapien
tgagagcaggattaatgagggccaaagtggatg

SEQ ID NO: 108110 - DNA, 33 bp, Homo sapien
tgagagcaggattaattagggccaaagtggatg

SEQ ID NO: 108111 - DNA, 33 bp, Homo sapien
ggaatgctcatgaaaaatagatgctttgacaag

SEQ ID NO: 108112 - DNA, 33 bp, Homo sapien
ggaatgctcatgaaaactagatgctttgacaag

SEQ ID NO: 108113 - DNA, 33 bp, Homo sapien
aaatgaccacaattcacaggagaaagtcctcaa

SEQ ID NO: 108114 - DNA, 33 bp, Homo sapien
aaatgaccacaattcataggagaaagtcctcaa

SEQ ID NO: 108115 - DNA, 33 bp, Homo sapien
tatttctttatgatacaacgatttatatttctt

SEQ ID NO: 108116 - DNA, 33 bp, Homo sapien
tatttctttatgatacgacgatttatatttctt

SEQ ID NO: 108117 - DNA, 33 bp, Homo sapien
cccagtgattatatctcacctaactacagcaca

SEQ ID NO: 108118 - DNA, 33 bp, Homo sapien
cccagtgattatatcttacctaactacagcaca

SEQ ID NO: 108119 - DNA, 33 bp, Homo sapien
ggacctcaggcccaccgctttggactgatctct

SEQ ID NO: 108120 - DNA, 33 bp, Homo sapien
ggacctcaggcccacctctttggactgatctct

SEQ ID NO: 108121 - DNA, 33 bp, Homo sapien
gaggaggcaacccacacaggtcctgaaatctgg

SEQ ID NO: 108122 - DNA, 33 bp, Homo sapien
gaggaggcaacccacagaggtcctgaaatctgg

SEQ ID NO: 108123 - DNA, 33 bp, Homo sapien
tgtgttcataactcaacctttgtcattacaagg

SEQ ID NO: 108124 - DNA, 33 bp, Homo sapien
tgtgttcataactcaatctttgtcattacaagg

SEQ ID NO: 108125 - DNA, 33 bp, Homo sapien
gagggaataagctggaaaaatatgagtcagtgg

SEQ ID NO: 108126 - DNA, 33 bp, Homo sapien
gagggaataagctggacaaatatgagtcagtgg

SEQ ID NO: 108127 - DNA, 33 bp, Homo sapien
gaggtcttgatgagcacaaaaaattgtcagggt

SEQ ID NO: 108128 - DNA, 33 bp, Homo sapien
gaggtcttgatgagcataaaaaattgtcagggt

SEQ ID NO: 108129 - DNA, 33 bp, Homo sapien
tgggcaagtgacttaaactgtttgttaacatgg

SEQ ID NO: 108130 - DNA, 33 bp, Homo sapien
tgggcaagtgacttaacctgtttgttaacatgg

SEQ ID NO: 108131 - DNA, 33 bp, Homo sapien
gtaaatgtttggataaatgataacatagactat

SEQ ID NO: 108132 - DNA, 33 bp, Homo sapien
gtaaatgtttggataagtgataacatagactat

SEQ ID NO: 108133 - DNA, 33 bp, Homo sapien
ttccccatggtcactacgactacttcttgtcct

SEQ ID NO: 108134 - DNA, 33 bp, Homo sapien
ttccccatggtcactatgactacttcttgtcct

SEQ ID NO: 108135 - DNA, 33 bp, Homo sapien
agaaagagattgccaacagaccgaggctatttt

SEQ ID NO: 108136 - DNA, 33 bp, Homo sapien
agaaagagattgccaagagaccgaggctatttt

SEQ ID NO: 108137 - DNA, 33 bp, Homo sapien
caatctcacctcaccgcagcctaaaactcccag

SEQ ID NO: 108138 - DNA, 33 bp, Homo sapien
caatctcacctcaccgtagcctaaaactcccag

SEQ ID NO: 108139 - DNA, 33 bp, Homo sapien
tacctagtcccgaggccgaatacttagcatgac

SEQ ID NO: 108140 - DNA, 33 bp, Homo sapien
tacctagtcccgaggctgaatacttagcatgac

SEQ ID NO: 108141 - DNA, 33 bp, Homo sapien
gaagaggttgcactccaccagagtatctcttcc

SEQ ID NO: 108142 - DNA, 33 bp, Homo sapien
gaagaggttgcactccgccagagtatctcttcc

SEQ ID NO: 108143 - DNA, 33 bp, Homo sapien
atcacaatttctgttacgttgttaaaagaaatg

SEQ ID NO: 108144 - DNA, 33 bp, Homo sapien
atcacaatttctgttatgttgttaaaagaaatg

SEQ ID NO: 108145 - DNA, 33 bp, Homo sapien
tcatgtggaaatacaaaagagcctaaataggta

SEQ ID NO: 108146 - DNA, 33 bp, Homo sapien
tcatgtggaaatacaatagagcctaaataggta

SEQ ID NO: 108147 - DNA, 33 bp, Homo sapien
aattctgaataacttgaactcagtcttgtgtga

SEQ ID NO: 108148 - DNA, 33 bp, Homo sapien
aattctgaataacttgtactcagtcttgtgtga

SEQ ID NO: 108149 - DNA, 33 bp, Homo sapien
ctttctaccctgatgaccgttgtgcatttcttc

SEQ ID NO: 108150 - DNA, 33 bp, Homo sapien
ctttctaccctgatgatcgttgtgcatttcttc

SEQ ID NO: 108151 - DNA, 33 bp, Homo sapien
atacaacagaagaggaagcatctgatactgaac

SEQ ID NO: 108152 - DNA, 33 bp, Homo sapien
atacaacagaagaggacgcatctgatactgaac

SEQ ID NO: 108153 - DNA, 33 bp, Homo sapien
caaaaccaggactaataaatggcactgatgata

SEQ ID NO: 108154 - DNA, 33 bp, Homo sapien
caaaaccaggactaatgaatggcactgatgata

SEQ ID NO: 108155 - DNA, 33 bp, Homo sapien
aaaattactgagttcaactgggaaagcccatta

SEQ ID NO: 108156 - DNA, 33 bp, Homo sapien
aaaattactgagttcagctgggaaagcccatta

SEQ ID NO: 108157 - DNA, 33 bp, Homo sapien
aaagtcctactaataaactggacctataccact

SEQ ID NO: 108158 - DNA, 33 bp, Homo sapien
aaagtcctactaataatctggacctataccact

SEQ ID NO: 108159 - DNA, 33 bp, Homo sapien
ggcaaaagttagaagaaaatgtcaggcattcgg

SEQ ID NO: 108160 - DNA, 33 bp, Homo sapien
ggcaaaagttagaagacaatgtcaggcattcgg

SEQ ID NO: 108161 - DNA, 33 bp, Homo sapien
gttacattatgatttaaggagattttcggggta

SEQ ID NO: 108162 - DNA, 33 bp, Homo sapien
gttacattatgatttagggagattttcggggta

SEQ ID NO: 108163 - DNA, 33 bp, Homo sapien
atggaaataagttgaccagcatgtgtcatcctt

SEQ ID NO: 108164 - DNA, 33 bp, Homo sapien
atggaaataagttgactagcatgtgtcatcctt

SEQ ID NO: 108165 - DNA, 33 bp, Homo sapien
agaatggctaccacaacttcctccctattatta

SEQ ID NO: 108166 - DNA, 33 bp, Homo sapien
agaatggctaccacaatttcctccctattatta

SEQ ID NO: 108167 - DNA, 33 bp, Homo sapien
tataaaagatcctcaacgagcttaacagctgat

SEQ ID NO: 108168 - DNA, 33 bp, Homo sapien
tataaaagatcctcaatgagcttaacagctgat

SEQ ID NO: 108169 - DNA, 33 bp, Homo sapien
ttctgtctcgagctcaagtattcctgttaactt

SEQ ID NO: 108170 - DNA, 33 bp, Homo sapien
ttctgtctcgagctcaggtattcctgttaactt

SEQ ID NO: 108171 - DNA, 33 bp, Homo sapien
actttcggcaaaggaaactgtttgctcttacta

SEQ ID NO: 108172 - DNA, 33 bp, Homo sapien
actttcggcaaaggaatctgtttgctcttacta

SEQ ID NO: 108173 - DNA, 33 bp, Homo sapien
atgtaaagctctcaaacgctttcctatttccct

SEQ ID NO: 108174 - DNA, 33 bp, Homo sapien
atgtaaagctctcaaatgctttcctatttccct

SEQ ID NO: 108175 - DNA, 33 bp, Homo sapien
aaggagagagtccgggaaatgttgttactgact

SEQ ID NO: 108176 - DNA, 33 bp, Homo sapien
aaggagagagtccgggtaatgttgttactgact

SEQ ID NO: 108177 - DNA, 33 bp, Homo sapien
cctcaccacaaaggccagacgctaggaggtccc

SEQ ID NO: 108178 - DNA, 33 bp, Homo sapien
cctcaccacaaaggcccgacgctaggaggtccc

SEQ ID NO: 108179 - DNA, 33 bp, Homo sapien
ggccatcagaagtaaaagtcactgggacaaggg

SEQ ID NO: 108180 - DNA, 33 bp, Homo sapien
ggccatcagaagtaaaggtcactgggacaaggg

SEQ ID NO: 108181 - DNA, 33 bp, Homo sapien
tgggggtaggtcaccgaaggaagcacggccaag

SEQ ID NO: 108182 - DNA, 33 bp, Homo sapien
tgggggtaggtcaccggaggaagcacggccaag

SEQ ID NO: 108183 - DNA, 33 bp, Homo sapien
attcagacaagtgataaaatatgggtgaacctg

SEQ ID NO: 108184 - DNA, 33 bp, Homo sapien
attcagacaagtgatacaatatgggtgaacctg

SEQ ID NO: 108185 - DNA, 33 bp, Homo sapien
atgaatgtaatgctgccgaactgtgtgctttaa

SEQ ID NO: 108186 - DNA, 33 bp, Homo sapien
atgaatgtaatgctgctgaactgtgtgctttaa

SEQ ID NO: 108187 - DNA, 33 bp, Homo sapien
tgaggagacagaatcaaggaggctccagcattt

SEQ ID NO: 108188 - DNA, 33 bp, Homo sapien
tgaggagacagaatcagggaggctccagcattt

SEQ ID NO: 108189 - DNA, 33 bp, Homo sapien
caatagccctgtgaaaccagtcccattatatcc

SEQ ID NO: 108190 - DNA, 33 bp, Homo sapien
caatagccctgtgaaatcagtcccattatatcc

SEQ ID NO: 108191 - DNA, 33 bp, Homo sapien
accagaacaaaggcccaagcagctgccttatct

SEQ ID NO: 108192 - DNA, 33 bp, Homo sapien
accagaacaaaggcccgagcagctgccttatct

SEQ ID NO: 108193 - DNA, 33 bp, Homo sapien
gaaacttgggtcaaagaagtgagatgacttgcc

SEQ ID NO: 108194 - DNA, 33 bp, Homo sapien
gaaacttgggtcaaaggagtgagatgacttgcc

SEQ ID NO: 108195 - DNA, 33 bp, Homo sapien
caactttcactctcaaaattatattgactcttc

SEQ ID NO: 108196 - DNA, 33 bp, Homo sapien
caactttcactctcaacattatattgactcttc

SEQ ID NO: 108197 - DNA, 33 bp, Homo sapien
aatagcaaagtgagacgaagggaaaaaagagaa

SEQ ID NO: 108198 - DNA, 33 bp, Homo sapien
aatagcaaagtgagactaagggaaaaaagagaa

SEQ ID NO: 108199 - DNA, 33 bp, Homo sapien
gtaacctgttgaatgcacacagcgaatgagtgg

SEQ ID NO: 108200 - DNA, 33 bp, Homo sapien
gtaacctgttgaatgcgcacagcgaatgagtgg

SEQ ID NO: 108201 - DNA, 33 bp, Homo sapien
agaaactgtgataataaacactcatctttcata

SEQ ID NO: 108202 - DNA, 33 bp, Homo sapien
agaaactgtgataatagacactcatctttcata

SEQ ID NO: 108203 - DNA, 33 bp, Homo sapien
cttagggtccaacgtcgatgggtcaaacctcag

SEQ ID NO: 108204 - DNA, 33 bp, Homo sapien
cttagggtccaacgtctatgggtcaaacctcag

SEQ ID NO: 108205 - DNA, 33 bp, Homo sapien
aagaaacattgatacgcaacagccagatctcta

SEQ ID NO: 108206 - DNA, 33 bp, Homo sapien
aagaaacattgatacggaacagccagatctcta

SEQ ID NO: 108207 - DNA, 33 bp, Homo sapien
tcagaacatagctgcaatctggtcacttctcac

SEQ ID NO: 108208 - DNA, 33 bp, Homo sapien
tcagaacatagctgcagtctggtcacttctcac

SEQ ID NO: 108209 - DNA, 33 bp, Homo sapien
agtggtgtttggtggccgcaaccaggtaaagag

SEQ ID NO: 108210 - DNA, 33 bp, Homo sapien
agtggtgtttggtggctgcaaccaggtaaagag

SEQ ID NO: 108211 - DNA, 33 bp, Homo sapien
tctgttttctgagaagaaagatgtgatcctgtg

SEQ ID NO: 108212 - DNA, 33 bp, Homo sapien
tctgttttctgagaaggaagatgtgatcctgtg

SEQ ID NO: 108213 - DNA, 33 bp, Homo sapien
ccgcacttctccctggaatagcttcctgaacaa

SEQ ID NO: 108214 - DNA, 33 bp, Homo sapien
ccgcacttctccctgggatagcttcctgaacaa

SEQ ID NO: 108215 - DNA, 33 bp, Homo sapien
tgaatgcgagaacatccaggccctcgtgtcaca

SEQ ID NO: 108216 - DNA, 33 bp, Homo sapien
tgaatgcgagaacatctaggccctcgtgtcaca

SEQ ID NO: 108217 - DNA, 33 bp, Homo sapien
ttttggaaaacacgctaaaaaatgaccttgttc

SEQ ID NO: 108218 - DNA, 33 bp, Homo sapien
ttttggaaaacacgctcaaaaatgaccttgttc

SEQ ID NO: 108219 - DNA, 33 bp, Homo sapien
gtcttgagacaacagaagaaagatcatttaaga

SEQ ID NO: 108220 - DNA, 33 bp, Homo sapien
gtcttgagacaacagaggaaagatcatttaaga

SEQ ID NO: 108221 - DNA, 33 bp, Homo sapien
aggtctattccagtgaagagccaccagggaaga

SEQ ID NO: 108222 - DNA, 33 bp, Homo sapien
aggtctattccagtgaggagccaccagggaaga

SEQ ID NO: 108223 - DNA, 33 bp, Homo sapien
tcttcctatggagccaatagtcctccgatatca

SEQ ID NO: 108224 - DNA, 33 bp, Homo sapien
tcttcctatggagccagtagtcctccgatatca

SEQ ID NO: 108225 - DNA, 33 bp, Homo sapien
cctctcaggaaatagtaacacttaggcccagac

SEQ ID NO: 108226 - DNA, 33 bp, Homo sapien
cctctcaggaaatagtgacacttaggcccagac

SEQ ID NO: 108227 - DNA, 33 bp, Homo sapien
taggcccagacaaacaaggagcaaggtgacttc

SEQ ID NO: 108228 - DNA, 33 bp, Homo sapien
taggcccagacaaacagggagcaaggtgacttc

SEQ ID NO: 108229 - DNA, 33 bp, Homo sapien
atttctctatttgtgaaaacctgtcttgcatat

SEQ ID NO: 108230 - DNA, 33 bp, Homo sapien
atttctctatttgtgacaacctgtcttgcatat

SEQ ID NO: 108231 - DNA, 33 bp, Homo sapien
tactgctattacaaccaaacagtttaatgtcca

SEQ ID NO: 108232 - DNA, 33 bp, Homo sapien
tactgctattacaaccgaacagtttaatgtcca

SEQ ID NO: 108233 - DNA, 33 bp, Homo sapien
tcaaccacagatcatacctcatagccagattaa

SEQ ID NO: 108234 - DNA, 33 bp, Homo sapien
tcaaccacagatcatatctcatagccagattaa

SEQ ID NO: 108235 - DNA, 33 bp, Homo sapien
caaccatccggtgaagcagtttctgttatcttc

SEQ ID NO: 108236 - DNA, 33 bp, Homo sapien
caaccatccggtgaaggagtttctgttatcttc

SEQ ID NO: 108237 - DNA, 33 bp, Homo sapien
aggaaagtctatggaaagctattcatggcagcc

SEQ ID NO: 108238 - DNA, 33 bp, Homo sapien
aggaaagtctatggaaggctattcatggcagcc

SEQ ID NO: 108239 - DNA, 33 bp, Homo sapien
ggattcatggcacttacgtaagacacataccca

SEQ ID NO: 108240 - DNA, 33 bp, Homo sapien
ggattcatggcacttatgtaagacacataccca

SEQ ID NO: 108241 - DNA, 33 bp, Homo sapien
attttgcatcacttcccatgtttcagctatctg

SEQ ID NO: 108242 - DNA, 33 bp, Homo sapien
attttgcatcacttcctatgtttcagctatctg

SEQ ID NO: 108243 - DNA, 33 bp, Homo sapien
cggtgccctcctcttgaaagtggaaataatgat

SEQ ID NO: 108244 - DNA, 33 bp, Homo sapien
cggtgccctcctcttgcaagtggaaataatgat

SEQ ID NO: 108245 - DNA, 33 bp, Homo sapien
cgcaagggctgccctgaaggaatgtggaaacca

SEQ ID NO: 108246 - DNA, 33 bp, Homo sapien
cgcaagggctgccctgtaggaatgtggaaacca

SEQ ID NO: 108247 - DNA, 33 bp, Homo sapien
ctcatgcaatattttcaatgcacaggattttac

SEQ ID NO: 108248 - DNA, 33 bp, Homo sapien
ctcatgcaatattttctatgcacaggattttac

SEQ ID NO: 108249 - DNA, 33 bp, Homo sapien
tggcccagtgacctccaacgtgtctgcttgaac

SEQ ID NO: 108250 - DNA, 33 bp, Homo sapien
tggcccagtgacctccgacgtgtctgcttgaac

SEQ ID NO: 108251 - DNA, 33 bp, Homo sapien
atatggcattatggaaaaagtaaagtacatttg

SEQ ID NO: 108252 - DNA, 33 bp, Homo sapien
atatggcattatggaagaagtaaagtacatttg

SEQ ID NO: 108253 - DNA, 33 bp, Homo sapien
cctggttccacagtcaacctctgttttctactc

SEQ ID NO: 108254 - DNA, 33 bp, Homo sapien
cctggttccacagtcagcctctgttttctactc

SEQ ID NO: 108255 - DNA, 33 bp, Homo sapien
aacactagcacagatcaagaatatttaggtaag

SEQ ID NO: 108256 - DNA, 33 bp, Homo sapien
aacactagcacagatcgagaatatttaggtaag

SEQ ID NO: 108257 - DNA, 33 bp, Homo sapien
aatgcaaggaaagaaactagtcaatgggaacat

SEQ ID NO: 108258 - DNA, 33 bp, Homo sapien
aatgcaaggaaagaaattagtcaatgggaacat

SEQ ID NO: 108259 - DNA, 33 bp, Homo sapien
aggaggcaaacacaaacacagggagcatgagat

SEQ ID NO: 108260 - DNA, 33 bp, Homo sapien
aggaggcaaacacaaatacagggagcatgagat

SEQ ID NO: 108261 - DNA, 33 bp, Homo sapien
cttctcatttaagcaacgttaatgtggaaaggc

SEQ ID NO: 108262 - DNA, 33 bp, Homo sapien
cttctcatttaagcaatgttaatgtggaaaggc

SEQ ID NO: 108263 - DNA, 33 bp, Homo sapien
ggagctactggaaataaattaggatagcagccc

SEQ ID NO: 108264 - DNA, 33 bp, Homo sapien
ggagctactggaaatacattaggatagcagccc

SEQ ID NO: 108265 - DNA, 33 bp, Homo sapien
atcagtagatttttgcaatttaatgtttttttt

SEQ ID NO: 108266 - DNA, 33 bp, Homo sapien
atcagtagatttttgcgatttaatgtttttttt

SEQ ID NO: 108267 - DNA, 33 bp, Homo sapien
cagaaggaaccaggcacacagtttgcacctaga

SEQ ID NO: 108268 - DNA, 33 bp, Homo sapien
cagaaggaaccaggcatacagtttgcacctaga

SEQ ID NO: 108269 - DNA, 33 bp, Homo sapien
aatgtctaaaacttgcaaatactgagccctcct

SEQ ID NO: 108270 - DNA, 33 bp, Homo sapien
aatgtctaaaacttgcgaatactgagccctcct

SEQ ID NO: 108271 - DNA, 33 bp, Homo sapien
aattcttaaaattcaacacaaggttacaggaca

SEQ ID NO: 108272 - DNA, 33 bp, Homo sapien
aattcttaaaattcaatacaaggttacaggaca

SEQ ID NO: 108273 - DNA, 33 bp, Homo sapien
tgtaagttttctgtgccatttctatacattaac

SEQ ID NO: 108274 - DNA, 33 bp, Homo sapien
tgtaagttttctgtgctatttctatacattaac

SEQ ID NO: 108275 - DNA, 33 bp, Homo sapien
gttaaagttgaaatggaaagcagtcagctaatt

SEQ ID NO: 108276 - DNA, 33 bp, Homo sapien
gttaaagttgaaatgggaagcagtcagctaatt

SEQ ID NO: 108277 - DNA, 33 bp, Homo sapien
ttactgtgacattgccacttaggtagaacacag

SEQ ID NO: 108278 - DNA, 33 bp, Homo sapien
ttactgtgacattgccgcttaggtagaacacag

SEQ ID NO: 108279 - DNA, 33 bp, Homo sapien
tgcaattctttttaccaagtctcctgataaaat

SEQ ID NO: 108280 - DNA, 33 bp, Homo sapien
tgcaattctttttaccgagtctcctgataaaat

SEQ ID NO: 108281 - DNA, 33 bp, Homo sapien
agagttaacagagataaggaaccctgagcgatt

SEQ ID NO: 108282 - DNA, 33 bp, Homo sapien
agagttaacagagatagggaaccctgagcgatt

SEQ ID NO: 108283 - DNA, 33 bp, Homo sapien
ggtgtcaggtggataaaggtttttaagattgat

SEQ ID NO: 108284 - DNA, 33 bp, Homo sapien
ggtgtcaggtggataacggtttttaagattgat

SEQ ID NO: 108285 - DNA, 33 bp, Homo sapien
gtggcagcgttactgcagaatctgttggaagaa

SEQ ID NO: 108286 - DNA, 33 bp, Homo sapien
gtggcagcgttactgcggaatctgttggaagaa

SEQ ID NO: 108287 - DNA, 33 bp, Homo sapien
tcactgtattcctgagccctgcagaagaccctg

SEQ ID NO: 108288 - DNA, 33 bp, Homo sapien
tcactgtattcctgagtcctgcagaagaccctg

SEQ ID NO: 108289 - DNA, 33 bp, Homo sapien
tcccatgagcatggtcacaggcattagaatgtt

SEQ ID NO: 108290 - DNA, 33 bp, Homo sapien
tcccatgagcatggtcgcaggcattagaatgtt

SEQ ID NO: 108291 - DNA, 33 bp, Homo sapien
taccagcatggaaatacgatgtttaattagtgc

SEQ ID NO: 108292 - DNA, 33 bp, Homo sapien
taccagcatggaaatatgatgtttaattagtgc

SEQ ID NO: 108293 - DNA, 33 bp, Homo sapien
ttaatttacagtaatacgtagaaaactgatagt

SEQ ID NO: 108294 - DNA, 33 bp, Homo sapien
ttaatttacagtaataggtagaaaactgatagt

SEQ ID NO: 108295 - DNA, 33 bp, Homo sapien
taccggtaacactggaagaaacacaaaagtcat

SEQ ID NO: 108296 - DNA, 33 bp, Homo sapien
taccggtaacactggaggaaacacaaaagtcat

SEQ ID NO: 108297 - DNA, 33 bp, Homo sapien
atactgcctacaagacagatctccaccttctaa

SEQ ID NO: 108298 - DNA, 33 bp, Homo sapien
atactgcctacaagacggatctccaccttctaa

SEQ ID NO: 108299 - DNA, 33 bp, Homo sapien
gaagaaaaattcaacaacagatatttccttttt

SEQ ID NO: 108300 - DNA, 33 bp, Homo sapien
gaagaaaaattcaacagcagatatttccttttt

SEQ ID NO: 108301 - DNA, 33 bp, Homo sapien
gtcagtctgtctacacgcagaaaaaaacaaacc

SEQ ID NO: 108302 - DNA, 33 bp, Homo sapien
gtcagtctgtctacactcagaaaaaaacaaacc

SEQ ID NO: 108303 - DNA, 33 bp, Homo sapien
tctatatagcttggtccagagtcactgacacag

SEQ ID NO: 108304 - DNA, 33 bp, Homo sapien
tctatatagcttggtcgagagtcactgacacag

SEQ ID NO: 108305 - DNA, 33 bp, Homo sapien
ttagtcaaggtctaacagtgaactacaattgtt

SEQ ID NO: 108306 - DNA, 33 bp, Homo sapien
ttagtcaaggtctaacggtgaactacaattgtt

SEQ ID NO: 108307 - DNA, 33 bp, Homo sapien
agaataaccacacctaccttataggactatggt

SEQ ID NO: 108308 - DNA, 33 bp, Homo sapien
agaataaccacacctatcttataggactatggt

SEQ ID NO: 108309 - DNA, 33 bp, Homo sapien
tggacagtcggaaaccagaaatctttaagaaag

SEQ ID NO: 108310 - DNA, 33 bp, Homo sapien
tggacagtcggaaaccggaaatctttaagaaag

SEQ ID NO: 108311 - DNA, 33 bp, Homo sapien
ttattgtaatttctcacgttgagactatcttca

SEQ ID NO: 108312 - DNA, 33 bp, Homo sapien
ttattgtaatttctcatgttgagactatcttca

SEQ ID NO: 108313 - DNA, 33 bp, Homo sapien
gtcagcagaggacagaaagcatagatacaagac

SEQ ID NO: 108314 - DNA, 33 bp, Homo sapien
gtcagcagaggacagagagcatagatacaagac

SEQ ID NO: 108315 - DNA, 33 bp, Homo sapien
tggatatccttcttcccgacagttacatctgct

SEQ ID NO: 108316 - DNA, 33 bp, Homo sapien
tggatatccttcttccggacagttacatctgct

SEQ ID NO: 108317 - DNA, 33 bp, Homo sapien
gcccaggcggtcagcactctcctgtaggacggg

SEQ ID NO: 108318 - DNA, 33 bp, Homo sapien
gcccaggcggtcagcagtctcctgtaggacggg

SEQ ID NO: 108319 - DNA, 33 bp, Homo sapien
cagctgagctctggaaagtgagttctgatgggt

SEQ ID NO: 108320 - DNA, 33 bp, Homo sapien
cagctgagctctggaaggtgagttctgatgggt

SEQ ID NO: 108321 - DNA, 33 bp, Homo sapien
tgtgcagtgtgaacaaaagttttctgaaacgga

SEQ ID NO: 108322 - DNA, 33 bp, Homo sapien
tgtgcagtgtgaacaacagttttctgaaacgga

SEQ ID NO: 108323 - DNA, 33 bp, Homo sapien
ctccttgattgtatgacaaaggagaactctaag

SEQ ID NO: 108324 - DNA, 33 bp, Homo sapien
ctccttgattgtatgagaaaggagaactctaag

SEQ ID NO: 108325 - DNA, 33 bp, Homo sapien
ttcctgttgcactgaaagctctaagtaagatga

SEQ ID NO: 108326 - DNA, 33 bp, Homo sapien
ttcctgttgcactgaaggctctaagtaagatga

SEQ ID NO: 108327 - DNA, 33 bp, Homo sapien
tcttaaaatgtgggtcacacagtgctggacaca

SEQ ID NO: 108328 - DNA, 33 bp, Homo sapien
tcttaaaatgtgggtctcacagtgctggacaca

SEQ ID NO: 108329 - DNA, 33 bp, Homo sapien
tgcatggatgaacaaacgtggaggaatgaagaa

SEQ ID NO: 108330 - DNA, 33 bp, Homo sapien
tgcatggatgaacaaatgtggaggaatgaagaa

SEQ ID NO: 108331 - DNA, 33 bp, Homo sapien
cacatttgcttgatacactgcttcctttcaacc

SEQ ID NO: 108332 - DNA, 33 bp, Homo sapien
cacatttgcttgatacgctgcttcctttcaacc

SEQ ID NO: 108333 - DNA, 33 bp, Homo sapien
agaaggcagaatgcacagagagaatcttcagat

SEQ ID NO: 108334 - DNA, 33 bp, Homo sapien
agaaggcagaatgcactgagagaatcttcagat

SEQ ID NO: 108335 - DNA, 33 bp, Homo sapien
atgtgagagtcattgccaacgtggtaagagcag

SEQ ID NO: 108336 - DNA, 33 bp, Homo sapien
atgtgagagtcattgctaacgtggtaagagcag

SEQ ID NO: 108337 - DNA, 33 bp, Homo sapien
aaagagtgataagagaagtgtcgttgaaaaagt

SEQ ID NO: 108338 - DNA, 33 bp, Homo sapien
aaagagtgataagagaggtgtcgttgaaaaagt

SEQ ID NO: 108339 - DNA, 33 bp, Homo sapien
cacggcctgtttccacacatgaaaagctaaagg

SEQ ID NO: 108340 - DNA, 33 bp, Homo sapien
cacggcctgtttccacgcatgaaaagctaaagg

SEQ ID NO: 108341 - DNA, 33 bp, Homo sapien
aagggcctcgggactcagaatcctgtgcatctt

SEQ ID NO: 108342 - DNA, 33 bp, Homo sapien
aagggcctcgggactcggaatcctgtgcatctt

SEQ ID NO: 108343 - DNA, 33 bp, Homo sapien
caaatctgggattcctaaacatcaccaggtggc

SEQ ID NO: 108344 - DNA, 33 bp, Homo sapien
caaatctgggattcctcaacatcaccaggtggc

SEQ ID NO: 108345 - DNA, 33 bp, Homo sapien
cagtggcagatgctgaagtaagagtttttttag

SEQ ID NO: 108346 - DNA, 33 bp, Homo sapien
cagtggcagatgctgaggtaagagtttttttag

SEQ ID NO: 108347 - DNA, 33 bp, Homo sapien
ccattccagctctccaataagcaagagtcttgc

SEQ ID NO: 108348 - DNA, 33 bp, Homo sapien
ccattccagctctccagtaagcaagagtcttgc

SEQ ID NO: 108349 - DNA, 33 bp, Homo sapien
cttcatctcacctaacacagaactcttccaatg

SEQ ID NO: 108350 - DNA, 33 bp, Homo sapien
cttcatctcacctaacccagaactcttccaatg

SEQ ID NO: 108351 - DNA, 33 bp, Homo sapien
atttagtaatcagccaatgatgagacagatgtc

SEQ ID NO: 108352 - DNA, 33 bp, Homo sapien
atttagtaatcagccagtgatgagacagatgtc

SEQ ID NO: 108353 - DNA, 33 bp, Homo sapien
acaagtccaagtttctcaatatggcatccacct

SEQ ID NO: 108354 - DNA, 33 bp, Homo sapien
acaagtccaagtttctgaatatggcatccacct

SEQ ID NO: 108355 - DNA, 33 bp, Homo sapien
gctgctaatgatggacaaagcagaagacacaag

SEQ ID NO: 108356 - DNA, 33 bp, Homo sapien
gctgctaatgatggacgaagcagaagacacaag

SEQ ID NO: 108357 - DNA, 33 bp, Homo sapien
aagcattgcagggctagctgttgtttcacgtgc

SEQ ID NO: 108358 - DNA, 33 bp, Homo sapien
aagcattgcagggctatctgttgtttcacgtgc

SEQ ID NO: 108359 - DNA, 33 bp, Homo sapien
ggagctgattcacaaaagtagagtaatcctgtc

SEQ ID NO: 108360 - DNA, 33 bp, Homo sapien
ggagctgattcacaaaggtagagtaatcctgtc

SEQ ID NO: 108361 - DNA, 33 bp, Homo sapien
ggctgtggccggaataaacggatgtactttctg

SEQ ID NO: 108362 - DNA, 33 bp, Homo sapien
ggctgtggccggaatagacggatgtactttctg

SEQ ID NO: 108363 - DNA, 33 bp, Homo sapien
ataatgtcacttgcgtaaagtatgacatagatt

SEQ ID NO: 108364 - DNA, 33 bp, Homo sapien
ataatgtcacttgcgtgaagtatgacatagatt

SEQ ID NO: 108365 - DNA, 33 bp, Homo sapien
acattccctcaccttccatactgccattcccct

SEQ ID NO: 108366 - DNA, 33 bp, Homo sapien
acattccctcaccttcgatactgccattcccct

SEQ ID NO: 108367 - DNA, 33 bp, Homo sapien
cagtagcgctctaataccgacttttaaaaggat

SEQ ID NO: 108368 - DNA, 33 bp, Homo sapien
cagtagcgctctaatatcgacttttaaaaggat

SEQ ID NO: 108369 - DNA, 33 bp, Homo sapien
cccaaagcacagtctacataacgtacaaagcaa

SEQ ID NO: 108370 - DNA, 33 bp, Homo sapien
cccaaagcacagtctatataacgtacaaagcaa

SEQ ID NO: 108371 - DNA, 33 bp, Homo sapien
gtgagatgtgatctagcagcgcccttggagcta

SEQ ID NO: 108372 - DNA, 33 bp, Homo sapien
gtgagatgtgatctagtagcgcccttggagcta

SEQ ID NO: 108373 - DNA, 33 bp, Homo sapien
ctattgagtgatttgcagagttgggagtctcag

SEQ ID NO: 108374 - DNA, 33 bp, Homo sapien
ctattgagtgatttgcggagttgggagtctcag

SEQ ID NO: 108375 - DNA, 33 bp, Homo sapien
cctcctgacaccattaccttagagattaaaatg

SEQ ID NO: 108376 - DNA, 33 bp, Homo sapien
cctcctgacaccattatcttagagattaaaatg

SEQ ID NO: 108377 - DNA, 33 bp, Homo sapien
gtgggaaaagtgtcaccgagaactagcagctca

SEQ ID NO: 108378 - DNA, 33 bp, Homo sapien
gtgggaaaagtgtcactgagaactagcagctca

SEQ ID NO: 108379 - DNA, 33 bp, Homo sapien
acacagtgtgctattcaatgccgtctgctctgg

SEQ ID NO: 108380 - DNA, 33 bp, Homo sapien
acacagtgtgctattcgatgccgtctgctctgg

SEQ ID NO: 108381 - DNA, 33 bp, Homo sapien
ttactaatgaatgttaagtcaccgtacaggcat

SEQ ID NO: 108382 - DNA, 33 bp, Homo sapien
ttactaatgaatgttatgtcaccgtacaggcat

SEQ ID NO: 108383 - DNA, 33 bp, Homo sapien
tctattacattctgacggactaataaaaccctg

SEQ ID NO: 108384 - DNA, 33 bp, Homo sapien
tctattacattctgactgactaataaaaccctg

SEQ ID NO: 108385 - DNA, 33 bp, Homo sapien
cacctggtagcttcaaacttgtgagtcttgaga

SEQ ID NO: 108386 - DNA, 33 bp, Homo sapien
cacctggtagcttcaatcttgtgagtcttgaga

SEQ ID NO: 108387 - DNA, 33 bp, Homo sapien
attccttcttatgttacccacttttccagttac

SEQ ID NO: 108388 - DNA, 33 bp, Homo sapien
attccttcttatgttatccacttttccagttac

SEQ ID NO: 108389 - DNA, 33 bp, Homo sapien
tgataagtgaatgaaacgaatatgaaacccacg

SEQ ID NO: 108390 - DNA, 33 bp, Homo sapien
tgataagtgaatgaaatgaatatgaaacccacg

SEQ ID NO: 108391 - DNA, 33 bp, Homo sapien
aatcccagaaatagaacgttgactggaaaaagc

SEQ ID NO: 108392 - DNA, 33 bp, Homo sapien
aatcccagaaatagaatgttgactggaaaaagc

SEQ ID NO: 108393 - DNA, 33 bp, Homo sapien
ttgtttggttttgctaaacagaaatctgaaatt

SEQ ID NO: 108394 - DNA, 33 bp, Homo sapien
ttgtttggttttgctatacagaaatctgaaatt

SEQ ID NO: 108395 - DNA, 33 bp, Homo sapien
gtctcttatgctgcaaaaattcctgaaatctac

SEQ ID NO: 108396 - DNA, 33 bp, Homo sapien
gtctcttatgctgcaagaattcctgaaatctac

SEQ ID NO: 108397 - DNA, 33 bp, Homo sapien
ggcgggaacaaggaacacagttaggaggcttta

SEQ ID NO: 108398 - DNA, 33 bp, Homo sapien
ggcgggaacaaggaacccagttaggaggcttta

SEQ ID NO: 108399 - DNA, 33 bp, Homo sapien
ccaggccctgctgaacagtgtctgagcttgggt

SEQ ID NO: 108400 - DNA, 33 bp, Homo sapien
ccaggccctgctgaacggtgtctgagcttgggt

SEQ ID NO: 108401 - DNA, 33 bp, Homo sapien
gcccagggattacagacagcaagggatggaaat

SEQ ID NO: 108402 - DNA, 33 bp, Homo sapien
gcccagggattacagagagcaagggatggaaat

SEQ ID NO: 108403 - DNA, 33 bp, Homo sapien
ttgaaatttctttgcaacatacagtccagtcaa

SEQ ID NO: 108404 - DNA, 33 bp, Homo sapien
ttgaaatttctttgcatcatacagtccagtcaa

SEQ ID NO: 108405 - DNA, 33 bp, Homo sapien
attcacacctctctccacagtctactaaggaac

SEQ ID NO: 108406 - DNA, 33 bp, Homo sapien
attcacacctctctccgcagtctactaaggaac

SEQ ID NO: 108407 - DNA, 33 bp, Homo sapien
acatacaagtgtggtacggcagagacgagcacc

SEQ ID NO: 108408 - DNA, 33 bp, Homo sapien
acatacaagtgtggtatggcagagacgagcacc

SEQ ID NO: 108409 - DNA, 33 bp, Homo sapien
accatcctcttccaaaactctagggcttctctc

SEQ ID NO: 108410 - DNA, 33 bp, Homo sapien
accatcctcttccaaacctctagggcttctctc

SEQ ID NO: 108411 - DNA, 33 bp, Homo sapien
aaattaaaagcaaagcagcctcatttgtgcagt

SEQ ID NO: 108412 - DNA, 33 bp, Homo sapien
aaattaaaagcaaagcggcctcatttgtgcagt

SEQ ID NO: 108413 - DNA, 33 bp, Homo sapien
ccaaaagcacaagtaacagaagaaaaaatggat

SEQ ID NO: 108414 - DNA, 33 bp, Homo sapien
ccaaaagcacaagtaatagaagaaaaaatggat

SEQ ID NO: 108415 - DNA, 33 bp, Homo sapien
tggggagctctgctaacgcagggcactgaagac

SEQ ID NO: 108416 - DNA, 33 bp, Homo sapien
tggggagctctgctaatgcagggcactgaagac

SEQ ID NO: 108417 - DNA, 33 bp, Homo sapien
aaagggttggaggtcaaggaagccgtctctaga

SEQ ID NO: 108418 - DNA, 33 bp, Homo sapien
aaagggttggaggtcagggaagccgtctctaga

SEQ ID NO: 108419 - DNA, 33 bp, Homo sapien
tgattctgcctctggaaaggtctcttaattcct

SEQ ID NO: 108420 - DNA, 33 bp, Homo sapien
tgattctgcctctggacaggtctcttaattcct

SEQ ID NO: 108421 - DNA, 33 bp, Homo sapien
caatatttttatgaggccactgtcatttttagg

SEQ ID NO: 108422 - DNA, 33 bp, Homo sapien
caatatttttatgaggtcactgtcatttttagg

SEQ ID NO: 108423 - DNA, 33 bp, Homo sapien
actcatccatatgttccattcatgtgttctatt

SEQ ID NO: 108424 - DNA, 33 bp, Homo sapien
actcatccatatgttctattcatgtgttctatt

SEQ ID NO: 108425 - DNA, 33 bp, Homo sapien
cctcagtctgcatctcacgttatttttgggtga

SEQ ID NO: 108426 - DNA, 33 bp, Homo sapien
cctcagtctgcatctcgcgttatttttgggtga

SEQ ID NO: 108427 - DNA, 33 bp, Homo sapien
agttgaaattgagatacagagaaacaaggtagc

SEQ ID NO: 108428 - DNA, 33 bp, Homo sapien
agttgaaattgagatatagagaaacaaggtagc

SEQ ID NO: 108429 - DNA, 33 bp, Homo sapien
tggcttcacttatgcacgttcattacctctctg

SEQ ID NO: 108430 - DNA, 33 bp, Homo sapien
tggcttcacttatgcatgttcattacctctctg

SEQ ID NO: 108431 - DNA, 33 bp, Homo sapien
gaggagttcagggctccatgcacagtgtttgcc

SEQ ID NO: 108432 - DNA, 33 bp, Homo sapien
gaggagttcagggctctatgcacagtgtttgcc

SEQ ID NO: 108433 - DNA, 33 bp, Homo sapien
accatgcccttttccaataatgcctgaagctgg

SEQ ID NO: 108434 - DNA, 33 bp, Homo sapien
accatgcccttttccagtaatgcctgaagctgg

SEQ ID NO: 108435 - DNA, 33 bp, Homo sapien
cttattcatctttaaacgcctagagctttaccc

SEQ ID NO: 108436 - DNA, 33 bp, Homo sapien
cttattcatctttaaatgcctagagctttaccc

SEQ ID NO: 108437 - DNA, 33 bp, Homo sapien
gtggctctcaacatcaacttctgggtaaagctc

SEQ ID NO: 108438 - DNA, 33 bp, Homo sapien
gtggctctcaacatcatcttctgggtaaagctc

SEQ ID NO: 108439 - DNA, 33 bp, Homo sapien
tccctctcacttgatacgacatcttatccagca

SEQ ID NO: 108440 - DNA, 33 bp, Homo sapien
tccctctcacttgatatgacatcttatccagca

SEQ ID NO: 108441 - DNA, 33 bp, Homo sapien
cttaggactgtccacactctcttttgttgctgg

SEQ ID NO: 108442 - DNA, 33 bp, Homo sapien
cttaggactgtccacattctcttttgttgctgg

SEQ ID NO: 108443 - DNA, 33 bp, Homo sapien
cttagagaaaagaaacccgtggacatcttgaat

SEQ ID NO: 108444 - DNA, 33 bp, Homo sapien
cttagagaaaagaaactcgtggacatcttgaat

SEQ ID NO: 108445 - DNA, 33 bp, Homo sapien
acagatcccttttccaccatagcacattctact

SEQ ID NO: 108446 - DNA, 33 bp, Homo sapien
acagatcccttttccagcatagcacattctact

SEQ ID NO: 108447 - DNA, 33 bp, Homo sapien
tacctggtgactgtgcaaaactctctttctggg

SEQ ID NO: 108448 - DNA, 33 bp, Homo sapien
tacctggtgactgtgcgaaactctctttctggg

SEQ ID NO: 108449 - DNA, 33 bp, Homo sapien
taatattgattgcaaacttgtagttcccattga

SEQ ID NO: 108450 - DNA, 33 bp, Homo sapien
taatattgattgcaaatttgtagttcccattga

SEQ ID NO: 108451 - DNA, 33 bp, Homo sapien
ggtttaaagaagtggaagtctgtctgttctgaa

SEQ ID NO: 108452 - DNA, 33 bp, Homo sapien
ggtttaaagaagtggaggtctgtctgttctgaa

SEQ ID NO: 108453 - DNA, 33 bp, Homo sapien
ctcactgcaaccctatcacagtccatatcttac

SEQ ID NO: 108454 - DNA, 33 bp, Homo sapien
ctcactgcaaccctattacagtccatatcttac

SEQ ID NO: 108455 - DNA, 33 bp, Homo sapien
ttcactttacatcaaacagtgtcaaatgtcaaa

SEQ ID NO: 108456 - DNA, 33 bp, Homo sapien
ttcactttacatcaaatagtgtcaaatgtcaaa

SEQ ID NO: 108457 - DNA, 33 bp, Homo sapien
tgagacaagctgggtcaccaaatgtatgctggg

SEQ ID NO: 108458 - DNA, 33 bp, Homo sapien
tgagacaagctgggtcgccaaatgtatgctggg

SEQ ID NO: 108459 - DNA, 33 bp, Homo sapien
cagtccagtctgcaaaccttctgctctctgctg

SEQ ID NO: 108460 - DNA, 33 bp, Homo sapien
cagtccagtctgcaaagcttctgctctctgctg

SEQ ID NO: 108461 - DNA, 33 bp, Homo sapien
aaaaagacagttcaaagtgaggaatctgcccaa

SEQ ID NO: 108462 - DNA, 33 bp, Homo sapien
aaaaagacagttcaaattgaggaatctgcccaa

SEQ ID NO: 108463 - DNA, 33 bp, Homo sapien
taagcagcttggataaccatccttttttggctg

SEQ ID NO: 108464 - DNA, 33 bp, Homo sapien
taagcagcttggataatcatccttttttggctg

SEQ ID NO: 108465 - DNA, 33 bp, Homo sapien
ctgtgtatgccacagacaatggactttatctgc

SEQ ID NO: 108466 - DNA, 33 bp, Homo sapien
ctgtgtatgccacagagaatggactttatctgc

SEQ ID NO: 108467 - DNA, 33 bp, Homo sapien
aggcctcaaactcacacgtcttcccatagcccc

SEQ ID NO: 108468 - DNA, 33 bp, Homo sapien
aggcctcaaactcacatgtcttcccatagcccc

SEQ ID NO: 108469 - DNA, 33 bp, Homo sapien
cccagattgattgcaagaatgaaatgtactgaa

SEQ ID NO: 108470 - DNA, 33 bp, Homo sapien
cccagattgattgcaataatgaaatgtactgaa

SEQ ID NO: 108471 - DNA, 33 bp, Homo sapien
catgttttctatacaaaaaaggccttggcagag

SEQ ID NO: 108472 - DNA, 33 bp, Homo sapien
catgttttctatacaacaaaggccttggcagag

SEQ ID NO: 108473 - DNA, 33 bp, Homo sapien
ctcctcaggcaagaacagtggagaagtgggact

SEQ ID NO: 108474 - DNA, 33 bp, Homo sapien
ctcctcaggcaagaacggtggagaagtgggact

SEQ ID NO: 108475 - DNA, 33 bp, Homo sapien
tgctcataaagtggcccgctactgtttgagaat

SEQ ID NO: 108476 - DNA, 33 bp, Homo sapien
tgctcataaagtggcctgctactgtttgagaat

SEQ ID NO: 108477 - DNA, 33 bp, Homo sapien
gcagctgtaccttttcaacaagcctaaacaaaa

SEQ ID NO: 108478 - DNA, 33 bp, Homo sapien
gcagctgtaccttttcgacaagcctaaacaaaa

SEQ ID NO: 108479 - DNA, 33 bp, Homo sapien
tcacacacatggctgaacacagtacctgctgtg

SEQ ID NO: 108480 - DNA, 33 bp, Homo sapien
tcacacacatggctgagcacagtacctgctgtg

SEQ ID NO: 108481 - DNA, 33 bp, Homo sapien
tgaccagattactcaacatctgttcattttgat

SEQ ID NO: 108482 - DNA, 33 bp, Homo sapien
tgaccagattactcaagatctgttcattttgat

SEQ ID NO: 108483 - DNA, 33 bp, Homo sapien
acatgacctgaaattcaaataggactcatttcc

SEQ ID NO: 108484 - DNA, 33 bp, Homo sapien
acatgacctgaaattctaataggactcatttcc

SEQ ID NO: 108485 - DNA, 33 bp, Homo sapien
actatcctgtggctcacggctcaggaacagcct

SEQ ID NO: 108486 - DNA, 33 bp, Homo sapien
actatcctgtggctcatggctcaggaacagcct

SEQ ID NO: 108487 - DNA, 33 bp, Homo sapien
cacacattgttggtgccaatgagttttaggaag

SEQ ID NO: 108488 - DNA, 33 bp, Homo sapien
cacacattgttggtgctaatgagttttaggaag

SEQ ID NO: 108489 - DNA, 33 bp, Homo sapien
gaaggctgagtagaccaccatgtttagggccac

SEQ ID NO: 108490 - DNA, 33 bp, Homo sapien
gaaggctgagtagaccgccatgtttagggccac

SEQ ID NO: 108491 - DNA, 33 bp, Homo sapien
gagtccaagttcccaacctctgtccaacaagct

SEQ ID NO: 108492 - DNA, 33 bp, Homo sapien
gagtccaagttcccaatctctgtccaacaagct

SEQ ID NO: 108493 - DNA, 33 bp, Homo sapien
caaaggatccagtaaacgggtgacctaaacact

SEQ ID NO: 108494 - DNA, 33 bp, Homo sapien
caaaggatccagtaaatgggtgacctaaacact

SEQ ID NO: 108495 - DNA, 33 bp, Homo sapien
tggtctgttctctcaacattactttcaattaac

SEQ ID NO: 108496 - DNA, 33 bp, Homo sapien
tggtctgttctctcaatattactttcaattaac

SEQ ID NO: 108497 - DNA, 33 bp, Homo sapien
agtagagtcaactttgcaggatacacttttgca

SEQ ID NO: 108498 - DNA, 33 bp, Homo sapien
agtagagtcaactttgtaggatacacttttgca

SEQ ID NO: 108499 - DNA, 33 bp, Homo sapien
gaaaggcccttagacaacattcaggccaggtct

SEQ ID NO: 108500 - DNA, 33 bp, Homo sapien
gaaaggcccttagacatcattcaggccaggtct

SEQ ID NO: 108501 - DNA, 33 bp, Homo sapien
aacaagtaacttgtgcaagcagacaatagcctt

SEQ ID NO: 108502 - DNA, 33 bp, Homo sapien
aacaagtaacttgtgcgagcagacaatagcctt

SEQ ID NO: 108503 - DNA, 33 bp, Homo sapien
cttaaaaatcttaaagcctattgcaatggggta

SEQ ID NO: 108504 - DNA, 33 bp, Homo sapien
cttaaaaatcttaaaggctattgcaatggggta

SEQ ID NO: 108505 - DNA, 33 bp, Homo sapien
agacttccctttgcaccctttctctgggccaac

SEQ ID NO: 108506 - DNA, 33 bp, Homo sapien
agacttccctttgcactctttctctgggccaac

SEQ ID NO: 108507 - DNA, 33 bp, Homo sapien
gtcaacactgatgaataacgtgctaaattcatg

SEQ ID NO: 108508 - DNA, 33 bp, Homo sapien
gtcaacactgatgaatgacgtgctaaattcatg

SEQ ID NO: 108509 - DNA, 33 bp, Homo sapien
tatcatatatctactacgtgaaattttgataaa

SEQ ID NO: 108510 - DNA, 33 bp, Homo sapien
tatcatatatctactatgtgaaattttgataaa

SEQ ID NO: 108511 - DNA, 33 bp, Homo sapien
gccattgttctcctatcaaagcaatgaaaagaa

SEQ ID NO: 108512 - DNA, 33 bp, Homo sapien
gccattgttctcctattaaagcaatgaaaagaa

SEQ ID NO: 108513 - DNA, 33 bp, Homo sapien
tgaccataaacttcagcctagccagggtgaaaa

SEQ ID NO: 108514 - DNA, 33 bp, Homo sapien
tgaccataaacttcagtctagccagggtgaaaa

SEQ ID NO: 108515 - DNA, 33 bp, Homo sapien
gaggcagtagagagggaacgaaaacacatgaac

SEQ ID NO: 108516 - DNA, 33 bp, Homo sapien
gaggcagtagagaggggacgaaaacacatgaac

SEQ ID NO: 108517 - DNA, 33 bp, Homo sapien
acagttatagagaaagaacatggggccaggagc

SEQ ID NO: 108518 - DNA, 33 bp, Homo sapien
acagttatagagaaagcacatggggccaggagc

SEQ ID NO: 108519 - DNA, 33 bp, Homo sapien
ttccccaggctggtacaattagcctatgttgag

SEQ ID NO: 108520 - DNA, 33 bp, Homo sapien
ttccccaggctggtacgattagcctatgttgag

SEQ ID NO: 108521 - DNA, 33 bp, Homo sapien
ccttccacactgctggaagagctgatatcctgc

SEQ ID NO: 108522 - DNA, 33 bp, Homo sapien
ccttccacactgctgggagagctgatatcctgc

SEQ ID NO: 108523 - DNA, 33 bp, Homo sapien
ccatacactaagaaaccgaccgttgggcaccag

SEQ ID NO: 108524 - DNA, 33 bp, Homo sapien
ccatacactaagaaactgaccgttgggcaccag

SEQ ID NO: 108525 - DNA, 33 bp, Homo sapien
atcaaagaggcaaaaggctatatttggtcatct

SEQ ID NO: 108526 - DNA, 33 bp, Homo sapien
atcaaagaggcaaaagtctatatttggtcatct

SEQ ID NO: 108527 - DNA, 33 bp, Homo sapien
aacaaaatgctggagcgaaagttagaaggtgtc

SEQ ID NO: 108528 - DNA, 33 bp, Homo sapien
aacaaaatgctggagctaaagttagaaggtgtc

SEQ ID NO: 108529 - DNA, 33 bp, Homo sapien
ctcccaccaggactatcaggaagattatgtcag

SEQ ID NO: 108530 - DNA, 33 bp, Homo sapien
ctcccaccaggactattaggaagattatgtcag

SEQ ID NO: 108531 - DNA, 33 bp, Homo sapien
caaaacatttgaaagcaacctgaatcaaaaaag

SEQ ID NO: 108532 - DNA, 33 bp, Homo sapien
caaaacatttgaaagccacctgaatcaaaaaag

SEQ ID NO: 108533 - DNA, 33 bp, Homo sapien
tgcacttctccgctggcccagccctgcaatcct

SEQ ID NO: 108534 - DNA, 33 bp, Homo sapien
tgcacttctccgctggtccagccctgcaatcct

SEQ ID NO: 108535 - DNA, 33 bp, Homo sapien
gtccagggaccagccaatacatggttgagccag

SEQ ID NO: 108536 - DNA, 33 bp, Homo sapien
gtccagggaccagccagtacatggttgagccag

SEQ ID NO: 108537 - DNA, 33 bp, Homo sapien
accctcctgtttcccccaagaatcatgggcatg

SEQ ID NO: 108538 - DNA, 33 bp, Homo sapien
accctcctgtttcccctaagaatcatgggcatg

SEQ ID NO: 108539 - DNA, 33 bp, Homo sapien
gtgtttatgaagtaagaccattcaaaatcaaat

SEQ ID NO: 108540 - DNA, 33 bp, Homo sapien
gtgtttatgaagtaaggccattcaaaatcaaat

SEQ ID NO: 108541 - DNA, 33 bp, Homo sapien
caagggagacttctcacgtctgaaaatgtactt

SEQ ID NO: 108542 - DNA, 33 bp, Homo sapien
caagggagacttctcatgtctgaaaatgtactt

SEQ ID NO: 108543 - DNA, 33 bp, Homo sapien
ggaatttgcactttgcactttggaaatttcctc

SEQ ID NO: 108544 - DNA, 33 bp, Homo sapien
ggaatttgcactttgccctttggaaatttcctc

SEQ ID NO: 108545 - DNA, 33 bp, Homo sapien
tgatccatcctaccacaatgcggcttagaggag

SEQ ID NO: 108546 - DNA, 33 bp, Homo sapien
tgatccatcctaccacgatgcggcttagaggag

SEQ ID NO: 108547 - DNA, 33 bp, Homo sapien
gaagttgagagaggccaagcagtcacagaccca

SEQ ID NO: 108548 - DNA, 33 bp, Homo sapien
gaagttgagagaggcccagcagtcacagaccca

SEQ ID NO: 108549 - DNA, 33 bp, Homo sapien
tccaaatagatgggaaacgttggaggattttaa

SEQ ID NO: 108550 - DNA, 33 bp, Homo sapien
tccaaatagatgggaagcgttggaggattttaa

SEQ ID NO: 108551 - DNA, 33 bp, Homo sapien
tgagaatctaaaacaccgagtcagcctagatat

SEQ ID NO: 108552 - DNA, 33 bp, Homo sapien
tgagaatctaaaacactgagtcagcctagatat

SEQ ID NO: 108553 - DNA, 33 bp, Homo sapien
aaccacagcacacagcacatttcatttcttcac

SEQ ID NO: 108554 - DNA, 33 bp, Homo sapien
aaccacagcacacagcgcatttcatttcttcac

SEQ ID NO: 108555 - DNA, 33 bp, Homo sapien
agtgggaataatgccacactgaactccaagtgt

SEQ ID NO: 108556 - DNA, 33 bp, Homo sapien
agtgggaataatgccatactgaactccaagtgt

SEQ ID NO: 108557 - DNA, 33 bp, Homo sapien
aggcacagtgagtcagcaagggcctgtccatgt

SEQ ID NO: 108558 - DNA, 33 bp, Homo sapien
aggcacagtgagtcaggaagggcctgtccatgt

SEQ ID NO: 108559 - DNA, 33 bp, Homo sapien
gcagcagctctttcagccaagcccataaaactc

SEQ ID NO: 108560 - DNA, 33 bp, Homo sapien
gcagcagctctttcagtcaagcccataaaactc

SEQ ID NO: 108561 - DNA, 33 bp, Homo sapien
tttgatgggaaaaagcaccttgacttgagcaag

SEQ ID NO: 108562 - DNA, 33 bp, Homo sapien
tttgatgggaaaaagcgccttgacttgagcaag

SEQ ID NO: 108563 - DNA, 33 bp, Homo sapien
tagcaactctgaactcgcctgagctgcctctgt

SEQ ID NO: 108564 - DNA, 33 bp, Homo sapien
tagcaactctgaactctcctgagctgcctctgt

SEQ ID NO: 108565 - DNA, 33 bp, Homo sapien
tggcaaccagtgggtaaaatcttctggccttac

SEQ ID NO: 108566 - DNA, 33 bp, Homo sapien
tggcaaccagtgggtagaatcttctggccttac

SEQ ID NO: 108567 - DNA, 33 bp, Homo sapien
ttgttacaactagtggacagctattggcaacca

SEQ ID NO: 108568 - DNA, 33 bp, Homo sapien
ttgttacaactagtgggcagctattggcaacca

SEQ ID NO: 108569 - DNA, 33 bp, Homo sapien
gaataactcactattaccactgaccaactgaat

SEQ ID NO: 108570 - DNA, 33 bp, Homo sapien
gaataactcactattatcactgaccaactgaat

SEQ ID NO: 108571 - DNA, 33 bp, Homo sapien
ctgacatcagaaaataagttgagaatcactctc

SEQ ID NO: 108572 - DNA, 33 bp, Homo sapien
ctgacatcagaaaatacgttgagaatcactctc

SEQ ID NO: 108573 - DNA, 33 bp, Homo sapien
tctctgaagtttgggaataagacaagagagcac

SEQ ID NO: 108574 - DNA, 33 bp, Homo sapien
tctctgaagtttgggactaagacaagagagcac

SEQ ID NO: 108575 - DNA, 33 bp, Homo sapien
tgccagcttgcgaacacctgttccctgtggtac

SEQ ID NO: 108576 - DNA, 33 bp, Homo sapien
tgccagcttgcgaacatctgttccctgtggtac

SEQ ID NO: 108577 - DNA, 33 bp, Homo sapien
ataagaggtttctaaaggtactgtgtctttttg

SEQ ID NO: 108578 - DNA, 33 bp, Homo sapien
ataagaggtttctaaatgtactgtgtctttttg

SEQ ID NO: 108579 - DNA, 33 bp, Homo sapien
gtcatctcttaaaaggaaatgatgcaaacttcc

SEQ ID NO: 108580 - DNA, 33 bp, Homo sapien
gtcatctcttaaaaggtaatgatgcaaacttcc

SEQ ID NO: 108581 - DNA, 33 bp, Homo sapien
tatgcagactgcctgaagtttgatttttaccgt

SEQ ID NO: 108582 - DNA, 33 bp, Homo sapien
tatgcagactgcctgaggtttgatttttaccgt

SEQ ID NO: 108583 - DNA, 33 bp, Homo sapien
ggatgcgttcttcccactacgtcaaaacttcca

SEQ ID NO: 108584 - DNA, 33 bp, Homo sapien
ggatgcgttcttcccattacgtcaaaacttcca

SEQ ID NO: 108585 - DNA, 33 bp, Homo sapien
acagtctatacactaacgattgcccggtgtttg

SEQ ID NO: 108586 - DNA, 33 bp, Homo sapien
acagtctatacactaatgattgcccggtgtttg

SEQ ID NO: 108587 - DNA, 33 bp, Homo sapien
ttccagaatatgaatacgttttaagggagaggt

SEQ ID NO: 108588 - DNA, 33 bp, Homo sapien
ttccagaatatgaatatgttttaagggagaggt

SEQ ID NO: 108589 - DNA, 33 bp, Homo sapien
acagatgatggcacgacggattgtttgaccatg

SEQ ID NO: 108590 - DNA, 33 bp, Homo sapien
acagatgatggcacgatggattgtttgaccatg

SEQ ID NO: 108591 - DNA, 33 bp, Homo sapien
aacactgctctctgaacggacggtactggactc

SEQ ID NO: 108592 - DNA, 33 bp, Homo sapien
aacactgctctctgaagggacggtactggactc

SEQ ID NO: 108593 - DNA, 33 bp, Homo sapien
aagaacagaagaactcaaatgaagccagtgagg

SEQ ID NO: 108594 - DNA, 33 bp, Homo sapien
aagaacagaagaactcgaatgaagccagtgagg

SEQ ID NO: 108595 - DNA, 33 bp, Homo sapien
cctgcattgagctacaagacaagactggggcct

SEQ ID NO: 108596 - DNA, 33 bp, Homo sapien
cctgcattgagctacaggacaagactggggcct

SEQ ID NO: 108597 - DNA, 33 bp, Homo sapien
gcccaggtgagacttcacaatttcaccagaggc

SEQ ID NO: 108598 - DNA, 33 bp, Homo sapien
gcccaggtgagacttcgcaatttcaccagaggc

SEQ ID NO: 108599 - DNA, 33 bp, Homo sapien
actcactccatccagtaaccagagtctactcca

SEQ ID NO: 108600 - DNA, 33 bp, Homo sapien
actcactccatccagtgaccagagtctactcca

SEQ ID NO: 108601 - DNA, 33 bp, Homo sapien
ggcgtggggcctgccaaatgtcttgagcctgct

SEQ ID NO: 108602 - DNA, 33 bp, Homo sapien
ggcgtggggcctgccagatgtcttgagcctgct

SEQ ID NO: 108603 - DNA, 33 bp, Homo sapien
ctaggtgagctcagccagagcagaaaagggacc

SEQ ID NO: 108604 - DNA, 33 bp, Homo sapien
ctaggtgagctcagccggagcagaaaagggacc

SEQ ID NO: 108605 - DNA, 33 bp, Homo sapien
tacacctaacttaataaaactatcctttgtaca

SEQ ID NO: 108606 - DNA, 33 bp, Homo sapien
tacacctaacttaatacaactatcctttgtaca

SEQ ID NO: 108607 - DNA, 33 bp, Homo sapien
gagcaacccactccacaattcattctacattta

SEQ ID NO: 108608 - DNA, 33 bp, Homo sapien
gagcaacccactccaccattcattctacattta

SEQ ID NO: 108609 - DNA, 33 bp, Homo sapien
ggagatctgcactgaaagccatgccctgagcac

SEQ ID NO: 108610 - DNA, 33 bp, Homo sapien
ggagatctgcactgaaggccatgccctgagcac

SEQ ID NO: 108611 - DNA, 33 bp, Homo sapien
caatgctttaacaaaaatttatgaggacagtgt

SEQ ID NO: 108612 - DNA, 33 bp, Homo sapien
caatgctttaacaaaagtttatgaggacagtgt

SEQ ID NO: 108613 - DNA, 33 bp, Homo sapien
tatttgcaagtaaaacaataatatgtgtcacat

SEQ ID NO: 108614 - DNA, 33 bp, Homo sapien
tatttgcaagtaaaacgataatatgtgtcacat

SEQ ID NO: 108615 - DNA, 33 bp, Homo sapien
ctcttccagccagtcacgttctgtcaatggtca

SEQ ID NO: 108616 - DNA, 33 bp, Homo sapien
ctcttccagccagtcatgttctgtcaatggtca

SEQ ID NO: 108617 - DNA, 33 bp, Homo sapien
taaacaggtgattgtacattagcaactgtctcc

SEQ ID NO: 108618 - DNA, 33 bp, Homo sapien
taaacaggtgattgtatattagcaactgtctcc

SEQ ID NO: 108619 - DNA, 33 bp, Homo sapien
cccaatctgtccaagaaaaacaaatagaagcta

SEQ ID NO: 108620 - DNA, 33 bp, Homo sapien
cccaatctgtccaagagaaacaaatagaagcta

SEQ ID NO: 108621 - DNA, 33 bp, Homo sapien
tttagagaggacttaaagcacagaacctttctc

SEQ ID NO: 108622 - DNA, 33 bp, Homo sapien
tttagagaggacttaaggcacagaacctttctc

SEQ ID NO: 108623 - DNA, 33 bp, Homo sapien
cctgcatctcttgatacccagccatcctggtta

SEQ ID NO: 108624 - DNA, 33 bp, Homo sapien
cctgcatctcttgatagccagccatcctggtta

SEQ ID NO: 108625 - DNA, 33 bp, Homo sapien
tcctataaaccttcaacgaaacatagttgttta

SEQ ID NO: 108626 - DNA, 33 bp, Homo sapien
tcctataaaccttcaaggaaacatagttgttta

SEQ ID NO: 108627 - DNA, 33 bp, Homo sapien
actctgttagctcacaaggaaaataaggaaaag

SEQ ID NO: 108628 - DNA, 33 bp, Homo sapien
actctgttagctcacagggaaaataaggaaaag

SEQ ID NO: 108629 - DNA, 33 bp, Homo sapien
ttaaatgaagctaaaacaagtatgaacccattg

SEQ ID NO: 108630 - DNA, 33 bp, Homo sapien
ttaaatgaagctaaaagaagtatgaacccattg

SEQ ID NO: 108631 - DNA, 33 bp, Homo sapien
gaatgtgtgatgtagaactcctgtggtcagcta

SEQ ID NO: 108632 - DNA, 33 bp, Homo sapien
gaatgtgtgatgtagagctcctgtggtcagcta

SEQ ID NO: 108633 - DNA, 33 bp, Homo sapien
ttttcttttgttgccacatttcatgctggggat

SEQ ID NO: 108634 - DNA, 33 bp, Homo sapien
ttttcttttgttgccatatttcatgctggggat

SEQ ID NO: 108635 - DNA, 33 bp, Homo sapien
gagctgagcatggggtaaatttcaactctcagt

SEQ ID NO: 108636 - DNA, 33 bp, Homo sapien
gagctgagcatggggtgaatttcaactctcagt

SEQ ID NO: 108637 - DNA, 33 bp, Homo sapien
aaaggtgcacaacctcagaattccttgaggttg

SEQ ID NO: 108638 - DNA, 33 bp, Homo sapien
aaaggtgcacaacctcggaattccttgaggttg

SEQ ID NO: 108639 - DNA, 33 bp, Homo sapien
gctggaatccagttgcactcccaaatccagcat

SEQ ID NO: 108640 - DNA, 33 bp, Homo sapien
gctggaatccagttgcgctcccaaatccagcat

SEQ ID NO: 108641 - DNA, 33 bp, Homo sapien
tctgataacttgtagaaacttgaacgaataata

SEQ ID NO: 108642 - DNA, 33 bp, Homo sapien
tctgataacttgtagagacttgaacgaataata

SEQ ID NO: 108643 - DNA, 33 bp, Homo sapien
gttatctacttcaacacagatgttcatgctgag

SEQ ID NO: 108644 - DNA, 33 bp, Homo sapien
gttatctacttcaacatagatgttcatgctgag

SEQ ID NO: 108645 - DNA, 33 bp, Homo sapien
attataaggtatcatcaatttggtagccttctg

SEQ ID NO: 108646 - DNA, 33 bp, Homo sapien
attataaggtatcatccatttggtagccttctg

SEQ ID NO: 108647 - DNA, 33 bp, Homo sapien
aaaaccttagattttggattaagccctgactgc

SEQ ID NO: 108648 - DNA, 33 bp, Homo sapien
aaaaccttagattttgtattaagccctgactgc

SEQ ID NO: 108649 - DNA, 33 bp, Homo sapien
gactctatttgttagaagccagtccctgagtcc

SEQ ID NO: 108650 - DNA, 33 bp, Homo sapien
gactctatttgttagaggccagtccctgagtcc

SEQ ID NO: 108651 - DNA, 33 bp, Homo sapien
ttcaatgccaagttcaaatcctaaatggttcaa

SEQ ID NO: 108652 - DNA, 33 bp, Homo sapien
ttcaatgccaagttcacatcctaaatggttcaa

SEQ ID NO: 108653 - DNA, 33 bp, Homo sapien
cataagccaaagggacaggaagataagcctttt

SEQ ID NO: 108654 - DNA, 33 bp, Homo sapien
cataagccaaagggacgggaagataagcctttt

SEQ ID NO: 108655 - DNA, 33 bp, Homo sapien
agctccattagctccacgcactaagggtttctg

SEQ ID NO: 108656 - DNA, 33 bp, Homo sapien
agctccattagctccatgcactaagggtttctg

SEQ ID NO: 108657 - DNA, 33 bp, Homo sapien
tacaataaatggtttacatcacccaagaagctc

SEQ ID NO: 108658 - DNA, 33 bp, Homo sapien
tacaataaatggtttagatcacccaagaagctc

SEQ ID NO: 108659 - DNA, 33 bp, Homo sapien
caaggctctgggaggacggcttctgctatggcc

SEQ ID NO: 108660 - DNA, 33 bp, Homo sapien
caaggctctgggaggatggcttctgctatggcc

SEQ ID NO: 108661 - DNA, 33 bp, Homo sapien
tccaggctctcatgaacgggtttcctcttttct

SEQ ID NO: 108662 - DNA, 33 bp, Homo sapien
tccaggctctcatgaatgggtttcctcttttct

SEQ ID NO: 108663 - DNA, 33 bp, Homo sapien
cggtgcagaactctagccctcttggaagcttct

SEQ ID NO: 108664 - DNA, 33 bp, Homo sapien
cggtgcagaactctagtcctcttggaagcttct

SEQ ID NO: 108665 - DNA, 33 bp, Homo sapien
actaactgcttctccacgccacaagggctttac

SEQ ID NO: 108666 - DNA, 33 bp, Homo sapien
actaactgcttctccatgccacaagggctttac

SEQ ID NO: 108667 - DNA, 33 bp, Homo sapien
agaaagttctcacatagctaaaaatcaaaactg

SEQ ID NO: 108668 - DNA, 33 bp, Homo sapien
agaaagttctcacatatctaaaaatcaaaactg

SEQ ID NO: 108669 - DNA, 33 bp, Homo sapien
ttggttaaggattgcaaactgtttctagaaccc

SEQ ID NO: 108670 - DNA, 33 bp, Homo sapien
ttggttaaggattgcagactgtttctagaaccc

SEQ ID NO: 108671 - DNA, 33 bp, Homo sapien
gcataaaaaatgacccaaaggcacctgttggtt

SEQ ID NO: 108672 - DNA, 33 bp, Homo sapien
gcataaaaaatgacccgaaggcacctgttggtt

SEQ ID NO: 108673 - DNA, 33 bp, Homo sapien
tatttaggatagaaagaaacaagctctccctaa

SEQ ID NO: 108674 - DNA, 33 bp, Homo sapien
tatttaggatagaaagcaacaagctctccctaa

SEQ ID NO: 108675 - DNA, 33 bp, Homo sapien
atttgcattttatttcaacaagtctttgagcaa

SEQ ID NO: 108676 - DNA, 33 bp, Homo sapien
atttgcattttatttccacaagtctttgagcaa

SEQ ID NO: 108677 - DNA, 33 bp, Homo sapien
gctggtgagccagacaatggtcctatagggtcc

SEQ ID NO: 108678 - DNA, 33 bp, Homo sapien
gctggtgagccagacagtggtcctatagggtcc

SEQ ID NO: 108679 - DNA, 33 bp, Homo sapien
ggccctggcgggccaaaaggaagaacgaggcag

SEQ ID NO: 108680 - DNA, 33 bp, Homo sapien
ggccctggcgggccaagaggaagaacgaggcag

SEQ ID NO: 108681 - DNA, 33 bp, Homo sapien
ggctttagagcactaaggaaggcagcacctgct

SEQ ID NO: 108682 - DNA, 33 bp, Homo sapien
ggctttagagcactaatgaaggcagcacctgct

SEQ ID NO: 108683 - DNA, 33 bp, Homo sapien
catctccttgtactcaatctttcttctaggagt

SEQ ID NO: 108684 - DNA, 33 bp, Homo sapien
catctccttgtactcagtctttcttctaggagt

SEQ ID NO: 108685 - DNA, 33 bp, Homo sapien
tggattttaaagccacacattccatagagagag

SEQ ID NO: 108686 - DNA, 33 bp, Homo sapien
tggattttaaagccacgcattccatagagagag

SEQ ID NO: 108687 - DNA, 33 bp, Homo sapien
gtttctgctctcaggcactggcctattgcttcc

SEQ ID NO: 108688 - DNA, 33 bp, Homo sapien
gtttctgctctcaggcgctggcctattgcttcc

SEQ ID NO: 108689 - DNA, 33 bp, Homo sapien
catttccagacagacacatttaagctagagaag

SEQ ID NO: 108690 - DNA, 33 bp, Homo sapien
catttccagacagacagatttaagctagagaag

SEQ ID NO: 108691 - DNA, 33 bp, Homo sapien
tatgtggatggaaacaacaccagctgttgagat

SEQ ID NO: 108692 - DNA, 33 bp, Homo sapien
tatgtggatggaaacaccaccagctgttgagat

SEQ ID NO: 108693 - DNA, 33 bp, Homo sapien
tgcgggaatgattggacacagtttggtattatc

SEQ ID NO: 108694 - DNA, 33 bp, Homo sapien
tgcgggaatgattggatacagtttggtattatc

SEQ ID NO: 108695 - DNA, 33 bp, Homo sapien
catctgggtttgctaacatgcttatcgaagttt

SEQ ID NO: 108696 - DNA, 33 bp, Homo sapien
catctgggtttgctaagatgcttatcgaagttt

SEQ ID NO: 108697 - DNA, 33 bp, Homo sapien
tcccgcatcactgtagacatagaagacctcata

SEQ ID NO: 108698 - DNA, 33 bp, Homo sapien
tcccgcatcactgtaggcatagaagacctcata

SEQ ID NO: 108699 - DNA, 33 bp, Homo sapien
ccctctttttataggcacacctccctgccttca

SEQ ID NO: 108700 - DNA, 33 bp, Homo sapien
ccctctttttataggcgcacctccctgccttca

SEQ ID NO: 108701 - DNA, 33 bp, Homo sapien
atggtcagccctggagaatgataagagctcctg

SEQ ID NO: 108702 - DNA, 33 bp, Homo sapien
atggtcagccctggaggatgataagagctcctg

SEQ ID NO: 108703 - DNA, 33 bp, Homo sapien
ggaatgcaaactagaaccaagtgaggcttccag

SEQ ID NO: 108704 - DNA, 33 bp, Homo sapien
ggaatgcaaactagaagcaagtgaggcttccag

SEQ ID NO: 108705 - DNA, 33 bp, Homo sapien
ggtcacagggagggaaccatttgaggctgaaag

SEQ ID NO: 108706 - DNA, 33 bp, Homo sapien
ggtcacagggagggaagcatttgaggctgaaag

SEQ ID NO: 108707 - DNA, 33 bp, Homo sapien
tgaatttggtgtgaaaagagcttgaggatcagc

SEQ ID NO: 108708 - DNA, 33 bp, Homo sapien
tgaatttggtgtgaaaggagcttgaggatcagc

SEQ ID NO: 108709 - DNA, 33 bp, Homo sapien
gagctccacacccttacgagtagcacccttctg

SEQ ID NO: 108710 - DNA, 33 bp, Homo sapien
gagctccacacccttaggagtagcacccttctg

SEQ ID NO: 108711 - DNA, 33 bp, Homo sapien
gagtgatcttcacaaacgcaaatctgacttcag

SEQ ID NO: 108712 - DNA, 33 bp, Homo sapien
gagtgatcttcacaaatgcaaatctgacttcag

SEQ ID NO: 108713 - DNA, 33 bp, Homo sapien
aatggggaaatctaagaagaggagccaagcagg

SEQ ID NO: 108714 - DNA, 33 bp, Homo sapien
aatggggaaatctaaggagaggagccaagcagg

SEQ ID NO: 108715 - DNA, 33 bp, Homo sapien
tgtcagcaacctcgtgcatcaaatgaaatgcgc

SEQ ID NO: 108716 - DNA, 33 bp, Homo sapien
tgtcagcaacctcgtggatcaaatgaaatgcgc

SEQ ID NO: 108717 - DNA, 33 bp, Homo sapien
gaagtggacatggggaataagtgaacaaaggga

SEQ ID NO: 108718 - DNA, 33 bp, Homo sapien
gaagtggacatggggagtaagtgaacaaaggga

SEQ ID NO: 108719 - DNA, 33 bp, Homo sapien
tggggaataggtaagcagactgaggtgtatcca

SEQ ID NO: 108720 - DNA, 33 bp, Homo sapien
tggggaataggtaagctgactgaggtgtatcca

SEQ ID NO: 108721 - DNA, 33 bp, Homo sapien
tgaaaacacaagatacaaggaatagatagatga

SEQ ID NO: 108722 - DNA, 33 bp, Homo sapien
tgaaaacacaagatacgaggaatagatagatga

SEQ ID NO: 108723 - DNA, 33 bp, Homo sapien
aggttggatcaggccacgtcaaattcccacagg

SEQ ID NO: 108724 - DNA, 33 bp, Homo sapien
aggttggatcaggccatgtcaaattcccacagg

SEQ ID NO: 108725 - DNA, 33 bp, Homo sapien
aaattcccacaggaaaattcccaagaaaggccc

SEQ ID NO: 108726 - DNA, 33 bp, Homo sapien
aaattcccacaggaaacttcccaagaaaggccc

SEQ ID NO: 108727 - DNA, 33 bp, Homo sapien
ctgagcatttccctgaacaattaaaatgcagcc

SEQ ID NO: 108728 - DNA, 33 bp, Homo sapien
ctgagcatttccctgaccaattaaaatgcagcc

SEQ ID NO: 108729 - DNA, 33 bp, Homo sapien
ttctatgataattgtgcaagaaaataagcaata

SEQ ID NO: 108730 - DNA, 33 bp, Homo sapien
ttctatgataattgtgtaagaaaataagcaata

SEQ ID NO: 108731 - DNA, 33 bp, Homo sapien
ttgactcaaagtccacaaacttaaatgtaaatc

SEQ ID NO: 108732 - DNA, 33 bp, Homo sapien
ttgactcaaagtccacgaacttaaatgtaaatc

SEQ ID NO: 108733 - DNA, 33 bp, Homo sapien
gtctagtgtcttttggaagctctggtaaactgt

SEQ ID NO: 108734 - DNA, 33 bp, Homo sapien
gtctagtgtcttttggcagctctggtaaactgt

SEQ ID NO: 108735 - DNA, 33 bp, Homo sapien
gggagcagacagagcaaaaaaaggacagatcag

SEQ ID NO: 108736 - DNA, 33 bp, Homo sapien
gggagcagacagagcacaaaaaggacagatcag

SEQ ID NO: 108737 - DNA, 33 bp, Homo sapien
agcgagttgcagaaagacaataggtaattctgt

SEQ ID NO: 108738 - DNA, 33 bp, Homo sapien
agcgagttgcagaaaggcaataggtaattctgt

SEQ ID NO: 108739 - DNA, 33 bp, Homo sapien
tccctcttctaaagtacggtatgagacaccatg

SEQ ID NO: 108740 - DNA, 33 bp, Homo sapien
tccctcttctaaagtatggtatgagacaccatg

SEQ ID NO: 108741 - DNA, 33 bp, Homo sapien
acttgtcaggggttgcacacagatagtaagcaa

SEQ ID NO: 108742 - DNA, 33 bp, Homo sapien
acttgtcaggggttgcgcacagatagtaagcaa

SEQ ID NO: 108743 - DNA, 33 bp, Homo sapien
agaattaaacaagtaacgtgtgtaaagttctta

SEQ ID NO: 108744 - DNA, 33 bp, Homo sapien
agaattaaacaagtaatgtgtgtaaagttctta

SEQ ID NO: 108745 - DNA, 33 bp, Homo sapien
catagaccaacaaggaaagaagaagaacaaaaa

SEQ ID NO: 108746 - DNA, 33 bp, Homo sapien
catagaccaacaaggagagaagaagaacaaaaa

SEQ ID NO: 108747 - DNA, 33 bp, Homo sapien
ttggagaatgaaaaaaagtttacctatcctgtt

SEQ ID NO: 108748 - DNA, 33 bp, Homo sapien
ttggagaatgaaaaaatgtttacctatcctgtt

SEQ ID NO: 108749 - DNA, 33 bp, Homo sapien
gttagagctgagaaaacggttttaacaggatag

SEQ ID NO: 108750 - DNA, 33 bp, Homo sapien
gttagagctgagaaaatggttttaacaggatag

SEQ ID NO: 108751 - DNA, 33 bp, Homo sapien
accccttcagtgcataaccctgactttcagaat

SEQ ID NO: 108752 - DNA, 33 bp, Homo sapien
accccttcagtgcatacccctgactttcagaat

SEQ ID NO: 108753 - DNA, 33 bp, Homo sapien
tttgacttacctagataaacaaactagtctgtc

SEQ ID NO: 108754 - DNA, 33 bp, Homo sapien
tttgacttacctagatgaacaaactagtctgtc

SEQ ID NO: 108755 - DNA, 33 bp, Homo sapien
ttgtatatatgagggacgtatgctgccttttta

SEQ ID NO: 108756 - DNA, 33 bp, Homo sapien
ttgtatatatgagggatgtatgctgccttttta

SEQ ID NO: 108757 - DNA, 33 bp, Homo sapien
ttattcgagacaaatccccaacttaaggatttt

SEQ ID NO: 108758 - DNA, 33 bp, Homo sapien
ttattcgagacaaatcgccaacttaaggatttt

SEQ ID NO: 108759 - DNA, 33 bp, Homo sapien
aaagaaagaacatagcagaaaattcattactga

SEQ ID NO: 108760 - DNA, 33 bp, Homo sapien
aaagaaagaacatagctgaaaattcattactga

SEQ ID NO: 108761 - DNA, 33 bp, Homo sapien
taactgtgctctttgacatgtgaactatatttc

SEQ ID NO: 108762 - DNA, 33 bp, Homo sapien
taactgtgctctttgatatgtgaactatatttc

SEQ ID NO: 108763 - DNA, 33 bp, Homo sapien
cacactctagttcttccctgacctactagcatg

SEQ ID NO: 108764 - DNA, 33 bp, Homo sapien
cacactctagttcttctctgacctactagcatg

SEQ ID NO: 108765 - DNA, 33 bp, Homo sapien
aaagacacactttggaagattcagaacagttta

SEQ ID NO: 108766 - DNA, 33 bp, Homo sapien
aaagacacactttggatgattcagaacagttta

SEQ ID NO: 108767 - DNA, 33 bp, Homo sapien
agctggtcgtggtcaccactgcagccgccaagc

SEQ ID NO: 108768 - DNA, 33 bp, Homo sapien
agctggtcgtggtcactactgcagccgccaagc

SEQ ID NO: 108769 - DNA, 33 bp, Homo sapien
ctctgggagtacaagacggtttggggctggcag

SEQ ID NO: 108770 - DNA, 33 bp, Homo sapien
ctctgggagtacaagatggtttggggctggcag

SEQ ID NO: 108771 - DNA, 33 bp, Homo sapien
ctctggagggctagcaaaggtgagaacagatga

SEQ ID NO: 108772 - DNA, 33 bp, Homo sapien
ctctggagggctagcataggtgagaacagatga

SEQ ID NO: 108773 - DNA, 33 bp, Homo sapien
ccagagggcacaaaccacaaactttggcagctt

SEQ ID NO: 108774 - DNA, 33 bp, Homo sapien
ccagagggcacaaaccgcaaactttggcagctt

SEQ ID NO: 108775 - DNA, 33 bp, Homo sapien
tactcaatgactcacacacagtggccaagggac

SEQ ID NO: 108776 - DNA, 33 bp, Homo sapien
tactcaatgactcacagacagtggccaagggac

SEQ ID NO: 108777 - DNA, 33 bp, Homo sapien
ccaaatggctttgctacggtagcggaaggagct

SEQ ID NO: 108778 - DNA, 33 bp, Homo sapien
ccaaatggctttgctatggtagcggaaggagct

SEQ ID NO: 108779 - DNA, 33 bp, Homo sapien
tcccaaagcttcccgaaaagtggctgatgccac

SEQ ID NO: 108780 - DNA, 33 bp, Homo sapien
tcccaaagcttcccgataagtggctgatgccac

SEQ ID NO: 108781 - DNA, 33 bp, Homo sapien
atagaaacatgcctaacgatatgatttattatc

SEQ ID NO: 108782 - DNA, 33 bp, Homo sapien
atagaaacatgcctaatgatatgatttattatc

SEQ ID NO: 108783 - DNA, 33 bp, Homo sapien
aaatattgaatagtgcagatcccaaccaatttg

SEQ ID NO: 108784 - DNA, 33 bp, Homo sapien
aaatattgaatagtgccgatcccaaccaatttg

SEQ ID NO: 108785 - DNA, 33 bp, Homo sapien
ccaaagagggacataaatgccatcctagcacca

SEQ ID NO: 108786 - DNA, 33 bp, Homo sapien
ccaaagagggacataagtgccatcctagcacca

SEQ ID NO: 108787 - DNA, 33 bp, Homo sapien
taagtgttttattggcagaataatttgcaaaca

SEQ ID NO: 108788 - DNA, 33 bp, Homo sapien
taagtgttttattggcggaataatttgcaaaca

SEQ ID NO: 108789 - DNA, 33 bp, Homo sapien
agaaccacacagctgaagtgaggagacggcgtc

SEQ ID NO: 108790 - DNA, 33 bp, Homo sapien
agaaccacacagctgacgtgaggagacggcgtc

SEQ ID NO: 108791 - DNA, 33 bp, Homo sapien
tgccatgtgcagatgacgacatttactttgcag

SEQ ID NO: 108792 - DNA, 33 bp, Homo sapien
tgccatgtgcagatgatgacatttactttgcag

SEQ ID NO: 108793 - DNA, 33 bp, Homo sapien
tctgggcagcacattgaacatcacaccggggca

SEQ ID NO: 108794 - DNA, 33 bp, Homo sapien
tctgggcagcacattgcacatcacaccggggca

SEQ ID NO: 108795 - DNA, 33 bp, Homo sapien
taggtgactctgtgccaatgggaccctaaaggg

SEQ ID NO: 108796 - DNA, 33 bp, Homo sapien
taggtgactctgtgccgatgggaccctaaaggg

SEQ ID NO: 108797 - DNA, 33 bp, Homo sapien
caagggccctccttaacataccttttgcccacc

SEQ ID NO: 108798 - DNA, 33 bp, Homo sapien
caagggccctccttaatataccttttgcccacc

SEQ ID NO: 108799 - DNA, 33 bp, Homo sapien
attcaactcactccaaaccactagaaataaagg

SEQ ID NO: 108800 - DNA, 33 bp, Homo sapien
attcaactcactccaagccactagaaataaagg

SEQ ID NO: 108801 - DNA, 33 bp, Homo sapien
gaggcctgtgggggacacaactcagtttccagc

SEQ ID NO: 108802 - DNA, 33 bp, Homo sapien
gaggcctgtgggggacgcaactcagtttccagc

SEQ ID NO: 108803 - DNA, 33 bp, Homo sapien
gtgatatttcaagccactaattttatggtaatc

SEQ ID NO: 108804 - DNA, 33 bp, Homo sapien
gtgatatttcaagccattaattttatggtaatc

SEQ ID NO: 108805 - DNA, 33 bp, Homo sapien
cccttattttagctcagtgagactcacaaccag

SEQ ID NO: 108806 - DNA, 33 bp, Homo sapien
cccttattttagctcattgagactcacaaccag

SEQ ID NO: 108807 - DNA, 33 bp, Homo sapien
agtgagagaggcctgaagtgtggggtccaggag

SEQ ID NO: 108808 - DNA, 33 bp, Homo sapien
agtgagagaggcctgaggtgtggggtccaggag

SEQ ID NO: 108809 - DNA, 33 bp, Homo sapien
tatctgtctcaaataccctctttctcttagaca

SEQ ID NO: 108810 - DNA, 33 bp, Homo sapien
tatctgtctcaaatactctctttctcttagaca

SEQ ID NO: 108811 - DNA, 33 bp, Homo sapien
cctaggactatgccctaagcggcactccacctt

SEQ ID NO: 108812 - DNA, 33 bp, Homo sapien
cctaggactatgcccttagcggcactccacctt

SEQ ID NO: 108813 - DNA, 33 bp, Homo sapien
gggtgcctcttcctcacggaaattgagctgtca

SEQ ID NO: 108814 - DNA, 33 bp, Homo sapien
gggtgcctcttcctcatggaaattgagctgtca

SEQ ID NO: 108815 - DNA, 33 bp, Homo sapien
aaaaatagtttaaacaagcatctaaacacaact

SEQ ID NO: 108816 - DNA, 33 bp, Homo sapien
aaaaatagtttaaacaggcatctaaacacaact

SEQ ID NO: 108817 - DNA, 33 bp, Homo sapien
gaatgtcagatagcgaccccagagagaagactg

SEQ ID NO: 108818 - DNA, 33 bp, Homo sapien
gaatgtcagatagcgatcccagagagaagactg

SEQ ID NO: 108819 - DNA, 33 bp, Homo sapien
tcctggatcctgccaaatactcccttatggtgt

SEQ ID NO: 108820 - DNA, 33 bp, Homo sapien
tcctggatcctgccaattactcccttatggtgt

SEQ ID NO: 108821 - DNA, 33 bp, Homo sapien
tcaccagaaaggcaagaaggctgtgaaaatctc

SEQ ID NO: 108822 - DNA, 33 bp, Homo sapien
tcaccagaaaggcaagcaggctgtgaaaatctc

SEQ ID NO: 108823 - DNA, 33 bp, Homo sapien
gccacacagaactccacgtggtacagccaggag

SEQ ID NO: 108824 - DNA, 33 bp, Homo sapien
gccacacagaactccaggtggtacagccaggag

SEQ ID NO: 108825 - DNA, 33 bp, Homo sapien
accagctccagccttacgggcttcttgcccctc

SEQ ID NO: 108826 - DNA, 33 bp, Homo sapien
accagctccagccttatgggcttcttgcccctc

SEQ ID NO: 108827 - DNA, 33 bp, Homo sapien
tgacatggcaccagggaaaagagtggtctgagg

SEQ ID NO: 108828 - DNA, 33 bp, Homo sapien
tgacatggcaccaggggaaagagtggtctgagg

SEQ ID NO: 108829 - DNA, 33 bp, Homo sapien
ctcatggacagtttgccgacctctgccctagag

SEQ ID NO: 108830 - DNA, 33 bp, Homo sapien
ctcatggacagtttgctgacctctgccctagag

SEQ ID NO: 108831 - DNA, 33 bp, Homo sapien
aaggaagcatcctcacacttttcagaatgccct

SEQ ID NO: 108832 - DNA, 33 bp, Homo sapien
aaggaagcatcctcacgcttttcagaatgccct

SEQ ID NO: 108833 - DNA, 33 bp, Homo sapien
aggtcagagaggttaaagaactcacttaaggtc

SEQ ID NO: 108834 - DNA, 33 bp, Homo sapien
aggtcagagaggttaaggaactcacttaaggtc

SEQ ID NO: 108835 - DNA, 33 bp, Homo sapien
aattctgcgctacacacgtttctcctctgtaaa

SEQ ID NO: 108836 - DNA, 33 bp, Homo sapien
aattctgcgctacacatgtttctcctctgtaaa

SEQ ID NO: 108837 - DNA, 33 bp, Homo sapien
ggagtcagccaaaccaccaggtcctggatcccc

SEQ ID NO: 108838 - DNA, 33 bp, Homo sapien
ggagtcagccaaaccatcaggtcctggatcccc

SEQ ID NO: 108839 - DNA, 33 bp, Homo sapien
tcactgtgtcatcccactattgactcactgcat

SEQ ID NO: 108840 - DNA, 33 bp, Homo sapien
tcactgtgtcatcccagtattgactcactgcat

SEQ ID NO: 108841 - DNA, 33 bp, Homo sapien
actttgtctctcctcacgggtgattgtggtccc

SEQ ID NO: 108842 - DNA, 33 bp, Homo sapien
actttgtctctcctcatgggtgattgtggtccc

SEQ ID NO: 108843 - DNA, 33 bp, Homo sapien
acgctgctgagggacaacttccctggagccagc

SEQ ID NO: 108844 - DNA, 33 bp, Homo sapien
acgctgctgagggacaccttccctggagccagc

SEQ ID NO: 108845 - DNA, 33 bp, Homo sapien
agatatgaagcatttaagagaacagtctttgaa

SEQ ID NO: 108846 - DNA, 33 bp, Homo sapien
agatatgaagcatttaggagaacagtctttgaa

SEQ ID NO: 108847 - DNA, 33 bp, Homo sapien
tagaccttggttgatacgtctttcagcttctga

SEQ ID NO: 108848 - DNA, 33 bp, Homo sapien
tagaccttggttgataggtctttcagcttctga

SEQ ID NO: 108849 - DNA, 33 bp, Homo sapien
tcaccgcttccacatgaagaaagtagtgcctct

SEQ ID NO: 108850 - DNA, 33 bp, Homo sapien
tcaccgcttccacatggagaaagtagtgcctct

SEQ ID NO: 108851 - DNA, 33 bp, Homo sapien
gtctgttttgtcctccaatgtatccaaagcacc

SEQ ID NO: 108852 - DNA, 33 bp, Homo sapien
gtctgttttgtcctccgatgtatccaaagcacc

SEQ ID NO: 108853 - DNA, 33 bp, Homo sapien
atggacgtcactggggaaactctcagaacgaca

SEQ ID NO: 108854 - DNA, 33 bp, Homo sapien
atggacgtcactgggggaactctcagaacgaca

SEQ ID NO: 108855 - DNA, 33 bp, Homo sapien
cattttggaaaacacaatctgtcacattcatcc

SEQ ID NO: 108856 - DNA, 33 bp, Homo sapien
cattttggaaaacacagtctgtcacattcatcc

SEQ ID NO: 108857 - DNA, 33 bp, Homo sapien
tctcctggttgggcccagatagtcctgcaggct

SEQ ID NO: 108858 - DNA, 33 bp, Homo sapien
tctcctggttgggcccggatagtcctgcaggct

SEQ ID NO: 108859 - DNA, 33 bp, Homo sapien
tgtcccaaagcaaaggcatggtcttcagggatc

SEQ ID NO: 108860 - DNA, 33 bp, Homo sapien
tgtcccaaagcaaaggtatggtcttcagggatc

SEQ ID NO: 108861 - DNA, 33 bp, Homo sapien
atacatcaattttcccacaggacgggtctccaa

SEQ ID NO: 108862 - DNA, 33 bp, Homo sapien
atacatcaattttcccgcaggacgggtctccaa

SEQ ID NO: 108863 - DNA, 33 bp, Homo sapien
caacaccactaatcctaaggaaaatgtaaatca

SEQ ID NO: 108864 - DNA, 33 bp, Homo sapien
caacaccactaatcctgaggaaaatgtaaatca

SEQ ID NO: 108865 - DNA, 33 bp, Homo sapien
gtgcattatcagacaacgctggagctgcggctg

SEQ ID NO: 108866 - DNA, 33 bp, Homo sapien
gtgcattatcagacaatgctggagctgcggctg

SEQ ID NO: 108867 - DNA, 33 bp, Homo sapien
agtggggggataggaactacagtgatctcggca

SEQ ID NO: 108868 - DNA, 33 bp, Homo sapien
agtggggggataggaagtacagtgatctcggca

SEQ ID NO: 108869 - DNA, 33 bp, Homo sapien
ctgtattttttcctcaatgaaatcttcccatct

SEQ ID NO: 108870 - DNA, 33 bp, Homo sapien
ctgtattttttcctcagtgaaatcttcccatct

SEQ ID NO: 108871 - DNA, 33 bp, Homo sapien
aacacagcagctaaaaatatgcttaaatattgt

SEQ ID NO: 108872 - DNA, 33 bp, Homo sapien
aacacagcagctaaaagtatgcttaaatattgt

SEQ ID NO: 108873 - DNA, 33 bp, Homo sapien
atggaggactctggtcaacaatagttggtgttc

SEQ ID NO: 108874 - DNA, 33 bp, Homo sapien
atggaggactctggtcgacaatagttggtgttc

SEQ ID NO: 108875 - DNA, 33 bp, Homo sapien
ctgcatgttctgctaacgcctgaggtctccctg

SEQ ID NO: 108876 - DNA, 33 bp, Homo sapien
ctgcatgttctgctaaggcctgaggtctccctg

SEQ ID NO: 108877 - DNA, 33 bp, Homo sapien
atgaaacaacagccaccgagaagagagcacata

SEQ ID NO: 108878 - DNA, 33 bp, Homo sapien
atgaaacaacagccactgagaagagagcacata

SEQ ID NO: 108879 - DNA, 33 bp, Homo sapien
tgggcttcaaactgtgaatctgccatttaccac

SEQ ID NO: 108880 - DNA, 33 bp, Homo sapien
tgggcttcaaactgtggatctgccatttaccac

SEQ ID NO: 108881 - DNA, 33 bp, Homo sapien
gaggcagctgggattacggtaaatgaaacctga

SEQ ID NO: 108882 - DNA, 33 bp, Homo sapien
gaggcagctgggattatggtaaatgaaacctga

SEQ ID NO: 108883 - DNA, 33 bp, Homo sapien
ctcctggagagcaatccaaaacccgaggacctc

SEQ ID NO: 108884 - DNA, 33 bp, Homo sapien
ctcctggagagcaatctaaaacccgaggacctc

SEQ ID NO: 108885 - DNA, 33 bp, Homo sapien
gaataaagaggttgaaaagccagggatgcagga

SEQ ID NO: 108886 - DNA, 33 bp, Homo sapien
gaataaagaggttgaagagccagggatgcagga

SEQ ID NO: 108887 - DNA, 33 bp, Homo sapien
atcagcacacggtcaaatacctttcactttaaa

SEQ ID NO: 108888 - DNA, 33 bp, Homo sapien
atcagcacacggtcaagtacctttcactttaaa

SEQ ID NO: 108889 - DNA, 33 bp, Homo sapien
ctaggaggcaggtatccgaaacggcactacact

SEQ ID NO: 108890 - DNA, 33 bp, Homo sapien
ctaggaggcaggtatctgaaacggcactacact

SEQ ID NO: 108891 - DNA, 33 bp, Homo sapien
ccctggatatttcccactgaccttgggcgacct

SEQ ID NO: 108892 - DNA, 33 bp, Homo sapien
ccctggatatttcccattgaccttgggcgacct

SEQ ID NO: 108893 - DNA, 33 bp, Homo sapien
ccctcctccacacaccaatgcttgttcatccct

SEQ ID NO: 108894 - DNA, 33 bp, Homo sapien
ccctcctccacacaccgatgcttgttcatccct

SEQ ID NO: 108895 - DNA, 33 bp, Homo sapien
atcacatggcgagagaagaaagagatgctaggc

SEQ ID NO: 108896 - DNA, 33 bp, Homo sapien
atcacatggcgagagaggaaagagatgctaggc

SEQ ID NO: 108897 - DNA, 33 bp, Homo sapien
acttaagatctcccaaatgccccaggttgttgg

SEQ ID NO: 108898 - DNA, 33 bp, Homo sapien
acttaagatctcccaagtgccccaggttgttgg

SEQ ID NO: 108899 - DNA, 33 bp, Homo sapien
ttcctaaagaagagaacaaccctggaatgggtg

SEQ ID NO: 108900 - DNA, 33 bp, Homo sapien
ttcctaaagaagagaagaaccctggaatgggtg

SEQ ID NO: 108901 - DNA, 33 bp, Homo sapien
ttgtcatttcagtaaacgtagaaaatgcaacta

SEQ ID NO: 108902 - DNA, 33 bp, Homo sapien
ttgtcatttcagtaaatgtagaaaatgcaacta

SEQ ID NO: 108903 - DNA, 33 bp, Homo sapien
atccaaaccgcagaaacaagaaagcccgtcgca

SEQ ID NO: 108904 - DNA, 33 bp, Homo sapien
atccaaaccgcagaaataagaaagcccgtcgca

SEQ ID NO: 108905 - DNA, 33 bp, Homo sapien
atgtctggaacccaataaaaaattactggctgg

SEQ ID NO: 108906 - DNA, 33 bp, Homo sapien
atgtctggaacccaatcaaaaattactggctgg

SEQ ID NO: 108907 - DNA, 33 bp, Homo sapien
gaactctaagcattgcagagacgccaagtttga

SEQ ID NO: 108908 - DNA, 33 bp, Homo sapien
gaactctaagcattgcggagacgccaagtttga

SEQ ID NO: 108909 - DNA, 33 bp, Homo sapien
ttggtaactagacaaccccaaactcctccaaat

SEQ ID NO: 108910 - DNA, 33 bp, Homo sapien
ttggtaactagacaactccaaactcctccaaat

SEQ ID NO: 108911 - DNA, 33 bp, Homo sapien
aggtaccagatagtaaatatttggacagcaaaa

SEQ ID NO: 108912 - DNA, 33 bp, Homo sapien
aggtaccagatagtaagtatttggacagcaaaa

SEQ ID NO: 108913 - DNA, 33 bp, Homo sapien
gtaaacttaattggcaaatctgagcagatgaaa

SEQ ID NO: 108914 - DNA, 33 bp, Homo sapien
gtaaacttaattggcacatctgagcagatgaaa

SEQ ID NO: 108915 - DNA, 33 bp, Homo sapien
ttccattgttatgtgacgttccaaaattggaac

SEQ ID NO: 108916 - DNA, 33 bp, Homo sapien
ttccattgttatgtgatgttccaaaattggaac

SEQ ID NO: 108917 - DNA, 33 bp, Homo sapien
aacactaggcaaaaccactgctacactgtacat

SEQ ID NO: 108918 - DNA, 33 bp, Homo sapien
aacactaggcaaaacctctgctacactgtacat

SEQ ID NO: 108919 - DNA, 33 bp, Homo sapien
tttgttctgtttcgaactggtcttacaaaatgc

SEQ ID NO: 108920 - DNA, 33 bp, Homo sapien
tttgttctgtttcgaattggtcttacaaaatgc

SEQ ID NO: 108921 - DNA, 33 bp, Homo sapien; identical to SEQ ID NO: 108919

SEQ ID NO: 108922 - DNA, 33 bp, Homo sapien; identical to SEQ ID NO: 108920

SEQ ID NO: 108923 - DNA, 33 bp, Homo sapien
agactattagaagacactctgtaagacttacac

SEQ ID NO: 108924 - DNA, 33 bp, Homo sapien
agactattagaagacattctgtaagacttacac

SEQ ID NO: 108925 - DNA, 33 bp, Homo sapien
actgtgggcaagccaactaactggaggggccgt

SEQ ID NO: 108926 - DNA, 33 bp, Homo sapien
actgtgggcaagccaattaactggaggggccgt

SEQ ID NO: 108927 - DNA, 33 bp, Homo sapien
ttggatttggaggcaactctaagatgaaaaact

SEQ ID NO: 108928 - DNA, 33 bp, Homo sapien
ttggatttggaggcaagtctaagatgaaaaact

SEQ ID NO: 108929 - DNA, 33 bp, Homo sapien
tttatttcttatcttacggcctgttgacttcca

SEQ ID NO: 108930 - DNA, 33 bp, Homo sapien
tttatttcttatcttatggcctgttgacttcca

SEQ ID NO: 108931 - DNA, 33 bp, Homo sapien
aagggaacaagacaaaaaggagtctggcgtggc

SEQ ID NO: 108932 - DNA, 33 bp, Homo sapien
aagggaacaagacaaagaggagtctggcgtggc

SEQ ID NO: 108933 - DNA, 33 bp, Homo sapien
ttttcatgtaaaaggacaacttattgcacattg

SEQ ID NO: 108934 - DNA, 33 bp, Homo sapien
ttttcatgtaaaaggataacttattgcacattg

SEQ ID NO: 108935 - DNA, 33 bp, Homo sapien
gcccaagaaatatcacagaggaactgagatttg

SEQ ID NO: 108936 - DNA, 33 bp, Homo sapien
gcccaagaaatatcacggaggaactgagatttg

SEQ ID NO: 108937 - DNA, 33 bp, Homo sapien
ccctagcgaaaaataccctgctggcaaggcagt

SEQ ID NO: 108938 - DNA, 33 bp, Homo sapien
ccctagcgaaaaatactctgctggcaaggcagt

SEQ ID NO: 108939 - DNA, 33 bp, Homo sapien
ataaggaattctcccaatgacctacagaacaga

SEQ ID NO: 108940 - DNA, 33 bp, Homo sapien
ataaggaattctcccactgacctacagaacaga

SEQ ID NO: 108941 - DNA, 33 bp, Homo sapien
atgttgaataaatgaaccagcaagcttaaaagc

SEQ ID NO: 108942 - DNA, 33 bp, Homo sapien
atgttgaataaatgaatcagcaagcttaaaagc

SEQ ID NO: 108943 - DNA, 33 bp, Homo sapien
ttgctgtatgacaaggcattagaaaacagtgtt

SEQ ID NO: 108944 - DNA, 33 bp, Homo sapien
ttgctgtatgacaaggtattagaaaacagtgtt

SEQ ID NO: 108945 - DNA, 33 bp, Homo sapien
ttgtaactgcattccaatggaactttctccctc

SEQ ID NO: 108946 - DNA, 33 bp, Homo sapien
ttgtaactgcattccagtggaactttctccctc

SEQ ID NO: 108947 - DNA, 33 bp, Homo sapien
ccctccggtgtctgagaataatagccttccttt

SEQ ID NO: 108948 - DNA, 33 bp, Homo sapien
ccctccggtgtctgaggataatagccttccttt

SEQ ID NO: 108949 - DNA, 33 bp, Homo sapien
cttcctagctgcagccccactgtgacttctctg

SEQ ID NO: 108950 - DNA, 33 bp, Homo sapien
cttcctagctgcagccgcactgtgacttctctg

SEQ ID NO: 108951 - DNA, 33 bp, Homo sapien
tccactgtggaaactcactgagcccggcatttt

SEQ ID NO: 108952 - DNA, 33 bp, Homo sapien
tccactgtggaaactcgctgagcccggcatttt

SEQ ID NO: 108953 - DNA, 33 bp, Homo sapien
tttgggtttgtttagaacttttgggcagggaat

SEQ ID NO: 108954 - DNA, 33 bp, Homo sapien
tttgggtttgtttagaccttttgggcagggaat

SEQ ID NO: 108955 - DNA, 33 bp, Homo sapien
ttcagggagaaacgagacatgtgcataagtaag

SEQ ID NO: 108956 - DNA, 33 bp, Homo sapien
ttcagggagaaacgagtcatgtgcataagtaag

SEQ ID NO: 108957 - DNA, 33 bp, Homo sapien
aaaacttgaaaaatacaaggttgtggcctgtca

SEQ ID NO: 108958 - DNA, 33 bp, Homo sapien
aaaacttgaaaaataccaggttgtggcctgtca

SEQ ID NO: 108959 - DNA, 33 bp, Homo sapien
cacctagccatcaaaacgcaaatctctaatcct

SEQ ID NO: 108960 - DNA, 33 bp, Homo sapien
cacctagccatcaaaatgcaaatctctaatcct

SEQ ID NO: 108961 - DNA, 33 bp, Homo sapien
cccagatgttctttcagaaggctctaaccacgg

SEQ ID NO: 108962 - DNA, 33 bp, Homo sapien
cccagatgttctttcataaggctctaaccacgg

SEQ ID NO: 108963 - DNA, 33 bp, Homo sapien
gtgggtccagaagaaagcaaagagaaggtagaa

SEQ ID NO: 108964 - DNA, 33 bp, Homo sapien
gtgggtccagaagaaatcaaagagaaggtagaa

SEQ ID NO: 108965 - DNA, 33 bp, Homo sapien
catgagaatgcagataacttttcaatacactgg

SEQ ID NO: 108966 - DNA, 33 bp, Homo sapien
catgagaatgcagataccttttcaatacactgg

SEQ ID NO: 108967 - DNA, 33 bp, Homo sapien
ttcaagtgcacttgacggcgctccagaatagaa

SEQ ID NO: 108968 - DNA, 33 bp, Homo sapien
ttcaagtgcacttgactgcgctccagaatagaa

SEQ ID NO: 108969 - DNA, 33 bp, Homo sapien
ccaaatggatctaagaataaatcagagttcagt

SEQ ID NO: 108970 - DNA, 33 bp, Homo sapien
ccaaatggatctaagagtaaatcagagttcagt

SEQ ID NO: 108971 - DNA, 33 bp, Homo sapien
ttatgtgtttattttaccaaacagtttctgcct

SEQ ID NO: 108972 - DNA, 33 bp, Homo sapien
ttatgtgtttattttagcaaacagtttctgcct

SEQ ID NO: 108973 - DNA, 33 bp, Homo sapien
agtctctctcattgcaccaaggtaacaaacctg

SEQ ID NO: 108974 - DNA, 33 bp, Homo sapien
agtctctctcattgcatcaaggtaacaaacctg

SEQ ID NO: 108975 - DNA, 33 bp, Homo sapien
ggaagccttcattaacaaggacggatggcaggg

SEQ ID NO: 108976 - DNA, 33 bp, Homo sapien
ggaagccttcattaacgaggacggatggcaggg

SEQ ID NO: 108977 - DNA, 33 bp, Homo sapien
gacagaagggtgaggacgacgattttttcctgc

SEQ ID NO: 108978 - DNA, 33 bp, Homo sapien
gacagaagggtgaggatgacgattttttcctgc

SEQ ID NO: 108979 - DNA, 33 bp, Homo sapien
gctgtgtctggcaccacgacatctcctgacctg

SEQ ID NO: 108980 - DNA, 33 bp, Homo sapien
gctgtgtctggcaccatgacatctcctgacctg

SEQ ID NO: 108981 - DNA, 33 bp, Homo sapien
cactttctttccgtctcaatccaattaatgtct

SEQ ID NO: 108982 - DNA, 33 bp, Homo sapien
cactttctttccgtcttaatccaattaatgtct

SEQ ID NO: 108983 - DNA, 33 bp, Homo sapien
gaaaggagtaggagccgagcattccggcagagg

SEQ ID NO: 108984 - DNA, 33 bp, Homo sapien
gaaaggagtaggagcctagcattccggcagagg

SEQ ID NO: 108985 - DNA, 33 bp, Homo sapien
atcatacacacatttccagaggtcggactctaa

SEQ ID NO: 108986 - DNA, 33 bp, Homo sapien
atcatacacacatttctagaggtcggactctaa

SEQ ID NO: 108987 - DNA, 33 bp, Homo sapien
gtggccggaatgcagaaatgaagcactgagcac

SEQ ID NO: 108988 - DNA, 33 bp, Homo sapien
gtggccggaatgcagagatgaagcactgagcac

SEQ ID NO: 108989 - DNA, 33 bp, Homo sapien
ggtcccccgtaagatgacagcaaaaactcccag

SEQ ID NO: 108990 - DNA, 33 bp, Homo sapien
ggtcccccgtaagatggcagcaaaaactcccag

SEQ ID NO: 108991 - DNA, 33 bp, Homo sapien
gtggagaggagctatcaccttattcttggtgca

SEQ ID NO: 108992 - DNA, 33 bp, Homo sapien
gtggagaggagctatcgccttattcttggtgca

SEQ ID NO: 108993 - DNA, 33 bp, Homo sapien
cttgtggtctactccccacctacacatcctagg

SEQ ID NO: 108994 - DNA, 33 bp, Homo sapien
cttgtggtctactccctacctacacatcctagg

SEQ ID NO: 108995 - DNA, 33 bp, Homo sapien
ctgaggcttagagaaacgtacccgtgtgtaccg

SEQ ID NO: 108996 - DNA, 33 bp, Homo sapien
ctgaggcttagagaaatgtacccgtgtgtaccg

SEQ ID NO: 108997 - DNA, 33 bp, Homo sapien
gctgagctctgcgtgcagcaaggagccagctgg

SEQ ID NO: 108998 - DNA, 33 bp, Homo sapien
gctgagctctgcgtgcggcaaggagccagctgg

SEQ ID NO: 108999 - DNA, 33 bp, Homo sapien
atggagagaccagtgacgtcaaggccattgaaa

SEQ ID NO: 109000 - DNA, 33 bp, Homo sapien
atggagagaccagtgaggtcaaggccattgaaa

SEQ ID NO: 109001 - DNA, 33 bp, Homo sapien
caggccttagttgaccacatgagaatccgggga

SEQ ID NO: 109002 - DNA, 33 bp, Homo sapien
caggccttagttgaccgcatgagaatccgggga

SEQ ID NO: 109003 - DNA, 33 bp, Homo sapien
ctaattaaatttccagaccaggataacgggttg

SEQ ID NO: 109004 - DNA, 33 bp, Homo sapien
ctaattaaatttccaggccaggataacgggttg

SEQ ID NO: 109005 - DNA, 33 bp, Homo sapien
cctagctctggatgacaatacgtaaatagcaaa

SEQ ID NO: 109006 - DNA, 33 bp, Homo sapien
cctagctctggatgacgatacgtaaatagcaaa

SEQ ID NO: 109007 - DNA, 33 bp, Homo sapien
gctgtttttaaggatcacttagtgaaggcagct

SEQ ID NO: 109008 - DNA, 33 bp, Homo sapien
gctgtttttaaggatcgcttagtgaaggcagct

SEQ ID NO: 109009 - DNA, 33 bp, Homo sapien
ccaggtgaattctccaagttcacaaggagtgtc

SEQ ID NO: 109010 - DNA, 33 bp, Homo sapien
ccaggtgaattctccaggttcacaaggagtgtc

SEQ ID NO: 109011 - DNA, 33 bp, Homo sapien
gaagtcaaggtcaaaccattcattcccattctg

SEQ ID NO: 109012 - DNA, 33 bp, Homo sapien
gaagtcaaggtcaaacgattcattcccattctg

SEQ ID NO: 109013 - DNA, 33 bp, Homo sapien
gggatccagactcacacgtgcttgagcagatgc

SEQ ID NO: 109014 - DNA, 33 bp, Homo sapien
gggatccagactcacatgtgcttgagcagatgc

SEQ ID NO: 109015 - DNA, 33 bp, Homo sapien
gagagaatgggtaaaactgggaatagaggaagg

SEQ ID NO: 109016 - DNA, 33 bp, Homo sapien
gagagaatgggtaaaattgggaatagaggaagg

SEQ ID NO: 109017 - DNA, 33 bp, Homo sapien
cacatcctggcaaccacgtctgcactgtagctg

SEQ ID NO: 109018 - DNA, 33 bp, Homo sapien
cacatcctggcaaccatgtctgcactgtagctg

SEQ ID NO: 109019 - DNA, 33 bp, Homo sapien
atcttactgtatcacacgttttggcctgggagt

SEQ ID NO: 109020 - DNA, 33 bp, Homo sapien
atcttactgtatcacatgttttggcctgggagt

SEQ ID NO: 109021 - DNA, 33 bp, Homo sapien
tcacctgtgtcacagtgaatccctgactcacta

SEQ ID NO: 109022 - DNA, 33 bp, Homo sapien
tcacctgtgtcacagttaatccctgactcacta

SEQ ID NO: 109023 - DNA, 33 bp, Homo sapien
tctagttcctgtctcaaaacgatttcttagatt

SEQ ID NO: 109024 - DNA, 33 bp, Homo sapien
tctagttcctgtctcagaacgatttcttagatt

SEQ ID NO: 109025 - DNA, 33 bp, Homo sapien
tgcactgtgagggctacgagaagcgcaaacagt

SEQ ID NO: 109026 - DNA, 33 bp, Homo sapien
tgcactgtgagggctatgagaagcgcaaacagt

SEQ ID NO: 109027 - DNA, 33 bp, Homo sapien
tgccacatctgggaaaagctggccacacatccc

SEQ ID NO: 109028 - DNA, 33 bp, Homo sapien
tgccacatctgggaaaggctggccacacatccc

SEQ ID NO: 109029 - DNA, 33 bp, Homo sapien
ttatacctagagaaaccgtaaggactcctccaa

SEQ ID NO: 109030 - DNA, 33 bp, Homo sapien
ttatacctagagaaactgtaaggactcctccaa

SEQ ID NO: 109031 - DNA, 33 bp, Homo sapien
aatgttcatttatgcaacctgctttaataaaat

SEQ ID NO: 109032 - DNA, 33 bp, Homo sapien
aatgttcatttatgcatcctgctttaataaaat

SEQ ID NO: 109033 - DNA, 33 bp, Homo sapien
acacatatggtttgaactgggctccaccattta

SEQ ID NO: 109034 - DNA, 33 bp, Homo sapien
acacatatggtttgaattgggctccaccattta

SEQ ID NO: 109035 - DNA, 33 bp, Homo sapien
gtgtctgcagattgaacgagctgaaacctgata

SEQ ID NO: 109036 - DNA, 33 bp, Homo sapien
gtgtctgcagattgaatgagctgaaacctgata

SEQ ID NO: 109037 - DNA, 33 bp, Homo sapien
ctatatctgtatggaactgtcacaattatggag

SEQ ID NO: 109038 - DNA, 33 bp, Homo sapien
ctatatctgtatggaattgtcacaattatggag

SEQ ID NO: 109039 - DNA, 33 bp, Homo sapien
aactacctctactaaccaccatctaagcatgga

SEQ ID NO: 109040 - DNA, 33 bp, Homo sapien
aactacctctactaactaccatctaagcatgga

SEQ ID NO: 109041 - DNA, 33 bp, Homo sapien
gcacttgtgcttgataaaggcagagtaagttga

SEQ ID NO: 109042 - DNA, 33 bp, Homo sapien
gcacttgtgcttgatagaggcagagtaagttga

SEQ ID NO: 109043 - DNA, 33 bp, Homo sapien
atctaaatctattcaaaaaatttatgtgcatac

SEQ ID NO: 109044 - DNA, 33 bp, Homo sapien
atctaaatctattcaacaaatttatgtgcatac

SEQ ID NO: 109045 - DNA, 33 bp, Homo sapien
tgtgctttgaaggacacagcagccgtccgtgca

SEQ ID NO: 109046 - DNA, 33 bp, Homo sapien
tgtgctttgaaggacatagcagccgtccgtgca

SEQ ID NO: 109047 - DNA, 33 bp, Homo sapien
tggagggacctcacaacattttgctgaacgaaa

SEQ ID NO: 109048 - DNA, 33 bp, Homo sapien
tggagggacctcacaatattttgctgaacgaaa

SEQ ID NO: 109049 - DNA, 33 bp, Homo sapien
agcatgggcctgaatcaaaaatgactggcattc

SEQ ID NO: 109050 - DNA, 33 bp, Homo sapien
agcatgggcctgaatccaaaatgactggcattc

SEQ ID NO: 109051 - DNA, 33 bp, Homo sapien
tcttggatgctctttaacaggttaagcacaatt

SEQ ID NO: 109052 - DNA, 33 bp, Homo sapien
tcttggatgctctttatcaggttaagcacaatt

SEQ ID NO: 109053 - DNA, 33 bp, Homo sapien
cacagtagcctgcctacaggactcctctggctc

SEQ ID NO: 109054 - DNA, 33 bp, Homo sapien
cacagtagcctgcctataggactcctctggctc

SEQ ID NO: 109055 - DNA, 33 bp, Homo sapien
actcatacgtggtagcaccttctgctgccaggg

SEQ ID NO: 109056 - DNA, 33 bp, Homo sapien
actcatacgtggtagcgccttctgctgccaggg

SEQ ID NO: 109057 - DNA, 33 bp, Homo sapien
atgaccaagaaccggacggtggactgggcgttg

SEQ ID NO: 109058 - DNA, 33 bp, Homo sapien
atgaccaagaaccggatggtggactgggcgttg

SEQ ID NO: 109059 - DNA, 33 bp, Homo sapien
cctgacggtgtctgcaacgtggccaatgcttgc

SEQ ID NO: 109060 - DNA, 33 bp, Homo sapien
cctgacggtgtctgcagcgtggccaatgcttgc

SEQ ID NO: 109061 - DNA, 33 bp, Homo sapien
aatggtagcaatgaggaacacacaacattttat

SEQ ID NO: 109062 - DNA, 33 bp, Homo sapien
aatggtagcaatgagggacacacaacattttat

SEQ ID NO: 109063 - DNA, 33 bp, Homo sapien
cctacatggctatccacagaaaactggctaaat

SEQ ID NO: 109064 - DNA, 33 bp, Homo sapien
cctacatggctatccatagaaaactggctaaat

SEQ ID NO: 109065 - DNA, 33 bp, Homo sapien
aggctaagctggctaagctggtgagtgacaggg

SEQ ID NO: 109066 - DNA, 33 bp, Homo sapien
aggctaagctggctaatctggtgagtgacaggg

SEQ ID NO: 109067 - DNA, 33 bp, Homo sapien
cagtttccatcagacaagacttattatgctggg

SEQ ID NO: 109068 - DNA, 33 bp, Homo sapien
cagtttccatcagacatgacttattatgctggg

SEQ ID NO: 109069 - DNA, 33 bp, Homo sapien
gctcaatatttgaaaacgtaatctatcacatca

SEQ ID NO: 109070 - DNA, 33 bp, Homo sapien
gctcaatatttgaaaatgtaatctatcacatca

SEQ ID NO: 109071 - DNA, 33 bp, Homo sapien
gtaactaaattttcggaaacatacttcaggctc

SEQ ID NO: 109072 - DNA, 33 bp, Homo sapien
gtaactaaattttcgggaacatacttcaggctc

SEQ ID NO: 109073 - DNA, 33 bp, Homo sapien
gtctggcacaaactgacgtataagattttacac

SEQ ID NO: 109074 - DNA, 33 bp, Homo sapien
gtctggcacaaactgatgtataagattttacac

SEQ ID NO: 109075 - DNA, 33 bp, Homo sapien
caacatcactatgcggcacgtaactgtctatct

SEQ ID NO: 109076 - DNA, 33 bp, Homo sapien
caacatcactatgcggtacgtaactgtctatct

SEQ ID NO: 109077 - DNA, 33 bp, Homo sapien
tgttttggttgctatagctttataataagtctt

SEQ ID NO: 109078 - DNA, 33 bp, Homo sapien
tgttttggttgctatatctttataataagtctt

SEQ ID NO: 109079 - DNA, 33 bp, Homo sapien
gatgcagttgaataaaattaggtgtattttaga

SEQ ID NO: 109080 - DNA, 33 bp, Homo sapien
gatgcagttgaataaacttaggtgtattttaga

SEQ ID NO: 109081 - DNA, 33 bp, Homo sapien
aggaaaagaggtgtcaaagatgggcagataaca

SEQ ID NO: 109082 - DNA, 33 bp, Homo sapien
aggaaaagaggtgtcagagatgggcagataaca

SEQ ID NO: 109083 - DNA, 33 bp, Homo sapien; identical to SEQ ID NO: 109081

SEQ ID NO: 109084 - DNA, 33 bp, Homo sapien; identical to SEQ ID NO: 109082

SEQ ID NO: 109085 - DNA, 33 bp, Homo sapien
taagaggatcagttcccaatcagctgcattttc

SEQ ID NO: 109086 - DNA, 33 bp, Homo sapien
taagaggatcagttcctaatcagctgcattttc

SEQ ID NO: 109087 - DNA, 33 bp, Homo sapien
gctggaaaattgttacccattacatcaatcagt

SEQ ID NO: 109088 - DNA, 33 bp, Homo sapien
gctggaaaattgttacgcattacatcaatcagt

SEQ ID NO: 109089 - DNA, 33 bp, Homo sapien
tctaaaataaattccaactcagtagaaacaata

SEQ ID NO: 109090 - DNA, 33 bp, Homo sapien
tctaaaataaattccagctcagtagaaacaata

SEQ ID NO: 109091 - DNA, 33 bp, Homo sapien
gcattgaaatacattaagtcttgtcatcctcag

SEQ ID NO: 109092 - DNA, 33 bp, Homo sapien
gcattgaaatacattatgtcttgtcatcctcag

SEQ ID NO: 109093 - DNA, 33 bp, Homo sapien
gaactgttcatcatttcaaaaagtcactccata

SEQ ID NO: 109094 - DNA, 33 bp, Homo sapien
gaactgttcatcatttgaaaaagtcactccata

SEQ ID NO: 109095 - DNA, 33 bp, Homo sapien
aggctaagacattagaaccacttgaagctggag

SEQ ID NO: 109096 - DNA, 33 bp, Homo sapien
aggctaagacattagagccacttgaagctggag

SEQ ID NO: 109097 - DNA, 33 bp, Homo sapien
tatctctccagaaacacgaggagacagaagacg

SEQ ID NO: 109098 - DNA, 33 bp, Homo sapien
tatctctccagaaacatgaggagacagaagacg

SEQ ID NO: 109099 - DNA, 33 bp, Homo sapien
aggaatcctatgtcccaggatctcgaggaagca

SEQ ID NO: 109100 - DNA, 33 bp, Homo sapien
aggaatcctatgtcccgggatctcgaggaagca

SEQ ID NO: 109101 - DNA, 33 bp, Homo sapien
tgctttgcacgtacagcctcattctaatcatca

SEQ ID NO: 109102 - DNA, 33 bp, Homo sapien
tgctttgcacgtacaggctcattctaatcatca

SEQ ID NO: 109103 - DNA, 33 bp, Homo sapien
ggcaaggaaggaatggaactttgcgagcattga

SEQ ID NO: 109104 - DNA, 33 bp, Homo sapien
ggcaaggaaggaatgggactttgcgagcattga

SEQ ID NO: 109105 - DNA, 33 bp, Homo sapien
gctctggatgttgccaacaaaattggaataatc

SEQ ID NO: 109106 - DNA, 33 bp, Homo sapien
gctctggatgttgccagcaaaattggaataatc

SEQ ID NO: 109107 - DNA, 33 bp, Homo sapien
gtttctcagcggctaacctggaacatgtttgct

SEQ ID NO: 109108 - DNA, 33 bp, Homo sapien
gtttctcagcggctaatctggaacatgtttgct

SEQ ID NO: 109109 - DNA, 33 bp, Homo sapien
cagcctatactctatgcagcctcacagtgaact

SEQ ID NO: 109110 - DNA, 33 bp, Homo sapien
cagcctatactctatgtagcctcacagtgaact

SEQ ID NO: 109111 - DNA, 33 bp, Homo sapien
gcgagtaaagaagcaaacacttgacttagagca

SEQ ID NO: 109112 - DNA, 33 bp, Homo sapien
gcgagtaaagaagcaagcacttgacttagagca

SEQ ID NO: 109113 - DNA, 33 bp, Homo sapien
atttcacttcctaccacgaactaaaagaattgt

SEQ ID NO: 109114 - DNA, 33 bp, Homo sapien
atttcacttcctaccatgaactaaaagaattgt

SEQ ID NO: 109115 - DNA, 33 bp, Homo sapien
taggagacatagattacgatgcagaagctaaga

SEQ ID NO: 109116 - DNA, 33 bp, Homo sapien
taggagacatagattatgatgcagaagctaaga

SEQ ID NO: 109117 - DNA, 33 bp, Homo sapien
tatacatactattaaaagggatatggttcagtg

SEQ ID NO: 109118 - DNA, 33 bp, Homo sapien
tatacatactattaaatgggatatggttcagtg

SEQ ID NO: 109119 - DNA, 33 bp, Homo sapien
gggctggtgactaaggaaagcagcatatggcag

SEQ ID NO: 109120 - DNA, 33 bp, Homo sapien
gggctggtgactaagggaagcagcatatggcag

SEQ ID NO: 109121 - DNA, 33 bp, Homo sapien
ttgttctggttgatcccgagcttgctcaacttg

SEQ ID NO: 109122 - DNA, 33 bp, Homo sapien
ttgttctggttgatcctgagcttgctcaacttg

SEQ ID NO: 109123 - DNA, 33 bp, Homo sapien
atgactgtgaagaagacgatgacggtggtgctg

SEQ ID NO: 109124 - DNA, 33 bp, Homo sapien
atgactgtgaagaagatgatgacggtggtgctg

SEQ ID NO: 109125 - DNA, 33 bp, Homo sapien
gcatcatccaatagcactacaggagtcaggact

SEQ ID NO: 109126 - DNA, 33 bp, Homo sapien
gcatcatccaatagcagtacaggagtcaggact

SEQ ID NO: 109127 - DNA, 33 bp, Homo sapien
ggtttgtgtgtgaggaagagagatgcccagggg

SEQ ID NO: 109128 - DNA, 33 bp, Homo sapien
ggtttgtgtgtgaggaggagagatgcccagggg

SEQ ID NO: 109129 - DNA, 33 bp, Homo sapien
gtgggcaaccaatttacagaggcaagtttggca

SEQ ID NO: 109130 - DNA, 33 bp, Homo sapien
gtgggcaaccaatttagagaggcaagtttggca

SEQ ID NO: 109131 - DNA, 33 bp, Homo sapien
aatggacattacaacacggatgaacctcagaag

SEQ ID NO: 109132 - DNA, 33 bp, Homo sapien
aatggacattacaacatggatgaacctcagaag

SEQ ID NO: 109133 - DNA, 33 bp, Homo sapien
tgtttcactgtttaccaccacacttgttgccag

SEQ ID NO: 109134 - DNA, 33 bp, Homo sapien
tgtttcactgtttaccgccacacttgttgccag

SEQ ID NO: 109135 - DNA, 33 bp, Homo sapien
actggacccagacttacggtggaagttccagca

SEQ ID NO: 109136 - DNA, 33 bp, Homo sapien
actggacccagacttatggtggaagttccagca

SEQ ID NO: 109137 - DNA, 33 bp, Homo sapien
gctctaaaaaagcttacctacagaagagcagtt

SEQ ID NO: 109138 - DNA, 33 bp, Homo sapien
gctctaaaaaagcttagctacagaagagcagtt

SEQ ID NO: 109139 - DNA, 33 bp, Homo sapien
catcagggaggcctcacagagaaatcgaagagt

SEQ ID NO: 109140 - DNA, 33 bp, Homo sapien
catcagggaggcctcatagagaaatcgaagagt

SEQ ID NO: 109141 - DNA, 33 bp, Homo sapien
tgaagaaaatactagaactgtaaggaaggctgt

SEQ ID NO: 109142 - DNA, 33 bp, Homo sapien
tgaagaaaatactagacctgtaaggaaggctgt

SEQ ID NO: 109143 - DNA, 33 bp, Homo sapien
aattatatgttaataacgcttttgggctttacc

SEQ ID NO: 109144 - DNA, 33 bp, Homo sapien
aattatatgttaataaggcttttgggctttacc

SEQ ID NO: 109145 - DNA, 33 bp, Homo sapien
gatacaaacagggaacaaaaagtcctgcctatg

SEQ ID NO: 109146 - DNA, 33 bp, Homo sapien
gatacaaacagggaacgaaaagtcctgcctatg

SEQ ID NO: 109147 - DNA, 33 bp, Homo sapien; identical to SEQ ID NO: 109145

SEQ ID NO: 109148 - DNA, 33 bp, Homo sapien; identical to SEQ ID NO: 109146

SEQ ID NO: 109149 - DNA, 33 bp, Homo sapien
cactgttcatcactccaaggcctgatgttaacc

SEQ ID NO: 109150 - DNA, 33 bp, Homo sapien
cactgttcatcactccgaggcctgatgttaacc

SEQ ID NO: 109151 - DNA, 33 bp, Homo sapien; identical to SEQ ID NO: 109149

SEQ ID NO: 109152 - DNA, 33 bp, Homo sapien; identical to SEQ ID NO: 109150

SEQ ID NO: 109153 - DNA, 33 bp, Homo sapien
tggtcccactttgacaagaagttcctcagtggg

SEQ ID NO: 109154 - DNA, 33 bp, Homo sapien
tggtcccactttgacaggaagttcctcagtggg

SEQ ID NO: 109155 - DNA, 33 bp, Homo sapien
gatcctcaatgtcttccatgagctgaacctgaa

SEQ ID NO: 109156 - DNA, 33 bp, Homo sapien
gatcctcaatgtcttcgatgagctgaacctgaa

SEQ ID NO: 109157 - DNA, 33 bp, Homo sapien
ctgcccaggtagagccccgtcacaatttcacca

SEQ ID NO: 109158 - DNA, 33 bp, Homo sapien
ctgcccaggtagagcctcgtcacaatttcacca

SEQ ID NO: 109159 - DNA, 33 bp, Homo sapien; identical to SEQ ID NO: 109157

SEQ ID NO: 109160 - DNA, 33 bp, Homo sapien; identical to SEQ ID NO: 109158

SEQ ID NO: 109161 - DNA, 33 bp, Homo sapien
catcaatagtgccagccgcaaaactgtagccca

SEQ ID NO: 109162 - DNA, 33 bp, Homo sapien
catcaatagtgccagctgcaaaactgtagccca

SEQ ID NO: 109163 - DNA, 33 bp, Homo sapien
atacagttatctcctaataaaatgaaaaaacaa

SEQ ID NO: 109164 - DNA, 33 bp, Homo sapien
atacagttatctcctagtaaaatgaaaaaacaa

SEQ ID NO: 109165 - DNA, 33 bp, Homo sapien
tgatcattgttctggtaaatgctccagccgctc

SEQ ID NO: 109166 - DNA, 33 bp, Homo sapien
tgatcattgttctggtcaatgctccagccgctc

SEQ ID NO: 109167 - DNA, 33 bp, Homo sapien
aatttctaagccctgacccagtactattttctg

SEQ ID NO: 109168 - DNA, 33 bp, Homo sapien
aatttctaagccctgatccagtactattttctg

SEQ ID NO: 109169 - DNA, 33 bp, Homo sapien
gagttgccaaggcatcaaatatcagtgtcacaa

SEQ ID NO: 109170 - DNA, 33 bp, Homo sapien
gagttgccaaggcatcgaatatcagtgtcacaa

SEQ ID NO: 109171 - DNA, 33 bp, Homo sapien
tatcagtgtcacaaggaatttgtagtcagaaag

SEQ ID NO: 109172 - DNA, 33 bp, Homo sapien
tatcagtgtcacaaggcatttgtagtcagaaag

SEQ ID NO: 109173 - DNA, 33 bp, Homo sapien
ttctaggtggagttagaatccatgtcttctcat

SEQ ID NO: 109174 - DNA, 33 bp, Homo sapien
ttctaggtggagttagcatccatgtcttctcat

SEQ ID NO: 109175 - DNA, 33 bp, Homo sapien
ttctcattcccaagccaagattttcttgaagac

SEQ ID NO: 109176 - DNA, 33 bp, Homo sapien
ttctcattcccaagccgagattttcttgaagac

SEQ ID NO: 109177 - DNA, 33 bp, Homo sapien
agaacctggaaattggaatttttagatatctca

SEQ ID NO: 109178 - DNA, 33 bp, Homo sapien
agaacctggaaattgggatttttagatatctca

SEQ ID NO: 109179 - DNA, 33 bp, Homo sapien
attactagaccttgacaaatcttgagctgtgct

SEQ ID NO: 109180 - DNA, 33 bp, Homo sapien
attactagaccttgacgaatcttgagctgtgct

SEQ ID NO: 109181 - DNA, 33 bp, Homo sapien
tcttgagctgtgcttacatcaatggaaaaacta

SEQ ID NO: 109182 - DNA, 33 bp, Homo sapien
tcttgagctgtgcttagatcaatggaaaaacta

SEQ ID NO: 109183 - DNA, 33 bp, Homo sapien
aggctgcttaagtacacgtagaactatcagcag

SEQ ID NO: 109184 - DNA, 33 bp, Homo sapien
aggctgcttaagtacatgtagaactatcagcag

SEQ ID NO: 109185 - DNA, 33 bp, Homo sapien
ggacagtttctcatgacaaaagtattccagcta

SEQ ID NO: 109186 - DNA, 33 bp, Homo sapien
ggacagtttctcatgataaaagtattccagcta

SEQ ID NO: 109187 - DNA, 33 bp, Homo sapien
cttacctcttctcacaatcactgagacaaaagg

SEQ ID NO: 109188 - DNA, 33 bp, Homo sapien
cttacctcttctcacagtcactgagacaaaagg

SEQ ID NO: 109189 - DNA, 33 bp, Homo sapien
gccgagggacgttaccagaaagttgcaggcggg

SEQ ID NO: 109190 - DNA, 33 bp, Homo sapien
gccgagggacgttaccggaaagttgcaggcggg

SEQ ID NO: 109191 - DNA, 33 bp, Homo sapien
ttactgtccagtcaaacgatgaagtgacataaa

SEQ ID NO: 109192 - DNA, 33 bp, Homo sapien
ttactgtccagtcaaatgatgaagtgacataaa

SEQ ID NO: 109193 - DNA, 33 bp, Homo sapien
tcccacatcgtatataacaatctgtccttcaga

SEQ ID NO: 109194 - DNA, 33 bp, Homo sapien
tcccacatcgtatatagcaatctgtccttcaga

SEQ ID NO: 109195 - DNA, 33 bp, Homo sapien; identical to SEQ ID NO: 109193

SEQ ID NO: 109196 - DNA, 33 bp, Homo sapien; identical to SEQ ID NO: 109194

SEQ ID NO: 109197 - DNA, 33 bp, Homo sapien
accccagaggtactcacagttcaatactgtaat

SEQ ID NO: 109198 - DNA, 33 bp, Homo sapien
accccagaggtactcatagttcaatactgtaat

SEQ ID NO: 109199 - DNA, 33 bp, Homo sapien
aataagtccctcgatcaattcatcatgcctgtg

SEQ ID NO: 109200 - DNA, 33 bp, Homo sapien
aataagtccctcgatcgattcatcatgcctgtg

SEQ ID NO: 109201 - DNA, 33 bp, Homo sapien
gcaatcagaaacataaatgaatatgaggaaact

SEQ ID NO: 109202 - DNA, 33 bp, Homo sapien
gcaatcagaaacataagtgaatatgaggaaact

SEQ ID NO: 109203 - DNA, 33 bp, Homo sapien
tgctacagaatgtaagcaaagcagccaatttgt

SEQ ID NO: 109204 - DNA, 33 bp, Homo sapien
tgctacagaatgtaagtaaagcagccaatttgt

SEQ ID NO: 109205 - DNA, 33 bp, Homo sapien
tgaggatagaaagaaaaggagaaaacgattctt

SEQ ID NO: 109206 - DNA, 33 bp, Homo sapien
tgaggatagaaagaaagggagaaaacgattctt

SEQ ID NO: 109207 - DNA, 33 bp, Homo sapien
ccacaatctctgtaccaattgcatcgaacacac

SEQ ID NO: 109208 - DNA, 33 bp, Homo sapien
ccacaatctctgtaccgattgcatcgaacacac

SEQ ID NO: 109209 - DNA, 33 bp, Homo sapien
gcccatgaggctcatgcaagcagctgtaatgtt

SEQ ID NO: 109210 - DNA, 33 bp, Homo sapien
gcccatgaggctcatggaagcagctgtaatgtt

SEQ ID NO: 109211 - DNA, 33 bp, Homo sapien
ggtgagggtatggcaccaacttccttttcacag

SEQ ID NO: 109212 - DNA, 33 bp, Homo sapien
ggtgagggtatggcactaacttccttttcacag

SEQ ID NO: 109213 - DNA, 33 bp, Homo sapien
cagattttccagaaaacgagctttaccagagga

SEQ ID NO: 109214 - DNA, 33 bp, Homo sapien
cagattttccagaaaatgagctttaccagagga

SEQ ID NO: 109215 - DNA, 33 bp, Homo sapien
tattatttctctgagccattatattttgtgaag

SEQ ID NO: 109216 - DNA, 33 bp, Homo sapien
tattatttctctgagcgattatattttgtgaag

SEQ ID NO: 109217 - DNA, 33 bp, Homo sapien
taagtacactaattacagcattttaatggcata

SEQ ID NO: 109218 - DNA, 33 bp, Homo sapien
taagtacactaattacggcattttaatggcata

SEQ ID NO: 109219 - DNA, 33 bp, Homo sapien
cccagacctggcctccgagctctttctggaagc

SEQ ID NO: 109220 - DNA, 33 bp, Homo sapien
cccagacctggcctcctagctctttctggaagc

SEQ ID NO: 109221 - DNA, 33 bp, Homo sapien
ggaagggaggttagaactgggggctaagttggt

SEQ ID NO: 109222 - DNA, 33 bp, Homo sapien
ggaagggaggttagaattgggggctaagttggt

SEQ ID NO: 109223 - DNA, 33 bp, Homo sapien
aactgcaaaaatggaccgctatcaaagttggca

SEQ ID NO: 109224 - DNA, 33 bp, Homo sapien
aactgcaaaaatggacggctatcaaagttggca

SEQ ID NO: 109225 - DNA, 33 bp, Homo sapien
gcccggctgaccgttgcaaattctataaaatat

SEQ ID NO: 109226 - DNA, 33 bp, Homo sapien
gcccggctgaccgttggaaattctataaaatat

SEQ ID NO: 109227 - DNA, 33 bp, Homo sapien
aaaacaatttggacgcccaaggagaataagatg

SEQ ID NO: 109228 - DNA, 33 bp, Homo sapien
aaaacaatttggacgcgcaaggagaataagatg

SEQ ID NO: 109229 - DNA, 33 bp, Homo sapien
gaataccacaaaataccgcaatgcaacgagacc

SEQ ID NO: 109230 - DNA, 33 bp, Homo sapien
gaataccacaaaatactgcaatgcaacgagacc

SEQ ID NO: 109231 - DNA, 33 bp, Homo sapien
catgactttactctgaaagcttacagttgactt

SEQ ID NO: 109232 - DNA, 33 bp, Homo sapien
catgactttactctgatagcttacagttgactt

SEQ ID NO: 109233 - DNA, 33 bp, Homo sapien
cagatgttgtgaaatccaagtattaaacattat

SEQ ID NO: 109234 - DNA, 33 bp, Homo sapien
cagatgttgtgaaatctaagtattaaacattat

SEQ ID NO: 109235 - DNA, 33 bp, Homo sapien
tttataggtgagtagacagaggtagttttagta

SEQ ID NO: 109236 - DNA, 33 bp, Homo sapien
tttataggtgagtagatagaggtagttttagta

SEQ ID NO: 109237 - DNA, 33 bp, Homo sapien
ctctgggcctgtatcacatccatactcaagtgt

SEQ ID NO: 109238 - DNA, 33 bp, Homo sapien
ctctgggcctgtatcatatccatactcaagtgt

SEQ ID NO: 109239 - DNA, 33 bp, Homo sapien
tcccttctctcatacaccatcaaaatgtcctag

SEQ ID NO: 109240 - DNA, 33 bp, Homo sapien
tcccttctctcatacatcatcaaaatgtcctag

SEQ ID NO: 109241 - DNA, 33 bp, Homo sapien
gtaatgaattgattgacggatatttgttttcaa

SEQ ID NO: 109242 - DNA, 33 bp, Homo sapien
gtaatgaattgattgatggatatttgttttcaa

SEQ ID NO: 109243 - DNA, 33 bp, Homo sapien
catcctttccactcaccgctgactgtgacttct

SEQ ID NO: 109244 - DNA, 33 bp, Homo sapien
catcctttccactcactgctgactgtgacttct

SEQ ID NO: 109245 - DNA, 33 bp, Homo sapien
acgtatatataacatcaaacatatgaaccatag

SEQ ID NO: 109246 - DNA, 33 bp, Homo sapien
acgtatatataacatcgaacatatgaaccatag

SEQ ID NO: 109247 - DNA, 33 bp, Homo sapien
catggtgtgaacatcacagaaaatgtatctgga

SEQ ID NO: 109248 - DNA, 33 bp, Homo sapien
catggtgtgaacatcatagaaaatgtatctgga

SEQ ID NO: 109249 - DNA, 33 bp, Homo sapien
ttacatttcatcagaactactgccaaagcttcc

SEQ ID NO: 109250 - DNA, 33 bp, Homo sapien
ttacatttcatcagaattactgccaaagcttcc

SEQ ID NO: 109251 - DNA, 33 bp, Homo sapien
agaatgtactaagtcaaagaggatgctcagaga

SEQ ID NO: 109252 - DNA, 33 bp, Homo sapien
agaatgtactaagtcagagaggatgctcagaga

SEQ ID NO: 109253 - DNA, 33 bp, Homo sapien
aacacattcaaaccaccgcactcttatctatat

SEQ ID NO: 109254 - DNA, 33 bp, Homo sapien
aacacattcaaaccactgcactcttatctatat

SEQ ID NO: 109255 - DNA, 33 bp, Homo sapien
gtatgttatgatcaaacgtagttggccaccttc

SEQ ID NO: 109256 - DNA, 33 bp, Homo sapien
gtatgttatgatcaaatgtagttggccaccttc

SEQ ID NO: 109257 - DNA, 33 bp, Homo sapien
acgcactaaaatagaactgcaggcatcactgtc

SEQ ID NO: 109258 - DNA, 33 bp, Homo sapien
acgcactaaaatagaattgcaggcatcactgtc

SEQ ID NO: 109259 - DNA, 33 bp, Homo sapien
cctatgggactgctaacggttattttatggtaa

SEQ ID NO: 109260 - DNA, 33 bp, Homo sapien
cctatgggactgctaatggttattttatggtaa

SEQ ID NO: 109261 - DNA, 33 bp, Homo sapien
acctgtaaaaaaacaactctctgaggttactaa

SEQ ID NO: 109262 - DNA, 33 bp, Homo sapien
acctgtaaaaaaacaattctctgaggttactaa

SEQ ID NO: 109263 - DNA, 33 bp, Homo sapien
acctgagatctgattacaaaaaaaaaggtgact

SEQ ID NO: 109264 - DNA, 33 bp, Homo sapien
acctgagatctgattataaaaaaaaaggtgact

SEQ ID NO: 109265 - DNA, 33 bp, Homo sapien
aatctaacactgaagaaactggaaaataaatgt

SEQ ID NO: 109266 - DNA, 33 bp, Homo sapien
aatctaacactgaagagactggaaaataaatgt

SEQ ID NO: 109267 - DNA, 33 bp, Homo sapien
tgtgatcttaagtaaaacactttgatttgatgg

SEQ ID NO: 109268 - DNA, 33 bp, Homo sapien
tgtgatcttaagtaaagcactttgatttgatgg

SEQ ID NO: 109269 - DNA, 33 bp, Homo sapien
aagctgtgtggtgaacaggcggtgttacttgaa

SEQ ID NO: 109270 - DNA, 33 bp, Homo sapien
aagctgtgtggtgaaccggcggtgttacttgaa

SEQ ID NO: 109271 - DNA, 33 bp, Homo sapien
acaagttctctaaatcaagcaactacatcagag

SEQ ID NO: 109272 - DNA, 33 bp, Homo sapien
acaagttctctaaatctagcaactacatcagag

SEQ ID NO: 109273 - DNA, 33 bp, Homo sapien
cattcctggtagccagaagttgtagataatgct

SEQ ID NO: 109274 - DNA, 33 bp, Homo sapien
cattcctggtagccaggagttgtagataatgct

SEQ ID NO: 109275 - DNA, 33 bp, Homo sapien
tgtactatcttacagcaaaattattcttaagac

SEQ ID NO: 109276 - DNA, 33 bp, Homo sapien
tgtactatcttacagctaaattattcttaagac

SEQ ID NO: 109277 - DNA, 33 bp, Homo sapien
gactaaccagttacaacagaatgggtgcctata

SEQ ID NO: 109278 - DNA, 33 bp, Homo sapien
gactaaccagttacaatagaatgggtgcctata

SEQ ID NO: 109279 - DNA, 33 bp, Homo sapien
ccgatgagggcaagaccaatctctaattcagat

SEQ ID NO: 109280 - DNA, 33 bp, Homo sapien
ccgatgagggcaagactaatctctaattcagat

SEQ ID NO: 109281 - DNA, 33 bp, Homo sapien
attcagatttggaactcaggcagatttcaaaag

SEQ ID NO: 109282 - DNA, 33 bp, Homo sapien
attcagatttggaacttaggcagatttcaaaag

SEQ ID NO: 109283 - DNA, 33 bp, Homo sapien
cagtgtccctattgcactgaattgtgtaaacct

SEQ ID NO: 109284 - DNA, 33 bp, Homo sapien
cagtgtccctattgcattgaattgtgtaaacct

SEQ ID NO: 109285 - DNA, 33 bp, Homo sapien
taacaactacactgaacgcgcaaagaaacaggg

SEQ ID NO: 109286 - DNA, 33 bp, Homo sapien
taacaactacactgaatgcgcaaagaaacaggg

SEQ ID NO: 109287 - DNA, 33 bp, Homo sapien
tgagaagattgagagcaaatgtatcagactcca

SEQ ID NO: 109288 - DNA, 33 bp, Homo sapien
tgagaagattgagagcgaatgtatcagactcca

SEQ ID NO: 109289 - DNA, 33 bp, Homo sapien
ggtgcacatggatataaagatgcgaacaacaga

SEQ ID NO: 109290 - DNA, 33 bp, Homo sapien
ggtgcacatggatatacagatgcgaacaacaga

SEQ ID NO: 109291 - DNA, 33 bp, Homo sapien
agcccctggtccaagacgtggctttaataataa

SEQ ID NO: 109292 - DNA, 33 bp, Homo sapien
agcccctggtccaagatgtggctttaataataa

SEQ ID NO: 109293 - DNA, 33 bp, Homo sapien
ttaaatggcacagtaaatacaagctaaggaagg

SEQ ID NO: 109294 - DNA, 33 bp, Homo sapien
ttaaatggcacagtaagtacaagctaaggaagg

SEQ ID NO: 109295 - DNA, 33 bp, Homo sapien
ctaagctgcgtgtgaaagagagagagagagaat

SEQ ID NO: 109296 - DNA, 33 bp, Homo sapien
ctaagctgcgtgtgaatgagagagagagagaat

SEQ ID NO: 109297 - DNA, 33 bp, Homo sapien
ctccatttctcactcacgtatttttttctgtgg

SEQ ID NO: 109298 - DNA, 33 bp, Homo sapien
ctccatttctcactcaggtatttttttctgtgg

SEQ ID NO: 109299 - DNA, 33 bp, Homo sapien
accagctagaatgcaactattgctcatgttatg

SEQ ID NO: 109300 - DNA, 33 bp, Homo sapien
accagctagaatgcaagtattgctcatgttatg

SEQ ID NO: 109301 - DNA, 33 bp, Homo sapien
aagtactagggtgaagacacaaaaaaagaggta

SEQ ID NO: 109302 - DNA, 33 bp, Homo sapien
aagtactagggtgaagccacaaaaaaagaggta

SEQ ID NO: 109303 - DNA, 33 bp, Homo sapien
catgacacgtttagaacagtaagagaactgtga

SEQ ID NO: 109304 - DNA, 33 bp, Homo sapien
catgacacgtttagaatagtaagagaactgtga

SEQ ID NO: 109305 - DNA, 33 bp, Homo sapien
cctatcaccctccaaaggcaatgtttctcattt

SEQ ID NO: 109306 - DNA, 33 bp, Homo sapien
cctatcaccctccaaatgcaatgtttctcattt

SEQ ID NO: 109307 - DNA, 33 bp, Homo sapien
tcaaactgcacttaataagaatggtttccttag

SEQ ID NO: 109308 - DNA, 33 bp, Homo sapien
tcaaactgcacttaatgagaatggtttccttag

SEQ ID NO: 109309 - DNA, 33 bp, Homo sapien
aagacttggagtacatcagagcatctcataagt

SEQ ID NO: 109310 - DNA, 33 bp, Homo sapien
aagacttggagtacattagagcatctcataagt

SEQ ID NO: 109311 - DNA, 33 bp, Homo sapien
ttgtggacacaagttcacaagttttcatgtctt

SEQ ID NO: 109312 - DNA, 33 bp, Homo sapien
ttgtggacacaagttcgcaagttttcatgtctt

SEQ ID NO: 109313 - DNA, 33 bp, Homo sapien
agtatgaatctataaaacaccagcaagtggagc

SEQ ID NO: 109314 - DNA, 33 bp, Homo sapien
agtatgaatctataaaccaccagcaagtggagc

SEQ ID NO: 109315 - DNA, 33 bp, Homo sapien
aaaattaaattttacaacctgctgttaaggact

SEQ ID NO: 109316 - DNA, 33 bp, Homo sapien
aaaattaaattttacaccctgctgttaaggact

SEQ ID NO: 109317 - DNA, 33 bp, Homo sapien
gagggcctagaaaatgaaagtgtcactaaaaat

SEQ ID NO: 109318 - DNA, 33 bp, Homo sapien
gagggcctagaaaatggaagtgtcactaaaaat

SEQ ID NO: 109319 - DNA, 33 bp, Homo sapien
tcctactttattgtcacctcattggcgcattta

SEQ ID NO: 109320 - DNA, 33 bp, Homo sapien
tcctactttattgtcatctcattggcgcattta

SEQ ID NO: 109321 - DNA, 33 bp, Homo sapien
gaaaaatctaccttcaatctaggccttgaacag

SEQ ID NO: 109322 - DNA, 33 bp, Homo sapien
gaaaaatctaccttcagtctaggccttgaacag

SEQ ID NO: 109323 - DNA, 33 bp, Homo sapien
aaatcacagaaatacaaggaaataagagaccat

SEQ ID NO: 109324 - DNA, 33 bp, Homo sapien
aaatcacagaaatacagggaaataagagaccat

SEQ ID NO: 109325 - DNA, 33 bp, Homo sapien
agtgaggatgtaggaagatctttttagctacat

SEQ ID NO: 109326 - DNA, 33 bp, Homo sapien
agtgaggatgtaggaatatctttttagctacat

SEQ ID NO: 109327 - DNA, 33 bp, Homo sapien
ctatcctgctccccacactgttaatccattccc

SEQ ID NO: 109328 - DNA, 33 bp, Homo sapien
ctatcctgctccccacgctgttaatccattccc

SEQ ID NO: 109329 - DNA, 33 bp, Homo sapien
cttttatctatgagaaatatccatacatccatt

SEQ ID NO: 109330 - DNA, 33 bp, Homo sapien
cttttatctatgagaattatccatacatccatt

SEQ ID NO: 109331 - DNA, 33 bp, Homo sapien
aaaccacacaactatacggaaattgatcaacct

SEQ ID NO: 109332 - DNA, 33 bp, Homo sapien
aaaccacacaactatatggaaattgatcaacct

SEQ ID NO: 109333 - DNA, 33 bp, Homo sapien
tataaggcataaaaaacgtgtacaaaatatgca

SEQ ID NO: 109334 - DNA, 33 bp, Homo sapien
tataaggcataaaaaatgtgtacaaaatatgca

SEQ ID NO: 109335 - DNA, 33 bp, Homo sapien
cagctctccacaaagcactgaattagccatctc

SEQ ID NO: 109336 - DNA, 33 bp, Homo sapien
cagctctccacaaagcgctgaattagccatctc

SEQ ID NO: 109337 - DNA, 33 bp, Homo sapien
tggagggttgatgtaaatgagttgaaacagcac

SEQ ID NO: 109338 - DNA, 33 bp, Homo sapien
tggagggttgatgtaattgagttgaaacagcac

SEQ ID NO: 109339 - DNA, 33 bp, Homo sapien
tggtaaggaagctgtacgttgatgttcactgat

SEQ ID NO: 109340 - DNA, 33 bp, Homo sapien
tggtaaggaagctgtatgttgatgttcactgat

SEQ ID NO: 109341 - DNA, 33 bp, Homo sapien
aagtgtcaacgattaacgatgagaactctgcct

SEQ ID NO: 109342 - DNA, 33 bp, Homo sapien
aagtgtcaacgattaatgatgagaactctgcct

SEQ ID NO: 109343 - DNA, 33 bp, Homo sapien
ataaacagtggtagcacatcacaaaattatacc

SEQ ID NO: 109344 - DNA, 33 bp, Homo sapien
ataaacagtggtagcatatcacaaaattatacc

SEQ ID NO: 109345 - DNA, 33 bp, Homo sapien
taaattgacccttaaaattgtgacacattaact

SEQ ID NO: 109346 - DNA, 33 bp, Homo sapien
taaattgacccttaaagttgtgacacattaact

SEQ ID NO: 109347 - DNA, 33 bp, Homo sapien
aacaaactcattaggaaaatgtgaaatgtgggc

SEQ ID NO: 109348 - DNA, 33 bp, Homo sapien
aacaaactcattaggataatgtgaaatgtgggc

SEQ ID NO: 109349 - DNA, 33 bp, Homo sapien
tttcagtccccaggtccctaacatcaaatgtat

SEQ ID NO: 109350 - DNA, 33 bp, Homo sapien
tttcagtccccaggtctctaacatcaaatgtat

SEQ ID NO: 109351 - DNA, 33 bp, Homo sapien
tagctgagtgatttacactgactgacactatgc

SEQ ID NO: 109352 - DNA, 33 bp, Homo sapien
tagctgagtgatttacgctgactgacactatgc

SEQ ID NO: 109353 - DNA, 33 bp, Homo sapien
aagaacacggaagcataagaaggaaggcttaat

SEQ ID NO: 109354 - DNA, 33 bp, Homo sapien
aagaacacggaagcatgagaaggaaggcttaat

SEQ ID NO: 109355 - DNA, 33 bp, Homo sapien
tggcatcatctatgccacacagatttccttcct

SEQ ID NO: 109356 - DNA, 33 bp, Homo sapien
tggcatcatctatgcctcacagatttccttcct

SEQ ID NO: 109357 - DNA, 33 bp, Homo sapien
ttcaacccaggaatagaaagcaatactgtcggg

SEQ ID NO: 109358 - DNA, 33 bp, Homo sapien
ttcaacccaggaataggaagcaatactgtcggg

SEQ ID NO: 109359 - DNA, 33 bp, Homo sapien
caactcacagaataaacgactgtagttttaaat

SEQ ID NO: 109360 - DNA, 33 bp, Homo sapien
caactcacagaataaatgactgtagttttaaat

SEQ ID NO: 109361 - DNA, 33 bp, Homo sapien
ccatcacccaattagaagccagagtactgaaag

SEQ ID NO: 109362 - DNA, 33 bp, Homo sapien
ccatcacccaattagaggccagagtactgaaag

SEQ ID NO: 109363 - DNA, 33 bp, Homo sapien
aattagaggcatcatccctgtaagctccatgtt

SEQ ID NO: 109364 - DNA, 33 bp, Homo sapien
aattagaggcatcatctctgtaagctccatgtt

SEQ ID NO: 109365 - DNA, 33 bp, Homo sapien
ggctctgatggcataaagggatcttccaggcct

SEQ ID NO: 109366 - DNA, 33 bp, Homo sapien
ggctctgatggcataaggggatcttccaggcct

SEQ ID NO: 109367 - DNA, 33 bp, Homo sapien
tgggtgatcaaaattaacataaccaagctgggg

SEQ ID NO: 109368 - DNA, 33 bp, Homo sapien
tgggtgatcaaaattagcataaccaagctgggg

SEQ ID NO: 109369 - DNA, 33 bp, Homo sapien
agtgggcagataaagaaccaagccctagtttga

SEQ ID NO: 109370 - DNA, 33 bp, Homo sapien
agtgggcagataaagagccaagccctagtttga

SEQ ID NO: 109371 - DNA, 33 bp, Homo sapien
caatagcatgataaggcaggcactaatctcatc

SEQ ID NO: 109372 - DNA, 33 bp, Homo sapien
caatagcatgataaggtaggcactaatctcatc

SEQ ID NO: 109373 - DNA, 33 bp, Homo sapien
catatgcacacagaagacccttgaataacactg

SEQ ID NO: 109374 - DNA, 33 bp, Homo sapien
catatgcacacagaaggcccttgaataacactg

SEQ ID NO: 109375 - DNA, 33 bp, Homo sapien
atatctctgggaactgaataagaaaccagagta

SEQ ID NO: 109376 - DNA, 33 bp, Homo sapien
atatctctgggaactggataagaaaccagagta

SEQ ID NO: 109377 - DNA, 33 bp, Homo sapien
cttgagagaaatgcaaatgctaagatgactcag

SEQ ID NO: 109378 - DNA, 33 bp, Homo sapien
cttgagagaaatgcaagtgctaagatgactcag

SEQ ID NO: 109379 - DNA, 33 bp, Homo sapien
gtagctttctgatcaacggacaaagtaaccttt

SEQ ID NO: 109380 - DNA, 33 bp, Homo sapien
gtagctttctgatcaatggacaaagtaaccttt

SEQ ID NO: 109381 - DNA, 33 bp, Homo sapien
agaagtctttgaagaacgaaaagtgggagtcac

SEQ ID NO: 109382 - DNA, 33 bp, Homo sapien
agaagtctttgaagaatgaaaagtgggagtcac

SEQ ID NO: 109383 - DNA, 33 bp, Homo sapien
agcaaccattcctgcaaggtttttttggttatt

SEQ ID NO: 109384 - DNA, 33 bp, Homo sapien
agcaaccattcctgcagggtttttttggttatt

SEQ ID NO: 109385 - DNA, 33 bp, Homo sapien
aaagtagaatgtgatcaaaaaaactctcagttg

SEQ ID NO: 109386 - DNA, 33 bp, Homo sapien
aaagtagaatgtgatcgaaaaaactctcagttg

SEQ ID NO: 109387 - DNA, 33 bp, Homo sapien
tatgtagcttttaataactgtggtgtttctgag

SEQ ID NO: 109388 - DNA, 33 bp, Homo sapien
tatgtagcttttaatagctgtggtgtttctgag

SEQ ID NO: 109389 - DNA, 33 bp, Homo sapien
aaagcagaaagttcaacgggaaataattttgaa

SEQ ID NO: 109390 - DNA, 33 bp, Homo sapien
aaagcagaaagttcaaggggaaataattttgaa

SEQ ID NO: 109391 - DNA, 33 bp, Homo sapien
acaatcaccacctaaccgtcacctactgccaca

SEQ ID NO: 109392 - DNA, 33 bp, Homo sapien
acaatcaccacctaactgtcacctactgccaca

SEQ ID NO: 109393 - DNA, 33 bp, Homo sapien
acatcaagtccactgacaagtccaaagcaagca

SEQ ID NO: 109394 - DNA, 33 bp, Homo sapien
acatcaagtccactgagaagtccaaagcaagca

SEQ ID NO: 109395 - DNA, 33 bp, Homo sapien
actgttatctaacatccgacccactttgccaat

SEQ ID NO: 109396 - DNA, 33 bp, Homo sapien
actgttatctaacatctgacccactttgccaat

SEQ ID NO: 109397 - DNA, 33 bp, Homo sapien
ttgttttagacacatcacaaagtgagcttaaca

SEQ ID NO: 109398 - DNA, 33 bp, Homo sapien
ttgttttagacacatcgcaaagtgagcttaaca

SEQ ID NO: 109399 - DNA, 33 bp, Homo sapien
gcaggactcactgcagaaaatggaaaaggtgcc

SEQ ID NO: 109400 - DNA, 33 bp, Homo sapien
gcaggactcactgcaggaaatggaaaaggtgcc

SEQ ID NO: 109401 - DNA, 33 bp, Homo sapien
cacacggagagtggcaccacatagtgtccagca

SEQ ID NO: 109402 - DNA, 33 bp, Homo sapien
cacacggagagtggcatcacatagtgtccagca

SEQ ID NO: 109403 - DNA, 33 bp, Homo sapien
aatgacaaatgtttcccatgatgaatatgctaa

SEQ ID NO: 109404 - DNA, 33 bp, Homo sapien
aatgacaaatgtttccgatgatgaatatgctaa

SEQ ID NO: 109405 - DNA, 33 bp, Homo sapien
aaaaagaggaaaattcaaccatgtgaaacaaca

SEQ ID NO: 109406 - DNA, 33 bp, Homo sapien
aaaaagaggaaaattcgaccatgtgaaacaaca

SEQ ID NO: 109407 - DNA, 33 bp, Homo sapien
tccaagtggatttagaatatttgcccataggac

SEQ ID NO: 109408 - DNA, 33 bp, Homo sapien
tccaagtggatttagattatttgcccataggac

SEQ ID NO: 109409 - DNA, 33 bp, Homo sapien
tacatgaaaagctgaactaataggttttaatgc

SEQ ID NO: 109410 - DNA, 33 bp, Homo sapien
tacatgaaaagctgaattaataggttttaatgc

SEQ ID NO: 109411 - DNA, 33 bp, Homo sapien
tattactgtcaaccttgaaagctgtcctgctgg

SEQ ID NO: 109412 - DNA, 33 bp, Homo sapien
tattactgtcaacctttaaagctgtcctgctgg

SEQ ID NO: 109413 - DNA, 33 bp, Homo sapien
ggggtgctgggaggtacactaattattataatg

SEQ ID NO: 109414 - DNA, 33 bp, Homo sapien
ggggtgctgggaggtatactaattattataatg

SEQ ID NO: 109415 - DNA, 33 bp, Homo sapien
ggatgggtagattacaggaagaaagcacagtaa

SEQ ID NO: 109416 - DNA, 33 bp, Homo sapien
ggatgggtagattacatgaagaaagcacagtaa

SEQ ID NO: 109417 - DNA, 33 bp, Homo sapien
cgtgatggagctactgcactgcagcctgggtga

SEQ ID NO: 109418 - DNA, 33 bp, Homo sapien
cgtgatggagctactgtactgcagcctgggtga

SEQ ID NO: 109419 - DNA, 33 bp, Homo sapien
tgttatgcagtgataactaacctatcaacatat

SEQ ID NO: 109420 - DNA, 33 bp, Homo sapien
tgttatgcagtgataagtaacctatcaacatat

SEQ ID NO: 109421 - DNA, 33 bp, Homo sapien
cctgaattttgagtcaatcattccttggctcct

SEQ ID NO: 109422 - DNA, 33 bp, Homo sapien
cctgaattttgagtcagtcattccttggctcct

SEQ ID NO: 109423 - DNA, 33 bp, Homo sapien
cagctgtctaggtcaccgctttggagtactatt

SEQ ID NO: 109424 - DNA, 33 bp, Homo sapien
cagctgtctaggtcactgctttggagtactatt

SEQ ID NO: 109425 - DNA, 33 bp, Homo sapien
ctgttgagcagatgccaaattgatggagacaga

SEQ ID NO: 109426 - DNA, 33 bp, Homo sapien
ctgttgagcagatgccgaattgatggagacaga

SEQ ID NO: 109427 - DNA, 33 bp, Homo sapien
agaaatagccaagaaccgagtctaggaagatga

SEQ ID NO: 109428 - DNA, 33 bp, Homo sapien
agaaatagccaagaactgagtctaggaagatga

SEQ ID NO: 109429 - DNA, 33 bp, Homo sapien
taaagtgtccagagaacgggtattggttgagca

SEQ ID NO: 109430 - DNA, 33 bp, Homo sapien
taaagtgtccagagaatgggtattggttgagca

SEQ ID NO: 109431 - DNA, 33 bp, Homo sapien
taaaaatcaaatgtgactaactggtggttttaa

SEQ ID NO: 109432 - DNA, 33 bp, Homo sapien
taaaaatcaaatgtgattaactggtggttttaa

SEQ ID NO: 109433 - DNA, 33 bp, Homo sapien
ttttgtggagatgtagaaaattgaaattagctt

SEQ ID NO: 109434 - DNA, 33 bp, Homo sapien
ttttgtggagatgtaggaaattgaaattagctt

SEQ ID NO: 109435 - DNA, 33 bp, Homo sapien
aaatcaagccaaatacgaaatagttccacttat

SEQ ID NO: 109436 - DNA, 33 bp, Homo sapien
aaatcaagccaaatactaaatagttccacttat

SEQ ID NO: 109437 - DNA, 33 bp, Homo sapien
gtctttggatactaacagcagatattcaaatat

SEQ ID NO: 109438 - DNA, 33 bp, Homo sapien
gtctttggatactaacggcagatattcaaatat

SEQ ID NO: 109439 - DNA, 33 bp, Homo sapien
gccagctgaggagtgacgaagaacagtgggctt

SEQ ID NO: 109440 - DNA, 33 bp, Homo sapien
gccagctgaggagtgatgaagaacagtgggctt

SEQ ID NO: 109441 - DNA, 33 bp, Homo sapien
actggtgaggtagtaacgcaatttctgagccat

SEQ ID NO: 109442 - DNA, 33 bp, Homo sapien
actggtgaggtagtaatgcaatttctgagccat

SEQ ID NO: 109443 - DNA, 33 bp, Homo sapien
gttgaaagccacatgacgttttcatttttagtg

SEQ ID NO: 109444 - DNA, 33 bp, Homo sapien
gttgaaagccacatgaggttttcatttttagtg

SEQ ID NO: 109445 - DNA, 33 bp, Homo sapien
gaagaattgtagaatacggatacggaagcgagc

SEQ ID NO: 109446 - DNA, 33 bp, Homo sapien
gaagaattgtagaatatggatacggaagcgagc

SEQ ID NO: 109447 - DNA, 33 bp, Homo sapien
ctgattaccctatcctaacagactcaaggtttt

SEQ ID NO: 109448 - DNA, 33 bp, Homo sapien
ctgattaccctatcctgacagactcaaggtttt

SEQ ID NO: 109449 - DNA, 33 bp, Homo sapien
tccttcaaagaaaatgaatcctcaaattcagtt

SEQ ID NO: 109450 - DNA, 33 bp, Homo sapien
tccttcaaagaaaatgtatcctcaaattcagtt

SEQ ID NO: 109451 - DNA, 33 bp, Homo sapien
gtgtttatctgattaaatccgtctcaccagcag

SEQ ID NO: 109452 - DNA, 33 bp, Homo sapien
gtgtttatctgattaagtccgtctcaccagcag

SEQ ID NO: 109453 - DNA, 33 bp, Homo sapien
tctgtggaaccatgccgctctgccgccttcctt

SEQ ID NO: 109454 - DNA, 33 bp, Homo sapien
tctgtggaaccatgcctctctgccgccttcctt

SEQ ID NO: 109455 - DNA, 33 bp, Homo sapien
tgacataagggtagggaacactgggatgcactg

SEQ ID NO: 109456 - DNA, 33 bp, Homo sapien
tgacataagggtaggggacactgggatgcactg

SEQ ID NO: 109457 - DNA, 33 bp, Homo sapien
gttctacatgctcaacacgctcacgtccaacag

SEQ ID NO: 109458 - DNA, 33 bp, Homo sapien
gttctacatgctcaacgcgctcacgtccaacag

SEQ ID NO: 109459 - DNA, 33 bp, Homo sapien
gtctctggacaggagcagcaccatcgcctcaga

SEQ ID NO: 109460 - DNA, 33 bp, Homo sapien
gtctctggacaggagcggcaccatcgcctcaga

SEQ ID NO: 109461 - DNA, 33 bp, Homo sapien; identical to SEQ ID NO: 109459

SEQ ID NO: 109462 - DNA, 33 bp, Homo sapien; identical to SEQ ID NO: 109460

SEQ ID NO: 109463 - DNA, 33 bp, Homo sapien
cttcttgttgcaagcccggaaatggttgtactg

SEQ ID NO: 109464 - DNA, 33 bp, Homo sapien
cttcttgttgcaagcctggaaatggttgtactg

SEQ ID NO: 109465 - DNA, 33 bp, Homo sapien; identical to SEQ ID NO: 109463

SEQ ID NO: 109466 - DNA, 33 bp, Homo sapien; identical to SEQ ID NO: 109464

SEQ ID NO: 109467 - DNA, 33 bp, Homo sapien
cttggattagccactgcatatgaagcttcccca

SEQ ID NO: 109468 - DNA, 33 bp, Homo sapien
cttggattagccactggatatgaagcttcccca

SEQ ID NO: 109469 - DNA, 33 bp, Homo sapien
aatctaattgctgactaaacatctccaggaaac

SEQ ID NO: 109470 - DNA, 33 bp, Homo sapien
aatctaattgctgactgaacatctccaggaaac

SEQ ID NO: 109471 - DNA, 33 bp, Homo sapien
gggccagccaggcagacactaggaacagagcag

SEQ ID NO: 109472 - DNA, 33 bp, Homo sapien
gggccagccaggcagatactaggaacagagcag

SEQ ID NO: 109473 - DNA, 33 bp, Homo sapien
gtacttcactctgccacatttattgttacctgg

SEQ ID NO: 109474 - DNA, 33 bp, Homo sapien
gtacttcactctgccagatttattgttacctgg

SEQ ID NO: 109475 - DNA, 33 bp, Homo sapien
tgacaacccagtttacacgcaatttcagtgatg

SEQ ID NO: 109476 - DNA, 33 bp, Homo sapien
tgacaacccagtttacgcgcaatttcagtgatg

SEQ ID NO: 109477 - DNA, 33 bp, Homo sapien
ttcccttcagaatctactacaaaacctagagaa

SEQ ID NO: 109478 - DNA, 33 bp, Homo sapien
ttcccttcagaatctattacaaaacctagagaa

SEQ ID NO: 109479 - DNA, 33 bp, Homo sapien
gtttaaaaaagagccacacaagcacgaagaaag

SEQ ID NO: 109480 - DNA, 33 bp, Homo sapien
gtttaaaaaagagccagacaagcacgaagaaag

SEQ ID NO: 109481 - DNA, 33 bp, Homo sapien
aaaaatctagacccggaaaagagattattcagt

SEQ ID NO: 109482 - DNA, 33 bp, Homo sapien
aaaaatctagacccggcaaagagattattcagt

SEQ ID NO: 109483 - DNA, 33 bp, Homo sapien; identical to SEQ ID NO: 109481

SEQ ID NO: 109484 - DNA, 33 bp, Homo sapien; identical to SEQ ID NO: 109482

SEQ ID NO: 109485 - DNA, 33 bp, Homo sapien
caaatcctagtttcaccatttaaccaatattag

SEQ ID NO: 109486 - DNA, 33 bp, Homo sapien
caaatcctagtttcactatttaaccaatattag

SEQ ID NO: 109487 - DNA, 33 bp, Homo sapien
gatggttgaaatcaagaaagttgatgactttgc

SEQ ID NO: 109488 - DNA, 33 bp, Homo sapien
gatggttgaaatcaaggaagttgatgactttgc

SEQ ID NO: 109489 - DNA, 33 bp, Homo sapien; identical to SEQ ID NO: 109487

SEQ ID NO: 109490 - DNA, 33 bp, Homo sapien; identical to SEQ ID NO: 109488

SEQ ID NO: 109491 - DNA, 33 bp, Homo sapien
cttatgaaattgctgtcaagtttcaaaggctta

SEQ ID NO: 109492 - DNA, 33 bp, Homo sapien
cttatgaaattgctgttaagtttcaaaggctta

SEQ ID NO: 109493 - DNA, 33 bp, Homo sapien; identical to SEQ ID NO: 109491

SEQ ID NO: 109494 - DNA, 33 bp, Homo sapien; identical to SEQ ID NO: 109492

SEQ ID NO: 109495 - DNA, 33 bp, Homo sapien
attacctacaacaggcagaaagtgataaaagaa

SEQ ID NO: 109496 - DNA, 33 bp, Homo sapien
attacctacaacaggccgaaagtgataaaagaa

SEQ ID NO: 109497 - DNA, 33 bp, Homo sapien
cacttttccaagcaaccactataaatcccacaa

SEQ ID NO: 109498 - DNA, 33 bp, Homo sapien
cacttttccaagcaactactataaatcccacaa

SEQ ID NO: 109499 - DNA, 33 bp, Homo sapien
gcatagtgggtacacactcttaaacatagaagt

SEQ ID NO: 109500 - DNA, 33 bp, Homo sapien
gcatagtgggtacacattcttaaacatagaagt

SEQ ID NO: 109501 - DNA, 33 bp, Homo sapien
tgccccaggtagcaaaatgttttataaggagac

SEQ ID NO: 109502 - DNA, 33 bp, Homo sapien
tgccccaggtagcaaagtgttttataaggagac

SEQ ID NO: 109503 - DNA, 33 bp, Homo sapien
ctcatgagacttcttaactatcacaataatagc

SEQ ID NO: 109504 - DNA, 33 bp, Homo sapien
ctcatgagacttcttacctatcacaataatagc

SEQ ID NO: 109505 - DNA, 33 bp, Homo sapien
ttcctaggaactatgaaggtttttgagcatata

SEQ ID NO: 109506 - DNA, 33 bp, Homo sapien
ttcctaggaactatgatggtttttgagcatata

SEQ ID NO: 109507 - DNA, 33 bp, Homo sapien
caaggatttggagaaacgagaatacttgcatac

SEQ ID NO: 109508 - DNA, 33 bp, Homo sapien
caaggatttggagaaatgagaatacttgcatac

SEQ ID NO: 109509 - DNA, 33 bp, Homo sapien
atggcttttcagttaaaggaagaatacaaaatt

SEQ ID NO: 109510 - DNA, 33 bp, Homo sapien
atggcttttcagttaagggaagaatacaaaatt

SEQ ID NO: 109511 - DNA, 33 bp, Homo sapien
tgttacttgcacatgacagtaatgacagcaaaa

SEQ ID NO: 109512 - DNA, 33 bp, Homo sapien
tgttacttgcacatgatagtaatgacagcaaaa

SEQ ID NO: 109513 - DNA, 33 bp, Homo sapien
gggggtgtgtgcccaacatttgtgggaacttca

SEQ ID NO: 109514 - DNA, 33 bp, Homo sapien
gggggtgtgtgcccaatatttgtgggaacttca

SEQ ID NO: 109515 - DNA, 33 bp, Homo sapien
ccatgaagacatcacaaaaagtcccaatgtgca

SEQ ID NO: 109516 - DNA, 33 bp, Homo sapien
ccatgaagacatcacacaaagtcccaatgtgca

SEQ ID NO: 109517 - DNA, 33 bp, Homo sapien
catcagctagccctacacatccttgcaaaaata

SEQ ID NO: 109518 - DNA, 33 bp, Homo sapien
catcagctagccctacgcatccttgcaaaaata

SEQ ID NO: 109519 - DNA, 33 bp, Homo sapien
ggaaatctcttaggagaaaggagcagatgtagg

SEQ ID NO: 109520 - DNA, 33 bp, Homo sapien
ggaaatctcttaggaggaaggagcagatgtagg

SEQ ID NO: 109521 - DNA, 33 bp, Homo sapien
caagacagtattgatcaacagaggataaacacc

SEQ ID NO: 109522 - DNA, 33 bp, Homo sapien
caagacagtattgatcgacagaggataaacacc

SEQ ID NO: 109523 - DNA, 33 bp, Homo sapien
ggtaagatctgacccacagtattttgtgaagtt

SEQ ID NO: 109524 - DNA, 33 bp, Homo sapien
ggtaagatctgacccatagtattttgtgaagtt

SEQ ID NO: 109525 - DNA, 33 bp, Homo sapien
acagctaagtggaaacacctattgtaaaactcc

SEQ ID NO: 109526 - DNA, 33 bp, Homo sapien
acagctaagtggaaacgcctattgtaaaactcc

SEQ ID NO: 109527 - DNA, 33 bp, Homo sapien
taaaattaattacggaaagaacactaggctttg

SEQ ID NO: 109528 - DNA, 33 bp, Homo sapien
taaaattaattacggagagaacactaggctttg

SEQ ID NO: 109529 - DNA, 33 bp, Homo sapien
actcatgtggtaacaaaacctgctataactttt

SEQ ID NO: 109530 - DNA, 33 bp, Homo sapien
actcatgtggtaacaagacctgctataactttt

SEQ ID NO: 109531 - DNA, 33 bp, Homo sapien
tcttcttttttcccttaaaatcgataaatagta

SEQ ID NO: 109532 - DNA, 33 bp, Homo sapien
tcttcttttttcccttgaaatcgataaatagta

SEQ ID NO: 109533 - DNA, 33 bp, Homo sapien
ggcttatggattttaacgaatcttgctttcact

SEQ ID NO: 109534 - DNA, 33 bp, Homo sapien
ggcttatggattttaatgaatcttgctttcact

SEQ ID NO: 109535 - DNA, 33 bp, Homo sapien
tttcatggggaaaataactacatccctgatcta

SEQ ID NO: 109536 - DNA, 33 bp, Homo sapien
tttcatggggaaaatagctacatccctgatcta

SEQ ID NO: 109537 - DNA, 33 bp, Homo sapien
tcaggtactcatcttaccttcttcatgcagttg

SEQ ID NO: 109538 - DNA, 33 bp, Homo sapien
tcaggtactcatcttatcttcttcatgcagttg

SEQ ID NO: 109539 - DNA, 33 bp, Homo sapien
aagtcaactgggtttcaccataccaaaagcttt

SEQ ID NO: 109540 - DNA, 33 bp, Homo sapien
aagtcaactgggtttcgccataccaaaagcttt

SEQ ID NO: 109541 - DNA, 33 bp, Homo sapien
ctttctgtggactccagaactttgctgtctgta

SEQ ID NO: 109542 - DNA, 33 bp, Homo sapien
ctttctgtggactccataactttgctgtctgta

SEQ ID NO: 109543 - DNA, 33 bp, Homo sapien
tcttagcccaatcatcggagcccagaaagtacc

SEQ ID NO: 109544 - DNA, 33 bp, Homo sapien
tcttagcccaatcatctgagcccagaaagtacc

SEQ ID NO: 109545 - DNA, 33 bp, Homo sapien
cagattattgtatctaccaggtattcagcttag

SEQ ID NO: 109546 - DNA, 33 bp, Homo sapien
cagattattgtatctatcaggtattcagcttag

SEQ ID NO: 109547 - DNA, 33 bp, Homo sapien
actgtcttgacaacagaaatggagtcaacctaa

SEQ ID NO: 109548 - DNA, 33 bp, Homo sapien
actgtcttgacaacaggaatggagtcaacctaa

SEQ ID NO: 109549 - DNA, 33 bp, Homo sapien
acctgaactttacctacggctgtatcggatact

SEQ ID NO: 109550 - DNA, 33 bp, Homo sapien
acctgaactttacctatggctgtatcggatact

SEQ ID NO: 109551 - DNA, 33 bp, Homo sapien
tcacaatatgtttaagccatgaaagttaaatga

SEQ ID NO: 109552 - DNA, 33 bp, Homo sapien
tcacaatatgtttaaggcatgaaagttaaatga

SEQ ID NO: 109553 - DNA, 33 bp, Homo sapien
cttattagctttgcgacgacttatgtggttcat

SEQ ID NO: 109554 - DNA, 33 bp, Homo sapien
cttattagctttgcgatgacttatgtggttcat

SEQ ID NO: 109555 - DNA, 33 bp, Homo sapien
attaaatgaaggtttagaattggctacctttgt

SEQ ID NO: 109556 - DNA, 33 bp, Homo sapien
attaaatgaaggtttataattggctacctttgt

SEQ ID NO: 109557 - DNA, 33 bp, Homo sapien
ctgtactcaccatagtaaaataccacatgactt

SEQ ID NO: 109558 - DNA, 33 bp, Homo sapien
ctgtactcaccatagtgaaataccacatgactt

SEQ ID NO: 109559 - DNA, 33 bp, Homo sapien
ctggaaggtgtttaacaaatactgccaaattca

SEQ ID NO: 109560 - DNA, 33 bp, Homo sapien
ctggaaggtgtttaacgaatactgccaaattca

SEQ ID NO: 109561 - DNA, 33 bp, Homo sapien
ttcaacactcacaaaacgggatgcttttgaaga

SEQ ID NO: 109562 - DNA, 33 bp, Homo sapien
ttcaacactcacaaaatgggatgcttttgaaga

SEQ ID NO: 109563 - DNA, 33 bp, Homo sapien
tttacatttccacataaaaattctggcttactt

SEQ ID NO: 109564 - DNA, 33 bp, Homo sapien
tttacatttccacatacaaattctggcttactt

SEQ ID NO: 109565 - DNA, 33 bp, Homo sapien
cacaacagccaataggaagaagcaattgaagta

SEQ ID NO: 109566 - DNA, 33 bp, Homo sapien
cacaacagccaataggtagaagcaattgaagta

SEQ ID NO: 109567 - DNA, 33 bp, Homo sapien
actgagcggactccaaacctagagcagccttag

SEQ ID NO: 109568 - DNA, 33 bp, Homo sapien
actgagcggactccaagcctagagcagccttag

SEQ ID NO: 109569 - DNA, 33 bp, Homo sapien
ctccggcactttaagacacaaatcctgccagtt

SEQ ID NO: 109570 - DNA, 33 bp, Homo sapien
ctccggcactttaagagacaaatcctgccagtt

SEQ ID NO: 109571 - DNA, 33 bp, Homo sapien
gcgggcatgaaggcacgcctaatggaatattca

SEQ ID NO: 109572 - DNA, 33 bp, Homo sapien
gcgggcatgaaggcactcctaatggaatattca

SEQ ID NO: 109573 - DNA, 33 bp, Homo sapien
tagctcatcattttctcacagcagccctaaaag

SEQ ID NO: 109574 - DNA, 33 bp, Homo sapien
tagctcatcattttctgacagcagccctaaaag

SEQ ID NO: 109575 - DNA, 33 bp, Homo sapien
gactggtaaatggcaaccccaagagcagggcta

SEQ ID NO: 109576 - DNA, 33 bp, Homo sapien
gactggtaaatggcaatcccaagagcagggcta

SEQ ID NO: 109577 - DNA, 33 bp, Homo sapien
tcctttaaaggatctcagaaataagacctgaaa

SEQ ID NO: 109578 - DNA, 33 bp, Homo sapien
tcctttaaaggatctcggaaataagacctgaaa

SEQ ID NO: 109579 - DNA, 33 bp, Homo sapien
ggcactaggaaacaggaccgtagtcaggaaaga

SEQ ID NO: 109580 - DNA, 33 bp, Homo sapien
ggcactaggaaacaggcccgtagtcaggaaaga

SEQ ID NO: 109581 - DNA, 33 bp, Homo sapien
gcatacccaacattcaatctacccttggttctc

SEQ ID NO: 109582 - DNA, 33 bp, Homo sapien
gcatacccaacattcagtctacccttggttctc

SEQ ID NO: 109583 - DNA, 33 bp, Homo sapien
tcacaaaagcatgtccagacttttaacatggca

SEQ ID NO: 109584 - DNA, 33 bp, Homo sapien
tcacaaaagcatgtccggacttttaacatggca

SEQ ID NO: 109585 - DNA, 33 bp, Homo sapien
gtgcaatcagacacaacaatgcaaactaagcta

SEQ ID NO: 109586 - DNA, 33 bp, Homo sapien
gtgcaatcagacacaataatgcaaactaagcta

SEQ ID NO: 109587 - DNA, 33 bp, Homo sapien
gagaaatggctgccaaaaattatttaatgattg

SEQ ID NO: 109588 - DNA, 33 bp, Homo sapien
gagaaatggctgccaacaattatttaatgattg

SEQ ID NO: 109589 - DNA, 33 bp, Homo sapien
tttttgattaagtggcggcaaatcctttattga

SEQ ID NO: 109590 - DNA, 33 bp, Homo sapien
tttttgattaagtggctgcaaatcctttattga

SEQ ID NO: 109591 - DNA, 33 bp, Homo sapien
aaccacaactgaacccagagtaaggcaagaatg

SEQ ID NO: 109592 - DNA, 33 bp, Homo sapien
aaccacaactgaacccggagtaaggcaagaatg

SEQ ID NO: 109593 - DNA, 33 bp, Homo sapien
atctccaaccttaagacgttaagattttacttt

SEQ ID NO: 109594 - DNA, 33 bp, Homo sapien
atctccaaccttaagatgttaagattttacttt

SEQ ID NO: 109595 - DNA, 33 bp, Homo sapien
gcctggtctagtaataaagacaaacaaatgaga

SEQ ID NO: 109596 - DNA, 33 bp, Homo sapien
gcctggtctagtaatagagacaaacaaatgaga

SEQ ID NO: 109597 - DNA, 33 bp, Homo sapien
gcaggagtagctcctacaaggcaacaacacttg

SEQ ID NO: 109598 - DNA, 33 bp, Homo sapien
gcaggagtagctcctataaggcaacaacacttg

SEQ ID NO: 109599 - DNA, 33 bp, Homo sapien
gaaactttttcagtaaaggttgcaatcaaagta

SEQ ID NO: 109600 - DNA, 33 bp, Homo sapien
gaaactttttcagtaagggttgcaatcaaagta

SEQ ID NO: 109601 - DNA, 33 bp, Homo sapien
actaaacattattgcccactatatctccaacaa

SEQ ID NO: 109602 - DNA, 33 bp, Homo sapien
actaaacattattgcctactatatctccaacaa

SEQ ID NO: 109603 - DNA, 33 bp, Homo sapien
tttccacagacaatgaagataatgcatgtgttc

SEQ ID NO: 109604 - DNA, 33 bp, Homo sapien
tttccacagacaatgaggataatgcatgtgttc

SEQ ID NO: 109605 - DNA, 33 bp, Homo sapien
tagtagaaataagatacgtcggcatagagaatg

SEQ ID NO: 109606 - DNA, 33 bp, Homo sapien
tagtagaaataagatatgtcggcatagagaatg

SEQ ID NO: 109607 - DNA, 33 bp, Homo sapien
tggctccatcacttacaacttactagctgtgag

SEQ ID NO: 109608 - DNA, 33 bp, Homo sapien
tggctccatcacttacgacttactagctgtgag

SEQ ID NO: 109609 - DNA, 33 bp, Homo sapien
aattcaggtcaatggaaattgtctgccaattgc

SEQ ID NO: 109610 - DNA, 33 bp, Homo sapien
aattcaggtcaatggagattgtctgccaattgc

SEQ ID NO: 109611 - DNA, 33 bp, Homo sapien
gcacccttatatataaactcactccatcttaag

SEQ ID NO: 109612 - DNA, 33 bp, Homo sapien
gcacccttatatataacctcactccatcttaag

SEQ ID NO: 109613 - DNA, 33 bp, Homo sapien
atttttattagtaggtaaaatgactgcattggg

SEQ ID NO: 109614 - DNA, 33 bp, Homo sapien
atttttattagtaggtcaaatgactgcattggg

SEQ ID NO: 109615 - DNA, 33 bp, Homo sapien
attccagaaacaactcacaacctgtttttcagc

SEQ ID NO: 109616 - DNA, 33 bp, Homo sapien
attccagaaacaactcgcaacctgtttttcagc

SEQ ID NO: 109617 - DNA, 33 bp, Homo sapien
ctgcttactctactaccaacgaaatcacattgg

SEQ ID NO: 109618 - DNA, 33 bp, Homo sapien
ctgcttactctactactaacgaaatcacattgg

SEQ ID NO: 109619 - DNA, 33 bp, Homo sapien
ttacatctatcttaaaacaaatctgaagtttaa

SEQ ID NO: 109620 - DNA, 33 bp, Homo sapien
ttacatctatcttaaagcaaatctgaagtttaa

SEQ ID NO: 109621 - DNA, 33 bp, Homo sapien
atttaggcacttagaaacattatggatatgtgt

SEQ ID NO: 109622 - DNA, 33 bp, Homo sapien
atttaggcacttagaagcattatggatatgtgt

SEQ ID NO: 109623 - DNA, 33 bp, Homo sapien
taaaccaaatggaagaacatgagatggaaagaa

SEQ ID NO: 109624 - DNA, 33 bp, Homo sapien
taaaccaaatggaagagcatgagatggaaagaa

SEQ ID NO: 109625 - DNA, 33 bp, Homo sapien
ttctgtgtgggataaccgtgggcaagaagggtt

SEQ ID NO: 109626 - DNA, 33 bp, Homo sapien
ttctgtgtgggataactgtgggcaagaagggtt

SEQ ID NO: 109627 - DNA, 33 bp, Homo sapien
gtcttttagagcataaacagctttaccttggca

SEQ ID NO: 109628 - DNA, 33 bp, Homo sapien
gtcttttagagcataagcagctttaccttggca

SEQ ID NO: 109629 - DNA, 33 bp, Homo sapien
agaatgaaaacacagaaaatactgatatattcc

SEQ ID NO: 109630 - DNA, 33 bp, Homo sapien
agaatgaaaacacagagaatactgatatattcc

SEQ ID NO: 109631 - DNA, 33 bp, Homo sapien
ttcaaagtttagtttacgtttaatgttgtgtcc

SEQ ID NO: 109632 - DNA, 33 bp, Homo sapien
ttcaaagtttagtttatgtttaatgttgtgtcc

SEQ ID NO: 109633 - DNA, 33 bp, Homo sapien
gatgtacacagctttacgtgaggaagaattctt

SEQ ID NO: 109634 - DNA, 33 bp, Homo sapien
gatgtacacagctttatgtgaggaagaattctt

SEQ ID NO: 109635 - DNA, 33 bp, Homo sapien
tacattgctcctatacaacatgatttaggttaa

SEQ ID NO: 109636 - DNA, 33 bp, Homo sapien
tacattgctcctatacgacatgatttaggttaa

SEQ ID NO: 109637 - DNA, 33 bp, Homo sapien
tggtgtactcttttcagctggacagttactgaa

SEQ ID NO: 109638 - DNA, 33 bp, Homo sapien
tggtgtactcttttcatctggacagttactgaa

SEQ ID NO: 109639 - DNA, 33 bp, Homo sapien
catttcctgcctcttgaagaagagaaacaaaac

SEQ ID NO: 109640 - DNA, 33 bp, Homo sapien
catttcctgcctcttgcagaagagaaacaaaac

SEQ ID NO: 109641 - DNA, 33 bp, Homo sapien
tcatgtacaggttaaccaaaaatgtcacatttc

SEQ ID NO: 109642 - DNA, 33 bp, Homo sapien
tcatgtacaggttaactaaaaatgtcacatttc

SEQ ID NO: 109643 - DNA, 33 bp, Homo sapien
accatactgtgcacaaagaagcattatgggacc

SEQ ID NO: 109644 - DNA, 33 bp, Homo sapien
accatactgtgcacaaggaagcattatgggacc

SEQ ID NO: 109645 - DNA, 33 bp, Homo sapien
gttatcttgctcctcaggtggtagcacttgtca

SEQ ID NO: 109646 - DNA, 33 bp, Homo sapien
gttatcttgctcctcatgtggtagcacttgtca

SEQ ID NO: 109647 - DNA, 33 bp, Homo sapien
ctccctcacttacaagcatcgtggtgattaatt

SEQ ID NO: 109648 - DNA, 33 bp, Homo sapien
ctccctcacttacaagtatcgtggtgattaatt

SEQ ID NO: 109649 - DNA, 33 bp, Homo sapien
atatccaaattctgagaatccgaaagtggacat

SEQ ID NO: 109650 - DNA, 33 bp, Homo sapien
atatccaaattctgaggatccgaaagtggacat

SEQ ID NO: 109651 - DNA, 33 bp, Homo sapien
agtttgaatgtgtcccaaacaatgtagaatgca

SEQ ID NO: 109652 - DNA, 33 bp, Homo sapien
agtttgaatgtgtcccgaacaatgtagaatgca

SEQ ID NO: 109653 - DNA, 33 bp, Homo sapien
tcagtgagatatgacacaaaaagttctcatctc

SEQ ID NO: 109654 - DNA, 33 bp, Homo sapien
tcagtgagatatgacataaaaagttctcatctc

SEQ ID NO: 109655 - DNA, 33 bp, Homo sapien
atgtactgatgggtgagtatgacattttcaaat

SEQ ID NO: 109656 - DNA, 33 bp, Homo sapien
atgtactgatgggtgattatgacattttcaaat

SEQ ID NO: 109657 - DNA, 33 bp, Homo sapien
aaatatattactgtgcaagaccattcacgaatc

SEQ ID NO: 109658 - DNA, 33 bp, Homo sapien
aaatatattactgtgcgagaccattcacgaatc

SEQ ID NO: 109659 - DNA, 33 bp, Homo sapien
ttggcagaaaccttagaaacatctgttgcctta

SEQ ID NO: 109660 - DNA, 33 bp, Homo sapien
ttggcagaaaccttaggaacatctgttgcctta

SEQ ID NO: 109661 - DNA, 33 bp, Homo sapien
gccctgcatgtgttaaacatttgtcctaatgct

SEQ ID NO: 109662 - DNA, 33 bp, Homo sapien
gccctgcatgtgttaagcatttgtcctaatgct

SEQ ID NO: 109663 - DNA, 33 bp, Homo sapien
aaatatatcgttaagacagagaaagtgttttaa

SEQ ID NO: 109664 - DNA, 33 bp, Homo sapien
aaatatatcgttaagagagagaaagtgttttaa

SEQ ID NO: 109665 - DNA, 33 bp, Homo sapien
tgtttcattcaagaaaacacaattttgaacacc

SEQ ID NO: 109666 - DNA, 33 bp, Homo sapien
tgtttcattcaagaaaccacaattttgaacacc

SEQ ID NO: 109667 - DNA, 33 bp, Homo sapien
atctacagggtaaggcccattgatcagagatgc

SEQ ID NO: 109668 - DNA, 33 bp, Homo sapien
atctacagggtaaggctcattgatcagagatgc

SEQ ID NO: 109669 - DNA, 33 bp, Homo sapien
tcatggtttaaagctacgcatcttttatgggct

SEQ ID NO: 109670 - DNA, 33 bp, Homo sapien
tcatggtttaaagctatgcatcttttatgggct

SEQ ID NO: 109671 - DNA, 33 bp, Homo sapien
ccctgagcaccttacagaacatagcaattcctt

SEQ ID NO: 109672 - DNA, 33 bp, Homo sapien
ccctgagcaccttacataacatagcaattcctt

SEQ ID NO: 109673 - DNA, 33 bp, Homo sapien
cttatgtaagatctaaataactctttggaagac

SEQ ID NO: 109674 - DNA, 33 bp, Homo sapien
cttatgtaagatctaagtaactctttggaagac

SEQ ID NO: 109675 - DNA, 33 bp, Homo sapien
tatgtaaattggtgctcagaactcagttgtaaa

SEQ ID NO: 109676 - DNA, 33 bp, Homo sapien
tatgtaaattggtgctgagaactcagttgtaaa

SEQ ID NO: 109677 - DNA, 33 bp, Homo sapien
cattagatgcaggagacgtcttcttgactagtc

SEQ ID NO: 109678 - DNA, 33 bp, Homo sapien
cattagatgcaggagatgtcttcttgactagtc

SEQ ID NO: 109679 - DNA, 33 bp, Homo sapien
tgacctgggtgaggtaagcaacaaatggctttc

SEQ ID NO: 109680 - DNA, 33 bp, Homo sapien
tgacctgggtgaggtacgcaacaaatggctttc

SEQ ID NO: 109681 - DNA, 33 bp, Homo sapien
cctgcatgtctgcctaaaaaccttactgtttct

SEQ ID NO: 109682 - DNA, 33 bp, Homo sapien
cctgcatgtctgcctacaaaccttactgtttct

SEQ ID NO: 109683 - DNA, 33 bp, Homo sapien
atgtatgagtgtggccaatttcttctctctgcc

SEQ ID NO: 109684 - DNA, 33 bp, Homo sapien
atgtatgagtgtggccgatttcttctctctgcc

SEQ ID NO: 109685 - DNA, 33 bp, Homo sapien
aggatactactaaggaagttcaggttctgggga

SEQ ID NO: 109686 - DNA, 33 bp, Homo sapien
aggatactactaaggaggttcaggttctgggga

SEQ ID NO: 109687 - DNA, 33 bp, Homo sapien
cagctgtcaaatatcaatgaactaacagcaaag

SEQ ID NO: 109688 - DNA, 33 bp, Homo sapien
cagctgtcaaatatcagtgaactaacagcaaag

SEQ ID NO: 109689 - DNA, 33 bp, Homo sapien
acacttctagatgtgacgttttctggagaattg

SEQ ID NO: 109690 - DNA, 33 bp, Homo sapien
acacttctagatgtgatgttttctggagaattg

SEQ ID NO: 109691 - DNA, 33 bp, Homo sapien
ttggctctcccctgtcaatgaggtagccatcta

SEQ ID NO: 109692 - DNA, 33 bp, Homo sapien
ttggctctcccctgtcgatgaggtagccatcta

SEQ ID NO: 109693 - DNA, 33 bp, Homo sapien
tggaatacaaagatgacaaatatgcccggctat

SEQ ID NO: 109694 - DNA, 33 bp, Homo sapien
tggaatacaaagatgagaaatatgcccggctat

SEQ ID NO: 109695 - DNA, 33 bp, Homo sapien
ttagaacatatccacaagcatttatgtaattct

SEQ ID NO: 109696 - DNA, 33 bp, Homo sapien
ttagaacatatccacatgcatttatgtaattct

SEQ ID NO: 109697 - DNA, 33 bp, Homo sapien
tctgggtgtagtatgaaagtttccctgatgttc

SEQ ID NO: 109698 - DNA, 33 bp, Homo sapien
tctgggtgtagtatgacagtttccctgatgttc

SEQ ID NO: 109699 - DNA, 33 bp, Homo sapien
ctctctcacagctttcactgaacatcaaaggca

SEQ ID NO: 109700 - DNA, 33 bp, Homo sapien
ctctctcacagctttctctgaacatcaaaggca

SEQ ID NO: 109701 - DNA, 33 bp, Homo sapien
ctcatctctggcataaagcctaaccatttaata

SEQ ID NO: 109702 - DNA, 33 bp, Homo sapien
ctcatctctggcataaggcctaaccatttaata

SEQ ID NO: 109703 - DNA, 33 bp, Homo sapien
ctactttcctgagtcacatgatggtgaacgtca

SEQ ID NO: 109704 - DNA, 33 bp, Homo sapien
ctactttcctgagtcatatgatggtgaacgtca

SEQ ID NO: 109705 - DNA, 33 bp, Homo sapien
atgccagtttaagttacgacatattttgtaaac

SEQ ID NO: 109706 - DNA, 33 bp, Homo sapien
atgccagtttaagttatgacatattttgtaaac

SEQ ID NO: 109707 - DNA, 33 bp, Homo sapien
ttaaatttccatctaccgacactctgctgaagc

SEQ ID NO: 109708 - DNA, 33 bp, Homo sapien
ttaaatttccatctactgacactctgctgaagc

SEQ ID NO: 109709 - DNA, 33 bp, Homo sapien
agaaaatcctaaccacactggctttaaatttcc

SEQ ID NO: 109710 - DNA, 33 bp, Homo sapien
agaaaatcctaaccacgctggctttaaatttcc

SEQ ID NO: 109711 - DNA, 33 bp, Homo sapien
atacatgggctttatacgatgtcaaactatttc

SEQ ID NO: 109712 - DNA, 33 bp, Homo sapien
atacatgggctttatatgatgtcaaactatttc

SEQ ID NO: 109713 - DNA, 33 bp, Homo sapien
cttaattgttcttatccgaaagttactgtgcat

SEQ ID NO: 109714 - DNA, 33 bp, Homo sapien
cttaattgttcttatctgaaagttactgtgcat

SEQ ID NO: 109715 - DNA, 33 bp, Homo sapien
gctccaggaactttaactacaatgatgtagcaa

SEQ ID NO: 109716 - DNA, 33 bp, Homo sapien
gctccaggaactttaattacaatgatgtagcaa

SEQ ID NO: 109717 - DNA, 33 bp, Homo sapien
tctttgttgaaattcaagtttaatgggaatctc

SEQ ID NO: 109718 - DNA, 33 bp, Homo sapien
tctttgttgaaattcaggtttaatgggaatctc

SEQ ID NO: 109719 - DNA, 33 bp, Homo sapien
ggaaagcaaacaactgaagacaaaaggcattca

SEQ ID NO: 109720 - DNA, 33 bp, Homo sapien
ggaaagcaaacaactggagacaaaaggcattca

SEQ ID NO: 109721 - DNA, 33 bp, Homo sapien
ttcacacccattttcaagtagcagaattaggag

SEQ ID NO: 109722 - DNA, 33 bp, Homo sapien
ttcacacccattttcatgtagcagaattaggag

SEQ ID NO: 109723 - DNA, 33 bp, Homo sapien
cagaggggagcaaagaggtatgtgtagttattc

SEQ ID NO: 109724 - DNA, 33 bp, Homo sapien
cagaggggagcaaagatgtatgtgtagttattc

SEQ ID NO: 109725 - DNA, 33 bp, Homo sapien
tcctcaaagttgataaagatgctctgaatgtat

SEQ ID NO: 109726 - DNA, 33 bp, Homo sapien
tcctcaaagttgataatgatgctctgaatgtat

SEQ ID NO: 109727 - DNA, 33 bp, Homo sapien
acaacagggcttcttacgggaaagtggtcccca

SEQ ID NO: 109728 - DNA, 33 bp, Homo sapien
acaacagggcttcttaggggaaagtggtcccca

SEQ ID NO: 109729 - DNA, 33 bp, Homo sapien
ggctgtttgtcatagcacagttttccttagaag

SEQ ID NO: 109730 - DNA, 33 bp, Homo sapien
ggctgtttgtcatagcgcagttttccttagaag

SEQ ID NO: 109731 - DNA, 33 bp, Homo sapien
tacagagggactctgcaattctcagcatctctg

SEQ ID NO: 109732 - DNA, 33 bp, Homo sapien
tacagagggactctgcgattctcagcatctctg

SEQ ID NO: 109733 - DNA, 33 bp, Homo sapien
atctcccttatcactacgctatcataaaataag

SEQ ID NO: 109734 - DNA, 33 bp, Homo sapien
atctcccttatcactatgctatcataaaataag

SEQ ID NO: 109735 - DNA, 33 bp, Homo sapien
gacacacaggacacatcaagctggaactggcca

SEQ ID NO: 109736 - DNA, 33 bp, Homo sapien
gacacacaggacacatgaagctggaactggcca

SEQ ID NO: 109737 - DNA, 33 bp, Homo sapien
gggaatcagggtgcctaaaagggaatgtaggag

SEQ ID NO: 109738 - DNA, 33 bp, Homo sapien
gggaatcagggtgcctgaaagggaatgtaggag

SEQ ID NO: 109739 - DNA, 33 bp, Homo sapien
aaaacctcctttcatacaatgtgtcaaaaacaa

SEQ ID NO: 109740 - DNA, 33 bp, Homo sapien
aaaacctcctttcatataatgtgtcaaaaacaa

SEQ ID NO: 109741 - DNA, 33 bp, Homo sapien
tatcttcaaataaaacccagccgcaaatccatt

SEQ ID NO: 109742 - DNA, 33 bp, Homo sapien
tatcttcaaataaaacgcagccgcaaatccatt

SEQ ID NO: 109743 - DNA, 33 bp, Homo sapien
taaatttgtctgagtgcatcttgcccttgcctt

SEQ ID NO: 109744 - DNA, 33 bp, Homo sapien
taaatttgtctgagtgtatcttgcccttgcctt

SEQ ID NO: 109745 - DNA, 33 bp, Homo sapien
acatgataggagctcaataaatgaaggccatta

SEQ ID NO: 109746 - DNA, 33 bp, Homo sapien
acatgataggagctcagtaaatgaaggccatta

SEQ ID NO: 109747 - DNA, 33 bp, Homo sapien
gaataaacataaagaaatacaagcaacctttca

SEQ ID NO: 109748 - DNA, 33 bp, Homo sapien
gaataaacataaagaagtacaagcaacctttca

SEQ ID NO: 109749 - DNA, 33 bp, Homo sapien
tgttatcagaaaaaaaataatggtgctctggtt

SEQ ID NO: 109750 - DNA, 33 bp, Homo sapien
tgttatcagaaaaaaagtaatggtgctctggtt

SEQ ID NO: 109751 - DNA, 33 bp, Homo sapien
ttgcactgaactttaacaatctccaaaatcttc

SEQ ID NO: 109752 - DNA, 33 bp, Homo sapien
ttgcactgaactttaataatctccaaaatcttc

SEQ ID NO: 109753 - DNA, 33 bp, Homo sapien
aagaattttggagaaaacttagtcttgactccc

SEQ ID NO: 109754 - DNA, 33 bp, Homo sapien
aagaattttggagaaaccttagtcttgactccc

SEQ ID NO: 109755 - DNA, 33 bp, Homo sapien
agcctggattcaactccctgtggttagactcag

SEQ ID NO: 109756 - DNA, 33 bp, Homo sapien
agcctggattcaactctctgtggttagactcag

SEQ ID NO: 109757 - DNA, 33 bp, Homo sapien
gattctcacaggaacacgaactctactgtcaac

SEQ ID NO: 109758 - DNA, 33 bp, Homo sapien
gattctcacaggaacatgaactctactgtcaac

SEQ ID NO: 109759 - DNA, 33 bp, Homo sapien
ttctggggacaaaaaacaatccagttagctctc

SEQ ID NO: 109760 - DNA, 33 bp, Homo sapien
ttctggggacaaaaaataatccagttagctctc

SEQ ID NO: 109761 - DNA, 33 bp, Homo sapien
gctgatggtatagttgcagtctgaatccaaggc

SEQ ID NO: 109762 - DNA, 33 bp, Homo sapien
gctgatggtatagttgtagtctgaatccaaggc

SEQ ID NO: 109763 - DNA, 33 bp, Homo sapien
gatttgctgctctatacaaaccatcgaatttct

SEQ ID NO: 109764 - DNA, 33 bp, Homo sapien
gatttgctgctctatataaaccatcgaatttct

SEQ ID NO: 109765 - DNA, 33 bp, Homo sapien
ttgtttcattatcctaaacttgtgttgttcaca

SEQ ID NO: 109766 - DNA, 33 bp, Homo sapien
ttgtttcattatcctagacttgtgttgttcaca

SEQ ID NO: 109767 - DNA, 33 bp, Homo sapien
acagtctaatacataaatctctcataatagact

SEQ ID NO: 109768 - DNA, 33 bp, Homo sapien
acagtctaatacataagtctctcataatagact

SEQ ID NO: 109769 - DNA, 33 bp, Homo sapien
taagtaagcataaatacagtttccagtgtactt

SEQ ID NO: 109770 - DNA, 33 bp, Homo sapien
taagtaagcataaatatagtttccagtgtactt

SEQ ID NO: 109771 - DNA, 33 bp, Homo sapien
aaaattgagattccagcaagccaaattaaacat

SEQ ID NO: 109772 - DNA, 33 bp, Homo sapien
aaaattgagattccagtaagccaaattaaacat

SEQ ID NO: 109773 - DNA, 33 bp, Homo sapien
ctctagtgatgattgaatagtctatgcagaagt

SEQ ID NO: 109774 - DNA, 33 bp, Homo sapien
ctctagtgatgattgagtagtctatgcagaagt

SEQ ID NO: 109775 - DNA, 33 bp, Homo sapien
gcagagaatgtttcgcccccccttacgaacatg

SEQ ID NO: 109776 - DNA, 33 bp, Homo sapien
gcagagaatgtttcgcgcccccttacgaacatg

SEQ ID NO: 109777 - DNA, 33 bp, Homo sapien
tagcagcttcttcgaggccctcaagggcaggat

SEQ ID NO: 109778 - DNA, 33 bp, Homo sapien
tagcagcttcttcgagtccctcaagggcaggat

SEQ ID NO: 109779 - DNA, 33 bp, Homo sapien
tttcaagagactacatgagcagatacagtgtca

SEQ ID NO: 109780 - DNA, 33 bp, Homo sapien
tttcaagagactacattagcagatacagtgtca

SEQ ID NO: 109781 - DNA, 33 bp, Homo sapien
gctttcatttgtcccacgtttatctcttttaaa

SEQ ID NO: 109782 - DNA, 33 bp, Homo sapien
gctttcatttgtcccatgtttatctcttttaaa

SEQ ID NO: 109783 - DNA, 33 bp, Homo sapien
ggcagccagtgaaaaacgagaatataagcattc

SEQ ID NO: 109784 - DNA, 33 bp, Homo sapien
ggcagccagtgaaaaatgagaatataagcattc

SEQ ID NO: 109785 - DNA, 33 bp, Homo sapien
tctgtctaagtatccacgtaactctatgcctag

SEQ ID NO: 109786 - DNA, 33 bp, Homo sapien
tctgtctaagtatccaggtaactctatgcctag

SEQ ID NO: 109787 - DNA, 33 bp, Homo sapien
tcatgtgctagatgataagggaacattcactgg

SEQ ID NO: 109788 - DNA, 33 bp, Homo sapien
tcatgtgctagatgatgagggaacattcactgg

SEQ ID NO: 109789 - DNA, 33 bp, Homo sapien
taagaggcaaaccgtacggccagggagccaatt

SEQ ID NO: 109790 - DNA, 33 bp, Homo sapien
taagaggcaaaccgtatggccagggagccaatt

SEQ ID NO: 109791 - DNA, 33 bp, Homo sapien
ataaagctcttcttacacattagtctaccatct

SEQ ID NO: 109792 - DNA, 33 bp, Homo sapien
ataaagctcttcttacgcattagtctaccatct

SEQ ID NO: 109793 - DNA, 33 bp, Homo sapien
ttctgcctaagagccaggacaaagctaaacaaa

SEQ ID NO: 109794 - DNA, 33 bp, Homo sapien
ttctgcctaagagccatgacaaagctaaacaaa

SEQ ID NO: 109795 - DNA, 33 bp, Homo sapien
aaaggcaggagatttggagtaattgtgcaaatt

SEQ ID NO: 109796 - DNA, 33 bp, Homo sapien
aaaggcaggagatttgtagtaattgtgcaaatt

SEQ ID NO: 109797 - DNA, 33 bp, Homo sapien
ctttcagtctctgaagaatgagactttcccact

SEQ ID NO: 109798 - DNA, 33 bp, Homo sapien
ctttcagtctctgaagtatgagactttcccact

SEQ ID NO: 109799 - DNA, 33 bp, Homo sapien
ggcaggaaaatggcaaaagtactacaatcacta

SEQ ID NO: 109800 - DNA, 33 bp, Homo sapien
ggcaggaaaatggcaagagtactacaatcacta

SEQ ID NO: 109801 - DNA, 33 bp, Homo sapien
cctaaacaggaaacaactaatgtacattgaaaa

SEQ ID NO: 109802 - DNA, 33 bp, Homo sapien
cctaaacaggaaacaagtaatgtacattgaaaa

SEQ ID NO: 109803 - DNA, 33 bp, Homo sapien
aaatctgctgactgtcaaaaacctaaatgatga

SEQ ID NO: 109804 - DNA, 33 bp, Homo sapien
aaatctgctgactgtcgaaaacctaaatgatga

SEQ ID NO: 109805 - DNA, 33 bp, Homo sapien
aaatgaaacattgcagacaaaatttaaaagctt

SEQ ID NO: 109806 - DNA, 33 bp, Homo sapien
aaatgaaacattgcaggcaaaatttaaaagctt

SEQ ID NO: 109807 - DNA, 33 bp, Homo sapien
ttctaccaacatcctacccatcaagtttaataa

SEQ ID NO: 109808 - DNA, 33 bp, Homo sapien
ttctaccaacatcctagccatcaagtttaataa

SEQ ID NO: 109809 - DNA, 33 bp, Homo sapien
tgccaagccagtaacacctgttcaagacattaa

SEQ ID NO: 109810 - DNA, 33 bp, Homo sapien
tgccaagccagtaacagctgttcaagacattaa

SEQ ID NO: 109811 - DNA, 33 bp, Homo sapien
tagagtcagtggaaaaaatagtcatcatctaat

SEQ ID NO: 109812 - DNA, 33 bp, Homo sapien
tagagtcagtggaaaagatagtcatcatctaat

SEQ ID NO: 109813 - DNA, 33 bp, Homo sapien
aaaggctagttaaatcaccctttttgaatcagg

SEQ ID NO: 109814 - DNA, 33 bp, Homo sapien
aaaggctagttaaatctccctttttgaatcagg

SEQ ID NO: 109815 - DNA, 33 bp, Homo sapien
aggtgaaaataataggacatgaactgaagagct

SEQ ID NO: 109816 - DNA, 33 bp, Homo sapien
aggtgaaaataatagggcatgaactgaagagct

SEQ ID NO: 109817 - DNA, 33 bp, Homo sapien
ccatcgctttcactcaatattcatggagagggc

SEQ ID NO: 109818 - DNA, 33 bp, Homo sapien
ccatcgctttcactcagtattcatggagagggc

SEQ ID NO: 109819 - DNA, 33 bp, Homo sapien
aaattagctgatgtaaagttctaagctaatcca

SEQ ID NO: 109820 - DNA, 33 bp, Homo sapien
aaattagctgatgtaatgttctaagctaatcca

SEQ ID NO: 109821 - DNA, 33 bp, Homo sapien
acttccctttgtgctacgtaaatacagtctttt

SEQ ID NO: 109822 - DNA, 33 bp, Homo sapien
acttccctttgtgctatgtaaatacagtctttt

SEQ ID NO: 109823 - DNA, 33 bp, Homo sapien
agaaggtgcgtagaataattagattacatctgt

SEQ ID NO: 109824 - DNA, 33 bp, Homo sapien
agaaggtgcgtagaatgattagattacatctgt

SEQ ID NO: 109825 - DNA, 33 bp, Homo sapien
gggtctaaaactcagagctctcattcaaatgat

SEQ ID NO: 109826 - DNA, 33 bp, Homo sapien
gggtctaaaactcagatctctcattcaaatgat

SEQ ID NO: 109827 - DNA, 33 bp, Homo sapien
tctcatgcagtgcttgaaacataataggtgctc

SEQ ID NO: 109828 - DNA, 33 bp, Homo sapien
tctcatgcagtgcttggaacataataggtgctc

SEQ ID NO: 109829 - DNA, 33 bp, Homo sapien
ttggcattcctttagaactgatgttattaacac

SEQ ID NO: 109830 - DNA, 33 bp, Homo sapien
ttggcattcctttagatctgatgttattaacac

SEQ ID NO: 109831 - DNA, 33 bp, Homo sapien
tataagccaagcatcaagatctgataatcagca

SEQ ID NO: 109832 - DNA, 33 bp, Homo sapien
tataagccaagcatcaggatctgataatcagca

SEQ ID NO: 109833 - DNA, 33 bp, Homo sapien
aaataaagctctttcaagtactctacaaacatt

SEQ ID NO: 109834 - DNA, 33 bp, Homo sapien
aaataaagctctttcaggtactctacaaacatt

SEQ ID NO: 109835 - DNA, 33 bp, Homo sapien
gactatgctgatgtgacaattttttcaacaaat

SEQ ID NO: 109836 - DNA, 33 bp, Homo sapien
gactatgctgatgtgataattttttcaacaaat

SEQ ID NO: 109837 - DNA, 33 bp, Homo sapien
agctcataatggaaagccaaaaatcatttgttg

SEQ ID NO: 109838 - DNA, 33 bp, Homo sapien
agctcataatggaaagtcaaaaatcatttgttg

SEQ ID NO: 109839 - DNA, 33 bp, Homo sapien
gagctcagtgcccttcaaagcactggaaatata

SEQ ID NO: 109840 - DNA, 33 bp, Homo sapien
gagctcagtgcccttccaagcactggaaatata

SEQ ID NO: 109841 - DNA, 33 bp, Homo sapien
tccaaatgagataactcaatatcagacaggtta

SEQ ID NO: 109842 - DNA, 33 bp, Homo sapien
tccaaatgagataactgaatatcagacaggtta

SEQ ID NO: 109843 - DNA, 33 bp, Homo sapien
ttaagcaattggaatgaatactatagaaaccat

SEQ ID NO: 109844 - DNA, 33 bp, Homo sapien
ttaagcaattggaatggatactatagaaaccat

SEQ ID NO: 109845 - DNA, 33 bp, Homo sapien
cagcataacaggtttgaataattcttttcatgg

SEQ ID NO: 109846 - DNA, 33 bp, Homo sapien
cagcataacaggtttggataattcttttcatgg

SEQ ID NO: 109847 - DNA, 33 bp, Homo sapien
agacctcaaatggtaaaggtttgaattaacagg

SEQ ID NO: 109848 - DNA, 33 bp, Homo sapien
agacctcaaatggtaagggtttgaattaacagg

SEQ ID NO: 109849 - DNA, 33 bp, Homo sapien
ttttagtacaaatgacaaaaggagattattctg

SEQ ID NO: 109850 - DNA, 33 bp, Homo sapien
ttttagtacaaatgacgaaaggagattattctg

SEQ ID NO: 109851 - DNA, 33 bp, Homo sapien
cactgtggttttcaagaaaaattacaaactcct

SEQ ID NO: 109852 - DNA, 33 bp, Homo sapien
cactgtggttttcaagcaaaattacaaactcct

SEQ ID NO: 109853 - DNA, 33 bp, Homo sapien
gagaaacacaaggaaaacagtgattacagaact

SEQ ID NO: 109854 - DNA, 33 bp, Homo sapien
gagaaacacaaggaaaccagtgattacagaact

SEQ ID NO: 109855 - DNA, 33 bp, Homo sapien
tcaaagtgataaattacacacatagaaagaaaa

SEQ ID NO: 109856 - DNA, 33 bp, Homo sapien
tcaaagtgataaattagacacatagaaagaaaa

SEQ ID NO: 109857 - DNA, 33 bp, Homo sapien
tagttatctaacccagaagcatttcttaatctg

SEQ ID NO: 109858 - DNA, 33 bp, Homo sapien
tagttatctaacccagcagcatttcttaatctg

SEQ ID NO: 109859 - DNA, 33 bp, Homo sapien
aaaaatgctactgtaacgtgtgaaaattattaa

SEQ ID NO: 109860 - DNA, 33 bp, Homo sapien
aaaaatgctactgtaatgtgtgaaaattattaa

SEQ ID NO: 109861 - DNA, 33 bp, Homo sapien
cacaaacatccccttgcaaaagatgaaaacctg

SEQ ID NO: 109862 - DNA, 33 bp, Homo sapien
cacaaacatccccttgtaaaagatgaaaacctg

SEQ ID NO: 109863 - DNA, 33 bp, Homo sapien
taacagaacctcacaactctgctaagtagtaag

SEQ ID NO: 109864 - DNA, 33 bp, Homo sapien
taacagaacctcacaattctgctaagtagtaag

SEQ ID NO: 109865 - DNA, 33 bp, Homo sapien
ttcttgattgggaataacaagataaatacacct

SEQ ID NO: 109866 - DNA, 33 bp, Homo sapien
ttcttgattgggaatagcaagataaatacacct

SEQ ID NO: 109867 - DNA, 33 bp, Homo sapien
catgttgaactcggtaaaagtctttctgtttat

SEQ ID NO: 109868 - DNA, 33 bp, Homo sapien
catgttgaactcggtagaagtctttctgtttat

SEQ ID NO: 109869 - DNA, 33 bp, Homo sapien
tatttgtgaaataggacataacacatattcatc

SEQ ID NO: 109870 - DNA, 33 bp, Homo sapien
tatttgtgaaataggatataacacatattcatc

SEQ ID NO: 109871 - DNA, 33 bp, Homo sapien
gccccaagaacaagcacggcttacataatacat

SEQ ID NO: 109872 - DNA, 33 bp, Homo sapien
gccccaagaacaagcagggcttacataatacat

SEQ ID NO: 109873 - DNA, 33 bp, Homo sapien
atctaactactttttccctgaaatgctacagtg

SEQ ID NO: 109874 - DNA, 33 bp, Homo sapien
atctaactactttttctctgaaatgctacagtg

SEQ ID NO: 109875 - DNA, 33 bp, Homo sapien
ttagatggtggaatgaggataaaaggaagaaat

SEQ ID NO: 109876 - DNA, 33 bp, Homo sapien
ttagatggtggaatgatgataaaaggaagaaat

SEQ ID NO: 109877 - DNA, 33 bp, Homo sapien
cacaaactgtgtactcaaacctcactaaaaatg

SEQ ID NO: 109878 - DNA, 33 bp, Homo sapien
cacaaactgtgtactccaacctcactaaaaatg

SEQ ID NO: 109879 - DNA, 33 bp, Homo sapien
caaatgaaactgatacaatcatgtcaaaggtat

SEQ ID NO: 109880 - DNA, 33 bp, Homo sapien
caaatgaaactgatacgatcatgtcaaaggtat

SEQ ID NO: 109881 - DNA, 33 bp, Homo sapien
agattttgatcaacaaactagttagtctacagc

SEQ ID NO: 109882 - DNA, 33 bp, Homo sapien
agattttgatcaacaagctagttagtctacagc

SEQ ID NO: 109883 - DNA, 33 bp, Homo sapien
tctaaatggactttgcgatttttaacaaggaga

SEQ ID NO: 109884 - DNA, 33 bp, Homo sapien
tctaaatggactttgctatttttaacaaggaga

SEQ ID NO: 109885 - DNA, 33 bp, Homo sapien
agggctctgacatctccatttttaacaaacatc

SEQ ID NO: 109886 - DNA, 33 bp, Homo sapien
agggctctgacatctctatttttaacaaacatc

SEQ ID NO: 109887 - DNA, 33 bp, Homo sapien
ttctgcaggtagccataaagtctagaaacagtt

SEQ ID NO: 109888 - DNA, 33 bp, Homo sapien
ttctgcaggtagccatgaagtctagaaacagtt

SEQ ID NO: 109889 - DNA, 33 bp, Homo sapien
acaatgtttgctaattcaagtgatcaaataatg

SEQ ID NO: 109890 - DNA, 33 bp, Homo sapien
acaatgtttgctaatttaagtgatcaaataatg

SEQ ID NO: 109891 - DNA, 33 bp, Homo sapien
tctacaaaaaatggtaaagcttagctggaggta

SEQ ID NO: 109892 - DNA, 33 bp, Homo sapien
tctacaaaaaatggtagagcttagctggaggta

SEQ ID NO: 109893 - DNA, 33 bp, Homo sapien
tttatctgagatgataagctggataaaacagag

SEQ ID NO: 109894 - DNA, 33 bp, Homo sapien
tttatctgagatgataggctggataaaacagag

SEQ ID NO: 109895 - DNA, 33 bp, Homo sapien
atattgggtgagatagaacgttattaaaattaa

SEQ ID NO: 109896 - DNA, 33 bp, Homo sapien
atattgggtgagatagcacgttattaaaattaa

SEQ ID NO: 109897 - DNA, 33 bp, Homo sapien
ccatattagacatatcaagctttagatctcaat

SEQ ID NO: 109898 - DNA, 33 bp, Homo sapien
ccatattagacatatcgagctttagatctcaat

SEQ ID NO: 109899 - DNA, 33 bp, Homo sapien
ttaccagtttagacacaaatgacatgatcgtag

SEQ ID NO: 109900 - DNA, 33 bp, Homo sapien
ttaccagtttagacacgaatgacatgatcgtag

SEQ ID NO: 109901 - DNA, 33 bp, Homo sapien
cttgggattccggatggagtgttctttccactg

SEQ ID NO: 109902 - DNA, 33 bp, Homo sapien
cttgggattccggatgtagtgttctttccactg

SEQ ID NO: 109903 - DNA, 33 bp, Homo sapien
tttcctttgctatagaaataaatgagaagtatg

SEQ ID NO: 109904 - DNA, 33 bp, Homo sapien
tttcctttgctatagagataaatgagaagtatg

SEQ ID NO: 109905 - DNA, 33 bp, Homo sapien
ataaacactgtggaacactatgcataaaaggac

SEQ ID NO: 109906 - DNA, 33 bp, Homo sapien
ataaacactgtggaacgctatgcataaaaggac

SEQ ID NO: 109907 - DNA, 33 bp, Homo sapien
attaggaaacaccttacagtgaaagaaaatatc

SEQ ID NO: 109908 - DNA, 33 bp, Homo sapien
attaggaaacaccttagagtgaaagaaaatatc

SEQ ID NO: 109909 - DNA, 33 bp, Homo sapien
atccttgtgatttccagatgaagctagaaagca

SEQ ID NO: 109910 - DNA, 33 bp, Homo sapien
atccttgtgatttccatatgaagctagaaagca

SEQ ID NO: 109911 - DNA, 33 bp, Homo sapien
ctcagcactgtgagaactgcttggagtgtgtct

SEQ ID NO: 109912 - DNA, 33 bp, Homo sapien
ctcagcactgtgagaattgcttggagtgtgtct

SEQ ID NO: 109913 - DNA, 33 bp, Homo sapien
tagctgctctaagcaaccacaaggaaagatata

SEQ ID NO: 109914 - DNA, 33 bp, Homo sapien
tagctgctctaagcaatcacaaggaaagatata

SEQ ID NO: 109915 - DNA, 33 bp, Homo sapien
tttagatccaacttccaacttacagaaactaca

SEQ ID NO: 109916 - DNA, 33 bp, Homo sapien
tttagatccaacttccgacttacagaaactaca

SEQ ID NO: 109917 - DNA, 33 bp, Homo sapien
tctaaactctggatcaagattctgttttgtgtt

SEQ ID NO: 109918 - DNA, 33 bp, Homo sapien
tctaaactctggatcacgattctgttttgtgtt

SEQ ID NO: 109919 - DNA, 33 bp, Homo sapien
tcttgaggaaggaaaacgaatactactctgaag

SEQ ID NO: 109920 - DNA, 33 bp, Homo sapien
tcttgaggaaggaaaatgaatactactctgaag

SEQ ID NO: 109921 - DNA, 33 bp, Homo sapien
aattagattggtagcacagagtaaggcaaattt

SEQ ID NO: 109922 - DNA, 33 bp, Homo sapien
aattagattggtagcatagagtaaggcaaattt

SEQ ID NO: 109923 - DNA, 33 bp, Homo sapien
tattccgtttctttgacatagcaggaaaatctt

SEQ ID NO: 109924 - DNA, 33 bp, Homo sapien
tattccgtttctttgatatagcaggaaaatctt

SEQ ID NO: 109925 - DNA, 33 bp, Homo sapien
tttcacaacacctagcactcagaactatgtcta

SEQ ID NO: 109926 - DNA, 33 bp, Homo sapien
tttcacaacacctagcgctcagaactatgtcta

SEQ ID NO: 109927 - DNA, 33 bp, Homo sapien
tagattttcttctaaaaggtagccattggggca

SEQ ID NO: 109928 - DNA, 33 bp, Homo sapien
tagattttcttctaaagggtagccattggggca

SEQ ID NO: 109929 - DNA, 33 bp, Homo sapien
ggtaaaactcttcgcacaggacatgacaggctg

SEQ ID NO: 109930 - DNA, 33 bp, Homo sapien
ggtaaaactcttcgcataggacatgacaggctg

SEQ ID NO: 109931 - DNA, 33 bp, Homo sapien
ataggaatattgttgagagttactgtggtgatg

SEQ ID NO: 109932 - DNA, 33 bp, Homo sapien
ataggaatattgttgatagttactgtggtgatg

SEQ ID NO: 109933 - DNA, 33 bp, Homo sapien
agtgaaaattccttgcgcagagttcagtttcta

SEQ ID NO: 109934 - DNA, 33 bp, Homo sapien
agtgaaaattccttgctcagagttcagtttcta

SEQ ID NO: 109935 - DNA, 33 bp, Homo sapien
atccagtcattccttcaacaccagtgaaaccta

SEQ ID NO: 109936 - DNA, 33 bp, Homo sapien
atccagtcattccttcgacaccagtgaaaccta

SEQ ID NO: 109937 - DNA, 33 bp, Homo sapien
ctgccctgatctcaagaaatctggacttctggt

SEQ ID NO: 109938 - DNA, 33 bp, Homo sapien
ctgccctgatctcaaggaatctggacttctggt

SEQ ID NO: 109939 - DNA, 33 bp, Homo sapien
ttaataggccttagaaaacctacacaatcaaaa

SEQ ID NO: 109940 - DNA, 33 bp, Homo sapien
ttaataggccttagaagacctacacaatcaaaa

SEQ ID NO: 109941 - DNA, 33 bp, Homo sapien
agtgaaatgttgctaaccacctggtgtcagtaa

SEQ ID NO: 109942 - DNA, 33 bp, Homo sapien
agtgaaatgttgctaatcacctggtgtcagtaa

SEQ ID NO: 109943 - DNA, 33 bp, Homo sapien
acttggtctgcttctcccttggataagactgga

SEQ ID NO: 109944 - DNA, 33 bp, Homo sapien
acttggtctgcttctctcttggataagactgga

SEQ ID NO: 109945 - DNA, 33 bp, Homo sapien
ctttgcactgaatggcacttctaagggtctctt

SEQ ID NO: 109946 - DNA, 33 bp, Homo sapien
ctttgcactgaatggcgcttctaagggtctctt

SEQ ID NO: 109947 - DNA, 33 bp, Homo sapien
tacactggatacttaaagagaaggtgtccctat

SEQ ID NO: 109948 - DNA, 33 bp, Homo sapien
tacactggatacttaaggagaaggtgtccctat

SEQ ID NO: 109949 - DNA, 33 bp, Homo sapien
tatattgagattctaaataaagctgtttgaaat

SEQ ID NO: 109950 - DNA, 33 bp, Homo sapien
tatattgagattctaagtaaagctgtttgaaat

SEQ ID NO: 109951 - DNA, 33 bp, Homo sapien
tatgtatttgaaagtacctaactgtgtaaatgg

SEQ ID NO: 109952 - DNA, 33 bp, Homo sapien
tatgtatttgaaagtatctaactgtgtaaatgg

SEQ ID NO: 109953 - DNA, 33 bp, Homo sapien
tcttttttaaaaacataatccacaataatcaaa

SEQ ID NO: 109954 - DNA, 33 bp, Homo sapien
tcttttttaaaaacattatccacaataatcaaa

SEQ ID NO: 109955 - DNA, 33 bp, Homo sapien
tctctgaatgctggaaagtttaaaagtacaaag

SEQ ID NO: 109956 - DNA, 33 bp, Homo sapien
tctctgaatgctggaaggtttaaaagtacaaag

SEQ ID NO: 109957 - DNA, 33 bp, Homo sapien
ttggggaaagtgaagaaggtctccttaaattaa

SEQ ID NO: 109958 - DNA, 33 bp, Homo sapien
ttggggaaagtgaagacggtctccttaaattaa

SEQ ID NO: 109959 - DNA, 33 bp, Homo sapien
gagcaggagatcacaacgacctgagaacatttc

SEQ ID NO: 109960 - DNA, 33 bp, Homo sapien
gagcaggagatcacaatgacctgagaacatttc

SEQ ID NO: 109961 - DNA, 33 bp, Homo sapien
tgctgactaggtgataaaacatttggcagtaga

SEQ ID NO: 109962 - DNA, 33 bp, Homo sapien
tgctgactaggtgatagaacatttggcagtaga

SEQ ID NO: 109963 - DNA, 33 bp, Homo sapien
aaatatttgctcgcacaatttgagaatgtatac

SEQ ID NO: 109964 - DNA, 33 bp, Homo sapien
aaatatttgctcgcaccatttgagaatgtatac

SEQ ID NO: 109965 - DNA, 33 bp, Homo sapien
ttctcttgtactagaccaggaatcagcaagtat

SEQ ID NO: 109966 - DNA, 33 bp, Homo sapien
ttctcttgtactagactaggaatcagcaagtat

SEQ ID NO: 109967 - DNA, 33 bp, Homo sapien
gtttacatgggctattaaaatgtctctaggtaa

SEQ ID NO: 109968 - DNA, 33 bp, Homo sapien
gtttacatgggctatttaaatgtctctaggtaa

SEQ ID NO: 109969 - DNA, 33 bp, Homo sapien
tcttagatcactctggaaatgcatccattcaaa

SEQ ID NO: 109970 - DNA, 33 bp, Homo sapien
tcttagatcactctggtaatgcatccattcaaa

SEQ ID NO: 109971 - DNA, 33 bp, Homo sapien
ttactgaggcagtaaccagaatcgtgaaaatta

SEQ ID NO: 109972 - DNA, 33 bp, Homo sapien
ttactgaggcagtaactagaatcgtgaaaatta

SEQ ID NO: 109973 - DNA, 33 bp, Homo sapien
ccactaattcttatgccatgcctatatccacaa

SEQ ID NO: 109974 - DNA, 33 bp, Homo sapien
ccactaattcttatgctatgcctatatccacaa

SEQ ID NO: 109975 - DNA, 33 bp, Homo sapien
tattgttttcctcttacatgaagaaattcccac

SEQ ID NO: 109976 - DNA, 33 bp, Homo sapien
tattgttttcctcttatatgaagaaattcccac

SEQ ID NO: 109977 - DNA, 33 bp, Homo sapien
tagacagcaatttgcactacagaaagaaataga

SEQ ID NO: 109978 - DNA, 33 bp, Homo sapien
tagacagcaatttgcattacagaaagaaataga

SEQ ID NO: 109979 - DNA, 33 bp, Homo sapien
tgtctatgctggcatcacaagatataacagatt

SEQ ID NO: 109980 - DNA, 33 bp, Homo sapien
tgtctatgctggcatctcaagatataacagatt

SEQ ID NO: 109981 - DNA, 33 bp, Homo sapien
ttcccctatgtctgccgcaacttttacatccca

SEQ ID NO: 109982 - DNA, 33 bp, Homo sapien
ttcccctatgtctgcctcaacttttacatccca

SEQ ID NO: 109983 - DNA, 33 bp, Homo sapien
tgaatagaaagctggaataaatttcaaagaacc

SEQ ID NO: 109984 - DNA, 33 bp, Homo sapien
tgaatagaaagctggagtaaatttcaaagaacc

SEQ ID NO: 109985 - DNA, 33 bp, Homo sapien
atctaattcacatggaaaggatttagctggcac

SEQ ID NO: 109986 - DNA, 33 bp, Homo sapien
atctaattcacatggagaggatttagctggcac

SEQ ID NO: 109987 - DNA, 33 bp, Homo sapien
gatcttgattactttacgtcttttcaattcaaa

SEQ ID NO: 109988 - DNA, 33 bp, Homo sapien
gatcttgattactttatgtcttttcaattcaaa

SEQ ID NO: 109989 - DNA, 33 bp, Homo sapien
tgtaacgtattggtgtaaattaagaagtacttc

SEQ ID NO: 109990 - DNA, 33 bp, Homo sapien
tgtaacgtattggtgttaattaagaagtacttc

SEQ ID NO: 109991 - DNA, 33 bp, Homo sapien
caaattatctttatggaaaagttagttgagtat

SEQ ID NO: 109992 - DNA, 33 bp, Homo sapien
caaattatctttatgggaaagttagttgagtat

SEQ ID NO: 109993 - DNA, 33 bp, Homo sapien
cagtctagaaagtggacgtaaaaatattcagag

SEQ ID NO: 109994 - DNA, 33 bp, Homo sapien
cagtctagaaagtggatgtaaaaatattcagag

SEQ ID NO: 109995 - DNA, 33 bp, Homo sapien
gtcactgcattaaagtaaatatgtgtgtgtctg

SEQ ID NO: 109996 - DNA, 33 bp, Homo sapien
gtcactgcattaaagtcaatatgtgtgtgtctg

SEQ ID NO: 109997 - DNA, 33 bp, Homo sapien
cttggctaagattgcacggtatgtcagtaatga

SEQ ID NO: 109998 - DNA, 33 bp, Homo sapien
cttggctaagattgcatggtatgtcagtaatga

SEQ ID NO: 109999 - DNA, 33 bp, Homo sapien
tacttttcatgtaatacagcttggagtttcttt

SEQ ID NO: 110000 - DNA, 33 bp, Homo sapien
tacttttcatgtaatatagcttggagtttcttt

SEQ ID NO: 110001 - DNA, 33 bp, Homo sapien
ctcattaaaagatatacgttgaatgtgtgcatt

SEQ ID NO: 110002 - DNA, 33 bp, Homo sapien
ctcattaaaagatatatgttgaatgtgtgcatt

SEQ ID NO: 110003 - DNA, 33 bp, Homo sapien
gcatgtcattattggccaacattcccctgactt

SEQ ID NO: 110004 - DNA, 33 bp, Homo sapien
gcatgtcattattggctaacattcccctgactt

SEQ ID NO: 110005 - DNA, 33 bp, Homo sapien
ccacttagatacagaacagtgaagttactcatg

SEQ ID NO: 110006 - DNA, 33 bp, Homo sapien
ccacttagatacagaagagtgaagttactcatg

SEQ ID NO: 110007 - DNA, 33 bp, Homo sapien
tctgtctcttcatttgcataaggtagataataa

SEQ ID NO: 110008 - DNA, 33 bp, Homo sapien
tctgtctcttcatttgtataaggtagataataa

SEQ ID NO: 110009 - DNA, 33 bp, Homo sapien
agtttgatttctggagacaaatgtcataatcca

SEQ ID NO: 110010 - DNA, 33 bp, Homo sapien
agtttgatttctggagtcaaatgtcataatcca

SEQ ID NO: 110011 - DNA, 33 bp, Homo sapien
tacactaatccatcaaaacttacaggtatctta

SEQ ID NO: 110012 - DNA, 33 bp, Homo sapien
tacactaatccatcaacacttacaggtatctta

SEQ ID NO: 110013 - DNA, 33 bp, Homo sapien
ttaacatcgaataagaactttgactatatgacc

SEQ ID NO: 110014 - DNA, 33 bp, Homo sapien
ttaacatcgaataagacctttgactatatgacc

SEQ ID NO: 110015 - DNA, 33 bp, Homo sapien
tttttttcatgtgtaaataagataaatcacacc

SEQ ID NO: 110016 - DNA, 33 bp, Homo sapien
tttttttcatgtgtaagtaagataaatcacacc

SEQ ID NO: 110017 - DNA, 33 bp, Homo sapien
aactggggaaaagaggaagattagtagacatca

SEQ ID NO: 110018 - DNA, 33 bp, Homo sapien
aactggggaaaagagggagattagtagacatca

SEQ ID NO: 110019 - DNA, 33 bp, Homo sapien
ataagtgacagctaaaaattgagtgcacatgga

SEQ ID NO: 110020 - DNA, 33 bp, Homo sapien
ataagtgacagctaaacattgagtgcacatgga

SEQ ID NO: 110021 - DNA, 33 bp, Homo sapien
gtactattgttattacccagatgggattagaca

SEQ ID NO: 110022 - DNA, 33 bp, Homo sapien
gtactattgttattactcagatgggattagaca

SEQ ID NO: 110023 - DNA, 33 bp, Homo sapien
ttcatggaaagtgttcaaaatggttgctctgta

SEQ ID NO: 110024 - DNA, 33 bp, Homo sapien
ttcatggaaagtgttcgaaatggttgctctgta

SEQ ID NO: 110025 - DNA, 33 bp, Homo sapien
gagagttatcaaacaacgtggtgcaggagataa

SEQ ID NO: 110026 - DNA, 33 bp, Homo sapien
gagagttatcaaacaatgtggtgcaggagataa

SEQ ID NO: 110027 - DNA, 33 bp, Homo sapien
ttaatgaggaacaaaccgtgaccaaccaaggct

SEQ ID NO: 110028 - DNA, 33 bp, Homo sapien
ttaatgaggaacaaactgtgaccaaccaaggct

SEQ ID NO: 110029 - DNA, 33 bp, Homo sapien
tttgcctcatgttctacgtgttcccttaattat

SEQ ID NO: 110030 - DNA, 33 bp, Homo sapien
tttgcctcatgttctatgtgttcccttaattat

SEQ ID NO: 110031 - DNA, 33 bp, Homo sapien
tgtaagtaataaaaaacaatggtagctcttccc

SEQ ID NO: 110032 - DNA, 33 bp, Homo sapien
tgtaagtaataaaaaagaatggtagctcttccc

SEQ ID NO: 110033 - DNA, 33 bp, Homo sapien
gatgatagaagaaaaacgagtcttattcctttc

SEQ ID NO: 110034 - DNA, 33 bp, Homo sapien
gatgatagaagaaaaatgagtcttattcctttc

SEQ ID NO: 110035 - DNA, 33 bp, Homo sapien
ctttcactactccagaagtcacagacagacggt

SEQ ID NO: 110036 - DNA, 33 bp, Homo sapien
ctttcactactccagacgtcacagacagacggt

SEQ ID NO: 110037 - DNA, 33 bp, Homo sapien
aagatttagaagctgacgtcccctactcttgag

SEQ ID NO: 110038 - DNA, 33 bp, Homo sapien
aagatttagaagctgatgtcccctactcttgag

SEQ ID NO: 110039 - DNA, 33 bp, Homo sapien
tatagaggaaaactcagtataacctgtggttct

SEQ ID NO: 110040 - DNA, 33 bp, Homo sapien
tatagaggaaaactcattataacctgtggttct

SEQ ID NO: 110041 - DNA, 33 bp, Homo sapien
ctgaaatccagttgtaggagttcggtaactgtt

SEQ ID NO: 110042 - DNA, 33 bp, Homo sapien
ctgaaatccagttgtatgagttcggtaactgtt

SEQ ID NO: 110043 - DNA, 33 bp, Homo sapien
agcacaaatgtagaagacctttaagaaaattat

SEQ ID NO: 110044 - DNA, 33 bp, Homo sapien
agcacaaatgtagaagtcctttaagaaaattat

SEQ ID NO: 110045 - DNA, 33 bp, Homo sapien
tagcacttgtttgagggaacaatgtaaataatt

SEQ ID NO: 110046 - DNA, 33 bp, Homo sapien
tagcacttgtttgaggtaacaatgtaaataatt

SEQ ID NO: 110047 - DNA, 33 bp, Homo sapien
aagttcattaatgggcaacaaactatagacaaa

SEQ ID NO: 110048 - DNA, 33 bp, Homo sapien
aagttcattaatgggcgacaaactatagacaaa

SEQ ID NO: 110049 - DNA, 33 bp, Homo sapien
tttctcaggtcaccaagactgaatttaaatata

SEQ ID NO: 110050 - DNA, 33 bp, Homo sapien
tttctcaggtcaccaatactgaatttaaatata

SEQ ID NO: 110051 - DNA, 33 bp, Homo sapien
ctttaattcctgagtgacaactctcttggctat

SEQ ID NO: 110052 - DNA, 33 bp, Homo sapien
ctttaattcctgagtggcaactctcttggctat

SEQ ID NO: 110053 - DNA, 33 bp, Homo sapien
gacatttgaaagcctaaagagtcttacatactt

SEQ ID NO: 110054 - DNA, 33 bp, Homo sapien
gacatttgaaagcctagagagtcttacatactt

SEQ ID NO: 110055 - DNA, 33 bp, Homo sapien
acaactttctctcttccaaaaagcctctcatat

SEQ ID NO: 110056 - DNA, 33 bp, Homo sapien
acaactttctctcttctaaaaagcctctcatat

SEQ ID NO: 110057 - DNA, 33 bp, Homo sapien
ctgcgagtctggcaaaatggccgaaagaaaatt

SEQ ID NO: 110058 - DNA, 33 bp, Homo sapien
ctgcgagtctggcaaagtggccgaaagaaaatt

SEQ ID NO: 110059 - DNA, 33 bp, Homo sapien
agtactacaccacttacgtttttgttgatttca

SEQ ID NO: 110060 - DNA, 33 bp, Homo sapien
agtactacaccacttatgtttttgttgatttca

SEQ ID NO: 110061 - DNA, 33 bp, Homo sapien
ttattgttacaaccagacctatttttctatcaa

SEQ ID NO: 110062 - DNA, 33 bp, Homo sapien
ttattgttacaaccaggcctatttttctatcaa

SEQ ID NO: 110063 - DNA, 33 bp, Homo sapien
tctagaccaacattgcaaggattatgctttact

SEQ ID NO: 110064 - DNA, 33 bp, Homo sapien
tctagaccaacattgctaggattatgctttact

SEQ ID NO: 110065 - DNA, 33 bp, Homo sapien
ccttcctccaggagaagttaaaggaattgggag

SEQ ID NO: 110066 - DNA, 33 bp, Homo sapien
ccttcctccaggagaatttaaaggaattgggag

SEQ ID NO: 110067 - DNA, 33 bp, Homo sapien
agatgtaagtaggaccaaagcagaatgatcaca

SEQ ID NO: 110068 - DNA, 33 bp, Homo sapien
agatgtaagtaggaccgaagcagaatgatcaca

SEQ ID NO: 110069 - DNA, 33 bp, Homo sapien
taaggaaaagtccaccaaagaatttctagaaaa

SEQ ID NO: 110070 - DNA, 33 bp, Homo sapien
taaggaaaagtccaccgaagaatttctagaaaa

SEQ ID NO: 110071 - DNA, 33 bp, Homo sapien
ttttggaatgcagttacattcattcatttccac

SEQ ID NO: 110072 - DNA, 33 bp, Homo sapien
ttttggaatgcagttatattcattcatttccac

SEQ ID NO: 110073 - DNA, 33 bp, Homo sapien
ggttctggcataaaaacagatataagattaata

SEQ ID NO: 110074 - DNA, 33 bp, Homo sapien
ggttctggcataaaaatagatataagattaata

SEQ ID NO: 110075 - DNA, 33 bp, Homo sapien
gagaagttttatcaagacacaatatacatagcc

SEQ ID NO: 110076 - DNA, 33 bp, Homo sapien
gagaagttttatcaaggcacaatatacatagcc

SEQ ID NO: 110077 - DNA, 33 bp, Homo sapien
tcctttatgtaggtaacgtgttcaaacataagt

SEQ ID NO: 110078 - DNA, 33 bp, Homo sapien
tcctttatgtaggtaatgtgttcaaacataagt

SEQ ID NO: 110079 - DNA, 33 bp, Homo sapien
cttttcattaataccaccctggagaaatggcat

SEQ ID NO: 110080 - DNA, 33 bp, Homo sapien
cttttcattaataccatcctggagaaatggcat

SEQ ID NO: 110081 - DNA, 33 bp, Homo sapien
accagttgagttcaaacagaagcaggccacagg

SEQ ID NO: 110082 - DNA, 33 bp, Homo sapien
accagttgagttcaaatagaagcaggccacagg

SEQ ID NO: 110083 - DNA, 33 bp, Homo sapien
aaatctggaggcataacatactcaacttcaaac

SEQ ID NO: 110084 - DNA, 33 bp, Homo sapien
aaatctggaggcataagatactcaacttcaaac

SEQ ID NO: 110085 - DNA, 33 bp, Homo sapien
agaagagctgtgagaaagttaccatcctccaga

SEQ ID NO: 110086 - DNA, 33 bp, Homo sapien
agaagagctgtgagaaggttaccatcctccaga

SEQ ID NO: 110087 - DNA, 33 bp, Homo sapien
ttagagggttcaagccccaaaccgtggcagctt

SEQ ID NO: 110088 - DNA, 33 bp, Homo sapien
ttagagggttcaagccgcaaaccgtggcagctt

SEQ ID NO: 110089 - DNA, 33 bp, Homo sapien
taaaaacacagcaataacagaacaaggtaaaat

SEQ ID NO: 110090 - DNA, 33 bp, Homo sapien
taaaaacacagcaatatcagaacaaggtaaaat

SEQ ID NO: 110091 - DNA, 33 bp, Homo sapien
gtaattttatggctaacagtataagctaaaaca

SEQ ID NO: 110092 - DNA, 33 bp, Homo sapien
gtaattttatggctaagagtataagctaaaaca

SEQ ID NO: 110093 - DNA, 33 bp, Homo sapien
tatgcaagaataggaaagtccagcccgctctat

SEQ ID NO: 110094 - DNA, 33 bp, Homo sapien
tatgcaagaataggaacgtccagcccgctctat

SEQ ID NO: 110095 - DNA, 33 bp, Homo sapien
tgatatatcaggaagggcaggtttaagctggca

SEQ ID NO: 110096 - DNA, 33 bp, Homo sapien
tgatatatcaggaaggtcaggtttaagctggca

SEQ ID NO: 110097 - DNA, 33 bp, Homo sapien
ctactttatgaagataggtccaattcagcaagt

SEQ ID NO: 110098 - DNA, 33 bp, Homo sapien
ctactttatgaagatatgtccaattcagcaagt

SEQ ID NO: 110099 - DNA, 33 bp, Homo sapien
gtacagtagcatttcaatatgtttactgtcagg

SEQ ID NO: 110100 - DNA, 33 bp, Homo sapien
gtacagtagcatttcagtatgtttactgtcagg

SEQ ID NO: 110101 - DNA, 33 bp, Homo sapien
gatgacagcaagataacgtcaaaaatcttaagg

SEQ ID NO: 110102 - DNA, 33 bp, Homo sapien
gatgacagcaagataatgtcaaaaatcttaagg

SEQ ID NO: 110103 - DNA, 33 bp, Homo sapien
aagtattgttgaatcaaaatttaggtaattctc

SEQ ID NO: 110104 - DNA, 33 bp, Homo sapien
aagtattgttgaatcacaatttaggtaattctc

SEQ ID NO: 110105 - DNA, 33 bp, Homo sapien
caaatctagaatgtcacgacaaattccctatgc

SEQ ID NO: 110106 - DNA, 33 bp, Homo sapien
caaatctagaatgtcaggacaaattccctatgc

SEQ ID NO: 110107 - DNA, 33 bp, Homo sapien
cagggtggtaacaaaagactgtcagaaatccat

SEQ ID NO: 110108 - DNA, 33 bp, Homo sapien
cagggtggtaacaaaatactgtcagaaatccat

SEQ ID NO: 110109 - DNA, 33 bp, Homo sapien
gaaatgtatgacttgcaattagataggaagagt

SEQ ID NO: 110110 - DNA, 33 bp, Homo sapien
gaaatgtatgacttgcgattagataggaagagt

SEQ ID NO: 110111 - DNA, 33 bp, Homo sapien
gttttgtgaatgttagcagagcttgagggagaa

SEQ ID NO: 110112 - DNA, 33 bp, Homo sapien
gttttgtgaatgttagtagagcttgagggagaa

SEQ ID NO: 110113 - DNA, 33 bp, Homo sapien
cctcagaggggcagaaatacatgctgattggtt

SEQ ID NO: 110114 - DNA, 33 bp, Homo sapien
cctcagaggggcagaagtacatgctgattggtt

SEQ ID NO: 110115 - DNA, 33 bp, Homo sapien
gattattaaatgtgtcaaaagatggcattttat

SEQ ID NO: 110116 - DNA, 33 bp, Homo sapien
gattattaaatgtgtcgaaagatggcattttat

SEQ ID NO: 110117 - DNA, 33 bp, Homo sapien
tattaatgtctattcaactgactttggctaatt

SEQ ID NO: 110118 - DNA, 33 bp, Homo sapien
tattaatgtctattcagctgactttggctaatt

SEQ ID NO: 110119 - DNA, 33 bp, Homo sapien
tatgatgatgaggttaagtctaggccactaaaa

SEQ ID NO: 110120 - DNA, 33 bp, Homo sapien
tatgatgatgaggttaggtctaggccactaaaa

SEQ ID NO: 110121 - DNA, 33 bp, Homo sapien
aataattgatgtactaagtgctataggaaaagc

SEQ ID NO: 110122 - DNA, 33 bp, Homo sapien
aataattgatgtactaggtgctataggaaaagc

SEQ ID NO: 110123 - DNA, 33 bp, Homo sapien
gtatgggagcgccttaacatttggactagacta

SEQ ID NO: 110124 - DNA, 33 bp, Homo sapien
gtatgggagcgccttagcatttggactagacta

SEQ ID NO: 110125 - DNA, 33 bp, Homo sapien
ttctccaatcttctataaaaagctgatcccttt

SEQ ID NO: 110126 - DNA, 33 bp, Homo sapien
ttctccaatcttctatgaaaagctgatcccttt

SEQ ID NO: 110127 - DNA, 33 bp, Homo sapien
tattgatcatggtgacagtaattagaatgtctg

SEQ ID NO: 110128 - DNA, 33 bp, Homo sapien
tattgatcatggtgacggtaattagaatgtctg

SEQ ID NO: 110129 - DNA, 33 bp, Homo sapien
acacacaggaggctcaaagttctctatgcttct

SEQ ID NO: 110130 - DNA, 33 bp, Homo sapien
acacacaggaggctcagagttctctatgcttct

SEQ ID NO: 110131 - DNA, 33 bp, Homo sapien
atgacagttgtctgccacccagatggccgactg

SEQ ID NO: 110132 - DNA, 33 bp, Homo sapien
atgacagttgtctgccgcccagatggccgactg

SEQ ID NO: 110133 - DNA, 33 bp, Homo sapien
catcgtacatggcatacggtaagtattgaatga

SEQ ID NO: 110134 - DNA, 33 bp, Homo sapien
catcgtacatggcatatggtaagtattgaatga

SEQ ID NO: 110135 - DNA, 33 bp, Homo sapien
gctcataagatagcccaactttacaaggagttc

SEQ ID NO: 110136 - DNA, 33 bp, Homo sapien
gctcataagatagcccgactttacaaggagttc

SEQ ID NO: 110137 - DNA, 33 bp, Homo sapien
aatatgggaactaagacctaccccagagtccta

SEQ ID NO: 110138 - DNA, 33 bp, Homo sapien
aatatgggaactaagatctaccccagagtccta

SEQ ID NO: 110139 - DNA, 33 bp, Homo sapien
tccatgcagttgcaaaattaaaaggaagaaaat

SEQ ID NO: 110140 - DNA, 33 bp, Homo sapien
tccatgcagttgcaaagttaaaaggaagaaaat

SEQ ID NO: 110141 - DNA, 33 bp, Homo sapien
gccactaaatagccacacagtcctgagttgact

SEQ ID NO: 110142 - DNA, 33 bp, Homo sapien
gccactaaatagccacgcagtcctgagttgact

SEQ ID NO: 110143 - DNA, 33 bp, Homo sapien
acttgcctcctaagtcaagaactaaacaggaga

SEQ ID NO: 110144 - DNA, 33 bp, Homo sapien
acttgcctcctaagtcgagaactaaacaggaga

SEQ ID NO: 110145 - DNA, 33 bp, Homo sapien
ttccagagatttcgtaagccaaaaatgtcagtg

SEQ ID NO: 110146 - DNA, 33 bp, Homo sapien
ttccagagatttcgtacgccaaaaatgtcagtg

SEQ ID NO: 110147 - DNA, 33 bp, Homo sapien
cagggcacttaataacaatagtaatatagtaat

SEQ ID NO: 110148 - DNA, 33 bp, Homo sapien
cagggcacttaataacgatagtaatatagtaat

SEQ ID NO: 110149 - DNA, 33 bp, Homo sapien
cccacttctcaattcccgagctgtgagccttga

SEQ ID NO: 110150 - DNA, 33 bp, Homo sapien
cccacttctcaattcctgagctgtgagccttga

SEQ ID NO: 110151 - DNA, 33 bp, Homo sapien
cacgcagttggtcacacaaagtagcaacacggc

SEQ ID NO: 110152 - DNA, 33 bp, Homo sapien
cacgcagttggtcacataaagtagcaacacggc

SEQ ID NO: 110153 - DNA, 33 bp, Homo sapien
agcagctaataaccacacagtcaacacacagcc

SEQ ID NO: 110154 - DNA, 33 bp, Homo sapien
agcagctaataaccacgcagtcaacacacagcc

SEQ ID NO: 110155 - DNA, 33 bp, Homo sapien
taatgttatttcccaaaagtataagtacatatg

SEQ ID NO: 110156 - DNA, 33 bp, Homo sapien
taatgttatttcccaacagtataagtacatatg

SEQ ID NO: 110157 - DNA, 33 bp, Homo sapien
aagttttgactgtatacagaagtttggctttta

SEQ ID NO: 110158 - DNA, 33 bp, Homo sapien
aagttttgactgtatatagaagtttggctttta

SEQ ID NO: 110159 - DNA, 33 bp, Homo sapien
gccataaccgtagagccgccagagtgcaacgta

SEQ ID NO: 110160 - DNA, 33 bp, Homo sapien
gccataaccgtagagctgccagagtgcaacgta

SEQ ID NO: 110161 - DNA, 33 bp, Homo sapien
taaaactaatagttgacgtcatagtgttatgtg

SEQ ID NO: 110162 - DNA, 33 bp, Homo sapien
taaaactaatagttgatgtcatagtgttatgtg

SEQ ID NO: 110163 - DNA, 33 bp, Homo sapien
tgaatgagcttggcgacgaataattctctattg

SEQ ID NO: 110164 - DNA, 33 bp, Homo sapien
tgaatgagcttggcgatgaataattctctattg

SEQ ID NO: 110165 - DNA, 33 bp, Homo sapien
accagatagagcctccacagagacaaccatgaa

SEQ ID NO: 110166 - DNA, 33 bp, Homo sapien
accagatagagcctccgcagagacaaccatgaa

SEQ ID NO: 110167 - DNA, 33 bp, Homo sapien
tctttcacttgggtcccgatatttaaaaaatgt

SEQ ID NO: 110168 - DNA, 33 bp, Homo sapien
tctttcacttgggtcctgatatttaaaaaatgt

SEQ ID NO: 110169 - DNA, 33 bp, Homo sapien
catctttattctcaaaactttaagagcctgtta

SEQ ID NO: 110170 - DNA, 33 bp, Homo sapien
catctttattctcaaacctttaagagcctgtta

SEQ ID NO: 110171 - DNA, 33 bp, Homo sapien
tttcaaaggtttaagaaattgatagatacgaat

SEQ ID NO: 110172 - DNA, 33 bp, Homo sapien
tttcaaaggtttaagagattgatagatacgaat

SEQ ID NO: 110173 - DNA, 33 bp, Homo sapien
cataaaatggtctgaactgcccttatcccaaca

SEQ ID NO: 110174 - DNA, 33 bp, Homo sapien
cataaaatggtctgaattgcccttatcccaaca

SEQ ID NO: 110175 - DNA, 33 bp, Homo sapien
tagtagaatgtcatcggacctaccaaactgatt

SEQ ID NO: 110176 - DNA, 33 bp, Homo sapien
tagtagaatgtcatcgtacctaccaaactgatt

SEQ ID NO: 110177 - DNA, 33 bp, Homo sapien
atctaagttcccacaacgatccttatctacatc

SEQ ID NO: 110178 - DNA, 33 bp, Homo sapien
atctaagttcccacaatgatccttatctacatc

SEQ ID NO: 110179 - DNA, 33 bp, Homo sapien
aatacatgaagtaagcactaaataaatatgccc

SEQ ID NO: 110180 - DNA, 33 bp, Homo sapien
aatacatgaagtaagcgctaaataaatatgccc

SEQ ID NO: 110181 - DNA, 33 bp, Homo sapien
aatatattactgaagaagattagacacagagaa

SEQ ID NO: 110182 - DNA, 33 bp, Homo sapien
aatatattactgaagaggattagacacagagaa

SEQ ID NO: 110183 - DNA, 33 bp, Homo sapien
gcattatgataacataaccctgaggaatgacaa

SEQ ID NO: 110184 - DNA, 33 bp, Homo sapien
gcattatgataacatacccctgaggaatgacaa

SEQ ID NO: 110185 - DNA, 33 bp, Homo sapien
tcttccagattctgtcaataattaagttccatg

SEQ ID NO: 110186 - DNA, 33 bp, Homo sapien
tcttccagattctgtccataattaagttccatg

SEQ ID NO: 110187 - DNA, 33 bp, Homo sapien
agttaatagttgtgtcgaagatttggtattaaa

SEQ ID NO: 110188 - DNA, 33 bp, Homo sapien
agttaatagttgtgtctaagatttggtattaaa

SEQ ID NO: 110189 - DNA, 33 bp, Homo sapien
tccaaagtagttgagacgttttacttagctaag

SEQ ID NO: 110190 - DNA, 33 bp, Homo sapien
tccaaagtagttgagatgttttacttagctaag

SEQ ID NO: 110191 - DNA, 33 bp, Homo sapien
actctatgaaattaccaacctcttctacattat

SEQ ID NO: 110192 - DNA, 33 bp, Homo sapien
actctatgaaattaccgacctcttctacattat

SEQ ID NO: 110193 - DNA, 33 bp, Homo sapien
attttggctgtctcaaaggcaggttcttcctgg

SEQ ID NO: 110194 - DNA, 33 bp, Homo sapien
attttggctgtctcaagggcaggttcttcctgg

SEQ ID NO: 110195 - DNA, 33 bp, Homo sapien
ataaaataatatagatggacgaaggggacaaag

SEQ ID NO: 110196 - DNA, 33 bp, Homo sapien
ataaaataatatagattgacgaaggggacaaag

SEQ ID NO: 110197 - DNA, 33 bp, Homo sapien
ttccagtgtcaagtccaaagtcttaagtcttat

SEQ ID NO: 110198 - DNA, 33 bp, Homo sapien
ttccagtgtcaagtccgaagtcttaagtcttat

SEQ ID NO: 110199 - DNA, 33 bp, Homo sapien
cactataatcctatgaaatgcctgcttctcctt

SEQ ID NO: 110200 - DNA, 33 bp, Homo sapien
cactataatcctatgatatgcctgcttctcctt

SEQ ID NO: 110201 - DNA, 33 bp, Homo sapien
aagagaacaaggagaaacttcactcatctatga

SEQ ID NO: 110202 - DNA, 33 bp, Homo sapien
aagagaacaaggagaatcttcactcatctatga

SEQ ID NO: 110203 - DNA, 33 bp, Homo sapien
atctgcactggggtcacggagtaaatccaggga

SEQ ID NO: 110204 - DNA, 33 bp, Homo sapien
atctgcactggggtcatggagtaaatccaggga

SEQ ID NO: 110205 - DNA, 33 bp, Homo sapien
acttataaatgataacaggcagtatttggtttt

SEQ ID NO: 110206 - DNA, 33 bp, Homo sapien
acttataaatgataactggcagtatttggtttt

SEQ ID NO: 110207 - DNA, 33 bp, Homo sapien
aataataataaccagcaaacaacatggtgacag

SEQ ID NO: 110208 - DNA, 33 bp, Homo sapien
aataataataaccagcgaacaacatggtgacag

SEQ ID NO: 110209 - DNA, 33 bp, Homo sapien
tagaataaaatcaaaacgtgtcatctcttaggt

SEQ ID NO: 110210 - DNA, 33 bp, Homo sapien
tagaataaaatcaaaatgtgtcatctcttaggt

SEQ ID NO: 110211 - DNA, 33 bp, Homo sapien
ggcttcatatgcaaaaaattaagtaccatgaaa

SEQ ID NO: 110212 - DNA, 33 bp, Homo sapien
ggcttcatatgcaaaacattaagtaccatgaaa

SEQ ID NO: 110213 - DNA, 33 bp, Homo sapien
acttccaatagttctacgtcggcatgcttcaca

SEQ ID NO: 110214 - DNA, 33 bp, Homo sapien
acttccaatagttctatgtcggcatgcttcaca

SEQ ID NO: 110215 - DNA, 33 bp, Homo sapien
ctctgggaaatgaaaaaggcattcactgtgcat

SEQ ID NO: 110216 - DNA, 33 bp, Homo sapien
ctctgggaaatgaaaatggcattcactgtgcat

SEQ ID NO: 110217 - DNA, 33 bp, Homo sapien
ttaggtatcttgtatacatcacaaaggaacagg

SEQ ID NO: 110218 - DNA, 33 bp, Homo sapien
ttaggtatcttgtatatatcacaaaggaacagg

SEQ ID NO: 110219 - DNA, 33 bp, Homo sapien
acaaaggaacaggtcaaaatccatggaaaaaaa

SEQ ID NO: 110220 - DNA, 33 bp, Homo sapien
acaaaggaacaggtcagaatccatggaaaaaaa

SEQ ID NO: 110221 - DNA, 33 bp, Homo sapien
caatgacacatgttatcagtggaataaaaatgt

SEQ ID NO: 110222 - DNA, 33 bp, Homo sapien
caatgacacatgttattagtggaataaaaatgt

SEQ ID NO: 110223 - DNA, 33 bp, Homo sapien
gaataaaaatatagtcaatcccctgtatccttg

SEQ ID NO: 110224 - DNA, 33 bp, Homo sapien
gaataaaaatatagtcgatcccctgtatccttg

SEQ ID NO: 110225 - DNA, 33 bp, Homo sapien
tgctactcaatcgtccccttcccaatcctgtcc

SEQ ID NO: 110226 - DNA, 33 bp, Homo sapien
tgctactcaatcgtcctcttcccaatcctgtcc

SEQ ID NO: 110227 - DNA, 33 bp, Homo sapien
atgaatgagaatataccacccattgtcagcttt

SEQ ID NO: 110228 - DNA, 33 bp, Homo sapien
atgaatgagaatatactacccattgtcagcttt

SEQ ID NO: 110229 - DNA, 33 bp, Homo sapien
acatttcagtctagaaaaattttggcctcccta

SEQ ID NO: 110230 - DNA, 33 bp, Homo sapien
acatttcagtctagaacaattttggcctcccta

SEQ ID NO: 110231 - DNA, 33 bp, Homo sapien
atgcttctccacaccactcatataagaaacttg

SEQ ID NO: 110232 - DNA, 33 bp, Homo sapien
atgcttctccacaccattcatataagaaacttg

SEQ ID NO: 110233 - DNA, 33 bp, Homo sapien
actttctgatctgtcacgagaggagatgggaaa

SEQ ID NO: 110234 - DNA, 33 bp, Homo sapien
actttctgatctgtcatgagaggagatgggaaa

SEQ ID NO: 110235 - DNA, 33 bp, Homo sapien
acagatattgtaagttaaaatcagatagtgtat

SEQ ID NO: 110236 - DNA, 33 bp, Homo sapien
acagatattgtaagttcaaatcagatagtgtat

SEQ ID NO: 110237 - DNA, 33 bp, Homo sapien
aagtgctgtagtgaaacgttctgcaaaggaaga

SEQ ID NO: 110238 - DNA, 33 bp, Homo sapien
aagtgctgtagtgaaatgttctgcaaaggaaga

SEQ ID NO: 110239 - DNA, 33 bp, Homo sapien
ccatgatgaattgtaaagtgacatttagtttgc

SEQ ID NO: 110240 - DNA, 33 bp, Homo sapien
ccatgatgaattgtaaggtgacatttagtttgc

SEQ ID NO: 110241 - DNA, 33 bp, Homo sapien
aaaagctacagaaagcaacagaaattcttggga

SEQ ID NO: 110242 - DNA, 33 bp, Homo sapien
aaaagctacagaaagctacagaaattcttggga

SEQ ID NO: 110243 - DNA, 33 bp, Homo sapien
aggggtttgagatacccgattgcttgaatactg

SEQ ID NO: 110244 - DNA, 33 bp, Homo sapien
aggggtttgagatacctgattgcttgaatactg

SEQ ID NO: 110245 - DNA, 33 bp, Homo sapien
caaaaaaaaacctgaacatgaatccatttctgc

SEQ ID NO: 110246 - DNA, 33 bp, Homo sapien
caaaaaaaaacctgaatatgaatccatttctgc

SEQ ID NO: 110247 - DNA, 33 bp, Homo sapien
gtaattagctctattaactctcttgtttttgtt

SEQ ID NO: 110248 - DNA, 33 bp, Homo sapien
gtaattagctctattacctctcttgtttttgtt

SEQ ID NO: 110249 - DNA, 33 bp, Homo sapien
catgcagtgaaaatggaaataaagtggattaaa

SEQ ID NO: 110250 - DNA, 33 bp, Homo sapien
catgcagtgaaaatgggaataaagtggattaaa

SEQ ID NO: 110251 - DNA, 33 bp, Homo sapien
gaccactaaatgttgccccaagggtctatgctc

SEQ ID NO: 110252 - DNA, 33 bp, Homo sapien
gaccactaaatgttgcgccaagggtctatgctc

SEQ ID NO: 110253 - DNA, 33 bp, Homo sapien
tagaagaaactaaggcactaatctctcccttga

SEQ ID NO: 110254 - DNA, 33 bp, Homo sapien
tagaagaaactaaggcgctaatctctcccttga

SEQ ID NO: 110255 - DNA, 33 bp, Homo sapien
tttgaaaccaaagagcaatgtaaaggtagaggg

SEQ ID NO: 110256 - DNA, 33 bp, Homo sapien
tttgaaaccaaagagccatgtaaaggtagaggg

SEQ ID NO: 110257 - DNA, 33 bp, Homo sapien
acatagtagctaaaaaatagttttctggtgctc

SEQ ID NO: 110258 - DNA, 33 bp, Homo sapien
acatagtagctaaaaagtagttttctggtgctc

SEQ ID NO: 110259 - DNA, 33 bp, Homo sapien
gtaatagtagccactacgattgagcaccagaaa

SEQ ID NO: 110260 - DNA, 33 bp, Homo sapien
gtaatagtagccactatgattgagcaccagaaa

SEQ ID NO: 110261 - DNA, 33 bp, Homo sapien
tttttaatctgcagggaagaaagcacgtatgaa

SEQ ID NO: 110262 - DNA, 33 bp, Homo sapien
tttttaatctgcagggcagaaagcacgtatgaa

SEQ ID NO: 110263 - DNA, 33 bp, Homo sapien
gtataaaatagtccagactagggcaaccacctg

SEQ ID NO: 110264 - DNA, 33 bp, Homo sapien
gtataaaatagtccaggctagggcaaccacctg

SEQ ID NO: 110265 - DNA, 33 bp, Homo sapien
cacaaggtataaaacaaactttaagatcctcaa

SEQ ID NO: 110266 - DNA, 33 bp, Homo sapien
cacaaggtataaaacagactttaagatcctcaa

SEQ ID NO: 110267 - DNA, 33 bp, Homo sapien
ttttttttgcctttcaagtttattaagagcagt

SEQ ID NO: 110268 - DNA, 33 bp, Homo sapien
ttttttttgcctttcatgtttattaagagcagt

SEQ ID NO: 110269 - DNA, 33 bp, Homo sapien
actgtgatgcaccatccaaatttgtctcacagc

SEQ ID NO: 110270 - DNA, 33 bp, Homo sapien
actgtgatgcaccatctaaatttgtctcacagc

SEQ ID NO: 110271 - DNA, 33 bp, Homo sapien
aagaactctgcgggtccaagagctctgatgtgc

SEQ ID NO: 110272 - DNA, 33 bp, Homo sapien
aagaactctgcgggtctaagagctctgatgtgc

SEQ ID NO: 110273 - DNA, 33 bp, Homo sapien
ttgacactgatactgaacatgtcgattttgaag

SEQ ID NO: 110274 - DNA, 33 bp, Homo sapien
ttgacactgatactgagcatgtcgattttgaag

SEQ ID NO: 110275 - DNA, 33 bp, Homo sapien
gacattttgctcataccagaatttatgagtagc

SEQ ID NO: 110276 - DNA, 33 bp, Homo sapien
gacattttgctcatactagaatttatgagtagc

SEQ ID NO: 110277 - DNA, 33 bp, Homo sapien
atctgcagatattaagcagacaatgacagccct

SEQ ID NO: 110278 - DNA, 33 bp, Homo sapien
atctgcagatattaagtagacaatgacagccct

SEQ ID NO: 110279 - DNA, 33 bp, Homo sapien
ccttggcttatcacaagtaatgtttatttcttg

SEQ ID NO: 110280 - DNA, 33 bp, Homo sapien
ccttggcttatcacaattaatgtttatttcttg

SEQ ID NO: 110281 - DNA, 33 bp, Homo sapien
ggttcctggtagaaaaagattgtgtattccaga

SEQ ID NO: 110282 - DNA, 33 bp, Homo sapien
ggttcctggtagaaaaggattgtgtattccaga

SEQ ID NO: 110283 - DNA, 33 bp, Homo sapien
tctcaaagagcctcaccggcgatggtctgccaa

SEQ ID NO: 110284 - DNA, 33 bp, Homo sapien
tctcaaagagcctcactggcgatggtctgccaa

SEQ ID NO: 110285 - DNA, 33 bp, Homo sapien
atcaatgacctttagcagatcacagagatggtc

SEQ ID NO: 110286 - DNA, 33 bp, Homo sapien
atcaatgacctttagcggatcacagagatggtc

SEQ ID NO: 110287 - DNA, 33 bp, Homo sapien
tttgtttatgaaattgcaagtgtttaattttta

SEQ ID NO: 110288 - DNA, 33 bp, Homo sapien
tttgtttatgaaattgtaagtgtttaattttta

SEQ ID NO: 110289 - DNA, 33 bp, Homo sapien
gattggagggtgcataaatatggcatgtgctaa

SEQ ID NO: 110290 - DNA, 33 bp, Homo sapien
gattggagggtgcatagatatggcatgtgctaa

SEQ ID NO: 110291 - DNA, 33 bp, Homo sapien
gtcattctaaacaaaagttggctcagttaatga

SEQ ID NO: 110292 - DNA, 33 bp, Homo sapien
gtcattctaaacaaaatttggctcagttaatga

SEQ ID NO: 110293 - DNA, 33 bp, Homo sapien
tgctcttttcaaaatgcatcgccgtacatcaca

SEQ ID NO: 110294 - DNA, 33 bp, Homo sapien
tgctcttttcaaaatgtatcgccgtacatcaca

SEQ ID NO: 110295 - DNA, 33 bp, Homo sapien
atgaggtactatgagacgaggtgatggcaccag

SEQ ID NO: 110296 - DNA, 33 bp, Homo sapien
atgaggtactatgagatgaggtgatggcaccag

SEQ ID NO: 110297 - DNA, 33 bp, Homo sapien
ccagtgtttcaagttaagaacaaagcctttagg

SEQ ID NO: 110298 - DNA, 33 bp, Homo sapien
ccagtgtttcaagttacgaacaaagcctttagg

SEQ ID NO: 110299 - DNA, 33 bp, Homo sapien
ggaagcagaatacgaaaaagtgacagagatgca

SEQ ID NO: 110300 - DNA, 33 bp, Homo sapien
ggaagcagaatacgaagaagtgacagagatgca

SEQ ID NO: 110301 - DNA, 33 bp, Homo sapien
ctatactttggttacccatgtacctgttaacca

SEQ ID NO: 110302 - DNA, 33 bp, Homo sapien
ctatactttggttacctatgtacctgttaacca

SEQ ID NO: 110303 - DNA, 33 bp, Homo sapien
aatgctgtctcagaaaaaggaatttgttttaaa

SEQ ID NO: 110304 - DNA, 33 bp, Homo sapien
aatgctgtctcagaaacaggaatttgttttaaa

SEQ ID NO: 110305 - DNA, 33 bp, Homo sapien
tagtaaagacatataaactcttgtcacaactct

SEQ ID NO: 110306 - DNA, 33 bp, Homo sapien
tagtaaagacatataagctcttgtcacaactct

SEQ ID NO: 110307 - DNA, 33 bp, Homo sapien
taaagccaggactataacccagctccggattcc

SEQ ID NO: 110308 - DNA, 33 bp, Homo sapien
taaagccaggactatagcccagctccggattcc

SEQ ID NO: 110309 - DNA, 33 bp, Homo sapien
tatgcttccagatcataatcatatttccatcaa

SEQ ID NO: 110310 - DNA, 33 bp, Homo sapien
tatgcttccagatcatcatcatatttccatcaa

SEQ ID NO: 110311 - DNA, 33 bp, Homo sapien
tacaaatggcctaaaacgggaatgatatggtct

SEQ ID NO: 110312 - DNA, 33 bp, Homo sapien
tacaaatggcctaaaatgggaatgatatggtct

SEQ ID NO: 110313 - DNA, 33 bp, Homo sapien
aatgcatactaccaagacaatatttattctatt

SEQ ID NO: 110314 - DNA, 33 bp, Homo sapien
aatgcatactaccaaggcaatatttattctatt

SEQ ID NO: 110315 - DNA, 33 bp, Homo sapien
gatgatgtcccataaacttagcagccatggttt

SEQ ID NO: 110316 - DNA, 33 bp, Homo sapien
gatgatgtcccataaatttagcagccatggttt

SEQ ID NO: 110317 - DNA, 33 bp, Homo sapien
tggcaaccaaacttgaccttcaaatgaaactcc

SEQ ID NO: 110318 - DNA, 33 bp, Homo sapien
tggcaaccaaacttgatcttcaaatgaaactcc

SEQ ID NO: 110319 - DNA, 33 bp, Homo sapien
tccaggtcatgttttacatcaaaatttatgtta

SEQ ID NO: 110320 - DNA, 33 bp, Homo sapien
tccaggtcatgttttatatcaaaatttatgtta

SEQ ID NO: 110321 - DNA, 33 bp, Homo sapien
acatttaattctttgcacatttaacaaatttct

SEQ ID NO: 110322 - DNA, 33 bp, Homo sapien
acatttaattctttgcgcatttaacaaatttct

SEQ ID NO: 110323 - DNA, 33 bp, Homo sapien
gtatctaatacagtgacggcaaaaattggatgg

SEQ ID NO: 110324 - DNA, 33 bp, Homo sapien
gtatctaatacagtgatggcaaaaattggatgg

SEQ ID NO: 110325 - DNA, 33 bp, Homo sapien
aattaatatgtctaataatgacctcctgaggta

SEQ ID NO: 110326 - DNA, 33 bp, Homo sapien
aattaatatgtctaatgatgacctcctgaggta

SEQ ID NO: 110327 - DNA, 33 bp, Homo sapien
tttgcactagaaaatacgtgaaatgctctcaac

SEQ ID NO: 110328 - DNA, 33 bp, Homo sapien
tttgcactagaaaatatgtgaaatgctctcaac

SEQ ID NO: 110329 - DNA, 33 bp, Homo sapien
ttgacaatacatactacgggatgagccaggaaa

SEQ ID NO: 110330 - DNA, 33 bp, Homo sapien
ttgacaatacatactatgggatgagccaggaaa

SEQ ID NO: 110331 - DNA, 33 bp, Homo sapien
cctattttaccacatcaccttctaggaaattgt

SEQ ID NO: 110332 - DNA, 33 bp, Homo sapien
cctattttaccacatcgccttctaggaaattgt

SEQ ID NO: 110333 - DNA, 33 bp, Homo sapien
tataaagaatgatatacgctttttccttcaggc

SEQ ID NO: 110334 - DNA, 33 bp, Homo sapien
tataaagaatgatatatgctttttccttcaggc

SEQ ID NO: 110335 - DNA, 33 bp, Homo sapien
taatgttgagatcctacattaaacttccagagg

SEQ ID NO: 110336 - DNA, 33 bp, Homo sapien
taatgttgagatcctatattaaacttccagagg

SEQ ID NO: 110337 - DNA, 33 bp, Homo sapien
agcatagttttaaacagtctgagaggttagtcc

SEQ ID NO: 110338 - DNA, 33 bp, Homo sapien
agcatagttttaaacattctgagaggttagtcc

SEQ ID NO: 110339 - DNA, 33 bp, Homo sapien
tttgttttttaaatgcactccaagttaatatgt

SEQ ID NO: 110340 - DNA, 33 bp, Homo sapien
tttgttttttaaatgcgctccaagttaatatgt

SEQ ID NO: 110341 - DNA, 33 bp, Homo sapien
agactagagtcactcaatataggcattactgac

SEQ ID NO: 110342 - DNA, 33 bp, Homo sapien
agactagagtcactcagtataggcattactgac

SEQ ID NO: 110343 - DNA, 33 bp, Homo sapien
ggaacatttatagccacgttgctataaaaaggc

SEQ ID NO: 110344 - DNA, 33 bp, Homo sapien
ggaacatttatagccatgttgctataaaaaggc

SEQ ID NO: 110345 - DNA, 33 bp, Homo sapien
ccagtttccactccgaatccacacaattttctg

SEQ ID NO: 110346 - DNA, 33 bp, Homo sapien
ccagtttccactccgagtccacacaattttctg

SEQ ID NO: 110347 - DNA, 33 bp, Homo sapien
gtgccatcctctaaaacgtggcacaagtctccc

SEQ ID NO: 110348 - DNA, 33 bp, Homo sapien
gtgccatcctctaaaatgtggcacaagtctccc

SEQ ID NO: 110349 - DNA, 33 bp, Homo sapien
ctttcctgcatcatcaaataaaaattcctctca

SEQ ID NO: 110350 - DNA, 33 bp, Homo sapien
ctttcctgcatcatcagataaaaattcctctca

SEQ ID NO: 110351 - DNA, 33 bp, Homo sapien
ctggacttgaagtgtacgagaatcaacattccc

SEQ ID NO: 110352 - DNA, 33 bp, Homo sapien
ctggacttgaagtgtatgagaatcaacattccc

SEQ ID NO: 110353 - DNA, 33 bp, Homo sapien
cttgttaaagacatgacgtttcaaactgtagtg

SEQ ID NO: 110354 - DNA, 33 bp, Homo sapien
cttgttaaagacatgatgtttcaaactgtagtg

SEQ ID NO: 110355 - DNA, 33 bp, Homo sapien
gtgatttcttcaaccaaaatgttttagtgccac

SEQ ID NO: 110356 - DNA, 33 bp, Homo sapien
gtgatttcttcaaccagaatgttttagtgccac

SEQ ID NO: 110357 - DNA, 33 bp, Homo sapien
cctgggcaaacttcacgatatcataatcaaata

SEQ ID NO: 110358 - DNA, 33 bp, Homo sapien
cctgggcaaacttcactatatcataatcaaata

SEQ ID NO: 110359 - DNA, 33 bp, Homo sapien
tgcctattgacttacacgtcatctctggtttct

SEQ ID NO: 110360 - DNA, 33 bp, Homo sapien
tgcctattgacttacatgtcatctctggtttct

SEQ ID NO: 110361 - DNA, 33 bp, Homo sapien
tggagaaattgaaccacactactgtcatgaccc

SEQ ID NO: 110362 - DNA, 33 bp, Homo sapien
tggagaaattgaaccatactactgtcatgaccc

SEQ ID NO: 110363 - DNA, 33 bp, Homo sapien
gttttaaatcaaagaactccaatagccaacgtt

SEQ ID NO: 110364 - DNA, 33 bp, Homo sapien
gttttaaatcaaagaagtccaatagccaacgtt

SEQ ID NO: 110365 - DNA, 33 bp, Homo sapien
atgtgagtacaacaagaaacataggcttctaaa

SEQ ID NO: 110366 - DNA, 33 bp, Homo sapien
atgtgagtacaacaagtaacataggcttctaaa

SEQ ID NO: 110367 - DNA, 33 bp, Homo sapien
atagaattgttcttgaaaaacagaacacatggt

SEQ ID NO: 110368 - DNA, 33 bp, Homo sapien
atagaattgttcttgacaaacagaacacatggt

SEQ ID NO: 110369 - DNA, 33 bp, Homo sapien
acaccttgatttcagacgtgttgcctccagaac

SEQ ID NO: 110370 - DNA, 33 bp, Homo sapien
acaccttgatttcagatgtgttgcctccagaac

SEQ ID NO: 110371 - DNA, 33 bp, Homo sapien
aggttccttttcattacgtgatacacctttcta

SEQ ID NO: 110372 - DNA, 33 bp, Homo sapien
aggttccttttcattatgtgatacacctttcta

SEQ ID NO: 110373 - DNA, 33 bp, Homo sapien
caatgttaactagccaaatttctctaattttct

SEQ ID NO: 110374 - DNA, 33 bp, Homo sapien
caatgttaactagccacatttctctaattttct

SEQ ID NO: 110375 - DNA, 33 bp, Homo sapien
acatggacatatctgacgcaatagagtatagga

SEQ ID NO: 110376 - DNA, 33 bp, Homo sapien
acatggacatatctgatgcaatagagtatagga

SEQ ID NO: 110377 - DNA, 33 bp, Homo sapien
atcacaagcatacacaacttgtagaattataac

SEQ ID NO: 110378 - DNA, 33 bp, Homo sapien
atcacaagcatacacatcttgtagaattataac

SEQ ID NO: 110379 - DNA, 33 bp, Homo sapien
cttgggaaactttaaaagtacatgagcttccct

SEQ ID NO: 110380 - DNA, 33 bp, Homo sapien
cttgggaaactttaaaggtacatgagcttccct

SEQ ID NO: 110381 - DNA, 33 bp, Homo sapien
tcttatagagaatcacactgaagtccgtattat

SEQ ID NO: 110382 - DNA, 33 bp, Homo sapien
tcttatagagaatcaccctgaagtccgtattat

SEQ ID NO: 110383 - DNA, 33 bp, Homo sapien
aatgtatgaaattaccacaaacagagggaatga

SEQ ID NO: 110384 - DNA, 33 bp, Homo sapien
aatgtatgaaattaccgcaaacagagggaatga

SEQ ID NO: 110385 - DNA, 33 bp, Homo sapien
cttgaagggaaacctaccatacacagaatggag

SEQ ID NO: 110386 - DNA, 33 bp, Homo sapien
cttgaagggaaacctatcatacacagaatggag

SEQ ID NO: 110387 - DNA, 33 bp, Homo sapien
tgtgattagaatggctaaaagcagaccatgagc

SEQ ID NO: 110388 - DNA, 33 bp, Homo sapien
tgtgattagaatggctcaaagcagaccatgagc

SEQ ID NO: 110389 - DNA, 33 bp, Homo sapien
taagattaggatgggacgactagcctttccctt

SEQ ID NO: 110390 - DNA, 33 bp, Homo sapien
taagattaggatgggatgactagcctttccctt

SEQ ID NO: 110391 - DNA, 33 bp, Homo sapien
atcaaagcaatgagtgaaaaagtacaattatat

SEQ ID NO: 110392 - DNA, 33 bp, Homo sapien
atcaaagcaatgagtggaaaagtacaattatat

SEQ ID NO: 110393 - DNA, 33 bp, Homo sapien
caattttcttttgttgaaggaattcagataata

SEQ ID NO: 110394 - DNA, 33 bp, Homo sapien
caattttcttttgttgtaggaattcagataata

SEQ ID NO: 110395 - DNA, 33 bp, Homo sapien
ttgttgtatgaccaagaagaaatgtggaagaat

SEQ ID NO: 110396 - DNA, 33 bp, Homo sapien
ttgttgtatgaccaaggagaaatgtggaagaat

SEQ ID NO: 110397 - DNA, 33 bp, Homo sapien
gaatagaaatctactgcagtaatccagctagag

SEQ ID NO: 110398 - DNA, 33 bp, Homo sapien
gaatagaaatctactgtagtaatccagctagag

SEQ ID NO: 110399 - DNA, 33 bp, Homo sapien
tgggcataaactggaaatgtcctaggcaaacga

SEQ ID NO: 110400 - DNA, 33 bp, Homo sapien
tgggcataaactggaactgtcctaggcaaacga

SEQ ID NO: 110401 - DNA, 33 bp, Homo sapien
agagatctatccagcacgaagggttcatttcac

SEQ ID NO: 110402 - DNA, 33 bp, Homo sapien
agagatctatccagcatgaagggttcatttcac

SEQ ID NO: 110403 - DNA, 33 bp, Homo sapien
gctctgggcctctgaaagtcttgccttggaaga

SEQ ID NO: 110404 - DNA, 33 bp, Homo sapien
gctctgggcctctgaacgtcttgccttggaaga

SEQ ID NO: 110405 - DNA, 33 bp, Homo sapien
tctatgtgaaatgcagcacatagatccctttct

SEQ ID NO: 110406 - DNA, 33 bp, Homo sapien
tctatgtgaaatgcaggacatagatccctttct

SEQ ID NO: 110407 - DNA, 33 bp, Homo sapien
ttctttgagcacattcaatgtacaatgttgttt

SEQ ID NO: 110408 - DNA, 33 bp, Homo sapien
ttctttgagcacattcgatgtacaatgttgttt

SEQ ID NO: 110409 - DNA, 33 bp, Homo sapien
cacactcaaactacaacaatgatgataaaagtg

SEQ ID NO: 110410 - DNA, 33 bp, Homo sapien
cacactcaaactacaataatgatgataaaagtg

SEQ ID NO: 110411 - DNA, 33 bp, Homo sapien
gttcagagagattgaaacaggggatgtctaggg

SEQ ID NO: 110412 - DNA, 33 bp, Homo sapien
gttcagagagattgaagcaggggatgtctaggg

SEQ ID NO: 110413 - DNA, 33 bp, Homo sapien
gacctttgatgggatccgaggcagaactgaata

SEQ ID NO: 110414 - DNA, 33 bp, Homo sapien
gacctttgatgggatctgaggcagaactgaata

SEQ ID NO: 110415 - DNA, 33 bp, Homo sapien
tatgccaataactagaaactggactgaacaggg

SEQ ID NO: 110416 - DNA, 33 bp, Homo sapien
tatgccaataactagagactggactgaacaggg

SEQ ID NO: 110417 - DNA, 33 bp, Homo sapien
aaatagcagagtacccaaaagttggatttttaa

SEQ ID NO: 110418 - DNA, 33 bp, Homo sapien
aaatagcagagtaccccaaagttggatttttaa

SEQ ID NO: 110419 - DNA, 33 bp, Homo sapien
ttgctatttttgctacactcccctgcacaggaa

SEQ ID NO: 110420 - DNA, 33 bp, Homo sapien
ttgctatttttgctacgctcccctgcacaggaa

SEQ ID NO: 110421 - DNA, 33 bp, Homo sapien
gagaatggtacgaagcccttcatgagggatctg

SEQ ID NO: 110422 - DNA, 33 bp, Homo sapien
gagaatggtacgaagctcttcatgagggatctg

SEQ ID NO: 110423 - DNA, 33 bp, Homo sapien
gcttatatattggagaacatttagattataaaa

SEQ ID NO: 110424 - DNA, 33 bp, Homo sapien
gcttatatattggagagcatttagattataaaa

SEQ ID NO: 110425 - DNA, 33 bp, Homo sapien
aatccccacctgtcaagggagagaccttgttga

SEQ ID NO: 110426 - DNA, 33 bp, Homo sapien
aatccccacctgtcaatggagagaccttgttga

SEQ ID NO: 110427 - DNA, 33 bp, Homo sapien
acatgaagtcattgcaaatttttaaacttaata

SEQ ID NO: 110428 - DNA, 33 bp, Homo sapien
acatgaagtcattgcagatttttaaacttaata

SEQ ID NO: 110429 - DNA, 33 bp, Homo sapien
aggaaacatagacatcaatcagtacttgtaaga

SEQ ID NO: 110430 - DNA, 33 bp, Homo sapien
aggaaacatagacatcgatcagtacttgtaaga

SEQ ID NO: 110431 - DNA, 33 bp, Homo sapien
attaaaatgcattatgaaactcatgactatact

SEQ ID NO: 110432 - DNA, 33 bp, Homo sapien
attaaaatgcattatgcaactcatgactatact

SEQ ID NO: 110433 - DNA, 33 bp, Homo sapien
ttagctcctatgtcagcagttctcaaaggatgt

SEQ ID NO: 110434 - DNA, 33 bp, Homo sapien
ttagctcctatgtcagtagttctcaaaggatgt

SEQ ID NO: 110435 - DNA, 33 bp, Homo sapien
ttctgatttagtaatgcagggtggtgcttgaaa

SEQ ID NO: 110436 - DNA, 33 bp, Homo sapien
ttctgatttagtaatgtagggtggtgcttgaaa

SEQ ID NO: 110437 - DNA, 33 bp, Homo sapien
cacacattacacttgactattatgtctctagag

SEQ ID NO: 110438 - DNA, 33 bp, Homo sapien
cacacattacacttgattattatgtctctagag

SEQ ID NO: 110439 - DNA, 33 bp, Homo sapien
atgatgagctcaataacccctgtcacttctcca

SEQ ID NO: 110440 - DNA, 33 bp, Homo sapien
atgatgagctcaataatccctgtcacttctcca

SEQ ID NO: 110441 - DNA, 33 bp, Homo sapien
tttgcggagccagttgaaacagtttttcttttg

SEQ ID NO: 110442 - DNA, 33 bp, Homo sapien
tttgcggagccagttgcaacagtttttcttttg

SEQ ID NO: 110443 - DNA, 33 bp, Homo sapien
cacatatttttccagaataccaggcactggtct

SEQ ID NO: 110444 - DNA, 33 bp, Homo sapien
cacatatttttccagagtaccaggcactggtct

SEQ ID NO: 110445 - DNA, 33 bp, Homo sapien
gatgaggatgatctataacttatgaggttcagg

SEQ ID NO: 110446 - DNA, 33 bp, Homo sapien
gatgaggatgatctatgacttatgaggttcagg

SEQ ID NO: 110447 - DNA, 33 bp, Homo sapien
ttcacctgattcagtacagccatttgttcctca

SEQ ID NO: 110448 - DNA, 33 bp, Homo sapien
ttcacctgattcagtagagccatttgttcctca

SEQ ID NO: 110449 - DNA, 33 bp, Homo sapien
cactaggttgtggaaccgtagccctcaagaggc

SEQ ID NO: 110450 - DNA, 33 bp, Homo sapien
cactaggttgtggaactgtagccctcaagaggc

SEQ ID NO: 110451 - DNA, 33 bp, Homo sapien
tttcaacagactcataagttgttggatattcag

SEQ ID NO: 110452 - DNA, 33 bp, Homo sapien
tttcaacagactcatacgttgttggatattcag

SEQ ID NO: 110453 - DNA, 33 bp, Homo sapien
tcagatatgttcagccaacatcactcactgatg

SEQ ID NO: 110454 - DNA, 33 bp, Homo sapien
tcagatatgttcagccgacatcactcactgatg

SEQ ID NO: 110455 - DNA, 33 bp, Homo sapien
gaggagcagagagcagaacacagagtttttctc

SEQ ID NO: 110456 - DNA, 33 bp, Homo sapien
gaggagcagagagcaggacacagagtttttctc

SEQ ID NO: 110457 - DNA, 33 bp, Homo sapien
ctcccagaaatccaccccatataactcatccac

SEQ ID NO: 110458 - DNA, 33 bp, Homo sapien
ctcccagaaatccacctcatataactcatccac

SEQ ID NO: 110459 - DNA, 33 bp, Homo sapien
cctagaccttccaagaagctgaaggacagtgaa

SEQ ID NO: 110460 - DNA, 33 bp, Homo sapien
cctagaccttccaagaggctgaaggacagtgaa

SEQ ID NO: 110461 - DNA, 33 bp, Homo sapien
ggcaatggctaagtcaaggatagagcccagccc

SEQ ID NO: 110462 - DNA, 33 bp, Homo sapien
ggcaatggctaagtcacggatagagcccagccc

SEQ ID NO: 110463 - DNA, 33 bp, Homo sapien
aagacatgaattgatacgaaaacatttaaatga

SEQ ID NO: 110464 - DNA, 33 bp, Homo sapien
aagacatgaattgatatgaaaacatttaaatga

SEQ ID NO: 110465 - DNA, 33 bp, Homo sapien
ggcttttcatcagtcacggacctaaaagcgtgc

SEQ ID NO: 110466 - DNA, 33 bp, Homo sapien
ggcttttcatcagtcatggacctaaaagcgtgc

SEQ ID NO: 110467 - DNA, 33 bp, Homo sapien
caaggcacaatttcaaatacattccagagctga

SEQ ID NO: 110468 - DNA, 33 bp, Homo sapien
caaggcacaatttcaagtacattccagagctga

SEQ ID NO: 110469 - DNA, 33 bp, Homo sapien
tcttgcataatactaacctccccttcctgcttc

SEQ ID NO: 110470 - DNA, 33 bp, Homo sapien
tcttgcataatactaagctccccttcctgcttc

SEQ ID NO: 110471 - DNA, 33 bp, Homo sapien
agtgcgtggagatgaacgggataggaaatggaa

SEQ ID NO: 110472 - DNA, 33 bp, Homo sapien
agtgcgtggagatgaatgggataggaaatggaa

SEQ ID NO: 110473 - DNA, 33 bp, Homo sapien
aggcagtcatttggccacccactgtgaactctg

SEQ ID NO: 110474 - DNA, 33 bp, Homo sapien
aggcagtcatttggccgcccactgtgaactctg

SEQ ID NO: 110475 - DNA, 33 bp, Homo sapien
aaaacctctccaaagacaaaaactctgcaatct

SEQ ID NO: 110476 - DNA, 33 bp, Homo sapien
aaaacctctccaaagataaaaactctgcaatct

SEQ ID NO: 110477 - DNA, 33 bp, Homo sapien
tgaacacatatttaccaagcatgccctctgtcc

SEQ ID NO: 110478 - DNA, 33 bp, Homo sapien
tgaacacatatttaccgagcatgccctctgtcc

SEQ ID NO: 110479 - DNA, 33 bp, Homo sapien
ttacttttccaaatccccagctagaggccaggg

SEQ ID NO: 110480 - DNA, 33 bp, Homo sapien
ttacttttccaaatcctcagctagaggccaggg

SEQ ID NO: 110481 - DNA, 33 bp, Homo sapien
ttgttctcactgccaccgaaagcatgtttatag

SEQ ID NO: 110482 - DNA, 33 bp, Homo sapien
ttgttctcactgccacggaaagcatgtttatag

SEQ ID NO: 110483 - DNA, 33 bp, Homo sapien
gagaagactcttgaacagtcaccctggagggaa

SEQ ID NO: 110484 - DNA, 33 bp, Homo sapien
gagaagactcttgaacggtcaccctggagggaa

SEQ ID NO: 110485 - DNA, 33 bp, Homo sapien
acagactcctgcttctcaaaccccttcccccaa

SEQ ID NO: 110486 - DNA, 33 bp, Homo sapien
acagactcctgcttcttaaaccccttcccccaa

SEQ ID NO: 110487 - DNA, 33 bp, Homo sapien
tgaagacatgattttgcaatgatttgggatctc

SEQ ID NO: 110488 - DNA, 33 bp, Homo sapien
tgaagacatgattttggaatgatttgggatctc

SEQ ID NO: 110489 - DNA, 33 bp, Homo sapien
atgagcaaaaacaagcaaagaaaaaatagcagg

SEQ ID NO: 110490 - DNA, 33 bp, Homo sapien
atgagcaaaaacaagcgaagaaaaaatagcagg

SEQ ID NO: 110491 - DNA, 33 bp, Homo sapien
agcaatgaagtagaaacattaacatggacatta

SEQ ID NO: 110492 - DNA, 33 bp, Homo sapien
agcaatgaagtagaaatattaacatggacatta

SEQ ID NO: 110493 - DNA, 33 bp, Homo sapien
gcttttggtaagcctcaaaaggtgagcacctct

SEQ ID NO: 110494 - DNA, 33 bp, Homo sapien
gcttttggtaagcctcgaaaggtgagcacctct

SEQ ID NO: 110495 - DNA, 33 bp, Homo sapien
gacaatcctccctctccaccattctatcgctct

SEQ ID NO: 110496 - DNA, 33 bp, Homo sapien
gacaatcctccctctctaccattctatcgctct

SEQ ID NO: 110497 - DNA, 33 bp, Homo sapien
gtcgggctcactgtggacatcctatcctgtatc

SEQ ID NO: 110498 - DNA, 33 bp, Homo sapien
gtcgggctcactgtggtcatcctatcctgtatc

SEQ ID NO: 110499 - DNA, 33 bp, Homo sapien
tcacttcttcaacatggcaaactctgttcctgc

SEQ ID NO: 110500 - DNA, 33 bp, Homo sapien
tcacttcttcaacatgtcaaactctgttcctgc

SEQ ID NO: 110501 - DNA, 33 bp, Homo sapien
ctgtggctttcacagcggagcctcatccagccc

SEQ ID NO: 110502 - DNA, 33 bp, Homo sapien
ctgtggctttcacagctgagcctcatccagccc

SEQ ID NO: 110503 - DNA, 33 bp, Homo sapien
agtaaaggagtatcaccgactccaggtgaccca

SEQ ID NO: 110504 - DNA, 33 bp, Homo sapien
agtaaaggagtatcactgactccaggtgaccca

SEQ ID NO: 110505 - DNA, 33 bp, Homo sapien
ccagtagctatcagtcaaccagctttcctcaga

SEQ ID NO: 110506 - DNA, 33 bp, Homo sapien
ccagtagctatcagtcgaccagctttcctcaga

SEQ ID NO: 110507 - DNA, 33 bp, Homo sapien
gattattagtcagagacagtttcatcagatttc

SEQ ID NO: 110508 - DNA, 33 bp, Homo sapien
gattattagtcagagagagtttcatcagatttc

SEQ ID NO: 110509 - DNA, 33 bp, Homo sapien
agtaaggacactggaaactttctggcaatgcaa

SEQ ID NO: 110510 - DNA, 33 bp, Homo sapien
agtaaggacactggaagctttctggcaatgcaa

SEQ ID NO: 110511 - DNA, 33 bp, Homo sapien
taacctcaaagtctagaaaatccttagtgcatt

SEQ ID NO: 110512 - DNA, 33 bp, Homo sapien
taacctcaaagtctagtaaatccttagtgcatt

SEQ ID NO: 110513 - DNA, 33 bp, Homo sapien
gagacctgctctctaaaaattgatcagcgtttc

SEQ ID NO: 110514 - DNA, 33 bp, Homo sapien
gagacctgctctctaacaattgatcagcgtttc

SEQ ID NO: 110515 - DNA, 33 bp, Homo sapien
agcaatctcaaacttaccaatatcgccttaaga

SEQ ID NO: 110516 - DNA, 33 bp, Homo sapien
agcaatctcaaacttatcaatatcgccttaaga

SEQ ID NO: 110517 - DNA, 33 bp, Homo sapien
ttcagggtcatccttaggcccacaaagaaatag

SEQ ID NO: 110518 - DNA, 33 bp, Homo sapien
ttcagggtcatccttatgcccacaaagaaatag

SEQ ID NO: 110519 - DNA, 33 bp, Homo sapien
tcatggcaaagagcccactttcaggaaccaggt

SEQ ID NO: 110520 - DNA, 33 bp, Homo sapien
tcatggcaaagagcccgctttcaggaaccaggt

SEQ ID NO: 110521 - DNA, 33 bp, Homo sapien
ctaggtcccacagcaaaaagtaacaatgctagg

SEQ ID NO: 110522 - DNA, 33 bp, Homo sapien
ctaggtcccacagcaataagtaacaatgctagg

SEQ ID NO: 110523 - DNA, 33 bp, Homo sapien
aacttaatagccatgcaaatttgttcaagcctc

SEQ ID NO: 110524 - DNA, 33 bp, Homo sapien
aacttaatagccatgcgaatttgttcaagcctc

SEQ ID NO: 110525 - DNA, 33 bp, Homo sapien
aactgcaggaaacataacatacacacacacaca

SEQ ID NO: 110526 - DNA, 33 bp, Homo sapien
aactgcaggaaacatagcatacacacacacaca

SEQ ID NO: 110527 - DNA, 33 bp, Homo sapien
cccaaaagaatgctcccccaagaaaggtgaagg

SEQ ID NO: 110528 - DNA, 33 bp, Homo sapien
cccaaaagaatgctcctccaagaaaggtgaagg

SEQ ID NO: 110529 - DNA, 33 bp, Homo sapien
acattccagccaagaggcactaagcatttgtgc

SEQ ID NO: 110530 - DNA, 33 bp, Homo sapien
acattccagccaagagtcactaagcatttgtgc

SEQ ID NO: 110531 - DNA, 33 bp, Homo sapien
gtctgtaaggccagtgcatcaagcccttctgtg

SEQ ID NO: 110532 - DNA, 33 bp, Homo sapien
gtctgtaaggccagtggatcaagcccttctgtg

SEQ ID NO: 110533 - DNA, 33 bp, Homo sapien
tacccagaccacacaggagagaaacaccgtggt

SEQ ID NO: 110534 - DNA, 33 bp, Homo sapien
tacccagaccacacagtagagaaacaccgtggt

SEQ ID NO: 110535 - DNA, 33 bp, Homo sapien
agttcacagtgcatccaaagtctcacagggacc

SEQ ID NO: 110536 - DNA, 33 bp, Homo sapien
agttcacagtgcatccgaagtctcacagggacc

SEQ ID NO: 110537 - DNA, 33 bp, Homo sapien
cttgtagataaggtcaatcaagtctctctctct

SEQ ID NO: 110538 - DNA, 33 bp, Homo sapien
cttgtagataaggtcagtcaagtctctctctct

SEQ ID NO: 110539 - DNA, 33 bp, Homo sapien
ttttatagttcaagtccgaaaatgagggcatta

SEQ ID NO: 110540 - DNA, 33 bp, Homo sapien
ttttatagttcaagtctgaaaatgagggcatta

SEQ ID NO: 110541 - DNA, 33 bp, Homo sapien
acaacttctgtatatgaaaacaactgtgaacca

SEQ ID NO: 110542 - DNA, 33 bp, Homo sapien
acaacttctgtatatggaaacaactgtgaacca

SEQ ID NO: 110543 - DNA, 33 bp, Homo sapien
aacactgtgaaaattcagaagtaaacaatgtat

SEQ ID NO: 110544 - DNA, 33 bp, Homo sapien
aacactgtgaaaattcggaagtaaacaatgtat

SEQ ID NO: 110545 - DNA, 33 bp, Homo sapien
agtatggatgatttgacggagcataataaatta

SEQ ID NO: 110546 - DNA, 33 bp, Homo sapien
agtatggatgatttgatggagcataataaatta

SEQ ID NO: 110547 - DNA, 33 bp, Homo sapien
aactgctgactttgctcacattccttaatgcct

SEQ ID NO: 110548 - DNA, 33 bp, Homo sapien
aactgctgactttgcttacattccttaatgcct

SEQ ID NO: 110549 - DNA, 33 bp, Homo sapien
atgaaagagatataaactcctagttcatttaaa

SEQ ID NO: 110550 - DNA, 33 bp, Homo sapien
atgaaagagatataaattcctagttcatttaaa

SEQ ID NO: 110551 - DNA, 33 bp, Homo sapien
attactccaaagcaaaatgacataataacaata

SEQ ID NO: 110552 - DNA, 33 bp, Homo sapien
attactccaaagcaaagtgacataataacaata

SEQ ID NO: 110553 - DNA, 33 bp, Homo sapien
cagcctcatacgaaccccaaagaaattaataga

SEQ ID NO: 110554 - DNA, 33 bp, Homo sapien
cagcctcatacgaacctcaaagaaattaataga

SEQ ID NO: 110555 - DNA, 33 bp, Homo sapien
gcaccaggaatgttataaatagtcttctaaact

SEQ ID NO: 110556 - DNA, 33 bp, Homo sapien
gcaccaggaatgttatgaatagtcttctaaact

SEQ ID NO: 110557 - DNA, 33 bp, Homo sapien
aattctgcctgtaccacgcctgtagtagttggc

SEQ ID NO: 110558 - DNA, 33 bp, Homo sapien
aattctgcctgtaccatgcctgtagtagttggc

SEQ ID NO: 110559 - DNA, 33 bp, Homo sapien
aaaagcaaaataagccacttggcaaaatagtct

SEQ ID NO: 110560 - DNA, 33 bp, Homo sapien
aaaagcaaaataagccgcttggcaaaatagtct

SEQ ID NO: 110561 - DNA, 33 bp, Homo sapien
gcagcattttgtaacactgatgaatttggatga

SEQ ID NO: 110562 - DNA, 33 bp, Homo sapien
gcagcattttgtaacagtgatgaatttggatga

SEQ ID NO: 110563 - DNA, 33 bp, Homo sapien
actgagaaccacaacactgagaatcaggtgaag

SEQ ID NO: 110564 - DNA, 33 bp, Homo sapien
actgagaaccacaacagtgagaatcaggtgaag

SEQ ID NO: 110565 - DNA, 33 bp, Homo sapien
aatcaattaatgaaaaagttgtgaacaaatggt

SEQ ID NO: 110566 - DNA, 33 bp, Homo sapien
aatcaattaatgaaaacgttgtgaacaaatggt

SEQ ID NO: 110567 - DNA, 33 bp, Homo sapien
ctattcactacaaatcaccaaagttatctctta

SEQ ID NO: 110568 - DNA, 33 bp, Homo sapien
ctattcactacaaatcgccaaagttatctctta

SEQ ID NO: 110569 - DNA, 33 bp, Homo sapien
atcctacagaactcaaatacagtacagcagttc

SEQ ID NO: 110570 - DNA, 33 bp, Homo sapien
atcctacagaactcaagtacagtacagcagttc

SEQ ID NO: 110571 - DNA, 33 bp, Homo sapien
acattcagactatatcacacagctaagcagttg

SEQ ID NO: 110572 - DNA, 33 bp, Homo sapien
acattcagactatatcgcacagctaagcagttg

SEQ ID NO: 110573 - DNA, 33 bp, Homo sapien
ggccataagctacgtaaagtaaaaggattctga

SEQ ID NO: 110574 - DNA, 33 bp, Homo sapien
ggccataagctacgtagagtaaaaggattctga

SEQ ID NO: 110575 - DNA, 33 bp, Homo sapien
tacatttttacaggacaatttgggaatatctcc

SEQ ID NO: 110576 - DNA, 33 bp, Homo sapien
tacatttttacaggacgatttgggaatatctcc

SEQ ID NO: 110577 - DNA, 33 bp, Homo sapien
tagccaagttctgccacgattaagtcacttttc

SEQ ID NO: 110578 - DNA, 33 bp, Homo sapien
tagccaagttctgccatgattaagtcacttttc

SEQ ID NO: 110579 - DNA, 33 bp, Homo sapien
aatggcagaacttggaatcaaacctgtttttct

SEQ ID NO: 110580 - DNA, 33 bp, Homo sapien
aatggcagaacttggattcaaacctgtttttct

SEQ ID NO: 110581 - DNA, 33 bp, Homo sapien
ttattaagcagaacagacgacctttactctttc

SEQ ID NO: 110582 - DNA, 33 bp, Homo sapien
ttattaagcagaacaggcgacctttactctttc

SEQ ID NO: 110583 - DNA, 33 bp, Homo sapien
agaggaatgcaagtataaggagtatattcaaat

SEQ ID NO: 110584 - DNA, 33 bp, Homo sapien
agaggaatgcaagtatgaggagtatattcaaat

SEQ ID NO: 110585 - DNA, 33 bp, Homo sapien
ctgaatgcaggagataccagtttggttgtgtga

SEQ ID NO: 110586 - DNA, 33 bp, Homo sapien
ctgaatgcaggagatatcagtttggttgtgtga

SEQ ID NO: 110587 - DNA, 33 bp, Homo sapien
ctgttcctggaaataactgctcaagttggtaca

SEQ ID NO: 110588 - DNA, 33 bp, Homo sapien
ctgttcctggaaataattgctcaagttggtaca

SEQ ID NO: 110589 - DNA, 33 bp, Homo sapien
agtagacatacacaagaagaaaggttagaatta

SEQ ID NO: 110590 - DNA, 33 bp, Homo sapien
agtagacatacacaaggagaaaggttagaatta

SEQ ID NO: 110591 - DNA, 33 bp, Homo sapien
ggaacaagcaactggaaaaaacagggagttgtt

SEQ ID NO: 110592 - DNA, 33 bp, Homo sapien
ggaacaagcaactggacaaaacagggagttgtt

SEQ ID NO: 110593 - DNA, 33 bp, Homo sapien
atgcaaggcctgaagactaaacctaacaagagg

SEQ ID NO: 110594 - DNA, 33 bp, Homo sapien
atgcaaggcctgaagattaaacctaacaagagg

SEQ ID NO: 110595 - DNA, 33 bp, Homo sapien
ttgccatacttgtttaaatacccccgtgtctat

SEQ ID NO: 110596 - DNA, 33 bp, Homo sapien
ttgccatacttgtttatatacccccgtgtctat

SEQ ID NO: 110597 - DNA, 33 bp, Homo sapien
ctgggagggaaatggccctgactaggtttctcc

SEQ ID NO: 110598 - DNA, 33 bp, Homo sapien
ctgggagggaaatggctctgactaggtttctcc

SEQ ID NO: 110599 - DNA, 33 bp, Homo sapien
aaacaaactgagaaaccgaataaaaagaaacaa

SEQ ID NO: 110600 - DNA, 33 bp, Homo sapien
aaacaaactgagaaactgaataaaaagaaacaa

SEQ ID NO: 110601 - DNA, 33 bp, Homo sapien
atgaaaaattgaccgacgtagagcaaaacaatg

SEQ ID NO: 110602 - DNA, 33 bp, Homo sapien
atgaaaaattgaccgatgtagagcaaaacaatg

SEQ ID NO: 110603 - DNA, 33 bp, Homo sapien
ctaacaaaatcagccaaaggtcatcagagagca

SEQ ID NO: 110604 - DNA, 33 bp, Homo sapien
ctaacaaaatcagccacaggtcatcagagagca

SEQ ID NO: 110605 - DNA, 33 bp, Homo sapien
agagacctgaagttgccagtttcgttcagccat

SEQ ID NO: 110606 - DNA, 33 bp, Homo sapien
agagacctgaagttgctagtttcgttcagccat

SEQ ID NO: 110607 - DNA, 33 bp, Homo sapien
ggatggacctgttacaagatagtgcctgcctct

SEQ ID NO: 110608 - DNA, 33 bp, Homo sapien
ggatggacctgttacacgatagtgcctgcctct

SEQ ID NO: 110609 - DNA, 33 bp, Homo sapien
cccaactgtgaagagactaactgagagtatggc

SEQ ID NO: 110610 - DNA, 33 bp, Homo sapien
cccaactgtgaagagattaactgagagtatggc

SEQ ID NO: 110611 - DNA, 33 bp, Homo sapien
atgcttctttctactcacttccttttggagttc

SEQ ID NO: 110612 - DNA, 33 bp, Homo sapien
atgcttctttctactcgcttccttttggagttc

SEQ ID NO: 110613 - DNA, 33 bp, Homo sapien
tcctgctattagggcaaatttctacccattccc

SEQ ID NO: 110614 - DNA, 33 bp, Homo sapien
tcctgctattagggcacatttctacccattccc

SEQ ID NO: 110615 - DNA, 33 bp, Homo sapien
taatgaggtcaggcacaaagataggtcattctt

SEQ ID NO: 110616 - DNA, 33 bp, Homo sapien
taatgaggtcaggcacgaagataggtcattctt

SEQ ID NO: 110617 - DNA, 33 bp, Homo sapien
aattgacttctataagaaagagttatcctgaac

SEQ ID NO: 110618 - DNA, 33 bp, Homo sapien
aattgacttctataaggaagagttatcctgaac

SEQ ID NO: 110619 - DNA, 33 bp, Homo sapien
ggagaagagtctttcaatcatcttatggagtta

SEQ ID NO: 110620 - DNA, 33 bp, Homo sapien
ggagaagagtctttcagtcatcttatggagtta

SEQ ID NO: 110621 - DNA, 33 bp, Homo sapien
aagaaagcaccaaggaacagcattgtattaaat

SEQ ID NO: 110622 - DNA, 33 bp, Homo sapien
aagaaagcaccaaggagcagcattgtattaaat

SEQ ID NO: 110623 - DNA, 33 bp, Homo sapien
gaaattcagtgctatgaaacatataaactaaat

SEQ ID NO: 110624 - DNA, 33 bp, Homo sapien
gaaattcagtgctatggaacatataaactaaat

SEQ ID NO: 110625 - DNA, 33 bp, Homo sapien
gcacacctagtaacaggccaactgtctgcagac

SEQ ID NO: 110626 - DNA, 33 bp, Homo sapien
gcacacctagtaacagtccaactgtctgcagac

SEQ ID NO: 110627 - DNA, 33 bp, Homo sapien
ctaatgtctgtgcatcggaagggaaataacatt

SEQ ID NO: 110628 - DNA, 33 bp, Homo sapien
ctaatgtctgtgcatctgaagggaaataacatt

SEQ ID NO: 110629 - DNA, 33 bp, Homo sapien
gaaagaactgccaactaagaatactacatctca

SEQ ID NO: 110630 - DNA, 33 bp, Homo sapien
gaaagaactgccaactgagaatactacatctca

SEQ ID NO: 110631 - DNA, 33 bp, Homo sapien
tccttgtggtgaactaactcagattatgtttct

SEQ ID NO: 110632 - DNA, 33 bp, Homo sapien
tccttgtggtgaactacctcagattatgtttct

SEQ ID NO: 110633 - DNA, 33 bp, Homo sapien
cataaacaccagcaaagctgatgcagaaggtca

SEQ ID NO: 110634 - DNA, 33 bp, Homo sapien
cataaacaccagcaaatctgatgcagaaggtca

SEQ ID NO: 110635 - DNA, 33 bp, Homo sapien
tattcattttaattgacgcattgcaattgtata

SEQ ID NO: 110636 - DNA, 33 bp, Homo sapien
tattcattttaattgatgcattgcaattgtata

SEQ ID NO: 110637 - DNA, 33 bp, Homo sapien
gtgcctcctttaaatgacaagaatatgcctacc

SEQ ID NO: 110638 - DNA, 33 bp, Homo sapien
gtgcctcctttaaatgccaagaatatgcctacc

SEQ ID NO: 110639 - DNA, 33 bp, Homo sapien
gctaagtactttccaaacatcatctgtcctaaa

SEQ ID NO: 110640 - DNA, 33 bp, Homo sapien
gctaagtactttccaatcatcatctgtcctaaa

SEQ ID NO: 110641 - DNA, 33 bp, Homo sapien
ggtctgtaacaggtctgaagccacaagaaatgg

SEQ ID NO: 110642 - DNA, 33 bp, Homo sapien
ggtctgtaacaggtcttaagccacaagaaatgg

SEQ ID NO: 110643 - DNA, 33 bp, Homo sapien
taaaagtttttgttaagtccctcatgtctctat

SEQ ID NO: 110644 - DNA, 33 bp, Homo sapien
taaaagtttttgttaattccctcatgtctctat

SEQ ID NO: 110645 - DNA, 33 bp, Homo sapien
aaaaaaagcagagataagctagtcatggcagtt

SEQ ID NO: 110646 - DNA, 33 bp, Homo sapien
aaaaaaagcagagataggctagtcatggcagtt

SEQ ID NO: 110647 - DNA, 33 bp, Homo sapien
atctggctcaagtctacaatactagcactttgg

SEQ ID NO: 110648 - DNA, 33 bp, Homo sapien
atctggctcaagtctataatactagcactttgg

SEQ ID NO: 110649 - DNA, 33 bp, Homo sapien
gattaaaactgagaagactgcaccagtgtccag

SEQ ID NO: 110650 - DNA, 33 bp, Homo sapien
gattaaaactgagaaggctgcaccagtgtccag

SEQ ID NO: 110651 - DNA, 33 bp, Homo sapien
attgtttttcattggcaaatatatgagtattcc

SEQ ID NO: 110652 - DNA, 33 bp, Homo sapien
attgtttttcattggcgaatatatgagtattcc

SEQ ID NO: 110653 - DNA, 33 bp, Homo sapien
gacatacctttagctacacgggccataaaaaaa

SEQ ID NO: 110654 - DNA, 33 bp, Homo sapien
gacatacctttagctagacgggccataaaaaaa

SEQ ID NO: 110655 - DNA, 33 bp, Homo sapien
ttattaaatgctggcaaggtaccaagctcagtt

SEQ ID NO: 110656 - DNA, 33 bp, Homo sapien
ttattaaatgctggcagggtaccaagctcagtt

SEQ ID NO: 110657 - DNA, 33 bp, Homo sapien
tgtctaagaatctcaaaaaacactgattaatcg

SEQ ID NO: 110658 - DNA, 33 bp, Homo sapien
tgtctaagaatctcaagaaacactgattaatcg

SEQ ID NO: 110659 - DNA, 33 bp, Homo sapien
gtaaactagacaagggaattttacctatttctc

SEQ ID NO: 110660 - DNA, 33 bp, Homo sapien
gtaaactagacaagggcattttacctatttctc

SEQ ID NO: 110661 - DNA, 33 bp, Homo sapien
tttaagtatatactgacaaagaccactaagctc

SEQ ID NO: 110662 - DNA, 33 bp, Homo sapien
tttaagtatatactgataaagaccactaagctc

SEQ ID NO: 110663 - DNA, 33 bp, Homo sapien
ttatatgaccaaagaacacatttccaaatcaaa

SEQ ID NO: 110664 - DNA, 33 bp, Homo sapien
ttatatgaccaaagaatacatttccaaatcaaa

SEQ ID NO: 110665 - DNA, 33 bp, Homo sapien
ggtaactttattgtctcactcatgtaccttcta

SEQ ID NO: 110666 - DNA, 33 bp, Homo sapien
ggtaactttattgtctgactcatgtaccttcta

SEQ ID NO: 110667 - DNA, 33 bp, Homo sapien
tttttctaaagtttagcccattgaatagcagtt

SEQ ID NO: 110668 - DNA, 33 bp, Homo sapien
tttttctaaagtttagtccattgaatagcagtt

SEQ ID NO: 110669 - DNA, 33 bp, Homo sapien
aagtgcctctagtaaactacttccccctataac

SEQ ID NO: 110670 - DNA, 33 bp, Homo sapien
aagtgcctctagtaaattacttccccctataac

SEQ ID NO: 110671 - DNA, 33 bp, Homo sapien
gcgcacatactcattagaattttggcaggcata

SEQ ID NO: 110672 - DNA, 33 bp, Homo sapien
gcgcacatactcattataattttggcaggcata

SEQ ID NO: 110673 - DNA, 33 bp, Homo sapien
aacatctcaaagtcaaaagatgtgtaacataat

SEQ ID NO: 110674 - DNA, 33 bp, Homo sapien
aacatctcaaagtcaagagatgtgtaacataat

SEQ ID NO: 110675 - DNA, 33 bp, Homo sapien
tcattttcaataccacagcatttccaggtattg

SEQ ID NO: 110676 - DNA, 33 bp, Homo sapien
tcattttcaataccacggcatttccaggtattg

SEQ ID NO: 110677 - DNA, 33 bp, Homo sapien
cataacacatcatttaacatattcccctagctc

SEQ ID NO: 110678 - DNA, 33 bp, Homo sapien
cataacacatcatttatcatattcccctagctc

SEQ ID NO: 110679 - DNA, 33 bp, Homo sapien
gagttcctgtgactccacgttctcaaaaccctt

SEQ ID NO: 110680 - DNA, 33 bp, Homo sapien
gagttcctgtgactccgcgttctcaaaaccctt

SEQ ID NO: 110681 - DNA, 33 bp, Homo sapien
aggcattggataaatacgccagttccaaatgga

SEQ ID NO: 110682 - DNA, 33 bp, Homo sapien
aggcattggataaatatgccagttccaaatgga

SEQ ID NO: 110683 - DNA, 33 bp, Homo sapien
gaaatgttattggtcaaggaatgataggttgta

SEQ ID NO: 110684 - DNA, 33 bp, Homo sapien
gaaatgttattggtcatggaatgataggttgta

SEQ ID NO: 110685 - DNA, 33 bp, Homo sapien
tccaatttccacttaaagacagtgtcatttgaa

SEQ ID NO: 110686 - DNA, 33 bp, Homo sapien
tccaatttccacttaaggacagtgtcatttgaa

SEQ ID NO: 110687 - DNA, 33 bp, Homo sapien
gtcctccttttctcaacggcttctcagttggct

SEQ ID NO: 110688 - DNA, 33 bp, Homo sapien
gtcctccttttctcaatggcttctcagttggct

SEQ ID NO: 110689 - DNA, 33 bp, Homo sapien
gacaaaaatgtgataaataaccttaatctctta

SEQ ID NO: 110690 - DNA, 33 bp, Homo sapien
gacaaaaatgtgataagtaaccttaatctctta

SEQ ID NO: 110691 - DNA, 33 bp, Homo sapien
tacatagggaagaacaagtctacagatttttct

SEQ ID NO: 110692 - DNA, 33 bp, Homo sapien
tacatagggaagaacaggtctacagatttttct

SEQ ID NO: 110693 - DNA, 33 bp, Homo sapien
acacaagggcttttacaactgttcaattcttcc

SEQ ID NO: 110694 - DNA, 33 bp, Homo sapien
acacaagggcttttaccactgttcaattcttcc

SEQ ID NO: 110695 - DNA, 33 bp, Homo sapien
cccttttttcttatgaatagctctccactgact

SEQ ID NO: 110696 - DNA, 33 bp, Homo sapien
cccttttttcttatgagtagctctccactgact

SEQ ID NO: 110697 - DNA, 33 bp, Homo sapien
agagactatcactctcactctagtaacccaaac

SEQ ID NO: 110698 - DNA, 33 bp, Homo sapien
agagactatcactctcgctctagtaacccaaac

SEQ ID NO: 110699 - DNA, 33 bp, Homo sapien
atctatcacttctttacagcctgattgacatta

SEQ ID NO: 110700 - DNA, 33 bp, Homo sapien
atctatcacttctttagagcctgattgacatta

SEQ ID NO: 110701 - DNA, 33 bp, Homo sapien
tatctcatgcaactcactacttatgttcttata

SEQ ID NO: 110702 - DNA, 33 bp, Homo sapien
tatctcatgcaactcagtacttatgttcttata

SEQ ID NO: 110703 - DNA, 33 bp, Homo sapien
agaaaaatcatgttaacggttgttgtctctagt

SEQ ID NO: 110704 - DNA, 33 bp, Homo sapien
agaaaaatcatgttaatggttgttgtctctagt

SEQ ID NO: 110705 - DNA, 33 bp, Homo sapien
tgacaaattggctgaccctatgcaaaattcaaa

SEQ ID NO: 110706 - DNA, 33 bp, Homo sapien
tgacaaattggctgacgctatgcaaaattcaaa

SEQ ID NO: 110707 - DNA, 33 bp, Homo sapien
tccattgtgatgattgcagtgaattaactttat

SEQ ID NO: 110708 - DNA, 33 bp, Homo sapien
tccattgtgatgattggagtgaattaactttat

SEQ ID NO: 110709 - DNA, 33 bp, Homo sapien
atgataactaagctgaatatgaacaactatgtg

SEQ ID NO: 110710 - DNA, 33 bp, Homo sapien
atgataactaagctgattatgaacaactatgtg

SEQ ID NO: 110711 - DNA, 33 bp, Homo sapien
cccttacctaacttcaatccaaaatatttgttg

SEQ ID NO: 110712 - DNA, 33 bp, Homo sapien
cccttacctaacttcattccaaaatatttgttg

SEQ ID NO: 110713 - DNA, 33 bp, Homo sapien
gctcaaaaacaatcacaggaaaagtttcttgtg

SEQ ID NO: 110714 - DNA, 33 bp, Homo sapien
gctcaaaaacaatcacgggaaaagtttcttgtg

SEQ ID NO: 110715 - DNA, 33 bp, Homo sapien
acatatggctaaagacaactagttcccattgtt

SEQ ID NO: 110716 - DNA, 33 bp, Homo sapien
acatatggctaaagaccactagttcccattgtt

SEQ ID NO: 110717 - DNA, 33 bp, Homo sapien
gtttgtccagcaaaaaacaagatatgtatctaa

SEQ ID NO: 110718 - DNA, 33 bp, Homo sapien
gtttgtccagcaaaaagcaagatatgtatctaa

SEQ ID NO: 110719 - DNA, 33 bp, Homo sapien
atcatttgccaatatcacttggtttgttcattt

SEQ ID NO: 110720 - DNA, 33 bp, Homo sapien
atcatttgccaatatctcttggtttgttcattt

SEQ ID NO: 110721 - DNA, 33 bp, Homo sapien
tatgagcttttctttccaattgcacagcttctg

SEQ ID NO: 110722 - DNA, 33 bp, Homo sapien
tatgagcttttctttctaattgcacagcttctg

SEQ ID NO: 110723 - DNA, 33 bp, Homo sapien
atgctaaaaccataagccaacacagaagaaaga

SEQ ID NO: 110724 - DNA, 33 bp, Homo sapien
atgctaaaaccataagtcaacacagaagaaaga

SEQ ID NO: 110725 - DNA, 33 bp, Homo sapien
atggtaccttttgtagaagctaaattttgaaag

SEQ ID NO: 110726 - DNA, 33 bp, Homo sapien
atggtaccttttgtaggagctaaattttgaaag

SEQ ID NO: 110727 - DNA, 33 bp, Homo sapien
attaatttacttgtgacatctggcttagaagta

SEQ ID NO: 110728 - DNA, 33 bp, Homo sapien
attaatttacttgtgatatctggcttagaagta

SEQ ID NO: 110729 - DNA, 33 bp, Homo sapien
gtggtagttagctttccattcctgtgtaattca

SEQ ID NO: 110730 - DNA, 33 bp, Homo sapien
gtggtagttagctttctattcctgtgtaattca

SEQ ID NO: 110731 - DNA, 33 bp, Homo sapien
attaagttaggatttcaaatgattacaagagat

SEQ ID NO: 110732 - DNA, 33 bp, Homo sapien
attaagttaggatttcgaatgattacaagagat

SEQ ID NO: 110733 - DNA, 33 bp, Homo sapien
aaagacaaaatctcaaccaatctcttgtaatca

SEQ ID NO: 110734 - DNA, 33 bp, Homo sapien
aaagacaaaatctcaagcaatctcttgtaatca

SEQ ID NO: 110735 - DNA, 33 bp, Homo sapien
tgtactaatgctcctacaacctggaactcctat

SEQ ID NO: 110736 - DNA, 33 bp, Homo sapien
tgtactaatgctcctataacctggaactcctat

SEQ ID NO: 110737 - DNA, 33 bp, Homo sapien
atattctttctatgccacagatggagcccaaat

SEQ ID NO: 110738 - DNA, 33 bp, Homo sapien
atattctttctatgcctcagatggagcccaaat

SEQ ID NO: 110739 - DNA, 33 bp, Homo sapien
ttaccaaccagcagtacgttatgttatccattt

SEQ ID NO: 110740 - DNA, 33 bp, Homo sapien
ttaccaaccagcagtatgttatgttatccattt

SEQ ID NO: 110741 - DNA, 33 bp, Homo sapien
ttatcctttaagtaaacacagcatagccttctt

SEQ ID NO: 110742 - DNA, 33 bp, Homo sapien
ttatcctttaagtaaatacagcatagccttctt

SEQ ID NO: 110743 - DNA, 33 bp, Homo sapien
aggaagacctaaggagaaatctgtgttgtttca

SEQ ID NO: 110744 - DNA, 33 bp, Homo sapien
aggaagacctaaggaggaatctgtgttgtttca

SEQ ID NO: 110745 - DNA, 33 bp, Homo sapien
gtttttgtgagaagtaagtattgaattcagcac

SEQ ID NO: 110746 - DNA, 33 bp, Homo sapien
gtttttgtgagaagtaggtattgaattcagcac

SEQ ID NO: 110747 - DNA, 33 bp, Homo sapien
attctctgttcttagacaggaaaaatcaacatt

SEQ ID NO: 110748 - DNA, 33 bp, Homo sapien
attctctgttcttagataggaaaaatcaacatt

SEQ ID NO: 110749 - DNA, 33 bp, Homo sapien
atcccttaaattcaaccgcattagacagacact

SEQ ID NO: 110750 - DNA, 33 bp, Homo sapien
atcccttaaattcaactgcattagacagacact

SEQ ID NO: 110751 - DNA, 33 bp, Homo sapien
caggaatagttcttcaagcattaccagaaacaa

SEQ ID NO: 110752 - DNA, 33 bp, Homo sapien
caggaatagttcttcaggcattaccagaaacaa

SEQ ID NO: 110753 - DNA, 33 bp, Homo sapien
taggtgcaagagaaggaaaaaatagaggcaaac

SEQ ID NO: 110754 - DNA, 33 bp, Homo sapien
taggtgcaagagaagggaaaaatagaggcaaac

SEQ ID NO: 110755 - DNA, 33 bp, Homo sapien
tggcatcttgttcatccaaaattgtcttagtaa

SEQ ID NO: 110756 - DNA, 33 bp, Homo sapien
tggcatcttgttcatctaaaattgtcttagtaa

SEQ ID NO: 110757 - DNA, 33 bp, Homo sapien
attactctcttgaaaactgaaataccagctctt

SEQ ID NO: 110758 - DNA, 33 bp, Homo sapien
attactctcttgaaaattgaaataccagctctt

SEQ ID NO: 110759 - DNA, 33 bp, Homo sapien
ttttatccaacacttacagagatcctggatgtt

SEQ ID NO: 110760 - DNA, 33 bp, Homo sapien
ttttatccaacacttatagagatcctggatgtt

SEQ ID NO: 110761 - DNA, 33 bp, Homo sapien
aatattgaacttttccactgacatagtttgaat

SEQ ID NO: 110762 - DNA, 33 bp, Homo sapien
aatattgaacttttccgctgacatagtttgaat

SEQ ID NO: 110763 - DNA, 33 bp, Homo sapien
taaaacaacgtgcctcacagtctagaagaaagg

SEQ ID NO: 110764 - DNA, 33 bp, Homo sapien
taaaacaacgtgcctcccagtctagaagaaagg

SEQ ID NO: 110765 - DNA, 33 bp, Homo sapien
tgaaaagtggcagagacagactgtaaacactga

SEQ ID NO: 110766 - DNA, 33 bp, Homo sapien
tgaaaagtggcagagagagactgtaaacactga

SEQ ID NO: 110767 - DNA, 33 bp, Homo sapien
tcttctgtatatagacaactttagtgtgctgac

SEQ ID NO: 110768 - DNA, 33 bp, Homo sapien
tcttctgtatatagactactttagtgtgctgac

SEQ ID NO: 110769 - DNA, 33 bp, Homo sapien
agttaggacccaataaaaaggctctcatcaggt

SEQ ID NO: 110770 - DNA, 33 bp, Homo sapien
agttaggacccaataagaaggctctcatcaggt

SEQ ID NO: 110771 - DNA, 33 bp, Homo sapien
tatttctacctttatcaaaagcttgagatgaaa

SEQ ID NO: 110772 - DNA, 33 bp, Homo sapien
tatttctacctttatcgaaagcttgagatgaaa

SEQ ID NO: 110773 - DNA, 33 bp, Homo sapien
ttcagggaagtaatcacgttcttttgctgctgt

SEQ ID NO: 110774 - DNA, 33 bp, Homo sapien
ttcagggaagtaatcatgttcttttgctgctgt

SEQ ID NO: 110775 - DNA, 33 bp, Homo sapien
tagcatcagtcctgttcaaactggttgaggccc

SEQ ID NO: 110776 - DNA, 33 bp, Homo sapien
tagcatcagtcctgttgaaactggttgaggccc

SEQ ID NO: 110777 - DNA, 33 bp, Homo sapien
tgaaactgcattgacagattattattacccaaa

SEQ ID NO: 110778 - DNA, 33 bp, Homo sapien
tgaaactgcattgacatattattattacccaaa

SEQ ID NO: 110779 - DNA, 33 bp, Homo sapien
ctcctgaaaacatgaagtaccaacacttacata

SEQ ID NO: 110780 - DNA, 33 bp, Homo sapien
ctcctgaaaacatgaattaccaacacttacata

SEQ ID NO: 110781 - DNA, 33 bp, Homo sapien
ctgccttgaagtgccacgattacaggtgccagc

SEQ ID NO: 110782 - DNA, 33 bp, Homo sapien
ctgccttgaagtgccatgattacaggtgccagc

SEQ ID NO: 110783 - DNA, 33 bp, Homo sapien
tcaaacagaataggaaaataaaaccgtactgaa

SEQ ID NO: 110784 - DNA, 33 bp, Homo sapien
tcaaacagaataggaagataaaaccgtactgaa

SEQ ID NO: 110785 - DNA, 33 bp, Homo sapien
caatgtccaagatgaacaagtgttaccattttt

SEQ ID NO: 110786 - DNA, 33 bp, Homo sapien
caatgtccaagatgaagaagtgttaccattttt

SEQ ID NO: 110787 - DNA, 33 bp, Homo sapien
ttccatcagagaagccacaatgtcactaccagc

SEQ ID NO: 110788 - DNA, 33 bp, Homo sapien
ttccatcagagaagccgcaatgtcactaccagc

SEQ ID NO: 110789 - DNA, 33 bp, Homo sapien
acaagaagatatggaacaagacatttactaaca

SEQ ID NO: 110790 - DNA, 33 bp, Homo sapien
acaagaagatatggaataagacatttactaaca

SEQ ID NO: 110791 - DNA, 33 bp, Homo sapien
ctatcatctaggaaacggtggcttggttatatc

SEQ ID NO: 110792 - DNA, 33 bp, Homo sapien
ctatcatctaggaaactgtggcttggttatatc

SEQ ID NO: 110793 - DNA, 33 bp, Homo sapien
gcacctagcaatatcacataacagttaagcact

SEQ ID NO: 110794 - DNA, 33 bp, Homo sapien
gcacctagcaatatcagataacagttaagcact

SEQ ID NO: 110795 - DNA, 33 bp, Homo sapien
attttattgttagtcaatctcagcacagggtca

SEQ ID NO: 110796 - DNA, 33 bp, Homo sapien
attttattgttagtcagtctcagcacagggtca

SEQ ID NO: 110797 - DNA, 33 bp, Homo sapien
atcatttacataagtccaatgtctcagatgaag

SEQ ID NO: 110798 - DNA, 33 bp, Homo sapien
atcatttacataagtctaatgtctcagatgaag

SEQ ID NO: 110799 - DNA, 33 bp, Homo sapien
gtgaaattaaccaacaactcttgcacttaataa

SEQ ID NO: 110800 - DNA, 33 bp, Homo sapien
gtgaaattaaccaacagctcttgcacttaataa

SEQ ID NO: 110801 - DNA, 33 bp, Homo sapien
gagatggctttctaaacgtagaccactgtccag

SEQ ID NO: 110802 - DNA, 33 bp, Homo sapien
gagatggctttctaaaggtagaccactgtccag

SEQ ID NO: 110803 - DNA, 33 bp, Homo sapien
gatgttgacaaggaaaaaatgttatttctgtgc

SEQ ID NO: 110804 - DNA, 33 bp, Homo sapien
gatgttgacaaggaaacaatgttatttctgtgc

SEQ ID NO: 110805 - DNA, 33 bp, Homo sapien
gtatcaagaatgcaagactctgaccattctcta

SEQ ID NO: 110806 - DNA, 33 bp, Homo sapien
gtatcaagaatgcaaggctctgaccattctcta

SEQ ID NO: 110807 - DNA, 33 bp, Homo sapien
cctacttctgacatcacgcttaatagctaaata

SEQ ID NO: 110808 - DNA, 33 bp, Homo sapien
cctacttctgacatcatgcttaatagctaaata

SEQ ID NO: 110809 - DNA, 33 bp, Homo sapien
tacactgaagatagcccgctccctacaatttta

SEQ ID NO: 110810 - DNA, 33 bp, Homo sapien
tacactgaagatagcctgctccctacaatttta

SEQ ID NO: 110811 - DNA, 33 bp, Homo sapien
ttcaatgtaaggaatccgaatcgtttatgtcat

SEQ ID NO: 110812 - DNA, 33 bp, Homo sapien
ttcaatgtaaggaatctgaatcgtttatgtcat

SEQ ID NO: 110813 - DNA, 33 bp, Homo sapien
caggtaactacatcagacccaaatagtacctcg

SEQ ID NO: 110814 - DNA, 33 bp, Homo sapien
caggtaactacatcaggcccaaatagtacctcg

SEQ ID NO: 110815 - DNA, 33 bp, Homo sapien
aatatctgactctgatcataactcaacctctag

SEQ ID NO: 110816 - DNA, 33 bp, Homo sapien
aatatctgactctgattataactcaacctctag

SEQ ID NO: 110817 - DNA, 33 bp, Homo sapien
taccagtcaggattgaaaaatatgcccaataag

SEQ ID NO: 110818 - DNA, 33 bp, Homo sapien
taccagtcaggattgataaatatgcccaataag

SEQ ID NO: 110819 - DNA, 33 bp, Homo sapien
aagtcatctttgattacgttcattagtaatgta

SEQ ID NO: 110820 - DNA, 33 bp, Homo sapien
aagtcatctttgattatgttcattagtaatgta

SEQ ID NO: 110821 - DNA, 33 bp, Homo sapien
aagatcagcagaagcagcctgttgactacagag

SEQ ID NO: 110822 - DNA, 33 bp, Homo sapien
aagatcagcagaagcatcctgttgactacagag

SEQ ID NO: 110823 - DNA, 33 bp, Homo sapien
aaagactggacgtaaaggatttttatataaaac

SEQ ID NO: 110824 - DNA, 33 bp, Homo sapien
aaagactggacgtaaatgatttttatataaaac

SEQ ID NO: 110825 - DNA, 33 bp, Homo sapien
taggttgatgttatggcatgaaatgctattaat

SEQ ID NO: 110826 - DNA, 33 bp, Homo sapien
taggttgatgttatggtatgaaatgctattaat

SEQ ID NO: 110827 - DNA, 33 bp, Homo sapien
cagacatgggtttgaaactttaaagaccaatat

SEQ ID NO: 110828 - DNA, 33 bp, Homo sapien
cagacatgggtttgaacctttaaagaccaatat

SEQ ID NO: 110829 - DNA, 33 bp, Homo sapien
agaagacattcatttaagtcactgaggaattgt

SEQ ID NO: 110830 - DNA, 33 bp, Homo sapien
agaagacattcatttaggtcactgaggaattgt

SEQ ID NO: 110831 - DNA, 33 bp, Homo sapien
ttccacttccttaatacgaagcacagctgccca

SEQ ID NO: 110832 - DNA, 33 bp, Homo sapien
ttccacttccttaatatgaagcacagctgccca

SEQ ID NO: 110833 - DNA, 33 bp, Homo sapien
tctcaatacctcctatcaagccactaacaaaat

SEQ ID NO: 110834 - DNA, 33 bp, Homo sapien
tctcaatacctcctatgaagccactaacaaaat

SEQ ID NO: 110835 - DNA, 33 bp, Homo sapien
cttcatcaacagtctaacaattcacttactttt

SEQ ID NO: 110836 - DNA, 33 bp, Homo sapien
cttcatcaacagtctagcaattcacttactttt

SEQ ID NO: 110837 - DNA, 33 bp, Homo sapien
ttgagccatccgtgggcaagcatattgagcttt

SEQ ID NO: 110838 - DNA, 33 bp, Homo sapien
ttgagccatccgtgggtaagcatattgagcttt

SEQ ID NO: 110839 - DNA, 33 bp, Homo sapien
tgaataatgcacttcaatcaatctcttaattca

SEQ ID NO: 110840 - DNA, 33 bp, Homo sapien
tgaataatgcacttcagtcaatctcttaattca

SEQ ID NO: 110841 - DNA, 33 bp, Homo sapien
agttcacgttgtatcaaatagaacattgacacg

SEQ ID NO: 110842 - DNA, 33 bp, Homo sapien
agttcacgttgtatcatatagaacattgacacg

SEQ ID NO: 110843 - DNA, 33 bp, Homo sapien
acctgtgaagttaaagcattatgatttgtagtc

SEQ ID NO: 110844 - DNA, 33 bp, Homo sapien
acctgtgaagttaaagtattatgatttgtagtc

SEQ ID NO: 110845 - DNA, 33 bp, Homo sapien
cacaggtgtacactaacgttggccattttcaaa

SEQ ID NO: 110846 - DNA, 33 bp, Homo sapien
cacaggtgtacactaatgttggccattttcaaa

SEQ ID NO: 110847 - DNA, 33 bp, Homo sapien
tatagtttttatacaaagagtggtatgttgagg

SEQ ID NO: 110848 - DNA, 33 bp, Homo sapien
tatagtttttatacaaggagtggtatgttgagg

SEQ ID NO: 110849 - DNA, 33 bp, Homo sapien
ataaattagaatcacaatagtagttatgattgt

SEQ ID NO: 110850 - DNA, 33 bp, Homo sapien
ataaattagaatcacattagtagttatgattgt

SEQ ID NO: 110851 - DNA, 33 bp, Homo sapien
catatgctacagaggcaaatataggccgagaat

SEQ ID NO: 110852 - DNA, 33 bp, Homo sapien
catatgctacagaggcgaatataggccgagaat

SEQ ID NO: 110853 - DNA, 33 bp, Homo sapien
ctcagtgctgctggggaagcaccatgagagtga

SEQ ID NO: 110854 - DNA, 33 bp, Homo sapien
ctcagtgctgctgggggagcaccatgagagtga

SEQ ID NO: 110855 - DNA, 33 bp, Homo sapien
ggaactttttgtcataatacaattcctgtacca

SEQ ID NO: 110856 - DNA, 33 bp, Homo sapien
ggaactttttgtcatagtacaattcctgtacca

SEQ ID NO: 110857 - DNA, 33 bp, Homo sapien
aagtacagggaaaaaacgtgtgccctagtcagg

SEQ ID NO: 110858 - DNA, 33 bp, Homo sapien
aagtacagggaaaaaatgtgtgccctagtcagg

SEQ ID NO: 110859 - DNA, 33 bp, Homo sapien
gatattttatcccatcaagttaaagaaaaatct

SEQ ID NO: 110860 - DNA, 33 bp, Homo sapien
gatattttatcccatcgagttaaagaaaaatct

SEQ ID NO: 110861 - DNA, 33 bp, Homo sapien
gcttccattatttaaactgcctggaaagccaca

SEQ ID NO: 110862 - DNA, 33 bp, Homo sapien
gcttccattatttaaattgcctggaaagccaca

SEQ ID NO: 110863 - DNA, 33 bp, Homo sapien
ttgagggactgaaaacagagttcataaagcagg

SEQ ID NO: 110864 - DNA, 33 bp, Homo sapien
ttgagggactgaaaactgagttcataaagcagg

SEQ ID NO: 110865 - DNA, 33 bp, Homo sapien
tgcagaggtaaatcaaaggtgctttcctgtaag

SEQ ID NO: 110866 - DNA, 33 bp, Homo sapien
tgcagaggtaaatcaacggtgctttcctgtaag

SEQ ID NO: 110867 - DNA, 33 bp, Homo sapien
aaggggctacagttcccatgcaagttcaaaacg

SEQ ID NO: 110868 - DNA, 33 bp, Homo sapien
aaggggctacagttccgatgcaagttcaaaacg

SEQ ID NO: 110869 - DNA, 33 bp, Homo sapien
ggcaaggaattaggtacgattaaccacatcatg

SEQ ID NO: 110870 - DNA, 33 bp, Homo sapien
ggcaaggaattaggtatgattaaccacatcatg

SEQ ID NO: 110871 - DNA, 33 bp, Homo sapien
cactgggtgcatagaagatttctgactgtcaaa

SEQ ID NO: 110872 - DNA, 33 bp, Homo sapien
cactgggtgcatagaatatttctgactgtcaaa

SEQ ID NO: 110873 - DNA, 33 bp, Homo sapien
cttctatgtctgagcacattccctcccctacct

SEQ ID NO: 110874 - DNA, 33 bp, Homo sapien
cttctatgtctgagcatattccctcccctacct

SEQ ID NO: 110875 - DNA, 33 bp, Homo sapien
gagtaaatgaggcaacactgtcacaagtcccat

SEQ ID NO: 110876 - DNA, 33 bp, Homo sapien
gagtaaatgaggcaacgctgtcacaagtcccat

SEQ ID NO: 110877 - DNA, 33 bp, Homo sapien
ggtagaatgatagtccacgtgacaagaaataag

SEQ ID NO: 110878 - DNA, 33 bp, Homo sapien
ggtagaatgatagtccgcgtgacaagaaataag

SEQ ID NO: 110879 - DNA, 33 bp, Homo sapien
tttgagggtaaaactaagaagagcacagaacaa

SEQ ID NO: 110880 - DNA, 33 bp, Homo sapien
tttgagggtaaaactaggaagagcacagaacaa

SEQ ID NO: 110881 - DNA, 33 bp, Homo sapien
gacacaacaatcatacagaggataggtttagca

SEQ ID NO: 110882 - DNA, 33 bp, Homo sapien
gacacaacaatcatacggaggataggtttagca

SEQ ID NO: 110883 - DNA, 33 bp, Homo sapien
ataagttttctgtttaacatttattctcagcaa

SEQ ID NO: 110884 - DNA, 33 bp, Homo sapien
ataagttttctgtttatcatttattctcagcaa

SEQ ID NO: 110885 - DNA, 33 bp, Homo sapien
ttcaaagacatgaagactcaatgttgtaaagat

SEQ ID NO: 110886 - DNA, 33 bp, Homo sapien
ttcaaagacatgaagattcaatgttgtaaagat

SEQ ID NO: 110887 - DNA, 33 bp, Homo sapien
tttaactgttcaggaaaagagtcaaactctgta

SEQ ID NO: 110888 - DNA, 33 bp, Homo sapien
tttaactgttcaggaagagagtcaaactctgta

SEQ ID NO: 110889 - DNA, 33 bp, Homo sapien
attttatgttgcagtcgcctagaatcctgtaaa

SEQ ID NO: 110890 - DNA, 33 bp, Homo sapien
attttatgttgcagtctcctagaatcctgtaaa

SEQ ID NO: 110891 - DNA, 33 bp, Homo sapien
attacataagcaatcaaagagtggaatactttt

SEQ ID NO: 110892 - DNA, 33 bp, Homo sapien
attacataagcaatcacagagtggaatactttt

SEQ ID NO: 110893 - DNA, 33 bp, Homo sapien
gtctgagaagctcacaacaaattcaattttatg

SEQ ID NO: 110894 - DNA, 33 bp, Homo sapien
gtctgagaagctcacatcaaattcaattttatg

SEQ ID NO: 110895 - DNA, 33 bp, Homo sapien
gactcaggaccagtgaccaagcactttgagtat

SEQ ID NO: 110896 - DNA, 33 bp, Homo sapien
gactcaggaccagtgatcaagcactttgagtat

SEQ ID NO: 110897 - DNA, 33 bp, Homo sapien
tatattttataaagatcactcaggcaacatgga

SEQ ID NO: 110898 - DNA, 33 bp, Homo sapien
tatattttataaagattactcaggcaacatgga

SEQ ID NO: 110899 - DNA, 33 bp, Homo sapien
agagagaattatccccaaacagctttaacagga

SEQ ID NO: 110900 - DNA, 33 bp, Homo sapien
agagagaattatccccgaacagctttaacagga

SEQ ID NO: 110901 - DNA, 33 bp, Homo sapien
agatattgttgccaccaaatatggtctaaacaa

SEQ ID NO: 110902 - DNA, 33 bp, Homo sapien
agatattgttgccaccgaatatggtctaaacaa

SEQ ID NO: 110903 - DNA, 33 bp, Homo sapien
tctggtttgtctatataaataaggcgactggga

SEQ ID NO: 110904 - DNA, 33 bp, Homo sapien
tctggtttgtctatatcaataaggcgactggga

SEQ ID NO: 110905 - DNA, 33 bp, Homo sapien
tcccttctatgattccaaagtaacacccttaca

SEQ ID NO: 110906 - DNA, 33 bp, Homo sapien
tcccttctatgattccgaagtaacacccttaca

SEQ ID NO: 110907 - DNA, 33 bp, Homo sapien
gtgtgccctcccttgacgtagataacaagtcaa

SEQ ID NO: 110908 - DNA, 33 bp, Homo sapien
gtgtgccctcccttgatgtagataacaagtcaa

SEQ ID NO: 110909 - DNA, 33 bp, Homo sapien
ctgataccgatatgaaggaactctccgtatgtt

SEQ ID NO: 110910 - DNA, 33 bp, Homo sapien
ctgataccgatatgaatgaactctccgtatgtt

SEQ ID NO: 110911 - DNA, 33 bp, Homo sapien
atttctttttggagtgaaaactataccgcagtt

SEQ ID NO: 110912 - DNA, 33 bp, Homo sapien
atttctttttggagtggaaactataccgcagtt

SEQ ID NO: 110913 - DNA, 33 bp, Homo sapien
tcagctctggatcaaacggactttacagatatt

SEQ ID NO: 110914 - DNA, 33 bp, Homo sapien
tcagctctggatcaaatggactttacagatatt

SEQ ID NO: 110915 - DNA, 33 bp, Homo sapien
ggaaacaaaatactgaacaacccagattaatag

SEQ ID NO: 110916 - DNA, 33 bp, Homo sapien
ggaaacaaaatactgagcaacccagattaatag

SEQ ID NO: 110917 - DNA, 33 bp, Homo sapien
ttaactttgaagtaacactgtgtcatgcagcag

SEQ ID NO: 110918 - DNA, 33 bp, Homo sapien
ttaactttgaagtaacgctgtgtcatgcagcag

SEQ ID NO: 110919 - DNA, 33 bp, Homo sapien
tattagctgtaagtataaggatatcatggcaac

SEQ ID NO: 110920 - DNA, 33 bp, Homo sapien
tattagctgtaagtatgaggatatcatggcaac

SEQ ID NO: 110921 - DNA, 33 bp, Homo sapien
aactgtagccctagaacggcattggctgtacgt

SEQ ID NO: 110922 - DNA, 33 bp, Homo sapien
aactgtagccctagaatggcattggctgtacgt

SEQ ID NO: 110923 - DNA, 33 bp, Homo sapien
gttcaaagaacttaacaaaatcatgtccaagct

SEQ ID NO: 110924 - DNA, 33 bp, Homo sapien
gttcaaagaacttaaccaaatcatgtccaagct

SEQ ID NO: 110925 - DNA, 33 bp, Homo sapien
taacatcaatatgtcacgatcgcattcagcacc

SEQ ID NO: 110926 - DNA, 33 bp, Homo sapien
taacatcaatatgtcatgatcgcattcagcacc

SEQ ID NO: 110927 - DNA, 33 bp, Homo sapien
tcatccaacagaggggaatttatagagtgtcta

SEQ ID NO: 110928 - DNA, 33 bp, Homo sapien
tcatccaacagaggggcatttatagagtgtcta

SEQ ID NO: 110929 - DNA, 33 bp, Homo sapien
tatcttcaactattctcactttttggctgcctg

SEQ ID NO: 110930 - DNA, 33 bp, Homo sapien
tatcttcaactattcttactttttggctgcctg

SEQ ID NO: 110931 - DNA, 33 bp, Homo sapien
tgctctaaaaattccacgtttcatccattcata

SEQ ID NO: 110932 - DNA, 33 bp, Homo sapien
tgctctaaaaattccatgtttcatccattcata

SEQ ID NO: 110933 - DNA, 33 bp, Homo sapien
aggcaaaaacagagcacggcatgatactgaaat

SEQ ID NO: 110934 - DNA, 33 bp, Homo sapien
aggcaaaaacagagcatggcatgatactgaaat

SEQ ID NO: 110935 - DNA, 33 bp, Homo sapien
caagcaggggcttacaatatatcaaaccataag

SEQ ID NO: 110936 - DNA, 33 bp, Homo sapien
caagcaggggcttacagtatatcaaaccataag

SEQ ID NO: 110937 - DNA, 33 bp, Homo sapien
agtgtagcattacctacgaaatgaagaaggggc

SEQ ID NO: 110938 - DNA, 33 bp, Homo sapien
agtgtagcattacctatgaaatgaagaaggggc

SEQ ID NO: 110939 - DNA, 33 bp, Homo sapien
taattaatgatttttacgttgaccttgattacc

SEQ ID NO: 110940 - DNA, 33 bp, Homo sapien
taattaatgatttttatgttgaccttgattacc

SEQ ID NO: 110941 - DNA, 33 bp, Homo sapien
cctctgtgttttatagaactggattttacattt

SEQ ID NO: 110942 - DNA, 33 bp, Homo sapien
cctctgtgttttatagtactggattttacattt

SEQ ID NO: 110943 - DNA, 33 bp, Homo sapien
ggcagattgattgaacactaaaggctgtatcta

SEQ ID NO: 110944 - DNA, 33 bp, Homo sapien
ggcagattgattgaacgctaaaggctgtatcta

SEQ ID NO: 110945 - DNA, 33 bp, Homo sapien
gatgattgatagaagacagattgatagctagct

SEQ ID NO: 110946 - DNA, 33 bp, Homo sapien
gatgattgatagaagatagattgatagctagct

SEQ ID NO: 110947 - DNA, 33 bp, Homo sapien
ttcaaggtgtgagcccaagtgggagccagggcc

SEQ ID NO: 110948 - DNA, 33 bp, Homo sapien
ttcaaggtgtgagcccgagtgggagccagggcc

SEQ ID NO: 110949 - DNA, 33 bp, Homo sapien
gaagccctgcgtccaaagggttcctcatgaagt

SEQ ID NO: 110950 - DNA, 33 bp, Homo sapien
gaagccctgcgtccaaggggttcctcatgaagt

SEQ ID NO: 110951 - DNA, 33 bp, Homo sapien
ttagtatgttactttgaagcacagatttaaagc

SEQ ID NO: 110952 - DNA, 33 bp, Homo sapien
ttagtatgttactttggagcacagatttaaagc

SEQ ID NO: 110953 - DNA, 33 bp, Homo sapien
ttctcatcaaggatcaacttgttacataataga

SEQ ID NO: 110954 - DNA, 33 bp, Homo sapien
ttctcatcaaggatcagcttgttacataataga

SEQ ID NO: 110955 - DNA, 33 bp, Homo sapien
tggctattttctaaaactactgactagagcttc

SEQ ID NO: 110956 - DNA, 33 bp, Homo sapien
tggctattttctaaaattactgactagagcttc

SEQ ID NO: 110957 - DNA, 33 bp, Homo sapien
gaacttggaaacacatgaagtgacaaaatatat

SEQ ID NO: 110958 - DNA, 33 bp, Homo sapien
gaacttggaaacacattaagtgacaaaatatat

SEQ ID NO: 110959 - DNA, 33 bp, Homo sapien
taataaaaatgagtaaaatccatacatttatat

SEQ ID NO: 110960 - DNA, 33 bp, Homo sapien
taataaaaatgagtaagatccatacatttatat

SEQ ID NO: 110961 - DNA, 33 bp, Homo sapien
aggatgtgtctccgtcgactgttctggggatta

SEQ ID NO: 110962 - DNA, 33 bp, Homo sapien
aggatgtgtctccgtctactgttctggggatta

SEQ ID NO: 110963 - DNA, 33 bp, Homo sapien
aactgatttacaggtcaagtgtaagaacagctt

SEQ ID NO: 110964 - DNA, 33 bp, Homo sapien
aactgatttacaggtcgagtgtaagaacagctt

SEQ ID NO: 110965 - DNA, 33 bp, Homo sapien
actcactatactcagcgcaaattagaaatttat

SEQ ID NO: 110966 - DNA, 33 bp, Homo sapien
actcactatactcagctcaaattagaaatttat

SEQ ID NO: 110967 - DNA, 33 bp, Homo sapien
tggtttaaagtgagacacatcagaacagtgcca

SEQ ID NO: 110968 - DNA, 33 bp, Homo sapien
tggtttaaagtgagacccatcagaacagtgcca

SEQ ID NO: 110969 - DNA, 33 bp, Homo sapien
aaaactacttccttccaaattgattttatttat

SEQ ID NO: 110970 - DNA, 33 bp, Homo sapien
aaaactacttccttccgaattgattttatttat

SEQ ID NO: 110971 - DNA, 33 bp, Homo sapien
gaggtcccaaaatctaagtctgtatctcactgg

SEQ ID NO: 110972 - DNA, 33 bp, Homo sapien
gaggtcccaaaatctatgtctgtatctcactgg

SEQ ID NO: 110973 - DNA, 33 bp, Homo sapien
ttggggcttgcaaaggaaagttcatcaccctgt

SEQ ID NO: 110974 - DNA, 33 bp, Homo sapien
ttggggcttgcaaagggaagttcatcaccctgt

SEQ ID NO: 110975 - DNA, 33 bp, Homo sapien
gtggattagtaacacaactctctagttcagtgg

SEQ ID NO: 110976 - DNA, 33 bp, Homo sapien
gtggattagtaacacagctctctagttcagtgg

SEQ ID NO: 110977 - DNA, 33 bp, Homo sapien
atggaggtcctaaagacgtcctatatttgagaa

SEQ ID NO: 110978 - DNA, 33 bp, Homo sapien
atggaggtcctaaagaggtcctatatttgagaa

SEQ ID NO: 110979 - DNA, 33 bp, Homo sapien
caggactaaaggtggcaaatggctttttaatgt

SEQ ID NO: 110980 - DNA, 33 bp, Homo sapien
caggactaaaggtggcgaatggctttttaatgt

SEQ ID NO: 110981 - DNA, 33 bp, Homo sapien
accagaaagaagccaggatacctggtgaatgtt

SEQ ID NO: 110982 - DNA, 33 bp, Homo sapien
accagaaagaagccagtatacctggtgaatgtt

SEQ ID NO: 110983 - DNA, 33 bp, Homo sapien
aaattgtctaagcgtacgtaagctagttgccag

SEQ ID NO: 110984 - DNA, 33 bp, Homo sapien
aaattgtctaagcgtatgtaagctagttgccag

SEQ ID NO: 110985 - DNA, 33 bp, Homo sapien
gaaactatgttgcacaatcataatctctttgtt

SEQ ID NO: 110986 - DNA, 33 bp, Homo sapien
gaaactatgttgcacagtcataatctctttgtt

SEQ ID NO: 110987 - DNA, 33 bp, Homo sapien
aagcatcataggaaaccagagcacctgctgtca

SEQ ID NO: 110988 - DNA, 33 bp, Homo sapien
aagcatcataggaaactagagcacctgctgtca

SEQ ID NO: 110989 - DNA, 33 bp, Homo sapien
aagccttgatgagagccatttccactgaatagt

SEQ ID NO: 110990 - DNA, 33 bp, Homo sapien
aagccttgatgagagcgatttccactgaatagt

SEQ ID NO: 110991 - DNA, 33 bp, Homo sapien
gaaccaacaaagaagacggaagaactggccaat

SEQ ID NO: 110992 - DNA, 33 bp, Homo sapien
gaaccaacaaagaagatggaagaactggccaat

SEQ ID NO: 110993 - DNA, 33 bp, Homo sapien
aacatattttcatagccgaagtgctgtgttttc

SEQ ID NO: 110994 - DNA, 33 bp, Homo sapien
aacatattttcatagctgaagtgctgtgttttc

SEQ ID NO: 110995 - DNA, 33 bp, Homo sapien
ctattttacatttctaccagaagcttatgagag

SEQ ID NO: 110996 - DNA, 33 bp, Homo sapien
ctattttacatttctagcagaagcttatgagag

SEQ ID NO: 110997 - DNA, 33 bp, Homo sapien
acattttactaaaacaagtgaatcttcaatata

SEQ ID NO: 110998 - DNA, 33 bp, Homo sapien
acattttactaaaacaggtgaatcttcaatata

SEQ ID NO: 110999 - DNA, 33 bp, Homo sapien
ttttttacagcagtacaagaataggctaatata

SEQ ID NO: 111000 - DNA, 33 bp, Homo sapien
ttttttacagcagtacgagaataggctaatata

SEQ ID NO: 111001 - DNA, 33 bp, Homo sapien
tgaaagaaaaacaacagtggaaacataaaatat

SEQ ID NO: 111002 - DNA, 33 bp, Homo sapien
tgaaagaaaaacaacattggaaacataaaatat

SEQ ID NO: 111003 - DNA, 33 bp, Homo sapien
cgtatccttagcccgaagtaaccactgatctgt

SEQ ID NO: 111004 - DNA, 33 bp, Homo sapien
cgtatccttagcccgaggtaaccactgatctgt

SEQ ID NO: 111005 - DNA, 33 bp, Homo sapien
cttctggtgattgtgaataaagcttctatcaat

SEQ ID NO: 111006 - DNA, 33 bp, Homo sapien
cttctggtgattgtgagtaaagcttctatcaat

SEQ ID NO: 111007 - DNA, 33 bp, Homo sapien
aatgacacctgttttgaacaaagcttggcaatt

SEQ ID NO: 111008 - DNA, 33 bp, Homo sapien
aatgacacctgttttggacaaagcttggcaatt

SEQ ID NO: 111009 - DNA, 33 bp, Homo sapien
gaaatgagggctgggacagagttataagctacc

SEQ ID NO: 111010 - DNA, 33 bp, Homo sapien
gaaatgagggctgggatagagttataagctacc

SEQ ID NO: 111011 - DNA, 33 bp, Homo sapien
ataaatgtagagaaaaccaaatctaagcacatt

SEQ ID NO: 111012 - DNA, 33 bp, Homo sapien
ataaatgtagagaaaagcaaatctaagcacatt

SEQ ID NO: 111013 - DNA, 33 bp, Homo sapien
tagctacaaggcctaaggttaccgacactctta

SEQ ID NO: 111014 - DNA, 33 bp, Homo sapien
tagctacaaggcctaatgttaccgacactctta

SEQ ID NO: 111015 - DNA, 33 bp, Homo sapien
tgaccaaagtatataggactgggcctgtgcata

SEQ ID NO: 111016 - DNA, 33 bp, Homo sapien
tgaccaaagtatatagtactgggcctgtgcata

SEQ ID NO: 111017 - DNA, 33 bp, Homo sapien
tgtgtgaagtttgctacgtttgttgtctgtttt

SEQ ID NO: 111018 - DNA, 33 bp, Homo sapien
tgtgtgaagtttgctatgtttgttgtctgtttt

SEQ ID NO: 111019 - DNA, 33 bp, Homo sapien
tagcctctgtcagtcacattaattagaatggcc

SEQ ID NO: 111020 - DNA, 33 bp, Homo sapien
tagcctctgtcagtcagattaattagaatggcc

SEQ ID NO: 111021 - DNA, 33 bp, Homo sapien
ttgcctgcaattacgcaccacccgcaaggaagc

SEQ ID NO: 111022 - DNA, 33 bp, Homo sapien
ttgcctgcaattacgcgccacccgcaaggaagc

SEQ ID NO: 111023 - DNA, 33 bp, Homo sapien
gaccagctatgttcacacacaattttctgtttt

SEQ ID NO: 111024 - DNA, 33 bp, Homo sapien
gaccagctatgttcacgcacaattttctgtttt

SEQ ID NO: 111025 - DNA, 33 bp, Homo sapien
aaaactcttaataaaccgtgaagtgatatgcca

SEQ ID NO: 111026 - DNA, 33 bp, Homo sapien
aaaactcttaataaactgtgaagtgatatgcca

SEQ ID NO: 111027 - DNA, 33 bp, Homo sapien
agtccaccttttagtaagtgcttagatattcag

SEQ ID NO: 111028 - DNA, 33 bp, Homo sapien
agtccaccttttagtacgtgcttagatattcag

SEQ ID NO: 111029 - DNA, 33 bp, Homo sapien
gtattagcatggggaagatattgtattttctta

SEQ ID NO: 111030 - DNA, 33 bp, Homo sapien
gtattagcatggggaatatattgtattttctta

SEQ ID NO: 111031 - DNA, 33 bp, Homo sapien
acatatacctttatagaaatcacaatatgttca

SEQ ID NO: 111032 - DNA, 33 bp, Homo sapien
acatatacctttatagcaatcacaatatgttca

SEQ ID NO: 111033 - DNA, 33 bp, Homo sapien
caagaagcagagtcaacgtgaaattacatattt

SEQ ID NO: 111034 - DNA, 33 bp, Homo sapien
caagaagcagagtcaatgtgaaattacatattt

SEQ ID NO: 111035 - DNA, 33 bp, Homo sapien
cccctgaatcagaagaatcggaatccacagagt

SEQ ID NO: 111036 - DNA, 33 bp, Homo sapien
cccctgaatcagaagactcggaatccacagagt

SEQ ID NO: 111037 - DNA, 33 bp, Homo sapien
ctcactgaactcagacgcttcttcactgtattc

SEQ ID NO: 111038 - DNA, 33 bp, Homo sapien
ctcactgaactcagactcttcttcactgtattc

SEQ ID NO: 111039 - DNA, 33 bp, Homo sapien
ccaatgaagtcactgcgaacctagtttgattta

SEQ ID NO: 111040 - DNA, 33 bp, Homo sapien
ccaatgaagtcactgctaacctagtttgattta

SEQ ID NO: 111041 - DNA, 33 bp, Homo sapien
atttaacaattggagcactaagaactattacta

SEQ ID NO: 111042 - DNA, 33 bp, Homo sapien
atttaacaattggagcgctaagaactattacta

SEQ ID NO: 111043 - DNA, 33 bp, Homo sapien
ttcaatcaagtaggacacaaaaagcctacaaaa

SEQ ID NO: 111044 - DNA, 33 bp, Homo sapien
ttcaatcaagtaggacgcaaaaagcctacaaaa

SEQ ID NO: 111045 - DNA, 33 bp, Homo sapien
tttgtgaactgattgagtatactagtgagaagt

SEQ ID NO: 111046 - DNA, 33 bp, Homo sapien
tttgtgaactgattgattatactagtgagaagt

SEQ ID NO: 111047 - DNA, 33 bp, Homo sapien
gttacagattgtaagcactggagattatcagtg

SEQ ID NO: 111048 - DNA, 33 bp, Homo sapien
gttacagattgtaagccctggagattatcagtg

SEQ ID NO: 111049 - DNA, 33 bp, Homo sapien
cttgtcgatgctaccaatgacttccatgttagg

SEQ ID NO: 111050 - DNA, 33 bp, Homo sapien
cttgtcgatgctaccagtgacttccatgttagg

SEQ ID NO: 111051 - DNA, 33 bp, Homo sapien
agagagaggaacgaaccgtgctcagtgctttat

SEQ ID NO: 111052 - DNA, 33 bp, Homo sapien
agagagaggaacgaactgtgctcagtgctttat

SEQ ID NO: 111053 - DNA, 33 bp, Homo sapien
ctcatggttaaataaaacctcacatttgtcctt

SEQ ID NO: 111054 - DNA, 33 bp, Homo sapien
ctcatggttaaataaagcctcacatttgtcctt

SEQ ID NO: 111055 - DNA, 33 bp, Homo sapien
caaaaacatgaagtcacgataggaattactaca

SEQ ID NO: 111056 - DNA, 33 bp, Homo sapien
caaaaacatgaagtcatgataggaattactaca

SEQ ID NO: 111057 - DNA, 33 bp, Homo sapien
agtgtaagatgcggctaagcccaaaggtgccaa

SEQ ID NO: 111058 - DNA, 33 bp, Homo sapien
agtgtaagatgcggctgagcccaaaggtgccaa

SEQ ID NO: 111059 - DNA, 33 bp, Homo sapien
aagtgaaagggaacagcctgcatcttagaaaag

SEQ ID NO: 111060 - DNA, 33 bp, Homo sapien
aagtgaaagggaacagtctgcatcttagaaaag

SEQ ID NO: 111061 - DNA, 33 bp, Homo sapien
cgtgaagctgtagagacacaattttagaaatgt

SEQ ID NO: 111062 - DNA, 33 bp, Homo sapien
cgtgaagctgtagagatacaattttagaaatgt

SEQ ID NO: 111063 - DNA, 33 bp, Homo sapien
aaaaacagtgtcagaaaaattgagttataatgt

SEQ ID NO: 111064 - DNA, 33 bp, Homo sapien
aaaaacagtgtcagaagaattgagttataatgt

SEQ ID NO: 111065 - DNA, 33 bp, Homo sapien
tcttcttcccaaacggcaacagagtagccatta

SEQ ID NO: 111066 - DNA, 33 bp, Homo sapien
tcttcttcccaaacggtaacagagtagccatta

SEQ ID NO: 111067 - DNA, 33 bp, Homo sapien
atgaatcagaaaagtcaacttatgtaatacatt

SEQ ID NO: 111068 - DNA, 33 bp, Homo sapien
atgaatcagaaaagtcgacttatgtaatacatt

SEQ ID NO: 111069 - DNA, 33 bp, Homo sapien
ttgtgttgcttcaaaaactattttctcctctca

SEQ ID NO: 111070 - DNA, 33 bp, Homo sapien
ttgtgttgcttcaaaatctattttctcctctca

SEQ ID NO: 111071 - DNA, 33 bp, Homo sapien
ctgtgactagtgctcaaaaatgtaagtagctga

SEQ ID NO: 111072 - DNA, 33 bp, Homo sapien
ctgtgactagtgctcagaaatgtaagtagctga

SEQ ID NO: 111073 - DNA, 33 bp, Homo sapien
gctttaaagaagtttccatcctggtggagaagc

SEQ ID NO: 111074 - DNA, 33 bp, Homo sapien
gctttaaagaagtttctatcctggtggagaagc

SEQ ID NO: 111075 - DNA, 33 bp, Homo sapien
attatctctgtagcacaaaaataatgtttcagg

SEQ ID NO: 111076 - DNA, 33 bp, Homo sapien
attatctctgtagcacgaaaataatgtttcagg

SEQ ID NO: 111077 - DNA, 33 bp, Homo sapien
cgggcagcaatacctaataatagtttgtcatta

SEQ ID NO: 111078 - DNA, 33 bp, Homo sapien
cgggcagcaatacctagtaatagtttgtcatta

SEQ ID NO: 111079 - DNA, 33 bp, Homo sapien
ggcaacaaactgtgaaaaatgatactgtggata

SEQ ID NO: 111080 - DNA, 33 bp, Homo sapien
ggcaacaaactgtgaagaatgatactgtggata

SEQ ID NO: 111081 - DNA, 33 bp, Homo sapien
tacaaagttgttagtaagggcaatctgatccta

SEQ ID NO: 111082 - DNA, 33 bp, Homo sapien
tacaaagttgttagtacgggcaatctgatccta

SEQ ID NO: 111083 - DNA, 33 bp, Homo sapien
tatgagcatgatgacaagttagtagtttataaa

SEQ ID NO: 111084 - DNA, 33 bp, Homo sapien
tatgagcatgatgacaggttagtagtttataaa

SEQ ID NO: 111085 - DNA, 33 bp, Homo sapien
tgcatatactcatccacaaactactctatcact

SEQ ID NO: 111086 - DNA, 33 bp, Homo sapien
tgcatatactcatccataaactactctatcact

SEQ ID NO: 111087 - DNA, 33 bp, Homo sapien
tcactgcacagaaagccgatcactgagacaaaa

SEQ ID NO: 111088 - DNA, 33 bp, Homo sapien
tcactgcacagaaagctgatcactgagacaaaa

SEQ ID NO: 111089 - DNA, 33 bp, Homo sapien
gaagaaattatgaaggaaacaatgtgagcctga

SEQ ID NO: 111090 - DNA, 33 bp, Homo sapien
gaagaaattatgaagggaacaatgtgagcctga

SEQ ID NO: 111091 - DNA, 33 bp, Homo sapien
tctttactacagagtcaaataatttaaaagcat

SEQ ID NO: 111092 - DNA, 33 bp, Homo sapien
tctttactacagagtccaataatttaaaagcat

SEQ ID NO: 111093 - DNA, 33 bp, Homo sapien
agagtttgaacctcaactcaggtaactcctgtg

SEQ ID NO: 111094 - DNA, 33 bp, Homo sapien
agagtttgaacctcaattcaggtaactcctgtg

SEQ ID NO: 111095 - DNA, 33 bp, Homo sapien
gagcttaaaaaagaaacgtgaacacaggagtta

SEQ ID NO: 111096 - DNA, 33 bp, Homo sapien
gagcttaaaaaagaaatgtgaacacaggagtta

SEQ ID NO: 111097 - DNA, 33 bp, Homo sapien
ccatgaccatgagataccttttcattcttttgt

SEQ ID NO: 111098 - DNA, 33 bp, Homo sapien
ccatgaccatgagatatcttttcattcttttgt

SEQ ID NO: 111099 - DNA, 33 bp, Homo sapien
gaaaactcagtgcccaataccaaggcagcattt

SEQ ID NO: 111100 - DNA, 33 bp, Homo sapien
gaaaactcagtgcccagtaccaaggcagcattt

SEQ ID NO: 111101 - DNA, 33 bp, Homo sapien
gtgaaatgacgagaaacgaagtatcatcaggtt

SEQ ID NO: 111102 - DNA, 33 bp, Homo sapien
gtgaaatgacgagaaatgaagtatcatcaggtt

SEQ ID NO: 111103 - DNA, 33 bp, Homo sapien
atcaagggacaagacaaaattatggattgcctg

SEQ ID NO: 111104 - DNA, 33 bp, Homo sapien
atcaagggacaagacacaattatggattgcctg

SEQ ID NO: 111105 - DNA, 33 bp, Homo sapien
cgacccccaacacagcacagtttccttacagaa

SEQ ID NO: 111106 - DNA, 33 bp, Homo sapien
cgacccccaacacagcgcagtttccttacagaa

SEQ ID NO: 111107 - DNA, 33 bp, Homo sapien
tatctgcactttcccacagtcttcaggtaacca

SEQ ID NO: 111108 - DNA, 33 bp, Homo sapien
tatctgcactttcccatagtcttcaggtaacca

SEQ ID NO: 111109 - DNA, 33 bp, Homo sapien
caggtaaccaacagaaaccaaatgatatggaat

SEQ ID NO: 111110 - DNA, 33 bp, Homo sapien
caggtaaccaacagaatccaaatgatatggaat

SEQ ID NO: 111111 - DNA, 33 bp, Homo sapien
ctctggaatgaaataaacttccaagttagatgg

SEQ ID NO: 111112 - DNA, 33 bp, Homo sapien
ctctggaatgaaataagcttccaagttagatgg

SEQ ID NO: 111113 - DNA, 33 bp, Homo sapien
ctcctccaatcaattactgacttaacaatcaga

SEQ ID NO: 111114 - DNA, 33 bp, Homo sapien
ctcctccaatcaattattgacttaacaatcaga

SEQ ID NO: 111115 - DNA, 33 bp, Homo sapien
tacattttattatgtgatttttcctgcttaaaa

SEQ ID NO: 111116 - DNA, 33 bp, Homo sapien
tacattttattatgtggtttttcctgcttaaaa

SEQ ID NO: 111117 - DNA, 33 bp, Homo sapien
ttgcatcccctaggacagcatgaatttaacaac

SEQ ID NO: 111118 - DNA, 33 bp, Homo sapien
ttgcatcccctaggaccgcatgaatttaacaac

SEQ ID NO: 111119 - DNA, 33 bp, Homo sapien
atgaattaatgttcaccgataaatctgaaatta

SEQ ID NO: 111120 - DNA, 33 bp, Homo sapien
atgaattaatgttcactgataaatctgaaatta

SEQ ID NO: 111121 - DNA, 33 bp, Homo sapien
atgtcctctgtacctacgtccctgcattgcttt

SEQ ID NO: 111122 - DNA, 33 bp, Homo sapien
atgtcctctgtacctatgtccctgcattgcttt

SEQ ID NO: 111123 - DNA, 33 bp, Homo sapien
tctgtttacaggcttcaaaaaaagacaaaacta

SEQ ID NO: 111124 - DNA, 33 bp, Homo sapien
tctgtttacaggcttcgaaaaaagacaaaacta

SEQ ID NO: 111125 - DNA, 33 bp, Homo sapien
atgaatagaaaacaccaagggtataggaaagtt

SEQ ID NO: 111126 - DNA, 33 bp, Homo sapien
atgaatagaaaacaccgagggtataggaaagtt

SEQ ID NO: 111127 - DNA, 33 bp, Homo sapien
gaggcacatccaagtccattgttgggattatgc

SEQ ID NO: 111128 - DNA, 33 bp, Homo sapien
gaggcacatccaagtctattgttgggattatgc

SEQ ID NO: 111129 - DNA, 33 bp, Homo sapien
gggccacggactccaccggaactgatgggctgg

SEQ ID NO: 111130 - DNA, 33 bp, Homo sapien
gggccacggactccactggaactgatgggctgg

SEQ ID NO: 111131 - DNA, 33 bp, Homo sapien
ttcctgagaggttatgaaactggaaaacatata

SEQ ID NO: 111132 - DNA, 33 bp, Homo sapien
ttcctgagaggttatggaactggaaaacatata

SEQ ID NO: 111133 - DNA, 33 bp, Homo sapien
gtcctgatagttttaactgtccagttcctgaga

SEQ ID NO: 111134 - DNA, 33 bp, Homo sapien
gtcctgatagttttaattgtccagttcctgaga

SEQ ID NO: 111135 - DNA, 33 bp, Homo sapien
tgcatctcatagcacagccatttgttttgtgct

SEQ ID NO: 111136 - DNA, 33 bp, Homo sapien
tgcatctcatagcacatccatttgttttgtgct

SEQ ID NO: 111137 - DNA, 33 bp, Homo sapien
ctgagtgaatatttgcaaaatcatatgccacta

SEQ ID NO: 111138 - DNA, 33 bp, Homo sapien
ctgagtgaatatttgctaaatcatatgccacta

SEQ ID NO: 111139 - DNA, 33 bp, Homo sapien
ttcagtactttgtaaaaccctactgacattaag

SEQ ID NO: 111140 - DNA, 33 bp, Homo sapien
ttcagtactttgtaaacccctactgacattaag

SEQ ID NO: 111141 - DNA, 33 bp, Homo sapien
atttacgcagatttcaatatctccacattctta

SEQ ID NO: 111142 - DNA, 33 bp, Homo sapien
atttacgcagatttcagtatctccacattctta

SEQ ID NO: 111143 - DNA, 33 bp, Homo sapien
ttatcactacagacacaaagtatgtatgaagtc

SEQ ID NO: 111144 - DNA, 33 bp, Homo sapien
ttatcactacagacacgaagtatgtatgaagtc

SEQ ID NO: 111145 - DNA, 33 bp, Homo sapien
tgtctatagtttcccacgcattactaactcatg

SEQ ID NO: 111146 - DNA, 33 bp, Homo sapien
tgtctatagtttcccaggcattactaactcatg

SEQ ID NO: 111147 - DNA, 33 bp, Homo sapien
tagacacattttcagaacttaactggagatctt

SEQ ID NO: 111148 - DNA, 33 bp, Homo sapien
tagacacattttcagaccttaactggagatctt

SEQ ID NO: 111149 - DNA, 33 bp, Homo sapien
attagtcttttgtccactctacatagaagtttt

SEQ ID NO: 111150 - DNA, 33 bp, Homo sapien
attagtcttttgtccattctacatagaagtttt

SEQ ID NO: 111151 - DNA, 33 bp, Homo sapien
ccataaaaaaagcctacactcctcatttactcc

SEQ ID NO: 111152 - DNA, 33 bp, Homo sapien
ccataaaaaaagcctatactcctcatttactcc

SEQ ID NO: 111153 - DNA, 33 bp, Homo sapien
actcacaggtcaggggaatactctttacttctg

SEQ ID NO: 111154 - DNA, 33 bp, Homo sapien
actcacaggtcagggggatactctttacttctg

SEQ ID NO: 111155 - DNA, 33 bp, Homo sapien
gtatctgcctctgtacaacaaatataataaaat

SEQ ID NO: 111156 - DNA, 33 bp, Homo sapien
gtatctgcctctgtactacaaatataataaaat

SEQ ID NO: 111157 - DNA, 33 bp, Homo sapien
tattgcccagagcacagtcacactgttctaaga

SEQ ID NO: 111158 - DNA, 33 bp, Homo sapien
tattgcccagagcacattcacactgttctaaga

SEQ ID NO: 111159 - DNA, 33 bp, Homo sapien
gtgttgggagaaggacaggtagagaagtgcaga

SEQ ID NO: 111160 - DNA, 33 bp, Homo sapien
gtgttgggagaaggaccggtagagaagtgcaga

SEQ ID NO: 111161 - DNA, 33 bp, Homo sapien
aaaatatttaaaaagcagacagaatattgatat

SEQ ID NO: 111162 - DNA, 33 bp, Homo sapien
aaaatatttaaaaagcggacagaatattgatat

SEQ ID NO: 111163 - DNA, 33 bp, Homo sapien
agaaaaccctgaatccaccatttcctagatgtc

SEQ ID NO: 111164 - DNA, 33 bp, Homo sapien
agaaaaccctgaatccgccatttcctagatgtc

SEQ ID NO: 111165 - DNA, 33 bp, Homo sapien
cctcattacagagttaataaaaaacaagatggt

SEQ ID NO: 111166 - DNA, 33 bp, Homo sapien
cctcattacagagttagtaaaaaacaagatggt

SEQ ID NO: 111167 - DNA, 33 bp, Homo sapien
tgtagaatcatgtaaacatctttggaccaacca

SEQ ID NO: 111168 - DNA, 33 bp, Homo sapien
tgtagaatcatgtaaatatctttggaccaacca

SEQ ID NO: 111169 - DNA, 33 bp, Homo sapien
acacaaaaataggcaacgaggaaaaactcccta

SEQ ID NO: 111170 - DNA, 33 bp, Homo sapien
acacaaaaataggcaatgaggaaaaactcccta

SEQ ID NO: 111171 - DNA, 33 bp, Homo sapien
taggcacttctcaacaaaaagggatacaagtag

SEQ ID NO: 111172 - DNA, 33 bp, Homo sapien
taggcacttctcaacagaaagggatacaagtag

SEQ ID NO: 111173 - DNA, 33 bp, Homo sapien
aatagtttcaagaagccatggaatttaatgtct

SEQ ID NO: 111174 - DNA, 33 bp, Homo sapien
aatagtttcaagaagctatggaatttaatgtct

SEQ ID NO: 111175 - DNA, 33 bp, Homo sapien
ccaagctatcatcttgcaagtaacacatatgct

SEQ ID NO: 111176 - DNA, 33 bp, Homo sapien
ccaagctatcatcttggaagtaacacatatgct

SEQ ID NO: 111177 - DNA, 33 bp, Homo sapien
aaacatctggtaataaaagctgtccttggggct

SEQ ID NO: 111178 - DNA, 33 bp, Homo sapien
aaacatctggtaataagagctgtccttggggct

SEQ ID NO: 111179 - DNA, 33 bp, Homo sapien
acagaactgataaaacgcagcccataatttgtt

SEQ ID NO: 111180 - DNA, 33 bp, Homo sapien
acagaactgataaaactcagcccataatttgtt

SEQ ID NO: 111181 - DNA, 33 bp, Homo sapien
atatctacagtattataaaggatgtagctaagg

SEQ ID NO: 111182 - DNA, 33 bp, Homo sapien
atatctacagtattattaaggatgtagctaagg

SEQ ID NO: 111183 - DNA, 33 bp, Homo sapien
gttagcccatgcatcaatcatttttatcgtaat

SEQ ID NO: 111184 - DNA, 33 bp, Homo sapien
gttagcccatgcatcagtcatttttatcgtaat

SEQ ID NO: 111185 - DNA, 33 bp, Homo sapien
tgaaaatatttggggaaaacattacatctgtac

SEQ ID NO: 111186 - DNA, 33 bp, Homo sapien
tgaaaatatttggggagaacattacatctgtac

SEQ ID NO: 111187 - DNA, 33 bp, Homo sapien
cagcttatttttctgacggtggactacgattaa

SEQ ID NO: 111188 - DNA, 33 bp, Homo sapien
cagcttatttttctgatggtggactacgattaa

SEQ ID NO: 111189 - DNA, 33 bp, Homo sapien
aaacaaataatcaagacctaaactttgtgaggt

SEQ ID NO: 111190 - DNA, 33 bp, Homo sapien
aaacaaataatcaagatctaaactttgtgaggt

SEQ ID NO: 111191 - DNA, 33 bp, Homo sapien
tggtaatgattaatggccaatgctggagaattg

SEQ ID NO: 111192 - DNA, 33 bp, Homo sapien
tggtaatgattaatggtcaatgctggagaattg

SEQ ID NO: 111193 - DNA, 33 bp, Homo sapien
ggaaaactgaggtacaaaaggttatgtcatgta

SEQ ID NO: 111194 - DNA, 33 bp, Homo sapien
ggaaaactgaggtacagaaggttatgtcatgta

SEQ ID NO: 111195 - DNA, 33 bp, Homo sapien
tgtcatgtaatggtacaaagtggcagaaagaaa

SEQ ID NO: 111196 - DNA, 33 bp, Homo sapien
tgtcatgtaatggtacgaagtggcagaaagaaa

SEQ ID NO: 111197 - DNA, 33 bp, Homo sapien
gactgcaaggtgcctaccctgctgcctgtggaa

SEQ ID NO: 111198 - DNA, 33 bp, Homo sapien
gactgcaaggtgcctatcctgctgcctgtggaa

SEQ ID NO: 111199 - DNA, 33 bp, Homo sapien
ttttgtcgataaggaaaataatcagagtgggat

SEQ ID NO: 111200 - DNA, 33 bp, Homo sapien
ttttgtcgataaggaagataatcagagtgggat

SEQ ID NO: 111201 - DNA, 33 bp, Homo sapien
gtaaataacaagtataatagggttgacagttgg

SEQ ID NO: 111202 - DNA, 33 bp, Homo sapien
gtaaataacaagtatagtagggttgacagttgg

SEQ ID NO: 111203 - DNA, 33 bp, Homo sapien
tatatcgtggaatacaaaatactgaaatacaaa

SEQ ID NO: 111204 - DNA, 33 bp, Homo sapien
tatatcgtggaatacagaatactgaaatacaaa

SEQ ID NO: 111205 - DNA, 33 bp, Homo sapien
ggtcataccttaatagaactggtggttagaaaa

SEQ ID NO: 111206 - DNA, 33 bp, Homo sapien
ggtcataccttaataggactggtggttagaaaa

SEQ ID NO: 111207 - DNA, 33 bp, Homo sapien
gccttcctaatttcctaaagtgattataaagct

SEQ ID NO: 111208 - DNA, 33 bp, Homo sapien
gccttcctaatttcctgaagtgattataaagct

SEQ ID NO: 111209 - DNA, 33 bp, Homo sapien
acagctgaccagggcaagaggtagagtctacgc

SEQ ID NO: 111210 - DNA, 33 bp, Homo sapien
acagctgaccagggcacgaggtagagtctacgc

SEQ ID NO: 111211 - DNA, 33 bp, Homo sapien
atacctagttcttagaacctgcttggccaattt

SEQ ID NO: 111212 - DNA, 33 bp, Homo sapien
atacctagttcttagagcctgcttggccaattt

SEQ ID NO: 111213 - DNA, 33 bp, Homo sapien
cttacctctggtgaaaagagaatgccatttgtt

SEQ ID NO: 111214 - DNA, 33 bp, Homo sapien
cttacctctggtgaaaggagaatgccatttgtt

SEQ ID NO: 111215 - DNA, 33 bp, Homo sapien
ttccttgcctctaacaccaacatatgaacgaga

SEQ ID NO: 111216 - DNA, 33 bp, Homo sapien
ttccttgcctctaacatcaacatatgaacgaga

SEQ ID NO: 111217 - DNA, 33 bp, Homo sapien
gaattgtctgctaaagaaaaatctgagactttt

SEQ ID NO: 111218 - DNA, 33 bp, Homo sapien
gaattgtctgctaaaggaaaatctgagactttt

SEQ ID NO: 111219 - DNA, 33 bp, Homo sapien
aaactaggatacgggcactcaagtccaagtggt

SEQ ID NO: 111220 - DNA, 33 bp, Homo sapien
aaactaggatacgggcgctcaagtccaagtggt

SEQ ID NO: 111221 - DNA, 33 bp, Homo sapien
ttataacttgttacaacgaacacatgaatcctc

SEQ ID NO: 111222 - DNA, 33 bp, Homo sapien
ttataacttgttacaatgaacacatgaatcctc

SEQ ID NO: 111223 - DNA, 33 bp, Homo sapien
cattgtaagagtacaacagcaagaccaaacatt

SEQ ID NO: 111224 - DNA, 33 bp, Homo sapien
cattgtaagagtacaagagcaagaccaaacatt

SEQ ID NO: 111225 - DNA, 33 bp, Homo sapien
tttgacgcagtcataaatagctttagttgtgcc

SEQ ID NO: 111226 - DNA, 33 bp, Homo sapien
tttgacgcagtcataagtagctttagttgtgcc

SEQ ID NO: 111227 - DNA, 33 bp, Homo sapien
atttccacataaattcaatgcctagaaaaaatg

SEQ ID NO: 111228 - DNA, 33 bp, Homo sapien
atttccacataaattcgatgcctagaaaaaatg

SEQ ID NO: 111229 - DNA, 33 bp, Homo sapien
tgttgacaagaagagggaggaatgattcaggaa

SEQ ID NO: 111230 - DNA, 33 bp, Homo sapien
tgttgacaagaagaggtaggaatgattcaggaa

SEQ ID NO: 111231 - DNA, 33 bp, Homo sapien
tgtgtaattattcataatacctctgttgctctt

SEQ ID NO: 111232 - DNA, 33 bp, Homo sapien
tgtgtaattattcatagtacctctgttgctctt

SEQ ID NO: 111233 - DNA, 33 bp, Homo sapien
ttctccgcttttgaaacataaattgggatctag

SEQ ID NO: 111234 - DNA, 33 bp, Homo sapien
ttctccgcttttgaaatataaattgggatctag

SEQ ID NO: 111235 - DNA, 33 bp, Homo sapien
aaatagtcaatgtaagaaggtgaatctcatgca

SEQ ID NO: 111236 - DNA, 33 bp, Homo sapien
aaatagtcaatgtaagcaggtgaatctcatgca

SEQ ID NO: 111237 - DNA, 33 bp, Homo sapien
gagatccaggcagaccagaaataaagtcagact

SEQ ID NO: 111238 - DNA, 33 bp, Homo sapien
gagatccaggcagaccggaaataaagtcagact

SEQ ID NO: 111239 - DNA, 33 bp, Homo sapien
cacatttcagtccaacaaattgaggaagcaaat

SEQ ID NO: 111240 - DNA, 33 bp, Homo sapien
cacatttcagtccaactaattgaggaagcaaat

SEQ ID NO: 111241 - DNA, 33 bp, Homo sapien
tgtgagaagtaggaacaagaatagttgttatag

SEQ ID NO: 111242 - DNA, 33 bp, Homo sapien
tgtgagaagtaggaaccagaatagttgttatag

SEQ ID NO: 111243 - DNA, 33 bp, Homo sapien
atatttataaccctaccacccaatgattatcat

SEQ ID NO: 111244 - DNA, 33 bp, Homo sapien
atatttataaccctactacccaatgattatcat

SEQ ID NO: 111245 - DNA, 33 bp, Homo sapien
ttactcccataattcaatcaataccttggttct

SEQ ID NO: 111246 - DNA, 33 bp, Homo sapien
ttactcccataattcagtcaataccttggttct

SEQ ID NO: 111247 - DNA, 33 bp, Homo sapien
agaatattaaagttaccgcattttcctacagtt

SEQ ID NO: 111248 - DNA, 33 bp, Homo sapien
agaatattaaagttactgcattttcctacagtt

SEQ ID NO: 111249 - DNA, 33 bp, Homo sapien
tgaaaacaaatttaggccatgataatttcaaac

SEQ ID NO: 111250 - DNA, 33 bp, Homo sapien
tgaaaacaaatttaggtcatgataatttcaaac

SEQ ID NO: 111251 - DNA, 33 bp, Homo sapien
tcagcatccagagttaccaacagtaccctgctg

SEQ ID NO: 111252 - DNA, 33 bp, Homo sapien
tcagcatccagagttatcaacagtaccctgctg

SEQ ID NO: 111253 - DNA, 33 bp, Homo sapien
tcttcagactttattcacgttggatattattat

SEQ ID NO: 111254 - DNA, 33 bp, Homo sapien
tcttcagactttattcgcgttggatattattat

SEQ ID NO: 111255 - DNA, 33 bp, Homo sapien
tgcaagagggtgtccacagcacaacatccactg

SEQ ID NO: 111256 - DNA, 33 bp, Homo sapien
tgcaagagggtgtccatagcacaacatccactg

SEQ ID NO: 111257 - DNA, 33 bp, Homo sapien
actgaaatttttaatcaactttaggcgtctttg

SEQ ID NO: 111258 - DNA, 33 bp, Homo sapien
actgaaatttttaatcgactttaggcgtctttg

SEQ ID NO: 111259 - DNA, 33 bp, Homo sapien
ttcaataactatcagacgaagaatgtctatgac

SEQ ID NO: 111260 - DNA, 33 bp, Homo sapien
ttcaataactatcagatgaagaatgtctatgac

SEQ ID NO: 111261 - DNA, 33 bp, Homo sapien
cacacacacaattaaactgagttttgtttcgaa

SEQ ID NO: 111262 - DNA, 33 bp, Homo sapien
cacacacacaattaaattgagttttgtttcgaa

SEQ ID NO: 111263 - DNA, 33 bp, Homo sapien
actcacttcaacctaccgcatccttagttttct

SEQ ID NO: 111264 - DNA, 33 bp, Homo sapien
actcacttcaacctactgcatccttagttttct

SEQ ID NO: 111265 - DNA, 33 bp, Homo sapien
ttcctgttattgtctcactgctaagtaatatta

SEQ ID NO: 111266 - DNA, 33 bp, Homo sapien
ttcctgttattgtctcgctgctaagtaatatta

SEQ ID NO: 111267 - DNA, 33 bp, Homo sapien
tccttaacatactttgaaaaaatgagaatttaa

SEQ ID NO: 111268 - DNA, 33 bp, Homo sapien
tccttaacatactttggaaaaatgagaatttaa

SEQ ID NO: 111269 - DNA, 33 bp, Homo sapien
gagcatgaaagatcctaaggatagtggattctt

SEQ ID NO: 111270 - DNA, 33 bp, Homo sapien
gagcatgaaagatcctgaggatagtggattctt

SEQ ID NO: 111271 - DNA, 33 bp, Homo sapien
tcagatgacaaacccaatccaatattaaatatt

SEQ ID NO: 111272 - DNA, 33 bp, Homo sapien
tcagatgacaaacccagtccaatattaaatatt

SEQ ID NO: 111273 - DNA, 33 bp, Homo sapien
cagaatggctagtgaactccttggtgatttatt

SEQ ID NO: 111274 - DNA, 33 bp, Homo sapien
cagaatggctagtgaattccttggtgatttatt

SEQ ID NO: 111275 - DNA, 33 bp, Homo sapien
tcaaatattaactccaatgccacaagtaaattt

SEQ ID NO: 111276 - DNA, 33 bp, Homo sapien
tcaaatattaactccagtgccacaagtaaattt

SEQ ID NO: 111277 - DNA, 33 bp, Homo sapien
gcaagacttttacttaaggttgatctaatccag

SEQ ID NO: 111278 - DNA, 33 bp, Homo sapien
gcaagacttttacttagggttgatctaatccag

SEQ ID NO: 111279 - DNA, 33 bp, Homo sapien
tgatctatcttgaaaactcatcaggtttctcat

SEQ ID NO: 111280 - DNA, 33 bp, Homo sapien
tgatctatcttgaaaattcatcaggtttctcat

SEQ ID NO: 111281 - DNA, 33 bp, Homo sapien
ttcaaactttgtaagagtagcaaccagaaaatg

SEQ ID NO: 111282 - DNA, 33 bp, Homo sapien
ttcaaactttgtaagattagcaaccagaaaatg

SEQ ID NO: 111283 - DNA, 33 bp, Homo sapien
tatgttaaacacctaaaggattacatacatatc

SEQ ID NO: 111284 - DNA, 33 bp, Homo sapien
tatgttaaacacctaagggattacatacatatc

SEQ ID NO: 111285 - DNA, 33 bp, Homo sapien
tatataggtagattataacaggtaccattttac

SEQ ID NO: 111286 - DNA, 33 bp, Homo sapien
tatataggtagattattacaggtaccattttac

SEQ ID NO: 111287 - DNA, 33 bp, Homo sapien
gtcaaaatcttatcaaatagaggatcaaatgca

SEQ ID NO: 111288 - DNA, 33 bp, Homo sapien
gtcaaaatcttatcaagtagaggatcaaatgca

SEQ ID NO: 111289 - DNA, 33 bp, Homo sapien
ccaggtcacctggaacagttatcactctcaact

SEQ ID NO: 111290 - DNA, 33 bp, Homo sapien
ccaggtcacctggaactgttatcactctcaact

SEQ ID NO: 111291 - DNA, 33 bp, Homo sapien
atgtaaaaagtaggccaacagcaaaatgaacag

SEQ ID NO: 111292 - DNA, 33 bp, Homo sapien
atgtaaaaagtaggccgacagcaaaatgaacag

SEQ ID NO: 111293 - DNA, 33 bp, Homo sapien
tcttgtaattatgcaacggtataacatttaggc

SEQ ID NO: 111294 - DNA, 33 bp, Homo sapien
tcttgtaattatgcaatggtataacatttaggc

SEQ ID NO: 111295 - DNA, 33 bp, Homo sapien
tttgatactttgagagacctgaagatcatttgg

SEQ ID NO: 111296 - DNA, 33 bp, Homo sapien
tttgatactttgagaggcctgaagatcatttgg

SEQ ID NO: 111297 - DNA, 33 bp, Homo sapien
gtcatttccatttctaagttgactaattttgat

SEQ ID NO: 111298 - DNA, 33 bp, Homo sapien
gtcatttccatttctaggttgactaattttgat

SEQ ID NO: 111299 - DNA, 33 bp, Homo sapien
tgtagaaactcttaagcctgatgatgagataga

SEQ ID NO: 111300 - DNA, 33 bp, Homo sapien
tgtagaaactcttaaggctgatgatgagataga

SEQ ID NO: 111301 - DNA, 33 bp, Homo sapien
ctttcctaaagaacaaatcaggctgcagaaaga

SEQ ID NO: 111302 - DNA, 33 bp, Homo sapien
ctttcctaaagaacaagtcaggctgcagaaaga

SEQ ID NO: 111303 - DNA, 33 bp, Homo sapien; identical to SEQ ID NO: 111301

SEQ ID NO: 111304 - DNA, 33 bp, Homo sapien; identical to SEQ ID NO: 111302

SEQ ID NO: 111305 - DNA, 33 bp, Homo sapien
tgcagtgtgactagaaaatagtaaacacgtaat

SEQ ID NO: 111306 - DNA, 33 bp, Homo sapien
tgcagtgtgactagaacatagtaaacacgtaat

SEQ ID NO: 111307 - DNA, 33 bp, Homo sapien
gccctcagtattagtcactctgacaagttgtat

SEQ ID NO: 111308 - DNA, 33 bp, Homo sapien
gccctcagtattagtctctctgacaagttgtat

SEQ ID NO: 111309 - DNA, 33 bp, Homo sapien
tagcaggaaacttaaaatctagcaaatttcctg

SEQ ID NO: 111310 - DNA, 33 bp, Homo sapien
tagcaggaaacttaaagtctagcaaatttcctg

SEQ ID NO: 111311 - DNA, 33 bp, Homo sapien
agaaatagtgccttcaaattcacaaaccaacaa

SEQ ID NO: 111312 - DNA, 33 bp, Homo sapien
agaaatagtgccttcagattcacaaaccaacaa

SEQ ID NO: 111313 - DNA, 33 bp, Homo sapien
tcagatgacctttgatcaagtggttcctggact

SEQ ID NO: 111314 - DNA, 33 bp, Homo sapien
tcagatgacctttgattaagtggttcctggact

SEQ ID NO: 111315 - DNA, 33 bp, Homo sapien
aggtggagatgcaggaagtgaccccaggaatct

SEQ ID NO: 111316 - DNA, 33 bp, Homo sapien
aggtggagatgcaggacgtgaccccaggaatct

SEQ ID NO: 111317 - DNA, 33 bp, Homo sapien
tagcactaaggttttgaaatagtagtgtacata

SEQ ID NO: 111318 - DNA, 33 bp, Homo sapien
tagcactaaggttttgcaatagtagtgtacata

SEQ ID NO: 111319 - DNA, 33 bp, Homo sapien
acgtgttcatttactcgaatctacaaacttaac

SEQ ID NO: 111320 - DNA, 33 bp, Homo sapien
acgtgttcatttactctaatctacaaacttaac

SEQ ID NO: 111321 - DNA, 33 bp, Homo sapien
tttcagtttacacttacgtcgatctactttagg

SEQ ID NO: 111322 - DNA, 33 bp, Homo sapien
tttcagtttacacttatgtcgatctactttagg

SEQ ID NO: 111323 - DNA, 33 bp, Homo sapien
tgggacttttctctcaaagaagaggtctgagat

SEQ ID NO: 111324 - DNA, 33 bp, Homo sapien
tgggacttttctctcacagaagaggtctgagat

SEQ ID NO: 111325 - DNA, 33 bp, Homo sapien
tttcagttacttaatagtatgttttgcctcaat

SEQ ID NO: 111326 - DNA, 33 bp, Homo sapien
tttcagttacttaatattatgttttgcctcaat

SEQ ID NO: 111327 - DNA, 33 bp, Homo sapien
gtgattctcaagccggaacaattttacttttca

SEQ ID NO: 111328 - DNA, 33 bp, Homo sapien
gtgattctcaagccgggacaattttacttttca

SEQ ID NO: 111329 - DNA, 33 bp, Homo sapien
gcttcagcatttaggacaccagatgtaaacatc

SEQ ID NO: 111330 - DNA, 33 bp, Homo sapien
gcttcagcatttaggataccagatgtaaacatc

SEQ ID NO: 111331 - DNA, 33 bp, Homo sapien
tacatgctgaagctaaacagccaattctagttt

SEQ ID NO: 111332 - DNA, 33 bp, Homo sapien
tacatgctgaagctaaccagccaattctagttt

SEQ ID NO: 111333 - DNA, 33 bp, Homo sapien
ggttacagctcagtaaaataggaatggatactt

SEQ ID NO: 111334 - DNA, 33 bp, Homo sapien
ggttacagctcagtaacataggaatggatactt

SEQ ID NO: 111335 - DNA, 33 bp, Homo sapien; identical to SEQ ID NO: 111333

SEQ ID NO: 111336 - DNA, 33 bp, Homo sapien; identical to SEQ ID NO: 111334

SEQ ID NO: 111337 - DNA, 33 bp, Homo sapien
cttaaatttccttagtaaaacaggagcttaact

SEQ ID NO: 111338 - DNA, 33 bp, Homo sapien
cttaaatttccttagtgaaacaggagcttaact

SEQ ID NO: 111339 - DNA, 33 bp, Homo sapien; identical to SEQ ID NO: 111337

SEQ ID NO: 111340 - DNA, 33 bp, Homo sapien; identical to SEQ ID NO: 111338

SEQ ID NO: 111341 - DNA, 33 bp, Homo sapien
ggcccctactgtcttacatcatacctctctagc

SEQ ID NO: 111342 - DNA, 33 bp, Homo sapien
ggcccctactgtcttatatcatacctctctagc

SEQ ID NO: 111343 - DNA, 33 bp, Homo sapien
gtctaggacatagaagaccaataaatgtatggt

SEQ ID NO: 111344 - DNA, 33 bp, Homo sapien
gtctaggacatagaaggccaataaatgtatggt

SEQ ID NO: 111345 - DNA, 33 bp, Homo sapien
ggccattatagctctgcaaattcttaaaggatt

SEQ ID NO: 111346 - DNA, 33 bp, Homo sapien
ggccattatagctctggaaattcttaaaggatt

SEQ ID NO: 111347 - DNA, 33 bp, Homo sapien
gtgtgtaggttaaggacgatcagaactaacaaa

SEQ ID NO: 111348 - DNA, 33 bp, Homo sapien
gtgtgtaggttaaggatgatcagaactaacaaa

SEQ ID NO: 111349 - DNA, 33 bp, Homo sapien
ggtgaaaaattggagaccttgcttcaaatgaag

SEQ ID NO: 111350 - DNA, 33 bp, Homo sapien
ggtgaaaaattggagagcttgcttcaaatgaag

SEQ ID NO: 111351 - DNA, 33 bp, Homo sapien
tgttcatcatcttggcagaatgttctacttgat

SEQ ID NO: 111352 - DNA, 33 bp, Homo sapien
tgttcatcatcttggctgaatgttctacttgat

SEQ ID NO: 111353 - DNA, 33 bp, Homo sapien
tttataaagtctatagcaatgtacagccatatc

SEQ ID NO: 111354 - DNA, 33 bp, Homo sapien
tttataaagtctatagtaatgtacagccatatc

SEQ ID NO: 111355 - DNA, 33 bp, Homo sapien
ctcacctagctcagaactgatatgtaacaggaa

SEQ ID NO: 111356 - DNA, 33 bp, Homo sapien
ctcacctagctcagaattgatatgtaacaggaa

SEQ ID NO: 111357 - DNA, 33 bp, Homo sapien
gataccgcattaaaaaatatgccaaataaatgt

SEQ ID NO: 111358 - DNA, 33 bp, Homo sapien
gataccgcattaaaaagtatgccaaataaatgt

SEQ ID NO: 111359 - DNA, 33 bp, Homo sapien; identical to SEQ ID NO: 111357

SEQ ID NO: 111360 - DNA, 33 bp, Homo sapien; identical to SEQ ID NO: 111358

SEQ ID NO: 111361 - DNA, 33 bp, Homo sapien
tgggaatacctagaaaatggtctggaaagaatg

SEQ ID NO: 111362 - DNA, 33 bp, Homo sapien
tgggaatacctagaaagtggtctggaaagaatg

SEQ ID NO: 111363 - DNA, 33 bp, Homo sapien
ttctgtaaattgcatcgcactgtacacattttt

SEQ ID NO: 111364 - DNA, 33 bp, Homo sapien
ttctgtaaattgcatctcactgtacacattttt

SEQ ID NO: 111365 - DNA, 33 bp, Homo sapien
ttttagaaaaaatacagctgactgttaaaaaac

SEQ ID NO: 111366 - DNA, 33 bp, Homo sapien
ttttagaaaaaatacatctgactgttaaaaaac

SEQ ID NO: 111367 - DNA, 33 bp, Homo sapien
ttatccacagacaatacatcccaagacccccag

SEQ ID NO: 111368 - DNA, 33 bp, Homo sapien
ttatccacagacaatatatcccaagacccccag

SEQ ID NO: 111369 - DNA, 33 bp, Homo sapien
aaacaatccaatatttcaaagatggtacagcta

SEQ ID NO: 111370 - DNA, 33 bp, Homo sapien
aaacaatccaatatttgaaagatggtacagcta

SEQ ID NO: 111371 - DNA, 33 bp, Homo sapien
tcttccttaaataggccaaactttctcttgcct

SEQ ID NO: 111372 - DNA, 33 bp, Homo sapien
tcttccttaaataggcgaaactttctcttgcct

SEQ ID NO: 111373 - DNA, 33 bp, Homo sapien
taatcataccttgaagaaataactaagcaaaca

SEQ ID NO: 111374 - DNA, 33 bp, Homo sapien
taatcataccttgaagcaataactaagcaaaca

SEQ ID NO: 111375 - DNA, 33 bp, Homo sapien
gaaatttaaagagaacacagtaccttctttgaa

SEQ ID NO: 111376 - DNA, 33 bp, Homo sapien
gaaatttaaagagaacgcagtaccttctttgaa

SEQ ID NO: 111377 - DNA, 33 bp, Homo sapien
ctatggctctaaggaaagtgttatcaggtgggt

SEQ ID NO: 111378 - DNA, 33 bp, Homo sapien
ctatggctctaaggaaggtgttatcaggtgggt

SEQ ID NO: 111379 - DNA, 33 bp, Homo sapien
taggtagacatccatcacttgtcacttctttat

SEQ ID NO: 111380 - DNA, 33 bp, Homo sapien
taggtagacatccatcccttgtcacttctttat

SEQ ID NO: 111381 - DNA, 33 bp, Homo sapien
gaaatgaagtttttgacagtttgttatccacat

SEQ ID NO: 111382 - DNA, 33 bp, Homo sapien
gaaatgaagtttttgatagtttgttatccacat

SEQ ID NO: 111383 - DNA, 33 bp, Homo sapien
tttgaggagagatataataaaatgctgttaatg

SEQ ID NO: 111384 - DNA, 33 bp, Homo sapien
tttgaggagagatatattaaaatgctgttaatg

SEQ ID NO: 111385 - DNA, 33 bp, Homo sapien
atgaacttgacactaaaggaaagccccagaatg

SEQ ID NO: 111386 - DNA, 33 bp, Homo sapien
atgaacttgacactaagggaaagccccagaatg

SEQ ID NO: 111387 - DNA, 33 bp, Homo sapien
aactgcacttgccagactcatttgcggataggg

SEQ ID NO: 111388 - DNA, 33 bp, Homo sapien
aactgcacttgccagattcatttgcggataggg

SEQ ID NO: 111389 - DNA, 33 bp, Homo sapien
gaacaaactgtaaattcaaaataccaaatggaa

SEQ ID NO: 111390 - DNA, 33 bp, Homo sapien
gaacaaactgtaaattgaaaataccaaatggaa

SEQ ID NO: 111391 - DNA, 33 bp, Homo sapien
ttgatgattgagtttacaatttagaatgatgat

SEQ ID NO: 111392 - DNA, 33 bp, Homo sapien
ttgatgattgagtttataatttagaatgatgat

SEQ ID NO: 111393 - DNA, 33 bp, Homo sapien
tagaaataatttccagccagatataacatccaa

SEQ ID NO: 111394 - DNA, 33 bp, Homo sapien
tagaaataatttccagtcagatataacatccaa

SEQ ID NO: 111395 - DNA, 33 bp, Homo sapien
ttatccactcctgaaactgatagaaaaattata

SEQ ID NO: 111396 - DNA, 33 bp, Homo sapien
ttatccactcctgaaattgatagaaaaattata

SEQ ID NO: 111397 - DNA, 33 bp, Homo sapien
tctaatcttccattcactatctctctgctgtgt

SEQ ID NO: 111398 - DNA, 33 bp, Homo sapien
tctaatcttccattcagtatctctctgctgtgt

SEQ ID NO: 111399 - DNA, 33 bp, Homo sapien
ttaaacctgtcattacaatctgataaaaagtaa

SEQ ID NO: 111400 - DNA, 33 bp, Homo sapien
ttaaacctgtcattacgatctgataaaaagtaa

SEQ ID NO: 111401 - DNA, 33 bp, Homo sapien
taaggaaaggggtgaacgtagactctgtagagc

SEQ ID NO: 111402 - DNA, 33 bp, Homo sapien
taaggaaaggggtgaatgtagactctgtagagc

SEQ ID NO: 111403 - DNA, 33 bp, Homo sapien
aaaggaatatgattgacgtattataaagacaca

SEQ ID NO: 111404 - DNA, 33 bp, Homo sapien
aaaggaatatgattgatgtattataaagacaca

SEQ ID NO: 111405 - DNA, 33 bp, Homo sapien
taaatgcgaagtaatacataaattcctagaaag

SEQ ID NO: 111406 - DNA, 33 bp, Homo sapien
taaatgcgaagtaatagataaattcctagaaag

SEQ ID NO: 111407 - DNA, 33 bp, Homo sapien
tactagaaacccttcacagaggacaagaattat

SEQ ID NO: 111408 - DNA, 33 bp, Homo sapien
tactagaaacccttcatagaggacaagaattat

SEQ ID NO: 111409 - DNA, 33 bp, Homo sapien
ttgaggttcaaatgcacctattaaaatgacagt

SEQ ID NO: 111410 - DNA, 33 bp, Homo sapien
ttgaggttcaaatgcatctattaaaatgacagt

SEQ ID NO: 111411 - DNA, 33 bp, Homo sapien
ttctcaaacgctaagacattccatagactctaa

SEQ ID NO: 111412 - DNA, 33 bp, Homo sapien
ttctcaaacgctaagatattccatagactctaa

SEQ ID NO: 111413 - DNA, 33 bp, Homo sapien
ccacctagtcactcaaagataagggctgactga

SEQ ID NO: 111414 - DNA, 33 bp, Homo sapien
ccacctagtcactcaaggataagggctgactga

SEQ ID NO: 111415 - DNA, 33 bp, Homo sapien
attttacacctttgtcacattgcatttgtagga

SEQ ID NO: 111416 - DNA, 33 bp, Homo sapien
attttacacctttgtcgcattgcatttgtagga

SEQ ID NO: 111417 - DNA, 33 bp, Homo sapien
cattctgctttaaaggaattatctggtcacatt

SEQ ID NO: 111418 - DNA, 33 bp, Homo sapien
cattctgctttaaaggtattatctggtcacatt

SEQ ID NO: 111419 - DNA, 33 bp, Homo sapien
aaagtctactatcttacgattcagcaagatatt

SEQ ID NO: 111420 - DNA, 33 bp, Homo sapien
aaagtctactatcttatgattcagcaagatatt

SEQ ID NO: 111421 - DNA, 33 bp, Homo sapien
tactagagatgagagacgtagccaacaagaaac

SEQ ID NO: 111422 - DNA, 33 bp, Homo sapien
tactagagatgagagatgtagccaacaagaaac

SEQ ID NO: 111423 - DNA, 33 bp, Homo sapien
aggatgtacaaagagagaaaaaatcaggacttg

SEQ ID NO: 111424 - DNA, 33 bp, Homo sapien
aggatgtacaaagagataaaaaatcaggacttg

SEQ ID NO: 111425 - DNA, 33 bp, Homo sapien
ttatcctcaaagctccaatacatctttctcatc

SEQ ID NO: 111426 - DNA, 33 bp, Homo sapien
ttatcctcaaagctccgatacatctttctcatc

SEQ ID NO: 111427 - DNA, 33 bp, Homo sapien
aaaatacatgattacccgagaacacagtttaat

SEQ ID NO: 111428 - DNA, 33 bp, Homo sapien
aaaatacatgattacctgagaacacagtttaat

SEQ ID NO: 111429 - DNA, 33 bp, Homo sapien
atcctagtagataaaactccttagatggtatgg

SEQ ID NO: 111430 - DNA, 33 bp, Homo sapien
atcctagtagataaaattccttagatggtatgg

SEQ ID NO: 111431 - DNA, 33 bp, Homo sapien
tttactctaggttctgcagcttaggtaagtagt

SEQ ID NO: 111432 - DNA, 33 bp, Homo sapien
tttactctaggttctgtagcttaggtaagtagt

SEQ ID NO: 111433 - DNA, 33 bp, Homo sapien
acatgatataaactcacagcaggactgcttagc

SEQ ID NO: 111434 - DNA, 33 bp, Homo sapien
acatgatataaactcagagcaggactgcttagc

SEQ ID NO: 111435 - DNA, 33 bp, Homo sapien
ctctgacttatttactcacttaactcattacct

SEQ ID NO: 111436 - DNA, 33 bp, Homo sapien
ctctgacttatttacttacttaactcattacct

SEQ ID NO: 111437 - DNA, 33 bp, Homo sapien
tgctaaaacatgataaactctgacttatttact

SEQ ID NO: 111438 - DNA, 33 bp, Homo sapien
tgctaaaacatgataagctctgacttatttact

SEQ ID NO: 111439 - DNA, 33 bp, Homo sapien
atggcaacattgcggagggtgaatttcaagagt

SEQ ID NO: 111440 - DNA, 33 bp, Homo sapien
atggcaacattgcggatggtgaatttcaagagt

SEQ ID NO: 111441 - DNA, 33 bp, Homo sapien
agacattttctatagcactcaaactttttcaaa

SEQ ID NO: 111442 - DNA, 33 bp, Homo sapien
agacattttctatagctctcaaactttttcaaa

SEQ ID NO: 111443 - DNA, 33 bp, Homo sapien
ttagttcatatagccacggaaaataacattcta

SEQ ID NO: 111444 - DNA, 33 bp, Homo sapien
ttagttcatatagccatggaaaataacattcta

SEQ ID NO: 111445 - DNA, 33 bp, Homo sapien
attatttgcccagacaatgattatacagatgaa

SEQ ID NO: 111446 - DNA, 33 bp, Homo sapien
attatttgcccagacactgattatacagatgaa

SEQ ID NO: 111447 - DNA, 33 bp, Homo sapien
actttcaacttcaaagccttgattctgttcatc

SEQ ID NO: 111448 - DNA, 33 bp, Homo sapien
actttcaacttcaaagtcttgattctgttcatc

SEQ ID NO: 111449 - DNA, 33 bp, Homo sapien
tctaaaccgagcattgcacttgaaatatagtgg

SEQ ID NO: 111450 - DNA, 33 bp, Homo sapien
tctaaaccgagcattgtacttgaaatatagtgg

SEQ ID NO: 111451 - DNA, 33 bp, Homo sapien
cagcagcactccctccacgtcacactcagacat

SEQ ID NO: 111452 - DNA, 33 bp, Homo sapien
cagcagcactccctccgcgtcacactcagacat

SEQ ID NO: 111453 - DNA, 33 bp, Homo sapien
tcagacatacctccaggcatttggcacacacac

SEQ ID NO: 111454 - DNA, 33 bp, Homo sapien
tcagacatacctccagtcatttggcacacacac

SEQ ID NO: 111455 - DNA, 33 bp, Homo sapien
tctctggaatttggagcactcactcttctaggt

SEQ ID NO: 111456 - DNA, 33 bp, Homo sapien
tctctggaatttggaggactcactcttctaggt

SEQ ID NO: 111457 - DNA, 33 bp, Homo sapien
ggcagcctgtgagaaccaggagatgtgcctagg

SEQ ID NO: 111458 - DNA, 33 bp, Homo sapien
ggcagcctgtgagaactaggagatgtgcctagg

SEQ ID NO: 111459 - DNA, 33 bp, Homo sapien
gtttttcatactttcagagttgtttctctggtt

SEQ ID NO: 111460 - DNA, 33 bp, Homo sapien
gtttttcatactttcatagttgtttctctggtt

SEQ ID NO: 111461 - DNA, 33 bp, Homo sapien
ttcttctttttaatccgaatgagttgacctgaa

SEQ ID NO: 111462 - DNA, 33 bp, Homo sapien
ttcttctttttaatcctaatgagttgacctgaa

SEQ ID NO: 111463 - DNA, 33 bp, Homo sapien
ttcaaggaaactggtccattttatatttgttgg

SEQ ID NO: 111464 - DNA, 33 bp, Homo sapien
ttcaaggaaactggtctattttatatttgttgg

SEQ ID NO: 111465 - DNA, 33 bp, Homo sapien
aacaaaaccttgttacactaaataccagtgagg

SEQ ID NO: 111466 - DNA, 33 bp, Homo sapien
aacaaaaccttgttacgctaaataccagtgagg

SEQ ID NO: 111467 - DNA, 33 bp, Homo sapien
ctttgctgtgtagaagaatttttagctcagtgt

SEQ ID NO: 111468 - DNA, 33 bp, Homo sapien
ctttgctgtgtagaagtatttttagctcagtgt

SEQ ID NO: 111469 - DNA, 33 bp, Homo sapien
acagcaaagaaagcaaacaacaaagtgaggaga

SEQ ID NO: 111470 - DNA, 33 bp, Homo sapien
acagcaaagaaagcaatcaacaaagtgaggaga

SEQ ID NO: 111471 - DNA, 33 bp, Homo sapien
ttctctcttcgacttcaaaagaccattgtgatt

SEQ ID NO: 111472 - DNA, 33 bp, Homo sapien
ttctctcttcgacttctaaagaccattgtgatt

SEQ ID NO: 111473 - DNA, 33 bp, Homo sapien
tccttaacatgacatacactgtgctcctaaata

SEQ ID NO: 111474 - DNA, 33 bp, Homo sapien
tccttaacatgacatatactgtgctcctaaata

SEQ ID NO: 111475 - DNA, 33 bp, Homo sapien; identical to SEQ ID NO: 111473

SEQ ID NO: 111476 - DNA, 33 bp, Homo sapien; identical to SEQ ID NO: 111474

SEQ ID NO: 111477 - DNA, 33 bp, Homo sapien
ttgccttcttatttatcagccctgtcaaagctg

SEQ ID NO: 111478 - DNA, 33 bp, Homo sapien
ttgccttcttatttattagccctgtcaaagctg

SEQ ID NO: 111479 - DNA, 33 bp, Homo sapien
agaagtcctataacccagaaagtctttgctgat

SEQ ID NO: 111480 - DNA, 33 bp, Homo sapien
agaagtcctataacccggaaagtctttgctgat

SEQ ID NO: 111481 - DNA, 33 bp, Homo sapien
ttagtctaaacatagaatccataccactgacag

SEQ ID NO: 111482 - DNA, 33 bp, Homo sapien
ttagtctaaacatagagtccataccactgacag

SEQ ID NO: 111483 - DNA, 33 bp, Homo sapien
taatagtcaacactgaaattgcctgtaaactgg

SEQ ID NO: 111484 - DNA, 33 bp, Homo sapien
taatagtcaacactgacattgcctgtaaactgg

SEQ ID NO: 111485 - DNA, 33 bp, Homo sapien
aaaatatgcctgagaacgtgcatttaatggctc

SEQ ID NO: 111486 - DNA, 33 bp, Homo sapien
aaaatatgcctgagaatgtgcatttaatggctc

SEQ ID NO: 111487 - DNA, 33 bp, Homo sapien
aaatacaaatgaatacaaatgcttaattctcct

SEQ ID NO: 111488 - DNA, 33 bp, Homo sapien
aaatacaaatgaataccaatgcttaattctcct

SEQ ID NO: 111489 - DNA, 33 bp, Homo sapien
aggggaatttttaccacactaagagcagatttc

SEQ ID NO: 111490 - DNA, 33 bp, Homo sapien
aggggaatttttaccagactaagagcagatttc

SEQ ID NO: 111491 - DNA, 33 bp, Homo sapien
ttatttgatcacaaaacgtacgtcaagcaaata

SEQ ID NO: 111492 - DNA, 33 bp, Homo sapien
ttatttgatcacaaaatgtacgtcaagcaaata

SEQ ID NO: 111493 - DNA, 33 bp, Homo sapien
ctatgattgacagctacgatttaaagagcaact

SEQ ID NO: 111494 - DNA, 33 bp, Homo sapien
ctatgattgacagctatgatttaaagagcaact

SEQ ID NO: 111495 - DNA, 33 bp, Homo sapien
tcaaggtagcatatggcaaaaagcctcagtcta

SEQ ID NO: 111496 - DNA, 33 bp, Homo sapien
tcaaggtagcatatgggaaaaagcctcagtcta

SEQ ID NO: 111497 - DNA, 33 bp, Homo sapien
ccaattatttgtggaaaaggaagaaatgggagg

SEQ ID NO: 111498 - DNA, 33 bp, Homo sapien
ccaattatttgtggaataggaagaaatgggagg

SEQ ID NO: 111499 - DNA, 33 bp, Homo sapien
atgttcctttttcatgccaggatatgtacttaa

SEQ ID NO: 111500 - DNA, 33 bp, Homo sapien
atgttcctttttcatgtcaggatatgtacttaa

SEQ ID NO: 111501 - DNA, 33 bp, Homo sapien
tgttaacaatcgtcaaattatcttaatgaaatc

SEQ ID NO: 111502 - DNA, 33 bp, Homo sapien
tgttaacaatcgtcaatttatcttaatgaaatc

SEQ ID NO: 111503 - DNA, 33 bp, Homo sapien
cgtggatggggttttaacatagcttggaactgg

SEQ ID NO: 111504 - DNA, 33 bp, Homo sapien
cgtggatggggttttagcatagcttggaactgg

SEQ ID NO: 111505 - DNA, 33 bp, Homo sapien
agcttgtttcactaagaataaagacctccaggt

SEQ ID NO: 111506 - DNA, 33 bp, Homo sapien
agcttgtttcactaagcataaagacctccaggt

SEQ ID NO: 111507 - DNA, 33 bp, Homo sapien
aatgaatcaacaaagacatcgtagtatgtatac

SEQ ID NO: 111508 - DNA, 33 bp, Homo sapien
aatgaatcaacaaagatatcgtagtatgtatac

SEQ ID NO: 111509 - DNA, 33 bp, Homo sapien
acctctaagcttcatccaaacagtgttttcaat

SEQ ID NO: 111510 - DNA, 33 bp, Homo sapien
acctctaagcttcatctaaacagtgttttcaat

SEQ ID NO: 111511 - DNA, 33 bp, Homo sapien
tatagtaacacaaaatgaacagagacatcagcc

SEQ ID NO: 111512 - DNA, 33 bp, Homo sapien
tatagtaacacaaaattaacagagacatcagcc

SEQ ID NO: 111513 - DNA, 33 bp, Homo sapien
gttgttaatttcataccaccaacctactgtcta

SEQ ID NO: 111514 - DNA, 33 bp, Homo sapien
gttgttaatttcatactaccaacctactgtcta

SEQ ID NO: 111515 - DNA, 33 bp, Homo sapien
aattcatttttgataaacagaaagtctaaactt

SEQ ID NO: 111516 - DNA, 33 bp, Homo sapien
aattcatttttgataagcagaaagtctaaactt

SEQ ID NO: 111517 - DNA, 33 bp, Homo sapien
tttatctctcacagaaaaaataaatgctgtcaa

SEQ ID NO: 111518 - DNA, 33 bp, Homo sapien
tttatctctcacagaacaaataaatgctgtcaa

SEQ ID NO: 111519 - DNA, 33 bp, Homo sapien
gttttactttgctaccaattaactgtactaaat

SEQ ID NO: 111520 - DNA, 33 bp, Homo sapien
gttttactttgctaccgattaactgtactaaat

SEQ ID NO: 111521 - DNA, 33 bp, Homo sapien
aactgcagaataatgaaccttgatgtgagaaag

SEQ ID NO: 111522 - DNA, 33 bp, Homo sapien
aactgcagaataatgagccttgatgtgagaaag

SEQ ID NO: 111523 - DNA, 33 bp, Homo sapien
gaaatctgagcttaaccggtgaaactgtatctg

SEQ ID NO: 111524 - DNA, 33 bp, Homo sapien
gaaatctgagcttaactggtgaaactgtatctg

SEQ ID NO: 111525 - DNA, 33 bp, Homo sapien
tttgctcaatctctatcagcctgaaagaatttc

SEQ ID NO: 111526 - DNA, 33 bp, Homo sapien
tttgctcaatctctattagcctgaaagaatttc

SEQ ID NO: 111527 - DNA, 33 bp, Homo sapien
tattgtttgtaaggcacactatattaagtggac

SEQ ID NO: 111528 - DNA, 33 bp, Homo sapien
tattgtttgtaaggcatactatattaagtggac

SEQ ID NO: 111529 - DNA, 33 bp, Homo sapien
aacatatgaagataaagtatgtgcttttagtaa

SEQ ID NO: 111530 - DNA, 33 bp, Homo sapien
aacatatgaagataaattatgtgcttttagtaa

SEQ ID NO: 111531 - DNA, 33 bp, Homo sapien
ataaaaattcagttgacgtattatcccttggca

SEQ ID NO: 111532 - DNA, 33 bp, Homo sapien
ataaaaattcagttgatgtattatcccttggca

SEQ ID NO: 111533 - DNA, 33 bp, Homo sapien
accctctactaattcccatctgattgcactatt

SEQ ID NO: 111534 - DNA, 33 bp, Homo sapien
accctctactaattcctatctgattgcactatt

SEQ ID NO: 111535 - DNA, 33 bp, Homo sapien
gtaacaaaatttgttgcaatgtgtggcacctgc

SEQ ID NO: 111536 - DNA, 33 bp, Homo sapien
gtaacaaaatttgttgtaatgtgtggcacctgc

SEQ ID NO: 111537 - DNA, 33 bp, Homo sapien
caggattttattctggcatgactctcatgttcc

SEQ ID NO: 111538 - DNA, 33 bp, Homo sapien
caggattttattctgggatgactctcatgttcc

SEQ ID NO: 111539 - DNA, 33 bp, Homo sapien
tacctaatacacaactgaaggaagaatttttgg

SEQ ID NO: 111540 - DNA, 33 bp, Homo sapien
tacctaatacacaacttaaggaagaatttttgg

SEQ ID NO: 111541 - DNA, 33 bp, Homo sapien
atatcgatgtatacaaatagtctatgaagaata

SEQ ID NO: 111542 - DNA, 33 bp, Homo sapien
atatcgatgtatacaagtagtctatgaagaata

SEQ ID NO: 111543 - DNA, 33 bp, Homo sapien
cagtggctacaaagtcactaggctataggaatt

SEQ ID NO: 111544 - DNA, 33 bp, Homo sapien
cagtggctacaaagtcgctaggctataggaatt

SEQ ID NO: 111545 - DNA, 33 bp, Homo sapien
atacatagtctactcacattgttttgactatca

SEQ ID NO: 111546 - DNA, 33 bp, Homo sapien
atacatagtctactcatattgttttgactatca

SEQ ID NO: 111547 - DNA, 33 bp, Homo sapien
atcttctgatcaaccacgttttaattatgtctg

SEQ ID NO: 111548 - DNA, 33 bp, Homo sapien
atcttctgatcaaccatgttttaattatgtctg

SEQ ID NO: 111549 - DNA, 33 bp, Homo sapien
tttacaaataagacaacggctaacatattttat

SEQ ID NO: 111550 - DNA, 33 bp, Homo sapien
tttacaaataagacaatggctaacatattttat

SEQ ID NO: 111551 - DNA, 33 bp, Homo sapien
tacttgattgatgcaaatgtttctatgatgata

SEQ ID NO: 111552 - DNA, 33 bp, Homo sapien
tacttgattgatgcaagtgtttctatgatgata

SEQ ID NO: 111553 - DNA, 33 bp, Homo sapien
acaaaattattttagacgctcctttgatgtctg

SEQ ID NO: 111554 - DNA, 33 bp, Homo sapien
acaaaattattttagatgctcctttgatgtctg

SEQ ID NO: 111555 - DNA, 33 bp, Homo sapien
caacttaaccacaggcaagaaaccctgcaaagg

SEQ ID NO: 111556 - DNA, 33 bp, Homo sapien
caacttaaccacaggccagaaaccctgcaaagg

SEQ ID NO: 111557 - DNA, 33 bp, Homo sapien
gaatcatgggggaagaaccttcatggcttagtg

SEQ ID NO: 111558 - DNA, 33 bp, Homo sapien
gaatcatgggggaagatccttcatggcttagtg

SEQ ID NO: 111559 - DNA, 33 bp, Homo sapien
taaataagatggctacaagatgaaaggatatac

SEQ ID NO: 111560 - DNA, 33 bp, Homo sapien
taaataagatggctacgagatgaaaggatatac

SEQ ID NO: 111561 - DNA, 33 bp, Homo sapien
cactggaagatgaagacgtaatgatcacatttc

SEQ ID NO: 111562 - DNA, 33 bp, Homo sapien
cactggaagatgaagaggtaatgatcacatttc

SEQ ID NO: 111563 - DNA, 33 bp, Homo sapien
atttgggatatgtaaaaggaacaacctaacatt

SEQ ID NO: 111564 - DNA, 33 bp, Homo sapien
atttgggatatgtaaagggaacaacctaacatt

SEQ ID NO: 111565 - DNA, 33 bp, Homo sapien
accaagatttcaaagacgtgaataaaagctcac

SEQ ID NO: 111566 - DNA, 33 bp, Homo sapien
accaagatttcaaagaggtgaataaaagctcac

SEQ ID NO: 111567 - DNA, 33 bp, Homo sapien
cttcaagtgatacctcagagagcctcaggttct

SEQ ID NO: 111568 - DNA, 33 bp, Homo sapien
cttcaagtgatacctcggagagcctcaggttct

SEQ ID NO: 111569 - DNA, 33 bp, Homo sapien
tcctgatataaccagactcgtataaaagagtta

SEQ ID NO: 111570 - DNA, 33 bp, Homo sapien
tcctgatataaccagagtcgtataaaagagtta

SEQ ID NO: 111571 - DNA, 33 bp, Homo sapien
ttatagtatattcaacaaagtttctgtgaatat

SEQ ID NO: 111572 - DNA, 33 bp, Homo sapien
ttatagtatattcaacgaagtttctgtgaatat

SEQ ID NO: 111573 - DNA, 33 bp, Homo sapien
cctcaccctgttttcacgcaagaagagtattat

SEQ ID NO: 111574 - DNA, 33 bp, Homo sapien
cctcaccctgttttcatgcaagaagagtattat

SEQ ID NO: 111575 - DNA, 33 bp, Homo sapien
tgtagtaataggtgagaaaattgaaaaggaaat

SEQ ID NO: 111576 - DNA, 33 bp, Homo sapien
tgtagtaataggtgaggaaattgaaaaggaaat

SEQ ID NO: 111577 - DNA, 33 bp, Homo sapien
ctaccatggctgaaagaaaaggtagcagcagac

SEQ ID NO: 111578 - DNA, 33 bp, Homo sapien
ctaccatggctgaaaggaaaggtagcagcagac

SEQ ID NO: 111579 - DNA, 33 bp, Homo sapien
catgtgtgcacacaaaggtactcatattaggtt

SEQ ID NO: 111580 - DNA, 33 bp, Homo sapien
catgtgtgcacacaaatgtactcatattaggtt

SEQ ID NO: 111581 - DNA, 33 bp, Homo sapien
aatagagattatatgccccaacctaatatgagt

SEQ ID NO: 111582 - DNA, 33 bp, Homo sapien
aatagagattatatgctccaacctaatatgagt

SEQ ID NO: 111583 - DNA, 33 bp, Homo sapien
gaattagaagtaaatgaaaactcgtaactacat

SEQ ID NO: 111584 - DNA, 33 bp, Homo sapien
gaattagaagtaaatggaaactcgtaactacat

SEQ ID NO: 111585 - DNA, 33 bp, Homo sapien
gtttcttgggagaaaaattttccacagactagg

SEQ ID NO: 111586 - DNA, 33 bp, Homo sapien
gtttcttgggagaaaatttttccacagactagg

SEQ ID NO: 111587 - DNA, 33 bp, Homo sapien
cactggagtacagaggccatgctgtgtgagcag

SEQ ID NO: 111588 - DNA, 33 bp, Homo sapien
cactggagtacagaggtcatgctgtgtgagcag

SEQ ID NO: 111589 - DNA, 33 bp, Homo sapien
ttgtttgattttgtctaacaacagaaaccctta

SEQ ID NO: 111590 - DNA, 33 bp, Homo sapien
ttgtttgattttgtctcacaacagaaaccctta

SEQ ID NO: 111591 - DNA, 33 bp, Homo sapien
accacatttgccttagaatttcaacatgtgaat

SEQ ID NO: 111592 - DNA, 33 bp, Homo sapien
accacatttgccttaggatttcaacatgtgaat

SEQ ID NO: 111593 - DNA, 33 bp, Homo sapien
cattttactatactgactatttgaggtaattgt

SEQ ID NO: 111594 - DNA, 33 bp, Homo sapien
cattttactatactgattatttgaggtaattgt

SEQ ID NO: 111595 - DNA, 33 bp, Homo sapien
ttgtattttctagataagtgcaaaatattttca

SEQ ID NO: 111596 - DNA, 33 bp, Homo sapien
ttgtattttctagatacgtgcaaaatattttca

SEQ ID NO: 111597 - DNA, 33 bp, Homo sapien
tttctggactttagggcagacaggttcaaataa

SEQ ID NO: 111598 - DNA, 33 bp, Homo sapien
tttctggactttagggtagacaggttcaaataa

SEQ ID NO: 111599 - DNA, 33 bp, Homo sapien
tctacttccactatcaaatagtactgaaaatgc

SEQ ID NO: 111600 - DNA, 33 bp, Homo sapien
tctacttccactatcacatagtactgaaaatgc

SEQ ID NO: 111601 - DNA, 33 bp, Homo sapien
tccatttctgaaccaacagatgattgtgtgtag

SEQ ID NO: 111602 - DNA, 33 bp, Homo sapien
tccatttctgaaccaatagatgattgtgtgtag

SEQ ID NO: 111603 - DNA, 33 bp, Homo sapien
aaatttgaaagtggaaaaggataggctgagatt

SEQ ID NO: 111604 - DNA, 33 bp, Homo sapien
aaatttgaaagtggaataggataggctgagatt

SEQ ID NO: 111605 - DNA, 33 bp, Homo sapien
aacttgatgctttacaatgctacagatttttta

SEQ ID NO: 111606 - DNA, 33 bp, Homo sapien
aacttgatgctttacagtgctacagatttttta

SEQ ID NO: 111607 - DNA, 33 bp, Homo sapien
acgtgaaaacgtgggaaaatagattatcagatg

SEQ ID NO: 111608 - DNA, 33 bp, Homo sapien
acgtgaaaacgtgggacaatagattatcagatg

SEQ ID NO: 111609 - DNA, 33 bp, Homo sapien
cacttccaaactaccaataactatgctgagatt

SEQ ID NO: 111610 - DNA, 33 bp, Homo sapien
cacttccaaactaccagtaactatgctgagatt

SEQ ID NO: 111611 - DNA, 33 bp, Homo sapien
taaaaataacacttgacgtatggactttttgca

SEQ ID NO: 111612 - DNA, 33 bp, Homo sapien
taaaaataacacttgatgtatggactttttgca

SEQ ID NO: 111613 - DNA, 33 bp, Homo sapien
gagagttgtaaagacaaattttcaggtttttgc

SEQ ID NO: 111614 - DNA, 33 bp, Homo sapien
gagagttgtaaagacagattttcaggtttttgc

SEQ ID NO: 111615 - DNA, 33 bp, Homo sapien
atcttacataatagcaatcatctctagatagat

SEQ ID NO: 111616 - DNA, 33 bp, Homo sapien
atcttacataatagcagtcatctctagatagat

SEQ ID NO: 111617 - DNA, 33 bp, Homo sapien
gccatttggagttttacggcttctaggcatgag

SEQ ID NO: 111618 - DNA, 33 bp, Homo sapien
gccatttggagttttatggcttctaggcatgag

SEQ ID NO: 111619 - DNA, 33 bp, Homo sapien
tgcacttaattttgctaacatacacttctctta

SEQ ID NO: 111620 - DNA, 33 bp, Homo sapien
tgcacttaattttgctgacatacacttctctta

SEQ ID NO: 111621 - DNA, 33 bp, Homo sapien
tttttctaggtatggaatcaaatgtttagtgaa

SEQ ID NO: 111622 - DNA, 33 bp, Homo sapien
tttttctaggtatggagtcaaatgtttagtgaa

SEQ ID NO: 111623 - DNA, 33 bp, Homo sapien
tcctgaggtattctgccaattccatgcatcata

SEQ ID NO: 111624 - DNA, 33 bp, Homo sapien
tcctgaggtattctgctaattccatgcatcata

SEQ ID NO: 111625 - DNA, 33 bp, Homo sapien
ttggaaattactcaaaagcagaattgacaaata

SEQ ID NO: 111626 - DNA, 33 bp, Homo sapien
ttggaaattactcaaatgcagaattgacaaata

SEQ ID NO: 111627 - DNA, 33 bp, Homo sapien
attaatgcttctgtgacggaataaaatatacag

SEQ ID NO: 111628 - DNA, 33 bp, Homo sapien
attaatgcttctgtgatggaataaaatatacag

SEQ ID NO: 111629 - DNA, 33 bp, Homo sapien
agcacctcattttgagaagtggcctctaaagaa

SEQ ID NO: 111630 - DNA, 33 bp, Homo sapien
agcacctcattttgagcagtggcctctaaagaa

SEQ ID NO: 111631 - DNA, 33 bp, Homo sapien
ttacttattgtatccagtctgataggtgtgaag

SEQ ID NO: 111632 - DNA, 33 bp, Homo sapien
ttacttattgtatccattctgataggtgtgaag

SEQ ID NO: 111633 - DNA, 33 bp, Homo sapien
aatggtgatactaagaaatgccctaagttatct

SEQ ID NO: 111634 - DNA, 33 bp, Homo sapien
aatggtgatactaagagatgccctaagttatct

SEQ ID NO: 111635 - DNA, 33 bp, Homo sapien
aagggatagatagatcagaatgttcacttgcaa

SEQ ID NO: 111636 - DNA, 33 bp, Homo sapien
aagggatagatagatcggaatgttcacttgcaa

SEQ ID NO: 111637 - DNA, 33 bp, Homo sapien
caagatcaattataaaactacattcctacttcc

SEQ ID NO: 111638 - DNA, 33 bp, Homo sapien
caagatcaattataaagctacattcctacttcc

SEQ ID NO: 111639 - DNA, 33 bp, Homo sapien
gtgctgtgagaagaggaaatttttcagagctaa

SEQ ID NO: 111640 - DNA, 33 bp, Homo sapien
gtgctgtgagaagaggtaatttttcagagctaa

SEQ ID NO: 111641 - DNA, 33 bp, Homo sapien
tatgagaatatcacacacaataaacaaaactac

SEQ ID NO: 111642 - DNA, 33 bp, Homo sapien
tatgagaatatcacacgcaataaacaaaactac

SEQ ID NO: 111643 - DNA, 33 bp, Homo sapien
gcagaagcctaaatgcagaatttggcacttaaa

SEQ ID NO: 111644 - DNA, 33 bp, Homo sapien
gcagaagcctaaatgcggaatttggcacttaaa

SEQ ID NO: 111645 - DNA, 33 bp, Homo sapien
atataaaatgatgttacgtgtacactgaaaatt

SEQ ID NO: 111646 - DNA, 33 bp, Homo sapien
atataaaatgatgttatgtgtacactgaaaatt

SEQ ID NO: 111647 - DNA, 33 bp, Homo sapien
ataattaaagaagtaacggtaagcagagtgcta

SEQ ID NO: 111648 - DNA, 33 bp, Homo sapien
ataattaaagaagtaatggtaagcagagtgcta

SEQ ID NO: 111649 - DNA, 33 bp, Homo sapien
ataacaggggtaaaaaagcatacgatcctgtat

SEQ ID NO: 111650 - DNA, 33 bp, Homo sapien
ataacaggggtaaaaatgcatacgatcctgtat

SEQ ID NO: 111651 - DNA, 33 bp, Homo sapien
caataaggtatcccataaaaccatctattaaac

SEQ ID NO: 111652 - DNA, 33 bp, Homo sapien
caataaggtatcccatgaaaccatctattaaac

SEQ ID NO: 111653 - DNA, 33 bp, Homo sapien
gatttttttctagaacgatctgtacacactact

SEQ ID NO: 111654 - DNA, 33 bp, Homo sapien
gatttttttctagaactatctgtacacactact

SEQ ID NO: 111655 - DNA, 33 bp, Homo sapien
attttaatctttgcagaccaatgtgatcatgtt

SEQ ID NO: 111656 - DNA, 33 bp, Homo sapien
attttaatctttgcaggccaatgtgatcatgtt

SEQ ID NO: 111657 - DNA, 33 bp, Homo sapien
aaatgaaaatgcatacactaacgtttttgtctt

SEQ ID NO: 111658 - DNA, 33 bp, Homo sapien
aaatgaaaatgcatacgctaacgtttttgtctt

SEQ ID NO: 111659 - DNA, 33 bp, Homo sapien
caaactcttctgtaaaatgtcagagagtaagta

SEQ ID NO: 111660 - DNA, 33 bp, Homo sapien
caaactcttctgtaaagtgtcagagagtaagta

SEQ ID NO: 111661 - DNA, 33 bp, Homo sapien
atattacaccaaattccacctaatgatcaacta

SEQ ID NO: 111662 - DNA, 33 bp, Homo sapien
atattacaccaaattcgacctaatgatcaacta

SEQ ID NO: 111663 - DNA, 33 bp, Homo sapien
aggatgaataaagaaaaggcaacagaattcctc

SEQ ID NO: 111664 - DNA, 33 bp, Homo sapien
aggatgaataaagaaacggcaacagaattcctc

SEQ ID NO: 111665 - DNA, 33 bp, Homo sapien
tgaaaaatctaaatacacaacataccttgatgt

SEQ ID NO: 111666 - DNA, 33 bp, Homo sapien
tgaaaaatctaaatacgcaacataccttgatgt

SEQ ID NO: 111667 - DNA, 33 bp, Homo sapien
aggaaaagctttaagaaggtataagcagcatca

SEQ ID NO: 111668 - DNA, 33 bp, Homo sapien
aggaaaagctttaagagggtataagcagcatca

SEQ ID NO: 111669 - DNA, 33 bp, Homo sapien
agcatttactgtgcttaaaaaattccgttgtat

SEQ ID NO: 111670 - DNA, 33 bp, Homo sapien
agcatttactgtgcttgaaaaattccgttgtat

SEQ ID NO: 111671 - DNA, 33 bp, Homo sapien
tattatgtgaaaccaaaactaggacaaaatcac

SEQ ID NO: 111672 - DNA, 33 bp, Homo sapien
tattatgtgaaaccaagactaggacaaaatcac

SEQ ID NO: 111673 - DNA, 33 bp, Homo sapien
aatataaaagcgatgactataatgatggtcata

SEQ ID NO: 111674 - DNA, 33 bp, Homo sapien
aatataaaagcgatgagtataatgatggtcata

SEQ ID NO: 111675 - DNA, 33 bp, Homo sapien
tacaaggaagctaaaaagaaagggcttggaaag

SEQ ID NO: 111676 - DNA, 33 bp, Homo sapien
tacaaggaagctaaaaggaaagggcttggaaag

SEQ ID NO: 111677 - DNA, 33 bp, Homo sapien
tgcaatcctagaataaatatccatcatcatttc

SEQ ID NO: 111678 - DNA, 33 bp, Homo sapien
tgcaatcctagaataagtatccatcatcatttc

SEQ ID NO: 111679 - DNA, 33 bp, Homo sapien
gactaaagcaagaaaaacatttgcaacaaaagc

SEQ ID NO: 111680 - DNA, 33 bp, Homo sapien
gactaaagcaagaaaagcatttgcaacaaaagc

SEQ ID NO: 111681 - DNA, 33 bp, Homo sapien
atattcatcatcttcagcttagttcctattttc

SEQ ID NO: 111682 - DNA, 33 bp, Homo sapien
atattcatcatcttcatcttagttcctattttc

SEQ ID NO: 111683 - DNA, 33 bp, Homo sapien
ctggtacattgttcaaattcattgcaattttca

SEQ ID NO: 111684 - DNA, 33 bp, Homo sapien
ctggtacattgttcaagttcattgcaattttca

SEQ ID NO: 111685 - DNA, 33 bp, Homo sapien
gaaatgggactgagaagtaaacatagaatctag

SEQ ID NO: 111686 - DNA, 33 bp, Homo sapien
gaaatgggactgagaattaaacatagaatctag

SEQ ID NO: 111687 - DNA, 33 bp, Homo sapien
ctctttttgaggacaaattgcctgtataaaaaa

SEQ ID NO: 111688 - DNA, 33 bp, Homo sapien
ctctttttgaggacaatttgcctgtataaaaaa

SEQ ID NO: 111689 - DNA, 33 bp, Homo sapien
gctccctgaattgacggcctgaagagaccatga

SEQ ID NO: 111690 - DNA, 33 bp, Homo sapien
gctccctgaattgacgtcctgaagagaccatga

SEQ ID NO: 111691 - DNA, 33 bp, Homo sapien
aacagaagatatgcaaatagccaataagtgtca

SEQ ID NO: 111692 - DNA, 33 bp, Homo sapien
aacagaagatatgcaattagccaataagtgtca

SEQ ID NO: 111693 - DNA, 33 bp, Homo sapien
tgagtctatggttgagcaacaatctgcacacaa

SEQ ID NO: 111694 - DNA, 33 bp, Homo sapien
tgagtctatggttgagtaacaatctgcacacaa

SEQ ID NO: 111695 - DNA, 33 bp, Homo sapien
caaatgtcaaccctaacgtaaactatgcattcc

SEQ ID NO: 111696 - DNA, 33 bp, Homo sapien
caaatgtcaaccctaatgtaaactatgcattcc

SEQ ID NO: 111697 - DNA, 33 bp, Homo sapien
aagatcaagtttcagacagagcaaaacaagttt

SEQ ID NO: 111698 - DNA, 33 bp, Homo sapien
aagatcaagtttcagatagagcaaaacaagttt

SEQ ID NO: 111699 - DNA, 33 bp, Homo sapien
tccctctctgttctaggcaatctggtgtatatg

SEQ ID NO: 111700 - DNA, 33 bp, Homo sapien
tccctctctgttctagtcaatctggtgtatatg

SEQ ID NO: 111701 - DNA, 33 bp, Homo sapien
ctttcttatattgaaaatactgggtgatgtagt

SEQ ID NO: 111702 - DNA, 33 bp, Homo sapien
ctttcttatattgaaagtactgggtgatgtagt

SEQ ID NO: 111703 - DNA, 33 bp, Homo sapien
tgaaatactgttataacacctgcaagcttacaa

SEQ ID NO: 111704 - DNA, 33 bp, Homo sapien
tgaaatactgttataatacctgcaagcttacaa

SEQ ID NO: 111705 - DNA, 33 bp, Homo sapien
aaatacaatgtcaacaaaagagaaagtttgaag

SEQ ID NO: 111706 - DNA, 33 bp, Homo sapien
aaatacaatgtcaacagaagagaaagtttgaag

SEQ ID NO: 111707 - DNA, 33 bp, Homo sapien
tcagtgaggtggtgaacagagtgaaagtgaacg

SEQ ID NO: 111708 - DNA, 33 bp, Homo sapien
tcagtgaggtggtgaatagagtgaaagtgaacg

SEQ ID NO: 111709 - DNA, 33 bp, Homo sapien
gatgagatgcaaataactcatgttttaatagaa

SEQ ID NO: 111710 - DNA, 33 bp, Homo sapien
gatgagatgcaaataagtcatgttttaatagaa

SEQ ID NO: 111711 - DNA, 33 bp, Homo sapien
gagagagagagagcaactgttacttttccagtc

SEQ ID NO: 111712 - DNA, 33 bp, Homo sapien
gagagagagagagcaagtgttacttttccagtc

SEQ ID NO: 111713 - DNA, 33 bp, Homo sapien
atgatttccaaacagagtaggctgaattcatac

SEQ ID NO: 111714 - DNA, 33 bp, Homo sapien
atgatttccaaacagattaggctgaattcatac

SEQ ID NO: 111715 - DNA, 33 bp, Homo sapien
tatctattgcaccagaataagtaatttctatct

SEQ ID NO: 111716 - DNA, 33 bp, Homo sapien
tatctattgcaccagagtaagtaatttctatct

SEQ ID NO: 111717 - DNA, 33 bp, Homo sapien
taggtgtaaagagagcagcaagttaaccttaag

SEQ ID NO: 111718 - DNA, 33 bp, Homo sapien
taggtgtaaagagagcggcaagttaaccttaag

SEQ ID NO: 111719 - DNA, 33 bp, Homo sapien
ctataactgcctttcacgggttcctttggtctt

SEQ ID NO: 111720 - DNA, 33 bp, Homo sapien
ctataactgcctttcatgggttcctttggtctt

SEQ ID NO: 111721 - DNA, 33 bp, Homo sapien
cagtgatcaacctctgaataagaagaaggttat

SEQ ID NO: 111722 - DNA, 33 bp, Homo sapien
cagtgatcaacctctggataagaagaaggttat

SEQ ID NO: 111723 - DNA, 33 bp, Homo sapien
ataagagatggaagacactaaaaggaggccagc

SEQ ID NO: 111724 - DNA, 33 bp, Homo sapien
ataagagatggaagactctaaaaggaggccagc

SEQ ID NO: 111725 - DNA, 33 bp, Homo sapien
attatagcaaagaacacaataatcatcataata

SEQ ID NO: 111726 - DNA, 33 bp, Homo sapien
attatagcaaagaacataataatcatcataata

SEQ ID NO: 111727 - DNA, 33 bp, Homo sapien
ctacacataattgcatcagaacattgctatcat

SEQ ID NO: 111728 - DNA, 33 bp, Homo sapien
ctacacataattgcatgagaacattgctatcat

SEQ ID NO: 111729 - DNA, 33 bp, Homo sapien
taatttttctacaaaaacccaaccattaagact

SEQ ID NO: 111730 - DNA, 33 bp, Homo sapien
taatttttctacaaaatcccaaccattaagact

SEQ ID NO: 111731 - DNA, 33 bp, Homo sapien
atgagctcattacttaaacttcccagaagtgct

SEQ ID NO: 111732 - DNA, 33 bp, Homo sapien
atgagctcattacttagacttcccagaagtgct

SEQ ID NO: 111733 - DNA, 33 bp, Homo sapien
cctggccaacaatgaccacttttagtaactgca

SEQ ID NO: 111734 - DNA, 33 bp, Homo sapien
cctggccaacaatgactacttttagtaactgca

SEQ ID NO: 111735 - DNA, 33 bp, Homo sapien
agtaagcaataaataacgtacactacagaatca

SEQ ID NO: 111736 - DNA, 33 bp, Homo sapien
agtaagcaataaataatgtacactacagaatca

SEQ ID NO: 111737 - DNA, 33 bp, Homo sapien
tttttgttgagaattacgttctggagattcatg

SEQ ID NO: 111738 - DNA, 33 bp, Homo sapien
tttttgttgagaattatgttctggagattcatg

SEQ ID NO: 111739 - DNA, 33 bp, Homo sapien
acataagggaaagttacccaattatccatttca

SEQ ID NO: 111740 - DNA, 33 bp, Homo sapien
acataagggaaagttatccaattatccatttca

SEQ ID NO: 111741 - DNA, 33 bp, Homo sapien
gacgtagtgacctaaacgaaatgctcgcttttt

SEQ ID NO: 111742 - DNA, 33 bp, Homo sapien
gacgtagtgacctaaatgaaatgctcgcttttt

SEQ ID NO: 111743 - DNA, 33 bp, Homo sapien
cattactccttttatgccaatggtttctgaact

SEQ ID NO: 111744 - DNA, 33 bp, Homo sapien
cattactccttttatgtcaatggtttctgaact

SEQ ID NO: 111745 - DNA, 33 bp, Homo sapien
aggttgccaaaaactacgaaacaattcttgaca

SEQ ID NO: 111746 - DNA, 33 bp, Homo sapien
aggttgccaaaaactatgaaacaattcttgaca

SEQ ID NO: 111747 - DNA, 33 bp, Homo sapien
atgattttaaatataaagtaagtcactcagcaa

SEQ ID NO: 111748 - DNA, 33 bp, Homo sapien
atgattttaaatataaggtaagtcactcagcaa

SEQ ID NO: 111749 - DNA, 33 bp, Homo sapien
aacatcttgggtataaaaattagctttctattg

SEQ ID NO: 111750 - DNA, 33 bp, Homo sapien
aacatcttgggtataagaattagctttctattg

SEQ ID NO: 111751 - DNA, 33 bp, Homo sapien
taattaattacaggaaactggaaagtggcaagt

SEQ ID NO: 111752 - DNA, 33 bp, Homo sapien
taattaattacaggaacctggaaagtggcaagt

SEQ ID NO: 111753 - DNA, 33 bp, Homo sapien
taattatctcctttacggactcaaagttgaatg

SEQ ID NO: 111754 - DNA, 33 bp, Homo sapien
taattatctcctttactgactcaaagttgaatg

SEQ ID NO: 111755 - DNA, 33 bp, Homo sapien
tgtgaggacactaaaaaagccttacgaagattt

SEQ ID NO: 111756 - DNA, 33 bp, Homo sapien
tgtgaggacactaaaacagccttacgaagattt

SEQ ID NO: 111757 - DNA, 33 bp, Homo sapien
ccagtcatattcctgaaatgcttctgtcaattc

SEQ ID NO: 111758 - DNA, 33 bp, Homo sapien
ccagtcatattcctgagatgcttctgtcaattc

SEQ ID NO: 111759 - DNA, 33 bp, Homo sapien
agggtaaccagaggaccaggaatggtataaaga

SEQ ID NO: 111760 - DNA, 33 bp, Homo sapien
agggtaaccagaggactaggaatggtataaaga

SEQ ID NO: 111761 - DNA, 33 bp, Homo sapien
tggtgtccgtaacaaacgtcattttgaagtcat

SEQ ID NO: 111762 - DNA, 33 bp, Homo sapien
tggtgtccgtaacaaatgtcattttgaagtcat

SEQ ID NO: 111763 - DNA, 33 bp, Homo sapien
agttcccatagcaataataaaagtgagaagatg

SEQ ID NO: 111764 - DNA, 33 bp, Homo sapien
agttcccatagcaatagtaaaagtgagaagatg

SEQ ID NO: 111765 - DNA, 33 bp, Homo sapien; identical to SEQ ID NO: 111763

SEQ ID NO: 111766 - DNA, 33 bp, Homo sapien; identical to SEQ ID NO: 111764

SEQ ID NO: 111767 - DNA, 33 bp, Homo sapien
atgtattttcaatatacgttacccaatccaaaa

SEQ ID NO: 111768 - DNA, 33 bp, Homo sapien
atgtattttcaatataggttacccaatccaaaa

SEQ ID NO: 111769 - DNA, 33 bp, Homo sapien
agcaggatctactccactataaccatagattgc

SEQ ID NO: 111770 - DNA, 33 bp, Homo sapien
agcaggatctactccattataaccatagattgc

SEQ ID NO: 111771 - DNA, 33 bp, Homo sapien
atcacattttaaactcccattacattgacattt

SEQ ID NO: 111772 - DNA, 33 bp, Homo sapien
atcacattttaaactctcattacattgacattt

SEQ ID NO: 111773 - DNA, 33 bp, Homo sapien
atcaaacacaagccaaatgaaaatttgtttagc

SEQ ID NO: 111774 - DNA, 33 bp, Homo sapien
atcaaacacaagccaagtgaaaatttgtttagc

SEQ ID NO: 111775 - DNA, 33 bp, Homo sapien
attgattttcaaccaagaaatggataacttcca

SEQ ID NO: 111776 - DNA, 33 bp, Homo sapien
attgattttcaaccaataaatggataacttcca

SEQ ID NO: 111777 - DNA, 33 bp, Homo sapien; identical to SEQ ID NO: 111775

SEQ ID NO: 111778 - DNA, 33 bp, Homo sapien; identical to SEQ ID NO: 111776

SEQ ID NO: 111779 - DNA, 33 bp, Homo sapien
gcttgcctgtggctcaatcatattattctttat

SEQ ID NO: 111780 - DNA, 33 bp, Homo sapien
gcttgcctgtggctcagtcatattattctttat

SEQ ID NO: 111781 - DNA, 33 bp, Homo sapien; identical to SEQ ID NO: 111779

SEQ ID NO: 111782 - DNA, 33 bp, Homo sapien; identical to SEQ ID NO: 111780

SEQ ID NO: 111783 - DNA, 33 bp, Homo sapien
aatcacagtttgttgaataaaatatctgattta

SEQ ID NO: 111784 - DNA, 33 bp, Homo sapien
aatcacagtttgttgactaaaatatctgattta

SEQ ID NO: 111785 - DNA, 33 bp, Homo sapien; identical to SEQ ID NO: 111783

SEQ ID NO: 111786 - DNA, 33 bp, Homo sapien; identical to SEQ ID NO: 111784

SEQ ID NO: 111787 - DNA, 33 bp, Homo sapien
ttgtatttttgagcaaacccaatcgtggtagaa

SEQ ID NO: 111788 - DNA, 33 bp, Homo sapien
ttgtatttttgagcaagcccaatcgtggtagaa

SEQ ID NO: 111789 - DNA, 33 bp, Homo sapien
attttatgatgaatgacggaaccagtacaaatt

SEQ ID NO: 111790 - DNA, 33 bp, Homo sapien
attttatgatgaatgatggaaccagtacaaatt

SEQ ID NO: 111791 - DNA, 33 bp, Homo sapien; identical to SEQ ID NO: 111789

SEQ ID NO: 111792 - DNA, 33 bp, Homo sapien; identical to SEQ ID NO: 111790

SEQ ID NO: 111793 - DNA, 33 bp, Homo sapien
gttatctacctacctggatctttatccattgat

SEQ ID NO: 111794 - DNA, 33 bp, Homo sapien
gttatctacctacctgtatctttatccattgat

SEQ ID NO: 111795 - DNA, 33 bp, Homo sapien
gttctctctgacagaccatatgttaggcaacaa

SEQ ID NO: 111796 - DNA, 33 bp, Homo sapien
gttctctctgacagactatatgttaggcaacaa

SEQ ID NO: 111797 - DNA, 33 bp, Homo sapien
attgagatgaaattgacgaattttctggaaaca

SEQ ID NO: 111798 - DNA, 33 bp, Homo sapien
attgagatgaaattgatgaattttctggaaaca

SEQ ID NO: 111799 - DNA, 33 bp, Homo sapien
gaggcccaggtctggaaccactacttgggctgc

SEQ ID NO: 111800 - DNA, 33 bp, Homo sapien
gaggcccaggtctggagccactacttgggctgc

SEQ ID NO: 111801 - DNA, 33 bp, Homo sapien
ccagaaaaggcatcacaagtttacactctggtc

SEQ ID NO: 111802 - DNA, 33 bp, Homo sapien
ccagaaaaggcatcacgagtttacactctggtc

SEQ ID NO: 111803 - DNA, 33 bp, Homo sapien
atggtattgaaatgaaaattaactgattgtaga

SEQ ID NO: 111804 - DNA, 33 bp, Homo sapien
atggtattgaaatgaagattaactgattgtaga

SEQ ID NO: 111805 - DNA, 33 bp, Homo sapien
tgttattaaaagtgaaaagcaatggccattttc

SEQ ID NO: 111806 - DNA, 33 bp, Homo sapien
tgttattaaaagtgaagagcaatggccattttc

SEQ ID NO: 111807 - DNA, 33 bp, Homo sapien
ccccaccagaaatgaaagaaaatggccattgct

SEQ ID NO: 111808 - DNA, 33 bp, Homo sapien
ccccaccagaaatgaatgaaaatggccattgct

SEQ ID NO: 111809 - DNA, 33 bp, Homo sapien
tactttaaatttctctcacgatgattacagctt

SEQ ID NO: 111810 - DNA, 33 bp, Homo sapien
tactttaaatttctcttacgatgattacagctt

SEQ ID NO: 111811 - DNA, 33 bp, Homo sapien
atgttctttgcatcaacataggtgcagctgaag

SEQ ID NO: 111812 - DNA, 33 bp, Homo sapien
atgttctttgcatcaatataggtgcagctgaag

SEQ ID NO: 111813 - DNA, 33 bp, Homo sapien
ctcaatggcacatttcaagtaatttaatgaaaa

SEQ ID NO: 111814 - DNA, 33 bp, Homo sapien
ctcaatggcacatttccagtaatttaatgaaaa

SEQ ID NO: 111815 - DNA, 33 bp, Homo sapien
ctaggtgtgaaaacccaatgtgaattaatcaac

SEQ ID NO: 111816 - DNA, 33 bp, Homo sapien
ctaggtgtgaaaacccgatgtgaattaatcaac

SEQ ID NO: 111817 - DNA, 33 bp, Homo sapien
atttttcaacagtacaatagtcaccgtcgtatt

SEQ ID NO: 111818 - DNA, 33 bp, Homo sapien
atttttcaacagtacagtagtcaccgtcgtatt

SEQ ID NO: 111819 - DNA, 33 bp, Homo sapien
caatctgtgaggattcgattccacctctacatt

SEQ ID NO: 111820 - DNA, 33 bp, Homo sapien
caatctgtgaggattctattccacctctacatt

SEQ ID NO: 111821 - DNA, 33 bp, Homo sapien
ccctgattttgaatgacgcagtagacacagatt

SEQ ID NO: 111822 - DNA, 33 bp, Homo sapien
ccctgattttgaatgatgcagtagacacagatt

SEQ ID NO: 111823 - DNA, 33 bp, Homo sapien
gtaagtgattaacaaaactggaatttctttcta

SEQ ID NO: 111824 - DNA, 33 bp, Homo sapien
gtaagtgattaacaaatctggaatttctttcta

SEQ ID NO: 111825 - DNA, 33 bp, Homo sapien
ttagcttcatccattacaaactgaagaatctac

SEQ ID NO: 111826 - DNA, 33 bp, Homo sapien
ttagcttcatccattataaactgaagaatctac

SEQ ID NO: 111827 - DNA, 33 bp, Homo sapien
aggtgatttacaactacaaatgagtgaagctct

SEQ ID NO: 111828 - DNA, 33 bp, Homo sapien
aggtgatttacaactagaaatgagtgaagctct

SEQ ID NO: 111829 - DNA, 33 bp, Homo sapien
tagcatcctaagtacacaaatattgacatctga

SEQ ID NO: 111830 - DNA, 33 bp, Homo sapien
tagcatcctaagtacataaatattgacatctga

SEQ ID NO: 111831 - DNA, 33 bp, Homo sapien
tctagggtttggccgcaaatgttaaaagagcat

SEQ ID NO: 111832 - DNA, 33 bp, Homo sapien
tctagggtttggccgcgaatgttaaaagagcat

SEQ ID NO: 111833 - DNA, 33 bp, Homo sapien
tcattgtgttgattaaagagttaatgattgttt

SEQ ID NO: 111834 - DNA, 33 bp, Homo sapien
tcattgtgttgattaaggagttaatgattgttt

SEQ ID NO: 111835 - DNA, 33 bp, Homo sapien
ccacagctaactgcacagaggctaggaaaggtg

SEQ ID NO: 111836 - DNA, 33 bp, Homo sapien
ccacagctaactgcacggaggctaggaaaggtg

SEQ ID NO: 111837 - DNA, 33 bp, Homo sapien
ctgctgctaattaataacttggcaaattgagat

SEQ ID NO: 111838 - DNA, 33 bp, Homo sapien
ctgctgctaattaatagcttggcaaattgagat

SEQ ID NO: 111839 - DNA, 33 bp, Homo sapien
tccaaaaagctacatacgtgtttcacttttcat

SEQ ID NO: 111840 - DNA, 33 bp, Homo sapien
tccaaaaagctacatatgtgtttcacttttcat

SEQ ID NO: 111841 - DNA, 33 bp, Homo sapien
acaaagtaataagatacggtgaatgaaacacac

SEQ ID NO: 111842 - DNA, 33 bp, Homo sapien
acaaagtaataagatatggtgaatgaaacacac

SEQ ID NO: 111843 - DNA, 33 bp, Homo sapien
caggagcaagtcaacaagaccaattccttactt

SEQ ID NO: 111844 - DNA, 33 bp, Homo sapien
caggagcaagtcaacaggaccaattccttactt

SEQ ID NO: 111845 - DNA, 33 bp, Homo sapien
cttttagaaagttaggccacatcttgaaggctt

SEQ ID NO: 111846 - DNA, 33 bp, Homo sapien
cttttagaaagttaggtcacatcttgaaggctt

SEQ ID NO: 111847 - DNA, 33 bp, Homo sapien
catgctatgctttagcaaagtgacgggctgcat

SEQ ID NO: 111848 - DNA, 33 bp, Homo sapien
catgctatgctttagcgaagtgacgggctgcat

SEQ ID NO: 111849 - DNA, 33 bp, Homo sapien
tgacagtatagagaaaagaaatgccatagtaca

SEQ ID NO: 111850 - DNA, 33 bp, Homo sapien
tgacagtatagagaaaggaaatgccatagtaca

SEQ ID NO: 111851 - DNA, 33 bp, Homo sapien
ttcttatgttagtaaccgctgaatgcttctatc

SEQ ID NO: 111852 - DNA, 33 bp, Homo sapien
ttcttatgttagtaactgctgaatgcttctatc

SEQ ID NO: 111853 - DNA, 33 bp, Homo sapien
ggaattgatactcaaacagaacacgtaactttg

SEQ ID NO: 111854 - DNA, 33 bp, Homo sapien
ggaattgatactcaaagagaacacgtaactttg

SEQ ID NO: 111855 - DNA, 33 bp, Homo sapien
gaagcacaagtgttcacaggggagtcatgggct

SEQ ID NO: 111856 - DNA, 33 bp, Homo sapien
gaagcacaagtgttcataggggagtcatgggct

SEQ ID NO: 111857 - DNA, 33 bp, Homo sapien
ccaaccaacagacccgaaacatacactcttctc

SEQ ID NO: 111858 - DNA, 33 bp, Homo sapien
ccaaccaacagacccgcaacatacactcttctc

SEQ ID NO: 111859 - DNA, 33 bp, Homo sapien
gtttcttatgctcaaaatcttacaggctacatc

SEQ ID NO: 111860 - DNA, 33 bp, Homo sapien
gtttcttatgctcaaagtcttacaggctacatc

SEQ ID NO: 111861 - DNA, 33 bp, Homo sapien
ggcttttctaactacacgagtatgtcatatctc

SEQ ID NO: 111862 - DNA, 33 bp, Homo sapien
ggcttttctaactacatgagtatgtcatatctc

SEQ ID NO: 111863 - DNA, 33 bp, Homo sapien
acctaggaaaagacgccatataaagagccctgt

SEQ ID NO: 111864 - DNA, 33 bp, Homo sapien
acctaggaaaagacgctatataaagagccctgt

SEQ ID NO: 111865 - DNA, 33 bp, Homo sapien
acattacaaaactacaacttaatacaggtaact

SEQ ID NO: 111866 - DNA, 33 bp, Homo sapien
acattacaaaactacaccttaatacaggtaact

SEQ ID NO: 111867 - DNA, 33 bp, Homo sapien
aaccaagaaagccaccaaagtctgtgtgacaag

SEQ ID NO: 111868 - DNA, 33 bp, Homo sapien
aaccaagaaagccaccgaagtctgtgtgacaag

SEQ ID NO: 111869 - DNA, 33 bp, Homo sapien
tttattcacttctgaaataggttcaagaggttt

SEQ ID NO: 111870 - DNA, 33 bp, Homo sapien
tttattcacttctgaagtaggttcaagaggttt

SEQ ID NO: 111871 - DNA, 33 bp, Homo sapien
tttgtttcttccttggaatctaccaccaaaata

SEQ ID NO: 111872 - DNA, 33 bp, Homo sapien
tttgtttcttccttgggatctaccaccaaaata

SEQ ID NO: 111873 - DNA, 33 bp, Homo sapien
aagttagagaagaccacgctgaattgaaagagt

SEQ ID NO: 111874 - DNA, 33 bp, Homo sapien
aagttagagaagaccaggctgaattgaaagagt

SEQ ID NO: 111875 - DNA, 33 bp, Homo sapien
gtaaataagttgaagaaaagctggtttttaatg

SEQ ID NO: 111876 - DNA, 33 bp, Homo sapien
gtaaataagttgaagataagctggtttttaatg

SEQ ID NO: 111877 - DNA, 33 bp, Homo sapien
gaaatgtatcttgcataataactaccagggaaa

SEQ ID NO: 111878 - DNA, 33 bp, Homo sapien
gaaatgtatcttgcattataactaccagggaaa

SEQ ID NO: 111879 - DNA, 33 bp, Homo sapien
cctgacctcaggaaaacgcctaatacttttgat

SEQ ID NO: 111880 - DNA, 33 bp, Homo sapien
cctgacctcaggaaaatgcctaatacttttgat

SEQ ID NO: 111881 - DNA, 33 bp, Homo sapien
ctttataacgaggatcacctttactccattgtc

SEQ ID NO: 111882 - DNA, 33 bp, Homo sapien
ctttataacgaggatctcctttactccattgtc

SEQ ID NO: 111883 - DNA, 33 bp, Homo sapien
tttctgcactcaaatccctaactcagcttctgt

SEQ ID NO: 111884 - DNA, 33 bp, Homo sapien
tttctgcactcaaatctctaactcagcttctgt

SEQ ID NO: 111885 - DNA, 33 bp, Homo sapien
agaaatttgtactacaacctggcacttggttat

SEQ ID NO: 111886 - DNA, 33 bp, Homo sapien
agaaatttgtactacagcctggcacttggttat

SEQ ID NO: 111887 - DNA, 33 bp, Homo sapien
gccaaattgagaagaccgacaatatcaattatg

SEQ ID NO: 111888 - DNA, 33 bp, Homo sapien
gccaaattgagaagactgacaatatcaattatg

SEQ ID NO: 111889 - DNA, 33 bp, Homo sapien
aaaattgatctagtcaatgaaatcagaaaatga

SEQ ID NO: 111890 - DNA, 33 bp, Homo sapien
aaaattgatctagtcagtgaaatcagaaaatga

SEQ ID NO: 111891 - DNA, 33 bp, Homo sapien
aacaatgaccttcagccaagaatactatatcta

SEQ ID NO: 111892 - DNA, 33 bp, Homo sapien
aacaatgaccttcagcgaagaatactatatcta

SEQ ID NO: 111893 - DNA, 33 bp, Homo sapien
gatgaaaaagtaatcacaacctctcctcccatc

SEQ ID NO: 111894 - DNA, 33 bp, Homo sapien
gatgaaaaagtaatcagaacctctcctcccatc

SEQ ID NO: 111895 - DNA, 33 bp, Homo sapien
ccatcaataagaaaaactccaagaccagatgtg

SEQ ID NO: 111896 - DNA, 33 bp, Homo sapien
ccatcaataagaaaaattccaagaccagatgtg

SEQ ID NO: 111897 - DNA, 33 bp, Homo sapien
acaaaggccatttaaaaaaaccagaggtaacat

SEQ ID NO: 111898 - DNA, 33 bp, Homo sapien
acaaaggccatttaaagaaaccagaggtaacat

SEQ ID NO: 111899 - DNA, 33 bp, Homo sapien
gaactcatggaattcaatactagaaacacaaac

SEQ ID NO: 111900 - DNA, 33 bp, Homo sapien
gaactcatggaattcagtactagaaacacaaac

SEQ ID NO: 111901 - DNA, 33 bp, Homo sapien
agccaagatagagatacaacacaaatgttcatt

SEQ ID NO: 111902 - DNA, 33 bp, Homo sapien
agccaagatagagatataacacaaatgttcatt

SEQ ID NO: 111903 - DNA, 33 bp, Homo sapien
tttgctgcaccagtcaacctatgtagcaaacct

SEQ ID NO: 111904 - DNA, 33 bp, Homo sapien
tttgctgcaccagtcatcctatgtagcaaacct

SEQ ID NO: 111905 - DNA, 33 bp, Homo sapien
tatttaagaagaaagcaaacaatggtgcttaaa

SEQ ID NO: 111906 - DNA, 33 bp, Homo sapien
tatttaagaagaaagcgaacaatggtgcttaaa

SEQ ID NO: 111907 - DNA, 33 bp, Homo sapien
agtgtctcttatgccacaacgaggtttttaggg

SEQ ID NO: 111908 - DNA, 33 bp, Homo sapien
agtgtctcttatgccagaacgaggtttttaggg

SEQ ID NO: 111909 - DNA, 33 bp, Homo sapien
ctctggggctgaaaaaattgagatgcttcagag

SEQ ID NO: 111910 - DNA, 33 bp, Homo sapien
ctctggggctgaaaaatttgagatgcttcagag

SEQ ID NO: 111911 - DNA, 33 bp, Homo sapien
ttgtttattgaccgaacagctagggtactggga

SEQ ID NO: 111912 - DNA, 33 bp, Homo sapien
ttgtttattgaccgaatagctagggtactggga

SEQ ID NO: 111913 - DNA, 33 bp, Homo sapien
tctccttttgttattaacctgatgtggctctag

SEQ ID NO: 111914 - DNA, 33 bp, Homo sapien
tctccttttgttattatcctgatgtggctctag

SEQ ID NO: 111915 - DNA, 33 bp, Homo sapien
agaatcccagatagaaaagaacagaatagagat

SEQ ID NO: 111916 - DNA, 33 bp, Homo sapien
agaatcccagatagaacagaacagaatagagat

SEQ ID NO: 111917 - DNA, 33 bp, Homo sapien
tctgtatatcattgcaagaaaactaccatttac

SEQ ID NO: 111918 - DNA, 33 bp, Homo sapien
tctgtatatcattgcaggaaaactaccatttac

SEQ ID NO: 111919 - DNA, 33 bp, Homo sapien
taattatagaacaaaacctggcacattatattt

SEQ ID NO: 111920 - DNA, 33 bp, Homo sapien
taattatagaacaaaatctggcacattatattt

SEQ ID NO: 111921 - DNA, 33 bp, Homo sapien
cacgttgttcaactgaagattgctaatttttat

SEQ ID NO: 111922 - DNA, 33 bp, Homo sapien
cacgttgttcaactgaggattgctaatttttat

SEQ ID NO: 111923 - DNA, 33 bp, Homo sapien
tcaagatggttgaccaaagacattgtatgccag

SEQ ID NO: 111924 - DNA, 33 bp, Homo sapien
tcaagatggttgaccagagacattgtatgccag

SEQ ID NO: 111925 - DNA, 33 bp, Homo sapien
aaattgaagtcccatgaaaagggtaggtggggg

SEQ ID NO: 111926 - DNA, 33 bp, Homo sapien
aaattgaagtcccatggaaagggtaggtggggg

SEQ ID NO: 111927 - DNA, 33 bp, Homo sapien
tttaaacctctttcctcaccagggaatctcagt

SEQ ID NO: 111928 - DNA, 33 bp, Homo sapien
tttaaacctctttcctgaccagggaatctcagt

SEQ ID NO: 111929 - DNA, 33 bp, Homo sapien
ataatgagcagtgaaaatgaattggtaacataa

SEQ ID NO: 111930 - DNA, 33 bp, Homo sapien
ataatgagcagtgaaagtgaattggtaacataa

SEQ ID NO: 111931 - DNA, 33 bp, Homo sapien
gtactcatggcaggaacagtgtagattgtactc

SEQ ID NO: 111932 - DNA, 33 bp, Homo sapien
gtactcatggcaggaatagtgtagattgtactc

SEQ ID NO: 111933 - DNA, 33 bp, Homo sapien
aattcatcactgattacgtttcatttgtcaata

SEQ ID NO: 111934 - DNA, 33 bp, Homo sapien
aattcatcactgattatgtttcatttgtcaata

SEQ ID NO: 111935 - DNA, 33 bp, Homo sapien
caacagaagaacgccaagtcctggctgtgaata

SEQ ID NO: 111936 - DNA, 33 bp, Homo sapien
caacagaagaacgccacgtcctggctgtgaata

SEQ ID NO: 111937 - DNA, 33 bp, Homo sapien
tgtgataatatactacccagtctcatctgtcag

SEQ ID NO: 111938 - DNA, 33 bp, Homo sapien
tgtgataatatactacgcagtctcatctgtcag

SEQ ID NO: 111939 - DNA, 33 bp, Homo sapien
tcaacctggccttcaccgtccacatcactatca

SEQ ID NO: 111940 - DNA, 33 bp, Homo sapien
tcaacctggccttcactgtccacatcactatca

SEQ ID NO: 111941 - DNA, 33 bp, Homo sapien
cagaaatacattcaagaagttgcatggctgttt

SEQ ID NO: 111942 - DNA, 33 bp, Homo sapien
cagaaatacattcaaggagttgcatggctgttt

SEQ ID NO: 111943 - DNA, 33 bp, Homo sapien
actgtgcctggacaaacctaaagtttaatcacc

SEQ ID NO: 111944 - DNA, 33 bp, Homo sapien
actgtgcctggacaaatctaaagtttaatcacc

SEQ ID NO: 111945 - DNA, 33 bp, Homo sapien
tgaagagatgtgactactaattgcaactatgtc

SEQ ID NO: 111946 - DNA, 33 bp, Homo sapien
tgaagagatgtgactagtaattgcaactatgtc

SEQ ID NO: 111947 - DNA, 33 bp, Homo sapien
atctgccgaaaatcaacttatcatcaccggcat

SEQ ID NO: 111948 - DNA, 33 bp, Homo sapien
atctgccgaaaatcaatttatcatcaccggcat

SEQ ID NO: 111949 - DNA, 33 bp, Homo sapien
gcaatatgtaaatttacgtctgttaccaatggt

SEQ ID NO: 111950 - DNA, 33 bp, Homo sapien
gcaatatgtaaatttatgtctgttaccaatggt

SEQ ID NO: 111951 - DNA, 33 bp, Homo sapien
acttgtatttcttttcactaatacacacacaca

SEQ ID NO: 111952 - DNA, 33 bp, Homo sapien
acttgtatttcttttcgctaatacacacacaca

SEQ ID NO: 111953 - DNA, 33 bp, Homo sapien
aacaaacagtgctgaacattatttacaaaactt

SEQ ID NO: 111954 - DNA, 33 bp, Homo sapien
aacaaacagtgctgaatattatttacaaaactt

SEQ ID NO: 111955 - DNA, 33 bp, Homo sapien
tatctgaaattgagtcaccttatataagtgcta

SEQ ID NO: 111956 - DNA, 33 bp, Homo sapien
tatctgaaattgagtcgccttatataagtgcta

SEQ ID NO: 111957 - DNA, 33 bp, Homo sapien
cacacaattgccctgagaattttagcaaatcgt

SEQ ID NO: 111958 - DNA, 33 bp, Homo sapien
cacacaattgccctgataattttagcaaatcgt

SEQ ID NO: 111959 - DNA, 33 bp, Homo sapien
atatattttggattaactgataaacaccaaggc

SEQ ID NO: 111960 - DNA, 33 bp, Homo sapien
atatattttggattaattgataaacaccaaggc

SEQ ID NO: 111961 - DNA, 33 bp, Homo sapien
aaggccacaccagcaaaagtattcacaacttga

SEQ ID NO: 111962 - DNA, 33 bp, Homo sapien
aaggccacaccagcaagagtattcacaacttga

SEQ ID NO: 111963 - DNA, 33 bp, Homo sapien
tatttatagttgattacggtaaacttagtgtta

SEQ ID NO: 111964 - DNA, 33 bp, Homo sapien
tatttatagttgattatggtaaacttagtgtta

SEQ ID NO: 111965 - DNA, 33 bp, Homo sapien
caaattgagaaaggaaaaccttaatctacagtg

SEQ ID NO: 111966 - DNA, 33 bp, Homo sapien
caaattgagaaaggaagaccttaatctacagtg

SEQ ID NO: 111967 - DNA, 33 bp, Homo sapien
agatttaaacacatcaaggtaattgcttcaggt

SEQ ID NO: 111968 - DNA, 33 bp, Homo sapien
agatttaaacacatcagggtaattgcttcaggt

SEQ ID NO: 111969 - DNA, 33 bp, Homo sapien
accatctgtggagtaaataataatgtatgatta

SEQ ID NO: 111970 - DNA, 33 bp, Homo sapien
accatctgtggagtaagtaataatgtatgatta

SEQ ID NO: 111971 - DNA, 33 bp, Homo sapien
aggaagcagagcaaaactgacctttaagcaaac

SEQ ID NO: 111972 - DNA, 33 bp, Homo sapien
aggaagcagagcaaaattgacctttaagcaaac

SEQ ID NO: 111973 - DNA, 33 bp, Homo sapien
agagccagcagacagcaaagggtccctggtgaa

SEQ ID NO: 111974 - DNA, 33 bp, Homo sapien
agagccagcagacagccaagggtccctggtgaa

SEQ ID NO: 111975 - DNA, 33 bp, Homo sapien
tgaatgctgaaaaaacaaattcctggtcccaga

SEQ ID NO: 111976 - DNA, 33 bp, Homo sapien
tgaatgctgaaaaaacgaattcctggtcccaga

SEQ ID NO: 111977 - DNA, 33 bp, Homo sapien
tctgtaattctactaactgtgaaatgaggaagg

SEQ ID NO: 111978 - DNA, 33 bp, Homo sapien
tctgtaattctactaattgtgaaatgaggaagg

SEQ ID NO: 111979 - DNA, 33 bp, Homo sapien
cctgaaatgttcattacaaaagtcagggtttat

SEQ ID NO: 111980 - DNA, 33 bp, Homo sapien
cctgaaatgttcattataaaagtcagggtttat

SEQ ID NO: 111981 - DNA, 33 bp, Homo sapien
attagcctggcatttacgaagcaatcaaaatag

SEQ ID NO: 111982 - DNA, 33 bp, Homo sapien
attagcctggcatttatgaagcaatcaaaatag

SEQ ID NO: 111983 - DNA, 33 bp, Homo sapien
gttactagtggtggtacggcagaatccacacat

SEQ ID NO: 111984 - DNA, 33 bp, Homo sapien
gttactagtggtggtatggcagaatccacacat

SEQ ID NO: 111985 - DNA, 33 bp, Homo sapien
ttataatctagaaccaatgaagggagacagggg

SEQ ID NO: 111986 - DNA, 33 bp, Homo sapien
ttataatctagaaccagtgaagggagacagggg

SEQ ID NO: 111987 - DNA, 33 bp, Homo sapien
ttttgtatagtctccacgccataggaagcagct

SEQ ID NO: 111988 - DNA, 33 bp, Homo sapien
ttttgtatagtctccaggccataggaagcagct

SEQ ID NO: 111989 - DNA, 33 bp, Homo sapien
ttcagataaagacgacaggactcatttatagtg

SEQ ID NO: 111990 - DNA, 33 bp, Homo sapien
ttcagataaagacgacgggactcatttatagtg

SEQ ID NO: 111991 - DNA, 33 bp, Homo sapien
attttccaaattattaaaagatgttacaagaga

SEQ ID NO: 111992 - DNA, 33 bp, Homo sapien
attttccaaattattacaagatgttacaagaga

SEQ ID NO: 111993 - DNA, 33 bp, Homo sapien
gaatccctggattacacgatagatgtatgttta

SEQ ID NO: 111994 - DNA, 33 bp, Homo sapien
gaatccctggattacatgatagatgtatgttta

SEQ ID NO: 111995 - DNA, 33 bp, Homo sapien
ggattttggcaaatgcacaaagtcatatattta

SEQ ID NO: 111996 - DNA, 33 bp, Homo sapien
ggattttggcaaatgcgcaaagtcatatattta

SEQ ID NO: 111997 - DNA, 33 bp, Homo sapien
tattgcagggctaaaaccaaaaagatctttaca

SEQ ID NO: 111998 - DNA, 33 bp, Homo sapien
tattgcagggctaaaagcaaaaagatctttaca

SEQ ID NO: 111999 - DNA, 33 bp, Homo sapien
agacaaagccagagcaagtatcttcatatggct

SEQ ID NO: 112000 - DNA, 33 bp, Homo sapien
agacaaagccagagcaggtatcttcatatggct

SEQ ID NO: 112001 - DNA, 33 bp, Homo sapien
attttatggttagaccaaataatagccttcaac

SEQ ID NO: 112002 - DNA, 33 bp, Homo sapien
attttatggttagaccgaataatagccttcaac

SEQ ID NO: 112003 - DNA, 33 bp, Homo sapien
ttcagtatgaatgagtaaagcaataatgacata

SEQ ID NO: 112004 - DNA, 33 bp, Homo sapien
ttcagtatgaatgagtcaagcaataatgacata

SEQ ID NO: 112005 - DNA, 33 bp, Homo sapien
gtgtttatacgcatagaaaaaagtggagtgaat

SEQ ID NO: 112006 - DNA, 33 bp, Homo sapien
gtgtttatacgcataggaaaaagtggagtgaat

SEQ ID NO: 112007 - DNA, 33 bp, Homo sapien
tgtggaaatatgctcacgaaactattgaaagca

SEQ ID NO: 112008 - DNA, 33 bp, Homo sapien
tgtggaaatatgctcatgaaactattgaaagca

SEQ ID NO: 112009 - DNA, 33 bp, Homo sapien
gaagaaatgacaaaaaagatcatcccaatacac

SEQ ID NO: 112010 - DNA, 33 bp, Homo sapien
gaagaaatgacaaaaacgatcatcccaatacac

SEQ ID NO: 112011 - DNA, 33 bp, Homo sapien
ctatttgcaggtcggaatactgagtttgaaaga

SEQ ID NO: 112012 - DNA, 33 bp, Homo sapien
ctatttgcaggtcggagtactgagtttgaaaga

SEQ ID NO: 112013 - DNA, 33 bp, Homo sapien
tcaactgattgcaaggaagtagagtgaagaaag

SEQ ID NO: 112014 - DNA, 33 bp, Homo sapien
tcaactgattgcaagggagtagagtgaagaaag

SEQ ID NO: 112015 - DNA, 33 bp, Homo sapien
tgaaacacagagtttacagtgtttttgaatacg

SEQ ID NO: 112016 - DNA, 33 bp, Homo sapien
tgaaacacagagtttatagtgtttttgaatacg

SEQ ID NO: 112017 - DNA, 33 bp, Homo sapien
tttcatgagggatctaagaaaacagacagaaat

SEQ ID NO: 112018 - DNA, 33 bp, Homo sapien
tttcatgagggatctaggaaaacagacagaaat

SEQ ID NO: 112019 - DNA, 33 bp, Homo sapien
tatggcatgtagggtaataacatttcatgaggg

SEQ ID NO: 112020 - DNA, 33 bp, Homo sapien
tatggcatgtagggtagtaacatttcatgaggg

SEQ ID NO: 112021 - DNA, 33 bp, Homo sapien
catgccatactatttcccagagttttggtagtc

SEQ ID NO: 112022 - DNA, 33 bp, Homo sapien
catgccatactatttctcagagttttggtagtc

SEQ ID NO: 112023 - DNA, 33 bp, Homo sapien
tctgtgaagtacatcaaagagggcaattctttg

SEQ ID NO: 112024 - DNA, 33 bp, Homo sapien
tctgtgaagtacatcagagagggcaattctttg

SEQ ID NO: 112025 - DNA, 33 bp, Homo sapien
aattctttggtgctgacagtaagtgaacgaaat

SEQ ID NO: 112026 - DNA, 33 bp, Homo sapien
aattctttggtgctgatagtaagtgaacgaaat

SEQ ID NO: 112027 - DNA, 33 bp, Homo sapien
tttctctagtttttcaatctgctttcttgtgtc

SEQ ID NO: 112028 - DNA, 33 bp, Homo sapien
tttctctagtttttcagtctgctttcttgtgtc

SEQ ID NO: 112029 - DNA, 33 bp, Homo sapien
aggtttggcctctgtacgtgtgttgaggtgggc

SEQ ID NO: 112030 - DNA, 33 bp, Homo sapien
aggtttggcctctgtatgtgtgttgaggtgggc

SEQ ID NO: 112031 - DNA, 33 bp, Homo sapien
ttattttagtgtgacacatccttttttcttgta

SEQ ID NO: 112032 - DNA, 33 bp, Homo sapien
ttattttagtgtgacatatccttttttcttgta

SEQ ID NO: 112033 - DNA, 33 bp, Homo sapien
cattgaagaagcagaaatcactctctgttttca

SEQ ID NO: 112034 - DNA, 33 bp, Homo sapien
cattgaagaagcagaattcactctctgttttca

SEQ ID NO: 112035 - DNA, 33 bp, Homo sapien
tccacatcgattacccaccactccagtttatct

SEQ ID NO: 112036 - DNA, 33 bp, Homo sapien
tccacatcgattaccctccactccagtttatct

SEQ ID NO: 112037 - DNA, 33 bp, Homo sapien
gctctgtaatcaggtcccatcctactgatgtga

SEQ ID NO: 112038 - DNA, 33 bp, Homo sapien
gctctgtaatcaggtcgcatcctactgatgtga

SEQ ID NO: 112039 - DNA, 33 bp, Homo sapien
gtaactctcaaagacacacaaattacttttaca

SEQ ID NO: 112040 - DNA, 33 bp, Homo sapien
gtaactctcaaagacatacaaattacttttaca

SEQ ID NO: 112041 - DNA, 33 bp, Homo sapien
ggcatcttgctaagcactctatatacactatca

SEQ ID NO: 112042 - DNA, 33 bp, Homo sapien
ggcatcttgctaagcattctatatacactatca

SEQ ID NO: 112043 - DNA, 33 bp, Homo sapien
caaccactccctctgaagcaaatacaatgatag

SEQ ID NO: 112044 - DNA, 33 bp, Homo sapien
caaccactccctctgaggcaaatacaatgatag

SEQ ID NO: 112045 - DNA, 33 bp, Homo sapien
cctacagtgtcagatcaaatgtgtcatgccttc

SEQ ID NO: 112046 - DNA, 33 bp, Homo sapien
cctacagtgtcagatccaatgtgtcatgccttc

SEQ ID NO: 112047 - DNA, 33 bp, Homo sapien
ttattctaaggcctgtaaagccatactcgcatt

SEQ ID NO: 112048 - DNA, 33 bp, Homo sapien
ttattctaaggcctgtgaagccatactcgcatt

SEQ ID NO: 112049 - DNA, 33 bp, Homo sapien
accatcaattcatgaaacatttctactaccact

SEQ ID NO: 112050 - DNA, 33 bp, Homo sapien
accatcaattcatgaaccatttctactaccact

SEQ ID NO: 112051 - DNA, 33 bp, Homo sapien
ctgaataatgagttaaccagtagtgtgaacttt

SEQ ID NO: 112052 - DNA, 33 bp, Homo sapien
ctgaataatgagttaatcagtagtgtgaacttt

SEQ ID NO: 112053 - DNA, 33 bp, Homo sapien
gtagcttggtgagcagaaacgcgtgttacagct

SEQ ID NO: 112054 - DNA, 33 bp, Homo sapien
gtagcttggtgagcaggaacgcgtgttacagct

SEQ ID NO: 112055 - DNA, 33 bp, Homo sapien
cgcaatttctgtcctacgtgaaattatatcaga

SEQ ID NO: 112056 - DNA, 33 bp, Homo sapien
cgcaatttctgtcctatgtgaaattatatcaga

SEQ ID NO: 112057 - DNA, 33 bp, Homo sapien
ttaaactactgacaaagagatgaaatgtactta

SEQ ID NO: 112058 - DNA, 33 bp, Homo sapien
ttaaactactgacaaatagatgaaatgtactta

SEQ ID NO: 112059 - DNA, 33 bp, Homo sapien
ttacattttcaagtacgatcaataacaacattt

SEQ ID NO: 112060 - DNA, 33 bp, Homo sapien
ttacattttcaagtactatcaataacaacattt

SEQ ID NO: 112061 - DNA, 33 bp, Homo sapien
atgacacgttacatcacgaaagtatagaatgac

SEQ ID NO: 112062 - DNA, 33 bp, Homo sapien
atgacacgttacatcatgaaagtatagaatgac

SEQ ID NO: 112063 - DNA, 33 bp, Homo sapien
ccacctagaataatgacgttctggtgttaaaag

SEQ ID NO: 112064 - DNA, 33 bp, Homo sapien
ccacctagaataatgatgttctggtgttaaaag

SEQ ID NO: 112065 - DNA, 33 bp, Homo sapien
aacattcactatcaacaacaaacatctctttag

SEQ ID NO: 112066 - DNA, 33 bp, Homo sapien
aacattcactatcaacgacaaacatctctttag

SEQ ID NO: 112067 - DNA, 33 bp, Homo sapien
agagggaaagaagaaacgaagtctgaaaggaag

SEQ ID NO: 112068 - DNA, 33 bp, Homo sapien
agagggaaagaagaaatgaagtctgaaaggaag

SEQ ID NO: 112069 - DNA, 33 bp, Homo sapien
taagtgatgacaagcactaaagagatcgtttgg

SEQ ID NO: 112070 - DNA, 33 bp, Homo sapien
taagtgatgacaagcagtaaagagatcgtttgg

SEQ ID NO: 112071 - DNA, 33 bp, Homo sapien
ctgaggtattttaacaacaaattactctgttct

SEQ ID NO: 112072 - DNA, 33 bp, Homo sapien
ctgaggtattttaacaccaaattactctgttct

SEQ ID NO: 112073 - DNA, 33 bp, Homo sapien
acagcttccttatcaacgtttcagagaccaaga

SEQ ID NO: 112074 - DNA, 33 bp, Homo sapien
acagcttccttatcaaggtttcagagaccaaga

SEQ ID NO: 112075 - DNA, 33 bp, Homo sapien
aatagtagttgcattaacacttaaatagaatat

SEQ ID NO: 112076 - DNA, 33 bp, Homo sapien
aatagtagttgcattagcacttaaatagaatat

SEQ ID NO: 112077 - DNA, 33 bp, Homo sapien
ggttcaattcctaaaaaaatgctgagagagata

SEQ ID NO: 112078 - DNA, 33 bp, Homo sapien
ggttcaattcctaaaacaatgctgagagagata

SEQ ID NO: 112079 - DNA, 33 bp, Homo sapien
caccagatacctaatgcactgcatcttcatctt

SEQ ID NO: 112080 - DNA, 33 bp, Homo sapien
caccagatacctaatgtactgcatcttcatctt

SEQ ID NO: 112081 - DNA, 33 bp, Homo sapien
gagacgactagtgtcacgttaaaaagtcctaga

SEQ ID NO: 112082 - DNA, 33 bp, Homo sapien
gagacgactagtgtcatgttaaaaagtcctaga

SEQ ID NO: 112083 - DNA, 33 bp, Homo sapien
ttcattatgcttcactaaggctcaatccaataa

SEQ ID NO: 112084 - DNA, 33 bp, Homo sapien
ttcattatgcttcactgaggctcaatccaataa

SEQ ID NO: 112085 - DNA, 33 bp, Homo sapien
gttggtatccatgggaaattgtttcaaggtatc

SEQ ID NO: 112086 - DNA, 33 bp, Homo sapien
gttggtatccatgggagattgtttcaaggtatc

SEQ ID NO: 112087 - DNA, 33 bp, Homo sapien
ttaaatactaagatcccaagagttaatttgtag

SEQ ID NO: 112088 - DNA, 33 bp, Homo sapien
ttaaatactaagatccgaagagttaatttgtag

SEQ ID NO: 112089 - DNA, 33 bp, Homo sapien
gcaatatgagatgatacgcctttgtaacctaat

SEQ ID NO: 112090 - DNA, 33 bp, Homo sapien
gcaatatgagatgatatgcctttgtaacctaat

SEQ ID NO: 112091 - DNA, 33 bp, Homo sapien
gtgtcagtttgctttgaatagtggcctccagct

SEQ ID NO: 112092 - DNA, 33 bp, Homo sapien
gtgtcagtttgctttggatagtggcctccagct

SEQ ID NO: 112093 - DNA, 33 bp, Homo sapien
agacctggctttgacccagaattcatcacttaa

SEQ ID NO: 112094 - DNA, 33 bp, Homo sapien
agacctggctttgacctagaattcatcacttaa

SEQ ID NO: 112095 - DNA, 33 bp, Homo sapien
ttctgagttgatataaaaagttagtaattctct

SEQ ID NO: 112096 - DNA, 33 bp, Homo sapien
ttctgagttgatataagaagttagtaattctct

SEQ ID NO: 112097 - DNA, 33 bp, Homo sapien
taatttcaaaatcctcactcactgtcaagttag

SEQ ID NO: 112098 - DNA, 33 bp, Homo sapien
taatttcaaaatcctctctcactgtcaagttag

SEQ ID NO: 112099 - DNA, 33 bp, Homo sapien
ggaagatgctatatggaaattgtagagattcgg

SEQ ID NO: 112100 - DNA, 33 bp, Homo sapien
ggaagatgctatatgggaattgtagagattcgg

SEQ ID NO: 112101 - DNA, 33 bp, Homo sapien
ttgctgtaaatctttcacttaagtcaaacaacc

SEQ ID NO: 112102 - DNA, 33 bp, Homo sapien
ttgctgtaaatctttcccttaagtcaaacaacc

SEQ ID NO: 112103 - DNA, 33 bp, Homo sapien
cacatattgaagagggcagatttcaaatatgaa

SEQ ID NO: 112104 - DNA, 33 bp, Homo sapien
cacatattgaagaggggagatttcaaatatgaa

SEQ ID NO: 112105 - DNA, 33 bp, Homo sapien
taagtcaccttcttaccgccactaatgtagaga

SEQ ID NO: 112106 - DNA, 33 bp, Homo sapien
taagtcaccttcttactgccactaatgtagaga

SEQ ID NO: 112107 - DNA, 33 bp, Homo sapien
acttcttcacagccctgaacttcagattatatt

SEQ ID NO: 112108 - DNA, 33 bp, Homo sapien
acttcttcacagcccttaacttcagattatatt

SEQ ID NO: 112109 - DNA, 33 bp, Homo sapien
attattactactcccaagcaaagaaggaggccc

SEQ ID NO: 112110 - DNA, 33 bp, Homo sapien
attattactactcccaggcaaagaaggaggccc

SEQ ID NO: 112111 - DNA, 33 bp, Homo sapien
agatggcttgtctttgcatcctcttaccaagct

SEQ ID NO: 112112 - DNA, 33 bp, Homo sapien
agatggcttgtctttgtatcctcttaccaagct

SEQ ID NO: 112113 - DNA, 33 bp, Homo sapien
ccaatgctggatgtgaacaaaatgagggatttc

SEQ ID NO: 112114 - DNA, 33 bp, Homo sapien
ccaatgctggatgtgatcaaaatgagggatttc

SEQ ID NO: 112115 - DNA, 33 bp, Homo sapien
aggtgtaatctagtacacatgcagagattagct

SEQ ID NO: 112116 - DNA, 33 bp, Homo sapien
aggtgtaatctagtacgcatgcagagattagct

SEQ ID NO: 112117 - DNA, 33 bp, Homo sapien
gtaaagagaggaaataagactgtgaaggaaaga

SEQ ID NO: 112118 - DNA, 33 bp, Homo sapien
gtaaagagaggaaatatgactgtgaaggaaaga

SEQ ID NO: 112119 - DNA, 33 bp, Homo sapien
ctggtttagaatattacagggagagagggtggt

SEQ ID NO: 112120 - DNA, 33 bp, Homo sapien
ctggtttagaatattagagggagagagggtggt

SEQ ID NO: 112121 - DNA, 33 bp, Homo sapien
tcatattggatgaaagccttagtaatagtatct

SEQ ID NO: 112122 - DNA, 33 bp, Homo sapien
tcatattggatgaaaggcttagtaatagtatct

SEQ ID NO: 112123 - DNA, 33 bp, Homo sapien
taatattcacagcccaaactctacaggtggatt

SEQ ID NO: 112124 - DNA, 33 bp, Homo sapien
taatattcacagcccagactctacaggtggatt

SEQ ID NO: 112125 - DNA, 33 bp, Homo sapien
tggattgctggcctcactagttcatttaagaac

SEQ ID NO: 112126 - DNA, 33 bp, Homo sapien
tggattgctggcctcattagttcatttaagaac

SEQ ID NO: 112127 - DNA, 33 bp, Homo sapien
tgtgcttgtggaaggcccacttttctaacatcc

SEQ ID NO: 112128 - DNA, 33 bp, Homo sapien
tgtgcttgtggaaggctcacttttctaacatcc

SEQ ID NO: 112129 - DNA, 33 bp, Homo sapien
ttattcttgctcaataggtcttaatcaatttat

SEQ ID NO: 112130 - DNA, 33 bp, Homo sapien
ttattcttgctcaatatgtcttaatcaatttat

SEQ ID NO: 112131 - DNA, 33 bp, Homo sapien
gacaaaaatatctgctaacacttatgaacacat

SEQ ID NO: 112132 - DNA, 33 bp, Homo sapien
gacaaaaatatctgctgacacttatgaacacat

SEQ ID NO: 112133 - DNA, 33 bp, Homo sapien
aggtcagcaagttgtaactaagatataaacaat

SEQ ID NO: 112134 - DNA, 33 bp, Homo sapien
aggtcagcaagttgtagctaagatataaacaat

SEQ ID NO: 112135 - DNA, 33 bp, Homo sapien
ctggtacaaacaatggaaaaaacggttgaaagg

SEQ ID NO: 112136 - DNA, 33 bp, Homo sapien
ctggtacaaacaatgggaaaaacggttgaaagg

SEQ ID NO: 112137 - DNA, 33 bp, Homo sapien
gtaggctcccattctaaatgtgatgttactaag

SEQ ID NO: 112138 - DNA, 33 bp, Homo sapien
gtaggctcccattctagatgtgatgttactaag

SEQ ID NO: 112139 - DNA, 33 bp, Homo sapien
ctctatcactgtgtagaaaatgttgaaaatttt

SEQ ID NO: 112140 - DNA, 33 bp, Homo sapien
ctctatcactgtgtaggaaatgttgaaaatttt

SEQ ID NO: 112141 - DNA, 33 bp, Homo sapien
aaggacctagactaataaaaccattttcaaata

SEQ ID NO: 112142 - DNA, 33 bp, Homo sapien
aaggacctagactaatcaaaccattttcaaata

SEQ ID NO: 112143 - DNA, 33 bp, Homo sapien
aaagatggtttgtctacgtaatggaatattact

SEQ ID NO: 112144 - DNA, 33 bp, Homo sapien
aaagatggtttgtctatgtaatggaatattact

SEQ ID NO: 112145 - DNA, 33 bp, Homo sapien
aacatatggtactggaaaaactaacttttcata

SEQ ID NO: 112146 - DNA, 33 bp, Homo sapien
aacatatggtactggagaaactaacttttcata

SEQ ID NO: 112147 - DNA, 33 bp, Homo sapien
agttttctactgtaaacatttcttgtcaatacc

SEQ ID NO: 112148 - DNA, 33 bp, Homo sapien
agttttctactgtaaatatttcttgtcaatacc

SEQ ID NO: 112149 - DNA, 33 bp, Homo sapien
agaagtacaatcataacataatttctgctagta

SEQ ID NO: 112150 - DNA, 33 bp, Homo sapien
agaagtacaatcataagataatttctgctagta

SEQ ID NO: 112151 - DNA, 33 bp, Homo sapien
actaaaaacttctaaccagcaagcaataggata

SEQ ID NO: 112152 - DNA, 33 bp, Homo sapien
actaaaaacttctaactagcaagcaataggata

SEQ ID NO: 112153 - DNA, 33 bp, Homo sapien
aacaatggtttgcaaaagatccaggctaaacct

SEQ ID NO: 112154 - DNA, 33 bp, Homo sapien
aacaatggtttgcaaatgatccaggctaaacct

SEQ ID NO: 112155 - DNA, 33 bp, Homo sapien
ggtgatggtagagaagacatgggtagtgactgc

SEQ ID NO: 112156 - DNA, 33 bp, Homo sapien
ggtgatggtagagaaggcatgggtagtgactgc

SEQ ID NO: 112157 - DNA, 33 bp, Homo sapien
gaaatatgttaatagacggtatcactgttgtgc

SEQ ID NO: 112158 - DNA, 33 bp, Homo sapien
gaaatatgttaatagatggtatcactgttgtgc

SEQ ID NO: 112159 - DNA, 33 bp, Homo sapien
tggacaagttctgttaaattccttgtaaaatat

SEQ ID NO: 112160 - DNA, 33 bp, Homo sapien
tggacaagttctgttacattccttgtaaaatat

SEQ ID NO: 112161 - DNA, 33 bp, Homo sapien
gcattgttaactccaaagctgttttcattgtcc

SEQ ID NO: 112162 - DNA, 33 bp, Homo sapien
gcattgttaactccaacgctgttttcattgtcc

SEQ ID NO: 112163 - DNA, 33 bp, Homo sapien
tgtgatgacatctgacactgttatcgactctga

SEQ ID NO: 112164 - DNA, 33 bp, Homo sapien
tgtgatgacatctgacgctgttatcgactctga

SEQ ID NO: 112165 - DNA, 33 bp, Homo sapien
tttacaatttgttccagtgattgtgtgagtttc

SEQ ID NO: 112166 - DNA, 33 bp, Homo sapien
tttacaatttgttccattgattgtgtgagtttc

SEQ ID NO: 112167 - DNA, 33 bp, Homo sapien
taattcatctgatacaaataacaacaagccagt

SEQ ID NO: 112168 - DNA, 33 bp, Homo sapien
taattcatctgatacacataacaacaagccagt

SEQ ID NO: 112169 - DNA, 33 bp, Homo sapien
ggagagcagcattttacaccaggagaaaaacac

SEQ ID NO: 112170 - DNA, 33 bp, Homo sapien
ggagagcagcattttataccaggagaaaaacac

SEQ ID NO: 112171 - DNA, 33 bp, Homo sapien
tcatctcatttacctgaactaagaaatttgagc

SEQ ID NO: 112172 - DNA, 33 bp, Homo sapien
tcatctcatttacctggactaagaaatttgagc

SEQ ID NO: 112173 - DNA, 33 bp, Homo sapien
aaactgatttggaaaacagaaaacttattagac

SEQ ID NO: 112174 - DNA, 33 bp, Homo sapien
aaactgatttggaaaagagaaaacttattagac

SEQ ID NO: 112175 - DNA, 33 bp, Homo sapien
aaatattaaggagttaagacaaaagcatttgcc

SEQ ID NO: 112176 - DNA, 33 bp, Homo sapien
aaatattaaggagttaggacaaaagcatttgcc

SEQ ID NO: 112177 - DNA, 33 bp, Homo sapien
tgcaggaataattcatgaaccacttacacttat

SEQ ID NO: 112178 - DNA, 33 bp, Homo sapien
tgcaggaataattcattaaccacttacacttat

SEQ ID NO: 112179 - DNA, 33 bp, Homo sapien
tgatgttggcattcaaaaagtgtcagagtttgg

SEQ ID NO: 112180 - DNA, 33 bp, Homo sapien
tgatgttggcattcaacaagtgtcagagtttgg

SEQ ID NO: 112181 - DNA, 33 bp, Homo sapien
catggccactgctacagtcttctttatggaagt

SEQ ID NO: 112182 - DNA, 33 bp, Homo sapien
catggccactgctacattcttctttatggaagt

SEQ ID NO: 112183 - DNA, 33 bp, Homo sapien
taatttattctgtgggaccaaacaagacagata

SEQ ID NO: 112184 - DNA, 33 bp, Homo sapien
taatttattctgtggggccaaacaagacagata

SEQ ID NO: 112185 - DNA, 33 bp, Homo sapien
ctggcaggtcttcaagaacagtatcatacatgg

SEQ ID NO: 112186 - DNA, 33 bp, Homo sapien
ctggcaggtcttcaaggacagtatcatacatgg

SEQ ID NO: 112187 - DNA, 33 bp, Homo sapien
cttgttatgaatgggacaaactaatgttcattc

SEQ ID NO: 112188 - DNA, 33 bp, Homo sapien
cttgttatgaatgggataaactaatgttcattc

SEQ ID NO: 112189 - DNA, 33 bp, Homo sapien
tttgtctgagtatgtacctggcagtgggattac

SEQ ID NO: 112190 - DNA, 33 bp, Homo sapien
tttgtctgagtatgtagctggcagtgggattac

SEQ ID NO: 112191 - DNA, 33 bp, Homo sapien
ttggattagagagagaaattccagtgcactaat

SEQ ID NO: 112192 - DNA, 33 bp, Homo sapien
ttggattagagagagatattccagtgcactaat

SEQ ID NO: 112193 - DNA, 33 bp, Homo sapien
gctaaatgaatgactaaaatgactcgtgattca

SEQ ID NO: 112194 - DNA, 33 bp, Homo sapien
gctaaatgaatgactataatgactcgtgattca

SEQ ID NO: 112195 - DNA, 33 bp, Homo sapien
agtagtatagccactacggctcagttttgacta

SEQ ID NO: 112196 - DNA, 33 bp, Homo sapien
agtagtatagccactatggctcagttttgacta

SEQ ID NO: 112197 - DNA, 33 bp, Homo sapien
tgggagtttctctcaaactgtgaccactgcctg

SEQ ID NO: 112198 - DNA, 33 bp, Homo sapien
tgggagtttctctcaacctgtgaccactgcctg

SEQ ID NO: 112199 - DNA, 33 bp, Homo sapien
aaccttttagactatcacatgcttctggaacca

SEQ ID NO: 112200 - DNA, 33 bp, Homo sapien
aaccttttagactatcgcatgcttctggaacca

SEQ ID NO: 112201 - DNA, 33 bp, Homo sapien
catgactttgtgcacacatttgagtaccccttt

SEQ ID NO: 112202 - DNA, 33 bp, Homo sapien
catgactttgtgcacatatttgagtaccccttt

SEQ ID NO: 112203 - DNA, 33 bp, Homo sapien
acaaagcagttaactacggatttcgcctttata

SEQ ID NO: 112204 - DNA, 33 bp, Homo sapien
acaaagcagttaactagggatttcgcctttata

SEQ ID NO: 112205 - DNA, 33 bp, Homo sapien
tactgcaatctcaataccttcaatgacagaaaa

SEQ ID NO: 112206 - DNA, 33 bp, Homo sapien
tactgcaatctcaatatcttcaatgacagaaaa

SEQ ID NO: 112207 - DNA, 33 bp, Homo sapien
ttactatattttcaacgcatgataagtttattg

SEQ ID NO: 112208 - DNA, 33 bp, Homo sapien
ttactatattttcaactcatgataagtttattg

SEQ ID NO: 112209 - DNA, 33 bp, Homo sapien
atttctatacttatacacttgaaaagagctgac

SEQ ID NO: 112210 - DNA, 33 bp, Homo sapien
atttctatacttatacccttgaaaagagctgac

SEQ ID NO: 112211 - DNA, 33 bp, Homo sapien
ggtccatgctaactaacgaaaattggatataca

SEQ ID NO: 112212 - DNA, 33 bp, Homo sapien
ggtccatgctaactaatgaaaattggatataca

SEQ ID NO: 112213 - DNA, 33 bp, Homo sapien
agtggcaagcttccaactgactaaaaagtttat

SEQ ID NO: 112214 - DNA, 33 bp, Homo sapien
agtggcaagcttccaattgactaaaaagtttat

SEQ ID NO: 112215 - DNA, 33 bp, Homo sapien
ccacattattgcaagccactacccatccaatgg

SEQ ID NO: 112216 - DNA, 33 bp, Homo sapien
ccacattattgcaagctactacccatccaatgg

SEQ ID NO: 112217 - DNA, 33 bp, Homo sapien
tccaaaaaaattccaaaggatcaaaatctccaa

SEQ ID NO: 112218 - DNA, 33 bp, Homo sapien
tccaaaaaaattccaagggatcaaaatctccaa

SEQ ID NO: 112219 - DNA, 33 bp, Homo sapien
ggaattcacagcaatagaatctgaacactaggt

SEQ ID NO: 112220 - DNA, 33 bp, Homo sapien
ggaattcacagcaatataatctgaacactaggt

SEQ ID NO: 112221 - DNA, 33 bp, Homo sapien
caatttaagatgactaaaggaaaaaaaaaccaa

SEQ ID NO: 112222 - DNA, 33 bp, Homo sapien
caatttaagatgactagaggaaaaaaaaaccaa

SEQ ID NO: 112223 - DNA, 33 bp, Homo sapien
gaaggacatcagcataggttagtttacaccttt

SEQ ID NO: 112224 - DNA, 33 bp, Homo sapien
gaaggacatcagcatatgttagtttacaccttt

SEQ ID NO: 112225 - DNA, 33 bp, Homo sapien
ttattgaaaatacaaacttagctttttacctca

SEQ ID NO: 112226 - DNA, 33 bp, Homo sapien
ttattgaaaatacaaagttagctttttacctca

SEQ ID NO: 112227 - DNA, 33 bp, Homo sapien
cgcaatttgctataagcctggtacttttctaag

SEQ ID NO: 112228 - DNA, 33 bp, Homo sapien
cgcaatttgctataagtctggtacttttctaag

SEQ ID NO: 112229 - DNA, 33 bp, Homo sapien
aataaactaggatacaataaatgcttgatacct

SEQ ID NO: 112230 - DNA, 33 bp, Homo sapien
aataaactaggatacattaaatgcttgatacct

SEQ ID NO: 112231 - DNA, 33 bp, Homo sapien
cttggccaagtcatacaacaaacaagtacccca

SEQ ID NO: 112232 - DNA, 33 bp, Homo sapien
cttggccaagtcatacgacaaacaagtacccca

SEQ ID NO: 112233 - DNA, 33 bp, Homo sapien
tgttcctttaaggcataagggctcttcattcag

SEQ ID NO: 112234 - DNA, 33 bp, Homo sapien
tgttcctttaaggcatgagggctcttcattcag

SEQ ID NO: 112235 - DNA, 33 bp, Homo sapien
agtgaagtatccagcccaggttgagacatttca

SEQ ID NO: 112236 - DNA, 33 bp, Homo sapien
agtgaagtatccagcctaggttgagacatttca

SEQ ID NO: 112237 - DNA, 33 bp, Homo sapien
ttcttcctatttccaccatattggcagtaaatt

SEQ ID NO: 112238 - DNA, 33 bp, Homo sapien
ttcttcctatttccactatattggcagtaaatt

SEQ ID NO: 112239 - DNA, 33 bp, Homo sapien
tttctctctgcacctaagaaaaatgtgagaata

SEQ ID NO: 112240 - DNA, 33 bp, Homo sapien
tttctctctgcacctatgaaaaatgtgagaata

SEQ ID NO: 112241 - DNA, 33 bp, Homo sapien
aagttggtatccattacgaaactttaaatgcaa

SEQ ID NO: 112242 - DNA, 33 bp, Homo sapien
aagttggtatccattatgaaactttaaatgcaa

SEQ ID NO: 112243 - DNA, 33 bp, Homo sapien
ctgccttatatccctcaaatggcagagactatg

SEQ ID NO: 112244 - DNA, 33 bp, Homo sapien
ctgccttatatccctcgaatggcagagactatg

SEQ ID NO: 112245 - DNA, 33 bp, Homo sapien
gttgtcagggttgcatgatattctcgtggctct

SEQ ID NO: 112246 - DNA, 33 bp, Homo sapien
gttgtcagggttgcattatattctcgtggctct

SEQ ID NO: 112247 - DNA, 33 bp, Homo sapien
ttgctaccaactggctcagaagtaacctgtaat

SEQ ID NO: 112248 - DNA, 33 bp, Homo sapien
ttgctaccaactggctgagaagtaacctgtaat

SEQ ID NO: 112249 - DNA, 33 bp, Homo sapien
cttcaaatattatttacacgaaacatttgtgca

SEQ ID NO: 112250 - DNA, 33 bp, Homo sapien
cttcaaatattatttagacgaaacatttgtgca

SEQ ID NO: 112251 - DNA, 33 bp, Homo sapien
catggctgtagtatggaaagaagtaacacaaca

SEQ ID NO: 112252 - DNA, 33 bp, Homo sapien
catggctgtagtatgggaagaagtaacacaaca

SEQ ID NO: 112253 - DNA, 33 bp, Homo sapien
taactgtgtgaggtaaaacaagctattattttt

SEQ ID NO: 112254 - DNA, 33 bp, Homo sapien
taactgtgtgaggtaagacaagctattattttt

SEQ ID NO: 112255 - DNA, 33 bp, Homo sapien
cacaaagaaccaagaccgaagcatatggtagat

SEQ ID NO: 112256 - DNA, 33 bp, Homo sapien
cacaaagaaccaagactgaagcatatggtagat

SEQ ID NO: 112257 - DNA, 33 bp, Homo sapien
taacacaagcttggaaatgacaaatgttaaaca

SEQ ID NO: 112258 - DNA, 33 bp, Homo sapien
taacacaagcttggaagtgacaaatgttaaaca

SEQ ID NO: 112259 - DNA, 33 bp, Homo sapien
aacacagaagacataacaattgaatgcaagagc

SEQ ID NO: 112260 - DNA, 33 bp, Homo sapien
aacacagaagacataataattgaatgcaagagc

SEQ ID NO: 112261 - DNA, 33 bp, Homo sapien
cttatcttcttggttccccttatatcagttatt

SEQ ID NO: 112262 - DNA, 33 bp, Homo sapien
cttatcttcttggttctccttatatcagttatt

SEQ ID NO: 112263 - DNA, 33 bp, Homo sapien
gaagagattatcataaaaggttgaagtaatttc

SEQ ID NO: 112264 - DNA, 33 bp, Homo sapien
gaagagattatcataagaggttgaagtaatttc

SEQ ID NO: 112265 - DNA, 33 bp, Homo sapien
caaattcttgaccataataaacttgcacctcct

SEQ ID NO: 112266 - DNA, 33 bp, Homo sapien
caaattcttgaccatagtaaacttgcacctcct

SEQ ID NO: 112267 - DNA, 33 bp, Homo sapien
ccagtcttgttacttacagcacaacttcatctg

SEQ ID NO: 112268 - DNA, 33 bp, Homo sapien
ccagtcttgttacttagagcacaacttcatctg

SEQ ID NO: 112269 - DNA, 33 bp, Homo sapien
cacgtaagtctagtgcaacagtaaacaagggca

SEQ ID NO: 112270 - DNA, 33 bp, Homo sapien
cacgtaagtctagtgcgacagtaaacaagggca

SEQ ID NO: 112271 - DNA, 33 bp, Homo sapien
tgcttttagaataaacagccatagaagtttgag

SEQ ID NO: 112272 - DNA, 33 bp, Homo sapien
tgcttttagaataaaccgccatagaagtttgag

SEQ ID NO: 112273 - DNA, 33 bp, Homo sapien
ggcaggccctatgaacactaagaacacattgga

SEQ ID NO: 112274 - DNA, 33 bp, Homo sapien
ggcaggccctatgaacgctaagaacacattgga

SEQ ID NO: 112275 - DNA, 33 bp, Homo sapien
ggggagctggcataaaattcacaatagctgctg

SEQ ID NO: 112276 - DNA, 33 bp, Homo sapien
ggggagctggcataaagttcacaatagctgctg

SEQ ID NO: 112277 - DNA, 33 bp, Homo sapien
cagcaccaaagttaatcactgttaaaatttagg

SEQ ID NO: 112278 - DNA, 33 bp, Homo sapien
cagcaccaaagttaatgactgttaaaatttagg

SEQ ID NO: 112279 - DNA, 33 bp, Homo sapien
tagaagctgtggattacgtgatgaacaggagag

SEQ ID NO: 112280 - DNA, 33 bp, Homo sapien
tagaagctgtggattatgtgatgaacaggagag

SEQ ID NO: 112281 - DNA, 33 bp, Homo sapien
ataatttcagtattaaatatgacctgggtctga

SEQ ID NO: 112282 - DNA, 33 bp, Homo sapien
ataatttcagtattaagtatgacctgggtctga

SEQ ID NO: 112283 - DNA, 33 bp, Homo sapien
tccagatatttgtgctaaatgagtaaatccaat

SEQ ID NO: 112284 - DNA, 33 bp, Homo sapien
tccagatatttgtgctgaatgagtaaatccaat

SEQ ID NO: 112285 - DNA, 33 bp, Homo sapien
caatcacagcataggaaactaaattgggtttgg

SEQ ID NO: 112286 - DNA, 33 bp, Homo sapien
caatcacagcataggagactaaattgggtttgg

SEQ ID NO: 112287 - DNA, 33 bp, Homo sapien
ctgggaattcacaacgcattactgggtgtagct

SEQ ID NO: 112288 - DNA, 33 bp, Homo sapien
ctgggaattcacaacgtattactgggtgtagct

SEQ ID NO: 112289 - DNA, 33 bp, Homo sapien
tttgactgagacaaagaaagtgaatattctcag

SEQ ID NO: 112290 - DNA, 33 bp, Homo sapien
tttgactgagacaaaggaagtgaatattctcag

SEQ ID NO: 112291 - DNA, 33 bp, Homo sapien
actttcaagagtggctcaaaatggaagcagttt

SEQ ID NO: 112292 - DNA, 33 bp, Homo sapien
actttcaagagtggctgaaaatggaagcagttt

SEQ ID NO: 112293 - DNA, 33 bp, Homo sapien
tcacattgctcaacataaagctacatatatagc

SEQ ID NO: 112294 - DNA, 33 bp, Homo sapien
tcacattgctcaacattaagctacatatatagc

SEQ ID NO: 112295 - DNA, 33 bp, Homo sapien
tcaccatgatcacctaatactttagtagttcat

SEQ ID NO: 112296 - DNA, 33 bp, Homo sapien
tcaccatgatcacctattactttagtagttcat

SEQ ID NO: 112297 - DNA, 33 bp, Homo sapien
aaagcatcttcattaagtgtaatgtctgcattt

SEQ ID NO: 112298 - DNA, 33 bp, Homo sapien
aaagcatcttcattaattgtaatgtctgcattt

SEQ ID NO: 112299 - DNA, 33 bp, Homo sapien
tttatacaacctttcacgttattctagagctta

SEQ ID NO: 112300 - DNA, 33 bp, Homo sapien
tttatacaacctttcatgttattctagagctta

SEQ ID NO: 112301 - DNA, 33 bp, Homo sapien
cccctttcctaatgacactgtactatggccatt

SEQ ID NO: 112302 - DNA, 33 bp, Homo sapien
cccctttcctaatgacgctgtactatggccatt

SEQ ID NO: 112303 - DNA, 33 bp, Homo sapien
tggttccagttctagtcacaaaaatctttttta

SEQ ID NO: 112304 - DNA, 33 bp, Homo sapien
tggttccagttctagtgacaaaaatctttttta

SEQ ID NO: 112305 - DNA, 33 bp, Homo sapien
gagaaatagggatagaaaacaacccaggcagag

SEQ ID NO: 112306 - DNA, 33 bp, Homo sapien
gagaaatagggatagagaacaacccaggcagag

SEQ ID NO: 112307 - DNA, 33 bp, Homo sapien
atgttgacctgagtgaaccttgtcatgggagaa

SEQ ID NO: 112308 - DNA, 33 bp, Homo sapien
atgttgacctgagtgagccttgtcatgggagaa

SEQ ID NO: 112309 - DNA, 33 bp, Homo sapien
ccagacatttattaaactatcagctcttgtgag

SEQ ID NO: 112310 - DNA, 33 bp, Homo sapien
ccagacatttattaaagtatcagctcttgtgag

SEQ ID NO: 112311 - DNA, 33 bp, Homo sapien
ctcctaagcattttaaaaacatctaatatcaga

SEQ ID NO: 112312 - DNA, 33 bp, Homo sapien
ctcctaagcattttaagaacatctaatatcaga

SEQ ID NO: 112313 - DNA, 33 bp, Homo sapien
tcaataagaaccttgtcaataggctaggttcta

SEQ ID NO: 112314 - DNA, 33 bp, Homo sapien
tcaataagaaccttgttaataggctaggttcta

SEQ ID NO: 112315 - DNA, 33 bp, Homo sapien
tagtagctgcatattcacaactggtgatcccat

SEQ ID NO: 112316 - DNA, 33 bp, Homo sapien
tagtagctgcatattcgcaactggtgatcccat

SEQ ID NO: 112317 - DNA, 33 bp, Homo sapien
gaacagaggcaaagagaaattctactgaggggc

SEQ ID NO: 112318 - DNA, 33 bp, Homo sapien
gaacagaggcaaagaggaattctactgaggggc

SEQ ID NO: 112319 - DNA, 33 bp, Homo sapien
tttgcttctggatcctcacattaatttggagat

SEQ ID NO: 112320 - DNA, 33 bp, Homo sapien
tttgcttctggatcctgacattaatttggagat

SEQ ID NO: 112321 - DNA, 33 bp, Homo sapien
agccttcaaagagttcaaacttagattttctct

SEQ ID NO: 112322 - DNA, 33 bp, Homo sapien
agccttcaaagagttcgaacttagattttctct

SEQ ID NO: 112323 - DNA, 33 bp, Homo sapien
aacatttctgagcacaaatttcaggggtgattt

SEQ ID NO: 112324 - DNA, 33 bp, Homo sapien
aacatttctgagcacagatttcaggggtgattt

SEQ ID NO: 112325 - DNA, 33 bp, Homo sapien
agctagatattaatgccgcaatggagactctac

SEQ ID NO: 112326 - DNA, 33 bp, Homo sapien
agctagatattaatgctgcaatggagactctac

SEQ ID NO: 112327 - DNA, 33 bp, Homo sapien
tatttctcaactcttcacagacatctgtcgagc

SEQ ID NO: 112328 - DNA, 33 bp, Homo sapien
tatttctcaactcttctcagacatctgtcgagc

SEQ ID NO: 112329 - DNA, 33 bp, Homo sapien
aagatggcatattagaagctttcaatgcatgtc

SEQ ID NO: 112330 - DNA, 33 bp, Homo sapien
aagatggcatattagaggctttcaatgcatgtc

SEQ ID NO: 112331 - DNA, 33 bp, Homo sapien
aaaaaagagagattccaatcgagcattttatat

SEQ ID NO: 112332 - DNA, 33 bp, Homo sapien
aaaaaagagagattcccatcgagcattttatat

SEQ ID NO: 112333 - DNA, 33 bp, Homo sapien
attgaatctcagagaacggtatggtatccttgg

SEQ ID NO: 112334 - DNA, 33 bp, Homo sapien
attgaatctcagagaatggtatggtatccttgg

SEQ ID NO: 112335 - DNA, 33 bp, Homo sapien
tttcctgatgcttccccagaatccactatgctt

SEQ ID NO: 112336 - DNA, 33 bp, Homo sapien
tttcctgatgcttccctagaatccactatgctt

SEQ ID NO: 112337 - DNA, 33 bp, Homo sapien
cttctatttgcttttgcaaacttctacagcctg

SEQ ID NO: 112338 - DNA, 33 bp, Homo sapien
cttctatttgcttttgtaaacttctacagcctg

SEQ ID NO: 112339 - DNA, 33 bp, Homo sapien
tcttctctttggagtgcacttatcatctcctta

SEQ ID NO: 112340 - DNA, 33 bp, Homo sapien
tcttctctttggagtggacttatcatctcctta

SEQ ID NO: 112341 - DNA, 33 bp, Homo sapien
cttcttctacagggcactctaatacttttgatc

SEQ ID NO: 112342 - DNA, 33 bp, Homo sapien
cttcttctacagggcattctaatacttttgatc

SEQ ID NO: 112343 - DNA, 33 bp, Homo sapien
aagaagcaaagaaagcactgtacatagggatag

SEQ ID NO: 112344 - DNA, 33 bp, Homo sapien
aagaagcaaagaaagcgctgtacatagggatag

SEQ ID NO: 112345 - DNA, 33 bp, Homo sapien
gatgatgtaactgaggacagtgattccctacca

SEQ ID NO: 112346 - DNA, 33 bp, Homo sapien
gatgatgtaactgaggtcagtgattccctacca

SEQ ID NO: 112347 - DNA, 33 bp, Homo sapien
gagaaattcagtctaacagatgtcagatatagg

SEQ ID NO: 112348 - DNA, 33 bp, Homo sapien
gagaaattcagtctaatagatgtcagatatagg

SEQ ID NO: 112349 - DNA, 33 bp, Homo sapien
tttaagtctatcttgaaactgaattttctggaa

SEQ ID NO: 112350 - DNA, 33 bp, Homo sapien
tttaagtctatcttgatactgaattttctggaa

SEQ ID NO: 112351 - DNA, 33 bp, Homo sapien
ggacaaccagagaacaccaaatgtcactagcaa

SEQ ID NO: 112352 - DNA, 33 bp, Homo sapien
ggacaaccagagaacagcaaatgtcactagcaa

SEQ ID NO: 112353 - DNA, 33 bp, Homo sapien
cctccttttcaaatcaaattgcacaataggcca

SEQ ID NO: 112354 - DNA, 33 bp, Homo sapien
cctccttttcaaatcacattgcacaataggcca

SEQ ID NO: 112355 - DNA, 33 bp, Homo sapien
aaatacaataatacaaacctacttcattacttc

SEQ ID NO: 112356 - DNA, 33 bp, Homo sapien
aaatacaataatacaagcctacttcattacttc

SEQ ID NO: 112357 - DNA, 33 bp, Homo sapien
ataacagaagaagcaaagctataaaccagtgag

SEQ ID NO: 112358 - DNA, 33 bp, Homo sapien
ataacagaagaagcaaggctataaaccagtgag

SEQ ID NO: 112359 - DNA, 33 bp, Homo sapien
atgctgggcccaaccacgatgctaaatgcttta

SEQ ID NO: 112360 - DNA, 33 bp, Homo sapien
atgctgggcccaaccatgatgctaaatgcttta

SEQ ID NO: 112361 - DNA, 33 bp, Homo sapien
catcctggcaattgcacgtacaattttcagttg

SEQ ID NO: 112362 - DNA, 33 bp, Homo sapien
catcctggcaattgcatgtacaattttcagttg

SEQ ID NO: 112363 - DNA, 33 bp, Homo sapien
ggaactctaaaattaaaccagcttcttgacaac

SEQ ID NO: 112364 - DNA, 33 bp, Homo sapien
ggaactctaaaattaatccagcttcttgacaac

SEQ ID NO: 112365 - DNA, 33 bp, Homo sapien
gggcatgcacttcccccagcaaagtcacaaaca

SEQ ID NO: 112366 - DNA, 33 bp, Homo sapien
gggcatgcacttccccgagcaaagtcacaaaca

SEQ ID NO: 112367 - DNA, 33 bp, Homo sapien
agattaggcaggaaaaatgcaaaaatttaaact

SEQ ID NO: 112368 - DNA, 33 bp, Homo sapien
agattaggcaggaaaattgcaaaaatttaaact

SEQ ID NO: 112369 - DNA, 33 bp, Homo sapien
taatgtttaacgtatgcattcatcagaattgta

SEQ ID NO: 112370 - DNA, 33 bp, Homo sapien
taatgtttaacgtatgtattcatcagaattgta

SEQ ID NO: 112371 - DNA, 33 bp, Homo sapien
tctgtatcactggtccaaaacaagatggcaatg

SEQ ID NO: 112372 - DNA, 33 bp, Homo sapien
tctgtatcactggtccgaaacaagatggcaatg

SEQ ID NO: 112373 - DNA, 33 bp, Homo sapien
tctactaattgtaaaaatcacttgagtggttgg

SEQ ID NO: 112374 - DNA, 33 bp, Homo sapien
tctactaattgtaaaagtcacttgagtggttgg

SEQ ID NO: 112375 - DNA, 33 bp, Homo sapien
gctttatacatggtaaatgctctataaagttgt

SEQ ID NO: 112376 - DNA, 33 bp, Homo sapien
gctttatacatggtaagtgctctataaagttgt

SEQ ID NO: 112377 - DNA, 33 bp, Homo sapien
actctttggaggcctaagctaaagtgtgcattt

SEQ ID NO: 112378 - DNA, 33 bp, Homo sapien
actctttggaggcctaggctaaagtgtgcattt

SEQ ID NO: 112379 - DNA, 33 bp, Homo sapien
cacattgcattagtagcaggctttattaaatcc

SEQ ID NO: 112380 - DNA, 33 bp, Homo sapien
cacattgcattagtagtaggctttattaaatcc

SEQ ID NO: 112381 - DNA, 33 bp, Homo sapien
gaggagctccagtggcacagttgattagtgtgc

SEQ ID NO: 112382 - DNA, 33 bp, Homo sapien
gaggagctccagtggcgcagttgattagtgtgc

SEQ ID NO: 112383 - DNA, 33 bp, Homo sapien
gtaaagattatagcagaattgtgggacaatgta

SEQ ID NO: 112384 - DNA, 33 bp, Homo sapien
gtaaagattatagcagcattgtgggacaatgta

SEQ ID NO: 112385 - DNA, 33 bp, Homo sapien
actgtacatatcagtactaagatcagctgaaga

SEQ ID NO: 112386 - DNA, 33 bp, Homo sapien
actgtacatatcagtattaagatcagctgaaga

SEQ ID NO: 112387 - DNA, 33 bp, Homo sapien
acagtttattttagtcccttcacctttcctcac

SEQ ID NO: 112388 - DNA, 33 bp, Homo sapien
acagtttattttagtcgcttcacctttcctcac

SEQ ID NO: 112389 - DNA, 33 bp, Homo sapien
tttctactggaaccacaaaaaactaattcttac

SEQ ID NO: 112390 - DNA, 33 bp, Homo sapien
tttctactggaaccacgaaaaactaattcttac

SEQ ID NO: 112391 - DNA, 33 bp, Homo sapien
gagtaatgaacctccaaatatcaccatgctact

SEQ ID NO: 112392 - DNA, 33 bp, Homo sapien
gagtaatgaacctccacatatcaccatgctact

SEQ ID NO: 112393 - DNA, 33 bp, Homo sapien
gagagtaaaataagtcacttgagtcaagttttt

SEQ ID NO: 112394 - DNA, 33 bp, Homo sapien
gagagtaaaataagtctcttgagtcaagttttt

SEQ ID NO: 112395 - DNA, 33 bp, Homo sapien
ttggagttgagaggggaaaggagtcagtgagga

SEQ ID NO: 112396 - DNA, 33 bp, Homo sapien
ttggagttgagagggggaaggagtcagtgagga

SEQ ID NO: 112397 - DNA, 33 bp, Homo sapien
ctaggtgtatccataaggtcagaaagaacatga

SEQ ID NO: 112398 - DNA, 33 bp, Homo sapien
ctaggtgtatccataatgtcagaaagaacatga

SEQ ID NO: 112399 - DNA, 33 bp, Homo sapien
tcatattctttaccaacgctgatatccagaatg

SEQ ID NO: 112400 - DNA, 33 bp, Homo sapien
tcatattctttaccaatgctgatatccagaatg

SEQ ID NO: 112401 - DNA, 33 bp, Homo sapien
tgtacagattagttcaccattaaggtattaaat

SEQ ID NO: 112402 - DNA, 33 bp, Homo sapien
tgtacagattagttcatcattaaggtattaaat

SEQ ID NO: 112403 - DNA, 33 bp, Homo sapien
taaatagttgagtgtacacatttttgcattcag

SEQ ID NO: 112404 - DNA, 33 bp, Homo sapien
taaatagttgagtgtatacatttttgcattcag

SEQ ID NO: 112405 - DNA, 33 bp, Homo sapien
aactgaatgtctgccacgtagctagaatcaagg

SEQ ID NO: 112406 - DNA, 33 bp, Homo sapien
aactgaatgtctgccatgtagctagaatcaagg

SEQ ID NO: 112407 - DNA, 33 bp, Homo sapien
agattctctaatgataagagtgttattcataat

SEQ ID NO: 112408 - DNA, 33 bp, Homo sapien
agattctctaatgatatgagtgttattcataat

SEQ ID NO: 112409 - DNA, 33 bp, Homo sapien
tctggctcaaaagctcaaaagttctaatctcat

SEQ ID NO: 112410 - DNA, 33 bp, Homo sapien
tctggctcaaaagctcgaaagttctaatctcat

SEQ ID NO: 112411 - DNA, 33 bp, Homo sapien
tggatgaagaaactgaaatttgtccatattgtc

SEQ ID NO: 112412 - DNA, 33 bp, Homo sapien
tggatgaagaaactgagatttgtccatattgtc

SEQ ID NO: 112413 - DNA, 33 bp, Homo sapien
tctcattttttcttagaaatttggactacttat

SEQ ID NO: 112414 - DNA, 33 bp, Homo sapien
tctcattttttcttagtaatttggactacttat

SEQ ID NO: 112415 - DNA, 33 bp, Homo sapien
aacatgatctttttaacattgtctgatcaaaac

SEQ ID NO: 112416 - DNA, 33 bp, Homo sapien
aacatgatctttttaatattgtctgatcaaaac

SEQ ID NO: 112417 - DNA, 33 bp, Homo sapien
accctatttaatttaaagctctggcaatgcaag

SEQ ID NO: 112418 - DNA, 33 bp, Homo sapien
accctatttaatttaaggctctggcaatgcaag

SEQ ID NO: 112419 - DNA, 33 bp, Homo sapien
agtcaagatatggaataaacatgagtctaccaa

SEQ ID NO: 112420 - DNA, 33 bp, Homo sapien
agtcaagatatggaatcaacatgagtctaccaa

SEQ ID NO: 112421 - DNA, 33 bp, Homo sapien
tttgccctacaatcataaggaaataaatatggt

SEQ ID NO: 112422 - DNA, 33 bp, Homo sapien
tttgccctacaatcatgaggaaataaatatggt

SEQ ID NO: 112423 - DNA, 33 bp, Homo sapien
gtaaattaatgcaaaaacaaaaatgcctattct

SEQ ID NO: 112424 - DNA, 33 bp, Homo sapien
gtaaattaatgcaaaagcaaaaatgcctattct

SEQ ID NO: 112425 - DNA, 33 bp, Homo sapien
caaaggcatttataaaagcaagaaagtacaatg

SEQ ID NO: 112426 - DNA, 33 bp, Homo sapien
caaaggcatttataaaggcaagaaagtacaatg

SEQ ID NO: 112427 - DNA, 33 bp, Homo sapien
aaaacacattagcttaagctcagcatgccattt

SEQ ID NO: 112428 - DNA, 33 bp, Homo sapien
aaaacacattagcttaggctcagcatgccattt

SEQ ID NO: 112429 - DNA, 33 bp, Homo sapien
atgagctcaggctataaaaataatgtcttctgc

SEQ ID NO: 112430 - DNA, 33 bp, Homo sapien
atgagctcaggctatacaaataatgtcttctgc

SEQ ID NO: 112431 - DNA, 33 bp, Homo sapien
tatcattggaatccccaaaacattttacagtta

SEQ ID NO: 112432 - DNA, 33 bp, Homo sapien
tatcattggaatccccgaaacattttacagtta

SEQ ID NO: 112433 - DNA, 33 bp, Homo sapien
attccaatgatattaacagaatctgtgccactg

SEQ ID NO: 112434 - DNA, 33 bp, Homo sapien
attccaatgatattaatagaatctgtgccactg

SEQ ID NO: 112435 - DNA, 33 bp, Homo sapien
tggatgtttatgtaaaatgatggtgataacttg

SEQ ID NO: 112436 - DNA, 33 bp, Homo sapien
tggatgtttatgtaaagtgatggtgataacttg

SEQ ID NO: 112437 - DNA, 33 bp, Homo sapien
atgttcctgttcatcaataattgtgtgttcctt

SEQ ID NO: 112438 - DNA, 33 bp, Homo sapien
atgttcctgttcatcagtaattgtgtgttcctt

SEQ ID NO: 112439 - DNA, 33 bp, Homo sapien
taaagccatgaaatgcagaactatagaggagta

SEQ ID NO: 112440 - DNA, 33 bp, Homo sapien
taaagccatgaaatgccgaactatagaggagta

SEQ ID NO: 112441 - DNA, 33 bp, Homo sapien
tgctgtggtaaagatacgttaatagcacacaaa

SEQ ID NO: 112442 - DNA, 33 bp, Homo sapien
tgctgtggtaaagatatgttaatagcacacaaa

SEQ ID NO: 112443 - DNA, 33 bp, Homo sapien
agagaattctgaaatgccatcctgccaaggttt

SEQ ID NO: 112444 - DNA, 33 bp, Homo sapien
agagaattctgaaatgtcatcctgccaaggttt

SEQ ID NO: 112445 - DNA, 33 bp, Homo sapien
atgagatatttatagcggaatctcaagtagatt

SEQ ID NO: 112446 - DNA, 33 bp, Homo sapien
atgagatatttatagctgaatctcaagtagatt

SEQ ID NO: 112447 - DNA, 33 bp, Homo sapien
gaaagaggtacttaaaggtataggaaagagtct

SEQ ID NO: 112448 - DNA, 33 bp, Homo sapien
gaaagaggtacttaaatgtataggaaagagtct

SEQ ID NO: 112449 - DNA, 33 bp, Homo sapien
gaagggagcatgtagaccagcgcaagcaaaagg

SEQ ID NO: 112450 - DNA, 33 bp, Homo sapien
gaagggagcatgtagatcagcgcaagcaaaagg

SEQ ID NO: 112451 - DNA, 33 bp, Homo sapien
cttaaataaacttgaaatgcaggctaagccaaa

SEQ ID NO: 112452 - DNA, 33 bp, Homo sapien
cttaaataaacttgaactgcaggctaagccaaa

SEQ ID NO: 112453 - DNA, 33 bp, Homo sapien
tgacacagagtttaaaaatgtcttgcagaactt

SEQ ID NO: 112454 - DNA, 33 bp, Homo sapien
tgacacagagtttaaatatgtcttgcagaactt

SEQ ID NO: 112455 - DNA, 33 bp, Homo sapien
ttctagtatcccagaaatatgttgaaggttttc

SEQ ID NO: 112456 - DNA, 33 bp, Homo sapien
ttctagtatcccagaagtatgttgaaggttttc

SEQ ID NO: 112457 - DNA, 33 bp, Homo sapien
gcttgagtgctatgaacggttttacattttaaa

SEQ ID NO: 112458 - DNA, 33 bp, Homo sapien
gcttgagtgctatgaatggttttacattttaaa

SEQ ID NO: 112459 - DNA, 33 bp, Homo sapien
aagtgaacgaatttaacatcaacaataataaaa

SEQ ID NO: 112460 - DNA, 33 bp, Homo sapien
aagtgaacgaatttaatatcaacaataataaaa

SEQ ID NO: 112461 - DNA, 33 bp, Homo sapien
tttttaaaatgctcgacaggaaaccatgagata

SEQ ID NO: 112462 - DNA, 33 bp, Homo sapien
tttttaaaatgctcgataggaaaccatgagata

SEQ ID NO: 112463 - DNA, 33 bp, Homo sapien
tttccagataacaaacacccttaaatgaagtat

SEQ ID NO: 112464 - DNA, 33 bp, Homo sapien
tttccagataacaaactcccttaaatgaagtat

SEQ ID NO: 112465 - DNA, 33 bp, Homo sapien
agctgggtattggtcaggaatctcttttcatgt

SEQ ID NO: 112466 - DNA, 33 bp, Homo sapien
agctgggtattggtcatgaatctcttttcatgt

SEQ ID NO: 112467 - DNA, 33 bp, Homo sapien
gtgacagtttgtaagcaaataatgaaagcaaca

SEQ ID NO: 112468 - DNA, 33 bp, Homo sapien
gtgacagtttgtaagcgaataatgaaagcaaca

SEQ ID NO: 112469 - DNA, 33 bp, Homo sapien
caagatatgcaaacaacctaaatgcctaaatgc

SEQ ID NO: 112470 - DNA, 33 bp, Homo sapien
caagatatgcaaacaatctaaatgcctaaatgc

SEQ ID NO: 112471 - DNA, 33 bp, Homo sapien
tttatagtaaagtctaggcctatagctgtacca

SEQ ID NO: 112472 - DNA, 33 bp, Homo sapien
tttatagtaaagtctatgcctatagctgtacca

SEQ ID NO: 112473 - DNA, 33 bp, Homo sapien
cccaaatccagcctaactactgatctctaccaa

SEQ ID NO: 112474 - DNA, 33 bp, Homo sapien
cccaaatccagcctaattactgatctctaccaa

SEQ ID NO: 112475 - DNA, 33 bp, Homo sapien
cattaacagaaaaatccctgcaagtcttggcca

SEQ ID NO: 112476 - DNA, 33 bp, Homo sapien
cattaacagaaaaatctctgcaagtcttggcca

SEQ ID NO: 112477 - DNA, 33 bp, Homo sapien
tgcccataaccagttcaaaagtggcttgcacat

SEQ ID NO: 112478 - DNA, 33 bp, Homo sapien
tgcccataaccagttccaaagtggcttgcacat

SEQ ID NO: 112479 - DNA, 33 bp, Homo sapien; identical to SEQ ID NO: 112477

SEQ ID NO: 112480 - DNA, 33 bp, Homo sapien; identical to SEQ ID NO: 112478

SEQ ID NO: 112481 - DNA, 33 bp, Homo sapien
aatctatacgtgcttcccatgtacaaaagagtt

SEQ ID NO: 112482 - DNA, 33 bp, Homo sapien
aatctatacgtgcttctcatgtacaaaagagtt

SEQ ID NO: 112483 - DNA, 33 bp, Homo sapien
tatagatttaattttaacaacttcatcactttg

SEQ ID NO: 112484 - DNA, 33 bp, Homo sapien
tatagatttaattttaccaacttcatcactttg

SEQ ID NO: 112485 - DNA, 33 bp, Homo sapien
acaacagttatagagaataggcagacgggtaat

SEQ ID NO: 112486 - DNA, 33 bp, Homo sapien
acaacagttatagagactaggcagacgggtaat

SEQ ID NO: 112487 - DNA, 33 bp, Homo sapien
tcattgctagttaaaaatcagaaagccatcatt

SEQ ID NO: 112488 - DNA, 33 bp, Homo sapien
tcattgctagttaaaagtcagaaagccatcatt

SEQ ID NO: 112489 - DNA, 33 bp, Homo sapien
tggcataaagtttcaaggcagggtgccaagtgc

SEQ ID NO: 112490 - DNA, 33 bp, Homo sapien
tggcataaagtttcaatgcagggtgccaagtgc

SEQ ID NO: 112491 - DNA, 33 bp, Homo sapien
aaacatatgtagattaaggataacagcaaattt

SEQ ID NO: 112492 - DNA, 33 bp, Homo sapien
aaacatatgtagattagggataacagcaaattt

SEQ ID NO: 112493 - DNA, 33 bp, Homo sapien
gtggagaaatgtaatgaaagactagaggtggta

SEQ ID NO: 112494 - DNA, 33 bp, Homo sapien
gtggagaaatgtaatggaagactagaggtggta

SEQ ID NO: 112495 - DNA, 33 bp, Homo sapien
ctcttggcccgagcaagaagtgatcaaagggac

SEQ ID NO: 112496 - DNA, 33 bp, Homo sapien
ctcttggcccgagcaataagtgatcaaagggac

SEQ ID NO: 112497 - DNA, 33 bp, Homo sapien
gaaggtaagcggcctccattatagaaacagcaa

SEQ ID NO: 112498 - DNA, 33 bp, Homo sapien
gaaggtaagcggcctctattatagaaacagcaa

SEQ ID NO: 112499 - DNA, 33 bp, Homo sapien
ttgtgagagacactcaaaatgtatctttcaaat

SEQ ID NO: 112500 - DNA, 33 bp, Homo sapien
ttgtgagagacactcacaatgtatctttcaaat

SEQ ID NO: 112501 - DNA, 33 bp, Homo sapien
ccctcagaatctgaacaatgcagtgataatctc

SEQ ID NO: 112502 - DNA, 33 bp, Homo sapien
ccctcagaatctgaacgatgcagtgataatctc

SEQ ID NO: 112503 - DNA, 33 bp, Homo sapien
ggtgcataagaaacacaacttgagaagggagct

SEQ ID NO: 112504 - DNA, 33 bp, Homo sapien
ggtgcataagaaacacgacttgagaagggagct

SEQ ID NO: 112505 - DNA, 33 bp, Homo sapien
gggagctatggaattacgggcagggataataac

SEQ ID NO: 112506 - DNA, 33 bp, Homo sapien
gggagctatggaattatgggcagggataataac

SEQ ID NO: 112507 - DNA, 33 bp, Homo sapien
tgttcgactggatccaagggctcaaattatgcc

SEQ ID NO: 112508 - DNA, 33 bp, Homo sapien
tgttcgactggatccaggggctcaaattatgcc

SEQ ID NO: 112509 - DNA, 33 bp, Homo sapien
attggcataatatcaccgggggaaatctatttt

SEQ ID NO: 112510 - DNA, 33 bp, Homo sapien
attggcataatatcactgggggaaatctatttt

SEQ ID NO: 112511 - DNA, 33 bp, Homo sapien
ctctcacctgagctacagaagttatcatgaaat

SEQ ID NO: 112512 - DNA, 33 bp, Homo sapien
ctctcacctgagctaccgaagttatcatgaaat

SEQ ID NO: 112513 - DNA, 33 bp, Homo sapien
aaccatataaccattagccttggcccgttcata

SEQ ID NO: 112514 - DNA, 33 bp, Homo sapien
aaccatataaccattatccttggcccgttcata

SEQ ID NO: 112515 - DNA, 33 bp, Homo sapien
aagagacttaaataaaagggactctagaaatat

SEQ ID NO: 112516 - DNA, 33 bp, Homo sapien
aagagacttaaataaaggggactctagaaatat

SEQ ID NO: 112517 - DNA, 33 bp, Homo sapien
agtcctctgttgcctaaggtaaatttgacggaa

SEQ ID NO: 112518 - DNA, 33 bp, Homo sapien
agtcctctgttgcctagggtaaatttgacggaa

SEQ ID NO: 112519 - DNA, 33 bp, Homo sapien
tacttgtaaattctgagatgtcagcttctacaa

SEQ ID NO: 112520 - DNA, 33 bp, Homo sapien
tacttgtaaattctgatatgtcagcttctacaa

SEQ ID NO: 112521 - DNA, 33 bp, Homo sapien
tttaactttgtcattaacagatctctgagtgat

SEQ ID NO: 112522 - DNA, 33 bp, Homo sapien
tttaactttgtcattagcagatctctgagtgat

SEQ ID NO: 112523 - DNA, 33 bp, Homo sapien
aagcttatggaattgactaaggtgacacagagc

SEQ ID NO: 112524 - DNA, 33 bp, Homo sapien
aagcttatggaattgagtaaggtgacacagagc

SEQ ID NO: 112525 - DNA, 33 bp, Homo sapien
gcagtagagtcctaaaattgaggagacagagaa

SEQ ID NO: 112526 - DNA, 33 bp, Homo sapien
gcagtagagtcctaaacttgaggagacagagaa

SEQ ID NO: 112527 - DNA, 33 bp, Homo sapien
ccaactcaagtgtccacagtgatcaaggggtct

SEQ ID NO: 112528 - DNA, 33 bp, Homo sapien
ccaactcaagtgtccatagtgatcaaggggtct

SEQ ID NO: 112529 - DNA, 33 bp, Homo sapien
agtcattatgtcacaacgggaattctactcagc

SEQ ID NO: 112530 - DNA, 33 bp, Homo sapien
agtcattatgtcacaatgggaattctactcagc

SEQ ID NO: 112531 - DNA, 33 bp, Homo sapien
taatttgaaagtcacacgttcaatcttgcccgc

SEQ ID NO: 112532 - DNA, 33 bp, Homo sapien
taatttgaaagtcacatgttcaatcttgcccgc

SEQ ID NO: 112533 - DNA, 33 bp, Homo sapien
ttcaatcttgcccgcaaatgtgttttggttgac

SEQ ID NO: 112534 - DNA, 33 bp, Homo sapien
ttcaatcttgcccgcacatgtgttttggttgac

SEQ ID NO: 112535 - DNA, 33 bp, Homo sapien
gttaaagaactgactacgtatttagaaacagaa

SEQ ID NO: 112536 - DNA, 33 bp, Homo sapien
gttaaagaactgactatgtatttagaaacagaa

SEQ ID NO: 112537 - DNA, 33 bp, Homo sapien
taaagagctctctgtacaaccatgttgctttga

SEQ ID NO: 112538 - DNA, 33 bp, Homo sapien
taaagagctctctgtataaccatgttgctttga

SEQ ID NO: 112539 - DNA, 33 bp, Homo sapien
gattagtggactaaaaagagcttataagacttt

SEQ ID NO: 112540 - DNA, 33 bp, Homo sapien
gattagtggactaaaaggagcttataagacttt

SEQ ID NO: 112541 - DNA, 33 bp, Homo sapien
taattaattttttatccatcacttgcctcccgc

SEQ ID NO: 112542 - DNA, 33 bp, Homo sapien
taattaattttttatctatcacttgcctcccgc

SEQ ID NO: 112543 - DNA, 33 bp, Homo sapien
ggtgccatcaaataaaagagatcacaagaatga

SEQ ID NO: 112544 - DNA, 33 bp, Homo sapien
ggtgccatcaaataaaggagatcacaagaatga

SEQ ID NO: 112545 - DNA, 33 bp, Homo sapien
gaccattgaagattacaaggagattctaaacat

SEQ ID NO: 112546 - DNA, 33 bp, Homo sapien
gaccattgaagattacgaggagattctaaacat

SEQ ID NO: 112547 - DNA, 33 bp, Homo sapien
ctaagcaagtattttaaagactcattcctggca

SEQ ID NO: 112548 - DNA, 33 bp, Homo sapien
ctaagcaagtattttagagactcattcctggca

SEQ ID NO: 112549 - DNA, 33 bp, Homo sapien
catttatgtgttacacagagaccaaaagaaaaa

SEQ ID NO: 112550 - DNA, 33 bp, Homo sapien
catttatgtgttacacggagaccaaaagaaaaa

SEQ ID NO: 112551 - DNA, 33 bp, Homo sapien
tagaggacaagcaaggcataaagccaagcctgt

SEQ ID NO: 112552 - DNA, 33 bp, Homo sapien
tagaggacaagcaaggtataaagccaagcctgt

SEQ ID NO: 112553 - DNA, 33 bp, Homo sapien
aagtcaatcatagtcactcctcatagtcacagt

SEQ ID NO: 112554 - DNA, 33 bp, Homo sapien
aagtcaatcatagtcattcctcatagtcacagt

SEQ ID NO: 112555 - DNA, 33 bp, Homo sapien
aatcgaagttcagaaacgttctggaaaatgaca

SEQ ID NO: 112556 - DNA, 33 bp, Homo sapien
aatcgaagttcagaaatgttctggaaaatgaca

SEQ ID NO: 112557 - DNA, 33 bp, Homo sapien
ggtgcctgaaaacttacaaactacaatgatgac

SEQ ID NO: 112558 - DNA, 33 bp, Homo sapien
ggtgcctgaaaacttataaactacaatgatgac

SEQ ID NO: 112559 - DNA, 33 bp, Homo sapien
tattattattgtaaggaaagagctcaatttatg

SEQ ID NO: 112560 - DNA, 33 bp, Homo sapien
tattattattgtaagggaagagctcaatttatg

SEQ ID NO: 112561 - DNA, 33 bp, Homo sapien
ctcaactgtattagaaatcttcatctgtatgtc

SEQ ID NO: 112562 - DNA, 33 bp, Homo sapien
ctcaactgtattagaagtcttcatctgtatgtc

SEQ ID NO: 112563 - DNA, 33 bp, Homo sapien
tagctacagaaaaataaatctgacagacataga

SEQ ID NO: 112564 - DNA, 33 bp, Homo sapien
tagctacagaaaaatacatctgacagacataga

SEQ ID NO: 112565 - DNA, 33 bp, Homo sapien
cttgaaacagagtataactttctcaacttgatc

SEQ ID NO: 112566 - DNA, 33 bp, Homo sapien
cttgaaacagagtatagctttctcaacttgatc

SEQ ID NO: 112567 - DNA, 33 bp, Homo sapien
tggtttattgaccaaaatttgactgttaggata

SEQ ID NO: 112568 - DNA, 33 bp, Homo sapien
tggtttattgaccaaagtttgactgttaggata

SEQ ID NO: 112569 - DNA, 33 bp, Homo sapien
tggtgtctcacttatacaggcaaagcggttgaa

SEQ ID NO: 112570 - DNA, 33 bp, Homo sapien
tggtgtctcacttatataggcaaagcggttgaa

SEQ ID NO: 112571 - DNA, 33 bp, Homo sapien
acacctagacaacaaccacagtggtagaatctg

SEQ ID NO: 112572 - DNA, 33 bp, Homo sapien
acacctagacaacaactacagtggtagaatctg

SEQ ID NO: 112573 - DNA, 33 bp, Homo sapien
gacaattatttcttgaatacaacatcagaggca

SEQ ID NO: 112574 - DNA, 33 bp, Homo sapien
gacaattatttcttgagtacaacatcagaggca

SEQ ID NO: 112575 - DNA, 33 bp, Homo sapien
ggacttgaaattgaagaccttgtgaaatttaaa

SEQ ID NO: 112576 - DNA, 33 bp, Homo sapien
ggacttgaaattgaagcccttgtgaaatttaaa

SEQ ID NO: 112577 - DNA, 33 bp, Homo sapien
ggaaataattttgaccccaaataagaagaactc

SEQ ID NO: 112578 - DNA, 33 bp, Homo sapien
ggaaataattttgacctcaaataagaagaactc

SEQ ID NO: 112579 - DNA, 33 bp, Homo sapien
agcagcatagtgttaacaatatgagatttggaa

SEQ ID NO: 112580 - DNA, 33 bp, Homo sapien
agcagcatagtgttaataatatgagatttggaa

SEQ ID NO: 112581 - DNA, 33 bp, Homo sapien
acaaagctggagttaacagagactgatattaac

SEQ ID NO: 112582 - DNA, 33 bp, Homo sapien
acaaagctggagttaatagagactgatattaac

SEQ ID NO: 112583 - DNA, 33 bp, Homo sapien
taggctttctttcagagataatggtgatttaca

SEQ ID NO: 112584 - DNA, 33 bp, Homo sapien
taggctttctttcagatataatggtgatttaca

SEQ ID NO: 112585 - DNA, 33 bp, Homo sapien
taaagaaagcttaaaaaccagaggagttggctg

SEQ ID NO: 112586 - DNA, 33 bp, Homo sapien
taaagaaagcttaaaagccagaggagttggctg

SEQ ID NO: 112587 - DNA, 33 bp, Homo sapien
aatcattcaacttgcccgcttcggagccattat

SEQ ID NO: 112588 - DNA, 33 bp, Homo sapien
aatcattcaacttgcctgcttcggagccattat

SEQ ID NO: 112589 - DNA, 33 bp, Homo sapien
aaaaccatatttacacgctctaaattagacaaa

SEQ ID NO: 112590 - DNA, 33 bp, Homo sapien
aaaaccatatttacactctctaaattagacaaa

SEQ ID NO: 112591 - DNA, 33 bp, Homo sapien
ctttactatgatacccaactcctgtcatgaata

SEQ ID NO: 112592 - DNA, 33 bp, Homo sapien
ctttactatgataccctactcctgtcatgaata

SEQ ID NO: 112593 - DNA, 33 bp, Homo sapien
tttttccttgtatttgcagaaatagcatgagct

SEQ ID NO: 112594 - DNA, 33 bp, Homo sapien
tttttccttgtatttgtagaaatagcatgagct

SEQ ID NO: 112595 - DNA, 33 bp, Homo sapien
tgggattaggatagataaaaaaacttccaagat

SEQ ID NO: 112596 - DNA, 33 bp, Homo sapien
tgggattaggatagatcaaaaaacttccaagat

SEQ ID NO: 112597 - DNA, 33 bp, Homo sapien
tgcatatatgcaacaagaatctgttttctcttg

SEQ ID NO: 112598 - DNA, 33 bp, Homo sapien
tgcatatatgcaacaataatctgttttctcttg

SEQ ID NO: 112599 - DNA, 33 bp, Homo sapien
atgccatccacagtgccaagactgtctgcaatg

SEQ ID NO: 112600 - DNA, 33 bp, Homo sapien
atgccatccacagtgctaagactgtctgcaatg

SEQ ID NO: 112601 - DNA, 33 bp, Homo sapien
gccaggccaagcggacagaacaagtccagagaa

SEQ ID NO: 112602 - DNA, 33 bp, Homo sapien
gccaggccaagcggacggaacaagtccagagaa

SEQ ID NO: 112603 - DNA, 33 bp, Homo sapien
ggtatgtactcagtaactggtttgctgggtcaa

SEQ ID NO: 112604 - DNA, 33 bp, Homo sapien
ggtatgtactcagtaattggtttgctgggtcaa

SEQ ID NO: 112605 - DNA, 33 bp, Homo sapien
caatgtaactttgaaacaggtactgtgttactg

SEQ ID NO: 112606 - DNA, 33 bp, Homo sapien
caatgtaactttgaaataggtactgtgttactg

SEQ ID NO: 112607 - DNA, 33 bp, Homo sapien
ttggataggatgacaaagttggatatagagttc

SEQ ID NO: 112608 - DNA, 33 bp, Homo sapien
ttggataggatgacaatgttggatatagagttc

SEQ ID NO: 112609 - DNA, 33 bp, Homo sapien
gccaaggcgggggtcgcaggcagccgttacgtt

SEQ ID NO: 112610 - DNA, 33 bp, Homo sapien
gccaaggcgggggtcggaggcagccgttacgtt

SEQ ID NO: 112611 - DNA, 33 bp, Homo sapien
ttgaattaaaaaagcacagtgacacccgtaagt

SEQ ID NO: 112612 - DNA, 33 bp, Homo sapien
ttgaattaaaaaagcatagtgacacccgtaagt

SEQ ID NO: 112613 - DNA, 33 bp, Homo sapien
atgaggcaggagaatacggtctggagagagtgg

SEQ ID NO: 112614 - DNA, 33 bp, Homo sapien
atgaggcaggagaatatggtctggagagagtgg

SEQ ID NO: 112615 - DNA, 33 bp, Homo sapien
agaaggaaaattaaccaacttcctgggcctgag

SEQ ID NO: 112616 - DNA, 33 bp, Homo sapien
agaaggaaaattaaccgacttcctgggcctgag

SEQ ID NO: 112617 - DNA, 33 bp, Homo sapien
attttagatagctgaacacttggtggttcctgg

SEQ ID NO: 112618 - DNA, 33 bp, Homo sapien
attttagatagctgaatacttggtggttcctgg

SEQ ID NO: 112619 - DNA, 33 bp, Homo sapien
gaagttccagagggccaaacttgggactggtgt

SEQ ID NO: 112620 - DNA, 33 bp, Homo sapien
gaagttccagagggccgaacttgggactggtgt

SEQ ID NO: 112621 - DNA, 33 bp, Homo sapien
ggaaaatccccacatacgtttggtcaagaaatc

SEQ ID NO: 112622 - DNA, 33 bp, Homo sapien
ggaaaatccccacatatgtttggtcaagaaatc

SEQ ID NO: 112623 - DNA, 33 bp, Homo sapien
aaggaacaatttcaaaactccagtcaaagaatg

SEQ ID NO: 112624 - DNA, 33 bp, Homo sapien
aaggaacaatttcaaatctccagtcaaagaatg

SEQ ID NO: 112625 - DNA, 33 bp, Homo sapien
ccatattaagattctacgaaatgcaccagatcc

SEQ ID NO: 112626 - DNA, 33 bp, Homo sapien
ccatattaagattctatgaaatgcaccagatcc

SEQ ID NO: 112627 - DNA, 33 bp, Homo sapien
atcaagatactattgaagagcgtggcacgcatt

SEQ ID NO: 112628 - DNA, 33 bp, Homo sapien
atcaagatactattgaggagcgtggcacgcatt

SEQ ID NO: 112629 - DNA, 33 bp, Homo sapien
atggaggaaaagcagacaatgaaccagcttgaa

SEQ ID NO: 112630 - DNA, 33 bp, Homo sapien
atggaggaaaagcagagaatgaaccagcttgaa

SEQ ID NO: 112631 - DNA, 33 bp, Homo sapien
ttcgacagagtcaagaaccaagacagatacacg

SEQ ID NO: 112632 - DNA, 33 bp, Homo sapien
ttcgacagagtcaagagccaagacagatacacg

SEQ ID NO: 112633 - DNA, 33 bp, Homo sapien
ttattataaggaaccccatgataattgttataa

SEQ ID NO: 112634 - DNA, 33 bp, Homo sapien
ttattataaggaaccctatgataattgttataa

SEQ ID NO: 112635 - DNA, 33 bp, Homo sapien
tacttcaaacgcttcacctttatatcccttttg

SEQ ID NO: 112636 - DNA, 33 bp, Homo sapien
tacttcaaacgcttcatctttatatcccttttg

SEQ ID NO: 112637 - DNA, 33 bp, Homo sapien
tactggttttatgatacagctggaaaaatttat

SEQ ID NO: 112638 - DNA, 33 bp, Homo sapien
tactggttttatgatatagctggaaaaatttat

SEQ ID NO: 112639 - DNA, 33 bp, Homo sapien
aactctcagcagaccaagaaaataaagggcatc

SEQ ID NO: 112640 - DNA, 33 bp, Homo sapien
aactctcagcagaccaggaaaataaagggcatc

SEQ ID NO: 112641 - DNA, 33 bp, Homo sapien
atcctttcaatctgcaagacttttacttctctt

SEQ ID NO: 112642 - DNA, 33 bp, Homo sapien
atcctttcaatctgcaggacttttacttctctt

SEQ ID NO: 112643 - DNA, 33 bp, Homo sapien
ataacagccattcagacatagcagtagccaata

SEQ ID NO: 112644 - DNA, 33 bp, Homo sapien
ataacagccattcagagatagcagtagccaata

SEQ ID NO: 112645 - DNA, 33 bp, Homo sapien
ggcctagcctgccattaaagtttgttcagagcc

SEQ ID NO: 112646 - DNA, 33 bp, Homo sapien
ggcctagcctgccattgaagtttgttcagagcc

SEQ ID NO: 112647 - DNA, 33 bp, Homo sapien
gggaggttgcccaataagctgcacaatgtggaa

SEQ ID NO: 112648 - DNA, 33 bp, Homo sapien
gggaggttgcccaatatgctgcacaatgtggaa

SEQ ID NO: 112649 - DNA, 33 bp, Homo sapien
gctgcattctaaggaaatgaggggtggaaataa

SEQ ID NO: 112650 - DNA, 33 bp, Homo sapien
gctgcattctaaggaagtgaggggtggaaataa

SEQ ID NO: 112651 - DNA, 33 bp, Homo sapien
gatgttctcttccaaccatcagggttccatgtt

SEQ ID NO: 112652 - DNA, 33 bp, Homo sapien
gatgttctcttccaactatcagggttccatgtt

SEQ ID NO: 112653 - DNA, 33 bp, Homo sapien
ttagctcacctcaataagccacaaactatggtc

SEQ ID NO: 112654 - DNA, 33 bp, Homo sapien
ttagctcacctcaataggccacaaactatggtc

SEQ ID NO: 112655 - DNA, 33 bp, Homo sapien
caaatctagcatatcacctgtttttataaagct

SEQ ID NO: 112656 - DNA, 33 bp, Homo sapien
caaatctagcatatcatctgtttttataaagct

SEQ ID NO: 112657 - DNA, 33 bp, Homo sapien
tcattgagcaatgaacaatcttttttacaactc

SEQ ID NO: 112658 - DNA, 33 bp, Homo sapien
tcattgagcaatgaaccatcttttttacaactc

SEQ ID NO: 112659 - DNA, 33 bp, Homo sapien
tgtctgatttatgtagcctaacagattggttca

SEQ ID NO: 112660 - DNA, 33 bp, Homo sapien
tgtctgatttatgtaggctaacagattggttca

SEQ ID NO: 112661 - DNA, 33 bp, Homo sapien
atacaagattcttgaacgtgtatccctgaagtc

SEQ ID NO: 112662 - DNA, 33 bp, Homo sapien
atacaagattcttgaatgtgtatccctgaagtc

SEQ ID NO: 112663 - DNA, 33 bp, Homo sapien
agctggattccaactaaagcggtctctcaggta

SEQ ID NO: 112664 - DNA, 33 bp, Homo sapien
agctggattccaactacagcggtctctcaggta

SEQ ID NO: 112665 - DNA, 33 bp, Homo sapien
ccttttgaatgaaagagcacactcaatggtcag

SEQ ID NO: 112666 - DNA, 33 bp, Homo sapien
ccttttgaatgaaagatcacactcaatggtcag

SEQ ID NO: 112667 - DNA, 33 bp, Homo sapien
aaaattgaatgagtaaatagctttctttcatga

SEQ ID NO: 112668 - DNA, 33 bp, Homo sapien
aaaattgaatgagtaagtagctttctttcatga

SEQ ID NO: 112669 - DNA, 33 bp, Homo sapien
tattcatatgcataacagtatacttggtgtaca

SEQ ID NO: 112670 - DNA, 33 bp, Homo sapien
tattcatatgcataactgtatacttggtgtaca

SEQ ID NO: 112671 - DNA, 33 bp, Homo sapien
aatttgcccatgaattaaatccagactggtggg

SEQ ID NO: 112672 - DNA, 33 bp, Homo sapien
aatttgcccatgaattgaatccagactggtggg

SEQ ID NO: 112673 - DNA, 33 bp, Homo sapien
tctacatcctttcacaccatctctgattgtatt

SEQ ID NO: 112674 - DNA, 33 bp, Homo sapien
tctacatcctttcacatcatctctgattgtatt

SEQ ID NO: 112675 - DNA, 33 bp, Homo sapien
tagaaaattctagacaaatcttacataaaagtc

SEQ ID NO: 112676 - DNA, 33 bp, Homo sapien
tagaaaattctagacagatcttacataaaagtc

SEQ ID NO: 112677 - DNA, 33 bp, Homo sapien
tggttctatagacacaaggtaaaggggcgagaa

SEQ ID NO: 112678 - DNA, 33 bp, Homo sapien
tggttctatagacacatggtaaaggggcgagaa

SEQ ID NO: 112679 - DNA, 33 bp, Homo sapien
gattcaatgggaaataccaaatgtttcaatata

SEQ ID NO: 112680 - DNA, 33 bp, Homo sapien
gattcaatgggaaatagcaaatgtttcaatata

SEQ ID NO: 112681 - DNA, 33 bp, Homo sapien
ttcattgacaccatgcaacttgaatcaagctag

SEQ ID NO: 112682 - DNA, 33 bp, Homo sapien
ttcattgacaccatgcgacttgaatcaagctag

SEQ ID NO: 112683 - DNA, 33 bp, Homo sapien
aattctaaattgcccaaccaactaaatgaacct

SEQ ID NO: 112684 - DNA, 33 bp, Homo sapien
aattctaaattgcccagccaactaaatgaacct

SEQ ID NO: 112685 - DNA, 33 bp, Homo sapien
tgacttttatttttcaatctcatccttatcaac

SEQ ID NO: 112686 - DNA, 33 bp, Homo sapien
tgacttttatttttcagtctcatccttatcaac

SEQ ID NO: 112687 - DNA, 33 bp, Homo sapien
ataatattaagcaagaaggtaacaaaatcagat

SEQ ID NO: 112688 - DNA, 33 bp, Homo sapien
ataatattaagcaagagggtaacaaaatcagat

SEQ ID NO: 112689 - DNA, 33 bp, Homo sapien
gttcatcaaaatttccagaaagatgcttaaagc

SEQ ID NO: 112690 - DNA, 33 bp, Homo sapien
gttcatcaaaatttcccgaaagatgcttaaagc

SEQ ID NO: 112691 - DNA, 33 bp, Homo sapien
agagtttcttatcctaaaagcaatgttagattt

SEQ ID NO: 112692 - DNA, 33 bp, Homo sapien
agagtttcttatcctagaagcaatgttagattt

SEQ ID NO: 112693 - DNA, 33 bp, Homo sapien
gagtgtttctcaaaaaaaaaacatgctctggaa

SEQ ID NO: 112694 - DNA, 33 bp, Homo sapien
gagtgtttctcaaaaataaaacatgctctggaa

SEQ ID NO: 112695 - DNA, 33 bp, Homo sapien
caacagtcttcccaaagatagtactacctctag

SEQ ID NO: 112696 - DNA, 33 bp, Homo sapien
caacagtcttcccaaatatagtactacctctag

SEQ ID NO: 112697 - DNA, 33 bp, Homo sapien
ccttgttggtgaaccactcattcaacacacaat

SEQ ID NO: 112698 - DNA, 33 bp, Homo sapien
ccttgttggtgaaccattcattcaacacacaat

SEQ ID NO: 112699 - DNA, 33 bp, Homo sapien
taacaccctgaaacaccagattcctttccttta

SEQ ID NO: 112700 - DNA, 33 bp, Homo sapien
taacaccctgaaacactagattcctttccttta

SEQ ID NO: 112701 - DNA, 33 bp, Homo sapien
ttaagacaagtggaaagtccaaccactacatta

SEQ ID NO: 112702 - DNA, 33 bp, Homo sapien
ttaagacaagtggaaattccaaccactacatta

SEQ ID NO: 112703 - DNA, 33 bp, Homo sapien
aacaataaatggtgaactggaactcacccatgc

SEQ ID NO: 112704 - DNA, 33 bp, Homo sapien
aacaataaatggtgaattggaactcacccatgc

SEQ ID NO: 112705 - DNA, 33 bp, Homo sapien
agaaactggaagataaagatgctgtctctcttg

SEQ ID NO: 112706 - DNA, 33 bp, Homo sapien
agaaactggaagataaggatgctgtctctcttg

SEQ ID NO: 112707 - DNA, 33 bp, Homo sapien
attgatttcaaaatcaatgaaacagagtggcta

SEQ ID NO: 112708 - DNA, 33 bp, Homo sapien
attgatttcaaaatcagtgaaacagagtggcta

SEQ ID NO: 112709 - DNA, 33 bp, Homo sapien
gaggactgctaacctacgaggtttcatctgcat

SEQ ID NO: 112710 - DNA, 33 bp, Homo sapien
gaggactgctaacctatgaggtttcatctgcat

SEQ ID NO: 112711 - DNA, 33 bp, Homo sapien
agcagcttggaacttacgcagcccaaatatcta

SEQ ID NO: 112712 - DNA, 33 bp, Homo sapien
agcagcttggaacttatgcagcccaaatatcta

SEQ ID NO: 112713 - DNA, 33 bp, Homo sapien
gttacttttttcatcacgtttctcataaaattc

SEQ ID NO: 112714 - DNA, 33 bp, Homo sapien
gttacttttttcatcatgtttctcataaaattc

SEQ ID NO: 112715 - DNA, 33 bp, Homo sapien
gggaccaatttcatgcagaatctttaattccaa

SEQ ID NO: 112716 - DNA, 33 bp, Homo sapien
gggaccaatttcatgcggaatctttaattccaa

SEQ ID NO: 112717 - DNA, 33 bp, Homo sapien
ctggaaaccaacatgacgatgaaagagacacat

SEQ ID NO: 112718 - DNA, 33 bp, Homo sapien
ctggaaaccaacatgatgatgaaagagacacat

SEQ ID NO: 112719 - DNA, 33 bp, Homo sapien
aaaacacataacaagagaaaaactagccaaatg

SEQ ID NO: 112720 - DNA, 33 bp, Homo sapien
aaaacacataacaagataaaaactagccaaatg

SEQ ID NO: 112721 - DNA, 33 bp, Homo sapien
cctagtatataaacaaggcaatttacttagcct

SEQ ID NO: 112722 - DNA, 33 bp, Homo sapien
cctagtatataaacaatgcaatttacttagcct

SEQ ID NO: 112723 - DNA, 33 bp, Homo sapien
gagagtaaatcaagcacgaaaaggggtggaaat

SEQ ID NO: 112724 - DNA, 33 bp, Homo sapien
gagagtaaatcaagcaggaaaaggggtggaaat

SEQ ID NO: 112725 - DNA, 33 bp, Homo sapien
aaactcttagacatggcaatgtgcctcagtttt

SEQ ID NO: 112726 - DNA, 33 bp, Homo sapien
aaactcttagacatggtaatgtgcctcagtttt

SEQ ID NO: 112727 - DNA, 33 bp, Homo sapien
atttattaaaatgccaaaatgattacagttcta

SEQ ID NO: 112728 - DNA, 33 bp, Homo sapien
atttattaaaatgccagaatgattacagttcta

SEQ ID NO: 112729 - DNA, 33 bp, Homo sapien
cagttctcaaggttcgccatgagcattgataag

SEQ ID NO: 112730 - DNA, 33 bp, Homo sapien
cagttctcaaggttcgtcatgagcattgataag

SEQ ID NO: 112731 - DNA, 33 bp, Homo sapien
agtatgatactttcagaacttgacaataatgcc

SEQ ID NO: 112732 - DNA, 33 bp, Homo sapien
agtatgatactttcaggacttgacaataatgcc

SEQ ID NO: 112733 - DNA, 33 bp, Homo sapien
aatatatatgttatacagcccacattttgttag

SEQ ID NO: 112734 - DNA, 33 bp, Homo sapien
aatatatatgttatacggcccacattttgttag

SEQ ID NO: 112735 - DNA, 33 bp, Homo sapien
tagcaccatttattgaaaaaactatctttgctc

SEQ ID NO: 112736 - DNA, 33 bp, Homo sapien
tagcaccatttattgagaaaactatctttgctc

SEQ ID NO: 112737 - DNA, 33 bp, Homo sapien
taacttggaaatggccaagatgtccttcagtag

SEQ ID NO: 112738 - DNA, 33 bp, Homo sapien
taacttggaaatggccgagatgtccttcagtag

SEQ ID NO: 112739 - DNA, 33 bp, Homo sapien
agcaacttgttgaaaactagagcaaaggtcact

SEQ ID NO: 112740 - DNA, 33 bp, Homo sapien
agcaacttgttgaaaattagagcaaaggtcact

SEQ ID NO: 112741 - DNA, 33 bp, Homo sapien
caatagtgaaatgcacaataaggtccaggctga

SEQ ID NO: 112742 - DNA, 33 bp, Homo sapien
caatagtgaaatgcacgataaggtccaggctga

SEQ ID NO: 112743 - DNA, 33 bp, Homo sapien
cttgcttatttgacaaatgtactttcatggaca

SEQ ID NO: 112744 - DNA, 33 bp, Homo sapien
cttgcttatttgacaagtgtactttcatggaca

SEQ ID NO: 112745 - DNA, 33 bp, Homo sapien
aattgcagggataaataaagtagtgcatagtat

SEQ ID NO: 112746 - DNA, 33 bp, Homo sapien
aattgcagggataaatgaagtagtgcatagtat

SEQ ID NO: 112747 - DNA, 33 bp, Homo sapien
atgtggcatattttaaccactcagtgaatttta

SEQ ID NO: 112748 - DNA, 33 bp, Homo sapien
atgtggcatattttaagcactcagtgaatttta

SEQ ID NO: 112749 - DNA, 33 bp, Homo sapien
taccagaagttgtcaaaaatatgaaacaactgg

SEQ ID NO: 112750 - DNA, 33 bp, Homo sapien
taccagaagttgtcaacaatatgaaacaactgg

SEQ ID NO: 112751 - DNA, 33 bp, Homo sapien
gtatgacaaaaatcacaaacttagaattaaagc

SEQ ID NO: 112752 - DNA, 33 bp, Homo sapien
gtatgacaaaaatcacgaacttagaattaaagc

SEQ ID NO: 112753 - DNA, 33 bp, Homo sapien
gtaaattctgatacaaccaagttttcctcctct

SEQ ID NO: 112754 - DNA, 33 bp, Homo sapien
gtaaattctgatacaagcaagttttcctcctct

SEQ ID NO: 112755 - DNA, 33 bp, Homo sapien
aggactatataggaaactcgaaggatgattagt

SEQ ID NO: 112756 - DNA, 33 bp, Homo sapien
aggactatataggaaattcgaaggatgattagt

SEQ ID NO: 112757 - DNA, 33 bp, Homo sapien
ggctggaacctgacaacgaattatagctgtcta

SEQ ID NO: 112758 - DNA, 33 bp, Homo sapien
ggctggaacctgacaatgaattatagctgtcta

SEQ ID NO: 112759 - DNA, 33 bp, Homo sapien
ccacatggccgacctgaaatcattggggtccga

SEQ ID NO: 112760 - DNA, 33 bp, Homo sapien
ccacatggccgacctggaatcattggggtccga

SEQ ID NO: 112761 - DNA, 33 bp, Homo sapien
cacaaacaggttacataatgcacagaattgtgt

SEQ ID NO: 112762 - DNA, 33 bp, Homo sapien
cacaaacaggttacattatgcacagaattgtgt

SEQ ID NO: 112763 - DNA, 33 bp, Homo sapien
aataaattgtagtttacgtatttgcaatcattt

SEQ ID NO: 112764 - DNA, 33 bp, Homo sapien
aataaattgtagtttatgtatttgcaatcattt

SEQ ID NO: 112765 - DNA, 33 bp, Homo sapien
tttccttgaaaaaaaaaatgtagctaatgggca

SEQ ID NO: 112766 - DNA, 33 bp, Homo sapien
tttccttgaaaaaaaatatgtagctaatgggca

SEQ ID NO: 112767 - DNA, 33 bp, Homo sapien
ccaaaatttgactgtgaagttcatggcctgtga

SEQ ID NO: 112768 - DNA, 33 bp, Homo sapien
ccaaaatttgactgtggagttcatggcctgtga

SEQ ID NO: 112769 - DNA, 33 bp, Homo sapien
gatgtttttgtaacccacagcagacagacagac

SEQ ID NO: 112770 - DNA, 33 bp, Homo sapien
gatgtttttgtaaccctcagcagacagacagac

SEQ ID NO: 112771 - DNA, 33 bp, Homo sapien
aactgaggttggcccacggtcatattgagaaat

SEQ ID NO: 112772 - DNA, 33 bp, Homo sapien
aactgaggttggcccatggtcatattgagaaat

SEQ ID NO: 112773 - DNA, 33 bp, Homo sapien
ggaaatttcttcatgacgcaatgaggtaacaga

SEQ ID NO: 112774 - DNA, 33 bp, Homo sapien
ggaaatttcttcatgatgcaatgaggtaacaga

SEQ ID NO: 112775 - DNA, 33 bp, Homo sapien
ctttaaccatgagtaccgaaccttgctgaattt

SEQ ID NO: 112776 - DNA, 33 bp, Homo sapien
ctttaaccatgagtactgaaccttgctgaattt

SEQ ID NO: 112777 - DNA, 33 bp, Homo sapien
agtttgagagaagagaaaaaattgtgaaatagt

SEQ ID NO: 112778 - DNA, 33 bp, Homo sapien
agtttgagagaagagacaaaattgtgaaatagt

SEQ ID NO: 112779 - DNA, 33 bp, Homo sapien
tttactttgtggtgtacgatttgaatgaaacta

SEQ ID NO: 112780 - DNA, 33 bp, Homo sapien
tttactttgtggtgtatgatttgaatgaaacta

SEQ ID NO: 112781 - DNA, 33 bp, Homo sapien
tcctttatccaggagagtctatggttctacaag

SEQ ID NO: 112782 - DNA, 33 bp, Homo sapien
tcctttatccaggagattctatggttctacaag

SEQ ID NO: 112783 - DNA, 33 bp, Homo sapien
aaagttttcagagaacacaaaaggctcaatatt

SEQ ID NO: 112784 - DNA, 33 bp, Homo sapien
aaagttttcagagaacgcaaaaggctcaatatt

SEQ ID NO: 112785 - DNA, 33 bp, Homo sapien
tattgctacaaatttacaattgccaaatacttt

SEQ ID NO: 112786 - DNA, 33 bp, Homo sapien
tattgctacaaatttataattgccaaatacttt

SEQ ID NO: 112787 - DNA, 33 bp, Homo sapien
aagaagattcccttagaagtgtttgaagcaaaa

SEQ ID NO: 112788 - DNA, 33 bp, Homo sapien
aagaagattcccttagtagtgtttgaagcaaaa

SEQ ID NO: 112789 - DNA, 33 bp, Homo sapien
aacaagtgtgttgaagcaaagttaatgagatct

SEQ ID NO: 112790 - DNA, 33 bp, Homo sapien
aacaagtgtgttgaagtaaagttaatgagatct

SEQ ID NO: 112791 - DNA, 33 bp, Homo sapien
gtcttccttgatggaaacctgtctatgccctag

SEQ ID NO: 112792 - DNA, 33 bp, Homo sapien
gtcttccttgatggaagcctgtctatgccctag

SEQ ID NO: 112793 - DNA, 33 bp, Homo sapien
attccaggaacaaatcactcttgacttgtcaat

SEQ ID NO: 112794 - DNA, 33 bp, Homo sapien
attccaggaacaaatcgctcttgacttgtcaat

SEQ ID NO: 112795 - DNA, 33 bp, Homo sapien
acttaacgtgctttaaatctccagcttattatt

SEQ ID NO: 112796 - DNA, 33 bp, Homo sapien
acttaacgtgctttaagtctccagcttattatt

SEQ ID NO: 112797 - DNA, 33 bp, Homo sapien
tgaggtccagaatgacaaagtaattatgccacg

SEQ ID NO: 112798 - DNA, 33 bp, Homo sapien
tgaggtccagaatgacgaagtaattatgccacg

SEQ ID NO: 112799 - DNA, 33 bp, Homo sapien
ttcctcttacttaactgaaagtccatgctcaaa

SEQ ID NO: 112800 - DNA, 33 bp, Homo sapien
ttcctcttacttaacttaaagtccatgctcaaa

SEQ ID NO: 112801 - DNA, 33 bp, Homo sapien
gatgtttccttcaaccactttttcttcaaatat

SEQ ID NO: 112802 - DNA, 33 bp, Homo sapien
gatgtttccttcaaccgctttttcttcaaatat

SEQ ID NO: 112803 - DNA, 33 bp, Homo sapien
ttgtttgaggcttcgacgtgtttttcatattca

SEQ ID NO: 112804 - DNA, 33 bp, Homo sapien
ttgtttgaggcttcgatgtgtttttcatattca

SEQ ID NO: 112805 - DNA, 33 bp, Homo sapien
ttctgggctcacaataaacaaaatagaaaataa

SEQ ID NO: 112806 - DNA, 33 bp, Homo sapien
ttctgggctcacaatagacaaaatagaaaataa

SEQ ID NO: 112807 - DNA, 33 bp, Homo sapien
tgagggagctctgctcaatgtcattttccctca

SEQ ID NO: 112808 - DNA, 33 bp, Homo sapien
tgagggagctctgctcgatgtcattttccctca

SEQ ID NO: 112809 - DNA, 33 bp, Homo sapien
tgcctaagggaaaaaaaggtggataatatactc

SEQ ID NO: 112810 - DNA, 33 bp, Homo sapien
tgcctaagggaaaaaacggtggataatatactc

SEQ ID NO: 112811 - DNA, 33 bp, Homo sapien
gtctcttctgccactacgtacaaggaaaccgtg

SEQ ID NO: 112812 - DNA, 33 bp, Homo sapien
gtctcttctgccactatgtacaaggaaaccgtg

SEQ ID NO: 112813 - DNA, 33 bp, Homo sapien
ctagcttacaactcaacggacacagcagcttcc

SEQ ID NO: 112814 - DNA, 33 bp, Homo sapien
ctagcttacaactcaatggacacagcagcttcc

SEQ ID NO: 112815 - DNA, 33 bp, Homo sapien
ttctcatgagtcacataaggcaacaacctgagg

SEQ ID NO: 112816 - DNA, 33 bp, Homo sapien
ttctcatgagtcacatgaggcaacaacctgagg

SEQ ID NO: 112817 - DNA, 33 bp, Homo sapien
aaagatcaaaagtccactcttgaaacaccaact

SEQ ID NO: 112818 - DNA, 33 bp, Homo sapien
aaagatcaaaagtccattcttgaaacaccaact

SEQ ID NO: 112819 - DNA, 33 bp, Homo sapien
tgtttcctctggaaaacgctgttaaatgcagaa

SEQ ID NO: 112820 - DNA, 33 bp, Homo sapien
tgtttcctctggaaaatgctgttaaatgcagaa

SEQ ID NO: 112821 - DNA, 33 bp, Homo sapien
ctttctgcattcacccaaacttgaaactactta

SEQ ID NO: 112822 - DNA, 33 bp, Homo sapien
ctttctgcattcaccccaacttgaaactactta

SEQ ID NO: 112823 - DNA, 33 bp, Homo sapien
tggaagaagatacttcccttttcatgctcggaa

SEQ ID NO: 112824 - DNA, 33 bp, Homo sapien
tggaagaagatacttctcttttcatgctcggaa

SEQ ID NO: 112825 - DNA, 33 bp, Homo sapien
aggagccagagataaaactgaagtgttttcgtg

SEQ ID NO: 112826 - DNA, 33 bp, Homo sapien
aggagccagagataaacctgaagtgttttcgtg

SEQ ID NO: 112827 - DNA, 33 bp, Homo sapien
gaagaggaaacagagcacaaagatggaaagaaa

SEQ ID NO: 112828 - DNA, 33 bp, Homo sapien
gaagaggaaacagagcgcaaagatggaaagaaa

SEQ ID NO: 112829 - DNA, 33 bp, Homo sapien
gagtagcactgcccaaataaaactcatttaact

SEQ ID NO: 112830 - DNA, 33 bp, Homo sapien
gagtagcactgcccaattaaaactcatttaact

SEQ ID NO: 112831 - DNA, 33 bp, Homo sapien
ttatgtttcagcagaactatccattcaaaatcc

SEQ ID NO: 112832 - DNA, 33 bp, Homo sapien
ttatgtttcagcagaattatccattcaaaatcc

SEQ ID NO: 112833 - DNA, 33 bp, Homo sapien
caatactttaagaccacagaaatgttcaccagc

SEQ ID NO: 112834 - DNA, 33 bp, Homo sapien
caatactttaagaccagagaaatgttcaccagc

SEQ ID NO: 112835 - DNA, 33 bp, Homo sapien
acaatcatttttgggcaacattgcaaataagca

SEQ ID NO: 112836 - DNA, 33 bp, Homo sapien
acaatcatttttgggccacattgcaaataagca

SEQ ID NO: 112837 - DNA, 33 bp, Homo sapien
caaaaatgattgtgtaagtattagtgacatagt

SEQ ID NO: 112838 - DNA, 33 bp, Homo sapien
caaaaatgattgtgtaggtattagtgacatagt

SEQ ID NO: 112839 - DNA, 33 bp, Homo sapien
tagtgacatagttgtgacaagaagccaagccag

SEQ ID NO: 112840 - DNA, 33 bp, Homo sapien
tagtgacatagttgtggcaagaagccaagccag

SEQ ID NO: 112841 - DNA, 33 bp, Homo sapien
cacaactgattatgtgaaacagtaagggcctgt

SEQ ID NO: 112842 - DNA, 33 bp, Homo sapien
cacaactgattatgtggaacagtaagggcctgt

SEQ ID NO: 112843 - DNA, 33 bp, Homo sapien
aaagttgtctggattaagttaacacagtaaagc

SEQ ID NO: 112844 - DNA, 33 bp, Homo sapien
aaagttgtctggattaggttaacacagtaaagc

SEQ ID NO: 112845 - DNA, 33 bp, Homo sapien
gctctaccatgctccactctcacggtccttatt

SEQ ID NO: 112846 - DNA, 33 bp, Homo sapien
gctctaccatgctccagtctcacggtccttatt

SEQ ID NO: 112847 - DNA, 33 bp, Homo sapien
taacgtgtgttgaaaactgagttaaatctgctc

SEQ ID NO: 112848 - DNA, 33 bp, Homo sapien
taacgtgtgttgaaaattgagttaaatctgctc

SEQ ID NO: 112849 - DNA, 33 bp, Homo sapien
caaccttgacactgaaaaacttttggagacatg

SEQ ID NO: 112850 - DNA, 33 bp, Homo sapien
caaccttgacactgaagaacttttggagacatg

SEQ ID NO: 112851 - DNA, 33 bp, Homo sapien
taagattctgaggaaactgtaagcaaaactcat

SEQ ID NO: 112852 - DNA, 33 bp, Homo sapien
taagattctgaggaaattgtaagcaaaactcat

SEQ ID NO: 112853 - DNA, 33 bp, Homo sapien
taggttgaaataagaaaccaattaggtaggcaa

SEQ ID NO: 112854 - DNA, 33 bp, Homo sapien
taggttgaaataagaatccaattaggtaggcaa

SEQ ID NO: 112855 - DNA, 33 bp, Homo sapien
ctgtttgctcaagtcaaattaaagaaacacaca

SEQ ID NO: 112856 - DNA, 33 bp, Homo sapien
ctgtttgctcaagtcacattaaagaaacacaca

SEQ ID NO: 112857 - DNA, 33 bp, Homo sapien
cacccctcattggaagaagaatatcacagtaca

SEQ ID NO: 112858 - DNA, 33 bp, Homo sapien
cacccctcattggaaggagaatatcacagtaca

SEQ ID NO: 112859 - DNA, 33 bp, Homo sapien
gctcaggagcctcagaataatgttctctctctg

SEQ ID NO: 112860 - DNA, 33 bp, Homo sapien
gctcaggagcctcagagtaatgttctctctctg

SEQ ID NO: 112861 - DNA, 33 bp, Homo sapien
ggcaatcctggacctacattcccccatggcagc

SEQ ID NO: 112862 - DNA, 33 bp, Homo sapien
ggcaatcctggacctatattcccccatggcagc

SEQ ID NO: 112863 - DNA, 33 bp, Homo sapien
ggtcatggctatccaccagagttacaaagacct

SEQ ID NO: 112864 - DNA, 33 bp, Homo sapien
ggtcatggctatccactagagttacaaagacct

SEQ ID NO: 112865 - DNA, 33 bp, Homo sapien
ctacagcaagtaaaaacgagaagagatctaaga

SEQ ID NO: 112866 - DNA, 33 bp, Homo sapien
ctacagcaagtaaaaatgagaagagatctaaga

SEQ ID NO: 112867 - DNA, 33 bp, Homo sapien
ttctgatcaccagcagacatagattcctttgag

SEQ ID NO: 112868 - DNA, 33 bp, Homo sapien
ttctgatcaccagcagtcatagattcctttgag

SEQ ID NO: 112869 - DNA, 33 bp, Homo sapien
cgtgtcatcctgtaggaagttcttatgtgatat

SEQ ID NO: 112870 - DNA, 33 bp, Homo sapien
cgtgtcatcctgtagggagttcttatgtgatat

SEQ ID NO: 112871 - DNA, 33 bp, Homo sapien
aaaagtatatgaagaaaaaagatcgtgtaaaaa

SEQ ID NO: 112872 - DNA, 33 bp, Homo sapien
aaaagtatatgaagaagaaagatcgtgtaaaaa

SEQ ID NO: 112873 - DNA, 33 bp, Homo sapien
gataagaatgtgaaaactgacccaaagaaccac

SEQ ID NO: 112874 - DNA, 33 bp, Homo sapien
gataagaatgtgaaaattgacccaaagaaccac

SEQ ID NO: 112875 - DNA, 33 bp, Homo sapien
acagaaagagataaccaaagcagacagtctaga

SEQ ID NO: 112876 - DNA, 33 bp, Homo sapien
acagaaagagataaccgaagcagacagtctaga

SEQ ID NO: 112877 - DNA, 33 bp, Homo sapien
gagcctacttgcccaacttctgagatattatcg

SEQ ID NO: 112878 - DNA, 33 bp, Homo sapien
gagcctacttgcccaatttctgagatattatcg

SEQ ID NO: 112879 - DNA, 33 bp, Homo sapien
gtgtgtaaaacagtcccaacagcatacaagatg

SEQ ID NO: 112880 - DNA, 33 bp, Homo sapien
gtgtgtaaaacagtcctaacagcatacaagatg

SEQ ID NO: 112881 - DNA, 33 bp, Homo sapien
aagatggagtccgggaaagcaataaagatacca

SEQ ID NO: 112882 - DNA, 33 bp, Homo sapien
aagatggagtccgggagagcaataaagatacca

SEQ ID NO: 112883 - DNA, 33 bp, Homo sapien
tgccagctacttttcaaaatatatctaggatct

SEQ ID NO: 112884 - DNA, 33 bp, Homo sapien
tgccagctacttttcagaatatatctaggatct

SEQ ID NO: 112885 - DNA, 33 bp, Homo sapien
ctaagccattaaccacaagcccgctaaccagct

SEQ ID NO: 112886 - DNA, 33 bp, Homo sapien
ctaagccattaaccacgagcccgctaaccagct

SEQ ID NO: 112887 - DNA, 33 bp, Homo sapien
tcaggcaggttcttccaggaaaaacacaactga

SEQ ID NO: 112888 - DNA, 33 bp, Homo sapien
tcaggcaggttcttccgggaaaaacacaactga

SEQ ID NO: 112889 - DNA, 33 bp, Homo sapien
ggttacaacaaatgaacatctgaactgatctct

SEQ ID NO: 112890 - DNA, 33 bp, Homo sapien
ggttacaacaaatgaatatctgaactgatctct

SEQ ID NO: 112891 - DNA, 33 bp, Homo sapien
actcttgctttgccacgaccgggaatcctcttc

SEQ ID NO: 112892 - DNA, 33 bp, Homo sapien
actcttgctttgccactaccgggaatcctcttc

SEQ ID NO: 112893 - DNA, 33 bp, Homo sapien
attcagcaaagtctcacgttataaaatcaatgt

SEQ ID NO: 112894 - DNA, 33 bp, Homo sapien
attcagcaaagtctcatgttataaaatcaatgt

SEQ ID NO: 112895 - DNA, 33 bp, Homo sapien
ctagtatattttggcaacagaggtatttgctat

SEQ ID NO: 112896 - DNA, 33 bp, Homo sapien
ctagtatattttggcatcagaggtatttgctat

SEQ ID NO: 112897 - DNA, 33 bp, Homo sapien
tatatttaaccaacatcataagcagactctaga

SEQ ID NO: 112898 - DNA, 33 bp, Homo sapien
tatatttaaccaacatgataagcagactctaga

SEQ ID NO: 112899 - DNA, 33 bp, Homo sapien
catttctgtacaaccaagcaaagcagctccagt

SEQ ID NO: 112900 - DNA, 33 bp, Homo sapien
catttctgtacaaccaggcaaagcagctccagt

SEQ ID NO: 112901 - DNA, 33 bp, Homo sapien
agataccggttgaagcaaagtggaagtggacat

SEQ ID NO: 112902 - DNA, 33 bp, Homo sapien
agataccggttgaagccaagtggaagtggacat

SEQ ID NO: 112903 - DNA, 33 bp, Homo sapien
gcagcacccacttcaaccctacaaataggttct

SEQ ID NO: 112904 - DNA, 33 bp, Homo sapien
gcagcacccacttcaatcctacaaataggttct

SEQ ID NO: 112905 - DNA, 33 bp, Homo sapien
catgaagggtcagagaagataagtaacagcact

SEQ ID NO: 112906 - DNA, 33 bp, Homo sapien
catgaagggtcagagaggataagtaacagcact

SEQ ID NO: 112907 - DNA, 33 bp, Homo sapien
ggtgctagttgtttacaatcatttctgtttaat

SEQ ID NO: 112908 - DNA, 33 bp, Homo sapien
ggtgctagttgtttaccatcatttctgtttaat

SEQ ID NO: 112909 - DNA, 33 bp, Homo sapien
ggtttcacgtaatatcactttttctaaaatgca

SEQ ID NO: 112910 - DNA, 33 bp, Homo sapien
ggtttcacgtaatatcgctttttctaaaatgca

SEQ ID NO: 112911 - DNA, 33 bp, Homo sapien
tctttatcgtgactgggatgctcttatttattt

SEQ ID NO: 112912 - DNA, 33 bp, Homo sapien
tctttatcgtgactggtatgctcttatttattt

SEQ ID NO: 112913 - DNA, 33 bp, Homo sapien
cacttctgaggttccacatcaaattattatagc

SEQ ID NO: 112914 - DNA, 33 bp, Homo sapien
cacttctgaggttccatatcaaattattatagc

SEQ ID NO: 112915 - DNA, 33 bp, Homo sapien
tattttggtctgatacacagaagcttcatacat

SEQ ID NO: 112916 - DNA, 33 bp, Homo sapien
tattttggtctgatacgcagaagcttcatacat

SEQ ID NO: 112917 - DNA, 33 bp, Homo sapien
ggttgtccctctgaacagctctcaaaatatgtg

SEQ ID NO: 112918 - DNA, 33 bp, Homo sapien
ggttgtccctctgaaccgctctcaaaatatgtg

SEQ ID NO: 112919 - DNA, 33 bp, Homo sapien
gttttgtacttgggaccggtcagtcgtgacaat

SEQ ID NO: 112920 - DNA, 33 bp, Homo sapien
gttttgtacttgggacgggtcagtcgtgacaat

SEQ ID NO: 112921 - DNA, 33 bp, Homo sapien
tcctctcatctgtggcaaccttgctgaggctgc

SEQ ID NO: 112922 - DNA, 33 bp, Homo sapien
tcctctcatctgtggcgaccttgctgaggctgc

SEQ ID NO: 112923 - DNA, 33 bp, Homo sapien
gaacccgcccattgacagatgagagcttcggtg

SEQ ID NO: 112924 - DNA, 33 bp, Homo sapien
gaacccgcccattgacggatgagagcttcggtg

SEQ ID NO: 112925 - DNA, 33 bp, Homo sapien
tgaaggctgatactggaacccatttagcccgcc

SEQ ID NO: 112926 - DNA, 33 bp, Homo sapien
tgaaggctgatactgggacccatttagcccgcc

SEQ ID NO: 112927 - DNA, 33 bp, Homo sapien
tttcaattagagtccaactgaatacaaattctc

SEQ ID NO: 112928 - DNA, 33 bp, Homo sapien
tttcaattagagtccagctgaatacaaattctc

SEQ ID NO: 112929 - DNA, 33 bp, Homo sapien
tcagtttgtgatttcacgtcagagtattccaca

SEQ ID NO: 112930 - DNA, 33 bp, Homo sapien
tcagtttgtgatttcatgtcagagtattccaca

SEQ ID NO: 112931 - DNA, 33 bp, Homo sapien
tttttcaaattccaggccccagaaaaaatttca

SEQ ID NO: 112932 - DNA, 33 bp, Homo sapien
tttttcaaattccaggtcccagaaaaaatttca

SEQ ID NO: 112933 - DNA, 33 bp, Homo sapien
aaaattcttccaaaagaaatatcctggccttat

SEQ ID NO: 112934 - DNA, 33 bp, Homo sapien
aaaattcttccaaaagcaatatcctggccttat

SEQ ID NO: 112935 - DNA, 33 bp, Homo sapien
taatggtctacactgaaccaaatggaaattata

SEQ ID NO: 112936 - DNA, 33 bp, Homo sapien
taatggtctacactgagccaaatggaaattata

SEQ ID NO: 112937 - DNA, 33 bp, Homo sapien
aaaggccttgttggtacgtcctgcttctgggta

SEQ ID NO: 112938 - DNA, 33 bp, Homo sapien
aaaggccttgttggtaggtcctgcttctgggta

SEQ ID NO: 112939 - DNA, 33 bp, Homo sapien
gatactatgaaaatcaatccaaaacatcgtgat

SEQ ID NO: 112940 - DNA, 33 bp, Homo sapien
gatactatgaaaatcagtccaaaacatcgtgat

SEQ ID NO: 112941 - DNA, 33 bp, Homo sapien
ttatgtcactacaaaacgcctcaggctcacagc

SEQ ID NO: 112942 - DNA, 33 bp, Homo sapien
ttatgtcactacaaaatgcctcaggctcacagc

SEQ ID NO: 112943 - DNA, 33 bp, Homo sapien
tatgtgactgattagaaaggaagattcatgaaa

SEQ ID NO: 112944 - DNA, 33 bp, Homo sapien
tatgtgactgattagagaggaagattcatgaaa

SEQ ID NO: 112945 - DNA, 33 bp, Homo sapien
gtcacaagaaacaggacaacactaccccagtat

SEQ ID NO: 112946 - DNA, 33 bp, Homo sapien
gtcacaagaaacaggataacactaccccagtat

SEQ ID NO: 112947 - DNA, 33 bp, Homo sapien
gctttaacagagaaaaagagtgtcttgttatct

SEQ ID NO: 112948 - DNA, 33 bp, Homo sapien
gctttaacagagaaaaggagtgtcttgttatct

SEQ ID NO: 112949 - DNA, 33 bp, Homo sapien
caatggcatgactgaccactattaggcatcgaa

SEQ ID NO: 112950 - DNA, 33 bp, Homo sapien
caatggcatgactgactactattaggcatcgaa

SEQ ID NO: 112951 - DNA, 33 bp, Homo sapien
agtacctgctctcttgaagaaacagtgctgtgc

SEQ ID NO: 112952 - DNA, 33 bp, Homo sapien
agtacctgctctcttggagaaacagtgctgtgc

SEQ ID NO: 112953 - DNA, 33 bp, Homo sapien
gagaagcacaaaaatgaatctaagaaaaccaaa

SEQ ID NO: 112954 - DNA, 33 bp, Homo sapien
gagaagcacaaaaatggatctaagaaaaccaaa

SEQ ID NO: 112955 - DNA, 33 bp, Homo sapien
ctagggcccagtagataaaatgctatgattggt

SEQ ID NO: 112956 - DNA, 33 bp, Homo sapien
ctagggcccagtagatgaaatgctatgattggt

SEQ ID NO: 112957 - DNA, 33 bp, Homo sapien
tcaactcaatgagttgaaaaaaagtaataagac

SEQ ID NO: 112958 - DNA, 33 bp, Homo sapien
tcaactcaatgagttggaaaaaagtaataagac

SEQ ID NO: 112959 - DNA, 33 bp, Homo sapien
atcaggagttagttgcagacactcgaccctcag

SEQ ID NO: 112960 - DNA, 33 bp, Homo sapien
atcaggagttagttgccgacactcgaccctcag

SEQ ID NO: 112961 - DNA, 33 bp, Homo sapien
accttggaagaaattcaatctccaattatctta

SEQ ID NO: 112962 - DNA, 33 bp, Homo sapien
accttggaagaaattcgatctccaattatctta

SEQ ID NO: 112963 - DNA, 33 bp, Homo sapien
aaaatttaagtaacaccctgcaaggaattttct

SEQ ID NO: 112964 - DNA, 33 bp, Homo sapien
aaaatttaagtaacactctgcaaggaattttct

SEQ ID NO: 112965 - DNA, 33 bp, Homo sapien
catttcaccatatgaaccttacacaatatgact

SEQ ID NO: 112966 - DNA, 33 bp, Homo sapien
catttcaccatatgaatcttacacaatatgact

SEQ ID NO: 112967 - DNA, 33 bp, Homo sapien
aatggttaaggtggaaagcaatgattaattggg

SEQ ID NO: 112968 - DNA, 33 bp, Homo sapien
aatggttaaggtggaaggcaatgattaattggg

SEQ ID NO: 112969 - DNA, 33 bp, Homo sapien
aattaaagaagtaaaaatacaatggtggaagca

SEQ ID NO: 112970 - DNA, 33 bp, Homo sapien
aattaaagaagtaaaagtacaatggtggaagca

SEQ ID NO: 112971 - DNA, 33 bp, Homo sapien
ccttattttctaccaactcagtacctgtacctt

SEQ ID NO: 112972 - DNA, 33 bp, Homo sapien
ccttattttctaccaattcagtacctgtacctt

SEQ ID NO: 112973 - DNA, 33 bp, Homo sapien
ctgaaaatatagggaactgtgcaatatcttttg

SEQ ID NO: 112974 - DNA, 33 bp, Homo sapien
ctgaaaatatagggaattgtgcaatatcttttg

SEQ ID NO: 112975 - DNA, 33 bp, Homo sapien
gaggtgagactggttactcctccgtgcactatc

SEQ ID NO: 112976 - DNA, 33 bp, Homo sapien
gaggtgagactggttattcctccgtgcactatc

SEQ ID NO: 112977 - DNA, 33 bp, Homo sapien
gagagagtgctggcaacagaaaaggaaatgggc

SEQ ID NO: 112978 - DNA, 33 bp, Homo sapien
gagagagtgctggcaatagaaaaggaaatgggc

SEQ ID NO: 112979 - DNA, 33 bp, Homo sapien
tgtaatagaaagggtaactgagggtacaaacat

SEQ ID NO: 112980 - DNA, 33 bp, Homo sapien
tgtaatagaaagggtatctgagggtacaaacat

SEQ ID NO: 112981 - DNA, 33 bp, Homo sapien
ctgtttaactgaagaaccttcgtctgtattttg

SEQ ID NO: 112982 - DNA, 33 bp, Homo sapien
ctgtttaactgaagaagcttcgtctgtattttg

SEQ ID NO: 112983 - DNA, 33 bp, Homo sapien
ttcctgggttaaagaaccgtctcggccaggtga

SEQ ID NO: 112984 - DNA, 33 bp, Homo sapien
ttcctgggttaaagaatcgtctcggccaggtga

SEQ ID NO: 112985 - DNA, 33 bp, Homo sapien
agtaagtcactgataaatattaaaacctgctaa

SEQ ID NO: 112986 - DNA, 33 bp, Homo sapien
agtaagtcactgataagtattaaaacctgctaa

SEQ ID NO: 112987 - DNA, 33 bp, Homo sapien
aagaagaatctaagaactgaaatagaatagaaa

SEQ ID NO: 112988 - DNA, 33 bp, Homo sapien
aagaagaatctaagaattgaaatagaatagaaa

SEQ ID NO: 112989 - DNA, 33 bp, Homo sapien
ccatcctgctatcccacgctgttgtctaccgct

SEQ ID NO: 112990 - DNA, 33 bp, Homo sapien
ccatcctgctatcccatgctgttgtctaccgct

SEQ ID NO: 112991 - DNA, 33 bp, Homo sapien
ttgtccccaagaaacaagtgacaagccattgtg

SEQ ID NO: 112992 - DNA, 33 bp, Homo sapien
ttgtccccaagaaacaggtgacaagccattgtg

SEQ ID NO: 112993 - DNA, 33 bp, Homo sapien
atatgtgagacaccacacgttgccatgactatt

SEQ ID NO: 112994 - DNA, 33 bp, Homo sapien
atatgtgagacaccacgcgttgccatgactatt

SEQ ID NO: 112995 - DNA, 33 bp, Homo sapien
caagaaagaatgataacgctacgggaaggaaaa

SEQ ID NO: 112996 - DNA, 33 bp, Homo sapien
caagaaagaatgataatgctacgggaaggaaaa

SEQ ID NO: 112997 - DNA, 33 bp, Homo sapien
tctcaaaatctgcaagaaaggacttgtgaacaa

SEQ ID NO: 112998 - DNA, 33 bp, Homo sapien
tctcaaaatctgcaaggaaggacttgtgaacaa

SEQ ID NO: 112999 - DNA, 33 bp, Homo sapien
gatagtcttactttcgaaacaagaagatgaaag

SEQ ID NO: 113000 - DNA, 33 bp, Homo sapien
gatagtcttactttcggaacaagaagatgaaag

SEQ ID NO: 113001 - DNA, 33 bp, Homo sapien
gaaagactcagtaaaacgcacttctaagccatt

SEQ ID NO: 113002 - DNA, 33 bp, Homo sapien
gaaagactcagtaaaatgcacttctaagccatt

SEQ ID NO: 113003 - DNA, 33 bp, Homo sapien
ccctttatcagaaacactgggagttgatgcatt

SEQ ID NO: 113004 - DNA, 33 bp, Homo sapien
ccctttatcagaaacattgggagttgatgcatt

SEQ ID NO: 113005 - DNA, 33 bp, Homo sapien
ctttcttagcacaccaataaaaaattagacggt

SEQ ID NO: 113006 - DNA, 33 bp, Homo sapien
ctttcttagcacaccagtaaaaaattagacggt

SEQ ID NO: 113007 - DNA, 33 bp, Homo sapien
atatattcataattccgcactcggatgaaatga

SEQ ID NO: 113008 - DNA, 33 bp, Homo sapien
atatattcataattcctcactcggatgaaatga

SEQ ID NO: 113009 - DNA, 33 bp, Homo sapien
tcggatgaaatgaagaatcaactttctatggta

SEQ ID NO: 113010 - DNA, 33 bp, Homo sapien
tcggatgaaatgaagagtcaactttctatggta

SEQ ID NO: 113011 - DNA, 33 bp, Homo sapien
gtcaggttggtttgaccgcgaaagatctgttcc

SEQ ID NO: 113012 - DNA, 33 bp, Homo sapien
gtcaggttggtttgactgcgaaagatctgttcc

SEQ ID NO: 113013 - DNA, 33 bp, Homo sapien
atgtcaagtacccagaaaagacctggaccaaaa

SEQ ID NO: 113014 - DNA, 33 bp, Homo sapien
atgtcaagtacccagacaagacctggaccaaaa

SEQ ID NO: 113015 - DNA, 33 bp, Homo sapien
caatcaccatgctgaaatagtgtatttgattta

SEQ ID NO: 113016 - DNA, 33 bp, Homo sapien
caatcaccatgctgaactagtgtatttgattta

SEQ ID NO: 113017 - DNA, 33 bp, Homo sapien
tttgaggtaactgtgggaagcaacgtaatgggt

SEQ ID NO: 113018 - DNA, 33 bp, Homo sapien
tttgaggtaactgtggtaagcaacgtaatgggt

SEQ ID NO: 113019 - DNA, 33 bp, Homo sapien
gtatacataggcatctcaagccattttatttca

SEQ ID NO: 113020 - DNA, 33 bp, Homo sapien
gtatacataggcatctgaagccattttatttca

SEQ ID NO: 113021 - DNA, 33 bp, Homo sapien
agttgtccttgatatgcagttcatttataattt

SEQ ID NO: 113022 - DNA, 33 bp, Homo sapien
agttgtccttgatatgtagttcatttataattt

SEQ ID NO: 113023 - DNA, 33 bp, Homo sapien
gtttgttaggaaaatacagccaaacaacttttt

SEQ ID NO: 113024 - DNA, 33 bp, Homo sapien
gtttgttaggaaaatatagccaaacaacttttt

SEQ ID NO: 113025 - DNA, 33 bp, Homo sapien
gttatatatgactctacgtagatacaggatagg

SEQ ID NO: 113026 - DNA, 33 bp, Homo sapien
gttatatatgactctatgtagatacaggatagg

SEQ ID NO: 113027 - DNA, 33 bp, Homo sapien
gtaatatttgagcagaaacattgtggtagttga

SEQ ID NO: 113028 - DNA, 33 bp, Homo sapien
gtaatatttgagcagacacattgtggtagttga

SEQ ID NO: 113029 - DNA, 33 bp, Homo sapien
gttgcttttgttcaggacagtaatatgctggta

SEQ ID NO: 113030 - DNA, 33 bp, Homo sapien
gttgcttttgttcaggccagtaatatgctggta

SEQ ID NO: 113031 - DNA, 33 bp, Homo sapien
tttactctcttaataccccgtaccttcttgcta

SEQ ID NO: 113032 - DNA, 33 bp, Homo sapien
tttactctcttaatacgccgtaccttcttgcta

SEQ ID NO: 113033 - DNA, 33 bp, Homo sapien
gcgtctgcaggactgaagtctcaaagcccttac

SEQ ID NO: 113034 - DNA, 33 bp, Homo sapien
gcgtctgcaggactgatgtctcaaagcccttac

SEQ ID NO: 113035 - DNA, 33 bp, Homo sapien
cagaaactttattcaccactacgcattacagat

SEQ ID NO: 113036 - DNA, 33 bp, Homo sapien
cagaaactttattcactactacgcattacagat

SEQ ID NO: 113037 - DNA, 33 bp, Homo sapien
tgcttagaagctccaaatgggcaattgcttttt

SEQ ID NO: 113038 - DNA, 33 bp, Homo sapien
tgcttagaagctccaagtgggcaattgcttttt

SEQ ID NO: 113039 - DNA, 33 bp, Homo sapien
ctactcccaccaatgacagctccacattattaa

SEQ ID NO: 113040 - DNA, 33 bp, Homo sapien
ctactcccaccaatgatagctccacattattaa

SEQ ID NO: 113041 - DNA, 33 bp, Homo sapien
aggcaggagaaacagcacgttcaattgcctcgt

SEQ ID NO: 113042 - DNA, 33 bp, Homo sapien
aggcaggagaaacagcgcgttcaattgcctcgt

SEQ ID NO: 113043 - DNA, 33 bp, Homo sapien
agctccattccttgtacataaccccaatctcca

SEQ ID NO: 113044 - DNA, 33 bp, Homo sapien
agctccattccttgtagataaccccaatctcca

SEQ ID NO: 113045 - DNA, 33 bp, Homo sapien
ggcaaaatgtgacagaagccctgtggcaaaagg

SEQ ID NO: 113046 - DNA, 33 bp, Homo sapien
ggcaaaatgtgacagaggccctgtggcaaaagg

SEQ ID NO: 113047 - DNA, 33 bp, Homo sapien
caaaagtgagatcataaatggagaaacacttag

SEQ ID NO: 113048 - DNA, 33 bp, Homo sapien
caaaagtgagatcatagatggagaaacacttag

SEQ ID NO: 113049 - DNA, 33 bp, Homo sapien
caatacaggtgacatgaacattttcttaatata

SEQ ID NO: 113050 - DNA, 33 bp, Homo sapien
caatacaggtgacatggacattttcttaatata

SEQ ID NO: 113051 - DNA, 33 bp, Homo sapien
aatcctaagacaaccaggtgctttcaaaaataa

SEQ ID NO: 113052 - DNA, 33 bp, Homo sapien
aatcctaagacaaccatgtgctttcaaaaataa

SEQ ID NO: 113053 - DNA, 33 bp, Homo sapien
ctatggaacacttacacgtagaagagacaaaag

SEQ ID NO: 113054 - DNA, 33 bp, Homo sapien
ctatggaacacttacatgtagaagagacaaaag

SEQ ID NO: 113055 - DNA, 33 bp, Homo sapien
gtgtgtactgagaaaaaccttaattcctgttta

SEQ ID NO: 113056 - DNA, 33 bp, Homo sapien
gtgtgtactgagaaaagccttaattcctgttta

SEQ ID NO: 113057 - DNA, 33 bp, Homo sapien
agattaaaagctgaaccgtaagaggcaagattt

SEQ ID NO: 113058 - DNA, 33 bp, Homo sapien
agattaaaagctgaactgtaagaggcaagattt

SEQ ID NO: 113059 - DNA, 33 bp, Homo sapien
ttatttctatcatctcacatgaatgagcaattt

SEQ ID NO: 113060 - DNA, 33 bp, Homo sapien
ttatttctatcatctcgcatgaatgagcaattt

SEQ ID NO: 113061 - DNA, 33 bp, Homo sapien
tgtatgaaatgatggaatactatgtaagacatt

SEQ ID NO: 113062 - DNA, 33 bp, Homo sapien
tgtatgaaatgatggactactatgtaagacatt

SEQ ID NO: 113063 - DNA, 33 bp, Homo sapien
cttccaataatcactacgaccctcagatgactt

SEQ ID NO: 113064 - DNA, 33 bp, Homo sapien
cttccaataatcactatgaccctcagatgactt

SEQ ID NO: 113065 - DNA, 33 bp, Homo sapien
atatgtgacaatagcaaaaaaggtaagagaaag

SEQ ID NO: 113066 - DNA, 33 bp, Homo sapien
atatgtgacaatagcacaaaaggtaagagaaag

SEQ ID NO: 113067 - DNA, 33 bp, Homo sapien
tgcgaggacatttttagctgcatttcagtctga

SEQ ID NO: 113068 - DNA, 33 bp, Homo sapien
tgcgaggacatttttatctgcatttcagtctga

SEQ ID NO: 113069 - DNA, 33 bp, Homo sapien
taagactcagattcaactggtttgaaaagagtc

SEQ ID NO: 113070 - DNA, 33 bp, Homo sapien
taagactcagattcaagtggtttgaaaagagtc

SEQ ID NO: 113071 - DNA, 33 bp, Homo sapien
ctgtttctaacaccacactcagttacaaggtaa

SEQ ID NO: 113072 - DNA, 33 bp, Homo sapien
ctgtttctaacaccactctcagttacaaggtaa

SEQ ID NO: 113073 - DNA, 33 bp, Homo sapien
gttacgactcagccacattgcatactctgatta

SEQ ID NO: 113074 - DNA, 33 bp, Homo sapien
gttacgactcagccacgttgcatactctgatta

SEQ ID NO: 113075 - DNA, 33 bp, Homo sapien
aagattgcttgccaccaaaacaagattaaatca

SEQ ID NO: 113076 - DNA, 33 bp, Homo sapien
aagattgcttgccaccgaaacaagattaaatca

SEQ ID NO: 113077 - DNA, 33 bp, Homo sapien
ggactcctgccaaatgaatgcagcatcaagagc

SEQ ID NO: 113078 - DNA, 33 bp, Homo sapien
ggactcctgccaaatggatgcagcatcaagagc

SEQ ID NO: 113079 - DNA, 33 bp, Homo sapien
tcccagcaaagtggcccgctgcacgagaggtgg

SEQ ID NO: 113080 - DNA, 33 bp, Homo sapien
tcccagcaaagtggcctgctgcacgagaggtgg

SEQ ID NO: 113081 - DNA, 33 bp, Homo sapien
taatagtcctactttacggtgatattgtgaatg

SEQ ID NO: 113082 - DNA, 33 bp, Homo sapien
taatagtcctactttatggtgatattgtgaatg

SEQ ID NO: 113083 - DNA, 33 bp, Homo sapien
aaaacaccacattccccggctgattttcatgcc

SEQ ID NO: 113084 - DNA, 33 bp, Homo sapien
aaaacaccacattccctggctgattttcatgcc

SEQ ID NO: 113085 - DNA, 33 bp, Homo sapien
gctgctgcttttgcaactaccatcattcttcag

SEQ ID NO: 113086 - DNA, 33 bp, Homo sapien
gctgctgcttttgcaattaccatcattcttcag

SEQ ID NO: 113087 - DNA, 33 bp, Homo sapien
ttgatgtcccctcatccatacagagtgctgaag

SEQ ID NO: 113088 - DNA, 33 bp, Homo sapien
ttgatgtcccctcatctatacagagtgctgaag

SEQ ID NO: 113089 - DNA, 33 bp, Homo sapien
tagtgatttgagttccgtgtatgttgtcagatg

SEQ ID NO: 113090 - DNA, 33 bp, Homo sapien
tagtgatttgagttccttgtatgttgtcagatg

SEQ ID NO: 113091 - DNA, 33 bp, Homo sapien
ggttacatggatgaacggtaccatggagaagtc

SEQ ID NO: 113092 - DNA, 33 bp, Homo sapien
ggttacatggatgaactgtaccatggagaagtc

SEQ ID NO: 113093 - DNA, 33 bp, Homo sapien
gttgatcttttcatgccgatgtttatattttca

SEQ ID NO: 113094 - DNA, 33 bp, Homo sapien
gttgatcttttcatgctgatgtttatattttca

SEQ ID NO: 113095 - DNA, 33 bp, Homo sapien
actagggaaaatgatacagaggctcctcaaaaa

SEQ ID NO: 113096 - DNA, 33 bp, Homo sapien
actagggaaaatgatatagaggctcctcaaaaa

SEQ ID NO: 113097 - DNA, 33 bp, Homo sapien
tgtgtgatctgtgttacgtatgtagaaaggaaa

SEQ ID NO: 113098 - DNA, 33 bp, Homo sapien
tgtgtgatctgtgttatgtatgtagaaaggaaa

SEQ ID NO: 113099 - DNA, 33 bp, Homo sapien
atttatgaaaaacacacaaaggcgattcaatga

SEQ ID NO: 113100 - DNA, 33 bp, Homo sapien
atttatgaaaaacacagaaaggcgattcaatga

SEQ ID NO: 113101 - DNA, 33 bp, Homo sapien
tagaacataatgtttaaagaaccaataccacac

SEQ ID NO: 113102 - DNA, 33 bp, Homo sapien
tagaacataatgtttagagaaccaataccacac

SEQ ID NO: 113103 - DNA, 33 bp, Homo sapien
gaaaagaaacttgaccaagaaatgttacttaga

SEQ ID NO: 113104 - DNA, 33 bp, Homo sapien
gaaaagaaacttgaccgagaaatgttacttaga

SEQ ID NO: 113105 - DNA, 33 bp, Homo sapien
ctctggtcctacctgaaaaagcagaaagacaga

SEQ ID NO: 113106 - DNA, 33 bp, Homo sapien
ctctggtcctacctgagaaagcagaaagacaga

SEQ ID NO: 113107 - DNA, 33 bp, Homo sapien
gaactgggcctggaaaccaaagagaccaagacg

SEQ ID NO: 113108 - DNA, 33 bp, Homo sapien
gaactgggcctggaaatcaaagagaccaagacg

SEQ ID NO: 113109 - DNA, 33 bp, Homo sapien
attcctataatgcgaaaatatgttcacttattt

SEQ ID NO: 113110 - DNA, 33 bp, Homo sapien
attcctataatgcgaagatatgttcacttattt

SEQ ID NO: 113111 - DNA, 33 bp, Homo sapien
gttctggattggaacactattgtcttcttgtgc

SEQ ID NO: 113112 - DNA, 33 bp, Homo sapien
gttctggattggaacagtattgtcttcttgtgc

SEQ ID NO: 113113 - DNA, 33 bp, Homo sapien
tgcacacacattccaaataagggcctttctcac

SEQ ID NO: 113114 - DNA, 33 bp, Homo sapien
tgcacacacattccaagtaagggcctttctcac

SEQ ID NO: 113115 - DNA, 33 bp, Homo sapien
cctaaactcagatagccagaaagttgttgggag

SEQ ID NO: 113116 - DNA, 33 bp, Homo sapien
cctaaactcagatagctagaaagttgttgggag

SEQ ID NO: 113117 - DNA, 33 bp, Homo sapien
ttgtaaaaagacaaatcaagacattctacttct

SEQ ID NO: 113118 - DNA, 33 bp, Homo sapien
ttgtaaaaagacaaatgaagacattctacttct

SEQ ID NO: 113119 - DNA, 33 bp, Homo sapien
aagataatttctctaaccctgacatcagaactg

SEQ ID NO: 113120 - DNA, 33 bp, Homo sapien
aagataatttctctaatcctgacatcagaactg

SEQ ID NO: 113121 - DNA, 33 bp, Homo sapien
aggtctcggaaatacacagttctggtttaagtt

SEQ ID NO: 113122 - DNA, 33 bp, Homo sapien
aggtctcggaaatacagagttctggtttaagtt

SEQ ID NO: 113123 - DNA, 33 bp, Homo sapien
acatatgttcactgcgccatttttcacaatagc

SEQ ID NO: 113124 - DNA, 33 bp, Homo sapien
acatatgttcactgcggcatttttcacaatagc

SEQ ID NO: 113125 - DNA, 33 bp, Homo sapien
aaaagtcaaaaagcaaaaagatgcttgcgagat

SEQ ID NO: 113126 - DNA, 33 bp, Homo sapien
aaaagtcaaaaagcaacaagatgcttgcgagat

SEQ ID NO: 113127 - DNA, 33 bp, Homo sapien
gacagaatatcacataacaacataataacataa

SEQ ID NO: 113128 - DNA, 33 bp, Homo sapien
gacagaatatcacatatcaacataataacataa

SEQ ID NO: 113129 - DNA, 33 bp, Homo sapien
gatattctgtcatatacgtattttgtttatctt

SEQ ID NO: 113130 - DNA, 33 bp, Homo sapien
gatattctgtcatataggtattttgtttatctt

SEQ ID NO: 113131 - DNA, 33 bp, Homo sapien
aaccaaagcaaatctcacaatgaattctgcctc

SEQ ID NO: 113132 - DNA, 33 bp, Homo sapien
aaccaaagcaaatctcgcaatgaattctgcctc

SEQ ID NO: 113133 - DNA, 33 bp, Homo sapien
gggtccctggatgacactccgcacactgctccg

SEQ ID NO: 113134 - DNA, 33 bp, Homo sapien
gggtccctggatgacattccgcacactgctccg

SEQ ID NO: 113135 - DNA, 33 bp, Homo sapien
agttaacaacattaacaatccacgtgtctgtgg

SEQ ID NO: 113136 - DNA, 33 bp, Homo sapien
agttaacaacattaacgatccacgtgtctgtgg

SEQ ID NO: 113137 - DNA, 33 bp, Homo sapien
ctaacatccactaaaaacaacagaaatgtccac

SEQ ID NO: 113138 - DNA, 33 bp, Homo sapien
ctaacatccactaaaaccaacagaaatgtccac

SEQ ID NO: 113139 - DNA, 33 bp, Homo sapien
aactataccacaaaacgacagtaactgaaacag

SEQ ID NO: 113140 - DNA, 33 bp, Homo sapien
aactataccacaaaactacagtaactgaaacag

SEQ ID NO: 113141 - DNA, 33 bp, Homo sapien
ggggagaagctgtacacgacttactggaaggta

SEQ ID NO: 113142 - DNA, 33 bp, Homo sapien
ggggagaagctgtacatgacttactggaaggta

SEQ ID NO: 113143 - DNA, 33 bp, Homo sapien
aatagtacatatctacactactgcttcagtgtc

SEQ ID NO: 113144 - DNA, 33 bp, Homo sapien
aatagtacatatctacgctactgcttcagtgtc

SEQ ID NO: 113145 - DNA, 33 bp, Homo sapien
aatgattgccttatacactgtgggctgaaaata

SEQ ID NO: 113146 - DNA, 33 bp, Homo sapien
aatgattgccttatactctgtgggctgaaaata

SEQ ID NO: 113147 - DNA, 33 bp, Homo sapien
ttttgcagttaaattcccatggtcaaaaatgca

SEQ ID NO: 113148 - DNA, 33 bp, Homo sapien
ttttgcagttaaattctcatggtcaaaaatgca

SEQ ID NO: 113149 - DNA, 33 bp, Homo sapien
tttagttcaatgggaactgtcttttccatagat

SEQ ID NO: 113150 - DNA, 33 bp, Homo sapien
tttagttcaatgggaagtgtcttttccatagat

SEQ ID NO: 113151 - DNA, 33 bp, Homo sapien
tatgcaaatcctatacagacacctatctatgga

SEQ ID NO: 113152 - DNA, 33 bp, Homo sapien
tatgcaaatcctatacggacacctatctatgga

SEQ ID NO: 113153 - DNA, 33 bp, Homo sapien
aatgtctacttctgtccagtcaaaatagcagaa

SEQ ID NO: 113154 - DNA, 33 bp, Homo sapien
aatgtctacttctgtcgagtcaaaatagcagaa

SEQ ID NO: 113155 - DNA, 33 bp, Homo sapien
aaataaaaaccaatcacaatctcaccactgaga

SEQ ID NO: 113156 - DNA, 33 bp, Homo sapien
aaataaaaaccaatcataatctcaccactgaga

SEQ ID NO: 113157 - DNA, 33 bp, Homo sapien
tctgtttttcttcataagatggtagttgttttt

SEQ ID NO: 113158 - DNA, 33 bp, Homo sapien
tctgtttttcttcataggatggtagttgttttt

SEQ ID NO: 113159 - DNA, 33 bp, Homo sapien
acttcacagaagaatcaatgcagtttaaagctg

SEQ ID NO: 113160 - DNA, 33 bp, Homo sapien
acttcacagaagaatcgatgcagtttaaagctg

SEQ ID NO: 113161 - DNA, 33 bp, Homo sapien
attcactggagattaaagtttcctggtaactcc

SEQ ID NO: 113162 - DNA, 33 bp, Homo sapien
attcactggagattaaggtttcctggtaactcc

SEQ ID NO: 113163 - DNA, 33 bp, Homo sapien
aattttgtcaaatttcccaggtattctctgaag

SEQ ID NO: 113164 - DNA, 33 bp, Homo sapien
aattttgtcaaatttctcaggtattctctgaag

SEQ ID NO: 113165 - DNA, 33 bp, Homo sapien
gatctctcaattctcaaggaaaccgcgtggctt

SEQ ID NO: 113166 - DNA, 33 bp, Homo sapien
gatctctcaattctcagggaaaccgcgtggctt

SEQ ID NO: 113167 - DNA, 33 bp, Homo sapien
tgctttgcttttctagcaggccattaggcataa

SEQ ID NO: 113168 - DNA, 33 bp, Homo sapien
tgctttgcttttctagtaggccattaggcataa

SEQ ID NO: 113169 - DNA, 33 bp, Homo sapien
gtggcagaaacttctccaataacaacagccact

SEQ ID NO: 113170 - DNA, 33 bp, Homo sapien
gtggcagaaacttctctaataacaacagccact

SEQ ID NO: 113171 - DNA, 33 bp, Homo sapien
gaacaacagtagaaccaatgtaatcccatgttg

SEQ ID NO: 113172 - DNA, 33 bp, Homo sapien
gaacaacagtagaacctatgtaatcccatgttg

SEQ ID NO: 113173 - DNA, 33 bp, Homo sapien
tgacccactacttgacccactacgtagctacat

SEQ ID NO: 113174 - DNA, 33 bp, Homo sapien
tgacccactacttgactcactacgtagctacat

SEQ ID NO: 113175 - DNA, 33 bp, Homo sapien
gcccctcacatagtccaaacagttgaaggctga

SEQ ID NO: 113176 - DNA, 33 bp, Homo sapien
gcccctcacatagtcccaacagttgaaggctga

SEQ ID NO: 113177 - DNA, 33 bp, Homo sapien
ttgctgttagtagaaggcttcacagctagaaat

SEQ ID NO: 113178 - DNA, 33 bp, Homo sapien
ttgctgttagtagaagtcttcacagctagaaat

SEQ ID NO: 113179 - DNA, 33 bp, Homo sapien
ccaagactgtggacacaaaagacagtcacagaa

SEQ ID NO: 113180 - DNA, 33 bp, Homo sapien
ccaagactgtggacaccaaagacagtcacagaa

SEQ ID NO: 113181 - DNA, 33 bp, Homo sapien
tgtgaagtttggactcaaaatagttcaacatgg

SEQ ID NO: 113182 - DNA, 33 bp, Homo sapien
tgtgaagtttggactccaaatagttcaacatgg

SEQ ID NO: 113183 - DNA, 33 bp, Homo sapien
agctcctactgagatacacaaaaactactagtg

SEQ ID NO: 113184 - DNA, 33 bp, Homo sapien
agctcctactgagatatacaaaaactactagtg

SEQ ID NO: 113185 - DNA, 33 bp, Homo sapien
actactctcaatcacactgtacctgcaggtggt

SEQ ID NO: 113186 - DNA, 33 bp, Homo sapien
actactctcaatcacagtgtacctgcaggtggt

SEQ ID NO: 113187 - DNA, 33 bp, Homo sapien
ttaatgccgtttgaaagcattatcaaaagccca

SEQ ID NO: 113188 - DNA, 33 bp, Homo sapien
ttaatgccgtttgaaatcattatcaaaagccca

SEQ ID NO: 113189 - DNA, 33 bp, Homo sapien
tctgaccaatttcggcaaagtcaaatcaaatgg

SEQ ID NO: 113190 - DNA, 33 bp, Homo sapien
tctgaccaatttcggcgaagtcaaatcaaatgg

SEQ ID NO: 113191 - DNA, 33 bp, Homo sapien
agatacatttttcttaaaggccatggcagtaaa

SEQ ID NO: 113192 - DNA, 33 bp, Homo sapien
agatacatttttcttacaggccatggcagtaaa

SEQ ID NO: 113193 - DNA, 33 bp, Homo sapien
tgcaacacaccaaacacgattcctgtaatacaa

SEQ ID NO: 113194 - DNA, 33 bp, Homo sapien
tgcaacacaccaaacatgattcctgtaatacaa

SEQ ID NO: 113195 - DNA, 33 bp, Homo sapien
tagtgtcccatagggtaaaaccaggcaagggaa

SEQ ID NO: 113196 - DNA, 33 bp, Homo sapien
tagtgtcccatagggtgaaaccaggcaagggaa

SEQ ID NO: 113197 - DNA, 33 bp, Homo sapien
atgaaaaagctctaaagaccaacaattccttcc

SEQ ID NO: 113198 - DNA, 33 bp, Homo sapien
atgaaaaagctctaaataccaacaattccttcc

SEQ ID NO: 113199 - DNA, 33 bp, Homo sapien
cctgagactttggacaccttagttaatgctgaa

SEQ ID NO: 113200 - DNA, 33 bp, Homo sapien
cctgagactttggacatcttagttaatgctgaa

SEQ ID NO: 113201 - DNA, 33 bp, Homo sapien
caaaaataaattcaaccatgtcagcatttcagg

SEQ ID NO: 113202 - DNA, 33 bp, Homo sapien
caaaaataaattcaactatgtcagcatttcagg

SEQ ID NO: 113203 - DNA, 33 bp, Homo sapien
taagagatgctctgtaaaagtcacatttgaaca

SEQ ID NO: 113204 - DNA, 33 bp, Homo sapien
taagagatgctctgtagaagtcacatttgaaca

SEQ ID NO: 113205 - DNA, 33 bp, Homo sapien
agaaacaggttgaaatcagtatctactttttaa

SEQ ID NO: 113206 - DNA, 33 bp, Homo sapien
agaaacaggttgaaatgagtatctactttttaa

SEQ ID NO: 113207 - DNA, 33 bp, Homo sapien
tataaccttctctacagtatacctcactatgat

SEQ ID NO: 113208 - DNA, 33 bp, Homo sapien
tataaccttctctacattatacctcactatgat

SEQ ID NO: 113209 - DNA, 33 bp, Homo sapien
ccttttaagggaacaaacagtgtcacgggaaac

SEQ ID NO: 113210 - DNA, 33 bp, Homo sapien
ccttttaagggaacaagcagtgtcacgggaaac

SEQ ID NO: 113211 - DNA, 33 bp, Homo sapien
gtcatgttttgtcaggcccctccagtgcaaagt

SEQ ID NO: 113212 - DNA, 33 bp, Homo sapien
gtcatgttttgtcaggtccctccagtgcaaagt

SEQ ID NO: 113213 - DNA, 33 bp, Homo sapien
tttttagtgacagagaaaaaactattttatcaa

SEQ ID NO: 113214 - DNA, 33 bp, Homo sapien
tttttagtgacagagagaaaactattttatcaa

SEQ ID NO: 113215 - DNA, 33 bp, Homo sapien
ctgagtagctcagacacaaagagatcatgtata

SEQ ID NO: 113216 - DNA, 33 bp, Homo sapien
ctgagtagctcagacataaagagatcatgtata

SEQ ID NO: 113217 - DNA, 33 bp, Homo sapien
cagtgagatggattccagattatttcaaggaat

SEQ ID NO: 113218 - DNA, 33 bp, Homo sapien
cagtgagatggattcctgattatttcaaggaat

SEQ ID NO: 113219 - DNA, 33 bp, Homo sapien
gctgcagcttaagccaaaagatgatgataagaa

SEQ ID NO: 113220 - DNA, 33 bp, Homo sapien
gctgcagcttaagccagaagatgatgataagaa

SEQ ID NO: 113221 - DNA, 33 bp, Homo sapien
atgcattctgtacataccatgtgttgtaattca

SEQ ID NO: 113222 - DNA, 33 bp, Homo sapien
atgcattctgtacatatcatgtgttgtaattca

SEQ ID NO: 113223 - DNA, 33 bp, Homo sapien
gctactataactcccaaaatgaaattcacagga

SEQ ID NO: 113224 - DNA, 33 bp, Homo sapien
gctactataactcccacaatgaaattcacagga

SEQ ID NO: 113225 - DNA, 33 bp, Homo sapien
gactctcttgggttaaatcattaggaagaggag

SEQ ID NO: 113226 - DNA, 33 bp, Homo sapien
gactctcttgggttaactcattaggaagaggag

SEQ ID NO: 113227 - DNA, 33 bp, Homo sapien
cttttcttctcagtgcaatgaactcagtcggtg

SEQ ID NO: 113228 - DNA, 33 bp, Homo sapien
cttttcttctcagtgcgatgaactcagtcggtg

SEQ ID NO: 113229 - DNA, 33 bp, Homo sapien
tcataaattctattaaaacagtgggaagactaa

SEQ ID NO: 113230 - DNA, 33 bp, Homo sapien
tcataaattctattaagacagtgggaagactaa

SEQ ID NO: 113231 - DNA, 33 bp, Homo sapien
cccaaaactttactaacggcctactgttgccca

SEQ ID NO: 113232 - DNA, 33 bp, Homo sapien
cccaaaactttactaatggcctactgttgccca

SEQ ID NO: 113233 - DNA, 33 bp, Homo sapien
aggactgtgatcagaaatgggaaattgacttga

SEQ ID NO: 113234 - DNA, 33 bp, Homo sapien
aggactgtgatcagaagtgggaaattgacttga

SEQ ID NO: 113235 - DNA, 33 bp, Homo sapien
aatgcactctcctggcacttcatctgtcttggg

SEQ ID NO: 113236 - DNA, 33 bp, Homo sapien
aatgcactctcctggcccttcatctgtcttggg

SEQ ID NO: 113237 - DNA, 33 bp, Homo sapien
aagggtccacaaaagacgtcaccatttggaaga

SEQ ID NO: 113238 - DNA, 33 bp, Homo sapien
aagggtccacaaaagatgtcaccatttggaaga

SEQ ID NO: 113239 - DNA, 33 bp, Homo sapien
atgtactatcagacaagaaagacaaaaagaatt

SEQ ID NO: 113240 - DNA, 33 bp, Homo sapien
atgtactatcagacaataaagacaaaaagaatt

SEQ ID NO: 113241 - DNA, 33 bp, Homo sapien
gaaaaatacccacgtccaaatgagtaagaataa

SEQ ID NO: 113242 - DNA, 33 bp, Homo sapien
gaaaaatacccacgtctaaatgagtaagaataa

SEQ ID NO: 113243 - DNA, 33 bp, Homo sapien
caagtagcagctctaccatggacttcttgatta

SEQ ID NO: 113244 - DNA, 33 bp, Homo sapien
caagtagcagctctacgatggacttcttgatta

SEQ ID NO: 113245 - DNA, 33 bp, Homo sapien
actgctagctagtctcccagttgctcccactta

SEQ ID NO: 113246 - DNA, 33 bp, Homo sapien
actgctagctagtctctcagttgctcccactta

SEQ ID NO: 113247 - DNA, 33 bp, Homo sapien
acatctaaagccaatcccaataatcccgaagat

SEQ ID NO: 113248 - DNA, 33 bp, Homo sapien
acatctaaagccaatcgcaataatcccgaagat

SEQ ID NO: 113249 - DNA, 33 bp, Homo sapien
tttgctctgttgtatcaactctgttcctttgtc

SEQ ID NO: 113250 - DNA, 33 bp, Homo sapien
tttgctctgttgtatcgactctgttcctttgtc

SEQ ID NO: 113251 - DNA, 33 bp, Homo sapien
tagtctttctctctccactcctgcccttgtggt

SEQ ID NO: 113252 - DNA, 33 bp, Homo sapien
tagtctttctctctccgctcctgcccttgtggt

SEQ ID NO: 113253 - DNA, 33 bp, Homo sapien
catgagacctaaaaaaattttatgaatacataa

SEQ ID NO: 113254 - DNA, 33 bp, Homo sapien
catgagacctaaaaaacttttatgaatacataa

SEQ ID NO: 113255 - DNA, 33 bp, Homo sapien
cctctcaaaccaaccaaggcaccagatggagtt

SEQ ID NO: 113256 - DNA, 33 bp, Homo sapien
cctctcaaaccaaccagggcaccagatggagtt

SEQ ID NO: 113257 - DNA, 33 bp, Homo sapien
gagccaacagctgggacgtttaaatgcagaatg

SEQ ID NO: 113258 - DNA, 33 bp, Homo sapien
gagccaacagctgggatgtttaaatgcagaatg

SEQ ID NO: 113259 - DNA, 33 bp, Homo sapien
cacatttccctttagacgcttattgatgccatt

SEQ ID NO: 113260 - DNA, 33 bp, Homo sapien
cacatttccctttagatgcttattgatgccatt

SEQ ID NO: 113261 - DNA, 33 bp, Homo sapien
agtccaatcaaaagaacgttgcattgataacac

SEQ ID NO: 113262 - DNA, 33 bp, Homo sapien
agtccaatcaaaagaatgttgcattgataacac

SEQ ID NO: 113263 - DNA, 33 bp, Homo sapien
taggttttctaagggcaaaacaggactaaaaat

SEQ ID NO: 113264 - DNA, 33 bp, Homo sapien
taggttttctaagggcgaaacaggactaaaaat

SEQ ID NO: 113265 - DNA, 33 bp, Homo sapien
cgtcataaaacagacaagataggatttgccaaa

SEQ ID NO: 113266 - DNA, 33 bp, Homo sapien
cgtcataaaacagacaggataggatttgccaaa

SEQ ID NO: 113267 - DNA, 33 bp, Homo sapien
attctaggaactttgcaatttgactgagaagca

SEQ ID NO: 113268 - DNA, 33 bp, Homo sapien
attctaggaactttgcgatttgactgagaagca

SEQ ID NO: 113269 - DNA, 33 bp, Homo sapien
tttttggcaccataatcataatcttctccatct

SEQ ID NO: 113270 - DNA, 33 bp, Homo sapien
tttttggcaccataatgataatcttctccatct

SEQ ID NO: 113271 - DNA, 33 bp, Homo sapien
gaaatgtgacaactaagtgaaatgtgggctctt

SEQ ID NO: 113272 - DNA, 33 bp, Homo sapien
gaaatgtgacaactaattgaaatgtgggctctt

SEQ ID NO: 113273 - DNA, 33 bp, Homo sapien
aaagtataccatgcaaaaactacaccctaaaga

SEQ ID NO: 113274 - DNA, 33 bp, Homo sapien
aaagtataccatgcaataactacaccctaaaga

SEQ ID NO: 113275 - DNA, 33 bp, Homo sapien
ttgtgtattgctttacacataggaggtgctcag

SEQ ID NO: 113276 - DNA, 33 bp, Homo sapien
ttgtgtattgctttacgcataggaggtgctcag

SEQ ID NO: 113277 - DNA, 33 bp, Homo sapien
acactgtgagaatataacaatgcataaaagtgg

SEQ ID NO: 113278 - DNA, 33 bp, Homo sapien
acactgtgagaatatagcaatgcataaaagtgg

SEQ ID NO: 113279 - DNA, 33 bp, Homo sapien
aagatccctgcgcttcaaggaattgtatacctg

SEQ ID NO: 113280 - DNA, 33 bp, Homo sapien
aagatccctgcgcttcgaggaattgtatacctg

SEQ ID NO: 113281 - DNA, 33 bp, Homo sapien
cagcaaaactgcttagacaacctgtggacccat

SEQ ID NO: 113282 - DNA, 33 bp, Homo sapien
cagcaaaactgcttagtcaacctgtggacccat

SEQ ID NO: 113283 - DNA, 33 bp, Homo sapien
tataaacgtccaagtaggtggagcaaaatcaca

SEQ ID NO: 113284 - DNA, 33 bp, Homo sapien
tataaacgtccaagtatgtggagcaaaatcaca

SEQ ID NO: 113285 - DNA, 33 bp, Homo sapien
aagaacagagcagaaaaaattttgaactataaa

SEQ ID NO: 113286 - DNA, 33 bp, Homo sapien
aagaacagagcagaaacaattttgaactataaa

SEQ ID NO: 113287 - DNA, 33 bp, Homo sapien
tgaaatgcttgcgtgacgagataaagtgagatt

SEQ ID NO: 113288 - DNA, 33 bp, Homo sapien
tgaaatgcttgcgtgatgagataaagtgagatt

SEQ ID NO: 113289 - DNA, 33 bp, Homo sapien
gaggttgagacttgaaaggagatgatcatgaga

SEQ ID NO: 113290 - DNA, 33 bp, Homo sapien
gaggttgagacttgaagggagatgatcatgaga

SEQ ID NO: 113291 - DNA, 33 bp, Homo sapien
atactggtcacattgtcaaggtaggtacaattt

SEQ ID NO: 113292 - DNA, 33 bp, Homo sapien
atactggtcacattgtgaaggtaggtacaattt

SEQ ID NO: 113293 - DNA, 33 bp, Homo sapien
cagaacacagtactccaaagtatggcaccttgg

SEQ ID NO: 113294 - DNA, 33 bp, Homo sapien
cagaacacagtactccgaagtatggcaccttgg

SEQ ID NO: 113295 - DNA, 33 bp, Homo sapien
tgcccagaatagtgagcattatgtgcctagata

SEQ ID NO: 113296 - DNA, 33 bp, Homo sapien
tgcccagaatagtgagtattatgtgcctagata

SEQ ID NO: 113297 - DNA, 33 bp, Homo sapien
ctgtgatctggccttaataacatgagatatacc

SEQ ID NO: 113298 - DNA, 33 bp, Homo sapien
ctgtgatctggccttagtaacatgagatatacc

SEQ ID NO: 113299 - DNA, 33 bp, Homo sapien
aagaagcagtagaaataaagatcaatgaagatc

SEQ ID NO: 113300 - DNA, 33 bp, Homo sapien
aagaagcagtagaaatgaagatcaatgaagatc

SEQ ID NO: 113301 - DNA, 33 bp, Homo sapien
cttaaaggggtagttaaaatttcagcttctata

SEQ ID NO: 113302 - DNA, 33 bp, Homo sapien
cttaaaggggtagttagaatttcagcttctata

SEQ ID NO: 113303 - DNA, 33 bp, Homo sapien
ctgaagacaactctagacctttatcagcccaga

SEQ ID NO: 113304 - DNA, 33 bp, Homo sapien
ctgaagacaactctaggcctttatcagcccaga

SEQ ID NO: 113305 - DNA, 33 bp, Homo sapien
aagtatggtctgcagacgaacaatatgagcctg

SEQ ID NO: 113306 - DNA, 33 bp, Homo sapien
aagtatggtctgcagatgaacaatatgagcctg

SEQ ID NO: 113307 - DNA, 33 bp, Homo sapien
attttctatatgaagaacttgtgtggtgatccc

SEQ ID NO: 113308 - DNA, 33 bp, Homo sapien
attttctatatgaagaccttgtgtggtgatccc

SEQ ID NO: 113309 - DNA, 33 bp, Homo sapien
aattacaaagagaaaacatctcagcattaagga

SEQ ID NO: 113310 - DNA, 33 bp, Homo sapien
aattacaaagagaaaatatctcagcattaagga

SEQ ID NO: 113311 - DNA, 33 bp, Homo sapien
taatagcatataagcccaaggagatattgcagc

SEQ ID NO: 113312 - DNA, 33 bp, Homo sapien
taatagcatataagcctaaggagatattgcagc

SEQ ID NO: 113313 - DNA, 33 bp, Homo sapien
tgttatttcaactaaaatgattatctccgttag

SEQ ID NO: 113314 - DNA, 33 bp, Homo sapien
tgttatttcaactaaagtgattatctccgttag

SEQ ID NO: 113315 - DNA, 33 bp, Homo sapien
cccatgaagcgaacccaaaacagaggacagaaa

SEQ ID NO: 113316 - DNA, 33 bp, Homo sapien
cccatgaagcgaaccccaaacagaggacagaaa

SEQ ID NO: 113317 - DNA, 33 bp, Homo sapien
atcagtttgttttgtccaaagtacctgaacatc

SEQ ID NO: 113318 - DNA, 33 bp, Homo sapien
atcagtttgttttgtctaaagtacctgaacatc

SEQ ID NO: 113319 - DNA, 33 bp, Homo sapien
ctggcaatatctgctcaaaggtggttcccgcag

SEQ ID NO: 113320 - DNA, 33 bp, Homo sapien
ctggcaatatctgctcgaaggtggttcccgcag

SEQ ID NO: 113321 - DNA, 33 bp, Homo sapien
aggatgggggtggcgcagagaacattgaaatca

SEQ ID NO: 113322 - DNA, 33 bp, Homo sapien
aggatgggggtggcgcggagaacattgaaatca

SEQ ID NO: 113323 - DNA, 33 bp, Homo sapien
gttcctttgctgaggccactgctattttctaaa

SEQ ID NO: 113324 - DNA, 33 bp, Homo sapien
gttcctttgctgaggctactgctattttctaaa

SEQ ID NO: 113325 - DNA, 33 bp, Homo sapien
ggtcaggagtctcaaagtactgccatgttaaga

SEQ ID NO: 113326 - DNA, 33 bp, Homo sapien
ggtcaggagtctcaaattactgccatgttaaga

SEQ ID NO: 113327 - DNA, 33 bp, Homo sapien
aggaaagtgtagtttacagaagttgagtgattt

SEQ ID NO: 113328 - DNA, 33 bp, Homo sapien
aggaaagtgtagtttagagaagttgagtgattt

SEQ ID NO: 113329 - DNA, 33 bp, Homo sapien
ttccaagttactagaaaattgtttggctttcct

SEQ ID NO: 113330 - DNA, 33 bp, Homo sapien
ttccaagttactagaatattgtttggctttcct

SEQ ID NO: 113331 - DNA, 33 bp, Homo sapien
ggataaagtgagataaagtgggagaaccttgaa

SEQ ID NO: 113332 - DNA, 33 bp, Homo sapien
ggataaagtgagataatgtgggagaaccttgaa

SEQ ID NO: 113333 - DNA, 33 bp, Homo sapien
aaggacctatgtatcacaaaaagtatcctggcc

SEQ ID NO: 113334 - DNA, 33 bp, Homo sapien
aaggacctatgtatcataaaaagtatcctggcc

SEQ ID NO: 113335 - DNA, 33 bp, Homo sapien
aggattaatctctgagaacctaaacattcttca

SEQ ID NO: 113336 - DNA, 33 bp, Homo sapien
aggattaatctctgagtacctaaacattcttca

SEQ ID NO: 113337 - DNA, 33 bp, Homo sapien
atcacaagagggtaaaatcagtgtcacagcaga

SEQ ID NO: 113338 - DNA, 33 bp, Homo sapien
atcacaagagggtaaactcagtgtcacagcaga

SEQ ID NO: 113339 - DNA, 33 bp, Homo sapien
agctgaaaagccaccaaactaagaaacagaaga

SEQ ID NO: 113340 - DNA, 33 bp, Homo sapien
agctgaaaagccaccagactaagaaacagaaga

SEQ ID NO: 113341 - DNA, 33 bp, Homo sapien
gttttctttgataataagaaaggcaaaccagat

SEQ ID NO: 113342 - DNA, 33 bp, Homo sapien
gttttctttgataatacgaaaggcaaaccagat

SEQ ID NO: 113343 - DNA, 33 bp, Homo sapien
ttgcaatcagttagcccgactttctgctgctgg

SEQ ID NO: 113344 - DNA, 33 bp, Homo sapien
ttgcaatcagttagcctgactttctgctgctgg

SEQ ID NO: 113345 - DNA, 33 bp, Homo sapien
ttcatgtaattaagtgaaaatgctaattattga

SEQ ID NO: 113346 - DNA, 33 bp, Homo sapien
ttcatgtaattaagtgcaaatgctaattattga

SEQ ID NO: 113347 - DNA, 33 bp, Homo sapien
ctatcctcataccttaaagcctgtgtcctccac

SEQ ID NO: 113348 - DNA, 33 bp, Homo sapien
ctatcctcataccttagagcctgtgtcctccac

SEQ ID NO: 113349 - DNA, 33 bp, Homo sapien
gtaagcattatgaataccatgaaagcagtagga

SEQ ID NO: 113350 - DNA, 33 bp, Homo sapien
gtaagcattatgaatatcatgaaagcagtagga

SEQ ID NO: 113351 - DNA, 33 bp, Homo sapien
cttagataacactagaaattgagggttttagtg

SEQ ID NO: 113352 - DNA, 33 bp, Homo sapien
cttagataacactagagattgagggttttagtg

SEQ ID NO: 113353 - DNA, 33 bp, Homo sapien
gatgttcactggttagcccatctctgcctttga

SEQ ID NO: 113354 - DNA, 33 bp, Homo sapien
gatgttcactggttagtccatctctgcctttga

SEQ ID NO: 113355 - DNA, 33 bp, Homo sapien
tcttccattggaaagtcaaagtgaaaagggacg

SEQ ID NO: 113356 - DNA, 33 bp, Homo sapien
tcttccattggaaagttaaagtgaaaagggacg

SEQ ID NO: 113357 - DNA, 33 bp, Homo sapien
cccaagaagagagataagtcttgaagaacaagg

SEQ ID NO: 113358 - DNA, 33 bp, Homo sapien
cccaagaagagagatacgtcttgaagaacaagg

SEQ ID NO: 113359 - DNA, 33 bp, Homo sapien
tattgagcagattccaatacatgaccctaaccc

SEQ ID NO: 113360 - DNA, 33 bp, Homo sapien
tattgagcagattccagtacatgaccctaaccc

SEQ ID NO: 113361 - DNA, 33 bp, Homo sapien
aatctgctcaatatgccatgtataaaagtgata

SEQ ID NO: 113362 - DNA, 33 bp, Homo sapien
aatctgctcaatatgctatgtataaaagtgata

SEQ ID NO: 113363 - DNA, 33 bp, Homo sapien
taatataaatagtatacccctttcacctgcaga

SEQ ID NO: 113364 - DNA, 33 bp, Homo sapien
taatataaatagtatagccctttcacctgcaga

SEQ ID NO: 113365 - DNA, 33 bp, Homo sapien
tcaccaattacacaccagcacttttgcccagat

SEQ ID NO: 113366 - DNA, 33 bp, Homo sapien
tcaccaattacacaccggcacttttgcccagat

SEQ ID NO: 113367 - DNA, 33 bp, Homo sapien
ttggtgaattggatccacatgacttgactgtgc

SEQ ID NO: 113368 - DNA, 33 bp, Homo sapien
ttggtgaattggatccgcatgacttgactgtgc

SEQ ID NO: 113369 - DNA, 33 bp, Homo sapien
gcagctggactgatgaacattattactgtccta

SEQ ID NO: 113370 - DNA, 33 bp, Homo sapien
gcagctggactgatgagcattattactgtccta

SEQ ID NO: 113371 - DNA, 33 bp, Homo sapien
gtcaggcaaatctctgaaactgcggttaatgtc

SEQ ID NO: 113372 - DNA, 33 bp, Homo sapien
gtcaggcaaatctctgcaactgcggttaatgtc

SEQ ID NO: 113373 - DNA, 33 bp, Homo sapien
ttgtttactgaattaaccacaaactgcttgata

SEQ ID NO: 113374 - DNA, 33 bp, Homo sapien
ttgtttactgaattaatcacaaactgcttgata

SEQ ID NO: 113375 - DNA, 33 bp, Homo sapien
cagtcaaaagctggaacaggagaagtggtaata

SEQ ID NO: 113376 - DNA, 33 bp, Homo sapien
cagtcaaaagctggaagaggagaagtggtaata

SEQ ID NO: 113377 - DNA, 33 bp, Homo sapien
gctcactctgtatatacccagacctattgagag

SEQ ID NO: 113378 - DNA, 33 bp, Homo sapien
gctcactctgtatatatccagacctattgagag

SEQ ID NO: 113379 - DNA, 33 bp, Homo sapien
attttttatcctgttcactagttttcataggtt

SEQ ID NO: 113380 - DNA, 33 bp, Homo sapien
attttttatcctgttcgctagttttcataggtt

SEQ ID NO: 113381 - DNA, 33 bp, Homo sapien
gtgtttgtcaaacctcactgcacattacattca

SEQ ID NO: 113382 - DNA, 33 bp, Homo sapien
gtgtttgtcaaacctcgctgcacattacattca

SEQ ID NO: 113383 - DNA, 33 bp, Homo sapien
gtggagcagtgctgaacggggggatggcttttt

SEQ ID NO: 113384 - DNA, 33 bp, Homo sapien
gtggagcagtgctgaatggggggatggcttttt

SEQ ID NO: 113385 - DNA, 33 bp, Homo sapien
aaatgagccattacaaattctccattcatatct

SEQ ID NO: 113386 - DNA, 33 bp, Homo sapien
aaatgagccattacaagttctccattcatatct

SEQ ID NO: 113387 - DNA, 33 bp, Homo sapien
tataacaatgttttcaaaatcaagtaaaagaaa

SEQ ID NO: 113388 - DNA, 33 bp, Homo sapien
tataacaatgttttcagaatcaagtaaaagaaa

SEQ ID NO: 113389 - DNA, 33 bp, Homo sapien
acttaacatagtatccaccattttcatccatgt

SEQ ID NO: 113390 - DNA, 33 bp, Homo sapien
acttaacatagtatcctccattttcatccatgt

SEQ ID NO: 113391 - DNA, 33 bp, Homo sapien
gaaaataatctaaatacggcaaaatgttaatat

SEQ ID NO: 113392 - DNA, 33 bp, Homo sapien
gaaaataatctaaatatggcaaaatgttaatat

SEQ ID NO: 113393 - DNA, 33 bp, Homo sapien
ggaagagttatcgaaacgtattatgaagatgaa

SEQ ID NO: 113394 - DNA, 33 bp, Homo sapien
ggaagagttatcgaaatgtattatgaagatgaa

SEQ ID NO: 113395 - DNA, 33 bp, Homo sapien
ttggatcacctgaataaagctgaatagtttttt

SEQ ID NO: 113396 - DNA, 33 bp, Homo sapien
ttggatcacctgaatacagctgaatagtttttt

SEQ ID NO: 113397 - DNA, 33 bp, Homo sapien
cacaatcaagaggctaacaaagaagcaataata

SEQ ID NO: 113398 - DNA, 33 bp, Homo sapien
cacaatcaagaggctagcaaagaagcaataata

SEQ ID NO: 113399 - DNA, 33 bp, Homo sapien
ctgacacctctagacaagctgcaattagttgat

SEQ ID NO: 113400 - DNA, 33 bp, Homo sapien
ctgacacctctagacatgctgcaattagttgat

SEQ ID NO: 113401 - DNA, 33 bp, Homo sapien
agacggtgctagtagacgaatagtatttaaaaa

SEQ ID NO: 113402 - DNA, 33 bp, Homo sapien
agacggtgctagtagatgaatagtatttaaaaa

SEQ ID NO: 113403 - DNA, 33 bp, Homo sapien
taccctatgcttatacaacttgacccagcccct

SEQ ID NO: 113404 - DNA, 33 bp, Homo sapien
taccctatgcttatacgacttgacccagcccct

SEQ ID NO: 113405 - DNA, 33 bp, Homo sapien
tacaaatgatctgaggcagttttttcccgggaa

SEQ ID NO: 113406 - DNA, 33 bp, Homo sapien
tacaaatgatctgaggtagttttttcccgggaa

SEQ ID NO: 113407 - DNA, 33 bp, Homo sapien
atgtagtatctactagccagttttggttagaga

SEQ ID NO: 113408 - DNA, 33 bp, Homo sapien
atgtagtatctactagtcagttttggttagaga

SEQ ID NO: 113409 - DNA, 33 bp, Homo sapien; identical to SEQ ID NO: 113407

SEQ ID NO: 113410 - DNA, 33 bp, Homo sapien; identical to SEQ ID NO: 113408

SEQ ID NO: 113411 - DNA, 33 bp, Homo sapien
tcattttgtattgagaaattttcagctagttgc

SEQ ID NO: 113412 - DNA, 33 bp, Homo sapien
tcattttgtattgagagattttcagctagttgc

SEQ ID NO: 113413 - DNA, 33 bp, Homo sapien
ctttcactttctttccactcaagtctcgttatt

SEQ ID NO: 113414 - DNA, 33 bp, Homo sapien
ctttcactttctttccgctcaagtctcgttatt

SEQ ID NO: 113415 - DNA, 33 bp, Homo sapien
acagtcataaagtgcccgactcatgaaaataat

SEQ ID NO: 113416 - DNA, 33 bp, Homo sapien
acagtcataaagtgccggactcatgaaaataat

SEQ ID NO: 113417 - DNA, 33 bp, Homo sapien
tgtatggagtcagtcaaagatgggtggtcccct

SEQ ID NO: 113418 - DNA, 33 bp, Homo sapien
tgtatggagtcagtcagagatgggtggtcccct

SEQ ID NO: 113419 - DNA, 33 bp, Homo sapien
cccagtttctcaggcactgaccttcaggggcat

SEQ ID NO: 113420 - DNA, 33 bp, Homo sapien
cccagtttctcaggcattgaccttcaggggcat

SEQ ID NO: 113421 - DNA, 33 bp, Homo sapien
ccaagtcattcagcaaaagttatttgaggttta

SEQ ID NO: 113422 - DNA, 33 bp, Homo sapien
ccaagtcattcagcaacagttatttgaggttta

SEQ ID NO: 113423 - DNA, 33 bp, Homo sapien
aaaaaatctcagattaaagccaatgttaaaagg

SEQ ID NO: 113424 - DNA, 33 bp, Homo sapien
aaaaaatctcagattacagccaatgttaaaagg

SEQ ID NO: 113425 - DNA, 33 bp, Homo sapien
gaaaaataatgttgtgcaagttagagttcttgg

SEQ ID NO: 113426 - DNA, 33 bp, Homo sapien
gaaaaataatgttgtgtaagttagagttcttgg

SEQ ID NO: 113427 - DNA, 33 bp, Homo sapien
tttcagaactaaagtaagctaggaactgaggat

SEQ ID NO: 113428 - DNA, 33 bp, Homo sapien
tttcagaactaaagtatgctaggaactgaggat

SEQ ID NO: 113429 - DNA, 33 bp, Homo sapien
tctttttgtcctatgagccatcaaatcctgctc

SEQ ID NO: 113430 - DNA, 33 bp, Homo sapien
tctttttgtcctatgatccatcaaatcctgctc

SEQ ID NO: 113431 - DNA, 33 bp, Homo sapien
tttgacaccagaggtacaggaattcctacacat

SEQ ID NO: 113432 - DNA, 33 bp, Homo sapien
tttgacaccagaggtagaggaattcctacacat

SEQ ID NO: 113433 - DNA, 33 bp, Homo sapien
gccccatctgacatcaatgaagtgactacccca

SEQ ID NO: 113434 - DNA, 33 bp, Homo sapien
gccccatctgacatcagtgaagtgactacccca

SEQ ID NO: 113435 - DNA, 33 bp, Homo sapien
gtatcacaccaagaaccaggaaaatcttaacct

SEQ ID NO: 113436 - DNA, 33 bp, Homo sapien
gtatcacaccaagaacgaggaaaatcttaacct

SEQ ID NO: 113437 - DNA, 33 bp, Homo sapien
attgtttgccctgataccttgaaaaagaagcca

SEQ ID NO: 113438 - DNA, 33 bp, Homo sapien
attgtttgccctgatatcttgaaaaagaagcca

SEQ ID NO: 113439 - DNA, 33 bp, Homo sapien
tatactaggttactgacaggctgtgatatcaac

SEQ ID NO: 113440 - DNA, 33 bp, Homo sapien
tatactaggttactgataggctgtgatatcaac

SEQ ID NO: 113441 - DNA, 33 bp, Homo sapien
gtgacaacatattccaaatctcaaaaggctcaa

SEQ ID NO: 113442 - DNA, 33 bp, Homo sapien
gtgacaacatattccagatctcaaaaggctcaa

SEQ ID NO: 113443 - DNA, 33 bp, Homo sapien
cctgtgaggttctgataataacaaagacttcta

SEQ ID NO: 113444 - DNA, 33 bp, Homo sapien
cctgtgaggttctgattataacaaagacttcta

SEQ ID NO: 113445 - DNA, 33 bp, Homo sapien
ttccatttcagtaaaaatatggtggtcccaggt

SEQ ID NO: 113446 - DNA, 33 bp, Homo sapien
ttccatttcagtaaaattatggtggtcccaggt

SEQ ID NO: 113447 - DNA, 33 bp, Homo sapien
tttggggaacattgaacatacaaagcaaacaga

SEQ ID NO: 113448 - DNA, 33 bp, Homo sapien
tttggggaacattgaatatacaaagcaaacaga

SEQ ID NO: 113449 - DNA, 33 bp, Homo sapien
atacaatcaggtataacaacacagtacttggtc

SEQ ID NO: 113450 - DNA, 33 bp, Homo sapien
atacaatcaggtataataacacagtacttggtc

SEQ ID NO: 113451 - DNA, 33 bp, Homo sapien
atccaggatgcacttaaaaggattggaactgaa

SEQ ID NO: 113452 - DNA, 33 bp, Homo sapien
atccaggatgcacttacaaggattggaactgaa

SEQ ID NO: 113453 - DNA, 33 bp, Homo sapien
tcactttggcaatatccctgccaaatgaagaga

SEQ ID NO: 113454 - DNA, 33 bp, Homo sapien
tcactttggcaatatcgctgccaaatgaagaga

SEQ ID NO: 113455 - DNA, 33 bp, Homo sapien
aattcaatgtaggagaacaagctattcacttta

SEQ ID NO: 113456 - DNA, 33 bp, Homo sapien
aattcaatgtaggagagcaagctattcacttta

SEQ ID NO: 113457 - DNA, 33 bp, Homo sapien
gttatgtgctaggcaaagtacctagaagcttct

SEQ ID NO: 113458 - DNA, 33 bp, Homo sapien
gttatgtgctaggcaacgtacctagaagcttct

SEQ ID NO: 113459 - DNA, 33 bp, Homo sapien
attctggtttgccctccataatctcacgcctct

SEQ ID NO: 113460 - DNA, 33 bp, Homo sapien
attctggtttgccctctataatctcacgcctct

SEQ ID NO: 113461 - DNA, 33 bp, Homo sapien
gatgtatctattcatcaaatattcttccatgac

SEQ ID NO: 113462 - DNA, 33 bp, Homo sapien
gatgtatctattcatccaatattcttccatgac

SEQ ID NO: 113463 - DNA, 33 bp, Homo sapien
tcttagcaatgtgttgcaattggagagttggag

SEQ ID NO: 113464 - DNA, 33 bp, Homo sapien
tcttagcaatgtgttgtaattggagagttggag

SEQ ID NO: 113465 - DNA, 33 bp, Homo sapien
aattggtttgcatgaaagtgaaatccatgtcag

SEQ ID NO: 113466 - DNA, 33 bp, Homo sapien
aattggtttgcatgaaggtgaaatccatgtcag

SEQ ID NO: 113467 - DNA, 33 bp, Homo sapien
ttttcattttcattctcactgttgtcataatgt

SEQ ID NO: 113468 - DNA, 33 bp, Homo sapien
ttttcattttcattcttactgttgtcataatgt

SEQ ID NO: 113469 - DNA, 33 bp, Homo sapien
agagccctgtcccccgaatcttcaccattttat

SEQ ID NO: 113470 - DNA, 33 bp, Homo sapien
agagccctgtcccccgcatcttcaccattttat

SEQ ID NO: 113471 - DNA, 33 bp, Homo sapien
tgatgccagatggcacagagtggggatgacaag

SEQ ID NO: 113472 - DNA, 33 bp, Homo sapien
tgatgccagatggcacggagtggggatgacaag

SEQ ID NO: 113473 - DNA, 33 bp, Homo sapien
gttggttggtgctaagcataaactcctgatcaa

SEQ ID NO: 113474 - DNA, 33 bp, Homo sapien
gttggttggtgctaaggataaactcctgatcaa

SEQ ID NO: 113475 - DNA, 33 bp, Homo sapien
aaggaaaactgattccaattcaaataagcgttc

SEQ ID NO: 113476 - DNA, 33 bp, Homo sapien
aaggaaaactgattcctattcaaataagcgttc

SEQ ID NO: 113477 - DNA, 33 bp, Homo sapien
ggcatccgagtctcaccgatccccagagttcag

SEQ ID NO: 113478 - DNA, 33 bp, Homo sapien
ggcatccgagtctcactgatccccagagttcag

SEQ ID NO: 113479 - DNA, 33 bp, Homo sapien
cctattgccgtaagaaggtaaggacacttggta

SEQ ID NO: 113480 - DNA, 33 bp, Homo sapien
cctattgccgtaagaatgtaaggacacttggta

SEQ ID NO: 113481 - DNA, 33 bp, Homo sapien
tgtgccatgtaagccaagaggtagctctatttc

SEQ ID NO: 113482 - DNA, 33 bp, Homo sapien
tgtgccatgtaagccaggaggtagctctatttc

SEQ ID NO: 113483 - DNA, 33 bp, Homo sapien
aaacagtctgtcgctactacatgtttttggtat

SEQ ID NO: 113484 - DNA, 33 bp, Homo sapien
aaacagtctgtcgctagtacatgtttttggtat

SEQ ID NO: 113485 - DNA, 33 bp, Homo sapien
aatgtttctgagaaaagcctgtcttggtggaaa

SEQ ID NO: 113486 - DNA, 33 bp, Homo sapien
aatgtttctgagaaaatcctgtcttggtggaaa

SEQ ID NO: 113487 - DNA, 33 bp, Homo sapien
agtgctagctactcacaaggttgaaacaagggg

SEQ ID NO: 113488 - DNA, 33 bp, Homo sapien
agtgctagctactcacgaggttgaaacaagggg

SEQ ID NO: 113489 - DNA, 33 bp, Homo sapien
ggtaagtcaattgatacgtttggaccttaggct

SEQ ID NO: 113490 - DNA, 33 bp, Homo sapien
ggtaagtcaattgatatgtttggaccttaggct

SEQ ID NO: 113491 - DNA, 33 bp, Homo sapien
tctaaatttctcatatgacaaagtttcaaatta

SEQ ID NO: 113492 - DNA, 33 bp, Homo sapien
tctaaatttctcatattacaaagtttcaaatta

SEQ ID NO: 113493 - DNA, 33 bp, Homo sapien
ttcaaattaggcagaactatcttgtgtcagact

SEQ ID NO: 113494 - DNA, 33 bp, Homo sapien
ttcaaattaggcagaagtatcttgtgtcagact

SEQ ID NO: 113495 - DNA, 33 bp, Homo sapien
ccttatgttcctcatgacagatgacccctgtgc

SEQ ID NO: 113496 - DNA, 33 bp, Homo sapien
ccttatgttcctcatgccagatgacccctgtgc

SEQ ID NO: 113497 - DNA, 33 bp, Homo sapien
taggaaccataaataactgtgattcatcggttc

SEQ ID NO: 113498 - DNA, 33 bp, Homo sapien
taggaaccataaataattgtgattcatcggttc

SEQ ID NO: 113499 - DNA, 33 bp, Homo sapien
tagaatcaaaggctgaggaaaagtggataaaag

SEQ ID NO: 113500 - DNA, 33 bp, Homo sapien
tagaatcaaaggctgatgaaaagtggataaaag

SEQ ID NO: 113501 - DNA, 33 bp, Homo sapien
gggccagaaggttgagcatatgagagaaatgac

SEQ ID NO: 113502 - DNA, 33 bp, Homo sapien
gggccagaaggttgagtatatgagagaaatgac

SEQ ID NO: 113503 - DNA, 33 bp, Homo sapien
ttttgatgtccccttcaatttctttcatcggtg

SEQ ID NO: 113504 - DNA, 33 bp, Homo sapien
ttttgatgtccccttccatttctttcatcggtg

SEQ ID NO: 113505 - DNA, 33 bp, Homo sapien
tgttatccaatgtgtacagagtttcagacttgc

SEQ ID NO: 113506 - DNA, 33 bp, Homo sapien
tgttatccaatgtgtatagagtttcagacttgc

SEQ ID NO: 113507 - DNA, 33 bp, Homo sapien
tactactaccatttcactagttttgttcttgtt

SEQ ID NO: 113508 - DNA, 33 bp, Homo sapien
tactactaccatttcattagttttgttcttgtt

SEQ ID NO: 113509 - DNA, 33 bp, Homo sapien
tggattccacatataaacgaggacatgaggtat

SEQ ID NO: 113510 - DNA, 33 bp, Homo sapien
tggattccacatataagcgaggacatgaggtat

SEQ ID NO: 113511 - DNA, 33 bp, Homo sapien
gatagtctatgctataccagacacttttcttag

SEQ ID NO: 113512 - DNA, 33 bp, Homo sapien
gatagtctatgctatatcagacacttttcttag

SEQ ID NO: 113513 - DNA, 33 bp, Homo sapien
tattcagcaatacaaactgaaggagctagaggc

SEQ ID NO: 113514 - DNA, 33 bp, Homo sapien
tattcagcaatacaaagtgaaggagctagaggc

SEQ ID NO: 113515 - DNA, 33 bp, Homo sapien
gttttgactatgtaaccaagaagtgtgaagaac

SEQ ID NO: 113516 - DNA, 33 bp, Homo sapien
gttttgactatgtaactaagaagtgtgaagaac

SEQ ID NO: 113517 - DNA, 33 bp, Homo sapien
taaattatgtccttaaggttccatagcaaggtt

SEQ ID NO: 113518 - DNA, 33 bp, Homo sapien
taaattatgtccttaatgttccatagcaaggtt

SEQ ID NO: 113519 - DNA, 33 bp, Homo sapien
ctgagctatgtggataaatgtaaaaggatttct

SEQ ID NO: 113520 - DNA, 33 bp, Homo sapien
ctgagctatgtggatatatgtaaaaggatttct

SEQ ID NO: 113521 - DNA, 33 bp, Homo sapien
tatacagtttctaggacaggcaaaattatggac

SEQ ID NO: 113522 - DNA, 33 bp, Homo sapien
tatacagtttctaggataggcaaaattatggac

SEQ ID NO: 113523 - DNA, 33 bp, Homo sapien
agttcgcattcaacaacgtgaatatgcttaatg

SEQ ID NO: 113524 - DNA, 33 bp, Homo sapien
agttcgcattcaacaatgtgaatatgcttaatg

SEQ ID NO: 113525 - DNA, 33 bp, Homo sapien
tgaatatgcttaatgccactgatgtgtaccttt

SEQ ID NO: 113526 - DNA, 33 bp, Homo sapien
tgaatatgcttaatgcgactgatgtgtaccttt

SEQ ID NO: 113527 - DNA, 33 bp, Homo sapien
tttgttagagttaatgaaccaatattgatatat

SEQ ID NO: 113528 - DNA, 33 bp, Homo sapien
tttgttagagttaatggaccaatattgatatat

SEQ ID NO: 113529 - DNA, 33 bp, Homo sapien
actcactgtacttctaacttcgcaatttttcca

SEQ ID NO: 113530 - DNA, 33 bp, Homo sapien
actcactgtacttctatcttcgcaatttttcca

SEQ ID NO: 113531 - DNA, 33 bp, Homo sapien
aaaatgaatgtgcttacgttatttttccagata

SEQ ID NO: 113532 - DNA, 33 bp, Homo sapien
aaaatgaatgtgcttatgttatttttccagata

SEQ ID NO: 113533 - DNA, 33 bp, Homo sapien
tttccatctctgctaactcacaccttctgagag

SEQ ID NO: 113534 - DNA, 33 bp, Homo sapien
tttccatctctgctaattcacaccttctgagag

SEQ ID NO: 113535 - DNA, 33 bp, Homo sapien
actggaatgatccaaagaaggctactttaacca

SEQ ID NO: 113536 - DNA, 33 bp, Homo sapien
actggaatgatccaaataaggctactttaacca

SEQ ID NO: 113537 - DNA, 33 bp, Homo sapien
tctattatatttcaaacgtgatagctactctcc

SEQ ID NO: 113538 - DNA, 33 bp, Homo sapien
tctattatatttcaaatgtgatagctactctcc

SEQ ID NO: 113539 - DNA, 33 bp, Homo sapien
atgcagttagtttaggaacaagtaactattcag

SEQ ID NO: 113540 - DNA, 33 bp, Homo sapien
atgcagttagtttagggacaagtaactattcag

SEQ ID NO: 113541 - DNA, 33 bp, Homo sapien
aactaactgcatcacaatcatttgataaccatt

SEQ ID NO: 113542 - DNA, 33 bp, Homo sapien
aactaactgcatcacagtcatttgataaccatt

SEQ ID NO: 113543 - DNA, 33 bp, Homo sapien
gatgagtaagcaacaaatcacaatctaaatcat

SEQ ID NO: 113544 - DNA, 33 bp, Homo sapien
gatgagtaagcaacaagtcacaatctaaatcat

SEQ ID NO: 113545 - DNA, 33 bp, Homo sapien
gaaatccactgggctagattgtttctaggatct

SEQ ID NO: 113546 - DNA, 33 bp, Homo sapien
gaaatccactgggctatattgtttctaggatct

SEQ ID NO: 113547 - DNA, 33 bp, Homo sapien
tcctctttgcagtacaatgggttgtctgatgtg

SEQ ID NO: 113548 - DNA, 33 bp, Homo sapien
tcctctttgcagtacattgggttgtctgatgtg

SEQ ID NO: 113549 - DNA, 33 bp, Homo sapien
attttatctcataccacgctctgctagttgaaa

SEQ ID NO: 113550 - DNA, 33 bp, Homo sapien
attttatctcataccatgctctgctagttgaaa

SEQ ID NO: 113551 - DNA, 33 bp, Homo sapien
actactctcttgatgacgttaagcaatcctttg

SEQ ID NO: 113552 - DNA, 33 bp, Homo sapien
actactctcttgatgatgttaagcaatcctttg

SEQ ID NO: 113553 - DNA, 33 bp, Homo sapien
ggctgtcagtatagaactggtggtttctaaggc

SEQ ID NO: 113554 - DNA, 33 bp, Homo sapien
ggctgtcagtatagaattggtggtttctaaggc

SEQ ID NO: 113555 - DNA, 33 bp, Homo sapien
cttcaaaatagatccacaatgcaaccatttttc

SEQ ID NO: 113556 - DNA, 33 bp, Homo sapien
cttcaaaatagatccagaatgcaaccatttttc

SEQ ID NO: 113557 - DNA, 33 bp, Homo sapien
tctagaaagagtagcaccttaattataatcatt

SEQ ID NO: 113558 - DNA, 33 bp, Homo sapien
tctagaaagagtagcatcttaattataatcatt

SEQ ID NO: 113559 - DNA, 33 bp, Homo sapien
acattccactgatgagaccttgtcacatggttc

SEQ ID NO: 113560 - DNA, 33 bp, Homo sapien
acattccactgatgagtccttgtcacatggttc

SEQ ID NO: 113561 - DNA, 33 bp, Homo sapien
ttaatggctttttctaaaacagatgattagatg

SEQ ID NO: 113562 - DNA, 33 bp, Homo sapien
ttaatggctttttctagaacagatgattagatg

SEQ ID NO: 113563 - DNA, 33 bp, Homo sapien
ttgcagagtgacattaacaagttgttaggcttc

SEQ ID NO: 113564 - DNA, 33 bp, Homo sapien
ttgcagagtgacattagcaagttgttaggcttc

SEQ ID NO: 113565 - DNA, 33 bp, Homo sapien
gcacaaggtctcattccctcaggtccttaccaa

SEQ ID NO: 113566 - DNA, 33 bp, Homo sapien
gcacaaggtctcattctctcaggtccttaccaa

SEQ ID NO: 113567 - DNA, 33 bp, Homo sapien
tggagacataagcttcaagactacagcttccct

SEQ ID NO: 113568 - DNA, 33 bp, Homo sapien
tggagacataagcttctagactacagcttccct

SEQ ID NO: 113569 - DNA, 33 bp, Homo sapien
ctcattgagtacttgaaccaaaagcaatatcag

SEQ ID NO: 113570 - DNA, 33 bp, Homo sapien
ctcattgagtacttgatccaaaagcaatatcag

SEQ ID NO: 113571 - DNA, 33 bp, Homo sapien
atggaacacacactagaaaatgctttattagag

SEQ ID NO: 113572 - DNA, 33 bp, Homo sapien
atggaacacacactaggaaatgctttattagag

SEQ ID NO: 113573 - DNA, 33 bp, Homo sapien
atcatgctgcacaatccgatgaagccaaactcc

SEQ ID NO: 113574 - DNA, 33 bp, Homo sapien
atcatgctgcacaatctgatgaagccaaactcc

SEQ ID NO: 113575 - DNA, 33 bp, Homo sapien
gaaaccgtggttctcacgacattcaatatcagg

SEQ ID NO: 113576 - DNA, 33 bp, Homo sapien
gaaaccgtggttctcatgacattcaatatcagg

SEQ ID NO: 113577 - DNA, 33 bp, Homo sapien
gggcattgtgctcaaaagtatgcttcctcagtt

SEQ ID NO: 113578 - DNA, 33 bp, Homo sapien
gggcattgtgctcaaatgtatgcttcctcagtt

SEQ ID NO: 113579 - DNA, 33 bp, Homo sapien
gattaatgagctatggaaaagctaaaagccacc

SEQ ID NO: 113580 - DNA, 33 bp, Homo sapien
gattaatgagctatgggaaagctaaaagccacc

SEQ ID NO: 113581 - DNA, 33 bp, Homo sapien
tttagtgtagttagcacggaaattaatcagtgt

SEQ ID NO: 113582 - DNA, 33 bp, Homo sapien
tttagtgtagttagcatggaaattaatcagtgt

SEQ ID NO: 113583 - DNA, 33 bp, Homo sapien
tgactataaagacacaagaagtaagatctggaa

SEQ ID NO: 113584 - DNA, 33 bp, Homo sapien
tgactataaagacacaggaagtaagatctggaa

SEQ ID NO: 113585 - DNA, 33 bp, Homo sapien
tatcaattgtgggaaactaagtcgaactaattc

SEQ ID NO: 113586 - DNA, 33 bp, Homo sapien
tatcaattgtgggaaattaagtcgaactaattc

SEQ ID NO: 113587 - DNA, 33 bp, Homo sapien
ttgtctagaactggaaatcctacagtttgtctg

SEQ ID NO: 113588 - DNA, 33 bp, Homo sapien
ttgtctagaactggaagtcctacagtttgtctg

SEQ ID NO: 113589 - DNA, 33 bp, Homo sapien
tttccgagtagaaggccgagaataggcagagat

SEQ ID NO: 113590 - DNA, 33 bp, Homo sapien
tttccgagtagaaggctgagaataggcagagat

SEQ ID NO: 113591 - DNA, 33 bp, Homo sapien
gaagaacaaaataacaagtatcaagacatagaa

SEQ ID NO: 113592 - DNA, 33 bp, Homo sapien
gaagaacaaaataacaggtatcaagacatagaa

SEQ ID NO: 113593 - DNA, 33 bp, Homo sapien
agatcttcaagttttacgaggacatttcagcac

SEQ ID NO: 113594 - DNA, 33 bp, Homo sapien
agatcttcaagttttatgaggacatttcagcac

SEQ ID NO: 113595 - DNA, 33 bp, Homo sapien
ggacatattaaccagcaatgttccctaacctct

SEQ ID NO: 113596 - DNA, 33 bp, Homo sapien
ggacatattaaccagcgatgttccctaacctct

SEQ ID NO: 113597 - DNA, 33 bp, Homo sapien
caggactaactcatagaccatgcacagagtcag

SEQ ID NO: 113598 - DNA, 33 bp, Homo sapien
caggactaactcataggccatgcacagagtcag

SEQ ID NO: 113599 - DNA, 33 bp, Homo sapien
ttgtctagggtttagaaatgtcctatcacatac

SEQ ID NO: 113600 - DNA, 33 bp, Homo sapien
ttgtctagggtttagatatgtcctatcacatac

SEQ ID NO: 113601 - DNA, 33 bp, Homo sapien
acattagctgatttccaattatgtagactgtct

SEQ ID NO: 113602 - DNA, 33 bp, Homo sapien
acattagctgatttcccattatgtagactgtct

SEQ ID NO: 113603 - DNA, 33 bp, Homo sapien
ccccaccagagaattccaccttgggcctgagga

SEQ ID NO: 113604 - DNA, 33 bp, Homo sapien
ccccaccagagaattctaccttgggcctgagga

SEQ ID NO: 113605 - DNA, 33 bp, Homo sapien
ccggcagcactggaacagaagcattaggaaaac

SEQ ID NO: 113606 - DNA, 33 bp, Homo sapien
ccggcagcactggaacggaagcattaggaaaac

SEQ ID NO: 113607 - DNA, 33 bp, Homo sapien
acttggacctagttgcaagctgggcagggactc

SEQ ID NO: 113608 - DNA, 33 bp, Homo sapien
acttggacctagttgcgagctgggcagggactc

SEQ ID NO: 113609 - DNA, 33 bp, Homo sapien
agtagtacagtctttacatgatttctttggctg

SEQ ID NO: 113610 - DNA, 33 bp, Homo sapien
agtagtacagtctttatatgatttctttggctg

SEQ ID NO: 113611 - DNA, 33 bp, Homo sapien
atggattatttaaaaagatctcgaccaggcagt

SEQ ID NO: 113612 - DNA, 33 bp, Homo sapien
atggattatttaaaaatatctcgaccaggcagt

SEQ ID NO: 113613 - DNA, 33 bp, Homo sapien
tctgtcatgattgagaccaggaaagaaatgaga

SEQ ID NO: 113614 - DNA, 33 bp, Homo sapien
tctgtcatgattgagatcaggaaagaaatgaga

SEQ ID NO: 113615 - DNA, 33 bp, Homo sapien
gtaggggtgggtgcacaactttgataatgtatg

SEQ ID NO: 113616 - DNA, 33 bp, Homo sapien
gtaggggtgggtgcacgactttgataatgtatg

SEQ ID NO: 113617 - DNA, 33 bp, Homo sapien
tgttcagtaaggatggacatttcaaataccgat

SEQ ID NO: 113618 - DNA, 33 bp, Homo sapien
tgttcagtaaggatggccatttcaaataccgat

SEQ ID NO: 113619 - DNA, 33 bp, Homo sapien
ttccaaatgactgtgacgtgtcattagaggaat

SEQ ID NO: 113620 - DNA, 33 bp, Homo sapien
ttccaaatgactgtgatgtgtcattagaggaat

SEQ ID NO: 113621 - DNA, 33 bp, Homo sapien
attactttttcttactcaagactattgtaggaa

SEQ ID NO: 113622 - DNA, 33 bp, Homo sapien
attactttttcttactgaagactattgtaggaa

SEQ ID NO: 113623 - DNA, 33 bp, Homo sapien
atatttcatgtatatcacgggatagtcgtcccc

SEQ ID NO: 113624 - DNA, 33 bp, Homo sapien
atatttcatgtatatcgcgggatagtcgtcccc

SEQ ID NO: 113625 - DNA, 33 bp, Homo sapien
gttacaattaatgagccaatgtcgataaattat

SEQ ID NO: 113626 - DNA, 33 bp, Homo sapien
gttacaattaatgagctaatgtcgataaattat

SEQ ID NO: 113627 - DNA, 33 bp, Homo sapien
aacaggaatggctaaacaacactgtaagacagc

SEQ ID NO: 113628 - DNA, 33 bp, Homo sapien
aacaggaatggctaaataacactgtaagacagc

SEQ ID NO: 113629 - DNA, 33 bp, Homo sapien
tgaaatgtcattcataagtaagggcaactgaga

SEQ ID NO: 113630 - DNA, 33 bp, Homo sapien
tgaaatgtcattcatatgtaagggcaactgaga

SEQ ID NO: 113631 - DNA, 33 bp, Homo sapien
atggggtacctgcgaaagtttgttacgtagata

SEQ ID NO: 113632 - DNA, 33 bp, Homo sapien
atggggtacctgcgaaggtttgttacgtagata

SEQ ID NO: 113633 - DNA, 33 bp, Homo sapien
gcctgctgagaaatccaacgaggtaatggctcc

SEQ ID NO: 113634 - DNA, 33 bp, Homo sapien
gcctgctgagaaatccgacgaggtaatggctcc

SEQ ID NO: 113635 - DNA, 33 bp, Homo sapien
tgtcaactatttcaaacatcactcacacctatg

SEQ ID NO: 113636 - DNA, 33 bp, Homo sapien
tgtcaactatttcaaatatcactcacacctatg

SEQ ID NO: 113637 - DNA, 33 bp, Homo sapien
ggtcttcctccaatccagcaataagtgtatttc

SEQ ID NO: 113638 - DNA, 33 bp, Homo sapien
ggtcttcctccaatccggcaataagtgtatttc

SEQ ID NO: 113639 - DNA, 33 bp, Homo sapien
ccatcttgaactcagacagaagagaggacagat

SEQ ID NO: 113640 - DNA, 33 bp, Homo sapien
ccatcttgaactcagagagaagagaggacagat

SEQ ID NO: 113641 - DNA, 33 bp, Homo sapien
ctacaaatagcaaaccagaagttaacctggaat

SEQ ID NO: 113642 - DNA, 33 bp, Homo sapien
ctacaaatagcaaaccggaagttaacctggaat

SEQ ID NO: 113643 - DNA, 33 bp, Homo sapien
gttacaatggcttcaaaaaggttatcaaggagt

SEQ ID NO: 113644 - DNA, 33 bp, Homo sapien
gttacaatggcttcaagaaggttatcaaggagt

SEQ ID NO: 113645 - DNA, 33 bp, Homo sapien
gttcttaagagaagaaaaagttcaaattcccat

SEQ ID NO: 113646 - DNA, 33 bp, Homo sapien
gttcttaagagaagaagaagttcaaattcccat

SEQ ID NO: 113647 - DNA, 33 bp, Homo sapien
tgatttgtggaggaacagcctgtgttttgtttt

SEQ ID NO: 113648 - DNA, 33 bp, Homo sapien
tgatttgtggaggaacggcctgtgttttgtttt

SEQ ID NO: 113649 - DNA, 33 bp, Homo sapien
gtgttttgttttgtgtcaaagcttctgaatggc

SEQ ID NO: 113650 - DNA, 33 bp, Homo sapien
gtgttttgttttgtgtgaaagcttctgaatggc

SEQ ID NO: 113651 - DNA, 33 bp, Homo sapien
aaagctgcgacaattacgtgattaggaataaca

SEQ ID NO: 113652 - DNA, 33 bp, Homo sapien
aaagctgcgacaattatgtgattaggaataaca

SEQ ID NO: 113653 - DNA, 33 bp, Homo sapien
acatcagctgagtggacggccaagaagcaaaag

SEQ ID NO: 113654 - DNA, 33 bp, Homo sapien
acatcagctgagtggatggccaagaagcaaaag

SEQ ID NO: 113655 - DNA, 33 bp, Homo sapien
agtataatttctctgccgactccatttaatcca

SEQ ID NO: 113656 - DNA, 33 bp, Homo sapien
agtataatttctctgctgactccatttaatcca

SEQ ID NO: 113657 - DNA, 33 bp, Homo sapien
aggagaaatagaaaaaaatacgagatagaggct

SEQ ID NO: 113658 - DNA, 33 bp, Homo sapien
aggagaaatagaaaaagatacgagatagaggct

SEQ ID NO: 113659 - DNA, 33 bp, Homo sapien
tactccactacttccaacgtggtttactgggag

SEQ ID NO: 113660 - DNA, 33 bp, Homo sapien
tactccactacttccagcgtggtttactgggag

SEQ ID NO: 113661 - DNA, 33 bp, Homo sapien
tagctctttgtagtaactgtgcaaggcctcaag

SEQ ID NO: 113662 - DNA, 33 bp, Homo sapien
tagctctttgtagtaattgtgcaaggcctcaag

SEQ ID NO: 113663 - DNA, 33 bp, Homo sapien
aaatgtttaaataagcaaatagtgagaaggatg

SEQ ID NO: 113664 - DNA, 33 bp, Homo sapien
aaatgtttaaataagctaatagtgagaaggatg

SEQ ID NO: 113665 - DNA, 33 bp, Homo sapien
tacttaggtttgaaaactggtaagggagataat

SEQ ID NO: 113666 - DNA, 33 bp, Homo sapien
tacttaggtttgaaaattggtaagggagataat

SEQ ID NO: 113667 - DNA, 33 bp, Homo sapien
ttatgatccatgcatacattcaacgttttggag

SEQ ID NO: 113668 - DNA, 33 bp, Homo sapien
ttatgatccatgcatatattcaacgttttggag

SEQ ID NO: 113669 - DNA, 33 bp, Homo sapien
gttatctgtgaggtgaatcaaaaatctaaatca

SEQ ID NO: 113670 - DNA, 33 bp, Homo sapien
gttatctgtgaggtgagtcaaaaatctaaatca

SEQ ID NO: 113671 - DNA, 33 bp, Homo sapien
aattatgttttagctcagactccaatgtaggta

SEQ ID NO: 113672 - DNA, 33 bp, Homo sapien
aattatgttttagctctgactccaatgtaggta

SEQ ID NO: 113673 - DNA, 33 bp, Homo sapien
tttcatttcatgagacacataacacaagtgatc

SEQ ID NO: 113674 - DNA, 33 bp, Homo sapien
tttcatttcatgagacgcataacacaagtgatc

SEQ ID NO: 113675 - DNA, 33 bp, Homo sapien
tgatgaaacaggcacaaagaagataaggaccct

SEQ ID NO: 113676 - DNA, 33 bp, Homo sapien
tgatgaaacaggcacacagaagataaggaccct

SEQ ID NO: 113677 - DNA, 33 bp, Homo sapien
aaatggtagttgtgaaagttcatgaattaaacc

SEQ ID NO: 113678 - DNA, 33 bp, Homo sapien
aaatggtagttgtgaaggttcatgaattaaacc

SEQ ID NO: 113679 - DNA, 33 bp, Homo sapien
tgcaatcaacatcacaatcaattttagaaattt

SEQ ID NO: 113680 - DNA, 33 bp, Homo sapien
tgcaatcaacatcacagtcaattttagaaattt

SEQ ID NO: 113681 - DNA, 33 bp, Homo sapien
tagggaaaccttccaaaggcagaagatacagat

SEQ ID NO: 113682 - DNA, 33 bp, Homo sapien
tagggaaaccttccaatggcagaagatacagat

SEQ ID NO: 113683 - DNA, 33 bp, Homo sapien
acagattgtttcatgacgtatgcaaaacacagc

SEQ ID NO: 113684 - DNA, 33 bp, Homo sapien
acagattgtttcatgatgtatgcaaaacacagc

SEQ ID NO: 113685 - DNA, 33 bp, Homo sapien
acaccatgtcttggcaacattcttattatttct

SEQ ID NO: 113686 - DNA, 33 bp, Homo sapien
acaccatgtcttggcagcattcttattatttct

SEQ ID NO: 113687 - DNA, 33 bp, Homo sapien
gtacaggatctgaaccagatggaaccagtttga

SEQ ID NO: 113688 - DNA, 33 bp, Homo sapien
gtacaggatctgaaccggatggaaccagtttga

SEQ ID NO: 113689 - DNA, 33 bp, Homo sapien
gctctgtaactcaggaaatatgattggattttt

SEQ ID NO: 113690 - DNA, 33 bp, Homo sapien
gctctgtaactcaggagatatgattggattttt

SEQ ID NO: 113691 - DNA, 33 bp, Homo sapien
agaggagagccactgcaaaccagaagtaaagtg

SEQ ID NO: 113692 - DNA, 33 bp, Homo sapien
agaggagagccactgccaaccagaagtaaagtg

SEQ ID NO: 113693 - DNA, 33 bp, Homo sapien
ctcttcttgaggtcacacaaatagtctcggttt

SEQ ID NO: 113694 - DNA, 33 bp, Homo sapien
ctcttcttgaggtcacgcaaatagtctcggttt

SEQ ID NO: 113695 - DNA, 33 bp, Homo sapien
tggaaaagcattgtaaaaattcctgtcgtgttc

SEQ ID NO: 113696 - DNA, 33 bp, Homo sapien
tggaaaagcattgtaagaattcctgtcgtgttc

SEQ ID NO: 113697 - DNA, 33 bp, Homo sapien
gggtatagaggaagcaagatgggcagtatgcca

SEQ ID NO: 113698 - DNA, 33 bp, Homo sapien
gggtatagaggaagcacgatgggcagtatgcca

SEQ ID NO: 113699 - DNA, 33 bp, Homo sapien
aatacttcatttacaaacctctaaaatatacat

SEQ ID NO: 113700 - DNA, 33 bp, Homo sapien
aatacttcatttacaagcctctaaaatatacat

SEQ ID NO: 113701 - DNA, 33 bp, Homo sapien
cctgagagataccagaatatggctggtgatatg

SEQ ID NO: 113702 - DNA, 33 bp, Homo sapien
cctgagagataccagagtatggctggtgatatg

SEQ ID NO: 113703 - DNA, 33 bp, Homo sapien
tacacacgtgtaagacgagtacctcttcagagt

SEQ ID NO: 113704 - DNA, 33 bp, Homo sapien
tacacacgtgtaagactagtacctcttcagagt

SEQ ID NO: 113705 - DNA, 33 bp, Homo sapien
cacagctgcaagagaaatgatcgcccagcggag

SEQ ID NO: 113706 - DNA, 33 bp, Homo sapien
cacagctgcaagagaagtgatcgcccagcggag

SEQ ID NO: 113707 - DNA, 33 bp, Homo sapien
agtgcagtggtgacagaagggaaagtaatttat

SEQ ID NO: 113708 - DNA, 33 bp, Homo sapien
agtgcagtggtgacagtagggaaagtaatttat

SEQ ID NO: 113709 - DNA, 33 bp, Homo sapien
ttaggtgaggggtctaagacagaaggatcagcc

SEQ ID NO: 113710 - DNA, 33 bp, Homo sapien
ttaggtgaggggtctaggacagaaggatcagcc

SEQ ID NO: 113711 - DNA, 33 bp, Homo sapien
tttctgaccatgcttacacttcgctgtcttctt

SEQ ID NO: 113712 - DNA, 33 bp, Homo sapien
tttctgaccatgcttatacttcgctgtcttctt

SEQ ID NO: 113713 - DNA, 33 bp, Homo sapien
tttagaaaaacaagaaatcagtgcatggtaaat

SEQ ID NO: 113714 - DNA, 33 bp, Homo sapien
tttagaaaaacaagaagtcagtgcatggtaaat

SEQ ID NO: 113715 - DNA, 33 bp, Homo sapien
taaaatccagctgccacgggtagagaggagttt

SEQ ID NO: 113716 - DNA, 33 bp, Homo sapien
taaaatccagctgccatgggtagagaggagttt

SEQ ID NO: 113717 - DNA, 33 bp, Homo sapien
aaacagtctgcactcacaagatggcatcacatc

SEQ ID NO: 113718 - DNA, 33 bp, Homo sapien
aaacagtctgcactcataagatggcatcacatc

SEQ ID NO: 113719 - DNA, 33 bp, Homo sapien
ctggaaagcgaaagtgaactgtccaacagaaag

SEQ ID NO: 113720 - DNA, 33 bp, Homo sapien
ctggaaagcgaaagtggactgtccaacagaaag

SEQ ID NO: 113721 - DNA, 33 bp, Homo sapien
actcctttcagtcaacaaaggagtaagttcaat

SEQ ID NO: 113722 - DNA, 33 bp, Homo sapien
actcctttcagtcaacgaaggagtaagttcaat

SEQ ID NO: 113723 - DNA, 33 bp, Homo sapien
cacttcctatgaaaaagtaccctttgtgaaata

SEQ ID NO: 113724 - DNA, 33 bp, Homo sapien
cacttcctatgaaaaattaccctttgtgaaata

SEQ ID NO: 113725 - DNA, 33 bp, Homo sapien
ctactcatggctgtgacgagtagtactgcctgt

SEQ ID NO: 113726 - DNA, 33 bp, Homo sapien
ctactcatggctgtgatgagtagtactgcctgt

SEQ ID NO: 113727 - DNA, 33 bp, Homo sapien
tcctctctaaattcggaataaggtagtggtaag

SEQ ID NO: 113728 - DNA, 33 bp, Homo sapien
tcctctctaaattcgggataaggtagtggtaag

SEQ ID NO: 113729 - DNA, 33 bp, Homo sapien
aaggctcaaaagttatcaagtgtgttaaggcaa

SEQ ID NO: 113730 - DNA, 33 bp, Homo sapien
aaggctcaaaagttatgaagtgtgttaaggcaa

SEQ ID NO: 113731 - DNA, 33 bp, Homo sapien
cactatagcttgcttacccttatacagtacagg

SEQ ID NO: 113732 - DNA, 33 bp, Homo sapien
cactatagcttgcttatccttatacagtacagg

SEQ ID NO: 113733 - DNA, 33 bp, Homo sapien
ataacttcagagaacactgtctttcaaagaaaa

SEQ ID NO: 113734 - DNA, 33 bp, Homo sapien
ataacttcagagaacattgtctttcaaagaaaa

SEQ ID NO: 113735 - DNA, 33 bp, Homo sapien
acacacatagtaattaacaacctgaggtccaca

SEQ ID NO: 113736 - DNA, 33 bp, Homo sapien
acacacatagtaattatcaacctgaggtccaca

SEQ ID NO: 113737 - DNA, 33 bp, Homo sapien
ttatatacttgtgaaacagtatgaaacagatat

SEQ ID NO: 113738 - DNA, 33 bp, Homo sapien
ttatatacttgtgaaatagtatgaaacagatat

SEQ ID NO: 113739 - DNA, 33 bp, Homo sapien
cataaatatgtccataactgaagagacagataa

SEQ ID NO: 113740 - DNA, 33 bp, Homo sapien
cataaatatgtccatacctgaagagacagataa

SEQ ID NO: 113741 - DNA, 33 bp, Homo sapien
atgtaaatcatgataaagcatagtgtagtgcat

SEQ ID NO: 113742 - DNA, 33 bp, Homo sapien
atgtaaatcatgataaggcatagtgtagtgcat

SEQ ID NO: 113743 - DNA, 33 bp, Homo sapien
aaaaataacctcgtcaatcttgcagggacccaa

SEQ ID NO: 113744 - DNA, 33 bp, Homo sapien
aaaaataacctcgtcagtcttgcagggacccaa

SEQ ID NO: 113745 - DNA, 33 bp, Homo sapien
acattctatgacaaacactgcttggtgggcaag

SEQ ID NO: 113746 - DNA, 33 bp, Homo sapien
acattctatgacaaacgctgcttggtgggcaag

SEQ ID NO: 113747 - DNA, 33 bp, Homo sapien
tttgaaatgatacttacgtgtctgccttaaata

SEQ ID NO: 113748 - DNA, 33 bp, Homo sapien
tttgaaatgatacttatgtgtctgccttaaata

SEQ ID NO: 113749 - DNA, 33 bp, Homo sapien
aggacttgtgctaggaggatctacagtggacct

SEQ ID NO: 113750 - DNA, 33 bp, Homo sapien
aggacttgtgctaggatgatctacagtggacct

SEQ ID NO: 113751 - DNA, 33 bp, Homo sapien
agggctgcatgcttagactaagagtgaactagt

SEQ ID NO: 113752 - DNA, 33 bp, Homo sapien
agggctgcatgcttaggctaagagtgaactagt

SEQ ID NO: 113753 - DNA, 33 bp, Homo sapien
cccagggcagatttccaccttgtaacctaagct

SEQ ID NO: 113754 - DNA, 33 bp, Homo sapien
cccagggcagatttccgccttgtaacctaagct

SEQ ID NO: 113755 - DNA, 33 bp, Homo sapien
cttgtagcatgatttcccttagcaggctttttt

SEQ ID NO: 113756 - DNA, 33 bp, Homo sapien
cttgtagcatgatttctcttagcaggctttttt

SEQ ID NO: 113757 - DNA, 33 bp, Homo sapien
aatgcttaacgccaccaaattgtacactcaaaa

SEQ ID NO: 113758 - DNA, 33 bp, Homo sapien
aatgcttaacgccaccgaattgtacactcaaaa

SEQ ID NO: 113759 - DNA, 33 bp, Homo sapien
ggacaggagatttcaccgtaacataaaaaagaa

SEQ ID NO: 113760 - DNA, 33 bp, Homo sapien
ggacaggagatttcactgtaacataaaaaagaa

SEQ ID NO: 113761 - DNA, 33 bp, Homo sapien
gcctaggtcattgttacaggactgcagagcaag

SEQ ID NO: 113762 - DNA, 33 bp, Homo sapien
gcctaggtcattgttataggactgcagagcaag

SEQ ID NO: 113763 - DNA, 33 bp, Homo sapien
ctcccctaaatcctcaacattcactagccttca

SEQ ID NO: 113764 - DNA, 33 bp, Homo sapien
ctcccctaaatcctcatcattcactagccttca

SEQ ID NO: 113765 - DNA, 33 bp, Homo sapien
gaattctgctatgaaaagtagtctgaatctggg

SEQ ID NO: 113766 - DNA, 33 bp, Homo sapien
gaattctgctatgaaatgtagtctgaatctggg

SEQ ID NO: 113767 - DNA, 33 bp, Homo sapien
ttaattaagagttaacagcaaaaccaggacgag

SEQ ID NO: 113768 - DNA, 33 bp, Homo sapien
ttaattaagagttaacggcaaaaccaggacgag

SEQ ID NO: 113769 - DNA, 33 bp, Homo sapien
tccttccagttgtttccaatgcttctgcccttt

SEQ ID NO: 113770 - DNA, 33 bp, Homo sapien
tccttccagttgtttctaatgcttctgcccttt

SEQ ID NO: 113771 - DNA, 33 bp, Homo sapien
gtattcagttaagatacggagacttaagcaaac

SEQ ID NO: 113772 - DNA, 33 bp, Homo sapien
gtattcagttaagatatggagacttaagcaaac

SEQ ID NO: 113773 - DNA, 33 bp, Homo sapien
tacctggggctgcatccagtcaaagaggataac

SEQ ID NO: 113774 - DNA, 33 bp, Homo sapien
tacctggggctgcatctagtcaaagaggataac

SEQ ID NO: 113775 - DNA, 33 bp, Homo sapien
tattgctaagctgtcaataggaattaaggtgaa

SEQ ID NO: 113776 - DNA, 33 bp, Homo sapien
tattgctaagctgtcattaggaattaaggtgaa

SEQ ID NO: 113777 - DNA, 33 bp, Homo sapien
caccgccagaggattgaaacagcagacacatca

SEQ ID NO: 113778 - DNA, 33 bp, Homo sapien
caccgccagaggattggaacagcagacacatca

SEQ ID NO: 113779 - DNA, 33 bp, Homo sapien
gataggagaacaaaagacaagtttagtgccaaa

SEQ ID NO: 113780 - DNA, 33 bp, Homo sapien
gataggagaacaaaaggcaagtttagtgccaaa

SEQ ID NO: 113781 - DNA, 33 bp, Homo sapien
acttaaatgccattacgcagtgcataatcatct

SEQ ID NO: 113782 - DNA, 33 bp, Homo sapien
acttaaatgccattactcagtgcataatcatct

SEQ ID NO: 113783 - DNA, 33 bp, Homo sapien
acccagaggcaacaaagaaaagaggtcacttga

SEQ ID NO: 113784 - DNA, 33 bp, Homo sapien
acccagaggcaacaaataaaagaggtcacttga

SEQ ID NO: 113785 - DNA, 33 bp, Homo sapien
aatgaagtgaagacaccatgttttgactcaacg

SEQ ID NO: 113786 - DNA, 33 bp, Homo sapien
aatgaagtgaagacacgatgttttgactcaacg

SEQ ID NO: 113787 - DNA, 33 bp, Homo sapien
agaacatttaaggggacgagcggcaccattgag

SEQ ID NO: 113788 - DNA, 33 bp, Homo sapien
agaacatttaaggggatgagcggcaccattgag

SEQ ID NO: 113789 - DNA, 33 bp, Homo sapien
tttaaaaagggcataaaagagatattactatac

SEQ ID NO: 113790 - DNA, 33 bp, Homo sapien
tttaaaaagggcataacagagatattactatac

SEQ ID NO: 113791 - DNA, 33 bp, Homo sapien
tgaacagaaaacaagacataggagttggggaac

SEQ ID NO: 113792 - DNA, 33 bp, Homo sapien
tgaacagaaaacaagatataggagttggggaac

SEQ ID NO: 113793 - DNA, 33 bp, Homo sapien
ataaatttctcctcccacattacatacctgaga

SEQ ID NO: 113794 - DNA, 33 bp, Homo sapien
ataaatttctcctcccgcattacatacctgaga

SEQ ID NO: 113795 - DNA, 33 bp, Homo sapien
agtctaactgcaaggcacaacatcaagattttt

SEQ ID NO: 113796 - DNA, 33 bp, Homo sapien
agtctaactgcaaggcgcaacatcaagattttt

SEQ ID NO: 113797 - DNA, 33 bp, Homo sapien
tgacactgtgacatccagctcatacttggctca

SEQ ID NO: 113798 - DNA, 33 bp, Homo sapien
tgacactgtgacatcccgctcatacttggctca

SEQ ID NO: 113799 - DNA, 33 bp, Homo sapien
catttttagtcaataaacagatatcatatacct

SEQ ID NO: 113800 - DNA, 33 bp, Homo sapien
catttttagtcaataaccagatatcatatacct

SEQ ID NO: 113801 - DNA, 33 bp, Homo sapien
cctatatttcctctagaagcaatgactcagtat

SEQ ID NO: 113802 - DNA, 33 bp, Homo sapien
cctatatttcctctaggagcaatgactcagtat

SEQ ID NO: 113803 - DNA, 33 bp, Homo sapien
cactggaggaaaagaggcctgaaacaatgagag

SEQ ID NO: 113804 - DNA, 33 bp, Homo sapien
cactggaggaaaagagtcctgaaacaatgagag

SEQ ID NO: 113805 - DNA, 33 bp, Homo sapien
atggtgttctttgaaacgcaaaagtatttaaat

SEQ ID NO: 113806 - DNA, 33 bp, Homo sapien
atggtgttctttgaaatgcaaaagtatttaaat

SEQ ID NO: 113807 - DNA, 33 bp, Homo sapien
ggaaaaagtacagaaacgaacacaagttatacc

SEQ ID NO: 113808 - DNA, 33 bp, Homo sapien
ggaaaaagtacagaaatgaacacaagttatacc

SEQ ID NO: 113809 - DNA, 33 bp, Homo sapien
taaatatgaaaggttgaaagaatagtacaatag

SEQ ID NO: 113810 - DNA, 33 bp, Homo sapien
taaatatgaaaggttggaagaatagtacaatag

SEQ ID NO: 113811 - DNA, 33 bp, Homo sapien
gtgaccctttgtcaagaatgttgtagaggagag

SEQ ID NO: 113812 - DNA, 33 bp, Homo sapien
gtgaccctttgtcaaggatgttgtagaggagag

SEQ ID NO: 113813 - DNA, 33 bp, Homo sapien
gaggagataatgtattaaaggacagaatcggga

SEQ ID NO: 113814 - DNA, 33 bp, Homo sapien
gaggagataatgtattgaaggacagaatcggga

SEQ ID NO: 113815 - DNA, 33 bp, Homo sapien
taaggacaaagtcctcaagtcaggttgcagtgg

SEQ ID NO: 113816 - DNA, 33 bp, Homo sapien
taaggacaaagtcctccagtcaggttgcagtgg

SEQ ID NO: 113817 - DNA, 33 bp, Homo sapien
ttatttaaagcgaaaaccacatgtgagagctat

SEQ ID NO: 113818 - DNA, 33 bp, Homo sapien
ttatttaaagcgaaaatcacatgtgagagctat

SEQ ID NO: 113819 - DNA, 33 bp, Homo sapien
tagcattgtttaagaaaatccagacaggtacct

SEQ ID NO: 113820 - DNA, 33 bp, Homo sapien
tagcattgtttaagaagatccagacaggtacct

SEQ ID NO: 113821 - DNA, 33 bp, Homo sapien
tatttgaactcagccagctgtgagtgctactct

SEQ ID NO: 113822 - DNA, 33 bp, Homo sapien
tatttgaactcagccatctgtgagtgctactct

SEQ ID NO: 113823 - DNA, 33 bp, Homo sapien; identical to SEQ ID NO: 113821

SEQ ID NO: 113824 - DNA, 33 bp, Homo sapien; identical to SEQ ID NO: 113822

SEQ ID NO: 113825 - DNA, 33 bp, Homo sapien
ctgatctaacctacagaaggatgaaagatcaca

SEQ ID NO: 113826 - DNA, 33 bp, Homo sapien
ctgatctaacctacaggaggatgaaagatcaca

SEQ ID NO: 113827 - DNA, 33 bp, Homo sapien
aaggttgaatccctacatgataagaaactgcat

SEQ ID NO: 113828 - DNA, 33 bp, Homo sapien
aaggttgaatccctacgtgataagaaactgcat

SEQ ID NO: 113829 - DNA, 33 bp, Homo sapien
tcatggccaaagtcccacagaaggagtgactga

SEQ ID NO: 113830 - DNA, 33 bp, Homo sapien
tcatggccaaagtcccgcagaaggagtgactga

SEQ ID NO: 113831 - DNA, 33 bp, Homo sapien
aatttaacctgaaagaagaaacaaatagcaggg

SEQ ID NO: 113832 - DNA, 33 bp, Homo sapien
aatttaacctgaaagaggaaacaaatagcaggg

SEQ ID NO: 113833 - DNA, 33 bp, Homo sapien
gattaaaatttatgaaccaattgtcatccaaaa

SEQ ID NO: 113834 - DNA, 33 bp, Homo sapien
gattaaaatttatgaatcaattgtcatccaaaa

SEQ ID NO: 113835 - DNA, 33 bp, Homo sapien
ctaatttatttgttgcacactgagaaggtaaca

SEQ ID NO: 113836 - DNA, 33 bp, Homo sapien
ctaatttatttgttgcgcactgagaaggtaaca

SEQ ID NO: 113837 - DNA, 33 bp, Homo sapien
atggctctgatattatcaaccacaactggcagt

SEQ ID NO: 113838 - DNA, 33 bp, Homo sapien
atggctctgatattattaaccacaactggcagt

SEQ ID NO: 113839 - DNA, 33 bp, Homo sapien
agaggtcaccaacagaatacccataagctgaat

SEQ ID NO: 113840 - DNA, 33 bp, Homo sapien
agaggtcaccaacagactacccataagctgaat

SEQ ID NO: 113841 - DNA, 33 bp, Homo sapien
aagttttcagaagttgcaccattgttcctgttc

SEQ ID NO: 113842 - DNA, 33 bp, Homo sapien
aagttttcagaagttgtaccattgttcctgttc

SEQ ID NO: 113843 - DNA, 33 bp, Homo sapien
tatttttgtaatataactcctctgcccagctag

SEQ ID NO: 113844 - DNA, 33 bp, Homo sapien
tatttttgtaatataattcctctgcccagctag

SEQ ID NO: 113845 - DNA, 33 bp, Homo sapien
cagaagaactaggctgcagactgactctcttct

SEQ ID NO: 113846 - DNA, 33 bp, Homo sapien
cagaagaactaggctggagactgactctcttct

SEQ ID NO: 113847 - DNA, 33 bp, Homo sapien
cactccctcgataacaacattaatccaaccata

SEQ ID NO: 113848 - DNA, 33 bp, Homo sapien
cactccctcgataacatcattaatccaaccata

SEQ ID NO: 113849 - DNA, 33 bp, Homo sapien
cacttattgagtacctaagagtgttttacatac

SEQ ID NO: 113850 - DNA, 33 bp, Homo sapien
cacttattgagtacctcagagtgttttacatac

SEQ ID NO: 113851 - DNA, 33 bp, Homo sapien
aaaacaagggtttctgccaattgttaatgcagt

SEQ ID NO: 113852 - DNA, 33 bp, Homo sapien
aaaacaagggtttctggcaattgttaatgcagt

SEQ ID NO: 113853 - DNA, 33 bp, Homo sapien
tgaacagtgtgtccaaatgaggcctaaattcag

SEQ ID NO: 113854 - DNA, 33 bp, Homo sapien
tgaacagtgtgtccaagtgaggcctaaattcag

SEQ ID NO: 113855 - DNA, 33 bp, Homo sapien
ttagatctagcatttccccatctctacagacac

SEQ ID NO: 113856 - DNA, 33 bp, Homo sapien
ttagatctagcatttctccatctctacagacac

SEQ ID NO: 113857 - DNA, 33 bp, Homo sapien
ttgccctgtggcttaacagcattgtttattctc

SEQ ID NO: 113858 - DNA, 33 bp, Homo sapien
ttgccctgtggcttaatagcattgtttattctc

SEQ ID NO: 113859 - DNA, 33 bp, Homo sapien
caattgtcgccattcacacagccctaccttagg

SEQ ID NO: 113860 - DNA, 33 bp, Homo sapien
caattgtcgccattcatacagccctaccttagg

SEQ ID NO: 113861 - DNA, 33 bp, Homo sapien
tttcttcacatattaaagtcatacttgcttctc

SEQ ID NO: 113862 - DNA, 33 bp, Homo sapien
tttcttcacatattaacgtcatacttgcttctc

SEQ ID NO: 113863 - DNA, 33 bp, Homo sapien
atgaagggaagcacaaataagtatagctttgga

SEQ ID NO: 113864 - DNA, 33 bp, Homo sapien
atgaagggaagcacaagtaagtatagctttgga

SEQ ID NO: 113865 - DNA, 33 bp, Homo sapien
ctaacaaaatactgcaatgcaggaattcaggcc

SEQ ID NO: 113866 - DNA, 33 bp, Homo sapien
ctaacaaaatactgcagtgcaggaattcaggcc

SEQ ID NO: 113867 - DNA, 33 bp, Homo sapien
cctggctaaacatgtaccaatacaaaaattaaa

SEQ ID NO: 113868 - DNA, 33 bp, Homo sapien
cctggctaaacatgtagcaatacaaaaattaaa

SEQ ID NO: 113869 - DNA, 33 bp, Homo sapien
agagttacgaatttctaactcagtctttgagag

SEQ ID NO: 113870 - DNA, 33 bp, Homo sapien
agagttacgaatttctgactcagtctttgagag

SEQ ID NO: 113871 - DNA, 33 bp, Homo sapien
tactggggacaactcactccatttggcaacaat

SEQ ID NO: 113872 - DNA, 33 bp, Homo sapien
tactggggacaactcattccatttggcaacaat

SEQ ID NO: 113873 - DNA, 33 bp, Homo sapien
ttcttatatttgtacaacctgactgtgaatttg

SEQ ID NO: 113874 - DNA, 33 bp, Homo sapien
ttcttatatttgtacatcctgactgtgaatttg

SEQ ID NO: 113875 - DNA, 33 bp, Homo sapien
aggatccagtcagataaagccttggcgtcaccc

SEQ ID NO: 113876 - DNA, 33 bp, Homo sapien
aggatccagtcagatagagccttggcgtcaccc

SEQ ID NO: 113877 - DNA, 33 bp, Homo sapien
cttgttttttataggcaaatggacatacctgtg

SEQ ID NO: 113878 - DNA, 33 bp, Homo sapien
cttgttttttataggcgaatggacatacctgtg

SEQ ID NO: 113879 - DNA, 33 bp, Homo sapien
ctaggcattagggtctaaaatccacaggtatgt

SEQ ID NO: 113880 - DNA, 33 bp, Homo sapien
ctaggcattagggtctgaaatccacaggtatgt

SEQ ID NO: 113881 - DNA, 33 bp, Homo sapien
caggagtctttgagtacagattctgattcagta

SEQ ID NO: 113882 - DNA, 33 bp, Homo sapien
caggagtctttgagtatagattctgattcagta

SEQ ID NO: 113883 - DNA, 33 bp, Homo sapien
aggactcaacttttgagccccttcttggcttac

SEQ ID NO: 113884 - DNA, 33 bp, Homo sapien
aggactcaacttttgatccccttcttggcttac

SEQ ID NO: 113885 - DNA, 33 bp, Homo sapien
actatgtactatatccaacacaattattctcac

SEQ ID NO: 113886 - DNA, 33 bp, Homo sapien
actatgtactatatccgacacaattattctcac

SEQ ID NO: 113887 - DNA, 33 bp, Homo sapien
acataactggtactgaaaaagaatttaatgaag

SEQ ID NO: 113888 - DNA, 33 bp, Homo sapien
acataactggtactgagaaagaatttaatgaag

SEQ ID NO: 113889 - DNA, 33 bp, Homo sapien
tcctacaaaaaaatcacgtgaggccaacccctt

SEQ ID NO: 113890 - DNA, 33 bp, Homo sapien
tcctacaaaaaaatcatgtgaggccaacccctt

SEQ ID NO: 113891 - DNA, 33 bp, Homo sapien
caagaccttcatgtaccccacaaccctttcatc

SEQ ID NO: 113892 - DNA, 33 bp, Homo sapien
caagaccttcatgtactccacaaccctttcatc

SEQ ID NO: 113893 - DNA, 33 bp, Homo sapien
aggaggtgtaaaaaaaatcataagtcaggaatg

SEQ ID NO: 113894 - DNA, 33 bp, Homo sapien
aggaggtgtaaaaaaagtcataagtcaggaatg

SEQ ID NO: 113895 - DNA, 33 bp, Homo sapien
ttctgccagaaaaacacgatgcttttccttgtt

SEQ ID NO: 113896 - DNA, 33 bp, Homo sapien
ttctgccagaaaaacatgatgcttttccttgtt

SEQ ID NO: 113897 - DNA, 33 bp, Homo sapien
caagaaggtaaggaaacgtgattcttgcaaagt

SEQ ID NO: 113898 - DNA, 33 bp, Homo sapien
caagaaggtaaggaaatgtgattcttgcaaagt

SEQ ID NO: 113899 - DNA, 33 bp, Homo sapien
tgttgctttagatctacgctcagatgaaaaaaa

SEQ ID NO: 113900 - DNA, 33 bp, Homo sapien
tgttgctttagatctatgctcagatgaaaaaaa

SEQ ID NO: 113901 - DNA, 33 bp, Homo sapien
tacttaggttgtatgacagggttttcctgcagg

SEQ ID NO: 113902 - DNA, 33 bp, Homo sapien
tacttaggttgtatgatagggttttcctgcagg

SEQ ID NO: 113903 - DNA, 33 bp, Homo sapien
atacccacataaaaaccgaggctttcagagtta

SEQ ID NO: 113904 - DNA, 33 bp, Homo sapien
atacccacataaaaactgaggctttcagagtta

SEQ ID NO: 113905 - DNA, 33 bp, Homo sapien
tttacttcaatcaaatcaaaacactaaagtctg

SEQ ID NO: 113906 - DNA, 33 bp, Homo sapien
tttacttcaatcaaatgaaaacactaaagtctg

SEQ ID NO: 113907 - DNA, 33 bp, Homo sapien
atttttcatcagaaaccaactgagacttttaaa

SEQ ID NO: 113908 - DNA, 33 bp, Homo sapien
atttttcatcagaaactaactgagacttttaaa

SEQ ID NO: 113909 - DNA, 33 bp, Homo sapien
ggagaccataatacaacgaagcataaataacat

SEQ ID NO: 113910 - DNA, 33 bp, Homo sapien
ggagaccataatacaatgaagcataaataacat

SEQ ID NO: 113911 - DNA, 33 bp, Homo sapien
aatgggttactcttaacgctttcaaatgaccat

SEQ ID NO: 113912 - DNA, 33 bp, Homo sapien
aatgggttactcttaatgctttcaaatgaccat

SEQ ID NO: 113913 - DNA, 33 bp, Homo sapien
cctgaccaggtcacaaatagcctttgaaatcta

SEQ ID NO: 113914 - DNA, 33 bp, Homo sapien
cctgaccaggtcacaagtagcctttgaaatcta

SEQ ID NO: 113915 - DNA, 33 bp, Homo sapien
agcattaataaggacaagtttttaatgcatttg

SEQ ID NO: 113916 - DNA, 33 bp, Homo sapien
agcattaataaggacaggtttttaatgcatttg

SEQ ID NO: 113917 - DNA, 33 bp, Homo sapien
agtcaacatttgctataaattacatgtatgtac

SEQ ID NO: 113918 - DNA, 33 bp, Homo sapien
agtcaacatttgctatcaattacatgtatgtac

SEQ ID NO: 113919 - DNA, 33 bp, Homo sapien
ctccacgcaagtgtacggcccccactcgaatca

SEQ ID NO: 113920 - DNA, 33 bp, Homo sapien
ctccacgcaagtgtactgcccccactcgaatca

SEQ ID NO: 113921 - DNA, 33 bp, Homo sapien
ggaaatgggaggatacaaagtgtgcatagggag

SEQ ID NO: 113922 - DNA, 33 bp, Homo sapien
ggaaatgggaggatacgaagtgtgcatagggag

SEQ ID NO: 113923 - DNA, 33 bp, Homo sapien
tttcagtgagccagcacagatagcgccactgca

SEQ ID NO: 113924 - DNA, 33 bp, Homo sapien
tttcagtgagccagcatagatagcgccactgca

SEQ ID NO: 113925 - DNA, 33 bp, Homo sapien
tcactgctaagaaaatgatcaatgatttcctac

SEQ ID NO: 113926 - DNA, 33 bp, Homo sapien
tcactgctaagaaaattatcaatgatttcctac

SEQ ID NO: 113927 - DNA, 33 bp, Homo sapien
actactgtgcatacttaaagccaggtattatct

SEQ ID NO: 113928 - DNA, 33 bp, Homo sapien
actactgtgcatactttaagccaggtattatct

SEQ ID NO: 113929 - DNA, 33 bp, Homo sapien
tttttttttaactggcgagtaccagaagattta

SEQ ID NO: 113930 - DNA, 33 bp, Homo sapien
tttttttttaactggctagtaccagaagattta

SEQ ID NO: 113931 - DNA, 33 bp, Homo sapien
gataaagtttccatcaagagaatacaccctagt

SEQ ID NO: 113932 - DNA, 33 bp, Homo sapien
gataaagtttccatcaggagaatacaccctagt

SEQ ID NO: 113933 - DNA, 33 bp, Homo sapien
ggtgagtagagggtgcaacggcttctagaaaga

SEQ ID NO: 113934 - DNA, 33 bp, Homo sapien
ggtgagtagagggtgcgacggcttctagaaaga

SEQ ID NO: 113935 - DNA, 33 bp, Homo sapien
tgacttgatgcatttcaaaacttttatcttgag

SEQ ID NO: 113936 - DNA, 33 bp, Homo sapien
tgacttgatgcatttcgaaacttttatcttgag

SEQ ID NO: 113937 - DNA, 33 bp, Homo sapien
cagcaaagagaggaaacgaaaactattgggaaa

SEQ ID NO: 113938 - DNA, 33 bp, Homo sapien
cagcaaagagaggaaatgaaaactattgggaaa

SEQ ID NO: 113939 - DNA, 33 bp, Homo sapien
caaactttgtcattcaaacctgattcttttttg

SEQ ID NO: 113940 - DNA, 33 bp, Homo sapien
caaactttgtcattcagacctgattcttttttg

SEQ ID NO: 113941 - DNA, 33 bp, Homo sapien
agttcaattatatgcaacagtatgaataaatct

SEQ ID NO: 113942 - DNA, 33 bp, Homo sapien
agttcaattatatgcagcagtatgaataaatct

SEQ ID NO: 113943 - DNA, 33 bp, Homo sapien
tcaaactagcactacaatcaagatactagtttt

SEQ ID NO: 113944 - DNA, 33 bp, Homo sapien
tcaaactagcactacagtcaagatactagtttt

SEQ ID NO: 113945 - DNA, 33 bp, Homo sapien
taccacaatgctgggcaaagttttagagacttc

SEQ ID NO: 113946 - DNA, 33 bp, Homo sapien
taccacaatgctgggcgaagttttagagacttc

SEQ ID NO: 113947 - DNA, 33 bp, Homo sapien
aaagtacaatgaaaaacgtaagaagacaccaga

SEQ ID NO: 113948 - DNA, 33 bp, Homo sapien
aaagtacaatgaaaaatgtaagaagacaccaga

SEQ ID NO: 113949 - DNA, 33 bp, Homo sapien
ttcacaaatggtttctcaaacatggctatgtgt

SEQ ID NO: 113950 - DNA, 33 bp, Homo sapien
ttcacaaatggtttcttaaacatggctatgtgt

SEQ ID NO: 113951 - DNA, 33 bp, Homo sapien
tttgtgaattctaagagggtaagccgagaattt

SEQ ID NO: 113952 - DNA, 33 bp, Homo sapien
tttgtgaattctaagatggtaagccgagaattt

SEQ ID NO: 113953 - DNA, 33 bp, Homo sapien
atatgccctgatgtgaaaacagaaaagcagcaa

SEQ ID NO: 113954 - DNA, 33 bp, Homo sapien
atatgccctgatgtgagaacagaaaagcagcaa

SEQ ID NO: 113955 - DNA, 33 bp, Homo sapien
ttgcttgacaaaactcgagtcttttcttcatga

SEQ ID NO: 113956 - DNA, 33 bp, Homo sapien
ttgcttgacaaaactctagtcttttcttcatga

SEQ ID NO: 113957 - DNA, 33 bp, Homo sapien
tgttacttcaccataacatagcaaagaagaagc

SEQ ID NO: 113958 - DNA, 33 bp, Homo sapien
tgttacttcaccataatatagcaaagaagaagc

SEQ ID NO: 113959 - DNA, 33 bp, Homo sapien
cagataattcagtcagacaatgagtatatatgg

SEQ ID NO: 113960 - DNA, 33 bp, Homo sapien
cagataattcagtcaggcaatgagtatatatgg

SEQ ID NO: 113961 - DNA, 33 bp, Homo sapien
ctcctcctgaagactagaggacacataaggatt

SEQ ID NO: 113962 - DNA, 33 bp, Homo sapien
ctcctcctgaagactataggacacataaggatt

SEQ ID NO: 113963 - DNA, 33 bp, Homo sapien
tctatttagaggactaccacagggatctttgag

SEQ ID NO: 113964 - DNA, 33 bp, Homo sapien
tctatttagaggactatcacagggatctttgag

SEQ ID NO: 113965 - DNA, 33 bp, Homo sapien
cttaaaccatttacctaaaccttatcacaattc

SEQ ID NO: 113966 - DNA, 33 bp, Homo sapien
cttaaaccatttacctgaaccttatcacaattc

SEQ ID NO: 113967 - DNA, 33 bp, Homo sapien
aggaaaggtagagaaaagaggctagaatagagg

SEQ ID NO: 113968 - DNA, 33 bp, Homo sapien
aggaaaggtagagaaacgaggctagaatagagg

SEQ ID NO: 113969 - DNA, 33 bp, Homo sapien
gtaaagaagtaatctgaattagaatctatttgg

SEQ ID NO: 113970 - DNA, 33 bp, Homo sapien
gtaaagaagtaatctggattagaatctatttgg

SEQ ID NO: 113971 - DNA, 33 bp, Homo sapien
cattaaagaagtaacaataaaacaagcaccatc

SEQ ID NO: 113972 - DNA, 33 bp, Homo sapien
cattaaagaagtaacagtaaaacaagcaccatc

SEQ ID NO: 113973 - DNA, 33 bp, Homo sapien
gagagtgtctagtctacggaagtgccaagggtt

SEQ ID NO: 113974 - DNA, 33 bp, Homo sapien
gagagtgtctagtctatggaagtgccaagggtt

SEQ ID NO: 113975 - DNA, 33 bp, Homo sapien
ttttaagacagagtaacccttacttgagaaaag

SEQ ID NO: 113976 - DNA, 33 bp, Homo sapien
ttttaagacagagtaatccttacttgagaaaag

SEQ ID NO: 113977 - DNA, 33 bp, Homo sapien
aactccttctgaaacacggtgcatccatccaag

SEQ ID NO: 113978 - DNA, 33 bp, Homo sapien
aactccttctgaaacatggtgcatccatccaag

SEQ ID NO: 113979 - DNA, 33 bp, Homo sapien
gattcttcttgcaggcaatatgaagaggggtaa

SEQ ID NO: 113980 - DNA, 33 bp, Homo sapien
gattcttcttgcaggcgatatgaagaggggtaa

SEQ ID NO: 113981 - DNA, 33 bp, Homo sapien
tacctaactcagcttcaacaattgtcaccccat

SEQ ID NO: 113982 - DNA, 33 bp, Homo sapien
tacctaactcagcttccacaattgtcaccccat

SEQ ID NO: 113983 - DNA, 33 bp, Homo sapien
tgatgatagtgaaagacaaactaaagggcatca

SEQ ID NO: 113984 - DNA, 33 bp, Homo sapien
tgatgatagtgaaagataaactaaagggcatca

SEQ ID NO: 113985 - DNA, 33 bp, Homo sapien
aaacaaatcaaaatgaaagtggtacctcagggc

SEQ ID NO: 113986 - DNA, 33 bp, Homo sapien
aaacaaatcaaaatgacagtggtacctcagggc

SEQ ID NO: 113987 - DNA, 33 bp, Homo sapien
tttagaaacttgatgaccttatgacaaaagcat

SEQ ID NO: 113988 - DNA, 33 bp, Homo sapien
tttagaaacttgatgatcttatgacaaaagcat

SEQ ID NO: 113989 - DNA, 33 bp, Homo sapien
ttgaacaaagcttggcaatagacttttagccta

SEQ ID NO: 113990 - DNA, 33 bp, Homo sapien
ttgaacaaagcttggcgatagacttttagccta

SEQ ID NO: 113991 - DNA, 33 bp, Homo sapien
attgttgatgtttttacattcattgccttctag

SEQ ID NO: 113992 - DNA, 33 bp, Homo sapien
attgttgatgtttttatattcattgccttctag

SEQ ID NO: 113993 - DNA, 33 bp, Homo sapien
gaaggggtcaccagacaaactccaaggaagggg

SEQ ID NO: 113994 - DNA, 33 bp, Homo sapien
gaaggggtcaccagacgaactccaaggaagggg

SEQ ID NO: 113995 - DNA, 33 bp, Homo sapien
atcagtgaagaaagaaatatgacagataaagtc

SEQ ID NO: 113996 - DNA, 33 bp, Homo sapien
atcagtgaagaaagaagtatgacagataaagtc

SEQ ID NO: 113997 - DNA, 33 bp, Homo sapien
tctgatgaaagcacaacaggcacagaaagaaag

SEQ ID NO: 113998 - DNA, 33 bp, Homo sapien
tctgatgaaagcacaataggcacagaaagaaag

SEQ ID NO: 113999 - DNA, 33 bp, Homo sapien
gtcttacctttgcaaacgccactagaaaaatct

SEQ ID NO: 114000 - DNA, 33 bp, Homo sapien
gtcttacctttgcaaatgccactagaaaaatct

SEQ ID NO: 114001 - DNA, 33 bp, Homo sapien
tggctaggtagttttaagctctgagatagtggg

SEQ ID NO: 114002 - DNA, 33 bp, Homo sapien
tggctaggtagttttaggctctgagatagtggg

SEQ ID NO: 114003 - DNA, 33 bp, Homo sapien
gctgggcactgtggctcacatcagcactttggg

SEQ ID NO: 114004 - DNA, 33 bp, Homo sapien
gctgggcactgtggcttacatcagcactttggg

SEQ ID NO: 114005 - DNA, 33 bp, Homo sapien
tcttcggaggtgttagacctttgtatcatgagg

SEQ ID NO: 114006 - DNA, 33 bp, Homo sapien
tcttcggaggtgttaggcctttgtatcatgagg

SEQ ID NO: 114007 - DNA, 33 bp, Homo sapien
ggagcaagtcacatcacggtccactactctgca

SEQ ID NO: 114008 - DNA, 33 bp, Homo sapien
ggagcaagtcacatcatggtccactactctgca

SEQ ID NO: 114009 - DNA, 33 bp, Homo sapien
agccacctttaatctccctcaggcaaaggatga

SEQ ID NO: 114010 - DNA, 33 bp, Homo sapien
agccacctttaatctctctcaggcaaaggatga

SEQ ID NO: 114011 - DNA, 33 bp, Homo sapien
ttgcccttgccatgtgaaaatccaagtccatac

SEQ ID NO: 114012 - DNA, 33 bp, Homo sapien
ttgcccttgccatgtgcaaatccaagtccatac

SEQ ID NO: 114013 - DNA, 33 bp, Homo sapien
agcaacacacttttaccgattctctgttttcca

SEQ ID NO: 114014 - DNA, 33 bp, Homo sapien
agcaacacacttttactgattctctgttttcca

SEQ ID NO: 114015 - DNA, 33 bp, Homo sapien
cagatatgtaataaagcacagtgatgctggctt

SEQ ID NO: 114016 - DNA, 33 bp, Homo sapien
cagatatgtaataaagtacagtgatgctggctt

SEQ ID NO: 114017 - DNA, 33 bp, Homo sapien
aaggatggataccatacgataatacctgtacat

SEQ ID NO: 114018 - DNA, 33 bp, Homo sapien
aaggatggataccatatgataatacctgtacat

SEQ ID NO: 114019 - DNA, 33 bp, Homo sapien
gtgtcccatgcacatacctatttcaccataatc

SEQ ID NO: 114020 - DNA, 33 bp, Homo sapien
gtgtcccatgcacatatctatttcaccataatc

SEQ ID NO: 114021 - DNA, 33 bp, Homo sapien
caggctgtatgtgttaacagaaaaatatataca

SEQ ID NO: 114022 - DNA, 33 bp, Homo sapien
caggctgtatgtgttatcagaaaaatatataca

SEQ ID NO: 114023 - DNA, 33 bp, Homo sapien
tgctgctgttcttgccactccagtaattcctag

SEQ ID NO: 114024 - DNA, 33 bp, Homo sapien
tgctgctgttcttgccgctccagtaattcctag

SEQ ID NO: 114025 - DNA, 33 bp, Homo sapien
atctaataacagcctactactaaaccagctcat

SEQ ID NO: 114026 - DNA, 33 bp, Homo sapien
atctaataacagcctagtactaaaccagctcat

SEQ ID NO: 114027 - DNA, 33 bp, Homo sapien
taagtgaagtacctcccactgatagtcactttt

SEQ ID NO: 114028 - DNA, 33 bp, Homo sapien
taagtgaagtacctcctactgatagtcactttt

SEQ ID NO: 114029 - DNA, 33 bp, Homo sapien
gggacacattcattctaaaaaggctaacagaac

SEQ ID NO: 114030 - DNA, 33 bp, Homo sapien
gggacacattcattctgaaaaggctaacagaac

SEQ ID NO: 114031 - DNA, 33 bp, Homo sapien
aggtccatgggtttgccagtaaatgtccttttg

SEQ ID NO: 114032 - DNA, 33 bp, Homo sapien
aggtccatgggtttgctagtaaatgtccttttg

SEQ ID NO: 114033 - DNA, 33 bp, Homo sapien
tataaattatacattccctgtggcttttgcatt

SEQ ID NO: 114034 - DNA, 33 bp, Homo sapien
tataaattatacattctctgtggcttttgcatt

SEQ ID NO: 114035 - DNA, 33 bp, Homo sapien
ttatgtcctttgcagacagttttgattgaaggg

SEQ ID NO: 114036 - DNA, 33 bp, Homo sapien
ttatgtcctttgcagatagttttgattgaaggg

SEQ ID NO: 114037 - DNA, 33 bp, Homo sapien
tgtatgattggtaaaacgaagttagttactctg

SEQ ID NO: 114038 - DNA, 33 bp, Homo sapien
tgtatgattggtaaaatgaagttagttactctg

SEQ ID NO: 114039 - DNA, 33 bp, Homo sapien
gcaaatcattcagtaaacatgtatctagtatgt

SEQ ID NO: 114040 - DNA, 33 bp, Homo sapien
gcaaatcattcagtaagcatgtatctagtatgt

SEQ ID NO: 114041 - DNA, 33 bp, Homo sapien
tcttttgggaatgaaaataaggagaggagaaac

SEQ ID NO: 114042 - DNA, 33 bp, Homo sapien
tcttttgggaatgaaagtaaggagaggagaaac

SEQ ID NO: 114043 - DNA, 33 bp, Homo sapien
atttatgtgtgaattgaaaagatgttattagct

SEQ ID NO: 114044 - DNA, 33 bp, Homo sapien
atttatgtgtgaattggaaagatgttattagct

SEQ ID NO: 114045 - DNA, 33 bp, Homo sapien
gctgactgactcctaaccaccaagataaactat

SEQ ID NO: 114046 - DNA, 33 bp, Homo sapien
gctgactgactcctaagcaccaagataaactat

SEQ ID NO: 114047 - DNA, 33 bp, Homo sapien
ataaataaatttcagaagcaaggttgtaataaa

SEQ ID NO: 114048 - DNA, 33 bp, Homo sapien
ataaataaatttcagaggcaaggttgtaataaa

SEQ ID NO: 114049 - DNA, 33 bp, Homo sapien
caagaagagcacattaactaaaagaagggaaga

SEQ ID NO: 114050 - DNA, 33 bp, Homo sapien
caagaagagcacattagctaaaagaagggaaga

SEQ ID NO: 114051 - DNA, 33 bp, Homo sapien
agaatggaaatctgcacggctgagttttaaatc

SEQ ID NO: 114052 - DNA, 33 bp, Homo sapien
agaatggaaatctgcatggctgagttttaaatc

SEQ ID NO: 114053 - DNA, 33 bp, Homo sapien
gcaacatttataaacaacggtaaagtgtagaat

SEQ ID NO: 114054 - DNA, 33 bp, Homo sapien
gcaacatttataaacagcggtaaagtgtagaat

SEQ ID NO: 114055 - DNA, 33 bp, Homo sapien
catatgaatttgagtaaaaagtgatcctcttgc

SEQ ID NO: 114056 - DNA, 33 bp, Homo sapien
catatgaatttgagtacaaagtgatcctcttgc

SEQ ID NO: 114057 - DNA, 33 bp, Homo sapien
gagccttgtcttcagcagcaggctgtaatttga

SEQ ID NO: 114058 - DNA, 33 bp, Homo sapien
gagccttgtcttcagcggcaggctgtaatttga

SEQ ID NO: 114059 - DNA, 33 bp, Homo sapien
caatgtttgacacctaccaattatttttatcgt

SEQ ID NO: 114060 - DNA, 33 bp, Homo sapien
caatgtttgacacctatcaattatttttatcgt

SEQ ID NO: 114061 - DNA, 33 bp, Homo sapien
atttcacttaacatgaagtcccccatttctgcc

SEQ ID NO: 114062 - DNA, 33 bp, Homo sapien
atttcacttaacatgaggtcccccatttctgcc

SEQ ID NO: 114063 - DNA, 33 bp, Homo sapien
ttgacccaagttcaagcctaggtccaccaatca

SEQ ID NO: 114064 - DNA, 33 bp, Homo sapien
ttgacccaagttcaagtctaggtccaccaatca

SEQ ID NO: 114065 - DNA, 33 bp, Homo sapien
acggtaaatgcattacaatggctgcactctcct

SEQ ID NO: 114066 - DNA, 33 bp, Homo sapien
acggtaaatgcattacgatggctgcactctcct

SEQ ID NO: 114067 - DNA, 33 bp, Homo sapien
gctaggatgcacacaccggaagaaatctaataa

SEQ ID NO: 114068 - DNA, 33 bp, Homo sapien
gctaggatgcacacactggaagaaatctaataa

SEQ ID NO: 114069 - DNA, 33 bp, Homo sapien
ttttcctcttgtaggacgctttatagtctctgc

SEQ ID NO: 114070 - DNA, 33 bp, Homo sapien
ttttcctcttgtaggatgctttatagtctctgc

SEQ ID NO: 114071 - DNA, 33 bp, Homo sapien
agaaggaagacgtaacaaaaagaacattcattc

SEQ ID NO: 114072 - DNA, 33 bp, Homo sapien
agaaggaagacgtaaccaaaagaacattcattc

SEQ ID NO: 114073 - DNA, 33 bp, Homo sapien
taggtagactgcacaaactaataaagagagctt

SEQ ID NO: 114074 - DNA, 33 bp, Homo sapien
taggtagactgcacaagctaataaagagagctt

SEQ ID NO: 114075 - DNA, 33 bp, Homo sapien
ctaatgtccttcagagaatacctttgtgtgaac

SEQ ID NO: 114076 - DNA, 33 bp, Homo sapien
ctaatgtccttcagaggatacctttgtgtgaac

SEQ ID NO: 114077 - DNA, 33 bp, Homo sapien
tgggctgatgcgggaacaggaacctgggtcaaa

SEQ ID NO: 114078 - DNA, 33 bp, Homo sapien
tgggctgatgcgggaagaggaacctgggtcaaa

SEQ ID NO: 114079 - DNA, 33 bp, Homo sapien
cagcagaattttaagacacattttgcttaaaat

SEQ ID NO: 114080 - DNA, 33 bp, Homo sapien
cagcagaattttaagagacattttgcttaaaat

SEQ ID NO: 114081 - DNA, 33 bp, Homo sapien
cttctttccaccatatcaggccatcccatttca

SEQ ID NO: 114082 - DNA, 33 bp, Homo sapien
cttctttccaccatattaggccatcccatttca

SEQ ID NO: 114083 - DNA, 33 bp, Homo sapien
tgaccacagcctgtgcactaatgtctatgttct

SEQ ID NO: 114084 - DNA, 33 bp, Homo sapien
tgaccacagcctgtgcgctaatgtctatgttct

SEQ ID NO: 114085 - DNA, 33 bp, Homo sapien
aatactgaaacattcccgattaatacagatgac

SEQ ID NO: 114086 - DNA, 33 bp, Homo sapien
aatactgaaacattcctgattaatacagatgac

SEQ ID NO: 114087 - DNA, 33 bp, Homo sapien
cctttgcaacagggccactaacctgatagatca

SEQ ID NO: 114088 - DNA, 33 bp, Homo sapien
cctttgcaacagggccgctaacctgatagatca

SEQ ID NO: 114089 - DNA, 33 bp, Homo sapien
caagagattggtcaggaaaaaattttggttgga

SEQ ID NO: 114090 - DNA, 33 bp, Homo sapien
caagagattggtcagggaaaaattttggttgga

SEQ ID NO: 114091 - DNA, 33 bp, Homo sapien
aataaatgagatgatgcaatgaaagaacttcag

SEQ ID NO: 114092 - DNA, 33 bp, Homo sapien
aataaatgagatgatggaatgaaagaacttcag

SEQ ID NO: 114093 - DNA, 33 bp, Homo sapien
aagaatcatcattgcagctttgtcttcctataa

SEQ ID NO: 114094 - DNA, 33 bp, Homo sapien
aagaatcatcattgcatctttgtcttcctataa

SEQ ID NO: 114095 - DNA, 33 bp, Homo sapien
ttcaaagtcatccagtaaaatacatttctttac

SEQ ID NO: 114096 - DNA, 33 bp, Homo sapien
ttcaaagtcatccagtgaaatacatttctttac

SEQ ID NO: 114097 - DNA, 33 bp, Homo sapien
tatttgaaattcctatgaaactggagagcaaaa

SEQ ID NO: 114098 - DNA, 33 bp, Homo sapien
tatttgaaattcctattaaactggagagcaaaa

SEQ ID NO: 114099 - DNA, 33 bp, Homo sapien
cttctattttttgagcaatgccaggatttcata

SEQ ID NO: 114100 - DNA, 33 bp, Homo sapien
cttctattttttgagcgatgccaggatttcata

SEQ ID NO: 114101 - DNA, 33 bp, Homo sapien
attagctgaaggagaaactggcaatatctttgg

SEQ ID NO: 114102 - DNA, 33 bp, Homo sapien
attagctgaaggagaagctggcaatatctttgg

SEQ ID NO: 114103 - DNA, 33 bp, Homo sapien
caaaataatgaaaatacctaacacttccaaaat

SEQ ID NO: 114104 - DNA, 33 bp, Homo sapien
caaaataatgaaaatatctaacacttccaaaat

SEQ ID NO: 114105 - DNA, 33 bp, Homo sapien
ggcaagggttgcaaaacgacaagtagttattta

SEQ ID NO: 114106 - DNA, 33 bp, Homo sapien
ggcaagggttgcaaaaggacaagtagttattta

SEQ ID NO: 114107 - DNA, 33 bp, Homo sapien
ggaacatgagcctgaggaaagaagaaaatgggc

SEQ ID NO: 114108 - DNA, 33 bp, Homo sapien
ggaacatgagcctgagtaaagaagaaaatgggc

SEQ ID NO: 114109 - DNA, 33 bp, Homo sapien
agaatttggtctttacaagctgtttcccaggtg

SEQ ID NO: 114110 - DNA, 33 bp, Homo sapien
agaatttggtctttaccagctgtttcccaggtg

SEQ ID NO: 114111 - DNA, 33 bp, Homo sapien
ttgaaaggaggtctgaagccattgactatagaa

SEQ ID NO: 114112 - DNA, 33 bp, Homo sapien
ttgaaaggaggtctgatgccattgactatagaa

SEQ ID NO: 114113 - DNA, 33 bp, Homo sapien
cctgtagacaaaataacgaggctgctgttttgc

SEQ ID NO: 114114 - DNA, 33 bp, Homo sapien
cctgtagacaaaataatgaggctgctgttttgc

SEQ ID NO: 114115 - DNA, 33 bp, Homo sapien
ataacactgggaaatacggatgacatcagagat

SEQ ID NO: 114116 - DNA, 33 bp, Homo sapien
ataacactgggaaatatggatgacatcagagat

SEQ ID NO: 114117 - DNA, 33 bp, Homo sapien
ggtgcttaattccacaccattatccaatgttgc

SEQ ID NO: 114118 - DNA, 33 bp, Homo sapien
ggtgcttaattccacagcattatccaatgttgc

SEQ ID NO: 114119 - DNA, 33 bp, Homo sapien
ccatctttgtgcagccaaccaaattttagcagg

SEQ ID NO: 114120 - DNA, 33 bp, Homo sapien
ccatctttgtgcagccgaccaaattttagcagg

SEQ ID NO: 114121 - DNA, 33 bp, Homo sapien
gctgacaaacaggtaactgggaggatttggctt

SEQ ID NO: 114122 - DNA, 33 bp, Homo sapien
gctgacaaacaggtaagtgggaggatttggctt

SEQ ID NO: 114123 - DNA, 33 bp, Homo sapien
ataactatggcatagaacttataattttaaaca

SEQ ID NO: 114124 - DNA, 33 bp, Homo sapien
ataactatggcatagagcttataattttaaaca

SEQ ID NO: 114125 - DNA, 33 bp, Homo sapien
tggtctccaaataagaaaagtagtcaaatgtac

SEQ ID NO: 114126 - DNA, 33 bp, Homo sapien
tggtctccaaataagagaagtagtcaaatgtac

SEQ ID NO: 114127 - DNA, 33 bp, Homo sapien
gaagatggccatgacaatgagattaagagacac

SEQ ID NO: 114128 - DNA, 33 bp, Homo sapien
gaagatggccatgacagtgagattaagagacac

SEQ ID NO: 114129 - DNA, 33 bp, Homo sapien
aaatccaagtcatgacaaacagtgatgatgcta

SEQ ID NO: 114130 - DNA, 33 bp, Homo sapien
aaatccaagtcatgacgaacagtgatgatgcta

SEQ ID NO: 114131 - DNA, 33 bp, Homo sapien
taaatacctgctgatacgtactaatttggaaat

SEQ ID NO: 114132 - DNA, 33 bp, Homo sapien
taaatacctgctgatatgtactaatttggaaat

SEQ ID NO: 114133 - DNA, 33 bp, Homo sapien
tttaacataccagcacgattcattttattgtgc

SEQ ID NO: 114134 - DNA, 33 bp, Homo sapien
tttaacataccagcactattcattttattgtgc

SEQ ID NO: 114135 - DNA, 33 bp, Homo sapien
ttcttgactgtgtttacggcagtgcaggtctca

SEQ ID NO: 114136 - DNA, 33 bp, Homo sapien
ttcttgactgtgtttagggcagtgcaggtctca

SEQ ID NO: 114137 - DNA, 33 bp, Homo sapien
tagagatcttgaaggacacccaatgccccttcg

SEQ ID NO: 114138 - DNA, 33 bp, Homo sapien
tagagatcttgaaggatacccaatgccccttcg

SEQ ID NO: 114139 - DNA, 33 bp, Homo sapien
ccaaatgttgacaataacaaccaatatacataa

SEQ ID NO: 114140 - DNA, 33 bp, Homo sapien
ccaaatgttgacaatagcaaccaatatacataa

SEQ ID NO: 114141 - DNA, 33 bp, Homo sapien
ctgtcactggtccataaaaattttgggctactg

SEQ ID NO: 114142 - DNA, 33 bp, Homo sapien
ctgtcactggtccatagaaattttgggctactg

SEQ ID NO: 114143 - DNA, 33 bp, Homo sapien
gagccactaggggttacggcagctgtaagataa

SEQ ID NO: 114144 - DNA, 33 bp, Homo sapien
gagccactaggggttatggcagctgtaagataa

SEQ ID NO: 114145 - DNA, 33 bp, Homo sapien
tcatgaactatacttaagatgttactgcagata

SEQ ID NO: 114146 - DNA, 33 bp, Homo sapien
tcatgaactatacttatgatgttactgcagata

SEQ ID NO: 114147 - DNA, 33 bp, Homo sapien
aagagcctaccagaacagtcagaaggagtgtgt

SEQ ID NO: 114148 - DNA, 33 bp, Homo sapien
aagagcctaccagaaccgtcagaaggagtgtgt

SEQ ID NO: 114149 - DNA, 33 bp, Homo sapien
accttactatacgctacggtagaatcaactctt

SEQ ID NO: 114150 - DNA, 33 bp, Homo sapien
accttactatacgctatggtagaatcaactctt

SEQ ID NO: 114151 - DNA, 33 bp, Homo sapien
tattgtttgctacctacataattttaggcaagt

SEQ ID NO: 114152 - DNA, 33 bp, Homo sapien
tattgtttgctacctatataattttaggcaagt

SEQ ID NO: 114153 - DNA, 33 bp, Homo sapien
ccaagactactcctaactccagattttgctgaa

SEQ ID NO: 114154 - DNA, 33 bp, Homo sapien
ccaagactactcctaattccagattttgctgaa

SEQ ID NO: 114155 - DNA, 33 bp, Homo sapien
actgtggctgataacgacattaggtaggtttct

SEQ ID NO: 114156 - DNA, 33 bp, Homo sapien
actgtggctgataacggcattaggtaggtttct

SEQ ID NO: 114157 - DNA, 33 bp, Homo sapien
ggagctaacatttaccaagtggccattatgtgc

SEQ ID NO: 114158 - DNA, 33 bp, Homo sapien
ggagctaacatttaccgagtggccattatgtgc

SEQ ID NO: 114159 - DNA, 33 bp, Homo sapien
tttagaacagtacctgacagatacaaggattaa

SEQ ID NO: 114160 - DNA, 33 bp, Homo sapien
tttagaacagtacctggcagatacaaggattaa

SEQ ID NO: 114161 - DNA, 33 bp, Homo sapien
ttagggagagaagcaacggactgaagacagaga

SEQ ID NO: 114162 - DNA, 33 bp, Homo sapien
ttagggagagaagcaagggactgaagacagaga

SEQ ID NO: 114163 - DNA, 33 bp, Homo sapien
atagatcttgagtcaaaactgaatggaagaatt

SEQ ID NO: 114164 - DNA, 33 bp, Homo sapien
atagatcttgagtcaatactgaatggaagaatt

SEQ ID NO: 114165 - DNA, 33 bp, Homo sapien
tgacggacaataacgacgtcaagtagaatttgt

SEQ ID NO: 114166 - DNA, 33 bp, Homo sapien
tgacggacaataacgatgtcaagtagaatttgt

SEQ ID NO: 114167 - DNA, 33 bp, Homo sapien
ggttaggaatttcaaaatgattgctaaaggatt

SEQ ID NO: 114168 - DNA, 33 bp, Homo sapien
ggttaggaatttcaaagtgattgctaaaggatt

SEQ ID NO: 114169 - DNA, 33 bp, Homo sapien
gcttatttgacaaggagctttattacatggaag

SEQ ID NO: 114170 - DNA, 33 bp, Homo sapien
gcttatttgacaaggatctttattacatggaag

SEQ ID NO: 114171 - DNA, 33 bp, Homo sapien
acataatattttgatacctaacttcaacagata

SEQ ID NO: 114172 - DNA, 33 bp, Homo sapien
acataatattttgatagctaacttcaacagata

SEQ ID NO: 114173 - DNA, 33 bp, Homo sapien
gtaagtaaacaaaggcaattaagaaatgtgaaa

SEQ ID NO: 114174 - DNA, 33 bp, Homo sapien
gtaagtaaacaaaggcgattaagaaatgtgaaa

SEQ ID NO: 114175 - DNA, 33 bp, Homo sapien
agaggtcagtgggggtaaagagcatagaacacg

SEQ ID NO: 114176 - DNA, 33 bp, Homo sapien
agaggtcagtgggggtgaagagcatagaacacg

SEQ ID NO: 114177 - DNA, 33 bp, Homo sapien
tctctcatattggtgacgttgtagcctcctttc

SEQ ID NO: 114178 - DNA, 33 bp, Homo sapien
tctctcatattggtgatgttgtagcctcctttc

SEQ ID NO: 114179 - DNA, 33 bp, Homo sapien
ttgaaaactttgaagcggagtggagaataacaa

SEQ ID NO: 114180 - DNA, 33 bp, Homo sapien
ttgaaaactttgaagctgagtggagaataacaa

SEQ ID NO: 114181 - DNA, 33 bp, Homo sapien
aaagagtcacattacccgattactataaagcta

SEQ ID NO: 114182 - DNA, 33 bp, Homo sapien
aaagagtcacattacctgattactataaagcta

SEQ ID NO: 114183 - DNA, 33 bp, Homo sapien
gctgtaggtcagaagaagaaggaaaatgtaaaa

SEQ ID NO: 114184 - DNA, 33 bp, Homo sapien
gctgtaggtcagaagatgaaggaaaatgtaaaa

SEQ ID NO: 114185 - DNA, 33 bp, Homo sapien
taaataaggtctcacaagtgttcacggtaaaaa

SEQ ID NO: 114186 - DNA, 33 bp, Homo sapien
taaataaggtctcacatgtgttcacggtaaaaa

SEQ ID NO: 114187 - DNA, 33 bp, Homo sapien
gccacattactaacaccaatccatgctgttttc

SEQ ID NO: 114188 - DNA, 33 bp, Homo sapien
gccacattactaacactaatccatgctgttttc

SEQ ID NO: 114189 - DNA, 33 bp, Homo sapien
gctttgtattgttcaacgatcagatgcctaact

SEQ ID NO: 114190 - DNA, 33 bp, Homo sapien
gctttgtattgttcaatgatcagatgcctaact

SEQ ID NO: 114191 - DNA, 33 bp, Homo sapien; identical to SEQ ID NO: 114189

SEQ ID NO: 114192 - DNA, 33 bp, Homo sapien; identical to SEQ ID NO: 114190

SEQ ID NO: 114193 - DNA, 33 bp, Homo sapien
cagacaggaattatgacaagaggagaagaatgt

SEQ ID NO: 114194 - DNA, 33 bp, Homo sapien
cagacaggaattatgagaagaggagaagaatgt

SEQ ID NO: 114195 - DNA, 33 bp, Homo sapien
cttctatgtttgaagcccaaaattaagtagccc

SEQ ID NO: 114196 - DNA, 33 bp, Homo sapien
cttctatgtttgaagctcaaaattaagtagccc

SEQ ID NO: 114197 - DNA, 33 bp, Homo sapien
ctgtatatttttgtcgaatgtgttattgtaatt

SEQ ID NO: 114198 - DNA, 33 bp, Homo sapien
ctgtatatttttgtcggatgtgttattgtaatt

SEQ ID NO: 114199 - DNA, 33 bp, Homo sapien
ttaacctggggaaaacggctgagagtccataac

SEQ ID NO: 114200 - DNA, 33 bp, Homo sapien
ttaacctggggaaaactgctgagagtccataac

SEQ ID NO: 114201 - DNA, 33 bp, Homo sapien
ctcatcatctcttacccggacaacttcaatatc

SEQ ID NO: 114202 - DNA, 33 bp, Homo sapien
ctcatcatctcttacctggacaacttcaatatc

SEQ ID NO: 114203 - DNA, 33 bp, Homo sapien
gtttctaatggccttgcatggaacttcttcacc

SEQ ID NO: 114204 - DNA, 33 bp, Homo sapien
gtttctaatggccttgtatggaacttcttcacc

SEQ ID NO: 114205 - DNA, 33 bp, Homo sapien
tagaatcaggtagacacactctaagattcatgc

SEQ ID NO: 114206 - DNA, 33 bp, Homo sapien
tagaatcaggtagacatactctaagattcatgc

SEQ ID NO: 114207 - DNA, 33 bp, Homo sapien
atcagctcttcaaggacgctcagagagtaaatc

SEQ ID NO: 114208 - DNA, 33 bp, Homo sapien
atcagctcttcaaggatgctcagagagtaaatc

SEQ ID NO: 114209 - DNA, 33 bp, Homo sapien
caaaagttaaacaaaaatcacctgtattttcaa

SEQ ID NO: 114210 - DNA, 33 bp, Homo sapien
caaaagttaaacaaaagtcacctgtattttcaa

SEQ ID NO: 114211 - DNA, 33 bp, Homo sapien
ctgttaccacttttgcacgtggcagaaatctca

SEQ ID NO: 114212 - DNA, 33 bp, Homo sapien
ctgttaccacttttgcccgtggcagaaatctca

SEQ ID NO: 114213 - DNA, 33 bp, Homo sapien
atgataagagaaaaaccataagagaggctggta

SEQ ID NO: 114214 - DNA, 33 bp, Homo sapien
atgataagagaaaaacgataagagaggctggta

SEQ ID NO: 114215 - DNA, 33 bp, Homo sapien
ctcctgggctcagttacacactcctgctttcag

SEQ ID NO: 114216 - DNA, 33 bp, Homo sapien
ctcctgggctcagttagacactcctgctttcag

SEQ ID NO: 114217 - DNA, 33 bp, Homo sapien
aacattgcttatgaggaagtctgtaatcacttg

SEQ ID NO: 114218 - DNA, 33 bp, Homo sapien
aacattgcttatgaggtagtctgtaatcacttg

SEQ ID NO: 114219 - DNA, 33 bp, Homo sapien
gcaaaaatattttcaagcataaaagacctcaaa

SEQ ID NO: 114220 - DNA, 33 bp, Homo sapien
gcaaaaatattttcaatcataaaagacctcaaa

SEQ ID NO: 114221 - DNA, 33 bp, Homo sapien
ttatctataattgttcgcagggtagaattttgt

SEQ ID NO: 114222 - DNA, 33 bp, Homo sapien
ttatctataattgttctcagggtagaattttgt

SEQ ID NO: 114223 - DNA, 33 bp, Homo sapien
ctcaaataaaagacaactctagaaaatatgaaa

SEQ ID NO: 114224 - DNA, 33 bp, Homo sapien
ctcaaataaaagacaagtctagaaaatatgaaa

SEQ ID NO: 114225 - DNA, 33 bp, Homo sapien
tatataaagagaggacaaaaacaggaacactga

SEQ ID NO: 114226 - DNA, 33 bp, Homo sapien
tatataaagagaggacgaaaacaggaacactga

SEQ ID NO: 114227 - DNA, 33 bp, Homo sapien
aataaatgtttaaataccattgtctgctaattc

SEQ ID NO: 114228 - DNA, 33 bp, Homo sapien
aataaatgtttaaatatcattgtctgctaattc

SEQ ID NO: 114229 - DNA, 33 bp, Homo sapien
taaaaccctgtatatcaaatctcatagtataca

SEQ ID NO: 114230 - DNA, 33 bp, Homo sapien
taaaaccctgtatatcgaatctcatagtataca

SEQ ID NO: 114231 - DNA, 33 bp, Homo sapien
tttgcatacattttccagcaacttttaaatttt

SEQ ID NO: 114232 - DNA, 33 bp, Homo sapien
tttgcatacattttccggcaacttttaaatttt

SEQ ID NO: 114233 - DNA, 33 bp, Homo sapien
gcctactgcagcataactattccataaatatta

SEQ ID NO: 114234 - DNA, 33 bp, Homo sapien
gcctactgcagcataagtattccataaatatta

SEQ ID NO: 114235 - DNA, 33 bp, Homo sapien
ctggtactacaagacaacttaatggttgaattt

SEQ ID NO: 114236 - DNA, 33 bp, Homo sapien
ctggtactacaagacatcttaatggttgaattt

SEQ ID NO: 114237 - DNA, 33 bp, Homo sapien
atctatatatggcacaaatgaggggtatatccc

SEQ ID NO: 114238 - DNA, 33 bp, Homo sapien
atctatatatggcacagatgaggggtatatccc

SEQ ID NO: 114239 - DNA, 33 bp, Homo sapien
taacatagaactggtaagtattgttggaagcta

SEQ ID NO: 114240 - DNA, 33 bp, Homo sapien
taacatagaactggtaggtattgttggaagcta

SEQ ID NO: 114241 - DNA, 33 bp, Homo sapien
tagtctttatcattttcttacatggctatataa

SEQ ID NO: 114242 - DNA, 33 bp, Homo sapien
tagtctttatcatttttttacatggctatataa

SEQ ID NO: 114243 - DNA, 33 bp, Homo sapien
ctgtagtcagcttacaatgctgtagaacactag

SEQ ID NO: 114244 - DNA, 33 bp, Homo sapien
ctgtagtcagcttacagtgctgtagaacactag

SEQ ID NO: 114245 - DNA, 33 bp, Homo sapien
gtcaagatacagaatcaacctgtttccatcaac

SEQ ID NO: 114246 - DNA, 33 bp, Homo sapien
gtcaagatacagaatcgacctgtttccatcaac

SEQ ID NO: 114247 - DNA, 33 bp, Homo sapien
aatgtgtagttttaaactcagactcgaaagcca

SEQ ID NO: 114248 - DNA, 33 bp, Homo sapien
aatgtgtagttttaaattcagactcgaaagcca

SEQ ID NO: 114249 - DNA, 33 bp, Homo sapien
atattgtgacggattcaacctgggtcacccttg

SEQ ID NO: 114250 - DNA, 33 bp, Homo sapien
atattgtgacggattccacctgggtcacccttg

SEQ ID NO: 114251 - DNA, 33 bp, Homo sapien
gcttgccttgtggaccaaatggatttaaataag

SEQ ID NO: 114252 - DNA, 33 bp, Homo sapien
gcttgccttgtggacccaatggatttaaataag

SEQ ID NO: 114253 - DNA, 33 bp, Homo sapien
gacaggttcttagagccatttccttataaatat

SEQ ID NO: 114254 - DNA, 33 bp, Homo sapien
gacaggttcttagagcgatttccttataaatat

SEQ ID NO: 114255 - DNA, 33 bp, Homo sapien
tccaatcatgagctaacctgtaaaccaggcgtg

SEQ ID NO: 114256 - DNA, 33 bp, Homo sapien
tccaatcatgagctaagctgtaaaccaggcgtg

SEQ ID NO: 114257 - DNA, 33 bp, Homo sapien
gagtacagttaggctacaaaagcctggaagttg

SEQ ID NO: 114258 - DNA, 33 bp, Homo sapien
gagtacagttaggctagaaaagcctggaagttg

SEQ ID NO: 114259 - DNA, 33 bp, Homo sapien
ccttgtaaccgagtccagaggaagctgcatccc

SEQ ID NO: 114260 - DNA, 33 bp, Homo sapien
ccttgtaaccgagtccggaggaagctgcatccc

SEQ ID NO: 114261 - DNA, 33 bp, Homo sapien
ttgtagatcctgaagccagaggagtgtatgaaa

SEQ ID NO: 114262 - DNA, 33 bp, Homo sapien
ttgtagatcctgaagcgagaggagtgtatgaaa

SEQ ID NO: 114263 - DNA, 33 bp, Homo sapien
attaggtttagagccccatacaacagaaacctc

SEQ ID NO: 114264 - DNA, 33 bp, Homo sapien
attaggtttagagcccgatacaacagaaacctc

SEQ ID NO: 114265 - DNA, 33 bp, Homo sapien
actcttgccagaaaagacaactcaaatgatctt

SEQ ID NO: 114266 - DNA, 33 bp, Homo sapien
actcttgccagaaaaggcaactcaaatgatctt

SEQ ID NO: 114267 - DNA, 33 bp, Homo sapien
caagggtcaggaccaccacactgtgaaggtaac

SEQ ID NO: 114268 - DNA, 33 bp, Homo sapien
caagggtcaggaccactacactgtgaaggtaac

SEQ ID NO: 114269 - DNA, 33 bp, Homo sapien
cttggagaagttaagcaccccaaatcacaaaac

SEQ ID NO: 114270 - DNA, 33 bp, Homo sapien
cttggagaagttaagcgccccaaatcacaaaac

SEQ ID NO: 114271 - DNA, 33 bp, Homo sapien
atatgtcaaaattctaacacagcacatggcata

SEQ ID NO: 114272 - DNA, 33 bp, Homo sapien
atatgtcaaaattctagcacagcacatggcata

SEQ ID NO: 114273 - DNA, 33 bp, Homo sapien
gcagagattttccaacaccttcagagagactat

SEQ ID NO: 114274 - DNA, 33 bp, Homo sapien
gcagagattttccaacgccttcagagagactat

SEQ ID NO: 114275 - DNA, 33 bp, Homo sapien
acatcttgagggtgaacctactggcttctcaag

SEQ ID NO: 114276 - DNA, 33 bp, Homo sapien
acatcttgagggtgaatctactggcttctcaag

SEQ ID NO: 114277 - DNA, 33 bp, Homo sapien
aaagctggagtcatcacgttatctaacttcaaa

SEQ ID NO: 114278 - DNA, 33 bp, Homo sapien
aaagctggagtcatcaggttatctaacttcaaa

SEQ ID NO: 114279 - DNA, 33 bp, Homo sapien
ctgaaaaagtccatcggcctagtgacatcttga

SEQ ID NO: 114280 - DNA, 33 bp, Homo sapien
ctgaaaaagtccatcgtcctagtgacatcttga

SEQ ID NO: 114281 - DNA, 33 bp, Homo sapien
agggtattatttcttccctgggtcttctggttt

SEQ ID NO: 114282 - DNA, 33 bp, Homo sapien
agggtattatttcttctctgggtcttctggttt

SEQ ID NO: 114283 - DNA, 33 bp, Homo sapien
atatgattaagggggaaagtctacagctcactc

SEQ ID NO: 114284 - DNA, 33 bp, Homo sapien
atatgattaagggggagagtctacagctcactc

SEQ ID NO: 114285 - DNA, 33 bp, Homo sapien
gagaagtgagggcttaaaagctgggaggcgaca

SEQ ID NO: 114286 - DNA, 33 bp, Homo sapien
gagaagtgagggcttagaagctgggaggcgaca

SEQ ID NO: 114287 - DNA, 33 bp, Homo sapien
gctggtgaactttggacgactccagaatcccat

SEQ ID NO: 114288 - DNA, 33 bp, Homo sapien
gctggtgaactttggatgactccagaatcccat

SEQ ID NO: 114289 - DNA, 33 bp, Homo sapien
aaatgaatatgtaaaagaagccctcaatctccc

SEQ ID NO: 114290 - DNA, 33 bp, Homo sapien
aaatgaatatgtaaaataagccctcaatctccc

SEQ ID NO: 114291 - DNA, 33 bp, Homo sapien
tagtaaaaaagatccacccaggttcaaaaggaa

SEQ ID NO: 114292 - DNA, 33 bp, Homo sapien
tagtaaaaaagatccatccaggttcaaaaggaa

SEQ ID NO: 114293 - DNA, 33 bp, Homo sapien
catgtaatcctagctacgcgaggctaaggcagg

SEQ ID NO: 114294 - DNA, 33 bp, Homo sapien
catgtaatcctagctatgcgaggctaaggcagg

SEQ ID NO: 114295 - DNA, 33 bp, Homo sapien
ccctcactagggcctccatgttttctattaagt

SEQ ID NO: 114296 - DNA, 33 bp, Homo sapien
ccctcactagggcctctatgttttctattaagt

SEQ ID NO: 114297 - DNA, 33 bp, Homo sapien
ttgcatctgtctaaataaagatgtcaccactga

SEQ ID NO: 114298 - DNA, 33 bp, Homo sapien
ttgcatctgtctaaatgaagatgtcaccactga

SEQ ID NO: 114299 - DNA, 33 bp, Homo sapien
gagaacattaaaccacaccctgcgagccaggta

SEQ ID NO: 114300 - DNA, 33 bp, Homo sapien
gagaacattaaaccacgccctgcgagccaggta

SEQ ID NO: 114301 - DNA, 33 bp, Homo sapien
gtcatctgtagcattgaatttgttcttctaatc

SEQ ID NO: 114302 - DNA, 33 bp, Homo sapien
gtcatctgtagcattgcatttgttcttctaatc

SEQ ID NO: 114303 - DNA, 33 bp, Homo sapien
gtttctatagcttaaacagctctggagccacac

SEQ ID NO: 114304 - DNA, 33 bp, Homo sapien
gtttctatagcttaaagagctctggagccacac

SEQ ID NO: 114305 - DNA, 33 bp, Homo sapien
ctggagacgattacagaccattcttggaaggga

SEQ ID NO: 114306 - DNA, 33 bp, Homo sapien
ctggagacgattacagtccattcttggaaggga

SEQ ID NO: 114307 - DNA, 33 bp, Homo sapien
ggaaggcacgtacctcactgttggcactttcca

SEQ ID NO: 114308 - DNA, 33 bp, Homo sapien
ggaaggcacgtacctcgctgttggcactttcca

SEQ ID NO: 114309 - DNA, 33 bp, Homo sapien
tttagacaatttctgacgttctaggtatgtttt

SEQ ID NO: 114310 - DNA, 33 bp, Homo sapien
tttagacaatttctgatgttctaggtatgtttt

SEQ ID NO: 114311 - DNA, 33 bp, Homo sapien
ttgtaagtaagactgaacgcagaatatttcact

SEQ ID NO: 114312 - DNA, 33 bp, Homo sapien
ttgtaagtaagactgagcgcagaatatttcact

SEQ ID NO: 114313 - DNA, 33 bp, Homo sapien
aaaaaatgtaaaattcaaagcattcttggcttt

SEQ ID NO: 114314 - DNA, 33 bp, Homo sapien
aaaaaatgtaaaattccaagcattcttggcttt

SEQ ID NO: 114315 - DNA, 33 bp, Homo sapien
aagaatactcattcacaaaaggcattaccaaaa

SEQ ID NO: 114316 - DNA, 33 bp, Homo sapien
aagaatactcattcacgaaaggcattaccaaaa

SEQ ID NO: 114317 - DNA, 33 bp, Homo sapien
gtgatgaagatggaaaatactggtgcttagcct

SEQ ID NO: 114318 - DNA, 33 bp, Homo sapien
gtgatgaagatggaaagtactggtgcttagcct

SEQ ID NO: 114319 - DNA, 33 bp, Homo sapien
cctattttgcaggctcaccacaagagtgaagca

SEQ ID NO: 114320 - DNA, 33 bp, Homo sapien
cctattttgcaggctcgccacaagagtgaagca

SEQ ID NO: 114321 - DNA, 33 bp, Homo sapien
gtcagcgtccatttataaaactctgtaagaaga

SEQ ID NO: 114322 - DNA, 33 bp, Homo sapien
gtcagcgtccatttatgaaactctgtaagaaga

SEQ ID NO: 114323 - DNA, 33 bp, Homo sapien
ttgtagaggctccatacagactaaggctacttg

SEQ ID NO: 114324 - DNA, 33 bp, Homo sapien
ttgtagaggctccatatagactaaggctacttg

SEQ ID NO: 114325 - DNA, 33 bp, Homo sapien
acaaagtatggaaaaagattctctctgttctgc

SEQ ID NO: 114326 - DNA, 33 bp, Homo sapien
acaaagtatggaaaaatattctctctgttctgc

SEQ ID NO: 114327 - DNA, 33 bp, Homo sapien
gtttttttttaatccacctcctgtgtttggact

SEQ ID NO: 114328 - DNA, 33 bp, Homo sapien
gtttttttttaatccatctcctgtgtttggact

SEQ ID NO: 114329 - DNA, 33 bp, Homo sapien
actgtgttcagctacccagaggaatgaatatat

SEQ ID NO: 114330 - DNA, 33 bp, Homo sapien
actgtgttcagctaccgagaggaatgaatatat

SEQ ID NO: 114331 - DNA, 33 bp, Homo sapien
caggtaatgtgttcctaagatactgaaggactg

SEQ ID NO: 114332 - DNA, 33 bp, Homo sapien
caggtaatgtgttcctgagatactgaaggactg

SEQ ID NO: 114333 - DNA, 33 bp, Homo sapien
ggacatttttgtgagccctattttgagtgtaat

SEQ ID NO: 114334 - DNA, 33 bp, Homo sapien
ggacatttttgtgagctctattttgagtgtaat

SEQ ID NO: 114335 - DNA, 33 bp, Homo sapien
caaaatgcatttgagactatcacatgaatttat

SEQ ID NO: 114336 - DNA, 33 bp, Homo sapien
caaaatgcatttgagattatcacatgaatttat

SEQ ID NO: 114337 - DNA, 33 bp, Homo sapien
tgtctcagcacaggaaacaaggtgctaaggcag

SEQ ID NO: 114338 - DNA, 33 bp, Homo sapien
tgtctcagcacaggaagcaaggtgctaaggcag

SEQ ID NO: 114339 - DNA, 33 bp, Homo sapien
ggagtgaactgcttaagtctggggatgtcatca

SEQ ID NO: 114340 - DNA, 33 bp, Homo sapien
ggagtgaactgcttaattctggggatgtcatca

SEQ ID NO: 114341 - DNA, 33 bp, Homo sapien
taaaatatacaccgtacagcaatataaaatgta

SEQ ID NO: 114342 - DNA, 33 bp, Homo sapien
taaaatatacaccgtagagcaatataaaatgta

SEQ ID NO: 114343 - DNA, 33 bp, Homo sapien
tgagctaaatgtcaccaaaaaattaattactac

SEQ ID NO: 114344 - DNA, 33 bp, Homo sapien
tgagctaaatgtcaccgaaaaattaattactac

SEQ ID NO: 114345 - DNA, 33 bp, Homo sapien
cctgtcagatgcactcagaagcgtaaggattaa

SEQ ID NO: 114346 - DNA, 33 bp, Homo sapien
cctgtcagatgcactcggaagcgtaaggattaa

SEQ ID NO: 114347 - DNA, 33 bp, Homo sapien
actttttcaagctatcaaaaactcccttcttcc

SEQ ID NO: 114348 - DNA, 33 bp, Homo sapien
actttttcaagctatcgaaaactcccttcttcc

SEQ ID NO: 114349 - DNA, 33 bp, Homo sapien
aaatcccaaataatcaatacggcaaagggctca

SEQ ID NO: 114350 - DNA, 33 bp, Homo sapien
aaatcccaaataatcattacggcaaagggctca

SEQ ID NO: 114351 - DNA, 33 bp, Homo sapien
taggattcacttatatcaccgaagagttagcta

SEQ ID NO: 114352 - DNA, 33 bp, Homo sapien
taggattcacttatatgaccgaagagttagcta

SEQ ID NO: 114353 - DNA, 33 bp, Homo sapien
cagatccagtctcgtagacaccactaaaattga

SEQ ID NO: 114354 - DNA, 33 bp, Homo sapien
cagatccagtctcgtatacaccactaaaattga

SEQ ID NO: 114355 - DNA, 33 bp, Homo sapien
ttgatgaaagtaatgaactctcttcccagaaaa

SEQ ID NO: 114356 - DNA, 33 bp, Homo sapien
ttgatgaaagtaatgagctctcttcccagaaaa

SEQ ID NO: 114357 - DNA, 33 bp, Homo sapien
acatttccaaatttcaaatacttcaaacgtgac

SEQ ID NO: 114358 - DNA, 33 bp, Homo sapien
acatttccaaatttcagatacttcaaacgtgac

SEQ ID NO: 114359 - DNA, 33 bp, Homo sapien
tagaaatgagtggaaaatgaaaagaaagaagag

SEQ ID NO: 114360 - DNA, 33 bp, Homo sapien
tagaaatgagtggaaagtgaaaagaaagaagag

SEQ ID NO: 114361 - DNA, 33 bp, Homo sapien
acagaacctactggaacaaggagaaaggaaaac

SEQ ID NO: 114362 - DNA, 33 bp, Homo sapien
acagaacctactggaagaaggagaaaggaaaac

SEQ ID NO: 114363 - DNA, 33 bp, Homo sapien
cttagctaggctcccaatagtcgatgtggctga

SEQ ID NO: 114364 - DNA, 33 bp, Homo sapien
cttagctaggctcccagtagtcgatgtggctga

SEQ ID NO: 114365 - DNA, 33 bp, Homo sapien
gttcagcattatttcactctgatggttctaaga

SEQ ID NO: 114366 - DNA, 33 bp, Homo sapien
gttcagcattatttcagtctgatggttctaaga

SEQ ID NO: 114367 - DNA, 33 bp, Homo sapien
cccatcccttcagcaacggctatgactcggggc

SEQ ID NO: 114368 - DNA, 33 bp, Homo sapien
cccatcccttcagcaagggctatgactcggggc

SEQ ID NO: 114369 - DNA, 33 bp, Homo sapien
actttacatgaaagacccaggaatcaaaatcag

SEQ ID NO: 114370 - DNA, 33 bp, Homo sapien
actttacatgaaagactcaggaatcaaaatcag

SEQ ID NO: 114371 - DNA, 33 bp, Homo sapien
aaaatggtgtgagctacgggtaataatttatac

SEQ ID NO: 114372 - DNA, 33 bp, Homo sapien
aaaatggtgtgagctatgggtaataatttatac

SEQ ID NO: 114373 - DNA, 33 bp, Homo sapien
aaggactaaatacatcacaattgagttttattc

SEQ ID NO: 114374 - DNA, 33 bp, Homo sapien
aaggactaaatacatcgcaattgagttttattc

SEQ ID NO: 114375 - DNA, 33 bp, Homo sapien
cagaaactgtgctgagcactttactaatatcac

SEQ ID NO: 114376 - DNA, 33 bp, Homo sapien
cagaaactgtgctgagtactttactaatatcac

SEQ ID NO: 114377 - DNA, 33 bp, Homo sapien
gaggtgtgaaattgtgacaattggaaagaaaat

SEQ ID NO: 114378 - DNA, 33 bp, Homo sapien
gaggtgtgaaattgtggcaattggaaagaaaat

SEQ ID NO: 114379 - DNA, 33 bp, Homo sapien
ccagagcagtgctaccactaccgggaaacttct

SEQ ID NO: 114380 - DNA, 33 bp, Homo sapien
ccagagcagtgctaccgctaccgggaaacttct

SEQ ID NO: 114381 - DNA, 33 bp, Homo sapien
caacactccaaagaccactgcatatgaggtgat

SEQ ID NO: 114382 - DNA, 33 bp, Homo sapien
caacactccaaagaccgctgcatatgaggtgat

SEQ ID NO: 114383 - DNA, 33 bp, Homo sapien
tcagctccccgtaccaatgagcaacttggccac

SEQ ID NO: 114384 - DNA, 33 bp, Homo sapien
tcagctccccgtaccagtgagcaacttggccac

SEQ ID NO: 114385 - DNA, 33 bp, Homo sapien
aatttggcattgtaaacatggaaactagggact

SEQ ID NO: 114386 - DNA, 33 bp, Homo sapien
aatttggcattgtaaatatggaaactagggact

SEQ ID NO: 114387 - DNA, 33 bp, Homo sapien
gaacatcacttttacacgcttttgcctcattca

SEQ ID NO: 114388 - DNA, 33 bp, Homo sapien
gaacatcacttttacatgcttttgcctcattca

SEQ ID NO: 114389 - DNA, 33 bp, Homo sapien
ccaagatactggcttacgtttactctcaaattt

SEQ ID NO: 114390 - DNA, 33 bp, Homo sapien
ccaagatactggcttatgtttactctcaaattt

SEQ ID NO: 114391 - DNA, 33 bp, Homo sapien
gatttagaggggaagaaatagataaaatactaa

SEQ ID NO: 114392 - DNA, 33 bp, Homo sapien
gatttagaggggaagacatagataaaatactaa

SEQ ID NO: 114393 - DNA, 33 bp, Homo sapien
caatcaactgtggctacaatctgaaaatggtgc

SEQ ID NO: 114394 - DNA, 33 bp, Homo sapien
caatcaactgtggctataatctgaaaatggtgc

SEQ ID NO: 114395 - DNA, 33 bp, Homo sapien
ctaatctagtcagagaagatagagagctaacta

SEQ ID NO: 114396 - DNA, 33 bp, Homo sapien
ctaatctagtcagagatgatagagagctaacta

SEQ ID NO: 114397 - DNA, 33 bp, Homo sapien
tataaagtgcttttcaaatacattggctccttt

SEQ ID NO: 114398 - DNA, 33 bp, Homo sapien
tataaagtgcttttcacatacattggctccttt

SEQ ID NO: 114399 - DNA, 33 bp, Homo sapien
aaaacgattgaccaaaacccttaagaatggaaa

SEQ ID NO: 114400 - DNA, 33 bp, Homo sapien
aaaacgattgaccaaagcccttaagaatggaaa

SEQ ID NO: 114401 - DNA, 33 bp, Homo sapien
caaatctgtatgaactcaactgcttttaacctc

SEQ ID NO: 114402 - DNA, 33 bp, Homo sapien
caaatctgtatgaacttaactgcttttaacctc

SEQ ID NO: 114403 - DNA, 33 bp, Homo sapien
tcactgttggttagaacgctgtttctagacact

SEQ ID NO: 114404 - DNA, 33 bp, Homo sapien
tcactgttggttagaatgctgtttctagacact

SEQ ID NO: 114405 - DNA, 33 bp, Homo sapien
ttccgaaggtaattgccgcaaacgtgttacaca

SEQ ID NO: 114406 - DNA, 33 bp, Homo sapien
ttccgaaggtaattgctgcaaacgtgttacaca

SEQ ID NO: 114407 - DNA, 33 bp, Homo sapien
aaaacaaatagcttgccaccgccttatgtggta

SEQ ID NO: 114408 - DNA, 33 bp, Homo sapien
aaaacaaatagcttgctaccgccttatgtggta

SEQ ID NO: 114409 - DNA, 33 bp, Homo sapien
gggtcttgacagggaaaaattatgctctaaagt

SEQ ID NO: 114410 - DNA, 33 bp, Homo sapien
gggtcttgacagggaagaattatgctctaaagt

SEQ ID NO: 114411 - DNA, 33 bp, Homo sapien
tttgatctgatgggataaacaagttaagcaaga

SEQ ID NO: 114412 - DNA, 33 bp, Homo sapien
tttgatctgatgggatgaacaagttaagcaaga

SEQ ID NO: 114413 - DNA, 33 bp, Homo sapien
tgtttgagatccccacagaatttgaaacagaat

SEQ ID NO: 114414 - DNA, 33 bp, Homo sapien
tgtttgagatccccacggaatttgaaacagaat

SEQ ID NO: 114415 - DNA, 33 bp, Homo sapien
tctgacccatgaacccaccagcaggtaatctca

SEQ ID NO: 114416 - DNA, 33 bp, Homo sapien
tctgacccatgaacccgccagcaggtaatctca

SEQ ID NO: 114417 - DNA, 33 bp, Homo sapien
ttaggggactccaagaccacctcaggatcaaaa

SEQ ID NO: 114418 - DNA, 33 bp, Homo sapien
ttaggggactccaagagcacctcaggatcaaaa

SEQ ID NO: 114419 - DNA, 33 bp, Homo sapien
ttgttagtagaggaccacaaatttagtttcata

SEQ ID NO: 114420 - DNA, 33 bp, Homo sapien
ttgttagtagaggaccccaaatttagtttcata

SEQ ID NO: 114421 - DNA, 33 bp, Homo sapien
aatctgtaagttgaaccccatttggactccttt

SEQ ID NO: 114422 - DNA, 33 bp, Homo sapien
aatctgtaagttgaactccatttggactccttt

SEQ ID NO: 114423 - DNA, 33 bp, Homo sapien
ttgattactttgtcaccgaaagactgaaggcag

SEQ ID NO: 114424 - DNA, 33 bp, Homo sapien
ttgattactttgtcactgaaagactgaaggcag

SEQ ID NO: 114425 - DNA, 33 bp, Homo sapien
ctgttcccttcatttacctggaatcatcctggg

SEQ ID NO: 114426 - DNA, 33 bp, Homo sapien
ctgttcccttcatttagctggaatcatcctggg

SEQ ID NO: 114427 - DNA, 33 bp, Homo sapien
cccatagaagcatgtaaaggttctgacaattct

SEQ ID NO: 114428 - DNA, 33 bp, Homo sapien
cccatagaagcatgtataggttctgacaattct

SEQ ID NO: 114429 - DNA, 33 bp, Homo sapien
gaatctttttccctggaacatgacctttctatc

SEQ ID NO: 114430 - DNA, 33 bp, Homo sapien
gaatctttttccctgggacatgacctttctatc

SEQ ID NO: 114431 - DNA, 33 bp, Homo sapien
tatccatcagtggccacactaggccttagttaa

SEQ ID NO: 114432 - DNA, 33 bp, Homo sapien
tatccatcagtggccatactaggccttagttaa

SEQ ID NO: 114433 - DNA, 33 bp, Homo sapien
atgaattggcatcaacaaggcactcaagggtct

SEQ ID NO: 114434 - DNA, 33 bp, Homo sapien
atgaattggcatcaaccaggcactcaagggtct

SEQ ID NO: 114435 - DNA, 33 bp, Homo sapien
ccaatagagccactataataaaaaattcaaaaa

SEQ ID NO: 114436 - DNA, 33 bp, Homo sapien
ccaatagagccactatgataaaaaattcaaaaa

SEQ ID NO: 114437 - DNA, 33 bp, Homo sapien
acattctgcaaaatgaccccgaacagctgctaa

SEQ ID NO: 114438 - DNA, 33 bp, Homo sapien
acattctgcaaaatgatcccgaacagctgctaa

SEQ ID NO: 114439 - DNA, 33 bp, Homo sapien
ctatttattgcattcaccctatctgccagacac

SEQ ID NO: 114440 - DNA, 33 bp, Homo sapien
ctatttattgcattcatcctatctgccagacac

SEQ ID NO: 114441 - DNA, 33 bp, Homo sapien
tcttgcaagttgatcccgccccagctgagcctt

SEQ ID NO: 114442 - DNA, 33 bp, Homo sapien
tcttgcaagttgatcctgccccagctgagcctt

SEQ ID NO: 114443 - DNA, 33 bp, Homo sapien
tttcctttatgacattcaaaatatgactctgtc

SEQ ID NO: 114444 - DNA, 33 bp, Homo sapien
tttcctttatgacattgaaaatatgactctgtc

SEQ ID NO: 114445 - DNA, 33 bp, Homo sapien
ccaaattttctttaccaaaactgtcattgatgg

SEQ ID NO: 114446 - DNA, 33 bp, Homo sapien
ccaaattttctttacccaaactgtcattgatgg

SEQ ID NO: 114447 - DNA, 33 bp, Homo sapien
tgtaaaattagagaaagtgggataagcgctttg

SEQ ID NO: 114448 - DNA, 33 bp, Homo sapien
tgtaaaattagagaaattgggataagcgctttg

SEQ ID NO: 114449 - DNA, 33 bp, Homo sapien
agaagggttccaaaaacacactagagtagaaag

SEQ ID NO: 114450 - DNA, 33 bp, Homo sapien
agaagggttccaaaaatacactagagtagaaag

SEQ ID NO: 114451 - DNA, 33 bp, Homo sapien
ttagcctatcaactaccgctgacaagaccctag

SEQ ID NO: 114452 - DNA, 33 bp, Homo sapien
ttagcctatcaactactgctgacaagaccctag

SEQ ID NO: 114453 - DNA, 33 bp, Homo sapien
gaagccaaatatactgaaggaagattaagggag

SEQ ID NO: 114454 - DNA, 33 bp, Homo sapien
gaagccaaatatactggaggaagattaagggag

SEQ ID NO: 114455 - DNA, 33 bp, Homo sapien
tactcatcagtaaaacagagctggtgatacttc

SEQ ID NO: 114456 - DNA, 33 bp, Homo sapien
tactcatcagtaaaacggagctggtgatacttc

SEQ ID NO: 114457 - DNA, 33 bp, Homo sapien
gacaattttcatagaacaagccattgtaatatt

SEQ ID NO: 114458 - DNA, 33 bp, Homo sapien
gacaattttcatagaataagccattgtaatatt

SEQ ID NO: 114459 - DNA, 33 bp, Homo sapien
ggatttatttattaaaatgtgcagcaggactag

SEQ ID NO: 114460 - DNA, 33 bp, Homo sapien
ggatttatttattaaactgtgcagcaggactag

SEQ ID NO: 114461 - DNA, 33 bp, Homo sapien
gctggagaaagattaacctgacttttcagaata

SEQ ID NO: 114462 - DNA, 33 bp, Homo sapien
gctggagaaagattaagctgacttttcagaata

SEQ ID NO: 114463 - DNA, 33 bp, Homo sapien
aagagagaaaataacagagagccttcttcccac

SEQ ID NO: 114464 - DNA, 33 bp, Homo sapien
aagagagaaaataacatagagccttcttcccac

SEQ ID NO: 114465 - DNA, 33 bp, Homo sapien
ctagagagtaacactccgaaaccaatctaatca

SEQ ID NO: 114466 - DNA, 33 bp, Homo sapien
ctagagagtaacactctgaaaccaatctaatca

SEQ ID NO: 114467 - DNA, 33 bp, Homo sapien
gaagcaggtaatttacgggcaaccctggcccac

SEQ ID NO: 114468 - DNA, 33 bp, Homo sapien
gaagcaggtaatttactggcaaccctggcccac

SEQ ID NO: 114469 - DNA, 33 bp, Homo sapien
attaagaaaattggaaagtggtactcaaagaga

SEQ ID NO: 114470 - DNA, 33 bp, Homo sapien
attaagaaaattggaaggtggtactcaaagaga

SEQ ID NO: 114471 - DNA, 33 bp, Homo sapien
attcttacgctgcttacgaaacagttactatcc

SEQ ID NO: 114472 - DNA, 33 bp, Homo sapien
attcttacgctgcttatgaaacagttactatcc

SEQ ID NO: 114473 - DNA, 33 bp, Homo sapien
tatatttcaaactagaaagcaaaatgagctaaa

SEQ ID NO: 114474 - DNA, 33 bp, Homo sapien
tatatttcaaactagagagcaaaatgagctaaa

SEQ ID NO: 114475 - DNA, 33 bp, Homo sapien
ttgatagattgatagaagtttttccatcccttt

SEQ ID NO: 114476 - DNA, 33 bp, Homo sapien
ttgatagattgatagatgtttttccatcccttt

SEQ ID NO: 114477 - DNA, 33 bp, Homo sapien
actcatggcaaacttgaaaaatctgtctttggt

SEQ ID NO: 114478 - DNA, 33 bp, Homo sapien
actcatggcaaacttgcaaaatctgtctttggt

SEQ ID NO: 114479 - DNA, 33 bp, Homo sapien
gtactcattaaatgcccagtgctggtgatgtca

SEQ ID NO: 114480 - DNA, 33 bp, Homo sapien
gtactcattaaatgcctagtgctggtgatgtca

SEQ ID NO: 114481 - DNA, 33 bp, Homo sapien
actacaacagtgccaaaagtaaatttgtatcag

SEQ ID NO: 114482 - DNA, 33 bp, Homo sapien
actacaacagtgccaagagtaaatttgtatcag

SEQ ID NO: 114483 - DNA, 33 bp, Homo sapien
gtttcaaaacatccaactgtttgttataaagtg

SEQ ID NO: 114484 - DNA, 33 bp, Homo sapien
gtttcaaaacatccaagtgtttgttataaagtg

SEQ ID NO: 114485 - DNA, 33 bp, Homo sapien
gaagttgtagcaatagccactaatcaaagttcc

SEQ ID NO: 114486 - DNA, 33 bp, Homo sapien
gaagttgtagcaatagtcactaatcaaagttcc

SEQ ID NO: 114487 - DNA, 33 bp, Homo sapien
aaaaaggtgatcttaaaccaaagctgaggaatt

SEQ ID NO: 114488 - DNA, 33 bp, Homo sapien
aaaaaggtgatcttaatccaaagctgaggaatt

SEQ ID NO: 114489 - DNA, 33 bp, Homo sapien
aagcggtagagttgcaacaccaccacgaggaag

SEQ ID NO: 114490 - DNA, 33 bp, Homo sapien
aagcggtagagttgcagcaccaccacgaggaag

SEQ ID NO: 114491 - DNA, 33 bp, Homo sapien
atgcacacacaaaatacggaagaatgtgggtgt

SEQ ID NO: 114492 - DNA, 33 bp, Homo sapien
atgcacacacaaaatatggaagaatgtgggtgt

SEQ ID NO: 114493 - DNA, 33 bp, Homo sapien
tttgtctgacttgtgccgacataaagtgtgcct

SEQ ID NO: 114494 - DNA, 33 bp, Homo sapien
tttgtctgacttgtgcggacataaagtgtgcct

SEQ ID NO: 114495 - DNA, 33 bp, Homo sapien
ctgccaccaaccgccaaagtttctaggagacct

SEQ ID NO: 114496 - DNA, 33 bp, Homo sapien
ctgccaccaaccgccagagtttctaggagacct

SEQ ID NO: 114497 - DNA, 33 bp, Homo sapien
ctcccaacagggatgcaatacaaagtcacatct

SEQ ID NO: 114498 - DNA, 33 bp, Homo sapien
ctcccaacagggatgcgatacaaagtcacatct

SEQ ID NO: 114499 - DNA, 33 bp, Homo sapien
agaagtgatctccagacatttcaattgttctca

SEQ ID NO: 114500 - DNA, 33 bp, Homo sapien
agaagtgatctccagatatttcaattgttctca

SEQ ID NO: 114501 - DNA, 33 bp, Homo sapien
aacccgcaagtacaaacagcagtaatgcttgag

SEQ ID NO: 114502 - DNA, 33 bp, Homo sapien
aacccgcaagtacaaagagcagtaatgcttgag

SEQ ID NO: 114503 - DNA, 33 bp, Homo sapien
tcaccactgcagacacaatgatggaggttaaca

SEQ ID NO: 114504 - DNA, 33 bp, Homo sapien
tcaccactgcagacaccatgatggaggttaaca

SEQ ID NO: 114505 - DNA, 33 bp, Homo sapien
tctaaacttttcaaaacgtgcaatgttagattc

SEQ ID NO: 114506 - DNA, 33 bp, Homo sapien
tctaaacttttcaaaaggtgcaatgttagattc

SEQ ID NO: 114507 - DNA, 33 bp, Homo sapien
gaaatcaatcacttaccaaaactgatgaatgat

SEQ ID NO: 114508 - DNA, 33 bp, Homo sapien
gaaatcaatcacttacgaaaactgatgaatgat

SEQ ID NO: 114509 - DNA, 33 bp, Homo sapien
gttttccacctcaagcacctgcacctcttcttc

SEQ ID NO: 114510 - DNA, 33 bp, Homo sapien
gttttccacctcaagcgcctgcacctcttcttc

SEQ ID NO: 114511 - DNA, 33 bp, Homo sapien
attcctaaagctttgccatactcggatactcac

SEQ ID NO: 114512 - DNA, 33 bp, Homo sapien
attcctaaagctttgctatactcggatactcac

SEQ ID NO: 114513 - DNA, 33 bp, Homo sapien
tgagttaccataacacagaaaagagggcttgac

SEQ ID NO: 114514 - DNA, 33 bp, Homo sapien
tgagttaccataacacggaaaagagggcttgac

SEQ ID NO: 114515 - DNA, 33 bp, Homo sapien
tataactgccattgaaatacttcagagaagaat

SEQ ID NO: 114516 - DNA, 33 bp, Homo sapien
tataactgccattgaattacttcagagaagaat

SEQ ID NO: 114517 - DNA, 33 bp, Homo sapien
caatatttcaaatgaaaagttgcttaattttgg

SEQ ID NO: 114518 - DNA, 33 bp, Homo sapien
caatatttcaaatgaagagttgcttaattttgg

SEQ ID NO: 114519 - DNA, 33 bp, Homo sapien
cacaattatcttacaaaatgagtaaagtactct

SEQ ID NO: 114520 - DNA, 33 bp, Homo sapien
cacaattatcttacaacatgagtaaagtactct

SEQ ID NO: 114521 - DNA, 33 bp, Homo sapien
cacttaatgatagttgaaagatttctctaaaat

SEQ ID NO: 114522 - DNA, 33 bp, Homo sapien
cacttaatgatagttgcaagatttctctaaaat

SEQ ID NO: 114523 - DNA, 33 bp, Homo sapien
ctcatttacaaaattccatgaagatttcactct

SEQ ID NO: 114524 - DNA, 33 bp, Homo sapien
ctcatttacaaaattctatgaagatttcactct

SEQ ID NO: 114525 - DNA, 33 bp, Homo sapien
gggcctgctatcagcccctgtgatttagagcat

SEQ ID NO: 114526 - DNA, 33 bp, Homo sapien
gggcctgctatcagccgctgtgatttagagcat

SEQ ID NO: 114527 - DNA, 33 bp, Homo sapien
ggcttcctgctgtttccaccctctccaatgccc

SEQ ID NO: 114528 - DNA, 33 bp, Homo sapien
ggcttcctgctgtttcgaccctctccaatgccc

SEQ ID NO: 114529 - DNA, 33 bp, Homo sapien
cagaagacttccatcaccacaagcatcccttgt

SEQ ID NO: 114530 - DNA, 33 bp, Homo sapien
cagaagacttccatcatcacaagcatcccttgt

SEQ ID NO: 114531 - DNA, 33 bp, Homo sapien
ctacagttagttgttacgatcagatgtctgtaa

SEQ ID NO: 114532 - DNA, 33 bp, Homo sapien
ctacagttagttgttatgatcagatgtctgtaa

SEQ ID NO: 114533 - DNA, 33 bp, Homo sapien
gctctaaaagagataacgtgtaatgtggggtgt

SEQ ID NO: 114534 - DNA, 33 bp, Homo sapien
gctctaaaagagataatgtgtaatgtggggtgt

SEQ ID NO: 114535 - DNA, 33 bp, Homo sapien
gtggtgagattcaagagggagactacttttagt

SEQ ID NO: 114536 - DNA, 33 bp, Homo sapien
gtggtgagattcaagatggagactacttttagt

SEQ ID NO: 114537 - DNA, 33 bp, Homo sapien
ctaccagtttgtacgacagatgactcctcctgg

SEQ ID NO: 114538 - DNA, 33 bp, Homo sapien
ctaccagtttgtacgatagatgactcctcctgg

SEQ ID NO: 114539 - DNA, 33 bp, Homo sapien
ggtactttctgctgaccaggagcattgacctta

SEQ ID NO: 114540 - DNA, 33 bp, Homo sapien
ggtactttctgctgacgaggagcattgacctta

SEQ ID NO: 114541 - DNA, 33 bp, Homo sapien
ccagaggaaaagcccaaaatggtcaggaacctg

SEQ ID NO: 114542 - DNA, 33 bp, Homo sapien
ccagaggaaaagcccagaatggtcaggaacctg

SEQ ID NO: 114543 - DNA, 33 bp, Homo sapien
aacatcctccattcaacttatcacctattgatg

SEQ ID NO: 114544 - DNA, 33 bp, Homo sapien
aacatcctccattcaatttatcacctattgatg

SEQ ID NO: 114545 - DNA, 33 bp, Homo sapien
gcaattatgagatcaacggcctttgttgcagat

SEQ ID NO: 114546 - DNA, 33 bp, Homo sapien
gcaattatgagatcaagggcctttgttgcagat

SEQ ID NO: 114547 - DNA, 33 bp, Homo sapien
catagattcttgactaactccatatcttcagtc

SEQ ID NO: 114548 - DNA, 33 bp, Homo sapien
catagattcttgactatctccatatcttcagtc

SEQ ID NO: 114549 - DNA, 33 bp, Homo sapien
cgaccaggaaataatacagtgcattgctcaaca

SEQ ID NO: 114550 - DNA, 33 bp, Homo sapien
cgaccaggaaataatagagtgcattgctcaaca

SEQ ID NO: 114551 - DNA, 33 bp, Homo sapien
gtttacagacagctgaaggctacaactctaaaa

SEQ ID NO: 114552 - DNA, 33 bp, Homo sapien
gtttacagacagctgagggctacaactctaaaa

SEQ ID NO: 114553 - DNA, 33 bp, Homo sapien
caatacccatactaccaccgacaatatgattat

SEQ ID NO: 114554 - DNA, 33 bp, Homo sapien
caatacccatactaccgccgacaatatgattat

SEQ ID NO: 114555 - DNA, 33 bp, Homo sapien
agtggttctagaggaaaagaatgataaggatgg

SEQ ID NO: 114556 - DNA, 33 bp, Homo sapien
agtggttctagaggaacagaatgataaggatgg

SEQ ID NO: 114557 - DNA, 33 bp, Homo sapien
gttggcaaacaaagaacagtcaacaactttctt

SEQ ID NO: 114558 - DNA, 33 bp, Homo sapien
gttggcaaacaaagaatagtcaacaactttctt

SEQ ID NO: 114559 - DNA, 33 bp, Homo sapien
tttaaaatttgttgaacctgttaattgtgtaga

SEQ ID NO: 114560 - DNA, 33 bp, Homo sapien
tttaaaatttgttgaatctgttaattgtgtaga

SEQ ID NO: 114561 - DNA, 33 bp, Homo sapien
agagagatatgggatgaattaaacacacaaatg

SEQ ID NO: 114562 - DNA, 33 bp, Homo sapien
agagagatatgggatggattaaacacacaaatg

SEQ ID NO: 114563 - DNA, 33 bp, Homo sapien
tgaaagccaagatgtaactctgggatctacact

SEQ ID NO: 114564 - DNA, 33 bp, Homo sapien
tgaaagccaagatgtacctctgggatctacact

SEQ ID NO: 114565 - DNA, 33 bp, Homo sapien
attctagagcatcttaacataaaccctacttct

SEQ ID NO: 114566 - DNA, 33 bp, Homo sapien
attctagagcatcttatcataaaccctacttct

SEQ ID NO: 114567 - DNA, 33 bp, Homo sapien
ctctctcctgtatctccccatattttctcttcc

SEQ ID NO: 114568 - DNA, 33 bp, Homo sapien
ctctctcctgtatctcgccatattttctcttcc

SEQ ID NO: 114569 - DNA, 33 bp, Homo sapien
aataaaagaccccagactcaagtaacacttttt

SEQ ID NO: 114570 - DNA, 33 bp, Homo sapien
aataaaagaccccagattcaagtaacacttttt

SEQ ID NO: 114571 - DNA, 33 bp, Homo sapien
ccactcttacctgcaaggaagcatgggcaatgt

SEQ ID NO: 114572 - DNA, 33 bp, Homo sapien
ccactcttacctgcaatgaagcatgggcaatgt

SEQ ID NO: 114573 - DNA, 33 bp, Homo sapien
tatgagcaggagcacaaatgaccatagctctgc

SEQ ID NO: 114574 - DNA, 33 bp, Homo sapien
tatgagcaggagcacagatgaccatagctctgc

SEQ ID NO: 114575 - DNA, 33 bp, Homo sapien
atttactttagcagcaaaaccttatgttaaatg

SEQ ID NO: 114576 - DNA, 33 bp, Homo sapien
atttactttagcagcacaaccttatgttaaatg

SEQ ID NO: 114577 - DNA, 33 bp, Homo sapien
tgcagggtaggctttcaataatgggaagtcatt

SEQ ID NO: 114578 - DNA, 33 bp, Homo sapien
tgcagggtaggctttcgataatgggaagtcatt

SEQ ID NO: 114579 - DNA, 33 bp, Homo sapien
aagatacagctgtatgcatgaaagtccaaaaaa

SEQ ID NO: 114580 - DNA, 33 bp, Homo sapien
aagatacagctgtatgtatgaaagtccaaaaaa

SEQ ID NO: 114581 - DNA, 33 bp, Homo sapien
ttctgcagcagatcaacatcacaatgctacagt

SEQ ID NO: 114582 - DNA, 33 bp, Homo sapien
ttctgcagcagatcaatatcacaatgctacagt

SEQ ID NO: 114583 - DNA, 33 bp, Homo sapien
acatatccagaatagtcaaacctctgaaaatag

SEQ ID NO: 114584 - DNA, 33 bp, Homo sapien
acatatccagaatagtgaaacctctgaaaatag

SEQ ID NO: 114585 - DNA, 33 bp, Homo sapien
gtcagacatcattagacaagcatggttaatttt

SEQ ID NO: 114586 - DNA, 33 bp, Homo sapien
gtcagacatcattagagaagcatggttaatttt

SEQ ID NO: 114587 - DNA, 33 bp, Homo sapien
aactctgggactacatcatatagcaggggccag

SEQ ID NO: 114588 - DNA, 33 bp, Homo sapien
aactctgggactacattatatagcaggggccag

SEQ ID NO: 114589 - DNA, 33 bp, Homo sapien
tcacagtcaggcctccaacattgccacaaatag

SEQ ID NO: 114590 - DNA, 33 bp, Homo sapien
tcacagtcaggcctccgacattgccacaaatag

SEQ ID NO: 114591 - DNA, 33 bp, Homo sapien
tgcaggagtccttgatcaccattcattaaggat

SEQ ID NO: 114592 - DNA, 33 bp, Homo sapien
tgcaggagtccttgattaccattcattaaggat

SEQ ID NO: 114593 - DNA, 33 bp, Homo sapien
ggctccaagtactaacagactgtccaaaatact

SEQ ID NO: 114594 - DNA, 33 bp, Homo sapien
ggctccaagtactaacggactgtccaaaatact

SEQ ID NO: 114595 - DNA, 33 bp, Homo sapien
gtgattaacagagacacagaacattacacagat

SEQ ID NO: 114596 - DNA, 33 bp, Homo sapien
gtgattaacagagacagagaacattacacagat

SEQ ID NO: 114597 - DNA, 33 bp, Homo sapien
tcacacctcagactacactaatccatgcaccag

SEQ ID NO: 114598 - DNA, 33 bp, Homo sapien
tcacacctcagactaccctaatccatgcaccag

SEQ ID NO: 114599 - DNA, 33 bp, Homo sapien
gccaaattactactgcactgaaaaatgactaca

SEQ ID NO: 114600 - DNA, 33 bp, Homo sapien
gccaaattactactgccctgaaaaatgactaca

SEQ ID NO: 114601 - DNA, 33 bp, Homo sapien
gtgtctactgttcaaaaggaaatagaaaacata

SEQ ID NO: 114602 - DNA, 33 bp, Homo sapien
gtgtctactgttcaaacggaaatagaaaacata

SEQ ID NO: 114603 - DNA, 33 bp, Homo sapien
agttgtctcaggatacacttcaattaggtaatt

SEQ ID NO: 114604 - DNA, 33 bp, Homo sapien
agttgtctcaggatacgcttcaattaggtaatt

SEQ ID NO: 114605 - DNA, 33 bp, Homo sapien
catcatcatgctctaccatttattggatgctta

SEQ ID NO: 114606 - DNA, 33 bp, Homo sapien
catcatcatgctctactatttattggatgctta

SEQ ID NO: 114607 - DNA, 33 bp, Homo sapien
gaggagaggcattgaaagagaaatggaaagact

SEQ ID NO: 114608 - DNA, 33 bp, Homo sapien
gaggagaggcattgaaggagaaatggaaagact

SEQ ID NO: 114609 - DNA, 33 bp, Homo sapien
atacaaacaagaaagacgtgctaacctcaagaa

SEQ ID NO: 114610 - DNA, 33 bp, Homo sapien
atacaaacaagaaagatgtgctaacctcaagaa

SEQ ID NO: 114611 - DNA, 33 bp, Homo sapien
ttataaagaaaatacactgcaaaccaacttact

SEQ ID NO: 114612 - DNA, 33 bp, Homo sapien
ttataaagaaaatacattgcaaaccaacttact

SEQ ID NO: 114613 - DNA, 33 bp, Homo sapien
tgtcgtggaccataacagacaaatagaaaatga

SEQ ID NO: 114614 - DNA, 33 bp, Homo sapien
tgtcgtggaccataacggacaaatagaaaatga

SEQ ID NO: 114615 - DNA, 33 bp, Homo sapien
gtaggccagtggaatacgcagaaagtccagaaa

SEQ ID NO: 114616 - DNA, 33 bp, Homo sapien
gtaggccagtggaatatgcagaaagtccagaaa

SEQ ID NO: 114617 - DNA, 33 bp, Homo sapien
aggaaacaattaggaaaccatataacacagtga

SEQ ID NO: 114618 - DNA, 33 bp, Homo sapien
aggaaacaattaggaagccatataacacagtga

SEQ ID NO: 114619 - DNA, 33 bp, Homo sapien
tccttgtagattccagaaaatcattttaagaag

SEQ ID NO: 114620 - DNA, 33 bp, Homo sapien
tccttgtagattccaggaaatcattttaagaag

SEQ ID NO: 114621 - DNA, 33 bp, Homo sapien
tctcaactcttgagacggtcacccaagtcttcc

SEQ ID NO: 114622 - DNA, 33 bp, Homo sapien
tctcaactcttgagactgtcacccaagtcttcc

SEQ ID NO: 114623 - DNA, 33 bp, Homo sapien
tgctttagggaaaaagaacactgcctaatcaca

SEQ ID NO: 114624 - DNA, 33 bp, Homo sapien
tgctttagggaaaaaggacactgcctaatcaca

SEQ ID NO: 114625 - DNA, 33 bp, Homo sapien
actgaaaaataatctaaacagtctctttcattc

SEQ ID NO: 114626 - DNA, 33 bp, Homo sapien
actgaaaaataatctagacagtctctttcattc

SEQ ID NO: 114627 - DNA, 33 bp, Homo sapien
ctctggatgggttccacaacattagcattctga

SEQ ID NO: 114628 - DNA, 33 bp, Homo sapien
ctctggatgggttccataacattagcattctga

SEQ ID NO: 114629 - DNA, 33 bp, Homo sapien
tgtattcttgattagaacatggttttttacaag

SEQ ID NO: 114630 - DNA, 33 bp, Homo sapien
tgtattcttgattagagcatggttttttacaag

SEQ ID NO: 114631 - DNA, 33 bp, Homo sapien
gggcaaaaacatatcaatcctcataagtgaatt

SEQ ID NO: 114632 - DNA, 33 bp, Homo sapien
gggcaaaaacatatcagtcctcataagtgaatt

SEQ ID NO: 114633 - DNA, 33 bp, Homo sapien
cattgaggtgaaatcaactaagaagaggtagct

SEQ ID NO: 114634 - DNA, 33 bp, Homo sapien
cattgaggtgaaatcatctaagaagaggtagct

SEQ ID NO: 114635 - DNA, 33 bp, Homo sapien
agcaaccaaagttagacggagagctacagtctg

SEQ ID NO: 114636 - DNA, 33 bp, Homo sapien
agcaaccaaagttagatggagagctacagtctg

SEQ ID NO: 114637 - DNA, 33 bp, Homo sapien
gaaaactgtgattccaatgaaaacagtggccaa

SEQ ID NO: 114638 - DNA, 33 bp, Homo sapien
gaaaactgtgattccagtgaaaacagtggccaa

SEQ ID NO: 114639 - DNA, 33 bp, Homo sapien
ctgattttgtggacaacggtgtacatagcaata

SEQ ID NO: 114640 - DNA, 33 bp, Homo sapien
ctgattttgtggacaatggtgtacatagcaata

SEQ ID NO: 114641 - DNA, 33 bp, Homo sapien
acctggctacttcatcaaattgtttcaagcaca

SEQ ID NO: 114642 - DNA, 33 bp, Homo sapien
acctggctacttcatcgaattgtttcaagcaca

SEQ ID NO: 114643 - DNA, 33 bp, Homo sapien
tgtaccatagttccaagtctgttatctttcaag

SEQ ID NO: 114644 - DNA, 33 bp, Homo sapien
tgtaccatagttccaattctgttatctttcaag

SEQ ID NO: 114645 - DNA, 33 bp, Homo sapien
atcatatcaaaatctccccccagattgacattg

SEQ ID NO: 114646 - DNA, 33 bp, Homo sapien
atcatatcaaaatctctccccagattgacattg

SEQ ID NO: 114647 - DNA, 33 bp, Homo sapien
agaatataaggcaaagaagcttggtggcatcta

SEQ ID NO: 114648 - DNA, 33 bp, Homo sapien
agaatataaggcaaaggagcttggtggcatcta

SEQ ID NO: 114649 - DNA, 33 bp, Homo sapien
ttgttgacaaacgttaagtagcaagtgacatca

SEQ ID NO: 114650 - DNA, 33 bp, Homo sapien
ttgttgacaaacgttacgtagcaagtgacatca

SEQ ID NO: 114651 - DNA, 33 bp, Homo sapien
cctactgctaatgatgccatagcaccacttcat

SEQ ID NO: 114652 - DNA, 33 bp, Homo sapien
cctactgctaatgatgtcatagcaccacttcat

SEQ ID NO: 114653 - DNA, 33 bp, Homo sapien
gaatgtccaggaaacaaatgactttcatgtcca

SEQ ID NO: 114654 - DNA, 33 bp, Homo sapien
gaatgtccaggaaacagatgactttcatgtcca

SEQ ID NO: 114655 - DNA, 33 bp, Homo sapien
actccatcttgccagaaccagaattgttgcatt

SEQ ID NO: 114656 - DNA, 33 bp, Homo sapien
actccatcttgccagacccagaattgttgcatt

SEQ ID NO: 114657 - DNA, 33 bp, Homo sapien
tcattcttcatttccaaatttagatatagataa

SEQ ID NO: 114658 - DNA, 33 bp, Homo sapien
tcattcttcatttccagatttagatatagataa

SEQ ID NO: 114659 - DNA, 33 bp, Homo sapien
acaatcaagccctggccctacatagttatgtga

SEQ ID NO: 114660 - DNA, 33 bp, Homo sapien
acaatcaagccctggctctacatagttatgtga

SEQ ID NO: 114661 - DNA, 33 bp, Homo sapien
ttccttatggtgtcagcattccaagaacattct

SEQ ID NO: 114662 - DNA, 33 bp, Homo sapien
ttccttatggtgtcaggattccaagaacattct

SEQ ID NO: 114663 - DNA, 33 bp, Homo sapien
gtcccaagatggaaaacgacaactctttaatca

SEQ ID NO: 114664 - DNA, 33 bp, Homo sapien
gtcccaagatggaaaatgacaactctttaatca

SEQ ID NO: 114665 - DNA, 33 bp, Homo sapien
ccttatgttctaggccaggaagtgtaagaaacc

SEQ ID NO: 114666 - DNA, 33 bp, Homo sapien
ccttatgttctaggcccggaagtgtaagaaacc

SEQ ID NO: 114667 - DNA, 33 bp, Homo sapien
aaagtatgataaaagacaggataaggaatgaca

SEQ ID NO: 114668 - DNA, 33 bp, Homo sapien
aaagtatgataaaagataggataaggaatgaca

SEQ ID NO: 114669 - DNA, 33 bp, Homo sapien
aaaacagtgatactataaaaacatgaatattaa

SEQ ID NO: 114670 - DNA, 33 bp, Homo sapien
aaaacagtgatactatcaaaacatgaatattaa

SEQ ID NO: 114671 - DNA, 33 bp, Homo sapien
ctgtggtatcttgttacggcacccctcacagac

SEQ ID NO: 114672 - DNA, 33 bp, Homo sapien
ctgtggtatcttgttatggcacccctcacagac

SEQ ID NO: 114673 - DNA, 33 bp, Homo sapien
gtgtggcacagatttacataacatagaaactca

SEQ ID NO: 114674 - DNA, 33 bp, Homo sapien
gtgtggcacagatttatataacatagaaactca

SEQ ID NO: 114675 - DNA, 33 bp, Homo sapien
ctttcccaagaccacaaggtcaaacctacttaa

SEQ ID NO: 114676 - DNA, 33 bp, Homo sapien
ctttcccaagaccacagggtcaaacctacttaa

SEQ ID NO: 114677 - DNA, 33 bp, Homo sapien
gccttaattcatttctcaaacagagaggaaaaa

SEQ ID NO: 114678 - DNA, 33 bp, Homo sapien
gccttaattcatttcttaaacagagaggaaaaa

SEQ ID NO: 114679 - DNA, 33 bp, Homo sapien
ttacacatcttaatcaccaatttttcctctctg

SEQ ID NO: 114680 - DNA, 33 bp, Homo sapien
ttacacatcttaatcatcaatttttcctctctg

SEQ ID NO: 114681 - DNA, 33 bp, Homo sapien
tctaggcttccactcacatactgagctgaccaa

SEQ ID NO: 114682 - DNA, 33 bp, Homo sapien
tctaggcttccactcatatactgagctgaccaa

SEQ ID NO: 114683 - DNA, 33 bp, Homo sapien
agggtggaagttaaacactaggagtacatagat

SEQ ID NO: 114684 - DNA, 33 bp, Homo sapien
agggtggaagttaaacgctaggagtacatagat

SEQ ID NO: 114685 - DNA, 33 bp, Homo sapien
ggcatgaagagggaataagcattagagagccca

SEQ ID NO: 114686 - DNA, 33 bp, Homo sapien
ggcatgaagagggaatcagcattagagagccca

SEQ ID NO: 114687 - DNA, 33 bp, Homo sapien
aacataaagtataaaactgaggcccagatagat

SEQ ID NO: 114688 - DNA, 33 bp, Homo sapien
aacataaagtataaaattgaggcccagatagat

SEQ ID NO: 114689 - DNA, 33 bp, Homo sapien
tatcatgaagttaagacaagttagagaaagaag

SEQ ID NO: 114690 - DNA, 33 bp, Homo sapien
tatcatgaagttaagagaagttagagaaagaag

SEQ ID NO: 114691 - DNA, 33 bp, Homo sapien
caaattctttctataaagcgccagttggtaaat

SEQ ID NO: 114692 - DNA, 33 bp, Homo sapien
caaattctttctataaggcgccagttggtaaat

SEQ ID NO: 114693 - DNA, 33 bp, Homo sapien
atttctaactccaaaccaatacctggggcactt

SEQ ID NO: 114694 - DNA, 33 bp, Homo sapien
atttctaactccaaactaatacctggggcactt

SEQ ID NO: 114695 - DNA, 33 bp, Homo sapien
tgagcatatattcttcaacaaataatcagttaa

SEQ ID NO: 114696 - DNA, 33 bp, Homo sapien
tgagcatatattcttcgacaaataatcagttaa

SEQ ID NO: 114697 - DNA, 33 bp, Homo sapien
agacaaatggttaccaatctcaaaatagttttc

SEQ ID NO: 114698 - DNA, 33 bp, Homo sapien
agacaaatggttaccagtctcaaaatagttttc

SEQ ID NO: 114699 - DNA, 33 bp, Homo sapien
gtttcctcattagggtcaaacagttgcccacag

SEQ ID NO: 114700 - DNA, 33 bp, Homo sapien
gtttcctcattagggttaaacagttgcccacag

SEQ ID NO: 114701 - DNA, 33 bp, Homo sapien
atggatgccaacataaataatttgtatgacagg

SEQ ID NO: 114702 - DNA, 33 bp, Homo sapien
atggatgccaacataagtaatttgtatgacagg

SEQ ID NO: 114703 - DNA, 33 bp, Homo sapien
gccttgaggcattgaaatctttggtcccatgct

SEQ ID NO: 114704 - DNA, 33 bp, Homo sapien
gccttgaggcattgaactctttggtcccatgct

SEQ ID NO: 114705 - DNA, 33 bp, Homo sapien
gattgggactgagccaatagaggtttgcacact

SEQ ID NO: 114706 - DNA, 33 bp, Homo sapien
gattgggactgagccagtagaggtttgcacact

SEQ ID NO: 114707 - DNA, 33 bp, Homo sapien
atgcacattgtccagcaataaatgtatgggact

SEQ ID NO: 114708 - DNA, 33 bp, Homo sapien
atgcacattgtccagccataaatgtatgggact

SEQ ID NO: 114709 - DNA, 33 bp, Homo sapien
tttcccagtttccttacaatcctgttgggtacc

SEQ ID NO: 114710 - DNA, 33 bp, Homo sapien
tttcccagtttccttataatcctgttgggtacc

SEQ ID NO: 114711 - DNA, 33 bp, Homo sapien
tgaatccgagtgtcaccacttcctagctcagtg

SEQ ID NO: 114712 - DNA, 33 bp, Homo sapien
tgaatccgagtgtcactacttcctagctcagtg

SEQ ID NO: 114713 - DNA, 33 bp, Homo sapien
tatctaccatgtcatacacttgaagccatctat

SEQ ID NO: 114714 - DNA, 33 bp, Homo sapien
tatctaccatgtcatatacttgaagccatctat

SEQ ID NO: 114715 - DNA, 33 bp, Homo sapien
cacatgacatcaaacaaaagtgggaagggaaga

SEQ ID NO: 114716 - DNA, 33 bp, Homo sapien
cacatgacatcaaacagaagtgggaagggaaga

SEQ ID NO: 114717 - DNA, 33 bp, Homo sapien
gggctgccagactatacacaaggcatatccatt

SEQ ID NO: 114718 - DNA, 33 bp, Homo sapien
gggctgccagactatatacaaggcatatccatt

SEQ ID NO: 114719 - DNA, 33 bp, Homo sapien
ttctcacccagaattcacactactattaaatat

SEQ ID NO: 114720 - DNA, 33 bp, Homo sapien
ttctcacccagaattcgcactactattaaatat

SEQ ID NO: 114721 - DNA, 33 bp, Homo sapien
taagagaatacaattacgaagtggcgcagcttg

SEQ ID NO: 114722 - DNA, 33 bp, Homo sapien
taagagaatacaattaggaagtggcgcagcttg

SEQ ID NO: 114723 - DNA, 33 bp, Homo sapien
agcttcagggcactggacaagtcacttaaaatc

SEQ ID NO: 114724 - DNA, 33 bp, Homo sapien
agcttcagggcactggtcaagtcacttaaaatc

SEQ ID NO: 114725 - DNA, 33 bp, Homo sapien
tacatagtacttaacacaagagtgagaaggtgt

SEQ ID NO: 114726 - DNA, 33 bp, Homo sapien
tacatagtacttaacagaagagtgagaaggtgt

SEQ ID NO: 114727 - DNA, 33 bp, Homo sapien
ctcctatggataggaacgttagctagttagccc

SEQ ID NO: 114728 - DNA, 33 bp, Homo sapien
ctcctatggataggaatgttagctagttagccc

SEQ ID NO: 114729 - DNA, 33 bp, Homo sapien
gtttagtgccactgatcaggcttggaactcaac

SEQ ID NO: 114730 - DNA, 33 bp, Homo sapien
gtttagtgccactgatgaggcttggaactcaac

SEQ ID NO: 114731 - DNA, 33 bp, Homo sapien
acaggtaatacactttcaaagggcactttacac

SEQ ID NO: 114732 - DNA, 33 bp, Homo sapien
acaggtaatacactttgaaagggcactttacac

SEQ ID NO: 114733 - DNA, 33 bp, Homo sapien
aaataggtatgtttcaggcacagtggttgagga

SEQ ID NO: 114734 - DNA, 33 bp, Homo sapien
aaataggtatgtttcatgcacagtggttgagga

SEQ ID NO: 114735 - DNA, 33 bp, Homo sapien
tgaacaggagtagaaaaagcaccaactgtggtt

SEQ ID NO: 114736 - DNA, 33 bp, Homo sapien
tgaacaggagtagaaagagcaccaactgtggtt

SEQ ID NO: 114737 - DNA, 33 bp, Homo sapien
ttaatgttttaatggccagagctaactgggtgc

SEQ ID NO: 114738 - DNA, 33 bp, Homo sapien
ttaatgttttaatggctagagctaactgggtgc

SEQ ID NO: 114739 - DNA, 33 bp, Homo sapien
ccttctaccaaacacaatgactcttccttaaag

SEQ ID NO: 114740 - DNA, 33 bp, Homo sapien
ccttctaccaaacacagtgactcttccttaaag

SEQ ID NO: 114741 - DNA, 33 bp, Homo sapien
tactgtgtatctcttacgattcctttacatccc

SEQ ID NO: 114742 - DNA, 33 bp, Homo sapien
tactgtgtatctcttatgattcctttacatccc

SEQ ID NO: 114743 - DNA, 33 bp, Homo sapien
gagtaaaaaggtttcacactacagataagtagt

SEQ ID NO: 114744 - DNA, 33 bp, Homo sapien
gagtaaaaaggtttcatactacagataagtagt

SEQ ID NO: 114745 - DNA, 33 bp, Homo sapien
actgcaatttgaggtacctaccagtttgcccaa

SEQ ID NO: 114746 - DNA, 33 bp, Homo sapien
actgcaatttgaggtatctaccagtttgcccaa

SEQ ID NO: 114747 - DNA, 33 bp, Homo sapien
tgaggtgagtatgccacgctttcctgttcttgt

SEQ ID NO: 114748 - DNA, 33 bp, Homo sapien
tgaggtgagtatgccatgctttcctgttcttgt

SEQ ID NO: 114749 - DNA, 33 bp, Homo sapien
ctctgtttgtaatcaccaaaattgaaacaaacc

SEQ ID NO: 114750 - DNA, 33 bp, Homo sapien
ctctgtttgtaatcacgaaaattgaaacaaacc

SEQ ID NO: 114751 - DNA, 33 bp, Homo sapien
gtggatcatttccctcaaacctataaataacgt

SEQ ID NO: 114752 - DNA, 33 bp, Homo sapien
gtggatcatttccctccaacctataaataacgt

SEQ ID NO: 114753 - DNA, 33 bp, Homo sapien
atcttttgagaatgcaacactgactctgtacct

SEQ ID NO: 114754 - DNA, 33 bp, Homo sapien
atcttttgagaatgcagcactgactctgtacct

SEQ ID NO: 114755 - DNA, 33 bp, Homo sapien
actagatgtcgtgctacaatcatcttcttaata

SEQ ID NO: 114756 - DNA, 33 bp, Homo sapien
actagatgtcgtgctagaatcatcttcttaata

SEQ ID NO: 114757 - DNA, 33 bp, Homo sapien
agttactatagttgtacctagtgtgttcaaggc

SEQ ID NO: 114758 - DNA, 33 bp, Homo sapien
agttactatagttgtatctagtgtgttcaaggc

SEQ ID NO: 114759 - DNA, 33 bp, Homo sapien
tgtgtaagatattttcacccttccaattcataa

SEQ ID NO: 114760 - DNA, 33 bp, Homo sapien
tgtgtaagatattttcccccttccaattcataa

SEQ ID NO: 114761 - DNA, 33 bp, Homo sapien
attcatgcctgggaccagacgaggaaagtgccc

SEQ ID NO: 114762 - DNA, 33 bp, Homo sapien
attcatgcctgggaccggacgaggaaagtgccc

SEQ ID NO: 114763 - DNA, 33 bp, Homo sapien
aaaataatcttggcaacaagagattcctagaat

SEQ ID NO: 114764 - DNA, 33 bp, Homo sapien
aaaataatcttggcaataagagattcctagaat

SEQ ID NO: 114765 - DNA, 33 bp, Homo sapien
tacccattcaaattctaaaggtctgaggcagac

SEQ ID NO: 114766 - DNA, 33 bp, Homo sapien
tacccattcaaattctgaaggtctgaggcagac

SEQ ID NO: 114767 - DNA, 33 bp, Homo sapien
gaagcctatcggtatccaagactcaaagggaac

SEQ ID NO: 114768 - DNA, 33 bp, Homo sapien
gaagcctatcggtatctaagactcaaagggaac

SEQ ID NO: 114769 - DNA, 33 bp, Homo sapien
tttgtgtgcttcctgcaatagctgctaggtgtt

SEQ ID NO: 114770 - DNA, 33 bp, Homo sapien
tttgtgtgcttcctgcgatagctgctaggtgtt

SEQ ID NO: 114771 - DNA, 33 bp, Homo sapien
gaaagttaaatgtgcaaaacaacaataacttta

SEQ ID NO: 114772 - DNA, 33 bp, Homo sapien
gaaagttaaatgtgcagaacaacaataacttta

SEQ ID NO: 114773 - DNA, 33 bp, Homo sapien
cagtgaacatcaaatacggcccatctgtatagc

SEQ ID NO: 114774 - DNA, 33 bp, Homo sapien
cagtgaacatcaaatatggcccatctgtatagc

SEQ ID NO: 114775 - DNA, 33 bp, Homo sapien
aaaaagcctatcttatcaccaggcattacgaaa

SEQ ID NO: 114776 - DNA, 33 bp, Homo sapien
aaaaagcctatcttattaccaggcattacgaaa

SEQ ID NO: 114777 - DNA, 33 bp, Homo sapien
ctcattgaaccttgcactacttcagagctatca

SEQ ID NO: 114778 - DNA, 33 bp, Homo sapien
ctcattgaaccttgcagtacttcagagctatca

SEQ ID NO: 114779 - DNA, 33 bp, Homo sapien
ctgtttctgtggagcacatgaagttgttattag

SEQ ID NO: 114780 - DNA, 33 bp, Homo sapien
ctgtttctgtggagcatatgaagttgttattag

SEQ ID NO: 114781 - DNA, 33 bp, Homo sapien
acatcttggccacaaactcagatatttatggag

SEQ ID NO: 114782 - DNA, 33 bp, Homo sapien
acatcttggccacaaagtcagatatttatggag

SEQ ID NO: 114783 - DNA, 33 bp, Homo sapien
agcttgggcttggtaacattaagtcctagaggc

SEQ ID NO: 114784 - DNA, 33 bp, Homo sapien
agcttgggcttggtaagattaagtcctagaggc

SEQ ID NO: 114785 - DNA, 33 bp, Homo sapien
tgcttaataggaaaaacgagaatccatctattt

SEQ ID NO: 114786 - DNA, 33 bp, Homo sapien
tgcttaataggaaaaatgagaatccatctattt

SEQ ID NO: 114787 - DNA, 33 bp, Homo sapien
acctccaacatagaaccatgttattagccaggt

SEQ ID NO: 114788 - DNA, 33 bp, Homo sapien
acctccaacatagaacgatgttattagccaggt

SEQ ID NO: 114789 - DNA, 33 bp, Homo sapien
tgggtaccaattcgacccatttactgcattatg

SEQ ID NO: 114790 - DNA, 33 bp, Homo sapien
tgggtaccaattcgactcatttactgcattatg

SEQ ID NO: 114791 - DNA, 33 bp, Homo sapien
gtccaccttaatgttacatctcggtagcaaatg

SEQ ID NO: 114792 - DNA, 33 bp, Homo sapien
gtccaccttaatgttatatctcggtagcaaatg

SEQ ID NO: 114793 - DNA, 33 bp, Homo sapien
aaaggccaattggtcaatatgcgtatgtggata

SEQ ID NO: 114794 - DNA, 33 bp, Homo sapien
aaaggccaattggtcactatgcgtatgtggata

SEQ ID NO: 114795 - DNA, 33 bp, Homo sapien
gcatgatggaatgttacgaggatcaaataaatt

SEQ ID NO: 114796 - DNA, 33 bp, Homo sapien
gcatgatggaatgttatgaggatcaaataaatt

SEQ ID NO: 114797 - DNA, 33 bp, Homo sapien
tacggcaaaaaatctaccgcactatgttaaata

SEQ ID NO: 114798 - DNA, 33 bp, Homo sapien
tacggcaaaaaatctagcgcactatgttaaata

SEQ ID NO: 114799 - DNA, 33 bp, Homo sapien
aaactgaggctgcataataatagaactggtttg

SEQ ID NO: 114800 - DNA, 33 bp, Homo sapien
aaactgaggctgcatagtaatagaactggtttg

SEQ ID NO: 114801 - DNA, 33 bp, Homo sapien
tatgaaatagaagagacgatgtattaaaacctg

SEQ ID NO: 114802 - DNA, 33 bp, Homo sapien
tatgaaatagaagagatgatgtattaaaacctg

SEQ ID NO: 114803 - DNA, 33 bp, Homo sapien
aggggtgagcgtgactaaagtacatttttacac

SEQ ID NO: 114804 - DNA, 33 bp, Homo sapien
aggggtgagcgtgactcaagtacatttttacac

SEQ ID NO: 114805 - DNA, 33 bp, Homo sapien
ttggttaggctctggtaaaactgcagtatgtca

SEQ ID NO: 114806 - DNA, 33 bp, Homo sapien
ttggttaggctctggttaaactgcagtatgtca

SEQ ID NO: 114807 - DNA, 33 bp, Homo sapien
ggtggtcctgagtgaggcctacttacaagaaag

SEQ ID NO: 114808 - DNA, 33 bp, Homo sapien
ggtggtcctgagtgagtcctacttacaagaaag

SEQ ID NO: 114809 - DNA, 33 bp, Homo sapien
gctatgctaggattttaaaaaaccaaacaatag

SEQ ID NO: 114810 - DNA, 33 bp, Homo sapien
gctatgctaggatttttaaaaaccaaacaatag

SEQ ID NO: 114811 - DNA, 33 bp, Homo sapien
tttgcaagacattgagaccattaaaatgattta

SEQ ID NO: 114812 - DNA, 33 bp, Homo sapien
tttgcaagacattgaggccattaaaatgattta

SEQ ID NO: 114813 - DNA, 33 bp, Homo sapien
tctggctttcatcaagcaaaaaatatagtttaa

SEQ ID NO: 114814 - DNA, 33 bp, Homo sapien
tctggctttcatcaaggaaaaaatatagtttaa

SEQ ID NO: 114815 - DNA, 33 bp, Homo sapien
gttttatttttttgccggctgcatccctggtgc

SEQ ID NO: 114816 - DNA, 33 bp, Homo sapien
gttttatttttttgcctgctgcatccctggtgc

SEQ ID NO: 114817 - DNA, 33 bp, Homo sapien
ttttaacatatactcaataagatttgctggtga

SEQ ID NO: 114818 - DNA, 33 bp, Homo sapien
ttttaacatatactcagtaagatttgctggtga

SEQ ID NO: 114819 - DNA, 33 bp, Homo sapien
cttgcaaaagagctgccaggcaagaaaaatcaa

SEQ ID NO: 114820 - DNA, 33 bp, Homo sapien
cttgcaaaagagctgctaggcaagaaaaatcaa

SEQ ID NO: 114821 - DNA, 33 bp, Homo sapien
tttacatatgctcaaacgttccttcaacccagg

SEQ ID NO: 114822 - DNA, 33 bp, Homo sapien
tttacatatgctcaaatgttccttcaacccagg

SEQ ID NO: 114823 - DNA, 33 bp, Homo sapien
tggtaaggattcttcacgctgaccaataaggaa

SEQ ID NO: 114824 - DNA, 33 bp, Homo sapien
tggtaaggattcttcatgctgaccaataaggaa

SEQ ID NO: 114825 - DNA, 33 bp, Homo sapien
cagtctatcctgtcacagtagaaatctaggaat

SEQ ID NO: 114826 - DNA, 33 bp, Homo sapien
cagtctatcctgtcacggtagaaatctaggaat

SEQ ID NO: 114827 - DNA, 33 bp, Homo sapien
gtttcctcataaagaactggattggagattatt

SEQ ID NO: 114828 - DNA, 33 bp, Homo sapien
gtttcctcataaagaattggattggagattatt

SEQ ID NO: 114829 - DNA, 33 bp, Homo sapien
tctcatggagtgaaaaattgcagactgacgaaa

SEQ ID NO: 114830 - DNA, 33 bp, Homo sapien
tctcatggagtgaaaatttgcagactgacgaaa

SEQ ID NO: 114831 - DNA, 33 bp, Homo sapien
atttgattttctcactaaatatggcactggtat

SEQ ID NO: 114832 - DNA, 33 bp, Homo sapien
atttgattttctcacttaatatggcactggtat

SEQ ID NO: 114833 - DNA, 33 bp, Homo sapien
atacatgcaaggcagcaaaggtttgtagtaaaa

SEQ ID NO: 114834 - DNA, 33 bp, Homo sapien
atacatgcaaggcagcgaaggtttgtagtaaaa

SEQ ID NO: 114835 - DNA, 33 bp, Homo sapien
tatgatgtacttttcaactaacttacagatttt

SEQ ID NO: 114836 - DNA, 33 bp, Homo sapien
tatgatgtacttttcagctaacttacagatttt

SEQ ID NO: 114837 - DNA, 33 bp, Homo sapien
aacacgaaggatacaacgaaaaagactaacata

SEQ ID NO: 114838 - DNA, 33 bp, Homo sapien
aacacgaaggatacaatgaaaaagactaacata

SEQ ID NO: 114839 - DNA, 33 bp, Homo sapien
tccttgtttgaattaaagttatacatccttttt

SEQ ID NO: 114840 - DNA, 33 bp, Homo sapien
tccttgtttgaattaaggttatacatccttttt

SEQ ID NO: 114841 - DNA, 33 bp, Homo sapien
atgagatatcagttcacactcattaagattagt

SEQ ID NO: 114842 - DNA, 33 bp, Homo sapien
atgagatatcagttcatactcattaagattagt

SEQ ID NO: 114843 - DNA, 33 bp, Homo sapien
atggatgacttcattacactcattccatttttt

SEQ ID NO: 114844 - DNA, 33 bp, Homo sapien
atggatgacttcattagactcattccatttttt

SEQ ID NO: 114845 - DNA, 33 bp, Homo sapien
tggtgatgtgacagataatacagtttgtaaaca

SEQ ID NO: 114846 - DNA, 33 bp, Homo sapien
tggtgatgtgacagatgatacagtttgtaaaca

SEQ ID NO: 114847 - DNA, 33 bp, Homo sapien
tccttcacatggcgacagaagagcgagcgaact

SEQ ID NO: 114848 - DNA, 33 bp, Homo sapien
tccttcacatggcgacggaagagcgagcgaact

SEQ ID NO: 114849 - DNA, 33 bp, Homo sapien
tgctctttgcaattctaaacttcttgcttcatt

SEQ ID NO: 114850 - DNA, 33 bp, Homo sapien
tgctctttgcaattcttaacttcttgcttcatt

SEQ ID NO: 114851 - DNA, 33 bp, Homo sapien
ggagtcctcttgaaccagaaacctctgaacaaa

SEQ ID NO: 114852 - DNA, 33 bp, Homo sapien
ggagtcctcttgaaccggaaacctctgaacaaa

SEQ ID NO: 114853 - DNA, 33 bp, Homo sapien
ggtacatccactcttcaaattatgcaacacaga

SEQ ID NO: 114854 - DNA, 33 bp, Homo sapien
ggtacatccactcttcgaattatgcaacacaga

SEQ ID NO: 114855 - DNA, 33 bp, Homo sapien
aagaaaaagaggtttaacggattcacagttcca

SEQ ID NO: 114856 - DNA, 33 bp, Homo sapien
aagaaaaagaggtttagcggattcacagttcca

SEQ ID NO: 114857 - DNA, 33 bp, Homo sapien
aatccaagaacagatcccaggttaggataagtc

SEQ ID NO: 114858 - DNA, 33 bp, Homo sapien
aatccaagaacagatctcaggttaggataagtc

SEQ ID NO: 114859 - DNA, 33 bp, Homo sapien
tacatattttgcatacacttctgcacatttctt

SEQ ID NO: 114860 - DNA, 33 bp, Homo sapien
tacatattttgcatactcttctgcacatttctt

SEQ ID NO: 114861 - DNA, 33 bp, Homo sapien
tgtaaagtaggaagagaaacaggagtgaagtgt

SEQ ID NO: 114862 - DNA, 33 bp, Homo sapien
tgtaaagtaggaagaggaacaggagtgaagtgt

SEQ ID NO: 114863 - DNA, 33 bp, Homo sapien
gtttattaacttgccaagatgacagggcagtag

SEQ ID NO: 114864 - DNA, 33 bp, Homo sapien
gtttattaacttgccaggatgacagggcagtag

SEQ ID NO: 114865 - DNA, 33 bp, Homo sapien
tctactacctccctaagtcggaaatctgagaga

SEQ ID NO: 114866 - DNA, 33 bp, Homo sapien
tctactacctccctaattcggaaatctgagaga

SEQ ID NO: 114867 - DNA, 33 bp, Homo sapien
tgactcacatggccaacagaacactggattttg

SEQ ID NO: 114868 - DNA, 33 bp, Homo sapien
tgactcacatggccaatagaacactggattttg

SEQ ID NO: 114869 - DNA, 33 bp, Homo sapien
aatctaatcatcaacaacattaccctgaaatcc

SEQ ID NO: 114870 - DNA, 33 bp, Homo sapien
aatctaatcatcaacagcattaccctgaaatcc

SEQ ID NO: 114871 - DNA, 33 bp, Homo sapien
attatcataagcttagacaagcagtgacttcaa

SEQ ID NO: 114872 - DNA, 33 bp, Homo sapien
attatcataagcttagccaagcagtgacttcaa

SEQ ID NO: 114873 - DNA, 33 bp, Homo sapien
atgtaaatatccacaaacagctgagatacttgc

SEQ ID NO: 114874 - DNA, 33 bp, Homo sapien
atgtaaatatccacaaccagctgagatacttgc

SEQ ID NO: 114875 - DNA, 33 bp, Homo sapien
ggtcatagctggtttcaataactaccttctttt

SEQ ID NO: 114876 - DNA, 33 bp, Homo sapien
ggtcatagctggtttcgataactaccttctttt

SEQ ID NO: 114877 - DNA, 33 bp, Homo sapien
tgcttgccatgacaacaaaatttaatagaaata

SEQ ID NO: 114878 - DNA, 33 bp, Homo sapien
tgcttgccatgacaacgaaatttaatagaaata

SEQ ID NO: 114879 - DNA, 33 bp, Homo sapien
attacacgagtaataacgaacatgagatctggg

SEQ ID NO: 114880 - DNA, 33 bp, Homo sapien
attacacgagtaataatgaacatgagatctggg

SEQ ID NO: 114881 - DNA, 33 bp, Homo sapien
aaaatgggaatgaattaaatagcaagaggattt

SEQ ID NO: 114882 - DNA, 33 bp, Homo sapien
aaaatgggaatgaattcaatagcaagaggattt

SEQ ID NO: 114883 - DNA, 33 bp, Homo sapien
atgtcagaacacaaaagggaaatataaggcaag

SEQ ID NO: 114884 - DNA, 33 bp, Homo sapien
atgtcagaacacaaaatggaaatataaggcaag

SEQ ID NO: 114885 - DNA, 33 bp, Homo sapien
ttcaacagtctctataagttaaaattcttcata

SEQ ID NO: 114886 - DNA, 33 bp, Homo sapien
ttcaacagtctctataggttaaaattcttcata

SEQ ID NO: 114887 - DNA, 33 bp, Homo sapien
atttttttggcttgaaagttgaacattttttaa

SEQ ID NO: 114888 - DNA, 33 bp, Homo sapien
atttttttggcttgaacgttgaacattttttaa

SEQ ID NO: 114889 - DNA, 33 bp, Homo sapien
tttaactttggaagaaccctttagataataact

SEQ ID NO: 114890 - DNA, 33 bp, Homo sapien
tttaactttggaagaatcctttagataataact

SEQ ID NO: 114891 - DNA, 33 bp, Homo sapien
gtagctgaaccaaacacggcattagcaaattga

SEQ ID NO: 114892 - DNA, 33 bp, Homo sapien
gtagctgaaccaaacatggcattagcaaattga

SEQ ID NO: 114893 - DNA, 33 bp, Homo sapien
gggtgtaaggcatagcaacttatattctctttc

SEQ ID NO: 114894 - DNA, 33 bp, Homo sapien
gggtgtaaggcatagcgacttatattctctttc

SEQ ID NO: 114895 - DNA, 33 bp, Homo sapien
agatcaacttcatttccatctcatatgcagttt

SEQ ID NO: 114896 - DNA, 33 bp, Homo sapien
agatcaacttcatttcgatctcatatgcagttt

SEQ ID NO: 114897 - DNA, 33 bp, Homo sapien
aagttgatcttgaagacgaaactaagttgtgtg

SEQ ID NO: 114898 - DNA, 33 bp, Homo sapien
aagttgatcttgaagatgaaactaagttgtgtg

SEQ ID NO: 114899 - DNA, 33 bp, Homo sapien
tcctcagacaactcatcagggatatttcttagg

SEQ ID NO: 114900 - DNA, 33 bp, Homo sapien
tcctcagacaactcattagggatatttcttagg

SEQ ID NO: 114901 - DNA, 33 bp, Homo sapien
ccacaagataattacaagtatccagcaaaaacg

SEQ ID NO: 114902 - DNA, 33 bp, Homo sapien
ccacaagataattacaggtatccagcaaaaacg

SEQ ID NO: 114903 - DNA, 33 bp, Homo sapien
agcctgttaacacaggaatagcagccatttctg

SEQ ID NO: 114904 - DNA, 33 bp, Homo sapien
agcctgttaacacagggatagcagccatttctg

SEQ ID NO: 114905 - DNA, 33 bp, Homo sapien
ccccagtgcaggagtcaccttctagcacctaca

SEQ ID NO: 114906 - DNA, 33 bp, Homo sapien
ccccagtgcaggagtcgccttctagcacctaca

SEQ ID NO: 114907 - DNA, 33 bp, Homo sapien
cccacttgacactgaacgtggcttgtcactcta

SEQ ID NO: 114908 - DNA, 33 bp, Homo sapien
cccacttgacactgaatgtggcttgtcactcta

SEQ ID NO: 114909 - DNA, 33 bp, Homo sapien
ccaaatacccatgaagcaaaaattttgaagagt

SEQ ID NO: 114910 - DNA, 33 bp, Homo sapien
ccaaatacccatgaagtaaaaattttgaagagt

SEQ ID NO: 114911 - DNA, 33 bp, Homo sapien
gtgaaactcacaaagacgttcagaccagtgcat

SEQ ID NO: 114912 - DNA, 33 bp, Homo sapien
gtgaaactcacaaagatgttcagaccagtgcat

SEQ ID NO: 114913 - DNA, 33 bp, Homo sapien
caaatatgggaatttacaggcgcatttaacaaa

SEQ ID NO: 114914 - DNA, 33 bp, Homo sapien
caaatatgggaatttataggcgcatttaacaaa

SEQ ID NO: 114915 - DNA, 33 bp, Homo sapien
gaacaaggaaacaagcacaggcaggcaccacaa

SEQ ID NO: 114916 - DNA, 33 bp, Homo sapien
gaacaaggaaacaagctcaggcaggcaccacaa

SEQ ID NO: 114917 - DNA, 33 bp, Homo sapien
gaaaaaattccttgtcacattacccatgacaat

SEQ ID NO: 114918 - DNA, 33 bp, Homo sapien
gaaaaaattccttgtcccattacccatgacaat

SEQ ID NO: 114919 - DNA, 33 bp, Homo sapien
gaatcacaacttccccaaaattcagtttctgca

SEQ ID NO: 114920 - DNA, 33 bp, Homo sapien
gaatcacaacttccccgaaattcagtttctgca

SEQ ID NO: 114921 - DNA, 33 bp, Homo sapien
ctaggagtttaacttagatctttctatgccaag

SEQ ID NO: 114922 - DNA, 33 bp, Homo sapien
ctaggagtttaacttatatctttctatgccaag

SEQ ID NO: 114923 - DNA, 33 bp, Homo sapien
atggcactctcagtgtctccgtaaatttgtcta

SEQ ID NO: 114924 - DNA, 33 bp, Homo sapien
atggcactctcagtgtttccgtaaatttgtcta

SEQ ID NO: 114925 - DNA, 33 bp, Homo sapien
gacaggagtacatatcagaagacaagagttgaa

SEQ ID NO: 114926 - DNA, 33 bp, Homo sapien
gacaggagtacatatcggaagacaagagttgaa

SEQ ID NO: 114927 - DNA, 33 bp, Homo sapien
ttatgtttcttgaacacatgaatttatagactg

SEQ ID NO: 114928 - DNA, 33 bp, Homo sapien
ttatgtttcttgaacagatgaatttatagactg

SEQ ID NO: 114929 - DNA, 33 bp, Homo sapien
actcagaaaaagagccaggacaaatatgtgcgg

SEQ ID NO: 114930 - DNA, 33 bp, Homo sapien
actcagaaaaagagccgggacaaatatgtgcgg

SEQ ID NO: 114931 - DNA, 33 bp, Homo sapien
cctgtcatgtaccaaagccgcacatatttgtcc

SEQ ID NO: 114932 - DNA, 33 bp, Homo sapien
cctgtcatgtaccaaatccgcacatatttgtcc

SEQ ID NO: 114933 - DNA, 33 bp, Homo sapien
tcaaggttgcatccaaagatctactaccaacta

SEQ ID NO: 114934 - DNA, 33 bp, Homo sapien
tcaaggttgcatccaatgatctactaccaacta

SEQ ID NO: 114935 - DNA, 33 bp, Homo sapien
aagtgtgctaaatcacaaattaggctggctgga

SEQ ID NO: 114936 - DNA, 33 bp, Homo sapien
aagtgtgctaaatcacgaattaggctggctgga

SEQ ID NO: 114937 - DNA, 33 bp, Homo sapien
agcttgaacacttacacgcaatttccattctta

SEQ ID NO: 114938 - DNA, 33 bp, Homo sapien
agcttgaacacttacaggcaatttccattctta

SEQ ID NO: 114939 - DNA, 33 bp, Homo sapien
attaagtgatgatgacaaacttgtaaccctcca

SEQ ID NO: 114940 - DNA, 33 bp, Homo sapien
attaagtgatgatgacgaacttgtaaccctcca

SEQ ID NO: 114941 - DNA, 33 bp, Homo sapien
ccactgcagactttaaagtgtctttctattgta

SEQ ID NO: 114942 - DNA, 33 bp, Homo sapien
ccactgcagactttaaggtgtctttctattgta

SEQ ID NO: 114943 - DNA, 33 bp, Homo sapien
tagagcaaagggctaaagggagaaaatgtctgg

SEQ ID NO: 114944 - DNA, 33 bp, Homo sapien
tagagcaaagggctaaggggagaaaatgtctgg

SEQ ID NO: 114945 - DNA, 33 bp, Homo sapien
aaatggcctgcagaaactccttgatttgatcct

SEQ ID NO: 114946 - DNA, 33 bp, Homo sapien
aaatggcctgcagaaattccttgatttgatcct

SEQ ID NO: 114947 - DNA, 33 bp, Homo sapien
ttgatccttgccatgaagctgaattttagtaga

SEQ ID NO: 114948 - DNA, 33 bp, Homo sapien
ttgatccttgccatgaggctgaattttagtaga

SEQ ID NO: 114949 - DNA, 33 bp, Homo sapien
atcaagagaatcgcaaattaattgtgccagaga

SEQ ID NO: 114950 - DNA, 33 bp, Homo sapien
atcaagagaatcgcaagttaattgtgccagaga

SEQ ID NO: 114951 - DNA, 33 bp, Homo sapien
ctataaagccctatgcaatcacctcactttaac

SEQ ID NO: 114952 - DNA, 33 bp, Homo sapien
ctataaagccctatgcgatcacctcactttaac

SEQ ID NO: 114953 - DNA, 33 bp, Homo sapien
caagtttgttcacaacacattttcttgtgccat

SEQ ID NO: 114954 - DNA, 33 bp, Homo sapien
caagtttgttcacaacgcattttcttgtgccat

SEQ ID NO: 114955 - DNA, 33 bp, Homo sapien
tgggcatttcaatggcaaaaactgtaccattga

SEQ ID NO: 114956 - DNA, 33 bp, Homo sapien
tgggcatttcaatggcgaaaactgtaccattga

SEQ ID NO: 114957 - DNA, 33 bp, Homo sapien
caaacgtggttgttaccaaatctggaattgcac

SEQ ID NO: 114958 - DNA, 33 bp, Homo sapien
caaacgtggttgttactaaatctggaattgcac

SEQ ID NO: 114959 - DNA, 33 bp, Homo sapien
attaaatcctaagcgacgtatttaagtattcaa

SEQ ID NO: 114960 - DNA, 33 bp, Homo sapien
attaaatcctaagcgatgtatttaagtattcaa

SEQ ID NO: 114961 - DNA, 33 bp, Homo sapien
gcttacaagtagaacaaaagctggagaagagga

SEQ ID NO: 114962 - DNA, 33 bp, Homo sapien
gcttacaagtagaacagaagctggagaagagga

SEQ ID NO: 114963 - DNA, 33 bp, Homo sapien
tgactagatcagattcacattgtaggatctctt

SEQ ID NO: 114964 - DNA, 33 bp, Homo sapien
tgactagatcagattcccattgtaggatctctt

SEQ ID NO: 114965 - DNA, 33 bp, Homo sapien
ctggttgatgagaagacagctggccataaaaat

SEQ ID NO: 114966 - DNA, 33 bp, Homo sapien
ctggttgatgagaagagagctggccataaaaat

SEQ ID NO: 114967 - DNA, 33 bp, Homo sapien
catcttttgaatgcaaatcaaacagctcagact

SEQ ID NO: 114968 - DNA, 33 bp, Homo sapien
catcttttgaatgcaagtcaaacagctcagact

SEQ ID NO: 114969 - DNA, 33 bp, Homo sapien
tgctccttgaaagcaccgtctttacttccatag

SEQ ID NO: 114970 - DNA, 33 bp, Homo sapien
tgctccttgaaagcactgtctttacttccatag

SEQ ID NO: 114971 - DNA, 33 bp, Homo sapien
tttctcattcctttcactaatatatgacagttc

SEQ ID NO: 114972 - DNA, 33 bp, Homo sapien
tttctcattcctttcagtaatatatgacagttc

SEQ ID NO: 114973 - DNA, 33 bp, Homo sapien
ttagagcattctttgaggtgaagaaactctccc

SEQ ID NO: 114974 - DNA, 33 bp, Homo sapien
ttagagcattctttgatgtgaagaaactctccc

SEQ ID NO: 114975 - DNA, 33 bp, Homo sapien
tagcagttaagagtgcaattttaggtgtatcca

SEQ ID NO: 114976 - DNA, 33 bp, Homo sapien
tagcagttaagagtgcgattttaggtgtatcca

SEQ ID NO: 114977 - DNA, 33 bp, Homo sapien
gtttgaactctgaacacatggagaacaattcca

SEQ ID NO: 114978 - DNA, 33 bp, Homo sapien
gtttgaactctgaacatatggagaacaattcca

SEQ ID NO: 114979 - DNA, 33 bp, Homo sapien
tgctccattgtgaatacgggtgtggactggacc

SEQ ID NO: 114980 - DNA, 33 bp, Homo sapien
tgctccattgtgaatatgggtgtggactggacc

SEQ ID NO: 114981 - DNA, 33 bp, Homo sapien
caatggtacattggagacaccacctcaacctcc

SEQ ID NO: 114982 - DNA, 33 bp, Homo sapien
caatggtacattggagtcaccacctcaacctcc

SEQ ID NO: 114983 - DNA, 33 bp, Homo sapien
tctatttgcacaagccaggaatttctgagtctc

SEQ ID NO: 114984 - DNA, 33 bp, Homo sapien
tctatttgcacaagccgggaatttctgagtctc

SEQ ID NO: 114985 - DNA, 33 bp, Homo sapien
tgtgctagctgggatcacaacaataggtcctga

SEQ ID NO: 114986 - DNA, 33 bp, Homo sapien
tgtgctagctgggatcgcaacaataggtcctga

SEQ ID NO: 114987 - DNA, 33 bp, Homo sapien
tagggcatatactctcaagtttgcctgagactc

SEQ ID NO: 114988 - DNA, 33 bp, Homo sapien
tagggcatatactctcgagtttgcctgagactc

SEQ ID NO: 114989 - DNA, 33 bp, Homo sapien
ttaaagcactcttatagggacagttattttctc

SEQ ID NO: 114990 - DNA, 33 bp, Homo sapien
ttaaagcactcttatatggacagttattttctc

SEQ ID NO: 114991 - DNA, 33 bp, Homo sapien
gccctccacaaacttaccttattaggagagatg

SEQ ID NO: 114992 - DNA, 33 bp, Homo sapien
gccctccacaaacttatcttattaggagagatg

SEQ ID NO: 114993 - DNA, 33 bp, Homo sapien
actctgatatgatcaggctcctaaaattgaagt

SEQ ID NO: 114994 - DNA, 33 bp, Homo sapien
actctgatatgatcagtctcctaaaattgaagt

SEQ ID NO: 114995 - DNA, 33 bp, Homo sapien
aagaagtcgaactcgtaaaagcagagagcaaat

SEQ ID NO: 114996 - DNA, 33 bp, Homo sapien
aagaagtcgaactcgtgaaagcagagagcaaat

SEQ ID NO: 114997 - DNA, 33 bp, Homo sapien
ggaaaagatagctacaaatgtcgcactgagtga

SEQ ID NO: 114998 - DNA, 33 bp, Homo sapien
ggaaaagatagctacagatgtcgcactgagtga

SEQ ID NO: 114999 - DNA, 33 bp, Homo sapien
ttctgtcacttgccaccagaggaaacctcactg

SEQ ID NO: 115000 - DNA, 33 bp, Homo sapien
ttctgtcacttgccactagaggaaacctcactg

SEQ ID NO: 115001 - DNA, 33 bp, Homo sapien
ttcaaccttatcaatactaccagtgcagaggct

SEQ ID NO: 115002 - DNA, 33 bp, Homo sapien
ttcaaccttatcaatattaccagtgcagaggct

SEQ ID NO: 115003 - DNA, 33 bp, Homo sapien
cctcaaagaggtgatacaaaggcccgggggaag

SEQ ID NO: 115004 - DNA, 33 bp, Homo sapien
cctcaaagaggtgatataaaggcccgggggaag

SEQ ID NO: 115005 - DNA, 33 bp, Homo sapien
tgttaccgttatgatgcagcttactatgataga

SEQ ID NO: 115006 - DNA, 33 bp, Homo sapien
tgttaccgttatgatgtagcttactatgataga

SEQ ID NO: 115007 - DNA, 33 bp, Homo sapien
aagctccttattgcaccatagaacaagttgcat

SEQ ID NO: 115008 - DNA, 33 bp, Homo sapien
aagctccttattgcactatagaacaagttgcat

SEQ ID NO: 115009 - DNA, 33 bp, Homo sapien
catccactgatctgacacaattgttccccaaag

SEQ ID NO: 115010 - DNA, 33 bp, Homo sapien
catccactgatctgacgcaattgttccccaaag

SEQ ID NO: 115011 - DNA, 33 bp, Homo sapien
gcatccttccagatcacagagtttagagcatcc

SEQ ID NO: 115012 - DNA, 33 bp, Homo sapien
gcatccttccagatcagagagtttagagcatcc

SEQ ID NO: 115013 - DNA, 33 bp, Homo sapien
ggctttcctggcctcgcaatctagagtgtaagc

SEQ ID NO: 115014 - DNA, 33 bp, Homo sapien
ggctttcctggcctcgtaatctagagtgtaagc

SEQ ID NO: 115015 - DNA, 33 bp, Homo sapien
cggttcactgtaacaacgccaaatcattacaag

SEQ ID NO: 115016 - DNA, 33 bp, Homo sapien
cggttcactgtaacaatgccaaatcattacaag

SEQ ID NO: 115017 - DNA, 33 bp, Homo sapien
aaacagcacagagttagctagtggatagtcagt

SEQ ID NO: 115018 - DNA, 33 bp, Homo sapien
aaacagcacagagttatctagtggatagtcagt

SEQ ID NO: 115019 - DNA, 33 bp, Homo sapien
tgtggctttgcaaatacggctacctgcactctg

SEQ ID NO: 115020 - DNA, 33 bp, Homo sapien
tgtggctttgcaaatatggctacctgcactctg

SEQ ID NO: 115021 - DNA, 33 bp, Homo sapien
tgtctttttaaaaccaacatatcatgaagacag

SEQ ID NO: 115022 - DNA, 33 bp, Homo sapien
tgtctttttaaaaccagcatatcatgaagacag

SEQ ID NO: 115023 - DNA, 33 bp, Homo sapien
aagttatttcacaaccaaacaaggcagggtagt

SEQ ID NO: 115024 - DNA, 33 bp, Homo sapien
aagttatttcacaaccgaacaaggcagggtagt

SEQ ID NO: 115025 - DNA, 33 bp, Homo sapien
ttgctaaatcccactaagacaatggttctgcaa

SEQ ID NO: 115026 - DNA, 33 bp, Homo sapien
ttgctaaatcccactaggacaatggttctgcaa

SEQ ID NO: 115027 - DNA, 33 bp, Homo sapien
gcacacttgccttctgaaagatcaacttagtcc

SEQ ID NO: 115028 - DNA, 33 bp, Homo sapien
gcacacttgccttctggaagatcaacttagtcc

SEQ ID NO: 115029 - DNA, 33 bp, Homo sapien
ttgtaatctctgtgaacggcacaggctgaaatt

SEQ ID NO: 115030 - DNA, 33 bp, Homo sapien
ttgtaatctctgtgaatggcacaggctgaaatt

SEQ ID NO: 115031 - DNA, 33 bp, Homo sapien
actcagtacccagtgccccacttcctctatcca

SEQ ID NO: 115032 - DNA, 33 bp, Homo sapien
actcagtacccagtgcgccacttcctctatcca

SEQ ID NO: 115033 - DNA, 33 bp, Homo sapien
caacccatatgctgaaaagagaggtgcagacta

SEQ ID NO: 115034 - DNA, 33 bp, Homo sapien
caacccatatgctgaagagagaggtgcagacta

SEQ ID NO: 115035 - DNA, 33 bp, Homo sapien
tttgaactcaagcccaactatctccaacatcca

SEQ ID NO: 115036 - DNA, 33 bp, Homo sapien
tttgaactcaagcccatctatctccaacatcca

SEQ ID NO: 115037 - DNA, 33 bp, Homo sapien
acggactcagtaagaactggcttaatgactgtg

SEQ ID NO: 115038 - DNA, 33 bp, Homo sapien
acggactcagtaagaattggcttaatgactgtg

SEQ ID NO: 115039 - DNA, 33 bp, Homo sapien
tctcattctaaatttacggttgcagaaatgaag

SEQ ID NO: 115040 - DNA, 33 bp, Homo sapien
tctcattctaaatttatggttgcagaaatgaag

SEQ ID NO: 115041 - DNA, 33 bp, Homo sapien
gcagagaaaacaatggaagatgagattaaagag

SEQ ID NO: 115042 - DNA, 33 bp, Homo sapien
gcagagaaaacaatgggagatgagattaaagag

SEQ ID NO: 115043 - DNA, 33 bp, Homo sapien
gtcatgatagtgtcccagaaaatgtcacaggat

SEQ ID NO: 115044 - DNA, 33 bp, Homo sapien
gtcatgatagtgtcccggaaaatgtcacaggat

SEQ ID NO: 115045 - DNA, 33 bp, Homo sapien
aatctcttaacgatccgcagtttggataagctg

SEQ ID NO: 115046 - DNA, 33 bp, Homo sapien
aatctcttaacgatcctcagtttggataagctg

SEQ ID NO: 115047 - DNA, 33 bp, Homo sapien
tataacatttatataccatagactgttccaagt

SEQ ID NO: 115048 - DNA, 33 bp, Homo sapien
tataacatttatatacgatagactgttccaagt

SEQ ID NO: 115049 - DNA, 33 bp, Homo sapien
tatcctttgatccaataaagttgccactcagta

SEQ ID NO: 115050 - DNA, 33 bp, Homo sapien
tatcctttgatccaatcaagttgccactcagta

SEQ ID NO: 115051 - DNA, 33 bp, Homo sapien
ccatgacaccttctaaaccatcatctcctccta

SEQ ID NO: 115052 - DNA, 33 bp, Homo sapien
ccatgacaccttctaagccatcatctcctccta

SEQ ID NO: 115053 - DNA, 33 bp, Homo sapien
gtccatatgggttcaacgtgagtaaccacaatt

SEQ ID NO: 115054 - DNA, 33 bp, Homo sapien
gtccatatgggttcaatgtgagtaaccacaatt

SEQ ID NO: 115055 - DNA, 33 bp, Homo sapien
tctgagacctgagagacagcatgagttagctgg

SEQ ID NO: 115056 - DNA, 33 bp, Homo sapien
tctgagacctgagagagagcatgagttagctgg

SEQ ID NO: 115057 - DNA, 33 bp, Homo sapien
gctctttcctaagtgacaatgaattcagatggc

SEQ ID NO: 115058 - DNA, 33 bp, Homo sapien
gctctttcctaagtgagaatgaattcagatggc

SEQ ID NO: 115059 - DNA, 33 bp, Homo sapien
tgcatgggaggggataaaccagagagaggttta

SEQ ID NO: 115060 - DNA, 33 bp, Homo sapien
tgcatgggaggggatagaccagagagaggttta

SEQ ID NO: 115061 - DNA, 33 bp, Homo sapien
tgttttccttctgttacagtttgagagatgatc

SEQ ID NO: 115062 - DNA, 33 bp, Homo sapien
tgttttccttctgttatagtttgagagatgatc

SEQ ID NO: 115063 - DNA, 33 bp, Homo sapien
gacttgagaaatatcaaattgctaggttatttt

SEQ ID NO: 115064 - DNA, 33 bp, Homo sapien
gacttgagaaatatcagattgctaggttatttt

SEQ ID NO: 115065 - DNA, 33 bp, Homo sapien
ttagtagctaaggaaaagaaaaatgacataatt

SEQ ID NO: 115066 - DNA, 33 bp, Homo sapien
ttagtagctaaggaaaggaaaaatgacataatt

SEQ ID NO: 115067 - DNA, 33 bp, Homo sapien
tttcagcagtgtctaccatagaggaaactttag

SEQ ID NO: 115068 - DNA, 33 bp, Homo sapien
tttcagcagtgtctactatagaggaaactttag

SEQ ID NO: 115069 - DNA, 33 bp, Homo sapien
gatttttcttcctaaagtgtatggtttacaagg

SEQ ID NO: 115070 - DNA, 33 bp, Homo sapien
gatttttcttcctaaattgtatggtttacaagg

SEQ ID NO: 115071 - DNA, 33 bp, Homo sapien
gacagttctgggaaaacagtggaatggaaaatt

SEQ ID NO: 115072 - DNA, 33 bp, Homo sapien
gacagttctgggaaaatagtggaatggaaaatt

SEQ ID NO: 115073 - DNA, 33 bp, Homo sapien
caggaaagggctagaactaatagtatctgagct

SEQ ID NO: 115074 - DNA, 33 bp, Homo sapien
caggaaagggctagaattaatagtatctgagct

SEQ ID NO: 115075 - DNA, 33 bp, Homo sapien
tatctaggatttagggaaagtagacagaggtat

SEQ ID NO: 115076 - DNA, 33 bp, Homo sapien
tatctaggatttaggggaagtagacagaggtat

SEQ ID NO: 115077 - DNA, 33 bp, Homo sapien
tgaagaacttgagtgcaacttcaactctgcctt

SEQ ID NO: 115078 - DNA, 33 bp, Homo sapien
tgaagaacttgagtgcgacttcaactctgcctt

SEQ ID NO: 115079 - DNA, 33 bp, Homo sapien
ccattgcgtcgtatgcagagttgcaatctatct

SEQ ID NO: 115080 - DNA, 33 bp, Homo sapien
ccattgcgtcgtatgcggagttgcaatctatct

SEQ ID NO: 115081 - DNA, 33 bp, Homo sapien
gtgtagacaaaaaaataactaggactttctctc

SEQ ID NO: 115082 - DNA, 33 bp, Homo sapien
gtgtagacaaaaaaattactaggactttctctc

SEQ ID NO: 115083 - DNA, 33 bp, Homo sapien
ctgactatgttaatgacaaatcgggaccccgaa

SEQ ID NO: 115084 - DNA, 33 bp, Homo sapien
ctgactatgttaatgagaaatcgggaccccgaa

SEQ ID NO: 115085 - DNA, 33 bp, Homo sapien
tttctgggcaaatataactatgttcaggataaa

SEQ ID NO: 115086 - DNA, 33 bp, Homo sapien
tttctgggcaaatatatctatgttcaggataaa

SEQ ID NO: 115087 - DNA, 33 bp, Homo sapien
gcctcatgaggaggaagagttgcagttgcctct

SEQ ID NO: 115088 - DNA, 33 bp, Homo sapien
gcctcatgaggaggaatagttgcagttgcctct

SEQ ID NO: 115089 - DNA, 33 bp, Homo sapien
ccagggccacttttacagaacagcagaatttaa

SEQ ID NO: 115090 - DNA, 33 bp, Homo sapien
ccagggccacttttacggaacagcagaatttaa

SEQ ID NO: 115091 - DNA, 33 bp, Homo sapien
tagcaagccatgaaaagatgtgaaagaaactta

SEQ ID NO: 115092 - DNA, 33 bp, Homo sapien
tagcaagccatgaaaatatgtgaaagaaactta

SEQ ID NO: 115093 - DNA, 33 bp, Homo sapien
tttgaccttggttgaaacaaaatgctctgtaaa

SEQ ID NO: 115094 - DNA, 33 bp, Homo sapien
tttgaccttggttgaaccaaaatgctctgtaaa

SEQ ID NO: 115095 - DNA, 33 bp, Homo sapien
ggagcaacagtctccaaaaaactcagagatggg

SEQ ID NO: 115096 - DNA, 33 bp, Homo sapien
ggagcaacagtctccagaaaactcagagatggg

SEQ ID NO: 115097 - DNA, 33 bp, Homo sapien
gttactatgcttcttacatgattatcacaaatg

SEQ ID NO: 115098 - DNA, 33 bp, Homo sapien
gttactatgcttcttagatgattatcacaaatg

SEQ ID NO: 115099 - DNA, 33 bp, Homo sapien
gcttggttttccccaaactgaaggccctagagt

SEQ ID NO: 115100 - DNA, 33 bp, Homo sapien
gcttggttttccccaacctgaaggccctagagt

SEQ ID NO: 115101 - DNA, 33 bp, Homo sapien
ccattttccaactgcaagaactgaggctaaatc

SEQ ID NO: 115102 - DNA, 33 bp, Homo sapien
ccattttccaactgcaggaactgaggctaaatc

SEQ ID NO: 115103 - DNA, 33 bp, Homo sapien
tcccattcctgcttcacgagttcctccccttct

SEQ ID NO: 115104 - DNA, 33 bp, Homo sapien
tcccattcctgcttcatgagttcctccccttct

SEQ ID NO: 115105 - DNA, 33 bp, Homo sapien
tttgtatggccacacaatatcttcaaccaattc

SEQ ID NO: 115106 - DNA, 33 bp, Homo sapien
tttgtatggccacacagtatcttcaaccaattc

SEQ ID NO: 115107 - DNA, 33 bp, Homo sapien
tctcagttcctaataactcagaactaagcaatt

SEQ ID NO: 115108 - DNA, 33 bp, Homo sapien
tctcagttcctaataattcagaactaagcaatt

SEQ ID NO: 115109 - DNA, 33 bp, Homo sapien
tccccaataataccagacaaatggagcatgtaa

SEQ ID NO: 115110 - DNA, 33 bp, Homo sapien
tccccaataataccaggcaaatggagcatgtaa

SEQ ID NO: 115111 - DNA, 33 bp, Homo sapien
ttacctttcttttctcaactcagattttcctgt

SEQ ID NO: 115112 - DNA, 33 bp, Homo sapien
ttacctttcttttctctactcagattttcctgt

SEQ ID NO: 115113 - DNA, 33 bp, Homo sapien
aactagtcgaggagtccacaacttcatatagta

SEQ ID NO: 115114 - DNA, 33 bp, Homo sapien
aactagtcgaggagtctacaacttcatatagta

SEQ ID NO: 115115 - DNA, 33 bp, Homo sapien
aggtgcacacattgcactaataaattgcagagg

SEQ ID NO: 115116 - DNA, 33 bp, Homo sapien
aggtgcacacattgcagtaataaattgcagagg

SEQ ID NO: 115117 - DNA, 33 bp, Homo sapien
actcgcgctgtataacacttccatcctctcaaa

SEQ ID NO: 115118 - DNA, 33 bp, Homo sapien
actcgcgctgtataacgcttccatcctctcaaa

SEQ ID NO: 115119 - DNA, 33 bp, Homo sapien
gcaaattaccaggtaaatggtttaagcaataat

SEQ ID NO: 115120 - DNA, 33 bp, Homo sapien
gcaaattaccaggtaagtggtttaagcaataat

SEQ ID NO: 115121 - DNA, 33 bp, Homo sapien
tatagggaatgcaacaactggctaggagtgttt

SEQ ID NO: 115122 - DNA, 33 bp, Homo sapien
tatagggaatgcaacagctggctaggagtgttt

SEQ ID NO: 115123 - DNA, 33 bp, Homo sapien
attgtcttatacttaccaaagttggacaagcaa

SEQ ID NO: 115124 - DNA, 33 bp, Homo sapien
attgtcttatacttactaaagttggacaagcaa

SEQ ID NO: 115125 - DNA, 33 bp, Homo sapien
attagtctcatgaccacagaaaactttttgaaa

SEQ ID NO: 115126 - DNA, 33 bp, Homo sapien
attagtctcatgaccatagaaaactttttgaaa

SEQ ID NO: 115127 - DNA, 33 bp, Homo sapien
tgtacaacttaagtcacgtgtcattggcacaaa

SEQ ID NO: 115128 - DNA, 33 bp, Homo sapien
tgtacaacttaagtcatgtgtcattggcacaaa

SEQ ID NO: 115129 - DNA, 33 bp, Homo sapien
ttcccaattaattctacccatcccactgcatgc

SEQ ID NO: 115130 - DNA, 33 bp, Homo sapien
ttcccaattaattctatccatcccactgcatgc

SEQ ID NO: 115131 - DNA, 33 bp, Homo sapien
aaagagttggagaaaactctcaatctatccaca

SEQ ID NO: 115132 - DNA, 33 bp, Homo sapien
aaagagttggagaaaattctcaatctatccaca

SEQ ID NO: 115133 - DNA, 33 bp, Homo sapien
ctaagatgcactaagacgttagtatttgcaaat

SEQ ID NO: 115134 - DNA, 33 bp, Homo sapien
ctaagatgcactaagatgttagtatttgcaaat

SEQ ID NO: 115135 - DNA, 33 bp, Homo sapien
tgtccggccaacttaacggaaaaagagcaagag

SEQ ID NO: 115136 - DNA, 33 bp, Homo sapien
tgtccggccaacttaatggaaaaagagcaagag

SEQ ID NO: 115137 - DNA, 33 bp, Homo sapien
gttttctaggagaaggcaaggcattgtgtatcc

SEQ ID NO: 115138 - DNA, 33 bp, Homo sapien
gttttctaggagaaggtaaggcattgtgtatcc

SEQ ID NO: 115139 - DNA, 33 bp, Homo sapien
ctgacatagaatgtacactccatgaaggcaaag

SEQ ID NO: 115140 - DNA, 33 bp, Homo sapien
ctgacatagaatgtacgctccatgaaggcaaag

SEQ ID NO: 115141 - DNA, 33 bp, Homo sapien
atttctacacagcataacaataaggccatgaga

SEQ ID NO: 115142 - DNA, 33 bp, Homo sapien
atttctacacagcatagcaataaggccatgaga

SEQ ID NO: 115143 - DNA, 33 bp, Homo sapien
catctgagtgaaggaaagacagcgttaagatgt

SEQ ID NO: 115144 - DNA, 33 bp, Homo sapien
catctgagtgaaggaaggacagcgttaagatgt

SEQ ID NO: 115145 - DNA, 33 bp, Homo sapien
tcaatgcatatcatagaaatcagctttgcctga

SEQ ID NO: 115146 - DNA, 33 bp, Homo sapien
tcaatgcatatcataggaatcagctttgcctga

SEQ ID NO: 115147 - DNA, 33 bp, Homo sapien
aaattttaactcactccgagacctcaaaagatt

SEQ ID NO: 115148 - DNA, 33 bp, Homo sapien
aaattttaactcactctgagacctcaaaagatt

SEQ ID NO: 115149 - DNA, 33 bp, Homo sapien
ccctcaaggaccatacaaaaagactggctggag

SEQ ID NO: 115150 - DNA, 33 bp, Homo sapien
ccctcaaggaccatacgaaaagactggctggag

SEQ ID NO: 115151 - DNA, 33 bp, Homo sapien
aagtcactgctttctaagagttaacagctgctt

SEQ ID NO: 115152 - DNA, 33 bp, Homo sapien
aagtcactgctttctaggagttaacagctgctt

SEQ ID NO: 115153 - DNA, 33 bp, Homo sapien
gtagtaagagttcaccaataaccacgacaacaa

SEQ ID NO: 115154 - DNA, 33 bp, Homo sapien
gtagtaagagttcaccgataaccacgacaacaa

SEQ ID NO: 115155 - DNA, 33 bp, Homo sapien
aatactgcagaaaggtcaaagagatttggattt

SEQ ID NO: 115156 - DNA, 33 bp, Homo sapien
aatactgcagaaaggtgaaagagatttggattt

SEQ ID NO: 115157 - DNA, 33 bp, Homo sapien
acagctgggctttgtacgctggcagcctaactc

SEQ ID NO: 115158 - DNA, 33 bp, Homo sapien
acagctgggctttgtatgctggcagcctaactc

SEQ ID NO: 115159 - DNA, 33 bp, Homo sapien
aagtcagaataaataccatctccatttggaaga

SEQ ID NO: 115160 - DNA, 33 bp, Homo sapien
aagtcagaataaatactatctccatttggaaga

SEQ ID NO: 115161 - DNA, 33 bp, Homo sapien
tgggactgatcaggctcaccagacttatttggg

SEQ ID NO: 115162 - DNA, 33 bp, Homo sapien
tgggactgatcaggcttaccagacttatttggg

SEQ ID NO: 115163 - DNA, 33 bp, Homo sapien
aaatgtaaaaaatagagagtgtgaaggaggatt

SEQ ID NO: 115164 - DNA, 33 bp, Homo sapien
aaatgtaaaaaatagatagtgtgaaggaggatt

SEQ ID NO: 115165 - DNA, 33 bp, Homo sapien
acagcttctagcccagcaaacatcttaagagca

SEQ ID NO: 115166 - DNA, 33 bp, Homo sapien
acagcttctagcccagtaaacatcttaagagca

SEQ ID NO: 115167 - DNA, 33 bp, Homo sapien
atactttgtgcctaaccataaatacaaaaatta

SEQ ID NO: 115168 - DNA, 33 bp, Homo sapien
atactttgtgcctaactataaatacaaaaatta

SEQ ID NO: 115169 - DNA, 33 bp, Homo sapien
ttcacctcttgacttgaagccttataaactaga

SEQ ID NO: 115170 - DNA, 33 bp, Homo sapien
ttcacctcttgacttggagccttataaactaga

SEQ ID NO: 115171 - DNA, 33 bp, Homo sapien
ccctcagctaatcagtaacaagttatcctctgg

SEQ ID NO: 115172 - DNA, 33 bp, Homo sapien
ccctcagctaatcagtgacaagttatcctctgg

SEQ ID NO: 115173 - DNA, 33 bp, Homo sapien
caagcgtttcagatcacggagcgatgactctat

SEQ ID NO: 115174 - DNA, 33 bp, Homo sapien
caagcgtttcagatcatggagcgatgactctat

SEQ ID NO: 115175 - DNA, 33 bp, Homo sapien
ttggcatgctcatgggaaaatctgtggtcttaa

SEQ ID NO: 115176 - DNA, 33 bp, Homo sapien
ttggcatgctcatgggcaaatctgtggtcttaa

SEQ ID NO: 115177 - DNA, 33 bp, Homo sapien
agctgatttgataaagacacctaagtgacttta

SEQ ID NO: 115178 - DNA, 33 bp, Homo sapien
agctgatttgataaaggcacctaagtgacttta

SEQ ID NO: 115179 - DNA, 33 bp, Homo sapien
aaaatttgcttcagaagaagagtaaaactgttg

SEQ ID NO: 115180 - DNA, 33 bp, Homo sapien
aaaatttgcttcagaataagagtaaaactgttg

SEQ ID NO: 115181 - DNA, 33 bp, Homo sapien
gacatttcaaacgttgcagtaaaaattgacatc

SEQ ID NO: 115182 - DNA, 33 bp, Homo sapien
gacatttcaaacgttggagtaaaaattgacatc

SEQ ID NO: 115183 - DNA, 33 bp, Homo sapien
agaaagatgctaaatgaacaagggaagaatgtt

SEQ ID NO: 115184 - DNA, 33 bp, Homo sapien
agaaagatgctaaatggacaagggaagaatgtt

SEQ ID NO: 115185 - DNA, 33 bp, Homo sapien
ggtggccttcgcagcaagatgaagctgccggtg

SEQ ID NO: 115186 - DNA, 33 bp, Homo sapien
ggtggccttcgcagcaggatgaagctgccggtg

SEQ ID NO: 115187 - DNA, 33 bp, Homo sapien
ttcctaaactgttggcacctttttgagataaaa

SEQ ID NO: 115188 - DNA, 33 bp, Homo sapien
ttcctaaactgttggcgcctttttgagataaaa

SEQ ID NO: 115189 - DNA, 33 bp, Homo sapien
ttatcatttttattagcccattgctaataaaca

SEQ ID NO: 115190 - DNA, 33 bp, Homo sapien
ttatcatttttattagtccattgctaataaaca

SEQ ID NO: 115191 - DNA, 33 bp, Homo sapien
agaagtaggagaacaacgcaaataaaggcagag

SEQ ID NO: 115192 - DNA, 33 bp, Homo sapien
agaagtaggagaacaatgcaaataaaggcagag

SEQ ID NO: 115193 - DNA, 33 bp, Homo sapien
caagaatagcacgaacaaataacgccacactct

SEQ ID NO: 115194 - DNA, 33 bp, Homo sapien
caagaatagcacgaacgaataacgccacactct

SEQ ID NO: 115195 - DNA, 33 bp, Homo sapien
ttttttgagggtgacaaatacagagaatgtgca

SEQ ID NO: 115196 - DNA, 33 bp, Homo sapien
ttttttgagggtgacagatacagagaatgtgca

SEQ ID NO: 115197 - DNA, 33 bp, Homo sapien
tgggctatagacaatgaaagtcatgaagaggag

SEQ ID NO: 115198 - DNA, 33 bp, Homo sapien
tgggctatagacaatggaagtcatgaagaggag

SEQ ID NO: 115199 - DNA, 33 bp, Homo sapien
ttgctgatgtgtctgccctcttctactgctcct

SEQ ID NO: 115200 - DNA, 33 bp, Homo sapien
ttgctgatgtgtctgctctcttctactgctcct

SEQ ID NO: 115201 - DNA, 33 bp, Homo sapien
ctctagtcagttaataaatccactagtgtttct

SEQ ID NO: 115202 - DNA, 33 bp, Homo sapien
ctctagtcagttaatagatccactagtgtttct

SEQ ID NO: 115203 - DNA, 33 bp, Homo sapien
agccaacaaggacttaagacagaagcccatgcc

SEQ ID NO: 115204 - DNA, 33 bp, Homo sapien
agccaacaaggacttaggacagaagcccatgcc

SEQ ID NO: 115205 - DNA, 33 bp, Homo sapien
ccactgtctctgcaaaccatatcagattcataa

SEQ ID NO: 115206 - DNA, 33 bp, Homo sapien
ccactgtctctgcaaatcatatcagattcataa

SEQ ID NO: 115207 - DNA, 33 bp, Homo sapien
agtatgtttggcataaaagattgctgccttttg

SEQ ID NO: 115208 - DNA, 33 bp, Homo sapien
agtatgtttggcataagagattgctgccttttg

SEQ ID NO: 115209 - DNA, 33 bp, Homo sapien
tctttgagtccaaaagccaaaacagctcatcag

SEQ ID NO: 115210 - DNA, 33 bp, Homo sapien
tctttgagtccaaaagtcaaaacagctcatcag

SEQ ID NO: 115211 - DNA, 33 bp, Homo sapien
atgctactcgcctgcaaaggttttagcaaacaa

SEQ ID NO: 115212 - DNA, 33 bp, Homo sapien
atgctactcgcctgcagaggttttagcaaacaa

SEQ ID NO: 115213 - DNA, 33 bp, Homo sapien
agaagaatgtttcaagaagactgagtccccaaa

SEQ ID NO: 115214 - DNA, 33 bp, Homo sapien
agaagaatgtttcaaggagactgagtccccaaa

SEQ ID NO: 115215 - DNA, 33 bp, Homo sapien
agggtgagctgagaacccaggacactggcccat

SEQ ID NO: 115216 - DNA, 33 bp, Homo sapien
agggtgagctgagaacgcaggacactggcccat

SEQ ID NO: 115217 - DNA, 33 bp, Homo sapien
acagaacaaaaaaagggattgaagagtgaaaga

SEQ ID NO: 115218 - DNA, 33 bp, Homo sapien
acagaacaaaaaaaggtattgaagagtgaaaga

SEQ ID NO: 115219 - DNA, 33 bp, Homo sapien
atctactgacttcttacagcagaggaagatatt

SEQ ID NO: 115220 - DNA, 33 bp, Homo sapien
atctactgacttcttatagcagaggaagatatt

SEQ ID NO: 115221 - DNA, 33 bp, Homo sapien
tagtaacattgaattgaaaaggaagtgaggtga

SEQ ID NO: 115222 - DNA, 33 bp, Homo sapien
tagtaacattgaattggaaaggaagtgaggtga

SEQ ID NO: 115223 - DNA, 33 bp, Homo sapien
gtttgttggatagcaccgctggagacaatggag

SEQ ID NO: 115224 - DNA, 33 bp, Homo sapien
gtttgttggatagcactgctggagacaatggag

SEQ ID NO: 115225 - DNA, 33 bp, Homo sapien
ttcatccaaaataaaacctttgtggtctaattc

SEQ ID NO: 115226 - DNA, 33 bp, Homo sapien
ttcatccaaaataaaatctttgtggtctaattc

SEQ ID NO: 115227 - DNA, 33 bp, Homo sapien
aaaaaagtcatatccaaggatgttcatcacatt

SEQ ID NO: 115228 - DNA, 33 bp, Homo sapien
aaaaaagtcatatccagggatgttcatcacatt

SEQ ID NO: 115229 - DNA, 33 bp, Homo sapien
acaaaaaaggaagcagcccgtactcatctctcc

SEQ ID NO: 115230 - DNA, 33 bp, Homo sapien
acaaaaaaggaagcaggccgtactcatctctcc

SEQ ID NO: 115231 - DNA, 33 bp, Homo sapien
ctcctcagagatcacaaagtcagtgtttcaacc

SEQ ID NO: 115232 - DNA, 33 bp, Homo sapien
ctcctcagagatcacacagtcagtgtttcaacc

SEQ ID NO: 115233 - DNA, 33 bp, Homo sapien
actctagttcttgacccctcctattgaagtgcc

SEQ ID NO: 115234 - DNA, 33 bp, Homo sapien
actctagttcttgacctctcctattgaagtgcc

SEQ ID NO: 115235 - DNA, 33 bp, Homo sapien
tctcctggttcttgaacgaaatccagctttagc

SEQ ID NO: 115236 - DNA, 33 bp, Homo sapien
tctcctggttcttgaatgaaatccagctttagc

SEQ ID NO: 115237 - DNA, 33 bp, Homo sapien
ttctgaagtgtgcgagaaactggctcccccagc

SEQ ID NO: 115238 - DNA, 33 bp, Homo sapien
ttctgaagtgtgcgaggaactggctcccccagc

SEQ ID NO: 115239 - DNA, 33 bp, Homo sapien
agaatgctattgcaaacgtaagtgacaactcag

SEQ ID NO: 115240 - DNA, 33 bp, Homo sapien
agaatgctattgcaaatgtaagtgacaactcag

SEQ ID NO: 115241 - DNA, 33 bp, Homo sapien
atgtctgatcacaaaggaggtttagtcttatgg

SEQ ID NO: 115242 - DNA, 33 bp, Homo sapien
atgtctgatcacaaagtaggtttagtcttatgg

SEQ ID NO: 115243 - DNA, 33 bp, Homo sapien
aaaagactgaaatgaactatctctgagtccctt

SEQ ID NO: 115244 - DNA, 33 bp, Homo sapien
aaaagactgaaatgaattatctctgagtccctt

SEQ ID NO: 115245 - DNA, 33 bp, Homo sapien
aaataggaatactgcaccaagttaaatatcaac

SEQ ID NO: 115246 - DNA, 33 bp, Homo sapien
aaataggaatactgcatcaagttaaatatcaac

SEQ ID NO: 115247 - DNA, 33 bp, Homo sapien
tttagaattgcaatagaccacaaatacaagtat

SEQ ID NO: 115248 - DNA, 33 bp, Homo sapien
tttagaattgcaatagtccacaaatacaagtat

SEQ ID NO: 115249 - DNA, 33 bp, Homo sapien
ggtttaggagctaccaacaaattgaacatatag

SEQ ID NO: 115250 - DNA, 33 bp, Homo sapien
ggtttaggagctaccatcaaattgaacatatag

SEQ ID NO: 115251 - DNA, 33 bp, Homo sapien
gagaaaactgaatgccagagtagacatattcat

SEQ ID NO: 115252 - DNA, 33 bp, Homo sapien
gagaaaactgaatgccggagtagacatattcat

SEQ ID NO: 115253 - DNA, 33 bp, Homo sapien
ggcaaaaaagctacaacgggcaggtttaggata

SEQ ID NO: 115254 - DNA, 33 bp, Homo sapien
ggcaaaaaagctacaatgggcaggtttaggata

SEQ ID NO: 115255 - DNA, 33 bp, Homo sapien
gcacagtaacagagaaagctcatccatcatcca

SEQ ID NO: 115256 - DNA, 33 bp, Homo sapien
gcacagtaacagagaaggctcatccatcatcca

SEQ ID NO: 115257 - DNA, 33 bp, Homo sapien
gaccctagctttgccaactacgacctcttttcc

SEQ ID NO: 115258 - DNA, 33 bp, Homo sapien
gaccctagctttgccagctacgacctcttttcc

SEQ ID NO: 115259 - DNA, 33 bp, Homo sapien
atgtaactattaagtacgaagcattgcactagg

SEQ ID NO: 115260 - DNA, 33 bp, Homo sapien
atgtaactattaagtatgaagcattgcactagg

SEQ ID NO: 115261 - DNA, 33 bp, Homo sapien
attcttgaagattttacgtcctgaattatgttg

SEQ ID NO: 115262 - DNA, 33 bp, Homo sapien
attcttgaagattttatgtcctgaattatgttg

SEQ ID NO: 115263 - DNA, 33 bp, Homo sapien
ttaatgtcatcccaaaaattgcacaagtctctt

SEQ ID NO: 115264 - DNA, 33 bp, Homo sapien
ttaatgtcatcccaaagattgcacaagtctctt

SEQ ID NO: 115265 - DNA, 33 bp, Homo sapien
agctcactacagccttaaactcttgtcctcaag

SEQ ID NO: 115266 - DNA, 33 bp, Homo sapien
agctcactacagccttgaactcttgtcctcaag

SEQ ID NO: 115267 - DNA, 33 bp, Homo sapien
aatgagtagagtattacgagagtggcttgagat

SEQ ID NO: 115268 - DNA, 33 bp, Homo sapien
aatgagtagagtattatgagagtggcttgagat

SEQ ID NO: 115269 - DNA, 33 bp, Homo sapien
tatgagacattaaaaaatagtgaaataggagca

SEQ ID NO: 115270 - DNA, 33 bp, Homo sapien
tatgagacattaaaaagtagtgaaataggagca

SEQ ID NO: 115271 - DNA, 33 bp, Homo sapien
gttatcttcagctttagaaattgtctatttact

SEQ ID NO: 115272 - DNA, 33 bp, Homo sapien
gttatcttcagctttataaattgtctatttact

SEQ ID NO: 115273 - DNA, 33 bp, Homo sapien
tactcttaaaagagccaaaactagttcttgatt

SEQ ID NO: 115274 - DNA, 33 bp, Homo sapien
tactcttaaaagagccgaaactagttcttgatt

SEQ ID NO: 115275 - DNA, 33 bp, Homo sapien
ctgaagcaactgggaacggctataaaaagtctt

SEQ ID NO: 115276 - DNA, 33 bp, Homo sapien
ctgaagcaactgggaatggctataaaaagtctt

SEQ ID NO: 115277 - DNA, 33 bp, Homo sapien
gattttattgtcactactagaaattatggagat

SEQ ID NO: 115278 - DNA, 33 bp, Homo sapien
gattttattgtcactagtagaaattatggagat

SEQ ID NO: 115279 - DNA, 33 bp, Homo sapien
acaaagtgggcatctgcatgccggtgtcacata

SEQ ID NO: 115280 - DNA, 33 bp, Homo sapien
acaaagtgggcatctgtatgccggtgtcacata

SEQ ID NO: 115281 - DNA, 33 bp, Homo sapien
actgtcagcttccagaagttgtgtttttcttac

SEQ ID NO: 115282 - DNA, 33 bp, Homo sapien
actgtcagcttccagatgttgtgtttttcttac

SEQ ID NO: 115283 - DNA, 33 bp, Homo sapien
gatctgtgggctttcacggacagctgtttggtg

SEQ ID NO: 115284 - DNA, 33 bp, Homo sapien
gatctgtgggctttcatggacagctgtttggtg

SEQ ID NO: 115285 - DNA, 33 bp, Homo sapien
ctctactaagaaaagacggatatcgaatttagc

SEQ ID NO: 115286 - DNA, 33 bp, Homo sapien
ctctactaagaaaagatggatatcgaatttagc

SEQ ID NO: 115287 - DNA, 33 bp, Homo sapien
caagttcaggtgggaacgaaattggttgtcgca

SEQ ID NO: 115288 - DNA, 33 bp, Homo sapien
caagttcaggtgggaatgaaattggttgtcgca

SEQ ID NO: 115289 - DNA, 33 bp, Homo sapien
cagattagtgtcaaaagaaactcattttccaag

SEQ ID NO: 115290 - DNA, 33 bp, Homo sapien
cagattagtgtcaaaataaactcattttccaag

SEQ ID NO: 115291 - DNA, 33 bp, Homo sapien
ttgaaatgagtagaaactggaccctagacttcc

SEQ ID NO: 115292 - DNA, 33 bp, Homo sapien
ttgaaatgagtagaaattggaccctagacttcc

SEQ ID NO: 115293 - DNA, 33 bp, Homo sapien
agggccttgttgtacacctcaaattatgccacg

SEQ ID NO: 115294 - DNA, 33 bp, Homo sapien
agggccttgttgtacatctcaaattatgccacg

SEQ ID NO: 115295 - DNA, 33 bp, Homo sapien
ttgtgttcagccacaactgggcatagagtaact

SEQ ID NO: 115296 - DNA, 33 bp, Homo sapien
ttgtgttcagccacaattgggcatagagtaact

SEQ ID NO: 115297 - DNA, 33 bp, Homo sapien
gctcactgcctttctaagcactcacccattttt

SEQ ID NO: 115298 - DNA, 33 bp, Homo sapien
gctcactgcctttctatgcactcacccattttt

SEQ ID NO: 115299 - DNA, 33 bp, Homo sapien
gttctagactcagtacaaggtagatcctaggaa

SEQ ID NO: 115300 - DNA, 33 bp, Homo sapien
gttctagactcagtacgaggtagatcctaggaa

SEQ ID NO: 115301 - DNA, 33 bp, Homo sapien
tgaaaggcattagagacactttcaatcaactat

SEQ ID NO: 115302 - DNA, 33 bp, Homo sapien
tgaaaggcattagagagactttcaatcaactat

SEQ ID NO: 115303 - DNA, 33 bp, Homo sapien
tcttcttacatttacactgatataacgctttta

SEQ ID NO: 115304 - DNA, 33 bp, Homo sapien
tcttcttacatttacattgatataacgctttta

SEQ ID NO: 115305 - DNA, 33 bp, Homo sapien
agcattctaaacgttgcattctgtgccttgctt

SEQ ID NO: 115306 - DNA, 33 bp, Homo sapien
agcattctaaacgttgtattctgtgccttgctt

SEQ ID NO: 115307 - DNA, 33 bp, Homo sapien
ggctaagcaggttataccagtttgaccattttt

SEQ ID NO: 115308 - DNA, 33 bp, Homo sapien
ggctaagcaggttatatcagtttgaccattttt

SEQ ID NO: 115309 - DNA, 33 bp, Homo sapien
tatgctgcacgatcaagtatattcctagccggg

SEQ ID NO: 115310 - DNA, 33 bp, Homo sapien
tatgctgcacgatcaattatattcctagccggg

SEQ ID NO: 115311 - DNA, 33 bp, Homo sapien
aaaattggaatgatacagagcaaattagcatgg

SEQ ID NO: 115312 - DNA, 33 bp, Homo sapien
aaaattggaatgatacggagcaaattagcatgg

SEQ ID NO: 115313 - DNA, 33 bp, Homo sapien
actgcccagtgaagccacccaagagcattcttc

SEQ ID NO: 115314 - DNA, 33 bp, Homo sapien
actgcccagtgaagccgcccaagagcattcttc

SEQ ID NO: 115315 - DNA, 33 bp, Homo sapien
atctctttaccatcataataatccagtctctcc

SEQ ID NO: 115316 - DNA, 33 bp, Homo sapien
atctctttaccatcatgataatccagtctctcc

SEQ ID NO: 115317 - DNA, 33 bp, Homo sapien
gacaagaagagccaagcagtaaggcttctgcaa

SEQ ID NO: 115318 - DNA, 33 bp, Homo sapien
gacaagaagagccaagtagtaaggcttctgcaa

SEQ ID NO: 115319 - DNA, 33 bp, Homo sapien
tggaggctgatttttacgaattacatcaatggg

SEQ ID NO: 115320 - DNA, 33 bp, Homo sapien
tggaggctgatttttatgaattacatcaatggg

SEQ ID NO: 115321 - DNA, 33 bp, Homo sapien
aaccatactgaaatgaacatgatgagtacaata

SEQ ID NO: 115322 - DNA, 33 bp, Homo sapien
aaccatactgaaatgatcatgatgagtacaata

SEQ ID NO: 115323 - DNA, 33 bp, Homo sapien
tggcttcagaaagatacgctgttaagagaaaaa

SEQ ID NO: 115324 - DNA, 33 bp, Homo sapien
tggcttcagaaagatatgctgttaagagaaaaa

SEQ ID NO: 115325 - DNA, 33 bp, Homo sapien
tatcttgaacttcttccacttactaaagcaaac

SEQ ID NO: 115326 - DNA, 33 bp, Homo sapien
tatcttgaacttcttctacttactaaagcaaac

SEQ ID NO: 115327 - DNA, 33 bp, Homo sapien
tttcaaagcatatctacctaggtttacatagta

SEQ ID NO: 115328 - DNA, 33 bp, Homo sapien
tttcaaagcatatctatctaggtttacatagta

SEQ ID NO: 115329 - DNA, 33 bp, Homo sapien
tggctaaccttctaacacttgaaaaatcaattt

SEQ ID NO: 115330 - DNA, 33 bp, Homo sapien
tggctaaccttctaacgcttgaaaaatcaattt

SEQ ID NO: 115331 - DNA, 33 bp, Homo sapien
cctactctgctgtcctcaattcaatccatacca

SEQ ID NO: 115332 - DNA, 33 bp, Homo sapien
cctactctgctgtccttaattcaatccatacca

SEQ ID NO: 115333 - DNA, 33 bp, Homo sapien
caggaagtgtcagttggaacagaaaatggatag

SEQ ID NO: 115334 - DNA, 33 bp, Homo sapien
caggaagtgtcagttgtaacagaaaatggatag

SEQ ID NO: 115335 - DNA, 33 bp, Homo sapien
atgaaatctgaaacaaaaaagcagaacatcacc

SEQ ID NO: 115336 - DNA, 33 bp, Homo sapien
atgaaatctgaaacaagaaagcagaacatcacc

SEQ ID NO: 115337 - DNA, 33 bp, Homo sapien
ggttacacatttcttcaaagtacctgttactat

SEQ ID NO: 115338 - DNA, 33 bp, Homo sapien
ggttacacatttcttcgaagtacctgttactat

SEQ ID NO: 115339 - DNA, 33 bp, Homo sapien
cagtcatctcctttggaatcttttctcatcatc

SEQ ID NO: 115340 - DNA, 33 bp, Homo sapien
cagtcatctcctttggcatcttttctcatcatc

SEQ ID NO: 115341 - DNA, 33 bp, Homo sapien
gaagccctgtactcaactcatctcccacaaatg

SEQ ID NO: 115342 - DNA, 33 bp, Homo sapien
gaagccctgtactcaagtcatctcccacaaatg

SEQ ID NO: 115343 - DNA, 33 bp, Homo sapien
ctggacaataagttacaagaagaaaaatgcctg

SEQ ID NO: 115344 - DNA, 33 bp, Homo sapien
ctggacaataagttacgagaagaaaaatgcctg

SEQ ID NO: 115345 - DNA, 33 bp, Homo sapien
tttagattaatttttggatcctatggtctcatc

SEQ ID NO: 115346 - DNA, 33 bp, Homo sapien
tttagattaatttttgtatcctatggtctcatc

SEQ ID NO: 115347 - DNA, 33 bp, Homo sapien
aagtgtacttccatgaatcaaaaataaaagttg

SEQ ID NO: 115348 - DNA, 33 bp, Homo sapien
aagtgtacttccatgattcaaaaataaaagttg

SEQ ID NO: 115349 - DNA, 33 bp, Homo sapien
tgcacaaaaagtgttacgtttgaaaccagagtc

SEQ ID NO: 115350 - DNA, 33 bp, Homo sapien
tgcacaaaaagtgttatgtttgaaaccagagtc

SEQ ID NO: 115351 - DNA, 33 bp, Homo sapien
attggaaatgtaattccaattgtgcagtttcac

SEQ ID NO: 115352 - DNA, 33 bp, Homo sapien
attggaaatgtaattctaattgtgcagtttcac

SEQ ID NO: 115353 - DNA, 33 bp, Homo sapien
tgatcatgaagcagtacagaaattcattgacaa

SEQ ID NO: 115354 - DNA, 33 bp, Homo sapien
tgatcatgaagcagtagagaaattcattgacaa

SEQ ID NO: 115355 - DNA, 33 bp, Homo sapien
atttgttctggcgtcacattttcataagcaatg

SEQ ID NO: 115356 - DNA, 33 bp, Homo sapien
atttgttctggcgtcagattttcataagcaatg

SEQ ID NO: 115357 - DNA, 33 bp, Homo sapien
agaataactgtgttggcatacgttaatacaata

SEQ ID NO: 115358 - DNA, 33 bp, Homo sapien
agaataactgtgttgggatacgttaatacaata

SEQ ID NO: 115359 - DNA, 33 bp, Homo sapien
tctcagtttacaccatcactaacaagaaagctt

SEQ ID NO: 115360 - DNA, 33 bp, Homo sapien
tctcagtttacaccatgactaacaagaaagctt

SEQ ID NO: 115361 - DNA, 33 bp, Homo sapien
ctgctctataattttggactttgctttccatat

SEQ ID NO: 115362 - DNA, 33 bp, Homo sapien
ctgctctataattttgtactttgctttccatat

SEQ ID NO: 115363 - DNA, 33 bp, Homo sapien
tttcaggggggacgtaactggttgacatgaaat

SEQ ID NO: 115364 - DNA, 33 bp, Homo sapien
tttcaggggggacgtacctggttgacatgaaat

SEQ ID NO: 115365 - DNA, 33 bp, Homo sapien
tttttaattttttgagacactttcatactgttt

SEQ ID NO: 115366 - DNA, 33 bp, Homo sapien
tttttaattttttgaggcactttcatactgttt

SEQ ID NO: 115367 - DNA, 33 bp, Homo sapien
gtgttagaaacatttcaaatcctcttctagcta

SEQ ID NO: 115368 - DNA, 33 bp, Homo sapien
gtgttagaaacatttccaatcctcttctagcta

SEQ ID NO: 115369 - DNA, 33 bp, Homo sapien
tttcagagagttgtagcatctttttgccgataa

SEQ ID NO: 115370 - DNA, 33 bp, Homo sapien
tttcagagagttgtagtatctttttgccgataa

SEQ ID NO: 115371 - DNA, 33 bp, Homo sapien
tatgtggtcagtgttgcaggctaacatagcatt

SEQ ID NO: 115372 - DNA, 33 bp, Homo sapien
tatgtggtcagtgttgtaggctaacatagcatt

SEQ ID NO: 115373 - DNA, 33 bp, Homo sapien
ttatatgttctcaacaacaatgaagatggattc

SEQ ID NO: 115374 - DNA, 33 bp, Homo sapien
ttatatgttctcaacagcaatgaagatggattc

SEQ ID NO: 115375 - DNA, 33 bp, Homo sapien
aatcgtattagtattcaaataacaatccctcat

SEQ ID NO: 115376 - DNA, 33 bp, Homo sapien
aatcgtattagtattccaataacaatccctcat

SEQ ID NO: 115377 - DNA, 33 bp, Homo sapien
taaaatcaaagagaagactgaaggtaatggggt

SEQ ID NO: 115378 - DNA, 33 bp, Homo sapien
taaaatcaaagagaagtctgaaggtaatggggt

SEQ ID NO: 115379 - DNA, 33 bp, Homo sapien
aaataacagtgctatacgaatgaactaatattt

SEQ ID NO: 115380 - DNA, 33 bp, Homo sapien
aaataacagtgctatatgaatgaactaatattt

SEQ ID NO: 115381 - DNA, 33 bp, Homo sapien
gacagcacagtagggacaagacaaataaaacgg

SEQ ID NO: 115382 - DNA, 33 bp, Homo sapien
gacagcacagtagggataagacaaataaaacgg

SEQ ID NO: 115383 - DNA, 33 bp, Homo sapien
acaaaatatggatttagagtgacaatgacctgt

SEQ ID NO: 115384 - DNA, 33 bp, Homo sapien
acaaaatatggatttatagtgacaatgacctgt

SEQ ID NO: 115385 - DNA, 33 bp, Homo sapien
tccctttgtcttcccactgatgtgcctaggaaa

SEQ ID NO: 115386 - DNA, 33 bp, Homo sapien
tccctttgtcttcccattgatgtgcctaggaaa

SEQ ID NO: 115387 - DNA, 33 bp, Homo sapien
aattgggtgaattacacggtatgtgaattatgc

SEQ ID NO: 115388 - DNA, 33 bp, Homo sapien
aattgggtgaattacatggtatgtgaattatgc

SEQ ID NO: 115389 - DNA, 33 bp, Homo sapien
tatttcccttcccacaactggaagtctagaggg

SEQ ID NO: 115390 - DNA, 33 bp, Homo sapien
tatttcccttcccacagctggaagtctagaggg

SEQ ID NO: 115391 - DNA, 33 bp, Homo sapien
cactgttccaggtaaacagaaagaaagcagcaa

SEQ ID NO: 115392 - DNA, 33 bp, Homo sapien
cactgttccaggtaaatagaaagaaagcagcaa

SEQ ID NO: 115393 - DNA, 33 bp, Homo sapien
tataataaataccacacgaaaccgttgtaaaga

SEQ ID NO: 115394 - DNA, 33 bp, Homo sapien
tataataaataccacatgaaaccgttgtaaaga

SEQ ID NO: 115395 - DNA, 33 bp, Homo sapien
accaatttttaagggacagtagtttgagattac

SEQ ID NO: 115396 - DNA, 33 bp, Homo sapien
accaatttttaagggatagtagtttgagattac

SEQ ID NO: 115397 - DNA, 33 bp, Homo sapien
attgtatactggtagacggttatacttctgtag

SEQ ID NO: 115398 - DNA, 33 bp, Homo sapien
attgtatactggtagatggttatacttctgtag

SEQ ID NO: 115399 - DNA, 33 bp, Homo sapien
aacacatttgggctcacgccatctcatcggatt

SEQ ID NO: 115400 - DNA, 33 bp, Homo sapien
aacacatttgggctcatgccatctcatcggatt

SEQ ID NO: 115401 - DNA, 33 bp, Homo sapien
ctttgattgtatccaaattctaaagggaattac

SEQ ID NO: 115402 - DNA, 33 bp, Homo sapien
ctttgattgtatccaagttctaaagggaattac

SEQ ID NO: 115403 - DNA, 33 bp, Homo sapien
atctaagtgaaggatacagcgtggcaaaagtcc

SEQ ID NO: 115404 - DNA, 33 bp, Homo sapien
atctaagtgaaggatagagcgtggcaaaagtcc

SEQ ID NO: 115405 - DNA, 33 bp, Homo sapien
actgattatgattaagcaatatgttgtcagtac

SEQ ID NO: 115406 - DNA, 33 bp, Homo sapien
actgattatgattaaggaatatgttgtcagtac

SEQ ID NO: 115407 - DNA, 33 bp, Homo sapien
taatttttcagatggacgtcatgagttaacttc

SEQ ID NO: 115408 - DNA, 33 bp, Homo sapien
taatttttcagatggatgtcatgagttaacttc

SEQ ID NO: 115409 - DNA, 33 bp, Homo sapien
ttgaaaagatctattcccgattcactaacttat

SEQ ID NO: 115410 - DNA, 33 bp, Homo sapien
ttgaaaagatctattctcgattcactaacttat

SEQ ID NO: 115411 - DNA, 33 bp, Homo sapien
ggtcgtgacagtgctacaatgattgagaaatgg

SEQ ID NO: 115412 - DNA, 33 bp, Homo sapien
ggtcgtgacagtgctataatgattgagaaatgg

SEQ ID NO: 115413 - DNA, 33 bp, Homo sapien
aactgctctgagagaaacacatgaattattcaa

SEQ ID NO: 115414 - DNA, 33 bp, Homo sapien
aactgctctgagagaaccacatgaattattcaa

SEQ ID NO: 115415 - DNA, 33 bp, Homo sapien
caccacccctaatataaatgaagcaccgtagcc

SEQ ID NO: 115416 - DNA, 33 bp, Homo sapien
caccacccctaatatacatgaagcaccgtagcc

SEQ ID NO: 115417 - DNA, 33 bp, Homo sapien
agttcttccttgttaacccttccagggacgtcc

SEQ ID NO: 115418 - DNA, 33 bp, Homo sapien
agttcttccttgttaatccttccagggacgtcc

SEQ ID NO: 115419 - DNA, 33 bp, Homo sapien
acaggaagacacactcactcttttttctcatgt

SEQ ID NO: 115420 - DNA, 33 bp, Homo sapien
acaggaagacacactcgctcttttttctcatgt

SEQ ID NO: 115421 - DNA, 33 bp, Homo sapien
tctaaaaaatccagaacgatgtgttttttattc

SEQ ID NO: 115422 - DNA, 33 bp, Homo sapien
tctaaaaaatccagaatgatgtgttttttattc

SEQ ID NO: 115423 - DNA, 33 bp, Homo sapien
tccattctaatatgtcaaaattatgtcaaaata

SEQ ID NO: 115424 - DNA, 33 bp, Homo sapien
tccattctaatatgtcgaaattatgtcaaaata

SEQ ID NO: 115425 - DNA, 33 bp, Homo sapien
gcagtcctgagtgatacagtgtgcaatttgggg

SEQ ID NO: 115426 - DNA, 33 bp, Homo sapien
gcagtcctgagtgatatagtgtgcaatttgggg

SEQ ID NO: 115427 - DNA, 33 bp, Homo sapien
gtttcatatttcaccactgactttttcttttaa

SEQ ID NO: 115428 - DNA, 33 bp, Homo sapien
gtttcatatttcaccattgactttttcttttaa

SEQ ID NO: 115429 - DNA, 33 bp, Homo sapien
gtctcatcaacctataaacagaaaatggtgcat

SEQ ID NO: 115430 - DNA, 33 bp, Homo sapien
gtctcatcaacctatacacagaaaatggtgcat

SEQ ID NO: 115431 - DNA, 33 bp, Homo sapien
ctttgtacacacaggaacattgagaccattgtt

SEQ ID NO: 115432 - DNA, 33 bp, Homo sapien
ctttgtacacacaggagcattgagaccattgtt

SEQ ID NO: 115433 - DNA, 33 bp, Homo sapien
ttggttctcatcttcacagcgtcagtttaggat

SEQ ID NO: 115434 - DNA, 33 bp, Homo sapien
ttggttctcatcttcatagcgtcagtttaggat

SEQ ID NO: 115435 - DNA, 33 bp, Homo sapien
gttggaagggaccctacggaaccattcagattt

SEQ ID NO: 115436 - DNA, 33 bp, Homo sapien
gttggaagggaccctatggaaccattcagattt

SEQ ID NO: 115437 - DNA, 33 bp, Homo sapien
cattgatttttcataaatgtctcatctattttg

SEQ ID NO: 115438 - DNA, 33 bp, Homo sapien
cattgatttttcataagtgtctcatctattttg

SEQ ID NO: 115439 - DNA, 33 bp, Homo sapien
tatttttacagtcccaatgagatcaactaaaat

SEQ ID NO: 115440 - DNA, 33 bp, Homo sapien
tatttttacagtcccagtgagatcaactaaaat

SEQ ID NO: 115441 - DNA, 33 bp, Homo sapien
aacaaagtctcataaaagttaagcagcctgtcc

SEQ ID NO: 115442 - DNA, 33 bp, Homo sapien
aacaaagtctcataaacgttaagcagcctgtcc

SEQ ID NO: 115443 - DNA, 33 bp, Homo sapien
ctagctgataaaaaaggataaaatcgcaagcca

SEQ ID NO: 115444 - DNA, 33 bp, Homo sapien
ctagctgataaaaaagtataaaatcgcaagcca

SEQ ID NO: 115445 - DNA, 33 bp, Homo sapien
tgtgctagatcttagaaatcaaagttccgaata

SEQ ID NO: 115446 - DNA, 33 bp, Homo sapien
tgtgctagatcttagacatcaaagttccgaata

SEQ ID NO: 115447 - DNA, 33 bp, Homo sapien
attaagagagtagcaacttatatatgtatatga

SEQ ID NO: 115448 - DNA, 33 bp, Homo sapien
attaagagagtagcaatttatatatgtatatga

SEQ ID NO: 115449 - DNA, 33 bp, Homo sapien
gcatcagttctagctcacccttggctatgaccg

SEQ ID NO: 115450 - DNA, 33 bp, Homo sapien
gcatcagttctagctcgcccttggctatgaccg

SEQ ID NO: 115451 - DNA, 33 bp, Homo sapien
gagcctagaacacaaaaactgtctcctcctcgc

SEQ ID NO: 115452 - DNA, 33 bp, Homo sapien
gagcctagaacacaaagactgtctcctcctcgc

SEQ ID NO: 115453 - DNA, 33 bp, Homo sapien
atattgtgaagaggctcaagacacacataaaag

SEQ ID NO: 115454 - DNA, 33 bp, Homo sapien
atattgtgaagaggctgaagacacacataaaag

SEQ ID NO: 115455 - DNA, 33 bp, Homo sapien
gacacggaaagaccaaatagttgggttgggcca

SEQ ID NO: 115456 - DNA, 33 bp, Homo sapien
gacacggaaagaccaagtagttgggttgggcca

SEQ ID NO: 115457 - DNA, 33 bp, Homo sapien
ttgcctgttccaatcaataaagctactaaaatg

SEQ ID NO: 115458 - DNA, 33 bp, Homo sapien
ttgcctgttccaatcagtaaagctactaaaatg

SEQ ID NO: 115459 - DNA, 33 bp, Homo sapien
tttggtattttaaggaggagcttgggcatttta

SEQ ID NO: 115460 - DNA, 33 bp, Homo sapien
tttggtattttaaggatgagcttgggcatttta

SEQ ID NO: 115461 - DNA, 33 bp, Homo sapien
gaaattcagctaagacactgaagccaaagagac

SEQ ID NO: 115462 - DNA, 33 bp, Homo sapien
gaaattcagctaagaccctgaagccaaagagac

SEQ ID NO: 115463 - DNA, 33 bp, Homo sapien
tgctcagtgctggctacggagtcccatctccca

SEQ ID NO: 115464 - DNA, 33 bp, Homo sapien
tgctcagtgctggctatggagtcccatctccca

SEQ ID NO: 115465 - DNA, 33 bp, Homo sapien
ggatggttgtctgcaactcaggaaaagaggcct

SEQ ID NO: 115466 - DNA, 33 bp, Homo sapien
ggatggttgtctgcaagtcaggaaaagaggcct

SEQ ID NO: 115467 - DNA, 33 bp, Homo sapien
atcctgactgttgaaacctcaaaaggtcaaaat

SEQ ID NO: 115468 - DNA, 33 bp, Homo sapien
atcctgactgttgaaatctcaaaaggtcaaaat

SEQ ID NO: 115469 - DNA, 33 bp, Homo sapien
ttaaaaatttccacaaacagttatatgggaggc

SEQ ID NO: 115470 - DNA, 33 bp, Homo sapien
ttaaaaatttccacaagcagttatatgggaggc

SEQ ID NO: 115471 - DNA, 33 bp, Homo sapien
ttgtataaagccaaaacaatttggtaacacccc

SEQ ID NO: 115472 - DNA, 33 bp, Homo sapien
ttgtataaagccaaaagaatttggtaacacccc

SEQ ID NO: 115473 - DNA, 33 bp, Homo sapien
ctctggagtagattgccgagtttttgttgctac

SEQ ID NO: 115474 - DNA, 33 bp, Homo sapien
ctctggagtagattgctgagtttttgttgctac

SEQ ID NO: 115475 - DNA, 33 bp, Homo sapien
cttaaagatgctgatacagccattagtctgaca

SEQ ID NO: 115476 - DNA, 33 bp, Homo sapien
cttaaagatgctgatatagccattagtctgaca

SEQ ID NO: 115477 - DNA, 33 bp, Homo sapien
ccaattggaaaggaaaattccactagcccaaga

SEQ ID NO: 115478 - DNA, 33 bp, Homo sapien
ccaattggaaaggaaacttccactagcccaaga

SEQ ID NO: 115479 - DNA, 33 bp, Homo sapien
tcaaggcagaggaagacgagaaacagacacagc

SEQ ID NO: 115480 - DNA, 33 bp, Homo sapien
tcaaggcagaggaagatgagaaacagacacagc

SEQ ID NO: 115481 - DNA, 33 bp, Homo sapien
atcttaatcctttcaaataatgcttctctcaat

SEQ ID NO: 115482 - DNA, 33 bp, Homo sapien
atcttaatcctttcaactaatgcttctctcaat

SEQ ID NO: 115483 - DNA, 33 bp, Homo sapien
gtatacatacatggaaaataaaaggatggaaaa

SEQ ID NO: 115484 - DNA, 33 bp, Homo sapien
gtatacatacatggaagataaaaggatggaaaa

SEQ ID NO: 115485 - DNA, 33 bp, Homo sapien
tatatattacagcctacaggggataggatataa

SEQ ID NO: 115486 - DNA, 33 bp, Homo sapien
tatatattacagcctagaggggataggatataa

SEQ ID NO: 115487 - DNA, 33 bp, Homo sapien
ctgttattacaaagacaaactttctgagagttt

SEQ ID NO: 115488 - DNA, 33 bp, Homo sapien
ctgttattacaaagacgaactttctgagagttt

SEQ ID NO: 115489 - DNA, 33 bp, Homo sapien
gactgtgtgacataaaccctgacttgagtccag

SEQ ID NO: 115490 - DNA, 33 bp, Homo sapien
gactgtgtgacataaatcctgacttgagtccag

SEQ ID NO: 115491 - DNA, 33 bp, Homo sapien
tgtatcatcctctaaaagtgaaatatttcatca

SEQ ID NO: 115492 - DNA, 33 bp, Homo sapien
tgtatcatcctctaaacgtgaaatatttcatca

SEQ ID NO: 115493 - DNA, 33 bp, Homo sapien
ggggtgaaataattatcagtgacagtttgtagt

SEQ ID NO: 115494 - DNA, 33 bp, Homo sapien
ggggtgaaataattattagtgacagtttgtagt

SEQ ID NO: 115495 - DNA, 33 bp, Homo sapien
gcaagaggcaatgagaacctggattaagtaagt

SEQ ID NO: 115496 - DNA, 33 bp, Homo sapien
gcaagaggcaatgagagcctggattaagtaagt

SEQ ID NO: 115497 - DNA, 33 bp, Homo sapien
atcctttctatttttcaaacgtatatctcaccc

SEQ ID NO: 115498 - DNA, 33 bp, Homo sapien
atcctttctatttttccaacgtatatctcaccc

SEQ ID NO: 115499 - DNA, 33 bp, Homo sapien
tgagttgtattagacacgtcctgtacagcactt

SEQ ID NO: 115500 - DNA, 33 bp, Homo sapien
tgagttgtattagacatgtcctgtacagcactt

SEQ ID NO: 115501 - DNA, 33 bp, Homo sapien
ggaaagttatgttgtgaaaagcactgtggaaag

SEQ ID NO: 115502 - DNA, 33 bp, Homo sapien
ggaaagttatgttgtgcaaagcactgtggaaag

SEQ ID NO: 115503 - DNA, 33 bp, Homo sapien
gacattacaactgataacacaaaaatccaaagc

SEQ ID NO: 115504 - DNA, 33 bp, Homo sapien
gacattacaactgataccacaaaaatccaaagc

SEQ ID NO: 115505 - DNA, 33 bp, Homo sapien
cttttagcattagacaaattttccagacaaaac

SEQ ID NO: 115506 - DNA, 33 bp, Homo sapien
cttttagcattagacagattttccagacaaaac

SEQ ID NO: 115507 - DNA, 33 bp, Homo sapien
acctgcctataatggaggtgagattaggctaac

SEQ ID NO: 115508 - DNA, 33 bp, Homo sapien
acctgcctataatggatgtgagattaggctaac

SEQ ID NO: 115509 - DNA, 33 bp, Homo sapien
ttacttttcataggacaaggaatgatggaattc

SEQ ID NO: 115510 - DNA, 33 bp, Homo sapien
ttacttttcataggacgaggaatgatggaattc

SEQ ID NO: 115511 - DNA, 33 bp, Homo sapien
agattctctctctgtaacacacagctgctgctg

SEQ ID NO: 115512 - DNA, 33 bp, Homo sapien
agattctctctctgtaccacacagctgctgctg

SEQ ID NO: 115513 - DNA, 33 bp, Homo sapien
taaatccaagttataacgccggctacatacaga

SEQ ID NO: 115514 - DNA, 33 bp, Homo sapien
taaatccaagttataatgccggctacatacaga

SEQ ID NO: 115515 - DNA, 33 bp, Homo sapien
catcaaaacagacccacagttactggcagaaca

SEQ ID NO: 115516 - DNA, 33 bp, Homo sapien
catcaaaacagacccatagttactggcagaaca

SEQ ID NO: 115517 - DNA, 33 bp, Homo sapien
atttcatggctgtttacaaagattcatctcccc

SEQ ID NO: 115518 - DNA, 33 bp, Homo sapien
atttcatggctgtttataaagattcatctcccc

SEQ ID NO: 115519 - DNA, 33 bp, Homo sapien
acaatagagatggctacattcctagagattgca

SEQ ID NO: 115520 - DNA, 33 bp, Homo sapien
acaatagagatggctagattcctagagattgca

SEQ ID NO: 115521 - DNA, 33 bp, Homo sapien
gcagactgtcaatccccggcgtcacgccctctg

SEQ ID NO: 115522 - DNA, 33 bp, Homo sapien
gcagactgtcaatccctggcgtcacgccctctg

SEQ ID NO: 115523 - DNA, 33 bp, Homo sapien
gcaagacaaatgtggccgaggagatttccccga

SEQ ID NO: 115524 - DNA, 33 bp, Homo sapien
gcaagacaaatgtggcggaggagatttccccga

SEQ ID NO: 115525 - DNA, 33 bp, Homo sapien
tccttgattagatttcaatattccaatcgctag

SEQ ID NO: 115526 - DNA, 33 bp, Homo sapien
tccttgattagatttcgatattccaatcgctag

SEQ ID NO: 115527 - DNA, 33 bp, Homo sapien
acttgaagtctgaaaaccttcatcctggtccac

SEQ ID NO: 115528 - DNA, 33 bp, Homo sapien
acttgaagtctgaaaatcttcatcctggtccac

SEQ ID NO: 115529 - DNA, 33 bp, Homo sapien
ttagtgcagaacatctgaacacttttgggactt

SEQ ID NO: 115530 - DNA, 33 bp, Homo sapien
ttagtgcagaacatcttaacacttttgggactt

SEQ ID NO: 115531 - DNA, 33 bp, Homo sapien
cctagacagcaaagtcacctcaacttaagaacc

SEQ ID NO: 115532 - DNA, 33 bp, Homo sapien
cctagacagcaaagtcgcctcaacttaagaacc

SEQ ID NO: 115533 - DNA, 33 bp, Homo sapien
ctgaactgagagcctgaaattccttaaagagtg

SEQ ID NO: 115534 - DNA, 33 bp, Homo sapien
ctgaactgagagcctgtaattccttaaagagtg

SEQ ID NO: 115535 - DNA, 33 bp, Homo sapien
caaaatataccaactacctaaagcagtcatgtg

SEQ ID NO: 115536 - DNA, 33 bp, Homo sapien
caaaatataccaactatctaaagcagtcatgtg

SEQ ID NO: 115537 - DNA, 33 bp, Homo sapien
catcttttctgatgtacgcttattttcattgtc

SEQ ID NO: 115538 - DNA, 33 bp, Homo sapien
catcttttctgatgtatgcttattttcattgtc

SEQ ID NO: 115539 - DNA, 33 bp, Homo sapien
tccacctggaacctgaatagcaagacagctcat

SEQ ID NO: 115540 - DNA, 33 bp, Homo sapien
tccacctggaacctgagtagcaagacagctcat

SEQ ID NO: 115541 - DNA, 33 bp, Homo sapien
ttaagaggaacaagtcaaatggctgcagaaaag

SEQ ID NO: 115542 - DNA, 33 bp, Homo sapien
ttaagaggaacaagtcgaatggctgcagaaaag

SEQ ID NO: 115543 - DNA, 33 bp, Homo sapien
ttcccaaatatagtaccgggaatgaaaacctcg

SEQ ID NO: 115544 - DNA, 33 bp, Homo sapien
ttcccaaatatagtactgggaatgaaaacctcg

SEQ ID NO: 115545 - DNA, 33 bp, Homo sapien
tgatctttggtgctaacccttcttgttgctcgc

SEQ ID NO: 115546 - DNA, 33 bp, Homo sapien
tgatctttggtgctaagccttcttgttgctcgc

SEQ ID NO: 115547 - DNA, 33 bp, Homo sapien
aaaagtaaaaaagcagcattcagaaagctcaat

SEQ ID NO: 115548 - DNA, 33 bp, Homo sapien
aaaagtaaaaaagcaggattcagaaagctcaat

SEQ ID NO: 115549 - DNA, 33 bp, Homo sapien
aagaaaaagatggctaaagaaataatatgacca

SEQ ID NO: 115550 - DNA, 33 bp, Homo sapien
aagaaaaagatggctagagaaataatatgacca

SEQ ID NO: 115551 - DNA, 33 bp, Homo sapien
tttgtctctttggctcacttcacactatcgata

SEQ ID NO: 115552 - DNA, 33 bp, Homo sapien
tttgtctctttggctcgcttcacactatcgata

SEQ ID NO: 115553 - DNA, 33 bp, Homo sapien
gtccttagagattcaaagtcctttttctttgtc

SEQ ID NO: 115554 - DNA, 33 bp, Homo sapien
gtccttagagattcaacgtcctttttctttgtc

SEQ ID NO: 115555 - DNA, 33 bp, Homo sapien
tttgtcctgcttttacacaaatggaaggcagaa

SEQ ID NO: 115556 - DNA, 33 bp, Homo sapien
tttgtcctgcttttacgcaaatggaaggcagaa

SEQ ID NO: 115557 - DNA, 33 bp, Homo sapien
gtctacaattagaatacgggctctgataggatt

SEQ ID NO: 115558 - DNA, 33 bp, Homo sapien
gtctacaattagaatatgggctctgataggatt

SEQ ID NO: 115559 - DNA, 33 bp, Homo sapien
tctgctatcagatagtcaaagacaaaacagcca

SEQ ID NO: 115560 - DNA, 33 bp, Homo sapien
tctgctatcagatagtgaaagacaaaacagcca

SEQ ID NO: 115561 - DNA, 33 bp, Homo sapien
tccccatgtttttgtcactttagctgtttcttc

SEQ ID NO: 115562 - DNA, 33 bp, Homo sapien
tccccatgtttttgtcgctttagctgtttcttc

SEQ ID NO: 115563 - DNA, 33 bp, Homo sapien
aaagtcttgcttcataagtcaacaaacaattat

SEQ ID NO: 115564 - DNA, 33 bp, Homo sapien
aaagtcttgcttcatatgtcaacaaacaattat

SEQ ID NO: 115565 - DNA, 33 bp, Homo sapien
ctgttgcaaagacagagcccatttagctgtatt

SEQ ID NO: 115566 - DNA, 33 bp, Homo sapien
ctgttgcaaagacagatcccatttagctgtatt

SEQ ID NO: 115567 - DNA, 33 bp, Homo sapien
gtgttcaaggggacctaaaggagtcaaagtctg

SEQ ID NO: 115568 - DNA, 33 bp, Homo sapien
gtgttcaaggggacctgaaggagtcaaagtctg

SEQ ID NO: 115569 - DNA, 33 bp, Homo sapien
tagtcacattgctgtaccttagggctccagaac

SEQ ID NO: 115570 - DNA, 33 bp, Homo sapien
tagtcacattgctgtatcttagggctccagaac

SEQ ID NO: 115571 - DNA, 33 bp, Homo sapien
attgattgtggtaagaaatgcttaagatctatc

SEQ ID NO: 115572 - DNA, 33 bp, Homo sapien
attgattgtggtaagatatgcttaagatctatc

SEQ ID NO: 115573 - DNA, 33 bp, Homo sapien
ataacacataagaatccgacttgctttgtccat

SEQ ID NO: 115574 - DNA, 33 bp, Homo sapien
ataacacataagaatctgacttgctttgtccat

SEQ ID NO: 115575 - DNA, 33 bp, Homo sapien
tcaatgtcgggacacaagaaacatttaaaaagc

SEQ ID NO: 115576 - DNA, 33 bp, Homo sapien
tcaatgtcgggacacacgaaacatttaaaaagc

SEQ ID NO: 115577 - DNA, 33 bp, Homo sapien
aaccagagccaaagcactctactcaaccaatac

SEQ ID NO: 115578 - DNA, 33 bp, Homo sapien
aaccagagccaaagcattctactcaaccaatac

SEQ ID NO: 115579 - DNA, 33 bp, Homo sapien
gctcatacattctaagcctccctcctctacctt

SEQ ID NO: 115580 - DNA, 33 bp, Homo sapien
gctcatacattctaaggctccctcctctacctt

SEQ ID NO: 115581 - DNA, 33 bp, Homo sapien
attaaaagataaaaccggagacatcttgttttc

SEQ ID NO: 115582 - DNA, 33 bp, Homo sapien
attaaaagataaaacctgagacatcttgttttc

SEQ ID NO: 115583 - DNA, 33 bp, Homo sapien
ggatattcagctgggacggtgatctacagagac

SEQ ID NO: 115584 - DNA, 33 bp, Homo sapien
ggatattcagctgggatggtgatctacagagac

SEQ ID NO: 115585 - DNA, 33 bp, Homo sapien
agaattcaaaatagaaccagaacccagatacct

SEQ ID NO: 115586 - DNA, 33 bp, Homo sapien
agaattcaaaatagaatcagaacccagatacct

SEQ ID NO: 115587 - DNA, 33 bp, Homo sapien
agctcagaagattgcaaagttaagtagaaatga

SEQ ID NO: 115588 - DNA, 33 bp, Homo sapien
agctcagaagattgcatagttaagtagaaatga

SEQ ID NO: 115589 - DNA, 33 bp, Homo sapien
tcccaagtaactagtaaaggcacataccatcat

SEQ ID NO: 115590 - DNA, 33 bp, Homo sapien
tcccaagtaactagtataggcacataccatcat

SEQ ID NO: 115591 - DNA, 33 bp, Homo sapien
ctgttgccttttctccacgatttgagggacaga

SEQ ID NO: 115592 - DNA, 33 bp, Homo sapien
ctgttgccttttctccgcgatttgagggacaga

SEQ ID NO: 115593 - DNA, 33 bp, Homo sapien
gacaactagcagagaacagaggacacagagggc

SEQ ID NO: 115594 - DNA, 33 bp, Homo sapien
gacaactagcagagaagagaggacacagagggc

SEQ ID NO: 115595 - DNA, 33 bp, Homo sapien
gtttctgacctattcactaatttatcagtatag

SEQ ID NO: 115596 - DNA, 33 bp, Homo sapien
gtttctgacctattcattaatttatcagtatag

SEQ ID NO: 115597 - DNA, 33 bp, Homo sapien
caactgaagagagttacggtcttactctgggtt

SEQ ID NO: 115598 - DNA, 33 bp, Homo sapien
caactgaagagagttagggtcttactctgggtt

SEQ ID NO: 115599 - DNA, 33 bp, Homo sapien
actgcctgctagtcacaaaagtaaatcctcttg

SEQ ID NO: 115600 - DNA, 33 bp, Homo sapien
actgcctgctagtcacgaaagtaaatcctcttg

SEQ ID NO: 115601 - DNA, 33 bp, Homo sapien
ccatgaacaattttgaacagccaatgtgacatc

SEQ ID NO: 115602 - DNA, 33 bp, Homo sapien
ccatgaacaattttgagcagccaatgtgacatc

SEQ ID NO: 115603 - DNA, 33 bp, Homo sapien
attgtcaaaatgtttgcaattagtcactattta

SEQ ID NO: 115604 - DNA, 33 bp, Homo sapien
attgtcaaaatgtttgtaattagtcactattta

SEQ ID NO: 115605 - DNA, 33 bp, Homo sapien
ttgtatgtgagaacataaggacctgcaagcaca

SEQ ID NO: 115606 - DNA, 33 bp, Homo sapien
ttgtatgtgagaacatgaggacctgcaagcaca

SEQ ID NO: 115607 - DNA, 33 bp, Homo sapien
tcagaatgatagtaggaagagaggcatttccaa

SEQ ID NO: 115608 - DNA, 33 bp, Homo sapien
tcagaatgatagtagggagagaggcatttccaa

SEQ ID NO: 115609 - DNA, 33 bp, Homo sapien
gcagcagggattgtggaaaatggaaatgtggtg

SEQ ID NO: 115610 - DNA, 33 bp, Homo sapien
gcagcagggattgtggcaaatggaaatgtggtg

SEQ ID NO: 115611 - DNA, 33 bp, Homo sapien
agtgatggctattcacaggggacagtggtcact

SEQ ID NO: 115612 - DNA, 33 bp, Homo sapien
agtgatggctattcacgggggacagtggtcact

SEQ ID NO: 115613 - DNA, 33 bp, Homo sapien
ccatcctttctgagtacgaatgtgtggagataa

SEQ ID NO: 115614 - DNA, 33 bp, Homo sapien
ccatcctttctgagtatgaatgtgtggagataa

SEQ ID NO: 115615 - DNA, 33 bp, Homo sapien
actcaagtttcttctacccgagacttagtttta

SEQ ID NO: 115616 - DNA, 33 bp, Homo sapien
actcaagtttcttctatccgagacttagtttta

SEQ ID NO: 115617 - DNA, 33 bp, Homo sapien
aatttatcccattttgaatggccgtatttaccc

SEQ ID NO: 115618 - DNA, 33 bp, Homo sapien
aatttatcccattttgtatggccgtatttaccc

SEQ ID NO: 115619 - DNA, 33 bp, Homo sapien
tatatacgtttgtccacgatctgtcctggctga

SEQ ID NO: 115620 - DNA, 33 bp, Homo sapien
tatatacgtttgtccatgatctgtcctggctga

SEQ ID NO: 115621 - DNA, 33 bp, Homo sapien
aggcaaggtgtagagacatcttacctcttgaga

SEQ ID NO: 115622 - DNA, 33 bp, Homo sapien
aggcaaggtgtagagatatcttacctcttgaga

SEQ ID NO: 115623 - DNA, 33 bp, Homo sapien
agcctgttttagttgaagaatcagaggaaaccc

SEQ ID NO: 115624 - DNA, 33 bp, Homo sapien
agcctgttttagttgatgaatcagaggaaaccc

SEQ ID NO: 115625 - DNA, 33 bp, Homo sapien
cttaggggttcttgaaaggactggtgcttacca

SEQ ID NO: 115626 - DNA, 33 bp, Homo sapien
cttaggggttcttgaatggactggtgcttacca

SEQ ID NO: 115627 - DNA, 33 bp, Homo sapien
cctctgttcgctcttcgcagataggtaattgtg

SEQ ID NO: 115628 - DNA, 33 bp, Homo sapien
cctctgttcgctcttctcagataggtaattgtg

SEQ ID NO: 115629 - DNA, 33 bp, Homo sapien
atgcatcctcaaaaaccgggaaaagcttcacac

SEQ ID NO: 115630 - DNA, 33 bp, Homo sapien
atgcatcctcaaaaactgggaaaagcttcacac

SEQ ID NO: 115631 - DNA, 33 bp, Homo sapien
tgaaagaattgtaagcaaacaaaggacaagatt

SEQ ID NO: 115632 - DNA, 33 bp, Homo sapien
tgaaagaattgtaagccaacaaaggacaagatt

SEQ ID NO: 115633 - DNA, 33 bp, Homo sapien
catagcatttgttaccggctaatctacgacatc

SEQ ID NO: 115634 - DNA, 33 bp, Homo sapien
catagcatttgttacctgctaatctacgacatc

SEQ ID NO: 115635 - DNA, 33 bp, Homo sapien
acattctagtataggacaaaaggatgaaaagaa

SEQ ID NO: 115636 - DNA, 33 bp, Homo sapien
acattctagtataggagaaaaggatgaaaagaa

SEQ ID NO: 115637 - DNA, 33 bp, Homo sapien
gttctacaactgcaagaatcaaaattctgtcat

SEQ ID NO: 115638 - DNA, 33 bp, Homo sapien
gttctacaactgcaaggatcaaaattctgtcat

SEQ ID NO: 115639 - DNA, 33 bp, Homo sapien
atggtgcaagtacaaactggccacttggctcac

SEQ ID NO: 115640 - DNA, 33 bp, Homo sapien
atggtgcaagtacaaattggccacttggctcac

SEQ ID NO: 115641 - DNA, 33 bp, Homo sapien
ttcttatcagatggctcaaatttgcatttcagc

SEQ ID NO: 115642 - DNA, 33 bp, Homo sapien
ttcttatcagatggcttaaatttgcatttcagc

SEQ ID NO: 115643 - DNA, 33 bp, Homo sapien
atattgcatcaattataagttacatctatcttg

SEQ ID NO: 115644 - DNA, 33 bp, Homo sapien
atattgcatcaattatgagttacatctatcttg

SEQ ID NO: 115645 - DNA, 33 bp, Homo sapien
aaaacacaataaaccacgactcgtgccttcaat

SEQ ID NO: 115646 - DNA, 33 bp, Homo sapien
aaaacacaataaaccatgactcgtgccttcaat

SEQ ID NO: 115647 - DNA, 33 bp, Homo sapien
ccctgcttggacgctacaccaaagtacacacag

SEQ ID NO: 115648 - DNA, 33 bp, Homo sapien
ccctgcttggacgctataccaaagtacacacag

SEQ ID NO: 115649 - DNA, 33 bp, Homo sapien
gtcatgttatatggcacagctgacctgaggaga

SEQ ID NO: 115650 - DNA, 33 bp, Homo sapien
gtcatgttatatggcatagctgacctgaggaga

SEQ ID NO: 115651 - DNA, 33 bp, Homo sapien
actctagggaatggcaagatcacaagatggaag

SEQ ID NO: 115652 - DNA, 33 bp, Homo sapien
actctagggaatggcaggatcacaagatggaag

SEQ ID NO: 115653 - DNA, 33 bp, Homo sapien
tatgtcagttatattacggggggtgatttatgt

SEQ ID NO: 115654 - DNA, 33 bp, Homo sapien
tatgtcagttatattatggggggtgatttatgt

SEQ ID NO: 115655 - DNA, 33 bp, Homo sapien
agcaagacaacgacttcaagtattaaccagtgc

SEQ ID NO: 115656 - DNA, 33 bp, Homo sapien
agcaagacaacgacttgaagtattaaccagtgc

SEQ ID NO: 115657 - DNA, 33 bp, Homo sapien
atgtggtctggcataaagaaaatagtcaaaaat

SEQ ID NO: 115658 - DNA, 33 bp, Homo sapien
atgtggtctggcataaggaaaatagtcaaaaat

SEQ ID NO: 115659 - DNA, 33 bp, Homo sapien
cagtacttgctcagaaagaaagacaagacttgg

SEQ ID NO: 115660 - DNA, 33 bp, Homo sapien
cagtacttgctcagaacgaaagacaagacttgg

SEQ ID NO: 115661 - DNA, 33 bp, Homo sapien
gtatgtaagtgatgaaatagccagtggctttgt

SEQ ID NO: 115662 - DNA, 33 bp, Homo sapien
gtatgtaagtgatgaagtagccagtggctttgt

SEQ ID NO: 115663 - DNA, 33 bp, Homo sapien
atttttaaatgagtcacggattccatagctggt

SEQ ID NO: 115664 - DNA, 33 bp, Homo sapien
atttttaaatgagtcatggattccatagctggt

SEQ ID NO: 115665 - DNA, 33 bp, Homo sapien
gtagtctggtgtcaagcataggcttctgaatct

SEQ ID NO: 115666 - DNA, 33 bp, Homo sapien
gtagtctggtgtcaagtataggcttctgaatct

SEQ ID NO: 115667 - DNA, 33 bp, Homo sapien
tttttcttacttccaagagtcttttccagtaaa

SEQ ID NO: 115668 - DNA, 33 bp, Homo sapien
tttttcttacttccaatagtcttttccagtaaa

SEQ ID NO: 115669 - DNA, 33 bp, Homo sapien
gctatctaatgttgtcacttacatcaccatttc

SEQ ID NO: 115670 - DNA, 33 bp, Homo sapien
gctatctaatgttgtcgcttacatcaccatttc

SEQ ID NO: 115671 - DNA, 33 bp, Homo sapien
aagagcacataccaagaaagaatctgctacgtg

SEQ ID NO: 115672 - DNA, 33 bp, Homo sapien
aagagcacataccaaggaagaatctgctacgtg

SEQ ID NO: 115673 - DNA, 33 bp, Homo sapien
tcattcattatccagcccatataactctttctg

SEQ ID NO: 115674 - DNA, 33 bp, Homo sapien
tcattcattatccagctcatataactctttctg

SEQ ID NO: 115675 - DNA, 33 bp, Homo sapien
attaatcatcctgaacaacaaaatgtcattttt

SEQ ID NO: 115676 - DNA, 33 bp, Homo sapien
attaatcatcctgaaccacaaaatgtcattttt

SEQ ID NO: 115677 - DNA, 33 bp, Homo sapien
gggcacctggctgtccaatcaacgaactctggg

SEQ ID NO: 115678 - DNA, 33 bp, Homo sapien
gggcacctggctgtcccatcaacgaactctggg

SEQ ID NO: 115679 - DNA, 33 bp, Homo sapien
tgacctcctgatattcacatgactttctcactt

SEQ ID NO: 115680 - DNA, 33 bp, Homo sapien
tgacctcctgatattcgcatgactttctcactt

SEQ ID NO: 115681 - DNA, 33 bp, Homo sapien
aggtccatgagaaaacaaactatgccttgttta

SEQ ID NO: 115682 - DNA, 33 bp, Homo sapien
aggtccatgagaaaacgaactatgccttgttta

SEQ ID NO: 115683 - DNA, 33 bp, Homo sapien
aatccaagctatctggcactagagtctgtgctt

SEQ ID NO: 115684 - DNA, 33 bp, Homo sapien
aatccaagctatctggtactagagtctgtgctt

SEQ ID NO: 115685 - DNA, 33 bp, Homo sapien
aaactcacggaaacaacgtcttgctgacacatg

SEQ ID NO: 115686 - DNA, 33 bp, Homo sapien
aaactcacggaaacaatgtcttgctgacacatg

SEQ ID NO: 115687 - DNA, 33 bp, Homo sapien
aacttgggtttaaagaagataagtgagttgccc

SEQ ID NO: 115688 - DNA, 33 bp, Homo sapien
aacttgggtttaaagacgataagtgagttgccc

SEQ ID NO: 115689 - DNA, 33 bp, Homo sapien
gtgtgcaccgagtaaaataaccacctgaagcat

SEQ ID NO: 115690 - DNA, 33 bp, Homo sapien
gtgtgcaccgagtaaagtaaccacctgaagcat

SEQ ID NO: 115691 - DNA, 33 bp, Homo sapien
ctgtgtgccattctaaatctgagagtcctttca

SEQ ID NO: 115692 - DNA, 33 bp, Homo sapien
ctgtgtgccattctaagtctgagagtcctttca

SEQ ID NO: 115693 - DNA, 33 bp, Homo sapien
ggacaacctcaggaaactggagagtcaaacatg

SEQ ID NO: 115694 - DNA, 33 bp, Homo sapien
ggacaacctcaggaaattggagagtcaaacatg

SEQ ID NO: 115695 - DNA, 33 bp, Homo sapien
tctgtaaaattctgaagagtatgttagagacgg

SEQ ID NO: 115696 - DNA, 33 bp, Homo sapien
tctgtaaaattctgaatagtatgttagagacgg

SEQ ID NO: 115697 - DNA, 33 bp, Homo sapien
gtgtgtgtgtttcaataagaatcaaaaggagaa

SEQ ID NO: 115698 - DNA, 33 bp, Homo sapien
gtgtgtgtgtttcaatgagaatcaaaaggagaa

SEQ ID NO: 115699 - DNA, 33 bp, Homo sapien
agaagagtttttccagacaggaggaagagctgg

SEQ ID NO: 115700 - DNA, 33 bp, Homo sapien
agaagagtttttccagtcaggaggaagagctgg

SEQ ID NO: 115701 - DNA, 33 bp, Homo sapien
ctaggtattttgttagcagaaacaggctaagac

SEQ ID NO: 115702 - DNA, 33 bp, Homo sapien
ctaggtattttgttagtagaaacaggctaagac

SEQ ID NO: 115703 - DNA, 33 bp, Homo sapien
tgatctcacagattgaaaaggaacctgagaccc

SEQ ID NO: 115704 - DNA, 33 bp, Homo sapien
tgatctcacagattgacaaggaacctgagaccc

SEQ ID NO: 115705 - DNA, 33 bp, Homo sapien
atactgtacactttcacccttgaaaaagcatgc

SEQ ID NO: 115706 - DNA, 33 bp, Homo sapien
atactgtacactttcatccttgaaaaagcatgc

SEQ ID NO: 115707 - DNA, 33 bp, Homo sapien
tacaggtaagtgagtacaataattagggttcat

SEQ ID NO: 115708 - DNA, 33 bp, Homo sapien
tacaggtaagtgagtataataattagggttcat

SEQ ID NO: 115709 - DNA, 33 bp, Homo sapien
cttcaagtatcaaaaaaaaccatcaccagctta

SEQ ID NO: 115710 - DNA, 33 bp, Homo sapien
cttcaagtatcaaaaagaaccatcaccagctta

SEQ ID NO: 115711 - DNA, 33 bp, Homo sapien
caatcctatagagcaccaggtggagaaaacact

SEQ ID NO: 115712 - DNA, 33 bp, Homo sapien
caatcctatagagcactaggtggagaaaacact

SEQ ID NO: 115713 - DNA, 33 bp, Homo sapien
ggggcttcaccatagcaaacaggctggtctcga

SEQ ID NO: 115714 - DNA, 33 bp, Homo sapien
ggggcttcaccatagcgaacaggctggtctcga

SEQ ID NO: 115715 - DNA, 33 bp, Homo sapien
atactttccctcctcacacgcaaatatttcttg

SEQ ID NO: 115716 - DNA, 33 bp, Homo sapien
atactttccctcctcatacgcaaatatttcttg

SEQ ID NO: 115717 - DNA, 33 bp, Homo sapien
atttctgttatataaacgcctaatttgagtcag

SEQ ID NO: 115718 - DNA, 33 bp, Homo sapien
atttctgttatataaatgcctaatttgagtcag

SEQ ID NO: 115719 - DNA, 33 bp, Homo sapien
acaagcaagagagtccacagcagataataatag

SEQ ID NO: 115720 - DNA, 33 bp, Homo sapien
acaagcaagagagtccgcagcagataataatag

SEQ ID NO: 115721 - DNA, 33 bp, Homo sapien
tcattggaaccatggacgaagtttcatatcaac

SEQ ID NO: 115722 - DNA, 33 bp, Homo sapien
tcattggaaccatggatgaagtttcatatcaac

SEQ ID NO: 115723 - DNA, 33 bp, Homo sapien
acaacaacctatagcaatgaaacggtttcagaa

SEQ ID NO: 115724 - DNA, 33 bp, Homo sapien
acaacaacctatagcattgaaacggtttcagaa

SEQ ID NO: 115725 - DNA, 33 bp, Homo sapien
tatgaaaaaaatggaaaaatagcttgattaaac

SEQ ID NO: 115726 - DNA, 33 bp, Homo sapien
tatgaaaaaaatggaacaatagcttgattaaac

SEQ ID NO: 115727 - DNA, 33 bp, Homo sapien
cacttggctatacctacctgccagggaaactga

SEQ ID NO: 115728 - DNA, 33 bp, Homo sapien
cacttggctatacctagctgccagggaaactga

SEQ ID NO: 115729 - DNA, 33 bp, Homo sapien
aacacacattgtcttaaagttttcaagaattta

SEQ ID NO: 115730 - DNA, 33 bp, Homo sapien
aacacacattgtcttagagttttcaagaattta

SEQ ID NO: 115731 - DNA, 33 bp, Homo sapien
cacagaagttagaatcacctaagagtcgaaagc

SEQ ID NO: 115732 - DNA, 33 bp, Homo sapien
cacagaagttagaatcgcctaagagtcgaaagc

SEQ ID NO: 115733 - DNA, 33 bp, Homo sapien
tcatggtctctggcaccgctgacaaagatttat

SEQ ID NO: 115734 - DNA, 33 bp, Homo sapien
tcatggtctctggcactgctgacaaagatttat

SEQ ID NO: 115735 - DNA, 33 bp, Homo sapien
atagaacagtttaggaaacaaaggaatgatgtg

SEQ ID NO: 115736 - DNA, 33 bp, Homo sapien
atagaacagtttaggagacaaaggaatgatgtg

SEQ ID NO: 115737 - DNA, 33 bp, Homo sapien
aagacaacctgtgggacgtagattgaatgaggc

SEQ ID NO: 115738 - DNA, 33 bp, Homo sapien
aagacaacctgtgggatgtagattgaatgaggc

SEQ ID NO: 115739 - DNA, 33 bp, Homo sapien
gaatagacccttttcaatctgaaggtaattttg

SEQ ID NO: 115740 - DNA, 33 bp, Homo sapien
gaatagacccttttcagtctgaaggtaattttg

SEQ ID NO: 115741 - DNA, 33 bp, Homo sapien
cagaaagagccaatagaatcacagttttacact

SEQ ID NO: 115742 - DNA, 33 bp, Homo sapien
cagaaagagccaataggatcacagttttacact

SEQ ID NO: 115743 - DNA, 33 bp, Homo sapien
agaactgactgaagaagtagtgaaatggaagaa

SEQ ID NO: 115744 - DNA, 33 bp, Homo sapien
agaactgactgaagaattagtgaaatggaagaa

SEQ ID NO: 115745 - DNA, 33 bp, Homo sapien
agtatcctctaactccactgggaattagtgttt

SEQ ID NO: 115746 - DNA, 33 bp, Homo sapien
agtatcctctaactcctctgggaattagtgttt

SEQ ID NO: 115747 - DNA, 33 bp, Homo sapien
tgatgggccaaccgtaagattacatatttattc

SEQ ID NO: 115748 - DNA, 33 bp, Homo sapien
tgatgggccaaccgtatgattacatatttattc

SEQ ID NO: 115749 - DNA, 33 bp, Homo sapien
catggaactatggaaacaaacacacaagccagc

SEQ ID NO: 115750 - DNA, 33 bp, Homo sapien
catggaactatggaaagaaacacacaagccagc

SEQ ID NO: 115751 - DNA, 33 bp, Homo sapien
cttccccattagattccagataaagactggcca

SEQ ID NO: 115752 - DNA, 33 bp, Homo sapien
cttccccattagattctagataaagactggcca

SEQ ID NO: 115753 - DNA, 33 bp, Homo sapien
acctgattcttcgaagcaggaactaggcaagta

SEQ ID NO: 115754 - DNA, 33 bp, Homo sapien
acctgattcttcgaagtaggaactaggcaagta

SEQ ID NO: 115755 - DNA, 33 bp, Homo sapien
aggcacagaacttaccaagctacacatcttctg

SEQ ID NO: 115756 - DNA, 33 bp, Homo sapien
aggcacagaacttaccgagctacacatcttctg

SEQ ID NO: 115757 - DNA, 33 bp, Homo sapien
aagataaggactttaaaatatttgtcttctatt

SEQ ID NO: 115758 - DNA, 33 bp, Homo sapien
aagataaggactttaacatatttgtcttctatt

SEQ ID NO: 115759 - DNA, 33 bp, Homo sapien
ttcctagtgtctgtaacagtctttgccatatga

SEQ ID NO: 115760 - DNA, 33 bp, Homo sapien
ttcctagtgtctgtaatagtctttgccatatga

SEQ ID NO: 115761 - DNA, 33 bp, Homo sapien
atggccagttgatctcaaaccaaaatgtcaagg

SEQ ID NO: 115762 - DNA, 33 bp, Homo sapien
atggccagttgatctccaaccaaaatgtcaagg

SEQ ID NO: 115763 - DNA, 33 bp, Homo sapien
atacagtcagtaaaaacgtatctccacaacata

SEQ ID NO: 115764 - DNA, 33 bp, Homo sapien
atacagtcagtaaaaatgtatctccacaacata

SEQ ID NO: 115765 - DNA, 33 bp, Homo sapien
gtaataaataatatccacatcctgtacctcctg

SEQ ID NO: 115766 - DNA, 33 bp, Homo sapien
gtaataaataatatcctcatcctgtacctcctg

SEQ ID NO: 115767 - DNA, 33 bp, Homo sapien
ttgaagcagtcattagaaagtatgtacagatga

SEQ ID NO: 115768 - DNA, 33 bp, Homo sapien
ttgaagcagtcattaggaagtatgtacagatga

SEQ ID NO: 115769 - DNA, 33 bp, Homo sapien
aaaaatataaatggtcaataacgatctaaaact

SEQ ID NO: 115770 - DNA, 33 bp, Homo sapien
aaaaatataaatggtcgataacgatctaaaact

SEQ ID NO: 115771 - DNA, 33 bp, Homo sapien
cacttaccaagtgtaccatagagcaagtttctt

SEQ ID NO: 115772 - DNA, 33 bp, Homo sapien
cacttaccaagtgtactatagagcaagtttctt

SEQ ID NO: 115773 - DNA, 33 bp, Homo sapien
tatcgggaatttataaactagtcatcaaaccaa

SEQ ID NO: 115774 - DNA, 33 bp, Homo sapien
tatcgggaatttataacctagtcatcaaaccaa

SEQ ID NO: 115775 - DNA, 33 bp, Homo sapien
taatggttaagtaaaaaaccctattctcaagcc

SEQ ID NO: 115776 - DNA, 33 bp, Homo sapien
taatggttaagtaaaagaccctattctcaagcc

SEQ ID NO: 115777 - DNA, 33 bp, Homo sapien
gaaataaatgtcggaaaagtcccatctagatgt

SEQ ID NO: 115778 - DNA, 33 bp, Homo sapien
gaaataaatgtcggaacagtcccatctagatgt

SEQ ID NO: 115779 - DNA, 33 bp, Homo sapien
tagcatacttttcaaacacaaagccactcacgg

SEQ ID NO: 115780 - DNA, 33 bp, Homo sapien
tagcatacttttcaaatacaaagccactcacgg

SEQ ID NO: 115781 - DNA, 33 bp, Homo sapien
tctgtgtgtgtgaaaaaagaagtgttagatcta

SEQ ID NO: 115782 - DNA, 33 bp, Homo sapien
tctgtgtgtgtgaaaagagaagtgttagatcta

SEQ ID NO: 115783 - DNA, 33 bp, Homo sapien
acacgtaccattcataaactcggtttggttgtg

SEQ ID NO: 115784 - DNA, 33 bp, Homo sapien
acacgtaccattcatacactcggtttggttgtg

SEQ ID NO: 115785 - DNA, 33 bp, Homo sapien
ttctggtggagtgtaccgggaagatcatacttt

SEQ ID NO: 115786 - DNA, 33 bp, Homo sapien
ttctggtggagtgtactgggaagatcatacttt

SEQ ID NO: 115787 - DNA, 33 bp, Homo sapien
tagtgaaaaaacttaaatgctactctcttagca

SEQ ID NO: 115788 - DNA, 33 bp, Homo sapien
tagtgaaaaaacttaagtgctactctcttagca

SEQ ID NO: 115789 - DNA, 33 bp, Homo sapien
atgcttaaaaatgtaacaggctagattttatgt

SEQ ID NO: 115790 - DNA, 33 bp, Homo sapien
atgcttaaaaatgtaagaggctagattttatgt

SEQ ID NO: 115791 - DNA, 33 bp, Homo sapien
agtgtgatgctgaagacagcttgtaatatggaa

SEQ ID NO: 115792 - DNA, 33 bp, Homo sapien
agtgtgatgctgaagatagcttgtaatatggaa

SEQ ID NO: 115793 - DNA, 33 bp, Homo sapien
actataaattaaagtaaactgcaagtagagaaa

SEQ ID NO: 115794 - DNA, 33 bp, Homo sapien
actataaattaaagtacactgcaagtagagaaa

SEQ ID NO: 115795 - DNA, 33 bp, Homo sapien
ttaaattgagtggaaaaccagttaatcctaaag

SEQ ID NO: 115796 - DNA, 33 bp, Homo sapien
ttaaattgagtggaaacccagttaatcctaaag

SEQ ID NO: 115797 - DNA, 33 bp, Homo sapien
cctgcagtgccagtgaaactcttcatgaaaacc

SEQ ID NO: 115798 - DNA, 33 bp, Homo sapien
cctgcagtgccagtgagactcttcatgaaaacc

SEQ ID NO: 115799 - DNA, 33 bp, Homo sapien
ttggaaccacatgtaggagcattgactctagat

SEQ ID NO: 115800 - DNA, 33 bp, Homo sapien
ttggaaccacatgtagtagcattgactctagat

SEQ ID NO: 115801 - DNA, 33 bp, Homo sapien
taaaaaacatagagaaatgtagttgtataactg

SEQ ID NO: 115802 - DNA, 33 bp, Homo sapien
taaaaaacatagagaagtgtagttgtataactg

SEQ ID NO: 115803 - DNA, 33 bp, Homo sapien
agacgcataattgtcagattctccaaggatgaa

SEQ ID NO: 115804 - DNA, 33 bp, Homo sapien
agacgcataattgtcatattctccaaggatgaa

SEQ ID NO: 115805 - DNA, 33 bp, Homo sapien
ttgctcaccctccagacgtccatgtacctcagc

SEQ ID NO: 115806 - DNA, 33 bp, Homo sapien
ttgctcaccctccagatgtccatgtacctcagc

SEQ ID NO: 115807 - DNA, 33 bp, Homo sapien
attgacatggcagaagaatcacgcctttgacat

SEQ ID NO: 115808 - DNA, 33 bp, Homo sapien
attgacatggcagaaggatcacgcctttgacat

SEQ ID NO: 115809 - DNA, 33 bp, Homo sapien
aaggtgcaatttgaaccaatttgatgacattta

SEQ ID NO: 115810 - DNA, 33 bp, Homo sapien
aaggtgcaatttgaactaatttgatgacattta

SEQ ID NO: 115811 - DNA, 33 bp, Homo sapien
gttgaatatcaaaacaagctcttaacaaaaggt

SEQ ID NO: 115812 - DNA, 33 bp, Homo sapien
gttgaatatcaaaacaggctcttaacaaaaggt

SEQ ID NO: 115813 - DNA, 33 bp, Homo sapien
tttctaacattctttccctcatcgttcttcccc

SEQ ID NO: 115814 - DNA, 33 bp, Homo sapien
tttctaacattctttctctcatcgttcttcccc

SEQ ID NO: 115815 - DNA, 33 bp, Homo sapien
aacttggaactacagactattgaggtgtgtgtc

SEQ ID NO: 115816 - DNA, 33 bp, Homo sapien
aacttggaactacagagtattgaggtgtgtgtc

SEQ ID NO: 115817 - DNA, 33 bp, Homo sapien
agtagtatgacatataataggactgtgaaacat

SEQ ID NO: 115818 - DNA, 33 bp, Homo sapien
agtagtatgacatatagtaggactgtgaaacat

SEQ ID NO: 115819 - DNA, 33 bp, Homo sapien
aattagaagtggttatcaagggtttgtcagcaa

SEQ ID NO: 115820 - DNA, 33 bp, Homo sapien
aattagaagtggttattaagggtttgtcagcaa

SEQ ID NO: 115821 - DNA, 33 bp, Homo sapien
aaatgaagtttcattacgagtgatagactatct

SEQ ID NO: 115822 - DNA, 33 bp, Homo sapien
aaatgaagtttcattatgagtgatagactatct

SEQ ID NO: 115823 - DNA, 33 bp, Homo sapien
gagagataagactcaccggaatggaatttatac

SEQ ID NO: 115824 - DNA, 33 bp, Homo sapien
gagagataagactcactggaatggaatttatac

SEQ ID NO: 115825 - DNA, 33 bp, Homo sapien
tatccttccgagcataataaaagcacaaaaaag

SEQ ID NO: 115826 - DNA, 33 bp, Homo sapien
tatccttccgagcatagtaaaagcacaaaaaag

SEQ ID NO: 115827 - DNA, 33 bp, Homo sapien
gctgcagctgaatgatcaatacagttagactat

SEQ ID NO: 115828 - DNA, 33 bp, Homo sapien
gctgcagctgaatgatgaatacagttagactat

SEQ ID NO: 115829 - DNA, 33 bp, Homo sapien
taggatcaacctgtaaattaatacaaatatgcc

SEQ ID NO: 115830 - DNA, 33 bp, Homo sapien
taggatcaacctgtaagttaatacaaatatgcc

SEQ ID NO: 115831 - DNA, 33 bp, Homo sapien
gagtcaagatacaggcagaagaagcggagtcat

SEQ ID NO: 115832 - DNA, 33 bp, Homo sapien
gagtcaagatacaggcggaagaagcggagtcat

SEQ ID NO: 115833 - DNA, 33 bp, Homo sapien
attcacaatagacaaaatggaatcaaactaagt

SEQ ID NO: 115834 - DNA, 33 bp, Homo sapien
attcacaatagacaaactggaatcaaactaagt

SEQ ID NO: 115835 - DNA, 33 bp, Homo sapien
gcattgtttgttagaacccttatacttcaccct

SEQ ID NO: 115836 - DNA, 33 bp, Homo sapien
gcattgtttgttagaatccttatacttcaccct

SEQ ID NO: 115837 - DNA, 33 bp, Homo sapien
tgataggagcattggacctggtatatgaaatat

SEQ ID NO: 115838 - DNA, 33 bp, Homo sapien
tgataggagcattggagctggtatatgaaatat

SEQ ID NO: 115839 - DNA, 33 bp, Homo sapien
ggcaaagacttcgtgactaagagcccaaaagca

SEQ ID NO: 115840 - DNA, 33 bp, Homo sapien
ggcaaagacttcgtgattaagagcccaaaagca

SEQ ID NO: 115841 - DNA, 33 bp, Homo sapien
atcttatttcatttccaattgatcttatttagc

SEQ ID NO: 115842 - DNA, 33 bp, Homo sapien
atcttatttcatttccgattgatcttatttagc

SEQ ID NO: 115843 - DNA, 33 bp, Homo sapien
agaatccatactttcacctgttaactatccaaa

SEQ ID NO: 115844 - DNA, 33 bp, Homo sapien
agaatccatactttcatctgttaactatccaaa

SEQ ID NO: 115845 - DNA, 33 bp, Homo sapien
atactctcactaccaaccaatgataagattctt

SEQ ID NO: 115846 - DNA, 33 bp, Homo sapien
atactctcactaccaagcaatgataagattctt

SEQ ID NO: 115847 - DNA, 33 bp, Homo sapien
tttctgtgccttgaggccaaattttcagagact

SEQ ID NO: 115848 - DNA, 33 bp, Homo sapien
tttctgtgccttgaggtcaaattttcagagact

SEQ ID NO: 115849 - DNA, 33 bp, Homo sapien
ttcttgaaaaaccatgaaaagtgcggccctagg

SEQ ID NO: 115850 - DNA, 33 bp, Homo sapien
ttcttgaaaaaccatgcaaagtgcggccctagg

SEQ ID NO: 115851 - DNA, 33 bp, Homo sapien
taaggtcacctaatgacggaaagaaattaagac

SEQ ID NO: 115852 - DNA, 33 bp, Homo sapien
taaggtcacctaatgatggaaagaaattaagac

SEQ ID NO: 115853 - DNA, 33 bp, Homo sapien
tgaacatcctggaaaccgtggactggaggagaa

SEQ ID NO: 115854 - DNA, 33 bp, Homo sapien
tgaacatcctggaaactgtggactggaggagaa

SEQ ID NO: 115855 - DNA, 33 bp, Homo sapien
gaacacacatatttgtcaaaagtagatggtacc

SEQ ID NO: 115856 - DNA, 33 bp, Homo sapien
gaacacacatatttgttaaaagtagatggtacc

SEQ ID NO: 115857 - DNA, 33 bp, Homo sapien
actccaaaacaaaaaaggaagagaatcagctca

SEQ ID NO: 115858 - DNA, 33 bp, Homo sapien
actccaaaacaaaaaatgaagagaatcagctca

SEQ ID NO: 115859 - DNA, 33 bp, Homo sapien
ataagtgttgactgacagccaaaggagcatttc

SEQ ID NO: 115860 - DNA, 33 bp, Homo sapien
ataagtgttgactgacggccaaaggagcatttc

SEQ ID NO: 115861 - DNA, 33 bp, Homo sapien
gttaatcccctctgatcaggctgctatctgtgc

SEQ ID NO: 115862 - DNA, 33 bp, Homo sapien
gttaatcccctctgattaggctgctatctgtgc

SEQ ID NO: 115863 - DNA, 33 bp, Homo sapien
gaatcatggaaaagaactgagccaaaaagtcct

SEQ ID NO: 115864 - DNA, 33 bp, Homo sapien
gaatcatggaaaagaagtgagccaaaaagtcct

SEQ ID NO: 115865 - DNA, 33 bp, Homo sapien
actggtggctggtatcagagtttccccaggtta

SEQ ID NO: 115866 - DNA, 33 bp, Homo sapien
actggtggctggtatcggagtttccccaggtta

SEQ ID NO: 115867 - DNA, 33 bp, Homo sapien
atcattcctgatgggaacaacacatttaagcag

SEQ ID NO: 115868 - DNA, 33 bp, Homo sapien
atcattcctgatgggagcaacacatttaagcag

SEQ ID NO: 115869 - DNA, 33 bp, Homo sapien
acacacacacaaaatcacctatattgcaagcaa

SEQ ID NO: 115870 - DNA, 33 bp, Homo sapien
acacacacacaaaatcgcctatattgcaagcaa

SEQ ID NO: 115871 - DNA, 33 bp, Homo sapien
tatttaaaggcactcaaaatttaaacataagtg

SEQ ID NO: 115872 - DNA, 33 bp, Homo sapien
tatttaaaggcactcagaatttaaacataagtg

SEQ ID NO: 115873 - DNA, 33 bp, Homo sapien
ttcacgctgattattcatcctacgttgtatacc

SEQ ID NO: 115874 - DNA, 33 bp, Homo sapien
ttcacgctgattattcttcctacgttgtatacc

SEQ ID NO: 115875 - DNA, 33 bp, Homo sapien
gttgtcgttaatctaccagagtgatgagaagta

SEQ ID NO: 115876 - DNA, 33 bp, Homo sapien
gttgtcgttaatctactagagtgatgagaagta

SEQ ID NO: 115877 - DNA, 33 bp, Homo sapien
ggtggacaagtatgataaaaatttctgggtata

SEQ ID NO: 115878 - DNA, 33 bp, Homo sapien
ggtggacaagtatgatcaaaatttctgggtata

SEQ ID NO: 115879 - DNA, 33 bp, Homo sapien
agaattgtctggtccactaaattagcctggtgc

SEQ ID NO: 115880 - DNA, 33 bp, Homo sapien
agaattgtctggtccattaaattagcctggtgc

SEQ ID NO: 115881 - DNA, 33 bp, Homo sapien
catgcttttactacaaaagagattgaggaagca

SEQ ID NO: 115882 - DNA, 33 bp, Homo sapien
catgcttttactacaagagagattgaggaagca

SEQ ID NO: 115883 - DNA, 33 bp, Homo sapien
ttagaagaagactagaacagtgtgctcaggatg

SEQ ID NO: 115884 - DNA, 33 bp, Homo sapien
ttagaagaagactagaccagtgtgctcaggatg

SEQ ID NO: 115885 - DNA, 33 bp, Homo sapien
gaactaaattacacccaagataatgacataaat

SEQ ID NO: 115886 - DNA, 33 bp, Homo sapien
gaactaaattacaccccagataatgacataaat

SEQ ID NO: 115887 - DNA, 33 bp, Homo sapien
atccattgactgattacacgtatacacaatgga

SEQ ID NO: 115888 - DNA, 33 bp, Homo sapien
atccattgactgattatacgtatacacaatgga

SEQ ID NO: 115889 - DNA, 33 bp, Homo sapien
ccccagcactagctacacctggctcattctctc

SEQ ID NO: 115890 - DNA, 33 bp, Homo sapien
ccccagcactagctactcctggctcattctctc

SEQ ID NO: 115891 - DNA, 33 bp, Homo sapien
aagtcaggtaacattacgtcagaaagttaaatc

SEQ ID NO: 115892 - DNA, 33 bp, Homo sapien
aagtcaggtaacattatgtcagaaagttaaatc

SEQ ID NO: 115893 - DNA, 33 bp, Homo sapien
ttacctgcctggatcagcataatttcaagctgg

SEQ ID NO: 115894 - DNA, 33 bp, Homo sapien
ttacctgcctggatcatcataatttcaagctgg

SEQ ID NO: 115895 - DNA, 33 bp, Homo sapien
gatgaatccaggaaaacatactaaggcatattc

SEQ ID NO: 115896 - DNA, 33 bp, Homo sapien
gatgaatccaggaaaatatactaaggcatattc

SEQ ID NO: 115897 - DNA, 33 bp, Homo sapien
tttcattgtctagctaaaagaggatttgaggtg

SEQ ID NO: 115898 - DNA, 33 bp, Homo sapien
tttcattgtctagctagaagaggatttgaggtg

SEQ ID NO: 115899 - DNA, 33 bp, Homo sapien
caaattatcatgtaaagctagtcatctgtatta

SEQ ID NO: 115900 - DNA, 33 bp, Homo sapien
caaattatcatgtaaatctagtcatctgtatta

SEQ ID NO: 115901 - DNA, 33 bp, Homo sapien
ttcagaattttctaacaaaatctctgaaactct

SEQ ID NO: 115902 - DNA, 33 bp, Homo sapien
ttcagaattttctaacgaaatctctgaaactct

SEQ ID NO: 115903 - DNA, 33 bp, Homo sapien
aattaactagtataaaaaatgctcttcttacaa

SEQ ID NO: 115904 - DNA, 33 bp, Homo sapien
aattaactagtataaacaatgctcttcttacaa

SEQ ID NO: 115905 - DNA, 33 bp, Homo sapien
aaatgatccatagaaccaaataatataggtgaa

SEQ ID NO: 115906 - DNA, 33 bp, Homo sapien
aaatgatccatagaactaaataatataggtgaa

SEQ ID NO: 115907 - DNA, 33 bp, Homo sapien
aagcctaccttctgagaaaataactgccttctg

SEQ ID NO: 115908 - DNA, 33 bp, Homo sapien
aagcctaccttctgagcaaataactgccttctg

SEQ ID NO: 115909 - DNA, 33 bp, Homo sapien
ttgagaaaatagcgtacagttcccatgtagcct

SEQ ID NO: 115910 - DNA, 33 bp, Homo sapien
ttgagaaaatagcgtagagttcccatgtagcct

SEQ ID NO: 115911 - DNA, 33 bp, Homo sapien
gaagttaaattgtgaaagataccccatgattat

SEQ ID NO: 115912 - DNA, 33 bp, Homo sapien
gaagttaaattgtgaatgataccccatgattat

SEQ ID NO: 115913 - DNA, 33 bp, Homo sapien
gtcagggacagttaagactccacaactttgctt

SEQ ID NO: 115914 - DNA, 33 bp, Homo sapien
gtcagggacagttaagcctccacaactttgctt

SEQ ID NO: 115915 - DNA, 33 bp, Homo sapien
ctggaaaatggaccaacgtgcaggatagctgta

SEQ ID NO: 115916 - DNA, 33 bp, Homo sapien
ctggaaaatggaccaatgtgcaggatagctgta

SEQ ID NO: 115917 - DNA, 33 bp, Homo sapien
agaatcaaatacacacagtaaaaaatgataaag

SEQ ID NO: 115918 - DNA, 33 bp, Homo sapien
agaatcaaatacacacggtaaaaaatgataaag

SEQ ID NO: 115919 - DNA, 33 bp, Homo sapien
ttcagtagacttctaaaagtgaggtgtaaaatg

SEQ ID NO: 115920 - DNA, 33 bp, Homo sapien
ttcagtagacttctaagagtgaggtgtaaaatg

SEQ ID NO: 115921 - DNA, 33 bp, Homo sapien
cattagaagtaaccaacgaacataattatatta

SEQ ID NO: 115922 - DNA, 33 bp, Homo sapien
cattagaagtaaccaatgaacataattatatta

SEQ ID NO: 115923 - DNA, 33 bp, Homo sapien
atagtccaaaccaagcaaagtccttatttaaca

SEQ ID NO: 115924 - DNA, 33 bp, Homo sapien
atagtccaaaccaagcgaagtccttatttaaca

SEQ ID NO: 115925 - DNA, 33 bp, Homo sapien
caagaaaggtgattgagggactggcaacaagtt

SEQ ID NO: 115926 - DNA, 33 bp, Homo sapien
caagaaaggtgattgatggactggcaacaagtt

SEQ ID NO: 115927 - DNA, 33 bp, Homo sapien
agaaattgtttaagacatactagagctttgtac

SEQ ID NO: 115928 - DNA, 33 bp, Homo sapien
agaaattgtttaagacgtactagagctttgtac

SEQ ID NO: 115929 - DNA, 33 bp, Homo sapien
cactaaggcttctttaagggaaagtcctttagc

SEQ ID NO: 115930 - DNA, 33 bp, Homo sapien
cactaaggcttctttaggggaaagtcctttagc

SEQ ID NO: 115931 - DNA, 33 bp, Homo sapien
tcaaagaggtttcagaataggagttatttgcaa

SEQ ID NO: 115932 - DNA, 33 bp, Homo sapien
tcaaagaggtttcagagtaggagttatttgcaa

SEQ ID NO: 115933 - DNA, 33 bp, Homo sapien
gtggaaattggaatagcagaatcaggaaaatgt

SEQ ID NO: 115934 - DNA, 33 bp, Homo sapien
gtggaaattggaatagtagaatcaggaaaatgt

SEQ ID NO: 115935 - DNA, 33 bp, Homo sapien
cggagattttaatcaacgctacagttaaacatg

SEQ ID NO: 115936 - DNA, 33 bp, Homo sapien
cggagattttaatcaaggctacagttaaacatg

SEQ ID NO: 115937 - DNA, 33 bp, Homo sapien
tcttggagtattttgagcaattcctgacatcat

SEQ ID NO: 115938 - DNA, 33 bp, Homo sapien
tcttggagtattttgatcaattcctgacatcat

SEQ ID NO: 115939 - DNA, 33 bp, Homo sapien
agaatgaacgcaggagaaactatggaacactta

SEQ ID NO: 115940 - DNA, 33 bp, Homo sapien
agaatgaacgcaggaggaactatggaacactta

SEQ ID NO: 115941 - DNA, 33 bp, Homo sapien
aagtgctatttaaaggacagctttggtttgcag

SEQ ID NO: 115942 - DNA, 33 bp, Homo sapien
aagtgctatttaaagggcagctttggtttgcag

SEQ ID NO: 115943 - DNA, 33 bp, Homo sapien
tggcgattacaattcagattacagttcgagatg

SEQ ID NO: 115944 - DNA, 33 bp, Homo sapien
tggcgattacaattcatattacagttcgagatg

SEQ ID NO: 115945 - DNA, 33 bp, Homo sapien
gctttgtggtccaatacagatccattttgaaaa

SEQ ID NO: 115946 - DNA, 33 bp, Homo sapien
gctttgtggtccaatatagatccattttgaaaa

SEQ ID NO: 115947 - DNA, 33 bp, Homo sapien
ctgggaatgttagatacgcatctttgtgaggag

SEQ ID NO: 115948 - DNA, 33 bp, Homo sapien
ctgggaatgttagatatgcatctttgtgaggag

SEQ ID NO: 115949 - DNA, 33 bp, Homo sapien
gcattccagaggataactgataatgttgggata

SEQ ID NO: 115950 - DNA, 33 bp, Homo sapien
gcattccagaggataattgataatgttgggata

SEQ ID NO: 115951 - DNA, 33 bp, Homo sapien
gctggtattggccatcaatatgatcatagacta

SEQ ID NO: 115952 - DNA, 33 bp, Homo sapien
gctggtattggccatctatatgatcatagacta

SEQ ID NO: 115953 - DNA, 33 bp, Homo sapien
gccactgagacctggacagcacattggtccatc

SEQ ID NO: 115954 - DNA, 33 bp, Homo sapien
gccactgagacctggatagcacattggtccatc

SEQ ID NO: 115955 - DNA, 33 bp, Homo sapien
agtttaatgctgaaaaaatgtctaaatttccaa

SEQ ID NO: 115956 - DNA, 33 bp, Homo sapien
agtttaatgctgaaaagatgtctaaatttccaa

SEQ ID NO: 115957 - DNA, 33 bp, Homo sapien
attatatgcagacttacgggctgtaaccaatgg

SEQ ID NO: 115958 - DNA, 33 bp, Homo sapien
attatatgcagacttatgggctgtaaccaatgg

SEQ ID NO: 115959 - DNA, 33 bp, Homo sapien
tctggatgacatttctaaacagactgtgggcta

SEQ ID NO: 115960 - DNA, 33 bp, Homo sapien
tctggatgacatttctgaacagactgtgggcta

SEQ ID NO: 115961 - DNA, 33 bp, Homo sapien
gataaaatgaatcataatatcaaaaatgtctcc

SEQ ID NO: 115962 - DNA, 33 bp, Homo sapien
gataaaatgaatcatagtatcaaaaatgtctcc

SEQ ID NO: 115963 - DNA, 33 bp, Homo sapien
ttaaagaaattggctaccaggataaaatgaatc

SEQ ID NO: 115964 - DNA, 33 bp, Homo sapien
ttaaagaaattggctatcaggataaaatgaatc

SEQ ID NO: 115965 - DNA, 33 bp, Homo sapien
gagcactttgtgacaacaggtagatctccatca

SEQ ID NO: 115966 - DNA, 33 bp, Homo sapien
gagcactttgtgacaataggtagatctccatca

SEQ ID NO: 115967 - DNA, 33 bp, Homo sapien
gtcataatgcgtttgaaaataggtatactagga

SEQ ID NO: 115968 - DNA, 33 bp, Homo sapien
gtcataatgcgtttgagaataggtatactagga

SEQ ID NO: 115969 - DNA, 33 bp, Homo sapien
acatatgaaaactgacagctgagtgagaattag

SEQ ID NO: 115970 - DNA, 33 bp, Homo sapien
acatatgaaaactgaccgctgagtgagaattag

SEQ ID NO: 115971 - DNA, 33 bp, Homo sapien
tcttctggacattgacagaggcaaaggttttta

SEQ ID NO: 115972 - DNA, 33 bp, Homo sapien
tcttctggacattgaccgaggcaaaggttttta

SEQ ID NO: 115973 - DNA, 33 bp, Homo sapien
tgcccttatttgagcacaagttgagttgaaatt

SEQ ID NO: 115974 - DNA, 33 bp, Homo sapien
tgcccttatttgagcataagttgagttgaaatt

SEQ ID NO: 115975 - DNA, 33 bp, Homo sapien
aatgagacatttatggcattttcttagaaaaca

SEQ ID NO: 115976 - DNA, 33 bp, Homo sapien
aatgagacatttatggtattttcttagaaaaca

SEQ ID NO: 115977 - DNA, 33 bp, Homo sapien
ttaaaaattgtttgcaaaataactcaaaccagt

SEQ ID NO: 115978 - DNA, 33 bp, Homo sapien
ttaaaaattgtttgcacaataactcaaaccagt

SEQ ID NO: 115979 - DNA, 33 bp, Homo sapien
tgttattattgtaagacatttgaagtccttggg

SEQ ID NO: 115980 - DNA, 33 bp, Homo sapien
tgttattattgtaagatatttgaagtccttggg

SEQ ID NO: 115981 - DNA, 33 bp, Homo sapien
aaggagagcttttaaagaaaaaaatgcaaaact

SEQ ID NO: 115982 - DNA, 33 bp, Homo sapien
aaggagagcttttaaataaaaaaatgcaaaact

SEQ ID NO: 115983 - DNA, 33 bp, Homo sapien
ctttggggaaagtaaaagaagacaataatctat

SEQ ID NO: 115984 - DNA, 33 bp, Homo sapien
ctttggggaaagtaaatgaagacaataatctat

SEQ ID NO: 115985 - DNA, 33 bp, Homo sapien
atcagacaaagctttcaccatcaagaagcttac

SEQ ID NO: 115986 - DNA, 33 bp, Homo sapien
atcagacaaagctttcgccatcaagaagcttac

SEQ ID NO: 115987 - DNA, 33 bp, Homo sapien
ccttgctctttgaaagacttcattgtgcctttt

SEQ ID NO: 115988 - DNA, 33 bp, Homo sapien
ccttgctctttgaaagccttcattgtgcctttt

SEQ ID NO: 115989 - DNA, 33 bp, Homo sapien
tttggggaatcaggagaaaacggagggaagaag

SEQ ID NO: 115990 - DNA, 33 bp, Homo sapien
tttggggaatcaggaggaaacggagggaagaag

SEQ ID NO: 115991 - DNA, 33 bp, Homo sapien
gtcatggggctgaataactcatgaatagaatga

SEQ ID NO: 115992 - DNA, 33 bp, Homo sapien
gtcatggggctgaatacctcatgaatagaatga

SEQ ID NO: 115993 - DNA, 33 bp, Homo sapien
gcctaggagcagtaggccatatcacatagccta

SEQ ID NO: 115994 - DNA, 33 bp, Homo sapien
gcctaggagcagtaggtcatatcacatagccta

SEQ ID NO: 115995 - DNA, 33 bp, Homo sapien
tagaaataagttaagaagacatattacaggaga

SEQ ID NO: 115996 - DNA, 33 bp, Homo sapien
tagaaataagttaagaggacatattacaggaga

SEQ ID NO: 115997 - DNA, 33 bp, Homo sapien
gagagtcacagcatagacccatacatttttgga

SEQ ID NO: 115998 - DNA, 33 bp, Homo sapien
gagagtcacagcataggcccatacatttttgga

SEQ ID NO: 115999 - DNA, 33 bp, Homo sapien
cattaaggattacattcaacgtggctaaaagtc

SEQ ID NO: 116000 - DNA, 33 bp, Homo sapien
cattaaggattacatttaacgtggctaaaagtc

SEQ ID NO: 116001 - DNA, 33 bp, Homo sapien
cttactgcaaaaaaatcagagtaaattcatatt

SEQ ID NO: 116002 - DNA, 33 bp, Homo sapien
cttactgcaaaaaaattagagtaaattcatatt

SEQ ID NO: 116003 - DNA, 33 bp, Homo sapien
taaatagagctggtgaacttctaaggaatttaa

SEQ ID NO: 116004 - DNA, 33 bp, Homo sapien
taaatagagctggtgaccttctaaggaatttaa

SEQ ID NO: 116005 - DNA, 33 bp, Homo sapien
tgttcaccattgtcagaatcacatttaatcata

SEQ ID NO: 116006 - DNA, 33 bp, Homo sapien
tgttcaccattgtcagcatcacatttaatcata

SEQ ID NO: 116007 - DNA, 33 bp, Homo sapien
ctgctgagagctgaacactttttgggaaacact

SEQ ID NO: 116008 - DNA, 33 bp, Homo sapien
ctgctgagagctgaacgctttttgggaaacact

SEQ ID NO: 116009 - DNA, 33 bp, Homo sapien
tgccttggtgttagaaccatttgaagggtctca

SEQ ID NO: 116010 - DNA, 33 bp, Homo sapien
tgccttggtgttagaagcatttgaagggtctca

SEQ ID NO: 116011 - DNA, 33 bp, Homo sapien
gtttaaggtaataatgccagagatatcacaaaa

SEQ ID NO: 116012 - DNA, 33 bp, Homo sapien
gtttaaggtaataatgtcagagatatcacaaaa

SEQ ID NO: 116013 - DNA, 33 bp, Homo sapien
ttattatttttactgactcaccctgtagtctac

SEQ ID NO: 116014 - DNA, 33 bp, Homo sapien
ttattatttttactgattcaccctgtagtctac

SEQ ID NO: 116015 - DNA, 33 bp, Homo sapien
aatactacgaattggcacatcaaaataaaattg

SEQ ID NO: 116016 - DNA, 33 bp, Homo sapien
aatactacgaattggcgcatcaaaataaaattg

SEQ ID NO: 116017 - DNA, 33 bp, Homo sapien
tactgaatttcactgacgttttttcaaaagtct

SEQ ID NO: 116018 - DNA, 33 bp, Homo sapien
tactgaatttcactgatgttttttcaaaagtct

SEQ ID NO: 116019 - DNA, 33 bp, Homo sapien
cttgagcaaagccatacgattgcaaactgaaat

SEQ ID NO: 116020 - DNA, 33 bp, Homo sapien
cttgagcaaagccatatgattgcaaactgaaat

SEQ ID NO: 116021 - DNA, 33 bp, Homo sapien
aaaaattgttgacacactactgacaaaaactac

SEQ ID NO: 116022 - DNA, 33 bp, Homo sapien
aaaaattgttgacacattactgacaaaaactac

SEQ ID NO: 116023 - DNA, 33 bp, Homo sapien
taattttgtagccttaccaataaaacttaggaa

SEQ ID NO: 116024 - DNA, 33 bp, Homo sapien
taattttgtagccttagcaataaaacttaggaa

SEQ ID NO: 116025 - DNA, 33 bp, Homo sapien
atagacaaaaattctggataggcactttgcaat

SEQ ID NO: 116026 - DNA, 33 bp, Homo sapien
atagacaaaaattctgtataggcactttgcaat

SEQ ID NO: 116027 - DNA, 33 bp, Homo sapien
attgtgctagagattccaaccagtgcaataagg

SEQ ID NO: 116028 - DNA, 33 bp, Homo sapien
attgtgctagagattctaaccagtgcaataagg

SEQ ID NO: 116029 - DNA, 33 bp, Homo sapien
ggccatggtatatcaacctcaggaagtttcaaa

SEQ ID NO: 116030 - DNA, 33 bp, Homo sapien
ggccatggtatatcaatctcaggaagtttcaaa

SEQ ID NO: 116031 - DNA, 33 bp, Homo sapien
tgtctgtgggaccaggcccaatatgcagctcac

SEQ ID NO: 116032 - DNA, 33 bp, Homo sapien
tgtctgtgggaccaggtccaatatgcagctcac

SEQ ID NO: 116033 - DNA, 33 bp, Homo sapien
ggtgaccctagagtaagcttctattctcccaat

SEQ ID NO: 116034 - DNA, 33 bp, Homo sapien
ggtgaccctagagtaatcttctattctcccaat

SEQ ID NO: 116035 - DNA, 33 bp, Homo sapien
agacagaaaagtgttacgccttcttttgctccc

SEQ ID NO: 116036 - DNA, 33 bp, Homo sapien
agacagaaaagtgttatgccttcttttgctccc

SEQ ID NO: 116037 - DNA, 33 bp, Homo sapien
ggcctgtgggtatccaactgtgtggagagcctg

SEQ ID NO: 116038 - DNA, 33 bp, Homo sapien
ggcctgtgggtatccatctgtgtggagagcctg

SEQ ID NO: 116039 - DNA, 33 bp, Homo sapien
aggtgaggaaatgtaactgatgaaagaagaaat

SEQ ID NO: 116040 - DNA, 33 bp, Homo sapien
aggtgaggaaatgtaattgatgaaagaagaaat

SEQ ID NO: 116041 - DNA, 33 bp, Homo sapien
gaataggtgacaaataaatgttttttgacattg

SEQ ID NO: 116042 - DNA, 33 bp, Homo sapien
gaataggtgacaaatacatgttttttgacattg

SEQ ID NO: 116043 - DNA, 33 bp, Homo sapien
gtgatgctacaagaagaacactcttatgaaagc

SEQ ID NO: 116044 - DNA, 33 bp, Homo sapien
gtgatgctacaagaagtacactcttatgaaagc

SEQ ID NO: 116045 - DNA, 33 bp, Homo sapien
tttcttaagtttggaaagatttttaccatcata

SEQ ID NO: 116046 - DNA, 33 bp, Homo sapien
tttcttaagtttggaaggatttttaccatcata

SEQ ID NO: 116047 - DNA, 33 bp, Homo sapien
aatatcaatgctacacaaaggcttgaaagaaat

SEQ ID NO: 116048 - DNA, 33 bp, Homo sapien
aatatcaatgctacacgaaggcttgaaagaaat

SEQ ID NO: 116049 - DNA, 33 bp, Homo sapien
tcagaatgattgttgccaaagattggggaggct

SEQ ID NO: 116050 - DNA, 33 bp, Homo sapien
tcagaatgattgttgctaaagattggggaggct

SEQ ID NO: 116051 - DNA, 33 bp, Homo sapien
ctgtgaggtatgcttacagttgtgaaagtagac

SEQ ID NO: 116052 - DNA, 33 bp, Homo sapien
ctgtgaggtatgcttatagttgtgaaagtagac

SEQ ID NO: 116053 - DNA, 33 bp, Homo sapien
gaatattagagatttaaaatgtcatagaaaaca

SEQ ID NO: 116054 - DNA, 33 bp, Homo sapien
gaatattagagatttagaatgtcatagaaaaca

SEQ ID NO: 116055 - DNA, 33 bp, Homo sapien
ctgcatttagatacccacataatacatattcat

SEQ ID NO: 116056 - DNA, 33 bp, Homo sapien
ctgcatttagatacccgcataatacatattcat

SEQ ID NO: 116057 - DNA, 33 bp, Homo sapien
acacatagtatcctgaactaatcataggacaga

SEQ ID NO: 116058 - DNA, 33 bp, Homo sapien
acacatagtatcctgagctaatcataggacaga

SEQ ID NO: 116059 - DNA, 33 bp, Homo sapien
acatatcaaatgcagaagtgaaacatctatagt

SEQ ID NO: 116060 - DNA, 33 bp, Homo sapien
acatatcaaatgcagaggtgaaacatctatagt

SEQ ID NO: 116061 - DNA, 33 bp, Homo sapien
aagatgatacaaaatcaattttattaggccact

SEQ ID NO: 116062 - DNA, 33 bp, Homo sapien
aagatgatacaaaatcgattttattaggccact

SEQ ID NO: 116063 - DNA, 33 bp, Homo sapien
atgaatgatggaagaaatgtcggaaaaatgttt

SEQ ID NO: 116064 - DNA, 33 bp, Homo sapien
atgaatgatggaagaagtgtcggaaaaatgttt

SEQ ID NO: 116065 - DNA, 33 bp, Homo sapien
ttatctttatcatcatcagcctcagtatcatca

SEQ ID NO: 116066 - DNA, 33 bp, Homo sapien
ttatctttatcatcatgagcctcagtatcatca

SEQ ID NO: 116067 - DNA, 33 bp, Homo sapien
taaaatattcttgagacgatttctccttaacct

SEQ ID NO: 116068 - DNA, 33 bp, Homo sapien
taaaatattcttgagatgatttctccttaacct

SEQ ID NO: 116069 - DNA, 33 bp, Homo sapien
gataaaaatgagaggaataagccactgcccagg

SEQ ID NO: 116070 - DNA, 33 bp, Homo sapien
gataaaaatgagaggagtaagccactgcccagg

SEQ ID NO: 116071 - DNA, 33 bp, Homo sapien
attagatgttgaactacggaagggctacacaat

SEQ ID NO: 116072 - DNA, 33 bp, Homo sapien
attagatgttgaactatggaagggctacacaat

SEQ ID NO: 116073 - DNA, 33 bp, Homo sapien
agtgaagagcacttaactaaaaggtgctaactc

SEQ ID NO: 116074 - DNA, 33 bp, Homo sapien
agtgaagagcacttaagtaaaaggtgctaactc

SEQ ID NO: 116075 - DNA, 33 bp, Homo sapien
aggtagcaaataatcaaataaaaatgttcaaca

SEQ ID NO: 116076 - DNA, 33 bp, Homo sapien
aggtagcaaataatcagataaaaatgttcaaca

SEQ ID NO: 116077 - DNA, 33 bp, Homo sapien
ccagctcctgaaggaacgcttccagtgttactt

SEQ ID NO: 116078 - DNA, 33 bp, Homo sapien
ccagctcctgaaggaatgcttccagtgttactt

SEQ ID NO: 116079 - DNA, 33 bp, Homo sapien
ggatatgtagatgaaagaaggtcttgagaaaaa

SEQ ID NO: 116080 - DNA, 33 bp, Homo sapien
ggatatgtagatgaaataaggtcttgagaaaaa

SEQ ID NO: 116081 - DNA, 33 bp, Homo sapien
ggattggaatgtacaaatagctgatgtgtctgt

SEQ ID NO: 116082 - DNA, 33 bp, Homo sapien
ggattggaatgtacaagtagctgatgtgtctgt

SEQ ID NO: 116083 - DNA, 33 bp, Homo sapien
tatagaaggatttcaacggaagttctcaaaaaa

SEQ ID NO: 116084 - DNA, 33 bp, Homo sapien
tatagaaggatttcaatggaagttctcaaaaaa

SEQ ID NO: 116085 - DNA, 33 bp, Homo sapien
ttcatggattgtgtacacgctattttcaaattt

SEQ ID NO: 116086 - DNA, 33 bp, Homo sapien
ttcatggattgtgtacgcgctattttcaaattt

SEQ ID NO: 116087 - DNA, 33 bp, Homo sapien
aatttgaaataacccacagtgttccaggaccaa

SEQ ID NO: 116088 - DNA, 33 bp, Homo sapien
aatttgaaataacccatagtgttccaggaccaa

SEQ ID NO: 116089 - DNA, 33 bp, Homo sapien
gatatctgttgtgataaataactgaaacaagag

SEQ ID NO: 116090 - DNA, 33 bp, Homo sapien
gatatctgttgtgatagataactgaaacaagag

SEQ ID NO: 116091 - DNA, 33 bp, Homo sapien
ttcttttcacacacttcaaagtttaagaattca

SEQ ID NO: 116092 - DNA, 33 bp, Homo sapien
ttcttttcacacacttgaaagtttaagaattca

SEQ ID NO: 116093 - DNA, 33 bp, Homo sapien
tgtgtgaggaagaagcaaaactaatgaagtatg

SEQ ID NO: 116094 - DNA, 33 bp, Homo sapien
tgtgtgaggaagaagcgaaactaatgaagtatg

SEQ ID NO: 116095 - DNA, 33 bp, Homo sapien
ctggatttctttgcagacaatagttgttcttgc

SEQ ID NO: 116096 - DNA, 33 bp, Homo sapien
ctggatttctttgcaggcaatagttgttcttgc

SEQ ID NO: 116097 - DNA, 33 bp, Homo sapien
gctaggccacgataatgaagttcttcttcttct

SEQ ID NO: 116098 - DNA, 33 bp, Homo sapien
gctaggccacgataattaagttcttcttcttct

SEQ ID NO: 116099 - DNA, 33 bp, Homo sapien
tttttcttctaagcaaagttatgtcaaaagacc

SEQ ID NO: 116100 - DNA, 33 bp, Homo sapien
tttttcttctaagcaacgttatgtcaaaagacc

SEQ ID NO: 116101 - DNA, 33 bp, Homo sapien
aaaatatcaattttaaagaagttcgataagata

SEQ ID NO: 116102 - DNA, 33 bp, Homo sapien
aaaatatcaattttaaggaagttcgataagata

SEQ ID NO: 116103 - DNA, 33 bp, Homo sapien
tccccgctaaacttgaactgactctgagacagg

SEQ ID NO: 116104 - DNA, 33 bp, Homo sapien
tccccgctaaacttgacctgactctgagacagg

SEQ ID NO: 116105 - DNA, 33 bp, Homo sapien
atttctgctggtgacccggaaatcagcagcctg

SEQ ID NO: 116106 - DNA, 33 bp, Homo sapien
atttctgctggtgaccgggaaatcagcagcctg

SEQ ID NO: 116107 - DNA, 33 bp, Homo sapien
ttcttctttgttcatagctgtcttctggcatct

SEQ ID NO: 116108 - DNA, 33 bp, Homo sapien
ttcttctttgttcatatctgtcttctggcatct

SEQ ID NO: 116109 - DNA, 33 bp, Homo sapien
tgtttacagtttgccaatcagcatctacaaaaa

SEQ ID NO: 116110 - DNA, 33 bp, Homo sapien
tgtttacagtttgccattcagcatctacaaaaa

SEQ ID NO: 116111 - DNA, 33 bp, Homo sapien
atgtctttctctgagaacctgtgtaaggaacat

SEQ ID NO: 116112 - DNA, 33 bp, Homo sapien
atgtctttctctgagatcctgtgtaaggaacat

SEQ ID NO: 116113 - DNA, 33 bp, Homo sapien
ctgaactgaactctaccgaagcaggtattgtta

SEQ ID NO: 116114 - DNA, 33 bp, Homo sapien
ctgaactgaactctactgaagcaggtattgtta

SEQ ID NO: 116115 - DNA, 33 bp, Homo sapien
taccaggaggaaatccacctgcatgggtctctt

SEQ ID NO: 116116 - DNA, 33 bp, Homo sapien
taccaggaggaaatccgcctgcatgggtctctt

SEQ ID NO: 116117 - DNA, 33 bp, Homo sapien
ctattcatttacagtacaagaacaaggaaggga

SEQ ID NO: 116118 - DNA, 33 bp, Homo sapien
ctattcatttacagtataagaacaaggaaggga

SEQ ID NO: 116119 - DNA, 33 bp, Homo sapien
attaaaacactttgagaactcatggtatgatat

SEQ ID NO: 116120 - DNA, 33 bp, Homo sapien
attaaaacactttgaggactcatggtatgatat

SEQ ID NO: 116121 - DNA, 33 bp, Homo sapien
aagagatggaatcacaagaaaaacctatccaaa

SEQ ID NO: 116122 - DNA, 33 bp, Homo sapien
aagagatggaatcacaggaaaaacctatccaaa

SEQ ID NO: 116123 - DNA, 33 bp, Homo sapien
aagttgtattcctgcacgtattaaacaaaattt

SEQ ID NO: 116124 - DNA, 33 bp, Homo sapien
aagttgtattcctgcatgtattaaacaaaattt

SEQ ID NO: 116125 - DNA, 33 bp, Homo sapien
atttttatttatggacagactctttcacttatc

SEQ ID NO: 116126 - DNA, 33 bp, Homo sapien
atttttatttatggacggactctttcacttatc

SEQ ID NO: 116127 - DNA, 33 bp, Homo sapien
aatatggctttaaaaaattcaaacactggcata

SEQ ID NO: 116128 - DNA, 33 bp, Homo sapien
aatatggctttaaaaacttcaaacactggcata

SEQ ID NO: 116129 - DNA, 33 bp, Homo sapien
gaaaattcatgaaaaaatgggtccataggtcct

SEQ ID NO: 116130 - DNA, 33 bp, Homo sapien
gaaaattcatgaaaaattgggtccataggtcct

SEQ ID NO: 116131 - DNA, 33 bp, Homo sapien
gccagcaaattataggaaatctagctggtagca

SEQ ID NO: 116132 - DNA, 33 bp, Homo sapien
gccagcaaattatagggaatctagctggtagca

SEQ ID NO: 116133 - DNA, 33 bp, Homo sapien
aggccaatgttcaatcaaagactttgactccat

SEQ ID NO: 116134 - DNA, 33 bp, Homo sapien
aggccaatgttcaatcgaagactttgactccat

SEQ ID NO: 116135 - DNA, 33 bp, Homo sapien
tcagttgtgcgcatcaaaaaatctgtaaaaaat

SEQ ID NO: 116136 - DNA, 33 bp, Homo sapien
tcagttgtgcgcatcagaaaatctgtaaaaaat

SEQ ID NO: 116137 - DNA, 33 bp, Homo sapien
tacttttacttacctaggcacaaaatatttgag

SEQ ID NO: 116138 - DNA, 33 bp, Homo sapien
tacttttacttacctatgcacaaaatatttgag

SEQ ID NO: 116139 - DNA, 33 bp, Homo sapien
gaagcagcataactaacgttttctttcaaggac

SEQ ID NO: 116140 - DNA, 33 bp, Homo sapien
gaagcagcataactaatgttttctttcaaggac

SEQ ID NO: 116141 - DNA, 33 bp, Homo sapien
caagtctgtttgagagaagtttgttccatagct

SEQ ID NO: 116142 - DNA, 33 bp, Homo sapien
caagtctgtttgagaggagtttgttccatagct

SEQ ID NO: 116143 - DNA, 33 bp, Homo sapien
tgtaaaatttgaagcaaagtcaaagtcatatga

SEQ ID NO: 116144 - DNA, 33 bp, Homo sapien
tgtaaaatttgaagcatagtcaaagtcatatga

SEQ ID NO: 116145 - DNA, 33 bp, Homo sapien
atatgcaatgtcattcacagtattatttcatac

SEQ ID NO: 116146 - DNA, 33 bp, Homo sapien
atatgcaatgtcattcgcagtattatttcatac

SEQ ID NO: 116147 - DNA, 33 bp, Homo sapien
acttcatcctattctgaagcacaagaatccact

SEQ ID NO: 116148 - DNA, 33 bp, Homo sapien
acttcatcctattctggagcacaagaatccact

SEQ ID NO: 116149 - DNA, 33 bp, Homo sapien
catgttcaccaacataagatgctcatggcaatc

SEQ ID NO: 116150 - DNA, 33 bp, Homo sapien
catgttcaccaacataggatgctcatggcaatc

SEQ ID NO: 116151 - DNA, 33 bp, Homo sapien
ctgagaacaaaaatcacattggcagatgcactg

SEQ ID NO: 116152 - DNA, 33 bp, Homo sapien
ctgagaacaaaaatcagattggcagatgcactg

SEQ ID NO: 116153 - DNA, 33 bp, Homo sapien
taataataaaagccccaacagatagtgtttgtt

SEQ ID NO: 116154 - DNA, 33 bp, Homo sapien
taataataaaagccccgacagatagtgtttgtt

SEQ ID NO: 116155 - DNA, 33 bp, Homo sapien
cagtttgtagctaggacattcgcatatttagtc

SEQ ID NO: 116156 - DNA, 33 bp, Homo sapien
cagtttgtagctaggatattcgcatatttagtc

SEQ ID NO: 116157 - DNA, 33 bp, Homo sapien
aaacaagcagaacagagaacggaattattttga

SEQ ID NO: 116158 - DNA, 33 bp, Homo sapien
aaacaagcagaacagataacggaattattttga

SEQ ID NO: 116159 - DNA, 33 bp, Homo sapien
cagaaggccaggaatcacctctgctctaagccc

SEQ ID NO: 116160 - DNA, 33 bp, Homo sapien
cagaaggccaggaatcgcctctgctctaagccc

SEQ ID NO: 116161 - DNA, 33 bp, Homo sapien
ggcactgattctaaagaagccaaaaagggtact

SEQ ID NO: 116162 - DNA, 33 bp, Homo sapien
ggcactgattctaaaggagccaaaaagggtact

SEQ ID NO: 116163 - DNA, 33 bp, Homo sapien
atagggcagaaattatgataaatgcttgatgaa

SEQ ID NO: 116164 - DNA, 33 bp, Homo sapien
atagggcagaaattattataaatgcttgatgaa

SEQ ID NO: 116165 - DNA, 33 bp, Homo sapien
caaattttagagaagaagttaagggcaagatga

SEQ ID NO: 116166 - DNA, 33 bp, Homo sapien
caaattttagagaagaggttaagggcaagatga

SEQ ID NO: 116167 - DNA, 33 bp, Homo sapien
tgtgtagctttaaagacggtatttttggactag

SEQ ID NO: 116168 - DNA, 33 bp, Homo sapien
tgtgtagctttaaagatggtatttttggactag

SEQ ID NO: 116169 - DNA, 33 bp, Homo sapien
ccaggtcaactcccgagaaaaatttgggaacat

SEQ ID NO: 116170 - DNA, 33 bp, Homo sapien
ccaggtcaactcccgataaaaatttgggaacat

SEQ ID NO: 116171 - DNA, 33 bp, Homo sapien
tactattgtcctttgaggcaaaaaaactgagaa

SEQ ID NO: 116172 - DNA, 33 bp, Homo sapien
tactattgtcctttgatgcaaaaaaactgagaa

SEQ ID NO: 116173 - DNA, 33 bp, Homo sapien
ggtgtttagccaaaagaacccaattaagaattc

SEQ ID NO: 116174 - DNA, 33 bp, Homo sapien
ggtgtttagccaaaaggacccaattaagaattc

SEQ ID NO: 116175 - DNA, 33 bp, Homo sapien
ccattagcagacagagaaaatgaatcttggaac

SEQ ID NO: 116176 - DNA, 33 bp, Homo sapien
ccattagcagacagaggaaatgaatcttggaac

SEQ ID NO: 116177 - DNA, 33 bp, Homo sapien
gtatttattctgcctgaaagtgtcacaagaaga

SEQ ID NO: 116178 - DNA, 33 bp, Homo sapien
gtatttattctgcctgcaagtgtcacaagaaga

SEQ ID NO: 116179 - DNA, 33 bp, Homo sapien
tccaggaaggttaaaggataactccatctggag

SEQ ID NO: 116180 - DNA, 33 bp, Homo sapien
tccaggaaggttaaagtataactccatctggag

SEQ ID NO: 116181 - DNA, 33 bp, Homo sapien
agatagataaactgagaccaaaaaaggctaaga

SEQ ID NO: 116182 - DNA, 33 bp, Homo sapien
agatagataaactgagtccaaaaaaggctaaga

SEQ ID NO: 116183 - DNA, 33 bp, Homo sapien
agctaagatataaatgcagtgtagaatttactt

SEQ ID NO: 116184 - DNA, 33 bp, Homo sapien
agctaagatataaatgtagtgtagaatttactt

SEQ ID NO: 116185 - DNA, 33 bp, Homo sapien
ttttctgcctgatagaacttatgcactaaaaat

SEQ ID NO: 116186 - DNA, 33 bp, Homo sapien
ttttctgcctgatagagcttatgcactaaaaat

SEQ ID NO: 116187 - DNA, 33 bp, Homo sapien
tagttcgatttgtttgaaactccaaatttcatg

SEQ ID NO: 116188 - DNA, 33 bp, Homo sapien
tagttcgatttgtttggaactccaaatttcatg

SEQ ID NO: 116189 - DNA, 33 bp, Homo sapien
cggagcatatgtagcccactggataactttgca

SEQ ID NO: 116190 - DNA, 33 bp, Homo sapien
cggagcatatgtagcctactggataactttgca

SEQ ID NO: 116191 - DNA, 33 bp, Homo sapien
tagtgactcagtatcaaaatgtttgcttcttgt

SEQ ID NO: 116192 - DNA, 33 bp, Homo sapien
tagtgactcagtatcataatgtttgcttcttgt

SEQ ID NO: 116193 - DNA, 33 bp, Homo sapien
gactaacaaagaaaaactggactgccatttcac

SEQ ID NO: 116194 - DNA, 33 bp, Homo sapien
gactaacaaagaaaaattggactgccatttcac

SEQ ID NO: 116195 - DNA, 33 bp, Homo sapien
aagcaaataggagaaaaattgccgaattctttt

SEQ ID NO: 116196 - DNA, 33 bp, Homo sapien
aagcaaataggagaaatattgccgaattctttt

SEQ ID NO: 116197 - DNA, 33 bp, Homo sapien
taaagacaggcataggaaatcaccagagtattg

SEQ ID NO: 116198 - DNA, 33 bp, Homo sapien
taaagacaggcataggtaatcaccagagtattg

SEQ ID NO: 116199 - DNA, 33 bp, Homo sapien
gctctgttcatgaaaaatgccttatataggtgc

SEQ ID NO: 116200 - DNA, 33 bp, Homo sapien
gctctgttcatgaaaagtgccttatataggtgc

SEQ ID NO: 116201 - DNA, 33 bp, Homo sapien
ttattcaatcttaacccaatcatcacttagaaa

SEQ ID NO: 116202 - DNA, 33 bp, Homo sapien
ttattcaatcttaaccgaatcatcacttagaaa

SEQ ID NO: 116203 - DNA, 33 bp, Homo sapien
gcaaccctgtacaacccatatttttcctcaaaa

SEQ ID NO: 116204 - DNA, 33 bp, Homo sapien
gcaaccctgtacaacctatatttttcctcaaaa

SEQ ID NO: 116205 - DNA, 33 bp, Homo sapien
ttctacatagggaagaacaaatatgtggctgag

SEQ ID NO: 116206 - DNA, 33 bp, Homo sapien
ttctacatagggaagagcaaatatgtggctgag

SEQ ID NO: 116207 - DNA, 33 bp, Homo sapien
ttcagaattttctgtgaattttgaatcatgaat

SEQ ID NO: 116208 - DNA, 33 bp, Homo sapien
ttcagaattttctgtggattttgaatcatgaat

SEQ ID NO: 116209 - DNA, 33 bp, Homo sapien
tagaaatccttaggcaatacagataagcatttg

SEQ ID NO: 116210 - DNA, 33 bp, Homo sapien
tagaaatccttaggcagtacagataagcatttg

SEQ ID NO: 116211 - DNA, 33 bp, Homo sapien
atttatggaagaagaccggacatatatttcctt

SEQ ID NO: 116212 - DNA, 33 bp, Homo sapien
atttatggaagaagactggacatatatttcctt

SEQ ID NO: 116213 - DNA, 33 bp, Homo sapien
agttaaagccctggtaacttcccattggtggtg

SEQ ID NO: 116214 - DNA, 33 bp, Homo sapien
agttaaagccctggtaccttcccattggtggtg

SEQ ID NO: 116215 - DNA, 33 bp, Homo sapien
tcaatgtaaactttcgcatcaacaatgctttca

SEQ ID NO: 116216 - DNA, 33 bp, Homo sapien
tcaatgtaaactttcgtatcaacaatgctttca

SEQ ID NO: 116217 - DNA, 33 bp, Homo sapien
gttactaatttatgaaggcacttgttttgttga

SEQ ID NO: 116218 - DNA, 33 bp, Homo sapien
gttactaatttatgaatgcacttgttttgttga

SEQ ID NO: 116219 - DNA, 33 bp, Homo sapien
gatgggaaatttgttccagtttgctgcttgctg

SEQ ID NO: 116220 - DNA, 33 bp, Homo sapien
gatgggaaatttgttctagtttgctgcttgctg

SEQ ID NO: 116221 - DNA, 33 bp, Homo sapien
tattgtgaatccactaaaacatgaattaacaaa

SEQ ID NO: 116222 - DNA, 33 bp, Homo sapien
tattgtgaatccactacaacatgaattaacaaa

SEQ ID NO: 116223 - DNA, 33 bp, Homo sapien
ggataaagctaaatgaagtagtgtctatacagg

SEQ ID NO: 116224 - DNA, 33 bp, Homo sapien
ggataaagctaaatgaggtagtgtctatacagg

SEQ ID NO: 116225 - DNA, 33 bp, Homo sapien
aaccctgagtctctggaaactgccttcaaaatc

SEQ ID NO: 116226 - DNA, 33 bp, Homo sapien
aaccctgagtctctgggaactgccttcaaaatc

SEQ ID NO: 116227 - DNA, 33 bp, Homo sapien
tgagttccagttttaaccagcatttggacatat

SEQ ID NO: 116228 - DNA, 33 bp, Homo sapien
tgagttccagttttaatcagcatttggacatat

SEQ ID NO: 116229 - DNA, 33 bp, Homo sapien
cttgcacctaaatctaagcttcagtttttttac

SEQ ID NO: 116230 - DNA, 33 bp, Homo sapien
cttgcacctaaatctaggcttcagtttttttac

SEQ ID NO: 116231 - DNA, 33 bp, Homo sapien
gctggaaatttggcaaaagcattatctaagtta

SEQ ID NO: 116232 - DNA, 33 bp, Homo sapien
gctggaaatttggcaagagcattatctaagtta

SEQ ID NO: 116233 - DNA, 33 bp, Homo sapien
tttactctgtgttaggaaatgcactaaatactt

SEQ ID NO: 116234 - DNA, 33 bp, Homo sapien
tttactctgtgttaggtaatgcactaaatactt

SEQ ID NO: 116235 - DNA, 33 bp, Homo sapien
aaggagtattgatcaccgaataagaccagaaat

SEQ ID NO: 116236 - DNA, 33 bp, Homo sapien
aaggagtattgatcactgaataagaccagaaat

SEQ ID NO: 116237 - DNA, 33 bp, Homo sapien
gtgcctgagttgtagacggactcaagagtggga

SEQ ID NO: 116238 - DNA, 33 bp, Homo sapien
gtgcctgagttgtagatggactcaagagtggga

SEQ ID NO: 116239 - DNA, 33 bp, Homo sapien
gttggtctagatccaaatacagcatttcttaaa

SEQ ID NO: 116240 - DNA, 33 bp, Homo sapien
gttggtctagatccaagtacagcatttcttaaa

SEQ ID NO: 116241 - DNA, 33 bp, Homo sapien
tgctaatctagggaacacattttgtaaaccacc

SEQ ID NO: 116242 - DNA, 33 bp, Homo sapien
tgctaatctagggaacgcattttgtaaaccacc

SEQ ID NO: 116243 - DNA, 33 bp, Homo sapien
aggcaatgtgacataactgtggaaccaaatgtc

SEQ ID NO: 116244 - DNA, 33 bp, Homo sapien
aggcaatgtgacataattgtggaaccaaatgtc

SEQ ID NO: 116245 - DNA, 33 bp, Homo sapien
gccctagcttccagataacatttctaaacacac

SEQ ID NO: 116246 - DNA, 33 bp, Homo sapien
gccctagcttccagattacatttctaaacacac

SEQ ID NO: 116247 - DNA, 33 bp, Homo sapien
ttttatcactctaaaacacagttaataagttta

SEQ ID NO: 116248 - DNA, 33 bp, Homo sapien
ttttatcactctaaaagacagttaataagttta

SEQ ID NO: 116249 - DNA, 33 bp, Homo sapien
ctaggagctcagagtccacttggtgaaataaaa

SEQ ID NO: 116250 - DNA, 33 bp, Homo sapien
ctaggagctcagagtctacttggtgaaataaaa

SEQ ID NO: 116251 - DNA, 33 bp, Homo sapien
tgattccagaagaacacggagggtgctgcacga

SEQ ID NO: 116252 - DNA, 33 bp, Homo sapien
tgattccagaagaacatggagggtgctgcacga

SEQ ID NO: 116253 - DNA, 33 bp, Homo sapien
cttgagattcagagggaactactgccagaatat

SEQ ID NO: 116254 - DNA, 33 bp, Homo sapien
cttgagattcagagggtactactgccagaatat

SEQ ID NO: 116255 - DNA, 33 bp, Homo sapien
gcaagtaattaatgaactcctatgtgtctggta

SEQ ID NO: 116256 - DNA, 33 bp, Homo sapien
gcaagtaattaatgaagtcctatgtgtctggta

SEQ ID NO: 116257 - DNA, 33 bp, Homo sapien
ctggagaggatatggcaaaataggaacactttt

SEQ ID NO: 116258 - DNA, 33 bp, Homo sapien
ctggagaggatatggcgaaataggaacactttt

SEQ ID NO: 116259 - DNA, 33 bp, Homo sapien
tgattattttcaatgcaaagttttctgaggatt

SEQ ID NO: 116260 - DNA, 33 bp, Homo sapien
tgattattttcaatgccaagttttctgaggatt

SEQ ID NO: 116261 - DNA, 33 bp, Homo sapien
atattttttggtccataagtctagataaagaat

SEQ ID NO: 116262 - DNA, 33 bp, Homo sapien
atattttttggtccatgagtctagataaagaat

SEQ ID NO: 116263 - DNA, 33 bp, Homo sapien
aaatgttggtctcctcaagaaacacctttacag

SEQ ID NO: 116264 - DNA, 33 bp, Homo sapien
aaatgttggtctcctccagaaacacctttacag

SEQ ID NO: 116265 - DNA, 33 bp, Homo sapien
atgatcgatcttctaacattcacacttattatt

SEQ ID NO: 116266 - DNA, 33 bp, Homo sapien
atgatcgatcttctaatattcacacttattatt

SEQ ID NO: 116267 - DNA, 33 bp, Homo sapien
ttcatgaaggggccgaaagctgaaacctctctc

SEQ ID NO: 116268 - DNA, 33 bp, Homo sapien
ttcatgaaggggccgacagctgaaacctctctc

SEQ ID NO: 116269 - DNA, 33 bp, Homo sapien
ttgagccagctgttaccagaagttgtccattga

SEQ ID NO: 116270 - DNA, 33 bp, Homo sapien
ttgagccagctgttactagaagttgtccattga

SEQ ID NO: 116271 - DNA, 33 bp, Homo sapien
gttgaaaagaagttgacgatgttagggattttt

SEQ ID NO: 116272 - DNA, 33 bp, Homo sapien
gttgaaaagaagttgatgatgttagggattttt

SEQ ID NO: 116273 - DNA, 33 bp, Homo sapien
ttggacatttgcacaagaattaactttaccaat

SEQ ID NO: 116274 - DNA, 33 bp, Homo sapien
ttggacatttgcacaataattaactttaccaat

SEQ ID NO: 116275 - DNA, 33 bp, Homo sapien
gagatctgattgaagaagaaaccatagcacaac

SEQ ID NO: 116276 - DNA, 33 bp, Homo sapien
gagatctgattgaagaggaaaccatagcacaac

SEQ ID NO: 116277 - DNA, 33 bp, Homo sapien
tttaggatcaaaagggccagctgtaatgtgtag

SEQ ID NO: 116278 - DNA, 33 bp, Homo sapien
tttaggatcaaaagggtcagctgtaatgtgtag

SEQ ID NO: 116279 - DNA, 33 bp, Homo sapien
cttactcttgagcaaaaaaggatgttaccttaa

SEQ ID NO: 116280 - DNA, 33 bp, Homo sapien
cttactcttgagcaaagaaggatgttaccttaa

SEQ ID NO: 116281 - DNA, 33 bp, Homo sapien
atactagattcgttcacggttggtaagtagtat

SEQ ID NO: 116282 - DNA, 33 bp, Homo sapien
atactagattcgttcatggttggtaagtagtat

SEQ ID NO: 116283 - DNA, 33 bp, Homo sapien
taatctgttagcctaaaaatatctatacttaca

SEQ ID NO: 116284 - DNA, 33 bp, Homo sapien
taatctgttagcctaagaatatctatacttaca

SEQ ID NO: 116285 - DNA, 33 bp, Homo sapien
acaagcagctgtcaggaacaatacagtatctgg

SEQ ID NO: 116286 - DNA, 33 bp, Homo sapien
acaagcagctgtcaggtacaatacagtatctgg

SEQ ID NO: 116287 - DNA, 33 bp, Homo sapien
attttacaaatacccactcttctctaattggtt

SEQ ID NO: 116288 - DNA, 33 bp, Homo sapien
attttacaaatacccagtcttctctaattggtt

SEQ ID NO: 116289 - DNA, 33 bp, Homo sapien
ggccctttgccctccactagcgctgggcagcca

SEQ ID NO: 116290 - DNA, 33 bp, Homo sapien
ggccctttgccctccattagcgctgggcagcca

SEQ ID NO: 116291 - DNA, 33 bp, Homo sapien
tctttttccaggaacacagaccaactccgtttc

SEQ ID NO: 116292 - DNA, 33 bp, Homo sapien
tctttttccaggaacagagaccaactccgtttc

SEQ ID NO: 116293 - DNA, 33 bp, Homo sapien
cattgctttagacttaccattttcactccttta

SEQ ID NO: 116294 - DNA, 33 bp, Homo sapien
cattgctttagacttatcattttcactccttta

SEQ ID NO: 116295 - DNA, 33 bp, Homo sapien
tagcttactttcatctgaattgatttcaccact

SEQ ID NO: 116296 - DNA, 33 bp, Homo sapien
tagcttactttcatcttaattgatttcaccact

SEQ ID NO: 116297 - DNA, 33 bp, Homo sapien
tcagggtgctggttgacgaagtttgggtggctg

SEQ ID NO: 116298 - DNA, 33 bp, Homo sapien
tcagggtgctggttgatgaagtttgggtggctg

SEQ ID NO: 116299 - DNA, 33 bp, Homo sapien
atcagtcagcaggcacaagcatggaggaaagac

SEQ ID NO: 116300 - DNA, 33 bp, Homo sapien
atcagtcagcaggcaccagcatggaggaaagac

SEQ ID NO: 116301 - DNA, 33 bp, Homo sapien
attggtgcagccattacagaaaatcatatgaac

SEQ ID NO: 116302 - DNA, 33 bp, Homo sapien
attggtgcagccattatagaaaatcatatgaac

SEQ ID NO: 116303 - DNA, 33 bp, Homo sapien
agctctgctctataacaccattcgaagacctgt

SEQ ID NO: 116304 - DNA, 33 bp, Homo sapien
agctctgctctataacgccattcgaagacctgt

SEQ ID NO: 116305 - DNA, 33 bp, Homo sapien
tactgtagtcttttcaggaacttatttggcatg

SEQ ID NO: 116306 - DNA, 33 bp, Homo sapien
tactgtagtcttttcatgaacttatttggcatg

SEQ ID NO: 116307 - DNA, 33 bp, Homo sapien
taaaggtgaaagttcccgaattcatgtattttc

SEQ ID NO: 116308 - DNA, 33 bp, Homo sapien
taaaggtgaaagttcctgaattcatgtattttc

SEQ ID NO: 116309 - DNA, 33 bp, Homo sapien
gtgattgaaaacattaaaggcacgtcttttgtc

SEQ ID NO: 116310 - DNA, 33 bp, Homo sapien
gtgattgaaaacattagaggcacgtcttttgtc

SEQ ID NO: 116311 - DNA, 33 bp, Homo sapien
attattatgtaatgacaaagctgttataacatt

SEQ ID NO: 116312 - DNA, 33 bp, Homo sapien
attattatgtaatgacgaagctgttataacatt

SEQ ID NO: 116313 - DNA, 33 bp, Homo sapien
tataatggaagaaaacggataaacccacacaaa

SEQ ID NO: 116314 - DNA, 33 bp, Homo sapien
tataatggaagaaaactgataaacccacacaaa

SEQ ID NO: 116315 - DNA, 33 bp, Homo sapien
tctctttaaaggcctgcagttcagatgcttgca

SEQ ID NO: 116316 - DNA, 33 bp, Homo sapien
tctctttaaaggcctggagttcagatgcttgca

SEQ ID NO: 116317 - DNA, 33 bp, Homo sapien
aaacacactataagcagtgcaaaaatacaaaag

SEQ ID NO: 116318 - DNA, 33 bp, Homo sapien
aaacacactataagcattgcaaaaatacaaaag

SEQ ID NO: 116319 - DNA, 33 bp, Homo sapien
agaagcagcctcaaaacgaagatctttctgaac

SEQ ID NO: 116320 - DNA, 33 bp, Homo sapien
agaagcagcctcaaaatgaagatctttctgaac

SEQ ID NO: 116321 - DNA, 33 bp, Homo sapien
ttcagacaaattgcaaacatcattttttctaca

SEQ ID NO: 116322 - DNA, 33 bp, Homo sapien
ttcagacaaattgcaagcatcattttttctaca

SEQ ID NO: 116323 - DNA, 33 bp, Homo sapien
tagtgttcatcctatcactggcagatccagaat

SEQ ID NO: 116324 - DNA, 33 bp, Homo sapien
tagtgttcatcctatcgctggcagatccagaat

SEQ ID NO: 116325 - DNA, 33 bp, Homo sapien
agtgagtgtgagtctacgaacaaaagagaaagg

SEQ ID NO: 116326 - DNA, 33 bp, Homo sapien
agtgagtgtgagtctatgaacaaaagagaaagg

SEQ ID NO: 116327 - DNA, 33 bp, Homo sapien
atgaatcgaaaattcaatatcttagatctgagg

SEQ ID NO: 116328 - DNA, 33 bp, Homo sapien
atgaatcgaaaattcagtatcttagatctgagg

SEQ ID NO: 116329 - DNA, 33 bp, Homo sapien
atttggccgaccttaacaaaaatgcaatatatt

SEQ ID NO: 116330 - DNA, 33 bp, Homo sapien
atttggccgaccttaataaaaatgcaatatatt

SEQ ID NO: 116331 - DNA, 33 bp, Homo sapien
tgatttatttccatacaaaattgaatcaatatc

SEQ ID NO: 116332 - DNA, 33 bp, Homo sapien
tgatttatttccatacgaaattgaatcaatatc

SEQ ID NO: 116333 - DNA, 33 bp, Homo sapien
gagcctgttgttcctgcagagctgcaaaagcag

SEQ ID NO: 116334 - DNA, 33 bp, Homo sapien
gagcctgttgttcctgtagagctgcaaaagcag

SEQ ID NO: 116335 - DNA, 33 bp, Homo sapien
aatatcagagatctaactcaactgagactttgt

SEQ ID NO: 116336 - DNA, 33 bp, Homo sapien
aatatcagagatctaattcaactgagactttgt

SEQ ID NO: 116337 - DNA, 33 bp, Homo sapien
gtctttccatttacccaaatatctctgtctttt

SEQ ID NO: 116338 - DNA, 33 bp, Homo sapien
gtctttccatttacccgaatatctctgtctttt

SEQ ID NO: 116339 - DNA, 33 bp, Homo sapien
ctactgtcactcaataaaactttgaactcattc

SEQ ID NO: 116340 - DNA, 33 bp, Homo sapien
ctactgtcactcaatacaactttgaactcattc

SEQ ID NO: 116341 - DNA, 33 bp, Homo sapien
gcaatcagaatttaaaatgaacaaagaatccga

SEQ ID NO: 116342 - DNA, 33 bp, Homo sapien
gcaatcagaatttaaattgaacaaagaatccga

SEQ ID NO: 116343 - DNA, 33 bp, Homo sapien
cttaggtgagacaggaaggttagagatgggtaa

SEQ ID NO: 116344 - DNA, 33 bp, Homo sapien
cttaggtgagacaggagggttagagatgggtaa

SEQ ID NO: 116345 - DNA, 33 bp, Homo sapien
aaaaattcctatctcccagtgacactgtagcca

SEQ ID NO: 116346 - DNA, 33 bp, Homo sapien
aaaaattcctatctcctagtgacactgtagcca

SEQ ID NO: 116347 - DNA, 33 bp, Homo sapien
tcccagtgcacttcaacaacattgcctaaccac

SEQ ID NO: 116348 - DNA, 33 bp, Homo sapien
tcccagtgcacttcaataacattgcctaaccac

SEQ ID NO: 116349 - DNA, 33 bp, Homo sapien
aaaagctgctgttataaagaaaactacatttaa

SEQ ID NO: 116350 - DNA, 33 bp, Homo sapien
aaaagctgctgttatacagaaaactacatttaa

SEQ ID NO: 116351 - DNA, 33 bp, Homo sapien
gatatctaactccaaacctgatagtattagtag

SEQ ID NO: 116352 - DNA, 33 bp, Homo sapien
gatatctaactccaaatctgatagtattagtag

SEQ ID NO: 116353 - DNA, 33 bp, Homo sapien
aaaataagattatgacgccctaaggtgttgtgg

SEQ ID NO: 116354 - DNA, 33 bp, Homo sapien
aaaataagattatgactccctaaggtgttgtgg

SEQ ID NO: 116355 - DNA, 33 bp, Homo sapien
caatttgaagatttgtaaattccagcagacaca

SEQ ID NO: 116356 - DNA, 33 bp, Homo sapien
caatttgaagatttgtgaattccagcagacaca

SEQ ID NO: 116357 - DNA, 33 bp, Homo sapien
tatcaaaatgtggcaaactgagcaatcaactca

SEQ ID NO: 116358 - DNA, 33 bp, Homo sapien
tatcaaaatgtggcaacctgagcaatcaactca

SEQ ID NO: 116359 - DNA, 33 bp, Homo sapien
agagtagagaggcataaaaagaagagataaaag

SEQ ID NO: 116360 - DNA, 33 bp, Homo sapien
agagtagagaggcatataaagaagagataaaag

SEQ ID NO: 116361 - DNA, 33 bp, Homo sapien
ataggcccagggattacaaaggtgaaaatatgc

SEQ ID NO: 116362 - DNA, 33 bp, Homo sapien
ataggcccagggattataaaggtgaaaatatgc

SEQ ID NO: 116363 - DNA, 33 bp, Homo sapien
tggtcaagtaaatctgaaaaatgtacacttaca

SEQ ID NO: 116364 - DNA, 33 bp, Homo sapien
tggtcaagtaaatctggaaaatgtacacttaca

SEQ ID NO: 116365 - DNA, 33 bp, Homo sapien
agaatcgcttcatctaagaaggcggagggtgca

SEQ ID NO: 116366 - DNA, 33 bp, Homo sapien
agaatcgcttcatctaggaaggcggagggtgca

SEQ ID NO: 116367 - DNA, 33 bp, Homo sapien
gcagcgggtgagagaaagtgtgcaggaagtgaa

SEQ ID NO: 116368 - DNA, 33 bp, Homo sapien
gcagcgggtgagagaacgtgtgcaggaagtgaa

SEQ ID NO: 116369 - DNA, 33 bp, Homo sapien
gcagaggcaaagtgtacggtaaataaaaggcat

SEQ ID NO: 116370 - DNA, 33 bp, Homo sapien
gcagaggcaaagtgtatggtaaataaaaggcat

SEQ ID NO: 116371 - DNA, 33 bp, Homo sapien
gtttgggatgagtccaatagccacagtcactat

SEQ ID NO: 116372 - DNA, 33 bp, Homo sapien
gtttgggatgagtccagtagccacagtcactat

SEQ ID NO: 116373 - DNA, 33 bp, Homo sapien
cttcattatgcttccagattgacagcttgggga

SEQ ID NO: 116374 - DNA, 33 bp, Homo sapien
cttcattatgcttccatattgacagcttgggga

SEQ ID NO: 116375 - DNA, 33 bp, Homo sapien
tatctacaggggaaaaaaagctatgagtgtatt

SEQ ID NO: 116376 - DNA, 33 bp, Homo sapien
tatctacaggggaaaagaagctatgagtgtatt

SEQ ID NO: 116377 - DNA, 33 bp, Homo sapien
cataataaattccaggccagtggtgggataaga

SEQ ID NO: 116378 - DNA, 33 bp, Homo sapien
cataataaattccaggtcagtggtgggataaga

SEQ ID NO: 116379 - DNA, 33 bp, Homo sapien
ttttttggacactaaagccgagtgatgaatatg

SEQ ID NO: 116380 - DNA, 33 bp, Homo sapien
ttttttggacactaaatccgagtgatgaatatg

SEQ ID NO: 116381 - DNA, 33 bp, Homo sapien
atatagacctgaaataaatactcaacttattgc

SEQ ID NO: 116382 - DNA, 33 bp, Homo sapien
atatagacctgaaatagatactcaacttattgc

SEQ ID NO: 116383 - DNA, 33 bp, Homo sapien
tactctacaaggctaaaaagaagcagaagagtg

SEQ ID NO: 116384 - DNA, 33 bp, Homo sapien
tactctacaaggctaagaagaagcagaagagtg

SEQ ID NO: 116385 - DNA, 33 bp, Homo sapien
agtgcatggttataagcaaaaggaatgacagta

SEQ ID NO: 116386 - DNA, 33 bp, Homo sapien
agtgcatggttataagtaaaaggaatgacagta

SEQ ID NO: 116387 - DNA, 33 bp, Homo sapien
gtaaactctaggcaacagctaagattttttaaa

SEQ ID NO: 116388 - DNA, 33 bp, Homo sapien
gtaaactctaggcaaccgctaagattttttaaa

SEQ ID NO: 116389 - DNA, 33 bp, Homo sapien
agccaggaataatctaagccttctctacctgga

SEQ ID NO: 116390 - DNA, 33 bp, Homo sapien
agccaggaataatctatgccttctctacctgga

SEQ ID NO: 116391 - DNA, 33 bp, Homo sapien
aaaactttcactctggacaggttagaaagttaa

SEQ ID NO: 116392 - DNA, 33 bp, Homo sapien
aaaactttcactctgggcaggttagaaagttaa

SEQ ID NO: 116393 - DNA, 33 bp, Homo sapien
tagtggatggattccaagattcttctgagagag

SEQ ID NO: 116394 - DNA, 33 bp, Homo sapien
tagtggatggattccaggattcttctgagagag

SEQ ID NO: 116395 - DNA, 33 bp, Homo sapien
ctcacctgtttatgtaagctttatggttgtgtc

SEQ ID NO: 116396 - DNA, 33 bp, Homo sapien
ctcacctgtttatgtaggctttatggttgtgtc

SEQ ID NO: 116397 - DNA, 33 bp, Homo sapien
acaagttgtctgctacacattcctcacaatctg

SEQ ID NO: 116398 - DNA, 33 bp, Homo sapien
acaagttgtctgctacgcattcctcacaatctg

SEQ ID NO: 116399 - DNA, 33 bp, Homo sapien
aaaaatgattcataaaactcttatgctgaccaa

SEQ ID NO: 116400 - DNA, 33 bp, Homo sapien
aaaaatgattcataaacctcttatgctgaccaa

SEQ ID NO: 116401 - DNA, 33 bp, Homo sapien
cttttgtgatttgcgacatcctgcactatcaac

SEQ ID NO: 116402 - DNA, 33 bp, Homo sapien
cttttgtgatttgcgatatcctgcactatcaac

SEQ ID NO: 116403 - DNA, 33 bp, Homo sapien
gaaacgaggagggaagcccttatttcaaactgg

SEQ ID NO: 116404 - DNA, 33 bp, Homo sapien
gaaacgaggagggaaggccttatttcaaactgg

SEQ ID NO: 116405 - DNA, 33 bp, Homo sapien
aaaaagtctatctacactggacatttgtaagta

SEQ ID NO: 116406 - DNA, 33 bp, Homo sapien
aaaaagtctatctacattggacatttgtaagta

SEQ ID NO: 116407 - DNA, 33 bp, Homo sapien
tctactgacacgttgacctctaaacctaggaat

SEQ ID NO: 116408 - DNA, 33 bp, Homo sapien
tctactgacacgttgagctctaaacctaggaat

SEQ ID NO: 116409 - DNA, 33 bp, Homo sapien
cttttgtctcaccctaacataagccctcaaatt

SEQ ID NO: 116410 - DNA, 33 bp, Homo sapien
cttttgtctcaccctaccataagccctcaaatt

SEQ ID NO: 116411 - DNA, 33 bp, Homo sapien
tgctcaggacgtatgcaatagaaaaaggtagtt

SEQ ID NO: 116412 - DNA, 33 bp, Homo sapien
tgctcaggacgtatgcgatagaaaaaggtagtt

SEQ ID NO: 116413 - DNA, 33 bp, Homo sapien
tcatggagtatacaaaccaattttattccactg

SEQ ID NO: 116414 - DNA, 33 bp, Homo sapien
tcatggagtatacaaatcaattttattccactg

SEQ ID NO: 116415 - DNA, 33 bp, Homo sapien
cactgtgtaagagacccactggtagctaggaaa

SEQ ID NO: 116416 - DNA, 33 bp, Homo sapien
cactgtgtaagagacctactggtagctaggaaa

SEQ ID NO: 116417 - DNA, 33 bp, Homo sapien
atacaataaattgttaactagtcacacttcagt

SEQ ID NO: 116418 - DNA, 33 bp, Homo sapien
atacaataaattgttatctagtcacacttcagt

SEQ ID NO: 116419 - DNA, 33 bp, Homo sapien
tactaaaagctgagaaagggatagaaatccgga

SEQ ID NO: 116420 - DNA, 33 bp, Homo sapien
tactaaaagctgagaaggggatagaaatccgga

SEQ ID NO: 116421 - DNA, 33 bp, Homo sapien
ctcatctcctaataacagcactgagaaccttcc

SEQ ID NO: 116422 - DNA, 33 bp, Homo sapien
ctcatctcctaataacggcactgagaaccttcc

SEQ ID NO: 116423 - DNA, 33 bp, Homo sapien
cagccagtttgaaaagaatcctcaagatcgaga

SEQ ID NO: 116424 - DNA, 33 bp, Homo sapien
cagccagtttgaaaagcatcctcaagatcgaga

SEQ ID NO: 116425 - DNA, 33 bp, Homo sapien
tagaattggaaagttaagctgttcctcactcca

SEQ ID NO: 116426 - DNA, 33 bp, Homo sapien
tagaattggaaagttaggctgttcctcactcca

SEQ ID NO: 116427 - DNA, 33 bp, Homo sapien
caaaactgaaagagcacattgtaacgcacaccc

SEQ ID NO: 116428 - DNA, 33 bp, Homo sapien
caaaactgaaagagcagattgtaacgcacaccc

SEQ ID NO: 116429 - DNA, 33 bp, Homo sapien
ggtgcccttgtgaaaacgacgctctacaaaagg

SEQ ID NO: 116430 - DNA, 33 bp, Homo sapien
ggtgcccttgtgaaaatgacgctctacaaaagg

SEQ ID NO: 116431 - DNA, 33 bp, Homo sapien
gaatcacaaagcccacaatttgtcttattcctt

SEQ ID NO: 116432 - DNA, 33 bp, Homo sapien
gaatcacaaagcccacgatttgtcttattcctt

SEQ ID NO: 116433 - DNA, 33 bp, Homo sapien
gaaacccctgtgggaaaagcagctccacacaca

SEQ ID NO: 116434 - DNA, 33 bp, Homo sapien
gaaacccctgtgggaagagcagctccacacaca

SEQ ID NO: 116435 - DNA, 33 bp, Homo sapien
tgtgtactcttggatgcattatttaattaactg

SEQ ID NO: 116436 - DNA, 33 bp, Homo sapien
tgtgtactcttggatgtattatttaattaactg

SEQ ID NO: 116437 - DNA, 33 bp, Homo sapien
ttgtcagctacagcaacgaattctgtgaaagat

SEQ ID NO: 116438 - DNA, 33 bp, Homo sapien
ttgtcagctacagcaatgaattctgtgaaagat

SEQ ID NO: 116439 - DNA, 33 bp, Homo sapien
tagttctcttcccctaccttctccaaatcaatg

SEQ ID NO: 116440 - DNA, 33 bp, Homo sapien
tagttctcttcccctatcttctccaaatcaatg

SEQ ID NO: 116441 - DNA, 33 bp, Homo sapien
ccaggagcagtaactcagagatgtaacttccag

SEQ ID NO: 116442 - DNA, 33 bp, Homo sapien
ccaggagcagtaactcggagatgtaacttccag

SEQ ID NO: 116443 - DNA, 33 bp, Homo sapien
tgcagactgagacttcgctgtaggtgttctgaa

SEQ ID NO: 116444 - DNA, 33 bp, Homo sapien
tgcagactgagacttctctgtaggtgttctgaa

SEQ ID NO: 116445 - DNA, 33 bp, Homo sapien
ttgaggtgtttctgaccatcttgcttgttcatt

SEQ ID NO: 116446 - DNA, 33 bp, Homo sapien
ttgaggtgtttctgactatcttgcttgttcatt

SEQ ID NO: 116447 - DNA, 33 bp, Homo sapien
tttgcaaaaataacagaatttgatcctaggact

SEQ ID NO: 116448 - DNA, 33 bp, Homo sapien
tttgcaaaaataacaggatttgatcctaggact

SEQ ID NO: 116449 - DNA, 33 bp, Homo sapien
aatcattttgactaaaagatgcttgaacaatat

SEQ ID NO: 116450 - DNA, 33 bp, Homo sapien
aatcattttgactaaatgatgcttgaacaatat

SEQ ID NO: 116451 - DNA, 33 bp, Homo sapien
ctgaaaggaaactgagcccaagatatgctaatt

SEQ ID NO: 116452 - DNA, 33 bp, Homo sapien
ctgaaaggaaactgagtccaagatatgctaatt

SEQ ID NO: 116453 - DNA, 33 bp, Homo sapien
ctttcctgctccaggaagtatatcagaatgcaa

SEQ ID NO: 116454 - DNA, 33 bp, Homo sapien
ctttcctgctccaggaggtatatcagaatgcaa

SEQ ID NO: 116455 - DNA, 33 bp, Homo sapien
tgtgccagaaccactccagcagatttcctccta

SEQ ID NO: 116456 - DNA, 33 bp, Homo sapien
tgtgccagaaccactctagcagatttcctccta

SEQ ID NO: 116457 - DNA, 33 bp, Homo sapien
cataggcctttatcccggcagtgaaacaatttt

SEQ ID NO: 116458 - DNA, 33 bp, Homo sapien
cataggcctttatccctgcagtgaaacaatttt

SEQ ID NO: 116459 - DNA, 33 bp, Homo sapien
aaacaagaagggttcaatgaacaggctgagaaa

SEQ ID NO: 116460 - DNA, 33 bp, Homo sapien
aaacaagaagggttcagtgaacaggctgagaaa

SEQ ID NO: 116461 - DNA, 33 bp, Homo sapien
cctttaaagtctgaaaagttggcaaaggaagat

SEQ ID NO: 116462 - DNA, 33 bp, Homo sapien
cctttaaagtctgaaaggttggcaaaggaagat

SEQ ID NO: 116463 - DNA, 33 bp, Homo sapien
ttcttttagcatactccgaggcacttaatgcca

SEQ ID NO: 116464 - DNA, 33 bp, Homo sapien
ttcttttagcatactctgaggcacttaatgcca

SEQ ID NO: 116465 - DNA, 33 bp, Homo sapien
ggttctgaactctaaaaatgctgtgctttaagt

SEQ ID NO: 116466 - DNA, 33 bp, Homo sapien
ggttctgaactctaaagatgctgtgctttaagt

SEQ ID NO: 116467 - DNA, 33 bp, Homo sapien
ttaataaatgttttggacaatagatgccaaaga

SEQ ID NO: 116468 - DNA, 33 bp, Homo sapien
ttaataaatgttttgggcaatagatgccaaaga

SEQ ID NO: 116469 - DNA, 33 bp, Homo sapien
gctaccaattctcagtgactcaacacaacaaaa

SEQ ID NO: 116470 - DNA, 33 bp, Homo sapien
gctaccaattctcagttactcaacacaacaaaa

SEQ ID NO: 116471 - DNA, 33 bp, Homo sapien
cttccaaccagctgtaaagttcaagtctattcc

SEQ ID NO: 116472 - DNA, 33 bp, Homo sapien
cttccaaccagctgtagagttcaagtctattcc

SEQ ID NO: 116473 - DNA, 33 bp, Homo sapien
gcacggatttgtggtaataatatgacctggaaa

SEQ ID NO: 116474 - DNA, 33 bp, Homo sapien
gcacggatttgtggtagtaatatgacctggaaa

SEQ ID NO: 116475 - DNA, 33 bp, Homo sapien
acaacattatccagaaaaaggagcagctgtgag

SEQ ID NO: 116476 - DNA, 33 bp, Homo sapien
acaacattatccagaagaaggagcagctgtgag

SEQ ID NO: 116477 - DNA, 33 bp, Homo sapien
agagatgaaatgagagaccatgaaagtgaacaa

SEQ ID NO: 116478 - DNA, 33 bp, Homo sapien
agagatgaaatgagaggccatgaaagtgaacaa

SEQ ID NO: 116479 - DNA, 33 bp, Homo sapien
ctgggcactaaatatgaatcaaagataaaaata

SEQ ID NO: 116480 - DNA, 33 bp, Homo sapien
ctgggcactaaatatgcatcaaagataaaaata

SEQ ID NO: 116481 - DNA, 33 bp, Homo sapien
ttcttggcttcagttggattcacagctgttatc

SEQ ID NO: 116482 - DNA, 33 bp, Homo sapien
ttcttggcttcagttgtattcacagctgttatc

SEQ ID NO: 116483 - DNA, 33 bp, Homo sapien
cactttacatgtcagggattatcattgtgtcca

SEQ ID NO: 116484 - DNA, 33 bp, Homo sapien
cactttacatgtcaggtattatcattgtgtcca

SEQ ID NO: 116485 - DNA, 33 bp, Homo sapien
tcaagtttaagcaaaacatgctgtctctatcaa

SEQ ID NO: 116486 - DNA, 33 bp, Homo sapien
tcaagtttaagcaaaatatgctgtctctatcaa

SEQ ID NO: 116487 - DNA, 33 bp, Homo sapien
caaaagagaaagcaacaaatgttccagcagatt

SEQ ID NO: 116488 - DNA, 33 bp, Homo sapien
caaaagagaaagcaaccaatgttccagcagatt

SEQ ID NO: 116489 - DNA, 33 bp, Homo sapien
gcaggactagatgttacgtacatggttatgttc

SEQ ID NO: 116490 - DNA, 33 bp, Homo sapien
gcaggactagatgttatgtacatggttatgttc

SEQ ID NO: 116491 - DNA, 33 bp, Homo sapien
taaataaagctgtctaagctcctgaaaggcaat

SEQ ID NO: 116492 - DNA, 33 bp, Homo sapien
taaataaagctgtctacgctcctgaaaggcaat

SEQ ID NO: 116493 - DNA, 33 bp, Homo sapien
acccaccttcgatatgaattgtaagtaaaggag

SEQ ID NO: 116494 - DNA, 33 bp, Homo sapien
acccaccttcgatatggattgtaagtaaaggag

SEQ ID NO: 116495 - DNA, 33 bp, Homo sapien
gctactctccttccccaatacactacatattaa

SEQ ID NO: 116496 - DNA, 33 bp, Homo sapien
gctactctccttccccgatacactacatattaa

SEQ ID NO: 116497 - DNA, 33 bp, Homo sapien
aataatagctatgtttaaaaataagctgctctt

SEQ ID NO: 116498 - DNA, 33 bp, Homo sapien
aataatagctatgtttgaaaataagctgctctt

SEQ ID NO: 116499 - DNA, 33 bp, Homo sapien
aaataattgcattggaagggaattgcgagtggc

SEQ ID NO: 116500 - DNA, 33 bp, Homo sapien
aaataattgcattggaggggaattgcgagtggc

SEQ ID NO: 116501 - DNA, 33 bp, Homo sapien
tccatttcttaatccagccattgtttacattat

SEQ ID NO: 116502 - DNA, 33 bp, Homo sapien
tccatttcttaatccatccattgtttacattat

SEQ ID NO: 116503 - DNA, 33 bp, Homo sapien
tgaatgctttggttaacagtaattagttaagag

SEQ ID NO: 116504 - DNA, 33 bp, Homo sapien
tgaatgctttggttaatagtaattagttaagag

SEQ ID NO: 116505 - DNA, 33 bp, Homo sapien
gtcctcattaacccaacgctctaaccaactgag

SEQ ID NO: 116506 - DNA, 33 bp, Homo sapien
gtcctcattaacccaatgctctaaccaactgag

SEQ ID NO: 116507 - DNA, 33 bp, Homo sapien
cagttaacttggcagagaaaaactttgctgcac

SEQ ID NO: 116508 - DNA, 33 bp, Homo sapien
cagttaacttggcagataaaaactttgctgcac

SEQ ID NO: 116509 - DNA, 33 bp, Homo sapien
ttatatcttccaacaggattcagggctaggcaa

SEQ ID NO: 116510 - DNA, 33 bp, Homo sapien
ttatatcttccaacagtattcagggctaggcaa

SEQ ID NO: 116511 - DNA, 33 bp, Homo sapien
acttgaatactgttgaagaggatgtaaattagt

SEQ ID NO: 116512 - DNA, 33 bp, Homo sapien
acttgaatactgttgatgaggatgtaaattagt

SEQ ID NO: 116513 - DNA, 33 bp, Homo sapien
tataacttcagacccaaccagatgacatttttt

SEQ ID NO: 116514 - DNA, 33 bp, Homo sapien
tataacttcagacccacccagatgacatttttt

SEQ ID NO: 116515 - DNA, 33 bp, Homo sapien
ttctcctcaaactttcacatactaatttggaca

SEQ ID NO: 116516 - DNA, 33 bp, Homo sapien
ttctcctcaaactttcgcatactaatttggaca

SEQ ID NO: 116517 - DNA, 33 bp, Homo sapien
ttctcagcataacaaacaacatcctctacagtg

SEQ ID NO: 116518 - DNA, 33 bp, Homo sapien
ttctcagcataacaaataacatcctctacagtg

SEQ ID NO: 116519 - DNA, 33 bp, Homo sapien
ttgaaagcaaggtctacgtcatagtatgttcct

SEQ ID NO: 116520 - DNA, 33 bp, Homo sapien
ttgaaagcaaggtctatgtcatagtatgttcct

SEQ ID NO: 116521 - DNA, 33 bp, Homo sapien
tatcacataagtgtcaactgctctgacagcatt

SEQ ID NO: 116522 - DNA, 33 bp, Homo sapien
tatcacataagtgtcacctgctctgacagcatt

SEQ ID NO: 116523 - DNA, 33 bp, Homo sapien
tactggtacagaaaccaacaaatagaccaatgg

SEQ ID NO: 116524 - DNA, 33 bp, Homo sapien
tactggtacagaaaccgacaaatagaccaatgg

SEQ ID NO: 116525 - DNA, 33 bp, Homo sapien
ctcaagtagatgctaacgtattttgttttcttc

SEQ ID NO: 116526 - DNA, 33 bp, Homo sapien
ctcaagtagatgctaatgtattttgttttcttc

SEQ ID NO: 116527 - DNA, 33 bp, Homo sapien
atttgcctatgtaacaaaccttcacttttacac

SEQ ID NO: 116528 - DNA, 33 bp, Homo sapien
atttgcctatgtaacagaccttcacttttacac

SEQ ID NO: 116529 - DNA, 33 bp, Homo sapien
ttcacatagcctaccccgagaagctctttggct

SEQ ID NO: 116530 - DNA, 33 bp, Homo sapien
ttcacatagcctaccctgagaagctctttggct

SEQ ID NO: 116531 - DNA, 33 bp, Homo sapien
aaatacttttaatgttcaaaggacaaaatatta

SEQ ID NO: 116532 - DNA, 33 bp, Homo sapien
aaatacttttaatgttgaaaggacaaaatatta

SEQ ID NO: 116533 - DNA, 33 bp, Homo sapien
tcttgaaacagacagcaagaataaggctgacaa

SEQ ID NO: 116534 - DNA, 33 bp, Homo sapien
tcttgaaacagacagcgagaataaggctgacaa

SEQ ID NO: 116535 - DNA, 33 bp, Homo sapien
aggtgcatccattgaactatcttactgtgtttt

SEQ ID NO: 116536 - DNA, 33 bp, Homo sapien
aggtgcatccattgaagtatcttactgtgtttt

SEQ ID NO: 116537 - DNA, 33 bp, Homo sapien
gctgtgtgtgctacaacatttaaattgctattg

SEQ ID NO: 116538 - DNA, 33 bp, Homo sapien
gctgtgtgtgctacaatatttaaattgctattg

SEQ ID NO: 116539 - DNA, 33 bp, Homo sapien
tcacactgctgatacaatactttctatgagttt

SEQ ID NO: 116540 - DNA, 33 bp, Homo sapien
tcacactgctgatacagtactttctatgagttt

SEQ ID NO: 116541 - DNA, 33 bp, Homo sapien
acccatatggatccggccacagttggagactca

SEQ ID NO: 116542 - DNA, 33 bp, Homo sapien
acccatatggatccggtcacagttggagactca

SEQ ID NO: 116543 - DNA, 33 bp, Homo sapien
ttatgtgttgttaaacggttaaatgttcaatct

SEQ ID NO: 116544 - DNA, 33 bp, Homo sapien
ttatgtgttgttaaactgttaaatgttcaatct

SEQ ID NO: 116545 - DNA, 33 bp, Homo sapien
ttagcacagggtaaagacttgttgtacaatggg

SEQ ID NO: 116546 - DNA, 33 bp, Homo sapien
ttagcacagggtaaagtcttgttgtacaatggg

SEQ ID NO: 116547 - DNA, 33 bp, Homo sapien
ccactaatgtcctccaatacttttctactagct

SEQ ID NO: 116548 - DNA, 33 bp, Homo sapien
ccactaatgtcctccagtacttttctactagct

SEQ ID NO: 116549 - DNA, 33 bp, Homo sapien
tgggaagttctctaaaatagatgctttaagaaa

SEQ ID NO: 116550 - DNA, 33 bp, Homo sapien
tgggaagttctctaaagtagatgctttaagaaa

SEQ ID NO: 116551 - DNA, 33 bp, Homo sapien
gggcctgtactcagaaagaatcccatcaagaca

SEQ ID NO: 116552 - DNA, 33 bp, Homo sapien
gggcctgtactcagaaggaatcccatcaagaca

SEQ ID NO: 116553 - DNA, 33 bp, Homo sapien
gtatatccattactgaacacccaggtacacaaa

SEQ ID NO: 116554 - DNA, 33 bp, Homo sapien
gtatatccattactgatcacccaggtacacaaa

SEQ ID NO: 116555 - DNA, 33 bp, Homo sapien
agaaaggcccatagcaatagacaaggcttttcc

SEQ ID NO: 116556 - DNA, 33 bp, Homo sapien
agaaaggcccatagcagtagacaaggcttttcc

SEQ ID NO: 116557 - DNA, 33 bp, Homo sapien
atgtctataaatgagcacaaaaggaaattaaaa

SEQ ID NO: 116558 - DNA, 33 bp, Homo sapien
atgtctataaatgagcgcaaaaggaaattaaaa

SEQ ID NO: 116559 - DNA, 33 bp, Homo sapien
cacttgtgactaacaaaaatcttccaagagatt

SEQ ID NO: 116560 - DNA, 33 bp, Homo sapien
cacttgtgactaacaataatcttccaagagatt

SEQ ID NO: 116561 - DNA, 33 bp, Homo sapien
aacttgctcaatgacaacagttagtaagtggca

SEQ ID NO: 116562 - DNA, 33 bp, Homo sapien
aacttgctcaatgacagcagttagtaagtggca

SEQ ID NO: 116563 - DNA, 33 bp, Homo sapien
gaaacacaattcctacactgccccctctttccc

SEQ ID NO: 116564 - DNA, 33 bp, Homo sapien
gaaacacaattcctacgctgccccctctttccc

SEQ ID NO: 116565 - DNA, 33 bp, Homo sapien
caaaacgtcaatagcaacagatgaactggagca

SEQ ID NO: 116566 - DNA, 33 bp, Homo sapien
caaaacgtcaatagcagcagatgaactggagca

SEQ ID NO: 116567 - DNA, 33 bp, Homo sapien
aaataaaaatcttacccagtctaattcagtgct

SEQ ID NO: 116568 - DNA, 33 bp, Homo sapien
aaataaaaatcttacctagtctaattcagtgct

SEQ ID NO: 116569 - DNA, 33 bp, Homo sapien
atagaccaccaccagaacaataaacctgatgta

SEQ ID NO: 116570 - DNA, 33 bp, Homo sapien
atagaccaccaccagagcaataaacctgatgta

SEQ ID NO: 116571 - DNA, 33 bp, Homo sapien
gccaggtatagtatcaacaatcctaaccaaatt

SEQ ID NO: 116572 - DNA, 33 bp, Homo sapien
gccaggtatagtatcaccaatcctaaccaaatt

SEQ ID NO: 116573 - DNA, 33 bp, Homo sapien
accaaattcatctggtaacatttgcaaagtaat

SEQ ID NO: 116574 - DNA, 33 bp, Homo sapien
accaaattcatctggttacatttgcaaagtaat

SEQ ID NO: 116575 - DNA, 33 bp, Homo sapien
tcctgtctttttacctaagaatgactgaattta

SEQ ID NO: 116576 - DNA, 33 bp, Homo sapien
tcctgtctttttacctgagaatgactgaattta

SEQ ID NO: 116577 - DNA, 33 bp, Homo sapien
aacattatgagaatcaataacctgtacccttat

SEQ ID NO: 116578 - DNA, 33 bp, Homo sapien
aacattatgagaatcattaacctgtacccttat

SEQ ID NO: 116579 - DNA, 33 bp, Homo sapien
gcaaacaatcccattgaaaagtggacatgaaca

SEQ ID NO: 116580 - DNA, 33 bp, Homo sapien
gcaaacaatcccattggaaagtggacatgaaca

SEQ ID NO: 116581 - DNA, 33 bp, Homo sapien
atgtaagaagagataccgaactggaatgaaaaa

SEQ ID NO: 116582 - DNA, 33 bp, Homo sapien
atgtaagaagagatactgaactggaatgaaaaa

SEQ ID NO: 116583 - DNA, 33 bp, Homo sapien
ggtgttgtacctaaaacgtctttgccaaagctg

SEQ ID NO: 116584 - DNA, 33 bp, Homo sapien
ggtgttgtacctaaaatgtctttgccaaagctg

SEQ ID NO: 116585 - DNA, 33 bp, Homo sapien
agcacctggaagggaaattaatctgcagaaaga

SEQ ID NO: 116586 - DNA, 33 bp, Homo sapien
agcacctggaagggaagttaatctgcagaaaga

SEQ ID NO: 116587 - DNA, 33 bp, Homo sapien
attgtggccatagcaccggctttaaaacaagtt

SEQ ID NO: 116588 - DNA, 33 bp, Homo sapien
attgtggccatagcactggctttaaaacaagtt

SEQ ID NO: 116589 - DNA, 33 bp, Homo sapien
tatagcacttttaagactatggaatgtagaatg

SEQ ID NO: 116590 - DNA, 33 bp, Homo sapien
tatagcacttttaagattatggaatgtagaatg

SEQ ID NO: 116591 - DNA, 33 bp, Homo sapien
gtctgtctcctcttaccagtctgagtacaggaa

SEQ ID NO: 116592 - DNA, 33 bp, Homo sapien
gtctgtctcctcttactagtctgagtacaggaa

SEQ ID NO: 116593 - DNA, 33 bp, Homo sapien
ggattggtaataaagcacagtcttcatttctgc

SEQ ID NO: 116594 - DNA, 33 bp, Homo sapien
ggattggtaataaagcgcagtcttcatttctgc

SEQ ID NO: 116595 - DNA, 33 bp, Homo sapien
cttaattcttaccccgcagatgagaaaccaaga

SEQ ID NO: 116596 - DNA, 33 bp, Homo sapien
cttaattcttaccccggagatgagaaaccaaga

SEQ ID NO: 116597 - DNA, 33 bp, Homo sapien
tcttggcatacctaagccatttcttcccatata

SEQ ID NO: 116598 - DNA, 33 bp, Homo sapien
tcttggcatacctaagtcatttcttcccatata

SEQ ID NO: 116599 - DNA, 33 bp, Homo sapien
gatcacgttctaaacaaaattgtaaactacatg

SEQ ID NO: 116600 - DNA, 33 bp, Homo sapien
gatcacgttctaaacacaattgtaaactacatg

SEQ ID NO: 116601 - DNA, 33 bp, Homo sapien
cttactctgtgcacatcagattccaatgaggac

SEQ ID NO: 116602 - DNA, 33 bp, Homo sapien
cttactctgtgcacatgagattccaatgaggac

SEQ ID NO: 116603 - DNA, 33 bp, Homo sapien
caacacgtgcatgatcaaatctgaagggaacat

SEQ ID NO: 116604 - DNA, 33 bp, Homo sapien
caacacgtgcatgatccaatctgaagggaacat

SEQ ID NO: 116605 - DNA, 33 bp, Homo sapien
catccaaattgttgcacgtatcaagtttgttcc

SEQ ID NO: 116606 - DNA, 33 bp, Homo sapien
catccaaattgttgcatgtatcaagtttgttcc

SEQ ID NO: 116607 - DNA, 33 bp, Homo sapien
acttcatctggtacccacagtctggtttttcag

SEQ ID NO: 116608 - DNA, 33 bp, Homo sapien
acttcatctggtacccgcagtctggtttttcag

SEQ ID NO: 116609 - DNA, 33 bp, Homo sapien
ataagttatctgttcccacataaccaacatacg

SEQ ID NO: 116610 - DNA, 33 bp, Homo sapien
ataagttatctgttcctacataaccaacatacg

SEQ ID NO: 116611 - DNA, 33 bp, Homo sapien
aggtaaagctccagtacgtttatcttgatttat

SEQ ID NO: 116612 - DNA, 33 bp, Homo sapien
aggtaaagctccagtatgtttatcttgatttat

SEQ ID NO: 116613 - DNA, 33 bp, Homo sapien
agcttagaaacaaataacaggtagctagtgaac

SEQ ID NO: 116614 - DNA, 33 bp, Homo sapien
agcttagaaacaaatatcaggtagctagtgaac

SEQ ID NO: 116615 - DNA, 33 bp, Homo sapien
tatatccacaattataaaaaaggaaagagattt

SEQ ID NO: 116616 - DNA, 33 bp, Homo sapien
tatatccacaattatagaaaaggaaagagattt

SEQ ID NO: 116617 - DNA, 33 bp, Homo sapien
ccactgaatatgtatacggaaggcaggatggct

SEQ ID NO: 116618 - DNA, 33 bp, Homo sapien
ccactgaatatgtatatggaaggcaggatggct

SEQ ID NO: 116619 - DNA, 33 bp, Homo sapien
ctctccaaaatatttgcacgattttacactccc

SEQ ID NO: 116620 - DNA, 33 bp, Homo sapien
ctctccaaaatatttgtacgattttacactccc

SEQ ID NO: 116621 - DNA, 33 bp, Homo sapien
tcaccctggcaattcactactaacaataaaatt

SEQ ID NO: 116622 - DNA, 33 bp, Homo sapien
tcaccctggcaattcattactaacaataaaatt

SEQ ID NO: 116623 - DNA, 33 bp, Homo sapien
ccctttcagccaatgacgttctaaagtaaatgt

SEQ ID NO: 116624 - DNA, 33 bp, Homo sapien
ccctttcagccaatgatgttctaaagtaaatgt

SEQ ID NO: 116625 - DNA, 33 bp, Homo sapien
ggatcttatccaagacaacaaaggcggcacatt

SEQ ID NO: 116626 - DNA, 33 bp, Homo sapien
ggatcttatccaagactacaaaggcggcacatt

SEQ ID NO: 116627 - DNA, 33 bp, Homo sapien
cctctatctccacgaactcaattgatttaattt

SEQ ID NO: 116628 - DNA, 33 bp, Homo sapien
cctctatctccacgaattcaattgatttaattt

SEQ ID NO: 116629 - DNA, 33 bp, Homo sapien
tcactgtgtttagttccatgtggttctgcaagc

SEQ ID NO: 116630 - DNA, 33 bp, Homo sapien
tcactgtgtttagttctatgtggttctgcaagc

SEQ ID NO: 116631 - DNA, 33 bp, Homo sapien
aggccccaaaagtgaacgctttctgtgaatatt

SEQ ID NO: 116632 - DNA, 33 bp, Homo sapien
aggccccaaaagtgaatgctttctgtgaatatt

SEQ ID NO: 116633 - DNA, 33 bp, Homo sapien
cctgttgcctggagaaatacaacagactcatat

SEQ ID NO: 116634 - DNA, 33 bp, Homo sapien
cctgttgcctggagaagtacaacagactcatat

SEQ ID NO: 116635 - DNA, 33 bp, Homo sapien
acatttgcaaggatacagaggtcaagacaggag

SEQ ID NO: 116636 - DNA, 33 bp, Homo sapien
acatttgcaaggatacggaggtcaagacaggag

SEQ ID NO: 116637 - DNA, 33 bp, Homo sapien
tgaatcttttataacacctcaaacatattctat

SEQ ID NO: 116638 - DNA, 33 bp, Homo sapien
tgaatcttttataacatctcaaacatattctat

SEQ ID NO: 116639 - DNA, 33 bp, Homo sapien
gtcctctgcagggcaccggtttaatgttggatg

SEQ ID NO: 116640 - DNA, 33 bp, Homo sapien
gtcctctgcagggcactggtttaatgttggatg

SEQ ID NO: 116641 - DNA, 33 bp, Homo sapien
tggggagacaggaccacgaggtaaggttaagta

SEQ ID NO: 116642 - DNA, 33 bp, Homo sapien
tggggagacaggaccatgaggtaaggttaagta

SEQ ID NO: 116643 - DNA, 33 bp, Homo sapien
taccataatgctttccacctttttcatattttg

SEQ ID NO: 116644 - DNA, 33 bp, Homo sapien
taccataatgctttccccctttttcatattttg

SEQ ID NO: 116645 - DNA, 33 bp, Homo sapien
cttactgaccaacatcacatggttatccctagc

SEQ ID NO: 116646 - DNA, 33 bp, Homo sapien
cttactgaccaacatcgcatggttatccctagc

SEQ ID NO: 116647 - DNA, 33 bp, Homo sapien
aatctggtataagcccacaaaagtctctagtta

SEQ ID NO: 116648 - DNA, 33 bp, Homo sapien
aatctggtataagccctcaaaagtctctagtta

SEQ ID NO: 116649 - DNA, 33 bp, Homo sapien
cttgcctgcagaaaaaataacgtgcttcttttt

SEQ ID NO: 116650 - DNA, 33 bp, Homo sapien
cttgcctgcagaaaaagtaacgtgcttcttttt

SEQ ID NO: 116651 - DNA, 33 bp, Homo sapien
agaactaccaagggacgctaagtggggtcctgc

SEQ ID NO: 116652 - DNA, 33 bp, Homo sapien
agaactaccaagggactctaagtggggtcctgc

SEQ ID NO: 116653 - DNA, 33 bp, Homo sapien
tttcattcgagaagaacgatttaacagccaaaa

SEQ ID NO: 116654 - DNA, 33 bp, Homo sapien
tttcattcgagaagaaggatttaacagccaaaa

SEQ ID NO: 116655 - DNA, 33 bp, Homo sapien
aaggtatttataagtactacctgtgccaaatgt

SEQ ID NO: 116656 - DNA, 33 bp, Homo sapien
aaggtatttataagtagtacctgtgccaaatgt

SEQ ID NO: 116657 - DNA, 33 bp, Homo sapien
gcaggttaaattataccaccagatttagtgggt

SEQ ID NO: 116658 - DNA, 33 bp, Homo sapien
gcaggttaaattatacgaccagatttagtgggt

SEQ ID NO: 116659 - DNA, 33 bp, Homo sapien
attgtgggccttgcaaactactatactgagtca

SEQ ID NO: 116660 - DNA, 33 bp, Homo sapien
attgtgggccttgcaatctactatactgagtca

SEQ ID NO: 116661 - DNA, 33 bp, Homo sapien
cgcataaaattaactgccacagtctataatgga

SEQ ID NO: 116662 - DNA, 33 bp, Homo sapien
cgcataaaattaactgtcacagtctataatgga

SEQ ID NO: 116663 - DNA, 33 bp, Homo sapien
aattatgaagtcaaataagtatcatgcatgagg

SEQ ID NO: 116664 - DNA, 33 bp, Homo sapien
aattatgaagtcaaatgagtatcatgcatgagg

SEQ ID NO: 116665 - DNA, 33 bp, Homo sapien
tcctgaaaaaaattcaagtactagagtgatcta

SEQ ID NO: 116666 - DNA, 33 bp, Homo sapien
tcctgaaaaaaattcatgtactagagtgatcta

SEQ ID NO: 116667 - DNA, 33 bp, Homo sapien
ttaatagttatcttaacgacagatgacagttta

SEQ ID NO: 116668 - DNA, 33 bp, Homo sapien
ttaatagttatcttaatgacagatgacagttta

SEQ ID NO: 116669 - DNA, 33 bp, Homo sapien
aaatgatacttatggcaatggttacagtcctct

SEQ ID NO: 116670 - DNA, 33 bp, Homo sapien
aaatgatacttatggcgatggttacagtcctct

SEQ ID NO: 116671 - DNA, 33 bp, Homo sapien
atgtctctaaaatgataaaaccatgttgcatga

SEQ ID NO: 116672 - DNA, 33 bp, Homo sapien
atgtctctaaaatgatgaaaccatgttgcatga

SEQ ID NO: 116673 - DNA, 33 bp, Homo sapien
atttatgctgcatagcaaatctccctaaaattt

SEQ ID NO: 116674 - DNA, 33 bp, Homo sapien
atttatgctgcatagccaatctccctaaaattt

SEQ ID NO: 116675 - DNA, 33 bp, Homo sapien
ctttcttaaatcactacaacctacaatcaacac

SEQ ID NO: 116676 - DNA, 33 bp, Homo sapien
ctttcttaaatcactataacctacaatcaacac

SEQ ID NO: 116677 - DNA, 33 bp, Homo sapien
gagtggtatcataataacttgtttaataaatct

SEQ ID NO: 116678 - DNA, 33 bp, Homo sapien
gagtggtatcataataccttgtttaataaatct

SEQ ID NO: 116679 - DNA, 33 bp, Homo sapien
attcattattgccaaaaatttctagaggacatg

SEQ ID NO: 116680 - DNA, 33 bp, Homo sapien
attcattattgccaaagatttctagaggacatg

SEQ ID NO: 116681 - DNA, 33 bp, Homo sapien
ttccacctctatgtcactctaaaatctaatcta

SEQ ID NO: 116682 - DNA, 33 bp, Homo sapien
ttccacctctatgtcagtctaaaatctaatcta

SEQ ID NO: 116683 - DNA, 33 bp, Homo sapien
aaacaaatgaattccaaagaaagttgcctactc

SEQ ID NO: 116684 - DNA, 33 bp, Homo sapien
aaacaaatgaattccagagaaagttgcctactc

SEQ ID NO: 116685 - DNA, 33 bp, Homo sapien
gtgtgtttgctacaaaagacaattattcttcag

SEQ ID NO: 116686 - DNA, 33 bp, Homo sapien
gtgtgtttgctacaaaggacaattattcttcag

SEQ ID NO: 116687 - DNA, 33 bp, Homo sapien
ctactattctttcaagccactaggcaaatgttc

SEQ ID NO: 116688 - DNA, 33 bp, Homo sapien
ctactattctttcaagtcactaggcaaatgttc

SEQ ID NO: 116689 - DNA, 33 bp, Homo sapien
gaaatggcaaagctacaggaacaataaaattcc

SEQ ID NO: 116690 - DNA, 33 bp, Homo sapien
gaaatggcaaagctacgggaacaataaaattcc

SEQ ID NO: 116691 - DNA, 33 bp, Homo sapien
ttagtcacaaaacctcaaccacatgacagaagg

SEQ ID NO: 116692 - DNA, 33 bp, Homo sapien
ttagtcacaaaacctcgaccacatgacagaagg

SEQ ID NO: 116693 - DNA, 33 bp, Homo sapien
cctgagtgtcccacaaaggaaagtgtggattct

SEQ ID NO: 116694 - DNA, 33 bp, Homo sapien
cctgagtgtcccacaacggaaagtgtggattct

SEQ ID NO: 116695 - DNA, 33 bp, Homo sapien
catcagtggtgaactaaactgggagattccctg

SEQ ID NO: 116696 - DNA, 33 bp, Homo sapien
catcagtggtgaactagactgggagattccctg

SEQ ID NO: 116697 - DNA, 33 bp, Homo sapien
cactcgcattgcctacaccatattagctgccca

SEQ ID NO: 116698 - DNA, 33 bp, Homo sapien
cactcgcattgcctacgccatattagctgccca

SEQ ID NO: 116699 - DNA, 33 bp, Homo sapien
ttgcttgggactcagaggtcaagtggaccagtc

SEQ ID NO: 116700 - DNA, 33 bp, Homo sapien
ttgcttgggactcagatgtcaagtggaccagtc

SEQ ID NO: 116701 - DNA, 33 bp, Homo sapien
agacagcaagcaccatcagaaaagcaaccatta

SEQ ID NO: 116702 - DNA, 33 bp, Homo sapien
agacagcaagcaccatgagaaaagcaaccatta

SEQ ID NO: 116703 - DNA, 33 bp, Homo sapien
taaatttgtacaaatgaacttcctttccctttt

SEQ ID NO: 116704 - DNA, 33 bp, Homo sapien
taaatttgtacaaatggacttcctttccctttt

SEQ ID NO: 116705 - DNA, 33 bp, Homo sapien
catttaatgactcaaagtccggcaatatatctt

SEQ ID NO: 116706 - DNA, 33 bp, Homo sapien
catttaatgactcaaattccggcaatatatctt

SEQ ID NO: 116707 - DNA, 33 bp, Homo sapien
gggaacaaggcaaggacgttcactctaacttct

SEQ ID NO: 116708 - DNA, 33 bp, Homo sapien
gggaacaaggcaaggatgttcactctaacttct

SEQ ID NO: 116709 - DNA, 33 bp, Homo sapien
tcaacccaatggagtgcagcaaggttatagtga

SEQ ID NO: 116710 - DNA, 33 bp, Homo sapien
tcaacccaatggagtgtagcaaggttatagtga

SEQ ID NO: 116711 - DNA, 33 bp, Homo sapien
agaactctctagaaaacggccagtaacttctgg

SEQ ID NO: 116712 - DNA, 33 bp, Homo sapien
agaactctctagaaaatggccagtaacttctgg

SEQ ID NO: 116713 - DNA, 33 bp, Homo sapien
tatcttccaaggaggccgccatgagacagttac

SEQ ID NO: 116714 - DNA, 33 bp, Homo sapien
tatcttccaaggaggctgccatgagacagttac

SEQ ID NO: 116715 - DNA, 33 bp, Homo sapien
tggctgtctattttggaagaaaaaaatgttaga

SEQ ID NO: 116716 - DNA, 33 bp, Homo sapien
tggctgtctattttggcagaaaaaaatgttaga

SEQ ID NO: 116717 - DNA, 33 bp, Homo sapien
aatggatctgattatacgttctgtactgttttc

SEQ ID NO: 116718 - DNA, 33 bp, Homo sapien
aatggatctgattatatgttctgtactgttttc

SEQ ID NO: 116719 - DNA, 33 bp, Homo sapien
caagagtcttattgacccactacccaagaagca

SEQ ID NO: 116720 - DNA, 33 bp, Homo sapien
caagagtcttattgacgcactacccaagaagca

SEQ ID NO: 116721 - DNA, 33 bp, Homo sapien
atttaatagcttggtcacaggaccactcaggtt

SEQ ID NO: 116722 - DNA, 33 bp, Homo sapien
atttaatagcttggtctcaggaccactcaggtt

SEQ ID NO: 116723 - DNA, 33 bp, Homo sapien
tatctcaggcagttacaaaatcaaaaattttct

SEQ ID NO: 116724 - DNA, 33 bp, Homo sapien
tatctcaggcagttacgaaatcaaaaattttct

SEQ ID NO: 116725 - DNA, 33 bp, Homo sapien
gaatagaggtgtaggaagtaaagacaacaaata

SEQ ID NO: 116726 - DNA, 33 bp, Homo sapien
gaatagaggtgtaggaggtaaagacaacaaata

SEQ ID NO: 116727 - DNA, 33 bp, Homo sapien
cattgtggtttatccaagaaaaattaatttgat

SEQ ID NO: 116728 - DNA, 33 bp, Homo sapien
cattgtggtttatccaggaaaaattaatttgat

SEQ ID NO: 116729 - DNA, 33 bp, Homo sapien
ggttaatagcttctgaataaaattttgataatc

SEQ ID NO: 116730 - DNA, 33 bp, Homo sapien
ggttaatagcttctgagtaaaattttgataatc

SEQ ID NO: 116731 - DNA, 33 bp, Homo sapien
ctattttcatgagttaaaacccaaaaacacaca

SEQ ID NO: 116732 - DNA, 33 bp, Homo sapien
ctattttcatgagttacaacccaaaaacacaca

SEQ ID NO: 116733 - DNA, 33 bp, Homo sapien
gtgtgtgtgtacataacgttggggagtatcaag

SEQ ID NO: 116734 - DNA, 33 bp, Homo sapien
gtgtgtgtgtacataatgttggggagtatcaag

SEQ ID NO: 116735 - DNA, 33 bp, Homo sapien
tcaatatcataacacaaaagtatctacgtaatt

SEQ ID NO: 116736 - DNA, 33 bp, Homo sapien
tcaatatcataacacacaagtatctacgtaatt

SEQ ID NO: 116737 - DNA, 33 bp, Homo sapien
atctgccagtgacccacgtgtaagaagtcataa

SEQ ID NO: 116738 - DNA, 33 bp, Homo sapien
atctgccagtgacccatgtgtaagaagtcataa

SEQ ID NO: 116739 - DNA, 33 bp, Homo sapien
atatgggaaatttcatgaaggtagagatattca

SEQ ID NO: 116740 - DNA, 33 bp, Homo sapien
atatgggaaatttcattaaggtagagatattca

SEQ ID NO: 116741 - DNA, 33 bp, Homo sapien
aagtaattctgtgacaaccagtctttgaaacct

SEQ ID NO: 116742 - DNA, 33 bp, Homo sapien
aagtaattctgtgacatccagtctttgaaacct

SEQ ID NO: 116743 - DNA, 33 bp, Homo sapien
taatcttacggtgaagccttactgagtcttaac

SEQ ID NO: 116744 - DNA, 33 bp, Homo sapien
taatcttacggtgaagtcttactgagtcttaac

SEQ ID NO: 116745 - DNA, 33 bp, Homo sapien
gtagaatagtggttaccaaggactgctggtaaa

SEQ ID NO: 116746 - DNA, 33 bp, Homo sapien
gtagaatagtggttactaaggactgctggtaaa

SEQ ID NO: 116747 - DNA, 33 bp, Homo sapien
catgtatctgattttacgagttgttgttgcaat

SEQ ID NO: 116748 - DNA, 33 bp, Homo sapien
catgtatctgattttatgagttgttgttgcaat

SEQ ID NO: 116749 - DNA, 33 bp, Homo sapien
tctctctgtctttcaccatgacctacataaagc

SEQ ID NO: 116750 - DNA, 33 bp, Homo sapien
tctctctgtctttcactatgacctacataaagc

SEQ ID NO: 116751 - DNA, 33 bp, Homo sapien
gaagtcctagcacataacaattaggaaaaagaa

SEQ ID NO: 116752 - DNA, 33 bp, Homo sapien
gaagtcctagcacatagcaattaggaaaaagaa

SEQ ID NO: 116753 - DNA, 33 bp, Homo sapien
attctgagaattcacaagttttcacaaatgatt

SEQ ID NO: 116754 - DNA, 33 bp, Homo sapien
attctgagaattcacacgttttcacaaatgatt

SEQ ID NO: 116755 - DNA, 33 bp, Homo sapien
aatataaactttgttaccataagctccatcaag

SEQ ID NO: 116756 - DNA, 33 bp, Homo sapien
aatataaactttgttatcataagctccatcaag

SEQ ID NO: 116757 - DNA, 33 bp, Homo sapien
tatcaggcatttaatcaatccttaactgatgat

SEQ ID NO: 116758 - DNA, 33 bp, Homo sapien
tatcaggcatttaatctatccttaactgatgat

SEQ ID NO: 116759 - DNA, 33 bp, Homo sapien
taactgatgattctgggaatttaaacatgccaa

SEQ ID NO: 116760 - DNA, 33 bp, Homo sapien
taactgatgattctggtaatttaaacatgccaa

SEQ ID NO: 116761 - DNA, 33 bp, Homo sapien
agaatgtctaagagcaaatagagactggaagta

SEQ ID NO: 116762 - DNA, 33 bp, Homo sapien
agaatgtctaagagcacatagagactggaagta

SEQ ID NO: 116763 - DNA, 33 bp, Homo sapien
atatatgatgcctcgaatacatctaaggttgta

SEQ ID NO: 116764 - DNA, 33 bp, Homo sapien
atatatgatgcctcgactacatctaaggttgta

SEQ ID NO: 116765 - DNA, 33 bp, Homo sapien
tttcttaattgtcaaaggatttttgctctgtgt

SEQ ID NO: 116766 - DNA, 33 bp, Homo sapien
tttcttaattgtcaaatgatttttgctctgtgt

SEQ ID NO: 116767 - DNA, 33 bp, Homo sapien
ttcctgggagttggaccatgtaaattagattga

SEQ ID NO: 116768 - DNA, 33 bp, Homo sapien
ttcctgggagttggactatgtaaattagattga

SEQ ID NO: 116769 - DNA, 33 bp, Homo sapien
tagctcttcaaatagaacctgccagatgctaaa

SEQ ID NO: 116770 - DNA, 33 bp, Homo sapien
tagctcttcaaatagaccctgccagatgctaaa

SEQ ID NO: 116771 - DNA, 33 bp, Homo sapien
agcagccagaaatgacaaagtcctgtctgttac

SEQ ID NO: 116772 - DNA, 33 bp, Homo sapien
agcagccagaaatgacgaagtcctgtctgttac

SEQ ID NO: 116773 - DNA, 33 bp, Homo sapien
tgtttactattcctaggattccatgcgtttctg

SEQ ID NO: 116774 - DNA, 33 bp, Homo sapien
tgtttactattcctagtattccatgcgtttctg

SEQ ID NO: 116775 - DNA, 33 bp, Homo sapien
cagaatcctgtagatgaagcataatatgcaaca

SEQ ID NO: 116776 - DNA, 33 bp, Homo sapien
cagaatcctgtagatggagcataatatgcaaca

SEQ ID NO: 116777 - DNA, 33 bp, Homo sapien
gattcaaaaggcagagacattactaataaaaat

SEQ ID NO: 116778 - DNA, 33 bp, Homo sapien
gattcaaaaggcagagccattactaataaaaat

SEQ ID NO: 116779 - DNA, 33 bp, Homo sapien
gacctgtgtgaaatcaagtggtttttaaaagtc

SEQ ID NO: 116780 - DNA, 33 bp, Homo sapien
gacctgtgtgaaatcaggtggtttttaaaagtc

SEQ ID NO: 116781 - DNA, 33 bp, Homo sapien
aaaggggaagaatgtcaccaaaggagaataaaa

SEQ ID NO: 116782 - DNA, 33 bp, Homo sapien
aaaggggaagaatgtcgccaaaggagaataaaa

SEQ ID NO: 116783 - DNA, 33 bp, Homo sapien
tgctcatgggttagaacaatcaatatcatgaaa

SEQ ID NO: 116784 - DNA, 33 bp, Homo sapien
tgctcatgggttagaagaatcaatatcatgaaa

SEQ ID NO: 116785 - DNA, 33 bp, Homo sapien
ttccaggtagtctgtacgtagaactaaaaactg

SEQ ID NO: 116786 - DNA, 33 bp, Homo sapien
ttccaggtagtctgtaggtagaactaaaaactg

SEQ ID NO: 116787 - DNA, 33 bp, Homo sapien
ccagtgggatttatggccagttgttgagatatt

SEQ ID NO: 116788 - DNA, 33 bp, Homo sapien
ccagtgggatttatggtcagttgttgagatatt

SEQ ID NO: 116789 - DNA, 33 bp, Homo sapien
tccccatgttggcaccaaatgacctctggctaa

SEQ ID NO: 116790 - DNA, 33 bp, Homo sapien
tccccatgttggcaccgaatgacctctggctaa

SEQ ID NO: 116791 - DNA, 33 bp, Homo sapien
gctattattcacctcaaaatcaccactcaaagg

SEQ ID NO: 116792 - DNA, 33 bp, Homo sapien
gctattattcacctcagaatcaccactcaaagg

SEQ ID NO: 116793 - DNA, 33 bp, Homo sapien
ttgttatgatgtcttccaagatagaagttgcca

SEQ ID NO: 116794 - DNA, 33 bp, Homo sapien
ttgttatgatgtcttcgaagatagaagttgcca

SEQ ID NO: 116795 - DNA, 33 bp, Homo sapien
tgccgataatgagtgaaacaaattggaagaaca

SEQ ID NO: 116796 - DNA, 33 bp, Homo sapien
tgccgataatgagtgagacaaattggaagaaca

SEQ ID NO: 116797 - DNA, 33 bp, Homo sapien
ccagcaaacagaatacccattttttcggtctcc

SEQ ID NO: 116798 - DNA, 33 bp, Homo sapien
ccagcaaacagaatactcattttttcggtctcc

SEQ ID NO: 116799 - DNA, 33 bp, Homo sapien
tttaagtagattaataacatgcttccagtcaca

SEQ ID NO: 116800 - DNA, 33 bp, Homo sapien
tttaagtagattaatagcatgcttccagtcaca

SEQ ID NO: 116801 - DNA, 33 bp, Homo sapien
aacatttattttagaaactgaaatctttgtgag

SEQ ID NO: 116802 - DNA, 33 bp, Homo sapien
aacatttattttagaacctgaaatctttgtgag

SEQ ID NO: 116803 - DNA, 33 bp, Homo sapien
ccactacttcagtcacaaatgcttttagattgg

SEQ ID NO: 116804 - DNA, 33 bp, Homo sapien
ccactacttcagtcacgaatgcttttagattgg

SEQ ID NO: 116805 - DNA, 33 bp, Homo sapien
ccattactgtttgtataaattaaggatcacttg

SEQ ID NO: 116806 - DNA, 33 bp, Homo sapien
ccattactgtttgtatgaattaaggatcacttg

SEQ ID NO: 116807 - DNA, 33 bp, Homo sapien
gtcctcatctaattccactgccacgcctgtact

SEQ ID NO: 116808 - DNA, 33 bp, Homo sapien
gtcctcatctaattccgctgccacgcctgtact

SEQ ID NO: 116809 - DNA, 33 bp, Homo sapien
tacttggacctgatgccaaaagaaggttcatgc

SEQ ID NO: 116810 - DNA, 33 bp, Homo sapien
tacttggacctgatgctaaaagaaggttcatgc

SEQ ID NO: 116811 - DNA, 33 bp, Homo sapien
ttatttgacattgtaaccttgatttggctgccc

SEQ ID NO: 116812 - DNA, 33 bp, Homo sapien
ttatttgacattgtaatcttgatttggctgccc

SEQ ID NO: 116813 - DNA, 33 bp, Homo sapien
aattattacaaagctaccgtatgggaaggcagt

SEQ ID NO: 116814 - DNA, 33 bp, Homo sapien
aattattacaaagctatcgtatgggaaggcagt

SEQ ID NO: 116815 - DNA, 33 bp, Homo sapien
attggctttgtcaaaaatatgtgataacacaga

SEQ ID NO: 116816 - DNA, 33 bp, Homo sapien
attggctttgtcaaaattatgtgataacacaga

SEQ ID NO: 116817 - DNA, 33 bp, Homo sapien
agtcccagttcttagaagagtttcaggtatatc

SEQ ID NO: 116818 - DNA, 33 bp, Homo sapien
agtcccagttcttagaggagtttcaggtatatc

SEQ ID NO: 116819 - DNA, 33 bp, Homo sapien
tcagttacaaaactgaactccttctaaataaaa

SEQ ID NO: 116820 - DNA, 33 bp, Homo sapien
tcagttacaaaactgagctccttctaaataaaa

SEQ ID NO: 116821 - DNA, 33 bp, Homo sapien
gggattagtggctttaagaaagaggtcccaagg

SEQ ID NO: 116822 - DNA, 33 bp, Homo sapien
gggattagtggctttatgaaagaggtcccaagg

SEQ ID NO: 116823 - DNA, 33 bp, Homo sapien
actgggagagtctttaaaaaacagagatgtctg

SEQ ID NO: 116824 - DNA, 33 bp, Homo sapien
actgggagagtctttacaaaacagagatgtctg

SEQ ID NO: 116825 - DNA, 33 bp, Homo sapien
agggttcatgtgattacattgatctcacctgga

SEQ ID NO: 116826 - DNA, 33 bp, Homo sapien
agggttcatgtgattatattgatctcacctgga

SEQ ID NO: 116827 - DNA, 33 bp, Homo sapien
tatctgtagtgaagaactagcactttgtaattt

SEQ ID NO: 116828 - DNA, 33 bp, Homo sapien
tatctgtagtgaagaattagcactttgtaattt

SEQ ID NO: 116829 - DNA, 33 bp, Homo sapien
tttaaaatcttcctatcaacttgggtcattgta

SEQ ID NO: 116830 - DNA, 33 bp, Homo sapien
tttaaaatcttcctattaacttgggtcattgta

SEQ ID NO: 116831 - DNA, 33 bp, Homo sapien
atagatgagggaactactaggtcagggagcaga

SEQ ID NO: 116832 - DNA, 33 bp, Homo sapien
atagatgagggaactagtaggtcagggagcaga

SEQ ID NO: 116833 - DNA, 33 bp, Homo sapien
aagtaagggtgtaatacggtcaatgttttgttt

SEQ ID NO: 116834 - DNA, 33 bp, Homo sapien
aagtaagggtgtaatatggtcaatgttttgttt

SEQ ID NO: 116835 - DNA, 33 bp, Homo sapien
ttcaaatgagaaatcacgaaatcctagactaag

SEQ ID NO: 116836 - DNA, 33 bp, Homo sapien
ttcaaatgagaaatcatgaaatcctagactaag

SEQ ID NO: 116837 - DNA, 33 bp, Homo sapien
aaggtcctcataagaaaagcattcaccatatta

SEQ ID NO: 116838 - DNA, 33 bp, Homo sapien
aaggtcctcataagaagagcattcaccatatta

SEQ ID NO: 116839 - DNA, 33 bp, Homo sapien
ggggactgagatcatacgtagccttaaatgttg

SEQ ID NO: 116840 - DNA, 33 bp, Homo sapien
ggggactgagatcatatgtagccttaaatgttg

SEQ ID NO: 116841 - DNA, 33 bp, Homo sapien
cattgccagatcttaaagttgtacataaatgtt

SEQ ID NO: 116842 - DNA, 33 bp, Homo sapien
cattgccagatcttaacgttgtacataaatgtt

SEQ ID NO: 116843 - DNA, 33 bp, Homo sapien
gacaggtgtgtcattaggctcagctagttttca

SEQ ID NO: 116844 - DNA, 33 bp, Homo sapien
gacaggtgtgtcattatgctcagctagttttca

SEQ ID NO: 116845 - DNA, 33 bp, Homo sapien
gcaaatgtggcttaaacaaacttttggaacaat

SEQ ID NO: 116846 - DNA, 33 bp, Homo sapien
gcaaatgtggcttaaataaacttttggaacaat

SEQ ID NO: 116847 - DNA, 33 bp, Homo sapien
tcctttaggtgccatcaagctttcagcagttgt

SEQ ID NO: 116848 - DNA, 33 bp, Homo sapien
tcctttaggtgccatcgagctttcagcagttgt

SEQ ID NO: 116849 - DNA, 33 bp, Homo sapien
gaaatcccttgaaataactctggcattatttca

SEQ ID NO: 116850 - DNA, 33 bp, Homo sapien
gaaatcccttgaaatatctctggcattatttca

SEQ ID NO: 116851 - DNA, 33 bp, Homo sapien
cgattggaaccaaagagaatatgctagcacagt

SEQ ID NO: 116852 - DNA, 33 bp, Homo sapien
cgattggaaccaaagataatatgctagcacagt

SEQ ID NO: 116853 - DNA, 33 bp, Homo sapien
atccttaatttttgtaagggctacctcattagc

SEQ ID NO: 116854 - DNA, 33 bp, Homo sapien
atccttaatttttgtaggggctacctcattagc

SEQ ID NO: 116855 - DNA, 33 bp, Homo sapien
ttcaatattcatttccacattatagatctttgc

SEQ ID NO: 116856 - DNA, 33 bp, Homo sapien
ttcaatattcatttcctcattatagatctttgc

SEQ ID NO: 116857 - DNA, 33 bp, Homo sapien
gaaaaaagctattatcaagcagttttgaaatcc

SEQ ID NO: 116858 - DNA, 33 bp, Homo sapien
gaaaaaagctattatctagcagttttgaaatcc

SEQ ID NO: 116859 - DNA, 33 bp, Homo sapien
ccccataaattagagaactgccaaatggctaag

SEQ ID NO: 116860 - DNA, 33 bp, Homo sapien
ccccataaattagagagctgccaaatggctaag

SEQ ID NO: 116861 - DNA, 33 bp, Homo sapien
ggtagtcataaacccaagtattcaaaaaataga

SEQ ID NO: 116862 - DNA, 33 bp, Homo sapien
ggtagtcataaacccaggtattcaaaaaataga

SEQ ID NO: 116863 - DNA, 33 bp, Homo sapien
ttttgtttcttgttcacggtgaaaggctgaaaa

SEQ ID NO: 116864 - DNA, 33 bp, Homo sapien
ttttgtttcttgttcatggtgaaaggctgaaaa

SEQ ID NO: 116865 - DNA, 33 bp, Homo sapien
accatccttccctttccaagatttgcagcacat

SEQ ID NO: 116866 - DNA, 33 bp, Homo sapien
accatccttccctttctaagatttgcagcacat

SEQ ID NO: 116867 - DNA, 33 bp, Homo sapien
atgaccagaagtattgcagagaccagggtaacc

SEQ ID NO: 116868 - DNA, 33 bp, Homo sapien
atgaccagaagtattgtagagaccagggtaacc

SEQ ID NO: 116869 - DNA, 33 bp, Homo sapien
tcaatggtagcagctaagcaccagtataatttg

SEQ ID NO: 116870 - DNA, 33 bp, Homo sapien
tcaatggtagcagctaggcaccagtataatttg

SEQ ID NO: 116871 - DNA, 33 bp, Homo sapien
gatagaaaatagcctacagttggcccttagtat

SEQ ID NO: 116872 - DNA, 33 bp, Homo sapien
gatagaaaatagcctatagttggcccttagtat

SEQ ID NO: 116873 - DNA, 33 bp, Homo sapien
gtgttacaatatctgaaacaaatatgcctgtga

SEQ ID NO: 116874 - DNA, 33 bp, Homo sapien
gtgttacaatatctgagacaaatatgcctgtga

SEQ ID NO: 116875 - DNA, 33 bp, Homo sapien
gaatactcatttgcaactgttatgtgagaaaaa

SEQ ID NO: 116876 - DNA, 33 bp, Homo sapien
gaatactcatttgcaattgttatgtgagaaaaa

SEQ ID NO: 116877 - DNA, 33 bp, Homo sapien
gcccttgactgatccacaataattatccaaaag

SEQ ID NO: 116878 - DNA, 33 bp, Homo sapien
gcccttgactgatccataataattatccaaaag

SEQ ID NO: 116879 - DNA, 33 bp, Homo sapien
agattgctgttgaataatagtgaatttaaatgc

SEQ ID NO: 116880 - DNA, 33 bp, Homo sapien
agattgctgttgaatagtagtgaatttaaatgc

SEQ ID NO: 116881 - DNA, 33 bp, Homo sapien
gaatttcatctctttaactctcttgtgtgtagt

SEQ ID NO: 116882 - DNA, 33 bp, Homo sapien
gaatttcatctctttatctctcttgtgtgtagt

SEQ ID NO: 116883 - DNA, 33 bp, Homo sapien
attttgatactactcacgactaatggtacatta

SEQ ID NO: 116884 - DNA, 33 bp, Homo sapien
attttgatactactcatgactaatggtacatta

SEQ ID NO: 116885 - DNA, 33 bp, Homo sapien
caaaatattccgtggccagtgttgcaaaagttt

SEQ ID NO: 116886 - DNA, 33 bp, Homo sapien
caaaatattccgtggctagtgttgcaaaagttt

SEQ ID NO: 116887 - DNA, 33 bp, Homo sapien
gttgcaatctccagaaaagaggaagaaagatag

SEQ ID NO: 116888 - DNA, 33 bp, Homo sapien
gttgcaatctccagaatagaggaagaaagatag

SEQ ID NO: 116889 - DNA, 33 bp, Homo sapien
taatagaaccattaaaagtacattgttaagact

SEQ ID NO: 116890 - DNA, 33 bp, Homo sapien
taatagaaccattaaaggtacattgttaagact

SEQ ID NO: 116891 - DNA, 33 bp, Homo sapien
tcccaatggcaaaaccaactttgttacgtctga

SEQ ID NO: 116892 - DNA, 33 bp, Homo sapien
tcccaatggcaaaaccgactttgttacgtctga

SEQ ID NO: 116893 - DNA, 33 bp, Homo sapien
attcaaaaaaacaaacaggaatgaggaggacag

SEQ ID NO: 116894 - DNA, 33 bp, Homo sapien
attcaaaaaaacaaacgggaatgaggaggacag

SEQ ID NO: 116895 - DNA, 33 bp, Homo sapien
gctctcctattttccacgagtctatcatagaca

SEQ ID NO: 116896 - DNA, 33 bp, Homo sapien
gctctcctattttccaggagtctatcatagaca

SEQ ID NO: 116897 - DNA, 33 bp, Homo sapien
ctgaatgatagagctaaatagaaagtactgtct

SEQ ID NO: 116898 - DNA, 33 bp, Homo sapien
ctgaatgatagagctacatagaaagtactgtct

SEQ ID NO: 116899 - DNA, 33 bp, Homo sapien
gtgtatttgagcgggaagtgatgcaaattctgg

SEQ ID NO: 116900 - DNA, 33 bp, Homo sapien
gtgtatttgagcgggaggtgatgcaaattctgg

SEQ ID NO: 116901 - DNA, 33 bp, Homo sapien
caataataaaaagcaactaagttctctttcaac

SEQ ID NO: 116902 - DNA, 33 bp, Homo sapien
caataataaaaagcaattaagttctctttcaac

SEQ ID NO: 116903 - DNA, 33 bp, Homo sapien
tataccttgatttcaactgggctgattttccac

SEQ ID NO: 116904 - DNA, 33 bp, Homo sapien
tataccttgatttcaattgggctgattttccac

SEQ ID NO: 116905 - DNA, 33 bp, Homo sapien
ctactgctaactctgacgagaaaaccttgattg

SEQ ID NO: 116906 - DNA, 33 bp, Homo sapien
ctactgctaactctgatgagaaaaccttgattg

SEQ ID NO: 116907 - DNA, 33 bp, Homo sapien
caaggacaatcacagacactttagagagagcaa

SEQ ID NO: 116908 - DNA, 33 bp, Homo sapien
caaggacaatcacagatactttagagagagcaa

SEQ ID NO: 116909 - DNA, 33 bp, Homo sapien
gaatatgaataagcataacacaaattgagaaat

SEQ ID NO: 116910 - DNA, 33 bp, Homo sapien
gaatatgaataagcatgacacaaattgagaaat

SEQ ID NO: 116911 - DNA, 33 bp, Homo sapien
atataaacaggcaatccgattcagaaggtctgt

SEQ ID NO: 116912 - DNA, 33 bp, Homo sapien
atataaacaggcaatctgattcagaaggtctgt

SEQ ID NO: 116913 - DNA, 33 bp, Homo sapien
gaaataaaaggacataagacagtaacttgaatt

SEQ ID NO: 116914 - DNA, 33 bp, Homo sapien
gaaataaaaggacatatgacagtaacttgaatt

SEQ ID NO: 116915 - DNA, 33 bp, Homo sapien
aaaaagcaaagtaaaacggaggaatggaggagc

SEQ ID NO: 116916 - DNA, 33 bp, Homo sapien
aaaaagcaaagtaaaatggaggaatggaggagc

SEQ ID NO: 116917 - DNA, 33 bp, Homo sapien
acaaatatcaaattggcagacgtatattctgcc

SEQ ID NO: 116918 - DNA, 33 bp, Homo sapien
acaaatatcaaattggtagacgtatattctgcc

SEQ ID NO: 116919 - DNA, 33 bp, Homo sapien
aattatcttgggcagactatgactctccaagtg

SEQ ID NO: 116920 - DNA, 33 bp, Homo sapien
aattatcttgggcagattatgactctccaagtg

SEQ ID NO: 116921 - DNA, 33 bp, Homo sapien
gaagatggtgaagccaagtctaaattcagcaaa

SEQ ID NO: 116922 - DNA, 33 bp, Homo sapien
gaagatggtgaagccacgtctaaattcagcaaa

SEQ ID NO: 116923 - DNA, 33 bp, Homo sapien
aatcaacgttccaaaaacaattcatgaaatgag

SEQ ID NO: 116924 - DNA, 33 bp, Homo sapien
aatcaacgttccaaaagcaattcatgaaatgag

SEQ ID NO: 116925 - DNA, 33 bp, Homo sapien
ttcatgtacctgttgggcacgtttatgtcttct

SEQ ID NO: 116926 - DNA, 33 bp, Homo sapien
ttcatgtacctgttggtcacgtttatgtcttct

SEQ ID NO: 116927 - DNA, 33 bp, Homo sapien
catctattataacatacctcaagtctctctcta

SEQ ID NO: 116928 - DNA, 33 bp, Homo sapien
catctattataacatagctcaagtctctctcta

SEQ ID NO: 116929 - DNA, 33 bp, Homo sapien
ataatttaatgagccaaaaacctaattttatgc

SEQ ID NO: 116930 - DNA, 33 bp, Homo sapien
ataatttaatgagccacaaacctaattttatgc

SEQ ID NO: 116931 - DNA, 33 bp, Homo sapien
agtcaggctctgtacacggttttagtgatatga

SEQ ID NO: 116932 - DNA, 33 bp, Homo sapien
agtcaggctctgtacatggttttagtgatatga

SEQ ID NO: 116933 - DNA, 33 bp, Homo sapien
agttttttctgaccaacgggttgttactttcag

SEQ ID NO: 116934 - DNA, 33 bp, Homo sapien
agttttttctgaccaatgggttgttactttcag

SEQ ID NO: 116935 - DNA, 33 bp, Homo sapien
acttagcagatctacaacttgtaatcattaagg

SEQ ID NO: 116936 - DNA, 33 bp, Homo sapien
acttagcagatctacagcttgtaatcattaagg

SEQ ID NO: 116937 - DNA, 33 bp, Homo sapien
ggatgatagcataatcacaaatggttaaatagc

SEQ ID NO: 116938 - DNA, 33 bp, Homo sapien
ggatgatagcataatcgcaaatggttaaatagc

SEQ ID NO: 116939 - DNA, 33 bp, Homo sapien
agcaactggaaagagaatagaaaagtgcattta

SEQ ID NO: 116940 - DNA, 33 bp, Homo sapien
agcaactggaaagagagtagaaaagtgcattta

SEQ ID NO: 116941 - DNA, 33 bp, Homo sapien
agaatagctgatagacagaaaactaacatgact

SEQ ID NO: 116942 - DNA, 33 bp, Homo sapien
agaatagctgatagacggaaaactaacatgact

SEQ ID NO: 116943 - DNA, 33 bp, Homo sapien
catagaggtggtttcccccatactgctctcatg

SEQ ID NO: 116944 - DNA, 33 bp, Homo sapien
catagaggtggtttcctccatactgctctcatg

SEQ ID NO: 116945 - DNA, 33 bp, Homo sapien
gattgctcttctagccaagactgaaataaaaaa

SEQ ID NO: 116946 - DNA, 33 bp, Homo sapien
gattgctcttctagccgagactgaaataaaaaa

SEQ ID NO: 116947 - DNA, 33 bp, Homo sapien
tgagtctcaggaacaaatgtaccttagaactcc

SEQ ID NO: 116948 - DNA, 33 bp, Homo sapien
tgagtctcaggaacaagtgtaccttagaactcc

SEQ ID NO: 116949 - DNA, 33 bp, Homo sapien
gaattgctaagaatagaccagaacacagtgccc

SEQ ID NO: 116950 - DNA, 33 bp, Homo sapien
gaattgctaagaataggccagaacacagtgccc

SEQ ID NO: 116951 - DNA, 33 bp, Homo sapien
gcctgggccattaatgaaaagactttaaaactc

SEQ ID NO: 116952 - DNA, 33 bp, Homo sapien
gcctgggccattaatgtaaagactttaaaactc

SEQ ID NO: 116953 - DNA, 33 bp, Homo sapien
tgaaaacaacataagaaacagtttatatgaact

SEQ ID NO: 116954 - DNA, 33 bp, Homo sapien
tgaaaacaacataagagacagtttatatgaact

SEQ ID NO: 116955 - DNA, 33 bp, Homo sapien
cactcctccacaactcaagaaggtcatttgtta

SEQ ID NO: 116956 - DNA, 33 bp, Homo sapien
cactcctccacaactcgagaaggtcatttgtta

SEQ ID NO: 116957 - DNA, 33 bp, Homo sapien
agcattttaggtgcaacaggtgtgtgataattt

SEQ ID NO: 116958 - DNA, 33 bp, Homo sapien
agcattttaggtgcaataggtgtgtgataattt

SEQ ID NO: 116959 - DNA, 33 bp, Homo sapien
agtacctgctaccctacacatacaatccactta

SEQ ID NO: 116960 - DNA, 33 bp, Homo sapien
agtacctgctaccctatacatacaatccactta

SEQ ID NO: 116961 - DNA, 33 bp, Homo sapien
ctacaaagtatctgtaaagctaaagcaattttg

SEQ ID NO: 116962 - DNA, 33 bp, Homo sapien
ctacaaagtatctgtacagctaaagcaattttg

SEQ ID NO: 116963 - DNA, 33 bp, Homo sapien
cagattagattgtaaacgccacaagtgtggaaa

SEQ ID NO: 116964 - DNA, 33 bp, Homo sapien
cagattagattgtaaatgccacaagtgtggaaa

SEQ ID NO: 116965 - DNA, 33 bp, Homo sapien
acactagtgcaaaatacattggaggatatggat

SEQ ID NO: 116966 - DNA, 33 bp, Homo sapien
acactagtgcaaaatagattggaggatatggat

SEQ ID NO: 116967 - DNA, 33 bp, Homo sapien
tactctgattgcagaaatatctgtaacacttta

SEQ ID NO: 116968 - DNA, 33 bp, Homo sapien
tactctgattgcagaactatctgtaacacttta

SEQ ID NO: 116969 - DNA, 33 bp, Homo sapien
caaggccatatgcaaaaatgttgcctctgtcta

SEQ ID NO: 116970 - DNA, 33 bp, Homo sapien
caaggccatatgcaaagatgttgcctctgtcta

SEQ ID NO: 116971 - DNA, 33 bp, Homo sapien
tgcagcacgaatatcagagcttccatatttgag

SEQ ID NO: 116972 - DNA, 33 bp, Homo sapien
tgcagcacgaatatcatagcttccatatttgag

SEQ ID NO: 116973 - DNA, 33 bp, Homo sapien
ttgtattttccaaggacgttgacattacatctt

SEQ ID NO: 116974 - DNA, 33 bp, Homo sapien
ttgtattttccaaggatgttgacattacatctt

SEQ ID NO: 116975 - DNA, 33 bp, Homo sapien
ttatcctgaatccttacgtaaacgtggtttaca

SEQ ID NO: 116976 - DNA, 33 bp, Homo sapien
ttatcctgaatccttatgtaaacgtggtttaca

SEQ ID NO: 116977 - DNA, 33 bp, Homo sapien
tctattggtgccagtaaacaaaccaagtattta

SEQ ID NO: 116978 - DNA, 33 bp, Homo sapien
tctattggtgccagtacacaaaccaagtattta

SEQ ID NO: 116979 - DNA, 33 bp, Homo sapien
tcaaatgatggatctacgtatgtacttggaagt

SEQ ID NO: 116980 - DNA, 33 bp, Homo sapien
tcaaatgatggatctatgtatgtacttggaagt

SEQ ID NO: 116981 - DNA, 33 bp, Homo sapien
ttaataaaatcttcccaagtagatctttaattg

SEQ ID NO: 116982 - DNA, 33 bp, Homo sapien
ttaataaaatcttcccgagtagatctttaattg

SEQ ID NO: 116983 - DNA, 33 bp, Homo sapien
actccctgcactgtgcaaagcctctaaaatctc

SEQ ID NO: 116984 - DNA, 33 bp, Homo sapien
actccctgcactgtgcgaagcctctaaaatctc

SEQ ID NO: 116985 - DNA, 33 bp, Homo sapien
agaattaaatacgttaagggacacattattgca

SEQ ID NO: 116986 - DNA, 33 bp, Homo sapien
agaattaaatacgttaggggacacattattgca

SEQ ID NO: 116987 - DNA, 33 bp, Homo sapien
aaaagacataagcaacacatctgtagcagccag

SEQ ID NO: 116988 - DNA, 33 bp, Homo sapien
aaaagacataagcaacgcatctgtagcagccag

SEQ ID NO: 116989 - DNA, 33 bp, Homo sapien
gtttcattaatacaaagctactagcacctaaca

SEQ ID NO: 116990 - DNA, 33 bp, Homo sapien
gtttcattaatacaaatctactagcacctaaca

SEQ ID NO: 116991 - DNA, 33 bp, Homo sapien
atagaaatggaatggcagcactaatatagggaa

SEQ ID NO: 116992 - DNA, 33 bp, Homo sapien
atagaaatggaatggcggcactaatatagggaa

SEQ ID NO: 116993 - DNA, 33 bp, Homo sapien
aaataaaataaagtagcaagacctctgtgatta

SEQ ID NO: 116994 - DNA, 33 bp, Homo sapien
aaataaaataaagtagtaagacctctgtgatta

SEQ ID NO: 116995 - DNA, 33 bp, Homo sapien
caagaaatgaagaatccgacttggagtaaaatc

SEQ ID NO: 116996 - DNA, 33 bp, Homo sapien
caagaaatgaagaatctgacttggagtaaaatc

SEQ ID NO: 116997 - DNA, 33 bp, Homo sapien
cagatatttgtttcaccaaaatgttcaatacat

SEQ ID NO: 116998 - DNA, 33 bp, Homo sapien
cagatatttgtttcactaaaatgttcaatacat

SEQ ID NO: 116999 - DNA, 33 bp, Homo sapien
gtcctttgagaatttccatacattgtacaagtt

SEQ ID NO: 117000 - DNA, 33 bp, Homo sapien
gtcctttgagaatttctatacattgtacaagtt

SEQ ID NO: 117001 - DNA, 33 bp, Homo sapien
atgtaaaactaggaaacccaaatgcaacaagtg

SEQ ID NO: 117002 - DNA, 33 bp, Homo sapien
atgtaaaactaggaaatccaaatgcaacaagtg

SEQ ID NO: 117003 - DNA, 33 bp, Homo sapien
acagaaataatgcacactccataatctcaaaca

SEQ ID NO: 117004 - DNA, 33 bp, Homo sapien
acagaaataatgcacattccataatctcaaaca

SEQ ID NO: 117005 - DNA, 33 bp, Homo sapien
ggtagaattacagcaaaggagaaaattaggcaa

SEQ ID NO: 117006 - DNA, 33 bp, Homo sapien
ggtagaattacagcaatggagaaaattaggcaa

SEQ ID NO: 117007 - DNA, 33 bp, Homo sapien
actcaaatactgatgaccgctataaagacacat

SEQ ID NO: 117008 - DNA, 33 bp, Homo sapien
actcaaatactgatgatcgctataaagacacat

SEQ ID NO: 117009 - DNA, 33 bp, Homo sapien
ttgagcaaccagtgacaaaaaagtatattaacg

SEQ ID NO: 117010 - DNA, 33 bp, Homo sapien
ttgagcaaccagtgacgaaaaagtatattaacg

SEQ ID NO: 117011 - DNA, 33 bp, Homo sapien
aagaacagagtaattcacactcatttcttagat

SEQ ID NO: 117012 - DNA, 33 bp, Homo sapien
aagaacagagtaattctcactcatttcttagat

SEQ ID NO: 117013 - DNA, 33 bp, Homo sapien
tcattaactatagcaggacctccacaaatccca

SEQ ID NO: 117014 - DNA, 33 bp, Homo sapien
tcattaactatagcagtacctccacaaatccca

SEQ ID NO: 117015 - DNA, 33 bp, Homo sapien
gggagaaaagttggaaatggacccagatcttat

SEQ ID NO: 117016 - DNA, 33 bp, Homo sapien
gggagaaaagttggaagtggacccagatcttat

SEQ ID NO: 117017 - DNA, 33 bp, Homo sapien
catttattgcctatacaagagcctgaaacgatg

SEQ ID NO: 117018 - DNA, 33 bp, Homo sapien
catttattgcctatacgagagcctgaaacgatg

SEQ ID NO: 117019 - DNA, 33 bp, Homo sapien
ccattgaaccaacacaactgaattttcaggggt

SEQ ID NO: 117020 - DNA, 33 bp, Homo sapien
ccattgaaccaacacacctgaattttcaggggt

SEQ ID NO: 117021 - DNA, 33 bp, Homo sapien
acaaagaaatataagacacagtttctgttttca

SEQ ID NO: 117022 - DNA, 33 bp, Homo sapien
acaaagaaatataagagacagtttctgttttca

SEQ ID NO: 117023 - DNA, 33 bp, Homo sapien
actagaggaataataaatcacccaggtaatgag

SEQ ID NO: 117024 - DNA, 33 bp, Homo sapien
actagaggaataataattcacccaggtaatgag

SEQ ID NO: 117025 - DNA, 33 bp, Homo sapien
caccactaattttaaaactatgcagattattgc

SEQ ID NO: 117026 - DNA, 33 bp, Homo sapien
caccactaattttaaacctatgcagattattgc

SEQ ID NO: 117027 - DNA, 33 bp, Homo sapien
cagtgaaagtaggctacagtctcaaacttgatt

SEQ ID NO: 117028 - DNA, 33 bp, Homo sapien
cagtgaaagtaggctatagtctcaaacttgatt

SEQ ID NO: 117029 - DNA, 33 bp, Homo sapien
tcctagaactctttagcattccaatggttaatt

SEQ ID NO: 117030 - DNA, 33 bp, Homo sapien
tcctagaactctttagtattccaatggttaatt

SEQ ID NO: 117031 - DNA, 33 bp, Homo sapien
cataggacaaaataaacgttgctagccaatctc

SEQ ID NO: 117032 - DNA, 33 bp, Homo sapien
cataggacaaaataaatgttgctagccaatctc

SEQ ID NO: 117033 - DNA, 33 bp, Homo sapien
ttagatgagcatagagaattcccaggaaaaatc

SEQ ID NO: 117034 - DNA, 33 bp, Homo sapien
ttagatgagcatagagcattcccaggaaaaatc

SEQ ID NO: 117035 - DNA, 33 bp, Homo sapien
atcacatccaaaggcgaaaaaatgttgacatca

SEQ ID NO: 117036 - DNA, 33 bp, Homo sapien
atcacatccaaaggcggaaaaatgttgacatca

SEQ ID NO: 117037 - DNA, 33 bp, Homo sapien
aaggattcattattaaatagctgcgtgtcaaag

SEQ ID NO: 117038 - DNA, 33 bp, Homo sapien
aaggattcattattaagtagctgcgtgtcaaag

SEQ ID NO: 117039 - DNA, 33 bp, Homo sapien
attatcttactttatccattctgcttaccttta

SEQ ID NO: 117040 - DNA, 33 bp, Homo sapien
attatcttactttatctattctgcttaccttta

SEQ ID NO: 117041 - DNA, 33 bp, Homo sapien
ataaagtaagataatggaagctgatttgtattt

SEQ ID NO: 117042 - DNA, 33 bp, Homo sapien
ataaagtaagataatgtaagctgatttgtattt

SEQ ID NO: 117043 - DNA, 33 bp, Homo sapien
attattataccactgccgcaaatgcaattgata

SEQ ID NO: 117044 - DNA, 33 bp, Homo sapien
attattataccactgctgcaaatgcaattgata

SEQ ID NO: 117045 - DNA, 33 bp, Homo sapien
acattctatcatctgaataagtcactccttaga

SEQ ID NO: 117046 - DNA, 33 bp, Homo sapien
acattctatcatctgagtaagtcactccttaga

SEQ ID NO: 117047 - DNA, 33 bp, Homo sapien
aaccaacaaatctgaaccagaccttaaactatg

SEQ ID NO: 117048 - DNA, 33 bp, Homo sapien
aaccaacaaatctgaatcagaccttaaactatg

SEQ ID NO: 117049 - DNA, 33 bp, Homo sapien
attattcagccataaaagaaaatcatgtcattc

SEQ ID NO: 117050 - DNA, 33 bp, Homo sapien
attattcagccataaaggaaaatcatgtcattc

SEQ ID NO: 117051 - DNA, 33 bp, Homo sapien
tactccgtaaataggtaaaacattgtatgtcaa

SEQ ID NO: 117052 - DNA, 33 bp, Homo sapien
tactccgtaaataggtgaaacattgtatgtcaa

SEQ ID NO: 117053 - DNA, 33 bp, Homo sapien
gctgtgccattatccccgggaagtgtggtcatg

SEQ ID NO: 117054 - DNA, 33 bp, Homo sapien
gctgtgccattatccctgggaagtgtggtcatg

SEQ ID NO: 117055 - DNA, 33 bp, Homo sapien
tgctgggttcaacagactagccatagtgagggc

SEQ ID NO: 117056 - DNA, 33 bp, Homo sapien
tgctgggttcaacagagtagccatagtgagggc

SEQ ID NO: 117057 - DNA, 33 bp, Homo sapien
atgctgaagataagagcagccaaaatgggaaat

SEQ ID NO: 117058 - DNA, 33 bp, Homo sapien
atgctgaagataagaggagccaaaatgggaaat

SEQ ID NO: 117059 - DNA, 33 bp, Homo sapien
tttgataatgtttttcaagtttgagaattataa

SEQ ID NO: 117060 - DNA, 33 bp, Homo sapien
tttgataatgtttttcgagtttgagaattataa

SEQ ID NO: 117061 - DNA, 33 bp, Homo sapien
aaaagataacagtttacgcagacatcctcctgg

SEQ ID NO: 117062 - DNA, 33 bp, Homo sapien
aaaagataacagtttatgcagacatcctcctgg

SEQ ID NO: 117063 - DNA, 33 bp, Homo sapien
tatgctaaccattataacaccaatgcaggatgc

SEQ ID NO: 117064 - DNA, 33 bp, Homo sapien
tatgctaaccattataccaccaatgcaggatgc

SEQ ID NO: 117065 - DNA, 33 bp, Homo sapien
ggtcctgtttagttccaaaagggagaaggcagc

SEQ ID NO: 117066 - DNA, 33 bp, Homo sapien
ggtcctgtttagttccgaaagggagaaggcagc

SEQ ID NO: 117067 - DNA, 33 bp, Homo sapien
aagatcagatggtcgcagatgtgtggccttatt

SEQ ID NO: 117068 - DNA, 33 bp, Homo sapien
aagatcagatggtcgccgatgtgtggccttatt

SEQ ID NO: 117069 - DNA, 33 bp, Homo sapien
gaattgccttctccatcatagtgtttgtggttt

SEQ ID NO: 117070 - DNA, 33 bp, Homo sapien
gaattgccttctccattatagtgtttgtggttt

SEQ ID NO: 117071 - DNA, 33 bp, Homo sapien
ttgtggggcctaatacaaaatgaaaatgtgagg

SEQ ID NO: 117072 - DNA, 33 bp, Homo sapien
ttgtggggcctaatacgaaatgaaaatgtgagg

SEQ ID NO: 117073 - DNA, 33 bp, Homo sapien
catgggctctttacacaccttcaaacatagctc

SEQ ID NO: 117074 - DNA, 33 bp, Homo sapien
catgggctctttacacgccttcaaacatagctc

SEQ ID NO: 117075 - DNA, 33 bp, Homo sapien
tttccagctattagaaactgacacggtattttt

SEQ ID NO: 117076 - DNA, 33 bp, Homo sapien
tttccagctattagaacctgacacggtattttt

SEQ ID NO: 117077 - DNA, 33 bp, Homo sapien
cttatttacatacttaaacacctctacctatat

SEQ ID NO: 117078 - DNA, 33 bp, Homo sapien
cttatttacatacttacacacctctacctatat

SEQ ID NO: 117079 - DNA, 33 bp, Homo sapien
gaagcagcagttgccaaagatgagagggtgtgg

SEQ ID NO: 117080 - DNA, 33 bp, Homo sapien
gaagcagcagttgccacagatgagagggtgtgg

SEQ ID NO: 117081 - DNA, 33 bp, Homo sapien
tacagagattgtgaaaataggagaatccttcaa

SEQ ID NO: 117082 - DNA, 33 bp, Homo sapien
tacagagattgtgaaagtaggagaatccttcaa

SEQ ID NO: 117083 - DNA, 33 bp, Homo sapien
tgttgccagtcacgaacgtcttactttatcagg

SEQ ID NO: 117084 - DNA, 33 bp, Homo sapien
tgttgccagtcacgaaggtcttactttatcagg

SEQ ID NO: 117085 - DNA, 33 bp, Homo sapien
ttatgtaatgacatacacaaaagttggtcagaa

SEQ ID NO: 117086 - DNA, 33 bp, Homo sapien
ttatgtaatgacatactcaaaagttggtcagaa

SEQ ID NO: 117087 - DNA, 33 bp, Homo sapien
gtaacacattcttttcaaggacacatggaaaat

SEQ ID NO: 117088 - DNA, 33 bp, Homo sapien
gtaacacattcttttcgaggacacatggaaaat

SEQ ID NO: 117089 - DNA, 33 bp, Homo sapien
aatcagtcatcattcaaaggtaactcttttttt

SEQ ID NO: 117090 - DNA, 33 bp, Homo sapien
aatcagtcatcattcataggtaactcttttttt

SEQ ID NO: 117091 - DNA, 33 bp, Homo sapien
agatcttcatctgcccaattcctgaactctttc

SEQ ID NO: 117092 - DNA, 33 bp, Homo sapien
agatcttcatctgcccgattcctgaactctttc

SEQ ID NO: 117093 - DNA, 33 bp, Homo sapien
aatagatctacgcaataagatagcaacacaata

SEQ ID NO: 117094 - DNA, 33 bp, Homo sapien
aatagatctacgcaatgagatagcaacacaata

SEQ ID NO: 117095 - DNA, 33 bp, Homo sapien
ttgactgacacagtagcccgcattagaattaag

SEQ ID NO: 117096 - DNA, 33 bp, Homo sapien
ttgactgacacagtagtccgcattagaattaag

SEQ ID NO: 117097 - DNA, 33 bp, Homo sapien
aatacacagaaaaacaaaaaagttatgggctat

SEQ ID NO: 117098 - DNA, 33 bp, Homo sapien
aatacacagaaaaacagaaaagttatgggctat

SEQ ID NO: 117099 - DNA, 33 bp, Homo sapien
tggtgagaggtgttatcaattcattggttactc

SEQ ID NO: 117100 - DNA, 33 bp, Homo sapien
tggtgagaggtgttattaattcattggttactc

SEQ ID NO: 117101 - DNA, 33 bp, Homo sapien
tagaagtagcattacactgggctcagagtatag

SEQ ID NO: 117102 - DNA, 33 bp, Homo sapien
tagaagtagcattacattgggctcagagtatag

SEQ ID NO: 117103 - DNA, 33 bp, Homo sapien
aaaacaacaggctcggaattatagctatgcaat

SEQ ID NO: 117104 - DNA, 33 bp, Homo sapien
aaaacaacaggctcgggattatagctatgcaat

SEQ ID NO: 117105 - DNA, 33 bp, Homo sapien
tatacaaaatctcactaagtagaacattaaagt

SEQ ID NO: 117106 - DNA, 33 bp, Homo sapien
tatacaaaatctcactgagtagaacattaaagt

SEQ ID NO: 117107 - DNA, 33 bp, Homo sapien
actcggaagaggacccaaagtagccacagtgca

SEQ ID NO: 117108 - DNA, 33 bp, Homo sapien
actcggaagaggaccccaagtagccacagtgca

SEQ ID NO: 117109 - DNA, 33 bp, Homo sapien
tgcctaatggtttggacctatagaagaatgaat

SEQ ID NO: 117110 - DNA, 33 bp, Homo sapien
tgcctaatggtttggatctatagaagaatgaat

SEQ ID NO: 117111 - DNA, 33 bp, Homo sapien
tctctcagaacggggcaaagacatacaggaaag

SEQ ID NO: 117112 - DNA, 33 bp, Homo sapien
tctctcagaacggggccaagacatacaggaaag

SEQ ID NO: 117113 - DNA, 33 bp, Homo sapien
aggccttgtcgattgacctgtttcattttggaa

SEQ ID NO: 117114 - DNA, 33 bp, Homo sapien
aggccttgtcgattgatctgtttcattttggaa

SEQ ID NO: 117115 - DNA, 33 bp, Homo sapien
ctacaaaatccatacaaaggaagaacagctgga

SEQ ID NO: 117116 - DNA, 33 bp, Homo sapien
ctacaaaatccatacagaggaagaacagctgga

SEQ ID NO: 117117 - DNA, 33 bp, Homo sapien
ttattggctgagcacactgatgggtggttgtat

SEQ ID NO: 117118 - DNA, 33 bp, Homo sapien
ttattggctgagcacattgatgggtggttgtat

SEQ ID NO: 117119 - DNA, 33 bp, Homo sapien
gactaagaagcattcaccttccccagcttctga

SEQ ID NO: 117120 - DNA, 33 bp, Homo sapien
gactaagaagcattcatcttccccagcttctga

SEQ ID NO: 117121 - DNA, 33 bp, Homo sapien
tctctttacataacagactaggatttgtggtgc

SEQ ID NO: 117122 - DNA, 33 bp, Homo sapien
tctctttacataacaggctaggatttgtggtgc

SEQ ID NO: 117123 - DNA, 33 bp, Homo sapien
atatcttattaaattcccaattgtctcaggcta

SEQ ID NO: 117124 - DNA, 33 bp, Homo sapien
atatcttattaaattctcaattgtctcaggcta

SEQ ID NO: 117125 - DNA, 33 bp, Homo sapien
gtgccaaacactgtgcgaacactcaaaaagcga

SEQ ID NO: 117126 - DNA, 33 bp, Homo sapien
gtgccaaacactgtgctaacactcaaaaagcga

SEQ ID NO: 117127 - DNA, 33 bp, Homo sapien
gttgcacaactggaacaatatgtgcaaatagca

SEQ ID NO: 117128 - DNA, 33 bp, Homo sapien
gttgcacaactggaactatatgtgcaaatagca

SEQ ID NO: 117129 - DNA, 33 bp, Homo sapien
actgatggagaagaaactctgaggagctattag

SEQ ID NO: 117130 - DNA, 33 bp, Homo sapien
actgatggagaagaaattctgaggagctattag

SEQ ID NO: 117131 - DNA, 33 bp, Homo sapien
gatagtaaattaccacggctaaactactaataa

SEQ ID NO: 117132 - DNA, 33 bp, Homo sapien
gatagtaaattaccactgctaaactactaataa

SEQ ID NO: 117133 - DNA, 33 bp, Homo sapien
aaaatgcttacatttacggaaaagtagaaggaa

SEQ ID NO: 117134 - DNA, 33 bp, Homo sapien
aaaatgcttacatttatggaaaagtagaaggaa

SEQ ID NO: 117135 - DNA, 33 bp, Homo sapien
tgattgcactatgaaactcttgtagtgtgtttt

SEQ ID NO: 117136 - DNA, 33 bp, Homo sapien
tgattgcactatgaaattcttgtagtgtgtttt

SEQ ID NO: 117137 - DNA, 33 bp, Homo sapien
gaacggatgaatgtaaagatttccacaggaatt

SEQ ID NO: 117138 - DNA, 33 bp, Homo sapien
gaacggatgaatgtaacgatttccacaggaatt

SEQ ID NO: 117139 - DNA, 33 bp, Homo sapien
tttgtttcataagtaacatagtttgtgagtatt

SEQ ID NO: 117140 - DNA, 33 bp, Homo sapien
tttgtttcataagtaatatagtttgtgagtatt

SEQ ID NO: 117141 - DNA, 33 bp, Homo sapien
catttttccagctcacaccctctcattctttga

SEQ ID NO: 117142 - DNA, 33 bp, Homo sapien
catttttccagctcacgccctctcattctttga

SEQ ID NO: 117143 - DNA, 33 bp, Homo sapien
ctgtcctaatgaaaaggattcttctctacttca

SEQ ID NO: 117144 - DNA, 33 bp, Homo sapien
ctgtcctaatgaaaagtattcttctctacttca

SEQ ID NO: 117145 - DNA, 33 bp, Homo sapien
atgctatggttagatactaagttaggacgtaga

SEQ ID NO: 117146 - DNA, 33 bp, Homo sapien
atgctatggttagatattaagttaggacgtaga

SEQ ID NO: 117147 - DNA, 33 bp, Homo sapien
gaatgagaagtcaccaataggaaaatttgtcag

SEQ ID NO: 117148 - DNA, 33 bp, Homo sapien
gaatgagaagtcaccagtaggaaaatttgtcag

SEQ ID NO: 117149 - DNA, 33 bp, Homo sapien
atttgagaaagctgggcaatagatatacagaaa

SEQ ID NO: 117150 - DNA, 33 bp, Homo sapien
atttgagaaagctgggtaatagatatacagaaa

SEQ ID NO: 117151 - DNA, 33 bp, Homo sapien
ttcttatcaaataggcaaaggggaataattgca

SEQ ID NO: 117152 - DNA, 33 bp, Homo sapien
ttcttatcaaataggcgaaggggaataattgca

SEQ ID NO: 117153 - DNA, 33 bp, Homo sapien
gcatggtagatcttaccgcatacttttacgttg

SEQ ID NO: 117154 - DNA, 33 bp, Homo sapien
gcatggtagatcttactgcatacttttacgttg

SEQ ID NO: 117155 - DNA, 33 bp, Homo sapien
tcaacctgtatctatcaacacataaataaatgg

SEQ ID NO: 117156 - DNA, 33 bp, Homo sapien
tcaacctgtatctatcgacacataaataaatgg

SEQ ID NO: 117157 - DNA, 33 bp, Homo sapien
gatgaaagctgcccagaaaccgggaacacacac

SEQ ID NO: 117158 - DNA, 33 bp, Homo sapien
gatgaaagctgcccagcaaccgggaacacacac

SEQ ID NO: 117159 - DNA, 33 bp, Homo sapien
tactgaattatcactacgtaaggcaatcacttg

SEQ ID NO: 117160 - DNA, 33 bp, Homo sapien
tactgaattatcactatgtaaggcaatcacttg

SEQ ID NO: 117161 - DNA, 33 bp, Homo sapien
ctagctgttaactgaactatgcacagaaaactg

SEQ ID NO: 117162 - DNA, 33 bp, Homo sapien
ctagctgttaactgaagtatgcacagaaaactg

SEQ ID NO: 117163 - DNA, 33 bp, Homo sapien
gacacacacgtacacaatcttccgtgggtttcc

SEQ ID NO: 117164 - DNA, 33 bp, Homo sapien
gacacacacgtacacactcttccgtgggtttcc

SEQ ID NO: 117165 - DNA, 33 bp, Homo sapien
aaagagattccaaaaacacagcttcctctaaat

SEQ ID NO: 117166 - DNA, 33 bp, Homo sapien
aaagagattccaaaaagacagcttcctctaaat

SEQ ID NO: 117167 - DNA, 33 bp, Homo sapien
aacagaagttttggtaagcagcagtgtacaatt

SEQ ID NO: 117168 - DNA, 33 bp, Homo sapien
aacagaagttttggtaggcagcagtgtacaatt

SEQ ID NO: 117169 - DNA, 33 bp, Homo sapien
caaagacttcattaccaaaacacccaaagcaat

SEQ ID NO: 117170 - DNA, 33 bp, Homo sapien
caaagacttcattacccaaacacccaaagcaat

SEQ ID NO: 117171 - DNA, 33 bp, Homo sapien
aaggtttagacgacacaggattctagaaattgt

SEQ ID NO: 117172 - DNA, 33 bp, Homo sapien
aaggtttagacgacacgggattctagaaattgt

SEQ ID NO: 117173 - DNA, 33 bp, Homo sapien
tattccatagtcccaacgcaacaaggttcctac

SEQ ID NO: 117174 - DNA, 33 bp, Homo sapien
tattccatagtcccaatgcaacaaggttcctac

SEQ ID NO: 117175 - DNA, 33 bp, Homo sapien
tggcattgaggatagacgggtaaattatatgtg

SEQ ID NO: 117176 - DNA, 33 bp, Homo sapien
tggcattgaggatagatgggtaaattatatgtg

SEQ ID NO: 117177 - DNA, 33 bp, Homo sapien
ctgtatctgctctaaccattagaagataagttt

SEQ ID NO: 117178 - DNA, 33 bp, Homo sapien
ctgtatctgctctaacgattagaagataagttt

SEQ ID NO: 117179 - DNA, 33 bp, Homo sapien
gatgcactaggatcgacgccaggttcagagaat

SEQ ID NO: 117180 - DNA, 33 bp, Homo sapien
gatgcactaggatcgatgccaggttcagagaat

SEQ ID NO: 117181 - DNA, 33 bp, Homo sapien
aaccttttacaagaaacgagattcagcaaatgc

SEQ ID NO: 117182 - DNA, 33 bp, Homo sapien
aaccttttacaagaaatgagattcagcaaatgc

SEQ ID NO: 117183 - DNA, 33 bp, Homo sapien
ttaaataatttaccacactaaagaacatcaagt

SEQ ID NO: 117184 - DNA, 33 bp, Homo sapien
ttaaataatttaccacgctaaagaacatcaagt

SEQ ID NO: 117185 - DNA, 33 bp, Homo sapien
gaagaaaatgtaaaaacatagagcctttagcaa

SEQ ID NO: 117186 - DNA, 33 bp, Homo sapien
gaagaaaatgtaaaaatatagagcctttagcaa

SEQ ID NO: 117187 - DNA, 33 bp, Homo sapien
ctctgtcctagtatctcaatcaagtcacttaac

SEQ ID NO: 117188 - DNA, 33 bp, Homo sapien
ctctgtcctagtatcttaatcaagtcacttaac

SEQ ID NO: 117189 - DNA, 33 bp, Homo sapien
ttttttcttcaagaaaccccactctatacataa

SEQ ID NO: 117190 - DNA, 33 bp, Homo sapien
ttttttcttcaagaaatcccactctatacataa

SEQ ID NO: 117191 - DNA, 33 bp, Homo sapien
cttcaataaagttcaacaactcctttctctcca

SEQ ID NO: 117192 - DNA, 33 bp, Homo sapien
cttcaataaagttcaataactcctttctctcca

SEQ ID NO: 117193 - DNA, 33 bp, Homo sapien
caacttctaatgccaccatagctctattttagg

SEQ ID NO: 117194 - DNA, 33 bp, Homo sapien
caacttctaatgccactatagctctattttagg

SEQ ID NO: 117195 - DNA, 33 bp, Homo sapien
gtttacaagcaatgtaactaattatctcatcag

SEQ ID NO: 117196 - DNA, 33 bp, Homo sapien
gtttacaagcaatgtagctaattatctcatcag

SEQ ID NO: 117197 - DNA, 33 bp, Homo sapien
acattctagcattaaaaagtgcattaagctatt

SEQ ID NO: 117198 - DNA, 33 bp, Homo sapien
acattctagcattaaagagtgcattaagctatt

SEQ ID NO: 117199 - DNA, 33 bp, Homo sapien
agggaaatggagatacacaattatcaaacagtc

SEQ ID NO: 117200 - DNA, 33 bp, Homo sapien
agggaaatggagatactcaattatcaaacagtc

SEQ ID NO: 117201 - DNA, 33 bp, Homo sapien
gaaagatacactgagaaaagatattggtataaa

SEQ ID NO: 117202 - DNA, 33 bp, Homo sapien
gaaagatacactgagagaagatattggtataaa

SEQ ID NO: 117203 - DNA, 33 bp, Homo sapien
aaaccagaaataattcaaatgttcatcagcaat

SEQ ID NO: 117204 - DNA, 33 bp, Homo sapien
aaaccagaaataattcgaatgttcatcagcaat

SEQ ID NO: 117205 - DNA, 33 bp, Homo sapien
gaagtcaggatagtgacagagtagtagctggta

SEQ ID NO: 117206 - DNA, 33 bp, Homo sapien
gaagtcaggatagtgagagagtagtagctggta

SEQ ID NO: 117207 - DNA, 33 bp, Homo sapien
taagtaggagtcataaccatattctaccatcag

SEQ ID NO: 117208 - DNA, 33 bp, Homo sapien
taagtaggagtcataatcatattctaccatcag

SEQ ID NO: 117209 - DNA, 33 bp, Homo sapien
gttagaagtgggtatcaatggaatcagtctgaa

SEQ ID NO: 117210 - DNA, 33 bp, Homo sapien
gttagaagtgggtatctatggaatcagtctgaa

SEQ ID NO: 117211 - DNA, 33 bp, Homo sapien
agatacgctggtttggaagcacaagtgagtcat

SEQ ID NO: 117212 - DNA, 33 bp, Homo sapien
agatacgctggtttgggagcacaagtgagtcat

SEQ ID NO: 117213 - DNA, 33 bp, Homo sapien
tgtcttgagagcattagggagacttaacaaaag

SEQ ID NO: 117214 - DNA, 33 bp, Homo sapien
tgtcttgagagcattatggagacttaacaaaag

SEQ ID NO: 117215 - DNA, 33 bp, Homo sapien
aaacatgaagaaagaaaatgcatagttggtagg

SEQ ID NO: 117216 - DNA, 33 bp, Homo sapien
aaacatgaagaaagaagatgcatagttggtagg

SEQ ID NO: 117217 - DNA, 33 bp, Homo sapien
ttccaggcaccttaccacagtcaggttaaggaa

SEQ ID NO: 117218 - DNA, 33 bp, Homo sapien
ttccaggcaccttaccgcagtcaggttaaggaa

SEQ ID NO: 117219 - DNA, 33 bp, Homo sapien
taatagcaaagaataactaaaatcccaaactta

SEQ ID NO: 117220 - DNA, 33 bp, Homo sapien
taatagcaaagaataattaaaatcccaaactta

SEQ ID NO: 117221 - DNA, 33 bp, Homo sapien
ataatatttagagaaaaaccatagctacagaag

SEQ ID NO: 117222 - DNA, 33 bp, Homo sapien
ataatatttagagaaagaccatagctacagaag

SEQ ID NO: 117223 - DNA, 33 bp, Homo sapien
attggaaggaatattaagaggttgaggaatgct

SEQ ID NO: 117224 - DNA, 33 bp, Homo sapien
attggaaggaatattaggaggttgaggaatgct

SEQ ID NO: 117225 - DNA, 33 bp, Homo sapien
tagatagacggttctcagacattgtaactgttc

SEQ ID NO: 117226 - DNA, 33 bp, Homo sapien
tagatagacggttctcggacattgtaactgttc

SEQ ID NO: 117227 - DNA, 33 bp, Homo sapien
gcctcataacaaccacactggatttttaaattt

SEQ ID NO: 117228 - DNA, 33 bp, Homo sapien
gcctcataacaaccacgctggatttttaaattt

SEQ ID NO: 117229 - DNA, 33 bp, Homo sapien
gccacagaagcgccaacttctgtcgatgggcaa

SEQ ID NO: 117230 - DNA, 33 bp, Homo sapien
gccacagaagcgccaagttctgtcgatgggcaa

SEQ ID NO: 117231 - DNA, 33 bp, Homo sapien
gatttttctttgctcaccatggagagagctaaa

SEQ ID NO: 117232 - DNA, 33 bp, Homo sapien
gatttttctttgctcatcatggagagagctaaa

SEQ ID NO: 117233 - DNA, 33 bp, Homo sapien
ctagttgtttgcactccagtatgtagaaagagc

SEQ ID NO: 117234 - DNA, 33 bp, Homo sapien
ctagttgtttgcactctagtatgtagaaagagc

SEQ ID NO: 117235 - DNA, 33 bp, Homo sapien
cattttatctgacaccacaagtcattccaagag

SEQ ID NO: 117236 - DNA, 33 bp, Homo sapien
cattttatctgacaccgcaagtcattccaagag

SEQ ID NO: 117237 - DNA, 33 bp, Homo sapien
agatcattttatctcaatacatcagaatggccc

SEQ ID NO: 117238 - DNA, 33 bp, Homo sapien
agatcattttatctcagtacatcagaatggccc

SEQ ID NO: 117239 - DNA, 33 bp, Homo sapien
agagtggtggtcagaacggtgtctagaaagagg

SEQ ID NO: 117240 - DNA, 33 bp, Homo sapien
agagtggtggtcagaatggtgtctagaaagagg

SEQ ID NO: 117241 - DNA, 33 bp, Homo sapien
cacatttctggagacccggaagtccaagatcag

SEQ ID NO: 117242 - DNA, 33 bp, Homo sapien
cacatttctggagaccgggaagtccaagatcag

SEQ ID NO: 117243 - DNA, 33 bp, Homo sapien
caaaacccctctggcaagcaatttggcaatatt

SEQ ID NO: 117244 - DNA, 33 bp, Homo sapien
caaaacccctctggcaggcaatttggcaatatt

SEQ ID NO: 117245 - DNA, 33 bp, Homo sapien
ttagatgacttaatcaatccttcttccctcgga

SEQ ID NO: 117246 - DNA, 33 bp, Homo sapien
ttagatgacttaatcagtccttcttccctcgga

SEQ ID NO: 117247 - DNA, 33 bp, Homo sapien
ttcttcctgttaattcaaagctcactgtgcctc

SEQ ID NO: 117248 - DNA, 33 bp, Homo sapien
ttcttcctgttaattcgaagctcactgtgcctc

SEQ ID NO: 117249 - DNA, 33 bp, Homo sapien
aaaaggcctacaggaaatcaacgtaatggagat

SEQ ID NO: 117250 - DNA, 33 bp, Homo sapien
aaaaggcctacaggaagtcaacgtaatggagat

SEQ ID NO: 117251 - DNA, 33 bp, Homo sapien
ctttgaccctgaaatacgtgttcctcccagtca

SEQ ID NO: 117252 - DNA, 33 bp, Homo sapien
ctttgaccctgaaatatgtgttcctcccagtca

SEQ ID NO: 117253 - DNA, 33 bp, Homo sapien
agtagagttaagttcaatcagtgggtggattct

SEQ ID NO: 117254 - DNA, 33 bp, Homo sapien
agtagagttaagttcattcagtgggtggattct

SEQ ID NO: 117255 - DNA, 33 bp, Homo sapien
gtgtgacaactagaaaagtctttgaaatgtcaa

SEQ ID NO: 117256 - DNA, 33 bp, Homo sapien
gtgtgacaactagaaatgtctttgaaatgtcaa

SEQ ID NO: 117257 - DNA, 33 bp, Homo sapien
gctgagaccataggcacgtaccatatacctagc

SEQ ID NO: 117258 - DNA, 33 bp, Homo sapien
gctgagaccataggcatgtaccatatacctagc

SEQ ID NO: 117259 - DNA, 33 bp, Homo sapien
gtttacttgtgaactcaatagagcaaggaaacc

SEQ ID NO: 117260 - DNA, 33 bp, Homo sapien
gtttacttgtgaactcgatagagcaaggaaacc

SEQ ID NO: 117261 - DNA, 33 bp, Homo sapien
ttgtgttaaagaatcaaaagtttagcgtaacag

SEQ ID NO: 117262 - DNA, 33 bp, Homo sapien
ttgtgttaaagaatcagaagtttagcgtaacag

SEQ ID NO: 117263 - DNA, 33 bp, Homo sapien
tccttgggttccaaggaatctgaacaaaattta

SEQ ID NO: 117264 - DNA, 33 bp, Homo sapien
tccttgggttccaaggcatctgaacaaaattta

SEQ ID NO: 117265 - DNA, 33 bp, Homo sapien
taacagggtaccagaaatggctcatttgtggca

SEQ ID NO: 117266 - DNA, 33 bp, Homo sapien
taacagggtaccagaattggctcatttgtggca

SEQ ID NO: 117267 - DNA, 33 bp, Homo sapien
ttttcctgtaagatcaagaataaggatgcctgc

SEQ ID NO: 117268 - DNA, 33 bp, Homo sapien
ttttcctgtaagatcaggaataaggatgcctgc

SEQ ID NO: 117269 - DNA, 33 bp, Homo sapien
ttctcacaaaggcatgcatttttaaaactgctt

SEQ ID NO: 117270 - DNA, 33 bp, Homo sapien
ttctcacaaaggcatgtatttttaaaactgctt

SEQ ID NO: 117271 - DNA, 33 bp, Homo sapien
gcaaatatacacagtgaaaaatttagccaactg

SEQ ID NO: 117272 - DNA, 33 bp, Homo sapien
gcaaatatacacagtgcaaaatttagccaactg

SEQ ID NO: 117273 - DNA, 33 bp, Homo sapien
attatttctatcttcaaccttcctaccatggcc

SEQ ID NO: 117274 - DNA, 33 bp, Homo sapien
attatttctatcttcatccttcctaccatggcc

SEQ ID NO: 117275 - DNA, 33 bp, Homo sapien
tatttgcataagcaaacgcgctgcttatcaaga

SEQ ID NO: 117276 - DNA, 33 bp, Homo sapien
tatttgcataagcaaatgcgctgcttatcaaga

SEQ ID NO: 117277 - DNA, 33 bp, Homo sapien
ttacttcagagactaactggaagtgaataattt

SEQ ID NO: 117278 - DNA, 33 bp, Homo sapien
ttacttcagagactaattggaagtgaataattt

SEQ ID NO: 117279 - DNA, 33 bp, Homo sapien
acacctcttattagcacctgtggacgaaccctt

SEQ ID NO: 117280 - DNA, 33 bp, Homo sapien
acacctcttattagcatctgtggacgaaccctt

SEQ ID NO: 117281 - DNA, 33 bp, Homo sapien
tgatgtactataaccaaagtgttcacaattact

SEQ ID NO: 117282 - DNA, 33 bp, Homo sapien
tgatgtactataaccagagtgttcacaattact

SEQ ID NO: 117283 - DNA, 33 bp, Homo sapien
aatgttatagtagtttcaaaagcatttggtcaa

SEQ ID NO: 117284 - DNA, 33 bp, Homo sapien
aatgttatagtagttttaaaagcatttggtcaa

SEQ ID NO: 117285 - DNA, 33 bp, Homo sapien
cactactctctcatctaactttcagtcctgcat

SEQ ID NO: 117286 - DNA, 33 bp, Homo sapien
cactactctctcatctgactttcagtcctgcat

SEQ ID NO: 117287 - DNA, 33 bp, Homo sapien
aaaaacaatcggtaaccgtcactctgactttaa

SEQ ID NO: 117288 - DNA, 33 bp, Homo sapien
aaaaacaatcggtaactgtcactctgactttaa

SEQ ID NO: 117289 - DNA, 33 bp, Homo sapien
aaagcgtgtataatcaagtatttgcatgacata

SEQ ID NO: 117290 - DNA, 33 bp, Homo sapien
aaagcgtgtataatcaggtatttgcatgacata

SEQ ID NO: 117291 - DNA, 33 bp, Homo sapien
ctttccagtgttcccaaatggtacccatgcatc

SEQ ID NO: 117292 - DNA, 33 bp, Homo sapien
ctttccagtgttcccagatggtacccatgcatc

SEQ ID NO: 117293 - DNA, 33 bp, Homo sapien
aacttctaagcgttcacatatgtaaaacacctg

SEQ ID NO: 117294 - DNA, 33 bp, Homo sapien
aacttctaagcgttcatatatgtaaaacacctg

SEQ ID NO: 117295 - DNA, 33 bp, Homo sapien
ggtcaacgtttgtaaaatatcatcaaaccaaga

SEQ ID NO: 117296 - DNA, 33 bp, Homo sapien
ggtcaacgtttgtaaagtatcatcaaaccaaga

SEQ ID NO: 117297 - DNA, 33 bp, Homo sapien
gtacaagaatccaagcaaaacacaagtgccatc

SEQ ID NO: 117298 - DNA, 33 bp, Homo sapien
gtacaagaatccaagcgaaacacaagtgccatc

SEQ ID NO: 117299 - DNA, 33 bp, Homo sapien
gatgcagggaagacacagtacctaggaagattt

SEQ ID NO: 117300 - DNA, 33 bp, Homo sapien
gatgcagggaagacacggtacctaggaagattt

SEQ ID NO: 117301 - DNA, 33 bp, Homo sapien
tgcccactgctataaacgtgagttgaaaggata

SEQ ID NO: 117302 - DNA, 33 bp, Homo sapien
tgcccactgctataaatgtgagttgaaaggata

SEQ ID NO: 117303 - DNA, 33 bp, Homo sapien
ctattcctcctaaagacactctgaagtcacaaa

SEQ ID NO: 117304 - DNA, 33 bp, Homo sapien
ctattcctcctaaagatactctgaagtcacaaa

SEQ ID NO: 117305 - DNA, 33 bp, Homo sapien
agccagctctttctcacgaaactttgtagaaaa

SEQ ID NO: 117306 - DNA, 33 bp, Homo sapien
agccagctctttctcatgaaactttgtagaaaa

SEQ ID NO: 117307 - DNA, 33 bp, Homo sapien
tacagtccagctgcgcaacagaacaagaatctg

SEQ ID NO: 117308 - DNA, 33 bp, Homo sapien
tacagtccagctgcgcgacagaacaagaatctg

SEQ ID NO: 117309 - DNA, 33 bp, Homo sapien
aagacatttttttcagaccatgaattccagcaa

SEQ ID NO: 117310 - DNA, 33 bp, Homo sapien
aagacatttttttcaggccatgaattccagcaa

SEQ ID NO: 117311 - DNA, 33 bp, Homo sapien
gggaaaatgcttgtcaaaaacagatcatcatct

SEQ ID NO: 117312 - DNA, 33 bp, Homo sapien
gggaaaatgcttgtcagaaacagatcatcatct

SEQ ID NO: 117313 - DNA, 33 bp, Homo sapien
aaaagtctttatgagaaaagcacagaagtactt

SEQ ID NO: 117314 - DNA, 33 bp, Homo sapien
aaaagtctttatgagagaagcacagaagtactt

SEQ ID NO: 117315 - DNA, 33 bp, Homo sapien
aagataaatccacacccgacacacccatgaaaa

SEQ ID NO: 117316 - DNA, 33 bp, Homo sapien
aagataaatccacacctgacacacccatgaaaa

SEQ ID NO: 117317 - DNA, 33 bp, Homo sapien
tatataacacaattgcaaattactatatatcca

SEQ ID NO: 117318 - DNA, 33 bp, Homo sapien
tatataacacaattgcgaattactatatatcca

SEQ ID NO: 117319 - DNA, 33 bp, Homo sapien
tgtaattaaccaactgcaataattctcagaata

SEQ ID NO: 117320 - DNA, 33 bp, Homo sapien
tgtaattaaccaactgtaataattctcagaata

SEQ ID NO: 117321 - DNA, 33 bp, Homo sapien
tcccaaatttcatttacgcagcttggatttcat

SEQ ID NO: 117322 - DNA, 33 bp, Homo sapien
tcccaaatttcatttatgcagcttggatttcat

SEQ ID NO: 117323 - DNA, 33 bp, Homo sapien
gcttgctttgtatcaggatattacgtatctgaa

SEQ ID NO: 117324 - DNA, 33 bp, Homo sapien
gcttgctttgtatcagtatattacgtatctgaa

SEQ ID NO: 117325 - DNA, 33 bp, Homo sapien
atttccttccgtgacacaccatactggtctttc

SEQ ID NO: 117326 - DNA, 33 bp, Homo sapien
atttccttccgtgacataccatactggtctttc

SEQ ID NO: 117327 - DNA, 33 bp, Homo sapien
tcaagtaaggtaagaacggataaatgacaatta

SEQ ID NO: 117328 - DNA, 33 bp, Homo sapien
tcaagtaaggtaagaatggataaatgacaatta

SEQ ID NO: 117329 - DNA, 33 bp, Homo sapien
aatggctttgccaaaacaatgctataggaagtt

SEQ ID NO: 117330 - DNA, 33 bp, Homo sapien
aatggctttgccaaaataatgctataggaagtt

SEQ ID NO: 117331 - DNA, 33 bp, Homo sapien
ggggcatcgagagaaaagaagagtctgaataaa

SEQ ID NO: 117332 - DNA, 33 bp, Homo sapien
ggggcatcgagagaaacgaagagtctgaataaa

SEQ ID NO: 117333 - DNA, 33 bp, Homo sapien
cttcccagcctaacaaccgtaaagtgtttccat

SEQ ID NO: 117334 - DNA, 33 bp, Homo sapien
cttcccagcctaacaatcgtaaagtgtttccat

SEQ ID NO: 117335 - DNA, 33 bp, Homo sapien
tcttagatgatgtgaacgaaacactgtaatgcc

SEQ ID NO: 117336 - DNA, 33 bp, Homo sapien
tcttagatgatgtgaatgaaacactgtaatgcc

SEQ ID NO: 117337 - DNA, 33 bp, Homo sapien
gaagagattaaactgtaaaggaagcagacacta

SEQ ID NO: 117338 - DNA, 33 bp, Homo sapien
gaagagattaaactgtgaaggaagcagacacta

SEQ ID NO: 117339 - DNA, 33 bp, Homo sapien
cagcacttggtgaacacagaaactctaataaat

SEQ ID NO: 117340 - DNA, 33 bp, Homo sapien
cagcacttggtgaacatagaaactctaataaat

SEQ ID NO: 117341 - DNA, 33 bp, Homo sapien
ttatggaatctgcacacatttttgaaataaatg

SEQ ID NO: 117342 - DNA, 33 bp, Homo sapien
ttatggaatctgcacatatttttgaaataaatg

SEQ ID NO: 117343 - DNA, 33 bp, Homo sapien
atgtgaggattatccacgtgaaactgcccttac

SEQ ID NO: 117344 - DNA, 33 bp, Homo sapien
atgtgaggattatccaggtgaaactgcccttac

SEQ ID NO: 117345 - DNA, 33 bp, Homo sapien
ccttacacacatatcacccaacgctggattccc

SEQ ID NO: 117346 - DNA, 33 bp, Homo sapien
ccttacacacatatcatccaacgctggattccc

SEQ ID NO: 117347 - DNA, 33 bp, Homo sapien
atctgtgaagtacagtaaagtgagaagcagtaa

SEQ ID NO: 117348 - DNA, 33 bp, Homo sapien
atctgtgaagtacagtgaagtgagaagcagtaa

SEQ ID NO: 117349 - DNA, 33 bp, Homo sapien
tggcaacaattcaaaagttcaacattatgatac

SEQ ID NO: 117350 - DNA, 33 bp, Homo sapien
tggcaacaattcaaaatttcaacattatgatac

SEQ ID NO: 117351 - DNA, 33 bp, Homo sapien
tcttcttgtatgtgtccatcagagctcttgggt

SEQ ID NO: 117352 - DNA, 33 bp, Homo sapien
tcttcttgtatgtgtctatcagagctcttgggt

SEQ ID NO: 117353 - DNA, 33 bp, Homo sapien
ctgcctacactgaagtaaatttccctggaatct

SEQ ID NO: 117354 - DNA, 33 bp, Homo sapien
ctgcctacactgaagtgaatttccctggaatct

SEQ ID NO: 117355 - DNA, 33 bp, Homo sapien
gcttaaccattgcgtgaataaaccaagcccttc

SEQ ID NO: 117356 - DNA, 33 bp, Homo sapien
gcttaaccattgcgtggataaaccaagcccttc

SEQ ID NO: 117357 - DNA, 33 bp, Homo sapien
cactctggaattactccgaaccacttgattctg

SEQ ID NO: 117358 - DNA, 33 bp, Homo sapien
cactctggaattactctgaaccacttgattctg

SEQ ID NO: 117359 - DNA, 33 bp, Homo sapien
tttgttggtcctccaaagtgtgtttcccaaatg

SEQ ID NO: 117360 - DNA, 33 bp, Homo sapien
tttgttggtcctccaaggtgtgtttcccaaatg

SEQ ID NO: 117361 - DNA, 33 bp, Homo sapien
tgcaatacgtgtaagcaccaaatgccttaccac

SEQ ID NO: 117362 - DNA, 33 bp, Homo sapien
tgcaatacgtgtaagccccaaatgccttaccac

SEQ ID NO: 117363 - DNA, 33 bp, Homo sapien
aggaagctgagaataaacagaactccagatctc

SEQ ID NO: 117364 - DNA, 33 bp, Homo sapien
aggaagctgagaataagcagaactccagatctc

SEQ ID NO: 117365 - DNA, 33 bp, Homo sapien
cagggatccagggtgacagaaaccaatcaggga

SEQ ID NO: 117366 - DNA, 33 bp, Homo sapien
cagggatccagggtgagagaaaccaatcaggga

SEQ ID NO: 117367 - DNA, 33 bp, Homo sapien
ctgctctggcactgccgactgaaaaaaccactt

SEQ ID NO: 117368 - DNA, 33 bp, Homo sapien
ctgctctggcactgcctactgaaaaaaccactt

SEQ ID NO: 117369 - DNA, 33 bp, Homo sapien
attctaggctgatgggaacattctatatcttga

SEQ ID NO: 117370 - DNA, 33 bp, Homo sapien
attctaggctgatggggacattctatatcttga

SEQ ID NO: 117371 - DNA, 33 bp, Homo sapien
tcacacatttatcatacgttcatacaacacaga

SEQ ID NO: 117372 - DNA, 33 bp, Homo sapien
tcacacatttatcatatgttcatacaacacaga

SEQ ID NO: 117373 - DNA, 33 bp, Homo sapien
atgagactgtccagttaaaaaggtatcagataa

SEQ ID NO: 117374 - DNA, 33 bp, Homo sapien
atgagactgtccagttgaaaaggtatcagataa

SEQ ID NO: 117375 - DNA, 33 bp, Homo sapien
agtaatgtgttggtaacaaacagattagttaat

SEQ ID NO: 117376 - DNA, 33 bp, Homo sapien
agtaatgtgttggtaataaacagattagttaat

SEQ ID NO: 117377 - DNA, 33 bp, Homo sapien
atcatgggacaatgcacatttaaaagttattga

SEQ ID NO: 117378 - DNA, 33 bp, Homo sapien
atcatgggacaatgcatatttaaaagttattga

SEQ ID NO: 117379 - DNA, 33 bp, Homo sapien
gctctcaagggactcacgctaactgtggagacc

SEQ ID NO: 117380 - DNA, 33 bp, Homo sapien
gctctcaagggactcatgctaactgtggagacc

SEQ ID NO: 117381 - DNA, 33 bp, Homo sapien
aggcaggttacatacaatagactcacatctcat

SEQ ID NO: 117382 - DNA, 33 bp, Homo sapien
aggcaggttacatacagtagactcacatctcat

SEQ ID NO: 117383 - DNA, 33 bp, Homo sapien
tagaaaaactgtgaaaaactcgggcgtggtggc

SEQ ID NO: 117384 - DNA, 33 bp, Homo sapien
tagaaaaactgtgaaatactcgggcgtggtggc

SEQ ID NO: 117385 - DNA, 33 bp, Homo sapien
tatttatttttggtacaactatggtccctagtt

SEQ ID NO: 117386 - DNA, 33 bp, Homo sapien
tatttatttttggtacgactatggtccctagtt

SEQ ID NO: 117387 - DNA, 33 bp, Homo sapien
atggactaatacaagcagaaacatagctccctc

SEQ ID NO: 117388 - DNA, 33 bp, Homo sapien
atggactaatacaagcggaaacatagctccctc

SEQ ID NO: 117389 - DNA, 33 bp, Homo sapien
gacagtaggccataaaatgttagcagtgttatg

SEQ ID NO: 117390 - DNA, 33 bp, Homo sapien
gacagtaggccataaagtgttagcagtgttatg

SEQ ID NO: 117391 - DNA, 33 bp, Homo sapien
gagttctttctaccatgaacaaggtctaccatt

SEQ ID NO: 117392 - DNA, 33 bp, Homo sapien
gagttctttctaccattaacaaggtctaccatt

SEQ ID NO: 117393 - DNA, 33 bp, Homo sapien
cttagtctattgtgagaactacttgggtatttc

SEQ ID NO: 117394 - DNA, 33 bp, Homo sapien
cttagtctattgtgagtactacttgggtatttc

SEQ ID NO: 117395 - DNA, 33 bp, Homo sapien
ttgtagatggcttaggacaataattacaaagag

SEQ ID NO: 117396 - DNA, 33 bp, Homo sapien
ttgtagatggcttagggcaataattacaaagag

SEQ ID NO: 117397 - DNA, 33 bp, Homo sapien
agagcttctttgctctaaatttgaagattcctg

SEQ ID NO: 117398 - DNA, 33 bp, Homo sapien
agagcttctttgctctgaatttgaagattcctg

SEQ ID NO: 117399 - DNA, 33 bp, Homo sapien
tgaaactctttctaacggaaatctactagttag

SEQ ID NO: 117400 - DNA, 33 bp, Homo sapien
tgaaactctttctaactgaaatctactagttag

SEQ ID NO: 117401 - DNA, 33 bp, Homo sapien
aaagtcatgctttaaccagccacactacactgc

SEQ ID NO: 117402 - DNA, 33 bp, Homo sapien
aaagtcatgctttaactagccacactacactgc

SEQ ID NO: 117403 - DNA, 33 bp, Homo sapien
cggaacagcaataaataaattaatgagtactgt

SEQ ID NO: 117404 - DNA, 33 bp, Homo sapien
cggaacagcaataaatcaattaatgagtactgt

SEQ ID NO: 117405 - DNA, 33 bp, Homo sapien
gtatctatccctaataccattgctctagtttaa

SEQ ID NO: 117406 - DNA, 33 bp, Homo sapien
gtatctatccctaatatcattgctctagtttaa

SEQ ID NO: 117407 - DNA, 33 bp, Homo sapien
gtacagtatcctaagaactacattgggagccag

SEQ ID NO: 117408 - DNA, 33 bp, Homo sapien
gtacagtatcctaagagctacattgggagccag

SEQ ID NO: 117409 - DNA, 33 bp, Homo sapien
tttggtaaactttgaaacactactttatctact

SEQ ID NO: 117410 - DNA, 33 bp, Homo sapien
tttggtaaactttgaagcactactttatctact

SEQ ID NO: 117411 - DNA, 33 bp, Homo sapien
aaacataaatactgcaataaattttgtatggtg

SEQ ID NO: 117412 - DNA, 33 bp, Homo sapien
aaacataaatactgcattaaattttgtatggtg

SEQ ID NO: 117413 - DNA, 33 bp, Homo sapien
aataaattaaggaagaaatatttagcacaatat

SEQ ID NO: 117414 - DNA, 33 bp, Homo sapien
aataaattaaggaagagatatttagcacaatat

SEQ ID NO: 117415 - DNA, 33 bp, Homo sapien
tactgaatttgctctaaatctgtccatatttcc

SEQ ID NO: 117416 - DNA, 33 bp, Homo sapien
tactgaatttgctctatatctgtccatatttcc

SEQ ID NO: 117417 - DNA, 33 bp, Homo sapien
tactataagtacgcaactggccataaagactat

SEQ ID NO: 117418 - DNA, 33 bp, Homo sapien
tactataagtacgcaagtggccataaagactat

SEQ ID NO: 117419 - DNA, 33 bp, Homo sapien
actaccgacttggagaggaaaaatagctttgtc

SEQ ID NO: 117420 - DNA, 33 bp, Homo sapien
actaccgacttggagatgaaaaatagctttgtc

SEQ ID NO: 117421 - DNA, 33 bp, Homo sapien
gaacgaccaaattatcaaaatggagatcagagt

SEQ ID NO: 117422 - DNA, 33 bp, Homo sapien
gaacgaccaaattatcgaaatggagatcagagt

SEQ ID NO: 117423 - DNA, 33 bp, Homo sapien
tggaatgactttgagaagtatttagaaagtaaa

SEQ ID NO: 117424 - DNA, 33 bp, Homo sapien
tggaatgactttgagaggtatttagaaagtaaa

SEQ ID NO: 117425 - DNA, 33 bp, Homo sapien
tgtcaatgagtcccaactgctgacctctatcca

SEQ ID NO: 117426 - DNA, 33 bp, Homo sapien
tgtcaatgagtcccaattgctgacctctatcca

SEQ ID NO: 117427 - DNA, 33 bp, Homo sapien
tcattttttttatggccgaatatattctgttgt

SEQ ID NO: 117428 - DNA, 33 bp, Homo sapien
tcattttttttatggctgaatatattctgttgt

SEQ ID NO: 117429 - DNA, 33 bp, Homo sapien
aagtgtatactgaaaacttttaacaggatttaa

SEQ ID NO: 117430 - DNA, 33 bp, Homo sapien
aagtgtatactgaaaatttttaacaggatttaa

SEQ ID NO: 117431 - DNA, 33 bp, Homo sapien
cacataaaaacacagacaatcatttggattttg

SEQ ID NO: 117432 - DNA, 33 bp, Homo sapien
cacataaaaacacagagaatcatttggattttg

SEQ ID NO: 117433 - DNA, 33 bp, Homo sapien
actaaagccctcaggaactcagtgtattggtgg

SEQ ID NO: 117434 - DNA, 33 bp, Homo sapien
actaaagccctcaggatctcagtgtattggtgg

SEQ ID NO: 117435 - DNA, 33 bp, Homo sapien
cagaatcctgggttaacaaattctgcaaacatt

SEQ ID NO: 117436 - DNA, 33 bp, Homo sapien
cagaatcctgggttaataaattctgcaaacatt

SEQ ID NO: 117437 - DNA, 33 bp, Homo sapien
acaaacaaaaaagcaacaacaagggccggtgcg

SEQ ID NO: 117438 - DNA, 33 bp, Homo sapien
acaaacaaaaaagcaataacaagggccggtgcg

SEQ ID NO: 117439 - DNA, 33 bp, Homo sapien
caatagcatatctttaacatctgtgaaaaatca

SEQ ID NO: 117440 - DNA, 33 bp, Homo sapien
caatagcatatctttatcatctgtgaaaaatca

SEQ ID NO: 117441 - DNA, 33 bp, Homo sapien
acagcacacatcagcacggggaggaggttaaag

SEQ ID NO: 117442 - DNA, 33 bp, Homo sapien
acagcacacatcagcatggggaggaggttaaag

SEQ ID NO: 117443 - DNA, 33 bp, Homo sapien
tcttaatttggttgaaatacattctgtgctggt

SEQ ID NO: 117444 - DNA, 33 bp, Homo sapien
tcttaatttggttgaactacattctgtgctggt

SEQ ID NO: 117445 - DNA, 33 bp, Homo sapien
ggaatgcagcaaagcaatcaataggcagaactc

SEQ ID NO: 117446 - DNA, 33 bp, Homo sapien
ggaatgcagcaaagcagtcaataggcagaactc

SEQ ID NO: 117447 - DNA, 33 bp, Homo sapien
tcagggttagtcagcgaattagcgtttcaaata

SEQ ID NO: 117448 - DNA, 33 bp, Homo sapien
tcagggttagtcagcggattagcgtttcaaata

SEQ ID NO: 117449 - DNA, 33 bp, Homo sapien
tgtcttgaatcttagcgatcttttttgtttgtt

SEQ ID NO: 117450 - DNA, 33 bp, Homo sapien
tgtcttgaatcttagctatcttttttgtttgtt

SEQ ID NO: 117451 - DNA, 33 bp, Homo sapien
gatgtcatcaacatacaaactccaactttggca

SEQ ID NO: 117452 - DNA, 33 bp, Homo sapien
gatgtcatcaacatacgaactccaactttggca

SEQ ID NO: 117453 - DNA, 33 bp, Homo sapien; identical to SEQ ID NO: 117451

SEQ ID NO: 117454 - DNA, 33 bp, Homo sapien; identical to SEQ ID NO: 117452

SEQ ID NO: 117455 - DNA, 33 bp, Homo sapien
ctggctcagtttcctccagcaactaagttctac

SEQ ID NO: 117456 - DNA, 33 bp, Homo sapien
ctggctcagtttcctctagcaactaagttctac

SEQ ID NO: 117457 - DNA, 33 bp, Homo sapien
tctctcaagatcacagaatcggcctggcactgt

SEQ ID NO: 117458 - DNA, 33 bp, Homo sapien
tctctcaagatcacagcatcggcctggcactgt

SEQ ID NO: 117459 - DNA, 33 bp, Homo sapien
gaaaaaatgaaagggcacaggaaacagagtcat

SEQ ID NO: 117460 - DNA, 33 bp, Homo sapien
gaaaaaatgaaagggcgcaggaaacagagtcat

SEQ ID NO: 117461 - DNA, 33 bp, Homo sapien
cttctagtggaccaaccgcttacatccggacta

SEQ ID NO: 117462 - DNA, 33 bp, Homo sapien
cttctagtggaccaactgcttacatccggacta

SEQ ID NO: 117463 - DNA, 33 bp, Homo sapien
atctcagcttgcacagcaggttagaacttgact

SEQ ID NO: 117464 - DNA, 33 bp, Homo sapien
atctcagcttgcacagtaggttagaacttgact

SEQ ID NO: 117465 - DNA, 33 bp, Homo sapien
ccaacagtttggaagccgcagtgagtgggtcac

SEQ ID NO: 117466 - DNA, 33 bp, Homo sapien
ccaacagtttggaagctgcagtgagtgggtcac

SEQ ID NO: 117467 - DNA, 33 bp, Homo sapien
agtcagagaaggatgaagaatcagagcagagaa

SEQ ID NO: 117468 - DNA, 33 bp, Homo sapien
agtcagagaaggatgaggaatcagagcagagaa

SEQ ID NO: 117469 - DNA, 33 bp, Homo sapien
tccaagattgacaccaataaaagtattgctcaa

SEQ ID NO: 117470 - DNA, 33 bp, Homo sapien
tccaagattgacaccagtaaaagtattgctcaa

SEQ ID NO: 117471 - DNA, 33 bp, Homo sapien
taatcatggttcatcactaacaaaacaaaagaa

SEQ ID NO: 117472 - DNA, 33 bp, Homo sapien
taatcatggttcatcattaacaaaacaaaagaa

SEQ ID NO: 117473 - DNA, 33 bp, Homo sapien
acttctgccattaccccagaagctcaagagggg

SEQ ID NO: 117474 - DNA, 33 bp, Homo sapien
acttctgccattacccgagaagctcaagagggg

SEQ ID NO: 117475 - DNA, 33 bp, Homo sapien
gctcaatattgctacaacgttgatgagaaaaat

SEQ ID NO: 117476 - DNA, 33 bp, Homo sapien
gctcaatattgctacagcgttgatgagaaaaat

SEQ ID NO: 117477 - DNA, 33 bp, Homo sapien
gtaatccgggccctggaagtcaaagagcgcaga

SEQ ID NO: 117478 - DNA, 33 bp, Homo sapien
gtaatccgggccctggcagtcaaagagcgcaga

SEQ ID NO: 117479 - DNA, 33 bp, Homo sapien
ccatctaattcgaagccctactcgttgttggca

SEQ ID NO: 117480 - DNA, 33 bp, Homo sapien
ccatctaattcgaagctctactcgttgttggca

SEQ ID NO: 117481 - DNA, 33 bp, Homo sapien
gtggccttcatctattgaaattctaattacaat

SEQ ID NO: 117482 - DNA, 33 bp, Homo sapien
gtggccttcatctatttaaattctaattacaat

SEQ ID NO: 117483 - DNA, 33 bp, Homo sapien
gtatcagatgcttataaagtataggctttcaat

SEQ ID NO: 117484 - DNA, 33 bp, Homo sapien
gtatcagatgcttatacagtataggctttcaat

SEQ ID NO: 117485 - DNA, 33 bp, Homo sapien
aagatacttttgcagacgaatgagaaaatgaag

SEQ ID NO: 117486 - DNA, 33 bp, Homo sapien
aagatacttttgcagatgaatgagaaaatgaag

SEQ ID NO: 117487 - DNA, 33 bp, Homo sapien
ctttagatgaagtttcactgttccagaaaattt

SEQ ID NO: 117488 - DNA, 33 bp, Homo sapien
ctttagatgaagtttctctgttccagaaaattt

SEQ ID NO: 117489 - DNA, 33 bp, Homo sapien
tttgaatcaatgccacaccagaacagaaagttt

SEQ ID NO: 117490 - DNA, 33 bp, Homo sapien
tttgaatcaatgccacgccagaacagaaagttt

SEQ ID NO: 117491 - DNA, 33 bp, Homo sapien
catccacaaatccaaacgtatcatgtagttttg

SEQ ID NO: 117492 - DNA, 33 bp, Homo sapien
catccacaaatccaaatgtatcatgtagttttg

SEQ ID NO: 117493 - DNA, 33 bp, Homo sapien
cgacttgagattgcacaactgtgtccagcctgg

SEQ ID NO: 117494 - DNA, 33 bp, Homo sapien
cgacttgagattgcacgactgtgtccagcctgg

SEQ ID NO: 117495 - DNA, 33 bp, Homo sapien
aataccacctaagaaaaatctgtatatcaattt

SEQ ID NO: 117496 - DNA, 33 bp, Homo sapien
aataccacctaagaaatatctgtatatcaattt

SEQ ID NO: 117497 - DNA, 33 bp, Homo sapien
ccttctggttcaaagaagcatgattgatttttc

SEQ ID NO: 117498 - DNA, 33 bp, Homo sapien
ccttctggttcaaagaggcatgattgatttttc

SEQ ID NO: 117499 - DNA, 33 bp, Homo sapien
ttactcttctctatttaaaaaaatcacgtatta

SEQ ID NO: 117500 - DNA, 33 bp, Homo sapien
ttactcttctctattttaaaaaatcacgtatta

SEQ ID NO: 117501 - DNA, 33 bp, Homo sapien
aaaacccaggtgaatacgcctcctaagttttcc

SEQ ID NO: 117502 - DNA, 33 bp, Homo sapien
aaaacccaggtgaatatgcctcctaagttttcc

SEQ ID NO: 117503 - DNA, 33 bp, Homo sapien
tgatttctttttaagacactaggtcatattatg

SEQ ID NO: 117504 - DNA, 33 bp, Homo sapien
tgatttctttttaagagactaggtcatattatg

SEQ ID NO: 117505 - DNA, 33 bp, Homo sapien
ctcctttcttgctcacactgtatttctagtgcc

SEQ ID NO: 117506 - DNA, 33 bp, Homo sapien
ctcctttcttgctcacgctgtatttctagtgcc

SEQ ID NO: 117507 - DNA, 33 bp, Homo sapien
ccaaaaaccaggaagaactcgaagtgaacaaga

SEQ ID NO: 117508 - DNA, 33 bp, Homo sapien
ccaaaaaccaggaagatctcgaagtgaacaaga

SEQ ID NO: 117509 - DNA, 33 bp, Homo sapien
gtggactaggagagcactgatggaagtggaaat

SEQ ID NO: 117510 - DNA, 33 bp, Homo sapien
gtggactaggagagcattgatggaagtggaaat

SEQ ID NO: 117511 - DNA, 33 bp, Homo sapien
atgtatatttcagaagcaggcaatccctgccat

SEQ ID NO: 117512 - DNA, 33 bp, Homo sapien
atgtatatttcagaagtaggcaatccctgccat

SEQ ID NO: 117513 - DNA, 33 bp, Homo sapien
actgttaacatcaatacaggattagctcagaac

SEQ ID NO: 117514 - DNA, 33 bp, Homo sapien
actgttaacatcaatataggattagctcagaac

SEQ ID NO: 117515 - DNA, 33 bp, Homo sapien
aggaacagaggtagataaaatgatttgaatttc

SEQ ID NO: 117516 - DNA, 33 bp, Homo sapien
aggaacagaggtagatgaaatgatttgaatttc

SEQ ID NO: 117517 - DNA, 33 bp, Homo sapien
acagcctgcaggtacaatcaagtttaatttaaa

SEQ ID NO: 117518 - DNA, 33 bp, Homo sapien
acagcctgcaggtacactcaagtttaatttaaa

SEQ ID NO: 117519 - DNA, 33 bp, Homo sapien
ttttcttatgaaaagacgaaacaaacctaagga

SEQ ID NO: 117520 - DNA, 33 bp, Homo sapien
ttttcttatgaaaagaggaaacaaacctaagga

SEQ ID NO: 117521 - DNA, 33 bp, Homo sapien
atgaacagctttctaacgatgaccaggccttgt

SEQ ID NO: 117522 - DNA, 33 bp, Homo sapien
atgaacagctttctaatgatgaccaggccttgt

SEQ ID NO: 117523 - DNA, 33 bp, Homo sapien
taacaacaaatcatacagagccatggctttctt

SEQ ID NO: 117524 - DNA, 33 bp, Homo sapien
taacaacaaatcatacggagccatggctttctt

SEQ ID NO: 117525 - DNA, 33 bp, Homo sapien
ggttcccaatcttttcccttcaggctctttcca

SEQ ID NO: 117526 - DNA, 33 bp, Homo sapien
ggttcccaatcttttctcttcaggctctttcca

SEQ ID NO: 117527 - DNA, 33 bp, Homo sapien
agcgtcactgcttcagaagagaaagaacagatt

SEQ ID NO: 117528 - DNA, 33 bp, Homo sapien
agcgtcactgcttcaggagagaaagaacagatt

SEQ ID NO: 117529 - DNA, 33 bp, Homo sapien
taatcatcttctaagaaggccaatgaaaacgaa

SEQ ID NO: 117530 - DNA, 33 bp, Homo sapien
taatcatcttctaagagggccaatgaaaacgaa

SEQ ID NO: 117531 - DNA, 33 bp, Homo sapien
cttgtttgtggtaggaataactgtgtcaccagg

SEQ ID NO: 117532 - DNA, 33 bp, Homo sapien
cttgtttgtggtaggagtaactgtgtcaccagg

SEQ ID NO: 117533 - DNA, 33 bp, Homo sapien
atgtcaaacatggacaaaagttggtagaatcat

SEQ ID NO: 117534 - DNA, 33 bp, Homo sapien
atgtcaaacatggacagaagttggtagaatcat

SEQ ID NO: 117535 - DNA, 33 bp, Homo sapien
aatgactggagagacactgacataaggactgat

SEQ ID NO: 117536 - DNA, 33 bp, Homo sapien
aatgactggagagacagtgacataaggactgat

SEQ ID NO: 117537 - DNA, 33 bp, Homo sapien
aaagacacagctagaaatagaaagtagaccttt

SEQ ID NO: 117538 - DNA, 33 bp, Homo sapien
aaagacacagctagaactagaaagtagaccttt

SEQ ID NO: 117539 - DNA, 33 bp, Homo sapien
ggaccattactccaataacttttgccagagtct

SEQ ID NO: 117540 - DNA, 33 bp, Homo sapien
ggaccattactccaatcacttttgccagagtct

SEQ ID NO: 117541 - DNA, 33 bp, Homo sapien
tattaagttgcatgagcactactatgttcagtc

SEQ ID NO: 117542 - DNA, 33 bp, Homo sapien
tattaagttgcatgagtactactatgttcagtc

SEQ ID NO: 117543 - DNA, 33 bp, Homo sapien
gcataataaaaagttaagcagtatgtattttac

SEQ ID NO: 117544 - DNA, 33 bp, Homo sapien
gcataataaaaagttaggcagtatgtattttac

SEQ ID NO: 117545 - DNA, 33 bp, Homo sapien
agatgtgatgatgaataatgtcaagagttttta

SEQ ID NO: 117546 - DNA, 33 bp, Homo sapien
agatgtgatgatgaattatgtcaagagttttta

SEQ ID NO: 117547 - DNA, 33 bp, Homo sapien
gaagtacagataaagacgcccctaacattgcct

SEQ ID NO: 117548 - DNA, 33 bp, Homo sapien
gaagtacagataaagatgcccctaacattgcct

SEQ ID NO: 117549 - DNA, 33 bp, Homo sapien
agtgtccttccctgaaataaatacctaagggag

SEQ ID NO: 117550 - DNA, 33 bp, Homo sapien
agtgtccttccctgaagtaaatacctaagggag

SEQ ID NO: 117551 - DNA, 33 bp, Homo sapien
catctcatggtaattacaaactctgattggctg

SEQ ID NO: 117552 - DNA, 33 bp, Homo sapien
catctcatggtaattagaaactctgattggctg

SEQ ID NO: 117553 - DNA, 33 bp, Homo sapien
gctcatcattactttaaaatcatcatagatatt

SEQ ID NO: 117554 - DNA, 33 bp, Homo sapien
gctcatcattactttacaatcatcatagatatt

SEQ ID NO: 117555 - DNA, 33 bp, Homo sapien
gggcacagtgaagagtcacaccaatattacgaa

SEQ ID NO: 117556 - DNA, 33 bp, Homo sapien
gggcacagtgaagagttacaccaatattacgaa

SEQ ID NO: 117557 - DNA, 33 bp, Homo sapien
ttaatttaaaatgtaaagtctgaggccaggcac

SEQ ID NO: 117558 - DNA, 33 bp, Homo sapien
ttaatttaaaatgtaaggtctgaggccaggcac

SEQ ID NO: 117559 - DNA, 33 bp, Homo sapien
agtctcttaactgaaacagaggtacaactaaac

SEQ ID NO: 117560 - DNA, 33 bp, Homo sapien
agtctcttaactgaaatagaggtacaactaaac

SEQ ID NO: 117561 - DNA, 33 bp, Homo sapien
attaatacagtcaaatcagtctcttaactgaaa

SEQ ID NO: 117562 - DNA, 33 bp, Homo sapien
attaatacagtcaaattagtctcttaactgaaa

SEQ ID NO: 117563 - DNA, 33 bp, Homo sapien
attgtgccttctcataacatgtgtctctccttt

SEQ ID NO: 117564 - DNA, 33 bp, Homo sapien
attgtgccttctcatatcatgtgtctctccttt

SEQ ID NO: 117565 - DNA, 33 bp, Homo sapien
tcaaggagctgaagcaacatgtttagaagttct

SEQ ID NO: 117566 - DNA, 33 bp, Homo sapien
tcaaggagctgaagcagcatgtttagaagttct

SEQ ID NO: 117567 - DNA, 33 bp, Homo sapien
ttgatcttgataaacaatctgaacttagagctt

SEQ ID NO: 117568 - DNA, 33 bp, Homo sapien
ttgatcttgataaacagtctgaacttagagctt

SEQ ID NO: 117569 - DNA, 33 bp, Homo sapien
gtcaagatcagtcgtaacatttaatatagagaa

SEQ ID NO: 117570 - DNA, 33 bp, Homo sapien
gtcaagatcagtcgtaccatttaatatagagaa

SEQ ID NO: 117571 - DNA, 33 bp, Homo sapien
tgaattcaaaagataaaattcaatcggctgggc

SEQ ID NO: 117572 - DNA, 33 bp, Homo sapien
tgaattcaaaagataacattcaatcggctgggc

SEQ ID NO: 117573 - DNA, 33 bp, Homo sapien
atgtgaggatcttcataaggcggtcggtcaggt

SEQ ID NO: 117574 - DNA, 33 bp, Homo sapien
atgtgaggatcttcatgaggcggtcggtcaggt

SEQ ID NO: 117575 - DNA, 33 bp, Homo sapien
tatggatgagcaagcaagaatatgatgactcca

SEQ ID NO: 117576 - DNA, 33 bp, Homo sapien
tatggatgagcaagcaggaatatgatgactcca

SEQ ID NO: 117577 - DNA, 33 bp, Homo sapien
gagccactgtgcccgaccagtactatcttcctt

SEQ ID NO: 117578 - DNA, 33 bp, Homo sapien
gagccactgtgcccgatcagtactatcttcctt

SEQ ID NO: 117579 - DNA, 33 bp, Homo sapien
aatgcccggctaagagacatactaataattatg

SEQ ID NO: 117580 - DNA, 33 bp, Homo sapien
aatgcccggctaagaggcatactaataattatg

SEQ ID NO: 117581 - DNA, 33 bp, Homo sapien
attgggctgactgaagcctcaatagggctcact

SEQ ID NO: 117582 - DNA, 33 bp, Homo sapien
attgggctgactgaagtctcaatagggctcact

SEQ ID NO: 117583 - DNA, 33 bp, Homo sapien
tcctttatgttgcagccgcctaccttgcagacc

SEQ ID NO: 117584 - DNA, 33 bp, Homo sapien
tcctttatgttgcagctgcctaccttgcagacc

SEQ ID NO: 117585 - DNA, 33 bp, Homo sapien
ctggaggtggaaccaacgattggtgttttaaca

SEQ ID NO: 117586 - DNA, 33 bp, Homo sapien
ctggaggtggaaccaatgattggtgttttaaca

SEQ ID NO: 117587 - DNA, 33 bp, Homo sapien
ggttctcttcaattaaagtgatttagtaaatgt

SEQ ID NO: 117588 - DNA, 33 bp, Homo sapien
ggttctcttcaattaatgtgatttagtaaatgt

SEQ ID NO: 117589 - DNA, 33 bp, Homo sapien
tttgtgattttatttacatgcggaaaagcttag

SEQ ID NO: 117590 - DNA, 33 bp, Homo sapien
tttgtgattttatttatatgcggaaaagcttag

SEQ ID NO: 117591 - DNA, 33 bp, Homo sapien
ccaagtcctgagataaacgggccctcaagacac

SEQ ID NO: 117592 - DNA, 33 bp, Homo sapien
ccaagtcctgagataagcgggccctcaagacac

SEQ ID NO: 117593 - DNA, 33 bp, Homo sapien
agtatgtgggagtggaacatttcagtcagaggg

SEQ ID NO: 117594 - DNA, 33 bp, Homo sapien
agtatgtgggagtggagcatttcagtcagaggg

SEQ ID NO: 117595 - DNA, 33 bp, Homo sapien
atcttgccagggtgaaaaagttaattattctta

SEQ ID NO: 117596 - DNA, 33 bp, Homo sapien
atcttgccagggtgaagaagttaattattctta

SEQ ID NO: 117597 - DNA, 33 bp, Homo sapien
attttggtatttttcacagagtcggggtcttgc

SEQ ID NO: 117598 - DNA, 33 bp, Homo sapien
attttggtatttttcatagagtcggggtcttgc

SEQ ID NO: 117599 - DNA, 33 bp, Homo sapien
tatactggtggtttgacaactgctgaagttgag

SEQ ID NO: 117600 - DNA, 33 bp, Homo sapien
tatactggtggtttgataactgctgaagttgag

SEQ ID NO: 117601 - DNA, 33 bp, Homo sapien
attacatctggaacaaaggacgcataaaaagtg

SEQ ID NO: 117602 - DNA, 33 bp, Homo sapien
attacatctggaacaagggacgcataaaaagtg

SEQ ID NO: 117603 - DNA, 33 bp, Homo sapien
catctgagcatgcaggaaaatagatgtccccca

SEQ ID NO: 117604 - DNA, 33 bp, Homo sapien
catctgagcatgcagggaaatagatgtccccca

SEQ ID NO: 117605 - DNA, 33 bp, Homo sapien
tgaggaaatggtgtcacgactcttcacatcaca

SEQ ID NO: 117606 - DNA, 33 bp, Homo sapien
tgaggaaatggtgtcatgactcttcacatcaca

SEQ ID NO: 117607 - DNA, 33 bp, Homo sapien
tttcatctgccaaaccaacgggctagataaaca

SEQ ID NO: 117608 - DNA, 33 bp, Homo sapien
tttcatctgccaaaccgacgggctagataaaca

SEQ ID NO: 117609 - DNA, 33 bp, Homo sapien
aaatttcaaaaacatacgtgaatcatgtatact

SEQ ID NO: 117610 - DNA, 33 bp, Homo sapien
aaatttcaaaaacataggtgaatcatgtatact

SEQ ID NO: 117611 - DNA, 33 bp, Homo sapien
tgtctggccttccttcactctgcataatgtttc

SEQ ID NO: 117612 - DNA, 33 bp, Homo sapien
tgtctggccttccttcgctctgcataatgtttc

SEQ ID NO: 117613 - DNA, 33 bp, Homo sapien
tcaagccaaccttccacctcatctgcctgagta

SEQ ID NO: 117614 - DNA, 33 bp, Homo sapien
tcaagccaaccttccatctcatctgcctgagta

SEQ ID NO: 117615 - DNA, 33 bp, Homo sapien
catagcttaaagttcaatacgacacttaccatg

SEQ ID NO: 117616 - DNA, 33 bp, Homo sapien
catagcttaaagttcagtacgacacttaccatg

SEQ ID NO: 117617 - DNA, 33 bp, Homo sapien
cctgtggccgagggaacagatcttccagtccca

SEQ ID NO: 117618 - DNA, 33 bp, Homo sapien
cctgtggccgagggaatagatcttccagtccca

SEQ ID NO: 117619 - DNA, 33 bp, Homo sapien
ctccattccctcagcacgttgtctgctttacca

SEQ ID NO: 117620 - DNA, 33 bp, Homo sapien
ctccattccctcagcatgttgtctgctttacca

SEQ ID NO: 117621 - DNA, 33 bp, Homo sapien
gaatagcctccctacaacaaagatataccctgt

SEQ ID NO: 117622 - DNA, 33 bp, Homo sapien
gaatagcctccctacagcaaagatataccctgt

SEQ ID NO: 117623 - DNA, 33 bp, Homo sapien
gtccgcaagctatttcgctgaacttaacgctct

SEQ ID NO: 117624 - DNA, 33 bp, Homo sapien
gtccgcaagctatttctctgaacttaacgctct

SEQ ID NO: 117625 - DNA, 33 bp, Homo sapien
cgctaaatgaagagaactgacgactactaccag

SEQ ID NO: 117626 - DNA, 33 bp, Homo sapien
cgctaaatgaagagaattgacgactactaccag

SEQ ID NO: 117627 - DNA, 33 bp, Homo sapien
attgtggaaaatgagaaaggttctagaatataa

SEQ ID NO: 117628 - DNA, 33 bp, Homo sapien
attgtggaaaatgagagaggttctagaatataa

SEQ ID NO: 117629 - DNA, 33 bp, Homo sapien
gattttcagttccccaatgagtaataatattga

SEQ ID NO: 117630 - DNA, 33 bp, Homo sapien
gattttcagttccccagtgagtaataatattga

SEQ ID NO: 117631 - DNA, 33 bp, Homo sapien
gtagaatcaagcacagaaaattatttttagaac

SEQ ID NO: 117632 - DNA, 33 bp, Homo sapien
gtagaatcaagcacaggaaattatttttagaac

SEQ ID NO: 117633 - DNA, 33 bp, Homo sapien
aaaaagcagggatgaaacaataaaagatatcag

SEQ ID NO: 117634 - DNA, 33 bp, Homo sapien
aaaaagcagggatgaaccaataaaagatatcag

SEQ ID NO: 117635 - DNA, 33 bp, Homo sapien
cacaagaggccactcaagttttctaattttatt

SEQ ID NO: 117636 - DNA, 33 bp, Homo sapien
cacaagaggccactcaggttttctaattttatt

SEQ ID NO: 117637 - DNA, 33 bp, Homo sapien
gttacaatgtctaatccattggttctcaaccct

SEQ ID NO: 117638 - DNA, 33 bp, Homo sapien
gttacaatgtctaatctattggttctcaaccct

SEQ ID NO: 117639 - DNA, 33 bp, Homo sapien
gacaggaaaactatacacaccaaatatctgtta

SEQ ID NO: 117640 - DNA, 33 bp, Homo sapien
gacaggaaaactatacgcaccaaatatctgtta

SEQ ID NO: 117641 - DNA, 33 bp, Homo sapien
tagaatactggtaatacgtatcagtgatataat

SEQ ID NO: 117642 - DNA, 33 bp, Homo sapien
tagaatactggtaatatgtatcagtgatataat

SEQ ID NO: 117643 - DNA, 33 bp, Homo sapien
cacttgcataccattccctgatcaaagaactct

SEQ ID NO: 117644 - DNA, 33 bp, Homo sapien
cacttgcataccattctctgatcaaagaactct

SEQ ID NO: 117645 - DNA, 33 bp, Homo sapien
ctccctgttccttcccactgctagattccggaa

SEQ ID NO: 117646 - DNA, 33 bp, Homo sapien
ctccctgttccttcccgctgctagattccggaa

SEQ ID NO: 117647 - DNA, 33 bp, Homo sapien
aagtctctcatattacagaatactcttgtaatt

SEQ ID NO: 117648 - DNA, 33 bp, Homo sapien
aagtctctcatattactgaatactcttgtaatt

SEQ ID NO: 117649 - DNA, 33 bp, Homo sapien
tgttagagatcttccacgtccagatgtttacct

SEQ ID NO: 117650 - DNA, 33 bp, Homo sapien
tgttagagatcttccatgtccagatgtttacct

SEQ ID NO: 117651 - DNA, 33 bp, Homo sapien
tttatggaacagtcttaaactgctgtaaactga

SEQ ID NO: 117652 - DNA, 33 bp, Homo sapien
tttatggaacagtcttgaactgctgtaaactga

SEQ ID NO: 117653 - DNA, 33 bp, Homo sapien
atagctgtttaaaggacggtgtgaatggtgcca

SEQ ID NO: 117654 - DNA, 33 bp, Homo sapien
atagctgtttaaaggatggtgtgaatggtgcca

SEQ ID NO: 117655 - DNA, 33 bp, Homo sapien
tgagccttgccaaaacggaccgtgtagattaaa

SEQ ID NO: 117656 - DNA, 33 bp, Homo sapien
tgagccttgccaaaactgaccgtgtagattaaa

SEQ ID NO: 117657 - DNA, 33 bp, Homo sapien
gtgctcccagcctgggaaaactcggataaaggt

SEQ ID NO: 117658 - DNA, 33 bp, Homo sapien
gtgctcccagcctggggaaactcggataaaggt

SEQ ID NO: 117659 - DNA, 33 bp, Homo sapien
gatgggctccaccgtcaaggccacctctcatac

SEQ ID NO: 117660 - DNA, 33 bp, Homo sapien
gatgggctccaccgtcgaggccacctctcatac

SEQ ID NO: 117661 - DNA, 33 bp, Homo sapien
gcatgtcaactggagaaggcaaatgtgagcaca

SEQ ID NO: 117662 - DNA, 33 bp, Homo sapien
gcatgtcaactggagagggcaaatgtgagcaca

SEQ ID NO: 117663 - DNA, 33 bp, Homo sapien
cttcaaatcacagccactaggtatcattatgct

SEQ ID NO: 117664 - DNA, 33 bp, Homo sapien
cttcaaatcacagccattaggtatcattatgct

SEQ ID NO: 117665 - DNA, 33 bp, Homo sapien
atccgcgggaacggcacagaggtacctggcagg

SEQ ID NO: 117666 - DNA, 33 bp, Homo sapien
atccgcgggaacggcatagaggtacctggcagg

SEQ ID NO: 117667 - DNA, 33 bp, Homo sapien
cctgggcatggcttcagatgggttagcaatttc

SEQ ID NO: 117668 - DNA, 33 bp, Homo sapien
cctgggcatggcttcatatgggttagcaatttc

SEQ ID NO: 117669 - DNA, 33 bp, Homo sapien
atataattgcacgaaaataaaaccacaaaacac

SEQ ID NO: 117670 - DNA, 33 bp, Homo sapien
atataattgcacgaaattaaaaccacaaaacac

SEQ ID NO: 117671 - DNA, 33 bp, Homo sapien
ctaatctattttttgacgtctctcttttttctc

SEQ ID NO: 117672 - DNA, 33 bp, Homo sapien
ctaatctattttttgatgtctctcttttttctc

SEQ ID NO: 117673 - DNA, 33 bp, Homo sapien
ccgatgtgcccagcccaaaagtagtatttttaa

SEQ ID NO: 117674 - DNA, 33 bp, Homo sapien
ccgatgtgcccagcccgaaagtagtatttttaa

SEQ ID NO: 117675 - DNA, 33 bp, Homo sapien
cagtgtgtggaaaacacctttctctcacatcaa

SEQ ID NO: 117676 - DNA, 33 bp, Homo sapien
cagtgtgtggaaaacatctttctctcacatcaa

SEQ ID NO: 117677 - DNA, 33 bp, Homo sapien
cctttacctgttgcaaacttgtcatcatatttt

SEQ ID NO: 117678 - DNA, 33 bp, Homo sapien
cctttacctgttgcaaccttgtcatcatatttt

SEQ ID NO: 117679 - DNA, 33 bp, Homo sapien
gggggaggcgttacacactattaaaataaccag

SEQ ID NO: 117680 - DNA, 33 bp, Homo sapien
gggggaggcgttacacgctattaaaataaccag

SEQ ID NO: 117681 - DNA, 33 bp, Homo sapien
ttgctcattgaatataccctgctggctactact

SEQ ID NO: 117682 - DNA, 33 bp, Homo sapien
ttgctcattgaatatatcctgctggctactact

SEQ ID NO: 117683 - DNA, 33 bp, Homo sapien
cactcttgatgatgcccgacaaaaatgtaacca

SEQ ID NO: 117684 - DNA, 33 bp, Homo sapien
cactcttgatgatgccggacaaaaatgtaacca

SEQ ID NO: 117685 - DNA, 33 bp, Homo sapien
cctctgaggctagaatcacagcttctctacact

SEQ ID NO: 117686 - DNA, 33 bp, Homo sapien
cctctgaggctagaattacagcttctctacact

SEQ ID NO: 117687 - DNA, 33 bp, Homo sapien
gagataatgccatctacgattttttcttttaag

SEQ ID NO: 117688 - DNA, 33 bp, Homo sapien
gagataatgccatctatgattttttcttttaag

SEQ ID NO: 117689 - DNA, 33 bp, Homo sapien
taagaaataaataccaatgggaaagaggtaaca

SEQ ID NO: 117690 - DNA, 33 bp, Homo sapien
taagaaataaataccagtgggaaagaggtaaca

SEQ ID NO: 117691 - DNA, 33 bp, Homo sapien
ctcatgtaggcttggaagtatctgcaagccttc

SEQ ID NO: 117692 - DNA, 33 bp, Homo sapien
ctcatgtaggcttggacgtatctgcaagccttc

SEQ ID NO: 117693 - DNA, 33 bp, Homo sapien
ggaaaaatacgaatacaaatactgaggccctcc

SEQ ID NO: 117694 - DNA, 33 bp, Homo sapien
ggaaaaatacgaatacgaatactgaggccctcc

SEQ ID NO: 117695 - DNA, 33 bp, Homo sapien
tttcccccaacctccaatgctgcagagatacct

SEQ ID NO: 117696 - DNA, 33 bp, Homo sapien
tttcccccaacctccagtgctgcagagatacct

SEQ ID NO: 117697 - DNA, 33 bp, Homo sapien
caagcatttttattcacccccctgctccctatc

SEQ ID NO: 117698 - DNA, 33 bp, Homo sapien
caagcatttttattcatccccctgctccctatc

SEQ ID NO: 117699 - DNA, 33 bp, Homo sapien
caaaagaacaagaataaagctacgcaatcagtg

SEQ ID NO: 117700 - DNA, 33 bp, Homo sapien
caaaagaacaagaatatagctacgcaatcagtg

SEQ ID NO: 117701 - DNA, 33 bp, Homo sapien
tttctgctcaaatgccacatcttcagaggtcct

SEQ ID NO: 117702 - DNA, 33 bp, Homo sapien
tttctgctcaaatgccgcatcttcagaggtcct

SEQ ID NO: 117703 - DNA, 33 bp, Homo sapien
ctcaggctggtcttgaacttttgggcctaagca

SEQ ID NO: 117704 - DNA, 33 bp, Homo sapien
ctcaggctggtcttgagcttttgggcctaagca

SEQ ID NO: 117705 - DNA, 33 bp, Homo sapien
tttgtccttcatggcaacttcgcatttattctc

SEQ ID NO: 117706 - DNA, 33 bp, Homo sapien
tttgtccttcatggcatcttcgcatttattctc

SEQ ID NO: 117707 - DNA, 33 bp, Homo sapien
aatgtatgaacaaatgaagttagaaggaagatt

SEQ ID NO: 117708 - DNA, 33 bp, Homo sapien
aatgtatgaacaaatgtagttagaaggaagatt

SEQ ID NO: 117709 - DNA, 33 bp, Homo sapien
ttttagttgttcttcaataatctgtatatcatt

SEQ ID NO: 117710 - DNA, 33 bp, Homo sapien
ttttagttgttcttcagtaatctgtatatcatt

SEQ ID NO: 117711 - DNA, 33 bp, Homo sapien
gacagatgaatccctagatacagaagtcaactc

SEQ ID NO: 117712 - DNA, 33 bp, Homo sapien
gacagatgaatccctatatacagaagtcaactc

SEQ ID NO: 117713 - DNA, 33 bp, Homo sapien
tgctactgaattgtacacctgaaaatggttgca

SEQ ID NO: 117714 - DNA, 33 bp, Homo sapien
tgctactgaattgtacgcctgaaaatggttgca

SEQ ID NO: 117715 - DNA, 33 bp, Homo sapien
tgtcagctctgacatcaattattccagggttct

SEQ ID NO: 117716 - DNA, 33 bp, Homo sapien
tgtcagctctgacatcgattattccagggttct

SEQ ID NO: 117717 - DNA, 33 bp, Homo sapien
tcagaacagaagataacattctatgtgtgttct

SEQ ID NO: 117718 - DNA, 33 bp, Homo sapien
tcagaacagaagataatattctatgtgtgttct

SEQ ID NO: 117719 - DNA, 33 bp, Homo sapien
cagcaacactcgtgacgacagcatagagatatt

SEQ ID NO: 117720 - DNA, 33 bp, Homo sapien
cagcaacactcgtgactacagcatagagatatt

SEQ ID NO: 117721 - DNA, 33 bp, Homo sapien
ggctaaatgggggtacagatgagaaagtgaaag

SEQ ID NO: 117722 - DNA, 33 bp, Homo sapien
ggctaaatgggggtacggatgagaaagtgaaag

SEQ ID NO: 117723 - DNA, 33 bp, Homo sapien
actgagaaacatattcaagaaaagagattttgc

SEQ ID NO: 117724 - DNA, 33 bp, Homo sapien
actgagaaacatattcgagaaaagagattttgc

SEQ ID NO: 117725 - DNA, 33 bp, Homo sapien
cttgaaagccattttaccctctttgtggcaggg

SEQ ID NO: 117726 - DNA, 33 bp, Homo sapien
cttgaaagccattttatcctctttgtggcaggg

SEQ ID NO: 117727 - DNA, 33 bp, Homo sapien
ttctggaagctcactccgaaaacctcaaacctt

SEQ ID NO: 117728 - DNA, 33 bp, Homo sapien
ttctggaagctcactctgaaaacctcaaacctt

SEQ ID NO: 117729 - DNA, 33 bp, Homo sapien
cttcttgacatctgcaatctaaatccaaacgct

SEQ ID NO: 117730 - DNA, 33 bp, Homo sapien
cttcttgacatctgcagtctaaatccaaacgct

SEQ ID NO: 117731 - DNA, 33 bp, Homo sapien
agtcccaagtcagcgacgtaactggattaactg

SEQ ID NO: 117732 - DNA, 33 bp, Homo sapien
agtcccaagtcagcgatgtaactggattaactg

SEQ ID NO: 117733 - DNA, 33 bp, Homo sapien
aatccatcatggtcccagacggagtggctgtgt

SEQ ID NO: 117734 - DNA, 33 bp, Homo sapien
aatccatcatggtcccggacggagtggctgtgt

SEQ ID NO: 117735 - DNA, 33 bp, Homo sapien
aaattagagctgtaaaatatggggcacctagta

SEQ ID NO: 117736 - DNA, 33 bp, Homo sapien
aaattagagctgtaaagtatggggcacctagta

SEQ ID NO: 117737 - DNA, 33 bp, Homo sapien
ctgtgtcatctgcttacggtttatcagcatttg

SEQ ID NO: 117738 - DNA, 33 bp, Homo sapien
ctgtgtcatctgcttatggtttatcagcatttg

SEQ ID NO: 117739 - DNA, 33 bp, Homo sapien
cggggtaggaagccacccaatggtactctgcat

SEQ ID NO: 117740 - DNA, 33 bp, Homo sapien
cggggtaggaagccacgcaatggtactctgcat

SEQ ID NO: 117741 - DNA, 33 bp, Homo sapien
atcggaagtcaacacacgggagtggcatccaag

SEQ ID NO: 117742 - DNA, 33 bp, Homo sapien
atcggaagtcaacacaggggagtggcatccaag

SEQ ID NO: 117743 - DNA, 33 bp, Homo sapien
aagttgttagtcctggaaaggcagattggatcc

SEQ ID NO: 117744 - DNA, 33 bp, Homo sapien
aagttgttagtcctgggaaggcagattggatcc

SEQ ID NO: 117745 - DNA, 33 bp, Homo sapien
tgtccatgcccagagggaaatggtgggccgagg

SEQ ID NO: 117746 - DNA, 33 bp, Homo sapien
tgtccatgcccagaggtaaatggtgggccgagg

SEQ ID NO: 117747 - DNA, 33 bp, Homo sapien
ccctattagattgtaactgcaagcaaacttaac

SEQ ID NO: 117748 - DNA, 33 bp, Homo sapien
ccctattagattgtaattgcaagcaaacttaac

SEQ ID NO: 117749 - DNA, 33 bp, Homo sapien
gaattctgtgtttccacatgatattcgagaagt

SEQ ID NO: 117750 - DNA, 33 bp, Homo sapien
gaattctgtgtttccatatgatattcgagaagt

SEQ ID NO: 117751 - DNA, 33 bp, Homo sapien
tttttcacataagagccctgagacctccccagg

SEQ ID NO: 117752 - DNA, 33 bp, Homo sapien
tttttcacataagagcgctgagacctccccagg

SEQ ID NO: 117753 - DNA, 33 bp, Homo sapien
aacgccacgaatacaaaatatatatccttttca

SEQ ID NO: 117754 - DNA, 33 bp, Homo sapien
aacgccacgaatacaagatatatatccttttca

SEQ ID NO: 117755 - DNA, 33 bp, Homo sapien
agaagactcggtaacacggaggaggaagcccca

SEQ ID NO: 117756 - DNA, 33 bp, Homo sapien
agaagactcggtaacatggaggaggaagcccca

SEQ ID NO: 117757 - DNA, 33 bp, Homo sapien
cactgtcaagttatcaagaaaacagatctcagg

SEQ ID NO: 117758 - DNA, 33 bp, Homo sapien
cactgtcaagttatcacgaaaacagatctcagg

SEQ ID NO: 117759 - DNA, 33 bp, Homo sapien
tcctagttccctttcactctccatatttaaact

SEQ ID NO: 117760 - DNA, 33 bp, Homo sapien
tcctagttccctttcattctccatatttaaact

SEQ ID NO: 117761 - DNA, 33 bp, Homo sapien
tcggagcgacggaattcaaagcttggttcatgt

SEQ ID NO: 117762 - DNA, 33 bp, Homo sapien
tcggagcgacggaattgaaagcttggttcatgt

SEQ ID NO: 117763 - DNA, 33 bp, Homo sapien
caagggtcactctgagaatccaaagagatgaag

SEQ ID NO: 117764 - DNA, 33 bp, Homo sapien
caagggtcactctgaggatccaaagagatgaag

SEQ ID NO: 117765 - DNA, 33 bp, Homo sapien
tctcggcagacttaccagcttccttcctggcct

SEQ ID NO: 117766 - DNA, 33 bp, Homo sapien
tctcggcagacttacccgcttccttcctggcct

SEQ ID NO: 117767 - DNA, 33 bp, Homo sapien
ccccaaaaagtccatcactctaagaaaagttct

SEQ ID NO: 117768 - DNA, 33 bp, Homo sapien
ccccaaaaagtccatcgctctaagaaaagttct

SEQ ID NO: 117769 - DNA, 33 bp, Homo sapien
agaaaagagctggaagaaaccactgagaactcc

SEQ ID NO: 117770 - DNA, 33 bp, Homo sapien
agaaaagagctggaaggaaccactgagaactcc

SEQ ID NO: 117771 - DNA, 33 bp, Homo sapien
agctcttttctgggaacgtaggcagtgtggcac

SEQ ID NO: 117772 - DNA, 33 bp, Homo sapien
agctcttttctgggaatgtaggcagtgtggcac

SEQ ID NO: 117773 - DNA, 33 bp, Homo sapien
gcagaaagtggcagccaggaaaggaggtaaagg

SEQ ID NO: 117774 - DNA, 33 bp, Homo sapien
gcagaaagtggcagccgggaaaggaggtaaagg

SEQ ID NO: 117775 - DNA, 33 bp, Homo sapien
cctgtatttagctccaagtagcagttagtgaaa

SEQ ID NO: 117776 - DNA, 33 bp, Homo sapien
cctgtatttagctccaggtagcagttagtgaaa

SEQ ID NO: 117777 - DNA, 33 bp, Homo sapien
ccccttgctgtttcttcaaaacacaggcacatc

SEQ ID NO: 117778 - DNA, 33 bp, Homo sapien
ccccttgctgtttcttgaaaacacaggcacatc

SEQ ID NO: 117779 - DNA, 33 bp, Homo sapien
aatagtaagactcccactgccactctcttggga

SEQ ID NO: 117780 - DNA, 33 bp, Homo sapien
aatagtaagactcccattgccactctcttggga

SEQ ID NO: 117781 - DNA, 33 bp, Homo sapien
aaaaccctggggtagacgtgatcaagtgtgcaa

SEQ ID NO: 117782 - DNA, 33 bp, Homo sapien
aaaaccctggggtagatgtgatcaagtgtgcaa

SEQ ID NO: 117783 - DNA, 33 bp, Homo sapien
ttagtggctggccaggaagacgagttttggttg

SEQ ID NO: 117784 - DNA, 33 bp, Homo sapien
ttagtggctggccaggcagacgagttttggttg

SEQ ID NO: 117785 - DNA, 33 bp, Homo sapien
ggtactgcctccaaaacatacatcaaatcgcct

SEQ ID NO: 117786 - DNA, 33 bp, Homo sapien
ggtactgcctccaaaatatacatcaaatcgcct

SEQ ID NO: 117787 - DNA, 33 bp, Homo sapien
ttccatttgcccatgaagctgcttctccctttt

SEQ ID NO: 117788 - DNA, 33 bp, Homo sapien
ttccatttgcccatgaggctgcttctccctttt

SEQ ID NO: 117789 - DNA, 33 bp, Homo sapien
ggctttccaggggctacgggttagtgctttcct

SEQ ID NO: 117790 - DNA, 33 bp, Homo sapien
ggctttccaggggctatgggttagtgctttcct

SEQ ID NO: 117791 - DNA, 33 bp, Homo sapien
aagctttagcggccgccccttccactccttttc

SEQ ID NO: 117792 - DNA, 33 bp, Homo sapien
aagctttagcggccgctccttccactccttttc

SEQ ID NO: 117793 - DNA, 33 bp, Homo sapien
tgtaaagtgctatgccaccgttgacagcactgg

SEQ ID NO: 117794 - DNA, 33 bp, Homo sapien
tgtaaagtgctatgccgccgttgacagcactgg

SEQ ID NO: 117795 - DNA, 33 bp, Homo sapien
ggaactggcacgcagaagtactcaatacatatt

SEQ ID NO: 117796 - DNA, 33 bp, Homo sapien
ggaactggcacgcagaggtactcaatacatatt

SEQ ID NO: 117797 - DNA, 33 bp, Homo sapien
ataagacacattaaggaagactgattttgtata

SEQ ID NO: 117798 - DNA, 33 bp, Homo sapien
ataagacacattaagggagactgattttgtata

SEQ ID NO: 117799 - DNA, 33 bp, Homo sapien
gttttggtcaatgttgcatagcaaatgtcagag

SEQ ID NO: 117800 - DNA, 33 bp, Homo sapien
gttttggtcaatgttgtatagcaaatgtcagag

SEQ ID NO: 117801 - DNA, 33 bp, Homo sapien
tggacctccctaattagactcttgtcccacttg

SEQ ID NO: 117802 - DNA, 33 bp, Homo sapien
tggacctccctaattatactcttgtcccacttg

SEQ ID NO: 117803 - DNA, 33 bp, Homo sapien
agatcctgactccttccaagctcttgccttggc

SEQ ID NO: 117804 - DNA, 33 bp, Homo sapien
agatcctgactccttctaagctcttgccttggc

SEQ ID NO: 117805 - DNA, 33 bp, Homo sapien
gctaaaagagctgtaaccaatagggctgaaact

SEQ ID NO: 117806 - DNA, 33 bp, Homo sapien
gctaaaagagctgtaatcaatagggctgaaact

SEQ ID NO: 117807 - DNA, 33 bp, Homo sapien
aatgggggcacaaggagaatgaaagagcttatc

SEQ ID NO: 117808 - DNA, 33 bp, Homo sapien
aatgggggcacaaggataatgaaagagcttatc

SEQ ID NO: 117809 - DNA, 33 bp, Homo sapien
tctttccctttaattaccaggatctaagacaac

SEQ ID NO: 117810 - DNA, 33 bp, Homo sapien
tctttccctttaattatcaggatctaagacaac

SEQ ID NO: 117811 - DNA, 33 bp, Homo sapien
aggcagctggcatgaaaggaattctggtttgag

SEQ ID NO: 117812 - DNA, 33 bp, Homo sapien
aggcagctggcatgaagggaattctggtttgag

SEQ ID NO: 117813 - DNA, 33 bp, Homo sapien
agggttgaatgtggcaactgaagttttcaattc

SEQ ID NO: 117814 - DNA, 33 bp, Homo sapien
agggttgaatgtggcacctgaagttttcaattc

SEQ ID NO: 117815 - DNA, 33 bp, Homo sapien
ccctgagtctctggatcaaacccgcatttccgt

SEQ ID NO: 117816 - DNA, 33 bp, Homo sapien
ccctgagtctctggatgaaacccgcatttccgt

SEQ ID NO: 117817 - DNA, 33 bp, Homo sapien
ttctttgactgcctccaactgtgcagatcatcc

SEQ ID NO: 117818 - DNA, 33 bp, Homo sapien
ttctttgactgcctccgactgtgcagatcatcc

SEQ ID NO: 117819 - DNA, 33 bp, Homo sapien
atgcaagctaaagtagcagaatttgttgccagc

SEQ ID NO: 117820 - DNA, 33 bp, Homo sapien
atgcaagctaaagtagtagaatttgttgccagc

SEQ ID NO: 117821 - DNA, 33 bp, Homo sapien
gcttgtgtttcccacacgacaccaagagacctg

SEQ ID NO: 117822 - DNA, 33 bp, Homo sapien
gcttgtgtttcccacatgacaccaagagacctg

SEQ ID NO: 117823 - DNA, 33 bp, Homo sapien
aatcataatttacaaaagatgcagcccactcag

SEQ ID NO: 117824 - DNA, 33 bp, Homo sapien
aatcataatttacaaacgatgcagcccactcag

SEQ ID NO: 117825 - DNA, 33 bp, Homo sapien
cagaagcaacctccgaaacttattggctttgtg

SEQ ID NO: 117826 - DNA, 33 bp, Homo sapien
cagaagcaacctccgatacttattggctttgtg

SEQ ID NO: 117827 - DNA, 33 bp, Homo sapien
tagaaaactgtgttgtaaaatactgcttactga

SEQ ID NO: 117828 - DNA, 33 bp, Homo sapien
tagaaaactgtgttgttaaatactgcttactga

SEQ ID NO: 117829 - DNA, 33 bp, Homo sapien
aatcatgaccatgacaacaacatcatcaataac

SEQ ID NO: 117830 - DNA, 33 bp, Homo sapien
aatcatgaccatgacagcaacatcatcaataac

SEQ ID NO: 117831 - DNA, 33 bp, Homo sapien
acaacagctaacagtcactgatggcttcatgca

SEQ ID NO: 117832 - DNA, 33 bp, Homo sapien
acaacagctaacagtcgctgatggcttcatgca

SEQ ID NO: 117833 - DNA, 33 bp, Homo sapien
attgtagcattttgcaagtagtgtagtgattgt

SEQ ID NO: 117834 - DNA, 33 bp, Homo sapien
attgtagcattttgcaggtagtgtagtgattgt

SEQ ID NO: 117835 - DNA, 33 bp, Homo sapien
gctggggaagaaaggaaggatgatgagttcaga

SEQ ID NO: 117836 - DNA, 33 bp, Homo sapien
gctggggaagaaaggagggatgatgagttcaga

SEQ ID NO: 117837 - DNA, 33 bp, Homo sapien
gggtgacagagcataaatctggagtgtgggcag

SEQ ID NO: 117838 - DNA, 33 bp, Homo sapien
gggtgacagagcataagtctggagtgtgggcag

SEQ ID NO: 117839 - DNA, 33 bp, Homo sapien
gttgttcagcaaggagcctacattgggttggct

SEQ ID NO: 117840 - DNA, 33 bp, Homo sapien
gttgttcagcaaggaggctacattgggttggct

SEQ ID NO: 117841 - DNA, 33 bp, Homo sapien
gctgctccaggccagagaataggaggtccttac

SEQ ID NO: 117842 - DNA, 33 bp, Homo sapien
gctgctccaggccagataataggaggtccttac

SEQ ID NO: 117843 - DNA, 33 bp, Homo sapien
gtagatgagtagattacaaacatttgatagagt

SEQ ID NO: 117844 - DNA, 33 bp, Homo sapien
gtagatgagtagattataaacatttgatagagt

SEQ ID NO: 117845 - DNA, 33 bp, Homo sapien
cttgatattatgataaacagatactctccataa

SEQ ID NO: 117846 - DNA, 33 bp, Homo sapien
cttgatattatgataagcagatactctccataa

SEQ ID NO: 117847 - DNA, 33 bp, Homo sapien
tgggtcatctgggtagaaaacctagtactactc

SEQ ID NO: 117848 - DNA, 33 bp, Homo sapien
tgggtcatctgggtagcaaacctagtactactc

SEQ ID NO: 117849 - DNA, 33 bp, Homo sapien
tcctcagctccttctacactctgctctgctggg

SEQ ID NO: 117850 - DNA, 33 bp, Homo sapien
tcctcagctccttctatactctgctctgctggg

SEQ ID NO: 117851 - DNA, 33 bp, Homo sapien
acctagttgaaatggacgagccatgaagatata

SEQ ID NO: 117852 - DNA, 33 bp, Homo sapien
acctagttgaaatggatgagccatgaagatata

SEQ ID NO: 117853 - DNA, 33 bp, Homo sapien
ctgtatagaggaaaatcaaccctagtgctcaga

SEQ ID NO: 117854 - DNA, 33 bp, Homo sapien
ctgtatagaggaaaatgaaccctagtgctcaga

SEQ ID NO: 117855 - DNA, 33 bp, Homo sapien
aaagactttgacaccaatgggaatagcaataat

SEQ ID NO: 117856 - DNA, 33 bp, Homo sapien
aaagactttgacaccagtgggaatagcaataat

SEQ ID NO: 117857 - DNA, 33 bp, Homo sapien
tctttggtgaggtatgcgttaaggtctttggcc

SEQ ID NO: 117858 - DNA, 33 bp, Homo sapien
tctttggtgaggtatgtgttaaggtctttggcc

SEQ ID NO: 117859 - DNA, 33 bp, Homo sapien
catttcatcaaaactaccgtgtaagtgtaccta

SEQ ID NO: 117860 - DNA, 33 bp, Homo sapien
catttcatcaaaactatcgtgtaagtgtaccta

SEQ ID NO: 117861 - DNA, 33 bp, Homo sapien
cacaaaaaatgctcaaactgaggtatttggcac

SEQ ID NO: 117862 - DNA, 33 bp, Homo sapien
cacaaaaaatgctcaacctgaggtatttggcac

SEQ ID NO: 117863 - DNA, 33 bp, Homo sapien
agcagtccctatgccacataggaaccaatagtg

SEQ ID NO: 117864 - DNA, 33 bp, Homo sapien
agcagtccctatgccatataggaaccaatagtg

SEQ ID NO: 117865 - DNA, 33 bp, Homo sapien
aatgagagtttccatacgctgccagtggatgtg

SEQ ID NO: 117866 - DNA, 33 bp, Homo sapien
aatgagagtttccatatgctgccagtggatgtg

SEQ ID NO: 117867 - DNA, 33 bp, Homo sapien
agttttgaaaaagtgcacagcatcattaacaat

SEQ ID NO: 117868 - DNA, 33 bp, Homo sapien
agttttgaaaaagtgcccagcatcattaacaat

SEQ ID NO: 117869 - DNA, 33 bp, Homo sapien
gtggggcacagctaaaagtgctaacagggaaat

SEQ ID NO: 117870 - DNA, 33 bp, Homo sapien
gtggggcacagctaaacgtgctaacagggaaat

SEQ ID NO: 117871 - DNA, 33 bp, Homo sapien
aaatagaaacagaagaatcagtgaagcagcgct

SEQ ID NO: 117872 - DNA, 33 bp, Homo sapien
aaatagaaacagaagactcagtgaagcagcgct

SEQ ID NO: 117873 - DNA, 33 bp, Homo sapien
acttcttcgccatatgcagctcatggaaaggtg

SEQ ID NO: 117874 - DNA, 33 bp, Homo sapien
acttcttcgccatatgtagctcatggaaaggtg

SEQ ID NO: 117875 - DNA, 33 bp, Homo sapien
gacttaaaaattatgaactctgctatgaacaga

SEQ ID NO: 117876 - DNA, 33 bp, Homo sapien
gacttaaaaattatgacctctgctatgaacaga

SEQ ID NO: 117877 - DNA, 33 bp, Homo sapien
ccacagcatggttgccaagatgccactgcggaa

SEQ ID NO: 117878 - DNA, 33 bp, Homo sapien
ccacagcatggttgccgagatgccactgcggaa

SEQ ID NO: 117879 - DNA, 33 bp, Homo sapien
gggtccgttggttcccaagatacttttaggtgg

SEQ ID NO: 117880 - DNA, 33 bp, Homo sapien
gggtccgttggttcccgagatacttttaggtgg

SEQ ID NO: 117881 - DNA, 33 bp, Homo sapien
gattttctcagtaggaacgcagaactaggagag

SEQ ID NO: 117882 - DNA, 33 bp, Homo sapien
gattttctcagtaggatcgcagaactaggagag

SEQ ID NO: 117883 - DNA, 33 bp, Homo sapien
ccttacccagtgcagcacccaccaacgcctcac

SEQ ID NO: 117884 - DNA, 33 bp, Homo sapien
ccttacccagtgcagcgcccaccaacgcctcac

SEQ ID NO: 117885 - DNA, 33 bp, Homo sapien
tgtaagtgcaggtagccctaccccgcagcacgt

SEQ ID NO: 117886 - DNA, 33 bp, Homo sapien
tgtaagtgcaggtagctctaccccgcagcacgt

SEQ ID NO: 117887 - DNA, 33 bp, Homo sapien
aagaaattgttaggaactgagtagcatgcagcc

SEQ ID NO: 117888 - DNA, 33 bp, Homo sapien
aagaaattgttaggaattgagtagcatgcagcc

SEQ ID NO: 117889 - DNA, 33 bp, Homo sapien
tgtttctttcagagccaccacacaaagacctga

SEQ ID NO: 117890 - DNA, 33 bp, Homo sapien
tgtttctttcagagccgccacacaaagacctga

SEQ ID NO: 117891 - DNA, 33 bp, Homo sapien
actgtttctgagatccaaaggtggcagatggag

SEQ ID NO: 117892 - DNA, 33 bp, Homo sapien
actgtttctgagatccgaaggtggcagatggag

SEQ ID NO: 117893 - DNA, 33 bp, Homo sapien
agtggtccttgtcatcgaagaggaagagctatg

SEQ ID NO: 117894 - DNA, 33 bp, Homo sapien
agtggtccttgtcatctaagaggaagagctatg

SEQ ID NO: 117895 - DNA, 33 bp, Homo sapien
ccactctaaatccagagacacttcaagtgggtg

SEQ ID NO: 117896 - DNA, 33 bp, Homo sapien
ccactctaaatccagatacacttcaagtgggtg

SEQ ID NO: 117897 - DNA, 33 bp, Homo sapien
gccatccgttgtgactaaaagcatctgggtcag

SEQ ID NO: 117898 - DNA, 33 bp, Homo sapien
gccatccgttgtgacttaaagcatctgggtcag

SEQ ID NO: 117899 - DNA, 33 bp, Homo sapien
cctggagccagaagcactataaatccaagacat

SEQ ID NO: 117900 - DNA, 33 bp, Homo sapien
cctggagccagaagcattataaatccaagacat

SEQ ID NO: 117901 - DNA, 33 bp, Homo sapien
cctgagagccacacaaaaaagcctcagggtgaa

SEQ ID NO: 117902 - DNA, 33 bp, Homo sapien
cctgagagccacacaacaaagcctcagggtgaa

SEQ ID NO: 117903 - DNA, 33 bp, Homo sapien
aataataaaaaaagagaatgccatagaccaggt

SEQ ID NO: 117904 - DNA, 33 bp, Homo sapien
aataataaaaaaagagcatgccatagaccaggt

SEQ ID NO: 117905 - DNA, 33 bp, Homo sapien
aagtggatatgaaaaacggcatagaaattgaaa

SEQ ID NO: 117906 - DNA, 33 bp, Homo sapien
aagtggatatgaaaaagggcatagaaattgaaa

SEQ ID NO: 117907 - DNA, 33 bp, Homo sapien
ggcaggtgtaataccaaggtgtgtcatcgtcat

SEQ ID NO: 117908 - DNA, 33 bp, Homo sapien
ggcaggtgtaataccagggtgtgtcatcgtcat

SEQ ID NO: 117909 - DNA, 33 bp, Homo sapien
cactctagaacaatgcagacaatgctaaaccaa

SEQ ID NO: 117910 - DNA, 33 bp, Homo sapien
cactctagaacaatgcggacaatgctaaaccaa

SEQ ID NO: 117911 - DNA, 33 bp, Homo sapien
gacgatatttgtgtagcagaggctgcctcagga

SEQ ID NO: 117912 - DNA, 33 bp, Homo sapien
gacgatatttgtgtagtagaggctgcctcagga

SEQ ID NO: 117913 - DNA, 33 bp, Homo sapien
ggtaatgggatcctgcaccttctgttccccttc

SEQ ID NO: 117914 - DNA, 33 bp, Homo sapien
ggtaatgggatcctgcgccttctgttccccttc

SEQ ID NO: 117915 - DNA, 33 bp, Homo sapien
tagttagtaggacatcaatgttcagaaccatgt

SEQ ID NO: 117916 - DNA, 33 bp, Homo sapien
tagttagtaggacatcgatgttcagaaccatgt

SEQ ID NO: 117917 - DNA, 33 bp, Homo sapien
ttaaggaagcaagatgaacaagagttggtgagc

SEQ ID NO: 117918 - DNA, 33 bp, Homo sapien
ttaaggaagcaagatggacaagagttggtgagc

SEQ ID NO: 117919 - DNA, 33 bp, Homo sapien
attttagctgagcctcaatggacaggtgggatt

SEQ ID NO: 117920 - DNA, 33 bp, Homo sapien
attttagctgagcctcgatggacaggtgggatt

SEQ ID NO: 117921 - DNA, 33 bp, Homo sapien
gatgaaagaggcaccactggaatttacagccca

SEQ ID NO: 117922 - DNA, 33 bp, Homo sapien
gatgaaagaggcaccattggaatttacagccca

SEQ ID NO: 117923 - DNA, 33 bp, Homo sapien
ctgagaataagaggaacagaagatatgagggtg

SEQ ID NO: 117924 - DNA, 33 bp, Homo sapien
ctgagaataagaggaagagaagatatgagggtg

SEQ ID NO: 117925 - DNA, 33 bp, Homo sapien
ccccggtgtcctgaccactgaatattctgaacg

SEQ ID NO: 117926 - DNA, 33 bp, Homo sapien
ccccggtgtcctgaccgctgaatattctgaacg

SEQ ID NO: 117927 - DNA, 33 bp, Homo sapien
tttcttgaagcactcccagattctcataagcag

SEQ ID NO: 117928 - DNA, 33 bp, Homo sapien
tttcttgaagcactcctagattctcataagcag

SEQ ID NO: 117929 - DNA, 33 bp, Homo sapien
tcatgtctaacatatacaagactttcaataaat

SEQ ID NO: 117930 - DNA, 33 bp, Homo sapien
tcatgtctaacatatagaagactttcaataaat

SEQ ID NO: 117931 - DNA, 33 bp, Homo sapien
gccaaagtggagactgaatggtagtttctgggg

SEQ ID NO: 117932 - DNA, 33 bp, Homo sapien
gccaaagtggagactgtatggtagtttctgggg

SEQ ID NO: 117933 - DNA, 33 bp, Homo sapien
ttgaggtcctgttgccaaggtcagacactcagg

SEQ ID NO: 117934 - DNA, 33 bp, Homo sapien
ttgaggtcctgttgccgaggtcagacactcagg

SEQ ID NO: 117935 - DNA, 33 bp, Homo sapien
tttgcaacattggtgcagataagggacccgata

SEQ ID NO: 117936 - DNA, 33 bp, Homo sapien
tttgcaacattggtgcggataagggacccgata

SEQ ID NO: 117937 - DNA, 33 bp, Homo sapien
acacaccaggagattcccaccttcggccaagtt

SEQ ID NO: 117938 - DNA, 33 bp, Homo sapien
acacaccaggagattcgcaccttcggccaagtt

SEQ ID NO: 117939 - DNA, 33 bp, Homo sapien
gcccatttgatcctcaaaacaattctgcaaggc

SEQ ID NO: 117940 - DNA, 33 bp, Homo sapien
gcccatttgatcctcacaacaattctgcaaggc

SEQ ID NO: 117941 - DNA, 33 bp, Homo sapien
ggaaacagggcagaacaaactagcagcactcaa

SEQ ID NO: 117942 - DNA, 33 bp, Homo sapien
ggaaacagggcagaacgaactagcagcactcaa

SEQ ID NO: 117943 - DNA, 33 bp, Homo sapien
agatatttttattccactcttaaccacagttat

SEQ ID NO: 117944 - DNA, 33 bp, Homo sapien
agatatttttattccattcttaaccacagttat

SEQ ID NO: 117945 - DNA, 33 bp, Homo sapien
aatgggatgtataatacgttgggtactgcatgg

SEQ ID NO: 117946 - DNA, 33 bp, Homo sapien
aatgggatgtataatatgttgggtactgcatgg

SEQ ID NO: 117947 - DNA, 33 bp, Homo sapien
aaaatctactcaagaccggggcattagcacctc

SEQ ID NO: 117948 - DNA, 33 bp, Homo sapien
aaaatctactcaagacgggggcattagcacctc

SEQ ID NO: 117949 - DNA, 33 bp, Homo sapien
ctgctgcagaagaaaacggaaaccagatgtgtg

SEQ ID NO: 117950 - DNA, 33 bp, Homo sapien
ctgctgcagaagaaaatggaaaccagatgtgtg

SEQ ID NO: 117951 - DNA, 33 bp, Homo sapien
tggacatgatttttcaagagattcaaagaggaa

SEQ ID NO: 117952 - DNA, 33 bp, Homo sapien
tggacatgatttttcaggagattcaaagaggaa

SEQ ID NO: 117953 - DNA, 33 bp, Homo sapien
aactccacttccccaaactcttggcaaatttcc

SEQ ID NO: 117954 - DNA, 33 bp, Homo sapien
aactccacttccccaagctcttggcaaatttcc

SEQ ID NO: 117955 - DNA, 33 bp, Homo sapien
attacagaagccagtaaatctccttcttagctt

SEQ ID NO: 117956 - DNA, 33 bp, Homo sapien
attacagaagccagtagatctccttcttagctt

SEQ ID NO: 117957 - DNA, 33 bp, Homo sapien
tcttggctcactgcaaacttagctcactgcaac

SEQ ID NO: 117958 - DNA, 33 bp, Homo sapien
tcttggctcactgcaaccttagctcactgcaac

SEQ ID NO: 117959 - DNA, 33 bp, Homo sapien
gagtagcttgggaaaaaagccacaagaaagcta

SEQ ID NO: 117960 - DNA, 33 bp, Homo sapien
gagtagcttgggaaaagagccacaagaaagcta

SEQ ID NO: 117961 - DNA, 33 bp, Homo sapien
tgtttgtctccagagtaacagatcattgtttta

SEQ ID NO: 117962 - DNA, 33 bp, Homo sapien
tgtttgtctccagagtgacagatcattgtttta

SEQ ID NO: 117963 - DNA, 33 bp, Homo sapien
aatattaacaatgtcagcacaacaataactcat

SEQ ID NO: 117964 - DNA, 33 bp, Homo sapien
aatattaacaatgtcatcacaacaataactcat

SEQ ID NO: 117965 - DNA, 33 bp, Homo sapien
ctcaaagcctccatcactcatttgaaacatgcc

SEQ ID NO: 117966 - DNA, 33 bp, Homo sapien
ctcaaagcctccatcattcatttgaaacatgcc

SEQ ID NO: 117967 - DNA, 33 bp, Homo sapien
tctctgggccagcttcaacataggcagagcagc

SEQ ID NO: 117968 - DNA, 33 bp, Homo sapien
tctctgggccagcttccacataggcagagcagc

SEQ ID NO: 117969 - DNA, 33 bp, Homo sapien
acatgagcatgtcaccacctctgcccttgagct

SEQ ID NO: 117970 - DNA, 33 bp, Homo sapien
acatgagcatgtcaccgcctctgcccttgagct

SEQ ID NO: 117971 - DNA, 33 bp, Homo sapien
ggtgtttgtggaacctcagactgtggagaccaa

SEQ ID NO: 117972 - DNA, 33 bp, Homo sapien
ggtgtttgtggaacctgagactgtggagaccaa

SEQ ID NO: 117973 - DNA, 33 bp, Homo sapien
gagtcctgttcatttgaagctcctgctaaacac

SEQ ID NO: 117974 - DNA, 33 bp, Homo sapien
gagtcctgttcatttgcagctcctgctaaacac

SEQ ID NO: 117975 - DNA, 33 bp, Homo sapien
acagcttaattgagcaaaacactaggctcataa

SEQ ID NO: 117976 - DNA, 33 bp, Homo sapien
acagcttaattgagcagaacactaggctcataa

SEQ ID NO: 117977 - DNA, 33 bp, Homo sapien
tcaggcagtgggtccacaggcagcacaggtgat

SEQ ID NO: 117978 - DNA, 33 bp, Homo sapien
tcaggcagtgggtccataggcagcacaggtgat

SEQ ID NO: 117979 - DNA, 33 bp, Homo sapien
cctcacacgatagtaaatcctgaaggagttctc

SEQ ID NO: 117980 - DNA, 33 bp, Homo sapien
cctcacacgatagtaagtcctgaaggagttctc

SEQ ID NO: 117981 - DNA, 33 bp, Homo sapien
cttagttattcctgcaccatttagagaaaatgc

SEQ ID NO: 117982 - DNA, 33 bp, Homo sapien
cttagttattcctgcatcatttagagaaaatgc

SEQ ID NO: 117983 - DNA, 33 bp, Homo sapien
cattactgccatccccagaaacttgcagatgca

SEQ ID NO: 117984 - DNA, 33 bp, Homo sapien
cattactgccatccccggaaacttgcagatgca

SEQ ID NO: 117985 - DNA, 33 bp, Homo sapien
gtccttttcagcctgaagcatctaggaattcct

SEQ ID NO: 117986 - DNA, 33 bp, Homo sapien
gtccttttcagcctgacgcatctaggaattcct

SEQ ID NO: 117987 - DNA, 33 bp, Homo sapien
tgtggagatgaggaaagcatgtgtgaaaaacat

SEQ ID NO: 117988 - DNA, 33 bp, Homo sapien
tgtggagatgaggaaatcatgtgtgaaaaacat

SEQ ID NO: 117989 - DNA, 33 bp, Homo sapien
aatggtggatctgggaatcaaaatggagttggt

SEQ ID NO: 117990 - DNA, 33 bp, Homo sapien
aatggtggatctgggattcaaaatggagttggt

SEQ ID NO: 117991 - DNA, 33 bp, Homo sapien
tcctctgcatagctcacgtttcctttccagact

SEQ ID NO: 117992 - DNA, 33 bp, Homo sapien
tcctctgcatagctcatgtttcctttccagact

SEQ ID NO: 117993 - DNA, 33 bp, Homo sapien
acagacctttggcagccagaccagactggggga

SEQ ID NO: 117994 - DNA, 33 bp, Homo sapien
acagacctttggcagctagaccagactggggga

SEQ ID NO: 117995 - DNA, 33 bp, Homo sapien
tgtcagcttgtcccccaagacactcccctggga

SEQ ID NO: 117996 - DNA, 33 bp, Homo sapien
tgtcagcttgtcccccgagacactcccctggga

SEQ ID NO: 117997 - DNA, 33 bp, Homo sapien
aacttgtgctttgaccaaagaattgaaatggga

SEQ ID NO: 117998 - DNA, 33 bp, Homo sapien
aacttgtgctttgaccgaagaattgaaatggga

SEQ ID NO: 117999 - DNA, 33 bp, Homo sapien
cattaatggaagcatcagaatgtgaggacagag

SEQ ID NO: 118000 - DNA, 33 bp, Homo sapien
cattaatggaagcatcggaatgtgaggacagag

SEQ ID NO: 118001 - DNA, 33 bp, Homo sapien
ggaaaaatgattttaccgaaacacagtttttat

SEQ ID NO: 118002 - DNA, 33 bp, Homo sapien
ggaaaaatgattttacggaaacacagtttttat

SEQ ID NO: 118003 - DNA, 33 bp, Homo sapien
actgagactgacttaaacttgtaccccagcctc

SEQ ID NO: 118004 - DNA, 33 bp, Homo sapien
actgagactgacttaaccttgtaccccagcctc

SEQ ID NO: 118005 - DNA, 33 bp, Homo sapien
tcccatgagtatcaagcagagtggtcactacag

SEQ ID NO: 118006 - DNA, 33 bp, Homo sapien
tcccatgagtatcaaggagagtggtcactacag

SEQ ID NO: 118007 - DNA, 33 bp, Homo sapien
catgggtctaggacgaagaaggagagcagagca

SEQ ID NO: 118008 - DNA, 33 bp, Homo sapien
catgggtctaggacgaggaaggagagcagagca

SEQ ID NO: 118009 - DNA, 33 bp, Homo sapien
ggagttgtaagctgaaaaatattctgtgctcag

SEQ ID NO: 118010 - DNA, 33 bp, Homo sapien
ggagttgtaagctgaacaatattctgtgctcag

SEQ ID NO: 118011 - DNA, 33 bp, Homo sapien
atgcaagaccctcccaagtgcaaaatatactca

SEQ ID NO: 118012 - DNA, 33 bp, Homo sapien
atgcaagaccctcccacgtgcaaaatatactca

SEQ ID NO: 118013 - DNA, 33 bp, Homo sapien
actggaggctaactaccgtagtgctccctctag

SEQ ID NO: 118014 - DNA, 33 bp, Homo sapien
actggaggctaactactgtagtgctccctctag

SEQ ID NO: 118015 - DNA, 33 bp, Homo sapien
tatgtctgaccatttacacttcagctgtgtata

SEQ ID NO: 118016 - DNA, 33 bp, Homo sapien
tatgtctgaccatttatacttcagctgtgtata

SEQ ID NO: 118017 - DNA, 33 bp, Homo sapien
cagtcatgagtgcaaaacctcctgtggattaac

SEQ ID NO: 118018 - DNA, 33 bp, Homo sapien
cagtcatgagtgcaaagcctcctgtggattaac

SEQ ID NO: 118019 - DNA, 33 bp, Homo sapien
gcttgcccatttgcacagtctaggtcattgata

SEQ ID NO: 118020 - DNA, 33 bp, Homo sapien
gcttgcccatttgcacggtctaggtcattgata

SEQ ID NO: 118021 - DNA, 33 bp, Homo sapien
ctcttctacgctcccactatttcctgcatggta

SEQ ID NO: 118022 - DNA, 33 bp, Homo sapien
ctcttctacgctcccattatttcctgcatggta

SEQ ID NO: 118023 - DNA, 33 bp, Homo sapien
agccttgtctcatttacgattgtgtctccaaca

SEQ ID NO: 118024 - DNA, 33 bp, Homo sapien
agccttgtctcatttatgattgtgtctccaaca

SEQ ID NO: 118025 - DNA, 33 bp, Homo sapien
gtatgtaagtttaggaaggcaaaagtgtctccc

SEQ ID NO: 118026 - DNA, 33 bp, Homo sapien
gtatgtaagtttaggagggcaaaagtgtctccc

SEQ ID NO: 118027 - DNA, 33 bp, Homo sapien
gctatgcgtgtcaccactatatctctttcaatc

SEQ ID NO: 118028 - DNA, 33 bp, Homo sapien
gctatgcgtgtcaccattatatctctttcaatc

SEQ ID NO: 118029 - DNA, 33 bp, Homo sapien
aggagattccttaacaaccaaaggaatgaatca

SEQ ID NO: 118030 - DNA, 33 bp, Homo sapien
aggagattccttaacatccaaaggaatgaatca

SEQ ID NO: 118031 - DNA, 33 bp, Homo sapien
cgtcttgaacaccaaccgtcactagtaagtagc

SEQ ID NO: 118032 - DNA, 33 bp, Homo sapien
cgtcttgaacaccaactgtcactagtaagtagc

SEQ ID NO: 118033 - DNA, 33 bp, Homo sapien
gaaggtttattagtcaactctcctcgcagcgtc

SEQ ID NO: 118034 - DNA, 33 bp, Homo sapien
gaaggtttattagtcagctctcctcgcagcgtc

SEQ ID NO: 118035 - DNA, 33 bp, Homo sapien
ttggctgggcctctgacgacattaagagccaga

SEQ ID NO: 118036 - DNA, 33 bp, Homo sapien
ttggctgggcctctgatgacattaagagccaga

SEQ ID NO: 118037 - DNA, 33 bp, Homo sapien
gtcaaggctgaagtaaagtacagagctgggatt

SEQ ID NO: 118038 - DNA, 33 bp, Homo sapien
gtcaaggctgaagtaaggtacagagctgggatt

SEQ ID NO: 118039 - DNA, 33 bp, Homo sapien
gcccagtccaaggcagaaaacaattagcagaga

SEQ ID NO: 118040 - DNA, 33 bp, Homo sapien
gcccagtccaaggcaggaaacaattagcagaga

SEQ ID NO: 118041 - DNA, 33 bp, Homo sapien
cttgggcaatgacaaccgatttttgctcagcgt

SEQ ID NO: 118042 - DNA, 33 bp, Homo sapien
cttgggcaatgacaactgatttttgctcagcgt

SEQ ID NO: 118043 - DNA, 33 bp, Homo sapien
gtaagatccttatttacatgtaagagatgagca

SEQ ID NO: 118044 - DNA, 33 bp, Homo sapien
gtaagatccttatttagatgtaagagatgagca

SEQ ID NO: 118045 - DNA, 33 bp, Homo sapien
ggtcacagtccagtccagatctatggcccagtg

SEQ ID NO: 118046 - DNA, 33 bp, Homo sapien
ggtcacagtccagtccggatctatggcccagtg

SEQ ID NO: 118047 - DNA, 33 bp, Homo sapien
gcttgggcagttataacagactagaaggtggga

SEQ ID NO: 118048 - DNA, 33 bp, Homo sapien
gcttgggcagttataagagactagaaggtggga

SEQ ID NO: 118049 - DNA, 33 bp, Homo sapien
agatgaaggagatgtacgtaaagcacgtggtac

SEQ ID NO: 118050 - DNA, 33 bp, Homo sapien
agatgaaggagatgtatgtaaagcacgtggtac

SEQ ID NO: 118051 - DNA, 33 bp, Homo sapien
tgaggctgtctcaggcgcattttacaaaatggg

SEQ ID NO: 118052 - DNA, 33 bp, Homo sapien
tgaggctgtctcaggctcattttacaaaatggg

SEQ ID NO: 118053 - DNA, 33 bp, Homo sapien
agggctaagataaaaacgagatgtgaaaaagaa

SEQ ID NO: 118054 - DNA, 33 bp, Homo sapien
agggctaagataaaaaggagatgtgaaaaagaa

SEQ ID NO: 118055 - DNA, 33 bp, Homo sapien
acgcagccatgttaaagatgtcgtttccaaggc

SEQ ID NO: 118056 - DNA, 33 bp, Homo sapien
acgcagccatgttaaatatgtcgtttccaaggc

SEQ ID NO: 118057 - DNA, 33 bp, Homo sapien
cgtgccacatgcttaacgccctttctattcaaa

SEQ ID NO: 118058 - DNA, 33 bp, Homo sapien
cgtgccacatgcttaaggccctttctattcaaa

SEQ ID NO: 118059 - DNA, 33 bp, Homo sapien
caagcagaaatgacagaaaccactttttttttt

SEQ ID NO: 118060 - DNA, 33 bp, Homo sapien
caagcagaaatgacaggaaccactttttttttt

SEQ ID NO: 118061 - DNA, 33 bp, Homo sapien
tccgatttccttacacacatgacaaagctgtac

SEQ ID NO: 118062 - DNA, 33 bp, Homo sapien
tccgatttccttacacgcatgacaaagctgtac

SEQ ID NO: 118063 - DNA, 33 bp, Homo sapien
agtttattttggaagacggatgataggaattaa

SEQ ID NO: 118064 - DNA, 33 bp, Homo sapien
agtttattttggaagatggatgataggaattaa

SEQ ID NO: 118065 - DNA, 33 bp, Homo sapien
tttctctcaattaccacgtcccaattctagaga

SEQ ID NO: 118066 - DNA, 33 bp, Homo sapien
tttctctcaattaccatgtcccaattctagaga

SEQ ID NO: 118067 - DNA, 33 bp, Homo sapien
actctgggacaaaaaagatagccatctcttatt

SEQ ID NO: 118068 - DNA, 33 bp, Homo sapien
actctgggacaaaaaatatagccatctcttatt

SEQ ID NO: 118069 - DNA, 33 bp, Homo sapien
agattccagacccttacgttcctccctcttacc

SEQ ID NO: 118070 - DNA, 33 bp, Homo sapien
agattccagacccttatgttcctccctcttacc

SEQ ID NO: 118071 - DNA, 33 bp, Homo sapien
ctcatctttatcaaacacaacttcaaggcacag

SEQ ID NO: 118072 - DNA, 33 bp, Homo sapien
ctcatctttatcaaacgcaacttcaaggcacag

SEQ ID NO: 118073 - DNA, 33 bp, Homo sapien
tgttgtggaaagagcacggaaggaggagtctgg

SEQ ID NO: 118074 - DNA, 33 bp, Homo sapien
tgttgtggaaagagcatggaaggaggagtctgg

SEQ ID NO: 118075 - DNA, 33 bp, Homo sapien
aggtatatttagccagaccactttccttaacat

SEQ ID NO: 118076 - DNA, 33 bp, Homo sapien
aggtatatttagccaggccactttccttaacat

SEQ ID NO: 118077 - DNA, 33 bp, Homo sapien
gagaggggccagagaacgaatggctaacttaca

SEQ ID NO: 118078 - DNA, 33 bp, Homo sapien
gagaggggccagagaatgaatggctaacttaca

SEQ ID NO: 118079 - DNA, 33 bp, Homo sapien
gggcttgtggcagccaaccaaaagggcacgagg

SEQ ID NO: 118080 - DNA, 33 bp, Homo sapien
gggcttgtggcagccatccaaaagggcacgagg

SEQ ID NO: 118081 - DNA, 33 bp, Homo sapien
cagccaaaggagacccaaggctgagaactgggc

SEQ ID NO: 118082 - DNA, 33 bp, Homo sapien
cagccaaaggagaccccaggctgagaactgggc

SEQ ID NO: 118083 - DNA, 33 bp, Homo sapien
tgaagtttaacccaatcaggcctacagaccacc

SEQ ID NO: 118084 - DNA, 33 bp, Homo sapien
tgaagtttaacccaattaggcctacagaccacc

SEQ ID NO: 118085 - DNA, 33 bp, Homo sapien
cttaattatgtcgaggcccaacaacacatggta

SEQ ID NO: 118086 - DNA, 33 bp, Homo sapien
cttaattatgtcgaggtccaacaacacatggta

SEQ ID NO: 118087 - DNA, 33 bp, Homo sapien
ctggagcggtgtcaaccgaatctattatgcggc

SEQ ID NO: 118088 - DNA, 33 bp, Homo sapien
ctggagcggtgtcaactgaatctattatgcggc

SEQ ID NO: 118089 - DNA, 33 bp, Homo sapien
cgtggctttaggaggccatcagagcccatgtga

SEQ ID NO: 118090 - DNA, 33 bp, Homo sapien
cgtggctttaggaggctatcagagcccatgtga

SEQ ID NO: 118091 - DNA, 33 bp, Homo sapien
cattgaagctgagcaaaccgtggctttaggagg

SEQ ID NO: 118092 - DNA, 33 bp, Homo sapien
cattgaagctgagcaacccgtggctttaggagg

SEQ ID NO: 118093 - DNA, 33 bp, Homo sapien
cagagccagagtgcaaaaggtggtgagtgtgat

SEQ ID NO: 118094 - DNA, 33 bp, Homo sapien
cagagccagagtgcaacaggtggtgagtgtgat

SEQ ID NO: 118095 - DNA, 33 bp, Homo sapien
tctgatagttttgctgaaatagagtcccagagg

SEQ ID NO: 118096 - DNA, 33 bp, Homo sapien
tctgatagttttgctggaatagagtcccagagg

SEQ ID NO: 118097 - DNA, 33 bp, Homo sapien
gagggcgagagaacacaagcaagagaaggctgg

SEQ ID NO: 118098 - DNA, 33 bp, Homo sapien
gagggcgagagaacacgagcaagagaaggctgg

SEQ ID NO: 118099 - DNA, 33 bp, Homo sapien
cccactcctgcaatcacaaacccacacccatga

SEQ ID NO: 118100 - DNA, 33 bp, Homo sapien
cccactcctgcaatcataaacccacacccatga

SEQ ID NO: 118101 - DNA, 33 bp, Homo sapien
ctgctctctgcttggagtaaggcctacggagga

SEQ ID NO: 118102 - DNA, 33 bp, Homo sapien
ctgctctctgcttggattaaggcctacggagga

SEQ ID NO: 118103 - DNA, 33 bp, Homo sapien
tctggctggcttttaagaggataccaggcccag

SEQ ID NO: 118104 - DNA, 33 bp, Homo sapien
tctggctggcttttaataggataccaggcccag

SEQ ID NO: 118105 - DNA, 33 bp, Homo sapien
cacaatgactacaatccatcccttcctgcattg

SEQ ID NO: 118106 - DNA, 33 bp, Homo sapien
cacaatgactacaatctatcccttcctgcattg

SEQ ID NO: 118107 - DNA, 33 bp, Homo sapien
ataaatttgtgtgtgcagattacaaacgctaag

SEQ ID NO: 118108 - DNA, 33 bp, Homo sapien
ataaatttgtgtgtgccgattacaaacgctaag

SEQ ID NO: 118109 - DNA, 33 bp, Homo sapien
aaggagaaggatggaccaggacctcctgtaaga

SEQ ID NO: 118110 - DNA, 33 bp, Homo sapien
aaggagaaggatggacgaggacctcctgtaaga

SEQ ID NO: 118111 - DNA, 33 bp, Homo sapien
gggacagcatggggtcactctaccatcgtggca

SEQ ID NO: 118112 - DNA, 33 bp, Homo sapien
gggacagcatggggtcgctctaccatcgtggca

SEQ ID NO: 118113 - DNA, 33 bp, Homo sapien
gtgttctggtcaaaaacgttttgaaaatgccac

SEQ ID NO: 118114 - DNA, 33 bp, Homo sapien
gtgttctggtcaaaaatgttttgaaaatgccac

SEQ ID NO: 118115 - DNA, 33 bp, Homo sapien
ccctgcacatccacacaggccccagcattggac

SEQ ID NO: 118116 - DNA, 33 bp, Homo sapien
ccctgcacatccacacgggccccagcattggac

SEQ ID NO: 118117 - DNA, 33 bp, Homo sapien
cctttaaacagacacaatatagcaaaatatgga

SEQ ID NO: 118118 - DNA, 33 bp, Homo sapien
cctttaaacagacacagtatagcaaaatatgga

SEQ ID NO: 118119 - DNA, 33 bp, Homo sapien
aactggccttcataaactgagtgacttgagggg

SEQ ID NO: 118120 - DNA, 33 bp, Homo sapien
aactggccttcataaagtgagtgacttgagggg

SEQ ID NO: 118121 - DNA, 33 bp, Homo sapien
tctcctcatctctaaaatggcgataataatgtt

SEQ ID NO: 118122 - DNA, 33 bp, Homo sapien
tctcctcatctctaaactggcgataataatgtt

SEQ ID NO: 118123 - DNA, 33 bp, Homo sapien
aggcagctctaaaccaagtcttcatctctttcc

SEQ ID NO: 118124 - DNA, 33 bp, Homo sapien
aggcagctctaaaccatgtcttcatctctttcc

SEQ ID NO: 118125 - DNA, 33 bp, Homo sapien
tagcctcctaaagaaaagatcctaattcaggaa

SEQ ID NO: 118126 - DNA, 33 bp, Homo sapien
tagcctcctaaagaaatgatcctaattcaggaa

SEQ ID NO: 118127 - DNA, 33 bp, Homo sapien
ctcacagcctagtcggaagaacaaactgccccg

SEQ ID NO: 118128 - DNA, 33 bp, Homo sapien
ctcacagcctagtcgggagaacaaactgccccg

SEQ ID NO: 118129 - DNA, 33 bp, Homo sapien
aattcttagcctactcccgcctcagttagtagc

SEQ ID NO: 118130 - DNA, 33 bp, Homo sapien
aattcttagcctactctcgcctcagttagtagc

SEQ ID NO: 118131 - DNA, 33 bp, Homo sapien
gttcccaccccaggtaaccataaagagcagaga

SEQ ID NO: 118132 - DNA, 33 bp, Homo sapien
gttcccaccccaggtagccataaagagcagaga

SEQ ID NO: 118133 - DNA, 33 bp, Homo sapien
ccttctgcttatgactaacaactgaaggatcag

SEQ ID NO: 118134 - DNA, 33 bp, Homo sapien
ccttctgcttatgactgacaactgaaggatcag

SEQ ID NO: 118135 - DNA, 33 bp, Homo sapien
acttcctgctgtcctccaggaattatctaaaca

SEQ ID NO: 118136 - DNA, 33 bp, Homo sapien
acttcctgctgtcctcgaggaattatctaaaca

SEQ ID NO: 118137 - DNA, 33 bp, Homo sapien
tctggcagatttgcccagcttcttcattaggaa

SEQ ID NO: 118138 - DNA, 33 bp, Homo sapien
tctggcagatttgcccggcttcttcattaggaa

SEQ ID NO: 118139 - DNA, 33 bp, Homo sapien
gaacatcatggcacaaatcatccccaaatggta

SEQ ID NO: 118140 - DNA, 33 bp, Homo sapien
gaacatcatggcacaagtcatccccaaatggta

SEQ ID NO: 118141 - DNA, 33 bp, Homo sapien
tttccgaagatctggaagaacatcaaaaatatt

SEQ ID NO: 118142 - DNA, 33 bp, Homo sapien
tttccgaagatctggaggaacatcaaaaatatt

SEQ ID NO: 118143 - DNA, 33 bp, Homo sapien
cttccactgcaggaacagtgcacatgacaacct

SEQ ID NO: 118144 - DNA, 33 bp, Homo sapien
cttccactgcaggaacggtgcacatgacaacct

SEQ ID NO: 118145 - DNA, 33 bp, Homo sapien
cttgcagctgtggttacaaagcaaatccaacag

SEQ ID NO: 118146 - DNA, 33 bp, Homo sapien
cttgcagctgtggttataaagcaaatccaacag

SEQ ID NO: 118147 - DNA, 33 bp, Homo sapien
tcagtaagaagccatccgatcatgaaagaaagg

SEQ ID NO: 118148 - DNA, 33 bp, Homo sapien
tcagtaagaagccatctgatcatgaaagaaagg

SEQ ID NO: 118149 - DNA, 33 bp, Homo sapien
gagcataggcaacaaaaggagagtgcagagcaa

SEQ ID NO: 118150 - DNA, 33 bp, Homo sapien
gagcataggcaacaaagggagagtgcagagcaa

SEQ ID NO: 118151 - DNA, 33 bp, Homo sapien
tcccacaatctgggcaactttagttctgccagc

SEQ ID NO: 118152 - DNA, 33 bp, Homo sapien
tcccacaatctgggcacctttagttctgccagc

SEQ ID NO: 118153 - DNA, 33 bp, Homo sapien
atggttgctaccaacaaaggagaccgacggtgt

SEQ ID NO: 118154 - DNA, 33 bp, Homo sapien
atggttgctaccaacagaggagaccgacggtgt

SEQ ID NO: 118155 - DNA, 33 bp, Homo sapien
tcccagcaaggtctaacgcttcgccaggaaccc

SEQ ID NO: 118156 - DNA, 33 bp, Homo sapien
tcccagcaaggtctaaggcttcgccaggaaccc

SEQ ID NO: 118157 - DNA, 33 bp, Homo sapien
tgcagctatagtgcaacgtcaataggggctgtc

SEQ ID NO: 118158 - DNA, 33 bp, Homo sapien
tgcagctatagtgcaaggtcaataggggctgtc

SEQ ID NO: 118159 - DNA, 33 bp, Homo sapien
agccactcaggcagaactgggtgcaatccacat

SEQ ID NO: 118160 - DNA, 33 bp, Homo sapien
agccactcaggcagaattgggtgcaatccacat

SEQ ID NO: 118161 - DNA, 33 bp, Homo sapien
ggagtgatgtctctggaaatatggttgtgcagg

SEQ ID NO: 118162 - DNA, 33 bp, Homo sapien
ggagtgatgtctctgggaatatggttgtgcagg

SEQ ID NO: 118163 - DNA, 33 bp, Homo sapien
tctgcccaactgaacactgcaaacttccacggc

SEQ ID NO: 118164 - DNA, 33 bp, Homo sapien
tctgcccaactgaacattgcaaacttccacggc

SEQ ID NO: 118165 - DNA, 33 bp, Homo sapien
gttagctatttgtgtacgtagacataggaaagt

SEQ ID NO: 118166 - DNA, 33 bp, Homo sapien
gttagctatttgtgtatgtagacataggaaagt

SEQ ID NO: 118167 - DNA, 33 bp, Homo sapien
gcctttctccatccataagaccctgttatcatt

SEQ ID NO: 118168 - DNA, 33 bp, Homo sapien
gcctttctccatccatgagaccctgttatcatt

SEQ ID NO: 118169 - DNA, 33 bp, Homo sapien
ggttctaggctccatgaagctgtggttatggtg

SEQ ID NO: 118170 - DNA, 33 bp, Homo sapien
ggttctaggctccatgcagctgtggttatggtg

SEQ ID NO: 118171 - DNA, 33 bp, Homo sapien
gccactctgcatcataccttcttccaaaagttt

SEQ ID NO: 118172 - DNA, 33 bp, Homo sapien
gccactctgcatcatagcttcttccaaaagttt

SEQ ID NO: 118173 - DNA, 33 bp, Homo sapien
acaatagattcaaacaaatagcagaaagaattt

SEQ ID NO: 118174 - DNA, 33 bp, Homo sapien
acaatagattcaaacagatagcagaaagaattt

SEQ ID NO: 118175 - DNA, 33 bp, Homo sapien
ataccagtgtttctccagaagcaaatggagcac

SEQ ID NO: 118176 - DNA, 33 bp, Homo sapien
ataccagtgtttctccggaagcaaatggagcac

SEQ ID NO: 118177 - DNA, 33 bp, Homo sapien
agcaattgaaagtgaaccatttcatttttgtga

SEQ ID NO: 118178 - DNA, 33 bp, Homo sapien
agcaattgaaagtgaatcatttcatttttgtga

SEQ ID NO: 118179 - DNA, 33 bp, Homo sapien
tcttccttccatgaaccatgcaaataaaaataa

SEQ ID NO: 118180 - DNA, 33 bp, Homo sapien
tcttccttccatgaactatgcaaataaaaataa

SEQ ID NO: 118181 - DNA, 33 bp, Homo sapien
tttaaagaaatctaccaaatgtttagcgtttaa

SEQ ID NO: 118182 - DNA, 33 bp, Homo sapien
tttaaagaaatctaccgaatgtttagcgtttaa

SEQ ID NO: 118183 - DNA, 33 bp, Homo sapien
tctcctagcaaaagaaacattttactagtcctg

SEQ ID NO: 118184 - DNA, 33 bp, Homo sapien
tctcctagcaaaagaagcattttactagtcctg

SEQ ID NO: 118185 - DNA, 33 bp, Homo sapien
tccagcgtggctgtgacagggtaactgccctta

SEQ ID NO: 118186 - DNA, 33 bp, Homo sapien
tccagcgtggctgtgatagggtaactgccctta

SEQ ID NO: 118187 - DNA, 33 bp, Homo sapien
caagggaatctcataaccatgttgaagaatgag

SEQ ID NO: 118188 - DNA, 33 bp, Homo sapien
caagggaatctcataatcatgttgaagaatgag

SEQ ID NO: 118189 - DNA, 33 bp, Homo sapien
tgggccctagcatagaaattccctcactttctc

SEQ ID NO: 118190 - DNA, 33 bp, Homo sapien
tgggccctagcatagacattccctcactttctc

SEQ ID NO: 118191 - DNA, 33 bp, Homo sapien
gggaggtaaaactccaaactcagagaggaagag

SEQ ID NO: 118192 - DNA, 33 bp, Homo sapien
gggaggtaaaactccagactcagagaggaagag

SEQ ID NO: 118193 - DNA, 33 bp, Homo sapien
aggagagtcactaatgcacctttatgagcctgt

SEQ ID NO: 118194 - DNA, 33 bp, Homo sapien
aggagagtcactaatgtacctttatgagcctgt

SEQ ID NO: 118195 - DNA, 33 bp, Homo sapien
gaggacaagaaggaaacgcctcacaataagatc

SEQ ID NO: 118196 - DNA, 33 bp, Homo sapien
gaggacaagaaggaaatgcctcacaataagatc

SEQ ID NO: 118197 - DNA, 33 bp, Homo sapien
tctatgtgctttcctacgcaggtctcctggcat

SEQ ID NO: 118198 - DNA, 33 bp, Homo sapien
tctatgtgctttcctatgcaggtctcctggcat

SEQ ID NO: 118199 - DNA, 33 bp, Homo sapien
tggaaagaaatccaggaagcgtaagagaactca

SEQ ID NO: 118200 - DNA, 33 bp, Homo sapien
tggaaagaaatccagggagcgtaagagaactca

SEQ ID NO: 118201 - DNA, 33 bp, Homo sapien
aaaagctttagctcagaccccattctgtgattg

SEQ ID NO: 118202 - DNA, 33 bp, Homo sapien
aaaagctttagctcaggccccattctgtgattg

SEQ ID NO: 118203 - DNA, 33 bp, Homo sapien
ctacggcttccctcaaggcttcagacatacctg

SEQ ID NO: 118204 - DNA, 33 bp, Homo sapien
ctacggcttccctcaatgcttcagacatacctg

SEQ ID NO: 118205 - DNA, 33 bp, Homo sapien
aggacagccctgggaaaagtcagcattacagag

SEQ ID NO: 118206 - DNA, 33 bp, Homo sapien
aggacagccctgggaagagtcagcattacagag

SEQ ID NO: 118207 - DNA, 33 bp, Homo sapien
ccatcagtaaatgaacagttaaacaaaatggaa

SEQ ID NO: 118208 - DNA, 33 bp, Homo sapien
ccatcagtaaatgaacggttaaacaaaatggaa

SEQ ID NO: 118209 - DNA, 33 bp, Homo sapien
actgtctaacaccacactgcatttcatttaaaa

SEQ ID NO: 118210 - DNA, 33 bp, Homo sapien
actgtctaacaccacattgcatttcatttaaaa

SEQ ID NO: 118211 - DNA, 33 bp, Homo sapien
ccatggggagaaatgacggtgtgggccaaatca

SEQ ID NO: 118212 - DNA, 33 bp, Homo sapien
ccatggggagaaatgatggtgtgggccaaatca

SEQ ID NO: 118213 - DNA, 33 bp, Homo sapien
tatccacaactcttaaagtaggtgctaatattt

SEQ ID NO: 118214 - DNA, 33 bp, Homo sapien
tatccacaactcttaatgtaggtgctaatattt

SEQ ID NO: 118215 - DNA, 33 bp, Homo sapien
gagttgcctgttcttcaagtgggcatactgcct

SEQ ID NO: 118216 - DNA, 33 bp, Homo sapien
gagttgcctgttcttcgagtgggcatactgcct

SEQ ID NO: 118217 - DNA, 33 bp, Homo sapien
aatttcgttggaactacgtatggaaaaggagaa

SEQ ID NO: 118218 - DNA, 33 bp, Homo sapien
aatttcgttggaactatgtatggaaaaggagaa

SEQ ID NO: 118219 - DNA, 33 bp, Homo sapien
aagggcaggactttgaggttttgttcatgcagt

SEQ ID NO: 118220 - DNA, 33 bp, Homo sapien
aagggcaggactttgatgttttgttcatgcagt

SEQ ID NO: 118221 - DNA, 33 bp, Homo sapien
tttcagacatacagaagtcttgcctaaatattg

SEQ ID NO: 118222 - DNA, 33 bp, Homo sapien
tttcagacatacagaattcttgcctaaatattg

SEQ ID NO: 118223 - DNA, 33 bp, Homo sapien
gcacttggaaaaggaaagtcatggctgcattat

SEQ ID NO: 118224 - DNA, 33 bp, Homo sapien
gcacttggaaaaggaaggtcatggctgcattat

SEQ ID NO: 118225 - DNA, 33 bp, Homo sapien
aagtgatgtccacaaaacactaacaccaaacct

SEQ ID NO: 118226 - DNA, 33 bp, Homo sapien
aagtgatgtccacaaagcactaacaccaaacct

SEQ ID NO: 118227 - DNA, 33 bp, Homo sapien
cagtactggagaataaaaatgagaactccaact

SEQ ID NO: 118228 - DNA, 33 bp, Homo sapien
cagtactggagaataagaatgagaactccaact

SEQ ID NO: 118229 - DNA, 33 bp, Homo sapien; identical to SEQ ID NO: 118227

SEQ ID NO: 118230 - DNA, 33 bp, Homo sapien; identical to SEQ ID NO: 118228

SEQ ID NO: 118231 - DNA, 33 bp, Homo sapien
aacattactggggtgaaggaggcattgttcttt

SEQ ID NO: 118232 - DNA, 33 bp, Homo sapien
aacattactggggtgagggaggcattgttcttt

SEQ ID NO: 118233 - DNA, 33 bp, Homo sapien; identical to SEQ ID NO: 118231

SEQ ID NO: 118234 - DNA, 33 bp, Homo sapien; identical to SEQ ID NO: 118232

SEQ ID NO: 118235 - DNA, 33 bp, Homo sapien; identical to SEQ ID NO: 118231

SEQ ID NO: 118236 - DNA, 33 bp, Homo sapien; identical to SEQ ID NO: 118232

SEQ ID NO: 118237 - DNA, 33 bp, Homo sapien
gcctttctctctctgaagagcatttgctttgaa

SEQ ID NO: 118238 - DNA, 33 bp, Homo sapien
gcctttctctctctgaggagcatttgctttgaa

SEQ ID NO: 118239 - DNA, 33 bp, Homo sapien
ctctcctcaacccctcactttgtcggcaaattt

SEQ ID NO: 118240 - DNA, 33 bp, Homo sapien
ctctcctcaacccctcgctttgtcggcaaattt

SEQ ID NO: 118241 - DNA, 33 bp, Homo sapien
gtgaaagcctaaaagcaatattagagttcttta

SEQ ID NO: 118242 - DNA, 33 bp, Homo sapien
gtgaaagcctaaaagcgatattagagttcttta

SEQ ID NO: 118243 - DNA, 33 bp, Homo sapien
actgaggagcagattgcagaattcaaagaagtt

SEQ ID NO: 118244 - DNA, 33 bp, Homo sapien
actgaggagcagattgtagaattcaaagaagtt

SEQ ID NO: 118245 - DNA, 33 bp, Homo sapien
ttaacagtacataaaagtcaaacccaaaccaca

SEQ ID NO: 118246 - DNA, 33 bp, Homo sapien
ttaacagtacataaaattcaaacccaaaccaca

SEQ ID NO: 118247 - DNA, 33 bp, Homo sapien
ggttcgagcgctcacaatcgctaactgcggagc

SEQ ID NO: 118248 - DNA, 33 bp, Homo sapien
ggttcgagcgctcacactcgctaactgcggagc

SEQ ID NO: 118249 - DNA, 33 bp, Homo sapien
tcttcttagtggttacaatttcttagactttcc

SEQ ID NO: 118250 - DNA, 33 bp, Homo sapien
tcttcttagtggttactatttcttagactttcc

SEQ ID NO: 118251 - DNA, 33 bp, Homo sapien
tctgaaattgcagaccacagagactggtcatga

SEQ ID NO: 118252 - DNA, 33 bp, Homo sapien
tctgaaattgcagaccgcagagactggtcatga

SEQ ID NO: 118253 - DNA, 33 bp, Homo sapien
gcccatcctactgtcacggtgacctcatctgtc

SEQ ID NO: 118254 - DNA, 33 bp, Homo sapien
gcccatcctactgtcagggtgacctcatctgtc

SEQ ID NO: 118255 - DNA, 33 bp, Homo sapien
ttacaaatcttactaccatgctatctgtccaac

SEQ ID NO: 118256 - DNA, 33 bp, Homo sapien
ttacaaatcttactactatgctatctgtccaac

SEQ ID NO: 118257 - DNA, 33 bp, Homo sapien
agaaacagccaatgtacaaaaataattctccca

SEQ ID NO: 118258 - DNA, 33 bp, Homo sapien
agaaacagccaatgtataaaaataattctccca

SEQ ID NO: 118259 - DNA, 33 bp, Homo sapien
atcattgtaatgcaaacctcttcaaattatagg

SEQ ID NO: 118260 - DNA, 33 bp, Homo sapien
atcattgtaatgcaaatctcttcaaattatagg

SEQ ID NO: 118261 - DNA, 33 bp, Homo sapien
agcctgatactttgtcccttctgaatcatttcc

SEQ ID NO: 118262 - DNA, 33 bp, Homo sapien
agcctgatactttgtctcttctgaatcatttcc

SEQ ID NO: 118263 - DNA, 33 bp, Homo sapien
aactgcaggaaaataaagccttagtaaatgagt

SEQ ID NO: 118264 - DNA, 33 bp, Homo sapien
aactgcaggaaaataatgccttagtaaatgagt

SEQ ID NO: 118265 - DNA, 33 bp, Homo sapien
ttctcttgcataagaaacacgttggaaatgcac

SEQ ID NO: 118266 - DNA, 33 bp, Homo sapien
ttctcttgcataagaagcacgttggaaatgcac

SEQ ID NO: 118267 - DNA, 33 bp, Homo sapien
aagaaatacgatgaccaaagttcacactgttgt

SEQ ID NO: 118268 - DNA, 33 bp, Homo sapien
aagaaatacgatgaccgaagttcacactgttgt

SEQ ID NO: 118269 - DNA, 33 bp, Homo sapien
cagacttctaaaaggaaatagctgttcctgtat

SEQ ID NO: 118270 - DNA, 33 bp, Homo sapien
cagacttctaaaaggacatagctgttcctgtat

SEQ ID NO: 118271 - DNA, 33 bp, Homo sapien
ttcaaaaggctaataccgctaagtgttggccag

SEQ ID NO: 118272 - DNA, 33 bp, Homo sapien
ttcaaaaggctaatactgctaagtgttggccag

SEQ ID NO: 118273 - DNA, 33 bp, Homo sapien
aaatctgcctttttaaatgtatagttccacagg

SEQ ID NO: 118274 - DNA, 33 bp, Homo sapien
aaatctgcctttttaagtgtatagttccacagg

SEQ ID NO: 118275 - DNA, 33 bp, Homo sapien
gccggttcttgagcacaatgaaacagaccaggg

SEQ ID NO: 118276 - DNA, 33 bp, Homo sapien
gccggttcttgagcacgatgaaacagaccaggg

SEQ ID NO: 118277 - DNA, 33 bp, Homo sapien
tcatgagtcaccccaactaatgacttcccagaa

SEQ ID NO: 118278 - DNA, 33 bp, Homo sapien
tcatgagtcaccccaattaatgacttcccagaa

SEQ ID NO: 118279 - DNA, 33 bp, Homo sapien
tggcttcaccgggttcaaggatgaaaatttcac

SEQ ID NO: 118280 - DNA, 33 bp, Homo sapien
tggcttcaccgggttcgaggatgaaaatttcac

SEQ ID NO: 118281 - DNA, 33 bp, Homo sapien
ttcaaggcagtgttggacatcaggttttgggct

SEQ ID NO: 118282 - DNA, 33 bp, Homo sapien
ttcaaggcagtgttgggcatcaggttttgggct

SEQ ID NO: 118283 - DNA, 33 bp, Homo sapien
aagtgtcagctttgtaacagaagcctcaggaag

SEQ ID NO: 118284 - DNA, 33 bp, Homo sapien
aagtgtcagctttgtagcagaagcctcaggaag

SEQ ID NO: 118285 - DNA, 33 bp, Homo sapien
tgagcaccgcaaaagacagagtaaacctgacag

SEQ ID NO: 118286 - DNA, 33 bp, Homo sapien
tgagcaccgcaaaagagagagtaaacctgacag

SEQ ID NO: 118287 - DNA, 33 bp, Homo sapien
gggtcactgagtctaaacctgacccagagcggg

SEQ ID NO: 118288 - DNA, 33 bp, Homo sapien
gggtcactgagtctaaccctgacccagagcggg

SEQ ID NO: 118289 - DNA, 33 bp, Homo sapien
gcttaaacaacaaaaaatcattttctcacagtt

SEQ ID NO: 118290 - DNA, 33 bp, Homo sapien
gcttaaacaacaaaaattcattttctcacagtt

SEQ ID NO: 118291 - DNA, 33 bp, Homo sapien
actgcagggggtgtcactcacaatgcagtctca

SEQ ID NO: 118292 - DNA, 33 bp, Homo sapien
actgcagggggtgtcattcacaatgcagtctca

SEQ ID NO: 118293 - DNA, 33 bp, Homo sapien
actcggtagctctggacatcctgtcttgacctc

SEQ ID NO: 118294 - DNA, 33 bp, Homo sapien
actcggtagctctggagatcctgtcttgacctc

SEQ ID NO: 118295 - DNA, 33 bp, Homo sapien
tggaggaaagcatcctaaaaaataagaatcaac

SEQ ID NO: 118296 - DNA, 33 bp, Homo sapien
tggaggaaagcatccttaaaaataagaatcaac

SEQ ID NO: 118297 - DNA, 33 bp, Homo sapien
gagtgtaccatacataagtcatggccctcagtg

SEQ ID NO: 118298 - DNA, 33 bp, Homo sapien
gagtgtaccatacatacgtcatggccctcagtg

SEQ ID NO: 118299 - DNA, 33 bp, Homo sapien
atcaactctgtgactacagctacactcaagagt

SEQ ID NO: 118300 - DNA, 33 bp, Homo sapien
atcaactctgtgactagagctacactcaagagt

SEQ ID NO: 118301 - DNA, 33 bp, Homo sapien
gccaggcctctgtggaccaacgctatgataaga

SEQ ID NO: 118302 - DNA, 33 bp, Homo sapien
gccaggcctctgtggatcaacgctatgataaga

SEQ ID NO: 118303 - DNA, 33 bp, Homo sapien
tggatgtccaacaacaagaacaggagtcaaagt

SEQ ID NO: 118304 - DNA, 33 bp, Homo sapien
tggatgtccaacaacaggaacaggagtcaaagt

SEQ ID NO: 118305 - DNA, 33 bp, Homo sapien
actcagtggcctatggaaaggcaaaaacctcaa

SEQ ID NO: 118306 - DNA, 33 bp, Homo sapien
actcagtggcctatggcaaggcaaaaacctcaa

SEQ ID NO: 118307 - DNA, 33 bp, Homo sapien
taattttgtgtaaacactgcccactctgcttct

SEQ ID NO: 118308 - DNA, 33 bp, Homo sapien
taattttgtgtaaacattgcccactctgcttct

SEQ ID NO: 118309 - DNA, 33 bp, Homo sapien
aggccagaacttctgaggaacccttctgcccca

SEQ ID NO: 118310 - DNA, 33 bp, Homo sapien
aggccagaacttctgatgaacccttctgcccca

SEQ ID NO: 118311 - DNA, 33 bp, Homo sapien
ctcagctacaagtagcaaagagtgcagaactat

SEQ ID NO: 118312 - DNA, 33 bp, Homo sapien
ctcagctacaagtagcgaagagtgcagaactat

SEQ ID NO: 118313 - DNA, 33 bp, Homo sapien
atgcggccgtggaagccaatgtgggggctgtga

SEQ ID NO: 118314 - DNA, 33 bp, Homo sapien
atgcggccgtggaagctaatgtgggggctgtga

SEQ ID NO: 118315 - DNA, 33 bp, Homo sapien
cactccattccactcccaacgttgtacccagcc

SEQ ID NO: 118316 - DNA, 33 bp, Homo sapien
cactccattccactcctaacgttgtacccagcc

SEQ ID NO: 118317 - DNA, 33 bp, Homo sapien
gttggcacattccttccagcatgggttgtataa

SEQ ID NO: 118318 - DNA, 33 bp, Homo sapien
gttggcacattccttcgagcatgggttgtataa

SEQ ID NO: 118319 - DNA, 33 bp, Homo sapien
cgtcctttccttctcaagtggtcttaatttttt

SEQ ID NO: 118320 - DNA, 33 bp, Homo sapien
cgtcctttccttctcaggtggtcttaatttttt

SEQ ID NO: 118321 - DNA, 33 bp, Homo sapien
cgtgtgtggcatacagcatattgctccttgtgt

SEQ ID NO: 118322 - DNA, 33 bp, Homo sapien
cgtgtgtggcatacagtatattgctccttgtgt

SEQ ID NO: 118323 - DNA, 33 bp, Homo sapien
ccattcaagttaataaacgcagggctgggcatg

SEQ ID NO: 118324 - DNA, 33 bp, Homo sapien
ccattcaagttaataagcgcagggctgggcatg

SEQ ID NO: 118325 - DNA, 33 bp, Homo sapien
aatttacctatcaacacgtgcctcattctcctg

SEQ ID NO: 118326 - DNA, 33 bp, Homo sapien
aatttacctatcaacatgtgcctcattctcctg

SEQ ID NO: 118327 - DNA, 33 bp, Homo sapien
gcgaggctctgagaaagtgtagaagaaggcaga

SEQ ID NO: 118328 - DNA, 33 bp, Homo sapien
gcgaggctctgagaaattgtagaagaaggcaga

SEQ ID NO: 118329 - DNA, 33 bp, Homo sapien
actgctaccgcctcccccaaggatctttctgtt

SEQ ID NO: 118330 - DNA, 33 bp, Homo sapien
actgctaccgcctcccgcaaggatctttctgtt

SEQ ID NO: 118331 - DNA, 33 bp, Homo sapien
catagaatgagtttaactgttagagagttcttt

SEQ ID NO: 118332 - DNA, 33 bp, Homo sapien
catagaatgagtttaattgttagagagttcttt

SEQ ID NO: 118333 - DNA, 33 bp, Homo sapien
ttctttcacctaaatacgcttactaagtacacc

SEQ ID NO: 118334 - DNA, 33 bp, Homo sapien
ttctttcacctaaatatgcttactaagtacacc

SEQ ID NO: 118335 - DNA, 33 bp, Homo sapien; identical to SEQ ID NO: 118333

SEQ ID NO: 118336 - DNA, 33 bp, Homo sapien; identical to SEQ ID NO: 118334

SEQ ID NO: 118337 - DNA, 33 bp, Homo sapien
cctttgccacattacactgaacactggatgcat

SEQ ID NO: 118338 - DNA, 33 bp, Homo sapien
cctttgccacattacattgaacactggatgcat

SEQ ID NO: 118339 - DNA, 33 bp, Homo sapien
acatgtcactttcaccacctgagaatcctctgt

SEQ ID NO: 118340 - DNA, 33 bp, Homo sapien
acatgtcactttcaccgcctgagaatcctctgt

SEQ ID NO: 118341 - DNA, 33 bp, Homo sapien
ctggggacactgccaacgtgcagattctgatgc

SEQ ID NO: 118342 - DNA, 33 bp, Homo sapien
ctggggacactgccaatgtgcagattctgatgc

SEQ ID NO: 118343 - DNA, 33 bp, Homo sapien
gctggctagtacagaaagaagcaagcgctcagc

SEQ ID NO: 118344 - DNA, 33 bp, Homo sapien
gctggctagtacagaaggaagcaagcgctcagc

SEQ ID NO: 118345 - DNA, 33 bp, Homo sapien
atttgaaaaggcctgaagcccgagactctacta

SEQ ID NO: 118346 - DNA, 33 bp, Homo sapien
atttgaaaaggcctgaggcccgagactctacta

SEQ ID NO: 118347 - DNA, 33 bp, Homo sapien
cttgtcctttgactgccgatgactgagtgtgtg

SEQ ID NO: 118348 - DNA, 33 bp, Homo sapien
cttgtcctttgactgctgatgactgagtgtgtg

SEQ ID NO: 118349 - DNA, 33 bp, Homo sapien
caggcaggcgccatcactcagtggttttcaaac

SEQ ID NO: 118350 - DNA, 33 bp, Homo sapien
caggcaggcgccatcattcagtggttttcaaac

SEQ ID NO: 118351 - DNA, 33 bp, Homo sapien
tagtgcctgattgaaaatattcagcccaggtga

SEQ ID NO: 118352 - DNA, 33 bp, Homo sapien
tagtgcctgattgaaagtattcagcccaggtga

SEQ ID NO: 118353 - DNA, 33 bp, Homo sapien
tgggaaaggactttgccaaccattacatgtttc

SEQ ID NO: 118354 - DNA, 33 bp, Homo sapien
tgggaaaggactttgcgaaccattacatgtttc

SEQ ID NO: 118355 - DNA, 33 bp, Homo sapien
atggttaagaaagttacctggggatcagaatac

SEQ ID NO: 118356 - DNA, 33 bp, Homo sapien
atggttaagaaagttatctggggatcagaatac

SEQ ID NO: 118357 - DNA, 33 bp, Homo sapien
gatcttacctctaataccactgccatacatagt

SEQ ID NO: 118358 - DNA, 33 bp, Homo sapien
gatcttacctctaatatcactgccatacatagt

SEQ ID NO: 118359 - DNA, 33 bp, Homo sapien
atcccctagttaggacaaataaaatgaagagtt

SEQ ID NO: 118360 - DNA, 33 bp, Homo sapien
atcccctagttaggaccaataaaatgaagagtt

SEQ ID NO: 118361 - DNA, 33 bp, Homo sapien
ctcaataaaaaaacaactaggaaagtcagagtt

SEQ ID NO: 118362 - DNA, 33 bp, Homo sapien
ctcaataaaaaaacaagtaggaaagtcagagtt

SEQ ID NO: 118363 - DNA, 33 bp, Homo sapien
gtcaccaactttaacaaactcaggctgtgtctg

SEQ ID NO: 118364 - DNA, 33 bp, Homo sapien
gtcaccaactttaacagactcaggctgtgtctg

SEQ ID NO: 118365 - DNA, 33 bp, Homo sapien
atgcgtatcttcaggcaagttcagacatagtgc

SEQ ID NO: 118366 - DNA, 33 bp, Homo sapien
atgcgtatcttcaggcgagttcagacatagtgc

SEQ ID NO: 118367 - DNA, 33 bp, Homo sapien
gaaggaacaaaaaagacggcatgctttccatgc

SEQ ID NO: 118368 - DNA, 33 bp, Homo sapien
gaaggaacaaaaaagatggcatgctttccatgc

SEQ ID NO: 118369 - DNA, 33 bp, Homo sapien
ccagcaatgaactaaacagagaagctgcttata

SEQ ID NO: 118370 - DNA, 33 bp, Homo sapien
ccagcaatgaactaaagagagaagctgcttata

SEQ ID NO: 118371 - DNA, 33 bp, Homo sapien
gcgtttgtccacgtaacccctatccagatcaag

SEQ ID NO: 118372 - DNA, 33 bp, Homo sapien
gcgtttgtccacgtaagccctatccagatcaag

SEQ ID NO: 118373 - DNA, 33 bp, Homo sapien
ccctactcagaatagcaagtcctgcagccctgg

SEQ ID NO: 118374 - DNA, 33 bp, Homo sapien
ccctactcagaatagcgagtcctgcagccctgg

SEQ ID NO: 118375 - DNA, 33 bp, Homo sapien
tgtgctcaggtttacagctgtgtgggcagagac

SEQ ID NO: 118376 - DNA, 33 bp, Homo sapien
tgtgctcaggtttacatctgtgtgggcagagac

SEQ ID NO: 118377 - DNA, 33 bp, Homo sapien
aggtaggaagatggtcaaggcagatgtgtcagg

SEQ ID NO: 118378 - DNA, 33 bp, Homo sapien
aggtaggaagatggtcgaggcagatgtgtcagg

SEQ ID NO: 118379 - DNA, 33 bp, Homo sapien
gcttatgttattaccacgatgttattctctcag

SEQ ID NO: 118380 - DNA, 33 bp, Homo sapien
gcttatgttattaccatgatgttattctctcag

SEQ ID NO: 118381 - DNA, 33 bp, Homo sapien
cacagcaaggccctgactcaaaaaaaggaagca

SEQ ID NO: 118382 - DNA, 33 bp, Homo sapien
cacagcaaggccctgattcaaaaaaaggaagca

SEQ ID NO: 118383 - DNA, 33 bp, Homo sapien
tggctcatgattgttacctcaacactttgggag

SEQ ID NO: 118384 - DNA, 33 bp, Homo sapien
tggctcatgattgttatctcaacactttgggag

SEQ ID NO: 118385 - DNA, 33 bp, Homo sapien
ggactaactgagaaaaaccctgtacagatccac

SEQ ID NO: 118386 - DNA, 33 bp, Homo sapien
ggactaactgagaaaacccctgtacagatccac

SEQ ID NO: 118387 - DNA, 33 bp, Homo sapien
gcacagtggcggaagacgttaactaatggtcgg

SEQ ID NO: 118388 - DNA, 33 bp, Homo sapien
gcacagtggcggaagatgttaactaatggtcgg

SEQ ID NO: 118389 - DNA, 33 bp, Homo sapien
agaagacgtgatacaaaggaagccacagacatg

SEQ ID NO: 118390 - DNA, 33 bp, Homo sapien
agaagacgtgatacaagggaagccacagacatg

SEQ ID NO: 118391 - DNA, 33 bp, Homo sapien
gcccctcatcttacatcacgctcccaaaggaag

SEQ ID NO: 118392 - DNA, 33 bp, Homo sapien
gcccctcatcttacattacgctcccaaaggaag

SEQ ID NO: 118393 - DNA, 33 bp, Homo sapien
ttggggcaagttaacccggaccatctgggcctc

SEQ ID NO: 118394 - DNA, 33 bp, Homo sapien
ttggggcaagttaacctggaccatctgggcctc

SEQ ID NO: 118395 - DNA, 33 bp, Homo sapien
agtgggttttcagatacgagtatttggcagaca

SEQ ID NO: 118396 - DNA, 33 bp, Homo sapien
agtgggttttcagatatgagtatttggcagaca

SEQ ID NO: 118397 - DNA, 33 bp, Homo sapien
tggctcaaaagccatgaagggggtgaaactgct

SEQ ID NO: 118398 - DNA, 33 bp, Homo sapien
tggctcaaaagccatggagggggtgaaactgct

SEQ ID NO: 118399 - DNA, 33 bp, Homo sapien
tatcctttcccccaacgaacctgagtgacactg

SEQ ID NO: 118400 - DNA, 33 bp, Homo sapien
tatcctttcccccaactaacctgagtgacactg

SEQ ID NO: 118401 - DNA, 33 bp, Homo sapien
ctgaggaggcagattccaccttaagcatatcag

SEQ ID NO: 118402 - DNA, 33 bp, Homo sapien
ctgaggaggcagattctaccttaagcatatcag

SEQ ID NO: 118403 - DNA, 33 bp, Homo sapien
gggacacaagtgaacacggtaagcagtggaagg

SEQ ID NO: 118404 - DNA, 33 bp, Homo sapien
gggacacaagtgaacatggtaagcagtggaagg

SEQ ID NO: 118405 - DNA, 33 bp, Homo sapien
tgatgtctgacgttcacgatttagagagagaag

SEQ ID NO: 118406 - DNA, 33 bp, Homo sapien
tgatgtctgacgttcatgatttagagagagaag

SEQ ID NO: 118407 - DNA, 33 bp, Homo sapien
aagcgtttgggggtaacgcctcttgatgtctga

SEQ ID NO: 118408 - DNA, 33 bp, Homo sapien
aagcgtttgggggtaatgcctcttgatgtctga

SEQ ID NO: 118409 - DNA, 33 bp, Homo sapien
ccaatctgagatcccacagacagagcggcagag

SEQ ID NO: 118410 - DNA, 33 bp, Homo sapien
ccaatctgagatcccatagacagagcggcagag

SEQ ID NO: 118411 - DNA, 33 bp, Homo sapien
gcaagaaggcaagatcaatgaaaaagtgggcct

SEQ ID NO: 118412 - DNA, 33 bp, Homo sapien
gcaagaaggcaagatcgatgaaaaagtgggcct

SEQ ID NO: 118413 - DNA, 33 bp, Homo sapien
tgaggtggtttagaacgcaggcttggggcatga

SEQ ID NO: 118414 - DNA, 33 bp, Homo sapien
tgaggtggtttagaactcaggcttggggcatga

SEQ ID NO: 118415 - DNA, 33 bp, Homo sapien
ggaatcaaccagaggaccacggtgctagctcca

SEQ ID NO: 118416 - DNA, 33 bp, Homo sapien
ggaatcaaccagaggatcacggtgctagctcca

SEQ ID NO: 118417 - DNA, 33 bp, Homo sapien
aatgccccatgaccacacaatcattcattcact

SEQ ID NO: 118418 - DNA, 33 bp, Homo sapien
aatgccccatgaccacgcaatcattcattcact

SEQ ID NO: 118419 - DNA, 33 bp, Homo sapien
ccccattctgttcacaagaggatcccaacaccc

SEQ ID NO: 118420 - DNA, 33 bp, Homo sapien
ccccattctgttcacaggaggatcccaacaccc

SEQ ID NO: 118421 - DNA, 33 bp, Homo sapien
gggccagaaattgtcacgctcccaagcttgcac

SEQ ID NO: 118422 - DNA, 33 bp, Homo sapien
gggccagaaattgtcaggctcccaagcttgcac

SEQ ID NO: 118423 - DNA, 33 bp, Homo sapien
aagtggaatcatacaccatgtggtcctttgtgt

SEQ ID NO: 118424 - DNA, 33 bp, Homo sapien
aagtggaatcatacactatgtggtcctttgtgt

SEQ ID NO: 118425 - DNA, 33 bp, Homo sapien
atattattcagccataaaaatgcagtaataata

SEQ ID NO: 118426 - DNA, 33 bp, Homo sapien
atattattcagccatacaaatgcagtaataata

SEQ ID NO: 118427 - DNA, 33 bp, Homo sapien
tcagctgataaacagacagacataatgggatat

SEQ ID NO: 118428 - DNA, 33 bp, Homo sapien
tcagctgataaacagagagacataatgggatat

SEQ ID NO: 118429 - DNA, 33 bp, Homo sapien
cttcttcagcaataaaactattccagggccctc

SEQ ID NO: 118430 - DNA, 33 bp, Homo sapien
cttcttcagcaataaagctattccagggccctc

SEQ ID NO: 118431 - DNA, 33 bp, Homo sapien
cctgggcggacactgaatagggaccggtgatga

SEQ ID NO: 118432 - DNA, 33 bp, Homo sapien
cctgggcggacactgagtagggaccggtgatga

SEQ ID NO: 118433 - DNA, 33 bp, Homo sapien
aggagagacgacaggaccttccagccccaacag

SEQ ID NO: 118434 - DNA, 33 bp, Homo sapien
aggagagacgacaggatcttccagccccaacag

SEQ ID NO: 118435 - DNA, 33 bp, Homo sapien
tcaaaggaaacagcaaacatggaacctgcctgt

SEQ ID NO: 118436 - DNA, 33 bp, Homo sapien
tcaaaggaaacagcaagcatggaacctgcctgt

SEQ ID NO: 118437 - DNA, 33 bp, Homo sapien
ccaagttggctaaggaaatgtcaggacatgtgt

SEQ ID NO: 118438 - DNA, 33 bp, Homo sapien
ccaagttggctaaggagatgtcaggacatgtgt

SEQ ID NO: 118439 - DNA, 33 bp, Homo sapien
agagcaagggtaacaactccaggtgacagatgg

SEQ ID NO: 118440 - DNA, 33 bp, Homo sapien
agagcaagggtaacaattccaggtgacagatgg

SEQ ID NO: 118441 - DNA, 33 bp, Homo sapien
gtaataaccgtttgtcaaatcaatgaatgacaa

SEQ ID NO: 118442 - DNA, 33 bp, Homo sapien
gtaataaccgtttgtccaatcaatgaatgacaa

SEQ ID NO: 118443 - DNA, 33 bp, Homo sapien
attaaacattgcactaaattccatcttaacaga

SEQ ID NO: 118444 - DNA, 33 bp, Homo sapien
attaaacattgcactacattccatcttaacaga

SEQ ID NO: 118445 - DNA, 33 bp, Homo sapien
tagttaacccttcaaacagtaggcatcctgccc

SEQ ID NO: 118446 - DNA, 33 bp, Homo sapien
tagttaacccttcaaagagtaggcatcctgccc

SEQ ID NO: 118447 - DNA, 33 bp, Homo sapien
tggtgcctggtctgtgcagatgcccaattttgc

SEQ ID NO: 118448 - DNA, 33 bp, Homo sapien
tggtgcctggtctgtgtagatgcccaattttgc

SEQ ID NO: 118449 - DNA, 33 bp, Homo sapien
ttcctacacaagatccaggaactgtccctgggg

SEQ ID NO: 118450 - DNA, 33 bp, Homo sapien
ttcctacacaagatccgggaactgtccctgggg

SEQ ID NO: 118451 - DNA, 33 bp, Homo sapien
ttccattgtatgtctacagcgcattttgtttct

SEQ ID NO: 118452 - DNA, 33 bp, Homo sapien
ttccattgtatgtctagagcgcattttgtttct

SEQ ID NO: 118453 - DNA, 33 bp, Homo sapien
tataatgttttaaggaccatacacgtaacacat

SEQ ID NO: 118454 - DNA, 33 bp, Homo sapien
tataatgttttaaggatcatacacgtaacacat

SEQ ID NO: 118455 - DNA, 33 bp, Homo sapien
cacaagctgttcagtccctgacactcagtggca

SEQ ID NO: 118456 - DNA, 33 bp, Homo sapien
cacaagctgttcagtctctgacactcagtggca

SEQ ID NO: 118457 - DNA, 33 bp, Homo sapien
caatcatatgaatttcaactttggtccaagaca

SEQ ID NO: 118458 - DNA, 33 bp, Homo sapien
caatcatatgaatttcgactttggtccaagaca

SEQ ID NO: 118459 - DNA, 33 bp, Homo sapien
gctacctaccacagaagcctagcatccactcct

SEQ ID NO: 118460 - DNA, 33 bp, Homo sapien
gctacctaccacagaatcctagcatccactcct

SEQ ID NO: 118461 - DNA, 33 bp, Homo sapien
acagcctctcttggtcaccagtatctcttgctt

SEQ ID NO: 118462 - DNA, 33 bp, Homo sapien
acagcctctcttggtcgccagtatctcttgctt

SEQ ID NO: 118463 - DNA, 33 bp, Homo sapien
ccctttggtggagtgaaggggaaattaacaccc

SEQ ID NO: 118464 - DNA, 33 bp, Homo sapien
ccctttggtggagtgagggggaaattaacaccc

SEQ ID NO: 118465 - DNA, 33 bp, Homo sapien
tgctacaggagggtgccgaaagttcatgtggtt

SEQ ID NO: 118466 - DNA, 33 bp, Homo sapien
tgctacaggagggtgctgaaagttcatgtggtt

SEQ ID NO: 118467 - DNA, 33 bp, Homo sapien
tgccaagcagtgacatgacattaaccctaaatc

SEQ ID NO: 118468 - DNA, 33 bp, Homo sapien
tgccaagcagtgacattacattaaccctaaatc

SEQ ID NO: 118469 - DNA, 33 bp, Homo sapien
cctaccgggagcgccactcggaagtggttggcg

SEQ ID NO: 118470 - DNA, 33 bp, Homo sapien
cctaccgggagcgccattcggaagtggttggcg

SEQ ID NO: 118471 - DNA, 33 bp, Homo sapien
aactctgggtggtctaagagccctggaaaggca

SEQ ID NO: 118472 - DNA, 33 bp, Homo sapien
aactctgggtggtctaggagccctggaaaggca

SEQ ID NO: 118473 - DNA, 33 bp, Homo sapien
tggtgaagctgggatcagaacctgtttagactt

SEQ ID NO: 118474 - DNA, 33 bp, Homo sapien
tggtgaagctgggatcggaacctgtttagactt

SEQ ID NO: 118475 - DNA, 33 bp, Homo sapien
gcagaaggtggggcacagagtcaaagattattt

SEQ ID NO: 118476 - DNA, 33 bp, Homo sapien
gcagaaggtggggcacggagtcaaagattattt

SEQ ID NO: 118477 - DNA, 33 bp, Homo sapien
gaagattcagctgtataacaagataaagaatga

SEQ ID NO: 118478 - DNA, 33 bp, Homo sapien
gaagattcagctgtatgacaagataaagaatga

SEQ ID NO: 118479 - DNA, 33 bp, Homo sapien
taactagtggttgctacacctaccagagtcctt

SEQ ID NO: 118480 - DNA, 33 bp, Homo sapien
taactagtggttgctatacctaccagagtcctt

SEQ ID NO: 118481 - DNA, 33 bp, Homo sapien
tgcccttattagagagactccagaggactggaa

SEQ ID NO: 118482 - DNA, 33 bp, Homo sapien
tgcccttattagagaggctccagaggactggaa

SEQ ID NO: 118483 - DNA, 33 bp, Homo sapien
caaacacattcctacaaagataactctaggcct

SEQ ID NO: 118484 - DNA, 33 bp, Homo sapien
caaacacattcctacagagataactctaggcct

SEQ ID NO: 118485 - DNA, 33 bp, Homo sapien
aataaggtccagaaacaaatacccacatatggt

SEQ ID NO: 118486 - DNA, 33 bp, Homo sapien
aataaggtccagaaaccaatacccacatatggt

SEQ ID NO: 118487 - DNA, 33 bp, Homo sapien
ctaaatgtgaaaaacaacaaatccataagaaaa

SEQ ID NO: 118488 - DNA, 33 bp, Homo sapien
ctaaatgtgaaaaacagcaaatccataagaaaa

SEQ ID NO: 118489 - DNA, 33 bp, Homo sapien
aggagagaccaatgcaagtttcagagcaggagt

SEQ ID NO: 118490 - DNA, 33 bp, Homo sapien
aggagagaccaatgcacgtttcagagcaggagt

SEQ ID NO: 118491 - DNA, 33 bp, Homo sapien
tcaaagatggcttgcaccaaattggcacatgac

SEQ ID NO: 118492 - DNA, 33 bp, Homo sapien
tcaaagatggcttgcagcaaattggcacatgac

SEQ ID NO: 118493 - DNA, 33 bp, Homo sapien
aatgtatccacatctacgagcatgtcactcatt

SEQ ID NO: 118494 - DNA, 33 bp, Homo sapien
aatgtatccacatctatgagcatgtcactcatt

SEQ ID NO: 118495 - DNA, 33 bp, Homo sapien
gtatctaccagtgccaatacccactgtacattg

SEQ ID NO: 118496 - DNA, 33 bp, Homo sapien
gtatctaccagtgccagtacccactgtacattg

SEQ ID NO: 118497 - DNA, 33 bp, Homo sapien
tacctttctgatctgaacaacttcatccgttaa

SEQ ID NO: 118498 - DNA, 33 bp, Homo sapien
tacctttctgatctgatcaacttcatccgttaa

SEQ ID NO: 118499 - DNA, 33 bp, Homo sapien
ttgttgtcaaaactgtaaagagctatgaagtgt

SEQ ID NO: 118500 - DNA, 33 bp, Homo sapien
ttgttgtcaaaactgtcaagagctatgaagtgt

SEQ ID NO: 118501 - DNA, 33 bp, Homo sapien
actgattaagttctgcactcaaggcagaaatct

SEQ ID NO: 118502 - DNA, 33 bp, Homo sapien
actgattaagttctgcgctcaaggcagaaatct

SEQ ID NO: 118503 - DNA, 33 bp, Homo sapien
agggttacatgaaaaaaacacagtagaatccat

SEQ ID NO: 118504 - DNA, 33 bp, Homo sapien
agggttacatgaaaaatacacagtagaatccat

SEQ ID NO: 118505 - DNA, 33 bp, Homo sapien
tctttaccacttgatgaatcacaagcaggtata

SEQ ID NO: 118506 - DNA, 33 bp, Homo sapien
tctttaccacttgatggatcacaagcaggtata

SEQ ID NO: 118507 - DNA, 33 bp, Homo sapien
gggcacgcttcttaccagcttttcttccaatcc

SEQ ID NO: 118508 - DNA, 33 bp, Homo sapien
gggcacgcttcttaccggcttttcttccaatcc

SEQ ID NO: 118509 - DNA, 33 bp, Homo sapien
tagcatcctcctaagcaaagtccagtgcggccc

SEQ ID NO: 118510 - DNA, 33 bp, Homo sapien
tagcatcctcctaagcgaagtccagtgcggccc

SEQ ID NO: 118511 - DNA, 33 bp, Homo sapien
ctggtcctctcaaaaaaatgaggtattattctc

SEQ ID NO: 118512 - DNA, 33 bp, Homo sapien
ctggtcctctcaaaaagatgaggtattattctc

SEQ ID NO: 118513 - DNA, 33 bp, Homo sapien
gacacacagagcagccaggaaagagcaggctgg

SEQ ID NO: 118514 - DNA, 33 bp, Homo sapien
gacacacagagcagcccggaaagagcaggctgg

SEQ ID NO: 118515 - DNA, 33 bp, Homo sapien
ccaggggtaaggccaaactccatggtgaggttg

SEQ ID NO: 118516 - DNA, 33 bp, Homo sapien
ccaggggtaaggccaagctccatggtgaggttg

SEQ ID NO: 118517 - DNA, 33 bp, Homo sapien
cttgcccactccagtgccactctggtattataa

SEQ ID NO: 118518 - DNA, 33 bp, Homo sapien
cttgcccactccagtgtcactctggtattataa

SEQ ID NO: 118519 - DNA, 33 bp, Homo sapien
ttataatcctgaagcaaaatgatgttaagtaag

SEQ ID NO: 118520 - DNA, 33 bp, Homo sapien
ttataatcctgaagcacaatgatgttaagtaag

SEQ ID NO: 118521 - DNA, 33 bp, Homo sapien
aggggtgtcggtggaaataaagcccttgtgata

SEQ ID NO: 118522 - DNA, 33 bp, Homo sapien
aggggtgtcggtggaagtaaagcccttgtgata

SEQ ID NO: 118523 - DNA, 33 bp, Homo sapien
ctgggcatttggcaaacgtaggctggtccaagc

SEQ ID NO: 118524 - DNA, 33 bp, Homo sapien
ctgggcatttggcaaaggtaggctggtccaagc

SEQ ID NO: 118525 - DNA, 33 bp, Homo sapien
tgcccggtgctatgaccaagtgtggacacgtgt

SEQ ID NO: 118526 - DNA, 33 bp, Homo sapien
tgcccggtgctatgacgaagtgtggacacgtgt

SEQ ID NO: 118527 - DNA, 33 bp, Homo sapien
tcagtataaggtttgacgttgacattttaacaa

SEQ ID NO: 118528 - DNA, 33 bp, Homo sapien
tcagtataaggtttgatgttgacattttaacaa

SEQ ID NO: 118529 - DNA, 33 bp, Homo sapien
gttgtaaaatggtctacgggacacaaagctgac

SEQ ID NO: 118530 - DNA, 33 bp, Homo sapien
gttgtaaaatggtctatgggacacaaagctgac

SEQ ID NO: 118531 - DNA, 33 bp, Homo sapien
tatgaagtgtagtaccagaggcaggtgacccat

SEQ ID NO: 118532 - DNA, 33 bp, Homo sapien
tatgaagtgtagtaccggaggcaggtgacccat

SEQ ID NO: 118533 - DNA, 33 bp, Homo sapien
acagccatggccgctgaagaaattgttctgagc

SEQ ID NO: 118534 - DNA, 33 bp, Homo sapien
acagccatggccgctggagaaattgttctgagc

SEQ ID NO: 118535 - DNA, 33 bp, Homo sapien
cgataagggggaaagacacgcggtggcagtgcc

SEQ ID NO: 118536 - DNA, 33 bp, Homo sapien
cgataagggggaaagatacgcggtggcagtgcc

SEQ ID NO: 118537 - DNA, 33 bp, Homo sapien
tccttaaaagcagcagcatctgggaaaagaggt

SEQ ID NO: 118538 - DNA, 33 bp, Homo sapien
tccttaaaagcagcagtatctgggaaaagaggt

SEQ ID NO: 118539 - DNA, 33 bp, Homo sapien
gtcaagcatcccagccaaataaaagcttccaca

SEQ ID NO: 118540 - DNA, 33 bp, Homo sapien
gtcaagcatcccagccgaataaaagcttccaca

SEQ ID NO: 118541 - DNA, 33 bp, Homo sapien
ctgtcacctgttgccacacacttgggtctcctt

SEQ ID NO: 118542 - DNA, 33 bp, Homo sapien
ctgtcacctgttgccatacacttgggtctcctt

SEQ ID NO: 118543 - DNA, 33 bp, Homo sapien
tgtttcctctagaaaccctcttggcagccagcc

SEQ ID NO: 118544 - DNA, 33 bp, Homo sapien
tgtttcctctagaaactctcttggcagccagcc

SEQ ID NO: 118545 - DNA, 33 bp, Homo sapien
agattgattttactggaaggtgtcaatgggagg

SEQ ID NO: 118546 - DNA, 33 bp, Homo sapien
agattgattttactgggaggtgtcaatgggagg

SEQ ID NO: 118547 - DNA, 33 bp, Homo sapien
gggacggacagtgaccgcagtctcttatggact

SEQ ID NO: 118548 - DNA, 33 bp, Homo sapien
gggacggacagtgacctcagtctcttatggact

SEQ ID NO: 118549 - DNA, 33 bp, Homo sapien
atctggagataccactaagaagcaacccgagac

SEQ ID NO: 118550 - DNA, 33 bp, Homo sapien
atctggagataccactgagaagcaacccgagac

SEQ ID NO: 118551 - DNA, 33 bp, Homo sapien
agcacttccaaccacacaggcgtgacagtccca

SEQ ID NO: 118552 - DNA, 33 bp, Homo sapien
agcacttccaaccacagaggcgtgacagtccca

SEQ ID NO: 118553 - DNA, 33 bp, Homo sapien
atgaatgaacacactccaaacaaaacccaaagc

SEQ ID NO: 118554 - DNA, 33 bp, Homo sapien
atgaatgaacacactctaaacaaaacccaaagc

SEQ ID NO: 118555 - DNA, 33 bp, Homo sapien
tctggtgcacatagtacgagttgcgcttggcac

SEQ ID NO: 118556 - DNA, 33 bp, Homo sapien
tctggtgcacatagtaggagttgcgcttggcac

SEQ ID NO: 118557 - DNA, 33 bp, Homo sapien
gctcagtcctattacacgctgtgtttttaggtt

SEQ ID NO: 118558 - DNA, 33 bp, Homo sapien
gctcagtcctattacatgctgtgtttttaggtt

SEQ ID NO: 118559 - DNA, 33 bp, Homo sapien
agcttaggatgctcacgacttctggatccctgt

SEQ ID NO: 118560 - DNA, 33 bp, Homo sapien
agcttaggatgctcactacttctggatccctgt

SEQ ID NO: 118561 - DNA, 33 bp, Homo sapien
ccatctatgtgcacaagaaattattaacagtag

SEQ ID NO: 118562 - DNA, 33 bp, Homo sapien
ccatctatgtgcacaataaattattaacagtag

SEQ ID NO: 118563 - DNA, 33 bp, Homo sapien
acttggtccaagaagacaagtagaagaaccacc

SEQ ID NO: 118564 - DNA, 33 bp, Homo sapien
acttggtccaagaagataagtagaagaaccacc

SEQ ID NO: 118565 - DNA, 33 bp, Homo sapien
tatctaactatgaagccaggctcgattaaaaat

SEQ ID NO: 118566 - DNA, 33 bp, Homo sapien
tatctaactatgaagctaggctcgattaaaaat

SEQ ID NO: 118567 - DNA, 33 bp, Homo sapien
gcgaactgggtacaatgatcattcccattctac

SEQ ID NO: 118568 - DNA, 33 bp, Homo sapien
gcgaactgggtacaattatcattcccattctac

SEQ ID NO: 118569 - DNA, 33 bp, Homo sapien
cttgccagccatgctacgatgcacacagatgtg

SEQ ID NO: 118570 - DNA, 33 bp, Homo sapien
cttgccagccatgctatgatgcacacagatgtg

SEQ ID NO: 118571 - DNA, 33 bp, Homo sapien
cagcagacgagaccatgaggagttctgtccatg

SEQ ID NO: 118572 - DNA, 33 bp, Homo sapien
cagcagacgagaccattaggagttctgtccatg

SEQ ID NO: 118573 - DNA, 33 bp, Homo sapien
ctgcagaatgggggaaaatacttgcaagtcata

SEQ ID NO: 118574 - DNA, 33 bp, Homo sapien
ctgcagaatgggggaagatacttgcaagtcata

SEQ ID NO: 118575 - DNA, 33 bp, Homo sapien
tctagaaggcagttaacaagaatggttcggata

SEQ ID NO: 118576 - DNA, 33 bp, Homo sapien
tctagaaggcagttaataagaatggttcggata

SEQ ID NO: 118577 - DNA, 33 bp, Homo sapien
tcagtgggacactgtacctgttgccaaatagtc

SEQ ID NO: 118578 - DNA, 33 bp, Homo sapien
tcagtgggacactgtatctgttgccaaatagtc

SEQ ID NO: 118579 - DNA, 33 bp, Homo sapien
tctgaaaatattggaaacagatatagttcagaa

SEQ ID NO: 118580 - DNA, 33 bp, Homo sapien
tctgaaaatattggaaccagatatagttcagaa

SEQ ID NO: 118581 - DNA, 33 bp, Homo sapien
gctttgggaaggaagacggcaggaaacccaggc

SEQ ID NO: 118582 - DNA, 33 bp, Homo sapien
gctttgggaaggaagatggcaggaaacccaggc

SEQ ID NO: 118583 - DNA, 33 bp, Homo sapien
cacgtttccatcctgaactacgttgaactacgt

SEQ ID NO: 118584 - DNA, 33 bp, Homo sapien
cacgtttccatcctgagctacgttgaactacgt

SEQ ID NO: 118585 - DNA, 33 bp, Homo sapien
aaccaggtataccaaaattcatgatggggtgtg

SEQ ID NO: 118586 - DNA, 33 bp, Homo sapien
aaccaggtataccaaagttcatgatggggtgtg

SEQ ID NO: 118587 - DNA, 33 bp, Homo sapien
tcacatgtgatgaaaaggatccacaataatcta

SEQ ID NO: 118588 - DNA, 33 bp, Homo sapien
tcacatgtgatgaaaatgatccacaataatcta

SEQ ID NO: 118589 - DNA, 33 bp, Homo sapien
gtgtacagtaaaggaacgggcaacctggcgcag

SEQ ID NO: 118590 - DNA, 33 bp, Homo sapien
gtgtacagtaaaggaatgggcaacctggcgcag

SEQ ID NO: 118591 - DNA, 33 bp, Homo sapien
ctatgtaagtcagacaacgcctcctcaacctca

SEQ ID NO: 118592 - DNA, 33 bp, Homo sapien
ctatgtaagtcagacaccgcctcctcaacctca

SEQ ID NO: 118593 - DNA, 33 bp, Homo sapien
aagttcctgctgtcacagaacttacatcccagc

SEQ ID NO: 118594 - DNA, 33 bp, Homo sapien
aagttcctgctgtcacggaacttacatcccagc

SEQ ID NO: 118595 - DNA, 33 bp, Homo sapien
cacagggacctctgacaccttcacccaccggga

SEQ ID NO: 118596 - DNA, 33 bp, Homo sapien
cacagggacctctgacgccttcacccaccggga

SEQ ID NO: 118597 - DNA, 33 bp, Homo sapien
tgaacgcactgttgtcaagggtcccttccagct

SEQ ID NO: 118598 - DNA, 33 bp, Homo sapien
tgaacgcactgttgtcgagggtcccttccagct

SEQ ID NO: 118599 - DNA, 33 bp, Homo sapien
tccagtggagagatcacggaactagggcccagg

SEQ ID NO: 118600 - DNA, 33 bp, Homo sapien
tccagtggagagatcatggaactagggcccagg

SEQ ID NO: 118601 - DNA, 33 bp, Homo sapien
aggggtcttacaaaccactttagggcaaggccc

SEQ ID NO: 118602 - DNA, 33 bp, Homo sapien
aggggtcttacaaaccgctttagggcaaggccc

SEQ ID NO: 118603 - DNA, 33 bp, Homo sapien
aggagcagagaatctcagaaggttttcaaacat

SEQ ID NO: 118604 - DNA, 33 bp, Homo sapien
aggagcagagaatctcggaaggttttcaaacat

SEQ ID NO: 118605 - DNA, 33 bp, Homo sapien
ctggagtaaagtaggacaggagaacggagaagg

SEQ ID NO: 118606 - DNA, 33 bp, Homo sapien
ctggagtaaagtaggagaggagaacggagaagg

SEQ ID NO: 118607 - DNA, 33 bp, Homo sapien
cccaaattgccagttcgccattttcctcatggg

SEQ ID NO: 118608 - DNA, 33 bp, Homo sapien
cccaaattgccagttctccattttcctcatggg

SEQ ID NO: 118609 - DNA, 33 bp, Homo sapien
gtcagaactaaccacaaatgtctgaagagttgt

SEQ ID NO: 118610 - DNA, 33 bp, Homo sapien
gtcagaactaaccacagatgtctgaagagttgt

SEQ ID NO: 118611 - DNA, 33 bp, Homo sapien
ttgaatgtctgtaacacggaatagattagagaa

SEQ ID NO: 118612 - DNA, 33 bp, Homo sapien
ttgaatgtctgtaacatggaatagattagagaa

SEQ ID NO: 118613 - DNA, 33 bp, Homo sapien
gccacagtgacctctacgatcagccgctgcttc

SEQ ID NO: 118614 - DNA, 33 bp, Homo sapien
gccacagtgacctctatgatcagccgctgcttc

SEQ ID NO: 118615 - DNA, 33 bp, Homo sapien
tagatcaatacagccactgacagatgattattg

SEQ ID NO: 118616 - DNA, 33 bp, Homo sapien
tagatcaatacagccattgacagatgattattg

SEQ ID NO: 118617 - DNA, 33 bp, Homo sapien
acctctcccttaaccacaggattctttctgact

SEQ ID NO: 118618 - DNA, 33 bp, Homo sapien
acctctcccttaaccataggattctttctgact

SEQ ID NO: 118619 - DNA, 33 bp, Homo sapien
cttgctcagccagaacactcttcctgcccctct

SEQ ID NO: 118620 - DNA, 33 bp, Homo sapien
cttgctcagccagaacgctcttcctgcccctct

SEQ ID NO: 118621 - DNA, 33 bp, Homo sapien
ccctcctgcagatggaaggaatgaggtgtgagg

SEQ ID NO: 118622 - DNA, 33 bp, Homo sapien
ccctcctgcagatggagggaatgaggtgtgagg

SEQ ID NO: 118623 - DNA, 33 bp, Homo sapien
atgcggagggtgttagaccaataattcttggcc

SEQ ID NO: 118624 - DNA, 33 bp, Homo sapien
atgcggagggtgttagcccaataattcttggcc

SEQ ID NO: 118625 - DNA, 33 bp, Homo sapien
agggaagttcttaataacagtgtgaaacggact

SEQ ID NO: 118626 - DNA, 33 bp, Homo sapien
agggaagttcttaatagcagtgtgaaacggact

SEQ ID NO: 118627 - DNA, 33 bp, Homo sapien
ttttaaatgttagtgaagaatgtctttatatct

SEQ ID NO: 118628 - DNA, 33 bp, Homo sapien
ttttaaatgttagtgaggaatgtctttatatct

SEQ ID NO: 118629 - DNA, 33 bp, Homo sapien
ttaaccctttctccaacgtaactggccaaagga

SEQ ID NO: 118630 - DNA, 33 bp, Homo sapien
ttaaccctttctccaatgtaactggccaaagga

SEQ ID NO: 118631 - DNA, 33 bp, Homo sapien
ggcttagatacaaaaaattacatgtgtgtatgt

SEQ ID NO: 118632 - DNA, 33 bp, Homo sapien
ggcttagatacaaaaagttacatgtgtgtatgt

SEQ ID NO: 118633 - DNA, 33 bp, Homo sapien
attctgctgtctctaccgtactcttgcatctgg

SEQ ID NO: 118634 - DNA, 33 bp, Homo sapien
attctgctgtctctactgtactcttgcatctgg

SEQ ID NO: 118635 - DNA, 33 bp, Homo sapien
cggccttgacaaatacccttacaatttctaagt

SEQ ID NO: 118636 - DNA, 33 bp, Homo sapien
cggccttgacaaatactcttacaatttctaagt

SEQ ID NO: 118637 - DNA, 33 bp, Homo sapien
ctgtgaagtaagaaaacggaggcctcagtaact

SEQ ID NO: 118638 - DNA, 33 bp, Homo sapien
ctgtgaagtaagaaaatggaggcctcagtaact

SEQ ID NO: 118639 - DNA, 33 bp, Homo sapien
ctcccagacaagcgtcaacatgaaggggtattt

SEQ ID NO: 118640 - DNA, 33 bp, Homo sapien
ctcccagacaagcgtcgacatgaaggggtattt

SEQ ID NO: 118641 - DNA, 33 bp, Homo sapien
ctaagccctctatatcacaggagacaacaggtg

SEQ ID NO: 118642 - DNA, 33 bp, Homo sapien
ctaagccctctatatcgcaggagacaacaggtg

SEQ ID NO: 118643 - DNA, 33 bp, Homo sapien
cttgctatttaggatgccaacaaggtggaaaca

SEQ ID NO: 118644 - DNA, 33 bp, Homo sapien
cttgctatttaggatgtcaacaaggtggaaaca

SEQ ID NO: 118645 - DNA, 33 bp, Homo sapien
ctaatgtgttaatgtggatttttgtttgcacag

SEQ ID NO: 118646 - DNA, 33 bp, Homo sapien
ctaatgtgttaatgtgtatttttgtttgcacag

SEQ ID NO: 118647 - DNA, 33 bp, Homo sapien
agaaacccatggcagactctcattacaaaatac

SEQ ID NO: 118648 - DNA, 33 bp, Homo sapien
agaaacccatggcagattctcattacaaaatac

SEQ ID NO: 118649 - DNA, 33 bp, Homo sapien
tatggaaatagtaccccctcacaccatgcagga

SEQ ID NO: 118650 - DNA, 33 bp, Homo sapien
tatggaaatagtaccctctcacaccatgcagga

SEQ ID NO: 118651 - DNA, 33 bp, Homo sapien
ggttactatttgtgaactgctttttaatatcct

SEQ ID NO: 118652 - DNA, 33 bp, Homo sapien
ggttactatttgtgaattgctttttaatatcct

SEQ ID NO: 118653 - DNA, 33 bp, Homo sapien
agaactattacaaacaacacaaagttcagaaaa

SEQ ID NO: 118654 - DNA, 33 bp, Homo sapien
agaactattacaaacatcacaaagttcagaaaa

SEQ ID NO: 118655 - DNA, 33 bp, Homo sapien
aagggtcctgagcacacgtggagttggccgctg

SEQ ID NO: 118656 - DNA, 33 bp, Homo sapien
aagggtcctgagcacatgtggagttggccgctg

SEQ ID NO: 118657 - DNA, 33 bp, Homo sapien
gctggcctgaaatacaagtccacagatgtccct

SEQ ID NO: 118658 - DNA, 33 bp, Homo sapien
gctggcctgaaatacaggtccacagatgtccct

SEQ ID NO: 118659 - DNA, 33 bp, Homo sapien
ctctgagagcaggtgaacagcttttgcttgcta

SEQ ID NO: 118660 - DNA, 33 bp, Homo sapien
ctctgagagcaggtgagcagcttttgcttgcta

SEQ ID NO: 118661 - DNA, 33 bp, Homo sapien
gggccctgggagagggacattcagcatgctcag

SEQ ID NO: 118662 - DNA, 33 bp, Homo sapien
gggccctgggagaggggcattcagcatgctcag

SEQ ID NO: 118663 - DNA, 33 bp, Homo sapien
cagcttcaggagaaaagctctgggttgtagcat

SEQ ID NO: 118664 - DNA, 33 bp, Homo sapien
cagcttcaggagaaaatctctgggttgtagcat

SEQ ID NO: 118665 - DNA, 33 bp, Homo sapien
catatctcctgtctccaaaggccctccagtgtg

SEQ ID NO: 118666 - DNA, 33 bp, Homo sapien
catatctcctgtctccgaaggccctccagtgtg

SEQ ID NO: 118667 - DNA, 33 bp, Homo sapien
ttcagcaaaggagactaagcgatgactttctct

SEQ ID NO: 118668 - DNA, 33 bp, Homo sapien
ttcagcaaaggagactgagcgatgactttctct

SEQ ID NO: 118669 - DNA, 33 bp, Homo sapien
ctgccgtgcccgagtacgcacacttgcacacac

SEQ ID NO: 118670 - DNA, 33 bp, Homo sapien
ctgccgtgcccgagtatgcacacttgcacacac

SEQ ID NO: 118671 - DNA, 33 bp, Homo sapien
gatttgggatctctcaatagggcctcacccagg

SEQ ID NO: 118672 - DNA, 33 bp, Homo sapien
gatttgggatctctcagtagggcctcacccagg

SEQ ID NO: 118673 - DNA, 33 bp, Homo sapien
tttaagcagtcatttcacatgagacttgcccaa

SEQ ID NO: 118674 - DNA, 33 bp, Homo sapien
tttaagcagtcatttcccatgagacttgcccaa

SEQ ID NO: 118675 - DNA, 33 bp, Homo sapien
gggttggatgtgaacaaacaacctctgcggttc

SEQ ID NO: 118676 - DNA, 33 bp, Homo sapien
gggttggatgtgaacagacaacctctgcggttc

SEQ ID NO: 118677 - DNA, 33 bp, Homo sapien
tctccacccctacatcacaggtaagaagcagga

SEQ ID NO: 118678 - DNA, 33 bp, Homo sapien
tctccacccctacatcgcaggtaagaagcagga

SEQ ID NO: 118679 - DNA, 33 bp, Homo sapien
ctgcagctttaagaacaactcctgagcccagag

SEQ ID NO: 118680 - DNA, 33 bp, Homo sapien
ctgcagctttaagaacgactcctgagcccagag

SEQ ID NO: 118681 - DNA, 33 bp, Homo sapien
cgtgttcccacggccaccaacacgggcctcatt

SEQ ID NO: 118682 - DNA, 33 bp, Homo sapien
cgtgttcccacggccatcaacacgggcctcatt

SEQ ID NO: 118683 - DNA, 33 bp, Homo sapien
tggcagttattaaaccagaaagtgaggtagtta

SEQ ID NO: 118684 - DNA, 33 bp, Homo sapien
tggcagttattaaacctgaaagtgaggtagtta

SEQ ID NO: 118685 - DNA, 33 bp, Homo sapien
gtgggagcctcagaaaaattctgtctcaaagag

SEQ ID NO: 118686 - DNA, 33 bp, Homo sapien
gtgggagcctcagaaagattctgtctcaaagag

SEQ ID NO: 118687 - DNA, 33 bp, Homo sapien
ccttcaactttagggaactttcagggagcttcc

SEQ ID NO: 118688 - DNA, 33 bp, Homo sapien
ccttcaactttagggacctttcagggagcttcc

SEQ ID NO: 118689 - DNA, 33 bp, Homo sapien
agcctcagatgtaatcaagcctggatgggctgg

SEQ ID NO: 118690 - DNA, 33 bp, Homo sapien
agcctcagatgtaatcgagcctggatgggctgg

SEQ ID NO: 118691 - DNA, 33 bp, Homo sapien
aagagctggatggctacgctaccccagaggctc

SEQ ID NO: 118692 - DNA, 33 bp, Homo sapien
aagagctggatggctatgctaccccagaggctc

SEQ ID NO: 118693 - DNA, 33 bp, Homo sapien
cactctgaattgtcaacacctaataccccacat

SEQ ID NO: 118694 - DNA, 33 bp, Homo sapien
cactctgaattgtcaatacctaataccccacat

SEQ ID NO: 118695 - DNA, 33 bp, Homo sapien
gaaaggaacctgtatccctgagtcaccacacag

SEQ ID NO: 118696 - DNA, 33 bp, Homo sapien
gaaaggaacctgtatctctgagtcaccacacag

SEQ ID NO: 118697 - DNA, 33 bp, Homo sapien
ttagtaattaggactcactttcagggccagtcc

SEQ ID NO: 118698 - DNA, 33 bp, Homo sapien
ttagtaattaggactcgctttcagggccagtcc

SEQ ID NO: 118699 - DNA, 33 bp, Homo sapien
agaactttggctatgccgagacatcatgcagaa

SEQ ID NO: 118700 - DNA, 33 bp, Homo sapien
agaactttggctatgctgagacatcatgcagaa

SEQ ID NO: 118701 - DNA, 33 bp, Homo sapien
tggctgggagctgaaactgaccaggcatctctc

SEQ ID NO: 118702 - DNA, 33 bp, Homo sapien
tggctgggagctgaaattgaccaggcatctctc

SEQ ID NO: 118703 - DNA, 33 bp, Homo sapien
gggcatggctggtgggacaaaatccttttctgt

SEQ ID NO: 118704 - DNA, 33 bp, Homo sapien
gggcatggctggtggggcaaaatccttttctgt

SEQ ID NO: 118705 - DNA, 33 bp, Homo sapien
ccagttctcaggttacgcccaggaagcagtggg

SEQ ID NO: 118706 - DNA, 33 bp, Homo sapien
ccagttctcaggttactcccaggaagcagtggg

SEQ ID NO: 118707 - DNA, 33 bp, Homo sapien
ggtttggtacaatccactacttagttttcataa

SEQ ID NO: 118708 - DNA, 33 bp, Homo sapien
ggtttggtacaatccattacttagttttcataa

SEQ ID NO: 118709 - DNA, 33 bp, Homo sapien
cagcatcgctcaccaagcagtatttcctaagcc

SEQ ID NO: 118710 - DNA, 33 bp, Homo sapien
cagcatcgctcaccaatcagtatttcctaagcc

SEQ ID NO: 118711 - DNA, 33 bp, Homo sapien
gtggtttccctggagacgctgactgcccacagc

SEQ ID NO: 118712 - DNA, 33 bp, Homo sapien
gtggtttccctggagatgctgactgcccacagc

SEQ ID NO: 118713 - DNA, 33 bp, Homo sapien
gggtaaaactccacaaacctagcaaacagtgac

SEQ ID NO: 118714 - DNA, 33 bp, Homo sapien
gggtaaaactccacaagcctagcaaacagtgac

SEQ ID NO: 118715 - DNA, 33 bp, Homo sapien
ttgggggataataatacgtcactcccgcttatg

SEQ ID NO: 118716 - DNA, 33 bp, Homo sapien
ttgggggataataatatgtcactcccgcttatg

SEQ ID NO: 118717 - DNA, 33 bp, Homo sapien
aggccacttctttctgccaaatcgtattccaat

SEQ ID NO: 118718 - DNA, 33 bp, Homo sapien
aggccacttctttctgtcaaatcgtattccaat

SEQ ID NO: 118719 - DNA, 33 bp, Homo sapien
cacccctctacttagcacacttttcagcagcct

SEQ ID NO: 118720 - DNA, 33 bp, Homo sapien
cacccctctacttagcgcacttttcagcagcct

SEQ ID NO: 118721 - DNA, 33 bp, Homo sapien
tacaatgagagataaaagatagagtggaggaat

SEQ ID NO: 118722 - DNA, 33 bp, Homo sapien
tacaatgagagataaaggatagagtggaggaat

SEQ ID NO: 118723 - DNA, 33 bp, Homo sapien
acgagagctatcggaacgtgagaggggcagtgg

SEQ ID NO: 118724 - DNA, 33 bp, Homo sapien
acgagagctatcggaatgtgagaggggcagtgg

SEQ ID NO: 118725 - DNA, 33 bp, Homo sapien
ccttgtggcagcctaagcaagcctctgtccctt

SEQ ID NO: 118726 - DNA, 33 bp, Homo sapien
ccttgtggcagcctaatcaagcctctgtccctt

SEQ ID NO: 118727 - DNA, 33 bp, Homo sapien
ggatatcaaggtaaaccgtgttcaggatcccac

SEQ ID NO: 118728 - DNA, 33 bp, Homo sapien
ggatatcaaggtaaactgtgttcaggatcccac

SEQ ID NO: 118729 - DNA, 33 bp, Homo sapien
agcaccttgcagtcaaacacccagggaccacat

SEQ ID NO: 118730 - DNA, 33 bp, Homo sapien
agcaccttgcagtcaagcacccagggaccacat

SEQ ID NO: 118731 - DNA, 33 bp, Homo sapien
tggcataagcttgacactcattacctgccagtc

SEQ ID NO: 118732 - DNA, 33 bp, Homo sapien
tggcataagcttgacattcattacctgccagtc

SEQ ID NO: 118733 - DNA, 33 bp, Homo sapien
gctgtgttttaaagaccgtacttggtgatggtt

SEQ ID NO: 118734 - DNA, 33 bp, Homo sapien
gctgtgttttaaagactgtacttggtgatggtt

SEQ ID NO: 118735 - DNA, 33 bp, Homo sapien
taattgtcaaaaatgggaatgacccacattctc

SEQ ID NO: 118736 - DNA, 33 bp, Homo sapien
taattgtcaaaaatggtaatgacccacattctc

SEQ ID NO: 118737 - DNA, 33 bp, Homo sapien
agccagtggaatactccatgggatgaggataaa

SEQ ID NO: 118738 - DNA, 33 bp, Homo sapien
agccagtggaatactctatgggatgaggataaa

SEQ ID NO: 118739 - DNA, 33 bp, Homo sapien
ccacaaagcaaccgccacagagattgtctttgc

SEQ ID NO: 118740 - DNA, 33 bp, Homo sapien
ccacaaagcaaccgccgcagagattgtctttgc

SEQ ID NO: 118741 - DNA, 33 bp, Homo sapien
ggaggtctgttgggaaagaaatgcctaagcacc

SEQ ID NO: 118742 - DNA, 33 bp, Homo sapien
ggaggtctgttgggaaggaaatgcctaagcacc

SEQ ID NO: 118743 - DNA, 33 bp, Homo sapien
gaagttttaacaaccaactctcttgcacaggtg

SEQ ID NO: 118744 - DNA, 33 bp, Homo sapien
gaagttttaacaaccagctctcttgcacaggtg

SEQ ID NO: 118745 - DNA, 33 bp, Homo sapien
gtgtgtcgggaaaagcgcatcatgatggtatac

SEQ ID NO: 118746 - DNA, 33 bp, Homo sapien
gtgtgtcgggaaaagctcatcatgatggtatac

SEQ ID NO: 118747 - DNA, 33 bp, Homo sapien
agcaaagattcgctcaatccagtgttggtttgt

SEQ ID NO: 118748 - DNA, 33 bp, Homo sapien
agcaaagattcgctcagtccagtgttggtttgt

SEQ ID NO: 118749 - DNA, 33 bp, Homo sapien
ctctattagttaacccaagagctggttgttaaa

SEQ ID NO: 118750 - DNA, 33 bp, Homo sapien
ctctattagttaacccgagagctggttgttaaa

SEQ ID NO: 118751 - DNA, 33 bp, Homo sapien
tggctctactggcctgcagtctaaggggcagct

SEQ ID NO: 118752 - DNA, 33 bp, Homo sapien
tggctctactggcctgtagtctaaggggcagct

SEQ ID NO: 118753 - DNA, 33 bp, Homo sapien
acaaccattttcattcactcctgcatattcaga

SEQ ID NO: 118754 - DNA, 33 bp, Homo sapien
acaaccattttcattcgctcctgcatattcaga

SEQ ID NO: 118755 - DNA, 33 bp, Homo sapien
ctctctcactccgatcactccagatggttccaa

SEQ ID NO: 118756 - DNA, 33 bp, Homo sapien
ctctctcactccgatcgctccagatggttccaa

SEQ ID NO: 118757 - DNA, 33 bp, Homo sapien
cttacagtgatgctgaaattcaccttttaagaa

SEQ ID NO: 118758 - DNA, 33 bp, Homo sapien
cttacagtgatgctgagattcaccttttaagaa

SEQ ID NO: 118759 - DNA, 33 bp, Homo sapien
tgcatggaaagagaaacggccagatatgcaatt

SEQ ID NO: 118760 - DNA, 33 bp, Homo sapien
tgcatggaaagagaaatggccagatatgcaatt

SEQ ID NO: 118761 - DNA, 33 bp, Homo sapien
tcctctgacacacaaagttctcaccaataagtc

SEQ ID NO: 118762 - DNA, 33 bp, Homo sapien
tcctctgacacacaaatttctcaccaataagtc

SEQ ID NO: 118763 - DNA, 33 bp, Homo sapien
aaagatatcacactgaaccattacactgatgac

SEQ ID NO: 118764 - DNA, 33 bp, Homo sapien
aaagatatcacactgatccattacactgatgac

SEQ ID NO: 118765 - DNA, 33 bp, Homo sapien
accaggagatgtgttaaattttctgaggcaatg

SEQ ID NO: 118766 - DNA, 33 bp, Homo sapien
accaggagatgtgttatattttctgaggcaatg

SEQ ID NO: 118767 - DNA, 33 bp, Homo sapien
gtgtccagcattccccaaaatgtcagatcattt

SEQ ID NO: 118768 - DNA, 33 bp, Homo sapien
gtgtccagcattccccgaaatgtcagatcattt

SEQ ID NO: 118769 - DNA, 33 bp, Homo sapien
gagtctggattctgtcgctttctgggcatatct

SEQ ID NO: 118770 - DNA, 33 bp, Homo sapien
gagtctggattctgtctctttctgggcatatct

SEQ ID NO: 118771 - DNA, 33 bp, Homo sapien
gattttcccacactgacggagagctacacggag

SEQ ID NO: 118772 - DNA, 33 bp, Homo sapien
gattttcccacactgatggagagctacacggag

SEQ ID NO: 118773 - DNA, 33 bp, Homo sapien
ggtggaaataaggcaacgggcactcttgtttgt

SEQ ID NO: 118774 - DNA, 33 bp, Homo sapien
ggtggaaataaggcaatgggcactcttgtttgt

SEQ ID NO: 118775 - DNA, 33 bp, Homo sapien
tgtgtgtaggatcatgaatctcagcatgggact

SEQ ID NO: 118776 - DNA, 33 bp, Homo sapien
tgtgtgtaggatcatggatctcagcatgggact

SEQ ID NO: 118777 - DNA, 33 bp, Homo sapien
acgggagacactcgtcaatacctatgggatgga

SEQ ID NO: 118778 - DNA, 33 bp, Homo sapien
acgggagacactcgtcgatacctatgggatgga

SEQ ID NO: 118779 - DNA, 33 bp, Homo sapien
cgaactcttctgaggcagcccttcagcctcacc

SEQ ID NO: 118780 - DNA, 33 bp, Homo sapien
cgaactcttctgaggccgcccttcagcctcacc

SEQ ID NO: 118781 - DNA, 33 bp, Homo sapien
tacttgacacacagtaacccttccctggacaga

SEQ ID NO: 118782 - DNA, 33 bp, Homo sapien
tacttgacacacagtagcccttccctggacaga

SEQ ID NO: 118783 - DNA, 33 bp, Homo sapien
aagttacccaaaggtacgctaggagaatgcaca

SEQ ID NO: 118784 - DNA, 33 bp, Homo sapien
aagttacccaaaggtatgctaggagaatgcaca

SEQ ID NO: 118785 - DNA, 33 bp, Homo sapien
ctggccctatgatggcaaacagtcctggtttcc

SEQ ID NO: 118786 - DNA, 33 bp, Homo sapien
ctggccctatgatggcgaacagtcctggtttcc

SEQ ID NO: 118787 - DNA, 33 bp, Homo sapien
ttactcactatgatgaaactagcacaacaaaga

SEQ ID NO: 118788 - DNA, 33 bp, Homo sapien
ttactcactatgatgagactagcacaacaaaga

SEQ ID NO: 118789 - DNA, 33 bp, Homo sapien
acacacagtaggcaaagagtcataaaattagct

SEQ ID NO: 118790 - DNA, 33 bp, Homo sapien
acacacagtaggcaaatagtcataaaattagct

SEQ ID NO: 118791 - DNA, 33 bp, Homo sapien
agtcaactcatttctccagttaaaagacacaga

SEQ ID NO: 118792 - DNA, 33 bp, Homo sapien
agtcaactcatttctctagttaaaagacacaga

SEQ ID NO: 118793 - DNA, 33 bp, Homo sapien
gtgtggaagcagcagacgttggaataatttgga

SEQ ID NO: 118794 - DNA, 33 bp, Homo sapien
gtgtggaagcagcagaggttggaataatttgga

SEQ ID NO: 118795 - DNA, 33 bp, Homo sapien
agttgcttacattctcaccatctctttcatgac

SEQ ID NO: 118796 - DNA, 33 bp, Homo sapien
agttgcttacattctcgccatctctttcatgac

SEQ ID NO: 118797 - DNA, 33 bp, Homo sapien
tcagaagattgctatacatccagaatttctggg

SEQ ID NO: 118798 - DNA, 33 bp, Homo sapien
tcagaagattgctatagatccagaatttctggg

SEQ ID NO: 118799 - DNA, 33 bp, Homo sapien
aacaaaaattaacaaacctctctggttaaccta

SEQ ID NO: 118800 - DNA, 33 bp, Homo sapien
aacaaaaattaacaaatctctctggttaaccta

SEQ ID NO: 118801 - DNA, 33 bp, Homo sapien
agagagctaaataccacgtgacagagaaagcaa

SEQ ID NO: 118802 - DNA, 33 bp, Homo sapien
agagagctaaataccatgtgacagagaaagcaa

SEQ ID NO: 118803 - DNA, 33 bp, Homo sapien
atgtggctgtgaggacaaaatgagttcatacat

SEQ ID NO: 118804 - DNA, 33 bp, Homo sapien
atgtggctgtgaggaccaaatgagttcatacat

SEQ ID NO: 118805 - DNA, 33 bp, Homo sapien
gcttgcttgaaaaatacgatctgtgaatttgac

SEQ ID NO: 118806 - DNA, 33 bp, Homo sapien
gcttgcttgaaaaataggatctgtgaatttgac

SEQ ID NO: 118807 - DNA, 33 bp, Homo sapien
ttgtaccccaactaacaccagagataagaacct

SEQ ID NO: 118808 - DNA, 33 bp, Homo sapien
ttgtaccccaactaaccccagagataagaacct

SEQ ID NO: 118809 - DNA, 33 bp, Homo sapien
aagttcaggatggtaagtgatgtcaaaaagagg

SEQ ID NO: 118810 - DNA, 33 bp, Homo sapien
aagttcaggatggtaattgatgtcaaaaagagg

SEQ ID NO: 118811 - DNA, 33 bp, Homo sapien
gtggtgggattcccggaattactgcctgaagcc

SEQ ID NO: 118812 - DNA, 33 bp, Homo sapien
gtggtgggattcccgggattactgcctgaagcc

SEQ ID NO: 118813 - DNA, 33 bp, Homo sapien
cctattctagacaatgaagctgaagacaggcca

SEQ ID NO: 118814 - DNA, 33 bp, Homo sapien
cctattctagacaatgcagctgaagacaggcca

SEQ ID NO: 118815 - DNA, 33 bp, Homo sapien
tgacagtgcaagggaacagaccttgtatatttg

SEQ ID NO: 118816 - DNA, 33 bp, Homo sapien
tgacagtgcaagggaatagaccttgtatatttg

SEQ ID NO: 118817 - DNA, 33 bp, Homo sapien
ctgttaatttgtggtaagctaacatccttggac

SEQ ID NO: 118818 - DNA, 33 bp, Homo sapien
ctgttaatttgtggtatgctaacatccttggac

SEQ ID NO: 118819 - DNA, 33 bp, Homo sapien
caaccttcaggaaaaacctgggacttctggctc

SEQ ID NO: 118820 - DNA, 33 bp, Homo sapien
caaccttcaggaaaaatctgggacttctggctc

SEQ ID NO: 118821 - DNA, 33 bp, Homo sapien
acacaggcagttattaaagttatttgatagctg

SEQ ID NO: 118822 - DNA, 33 bp, Homo sapien
acacaggcagttattatagttatttgatagctg

SEQ ID NO: 118823 - DNA, 33 bp, Homo sapien
tattccctacatcttccagatactgcctgcctt

SEQ ID NO: 118824 - DNA, 33 bp, Homo sapien
tattccctacatcttctagatactgcctgcctt

SEQ ID NO: 118825 - DNA, 33 bp, Homo sapien
aatttagtcacaacaacgatctacagtagcatc

SEQ ID NO: 118826 - DNA, 33 bp, Homo sapien
aatttagtcacaacaatgatctacagtagcatc

SEQ ID NO: 118827 - DNA, 33 bp, Homo sapien
gcctgaatactggctcaaatcccagttttgcca

SEQ ID NO: 118828 - DNA, 33 bp, Homo sapien
gcctgaatactggctcgaatcccagttttgcca

SEQ ID NO: 118829 - DNA, 33 bp, Homo sapien
agcagggctgtgtggcaccctagcctcataaag

SEQ ID NO: 118830 - DNA, 33 bp, Homo sapien
agcagggctgtgtggcgccctagcctcataaag

SEQ ID NO: 118831 - DNA, 33 bp, Homo sapien
tggaaaagaaagacccactctcgatgtgggtga

SEQ ID NO: 118832 - DNA, 33 bp, Homo sapien
tggaaaagaaagaccctctctcgatgtgggtga

SEQ ID NO: 118833 - DNA, 33 bp, Homo sapien
agctaaagataagatcactttgatggctgcttt

SEQ ID NO: 118834 - DNA, 33 bp, Homo sapien
agctaaagataagatcgctttgatggctgcttt

SEQ ID NO: 118835 - DNA, 33 bp, Homo sapien
gtgttctgataccctacatggagacaggagtcc

SEQ ID NO: 118836 - DNA, 33 bp, Homo sapien
gtgttctgataccctagatggagacaggagtcc

SEQ ID NO: 118837 - DNA, 33 bp, Homo sapien
gtgccaggaatccacaagagtgagccaaatcag

SEQ ID NO: 118838 - DNA, 33 bp, Homo sapien
gtgccaggaatccacacgagtgagccaaatcag

SEQ ID NO: 118839 - DNA, 33 bp, Homo sapien
tggaagccagagccaaatcttcagtgatcagag

SEQ ID NO: 118840 - DNA, 33 bp, Homo sapien
tggaagccagagccaagtcttcagtgatcagag

SEQ ID NO: 118841 - DNA, 33 bp, Homo sapien
agaattctcaggcttgcagcaggaccttccggc

SEQ ID NO: 118842 - DNA, 33 bp, Homo sapien
agaattctcaggcttggagcaggaccttccggc

SEQ ID NO: 118843 - DNA, 33 bp, Homo sapien
ctttgtggttgaagacaaggctcacatgggcta

SEQ ID NO: 118844 - DNA, 33 bp, Homo sapien
ctttgtggttgaagacgaggctcacatgggcta

SEQ ID NO: 118845 - DNA, 33 bp, Homo sapien
caagttcaggatggcccgctgagcttcttgtaa

SEQ ID NO: 118846 - DNA, 33 bp, Homo sapien
caagttcaggatggcctgctgagcttcttgtaa

SEQ ID NO: 118847 - DNA, 33 bp, Homo sapien
tgggccacggccgacgaacgccacgcaggaagg

SEQ ID NO: 118848 - DNA, 33 bp, Homo sapien
tgggccacggccgacggacgccacgcaggaagg

SEQ ID NO: 118849 - DNA, 33 bp, Homo sapien
tcacaatgagcactaccactttctggccatgtc

SEQ ID NO: 118850 - DNA, 33 bp, Homo sapien
tcacaatgagcactactactttctggccatgtc

SEQ ID NO: 118851 - DNA, 33 bp, Homo sapien
ttgttaggaattcgagacctcagcactgtccca

SEQ ID NO: 118852 - DNA, 33 bp, Homo sapien
ttgttaggaattcgaggcctcagcactgtccca

SEQ ID NO: 118853 - DNA, 33 bp, Homo sapien
aagccaggcctgctgaatcacctctcctctccg

SEQ ID NO: 118854 - DNA, 33 bp, Homo sapien
aagccaggcctgctgattcacctctcctctccg

SEQ ID NO: 118855 - DNA, 33 bp, Homo sapien
actgctatcaaagagccgagagctggtaccagg

SEQ ID NO: 118856 - DNA, 33 bp, Homo sapien
actgctatcaaagagctgagagctggtaccagg

SEQ ID NO: 118857 - DNA, 33 bp, Homo sapien
ctgtgcaaaaagggacggaaagcttggacacag

SEQ ID NO: 118858 - DNA, 33 bp, Homo sapien
ctgtgcaaaaagggactgaaagcttggacacag

SEQ ID NO: 118859 - DNA, 33 bp, Homo sapien
gactggggtgactagacggtaatcaaggctcat

SEQ ID NO: 118860 - DNA, 33 bp, Homo sapien
gactggggtgactagagggtaatcaaggctcat

SEQ ID NO: 118861 - DNA, 33 bp, Homo sapien
gataggagtgacgctgcagccacagactgtttg

SEQ ID NO: 118862 - DNA, 33 bp, Homo sapien
gataggagtgacgctgtagccacagactgtttg

SEQ ID NO: 118863 - DNA, 33 bp, Homo sapien
gagatggggttccaccacgatggcctggctggt

SEQ ID NO: 118864 - DNA, 33 bp, Homo sapien
gagatggggttccaccgcgatggcctggctggt

SEQ ID NO: 118865 - DNA, 33 bp, Homo sapien
gtctgcattagagttacaaaacaaagtcataat

SEQ ID NO: 118866 - DNA, 33 bp, Homo sapien
gtctgcattagagttataaaacaaagtcataat

SEQ ID NO: 118867 - DNA, 33 bp, Homo sapien
gatactcctggctagcacctatttagttagttt

SEQ ID NO: 118868 - DNA, 33 bp, Homo sapien
gatactcctggctagcgcctatttagttagttt

SEQ ID NO: 118869 - DNA, 33 bp, Homo sapien
aactcatgtaatcctcgcgatggatccctatgg

SEQ ID NO: 118870 - DNA, 33 bp, Homo sapien
aactcatgtaatcctctcgatggatccctatgg

SEQ ID NO: 118871 - DNA, 33 bp, Homo sapien
gtatgtttgtgcctacactgtttttctttaccc

SEQ ID NO: 118872 - DNA, 33 bp, Homo sapien
gtatgtttgtgcctacgctgtttttctttaccc

SEQ ID NO: 118873 - DNA, 33 bp, Homo sapien
tcacctcttctccaccacattgttgtgcatctc

SEQ ID NO: 118874 - DNA, 33 bp, Homo sapien
tcacctcttctccaccgcattgttgtgcatctc

SEQ ID NO: 118875 - DNA, 33 bp, Homo sapien
ggtaaagctatccagccgccaggagagagatgc

SEQ ID NO: 118876 - DNA, 33 bp, Homo sapien
ggtaaagctatccagctgccaggagagagatgc

SEQ ID NO: 118877 - DNA, 33 bp, Homo sapien
cctctgtttattctgtaaactgcaacctataaa

SEQ ID NO: 118878 - DNA, 33 bp, Homo sapien
cctctgtttattctgtgaactgcaacctataaa

SEQ ID NO: 118879 - DNA, 33 bp, Homo sapien
gggtgccttgttctcacgtgcacagacgtgctg

SEQ ID NO: 118880 - DNA, 33 bp, Homo sapien
gggtgccttgttctcatgtgcacagacgtgctg

SEQ ID NO: 118881 - DNA, 33 bp, Homo sapien
ccaaacttaagacaccacagaatctactcatgg

SEQ ID NO: 118882 - DNA, 33 bp, Homo sapien
ccaaacttaagacaccgcagaatctactcatgg

SEQ ID NO: 118883 - DNA, 33 bp, Homo sapien
aattttctgtaactcacagctgaacataacact

SEQ ID NO: 118884 - DNA, 33 bp, Homo sapien
aattttctgtaactcatagctgaacataacact

SEQ ID NO: 118885 - DNA, 33 bp, Homo sapien
tctgttatggaagacaaggaaaatgaatccgaa

SEQ ID NO: 118886 - DNA, 33 bp, Homo sapien
tctgttatggaagacagggaaaatgaatccgaa

SEQ ID NO: 118887 - DNA, 33 bp, Homo sapien
tagaattgggtgagtgaaacacgtgggatgtgg

SEQ ID NO: 118888 - DNA, 33 bp, Homo sapien
tagaattgggtgagtggaacacgtgggatgtgg

SEQ ID NO: 118889 - DNA, 33 bp, Homo sapien
aagatatgagaccgtagattgggacccagaaac

SEQ ID NO: 118890 - DNA, 33 bp, Homo sapien
aagatatgagaccgtatattgggacccagaaac

SEQ ID NO: 118891 - DNA, 33 bp, Homo sapien
tttgatttgttctacccctacaaccaactccac

SEQ ID NO: 118892 - DNA, 33 bp, Homo sapien
tttgatttgttctacctctacaaccaactccac

SEQ ID NO: 118893 - DNA, 33 bp, Homo sapien
gagagagggaagagagccgcctacctgttgaca

SEQ ID NO: 118894 - DNA, 33 bp, Homo sapien
gagagagggaagagagtcgcctacctgttgaca

SEQ ID NO: 118895 - DNA, 33 bp, Homo sapien
aggatgcagcagctcaaatttatgcatgaagag

SEQ ID NO: 118896 - DNA, 33 bp, Homo sapien
aggatgcagcagctcagatttatgcatgaagag

SEQ ID NO: 118897 - DNA, 33 bp, Homo sapien
tagtggcagcttaggaaaaatgcaggcaaagta

SEQ ID NO: 118898 - DNA, 33 bp, Homo sapien
tagtggcagcttaggagaaatgcaggcaaagta

SEQ ID NO: 118899 - DNA, 33 bp, Homo sapien
catattatgtaacagaaaactgcaatatcccca

SEQ ID NO: 118900 - DNA, 33 bp, Homo sapien
catattatgtaacagataactgcaatatcccca

SEQ ID NO: 118901 - DNA, 33 bp, Homo sapien
gccacgggtccaggagaaagtgtccaccttcac

SEQ ID NO: 118902 - DNA, 33 bp, Homo sapien
gccacgggtccaggaggaagtgtccaccttcac

SEQ ID NO: 118903 - DNA, 33 bp, Homo sapien
ctatgaggaactcccaagcactgatatcaggtg

SEQ ID NO: 118904 - DNA, 33 bp, Homo sapien
ctatgaggaactcccaggcactgatatcaggtg

SEQ ID NO: 118905 - DNA, 33 bp, Homo sapien
gtgcggaattcacagacgggctgtgctggaaaa

SEQ ID NO: 118906 - DNA, 33 bp, Homo sapien
gtgcggaattcacagatgggctgtgctggaaaa

SEQ ID NO: 118907 - DNA, 33 bp, Homo sapien
gtcaggaggagccaagccacactttcaatacat

SEQ ID NO: 118908 - DNA, 33 bp, Homo sapien
gtcaggaggagccaagtcacactttcaatacat

SEQ ID NO: 118909 - DNA, 33 bp, Homo sapien
aattcagtttctgtttcaaaaagtgttgctggt

SEQ ID NO: 118910 - DNA, 33 bp, Homo sapien
aattcagtttctgtttgaaaaagtgttgctggt

SEQ ID NO: 118911 - DNA, 33 bp, Homo sapien
aaaacgtggataatgacacgctagcggcaagcc

SEQ ID NO: 118912 - DNA, 33 bp, Homo sapien
aaaacgtggataatgatacgctagcggcaagcc

SEQ ID NO: 118913 - DNA, 33 bp, Homo sapien
agtggctctgaagcaactaataggctctttgtt

SEQ ID NO: 118914 - DNA, 33 bp, Homo sapien
agtggctctgaagcaattaataggctctttgtt

SEQ ID NO: 118915 - DNA, 33 bp, Homo sapien
ttaatttgaggcaacacatttgtaaatgttttg

SEQ ID NO: 118916 - DNA, 33 bp, Homo sapien
ttaatttgaggcaacatatttgtaaatgttttg

SEQ ID NO: 118917 - DNA, 33 bp, Homo sapien
acacaaggcctgcaaacgttaagagctagagcc

SEQ ID NO: 118918 - DNA, 33 bp, Homo sapien
acacaaggcctgcaaatgttaagagctagagcc

SEQ ID NO: 118919 - DNA, 33 bp, Homo sapien
agagggttgcatccacgatctcatttaaccctc

SEQ ID NO: 118920 - DNA, 33 bp, Homo sapien
agagggttgcatccactatctcatttaaccctc

SEQ ID NO: 118921 - DNA, 33 bp, Homo sapien
ggactgagtgacgtggcaactatgaagtggcac

SEQ ID NO: 118922 - DNA, 33 bp, Homo sapien
ggactgagtgacgtggtaactatgaagtggcac

SEQ ID NO: 118923 - DNA, 33 bp, Homo sapien
tccgcatatacttctcagacttggccttcctca

SEQ ID NO: 118924 - DNA, 33 bp, Homo sapien
tccgcatatacttctcggacttggccttcctca

SEQ ID NO: 118925 - DNA, 33 bp, Homo sapien
ctggagaggacactgaaaaagcagaaaaggaca

SEQ ID NO: 118926 - DNA, 33 bp, Homo sapien
ctggagaggacactgagaaagcagaaaaggaca

SEQ ID NO: 118927 - DNA, 33 bp, Homo sapien
gattaattcagttaacaaacatcttccacgcac

SEQ ID NO: 118928 - DNA, 33 bp, Homo sapien
gattaattcagttaacgaacatcttccacgcac

SEQ ID NO: 118929 - DNA, 33 bp, Homo sapien
ccagccagtcagtcaccataccttcttttgatt

SEQ ID NO: 118930 - DNA, 33 bp, Homo sapien
ccagccagtcagtcacgataccttcttttgatt

SEQ ID NO: 118931 - DNA, 33 bp, Homo sapien
tccatgtccctagaaacgtctggtagcagccca

SEQ ID NO: 118932 - DNA, 33 bp, Homo sapien
tccatgtccctagaaatgtctggtagcagccca

SEQ ID NO: 118933 - DNA, 33 bp, Homo sapien
gtggcacaggctccaaagggtaaagcaaagcag

SEQ ID NO: 118934 - DNA, 33 bp, Homo sapien
gtggcacaggctccaacgggtaaagcaaagcag

SEQ ID NO: 118935 - DNA, 33 bp, Homo sapien
aaagcgaaaggcattacgcatgcatgtgtatgc

SEQ ID NO: 118936 - DNA, 33 bp, Homo sapien
aaagcgaaaggcattatgcatgcatgtgtatgc

SEQ ID NO: 118937 - DNA, 33 bp, Homo sapien
ctgccaaaaagtgagcgcctgcatacacatgca

SEQ ID NO: 118938 - DNA, 33 bp, Homo sapien
ctgccaaaaagtgagctcctgcatacacatgca

SEQ ID NO: 118939 - DNA, 33 bp, Homo sapien
gctcctggctgccatacctttgctcagactatg

SEQ ID NO: 118940 - DNA, 33 bp, Homo sapien
gctcctggctgccatagctttgctcagactatg

SEQ ID NO: 118941 - DNA, 33 bp, Homo sapien
ccccatacaagcacaccgacgtcccttcagtcc

SEQ ID NO: 118942 - DNA, 33 bp, Homo sapien
ccccatacaagcacactgacgtcccttcagtcc

SEQ ID NO: 118943 - DNA, 33 bp, Homo sapien
gaggggagagaagggcacagagagggcacagca

SEQ ID NO: 118944 - DNA, 33 bp, Homo sapien
gaggggagagaagggcgcagagagggcacagca

SEQ ID NO: 118945 - DNA, 33 bp, Homo sapien
gttgaagaattatgcaaccactctactgcacac

SEQ ID NO: 118946 - DNA, 33 bp, Homo sapien
gttgaagaattatgcatccactctactgcacac

SEQ ID NO: 118947 - DNA, 33 bp, Homo sapien
cagtggggtgccttacacgggcccagactctcc

SEQ ID NO: 118948 - DNA, 33 bp, Homo sapien
cagtggggtgccttacgcgggcccagactctcc

SEQ ID NO: 118949 - DNA, 33 bp, Homo sapien
accaatggggagttccacacaaatagccacgct

SEQ ID NO: 118950 - DNA, 33 bp, Homo sapien
accaatggggagttccgcacaaatagccacgct

SEQ ID NO: 118951 - DNA, 33 bp, Homo sapien
gactgaggagtgctaacgtgagctatggtttgt

SEQ ID NO: 118952 - DNA, 33 bp, Homo sapien
gactgaggagtgctaatgtgagctatggtttgt

SEQ ID NO: 118953 - DNA, 33 bp, Homo sapien
gccctctaaggtgatacaacagactgtgtcttc

SEQ ID NO: 118954 - DNA, 33 bp, Homo sapien
gccctctaaggtgatagaacagactgtgtcttc

SEQ ID NO: 118955 - DNA, 33 bp, Homo sapien
attcacacatctgctacccgatgataagcccca

SEQ ID NO: 118956 - DNA, 33 bp, Homo sapien
attcacacatctgctatccgatgataagcccca

SEQ ID NO: 118957 - DNA, 33 bp, Homo sapien
ttcaggcgccccaccgccatctgctttagaggg

SEQ ID NO: 118958 - DNA, 33 bp, Homo sapien
ttcaggcgccccaccgtcatctgctttagaggg

SEQ ID NO: 118959 - DNA, 33 bp, Homo sapien
aaatggagataaaaaactacttacttccaacat

SEQ ID NO: 118960 - DNA, 33 bp, Homo sapien
aaatggagataaaaaagtacttacttccaacat

SEQ ID NO: 118961 - DNA, 33 bp, Homo sapien
ttgcacacttgaaatcaaaagtacaaataggaa

SEQ ID NO: 118962 - DNA, 33 bp, Homo sapien
ttgcacacttgaaatcgaaagtacaaataggaa

SEQ ID NO: 118963 - DNA, 33 bp, Homo sapien
cttctaaaagtacaaaagaagccaggttatcct

SEQ ID NO: 118964 - DNA, 33 bp, Homo sapien
cttctaaaagtacaaatgaagccaggttatcct

SEQ ID NO: 118965 - DNA, 33 bp, Homo sapien
aagctcattacagaaaagagagatagggccaag

SEQ ID NO: 118966 - DNA, 33 bp, Homo sapien
aagctcattacagaaatgagagatagggccaag

SEQ ID NO: 118967 - DNA, 33 bp, Homo sapien
ttgctggtagcaataaatagactgaggaaagcc

SEQ ID NO: 118968 - DNA, 33 bp, Homo sapien
ttgctggtagcaataagtagactgaggaaagcc

SEQ ID NO: 118969 - DNA, 33 bp, Homo sapien
gcacagaatcctctgccgcactgattgagccag

SEQ ID NO: 118970 - DNA, 33 bp, Homo sapien
gcacagaatcctctgctgcactgattgagccag

SEQ ID NO: 118971 - DNA, 33 bp, Homo sapien
tcacaaggccctggcgcatctgggagctctgat

SEQ ID NO: 118972 - DNA, 33 bp, Homo sapien
tcacaaggccctggcgtatctgggagctctgat

SEQ ID NO: 118973 - DNA, 33 bp, Homo sapien
catccaacaagtggccaccacactgctgggaca

SEQ ID NO: 118974 - DNA, 33 bp, Homo sapien
catccaacaagtggccgccacactgctgggaca

SEQ ID NO: 118975 - DNA, 33 bp, Homo sapien
acagataactcagaaacgggggaagtccctctg

SEQ ID NO: 118976 - DNA, 33 bp, Homo sapien
acagataactcagaaatgggggaagtccctctg

SEQ ID NO: 118977 - DNA, 33 bp, Homo sapien
ttccactaagctcccacgcgatgccagtgctgc

SEQ ID NO: 118978 - DNA, 33 bp, Homo sapien
ttccactaagctcccaggcgatgccagtgctgc

SEQ ID NO: 118979 - DNA, 33 bp, Homo sapien
aagacctcgagagacccagcctcacacacctgc

SEQ ID NO: 118980 - DNA, 33 bp, Homo sapien
aagacctcgagagacctagcctcacacacctgc

SEQ ID NO: 118981 - DNA, 33 bp, Homo sapien
acatggtgaaagcccacgcgagggtgtctgtct

SEQ ID NO: 118982 - DNA, 33 bp, Homo sapien
acatggtgaaagcccatgcgagggtgtctgtct

SEQ ID NO: 118983 - DNA, 33 bp, Homo sapien
attgctgatattcaacccatagtcccctgtccc

SEQ ID NO: 118984 - DNA, 33 bp, Homo sapien
attgctgatattcaacgcatagtcccctgtccc

SEQ ID NO: 118985 - DNA, 33 bp, Homo sapien
cttgacatgcgtctaaaaaacaaagccacaagc

SEQ ID NO: 118986 - DNA, 33 bp, Homo sapien
cttgacatgcgtctaacaaacaaagccacaagc

SEQ ID NO: 118987 - DNA, 33 bp, Homo sapien
ataaaaggagctgttacatctctagttttgcat

SEQ ID NO: 118988 - DNA, 33 bp, Homo sapien
ataaaaggagctgttatatctctagttttgcat

SEQ ID NO: 118989 - DNA, 33 bp, Homo sapien
catgtgtggctagagaacttccggcaggagttt

SEQ ID NO: 118990 - DNA, 33 bp, Homo sapien
catgtgtggctagagagcttccggcaggagttt

SEQ ID NO: 118991 - DNA, 33 bp, Homo sapien
atcgctctgcctggtacagaggagccactcaaa

SEQ ID NO: 118992 - DNA, 33 bp, Homo sapien
atcgctctgcctggtatagaggagccactcaaa

SEQ ID NO: 118993 - DNA, 33 bp, Homo sapien
taaaggaggagaaacaagtgtagagagctcaag

SEQ ID NO: 118994 - DNA, 33 bp, Homo sapien
taaaggaggagaaacaggtgtagagagctcaag

SEQ ID NO: 118995 - DNA, 33 bp, Homo sapien
tgaccttcctgtagaaagaatgacagtagaatt

SEQ ID NO: 118996 - DNA, 33 bp, Homo sapien
tgaccttcctgtagaatgaatgacagtagaatt

SEQ ID NO: 118997 - DNA, 33 bp, Homo sapien
ttcacccaagagagcaaatactggtagaaagaa

SEQ ID NO: 118998 - DNA, 33 bp, Homo sapien
ttcacccaagagagcagatactggtagaaagaa

SEQ ID NO: 118999 - DNA, 33 bp, Homo sapien
tacagctccccaccaaacctctgttctcttacc

SEQ ID NO: 119000 - DNA, 33 bp, Homo sapien
tacagctccccaccaatcctctgttctcttacc

SEQ ID NO: 119001 - DNA, 33 bp, Homo sapien
ccctggaagagagtgacggggcattccaatggg

SEQ ID NO: 119002 - DNA, 33 bp, Homo sapien
ccctggaagagagtgatggggcattccaatggg

SEQ ID NO: 119003 - DNA, 33 bp, Homo sapien
acaaagggcatgctgcaatgttcttgagacctg

SEQ ID NO: 119004 - DNA, 33 bp, Homo sapien
acaaagggcatgctgcgatgttcttgagacctg

SEQ ID NO: 119005 - DNA, 33 bp, Homo sapien
acagacctgcaccgtgcagcacataagtgcaaa

SEQ ID NO: 119006 - DNA, 33 bp, Homo sapien
acagacctgcaccgtgtagcacataagtgcaaa

SEQ ID NO: 119007 - DNA, 33 bp, Homo sapien
gcatacaactggcacagtcgaatatcaattgat

SEQ ID NO: 119008 - DNA, 33 bp, Homo sapien
gcatacaactggcacattcgaatatcaattgat

SEQ ID NO: 119009 - DNA, 33 bp, Homo sapien
tttgtacgtttctccacgtgagccatatgtgta

SEQ ID NO: 119010 - DNA, 33 bp, Homo sapien
tttgtacgtttctccatgtgagccatatgtgta

SEQ ID NO: 119011 - DNA, 33 bp, Homo sapien
atcatgaaagcaggtaactcgggggatgacggt

SEQ ID NO: 119012 - DNA, 33 bp, Homo sapien
atcatgaaagcaggtatctcgggggatgacggt

SEQ ID NO: 119013 - DNA, 33 bp, Homo sapien
tggtggtccatttgaacaagggatatgggaagg

SEQ ID NO: 119014 - DNA, 33 bp, Homo sapien
tggtggtccatttgaataagggatatgggaagg

SEQ ID NO: 119015 - DNA, 33 bp, Homo sapien
tgctggacaccagaataatgaaatgggggaggg

SEQ ID NO: 119016 - DNA, 33 bp, Homo sapien
tgctggacaccagaatgatgaaatgggggaggg

SEQ ID NO: 119017 - DNA, 33 bp, Homo sapien
ctgtgttctagagttacgtggcctcggcttagc

SEQ ID NO: 119018 - DNA, 33 bp, Homo sapien
ctgtgttctagagttaggtggcctcggcttagc

SEQ ID NO: 119019 - DNA, 33 bp, Homo sapien
aggagctgtggtgtgcaattcagagttccaaag

SEQ ID NO: 119020 - DNA, 33 bp, Homo sapien
aggagctgtggtgtgcgattcagagttccaaag

SEQ ID NO: 119021 - DNA, 33 bp, Homo sapien
ccacagcctgttagcaaatcgccctcattccag

SEQ ID NO: 119022 - DNA, 33 bp, Homo sapien
ccacagcctgttagcagatcgccctcattccag

SEQ ID NO: 119023 - DNA, 33 bp, Homo sapien
cccaccatcatgccgaaacagcaataatgcatc

SEQ ID NO: 119024 - DNA, 33 bp, Homo sapien
cccaccatcatgccgagacagcaataatgcatc

SEQ ID NO: 119025 - DNA, 33 bp, Homo sapien
cattcttagccttaataatattgtggatgcctg

SEQ ID NO: 119026 - DNA, 33 bp, Homo sapien
cattcttagccttaatcatattgtggatgcctg

SEQ ID NO: 119027 - DNA, 33 bp, Homo sapien
gatatttgtaaaataaagttcaaagacaactaa

SEQ ID NO: 119028 - DNA, 33 bp, Homo sapien
gatatttgtaaaataatgttcaaagacaactaa

SEQ ID NO: 119029 - DNA, 33 bp, Homo sapien
gctacagaggtaaacgaatgagaaatcgctcct

SEQ ID NO: 119030 - DNA, 33 bp, Homo sapien
gctacagaggtaaacgtatgagaaatcgctcct

SEQ ID NO: 119031 - DNA, 33 bp, Homo sapien
gtgctaaagacatgagcacccaactgaaccctt

SEQ ID NO: 119032 - DNA, 33 bp, Homo sapien
gtgctaaagacatgagtacccaactgaaccctt

SEQ ID NO: 119033 - DNA, 33 bp, Homo sapien
cagaaagggaaagatgcaagatgatttgaaggg

SEQ ID NO: 119034 - DNA, 33 bp, Homo sapien
cagaaagggaaagatggaagatgatttgaaggg

SEQ ID NO: 119035 - DNA, 33 bp, Homo sapien
aaaataaagcaagatccctaccatacaccatat

SEQ ID NO: 119036 - DNA, 33 bp, Homo sapien
aaaataaagcaagatcgctaccatacaccatat

SEQ ID NO: 119037 - DNA, 33 bp, Homo sapien
agagtgggaaaccccaatgactggtggacacat

SEQ ID NO: 119038 - DNA, 33 bp, Homo sapien
agagtgggaaaccccagtgactggtggacacat

SEQ ID NO: 119039 - DNA, 33 bp, Homo sapien
gcagcctgcaagctgaaaatgggttttaaatat

SEQ ID NO: 119040 - DNA, 33 bp, Homo sapien
gcagcctgcaagctgagaatgggttttaaatat

SEQ ID NO: 119041 - DNA, 33 bp, Homo sapien
attagtctgcccgttcccctcttttccatctta

SEQ ID NO: 119042 - DNA, 33 bp, Homo sapien
attagtctgcccgttctcctcttttccatctta

SEQ ID NO: 119043 - DNA, 33 bp, Homo sapien
taaaagcaggtaataagcctacttagttcagca

SEQ ID NO: 119044 - DNA, 33 bp, Homo sapien
taaaagcaggtaataatcctacttagttcagca

SEQ ID NO: 119045 - DNA, 33 bp, Homo sapien
tgatgacaacggctaacgtactgggcgctgtgc

SEQ ID NO: 119046 - DNA, 33 bp, Homo sapien
tgatgacaacggctaatgtactgggcgctgtgc

SEQ ID NO: 119047 - DNA, 33 bp, Homo sapien
aatcaggcaactgttaaagaaaagatttttaga

SEQ ID NO: 119048 - DNA, 33 bp, Homo sapien
aatcaggcaactgttagagaaaagatttttaga

SEQ ID NO: 119049 - DNA, 33 bp, Homo sapien
tggtgttctggggagcaacggtgaatcggcaac

SEQ ID NO: 119050 - DNA, 33 bp, Homo sapien
tggtgttctggggagccacggtgaatcggcaac

SEQ ID NO: 119051 - DNA, 33 bp, Homo sapien
ggcaatgaagacccccacttctctgcatgcctt

SEQ ID NO: 119052 - DNA, 33 bp, Homo sapien
ggcaatgaagacccccgcttctctgcatgcctt

SEQ ID NO: 119053 - DNA, 33 bp, Homo sapien
gcaagggttgagcatccacacaaaacagtgtcc

SEQ ID NO: 119054 - DNA, 33 bp, Homo sapien
gcaagggttgagcatctacacaaaacagtgtcc

SEQ ID NO: 119055 - DNA, 33 bp, Homo sapien
tgctgtgcagcggccaagttccatctttacctc

SEQ ID NO: 119056 - DNA, 33 bp, Homo sapien
tgctgtgcagcggccaggttccatctttacctc

SEQ ID NO: 119057 - DNA, 33 bp, Homo sapien
ctgttggtctcatccacaacattgagcagtaga

SEQ ID NO: 119058 - DNA, 33 bp, Homo sapien
ctgttggtctcatccataacattgagcagtaga

SEQ ID NO: 119059 - DNA, 33 bp, Homo sapien
tattctaaacactttgcaagtaccaagtatttg

SEQ ID NO: 119060 - DNA, 33 bp, Homo sapien
tattctaaacactttgtaagtaccaagtatttg

SEQ ID NO: 119061 - DNA, 33 bp, Homo sapien
gatgggagtctggtaaaattccactcaattact

SEQ ID NO: 119062 - DNA, 33 bp, Homo sapien
gatgggagtctggtaagattccactcaattact

SEQ ID NO: 119063 - DNA, 33 bp, Homo sapien
caacctgaggggtgacaagactgagctgaggac

SEQ ID NO: 119064 - DNA, 33 bp, Homo sapien
caacctgaggggtgacgagactgagctgaggac

SEQ ID NO: 119065 - DNA, 33 bp, Homo sapien
gggggaggagtgtcccaagagatccagacagaa

SEQ ID NO: 119066 - DNA, 33 bp, Homo sapien
gggggaggagtgtcccgagagatccagacagaa

SEQ ID NO: 119067 - DNA, 33 bp, Homo sapien
ccagcccatcggcaaccgagatgtttgtccaag

SEQ ID NO: 119068 - DNA, 33 bp, Homo sapien
ccagcccatcggcaacggagatgtttgtccaag

SEQ ID NO: 119069 - DNA, 33 bp, Homo sapien
ataatttcagcctcaccaggttgtcatgaggct

SEQ ID NO: 119070 - DNA, 33 bp, Homo sapien
ataatttcagcctcactaggttgtcatgaggct

SEQ ID NO: 119071 - DNA, 33 bp, Homo sapien
tttgcagatggagaaacggaggtgttcagagaa

SEQ ID NO: 119072 - DNA, 33 bp, Homo sapien
tttgcagatggagaaatggaggtgttcagagaa

SEQ ID NO: 119073 - DNA, 33 bp, Homo sapien
ttatccgtcacacaaaatgcaatgggagccatt

SEQ ID NO: 119074 - DNA, 33 bp, Homo sapien
ttatccgtcacacaaagtgcaatgggagccatt

SEQ ID NO: 119075 - DNA, 33 bp, Homo sapien
ggagccattttccttcaagcacccatcatttcc

SEQ ID NO: 119076 - DNA, 33 bp, Homo sapien
ggagccattttccttcgagcacccatcatttcc

SEQ ID NO: 119077 - DNA, 33 bp, Homo sapien
tggggagaatcagaagaaacgccttataaatca

SEQ ID NO: 119078 - DNA, 33 bp, Homo sapien
tggggagaatcagaaggaacgccttataaatca

SEQ ID NO: 119079 - DNA, 33 bp, Homo sapien
tttgcaagtgaggaaacagaggcgcagtggtgt

SEQ ID NO: 119080 - DNA, 33 bp, Homo sapien
tttgcaagtgaggaaagagaggcgcagtggtgt

SEQ ID NO: 119081 - DNA, 33 bp, Homo sapien
ttgcaaaagtgggtggaaggtaatgacagtact

SEQ ID NO: 119082 - DNA, 33 bp, Homo sapien
ttgcaaaagtgggtgggaggtaatgacagtact

SEQ ID NO: 119083 - DNA, 33 bp, Homo sapien
ttgaccagaactccacaggtaagtactgtcatt

SEQ ID NO: 119084 - DNA, 33 bp, Homo sapien
ttgaccagaactccacgggtaagtactgtcatt

SEQ ID NO: 119085 - DNA, 33 bp, Homo sapien
cacttgtccaaagtcacacagctataagtgccg

SEQ ID NO: 119086 - DNA, 33 bp, Homo sapien
cacttgtccaaagtcagacagctataagtgccg

SEQ ID NO: 119087 - DNA, 33 bp, Homo sapien
tgctgcatgttgagagccctcttggggcaggct

SEQ ID NO: 119088 - DNA, 33 bp, Homo sapien
tgctgcatgttgagagtcctcttggggcaggct

SEQ ID NO: 119089 - DNA, 33 bp, Homo sapien
gggagtcttggctaaaaagcttccatcccacgg

SEQ ID NO: 119090 - DNA, 33 bp, Homo sapien
gggagtcttggctaaagagcttccatcccacgg

SEQ ID NO: 119091 - DNA, 33 bp, Homo sapien
tcaggaaacctcagtcaagatgttgaggctcca

SEQ ID NO: 119092 - DNA, 33 bp, Homo sapien
tcaggaaacctcagtcgagatgttgaggctcca

SEQ ID NO: 119093 - DNA, 33 bp, Homo sapien
aatgcactaactcttccatcaacacgcgttcgc

SEQ ID NO: 119094 - DNA, 33 bp, Homo sapien
aatgcactaactcttcgatcaacacgcgttcgc

SEQ ID NO: 119095 - DNA, 33 bp, Homo sapien
ggcctcttctactaggccactgtggtttcatgc

SEQ ID NO: 119096 - DNA, 33 bp, Homo sapien
ggcctcttctactaggtcactgtggtttcatgc

SEQ ID NO: 119097 - DNA, 33 bp, Homo sapien
aggaaatgctgccatcaacaacttcattgctgc

SEQ ID NO: 119098 - DNA, 33 bp, Homo sapien
aggaaatgctgccatcgacaacttcattgctgc

SEQ ID NO: 119099 - DNA, 33 bp, Homo sapien
ctggctctggttatacagagaggccaaagctct

SEQ ID NO: 119100 - DNA, 33 bp, Homo sapien
ctggctctggttatacggagaggccaaagctct

SEQ ID NO: 119101 - DNA, 33 bp, Homo sapien
ggagggatggatagcaagaagagctgatgccct

SEQ ID NO: 119102 - DNA, 33 bp, Homo sapien
ggagggatggatagcaggaagagctgatgccct

SEQ ID NO: 119103 - DNA, 33 bp, Homo sapien
agccagtcagtgaacaatgtggaaaggaagata

SEQ ID NO: 119104 - DNA, 33 bp, Homo sapien
agccagtcagtgaacagtgtggaaaggaagata

SEQ ID NO: 119105 - DNA, 33 bp, Homo sapien
ggctttgaaaaaaatcacagattccagatccct

SEQ ID NO: 119106 - DNA, 33 bp, Homo sapien
ggctttgaaaaaaatcgcagattccagatccct

SEQ ID NO: 119107 - DNA, 33 bp, Homo sapien
ctggaattcccagttacgtatgatgattgccag

SEQ ID NO: 119108 - DNA, 33 bp, Homo sapien
ctggaattcccagttatgtatgatgattgccag

SEQ ID NO: 119109 - DNA, 33 bp, Homo sapien
agcctccccgacacacaagagatgctgggacac

SEQ ID NO: 119110 - DNA, 33 bp, Homo sapien
agcctccccgacacacgagagatgctgggacac

SEQ ID NO: 119111 - DNA, 33 bp, Homo sapien
gaaagatgtcaggtcacgctcagagaaaccctg

SEQ ID NO: 119112 - DNA, 33 bp, Homo sapien
gaaagatgtcaggtcaggctcagagaaaccctg

SEQ ID NO: 119113 - DNA, 33 bp, Homo sapien
gattgttgaccttgggcccagagagattgagtc

SEQ ID NO: 119114 - DNA, 33 bp, Homo sapien
gattgttgaccttgggtccagagagattgagtc

SEQ ID NO: 119115 - DNA, 33 bp, Homo sapien
aaacctcttctctccccgctgggtggcattcaa

SEQ ID NO: 119116 - DNA, 33 bp, Homo sapien
aaacctcttctctccctgctgggtggcattcaa

SEQ ID NO: 119117 - DNA, 33 bp, Homo sapien
tggccatgacacttccaaacccatgtcctcgcc

SEQ ID NO: 119118 - DNA, 33 bp, Homo sapien
tggccatgacacttcctaacccatgtcctcgcc

SEQ ID NO: 119119 - DNA, 33 bp, Homo sapien
gtagtgatagccctaacgcctagcctggatcct

SEQ ID NO: 119120 - DNA, 33 bp, Homo sapien
gtagtgatagccctaatgcctagcctggatcct

SEQ ID NO: 119121 - DNA, 33 bp, Homo sapien
atcatgctaggttggaagttcatgaaggcagga

SEQ ID NO: 119122 - DNA, 33 bp, Homo sapien
atcatgctaggttggacgttcatgaaggcagga

SEQ ID NO: 119123 - DNA, 33 bp, Homo sapien
cggtccatgcggaaggccatgtccttgttgccc

SEQ ID NO: 119124 - DNA, 33 bp, Homo sapien
cggtccatgcggaaggtcatgtccttgttgccc

SEQ ID NO: 119125 - DNA, 33 bp, Homo sapien
ttgcagccaaccgataatactattccagataag

SEQ ID NO: 119126 - DNA, 33 bp, Homo sapien
ttgcagccaaccgatactactattccagataag

SEQ ID NO: 119127 - DNA, 33 bp, Homo sapien
ccatctgctggacagacacgcagatcgcttgct

SEQ ID NO: 119128 - DNA, 33 bp, Homo sapien
ccatctgctggacagatacgcagatcgcttgct

SEQ ID NO: 119129 - DNA, 33 bp, Homo sapien
ttttgagggtcaacccaattaaatgctggagga

SEQ ID NO: 119130 - DNA, 33 bp, Homo sapien
ttttgagggtcaacccgattaaatgctggagga

SEQ ID NO: 119131 - DNA, 33 bp, Homo sapien
ttctatctaactgtataagcctcagtttcctcc

SEQ ID NO: 119132 - DNA, 33 bp, Homo sapien
ttctatctaactgtatgagcctcagtttcctcc

SEQ ID NO: 119133 - DNA, 33 bp, Homo sapien
gtgtatttttcatgacagggcgtgagcttagcc

SEQ ID NO: 119134 - DNA, 33 bp, Homo sapien
gtgtatttttcatgacggggcgtgagcttagcc

SEQ ID NO: 119135 - DNA, 33 bp, Homo sapien
tgggaatgtctgtgggaaagaagaggctctgct

SEQ ID NO: 119136 - DNA, 33 bp, Homo sapien
tgggaatgtctgtggggaagaagaggctctgct

SEQ ID NO: 119137 - DNA, 33 bp, Homo sapien
gaatggtagtgatgaacgtggtgttcagaagcc

SEQ ID NO: 119138 - DNA, 33 bp, Homo sapien
gaatggtagtgatgaatgtggtgttcagaagcc

SEQ ID NO: 119139 - DNA, 33 bp, Homo sapien
aatatttcctgcacgaccaattaaaaaatcagg

SEQ ID NO: 119140 - DNA, 33 bp, Homo sapien
aatatttcctgcacgatcaattaaaaaatcagg

SEQ ID NO: 119141 - DNA, 33 bp, Homo sapien
ttaaatccaggaaacaaagagcggtgcgaagat

SEQ ID NO: 119142 - DNA, 33 bp, Homo sapien
ttaaatccaggaaacacagagcggtgcgaagat

SEQ ID NO: 119143 - DNA, 33 bp, Homo sapien
gggctctcattctgtcacttgggccctccatat

SEQ ID NO: 119144 - DNA, 33 bp, Homo sapien
gggctctcattctgtcgcttgggccctccatat

SEQ ID NO: 119145 - DNA, 33 bp, Homo sapien
cttctgtctttggcagccctatctttctgtatg

SEQ ID NO: 119146 - DNA, 33 bp, Homo sapien
cttctgtctttggcaggcctatctttctgtatg

SEQ ID NO: 119147 - DNA, 33 bp, Homo sapien
aagtctgttttctgtaagtctattttttcctct

SEQ ID NO: 119148 - DNA, 33 bp, Homo sapien
aagtctgttttctgtacgtctattttttcctct

SEQ ID NO: 119149 - DNA, 33 bp, Homo sapien
aagactgatacaggacaaagggtggctgtggcc

SEQ ID NO: 119150 - DNA, 33 bp, Homo sapien
aagactgatacaggacgaagggtggctgtggcc

SEQ ID NO: 119151 - DNA, 33 bp, Homo sapien
agctcaatatagtgtaacacagctgctcaataa

SEQ ID NO: 119152 - DNA, 33 bp, Homo sapien
agctcaatatagtgtatcacagctgctcaataa

SEQ ID NO: 119153 - DNA, 33 bp, Homo sapien
tcccttgaggttacaacggttctactcacccca

SEQ ID NO: 119154 - DNA, 33 bp, Homo sapien
tcccttgaggttacaatggttctactcacccca

SEQ ID NO: 119155 - DNA, 33 bp, Homo sapien
tgacctctaccttcataagatctgttattttta

SEQ ID NO: 119156 - DNA, 33 bp, Homo sapien
tgacctctaccttcatgagatctgttattttta

SEQ ID NO: 119157 - DNA, 33 bp, Homo sapien
ttgactttcttgtccacgtggggatgccacctc

SEQ ID NO: 119158 - DNA, 33 bp, Homo sapien
ttgactttcttgtccatgtggggatgccacctc

SEQ ID NO: 119159 - DNA, 33 bp, Homo sapien
aacggagtttttcatccgaagactaaactcagc

SEQ ID NO: 119160 - DNA, 33 bp, Homo sapien
aacggagtttttcatctgaagactaaactcagc

SEQ ID NO: 119161 - DNA, 33 bp, Homo sapien
gctgtgtcacatcacaacttacgagtcacttgt

SEQ ID NO: 119162 - DNA, 33 bp, Homo sapien
gctgtgtcacatcacatcttacgagtcacttgt

SEQ ID NO: 119163 - DNA, 33 bp, Homo sapien
agaagctggttgtaatcactctgtcctttggga

SEQ ID NO: 119164 - DNA, 33 bp, Homo sapien
agaagctggttgtaattactctgtcctttggga

SEQ ID NO: 119165 - DNA, 33 bp, Homo sapien
tcctctttagacacccagaatcacagctctctt

SEQ ID NO: 119166 - DNA, 33 bp, Homo sapien
tcctctttagacacccggaatcacagctctctt

SEQ ID NO: 119167 - DNA, 33 bp, Homo sapien
tattggtgaatgtacccattttacagcagagga

SEQ ID NO: 119168 - DNA, 33 bp, Homo sapien
tattggtgaatgtacctattttacagcagagga

SEQ ID NO: 119169 - DNA, 33 bp, Homo sapien
acgttcatcctctctaactacctttaaacagta

SEQ ID NO: 119170 - DNA, 33 bp, Homo sapien
acgttcatcctctctagctacctttaaacagta

SEQ ID NO: 119171 - DNA, 33 bp, Homo sapien
caagagaggctaacacagagtccaagagaacaa

SEQ ID NO: 119172 - DNA, 33 bp, Homo sapien
caagagaggctaacacggagtccaagagaacaa

SEQ ID NO: 119173 - DNA, 33 bp, Homo sapien
cactgaatcattcagaatagtatacgctcagag

SEQ ID NO: 119174 - DNA, 33 bp, Homo sapien
cactgaatcattcagagtagtatacgctcagag

SEQ ID NO: 119175 - DNA, 33 bp, Homo sapien
ggtgataggtacagggaagtctaatataattta

SEQ ID NO: 119176 - DNA, 33 bp, Homo sapien
ggtgataggtacaggggagtctaatataattta

SEQ ID NO: 119177 - DNA, 33 bp, Homo sapien
tgctgtaccactaataaaagtaatgtattgtca

SEQ ID NO: 119178 - DNA, 33 bp, Homo sapien
tgctgtaccactaatagaagtaatgtattgtca

SEQ ID NO: 119179 - DNA, 33 bp, Homo sapien
gtggtacagcaacaaacaatactaactaagccc

SEQ ID NO: 119180 - DNA, 33 bp, Homo sapien
gtggtacagcaacaaagaatactaactaagccc

SEQ ID NO: 119181 - DNA, 33 bp, Homo sapien
ccagtgaaatagatgagtaatgccactttacaa

SEQ ID NO: 119182 - DNA, 33 bp, Homo sapien
ccagtgaaatagatgattaatgccactttacaa

SEQ ID NO: 119183 - DNA, 33 bp, Homo sapien
cttggcattcactgaaacacatgacctaagcag

SEQ ID NO: 119184 - DNA, 33 bp, Homo sapien
cttggcattcactgaatcacatgacctaagcag

SEQ ID NO: 119185 - DNA, 33 bp, Homo sapien
gacccttaaagatcacaaatctgagcccggtgt

SEQ ID NO: 119186 - DNA, 33 bp, Homo sapien
gacccttaaagatcactaatctgagcccggtgt

SEQ ID NO: 119187 - DNA, 33 bp, Homo sapien
caccacacaagatggccgacctgagctcatcaa

SEQ ID NO: 119188 - DNA, 33 bp, Homo sapien
caccacacaagatggctgacctgagctcatcaa

SEQ ID NO: 119189 - DNA, 33 bp, Homo sapien
tcttctttaatgctacaccaaaacttaacaagc

SEQ ID NO: 119190 - DNA, 33 bp, Homo sapien
tcttctttaatgctacgccaaaacttaacaagc

SEQ ID NO: 119191 - DNA, 33 bp, Homo sapien
ggaacagaaaatagaaaagaagcaaatagaaat

SEQ ID NO: 119192 - DNA, 33 bp, Homo sapien
ggaacagaaaatagaagagaagcaaatagaaat

SEQ ID NO: 119193 - DNA, 33 bp, Homo sapien
ctagtaggtgctcaaaaaagccattcactcttt

SEQ ID NO: 119194 - DNA, 33 bp, Homo sapien
ctagtaggtgctcaaagaagccattcactcttt

SEQ ID NO: 119195 - DNA, 33 bp, Homo sapien
agcataatttattcacccagttcacaattgata

SEQ ID NO: 119196 - DNA, 33 bp, Homo sapien
agcataatttattcactcagttcacaattgata

SEQ ID NO: 119197 - DNA, 33 bp, Homo sapien
agtgagacctgtgttgcacttcttgtctttaga

SEQ ID NO: 119198 - DNA, 33 bp, Homo sapien
agtgagacctgtgttggacttcttgtctttaga

SEQ ID NO: 119199 - DNA, 33 bp, Homo sapien
gtcgtgtgtacaggccaagccccagtggcgtag

SEQ ID NO: 119200 - DNA, 33 bp, Homo sapien
gtcgtgtgtacaggccgagccccagtggcgtag

SEQ ID NO: 119201 - DNA, 33 bp, Homo sapien
caggtaggatcttagaaaactacaaactcacct

SEQ ID NO: 119202 - DNA, 33 bp, Homo sapien
caggtaggatcttagacaactacaaactcacct

SEQ ID NO: 119203 - DNA, 33 bp, Homo sapien
gccctgttgatgtctcactaactatctactgta

SEQ ID NO: 119204 - DNA, 33 bp, Homo sapien
gccctgttgatgtctcgctaactatctactgta

SEQ ID NO: 119205 - DNA, 33 bp, Homo sapien
tgacccctaatttgccaaagagacttctggcca

SEQ ID NO: 119206 - DNA, 33 bp, Homo sapien
tgacccctaatttgccgaagagacttctggcca

SEQ ID NO: 119207 - DNA, 33 bp, Homo sapien
aatccacaaaataaagccctagctccttaggaa

SEQ ID NO: 119208 - DNA, 33 bp, Homo sapien
aatccacaaaataaaggcctagctccttaggaa

SEQ ID NO: 119209 - DNA, 33 bp, Homo sapien
ggcctgaagaatccccaagcagataaaaccagt

SEQ ID NO: 119210 - DNA, 33 bp, Homo sapien
ggcctgaagaatccccgagcagataaaaccagt

SEQ ID NO: 119211 - DNA, 33 bp, Homo sapien
ctgctatggttttgaacatatgtgtgtctccaa

SEQ ID NO: 119212 - DNA, 33 bp, Homo sapien
ctgctatggttttgaatatatgtgtgtctccaa

SEQ ID NO: 119213 - DNA, 33 bp, Homo sapien
tcaggaatacctcacactcaatgttgtattctt

SEQ ID NO: 119214 - DNA, 33 bp, Homo sapien
tcaggaatacctcacattcaatgttgtattctt

SEQ ID NO: 119215 - DNA, 33 bp, Homo sapien
gggctttccagatgaaagaaccagtaacaaaaa

SEQ ID NO: 119216 - DNA, 33 bp, Homo sapien
gggctttccagatgaaggaaccagtaacaaaaa

SEQ ID NO: 119217 - DNA, 33 bp, Homo sapien
tgtctagagaagacacacatacgtcttaacaaa

SEQ ID NO: 119218 - DNA, 33 bp, Homo sapien
tgtctagagaagacacgcatacgtcttaacaaa

SEQ ID NO: 119219 - DNA, 33 bp, Homo sapien
aggtcaaatgccagaaatgtgtcaccatcaaat

SEQ ID NO: 119220 - DNA, 33 bp, Homo sapien
aggtcaaatgccagaactgtgtcaccatcaaat

SEQ ID NO: 119221 - DNA, 33 bp, Homo sapien
cccacggaacaatacaagatatgatgctgctcc

SEQ ID NO: 119222 - DNA, 33 bp, Homo sapien
cccacggaacaatacaggatatgatgctgctcc

SEQ ID NO: 119223 - DNA, 33 bp, Homo sapien
tgctggtccaattggcagagaagcagacatagg

SEQ ID NO: 119224 - DNA, 33 bp, Homo sapien
tgctggtccaattggccgagaagcagacatagg

SEQ ID NO: 119225 - DNA, 33 bp, Homo sapien
taagactggagatacaagagcgtaacaattgta

SEQ ID NO: 119226 - DNA, 33 bp, Homo sapien
taagactggagatacaggagcgtaacaattgta

SEQ ID NO: 119227 - DNA, 33 bp, Homo sapien
cgaaggccccccaaccagaatctccttccagga

SEQ ID NO: 119228 - DNA, 33 bp, Homo sapien
cgaaggccccccaaccggaatctccttccagga

SEQ ID NO: 119229 - DNA, 33 bp, Homo sapien
gcactcttcttagaccaacacactctccatata

SEQ ID NO: 119230 - DNA, 33 bp, Homo sapien
gcactcttcttagaccgacacactctccatata

SEQ ID NO: 119231 - DNA, 33 bp, Homo sapien
gtgttaaagatcccaacgacaatgcctgaccag

SEQ ID NO: 119232 - DNA, 33 bp, Homo sapien
gtgttaaagatcccaatgacaatgcctgaccag

SEQ ID NO: 119233 - DNA, 33 bp, Homo sapien
tagcatgtgggtttcaactttctgttttttcaa

SEQ ID NO: 119234 - DNA, 33 bp, Homo sapien
tagcatgtgggtttcacctttctgttttttcaa

SEQ ID NO: 119235 - DNA, 33 bp, Homo sapien
taacagtagattcacacgcaattttaataaatt

SEQ ID NO: 119236 - DNA, 33 bp, Homo sapien
taacagtagattcacatgcaattttaataaatt

SEQ ID NO: 119237 - DNA, 33 bp, Homo sapien
ctccaggatcagaaagcctccttagaaggtcag

SEQ ID NO: 119238 - DNA, 33 bp, Homo sapien
ctccaggatcagaaagtctccttagaaggtcag

SEQ ID NO: 119239 - DNA, 33 bp, Homo sapien
cccacgcagaactcaccatgcaggaggcccttt

SEQ ID NO: 119240 - DNA, 33 bp, Homo sapien
cccacgcagaactcactatgcaggaggcccttt

SEQ ID NO: 119241 - DNA, 33 bp, Homo sapien
tatggcggtgaacaagaaggtatggtctgtgcc

SEQ ID NO: 119242 - DNA, 33 bp, Homo sapien
tatggcggtgaacaagcaggtatggtctgtgcc

SEQ ID NO: 119243 - DNA, 33 bp, Homo sapien
ctgctaatgtggacagcagactttatccctcct

SEQ ID NO: 119244 - DNA, 33 bp, Homo sapien
ctgctaatgtggacagtagactttatccctcct

SEQ ID NO: 119245 - DNA, 33 bp, Homo sapien
cttgagatctggcttcactttctgactttggga

SEQ ID NO: 119246 - DNA, 33 bp, Homo sapien
cttgagatctggcttcgctttctgactttggga

SEQ ID NO: 119247 - DNA, 33 bp, Homo sapien
catgtctgcatggtacaagacaccccttcacgg

SEQ ID NO: 119248 - DNA, 33 bp, Homo sapien
catgtctgcatggtacgagacaccccttcacgg

SEQ ID NO: 119249 - DNA, 33 bp, Homo sapien
gctaggcctgcatccagtccacgccagagctgc

SEQ ID NO: 119250 - DNA, 33 bp, Homo sapien
gctaggcctgcatccattccacgccagagctgc

SEQ ID NO: 119251 - DNA, 33 bp, Homo sapien
tcttaggagcaagtcaaacctctttttcttagt

SEQ ID NO: 119252 - DNA, 33 bp, Homo sapien
tcttaggagcaagtcagacctctttttcttagt

SEQ ID NO: 119253 - DNA, 33 bp, Homo sapien
aatctcaggtggcgagaagcccggcatcatccc

SEQ ID NO: 119254 - DNA, 33 bp, Homo sapien
aatctcaggtggcgaggagcccggcatcatccc

SEQ ID NO: 119255 - DNA, 33 bp, Homo sapien
atatatgctcataaaacactatgcaggcataaa

SEQ ID NO: 119256 - DNA, 33 bp, Homo sapien
atatatgctcataaaatactatgcaggcataaa

SEQ ID NO: 119257 - DNA, 33 bp, Homo sapien
ggtgttggaatggctcaagactggaacagctag

SEQ ID NO: 119258 - DNA, 33 bp, Homo sapien
ggtgttggaatggctcgagactggaacagctag

SEQ ID NO: 119259 - DNA, 33 bp, Homo sapien
ccaacagattcaaagacgcaggacacagacctc

SEQ ID NO: 119260 - DNA, 33 bp, Homo sapien
ccaacagattcaaagatgcaggacacagacctc

SEQ ID NO: 119261 - DNA, 33 bp, Homo sapien
taccttttatctacacaaaattcagccatcata

SEQ ID NO: 119262 - DNA, 33 bp, Homo sapien
taccttttatctacaccaaattcagccatcata

SEQ ID NO: 119263 - DNA, 33 bp, Homo sapien
atttaaataattgcccaaactcagccttgctga

SEQ ID NO: 119264 - DNA, 33 bp, Homo sapien
atttaaataattgcccgaactcagccttgctga

SEQ ID NO: 119265 - DNA, 33 bp, Homo sapien
ctctggtggctactggaagaagtgcataggtcc

SEQ ID NO: 119266 - DNA, 33 bp, Homo sapien
ctctggtggctactggcagaagtgcataggtcc

SEQ ID NO: 119267 - DNA, 33 bp, Homo sapien
aactgggcttcaaggagggctatgacaagacaa

SEQ ID NO: 119268 - DNA, 33 bp, Homo sapien
aactgggcttcaaggatggctatgacaagacaa

SEQ ID NO: 119269 - DNA, 33 bp, Homo sapien
ggacccaggattttgtaaagatttagactctgc

SEQ ID NO: 119270 - DNA, 33 bp, Homo sapien
ggacccaggattttgttaagatttagactctgc

SEQ ID NO: 119271 - DNA, 33 bp, Homo sapien
acctggcaacagtaacagatccaatcagggtcc

SEQ ID NO: 119272 - DNA, 33 bp, Homo sapien
acctggcaacagtaacggatccaatcagggtcc

SEQ ID NO: 119273 - DNA, 33 bp, Homo sapien
ggctcctccatgctgaccgtctttgctttactg

SEQ ID NO: 119274 - DNA, 33 bp, Homo sapien
ggctcctccatgctgatcgtctttgctttactg

SEQ ID NO: 119275 - DNA, 33 bp, Homo sapien
tgctgcaggatccccaccttctgtgagagccaa

SEQ ID NO: 119276 - DNA, 33 bp, Homo sapien
tgctgcaggatccccatcttctgtgagagccaa

SEQ ID NO: 119277 - DNA, 33 bp, Homo sapien
ccctctgtgccttacaatcttttgcttagggct

SEQ ID NO: 119278 - DNA, 33 bp, Homo sapien
ccctctgtgccttacagtcttttgcttagggct

SEQ ID NO: 119279 - DNA, 33 bp, Homo sapien
ttttctcttctactctcactctgtcaacacaca

SEQ ID NO: 119280 - DNA, 33 bp, Homo sapien
ttttctcttctactcttactctgtcaacacaca

SEQ ID NO: 119281 - DNA, 33 bp, Homo sapien
tgagcggatggcaagaaggatgcactccctggc

SEQ ID NO: 119282 - DNA, 33 bp, Homo sapien
tgagcggatggcaagacggatgcactccctggc

SEQ ID NO: 119283 - DNA, 33 bp, Homo sapien
tgttatttcctgacgcagatgaagaagcagaac

SEQ ID NO: 119284 - DNA, 33 bp, Homo sapien
tgttatttcctgacgcggatgaagaagcagaac

SEQ ID NO: 119285 - DNA, 33 bp, Homo sapien
taatcacttattggtgacacaaaatttaagatg

SEQ ID NO: 119286 - DNA, 33 bp, Homo sapien
taatcacttattggtggcacaaaatttaagatg

SEQ ID NO: 119287 - DNA, 33 bp, Homo sapien
tgtccaggttgatggcagccagctccgtctggt

SEQ ID NO: 119288 - DNA, 33 bp, Homo sapien
tgtccaggttgatggcggccagctccgtctggt

SEQ ID NO: 119289 - DNA, 33 bp, Homo sapien
cctttttgggccttgacgtagtatctctaagac

SEQ ID NO: 119290 - DNA, 33 bp, Homo sapien
cctttttgggccttgatgtagtatctctaagac

SEQ ID NO: 119291 - DNA, 33 bp, Homo sapien
gaggccagtattcttacgtcttcatcacagagc

SEQ ID NO: 119292 - DNA, 33 bp, Homo sapien
gaggccagtattcttatgtcttcatcacagagc

SEQ ID NO: 119293 - DNA, 33 bp, Homo sapien
taaagttagcctttaaggaaccctcaggcattt

SEQ ID NO: 119294 - DNA, 33 bp, Homo sapien
taaagttagcctttaatgaaccctcaggcattt

SEQ ID NO: 119295 - DNA, 33 bp, Homo sapien
ttctgaaacacaagacaatgcagcatacaacct

SEQ ID NO: 119296 - DNA, 33 bp, Homo sapien
ttctgaaacacaagacgatgcagcatacaacct

SEQ ID NO: 119297 - DNA, 33 bp, Homo sapien
cagcaaatagttcaccaaggccaccagcacaag

SEQ ID NO: 119298 - DNA, 33 bp, Homo sapien
cagcaaatagttcaccgaggccaccagcacaag

SEQ ID NO: 119299 - DNA, 33 bp, Homo sapien
gaaagactttgaattaagaactgacaactagaa

SEQ ID NO: 119300 - DNA, 33 bp, Homo sapien
gaaagactttgaattaggaactgacaactagaa

SEQ ID NO: 119301 - DNA, 33 bp, Homo sapien
gcgagacactgtctcacataaacaaataaacaa

SEQ ID NO: 119302 - DNA, 33 bp, Homo sapien
gcgagacactgtctcagataaacaaataaacaa

SEQ ID NO: 119303 - DNA, 33 bp, Homo sapien
cttctcagctggactacagtaatgacttttaaa

SEQ ID NO: 119304 - DNA, 33 bp, Homo sapien
cttctcagctggactagagtaatgacttttaaa

SEQ ID NO: 119305 - DNA, 33 bp, Homo sapien
ttcacatcataatcccaaaaccggtgactatta

SEQ ID NO: 119306 - DNA, 33 bp, Homo sapien
ttcacatcataatccccaaaccggtgactatta

SEQ ID NO: 119307 - DNA, 33 bp, Homo sapien
ggatgccacagtgttaagtagagcagtgatacg

SEQ ID NO: 119308 - DNA, 33 bp, Homo sapien
ggatgccacagtgttaggtagagcagtgatacg

SEQ ID NO: 119309 - DNA, 33 bp, Homo sapien
ccagcatgacgttcacagcgaacaagctcattc

SEQ ID NO: 119310 - DNA, 33 bp, Homo sapien
ccagcatgacgttcacggcgaacaagctcattc

SEQ ID NO: 119311 - DNA, 33 bp, Homo sapien
ctcattctggcgaaatcaaagcagtaattccag

SEQ ID NO: 119312 - DNA, 33 bp, Homo sapien
ctcattctggcgaaattaaagcagtaattccag

SEQ ID NO: 119313 - DNA, 33 bp, Homo sapien
acacatgataaaactaaggtgaagaagagctca

SEQ ID NO: 119314 - DNA, 33 bp, Homo sapien
acacatgataaaactacggtgaagaagagctca

SEQ ID NO: 119315 - DNA, 33 bp, Homo sapien
acacatatatagcaatcatgtaacagcatctct

SEQ ID NO: 119316 - DNA, 33 bp, Homo sapien
acacatatatagcaatgatgtaacagcatctct

SEQ ID NO: 119317 - DNA, 33 bp, Homo sapien
gtgttaatagcaattacgtttggggttcgtatt

SEQ ID NO: 119318 - DNA, 33 bp, Homo sapien
gtgttaatagcaattatgtttggggttcgtatt

SEQ ID NO: 119319 - DNA, 33 bp, Homo sapien
ttaacagcatttggaaagacttttattaaagta

SEQ ID NO: 119320 - DNA, 33 bp, Homo sapien
ttaacagcatttggaaggacttttattaaagta

SEQ ID NO: 119321 - DNA, 33 bp, Homo sapien
agccactgtgcccaaccaccatatcccatatta

SEQ ID NO: 119322 - DNA, 33 bp, Homo sapien
agccactgtgcccaactaccatatcccatatta

SEQ ID NO: 119323 - DNA, 33 bp, Homo sapien
taaggtatatgggggcaatagacacctagtgaa

SEQ ID NO: 119324 - DNA, 33 bp, Homo sapien
taaggtatatgggggcgatagacacctagtgaa

SEQ ID NO: 119325 - DNA, 33 bp, Homo sapien
gaaaagagtgggtgacagctaatgggtctcaag

SEQ ID NO: 119326 - DNA, 33 bp, Homo sapien
gaaaagagtgggtgacggctaatgggtctcaag

SEQ ID NO: 119327 - DNA, 33 bp, Homo sapien
ataagaaagaccatgacagctcaagtccaacat

SEQ ID NO: 119328 - DNA, 33 bp, Homo sapien
ataagaaagaccatgatagctcaagtccaacat

SEQ ID NO: 119329 - DNA, 33 bp, Homo sapien
attcaataaaacctacagattgccagtgcttgg

SEQ ID NO: 119330 - DNA, 33 bp, Homo sapien
attcaataaaacctacggattgccagtgcttgg

SEQ ID NO: 119331 - DNA, 33 bp, Homo sapien
gaggttaatgaatgctcaagaccggacatgact

SEQ ID NO: 119332 - DNA, 33 bp, Homo sapien
gaggttaatgaatgctgaagaccggacatgact

SEQ ID NO: 119333 - DNA, 33 bp, Homo sapien
tggagggcaaaaacacaaatgagtgtgtgctaa

SEQ ID NO: 119334 - DNA, 33 bp, Homo sapien
tggagggcaaaaacacgaatgagtgtgtgctaa

SEQ ID NO: 119335 - DNA, 33 bp, Homo sapien
ctgaacattaaattataagcagtttagtgagtg

SEQ ID NO: 119336 - DNA, 33 bp, Homo sapien
ctgaacattaaattatcagcagtttagtgagtg

SEQ ID NO: 119337 - DNA, 33 bp, Homo sapien
acacagctagaaagtaaaatgttctgtgactct

SEQ ID NO: 119338 - DNA, 33 bp, Homo sapien
acacagctagaaagtagaatgttctgtgactct

SEQ ID NO: 119339 - DNA, 33 bp, Homo sapien
aaaagctgactggtgacggccaaggttaagtga

SEQ ID NO: 119340 - DNA, 33 bp, Homo sapien
aaaagctgactggtgatggccaaggttaagtga

SEQ ID NO: 119341 - DNA, 33 bp, Homo sapien
atgaaacttaggagaacctagaagcttcaatcc

SEQ ID NO: 119342 - DNA, 33 bp, Homo sapien
atgaaacttaggagaatctagaagcttcaatcc

SEQ ID NO: 119343 - DNA, 33 bp, Homo sapien
ctagtttatgtgttaactgactgtatgttatca

SEQ ID NO: 119344 - DNA, 33 bp, Homo sapien
ctagtttatgtgttaattgactgtatgttatca

SEQ ID NO: 119345 - DNA, 33 bp, Homo sapien
ggtgtatttggaatgtaaaaagaacaatgtgga

SEQ ID NO: 119346 - DNA, 33 bp, Homo sapien
ggtgtatttggaatgtgaaaagaacaatgtgga

SEQ ID NO: 119347 - DNA, 33 bp, Homo sapien
aaatcccaggctaaaaagtttggaggtttatcc

SEQ ID NO: 119348 - DNA, 33 bp, Homo sapien
aaatcccaggctaaaaggtttggaggtttatcc

SEQ ID NO: 119349 - DNA, 33 bp, Homo sapien
tttagcctgggatttacggtcttccaccatctg

SEQ ID NO: 119350 - DNA, 33 bp, Homo sapien
tttagcctgggatttatggtcttccaccatctg

SEQ ID NO: 119351 - DNA, 33 bp, Homo sapien
gatttccaacagatataagctaagtattgggta

SEQ ID NO: 119352 - DNA, 33 bp, Homo sapien
gatttccaacagatatgagctaagtattgggta

SEQ ID NO: 119353 - DNA, 33 bp, Homo sapien
ggggtctaccatgtcacatataacagcgaggat

SEQ ID NO: 119354 - DNA, 33 bp, Homo sapien
ggggtctaccatgtcatatataacagcgaggat

SEQ ID NO: 119355 - DNA, 33 bp, Homo sapien
cactataacagcctacagagcagctactattag

SEQ ID NO: 119356 - DNA, 33 bp, Homo sapien
cactataacagcctacggagcagctactattag

SEQ ID NO: 119357 - DNA, 33 bp, Homo sapien
tagggaactttgaaggcagtatctcaaggacct

SEQ ID NO: 119358 - DNA, 33 bp, Homo sapien
tagggaactttgaaggtagtatctcaaggacct

SEQ ID NO: 119359 - DNA, 33 bp, Homo sapien
tgtttgcagctttctaccctttaaagtttgaaa

SEQ ID NO: 119360 - DNA, 33 bp, Homo sapien
tgtttgcagctttctatcctttaaagtttgaaa

SEQ ID NO: 119361 - DNA, 33 bp, Homo sapien
tgctctcttacttcacagactgattcatatgtc

SEQ ID NO: 119362 - DNA, 33 bp, Homo sapien
tgctctcttacttcactgactgattcatatgtc

SEQ ID NO: 119363 - DNA, 33 bp, Homo sapien
gggatatgagaggaaaccggagtactcagggaa

SEQ ID NO: 119364 - DNA, 33 bp, Homo sapien
gggatatgagaggaaagcggagtactcagggaa

SEQ ID NO: 119365 - DNA, 33 bp, Homo sapien
ccactggaaagcctaaagagccaaacaccaaac

SEQ ID NO: 119366 - DNA, 33 bp, Homo sapien
ccactggaaagcctaaggagccaaacaccaaac

SEQ ID NO: 119367 - DNA, 33 bp, Homo sapien
aacagaattatgaaccaggacagtcccataaaa

SEQ ID NO: 119368 - DNA, 33 bp, Homo sapien
aacagaattatgaaccgggacagtcccataaaa

SEQ ID NO: 119369 - DNA, 33 bp, Homo sapien
atatgaagcaggtaaactaaagggtaattattt

SEQ ID NO: 119370 - DNA, 33 bp, Homo sapien
atatgaagcaggtaaattaaagggtaattattt

SEQ ID NO: 119371 - DNA, 33 bp, Homo sapien
cagctgggataatataagcatgtgccaccacgc

SEQ ID NO: 119372 - DNA, 33 bp, Homo sapien
cagctgggataatataggcatgtgccaccacgc

SEQ ID NO: 119373 - DNA, 33 bp, Homo sapien
gaaaaccagctagaacagtgcaaagggcatcag

SEQ ID NO: 119374 - DNA, 33 bp, Homo sapien
gaaaaccagctagaacggtgcaaagggcatcag

SEQ ID NO: 119375 - DNA, 33 bp, Homo sapien
aatagggaaagtacatgagcatatgcattcatc

SEQ ID NO: 119376 - DNA, 33 bp, Homo sapien
aatagggaaagtacattagcatatgcattcatc

SEQ ID NO: 119377 - DNA, 33 bp, Homo sapien
aatttattatacagcaaatagccatgatgtagc

SEQ ID NO: 119378 - DNA, 33 bp, Homo sapien
aatttattatacagcagatagccatgatgtagc

SEQ ID NO: 119379 - DNA, 33 bp, Homo sapien
tcatacagagtaccgaatagatcagatgagata

SEQ ID NO: 119380 - DNA, 33 bp, Homo sapien
tcatacagagtaccgagtagatcagatgagata

SEQ ID NO: 119381 - DNA, 33 bp, Homo sapien
gactcggtatttaacccgggctagttgctcatt

SEQ ID NO: 119382 - DNA, 33 bp, Homo sapien
gactcggtatttaacctgggctagttgctcatt

SEQ ID NO: 119383 - DNA, 33 bp, Homo sapien
ccctttactcagtttaagaaaggagttctctgc

SEQ ID NO: 119384 - DNA, 33 bp, Homo sapien
ccctttactcagtttatgaaaggagttctctgc

SEQ ID NO: 119385 - DNA, 33 bp, Homo sapien
catgagtcctgtgaaaaagtcaagataatatcc

SEQ ID NO: 119386 - DNA, 33 bp, Homo sapien
catgagtcctgtgaaagagtcaagataatatcc

SEQ ID NO: 119387 - DNA, 33 bp, Homo sapien
attgaggtcgcacgaaaaaattgaaagatggtg

SEQ ID NO: 119388 - DNA, 33 bp, Homo sapien
attgaggtcgcacgaacaaattgaaagatggtg

SEQ ID NO: 119389 - DNA, 33 bp, Homo sapien
tagccaattattcaaacgatgttcaaataaggg

SEQ ID NO: 119390 - DNA, 33 bp, Homo sapien
tagccaattattcaaatgatgttcaaataaggg

SEQ ID NO: 119391 - DNA, 33 bp, Homo sapien
aaataggagatgcccgaatgatgtcaaagagtt

SEQ ID NO: 119392 - DNA, 33 bp, Homo sapien
aaataggagatgcccggatgatgtcaaagagtt

SEQ ID NO: 119393 - DNA, 33 bp, Homo sapien
tatcatctagcaataaaatgttagagggctcta

SEQ ID NO: 119394 - DNA, 33 bp, Homo sapien
tatcatctagcaataagatgttagagggctcta

SEQ ID NO: 119395 - DNA, 33 bp, Homo sapien
ttcaataccatctcacaacttattagcataaaa

SEQ ID NO: 119396 - DNA, 33 bp, Homo sapien
ttcaataccatctcacgacttattagcataaaa

SEQ ID NO: 119397 - DNA, 33 bp, Homo sapien
tgaaaaaatatgaagacacaaataactgcttgt

SEQ ID NO: 119398 - DNA, 33 bp, Homo sapien
tgaaaaaatatgaagagacaaataactgcttgt

SEQ ID NO: 119399 - DNA, 33 bp, Homo sapien
attaataaccattaacggtgtatgctgtaactc

SEQ ID NO: 119400 - DNA, 33 bp, Homo sapien
attaataaccattaactgtgtatgctgtaactc

SEQ ID NO: 119401 - DNA, 33 bp, Homo sapien
caaaaagcccaacaaacgacactcaagtcccat

SEQ ID NO: 119402 - DNA, 33 bp, Homo sapien
caaaaagcccaacaaatgacactcaagtcccat

SEQ ID NO: 119403 - DNA, 33 bp, Homo sapien
aaaaaaaaaaatctcaagttcacatatctagta

SEQ ID NO: 119404 - DNA, 33 bp, Homo sapien
aaaaaaaaaaatctcaggttcacatatctagta

SEQ ID NO: 119405 - DNA, 33 bp, Homo sapien
agtccttccagtttaccacttctcacatgcctc

SEQ ID NO: 119406 - DNA, 33 bp, Homo sapien
agtccttccagtttactacttctcacatgcctc

SEQ ID NO: 119407 - DNA, 33 bp, Homo sapien
aaaccttaacaatatcaaaggcagaaaatctat

SEQ ID NO: 119408 - DNA, 33 bp, Homo sapien
aaaccttaacaatatcgaaggcagaaaatctat

SEQ ID NO: 119409 - DNA, 33 bp, Homo sapien
atctgaatgtgtgtcacggtattttttgtggaa

SEQ ID NO: 119410 - DNA, 33 bp, Homo sapien
atctgaatgtgtgtcatggtattttttgtggaa

SEQ ID NO: 119411 - DNA, 33 bp, Homo sapien
tctttaacctctcctgaaaccaaatgtagccaa

SEQ ID NO: 119412 - DNA, 33 bp, Homo sapien
tctttaacctctcctgcaaccaaatgtagccaa

SEQ ID NO: 119413 - DNA, 33 bp, Homo sapien
gccaatttctcaaggcaaaaatgcgtaatttat

SEQ ID NO: 119414 - DNA, 33 bp, Homo sapien
gccaatttctcaaggcgaaaatgcgtaatttat

SEQ ID NO: 119415 - DNA, 33 bp, Homo sapien
cacataatgaacacatgaagattaataccaaag

SEQ ID NO: 119416 - DNA, 33 bp, Homo sapien
cacataatgaacacattaagattaataccaaag

SEQ ID NO: 119417 - DNA, 33 bp, Homo sapien
gaaaattgttcaaagacgcaccaaaattaagta

SEQ ID NO: 119418 - DNA, 33 bp, Homo sapien
gaaaattgttcaaagatgcaccaaaattaagta

SEQ ID NO: 119419 - DNA, 33 bp, Homo sapien
acaggtgaatggataaatgttgtgtatacacat

SEQ ID NO: 119420 - DNA, 33 bp, Homo sapien
acaggtgaatggataattgttgtgtatacacat

SEQ ID NO: 119421 - DNA, 33 bp, Homo sapien
gctttttagggagaaggattgtgtttcaagtta

SEQ ID NO: 119422 - DNA, 33 bp, Homo sapien
gctttttagggagaagtattgtgtttcaagtta

SEQ ID NO: 119423 - DNA, 33 bp, Homo sapien
ttgttcctttagagtgcaaagtttgtgttcatt

SEQ ID NO: 119424 - DNA, 33 bp, Homo sapien
ttgttcctttagagtggaaagtttgtgttcatt

SEQ ID NO: 119425 - DNA, 33 bp, Homo sapien
gttacatacaggacataacaaggttaaggagtg

SEQ ID NO: 119426 - DNA, 33 bp, Homo sapien
gttacatacaggacattacaaggttaaggagtg

SEQ ID NO: 119427 - DNA, 33 bp, Homo sapien
tgactaagaggttagaagaggatagaagatatt

SEQ ID NO: 119428 - DNA, 33 bp, Homo sapien
tgactaagaggttagaggaggatagaagatatt

SEQ ID NO: 119429 - DNA, 33 bp, Homo sapien
ttcaagcttgtttgaagatttagaacaggaggc

SEQ ID NO: 119430 - DNA, 33 bp, Homo sapien
ttcaagcttgtttgaatatttagaacaggaggc

SEQ ID NO: 119431 - DNA, 33 bp, Homo sapien; identical to SEQ ID NO: 119429

SEQ ID NO: 119432 - DNA, 33 bp, Homo sapien; identical to SEQ ID NO: 119430

SEQ ID NO: 119433 - DNA, 33 bp, Homo sapien
gtctttttattctctcaacagtgtgtttggaag

SEQ ID NO: 119434 - DNA, 33 bp, Homo sapien
gtctttttattctctccacagtgtgtttggaag

SEQ ID NO: 119435 - DNA, 33 bp, Homo sapien
tctttaactgacaaggaaaaaattatcttcttc

SEQ ID NO: 119436 - DNA, 33 bp, Homo sapien
tctttaactgacaagggaaaaattatcttcttc

SEQ ID NO: 119437 - DNA, 33 bp, Homo sapien
gagctgtggttactgaggtagctccacagttat

SEQ ID NO: 119438 - DNA, 33 bp, Homo sapien
gagctgtggttactgatgtagctccacagttat

SEQ ID NO: 119439 - DNA, 33 bp, Homo sapien
ttctttcccaatgagcaacaaaaaaatagaaaa

SEQ ID NO: 119440 - DNA, 33 bp, Homo sapien
ttctttcccaatgagcgacaaaaaaatagaaaa

SEQ ID NO: 119441 - DNA, 33 bp, Homo sapien
taatattggcagagtaacttgaagttcaattca

SEQ ID NO: 119442 - DNA, 33 bp, Homo sapien
taatattggcagagtaccttgaagttcaattca

SEQ ID NO: 119443 - DNA, 33 bp, Homo sapien
cctgttgggtgtgttacaaacagaggagccatt

SEQ ID NO: 119444 - DNA, 33 bp, Homo sapien
cctgttgggtgtgttataaacagaggagccatt

SEQ ID NO: 119445 - DNA, 33 bp, Homo sapien
ctatcttattttttgacgcatagattgaagata

SEQ ID NO: 119446 - DNA, 33 bp, Homo sapien
ctatcttattttttgatgcatagattgaagata

SEQ ID NO: 119447 - DNA, 33 bp, Homo sapien
tcacagtataagggaacatgagaacttacttct

SEQ ID NO: 119448 - DNA, 33 bp, Homo sapien
tcacagtataagggaagatgagaacttacttct

SEQ ID NO: 119449 - DNA, 33 bp, Homo sapien
gggcagtatctagaacggactttcacctaacct

SEQ ID NO: 119450 - DNA, 33 bp, Homo sapien
gggcagtatctagaactgactttcacctaacct

SEQ ID NO: 119451 - DNA, 33 bp, Homo sapien
tggatctgaaagacataaggaagaaaaggatgt

SEQ ID NO: 119452 - DNA, 33 bp, Homo sapien
tggatctgaaagacattaggaagaaaaggatgt

SEQ ID NO: 119453 - DNA, 33 bp, Homo sapien
aattgaaaaagtgaatcagttttcaaatccaaa

SEQ ID NO: 119454 - DNA, 33 bp, Homo sapien
aattgaaaaagtgaatgagttttcaaatccaaa

SEQ ID NO: 119455 - DNA, 33 bp, Homo sapien
acttgttggtctgtgaccggtgttgtcaggcag

SEQ ID NO: 119456 - DNA, 33 bp, Homo sapien
acttgttggtctgtgatcggtgttgtcaggcag

SEQ ID NO: 119457 - DNA, 33 bp, Homo sapien
agaaaatgtatttaaaatgttagcatagcattt

SEQ ID NO: 119458 - DNA, 33 bp, Homo sapien
agaaaatgtatttaaagtgttagcatagcattt

SEQ ID NO: 119459 - DNA, 33 bp, Homo sapien
tctacatctggaaaacaacaacagcctcctaac

SEQ ID NO: 119460 - DNA, 33 bp, Homo sapien
tctacatctggaaaacgacaacagcctcctaac

SEQ ID NO: 119461 - DNA, 33 bp, Homo sapien
actagccagattttaaccactggtggctaccat

SEQ ID NO: 119462 - DNA, 33 bp, Homo sapien
actagccagattttaatcactggtggctaccat

SEQ ID NO: 119463 - DNA, 33 bp, Homo sapien
agtctctcagaacttcaattagtgtctgagatg

SEQ ID NO: 119464 - DNA, 33 bp, Homo sapien
agtctctcagaacttctattagtgtctgagatg

SEQ ID NO: 119465 - DNA, 33 bp, Homo sapien
gtacaggttctatacacaatttctctccatctg

SEQ ID NO: 119466 - DNA, 33 bp, Homo sapien
gtacaggttctatacataatttctctccatctg

SEQ ID NO: 119467 - DNA, 33 bp, Homo sapien
gcagaaatagaaaatacgactaagagcaagaca

SEQ ID NO: 119468 - DNA, 33 bp, Homo sapien
gcagaaatagaaaatatgactaagagcaagaca

SEQ ID NO: 119469 - DNA, 33 bp, Homo sapien
tagagctatactgtccaatagagtaggcaccag

SEQ ID NO: 119470 - DNA, 33 bp, Homo sapien
tagagctatactgtccgatagagtaggcaccag

SEQ ID NO: 119471 - DNA, 33 bp, Homo sapien
atagctatagagcactcagaatgtggctaggga

SEQ ID NO: 119472 - DNA, 33 bp, Homo sapien
atagctatagagcacttagaatgtggctaggga

SEQ ID NO: 119473 - DNA, 33 bp, Homo sapien
tcaaagataattgacaatcttctagaattaaaa

SEQ ID NO: 119474 - DNA, 33 bp, Homo sapien
tcaaagataattgacagtcttctagaattaaaa

SEQ ID NO: 119475 - DNA, 33 bp, Homo sapien
aagtgtgctgcaaacactaccatcctgaaaact

SEQ ID NO: 119476 - DNA, 33 bp, Homo sapien
aagtgtgctgcaaacattaccatcctgaaaact

SEQ ID NO: 119477 - DNA, 33 bp, Homo sapien
atataccgtatgcataaagtaagcctttagctc

SEQ ID NO: 119478 - DNA, 33 bp, Homo sapien
atataccgtatgcatagagtaagcctttagctc

SEQ ID NO: 119479 - DNA, 33 bp, Homo sapien
ttaccttttagtgtccaagaacaactttttcaa

SEQ ID NO: 119480 - DNA, 33 bp, Homo sapien
ttaccttttagtgtcccagaacaactttttcaa

SEQ ID NO: 119481 - DNA, 33 bp, Homo sapien
aggactttcaccttacacattggtggagagaga

SEQ ID NO: 119482 - DNA, 33 bp, Homo sapien
aggactttcaccttacccattggtggagagaga

SEQ ID NO: 119483 - DNA, 33 bp, Homo sapien
aataaaagttacaaaaacagttctctcttctct

SEQ ID NO: 119484 - DNA, 33 bp, Homo sapien
aataaaagttacaaaatcagttctctcttctct

SEQ ID NO: 119485 - DNA, 33 bp, Homo sapien
aattctacctagcacaaaagatttcatatttga

SEQ ID NO: 119486 - DNA, 33 bp, Homo sapien
aattctacctagcacagaagatttcatatttga

SEQ ID NO: 119487 - DNA, 33 bp, Homo sapien
tcaccaatcttcttgcaataactcccttaaggt

SEQ ID NO: 119488 - DNA, 33 bp, Homo sapien
tcaccaatcttcttgcgataactcccttaaggt

SEQ ID NO: 119489 - DNA, 33 bp, Homo sapien
aaaaatagattaaataggttgcataaattgtga

SEQ ID NO: 119490 - DNA, 33 bp, Homo sapien
aaaaatagattaaatatgttgcataaattgtga

SEQ ID NO: 119491 - DNA, 33 bp, Homo sapien
gttctccacatacccacatcacattttctcctc

SEQ ID NO: 119492 - DNA, 33 bp, Homo sapien
gttctccacatacccagatcacattttctcctc

SEQ ID NO: 119493 - DNA, 33 bp, Homo sapien
aagttgaaatgataagaaataagatattgagtg

SEQ ID NO: 119494 - DNA, 33 bp, Homo sapien
aagttgaaatgataagtaataagatattgagtg

SEQ ID NO: 119495 - DNA, 33 bp, Homo sapien
gtttagagttacctgcccggtcgttttgctgac

SEQ ID NO: 119496 - DNA, 33 bp, Homo sapien
gtttagagttacctgctcggtcgttttgctgac

SEQ ID NO: 119497 - DNA, 33 bp, Homo sapien
accaatgtgtaacttgaatatattgatttatga

SEQ ID NO: 119498 - DNA, 33 bp, Homo sapien
accaatgtgtaacttgcatatattgatttatga

SEQ ID NO: 119499 - DNA, 33 bp, Homo sapien
tacctctgcctttaaaaatcattgcctgcaagc

SEQ ID NO: 119500 - DNA, 33 bp, Homo sapien
tacctctgcctttaaatatcattgcctgcaagc

SEQ ID NO: 119501 - DNA, 33 bp, Homo sapien
tttaacagcgttttaaatggttgtatggtttgc

SEQ ID NO: 119502 - DNA, 33 bp, Homo sapien
tttaacagcgttttaagtggttgtatggtttgc

SEQ ID NO: 119503 - DNA, 33 bp, Homo sapien
cataataaaaatactaccactaggtaaccattt

SEQ ID NO: 119504 - DNA, 33 bp, Homo sapien
cataataaaaatactatcactaggtaaccattt

SEQ ID NO: 119505 - DNA, 33 bp, Homo sapien
cagtaaaatgtgacaacgagttcaaaggagtat

SEQ ID NO: 119506 - DNA, 33 bp, Homo sapien
cagtaaaatgtgacaatgagttcaaaggagtat

SEQ ID NO: 119507 - DNA, 33 bp, Homo sapien
gaagcttcatggactacgaagcatttgagctgg

SEQ ID NO: 119508 - DNA, 33 bp, Homo sapien
gaagcttcatggactaggaagcatttgagctgg

SEQ ID NO: 119509 - DNA, 33 bp, Homo sapien
actcctaaattttgaaactttgggcaatttcac

SEQ ID NO: 119510 - DNA, 33 bp, Homo sapien
actcctaaattttgaacctttgggcaatttcac

SEQ ID NO: 119511 - DNA, 33 bp, Homo sapien
tccctacacaaagaataattcagcccaaaaagt

SEQ ID NO: 119512 - DNA, 33 bp, Homo sapien
tccctacacaaagaattattcagcccaaaaagt

SEQ ID NO: 119513 - DNA, 33 bp, Homo sapien
gtactcaagttgcttaaagagccaccagggtga

SEQ ID NO: 119514 - DNA, 33 bp, Homo sapien
gtactcaagttgcttagagagccaccagggtga

SEQ ID NO: 119515 - DNA, 33 bp, Homo sapien
aatccaacttgaaagacagaaacaaaagacata

SEQ ID NO: 119516 - DNA, 33 bp, Homo sapien
aatccaacttgaaagatagaaacaaaagacata

SEQ ID NO: 119517 - DNA, 33 bp, Homo sapien
tactgaggcagtttataaagttacctacatttc

SEQ ID NO: 119518 - DNA, 33 bp, Homo sapien
tactgaggcagtttatgaagttacctacatttc

SEQ ID NO: 119519 - DNA, 33 bp, Homo sapien
tagagacttgcagcaaaaggagaaaaatacagt

SEQ ID NO: 119520 - DNA, 33 bp, Homo sapien
tagagacttgcagcaacaggagaaaaatacagt

SEQ ID NO: 119521 - DNA, 33 bp, Homo sapien
aagaatggggatgttagtaacactgttcaccat

SEQ ID NO: 119522 - DNA, 33 bp, Homo sapien
aagaatggggatgttattaacactgttcaccat

SEQ ID NO: 119523 - DNA, 33 bp, Homo sapien
aagaaagaaggaaataaatatgaaaccaatatg

SEQ ID NO: 119524 - DNA, 33 bp, Homo sapien
aagaaagaaggaaatagatatgaaaccaatatg

SEQ ID NO: 119525 - DNA, 33 bp, Homo sapien
gcacagaggtagcaaacgaccaaataaaagcaa

SEQ ID NO: 119526 - DNA, 33 bp, Homo sapien
gcacagaggtagcaaatgaccaaataaaagcaa

SEQ ID NO: 119527 - DNA, 33 bp, Homo sapien
taaacttatttgtgtacagatacccgtgcttgc

SEQ ID NO: 119528 - DNA, 33 bp, Homo sapien
taaacttatttgtgtatagatacccgtgcttgc

SEQ ID NO: 119529 - DNA, 33 bp, Homo sapien
ggaaaaataataacacactgctataacagagac

SEQ ID NO: 119530 - DNA, 33 bp, Homo sapien
ggaaaaataataacacgctgctataacagagac

SEQ ID NO: 119531 - DNA, 33 bp, Homo sapien
acacgtaaacgttatcaacaaattattttctgg

SEQ ID NO: 119532 - DNA, 33 bp, Homo sapien
acacgtaaacgttatcgacaaattattttctgg

SEQ ID NO: 119533 - DNA, 33 bp, Homo sapien
gtgagtgacctcagagcaggtaggctaagttat

SEQ ID NO: 119534 - DNA, 33 bp, Homo sapien
gtgagtgacctcagagtaggtaggctaagttat

SEQ ID NO: 119535 - DNA, 33 bp, Homo sapien
actagggaatagaaaaattttagtactggcatt

SEQ ID NO: 119536 - DNA, 33 bp, Homo sapien
actagggaatagaaaacttttagtactggcatt

SEQ ID NO: 119537 - DNA, 33 bp, Homo sapien
ggattgtaggatcacaaactacgtcaacgtctc

SEQ ID NO: 119538 - DNA, 33 bp, Homo sapien
ggattgtaggatcacagactacgtcaacgtctc

SEQ ID NO: 119539 - DNA, 33 bp, Homo sapien
ggcaatgagtcagtaacgtggtgcagtggtcca

SEQ ID NO: 119540 - DNA, 33 bp, Homo sapien
ggcaatgagtcagtaatgtggtgcagtggtcca

SEQ ID NO: 119541 - DNA, 33 bp, Homo sapien
atatactttccagtttaaaaacaattatctctg

SEQ ID NO: 119542 - DNA, 33 bp, Homo sapien
atatactttccagtttgaaaacaattatctctg

SEQ ID NO: 119543 - DNA, 33 bp, Homo sapien
cttctcactgaacattaaaatgaggcccaggga

SEQ ID NO: 119544 - DNA, 33 bp, Homo sapien
cttctcactgaacattcaaatgaggcccaggga

SEQ ID NO: 119545 - DNA, 33 bp, Homo sapien
gacacaggacaggggaatatttaaaagcaggtt

SEQ ID NO: 119546 - DNA, 33 bp, Homo sapien
gacacaggacaggggagtatttaaaagcaggtt

SEQ ID NO: 119547 - DNA, 33 bp, Homo sapien
tgggttggtatgtttacgcacacctacacacct

SEQ ID NO: 119548 - DNA, 33 bp, Homo sapien
tgggttggtatgtttatgcacacctacacacct

SEQ ID NO: 119549 - DNA, 33 bp, Homo sapien
gtgaaatgtgtacatcaagccctggatttattc

SEQ ID NO: 119550 - DNA, 33 bp, Homo sapien
gtgaaatgtgtacatcgagccctggatttattc

SEQ ID NO: 119551 - DNA, 33 bp, Homo sapien
ggaaatgcattagaccaggtagcttataaacaa

SEQ ID NO: 119552 - DNA, 33 bp, Homo sapien
ggaaatgcattagaccgggtagcttataaacaa

SEQ ID NO: 119553 - DNA, 33 bp, Homo sapien
ctaatttcaaaggcaaattctagtgcaacctgt

SEQ ID NO: 119554 - DNA, 33 bp, Homo sapien
ctaatttcaaaggcaacttctagtgcaacctgt

SEQ ID NO: 119555 - DNA, 33 bp, Homo sapien; identical to SEQ ID NO: 119553

SEQ ID NO: 119556 - DNA, 33 bp, Homo sapien; identical to SEQ ID NO: 119554

SEQ ID NO: 119557 - DNA, 33 bp, Homo sapien
ccggcagaagttgaccaagatcagaggccctgt

SEQ ID NO: 119558 - DNA, 33 bp, Homo sapien
ccggcagaagttgaccgagatcagaggccctgt

SEQ ID NO: 119559 - DNA, 33 bp, Homo sapien
gttgaaaactgaacacaccttaaatctgactgt

SEQ ID NO: 119560 - DNA, 33 bp, Homo sapien
gttgaaaactgaacactccttaaatctgactgt

SEQ ID NO: 119561 - DNA, 33 bp, Homo sapien
catttgcctggggcatcagtaactggcacagaa

SEQ ID NO: 119562 - DNA, 33 bp, Homo sapien
catttgcctggggcatgagtaactggcacagaa

SEQ ID NO: 119563 - DNA, 33 bp, Homo sapien
caccctatcattaaccccaggaaacacctcagt

SEQ ID NO: 119564 - DNA, 33 bp, Homo sapien
caccctatcattaacctcaggaaacacctcagt

SEQ ID NO: 119565 - DNA, 33 bp, Homo sapien
gagaaagcaagcaacacgaatcttctgatttgg

SEQ ID NO: 119566 - DNA, 33 bp, Homo sapien
gagaaagcaagcaacatgaatcttctgatttgg

SEQ ID NO: 119567 - DNA, 33 bp, Homo sapien
gggctggggtgccaaaagaccatcagaacccta

SEQ ID NO: 119568 - DNA, 33 bp, Homo sapien
gggctggggtgccaaaggaccatcagaacccta

SEQ ID NO: 119569 - DNA, 33 bp, Homo sapien
gcaactgtagtcccacacttgcttcttgtgctt

SEQ ID NO: 119570 - DNA, 33 bp, Homo sapien
gcaactgtagtcccacgcttgcttcttgtgctt

SEQ ID NO: 119571 - DNA, 33 bp, Homo sapien
ggtgttctcacgttcacgttgtccttatgtaac

SEQ ID NO: 119572 - DNA, 33 bp, Homo sapien
ggtgttctcacgttcatgttgtccttatgtaac

SEQ ID NO: 119573 - DNA, 33 bp, Homo sapien
aacttttatgtgcttaagactcacgcagggatc

SEQ ID NO: 119574 - DNA, 33 bp, Homo sapien
aacttttatgtgcttatgactcacgcagggatc

SEQ ID NO: 119575 - DNA, 33 bp, Homo sapien
gttttgcttggctgacccagtggtctaaaaata

SEQ ID NO: 119576 - DNA, 33 bp, Homo sapien
gttttgcttggctgactcagtggtctaaaaata

SEQ ID NO: 119577 - DNA, 33 bp, Homo sapien
caccccgggcagacaacttcttggtattgatga

SEQ ID NO: 119578 - DNA, 33 bp, Homo sapien
caccccgggcagacaatttcttggtattgatga

SEQ ID NO: 119579 - DNA, 33 bp, Homo sapien
aatgccataatcttaaaccagtcttgagcctcg

SEQ ID NO: 119580 - DNA, 33 bp, Homo sapien
aatgccataatcttaacccagtcttgagcctcg

SEQ ID NO: 119581 - DNA, 33 bp, Homo sapien
actactccaatggaacggacttgccaaaggcct

SEQ ID NO: 119582 - DNA, 33 bp, Homo sapien
actactccaatggaactgacttgccaaaggcct

SEQ ID NO: 119583 - DNA, 33 bp, Homo sapien
ctgagacttgtgaaaaatgcctaaggccacaca

SEQ ID NO: 119584 - DNA, 33 bp, Homo sapien
ctgagacttgtgaaaattgcctaaggccacaca

SEQ ID NO: 119585 - DNA, 33 bp, Homo sapien
agaaggcaattatgaaaaaaggtgaaaattgtc

SEQ ID NO: 119586 - DNA, 33 bp, Homo sapien
agaaggcaattatgaagaaaggtgaaaattgtc

SEQ ID NO: 119587 - DNA, 33 bp, Homo sapien
gtggaggttccgattaactgagattttgtcact

SEQ ID NO: 119588 - DNA, 33 bp, Homo sapien
gtggaggttccgattagctgagattttgtcact

SEQ ID NO: 119589 - DNA, 33 bp, Homo sapien
tgggtgagaggtcataggtgagatcgtttttga

SEQ ID NO: 119590 - DNA, 33 bp, Homo sapien
tgggtgagaggtcatatgtgagatcgtttttga

SEQ ID NO: 119591 - DNA, 33 bp, Homo sapien
gtattatttctcagtccaaccctacataagtgg

SEQ ID NO: 119592 - DNA, 33 bp, Homo sapien
gtattatttctcagtctaaccctacataagtgg

SEQ ID NO: 119593 - DNA, 33 bp, Homo sapien
attctgattctttagacggggcctagaaatctg

SEQ ID NO: 119594 - DNA, 33 bp, Homo sapien
attctgattctttagatggggcctagaaatctg

SEQ ID NO: 119595 - DNA, 33 bp, Homo sapien
agaggaattgggagacgggaggacaaaataaga

SEQ ID NO: 119596 - DNA, 33 bp, Homo sapien
agaggaattgggagactggaggacaaaataaga

SEQ ID NO: 119597 - DNA, 33 bp, Homo sapien
ttccagagacagtccaactgtgcattttatttt

SEQ ID NO: 119598 - DNA, 33 bp, Homo sapien
ttccagagacagtccagctgtgcattttatttt

SEQ ID NO: 119599 - DNA, 33 bp, Homo sapien
gcacttctcatcatcacgcttctgacactgcgt

SEQ ID NO: 119600 - DNA, 33 bp, Homo sapien
gcacttctcatcatcatgcttctgacactgcgt

SEQ ID NO: 119601 - DNA, 33 bp, Homo sapien
attcagatgtacagtaggaactttatgtgtggt

SEQ ID NO: 119602 - DNA, 33 bp, Homo sapien
attcagatgtacagtatgaactttatgtgtggt

SEQ ID NO: 119603 - DNA, 33 bp, Homo sapien
ttttcagtaccttctccactatcagaacccctt

SEQ ID NO: 119604 - DNA, 33 bp, Homo sapien
ttttcagtaccttctctactatcagaacccctt

SEQ ID NO: 119605 - DNA, 33 bp, Homo sapien
accactacttcatgaactattttttgcccagga

SEQ ID NO: 119606 - DNA, 33 bp, Homo sapien
accactacttcatgaattattttttgcccagga

SEQ ID NO: 119607 - DNA, 33 bp, Homo sapien
tattcctgacacctcaatagatagcttctccca

SEQ ID NO: 119608 - DNA, 33 bp, Homo sapien
tattcctgacacctcagtagatagcttctccca

SEQ ID NO: 119609 - DNA, 33 bp, Homo sapien
tgacagagaatcttggaaagtgggcgagaaata

SEQ ID NO: 119610 - DNA, 33 bp, Homo sapien
tgacagagaatcttgggaagtgggcgagaaata

SEQ ID NO: 119611 - DNA, 33 bp, Homo sapien
atttggatacacatcaaaagtccactgttattt

SEQ ID NO: 119612 - DNA, 33 bp, Homo sapien
atttggatacacatcagaagtccactgttattt

SEQ ID NO: 119613 - DNA, 33 bp, Homo sapien
gaataccctgaaccacccaaatatagaaaccaa

SEQ ID NO: 119614 - DNA, 33 bp, Homo sapien
gaataccctgaaccactcaaatatagaaaccaa

SEQ ID NO: 119615 - DNA, 33 bp, Homo sapien
acactgggttttcaaccgaccactctttagaat

SEQ ID NO: 119616 - DNA, 33 bp, Homo sapien
acactgggttttcaactgaccactctttagaat

SEQ ID NO: 119617 - DNA, 33 bp, Homo sapien
actctttactgtgaatcatactctcgttgaatg

SEQ ID NO: 119618 - DNA, 33 bp, Homo sapien
actctttactgtgaattatactctcgttgaatg

SEQ ID NO: 119619 - DNA, 33 bp, Homo sapien
gaaacaggacaagacaatataacaggtcttcat

SEQ ID NO: 119620 - DNA, 33 bp, Homo sapien
gaaacaggacaagacagtataacaggtcttcat

SEQ ID NO: 119621 - DNA, 33 bp, Homo sapien
tatacttacacaaacccagacggtatagcctac

SEQ ID NO: 119622 - DNA, 33 bp, Homo sapien
tatacttacacaaacctagacggtatagcctac

SEQ ID NO: 119623 - DNA, 33 bp, Homo sapien
tataccatctcagataacttattcccagttagg

SEQ ID NO: 119624 - DNA, 33 bp, Homo sapien
tataccatctcagatagcttattcccagttagg

SEQ ID NO: 119625 - DNA, 33 bp, Homo sapien
attgaacagttgccacagacaaccaaactcatt

SEQ ID NO: 119626 - DNA, 33 bp, Homo sapien
attgaacagttgccacggacaaccaaactcatt

SEQ ID NO: 119627 - DNA, 33 bp, Homo sapien
agaatagggcctggtagataacaagggctaaat

SEQ ID NO: 119628 - DNA, 33 bp, Homo sapien
agaatagggcctggtatataacaagggctaaat

SEQ ID NO: 119629 - DNA, 33 bp, Homo sapien
ccagcttgttcttccaccagctacttatctgtt

SEQ ID NO: 119630 - DNA, 33 bp, Homo sapien
ccagcttgttcttccatcagctacttatctgtt

SEQ ID NO: 119631 - DNA, 33 bp, Homo sapien
cttgtttgatcagataagtttgtgggctctgca

SEQ ID NO: 119632 - DNA, 33 bp, Homo sapien
cttgtttgatcagatatgtttgtgggctctgca

SEQ ID NO: 119633 - DNA, 33 bp, Homo sapien
ttttataaagtgataaaaatcaagttaagcagg

SEQ ID NO: 119634 - DNA, 33 bp, Homo sapien
ttttataaagtgataacaatcaagttaagcagg

SEQ ID NO: 119635 - DNA, 33 bp, Homo sapien
cttttacattaccttacagatcccggagaacat

SEQ ID NO: 119636 - DNA, 33 bp, Homo sapien
cttttacattaccttatagatcccggagaacat

SEQ ID NO: 119637 - DNA, 33 bp, Homo sapien
caaatggtaaagttaccgcccctatcattgagt

SEQ ID NO: 119638 - DNA, 33 bp, Homo sapien
caaatggtaaagttactgcccctatcattgagt

SEQ ID NO: 119639 - DNA, 33 bp, Homo sapien
aaccccaaatgcaaaaccatctacttaattgtt

SEQ ID NO: 119640 - DNA, 33 bp, Homo sapien
aaccccaaatgcaaaatcatctacttaattgtt

SEQ ID NO: 119641 - DNA, 33 bp, Homo sapien
ggtcttctgaggcaaaccttctaccatctcttt

SEQ ID NO: 119642 - DNA, 33 bp, Homo sapien
ggtcttctgaggcaaagcttctaccatctcttt

SEQ ID NO: 119643 - DNA, 33 bp, Homo sapien
tatctgtaaaatgacaaaagttgcccaagagca

SEQ ID NO: 119644 - DNA, 33 bp, Homo sapien
tatctgtaaaatgacacaagttgcccaagagca

SEQ ID NO: 119645 - DNA, 33 bp, Homo sapien
ggattagaatatggtaacagaagcaacaataat

SEQ ID NO: 119646 - DNA, 33 bp, Homo sapien
ggattagaatatggtagcagaagcaacaataat

SEQ ID NO: 119647 - DNA, 33 bp, Homo sapien
gctgagtacagcataacgttcttgtaccactgt

SEQ ID NO: 119648 - DNA, 33 bp, Homo sapien
gctgagtacagcataatgttcttgtaccactgt

SEQ ID NO: 119649 - DNA, 33 bp, Homo sapien
tttaaggtcagcatacccatacggctgcaatat

SEQ ID NO: 119650 - DNA, 33 bp, Homo sapien
tttaaggtcagcatactcatacggctgcaatat

SEQ ID NO: 119651 - DNA, 33 bp, Homo sapien
cctgtagacatgaagtcaaaagattagacactt

SEQ ID NO: 119652 - DNA, 33 bp, Homo sapien
cctgtagacatgaagttaaaagattagacactt

SEQ ID NO: 119653 - DNA, 33 bp, Homo sapien
aatctaggagttcaccacttgtctctgttgtcc

SEQ ID NO: 119654 - DNA, 33 bp, Homo sapien
aatctaggagttcaccgcttgtctctgttgtcc

SEQ ID NO: 119655 - DNA, 33 bp, Homo sapien
atctttaaagggttaacaggccaggcatgcagc

SEQ ID NO: 119656 - DNA, 33 bp, Homo sapien
atctttaaagggttaagaggccaggcatgcagc

SEQ ID NO: 119657 - DNA, 33 bp, Homo sapien
gtcaaagtcttaaccacgccaagtatagctcag

SEQ ID NO: 119658 - DNA, 33 bp, Homo sapien
gtcaaagtcttaaccatgccaagtatagctcag

SEQ ID NO: 119659 - DNA, 33 bp, Homo sapien
gcaacgaacttgataactggggtttagaagtag

SEQ ID NO: 119660 - DNA, 33 bp, Homo sapien
gcaacgaacttgataagtggggtttagaagtag

SEQ ID NO: 119661 - DNA, 33 bp, Homo sapien
catctctacaaaaattaaaattactagctgggt

SEQ ID NO: 119662 - DNA, 33 bp, Homo sapien
catctctacaaaaattgaaattactagctgggt

SEQ ID NO: 119663 - DNA, 33 bp, Homo sapien
gtaagctttaaaatacagagtatcaccagatac

SEQ ID NO: 119664 - DNA, 33 bp, Homo sapien
gtaagctttaaaatacggagtatcaccagatac

SEQ ID NO: 119665 - DNA, 33 bp, Homo sapien
gtctcaataagagacactcatctagtttatcca

SEQ ID NO: 119666 - DNA, 33 bp, Homo sapien
gtctcaataagagacattcatctagtttatcca

SEQ ID NO: 119667 - DNA, 33 bp, Homo sapien
gtggggactattgtaccaaatggcctcaaatac

SEQ ID NO: 119668 - DNA, 33 bp, Homo sapien
gtggggactattgtacgaaatggcctcaaatac

SEQ ID NO: 119669 - DNA, 33 bp, Homo sapien
gggtatcacatggcaacgggcctgaacctgcta

SEQ ID NO: 119670 - DNA, 33 bp, Homo sapien
gggtatcacatggcaaggggcctgaacctgcta

SEQ ID NO: 119671 - DNA, 33 bp, Homo sapien
ccttataagcacaaacggtaactcttattacaa

SEQ ID NO: 119672 - DNA, 33 bp, Homo sapien
ccttataagcacaaactgtaactcttattacaa

SEQ ID NO: 119673 - DNA, 33 bp, Homo sapien
ttgactaaatttgataccagataattgctttaa

SEQ ID NO: 119674 - DNA, 33 bp, Homo sapien
ttgactaaatttgatatcagataattgctttaa

SEQ ID NO: 119675 - DNA, 33 bp, Homo sapien
aatacttttcatctaacggagatctaatcttac

SEQ ID NO: 119676 - DNA, 33 bp, Homo sapien
aatacttttcatctaatggagatctaatcttac

SEQ ID NO: 119677 - DNA, 33 bp, Homo sapien
gctatggggtcagtcaaccttgtagaaagaata

SEQ ID NO: 119678 - DNA, 33 bp, Homo sapien
gctatggggtcagtcagccttgtagaaagaata

SEQ ID NO: 119679 - DNA, 33 bp, Homo sapien
tattcccaaagagtataacaacatgactgaatg

SEQ ID NO: 119680 - DNA, 33 bp, Homo sapien
tattcccaaagagtatcacaacatgactgaatg

SEQ ID NO: 119681 - DNA, 33 bp, Homo sapien
gcaatttacaaagaaacttcagtctgtagggct

SEQ ID NO: 119682 - DNA, 33 bp, Homo sapien
gcaatttacaaagaaagttcagtctgtagggct

SEQ ID NO: 119683 - DNA, 33 bp, Homo sapien
gaggctttgttgggcccgaattgcaatttgatt

SEQ ID NO: 119684 - DNA, 33 bp, Homo sapien
gaggctttgttgggcctgaattgcaatttgatt

SEQ ID NO: 119685 - DNA, 33 bp, Homo sapien
cctgcttatggtgacacaagtaggaattgaaaa

SEQ ID NO: 119686 - DNA, 33 bp, Homo sapien
cctgcttatggtgacagaagtaggaattgaaaa

SEQ ID NO: 119687 - DNA, 33 bp, Homo sapien
tgctagggcagtcttaacaatttcagagactag

SEQ ID NO: 119688 - DNA, 33 bp, Homo sapien
tgctagggcagtcttagcaatttcagagactag

SEQ ID NO: 119689 - DNA, 33 bp, Homo sapien
aagccaagctgggcaaatatgaacttgggactg

SEQ ID NO: 119690 - DNA, 33 bp, Homo sapien
aagccaagctgggcaagtatgaacttgggactg

SEQ ID NO: 119691 - DNA, 33 bp, Homo sapien
taaatgcttgatatggaaagaattaaataagga

SEQ ID NO: 119692 - DNA, 33 bp, Homo sapien
taaatgcttgatatgggaagaattaaataagga

SEQ ID NO: 119693 - DNA, 33 bp, Homo sapien
gcaatattacccattacggatgtagagattcaa

SEQ ID NO: 119694 - DNA, 33 bp, Homo sapien
gcaatattacccattatggatgtagagattcaa

SEQ ID NO: 119695 - DNA, 33 bp, Homo sapien
gttgggtgatgcatgccaatctgagccaatgag

SEQ ID NO: 119696 - DNA, 33 bp, Homo sapien
gttgggtgatgcatgctaatctgagccaatgag

SEQ ID NO: 119697 - DNA, 33 bp, Homo sapien
aaagcaaaacaaaaacacccaaatatcaatgtg

SEQ ID NO: 119698 - DNA, 33 bp, Homo sapien
aaagcaaaacaaaaacgcccaaatatcaatgtg

SEQ ID NO: 119699 - DNA, 33 bp, Homo sapien
agagtatgataaaaatcatgtatcctcagaaaa

SEQ ID NO: 119700 - DNA, 33 bp, Homo sapien
agagtatgataaaaattatgtatcctcagaaaa

SEQ ID NO: 119701 - DNA, 33 bp, Homo sapien
gctccaccatgccaaaatagtaactctttatct

SEQ ID NO: 119702 - DNA, 33 bp, Homo sapien
gctccaccatgccaaagtagtaactctttatct

SEQ ID NO: 119703 - DNA, 33 bp, Homo sapien
gtaatgcattcagcaaagttgacagataaaata

SEQ ID NO: 119704 - DNA, 33 bp, Homo sapien
gtaatgcattcagcaaggttgacagataaaata

SEQ ID NO: 119705 - DNA, 33 bp, Homo sapien
ttccttcatttagcaccatattttcaaaatttg

SEQ ID NO: 119706 - DNA, 33 bp, Homo sapien
ttccttcatttagcacgatattttcaaaatttg

SEQ ID NO: 119707 - DNA, 33 bp, Homo sapien
ttcaccttcttgattaaaatccttcagtgacat

SEQ ID NO: 119708 - DNA, 33 bp, Homo sapien
ttcaccttcttgattagaatccttcagtgacat

SEQ ID NO: 119709 - DNA, 33 bp, Homo sapien
aagagcaaaaaggttacagaactgagtcaaatt

SEQ ID NO: 119710 - DNA, 33 bp, Homo sapien
aagagcaaaaaggttatagaactgagtcaaatt

SEQ ID NO: 119711 - DNA, 33 bp, Homo sapien
aacaagagtctttaacaacatatggaaagattt

SEQ ID NO: 119712 - DNA, 33 bp, Homo sapien
aacaagagtctttaacgacatatggaaagattt

SEQ ID NO: 119713 - DNA, 33 bp, Homo sapien
caaactacagtctgaaataagagctatatcaac

SEQ ID NO: 119714 - DNA, 33 bp, Homo sapien
caaactacagtctgaagtaagagctatatcaac

SEQ ID NO: 119715 - DNA, 33 bp, Homo sapien
caagattccagatgtcacagttattctggtagt

SEQ ID NO: 119716 - DNA, 33 bp, Homo sapien
caagattccagatgtcgcagttattctggtagt

SEQ ID NO: 119717 - DNA, 33 bp, Homo sapien
aatttatccagcaaaaatcaaagattctcccta

SEQ ID NO: 119718 - DNA, 33 bp, Homo sapien
aatttatccagcaaaagtcaaagattctcccta

SEQ ID NO: 119719 - DNA, 33 bp, Homo sapien
tatcttgttctctatacggatttctggcacaag

SEQ ID NO: 119720 - DNA, 33 bp, Homo sapien
tatcttgttctctatatggatttctggcacaag

SEQ ID NO: 119721 - DNA, 33 bp, Homo sapien
tcataacggtatgggtgaacagttctgaacctc

SEQ ID NO: 119722 - DNA, 33 bp, Homo sapien
tcataacggtatgggttaacagttctgaacctc

SEQ ID NO: 119723 - DNA, 33 bp, Homo sapien
tggtttcttggtttggacaaatgtaccacagta

SEQ ID NO: 119724 - DNA, 33 bp, Homo sapien
tggtttcttggtttggccaaatgtaccacagta

SEQ ID NO: 119725 - DNA, 33 bp, Homo sapien
ggaagaagggaggacaaatttatgaacaccaga

SEQ ID NO: 119726 - DNA, 33 bp, Homo sapien
ggaagaagggaggacagatttatgaacaccaga

SEQ ID NO: 119727 - DNA, 33 bp, Homo sapien
atatgcaactggcctacctgttcagagtattaa

SEQ ID NO: 119728 - DNA, 33 bp, Homo sapien
atatgcaactggcctatctgttcagagtattaa

SEQ ID NO: 119729 - DNA, 33 bp, Homo sapien
cataggccaattcctcaaaatcgatcaaccaac

SEQ ID NO: 119730 - DNA, 33 bp, Homo sapien
cataggccaattcctcgaaatcgatcaaccaac

SEQ ID NO: 119731 - DNA, 33 bp, Homo sapien
tttttttcatagaatcccaggccaaattcatct

SEQ ID NO: 119732 - DNA, 33 bp, Homo sapien
tttttttcatagaatctcaggccaaattcatct

SEQ ID NO: 119733 - DNA, 33 bp, Homo sapien
tttgtatatttgttcccgagatttataacattt

SEQ ID NO: 119734 - DNA, 33 bp, Homo sapien
tttgtatatttgttcctgagatttataacattt

SEQ ID NO: 119735 - DNA, 33 bp, Homo sapien
aaactgcctattggaacggtgagaagagggcca

SEQ ID NO: 119736 - DNA, 33 bp, Homo sapien
aaactgcctattggaatggtgagaagagggcca

SEQ ID NO: 119737 - DNA, 33 bp, Homo sapien
aatctctgattttgcactgaattatctcaacct

SEQ ID NO: 119738 - DNA, 33 bp, Homo sapien
aatctctgattttgcattgaattatctcaacct

SEQ ID NO: 119739 - DNA, 33 bp, Homo sapien
tttttccaagttatagcattgagaagcatagct

SEQ ID NO: 119740 - DNA, 33 bp, Homo sapien
tttttccaagttatagtattgagaagcatagct

SEQ ID NO: 119741 - DNA, 33 bp, Homo sapien
tggaggcatgggtgaagaaagaatctctgagaa

SEQ ID NO: 119742 - DNA, 33 bp, Homo sapien
tggaggcatgggtgaataaagaatctctgagaa

SEQ ID NO: 119743 - DNA, 33 bp, Homo sapien
ttttcgtttttccagcagattacggaacttgca

SEQ ID NO: 119744 - DNA, 33 bp, Homo sapien
ttttcgtttttccagcggattacggaacttgca

SEQ ID NO: 119745 - DNA, 33 bp, Homo sapien
agacttctaagctagcaattaagtgtattttct

SEQ ID NO: 119746 - DNA, 33 bp, Homo sapien
agacttctaagctagcgattaagtgtattttct

SEQ ID NO: 119747 - DNA, 33 bp, Homo sapien
aagtgatccagtctcaatccatctttgagaagg

SEQ ID NO: 119748 - DNA, 33 bp, Homo sapien
aagtgatccagtctcactccatctttgagaagg

SEQ ID NO: 119749 - DNA, 33 bp, Homo sapien
caagcagtctgacttacgcacttaaccacagtt

SEQ ID NO: 119750 - DNA, 33 bp, Homo sapien
caagcagtctgacttatgcacttaaccacagtt

SEQ ID NO: 119751 - DNA, 33 bp, Homo sapien
tcatctaattctcacaagagtaaggtatcacta

SEQ ID NO: 119752 - DNA, 33 bp, Homo sapien
tcatctaattctcacatgagtaaggtatcacta

SEQ ID NO: 119753 - DNA, 33 bp, Homo sapien
gcaccaaatttcataaacactgtctatgattat

SEQ ID NO: 119754 - DNA, 33 bp, Homo sapien
gcaccaaatttcataagcactgtctatgattat

SEQ ID NO: 119755 - DNA, 33 bp, Homo sapien
tcttctataaaagttgcattcttagccaagtgt

SEQ ID NO: 119756 - DNA, 33 bp, Homo sapien
tcttctataaaagttgtattcttagccaagtgt

SEQ ID NO: 119757 - DNA, 33 bp, Homo sapien
ccattttctttccagacgaggtttatggcacac

SEQ ID NO: 119758 - DNA, 33 bp, Homo sapien
ccattttctttccagatgaggtttatggcacac

SEQ ID NO: 119759 - DNA, 33 bp, Homo sapien
gacgctactctcccaacgctggccactccagct

SEQ ID NO: 119760 - DNA, 33 bp, Homo sapien
gacgctactctcccaatgctggccactccagct

SEQ ID NO: 119761 - DNA, 33 bp, Homo sapien
ttcagcaatagaagaccactttggtaggttata

SEQ ID NO: 119762 - DNA, 33 bp, Homo sapien
ttcagcaatagaagactactttggtaggttata

SEQ ID NO: 119763 - DNA, 33 bp, Homo sapien
aacccatctctttctaactgtgtattgtgagac

SEQ ID NO: 119764 - DNA, 33 bp, Homo sapien
aacccatctctttctagctgtgtattgtgagac

SEQ ID NO: 119765 - DNA, 33 bp, Homo sapien
aagaaattcactgtgaacaaacacacacacaca

SEQ ID NO: 119766 - DNA, 33 bp, Homo sapien
aagaaattcactgtgaccaaacacacacacaca

SEQ ID NO: 119767 - DNA, 33 bp, Homo sapien
ctaaactatgccaagaaacatcagaaacctggc

SEQ ID NO: 119768 - DNA, 33 bp, Homo sapien
ctaaactatgccaagagacatcagaaacctggc

SEQ ID NO: 119769 - DNA, 33 bp, Homo sapien
caggcataggtcatcacgctgagcggtcttgtg

SEQ ID NO: 119770 - DNA, 33 bp, Homo sapien
caggcataggtcatcatgctgagcggtcttgtg

SEQ ID NO: 119771 - DNA, 33 bp, Homo sapien
ttcaaatggtaaactaagttgtcaaggttcctg

SEQ ID NO: 119772 - DNA, 33 bp, Homo sapien
ttcaaatggtaaactaggttgtcaaggttcctg

SEQ ID NO: 119773 - DNA, 33 bp, Homo sapien
gggccctggacaaatacgtttagcgtccttgcc

SEQ ID NO: 119774 - DNA, 33 bp, Homo sapien
gggccctggacaaatatgtttagcgtccttgcc

SEQ ID NO: 119775 - DNA, 33 bp, Homo sapien
aagctctaattgctaactggttggtgtctgaag

SEQ ID NO: 119776 - DNA, 33 bp, Homo sapien
aagctctaattgctaattggttggtgtctgaag

SEQ ID NO: 119777 - DNA, 33 bp, Homo sapien
gatctttcttcatccaagcagggtcatatatat

SEQ ID NO: 119778 - DNA, 33 bp, Homo sapien
gatctttcttcatccaggcagggtcatatatat

SEQ ID NO: 119779 - DNA, 33 bp, Homo sapien
ctctgaaatagagtgtaaagtcatgtgtgtgta

SEQ ID NO: 119780 - DNA, 33 bp, Homo sapien
ctctgaaatagagtgtgaagtcatgtgtgtgta

SEQ ID NO: 119781 - DNA, 33 bp, Homo sapien
cagctagcattactcccataaactgtgattaat

SEQ ID NO: 119782 - DNA, 33 bp, Homo sapien
cagctagcattactcctataaactgtgattaat

SEQ ID NO: 119783 - DNA, 33 bp, Homo sapien
taaaccttctaacttaactcattttccaccagc

SEQ ID NO: 119784 - DNA, 33 bp, Homo sapien
taaaccttctaacttatctcattttccaccagc

SEQ ID NO: 119785 - DNA, 33 bp, Homo sapien
agagttatcaggtgcaaacagaaattttactct

SEQ ID NO: 119786 - DNA, 33 bp, Homo sapien
agagttatcaggtgcagacagaaattttactct

SEQ ID NO: 119787 - DNA, 33 bp, Homo sapien
taaccaacatcctcaacagctgaaattaagcag

SEQ ID NO: 119788 - DNA, 33 bp, Homo sapien
taaccaacatcctcaatagctgaaattaagcag

SEQ ID NO: 119789 - DNA, 33 bp, Homo sapien
tttcttcaaacttctacgcttctttatttgaca

SEQ ID NO: 119790 - DNA, 33 bp, Homo sapien
tttcttcaaacttctatgcttctttatttgaca

SEQ ID NO: 119791 - DNA, 33 bp, Homo sapien
acacagggtttaacacaaaaattctgcatgaga

SEQ ID NO: 119792 - DNA, 33 bp, Homo sapien
acacagggtttaacacgaaaattctgcatgaga

SEQ ID NO: 119793 - DNA, 33 bp, Homo sapien
ttgtatgctcttgagacagtgactcatgtactg

SEQ ID NO: 119794 - DNA, 33 bp, Homo sapien
ttgtatgctcttgagagagtgactcatgtactg

SEQ ID NO: 119795 - DNA, 33 bp, Homo sapien
acatgacacaaactcacgatactggttttgttt

SEQ ID NO: 119796 - DNA, 33 bp, Homo sapien
acatgacacaaactcatgatactggttttgttt

SEQ ID NO: 119797 - DNA, 33 bp, Homo sapien
cttatatagtggataaggtgggcgttagtctca

SEQ ID NO: 119798 - DNA, 33 bp, Homo sapien
cttatatagtggataatgtgggcgttagtctca

SEQ ID NO: 119799 - DNA, 33 bp, Homo sapien
caagaaatgggcaataaattaataagtagaaag

SEQ ID NO: 119800 - DNA, 33 bp, Homo sapien
caagaaatgggcaatacattaataagtagaaag

SEQ ID NO: 119801 - DNA, 33 bp, Homo sapien
atattgcaatgaccatcagcaaaaggtttagaa

SEQ ID NO: 119802 - DNA, 33 bp, Homo sapien
atattgcaatgaccatgagcaaaaggtttagaa

SEQ ID NO: 119803 - DNA, 33 bp, Homo sapien
tggaaggatggagttacctatcactgagataaa

SEQ ID NO: 119804 - DNA, 33 bp, Homo sapien
tggaaggatggagttatctatcactgagataaa

SEQ ID NO: 119805 - DNA, 33 bp, Homo sapien
tatttatagtttttaacgaagtattccaggata

SEQ ID NO: 119806 - DNA, 33 bp, Homo sapien
tatttatagtttttaatgaagtattccaggata

SEQ ID NO: 119807 - DNA, 33 bp, Homo sapien
taaggccctgaagagaatataaaggtgcaagat

SEQ ID NO: 119808 - DNA, 33 bp, Homo sapien
taaggccctgaagagagtataaaggtgcaagat

SEQ ID NO: 119809 - DNA, 33 bp, Homo sapien
ttaagccagtgattcaaattgttcttcctgatg

SEQ ID NO: 119810 - DNA, 33 bp, Homo sapien
ttaagccagtgattcacattgttcttcctgatg

SEQ ID NO: 119811 - DNA, 33 bp, Homo sapien
gaaaaatatcgacttacgctgtgaaccctttta

SEQ ID NO: 119812 - DNA, 33 bp, Homo sapien
gaaaaatatcgacttatgctgtgaaccctttta

SEQ ID NO: 119813 - DNA, 33 bp, Homo sapien
ctcttttttccaaggaactaatagcaggcacta

SEQ ID NO: 119814 - DNA, 33 bp, Homo sapien
ctcttttttccaaggagctaatagcaggcacta

SEQ ID NO: 119815 - DNA, 33 bp, Homo sapien
agtaaagagttattgccactgatggaaagataa

SEQ ID NO: 119816 - DNA, 33 bp, Homo sapien
agtaaagagttattgctactgatggaaagataa

SEQ ID NO: 119817 - DNA, 33 bp, Homo sapien
ttaaacaatttgtgaaagtttggtcatgagatg

SEQ ID NO: 119818 - DNA, 33 bp, Homo sapien
ttaaacaatttgtgaatgtttggtcatgagatg

SEQ ID NO: 119819 - DNA, 33 bp, Homo sapien
aggtgagccccatccccgcaaaagcccaaagca

SEQ ID NO: 119820 - DNA, 33 bp, Homo sapien
aggtgagccccatccctgcaaaagcccaaagca

SEQ ID NO: 119821 - DNA, 33 bp, Homo sapien
gatgcaactgaaatgaacttaagatagaggctg

SEQ ID NO: 119822 - DNA, 33 bp, Homo sapien
gatgcaactgaaatgatcttaagatagaggctg

SEQ ID NO: 119823 - DNA, 33 bp, Homo sapien
tcattaaatttggaaaatagagtgtctgtatac

SEQ ID NO: 119824 - DNA, 33 bp, Homo sapien
tcattaaatttggaaagtagagtgtctgtatac

SEQ ID NO: 119825 - DNA, 33 bp, Homo sapien
tgttactctaagccccactcttagatctctctt

SEQ ID NO: 119826 - DNA, 33 bp, Homo sapien
tgttactctaagcccctctcttagatctctctt

SEQ ID NO: 119827 - DNA, 33 bp, Homo sapien
ctctaagtcaattcacacagctagcagcagcat

SEQ ID NO: 119828 - DNA, 33 bp, Homo sapien
ctctaagtcaattcacgcagctagcagcagcat

SEQ ID NO: 119829 - DNA, 33 bp, Homo sapien
ctaagctctgggaatgccacagtgaggaatgcc

SEQ ID NO: 119830 - DNA, 33 bp, Homo sapien
ctaagctctgggaatgtcacagtgaggaatgcc

SEQ ID NO: 119831 - DNA, 33 bp, Homo sapien
tagtccaactggtggacagcagagtaagcactg

SEQ ID NO: 119832 - DNA, 33 bp, Homo sapien
tagtccaactggtggatagcagagtaagcactg

SEQ ID NO: 119833 - DNA, 33 bp, Homo sapien
taaagacacttagaaacaaaccataattgtgaa

SEQ ID NO: 119834 - DNA, 33 bp, Homo sapien
taaagacacttagaaataaaccataattgtgaa

SEQ ID NO: 119835 - DNA, 33 bp, Homo sapien
aagctgccttttttccccaaagaaatctgtcac

SEQ ID NO: 119836 - DNA, 33 bp, Homo sapien
aagctgccttttttccgcaaagaaatctgtcac

SEQ ID NO: 119837 - DNA, 33 bp, Homo sapien
gcagtggaaagatttacgtcagaatgtgcttat

SEQ ID NO: 119838 - DNA, 33 bp, Homo sapien
gcagtggaaagatttatgtcagaatgtgcttat

SEQ ID NO: 119839 - DNA, 33 bp, Homo sapien
agattcttctcctttacctatccatcttcaaaa

SEQ ID NO: 119840 - DNA, 33 bp, Homo sapien
agattcttctcctttatctatccatcttcaaaa

SEQ ID NO: 119841 - DNA, 33 bp, Homo sapien
gacggaggtttcagaacggaattgactctagcg

SEQ ID NO: 119842 - DNA, 33 bp, Homo sapien
gacggaggtttcagaatggaattgactctagcg

SEQ ID NO: 119843 - DNA, 33 bp, Homo sapien
agcaggaaaacaggcacctgaggtaggaaggct

SEQ ID NO: 119844 - DNA, 33 bp, Homo sapien
agcaggaaaacaggcatctgaggtaggaaggct

SEQ ID NO: 119845 - DNA, 33 bp, Homo sapien
atctagctagctcagaggtctttagatatgtta

SEQ ID NO: 119846 - DNA, 33 bp, Homo sapien
atctagctagctcagatgtctttagatatgtta

SEQ ID NO: 119847 - DNA, 33 bp, Homo sapien
cacaccatctaggaaacgttcaatgacttaatt

SEQ ID NO: 119848 - DNA, 33 bp, Homo sapien
cacaccatctaggaaatgttcaatgacttaatt

SEQ ID NO: 119849 - DNA, 33 bp, Homo sapien
ctgtcattatgtgttacgctcattacatctaga

SEQ ID NO: 119850 - DNA, 33 bp, Homo sapien
ctgtcattatgtgttatgctcattacatctaga

SEQ ID NO: 119851 - DNA, 33 bp, Homo sapien
tttggaggtttcagtcactctcgaaggagtttg

SEQ ID NO: 119852 - DNA, 33 bp, Homo sapien
tttggaggtttcagtcgctctcgaaggagtttg

SEQ ID NO: 119853 - DNA, 33 bp, Homo sapien
ttctgaagcctgtgtaagtctgtccagacaaga

SEQ ID NO: 119854 - DNA, 33 bp, Homo sapien
ttctgaagcctgtgtacgtctgtccagacaaga

SEQ ID NO: 119855 - DNA, 33 bp, Homo sapien
ggtttggggcaagtaacggagacttcaaaaata

SEQ ID NO: 119856 - DNA, 33 bp, Homo sapien
ggtttggggcaagtaatggagacttcaaaaata

SEQ ID NO: 119857 - DNA, 33 bp, Homo sapien
gacctttgtcatacacacataccttgatactac

SEQ ID NO: 119858 - DNA, 33 bp, Homo sapien
gacctttgtcatacacgcataccttgatactac

SEQ ID NO: 119859 - DNA, 33 bp, Homo sapien
atgcacagtggaatagcaattgtttcttcaaag

SEQ ID NO: 119860 - DNA, 33 bp, Homo sapien
atgcacagtggaatagtaattgtttcttcaaag

SEQ ID NO: 119861 - DNA, 33 bp, Homo sapien
atgacttttattcacaactaagtatgaagataa

SEQ ID NO: 119862 - DNA, 33 bp, Homo sapien
atgacttttattcacagctaagtatgaagataa

SEQ ID NO: 119863 - DNA, 33 bp, Homo sapien
gtcttaagagtatacacgaaagattttattaca

SEQ ID NO: 119864 - DNA, 33 bp, Homo sapien
gtcttaagagtatacaggaaagattttattaca

SEQ ID NO: 119865 - DNA, 33 bp, Homo sapien
aggaaagaccacccaaatgaattcccagcactc

SEQ ID NO: 119866 - DNA, 33 bp, Homo sapien
aggaaagaccacccaattgaattcccagcactc

SEQ ID NO: 119867 - DNA, 33 bp, Homo sapien
tacagagatgggaaaactgtggaaggagctgac

SEQ ID NO: 119868 - DNA, 33 bp, Homo sapien
tacagagatgggaaaattgtggaaggagctgac

SEQ ID NO: 119869 - DNA, 33 bp, Homo sapien
cagtcaggaagtgataaaacttagctgctattt

SEQ ID NO: 119870 - DNA, 33 bp, Homo sapien
cagtcaggaagtgatataacttagctgctattt

SEQ ID NO: 119871 - DNA, 33 bp, Homo sapien
tgggctcaaaagtcaagccagtgcctgtgaaaa

SEQ ID NO: 119872 - DNA, 33 bp, Homo sapien
tgggctcaaaagtcaatccagtgcctgtgaaaa

SEQ ID NO: 119873 - DNA, 33 bp, Homo sapien
aggtgatcttataggaagtgacgagcgaagtaa

SEQ ID NO: 119874 - DNA, 33 bp, Homo sapien
aggtgatcttataggaggtgacgagcgaagtaa

SEQ ID NO: 119875 - DNA, 33 bp, Homo sapien
gtcaggagctacaataaaactataacgacccat

SEQ ID NO: 119876 - DNA, 33 bp, Homo sapien
gtcaggagctacaatagaactataacgacccat

SEQ ID NO: 119877 - DNA, 33 bp, Homo sapien
cactggatcatgttagaaaacactagatataaa

SEQ ID NO: 119878 - DNA, 33 bp, Homo sapien
cactggatcatgttaggaaacactagatataaa

SEQ ID NO: 119879 - DNA, 33 bp, Homo sapien
agagatttcaccaccacaaggtagcttaataag

SEQ ID NO: 119880 - DNA, 33 bp, Homo sapien
agagatttcaccaccagaaggtagcttaataag

SEQ ID NO: 119881 - DNA, 33 bp, Homo sapien
ggaattagtttggaaacgtacctagcctttccc

SEQ ID NO: 119882 - DNA, 33 bp, Homo sapien
ggaattagtttggaaatgtacctagcctttccc

SEQ ID NO: 119883 - DNA, 33 bp, Homo sapien
tcctttgggtttttacagagacttcattacaaa

SEQ ID NO: 119884 - DNA, 33 bp, Homo sapien
tcctttgggtttttacggagacttcattacaaa

SEQ ID NO: 119885 - DNA, 33 bp, Homo sapien
ttgaattttattgtctcacgtgaataaaactga

SEQ ID NO: 119886 - DNA, 33 bp, Homo sapien
ttgaattttattgtcttacgtgaataaaactga

SEQ ID NO: 119887 - DNA, 33 bp, Homo sapien
aaggagacatctggcccgagggattggggaaag

SEQ ID NO: 119888 - DNA, 33 bp, Homo sapien
aaggagacatctggcctgagggattggggaaag

SEQ ID NO: 119889 - DNA, 33 bp, Homo sapien
ttcaatccttacaacaactgtgagaccagtaat

SEQ ID NO: 119890 - DNA, 33 bp, Homo sapien
ttcaatccttacaacagctgtgagaccagtaat

SEQ ID NO: 119891 - DNA, 33 bp, Homo sapien
tatccacactcttgtacaaccattgccaccatt

SEQ ID NO: 119892 - DNA, 33 bp, Homo sapien
tatccacactcttgtataaccattgccaccatt

SEQ ID NO: 119893 - DNA, 33 bp, Homo sapien
agtctcagttcttgaaatcatcattgagctgct

SEQ ID NO: 119894 - DNA, 33 bp, Homo sapien
agtctcagttcttgaagtcatcattgagctgct

SEQ ID NO: 119895 - DNA, 33 bp, Homo sapien
actctgttcaacctaccctcaggaagccttaag

SEQ ID NO: 119896 - DNA, 33 bp, Homo sapien
actctgttcaacctactctcaggaagccttaag

SEQ ID NO: 119897 - DNA, 33 bp, Homo sapien
aaagccaatgttcacaaggaaacagaagaacga

SEQ ID NO: 119898 - DNA, 33 bp, Homo sapien
aaagccaatgttcacagggaaacagaagaacga

SEQ ID NO: 119899 - DNA, 33 bp, Homo sapien
gatcaagctaagacaactggtgaaagtggttac

SEQ ID NO: 119900 - DNA, 33 bp, Homo sapien
gatcaagctaagacaattggtgaaagtggttac

SEQ ID NO: 119901 - DNA, 33 bp, Homo sapien
cataacatatgtgtaactgaagtctcagaaggt

SEQ ID NO: 119902 - DNA, 33 bp, Homo sapien
cataacatatgtgtaattgaagtctcagaaggt

SEQ ID NO: 119903 - DNA, 33 bp, Homo sapien
gtgtgttgtggaggaaacgagggtggaaacagc

SEQ ID NO: 119904 - DNA, 33 bp, Homo sapien
gtgtgttgtggaggaaccgagggtggaaacagc

SEQ ID NO: 119905 - DNA, 33 bp, Homo sapien
tggagccctaccgtgcactccagtctacaattc

SEQ ID NO: 119906 - DNA, 33 bp, Homo sapien
tggagccctaccgtgcgctccagtctacaattc

SEQ ID NO: 119907 - DNA, 33 bp, Homo sapien
gggtcaaactgtgcggaatcagtgttcatcagt

SEQ ID NO: 119908 - DNA, 33 bp, Homo sapien
gggtcaaactgtgcgggatcagtgttcatcagt

SEQ ID NO: 119909 - DNA, 33 bp, Homo sapien
aaaacaatgaaggagacgaaaatgtgacccctc

SEQ ID NO: 119910 - DNA, 33 bp, Homo sapien
aaaacaatgaaggagaggaaaatgtgacccctc

SEQ ID NO: 119911 - DNA, 33 bp, Homo sapien
ctgaagagaggctcacatcaagtggaagtcttc

SEQ ID NO: 119912 - DNA, 33 bp, Homo sapien
ctgaagagaggctcacgtcaagtggaagtcttc

SEQ ID NO: 119913 - DNA, 33 bp, Homo sapien
gaatttgctgatgttacgaaagaatgaatgagg

SEQ ID NO: 119914 - DNA, 33 bp, Homo sapien
gaatttgctgatgttatgaaagaatgaatgagg

SEQ ID NO: 119915 - DNA, 33 bp, Homo sapien
cttaccaagagttgtgcaccatttcagaaacca

SEQ ID NO: 119916 - DNA, 33 bp, Homo sapien
cttaccaagagttgtgtaccatttcagaaacca

SEQ ID NO: 119917 - DNA, 33 bp, Homo sapien
tctgtgccccccaaaacattttgatcagagaac

SEQ ID NO: 119918 - DNA, 33 bp, Homo sapien
tctgtgccccccaaaagattttgatcagagaac

SEQ ID NO: 119919 - DNA, 33 bp, Homo sapien
acaccattgctcgggacgtgggaacccaggcta

SEQ ID NO: 119920 - DNA, 33 bp, Homo sapien
acaccattgctcgggatgtgggaacccaggcta

SEQ ID NO: 119921 - DNA, 33 bp, Homo sapien
ccctggtctgccggacagggccatacatcatcg

SEQ ID NO: 119922 - DNA, 33 bp, Homo sapien
ccctggtctgccggacggggccatacatcatcg

SEQ ID NO: 119923 - DNA, 33 bp, Homo sapien
gaaggtgcttgtggccaaatcctgcggctgggg

SEQ ID NO: 119924 - DNA, 33 bp, Homo sapien
gaaggtgcttgtggccgaatcctgcggctgggg

SEQ ID NO: 119925 - DNA, 33 bp, Homo sapien
cagaggccagaacaccaagtgatgtcagcagtg

SEQ ID NO: 119926 - DNA, 33 bp, Homo sapien
cagaggccagaacacctagtgatgtcagcagtg

SEQ ID NO: 119927 - DNA, 33 bp, Homo sapien
ggaggtctgaaaatcccagaaaagaaagcagaa

SEQ ID NO: 119928 - DNA, 33 bp, Homo sapien
ggaggtctgaaaatcctagaaaagaaagcagaa

SEQ ID NO: 119929 - DNA, 33 bp, Homo sapien
atgaacagatagcaaacgaaatggcggagtaag

SEQ ID NO: 119930 - DNA, 33 bp, Homo sapien
atgaacagatagcaaatgaaatggcggagtaag

SEQ ID NO: 119931 - DNA, 33 bp, Homo sapien
ggcagtgagctgagaaacagaaacatggataga

SEQ ID NO: 119932 - DNA, 33 bp, Homo sapien
ggcagtgagctgagaaccagaaacatggataga

SEQ ID NO: 119933 - DNA, 33 bp, Homo sapien
cctagcatgcacgccccattccacttcctcccc

SEQ ID NO: 119934 - DNA, 33 bp, Homo sapien
cctagcatgcacgccctattccacttcctcccc

SEQ ID NO: 119935 - DNA, 33 bp, Homo sapien
ggagaattgcttagcaaaaagtttcttaggtag

SEQ ID NO: 119936 - DNA, 33 bp, Homo sapien
ggagaattgcttagcagaaagtttcttaggtag

SEQ ID NO: 119937 - DNA, 33 bp, Homo sapien
tgatccctgtaacttgcaatataatttagaaag

SEQ ID NO: 119938 - DNA, 33 bp, Homo sapien
tgatccctgtaacttggaatataatttagaaag

SEQ ID NO: 119939 - DNA, 33 bp, Homo sapien
gtctaggaatgtcttaccttagaggcaaatgct

SEQ ID NO: 119940 - DNA, 33 bp, Homo sapien
gtctaggaatgtcttatcttagaggcaaatgct

SEQ ID NO: 119941 - DNA, 33 bp, Homo sapien
tttgagacttggggtcacatcatagccttgttt

SEQ ID NO: 119942 - DNA, 33 bp, Homo sapien
tttgagacttggggtcgcatcatagccttgttt

SEQ ID NO: 119943 - DNA, 33 bp, Homo sapien
aggcagagcacttgacaaaagactttcaggagc

SEQ ID NO: 119944 - DNA, 33 bp, Homo sapien
aggcagagcacttgacgaaagactttcaggagc

SEQ ID NO: 119945 - DNA, 33 bp, Homo sapien
ggcatgagtcacctcacgtggcggtaaaatgga

SEQ ID NO: 119946 - DNA, 33 bp, Homo sapien
ggcatgagtcacctcatgtggcggtaaaatgga

SEQ ID NO: 119947 - DNA, 33 bp, Homo sapien
gggcagtgcctatggccaatcttttagtgcctt

SEQ ID NO: 119948 - DNA, 33 bp, Homo sapien
gggcagtgcctatggctaatcttttagtgcctt

SEQ ID NO: 119949 - DNA, 33 bp, Homo sapien
gcctgcccaactttgcaatcttgatgtctggta

SEQ ID NO: 119950 - DNA, 33 bp, Homo sapien
gcctgcccaactttgcgatcttgatgtctggta

SEQ ID NO: 119951 - DNA, 33 bp, Homo sapien
ctgagcaatactttgcaactttgtgtgtgtgtg

SEQ ID NO: 119952 - DNA, 33 bp, Homo sapien
ctgagcaatactttgcgactttgtgtgtgtgtg

SEQ ID NO: 119953 - DNA, 33 bp, Homo sapien
tgatattacttggaacacaatgcaaggagatgt

SEQ ID NO: 119954 - DNA, 33 bp, Homo sapien
tgatattacttggaacgcaatgcaaggagatgt

SEQ ID NO: 119955 - DNA, 33 bp, Homo sapien
tctgccttgtcttggaagactctacaacctcct

SEQ ID NO: 119956 - DNA, 33 bp, Homo sapien
tctgccttgtcttggaggactctacaacctcct

SEQ ID NO: 119957 - DNA, 33 bp, Homo sapien
aggcttaggtctgctccacgtgagttcatggtg

SEQ ID NO: 119958 - DNA, 33 bp, Homo sapien
aggcttaggtctgctctacgtgagttcatggtg

SEQ ID NO: 119959 - DNA, 33 bp, Homo sapien
ttgccattattcttatcacccatgacattcatc

SEQ ID NO: 119960 - DNA, 33 bp, Homo sapien
ttgccattattcttattacccatgacattcatc

SEQ ID NO: 119961 - DNA, 33 bp, Homo sapien
ggtagggtcacatagacggaaaaacattggatc

SEQ ID NO: 119962 - DNA, 33 bp, Homo sapien
ggtagggtcacatagatggaaaaacattggatc

SEQ ID NO: 119963 - DNA, 33 bp, Homo sapien
tgctttcactcctagcagaaggcgaaggagggc

SEQ ID NO: 119964 - DNA, 33 bp, Homo sapien
tgctttcactcctagcggaaggcgaaggagggc

SEQ ID NO: 119965 - DNA, 33 bp, Homo sapien
aaggtgatctagccagaccaactagtcgtgaag

SEQ ID NO: 119966 - DNA, 33 bp, Homo sapien
aaggtgatctagccaggccaactagtcgtgaag

SEQ ID NO: 119967 - DNA, 33 bp, Homo sapien
tttctagaactcactgcagattaagagagctga

SEQ ID NO: 119968 - DNA, 33 bp, Homo sapien
tttctagaactcactgtagattaagagagctga

SEQ ID NO: 119969 - DNA, 33 bp, Homo sapien
ttactaacattttgccaatgagaaaactgagcc

SEQ ID NO: 119970 - DNA, 33 bp, Homo sapien
ttactaacattttgccgatgagaaaactgagcc

SEQ ID NO: 119971 - DNA, 33 bp, Homo sapien
aaagaaaatggagtgacaccattaaagcactga

SEQ ID NO: 119972 - DNA, 33 bp, Homo sapien
aaagaaaatggagtgataccattaaagcactga

SEQ ID NO: 119973 - DNA, 33 bp, Homo sapien
tgggacttaacagatcaacatacagctgtatac

SEQ ID NO: 119974 - DNA, 33 bp, Homo sapien
tgggacttaacagatcgacatacagctgtatac

SEQ ID NO: 119975 - DNA, 33 bp, Homo sapien
taaatattgttgaatgaatgttgttagtgtaat

SEQ ID NO: 119976 - DNA, 33 bp, Homo sapien
taaatattgttgaatgcatgttgttagtgtaat

SEQ ID NO: 119977 - DNA, 33 bp, Homo sapien
agcatgtgcttatgagccacacacatgttaatt

SEQ ID NO: 119978 - DNA, 33 bp, Homo sapien
agcatgtgcttatgaggcacacacatgttaatt

SEQ ID NO: 119979 - DNA, 33 bp, Homo sapien
agggttgctgcgactagggcagttgatgacgta

SEQ ID NO: 119980 - DNA, 33 bp, Homo sapien
agggttgctgcgactatggcagttgatgacgta

SEQ ID NO: 119981 - DNA, 33 bp, Homo sapien
tgggcagagctggaaaccttaaagaggcagtgc

SEQ ID NO: 119982 - DNA, 33 bp, Homo sapien
tgggcagagctggaaatcttaaagaggcagtgc

SEQ ID NO: 119983 - DNA, 33 bp, Homo sapien
ttttgttttggagaaaccttgagggtagttaaa

SEQ ID NO: 119984 - DNA, 33 bp, Homo sapien
ttttgttttggagaaatcttgagggtagttaaa

SEQ ID NO: 119985 - DNA, 33 bp, Homo sapien
ggatgctccccatttcacttgccttggctgtac

SEQ ID NO: 119986 - DNA, 33 bp, Homo sapien
ggatgctccccatttcgcttgccttggctgtac

SEQ ID NO: 119987 - DNA, 33 bp, Homo sapien
ttaagggcagagtccactccgggctacatgggc

SEQ ID NO: 119988 - DNA, 33 bp, Homo sapien
ttaagggcagagtccattccgggctacatgggc

SEQ ID NO: 119989 - DNA, 33 bp, Homo sapien
aaggtccttctggccacgatgagactataaaat

SEQ ID NO: 119990 - DNA, 33 bp, Homo sapien
aaggtccttctggccatgatgagactataaaat

SEQ ID NO: 119991 - DNA, 33 bp, Homo sapien
gcctgctcaaaaggggaattggaggaaatagga

SEQ ID NO: 119992 - DNA, 33 bp, Homo sapien
gcctgctcaaaagggggattggaggaaatagga

SEQ ID NO: 119993 - DNA, 33 bp, Homo sapien
acaactggtcactgcaatgaccactgaaactaa

SEQ ID NO: 119994 - DNA, 33 bp, Homo sapien
acaactggtcactgcattgaccactgaaactaa

SEQ ID NO: 119995 - DNA, 33 bp, Homo sapien
aaccaggaaagggagactatgaattgaggaaga

SEQ ID NO: 119996 - DNA, 33 bp, Homo sapien
aaccaggaaagggagattatgaattgaggaaga

SEQ ID NO: 119997 - DNA, 33 bp, Homo sapien
attcttaagagtagctaaactgcaggtggaatg

SEQ ID NO: 119998 - DNA, 33 bp, Homo sapien
attcttaagagtagctcaactgcaggtggaatg

SEQ ID NO: 119999 - DNA, 33 bp, Homo sapien
tagggatttgaaacaaacatgtcataagcacat

SEQ ID NO: 120000 - DNA, 33 bp, Homo sapien
tagggatttgaaacaagcatgtcataagcacat

SEQ ID NO: 120001 - DNA, 33 bp, Homo sapien
cagcccttagcatcaactcatcttcagtctttg

SEQ ID NO: 120002 - DNA, 33 bp, Homo sapien
cagcccttagcatcaagtcatcttcagtctttg

SEQ ID NO: 120003 - DNA, 33 bp, Homo sapien
tgttagcagtatgacactggaaaatataatgca

SEQ ID NO: 120004 - DNA, 33 bp, Homo sapien
tgttagcagtatgacattggaaaatataatgca

SEQ ID NO: 120005 - DNA, 33 bp, Homo sapien
gacaccaagttccatgcaggtctttcccgcctg

SEQ ID NO: 120006 - DNA, 33 bp, Homo sapien
gacaccaagttccatgtaggtctttcccgcctg

SEQ ID NO: 120007 - DNA, 33 bp, Homo sapien
cgtaggaagtgcatcccgaggcagtgtgtacaa

SEQ ID NO: 120008 - DNA, 33 bp, Homo sapien
cgtaggaagtgcatcctgaggcagtgtgtacaa

SEQ ID NO: 120009 - DNA, 33 bp, Homo sapien
aacacttggcccaaaacgttctctccaccattt

SEQ ID NO: 120010 - DNA, 33 bp, Homo sapien
aacacttggcccaaaatgttctctccaccattt

SEQ ID NO: 120011 - DNA, 33 bp, Homo sapien
tgtgtatattttcacaatgaggtttctgtactc

SEQ ID NO: 120012 - DNA, 33 bp, Homo sapien
tgtgtatattttcacagtgaggtttctgtactc

SEQ ID NO: 120013 - DNA, 33 bp, Homo sapien
agcacttaagggtaccaatagacttgacacttc

SEQ ID NO: 120014 - DNA, 33 bp, Homo sapien
agcacttaagggtaccgatagacttgacacttc

SEQ ID NO: 120015 - DNA, 33 bp, Homo sapien
tacccgttaaaatgtcaaggttctcaaagtaaa

SEQ ID NO: 120016 - DNA, 33 bp, Homo sapien
tacccgttaaaatgtcgaggttctcaaagtaaa

SEQ ID NO: 120017 - DNA, 33 bp, Homo sapien
ggataggtacaaaaaactctaaacactgtgaag

SEQ ID NO: 120018 - DNA, 33 bp, Homo sapien
ggataggtacaaaaaagtctaaacactgtgaag

SEQ ID NO: 120019 - DNA, 33 bp, Homo sapien
gtgttaaagggaatgaaacgtgcaaagcctttt

SEQ ID NO: 120020 - DNA, 33 bp, Homo sapien
gtgttaaagggaatgagacgtgcaaagcctttt

SEQ ID NO: 120021 - DNA, 33 bp, Homo sapien
tggaccaagataagaacacactcgaggccttat

SEQ ID NO: 120022 - DNA, 33 bp, Homo sapien
tggaccaagataagaatacactcgaggccttat

SEQ ID NO: 120023 - DNA, 33 bp, Homo sapien
aatgtcatgtcagagtaaaaagaataaaggtgt

SEQ ID NO: 120024 - DNA, 33 bp, Homo sapien
aatgtcatgtcagagtcaaaagaataaaggtgt

SEQ ID NO: 120025 - DNA, 33 bp, Homo sapien
aaatctgatctattccacaaggtccagtgtttc

SEQ ID NO: 120026 - DNA, 33 bp, Homo sapien
aaatctgatctattccgcaaggtccagtgtttc

SEQ ID NO: 120027 - DNA, 33 bp, Homo sapien
ctacaggcccaaacaaattatatagcttattta

SEQ ID NO: 120028 - DNA, 33 bp, Homo sapien
ctacaggcccaaacaagttatatagcttattta

SEQ ID NO: 120029 - DNA, 33 bp, Homo sapien
atatatttgcagtggacctattgttcagaagaa

SEQ ID NO: 120030 - DNA, 33 bp, Homo sapien
atatatttgcagtggatctattgttcagaagaa

SEQ ID NO: 120031 - DNA, 33 bp, Homo sapien
gcatggagagacgaagaaatttgttcaaggtca

SEQ ID NO: 120032 - DNA, 33 bp, Homo sapien
gcatggagagacgaaggaatttgttcaaggtca

SEQ ID NO: 120033 - DNA, 33 bp, Homo sapien
gaatagaacatatcagaagctacaaatattaag

SEQ ID NO: 120034 - DNA, 33 bp, Homo sapien
gaatagaacatatcagtagctacaaatattaag

SEQ ID NO: 120035 - DNA, 33 bp, Homo sapien
ccatgttcactgtttaactgtgtattataaaca

SEQ ID NO: 120036 - DNA, 33 bp, Homo sapien
ccatgttcactgtttacctgtgtattataaaca

SEQ ID NO: 120037 - DNA, 33 bp, Homo sapien
agctaaaaatgctgcagctcaactttctgaaat

SEQ ID NO: 120038 - DNA, 33 bp, Homo sapien
agctaaaaatgctgcatctcaactttctgaaat

SEQ ID NO: 120039 - DNA, 33 bp, Homo sapien
aaataatgccttctgacggaaaatcctgctatg

SEQ ID NO: 120040 - DNA, 33 bp, Homo sapien
aaataatgccttctgatggaaaatcctgctatg

SEQ ID NO: 120041 - DNA, 33 bp, Homo sapien
ggagttgttgctcacaaatattctattgtggta

SEQ ID NO: 120042 - DNA, 33 bp, Homo sapien
ggagttgttgctcacagatattctattgtggta

SEQ ID NO: 120043 - DNA, 33 bp, Homo sapien
tctgatccaagacacaaaagcagctttcactcc

SEQ ID NO: 120044 - DNA, 33 bp, Homo sapien
tctgatccaagacacacaagcagctttcactcc

SEQ ID NO: 120045 - DNA, 33 bp, Homo sapien
cagtgataatctttagccaaacagcacctgtaa

SEQ ID NO: 120046 - DNA, 33 bp, Homo sapien
cagtgataatctttagtcaaacagcacctgtaa

SEQ ID NO: 120047 - DNA, 33 bp, Homo sapien
atgtcctataagcagaagaagacacacacacac

SEQ ID NO: 120048 - DNA, 33 bp, Homo sapien
atgtcctataagcagaggaagacacacacacac

SEQ ID NO: 120049 - DNA, 33 bp, Homo sapien
gctccctcatttttcacatcatacttttcgctg

SEQ ID NO: 120050 - DNA, 33 bp, Homo sapien
gctccctcatttttcatatcatacttttcgctg

SEQ ID NO: 120051 - DNA, 33 bp, Homo sapien
ctttcaggcagaatacaaaagggaatttttagt

SEQ ID NO: 120052 - DNA, 33 bp, Homo sapien
ctttcaggcagaatacgaaagggaatttttagt

SEQ ID NO: 120053 - DNA, 33 bp, Homo sapien
aaaacactaactctgacgaggaatgaaatatat

SEQ ID NO: 120054 - DNA, 33 bp, Homo sapien
aaaacactaactctgatgaggaatgaaatatat

SEQ ID NO: 120055 - DNA, 33 bp, Homo sapien
aatcctaactgataaacgtgctctctttttgag

SEQ ID NO: 120056 - DNA, 33 bp, Homo sapien
aatcctaactgataaaggtgctctctttttgag

SEQ ID NO: 120057 - DNA, 33 bp, Homo sapien
aggagaatgggctgcccaataataatgccaatc

SEQ ID NO: 120058 - DNA, 33 bp, Homo sapien
aggagaatgggctgcctaataataatgccaatc

SEQ ID NO: 120059 - DNA, 33 bp, Homo sapien
ctatcacttgggttgccacaagaaaaatcttcc

SEQ ID NO: 120060 - DNA, 33 bp, Homo sapien
ctatcacttgggttgctacaagaaaaatcttcc

SEQ ID NO: 120061 - DNA, 33 bp, Homo sapien
tatcacagcagtttgcaaaaaaattattagcct

SEQ ID NO: 120062 - DNA, 33 bp, Homo sapien
tatcacagcagtttgcgaaaaaattattagcct

SEQ ID NO: 120063 - DNA, 33 bp, Homo sapien
gaagaactcacagagaggattcagtccagtagt

SEQ ID NO: 120064 - DNA, 33 bp, Homo sapien
gaagaactcacagagatgattcagtccagtagt

SEQ ID NO: 120065 - DNA, 33 bp, Homo sapien
ttacttaggggaaccaatctctggtaactgata

SEQ ID NO: 120066 - DNA, 33 bp, Homo sapien
ttacttaggggaaccagtctctggtaactgata

SEQ ID NO: 120067 - DNA, 33 bp, Homo sapien
tgtggtcatgatgaagcctatgtgacttaatat

SEQ ID NO: 120068 - DNA, 33 bp, Homo sapien
tgtggtcatgatgaaggctatgtgacttaatat

SEQ ID NO: 120069 - DNA, 33 bp, Homo sapien
aaggttctcaacaagtaaaagttgcgggtcttt

SEQ ID NO: 120070 - DNA, 33 bp, Homo sapien
aaggttctcaacaagtgaaagttgcgggtcttt

SEQ ID NO: 120071 - DNA, 33 bp, Homo sapien
ccttcttcttccttcccgcttaaaacttggatg

SEQ ID NO: 120072 - DNA, 33 bp, Homo sapien
ccttcttcttccttcctgcttaaaacttggatg

SEQ ID NO: 120073 - DNA, 33 bp, Homo sapien
tgggtttccatataaactgaggtcctttgggtt

SEQ ID NO: 120074 - DNA, 33 bp, Homo sapien
tgggtttccatataaattgaggtcctttgggtt

SEQ ID NO: 120075 - DNA, 33 bp, Homo sapien
ctgagtgagagataagaagctgtcgaatggctt

SEQ ID NO: 120076 - DNA, 33 bp, Homo sapien
ctgagtgagagataaggagctgtcgaatggctt

SEQ ID NO: 120077 - DNA, 33 bp, Homo sapien
cttcctcatctgatcaagagacctgtgaaatgt

SEQ ID NO: 120078 - DNA, 33 bp, Homo sapien
cttcctcatctgatcatgagacctgtgaaatgt

SEQ ID NO: 120079 - DNA, 33 bp, Homo sapien
catttttgttgctcaactgggttcctgttacag

SEQ ID NO: 120080 - DNA, 33 bp, Homo sapien
catttttgttgctcaattgggttcctgttacag

SEQ ID NO: 120081 - DNA, 33 bp, Homo sapien
cctagatgagagttacacggctcctgggacaaa

SEQ ID NO: 120082 - DNA, 33 bp, Homo sapien
cctagatgagagttacgcggctcctgggacaaa

SEQ ID NO: 120083 - DNA, 33 bp, Homo sapien
gaatgttcctttctggaatttattagttagtga

SEQ ID NO: 120084 - DNA, 33 bp, Homo sapien
gaatgttcctttctgggatttattagttagtga

SEQ ID NO: 120085 - DNA, 33 bp, Homo sapien
ccatgcctaacagttagaaggagccacattttg

SEQ ID NO: 120086 - DNA, 33 bp, Homo sapien
ccatgcctaacagttataaggagccacattttg

SEQ ID NO: 120087 - DNA, 33 bp, Homo sapien
gagaaaaaagatggaaagagtcttggtccctga

SEQ ID NO: 120088 - DNA, 33 bp, Homo sapien
gagaaaaaagatggaaggagtcttggtccctga

SEQ ID NO: 120089 - DNA, 33 bp, Homo sapien
ccaaatgcagtgaaaacgaggttaagcctatga

SEQ ID NO: 120090 - DNA, 33 bp, Homo sapien
ccaaatgcagtgaaaatgaggttaagcctatga

SEQ ID NO: 120091 - DNA, 33 bp, Homo sapien
ttcctcttgtctttcaagtttcagcttccagat

SEQ ID NO: 120092 - DNA, 33 bp, Homo sapien
ttcctcttgtctttcacgtttcagcttccagat

SEQ ID NO: 120093 - DNA, 33 bp, Homo sapien
ggcattccttgcctggcagctgatattgtgtgt

SEQ ID NO: 120094 - DNA, 33 bp, Homo sapien
ggcattccttgcctgggagctgatattgtgtgt

SEQ ID NO: 120095 - DNA, 33 bp, Homo sapien
ctggggtaaaatgaccacatgaagcaatacaca

SEQ ID NO: 120096 - DNA, 33 bp, Homo sapien
ctggggtaaaatgaccgcatgaagcaatacaca

SEQ ID NO: 120097 - DNA, 33 bp, Homo sapien
ccacaggggccaaactgacagcatccagtacca

SEQ ID NO: 120098 - DNA, 33 bp, Homo sapien
ccacaggggccaaacttacagcatccagtacca

SEQ ID NO: 120099 - DNA, 33 bp, Homo sapien
atataaaagggaactactaggaagtgtggttca

SEQ ID NO: 120100 - DNA, 33 bp, Homo sapien
atataaaagggaactattaggaagtgtggttca

SEQ ID NO: 120101 - DNA, 33 bp, Homo sapien
acatgaggggcctcaaatgagaccagtagaaga

SEQ ID NO: 120102 - DNA, 33 bp, Homo sapien
acatgaggggcctcaagtgagaccagtagaaga

SEQ ID NO: 120103 - DNA, 33 bp, Homo sapien
ggctactttatcaggaaatacttttatttactt

SEQ ID NO: 120104 - DNA, 33 bp, Homo sapien
ggctactttatcaggagatacttttatttactt

SEQ ID NO: 120105 - DNA, 33 bp, Homo sapien
ctaataaaatgagctgaaagttccagaaatcac

SEQ ID NO: 120106 - DNA, 33 bp, Homo sapien
ctaataaaatgagctggaagttccagaaatcac

SEQ ID NO: 120107 - DNA, 33 bp, Homo sapien
taatatgcaaatgccactggaagtgaagcgaac

SEQ ID NO: 120108 - DNA, 33 bp, Homo sapien
taatatgcaaatgccattggaagtgaagcgaac

SEQ ID NO: 120109 - DNA, 33 bp, Homo sapien
tgaaaattcatcgtcacaccagggcatctatgt

SEQ ID NO: 120110 - DNA, 33 bp, Homo sapien
tgaaaattcatcgtcagaccagggcatctatgt

SEQ ID NO: 120111 - DNA, 33 bp, Homo sapien
gggtatttgcaaagcactgctgaacattaagga

SEQ ID NO: 120112 - DNA, 33 bp, Homo sapien
gggtatttgcaaagcagtgctgaacattaagga

SEQ ID NO: 120113 - DNA, 33 bp, Homo sapien
gttacagaacatgtcaagcttaagctgaaaggg

SEQ ID NO: 120114 - DNA, 33 bp, Homo sapien
gttacagaacatgtcatgcttaagctgaaaggg

SEQ ID NO: 120115 - DNA, 33 bp, Homo sapien
tgaatatgaagtattacagaatttcagatgata

SEQ ID NO: 120116 - DNA, 33 bp, Homo sapien
tgaatatgaagtattagagaatttcagatgata

SEQ ID NO: 120117 - DNA, 33 bp, Homo sapien
ttgtacatttgaagtacgacatctttactcctc

SEQ ID NO: 120118 - DNA, 33 bp, Homo sapien
ttgtacatttgaagtatgacatctttactcctc

SEQ ID NO: 120119 - DNA, 33 bp, Homo sapien
atacccctaacaccagaagaaagcaaggagggg

SEQ ID NO: 120120 - DNA, 33 bp, Homo sapien
atacccctaacaccaggagaaagcaaggagggg

SEQ ID NO: 120121 - DNA, 33 bp, Homo sapien
tgattccatatagtgcacttgctcgttatattc

SEQ ID NO: 120122 - DNA, 33 bp, Homo sapien
tgattccatatagtgcgcttgctcgttatattc

SEQ ID NO: 120123 - DNA, 33 bp, Homo sapien
agtgctccccatcttacggcattctcacatctt

SEQ ID NO: 120124 - DNA, 33 bp, Homo sapien
agtgctccccatcttatggcattctcacatctt

SEQ ID NO: 120125 - DNA, 33 bp, Homo sapien
tccaatgaataaagtcaaaacactcactattga

SEQ ID NO: 120126 - DNA, 33 bp, Homo sapien
tccaatgaataaagtccaaacactcactattga

SEQ ID NO: 120127 - DNA, 33 bp, Homo sapien
acctaagctggctctacgtaggggatcaaataa

SEQ ID NO: 120128 - DNA, 33 bp, Homo sapien
acctaagctggctctatgtaggggatcaaataa

SEQ ID NO: 120129 - DNA, 33 bp, Homo sapien
gtcaggatggattgttcaaagtgatgcctcttg

SEQ ID NO: 120130 - DNA, 33 bp, Homo sapien
gtcaggatggattgtttaaagtgatgcctcttg

SEQ ID NO: 120131 - DNA, 33 bp, Homo sapien
tcatgtgaagtattcacggggggagaaaaaaga

SEQ ID NO: 120132 - DNA, 33 bp, Homo sapien
tcatgtgaagtattcatggggggagaaaaaaga

SEQ ID NO: 120133 - DNA, 33 bp, Homo sapien
ttgcccatccaaggtccacccaccaatggctgc

SEQ ID NO: 120134 - DNA, 33 bp, Homo sapien
ttgcccatccaaggtctacccaccaatggctgc

SEQ ID NO: 120135 - DNA, 33 bp, Homo sapien
aggcatcaataatggcaatagtaatgaaatcaa

SEQ ID NO: 120136 - DNA, 33 bp, Homo sapien
aggcatcaataatggcgatagtaatgaaatcaa

SEQ ID NO: 120137 - DNA, 33 bp, Homo sapien
tagcaccatgctactccccttcattgcaaaccc

SEQ ID NO: 120138 - DNA, 33 bp, Homo sapien
tagcaccatgctactctccttcattgcaaaccc

SEQ ID NO: 120139 - DNA, 33 bp, Homo sapien
cctggcattgatgccgaaacaaggcagtttatt

SEQ ID NO: 120140 - DNA, 33 bp, Homo sapien
cctggcattgatgccggaacaaggcagtttatt

SEQ ID NO: 120141 - DNA, 33 bp, Homo sapien
attgaaaaggccagaccatgttaaagcaaccta

SEQ ID NO: 120142 - DNA, 33 bp, Homo sapien
attgaaaaggccagactatgttaaagcaaccta

SEQ ID NO: 120143 - DNA, 33 bp, Homo sapien
gggtgacagaatccaaatagaaggatcttggaa

SEQ ID NO: 120144 - DNA, 33 bp, Homo sapien
gggtgacagaatccaagtagaaggatcttggaa

SEQ ID NO: 120145 - DNA, 33 bp, Homo sapien
cgggaaaataagcaaacgggagcctgctcaggt

SEQ ID NO: 120146 - DNA, 33 bp, Homo sapien
cgggaaaataagcaaatgggagcctgctcaggt

SEQ ID NO: 120147 - DNA, 33 bp, Homo sapien
ataagtagctagaataacaggccagtgagttgg

SEQ ID NO: 120148 - DNA, 33 bp, Homo sapien
ataagtagctagaataccaggccagtgagttgg

SEQ ID NO: 120149 - DNA, 33 bp, Homo sapien
tataatgggatttgccaccacttttcttccctg

SEQ ID NO: 120150 - DNA, 33 bp, Homo sapien
tataatgggatttgccgccacttttcttccctg

SEQ ID NO: 120151 - DNA, 33 bp, Homo sapien
taccacctcgtagaaacagcttcacaagttata

SEQ ID NO: 120152 - DNA, 33 bp, Homo sapien
taccacctcgtagaaatagcttcacaagttata

SEQ ID NO: 120153 - DNA, 33 bp, Homo sapien
aatcatggctaattcaccgtttgcggccaccct

SEQ ID NO: 120154 - DNA, 33 bp, Homo sapien
aatcatggctaattcatcgtttgcggccaccct

SEQ ID NO: 120155 - DNA, 33 bp, Homo sapien
ccagaatggcttcgtgaaaggcacggcttttta

SEQ ID NO: 120156 - DNA, 33 bp, Homo sapien
ccagaatggcttcgtggaaggcacggcttttta

SEQ ID NO: 120157 - DNA, 33 bp, Homo sapien
tttattcagtatctaccagagaggcattgtaat

SEQ ID NO: 120158 - DNA, 33 bp, Homo sapien
tttattcagtatctactagagaggcattgtaat

SEQ ID NO: 120159 - DNA, 33 bp, Homo sapien
acgcagtgaactatcaatgagtttccagtattg

SEQ ID NO: 120160 - DNA, 33 bp, Homo sapien
acgcagtgaactatcagtgagtttccagtattg

SEQ ID NO: 120161 - DNA, 33 bp, Homo sapien
aagagagatttcctctcaccagcagttccacaa

SEQ ID NO: 120162 - DNA, 33 bp, Homo sapien
aagagagatttcctcttaccagcagttccacaa

SEQ ID NO: 120163 - DNA, 33 bp, Homo sapien
tggccagactggatgacaaagccaacatggtag

SEQ ID NO: 120164 - DNA, 33 bp, Homo sapien
tggccagactggatgataaagccaacatggtag

SEQ ID NO: 120165 - DNA, 33 bp, Homo sapien
tccaagaagtttggcaataatgaaagcttttag

SEQ ID NO: 120166 - DNA, 33 bp, Homo sapien
tccaagaagtttggcagtaatgaaagcttttag

SEQ ID NO: 120167 - DNA, 33 bp, Homo sapien
cctccgagtaccatgaagaaagatgtacatgta

SEQ ID NO: 120168 - DNA, 33 bp, Homo sapien
cctccgagtaccatgaggaaagatgtacatgta

SEQ ID NO: 120169 - DNA, 33 bp, Homo sapien
tacgtaaagttgatgtgaataggcagggagcag

SEQ ID NO: 120170 - DNA, 33 bp, Homo sapien
tacgtaaagttgatgttaataggcagggagcag

SEQ ID NO: 120171 - DNA, 33 bp, Homo sapien
gcagtggttagcctccaaacttcagttcctaca

SEQ ID NO: 120172 - DNA, 33 bp, Homo sapien
gcagtggttagcctccgaacttcagttcctaca

SEQ ID NO: 120173 - DNA, 33 bp, Homo sapien
aagaaaaacctggataacaaccagtctggccga

SEQ ID NO: 120174 - DNA, 33 bp, Homo sapien
aagaaaaacctggatagcaaccagtctggccga

SEQ ID NO: 120175 - DNA, 33 bp, Homo sapien
cgggggaagagccaaaaggactatgtatttaaa

SEQ ID NO: 120176 - DNA, 33 bp, Homo sapien
cgggggaagagccaaagggactatgtatttaaa

SEQ ID NO: 120177 - DNA, 33 bp, Homo sapien
ctgatgtggtcactccccttgattccactccag

SEQ ID NO: 120178 - DNA, 33 bp, Homo sapien
ctgatgtggtcactcctcttgattccactccag

SEQ ID NO: 120179 - DNA, 33 bp, Homo sapien
caaattaaagttagtcaaaagatggagccagtc

SEQ ID NO: 120180 - DNA, 33 bp, Homo sapien
caaattaaagttagtccaaagatggagccagtc

SEQ ID NO: 120181 - DNA, 33 bp, Homo sapien
ggatacaaatgatgcacaagtcatggaatctgc

SEQ ID NO: 120182 - DNA, 33 bp, Homo sapien
ggatacaaatgatgcataagtcatggaatctgc

SEQ ID NO: 120183 - DNA, 33 bp, Homo sapien
taacccattcattgtacgtcctcaattattaat

SEQ ID NO: 120184 - DNA, 33 bp, Homo sapien
taacccattcattgtatgtcctcaattattaat

SEQ ID NO: 120185 - DNA, 33 bp, Homo sapien
gatagaatattagaagccatcgaatctgatctc

SEQ ID NO: 120186 - DNA, 33 bp, Homo sapien
gatagaatattagaagtcatcgaatctgatctc

SEQ ID NO: 120187 - DNA, 33 bp, Homo sapien
ttcatcttattgagctaaaaaatggttgattct

SEQ ID NO: 120188 - DNA, 33 bp, Homo sapien
ttcatcttattgagctgaaaaatggttgattct

SEQ ID NO: 120189 - DNA, 33 bp, Homo sapien
cataccaactgtagaacaaatatgggaagggac

SEQ ID NO: 120190 - DNA, 33 bp, Homo sapien
cataccaactgtagaataaatatgggaagggac

SEQ ID NO: 120191 - DNA, 33 bp, Homo sapien
ttcctccctggcctcaatctattgtccttttcc

SEQ ID NO: 120192 - DNA, 33 bp, Homo sapien
ttcctccctggcctcagtctattgtccttttcc

SEQ ID NO: 120193 - DNA, 33 bp, Homo sapien
aactgaggaagtaacaacccaaggattcggtga

SEQ ID NO: 120194 - DNA, 33 bp, Homo sapien
aactgaggaagtaacaccccaaggattcggtga

SEQ ID NO: 120195 - DNA, 33 bp, Homo sapien
ttgattgtaccctttacgtcactgccattccta

SEQ ID NO: 120196 - DNA, 33 bp, Homo sapien
ttgattgtaccctttatgtcactgccattccta

SEQ ID NO: 120197 - DNA, 33 bp, Homo sapien
ggccaaacatgaaataaggttaggtgtaaattg

SEQ ID NO: 120198 - DNA, 33 bp, Homo sapien
ggccaaacatgaaatagggttaggtgtaaattg

SEQ ID NO: 120199 - DNA, 33 bp, Homo sapien
ccagcctagggacacactgtcagaaaacatcac

SEQ ID NO: 120200 - DNA, 33 bp, Homo sapien
ccagcctagggacacattgtcagaaaacatcac

SEQ ID NO: 120201 - DNA, 33 bp, Homo sapien
ctttcctgccttttaaggtaaccatgttgactg

SEQ ID NO: 120202 - DNA, 33 bp, Homo sapien
ctttcctgccttttaatgtaaccatgttgactg

SEQ ID NO: 120203 - DNA, 33 bp, Homo sapien
aagaatctacattgcaaaaacaaaatgccaaag

SEQ ID NO: 120204 - DNA, 33 bp, Homo sapien
aagaatctacattgcacaaacaaaatgccaaag

SEQ ID NO: 120205 - DNA, 33 bp, Homo sapien
tggctatttccaaaccacctgctactataggta

SEQ ID NO: 120206 - DNA, 33 bp, Homo sapien
tggctatttccaaaccgcctgctactataggta

SEQ ID NO: 120207 - DNA, 33 bp, Homo sapien
aaagcaaagttgtggacaagataaagtagtaag

SEQ ID NO: 120208 - DNA, 33 bp, Homo sapien
aaagcaaagttgtggagaagataaagtagtaag

SEQ ID NO: 120209 - DNA, 33 bp, Homo sapien
ggggcttctcatttcaaaagaaattatctctgc

SEQ ID NO: 120210 - DNA, 33 bp, Homo sapien
ggggcttctcatttcagaagaaattatctctgc

SEQ ID NO: 120211 - DNA, 33 bp, Homo sapien
cactcaagagttaaaaactgcataaagtagaag

SEQ ID NO: 120212 - DNA, 33 bp, Homo sapien
cactcaagagttaaaagctgcataaagtagaag

SEQ ID NO: 120213 - DNA, 33 bp, Homo sapien
gttccctagagcatcccgaaaattattagtggc

SEQ ID NO: 120214 - DNA, 33 bp, Homo sapien
gttccctagagcatcctgaaaattattagtggc

SEQ ID NO: 120215 - DNA, 33 bp, Homo sapien
gtccctggacactcctcactctccatcaaggag

SEQ ID NO: 120216 - DNA, 33 bp, Homo sapien
gtccctggacactccttactctccatcaaggag

SEQ ID NO: 120217 - DNA, 33 bp, Homo sapien
cctcttcttataagggaaacagccagatggatt

SEQ ID NO: 120218 - DNA, 33 bp, Homo sapien
cctcttcttataagggcaacagccagatggatt

SEQ ID NO: 120219 - DNA, 33 bp, Homo sapien
ctactgctaactagaaaccaatacaaaatctga

SEQ ID NO: 120220 - DNA, 33 bp, Homo sapien
ctactgctaactagaagccaatacaaaatctga

SEQ ID NO: 120221 - DNA, 33 bp, Homo sapien
ccattaactgagataccacctcttccttagtat

SEQ ID NO: 120222 - DNA, 33 bp, Homo sapien
ccattaactgagatacgacctcttccttagtat

SEQ ID NO: 120223 - DNA, 33 bp, Homo sapien
aagtgctctgaactcacgaagtaactgggcttt

SEQ ID NO: 120224 - DNA, 33 bp, Homo sapien
aagtgctctgaactcatgaagtaactgggcttt

SEQ ID NO: 120225 - DNA, 33 bp, Homo sapien
tcagattctctacaaacagagtggggactgggt

SEQ ID NO: 120226 - DNA, 33 bp, Homo sapien
tcagattctctacaaatagagtggggactgggt

SEQ ID NO: 120227 - DNA, 33 bp, Homo sapien
gacagagttctcaaaacctgatgggaattactg

SEQ ID NO: 120228 - DNA, 33 bp, Homo sapien
gacagagttctcaaaatctgatgggaattactg

SEQ ID NO: 120229 - DNA, 33 bp, Homo sapien
gccttgacagatggtaagcaattttactctggg

SEQ ID NO: 120230 - DNA, 33 bp, Homo sapien
gccttgacagatggtaggcaattttactctggg

SEQ ID NO: 120231 - DNA, 33 bp, Homo sapien
tgcagaatgcctatgcactatctgcaattgtga

SEQ ID NO: 120232 - DNA, 33 bp, Homo sapien
tgcagaatgcctatgcgctatctgcaattgtga

SEQ ID NO: 120233 - DNA, 33 bp, Homo sapien
gagctgagtaccctacacccaagaaggtttgcc

SEQ ID NO: 120234 - DNA, 33 bp, Homo sapien
gagctgagtaccctacgcccaagaaggtttgcc

SEQ ID NO: 120235 - DNA, 33 bp, Homo sapien
tgtatatacctgcaatgatcactttaggaaata

SEQ ID NO: 120236 - DNA, 33 bp, Homo sapien
tgtatatacctgcaattatcactttaggaaata

SEQ ID NO: 120237 - DNA, 33 bp, Homo sapien
taaagtgccattcacaaaaagaagattccctat

SEQ ID NO: 120238 - DNA, 33 bp, Homo sapien
taaagtgccattcacagaaagaagattccctat

SEQ ID NO: 120239 - DNA, 33 bp, Homo sapien
gttaaggatacctatacgtcaggccctaaccaa

SEQ ID NO: 120240 - DNA, 33 bp, Homo sapien
gttaaggatacctatatgtcaggccctaaccaa

SEQ ID NO: 120241 - DNA, 33 bp, Homo sapien
ttgttgccttaggccaccttacaccaaaccatt

SEQ ID NO: 120242 - DNA, 33 bp, Homo sapien
ttgttgccttaggccatcttacaccaaaccatt

SEQ ID NO: 120243 - DNA, 33 bp, Homo sapien
tgcgtctgtgcgtgtgaagaggaaggtggtaaa

SEQ ID NO: 120244 - DNA, 33 bp, Homo sapien
tgcgtctgtgcgtgtgtagaggaaggtggtaaa

SEQ ID NO: 120245 - DNA, 33 bp, Homo sapien
atgatttactaaatgaaaaaaatgtagaccaga

SEQ ID NO: 120246 - DNA, 33 bp, Homo sapien
atgatttactaaatgacaaaaatgtagaccaga

SEQ ID NO: 120247 - DNA, 33 bp, Homo sapien
gttcagaggtgcatacagggcgcttggattctg

SEQ ID NO: 120248 - DNA, 33 bp, Homo sapien
gttcagaggtgcatacggggcgcttggattctg

SEQ ID NO: 120249 - DNA, 33 bp, Homo sapien
ctgtttaataagctgaaatagctgtacctaaaa

SEQ ID NO: 120250 - DNA, 33 bp, Homo sapien
ctgtttaataagctgatatagctgtacctaaaa

SEQ ID NO: 120251 - DNA, 33 bp, Homo sapien
tacctagaacagtcacaaaacaagataaagaga

SEQ ID NO: 120252 - DNA, 33 bp, Homo sapien
tacctagaacagtcacgaaacaagataaagaga

SEQ ID NO: 120253 - DNA, 33 bp, Homo sapien
ctgttcagcagagtgactattcctgagacttgg

SEQ ID NO: 120254 - DNA, 33 bp, Homo sapien
ctgttcagcagagtgattattcctgagacttgg

SEQ ID NO: 120255 - DNA, 33 bp, Homo sapien
atccaatgatcaagaaagaaaaggggttctatc

SEQ ID NO: 120256 - DNA, 33 bp, Homo sapien
atccaatgatcaagaaggaaaaggggttctatc

SEQ ID NO: 120257 - DNA, 33 bp, Homo sapien
tcatcttgagctatcacgagccttaagtcccca

SEQ ID NO: 120258 - DNA, 33 bp, Homo sapien
tcatcttgagctatcatgagccttaagtcccca

SEQ ID NO: 120259 - DNA, 33 bp, Homo sapien
caagatacattctttcccctgtagaggcttttg

SEQ ID NO: 120260 - DNA, 33 bp, Homo sapien
caagatacattctttctcctgtagaggcttttg

SEQ ID NO: 120261 - DNA, 33 bp, Homo sapien
tgacgtggaaactggaccatctttgtattggtc

SEQ ID NO: 120262 - DNA, 33 bp, Homo sapien
tgacgtggaaactggatcatctttgtattggtc

SEQ ID NO: 120263 - DNA, 33 bp, Homo sapien
caagaaagctgttcaaatacaacgtgtgaggct

SEQ ID NO: 120264 - DNA, 33 bp, Homo sapien
caagaaagctgttcaagtacaacgtgtgaggct

SEQ ID NO: 120265 - DNA, 33 bp, Homo sapien
catgagtcccaggcaggcacattcaattctaaa

SEQ ID NO: 120266 - DNA, 33 bp, Homo sapien
catgagtcccaggcagtcacattcaattctaaa

SEQ ID NO: 120267 - DNA, 33 bp, Homo sapien
tgttctggaacttggcaaacttggtgatgatct

SEQ ID NO: 120268 - DNA, 33 bp, Homo sapien
tgttctggaacttggcgaacttggtgatgatct

SEQ ID NO: 120269 - DNA, 33 bp, Homo sapien
aagacagaacaaaagcaaagtgaagttagaaag

SEQ ID NO: 120270 - DNA, 33 bp, Homo sapien
aagacagaacaaaagcgaagtgaagttagaaag

SEQ ID NO: 120271 - DNA, 33 bp, Homo sapien
cagaattggtagaaaaccaaaactagctcatct

SEQ ID NO: 120272 - DNA, 33 bp, Homo sapien
cagaattggtagaaaatcaaaactagctcatct

SEQ ID NO: 120273 - DNA, 33 bp, Homo sapien
gctcagatcagtacaaacttttgcctcttcata

SEQ ID NO: 120274 - DNA, 33 bp, Homo sapien
gctcagatcagtacaaccttttgcctcttcata

SEQ ID NO: 120275 - DNA, 33 bp, Homo sapien
gcagaccctgcaaacaatctatctcggagacag

SEQ ID NO: 120276 - DNA, 33 bp, Homo sapien
gcagaccctgcaaacagtctatctcggagacag

SEQ ID NO: 120277 - DNA, 33 bp, Homo sapien
cactgatggctgatgaccagttccatagctggc

SEQ ID NO: 120278 - DNA, 33 bp, Homo sapien
cactgatggctgatgagcagttccatagctggc

SEQ ID NO: 120279 - DNA, 33 bp, Homo sapien
atgtgtccttgccttaaactatcgtctgcagag

SEQ ID NO: 120280 - DNA, 33 bp, Homo sapien
atgtgtccttgccttacactatcgtctgcagag

SEQ ID NO: 120281 - DNA, 33 bp, Homo sapien
ggtgatggtcccaggaaagaatggtgagcagca

SEQ ID NO: 120282 - DNA, 33 bp, Homo sapien
ggtgatggtcccaggagagaatggtgagcagca

SEQ ID NO: 120283 - DNA, 33 bp, Homo sapien
agcatcaagggtagtcaaagttgaaatagagaa

SEQ ID NO: 120284 - DNA, 33 bp, Homo sapien
agcatcaagggtagtcgaagttgaaatagagaa

SEQ ID NO: 120285 - DNA, 33 bp, Homo sapien
atcatttatttgcacccgaatggtacatttctg

SEQ ID NO: 120286 - DNA, 33 bp, Homo sapien
atcatttatttgcacctgaatggtacatttctg

SEQ ID NO: 120287 - DNA, 33 bp, Homo sapien
atgccattatttgtccaccatcaaaatatcaag

SEQ ID NO: 120288 - DNA, 33 bp, Homo sapien
atgccattatttgtcccccatcaaaatatcaag

SEQ ID NO: 120289 - DNA, 33 bp, Homo sapien
atggaagcagatgtcaagaaagaagtgttagga

SEQ ID NO: 120290 - DNA, 33 bp, Homo sapien
atggaagcagatgtcaggaaagaagtgttagga

SEQ ID NO: 120291 - DNA, 33 bp, Homo sapien
gtgctaagttgaaatacggcaagatcattcatt

SEQ ID NO: 120292 - DNA, 33 bp, Homo sapien
gtgctaagttgaaatatggcaagatcattcatt

SEQ ID NO: 120293 - DNA, 33 bp, Homo sapien
aacaggaccattatcacagagtttgacataatg

SEQ ID NO: 120294 - DNA, 33 bp, Homo sapien
aacaggaccattatcatagagtttgacataatg

SEQ ID NO: 120295 - DNA, 33 bp, Homo sapien
caaagaaccatccaaccgagtccaaactgccaa

SEQ ID NO: 120296 - DNA, 33 bp, Homo sapien
caaagaaccatccaactgagtccaaactgccaa

SEQ ID NO: 120297 - DNA, 33 bp, Homo sapien
gaaagtggttactggacagtcccatctcccttg

SEQ ID NO: 120298 - DNA, 33 bp, Homo sapien
gaaagtggttactggatagtcccatctcccttg

SEQ ID NO: 120299 - DNA, 33 bp, Homo sapien
gattaccctgggcttcactgctgaatgcaatgc

SEQ ID NO: 120300 - DNA, 33 bp, Homo sapien
gattaccctgggcttcgctgctgaatgcaatgc

SEQ ID NO: 120301 - DNA, 33 bp, Homo sapien
agttatctctccttcaatatcaagataaggatt

SEQ ID NO: 120302 - DNA, 33 bp, Homo sapien
agttatctctccttcagtatcaagataaggatt

SEQ ID NO: 120303 - DNA, 33 bp, Homo sapien
tttctcatttgagaaactgattatctagtcaat

SEQ ID NO: 120304 - DNA, 33 bp, Homo sapien
tttctcatttgagaaattgattatctagtcaat

SEQ ID NO: 120305 - DNA, 33 bp, Homo sapien
aatttcccatcacttgaagtctttagttacagc

SEQ ID NO: 120306 - DNA, 33 bp, Homo sapien
aatttcccatcacttgtagtctttagttacagc

SEQ ID NO: 120307 - DNA, 33 bp, Homo sapien
tgttggagagtatgtagatctacaggaaccctg

SEQ ID NO: 120308 - DNA, 33 bp, Homo sapien
tgttggagagtatgtatatctacaggaaccctg

SEQ ID NO: 120309 - DNA, 33 bp, Homo sapien
tccgctgcatctggaaacacttcatattcccat

SEQ ID NO: 120310 - DNA, 33 bp, Homo sapien
tccgctgcatctggaaccacttcatattcccat

SEQ ID NO: 120311 - DNA, 33 bp, Homo sapien
ggtagcccccccaaaagatatcgctccatccta

SEQ ID NO: 120312 - DNA, 33 bp, Homo sapien
ggtagcccccccaaaatatatcgctccatccta

SEQ ID NO: 120313 - DNA, 33 bp, Homo sapien
tgatcagaatgtgctcagagacatagggaaatg

SEQ ID NO: 120314 - DNA, 33 bp, Homo sapien
tgatcagaatgtgctcggagacatagggaaatg

SEQ ID NO: 120315 - DNA, 33 bp, Homo sapien
gggaaaagccctgcaactactgcaaggtcctac

SEQ ID NO: 120316 - DNA, 33 bp, Homo sapien
gggaaaagccctgcaattactgcaaggtcctac

SEQ ID NO: 120317 - DNA, 33 bp, Homo sapien
gatgctactggcccatcaactacgaccccggga

SEQ ID NO: 120318 - DNA, 33 bp, Homo sapien
gatgctactggcccatgaactacgaccccggga

SEQ ID NO: 120319 - DNA, 33 bp, Homo sapien
aacctatatttctggcaaaaatgagatcatagt

SEQ ID NO: 120320 - DNA, 33 bp, Homo sapien
aacctatatttctggccaaaatgagatcatagt

SEQ ID NO: 120321 - DNA, 33 bp, Homo sapien
ctaaaggaagatctaaatggcattataagaagc

SEQ ID NO: 120322 - DNA, 33 bp, Homo sapien
ctaaaggaagatctaagtggcattataagaagc

SEQ ID NO: 120323 - DNA, 33 bp, Homo sapien
acaaatgcaaagatgccaaactataagtgagat

SEQ ID NO: 120324 - DNA, 33 bp, Homo sapien
acaaatgcaaagatgctaaactataagtgagat

SEQ ID NO: 120325 - DNA, 33 bp, Homo sapien
aaacactacagctttccatgaagccagataaaa

SEQ ID NO: 120326 - DNA, 33 bp, Homo sapien
aaacactacagctttctatgaagccagataaaa

SEQ ID NO: 120327 - DNA, 33 bp, Homo sapien
ggcaaagtttaggaaacttacacacaagcaatg

SEQ ID NO: 120328 - DNA, 33 bp, Homo sapien
ggcaaagtttaggaaagttacacacaagcaatg

SEQ ID NO: 120329 - DNA, 33 bp, Homo sapien
tgagggtctcagagacaatatgctttttattaa

SEQ ID NO: 120330 - DNA, 33 bp, Homo sapien
tgagggtctcagagaccatatgctttttattaa

SEQ ID NO: 120331 - DNA, 33 bp, Homo sapien
gttgaaaaaaataacactggaaatagtcataaa

SEQ ID NO: 120332 - DNA, 33 bp, Homo sapien
gttgaaaaaaataacattggaaatagtcataaa

SEQ ID NO: 120333 - DNA, 33 bp, Homo sapien
gactatagttaaccagaatctatccaaatatcg

SEQ ID NO: 120334 - DNA, 33 bp, Homo sapien
gactatagttaaccaggatctatccaaatatcg

SEQ ID NO: 120335 - DNA, 33 bp, Homo sapien
ttagcttgctgggaccacttggaaccatgatct

SEQ ID NO: 120336 - DNA, 33 bp, Homo sapien
ttagcttgctgggaccgcttggaaccatgatct

SEQ ID NO: 120337 - DNA, 33 bp, Homo sapien
cttctacaatgccttacaaaaatggtcttccag

SEQ ID NO: 120338 - DNA, 33 bp, Homo sapien
cttctacaatgccttataaaaatggtcttccag

SEQ ID NO: 120339 - DNA, 33 bp, Homo sapien
atggtcactaaacctgaataccaggcacagttt

SEQ ID NO: 120340 - DNA, 33 bp, Homo sapien
atggtcactaaacctggataccaggcacagttt

SEQ ID NO: 120341 - DNA, 33 bp, Homo sapien
aataggtttctggaagactaagctgcagagcca

SEQ ID NO: 120342 - DNA, 33 bp, Homo sapien
aataggtttctggaaggctaagctgcagagcca

SEQ ID NO: 120343 - DNA, 33 bp, Homo sapien
aatctcaattgattgacgagttcttaaaataac

SEQ ID NO: 120344 - DNA, 33 bp, Homo sapien
aatctcaattgattgatgagttcttaaaataac

SEQ ID NO: 120345 - DNA, 33 bp, Homo sapien
acaattagacccacatcatggagagaagagagg

SEQ ID NO: 120346 - DNA, 33 bp, Homo sapien
acaattagacccacatgatggagagaagagagg

SEQ ID NO: 120347 - DNA, 33 bp, Homo sapien
cttccatcattcagaccctaggctgttttgttt

SEQ ID NO: 120348 - DNA, 33 bp, Homo sapien
cttccatcattcagacgctaggctgttttgttt

SEQ ID NO: 120349 - DNA, 33 bp, Homo sapien
gccagttcaaaataacccaccagttctcaatat

SEQ ID NO: 120350 - DNA, 33 bp, Homo sapien
gccagttcaaaataacgcaccagttctcaatat

SEQ ID NO: 120351 - DNA, 33 bp, Homo sapien
accctgagagtcatcacgtggtgttctcctgct

SEQ ID NO: 120352 - DNA, 33 bp, Homo sapien
accctgagagtcatcatgtggtgttctcctgct

SEQ ID NO: 120353 - DNA, 33 bp, Homo sapien
tttcctgactccgttcaaccatctactgtcttt

SEQ ID NO: 120354 - DNA, 33 bp, Homo sapien
tttcctgactccgttctaccatctactgtcttt

SEQ ID NO: 120355 - DNA, 33 bp, Homo sapien
atatatttgggtctggaatctctcaaggaaata

SEQ ID NO: 120356 - DNA, 33 bp, Homo sapien
atatatttgggtctggcatctctcaaggaaata

SEQ ID NO: 120357 - DNA, 33 bp, Homo sapien
actttccatctattaaactattttccaccattt

SEQ ID NO: 120358 - DNA, 33 bp, Homo sapien
actttccatctattaagctattttccaccattt

SEQ ID NO: 120359 - DNA, 33 bp, Homo sapien
cttgaatatatccaagactccaggttcattgtg

SEQ ID NO: 120360 - DNA, 33 bp, Homo sapien
cttgaatatatccaagcctccaggttcattgtg

SEQ ID NO: 120361 - DNA, 33 bp, Homo sapien
cagttgagatatgccacgtgtagccttctcgtc

SEQ ID NO: 120362 - DNA, 33 bp, Homo sapien
cagttgagatatgccatgtgtagccttctcgtc

SEQ ID NO: 120363 - DNA, 33 bp, Homo sapien
aatgttgcagatagaacctaaaagaatgttgtg

SEQ ID NO: 120364 - DNA, 33 bp, Homo sapien
aatgttgcagatagaatctaaaagaatgttgtg

SEQ ID NO: 120365 - DNA, 33 bp, Homo sapien
gcattgctgggtcataaaaaaaaacatactatg

SEQ ID NO: 120366 - DNA, 33 bp, Homo sapien
gcattgctgggtcatataaaaaaacatactatg

SEQ ID NO: 120367 - DNA, 33 bp, Homo sapien
cctgtggtctgtatcaagttctttcagtgcatc

SEQ ID NO: 120368 - DNA, 33 bp, Homo sapien
cctgtggtctgtatcaggttctttcagtgcatc

SEQ ID NO: 120369 - DNA, 33 bp, Homo sapien
tcactcggtgattaccaaaactgataaatgcat

SEQ ID NO: 120370 - DNA, 33 bp, Homo sapien
tcactcggtgattaccgaaactgataaatgcat

SEQ ID NO: 120371 - DNA, 33 bp, Homo sapien
gctggaaggaagagtcaaaaaagtagagggaga

SEQ ID NO: 120372 - DNA, 33 bp, Homo sapien
gctggaaggaagagtcgaaaaagtagagggaga

SEQ ID NO: 120373 - DNA, 33 bp, Homo sapien
agacagagaagggctacgaatctggtttttctc

SEQ ID NO: 120374 - DNA, 33 bp, Homo sapien
agacagagaagggctatgaatctggtttttctc

SEQ ID NO: 120375 - DNA, 33 bp, Homo sapien
aagataaagcacaaggacaagaacaggtagaac

SEQ ID NO: 120376 - DNA, 33 bp, Homo sapien
aagataaagcacaagggcaagaacaggtagaac

SEQ ID NO: 120377 - DNA, 33 bp, Homo sapien
gggttccacatgttacagctctcatgaaaacca

SEQ ID NO: 120378 - DNA, 33 bp, Homo sapien
gggttccacatgttacggctctcatgaaaacca

SEQ ID NO: 120379 - DNA, 33 bp, Homo sapien
caagcacagggagatacaggatcatgctggacg

SEQ ID NO: 120380 - DNA, 33 bp, Homo sapien
caagcacagggagatataggatcatgctggacg

SEQ ID NO: 120381 - DNA, 33 bp, Homo sapien
catcatgaagactttaacacatctcctatgaaa

SEQ ID NO: 120382 - DNA, 33 bp, Homo sapien
catcatgaagactttagcacatctcctatgaaa

SEQ ID NO: 120383 - DNA, 33 bp, Homo sapien
tggggtttggtcattaactgaagggttgcctag

SEQ ID NO: 120384 - DNA, 33 bp, Homo sapien
tggggtttggtcattagctgaagggttgcctag

SEQ ID NO: 120385 - DNA, 33 bp, Homo sapien
gagcaggcgctatgtaagaagtgttggttctct

SEQ ID NO: 120386 - DNA, 33 bp, Homo sapien
gagcaggcgctatgtaggaagtgttggttctct

SEQ ID NO: 120387 - DNA, 33 bp, Homo sapien
agtgccttcactgaaaaaagtggttgtggatgg

SEQ ID NO: 120388 - DNA, 33 bp, Homo sapien
agtgccttcactgaaagaagtggttgtggatgg

SEQ ID NO: 120389 - DNA, 33 bp, Homo sapien
aaaagttcttagggaacgtaatgtccatgagat

SEQ ID NO: 120390 - DNA, 33 bp, Homo sapien
aaaagttcttagggaatgtaatgtccatgagat

SEQ ID NO: 120391 - DNA, 33 bp, Homo sapien
tggcagtgctgtccttaaaattcaactcaactc

SEQ ID NO: 120392 - DNA, 33 bp, Homo sapien
tggcagtgctgtccttcaaattcaactcaactc

SEQ ID NO: 120393 - DNA, 33 bp, Homo sapien
attcaggtgagaaaaccatcagaaacatcatct

SEQ ID NO: 120394 - DNA, 33 bp, Homo sapien
attcaggtgagaaaacgatcagaaacatcatct

SEQ ID NO: 120395 - DNA, 33 bp, Homo sapien
cacagttccagcgggacgccaaacatctgggct

SEQ ID NO: 120396 - DNA, 33 bp, Homo sapien
cacagttccagcgggatgccaaacatctgggct

SEQ ID NO: 120397 - DNA, 33 bp, Homo sapien
taggttactctaatggccaccagggtacttttc

SEQ ID NO: 120398 - DNA, 33 bp, Homo sapien
taggttactctaatggtcaccagggtacttttc

SEQ ID NO: 120399 - DNA, 33 bp, Homo sapien
cttccatgtgaggagaaggtagttagtgataag

SEQ ID NO: 120400 - DNA, 33 bp, Homo sapien
cttccatgtgaggagagggtagttagtgataag

SEQ ID NO: 120401 - DNA, 33 bp, Homo sapien
tatacagtaatgttcacagcgttgtttacagaa

SEQ ID NO: 120402 - DNA, 33 bp, Homo sapien
tatacagtaatgttcatagcgttgtttacagaa

SEQ ID NO: 120403 - DNA, 33 bp, Homo sapien
ccaccaagatcaaggccgacaaataaaactgaa

SEQ ID NO: 120404 - DNA, 33 bp, Homo sapien
ccaccaagatcaaggctgacaaataaaactgaa

SEQ ID NO: 120405 - DNA, 33 bp, Homo sapien
tcagagctgtggtggcaagtttcgaatggtgag

SEQ ID NO: 120406 - DNA, 33 bp, Homo sapien
tcagagctgtggtggcgagtttcgaatggtgag

SEQ ID NO: 120407 - DNA, 33 bp, Homo sapien
ttaggcttaattctcagaagtagaacatatcta

SEQ ID NO: 120408 - DNA, 33 bp, Homo sapien
ttaggcttaattctcataagtagaacatatcta

SEQ ID NO: 120409 - DNA, 33 bp, Homo sapien
actacaattgtctgctaaacaaactacagagga

SEQ ID NO: 120410 - DNA, 33 bp, Homo sapien
actacaattgtctgctgaacaaactacagagga

SEQ ID NO: 120411 - DNA, 33 bp, Homo sapien
ttcctgactatgcagcaagtacagatcctccca

SEQ ID NO: 120412 - DNA, 33 bp, Homo sapien
ttcctgactatgcagcgagtacagatcctccca

SEQ ID NO: 120413 - DNA, 33 bp, Homo sapien
atgccaccttctcagcaacggttccctcatcat

SEQ ID NO: 120414 - DNA, 33 bp, Homo sapien
atgccaccttctcagcgacggttccctcatcat

SEQ ID NO: 120415 - DNA, 33 bp, Homo sapien
tcacctggacaagtgacacaaagtggtaaactg

SEQ ID NO: 120416 - DNA, 33 bp, Homo sapien
tcacctggacaagtgatacaaagtggtaaactg

SEQ ID NO: 120417 - DNA, 33 bp, Homo sapien
ggcagtgatattattacgactacttgatctcta

SEQ ID NO: 120418 - DNA, 33 bp, Homo sapien
ggcagtgatattattatgactacttgatctcta

SEQ ID NO: 120419 - DNA, 33 bp, Homo sapien
taatacattgaactccaatattttggaatactg

SEQ ID NO: 120420 - DNA, 33 bp, Homo sapien
taatacattgaactcctatattttggaatactg

SEQ ID NO: 120421 - DNA, 33 bp, Homo sapien
caggataataccgtcaggacctttgagtagaca

SEQ ID NO: 120422 - DNA, 33 bp, Homo sapien
caggataataccgtcatgacctttgagtagaca

SEQ ID NO: 120423 - DNA, 33 bp, Homo sapien
ccctgcaaccctcatgcagataatatgataata

SEQ ID NO: 120424 - DNA, 33 bp, Homo sapien
ccctgcaaccctcatgtagataatatgataata

SEQ ID NO: 120425 - DNA, 33 bp, Homo sapien
tctgaatgatactgccaacactcctaaggtagc

SEQ ID NO: 120426 - DNA, 33 bp, Homo sapien
tctgaatgatactgccgacactcctaaggtagc

SEQ ID NO: 120427 - DNA, 33 bp, Homo sapien
cacagggctcatgtggaaccccaagtggcctgg

SEQ ID NO: 120428 - DNA, 33 bp, Homo sapien
cacagggctcatgtggcaccccaagtggcctgg

SEQ ID NO: 120429 - DNA, 33 bp, Homo sapien
gctttagcaatgaccaccatcccttaggttggt

SEQ ID NO: 120430 - DNA, 33 bp, Homo sapien
gctttagcaatgaccatcatcccttaggttggt

SEQ ID NO: 120431 - DNA, 33 bp, Homo sapien
taagtttaaagaataaccaaagcccagtgtttg

SEQ ID NO: 120432 - DNA, 33 bp, Homo sapien
taagtttaaagaataagcaaagcccagtgtttg

SEQ ID NO: 120433 - DNA, 33 bp, Homo sapien
aaaagaaatgctcatcaaaattagtactttcta

SEQ ID NO: 120434 - DNA, 33 bp, Homo sapien
aaaagaaatgctcatcgaaattagtactttcta

SEQ ID NO: 120435 - DNA, 33 bp, Homo sapien
aactaccattatctaacccgcaaagtactagtc

SEQ ID NO: 120436 - DNA, 33 bp, Homo sapien
aactaccattatctaatccgcaaagtactagtc

SEQ ID NO: 120437 - DNA, 33 bp, Homo sapien
tactgcctgcttttagaaaaggtctctgctgct

SEQ ID NO: 120438 - DNA, 33 bp, Homo sapien
tactgcctgcttttaggaaaggtctctgctgct

SEQ ID NO: 120439 - DNA, 33 bp, Homo sapien
attcaactgaatatgaaaaagtgctaacatttt

SEQ ID NO: 120440 - DNA, 33 bp, Homo sapien
attcaactgaatatgagaaagtgctaacatttt

SEQ ID NO: 120441 - DNA, 33 bp, Homo sapien
aaatatttagaaataactgaagtccctcacatt

SEQ ID NO: 120442 - DNA, 33 bp, Homo sapien
aaatatttagaaataattgaagtccctcacatt

SEQ ID NO: 120443 - DNA, 33 bp, Homo sapien
tacagaaaaaagtgcacataattgtctctgaaa

SEQ ID NO: 120444 - DNA, 33 bp, Homo sapien
tacagaaaaaagtgcatataattgtctctgaaa

SEQ ID NO: 120445 - DNA, 33 bp, Homo sapien
tttaaaagagagttaagtgttctggaccccaca

SEQ ID NO: 120446 - DNA, 33 bp, Homo sapien
tttaaaagagagttaattgttctggaccccaca

SEQ ID NO: 120447 - DNA, 33 bp, Homo sapien
gacactgctactttcactatggaagtaatatga

SEQ ID NO: 120448 - DNA, 33 bp, Homo sapien
gacactgctactttcattatggaagtaatatga

SEQ ID NO: 120449 - DNA, 33 bp, Homo sapien
gagactttgatattagccagggcctttaggaat

SEQ ID NO: 120450 - DNA, 33 bp, Homo sapien
gagactttgatattagtcagggcctttaggaat

SEQ ID NO: 120451 - DNA, 33 bp, Homo sapien
aaaatagtgggaaaaccatctcaacacacccca

SEQ ID NO: 120452 - DNA, 33 bp, Homo sapien
aaaatagtgggaaaacgatctcaacacacccca

SEQ ID NO: 120453 - DNA, 33 bp, Homo sapien
agttcgacattaatgaatcaacaaaatatctta

SEQ ID NO: 120454 - DNA, 33 bp, Homo sapien
agttcgacattaatgagtcaacaaaatatctta

SEQ ID NO: 120455 - DNA, 33 bp, Homo sapien
cagtattaaatatccaatgcaggctggttcagg

SEQ ID NO: 120456 - DNA, 33 bp, Homo sapien
cagtattaaatatccagtgcaggctggttcagg

SEQ ID NO: 120457 - DNA, 33 bp, Homo sapien
actcctgaaaaaaaaaatgcagattctgattca

SEQ ID NO: 120458 - DNA, 33 bp, Homo sapien
actcctgaaaaaaaaattgcagattctgattca

SEQ ID NO: 120459 - DNA, 33 bp, Homo sapien
tcaatttatttagtctcacaaaagcaagtatat

SEQ ID NO: 120460 - DNA, 33 bp, Homo sapien
tcaatttatttagtcttacaaaagcaagtatat

SEQ ID NO: 120461 - DNA, 33 bp, Homo sapien
ccagccagtgattaaaagacatttgttccagaa

SEQ ID NO: 120462 - DNA, 33 bp, Homo sapien
ccagccagtgattaaacgacatttgttccagaa

SEQ ID NO: 120463 - DNA, 33 bp, Homo sapien
gctgaggatttatctaagttacttcaattgccc

SEQ ID NO: 120464 - DNA, 33 bp, Homo sapien
gctgaggatttatctacgttacttcaattgccc

SEQ ID NO: 120465 - DNA, 33 bp, Homo sapien
cagtttgatagaagtaaccttgaatctataaat

SEQ ID NO: 120466 - DNA, 33 bp, Homo sapien
cagtttgatagaagtagccttgaatctataaat

SEQ ID NO: 120467 - DNA, 33 bp, Homo sapien
tagcaagattggagaaatgttcatggattaata

SEQ ID NO: 120468 - DNA, 33 bp, Homo sapien
tagcaagattggagaagtgttcatggattaata

SEQ ID NO: 120469 - DNA, 33 bp, Homo sapien
ctgaaggtgatagaaccactatttgaacccagt

SEQ ID NO: 120470 - DNA, 33 bp, Homo sapien
ctgaaggtgatagaactactatttgaacccagt

SEQ ID NO: 120471 - DNA, 33 bp, Homo sapien
ggagggaagttcaaataatgcaaaaattggcac

SEQ ID NO: 120472 - DNA, 33 bp, Homo sapien
ggagggaagttcaaatcatgcaaaaattggcac

SEQ ID NO: 120473 - DNA, 33 bp, Homo sapien
aaaaaaatgagctgtccattaccttgcaaagac

SEQ ID NO: 120474 - DNA, 33 bp, Homo sapien
aaaaaaatgagctgtctattaccttgcaaagac

SEQ ID NO: 120475 - DNA, 33 bp, Homo sapien
gttaaatagactatcactgaagagagaatatta

SEQ ID NO: 120476 - DNA, 33 bp, Homo sapien
gttaaatagactatcattgaagagagaatatta

SEQ ID NO: 120477 - DNA, 33 bp, Homo sapien
gtcttcctatgagcaaactctgaaaatggtggt

SEQ ID NO: 120478 - DNA, 33 bp, Homo sapien
gtcttcctatgagcaatctctgaaaatggtggt

SEQ ID NO: 120479 - DNA, 33 bp, Homo sapien
ctgtacaaggcagcaactctttttctctggtct

SEQ ID NO: 120480 - DNA, 33 bp, Homo sapien
ctgtacaaggcagcaattctttttctctggtct

SEQ ID NO: 120481 - DNA, 33 bp, Homo sapien
aagtgcatagcctagacgaacttggagctgtga

SEQ ID NO: 120482 - DNA, 33 bp, Homo sapien
aagtgcatagcctagaggaacttggagctgtga

SEQ ID NO: 120483 - DNA, 33 bp, Homo sapien
ttgtcttcttacatggaaaaaggtcactaattt

SEQ ID NO: 120484 - DNA, 33 bp, Homo sapien
ttgtcttcttacatgggaaaaggtcactaattt

SEQ ID NO: 120485 - DNA, 33 bp, Homo sapien
cagtatccttgggttcaagtaaatttcttttaa

SEQ ID NO: 120486 - DNA, 33 bp, Homo sapien
cagtatccttgggttcgagtaaatttcttttaa

SEQ ID NO: 120487 - DNA, 33 bp, Homo sapien
ttttctctttctgtgcactacccatcacacaac

SEQ ID NO: 120488 - DNA, 33 bp, Homo sapien
ttttctctttctgtgcgctacccatcacacaac

SEQ ID NO: 120489 - DNA, 33 bp, Homo sapien
aactggttttaggacaaattcaataatatccta

SEQ ID NO: 120490 - DNA, 33 bp, Homo sapien
aactggttttaggacagattcaataatatccta

SEQ ID NO: 120491 - DNA, 33 bp, Homo sapien
aaataactggcaatgccgcagaaccattatagc

SEQ ID NO: 120492 - DNA, 33 bp, Homo sapien
aaataactggcaatgctgcagaaccattatagc

SEQ ID NO: 120493 - DNA, 33 bp, Homo sapien
ggccaactatgtaccaaacataatactatatta

SEQ ID NO: 120494 - DNA, 33 bp, Homo sapien
ggccaactatgtaccagacataatactatatta

SEQ ID NO: 120495 - DNA, 33 bp, Homo sapien
tattttagccaatgaaatgttcgtggaagggat

SEQ ID NO: 120496 - DNA, 33 bp, Homo sapien
tattttagccaatgaagtgttcgtggaagggat

SEQ ID NO: 120497 - DNA, 33 bp, Homo sapien
caggaaaatgcccttacgtataggagacccatg

SEQ ID NO: 120498 - DNA, 33 bp, Homo sapien
caggaaaatgcccttatgtataggagacccatg

SEQ ID NO: 120499 - DNA, 33 bp, Homo sapien
acagggacttctctgaatatgtctctttatcat

SEQ ID NO: 120500 - DNA, 33 bp, Homo sapien
acagggacttctctgagtatgtctctttatcat

SEQ ID NO: 120501 - DNA, 33 bp, Homo sapien
taggtagtcatggaaaccttgaaaggagtaatt

SEQ ID NO: 120502 - DNA, 33 bp, Homo sapien
taggtagtcatggaaatcttgaaaggagtaatt

SEQ ID NO: 120503 - DNA, 33 bp, Homo sapien
agcactaggaactggaactgcaaacttttgagt

SEQ ID NO: 120504 - DNA, 33 bp, Homo sapien
agcactaggaactggagctgcaaacttttgagt

SEQ ID NO: 120505 - DNA, 33 bp, Homo sapien
ttgttcagtctcagagaattgtttaaatttaaa

SEQ ID NO: 120506 - DNA, 33 bp, Homo sapien
ttgttcagtctcagagcattgtttaaatttaaa

SEQ ID NO: 120507 - DNA, 33 bp, Homo sapien
atcctattcatgtttcacaggctttcaacagaa

SEQ ID NO: 120508 - DNA, 33 bp, Homo sapien
atcctattcatgtttctcaggctttcaacagaa

SEQ ID NO: 120509 - DNA, 33 bp, Homo sapien
gtgtaaaatttcaagcacttccctgtccttacg

SEQ ID NO: 120510 - DNA, 33 bp, Homo sapien
gtgtaaaatttcaagcgcttccctgtccttacg

SEQ ID NO: 120511 - DNA, 33 bp, Homo sapien
ttccctgtccttacgccgcaaaaggttaatagt

SEQ ID NO: 120512 - DNA, 33 bp, Homo sapien
ttccctgtccttacgctgcaaaaggttaatagt

SEQ ID NO: 120513 - DNA, 33 bp, Homo sapien
agtcacagccatctcacaggagtttgcacattt

SEQ ID NO: 120514 - DNA, 33 bp, Homo sapien
agtcacagccatctcataggagtttgcacattt

SEQ ID NO: 120515 - DNA, 33 bp, Homo sapien
taagccattacggtaactgagggccaagactct

SEQ ID NO: 120516 - DNA, 33 bp, Homo sapien
taagccattacggtaattgagggccaagactct

SEQ ID NO: 120517 - DNA, 33 bp, Homo sapien
gctgtactgcctagtacgcttcaatacagaatg

SEQ ID NO: 120518 - DNA, 33 bp, Homo sapien
gctgtactgcctagtatgcttcaatacagaatg

SEQ ID NO: 120519 - DNA, 33 bp, Homo sapien
ataattatgaaaaaaaagtatcaggaagaatct

SEQ ID NO: 120520 - DNA, 33 bp, Homo sapien
ataattatgaaaaaaatgtatcaggaagaatct

SEQ ID NO: 120521 - DNA, 33 bp, Homo sapien
gtagtttgaagagatacaaacaaatgaatccgt

SEQ ID NO: 120522 - DNA, 33 bp, Homo sapien
gtagtttgaagagatagaaacaaatgaatccgt

SEQ ID NO: 120523 - DNA, 33 bp, Homo sapien
tgctccctggtttggacggcttggaacaaagct

SEQ ID NO: 120524 - DNA, 33 bp, Homo sapien
tgctccctggtttggatggcttggaacaaagct

SEQ ID NO: 120525 - DNA, 33 bp, Homo sapien
aggctggtaaaagtaaaagcaaatgactgcaat

SEQ ID NO: 120526 - DNA, 33 bp, Homo sapien
aggctggtaaaagtaagagcaaatgactgcaat

SEQ ID NO: 120527 - DNA, 33 bp, Homo sapien
aagaagggcgctaccactactcgattctctcta

SEQ ID NO: 120528 - DNA, 33 bp, Homo sapien
aagaagggcgctaccattactcgattctctcta

SEQ ID NO: 120529 - DNA, 33 bp, Homo sapien
tgggaaatttcaggtaaacttgtaggaagacaa

SEQ ID NO: 120530 - DNA, 33 bp, Homo sapien
tgggaaatttcaggtagacttgtaggaagacaa

SEQ ID NO: 120531 - DNA, 33 bp, Homo sapien
tttacatgaaagatgactcaattttgaggataa

SEQ ID NO: 120532 - DNA, 33 bp, Homo sapien
tttacatgaaagatgattcaattttgaggataa

SEQ ID NO: 120533 - DNA, 33 bp, Homo sapien
gaagatgctggcaataagatttaactgttattg

SEQ ID NO: 120534 - DNA, 33 bp, Homo sapien
gaagatgctggcaataggatttaactgttattg

SEQ ID NO: 120535 - DNA, 33 bp, Homo sapien
aaataagacataagaacaggaaccagacaggat

SEQ ID NO: 120536 - DNA, 33 bp, Homo sapien
aaataagacataagaataggaaccagacaggat

SEQ ID NO: 120537 - DNA, 33 bp, Homo sapien
acatgctctgagggtacgcgtgctactgcataa

SEQ ID NO: 120538 - DNA, 33 bp, Homo sapien
acatgctctgagggtatgcgtgctactgcataa

SEQ ID NO: 120539 - DNA, 33 bp, Homo sapien
agaagagaatccacagaaggaatgaggctggca

SEQ ID NO: 120540 - DNA, 33 bp, Homo sapien
agaagagaatccacaggaggaatgaggctggca

SEQ ID NO: 120541 - DNA, 33 bp, Homo sapien
gactgtaagaagtgtcaagcatcctttcattgt

SEQ ID NO: 120542 - DNA, 33 bp, Homo sapien
gactgtaagaagtgtccagcatcctttcattgt

SEQ ID NO: 120543 - DNA, 33 bp, Homo sapien
tggccttttaccaggacaaaggtgaatgtttca

SEQ ID NO: 120544 - DNA, 33 bp, Homo sapien
tggccttttaccaggagaaaggtgaatgtttca

SEQ ID NO: 120545 - DNA, 33 bp, Homo sapien
tgctgcttctggaaaactgcaaataatggatcg

SEQ ID NO: 120546 - DNA, 33 bp, Homo sapien
tgctgcttctggaaaagtgcaaataatggatcg

SEQ ID NO: 120547 - DNA, 33 bp, Homo sapien
gactttggcagactgtcaagagaactaacattt

SEQ ID NO: 120548 - DNA, 33 bp, Homo sapien
gactttggcagactgttaagagaactaacattt

SEQ ID NO: 120549 - DNA, 33 bp, Homo sapien
gattagctccagcccaaaagtgaaggttaactg

SEQ ID NO: 120550 - DNA, 33 bp, Homo sapien
gattagctccagcccagaagtgaaggttaactg

SEQ ID NO: 120551 - DNA, 33 bp, Homo sapien
agattccatattttccgacagattctggacctc

SEQ ID NO: 120552 - DNA, 33 bp, Homo sapien
agattccatattttcctacagattctggacctc

SEQ ID NO: 120553 - DNA, 33 bp, Homo sapien
gcaacacacaaacaacagaatgacgtatttaaa

SEQ ID NO: 120554 - DNA, 33 bp, Homo sapien
gcaacacacaaacaacggaatgacgtatttaaa

SEQ ID NO: 120555 - DNA, 33 bp, Homo sapien
ttatcatgcattttaaatctgaatatgtattgt

SEQ ID NO: 120556 - DNA, 33 bp, Homo sapien
ttatcatgcattttaattctgaatatgtattgt

SEQ ID NO: 120557 - DNA, 33 bp, Homo sapien
atatatatccacaataaagtagtattcagccgt

SEQ ID NO: 120558 - DNA, 33 bp, Homo sapien
atatatatccacaatagagtagtattcagccgt

SEQ ID NO: 120559 - DNA, 33 bp, Homo sapien
cccctacccagaccacaacgatagcaacctcac

SEQ ID NO: 120560 - DNA, 33 bp, Homo sapien
cccctacccagaccacgacgatagcaacctcac

SEQ ID NO: 120561 - DNA, 33 bp, Homo sapien
tccctctcctgatgacagcaacaatgcagctca

SEQ ID NO: 120562 - DNA, 33 bp, Homo sapien
tccctctcctgatgacggcaacaatgcagctca

SEQ ID NO: 120563 - DNA, 33 bp, Homo sapien
gtttctgtgtccagaacagtgttaggctgactc

SEQ ID NO: 120564 - DNA, 33 bp, Homo sapien
gtttctgtgtccagaagagtgttaggctgactc

SEQ ID NO: 120565 - DNA, 33 bp, Homo sapien
ggatggcttcccaagaccttaaacagcagaaaa

SEQ ID NO: 120566 - DNA, 33 bp, Homo sapien
ggatggcttcccaagatcttaaacagcagaaaa

SEQ ID NO: 120567 - DNA, 33 bp, Homo sapien
tttcttccgcagtcataaagagttgaagtaggc

SEQ ID NO: 120568 - DNA, 33 bp, Homo sapien
tttcttccgcagtcatgaagagttgaagtaggc

SEQ ID NO: 120569 - DNA, 33 bp, Homo sapien
actatgctctttccctaaagttctccaaagagg

SEQ ID NO: 120570 - DNA, 33 bp, Homo sapien
actatgctctttcccttaagttctccaaagagg

SEQ ID NO: 120571 - DNA, 33 bp, Homo sapien
aactctggggtcagaaacaaaggtcagaatgtt

SEQ ID NO: 120572 - DNA, 33 bp, Homo sapien
aactctggggtcagaatcaaaggtcagaatgtt

SEQ ID NO: 120573 - DNA, 33 bp, Homo sapien
gtttgttggaggagaaaaatgggctttgcaaga

SEQ ID NO: 120574 - DNA, 33 bp, Homo sapien
gtttgttggaggagaagaatgggctttgcaaga

SEQ ID NO: 120575 - DNA, 33 bp, Homo sapien
aggatctggtttagccgaagtttacatctcatc

SEQ ID NO: 120576 - DNA, 33 bp, Homo sapien
aggatctggtttagcctaagtttacatctcatc

SEQ ID NO: 120577 - DNA, 33 bp, Homo sapien
tcacaccttatacacccgggagtcatttctgtt

SEQ ID NO: 120578 - DNA, 33 bp, Homo sapien
tcacaccttatacacctgggagtcatttctgtt

SEQ ID NO: 120579 - DNA, 33 bp, Homo sapien
tagcagtctttgcttccagaaccacatttatgc

SEQ ID NO: 120580 - DNA, 33 bp, Homo sapien
tagcagtctttgcttctagaaccacatttatgc

SEQ ID NO: 120581 - DNA, 33 bp, Homo sapien
tgtcacgtaaaattaaccaggctatagtataca

SEQ ID NO: 120582 - DNA, 33 bp, Homo sapien
tgtcacgtaaaattaagcaggctatagtataca

SEQ ID NO: 120583 - DNA, 33 bp, Homo sapien
tctctgtgtttatgtaaaggctaatatgtaggg

SEQ ID NO: 120584 - DNA, 33 bp, Homo sapien
tctctgtgtttatgtacaggctaatatgtaggg

SEQ ID NO: 120585 - DNA, 33 bp, Homo sapien
taaattgtcggtcaacaatagtcttatttgtta

SEQ ID NO: 120586 - DNA, 33 bp, Homo sapien
taaattgtcggtcaacgatagtcttatttgtta

SEQ ID NO: 120587 - DNA, 33 bp, Homo sapien
cctggctcaacctagacacacaagtagattcag

SEQ ID NO: 120588 - DNA, 33 bp, Homo sapien
cctggctcaacctagatacacaagtagattcag

SEQ ID NO: 120589 - DNA, 33 bp, Homo sapien
ttctacccatatatcaatcaggattattctgcc

SEQ ID NO: 120590 - DNA, 33 bp, Homo sapien
ttctacccatatatcattcaggattattctgcc

SEQ ID NO: 120591 - DNA, 33 bp, Homo sapien
tatttttcatcaattacaagaagatgcagtcct

SEQ ID NO: 120592 - DNA, 33 bp, Homo sapien
tatttttcatcaattataagaagatgcagtcct

SEQ ID NO: 120593 - DNA, 33 bp, Homo sapien
aggagaaagagttccaatgatcccgacaattgc

SEQ ID NO: 120594 - DNA, 33 bp, Homo sapien
aggagaaagagttccagtgatcccgacaattgc

SEQ ID NO: 120595 - DNA, 33 bp, Homo sapien
tttgataccttcatacaggtaaggtacttcgaa

SEQ ID NO: 120596 - DNA, 33 bp, Homo sapien
tttgataccttcatactggtaaggtacttcgaa

SEQ ID NO: 120597 - DNA, 33 bp, Homo sapien
gtgagagactgtttagaaaaattcctgctctca

SEQ ID NO: 120598 - DNA, 33 bp, Homo sapien
gtgagagactgtttaggaaaattcctgctctca

SEQ ID NO: 120599 - DNA, 33 bp, Homo sapien
cctgcaggaagacaaaaccttgtagtaaaagga

SEQ ID NO: 120600 - DNA, 33 bp, Homo sapien
cctgcaggaagacaaagccttgtagtaaaagga

SEQ ID NO: 120601 - DNA, 33 bp, Homo sapien
attgtgtgttaatgaaataccaatggaaagtgc

SEQ ID NO: 120602 - DNA, 33 bp, Homo sapien
attgtgtgttaatgaagtaccaatggaaagtgc

SEQ ID NO: 120603 - DNA, 33 bp, Homo sapien
ataactcaccacacaaaaggaccatttactgtc

SEQ ID NO: 120604 - DNA, 33 bp, Homo sapien
ataactcaccacacaagaggaccatttactgtc

SEQ ID NO: 120605 - DNA, 33 bp, Homo sapien
atataccactcagacacatattacagcttttta

SEQ ID NO: 120606 - DNA, 33 bp, Homo sapien
atataccactcagacatatattacagcttttta

SEQ ID NO: 120607 - DNA, 33 bp, Homo sapien
attgtatcattctagtaaccacctggaccatgt

SEQ ID NO: 120608 - DNA, 33 bp, Homo sapien
attgtatcattctagtcaccacctggaccatgt

SEQ ID NO: 120609 - DNA, 33 bp, Homo sapien
tggaaaagcaggtcccaccaggatgcaagatag

SEQ ID NO: 120610 - DNA, 33 bp, Homo sapien
tggaaaagcaggtcccgccaggatgcaagatag

SEQ ID NO: 120611 - DNA, 33 bp, Homo sapien
catcttgcttctcaacagtcaccttaatttccc

SEQ ID NO: 120612 - DNA, 33 bp, Homo sapien
catcttgcttctcaacggtcaccttaatttccc

SEQ ID NO: 120613 - DNA, 33 bp, Homo sapien
aacacgagtcacaatcagaacttatatatttac

SEQ ID NO: 120614 - DNA, 33 bp, Homo sapien
aacacgagtcacaatcggaacttatatatttac

SEQ ID NO: 120615 - DNA, 33 bp, Homo sapien
gataaaaaatggcatcacattatctcaattttt

SEQ ID NO: 120616 - DNA, 33 bp, Homo sapien
gataaaaaatggcatcgcattatctcaattttt

SEQ ID NO: 120617 - DNA, 33 bp, Homo sapien
cctatgcctgagaaaaaatagtacccatgtatc

SEQ ID NO: 120618 - DNA, 33 bp, Homo sapien
cctatgcctgagaaaagatagtacccatgtatc

SEQ ID NO: 120619 - DNA, 33 bp, Homo sapien
ctaacggtgaaatacaatgatttggaccattga

SEQ ID NO: 120620 - DNA, 33 bp, Homo sapien
ctaacggtgaaatacattgatttggaccattga

SEQ ID NO: 120621 - DNA, 33 bp, Homo sapien
gaacatcaagtttggaactcaaaaagccatagg

SEQ ID NO: 120622 - DNA, 33 bp, Homo sapien
gaacatcaagtttggagctcaaaaagccatagg

SEQ ID NO: 120623 - DNA, 33 bp, Homo sapien
caggctaaaacatggcaattttatgagacactt

SEQ ID NO: 120624 - DNA, 33 bp, Homo sapien
caggctaaaacatggcgattttatgagacactt

SEQ ID NO: 120625 - DNA, 33 bp, Homo sapien
ttctacaacctcctacagggaaaattgtgaggg

SEQ ID NO: 120626 - DNA, 33 bp, Homo sapien
ttctacaacctcctaccgggaaaattgtgaggg

SEQ ID NO: 120627 - DNA, 33 bp, Homo sapien
gaggagaaagtcagacacactttggaacctgtt

SEQ ID NO: 120628 - DNA, 33 bp, Homo sapien
gaggagaaagtcagacgcactttggaacctgtt

SEQ ID NO: 120629 - DNA, 33 bp, Homo sapien
tccaaagcctgtcataactatgtatgtggatgg

SEQ ID NO: 120630 - DNA, 33 bp, Homo sapien
tccaaagcctgtcatagctatgtatgtggatgg

SEQ ID NO: 120631 - DNA, 33 bp, Homo sapien
atttacagttagtttcaaaggaagattttcttt

SEQ ID NO: 120632 - DNA, 33 bp, Homo sapien
atttacagttagtttcgaaggaagattttcttt

SEQ ID NO: 120633 - DNA, 33 bp, Homo sapien
cctatgagagggtacacgctaggaatttgagaa

SEQ ID NO: 120634 - DNA, 33 bp, Homo sapien
cctatgagagggtacatgctaggaatttgagaa

SEQ ID NO: 120635 - DNA, 33 bp, Homo sapien
tcccctgtgagcatccaattcctttctccactg

SEQ ID NO: 120636 - DNA, 33 bp, Homo sapien
tcccctgtgagcatccgattcctttctccactg

SEQ ID NO: 120637 - DNA, 33 bp, Homo sapien
ctctgttcacacacacacacatttttcattttt

SEQ ID NO: 120638 - DNA, 33 bp, Homo sapien
ctctgttcacacacacccacatttttcattttt

SEQ ID NO: 120639 - DNA, 33 bp, Homo sapien
aatggaaaagtcataaataaccaaatgtatatg

SEQ ID NO: 120640 - DNA, 33 bp, Homo sapien
aatggaaaagtcataattaaccaaatgtatatg

SEQ ID NO: 120641 - DNA, 33 bp, Homo sapien
aagcatatttgcccaaacaaaccaataatgttg

SEQ ID NO: 120642 - DNA, 33 bp, Homo sapien
aagcatatttgcccaagcaaaccaataatgttg

SEQ ID NO: 120643 - DNA, 33 bp, Homo sapien
agttacagctctcggaagtatgacactgaatca

SEQ ID NO: 120644 - DNA, 33 bp, Homo sapien
agttacagctctcggaggtatgacactgaatca

SEQ ID NO: 120645 - DNA, 33 bp, Homo sapien
gtaactcttacaactacgaaatattaaacacca

SEQ ID NO: 120646 - DNA, 33 bp, Homo sapien
gtaactcttacaactaggaaatattaaacacca

SEQ ID NO: 120647 - DNA, 33 bp, Homo sapien
cagctcagctggtgaaatcccaaggacacaggt

SEQ ID NO: 120648 - DNA, 33 bp, Homo sapien
cagctcagctggtgaactcccaaggacacaggt

SEQ ID NO: 120649 - DNA, 33 bp, Homo sapien
gtgccacctgggaatgcaacgtttttaattagg

SEQ ID NO: 120650 - DNA, 33 bp, Homo sapien
gtgccacctgggaatggaacgtttttaattagg

SEQ ID NO: 120651 - DNA, 33 bp, Homo sapien
gatggaggctggacagaacctgtggtgatcggc

SEQ ID NO: 120652 - DNA, 33 bp, Homo sapien
gatggaggctggacaggacctgtggtgatcggc

SEQ ID NO: 120653 - DNA, 33 bp, Homo sapien
cctttagccctacaacagttggaagctccatga

SEQ ID NO: 120654 - DNA, 33 bp, Homo sapien
cctttagccctacaacggttggaagctccatga

SEQ ID NO: 120655 - DNA, 33 bp, Homo sapien
aacagcatggccaaaaccgagggcagctcaggc

SEQ ID NO: 120656 - DNA, 33 bp, Homo sapien
aacagcatggccaaaagcgagggcagctcaggc

SEQ ID NO: 120657 - DNA, 33 bp, Homo sapien
atttttacaactgctgaagagaataattgttcg

SEQ ID NO: 120658 - DNA, 33 bp, Homo sapien
atttttacaactgctgcagagaataattgttcg

SEQ ID NO: 120659 - DNA, 33 bp, Homo sapien
aacagtaagggctaacaaggagcttcgaccttc

SEQ ID NO: 120660 - DNA, 33 bp, Homo sapien
aacagtaagggctaacgaggagcttcgaccttc

SEQ ID NO: 120661 - DNA, 33 bp, Homo sapien
atttgaaacaagcaacaaaacagcaatgaaaac

SEQ ID NO: 120662 - DNA, 33 bp, Homo sapien
atttgaaacaagcaaccaaacagcaatgaaaac

SEQ ID NO: 120663 - DNA, 33 bp, Homo sapien
tcctcagcacttccaaatcagtaggtctgggtg

SEQ ID NO: 120664 - DNA, 33 bp, Homo sapien
tcctcagcacttccaattcagtaggtctgggtg

SEQ ID NO: 120665 - DNA, 33 bp, Homo sapien
agggacagcagggaaacgggtcttttcatcaaa

SEQ ID NO: 120666 - DNA, 33 bp, Homo sapien
agggacagcagggaaatgggtcttttcatcaaa

SEQ ID NO: 120667 - DNA, 33 bp, Homo sapien
gaaagctctaaggagactatgcttctccctcac

SEQ ID NO: 120668 - DNA, 33 bp, Homo sapien
gaaagctctaaggagattatgcttctccctcac

SEQ ID NO: 120669 - DNA, 33 bp, Homo sapien
tcagaactgcgaatcccagttattcagcctgca

SEQ ID NO: 120670 - DNA, 33 bp, Homo sapien
tcagaactgcgaatcctagttattcagcctgca

SEQ ID NO: 120671 - DNA, 33 bp, Homo sapien
ataaagagccactagccatgaaaattccctttc

SEQ ID NO: 120672 - DNA, 33 bp, Homo sapien
ataaagagccactagctatgaaaattccctttc

SEQ ID NO: 120673 - DNA, 33 bp, Homo sapien
gttaaagactgacccgcacttaatcggttatgt

SEQ ID NO: 120674 - DNA, 33 bp, Homo sapien
gttaaagactgacccggacttaatcggttatgt

SEQ ID NO: 120675 - DNA, 33 bp, Homo sapien
ttgccataatgtatgacatggctcagtatgacg

SEQ ID NO: 120676 - DNA, 33 bp, Homo sapien
ttgccataatgtatgagatggctcagtatgacg

SEQ ID NO: 120677 - DNA, 33 bp, Homo sapien
gcctttgccattctccaattagcagaaagtcat

SEQ ID NO: 120678 - DNA, 33 bp, Homo sapien
gcctttgccattctccgattagcagaaagtcat

SEQ ID NO: 120679 - DNA, 33 bp, Homo sapien
gcttgtgcaactcaaacccagatgggcccccac

SEQ ID NO: 120680 - DNA, 33 bp, Homo sapien
gcttgtgcaactcaaatccagatgggcccccac

SEQ ID NO: 120681 - DNA, 33 bp, Homo sapien
aaatcggtttgagcaccggagaacttcttttca

SEQ ID NO: 120682 - DNA, 33 bp, Homo sapien
aaatcggtttgagcactggagaacttcttttca

SEQ ID NO: 120683 - DNA, 33 bp, Homo sapien
gtgcttctcccacccccatagacttaacataaa

SEQ ID NO: 120684 - DNA, 33 bp, Homo sapien
gtgcttctcccaccccgatagacttaacataaa

SEQ ID NO: 120685 - DNA, 33 bp, Homo sapien
tccatgcttcctaataaaatcttccccacattg

SEQ ID NO: 120686 - DNA, 33 bp, Homo sapien
tccatgcttcctaatagaatcttccccacattg

SEQ ID NO: 120687 - DNA, 33 bp, Homo sapien
catagtcatttgataaaccaggtgcatttagta

SEQ ID NO: 120688 - DNA, 33 bp, Homo sapien
catagtcatttgataagccaggtgcatttagta

SEQ ID NO: 120689 - DNA, 33 bp, Homo sapien
tctttgatctctgtaaaccttgtccagtgccca

SEQ ID NO: 120690 - DNA, 33 bp, Homo sapien
tctttgatctctgtaacccttgtccagtgccca

SEQ ID NO: 120691 - DNA, 33 bp, Homo sapien
acgtgccctcaaatgacataaagcagccaaata

SEQ ID NO: 120692 - DNA, 33 bp, Homo sapien
acgtgccctcaaatgagataaagcagccaaata

SEQ ID NO: 120693 - DNA, 33 bp, Homo sapien
aataagttgtatggaacgactttgacacacata

SEQ ID NO: 120694 - DNA, 33 bp, Homo sapien
aataagttgtatggaatgactttgacacacata

SEQ ID NO: 120695 - DNA, 33 bp, Homo sapien
gcatagactatggagacaacaggggcactaacc

SEQ ID NO: 120696 - DNA, 33 bp, Homo sapien
gcatagactatggagagaacaggggcactaacc

SEQ ID NO: 120697 - DNA, 33 bp, Homo sapien
gctgtagaatcagagaaaagtaaaggaagtctt

SEQ ID NO: 120698 - DNA, 33 bp, Homo sapien
gctgtagaatcagagagaagtaaaggaagtctt

SEQ ID NO: 120699 - DNA, 33 bp, Homo sapien
aaaatggggattcacaaagacaagaaccgttga

SEQ ID NO: 120700 - DNA, 33 bp, Homo sapien
aaaatggggattcacagagacaagaaccgttga

SEQ ID NO: 120701 - DNA, 33 bp, Homo sapien
ttttacagttgagaaaacagagattcaggggaa

SEQ ID NO: 120702 - DNA, 33 bp, Homo sapien
ttttacagttgagaaagcagagattcaggggaa

SEQ ID NO: 120703 - DNA, 33 bp, Homo sapien
tgtaactccagagggacagctatggtgtttgtc

SEQ ID NO: 120704 - DNA, 33 bp, Homo sapien
tgtaactccagagggagagctatggtgtttgtc

SEQ ID NO: 120705 - DNA, 33 bp, Homo sapien
aagaaaaatgtcattccctacttgaggctctta

SEQ ID NO: 120706 - DNA, 33 bp, Homo sapien
aagaaaaatgtcattctctacttgaggctctta

SEQ ID NO: 120707 - DNA, 33 bp, Homo sapien
agaacagaagagaaaaaagaggctttgttagtc

SEQ ID NO: 120708 - DNA, 33 bp, Homo sapien
agaacagaagagaaaagagaggctttgttagtc

SEQ ID NO: 120709 - DNA, 33 bp, Homo sapien
gaacaggatgtgaccaacccttggtagatgctc

SEQ ID NO: 120710 - DNA, 33 bp, Homo sapien
gaacaggatgtgaccagcccttggtagatgctc

SEQ ID NO: 120711 - DNA, 33 bp, Homo sapien
gcaggaaccaaatgccagcttgcctctttcaac

SEQ ID NO: 120712 - DNA, 33 bp, Homo sapien
gcaggaaccaaatgccggcttgcctctttcaac

SEQ ID NO: 120713 - DNA, 33 bp, Homo sapien
ttaaaatccaacagataactcagtaaagttacc

SEQ ID NO: 120714 - DNA, 33 bp, Homo sapien
ttaaaatccaacagatgactcagtaaagttacc

SEQ ID NO: 120715 - DNA, 33 bp, Homo sapien
aactctttccagcccacgaagaacatatttcag

SEQ ID NO: 120716 - DNA, 33 bp, Homo sapien
aactctttccagcccatgaagaacatatttcag

SEQ ID NO: 120717 - DNA, 33 bp, Homo sapien
aggcaggaaagggagaacagttcaataataaag

SEQ ID NO: 120718 - DNA, 33 bp, Homo sapien
aggcaggaaagggagagcagttcaataataaag

SEQ ID NO: 120719 - DNA, 33 bp, Homo sapien
tctattttgtttcccaagtatacacagagcccg

SEQ ID NO: 120720 - DNA, 33 bp, Homo sapien
tctattttgtttcccatgtatacacagagcccg

SEQ ID NO: 120721 - DNA, 33 bp, Homo sapien
ttacagcatgatctaccgaatattttaatcctg

SEQ ID NO: 120722 - DNA, 33 bp, Homo sapien
ttacagcatgatctactgaatattttaatcctg

SEQ ID NO: 120723 - DNA, 33 bp, Homo sapien
aacatggtatctagtcactaagaccttgagcac

SEQ ID NO: 120724 - DNA, 33 bp, Homo sapien
aacatggtatctagtcgctaagaccttgagcac

SEQ ID NO: 120725 - DNA, 33 bp, Homo sapien
taccaaatccagggtaacatacttctacacaaa

SEQ ID NO: 120726 - DNA, 33 bp, Homo sapien
taccaaatccagggtagcatacttctacacaaa

SEQ ID NO: 120727 - DNA, 33 bp, Homo sapien
aagttctctgccttccacttcacccagccttcc

SEQ ID NO: 120728 - DNA, 33 bp, Homo sapien
aagttctctgccttccgcttcacccagccttcc

SEQ ID NO: 120729 - DNA, 33 bp, Homo sapien
cggtaaccaatcagagaaactcgtgtggttagt

SEQ ID NO: 120730 - DNA, 33 bp, Homo sapien
cggtaaccaatcagaggaactcgtgtggttagt

SEQ ID NO: 120731 - DNA, 33 bp, Homo sapien
agacttcaggaaagaacgggtctgatcctgctg

SEQ ID NO: 120732 - DNA, 33 bp, Homo sapien
agacttcaggaaagaatgggtctgatcctgctg

SEQ ID NO: 120733 - DNA, 33 bp, Homo sapien
gcaacctctgacatcacggctaacattaatcca

SEQ ID NO: 120734 - DNA, 33 bp, Homo sapien
gcaacctctgacatcatggctaacattaatcca

SEQ ID NO: 120735 - DNA, 33 bp, Homo sapien
aataatcaaaatttaaaaaatccaggatgaaca

SEQ ID NO: 120736 - DNA, 33 bp, Homo sapien
aataatcaaaatttaagaaatccaggatgaaca

SEQ ID NO: 120737 - DNA, 33 bp, Homo sapien
aggttcagacccaacaatgtggctttaagacct

SEQ ID NO: 120738 - DNA, 33 bp, Homo sapien
aggttcagacccaacagtgtggctttaagacct

SEQ ID NO: 120739 - DNA, 33 bp, Homo sapien
ggagtagaacacattacaattgaacacaaatta

SEQ ID NO: 120740 - DNA, 33 bp, Homo sapien
ggagtagaacacattagaattgaacacaaatta

SEQ ID NO: 120741 - DNA, 33 bp, Homo sapien
gtgacatattttccacaacttctctattgctat

SEQ ID NO: 120742 - DNA, 33 bp, Homo sapien
gtgacatattttccacgacttctctattgctat

SEQ ID NO: 120743 - DNA, 33 bp, Homo sapien
gctgatgggaagcccactctaattccaaaaagt

SEQ ID NO: 120744 - DNA, 33 bp, Homo sapien
gctgatgggaagcccattctaattccaaaaagt

SEQ ID NO: 120745 - DNA, 33 bp, Homo sapien
atgtaaactctgttgacaatatgtttccatagt

SEQ ID NO: 120746 - DNA, 33 bp, Homo sapien
atgtaaactctgttgagaatatgtttccatagt

SEQ ID NO: 120747 - DNA, 33 bp, Homo sapien
tgcattagggatgatcaactgcactgagagact

SEQ ID NO: 120748 - DNA, 33 bp, Homo sapien
tgcattagggatgatcgactgcactgagagact

SEQ ID NO: 120749 - DNA, 33 bp, Homo sapien
ctctggggctttctccaaaaccagcttgttgaa

SEQ ID NO: 120750 - DNA, 33 bp, Homo sapien
ctctggggctttctcccaaaccagcttgttgaa

SEQ ID NO: 120751 - DNA, 33 bp, Homo sapien
ccactgtagttttcaaacacttaaccttctcga

SEQ ID NO: 120752 - DNA, 33 bp, Homo sapien
ccactgtagttttcaaccacttaaccttctcga

SEQ ID NO: 120753 - DNA, 33 bp, Homo sapien
ttgtacttcattgcagaaagtaaaaacagagtg

SEQ ID NO: 120754 - DNA, 33 bp, Homo sapien
ttgtacttcattgcaggaagtaaaaacagagtg

SEQ ID NO: 120755 - DNA, 33 bp, Homo sapien
aaaatggagactcagacgaacaggctttaaaac

SEQ ID NO: 120756 - DNA, 33 bp, Homo sapien
aaaatggagactcagatgaacaggctttaaaac

SEQ ID NO: 120757 - DNA, 33 bp, Homo sapien
tcctcaaattccccaaacctaaattctatttgc

SEQ ID NO: 120758 - DNA, 33 bp, Homo sapien
tcctcaaattccccaatcctaaattctatttgc

SEQ ID NO: 120759 - DNA, 33 bp, Homo sapien
ctgacaagactcgatactacactaaactgattt

SEQ ID NO: 120760 - DNA, 33 bp, Homo sapien
ctgacaagactcgatattacactaaactgattt

SEQ ID NO: 120761 - DNA, 33 bp, Homo sapien
gattttcttaacttacacttctcgtaacagcat

SEQ ID NO: 120762 - DNA, 33 bp, Homo sapien
gattttcttaacttacgcttctcgtaacagcat

SEQ ID NO: 120763 - DNA, 33 bp, Homo sapien
gaacaatgggtgactacgtaagaaagaaaatta

SEQ ID NO: 120764 - DNA, 33 bp, Homo sapien
gaacaatgggtgactatgtaagaaagaaaatta

SEQ ID NO: 120765 - DNA, 33 bp, Homo sapien
aggtgattccacagtgcattagctgtgtcaaag

SEQ ID NO: 120766 - DNA, 33 bp, Homo sapien
aggtgattccacagtgtattagctgtgtcaaag

SEQ ID NO: 120767 - DNA, 33 bp, Homo sapien
agatgcagtgttttagaaaatgaggagtgaaac

SEQ ID NO: 120768 - DNA, 33 bp, Homo sapien
agatgcagtgttttagtaaatgaggagtgaaac

SEQ ID NO: 120769 - DNA, 33 bp, Homo sapien
tttaagttattagagcactcagtttaagaattc

SEQ ID NO: 120770 - DNA, 33 bp, Homo sapien
tttaagttattagagcgctcagtttaagaattc

SEQ ID NO: 120771 - DNA, 33 bp, Homo sapien
agggaatggtacaagacacccgtaaccaatgcg

SEQ ID NO: 120772 - DNA, 33 bp, Homo sapien
agggaatggtacaagatacccgtaaccaatgcg

SEQ ID NO: 120773 - DNA, 33 bp, Homo sapien
gctgatcctcaaacacccagagctcttccctgc

SEQ ID NO: 120774 - DNA, 33 bp, Homo sapien
gctgatcctcaaacactcagagctcttccctgc

SEQ ID NO: 120775 - DNA, 33 bp, Homo sapien
cactgagaggagttaaccattcagaggcattgg

SEQ ID NO: 120776 - DNA, 33 bp, Homo sapien
cactgagaggagttaagcattcagaggcattgg

SEQ ID NO: 120777 - DNA, 33 bp, Homo sapien
cactgggctgaggaagaaaagccatttgcttgc

SEQ ID NO: 120778 - DNA, 33 bp, Homo sapien
cactgggctgaggaaggaaagccatttgcttgc

SEQ ID NO: 120779 - DNA, 33 bp, Homo sapien
aagtggatggtagtgacggtcacacagtcatgt

SEQ ID NO: 120780 - DNA, 33 bp, Homo sapien
aagtggatggtagtgatggtcacacagtcatgt

SEQ ID NO: 120781 - DNA, 33 bp, Homo sapien
aaagaatcaacccacacgaggtgttcagagggc

SEQ ID NO: 120782 - DNA, 33 bp, Homo sapien
aaagaatcaacccacatgaggtgttcagagggc

SEQ ID NO: 120783 - DNA, 33 bp, Homo sapien
tgtctggacaacatgaagagacaataaataaat

SEQ ID NO: 120784 - DNA, 33 bp, Homo sapien
tgtctggacaacatgatgagacaataaataaat

SEQ ID NO: 120785 - DNA, 33 bp, Homo sapien
aaaccaaagtcaaaaagttggaagagtggggag

SEQ ID NO: 120786 - DNA, 33 bp, Homo sapien
aaaccaaagtcaaaaatttggaagagtggggag

SEQ ID NO: 120787 - DNA, 33 bp, Homo sapien
tgtttggtgaatcaaaagcaaatgtacatgatt

SEQ ID NO: 120788 - DNA, 33 bp, Homo sapien
tgtttggtgaatcaaaggcaaatgtacatgatt

SEQ ID NO: 120789 - DNA, 33 bp, Homo sapien
aaatgattcccttggcaatggttagtgctagga

SEQ ID NO: 120790 - DNA, 33 bp, Homo sapien
aaatgattcccttggctatggttagtgctagga

SEQ ID NO: 120791 - DNA, 33 bp, Homo sapien
gcaagaaggaatttcacaagaatagtatttttg

SEQ ID NO: 120792 - DNA, 33 bp, Homo sapien
gcaagaaggaatttcataagaatagtatttttg

SEQ ID NO: 120793 - DNA, 33 bp, Homo sapien
tttcataattggacaacgggcttgaaatatgaa

SEQ ID NO: 120794 - DNA, 33 bp, Homo sapien
tttcataattggacaatgggcttgaaatatgaa

SEQ ID NO: 120795 - DNA, 33 bp, Homo sapien
aacttgctttcaggaaaggacctggtatgtgcc

SEQ ID NO: 120796 - DNA, 33 bp, Homo sapien
aacttgctttcaggaagggacctggtatgtgcc

SEQ ID NO: 120797 - DNA, 33 bp, Homo sapien
gaggggttgcagacaccgggccaggttaaacag

SEQ ID NO: 120798 - DNA, 33 bp, Homo sapien
gaggggttgcagacactgggccaggttaaacag

SEQ ID NO: 120799 - DNA, 33 bp, Homo sapien
tattcccaccaccatacctcttgctagtgtgaa

SEQ ID NO: 120800 - DNA, 33 bp, Homo sapien
tattcccaccaccatatctcttgctagtgtgaa

SEQ ID NO: 120801 - DNA, 33 bp, Homo sapien
aaaagctgcaacgtacaaatttaggaaatggat

SEQ ID NO: 120802 - DNA, 33 bp, Homo sapien
aaaagctgcaacgtacgaatttaggaaatggat

SEQ ID NO: 120803 - DNA, 33 bp, Homo sapien
atgtagcaagaggctcaactcctgtccctgtgc

SEQ ID NO: 120804 - DNA, 33 bp, Homo sapien
atgtagcaagaggctcgactcctgtccctgtgc

SEQ ID NO: 120805 - DNA, 33 bp, Homo sapien
cacaatatagattgaacatttggatgatatgca

SEQ ID NO: 120806 - DNA, 33 bp, Homo sapien
cacaatatagattgaatatttggatgatatgca

SEQ ID NO: 120807 - DNA, 33 bp, Homo sapien
agaacagcctcagccacgtatctgtcctgtgga

SEQ ID NO: 120808 - DNA, 33 bp, Homo sapien
agaacagcctcagccatgtatctgtcctgtgga

SEQ ID NO: 120809 - DNA, 33 bp, Homo sapien
tgatgattatgaacaccattgagggtcaccata

SEQ ID NO: 120810 - DNA, 33 bp, Homo sapien
tgatgattatgaacactattgagggtcaccata

SEQ ID NO: 120811 - DNA, 33 bp, Homo sapien
aggcagcgatgcttaaatggcaggagaagcaca

SEQ ID NO: 120812 - DNA, 33 bp, Homo sapien
aggcagcgatgcttaagtggcaggagaagcaca

SEQ ID NO: 120813 - DNA, 33 bp, Homo sapien
cacttcctcctttactcaatgtctcaaagagac

SEQ ID NO: 120814 - DNA, 33 bp, Homo sapien
cacttcctcctttactgaatgtctcaaagagac

SEQ ID NO: 120815 - DNA, 33 bp, Homo sapien
agtcaaggatcttttcaaggagaaggttacttt

SEQ ID NO: 120816 - DNA, 33 bp, Homo sapien
agtcaaggatcttttcgaggagaaggttacttt

SEQ ID NO: 120817 - DNA, 33 bp, Homo sapien
aaccagctggtacctcagacatattccttcatt

SEQ ID NO: 120818 - DNA, 33 bp, Homo sapien
aaccagctggtacctcggacatattccttcatt

SEQ ID NO: 120819 - DNA, 33 bp, Homo sapien
ttatttttttgagccaatccttttctccctctt

SEQ ID NO: 120820 - DNA, 33 bp, Homo sapien
ttatttttttgagccagtccttttctccctctt

SEQ ID NO: 120821 - DNA, 33 bp, Homo sapien
cactcattcagttcaaacaaggatttattgagc

SEQ ID NO: 120822 - DNA, 33 bp, Homo sapien
cactcattcagttcaagcaaggatttattgagc

SEQ ID NO: 120823 - DNA, 33 bp, Homo sapien
agggaaaagccttaaccaatgaccactctggct

SEQ ID NO: 120824 - DNA, 33 bp, Homo sapien
agggaaaagccttaacgaatgaccactctggct

SEQ ID NO: 120825 - DNA, 33 bp, Homo sapien
aaatgtcagtcttaggaagggatagcttttatt

SEQ ID NO: 120826 - DNA, 33 bp, Homo sapien
aaatgtcagtcttagggagggatagcttttatt

SEQ ID NO: 120827 - DNA, 33 bp, Homo sapien
gaaaagaaaatctgcccagaaaactattcttat

SEQ ID NO: 120828 - DNA, 33 bp, Homo sapien
gaaaagaaaatctgcctagaaaactattcttat

SEQ ID NO: 120829 - DNA, 33 bp, Homo sapien
cttgtatgtgtgcatacgtttgcatagaattct

SEQ ID NO: 120830 - DNA, 33 bp, Homo sapien
cttgtatgtgtgcatatgtttgcatagaattct

SEQ ID NO: 120831 - DNA, 33 bp, Homo sapien
tcagacgaaattgaccccttcagtgaagtcata

SEQ ID NO: 120832 - DNA, 33 bp, Homo sapien
tcagacgaaattgacctcttcagtgaagtcata

SEQ ID NO: 120833 - DNA, 33 bp, Homo sapien
aatgcacattagcatacggaaggctctgaggat

SEQ ID NO: 120834 - DNA, 33 bp, Homo sapien
aatgcacattagcatatggaaggctctgaggat

SEQ ID NO: 120835 - DNA, 33 bp, Homo sapien
ttattgttttagttcagatcgtaatggtggagg

SEQ ID NO: 120836 - DNA, 33 bp, Homo sapien
ttattgttttagttcatatcgtaatggtggagg

SEQ ID NO: 120837 - DNA, 33 bp, Homo sapien
aatgtcacaaaaccctaacacagtgaaacaatt

SEQ ID NO: 120838 - DNA, 33 bp, Homo sapien
aatgtcacaaaaccctgacacagtgaaacaatt

SEQ ID NO: 120839 - DNA, 33 bp, Homo sapien
gttatcatttaactgcacttatgtgttagcaga

SEQ ID NO: 120840 - DNA, 33 bp, Homo sapien
gttatcatttaactgcgcttatgtgttagcaga

SEQ ID NO: 120841 - DNA, 33 bp, Homo sapien
taaaagggaaacccaaatgagaatgaagagtgt

SEQ ID NO: 120842 - DNA, 33 bp, Homo sapien
taaaagggaaacccaactgagaatgaagagtgt

SEQ ID NO: 120843 - DNA, 33 bp, Homo sapien
gggcatccccaggcccaagttttctcatcagta

SEQ ID NO: 120844 - DNA, 33 bp, Homo sapien
gggcatccccaggccccagttttctcatcagta

SEQ ID NO: 120845 - DNA, 33 bp, Homo sapien
aggagaaacacaactccagattccctattgcca

SEQ ID NO: 120846 - DNA, 33 bp, Homo sapien
aggagaaacacaactctagattccctattgcca

SEQ ID NO: 120847 - DNA, 33 bp, Homo sapien
aaccaagcatatctcaagtccaaaacaaaaact

SEQ ID NO: 120848 - DNA, 33 bp, Homo sapien
aaccaagcatatctcaggtccaaaacaaaaact

SEQ ID NO: 120849 - DNA, 33 bp, Homo sapien
cttctgtaaggacaacacttggctgttcaacag

SEQ ID NO: 120850 - DNA, 33 bp, Homo sapien
cttctgtaaggacaacgcttggctgttcaacag

SEQ ID NO: 120851 - DNA, 33 bp, Homo sapien
tctggagatttttccacgtgatttgggagatga

SEQ ID NO: 120852 - DNA, 33 bp, Homo sapien
tctggagatttttccatgtgatttgggagatga

SEQ ID NO: 120853 - DNA, 33 bp, Homo sapien
gagggaaggatcaccccctcctcacagcctcta

SEQ ID NO: 120854 - DNA, 33 bp, Homo sapien
gagggaaggatcacccgctcctcacagcctcta

SEQ ID NO: 120855 - DNA, 33 bp, Homo sapien
atcccttagcccaagactaggcactaagcagtc

SEQ ID NO: 120856 - DNA, 33 bp, Homo sapien
atcccttagcccaagagtaggcactaagcagtc

SEQ ID NO: 120857 - DNA, 33 bp, Homo sapien
accgtcaagccatcaacttaactgccttttaag

SEQ ID NO: 120858 - DNA, 33 bp, Homo sapien
accgtcaagccatcaatttaactgccttttaag

SEQ ID NO: 120859 - DNA, 33 bp, Homo sapien
acttgcaggtaataacagtgtcaggttaacagc

SEQ ID NO: 120860 - DNA, 33 bp, Homo sapien
acttgcaggtaataacggtgtcaggttaacagc

SEQ ID NO: 120861 - DNA, 33 bp, Homo sapien
aaattcatttgttcccagattgagctgttctag

SEQ ID NO: 120862 - DNA, 33 bp, Homo sapien
aaattcatttgttcccggattgagctgttctag

SEQ ID NO: 120863 - DNA, 33 bp, Homo sapien
cagccattgtggaaaacagtttagtgattcatc

SEQ ID NO: 120864 - DNA, 33 bp, Homo sapien
cagccattgtggaaaatagtttagtgattcatc

SEQ ID NO: 120865 - DNA, 33 bp, Homo sapien
tgtgctcacaccccaacggcctcggacctctcc

SEQ ID NO: 120866 - DNA, 33 bp, Homo sapien
tgtgctcacaccccaatggcctcggacctctcc

SEQ ID NO: 120867 - DNA, 33 bp, Homo sapien
tttgttagctatgtgaacttgagtgagaaatta

SEQ ID NO: 120868 - DNA, 33 bp, Homo sapien
tttgttagctatgtgaccttgagtgagaaatta

SEQ ID NO: 120869 - DNA, 33 bp, Homo sapien
ctgctgtggctcataaagagaacagtggaaaga

SEQ ID NO: 120870 - DNA, 33 bp, Homo sapien
ctgctgtggctcataaggagaacagtggaaaga

SEQ ID NO: 120871 - DNA, 33 bp, Homo sapien
gcctcctacgagaagacgaattttggaagaagc

SEQ ID NO: 120872 - DNA, 33 bp, Homo sapien
gcctcctacgagaagatgaattttggaagaagc

SEQ ID NO: 120873 - DNA, 33 bp, Homo sapien
aggagtactgtcaatcaagaaagttcgcccggg

SEQ ID NO: 120874 - DNA, 33 bp, Homo sapien
aggagtactgtcaatcgagaaagttcgcccggg

SEQ ID NO: 120875 - DNA, 33 bp, Homo sapien
tcaatgtgtgactacacgcaaggagtactgtca

SEQ ID NO: 120876 - DNA, 33 bp, Homo sapien
tcaatgtgtgactacatgcaaggagtactgtca

SEQ ID NO: 120877 - DNA, 33 bp, Homo sapien
ggcaaactccttaatgcactcctgtgccacttc

SEQ ID NO: 120878 - DNA, 33 bp, Homo sapien
ggcaaactccttaatgtactcctgtgccacttc

SEQ ID NO: 120879 - DNA, 33 bp, Homo sapien
atcaggataggagccaactggagcgaaatgtta

SEQ ID NO: 120880 - DNA, 33 bp, Homo sapien
atcaggataggagccagctggagcgaaatgtta

SEQ ID NO: 120881 - DNA, 33 bp, Homo sapien
tactttgccttccaaaattaggatgaattattt

SEQ ID NO: 120882 - DNA, 33 bp, Homo sapien
tactttgccttccaaagttaggatgaattattt

SEQ ID NO: 120883 - DNA, 33 bp, Homo sapien
gaacgcattgaagagccgaacacattgttttgg

SEQ ID NO: 120884 - DNA, 33 bp, Homo sapien
gaacgcattgaagagctgaacacattgttttgg

SEQ ID NO: 120885 - DNA, 33 bp, Homo sapien
gaactcttaactcttacccatccccaactccat

SEQ ID NO: 120886 - DNA, 33 bp, Homo sapien
gaactcttaactcttatccatccccaactccat

SEQ ID NO: 120887 - DNA, 33 bp, Homo sapien
ctttcctagcatagtccctgatttccccaatga

SEQ ID NO: 120888 - DNA, 33 bp, Homo sapien
ctttcctagcatagtctctgatttccccaatga

SEQ ID NO: 120889 - DNA, 33 bp, Homo sapien
aaatttccagattgtggaagtaactgatggggt

SEQ ID NO: 120890 - DNA, 33 bp, Homo sapien
aaatttccagattgtgtaagtaactgatggggt

SEQ ID NO: 120891 - DNA, 33 bp, Homo sapien
ctggtcaatttctatcacaatcttaaagatagt

SEQ ID NO: 120892 - DNA, 33 bp, Homo sapien
ctggtcaatttctatcgcaatcttaaagatagt

SEQ ID NO: 120893 - DNA, 33 bp, Homo sapien
aaagactggggagaggccattttccaatcgtaa

SEQ ID NO: 120894 - DNA, 33 bp, Homo sapien
aaagactggggagaggtcattttccaatcgtaa

SEQ ID NO: 120895 - DNA, 33 bp, Homo sapien
tacctggaaaggttgacctagcagccaggcatt

SEQ ID NO: 120896 - DNA, 33 bp, Homo sapien
tacctggaaaggttgatctagcagccaggcatt

SEQ ID NO: 120897 - DNA, 33 bp, Homo sapien
agtcttcagggccagggagctgtggaggttatt

SEQ ID NO: 120898 - DNA, 33 bp, Homo sapien
agtcttcagggccaggtagctgtggaggttatt

SEQ ID NO: 120899 - DNA, 33 bp, Homo sapien
tcatccaacaatagaacggctgctgcatgtggc

SEQ ID NO: 120900 - DNA, 33 bp, Homo sapien
tcatccaacaatagaatggctgctgcatgtggc

SEQ ID NO: 120901 - DNA, 33 bp, Homo sapien
gccagggaacagcctgccaaagcaactcaggct

SEQ ID NO: 120902 - DNA, 33 bp, Homo sapien
gccagggaacagcctgtcaaagcaactcaggct

SEQ ID NO: 120903 - DNA, 33 bp, Homo sapien
atgggggttgtgttcacgtatgagttcccacca

SEQ ID NO: 120904 - DNA, 33 bp, Homo sapien
atgggggttgtgttcatgtatgagttcccacca

SEQ ID NO: 120905 - DNA, 33 bp, Homo sapien
gcacctgacacccccaatgaaatataacagtgt

SEQ ID NO: 120906 - DNA, 33 bp, Homo sapien
gcacctgacacccccactgaaatataacagtgt

SEQ ID NO: 120907 - DNA, 33 bp, Homo sapien
gtggtgttttgcatcaagtaaggctcaggtgaa

SEQ ID NO: 120908 - DNA, 33 bp, Homo sapien
gtggtgttttgcatcaggtaaggctcaggtgaa

SEQ ID NO: 120909 - DNA, 33 bp, Homo sapien
ttataggcttaacccacaggcagaattagtcat

SEQ ID NO: 120910 - DNA, 33 bp, Homo sapien
ttataggcttaacccataggcagaattagtcat

SEQ ID NO: 120911 - DNA, 33 bp, Homo sapien
tgtaggtgattaataactatcgattgtcagagg

SEQ ID NO: 120912 - DNA, 33 bp, Homo sapien
tgtaggtgattaataattatcgattgtcagagg

SEQ ID NO: 120913 - DNA, 33 bp, Homo sapien
agcagggagataaatgccaagcccaaacgtcac

SEQ ID NO: 120914 - DNA, 33 bp, Homo sapien
agcagggagataaatggcaagcccaaacgtcac

SEQ ID NO: 120915 - DNA, 33 bp, Homo sapien
aagcagctactatctggtttttgtctcagttct

SEQ ID NO: 120916 - DNA, 33 bp, Homo sapien
aagcagctactatctgttttttgtctcagttct

SEQ ID NO: 120917 - DNA, 33 bp, Homo sapien
ggggaatcaaggacaacttcctgaatcagcctg

SEQ ID NO: 120918 - DNA, 33 bp, Homo sapien
ggggaatcaaggacaatttcctgaatcagcctg

SEQ ID NO: 120919 - DNA, 33 bp, Homo sapien
tacaaaggctcagtgaggtacacaggcagaacc

SEQ ID NO: 120920 - DNA, 33 bp, Homo sapien
tacaaaggctcagtgatgtacacaggcagaacc

SEQ ID NO: 120921 - DNA, 33 bp, Homo sapien
ttgacagaatagcttgaaatatgatgtttaatg

SEQ ID NO: 120922 - DNA, 33 bp, Homo sapien
ttgacagaatagcttggaatatgatgtttaatg

SEQ ID NO: 120923 - DNA, 33 bp, Homo sapien
caaacatgttcactagaaaggctattcattaaa

SEQ ID NO: 120924 - DNA, 33 bp, Homo sapien
caaacatgttcactagtaaggctattcattaaa

SEQ ID NO: 120925 - DNA, 33 bp, Homo sapien
acaggacctttggaaaacaccaggttctgattt

SEQ ID NO: 120926 - DNA, 33 bp, Homo sapien
acaggacctttggaaagcaccaggttctgattt

SEQ ID NO: 120927 - DNA, 33 bp, Homo sapien
ggccagcctcttccagaagaatcaaaacttcac

SEQ ID NO: 120928 - DNA, 33 bp, Homo sapien
ggccagcctcttccaggagaatcaaaacttcac

SEQ ID NO: 120929 - DNA, 33 bp, Homo sapien
gaccaatcagtatccaccccctttctgagccca

SEQ ID NO: 120930 - DNA, 33 bp, Homo sapien
gaccaatcagtatccatcccctttctgagccca

SEQ ID NO: 120931 - DNA, 33 bp, Homo sapien
ttgggccacagacttaaagactcagaatttgag

SEQ ID NO: 120932 - DNA, 33 bp, Homo sapien
ttgggccacagacttacagactcagaatttgag

SEQ ID NO: 120933 - DNA, 33 bp, Homo sapien
ctgtgttcccactctaccagcttaccttaaaac

SEQ ID NO: 120934 - DNA, 33 bp, Homo sapien
ctgtgttcccactctatcagcttaccttaaaac

SEQ ID NO: 120935 - DNA, 33 bp, Homo sapien
cgtttctttctctataagttgagacccatgccc

SEQ ID NO: 120936 - DNA, 33 bp, Homo sapien
cgtttctttctctataggttgagacccatgccc

SEQ ID NO: 120937 - DNA, 33 bp, Homo sapien
tactggcacttgcaaacgctttgaatccaatct

SEQ ID NO: 120938 - DNA, 33 bp, Homo sapien
tactggcacttgcaaatgctttgaatccaatct

SEQ ID NO: 120939 - DNA, 33 bp, Homo sapien
ctaagcagaccttgtcactgaagttcacacact

SEQ ID NO: 120940 - DNA, 33 bp, Homo sapien
ctaagcagaccttgtcgctgaagttcacacact

SEQ ID NO: 120941 - DNA, 33 bp, Homo sapien
cacagctaaaatggccgccaagtcaggatttga

SEQ ID NO: 120942 - DNA, 33 bp, Homo sapien
cacagctaaaatggcctccaagtcaggatttga

SEQ ID NO: 120943 - DNA, 33 bp, Homo sapien
atttatgcactctgccagcacgtggttggccca

SEQ ID NO: 120944 - DNA, 33 bp, Homo sapien
atttatgcactctgccggcacgtggttggccca

SEQ ID NO: 120945 - DNA, 33 bp, Homo sapien
ttccatgatgtgatgacagaatttgcagccagc

SEQ ID NO: 120946 - DNA, 33 bp, Homo sapien
ttccatgatgtgatgatagaatttgcagccagc

SEQ ID NO: 120947 - DNA, 33 bp, Homo sapien
cgtgcactagtacaacaaaaccagtctctcaaa

SEQ ID NO: 120948 - DNA, 33 bp, Homo sapien
cgtgcactagtacaactaaaccagtctctcaaa

SEQ ID NO: 120949 - DNA, 33 bp, Homo sapien
tctccagcagaggagaaattggtttaaaaaagc

SEQ ID NO: 120950 - DNA, 33 bp, Homo sapien
tctccagcagaggagacattggtttaaaaaagc

SEQ ID NO: 120951 - DNA, 33 bp, Homo sapien
cagcagacatcccctaacatgagttgtgcaggc

SEQ ID NO: 120952 - DNA, 33 bp, Homo sapien
cagcagacatcccctagcatgagttgtgcaggc

SEQ ID NO: 120953 - DNA, 33 bp, Homo sapien
atgtcctcaggtttggaaagtcagcaatttggt

SEQ ID NO: 120954 - DNA, 33 bp, Homo sapien
atgtcctcaggtttgggaagtcagcaatttggt

SEQ ID NO: 120955 - DNA, 33 bp, Homo sapien
aacagtggagacacagaaaatagtagcattaat

SEQ ID NO: 120956 - DNA, 33 bp, Homo sapien
aacagtggagacacaggaaatagtagcattaat

SEQ ID NO: 120957 - DNA, 33 bp, Homo sapien
tgcatccagcaatctacgggaatatcaaggcca

SEQ ID NO: 120958 - DNA, 33 bp, Homo sapien
tgcatccagcaatctatgggaatatcaaggcca

SEQ ID NO: 120959 - DNA, 33 bp, Homo sapien
ctcctcttgcagctcaataggtatgtggtgaac

SEQ ID NO: 120960 - DNA, 33 bp, Homo sapien
ctcctcttgcagctcagtaggtatgtggtgaac

SEQ ID NO: 120961 - DNA, 33 bp, Homo sapien
gtgtgtcagagaaagaaagtgagattgattttt

SEQ ID NO: 120962 - DNA, 33 bp, Homo sapien
gtgtgtcagagaaagagagtgagattgattttt

SEQ ID NO: 120963 - DNA, 33 bp, Homo sapien
tggacccagaagcaaaaatgggtatgctgtgca

SEQ ID NO: 120964 - DNA, 33 bp, Homo sapien
tggacccagaagcaaagatgggtatgctgtgca

SEQ ID NO: 120965 - DNA, 33 bp, Homo sapien
atcaagagcttcaccaccttcttgtctagacaa

SEQ ID NO: 120966 - DNA, 33 bp, Homo sapien
atcaagagcttcaccatcttcttgtctagacaa

SEQ ID NO: 120967 - DNA, 33 bp, Homo sapien
tatgtatagtctgtgcaatcttaggtaagccac

SEQ ID NO: 120968 - DNA, 33 bp, Homo sapien
tatgtatagtctgtgcgatcttaggtaagccac

SEQ ID NO: 120969 - DNA, 33 bp, Homo sapien
aggtaagccacttaaaagctctctcagtttcct

SEQ ID NO: 120970 - DNA, 33 bp, Homo sapien
aggtaagccacttaaatgctctctcagtttcct

SEQ ID NO: 120971 - DNA, 33 bp, Homo sapien
atggcatgatggcaacaatgggtcagtgaaaca

SEQ ID NO: 120972 - DNA, 33 bp, Homo sapien
atggcatgatggcaaccatgggtcagtgaaaca

SEQ ID NO: 120973 - DNA, 33 bp, Homo sapien
catagcatttacagtacgataggctgagtacgc

SEQ ID NO: 120974 - DNA, 33 bp, Homo sapien
catagcatttacagtatgataggctgagtacgc

SEQ ID NO: 120975 - DNA, 33 bp, Homo sapien
tgtttccttttcactcccaagagccttcaggct

SEQ ID NO: 120976 - DNA, 33 bp, Homo sapien
tgtttccttttcactctcaagagccttcaggct

SEQ ID NO: 120977 - DNA, 33 bp, Homo sapien
ggggagcaagtcaccaataataacccacaacac

SEQ ID NO: 120978 - DNA, 33 bp, Homo sapien
ggggagcaagtcaccagtaataacccacaacac

SEQ ID NO: 120979 - DNA, 33 bp, Homo sapien
atcaggcacccctttcaaccagatactgctgta

SEQ ID NO: 120980 - DNA, 33 bp, Homo sapien
atcaggcacccctttcgaccagatactgctgta

SEQ ID NO: 120981 - DNA, 33 bp, Homo sapien
ggcaaggaggtagagacgagtgaacttaggatt

SEQ ID NO: 120982 - DNA, 33 bp, Homo sapien
ggcaaggaggtagagatgagtgaacttaggatt

SEQ ID NO: 120983 - DNA, 33 bp, Homo sapien
ttgtcttatggaggaaagaggtgaagcacaccc

SEQ ID NO: 120984 - DNA, 33 bp, Homo sapien
ttgtcttatggaggaaggaggtgaagcacaccc

SEQ ID NO: 120985 - DNA, 33 bp, Homo sapien
gaaatgggcatataaacagatctacataagact

SEQ ID NO: 120986 - DNA, 33 bp, Homo sapien
gaaatgggcatataaatagatctacataagact

SEQ ID NO: 120987 - DNA, 33 bp, Homo sapien
gcaattacctgaatgacagattagaactcaggg

SEQ ID NO: 120988 - DNA, 33 bp, Homo sapien
gcaattacctgaatgatagattagaactcaggg

SEQ ID NO: 120989 - DNA, 33 bp, Homo sapien
caaaggatatgaaagacagcataagacagaacg

SEQ ID NO: 120990 - DNA, 33 bp, Homo sapien
caaaggatatgaaagatagcataagacagaacg

SEQ ID NO: 120991 - DNA, 33 bp, Homo sapien
tctttattcagctagaaaggaaccaggggaata

SEQ ID NO: 120992 - DNA, 33 bp, Homo sapien
tctttattcagctagagaggaaccaggggaata

SEQ ID NO: 120993 - DNA, 33 bp, Homo sapien
tcctcctgggtgtgaacgagtctcctttgatct

SEQ ID NO: 120994 - DNA, 33 bp, Homo sapien
tcctcctgggtgtgaatgagtctcctttgatct

SEQ ID NO: 120995 - DNA, 33 bp, Homo sapien
cttccttgcttaaaacacttccatggtgcctat

SEQ ID NO: 120996 - DNA, 33 bp, Homo sapien
cttccttgcttaaaacgcttccatggtgcctat

SEQ ID NO: 120997 - DNA, 33 bp, Homo sapien
aggcaatgagatgaaactggcacgtttacctgc

SEQ ID NO: 120998 - DNA, 33 bp, Homo sapien
aggcaatgagatgaaattggcacgtttacctgc

SEQ ID NO: 120999 - DNA, 33 bp, Homo sapien
cctgcatggagtgggcagcacagattgtggagg

SEQ ID NO: 121000 - DNA, 33 bp, Homo sapien
cctgcatggagtgggccgcacagattgtggagg

SEQ ID NO: 121001 - DNA, 33 bp, Homo sapien
ccaggccccattgctaaacctcttgaataagaa

SEQ ID NO: 121002 - DNA, 33 bp, Homo sapien
ccaggccccattgctagacctcttgaataagaa

SEQ ID NO: 121003 - DNA, 33 bp, Homo sapien
acctatccaaggaagtaacataaatgaaattga

SEQ ID NO: 121004 - DNA, 33 bp, Homo sapien
acctatccaaggaagtcacataaatgaaattga

SEQ ID NO: 121005 - DNA, 33 bp, Homo sapien
ctgcctcagtaacttgcagagagacttccaaaa

SEQ ID NO: 121006 - DNA, 33 bp, Homo sapien
ctgcctcagtaacttgtagagagacttccaaaa

SEQ ID NO: 121007 - DNA, 33 bp, Homo sapien
tttctgtggctccttgaaaatgttaaaggcatg

SEQ ID NO: 121008 - DNA, 33 bp, Homo sapien
tttctgtggctccttggaaatgttaaaggcatg

SEQ ID NO: 121009 - DNA, 33 bp, Homo sapien
attacaggtgaggttaagaaagctgaaacagta

SEQ ID NO: 121010 - DNA, 33 bp, Homo sapien
attacaggtgaggttaggaaagctgaaacagta

SEQ ID NO: 121011 - DNA, 33 bp, Homo sapien
atgtaatatgtctccccgagtttcccaccaaaa

SEQ ID NO: 121012 - DNA, 33 bp, Homo sapien
atgtaatatgtctccctgagtttcccaccaaaa

SEQ ID NO: 121013 - DNA, 33 bp, Homo sapien
cagaaacaagttccaaagagcactcactgggca

SEQ ID NO: 121014 - DNA, 33 bp, Homo sapien
cagaaacaagttccaaggagcactcactgggca

SEQ ID NO: 121015 - DNA, 33 bp, Homo sapien
tttaaggattagaagagatcaagtctagcaatg

SEQ ID NO: 121016 - DNA, 33 bp, Homo sapien
tttaaggattagaagatatcaagtctagcaatg

SEQ ID NO: 121017 - DNA, 33 bp, Homo sapien
gacagttcattgaaaaagagagagaaagtaaag

SEQ ID NO: 121018 - DNA, 33 bp, Homo sapien
gacagttcattgaaaaggagagagaaagtaaag

SEQ ID NO: 121019 - DNA, 33 bp, Homo sapien
tgtgaggtcaccagaacataaagacccagattc

SEQ ID NO: 121020 - DNA, 33 bp, Homo sapien
tgtgaggtcaccagaagataaagacccagattc

SEQ ID NO: 121021 - DNA, 33 bp, Homo sapien
gatggagaaactcaaggaatgatgctgctacaa

SEQ ID NO: 121022 - DNA, 33 bp, Homo sapien
gatggagaaactcaagtaatgatgctgctacaa

SEQ ID NO: 121023 - DNA, 33 bp, Homo sapien
tcttcaagtggcctacaggacttgctccataag

SEQ ID NO: 121024 - DNA, 33 bp, Homo sapien
tcttcaagtggcctacgggacttgctccataag

SEQ ID NO: 121025 - DNA, 33 bp, Homo sapien
tacttgcttgaatgtacagggatgatttatcga

SEQ ID NO: 121026 - DNA, 33 bp, Homo sapien
tacttgcttgaatgtatagggatgatttatcga

SEQ ID NO: 121027 - DNA, 33 bp, Homo sapien
atccaaatagcgtgcactgcaaccattaagtaa

SEQ ID NO: 121028 - DNA, 33 bp, Homo sapien
atccaaatagcgtgcattgcaaccattaagtaa

SEQ ID NO: 121029 - DNA, 33 bp, Homo sapien
ccaaccctgaatttgactaccactgttgacttt

SEQ ID NO: 121030 - DNA, 33 bp, Homo sapien
ccaaccctgaatttgattaccactgttgacttt

SEQ ID NO: 121031 - DNA, 33 bp, Homo sapien
tgattactcaagcaccacgttcattctctcact

SEQ ID NO: 121032 - DNA, 33 bp, Homo sapien
tgattactcaagcaccgcgttcattctctcact

SEQ ID NO: 121033 - DNA, 33 bp, Homo sapien
gagattgtctcctaagcccacctgcaaccaggg

SEQ ID NO: 121034 - DNA, 33 bp, Homo sapien
gagattgtctcctaaggccacctgcaaccaggg

SEQ ID NO: 121035 - DNA, 33 bp, Homo sapien
ggtccctatgggctaccacaggacaagaagaac

SEQ ID NO: 121036 - DNA, 33 bp, Homo sapien
ggtccctatgggctacgacaggacaagaagaac

SEQ ID NO: 121037 - DNA, 33 bp, Homo sapien
aatcacatgatccatgacaagccaataagactc

SEQ ID NO: 121038 - DNA, 33 bp, Homo sapien
aatcacatgatccatgccaagccaataagactc

SEQ ID NO: 121039 - DNA, 33 bp, Homo sapien
cccaacaaaggagtaacgatataatgtcaaaga

SEQ ID NO: 121040 - DNA, 33 bp, Homo sapien
cccaacaaaggagtaatgatataatgtcaaaga

SEQ ID NO: 121041 - DNA, 33 bp, Homo sapien
ctctctacttggctcccctagacccatcaatct

SEQ ID NO: 121042 - DNA, 33 bp, Homo sapien
ctctctacttggctccgctagacccatcaatct

SEQ ID NO: 121043 - DNA, 33 bp, Homo sapien
gcttctggggataccgacagtattttatttttt

SEQ ID NO: 121044 - DNA, 33 bp, Homo sapien
gcttctggggataccgtcagtattttatttttt

SEQ ID NO: 121045 - DNA, 33 bp, Homo sapien
acatagaaacggctaaccagtagatattttcag

SEQ ID NO: 121046 - DNA, 33 bp, Homo sapien
acatagaaacggctaagcagtagatattttcag

SEQ ID NO: 121047 - DNA, 33 bp, Homo sapien
tcagaagcctaaattcaagtgctgcaggaatcc

SEQ ID NO: 121048 - DNA, 33 bp, Homo sapien
tcagaagcctaaattcgagtgctgcaggaatcc

SEQ ID NO: 121049 - DNA, 33 bp, Homo sapien
gatttatatcccagctcaacctcttataactgt

SEQ ID NO: 121050 - DNA, 33 bp, Homo sapien
gatttatatcccagctgaacctcttataactgt

SEQ ID NO: 121051 - DNA, 33 bp, Homo sapien
gaatcactgcatattgcaccctcttttggaaat

SEQ ID NO: 121052 - DNA, 33 bp, Homo sapien
gaatcactgcatattgtaccctcttttggaaat

SEQ ID NO: 121053 - DNA, 33 bp, Homo sapien
gaaatgctgatgtttcactaggcgttgttccta

SEQ ID NO: 121054 - DNA, 33 bp, Homo sapien
gaaatgctgatgtttccctaggcgttgttccta

SEQ ID NO: 121055 - DNA, 33 bp, Homo sapien
tgataggaaactggtcccttgatgtactgtctt

SEQ ID NO: 121056 - DNA, 33 bp, Homo sapien
tgataggaaactggtctcttgatgtactgtctt

SEQ ID NO: 121057 - DNA, 33 bp, Homo sapien
ctgggggaagcttgcacaagtctggtccaaaat

SEQ ID NO: 121058 - DNA, 33 bp, Homo sapien
ctgggggaagcttgcataagtctggtccaaaat

SEQ ID NO: 121059 - DNA, 33 bp, Homo sapien
ctaaggggtgttactggcagcttttctctgagt

SEQ ID NO: 121060 - DNA, 33 bp, Homo sapien
ctaaggggtgttactgtcagcttttctctgagt

SEQ ID NO: 121061 - DNA, 33 bp, Homo sapien
gcttggccacctacaccgtacttcatctggctg

SEQ ID NO: 121062 - DNA, 33 bp, Homo sapien
gcttggccacctacactgtacttcatctggctg

SEQ ID NO: 121063 - DNA, 33 bp, Homo sapien
attgccatgtgacaaactaaagtggctacaagt

SEQ ID NO: 121064 - DNA, 33 bp, Homo sapien
attgccatgtgacaaattaaagtggctacaagt

SEQ ID NO: 121065 - DNA, 33 bp, Homo sapien
tgaggctgagcctgaaagaaccgacagctgggg

SEQ ID NO: 121066 - DNA, 33 bp, Homo sapien
tgaggctgagcctgaaggaaccgacagctgggg

SEQ ID NO: 121067 - DNA, 33 bp, Homo sapien
tttaaagcaatcttgcagaaaagggccaacatt

SEQ ID NO: 121068 - DNA, 33 bp, Homo sapien
tttaaagcaatcttgccgaaaagggccaacatt

SEQ ID NO: 121069 - DNA, 33 bp, Homo sapien
tttttaatagcatcaccctagtttatcatgagg

SEQ ID NO: 121070 - DNA, 33 bp, Homo sapien
tttttaatagcatcactctagtttatcatgagg

SEQ ID NO: 121071 - DNA, 33 bp, Homo sapien
gcgatcacgatacacgaacatgctctcttcttc

SEQ ID NO: 121072 - DNA, 33 bp, Homo sapien
gcgatcacgatacacggacatgctctcttcttc

SEQ ID NO: 121073 - DNA, 33 bp, Homo sapien
tctgcctgcatcgagcactatgtggcgcatcta

SEQ ID NO: 121074 - DNA, 33 bp, Homo sapien
tctgcctgcatcgagccctatgtggcgcatcta

SEQ ID NO: 121075 - DNA, 33 bp, Homo sapien
ctgcctctccagaatcaactgtgtcccatcttc

SEQ ID NO: 121076 - DNA, 33 bp, Homo sapien
ctgcctctccagaatcgactgtgtcccatcttc

SEQ ID NO: 121077 - DNA, 33 bp, Homo sapien
aattaactccctcttgcagcaataaaccaccct

SEQ ID NO: 121078 - DNA, 33 bp, Homo sapien
aattaactccctcttggagcaataaaccaccct

SEQ ID NO: 121079 - DNA, 33 bp, Homo sapien
ttaaagagccttccagaactaacaattttgccc

SEQ ID NO: 121080 - DNA, 33 bp, Homo sapien
ttaaagagccttccaggactaacaattttgccc

SEQ ID NO: 121081 - DNA, 33 bp, Homo sapien
gggagatgcaagttacaatttctcccctgcctc

SEQ ID NO: 121082 - DNA, 33 bp, Homo sapien
gggagatgcaagttacgatttctcccctgcctc

SEQ ID NO: 121083 - DNA, 33 bp, Homo sapien
ctttcatctccaggaccgaaatctctaggacca

SEQ ID NO: 121084 - DNA, 33 bp, Homo sapien
ctttcatctccaggacggaaatctctaggacca

SEQ ID NO: 121085 - DNA, 33 bp, Homo sapien
ctgaggcacagactgacgaacttgtccatggtt

SEQ ID NO: 121086 - DNA, 33 bp, Homo sapien
ctgaggcacagactgaggaacttgtccatggtt

SEQ ID NO: 121087 - DNA, 33 bp, Homo sapien
tggcagtgagaatgcaagcccaactgagcgagt

SEQ ID NO: 121088 - DNA, 33 bp, Homo sapien
tggcagtgagaatgcacgcccaactgagcgagt

SEQ ID NO: 121089 - DNA, 33 bp, Homo sapien
ttggcgaaatgccagactaagcacagatcactt

SEQ ID NO: 121090 - DNA, 33 bp, Homo sapien
ttggcgaaatgccagattaagcacagatcactt

SEQ ID NO: 121091 - DNA, 33 bp, Homo sapien
cccccagtcagtacccagatgaggctgagtagg

SEQ ID NO: 121092 - DNA, 33 bp, Homo sapien
cccccagtcagtacccggatgaggctgagtagg

SEQ ID NO: 121093 - DNA, 33 bp, Homo sapien
tatcacaatatcacacaagttgtttactgagca

SEQ ID NO: 121094 - DNA, 33 bp, Homo sapien
tatcacaatatcacacgagttgtttactgagca

SEQ ID NO: 121095 - DNA, 33 bp, Homo sapien
atgcctccattatcatcatccataaactgagaa

SEQ ID NO: 121096 - DNA, 33 bp, Homo sapien
atgcctccattatcattatccataaactgagaa

SEQ ID NO: 121097 - DNA, 33 bp, Homo sapien
tgtaagggaaatgctacgaagaaaaggcatttc

SEQ ID NO: 121098 - DNA, 33 bp, Homo sapien
tgtaagggaaatgctatgaagaaaaggcatttc

SEQ ID NO: 121099 - DNA, 33 bp, Homo sapien
cactacactgtctctaactgctggaacaggtgc

SEQ ID NO: 121100 - DNA, 33 bp, Homo sapien
cactacactgtctctacctgctggaacaggtgc

SEQ ID NO: 121101 - DNA, 33 bp, Homo sapien
accagcacctttttcaccaatgcgcccttcccc

SEQ ID NO: 121102 - DNA, 33 bp, Homo sapien
accagcacctttttcatcaatgcgcccttcccc

SEQ ID NO: 121103 - DNA, 33 bp, Homo sapien
ttcaaatggaggtataaaaacacacagaaagac

SEQ ID NO: 121104 - DNA, 33 bp, Homo sapien
ttcaaatggaggtatacaaacacacagaaagac

SEQ ID NO: 121105 - DNA, 33 bp, Homo sapien
atactccatgctagggaattaactacttgttga

SEQ ID NO: 121106 - DNA, 33 bp, Homo sapien
atactccatgctagggcattaactacttgttga

SEQ ID NO: 121107 - DNA, 33 bp, Homo sapien
tggttgtatacttaaaatctcacaatggtcaat

SEQ ID NO: 121108 - DNA, 33 bp, Homo sapien
tggttgtatacttaaagtctcacaatggtcaat

SEQ ID NO: 121109 - DNA, 33 bp, Homo sapien
aagtctcggtttttctaaaatggtaggaaacag

SEQ ID NO: 121110 - DNA, 33 bp, Homo sapien
aagtctcggtttttctgaaatggtaggaaacag

SEQ ID NO: 121111 - DNA, 33 bp, Homo sapien
cagtaacaactcaatacgaatcagaaataatct

SEQ ID NO: 121112 - DNA, 33 bp, Homo sapien
cagtaacaactcaatatgaatcagaaataatct

SEQ ID NO: 121113 - DNA, 33 bp, Homo sapien
tgcaaagatgagctacaaaaatttccttcttgg

SEQ ID NO: 121114 - DNA, 33 bp, Homo sapien
tgcaaagatgagctacgaaaatttccttcttgg

SEQ ID NO: 121115 - DNA, 33 bp, Homo sapien
ggctcaatgaacagaacggctccgttatatttc

SEQ ID NO: 121116 - DNA, 33 bp, Homo sapien
ggctcaatgaacagaatggctccgttatatttc

SEQ ID NO: 121117 - DNA, 33 bp, Homo sapien
agacccagaggatgaaataatcttatcgaggtc

SEQ ID NO: 121118 - DNA, 33 bp, Homo sapien
agacccagaggatgaagtaatcttatcgaggtc

SEQ ID NO: 121119 - DNA, 33 bp, Homo sapien
ggggtgttcacaagaaaagaagatcataaacat

SEQ ID NO: 121120 - DNA, 33 bp, Homo sapien
ggggtgttcacaagaagagaagatcataaacat

SEQ ID NO: 121121 - DNA, 33 bp, Homo sapien
cacagtcaaccattacagcccattttctcaaac

SEQ ID NO: 121122 - DNA, 33 bp, Homo sapien
cacagtcaaccattacggcccattttctcaaac

SEQ ID NO: 121123 - DNA, 33 bp, Homo sapien
agttctgttcagaaagacaagcttgaaaaaata

SEQ ID NO: 121124 - DNA, 33 bp, Homo sapien
agttctgttcagaaaggcaagcttgaaaaaata

SEQ ID NO: 121125 - DNA, 33 bp, Homo sapien
ttaacttagacaaacactgacactctataaagc

SEQ ID NO: 121126 - DNA, 33 bp, Homo sapien
ttaacttagacaaacattgacactctataaagc

SEQ ID NO: 121127 - DNA, 33 bp, Homo sapien
gacactctataaagcaacaattgcaaaatgtgg

SEQ ID NO: 121128 - DNA, 33 bp, Homo sapien
gacactctataaagcagcaattgcaaaatgtgg

SEQ ID NO: 121129 - DNA, 33 bp, Homo sapien
ttaattgccagcattacccaagggagtctcaaa

SEQ ID NO: 121130 - DNA, 33 bp, Homo sapien
ttaattgccagcattatccaagggagtctcaaa

SEQ ID NO: 121131 - DNA, 33 bp, Homo sapien
tctttaaagtggtcaccgactatacaccttagt

SEQ ID NO: 121132 - DNA, 33 bp, Homo sapien
tctttaaagtggtcactgactatacaccttagt

SEQ ID NO: 121133 - DNA, 33 bp, Homo sapien
cacaggatgtttgtgtgaaaaagattcagaggc

SEQ ID NO: 121134 - DNA, 33 bp, Homo sapien
cacaggatgtttgtgttaaaaagattcagaggc

SEQ ID NO: 121135 - DNA, 33 bp, Homo sapien
atgaactgttctctcaaggcactagcgatttcc

SEQ ID NO: 121136 - DNA, 33 bp, Homo sapien
atgaactgttctctcacggcactagcgatttcc

SEQ ID NO: 121137 - DNA, 33 bp, Homo sapien
gttaaatgacttggacaggttaccagcatctcg

SEQ ID NO: 121138 - DNA, 33 bp, Homo sapien
gttaaatgacttggacgggttaccagcatctcg

SEQ ID NO: 121139 - DNA, 33 bp, Homo sapien
gtcctgtgcagaatgcaaatgtagggttcctat

SEQ ID NO: 121140 - DNA, 33 bp, Homo sapien
gtcctgtgcagaatgcgaatgtagggttcctat

SEQ ID NO: 121141 - DNA, 33 bp, Homo sapien
cagctggaacagaggccgattctgccagctgtc

SEQ ID NO: 121142 - DNA, 33 bp, Homo sapien
cagctggaacagaggcggattctgccagctgtc

SEQ ID NO: 121143 - DNA, 33 bp, Homo sapien
gtcatgctttatcacgcattactaaggatctga

SEQ ID NO: 121144 - DNA, 33 bp, Homo sapien
gtcatgctttatcacgtattactaaggatctga

SEQ ID NO: 121145 - DNA, 33 bp, Homo sapien
actggcctgcacagtccgaagtattcactatcc

SEQ ID NO: 121146 - DNA, 33 bp, Homo sapien
actggcctgcacagtctgaagtattcactatcc

SEQ ID NO: 121147 - DNA, 33 bp, Homo sapien
ttaattgacattcaaaacttgatggtagaggtg

SEQ ID NO: 121148 - DNA, 33 bp, Homo sapien
ttaattgacattcaaatcttgatggtagaggtg

SEQ ID NO: 121149 - DNA, 33 bp, Homo sapien
agtcatgaaaggtaagaaaagacgagtcacaaa

SEQ ID NO: 121150 - DNA, 33 bp, Homo sapien
agtcatgaaaggtaaggaaagacgagtcacaaa

SEQ ID NO: 121151 - DNA, 33 bp, Homo sapien
acaataatgctggaggaccctcagtcttctctt

SEQ ID NO: 121152 - DNA, 33 bp, Homo sapien
acaataatgctggaggcccctcagtcttctctt

SEQ ID NO: 121153 - DNA, 33 bp, Homo sapien
tttgctggcaagaaaaagagaccagggcaattc

SEQ ID NO: 121154 - DNA, 33 bp, Homo sapien
tttgctggcaagaaaaggagaccagggcaattc

SEQ ID NO: 121155 - DNA, 33 bp, Homo sapien
ggattaactaatccaaatgtatcgctttataga

SEQ ID NO: 121156 - DNA, 33 bp, Homo sapien
ggattaactaatccaactgtatcgctttataga

SEQ ID NO: 121157 - DNA, 33 bp, Homo sapien
tggctgcattcacttcactgtaagatatttttg

SEQ ID NO: 121158 - DNA, 33 bp, Homo sapien
tggctgcattcacttctctgtaagatatttttg

SEQ ID NO: 121159 - DNA, 33 bp, Homo sapien
cctgaccttcccaggacgcttgctgcactggat

SEQ ID NO: 121160 - DNA, 33 bp, Homo sapien
cctgaccttcccaggatgcttgctgcactggat

SEQ ID NO: 121161 - DNA, 33 bp, Homo sapien
atgctaacccaaatccaaacactcccagactct

SEQ ID NO: 121162 - DNA, 33 bp, Homo sapien
atgctaacccaaatccgaacactcccagactct

SEQ ID NO: 121163 - DNA, 33 bp, Homo sapien
tactagaggcagacaacgaaaagctggcagaac

SEQ ID NO: 121164 - DNA, 33 bp, Homo sapien
tactagaggcagacaatgaaaagctggcagaac

SEQ ID NO: 121165 - DNA, 33 bp, Homo sapien
tgataaagcagtatcgcatacatccagcccact

SEQ ID NO: 121166 - DNA, 33 bp, Homo sapien
tgataaagcagtatcgtatacatccagcccact

SEQ ID NO: 121167 - DNA, 33 bp, Homo sapien
cttctaataatttatacattcggagtctacgat

SEQ ID NO: 121168 - DNA, 33 bp, Homo sapien
cttctaataatttatagattcggagtctacgat

SEQ ID NO: 121169 - DNA, 33 bp, Homo sapien
tggcacacaggaggacagaccatcaggggctca

SEQ ID NO: 121170 - DNA, 33 bp, Homo sapien
tggcacacaggaggacggaccatcaggggctca

SEQ ID NO: 121171 - DNA, 33 bp, Homo sapien
gctcatcctgaaaaaacgatgcgatcagcctgc

SEQ ID NO: 121172 - DNA, 33 bp, Homo sapien
gctcatcctgaaaaaatgatgcgatcagcctgc

SEQ ID NO: 121173 - DNA, 33 bp, Homo sapien
gaactcgcctgacttacggccccagctgtttcc

SEQ ID NO: 121174 - DNA, 33 bp, Homo sapien
gaactcgcctgacttatggccccagctgtttcc

SEQ ID NO: 121175 - DNA, 33 bp, Homo sapien
cctccaggactaatgtaaattgctcacaacggt

SEQ ID NO: 121176 - DNA, 33 bp, Homo sapien
cctccaggactaatgtgaattgctcacaacggt

SEQ ID NO: 121177 - DNA, 33 bp, Homo sapien
tagtagacctaagtagacaactagaaaaacaac

SEQ ID NO: 121178 - DNA, 33 bp, Homo sapien
tagtagacctaagtaggcaactagaaaaacaac

SEQ ID NO: 121179 - DNA, 33 bp, Homo sapien
atcaccatgatgtacaataatagatgtcttgaa

SEQ ID NO: 121180 - DNA, 33 bp, Homo sapien
atcaccatgatgtacagtaatagatgtcttgaa

SEQ ID NO: 121181 - DNA, 33 bp, Homo sapien
ttcctggcttaagccaggagctatgtgaactga

SEQ ID NO: 121182 - DNA, 33 bp, Homo sapien
ttcctggcttaagccatgagctatgtgaactga

SEQ ID NO: 121183 - DNA, 33 bp, Homo sapien
tcaggacaaggccaaccgtaaggagagcagatt

SEQ ID NO: 121184 - DNA, 33 bp, Homo sapien
tcaggacaaggccaactgtaaggagagcagatt

SEQ ID NO: 121185 - DNA, 33 bp, Homo sapien
tccacctttccaactacatgagtcaatggagtc

SEQ ID NO: 121186 - DNA, 33 bp, Homo sapien
tccacctttccaactatatgagtcaatggagtc

SEQ ID NO: 121187 - DNA, 33 bp, Homo sapien
ttgctgattagattataaactcctctttggact

SEQ ID NO: 121188 - DNA, 33 bp, Homo sapien
ttgctgattagattatgaactcctctttggact

SEQ ID NO: 121189 - DNA, 33 bp, Homo sapien
gttctgtgacatcacactggtatcttcaaacca

SEQ ID NO: 121190 - DNA, 33 bp, Homo sapien
gttctgtgacatcacattggtatcttcaaacca

SEQ ID NO: 121191 - DNA, 33 bp, Homo sapien
cctatgtacggtgttcatcaattcctatggtat

SEQ ID NO: 121192 - DNA, 33 bp, Homo sapien
cctatgtacggtgttcgtcaattcctatggtat

SEQ ID NO: 121193 - DNA, 33 bp, Homo sapien
gttttctctggctcgacctcacccagaaccagc

SEQ ID NO: 121194 - DNA, 33 bp, Homo sapien
gttttctctggctcgatctcacccagaaccagc

SEQ ID NO: 121195 - DNA, 33 bp, Homo sapien
cttgaccaaacatacaacaggaggaaaagaaga

SEQ ID NO: 121196 - DNA, 33 bp, Homo sapien
cttgaccaaacatacatcaggaggaaaagaaga

SEQ ID NO: 121197 - DNA, 33 bp, Homo sapien
tggaaattgaggtccactgcacaagaactgaaa

SEQ ID NO: 121198 - DNA, 33 bp, Homo sapien
tggaaattgaggtccattgcacaagaactgaaa

SEQ ID NO: 121199 - DNA, 33 bp, Homo sapien
ctcatcgtatcctcctcaatcattgcgccacct

SEQ ID NO: 121200 - DNA, 33 bp, Homo sapien
ctcatcgtatcctccttaatcattgcgccacct

SEQ ID NO: 121201 - DNA, 33 bp, Homo sapien
agcattgaacaccaaacaaaggcgagtaaacaa

SEQ ID NO: 121202 - DNA, 33 bp, Homo sapien
agcattgaacaccaaataaaggcgagtaaacaa

SEQ ID NO: 121203 - DNA, 33 bp, Homo sapien
cttttcaagccaacccactgtgtaacctctatg

SEQ ID NO: 121204 - DNA, 33 bp, Homo sapien
cttttcaagccaaccctctgtgtaacctctatg

SEQ ID NO: 121205 - DNA, 33 bp, Homo sapien
tgatgatgcagatgaccgaaaatgataatggta

SEQ ID NO: 121206 - DNA, 33 bp, Homo sapien
tgatgatgcagatgactgaaaatgataatggta

SEQ ID NO: 121207 - DNA, 33 bp, Homo sapien
ctaaaatgaatcatacaggttttaaatgagatg

SEQ ID NO: 121208 - DNA, 33 bp, Homo sapien
ctaaaatgaatcatacgggttttaaatgagatg

SEQ ID NO: 121209 - DNA, 33 bp, Homo sapien
atagcttcatactacaaccaagtcaccataggc

SEQ ID NO: 121210 - DNA, 33 bp, Homo sapien
atagcttcatactacacccaagtcaccataggc

SEQ ID NO: 121211 - DNA, 33 bp, Homo sapien
ccagactttgtacccccacgacttggtgttggg

SEQ ID NO: 121212 - DNA, 33 bp, Homo sapien
ccagactttgtacccctacgacttggtgttggg

SEQ ID NO: 121213 - DNA, 33 bp, Homo sapien
gatgggaatgcttaaaggagccgatatgactgt

SEQ ID NO: 121214 - DNA, 33 bp, Homo sapien
gatgggaatgcttaaatgagccgatatgactgt

SEQ ID NO: 121215 - DNA, 33 bp, Homo sapien; identical to SEQ ID NO: 121213

SEQ ID NO: 121216 - DNA, 33 bp, Homo sapien; identical to SEQ ID NO: 121214

SEQ ID NO: 121217 - DNA, 33 bp, Homo sapien
cagcaggctgcagatacacgtggacaaaagact

SEQ ID NO: 121218 - DNA, 33 bp, Homo sapien
cagcaggctgcagatatacgtggacaaaagact

SEQ ID NO: 121219 - DNA, 33 bp, Homo sapien; identical to SEQ ID NO: 121217

SEQ ID NO: 121220 - DNA, 33 bp, Homo sapien; identical to SEQ ID NO: 121218

SEQ ID NO: 121221 - DNA, 33 bp, Homo sapien
tattccaatgtggacaaggattttcctcatgta

SEQ ID NO: 121222 - DNA, 33 bp, Homo sapien
tattccaatgtggacagggattttcctcatgta

SEQ ID NO: 121223 - DNA, 33 bp, Homo sapien
agaaagataacaaaaaatgaaatctgtcaccat

SEQ ID NO: 121224 - DNA, 33 bp, Homo sapien
agaaagataacaaaaagtgaaatctgtcaccat

SEQ ID NO: 121225 - DNA, 33 bp, Homo sapien
gcctttcagttaggccaacggagcataagggga

SEQ ID NO: 121226 - DNA, 33 bp, Homo sapien
gcctttcagttaggccgacggagcataagggga

SEQ ID NO: 121227 - DNA, 33 bp, Homo sapien
ccatttgttgaaaagaacattcttcctgcattt

SEQ ID NO: 121228 - DNA, 33 bp, Homo sapien
ccatttgttgaaaagaccattcttcctgcattt

SEQ ID NO: 121229 - DNA, 33 bp, Homo sapien
ttgagaacaatgttaacatcactcatagacatc

SEQ ID NO: 121230 - DNA, 33 bp, Homo sapien
ttgagaacaatgttaatatcactcatagacatc

SEQ ID NO: 121231 - DNA, 33 bp, Homo sapien
gtagggggttaaagaaaagatggcgctaggttt

SEQ ID NO: 121232 - DNA, 33 bp, Homo sapien
gtagggggttaaagaagagatggcgctaggttt

SEQ ID NO: 121233 - DNA, 33 bp, Homo sapien
tctctagtctgaaatacctaaaatcctccactt

SEQ ID NO: 121234 - DNA, 33 bp, Homo sapien
tctctagtctgaaatatctaaaatcctccactt

SEQ ID NO: 121235 - DNA, 33 bp, Homo sapien
tcgctcattcttgtacacaatagaccctgcctt

SEQ ID NO: 121236 - DNA, 33 bp, Homo sapien
tcgctcattcttgtacgcaatagaccctgcctt

SEQ ID NO: 121237 - DNA, 33 bp, Homo sapien
tcacccattcctctctcaaccctgtacccttat

SEQ ID NO: 121238 - DNA, 33 bp, Homo sapien
tcacccattcctctcttaaccctgtacccttat

SEQ ID NO: 121239 - DNA, 33 bp, Homo sapien
tttgatcttcctctcaataatttgacatcaaac

SEQ ID NO: 121240 - DNA, 33 bp, Homo sapien
tttgatcttcctctcagtaatttgacatcaaac

SEQ ID NO: 121241 - DNA, 33 bp, Homo sapien
tccagctacaagttacaccgctctgtgatacaa

SEQ ID NO: 121242 - DNA, 33 bp, Homo sapien
tccagctacaagttacgccgctctgtgatacaa

SEQ ID NO: 121243 - DNA, 33 bp, Homo sapien
caaactgttcctctcacgcagcagaattagaac

SEQ ID NO: 121244 - DNA, 33 bp, Homo sapien
caaactgttcctctcatgcagcagaattagaac

SEQ ID NO: 121245 - DNA, 33 bp, Homo sapien
cgtggtgtattttaagcataaacaatgcatggg

SEQ ID NO: 121246 - DNA, 33 bp, Homo sapien
cgtggtgtattttaagtataaacaatgcatggg

SEQ ID NO: 121247 - DNA, 33 bp, Homo sapien
tactcgctgcaagaaaaagagaagcaaaatagt

SEQ ID NO: 121248 - DNA, 33 bp, Homo sapien
tactcgctgcaagaaagagagaagcaaaatagt

SEQ ID NO: 121249 - DNA, 33 bp, Homo sapien
tgctcaaaaacaaccaatgagggtctcttggat

SEQ ID NO: 121250 - DNA, 33 bp, Homo sapien
tgctcaaaaacaaccagtgagggtctcttggat

SEQ ID NO: 121251 - DNA, 33 bp, Homo sapien
tgtttctagaggagcaaagctgcttccggttac

SEQ ID NO: 121252 - DNA, 33 bp, Homo sapien
tgtttctagaggagcagagctgcttccggttac

SEQ ID NO: 121253 - DNA, 33 bp, Homo sapien
agggcagtgagcctcacgtggattctgtttcta

SEQ ID NO: 121254 - DNA, 33 bp, Homo sapien
agggcagtgagcctcatgtggattctgtttcta

SEQ ID NO: 121255 - DNA, 33 bp, Homo sapien
tcttaatgaggctactcaaaagcaggagaaaca

SEQ ID NO: 121256 - DNA, 33 bp, Homo sapien
tcttaatgaggctacttaaaagcaggagaaaca

SEQ ID NO: 121257 - DNA, 33 bp, Homo sapien
tcaggcaaatctaaaaggaaggatattctataa

SEQ ID NO: 121258 - DNA, 33 bp, Homo sapien
tcaggcaaatctaaaatgaaggatattctataa

SEQ ID NO: 121259 - DNA, 33 bp, Homo sapien
ttctcccgaaactggacaaggaagagtgcctgt

SEQ ID NO: 121260 - DNA, 33 bp, Homo sapien
ttctcccgaaactggataaggaagagtgcctgt

SEQ ID NO: 121261 - DNA, 33 bp, Homo sapien
gggcactgctgtgtacaaggtggccaagtatgc

SEQ ID NO: 121262 - DNA, 33 bp, Homo sapien
gggcactgctgtgtacgaggtggccaagtatgc

SEQ ID NO: 121263 - DNA, 33 bp, Homo sapien
agtttatagataaggacatcaggaccgtcaatt

SEQ ID NO: 121264 - DNA, 33 bp, Homo sapien
agtttatagataaggatatcaggaccgtcaatt

SEQ ID NO: 121265 - DNA, 33 bp, Homo sapien
aatgtaatccaaatgcccagttatgggaaacta

SEQ ID NO: 121266 - DNA, 33 bp, Homo sapien
aatgtaatccaaatgctcagttatgggaaacta

SEQ ID NO: 121267 - DNA, 33 bp, Homo sapien
cacgatggcctaagtgcaactgtgaaggtttgg

SEQ ID NO: 121268 - DNA, 33 bp, Homo sapien
cacgatggcctaagtgtaactgtgaaggtttgg

SEQ ID NO: 121269 - DNA, 33 bp, Homo sapien
tgaatgttaagctcaccgatcttggcctcaggt

SEQ ID NO: 121270 - DNA, 33 bp, Homo sapien
tgaatgttaagctcactgatcttggcctcaggt

SEQ ID NO: 121271 - DNA, 33 bp, Homo sapien
caacctgtaagaatcccgacgttggccagggac

SEQ ID NO: 121272 - DNA, 33 bp, Homo sapien
caacctgtaagaatcctgacgttggccagggac

SEQ ID NO: 121273 - DNA, 33 bp, Homo sapien
acctggatgcctgggacgacagacatgacagac

SEQ ID NO: 121274 - DNA, 33 bp, Homo sapien
acctggatgcctgggatgacagacatgacagac

SEQ ID NO: 121275 - DNA, 33 bp, Homo sapien
tggaagctggcaacatcactcggagccctgaaa

SEQ ID NO: 121276 - DNA, 33 bp, Homo sapien
tggaagctggcaacatgactcggagccctgaaa

SEQ ID NO: 121277 - DNA, 33 bp, Homo sapien
cctaagatccaagatcacagaaagcatgagaac

SEQ ID NO: 121278 - DNA, 33 bp, Homo sapien
cctaagatccaagatcgcagaaagcatgagaac

SEQ ID NO: 121279 - DNA, 33 bp, Homo sapien
tgaccatacggcagaaattcaacatccctcctt

SEQ ID NO: 121280 - DNA, 33 bp, Homo sapien
tgaccatacggcagaatttcaacatccctcctt

SEQ ID NO: 121281 - DNA, 33 bp, Homo sapien
cctttgctgttggactcaagtgggaagtggccc

SEQ ID NO: 121282 - DNA, 33 bp, Homo sapien
cctttgctgttggacttaagtgggaagtggccc

SEQ ID NO: 121283 - DNA, 33 bp, Homo sapien
gtactaactacactaacgcaaaatgccaaaatt

SEQ ID NO: 121284 - DNA, 33 bp, Homo sapien
gtactaactacactaatgcaaaatgccaaaatt

SEQ ID NO: 121285 - DNA, 33 bp, Homo sapien
ccattctcctgtataacaaccccaatgccatca

SEQ ID NO: 121286 - DNA, 33 bp, Homo sapien
ccattctcctgtataataaccccaatgccatca

SEQ ID NO: 121287 - DNA, 33 bp, Homo sapien
tatctcaacctaaaccacttaacctcggataaa

SEQ ID NO: 121288 - DNA, 33 bp, Homo sapien
tatctcaacctaaacctcttaacctcggataaa

SEQ ID NO: 121289 - DNA, 33 bp, Homo sapien
ttgtgttatttggacgcccatttggaagaccat

SEQ ID NO: 121290 - DNA, 33 bp, Homo sapien
ttgtgttatttggacgtccatttggaagaccat

SEQ ID NO: 121291 - DNA, 33 bp, Homo sapien
cctaagaatttctaataaaccctacatggagat

SEQ ID NO: 121292 - DNA, 33 bp, Homo sapien
cctaagaatttctaattaaccctacatggagat

SEQ ID NO: 121293 - DNA, 33 bp, Homo sapien
ttaactgttctgcacaatacttagtaaatagtt

SEQ ID NO: 121294 - DNA, 33 bp, Homo sapien
ttaactgttctgcacagtacttagtaaatagtt

SEQ ID NO: 121295 - DNA, 33 bp, Homo sapien
agctgcttatatcaccagaagaaaagttttaca

SEQ ID NO: 121296 - DNA, 33 bp, Homo sapien
agctgcttatatcaccggaagaaaagttttaca

SEQ ID NO: 121297 - DNA, 33 bp, Homo sapien
tgcctgcctgagtggaaaagttgactctcaggc

SEQ ID NO: 121298 - DNA, 33 bp, Homo sapien
tgcctgcctgagtggagaagttgactctcaggc

SEQ ID NO: 121299 - DNA, 33 bp, Homo sapien
ggctcaaacttcaaaacatgtgtgcaaaagaac

SEQ ID NO: 121300 - DNA, 33 bp, Homo sapien
ggctcaaacttcaaaatatgtgtgcaaaagaac

SEQ ID NO: 121301 - DNA, 33 bp, Homo sapien
agccttgctagaaagcacgaggttggcacatct

SEQ ID NO: 121302 - DNA, 33 bp, Homo sapien
agccttgctagaaagcgcgaggttggcacatct

SEQ ID NO: 121303 - DNA, 33 bp, Homo sapien
atggcggtgctgtgtcaaaacaaagctcccagg

SEQ ID NO: 121304 - DNA, 33 bp, Homo sapien
atggcggtgctgtgtcgaaacaaagctcccagg

SEQ ID NO: 121305 - DNA, 33 bp, Homo sapien
cttacacaaacttagacggtatctaccccatac

SEQ ID NO: 121306 - DNA, 33 bp, Homo sapien
cttacacaaacttagatggtatctaccccatac

SEQ ID NO: 121307 - DNA, 33 bp, Homo sapien
aagattgaaatagcagaagatttcttattaaat

SEQ ID NO: 121308 - DNA, 33 bp, Homo sapien
aagattgaaatagcaggagatttcttattaaat

SEQ ID NO: 121309 - DNA, 33 bp, Homo sapien
tcgtttcaggcaatcaatacttttttcctcccc

SEQ ID NO: 121310 - DNA, 33 bp, Homo sapien
tcgtttcaggcaatcagtacttttttcctcccc

SEQ ID NO: 121311 - DNA, 33 bp, Homo sapien
gaggcctggcagaaacaccgaagtccagatctg

SEQ ID NO: 121312 - DNA, 33 bp, Homo sapien
gaggcctggcagaaacgccgaagtccagatctg

SEQ ID NO: 121313 - DNA, 33 bp, Homo sapien
ctagttccttctcccactggatagaaaaagatg

SEQ ID NO: 121314 - DNA, 33 bp, Homo sapien
ctagttccttctcccagtggatagaaaaagatg

SEQ ID NO: 121315 - DNA, 33 bp, Homo sapien
gcaacattactactctcacacggttctctagtg

SEQ ID NO: 121316 - DNA, 33 bp, Homo sapien
gcaacattactactcttacacggttctctagtg

SEQ ID NO: 121317 - DNA, 33 bp, Homo sapien
gcagtgcttagcataaagatacggaggcagatg

SEQ ID NO: 121318 - DNA, 33 bp, Homo sapien
gcagtgcttagcataaggatacggaggcagatg

SEQ ID NO: 121319 - DNA, 33 bp, Homo sapien
agttccctgggacttcacttttcttggagaagg

SEQ ID NO: 121320 - DNA, 33 bp, Homo sapien
agttccctgggacttcgcttttcttggagaagg

SEQ ID NO: 121321 - DNA, 33 bp, Homo sapien
catgtatatttgaagaggatctggacaaggata

SEQ ID NO: 121322 - DNA, 33 bp, Homo sapien
catgtatatttgaagatgatctggacaaggata

SEQ ID NO: 121323 - DNA, 33 bp, Homo sapien
caggaagtattccttacggtcaaagctcagtgc

SEQ ID NO: 121324 - DNA, 33 bp, Homo sapien
caggaagtattccttatggtcaaagctcagtgc

SEQ ID NO: 121325 - DNA, 33 bp, Homo sapien
tgtggaatggtggtaccgcaatggctacatgga

SEQ ID NO: 121326 - DNA, 33 bp, Homo sapien
tgtggaatggtggtactgcaatggctacatgga

SEQ ID NO: 121327 - DNA, 33 bp, Homo sapien
gggatcacaaatcacaatactcaccattctagt

SEQ ID NO: 121328 - DNA, 33 bp, Homo sapien
gggatcacaaatcacagtactcaccattctagt

SEQ ID NO: 121329 - DNA, 33 bp, Homo sapien
caggccagctgtctgcaagtgggaaaccgcctt

SEQ ID NO: 121330 - DNA, 33 bp, Homo sapien
caggccagctgtctgcgagtgggaaaccgcctt

SEQ ID NO: 121331 - DNA, 33 bp, Homo sapien
ggcctctgctgtgggtaaatataaagcccggac

SEQ ID NO: 121332 - DNA, 33 bp, Homo sapien
ggcctctgctgtgggtgaatataaagcccggac

SEQ ID NO: 121333 - DNA, 33 bp, Homo sapien
ggagttttgccagggaaaatgtgcgtcttttcc

SEQ ID NO: 121334 - DNA, 33 bp, Homo sapien
ggagttttgccagggagaatgtgcgtcttttcc

SEQ ID NO: 121335 - DNA, 33 bp, Homo sapien
taacaattattctttcaatagcaatcagatcct

SEQ ID NO: 121336 - DNA, 33 bp, Homo sapien
taacaattattctttcgatagcaatcagatcct

SEQ ID NO: 121337 - DNA, 33 bp, Homo sapien
ttccatactccttggcagattccagcttccatg

SEQ ID NO: 121338 - DNA, 33 bp, Homo sapien
ttccatactccttggccgattccagcttccatg

SEQ ID NO: 121339 - DNA, 33 bp, Homo sapien
tacttgagaccccaccaagatcaccagttctca

SEQ ID NO: 121340 - DNA, 33 bp, Homo sapien
tacttgagaccccaccgagatcaccagttctca

SEQ ID NO: 121341 - DNA, 33 bp, Homo sapien
aaccccgagctgtttgcagttgccgctggccct

SEQ ID NO: 121342 - DNA, 33 bp, Homo sapien
aaccccgagctgtttgtagttgccgctggccct

SEQ ID NO: 121343 - DNA, 33 bp, Homo sapien
atggagctaacactaaaatatgatggacttgtc

SEQ ID NO: 121344 - DNA, 33 bp, Homo sapien
atggagctaacactaagatatgatggacttgtc

SEQ ID NO: 121345 - DNA, 33 bp, Homo sapien
tccgtgatgattgacccactgtgagcaggatgt

SEQ ID NO: 121346 - DNA, 33 bp, Homo sapien
tccgtgatgattgacctactgtgagcaggatgt

SEQ ID NO: 121347 - DNA, 33 bp, Homo sapien
gacaagagtggtaaaactatttcacagtctatt

SEQ ID NO: 121348 - DNA, 33 bp, Homo sapien
gacaagagtggtaaaagtatttcacagtctatt

SEQ ID NO: 121349 - DNA, 33 bp, Homo sapien
ataaccctcattgtcaagtgttagtaaagcgag

SEQ ID NO: 121350 - DNA, 33 bp, Homo sapien
ataaccctcattgtcacgtgttagtaaagcgag

SEQ ID NO: 121351 - DNA, 33 bp, Homo sapien
cagcagtagctccctacggtcttctagacaggg

SEQ ID NO: 121352 - DNA, 33 bp, Homo sapien
cagcagtagctccctatggtcttctagacaggg

SEQ ID NO: 121353 - DNA, 33 bp, Homo sapien
aaaagatgacaaaataaagacaaactactaagt

SEQ ID NO: 121354 - DNA, 33 bp, Homo sapien
aaaagatgacaaaatacagacaaactactaagt

SEQ ID NO: 121355 - DNA, 33 bp, Homo sapien
caccaaaatgaaatatcaagtgaagttgtttca

SEQ ID NO: 121356 - DNA, 33 bp, Homo sapien
caccaaaatgaaatattaagtgaagttgtttca

SEQ ID NO: 121357 - DNA, 33 bp, Homo sapien
ccagactgcagttgaccgacagcaactgaaact

SEQ ID NO: 121358 - DNA, 33 bp, Homo sapien
ccagactgcagttgacggacagcaactgaaact

SEQ ID NO: 121359 - DNA, 33 bp, Homo sapien
gtgctctagcagccaacctgaagactatttttg

SEQ ID NO: 121360 - DNA, 33 bp, Homo sapien
gtgctctagcagccaatctgaagactatttttg

SEQ ID NO: 121361 - DNA, 33 bp, Homo sapien
accaaaacactgaacaagtgaaatccttagctt

SEQ ID NO: 121362 - DNA, 33 bp, Homo sapien
accaaaacactgaacaggtgaaatccttagctt

SEQ ID NO: 121363 - DNA, 33 bp, Homo sapien
tctgtaccagtgacacactctgtgagacgacac

SEQ ID NO: 121364 - DNA, 33 bp, Homo sapien
tctgtaccagtgacacgctctgtgagacgacac

SEQ ID NO: 121365 - DNA, 33 bp, Homo sapien
tacaaaaattctgggcaaagatgaatctctgct

SEQ ID NO: 121366 - DNA, 33 bp, Homo sapien
tacaaaaattctgggcgaagatgaatctctgct

SEQ ID NO: 121367 - DNA, 33 bp, Homo sapien
ggagcaagtcatgcaaatgttgaaaccttagtt

SEQ ID NO: 121368 - DNA, 33 bp, Homo sapien
ggagcaagtcatgcaattgttgaaaccttagtt

SEQ ID NO: 121369 - DNA, 33 bp, Homo sapien
gaggtggaagagtgaaaggtgaagtcactgggc

SEQ ID NO: 121370 - DNA, 33 bp, Homo sapien
gaggtggaagagtgaagggtgaagtcactgggc

SEQ ID NO: 121371 - DNA, 33 bp, Homo sapien
tgcagatgtggttcaactgagaatcttgagatg

SEQ ID NO: 121372 - DNA, 33 bp, Homo sapien
tgcagatgtggttcaattgagaatcttgagatg

SEQ ID NO: 121373 - DNA, 33 bp, Homo sapien
atgcccctctcatcaacgccaaccaaaaagggc

SEQ ID NO: 121374 - DNA, 33 bp, Homo sapien
atgcccctctcatcaatgccaaccaaaaagggc

SEQ ID NO: 121375 - DNA, 33 bp, Homo sapien
agcgtgaggctgaaaaattagactttattctga

SEQ ID NO: 121376 - DNA, 33 bp, Homo sapien
agcgtgaggctgaaaagttagactttattctga

SEQ ID NO: 121377 - DNA, 33 bp, Homo sapien
caaatgggaggtaaaacgaatgaaagagaaata

SEQ ID NO: 121378 - DNA, 33 bp, Homo sapien
caaatgggaggtaaaatgaatgaaagagaaata

SEQ ID NO: 121379 - DNA, 33 bp, Homo sapien
ccagttttcccactaacgctccaaatgatcata

SEQ ID NO: 121380 - DNA, 33 bp, Homo sapien
ccagttttcccactaatgctccaaatgatcata

SEQ ID NO: 121381 - DNA, 33 bp, Homo sapien
ccattttctcatgggcagaaaggggtcaacata

SEQ ID NO: 121382 - DNA, 33 bp, Homo sapien
ccattttctcatgggcggaaaggggtcaacata

SEQ ID NO: 121383 - DNA, 33 bp, Homo sapien
agattcctattgttgcaattataaattaccaca

SEQ ID NO: 121384 - DNA, 33 bp, Homo sapien
agattcctattgttgctattataaattaccaca

SEQ ID NO: 121385 - DNA, 33 bp, Homo sapien
tgatcttggaatccacacatgagcccttcagga

SEQ ID NO: 121386 - DNA, 33 bp, Homo sapien
tgatcttggaatccacgcatgagcccttcagga

SEQ ID NO: 121387 - DNA, 33 bp, Homo sapien
tacaggtggtaaaagacgtgaacaaatgtgaac

SEQ ID NO: 121388 - DNA, 33 bp, Homo sapien
tacaggtggtaaaagatgtgaacaaatgtgaac

SEQ ID NO: 121389 - DNA, 33 bp, Homo sapien
ccagccctgatacgaacatagaaaagccagagt

SEQ ID NO: 121390 - DNA, 33 bp, Homo sapien
ccagccctgatacgaagatagaaaagccagagt

SEQ ID NO: 121391 - DNA, 33 bp, Homo sapien
caaccactccctttcacaaactgtttgaggtga

SEQ ID NO: 121392 - DNA, 33 bp, Homo sapien
caaccactccctttcataaactgtttgaggtga

SEQ ID NO: 121393 - DNA, 33 bp, Homo sapien
aatacgactgatgaagcataaactaattaattc

SEQ ID NO: 121394 - DNA, 33 bp, Homo sapien
aatacgactgatgaaggataaactaattaattc

SEQ ID NO: 121395 - DNA, 33 bp, Homo sapien
aaacttgtgcatggaaacaaatcttggatatct

SEQ ID NO: 121396 - DNA, 33 bp, Homo sapien
aaacttgtgcatggaagcaaatcttggatatct

SEQ ID NO: 121397 - DNA, 33 bp, Homo sapien
acaggcccataactgaaacttattttcatacat

SEQ ID NO: 121398 - DNA, 33 bp, Homo sapien
acaggcccataactgagacttattttcatacat

SEQ ID NO: 121399 - DNA, 33 bp, Homo sapien
ggacgacacatgacccaggactgaaccatcagt

SEQ ID NO: 121400 - DNA, 33 bp, Homo sapien
ggacgacacatgacccgggactgaaccatcagt

SEQ ID NO: 121401 - DNA, 33 bp, Homo sapien
cataggaatgtggcagaagacaaaaatgtgggg

SEQ ID NO: 121402 - DNA, 33 bp, Homo sapien
cataggaatgtggcaggagacaaaaatgtgggg

SEQ ID NO: 121403 - DNA, 33 bp, Homo sapien
ttgatctgaacttataaataccagtagggatgg

SEQ ID NO: 121404 - DNA, 33 bp, Homo sapien
ttgatctgaacttatagataccagtagggatgg

SEQ ID NO: 121405 - DNA, 33 bp, Homo sapien
gaactcaagcctggcccaatagcatctcatgga

SEQ ID NO: 121406 - DNA, 33 bp, Homo sapien
gaactcaagcctggcctaatagcatctcatgga

SEQ ID NO: 121407 - DNA, 33 bp, Homo sapien
tctcattcaggcctcgaaaaatccagtggggga

SEQ ID NO: 121408 - DNA, 33 bp, Homo sapien
tctcattcaggcctcgtaaaatccagtggggga

SEQ ID NO: 121409 - DNA, 33 bp, Homo sapien
gttacatgtagtgcaaattatggatcaaagctt

SEQ ID NO: 121410 - DNA, 33 bp, Homo sapien
gttacatgtagtgcaagttatggatcaaagctt

SEQ ID NO: 121411 - DNA, 33 bp, Homo sapien
acttggggcctgcctaccaagaatagcaaattc

SEQ ID NO: 121412 - DNA, 33 bp, Homo sapien
acttggggcctgcctatcaagaatagcaaattc

SEQ ID NO: 121413 - DNA, 33 bp, Homo sapien
tagagagaaccagctacaaaagagggtttggcc

SEQ ID NO: 121414 - DNA, 33 bp, Homo sapien
tagagagaaccagctataaaagagggtttggcc

SEQ ID NO: 121415 - DNA, 33 bp, Homo sapien
gctgctgtttctaatacgttattttgacacaca

SEQ ID NO: 121416 - DNA, 33 bp, Homo sapien
gctgctgtttctaatatgttattttgacacaca

SEQ ID NO: 121417 - DNA, 33 bp, Homo sapien
actgacattcaatacacggtgctcttactagca

SEQ ID NO: 121418 - DNA, 33 bp, Homo sapien
actgacattcaatacatggtgctcttactagca

SEQ ID NO: 121419 - DNA, 33 bp, Homo sapien
tcaactcaaaacagaaaagaaaatgtagtagga

SEQ ID NO: 121420 - DNA, 33 bp, Homo sapien
tcaactcaaaacagaatagaaaatgtagtagga

SEQ ID NO: 121421 - DNA, 33 bp, Homo sapien
tctgagccaagaaagacgttatagtgcttcctg

SEQ ID NO: 121422 - DNA, 33 bp, Homo sapien
tctgagccaagaaagatgttatagtgcttcctg

SEQ ID NO: 121423 - DNA, 33 bp, Homo sapien
ttacttctaggccacactaagtcctccaggagc

SEQ ID NO: 121424 - DNA, 33 bp, Homo sapien
ttacttctaggccacattaagtcctccaggagc

SEQ ID NO: 121425 - DNA, 33 bp, Homo sapien
agagcctggtcaggcgcacagaattggagacta

SEQ ID NO: 121426 - DNA, 33 bp, Homo sapien
agagcctggtcaggcgtacagaattggagacta

SEQ ID NO: 121427 - DNA, 33 bp, Homo sapien
ggggatgttgctaaacactctaaagtacatagg

SEQ ID NO: 121428 - DNA, 33 bp, Homo sapien
ggggatgttgctaaaccctctaaagtacatagg

SEQ ID NO: 121429 - DNA, 33 bp, Homo sapien
cccagattccagcctcagagaactattttttga

SEQ ID NO: 121430 - DNA, 33 bp, Homo sapien
cccagattccagcctcggagaactattttttga

SEQ ID NO: 121431 - DNA, 33 bp, Homo sapien
agcacaaaatagggtacgaaaaatgctcactga

SEQ ID NO: 121432 - DNA, 33 bp, Homo sapien
agcacaaaatagggtatgaaaaatgctcactga

SEQ ID NO: 121433 - DNA, 33 bp, Homo sapien
tgggggcaaaatctaacctatcaggctggaagc

SEQ ID NO: 121434 - DNA, 33 bp, Homo sapien
tgggggcaaaatctaatctatcaggctggaagc

SEQ ID NO: 121435 - DNA, 33 bp, Homo sapien
agagtagagaatgagacagtcaaggtccctatc

SEQ ID NO: 121436 - DNA, 33 bp, Homo sapien
agagtagagaatgagatagtcaaggtccctatc

SEQ ID NO: 121437 - DNA, 33 bp, Homo sapien
cattttcagcaaaataaagcaaggagcagagca

SEQ ID NO: 121438 - DNA, 33 bp, Homo sapien
cattttcagcaaaatatagcaaggagcagagca

SEQ ID NO: 121439 - DNA, 33 bp, Homo sapien
cctatagaatcttgaacgacagagctgggcagg

SEQ ID NO: 121440 - DNA, 33 bp, Homo sapien
cctatagaatcttgaatgacagagctgggcagg

SEQ ID NO: 121441 - DNA, 33 bp, Homo sapien
tgttaactctcatttcccaggcctgattctgta

SEQ ID NO: 121442 - DNA, 33 bp, Homo sapien
tgttaactctcatttcgcaggcctgattctgta

SEQ ID NO: 121443 - DNA, 33 bp, Homo sapien
gtgttatttcaagttgcaaaatattgagtagaa

SEQ ID NO: 121444 - DNA, 33 bp, Homo sapien
gtgttatttcaagttgtaaaatattgagtagaa

SEQ ID NO: 121445 - DNA, 33 bp, Homo sapien
gtaagtcaggagagacggtaaatgccaagaagc

SEQ ID NO: 121446 - DNA, 33 bp, Homo sapien
gtaagtcaggagagactgtaaatgccaagaagc

SEQ ID NO: 121447 - DNA, 33 bp, Homo sapien
gctaatctcaaattcaaatcaaactgaacatag

SEQ ID NO: 121448 - DNA, 33 bp, Homo sapien
gctaatctcaaattcagatcaaactgaacatag

SEQ ID NO: 121449 - DNA, 33 bp, Homo sapien
caatcactgaaatccaatctggcaaatggtcca

SEQ ID NO: 121450 - DNA, 33 bp, Homo sapien
caatcactgaaatccagtctggcaaatggtcca

SEQ ID NO: 121451 - DNA, 33 bp, Homo sapien
accagagccatcgccaactgccaagtgcaagga

SEQ ID NO: 121452 - DNA, 33 bp, Homo sapien
accagagccatcgccacctgccaagtgcaagga

SEQ ID NO: 121453 - DNA, 33 bp, Homo sapien
gggaagaagcacccatcagcactaagctctaag

SEQ ID NO: 121454 - DNA, 33 bp, Homo sapien
gggaagaagcacccattagcactaagctctaag

SEQ ID NO: 121455 - DNA, 33 bp, Homo sapien
tcggtcacgatggggacgtttacagggaaccgt

SEQ ID NO: 121456 - DNA, 33 bp, Homo sapien
tcggtcacgatggggatgtttacagggaaccgt

SEQ ID NO: 121457 - DNA, 33 bp, Homo sapien
tgaggacaaaatcaacacattgacagtggcaaa

SEQ ID NO: 121458 - DNA, 33 bp, Homo sapien
tgaggacaaaatcaacccattgacagtggcaaa

SEQ ID NO: 121459 - DNA, 33 bp, Homo sapien
tatctgtggtggtgcacataaataacaacttct

SEQ ID NO: 121460 - DNA, 33 bp, Homo sapien
tatctgtggtggtgcatataaataacaacttct

SEQ ID NO: 121461 - DNA, 33 bp, Homo sapien
ttccatcactgcagaaagttccagtggacggtg

SEQ ID NO: 121462 - DNA, 33 bp, Homo sapien
ttccatcactgcagaatgttccagtggacggtg

SEQ ID NO: 121463 - DNA, 33 bp, Homo sapien
tgcccctatttcagagaagccattagggagggt

SEQ ID NO: 121464 - DNA, 33 bp, Homo sapien
tgcccctatttcagaggagccattagggagggt

SEQ ID NO: 121465 - DNA, 33 bp, Homo sapien
attcaatcagcacccacgcggtaggaacaatta

SEQ ID NO: 121466 - DNA, 33 bp, Homo sapien
attcaatcagcacccatgcggtaggaacaatta

SEQ ID NO: 121467 - DNA, 33 bp, Homo sapien
ccagaagtgtcccagaaaggcctgcagacaatg

SEQ ID NO: 121468 - DNA, 33 bp, Homo sapien
ccagaagtgtcccagagaggcctgcagacaatg

SEQ ID NO: 121469 - DNA, 33 bp, Homo sapien
tgggctttcatactccggcctcctgatcattgt

SEQ ID NO: 121470 - DNA, 33 bp, Homo sapien
tgggctttcatactcctgcctcctgatcattgt

SEQ ID NO: 121471 - DNA, 33 bp, Homo sapien
cccatgtgaaagatcacggagttagtaggtgga

SEQ ID NO: 121472 - DNA, 33 bp, Homo sapien
cccatgtgaaagatcatggagttagtaggtgga

SEQ ID NO: 121473 - DNA, 33 bp, Homo sapien
ttcctctgtccatctcaaagcaggcaacttccc

SEQ ID NO: 121474 - DNA, 33 bp, Homo sapien
ttcctctgtccatctccaagcaggcaacttccc

SEQ ID NO: 121475 - DNA, 33 bp, Homo sapien
cagcaggtatcccaaaaagctgggccagagaag

SEQ ID NO: 121476 - DNA, 33 bp, Homo sapien
cagcaggtatcccaaagagctgggccagagaag

SEQ ID NO: 121477 - DNA, 33 bp, Homo sapien
cctagcctatctgtccagccagtcgaacctcat

SEQ ID NO: 121478 - DNA, 33 bp, Homo sapien
cctagcctatctgtccggccagtcgaacctcat

SEQ ID NO: 121479 - DNA, 33 bp, Homo sapien
atactcactgttggaactggggacatcattcgc

SEQ ID NO: 121480 - DNA, 33 bp, Homo sapien
atactcactgttggaattggggacatcattcgc

SEQ ID NO: 121481 - DNA, 33 bp, Homo sapien
atcactgtcttcccaactcacagtcaaacttat

SEQ ID NO: 121482 - DNA, 33 bp, Homo sapien
atcactgtcttcccaattcacagtcaaacttat

SEQ ID NO: 121483 - DNA, 33 bp, Homo sapien
taagcgactgtttgataagattagtagggacag

SEQ ID NO: 121484 - DNA, 33 bp, Homo sapien
taagcgactgtttgatcagattagtagggacag

SEQ ID NO: 121485 - DNA, 33 bp, Homo sapien
taatgagtagccacagaaatgggagtggaacca

SEQ ID NO: 121486 - DNA, 33 bp, Homo sapien
taatgagtagccacaggaatgggagtggaacca

SEQ ID NO: 121487 - DNA, 33 bp, Homo sapien
agaaatgccattgctgcagagtggaattaacca

SEQ ID NO: 121488 - DNA, 33 bp, Homo sapien
agaaatgccattgctgtagagtggaattaacca

SEQ ID NO: 121489 - DNA, 33 bp, Homo sapien
atggaaacagtgagtcaaattaatcctaagtct

SEQ ID NO: 121490 - DNA, 33 bp, Homo sapien
atggaaacagtgagtcgaattaatcctaagtct

SEQ ID NO: 121491 - DNA, 33 bp, Homo sapien
atgagctaccatgcacagcccaaaagtgcattt

SEQ ID NO: 121492 - DNA, 33 bp, Homo sapien
atgagctaccatgcacggcccaaaagtgcattt

SEQ ID NO: 121493 - DNA, 33 bp, Homo sapien
cagatgtttatgttcaactgggcactgtgtcca

SEQ ID NO: 121494 - DNA, 33 bp, Homo sapien
cagatgtttatgttcagctgggcactgtgtcca

SEQ ID NO: 121495 - DNA, 33 bp, Homo sapien
atctctgccaatccaccaccaggtaattgagga

SEQ ID NO: 121496 - DNA, 33 bp, Homo sapien
atctctgccaatccactaccaggtaattgagga

SEQ ID NO: 121497 - DNA, 33 bp, Homo sapien
tcgaactttatcttcccatcacccacagtttct

SEQ ID NO: 121498 - DNA, 33 bp, Homo sapien
tcgaactttatcttcctatcacccacagtttct

SEQ ID NO: 121499 - DNA, 33 bp, Homo sapien
ctcattcagtcttcaacggattcagtgcccatt

SEQ ID NO: 121500 - DNA, 33 bp, Homo sapien
ctcattcagtcttcaatggattcagtgcccatt

SEQ ID NO: 121501 - DNA, 33 bp, Homo sapien
ctgtgatctttatagacgaggaagtggagcccc

SEQ ID NO: 121502 - DNA, 33 bp, Homo sapien
ctgtgatctttatagatgaggaagtggagcccc

SEQ ID NO: 121503 - DNA, 33 bp, Homo sapien
aggaggaaaacaaatgaaatgcctgccctcaca

SEQ ID NO: 121504 - DNA, 33 bp, Homo sapien
aggaggaaaacaaatggaatgcctgccctcaca

SEQ ID NO: 121505 - DNA, 33 bp, Homo sapien
taagcagatcatgagaaagaggtaacaactgaa

SEQ ID NO: 121506 - DNA, 33 bp, Homo sapien
taagcagatcatgagagagaggtaacaactgaa

SEQ ID NO: 121507 - DNA, 33 bp, Homo sapien
tcactgaagttttgggaaagaatgagatcatcc

SEQ ID NO: 121508 - DNA, 33 bp, Homo sapien
tcactgaagttttggggaagaatgagatcatcc

SEQ ID NO: 121509 - DNA, 33 bp, Homo sapien
gctaagcatcacttctaagaacaatgagacatc

SEQ ID NO: 121510 - DNA, 33 bp, Homo sapien
gctaagcatcacttctgagaacaatgagacatc

SEQ ID NO: 121511 - DNA, 33 bp, Homo sapien
cacagtcccctagcgacgaccttgttctcagga

SEQ ID NO: 121512 - DNA, 33 bp, Homo sapien
cacagtcccctagcgatgaccttgttctcagga

SEQ ID NO: 121513 - DNA, 33 bp, Homo sapien
gtggaatcccatgcccagcatttgttttgagat

SEQ ID NO: 121514 - DNA, 33 bp, Homo sapien
gtggaatcccatgcccggcatttgttttgagat

SEQ ID NO: 121515 - DNA, 33 bp, Homo sapien
tccaggacaaccttgggcaagcacccgtccctc

SEQ ID NO: 121516 - DNA, 33 bp, Homo sapien
tccaggacaaccttggtcaagcacccgtccctc

SEQ ID NO: 121517 - DNA, 33 bp, Homo sapien
gccaccgaatggggatgacaagtacataaattc

SEQ ID NO: 121518 - DNA, 33 bp, Homo sapien
gccaccgaatggggattacaagtacataaattc

SEQ ID NO: 121519 - DNA, 33 bp, Homo sapien
gactttatacagaagcactgaaagttcatgtga

SEQ ID NO: 121520 - DNA, 33 bp, Homo sapien
gactttatacagaagcgctgaaagttcatgtga

SEQ ID NO: 121521 - DNA, 33 bp, Homo sapien
aactggtaaatataaactctgattagtcagcct

SEQ ID NO: 121522 - DNA, 33 bp, Homo sapien
aactggtaaatataaattctgattagtcagcct

SEQ ID NO: 121523 - DNA, 33 bp, Homo sapien
atggttaaccaattacaacatatgagcaaggga

SEQ ID NO: 121524 - DNA, 33 bp, Homo sapien
atggttaaccaattacgacatatgagcaaggga

SEQ ID NO: 121525 - DNA, 33 bp, Homo sapien
atcctgggtatgctacagaggaaattgtgggtt

SEQ ID NO: 121526 - DNA, 33 bp, Homo sapien
atcctgggtatgctacggaggaaattgtgggtt

SEQ ID NO: 121527 - DNA, 33 bp, Homo sapien
gagccatgtttgtgtcactacattccagcttgg

SEQ ID NO: 121528 - DNA, 33 bp, Homo sapien
gagccatgtttgtgtctctacattccagcttgg

SEQ ID NO: 121529 - DNA, 33 bp, Homo sapien
gggtccaggtcgcccacaaggttctcaggatta

SEQ ID NO: 121530 - DNA, 33 bp, Homo sapien
gggtccaggtcgcccagaaggttctcaggatta

SEQ ID NO: 121531 - DNA, 33 bp, Homo sapien
aaagggctgtctcttaaaatctagataaggttg

SEQ ID NO: 121532 - DNA, 33 bp, Homo sapien
aaagggctgtctcttacaatctagataaggttg

SEQ ID NO: 121533 - DNA, 33 bp, Homo sapien
tcttgatttggattgacggcctactctgacagt

SEQ ID NO: 121534 - DNA, 33 bp, Homo sapien
tcttgatttggattgagggcctactctgacagt

SEQ ID NO: 121535 - DNA, 33 bp, Homo sapien
tttcggcatttgtatacagattggtgctgtccc

SEQ ID NO: 121536 - DNA, 33 bp, Homo sapien
tttcggcatttgtatagagattggtgctgtccc

SEQ ID NO: 121537 - DNA, 33 bp, Homo sapien
atgtactgtggattaactacctgaagctgtgcc

SEQ ID NO: 121538 - DNA, 33 bp, Homo sapien
atgtactgtggattaagtacctgaagctgtgcc

SEQ ID NO: 121539 - DNA, 33 bp, Homo sapien
aagacagcaattaaaaatcttccaaattctgag

SEQ ID NO: 121540 - DNA, 33 bp, Homo sapien
aagacagcaattaaaagtcttccaaattctgag

SEQ ID NO: 121541 - DNA, 33 bp, Homo sapien
gcaggcactaaagccaaaacccaggtgtccaca

SEQ ID NO: 121542 - DNA, 33 bp, Homo sapien
gcaggcactaaagccagaacccaggtgtccaca

SEQ ID NO: 121543 - DNA, 33 bp, Homo sapien
ttggctacttgggcccccaatgtgatgaagaaa

SEQ ID NO: 121544 - DNA, 33 bp, Homo sapien
ttggctacttgggcccgcaatgtgatgaagaaa

SEQ ID NO: 121545 - DNA, 33 bp, Homo sapien
ctcttggtggtaatcacggcccatttgcacctc

SEQ ID NO: 121546 - DNA, 33 bp, Homo sapien
ctcttggtggtaatcatggcccatttgcacctc

SEQ ID NO: 121547 - DNA, 33 bp, Homo sapien
agtctccttaccctgcaatgatatcttctgagt

SEQ ID NO: 121548 - DNA, 33 bp, Homo sapien
agtctccttaccctgcgatgatatcttctgagt

SEQ ID NO: 121549 - DNA, 33 bp, Homo sapien
taatcgtcgtggtgaacgcctatatttaatgtg

SEQ ID NO: 121550 - DNA, 33 bp, Homo sapien
taatcgtcgtggtgaatgcctatatttaatgtg

SEQ ID NO: 121551 - DNA, 33 bp, Homo sapien
ctacctcttccacagcaatcaacagggcctatc

SEQ ID NO: 121552 - DNA, 33 bp, Homo sapien
ctacctcttccacagccatcaacagggcctatc

SEQ ID NO: 121553 - DNA, 33 bp, Homo sapien
gaggttgtttagtccgaccctctggcactggga

SEQ ID NO: 121554 - DNA, 33 bp, Homo sapien
gaggttgtttagtccggccctctggcactggga

SEQ ID NO: 121555 - DNA, 33 bp, Homo sapien
agacctgcctggtgaacctgttcatttgtatca

SEQ ID NO: 121556 - DNA, 33 bp, Homo sapien
agacctgcctggtgaatctgttcatttgtatca

SEQ ID NO: 121557 - DNA, 33 bp, Homo sapien
aataagatctgccttacgcacactaggagcatc

SEQ ID NO: 121558 - DNA, 33 bp, Homo sapien
aataagatctgccttatgcacactaggagcatc

SEQ ID NO: 121559 - DNA, 33 bp, Homo sapien
gtagcagccaaaggaactctgactaatctgtgg

SEQ ID NO: 121560 - DNA, 33 bp, Homo sapien
gtagcagccaaaggaattctgactaatctgtgg

SEQ ID NO: 121561 - DNA, 33 bp, Homo sapien
tgcttcaagaaaaggaagttaggccagccacag

SEQ ID NO: 121562 - DNA, 33 bp, Homo sapien
tgcttcaagaaaaggaggttaggccagccacag

SEQ ID NO: 121563 - DNA, 33 bp, Homo sapien
ctttctcagagcctggaaatgaaacatgataag

SEQ ID NO: 121564 - DNA, 33 bp, Homo sapien
ctttctcagagcctgggaatgaaacatgataag

SEQ ID NO: 121565 - DNA, 33 bp, Homo sapien
ttccccagtcaggccacgttggagcccatcttt

SEQ ID NO: 121566 - DNA, 33 bp, Homo sapien
ttccccagtcaggccatgttggagcccatcttt

SEQ ID NO: 121567 - DNA, 33 bp, Homo sapien
caatgctgtagtcctacaatcttaaatgaaaaa

SEQ ID NO: 121568 - DNA, 33 bp, Homo sapien
caatgctgtagtcctataatcttaaatgaaaaa

SEQ ID NO: 121569 - DNA, 33 bp, Homo sapien
cacaggatggaacacaagacagagtactggaga

SEQ ID NO: 121570 - DNA, 33 bp, Homo sapien
cacaggatggaacacaggacagagtactggaga

SEQ ID NO: 121571 - DNA, 33 bp, Homo sapien
aggcttgggttcaggccctattcttttggcaag

SEQ ID NO: 121572 - DNA, 33 bp, Homo sapien
aggcttgggttcaggctctattcttttggcaag

SEQ ID NO: 121573 - DNA, 33 bp, Homo sapien
ctaattacagtttcaacagacaacggaccgggc

SEQ ID NO: 121574 - DNA, 33 bp, Homo sapien
ctaattacagtttcaatagacaacggaccgggc

SEQ ID NO: 121575 - DNA, 33 bp, Homo sapien
gtgacatttcaccggaccaatcttatttccctg

SEQ ID NO: 121576 - DNA, 33 bp, Homo sapien
gtgacatttcaccggatcaatcttatttccctg

SEQ ID NO: 121577 - DNA, 33 bp, Homo sapien
cctgtattaggaacccaagtgagaacataaaat

SEQ ID NO: 121578 - DNA, 33 bp, Homo sapien
cctgtattaggaacccgagtgagaacataaaat

SEQ ID NO: 121579 - DNA, 33 bp, Homo sapien
ctttgaaaccatcagagagcagtcaggcagacc

SEQ ID NO: 121580 - DNA, 33 bp, Homo sapien
ctttgaaaccatcagatagcagtcaggcagacc

SEQ ID NO: 121581 - DNA, 33 bp, Homo sapien
ccttgaattacatctcaaatgtagctaaactga

SEQ ID NO: 121582 - DNA, 33 bp, Homo sapien
ccttgaattacatctcgaatgtagctaaactga

SEQ ID NO: 121583 - DNA, 33 bp, Homo sapien
acttgggcatcacatacaaccattccccagtga

SEQ ID NO: 121584 - DNA, 33 bp, Homo sapien
acttgggcatcacatataaccattccccagtga

SEQ ID NO: 121585 - DNA, 33 bp, Homo sapien
catacccctacagcccagaaagagctagagagg

SEQ ID NO: 121586 - DNA, 33 bp, Homo sapien
catacccctacagcccggaaagagctagagagg

SEQ ID NO: 121587 - DNA, 33 bp, Homo sapien
gactgctggtctctgacaaaggatgtggaggat

SEQ ID NO: 121588 - DNA, 33 bp, Homo sapien
gactgctggtctctgataaaggatgtggaggat

SEQ ID NO: 121589 - DNA, 33 bp, Homo sapien
agtttctgcagtgcaacgggcctccaactgggg

SEQ ID NO: 121590 - DNA, 33 bp, Homo sapien
agtttctgcagtgcaatgggcctccaactgggg

SEQ ID NO: 121591 - DNA, 33 bp, Homo sapien
cttatcaccgaattacacgaaattgtttggtaa

SEQ ID NO: 121592 - DNA, 33 bp, Homo sapien
cttatcaccgaattacgcgaaattgtttggtaa

SEQ ID NO: 121593 - DNA, 33 bp, Homo sapien
aattttgatgaagcgaacaacttaatagagcac

SEQ ID NO: 121594 - DNA, 33 bp, Homo sapien
aattttgatgaagcgatcaacttaatagagcac

SEQ ID NO: 121595 - DNA, 33 bp, Homo sapien
ttagggactgtgcatcacaccttattcagtact

SEQ ID NO: 121596 - DNA, 33 bp, Homo sapien
ttagggactgtgcatcgcaccttattcagtact

SEQ ID NO: 121597 - DNA, 33 bp, Homo sapien
ggctaggtcaaaaagcagagagtaaagcaggct

SEQ ID NO: 121598 - DNA, 33 bp, Homo sapien
ggctaggtcaaaaagcggagagtaaagcaggct

SEQ ID NO: 121599 - DNA, 33 bp, Homo sapien
agcttgggccagggacggcttaaaaggaagctg

SEQ ID NO: 121600 - DNA, 33 bp, Homo sapien
agcttgggccagggactgcttaaaaggaagctg

SEQ ID NO: 121601 - DNA, 33 bp, Homo sapien
aagtgaagaccatgtaggaagaggagactgatt

SEQ ID NO: 121602 - DNA, 33 bp, Homo sapien
aagtgaagaccatgtatgaagaggagactgatt

SEQ ID NO: 121603 - DNA, 33 bp, Homo sapien
ccttcctgtggtgcaccgagctgagcttactca

SEQ ID NO: 121604 - DNA, 33 bp, Homo sapien
ccttcctgtggtgcactgagctgagcttactca

SEQ ID NO: 121605 - DNA, 33 bp, Homo sapien
aattggccattggttcaatccaggtcaagtcct

SEQ ID NO: 121606 - DNA, 33 bp, Homo sapien
aattggccattggttcgatccaggtcaagtcct

SEQ ID NO: 121607 - DNA, 33 bp, Homo sapien
ccaggtgctggagatactaaaaaggacaagaca

SEQ ID NO: 121608 - DNA, 33 bp, Homo sapien
ccaggtgctggagatattaaaaaggacaagaca

SEQ ID NO: 121609 - DNA, 33 bp, Homo sapien
gccctgttaagttctaagtcttccatccagtca

SEQ ID NO: 121610 - DNA, 33 bp, Homo sapien
gccctgttaagttctacgtcttccatccagtca

SEQ ID NO: 121611 - DNA, 33 bp, Homo sapien
ctctgactgcagcatacgttatttcatgcaggc

SEQ ID NO: 121612 - DNA, 33 bp, Homo sapien
ctctgactgcagcataggttatttcatgcaggc

SEQ ID NO: 121613 - DNA, 33 bp, Homo sapien
gcagtagtctcttcccagagctcacctcctcca

SEQ ID NO: 121614 - DNA, 33 bp, Homo sapien
gcagtagtctcttcccggagctcacctcctcca

SEQ ID NO: 121615 - DNA, 33 bp, Homo sapien
attcatactagggttcaagacttaggctgggag

SEQ ID NO: 121616 - DNA, 33 bp, Homo sapien
attcatactagggttccagacttaggctgggag

SEQ ID NO: 121617 - DNA, 33 bp, Homo sapien
tcactgaaacgctgtaacttgtcacgtggtgta

SEQ ID NO: 121618 - DNA, 33 bp, Homo sapien
tcactgaaacgctgtaccttgtcacgtggtgta

SEQ ID NO: 121619 - DNA, 33 bp, Homo sapien
aggaagacacaaaaataagctaaactagtgcac

SEQ ID NO: 121620 - DNA, 33 bp, Homo sapien
aggaagacacaaaaatgagctaaactagtgcac

SEQ ID NO: 121621 - DNA, 33 bp, Homo sapien
ccccatgatggaaaacacctcaacagctacact

SEQ ID NO: 121622 - DNA, 33 bp, Homo sapien
ccccatgatggaaaacgcctcaacagctacact

SEQ ID NO: 121623 - DNA, 33 bp, Homo sapien
gcttggactgacttcaaggcaacggcacctgca

SEQ ID NO: 121624 - DNA, 33 bp, Homo sapien
gcttggactgacttcagggcaacggcacctgca

SEQ ID NO: 121625 - DNA, 33 bp, Homo sapien
gatcaaagagggaaacaacaaatataggcttgt

SEQ ID NO: 121626 - DNA, 33 bp, Homo sapien
gatcaaagagggaaacgacaaatataggcttgt

SEQ ID NO: 121627 - DNA, 33 bp, Homo sapien
atcagggttccttgtgaatatataatttggcct

SEQ ID NO: 121628 - DNA, 33 bp, Homo sapien
atcagggttccttgtgcatatataatttggcct

SEQ ID NO: 121629 - DNA, 33 bp, Homo sapien
gatcaatatttttgtaacttctaatctcatctc

SEQ ID NO: 121630 - DNA, 33 bp, Homo sapien
gatcaatatttttgtagcttctaatctcatctc

SEQ ID NO: 121631 - DNA, 33 bp, Homo sapien
ctttcaagaagtccacaaggtgaaagactctcc

SEQ ID NO: 121632 - DNA, 33 bp, Homo sapien
ctttcaagaagtccacgaggtgaaagactctcc

SEQ ID NO: 121633 - DNA, 33 bp, Homo sapien
ccaactgctgactcaacgccttacaccaagtga

SEQ ID NO: 121634 - DNA, 33 bp, Homo sapien
ccaactgctgactcaatgccttacaccaagtga

SEQ ID NO: 121635 - DNA, 33 bp, Homo sapien
caaggtgaaatctgaacttaggatgtttggatt

SEQ ID NO: 121636 - DNA, 33 bp, Homo sapien
caaggtgaaatctgaatttaggatgtttggatt

SEQ ID NO: 121637 - DNA, 33 bp, Homo sapien
gagagaatagagggaaaaactgatgtggctgac

SEQ ID NO: 121638 - DNA, 33 bp, Homo sapien
gagagaatagagggaagaactgatgtggctgac

SEQ ID NO: 121639 - DNA, 33 bp, Homo sapien
ttcttcttactgtggactcacccccttagcagc

SEQ ID NO: 121640 - DNA, 33 bp, Homo sapien
ttcttcttactgtggattcacccccttagcagc

SEQ ID NO: 121641 - DNA, 33 bp, Homo sapien
cactggagtctagtccagaggccgagatggcct

SEQ ID NO: 121642 - DNA, 33 bp, Homo sapien
cactggagtctagtccggaggccgagatggcct

SEQ ID NO: 121643 - DNA, 33 bp, Homo sapien
acttgggtgttccacaagccctagctctctaac

SEQ ID NO: 121644 - DNA, 33 bp, Homo sapien
acttgggtgttccacaggccctagctctctaac

SEQ ID NO: 121645 - DNA, 33 bp, Homo sapien
tggttttttaacttcaagacaactctgcttcta

SEQ ID NO: 121646 - DNA, 33 bp, Homo sapien
tggttttttaacttcacgacaactctgcttcta

SEQ ID NO: 121647 - DNA, 33 bp, Homo sapien
caagagcactcaagtgaagaacacaaggcaagt

SEQ ID NO: 121648 - DNA, 33 bp, Homo sapien
caagagcactcaagtgcagaacacaaggcaagt

SEQ ID NO: 121649 - DNA, 33 bp, Homo sapien
gagacccacgctaagacaacttatgccaattcc

SEQ ID NO: 121650 - DNA, 33 bp, Homo sapien
gagacccacgctaagataacttatgccaattcc

SEQ ID NO: 121651 - DNA, 33 bp, Homo sapien
tgtacctctcatcccacgtcccacagtcagggg

SEQ ID NO: 121652 - DNA, 33 bp, Homo sapien
tgtacctctcatcccatgtcccacagtcagggg

SEQ ID NO: 121653 - DNA, 33 bp, Homo sapien
ggttctgatgatttgccatctgcagttatctgg

SEQ ID NO: 121654 - DNA, 33 bp, Homo sapien
ggttctgatgatttgctatctgcagttatctgg

SEQ ID NO: 121655 - DNA, 33 bp, Homo sapien
aagttggcatcttaaaattctgatatctgatta

SEQ ID NO: 121656 - DNA, 33 bp, Homo sapien
aagttggcatcttaaacttctgatatctgatta

SEQ ID NO: 121657 - DNA, 33 bp, Homo sapien
cagaatgattccactcaaaaccctctgctccca

SEQ ID NO: 121658 - DNA, 33 bp, Homo sapien
cagaatgattccactcgaaaccctctgctccca

SEQ ID NO: 121659 - DNA, 33 bp, Homo sapien
catgtactgaatttccagctatatccacatgca

SEQ ID NO: 121660 - DNA, 33 bp, Homo sapien
catgtactgaatttccggctatatccacatgca

SEQ ID NO: 121661 - DNA, 33 bp, Homo sapien
cagggaaaaagtatgaagagtccagaaagcctg

SEQ ID NO: 121662 - DNA, 33 bp, Homo sapien
cagggaaaaagtatgatgagtccagaaagcctg

SEQ ID NO: 121663 - DNA, 33 bp, Homo sapien
atttttgcggctaaacactcttgagtttctgta

SEQ ID NO: 121664 - DNA, 33 bp, Homo sapien
atttttgcggctaaaccctcttgagtttctgta

SEQ ID NO: 121665 - DNA, 33 bp, Homo sapien
ggggaagaagcctcataagggatgttctgacta

SEQ ID NO: 121666 - DNA, 33 bp, Homo sapien
ggggaagaagcctcatgagggatgttctgacta

SEQ ID NO: 121667 - DNA, 33 bp, Homo sapien
agtctccgcaggaggcaatgctcaatgggtcca

SEQ ID NO: 121668 - DNA, 33 bp, Homo sapien
agtctccgcaggaggcgatgctcaatgggtcca

SEQ ID NO: 121669 - DNA, 33 bp, Homo sapien
gttattcccggcacaccgtgggacctgctcatg

SEQ ID NO: 121670 - DNA, 33 bp, Homo sapien
gttattcccggcacactgtgggacctgctcatg

SEQ ID NO: 121671 - DNA, 33 bp, Homo sapien
ggtcactttcctctataaacagccaaggtcaaa

SEQ ID NO: 121672 - DNA, 33 bp, Homo sapien
ggtcactttcctctatgaacagccaaggtcaaa

SEQ ID NO: 121673 - DNA, 33 bp, Homo sapien
cacctggttttctttccagatggagaaagtgct

SEQ ID NO: 121674 - DNA, 33 bp, Homo sapien
cacctggttttctttctagatggagaaagtgct

SEQ ID NO: 121675 - DNA, 33 bp, Homo sapien
gagttactgaaggaacaaagagaatttctgcat

SEQ ID NO: 121676 - DNA, 33 bp, Homo sapien
gagttactgaaggaaccaagagaatttctgcat

SEQ ID NO: 121677 - DNA, 33 bp, Homo sapien
tcactgagataaaggacgtgaaagtgcttgcag

SEQ ID NO: 121678 - DNA, 33 bp, Homo sapien
tcactgagataaaggatgtgaaagtgcttgcag

SEQ ID NO: 121679 - DNA, 33 bp, Homo sapien
tccacagctctttttccatatcatgccagatca

SEQ ID NO: 121680 - DNA, 33 bp, Homo sapien
tccacagctctttttctatatcatgccagatca

SEQ ID NO: 121681 - DNA, 33 bp, Homo sapien
gaactttcagcagaacaggatgcctggcaggca

SEQ ID NO: 121682 - DNA, 33 bp, Homo sapien
gaactttcagcagaacgggatgcctggcaggca

SEQ ID NO: 121683 - DNA, 33 bp, Homo sapien
gcaaactccctagctacgcagctgactttttac

SEQ ID NO: 121684 - DNA, 33 bp, Homo sapien
gcaaactccctagctatgcagctgactttttac

SEQ ID NO: 121685 - DNA, 33 bp, Homo sapien
gttcttgtcaccttgacagtgagaatgtccatc

SEQ ID NO: 121686 - DNA, 33 bp, Homo sapien
gttcttgtcaccttgatagtgagaatgtccatc

SEQ ID NO: 121687 - DNA, 33 bp, Homo sapien
tgaataactggaagaaagaactcagcactgaat

SEQ ID NO: 121688 - DNA, 33 bp, Homo sapien
tgaataactggaagaaggaactcagcactgaat

SEQ ID NO: 121689 - DNA, 33 bp, Homo sapien
catgttcagaagtggacaggtccctttatgcca

SEQ ID NO: 121690 - DNA, 33 bp, Homo sapien
catgttcagaagtggataggtccctttatgcca

SEQ ID NO: 121691 - DNA, 33 bp, Homo sapien
ccaagaataagcattacaggaaactgtctcctg

SEQ ID NO: 121692 - DNA, 33 bp, Homo sapien
ccaagaataagcattataggaaactgtctcctg

SEQ ID NO: 121693 - DNA, 33 bp, Homo sapien
tttagtcaagtggtgacgatatggaaaacagtg

SEQ ID NO: 121694 - DNA, 33 bp, Homo sapien
tttagtcaagtggtgatgatatggaaaacagtg

SEQ ID NO: 121695 - DNA, 33 bp, Homo sapien
agccacttcctccatcacgtctaacctctgtta

SEQ ID NO: 121696 - DNA, 33 bp, Homo sapien
agccacttcctccatcgcgtctaacctctgtta

SEQ ID NO: 121697 - DNA, 33 bp, Homo sapien
aaatttcattactgcaactctaggtgtggggaa

SEQ ID NO: 121698 - DNA, 33 bp, Homo sapien
aaatttcattactgcagctctaggtgtggggaa

SEQ ID NO: 121699 - DNA, 33 bp, Homo sapien
aggctatgtcattccagctctagcagttaccag

SEQ ID NO: 121700 - DNA, 33 bp, Homo sapien
aggctatgtcattccatctctagcagttaccag

SEQ ID NO: 121701 - DNA, 33 bp, Homo sapien
cctggccctgcacgagaaacaagggatacaggt

SEQ ID NO: 121702 - DNA, 33 bp, Homo sapien
cctggccctgcacgaggaacaagggatacaggt

SEQ ID NO: 121703 - DNA, 33 bp, Homo sapien
agtgacaagatctgagaaatgctttagaaagat

SEQ ID NO: 121704 - DNA, 33 bp, Homo sapien
agtgacaagatctgagcaatgctttagaaagat

SEQ ID NO: 121705 - DNA, 33 bp, Homo sapien
gtggagaaaaagtagccgagtatatctggtggc

SEQ ID NO: 121706 - DNA, 33 bp, Homo sapien
gtggagaaaaagtagctgagtatatctggtggc

SEQ ID NO: 121707 - DNA, 33 bp, Homo sapien
cgacagcctcagataccggggagccgttcaccc

SEQ ID NO: 121708 - DNA, 33 bp, Homo sapien
cgacagcctcagatactggggagccgttcaccc

SEQ ID NO: 121709 - DNA, 33 bp, Homo sapien
cagcctcagatacaggaaagatgctccttgctg

SEQ ID NO: 121710 - DNA, 33 bp, Homo sapien
cagcctcagatacagggaagatgctccttgctg

SEQ ID NO: 121711 - DNA, 33 bp, Homo sapien
acattcctgaggctagcaaaagcaacaaacaaa

SEQ ID NO: 121712 - DNA, 33 bp, Homo sapien
acattcctgaggctaggaaaagcaacaaacaaa

SEQ ID NO: 121713 - DNA, 33 bp, Homo sapien
ctatgctagagaatcactaaggatcaaggagaa

SEQ ID NO: 121714 - DNA, 33 bp, Homo sapien
ctatgctagagaatcagtaaggatcaaggagaa

SEQ ID NO: 121715 - DNA, 33 bp, Homo sapien
ggttgcaaggacacagaaaagcaatttgtttgt

SEQ ID NO: 121716 - DNA, 33 bp, Homo sapien
ggttgcaaggacacaggaaagcaatttgtttgt

SEQ ID NO: 121717 - DNA, 33 bp, Homo sapien
tctctcacccctgttaaaaagctcagccctggg

SEQ ID NO: 121718 - DNA, 33 bp, Homo sapien
tctctcacccctgttacaaagctcagccctggg

SEQ ID NO: 121719 - DNA, 33 bp, Homo sapien
cctgcttcacaagcccagagaaaaacaaaatag

SEQ ID NO: 121720 - DNA, 33 bp, Homo sapien
cctgcttcacaagcccggagaaaaacaaaatag

SEQ ID NO: 121721 - DNA, 33 bp, Homo sapien
gacacacagttgttgtaaaaaatattacagata

SEQ ID NO: 121722 - DNA, 33 bp, Homo sapien
gacacacagttgttgtgaaaaatattacagata

SEQ ID NO: 121723 - DNA, 33 bp, Homo sapien
caagaaaagctggaggccagatcaagggtacct

SEQ ID NO: 121724 - DNA, 33 bp, Homo sapien
caagaaaagctggaggtcagatcaagggtacct

SEQ ID NO: 121725 - DNA, 33 bp, Homo sapien
tcagcttggagctcaaacaccttcaatggctcc

SEQ ID NO: 121726 - DNA, 33 bp, Homo sapien
tcagcttggagctcaatcaccttcaatggctcc

SEQ ID NO: 121727 - DNA, 33 bp, Homo sapien
acgtgtgaaggagatcaagaagggactctcctt

SEQ ID NO: 121728 - DNA, 33 bp, Homo sapien
acgtgtgaaggagatcgagaagggactctcctt

SEQ ID NO: 121729 - DNA, 33 bp, Homo sapien
gatcattgagtgaatacacacttttgtctagct

SEQ ID NO: 121730 - DNA, 33 bp, Homo sapien
gatcattgagtgaatatacacttttgtctagct

SEQ ID NO: 121731 - DNA, 33 bp, Homo sapien
taggagtattgagtacacagccaagtgagctgc

SEQ ID NO: 121732 - DNA, 33 bp, Homo sapien
taggagtattgagtacgcagccaagtgagctgc

SEQ ID NO: 121733 - DNA, 33 bp, Homo sapien
tgtaatgtagcttggaagtgcagcagagtgcca

SEQ ID NO: 121734 - DNA, 33 bp, Homo sapien
tgtaatgtagcttggaggtgcagcagagtgcca

SEQ ID NO: 121735 - DNA, 33 bp, Homo sapien
ttctcccaatgtgcacactcaaattgctgcttt

SEQ ID NO: 121736 - DNA, 33 bp, Homo sapien
ttctcccaatgtgcacgctcaaattgctgcttt

SEQ ID NO: 121737 - DNA, 33 bp, Homo sapien
ctcctagagtagtccacgtgaaacttaggctga

SEQ ID NO: 121738 - DNA, 33 bp, Homo sapien
ctcctagagtagtccatgtgaaacttaggctga

SEQ ID NO: 121739 - DNA, 33 bp, Homo sapien
aggcaatgcagtgaacactcaaggtctttgaaa

SEQ ID NO: 121740 - DNA, 33 bp, Homo sapien
aggcaatgcagtgaaccctcaaggtctttgaaa

SEQ ID NO: 121741 - DNA, 33 bp, Homo sapien
ctgcgtgagtaccagaaagtaagaagcgaagaa

SEQ ID NO: 121742 - DNA, 33 bp, Homo sapien
ctgcgtgagtaccagagagtaagaagcgaagaa

SEQ ID NO: 121743 - DNA, 33 bp, Homo sapien
atgcaataattttggcaaatggatcaaacagtt

SEQ ID NO: 121744 - DNA, 33 bp, Homo sapien
atgcaataattttggctaatggatcaaacagtt

SEQ ID NO: 121745 - DNA, 33 bp, Homo sapien
ttgccacctctttggacacatcactcacaagcc

SEQ ID NO: 121746 - DNA, 33 bp, Homo sapien
ttgccacctctttggatacatcactcacaagcc

SEQ ID NO: 121747 - DNA, 33 bp, Homo sapien
tgtgacctgggtatgaagccattgccacagagc

SEQ ID NO: 121748 - DNA, 33 bp, Homo sapien
tgtgacctgggtatgatgccattgccacagagc

SEQ ID NO: 121749 - DNA, 33 bp, Homo sapien
acaaatcttaggccagaatcctctcctgctggt

SEQ ID NO: 121750 - DNA, 33 bp, Homo sapien
acaaatcttaggccagtatcctctcctgctggt

SEQ ID NO: 121751 - DNA, 33 bp, Homo sapien
ccttcactctccaacacaggaatccctcagagg

SEQ ID NO: 121752 - DNA, 33 bp, Homo sapien
ccttcactctccaacataggaatccctcagagg

SEQ ID NO: 121753 - DNA, 33 bp, Homo sapien
ccttaactccaacgagaaaatagagtttaataa

SEQ ID NO: 121754 - DNA, 33 bp, Homo sapien
ccttaactccaacgagcaaatagagtttaataa

SEQ ID NO: 121755 - DNA, 33 bp, Homo sapien
catatggcctacaggagtcagcaggaatttctc

SEQ ID NO: 121756 - DNA, 33 bp, Homo sapien
catatggcctacaggattcagcaggaatttctc

SEQ ID NO: 121757 - DNA, 33 bp, Homo sapien
cacacactattgcttgaatgggctgacacttgt

SEQ ID NO: 121758 - DNA, 33 bp, Homo sapien
cacacactattgcttgcatgggctgacacttgt

SEQ ID NO: 121759 - DNA, 33 bp, Homo sapien
gccctgacataaaatcgcctcgacgagaaacct

SEQ ID NO: 121760 - DNA, 33 bp, Homo sapien
gccctgacataaaatctcctcgacgagaaacct

SEQ ID NO: 121761 - DNA, 33 bp, Homo sapien
tgggatcagggacaccaaacagttgaacaggat

SEQ ID NO: 121762 - DNA, 33 bp, Homo sapien
tgggatcagggacacccaacagttgaacaggat

SEQ ID NO: 121763 - DNA, 33 bp, Homo sapien
ttgctaataaaacttaccagtgcagggcaggag

SEQ ID NO: 121764 - DNA, 33 bp, Homo sapien
ttgctaataaaacttatcagtgcagggcaggag

SEQ ID NO: 121765 - DNA, 33 bp, Homo sapien
ggcaattacttttagacccatctacatgcaatt

SEQ ID NO: 121766 - DNA, 33 bp, Homo sapien
ggcaattacttttagatccatctacatgcaatt

SEQ ID NO: 121767 - DNA, 33 bp, Homo sapien
gcttaaagagaggaaaactatgtatagccaacc

SEQ ID NO: 121768 - DNA, 33 bp, Homo sapien
gcttaaagagaggaaacctatgtatagccaacc

SEQ ID NO: 121769 - DNA, 33 bp, Homo sapien
ccgtttgaactgaaagaagagctcaggattctg

SEQ ID NO: 121770 - DNA, 33 bp, Homo sapien
ccgtttgaactgaaaggagagctcaggattctg

SEQ ID NO: 121771 - DNA, 33 bp, Homo sapien
tttcactcttggtggaagatgaagtggaagcag

SEQ ID NO: 121772 - DNA, 33 bp, Homo sapien
tttcactcttggtggacgatgaagtggaagcag

SEQ ID NO: 121773 - DNA, 33 bp, Homo sapien
cagggcttctccaatgaaagtgcattcaactca

SEQ ID NO: 121774 - DNA, 33 bp, Homo sapien
cagggcttctccaatggaagtgcattcaactca

SEQ ID NO: 121775 - DNA, 33 bp, Homo sapien
tgagtccagtccacaaagtacctagcacaacat

SEQ ID NO: 121776 - DNA, 33 bp, Homo sapien
tgagtccagtccacaaggtacctagcacaacat

SEQ ID NO: 121777 - DNA, 33 bp, Homo sapien
tgcccctgcctatcacccttctctgtgtcaagg

SEQ ID NO: 121778 - DNA, 33 bp, Homo sapien
tgcccctgcctatcacgcttctctgtgtcaagg

SEQ ID NO: 121779 - DNA, 33 bp, Homo sapien
cccatctgaatcaacccgagggctgtgtccaag

SEQ ID NO: 121780 - DNA, 33 bp, Homo sapien
cccatctgaatcaacctgagggctgtgtccaag

SEQ ID NO: 121781 - DNA, 33 bp, Homo sapien
tggagaaatgttcccacgtttgttatctaggat

SEQ ID NO: 121782 - DNA, 33 bp, Homo sapien
tggagaaatgttcccatgtttgttatctaggat

SEQ ID NO: 121783 - DNA, 33 bp, Homo sapien
aagtgaaacagaaagaagaggagaagaagccag

SEQ ID NO: 121784 - DNA, 33 bp, Homo sapien
aagtgaaacagaaagaggaggagaagaagccag

SEQ ID NO: 121785 - DNA, 33 bp, Homo sapien
attaacagaggacgtaccctgccgtgaccacca

SEQ ID NO: 121786 - DNA, 33 bp, Homo sapien
attaacagaggacgtatcctgccgtgaccacca

SEQ ID NO: 121787 - DNA, 33 bp, Homo sapien
tgtagagtattagaccaggcaaagtgaaaaggg

SEQ ID NO: 121788 - DNA, 33 bp, Homo sapien
tgtagagtattagaccgggcaaagtgaaaaggg

SEQ ID NO: 121789 - DNA, 33 bp, Homo sapien
caacctcaaggtcccacggtcccatatggctgc

SEQ ID NO: 121790 - DNA, 33 bp, Homo sapien
caacctcaaggtcccatggtcccatatggctgc

SEQ ID NO: 121791 - DNA, 33 bp, Homo sapien
gtctccttgcctaagccctttgttcccaacagc

SEQ ID NO: 121792 - DNA, 33 bp, Homo sapien
gtctccttgcctaagctctttgttcccaacagc

SEQ ID NO: 121793 - DNA, 33 bp, Homo sapien
gttggcaattacctgcaaagcgtcctaccatga

SEQ ID NO: 121794 - DNA, 33 bp, Homo sapien
gttggcaattacctgccaagcgtcctaccatga

SEQ ID NO: 121795 - DNA, 33 bp, Homo sapien
agggcagcaatggccacgataaaaggactatta

SEQ ID NO: 121796 - DNA, 33 bp, Homo sapien
agggcagcaatggccatgataaaaggactatta

SEQ ID NO: 121797 - DNA, 33 bp, Homo sapien
tccctggggtaatgccaagagagccatcgcagg

SEQ ID NO: 121798 - DNA, 33 bp, Homo sapien
tccctggggtaatgccgagagagccatcgcagg

SEQ ID NO: 121799 - DNA, 33 bp, Homo sapien
cacaaaatctgctgtacccaggaattccaacct

SEQ ID NO: 121800 - DNA, 33 bp, Homo sapien
cacaaaatctgctgtatccaggaattccaacct

SEQ ID NO: 121801 - DNA, 33 bp, Homo sapien
ttactgccctcacgaaacttctagtccaaaatg

SEQ ID NO: 121802 - DNA, 33 bp, Homo sapien
ttactgccctcacgaaccttctagtccaaaatg

SEQ ID NO: 121803 - DNA, 33 bp, Homo sapien
tgggcctttcctaagacgagaaggctgtgaaag

SEQ ID NO: 121804 - DNA, 33 bp, Homo sapien
tgggcctttcctaagatgagaaggctgtgaaag

SEQ ID NO: 121805 - DNA, 33 bp, Homo sapien
aatataatttccaaaacgttggccctgagagat

SEQ ID NO: 121806 - DNA, 33 bp, Homo sapien
aatataatttccaaaatgttggccctgagagat

SEQ ID NO: 121807 - DNA, 33 bp, Homo sapien
cccaacagagaatatgaaagtggatgggtccat

SEQ ID NO: 121808 - DNA, 33 bp, Homo sapien
cccaacagagaatatggaagtggatgggtccat

SEQ ID NO: 121809 - DNA, 33 bp, Homo sapien
aagacagcagagactacggtcccaagctaagct

SEQ ID NO: 121810 - DNA, 33 bp, Homo sapien
aagacagcagagactatggtcccaagctaagct

SEQ ID NO: 121811 - DNA, 33 bp, Homo sapien
caagcttgtagagagaagcagaaacacttgaat

SEQ ID NO: 121812 - DNA, 33 bp, Homo sapien
caagcttgtagagagaggcagaaacacttgaat

SEQ ID NO: 121813 - DNA, 33 bp, Homo sapien
gtgaggagcaacctgcacggggcttggtgacct

SEQ ID NO: 121814 - DNA, 33 bp, Homo sapien
gtgaggagcaacctgcgcggggcttggtgacct

SEQ ID NO: 121815 - DNA, 33 bp, Homo sapien
gagaagaaccactgggccaggtaattccagttc

SEQ ID NO: 121816 - DNA, 33 bp, Homo sapien
gagaagaaccactgggtcaggtaattccagttc

SEQ ID NO: 121817 - DNA, 33 bp, Homo sapien
tcacttttaattacaacggtgagggaataggta

SEQ ID NO: 121818 - DNA, 33 bp, Homo sapien
tcacttttaattacaatggtgagggaataggta

SEQ ID NO: 121819 - DNA, 33 bp, Homo sapien
cacaagcctgcactaacgacacacccacgtcac

SEQ ID NO: 121820 - DNA, 33 bp, Homo sapien
cacaagcctgcactaaggacacacccacgtcac

SEQ ID NO: 121821 - DNA, 33 bp, Homo sapien
agccttttgcctaacaagaggaccaggaagtga

SEQ ID NO: 121822 - DNA, 33 bp, Homo sapien
agccttttgcctaacaggaggaccaggaagtga

SEQ ID NO: 121823 - DNA, 33 bp, Homo sapien
cctgccatatatcactcaagtcccatcctcata

SEQ ID NO: 121824 - DNA, 33 bp, Homo sapien
cctgccatatatcactgaagtcccatcctcata

SEQ ID NO: 121825 - DNA, 33 bp, Homo sapien
ctactggatgaggggaaaaatggaatctgaggt

SEQ ID NO: 121826 - DNA, 33 bp, Homo sapien
ctactggatgaggggacaaatggaatctgaggt

SEQ ID NO: 121827 - DNA, 33 bp, Homo sapien
gctattggagggctgaagaaatagagtgtccag

SEQ ID NO: 121828 - DNA, 33 bp, Homo sapien
gctattggagggctgacgaaatagagtgtccag

SEQ ID NO: 121829 - DNA, 33 bp, Homo sapien
gaaggagaaggctgagaaaataggccacactgt

SEQ ID NO: 121830 - DNA, 33 bp, Homo sapien
gaaggagaaggctgaggaaataggccacactgt

SEQ ID NO: 121831 - DNA, 33 bp, Homo sapien
aaagggattttagtacaaagtggaccatgggca

SEQ ID NO: 121832 - DNA, 33 bp, Homo sapien
aaagggattttagtacgaagtggaccatgggca

SEQ ID NO: 121833 - DNA, 33 bp, Homo sapien
ttgggtgaaaatggaacgggaaatcaggaggag

SEQ ID NO: 121834 - DNA, 33 bp, Homo sapien
ttgggtgaaaatggaatgggaaatcaggaggag

SEQ ID NO: 121835 - DNA, 33 bp, Homo sapien
tcgccacatcctgagaatagccaacgtgtgggg

SEQ ID NO: 121836 - DNA, 33 bp, Homo sapien
tcgccacatcctgagagtagccaacgtgtgggg

SEQ ID NO: 121837 - DNA, 33 bp, Homo sapien
actcggcatgcatggaactttcccaggcagtgt

SEQ ID NO: 121838 - DNA, 33 bp, Homo sapien
actcggcatgcatggacctttcccaggcagtgt

SEQ ID NO: 121839 - DNA, 33 bp, Homo sapien
taccactttagctcaacaggtgtctcctctagg

SEQ ID NO: 121840 - DNA, 33 bp, Homo sapien
taccactttagctcaataggtgtctcctctagg

SEQ ID NO: 121841 - DNA, 33 bp, Homo sapien
gctgagtttctttccaaccaagcacctgatgtc

SEQ ID NO: 121842 - DNA, 33 bp, Homo sapien
gctgagtttctttccagccaagcacctgatgtc

SEQ ID NO: 121843 - DNA, 33 bp, Homo sapien
cacaatggtgttggcacataaaacagggtagag

SEQ ID NO: 121844 - DNA, 33 bp, Homo sapien
cacaatggtgttggcatataaaacagggtagag

SEQ ID NO: 121845 - DNA, 33 bp, Homo sapien
tagatgtctgtttagcaaggaagcagggctgtt

SEQ ID NO: 121846 - DNA, 33 bp, Homo sapien
tagatgtctgtttagcgaggaagcagggctgtt

SEQ ID NO: 121847 - DNA, 33 bp, Homo sapien
tccaacattctttccaaaagaaaccactggtat

SEQ ID NO: 121848 - DNA, 33 bp, Homo sapien
tccaacattctttccagaagaaaccactggtat

SEQ ID NO: 121849 - DNA, 33 bp, Homo sapien
atgtacaattctgtaaccttgtgcacatataca

SEQ ID NO: 121850 - DNA, 33 bp, Homo sapien
atgtacaattctgtaatcttgtgcacatataca

SEQ ID NO: 121851 - DNA, 33 bp, Homo sapien
ttagtgaccacgagtaagagaatggctagagac

SEQ ID NO: 121852 - DNA, 33 bp, Homo sapien
ttagtgaccacgagtaggagaatggctagagac

SEQ ID NO: 121853 - DNA, 33 bp, Homo sapien
tattgatcttgcttcgacactggaaaaatgtat

SEQ ID NO: 121854 - DNA, 33 bp, Homo sapien
tattgatcttgcttcgtcactggaaaaatgtat

SEQ ID NO: 121855 - DNA, 33 bp, Homo sapien
catccttttatgcacaccgttctttctctcttc

SEQ ID NO: 121856 - DNA, 33 bp, Homo sapien
catccttttatgcacatcgttctttctctcttc

SEQ ID NO: 121857 - DNA, 33 bp, Homo sapien
agtgggggcttgtcaacgtgtggtcagttcctc

SEQ ID NO: 121858 - DNA, 33 bp, Homo sapien
agtgggggcttgtcaatgtgtggtcagttcctc

SEQ ID NO: 121859 - DNA, 33 bp, Homo sapien
ttccatcaggggacaccggaaaagcccattaaa

SEQ ID NO: 121860 - DNA, 33 bp, Homo sapien
ttccatcaggggacactggaaaagcccattaaa

SEQ ID NO: 121861 - DNA, 33 bp, Homo sapien
gcttggcttttttctacccctctcagctagtct

SEQ ID NO: 121862 - DNA, 33 bp, Homo sapien
gcttggcttttttctatccctctcagctagtct

SEQ ID NO: 121863 - DNA, 33 bp, Homo sapien
gcttactgtaaactccacgtcacttcttcttct

SEQ ID NO: 121864 - DNA, 33 bp, Homo sapien
gcttactgtaaactccgcgtcacttcttcttct

SEQ ID NO: 121865 - DNA, 33 bp, Homo sapien
taagcctggtgaaagaccttacatgtatgcaat

SEQ ID NO: 121866 - DNA, 33 bp, Homo sapien
taagcctggtgaaagatcttacatgtatgcaat

SEQ ID NO: 121867 - DNA, 33 bp, Homo sapien
aaaaggatgatcccacaatgcgatgccacactc

SEQ ID NO: 121868 - DNA, 33 bp, Homo sapien
aaaaggatgatcccacgatgcgatgccacactc

SEQ ID NO: 121869 - DNA, 33 bp, Homo sapien
aatccttcttaacacacgctgtgaaattaacac

SEQ ID NO: 121870 - DNA, 33 bp, Homo sapien
aatccttcttaacacatgctgtgaaattaacac

SEQ ID NO: 121871 - DNA, 33 bp, Homo sapien
aattaacacactatcaatgaaatgaagatgact

SEQ ID NO: 121872 - DNA, 33 bp, Homo sapien
aattaacacactatcagtgaaatgaagatgact

SEQ ID NO: 121873 - DNA, 33 bp, Homo sapien
tcagtgccatttgtgaacacagaacctacattt

SEQ ID NO: 121874 - DNA, 33 bp, Homo sapien
tcagtgccatttgtgagcacagaacctacattt

SEQ ID NO: 121875 - DNA, 33 bp, Homo sapien
atgaaaaagccactgcagacatcccagcctcgg

SEQ ID NO: 121876 - DNA, 33 bp, Homo sapien
atgaaaaagccactgcggacatcccagcctcgg

SEQ ID NO: 121877 - DNA, 33 bp, Homo sapien
ctgcttggagttagaacatgatatctggagctg

SEQ ID NO: 121878 - DNA, 33 bp, Homo sapien
ctgcttggagttagaatatgatatctggagctg

SEQ ID NO: 121879 - DNA, 33 bp, Homo sapien
atgaatgtgtttgttaacttgatggcagcaatg

SEQ ID NO: 121880 - DNA, 33 bp, Homo sapien
atgaatgtgtttgttatcttgatggcagcaatg

SEQ ID NO: 121881 - DNA, 33 bp, Homo sapien
gctggtgagaaggaggaatggctatggcaagag

SEQ ID NO: 121882 - DNA, 33 bp, Homo sapien
gctggtgagaaggagggatggctatggcaagag

SEQ ID NO: 121883 - DNA, 33 bp, Homo sapien
actttgtgactatgaaacaacaactctacgggc

SEQ ID NO: 121884 - DNA, 33 bp, Homo sapien
actttgtgactatgaagcaacaactctacgggc

SEQ ID NO: 121885 - DNA, 33 bp, Homo sapien
tcgtgcaggcagcagcccattgcatctctaagc

SEQ ID NO: 121886 - DNA, 33 bp, Homo sapien
tcgtgcaggcagcagcgcattgcatctctaagc

SEQ ID NO: 121887 - DNA, 33 bp, Homo sapien
cacacacctcggaggaacaggctcttggcaggc

SEQ ID NO: 121888 - DNA, 33 bp, Homo sapien
cacacacctcggaggatcaggctcttggcaggc

SEQ ID NO: 121889 - DNA, 33 bp, Homo sapien
atgaagtggttgttccagagaagtcatttgatc

SEQ ID NO: 121890 - DNA, 33 bp, Homo sapien
atgaagtggttgttccggagaagtcatttgatc

SEQ ID NO: 121891 - DNA, 33 bp, Homo sapien
ctgacccctgaccttgaagtgtgtggaaaccag

SEQ ID NO: 121892 - DNA, 33 bp, Homo sapien
ctgacccctgaccttggagtgtgtggaaaccag

SEQ ID NO: 121893 - DNA, 33 bp, Homo sapien
gcaagtgggcagaacaagcaagcaaatagatga

SEQ ID NO: 121894 - DNA, 33 bp, Homo sapien
gcaagtgggcagaacaggcaagcaaatagatga

SEQ ID NO: 121895 - DNA, 33 bp, Homo sapien
aaatgatagggattcaaggattgctaagacagg

SEQ ID NO: 121896 - DNA, 33 bp, Homo sapien
aaatgatagggattcacggattgctaagacagg

SEQ ID NO: 121897 - DNA, 33 bp, Homo sapien
agtttaaacgtatctacaatgcagtatgataag

SEQ ID NO: 121898 - DNA, 33 bp, Homo sapien
agtttaaacgtatctataatgcagtatgataag

SEQ ID NO: 121899 - DNA, 33 bp, Homo sapien
acttaatggaaacacagatatacaccagtctat

SEQ ID NO: 121900 - DNA, 33 bp, Homo sapien
acttaatggaaacacatatatacaccagtctat

SEQ ID NO: 121901 - DNA, 33 bp, Homo sapien
agccaagccatgtctgaagctaggaccgtgtga

SEQ ID NO: 121902 - DNA, 33 bp, Homo sapien
agccaagccatgtctggagctaggaccgtgtga

SEQ ID NO: 121903 - DNA, 33 bp, Homo sapien
catttgtcattatgcaaatctacaagtcatata

SEQ ID NO: 121904 - DNA, 33 bp, Homo sapien
catttgtcattatgcagatctacaagtcatata

SEQ ID NO: 121905 - DNA, 33 bp, Homo sapien
aggggtcataatgacacaaagaggtgttctgtt

SEQ ID NO: 121906 - DNA, 33 bp, Homo sapien
aggggtcataatgacataaagaggtgttctgtt

SEQ ID NO: 121907 - DNA, 33 bp, Homo sapien
gaaatgaagaagatccaaatgtaggtgtgtagt

SEQ ID NO: 121908 - DNA, 33 bp, Homo sapien
gaaatgaagaagatccgaatgtaggtgtgtagt

SEQ ID NO: 121909 - DNA, 33 bp, Homo sapien
tactgcgtttcagtacaagagacgtcacagtca

SEQ ID NO: 121910 - DNA, 33 bp, Homo sapien
tactgcgtttcagtacgagagacgtcacagtca

SEQ ID NO: 121911 - DNA, 33 bp, Homo sapien
cttcctgggtatcaggaaccgcttctgattacc

SEQ ID NO: 121912 - DNA, 33 bp, Homo sapien
cttcctgggtatcagggaccgcttctgattacc

SEQ ID NO: 121913 - DNA, 33 bp, Homo sapien
ctcgctggcaaatgtcaccacttcctgggtatc

SEQ ID NO: 121914 - DNA, 33 bp, Homo sapien
ctcgctggcaaatgtcgccacttcctgggtatc

SEQ ID NO: 121915 - DNA, 33 bp, Homo sapien
ggaaaggggaatgagacgccccagtgctaggaa

SEQ ID NO: 121916 - DNA, 33 bp, Homo sapien
ggaaaggggaatgagatgccccagtgctaggaa

SEQ ID NO: 121917 - DNA, 33 bp, Homo sapien
ttgctaattccctctcacagtttttctactgat

SEQ ID NO: 121918 - DNA, 33 bp, Homo sapien
ttgctaattccctctcgcagtttttctactgat

SEQ ID NO: 121919 - DNA, 33 bp, Homo sapien
gaaattactgacatggacaagttttggaaagta

SEQ ID NO: 121920 - DNA, 33 bp, Homo sapien
gaaattactgacatgggcaagttttggaaagta

SEQ ID NO: 121921 - DNA, 33 bp, Homo sapien
atcaggaatcccaaacagaggatgcgttctggg

SEQ ID NO: 121922 - DNA, 33 bp, Homo sapien
atcaggaatcccaaacggaggatgcgttctggg

SEQ ID NO: 121923 - DNA, 33 bp, Homo sapien
gcactgttacaagtggaagctggagacagcttc

SEQ ID NO: 121924 - DNA, 33 bp, Homo sapien
gcactgttacaagtggtagctggagacagcttc

SEQ ID NO: 121925 - DNA, 33 bp, Homo sapien
gagatctctttgtccacactcagttaggaaccc

SEQ ID NO: 121926 - DNA, 33 bp, Homo sapien
gagatctctttgtccagactcagttaggaaccc

SEQ ID NO: 121927 - DNA, 33 bp, Homo sapien
ggagctcctagccttcacctaagcctcaggtca

SEQ ID NO: 121928 - DNA, 33 bp, Homo sapien
ggagctcctagccttcgcctaagcctcaggtca

SEQ ID NO: 121929 - DNA, 33 bp, Homo sapien
ggggcctaggcatctggattccctttaaggcct

SEQ ID NO: 121930 - DNA, 33 bp, Homo sapien
ggggcctaggcatctgtattccctttaaggcct

SEQ ID NO: 121931 - DNA, 33 bp, Homo sapien
ttttgagaattgctagcaccgtttctaccactc

SEQ ID NO: 121932 - DNA, 33 bp, Homo sapien
ttttgagaattgctagtaccgtttctaccactc

SEQ ID NO: 121933 - DNA, 33 bp, Homo sapien
ctgctgcaaggagcccaatccccagagcttcct

SEQ ID NO: 121934 - DNA, 33 bp, Homo sapien
ctgctgcaaggagcccgatccccagagcttcct

SEQ ID NO: 121935 - DNA, 33 bp, Homo sapien
atccactgagtgttccacttgatgagttttagt

SEQ ID NO: 121936 - DNA, 33 bp, Homo sapien
atccactgagtgttccgcttgatgagttttagt

SEQ ID NO: 121937 - DNA, 33 bp, Homo sapien
tagaacctttaagccaatcgtttgacagctgtg

SEQ ID NO: 121938 - DNA, 33 bp, Homo sapien
tagaacctttaagccagtcgtttgacagctgtg

SEQ ID NO: 121939 - DNA, 33 bp, Homo sapien
accagtgagtaagtaaatgaatgaatctgattt

SEQ ID NO: 121940 - DNA, 33 bp, Homo sapien
accagtgagtaagtaagtgaatgaatctgattt

SEQ ID NO: 121941 - DNA, 33 bp, Homo sapien
tctgatcccccaacccagaagtctctaacacct

SEQ ID NO: 121942 - DNA, 33 bp, Homo sapien
tctgatcccccaacccggaagtctctaacacct

SEQ ID NO: 121943 - DNA, 33 bp, Homo sapien
cacacattatgatttcccacctctccagctcca

SEQ ID NO: 121944 - DNA, 33 bp, Homo sapien
cacacattatgatttctcacctctccagctcca

SEQ ID NO: 121945 - DNA, 33 bp, Homo sapien
cacgaggctgaacaagaagcaggcacttgataa

SEQ ID NO: 121946 - DNA, 33 bp, Homo sapien
cacgaggctgaacaaggagcaggcacttgataa

SEQ ID NO: 121947 - DNA, 33 bp, Homo sapien
ttgaaacaacatttacagctttatggtattcat

SEQ ID NO: 121948 - DNA, 33 bp, Homo sapien
ttgaaacaacatttactgctttatggtattcat

SEQ ID NO: 121949 - DNA, 33 bp, Homo sapien
gctatgccagctatgaagtgccatgcagtcatc

SEQ ID NO: 121950 - DNA, 33 bp, Homo sapien
gctatgccagctatgaggtgccatgcagtcatc

SEQ ID NO: 121951 - DNA, 33 bp, Homo sapien
accaggcactcagaaaagcaagggccatagtag

SEQ ID NO: 121952 - DNA, 33 bp, Homo sapien
accaggcactcagaaaggcaagggccatagtag

SEQ ID NO: 121953 - DNA, 33 bp, Homo sapien
atcccagggtctgcgcccttcttctgttccatg

SEQ ID NO: 121954 - DNA, 33 bp, Homo sapien
atcccagggtctgcgctcttcttctgttccatg

SEQ ID NO: 121955 - DNA, 33 bp, Homo sapien
gttttacagatgggaaaataagacccagaaaac

SEQ ID NO: 121956 - DNA, 33 bp, Homo sapien
gttttacagatgggaagataagacccagaaaac

SEQ ID NO: 121957 - DNA, 33 bp, Homo sapien
gtcacgttgcattttaacaaaagatctgaacag

SEQ ID NO: 121958 - DNA, 33 bp, Homo sapien
gtcacgttgcattttatcaaaagatctgaacag

SEQ ID NO: 121959 - DNA, 33 bp, Homo sapien
gggcatacaaatcacaaatgaatggattaacaa

SEQ ID NO: 121960 - DNA, 33 bp, Homo sapien
gggcatacaaatcacagatgaatggattaacaa

SEQ ID NO: 121961 - DNA, 33 bp, Homo sapien
ggtctactttttgccacgccatagtaccagtga

SEQ ID NO: 121962 - DNA, 33 bp, Homo sapien
ggtctactttttgccatgccatagtaccagtga

SEQ ID NO: 121963 - DNA, 33 bp, Homo sapien
ccctgttctcaggaatcactggcctgtgcttct

SEQ ID NO: 121964 - DNA, 33 bp, Homo sapien
ccctgttctcaggaattactggcctgtgcttct

SEQ ID NO: 121965 - DNA, 33 bp, Homo sapien
tcaaatgtgcctccaaggagataactggaccat

SEQ ID NO: 121966 - DNA, 33 bp, Homo sapien
tcaaatgtgcctccaatgagataactggaccat

SEQ ID NO: 121967 - DNA, 33 bp, Homo sapien
acatttgagaccactgcatgaagagagaatcca

SEQ ID NO: 121968 - DNA, 33 bp, Homo sapien
acatttgagaccactggatgaagagagaatcca

SEQ ID NO: 121969 - DNA, 33 bp, Homo sapien
atgtgcaagaaagcaggaaaatgtgacccacag

SEQ ID NO: 121970 - DNA, 33 bp, Homo sapien
atgtgcaagaaagcagtaaaatgtgacccacag

SEQ ID NO: 121971 - DNA, 33 bp, Homo sapien
tgagcttgtgaaacaacttgggaagtattccat

SEQ ID NO: 121972 - DNA, 33 bp, Homo sapien
tgagcttgtgaaacaagttgggaagtattccat

SEQ ID NO: 121973 - DNA, 33 bp, Homo sapien
gatctagcttcaacaacaatttataaggcacac

SEQ ID NO: 121974 - DNA, 33 bp, Homo sapien
gatctagcttcaacaataatttataaggcacac

SEQ ID NO: 121975 - DNA, 33 bp, Homo sapien
gacctagacacaaatacgacagggatattggaa

SEQ ID NO: 121976 - DNA, 33 bp, Homo sapien
gacctagacacaaatatgacagggatattggaa

SEQ ID NO: 121977 - DNA, 33 bp, Homo sapien
taatttgcaattccacaacaactagtaatgttg

SEQ ID NO: 121978 - DNA, 33 bp, Homo sapien
taatttgcaattccacgacaactagtaatgttg

SEQ ID NO: 121979 - DNA, 33 bp, Homo sapien
tagggtgaacagggcaatccagcttagcactga

SEQ ID NO: 121980 - DNA, 33 bp, Homo sapien
tagggtgaacagggcattccagcttagcactga

SEQ ID NO: 121981 - DNA, 33 bp, Homo sapien
ggcagcctgagttaaacgaacaaactgggtctg

SEQ ID NO: 121982 - DNA, 33 bp, Homo sapien
ggcagcctgagttaaaggaacaaactgggtctg

SEQ ID NO: 121983 - DNA, 33 bp, Homo sapien
caccagaaccagtgaaaatgtctagtctgacac

SEQ ID NO: 121984 - DNA, 33 bp, Homo sapien
caccagaaccagtgaatatgtctagtctgacac

SEQ ID NO: 121985 - DNA, 33 bp, Homo sapien
ttggagatctggcatacagcaagtatttaataa

SEQ ID NO: 121986 - DNA, 33 bp, Homo sapien
ttggagatctggcatatagcaagtatttaataa

SEQ ID NO: 121987 - DNA, 33 bp, Homo sapien
cagttccctgattgaactgtcacattgtcttaa

SEQ ID NO: 121988 - DNA, 33 bp, Homo sapien
cagttccctgattgaattgtcacattgtcttaa

SEQ ID NO: 121989 - DNA, 33 bp, Homo sapien
agaccaggtaacgcaaccagttcccactaattt

SEQ ID NO: 121990 - DNA, 33 bp, Homo sapien
agaccaggtaacgcaatcagttcccactaattt

SEQ ID NO: 121991 - DNA, 33 bp, Homo sapien
gcctctcatcagacccaaagagcatttattaat

SEQ ID NO: 121992 - DNA, 33 bp, Homo sapien
gcctctcatcagacccgaagagcatttattaat

SEQ ID NO: 121993 - DNA, 33 bp, Homo sapien
aatctattcacatcttcaagagtcacacgactg

SEQ ID NO: 121994 - DNA, 33 bp, Homo sapien
aatctattcacatctttaagagtcacacgactg

SEQ ID NO: 121995 - DNA, 33 bp, Homo sapien
gtgctctatggggataccgtagatggggcataa

SEQ ID NO: 121996 - DNA, 33 bp, Homo sapien
gtgctctatggggatagcgtagatggggcataa

SEQ ID NO: 121997 - DNA, 33 bp, Homo sapien
cttacaacctgggctaagctattttcaggtcag

SEQ ID NO: 121998 - DNA, 33 bp, Homo sapien
cttacaacctgggctaggctattttcaggtcag

SEQ ID NO: 121999 - DNA, 33 bp, Homo sapien
ctagaatgtaagcagggcccctgtcaaattcac

SEQ ID NO: 122000 - DNA, 33 bp, Homo sapien
ctagaatgtaagcaggtcccctgtcaaattcac

SEQ ID NO: 122001 - DNA, 33 bp, Homo sapien
actgggaatgcctgtcaacctccgtgaaacagg

SEQ ID NO: 122002 - DNA, 33 bp, Homo sapien
actgggaatgcctgtccacctccgtgaaacagg

SEQ ID NO: 122003 - DNA, 33 bp, Homo sapien
aaaaaaatagttgcacagaccaggtaaataaaa

SEQ ID NO: 122004 - DNA, 33 bp, Homo sapien
aaaaaaatagttgcacggaccaggtaaataaaa

SEQ ID NO: 122005 - DNA, 33 bp, Homo sapien
ttcttagtgtgttagactagattttatctgcct

SEQ ID NO: 122006 - DNA, 33 bp, Homo sapien
ttcttagtgtgttagattagattttatctgcct

SEQ ID NO: 122007 - DNA, 33 bp, Homo sapien
actgatgtctttggaccccaccttctggatgtt

SEQ ID NO: 122008 - DNA, 33 bp, Homo sapien
actgatgtctttggactccaccttctggatgtt

SEQ ID NO: 122009 - DNA, 33 bp, Homo sapien
tcagtccttgctcccccaggcaaagctcacatc

SEQ ID NO: 122010 - DNA, 33 bp, Homo sapien
tcagtccttgctccccgaggcaaagctcacatc

SEQ ID NO: 122011 - DNA, 33 bp, Homo sapien
gctcactttccttctacgagatgaactcagctc

SEQ ID NO: 122012 - DNA, 33 bp, Homo sapien
gctcactttccttctatgagatgaactcagctc

SEQ ID NO: 122013 - DNA, 33 bp, Homo sapien
ctgcacccagaacccccaatttctacctgactc

SEQ ID NO: 122014 - DNA, 33 bp, Homo sapien
ctgcacccagaacccctaatttctacctgactc

SEQ ID NO: 122015 - DNA, 33 bp, Homo sapien
aaatggggcagctaaactcaatgacagcaagct

SEQ ID NO: 122016 - DNA, 33 bp, Homo sapien
aaatggggcagctaaagtcaatgacagcaagct

SEQ ID NO: 122017 - DNA, 33 bp, Homo sapien
tggagcagaaggcgtgcagtggggaacgcagcc

SEQ ID NO: 122018 - DNA, 33 bp, Homo sapien
tggagcagaaggcgtgtagtggggaacgcagcc

SEQ ID NO: 122019 - DNA, 33 bp, Homo sapien
tgaacaagtgagtgaacagctacgattctgtca

SEQ ID NO: 122020 - DNA, 33 bp, Homo sapien
tgaacaagtgagtgaagagctacgattctgtca

SEQ ID NO: 122021 - DNA, 33 bp, Homo sapien
gcccgctggccacggcactctgagcatcagcct

SEQ ID NO: 122022 - DNA, 33 bp, Homo sapien
gcccgctggccacggcgctctgagcatcagcct

SEQ ID NO: 122023 - DNA, 33 bp, Homo sapien
gatctaaggacatttccccgaaaccaggcaaaa

SEQ ID NO: 122024 - DNA, 33 bp, Homo sapien
gatctaaggacatttcgccgaaaccaggcaaaa

SEQ ID NO: 122025 - DNA, 33 bp, Homo sapien
gggagcagaaaatcacacagacaacgagttgga

SEQ ID NO: 122026 - DNA, 33 bp, Homo sapien
gggagcagaaaatcacccagacaacgagttgga

SEQ ID NO: 122027 - DNA, 33 bp, Homo sapien
ggcaaaaagactctacacctgtaatagatgaaa

SEQ ID NO: 122028 - DNA, 33 bp, Homo sapien
ggcaaaaagactctacgcctgtaatagatgaaa

SEQ ID NO: 122029 - DNA, 33 bp, Homo sapien
cacagcccactggagacgaacaagcaaggaggg

SEQ ID NO: 122030 - DNA, 33 bp, Homo sapien
cacagcccactggagatgaacaagcaaggaggg

SEQ ID NO: 122031 - DNA, 33 bp, Homo sapien
cacatctgatgacgtggatccgaagcccagctc

SEQ ID NO: 122032 - DNA, 33 bp, Homo sapien
cacatctgatgacgtgtatccgaagcccagctc

SEQ ID NO: 122033 - DNA, 33 bp, Homo sapien
gggtattgttgggtacagatgcaggtgcgaagg

SEQ ID NO: 122034 - DNA, 33 bp, Homo sapien
gggtattgttgggtacggatgcaggtgcgaagg

SEQ ID NO: 122035 - DNA, 33 bp, Homo sapien
caggttagatgtcatgcagatttctttgacccc

SEQ ID NO: 122036 - DNA, 33 bp, Homo sapien
caggttagatgtcatggagatttctttgacccc

SEQ ID NO: 122037 - DNA, 33 bp, Homo sapien
ctttgtggcttctgatgagcgacttcatctctc

SEQ ID NO: 122038 - DNA, 33 bp, Homo sapien
ctttgtggcttctgattagcgacttcatctctc

SEQ ID NO: 122039 - DNA, 33 bp, Homo sapien
atgtgttttccctaccacaacaaactgcctgtc

SEQ ID NO: 122040 - DNA, 33 bp, Homo sapien
atgtgttttccctaccgcaacaaactgcctgtc

SEQ ID NO: 122041 - DNA, 33 bp, Homo sapien
gaagcatgtccaggaccctgggacggccagagg

SEQ ID NO: 122042 - DNA, 33 bp, Homo sapien
gaagcatgtccaggactctgggacggccagagg

SEQ ID NO: 122043 - DNA, 33 bp, Homo sapien
aaactctttacaacctcacactcctaccagagt

SEQ ID NO: 122044 - DNA, 33 bp, Homo sapien
aaactctttacaaccttacactcctaccagagt

SEQ ID NO: 122045 - DNA, 33 bp, Homo sapien
tccagatctacctagaaaggggattcgccttct

SEQ ID NO: 122046 - DNA, 33 bp, Homo sapien
tccagatctacctagagaggggattcgccttct

SEQ ID NO: 122047 - DNA, 33 bp, Homo sapien
gtaggcactgtcttcccaagcccagccctggaa

SEQ ID NO: 122048 - DNA, 33 bp, Homo sapien
gtaggcactgtcttccgaagcccagccctggaa

SEQ ID NO: 122049 - DNA, 33 bp, Homo sapien
cacaatccacaatatggactcaatacagagtgc

SEQ ID NO: 122050 - DNA, 33 bp, Homo sapien
cacaatccacaatatgtactcaatacagagtgc

SEQ ID NO: 122051 - DNA, 33 bp, Homo sapien
ggctcccagggagaaacggtgcccagggcctcg

SEQ ID NO: 122052 - DNA, 33 bp, Homo sapien
ggctcccagggagaaatggtgcccagggcctcg

SEQ ID NO: 122053 - DNA, 33 bp, Homo sapien
gctgaccggcgtgtggaacactggtggtttgca

SEQ ID NO: 122054 - DNA, 33 bp, Homo sapien
gctgaccggcgtgtgggacactggtggtttgca

SEQ ID NO: 122055 - DNA, 33 bp, Homo sapien
gacctgggctggttagcaggacacaacctttgg

SEQ ID NO: 122056 - DNA, 33 bp, Homo sapien
gacctgggctggttaggaggacacaacctttgg

SEQ ID NO: 122057 - DNA, 33 bp, Homo sapien
gtgtggcagggagtcacggaaggttcaggtgct

SEQ ID NO: 122058 - DNA, 33 bp, Homo sapien
gtgtggcagggagtcatggaaggttcaggtgct

SEQ ID NO: 122059 - DNA, 33 bp, Homo sapien
tcaggggagcggtagacggtcccagaacagccg

SEQ ID NO: 122060 - DNA, 33 bp, Homo sapien
tcaggggagcggtagatggtcccagaacagccg

SEQ ID NO: 122061 - DNA, 33 bp, Homo sapien
gagccttaatagttaacacacatgaaagcctgc

SEQ ID NO: 122062 - DNA, 33 bp, Homo sapien
gagccttaatagttaatacacatgaaagcctgc

SEQ ID NO: 122063 - DNA, 33 bp, Homo sapien
agcccctctccactgcactctctatctgtactc

SEQ ID NO: 122064 - DNA, 33 bp, Homo sapien
agcccctctccactgctctctctatctgtactc

SEQ ID NO: 122065 - DNA, 33 bp, Homo sapien
agggcccattatccagacactggttgttcatct

SEQ ID NO: 122066 - DNA, 33 bp, Homo sapien
agggcccattatccagccactggttgttcatct

SEQ ID NO: 122067 - DNA, 33 bp, Homo sapien
tccctgatacagccaaacaggccctgagcagcc

SEQ ID NO: 122068 - DNA, 33 bp, Homo sapien
tccctgatacagccaagcaggccctgagcagcc

SEQ ID NO: 122069 - DNA, 33 bp, Homo sapien
tggcagcaagccttaccctaattcatgacccaa

SEQ ID NO: 122070 - DNA, 33 bp, Homo sapien
tggcagcaagccttacgctaattcatgacccaa

SEQ ID NO: 122071 - DNA, 33 bp, Homo sapien
gaggcagagccagagccagaggcagacgggcag

SEQ ID NO: 122072 - DNA, 33 bp, Homo sapien
gaggcagagccagagcgagaggcagacgggcag

SEQ ID NO: 122073 - DNA, 33 bp, Homo sapien
tttggaggttgcaggacctagactgggagaggt

SEQ ID NO: 122074 - DNA, 33 bp, Homo sapien
tttggaggttgcaggatctagactgggagaggt

SEQ ID NO: 122075 - DNA, 33 bp, Homo sapien
tcttaaacatctgctacctctgtgctgcaggcc

SEQ ID NO: 122076 - DNA, 33 bp, Homo sapien
tcttaaacatctgctatctctgtgctgcaggcc

SEQ ID NO: 122077 - DNA, 33 bp, Homo sapien
cctggctgactcaccacactaactgccctactc

SEQ ID NO: 122078 - DNA, 33 bp, Homo sapien
cctggctgactcaccatactaactgccctactc

SEQ ID NO: 122079 - DNA, 33 bp, Homo sapien
agtaaagactcggggacgggcagcaatggatca

SEQ ID NO: 122080 - DNA, 33 bp, Homo sapien
agtaaagactcggggatgggcagcaatggatca

SEQ ID NO: 122081 - DNA, 33 bp, Homo sapien
cctgagcctgctgaaacgatagaaaatgcaatc

SEQ ID NO: 122082 - DNA, 33 bp, Homo sapien
cctgagcctgctgaaatgatagaaaatgcaatc

SEQ ID NO: 122083 - DNA, 33 bp, Homo sapien
gttccagcctaatcacacagctatactggcagt

SEQ ID NO: 122084 - DNA, 33 bp, Homo sapien
gttccagcctaatcacgcagctatactggcagt

SEQ ID NO: 122085 - DNA, 33 bp, Homo sapien
gtcacactactgacaactgccaggatttgaatc

SEQ ID NO: 122086 - DNA, 33 bp, Homo sapien
gtcacactactgacaagtgccaggatttgaatc

SEQ ID NO: 122087 - DNA, 33 bp, Homo sapien
acttctggtgggataacgatgactttagaaggt

SEQ ID NO: 122088 - DNA, 33 bp, Homo sapien
acttctggtgggataaggatgactttagaaggt

SEQ ID NO: 122089 - DNA, 33 bp, Homo sapien
tggctgtgtcttggaacgcagcctctgctcgcg

SEQ ID NO: 122090 - DNA, 33 bp, Homo sapien
tggctgtgtcttggaatgcagcctctgctcgcg

SEQ ID NO: 122091 - DNA, 33 bp, Homo sapien
ggacctgttcaagagtaaaaactgtaaagggaa

SEQ ID NO: 122092 - DNA, 33 bp, Homo sapien
ggacctgttcaagagtgaaaactgtaaagggaa

SEQ ID NO: 122093 - DNA, 33 bp, Homo sapien
gctgcccaggagttcccctatttggactgccgg

SEQ ID NO: 122094 - DNA, 33 bp, Homo sapien
gctgcccaggagttcctctatttggactgccgg

SEQ ID NO: 122095 - DNA, 33 bp, Homo sapien
cagtcaccattccgtcacttacaaactatgcag

SEQ ID NO: 122096 - DNA, 33 bp, Homo sapien
cagtcaccattccgtcgcttacaaactatgcag

SEQ ID NO: 122097 - DNA, 33 bp, Homo sapien
gaatcacttgattcacagatggactggtggaca

SEQ ID NO: 122098 - DNA, 33 bp, Homo sapien
gaatcacttgattcaccgatggactggtggaca

SEQ ID NO: 122099 - DNA, 33 bp, Homo sapien
cacccatttttaaataccttgcctcgcatgaac

SEQ ID NO: 122100 - DNA, 33 bp, Homo sapien
cacccatttttaaatatcttgcctcgcatgaac

SEQ ID NO: 122101 - DNA, 33 bp, Homo sapien
tcatcttcagtttccccggacttagcagaggga

SEQ ID NO: 122102 - DNA, 33 bp, Homo sapien
tcatcttcagtttccctggacttagcagaggga

SEQ ID NO: 122103 - DNA, 33 bp, Homo sapien
ccacatcctagatagaaagggtcaggctcgggg

SEQ ID NO: 122104 - DNA, 33 bp, Homo sapien
ccacatcctagatagacagggtcaggctcgggg

SEQ ID NO: 122105 - DNA, 33 bp, Homo sapien
cccggaagccttagtcaattaagcagctctgac

SEQ ID NO: 122106 - DNA, 33 bp, Homo sapien
cccggaagccttagtcgattaagcagctctgac

SEQ ID NO: 122107 - DNA, 33 bp, Homo sapien
cagtcatgatgcaaccaacattaagttctgcat

SEQ ID NO: 122108 - DNA, 33 bp, Homo sapien
cagtcatgatgcaaccgacattaagttctgcat

SEQ ID NO: 122109 - DNA, 33 bp, Homo sapien
gtggcaataatagcagaagtaatgccagcctcg

SEQ ID NO: 122110 - DNA, 33 bp, Homo sapien
gtggcaataatagcaggagtaatgccagcctcg

SEQ ID NO: 122111 - DNA, 33 bp, Homo sapien
aagtgctaggcagatacgctcttctaaaggact

SEQ ID NO: 122112 - DNA, 33 bp, Homo sapien
aagtgctaggcagatatgctcttctaaaggact

SEQ ID NO: 122113 - DNA, 33 bp, Homo sapien
gggatgccctggaaaacggacagaagccattgt

SEQ ID NO: 122114 - DNA, 33 bp, Homo sapien
gggatgccctggaaaatggacagaagccattgt

SEQ ID NO: 122115 - DNA, 33 bp, Homo sapien
tatccaggtcactaaacgtatttatctgagaag

SEQ ID NO: 122116 - DNA, 33 bp, Homo sapien
tatccaggtcactaaatgtatttatctgagaag

SEQ ID NO: 122117 - DNA, 33 bp, Homo sapien
aaagttggctgaaaataaaaatttaagctacaa

SEQ ID NO: 122118 - DNA, 33 bp, Homo sapien
aaagttggctgaaaatgaaaatttaagctacaa

SEQ ID NO: 122119 - DNA, 33 bp, Homo sapien
aaatccattctccttaaaaagctaatgtttccc

SEQ ID NO: 122120 - DNA, 33 bp, Homo sapien
aaatccattctccttataaagctaatgtttccc

SEQ ID NO: 122121 - DNA, 33 bp, Homo sapien
ggttcaggacataagcaagttcttagggccagc

SEQ ID NO: 122122 - DNA, 33 bp, Homo sapien
ggttcaggacataagcgagttcttagggccagc

SEQ ID NO: 122123 - DNA, 33 bp, Homo sapien
agagtagagtggattcactgaggtcaaacagcc

SEQ ID NO: 122124 - DNA, 33 bp, Homo sapien
agagtagagtggattcgctgaggtcaaacagcc

SEQ ID NO: 122125 - DNA, 33 bp, Homo sapien
ttatagaagataccagccctggtcgcacacacc

SEQ ID NO: 122126 - DNA, 33 bp, Homo sapien
ttatagaagataccagtcctggtcgcacacacc

SEQ ID NO: 122127 - DNA, 33 bp, Homo sapien
cgggcaggccaggacacacaaaaacgagcctcc

SEQ ID NO: 122128 - DNA, 33 bp, Homo sapien
cgggcaggccaggacagacaaaaacgagcctcc

SEQ ID NO: 122129 - DNA, 33 bp, Homo sapien
cggctctcattatccagcctgactgagggaccc

SEQ ID NO: 122130 - DNA, 33 bp, Homo sapien
cggctctcattatccatcctgactgagggaccc

SEQ ID NO: 122131 - DNA, 33 bp, Homo sapien
taaatacacatacgacaccttgacccaaggtgc

SEQ ID NO: 122132 - DNA, 33 bp, Homo sapien
taaatacacatacgaccccttgacccaaggtgc

SEQ ID NO: 122133 - DNA, 33 bp, Homo sapien
cctcctccagggaaacccttctctctcgcagat

SEQ ID NO: 122134 - DNA, 33 bp, Homo sapien
cctcctccagggaaactcttctctctcgcagat

SEQ ID NO: 122135 - DNA, 33 bp, Homo sapien
aaagataaatgatggcagaaattaatgagtgac

SEQ ID NO: 122136 - DNA, 33 bp, Homo sapien
aaagataaatgatggcggaaattaatgagtgac

SEQ ID NO: 122137 - DNA, 33 bp, Homo sapien
gactaggagaaaaacacaacagacggagagaaa

SEQ ID NO: 122138 - DNA, 33 bp, Homo sapien
gactaggagaaaaacagaacagacggagagaaa

SEQ ID NO: 122139 - DNA, 33 bp, Homo sapien
taactcccacagaaaccatcatcgtctttgtac

SEQ ID NO: 122140 - DNA, 33 bp, Homo sapien
taactcccacagaaactatcatcgtctttgtac

SEQ ID NO: 122141 - DNA, 33 bp, Homo sapien
cctggcatttcagctgcagactctgaacctggg

SEQ ID NO: 122142 - DNA, 33 bp, Homo sapien
cctggcatttcagctggagactctgaacctggg

SEQ ID NO: 122143 - DNA, 33 bp, Homo sapien
ctgtgagcctaaccccgggaccagaaacatcca

SEQ ID NO: 122144 - DNA, 33 bp, Homo sapien
ctgtgagcctaacccctggaccagaaacatcca

SEQ ID NO: 122145 - DNA, 33 bp, Homo sapien
ttatctcaccatagataagtttcacctactctt

SEQ ID NO: 122146 - DNA, 33 bp, Homo sapien
ttatctcaccatagattagtttcacctactctt

SEQ ID NO: 122147 - DNA, 33 bp, Homo sapien
ggagcttataatctgaagggaaaagcacaatat

SEQ ID NO: 122148 - DNA, 33 bp, Homo sapien
ggagcttataatctgatgggaaaagcacaatat

SEQ ID NO: 122149 - DNA, 33 bp, Homo sapien
tcaacagtagcaaagacagcattagaggcagga

SEQ ID NO: 122150 - DNA, 33 bp, Homo sapien
tcaacagtagcaaagatagcattagaggcagga

SEQ ID NO: 122151 - DNA, 33 bp, Homo sapien
gtccaccttctgatcaatatggtccacccttga

SEQ ID NO: 122152 - DNA, 33 bp, Homo sapien
gtccaccttctgatcagtatggtccacccttga

SEQ ID NO: 122153 - DNA, 33 bp, Homo sapien
gctggaactgctgaacaaacctctcccaggtag

SEQ ID NO: 122154 - DNA, 33 bp, Homo sapien
gctggaactgctgaacgaacctctcccaggtag

SEQ ID NO: 122155 - DNA, 33 bp, Homo sapien
gtaagctctgatttccactgtacaggtgagagg

SEQ ID NO: 122156 - DNA, 33 bp, Homo sapien
gtaagctctgatttccgctgtacaggtgagagg

SEQ ID NO: 122157 - DNA, 33 bp, Homo sapien
tgctcacctcagggcacaatcataagaaaggag

SEQ ID NO: 122158 - DNA, 33 bp, Homo sapien
tgctcacctcagggcataatcataagaaaggag

SEQ ID NO: 122159 - DNA, 33 bp, Homo sapien
atggaaccacgttaacagtcatgaatgatgagt

SEQ ID NO: 122160 - DNA, 33 bp, Homo sapien
atggaaccacgttaacggtcatgaatgatgagt

SEQ ID NO: 122161 - DNA, 33 bp, Homo sapien
taacaagattgactagaagtgaaactgcaacac

SEQ ID NO: 122162 - DNA, 33 bp, Homo sapien
taacaagattgactaggagtgaaactgcaacac

SEQ ID NO: 122163 - DNA, 33 bp, Homo sapien
tgtgaaagggaaatgaacacatcatggattgag

SEQ ID NO: 122164 - DNA, 33 bp, Homo sapien
tgtgaaagggaaatgagcacatcatggattgag

SEQ ID NO: 122165 - DNA, 33 bp, Homo sapien
gagaccaggtgacagcagcacttgaccattaca

SEQ ID NO: 122166 - DNA, 33 bp, Homo sapien
gagaccaggtgacagcggcacttgaccattaca

SEQ ID NO: 122167 - DNA, 33 bp, Homo sapien
ccagagagagtcaagaaacccaagtccctccct

SEQ ID NO: 122168 - DNA, 33 bp, Homo sapien
ccagagagagtcaagagacccaagtccctccct

SEQ ID NO: 122169 - DNA, 33 bp, Homo sapien
tgctcaggaattgttaactactgctctggtcat

SEQ ID NO: 122170 - DNA, 33 bp, Homo sapien
tgctcaggaattgttagctactgctctggtcat

SEQ ID NO: 122171 - DNA, 33 bp, Homo sapien
cttgttctcaccagacaactcaatggagataat

SEQ ID NO: 122172 - DNA, 33 bp, Homo sapien
cttgttctcaccagacgactcaatggagataat

SEQ ID NO: 122173 - DNA, 33 bp, Homo sapien
catcttccattctaaaaatttatcttattttat

SEQ ID NO: 122174 - DNA, 33 bp, Homo sapien
catcttccattctaaagatttatcttattttat

SEQ ID NO: 122175 - DNA, 33 bp, Homo sapien
gagaaggaatttctaacggaacaaaggcttctc

SEQ ID NO: 122176 - DNA, 33 bp, Homo sapien
gagaaggaatttctaatggaacaaaggcttctc

SEQ ID NO: 122177 - DNA, 33 bp, Homo sapien
aatgacaataaagccactaaaatagttatggtg

SEQ ID NO: 122178 - DNA, 33 bp, Homo sapien
aatgacaataaagccattaaaatagttatggtg

SEQ ID NO: 122179 - DNA, 33 bp, Homo sapien
ctgctttagggaccaaccaaagacctccacact

SEQ ID NO: 122180 - DNA, 33 bp, Homo sapien
ctgctttagggaccaagcaaagacctccacact

SEQ ID NO: 122181 - DNA, 33 bp, Homo sapien
gatacttctctcaggccgatagtcatgtccaaa

SEQ ID NO: 122182 - DNA, 33 bp, Homo sapien
gatacttctctcaggctgatagtcatgtccaaa

SEQ ID NO: 122183 - DNA, 33 bp, Homo sapien
atacagctacatccccaaattgctgcttgtatc

SEQ ID NO: 122184 - DNA, 33 bp, Homo sapien
atacagctacatccccgaattgctgcttgtatc

SEQ ID NO: 122185 - DNA, 33 bp, Homo sapien
atcataaccacaattaccctcctgaggtcctgg

SEQ ID NO: 122186 - DNA, 33 bp, Homo sapien
atcataaccacaattatcctcctgaggtcctgg

SEQ ID NO: 122187 - DNA, 33 bp, Homo sapien
gtgtccagctaagaacagggcgccgcgagaggt

SEQ ID NO: 122188 - DNA, 33 bp, Homo sapien
gtgtccagctaagaaccgggcgccgcgagaggt

SEQ ID NO: 122189 - DNA, 33 bp, Homo sapien
cccacgtcaacatcagaatccttactgtgggca

SEQ ID NO: 122190 - DNA, 33 bp, Homo sapien
cccacgtcaacatcaggatccttactgtgggca

SEQ ID NO: 122191 - DNA, 33 bp, Homo sapien
ggagggcaacagtgaaagcaagcttaaagcatt

SEQ ID NO: 122192 - DNA, 33 bp, Homo sapien
ggagggcaacagtgaaggcaagcttaaagcatt

SEQ ID NO: 122193 - DNA, 33 bp, Homo sapien
gtattcttgccaggtaagaggggactaagaaag

SEQ ID NO: 122194 - DNA, 33 bp, Homo sapien
gtattcttgccaggtacgaggggactaagaaag

SEQ ID NO: 122195 - DNA, 33 bp, Homo sapien
gtcagctcattccaatcaatcaagaaatcgata

SEQ ID NO: 122196 - DNA, 33 bp, Homo sapien
gtcagctcattccaatgaatcaagaaatcgata

SEQ ID NO: 122197 - DNA, 33 bp, Homo sapien
aattggccctgaagacacaaattatttgccatg

SEQ ID NO: 122198 - DNA, 33 bp, Homo sapien
aattggccctgaagacgcaaattatttgccatg

SEQ ID NO: 122199 - DNA, 33 bp, Homo sapien
gaaacaggagactgtcaaatctgggctggaaca

SEQ ID NO: 122200 - DNA, 33 bp, Homo sapien
gaaacaggagactgtcgaatctgggctggaaca

SEQ ID NO: 122201 - DNA, 33 bp, Homo sapien
gaatctcagtccggaaagagagagaggaaggag

SEQ ID NO: 122202 - DNA, 33 bp, Homo sapien
gaatctcagtccggaaggagagagaggaaggag

SEQ ID NO: 122203 - DNA, 33 bp, Homo sapien
tgcattatcggtctcaacatcattcttcctttc

SEQ ID NO: 122204 - DNA, 33 bp, Homo sapien
tgcattatcggtctcagcatcattcttcctttc

SEQ ID NO: 122205 - DNA, 33 bp, Homo sapien
cccctcttacatatccacatcagtatattctat

SEQ ID NO: 122206 - DNA, 33 bp, Homo sapien
cccctcttacatatccgcatcagtatattctat

SEQ ID NO: 122207 - DNA, 33 bp, Homo sapien
tttgaaaccccctcaacggattctgaaaatcag

SEQ ID NO: 122208 - DNA, 33 bp, Homo sapien
tttgaaaccccctcaatggattctgaaaatcag

SEQ ID NO: 122209 - DNA, 33 bp, Homo sapien
acaggcttgtgtattacggtatcttattgatga

SEQ ID NO: 122210 - DNA, 33 bp, Homo sapien
acaggcttgtgtattatggtatcttattgatga

SEQ ID NO: 122211 - DNA, 33 bp, Homo sapien
aaattacctctggaaaactagagtacaatctta

SEQ ID NO: 122212 - DNA, 33 bp, Homo sapien
aaattacctctggaaagctagagtacaatctta

SEQ ID NO: 122213 - DNA, 33 bp, Homo sapien
agccaacaatgtaggaagaagatcgaaggttga

SEQ ID NO: 122214 - DNA, 33 bp, Homo sapien
agccaacaatgtaggaggaagatcgaaggttga

SEQ ID NO: 122215 - DNA, 33 bp, Homo sapien
tgttttagccattttgaaatgtatgcataatca

SEQ ID NO: 122216 - DNA, 33 bp, Homo sapien
tgttttagccattttgcaatgtatgcataatca

SEQ ID NO: 122217 - DNA, 33 bp, Homo sapien
ctgtgtgtgagagaaacacggatagagaattaa

SEQ ID NO: 122218 - DNA, 33 bp, Homo sapien
ctgtgtgtgagagaaatacggatagagaattaa

SEQ ID NO: 122219 - DNA, 33 bp, Homo sapien
gcctcaccctggggacccatcaccaagaggaac

SEQ ID NO: 122220 - DNA, 33 bp, Homo sapien
gcctcaccctggggactcatcaccaagaggaac

SEQ ID NO: 122221 - DNA, 33 bp, Homo sapien
tgaaaatgcgacgctaagtgtaagaagccggac

SEQ ID NO: 122222 - DNA, 33 bp, Homo sapien
tgaaaatgcgacgctacgtgtaagaagccggac

SEQ ID NO: 122223 - DNA, 33 bp, Homo sapien
cagtggcaaccgagaacgtgtactttgaatgat

SEQ ID NO: 122224 - DNA, 33 bp, Homo sapien
cagtggcaaccgagaatgtgtactttgaatgat

SEQ ID NO: 122225 - DNA, 33 bp, Homo sapien
tattaatcataaagaacatggagagtaggagaa

SEQ ID NO: 122226 - DNA, 33 bp, Homo sapien
tattaatcataaagaatatggagagtaggagaa

SEQ ID NO: 122227 - DNA, 33 bp, Homo sapien
ggtgcatgcctgctacgatgggccagatatcac

SEQ ID NO: 122228 - DNA, 33 bp, Homo sapien
ggtgcatgcctgctactatgggccagatatcac

SEQ ID NO: 122229 - DNA, 33 bp, Homo sapien
gtgagtactcaatcaaggttagccatgtagctt

SEQ ID NO: 122230 - DNA, 33 bp, Homo sapien
gtgagtactcaatcaatgttagccatgtagctt

SEQ ID NO: 122231 - DNA, 33 bp, Homo sapien
cttctgtttgatgtgacagaaaagttatgaaaa

SEQ ID NO: 122232 - DNA, 33 bp, Homo sapien
cttctgtttgatgtgatagaaaagttatgaaaa

SEQ ID NO: 122233 - DNA, 33 bp, Homo sapien
gcctccttcattatcaatatcttcctccagagt

SEQ ID NO: 122234 - DNA, 33 bp, Homo sapien
gcctccttcattatcagtatcttcctccagagt

SEQ ID NO: 122235 - DNA, 33 bp, Homo sapien
taaaataggtcagacaaaaaagcatatgattcc

SEQ ID NO: 122236 - DNA, 33 bp, Homo sapien
taaaataggtcagacacaaaagcatatgattcc

SEQ ID NO: 122237 - DNA, 33 bp, Homo sapien
tagatgaatctccaaaacatcatgttgagtaaa

SEQ ID NO: 122238 - DNA, 33 bp, Homo sapien
tagatgaatctccaaatcatcatgttgagtaaa

SEQ ID NO: 122239 - DNA, 33 bp, Homo sapien
gagattaatactcttacaggaagagacatcaaa

SEQ ID NO: 122240 - DNA, 33 bp, Homo sapien
gagattaatactcttataggaagagacatcaaa

SEQ ID NO: 122241 - DNA, 33 bp, Homo sapien
tacgttttgagtacttgaaactgcctgtacaat

SEQ ID NO: 122242 - DNA, 33 bp, Homo sapien
tacgttttgagtactttaaactgcctgtacaat

SEQ ID NO: 122243 - DNA, 33 bp, Homo sapien; identical to SEQ ID NO: 122241

SEQ ID NO: 122244 - DNA, 33 bp, Homo sapien; identical to SEQ ID NO: 122242

SEQ ID NO: 122245 - DNA, 33 bp, Homo sapien
aaacatactttgtagaatatgtgaactgcaatc

SEQ ID NO: 122246 - DNA, 33 bp, Homo sapien
aaacatactttgtagactatgtgaactgcaatc

SEQ ID NO: 122247 - DNA, 33 bp, Homo sapien
ggagatggggccataacattcggaagcttctgg

SEQ ID NO: 122248 - DNA, 33 bp, Homo sapien
ggagatggggccataatattcggaagcttctgg

SEQ ID NO: 122249 - DNA, 33 bp, Homo sapien
gtggtgtatgaggcaacaaaatagttatcgtgg

SEQ ID NO: 122250 - DNA, 33 bp, Homo sapien
gtggtgtatgaggcaataaaatagttatcgtgg

SEQ ID NO: 122251 - DNA, 33 bp, Homo sapien; identical to SEQ ID NO: 122249

SEQ ID NO: 122252 - DNA, 33 bp, Homo sapien; identical to SEQ ID NO: 122250

SEQ ID NO: 122253 - DNA, 33 bp, Homo sapien
tggcacaaaaagtagaccctccatgagattcaa

SEQ ID NO: 122254 - DNA, 33 bp, Homo sapien
tggcacaaaaagtagatcctccatgagattcaa

SEQ ID NO: 122255 - DNA, 33 bp, Homo sapien
atatttcctgattttcacttgccattccatttc

SEQ ID NO: 122256 - DNA, 33 bp, Homo sapien
atatttcctgattttcgcttgccattccatttc

SEQ ID NO: 122257 - DNA, 33 bp, Homo sapien; identical to SEQ ID NO: 122255

SEQ ID NO: 122258 - DNA, 33 bp, Homo sapien; identical to SEQ ID NO: 122256

SEQ ID NO: 122259 - DNA, 33 bp, Homo sapien
tggggctctgaaaaaactggtaaactgaaacaa

SEQ ID NO: 122260 - DNA, 33 bp, Homo sapien
tggggctctgaaaaaattggtaaactgaaacaa

SEQ ID NO: 122261 - DNA, 33 bp, Homo sapien
tgatttctttgaatgcaaagttgggaggaggtg

SEQ ID NO: 122262 - DNA, 33 bp, Homo sapien
tgatttctttgaatgcgaagttgggaggaggtg

SEQ ID NO: 122263 - DNA, 33 bp, Homo sapien
agcttttcgtgaccaacggtgagcggatgcctt

SEQ ID NO: 122264 - DNA, 33 bp, Homo sapien
agcttttcgtgaccaatggtgagcggatgcctt

SEQ ID NO: 122265 - DNA, 33 bp, Homo sapien
gtggattgtattggaaacagttaattattttgc

SEQ ID NO: 122266 - DNA, 33 bp, Homo sapien
gtggattgtattggaagcagttaattattttgc

SEQ ID NO: 122267 - DNA, 33 bp, Homo sapien
ctccaggtggtttacagctccctggctgaggag

SEQ ID NO: 122268 - DNA, 33 bp, Homo sapien
ctccaggtggtttacatctccctggctgaggag

SEQ ID NO: 122269 - DNA, 33 bp, Homo sapien
taaggaattgttccccacaaaggcaggatctgg

SEQ ID NO: 122270 - DNA, 33 bp, Homo sapien
taaggaattgttccccgcaaaggcaggatctgg

SEQ ID NO: 122271 - DNA, 33 bp, Homo sapien
ctccagacttccataaaaaagtacccagagttg

SEQ ID NO: 122272 - DNA, 33 bp, Homo sapien
ctccagacttccataacaaagtacccagagttg

SEQ ID NO: 122273 - DNA, 33 bp, Homo sapien
gcacactcgctctcccccaaaacctgagttgaa

SEQ ID NO: 122274 - DNA, 33 bp, Homo sapien
gcacactcgctctccctcaaaacctgagttgaa

SEQ ID NO: 122275 - DNA, 33 bp, Homo sapien
gaaacaattatctaggacatgaagtgaggatgg

SEQ ID NO: 122276 - DNA, 33 bp, Homo sapien
gaaacaattatctaggtcatgaagtgaggatgg

SEQ ID NO: 122277 - DNA, 33 bp, Homo sapien
cctagataattgtttccaagctccatattgccc

SEQ ID NO: 122278 - DNA, 33 bp, Homo sapien
cctagataattgtttctaagctccatattgccc

SEQ ID NO: 122279 - DNA, 33 bp, Homo sapien
aactccttgtcatgaactcacaggatgagaaaa

SEQ ID NO: 122280 - DNA, 33 bp, Homo sapien
aactccttgtcatgaattcacaggatgagaaaa

SEQ ID NO: 122281 - DNA, 33 bp, Homo sapien
cttttctatttttgtaacttccaaggatacatc

SEQ ID NO: 122282 - DNA, 33 bp, Homo sapien
cttttctatttttgtaccttccaaggatacatc

SEQ ID NO: 122283 - DNA, 33 bp, Homo sapien
tgtttttcttaaggccactgtatccagaactct

SEQ ID NO: 122284 - DNA, 33 bp, Homo sapien
tgtttttcttaaggccgctgtatccagaactct

SEQ ID NO: 122285 - DNA, 33 bp, Homo sapien
ccaaatattgtataaccacacaaattatttgtt

SEQ ID NO: 122286 - DNA, 33 bp, Homo sapien
ccaaatattgtataacgacacaaattatttgtt

SEQ ID NO: 122287 - DNA, 33 bp, Homo sapien
tcgctacagtttcacaaccctgtggctaaagct

SEQ ID NO: 122288 - DNA, 33 bp, Homo sapien
tcgctacagtttcacatccctgtggctaaagct

SEQ ID NO: 122289 - DNA, 33 bp, Homo sapien
tagcatttctatgtgccagtagcgaacaatctg

SEQ ID NO: 122290 - DNA, 33 bp, Homo sapien
tagcatttctatgtgctagtagcgaacaatctg

SEQ ID NO: 122291 - DNA, 33 bp, Homo sapien
tgagactggcaaatcacgaggttgggagttcga

SEQ ID NO: 122292 - DNA, 33 bp, Homo sapien
tgagactggcaaatcatgaggttgggagttcga

SEQ ID NO: 122293 - DNA, 33 bp, Homo sapien
caaaatagtcattttaaagaaagaatcaaactg

SEQ ID NO: 122294 - DNA, 33 bp, Homo sapien
caaaatagtcattttagagaaagaatcaaactg

SEQ ID NO: 122295 - DNA, 33 bp, Homo sapien
agcaaggaggccaataccactagatggtgccta

SEQ ID NO: 122296 - DNA, 33 bp, Homo sapien
agcaaggaggccaatatcactagatggtgccta

SEQ ID NO: 122297 - DNA, 33 bp, Homo sapien
atataaagaaactgaaatgcttatacatctctg

SEQ ID NO: 122298 - DNA, 33 bp, Homo sapien
atataaagaaactgaagtgcttatacatctctg

SEQ ID NO: 122299 - DNA, 33 bp, Homo sapien
cagaactatctgaagacagtctgatgtaattct

SEQ ID NO: 122300 - DNA, 33 bp, Homo sapien
cagaactatctgaagagagtctgatgtaattct

SEQ ID NO: 122301 - DNA, 33 bp, Homo sapien
aacaaatctctaaatacatactagttccctttc

SEQ ID NO: 122302 - DNA, 33 bp, Homo sapien
aacaaatctctaaatatatactagttccctttc

SEQ ID NO: 122303 - DNA, 33 bp, Homo sapien
tgtttgaattgtgaaggcttactcaatactttg

SEQ ID NO: 122304 - DNA, 33 bp, Homo sapien
tgtttgaattgtgaagtcttactcaatactttg

SEQ ID NO: 122305 - DNA, 33 bp, Homo sapien
acaacccacttgactccagcaagcacaggggac

SEQ ID NO: 122306 - DNA, 33 bp, Homo sapien
acaacccacttgactctagcaagcacaggggac

SEQ ID NO: 122307 - DNA, 33 bp, Homo sapien
ctaaaaggacatctgaacccattgggaaacatc

SEQ ID NO: 122308 - DNA, 33 bp, Homo sapien
ctaaaaggacatctgagcccattgggaaacatc

SEQ ID NO: 122309 - DNA, 33 bp, Homo sapien
gtgacagaagatctaaaatccagatggagcact

SEQ ID NO: 122310 - DNA, 33 bp, Homo sapien
gtgacagaagatctaagatccagatggagcact

SEQ ID NO: 122311 - DNA, 33 bp, Homo sapien
acacagttattttcaaccagtgaggtctgaacc

SEQ ID NO: 122312 - DNA, 33 bp, Homo sapien
acacagttattttcaatcagtgaggtctgaacc

SEQ ID NO: 122313 - DNA, 33 bp, Homo sapien
aatgaagctctaaggacgaccccaagctctcca

SEQ ID NO: 122314 - DNA, 33 bp, Homo sapien
aatgaagctctaaggatgaccccaagctctcca

SEQ ID NO: 122315 - DNA, 33 bp, Homo sapien
tccaggaatgactgaacatagcttggaggttag

SEQ ID NO: 122316 - DNA, 33 bp, Homo sapien
tccaggaatgactgaagatagcttggaggttag

SEQ ID NO: 122317 - DNA, 33 bp, Homo sapien
tgctgtgataagcatacgaatgcaggtgtcttt

SEQ ID NO: 122318 - DNA, 33 bp, Homo sapien
tgctgtgataagcataggaatgcaggtgtcttt

SEQ ID NO: 122319 - DNA, 33 bp, Homo sapien
tagtgatgtaaagtaaccttcagacatctcttt

SEQ ID NO: 122320 - DNA, 33 bp, Homo sapien
tagtgatgtaaagtaatcttcagacatctcttt

SEQ ID NO: 122321 - DNA, 33 bp, Homo sapien
acgtttcacattctccgcagcttttcctgaaaa

SEQ ID NO: 122322 - DNA, 33 bp, Homo sapien
acgtttcacattctcctcagcttttcctgaaaa

SEQ ID NO: 122323 - DNA, 33 bp, Homo sapien
gtcattttaccaaaataaacaatgggatgattg

SEQ ID NO: 122324 - DNA, 33 bp, Homo sapien
gtcattttaccaaaatcaacaatgggatgattg

SEQ ID NO: 122325 - DNA, 33 bp, Homo sapien
caaacacaaattatcaactcctgttagcaagag

SEQ ID NO: 122326 - DNA, 33 bp, Homo sapien
caaacacaaattatcagctcctgttagcaagag

SEQ ID NO: 122327 - DNA, 33 bp, Homo sapien
atgaataaaagagataacacagatttgtccctc

SEQ ID NO: 122328 - DNA, 33 bp, Homo sapien
atgaataaaagagataccacagatttgtccctc

SEQ ID NO: 122329 - DNA, 33 bp, Homo sapien
tgacagaaggacaaaactgtgttagtgaaaaca

SEQ ID NO: 122330 - DNA, 33 bp, Homo sapien
tgacagaaggacaaaattgtgttagtgaaaaca

SEQ ID NO: 122331 - DNA, 33 bp, Homo sapien
attcttgcctctgaaacatagtgatgagcccag

SEQ ID NO: 122332 - DNA, 33 bp, Homo sapien
attcttgcctctgaaatatagtgatgagcccag

SEQ ID NO: 122333 - DNA, 33 bp, Homo sapien
ttgaaaagctccaaatcatttctgaatttcatg

SEQ ID NO: 122334 - DNA, 33 bp, Homo sapien
ttgaaaagctccaaattatttctgaatttcatg

SEQ ID NO: 122335 - DNA, 33 bp, Homo sapien
taaagttgcaagatacaaagtcaaaatacaaaa

SEQ ID NO: 122336 - DNA, 33 bp, Homo sapien
taaagttgcaagatacgaagtcaaaatacaaaa

SEQ ID NO: 122337 - DNA, 33 bp, Homo sapien
aatgctgatggaattaaccaactcacctatctg

SEQ ID NO: 122338 - DNA, 33 bp, Homo sapien
aatgctgatggaattagccaactcacctatctg

SEQ ID NO: 122339 - DNA, 33 bp, Homo sapien; identical to SEQ ID NO: 122337

SEQ ID NO: 122340 - DNA, 33 bp, Homo sapien; identical to SEQ ID NO: 122338

SEQ ID NO: 122341 - DNA, 33 bp, Homo sapien
aatgctccttaaatacaaggcaagagaaaatgt

SEQ ID NO: 122342 - DNA, 33 bp, Homo sapien
aatgctccttaaatacgaggcaagagaaaatgt

SEQ ID NO: 122343 - DNA, 33 bp, Homo sapien
acaccttgatatttcaccaagctgcctgtcagt

SEQ ID NO: 122344 - DNA, 33 bp, Homo sapien
acaccttgatatttcagcaagctgcctgtcagt

SEQ ID NO: 122345 - DNA, 33 bp, Homo sapien
gggccaaatgaattaaataccttgtttacagtc

SEQ ID NO: 122346 - DNA, 33 bp, Homo sapien
gggccaaatgaattaagtaccttgtttacagtc

SEQ ID NO: 122347 - DNA, 33 bp, Homo sapien
gtggcctttggaatgcacccagacttactggct

SEQ ID NO: 122348 - DNA, 33 bp, Homo sapien
gtggcctttggaatgcgcccagacttactggct

SEQ ID NO: 122349 - DNA, 33 bp, Homo sapien; identical to SEQ ID NO: 122347

SEQ ID NO: 122350 - DNA, 33 bp, Homo sapien; identical to SEQ ID NO: 122348

SEQ ID NO: 122351 - DNA, 33 bp, Homo sapien
ggcacctctgcctacaacaagaaagtttactct

SEQ ID NO: 122352 - DNA, 33 bp, Homo sapien
ggcacctctgcctacagcaagaaagtttactct

SEQ ID NO: 122353 - DNA, 33 bp, Homo sapien
ctgaagtgtaaacctaacagtcacctacattct

SEQ ID NO: 122354 - DNA, 33 bp, Homo sapien
ctgaagtgtaaacctatcagtcacctacattct

SEQ ID NO: 122355 - DNA, 33 bp, Homo sapien
gtcgagcagcttcagacagtgacaatattaagg

SEQ ID NO: 122356 - DNA, 33 bp, Homo sapien
gtcgagcagcttcagagagtgacaatattaagg

SEQ ID NO: 122357 - DNA, 33 bp, Homo sapien
ggaatccagctgggataaggaaggaaatgaggc

SEQ ID NO: 122358 - DNA, 33 bp, Homo sapien
ggaatccagctgggatgaggaaggaaatgaggc

SEQ ID NO: 122359 - DNA, 33 bp, Homo sapien
agtgaggaagaaaatgaaaggagatatttcagt

SEQ ID NO: 122360 - DNA, 33 bp, Homo sapien
agtgaggaagaaaatggaaggagatatttcagt

SEQ ID NO: 122361 - DNA, 33 bp, Homo sapien
atcccaggactgcaaaagtcatttaatatatga

SEQ ID NO: 122362 - DNA, 33 bp, Homo sapien
atcccaggactgcaaaggtcatttaatatatga

SEQ ID NO: 122363 - DNA, 33 bp, Homo sapien
aaccacaggacagtaaagcaccaaatggttctt

SEQ ID NO: 122364 - DNA, 33 bp, Homo sapien
aaccacaggacagtaatgcaccaaatggttctt

SEQ ID NO: 122365 - DNA, 33 bp, Homo sapien
accctgtggctgggtaaatggtcctaaagtggt

SEQ ID NO: 122366 - DNA, 33 bp, Homo sapien
accctgtggctgggtagatggtcctaaagtggt

SEQ ID NO: 122367 - DNA, 33 bp, Homo sapien
aggaagaatgacatccaaagggtgtggagcagc

SEQ ID NO: 122368 - DNA, 33 bp, Homo sapien
aggaagaatgacatccgaagggtgtggagcagc

SEQ ID NO: 122369 - DNA, 33 bp, Homo sapien
agatcaaggaatcacacggtgatcggaacgctg

SEQ ID NO: 122370 - DNA, 33 bp, Homo sapien
agatcaaggaatcacagggtgatcggaacgctg

SEQ ID NO: 122371 - DNA, 33 bp, Homo sapien
gggtatgtaacttccacgtgcaggttgcgatgg

SEQ ID NO: 122372 - DNA, 33 bp, Homo sapien
gggtatgtaacttccatgtgcaggttgcgatgg

SEQ ID NO: 122373 - DNA, 33 bp, Homo sapien
cgtgtttctgttccaaatagctggagccaagat

SEQ ID NO: 122374 - DNA, 33 bp, Homo sapien
cgtgtttctgttccaagtagctggagccaagat

SEQ ID NO: 122375 - DNA, 33 bp, Homo sapien
aactggagtcaggaccaaggtctccatcatgcc

SEQ ID NO: 122376 - DNA, 33 bp, Homo sapien
aactggagtcaggaccgaggtctccatcatgcc

SEQ ID NO: 122377 - DNA, 33 bp, Homo sapien
caacctctgaactagacggcctctaaagtgcct

SEQ ID NO: 122378 - DNA, 33 bp, Homo sapien
caacctctgaactagatggcctctaaagtgcct

SEQ ID NO: 122379 - DNA, 33 bp, Homo sapien
cctcaccagcactcggaaagaagggtgggggct

SEQ ID NO: 122380 - DNA, 33 bp, Homo sapien
cctcaccagcactcgggaagaagggtgggggct

SEQ ID NO: 122381 - DNA, 33 bp, Homo sapien
tgtggagaagagctgacgccctcgagcctggga

SEQ ID NO: 122382 - DNA, 33 bp, Homo sapien
tgtggagaagagctgatgccctcgagcctggga

SEQ ID NO: 122383 - DNA, 33 bp, Homo sapien
tattcagagttcagccagaagcgagatgacaac

SEQ ID NO: 122384 - DNA, 33 bp, Homo sapien
tattcagagttcagccggaagcgagatgacaac

SEQ ID NO: 122385 - DNA, 33 bp, Homo sapien
aaaaggtaggaacaacaaggatgaatcggacaa

SEQ ID NO: 122386 - DNA, 33 bp, Homo sapien
aaaaggtaggaacaacgaggatgaatcggacaa

SEQ ID NO: 122387 - DNA, 33 bp, Homo sapien
aacaggcccagaggcgcactgcacccttgccag

SEQ ID NO: 122388 - DNA, 33 bp, Homo sapien
aacaggcccagaggcgtactgcacccttgccag

SEQ ID NO: 122389 - DNA, 33 bp, Homo sapien
agttggatagcgtggccagaacagtggtcttca

SEQ ID NO: 122390 - DNA, 33 bp, Homo sapien
agttggatagcgtggctagaacagtggtcttca

SEQ ID NO: 122391 - DNA, 33 bp, Homo sapien
actggtgaggaggtaacctgggggatgtaaatg

SEQ ID NO: 122392 - DNA, 33 bp, Homo sapien
actggtgaggaggtaatctgggggatgtaaatg

SEQ ID NO: 122393 - DNA, 33 bp, Homo sapien
cctgctcacctgtcggacagttccttctattag

SEQ ID NO: 122394 - DNA, 33 bp, Homo sapien
cctgctcacctgtcgggcagttccttctattag

SEQ ID NO: 122395 - DNA, 33 bp, Homo sapien
atgtatgcttgtttacacttcagattcctgggc

SEQ ID NO: 122396 - DNA, 33 bp, Homo sapien
atgtatgcttgtttacgcttcagattcctgggc

SEQ ID NO: 122397 - DNA, 33 bp, Homo sapien
atggcagaagacatcacgcgggtaagagagagc

SEQ ID NO: 122398 - DNA, 33 bp, Homo sapien
atggcagaagacatcatgcgggtaagagagagc

SEQ ID NO: 122399 - DNA, 33 bp, Homo sapien
atattctttaaaatgaaaagatgaggccaggca

SEQ ID NO: 122400 - DNA, 33 bp, Homo sapien
atattctttaaaatgacaagatgaggccaggca

SEQ ID NO: 122401 - DNA, 33 bp, Homo sapien
tctctgaggggccttgacaaatctaagccctcc

SEQ ID NO: 122402 - DNA, 33 bp, Homo sapien
tctctgaggggccttggcaaatctaagccctcc

SEQ ID NO: 122403 - DNA, 33 bp, Homo sapien
aataggtgaggtagacaaggctgggagggctta

SEQ ID NO: 122404 - DNA, 33 bp, Homo sapien
aataggtgaggtagacgaggctgggagggctta

SEQ ID NO: 122405 - DNA, 33 bp, Homo sapien
agccaaaaaaagtctgcatatgaggccacaaag

SEQ ID NO: 122406 - DNA, 33 bp, Homo sapien
agccaaaaaaagtctgtatatgaggccacaaag

SEQ ID NO: 122407 - DNA, 33 bp, Homo sapien
ctgtgcctaacagttacgtgggtcagtaggaaa

SEQ ID NO: 122408 - DNA, 33 bp, Homo sapien
ctgtgcctaacagttatgtgggtcagtaggaaa

SEQ ID NO: 122409 - DNA, 33 bp, Homo sapien
atcagtgaacaaccataaggccacacaaagagg

SEQ ID NO: 122410 - DNA, 33 bp, Homo sapien
atcagtgaacaaccatgaggccacacaaagagg

SEQ ID NO: 122411 - DNA, 33 bp, Homo sapien
ttccctggctgacataatagaagtgaactttgg

SEQ ID NO: 122412 - DNA, 33 bp, Homo sapien
ttccctggctgacatagtagaagtgaactttgg

SEQ ID NO: 122413 - DNA, 33 bp, Homo sapien
atccatgcaagaaacaggagactggaaatttcc

SEQ ID NO: 122414 - DNA, 33 bp, Homo sapien
atccatgcaagaaacatgagactggaaatttcc

SEQ ID NO: 122415 - DNA, 33 bp, Homo sapien
catcttgagtaaaaggaatcagtcagggtctac

SEQ ID NO: 122416 - DNA, 33 bp, Homo sapien
catcttgagtaaaagggatcagtcagggtctac

SEQ ID NO: 122417 - DNA, 33 bp, Homo sapien
ctgaagggccagccataacatcgggcaagtagg

SEQ ID NO: 122418 - DNA, 33 bp, Homo sapien
ctgaagggccagccatgacatcgggcaagtagg

SEQ ID NO: 122419 - DNA, 33 bp, Homo sapien
cctggattcacttttcaaaatagtcctcctgct

SEQ ID NO: 122420 - DNA, 33 bp, Homo sapien
cctggattcacttttcgaaatagtcctcctgct

SEQ ID NO: 122421 - DNA, 33 bp, Homo sapien
atgcctgttttacagacgtaagaactgaggccc

SEQ ID NO: 122422 - DNA, 33 bp, Homo sapien
atgcctgttttacagaggtaagaactgaggccc

SEQ ID NO: 122423 - DNA, 33 bp, Homo sapien
ggatttataccgttacaggtcacagaggactag

SEQ ID NO: 122424 - DNA, 33 bp, Homo sapien
ggatttataccgttacgggtcacagaggactag

SEQ ID NO: 122425 - DNA, 33 bp, Homo sapien
tgtgccaagccctgcactgaaggcaagtatgag

SEQ ID NO: 122426 - DNA, 33 bp, Homo sapien
tgtgccaagccctgcattgaaggcaagtatgag

SEQ ID NO: 122427 - DNA, 33 bp, Homo sapien
gaaacatgacacattacagagaaaagcacgttt

SEQ ID NO: 122428 - DNA, 33 bp, Homo sapien
gaaacatgacacattatagagaaaagcacgttt

SEQ ID NO: 122429 - DNA, 33 bp, Homo sapien
atgcaggaagggcacaagataaggcataggcag

SEQ ID NO: 122430 - DNA, 33 bp, Homo sapien
atgcaggaagggcacaggataaggcataggcag

SEQ ID NO: 122431 - DNA, 33 bp, Homo sapien
agggttaggaccaaagacagtggccacctctgg

SEQ ID NO: 122432 - DNA, 33 bp, Homo sapien
agggttaggaccaaaggcagtggccacctctgg

SEQ ID NO: 122433 - DNA, 33 bp, Homo sapien
tctcagaagcttgtccaacaccagaaggcaagc

SEQ ID NO: 122434 - DNA, 33 bp, Homo sapien
tctcagaagcttgtccgacaccagaaggcaagc

SEQ ID NO: 122435 - DNA, 33 bp, Homo sapien
ttggaagatggaacagaagcagggtttctttct

SEQ ID NO: 122436 - DNA, 33 bp, Homo sapien
ttggaagatggaacaggagcagggtttctttct

SEQ ID NO: 122437 - DNA, 33 bp, Homo sapien
cctgtgtaatagcagcacatggcactttacctg

SEQ ID NO: 122438 - DNA, 33 bp, Homo sapien
cctgtgtaatagcagcgcatggcactttacctg

SEQ ID NO: 122439 - DNA, 33 bp, Homo sapien
gaaggtccagaagaagcaggagaaagagtcctg

SEQ ID NO: 122440 - DNA, 33 bp, Homo sapien
gaaggtccagaagaagtaggagaaagagtcctg

SEQ ID NO: 122441 - DNA, 33 bp, Homo sapien
tgatgttcggctatgccaccgacgagacagagg

SEQ ID NO: 122442 - DNA, 33 bp, Homo sapien
tgatgttcggctatgctaccgacgagacagagg

SEQ ID NO: 122443 - DNA, 33 bp, Homo sapien
gctatcgtgctaggacaagaatccacccctcag

SEQ ID NO: 122444 - DNA, 33 bp, Homo sapien
gctatcgtgctaggacgagaatccacccctcag

SEQ ID NO: 122445 - DNA, 33 bp, Homo sapien
ctctgttagctctttccctaattctctgaaatc

SEQ ID NO: 122446 - DNA, 33 bp, Homo sapien
ctctgttagctctttctctaattctctgaaatc

SEQ ID NO: 122447 - DNA, 33 bp, Homo sapien
aatttgcctgtcttcagataatactgatacttt

SEQ ID NO: 122448 - DNA, 33 bp, Homo sapien
aatttgcctgtcttcatataatactgatacttt

SEQ ID NO: 122449 - DNA, 33 bp, Homo sapien
agtagagtaacaaagacaataaacacaaacatt

SEQ ID NO: 122450 - DNA, 33 bp, Homo sapien
agtagagtaacaaagataataaacacaaacatt

SEQ ID NO: 122451 - DNA, 33 bp, Homo sapien
acaagtagacaatctagaactgaaaagtacaac

SEQ ID NO: 122452 - DNA, 33 bp, Homo sapien
acaagtagacaatctataactgaaaagtacaac

SEQ ID NO: 122453 - DNA, 33 bp, Homo sapien
tggatcaataacacataatagattcaaatactt

SEQ ID NO: 122454 - DNA, 33 bp, Homo sapien
tggatcaataacacatcatagattcaaatactt

SEQ ID NO: 122455 - DNA, 33 bp, Homo sapien
tgctgaaacaggaagaatatcagattcaacaga

SEQ ID NO: 122456 - DNA, 33 bp, Homo sapien
tgctgaaacaggaagagtatcagattcaacaga

SEQ ID NO: 122457 - DNA, 33 bp, Homo sapien
tgtgttagcaggcgtaaaaacaacatttacctc

SEQ ID NO: 122458 - DNA, 33 bp, Homo sapien
tgtgttagcaggcgtagaaacaacatttacctc

SEQ ID NO: 122459 - DNA, 33 bp, Homo sapien
gaagatccatgcaatacccttatgccttttgta

SEQ ID NO: 122460 - DNA, 33 bp, Homo sapien
gaagatccatgcaatatccttatgccttttgta

SEQ ID NO: 122461 - DNA, 33 bp, Homo sapien
acagaggctggaacaacagaccacctctagatc

SEQ ID NO: 122462 - DNA, 33 bp, Homo sapien
acagaggctggaacaatagaccacctctagatc

SEQ ID NO: 122463 - DNA, 33 bp, Homo sapien
tacctaaggctacggacataaagcctaaagcag

SEQ ID NO: 122464 - DNA, 33 bp, Homo sapien
tacctaaggctacggagataaagcctaaagcag

SEQ ID NO: 122465 - DNA, 33 bp, Homo sapien
tttaactatcacccacagcccactgagtcactg

SEQ ID NO: 122466 - DNA, 33 bp, Homo sapien
tttaactatcacccacggcccactgagtcactg

SEQ ID NO: 122467 - DNA, 33 bp, Homo sapien
tgctatgacgctgaaaaagtcaggagtctttac

SEQ ID NO: 122468 - DNA, 33 bp, Homo sapien
tgctatgacgctgaaagagtcaggagtctttac

SEQ ID NO: 122469 - DNA, 33 bp, Homo sapien
ttctaagtttatttccacgctgtccctgggcca

SEQ ID NO: 122470 - DNA, 33 bp, Homo sapien
ttctaagtttatttccgcgctgtccctgggcca

SEQ ID NO: 122471 - DNA, 33 bp, Homo sapien
ttcatataccacaaaaccagtcacttgcaatga

SEQ ID NO: 122472 - DNA, 33 bp, Homo sapien
ttcatataccacaaaatcagtcacttgcaatga

SEQ ID NO: 122473 - DNA, 33 bp, Homo sapien
tagaagctgtcagtaacggcctaatttcattca

SEQ ID NO: 122474 - DNA, 33 bp, Homo sapien
tagaagctgtcagtaatggcctaatttcattca

SEQ ID NO: 122475 - DNA, 33 bp, Homo sapien
ggcatgtcttgaagcacgtactactgtgacttg

SEQ ID NO: 122476 - DNA, 33 bp, Homo sapien
ggcatgtcttgaagcatgtactactgtgacttg

SEQ ID NO: 122477 - DNA, 33 bp, Homo sapien
tgtaacaaagccacccggatcggggagatgtat

SEQ ID NO: 122478 - DNA, 33 bp, Homo sapien
tgtaacaaagccaccctgatcggggagatgtat

SEQ ID NO: 122479 - DNA, 33 bp, Homo sapien
actggcatgtttctgacgttgctaggtgtgttt

SEQ ID NO: 122480 - DNA, 33 bp, Homo sapien
actggcatgtttctgatgttgctaggtgtgttt

SEQ ID NO: 122481 - DNA, 33 bp, Homo sapien
gtttctctagaaaaaaagtccatctctggcttt

SEQ ID NO: 122482 - DNA, 33 bp, Homo sapien
gtttctctagaaaaaatgtccatctctggcttt

SEQ ID NO: 122483 - DNA, 33 bp, Homo sapien
cagatcatttctttccaaccagtttttacacag

SEQ ID NO: 122484 - DNA, 33 bp, Homo sapien
cagatcatttctttcctaccagtttttacacag

SEQ ID NO: 122485 - DNA, 33 bp, Homo sapien
actggaagatgatgagaataagcagttgcagga

SEQ ID NO: 122486 - DNA, 33 bp, Homo sapien
actggaagatgatgaggataagcagttgcagga

SEQ ID NO: 122487 - DNA, 33 bp, Homo sapien
ctcacctgccattcccagctgtagcagagaccc

SEQ ID NO: 122488 - DNA, 33 bp, Homo sapien
ctcacctgccattcccggctgtagcagagaccc

SEQ ID NO: 122489 - DNA, 33 bp, Homo sapien
agggtataggcactaacgagggtcacctcctac

SEQ ID NO: 122490 - DNA, 33 bp, Homo sapien
agggtataggcactaatgagggtcacctcctac

SEQ ID NO: 122491 - DNA, 33 bp, Homo sapien
attatcaggcactcagacaaacactcactatct

SEQ ID NO: 122492 - DNA, 33 bp, Homo sapien
attatcaggcactcagtcaaacactcactatct

SEQ ID NO: 122493 - DNA, 33 bp, Homo sapien
gcagcctgtgcccctaaaagtgtgaggagtcag

SEQ ID NO: 122494 - DNA, 33 bp, Homo sapien
gcagcctgtgcccctagaagtgtgaggagtcag

SEQ ID NO: 122495 - DNA, 33 bp, Homo sapien
tgctgttttctcaacacggtttttacagtagtt

SEQ ID NO: 122496 - DNA, 33 bp, Homo sapien
tgctgttttctcaacatggtttttacagtagtt

SEQ ID NO: 122497 - DNA, 33 bp, Homo sapien
aatttactgaatgaagaactaaacaagggaatg

SEQ ID NO: 122498 - DNA, 33 bp, Homo sapien
aatttactgaatgaaggactaaacaagggaatg

SEQ ID NO: 122499 - DNA, 33 bp, Homo sapien
agttgcagacattatcggaatcatccctctaga

SEQ ID NO: 122500 - DNA, 33 bp, Homo sapien
agttgcagacattatctgaatcatccctctaga

SEQ ID NO: 122501 - DNA, 33 bp, Homo sapien
ctcagaaacaggctgcacagaggtgaattcaca

SEQ ID NO: 122502 - DNA, 33 bp, Homo sapien
ctcagaaacaggctgcgcagaggtgaattcaca

SEQ ID NO: 122503 - DNA, 33 bp, Homo sapien
ttgaaggaataggcctcaagccatgctggtcac

SEQ ID NO: 122504 - DNA, 33 bp, Homo sapien
ttgaaggaataggccttaagccatgctggtcac

SEQ ID NO: 122505 - DNA, 33 bp, Homo sapien
atgatttcttcatttccatctcagtaatgcagt

SEQ ID NO: 122506 - DNA, 33 bp, Homo sapien
atgatttcttcatttctatctcagtaatgcagt

SEQ ID NO: 122507 - DNA, 33 bp, Homo sapien
agagcaggcttgggcaatccagcttcctgaccc

SEQ ID NO: 122508 - DNA, 33 bp, Homo sapien
agagcaggcttgggcagtccagcttcctgaccc

SEQ ID NO: 122509 - DNA, 33 bp, Homo sapien
gaaagctccaagccaacgtgtcaatcacttgct

SEQ ID NO: 122510 - DNA, 33 bp, Homo sapien
gaaagctccaagccaatgtgtcaatcacttgct

SEQ ID NO: 122511 - DNA, 33 bp, Homo sapien
acacagaacgagtgcaaatctaaaactagaaga

SEQ ID NO: 122512 - DNA, 33 bp, Homo sapien
acacagaacgagtgcatatctaaaactagaaga

SEQ ID NO: 122513 - DNA, 33 bp, Homo sapien
ggccacttccctcgacaaaacagtcgacttcat

SEQ ID NO: 122514 - DNA, 33 bp, Homo sapien
ggccacttccctcgacgaaacagtcgacttcat

SEQ ID NO: 122515 - DNA, 33 bp, Homo sapien
tgaaaatgtagatgtcaatgtgtgacaaatctc

SEQ ID NO: 122516 - DNA, 33 bp, Homo sapien
tgaaaatgtagatgtctatgtgtgacaaatctc

SEQ ID NO: 122517 - DNA, 33 bp, Homo sapien
acgtgatagcacaataagcatgatgttagattt

SEQ ID NO: 122518 - DNA, 33 bp, Homo sapien
acgtgatagcacaataggcatgatgttagattt

SEQ ID NO: 122519 - DNA, 33 bp, Homo sapien
actaaaagtatagaaaccagaatatatgtgtgc

SEQ ID NO: 122520 - DNA, 33 bp, Homo sapien
actaaaagtatagaaatcagaatatatgtgtgc

SEQ ID NO: 122521 - DNA, 33 bp, Homo sapien
ctggcataaaggaggcaaaagtccagcactctg

SEQ ID NO: 122522 - DNA, 33 bp, Homo sapien
ctggcataaaggaggcgaaagtccagcactctg

SEQ ID NO: 122523 - DNA, 33 bp, Homo sapien
cttcaaggaaaacaacggatagaattcatgcca

SEQ ID NO: 122524 - DNA, 33 bp, Homo sapien
cttcaaggaaaacaactgatagaattcatgcca

SEQ ID NO: 122525 - DNA, 33 bp, Homo sapien
aattgttttattcacaccttgacaaattgactt

SEQ ID NO: 122526 - DNA, 33 bp, Homo sapien
aattgttttattcacatcttgacaaattgactt

SEQ ID NO: 122527 - DNA, 33 bp, Homo sapien
aaacctaagaagttcaacatgcatctcctatga

SEQ ID NO: 122528 - DNA, 33 bp, Homo sapien
aaacctaagaagttcagcatgcatctcctatga

SEQ ID NO: 122529 - DNA, 33 bp, Homo sapien
tttctttcagtggtatcagatggctcagagaat

SEQ ID NO: 122530 - DNA, 33 bp, Homo sapien
tttctttcagtggtattagatggctcagagaat

SEQ ID NO: 122531 - DNA, 33 bp, Homo sapien
attcagtaaaatatgacaggtatggaagccttt

SEQ ID NO: 122532 - DNA, 33 bp, Homo sapien
attcagtaaaatatgataggtatggaagccttt

SEQ ID NO: 122533 - DNA, 33 bp, Homo sapien
aggtgaacatccatacaccatactttttctctc

SEQ ID NO: 122534 - DNA, 33 bp, Homo sapien
aggtgaacatccatacgccatactttttctctc

SEQ ID NO: 122535 - DNA, 33 bp, Homo sapien
gttagctgttcctttgcttggctacgtccatgt

SEQ ID NO: 122536 - DNA, 33 bp, Homo sapien
gttagctgttcctttgtttggctacgtccatgt

SEQ ID NO: 122537 - DNA, 33 bp, Homo sapien
ccctcttcctccaaaaagaaagtacacctaagg

SEQ ID NO: 122538 - DNA, 33 bp, Homo sapien
ccctcttcctccaaaatgaaagtacacctaagg

SEQ ID NO: 122539 - DNA, 33 bp, Homo sapien
attgactttctgtgccacaagcagtaggacctg

SEQ ID NO: 122540 - DNA, 33 bp, Homo sapien
attgactttctgtgccgcaagcagtaggacctg

SEQ ID NO: 122541 - DNA, 33 bp, Homo sapien
tctccctaactgactaaaactagaggtttgtgt

SEQ ID NO: 122542 - DNA, 33 bp, Homo sapien
tctccctaactgactataactagaggtttgtgt

SEQ ID NO: 122543 - DNA, 33 bp, Homo sapien
cagatattcagttataaaaatagaagactaaga

SEQ ID NO: 122544 - DNA, 33 bp, Homo sapien
cagatattcagttatagaaatagaagactaaga

SEQ ID NO: 122545 - DNA, 33 bp, Homo sapien
gagagcaaagacagcccagttttcaagctcttt

SEQ ID NO: 122546 - DNA, 33 bp, Homo sapien
gagagcaaagacagcctagttttcaagctcttt

SEQ ID NO: 122547 - DNA, 33 bp, Homo sapien
gaggctctttgaatcaatgaaagcctaagagat

SEQ ID NO: 122548 - DNA, 33 bp, Homo sapien
gaggctctttgaatcagtgaaagcctaagagat

SEQ ID NO: 122549 - DNA, 33 bp, Homo sapien
acagcagctgcccagacgttatcaatgagcaag

SEQ ID NO: 122550 - DNA, 33 bp, Homo sapien
acagcagctgcccagatgttatcaatgagcaag

SEQ ID NO: 122551 - DNA, 33 bp, Homo sapien
ggcctgtgaggccaataaccaaagacatccctc

SEQ ID NO: 122552 - DNA, 33 bp, Homo sapien
ggcctgtgaggccaatgaccaaagacatccctc

SEQ ID NO: 122553 - DNA, 33 bp, Homo sapien
tcccatttacatctcaaagcaacccagtcaggc

SEQ ID NO: 122554 - DNA, 33 bp, Homo sapien
tcccatttacatctcagagcaacccagtcaggc

SEQ ID NO: 122555 - DNA, 33 bp, Homo sapien
gcctttcgtcacaatacaaggctggtatcatgg

SEQ ID NO: 122556 - DNA, 33 bp, Homo sapien
gcctttcgtcacaatataaggctggtatcatgg

SEQ ID NO: 122557 - DNA, 33 bp, Homo sapien
tttgagttttagaagccgcaacatacggatgtc

SEQ ID NO: 122558 - DNA, 33 bp, Homo sapien
tttgagttttagaagctgcaacatacggatgtc

SEQ ID NO: 122559 - DNA, 33 bp, Homo sapien
tcagccaagtggccttaaaaagatatctgtgct

SEQ ID NO: 122560 - DNA, 33 bp, Homo sapien
tcagccaagtggccttgaaaagatatctgtgct

SEQ ID NO: 122561 - DNA, 33 bp, Homo sapien
gagggacaggaaaaaggccagagctttggaaac

SEQ ID NO: 122562 - DNA, 33 bp, Homo sapien
gagggacaggaaaaagtccagagctttggaaac

SEQ ID NO: 122563 - DNA, 33 bp, Homo sapien
ggtgctggctctaagaatagggctcaagagcct

SEQ ID NO: 122564 - DNA, 33 bp, Homo sapien
ggtgctggctctaagactagggctcaagagcct

SEQ ID NO: 122565 - DNA, 33 bp, Homo sapien
tcccaggaaacatcagaaaacacactggcatgg

SEQ ID NO: 122566 - DNA, 33 bp, Homo sapien
tcccaggaaacatcaggaaacacactggcatgg

SEQ ID NO: 122567 - DNA, 33 bp, Homo sapien
gagctctcgcatctcacaagaaagctgcccctc

SEQ ID NO: 122568 - DNA, 33 bp, Homo sapien
gagctctcgcatctcataagaaagctgcccctc

SEQ ID NO: 122569 - DNA, 33 bp, Homo sapien
ttgattattactgtcaagtttgtgttgagtgct

SEQ ID NO: 122570 - DNA, 33 bp, Homo sapien
ttgattattactgtcaggtttgtgttgagtgct

SEQ ID NO: 122571 - DNA, 33 bp, Homo sapien
caacaggaaatgtaggaccaaagtaagatgaga

SEQ ID NO: 122572 - DNA, 33 bp, Homo sapien
caacaggaaatgtaggcccaaagtaagatgaga

SEQ ID NO: 122573 - DNA, 33 bp, Homo sapien
tcccccagccgtatatgagggttgctctacctg

SEQ ID NO: 122574 - DNA, 33 bp, Homo sapien
tcccccagccgtatattagggttgctctacctg

SEQ ID NO: 122575 - DNA, 33 bp, Homo sapien
taatagctatgtcttaaggctgtttgagaatga

SEQ ID NO: 122576 - DNA, 33 bp, Homo sapien
taatagctatgtcttacggctgtttgagaatga

SEQ ID NO: 122577 - DNA, 33 bp, Homo sapien
tccatgaagcagaagacgaaagactgattggag

SEQ ID NO: 122578 - DNA, 33 bp, Homo sapien
tccatgaagcagaagatgaaagactgattggag

SEQ ID NO: 122579 - DNA, 33 bp, Homo sapien
gattctaggaatgttaaggaacgatttacttta

SEQ ID NO: 122580 - DNA, 33 bp, Homo sapien
gattctaggaatgttagggaacgatttacttta

SEQ ID NO: 122581 - DNA, 33 bp, Homo sapien
gccaccagcactataaacagttttgcgtgggtt

SEQ ID NO: 122582 - DNA, 33 bp, Homo sapien
gccaccagcactataaccagttttgcgtgggtt

SEQ ID NO: 122583 - DNA, 33 bp, Homo sapien
aactaacccacaaaaaaacctagtgacggccat

SEQ ID NO: 122584 - DNA, 33 bp, Homo sapien
aactaacccacaaaaacacctagtgacggccat

SEQ ID NO: 122585 - DNA, 33 bp, Homo sapien
tgtcctgcaaatgaaactactgtctggaaaact

SEQ ID NO: 122586 - DNA, 33 bp, Homo sapien
tgtcctgcaaatgaaattactgtctggaaaact

SEQ ID NO: 122587 - DNA, 33 bp, Homo sapien
tcttgtcgcagcttcaaagccctccaggtgtgc

SEQ ID NO: 122588 - DNA, 33 bp, Homo sapien
tcttgtcgcagcttcagagccctccaggtgtgc

SEQ ID NO: 122589 - DNA, 33 bp, Homo sapien
ctagacagttttattcacttttgggacactttc

SEQ ID NO: 122590 - DNA, 33 bp, Homo sapien
ctagacagttttattcccttttgggacactttc

SEQ ID NO: 122591 - DNA, 33 bp, Homo sapien
aatacatccagattagacacagaatgtgaagtg

SEQ ID NO: 122592 - DNA, 33 bp, Homo sapien
aatacatccagattaggcacagaatgtgaagtg

SEQ ID NO: 122593 - DNA, 33 bp, Homo sapien
aactgaacaagcgccaaataccacaaacatccc

SEQ ID NO: 122594 - DNA, 33 bp, Homo sapien
aactgaacaagcgccagataccacaaacatccc

SEQ ID NO: 122595 - DNA, 33 bp, Homo sapien
caaaatggaagttctcaactctcaagaatatat

SEQ ID NO: 122596 - DNA, 33 bp, Homo sapien
caaaatggaagttctcgactctcaagaatatat

SEQ ID NO: 122597 - DNA, 33 bp, Homo sapien
gaaaatcatccagtcaataagctgcaatttagt

SEQ ID NO: 122598 - DNA, 33 bp, Homo sapien
gaaaatcatccagtcagtaagctgcaatttagt

SEQ ID NO: 122599 - DNA, 33 bp, Homo sapien
caagacctttgctctcaagtagttctgtgggat

SEQ ID NO: 122600 - DNA, 33 bp, Homo sapien
caagacctttgctctcgagtagttctgtgggat

SEQ ID NO: 122601 - DNA, 33 bp, Homo sapien
aggcagcatcctcttaacatgtccaaaacggag

SEQ ID NO: 122602 - DNA, 33 bp, Homo sapien
aggcagcatcctcttaccatgtccaaaacggag

SEQ ID NO: 122603 - DNA, 33 bp, Homo sapien
caaagatgtttttaaacggacaaatgtattagc

SEQ ID NO: 122604 - DNA, 33 bp, Homo sapien
caaagatgtttttaaatggacaaatgtattagc

SEQ ID NO: 122605 - DNA, 33 bp, Homo sapien
ctgttagaatagccccaaggatgggatgtatac

SEQ ID NO: 122606 - DNA, 33 bp, Homo sapien
ctgttagaatagccccgaggatgggatgtatac

SEQ ID NO: 122607 - DNA, 33 bp, Homo sapien
tgtctggtgagcaagacatagatatagaaaaat

SEQ ID NO: 122608 - DNA, 33 bp, Homo sapien
tgtctggtgagcaagagatagatatagaaaaat

SEQ ID NO: 122609 - DNA, 33 bp, Homo sapien
ttactgcaggtgtagacaatcatcccagcagag

SEQ ID NO: 122610 - DNA, 33 bp, Homo sapien
ttactgcaggtgtagataatcatcccagcagag

SEQ ID NO: 122611 - DNA, 33 bp, Homo sapien
taaaggcatatcaaaacttcccaattaaaacag

SEQ ID NO: 122612 - DNA, 33 bp, Homo sapien
taaaggcatatcaaaatttcccaattaaaacag

SEQ ID NO: 122613 - DNA, 33 bp, Homo sapien
taaaacaacttaaaaaatacacaagatatcacc

SEQ ID NO: 122614 - DNA, 33 bp, Homo sapien
taaaacaacttaaaaactacacaagatatcacc

SEQ ID NO: 122615 - DNA, 33 bp, Homo sapien
gcagaaaagatcataaaagcatgttcggttcct

SEQ ID NO: 122616 - DNA, 33 bp, Homo sapien
gcagaaaagatcataagagcatgttcggttcct

SEQ ID NO: 122617 - DNA, 33 bp, Homo sapien
cagacacactcggggccagtattccaaatcctg

SEQ ID NO: 122618 - DNA, 33 bp, Homo sapien
cagacacactcggggctagtattccaaatcctg

SEQ ID NO: 122619 - DNA, 33 bp, Homo sapien
gaactggatctgagaaagactacacatcaaaga

SEQ ID NO: 122620 - DNA, 33 bp, Homo sapien
gaactggatctgagaaggactacacatcaaaga

SEQ ID NO: 122621 - DNA, 33 bp, Homo sapien
tgtatgtatgctcaccagaggcattattccctt

SEQ ID NO: 122622 - DNA, 33 bp, Homo sapien
tgtatgtatgctcaccggaggcattattccctt

SEQ ID NO: 122623 - DNA, 33 bp, Homo sapien
tggatggcttaccttaccaatgcagttatggga

SEQ ID NO: 122624 - DNA, 33 bp, Homo sapien
tggatggcttaccttagcaatgcagttatggga

SEQ ID NO: 122625 - DNA, 33 bp, Homo sapien
tgggaaataccgcatgacaatgattttgtaggg

SEQ ID NO: 122626 - DNA, 33 bp, Homo sapien
tgggaaataccgcatggcaatgattttgtaggg

SEQ ID NO: 122627 - DNA, 33 bp, Homo sapien
tgggtaggactgggccgctagcaatggacaaaa

SEQ ID NO: 122628 - DNA, 33 bp, Homo sapien
tgggtaggactgggcctctagcaatggacaaaa

SEQ ID NO: 122629 - DNA, 33 bp, Homo sapien
atagccaatattaactaaccaaacagaagagag

SEQ ID NO: 122630 - DNA, 33 bp, Homo sapien
atagccaatattaactgaccaaacagaagagag

SEQ ID NO: 122631 - DNA, 33 bp, Homo sapien
aggtcacctaatcagcgcaggtagaagaatagg

SEQ ID NO: 122632 - DNA, 33 bp, Homo sapien
aggtcacctaatcagctcaggtagaagaatagg

SEQ ID NO: 122633 - DNA, 33 bp, Homo sapien; identical to SEQ ID NO: 122631

SEQ ID NO: 122634 - DNA, 33 bp, Homo sapien; identical to SEQ ID NO: 122632

SEQ ID NO: 122635 - DNA, 33 bp, Homo sapien
agcatctttatggagtaacaagacactagtcca

SEQ ID NO: 122636 - DNA, 33 bp, Homo sapien
agcatctttatggagtgacaagacactagtcca

SEQ ID NO: 122637 - DNA, 33 bp, Homo sapien
tcaggttcttcccagccgaaactttgagaacca

SEQ ID NO: 122638 - DNA, 33 bp, Homo sapien
tcaggttcttcccagctgaaactttgagaacca

SEQ ID NO: 122639 - DNA, 33 bp, Homo sapien
atatgtggcaatttcaactgctaagagtgtaag

SEQ ID NO: 122640 - DNA, 33 bp, Homo sapien
atatgtggcaatttcagctgctaagagtgtaag

SEQ ID NO: 122641 - DNA, 33 bp, Homo sapien
actttttggctacacgaaatgtctaaacttctg

SEQ ID NO: 122642 - DNA, 33 bp, Homo sapien
actttttggctacacggaatgtctaaacttctg

SEQ ID NO: 122643 - DNA, 33 bp, Homo sapien
attaaaatgtgtttaaaagtgatctccaaactc

SEQ ID NO: 122644 - DNA, 33 bp, Homo sapien
attaaaatgtgtttaagagtgatctccaaactc

SEQ ID NO: 122645 - DNA, 33 bp, Homo sapien
tttttcacaaggataccaagacacttcaatggg

SEQ ID NO: 122646 - DNA, 33 bp, Homo sapien
tttttcacaaggatacgaagacacttcaatggg

SEQ ID NO: 122647 - DNA, 33 bp, Homo sapien
gcatacaagtctcatacatgttttgatggattt

SEQ ID NO: 122648 - DNA, 33 bp, Homo sapien
gcatacaagtctcatatatgttttgatggattt

SEQ ID NO: 122649 - DNA, 33 bp, Homo sapien
cagccattggtgttcacgtgtaactaggatttt

SEQ ID NO: 122650 - DNA, 33 bp, Homo sapien
cagccattggtgttcatgtgtaactaggatttt

SEQ ID NO: 122651 - DNA, 33 bp, Homo sapien
aatttaccttgatgaactgagagaggtgatggg

SEQ ID NO: 122652 - DNA, 33 bp, Homo sapien
aatttaccttgatgaattgagagaggtgatggg

SEQ ID NO: 122653 - DNA, 33 bp, Homo sapien
gaccataagttgaatgacagctgtttaaaaccc

SEQ ID NO: 122654 - DNA, 33 bp, Homo sapien
gaccataagttgaatggcagctgtttaaaaccc

SEQ ID NO: 122655 - DNA, 33 bp, Homo sapien
tgccttctctgaaccaagtgtcttcctaaatgc

SEQ ID NO: 122656 - DNA, 33 bp, Homo sapien
tgccttctctgaaccatgtgtcttcctaaatgc

SEQ ID NO: 122657 - DNA, 33 bp, Homo sapien
ttttgacatgatgaaaatattctaaagtgttct

SEQ ID NO: 122658 - DNA, 33 bp, Homo sapien
ttttgacatgatgaaagtattctaaagtgttct

SEQ ID NO: 122659 - DNA, 33 bp, Homo sapien
gagatacgacttcataactcctaggatggctca

SEQ ID NO: 122660 - DNA, 33 bp, Homo sapien
gagatacgacttcatatctcctaggatggctca

SEQ ID NO: 122661 - DNA, 33 bp, Homo sapien
acaggagtaaattgtacgtcttcatgaccttgg

SEQ ID NO: 122662 - DNA, 33 bp, Homo sapien
acaggagtaaattgtatgtcttcatgaccttgg

SEQ ID NO: 122663 - DNA, 33 bp, Homo sapien
gcaagccgaggcttgaaataatgctctcatgtt

SEQ ID NO: 122664 - DNA, 33 bp, Homo sapien
gcaagccgaggcttgacataatgctctcatgtt

SEQ ID NO: 122665 - DNA, 33 bp, Homo sapien
ggtggtttttgtcaaccattaagtttggaggtg

SEQ ID NO: 122666 - DNA, 33 bp, Homo sapien
ggtggtttttgtcaactattaagtttggaggtg

SEQ ID NO: 122667 - DNA, 33 bp, Homo sapien
gaatagcccagaaatgaacctacataaatatag

SEQ ID NO: 122668 - DNA, 33 bp, Homo sapien
gaatagcccagaaatggacctacataaatatag

SEQ ID NO: 122669 - DNA, 33 bp, Homo sapien
atccttttgccaatatcaccctgtcttgattta

SEQ ID NO: 122670 - DNA, 33 bp, Homo sapien
atccttttgccaatattaccctgtcttgattta

SEQ ID NO: 122671 - DNA, 33 bp, Homo sapien
tgaagaagatctgaaagaattgaccaaaaatac

SEQ ID NO: 122672 - DNA, 33 bp, Homo sapien
tgaagaagatctgaaataattgaccaaaaatac

SEQ ID NO: 122673 - DNA, 33 bp, Homo sapien
ctgtttacatatcctgaagtctaatagtaacac

SEQ ID NO: 122674 - DNA, 33 bp, Homo sapien
ctgtttacatatcctggagtctaatagtaacac

SEQ ID NO: 122675 - DNA, 33 bp, Homo sapien
taagtcaacttgaagaccacagttccctgcaga

SEQ ID NO: 122676 - DNA, 33 bp, Homo sapien
taagtcaacttgaagatcacagttccctgcaga

SEQ ID NO: 122677 - DNA, 33 bp, Homo sapien
acagacgacatttaaaatcctttgttttgctta

SEQ ID NO: 122678 - DNA, 33 bp, Homo sapien
acagacgacatttaaagtcctttgttttgctta

SEQ ID NO: 122679 - DNA, 33 bp, Homo sapien
agtgcaagaagattgacgcagaagtgaaaatgt

SEQ ID NO: 122680 - DNA, 33 bp, Homo sapien
agtgcaagaagattgatgcagaagtgaaaatgt

SEQ ID NO: 122681 - DNA, 33 bp, Homo sapien
agagcgaaactccgtcccgtaagtaagtaagta

SEQ ID NO: 122682 - DNA, 33 bp, Homo sapien
agagcgaaactccgtctcgtaagtaagtaagta

SEQ ID NO: 122683 - DNA, 33 bp, Homo sapien
tgcacatccaggcgtaataccttcccttgaact

SEQ ID NO: 122684 - DNA, 33 bp, Homo sapien
tgcacatccaggcgtagtaccttcccttgaact

SEQ ID NO: 122685 - DNA, 33 bp, Homo sapien
ggagaaaatgggtgcaaaaatataagacttcta

SEQ ID NO: 122686 - DNA, 33 bp, Homo sapien
ggagaaaatgggtgcacaaatataagacttcta

SEQ ID NO: 122687 - DNA, 33 bp, Homo sapien
tttaaagctgccaagcaatcacatcgtattttc

SEQ ID NO: 122688 - DNA, 33 bp, Homo sapien
tttaaagctgccaagcgatcacatcgtattttc

SEQ ID NO: 122689 - DNA, 33 bp, Homo sapien
cttcctttggttcacacaaacttcaacagtgtt

SEQ ID NO: 122690 - DNA, 33 bp, Homo sapien
cttcctttggttcacataaacttcaacagtgtt

SEQ ID NO: 122691 - DNA, 33 bp, Homo sapien
agccacatacttataaccagttgatcttttgca

SEQ ID NO: 122692 - DNA, 33 bp, Homo sapien
agccacatacttataatcagttgatcttttgca

SEQ ID NO: 122693 - DNA, 33 bp, Homo sapien
gaatattgctggtagacgtattaaggtacttca

SEQ ID NO: 122694 - DNA, 33 bp, Homo sapien
gaatattgctggtagatgtattaaggtacttca

SEQ ID NO: 122695 - DNA, 33 bp, Homo sapien
atcttctctgtttaaaaatatgtcaaaagggaa

SEQ ID NO: 122696 - DNA, 33 bp, Homo sapien
atcttctctgtttaaagatatgtcaaaagggaa

SEQ ID NO: 122697 - DNA, 33 bp, Homo sapien
agtgacctctgaaagcactgtccaaaattgtat

SEQ ID NO: 122698 - DNA, 33 bp, Homo sapien
agtgacctctgaaagctctgtccaaaattgtat

SEQ ID NO: 122699 - DNA, 33 bp, Homo sapien
tgacaggaaccttcaccatgttaacaggtccaa

SEQ ID NO: 122700 - DNA, 33 bp, Homo sapien
tgacaggaaccttcactatgttaacaggtccaa

SEQ ID NO: 122701 - DNA, 33 bp, Homo sapien
tggtttgtacttgtgacgtgggtaaaagcatga

SEQ ID NO: 122702 - DNA, 33 bp, Homo sapien
tggtttgtacttgtgatgtgggtaaaagcatga

SEQ ID NO: 122703 - DNA, 33 bp, Homo sapien
gagtttgaatcacttcaagttcaacagttttcc

SEQ ID NO: 122704 - DNA, 33 bp, Homo sapien
gagtttgaatcacttcgagttcaacagttttcc

SEQ ID NO: 122705 - DNA, 33 bp, Homo sapien
accacgtagtaacaaccaaagacagcttcctcc

SEQ ID NO: 122706 - DNA, 33 bp, Homo sapien
accacgtagtaacaactaaagacagcttcctcc

SEQ ID NO: 122707 - DNA, 33 bp, Homo sapien
catttttgttgcataacgttctattctttctat

SEQ ID NO: 122708 - DNA, 33 bp, Homo sapien
catttttgttgcataatgttctattctttctat

SEQ ID NO: 122709 - DNA, 33 bp, Homo sapien
gccagaactggttgtacgtctatcttaccatat

SEQ ID NO: 122710 - DNA, 33 bp, Homo sapien
gccagaactggttgtatgtctatcttaccatat

SEQ ID NO: 122711 - DNA, 33 bp, Homo sapien
tggagacatttaggcacagaaatgatgacaaac

SEQ ID NO: 122712 - DNA, 33 bp, Homo sapien
tggagacatttaggcatagaaatgatgacaaac

SEQ ID NO: 122713 - DNA, 33 bp, Homo sapien
tgatgctagtcttccaaaagcagggcataaaat

SEQ ID NO: 122714 - DNA, 33 bp, Homo sapien
tgatgctagtcttccagaagcagggcataaaat

SEQ ID NO: 122715 - DNA, 33 bp, Homo sapien
cttaaaaattcagaaggaatcagttatgccgta

SEQ ID NO: 122716 - DNA, 33 bp, Homo sapien
cttaaaaattcagaagtaatcagttatgccgta

SEQ ID NO: 122717 - DNA, 33 bp, Homo sapien
ttcctccttagatcaacgcaatctttccttccc

SEQ ID NO: 122718 - DNA, 33 bp, Homo sapien
ttcctccttagatcaatgcaatctttccttccc

SEQ ID NO: 122719 - DNA, 33 bp, Homo sapien
gccttaacttagtcaaagattcttgttctccct

SEQ ID NO: 122720 - DNA, 33 bp, Homo sapien
gccttaacttagtcaaggattcttgttctccct

SEQ ID NO: 122721 - DNA, 33 bp, Homo sapien
cagaccttactgtgcaccaattttacatatgca

SEQ ID NO: 122722 - DNA, 33 bp, Homo sapien
cagaccttactgtgcatcaattttacatatgca

SEQ ID NO: 122723 - DNA, 33 bp, Homo sapien
tggaggaaatgaattcaatgcttttggcaagtg

SEQ ID NO: 122724 - DNA, 33 bp, Homo sapien
tggaggaaatgaattcgatgcttttggcaagtg

SEQ ID NO: 122725 - DNA, 33 bp, Homo sapien
tctgcagaaaggcaaaccataagttgtgatgac

SEQ ID NO: 122726 - DNA, 33 bp, Homo sapien
tctgcagaaaggcaaatcataagttgtgatgac

SEQ ID NO: 122727 - DNA, 33 bp, Homo sapien
agtatgtcatggcatcacagaatatgagtttgg

SEQ ID NO: 122728 - DNA, 33 bp, Homo sapien
agtatgtcatggcatcgcagaatatgagtttgg

SEQ ID NO: 122729 - DNA, 33 bp, Homo sapien
tagtatgtcattatgcaaatcaattgtattcaa

SEQ ID NO: 122730 - DNA, 33 bp, Homo sapien
tagtatgtcattatgccaatcaattgtattcaa

SEQ ID NO: 122731 - DNA, 33 bp, Homo sapien
ttgttacagtattttacgtcagctgggatggaa

SEQ ID NO: 122732 - DNA, 33 bp, Homo sapien
ttgttacagtattttatgtcagctgggatggaa

SEQ ID NO: 122733 - DNA, 33 bp, Homo sapien
cacctataaatctttgaatacacttatcaccta

SEQ ID NO: 122734 - DNA, 33 bp, Homo sapien
cacctataaatctttggatacacttatcaccta

SEQ ID NO: 122735 - DNA, 33 bp, Homo sapien
ggtagagggaagaacactagagcttaggtgggg

SEQ ID NO: 122736 - DNA, 33 bp, Homo sapien
ggtagagggaagaacagtagagcttaggtgggg

SEQ ID NO: 122737 - DNA, 33 bp, Homo sapien
gacagacatgccctcaatagaaaccaaagcaca

SEQ ID NO: 122738 - DNA, 33 bp, Homo sapien
gacagacatgccctcagtagaaaccaaagcaca

SEQ ID NO: 122739 - DNA, 33 bp, Homo sapien
gattgtctaactatacccagatcataaaaagac

SEQ ID NO: 122740 - DNA, 33 bp, Homo sapien
gattgtctaactatactcagatcataaaaagac

SEQ ID NO: 122741 - DNA, 33 bp, Homo sapien
tttcttccaggggcccaattgtccagacgaatc

SEQ ID NO: 122742 - DNA, 33 bp, Homo sapien
tttcttccaggggcccgattgtccagacgaatc

SEQ ID NO: 122743 - DNA, 33 bp, Homo sapien
aggaaaatgatctcttaaaatttctcatgtgtg

SEQ ID NO: 122744 - DNA, 33 bp, Homo sapien
aggaaaatgatctcttgaaatttctcatgtgtg

SEQ ID NO: 122745 - DNA, 33 bp, Homo sapien
aatttttaaaaggaaaggcctcacatcccagaa

SEQ ID NO: 122746 - DNA, 33 bp, Homo sapien
aatttttaaaaggaaatgcctcacatcccagaa

SEQ ID NO: 122747 - DNA, 33 bp, Homo sapien
caggccttagaaagcaaatattgaatttattac

SEQ ID NO: 122748 - DNA, 33 bp, Homo sapien
caggccttagaaagcacatattgaatttattac

SEQ ID NO: 122749 - DNA, 33 bp, Homo sapien
cattctgttgctcacaatacttggaattattat

SEQ ID NO: 122750 - DNA, 33 bp, Homo sapien
cattctgttgctcacattacttggaattattat

SEQ ID NO: 122751 - DNA, 33 bp, Homo sapien
cctccagtctctttcaacctttctcttgaatcc

SEQ ID NO: 122752 - DNA, 33 bp, Homo sapien
cctccagtctctttcagcctttctcttgaatcc

SEQ ID NO: 122753 - DNA, 33 bp, Homo sapien
aaagtgggctaagaacacgaatagacaagtctc

SEQ ID NO: 122754 - DNA, 33 bp, Homo sapien
aaagtgggctaagaacgcgaatagacaagtctc

SEQ ID NO: 122755 - DNA, 33 bp, Homo sapien
gcaataatttttagtaccttgcaatgagatgat

SEQ ID NO: 122756 - DNA, 33 bp, Homo sapien
gcaataatttttagtatcttgcaatgagatgat

SEQ ID NO: 122757 - DNA, 33 bp, Homo sapien
agaaatcgaatattgacagttccttgggtgtct

SEQ ID NO: 122758 - DNA, 33 bp, Homo sapien
agaaatcgaatattgatagttccttgggtgtct

SEQ ID NO: 122759 - DNA, 33 bp, Homo sapien
gcaaagtacaagcaaactgaatccagcagcaca

SEQ ID NO: 122760 - DNA, 33 bp, Homo sapien
gcaaagtacaagcaaattgaatccagcagcaca

SEQ ID NO: 122761 - DNA, 33 bp, Homo sapien
caccctcaaggaagtgcagcatattccttacta

SEQ ID NO: 122762 - DNA, 33 bp, Homo sapien
caccctcaaggaagtggagcatattccttacta

SEQ ID NO: 122763 - DNA, 33 bp, Homo sapien
atattaggtgaataaacattaaggattactatg

SEQ ID NO: 122764 - DNA, 33 bp, Homo sapien
atattaggtgaataaagattaaggattactatg

SEQ ID NO: 122765 - DNA, 33 bp, Homo sapien
aataaaataaacagaacaagctatcagactccc

SEQ ID NO: 122766 - DNA, 33 bp, Homo sapien
aataaaataaacagaataagctatcagactccc

SEQ ID NO: 122767 - DNA, 33 bp, Homo sapien
agtgctctttacccaaccaaagatcattaagag

SEQ ID NO: 122768 - DNA, 33 bp, Homo sapien
agtgctctttacccaatcaaagatcattaagag

SEQ ID NO: 122769 - DNA, 33 bp, Homo sapien
tgacaatcacatatgaatagtgacaccacaatt

SEQ ID NO: 122770 - DNA, 33 bp, Homo sapien
tgacaatcacatatgagtagtgacaccacaatt

SEQ ID NO: 122771 - DNA, 33 bp, Homo sapien
acaggtgctctgttggccaaaaaatagcaaata

SEQ ID NO: 122772 - DNA, 33 bp, Homo sapien
acaggtgctctgttggtcaaaaaatagcaaata

SEQ ID NO: 122773 - DNA, 33 bp, Homo sapien
aggcaaaaatctgctccataggttggactatcc

SEQ ID NO: 122774 - DNA, 33 bp, Homo sapien
aggcaaaaatctgctctataggttggactatcc

SEQ ID NO: 122775 - DNA, 33 bp, Homo sapien
gtgatggctttactaaagtgtggcctttttgtc

SEQ ID NO: 122776 - DNA, 33 bp, Homo sapien
gtgatggctttactaaggtgtggcctttttgtc

SEQ ID NO: 122777 - DNA, 33 bp, Homo sapien
atatcaggctagaggacaataattttgagggtc

SEQ ID NO: 122778 - DNA, 33 bp, Homo sapien
atatcaggctagaggataataattttgagggtc

SEQ ID NO: 122779 - DNA, 33 bp, Homo sapien
gaaaacatccagaaatcaagctaactgactgta

SEQ ID NO: 122780 - DNA, 33 bp, Homo sapien
gaaaacatccagaaatgaagctaactgactgta

SEQ ID NO: 122781 - DNA, 33 bp, Homo sapien
ttcttaacaggtgccacggtttcaccattgatg

SEQ ID NO: 122782 - DNA, 33 bp, Homo sapien
ttcttaacaggtgccagggtttcaccattgatg

SEQ ID NO: 122783 - DNA, 33 bp, Homo sapien
tcatttacatagtcaccatcgctatcaggaaac

SEQ ID NO: 122784 - DNA, 33 bp, Homo sapien
tcatttacatagtcactatcgctatcaggaaac

SEQ ID NO: 122785 - DNA, 33 bp, Homo sapien
aatattatgtttgtccaatgtgatacctaagtt

SEQ ID NO: 122786 - DNA, 33 bp, Homo sapien
aatattatgtttgtccgatgtgatacctaagtt

SEQ ID NO: 122787 - DNA, 33 bp, Homo sapien
aggtgcagttattgccggatttgtttccagctg

SEQ ID NO: 122788 - DNA, 33 bp, Homo sapien
aggtgcagttattgcctgatttgtttccagctg

SEQ ID NO: 122789 - DNA, 33 bp, Homo sapien
cttaggagatatacgccgcattatttaaactaa

SEQ ID NO: 122790 - DNA, 33 bp, Homo sapien
cttaggagatatacgctgcattatttaaactaa

SEQ ID NO: 122791 - DNA, 33 bp, Homo sapien
aatgcgaagataaagaaagaagctcctgcttag

SEQ ID NO: 122792 - DNA, 33 bp, Homo sapien
aatgcgaagataaagagagaagctcctgcttag

SEQ ID NO: 122793 - DNA, 33 bp, Homo sapien
gagaatgaaaacggcccgaaaatgaagttgaaa

SEQ ID NO: 122794 - DNA, 33 bp, Homo sapien
gagaatgaaaacggcctgaaaatgaagttgaaa

SEQ ID NO: 122795 - DNA, 33 bp, Homo sapien
agcatagtggcataagcaacaaaccatttgcag

SEQ ID NO: 122796 - DNA, 33 bp, Homo sapien
agcatagtggcataagtaacaaaccatttgcag

SEQ ID NO: 122797 - DNA, 33 bp, Homo sapien
ttatacataggatacacgtcaaaaatgttactg

SEQ ID NO: 122798 - DNA, 33 bp, Homo sapien
ttatacataggatacatgtcaaaaatgttactg

SEQ ID NO: 122799 - DNA, 33 bp, Homo sapien
tgttgtgaggcactgtaaatcaagttaatagaa

SEQ ID NO: 122800 - DNA, 33 bp, Homo sapien
tgttgtgaggcactgtgaatcaagttaatagaa

SEQ ID NO: 122801 - DNA, 33 bp, Homo sapien
gtacagataccacaaaagggtacagtcacccag

SEQ ID NO: 122802 - DNA, 33 bp, Homo sapien
gtacagataccacaaaggggtacagtcacccag

SEQ ID NO: 122803 - DNA, 33 bp, Homo sapien
ttgcacatagctaagacaatgactgcccttatt

SEQ ID NO: 122804 - DNA, 33 bp, Homo sapien
ttgcacatagctaagagaatgactgcccttatt

SEQ ID NO: 122805 - DNA, 33 bp, Homo sapien
ataggaaactctagaacgcttggaataaaacag

SEQ ID NO: 122806 - DNA, 33 bp, Homo sapien
ataggaaactctagaatgcttggaataaaacag

SEQ ID NO: 122807 - DNA, 33 bp, Homo sapien
acttttatgaacagtcccaaacttgaaatttca

SEQ ID NO: 122808 - DNA, 33 bp, Homo sapien
acttttatgaacagtctcaaacttgaaatttca

SEQ ID NO: 122809 - DNA, 33 bp, Homo sapien
catactaagttttacaggattagaaattagagg

SEQ ID NO: 122810 - DNA, 33 bp, Homo sapien
catactaagttttacatgattagaaattagagg

SEQ ID NO: 122811 - DNA, 33 bp, Homo sapien
tatacaaaaagaataacgcatcataaccaagtg

SEQ ID NO: 122812 - DNA, 33 bp, Homo sapien
tatacaaaaagaataatgcatcataaccaagtg

SEQ ID NO: 122813 - DNA, 33 bp, Homo sapien
tggtaatctgtccacaaccctgaataatagatt

SEQ ID NO: 122814 - DNA, 33 bp, Homo sapien
tggtaatctgtccacagccctgaataatagatt

SEQ ID NO: 122815 - DNA, 33 bp, Homo sapien
atgtgccacatttcaccaagccacaccaagact

SEQ ID NO: 122816 - DNA, 33 bp, Homo sapien
atgtgccacatttcactaagccacaccaagact

SEQ ID NO: 122817 - DNA, 33 bp, Homo sapien
catcataataaaaagactcatgcactcgtatgt

SEQ ID NO: 122818 - DNA, 33 bp, Homo sapien
catcataataaaaagattcatgcactcgtatgt

SEQ ID NO: 122819 - DNA, 33 bp, Homo sapien
ccccaagattgagggcactatctaacgagcatg

SEQ ID NO: 122820 - DNA, 33 bp, Homo sapien
ccccaagattgagggctctatctaacgagcatg

SEQ ID NO: 122821 - DNA, 33 bp, Homo sapien
ggatctcctgtattccaagcgtaatcttcctta

SEQ ID NO: 122822 - DNA, 33 bp, Homo sapien
ggatctcctgtattccgagcgtaatcttcctta

SEQ ID NO: 122823 - DNA, 33 bp, Homo sapien
cattaaacaaacatggaacattgattggggtgg

SEQ ID NO: 122824 - DNA, 33 bp, Homo sapien
cattaaacaaacatggcacattgattggggtgg

SEQ ID NO: 122825 - DNA, 33 bp, Homo sapien
acagccttgcatattacggcctacagatcaaca

SEQ ID NO: 122826 - DNA, 33 bp, Homo sapien
acagccttgcatattatggcctacagatcaaca

SEQ ID NO: 122827 - DNA, 33 bp, Homo sapien
aaaatagaaagagaaacgtgaaaatttatataa

SEQ ID NO: 122828 - DNA, 33 bp, Homo sapien
aaaatagaaagagaaaggtgaaaatttatataa

SEQ ID NO: 122829 - DNA, 33 bp, Homo sapien
gtaataatagttattgcacttaaagccgatcaa

SEQ ID NO: 122830 - DNA, 33 bp, Homo sapien
gtaataatagttattgtacttaaagccgatcaa

SEQ ID NO: 122831 - DNA, 33 bp, Homo sapien
gttatcatcaaaatgaaacaatagagattcaaa

SEQ ID NO: 122832 - DNA, 33 bp, Homo sapien
gttatcatcaaaatgagacaatagagattcaaa

SEQ ID NO: 122833 - DNA, 33 bp, Homo sapien
aagatctctgttttaaagttaatcagttgtatc

SEQ ID NO: 122834 - DNA, 33 bp, Homo sapien
aagatctctgttttaatgttaatcagttgtatc

SEQ ID NO: 122835 - DNA, 33 bp, Homo sapien
cttccaagttgattgaaatctgtctcaggtacc

SEQ ID NO: 122836 - DNA, 33 bp, Homo sapien
cttccaagttgattgagatctgtctcaggtacc

SEQ ID NO: 122837 - DNA, 33 bp, Homo sapien
aggtcatctttgtgaggctaaaagtaaggtgaa

SEQ ID NO: 122838 - DNA, 33 bp, Homo sapien
aggtcatctttgtgagtctaaaagtaaggtgaa

SEQ ID NO: 122839 - DNA, 33 bp, Homo sapien
atttgtatattttcacagggaacactggagtgt

SEQ ID NO: 122840 - DNA, 33 bp, Homo sapien
atttgtatattttcactgggaacactggagtgt

SEQ ID NO: 122841 - DNA, 33 bp, Homo sapien
atactgtggtctccctaagaagcttatgagtat

SEQ ID NO: 122842 - DNA, 33 bp, Homo sapien
atactgtggtctccctgagaagcttatgagtat

SEQ ID NO: 122843 - DNA, 33 bp, Homo sapien
atgaaagagaaataccactagatggtgtctgga

SEQ ID NO: 122844 - DNA, 33 bp, Homo sapien
atgaaagagaaatacctctagatggtgtctgga

SEQ ID NO: 122845 - DNA, 33 bp, Homo sapien
tgagtttctacaacctaagcacgtgcctgcctc

SEQ ID NO: 122846 - DNA, 33 bp, Homo sapien
tgagtttctacaacctgagcacgtgcctgcctc

SEQ ID NO: 122847 - DNA, 33 bp, Homo sapien
atagccaagcatatctaaatcaaattcgaattt

SEQ ID NO: 122848 - DNA, 33 bp, Homo sapien
atagccaagcatatctgaatcaaattcgaattt

SEQ ID NO: 122849 - DNA, 33 bp, Homo sapien
caaggtaaacaacagcagaggaaccaccggccc

SEQ ID NO: 122850 - DNA, 33 bp, Homo sapien
caaggtaaacaacagccgaggaaccaccggccc

SEQ ID NO: 122851 - DNA, 33 bp, Homo sapien
tttgtgaacaactaaaatgtttaatactaccta

SEQ ID NO: 122852 - DNA, 33 bp, Homo sapien
tttgtgaacaactaaagtgtttaatactaccta

SEQ ID NO: 122853 - DNA, 33 bp, Homo sapien
ctctactccccttaaaatctcctttctcattct

SEQ ID NO: 122854 - DNA, 33 bp, Homo sapien
ctctactccccttaaattctcctttctcattct

SEQ ID NO: 122855 - DNA, 33 bp, Homo sapien
ctgcaaagcacaggacaaaatcccacaacaaac

SEQ ID NO: 122856 - DNA, 33 bp, Homo sapien
ctgcaaagcacaggacgaaatcccacaacaaac

SEQ ID NO: 122857 - DNA, 33 bp, Homo sapien
tgtggaaataggacaacaaacaaagttcaagaa

SEQ ID NO: 122858 - DNA, 33 bp, Homo sapien
tgtggaaataggacaataaacaaagttcaagaa

SEQ ID NO: 122859 - DNA, 33 bp, Homo sapien
tactattctagatgtaaacccggacaaacattt

SEQ ID NO: 122860 - DNA, 33 bp, Homo sapien
tactattctagatgtagacccggacaaacattt

SEQ ID NO: 122861 - DNA, 33 bp, Homo sapien
ttaagttatttaaaaaattctccatactgcttt

SEQ ID NO: 122862 - DNA, 33 bp, Homo sapien
ttaagttatttaaaaacttctccatactgcttt

SEQ ID NO: 122863 - DNA, 33 bp, Homo sapien
aacaacaaaagcatgacgctatctcctgaacaa

SEQ ID NO: 122864 - DNA, 33 bp, Homo sapien
aacaacaaaagcatgatgctatctcctgaacaa

SEQ ID NO: 122865 - DNA, 33 bp, Homo sapien
gcttagtagccatgtgaagatgtggatgtgatt

SEQ ID NO: 122866 - DNA, 33 bp, Homo sapien
gcttagtagccatgtggagatgtggatgtgatt

SEQ ID NO: 122867 - DNA, 33 bp, Homo sapien
ctttcactaagttgtgaacacttccttgggccc

SEQ ID NO: 122868 - DNA, 33 bp, Homo sapien
ctttcactaagttgtgcacacttccttgggccc

SEQ ID NO: 122869 - DNA, 33 bp, Homo sapien
aagatgttgatgaagccgaatgtttttataaaa

SEQ ID NO: 122870 - DNA, 33 bp, Homo sapien
aagatgttgatgaagctgaatgtttttataaaa

SEQ ID NO: 122871 - DNA, 33 bp, Homo sapien
ctcattttcaaaggaaacctccatctgtaatga

SEQ ID NO: 122872 - DNA, 33 bp, Homo sapien
ctcattttcaaaggaagcctccatctgtaatga

SEQ ID NO: 122873 - DNA, 33 bp, Homo sapien
tatacccatgaaaccaccaaaccttacaatatt

SEQ ID NO: 122874 - DNA, 33 bp, Homo sapien
tatacccatgaaaccatcaaaccttacaatatt

SEQ ID NO: 122875 - DNA, 33 bp, Homo sapien
gcgcacagtgcagcaactcctcaaagatgtaga

SEQ ID NO: 122876 - DNA, 33 bp, Homo sapien
gcgcacagtgcagcaattcctcaaagatgtaga

SEQ ID NO: 122877 - DNA, 33 bp, Homo sapien
gaaacgttctatcagacggaaatccaggatgtg

SEQ ID NO: 122878 - DNA, 33 bp, Homo sapien
gaaacgttctatcagatggaaatccaggatgtg

SEQ ID NO: 122879 - DNA, 33 bp, Homo sapien
agagaacatgaaagaaactaatactgtaatgat

SEQ ID NO: 122880 - DNA, 33 bp, Homo sapien
agagaacatgaaagaagctaatactgtaatgat

SEQ ID NO: 122881 - DNA, 33 bp, Homo sapien
cacaactttctaccaacgctgtcaatatctctc

SEQ ID NO: 122882 - DNA, 33 bp, Homo sapien
cacaactttctaccaatgctgtcaatatctctc

SEQ ID NO: 122883 - DNA, 33 bp, Homo sapien
tcccacggccatgaaaatataggcttgcagaca

SEQ ID NO: 122884 - DNA, 33 bp, Homo sapien
tcccacggccatgaaagtataggcttgcagaca

SEQ ID NO: 122885 - DNA, 33 bp, Homo sapien
cttagtgtaatgtctcccaggttcgtctgtgtt

SEQ ID NO: 122886 - DNA, 33 bp, Homo sapien
cttagtgtaatgtctctcaggttcgtctgtgtt

SEQ ID NO: 122887 - DNA, 33 bp, Homo sapien
acaaggaactcaaaggaatcagcaagaaaaacc

SEQ ID NO: 122888 - DNA, 33 bp, Homo sapien
acaaggaactcaaaggcatcagcaagaaaaacc

SEQ ID NO: 122889 - DNA, 33 bp, Homo sapien
acaatgttggagagaacgtaaagaaactgatca

SEQ ID NO: 122890 - DNA, 33 bp, Homo sapien
acaatgttggagagaatgtaaagaaactgatca

SEQ ID NO: 122891 - DNA, 33 bp, Homo sapien
caaactggaggcccatcaacaggtaagcggtta

SEQ ID NO: 122892 - DNA, 33 bp, Homo sapien
caaactggaggcccattaacaggtaagcggtta

SEQ ID NO: 122893 - DNA, 33 bp, Homo sapien
tcatcatggccatcccaaatgctgtatttttaa

SEQ ID NO: 122894 - DNA, 33 bp, Homo sapien
tcatcatggccatccctaatgctgtatttttaa

SEQ ID NO: 122895 - DNA, 33 bp, Homo sapien
tcattatttccacttacaggtaattgcccttgc

SEQ ID NO: 122896 - DNA, 33 bp, Homo sapien
tcattatttccacttataggtaattgcccttgc

SEQ ID NO: 122897 - DNA, 33 bp, Homo sapien
gacattcagaaaaagacaaaactatggctaaag

SEQ ID NO: 122898 - DNA, 33 bp, Homo sapien
gacattcagaaaaagataaaactatggctaaag

SEQ ID NO: 122899 - DNA, 33 bp, Homo sapien
gtaatttagtttgtcaatccattttgaaatttc

SEQ ID NO: 122900 - DNA, 33 bp, Homo sapien
gtaatttagtttgtcactccattttgaaatttc

SEQ ID NO: 122901 - DNA, 33 bp, Homo sapien
ataattatgtcatgaacgctaaaataattggaa

SEQ ID NO: 122902 - DNA, 33 bp, Homo sapien
ataattatgtcatgaaggctaaaataattggaa

SEQ ID NO: 122903 - DNA, 33 bp, Homo sapien
cacatattgtaagcatcaacagaaaatgtttta

SEQ ID NO: 122904 - DNA, 33 bp, Homo sapien
cacatattgtaagcattaacagaaaatgtttta

SEQ ID NO: 122905 - DNA, 33 bp, Homo sapien
gaaacatagaggtaaaaattggcaaacaacaga

SEQ ID NO: 122906 - DNA, 33 bp, Homo sapien
gaaacatagaggtaaatattggcaaacaacaga

SEQ ID NO: 122907 - DNA, 33 bp, Homo sapien
attattcttcacattaacacatccattaacatg

SEQ ID NO: 122908 - DNA, 33 bp, Homo sapien
attattcttcacattagcacatccattaacatg

SEQ ID NO: 122909 - DNA, 33 bp, Homo sapien
taattcctattttttacgtggatcataaggtta

SEQ ID NO: 122910 - DNA, 33 bp, Homo sapien
taattcctattttttaggtggatcataaggtta

SEQ ID NO: 122911 - DNA, 33 bp, Homo sapien
gccaccttcattgtaaaagaatcgtaggaatca

SEQ ID NO: 122912 - DNA, 33 bp, Homo sapien
gccaccttcattgtaatagaatcgtaggaatca

SEQ ID NO: 122913 - DNA, 33 bp, Homo sapien
ttgtgaaacatttggacactggctgcttgaaga

SEQ ID NO: 122914 - DNA, 33 bp, Homo sapien
ttgtgaaacatttggatactggctgcttgaaga

SEQ ID NO: 122915 - DNA, 33 bp, Homo sapien
gtctggcgcactaatcaatggtaatatccccac

SEQ ID NO: 122916 - DNA, 33 bp, Homo sapien
gtctggcgcactaatccatggtaatatccccac

SEQ ID NO: 122917 - DNA, 33 bp, Homo sapien
ttctctgaaatgtagcactttctttaattccct

SEQ ID NO: 122918 - DNA, 33 bp, Homo sapien
ttctctgaaatgtagctctttctttaattccct

SEQ ID NO: 122919 - DNA, 33 bp, Homo sapien
tactaggataagcctgaattacatatttcaaaa

SEQ ID NO: 122920 - DNA, 33 bp, Homo sapien
tactaggataagcctgcattacatatttcaaaa

SEQ ID NO: 122921 - DNA, 33 bp, Homo sapien
gtacaccaaggtagtacgcaaccaaggacaaaa

SEQ ID NO: 122922 - DNA, 33 bp, Homo sapien
gtacaccaaggtagtatgcaaccaaggacaaaa

SEQ ID NO: 122923 - DNA, 33 bp, Homo sapien
acaagcaataaatgtaaatagcctatatttctc

SEQ ID NO: 122924 - DNA, 33 bp, Homo sapien
acaagcaataaatgtagatagcctatatttctc

SEQ ID NO: 122925 - DNA, 33 bp, Homo sapien
tactttttatcctttaagttctgaaataccact

SEQ ID NO: 122926 - DNA, 33 bp, Homo sapien
tactttttatcctttaggttctgaaataccact

SEQ ID NO: 122927 - DNA, 33 bp, Homo sapien
aattcaatacaaagcaagagaagtttgatgttt

SEQ ID NO: 122928 - DNA, 33 bp, Homo sapien
aattcaatacaaagcaggagaagtttgatgttt

SEQ ID NO: 122929 - DNA, 33 bp, Homo sapien
ctttgtattgaattaacaaaacatgattcctga

SEQ ID NO: 122930 - DNA, 33 bp, Homo sapien
ctttgtattgaattaagaaaacatgattcctga

SEQ ID NO: 122931 - DNA, 33 bp, Homo sapien
tatctgatcatggacacgaaagtgatttttaaa

SEQ ID NO: 122932 - DNA, 33 bp, Homo sapien
tatctgatcatggacatgaaagtgatttttaaa

SEQ ID NO: 122933 - DNA, 33 bp, Homo sapien
ttgtgagagatcgggagacttttctctgcttat

SEQ ID NO: 122934 - DNA, 33 bp, Homo sapien
ttgtgagagatcgggatacttttctctgcttat

SEQ ID NO: 122935 - DNA, 33 bp, Homo sapien
acatttagtttactcccattgttttgcaattac

SEQ ID NO: 122936 - DNA, 33 bp, Homo sapien
acatttagtttactccgattgttttgcaattac

SEQ ID NO: 122937 - DNA, 33 bp, Homo sapien
tttaaaattgttatacagctgaactagtgtcca

SEQ ID NO: 122938 - DNA, 33 bp, Homo sapien
tttaaaattgttatactgctgaactagtgtcca

SEQ ID NO: 122939 - DNA, 33 bp, Homo sapien
gaagtcaatcagcagaactcaccctgtcatgca

SEQ ID NO: 122940 - DNA, 33 bp, Homo sapien
gaagtcaatcagcagagctcaccctgtcatgca

SEQ ID NO: 122941 - DNA, 33 bp, Homo sapien
tcatcccagttttcataaacacaaatttctcca

SEQ ID NO: 122942 - DNA, 33 bp, Homo sapien
tcatcccagttttcatgaacacaaatttctcca

SEQ ID NO: 122943 - DNA, 33 bp, Homo sapien
aattctatctgccatactaacagtctaaaattt

SEQ ID NO: 122944 - DNA, 33 bp, Homo sapien
aattctatctgccatattaacagtctaaaattt

SEQ ID NO: 122945 - DNA, 33 bp, Homo sapien
tcataattgttggcagaactggctatttgactt

SEQ ID NO: 122946 - DNA, 33 bp, Homo sapien
tcataattgttggcaggactggctatttgactt

SEQ ID NO: 122947 - DNA, 33 bp, Homo sapien
ttgcttcacctatttaaacacctcaggaaaagt

SEQ ID NO: 122948 - DNA, 33 bp, Homo sapien
ttgcttcacctatttatacacctcaggaaaagt

SEQ ID NO: 122949 - DNA, 33 bp, Homo sapien
tttctgacttggactcaatgaaattgctaccgc

SEQ ID NO: 122950 - DNA, 33 bp, Homo sapien
tttctgacttggactcgatgaaattgctaccgc

SEQ ID NO: 122951 - DNA, 33 bp, Homo sapien
gagagagaacagactcaaattcagttgacctca

SEQ ID NO: 122952 - DNA, 33 bp, Homo sapien
gagagagaacagactcgaattcagttgacctca

SEQ ID NO: 122953 - DNA, 33 bp, Homo sapien
ggctctaaaacagacaagttgaacaattatcag

SEQ ID NO: 122954 - DNA, 33 bp, Homo sapien
ggctctaaaacagacaggttgaacaattatcag

SEQ ID NO: 122955 - DNA, 33 bp, Homo sapien
gtcaggagtgacaaaactatagccgttggacag

SEQ ID NO: 122956 - DNA, 33 bp, Homo sapien
gtcaggagtgacaaaagtatagccgttggacag

SEQ ID NO: 122957 - DNA, 33 bp, Homo sapien
aatccaatttttctcaagagtactagatgaaag

SEQ ID NO: 122958 - DNA, 33 bp, Homo sapien
aatccaatttttctcatgagtactagatgaaag

SEQ ID NO: 122959 - DNA, 33 bp, Homo sapien
cttttatgttgctatacctgaataagcctatat

SEQ ID NO: 122960 - DNA, 33 bp, Homo sapien
cttttatgttgctatatctgaataagcctatat

SEQ ID NO: 122961 - DNA, 33 bp, Homo sapien
cataatgtcactagaaatgatgcagcaaattta

SEQ ID NO: 122962 - DNA, 33 bp, Homo sapien
cataatgtcactagaactgatgcagcaaattta

SEQ ID NO: 122963 - DNA, 33 bp, Homo sapien
agacagcgttagacttaaacattcctgaaattg

SEQ ID NO: 122964 - DNA, 33 bp, Homo sapien
agacagcgttagacttgaacattcctgaaattg

SEQ ID NO: 122965 - DNA, 33 bp, Homo sapien
ccctctttacagaaacacctccgggaatggaaa

SEQ ID NO: 122966 - DNA, 33 bp, Homo sapien
ccctctttacagaaacgcctccgggaatggaaa

SEQ ID NO: 122967 - DNA, 33 bp, Homo sapien
actgacctcaagcgaactactgtttaagagaca

SEQ ID NO: 122968 - DNA, 33 bp, Homo sapien
actgacctcaagcgaattactgtttaagagaca

SEQ ID NO: 122969 - DNA, 33 bp, Homo sapien
taccaaagttctgacaatgcaaaatgttaaact

SEQ ID NO: 122970 - DNA, 33 bp, Homo sapien
taccaaagttctgacagtgcaaaatgttaaact

SEQ ID NO: 122971 - DNA, 33 bp, Homo sapien
aacccatgtaaaagtgacaattctctcaggatt

SEQ ID NO: 122972 - DNA, 33 bp, Homo sapien
aacccatgtaaaagtgccaattctctcaggatt

SEQ ID NO: 122973 - DNA, 33 bp, Homo sapien
ctttagcatatatcaacgggtaagtttgatttc

SEQ ID NO: 122974 - DNA, 33 bp, Homo sapien
ctttagcatatatcaatgggtaagtttgatttc

SEQ ID NO: 122975 - DNA, 33 bp, Homo sapien
aaacaaatctaagacaacttagtccaaaataca

SEQ ID NO: 122976 - DNA, 33 bp, Homo sapien
aaacaaatctaagacaccttagtccaaaataca

SEQ ID NO: 122977 - DNA, 33 bp, Homo sapien
acactatcagtggtagaataccttgattaaaac

SEQ ID NO: 122978 - DNA, 33 bp, Homo sapien
acactatcagtggtagtataccttgattaaaac

SEQ ID NO: 122979 - DNA, 33 bp, Homo sapien
tacatacctagaagtgaacttgctgaattatat

SEQ ID NO: 122980 - DNA, 33 bp, Homo sapien
tacatacctagaagtggacttgctgaattatat

SEQ ID NO: 122981 - DNA, 33 bp, Homo sapien
acaaactcacgaaggggagaaagaatcaacgag

SEQ ID NO: 122982 - DNA, 33 bp, Homo sapien
acaaactcacgaagggtagaaagaatcaacgag

SEQ ID NO: 122983 - DNA, 33 bp, Homo sapien
cctgcagagacagcacacttgtcaggaagcgct

SEQ ID NO: 122984 - DNA, 33 bp, Homo sapien
cctgcagagacagcacccttgtcaggaagcgct

SEQ ID NO: 122985 - DNA, 33 bp, Homo sapien
gaaaactcttggctaccggttatcagagtcatc

SEQ ID NO: 122986 - DNA, 33 bp, Homo sapien
gaaaactcttggctactggttatcagagtcatc

SEQ ID NO: 122987 - DNA, 33 bp, Homo sapien
aaccaaaaaataccaaatagcaagaaatagcaa

SEQ ID NO: 122988 - DNA, 33 bp, Homo sapien
aaccaaaaaataccaattagcaagaaatagcaa

SEQ ID NO: 122989 - DNA, 33 bp, Homo sapien
aagaagtagccaaaataaaagacaaattattta

SEQ ID NO: 122990 - DNA, 33 bp, Homo sapien
aagaagtagccaaaatgaaagacaaattattta

SEQ ID NO: 122991 - DNA, 33 bp, Homo sapien
gcaccagcagggtaacaaaaatctgtgtttttc

SEQ ID NO: 122992 - DNA, 33 bp, Homo sapien
gcaccagcagggtaactaaaatctgtgtttttc

SEQ ID NO: 122993 - DNA, 33 bp, Homo sapien
gagtcattgatacccaaagtactttctgtctgc

SEQ ID NO: 122994 - DNA, 33 bp, Homo sapien
gagtcattgatacccacagtactttctgtctgc

SEQ ID NO: 122995 - DNA, 33 bp, Homo sapien
ttctgtaaaattttcccagaactatctagccat

SEQ ID NO: 122996 - DNA, 33 bp, Homo sapien
ttctgtaaaattttcctagaactatctagccat

SEQ ID NO: 122997 - DNA, 33 bp, Homo sapien
atgctgcttgggacacaataggagattcataaa

SEQ ID NO: 122998 - DNA, 33 bp, Homo sapien
atgctgcttgggacacgataggagattcataaa

SEQ ID NO: 122999 - DNA, 33 bp, Homo sapien
ggtaactgcttaacaccacctgcaagcaagcaa

SEQ ID NO: 123000 - DNA, 33 bp, Homo sapien
ggtaactgcttaacactacctgcaagcaagcaa

SEQ ID NO: 123001 - DNA, 33 bp, Homo sapien
gagtataccaagaaaacggaaagaaataacaga

SEQ ID NO: 123002 - DNA, 33 bp, Homo sapien
gagtataccaagaaaatggaaagaaataacaga

SEQ ID NO: 123003 - DNA, 33 bp, Homo sapien
tgggtatagccacacagtagggctaccaggctc

SEQ ID NO: 123004 - DNA, 33 bp, Homo sapien
tgggtatagccacacattagggctaccaggctc

SEQ ID NO: 123005 - DNA, 33 bp, Homo sapien
acccaaaatgtaaggacgaatgagaagtaagat

SEQ ID NO: 123006 - DNA, 33 bp, Homo sapien
acccaaaatgtaaggatgaatgagaagtaagat

SEQ ID NO: 123007 - DNA, 33 bp, Homo sapien
atgaacagatgagtgacaggaaatgctaaaatg

SEQ ID NO: 123008 - DNA, 33 bp, Homo sapien
atgaacagatgagtgataggaaatgctaaaatg

SEQ ID NO: 123009 - DNA, 33 bp, Homo sapien
atatattgcaatgactaaaagaatgactgtagg

SEQ ID NO: 123010 - DNA, 33 bp, Homo sapien
atatattgcaatgactgaaagaatgactgtagg

SEQ ID NO: 123011 - DNA, 33 bp, Homo sapien
aaaaaagctcttctaactaacattaagacagga

SEQ ID NO: 123012 - DNA, 33 bp, Homo sapien
aaaaaagctcttctaagtaacattaagacagga

SEQ ID NO: 123013 - DNA, 33 bp, Homo sapien
atagcatttggagcaaatagtttccacataaat

SEQ ID NO: 123014 - DNA, 33 bp, Homo sapien
atagcatttggagcaagtagtttccacataaat

SEQ ID NO: 123015 - DNA, 33 bp, Homo sapien
gaaataagaatatagaagtcacctaccatcaat

SEQ ID NO: 123016 - DNA, 33 bp, Homo sapien
gaaataagaatatagaggtcacctaccatcaat

SEQ ID NO: 123017 - DNA, 33 bp, Homo sapien
gtaaatagctaaaccccaattgccttaaaaata

SEQ ID NO: 123018 - DNA, 33 bp, Homo sapien
gtaaatagctaaaccctaattgccttaaaaata

SEQ ID NO: 123019 - DNA, 33 bp, Homo sapien
agagtaaagagagataccctttgcatgggggag

SEQ ID NO: 123020 - DNA, 33 bp, Homo sapien
agagtaaagagagatatcctttgcatgggggag

SEQ ID NO: 123021 - DNA, 33 bp, Homo sapien
agggtaaagcagttaacagcccatgagtttctt

SEQ ID NO: 123022 - DNA, 33 bp, Homo sapien
agggtaaagcagttaatagcccatgagtttctt

SEQ ID NO: 123023 - DNA, 33 bp, Homo sapien
agaaaatatgtggcaacgtatttaggtacacca

SEQ ID NO: 123024 - DNA, 33 bp, Homo sapien
agaaaatatgtggcaatgtatttaggtacacca

SEQ ID NO: 123025 - DNA, 33 bp, Homo sapien
gcctggcagaattacccggagtttagataccaa

SEQ ID NO: 123026 - DNA, 33 bp, Homo sapien
gcctggcagaattacctggagtttagataccaa

SEQ ID NO: 123027 - DNA, 33 bp, Homo sapien
tgtcaggtgactcataccaggtagggccattat

SEQ ID NO: 123028 - DNA, 33 bp, Homo sapien
tgtcaggtgactcatatcaggtagggccattat

SEQ ID NO: 123029 - DNA, 33 bp, Homo sapien
taagtttttctccaggaatccattcatcttctg

SEQ ID NO: 123030 - DNA, 33 bp, Homo sapien
taagtttttctccagggatccattcatcttctg

SEQ ID NO: 123031 - DNA, 33 bp, Homo sapien
actcatttgtgaaatcaaaatatgtataccaca

SEQ ID NO: 123032 - DNA, 33 bp, Homo sapien
actcatttgtgaaatcgaaatatgtataccaca

SEQ ID NO: 123033 - DNA, 33 bp, Homo sapien
ttcttccactaaaccggaagtctttattttgac

SEQ ID NO: 123034 - DNA, 33 bp, Homo sapien
ttcttccactaaaccgtaagtctttattttgac

SEQ ID NO: 123035 - DNA, 33 bp, Homo sapien
cgcaaatcaactcaaacggaaacaaagacataa

SEQ ID NO: 123036 - DNA, 33 bp, Homo sapien
cgcaaatcaactcaaatggaaacaaagacataa

SEQ ID NO: 123037 - DNA, 33 bp, Homo sapien
cctctgcaaaacactacgagaattgaaaagaga

SEQ ID NO: 123038 - DNA, 33 bp, Homo sapien
cctctgcaaaacactatgagaattgaaaagaga

SEQ ID NO: 123039 - DNA, 33 bp, Homo sapien
gttacatcctgaaccactacaagctgccattgt

SEQ ID NO: 123040 - DNA, 33 bp, Homo sapien
gttacatcctgaaccattacaagctgccattgt

SEQ ID NO: 123041 - DNA, 33 bp, Homo sapien
agtggttaacccacaacgttcaggcatagtctc

SEQ ID NO: 123042 - DNA, 33 bp, Homo sapien
agtggttaacccacaatgttcaggcatagtctc

SEQ ID NO: 123043 - DNA, 33 bp, Homo sapien
gcaatctgatagcaacaggctaggaaaatagat

SEQ ID NO: 123044 - DNA, 33 bp, Homo sapien
gcaatctgatagcaacgggctaggaaaatagat

SEQ ID NO: 123045 - DNA, 33 bp, Homo sapien
ggccatgtttaccttacgtcagggatttgtagg

SEQ ID NO: 123046 - DNA, 33 bp, Homo sapien
ggccatgtttaccttatgtcagggatttgtagg

SEQ ID NO: 123047 - DNA, 33 bp, Homo sapien
gcttctcatctgtaaaatctagatagttgcgta

SEQ ID NO: 123048 - DNA, 33 bp, Homo sapien
gcttctcatctgtaaagtctagatagttgcgta

SEQ ID NO: 123049 - DNA, 33 bp, Homo sapien
acatatgacaagggccacataatgaggcctctc

SEQ ID NO: 123050 - DNA, 33 bp, Homo sapien
acatatgacaagggccgcataatgaggcctctc

SEQ ID NO: 123051 - DNA, 33 bp, Homo sapien
actctcaagctccttacatgtagaaccagagct

SEQ ID NO: 123052 - DNA, 33 bp, Homo sapien
actctcaagctccttatatgtagaaccagagct

SEQ ID NO: 123053 - DNA, 33 bp, Homo sapien
ccacaagtggaaaccaccacaggaaggaaaagc

SEQ ID NO: 123054 - DNA, 33 bp, Homo sapien
ccacaagtggaaaccatcacaggaaggaaaagc

SEQ ID NO: 123055 - DNA, 33 bp, Homo sapien
atgttctcacagtaaacatcagggaacagtcgt

SEQ ID NO: 123056 - DNA, 33 bp, Homo sapien
atgttctcacagtaaatatcagggaacagtcgt

SEQ ID NO: 123057 - DNA, 33 bp, Homo sapien
aattcatcctttgataagtttggttttataagt

SEQ ID NO: 123058 - DNA, 33 bp, Homo sapien
aattcatcctttgataggtttggttttataagt

SEQ ID NO: 123059 - DNA, 33 bp, Homo sapien
actatggtaggtgtaaagtaggcaatactgaac

SEQ ID NO: 123060 - DNA, 33 bp, Homo sapien
actatggtaggtgtaaggtaggcaatactgaac

SEQ ID NO: 123061 - DNA, 33 bp, Homo sapien
acttttgtttacttaacgcctgacaactagaag

SEQ ID NO: 123062 - DNA, 33 bp, Homo sapien
acttttgtttacttaatgcctgacaactagaag

SEQ ID NO: 123063 - DNA, 33 bp, Homo sapien
aacttgacttttaccaactaggtatcatttttg

SEQ ID NO: 123064 - DNA, 33 bp, Homo sapien
aacttgacttttaccacctaggtatcatttttg

SEQ ID NO: 123065 - DNA, 33 bp, Homo sapien
ctgtatgtagtatgaacctacaacagtgttgcc

SEQ ID NO: 123066 - DNA, 33 bp, Homo sapien
ctgtatgtagtatgaatctacaacagtgttgcc

SEQ ID NO: 123067 - DNA, 33 bp, Homo sapien
ctgtccttgcatactcagagctttcctattctc

SEQ ID NO: 123068 - DNA, 33 bp, Homo sapien
ctgtccttgcatactcggagctttcctattctc

SEQ ID NO: 123069 - DNA, 33 bp, Homo sapien
ttaccccaggacttccaaattgggagatcttgc

SEQ ID NO: 123070 - DNA, 33 bp, Homo sapien
ttaccccaggacttccgaattgggagatcttgc

SEQ ID NO: 123071 - DNA, 33 bp, Homo sapien
ttgatgtttcgcccaaacttagtaaggcttttt

SEQ ID NO: 123072 - DNA, 33 bp, Homo sapien
ttgatgtttcgcccaagcttagtaaggcttttt

SEQ ID NO: 123073 - DNA, 33 bp, Homo sapien
gcaatgaaaagcccacagaatttattatccttt

SEQ ID NO: 123074 - DNA, 33 bp, Homo sapien
gcaatgaaaagcccacggaatttattatccttt

SEQ ID NO: 123075 - DNA, 33 bp, Homo sapien
tcttatatactcaatcccacttttgtaattgga

SEQ ID NO: 123076 - DNA, 33 bp, Homo sapien
tcttatatactcaatctcacttttgtaattgga

SEQ ID NO: 123077 - DNA, 33 bp, Homo sapien
gcatatgtgctatctaaaggcattatgatagtt

SEQ ID NO: 123078 - DNA, 33 bp, Homo sapien
gcatatgtgctatctacaggcattatgatagtt

SEQ ID NO: 123079 - DNA, 33 bp, Homo sapien
tagccacttatccacaacctagtgacccatcca

SEQ ID NO: 123080 - DNA, 33 bp, Homo sapien
tagccacttatccacaccctagtgacccatcca

SEQ ID NO: 123081 - DNA, 33 bp, Homo sapien
aatggatcaatcactgaaggtggaaattggttg

SEQ ID NO: 123082 - DNA, 33 bp, Homo sapien
aatggatcaatcactgcaggtggaaattggttg

SEQ ID NO: 123083 - DNA, 33 bp, Homo sapien
taggaagaactaaaaacattgctacaaaacatg

SEQ ID NO: 123084 - DNA, 33 bp, Homo sapien
taggaagaactaaaaagattgctacaaaacatg

SEQ ID NO: 123085 - DNA, 33 bp, Homo sapien
aggtaacgtgtgaagccatctctatcagtcagc

SEQ ID NO: 123086 - DNA, 33 bp, Homo sapien
aggtaacgtgtgaagctatctctatcagtcagc

SEQ ID NO: 123087 - DNA, 33 bp, Homo sapien
taatggcaaaaaaggcagagactaaggcagcat

SEQ ID NO: 123088 - DNA, 33 bp, Homo sapien
taatggcaaaaaaggcggagactaaggcagcat

SEQ ID NO: 123089 - DNA, 33 bp, Homo sapien
tatcttcctgacttaacatccactgctcttcct

SEQ ID NO: 123090 - DNA, 33 bp, Homo sapien
tatcttcctgacttaatatccactgctcttcct

SEQ ID NO: 123091 - DNA, 33 bp, Homo sapien
tcccgcaattagctcacagaataaataacattt

SEQ ID NO: 123092 - DNA, 33 bp, Homo sapien
tcccgcaattagctcatagaataaataacattt

SEQ ID NO: 123093 - DNA, 33 bp, Homo sapien
agttgtgttatgcttacaccagcttatttaatt

SEQ ID NO: 123094 - DNA, 33 bp, Homo sapien
agttgtgttatgcttataccagcttatttaatt

SEQ ID NO: 123095 - DNA, 33 bp, Homo sapien
agcagcactgtacaaacgtaaatagactttaaa

SEQ ID NO: 123096 - DNA, 33 bp, Homo sapien
agcagcactgtacaaatgtaaatagactttaaa

SEQ ID NO: 123097 - DNA, 33 bp, Homo sapien
gtctccttgcccctaaaacatattactctaatc

SEQ ID NO: 123098 - DNA, 33 bp, Homo sapien
gtctccttgcccctaagacatattactctaatc

SEQ ID NO: 123099 - DNA, 33 bp, Homo sapien
ctatatacctgcataaaattgaaataacttgga

SEQ ID NO: 123100 - DNA, 33 bp, Homo sapien
ctatatacctgcataacattgaaataacttgga

SEQ ID NO: 123101 - DNA, 33 bp, Homo sapien
caaacttctatttcgagactgaggtgtccactt

SEQ ID NO: 123102 - DNA, 33 bp, Homo sapien
caaacttctatttcgatactgaggtgtccactt

SEQ ID NO: 123103 - DNA, 33 bp, Homo sapien
agtatttttgctacaactgagtacatatcatgt

SEQ ID NO: 123104 - DNA, 33 bp, Homo sapien
agtatttttgctacaattgagtacatatcatgt

SEQ ID NO: 123105 - DNA, 33 bp, Homo sapien
gaactaaggagcacaactattttgataaacttc

SEQ ID NO: 123106 - DNA, 33 bp, Homo sapien
gaactaaggagcacaattattttgataaacttc

SEQ ID NO: 123107 - DNA, 33 bp, Homo sapien
tttaggtgtcagagaccgaaaaaatacatagtg

SEQ ID NO: 123108 - DNA, 33 bp, Homo sapien
tttaggtgtcagagactgaaaaaatacatagtg

SEQ ID NO: 123109 - DNA, 33 bp, Homo sapien
actagctttgtgaagtcaaagacaaactgtatc

SEQ ID NO: 123110 - DNA, 33 bp, Homo sapien
actagctttgtgaagtgaaagacaaactgtatc

SEQ ID NO: 123111 - DNA, 33 bp, Homo sapien
ttttactgtagttacaccacaatgtaaataaaa

SEQ ID NO: 123112 - DNA, 33 bp, Homo sapien
ttttactgtagttacagcacaatgtaaataaaa

SEQ ID NO: 123113 - DNA, 33 bp, Homo sapien
ccccataagttaaagaatatggtctccagcaag

SEQ ID NO: 123114 - DNA, 33 bp, Homo sapien
ccccataagttaaagagtatggtctccagcaag

SEQ ID NO: 123115 - DNA, 33 bp, Homo sapien
cagcaagatggtcctcacttcatactcagaggc

SEQ ID NO: 123116 - DNA, 33 bp, Homo sapien
cagcaagatggtcctcgcttcatactcagaggc

SEQ ID NO: 123117 - DNA, 33 bp, Homo sapien
ttgagctatgattatgcattgtaccccagcctg

SEQ ID NO: 123118 - DNA, 33 bp, Homo sapien
ttgagctatgattatgtattgtaccccagcctg

SEQ ID NO: 123119 - DNA, 33 bp, Homo sapien
acaatgatcattttagaagcagactgatttgga

SEQ ID NO: 123120 - DNA, 33 bp, Homo sapien
acaatgatcattttagcagcagactgatttgga

SEQ ID NO: 123121 - DNA, 33 bp, Homo sapien
agacatttgttctagacaggttgttaaaaatca

SEQ ID NO: 123122 - DNA, 33 bp, Homo sapien
agacatttgttctagataggttgttaaaaatca

SEQ ID NO: 123123 - DNA, 33 bp, Homo sapien
ttcccgtctccctaaacatagtagctgtctgta

SEQ ID NO: 123124 - DNA, 33 bp, Homo sapien
ttcccgtctccctaaagatagtagctgtctgta

SEQ ID NO: 123125 - DNA, 33 bp, Homo sapien
gttgatttaccagtaaatgccaggtacatacac

SEQ ID NO: 123126 - DNA, 33 bp, Homo sapien
gttgatttaccagtaattgccaggtacatacac

SEQ ID NO: 123127 - DNA, 33 bp, Homo sapien
cacagagccagtaacaaataacatctctctgac

SEQ ID NO: 123128 - DNA, 33 bp, Homo sapien
cacagagccagtaacatataacatctctctgac

SEQ ID NO: 123129 - DNA, 33 bp, Homo sapien
tttttataccgagccaagcttgttatgactgtg

SEQ ID NO: 123130 - DNA, 33 bp, Homo sapien
tttttataccgagccaggcttgttatgactgtg

SEQ ID NO: 123131 - DNA, 33 bp, Homo sapien
tcagtagttgagaggacaatgcaaacaaataca

SEQ ID NO: 123132 - DNA, 33 bp, Homo sapien
tcagtagttgagaggagaatgcaaacaaataca

SEQ ID NO: 123133 - DNA, 33 bp, Homo sapien
tttgtggaccagaaaccaactttcaaaaccaca

SEQ ID NO: 123134 - DNA, 33 bp, Homo sapien
tttgtggaccagaaacgaactttcaaaaccaca

SEQ ID NO: 123135 - DNA, 33 bp, Homo sapien
gatctggtaaaacccactagagcggtcttgaat

SEQ ID NO: 123136 - DNA, 33 bp, Homo sapien
gatctggtaaaacccattagagcggtcttgaat

SEQ ID NO: 123137 - DNA, 33 bp, Homo sapien
atttattgttaagttacgaaactgtctttccaa

SEQ ID NO: 123138 - DNA, 33 bp, Homo sapien
atttattgttaagttatgaaactgtctttccaa

SEQ ID NO: 123139 - DNA, 33 bp, Homo sapien
ggtactgatgaagaaccagaaagtacaaggaat

SEQ ID NO: 123140 - DNA, 33 bp, Homo sapien
ggtactgatgaagaactagaaagtacaaggaat

SEQ ID NO: 123141 - DNA, 33 bp, Homo sapien
gataatgaccaattggaaaaaatatgtaaatat

SEQ ID NO: 123142 - DNA, 33 bp, Homo sapien
gataatgaccaattggcaaaaatatgtaaatat

SEQ ID NO: 123143 - DNA, 33 bp, Homo sapien
ttgacttagctggaggccaaagcacacacaaac

SEQ ID NO: 123144 - DNA, 33 bp, Homo sapien
ttgacttagctggaggtcaaagcacacacaaac

SEQ ID NO: 123145 - DNA, 33 bp, Homo sapien
agaacaactatgatgcctcagcggtgaccattc

SEQ ID NO: 123146 - DNA, 33 bp, Homo sapien
agaacaactatgatgcttcagcggtgaccattc

SEQ ID NO: 123147 - DNA, 33 bp, Homo sapien
caatacatggtgcagaaataaccggctaaccat

SEQ ID NO: 123148 - DNA, 33 bp, Homo sapien
caatacatggtgcagagataaccggctaaccat

SEQ ID NO: 123149 - DNA, 33 bp, Homo sapien
ttagctattttattgccgaggcacttacaacca

SEQ ID NO: 123150 - DNA, 33 bp, Homo sapien
ttagctattttattgctgaggcacttacaacca

SEQ ID NO: 123151 - DNA, 33 bp, Homo sapien
tctagatggatgagtaagagtctacttgaaaga

SEQ ID NO: 123152 - DNA, 33 bp, Homo sapien
tctagatggatgagtaggagtctacttgaaaga

SEQ ID NO: 123153 - DNA, 33 bp, Homo sapien
actatcactaaattgaataggcaggaatagctt

SEQ ID NO: 123154 - DNA, 33 bp, Homo sapien
actatcactaaattgagtaggcaggaatagctt

SEQ ID NO: 123155 - DNA, 33 bp, Homo sapien
atggctacctgaggagaccaagtcctagctggg

SEQ ID NO: 123156 - DNA, 33 bp, Homo sapien
atggctacctgaggagtccaagtcctagctggg

SEQ ID NO: 123157 - DNA, 33 bp, Homo sapien
gtgcactcactgaaaaaatgcggaaaagattga

SEQ ID NO: 123158 - DNA, 33 bp, Homo sapien
gtgcactcactgaaaagatgcggaaaagattga

SEQ ID NO: 123159 - DNA, 33 bp, Homo sapien
aaaggatgcccagaaaataaaggatgcctagaa

SEQ ID NO: 123160 - DNA, 33 bp, Homo sapien
aaaggatgcccagaaagtaaaggatgcctagaa

SEQ ID NO: 123161 - DNA, 33 bp, Homo sapien
gggattctgaaaagagacaaactgatagaggct

SEQ ID NO: 123162 - DNA, 33 bp, Homo sapien
gggattctgaaaagaggcaaactgatagaggct

SEQ ID NO: 123163 - DNA, 33 bp, Homo sapien
atcttgtaaacatgaacaagagatgacaccatg

SEQ ID NO: 123164 - DNA, 33 bp, Homo sapien
atcttgtaaacatgaagaagagatgacaccatg

SEQ ID NO: 123165 - DNA, 33 bp, Homo sapien
gtgagactattgaagaacagaaggcaacaaacg

SEQ ID NO: 123166 - DNA, 33 bp, Homo sapien
gtgagactattgaagagcagaaggcaacaaacg

SEQ ID NO: 123167 - DNA, 33 bp, Homo sapien
ttaaagttcttattgcaacacttcttaatacct

SEQ ID NO: 123168 - DNA, 33 bp, Homo sapien
ttaaagttcttattgcgacacttcttaatacct

SEQ ID NO: 123169 - DNA, 33 bp, Homo sapien
cacatctttacttatacaaaccctcactctggg

SEQ ID NO: 123170 - DNA, 33 bp, Homo sapien
cacatctttacttatagaaaccctcactctggg

SEQ ID NO: 123171 - DNA, 33 bp, Homo sapien
cacccatgccaagagcaagcaattaatgtaact

SEQ ID NO: 123172 - DNA, 33 bp, Homo sapien
cacccatgccaagagcgagcaattaatgtaact

SEQ ID NO: 123173 - DNA, 33 bp, Homo sapien
aattggatcatggttactaacattatcaccact

SEQ ID NO: 123174 - DNA, 33 bp, Homo sapien
aattggatcatggttattaacattatcaccact

SEQ ID NO: 123175 - DNA, 33 bp, Homo sapien
atcattactaaattaaactctatgcttacctga

SEQ ID NO: 123176 - DNA, 33 bp, Homo sapien
atcattactaaattaatctctatgcttacctga

SEQ ID NO: 123177 - DNA, 33 bp, Homo sapien
ggtagttaaagatcatcacttgtgcttatgcaa

SEQ ID NO: 123178 - DNA, 33 bp, Homo sapien
ggtagttaaagatcattacttgtgcttatgcaa

SEQ ID NO: 123179 - DNA, 33 bp, Homo sapien
gtatctctaccttacaacttcagaccacaggga

SEQ ID NO: 123180 - DNA, 33 bp, Homo sapien
gtatctctaccttacagcttcagaccacaggga

SEQ ID NO: 123181 - DNA, 33 bp, Homo sapien
cctaggctacagtttaccatagcaacagtgcta

SEQ ID NO: 123182 - DNA, 33 bp, Homo sapien
cctaggctacagtttatcatagcaacagtgcta

SEQ ID NO: 123183 - DNA, 33 bp, Homo sapien
ataagcagtgccgggacaggaatgggtgatcag

SEQ ID NO: 123184 - DNA, 33 bp, Homo sapien
ataagcagtgccgggagaggaatgggtgatcag

SEQ ID NO: 123185 - DNA, 33 bp, Homo sapien
tcaagaaaaggggcaacgctcataagtaagaag

SEQ ID NO: 123186 - DNA, 33 bp, Homo sapien
tcaagaaaaggggcaatgctcataagtaagaag

SEQ ID NO: 123187 - DNA, 33 bp, Homo sapien
ctcataagtaagaagacgaggactcaatttcag

SEQ ID NO: 123188 - DNA, 33 bp, Homo sapien
ctcataagtaagaagatgaggactcaatttcag

SEQ ID NO: 123189 - DNA, 33 bp, Homo sapien
gacccagcctcattcactcatctgtttgcttct

SEQ ID NO: 123190 - DNA, 33 bp, Homo sapien
gacccagcctcattcattcatctgtttgcttct

SEQ ID NO: 123191 - DNA, 33 bp, Homo sapien
tgaaaagaagagagaacacttagacctgagctg

SEQ ID NO: 123192 - DNA, 33 bp, Homo sapien
tgaaaagaagagagaatacttagacctgagctg

SEQ ID NO: 123193 - DNA, 33 bp, Homo sapien
ttgaaagacggtggtgaaatttagtgctgcatg

SEQ ID NO: 123194 - DNA, 33 bp, Homo sapien
ttgaaagacggtggtggaatttagtgctgcatg

SEQ ID NO: 123195 - DNA, 33 bp, Homo sapien
ccctgaactacagtgacagagttggaaagtgaa

SEQ ID NO: 123196 - DNA, 33 bp, Homo sapien
ccctgaactacagtgagagagttggaaagtgaa

SEQ ID NO: 123197 - DNA, 33 bp, Homo sapien
agatacactcagtagagatttcagggtgaatgg

SEQ ID NO: 123198 - DNA, 33 bp, Homo sapien
agatacactcagtagatatttcagggtgaatgg

SEQ ID NO: 123199 - DNA, 33 bp, Homo sapien
cgccgatcataagtaacaatgatttgaattggg

SEQ ID NO: 123200 - DNA, 33 bp, Homo sapien
cgccgatcataagtaagaatgatttgaattggg

SEQ ID NO: 123201 - DNA, 33 bp, Homo sapien
tacatatcttaaagccaatctacaaggacacct

SEQ ID NO: 123202 - DNA, 33 bp, Homo sapien
tacatatcttaaagcctatctacaaggacacct

SEQ ID NO: 123203 - DNA, 33 bp, Homo sapien
tctgtgtctctagatgaacccttgcaggaggag

SEQ ID NO: 123204 - DNA, 33 bp, Homo sapien
tctgtgtctctagatggacccttgcaggaggag

SEQ ID NO: 123205 - DNA, 33 bp, Homo sapien
gagtgtacatttacacaaaatatatgcacatat

SEQ ID NO: 123206 - DNA, 33 bp, Homo sapien
gagtgtacatttacacgaaatatatgcacatat

SEQ ID NO: 123207 - DNA, 33 bp, Homo sapien
gggtatctacaaattgaatccaaagaattctga

SEQ ID NO: 123208 - DNA, 33 bp, Homo sapien
gggtatctacaaattggatccaaagaattctga

SEQ ID NO: 123209 - DNA, 33 bp, Homo sapien
atagaatacaactgcaaattttatttcttacta

SEQ ID NO: 123210 - DNA, 33 bp, Homo sapien
atagaatacaactgcatattttatttcttacta

SEQ ID NO: 123211 - DNA, 33 bp, Homo sapien
caattgggtttgacaaggaaatagaagtgctcc

SEQ ID NO: 123212 - DNA, 33 bp, Homo sapien
caattgggtttgacaatgaaatagaagtgctcc

SEQ ID NO: 123213 - DNA, 33 bp, Homo sapien
ttatgtactctgcccccatagtaccctgtaaac

SEQ ID NO: 123214 - DNA, 33 bp, Homo sapien
ttatgtactctgccccgatagtaccctgtaaac

SEQ ID NO: 123215 - DNA, 33 bp, Homo sapien
aaatatttatttcaccaaagtcctagaagcact

SEQ ID NO: 123216 - DNA, 33 bp, Homo sapien
aaatatttatttcaccgaagtcctagaagcact

SEQ ID NO: 123217 - DNA, 33 bp, Homo sapien
ttttgatctatgcttccatgattcttatgagac

SEQ ID NO: 123218 - DNA, 33 bp, Homo sapien
ttttgatctatgcttctatgattcttatgagac

SEQ ID NO: 123219 - DNA, 33 bp, Homo sapien
ggactgggatgggagcaactgtgaatgcagaac

SEQ ID NO: 123220 - DNA, 33 bp, Homo sapien
ggactgggatgggagccactgtgaatgcagaac

SEQ ID NO: 123221 - DNA, 33 bp, Homo sapien
gctggggggacggaaaagaatgagggtatgaat

SEQ ID NO: 123222 - DNA, 33 bp, Homo sapien
gctggggggacggaaaggaatgagggtatgaat

SEQ ID NO: 123223 - DNA, 33 bp, Homo sapien
atggtttaaccattcacgagaggcattagatac

SEQ ID NO: 123224 - DNA, 33 bp, Homo sapien
atggtttaaccattcatgagaggcattagatac

SEQ ID NO: 123225 - DNA, 33 bp, Homo sapien
gagaaccaaagcactcactattacaaaggggcc

SEQ ID NO: 123226 - DNA, 33 bp, Homo sapien
gagaaccaaagcactcgctattacaaaggggcc

SEQ ID NO: 123227 - DNA, 33 bp, Homo sapien
tgtgcatggaaggctactaataaatcttagacc

SEQ ID NO: 123228 - DNA, 33 bp, Homo sapien
tgtgcatggaaggctattaataaatcttagacc

SEQ ID NO: 123229 - DNA, 33 bp, Homo sapien
gttctccactcccaaactatctcccctgacagg

SEQ ID NO: 123230 - DNA, 33 bp, Homo sapien
gttctccactcccaaattatctcccctgacagg

SEQ ID NO: 123231 - DNA, 33 bp, Homo sapien
tttggttcatattgaaagagactttgagagcca

SEQ ID NO: 123232 - DNA, 33 bp, Homo sapien
tttggttcatattgaaggagactttgagagcca

SEQ ID NO: 123233 - DNA, 33 bp, Homo sapien
atacaaatcaggcttacaaacccaggatccctt

SEQ ID NO: 123234 - DNA, 33 bp, Homo sapien
atacaaatcaggcttataaacccaggatccctt

SEQ ID NO: 123235 - DNA, 33 bp, Homo sapien
gcaaatgagcttaacaactagcctaaccttagg

SEQ ID NO: 123236 - DNA, 33 bp, Homo sapien
gcaaatgagcttaacagctagcctaaccttagg

SEQ ID NO: 123237 - DNA, 33 bp, Homo sapien
actaatttttggtgacaatatgctaggtaatgg

SEQ ID NO: 123238 - DNA, 33 bp, Homo sapien
actaatttttggtgaccatatgctaggtaatgg

SEQ ID NO: 123239 - DNA, 33 bp, Homo sapien
gaagcataggtactcacccagagtcagcatttt

SEQ ID NO: 123240 - DNA, 33 bp, Homo sapien
gaagcataggtactcatccagagtcagcatttt

SEQ ID NO: 123241 - DNA, 33 bp, Homo sapien
ggatgaaagcaaaaaacagttcatggatagatc

SEQ ID NO: 123242 - DNA, 33 bp, Homo sapien
ggatgaaagcaaaaaagagttcatggatagatc

SEQ ID NO: 123243 - DNA, 33 bp, Homo sapien
acaaagcatggtcacgacctggcaaaaatcagg

SEQ ID NO: 123244 - DNA, 33 bp, Homo sapien
acaaagcatggtcacggcctggcaaaaatcagg

SEQ ID NO: 123245 - DNA, 33 bp, Homo sapien
ccccatggttgatgaaataagatgcctagctca

SEQ ID NO: 123246 - DNA, 33 bp, Homo sapien
ccccatggttgatgaactaagatgcctagctca

SEQ ID NO: 123247 - DNA, 33 bp, Homo sapien
actttgttttgaagcactacgatcaaaatctgt

SEQ ID NO: 123248 - DNA, 33 bp, Homo sapien
actttgttttgaagcagtacgatcaaaatctgt

SEQ ID NO: 123249 - DNA, 33 bp, Homo sapien
gaccaatgttagaagacgattatgatgtcacca

SEQ ID NO: 123250 - DNA, 33 bp, Homo sapien
gaccaatgttagaagatgattatgatgtcacca

SEQ ID NO: 123251 - DNA, 33 bp, Homo sapien
gattgtcagcttctcaatagaccaatcatcatc

SEQ ID NO: 123252 - DNA, 33 bp, Homo sapien
gattgtcagcttctcagtagaccaatcatcatc

SEQ ID NO: 123253 - DNA, 33 bp, Homo sapien
atgaagctttagaatacgtggcagcagaattct

SEQ ID NO: 123254 - DNA, 33 bp, Homo sapien
atgaagctttagaatatgtggcagcagaattct

SEQ ID NO: 123255 - DNA, 33 bp, Homo sapien
cttcctttttaaggcaaataactcttggatatg

SEQ ID NO: 123256 - DNA, 33 bp, Homo sapien
cttcctttttaaggcagataactcttggatatg

SEQ ID NO: 123257 - DNA, 33 bp, Homo sapien
tagtcccaggtacttaagagggtaaggctagat

SEQ ID NO: 123258 - DNA, 33 bp, Homo sapien
tagtcccaggtacttaggagggtaaggctagat

SEQ ID NO: 123259 - DNA, 33 bp, Homo sapien
atttagaagcaagatacagaatctggagttagg

SEQ ID NO: 123260 - DNA, 33 bp, Homo sapien
atttagaagcaagatatagaatctggagttagg

SEQ ID NO: 123261 - DNA, 33 bp, Homo sapien
ttttttgccgtaagctgaaatatcttgtcttat

SEQ ID NO: 123262 - DNA, 33 bp, Homo sapien
ttttttgccgtaagcttaaatatcttgtcttat

SEQ ID NO: 123263 - DNA, 33 bp, Homo sapien
caccattggagctaaaatctgatgaaggataaa

SEQ ID NO: 123264 - DNA, 33 bp, Homo sapien
caccattggagctaaagtctgatgaaggataaa

SEQ ID NO: 123265 - DNA, 33 bp, Homo sapien
tttatgggaattgtaccattcttaaccactgtc

SEQ ID NO: 123266 - DNA, 33 bp, Homo sapien
tttatgggaattgtacgattcttaaccactgtc

SEQ ID NO: 123267 - DNA, 33 bp, Homo sapien
tcaaataagccattgaacctggagccccaggaa

SEQ ID NO: 123268 - DNA, 33 bp, Homo sapien
tcaaataagccattgagcctggagccccaggaa

SEQ ID NO: 123269 - DNA, 33 bp, Homo sapien
attgaaaaaattctcaatattccaacagactca

SEQ ID NO: 123270 - DNA, 33 bp, Homo sapien
attgaaaaaattctcagtattccaacagactca

SEQ ID NO: 123271 - DNA, 33 bp, Homo sapien
aataagaatttgaccacgttagtctgtttactt

SEQ ID NO: 123272 - DNA, 33 bp, Homo sapien
aataagaatttgaccaggttagtctgtttactt

SEQ ID NO: 123273 - DNA, 33 bp, Homo sapien
aaacaccaacaaatgggataaactaaaagaaac

SEQ ID NO: 123274 - DNA, 33 bp, Homo sapien
aaacaccaacaaatggtataaactaaaagaaac

SEQ ID NO: 123275 - DNA, 33 bp, Homo sapien
atgggccttataaacaaatatggatcattccag

SEQ ID NO: 123276 - DNA, 33 bp, Homo sapien
atgggccttataaacacatatggatcattccag

SEQ ID NO: 123277 - DNA, 33 bp, Homo sapien
atcacccactattatcacctagtccataactgg

SEQ ID NO: 123278 - DNA, 33 bp, Homo sapien
atcacccactattatcgcctagtccataactgg

SEQ ID NO: 123279 - DNA, 33 bp, Homo sapien
ggctggttaattcagtgactcaaggacagtatc

SEQ ID NO: 123280 - DNA, 33 bp, Homo sapien
ggctggttaattcagttactcaaggacagtatc

SEQ ID NO: 123281 - DNA, 33 bp, Homo sapien
gtctctactagagttacatctgtgggtaatgcc

SEQ ID NO: 123282 - DNA, 33 bp, Homo sapien
gtctctactagagttatatctgtgggtaatgcc

SEQ ID NO: 123283 - DNA, 33 bp, Homo sapien
ttcagcagatgttgtgcattgttactcaagtca

SEQ ID NO: 123284 - DNA, 33 bp, Homo sapien
ttcagcagatgttgtggattgttactcaagtca

SEQ ID NO: 123285 - DNA, 33 bp, Homo sapien
attctctcaaaagtggaaacgactcttacgcac

SEQ ID NO: 123286 - DNA, 33 bp, Homo sapien
attctctcaaaagtggcaacgactcttacgcac

SEQ ID NO: 123287 - DNA, 33 bp, Homo sapien
cacccaagttgagaaactgagaagagatttaca

SEQ ID NO: 123288 - DNA, 33 bp, Homo sapien
cacccaagttgagaaattgagaagagatttaca

SEQ ID NO: 123289 - DNA, 33 bp, Homo sapien
ttctaatctccccccaatgccagtgttatgtgt

SEQ ID NO: 123290 - DNA, 33 bp, Homo sapien
ttctaatctccccccagtgccagtgttatgtgt

SEQ ID NO: 123291 - DNA, 33 bp, Homo sapien
tttcctgtaactgggcaatcagacatttttttg

SEQ ID NO: 123292 - DNA, 33 bp, Homo sapien
tttcctgtaactgggcgatcagacatttttttg

SEQ ID NO: 123293 - DNA, 33 bp, Homo sapien
cttgtgaagaagtcaccgtgaaataaaagtctt

SEQ ID NO: 123294 - DNA, 33 bp, Homo sapien
cttgtgaagaagtcactgtgaaataaaagtctt

SEQ ID NO: 123295 - DNA, 33 bp, Homo sapien
tcagactagcatctgaagaaacttgtgaagaag

SEQ ID NO: 123296 - DNA, 33 bp, Homo sapien
tcagactagcatctgaggaaacttgtgaagaag

SEQ ID NO: 123297 - DNA, 33 bp, Homo sapien
aaaggagagcagggaactagaaatgtagacttt

SEQ ID NO: 123298 - DNA, 33 bp, Homo sapien
aaaggagagcagggaagtagaaatgtagacttt

SEQ ID NO: 123299 - DNA, 33 bp, Homo sapien
cttactaaagtttgtgcagtcttgatcattccc

SEQ ID NO: 123300 - DNA, 33 bp, Homo sapien
cttactaaagtttgtggagtcttgatcattccc

SEQ ID NO: 123301 - DNA, 33 bp, Homo sapien
cctagagtgaaaaacaccttcaggaaaccttca

SEQ ID NO: 123302 - DNA, 33 bp, Homo sapien
cctagagtgaaaaacagcttcaggaaaccttca

SEQ ID NO: 123303 - DNA, 33 bp, Homo sapien
gccagattgatgccaaaaatttggaagaccaac

SEQ ID NO: 123304 - DNA, 33 bp, Homo sapien
gccagattgatgccaacaatttggaagaccaac

SEQ ID NO: 123305 - DNA, 33 bp, Homo sapien
ggacacttctaatttacgaatgcaatttttaaa

SEQ ID NO: 123306 - DNA, 33 bp, Homo sapien
ggacacttctaatttatgaatgcaatttttaaa

SEQ ID NO: 123307 - DNA, 33 bp, Homo sapien
atctttggccaaatacgggaagaaaggctccag

SEQ ID NO: 123308 - DNA, 33 bp, Homo sapien
atctttggccaaatactggaagaaaggctccag

SEQ ID NO: 123309 - DNA, 33 bp, Homo sapien
gaacgtgatgaagcaactggagggtcggaggct

SEQ ID NO: 123310 - DNA, 33 bp, Homo sapien
gaacgtgatgaagcaattggagggtcggaggct

SEQ ID NO: 123311 - DNA, 33 bp, Homo sapien
accatgaaatgcattaaagtgtattcctatatc

SEQ ID NO: 123312 - DNA, 33 bp, Homo sapien
accatgaaatgcattacagtgtattcctatatc

SEQ ID NO: 123313 - DNA, 33 bp, Homo sapien
ttgccttactttaaaaaatacattcactgagtc

SEQ ID NO: 123314 - DNA, 33 bp, Homo sapien
ttgccttactttaaaagatacattcactgagtc

SEQ ID NO: 123315 - DNA, 33 bp, Homo sapien
agtgtccacagagaaacgtctgatgctatttca

SEQ ID NO: 123316 - DNA, 33 bp, Homo sapien
agtgtccacagagaaatgtctgatgctatttca

SEQ ID NO: 123317 - DNA, 33 bp, Homo sapien
aaaacagaggacacctaaaaatgataaggccat

SEQ ID NO: 123318 - DNA, 33 bp, Homo sapien
aaaacagaggacaccttaaaatgataaggccat

SEQ ID NO: 123319 - DNA, 33 bp, Homo sapien
catatgatagatacaacaaggatgcctgcctaa

SEQ ID NO: 123320 - DNA, 33 bp, Homo sapien
catatgatagatacaataaggatgcctgcctaa

SEQ ID NO: 123321 - DNA, 33 bp, Homo sapien
tctattaaaaaggtagcctaagctgagctgggg

SEQ ID NO: 123322 - DNA, 33 bp, Homo sapien
tctattaaaaaggtagtctaagctgagctgggg

SEQ ID NO: 123323 - DNA, 33 bp, Homo sapien
gttatacatggctccaccttcattaaatataca

SEQ ID NO: 123324 - DNA, 33 bp, Homo sapien
gttatacatggctccatcttcattaaatataca

SEQ ID NO: 123325 - DNA, 33 bp, Homo sapien
tattgtttcccattccaatactgtatgcatttt

SEQ ID NO: 123326 - DNA, 33 bp, Homo sapien
tattgtttcccattcctatactgtatgcatttt

SEQ ID NO: 123327 - DNA, 33 bp, Homo sapien
tttctattctgtccaactgatttgtgtctctct

SEQ ID NO: 123328 - DNA, 33 bp, Homo sapien
tttctattctgtccaattgatttgtgtctctct

SEQ ID NO: 123329 - DNA, 33 bp, Homo sapien
tgtcgtcttccataccgctggagctgggtctgc

SEQ ID NO: 123330 - DNA, 33 bp, Homo sapien
tgtcgtcttccatacctctggagctgggtctgc

SEQ ID NO: 123331 - DNA, 33 bp, Homo sapien
ctcattgcctttgggacgagtttaaacattagt

SEQ ID NO: 123332 - DNA, 33 bp, Homo sapien
ctcattgcctttgggatgagtttaaacattagt

SEQ ID NO: 123333 - DNA, 33 bp, Homo sapien
cactcttcttgcctctcacttggctgcagatcc

SEQ ID NO: 123334 - DNA, 33 bp, Homo sapien
cactcttcttgcctcttacttggctgcagatcc

SEQ ID NO: 123335 - DNA, 33 bp, Homo sapien
atatgaagttgtcaaagaacccttccctgtccc

SEQ ID NO: 123336 - DNA, 33 bp, Homo sapien
atatgaagttgtcaaataacccttccctgtccc

SEQ ID NO: 123337 - DNA, 33 bp, Homo sapien
aatcataatgataatcacaacaattccatttat

SEQ ID NO: 123338 - DNA, 33 bp, Homo sapien
aatcataatgataatcgcaacaattccatttat

SEQ ID NO: 123339 - DNA, 33 bp, Homo sapien
gcacaaatgacctgcaagctgaacacatgagct

SEQ ID NO: 123340 - DNA, 33 bp, Homo sapien
gcacaaatgacctgcacgctgaacacatgagct

SEQ ID NO: 123341 - DNA, 33 bp, Homo sapien
atgaaattcttagtcacatcccgtgatccttaa

SEQ ID NO: 123342 - DNA, 33 bp, Homo sapien
atgaaattcttagtcatatcccgtgatccttaa

SEQ ID NO: 123343 - DNA, 33 bp, Homo sapien
ggagtccccttggttacatcttcccatctgtac

SEQ ID NO: 123344 - DNA, 33 bp, Homo sapien
ggagtccccttggttatatcttcccatctgtac

SEQ ID NO: 123345 - DNA, 33 bp, Homo sapien
ttacacacatccttaccctgaaaggctttgaaa

SEQ ID NO: 123346 - DNA, 33 bp, Homo sapien
ttacacacatccttactctgaaaggctttgaaa

SEQ ID NO: 123347 - DNA, 33 bp, Homo sapien
tctgggtcagaactcactgaatacttagctggg

SEQ ID NO: 123348 - DNA, 33 bp, Homo sapien
tctgggtcagaactcattgaatacttagctggg

SEQ ID NO: 123349 - DNA, 33 bp, Homo sapien
tgctgtctgaattagagaataatggcatgatga

SEQ ID NO: 123350 - DNA, 33 bp, Homo sapien
tgctgtctgaattagataataatggcatgatga

SEQ ID NO: 123351 - DNA, 33 bp, Homo sapien
acttctagtatgctcccacatcttcccctctgg

SEQ ID NO: 123352 - DNA, 33 bp, Homo sapien
acttctagtatgctcctacatcttcccctctgg

SEQ ID NO: 123353 - DNA, 33 bp, Homo sapien
taaaaatatctcagtaaaagtggaaagagttaa

SEQ ID NO: 123354 - DNA, 33 bp, Homo sapien
taaaaatatctcagtacaagtggaaagagttaa

SEQ ID NO: 123355 - DNA, 33 bp, Homo sapien
tccatattgagagaaaactgcccttatttacac

SEQ ID NO: 123356 - DNA, 33 bp, Homo sapien
tccatattgagagaaagctgcccttatttacac

SEQ ID NO: 123357 - DNA, 33 bp, Homo sapien
attcattacgttttccccgaagcatggaaggag

SEQ ID NO: 123358 - DNA, 33 bp, Homo sapien
attcattacgttttcctcgaagcatggaaggag

SEQ ID NO: 123359 - DNA, 33 bp, Homo sapien
cacatccagtatctctaaacaagtgcttagaag

SEQ ID NO: 123360 - DNA, 33 bp, Homo sapien
cacatccagtatctctgaacaagtgcttagaag

SEQ ID NO: 123361 - DNA, 33 bp, Homo sapien
tactttatggtatttacggtatatggtatttct

SEQ ID NO: 123362 - DNA, 33 bp, Homo sapien
tactttatggtatttatggtatatggtatttct

SEQ ID NO: 123363 - DNA, 33 bp, Homo sapien
cattacacgagattgacaaaccctttctagctt

SEQ ID NO: 123364 - DNA, 33 bp, Homo sapien
cattacacgagattgataaaccctttctagctt

SEQ ID NO: 123365 - DNA, 33 bp, Homo sapien
agcaagtggaaaatgaccctgctgtaatccaga

SEQ ID NO: 123366 - DNA, 33 bp, Homo sapien
agcaagtggaaaatgatcctgctgtaatccaga

SEQ ID NO: 123367 - DNA, 33 bp, Homo sapien
atcttccagaagcatacggtttatgggataaac

SEQ ID NO: 123368 - DNA, 33 bp, Homo sapien
atcttccagaagcatatggtttatgggataaac

SEQ ID NO: 123369 - DNA, 33 bp, Homo sapien
aactcagtagttaaggaagaaaccagtcatcgt

SEQ ID NO: 123370 - DNA, 33 bp, Homo sapien
aactcagtagttaagggagaaaccagtcatcgt

SEQ ID NO: 123371 - DNA, 33 bp, Homo sapien
catgtagacattgttccaattacagagttttaa

SEQ ID NO: 123372 - DNA, 33 bp, Homo sapien
catgtagacattgttctaattacagagttttaa

SEQ ID NO: 123373 - DNA, 33 bp, Homo sapien
gatggtgttttaccaaaaggaggaatcagatca

SEQ ID NO: 123374 - DNA, 33 bp, Homo sapien
gatggtgttttaccaagaggaggaatcagatca

SEQ ID NO: 123375 - DNA, 33 bp, Homo sapien
aatataaaggcttatgaatgaccctggcttatt

SEQ ID NO: 123376 - DNA, 33 bp, Homo sapien
aatataaaggcttatgcatgaccctggcttatt

SEQ ID NO: 123377 - DNA, 33 bp, Homo sapien
cttcccagtgctcttacagcaagttattgacaa

SEQ ID NO: 123378 - DNA, 33 bp, Homo sapien
cttcccagtgctcttatagcaagttattgacaa

SEQ ID NO: 123379 - DNA, 33 bp, Homo sapien
gtattcaattccaaagaagcagtagaagataag

SEQ ID NO: 123380 - DNA, 33 bp, Homo sapien
gtattcaattccaaagcagcagtagaagataag

SEQ ID NO: 123381 - DNA, 33 bp, Homo sapien
ttgacaggcttttccaatacaccatgtcatatt

SEQ ID NO: 123382 - DNA, 33 bp, Homo sapien
ttgacaggcttttccagtacaccatgtcatatt

SEQ ID NO: 123383 - DNA, 33 bp, Homo sapien
cttccatggctatgaactcacccaccatctttg

SEQ ID NO: 123384 - DNA, 33 bp, Homo sapien
cttccatggctatgaagtcacccaccatctttg

SEQ ID NO: 123385 - DNA, 33 bp, Homo sapien
gtcagaatggcaaagaacaaagttggatagcat

SEQ ID NO: 123386 - DNA, 33 bp, Homo sapien
gtcagaatggcaaagagcaaagttggatagcat

SEQ ID NO: 123387 - DNA, 33 bp, Homo sapien
ggaatctgcattttacaaaagatcctcaggtta

SEQ ID NO: 123388 - DNA, 33 bp, Homo sapien
ggaatctgcattttacgaaagatcctcaggtta

SEQ ID NO: 123389 - DNA, 33 bp, Homo sapien
tctgaagaataaatgacagtaatgcataaagat

SEQ ID NO: 123390 - DNA, 33 bp, Homo sapien
tctgaagaataaatgagagtaatgcataaagat

SEQ ID NO: 123391 - DNA, 33 bp, Homo sapien
atacttgttgcttacagaagttaatctgagcag

SEQ ID NO: 123392 - DNA, 33 bp, Homo sapien
atacttgttgcttacataagttaatctgagcag

SEQ ID NO: 123393 - DNA, 33 bp, Homo sapien
tggcatattatttctcactttatcacagaagca

SEQ ID NO: 123394 - DNA, 33 bp, Homo sapien
tggcatattatttctcgctttatcacagaagca

SEQ ID NO: 123395 - DNA, 33 bp, Homo sapien
gttgatcaaatgctctcacttcttaagtatggt

SEQ ID NO: 123396 - DNA, 33 bp, Homo sapien
gttgatcaaatgctctgacttcttaagtatggt

SEQ ID NO: 123397 - DNA, 33 bp, Homo sapien
cagtatcctaatctcaacataatccaattaaga

SEQ ID NO: 123398 - DNA, 33 bp, Homo sapien
cagtatcctaatctcagcataatccaattaaga

SEQ ID NO: 123399 - DNA, 33 bp, Homo sapien
gcccaggaatgatcaccggcggaatttttggta

SEQ ID NO: 123400 - DNA, 33 bp, Homo sapien
gcccaggaatgatcactggcggaatttttggta

SEQ ID NO: 123401 - DNA, 33 bp, Homo sapien
caagtttctcacccccacttaagtacagaagga

SEQ ID NO: 123402 - DNA, 33 bp, Homo sapien
caagtttctcaccccctcttaagtacagaagga

SEQ ID NO: 123403 - DNA, 33 bp, Homo sapien
tagagtggtgagagaacgatccacaatttctgt

SEQ ID NO: 123404 - DNA, 33 bp, Homo sapien
tagagtggtgagagaatgatccacaatttctgt

SEQ ID NO: 123405 - DNA, 33 bp, Homo sapien
gtgaacatggttcaataagagagagagaccttg

SEQ ID NO: 123406 - DNA, 33 bp, Homo sapien
gtgaacatggttcaatcagagagagagaccttg

SEQ ID NO: 123407 - DNA, 33 bp, Homo sapien
ttagtctacattcgcccattttccataacctga

SEQ ID NO: 123408 - DNA, 33 bp, Homo sapien
ttagtctacattcgcctattttccataacctga

SEQ ID NO: 123409 - DNA, 33 bp, Homo sapien
gcaagactcaaacacaacattagataaaaattt

SEQ ID NO: 123410 - DNA, 33 bp, Homo sapien
gcaagactcaaacacatcattagataaaaattt

SEQ ID NO: 123411 - DNA, 33 bp, Homo sapien
tatgggcttctcataacatagtttcaatgaaaa

SEQ ID NO: 123412 - DNA, 33 bp, Homo sapien
tatgggcttctcataatatagtttcaatgaaaa

SEQ ID NO: 123413 - DNA, 33 bp, Homo sapien
gaggaatgacatccacaatactctaattttcta

SEQ ID NO: 123414 - DNA, 33 bp, Homo sapien
gaggaatgacatccaccatactctaattttcta

SEQ ID NO: 123415 - DNA, 33 bp, Homo sapien
actgcgtgagtttaaaatccacagtttcttcca

SEQ ID NO: 123416 - DNA, 33 bp, Homo sapien
actgcgtgagtttaaagtccacagtttcttcca

SEQ ID NO: 123417 - DNA, 33 bp, Homo sapien
agattttgtatattcactgaaaaattccccatc

SEQ ID NO: 123418 - DNA, 33 bp, Homo sapien
agattttgtatattcattgaaaaattccccatc

SEQ ID NO: 123419 - DNA, 33 bp, Homo sapien
tttactattgaattaacgcaatggttacagaca

SEQ ID NO: 123420 - DNA, 33 bp, Homo sapien
tttactattgaattaatgcaatggttacagaca

SEQ ID NO: 123421 - DNA, 33 bp, Homo sapien
tgacgtttgcacaacaaaatcatttaatgatgc

SEQ ID NO: 123422 - DNA, 33 bp, Homo sapien
tgacgtttgcacaacacaatcatttaatgatgc

SEQ ID NO: 123423 - DNA, 33 bp, Homo sapien
gaaataatacattccgaagtatggaagcatcct

SEQ ID NO: 123424 - DNA, 33 bp, Homo sapien
gaaataatacattccgtagtatggaagcatcct

SEQ ID NO: 123425 - DNA, 33 bp, Homo sapien
actaatattcatgctcagaattttcagctgcat

SEQ ID NO: 123426 - DNA, 33 bp, Homo sapien
actaatattcatgctcggaattttcagctgcat

SEQ ID NO: 123427 - DNA, 33 bp, Homo sapien
gtcaaggctggataaccgggcaaagtcatgcag

SEQ ID NO: 123428 - DNA, 33 bp, Homo sapien
gtcaaggctggataactgggcaaagtcatgcag

SEQ ID NO: 123429 - DNA, 33 bp, Homo sapien
gacctaactagatgcacgatggaaacaatgata

SEQ ID NO: 123430 - DNA, 33 bp, Homo sapien
gacctaactagatgcatgatggaaacaatgata

SEQ ID NO: 123431 - DNA, 33 bp, Homo sapien
tttttttctgcaactgacaatacttttttttta

SEQ ID NO: 123432 - DNA, 33 bp, Homo sapien
tttttttctgcaactggcaatacttttttttta

SEQ ID NO: 123433 - DNA, 33 bp, Homo sapien
ggaactgcagtccaccaataccagtaagaaaaa

SEQ ID NO: 123434 - DNA, 33 bp, Homo sapien
ggaactgcagtccaccgataccagtaagaaaaa

SEQ ID NO: 123435 - DNA, 33 bp, Homo sapien
tcttctgtatctgaaaatgaatgaagttagacc

SEQ ID NO: 123436 - DNA, 33 bp, Homo sapien
tcttctgtatctgaaagtgaatgaagttagacc

SEQ ID NO: 123437 - DNA, 33 bp, Homo sapien
ggtgactatcacggacagtattgtattttatat

SEQ ID NO: 123438 - DNA, 33 bp, Homo sapien
ggtgactatcacggacggtattgtattttatat

SEQ ID NO: 123439 - DNA, 33 bp, Homo sapien
cattgcaaattgcagaaacaaggaagggtgtgg

SEQ ID NO: 123440 - DNA, 33 bp, Homo sapien
cattgcaaattgcagagacaaggaagggtgtgg

SEQ ID NO: 123441 - DNA, 33 bp, Homo sapien
aacgttttctaagaagcattccgtggagaaaac

SEQ ID NO: 123442 - DNA, 33 bp, Homo sapien
aacgttttctaagaaggattccgtggagaaaac

SEQ ID NO: 123443 - DNA, 33 bp, Homo sapien
gctcctgaagcggctaccgggtctttgtctctg

SEQ ID NO: 123444 - DNA, 33 bp, Homo sapien
gctcctgaagcggctagcgggtctttgtctctg

SEQ ID NO: 123445 - DNA, 33 bp, Homo sapien
atactaactgttaaagaatgatcctctacttat

SEQ ID NO: 123446 - DNA, 33 bp, Homo sapien
atactaactgttaaaggatgatcctctacttat

SEQ ID NO: 123447 - DNA, 33 bp, Homo sapien
cttccctgattcagtaaattctgtactagctat

SEQ ID NO: 123448 - DNA, 33 bp, Homo sapien
cttccctgattcagtatattctgtactagctat

SEQ ID NO: 123449 - DNA, 33 bp, Homo sapien
ctgtgggtggtcataagtaaaaggaaagtacta

SEQ ID NO: 123450 - DNA, 33 bp, Homo sapien
ctgtgggtggtcataattaaaaggaaagtacta

SEQ ID NO: 123451 - DNA, 33 bp, Homo sapien
ggagtctgacaccagcaagtttgtgaggaaggg

SEQ ID NO: 123452 - DNA, 33 bp, Homo sapien
ggagtctgacaccagcgagtttgtgaggaaggg

SEQ ID NO: 123453 - DNA, 33 bp, Homo sapien
cttcgcaaaagagaagaactgtgtagtattata

SEQ ID NO: 123454 - DNA, 33 bp, Homo sapien
cttcgcaaaagagaaggactgtgtagtattata

SEQ ID NO: 123455 - DNA, 33 bp, Homo sapien
acgaaggtggtagtaaaagactgcagagtggtt

SEQ ID NO: 123456 - DNA, 33 bp, Homo sapien
acgaaggtggtagtaagagactgcagagtggtt

SEQ ID NO: 123457 - DNA, 33 bp, Homo sapien
tgttatctgtcctcgacgtagcagaagctaaat

SEQ ID NO: 123458 - DNA, 33 bp, Homo sapien
tgttatctgtcctcgatgtagcagaagctaaat

SEQ ID NO: 123459 - DNA, 33 bp, Homo sapien
gaattatagccattaaactgaactcatggtttt

SEQ ID NO: 123460 - DNA, 33 bp, Homo sapien
gaattatagccattaatctgaactcatggtttt

SEQ ID NO: 123461 - DNA, 33 bp, Homo sapien
taattttgtttctcataatataaaatgcttact

SEQ ID NO: 123462 - DNA, 33 bp, Homo sapien
taattttgtttctcatcatataaaatgcttact

SEQ ID NO: 123463 - DNA, 33 bp, Homo sapien
tcaccaacatttacacaagacttgaaaagcacc

SEQ ID NO: 123464 - DNA, 33 bp, Homo sapien
tcaccaacatttacaccagacttgaaaagcacc

SEQ ID NO: 123465 - DNA, 33 bp, Homo sapien
cctccagcactttctgcaaggtgtgagatcatt

SEQ ID NO: 123466 - DNA, 33 bp, Homo sapien
cctccagcactttctgtaaggtgtgagatcatt

SEQ ID NO: 123467 - DNA, 33 bp, Homo sapien
aggagccaggatgagcacttttagggtgccagc

SEQ ID NO: 123468 - DNA, 33 bp, Homo sapien
aggagccaggatgagcgcttttagggtgccagc

SEQ ID NO: 123469 - DNA, 33 bp, Homo sapien
agagaatgtagatctgaaaaggactgtgaaggg

SEQ ID NO: 123470 - DNA, 33 bp, Homo sapien
agagaatgtagatctggaaaggactgtgaaggg

SEQ ID NO: 123471 - DNA, 33 bp, Homo sapien
ctaaggagttagcaaaagaggaaggagaattct

SEQ ID NO: 123472 - DNA, 33 bp, Homo sapien
ctaaggagttagcaaaggaggaaggagaattct

SEQ ID NO: 123473 - DNA, 33 bp, Homo sapien
gggaagcttggatcaacgaactgggcagcctta

SEQ ID NO: 123474 - DNA, 33 bp, Homo sapien
gggaagcttggatcaatgaactgggcagcctta

SEQ ID NO: 123475 - DNA, 33 bp, Homo sapien
atggatctgtaaagaaatagtagccattgggag

SEQ ID NO: 123476 - DNA, 33 bp, Homo sapien
atggatctgtaaagaagtagtagccattgggag

SEQ ID NO: 123477 - DNA, 33 bp, Homo sapien
tcaggcctgtgagttaaaaaaaaattagctttc

SEQ ID NO: 123478 - DNA, 33 bp, Homo sapien
tcaggcctgtgagttagaaaaaaattagctttc

SEQ ID NO: 123479 - DNA, 33 bp, Homo sapien
aggcctgagataatgacgaaaggagaggagaat

SEQ ID NO: 123480 - DNA, 33 bp, Homo sapien
aggcctgagataatgatgaaaggagaggagaat

SEQ ID NO: 123481 - DNA, 33 bp, Homo sapien
caaacacacatcaacaaaaatgtgcacaaatac

SEQ ID NO: 123482 - DNA, 33 bp, Homo sapien
caaacacacatcaacacaaatgtgcacaaatac

SEQ ID NO: 123483 - DNA, 33 bp, Homo sapien
gccatagtacgctgaaacatgatgggttttcca

SEQ ID NO: 123484 - DNA, 33 bp, Homo sapien
gccatagtacgctgaagcatgatgggttttcca

SEQ ID NO: 123485 - DNA, 33 bp, Homo sapien
caatctgctccttaacagggagtcaaagatgct

SEQ ID NO: 123486 - DNA, 33 bp, Homo sapien
caatctgctccttaacggggagtcaaagatgct

SEQ ID NO: 123487 - DNA, 33 bp, Homo sapien
tgtaaaagtgtcagtaccaaaaagtgcatagtc

SEQ ID NO: 123488 - DNA, 33 bp, Homo sapien
tgtaaaagtgtcagtatcaaaaagtgcatagtc

SEQ ID NO: 123489 - DNA, 33 bp, Homo sapien
aacacaatggtagctccaaagagtaggaaggga

SEQ ID NO: 123490 - DNA, 33 bp, Homo sapien
aacacaatggtagctctaaagagtaggaaggga

SEQ ID NO: 123491 - DNA, 33 bp, Homo sapien
gtggaagataagagcaagtgagcacatgggtgg

SEQ ID NO: 123492 - DNA, 33 bp, Homo sapien
gtggaagataagagcaggtgagcacatgggtgg

SEQ ID NO: 123493 - DNA, 33 bp, Homo sapien
aaaaagagtcaacaaactgcatacattctctat

SEQ ID NO: 123494 - DNA, 33 bp, Homo sapien
aaaaagagtcaacaaattgcatacattctctat

SEQ ID NO: 123495 - DNA, 33 bp, Homo sapien
aataaattacagtatcagaaatcaaattactca

SEQ ID NO: 123496 - DNA, 33 bp, Homo sapien
aataaattacagtatcggaaatcaaattactca

SEQ ID NO: 123497 - DNA, 33 bp, Homo sapien
gaattattcttctccaaaacacaatactgcaca

SEQ ID NO: 123498 - DNA, 33 bp, Homo sapien
gaattattcttctccagaacacaatactgcaca

SEQ ID NO: 123499 - DNA, 33 bp, Homo sapien
ataaatatgcttccccaatgaataacagtatgg

SEQ ID NO: 123500 - DNA, 33 bp, Homo sapien
ataaatatgcttccccgatgaataacagtatgg

SEQ ID NO: 123501 - DNA, 33 bp, Homo sapien
gaatagtgattaaacactgcaacaattctgaag

SEQ ID NO: 123502 - DNA, 33 bp, Homo sapien
gaatagtgattaaacattgcaacaattctgaag

SEQ ID NO: 123503 - DNA, 33 bp, Homo sapien
ctaaacaaaagtcaccaaagttcaaaagaaagc

SEQ ID NO: 123504 - DNA, 33 bp, Homo sapien
ctaaacaaaagtcaccgaagttcaaaagaaagc

SEQ ID NO: 123505 - DNA, 33 bp, Homo sapien
aaagccagtgggtgtaccagataggagctagca

SEQ ID NO: 123506 - DNA, 33 bp, Homo sapien
aaagccagtgggtgtatcagataggagctagca

SEQ ID NO: 123507 - DNA, 33 bp, Homo sapien
acttgctcagaatcagaagagtaattgactaac

SEQ ID NO: 123508 - DNA, 33 bp, Homo sapien
acttgctcagaatcagtagagtaattgactaac

SEQ ID NO: 123509 - DNA, 33 bp, Homo sapien
agattctagttttcaaggtaggtagtcagttat

SEQ ID NO: 123510 - DNA, 33 bp, Homo sapien
agattctagttttcaatgtaggtagtcagttat

SEQ ID NO: 123511 - DNA, 33 bp, Homo sapien
tttcctcaaattgacaagaagcaaaatttcatc

SEQ ID NO: 123512 - DNA, 33 bp, Homo sapien
tttcctcaaattgacatgaagcaaaatttcatc

SEQ ID NO: 123513 - DNA, 33 bp, Homo sapien
caatgacaggttgttgcaagatggatgaaattt

SEQ ID NO: 123514 - DNA, 33 bp, Homo sapien
caatgacaggttgttggaagatggatgaaattt

SEQ ID NO: 123515 - DNA, 33 bp, Homo sapien
tgtgacagtgaagcaacaataacacctttcatc

SEQ ID NO: 123516 - DNA, 33 bp, Homo sapien
tgtgacagtgaagcaataataacacctttcatc

SEQ ID NO: 123517 - DNA, 33 bp, Homo sapien
gtctactttctgccagacattgtacaagccaac

SEQ ID NO: 123518 - DNA, 33 bp, Homo sapien
gtctactttctgccaggcattgtacaagccaac

SEQ ID NO: 123519 - DNA, 33 bp, Homo sapien
caaatctgctaacgtcagaaaagggtaaatgtt

SEQ ID NO: 123520 - DNA, 33 bp, Homo sapien
caaatctgctaacgtcggaaaagggtaaatgtt

SEQ ID NO: 123521 - DNA, 33 bp, Homo sapien
aagatgcaaagaaacaaagtgcgaatcgaagtc

SEQ ID NO: 123522 - DNA, 33 bp, Homo sapien
aagatgcaaagaaacagagtgcgaatcgaagtc

SEQ ID NO: 123523 - DNA, 33 bp, Homo sapien
cataggcttaaaaaaaacttgaaggcactgtat

SEQ ID NO: 123524 - DNA, 33 bp, Homo sapien
cataggcttaaaaaaaccttgaaggcactgtat

SEQ ID NO: 123525 - DNA, 33 bp, Homo sapien
gtcttctaacaaattgcaatatgggttcctgtg

SEQ ID NO: 123526 - DNA, 33 bp, Homo sapien
gtcttctaacaaattgtaatatgggttcctgtg

SEQ ID NO: 123527 - DNA, 33 bp, Homo sapien
accatcctcacatataagtgacaggccaaatac

SEQ ID NO: 123528 - DNA, 33 bp, Homo sapien
accatcctcacatataggtgacaggccaaatac

SEQ ID NO: 123529 - DNA, 33 bp, Homo sapien
ggaaagcatatgtggggacagtcttttgtgagt

SEQ ID NO: 123530 - DNA, 33 bp, Homo sapien
ggaaagcatatgtgggtacagtcttttgtgagt

SEQ ID NO: 123531 - DNA, 33 bp, Homo sapien
tggggccaagactacccgaagattaaaagcaaa

SEQ ID NO: 123532 - DNA, 33 bp, Homo sapien
tggggccaagactacctgaagattaaaagcaaa

SEQ ID NO: 123533 - DNA, 33 bp, Homo sapien
tcatttaactcttacaagataaagtagctatta

SEQ ID NO: 123534 - DNA, 33 bp, Homo sapien
tcatttaactcttacaggataaagtagctatta

SEQ ID NO: 123535 - DNA, 33 bp, Homo sapien
agtgcctgatgtaatgaaagcatgaaaggcact

SEQ ID NO: 123536 - DNA, 33 bp, Homo sapien
agtgcctgatgtaatggaagcatgaaaggcact

SEQ ID NO: 123537 - DNA, 33 bp, Homo sapien
ccctatattatgcctcaaggaaccagtgaagaa

SEQ ID NO: 123538 - DNA, 33 bp, Homo sapien
ccctatattatgcctctaggaaccagtgaagaa

SEQ ID NO: 123539 - DNA, 33 bp, Homo sapien
gctgctttctggctcaagtatggcttcttggct

SEQ ID NO: 123540 - DNA, 33 bp, Homo sapien
gctgctttctggctcaggtatggcttcttggct

SEQ ID NO: 123541 - DNA, 33 bp, Homo sapien
ggtacttttccctgtacgagaatgtggtgtaat

SEQ ID NO: 123542 - DNA, 33 bp, Homo sapien
ggtacttttccctgtatgagaatgtggtgtaat

SEQ ID NO: 123543 - DNA, 33 bp, Homo sapien
tccatcaacctttacaacctctaatggaggaat

SEQ ID NO: 123544 - DNA, 33 bp, Homo sapien
tccatcaacctttacatcctctaatggaggaat

SEQ ID NO: 123545 - DNA, 33 bp, Homo sapien
tgatggtaaattcagaatatctgttccaataga

SEQ ID NO: 123546 - DNA, 33 bp, Homo sapien
tgatggtaaattcagattatctgttccaataga

SEQ ID NO: 123547 - DNA, 33 bp, Homo sapien
ttaagcccttatcatgcattgtagccaaaacct

SEQ ID NO: 123548 - DNA, 33 bp, Homo sapien
ttaagcccttatcatgtattgtagccaaaacct

SEQ ID NO: 123549 - DNA, 33 bp, Homo sapien
cccacacagacatagcaaactggaacctacatt

SEQ ID NO: 123550 - DNA, 33 bp, Homo sapien
cccacacagacatagcgaactggaacctacatt

SEQ ID NO: 123551 - DNA, 33 bp, Homo sapien
ggctttacaggatgaaatgttttctcatgggtc

SEQ ID NO: 123552 - DNA, 33 bp, Homo sapien
ggctttacaggatgaagtgttttctcatgggtc

SEQ ID NO: 123553 - DNA, 33 bp, Homo sapien
gtgaaatgcctagcaaaagtccatatattttta

SEQ ID NO: 123554 - DNA, 33 bp, Homo sapien
gtgaaatgcctagcaacagtccatatattttta

SEQ ID NO: 123555 - DNA, 33 bp, Homo sapien
tctttatttgcaattcgctgttactctactgtg

SEQ ID NO: 123556 - DNA, 33 bp, Homo sapien
tctttatttgcaattctctgttactctactgtg

SEQ ID NO: 123557 - DNA, 33 bp, Homo sapien
ctgcaggacataaggaaagaatagcaactgata

SEQ ID NO: 123558 - DNA, 33 bp, Homo sapien
ctgcaggacataaggagagaatagcaactgata

SEQ ID NO: 123559 - DNA, 33 bp, Homo sapien
ctcctgttctttttctcaacagcattaatctaa

SEQ ID NO: 123560 - DNA, 33 bp, Homo sapien
ctcctgttctttttcttaacagcattaatctaa

SEQ ID NO: 123561 - DNA, 33 bp, Homo sapien
ctgcttacctgcaagggcatctggtaaatatag

SEQ ID NO: 123562 - DNA, 33 bp, Homo sapien
ctgcttacctgcaaggtcatctggtaaatatag

SEQ ID NO: 123563 - DNA, 33 bp, Homo sapien
gcatttcatttcttcaatagatgaggaactgaa

SEQ ID NO: 123564 - DNA, 33 bp, Homo sapien
gcatttcatttcttcagtagatgaggaactgaa

SEQ ID NO: 123565 - DNA, 33 bp, Homo sapien
attttaaaatcttgtcaaattctgtgagcttaa

SEQ ID NO: 123566 - DNA, 33 bp, Homo sapien
attttaaaatcttgtcgaattctgtgagcttaa

SEQ ID NO: 123567 - DNA, 33 bp, Homo sapien
gcacctactttatatcagacattgtgttggatg

SEQ ID NO: 123568 - DNA, 33 bp, Homo sapien
gcacctactttatatctgacattgtgttggatg

SEQ ID NO: 123569 - DNA, 33 bp, Homo sapien
actcagagtatgtagacataaaacattccacaa

SEQ ID NO: 123570 - DNA, 33 bp, Homo sapien
actcagagtatgtagatataaaacattccacaa

SEQ ID NO: 123571 - DNA, 33 bp, Homo sapien
ggagttcatcaggaaaaatatttaagctaatgg

SEQ ID NO: 123572 - DNA, 33 bp, Homo sapien
ggagttcatcaggaaagatatttaagctaatgg

SEQ ID NO: 123573 - DNA, 33 bp, Homo sapien
ggacaagcccgacttcagaagctacagtgcctt

SEQ ID NO: 123574 - DNA, 33 bp, Homo sapien
ggacaagcccgacttccgaagctacagtgcctt

SEQ ID NO: 123575 - DNA, 33 bp, Homo sapien
cactctttcattgctccaccctatcacagagtc

SEQ ID NO: 123576 - DNA, 33 bp, Homo sapien
cactctttcattgctcgaccctatcacagagtc

SEQ ID NO: 123577 - DNA, 33 bp, Homo sapien
cagcctaagcaaatgacctctccttaacctcag

SEQ ID NO: 123578 - DNA, 33 bp, Homo sapien
cagcctaagcaaatgatctctccttaacctcag

SEQ ID NO: 123579 - DNA, 33 bp, Homo sapien
agactggagtagacttcaagagttctgattagg

SEQ ID NO: 123580 - DNA, 33 bp, Homo sapien
agactggagtagactttaagagttctgattagg

SEQ ID NO: 123581 - DNA, 33 bp, Homo sapien
tcatcaagttggaaacgctgtcactgaattact

SEQ ID NO: 123582 - DNA, 33 bp, Homo sapien
tcatcaagttggaaactctgtcactgaattact

SEQ ID NO: 123583 - DNA, 33 bp, Homo sapien
taggagggaattgggggattcttgcagcagaga

SEQ ID NO: 123584 - DNA, 33 bp, Homo sapien
taggagggaattggggtattcttgcagcagaga

SEQ ID NO: 123585 - DNA, 33 bp, Homo sapien
gtcataaacatattgacgtttcaaaacattcag

SEQ ID NO: 123586 - DNA, 33 bp, Homo sapien
gtcataaacatattgaggtttcaaaacattcag

SEQ ID NO: 123587 - DNA, 33 bp, Homo sapien
tgccactcatttcttaacacaatctacagattc

SEQ ID NO: 123588 - DNA, 33 bp, Homo sapien
tgccactcatttcttagcacaatctacagattc

SEQ ID NO: 123589 - DNA, 33 bp, Homo sapien
ctgactgtggtacctaggacattggagagagac

SEQ ID NO: 123590 - DNA, 33 bp, Homo sapien
ctgactgtggtacctatgacattggagagagac

SEQ ID NO: 123591 - DNA, 33 bp, Homo sapien
gttacatcaggaataacagacttttgttctctt

SEQ ID NO: 123592 - DNA, 33 bp, Homo sapien
gttacatcaggaataatagacttttgttctctt

SEQ ID NO: 123593 - DNA, 33 bp, Homo sapien
taagtgtagacaaagaagtttatatcaaagcga

SEQ ID NO: 123594 - DNA, 33 bp, Homo sapien
taagtgtagacaaagaggtttatatcaaagcga

SEQ ID NO: 123595 - DNA, 33 bp, Homo sapien
agaaatgccagggaaagaaatgaatgcatctac

SEQ ID NO: 123596 - DNA, 33 bp, Homo sapien
agaaatgccagggaaataaatgaatgcatctac

SEQ ID NO: 123597 - DNA, 33 bp, Homo sapien
tcactacttgaataaaactagtcatttgctacc

SEQ ID NO: 123598 - DNA, 33 bp, Homo sapien
tcactacttgaataaagctagtcatttgctacc

SEQ ID NO: 123599 - DNA, 33 bp, Homo sapien
accttctgcattctcaatctcttctttgactct

SEQ ID NO: 123600 - DNA, 33 bp, Homo sapien
accttctgcattctcagtctcttctttgactct

SEQ ID NO: 123601 - DNA, 33 bp, Homo sapien
tcttcttcccattttaacctcccctgtagctgg

SEQ ID NO: 123602 - DNA, 33 bp, Homo sapien
tcttcttcccattttatcctcccctgtagctgg

SEQ ID NO: 123603 - DNA, 33 bp, Homo sapien
actgccattcgtggaaaagaaagacatagagct

SEQ ID NO: 123604 - DNA, 33 bp, Homo sapien
actgccattcgtggaagagaaagacatagagct

SEQ ID NO: 123605 - DNA, 33 bp, Homo sapien
attgctatggaccagcaattcttccactggaca

SEQ ID NO: 123606 - DNA, 33 bp, Homo sapien
attgctatggaccagcgattcttccactggaca

SEQ ID NO: 123607 - DNA, 33 bp, Homo sapien
gccttatttggtgacaatattgctatggaccag

SEQ ID NO: 123608 - DNA, 33 bp, Homo sapien
gccttatttggtgacattattgctatggaccag

SEQ ID NO: 123609 - DNA, 33 bp, Homo sapien
cgatgtcttctacacactgagagcatcataaac

SEQ ID NO: 123610 - DNA, 33 bp, Homo sapien
cgatgtcttctacacattgagagcatcataaac

SEQ ID NO: 123611 - DNA, 33 bp, Homo sapien
attttttttcacaccaaagttgtgtctctctcc

SEQ ID NO: 123612 - DNA, 33 bp, Homo sapien
attttttttcacaccagagttgtgtctctctcc

SEQ ID NO: 123613 - DNA, 33 bp, Homo sapien
accctcactagcagtaactcgcatatacatgag

SEQ ID NO: 123614 - DNA, 33 bp, Homo sapien
accctcactagcagtacctcgcatatacatgag

SEQ ID NO: 123615 - DNA, 33 bp, Homo sapien
ggaaagattctacagacccttgattcctccttt

SEQ ID NO: 123616 - DNA, 33 bp, Homo sapien
ggaaagattctacagatccttgattcctccttt

SEQ ID NO: 123617 - DNA, 33 bp, Homo sapien
cacaagattgaggacccgaagttggaagggtcc

SEQ ID NO: 123618 - DNA, 33 bp, Homo sapien
cacaagattgaggacctgaagttggaagggtcc

SEQ ID NO: 123619 - DNA, 33 bp, Homo sapien
tacagtgaactgagaaaatacaaggccagtgtg

SEQ ID NO: 123620 - DNA, 33 bp, Homo sapien
tacagtgaactgagaagatacaaggccagtgtg

SEQ ID NO: 123621 - DNA, 33 bp, Homo sapien
atgggagttggttttccaccacaatacacagac

SEQ ID NO: 123622 - DNA, 33 bp, Homo sapien
atgggagttggttttctaccacaatacacagac

SEQ ID NO: 123623 - DNA, 33 bp, Homo sapien
gcagaagccattgctgaagtcagaaacaagtta

SEQ ID NO: 123624 - DNA, 33 bp, Homo sapien
gcagaagccattgctggagtcagaaacaagtta

SEQ ID NO: 123625 - DNA, 33 bp, Homo sapien
gatctagcactagaaaaagccttattcaggaga

SEQ ID NO: 123626 - DNA, 33 bp, Homo sapien
gatctagcactagaaagagccttattcaggaga

SEQ ID NO: 123627 - DNA, 33 bp, Homo sapien
tgttttcatttggtcaactctaaaattcttcag

SEQ ID NO: 123628 - DNA, 33 bp, Homo sapien
tgttttcatttggtcatctctaaaattcttcag

SEQ ID NO: 123629 - DNA, 33 bp, Homo sapien
tgatagtgagaatgaaaaaaaaaagcacagata

SEQ ID NO: 123630 - DNA, 33 bp, Homo sapien
tgatagtgagaatgaagaaaaaaagcacagata

SEQ ID NO: 123631 - DNA, 33 bp, Homo sapien
aagtcattcagcatagaagtcatacaatgggca

SEQ ID NO: 123632 - DNA, 33 bp, Homo sapien
aagtcattcagcataggagtcatacaatgggca

SEQ ID NO: 123633 - DNA, 33 bp, Homo sapien
ttaaactgactccaaggaggatggcctttttta

SEQ ID NO: 123634 - DNA, 33 bp, Homo sapien
ttaaactgactccaagtaggatggcctttttta

SEQ ID NO: 123635 - DNA, 33 bp, Homo sapien
tttagtcctttcaacaatgctgggaccattatt

SEQ ID NO: 123636 - DNA, 33 bp, Homo sapien
tttagtcctttcaacagtgctgggaccattatt

SEQ ID NO: 123637 - DNA, 33 bp, Homo sapien
acaactacaacatgaacatttatggagcactta

SEQ ID NO: 123638 - DNA, 33 bp, Homo sapien
acaactacaacatgaatatttatggagcactta

SEQ ID NO: 123639 - DNA, 33 bp, Homo sapien
ctgggaaagactaaggaaataggtcatctttcc

SEQ ID NO: 123640 - DNA, 33 bp, Homo sapien
ctgggaaagactaaggcaataggtcatctttcc

SEQ ID NO: 123641 - DNA, 33 bp, Homo sapien
aaggctttagaagttgaatccccagcacagagc

SEQ ID NO: 123642 - DNA, 33 bp, Homo sapien
aaggctttagaagttggatccccagcacagagc

SEQ ID NO: 123643 - DNA, 33 bp, Homo sapien
agaaggctggatttcaccgaattgcatgggagt

SEQ ID NO: 123644 - DNA, 33 bp, Homo sapien
agaaggctggatttcatcgaattgcatgggagt

SEQ ID NO: 123645 - DNA, 33 bp, Homo sapien
tgttctctcctaaaataaagttgtgctttgagc

SEQ ID NO: 123646 - DNA, 33 bp, Homo sapien
tgttctctcctaaaatgaagttgtgctttgagc

SEQ ID NO: 123647 - DNA, 33 bp, Homo sapien
ttctgaaaggtaaaacagtacttgcatccctta

SEQ ID NO: 123648 - DNA, 33 bp, Homo sapien
ttctgaaaggtaaaacggtacttgcatccctta

SEQ ID NO: 123649 - DNA, 33 bp, Homo sapien
tctgcaagcaccttggaagttttgctgactgtt

SEQ ID NO: 123650 - DNA, 33 bp, Homo sapien
tctgcaagcaccttggcagttttgctgactgtt

SEQ ID NO: 123651 - DNA, 33 bp, Homo sapien
tcaaagtgaagataaaaaatgagtggagtgatt

SEQ ID NO: 123652 - DNA, 33 bp, Homo sapien
tcaaagtgaagataaataatgagtggagtgatt

SEQ ID NO: 123653 - DNA, 33 bp, Homo sapien
taggaaagccagtgaaagtaacctccattggat

SEQ ID NO: 123654 - DNA, 33 bp, Homo sapien
taggaaagccagtgaaggtaacctccattggat

SEQ ID NO: 123655 - DNA, 33 bp, Homo sapien
gtggtgggggatgacaaaaaacttcctcttcat

SEQ ID NO: 123656 - DNA, 33 bp, Homo sapien
gtggtgggggatgacagaaaacttcctcttcat

SEQ ID NO: 123657 - DNA, 33 bp, Homo sapien
ttgccatcgcctcctacactctgctccaggctc

SEQ ID NO: 123658 - DNA, 33 bp, Homo sapien
ttgccatcgcctcctatactctgctccaggctc

SEQ ID NO: 123659 - DNA, 33 bp, Homo sapien
aaatgaagaaacaaaacctcaaagaggctaaac

SEQ ID NO: 123660 - DNA, 33 bp, Homo sapien
aaatgaagaaacaaaagctcaaagaggctaaac

SEQ ID NO: 123661 - DNA, 33 bp, Homo sapien
tcggaaagcaggtgaaagaatggagagaaggag

SEQ ID NO: 123662 - DNA, 33 bp, Homo sapien
tcggaaagcaggtgaaggaatggagagaaggag

SEQ ID NO: 123663 - DNA, 33 bp, Homo sapien
aggctgtcctacggaaacctaaatttcaaacag

SEQ ID NO: 123664 - DNA, 33 bp, Homo sapien
aggctgtcctacggaatcctaaatttcaaacag

SEQ ID NO: 123665 - DNA, 33 bp, Homo sapien
gtgagttgcattgaaaaattgatctaagcacct

SEQ ID NO: 123666 - DNA, 33 bp, Homo sapien
gtgagttgcattgaaagattgatctaagcacct

SEQ ID NO: 123667 - DNA, 33 bp, Homo sapien
cttaccacatctcaaaatttctgttaatacact

SEQ ID NO: 123668 - DNA, 33 bp, Homo sapien
cttaccacatctcaaattttctgttaatacact

SEQ ID NO: 123669 - DNA, 33 bp, Homo sapien
atttatgctggttctcacataataccctatgaa

SEQ ID NO: 123670 - DNA, 33 bp, Homo sapien
atttatgctggttctcgcataataccctatgaa

SEQ ID NO: 123671 - DNA, 33 bp, Homo sapien
tatattctgcatattcgacatattctttgcata

SEQ ID NO: 123672 - DNA, 33 bp, Homo sapien
tatattctgcatattctacatattctttgcata

SEQ ID NO: 123673 - DNA, 33 bp, Homo sapien
agagcatgtgatttaaactagaactcctaaaat

SEQ ID NO: 123674 - DNA, 33 bp, Homo sapien
agagcatgtgatttaagctagaactcctaaaat

SEQ ID NO: 123675 - DNA, 33 bp, Homo sapien
atggtaattatgaaagcaaacagctggattacc

SEQ ID NO: 123676 - DNA, 33 bp, Homo sapien
atggtaattatgaaaggaaacagctggattacc

SEQ ID NO: 123677 - DNA, 33 bp, Homo sapien
gtctcactctggacagcaagagggctctgagat

SEQ ID NO: 123678 - DNA, 33 bp, Homo sapien
gtctcactctggacagtaagagggctctgagat

SEQ ID NO: 123679 - DNA, 33 bp, Homo sapien
aacagagccttaaaaactggtgaaaaggcacat

SEQ ID NO: 123680 - DNA, 33 bp, Homo sapien
aacagagccttaaaaattggtgaaaaggcacat

SEQ ID NO: 123681 - DNA, 33 bp, Homo sapien
tcagagaatggaaaacaacttctgaatttgact

SEQ ID NO: 123682 - DNA, 33 bp, Homo sapien
tcagagaatggaaaacgacttctgaatttgact

SEQ ID NO: 123683 - DNA, 33 bp, Homo sapien
tctttattgccactctcacttatgagcccgagt

SEQ ID NO: 123684 - DNA, 33 bp, Homo sapien
tctttattgccactctgacttatgagcccgagt

SEQ ID NO: 123685 - DNA, 33 bp, Homo sapien
ctgggagcatttgcatcagccggcactttcagg

SEQ ID NO: 123686 - DNA, 33 bp, Homo sapien
ctgggagcatttgcattagccggcactttcagg

SEQ ID NO: 123687 - DNA, 33 bp, Homo sapien
accatgtgcacacaataaagtcaggatctgtgt

SEQ ID NO: 123688 - DNA, 33 bp, Homo sapien
accatgtgcacacaatgaagtcaggatctgtgt

SEQ ID NO: 123689 - DNA, 33 bp, Homo sapien
ctgagtggagtatgcaccttgagggcctacacc

SEQ ID NO: 123690 - DNA, 33 bp, Homo sapien
ctgagtggagtatgcatcttgagggcctacacc

SEQ ID NO: 123691 - DNA, 33 bp, Homo sapien
tttggctcttggataactgctttagctattctt

SEQ ID NO: 123692 - DNA, 33 bp, Homo sapien
tttggctcttggataattgctttagctattctt

SEQ ID NO: 123693 - DNA, 33 bp, Homo sapien
cagtgcctgggttatcaatcatgaaaacgttca

SEQ ID NO: 123694 - DNA, 33 bp, Homo sapien
cagtgcctgggttatcgatcatgaaaacgttca

SEQ ID NO: 123695 - DNA, 33 bp, Homo sapien
tcatatatgaaacagacctattaattcaaagcc

SEQ ID NO: 123696 - DNA, 33 bp, Homo sapien
tcatatatgaaacagagctattaattcaaagcc

SEQ ID NO: 123697 - DNA, 33 bp, Homo sapien
atacacagtcctgtgtaaaagagctgcgattga

SEQ ID NO: 123698 - DNA, 33 bp, Homo sapien
atacacagtcctgtgtcaaagagctgcgattga

SEQ ID NO: 123699 - DNA, 33 bp, Homo sapien
tacacactaaatcaaaatgagttccatagttct

SEQ ID NO: 123700 - DNA, 33 bp, Homo sapien
tacacactaaatcaaagtgagttccatagttct

SEQ ID NO: 123701 - DNA, 33 bp, Homo sapien
ttcgcaccattataaagtcgtgaaatcctaaac

SEQ ID NO: 123702 - DNA, 33 bp, Homo sapien
ttcgcaccattataaattcgtgaaatcctaaac

SEQ ID NO: 123703 - DNA, 33 bp, Homo sapien
ctacccggaggagcaacgtgactaccaggatgc

SEQ ID NO: 123704 - DNA, 33 bp, Homo sapien
ctacccggaggagcaatgtgactaccaggatgc

SEQ ID NO: 123705 - DNA, 33 bp, Homo sapien
aataataataataaaacgggcaggcatagattc

SEQ ID NO: 123706 - DNA, 33 bp, Homo sapien
aataataataataaaatgggcaggcatagattc

SEQ ID NO: 123707 - DNA, 33 bp, Homo sapien
tatgttttttatttgcaagatttccagtcagca

SEQ ID NO: 123708 - DNA, 33 bp, Homo sapien
tatgttttttatttgcgagatttccagtcagca

SEQ ID NO: 123709 - DNA, 33 bp, Homo sapien
agcagttttctgaaaaagcattaatatgtcatt

SEQ ID NO: 123710 - DNA, 33 bp, Homo sapien
agcagttttctgaaaaggcattaatatgtcatt

SEQ ID NO: 123711 - DNA, 33 bp, Homo sapien
taaatttgatttatgcaatgatactatttctct

SEQ ID NO: 123712 - DNA, 33 bp, Homo sapien
taaatttgatttatgctatgatactatttctct

SEQ ID NO: 123713 - DNA, 33 bp, Homo sapien
attgagcccctctaacaaatttttcatgtcagt

SEQ ID NO: 123714 - DNA, 33 bp, Homo sapien
attgagcccctctaacgaatttttcatgtcagt

SEQ ID NO: 123715 - DNA, 33 bp, Homo sapien
tcccttgagcctcacaacaaacttaaattatgc

SEQ ID NO: 123716 - DNA, 33 bp, Homo sapien
tcccttgagcctcacagcaaacttaaattatgc

SEQ ID NO: 123717 - DNA, 33 bp, Homo sapien
caagtggtataagaacaatgttagactgatgct

SEQ ID NO: 123718 - DNA, 33 bp, Homo sapien
caagtggtataagaacgatgttagactgatgct

SEQ ID NO: 123719 - DNA, 33 bp, Homo sapien
atcaattagatcaaaaagaagcaaaattatagc

SEQ ID NO: 123720 - DNA, 33 bp, Homo sapien
atcaattagatcaaaaggaagcaaaattatagc

SEQ ID NO: 123721 - DNA, 33 bp, Homo sapien
ccaagagtactaagtgcaataaatgaaaataag

SEQ ID NO: 123722 - DNA, 33 bp, Homo sapien
ccaagagtactaagtggaataaatgaaaataag

SEQ ID NO: 123723 - DNA, 33 bp, Homo sapien
aagtgagcaactcttaagctgtgactagctctc

SEQ ID NO: 123724 - DNA, 33 bp, Homo sapien
aagtgagcaactcttatgctgtgactagctctc

SEQ ID NO: 123725 - DNA, 33 bp, Homo sapien
atagaatgttatcaaagtatttatgatgttgga

SEQ ID NO: 123726 - DNA, 33 bp, Homo sapien
atagaatgttatcaaattatttatgatgttgga

SEQ ID NO: 123727 - DNA, 33 bp, Homo sapien
tttcaaatacttccacacaagttatccctcact

SEQ ID NO: 123728 - DNA, 33 bp, Homo sapien
tttcaaatacttccacgcaagttatccctcact

SEQ ID NO: 123729 - DNA, 33 bp, Homo sapien
caccaaataacactggccaatgctacatggagc

SEQ ID NO: 123730 - DNA, 33 bp, Homo sapien
caccaaataacactggtcaatgctacatggagc

SEQ ID NO: 123731 - DNA, 33 bp, Homo sapien
tactgatccataataagtctaaagcccagccta

SEQ ID NO: 123732 - DNA, 33 bp, Homo sapien
tactgatccataataattctaaagcccagccta

SEQ ID NO: 123733 - DNA, 33 bp, Homo sapien
attggtttacacaaaaaagccaacatcctacta

SEQ ID NO: 123734 - DNA, 33 bp, Homo sapien
attggtttacacaaaagagccaacatcctacta

SEQ ID NO: 123735 - DNA, 33 bp, Homo sapien
acttttcatcaaatgacaccattaaaccacact

SEQ ID NO: 123736 - DNA, 33 bp, Homo sapien
acttttcatcaaatgataccattaaaccacact

SEQ ID NO: 123737 - DNA, 33 bp, Homo sapien
taataggttttaaaaaatcacatgacaattgaa

SEQ ID NO: 123738 - DNA, 33 bp, Homo sapien
taataggttttaaaaagtcacatgacaattgaa

SEQ ID NO: 123739 - DNA, 33 bp, Homo sapien
aatactgtttcagattgaaggaattgtacttca

SEQ ID NO: 123740 - DNA, 33 bp, Homo sapien
aatactgtttcagatttaaggaattgtacttca

SEQ ID NO: 123741 - DNA, 33 bp, Homo sapien
tcgatgcatataatccactttgtcattttggtt

SEQ ID NO: 123742 - DNA, 33 bp, Homo sapien
tcgatgcatataatccgctttgtcattttggtt

SEQ ID NO: 123743 - DNA, 33 bp, Homo sapien
acagaaagcaagataaagaaagcagtatagaat

SEQ ID NO: 123744 - DNA, 33 bp, Homo sapien
acagaaagcaagataatgaaagcagtatagaat

SEQ ID NO: 123745 - DNA, 33 bp, Homo sapien
tgctctgttacaaacactcctgcactaaacacc

SEQ ID NO: 123746 - DNA, 33 bp, Homo sapien
tgctctgttacaaacagtcctgcactaaacacc

SEQ ID NO: 123747 - DNA, 33 bp, Homo sapien
taaaggagttagaacaacacatagtatagaaca

SEQ ID NO: 123748 - DNA, 33 bp, Homo sapien
taaaggagttagaacagcacatagtatagaaca

SEQ ID NO: 123749 - DNA, 33 bp, Homo sapien
cttgccactgggtcaagtagttttcattttaaa

SEQ ID NO: 123750 - DNA, 33 bp, Homo sapien
cttgccactgggtcaattagttttcattttaaa

SEQ ID NO: 123751 - DNA, 33 bp, Homo sapien
caactacaggcaaaaacaggttcaagggttgcc

SEQ ID NO: 123752 - DNA, 33 bp, Homo sapien
caactacaggcaaaaagaggttcaagggttgcc

SEQ ID NO: 123753 - DNA, 33 bp, Homo sapien
tagcttggaaccaaataagatccgaggctaata

SEQ ID NO: 123754 - DNA, 33 bp, Homo sapien
tagcttggaaccaaatgagatccgaggctaata

SEQ ID NO: 123755 - DNA, 33 bp, Homo sapien
atgcaaattaagatgacattagctgcaaatgaa

SEQ ID NO: 123756 - DNA, 33 bp, Homo sapien
atgcaaattaagatgatattagctgcaaatgaa

SEQ ID NO: 123757 - DNA, 33 bp, Homo sapien
atatttcagcataccaatgatagattaactgtg

SEQ ID NO: 123758 - DNA, 33 bp, Homo sapien
atatttcagcataccagtgatagattaactgtg

SEQ ID NO: 123759 - DNA, 33 bp, Homo sapien
ctttttttcttgacaactctgcagtctagtcta

SEQ ID NO: 123760 - DNA, 33 bp, Homo sapien
ctttttttcttgacaattctgcagtctagtcta

SEQ ID NO: 123761 - DNA, 33 bp, Homo sapien
gtaatgtcaggctgtaacatctgtgactgctgc

SEQ ID NO: 123762 - DNA, 33 bp, Homo sapien
gtaatgtcaggctgtagcatctgtgactgctgc

SEQ ID NO: 123763 - DNA, 33 bp, Homo sapien
ccctcctccatactgcaccttctaatagtccac

SEQ ID NO: 123764 - DNA, 33 bp, Homo sapien
ccctcctccatactgcgccttctaatagtccac

SEQ ID NO: 123765 - DNA, 33 bp, Homo sapien
agtaaacttctgtcatcagggtttgctgtacag

SEQ ID NO: 123766 - DNA, 33 bp, Homo sapien
agtaaacttctgtcatgagggtttgctgtacag

SEQ ID NO: 123767 - DNA, 33 bp, Homo sapien
tcatgtgcactttcaaggagctaataagatcaa

SEQ ID NO: 123768 - DNA, 33 bp, Homo sapien
tcatgtgcactttcaatgagctaataagatcaa

SEQ ID NO: 123769 - DNA, 33 bp, Homo sapien
cctaaaatttctgccaaatcttacaatttcata

SEQ ID NO: 123770 - DNA, 33 bp, Homo sapien
cctaaaatttctgccatatcttacaatttcata

SEQ ID NO: 123771 - DNA, 33 bp, Homo sapien
atggttttctatggcaactgttcttcaaaaatg

SEQ ID NO: 123772 - DNA, 33 bp, Homo sapien
atggttttctatggcagctgttcttcaaaaatg

SEQ ID NO: 123773 - DNA, 33 bp, Homo sapien
agagaaaaaatcatctaaaatcgcacattaaaa

SEQ ID NO: 123774 - DNA, 33 bp, Homo sapien
agagaaaaaatcatctgaaatcgcacattaaaa

SEQ ID NO: 123775 - DNA, 33 bp, Homo sapien
aaaggtgcaaatcataaaagagaaattgataaa

SEQ ID NO: 123776 - DNA, 33 bp, Homo sapien
aaaggtgcaaatcatacaagagaaattgataaa

SEQ ID NO: 123777 - DNA, 33 bp, Homo sapien
cccatttctaatatgacgaactcagaaatgcag

SEQ ID NO: 123778 - DNA, 33 bp, Homo sapien
cccatttctaatatgatgaactcagaaatgcag

SEQ ID NO: 123779 - DNA, 33 bp, Homo sapien
cctgtttcaggccaataatcagttgcaaaaact

SEQ ID NO: 123780 - DNA, 33 bp, Homo sapien
cctgtttcaggccaatgatcagttgcaaaaact

SEQ ID NO: 123781 - DNA, 33 bp, Homo sapien
cttgggttggaccacagactgcttaagtcatct

SEQ ID NO: 123782 - DNA, 33 bp, Homo sapien
cttgggttggaccacatactgcttaagtcatct

SEQ ID NO: 123783 - DNA, 33 bp, Homo sapien
cattctatacttctgcgcctcttgcactaggcc

SEQ ID NO: 123784 - DNA, 33 bp, Homo sapien
cattctatacttctgctcctcttgcactaggcc

SEQ ID NO: 123785 - DNA, 33 bp, Homo sapien
attttttatgcatacgacattttagacattcca

SEQ ID NO: 123786 - DNA, 33 bp, Homo sapien
attttttatgcatacggcattttagacattcca

SEQ ID NO: 123787 - DNA, 33 bp, Homo sapien
tattagtaaacaataaagtacagtatatgaaca

SEQ ID NO: 123788 - DNA, 33 bp, Homo sapien
tattagtaaacaataaggtacagtatatgaaca

SEQ ID NO: 123789 - DNA, 33 bp, Homo sapien
aggctgttagtaagagaccttatattaatctgt

SEQ ID NO: 123790 - DNA, 33 bp, Homo sapien
aggctgttagtaagaggccttatattaatctgt

SEQ ID NO: 123791 - DNA, 33 bp, Homo sapien
gctgatggaatttgaccatgatcacacttatat

SEQ ID NO: 123792 - DNA, 33 bp, Homo sapien
gctgatggaatttgactatgatcacacttatat

SEQ ID NO: 123793 - DNA, 33 bp, Homo sapien
tttcccgtactgtagaaaactcatcagctcaga

SEQ ID NO: 123794 - DNA, 33 bp, Homo sapien
tttcccgtactgtagacaactcatcagctcaga

SEQ ID NO: 123795 - DNA, 33 bp, Homo sapien
ggttcacaggtttgcactatagaaagcatgggg

SEQ ID NO: 123796 - DNA, 33 bp, Homo sapien
ggttcacaggtttgcattatagaaagcatgggg

SEQ ID NO: 123797 - DNA, 33 bp, Homo sapien
cttttgcaattcataaatgctcttctttcacca

SEQ ID NO: 123798 - DNA, 33 bp, Homo sapien
cttttgcaattcataagtgctcttctttcacca

SEQ ID NO: 123799 - DNA, 33 bp, Homo sapien
gggccatagaatgtctcactctgttcctgtaca

SEQ ID NO: 123800 - DNA, 33 bp, Homo sapien
gggccatagaatgtcttactctgttcctgtaca

SEQ ID NO: 123801 - DNA, 33 bp, Homo sapien
acaaagaacaattttaagaagcgaagaagacaa

SEQ ID NO: 123802 - DNA, 33 bp, Homo sapien
acaaagaacaattttaggaagcgaagaagacaa

SEQ ID NO: 123803 - DNA, 33 bp, Homo sapien
agcaactatttctgagaattttccttgccccag

SEQ ID NO: 123804 - DNA, 33 bp, Homo sapien
agcaactatttctgaggattttccttgccccag

SEQ ID NO: 123805 - DNA, 33 bp, Homo sapien
gacctctcaaatggtaaggctgcctttatcttc

SEQ ID NO: 123806 - DNA, 33 bp, Homo sapien
gacctctcaaatggtatggctgcctttatcttc

SEQ ID NO: 123807 - DNA, 33 bp, Homo sapien
ggcaaaactcttctaccctgctgtctatgagag

SEQ ID NO: 123808 - DNA, 33 bp, Homo sapien
ggcaaaactcttctactctgctgtctatgagag

SEQ ID NO: 123809 - DNA, 33 bp, Homo sapien
ataacctgagcctctggattgctgcctgaggac

SEQ ID NO: 123810 - DNA, 33 bp, Homo sapien
ataacctgagcctctgtattgctgcctgaggac

SEQ ID NO: 123811 - DNA, 33 bp, Homo sapien
gatccttttgtgactacgttttcatttctttta

SEQ ID NO: 123812 - DNA, 33 bp, Homo sapien
gatccttttgtgactatgttttcatttctttta

SEQ ID NO: 123813 - DNA, 33 bp, Homo sapien
cataatcactgtcagcagcaatcacatgaccac

SEQ ID NO: 123814 - DNA, 33 bp, Homo sapien
cataatcactgtcagcggcaatcacatgaccac

SEQ ID NO: 123815 - DNA, 33 bp, Homo sapien
caggggagaatactgacgatggagcccatcaca

SEQ ID NO: 123816 - DNA, 33 bp, Homo sapien
caggggagaatactgatgatggagcccatcaca

SEQ ID NO: 123817 - DNA, 33 bp, Homo sapien
gctctatgttagtgagcagcctgttcgtggcct

SEQ ID NO: 123818 - DNA, 33 bp, Homo sapien
gctctatgttagtgagtagcctgttcgtggcct

SEQ ID NO: 123819 - DNA, 33 bp, Homo sapien
gggttatctgaaattcaatcttctgcgcattag

SEQ ID NO: 123820 - DNA, 33 bp, Homo sapien
gggttatctgaaattctatcttctgcgcattag

SEQ ID NO: 123821 - DNA, 33 bp, Homo sapien
tatattctggcatgaactgtatgctaatttctt

SEQ ID NO: 123822 - DNA, 33 bp, Homo sapien
tatattctggcatgaattgtatgctaatttctt

SEQ ID NO: 123823 - DNA, 33 bp, Homo sapien
gctgaaccagaaaggaaaaagctggaaggcaag

SEQ ID NO: 123824 - DNA, 33 bp, Homo sapien
gctgaaccagaaaggagaaagctggaaggcaag

SEQ ID NO: 123825 - DNA, 33 bp, Homo sapien
gttgacaggtgataaacgctgccacgctgccat

SEQ ID NO: 123826 - DNA, 33 bp, Homo sapien
gttgacaggtgataaatgctgccacgctgccat

SEQ ID NO: 123827 - DNA, 33 bp, Homo sapien
ataagccagacaataaaaaacattgcaaaaaat

SEQ ID NO: 123828 - DNA, 33 bp, Homo sapien
ataagccagacaataacaaacattgcaaaaaat

SEQ ID NO: 123829 - DNA, 33 bp, Homo sapien
gcacagttctaagaccaaataaataagactgaa

SEQ ID NO: 123830 - DNA, 33 bp, Homo sapien
gcacagttctaagaccgaataaataagactgaa

SEQ ID NO: 123831 - DNA, 33 bp, Homo sapien
acagttttgtagcagaacttcaagggttttcta

SEQ ID NO: 123832 - DNA, 33 bp, Homo sapien
acagttttgtagcagatcttcaagggttttcta

SEQ ID NO: 123833 - DNA, 33 bp, Homo sapien
acttaccacagtataacctctgtcaattatgat

SEQ ID NO: 123834 - DNA, 33 bp, Homo sapien
acttaccacagtataagctctgtcaattatgat

SEQ ID NO: 123835 - DNA, 33 bp, Homo sapien
gtaaggcatagaacaaacttttcaggcaatgta

SEQ ID NO: 123836 - DNA, 33 bp, Homo sapien
gtaaggcatagaacaagcttttcaggcaatgta

SEQ ID NO: 123837 - DNA, 33 bp, Homo sapien
gccatttgtcctagaacctcctaagctagttga

SEQ ID NO: 123838 - DNA, 33 bp, Homo sapien
gccatttgtcctagaagctcctaagctagttga

SEQ ID NO: 123839 - DNA, 33 bp, Homo sapien
ctaagtgactaaggaacaggtagtgtgtataca

SEQ ID NO: 123840 - DNA, 33 bp, Homo sapien
ctaagtgactaaggaagaggtagtgtgtataca

SEQ ID NO: 123841 - DNA, 33 bp, Homo sapien
atcagtaagatatcaaatccttctttagacttc

SEQ ID NO: 123842 - DNA, 33 bp, Homo sapien
atcagtaagatatcaactccttctttagacttc

SEQ ID NO: 123843 - DNA, 33 bp, Homo sapien
cccagatatcagtttaccagagaacatagctag

SEQ ID NO: 123844 - DNA, 33 bp, Homo sapien
cccagatatcagtttatcagagaacatagctag

SEQ ID NO: 123845 - DNA, 33 bp, Homo sapien
tatactattacttttccaagaagtgatgagcaa

SEQ ID NO: 123846 - DNA, 33 bp, Homo sapien
tatactattacttttctaagaagtgatgagcaa

SEQ ID NO: 123847 - DNA, 33 bp, Homo sapien
tgatatcaggtaaacacacttgcttgtatttta

SEQ ID NO: 123848 - DNA, 33 bp, Homo sapien
tgatatcaggtaaacatacttgcttgtatttta

SEQ ID NO: 123849 - DNA, 33 bp, Homo sapien
ttgcctgcagtattcaatacactaatgagctac

SEQ ID NO: 123850 - DNA, 33 bp, Homo sapien
ttgcctgcagtattcagtacactaatgagctac

SEQ ID NO: 123851 - DNA, 33 bp, Homo sapien
gtaaagatggatttaaaccactgtcatctcctg

SEQ ID NO: 123852 - DNA, 33 bp, Homo sapien
gtaaagatggatttaagccactgtcatctcctg

SEQ ID NO: 123853 - DNA, 33 bp, Homo sapien
tagggaaataagcacacagaactctgtcacagg

SEQ ID NO: 123854 - DNA, 33 bp, Homo sapien
tagggaaataagcacatagaactctgtcacagg

SEQ ID NO: 123855 - DNA, 33 bp, Homo sapien
ttactttcactagttacgctacagagacagata

SEQ ID NO: 123856 - DNA, 33 bp, Homo sapien
ttactttcactagttatgctacagagacagata

SEQ ID NO: 123857 - DNA, 33 bp, Homo sapien
agtaagtagtcattcactgaaggaaggactgat

SEQ ID NO: 123858 - DNA, 33 bp, Homo sapien
agtaagtagtcattcattgaaggaaggactgat

SEQ ID NO: 123859 - DNA, 33 bp, Homo sapien
gaacagcccaaaggtacctcaaaattaacatgt

SEQ ID NO: 123860 - DNA, 33 bp, Homo sapien
gaacagcccaaaggtagctcaaaattaacatgt

SEQ ID NO: 123861 - DNA, 33 bp, Homo sapien
cctggagaaagacgtacgtatcaagaagaagta

SEQ ID NO: 123862 - DNA, 33 bp, Homo sapien
cctggagaaagacgtaggtatcaagaagaagta

SEQ ID NO: 123863 - DNA, 33 bp, Homo sapien
agaatggaaagtcttacagagaaaatgacattt

SEQ ID NO: 123864 - DNA, 33 bp, Homo sapien
agaatggaaagtcttatagagaaaatgacattt

SEQ ID NO: 123865 - DNA, 33 bp, Homo sapien
ctgtaattaccaaaaacctcttgcttaagaaga

SEQ ID NO: 123866 - DNA, 33 bp, Homo sapien
ctgtaattaccaaaaatctcttgcttaagaaga

SEQ ID NO: 123867 - DNA, 33 bp, Homo sapien
tcactggattttttcagaattaaacttcaaatg

SEQ ID NO: 123868 - DNA, 33 bp, Homo sapien
tcactggattttttcataattaaacttcaaatg

SEQ ID NO: 123869 - DNA, 33 bp, Homo sapien
agggaggtccctggaaggtttcccaagtgcttc

SEQ ID NO: 123870 - DNA, 33 bp, Homo sapien
agggaggtccctggaatgtttcccaagtgcttc

SEQ ID NO: 123871 - DNA, 33 bp, Homo sapien
tgagagaccacagtgactagcagaccaatcaga

SEQ ID NO: 123872 - DNA, 33 bp, Homo sapien
tgagagaccacagtgagtagcagaccaatcaga

SEQ ID NO: 123873 - DNA, 33 bp, Homo sapien
ctgtttatttgaggaaacacctttatggatttg

SEQ ID NO: 123874 - DNA, 33 bp, Homo sapien
ctgtttatttgaggaaccacctttatggatttg

SEQ ID NO: 123875 - DNA, 33 bp, Homo sapien
gtcactgttatgttcccgaaagtcctgagtcct

SEQ ID NO: 123876 - DNA, 33 bp, Homo sapien
gtcactgttatgttcctgaaagtcctgagtcct

SEQ ID NO: 123877 - DNA, 33 bp, Homo sapien
ctcaagtggactccaacgttttttgcttccttt

SEQ ID NO: 123878 - DNA, 33 bp, Homo sapien
ctcaagtggactccaatgttttttgcttccttt

SEQ ID NO: 123879 - DNA, 33 bp, Homo sapien
gtgtagatagttataaattagtgtcgtgggagg

SEQ ID NO: 123880 - DNA, 33 bp, Homo sapien
gtgtagatagttataagttagtgtcgtgggagg

SEQ ID NO: 123881 - DNA, 33 bp, Homo sapien
ctagatggtgagatataatagctcaaatgggta

SEQ ID NO: 123882 - DNA, 33 bp, Homo sapien
ctagatggtgagatatgatagctcaaatgggta

SEQ ID NO: 123883 - DNA, 33 bp, Homo sapien
taattgagaggaagaaacttatcatagaagaga

SEQ ID NO: 123884 - DNA, 33 bp, Homo sapien
taattgagaggaagaatcttatcatagaagaga

SEQ ID NO: 123885 - DNA, 33 bp, Homo sapien
taagaaatattgcaaccaaaaaggtaatagaaa

SEQ ID NO: 123886 - DNA, 33 bp, Homo sapien
taagaaatattgcaactaaaaaggtaatagaaa

SEQ ID NO: 123887 - DNA, 33 bp, Homo sapien
tattaatacaaggtatcaagatattgactctgc

SEQ ID NO: 123888 - DNA, 33 bp, Homo sapien
tattaatacaaggtatgaagatattgactctgc

SEQ ID NO: 123889 - DNA, 33 bp, Homo sapien
tactagtgtataagtagagtctagtcttgagga

SEQ ID NO: 123890 - DNA, 33 bp, Homo sapien
tactagtgtataagtatagtctagtcttgagga

SEQ ID NO: 123891 - DNA, 33 bp, Homo sapien
tgagaaaatttgaaaaaatccagaaggtaggaa

SEQ ID NO: 123892 - DNA, 33 bp, Homo sapien
tgagaaaatttgaaaatatccagaaggtaggaa

SEQ ID NO: 123893 - DNA, 33 bp, Homo sapien
cttaatctctttggaaaaccaattccactcctt

SEQ ID NO: 123894 - DNA, 33 bp, Homo sapien
cttaatctctttggaagaccaattccactcctt

SEQ ID NO: 123895 - DNA, 33 bp, Homo sapien
tccaaggcaattaagcaataaaaaatagttgtc

SEQ ID NO: 123896 - DNA, 33 bp, Homo sapien
tccaaggcaattaagcgataaaaaatagttgtc

SEQ ID NO: 123897 - DNA, 33 bp, Homo sapien
aatacaagaaacatagaatagccaaaacaatct

SEQ ID NO: 123898 - DNA, 33 bp, Homo sapien
aatacaagaaacataggatagccaaaacaatct

SEQ ID NO: 123899 - DNA, 33 bp, Homo sapien
taaatactgataataaacatgaatggcaagagt

SEQ ID NO: 123900 - DNA, 33 bp, Homo sapien
taaatactgataataagcatgaatggcaagagt

SEQ ID NO: 123901 - DNA, 33 bp, Homo sapien
cccatatcacaaataacccttcattttatttaa

SEQ ID NO: 123902 - DNA, 33 bp, Homo sapien
cccatatcacaaataatccttcattttatttaa

SEQ ID NO: 123903 - DNA, 33 bp, Homo sapien
ctctatggcacctcagacacagaagcacctctg

SEQ ID NO: 123904 - DNA, 33 bp, Homo sapien
ctctatggcacctcagtcacagaagcacctctg

SEQ ID NO: 123905 - DNA, 33 bp, Homo sapien
aaattctttctctttcacaaaacctgtcatcac

SEQ ID NO: 123906 - DNA, 33 bp, Homo sapien
aaattctttctctttcgcaaaacctgtcatcac

SEQ ID NO: 123907 - DNA, 33 bp, Homo sapien
ttgaggatcctaattaccaatgaccagacaacg

SEQ ID NO: 123908 - DNA, 33 bp, Homo sapien
ttgaggatcctaattatcaatgaccagacaacg

SEQ ID NO: 123909 - DNA, 33 bp, Homo sapien
ggactgataaccctgaccaaaccaaagccatgg

SEQ ID NO: 123910 - DNA, 33 bp, Homo sapien
ggactgataaccctgatcaaaccaaagccatgg

SEQ ID NO: 123911 - DNA, 33 bp, Homo sapien
tgtttcttttagcatacgggtttattttatccc

SEQ ID NO: 123912 - DNA, 33 bp, Homo sapien
tgtttcttttagcatatgggtttattttatccc

SEQ ID NO: 123913 - DNA, 33 bp, Homo sapien
tcatcatatatgaccacacaattttaagaaagt

SEQ ID NO: 123914 - DNA, 33 bp, Homo sapien
tcatcatatatgaccagacaattttaagaaagt

SEQ ID NO: 123915 - DNA, 33 bp, Homo sapien
accacttggtgcagcacgaaaatgttctagttc

SEQ ID NO: 123916 - DNA, 33 bp, Homo sapien
accacttggtgcagcaggaaaatgttctagttc

SEQ ID NO: 123917 - DNA, 33 bp, Homo sapien
agctaagcagcaaacaaatttaactggatagtg

SEQ ID NO: 123918 - DNA, 33 bp, Homo sapien
agctaagcagcaaacacatttaactggatagtg

SEQ ID NO: 123919 - DNA, 33 bp, Homo sapien
ttttcctttgtctcagaagaatgaactctaggt

SEQ ID NO: 123920 - DNA, 33 bp, Homo sapien
ttttcctttgtctcaggagaatgaactctaggt

SEQ ID NO: 123921 - DNA, 33 bp, Homo sapien
tccaatatagtaaccacgtgcttcctaccctga

SEQ ID NO: 123922 - DNA, 33 bp, Homo sapien
tccaatatagtaaccatgtgcttcctaccctga

SEQ ID NO: 123923 - DNA, 33 bp, Homo sapien
ttgtcattgatttgcccacagcatctagtctcc

SEQ ID NO: 123924 - DNA, 33 bp, Homo sapien
ttgtcattgatttgcctacagcatctagtctcc

SEQ ID NO: 123925 - DNA, 33 bp, Homo sapien
taattttctttataaccgcataatcagtaggcc

SEQ ID NO: 123926 - DNA, 33 bp, Homo sapien
taattttctttataactgcataatcagtaggcc

SEQ ID NO: 123927 - DNA, 33 bp, Homo sapien
tgtgggcttatcagcacggtggtagcatatgag

SEQ ID NO: 123928 - DNA, 33 bp, Homo sapien
tgtgggcttatcagcatggtggtagcatatgag

SEQ ID NO: 123929 - DNA, 33 bp, Homo sapien
cccctaatgtctaaaacgcaacaaaaatgccct

SEQ ID NO: 123930 - DNA, 33 bp, Homo sapien
cccctaatgtctaaaatgcaacaaaaatgccct

SEQ ID NO: 123931 - DNA, 33 bp, Homo sapien
gctctctctttgatacacttattgcctttcttt

SEQ ID NO: 123932 - DNA, 33 bp, Homo sapien
gctctctctttgatactcttattgcctttcttt

SEQ ID NO: 123933 - DNA, 33 bp, Homo sapien
tacctaactggtttgaaaactcacaaaaaacta

SEQ ID NO: 123934 - DNA, 33 bp, Homo sapien
tacctaactggtttgagaactcacaaaaaacta

SEQ ID NO: 123935 - DNA, 33 bp, Homo sapien
cataccatttttcatacgagttgaatcatttta

SEQ ID NO: 123936 - DNA, 33 bp, Homo sapien
cataccatttttcatatgagttgaatcatttta

SEQ ID NO: 123937 - DNA, 33 bp, Homo sapien
tgaatatgttatcccactcccttatggtccata

SEQ ID NO: 123938 - DNA, 33 bp, Homo sapien
tgaatatgttatcccattcccttatggtccata

SEQ ID NO: 123939 - DNA, 33 bp, Homo sapien
ccagatttgaggaaagaagaggctatataggtt

SEQ ID NO: 123940 - DNA, 33 bp, Homo sapien
ccagatttgaggaaagcagaggctatataggtt

SEQ ID NO: 123941 - DNA, 33 bp, Homo sapien
tttcagacagctcacaaattgcatttatttagt

SEQ ID NO: 123942 - DNA, 33 bp, Homo sapien
tttcagacagctcacagattgcatttatttagt

SEQ ID NO: 123943 - DNA, 33 bp, Homo sapien
tgagtgatatcggcaagatggcagactaagaag

SEQ ID NO: 123944 - DNA, 33 bp, Homo sapien
tgagtgatatcggcaatatggcagactaagaag

SEQ ID NO: 123945 - DNA, 33 bp, Homo sapien
atgatggagatagaaactggagtgatggatcta

SEQ ID NO: 123946 - DNA, 33 bp, Homo sapien
atgatggagatagaaattggagtgatggatcta

SEQ ID NO: 123947 - DNA, 33 bp, Homo sapien
tctcatttgaaattacagagatcatgctgatcc

SEQ ID NO: 123948 - DNA, 33 bp, Homo sapien
tctcatttgaaattacggagatcatgctgatcc

SEQ ID NO: 123949 - DNA, 33 bp, Homo sapien
caaagaaactttattgccaaatcaaacaaacaa

SEQ ID NO: 123950 - DNA, 33 bp, Homo sapien
caaagaaactttattggcaaatcaaacaaacaa

SEQ ID NO: 123951 - DNA, 33 bp, Homo sapien
ctgagaaaggagggttaaaatcttcagctataa

SEQ ID NO: 123952 - DNA, 33 bp, Homo sapien
ctgagaaaggagggttgaaatcttcagctataa

SEQ ID NO: 123953 - DNA, 33 bp, Homo sapien
agcatgcttaatgttcacagttctctttaattt

SEQ ID NO: 123954 - DNA, 33 bp, Homo sapien
agcatgcttaatgttcgcagttctctttaattt

SEQ ID NO: 123955 - DNA, 33 bp, Homo sapien
ggcaataataccaaaagaacactgtttcatcaa

SEQ ID NO: 123956 - DNA, 33 bp, Homo sapien
ggcaataataccaaaataacactgtttcatcaa

SEQ ID NO: 123957 - DNA, 33 bp, Homo sapien
tttttagcaaaccttacgccaaaatatgttgac

SEQ ID NO: 123958 - DNA, 33 bp, Homo sapien
tttttagcaaaccttatgccaaaatatgttgac

SEQ ID NO: 123959 - DNA, 33 bp, Homo sapien
aagtagtttcaatttaggtctcaaaatggaact

SEQ ID NO: 123960 - DNA, 33 bp, Homo sapien
aagtagtttcaatttatgtctcaaaatggaact

SEQ ID NO: 123961 - DNA, 33 bp, Homo sapien
taagaaatttgaaagaaacatattggtttggtt

SEQ ID NO: 123962 - DNA, 33 bp, Homo sapien
taagaaatttgaaagacacatattggtttggtt

SEQ ID NO: 123963 - DNA, 33 bp, Homo sapien
gggtgattctgaaggaatacttagtcctgaatt

SEQ ID NO: 123964 - DNA, 33 bp, Homo sapien
gggtgattctgaaggagtacttagtcctgaatt

SEQ ID NO: 123965 - DNA, 33 bp, Homo sapien
ccagagctcggtggtactaatagctgaatcaac

SEQ ID NO: 123966 - DNA, 33 bp, Homo sapien
ccagagctcggtggtattaatagctgaatcaac

SEQ ID NO: 123967 - DNA, 33 bp, Homo sapien
aatttccaaggagcgaatataaagtttgctaga

SEQ ID NO: 123968 - DNA, 33 bp, Homo sapien
aatttccaaggagcgactataaagtttgctaga

SEQ ID NO: 123969 - DNA, 33 bp, Homo sapien
ggcctcttgcaccaaacgcttagctaagttgtg

SEQ ID NO: 123970 - DNA, 33 bp, Homo sapien
ggcctcttgcaccaaatgcttagctaagttgtg

SEQ ID NO: 123971 - DNA, 33 bp, Homo sapien
ctaacaccgaaaccaagaactagaagattccag

SEQ ID NO: 123972 - DNA, 33 bp, Homo sapien
ctaacaccgaaaccaataactagaagattccag

SEQ ID NO: 123973 - DNA, 33 bp, Homo sapien
cggtcacagaactgtaccagggcagtggaacac

SEQ ID NO: 123974 - DNA, 33 bp, Homo sapien
cggtcacagaactgtatcagggcagtggaacac

SEQ ID NO: 123975 - DNA, 33 bp, Homo sapien
ttgcaacgttctatacaaacaaagatggcagag

SEQ ID NO: 123976 - DNA, 33 bp, Homo sapien
ttgcaacgttctatactaacaaagatggcagag

SEQ ID NO: 123977 - DNA, 33 bp, Homo sapien
ctcatcaatgccaggacaagagtgcccttctat

SEQ ID NO: 123978 - DNA, 33 bp, Homo sapien
ctcatcaatgccaggataagagtgcccttctat

SEQ ID NO: 123979 - DNA, 33 bp, Homo sapien
atgcactgagagcagaaggttttgtagcaaaga

SEQ ID NO: 123980 - DNA, 33 bp, Homo sapien
atgcactgagagcagacggttttgtagcaaaga

SEQ ID NO: 123981 - DNA, 33 bp, Homo sapien
gagtagaagcaaggtcacgagttaggacttgat

SEQ ID NO: 123982 - DNA, 33 bp, Homo sapien
gagtagaagcaaggtctcgagttaggacttgat

SEQ ID NO: 123983 - DNA, 33 bp, Homo sapien
gtctgtttctgcttaccattatatccttaagta

SEQ ID NO: 123984 - DNA, 33 bp, Homo sapien
gtctgtttctgcttactattatatccttaagta

SEQ ID NO: 123985 - DNA, 33 bp, Homo sapien
cagaatgggccctagaacaaaaatgtgataaaa

SEQ ID NO: 123986 - DNA, 33 bp, Homo sapien
cagaatgggccctagagcaaaaatgtgataaaa

SEQ ID NO: 123987 - DNA, 33 bp, Homo sapien
tgaaacatcaatctaaaccaaactcaatacttt

SEQ ID NO: 123988 - DNA, 33 bp, Homo sapien
tgaaacatcaatctaatccaaactcaatacttt

SEQ ID NO: 123989 - DNA, 33 bp, Homo sapien
ttttccaaataggccacgtccaggtagttcctg

SEQ ID NO: 123990 - DNA, 33 bp, Homo sapien
ttttccaaataggccatgtccaggtagttcctg

SEQ ID NO: 123991 - DNA, 33 bp, Homo sapien
tgactgaatcttctaaaatgtcttataaaccca

SEQ ID NO: 123992 - DNA, 33 bp, Homo sapien
tgactgaatcttctaatatgtcttataaaccca

SEQ ID NO: 123993 - DNA, 33 bp, Homo sapien
tagccttctccgtggaggtaggagtggatgctc

SEQ ID NO: 123994 - DNA, 33 bp, Homo sapien
tagccttctccgtggatgtaggagtggatgctc

SEQ ID NO: 123995 - DNA, 33 bp, Homo sapien
accccagatgctattaggtgagaatttgcaatt

SEQ ID NO: 123996 - DNA, 33 bp, Homo sapien
accccagatgctattatgtgagaatttgcaatt

SEQ ID NO: 123997 - DNA, 33 bp, Homo sapien
tgctctattagaagtacgttcagattgttgtgg

SEQ ID NO: 123998 - DNA, 33 bp, Homo sapien
tgctctattagaagtatgttcagattgttgtgg

SEQ ID NO: 123999 - DNA, 33 bp, Homo sapien
gcagtcaatgtgctgacgacaaaagatgaaaag

SEQ ID NO: 124000 - DNA, 33 bp, Homo sapien
gcagtcaatgtgctgatgacaaaagatgaaaag

SEQ ID NO: 124001 - DNA, 33 bp, Homo sapien
accggcctatgttagaatatttaatttccaaag

SEQ ID NO: 124002 - DNA, 33 bp, Homo sapien
accggcctatgttagagtatttaatttccaaag

SEQ ID NO: 124003 - DNA, 33 bp, Homo sapien
gcatttggagaggaaacacttcttcaatctaag

SEQ ID NO: 124004 - DNA, 33 bp, Homo sapien
gcatttggagaggaaagacttcttcaatctaag

SEQ ID NO: 124005 - DNA, 33 bp, Homo sapien
attatttcattggctacggagaagaaagacacc

SEQ ID NO: 124006 - DNA, 33 bp, Homo sapien
attatttcattggctatggagaagaaagacacc

SEQ ID NO: 124007 - DNA, 33 bp, Homo sapien
aacagatgctagctagaatgcagagaaaaggga

SEQ ID NO: 124008 - DNA, 33 bp, Homo sapien
aacagatgctagctaggatgcagagaaaaggga

SEQ ID NO: 124009 - DNA, 33 bp, Homo sapien
agccatgctatggagaagaggacaagctgtctt

SEQ ID NO: 124010 - DNA, 33 bp, Homo sapien
agccatgctatggagaggaggacaagctgtctt

SEQ ID NO: 124011 - DNA, 33 bp, Homo sapien
gggaggaagcaaagaacctgattgcttgtctgt

SEQ ID NO: 124012 - DNA, 33 bp, Homo sapien
gggaggaagcaaagaatctgattgcttgtctgt

SEQ ID NO: 124013 - DNA, 33 bp, Homo sapien
catgttttgtcctatacgtacacacctatgata

SEQ ID NO: 124014 - DNA, 33 bp, Homo sapien
catgttttgtcctatatgtacacacctatgata

SEQ ID NO: 124015 - DNA, 33 bp, Homo sapien
aatttcaggcttccacaggagtcttggtatatt

SEQ ID NO: 124016 - DNA, 33 bp, Homo sapien
aatttcaggcttccactggagtcttggtatatt

SEQ ID NO: 124017 - DNA, 33 bp, Homo sapien
ccaccagcaagaaggcactaacaaaatgcagct

SEQ ID NO: 124018 - DNA, 33 bp, Homo sapien
ccaccagcaagaaggcgctaacaaaatgcagct

SEQ ID NO: 124019 - DNA, 33 bp, Homo sapien
cttagctgttttttaccgattctttgcaacacc

SEQ ID NO: 124020 - DNA, 33 bp, Homo sapien
cttagctgttttttactgattctttgcaacacc

SEQ ID NO: 124021 - DNA, 33 bp, Homo sapien
gtaatgagaatttcaccgctgaaaaagtttggt

SEQ ID NO: 124022 - DNA, 33 bp, Homo sapien
gtaatgagaatttcactgctgaaaaagtttggt

SEQ ID NO: 124023 - DNA, 33 bp, Homo sapien
aagaaattttccctgccaaattgttcaatcatg

SEQ ID NO: 124024 - DNA, 33 bp, Homo sapien
aagaaattttccctgcgaaattgttcaatcatg

SEQ ID NO: 124025 - DNA, 33 bp, Homo sapien
tacagctcccgagatacctgctcattctaattt

SEQ ID NO: 124026 - DNA, 33 bp, Homo sapien
tacagctcccgagatatctgctcattctaattt

SEQ ID NO: 124027 - DNA, 33 bp, Homo sapien
atgtggatcacggtacactgtaggataccatga

SEQ ID NO: 124028 - DNA, 33 bp, Homo sapien
atgtggatcacggtactctgtaggataccatga

SEQ ID NO: 124029 - DNA, 33 bp, Homo sapien
aaactgagttaaagcaagtaagaggcctaaagg

SEQ ID NO: 124030 - DNA, 33 bp, Homo sapien
aaactgagttaaagcaggtaagaggcctaaagg

SEQ ID NO: 124031 - DNA, 33 bp, Homo sapien
cactattacatgagaggccagtattaataaatt

SEQ ID NO: 124032 - DNA, 33 bp, Homo sapien
cactattacatgagagtccagtattaataaatt

SEQ ID NO: 124033 - DNA, 33 bp, Homo sapien
atggctaaaacccttcaagtgcttctccttctt

SEQ ID NO: 124034 - DNA, 33 bp, Homo sapien
atggctaaaacccttcgagtgcttctccttctt

SEQ ID NO: 124035 - DNA, 33 bp, Homo sapien
attcagtcccattcagaccaattcagggtcaac

SEQ ID NO: 124036 - DNA, 33 bp, Homo sapien
attcagtcccattcagtccaattcagggtcaac

SEQ ID NO: 124037 - DNA, 33 bp, Homo sapien
gtctgactgattttgcactactagctgcacatg

SEQ ID NO: 124038 - DNA, 33 bp, Homo sapien
gtctgactgattttgcgctactagctgcacatg

SEQ ID NO: 124039 - DNA, 33 bp, Homo sapien
atgattgttatctgcaagtggtgtttttgctgt

SEQ ID NO: 124040 - DNA, 33 bp, Homo sapien
atgattgttatctgcacgtggtgtttttgctgt

SEQ ID NO: 124041 - DNA, 33 bp, Homo sapien
aaagtctggaccattgaaattatactaagagag

SEQ ID NO: 124042 - DNA, 33 bp, Homo sapien
aaagtctggaccattgcaattatactaagagag

SEQ ID NO: 124043 - DNA, 33 bp, Homo sapien
ttataaaagggcaataacagtgataccagaacc

SEQ ID NO: 124044 - DNA, 33 bp, Homo sapien
ttataaaagggcaatagcagtgataccagaacc

SEQ ID NO: 124045 - DNA, 33 bp, Homo sapien
gaaagagacaaagacagaattatcaatatcaga

SEQ ID NO: 124046 - DNA, 33 bp, Homo sapien
gaaagagacaaagacataattatcaatatcaga

SEQ ID NO: 124047 - DNA, 33 bp, Homo sapien
agtcaggaaatttttgcatccacatataacctg

SEQ ID NO: 124048 - DNA, 33 bp, Homo sapien
agtcaggaaatttttgtatccacatataacctg

SEQ ID NO: 124049 - DNA, 33 bp, Homo sapien
gtgatttcaggcatcaactgggactttggaaca

SEQ ID NO: 124050 - DNA, 33 bp, Homo sapien
gtgatttcaggcatcagctgggactttggaaca

SEQ ID NO: 124051 - DNA, 33 bp, Homo sapien
aaaaagagttgtttcacatgcattaacttggaa

SEQ ID NO: 124052 - DNA, 33 bp, Homo sapien
aaaaagagttgtttcatatgcattaacttggaa

SEQ ID NO: 124053 - DNA, 33 bp, Homo sapien
cactgattcctgcagactatgccagctcaaaac

SEQ ID NO: 124054 - DNA, 33 bp, Homo sapien
cactgattcctgcagattatgccagctcaaaac

SEQ ID NO: 124055 - DNA, 33 bp, Homo sapien
agccaattcctcttggaaatgtatccatccacc

SEQ ID NO: 124056 - DNA, 33 bp, Homo sapien
agccaattcctcttgggaatgtatccatccacc

SEQ ID NO: 124057 - DNA, 33 bp, Homo sapien
agatcagaaagaatcaaccatagagggtggatg

SEQ ID NO: 124058 - DNA, 33 bp, Homo sapien
agatcagaaagaatcagccatagagggtggatg

SEQ ID NO: 124059 - DNA, 33 bp, Homo sapien
aggaggttaagtagatcagaaaaatctgacttc

SEQ ID NO: 124060 - DNA, 33 bp, Homo sapien
aggaggttaagtagatgagaaaaatctgacttc

SEQ ID NO: 124061 - DNA, 33 bp, Homo sapien
ttaacatcagatagccaaacctggagtgcaaag

SEQ ID NO: 124062 - DNA, 33 bp, Homo sapien
ttaacatcagatagcccaacctggagtgcaaag

SEQ ID NO: 124063 - DNA, 33 bp, Homo sapien
tctgagtctaaagttccacctctgtgtcctttc

SEQ ID NO: 124064 - DNA, 33 bp, Homo sapien
tctgagtctaaagttctacctctgtgtcctttc

SEQ ID NO: 124065 - DNA, 33 bp, Homo sapien
tggagtctttagaaggcagttgaggttagatga

SEQ ID NO: 124066 - DNA, 33 bp, Homo sapien
tggagtctttagaaggtagttgaggttagatga

SEQ ID NO: 124067 - DNA, 33 bp, Homo sapien
ggtgtctcttcttctaagggcactaatcacatc

SEQ ID NO: 124068 - DNA, 33 bp, Homo sapien
ggtgtctcttcttctacgggcactaatcacatc

SEQ ID NO: 124069 - DNA, 33 bp, Homo sapien
aggcttttgtgaccataagaattctgaaaggca

SEQ ID NO: 124070 - DNA, 33 bp, Homo sapien
aggcttttgtgaccattagaattctgaaaggca

SEQ ID NO: 124071 - DNA, 33 bp, Homo sapien
tgataaggatctcaggaataactaattaaaaat

SEQ ID NO: 124072 - DNA, 33 bp, Homo sapien
tgataaggatctcagggataactaattaaaaat

SEQ ID NO: 124073 - DNA, 33 bp, Homo sapien
aagcttgatatcaaaacgggagcaaactttttc

SEQ ID NO: 124074 - DNA, 33 bp, Homo sapien
aagcttgatatcaaaatgggagcaaactttttc

SEQ ID NO: 124075 - DNA, 33 bp, Homo sapien
gtggacacaggagacaactgagtctatttttta

SEQ ID NO: 124076 - DNA, 33 bp, Homo sapien
gtggacacaggagacacctgagtctatttttta

SEQ ID NO: 124077 - DNA, 33 bp, Homo sapien
cacatatatattcctgacacagcaagtctactc

SEQ ID NO: 124078 - DNA, 33 bp, Homo sapien
cacatatatattcctgtcacagcaagtctactc

SEQ ID NO: 124079 - DNA, 33 bp, Homo sapien
tgtgttacaattaggccctctacatccaaaggc

SEQ ID NO: 124080 - DNA, 33 bp, Homo sapien
tgtgttacaattaggctctctacatccaaaggc

SEQ ID NO: 124081 - DNA, 33 bp, Homo sapien
ttacattgacctcagcaaaatagttaggagtgg

SEQ ID NO: 124082 - DNA, 33 bp, Homo sapien
ttacattgacctcagcgaaatagttaggagtgg

SEQ ID NO: 124083 - DNA, 33 bp, Homo sapien
aagaatgattaaaaaaacagttcacattgtgct

SEQ ID NO: 124084 - DNA, 33 bp, Homo sapien
aagaatgattaaaaaagcagttcacattgtgct

SEQ ID NO: 124085 - DNA, 33 bp, Homo sapien
ccacttcataggccacagctatattcttgctac

SEQ ID NO: 124086 - DNA, 33 bp, Homo sapien
ccacttcataggccacggctatattcttgctac

SEQ ID NO: 124087 - DNA, 33 bp, Homo sapien
ggcaagtattgggaaaaaccagtaactaccaga

SEQ ID NO: 124088 - DNA, 33 bp, Homo sapien
ggcaagtattgggaaagaccagtaactaccaga

SEQ ID NO: 124089 - DNA, 33 bp, Homo sapien
gattgagttgtttaaaccacccttatcaagagt

SEQ ID NO: 124090 - DNA, 33 bp, Homo sapien
gattgagttgtttaaatcacccttatcaagagt

SEQ ID NO: 124091 - DNA, 33 bp, Homo sapien
aaggtaagaaccataaagatggacaaagatcat

SEQ ID NO: 124092 - DNA, 33 bp, Homo sapien
aaggtaagaaccataaggatggacaaagatcat

SEQ ID NO: 124093 - DNA, 33 bp, Homo sapien
tcatcttgcttctacccgaggctcacagtcgtg

SEQ ID NO: 124094 - DNA, 33 bp, Homo sapien
tcatcttgcttctacctgaggctcacagtcgtg

SEQ ID NO: 124095 - DNA, 33 bp, Homo sapien
gtgtttctttctgtcccacaagtactttctgaa

SEQ ID NO: 124096 - DNA, 33 bp, Homo sapien
gtgtttctttctgtcctacaagtactttctgaa

SEQ ID NO: 124097 - DNA, 33 bp, Homo sapien
gcaattgcagactttaaaccagtttcagcagcg

SEQ ID NO: 124098 - DNA, 33 bp, Homo sapien
gcaattgcagactttataccagtttcagcagcg

SEQ ID NO: 124099 - DNA, 33 bp, Homo sapien
taatgtctgatttatacagggcctgagaaattg

SEQ ID NO: 124100 - DNA, 33 bp, Homo sapien
taatgtctgatttatatagggcctgagaaattg

SEQ ID NO: 124101 - DNA, 33 bp, Homo sapien
gtatcatggctgaagacaatggcaatatctgta

SEQ ID NO: 124102 - DNA, 33 bp, Homo sapien
gtatcatggctgaagataatggcaatatctgta

SEQ ID NO: 124103 - DNA, 33 bp, Homo sapien
ctggagaattcctcaactgactgattcatcccc

SEQ ID NO: 124104 - DNA, 33 bp, Homo sapien
ctggagaattcctcaagtgactgattcatcccc

SEQ ID NO: 124105 - DNA, 33 bp, Homo sapien
atcatgcacctgccaccggagttgggaaatgct

SEQ ID NO: 124106 - DNA, 33 bp, Homo sapien
atcatgcacctgccactggagttgggaaatgct

SEQ ID NO: 124107 - DNA, 33 bp, Homo sapien
cagtaaaaagtcttcccatggcttctcttatct

SEQ ID NO: 124108 - DNA, 33 bp, Homo sapien
cagtaaaaagtcttcctatggcttctcttatct

SEQ ID NO: 124109 - DNA, 33 bp, Homo sapien
tataaattgttgatgaataagtatcctgcttgt

SEQ ID NO: 124110 - DNA, 33 bp, Homo sapien
tataaattgttgatgagtaagtatcctgcttgt

SEQ ID NO: 124111 - DNA, 33 bp, Homo sapien
tggttatgtgtcaatggattccctatcaccttt

SEQ ID NO: 124112 - DNA, 33 bp, Homo sapien
tggttatgtgtcaatgtattccctatcaccttt

SEQ ID NO: 124113 - DNA, 33 bp, Homo sapien
tattggtgtgggtgtgaagaaaaaagaaccctt

SEQ ID NO: 124114 - DNA, 33 bp, Homo sapien
tattggtgtgggtgtggagaaaaaagaaccctt

SEQ ID NO: 124115 - DNA, 33 bp, Homo sapien
ttaaatttactcctaaatatttcggtagctatt

SEQ ID NO: 124116 - DNA, 33 bp, Homo sapien
ttaaatttactcctaagtatttcggtagctatt

SEQ ID NO: 124117 - DNA, 33 bp, Homo sapien
tagaagaaatggcctgaaacacaataatgggca

SEQ ID NO: 124118 - DNA, 33 bp, Homo sapien
tagaagaaatggcctgcaacacaataatgggca

SEQ ID NO: 124119 - DNA, 33 bp, Homo sapien
acataaaaatcattgaaaaaacactggcaaagt

SEQ ID NO: 124120 - DNA, 33 bp, Homo sapien
acataaaaatcattgagaaaacactggcaaagt

SEQ ID NO: 124121 - DNA, 33 bp, Homo sapien
cagagaagtgaaagaaaacacctgagtcacaga

SEQ ID NO: 124122 - DNA, 33 bp, Homo sapien
cagagaagtgaaagaagacacctgagtcacaga

SEQ ID NO: 124123 - DNA, 33 bp, Homo sapien
gactccctctttagagcaatgttgtcatgcaaa

SEQ ID NO: 124124 - DNA, 33 bp, Homo sapien
gactccctctttagagtaatgttgtcatgcaaa

SEQ ID NO: 124125 - DNA, 33 bp, Homo sapien
gcttaacagagttgtaaccagcaatggggaagg

SEQ ID NO: 124126 - DNA, 33 bp, Homo sapien
gcttaacagagttgtacccagcaatggggaagg

SEQ ID NO: 124127 - DNA, 33 bp, Homo sapien
ggacacagagccaaaccgtactattccaccgct

SEQ ID NO: 124128 - DNA, 33 bp, Homo sapien
ggacacagagccaaactgtactattccaccgct

SEQ ID NO: 124129 - DNA, 33 bp, Homo sapien
ttctatttctgtgaaaaatgcttcggtatttca

SEQ ID NO: 124130 - DNA, 33 bp, Homo sapien
ttctatttctgtgaaagatgcttcggtatttca

SEQ ID NO: 124131 - DNA, 33 bp, Homo sapien
atgaaaaaaacagtcaacaataggaaagaattg

SEQ ID NO: 124132 - DNA, 33 bp, Homo sapien
atgaaaaaaacagtcaccaataggaaagaattg

SEQ ID NO: 124133 - DNA, 33 bp, Homo sapien
accaaacatttgtcgaatattgaattaacactt

SEQ ID NO: 124134 - DNA, 33 bp, Homo sapien
accaaacatttgtcgactattgaattaacactt

SEQ ID NO: 124135 - DNA, 33 bp, Homo sapien
aagtatggtttttatccaggcatcaagttttat

SEQ ID NO: 124136 - DNA, 33 bp, Homo sapien
aagtatggtttttatctaggcatcaagttttat

SEQ ID NO: 124137 - DNA, 33 bp, Homo sapien
gaaagtttctgggccccggagaaatgtccatct

SEQ ID NO: 124138 - DNA, 33 bp, Homo sapien
gaaagtttctgggccctggagaaatgtccatct

SEQ ID NO: 124139 - DNA, 33 bp, Homo sapien
gagagttgagggttgaaaaattatctattgagt

SEQ ID NO: 124140 - DNA, 33 bp, Homo sapien
gagagttgagggttgagaaattatctattgagt

SEQ ID NO: 124141 - DNA, 33 bp, Homo sapien
atgttccttttatgcccgatttgctgagaattt

SEQ ID NO: 124142 - DNA, 33 bp, Homo sapien
atgttccttttatgcctgatttgctgagaattt

SEQ ID NO: 124143 - DNA, 33 bp, Homo sapien
cttcacattgacattgaaggatgtgatgactat

SEQ ID NO: 124144 - DNA, 33 bp, Homo sapien
cttcacattgacattggaggatgtgatgactat

SEQ ID NO: 124145 - DNA, 33 bp, Homo sapien
acatcccaaagaaacaaatcagctctcttgcca

SEQ ID NO: 124146 - DNA, 33 bp, Homo sapien
acatcccaaagaaacacatcagctctcttgcca

SEQ ID NO: 124147 - DNA, 33 bp, Homo sapien
ttgcagcactattcgcaatggcagagacagaat

SEQ ID NO: 124148 - DNA, 33 bp, Homo sapien
ttgcagcactattcgcgatggcagagacagaat

SEQ ID NO: 124149 - DNA, 33 bp, Homo sapien
tccagcaaatgtgtgaacttaaagaagtgaaac

SEQ ID NO: 124150 - DNA, 33 bp, Homo sapien
tccagcaaatgtgtgatcttaaagaagtgaaac

SEQ ID NO: 124151 - DNA, 33 bp, Homo sapien
cttataagaaaaacaccctggagaagttgtagg

SEQ ID NO: 124152 - DNA, 33 bp, Homo sapien
cttataagaaaaacactctggagaagttgtagg

SEQ ID NO: 124153 - DNA, 33 bp, Homo sapien
agactatgtcaggctacagaaattgctaggtca

SEQ ID NO: 124154 - DNA, 33 bp, Homo sapien
agactatgtcaggctatagaaattgctaggtca

SEQ ID NO: 124155 - DNA, 33 bp, Homo sapien
tggtaacaaacagaaacgtgtgaaattgttcag

SEQ ID NO: 124156 - DNA, 33 bp, Homo sapien
tggtaacaaacagaaatgtgtgaaattgttcag

SEQ ID NO: 124157 - DNA, 33 bp, Homo sapien
gtcctgtgtgatacacggtcttccttagtcttt

SEQ ID NO: 124158 - DNA, 33 bp, Homo sapien
gtcctgtgtgatacactgtcttccttagtcttt

SEQ ID NO: 124159 - DNA, 33 bp, Homo sapien
gtttgtgtatgaattgacaacttttttagtacc

SEQ ID NO: 124160 - DNA, 33 bp, Homo sapien
gtttgtgtatgaattgccaacttttttagtacc

SEQ ID NO: 124161 - DNA, 33 bp, Homo sapien
tgcatatttgtcgtcactcttttcttgttgatc

SEQ ID NO: 124162 - DNA, 33 bp, Homo sapien
tgcatatttgtcgtcattcttttcttgttgatc

SEQ ID NO: 124163 - DNA, 33 bp, Homo sapien
tactgtcttgagtcaggcatcaaaaaaccttat

SEQ ID NO: 124164 - DNA, 33 bp, Homo sapien
tactgtcttgagtcagtcatcaaaaaaccttat

SEQ ID NO: 124165 - DNA, 33 bp, Homo sapien
tagattccaaggtagaaattgcacagagatggt

SEQ ID NO: 124166 - DNA, 33 bp, Homo sapien
tagattccaaggtagagattgcacagagatggt

SEQ ID NO: 124167 - DNA, 33 bp, Homo sapien
tccatattatttaccccgcttctattttcaata

SEQ ID NO: 124168 - DNA, 33 bp, Homo sapien
tccatattatttaccctgcttctattttcaata

SEQ ID NO: 124169 - DNA, 33 bp, Homo sapien
cttattgctttcatgacgtatcttttcctattc

SEQ ID NO: 124170 - DNA, 33 bp, Homo sapien
cttattgctttcatgatgtatcttttcctattc

SEQ ID NO: 124171 - DNA, 33 bp, Homo sapien
tgatggtggctcacacaagagtggtatgaatag

SEQ ID NO: 124172 - DNA, 33 bp, Homo sapien
tgatggtggctcacaccagagtggtatgaatag

SEQ ID NO: 124173 - DNA, 33 bp, Homo sapien
tggaggtcattagagaggccagttgaagcttag

SEQ ID NO: 124174 - DNA, 33 bp, Homo sapien
tggaggtcattagagatgccagttgaagcttag

SEQ ID NO: 124175 - DNA, 33 bp, Homo sapien
ccaggtctctacctgccccaagcctgatagttg

SEQ ID NO: 124176 - DNA, 33 bp, Homo sapien
ccaggtctctacctgctccaagcctgatagttg

SEQ ID NO: 124177 - DNA, 33 bp, Homo sapien
acaagatacagaggagacacctcaaaagtcaga

SEQ ID NO: 124178 - DNA, 33 bp, Homo sapien
acaagatacagaggaggcacctcaaaagtcaga

SEQ ID NO: 124179 - DNA, 33 bp, Homo sapien
tcatgttttatcctcacagttgtagaggctaaa

SEQ ID NO: 124180 - DNA, 33 bp, Homo sapien
tcatgttttatcctcagagttgtagaggctaaa

SEQ ID NO: 124181 - DNA, 33 bp, Homo sapien
gatttgcttctgtaaggacctaagttgtccatg

SEQ ID NO: 124182 - DNA, 33 bp, Homo sapien
gatttgcttctgtaagtacctaagttgtccatg

SEQ ID NO: 124183 - DNA, 33 bp, Homo sapien
atggccttgacacaggaaggttcttatcaatta

SEQ ID NO: 124184 - DNA, 33 bp, Homo sapien
atggccttgacacaggtaggttcttatcaatta

SEQ ID NO: 124185 - DNA, 33 bp, Homo sapien
ggtaattggcctgaaacttaaacttagtgctct

SEQ ID NO: 124186 - DNA, 33 bp, Homo sapien
ggtaattggcctgaaatttaaacttagtgctct

SEQ ID NO: 124187 - DNA, 33 bp, Homo sapien
acgcagggtggaaagcacaatcacagcaaagtc

SEQ ID NO: 124188 - DNA, 33 bp, Homo sapien
acgcagggtggaaagcgcaatcacagcaaagtc

SEQ ID NO: 124189 - DNA, 33 bp, Homo sapien
agagaggccaagatcaatcataatgtgggtgag

SEQ ID NO: 124190 - DNA, 33 bp, Homo sapien
agagaggccaagatcattcataatgtgggtgag

SEQ ID NO: 124191 - DNA, 33 bp, Homo sapien
tagagctggggctacaaagatcttacaatttgc

SEQ ID NO: 124192 - DNA, 33 bp, Homo sapien
tagagctggggctacagagatcttacaatttgc

SEQ ID NO: 124193 - DNA, 33 bp, Homo sapien
tttgagtaggaatcataatatgtctaaaagttt

SEQ ID NO: 124194 - DNA, 33 bp, Homo sapien
tttgagtaggaatcatgatatgtctaaaagttt

SEQ ID NO: 124195 - DNA, 33 bp, Homo sapien
ataataaatctacccactctcttcctgaagagt

SEQ ID NO: 124196 - DNA, 33 bp, Homo sapien
ataataaatctacccattctcttcctgaagagt

SEQ ID NO: 124197 - DNA, 33 bp, Homo sapien
tttgtaaggtcattagaaccttgattccaaaat

SEQ ID NO: 124198 - DNA, 33 bp, Homo sapien
tttgtaaggtcattagcaccttgattccaaaat

SEQ ID NO: 124199 - DNA, 33 bp, Homo sapien
attgctggtgattttggagttcagaattactgg

SEQ ID NO: 124200 - DNA, 33 bp, Homo sapien
attgctggtgattttgtagttcagaattactgg

SEQ ID NO: 124201 - DNA, 33 bp, Homo sapien
gaataacccatgttaacgttgctttcaagcata

SEQ ID NO: 124202 - DNA, 33 bp, Homo sapien
gaataacccatgttaaggttgctttcaagcata

SEQ ID NO: 124203 - DNA, 33 bp, Homo sapien
tagaagtccaagacacaagggcagttgtcccaa

SEQ ID NO: 124204 - DNA, 33 bp, Homo sapien
tagaagtccaagacacgagggcagttgtcccaa

SEQ ID NO: 124205 - DNA, 33 bp, Homo sapien
tcactgagggcaaggacgaacaagactccagtt

SEQ ID NO: 124206 - DNA, 33 bp, Homo sapien
tcactgagggcaaggatgaacaagactccagtt

SEQ ID NO: 124207 - DNA, 33 bp, Homo sapien
ctcttttggctcaacccaaagtgtctggcactg

SEQ ID NO: 124208 - DNA, 33 bp, Homo sapien
ctcttttggctcaacctaaagtgtctggcactg

SEQ ID NO: 124209 - DNA, 33 bp, Homo sapien
agggctccacagaaaaactgaggaagccaaagg

SEQ ID NO: 124210 - DNA, 33 bp, Homo sapien
agggctccacagaaaagctgaggaagccaaagg

SEQ ID NO: 124211 - DNA, 33 bp, Homo sapien
cctttcagcatatccaaagtctgtctcatttcc

SEQ ID NO: 124212 - DNA, 33 bp, Homo sapien
cctttcagcatatccacagtctgtctcatttcc

SEQ ID NO: 124213 - DNA, 33 bp, Homo sapien
gtaagttaggtttcagcctctacagtctccaac

SEQ ID NO: 124214 - DNA, 33 bp, Homo sapien
gtaagttaggtttcaggctctacagtctccaac

SEQ ID NO: 124215 - DNA, 33 bp, Homo sapien
aaacaggtgagaagcaatatcagaatatctaac

SEQ ID NO: 124216 - DNA, 33 bp, Homo sapien
aaacaggtgagaagcagtatcagaatatctaac

SEQ ID NO: 124217 - DNA, 33 bp, Homo sapien
ggcacatttgcaagtcaatctgtgagctgggtt

SEQ ID NO: 124218 - DNA, 33 bp, Homo sapien
ggcacatttgcaagtcgatctgtgagctgggtt

SEQ ID NO: 124219 - DNA, 33 bp, Homo sapien
attcagggtaaatttcaaatgttatatctgctt

SEQ ID NO: 124220 - DNA, 33 bp, Homo sapien
attcagggtaaatttcgaatgttatatctgctt

SEQ ID NO: 124221 - DNA, 33 bp, Homo sapien
ctatccacgcctgggaaaatgacctccaacttg

SEQ ID NO: 124222 - DNA, 33 bp, Homo sapien
ctatccacgcctgggagaatgacctccaacttg

SEQ ID NO: 124223 - DNA, 33 bp, Homo sapien
ttctagacctgcttggccataatttgtgacact

SEQ ID NO: 124224 - DNA, 33 bp, Homo sapien
ttctagacctgcttggtcataatttgtgacact

SEQ ID NO: 124225 - DNA, 33 bp, Homo sapien
gtagacttcctccaagaaacaaagagcaggaga

SEQ ID NO: 124226 - DNA, 33 bp, Homo sapien
gtagacttcctccaagtaacaaagagcaggaga

SEQ ID NO: 124227 - DNA, 33 bp, Homo sapien
ttccttcagatgtaagaaaaatgtcttcctgtg

SEQ ID NO: 124228 - DNA, 33 bp, Homo sapien
ttccttcagatgtaaggaaaatgtcttcctgtg

SEQ ID NO: 124229 - DNA, 33 bp, Homo sapien
actctacccataccgaaacttacactcttttga

SEQ ID NO: 124230 - DNA, 33 bp, Homo sapien
actctacccataccgagacttacactcttttga

SEQ ID NO: 124231 - DNA, 33 bp, Homo sapien
tagaattgcaaacagactagatggtcaatgtgc

SEQ ID NO: 124232 - DNA, 33 bp, Homo sapien
tagaattgcaaacagattagatggtcaatgtgc

SEQ ID NO: 124233 - DNA, 33 bp, Homo sapien
ctaataaaaatcctgaagatatgcagaaattct

SEQ ID NO: 124234 - DNA, 33 bp, Homo sapien
ctaataaaaatcctgatgatatgcagaaattct

SEQ ID NO: 124235 - DNA, 33 bp, Homo sapien
ttccaagtcctgccaaccaggataaatcattta

SEQ ID NO: 124236 - DNA, 33 bp, Homo sapien
ttccaagtcctgccaatcaggataaatcattta

SEQ ID NO: 124237 - DNA, 33 bp, Homo sapien
gcatcctggtatatcaacaaactgggtttgaat

SEQ ID NO: 124238 - DNA, 33 bp, Homo sapien
gcatcctggtatatcatcaaactgggtttgaat

SEQ ID NO: 124239 - DNA, 33 bp, Homo sapien
cctgcagccgatgttcactactgtccaggggcc

SEQ ID NO: 124240 - DNA, 33 bp, Homo sapien
cctgcagccgatgttcgctactgtccaggggcc

SEQ ID NO: 124241 - DNA, 33 bp, Homo sapien
tactctctggctaccacataagctaaaaaatag

SEQ ID NO: 124242 - DNA, 33 bp, Homo sapien
tactctctggctaccatataagctaaaaaatag

SEQ ID NO: 124243 - DNA, 33 bp, Homo sapien
ttgttgaaggaacgaaactcctaattttacaat

SEQ ID NO: 124244 - DNA, 33 bp, Homo sapien
ttgttgaaggaacgaacctcctaattttacaat

SEQ ID NO: 124245 - DNA, 33 bp, Homo sapien
tgagaaactgggttgtaaactacctgctaattt

SEQ ID NO: 124246 - DNA, 33 bp, Homo sapien
tgagaaactgggttgtgaactacctgctaattt

SEQ ID NO: 124247 - DNA, 33 bp, Homo sapien
agaaaaagaaagccaaatatacccagtccttta

SEQ ID NO: 124248 - DNA, 33 bp, Homo sapien
agaaaaagaaagccaattatacccagtccttta

SEQ ID NO: 124249 - DNA, 33 bp, Homo sapien
tctctgtgtgagctcaagcaaatatctctgcct

SEQ ID NO: 124250 - DNA, 33 bp, Homo sapien
tctctgtgtgagctcaggcaaatatctctgcct

SEQ ID NO: 124251 - DNA, 33 bp, Homo sapien
gatgtttcctgtcttccaatgtcggactccaag

SEQ ID NO: 124252 - DNA, 33 bp, Homo sapien
gatgtttcctgtcttcgaatgtcggactccaag

SEQ ID NO: 124253 - DNA, 33 bp, Homo sapien
taaaggttatagaagaataaaatgtaatgttta

SEQ ID NO: 124254 - DNA, 33 bp, Homo sapien
taaaggttatagaagattaaaatgtaatgttta

SEQ ID NO: 124255 - DNA, 33 bp, Homo sapien
cagttcaggagaaacaatgagctttcgtgtctc

SEQ ID NO: 124256 - DNA, 33 bp, Homo sapien
cagttcaggagaaacagtgagctttcgtgtctc

SEQ ID NO: 124257 - DNA, 33 bp, Homo sapien
gcctggaaaaatgacaaaagtgagatgaggagg

SEQ ID NO: 124258 - DNA, 33 bp, Homo sapien
gcctggaaaaatgacagaagtgagatgaggagg

SEQ ID NO: 124259 - DNA, 33 bp, Homo sapien
gactccagggactgtacagaacatcattaacat

SEQ ID NO: 124260 - DNA, 33 bp, Homo sapien
gactccagggactgtatagaacatcattaacat

SEQ ID NO: 124261 - DNA, 33 bp, Homo sapien
tttattattggaaatgaagcctcctcctgctct

SEQ ID NO: 124262 - DNA, 33 bp, Homo sapien
tttattattggaaatggagcctcctcctgctct

SEQ ID NO: 124263 - DNA, 33 bp, Homo sapien
tataatatgtgttacaggtatagagagagggag

SEQ ID NO: 124264 - DNA, 33 bp, Homo sapien
tataatatgtgttacatgtatagagagagggag

SEQ ID NO: 124265 - DNA, 33 bp, Homo sapien
gtaactaccataatgccctccaagtcctctaat

SEQ ID NO: 124266 - DNA, 33 bp, Homo sapien
gtaactaccataatgctctccaagtcctctaat

SEQ ID NO: 124267 - DNA, 33 bp, Homo sapien
attgtagtactagaaccaagccttcacatctca

SEQ ID NO: 124268 - DNA, 33 bp, Homo sapien
attgtagtactagaactaagccttcacatctca

SEQ ID NO: 124269 - DNA, 33 bp, Homo sapien
atggcaaaagtaattcaaggctttgagaaattg

SEQ ID NO: 124270 - DNA, 33 bp, Homo sapien
atggcaaaagtaattccaggctttgagaaattg

SEQ ID NO: 124271 - DNA, 33 bp, Homo sapien
cttagagagagtgattcaagacaatagaaagtg

SEQ ID NO: 124272 - DNA, 33 bp, Homo sapien
cttagagagagtgatttaagacaatagaaagtg

SEQ ID NO: 124273 - DNA, 33 bp, Homo sapien
tttgccaacatcaggacattacatggagataat

SEQ ID NO: 124274 - DNA, 33 bp, Homo sapien
tttgccaacatcaggatattacatggagataat

SEQ ID NO: 124275 - DNA, 33 bp, Homo sapien
agagtcccatttttcacagggtttctacatcca

SEQ ID NO: 124276 - DNA, 33 bp, Homo sapien
agagtcccatttttcatagggtttctacatcca

SEQ ID NO: 124277 - DNA, 33 bp, Homo sapien
tctggtgcaatccaccagagtctcctggccacc

SEQ ID NO: 124278 - DNA, 33 bp, Homo sapien
tctggtgcaatccaccggagtctcctggccacc

SEQ ID NO: 124279 - DNA, 33 bp, Homo sapien
agagaccccagaggaaagaaccatccagctgag

SEQ ID NO: 124280 - DNA, 33 bp, Homo sapien
agagaccccagaggaaggaaccatccagctgag

SEQ ID NO: 124281 - DNA, 33 bp, Homo sapien
gacacttatttctctacgcttaatgttctcatc

SEQ ID NO: 124282 - DNA, 33 bp, Homo sapien
gacacttatttctctatgcttaatgttctcatc

SEQ ID NO: 124283 - DNA, 33 bp, Homo sapien
ttcattcacaacaccacgagggaaccttactat

SEQ ID NO: 124284 - DNA, 33 bp, Homo sapien
ttcattcacaacaccatgagggaaccttactat

SEQ ID NO: 124285 - DNA, 33 bp, Homo sapien
aaaattttaattcccaatctaagttcagccagg

SEQ ID NO: 124286 - DNA, 33 bp, Homo sapien
aaaattttaattcccagtctaagttcagccagg

SEQ ID NO: 124287 - DNA, 33 bp, Homo sapien
cactgtgacatcagtaacattatccccatttta

SEQ ID NO: 124288 - DNA, 33 bp, Homo sapien
cactgtgacatcagtatcattatccccatttta

SEQ ID NO: 124289 - DNA, 33 bp, Homo sapien
cctctctagtcccccaatatgtatctcgatgcc

SEQ ID NO: 124290 - DNA, 33 bp, Homo sapien
cctctctagtcccccagtatgtatctcgatgcc

SEQ ID NO: 124291 - DNA, 33 bp, Homo sapien
aaataatttttcccagactagagcaaggttctc

SEQ ID NO: 124292 - DNA, 33 bp, Homo sapien
aaataatttttcccagtctagagcaaggttctc

SEQ ID NO: 124293 - DNA, 33 bp, Homo sapien
ggatcatgagtccaaacaggtcaattgtggagc

SEQ ID NO: 124294 - DNA, 33 bp, Homo sapien
ggatcatgagtccaaataggtcaattgtggagc

SEQ ID NO: 124295 - DNA, 33 bp, Homo sapien
tttctactcttctgctaagatttatttcattgt

SEQ ID NO: 124296 - DNA, 33 bp, Homo sapien
tttctactcttctgctgagatttatttcattgt

SEQ ID NO: 124297 - DNA, 33 bp, Homo sapien
cttagaaagagatttggaaacaaaccagagaac

SEQ ID NO: 124298 - DNA, 33 bp, Homo sapien
cttagaaagagatttgtaaacaaaccagagaac

SEQ ID NO: 124299 - DNA, 33 bp, Homo sapien
caaagggaggagagtacaatgagacatgtccca

SEQ ID NO: 124300 - DNA, 33 bp, Homo sapien
caaagggaggagagtataatgagacatgtccca

SEQ ID NO: 124301 - DNA, 33 bp, Homo sapien
gtatagttatgtgaccgaatacatttcctttta

SEQ ID NO: 124302 - DNA, 33 bp, Homo sapien
gtatagttatgtgacctaatacatttcctttta

SEQ ID NO: 124303 - DNA, 33 bp, Homo sapien
cctgtctaaccctcataagaaagatcctggttg

SEQ ID NO: 124304 - DNA, 33 bp, Homo sapien
cctgtctaaccctcatgagaaagatcctggttg

SEQ ID NO: 124305 - DNA, 33 bp, Homo sapien
tgagacaagcaagagaatactcccatccacaat

SEQ ID NO: 124306 - DNA, 33 bp, Homo sapien
tgagacaagcaagagactactcccatccacaat

SEQ ID NO: 124307 - DNA, 33 bp, Homo sapien
agcttggccatcacccccttatccagaccattg

SEQ ID NO: 124308 - DNA, 33 bp, Homo sapien
agcttggccatcaccctcttatccagaccattg

SEQ ID NO: 124309 - DNA, 33 bp, Homo sapien
aaagagggttcctagcaattgtgtgaaacatga

SEQ ID NO: 124310 - DNA, 33 bp, Homo sapien
aaagagggttcctagcgattgtgtgaaacatga

SEQ ID NO: 124311 - DNA, 33 bp, Homo sapien
ttttcttcctggaaaaatttgctgcaagaccgc

SEQ ID NO: 124312 - DNA, 33 bp, Homo sapien
ttttcttcctggaaaagtttgctgcaagaccgc

SEQ ID NO: 124313 - DNA, 33 bp, Homo sapien
atcagccaggccctgaaaatactatggctctat

SEQ ID NO: 124314 - DNA, 33 bp, Homo sapien
atcagccaggccctgagaatactatggctctat

SEQ ID NO: 124315 - DNA, 33 bp, Homo sapien
cattccctttcaaaataactgtgagagtggcag

SEQ ID NO: 124316 - DNA, 33 bp, Homo sapien
cattccctttcaaaatgactgtgagagtggcag

SEQ ID NO: 124317 - DNA, 33 bp, Homo sapien
agcaggtgatcatgtacgggtgcaattgcttcc

SEQ ID NO: 124318 - DNA, 33 bp, Homo sapien
agcaggtgatcatgtatgggtgcaattgcttcc

SEQ ID NO: 124319 - DNA, 33 bp, Homo sapien
gcagttaaagtaaccacggaactcaccaatgag

SEQ ID NO: 124320 - DNA, 33 bp, Homo sapien
gcagttaaagtaaccatggaactcaccaatgag

SEQ ID NO: 124321 - DNA, 33 bp, Homo sapien
tctgcaaaacatgttcaaaaccaacaataacat

SEQ ID NO: 124322 - DNA, 33 bp, Homo sapien
tctgcaaaacatgttcgaaaccaacaataacat

SEQ ID NO: 124323 - DNA, 33 bp, Homo sapien
ttaatgtgatgtctgaaattgcttcaaaataac

SEQ ID NO: 124324 - DNA, 33 bp, Homo sapien
ttaatgtgatgtctgagattgcttcaaaataac

SEQ ID NO: 124325 - DNA, 33 bp, Homo sapien
ctgcctccaaacataccactgccctgggatgct

SEQ ID NO: 124326 - DNA, 33 bp, Homo sapien
ctgcctccaaacatactactgccctgggatgct

SEQ ID NO: 124327 - DNA, 33 bp, Homo sapien
taacacagcgaaacaccgtgtctacttaaatta

SEQ ID NO: 124328 - DNA, 33 bp, Homo sapien
taacacagcgaaacacggtgtctacttaaatta

SEQ ID NO: 124329 - DNA, 33 bp, Homo sapien
cctaacacagctgaccagaaaattaaaagatat

SEQ ID NO: 124330 - DNA, 33 bp, Homo sapien
cctaacacagctgaccggaaaattaaaagatat

SEQ ID NO: 124331 - DNA, 33 bp, Homo sapien
gataaaacctggcaagactgtttctctaagaca

SEQ ID NO: 124332 - DNA, 33 bp, Homo sapien
gataaaacctggcaaggctgtttctctaagaca

SEQ ID NO: 124333 - DNA, 33 bp, Homo sapien
agggtcggttcaagacaagaagcatctgtatct

SEQ ID NO: 124334 - DNA, 33 bp, Homo sapien
agggtcggttcaagacgagaagcatctgtatct

SEQ ID NO: 124335 - DNA, 33 bp, Homo sapien
ttcctttttcttcaaccgtctctagccttcctg

SEQ ID NO: 124336 - DNA, 33 bp, Homo sapien
ttcctttttcttcaactgtctctagccttcctg

SEQ ID NO: 124337 - DNA, 33 bp, Homo sapien
ctgttgggaaagaaaaaaatatttgcctctaga

SEQ ID NO: 124338 - DNA, 33 bp, Homo sapien
ctgttgggaaagaaaagaatatttgcctctaga

SEQ ID NO: 124339 - DNA, 33 bp, Homo sapien
gctcagctccaatctaaccccacgagggaataa

SEQ ID NO: 124340 - DNA, 33 bp, Homo sapien
gctcagctccaatctatccccacgagggaataa

SEQ ID NO: 124341 - DNA, 33 bp, Homo sapien
cagttcaatcctaaaccgttgtaaaacaacgat

SEQ ID NO: 124342 - DNA, 33 bp, Homo sapien
cagttcaatcctaaactgttgtaaaacaacgat

SEQ ID NO: 124343 - DNA, 33 bp, Homo sapien
agcattcatatcaccaaggacttggctcagcag

SEQ ID NO: 124344 - DNA, 33 bp, Homo sapien
agcattcatatcaccatggacttggctcagcag

SEQ ID NO: 124345 - DNA, 33 bp, Homo sapien
catatcacttcccatcgcattcatttcctgtgt

SEQ ID NO: 124346 - DNA, 33 bp, Homo sapien
catatcacttcccatctcattcatttcctgtgt

SEQ ID NO: 124347 - DNA, 33 bp, Homo sapien
taccaccctgctgccaatatcagagagcctggt

SEQ ID NO: 124348 - DNA, 33 bp, Homo sapien
taccaccctgctgccagtatcagagagcctggt

SEQ ID NO: 124349 - DNA, 33 bp, Homo sapien
cagtaattagactggaacaaaacagaacaggga

SEQ ID NO: 124350 - DNA, 33 bp, Homo sapien
cagtaattagactggatcaaaacagaacaggga

SEQ ID NO: 124351 - DNA, 33 bp, Homo sapien
tacaagaagcgggggcaattggctttgtaaatg

SEQ ID NO: 124352 - DNA, 33 bp, Homo sapien
tacaagaagcgggggccattggctttgtaaatg

SEQ ID NO: 124353 - DNA, 33 bp, Homo sapien
ccattccttctcattcaccctctacccacacag

SEQ ID NO: 124354 - DNA, 33 bp, Homo sapien
ccattccttctcattcgccctctacccacacag

SEQ ID NO: 124355 - DNA, 33 bp, Homo sapien
aggatgcacttgcttaccctttggccactaaac

SEQ ID NO: 124356 - DNA, 33 bp, Homo sapien
aggatgcacttgcttatcctttggccactaaac

SEQ ID NO: 124357 - DNA, 33 bp, Homo sapien
tggaggtataggagaaggatcaccaaacaggtg

SEQ ID NO: 124358 - DNA, 33 bp, Homo sapien
tggaggtataggagaatgatcaccaaacaggtg

SEQ ID NO: 124359 - DNA, 33 bp, Homo sapien
ggtcctagaggaacaacgggtgggaacagttag

SEQ ID NO: 124360 - DNA, 33 bp, Homo sapien
ggtcctagaggaacaatgggtgggaacagttag

SEQ ID NO: 124361 - DNA, 33 bp, Homo sapien
tgttactggtagtgacaagggatgaagtgtagg

SEQ ID NO: 124362 - DNA, 33 bp, Homo sapien
tgttactggtagtgacgagggatgaagtgtagg

SEQ ID NO: 124363 - DNA, 33 bp, Homo sapien
agcaggttttgaggacacaaataactgcttggg

SEQ ID NO: 124364 - DNA, 33 bp, Homo sapien
agcaggttttgaggacgcaaataactgcttggg

SEQ ID NO: 124365 - DNA, 33 bp, Homo sapien
tgagactctcatggtaccttttgttcctgcttt

SEQ ID NO: 124366 - DNA, 33 bp, Homo sapien
tgagactctcatggtatcttttgttcctgcttt

SEQ ID NO: 124367 - DNA, 33 bp, Homo sapien
ttcactagaaggactcacaggattcggaagcca

SEQ ID NO: 124368 - DNA, 33 bp, Homo sapien
ttcactagaaggactcgcaggattcggaagcca

SEQ ID NO: 124369 - DNA, 33 bp, Homo sapien
actggaaagtcaggaaacacaatccctgtatca

SEQ ID NO: 124370 - DNA, 33 bp, Homo sapien
actggaaagtcaggaagcacaatccctgtatca

SEQ ID NO: 124371 - DNA, 33 bp, Homo sapien
aagggtttttgtttcacctctgtccaacaagag

SEQ ID NO: 124372 - DNA, 33 bp, Homo sapien
aagggtttttgtttcatctctgtccaacaagag

SEQ ID NO: 124373 - DNA, 33 bp, Homo sapien
tatcatggattttgaactaatgcaaataagatt

SEQ ID NO: 124374 - DNA, 33 bp, Homo sapien
tatcatggattttgaagtaatgcaaataagatt

SEQ ID NO: 124375 - DNA, 33 bp, Homo sapien
aagaggtttattcagactaattgccaccggagt

SEQ ID NO: 124376 - DNA, 33 bp, Homo sapien
aagaggtttattcagagtaattgccaccggagt

SEQ ID NO: 124377 - DNA, 33 bp, Homo sapien
aagaagttggataaatgatgacaagactttcac

SEQ ID NO: 124378 - DNA, 33 bp, Homo sapien
aagaagttggataaattatgacaagactttcac

SEQ ID NO: 124379 - DNA, 33 bp, Homo sapien
tgaagatgtttttgtcacattgacccagagtcc

SEQ ID NO: 124380 - DNA, 33 bp, Homo sapien
tgaagatgtttttgtcccattgacccagagtcc

SEQ ID NO: 124381 - DNA, 33 bp, Homo sapien
tgcaaataggatatagaaagcatatgtttagta

SEQ ID NO: 124382 - DNA, 33 bp, Homo sapien
tgcaaataggatataggaagcatatgtttagta

SEQ ID NO: 124383 - DNA, 33 bp, Homo sapien
tctcccacaattccaaacctgtatgcccaagtt

SEQ ID NO: 124384 - DNA, 33 bp, Homo sapien
tctcccacaattccaaccctgtatgcccaagtt

SEQ ID NO: 124385 - DNA, 33 bp, Homo sapien
catgggagggaataaaagcacccagaggaagaa

SEQ ID NO: 124386 - DNA, 33 bp, Homo sapien
catgggagggaataaaggcacccagaggaagaa

SEQ ID NO: 124387 - DNA, 33 bp, Homo sapien
aggcagaggacatggaaggcaagtacagcgtag

SEQ ID NO: 124388 - DNA, 33 bp, Homo sapien
aggcagaggacatggagggcaagtacagcgtag

SEQ ID NO: 124389 - DNA, 33 bp, Homo sapien
ttctgcatctgtaatacggattcaccaatattt

SEQ ID NO: 124390 - DNA, 33 bp, Homo sapien
ttctgcatctgtaatatggattcaccaatattt

SEQ ID NO: 124391 - DNA, 33 bp, Homo sapien
ctttcctacagcccacaaggttcgctgacctcc

SEQ ID NO: 124392 - DNA, 33 bp, Homo sapien
ctttcctacagcccacgaggttcgctgacctcc

SEQ ID NO: 124393 - DNA, 33 bp, Homo sapien
cgcgatgtgagcaaaaaagctggataaaaacgg

SEQ ID NO: 124394 - DNA, 33 bp, Homo sapien
cgcgatgtgagcaaaagagctggataaaaacgg

SEQ ID NO: 124395 - DNA, 33 bp, Homo sapien
ggactttgttatttcacgtgattggaagatctg

SEQ ID NO: 124396 - DNA, 33 bp, Homo sapien
ggactttgttatttcatgtgattggaagatctg

SEQ ID NO: 124397 - DNA, 33 bp, Homo sapien
tgaataaataaccgaacctcattcaggcctcaa

SEQ ID NO: 124398 - DNA, 33 bp, Homo sapien
tgaataaataaccgaagctcattcaggcctcaa

SEQ ID NO: 124399 - DNA, 33 bp, Homo sapien
gccatttggaatatcacatcttattaagactac

SEQ ID NO: 124400 - DNA, 33 bp, Homo sapien
gccatttggaatatcagatcttattaagactac

SEQ ID NO: 124401 - DNA, 33 bp, Homo sapien
agtggggatgcaagaacagaccctggctggaat

SEQ ID NO: 124402 - DNA, 33 bp, Homo sapien
agtggggatgcaagaatagaccctggctggaat

SEQ ID NO: 124403 - DNA, 33 bp, Homo sapien
aaaactctagagtacaaattcacattactcaga

SEQ ID NO: 124404 - DNA, 33 bp, Homo sapien
aaaactctagagtacagattcacattactcaga

SEQ ID NO: 124405 - DNA, 33 bp, Homo sapien
aggggaaagcagcggacgtatgggtgctcttcc

SEQ ID NO: 124406 - DNA, 33 bp, Homo sapien
aggggaaagcagcggatgtatgggtgctcttcc

SEQ ID NO: 124407 - DNA, 33 bp, Homo sapien
ggccagcctaccagaaatgccggcagcctgact

SEQ ID NO: 124408 - DNA, 33 bp, Homo sapien
ggccagcctaccagaactgccggcagcctgact

SEQ ID NO: 124409 - DNA, 33 bp, Homo sapien
tggaatacctctggctcaattttaacaatatca

SEQ ID NO: 124410 - DNA, 33 bp, Homo sapien
tggaatacctctggcttaattttaacaatatca

SEQ ID NO: 124411 - DNA, 33 bp, Homo sapien
ataggatttgccactcagaagctggggcgatac

SEQ ID NO: 124412 - DNA, 33 bp, Homo sapien
ataggatttgccactcggaagctggggcgatac

SEQ ID NO: 124413 - DNA, 33 bp, Homo sapien
agtttgcttttcagacccaagaattacacaaat

SEQ ID NO: 124414 - DNA, 33 bp, Homo sapien
agtttgcttttcagactcaagaattacacaaat

SEQ ID NO: 124415 - DNA, 33 bp, Homo sapien
atgattggaaattctacgtttcaggaatcaact

SEQ ID NO: 124416 - DNA, 33 bp, Homo sapien
atgattggaaattctaggtttcaggaatcaact

SEQ ID NO: 124417 - DNA, 33 bp, Homo sapien
actgacttacattagcagccctagaaactcatt

SEQ ID NO: 124418 - DNA, 33 bp, Homo sapien
actgacttacattagcggccctagaaactcatt

SEQ ID NO: 124419 - DNA, 33 bp, Homo sapien
aagggtcctgtccccaatagaagccaggctgag

SEQ ID NO: 124420 - DNA, 33 bp, Homo sapien
aagggtcctgtccccagtagaagccaggctgag

SEQ ID NO: 124421 - DNA, 33 bp, Homo sapien
tggcaacagagagacccgaccttgaattttggc

SEQ ID NO: 124422 - DNA, 33 bp, Homo sapien
tggcaacagagagaccggaccttgaattttggc

SEQ ID NO: 124423 - DNA, 33 bp, Homo sapien
ggcttggtgactgttaccactgacacaagccaa

SEQ ID NO: 124424 - DNA, 33 bp, Homo sapien
ggcttggtgactgttatcactgacacaagccaa

SEQ ID NO: 124425 - DNA, 33 bp, Homo sapien
gattttctcttgatcactgaaaacgcagaaaac

SEQ ID NO: 124426 - DNA, 33 bp, Homo sapien
gattttctcttgatcattgaaaacgcagaaaac

SEQ ID NO: 124427 - DNA, 33 bp, Homo sapien
agactgggtggataataagcgcttcctcctggg

SEQ ID NO: 124428 - DNA, 33 bp, Homo sapien
agactgggtggataatgagcgcttcctcctggg

SEQ ID NO: 124429 - DNA, 33 bp, Homo sapien
ccaacactgccggcaaattgatctccgacttcc

SEQ ID NO: 124430 - DNA, 33 bp, Homo sapien
ccaacactgccggcaacttgatctccgacttcc

SEQ ID NO: 124431 - DNA, 33 bp, Homo sapien
acttttcagatgaacaatcccaggttggagaaa

SEQ ID NO: 124432 - DNA, 33 bp, Homo sapien
acttttcagatgaacagtcccaggttggagaaa

SEQ ID NO: 124433 - DNA, 33 bp, Homo sapien
tctgaatggactcaacagcagaatggaggggag

SEQ ID NO: 124434 - DNA, 33 bp, Homo sapien
tctgaatggactcaaccgcagaatggaggggag

SEQ ID NO: 124435 - DNA, 33 bp, Homo sapien
catgtcagcttggctaagtggaagcagatttcc

SEQ ID NO: 124436 - DNA, 33 bp, Homo sapien
catgtcagcttggctaggtggaagcagatttcc

SEQ ID NO: 124437 - DNA, 33 bp, Homo sapien
agaacccttggatttacgcacattcaatttgga

SEQ ID NO: 124438 - DNA, 33 bp, Homo sapien
agaacccttggatttatgcacattcaatttgga

SEQ ID NO: 124439 - DNA, 33 bp, Homo sapien
tgtctgctttatccaaacctttttacaaggtga

SEQ ID NO: 124440 - DNA, 33 bp, Homo sapien
tgtctgctttatccaagcctttttacaaggtga

SEQ ID NO: 124441 - DNA, 33 bp, Homo sapien
tggggggcttcctgacaatctgctgaagcctgg

SEQ ID NO: 124442 - DNA, 33 bp, Homo sapien
tggggggcttcctgaccatctgctgaagcctgg

SEQ ID NO: 124443 - DNA, 33 bp, Homo sapien
aaaagaaagacacagaactatacaagaaggaca

SEQ ID NO: 124444 - DNA, 33 bp, Homo sapien
aaaagaaagacacagagctatacaagaaggaca

SEQ ID NO: 124445 - DNA, 33 bp, Homo sapien
atatgctgtttaataaatgggcaaacataagtg

SEQ ID NO: 124446 - DNA, 33 bp, Homo sapien
atatgctgtttaataagtgggcaaacataagtg

SEQ ID NO: 124447 - DNA, 33 bp, Homo sapien
ccactgtgaaccttagaccatcatgcccatgtt

SEQ ID NO: 124448 - DNA, 33 bp, Homo sapien
ccactgtgaaccttaggccatcatgcccatgtt

SEQ ID NO: 124449 - DNA, 33 bp, Homo sapien
attttcccatcttagtcaatgatactgccagtc

SEQ ID NO: 124450 - DNA, 33 bp, Homo sapien
attttcccatcttagttaatgatactgccagtc

SEQ ID NO: 124451 - DNA, 33 bp, Homo sapien
gttacaattccacacactaatactcaaattttg

SEQ ID NO: 124452 - DNA, 33 bp, Homo sapien
gttacaattccacacagtaatactcaaattttg

SEQ ID NO: 124453 - DNA, 33 bp, Homo sapien
cttctcatgtaatatacagcaataaatctacca

SEQ ID NO: 124454 - DNA, 33 bp, Homo sapien
cttctcatgtaatatatagcaataaatctacca

SEQ ID NO: 124455 - DNA, 33 bp, Homo sapien
taacctgttcttgacccgaccctcacataaatc

SEQ ID NO: 124456 - DNA, 33 bp, Homo sapien
taacctgttcttgacctgaccctcacataaatc

SEQ ID NO: 124457 - DNA, 33 bp, Homo sapien
gagatcttgttttaataaagccttccaggtgat

SEQ ID NO: 124458 - DNA, 33 bp, Homo sapien
gagatcttgttttaatgaagccttccaggtgat

SEQ ID NO: 124459 - DNA, 33 bp, Homo sapien
cagatcaagttgccaacgtctcagtcaacccct

SEQ ID NO: 124460 - DNA, 33 bp, Homo sapien
cagatcaagttgccaatgtctcagtcaacccct

SEQ ID NO: 124461 - DNA, 33 bp, Homo sapien
atggtagctcatcaacaaatgaagtgataatat

SEQ ID NO: 124462 - DNA, 33 bp, Homo sapien
atggtagctcatcaacgaatgaagtgataatat

SEQ ID NO: 124463 - DNA, 33 bp, Homo sapien
caaggataaggtagaaccaaatagagtagcttg

SEQ ID NO: 124464 - DNA, 33 bp, Homo sapien
caaggataaggtagaatcaaatagagtagcttg

SEQ ID NO: 124465 - DNA, 33 bp, Homo sapien
aagacttaaacaaatggcaaggagaaaaatctt

SEQ ID NO: 124466 - DNA, 33 bp, Homo sapien
aagacttaaacaaatgtcaaggagaaaaatctt

SEQ ID NO: 124467 - DNA, 33 bp, Homo sapien
ttcttacttgtaattaagagctaagttatgggt

SEQ ID NO: 124468 - DNA, 33 bp, Homo sapien
ttcttacttgtaattaggagctaagttatgggt

SEQ ID NO: 124469 - DNA, 33 bp, Homo sapien
aacatgattagacgtacgaagaaaggagtaatt

SEQ ID NO: 124470 - DNA, 33 bp, Homo sapien
aacatgattagacgtaggaagaaaggagtaatt

SEQ ID NO: 124471 - DNA, 33 bp, Homo sapien
agagaactctctggaacgattaaagagatcctg

SEQ ID NO: 124472 - DNA, 33 bp, Homo sapien
agagaactctctggaatgattaaagagatcctg

SEQ ID NO: 124473 - DNA, 33 bp, Homo sapien; identical to SEQ ID NO: 124471

SEQ ID NO: 124474 - DNA, 33 bp, Homo sapien; identical to SEQ ID NO: 124472

SEQ ID NO: 124475 - DNA, 33 bp, Homo sapien
aagtaacatcctaacactaatgcatcagtggat

SEQ ID NO: 124476 - DNA, 33 bp, Homo sapien
aagtaacatcctaacagtaatgcatcagtggat

SEQ ID NO: 124477 - DNA, 33 bp, Homo sapien
gttttaccagttggccaaggaaattagatggtg

SEQ ID NO: 124478 - DNA, 33 bp, Homo sapien
gttttaccagttggccgaggaaattagatggtg

SEQ ID NO: 124479 - DNA, 33 bp, Homo sapien
tgcacagggtagaaaccgcatttttacaggaaa

SEQ ID NO: 124480 - DNA, 33 bp, Homo sapien
tgcacagggtagaaactgcatttttacaggaaa

SEQ ID NO: 124481 - DNA, 33 bp, Homo sapien
attacagtcatggtacagaaacatcatcaaaat

SEQ ID NO: 124482 - DNA, 33 bp, Homo sapien
attacagtcatggtacggaaacatcatcaaaat

SEQ ID NO: 124483 - DNA, 33 bp, Homo sapien
acttaacctgagttccactgtctaatgtgtctc

SEQ ID NO: 124484 - DNA, 33 bp, Homo sapien
acttaacctgagttccgctgtctaatgtgtctc

SEQ ID NO: 124485 - DNA, 33 bp, Homo sapien
accctttctcagataccctagactttcctgttt

SEQ ID NO: 124486 - DNA, 33 bp, Homo sapien
accctttctcagatactctagactttcctgttt

SEQ ID NO: 124487 - DNA, 33 bp, Homo sapien
ttacagatcttatgaacggtctgaaatgaaaaa

SEQ ID NO: 124488 - DNA, 33 bp, Homo sapien
ttacagatcttatgaagggtctgaaatgaaaaa

SEQ ID NO: 124489 - DNA, 33 bp, Homo sapien
cttcctggagataagaaccagagcaaagacatg

SEQ ID NO: 124490 - DNA, 33 bp, Homo sapien
cttcctggagataagacccagagcaaagacatg

SEQ ID NO: 124491 - DNA, 33 bp, Homo sapien
cagattttatgccaaagagcttgtgatatggtt

SEQ ID NO: 124492 - DNA, 33 bp, Homo sapien
cagattttatgccaaatagcttgtgatatggtt

SEQ ID NO: 124493 - DNA, 33 bp, Homo sapien
ttggcaggcctctgaaatgggtaagcaaacttt

SEQ ID NO: 124494 - DNA, 33 bp, Homo sapien
ttggcaggcctctgaagtgggtaagcaaacttt

SEQ ID NO: 124495 - DNA, 33 bp, Homo sapien
tatccatccctctccacgtcagaaaattcataa

SEQ ID NO: 124496 - DNA, 33 bp, Homo sapien
tatccatccctctccaggtcagaaaattcataa

SEQ ID NO: 124497 - DNA, 33 bp, Homo sapien
atagatgcagaaggccaataagggggagggtcc

SEQ ID NO: 124498 - DNA, 33 bp, Homo sapien
atagatgcagaaggccgataagggggagggtcc

SEQ ID NO: 124499 - DNA, 33 bp, Homo sapien
gattttaagacttctccactatcctaaggccac

SEQ ID NO: 124500 - DNA, 33 bp, Homo sapien
gattttaagacttctcgactatcctaaggccac

SEQ ID NO: 124501 - DNA, 33 bp, Homo sapien
taacaatccatcacaactcctattacttttgtt

SEQ ID NO: 124502 - DNA, 33 bp, Homo sapien
taacaatccatcacaagtcctattacttttgtt

SEQ ID NO: 124503 - DNA, 33 bp, Homo sapien
gcacccattgccactcccgatcaggctaaaggc

SEQ ID NO: 124504 - DNA, 33 bp, Homo sapien
gcacccattgccactctcgatcaggctaaaggc

SEQ ID NO: 124505 - DNA, 33 bp, Homo sapien
ctttcctttccgatgaccctggtagtgtaagac

SEQ ID NO: 124506 - DNA, 33 bp, Homo sapien
ctttcctttccgatgagcctggtagtgtaagac

SEQ ID NO: 124507 - DNA, 33 bp, Homo sapien
agacagtgtggtctggcatgagaacagatgtat

SEQ ID NO: 124508 - DNA, 33 bp, Homo sapien
agacagtgtggtctggtatgagaacagatgtat

SEQ ID NO: 124509 - DNA, 33 bp, Homo sapien
gaacaaatctctttacaaatgtcattgtgcagt

SEQ ID NO: 124510 - DNA, 33 bp, Homo sapien
gaacaaatctctttacgaatgtcattgtgcagt

SEQ ID NO: 124511 - DNA, 33 bp, Homo sapien
cacgctcaggcaaacacgtatgacaggaatgag

SEQ ID NO: 124512 - DNA, 33 bp, Homo sapien
cacgctcaggcaaacatgtatgacaggaatgag

SEQ ID NO: 124513 - DNA, 33 bp, Homo sapien
cgttcactactttcctaagaaatcaaattattc

SEQ ID NO: 124514 - DNA, 33 bp, Homo sapien
cgttcactactttcctgagaaatcaaattattc

SEQ ID NO: 124515 - DNA, 33 bp, Homo sapien
tacacattcatgcagacggttcttgctttaatg

SEQ ID NO: 124516 - DNA, 33 bp, Homo sapien
tacacattcatgcagatggttcttgctttaatg

SEQ ID NO: 124517 - DNA, 33 bp, Homo sapien
gtttatggacactggccaactgtgaaaatggac

SEQ ID NO: 124518 - DNA, 33 bp, Homo sapien
gtttatggacactggctaactgtgaaaatggac

SEQ ID NO: 124519 - DNA, 33 bp, Homo sapien
caacttgggaaccagaaagcatacttgaaagga

SEQ ID NO: 124520 - DNA, 33 bp, Homo sapien
caacttgggaaccagagagcatacttgaaagga

SEQ ID NO: 124521 - DNA, 33 bp, Homo sapien
gcaacatttatgccaacgagattatattctttt

SEQ ID NO: 124522 - DNA, 33 bp, Homo sapien
gcaacatttatgccaatgagattatattctttt

SEQ ID NO: 124523 - DNA, 33 bp, Homo sapien
agggtccaagtcaaagaatgtgggtagctttga

SEQ ID NO: 124524 - DNA, 33 bp, Homo sapien
agggtccaagtcaaaggatgtgggtagctttga

SEQ ID NO: 124525 - DNA, 33 bp, Homo sapien
ctcaaacaggcttttaagattcaaaagggcaga

SEQ ID NO: 124526 - DNA, 33 bp, Homo sapien
ctcaaacaggcttttacgattcaaaagggcaga

SEQ ID NO: 124527 - DNA, 33 bp, Homo sapien
ttgcttacttgaggcaacactaagatgctcaat

SEQ ID NO: 124528 - DNA, 33 bp, Homo sapien
ttgcttacttgaggcaccactaagatgctcaat

SEQ ID NO: 124529 - DNA, 33 bp, Homo sapien
ttctggaaaagatggcacgtgacggggaattta

SEQ ID NO: 124530 - DNA, 33 bp, Homo sapien
ttctggaaaagatggcgcgtgacggggaattta

SEQ ID NO: 124531 - DNA, 33 bp, Homo sapien
cctgaaaattagtgatcagggctcctgccaaaa

SEQ ID NO: 124532 - DNA, 33 bp, Homo sapien
cctgaaaattagtgatgagggctcctgccaaaa

SEQ ID NO: 124533 - DNA, 33 bp, Homo sapien
ttttgccctcaaaggagatgagttcagtgattt

SEQ ID NO: 124534 - DNA, 33 bp, Homo sapien
ttttgccctcaaaggatatgagttcagtgattt

SEQ ID NO: 124535 - DNA, 33 bp, Homo sapien
cagagtaggatgcttaaacaaagaaacagcttg

SEQ ID NO: 124536 - DNA, 33 bp, Homo sapien
cagagtaggatgcttacacaaagaaacagcttg

SEQ ID NO: 124537 - DNA, 33 bp, Homo sapien
cctcgctcttgtaaggcagttggaactagtccc

SEQ ID NO: 124538 - DNA, 33 bp, Homo sapien
cctcgctcttgtaaggtagttggaactagtccc

SEQ ID NO: 124539 - DNA, 33 bp, Homo sapien
tcccctgggtttccaactcctcctctggtgagc

SEQ ID NO: 124540 - DNA, 33 bp, Homo sapien
tcccctgggtttccaattcctcctctggtgagc

SEQ ID NO: 124541 - DNA, 33 bp, Homo sapien
tattcggacgccaagacaggatgattgcttgag

SEQ ID NO: 124542 - DNA, 33 bp, Homo sapien
tattcggacgccaagataggatgattgcttgag

SEQ ID NO: 124543 - DNA, 33 bp, Homo sapien
agattgggcccacacaataattcaggataatct

SEQ ID NO: 124544 - DNA, 33 bp, Homo sapien
agattgggcccacacagtaattcaggataatct

SEQ ID NO: 124545 - DNA, 33 bp, Homo sapien
aatcccaattcgaaaacggtgaggacccaggtt

SEQ ID NO: 124546 - DNA, 33 bp, Homo sapien
aatcccaattcgaaaatggtgaggacccaggtt

SEQ ID NO: 124547 - DNA, 33 bp, Homo sapien
ccaagtagaaactatgaagaatctatagaccca

SEQ ID NO: 124548 - DNA, 33 bp, Homo sapien
ccaagtagaaactatggagaatctatagaccca

SEQ ID NO: 124549 - DNA, 33 bp, Homo sapien
accatgttcaagcatcacctaaaagtgtcctct

SEQ ID NO: 124550 - DNA, 33 bp, Homo sapien
accatgttcaagcatcgcctaaaagtgtcctct

SEQ ID NO: 124551 - DNA, 33 bp, Homo sapien
cactacatccagacaacgagactttggacccct

SEQ ID NO: 124552 - DNA, 33 bp, Homo sapien
cactacatccagacaatgagactttggacccct

SEQ ID NO: 124553 - DNA, 33 bp, Homo sapien
aatattctatttctgaacaagtcacaatttgct

SEQ ID NO: 124554 - DNA, 33 bp, Homo sapien
aatattctatttctgagcaagtcacaatttgct

SEQ ID NO: 124555 - DNA, 33 bp, Homo sapien
agagtgatccaaaatacgtttcagagctcttcc

SEQ ID NO: 124556 - DNA, 33 bp, Homo sapien
agagtgatccaaaatatgtttcagagctcttcc

SEQ ID NO: 124557 - DNA, 33 bp, Homo sapien
gacatgaattttggggaccaggagaagaatgct

SEQ ID NO: 124558 - DNA, 33 bp, Homo sapien
gacatgaattttgggggccaggagaagaatgct

SEQ ID NO: 124559 - DNA, 33 bp, Homo sapien
acattaaagagggaacaggcagaatggtaaagc

SEQ ID NO: 124560 - DNA, 33 bp, Homo sapien
acattaaagagggaaccggcagaatggtaaagc

SEQ ID NO: 124561 - DNA, 33 bp, Homo sapien
gtttagctgaaagagagaaacagaagataactt

SEQ ID NO: 124562 - DNA, 33 bp, Homo sapien
gtttagctgaaagagataaacagaagataactt

SEQ ID NO: 124563 - DNA, 33 bp, Homo sapien
gcattacctccttgaaacttctcaacagttctt

SEQ ID NO: 124564 - DNA, 33 bp, Homo sapien
gcattacctccttgaaccttctcaacagttctt

SEQ ID NO: 124565 - DNA, 33 bp, Homo sapien
gacaacaataagggacaggtcaaaaaatctgta

SEQ ID NO: 124566 - DNA, 33 bp, Homo sapien
gacaacaataagggactggtcaaaaaatctgta

SEQ ID NO: 124567 - DNA, 33 bp, Homo sapien
ctgtaactgtacactactacacacattttgtaa

SEQ ID NO: 124568 - DNA, 33 bp, Homo sapien
ctgtaactgtacactattacacacattttgtaa

SEQ ID NO: 124569 - DNA, 33 bp, Homo sapien
gtacacgtgtacatagaaagtggaataatagac

SEQ ID NO: 124570 - DNA, 33 bp, Homo sapien
gtacacgtgtacataggaagtggaataatagac

SEQ ID NO: 124571 - DNA, 33 bp, Homo sapien
ccactgaaggtgaatggattctgtccatctcaa

SEQ ID NO: 124572 - DNA, 33 bp, Homo sapien
ccactgaaggtgaatgtattctgtccatctcaa

SEQ ID NO: 124573 - DNA, 33 bp, Homo sapien
acatagagagcttagacatttctgtctggaaca

SEQ ID NO: 124574 - DNA, 33 bp, Homo sapien
acatagagagcttagatatttctgtctggaaca

SEQ ID NO: 124575 - DNA, 33 bp, Homo sapien
ctatttaaggaattgacggctgatcccacaggc

SEQ ID NO: 124576 - DNA, 33 bp, Homo sapien
ctatttaaggaattgatggctgatcccacaggc

SEQ ID NO: 124577 - DNA, 33 bp, Homo sapien
gttagtctacaccaaacaaattctgacccccaa

SEQ ID NO: 124578 - DNA, 33 bp, Homo sapien
gttagtctacaccaaataaattctgacccccaa

SEQ ID NO: 124579 - DNA, 33 bp, Homo sapien
gagttcactaagcagaagaagtctaaaataatt

SEQ ID NO: 124580 - DNA, 33 bp, Homo sapien
gagttcactaagcagaggaagtctaaaataatt

SEQ ID NO: 124581 - DNA, 33 bp, Homo sapien
ccgagtcacaaggacactcttgatttcacccaa

SEQ ID NO: 124582 - DNA, 33 bp, Homo sapien
ccgagtcacaaggacattcttgatttcacccaa

SEQ ID NO: 124583 - DNA, 33 bp, Homo sapien
cttaatttaaaatccaactgtgtgcacagtccc

SEQ ID NO: 124584 - DNA, 33 bp, Homo sapien
cttaatttaaaatccagctgtgtgcacagtccc

SEQ ID NO: 124585 - DNA, 33 bp, Homo sapien
agtgactccttagacccgctggctcttccctga

SEQ ID NO: 124586 - DNA, 33 bp, Homo sapien
agtgactccttagacctgctggctcttccctga

SEQ ID NO: 124587 - DNA, 33 bp, Homo sapien
ggtttctctttcagcaaaagagggaattttatg

SEQ ID NO: 124588 - DNA, 33 bp, Homo sapien
ggtttctctttcagcagaagagggaattttatg

SEQ ID NO: 124589 - DNA, 33 bp, Homo sapien
tttcggcgtacatactcacaaattgctttctta

SEQ ID NO: 124590 - DNA, 33 bp, Homo sapien
tttcggcgtacatactgacaaattgctttctta

SEQ ID NO: 124591 - DNA, 33 bp, Homo sapien
actcccaaggctcacagctgaggttaacctgag

SEQ ID NO: 124592 - DNA, 33 bp, Homo sapien
actcccaaggctcacatctgaggttaacctgag

SEQ ID NO: 124593 - DNA, 33 bp, Homo sapien
aacccaaggcgagccacattgaaatagcttaga

SEQ ID NO: 124594 - DNA, 33 bp, Homo sapien
aacccaaggcgagccagattgaaatagcttaga

SEQ ID NO: 124595 - DNA, 33 bp, Homo sapien
tgccaattgtgtagtgcagaaggcctaaaagct

SEQ ID NO: 124596 - DNA, 33 bp, Homo sapien
tgccaattgtgtagtggagaaggcctaaaagct

SEQ ID NO: 124597 - DNA, 33 bp, Homo sapien
aggctgttctagtaaaaagtgaggctgacaaga

SEQ ID NO: 124598 - DNA, 33 bp, Homo sapien
aggctgttctagtaaacagtgaggctgacaaga

SEQ ID NO: 124599 - DNA, 33 bp, Homo sapien
gaaaggtcttgctaaaatatctacattgctctg

SEQ ID NO: 124600 - DNA, 33 bp, Homo sapien
gaaaggtcttgctaaattatctacattgctctg

SEQ ID NO: 124601 - DNA, 33 bp, Homo sapien
aggcctgccctcacggaaaagactgaagactct

SEQ ID NO: 124602 - DNA, 33 bp, Homo sapien
aggcctgccctcacgggaaagactgaagactct

SEQ ID NO: 124603 - DNA, 33 bp, Homo sapien
agaagaaagctctatgcatttgtggtcacagaa

SEQ ID NO: 124604 - DNA, 33 bp, Homo sapien
agaagaaagctctatgtatttgtggtcacagaa

SEQ ID NO: 124605 - DNA, 33 bp, Homo sapien
aagagcaggctggctacgcattcttaacgagtc

SEQ ID NO: 124606 - DNA, 33 bp, Homo sapien
aagagcaggctggctatgcattcttaacgagtc

SEQ ID NO: 124607 - DNA, 33 bp, Homo sapien
tgttctgctttgtcctaaccctgaaagcctgtc

SEQ ID NO: 124608 - DNA, 33 bp, Homo sapien
tgttctgctttgtccttaccctgaaagcctgtc

SEQ ID NO: 124609 - DNA, 33 bp, Homo sapien
caaatgcaagaatcagaagtgggctgtcagtag

SEQ ID NO: 124610 - DNA, 33 bp, Homo sapien
caaatgcaagaatcagcagtgggctgtcagtag

SEQ ID NO: 124611 - DNA, 33 bp, Homo sapien
tcaccactcctgctcccattgggtgccacagac

SEQ ID NO: 124612 - DNA, 33 bp, Homo sapien
tcaccactcctgctcctattgggtgccacagac

SEQ ID NO: 124613 - DNA, 33 bp, Homo sapien
cctccacagtctctataacaagggtttggtagt

SEQ ID NO: 124614 - DNA, 33 bp, Homo sapien
cctccacagtctctatgacaagggtttggtagt

SEQ ID NO: 124615 - DNA, 33 bp, Homo sapien
gccctgaaaatagcaaccatgtggagaaacatt

SEQ ID NO: 124616 - DNA, 33 bp, Homo sapien
gccctgaaaatagcaatcatgtggagaaacatt

SEQ ID NO: 124617 - DNA, 33 bp, Homo sapien
gacagggaccaggaaaaggatggaggaataaat

SEQ ID NO: 124618 - DNA, 33 bp, Homo sapien
gacagggaccaggaaagggatggaggaataaat

SEQ ID NO: 124619 - DNA, 33 bp, Homo sapien
atcagaacagagccagaattaagttatgtaata

SEQ ID NO: 124620 - DNA, 33 bp, Homo sapien
atcagaacagagccaggattaagttatgtaata

SEQ ID NO: 124621 - DNA, 33 bp, Homo sapien
aactaaaatttatggacgctgtatggacccact

SEQ ID NO: 124622 - DNA, 33 bp, Homo sapien
aactaaaatttatggatgctgtatggacccact

SEQ ID NO: 124623 - DNA, 33 bp, Homo sapien
tatgattaggtaattgcaatgagatactactac

SEQ ID NO: 124624 - DNA, 33 bp, Homo sapien
tatgattaggtaattgtaatgagatactactac

SEQ ID NO: 124625 - DNA, 33 bp, Homo sapien
ctgattttgctaataacgtcatggtttcttgag

SEQ ID NO: 124626 - DNA, 33 bp, Homo sapien
ctgattttgctaataatgtcatggtttcttgag

SEQ ID NO: 124627 - DNA, 33 bp, Homo sapien
tcttgcactggacaccaatttatcccctgtcct

SEQ ID NO: 124628 - DNA, 33 bp, Homo sapien
tcttgcactggacaccgatttatcccctgtcct

SEQ ID NO: 124629 - DNA, 33 bp, Homo sapien
ctgatctgtggtatcaatcactttctggaacac

SEQ ID NO: 124630 - DNA, 33 bp, Homo sapien
ctgatctgtggtatcactcactttctggaacac

SEQ ID NO: 124631 - DNA, 33 bp, Homo sapien
agaagccttataaaacaagaactcagcataaac

SEQ ID NO: 124632 - DNA, 33 bp, Homo sapien
agaagccttataaaacgagaactcagcataaac

SEQ ID NO: 124633 - DNA, 33 bp, Homo sapien
catgtaagtgagatgacgtgatgtttgtctttc

SEQ ID NO: 124634 - DNA, 33 bp, Homo sapien
catgtaagtgagatgatgtgatgtttgtctttc

SEQ ID NO: 124635 - DNA, 33 bp, Homo sapien
aaattaatgtcaaaaacttgttgttaaaaagac

SEQ ID NO: 124636 - DNA, 33 bp, Homo sapien
aaattaatgtcaaaaatttgttgttaaaaagac

SEQ ID NO: 124637 - DNA, 33 bp, Homo sapien
ccccaactcctaacacaaggaaagaaaagaaga

SEQ ID NO: 124638 - DNA, 33 bp, Homo sapien
ccccaactcctaacacgaggaaagaaaagaaga

SEQ ID NO: 124639 - DNA, 33 bp, Homo sapien
aactctcaagtgaggacgatttactcacttacc

SEQ ID NO: 124640 - DNA, 33 bp, Homo sapien
aactctcaagtgaggatgatttactcacttacc

SEQ ID NO: 124641 - DNA, 33 bp, Homo sapien
ggaaatagaagagaaagcattgtattgactttg

SEQ ID NO: 124642 - DNA, 33 bp, Homo sapien
ggaaatagaagagaaatcattgtattgactttg

SEQ ID NO: 124643 - DNA, 33 bp, Homo sapien
gaaagccttctccaaactgatcttaaatagtga

SEQ ID NO: 124644 - DNA, 33 bp, Homo sapien
gaaagccttctccaaattgatcttaaatagtga

SEQ ID NO: 124645 - DNA, 33 bp, Homo sapien
gtttcctgggttgtgactaaagcataatggcct

SEQ ID NO: 124646 - DNA, 33 bp, Homo sapien
gtttcctgggttgtgattaaagcataatggcct

SEQ ID NO: 124647 - DNA, 33 bp, Homo sapien
cgttgtaccccaagcacaatctcaaggttttcc

SEQ ID NO: 124648 - DNA, 33 bp, Homo sapien
cgttgtaccccaagcagaatctcaaggttttcc

SEQ ID NO: 124649 - DNA, 33 bp, Homo sapien
ggcatcacaatgaagaacgactgctggagaatg

SEQ ID NO: 124650 - DNA, 33 bp, Homo sapien
ggcatcacaatgaagagcgactgctggagaatg

SEQ ID NO: 124651 - DNA, 33 bp, Homo sapien
catacgtacataagtaaaaggcttctggatttg

SEQ ID NO: 124652 - DNA, 33 bp, Homo sapien
catacgtacataagtagaaggcttctggatttg

SEQ ID NO: 124653 - DNA, 33 bp, Homo sapien
agtcacgtacagataaagtgcctatcccctttc

SEQ ID NO: 124654 - DNA, 33 bp, Homo sapien
agtcacgtacagataaggtgcctatcccctttc

SEQ ID NO: 124655 - DNA, 33 bp, Homo sapien
cagactgaagcaattagcagcttgttgcttcat

SEQ ID NO: 124656 - DNA, 33 bp, Homo sapien
cagactgaagcaattatcagcttgttgcttcat

SEQ ID NO: 124657 - DNA, 33 bp, Homo sapien
gaacaagcgtactggaacagatgggagaggctc

SEQ ID NO: 124658 - DNA, 33 bp, Homo sapien
gaacaagcgtactggagcagatgggagaggctc

SEQ ID NO: 124659 - DNA, 33 bp, Homo sapien
tagctcttctctttaaccttgtgctcctggatt

SEQ ID NO: 124660 - DNA, 33 bp, Homo sapien
tagctcttctctttaatcttgtgctcctggatt

SEQ ID NO: 124661 - DNA, 33 bp, Homo sapien
acaggtacaactaaaaagctgagatatttactg

SEQ ID NO: 124662 - DNA, 33 bp, Homo sapien
acaggtacaactaaaaggctgagatatttactg

SEQ ID NO: 124663 - DNA, 33 bp, Homo sapien
ggacaggatactgcatcagaacaggtttccatt

SEQ ID NO: 124664 - DNA, 33 bp, Homo sapien
ggacaggatactgcattagaacaggtttccatt

SEQ ID NO: 124665 - DNA, 33 bp, Homo sapien
agggttagaaatggaacagtggacttgcacttt

SEQ ID NO: 124666 - DNA, 33 bp, Homo sapien
agggttagaaatggaagagtggacttgcacttt

SEQ ID NO: 124667 - DNA, 33 bp, Homo sapien
attaccaaatattgtgaactgtacataattgta

SEQ ID NO: 124668 - DNA, 33 bp, Homo sapien
attaccaaatattgtgcactgtacataattgta

SEQ ID NO: 124669 - DNA, 33 bp, Homo sapien
gacctaaagtgagacaccagttggttttgtgga

SEQ ID NO: 124670 - DNA, 33 bp, Homo sapien
gacctaaagtgagacatcagttggttttgtgga

SEQ ID NO: 124671 - DNA, 33 bp, Homo sapien
cctcccaattcagtcactcatgaggacatcact

SEQ ID NO: 124672 - DNA, 33 bp, Homo sapien
cctcccaattcagtcattcatgaggacatcact

SEQ ID NO: 124673 - DNA, 33 bp, Homo sapien
ttgaggaggttgaatgcaaactcttaggaattc

SEQ ID NO: 124674 - DNA, 33 bp, Homo sapien
ttgaggaggttgaatgtaaactcttaggaattc

SEQ ID NO: 124675 - DNA, 33 bp, Homo sapien
ttcagcacaatcatacactgaccacatggcctc

SEQ ID NO: 124676 - DNA, 33 bp, Homo sapien
ttcagcacaatcatacgctgaccacatggcctc

SEQ ID NO: 124677 - DNA, 33 bp, Homo sapien
taaattatctggtgtacgttcccaatagaaccc

SEQ ID NO: 124678 - DNA, 33 bp, Homo sapien
taaattatctggtgtatgttcccaatagaaccc

SEQ ID NO: 124679 - DNA, 33 bp, Homo sapien
gagaacttaaggacatcacacttattgatcaaa

SEQ ID NO: 124680 - DNA, 33 bp, Homo sapien
gagaacttaaggacattacacttattgatcaaa

SEQ ID NO: 124681 - DNA, 33 bp, Homo sapien
tggcaggtgtcttagacctctttgtgctggtat

SEQ ID NO: 124682 - DNA, 33 bp, Homo sapien
tggcaggtgtcttagatctctttgtgctggtat

SEQ ID NO: 124683 - DNA, 33 bp, Homo sapien
tgttctattttggataagatagtgtctgcaagt

SEQ ID NO: 124684 - DNA, 33 bp, Homo sapien
tgttctattttggataggatagtgtctgcaagt

SEQ ID NO: 124685 - DNA, 33 bp, Homo sapien
ggaagaagatgaaagacaaccatgaagtttaag

SEQ ID NO: 124686 - DNA, 33 bp, Homo sapien
ggaagaagatgaaagataaccatgaagtttaag

SEQ ID NO: 124687 - DNA, 33 bp, Homo sapien
ttaaaggtacaagaagcatgctacagagccaga

SEQ ID NO: 124688 - DNA, 33 bp, Homo sapien
ttaaaggtacaagaagtatgctacagagccaga

SEQ ID NO: 124689 - DNA, 33 bp, Homo sapien
aatagggagttggaaaagcagaggatgaaatga

SEQ ID NO: 124690 - DNA, 33 bp, Homo sapien
aatagggagttggaaaggcagaggatgaaatga

SEQ ID NO: 124691 - DNA, 33 bp, Homo sapien
gaaattattatacctcaaagcagaatggtagat

SEQ ID NO: 124692 - DNA, 33 bp, Homo sapien
gaaattattatacctcgaagcagaatggtagat

SEQ ID NO: 124693 - DNA, 33 bp, Homo sapien
accaccaaactggcctgagaaaaggtgcttaag

SEQ ID NO: 124694 - DNA, 33 bp, Homo sapien
accaccaaactggccttagaaaaggtgcttaag

SEQ ID NO: 124695 - DNA, 33 bp, Homo sapien
acatagcagttagatacccatgaactcaccacc

SEQ ID NO: 124696 - DNA, 33 bp, Homo sapien
acatagcagttagatatccatgaactcaccacc

SEQ ID NO: 124697 - DNA, 33 bp, Homo sapien
tgtttttgaactctgaacctaaattctcctcct

SEQ ID NO: 124698 - DNA, 33 bp, Homo sapien
tgtttttgaactctgagcctaaattctcctcct

SEQ ID NO: 124699 - DNA, 33 bp, Homo sapien
gtcaggatggctggtgacaacaatggcccaaat

SEQ ID NO: 124700 - DNA, 33 bp, Homo sapien
gtcaggatggctggtggcaacaatggcccaaat

SEQ ID NO: 124701 - DNA, 33 bp, Homo sapien
ctctgttcactttccaactgcttgcatgtttgc

SEQ ID NO: 124702 - DNA, 33 bp, Homo sapien
ctctgttcactttccagctgcttgcatgtttgc

SEQ ID NO: 124703 - DNA, 33 bp, Homo sapien
aaattagaaggcatagaaaatatttggttgaca

SEQ ID NO: 124704 - DNA, 33 bp, Homo sapien
aaattagaaggcataggaaatatttggttgaca

SEQ ID NO: 124705 - DNA, 33 bp, Homo sapien
taatacccctggagtaacatatgaccaatggtg

SEQ ID NO: 124706 - DNA, 33 bp, Homo sapien
taatacccctggagtagcatatgaccaatggtg

SEQ ID NO: 124707 - DNA, 33 bp, Homo sapien
ggaatgtagctattatcactccactctgtagct

SEQ ID NO: 124708 - DNA, 33 bp, Homo sapien
ggaatgtagctattatgactccactctgtagct

SEQ ID NO: 124709 - DNA, 33 bp, Homo sapien
ttagtttagaaccaagaaacttactcaaggaaa

SEQ ID NO: 124710 - DNA, 33 bp, Homo sapien
ttagtttagaaccaagcaacttactcaaggaaa

SEQ ID NO: 124711 - DNA, 33 bp, Homo sapien
gaccaggacgtcctgacatcatgtctttgagct

SEQ ID NO: 124712 - DNA, 33 bp, Homo sapien
gaccaggacgtcctgatatcatgtctttgagct

SEQ ID NO: 124713 - DNA, 33 bp, Homo sapien
tccagtgaggcatgagacagccatagagtgcaa

SEQ ID NO: 124714 - DNA, 33 bp, Homo sapien
tccagtgaggcatgaggcagccatagagtgcaa

SEQ ID NO: 124715 - DNA, 33 bp, Homo sapien
ccattttcacacataacattgccactgctgtac

SEQ ID NO: 124716 - DNA, 33 bp, Homo sapien
ccattttcacacataatattgccactgctgtac

SEQ ID NO: 124717 - DNA, 33 bp, Homo sapien
taaaaattctcccatcactggaaatggtctaaa

SEQ ID NO: 124718 - DNA, 33 bp, Homo sapien
taaaaattctcccatctctggaaatggtctaaa

SEQ ID NO: 124719 - DNA, 33 bp, Homo sapien
ctccatggaactggtcagaactagttacacata

SEQ ID NO: 124720 - DNA, 33 bp, Homo sapien
ctccatggaactggtcggaactagttacacata

SEQ ID NO: 124721 - DNA, 33 bp, Homo sapien
tcacaaaattgtcaagaaagagagcatgttgag

SEQ ID NO: 124722 - DNA, 33 bp, Homo sapien
tcacaaaattgtcaaggaagagagcatgttgag

SEQ ID NO: 124723 - DNA, 33 bp, Homo sapien
tcaatggtctggaaagaaagccacaatatctat

SEQ ID NO: 124724 - DNA, 33 bp, Homo sapien
tcaatggtctggaaaggaagccacaatatctat

SEQ ID NO: 124725 - DNA, 33 bp, Homo sapien
gaatgactcggtctatcagtgagaagaaagcat

SEQ ID NO: 124726 - DNA, 33 bp, Homo sapien
gaatgactcggtctattagtgagaagaaagcat

SEQ ID NO: 124727 - DNA, 33 bp, Homo sapien
aagctgaagtcctgagcagaagaacaagaagtg

SEQ ID NO: 124728 - DNA, 33 bp, Homo sapien
aagctgaagtcctgagtagaagaacaagaagtg

SEQ ID NO: 124729 - DNA, 33 bp, Homo sapien
aattggaaacaaaagcagcttgataattgttat

SEQ ID NO: 124730 - DNA, 33 bp, Homo sapien
aattggaaacaaaagctgcttgataattgttat

SEQ ID NO: 124731 - DNA, 33 bp, Homo sapien
aaacatctgtgcataaacttacgtgcgggtact

SEQ ID NO: 124732 - DNA, 33 bp, Homo sapien
aaacatctgtgcataagcttacgtgcgggtact

SEQ ID NO: 124733 - DNA, 33 bp, Homo sapien
gtatgcctccttaatcactcagagtagcacata

SEQ ID NO: 124734 - DNA, 33 bp, Homo sapien
gtatgcctccttaatcgctcagagtagcacata

SEQ ID NO: 124735 - DNA, 33 bp, Homo sapien
gcaaagggctaaatgaagtgaagaagtaaaata

SEQ ID NO: 124736 - DNA, 33 bp, Homo sapien
gcaaagggctaaatgaggtgaagaagtaaaata

SEQ ID NO: 124737 - DNA, 33 bp, Homo sapien
gattttctagcttctacccttgctccttgatat

SEQ ID NO: 124738 - DNA, 33 bp, Homo sapien
gattttctagcttctatccttgctccttgatat

SEQ ID NO: 124739 - DNA, 33 bp, Homo sapien
aagaccacactctaggaatgatacacatattag

SEQ ID NO: 124740 - DNA, 33 bp, Homo sapien
aagaccacactctagggatgatacacatattag

SEQ ID NO: 124741 - DNA, 33 bp, Homo sapien
caacaaaacttaactacacacaatacacaatac

SEQ ID NO: 124742 - DNA, 33 bp, Homo sapien
caacaaaacttaactatacacaatacacaatac

SEQ ID NO: 124743 - DNA, 33 bp, Homo sapien
cagttctctagctgtacggttctgaatcatttg

SEQ ID NO: 124744 - DNA, 33 bp, Homo sapien
cagttctctagctgtatggttctgaatcatttg

SEQ ID NO: 124745 - DNA, 33 bp, Homo sapien
gtggaagctgaggttcaatcaagtaaaagttaa

SEQ ID NO: 124746 - DNA, 33 bp, Homo sapien
gtggaagctgaggttccatcaagtaaaagttaa

SEQ ID NO: 124747 - DNA, 33 bp, Homo sapien
ttagtggttgaacttaacaaaatttacttggta

SEQ ID NO: 124748 - DNA, 33 bp, Homo sapien
ttagtggttgaacttagcaaaatttacttggta

SEQ ID NO: 124749 - DNA, 33 bp, Homo sapien
tgccactgctaggtggccaaaaatttatgttga

SEQ ID NO: 124750 - DNA, 33 bp, Homo sapien
tgccactgctaggtggtcaaaaatttatgttga

SEQ ID NO: 124751 - DNA, 33 bp, Homo sapien
tagtacctactacctacaaagatttgaggagct

SEQ ID NO: 124752 - DNA, 33 bp, Homo sapien
tagtacctactacctataaagatttgaggagct

SEQ ID NO: 124753 - DNA, 33 bp, Homo sapien
tgcaaattttttcaggcaccatctgtattagtt

SEQ ID NO: 124754 - DNA, 33 bp, Homo sapien
tgcaaattttttcagggaccatctgtattagtt

SEQ ID NO: 124755 - DNA, 33 bp, Homo sapien
gatttcttagcaaagcgactcgccaaactaaac

SEQ ID NO: 124756 - DNA, 33 bp, Homo sapien
gatttcttagcaaagctactcgccaaactaaac

SEQ ID NO: 124757 - DNA, 33 bp, Homo sapien
gttatcccagaatgcaccggtacgcgagtgagg

SEQ ID NO: 124758 - DNA, 33 bp, Homo sapien
gttatcccagaatgcatcggtacgcgagtgagg

SEQ ID NO: 124759 - DNA, 33 bp, Homo sapien
tccttgctctccaggaaatctggatttggactt

SEQ ID NO: 124760 - DNA, 33 bp, Homo sapien
tccttgctctccaggagatctggatttggactt

SEQ ID NO: 124761 - DNA, 33 bp, Homo sapien
ttggagtgtggttatgaagggagaagtttccat

SEQ ID NO: 124762 - DNA, 33 bp, Homo sapien
ttggagtgtggttatggagggagaagtttccat

SEQ ID NO: 124763 - DNA, 33 bp, Homo sapien
tggctgctgtgttgaccatagactatcggggag

SEQ ID NO: 124764 - DNA, 33 bp, Homo sapien
tggctgctgtgttgactatagactatcggggag

SEQ ID NO: 124765 - DNA, 33 bp, Homo sapien
atgttcattccaaggaggctgagtacttgctgt

SEQ ID NO: 124766 - DNA, 33 bp, Homo sapien
atgttcattccaaggatgctgagtacttgctgt

SEQ ID NO: 124767 - DNA, 33 bp, Homo sapien
gcttctttgtctgcctcaaacattgttttttaa

SEQ ID NO: 124768 - DNA, 33 bp, Homo sapien
gcttctttgtctgcctgaaacattgttttttaa

SEQ ID NO: 124769 - DNA, 33 bp, Homo sapien
gacagcctggttaaaaccttcccactcatgaaa

SEQ ID NO: 124770 - DNA, 33 bp, Homo sapien
gacagcctggttaaaatcttcccactcatgaaa

SEQ ID NO: 124771 - DNA, 33 bp, Homo sapien
ttgggaaagatgtcatcatcgtctttccagggc

SEQ ID NO: 124772 - DNA, 33 bp, Homo sapien
ttgggaaagatgtcattatcgtctttccagggc

SEQ ID NO: 124773 - DNA, 33 bp, Homo sapien
gaaaacatttgcatctcaattcaatgtactttt

SEQ ID NO: 124774 - DNA, 33 bp, Homo sapien
gaaaacatttgcatcttaattcaatgtactttt

SEQ ID NO: 124775 - DNA, 33 bp, Homo sapien
actgtttagttggcaccatactctagaaacact

SEQ ID NO: 124776 - DNA, 33 bp, Homo sapien
actgtttagttggcacgatactctagaaacact

SEQ ID NO: 124777 - DNA, 33 bp, Homo sapien
gacagagaaatagtgtcaaatgtgcctctgaaa

SEQ ID NO: 124778 - DNA, 33 bp, Homo sapien
gacagagaaatagtgttaaatgtgcctctgaaa

SEQ ID NO: 124779 - DNA, 33 bp, Homo sapien
acatataaattatacccaagcacctaaaataac

SEQ ID NO: 124780 - DNA, 33 bp, Homo sapien
acatataaattataccgaagcacctaaaataac

SEQ ID NO: 124781 - DNA, 33 bp, Homo sapien
gagctgtgaatattcaggaagatggtactgaca

SEQ ID NO: 124782 - DNA, 33 bp, Homo sapien
gagctgtgaatattcatgaagatggtactgaca

SEQ ID NO: 124783 - DNA, 33 bp, Homo sapien
tgaggttcttgtataaacttcaccaattgcatt

SEQ ID NO: 124784 - DNA, 33 bp, Homo sapien
tgaggttcttgtataaccttcaccaattgcatt

SEQ ID NO: 124785 - DNA, 33 bp, Homo sapien
gccagggtacaaagaactagaagtaaccataga

SEQ ID NO: 124786 - DNA, 33 bp, Homo sapien
gccagggtacaaagaagtagaagtaaccataga

SEQ ID NO: 124787 - DNA, 33 bp, Homo sapien
tcatcaatattctctcaatgtccaagtaaatgg

SEQ ID NO: 124788 - DNA, 33 bp, Homo sapien
tcatcaatattctctcgatgtccaagtaaatgg

SEQ ID NO: 124789 - DNA, 33 bp, Homo sapien
tctttataaatatctaagacattccatgtatcc

SEQ ID NO: 124790 - DNA, 33 bp, Homo sapien
tctttataaatatctaggacattccatgtatcc

SEQ ID NO: 124791 - DNA, 33 bp, Homo sapien
ggtcattaaacacagacatggcaaaaatgaata

SEQ ID NO: 124792 - DNA, 33 bp, Homo sapien
ggtcattaaacacagatatggcaaaaatgaata

SEQ ID NO: 124793 - DNA, 33 bp, Homo sapien
aaaatgtcaacatgaaaccccttgttagtcata

SEQ ID NO: 124794 - DNA, 33 bp, Homo sapien
aaaatgtcaacatgaacccccttgttagtcata

SEQ ID NO: 124795 - DNA, 33 bp, Homo sapien
accatccttttaattcccctgtgcttcatccct

SEQ ID NO: 124796 - DNA, 33 bp, Homo sapien
accatccttttaattcgcctgtgcttcatccct

SEQ ID NO: 124797 - DNA, 33 bp, Homo sapien
caagaacttttccccactccctacagtgaagtt

SEQ ID NO: 124798 - DNA, 33 bp, Homo sapien
caagaacttttccccattccctacagtgaagtt

SEQ ID NO: 124799 - DNA, 33 bp, Homo sapien
agtgttgatgggactacatgtgcttagaggaca

SEQ ID NO: 124800 - DNA, 33 bp, Homo sapien
agtgttgatgggactatatgtgcttagaggaca

SEQ ID NO: 124801 - DNA, 33 bp, Homo sapien
cagcctttacatccataactgctgggtgcaagg

SEQ ID NO: 124802 - DNA, 33 bp, Homo sapien
cagcctttacatccatgactgctgggtgcaagg

SEQ ID NO: 124803 - DNA, 33 bp, Homo sapien
aggaggtagagcaagaagaaggagaggaaggga

SEQ ID NO: 124804 - DNA, 33 bp, Homo sapien
aggaggtagagcaagaggaaggagaggaaggga

SEQ ID NO: 124805 - DNA, 33 bp, Homo sapien
ttgcttccaggagctacctttagccttactatc

SEQ ID NO: 124806 - DNA, 33 bp, Homo sapien
ttgcttccaggagctatctttagccttactatc

SEQ ID NO: 124807 - DNA, 33 bp, Homo sapien
attgaagattccaaccaagactaacctctgacc

SEQ ID NO: 124808 - DNA, 33 bp, Homo sapien
attgaagattccaacccagactaacctctgacc

SEQ ID NO: 124809 - DNA, 33 bp, Homo sapien
tggaaataatttccacacctgtcaccagcgctt

SEQ ID NO: 124810 - DNA, 33 bp, Homo sapien
tggaaataatttccacgcctgtcaccagcgctt

SEQ ID NO: 124811 - DNA, 33 bp, Homo sapien
tagcaatccaattcaggattatttaacaagcct

SEQ ID NO: 124812 - DNA, 33 bp, Homo sapien
tagcaatccaattcagtattatttaacaagcct

SEQ ID NO: 124813 - DNA, 33 bp, Homo sapien
ctttagcacttcttaacaagcccttcataataa

SEQ ID NO: 124814 - DNA, 33 bp, Homo sapien
ctttagcacttcttaataagcccttcataataa

SEQ ID NO: 124815 - DNA, 33 bp, Homo sapien
gaagaaaattgtaggaccacctagaaaagccaa

SEQ ID NO: 124816 - DNA, 33 bp, Homo sapien
gaagaaaattgtaggatcacctagaaaagccaa

SEQ ID NO: 124817 - DNA, 33 bp, Homo sapien
aggaagaacagctacaatagtcaagagagtgtg

SEQ ID NO: 124818 - DNA, 33 bp, Homo sapien
aggaagaacagctacagtagtcaagagagtgtg

SEQ ID NO: 124819 - DNA, 33 bp, Homo sapien
tactgtgaccggcaaaacctttgttatctgtag

SEQ ID NO: 124820 - DNA, 33 bp, Homo sapien
tactgtgaccggcaaagcctttgttatctgtag

SEQ ID NO: 124821 - DNA, 33 bp, Homo sapien
gtggggcaggaagtgacgaggattcttagagaa

SEQ ID NO: 124822 - DNA, 33 bp, Homo sapien
gtggggcaggaagtgaggaggattcttagagaa

SEQ ID NO: 124823 - DNA, 33 bp, Homo sapien
tttctggaaaggcataaacaagatttttttttg

SEQ ID NO: 124824 - DNA, 33 bp, Homo sapien
tttctggaaaggcatagacaagatttttttttg

SEQ ID NO: 124825 - DNA, 33 bp, Homo sapien
tgaacactgggcctgaaaagtttggactgggca

SEQ ID NO: 124826 - DNA, 33 bp, Homo sapien
tgaacactgggcctgagaagtttggactgggca

SEQ ID NO: 124827 - DNA, 33 bp, Homo sapien
gccttcggtttttgccactgttaaagttcacaa

SEQ ID NO: 124828 - DNA, 33 bp, Homo sapien
gccttcggtttttgccgctgttaaagttcacaa

SEQ ID NO: 124829 - DNA, 33 bp, Homo sapien
acctggaaggaaagcaagtatggagaatacata

SEQ ID NO: 124830 - DNA, 33 bp, Homo sapien
acctggaaggaaagcaggtatggagaatacata

SEQ ID NO: 124831 - DNA, 33 bp, Homo sapien
gtatatatgcgagagcacttttaatttgctccc

SEQ ID NO: 124832 - DNA, 33 bp, Homo sapien
gtatatatgcgagagcgcttttaatttgctccc

SEQ ID NO: 124833 - DNA, 33 bp, Homo sapien
gctcaaagttaggagaccacttcgatgtggaag

SEQ ID NO: 124834 - DNA, 33 bp, Homo sapien
gctcaaagttaggagagcacttcgatgtggaag

SEQ ID NO: 124835 - DNA, 33 bp, Homo sapien
cggtgcaatcagatataagcgttagatgcatta

SEQ ID NO: 124836 - DNA, 33 bp, Homo sapien
cggtgcaatcagatatgagcgttagatgcatta

SEQ ID NO: 124837 - DNA, 33 bp, Homo sapien
ctcacatccagtttcaaatgaatctcaaaaagt

SEQ ID NO: 124838 - DNA, 33 bp, Homo sapien
ctcacatccagtttcagatgaatctcaaaaagt

SEQ ID NO: 124839 - DNA, 33 bp, Homo sapien
agagaataaatcccaagtagtgttgctaagagc

SEQ ID NO: 124840 - DNA, 33 bp, Homo sapien
agagaataaatcccaattagtgttgctaagagc

SEQ ID NO: 124841 - DNA, 33 bp, Homo sapien
agagaaagcaaaagacagagtgcacggtactgt

SEQ ID NO: 124842 - DNA, 33 bp, Homo sapien
agagaaagcaaaagacggagtgcacggtactgt

SEQ ID NO: 124843 - DNA, 33 bp, Homo sapien
agtaaacttctgcaaaacaagcactacacctct

SEQ ID NO: 124844 - DNA, 33 bp, Homo sapien
agtaaacttctgcaaatcaagcactacacctct

SEQ ID NO: 124845 - DNA, 33 bp, Homo sapien
aaacaaccagcaagtacgagtgtcaaaaactag

SEQ ID NO: 124846 - DNA, 33 bp, Homo sapien
aaacaaccagcaagtatgagtgtcaaaaactag

SEQ ID NO: 124847 - DNA, 33 bp, Homo sapien
aaaaactagagagcaaatggtattacctcagaa

SEQ ID NO: 124848 - DNA, 33 bp, Homo sapien
aaaaactagagagcaattggtattacctcagaa

SEQ ID NO: 124849 - DNA, 33 bp, Homo sapien
gtatggtgtggttctaaaaattttgtacttaaa

SEQ ID NO: 124850 - DNA, 33 bp, Homo sapien
gtatggtgtggttctacaaattttgtacttaaa

SEQ ID NO: 124851 - DNA, 33 bp, Homo sapien
agtatgtgattttccaagaggaggcaaaacact

SEQ ID NO: 124852 - DNA, 33 bp, Homo sapien
agtatgtgattttccatgaggaggcaaaacact

SEQ ID NO: 124853 - DNA, 33 bp, Homo sapien
ggttctggtttcttcacggtcagtgcacactgt

SEQ ID NO: 124854 - DNA, 33 bp, Homo sapien
ggttctggtttcttcatggtcagtgcacactgt

SEQ ID NO: 124855 - DNA, 33 bp, Homo sapien
agccatgttcctataaatgtatgtctgtatgta

SEQ ID NO: 124856 - DNA, 33 bp, Homo sapien
agccatgttcctataagtgtatgtctgtatgta

SEQ ID NO: 124857 - DNA, 33 bp, Homo sapien
agagtgagaagcagaacatttaggctggcacat

SEQ ID NO: 124858 - DNA, 33 bp, Homo sapien
agagtgagaagcagaatatttaggctggcacat

SEQ ID NO: 124859 - DNA, 33 bp, Homo sapien
ttttaacatatgtttcacaatttacactgcaga

SEQ ID NO: 124860 - DNA, 33 bp, Homo sapien
ttttaacatatgtttcgcaatttacactgcaga

SEQ ID NO: 124861 - DNA, 33 bp, Homo sapien
aacagctctagcaattcaagcaattgttgttag

SEQ ID NO: 124862 - DNA, 33 bp, Homo sapien
aacagctctagcaatttaagcaattgttgttag

SEQ ID NO: 124863 - DNA, 33 bp, Homo sapien
agccttaagtaagacccgagaggtgagaaaaga

SEQ ID NO: 124864 - DNA, 33 bp, Homo sapien
agccttaagtaagacctgagaggtgagaaaaga

SEQ ID NO: 124865 - DNA, 33 bp, Homo sapien
gtgccaatttctgtggcaaaaatgctgtttctt

SEQ ID NO: 124866 - DNA, 33 bp, Homo sapien
gtgccaatttctgtggtaaaaatgctgtttctt

SEQ ID NO: 124867 - DNA, 33 bp, Homo sapien
ctaaaatatattctaccggaggcaaattctatc

SEQ ID NO: 124868 - DNA, 33 bp, Homo sapien
ctaaaatatattctactggaggcaaattctatc

SEQ ID NO: 124869 - DNA, 33 bp, Homo sapien
gaccctccagtttatcccctagtttctgagtta

SEQ ID NO: 124870 - DNA, 33 bp, Homo sapien
gaccctccagtttatctcctagtttctgagtta

SEQ ID NO: 124871 - DNA, 33 bp, Homo sapien
agaaagcaaccctcaacggacggctgcagaaga

SEQ ID NO: 124872 - DNA, 33 bp, Homo sapien
agaaagcaaccctcaatggacggctgcagaaga

SEQ ID NO: 124873 - DNA, 33 bp, Homo sapien
ggcagagcacagtagacacaagaaaagcagcca

SEQ ID NO: 124874 - DNA, 33 bp, Homo sapien
ggcagagcacagtagatacaagaaaagcagcca

SEQ ID NO: 124875 - DNA, 33 bp, Homo sapien
ttaactccaaattcagaactgcctgccttgact

SEQ ID NO: 124876 - DNA, 33 bp, Homo sapien
ttaactccaaattcaggactgcctgccttgact

SEQ ID NO: 124877 - DNA, 33 bp, Homo sapien
gacaaacgagaatgtacgggcaaaggtctacac

SEQ ID NO: 124878 - DNA, 33 bp, Homo sapien
gacaaacgagaatgtatgggcaaaggtctacac

SEQ ID NO: 124879 - DNA, 33 bp, Homo sapien
ccttttgcgttttatacacttacacaaaagaac

SEQ ID NO: 124880 - DNA, 33 bp, Homo sapien
ccttttgcgttttatatacttacacaaaagaac

SEQ ID NO: 124881 - DNA, 33 bp, Homo sapien
tgaaaattatttttaaagtggcagaaacaaata

SEQ ID NO: 124882 - DNA, 33 bp, Homo sapien
tgaaaattatttttaatgtggcagaaacaaata

SEQ ID NO: 124883 - DNA, 33 bp, Homo sapien
atggaaatacagctgacaaatggtgactatggt

SEQ ID NO: 124884 - DNA, 33 bp, Homo sapien
atggaaatacagctgagaaatggtgactatggt

SEQ ID NO: 124885 - DNA, 33 bp, Homo sapien
tgaaaagtaattatacaccaggcccaacaggct

SEQ ID NO: 124886 - DNA, 33 bp, Homo sapien
tgaaaagtaattatacgccaggcccaacaggct

SEQ ID NO: 124887 - DNA, 33 bp, Homo sapien
agagtttttatctaaaagatgtgtaagtggtat

SEQ ID NO: 124888 - DNA, 33 bp, Homo sapien
agagtttttatctaaaggatgtgtaagtggtat

SEQ ID NO: 124889 - DNA, 33 bp, Homo sapien
aaataaattgaaggtaaggggtgacagaacctg

SEQ ID NO: 124890 - DNA, 33 bp, Homo sapien
aaataaattgaaggtatggggtgacagaacctg

SEQ ID NO: 124891 - DNA, 33 bp, Homo sapien
aggcaagtgagattaacctcctggattttcctg

SEQ ID NO: 124892 - DNA, 33 bp, Homo sapien
aggcaagtgagattaagctcctggattttcctg

SEQ ID NO: 124893 - DNA, 33 bp, Homo sapien
cgaaatcccatggtacaaaacaacttcagcact

SEQ ID NO: 124894 - DNA, 33 bp, Homo sapien
cgaaatcccatggtacgaaacaacttcagcact

SEQ ID NO: 124895 - DNA, 33 bp, Homo sapien
acaagtactcctgctacgaatttatccaataca

SEQ ID NO: 124896 - DNA, 33 bp, Homo sapien
acaagtactcctgctaggaatttatccaataca

SEQ ID NO: 124897 - DNA, 33 bp, Homo sapien
gtccctgatgcttctccacgtggccctgcatga

SEQ ID NO: 124898 - DNA, 33 bp, Homo sapien
gtccctgatgcttctctacgtggccctgcatga

SEQ ID NO: 124899 - DNA, 33 bp, Homo sapien
gcaagtatatgacaaccgcgacagcaactcatg

SEQ ID NO: 124900 - DNA, 33 bp, Homo sapien
gcaagtatatgacaactgcgacagcaactcatg

SEQ ID NO: 124901 - DNA, 33 bp, Homo sapien
agttggtagatgaataaccacactgttgtcctt

SEQ ID NO: 124902 - DNA, 33 bp, Homo sapien
agttggtagatgaatacccacactgttgtcctt

SEQ ID NO: 124903 - DNA, 33 bp, Homo sapien
gatagtggcagtaataccacaacccttaccact

SEQ ID NO: 124904 - DNA, 33 bp, Homo sapien
gatagtggcagtaatatcacaacccttaccact

SEQ ID NO: 124905 - DNA, 33 bp, Homo sapien
atccttgaacccttgaagaagttccagatctcc

SEQ ID NO: 124906 - DNA, 33 bp, Homo sapien
atccttgaacccttgaggaagttccagatctcc

SEQ ID NO: 124907 - DNA, 33 bp, Homo sapien
cctcttgcccttggaagaaaggtgcatttgtat

SEQ ID NO: 124908 - DNA, 33 bp, Homo sapien
cctcttgcccttggaataaaggtgcatttgtat

SEQ ID NO: 124909 - DNA, 33 bp, Homo sapien
agttactctgacacacactaaactttgagaatc

SEQ ID NO: 124910 - DNA, 33 bp, Homo sapien
agttactctgacacacgctaaactttgagaatc

SEQ ID NO: 124911 - DNA, 33 bp, Homo sapien
ggaataagagtattgacccaagttattatacgt

SEQ ID NO: 124912 - DNA, 33 bp, Homo sapien
ggaataagagtattgatccaagttattatacgt

SEQ ID NO: 124913 - DNA, 33 bp, Homo sapien
atgctgggtgtgaataacatgagttggactgga

SEQ ID NO: 124914 - DNA, 33 bp, Homo sapien
atgctgggtgtgaatagcatgagttggactgga

SEQ ID NO: 124915 - DNA, 33 bp, Homo sapien
gaaacaactttatttgaaagcataagggatgca

SEQ ID NO: 124916 - DNA, 33 bp, Homo sapien
gaaacaactttatttgcaagcataagggatgca

SEQ ID NO: 124917 - DNA, 33 bp, Homo sapien
ctgatgaatatagaaacgagcttctggtttgtc

SEQ ID NO: 124918 - DNA, 33 bp, Homo sapien
ctgatgaatatagaaatgagcttctggtttgtc

SEQ ID NO: 124919 - DNA, 33 bp, Homo sapien
ccaataatatctttgaccatctactatatgatt

SEQ ID NO: 124920 - DNA, 33 bp, Homo sapien
ccaataatatctttgagcatctactatatgatt

SEQ ID NO: 124921 - DNA, 33 bp, Homo sapien
tttgccttgatgttgacgactactgactgctca

SEQ ID NO: 124922 - DNA, 33 bp, Homo sapien
tttgccttgatgttgatgactactgactgctca

SEQ ID NO: 124923 - DNA, 33 bp, Homo sapien
atgtgagtatctctagaccacagaaaaaaaggg

SEQ ID NO: 124924 - DNA, 33 bp, Homo sapien
atgtgagtatctctaggccacagaaaaaaaggg

SEQ ID NO: 124925 - DNA, 33 bp, Homo sapien
aaacaacaattatagacgaggaagtgagatagt

SEQ ID NO: 124926 - DNA, 33 bp, Homo sapien
aaacaacaattatagatgaggaagtgagatagt

SEQ ID NO: 124927 - DNA, 33 bp, Homo sapien
ttgaaaagattaacaaagtagacctcaggcaag

SEQ ID NO: 124928 - DNA, 33 bp, Homo sapien
ttgaaaagattaacaacgtagacctcaggcaag

SEQ ID NO: 124929 - DNA, 33 bp, Homo sapien
acaacatatactcctaagtaccctttccaaata

SEQ ID NO: 124930 - DNA, 33 bp, Homo sapien
acaacatatactcctatgtaccctttccaaata

SEQ ID NO: 124931 - DNA, 33 bp, Homo sapien
ctacaatgaaaatacaatgtaccagaaatactg

SEQ ID NO: 124932 - DNA, 33 bp, Homo sapien
ctacaatgaaaatacagtgtaccagaaatactg

SEQ ID NO: 124933 - DNA, 33 bp, Homo sapien
aatactatgaataactcacaaatctgataacct

SEQ ID NO: 124934 - DNA, 33 bp, Homo sapien
aatactatgaataactgacaaatctgataacct

SEQ ID NO: 124935 - DNA, 33 bp, Homo sapien
tctgaattcaatctaacgctcttgctctgcagt

SEQ ID NO: 124936 - DNA, 33 bp, Homo sapien
tctgaattcaatctaatgctcttgctctgcagt

SEQ ID NO: 124937 - DNA, 33 bp, Homo sapien
cgttctatttttataaacttctctgagtgcatg

SEQ ID NO: 124938 - DNA, 33 bp, Homo sapien
cgttctatttttataagcttctctgagtgcatg

SEQ ID NO: 124939 - DNA, 33 bp, Homo sapien
agggctgacatcaactaaagacctatttatgag

SEQ ID NO: 124940 - DNA, 33 bp, Homo sapien
agggctgacatcaactgaagacctatttatgag

SEQ ID NO: 124941 - DNA, 33 bp, Homo sapien
ttgtgcttgcaggtaaccatcattggccttcaa

SEQ ID NO: 124942 - DNA, 33 bp, Homo sapien
ttgtgcttgcaggtaatcatcattggccttcaa

SEQ ID NO: 124943 - DNA, 33 bp, Homo sapien
cttgcactcagggacacacaagtgaaagataac

SEQ ID NO: 124944 - DNA, 33 bp, Homo sapien
cttgcactcagggacatacaagtgaaagataac

SEQ ID NO: 124945 - DNA, 33 bp, Homo sapien
gttaagatgttcattcccataatttcatgccaa

SEQ ID NO: 124946 - DNA, 33 bp, Homo sapien
gttaagatgttcattctcataatttcatgccaa

SEQ ID NO: 124947 - DNA, 33 bp, Homo sapien
gcatccagcaccaaaaaatgtgccacttgtttt

SEQ ID NO: 124948 - DNA, 33 bp, Homo sapien
gcatccagcaccaaaagatgtgccacttgtttt

SEQ ID NO: 124949 - DNA, 33 bp, Homo sapien
ttagctatagcatcttaaaaagttaaagacaag

SEQ ID NO: 124950 - DNA, 33 bp, Homo sapien
ttagctatagcatcttgaaaagttaaagacaag

SEQ ID NO: 124951 - DNA, 33 bp, Homo sapien
ctccattgcttatttgcaacgtctttctatgga

SEQ ID NO: 124952 - DNA, 33 bp, Homo sapien
ctccattgcttatttgtaacgtctttctatgga

SEQ ID NO: 124953 - DNA, 33 bp, Homo sapien
ttagatatgaaatcagaactagaagggctttaa

SEQ ID NO: 124954 - DNA, 33 bp, Homo sapien
ttagatatgaaatcaggactagaagggctttaa

SEQ ID NO: 124955 - DNA, 33 bp, Homo sapien
atcatgaaaaagaatcagagcgggaaatatggc

SEQ ID NO: 124956 - DNA, 33 bp, Homo sapien
atcatgaaaaagaatcggagcgggaaatatggc

SEQ ID NO: 124957 - DNA, 33 bp, Homo sapien
ggtaaaagtggtatgaaaaatgctcaatccttc

SEQ ID NO: 124958 - DNA, 33 bp, Homo sapien
ggtaaaagtggtatgacaaatgctcaatccttc

SEQ ID NO: 124959 - DNA, 33 bp, Homo sapien
aagggtaaatacttcacgatcgtggcttcttct

SEQ ID NO: 124960 - DNA, 33 bp, Homo sapien
aagggtaaatacttcatgatcgtggcttcttct

SEQ ID NO: 124961 - DNA, 33 bp, Homo sapien
tctcccaagctttaagacccttccggatgtaga

SEQ ID NO: 124962 - DNA, 33 bp, Homo sapien
tctcccaagctttaagtcccttccggatgtaga

SEQ ID NO: 124963 - DNA, 33 bp, Homo sapien
gcaatgagtgagagaaaatcaaagttttacagg

SEQ ID NO: 124964 - DNA, 33 bp, Homo sapien
gcaatgagtgagagaagatcaaagttttacagg

SEQ ID NO: 124965 - DNA, 33 bp, Homo sapien
tcaactgaaactggtaccaaaatgatctaaatg

SEQ ID NO: 124966 - DNA, 33 bp, Homo sapien
tcaactgaaactggtatcaaaatgatctaaatg

SEQ ID NO: 124967 - DNA, 33 bp, Homo sapien
tgttctggtcacccaacagaagtgggatgaagt

SEQ ID NO: 124968 - DNA, 33 bp, Homo sapien
tgttctggtcacccaatagaagtgggatgaagt

SEQ ID NO: 124969 - DNA, 33 bp, Homo sapien
aatcaatatacaaaaaccaagtccatctatata

SEQ ID NO: 124970 - DNA, 33 bp, Homo sapien
aatcaatatacaaaaatcaagtccatctatata

SEQ ID NO: 124971 - DNA, 33 bp, Homo sapien
ctcataacttatcaaaacacattatcttctaca

SEQ ID NO: 124972 - DNA, 33 bp, Homo sapien
ctcataacttatcaaatcacattatcttctaca

SEQ ID NO: 124973 - DNA, 33 bp, Homo sapien
ttagaagaagaggaaaagactggagtttgctca

SEQ ID NO: 124974 - DNA, 33 bp, Homo sapien
ttagaagaagaggaaaggactggagtttgctca

SEQ ID NO: 124975 - DNA, 33 bp, Homo sapien
gttgtccaaagctcagaattgcttatctcactg

SEQ ID NO: 124976 - DNA, 33 bp, Homo sapien
gttgtccaaagctcagcattgcttatctcactg

SEQ ID NO: 124977 - DNA, 33 bp, Homo sapien
tttgacaggaataaagaattatgctgatggagg

SEQ ID NO: 124978 - DNA, 33 bp, Homo sapien
tttgacaggaataaagcattatgctgatggagg

SEQ ID NO: 124979 - DNA, 33 bp, Homo sapien
caaagcctcatggttcaattggactcagctatt

SEQ ID NO: 124980 - DNA, 33 bp, Homo sapien
caaagcctcatggttcgattggactcagctatt

SEQ ID NO: 124981 - DNA, 33 bp, Homo sapien
atgaaaacccctgtcaacatccagaaatagcct

SEQ ID NO: 124982 - DNA, 33 bp, Homo sapien
atgaaaacccctgtcagcatccagaaatagcct

SEQ ID NO: 124983 - DNA, 33 bp, Homo sapien
ccaggaaggctcaggaagtgcttttatggtgct

SEQ ID NO: 124984 - DNA, 33 bp, Homo sapien
ccaggaaggctcaggatgtgcttttatggtgct

SEQ ID NO: 124985 - DNA, 33 bp, Homo sapien
gtccctcagtccaaaggatgctgcttgtttctc

SEQ ID NO: 124986 - DNA, 33 bp, Homo sapien
gtccctcagtccaaagtatgctgcttgtttctc

SEQ ID NO: 124987 - DNA, 33 bp, Homo sapien
tctttttgtccttacaaatctcctgtcttcacc

SEQ ID NO: 124988 - DNA, 33 bp, Homo sapien
tctttttgtccttacacatctcctgtcttcacc

SEQ ID NO: 124989 - DNA, 33 bp, Homo sapien
tgcccaactaaactaactcactttgtcctggac

SEQ ID NO: 124990 - DNA, 33 bp, Homo sapien
tgcccaactaaactaattcactttgtcctggac

SEQ ID NO: 124991 - DNA, 33 bp, Homo sapien
cccattgagactcacaatcagcctctgtgtagc

SEQ ID NO: 124992 - DNA, 33 bp, Homo sapien
cccattgagactcacagtcagcctctgtgtagc

SEQ ID NO: 124993 - DNA, 33 bp, Homo sapien
acaccaagtgaggggaaaaccaataactggatc

SEQ ID NO: 124994 - DNA, 33 bp, Homo sapien
acaccaagtgaggggagaaccaataactggatc

SEQ ID NO: 124995 - DNA, 33 bp, Homo sapien
ggtccactttgaacacaatgaaaacaggacaag

SEQ ID NO: 124996 - DNA, 33 bp, Homo sapien
ggtccactttgaacacgatgaaaacaggacaag

SEQ ID NO: 124997 - DNA, 33 bp, Homo sapien
gactggcaggataatcaagaactagttagaatc

SEQ ID NO: 124998 - DNA, 33 bp, Homo sapien
gactggcaggataatccagaactagttagaatc

SEQ ID NO: 124999 - DNA, 33 bp, Homo sapien
ggagacacctgctaataaggagagttttaaaag

SEQ ID NO: 125000 - DNA, 33 bp, Homo sapien
ggagacacctgctaatgaggagagttttaaaag

SEQ ID NO: 125001 - DNA, 33 bp, Homo sapien
gttattttatctggtccacaaaacaaaccaaca

SEQ ID NO: 125002 - DNA, 33 bp, Homo sapien
gttattttatctggtctacaaaacaaaccaaca

SEQ ID NO: 125003 - DNA, 33 bp, Homo sapien
aatgagctttcctaacagccaacatcacttacc

SEQ ID NO: 125004 - DNA, 33 bp, Homo sapien
aatgagctttcctaacggccaacatcacttacc

SEQ ID NO: 125005 - DNA, 33 bp, Homo sapien
tacctggatgattctacataaactcaacattga

SEQ ID NO: 125006 - DNA, 33 bp, Homo sapien
tacctggatgattctatataaactcaacattga

SEQ ID NO: 125007 - DNA, 33 bp, Homo sapien
ttgacataaggacaacaagaagcatatgcaaag

SEQ ID NO: 125008 - DNA, 33 bp, Homo sapien
ttgacataaggacaacgagaagcatatgcaaag

SEQ ID NO: 125009 - DNA, 33 bp, Homo sapien
tctcttgaactcttaccatgaccatgagaacaa

SEQ ID NO: 125010 - DNA, 33 bp, Homo sapien
tctcttgaactcttactatgaccatgagaacaa

SEQ ID NO: 125011 - DNA, 33 bp, Homo sapien
gtttgtcagttagtaacgaaaaatgaaaagtgg

SEQ ID NO: 125012 - DNA, 33 bp, Homo sapien
gtttgtcagttagtaaggaaaaatgaaaagtgg

SEQ ID NO: 125013 - DNA, 33 bp, Homo sapien
ttttgtgttgccttaacattgggtcctctggat

SEQ ID NO: 125014 - DNA, 33 bp, Homo sapien
ttttgtgttgccttaatattgggtcctctggat

SEQ ID NO: 125015 - DNA, 33 bp, Homo sapien
acaagggtttttcagaacaagattattctcatc

SEQ ID NO: 125016 - DNA, 33 bp, Homo sapien
acaagggtttttcagatcaagattattctcatc

SEQ ID NO: 125017 - DNA, 33 bp, Homo sapien
ataagttccagtgaaaagacaaaatgactgcaa

SEQ ID NO: 125018 - DNA, 33 bp, Homo sapien
ataagttccagtgaaaggacaaaatgactgcaa

SEQ ID NO: 125019 - DNA, 33 bp, Homo sapien
tgcacaatatggcacaaagagccacctctaggg

SEQ ID NO: 125020 - DNA, 33 bp, Homo sapien
tgcacaatatggcacagagagccacctctaggg

SEQ ID NO: 125021 - DNA, 33 bp, Homo sapien
taacagggtaatgagccagagaaggttagagaa

SEQ ID NO: 125022 - DNA, 33 bp, Homo sapien
taacagggtaatgagctagagaaggttagagaa

SEQ ID NO: 125023 - DNA, 33 bp, Homo sapien
agaggaagagctattacggataaggtggcattt

SEQ ID NO: 125024 - DNA, 33 bp, Homo sapien
agaggaagagctattatggataaggtggcattt

SEQ ID NO: 125025 - DNA, 33 bp, Homo sapien
cactggagaaaatcaaagactgttctctaagtg

SEQ ID NO: 125026 - DNA, 33 bp, Homo sapien
cactggagaaaatcaacgactgttctctaagtg

SEQ ID NO: 125027 - DNA, 33 bp, Homo sapien
tttcaatatttgcctgaatgtttgtttatgttt

SEQ ID NO: 125028 - DNA, 33 bp, Homo sapien
tttcaatatttgcctgcatgtttgtttatgttt

SEQ ID NO: 125029 - DNA, 33 bp, Homo sapien
agactgccataaatcagcatcagcagggtatgt

SEQ ID NO: 125030 - DNA, 33 bp, Homo sapien
agactgccataaatcatcatcagcagggtatgt

SEQ ID NO: 125031 - DNA, 33 bp, Homo sapien
aacatccttgtaagagacctagatatcaggaag

SEQ ID NO: 125032 - DNA, 33 bp, Homo sapien
aacatccttgtaagaggcctagatatcaggaag

SEQ ID NO: 125033 - DNA, 33 bp, Homo sapien
aaaattcatgttgtcaaaataccttctatatag

SEQ ID NO: 125034 - DNA, 33 bp, Homo sapien
aaaattcatgttgtcagaataccttctatatag

SEQ ID NO: 125035 - DNA, 33 bp, Homo sapien
tgcttatagtccaaaaatttgatatatgacagt

SEQ ID NO: 125036 - DNA, 33 bp, Homo sapien
tgcttatagtccaaaagtttgatatatgacagt

SEQ ID NO: 125037 - DNA, 33 bp, Homo sapien
aattatctgagcacaacctagtgtatgttgcaa

SEQ ID NO: 125038 - DNA, 33 bp, Homo sapien
aattatctgagcacaatctagtgtatgttgcaa

SEQ ID NO: 125039 - DNA, 33 bp, Homo sapien
catttaataacatttccatttgccccctcggag

SEQ ID NO: 125040 - DNA, 33 bp, Homo sapien
catttaataacatttctatttgccccctcggag

SEQ ID NO: 125041 - DNA, 33 bp, Homo sapien
aaggggattataataaatctagaggcattttat

SEQ ID NO: 125042 - DNA, 33 bp, Homo sapien
aaggggattataataagtctagaggcattttat

SEQ ID NO: 125043 - DNA, 33 bp, Homo sapien
atttcctctacatggaacagtctctcagttgtt

SEQ ID NO: 125044 - DNA, 33 bp, Homo sapien
atttcctctacatggatcagtctctcagttgtt

SEQ ID NO: 125045 - DNA, 33 bp, Homo sapien
atgaagttcctgtataccccatctcccatttcc

SEQ ID NO: 125046 - DNA, 33 bp, Homo sapien
atgaagttcctgtatatcccatctcccatttcc

SEQ ID NO: 125047 - DNA, 33 bp, Homo sapien
aaggcaaagaatgatccctgagctaaggctgga

SEQ ID NO: 125048 - DNA, 33 bp, Homo sapien
aaggcaaagaatgatctctgagctaaggctgga

SEQ ID NO: 125049 - DNA, 33 bp, Homo sapien
tgttttcttaatctcaaaatagggactgaagaa

SEQ ID NO: 125050 - DNA, 33 bp, Homo sapien
tgttttcttaatctcataatagggactgaagaa

SEQ ID NO: 125051 - DNA, 33 bp, Homo sapien
atgatagggtttggacagatcaaatttagtggt

SEQ ID NO: 125052 - DNA, 33 bp, Homo sapien
atgatagggtttggacggatcaaatttagtggt

SEQ ID NO: 125053 - DNA, 33 bp, Homo sapien
tggtgcctgggagagtaaaagggcgggtgctct

SEQ ID NO: 125054 - DNA, 33 bp, Homo sapien
tggtgcctgggagagtgaaagggcgggtgctct

SEQ ID NO: 125055 - DNA, 33 bp, Homo sapien
ggtaaacattcttttacgttccaaagtaattac

SEQ ID NO: 125056 - DNA, 33 bp, Homo sapien
ggtaaacattcttttatgttccaaagtaattac

SEQ ID NO: 125057 - DNA, 33 bp, Homo sapien
atatacattaataaaaatgatattggtcctaat

SEQ ID NO: 125058 - DNA, 33 bp, Homo sapien
atatacattaataaaattgatattggtcctaat

SEQ ID NO: 125059 - DNA, 33 bp, Homo sapien
tggatacgttcaaacacgaagacttaacctaga

SEQ ID NO: 125060 - DNA, 33 bp, Homo sapien
tggatacgttcaaacaggaagacttaacctaga

SEQ ID NO: 125061 - DNA, 33 bp, Homo sapien
tagactgtggggaaaagggtgaatttgttctct

SEQ ID NO: 125062 - DNA, 33 bp, Homo sapien
tagactgtggggaaaatggtgaatttgttctct

SEQ ID NO: 125063 - DNA, 33 bp, Homo sapien
ccattgctgtgactacacaatcaggagagaata

SEQ ID NO: 125064 - DNA, 33 bp, Homo sapien
ccattgctgtgactacgcaatcaggagagaata

SEQ ID NO: 125065 - DNA, 33 bp, Homo sapien
ggagaaacaaatgacaaatagaagtgacagaaa

SEQ ID NO: 125066 - DNA, 33 bp, Homo sapien
ggagaaacaaatgacagatagaagtgacagaaa

SEQ ID NO: 125067 - DNA, 33 bp, Homo sapien
cagctcaactctatgcactctcttcaataattt

SEQ ID NO: 125068 - DNA, 33 bp, Homo sapien
cagctcaactctatgcgctctcttcaataattt

SEQ ID NO: 125069 - DNA, 33 bp, Homo sapien
aataacatcaggtgtcaaaaatgtctttcaaat

SEQ ID NO: 125070 - DNA, 33 bp, Homo sapien
aataacatcaggtgtcgaaaatgtctttcaaat

SEQ ID NO: 125071 - DNA, 33 bp, Homo sapien
gcttttgtagctttgtcaaatataaattggcca

SEQ ID NO: 125072 - DNA, 33 bp, Homo sapien
gcttttgtagctttgtgaaatataaattggcca

SEQ ID NO: 125073 - DNA, 33 bp, Homo sapien
ttgcacattgctaataagaatgtaagatgctgc

SEQ ID NO: 125074 - DNA, 33 bp, Homo sapien
ttgcacattgctaataggaatgtaagatgctgc

SEQ ID NO: 125075 - DNA, 33 bp, Homo sapien
atctgtatctcttgcaactctccagtctgtgga

SEQ ID NO: 125076 - DNA, 33 bp, Homo sapien
atctgtatctcttgcagctctccagtctgtgga

SEQ ID NO: 125077 - DNA, 33 bp, Homo sapien
tgtgagaaggcgaagacggaaaataggtgaatg

SEQ ID NO: 125078 - DNA, 33 bp, Homo sapien
tgtgagaaggcgaagatggaaaataggtgaatg

SEQ ID NO: 125079 - DNA, 33 bp, Homo sapien
ataagctactatgtcagaaccttttactggaat

SEQ ID NO: 125080 - DNA, 33 bp, Homo sapien
ataagctactatgtcataaccttttactggaat

SEQ ID NO: 125081 - DNA, 33 bp, Homo sapien
gctgtccacattttgtgaaacctaaccacaaaa

SEQ ID NO: 125082 - DNA, 33 bp, Homo sapien
gctgtccacattttgttaaacctaaccacaaaa

SEQ ID NO: 125083 - DNA, 33 bp, Homo sapien
cagctgtgtagaaatacaactggactaaaaggg

SEQ ID NO: 125084 - DNA, 33 bp, Homo sapien
cagctgtgtagaaatataactggactaaaaggg

SEQ ID NO: 125085 - DNA, 33 bp, Homo sapien
agatacgtggtgaccaaacacccctgggaagaa

SEQ ID NO: 125086 - DNA, 33 bp, Homo sapien
agatacgtggtgaccagacacccctgggaagaa

SEQ ID NO: 125087 - DNA, 33 bp, Homo sapien
cgtcctgctcttaccaactcatgaaaacctctt

SEQ ID NO: 125088 - DNA, 33 bp, Homo sapien
cgtcctgctcttaccagctcatgaaaacctctt

SEQ ID NO: 125089 - DNA, 33 bp, Homo sapien
ctatgtaggctcagaaacgcattctcttttccc

SEQ ID NO: 125090 - DNA, 33 bp, Homo sapien
ctatgtaggctcagaaccgcattctcttttccc

SEQ ID NO: 125091 - DNA, 33 bp, Homo sapien
gggaaataaatgcacaaacctgaagcaatgagc

SEQ ID NO: 125092 - DNA, 33 bp, Homo sapien
gggaaataaatgcacacacctgaagcaatgagc

SEQ ID NO: 125093 - DNA, 33 bp, Homo sapien
tctgcttctcctttagaacttgaaaagacaaac

SEQ ID NO: 125094 - DNA, 33 bp, Homo sapien
tctgcttctcctttagtacttgaaaagacaaac

SEQ ID NO: 125095 - DNA, 33 bp, Homo sapien
ctgttaggttaaccaaaaattagacttgctcct

SEQ ID NO: 125096 - DNA, 33 bp, Homo sapien
ctgttaggttaaccaagaattagacttgctcct

SEQ ID NO: 125097 - DNA, 33 bp, Homo sapien
ggccatctcagggggcaatgaggaaacagagtt

SEQ ID NO: 125098 - DNA, 33 bp, Homo sapien
ggccatctcagggggcgatgaggaaacagagtt

SEQ ID NO: 125099 - DNA, 33 bp, Homo sapien
tttttgttcctgcccaacttacaataagagctg

SEQ ID NO: 125100 - DNA, 33 bp, Homo sapien
tttttgttcctgcccagcttacaataagagctg

SEQ ID NO: 125101 - DNA, 33 bp, Homo sapien
tccctaaaacatctgcgattgaactgatcagaa

SEQ ID NO: 125102 - DNA, 33 bp, Homo sapien
tccctaaaacatctgctattgaactgatcagaa

SEQ ID NO: 125103 - DNA, 33 bp, Homo sapien
aagtcattgtcggttcactctcattgccctccc

SEQ ID NO: 125104 - DNA, 33 bp, Homo sapien
aagtcattgtcggttcgctctcattgccctccc

SEQ ID NO: 125105 - DNA, 33 bp, Homo sapien
tgagtcacaaccttcactcccaagtcctctgga

SEQ ID NO: 125106 - DNA, 33 bp, Homo sapien
tgagtcacaaccttcattcccaagtcctctgga

SEQ ID NO: 125107 - DNA, 33 bp, Homo sapien
cctggcccagagacacacttggttgttggtggc

SEQ ID NO: 125108 - DNA, 33 bp, Homo sapien
cctggcccagagacacgcttggttgttggtggc

SEQ ID NO: 125109 - DNA, 33 bp, Homo sapien
gcctccactcctttgaggtcttcttcaactgca

SEQ ID NO: 125110 - DNA, 33 bp, Homo sapien
gcctccactcctttgatgtcttcttcaactgca

SEQ ID NO: 125111 - DNA, 33 bp, Homo sapien
gtactatctgagcctccagtaaaaacaaaaaca

SEQ ID NO: 125112 - DNA, 33 bp, Homo sapien
gtactatctgagcctctagtaaaaacaaaaaca

SEQ ID NO: 125113 - DNA, 33 bp, Homo sapien
aaatcaaatgactgtaagaataatttggtgaat

SEQ ID NO: 125114 - DNA, 33 bp, Homo sapien
aaatcaaatgactgtatgaataatttggtgaat

SEQ ID NO: 125115 - DNA, 33 bp, Homo sapien
cccttttgaaatcatacaaataacaatgtctga

SEQ ID NO: 125116 - DNA, 33 bp, Homo sapien
cccttttgaaatcatagaaataacaatgtctga

SEQ ID NO: 125117 - DNA, 33 bp, Homo sapien
cagcctttctctttcaactccatgctgagtaaa

SEQ ID NO: 125118 - DNA, 33 bp, Homo sapien
cagcctttctctttcacctccatgctgagtaaa

SEQ ID NO: 125119 - DNA, 33 bp, Homo sapien
tagcctctagttctatcaggaaagcatgtctac

SEQ ID NO: 125120 - DNA, 33 bp, Homo sapien
tagcctctagttctattaggaaagcatgtctac

SEQ ID NO: 125121 - DNA, 33 bp, Homo sapien
ggaaagtcctgaaatgcagaaaggcagcgaggc

SEQ ID NO: 125122 - DNA, 33 bp, Homo sapien
ggaaagtcctgaaatggagaaaggcagcgaggc

SEQ ID NO: 125123 - DNA, 33 bp, Homo sapien
catgtctgagatgggagagattcctctgcacaa

SEQ ID NO: 125124 - DNA, 33 bp, Homo sapien
catgtctgagatgggatagattcctctgcacaa

SEQ ID NO: 125125 - DNA, 33 bp, Homo sapien
gactgccaagccaacactggtagtcagtggaag

SEQ ID NO: 125126 - DNA, 33 bp, Homo sapien
gactgccaagccaacagtggtagtcagtggaag

SEQ ID NO: 125127 - DNA, 33 bp, Homo sapien
acatcagccaaaaatacgtaggtgatggaattt

SEQ ID NO: 125128 - DNA, 33 bp, Homo sapien
acatcagccaaaaatatgtaggtgatggaattt

SEQ ID NO: 125129 - DNA, 33 bp, Homo sapien
gttctataatctctgaagccttagatttcataa

SEQ ID NO: 125130 - DNA, 33 bp, Homo sapien
gttctataatctctgaggccttagatttcataa

SEQ ID NO: 125131 - DNA, 33 bp, Homo sapien
tgacttgaaactttcaaagctacagcctacaga

SEQ ID NO: 125132 - DNA, 33 bp, Homo sapien
tgacttgaaactttcatagctacagcctacaga

SEQ ID NO: 125133 - DNA, 33 bp, Homo sapien
agcgcatcacacggacaggggcccaagcctact

SEQ ID NO: 125134 - DNA, 33 bp, Homo sapien
agcgcatcacacggacgggggcccaagcctact

SEQ ID NO: 125135 - DNA, 33 bp, Homo sapien
cctctgctgatctgaaacaactttcatcaaggt

SEQ ID NO: 125136 - DNA, 33 bp, Homo sapien
cctctgctgatctgaagcaactttcatcaaggt

SEQ ID NO: 125137 - DNA, 33 bp, Homo sapien
cctggggcaccttgtccagcaggaaggtgatca

SEQ ID NO: 125138 - DNA, 33 bp, Homo sapien
cctggggcaccttgtcgagcaggaaggtgatca

SEQ ID NO: 125139 - DNA, 33 bp, Homo sapien
taatctagagaataaaatagtgtcatcttataa

SEQ ID NO: 125140 - DNA, 33 bp, Homo sapien
taatctagagaataaagtagtgtcatcttataa

SEQ ID NO: 125141 - DNA, 33 bp, Homo sapien
tagatttaaacaccccacaaagcaggaaggaag

SEQ ID NO: 125142 - DNA, 33 bp, Homo sapien
tagatttaaacaccccccaaagcaggaaggaag

SEQ ID NO: 125143 - DNA, 33 bp, Homo sapien
taattaatgtataaaggcaacagaaaatgttct

SEQ ID NO: 125144 - DNA, 33 bp, Homo sapien
taattaatgtataaagtcaacagaaaatgttct

SEQ ID NO: 125145 - DNA, 33 bp, Homo sapien
taaagaaatgaacagcagctaaatcatagtata

SEQ ID NO: 125146 - DNA, 33 bp, Homo sapien
taaagaaatgaacagcggctaaatcatagtata

SEQ ID NO: 125147 - DNA, 33 bp, Homo sapien
aataatggtaacagaacgctaaacaccataaaa

SEQ ID NO: 125148 - DNA, 33 bp, Homo sapien
aataatggtaacagaatgctaaacaccataaaa

SEQ ID NO: 125149 - DNA, 33 bp, Homo sapien
atacctaaagcacaatcattcaaatatgacaaa

SEQ ID NO: 125150 - DNA, 33 bp, Homo sapien
atacctaaagcacaatgattcaaatatgacaaa

SEQ ID NO: 125151 - DNA, 33 bp, Homo sapien
agtaacatccctttaactcatcacactcactgt

SEQ ID NO: 125152 - DNA, 33 bp, Homo sapien
agtaacatccctttaattcatcacactcactgt

SEQ ID NO: 125153 - DNA, 33 bp, Homo sapien
tttctacttattgtggcaattggcatttttgaa

SEQ ID NO: 125154 - DNA, 33 bp, Homo sapien
tttctacttattgtggtaattggcatttttgaa

SEQ ID NO: 125155 - DNA, 33 bp, Homo sapien
cagagaagttgagcctcaagtcctaaattgggg

SEQ ID NO: 125156 - DNA, 33 bp, Homo sapien
cagagaagttgagcctgaagtcctaaattgggg

SEQ ID NO: 125157 - DNA, 33 bp, Homo sapien
gtagggagtgccaagaaatttttcagatgacca

SEQ ID NO: 125158 - DNA, 33 bp, Homo sapien
gtagggagtgccaagacatttttcagatgacca

SEQ ID NO: 125159 - DNA, 33 bp, Homo sapien
ttaaagtctcttacaaatgcaaaagtctatgat

SEQ ID NO: 125160 - DNA, 33 bp, Homo sapien
ttaaagtctcttacaagtgcaaaagtctatgat

SEQ ID NO: 125161 - DNA, 33 bp, Homo sapien
tggtgttgggtgctaaaagaatgtcctcctcca

SEQ ID NO: 125162 - DNA, 33 bp, Homo sapien
tggtgttgggtgctaagagaatgtcctcctcca

SEQ ID NO: 125163 - DNA, 33 bp, Homo sapien
caggagttggcagtcaaaacctagttaatacac

SEQ ID NO: 125164 - DNA, 33 bp, Homo sapien
caggagttggcagtcagaacctagttaatacac

SEQ ID NO: 125165 - DNA, 33 bp, Homo sapien
ttaggaagattgaacccgagaaggcctttatca

SEQ ID NO: 125166 - DNA, 33 bp, Homo sapien
ttaggaagattgaacctgagaaggcctttatca

SEQ ID NO: 125167 - DNA, 33 bp, Homo sapien
gaagagcataggatgacgttattgctagacttg

SEQ ID NO: 125168 - DNA, 33 bp, Homo sapien
gaagagcataggatgatgttattgctagacttg

SEQ ID NO: 125169 - DNA, 33 bp, Homo sapien
gtgttattataaatgacacaagtcacatgcaaa

SEQ ID NO: 125170 - DNA, 33 bp, Homo sapien
gtgttattataaatgagacaagtcacatgcaaa

SEQ ID NO: 125171 - DNA, 33 bp, Homo sapien
cagatattagggtagcaccaggttggctctaag

SEQ ID NO: 125172 - DNA, 33 bp, Homo sapien
cagatattagggtagcgccaggttggctctaag

SEQ ID NO: 125173 - DNA, 33 bp, Homo sapien
tgaccgccttttggatcaaaatgttctcatagt

SEQ ID NO: 125174 - DNA, 33 bp, Homo sapien
tgaccgccttttggatgaaaatgttctcatagt

SEQ ID NO: 125175 - DNA, 33 bp, Homo sapien
ttggagatttcagtaacatccttaggttcacac

SEQ ID NO: 125176 - DNA, 33 bp, Homo sapien
ttggagatttcagtaagatccttaggttcacac

SEQ ID NO: 125177 - DNA, 33 bp, Homo sapien
atttactgaactccaaaaatgtaccagaccctt

SEQ ID NO: 125178 - DNA, 33 bp, Homo sapien
atttactgaactccaagaatgtaccagaccctt

SEQ ID NO: 125179 - DNA, 33 bp, Homo sapien
tgttacagtcatttgacggtaaatccaactgaa

SEQ ID NO: 125180 - DNA, 33 bp, Homo sapien
tgttacagtcatttgatggtaaatccaactgaa

SEQ ID NO: 125181 - DNA, 33 bp, Homo sapien
ttttgccctctctctggcacacgcagcagtcta

SEQ ID NO: 125182 - DNA, 33 bp, Homo sapien
ttttgccctctctctgtcacacgcagcagtcta

SEQ ID NO: 125183 - DNA, 33 bp, Homo sapien
cacttgtgcattgttacgacttcaagacagggg

SEQ ID NO: 125184 - DNA, 33 bp, Homo sapien
cacttgtgcattgttatgacttcaagacagggg

SEQ ID NO: 125185 - DNA, 33 bp, Homo sapien
tgtttatgtgcgagtacaagagaattacttcac

SEQ ID NO: 125186 - DNA, 33 bp, Homo sapien
tgtttatgtgcgagtagaagagaattacttcac

SEQ ID NO: 125187 - DNA, 33 bp, Homo sapien
agtctaagttagtaaaaccatgacttcaagttt

SEQ ID NO: 125188 - DNA, 33 bp, Homo sapien
agtctaagttagtaaacccatgacttcaagttt

SEQ ID NO: 125189 - DNA, 33 bp, Homo sapien
taccccattctacttaaatcataagcccaggtg

SEQ ID NO: 125190 - DNA, 33 bp, Homo sapien
taccccattctacttacatcataagcccaggtg

SEQ ID NO: 125191 - DNA, 33 bp, Homo sapien
atcagacactcttgtacgcagaaatttagtcct

SEQ ID NO: 125192 - DNA, 33 bp, Homo sapien
atcagacactcttgtatgcagaaatttagtcct

SEQ ID NO: 125193 - DNA, 33 bp, Homo sapien
attgtaacatataagaaagcagtgatttttact

SEQ ID NO: 125194 - DNA, 33 bp, Homo sapien
attgtaacatataagacagcagtgatttttact

SEQ ID NO: 125195 - DNA, 33 bp, Homo sapien
gaggctgagaagaaaaatgaggcccagctgttg

SEQ ID NO: 125196 - DNA, 33 bp, Homo sapien
gaggctgagaagaaaagtgaggcccagctgttg

SEQ ID NO: 125197 - DNA, 33 bp, Homo sapien
agaaaactgaaacatgaaccttctcttgcaaga

SEQ ID NO: 125198 - DNA, 33 bp, Homo sapien
agaaaactgaaacatggaccttctcttgcaaga

SEQ ID NO: 125199 - DNA, 33 bp, Homo sapien
atgattcctgtttagaacctcaaaataattctt

SEQ ID NO: 125200 - DNA, 33 bp, Homo sapien
atgattcctgtttagaccctcaaaataattctt

SEQ ID NO: 125201 - DNA, 33 bp, Homo sapien
gtgactcaggagcttaaacaagcaaactgatgc

SEQ ID NO: 125202 - DNA, 33 bp, Homo sapien
gtgactcaggagcttagacaagcaaactgatgc

SEQ ID NO: 125203 - DNA, 33 bp, Homo sapien
tgccgtaccttgtaaacgttactatcagtgagc

SEQ ID NO: 125204 - DNA, 33 bp, Homo sapien
tgccgtaccttgtaaatgttactatcagtgagc

SEQ ID NO: 125205 - DNA, 33 bp, Homo sapien
atgtcaaaagattccaagatggaaagttggcta

SEQ ID NO: 125206 - DNA, 33 bp, Homo sapien
atgtcaaaagattccaggatggaaagttggcta

SEQ ID NO: 125207 - DNA, 33 bp, Homo sapien
gcagacagataacaaccaggatatgcagttatt

SEQ ID NO: 125208 - DNA, 33 bp, Homo sapien
gcagacagataacaactaggatatgcagttatt

SEQ ID NO: 125209 - DNA, 33 bp, Homo sapien
tagactctttgtgtcacgagtccacttaacttt

SEQ ID NO: 125210 - DNA, 33 bp, Homo sapien
tagactctttgtgtcatgagtccacttaacttt

SEQ ID NO: 125211 - DNA, 33 bp, Homo sapien
gtaagttgcagggcagaaaacatgtgcattgga

SEQ ID NO: 125212 - DNA, 33 bp, Homo sapien
gtaagttgcagggcagcaaacatgtgcattgga

SEQ ID NO: 125213 - DNA, 33 bp, Homo sapien
ggttgaaggactgaccagaaacacttggtacct

SEQ ID NO: 125214 - DNA, 33 bp, Homo sapien
ggttgaaggactgacccgaaacacttggtacct

SEQ ID NO: 125215 - DNA, 33 bp, Homo sapien
ttatggcattagttccgaaaagcttcacacctg

SEQ ID NO: 125216 - DNA, 33 bp, Homo sapien
ttatggcattagttcctaaaagcttcacacctg

SEQ ID NO: 125217 - DNA, 33 bp, Homo sapien
ttgttggtgtcaatggccatttttaggtccatt

SEQ ID NO: 125218 - DNA, 33 bp, Homo sapien
ttgttggtgtcaatggtcatttttaggtccatt

SEQ ID NO: 125219 - DNA, 33 bp, Homo sapien
ccaagtttgatgaagaacacacataattaagca

SEQ ID NO: 125220 - DNA, 33 bp, Homo sapien
ccaagtttgatgaagagcacacataattaagca

SEQ ID NO: 125221 - DNA, 33 bp, Homo sapien
tgtcctgtttttgaaacgtcgttttcacctttc

SEQ ID NO: 125222 - DNA, 33 bp, Homo sapien
tgtcctgtttttgaaatgtcgttttcacctttc

SEQ ID NO: 125223 - DNA, 33 bp, Homo sapien
ataaaaagtaaaaccgcagataaggagggacaa

SEQ ID NO: 125224 - DNA, 33 bp, Homo sapien
ataaaaagtaaaaccgtagataaggagggacaa

SEQ ID NO: 125225 - DNA, 33 bp, Homo sapien
actaattatgtgacatcaaactgttttcttatc

SEQ ID NO: 125226 - DNA, 33 bp, Homo sapien
actaattatgtgacattaaactgttttcttatc

SEQ ID NO: 125227 - DNA, 33 bp, Homo sapien
gaagattttacagttacctccgcaagtaaatag

SEQ ID NO: 125228 - DNA, 33 bp, Homo sapien
gaagattttacagttatctccgcaagtaaatag

SEQ ID NO: 125229 - DNA, 33 bp, Homo sapien
gtgcctcaggagtagcaacgtcccatcccagga

SEQ ID NO: 125230 - DNA, 33 bp, Homo sapien
gtgcctcaggagtagcgacgtcccatcccagga

SEQ ID NO: 125231 - DNA, 33 bp, Homo sapien
ttcatctgaaggatccacaaatgatctgtaatg

SEQ ID NO: 125232 - DNA, 33 bp, Homo sapien
ttcatctgaaggatccgcaaatgatctgtaatg

SEQ ID NO: 125233 - DNA, 33 bp, Homo sapien
ccttgccaatgatgcacactcctcaactttgga

SEQ ID NO: 125234 - DNA, 33 bp, Homo sapien
ccttgccaatgatgcagactcctcaactttgga

SEQ ID NO: 125235 - DNA, 33 bp, Homo sapien
gaagtggctactgtaacgattcagggaagtaat

SEQ ID NO: 125236 - DNA, 33 bp, Homo sapien
gaagtggctactgtaaggattcagggaagtaat

SEQ ID NO: 125237 - DNA, 33 bp, Homo sapien
gaggggtctttggccacgagcagacttgggatc

SEQ ID NO: 125238 - DNA, 33 bp, Homo sapien
gaggggtctttggccatgagcagacttgggatc

SEQ ID NO: 125239 - DNA, 33 bp, Homo sapien
tcaggtgcttttcatcaatctgtgatgtgtgat

SEQ ID NO: 125240 - DNA, 33 bp, Homo sapien
tcaggtgcttttcatccatctgtgatgtgtgat

SEQ ID NO: 125241 - DNA, 33 bp, Homo sapien
cccctccagtgccccactgcacacttcagcacc

SEQ ID NO: 125242 - DNA, 33 bp, Homo sapien
cccctccagtgccccattgcacacttcagcacc

SEQ ID NO: 125243 - DNA, 33 bp, Homo sapien
tgggagaaccagcatacgaaatgaacctggaga

SEQ ID NO: 125244 - DNA, 33 bp, Homo sapien
tgggagaaccagcatatgaaatgaacctggaga

SEQ ID NO: 125245 - DNA, 33 bp, Homo sapien
tcaaaaacaagacttacgtcgattctcctttct

SEQ ID NO: 125246 - DNA, 33 bp, Homo sapien
tcaaaaacaagacttatgtcgattctcctttct

SEQ ID NO: 125247 - DNA, 33 bp, Homo sapien
caacatgtagcggcaactgttaatgcaaggcag

SEQ ID NO: 125248 - DNA, 33 bp, Homo sapien
caacatgtagcggcaattgttaatgcaaggcag

SEQ ID NO: 125249 - DNA, 33 bp, Homo sapien
gctatgagagccttagaagaggtttgagcacaa

SEQ ID NO: 125250 - DNA, 33 bp, Homo sapien
gctatgagagccttagcagaggtttgagcacaa

SEQ ID NO: 125251 - DNA, 33 bp, Homo sapien
agaaaaataggaaaaaatgcattcaatataaat

SEQ ID NO: 125252 - DNA, 33 bp, Homo sapien
agaaaaataggaaaaagtgcattcaatataaat

SEQ ID NO: 125253 - DNA, 33 bp, Homo sapien
gtctgctattagtacaaccacttcagctgtctt

SEQ ID NO: 125254 - DNA, 33 bp, Homo sapien
gtctgctattagtacagccacttcagctgtctt

SEQ ID NO: 125255 - DNA, 33 bp, Homo sapien
catgttttagggcataacacatagtctgtccta

SEQ ID NO: 125256 - DNA, 33 bp, Homo sapien
catgttttagggcatagcacatagtctgtccta

SEQ ID NO: 125257 - DNA, 33 bp, Homo sapien
ctgatgttgtagaaaacaccatgccagccacac

SEQ ID NO: 125258 - DNA, 33 bp, Homo sapien
ctgatgttgtagaaaataccatgccagccacac

SEQ ID NO: 125259 - DNA, 33 bp, Homo sapien
cttgtgatctaatccacggcagtaaggaagacc

SEQ ID NO: 125260 - DNA, 33 bp, Homo sapien
cttgtgatctaatccagggcagtaaggaagacc

SEQ ID NO: 125261 - DNA, 33 bp, Homo sapien
gaggtctggctgcacacagctgaggaccaaggt

SEQ ID NO: 125262 - DNA, 33 bp, Homo sapien
gaggtctggctgcacatagctgaggaccaaggt

SEQ ID NO: 125263 - DNA, 33 bp, Homo sapien
gtggataggaagagatcagtaatgcagaagaga

SEQ ID NO: 125264 - DNA, 33 bp, Homo sapien
gtggataggaagagattagtaatgcagaagaga

SEQ ID NO: 125265 - DNA, 33 bp, Homo sapien
ctcaatcctagcacccaacatctctgcccttaa

SEQ ID NO: 125266 - DNA, 33 bp, Homo sapien
ctcaatcctagcacccgacatctctgcccttaa

SEQ ID NO: 125267 - DNA, 33 bp, Homo sapien
atccatattccaaccaaaatggacctctatttc

SEQ ID NO: 125268 - DNA, 33 bp, Homo sapien
atccatattccaaccagaatggacctctatttc

SEQ ID NO: 125269 - DNA, 33 bp, Homo sapien
cataaaaatccgcaagcctaacatgaaaataaa

SEQ ID NO: 125270 - DNA, 33 bp, Homo sapien
cataaaaatccgcaagtctaacatgaaaataaa

SEQ ID NO: 125271 - DNA, 33 bp, Homo sapien
acaagaattcaaagaacaccaaactggctgtaa

SEQ ID NO: 125272 - DNA, 33 bp, Homo sapien
acaagaattcaaagaataccaaactggctgtaa

SEQ ID NO: 125273 - DNA, 33 bp, Homo sapien
agaacaagcaaaatctaaactcacatgggaaaa

SEQ ID NO: 125274 - DNA, 33 bp, Homo sapien
agaacaagcaaaatctcaactcacatgggaaaa

SEQ ID NO: 125275 - DNA, 33 bp, Homo sapien
ctattctcatttttcaaattgggccgttcctga

SEQ ID NO: 125276 - DNA, 33 bp, Homo sapien
ctattctcatttttcatattgggccgttcctga

SEQ ID NO: 125277 - DNA, 33 bp, Homo sapien
gcatctacatacttgccgagtgatctttgtggt

SEQ ID NO: 125278 - DNA, 33 bp, Homo sapien
gcatctacatacttgctgagtgatctttgtggt

SEQ ID NO: 125279 - DNA, 33 bp, Homo sapien
ggttggggtcaaattgcaaaccaggaatactta

SEQ ID NO: 125280 - DNA, 33 bp, Homo sapien
ggttggggtcaaattggaaaccaggaatactta

SEQ ID NO: 125281 - DNA, 33 bp, Homo sapien
gaacccctgcttctgcaaataaggctggagcaa

SEQ ID NO: 125282 - DNA, 33 bp, Homo sapien
gaacccctgcttctgcgaataaggctggagcaa

SEQ ID NO: 125283 - DNA, 33 bp, Homo sapien
gacaaaaacgccttgcaaagtggtctccaagag

SEQ ID NO: 125284 - DNA, 33 bp, Homo sapien
gacaaaaacgccttgccaagtggtctccaagag

SEQ ID NO: 125285 - DNA, 33 bp, Homo sapien
ctgagattcttaccagaaaacccagagaagccc

SEQ ID NO: 125286 - DNA, 33 bp, Homo sapien
ctgagattcttaccaggaaacccagagaagccc

SEQ ID NO: 125287 - DNA, 33 bp, Homo sapien
tggagcgaattatcataaaaactctgggattgg

SEQ ID NO: 125288 - DNA, 33 bp, Homo sapien
tggagcgaattatcatcaaaactctgggattgg

SEQ ID NO: 125289 - DNA, 33 bp, Homo sapien
tatgtgtgctgccccaccaaactgtgcactaca

SEQ ID NO: 125290 - DNA, 33 bp, Homo sapien
tatgtgtgctgccccatcaaactgtgcactaca

SEQ ID NO: 125291 - DNA, 33 bp, Homo sapien
gttacgttaaagagaaatgacacaatgggatat

SEQ ID NO: 125292 - DNA, 33 bp, Homo sapien
gttacgttaaagagaagtgacacaatgggatat

SEQ ID NO: 125293 - DNA, 33 bp, Homo sapien
gctttaaggactggataaacttctttagagaat

SEQ ID NO: 125294 - DNA, 33 bp, Homo sapien
gctttaaggactggatgaacttctttagagaat

SEQ ID NO: 125295 - DNA, 33 bp, Homo sapien
gcttggacaagtaagaatcatggatgaatctgg

SEQ ID NO: 125296 - DNA, 33 bp, Homo sapien
gcttggacaagtaagagtcatggatgaatctgg

SEQ ID NO: 125297 - DNA, 33 bp, Homo sapien
tgctgaaggaacttcaccttcgctaagagttct

SEQ ID NO: 125298 - DNA, 33 bp, Homo sapien
tgctgaaggaacttcatcttcgctaagagttct

SEQ ID NO: 125299 - DNA, 33 bp, Homo sapien
ctgctggtccaggagcacacttggagaaccact

SEQ ID NO: 125300 - DNA, 33 bp, Homo sapien
ctgctggtccaggagcgcacttggagaaccact

SEQ ID NO: 125301 - DNA, 33 bp, Homo sapien
agagctggcacaaccacagcacctctctaccca

SEQ ID NO: 125302 - DNA, 33 bp, Homo sapien
agagctggcacaaccagagcacctctctaccca

SEQ ID NO: 125303 - DNA, 33 bp, Homo sapien
aattggagaatgcccccgcttcacaataggcac

SEQ ID NO: 125304 - DNA, 33 bp, Homo sapien
aattggagaatgcccctgcttcacaataggcac

SEQ ID NO: 125305 - DNA, 33 bp, Homo sapien
aagaggtgatgactgacctgtgtctttaaaaat

SEQ ID NO: 125306 - DNA, 33 bp, Homo sapien
aagaggtgatgactgatctgtgtctttaaaaat

SEQ ID NO: 125307 - DNA, 33 bp, Homo sapien
gaaagcaggaaaggtcaagagagcacagctggt

SEQ ID NO: 125308 - DNA, 33 bp, Homo sapien
gaaagcaggaaaggtcgagagagcacagctggt

SEQ ID NO: 125309 - DNA, 33 bp, Homo sapien
tccatcttctaatatacaggtgagcatagaggc

SEQ ID NO: 125310 - DNA, 33 bp, Homo sapien
tccatcttctaatatagaggtgagcatagaggc

SEQ ID NO: 125311 - DNA, 33 bp, Homo sapien
agcaaaactgagtcaaagaactacttatcttgt

SEQ ID NO: 125312 - DNA, 33 bp, Homo sapien
agcaaaactgagtcaaggaactacttatcttgt

SEQ ID NO: 125313 - DNA, 33 bp, Homo sapien
gatataaaaggaggccagatgccactggaacag

SEQ ID NO: 125314 - DNA, 33 bp, Homo sapien
gatataaaaggaggccggatgccactggaacag

SEQ ID NO: 125315 - DNA, 33 bp, Homo sapien
agcttcagtctgcccaagaagacagtgagggtg

SEQ ID NO: 125316 - DNA, 33 bp, Homo sapien
agcttcagtctgcccaggaagacagtgagggtg

SEQ ID NO: 125317 - DNA, 33 bp, Homo sapien
agctccattccaagcacgcagaataataacagc

SEQ ID NO: 125318 - DNA, 33 bp, Homo sapien
agctccattccaagcaggcagaataataacagc

SEQ ID NO: 125319 - DNA, 33 bp, Homo sapien
tgtttgcaaagaaataaaatctctggatgacat

SEQ ID NO: 125320 - DNA, 33 bp, Homo sapien
tgtttgcaaagaaatagaatctctggatgacat

SEQ ID NO: 125321 - DNA, 33 bp, Homo sapien
gacttggaaaagacaacgtctgtagtattccca

SEQ ID NO: 125322 - DNA, 33 bp, Homo sapien
gacttggaaaagacaatgtctgtagtattccca

SEQ ID NO: 125323 - DNA, 33 bp, Homo sapien
atttcagttaaccatggactgcatctaagacag

SEQ ID NO: 125324 - DNA, 33 bp, Homo sapien
atttcagttaaccatgtactgcatctaagacag

SEQ ID NO: 125325 - DNA, 33 bp, Homo sapien
ataccctgtacttagaagaacgttgtgaatcaa

SEQ ID NO: 125326 - DNA, 33 bp, Homo sapien
ataccctgtacttagaggaacgttgtgaatcaa

SEQ ID NO: 125327 - DNA, 33 bp, Homo sapien
atctgctcaatggagtcaatacttgattcacaa

SEQ ID NO: 125328 - DNA, 33 bp, Homo sapien
atctgctcaatggagttaatacttgattcacaa

SEQ ID NO: 125329 - DNA, 33 bp, Homo sapien
agaaagcctatataaaatgtcctcagactctcg

SEQ ID NO: 125330 - DNA, 33 bp, Homo sapien
agaaagcctatataaactgtcctcagactctcg

SEQ ID NO: 125331 - DNA, 33 bp, Homo sapien
gagttcggttggagacagtcagagagaagatca

SEQ ID NO: 125332 - DNA, 33 bp, Homo sapien
gagttcggttggagacggtcagagagaagatca

SEQ ID NO: 125333 - DNA, 33 bp, Homo sapien
tccatcctactgagagacacttccatctggcaa

SEQ ID NO: 125334 - DNA, 33 bp, Homo sapien
tccatcctactgagagccacttccatctggcaa

SEQ ID NO: 125335 - DNA, 33 bp, Homo sapien
gggcgttaacctctaacaccctgaaaaggaccc

SEQ ID NO: 125336 - DNA, 33 bp, Homo sapien
gggcgttaacctctaataccctgaaaaggaccc

SEQ ID NO: 125337 - DNA, 33 bp, Homo sapien
ttcctccctactaatgacaggcgcatgagaaca

SEQ ID NO: 125338 - DNA, 33 bp, Homo sapien
ttcctccctactaatggcaggcgcatgagaaca

SEQ ID NO: 125339 - DNA, 33 bp, Homo sapien
cgatgagattagtcgacaccatcaccagtacag

SEQ ID NO: 125340 - DNA, 33 bp, Homo sapien
cgatgagattagtcgataccatcaccagtacag

SEQ ID NO: 125341 - DNA, 33 bp, Homo sapien
gaaggagacttttcccccagactgagaggactg

SEQ ID NO: 125342 - DNA, 33 bp, Homo sapien
gaaggagacttttcccgcagactgagaggactg

SEQ ID NO: 125343 - DNA, 33 bp, Homo sapien
ttgaattatgggtaaactacatctgggaagaaa

SEQ ID NO: 125344 - DNA, 33 bp, Homo sapien
ttgaattatgggtaaagtacatctgggaagaaa

SEQ ID NO: 125345 - DNA, 33 bp, Homo sapien
tgatcctggacaaccaactctctgagcctattt

SEQ ID NO: 125346 - DNA, 33 bp, Homo sapien
tgatcctggacaaccacctctctgagcctattt

SEQ ID NO: 125347 - DNA, 33 bp, Homo sapien
ccacagaaccacataacagcagattcaggaaag

SEQ ID NO: 125348 - DNA, 33 bp, Homo sapien
ccacagaaccacataagagcagattcaggaaag

SEQ ID NO: 125349 - DNA, 33 bp, Homo sapien
ggcttgtgaggaaggccaaccataccatgaaag

SEQ ID NO: 125350 - DNA, 33 bp, Homo sapien
ggcttgtgaggaaggctaaccataccatgaaag

SEQ ID NO: 125351 - DNA, 33 bp, Homo sapien
ctgtaaaagtcagcacaaaaatcaatgagtttt

SEQ ID NO: 125352 - DNA, 33 bp, Homo sapien
ctgtaaaagtcagcactaaaatcaatgagtttt

SEQ ID NO: 125353 - DNA, 33 bp, Homo sapien
agctggtcccagaatacgtgcttgcccactctg

SEQ ID NO: 125354 - DNA, 33 bp, Homo sapien
agctggtcccagaatatgtgcttgcccactctg

SEQ ID NO: 125355 - DNA, 33 bp, Homo sapien
atcctggattggcctgaaccagtgcactgaagc

SEQ ID NO: 125356 - DNA, 33 bp, Homo sapien
atcctggattggcctggaccagtgcactgaagc

SEQ ID NO: 125357 - DNA, 33 bp, Homo sapien
cagtggtatgctaggaaaggtttaactggctct

SEQ ID NO: 125358 - DNA, 33 bp, Homo sapien
cagtggtatgctaggagaggtttaactggctct

SEQ ID NO: 125359 - DNA, 33 bp, Homo sapien
gcccagggatttggtacgcaagcctgaaagttg

SEQ ID NO: 125360 - DNA, 33 bp, Homo sapien
gcccagggatttggtatgcaagcctgaaagttg

SEQ ID NO: 125361 - DNA, 33 bp, Homo sapien
taactccaggtgcttcactgaaatctttaggga

SEQ ID NO: 125362 - DNA, 33 bp, Homo sapien
taactccaggtgcttcgctgaaatctttaggga

SEQ ID NO: 125363 - DNA, 33 bp, Homo sapien
tgcgtcgctgggacacagaggtcttgagggagt

SEQ ID NO: 125364 - DNA, 33 bp, Homo sapien
tgcgtcgctgggacacggaggtcttgagggagt

SEQ ID NO: 125365 - DNA, 33 bp, Homo sapien
gtgtggattaaatgagccaatagatgtcagggg

SEQ ID NO: 125366 - DNA, 33 bp, Homo sapien
gtgtggattaaatgagtcaatagatgtcagggg

SEQ ID NO: 125367 - DNA, 33 bp, Homo sapien
attgtgtgctaacaagaccctcgctttccttga

SEQ ID NO: 125368 - DNA, 33 bp, Homo sapien
attgtgtgctaacaagtccctcgctttccttga

SEQ ID NO: 125369 - DNA, 33 bp, Homo sapien
ttctttgttattgtcaagtggcttttgaataat

SEQ ID NO: 125370 - DNA, 33 bp, Homo sapien
ttctttgttattgtcaggtggcttttgaataat

SEQ ID NO: 125371 - DNA, 33 bp, Homo sapien
tgcctgagtggcgggaacgtctttctttgttat

SEQ ID NO: 125372 - DNA, 33 bp, Homo sapien
tgcctgagtggcgggagcgtctttctttgttat

SEQ ID NO: 125373 - DNA, 33 bp, Homo sapien
ggtgtggaggaggaacacagcggacgctccagc

SEQ ID NO: 125374 - DNA, 33 bp, Homo sapien
ggtgtggaggaggaacgcagcggacgctccagc

SEQ ID NO: 125375 - DNA, 33 bp, Homo sapien
ttgagtgctgttcctacggtttggacaggtacc

SEQ ID NO: 125376 - DNA, 33 bp, Homo sapien
ttgagtgctgttcctatggtttggacaggtacc

SEQ ID NO: 125377 - DNA, 33 bp, Homo sapien
ttgtgtagagtaggtaacattgcatccattttc

SEQ ID NO: 125378 - DNA, 33 bp, Homo sapien
ttgtgtagagtaggtatcattgcatccattttc

SEQ ID NO: 125379 - DNA, 33 bp, Homo sapien
gctaggcagaaagcacacccatgaaaacagcaa

SEQ ID NO: 125380 - DNA, 33 bp, Homo sapien
gctaggcagaaagcacgcccatgaaaacagcaa

SEQ ID NO: 125381 - DNA, 33 bp, Homo sapien
taaattgtccaggaacgccaatgctcaattgtg

SEQ ID NO: 125382 - DNA, 33 bp, Homo sapien
taaattgtccaggaactccaatgctcaattgtg

SEQ ID NO: 125383 - DNA, 33 bp, Homo sapien
actgtgaggcattggcacttgctatcagcgtcc

SEQ ID NO: 125384 - DNA, 33 bp, Homo sapien
actgtgaggcattggcgcttgctatcagcgtcc

SEQ ID NO: 125385 - DNA, 33 bp, Homo sapien
tgcccagacagcattcccaatacaactgcacaa

SEQ ID NO: 125386 - DNA, 33 bp, Homo sapien
tgcccagacagcattcgcaatacaactgcacaa

SEQ ID NO: 125387 - DNA, 33 bp, Homo sapien
agcaagagcttgggacacttgagttactgcaca

SEQ ID NO: 125388 - DNA, 33 bp, Homo sapien
agcaagagcttgggacgcttgagttactgcaca

SEQ ID NO: 125389 - DNA, 33 bp, Homo sapien
gagctgttggaatttacgaaccgtgttgaggcc

SEQ ID NO: 125390 - DNA, 33 bp, Homo sapien
gagctgttggaatttaggaaccgtgttgaggcc

SEQ ID NO: 125391 - DNA, 33 bp, Homo sapien
cttccctgcagaaatacacgctttgagaagagt

SEQ ID NO: 125392 - DNA, 33 bp, Homo sapien
cttccctgcagaaatatacgctttgagaagagt

SEQ ID NO: 125393 - DNA, 33 bp, Homo sapien
tatgcaaaagtacaaaatgttgaaaggtgacat

SEQ ID NO: 125394 - DNA, 33 bp, Homo sapien
tatgcaaaagtacaaactgttgaaaggtgacat

SEQ ID NO: 125395 - DNA, 33 bp, Homo sapien
cctctggtctgtgagcgcctccaagcaggatca

SEQ ID NO: 125396 - DNA, 33 bp, Homo sapien
cctctggtctgtgagctcctccaagcaggatca

SEQ ID NO: 125397 - DNA, 33 bp, Homo sapien
cccaccatctctgcacactcagggcacagccat

SEQ ID NO: 125398 - DNA, 33 bp, Homo sapien
cccaccatctctgcacgctcagggcacagccat

SEQ ID NO: 125399 - DNA, 33 bp, Homo sapien
ccagaccccctaagtgaacccttgtgccctgag

SEQ ID NO: 125400 - DNA, 33 bp, Homo sapien
ccagaccccctaagtggacccttgtgccctgag

SEQ ID NO: 125401 - DNA, 33 bp, Homo sapien
cgtgggattgggatgcgctattctcattgcact

SEQ ID NO: 125402 - DNA, 33 bp, Homo sapien
cgtgggattgggatgctctattctcattgcact

SEQ ID NO: 125403 - DNA, 33 bp, Homo sapien
cacctgcaagttgaagcatgccataacacttta

SEQ ID NO: 125404 - DNA, 33 bp, Homo sapien
cacctgcaagttgaagtatgccataacacttta

SEQ ID NO: 125405 - DNA, 33 bp, Homo sapien
ggtagacgtggtgagacacactcaggaagaact

SEQ ID NO: 125406 - DNA, 33 bp, Homo sapien
ggtagacgtggtgagatacactcaggaagaact

SEQ ID NO: 125407 - DNA, 33 bp, Homo sapien
tattttgaagctttaacatttagtgactgggtt

SEQ ID NO: 125408 - DNA, 33 bp, Homo sapien
tattttgaagctttaagatttagtgactgggtt

SEQ ID NO: 125409 - DNA, 33 bp, Homo sapien
attaagggagatgatacaattgacactctttct

SEQ ID NO: 125410 - DNA, 33 bp, Homo sapien
attaagggagatgatagaattgacactctttct

SEQ ID NO: 125411 - DNA, 33 bp, Homo sapien
tgtcgcactgattccacgttttcattttttcct

SEQ ID NO: 125412 - DNA, 33 bp, Homo sapien
tgtcgcactgattccatgttttcattttttcct

SEQ ID NO: 125413 - DNA, 33 bp, Homo sapien
gagaggagtttccaggcattgggagctggacac

SEQ ID NO: 125414 - DNA, 33 bp, Homo sapien
gagaggagtttccaggtattgggagctggacac

SEQ ID NO: 125415 - DNA, 33 bp, Homo sapien
tgaacaaatcagtacactcatcacagtgattgt

SEQ ID NO: 125416 - DNA, 33 bp, Homo sapien
tgaacaaatcagtacagtcatcacagtgattgt

SEQ ID NO: 125417 - DNA, 33 bp, Homo sapien
attgggatttatccaacgttttgtacgaccagt

SEQ ID NO: 125418 - DNA, 33 bp, Homo sapien
attgggatttatccaaggttttgtacgaccagt

SEQ ID NO: 125419 - DNA, 33 bp, Homo sapien
aaggcagagggttggccgaggtacctctccagc

SEQ ID NO: 125420 - DNA, 33 bp, Homo sapien
aaggcagagggttggctgaggtacctctccagc

SEQ ID NO: 125421 - DNA, 33 bp, Homo sapien
aagctgtttcctttgacgacccagccccctgcc

SEQ ID NO: 125422 - DNA, 33 bp, Homo sapien
aagctgtttcctttgatgacccagccccctgcc

SEQ ID NO: 125423 - DNA, 33 bp, Homo sapien
gcccctggctccaggcaaggttcagaggaaggg

SEQ ID NO: 125424 - DNA, 33 bp, Homo sapien
gcccctggctccaggcgaggttcagaggaaggg

SEQ ID NO: 125425 - DNA, 33 bp, Homo sapien
tgtcactctgaagccaatcagcagcaacccact

SEQ ID NO: 125426 - DNA, 33 bp, Homo sapien
tgtcactctgaagccactcagcagcaacccact

SEQ ID NO: 125427 - DNA, 33 bp, Homo sapien
acatctgccctcacacacaacagcaaatacaca

SEQ ID NO: 125428 - DNA, 33 bp, Homo sapien
acatctgccctcacacgcaacagcaaatacaca

SEQ ID NO: 125429 - DNA, 33 bp, Homo sapien
gagaaagcaagagcagaaggcgtaaccgctaga

SEQ ID NO: 125430 - DNA, 33 bp, Homo sapien
gagaaagcaagagcaggaggcgtaaccgctaga

SEQ ID NO: 125431 - DNA, 33 bp, Homo sapien
gtgagggtcttttcccactgttaatgaacctag

SEQ ID NO: 125432 - DNA, 33 bp, Homo sapien
gtgagggtcttttcccgctgttaatgaacctag

SEQ ID NO: 125433 - DNA, 33 bp, Homo sapien
tagcctggtcctaacacggtctctgggccaaag

SEQ ID NO: 125434 - DNA, 33 bp, Homo sapien
tagcctggtcctaacatggtctctgggccaaag

SEQ ID NO: 125435 - DNA, 33 bp, Homo sapien
ggttcccccaccaaacagagagctccgtgggaa

SEQ ID NO: 125436 - DNA, 33 bp, Homo sapien
ggttcccccaccaaacggagagctccgtgggaa

SEQ ID NO: 125437 - DNA, 33 bp, Homo sapien
ctcccattggattcccagagaggtggattttcc

SEQ ID NO: 125438 - DNA, 33 bp, Homo sapien
ctcccattggattcccggagaggtggattttcc

SEQ ID NO: 125439 - DNA, 33 bp, Homo sapien
ccattgcaagtaccataaaaatgcccacactct

SEQ ID NO: 125440 - DNA, 33 bp, Homo sapien
ccattgcaagtaccatgaaaatgcccacactct

SEQ ID NO: 125441 - DNA, 33 bp, Homo sapien
gaggcaggacaggtagaaggtgcagagaagtgc

SEQ ID NO: 125442 - DNA, 33 bp, Homo sapien
gaggcaggacaggtaggaggtgcagagaagtgc

SEQ ID NO: 125443 - DNA, 33 bp, Homo sapien
aaatgttaatcacatcggaaaaataccttcata

SEQ ID NO: 125444 - DNA, 33 bp, Homo sapien
aaatgttaatcacatctgaaaaataccttcata

SEQ ID NO: 125445 - DNA, 33 bp, Homo sapien
tgtgcctgctctgagacgtgtcccataagccta

SEQ ID NO: 125446 - DNA, 33 bp, Homo sapien
tgtgcctgctctgagatgtgtcccataagccta

SEQ ID NO: 125447 - DNA, 33 bp, Homo sapien
cttaaactgatgggaaatgacatggctgggcat

SEQ ID NO: 125448 - DNA, 33 bp, Homo sapien
cttaaactgatgggaagtgacatggctgggcat

SEQ ID NO: 125449 - DNA, 33 bp, Homo sapien
gtgtctagggtggcacagtcaagatgggcagga

SEQ ID NO: 125450 - DNA, 33 bp, Homo sapien
gtgtctagggtggcacggtcaagatgggcagga

SEQ ID NO: 125451 - DNA, 33 bp, Homo sapien
accaaatatccacagactctggaagtggctctg

SEQ ID NO: 125452 - DNA, 33 bp, Homo sapien
accaaatatccacagattctggaagtggctctg

SEQ ID NO: 125453 - DNA, 33 bp, Homo sapien
tctccgtggcagggaaatctccctctttaggct

SEQ ID NO: 125454 - DNA, 33 bp, Homo sapien
tctccgtggcagggaagtctccctctttaggct

SEQ ID NO: 125455 - DNA, 33 bp, Homo sapien
tggggaaggggctgagcatatgcattttagtgg

SEQ ID NO: 125456 - DNA, 33 bp, Homo sapien
tggggaaggggctgaggatatgcattttagtgg

SEQ ID NO: 125457 - DNA, 33 bp, Homo sapien
gtggtaaattggagacaagagtggagcaggtgc

SEQ ID NO: 125458 - DNA, 33 bp, Homo sapien
gtggtaaattggagacgagagtggagcaggtgc

SEQ ID NO: 125459 - DNA, 33 bp, Homo sapien
aaaggtgttcattttcgcaggatgacttacttt

SEQ ID NO: 125460 - DNA, 33 bp, Homo sapien
aaaggtgttcattttctcaggatgacttacttt

SEQ ID NO: 125461 - DNA, 33 bp, Homo sapien
acacataacagaataaagagttttgctttcttt

SEQ ID NO: 125462 - DNA, 33 bp, Homo sapien
acacataacagaataaggagttttgctttcttt

SEQ ID NO: 125463 - DNA, 33 bp, Homo sapien
gtcacaaataatacacaaacacatctcattatg

SEQ ID NO: 125464 - DNA, 33 bp, Homo sapien
gtcacaaataatacacgaacacatctcattatg

SEQ ID NO: 125465 - DNA, 33 bp, Homo sapien
gagggagcccatcctcaagatcagagtgtggga

SEQ ID NO: 125466 - DNA, 33 bp, Homo sapien
gagggagcccatcctcgagatcagagtgtggga

SEQ ID NO: 125467 - DNA, 33 bp, Homo sapien
gctgatcatcgtcaccaatgtagagctgctggc

SEQ ID NO: 125468 - DNA, 33 bp, Homo sapien
gctgatcatcgtcacccatgtagagctgctggc

SEQ ID NO: 125469 - DNA, 33 bp, Homo sapien
cagagatgggaaaccccgagtccaggccagggg

SEQ ID NO: 125470 - DNA, 33 bp, Homo sapien
cagagatgggaaacccggagtccaggccagggg

SEQ ID NO: 125471 - DNA, 33 bp, Homo sapien
agaggcagaggctaaacgctgatcactgtaatc

SEQ ID NO: 125472 - DNA, 33 bp, Homo sapien
agaggcagaggctaaaggctgatcactgtaatc

SEQ ID NO: 125473 - DNA, 33 bp, Homo sapien
taaataacagacacaccgagagaacatgtcaca

SEQ ID NO: 125474 - DNA, 33 bp, Homo sapien
taaataacagacacactgagagaacatgtcaca

SEQ ID NO: 125475 - DNA, 33 bp, Homo sapien
catgtcacaaaaccacagacacatttcacaaca

SEQ ID NO: 125476 - DNA, 33 bp, Homo sapien
catgtcacaaaaccacggacacatttcacaaca

SEQ ID NO: 125477 - DNA, 33 bp, Homo sapien
ggaatgtggcctgtcacgttaaggggggattgg

SEQ ID NO: 125478 - DNA, 33 bp, Homo sapien
ggaatgtggcctgtcatgttaaggggggattgg

SEQ ID NO: 125479 - DNA, 33 bp, Homo sapien
cggtgctctccttgtacgtgctgggcctcccac

SEQ ID NO: 125480 - DNA, 33 bp, Homo sapien
cggtgctctccttgtatgtgctgggcctcccac

SEQ ID NO: 125481 - DNA, 33 bp, Homo sapien
tcaggtgactgtccatcaggcttctacaatgaa

SEQ ID NO: 125482 - DNA, 33 bp, Homo sapien
tcaggtgactgtccatgaggcttctacaatgaa

SEQ ID NO: 125483 - DNA, 33 bp, Homo sapien
ctgtgctgccctcaccaacctcagaaatgtcca

SEQ ID NO: 125484 - DNA, 33 bp, Homo sapien
ctgtgctgccctcaccgacctcagaaatgtcca

SEQ ID NO: 125485 - DNA, 33 bp, Homo sapien
actcagagcagacaagaccacagtaagatggaa

SEQ ID NO: 125486 - DNA, 33 bp, Homo sapien
actcagagcagacaaggccacagtaagatggaa

SEQ ID NO: 125487 - DNA, 33 bp, Homo sapien
ccctgactcatacaacaggaaacacagaacaaa

SEQ ID NO: 125488 - DNA, 33 bp, Homo sapien
ccctgactcatacaacgggaaacacagaacaaa

SEQ ID NO: 125489 - DNA, 33 bp, Homo sapien
aaaagttggttagtgaatacaaatatacagtta

SEQ ID NO: 125490 - DNA, 33 bp, Homo sapien
aaaagttggttagtgagtacaaatatacagtta

SEQ ID NO: 125491 - DNA, 33 bp, Homo sapien
aatggcagtggtggtgaaaacataactttgtgc

SEQ ID NO: 125492 - DNA, 33 bp, Homo sapien
aatggcagtggtggtggaaacataactttgtgc

SEQ ID NO: 125493 - DNA, 33 bp, Homo sapien
tttctgaatccccacaaaattatagtcagagca

SEQ ID NO: 125494 - DNA, 33 bp, Homo sapien
tttctgaatccccacataattatagtcagagca

SEQ ID NO: 125495 - DNA, 33 bp, Homo sapien
cagcggtggtgactagccctcggatttcctgcc

SEQ ID NO: 125496 - DNA, 33 bp, Homo sapien
cagcggtggtgactagtcctcggatttcctgcc

SEQ ID NO: 125497 - DNA, 33 bp, Homo sapien
tttccatccccatcaccacattcaggtccttat

SEQ ID NO: 125498 - DNA, 33 bp, Homo sapien
tttccatccccatcactacattcaggtccttat

SEQ ID NO: 125499 - DNA, 33 bp, Homo sapien
atcaaagacaacagtaaggacaactcattctta

SEQ ID NO: 125500 - DNA, 33 bp, Homo sapien
atcaaagacaacagtagggacaactcattctta

SEQ ID NO: 125501 - DNA, 33 bp, Homo sapien
tgcaacccagccctgcagaaagttggccctgtc

SEQ ID NO: 125502 - DNA, 33 bp, Homo sapien
tgcaacccagccctgcggaaagttggccctgtc

SEQ ID NO: 125503 - DNA, 33 bp, Homo sapien
tcttctgtaagtatctaaaaattgaagacagtc

SEQ ID NO: 125504 - DNA, 33 bp, Homo sapien
tcttctgtaagtatcttaaaattgaagacagtc

SEQ ID NO: 125505 - DNA, 33 bp, Homo sapien
aactgataaatccttaacaagactaatcaagaa

SEQ ID NO: 125506 - DNA, 33 bp, Homo sapien
aactgataaatccttagcaagactaatcaagaa

SEQ ID NO: 125507 - DNA, 33 bp, Homo sapien
tttgtctttctatatccatagcctgcatcctga

SEQ ID NO: 125508 - DNA, 33 bp, Homo sapien
tttgtctttctatatctatagcctgcatcctga

SEQ ID NO: 125509 - DNA, 33 bp, Homo sapien
tgcagagtgagtgtggaaagagaataaataacc

SEQ ID NO: 125510 - DNA, 33 bp, Homo sapien
tgcagagtgagtgtgggaagagaataaataacc

SEQ ID NO: 125511 - DNA, 33 bp, Homo sapien
actgggcaaggagctacgtgatcagtaagtgct

SEQ ID NO: 125512 - DNA, 33 bp, Homo sapien
actgggcaaggagctatgtgatcagtaagtgct

SEQ ID NO: 125513 - DNA, 33 bp, Homo sapien
gcatgtggttgttgcaataaatgctgctttgtg

SEQ ID NO: 125514 - DNA, 33 bp, Homo sapien
gcatgtggttgttgcagtaaatgctgctttgtg

SEQ ID NO: 125515 - DNA, 33 bp, Homo sapien
ctgctccccatagtgaagctaccagtttctctt

SEQ ID NO: 125516 - DNA, 33 bp, Homo sapien
ctgctccccatagtgaggctaccagtttctctt

SEQ ID NO: 125517 - DNA, 33 bp, Homo sapien
attattttttgaagtacgtcaatggagtatttt

SEQ ID NO: 125518 - DNA, 33 bp, Homo sapien
attattttttgaagtatgtcaatggagtatttt

SEQ ID NO: 125519 - DNA, 33 bp, Homo sapien
acaatccagatccaaactgtttttttctacttc

SEQ ID NO: 125520 - DNA, 33 bp, Homo sapien
acaatccagatccaaattgtttttttctacttc

SEQ ID NO: 125521 - DNA, 33 bp, Homo sapien
gcacaatgcattaggcaagtgtttgtagtgatg

SEQ ID NO: 125522 - DNA, 33 bp, Homo sapien
gcacaatgcattaggcgagtgtttgtagtgatg

SEQ ID NO: 125523 - DNA, 33 bp, Homo sapien
aaaagccaactaaaaccgactccctctcttcca

SEQ ID NO: 125524 - DNA, 33 bp, Homo sapien
aaaagccaactaaaactgactccctctcttcca

SEQ ID NO: 125525 - DNA, 33 bp, Homo sapien
gtaccaagaactgctcaatgatcaaaaccttac

SEQ ID NO: 125526 - DNA, 33 bp, Homo sapien
gtaccaagaactgctcgatgatcaaaaccttac

SEQ ID NO: 125527 - DNA, 33 bp, Homo sapien
ttaacttagttatgaacttaatgttggagtaat

SEQ ID NO: 125528 - DNA, 33 bp, Homo sapien
ttaacttagttatgaagttaatgttggagtaat

SEQ ID NO: 125529 - DNA, 33 bp, Homo sapien
ttggcagtggtattaacatggtttttcgatact

SEQ ID NO: 125530 - DNA, 33 bp, Homo sapien
ttggcagtggtattaatatggtttttcgatact

SEQ ID NO: 125531 - DNA, 33 bp, Homo sapien
cttttcaccgttaagaactttggattttagtat

SEQ ID NO: 125532 - DNA, 33 bp, Homo sapien
cttttcaccgttaagacctttggattttagtat

SEQ ID NO: 125533 - DNA, 33 bp, Homo sapien
acctgtaggcccatgaataataatagctactta

SEQ ID NO: 125534 - DNA, 33 bp, Homo sapien
acctgtaggcccatgagtaataatagctactta

SEQ ID NO: 125535 - DNA, 33 bp, Homo sapien
ctccccctgagaagtaccttcgaggtgaggcct

SEQ ID NO: 125536 - DNA, 33 bp, Homo sapien
ctccccctgagaagtatcttcgaggtgaggcct

SEQ ID NO: 125537 - DNA, 33 bp, Homo sapien
gtggtaaggctggagaactactttggggcttcc

SEQ ID NO: 125538 - DNA, 33 bp, Homo sapien
gtggtaaggctggagagctactttggggcttcc

SEQ ID NO: 125539 - DNA, 33 bp, Homo sapien
ttactttctgacactacaaggtactccaggatc

SEQ ID NO: 125540 - DNA, 33 bp, Homo sapien
ttactttctgacactataaggtactccaggatc

SEQ ID NO: 125541 - DNA, 33 bp, Homo sapien
tgtctagagagtgagaaaaaagaagttatccgt

SEQ ID NO: 125542 - DNA, 33 bp, Homo sapien
tgtctagagagtgagacaaaagaagttatccgt

SEQ ID NO: 125543 - DNA, 33 bp, Homo sapien
aactaatgataattccaccaccctttgctgact

SEQ ID NO: 125544 - DNA, 33 bp, Homo sapien
aactaatgataattccgccaccctttgctgact

SEQ ID NO: 125545 - DNA, 33 bp, Homo sapien
aaccgcatgagcctcaagcagataccgcaatac

SEQ ID NO: 125546 - DNA, 33 bp, Homo sapien
aaccgcatgagcctcaggcagataccgcaatac

SEQ ID NO: 125547 - DNA, 33 bp, Homo sapien
cttgacaatttcttgcaacttgttagcttttct

SEQ ID NO: 125548 - DNA, 33 bp, Homo sapien
cttgacaatttcttgcgacttgttagcttttct

SEQ ID NO: 125549 - DNA, 33 bp, Homo sapien
gtaaatcctttgtccacgagtaatccgttgtga

SEQ ID NO: 125550 - DNA, 33 bp, Homo sapien
gtaaatcctttgtccatgagtaatccgttgtga

SEQ ID NO: 125551 - DNA, 33 bp, Homo sapien
gagaaaagctaaggaccctgacatttgcaacat

SEQ ID NO: 125552 - DNA, 33 bp, Homo sapien
gagaaaagctaaggactctgacatttgcaacat

SEQ ID NO: 125553 - DNA, 33 bp, Homo sapien
ctaaaacttctacatgaatcagggacctcaggg

SEQ ID NO: 125554 - DNA, 33 bp, Homo sapien
ctaaaacttctacatggatcagggacctcaggg

SEQ ID NO: 125555 - DNA, 33 bp, Homo sapien
aaaaaaaaatcgactcccaatcctgcaaattcc

SEQ ID NO: 125556 - DNA, 33 bp, Homo sapien
aaaaaaaaatcgactctcaatcctgcaaattcc

SEQ ID NO: 125557 - DNA, 33 bp, Homo sapien
ttgaaagtggaatattcaagtgtccagttattt

SEQ ID NO: 125558 - DNA, 33 bp, Homo sapien
ttgaaagtggaatatttaagtgtccagttattt

SEQ ID NO: 125559 - DNA, 33 bp, Homo sapien
gaggccagcatatcagaatcagtgaacaatttg

SEQ ID NO: 125560 - DNA, 33 bp, Homo sapien
gaggccagcatatcaggatcagtgaacaatttg

SEQ ID NO: 125561 - DNA, 33 bp, Homo sapien
tatttataatcattgacataaatagcagaagaa

SEQ ID NO: 125562 - DNA, 33 bp, Homo sapien
tatttataatcattgagataaatagcagaagaa

SEQ ID NO: 125563 - DNA, 33 bp, Homo sapien
ggttgacactagttccactttcaacccattagt

SEQ ID NO: 125564 - DNA, 33 bp, Homo sapien
ggttgacactagttcctctttcaacccattagt

SEQ ID NO: 125565 - DNA, 33 bp, Homo sapien
cacagtgagctccaggcagacaatttcaagcat

SEQ ID NO: 125566 - DNA, 33 bp, Homo sapien
cacagtgagctccaggtagacaatttcaagcat

SEQ ID NO: 125567 - DNA, 33 bp, Homo sapien
tgtgatggtggcaaccaaatgaaatctaatttc

SEQ ID NO: 125568 - DNA, 33 bp, Homo sapien
tgtgatggtggcaaccgaatgaaatctaatttc

SEQ ID NO: 125569 - DNA, 33 bp, Homo sapien
tgattacctgggaattaaaaaagttatgccgcc

SEQ ID NO: 125570 - DNA, 33 bp, Homo sapien
tgattacctgggaatttaaaaagttatgccgcc

SEQ ID NO: 125571 - DNA, 33 bp, Homo sapien
ggaaccacacagctccaagattcagtttcctca

SEQ ID NO: 125572 - DNA, 33 bp, Homo sapien
ggaaccacacagctccgagattcagtttcctca

SEQ ID NO: 125573 - DNA, 33 bp, Homo sapien
cccatcaggcccaacacgatcaggtcaacctcg

SEQ ID NO: 125574 - DNA, 33 bp, Homo sapien
cccatcaggcccaacatgatcaggtcaacctcg

SEQ ID NO: 125575 - DNA, 33 bp, Homo sapien
tttaatattcccctggcaacagctcctgggcgt

SEQ ID NO: 125576 - DNA, 33 bp, Homo sapien
tttaatattcccctggtaacagctcctgggcgt

SEQ ID NO: 125577 - DNA, 33 bp, Homo sapien
ctatggagagcttcccacacccctcaggtatgc

SEQ ID NO: 125578 - DNA, 33 bp, Homo sapien
ctatggagagcttcccgcacccctcaggtatgc

SEQ ID NO: 125579 - DNA, 33 bp, Homo sapien
ccacattcttgtgcacacgggcatttgcaggca

SEQ ID NO: 125580 - DNA, 33 bp, Homo sapien
ccacattcttgtgcacgcgggcatttgcaggca

SEQ ID NO: 125581 - DNA, 33 bp, Homo sapien
tgaggcccacctcaaactgcaaggagtacagca

SEQ ID NO: 125582 - DNA, 33 bp, Homo sapien
tgaggcccacctcaaattgcaaggagtacagca

SEQ ID NO: 125583 - DNA, 33 bp, Homo sapien
tgctctcagctgtgtcacctcagaagtctgttt

SEQ ID NO: 125584 - DNA, 33 bp, Homo sapien
tgctctcagctgtgtcgcctcagaagtctgttt

SEQ ID NO: 125585 - DNA, 33 bp, Homo sapien
tgctgtttatagccgcactgaaggtcaggcaag

SEQ ID NO: 125586 - DNA, 33 bp, Homo sapien
tgctgtttatagccgcgctgaaggtcaggcaag

SEQ ID NO: 125587 - DNA, 33 bp, Homo sapien
aacattctaaagtgtacacctgaacacccgcca

SEQ ID NO: 125588 - DNA, 33 bp, Homo sapien
aacattctaaagtgtatacctgaacacccgcca

SEQ ID NO: 125589 - DNA, 33 bp, Homo sapien
ccacgtgggtgatgacagcaagaccaggacagc

SEQ ID NO: 125590 - DNA, 33 bp, Homo sapien
ccacgtgggtgatgacggcaagaccaggacagc

SEQ ID NO: 125591 - DNA, 33 bp, Homo sapien
ggtcgtgcagaaacaactcagttcctgggctgc

SEQ ID NO: 125592 - DNA, 33 bp, Homo sapien
ggtcgtgcagaaacaattcagttcctgggctgc

SEQ ID NO: 125593 - DNA, 33 bp, Homo sapien
ggcaggagcttccacccatgtctgtaagcccag

SEQ ID NO: 125594 - DNA, 33 bp, Homo sapien
ggcaggagcttccacctatgtctgtaagcccag

SEQ ID NO: 125595 - DNA, 33 bp, Homo sapien
cctggatgagcaaactcagctgggaaatggggc

SEQ ID NO: 125596 - DNA, 33 bp, Homo sapien
cctggatgagcaaacttagctgggaaatggggc

SEQ ID NO: 125597 - DNA, 33 bp, Homo sapien
ctaatatcacacaaagaaagttaactatctccc

SEQ ID NO: 125598 - DNA, 33 bp, Homo sapien
ctaatatcacacaaaggaagttaactatctccc

SEQ ID NO: 125599 - DNA, 33 bp, Homo sapien
aacaacatcaatgcaaggattggaaaatggaaa

SEQ ID NO: 125600 - DNA, 33 bp, Homo sapien
aacaacatcaatgcaatgattggaaaatggaaa

SEQ ID NO: 125601 - DNA, 33 bp, Homo sapien
aaagacaactagagaacctgttcaaagagctag

SEQ ID NO: 125602 - DNA, 33 bp, Homo sapien
aaagacaactagagaatctgttcaaagagctag

SEQ ID NO: 125603 - DNA, 33 bp, Homo sapien
acaactctaccaggtaaggaagccaaggtttag

SEQ ID NO: 125604 - DNA, 33 bp, Homo sapien
acaactctaccaggtagggaagccaaggtttag

SEQ ID NO: 125605 - DNA, 33 bp, Homo sapien
cacatgtcctctaggaactttctgcaattgtaa

SEQ ID NO: 125606 - DNA, 33 bp, Homo sapien
cacatgtcctctaggagctttctgcaattgtaa

SEQ ID NO: 125607 - DNA, 33 bp, Homo sapien
ttccctgttccaacacagtagcccctaatctca

SEQ ID NO: 125608 - DNA, 33 bp, Homo sapien
ttccctgttccaacacggtagcccctaatctca

SEQ ID NO: 125609 - DNA, 33 bp, Homo sapien
tcagtgtttagggatactaagaagaatcagaca

SEQ ID NO: 125610 - DNA, 33 bp, Homo sapien
tcagtgtttagggatagtaagaagaatcagaca

SEQ ID NO: 125611 - DNA, 33 bp, Homo sapien
gctcctgtctagcctaacagtagctgttgaact

SEQ ID NO: 125612 - DNA, 33 bp, Homo sapien
gctcctgtctagcctagcagtagctgttgaact

SEQ ID NO: 125613 - DNA, 33 bp, Homo sapien
tgaaatgagaccacaaaagtgaagaacagaaaa

SEQ ID NO: 125614 - DNA, 33 bp, Homo sapien
tgaaatgagaccacaatagtgaagaacagaaaa

SEQ ID NO: 125615 - DNA, 33 bp, Homo sapien
aaactgctcactttaccgaatacttctggccgg

SEQ ID NO: 125616 - DNA, 33 bp, Homo sapien
aaactgctcactttactgaatacttctggccgg

SEQ ID NO: 125617 - DNA, 33 bp, Homo sapien
ctgaatcggatatttacgtgacttaggctgata

SEQ ID NO: 125618 - DNA, 33 bp, Homo sapien
ctgaatcggatatttaggtgacttaggctgata

SEQ ID NO: 125619 - DNA, 33 bp, Homo sapien
tgtattgagattttgcccagtatgtctttttac

SEQ ID NO: 125620 - DNA, 33 bp, Homo sapien
tgtattgagattttgctcagtatgtctttttac

SEQ ID NO: 125621 - DNA, 33 bp, Homo sapien
ttgagcagcagttacagatgctagaatcatagt

SEQ ID NO: 125622 - DNA, 33 bp, Homo sapien
ttgagcagcagttacatatgctagaatcatagt

SEQ ID NO: 125623 - DNA, 33 bp, Homo sapien
actaatctaaacctcaacatacagcaatgaaca

SEQ ID NO: 125624 - DNA, 33 bp, Homo sapien
actaatctaaacctcagcatacagcaatgaaca

SEQ ID NO: 125625 - DNA, 33 bp, Homo sapien
ctcggctgtttcacacaaagttttccctttttc

SEQ ID NO: 125626 - DNA, 33 bp, Homo sapien
ctcggctgtttcacacgaagttttccctttttc

SEQ ID NO: 125627 - DNA, 33 bp, Homo sapien
tttccaaattttccaccgcaggatgattttttt

SEQ ID NO: 125628 - DNA, 33 bp, Homo sapien
tttccaaattttccactgcaggatgattttttt

SEQ ID NO: 125629 - DNA, 33 bp, Homo sapien
ttcgtgtaactacaaacgttatgccacacgaga

SEQ ID NO: 125630 - DNA, 33 bp, Homo sapien
ttcgtgtaactacaaatgttatgccacacgaga

SEQ ID NO: 125631 - DNA, 33 bp, Homo sapien
acaacacgcttaatgacggcagaacaagcaaaa

SEQ ID NO: 125632 - DNA, 33 bp, Homo sapien
acaacacgcttaatgatggcagaacaagcaaaa

SEQ ID NO: 125633 - DNA, 33 bp, Homo sapien
cctaacaagacatttaaattttttgataacacc

SEQ ID NO: 125634 - DNA, 33 bp, Homo sapien
cctaacaagacatttacattttttgataacacc

SEQ ID NO: 125635 - DNA, 33 bp, Homo sapien
gccgatcagctgacaaatggctaaacaaaatgt

SEQ ID NO: 125636 - DNA, 33 bp, Homo sapien
gccgatcagctgacaactggctaaacaaaatgt

SEQ ID NO: 125637 - DNA, 33 bp, Homo sapien
attttaataattttgaaaaccaagatggatgca

SEQ ID NO: 125638 - DNA, 33 bp, Homo sapien
attttaataattttgagaaccaagatggatgca

SEQ ID NO: 125639 - DNA, 33 bp, Homo sapien
acgttcattctgtaggcacaactaattaaacca

SEQ ID NO: 125640 - DNA, 33 bp, Homo sapien
acgttcattctgtaggtacaactaattaaacca

SEQ ID NO: 125641 - DNA, 33 bp, Homo sapien
agaggacttcagtttgaatcttgactttaccac

SEQ ID NO: 125642 - DNA, 33 bp, Homo sapien
agaggacttcagtttgtatcttgactttaccac

SEQ ID NO: 125643 - DNA, 33 bp, Homo sapien
gacagtctgaatggaagagagtgggactaaaca

SEQ ID NO: 125644 - DNA, 33 bp, Homo sapien
gacagtctgaatggaatagagtgggactaaaca

SEQ ID NO: 125645 - DNA, 33 bp, Homo sapien
tgctgtatgcacgtgaagctcaagaacttggga

SEQ ID NO: 125646 - DNA, 33 bp, Homo sapien
tgctgtatgcacgtgacgctcaagaacttggga

SEQ ID NO: 125647 - DNA, 33 bp, Homo sapien
ccttgagatttacttgaagacattgggtaactt

SEQ ID NO: 125648 - DNA, 33 bp, Homo sapien
ccttgagatttacttgtagacattgggtaactt

SEQ ID NO: 125649 - DNA, 33 bp, Homo sapien
aatcaggatccaaataagctggttgtctccaag

SEQ ID NO: 125650 - DNA, 33 bp, Homo sapien
aatcaggatccaaatacgctggttgtctccaag

SEQ ID NO: 125651 - DNA, 33 bp, Homo sapien
tgcttagacatctcctaactgacttgtcttaaa

SEQ ID NO: 125652 - DNA, 33 bp, Homo sapien
tgcttagacatctcctgactgacttgtcttaaa

SEQ ID NO: 125653 - DNA, 33 bp, Homo sapien
cagaaagcattcttgaaagctgattacagacca

SEQ ID NO: 125654 - DNA, 33 bp, Homo sapien
cagaaagcattcttgagagctgattacagacca

SEQ ID NO: 125655 - DNA, 33 bp, Homo sapien
tgctgccatcaaaaaacggacctgacaataaaa

SEQ ID NO: 125656 - DNA, 33 bp, Homo sapien
tgctgccatcaaaaaatggacctgacaataaaa

SEQ ID NO: 125657 - DNA, 33 bp, Homo sapien
gagagaacagatggagaaaatcatcaatgaaaa

SEQ ID NO: 125658 - DNA, 33 bp, Homo sapien
gagagaacagatggaggaaatcatcaatgaaaa

SEQ ID NO: 125659 - DNA, 33 bp, Homo sapien
gagcttgaggtggaaagtcccagtcactcctgg

SEQ ID NO: 125660 - DNA, 33 bp, Homo sapien
gagcttgaggtggaaattcccagtcactcctgg

SEQ ID NO: 125661 - DNA, 33 bp, Homo sapien
cccgaggaggccaaagacaaacacacataggtg

SEQ ID NO: 125662 - DNA, 33 bp, Homo sapien
cccgaggaggccaaagccaaacacacataggtg

SEQ ID NO: 125663 - DNA, 33 bp, Homo sapien
atctcagccaccttgaacttcccatcatgctcc

SEQ ID NO: 125664 - DNA, 33 bp, Homo sapien
atctcagccaccttgaccttcccatcatgctcc

SEQ ID NO: 125665 - DNA, 33 bp, Homo sapien
tctggcagccctgcgactaaacctctttcttct

SEQ ID NO: 125666 - DNA, 33 bp, Homo sapien
tctggcagccctgcgattaaacctctttcttct

SEQ ID NO: 125667 - DNA, 33 bp, Homo sapien
ctcacctcatccttcagggcctcaatttccaca

SEQ ID NO: 125668 - DNA, 33 bp, Homo sapien
ctcacctcatccttcatggcctcaatttccaca

SEQ ID NO: 125669 - DNA, 33 bp, Homo sapien
atggactgcttgcaaacgggcgtgggtgtgttg

SEQ ID NO: 125670 - DNA, 33 bp, Homo sapien
atggactgcttgcaaatgggcgtgggtgtgttg

SEQ ID NO: 125671 - DNA, 33 bp, Homo sapien; identical to SEQ ID NO: 125669

SEQ ID NO: 125672 - DNA, 33 bp, Homo sapien; identical to SEQ ID NO: 125670

SEQ ID NO: 125673 - DNA, 33 bp, Homo sapien
catatttctttttccacgtcttcagccatttcc

SEQ ID NO: 125674 - DNA, 33 bp, Homo sapien
catatttctttttccatgtcttcagccatttcc

SEQ ID NO: 125675 - DNA, 33 bp, Homo sapien
aatctgagcgaataacaacctctcctctctctc

SEQ ID NO: 125676 - DNA, 33 bp, Homo sapien
aatctgagcgaataaccacctctcctctctctc

SEQ ID NO: 125677 - DNA, 33 bp, Homo sapien
taattgtataagagtaaaaaaaaatggccaggc

SEQ ID NO: 125678 - DNA, 33 bp, Homo sapien
taattgtataagagtacaaaaaaatggccaggc

SEQ ID NO: 125679 - DNA, 33 bp, Homo sapien
tccctctgaagatccactagtagtgcaccagtc

SEQ ID NO: 125680 - DNA, 33 bp, Homo sapien
tccctctgaagatccattagtagtgcaccagtc

SEQ ID NO: 125681 - DNA, 33 bp, Homo sapien
taatgttgaaagctgacagtgaagtaactttta

SEQ ID NO: 125682 - DNA, 33 bp, Homo sapien
taatgttgaaagctgatagtgaagtaactttta

SEQ ID NO: 125683 - DNA, 33 bp, Homo sapien
gggctagaccttgaaaatgggtagaatatgaac

SEQ ID NO: 125684 - DNA, 33 bp, Homo sapien
gggctagaccttgaaagtgggtagaatatgaac

SEQ ID NO: 125685 - DNA, 33 bp, Homo sapien
ttgcagatatgggtgacaaatatgactgaataa

SEQ ID NO: 125686 - DNA, 33 bp, Homo sapien
ttgcagatatgggtgataaatatgactgaataa

SEQ ID NO: 125687 - DNA, 33 bp, Homo sapien; identical to SEQ ID NO: 125685

SEQ ID NO: 125688 - DNA, 33 bp, Homo sapien; identical to SEQ ID NO: 125686

SEQ ID NO: 125689 - DNA, 33 bp, Homo sapien
aataatgcacgtgggaaccttagaacagagcct

SEQ ID NO: 125690 - DNA, 33 bp, Homo sapien
aataatgcacgtgggagccttagaacagagcct

SEQ ID NO: 125691 - DNA, 33 bp, Homo sapien
aaaccttcaaggttacagaagttgcaagggaca

SEQ ID NO: 125692 - DNA, 33 bp, Homo sapien
aaaccttcaaggttaccgaagttgcaagggaca

SEQ ID NO: 125693 - DNA, 33 bp, Homo sapien
ttcattaagcctcccccgcaccaatgtgcttta

SEQ ID NO: 125694 - DNA, 33 bp, Homo sapien
ttcattaagcctcccctgcaccaatgtgcttta

SEQ ID NO: 125695 - DNA, 33 bp, Homo sapien
ctgcccttgcttatctaaaaactcctgctccaa

SEQ ID NO: 125696 - DNA, 33 bp, Homo sapien
ctgcccttgcttatctgaaaactcctgctccaa

SEQ ID NO: 125697 - DNA, 33 bp, Homo sapien
tgtatacgacatttaccgcttctgtgtcctcac

SEQ ID NO: 125698 - DNA, 33 bp, Homo sapien
tgtatacgacatttactgcttctgtgtcctcac

SEQ ID NO: 125699 - DNA, 33 bp, Homo sapien
taatgttcagaaaaaaagtcatataataaagtc

SEQ ID NO: 125700 - DNA, 33 bp, Homo sapien
taatgttcagaaaaaaggtcatataataaagtc

SEQ ID NO: 125701 - DNA, 33 bp, Homo sapien
agttaggtgaattgaacctccaataatataatc

SEQ ID NO: 125702 - DNA, 33 bp, Homo sapien
agttaggtgaattgaatctccaataatataatc

SEQ ID NO: 125703 - DNA, 33 bp, Homo sapien
aacagtattatacaaacgttgatttcctgttgt

SEQ ID NO: 125704 - DNA, 33 bp, Homo sapien
aacagtattatacaaatgttgatttcctgttgt

SEQ ID NO: 125705 - DNA, 33 bp, Homo sapien
gcaatctgctttgttacggctccactatacctg

SEQ ID NO: 125706 - DNA, 33 bp, Homo sapien
gcaatctgctttgttatggctccactatacctg

SEQ ID NO: 125707 - DNA, 33 bp, Homo sapien
taaaatatgaaaaagcaaactgcaaatgactga

SEQ ID NO: 125708 - DNA, 33 bp, Homo sapien
taaaatatgaaaaagccaactgcaaatgactga

SEQ ID NO: 125709 - DNA, 33 bp, Homo sapien
aagttttgtcactgtaaaataactctcttggca

SEQ ID NO: 125710 - DNA, 33 bp, Homo sapien
aagttttgtcactgtagaataactctcttggca

SEQ ID NO: 125711 - DNA, 33 bp, Homo sapien
attatatgtatatttaaggatcactttttcaac

SEQ ID NO: 125712 - DNA, 33 bp, Homo sapien
attatatgtatatttacggatcactttttcaac

SEQ ID NO: 125713 - DNA, 33 bp, Homo sapien
aaatgcattccggtaagactcaagtagaaacta

SEQ ID NO: 125714 - DNA, 33 bp, Homo sapien
aaatgcattccggtaatactcaagtagaaacta

SEQ ID NO: 125715 - DNA, 33 bp, Homo sapien
gagcaatgaatggtgacgtaaaagatcagttaa

SEQ ID NO: 125716 - DNA, 33 bp, Homo sapien
gagcaatgaatggtgatgtaaaagatcagttaa

SEQ ID NO: 125717 - DNA, 33 bp, Homo sapien
tgaaaattaacttggcaaacataattaataatc

SEQ ID NO: 125718 - DNA, 33 bp, Homo sapien
tgaaaattaacttggccaacataattaataatc

SEQ ID NO: 125719 - DNA, 33 bp, Homo sapien; identical to SEQ ID NO: 125717

SEQ ID NO: 125720 - DNA, 33 bp, Homo sapien; identical to SEQ ID NO: 125718

SEQ ID NO: 125721 - DNA, 33 bp, Homo sapien
gagagctaatttgtagaaaacagaagtctaaaa

SEQ ID NO: 125722 - DNA, 33 bp, Homo sapien
gagagctaatttgtagcaaacagaagtctaaaa

SEQ ID NO: 125723 - DNA, 33 bp, Homo sapien
gcattctgactatggaggatcctccttcacttg

SEQ ID NO: 125724 - DNA, 33 bp, Homo sapien
gcattctgactatggatgatcctccttcacttg

SEQ ID NO: 125725 - DNA, 33 bp, Homo sapien
agtgtaatcacttaaaaatgttgatcctccgtc

SEQ ID NO: 125726 - DNA, 33 bp, Homo sapien
agtgtaatcacttaaatatgttgatcctccgtc

SEQ ID NO: 125727 - DNA, 33 bp, Homo sapien
tctctgataaacattaggaactcattgctttct

SEQ ID NO: 125728 - DNA, 33 bp, Homo sapien
tctctgataaacattatgaactcattgctttct

SEQ ID NO: 125729 - DNA, 33 bp, Homo sapien; identical to SEQ ID NO: 125727

SEQ ID NO: 125730 - DNA, 33 bp, Homo sapien; identical to SEQ ID NO: 125728

SEQ ID NO: 125731 - DNA, 33 bp, Homo sapien
cactcaattaataagcagcagagctaattagag

SEQ ID NO: 125732 - DNA, 33 bp, Homo sapien
cactcaattaataagcggcagagctaattagag

SEQ ID NO: 125733 - DNA, 33 bp, Homo sapien
cgtctccaaattttcagcattcataggctggcc

SEQ ID NO: 125734 - DNA, 33 bp, Homo sapien
cgtctccaaattttcatcattcataggctggcc

SEQ ID NO: 125735 - DNA, 33 bp, Homo sapien
aaaaagaaactctatacgctgtgccttagcagt

SEQ ID NO: 125736 - DNA, 33 bp, Homo sapien
aaaaagaaactctatatgctgtgccttagcagt

SEQ ID NO: 125737 - DNA, 33 bp, Homo sapien
acactacagagattcccagcactgaaaagattc

SEQ ID NO: 125738 - DNA, 33 bp, Homo sapien
acactacagagattcctagcactgaaaagattc

SEQ ID NO: 125739 - DNA, 33 bp, Homo sapien
tttcagacactcaacaatagttataagaaaagg

SEQ ID NO: 125740 - DNA, 33 bp, Homo sapien
tttcagacactcaacagtagttataagaaaagg

SEQ ID NO: 125741 - DNA, 33 bp, Homo sapien
aaagctggtctatgaacaagcccaaaatactgg

SEQ ID NO: 125742 - DNA, 33 bp, Homo sapien
aaagctggtctatgaataagcccaaaatactgg

SEQ ID NO: 125743 - DNA, 33 bp, Homo sapien
gttcatatcgctatcaacattttgttcacaacc

SEQ ID NO: 125744 - DNA, 33 bp, Homo sapien
gttcatatcgctatcagcattttgttcacaacc

SEQ ID NO: 125745 - DNA, 33 bp, Homo sapien
ggggacaagatatgacaatatatccaaactatt

SEQ ID NO: 125746 - DNA, 33 bp, Homo sapien
ggggacaagatatgacgatatatccaaactatt

SEQ ID NO: 125747 - DNA, 33 bp, Homo sapien
ctgtacataatctgtacgtaggcacatggatac

SEQ ID NO: 125748 - DNA, 33 bp, Homo sapien
ctgtacataatctgtatgtaggcacatggatac

SEQ ID NO: 125749 - DNA, 33 bp, Homo sapien
agaaacaactgtctcaacttttcttcctacttc

SEQ ID NO: 125750 - DNA, 33 bp, Homo sapien
agaaacaactgtctcagcttttcttcctacttc

SEQ ID NO: 125751 - DNA, 33 bp, Homo sapien
ttccagtaacatagaaagattgcaactaactct

SEQ ID NO: 125752 - DNA, 33 bp, Homo sapien
ttccagtaacatagaatgattgcaactaactct

SEQ ID NO: 125753 - DNA, 33 bp, Homo sapien
ggctataagacccccactgcataaacatcatct

SEQ ID NO: 125754 - DNA, 33 bp, Homo sapien
ggctataagacccccagtgcataaacatcatct

SEQ ID NO: 125755 - DNA, 33 bp, Homo sapien
ttgctgccactactggaattcagacaagccgcc

SEQ ID NO: 125756 - DNA, 33 bp, Homo sapien
ttgctgccactactggcattcagacaagccgcc

SEQ ID NO: 125757 - DNA, 33 bp, Homo sapien
tccccaacaaaaaccacagatacatcttcagga

SEQ ID NO: 125758 - DNA, 33 bp, Homo sapien
tccccaacaaaaaccatagatacatcttcagga

SEQ ID NO: 125759 - DNA, 33 bp, Homo sapien
cactcaggctttcctacacaccttctgaaatct

SEQ ID NO: 125760 - DNA, 33 bp, Homo sapien
cactcaggctttcctatacaccttctgaaatct

SEQ ID NO: 125761 - DNA, 33 bp, Homo sapien
acagtgggctgagatacagaatagcaagaagaa

SEQ ID NO: 125762 - DNA, 33 bp, Homo sapien
acagtgggctgagatagagaatagcaagaagaa

SEQ ID NO: 125763 - DNA, 33 bp, Homo sapien
ttctgaaatctgaacaagtttcctgtactaaaa

SEQ ID NO: 125764 - DNA, 33 bp, Homo sapien
ttctgaaatctgaacaggtttcctgtactaaaa

SEQ ID NO: 125765 - DNA, 33 bp, Homo sapien
tgtgggtgtttatttgaaagatgatccagggac

SEQ ID NO: 125766 - DNA, 33 bp, Homo sapien
tgtgggtgtttatttggaagatgatccagggac

SEQ ID NO: 125767 - DNA, 33 bp, Homo sapien
ttgaatttttataataaccttgccaaaaatcaa

SEQ ID NO: 125768 - DNA, 33 bp, Homo sapien
ttgaatttttataatacccttgccaaaaatcaa

SEQ ID NO: 125769 - DNA, 33 bp, Homo sapien
aggaagctcggtgagacccatccctgctctcaa

SEQ ID NO: 125770 - DNA, 33 bp, Homo sapien
aggaagctcggtgagatccatccctgctctcaa

SEQ ID NO: 125771 - DNA, 33 bp, Homo sapien
gatcaaacccttcacaatctataatagaacctg

SEQ ID NO: 125772 - DNA, 33 bp, Homo sapien
gatcaaacccttcacagtctataatagaacctg

SEQ ID NO: 125773 - DNA, 33 bp, Homo sapien
tacactgatctgatgacgtacatgatctgatga

SEQ ID NO: 125774 - DNA, 33 bp, Homo sapien
tacactgatctgatgaggtacatgatctgatga

SEQ ID NO: 125775 - DNA, 33 bp, Homo sapien
actgtttttcagaaaacgtttagcatccatata

SEQ ID NO: 125776 - DNA, 33 bp, Homo sapien
actgtttttcagaaaatgtttagcatccatata

SEQ ID NO: 125777 - DNA, 33 bp, Homo sapien
gcccattccagtggaaaagaagtgctactttgg

SEQ ID NO: 125778 - DNA, 33 bp, Homo sapien
gcccattccagtggaacagaagtgctactttgg

SEQ ID NO: 125779 - DNA, 33 bp, Homo sapien
taagatgtttatttcacagaggcaatgacactt

SEQ ID NO: 125780 - DNA, 33 bp, Homo sapien
taagatgtttatttcatagaggcaatgacactt

SEQ ID NO: 125781 - DNA, 33 bp, Homo sapien
aaaggatgatgcaggcactttgaaagggatttc

SEQ ID NO: 125782 - DNA, 33 bp, Homo sapien
aaaggatgatgcaggcgctttgaaagggatttc

SEQ ID NO: 125783 - DNA, 33 bp, Homo sapien
gactgtgcagcactcacataatggacaaggctg

SEQ ID NO: 125784 - DNA, 33 bp, Homo sapien
gactgtgcagcactcatataatggacaaggctg

SEQ ID NO: 125785 - DNA, 33 bp, Homo sapien
acacagcctaataaccagaaccaattgagaaaa

SEQ ID NO: 125786 - DNA, 33 bp, Homo sapien
acacagcctaataacctgaaccaattgagaaaa

SEQ ID NO: 125787 - DNA, 33 bp, Homo sapien
taccacgtgcataaaactgagtctcctgaaatg

SEQ ID NO: 125788 - DNA, 33 bp, Homo sapien
taccacgtgcataaaattgagtctcctgaaatg

SEQ ID NO: 125789 - DNA, 33 bp, Homo sapien
gtagctctacatattaagtagttacaagtatta

SEQ ID NO: 125790 - DNA, 33 bp, Homo sapien
gtagctctacatattaggtagttacaagtatta

SEQ ID NO: 125791 - DNA, 33 bp, Homo sapien
aatccaggatgaactaacaggaaagaaatggtg

SEQ ID NO: 125792 - DNA, 33 bp, Homo sapien
aatccaggatgaactagcaggaaagaaatggtg

SEQ ID NO: 125793 - DNA, 33 bp, Homo sapien
atattttgtgttatgaaaagtatatgaaattaa

SEQ ID NO: 125794 - DNA, 33 bp, Homo sapien
atattttgtgttatgacaagtatatgaaattaa

SEQ ID NO: 125795 - DNA, 33 bp, Homo sapien
taggactaaatctaaaataatttccttgtcaca

SEQ ID NO: 125796 - DNA, 33 bp, Homo sapien
taggactaaatctaaagtaatttccttgtcaca

SEQ ID NO: 125797 - DNA, 33 bp, Homo sapien
ttctgatagttgcataagagaattagaggaaaa

SEQ ID NO: 125798 - DNA, 33 bp, Homo sapien
ttctgatagttgcataggagaattagaggaaaa

SEQ ID NO: 125799 - DNA, 33 bp, Homo sapien
ctaaagaaaatagtaacgggtctagttcccaaa

SEQ ID NO: 125800 - DNA, 33 bp, Homo sapien
ctaaagaaaatagtaatgggtctagttcccaaa

SEQ ID NO: 125801 - DNA, 33 bp, Homo sapien
actattgatgtcttgaacctgagaattctttgt

SEQ ID NO: 125802 - DNA, 33 bp, Homo sapien
actattgatgtcttgagcctgagaattctttgt

SEQ ID NO: 125803 - DNA, 33 bp, Homo sapien
taaggtccaggtggccacaatgctttcctttta

SEQ ID NO: 125804 - DNA, 33 bp, Homo sapien
taaggtccaggtggccgcaatgctttcctttta

SEQ ID NO: 125805 - DNA, 33 bp, Homo sapien
ggctctactcttttcaagcagagtatgaggaaa

SEQ ID NO: 125806 - DNA, 33 bp, Homo sapien
ggctctactcttttcaggcagagtatgaggaaa

SEQ ID NO: 125807 - DNA, 33 bp, Homo sapien
aaaaacaattaaatcacgggacaacagtaagtg

SEQ ID NO: 125808 - DNA, 33 bp, Homo sapien
aaaaacaattaaatcatgggacaacagtaagtg

SEQ ID NO: 125809 - DNA, 33 bp, Homo sapien
atatattcatacaccgcaacattatgcaagggt

SEQ ID NO: 125810 - DNA, 33 bp, Homo sapien
atatattcatacaccggaacattatgcaagggt

SEQ ID NO: 125811 - DNA, 33 bp, Homo sapien
ctcttctttgccagtacagtaaaattcccttta

SEQ ID NO: 125812 - DNA, 33 bp, Homo sapien
ctcttctttgccagtagagtaaaattcccttta

SEQ ID NO: 125813 - DNA, 33 bp, Homo sapien
agagatttgggagcccacagcatatggatggta

SEQ ID NO: 125814 - DNA, 33 bp, Homo sapien
agagatttgggagcccgcagcatatggatggta

SEQ ID NO: 125815 - DNA, 33 bp, Homo sapien
aaaaggtgcaaaaccacaatgaccaagctgtgt

SEQ ID NO: 125816 - DNA, 33 bp, Homo sapien
aaaaggtgcaaaaccagaatgaccaagctgtgt

SEQ ID NO: 125817 - DNA, 33 bp, Homo sapien
tacggacttcagttaacgacaatgtatatttgg

SEQ ID NO: 125818 - DNA, 33 bp, Homo sapien
tacggacttcagttaatgacaatgtatatttgg

SEQ ID NO: 125819 - DNA, 33 bp, Homo sapien
gatgccgtaagtatgacctccatctgttttttt

SEQ ID NO: 125820 - DNA, 33 bp, Homo sapien
gatgccgtaagtatgatctccatctgttttttt

SEQ ID NO: 125821 - DNA, 33 bp, Homo sapien
cacggaatatggatgacaatgaatggaaaacat

SEQ ID NO: 125822 - DNA, 33 bp, Homo sapien
cacggaatatggatgataatgaatggaaaacat

SEQ ID NO: 125823 - DNA, 33 bp, Homo sapien
tcaagacaccaagataaaagtcagccttccttg

SEQ ID NO: 125824 - DNA, 33 bp, Homo sapien
tcaagacaccaagatacaagtcagccttccttg

SEQ ID NO: 125825 - DNA, 33 bp, Homo sapien
gtgggctaacaaaaaaccttagaggcaaaaatg

SEQ ID NO: 125826 - DNA, 33 bp, Homo sapien
gtgggctaacaaaaaatcttagaggcaaaaatg

SEQ ID NO: 125827 - DNA, 33 bp, Homo sapien
aatcatctgtccaaaaacacagaggagtgaaaa

SEQ ID NO: 125828 - DNA, 33 bp, Homo sapien
aatcatctgtccaaaaccacagaggagtgaaaa

SEQ ID NO: 125829 - DNA, 33 bp, Homo sapien
atcacaggtcttgctaacgcaaccacagttgag

SEQ ID NO: 125830 - DNA, 33 bp, Homo sapien
atcacaggtcttgctagcgcaaccacagttgag

SEQ ID NO: 125831 - DNA, 33 bp, Homo sapien
aaaggtgattttatgccgaaaccaccatgaata

SEQ ID NO: 125832 - DNA, 33 bp, Homo sapien
aaaggtgattttatgctgaaaccaccatgaata

SEQ ID NO: 125833 - DNA, 33 bp, Homo sapien
cctgttttgcactctacattttcttgtacaaac

SEQ ID NO: 125834 - DNA, 33 bp, Homo sapien
cctgttttgcactctatattttcttgtacaaac

SEQ ID NO: 125835 - DNA, 33 bp, Homo sapien
aaccatatattagaacactattcaacagtttaa

SEQ ID NO: 125836 - DNA, 33 bp, Homo sapien
aaccatatattagaacgctattcaacagtttaa

SEQ ID NO: 125837 - DNA, 33 bp, Homo sapien
gctgctttgcctcaaaccatttaagccgaagta

SEQ ID NO: 125838 - DNA, 33 bp, Homo sapien
gctgctttgcctcaaatcatttaagccgaagta

SEQ ID NO: 125839 - DNA, 33 bp, Homo sapien
ttgctgaagtttgctacggcaacacactgcaat

SEQ ID NO: 125840 - DNA, 33 bp, Homo sapien
ttgctgaagtttgctatggcaacacactgcaat

SEQ ID NO: 125841 - DNA, 33 bp, Homo sapien
ttgacttgatttttaacacttgtcaaaatcttt

SEQ ID NO: 125842 - DNA, 33 bp, Homo sapien
ttgacttgatttttaatacttgtcaaaatcttt

SEQ ID NO: 125843 - DNA, 33 bp, Homo sapien
atctatcatgttggcacgaagttccataacatt

SEQ ID NO: 125844 - DNA, 33 bp, Homo sapien
atctatcatgttggcatgaagttccataacatt

SEQ ID NO: 125845 - DNA, 33 bp, Homo sapien
ttttgattactcacacaacatattaaatttaca

SEQ ID NO: 125846 - DNA, 33 bp, Homo sapien
ttttgattactcacacgacatattaaatttaca

SEQ ID NO: 125847 - DNA, 33 bp, Homo sapien
gaattctcatataaaaacaagcctaaagccatc

SEQ ID NO: 125848 - DNA, 33 bp, Homo sapien
gaattctcatataaaagcaagcctaaagccatc

SEQ ID NO: 125849 - DNA, 33 bp, Homo sapien
tatacaggaatacaaccatatgccgagtcttat

SEQ ID NO: 125850 - DNA, 33 bp, Homo sapien
tatacaggaatacaactatatgccgagtcttat

SEQ ID NO: 125851 - DNA, 33 bp, Homo sapien
ctttttaccaaggtcacagctgaagtgttccaa

SEQ ID NO: 125852 - DNA, 33 bp, Homo sapien
ctttttaccaaggtcatagctgaagtgttccaa

SEQ ID NO: 125853 - DNA, 33 bp, Homo sapien
ttctccttgaccattccataacacgtttaaaat

SEQ ID NO: 125854 - DNA, 33 bp, Homo sapien
ttctccttgaccattctataacacgtttaaaat

SEQ ID NO: 125855 - DNA, 33 bp, Homo sapien
atcccatcctttaaagccttgtgattttggcat

SEQ ID NO: 125856 - DNA, 33 bp, Homo sapien
atcccatcctttaaaggcttgtgattttggcat

SEQ ID NO: 125857 - DNA, 33 bp, Homo sapien
ctgtccatgaacttaaccatagttttcaacatt

SEQ ID NO: 125858 - DNA, 33 bp, Homo sapien
ctgtccatgaacttaatcatagttttcaacatt

SEQ ID NO: 125859 - DNA, 33 bp, Homo sapien
agataaaagacctcaaattattcttgttcattt

SEQ ID NO: 125860 - DNA, 33 bp, Homo sapien
agataaaagacctcaatttattcttgttcattt

SEQ ID NO: 125861 - DNA, 33 bp, Homo sapien
actatgccagtgctaaccaaagtgaattacggg

SEQ ID NO: 125862 - DNA, 33 bp, Homo sapien
actatgccagtgctaagcaaagtgaattacggg

SEQ ID NO: 125863 - DNA, 33 bp, Homo sapien
tctctctagtgttaccccatttcctcctcattc

SEQ ID NO: 125864 - DNA, 33 bp, Homo sapien
tctctctagtgttacctcatttcctcctcattc

SEQ ID NO: 125865 - DNA, 33 bp, Homo sapien
tagtcctagagtagaaccatgctgtaaaataga

SEQ ID NO: 125866 - DNA, 33 bp, Homo sapien
tagtcctagagtagaatcatgctgtaaaataga

SEQ ID NO: 125867 - DNA, 33 bp, Homo sapien
ttgccttttaggagccaaacatttaaggaggat

SEQ ID NO: 125868 - DNA, 33 bp, Homo sapien
ttgccttttaggagcccaacatttaaggaggat

SEQ ID NO: 125869 - DNA, 33 bp, Homo sapien
accaaacctgacaatactaaatcaactatcaat

SEQ ID NO: 125870 - DNA, 33 bp, Homo sapien
accaaacctgacaatagtaaatcaactatcaat

SEQ ID NO: 125871 - DNA, 33 bp, Homo sapien
aatggcattgtaagaagcttgttggcataaaag

SEQ ID NO: 125872 - DNA, 33 bp, Homo sapien
aatggcattgtaagaatcttgttggcataaaag

SEQ ID NO: 125873 - DNA, 33 bp, Homo sapien
tagagtcttaaaggtgaatgaagcttcgaaaag

SEQ ID NO: 125874 - DNA, 33 bp, Homo sapien
tagagtcttaaaggtggatgaagcttcgaaaag

SEQ ID NO: 125875 - DNA, 33 bp, Homo sapien
gcttggtccaaccctcacacctcttttattctc

SEQ ID NO: 125876 - DNA, 33 bp, Homo sapien
gcttggtccaaccctcgcacctcttttattctc

SEQ ID NO: 125877 - DNA, 33 bp, Homo sapien
atataaagaactactaagtttcaacaattaaaa

SEQ ID NO: 125878 - DNA, 33 bp, Homo sapien
atataaagaactactaggtttcaacaattaaaa

SEQ ID NO: 125879 - DNA, 33 bp, Homo sapien
attcttggaaatgccaggagaagttattaggat

SEQ ID NO: 125880 - DNA, 33 bp, Homo sapien
attcttggaaatgccatgagaagttattaggat

SEQ ID NO: 125881 - DNA, 33 bp, Homo sapien
gttagaaggaatataaaagatacaggagacaaa

SEQ ID NO: 125882 - DNA, 33 bp, Homo sapien
gttagaaggaatataatagatacaggagacaaa

SEQ ID NO: 125883 - DNA, 33 bp, Homo sapien
atcatagttttatgtaacctgttctaaattgaa

SEQ ID NO: 125884 - DNA, 33 bp, Homo sapien
atcatagttttatgtaccctgttctaaattgaa

SEQ ID NO: 125885 - DNA, 33 bp, Homo sapien
gtccatccccaaataaaacaaggccctgcagag

SEQ ID NO: 125886 - DNA, 33 bp, Homo sapien
gtccatccccaaataatacaaggccctgcagag

SEQ ID NO: 125887 - DNA, 33 bp, Homo sapien
aacctaaacacaaggccaatgaattatgtgtgg

SEQ ID NO: 125888 - DNA, 33 bp, Homo sapien
aacctaaacacaaggctaatgaattatgtgtgg

SEQ ID NO: 125889 - DNA, 33 bp, Homo sapien
ccaaatgcttttaaacaaatcacattgctctct

SEQ ID NO: 125890 - DNA, 33 bp, Homo sapien
ccaaatgcttttaaacgaatcacattgctctct

SEQ ID NO: 125891 - DNA, 33 bp, Homo sapien
ccttagatttttcaaacttggagtaataaattc

SEQ ID NO: 125892 - DNA, 33 bp, Homo sapien
ccttagatttttcaaatttggagtaataaattc

SEQ ID NO: 125893 - DNA, 33 bp, Homo sapien
atcctatctctacaaaacaaatttaaaagatag

SEQ ID NO: 125894 - DNA, 33 bp, Homo sapien
atcctatctctacaaagcaaatttaaaagatag

SEQ ID NO: 125895 - DNA, 33 bp, Homo sapien
tatttctgctctacagcccttagctccacagtc

SEQ ID NO: 125896 - DNA, 33 bp, Homo sapien
tatttctgctctacagtccttagctccacagtc

SEQ ID NO: 125897 - DNA, 33 bp, Homo sapien
tcaggaagactcactacctgattaagggccagg

SEQ ID NO: 125898 - DNA, 33 bp, Homo sapien
tcaggaagactcactatctgattaagggccagg

SEQ ID NO: 125899 - DNA, 33 bp, Homo sapien
taatcacctcagtaaccagggtgaaggtatagc

SEQ ID NO: 125900 - DNA, 33 bp, Homo sapien
taatcacctcagtaactagggtgaaggtatagc

SEQ ID NO: 125901 - DNA, 33 bp, Homo sapien
aatacataaaacttcactaagacatcccctggt

SEQ ID NO: 125902 - DNA, 33 bp, Homo sapien
aatacataaaacttcattaagacatcccctggt

SEQ ID NO: 125903 - DNA, 33 bp, Homo sapien
acacgccaagtaagcactaaaaaataactagaa

SEQ ID NO: 125904 - DNA, 33 bp, Homo sapien
acacgccaagtaagcattaaaaaataactagaa

SEQ ID NO: 125905 - DNA, 33 bp, Homo sapien
tttgagtcagactttccacttgtaggtacagaa

SEQ ID NO: 125906 - DNA, 33 bp, Homo sapien
tttgagtcagactttctacttgtaggtacagaa

SEQ ID NO: 125907 - DNA, 33 bp, Homo sapien
tcttatttttacgttgaaatatgcagcccattg

SEQ ID NO: 125908 - DNA, 33 bp, Homo sapien
tcttatttttacgttggaatatgcagcccattg

SEQ ID NO: 125909 - DNA, 33 bp, Homo sapien
cggcagtattttatacactcttacgtgtcttac

SEQ ID NO: 125910 - DNA, 33 bp, Homo sapien
cggcagtattttatactctcttacgtgtcttac

SEQ ID NO: 125911 - DNA, 33 bp, Homo sapien
tattaggttgtagcccaagataagttcattcta

SEQ ID NO: 125912 - DNA, 33 bp, Homo sapien
tattaggttgtagccccagataagttcattcta

SEQ ID NO: 125913 - DNA, 33 bp, Homo sapien
ctgggttagatataaactggttaatgtccaaca

SEQ ID NO: 125914 - DNA, 33 bp, Homo sapien
ctgggttagatataaagtggttaatgtccaaca

SEQ ID NO: 125915 - DNA, 33 bp, Homo sapien
ccctcaaaccaaatacaaacaatggtgccagga

SEQ ID NO: 125916 - DNA, 33 bp, Homo sapien
ccctcaaaccaaatacgaacaatggtgccagga

SEQ ID NO: 125917 - DNA, 33 bp, Homo sapien
caggaccgagctcacgaaagtctcacacaagtc

SEQ ID NO: 125918 - DNA, 33 bp, Homo sapien
caggaccgagctcacggaagtctcacacaagtc

SEQ ID NO: 125919 - DNA, 33 bp, Homo sapien
gtagggcatgaggaatgaaggaaattcagttca

SEQ ID NO: 125920 - DNA, 33 bp, Homo sapien
gtagggcatgaggaattaaggaaattcagttca

SEQ ID NO: 125921 - DNA, 33 bp, Homo sapien
atagtgaatcaaaacactgaaaagccactaact

SEQ ID NO: 125922 - DNA, 33 bp, Homo sapien
atagtgaatcaaaacattgaaaagccactaact

SEQ ID NO: 125923 - DNA, 33 bp, Homo sapien
tgctcttacactaacgcatgcaacgggggcctg

SEQ ID NO: 125924 - DNA, 33 bp, Homo sapien
tgctcttacactaacgtatgcaacgggggcctg

SEQ ID NO: 125925 - DNA, 33 bp, Homo sapien
gctcaagatttgagacaatgaggagaaaaataa

SEQ ID NO: 125926 - DNA, 33 bp, Homo sapien
gctcaagatttgagacgatgaggagaaaaataa

SEQ ID NO: 125927 - DNA, 33 bp, Homo sapien
ttttccactgtatagacgcaccacagtttgttt

SEQ ID NO: 125928 - DNA, 33 bp, Homo sapien
ttttccactgtatagatgcaccacagtttgttt

SEQ ID NO: 125929 - DNA, 33 bp, Homo sapien
agtggtagacaataaacggaaaaagacaaataa

SEQ ID NO: 125930 - DNA, 33 bp, Homo sapien
agtggtagacaataaatggaaaaagacaaataa

SEQ ID NO: 125931 - DNA, 33 bp, Homo sapien
gtgcgagctggggactaaggatcaggctgacct

SEQ ID NO: 125932 - DNA, 33 bp, Homo sapien
gtgcgagctggggactgaggatcaggctgacct

SEQ ID NO: 125933 - DNA, 33 bp, Homo sapien
ttgtgttaacacatacaaagaacagtttccaag

SEQ ID NO: 125934 - DNA, 33 bp, Homo sapien
ttgtgttaacacatacgaagaacagtttccaag

SEQ ID NO: 125935 - DNA, 33 bp, Homo sapien
agctttgagcacttgaagtgatgggaaagcagc

SEQ ID NO: 125936 - DNA, 33 bp, Homo sapien
agctttgagcacttgaggtgatgggaaagcagc

SEQ ID NO: 125937 - DNA, 33 bp, Homo sapien
ttaaaagataacagtaagaagagaaaggcctgg

SEQ ID NO: 125938 - DNA, 33 bp, Homo sapien
ttaaaagataacagtaggaagagaaaggcctgg

SEQ ID NO: 125939 - DNA, 33 bp, Homo sapien
agcttttcagatgacgaataccacaagttccag

SEQ ID NO: 125940 - DNA, 33 bp, Homo sapien
agcttttcagatgacggataccacaagttccag

SEQ ID NO: 125941 - DNA, 33 bp, Homo sapien
aggcttattttagagacgacatggttctagccg

SEQ ID NO: 125942 - DNA, 33 bp, Homo sapien
aggcttattttagagatgacatggttctagccg

SEQ ID NO: 125943 - DNA, 33 bp, Homo sapien
ggaaagcaagacttgaaccagctaggttaatta

SEQ ID NO: 125944 - DNA, 33 bp, Homo sapien
ggaaagcaagacttgacccagctaggttaatta

SEQ ID NO: 125945 - DNA, 33 bp, Homo sapien
cagagccggtcttataagtggggcagaattaat

SEQ ID NO: 125946 - DNA, 33 bp, Homo sapien
cagagccggtcttataggtggggcagaattaat

SEQ ID NO: 125947 - DNA, 33 bp, Homo sapien
ggcaacatcctcaaagacataatttttgtgacc

SEQ ID NO: 125948 - DNA, 33 bp, Homo sapien
ggcaacatcctcaaaggcataatttttgtgacc

SEQ ID NO: 125949 - DNA, 33 bp, Homo sapien
gatgttacttaacagaatagcacagtttgctta

SEQ ID NO: 125950 - DNA, 33 bp, Homo sapien
gatgttacttaacagagtagcacagtttgctta

SEQ ID NO: 125951 - DNA, 33 bp, Homo sapien
tatctctattgttggacattgaggttttttcca

SEQ ID NO: 125952 - DNA, 33 bp, Homo sapien
tatctctattgttggatattgaggttttttcca

SEQ ID NO: 125953 - DNA, 33 bp, Homo sapien
attacatgctgagataataaggttaaagaaagt

SEQ ID NO: 125954 - DNA, 33 bp, Homo sapien
attacatgctgagatagtaaggttaaagaaagt

SEQ ID NO: 125955 - DNA, 33 bp, Homo sapien
catcagagaggacataagaatcttaatagcatc

SEQ ID NO: 125956 - DNA, 33 bp, Homo sapien
catcagagaggacataggaatcttaatagcatc

SEQ ID NO: 125957 - DNA, 33 bp, Homo sapien
ctctagattcatagcaacataagtaggacagct

SEQ ID NO: 125958 - DNA, 33 bp, Homo sapien
ctctagattcatagcaccataagtaggacagct

SEQ ID NO: 125959 - DNA, 33 bp, Homo sapien
tacactatcacaaaaaaaagtattgtaaactct

SEQ ID NO: 125960 - DNA, 33 bp, Homo sapien
tacactatcacaaaaagaagtattgtaaactct

SEQ ID NO: 125961 - DNA, 33 bp, Homo sapien
agctgctgggatgttcacctatcaaaggaggaa

SEQ ID NO: 125962 - DNA, 33 bp, Homo sapien
agctgctgggatgttcgcctatcaaaggaggaa

SEQ ID NO: 125963 - DNA, 33 bp, Homo sapien
aaggaattttagcttacgaaagcaatcagagaa

SEQ ID NO: 125964 - DNA, 33 bp, Homo sapien
aaggaattttagcttatgaaagcaatcagagaa

SEQ ID NO: 125965 - DNA, 33 bp, Homo sapien
atggatgttttacatcaagagaagccttgacca

SEQ ID NO: 125966 - DNA, 33 bp, Homo sapien
atggatgttttacatccagagaagccttgacca

SEQ ID NO: 125967 - DNA, 33 bp, Homo sapien
tttactcctttaaaacaacacagatgtcataaa

SEQ ID NO: 125968 - DNA, 33 bp, Homo sapien
tttactcctttaaaactacacagatgtcataaa

SEQ ID NO: 125969 - DNA, 33 bp, Homo sapien
atcagttgatccccaaaaggaaagccaactctg

SEQ ID NO: 125970 - DNA, 33 bp, Homo sapien
atcagttgatccccaagaggaaagccaactctg

SEQ ID NO: 125971 - DNA, 33 bp, Homo sapien
agacccaaatcagataaggtaactaatttagaa

SEQ ID NO: 125972 - DNA, 33 bp, Homo sapien
agacccaaatcagatacggtaactaatttagaa

SEQ ID NO: 125973 - DNA, 33 bp, Homo sapien
tttatttattacacaaacatactaacagctgcc

SEQ ID NO: 125974 - DNA, 33 bp, Homo sapien
tttatttattacacaatcatactaacagctgcc

SEQ ID NO: 125975 - DNA, 33 bp, Homo sapien
atccatacagccaccaacgtgtagagacctgat

SEQ ID NO: 125976 - DNA, 33 bp, Homo sapien
atccatacagccaccagcgtgtagagacctgat

SEQ ID NO: 125977 - DNA, 33 bp, Homo sapien
ggatctgctgtaacaaactttagaaattgaaaa

SEQ ID NO: 125978 - DNA, 33 bp, Homo sapien
ggatctgctgtaacaatctttagaaattgaaaa

SEQ ID NO: 125979 - DNA, 33 bp, Homo sapien
tgtgactatcagataaagccattttttgatctt

SEQ ID NO: 125980 - DNA, 33 bp, Homo sapien
tgtgactatcagataacgccattttttgatctt

SEQ ID NO: 125981 - DNA, 33 bp, Homo sapien
tgcaactggatttccagtctcttctgatccact

SEQ ID NO: 125982 - DNA, 33 bp, Homo sapien
tgcaactggatttccattctcttctgatccact

SEQ ID NO: 125983 - DNA, 33 bp, Homo sapien
gaactactggcaccagcattgtcctctttctgg

SEQ ID NO: 125984 - DNA, 33 bp, Homo sapien
gaactactggcaccaggattgtcctctttctgg

SEQ ID NO: 125985 - DNA, 33 bp, Homo sapien
gaaaactggagcctaacaagtttacgtaaaatc

SEQ ID NO: 125986 - DNA, 33 bp, Homo sapien
gaaaactggagcctaagaagtttacgtaaaatc

SEQ ID NO: 125987 - DNA, 33 bp, Homo sapien
tgcttaaaagacctcccggaatattgctttttt

SEQ ID NO: 125988 - DNA, 33 bp, Homo sapien
tgcttaaaagacctcctggaatattgctttttt

SEQ ID NO: 125989 - DNA, 33 bp, Homo sapien
acacaatgaaataaaaatgtgctctcacaagag

SEQ ID NO: 125990 - DNA, 33 bp, Homo sapien
acacaatgaaataaaagtgtgctctcacaagag

SEQ ID NO: 125991 - DNA, 33 bp, Homo sapien
gccgggaaacctaaaactgaaatatgttcctga

SEQ ID NO: 125992 - DNA, 33 bp, Homo sapien
gccgggaaacctaaaagtgaaatatgttcctga

SEQ ID NO: 125993 - DNA, 33 bp, Homo sapien
cttccttttcatcttaaccacctcctaaagcct

SEQ ID NO: 125994 - DNA, 33 bp, Homo sapien
cttccttttcatcttacccacctcctaaagcct

SEQ ID NO: 125995 - DNA, 33 bp, Homo sapien
agcttatctaataacaatatgctatggtagcga

SEQ ID NO: 125996 - DNA, 33 bp, Homo sapien
agcttatctaataacagtatgctatggtagcga

SEQ ID NO: 125997 - DNA, 33 bp, Homo sapien
gttttggacttcaagaataagcctgttccctct

SEQ ID NO: 125998 - DNA, 33 bp, Homo sapien
gttttggacttcaagagtaagcctgttccctct

SEQ ID NO: 125999 - DNA, 33 bp, Homo sapien
gtctgataaaaggaacagtgcttgctttaaagt

SEQ ID NO: 126000 - DNA, 33 bp, Homo sapien
gtctgataaaaggaaccgtgcttgctttaaagt

SEQ ID NO: 126001 - DNA, 33 bp, Homo sapien
tttaaccattccttaccgcaagaaatcaacgca

SEQ ID NO: 126002 - DNA, 33 bp, Homo sapien
tttaaccattccttactgcaagaaatcaacgca

SEQ ID NO: 126003 - DNA, 33 bp, Homo sapien
caaaataaatgttataaatagtggcaaagagca

SEQ ID NO: 126004 - DNA, 33 bp, Homo sapien
caaaataaatgttatacatagtggcaaagagca

SEQ ID NO: 126005 - DNA, 33 bp, Homo sapien
agttacctgggccacaatagcttcatgcttggg

SEQ ID NO: 126006 - DNA, 33 bp, Homo sapien
agttacctgggccacagtagcttcatgcttggg

SEQ ID NO: 126007 - DNA, 33 bp, Homo sapien
agaaaactgcagttgcaagaggttaattgtggt

SEQ ID NO: 126008 - DNA, 33 bp, Homo sapien
agaaaactgcagttgccagaggttaattgtggt

SEQ ID NO: 126009 - DNA, 33 bp, Homo sapien
ccaacaatgctgtggacctaacaagagaagaag

SEQ ID NO: 126010 - DNA, 33 bp, Homo sapien
ccaacaatgctgtggatctaacaagagaagaag

SEQ ID NO: 126011 - DNA, 33 bp, Homo sapien
aaacatcatgccttccaagaataaatataaaac

SEQ ID NO: 126012 - DNA, 33 bp, Homo sapien
aaacatcatgccttccgagaataaatataaaac

SEQ ID NO: 126013 - DNA, 33 bp, Homo sapien
atagagttagtttacacaccccatatcacccct

SEQ ID NO: 126014 - DNA, 33 bp, Homo sapien
atagagttagtttacataccccatatcacccct

SEQ ID NO: 126015 - DNA, 33 bp, Homo sapien
atacaaggctttaggacccaccattgcaagggg

SEQ ID NO: 126016 - DNA, 33 bp, Homo sapien
atacaaggctttaggatccaccattgcaagggg

SEQ ID NO: 126017 - DNA, 33 bp, Homo sapien
ttctggagatggatgacggttatgggtgctcaa

SEQ ID NO: 126018 - DNA, 33 bp, Homo sapien
ttctggagatggatgatggttatgggtgctcaa

SEQ ID NO: 126019 - DNA, 33 bp, Homo sapien
aaattttatggagtgacattttgaaacatttga

SEQ ID NO: 126020 - DNA, 33 bp, Homo sapien
aaattttatggagtgatattttgaaacatttga

SEQ ID NO: 126021 - DNA, 33 bp, Homo sapien
tagccgtcactacatccataggtagctttagat

SEQ ID NO: 126022 - DNA, 33 bp, Homo sapien
tagccgtcactacatctataggtagctttagat

SEQ ID NO: 126023 - DNA, 33 bp, Homo sapien
cagcacatactggagaacccataaagtaacagc

SEQ ID NO: 126024 - DNA, 33 bp, Homo sapien
cagcacatactggagagcccataaagtaacagc

SEQ ID NO: 126025 - DNA, 33 bp, Homo sapien
gttatcagttaataaactcagggaggcttgttc

SEQ ID NO: 126026 - DNA, 33 bp, Homo sapien
gttatcagttaataaattcagggaggcttgttc

SEQ ID NO: 126027 - DNA, 33 bp, Homo sapien
tttgttccaggggaaactcgtaaagtcactaag

SEQ ID NO: 126028 - DNA, 33 bp, Homo sapien
tttgttccaggggaaagtcgtaaagtcactaag

SEQ ID NO: 126029 - DNA, 33 bp, Homo sapien
cagaatttaaacgtgaccaaagtttgaaaatag

SEQ ID NO: 126030 - DNA, 33 bp, Homo sapien
cagaatttaaacgtgatcaaagtttgaaaatag

SEQ ID NO: 126031 - DNA, 33 bp, Homo sapien
tgcacacacatcaatactataccgtttagtgga

SEQ ID NO: 126032 - DNA, 33 bp, Homo sapien
tgcacacacatcaatagtataccgtttagtgga

SEQ ID NO: 126033 - DNA, 33 bp, Homo sapien
aactgccctctagccacgagagttactacaatt

SEQ ID NO: 126034 - DNA, 33 bp, Homo sapien
aactgccctctagccatgagagttactacaatt

SEQ ID NO: 126035 - DNA, 33 bp, Homo sapien
agcaacatatcttggacagatttctagcagttc

SEQ ID NO: 126036 - DNA, 33 bp, Homo sapien
agcaacatatcttggatagatttctagcagttc

SEQ ID NO: 126037 - DNA, 33 bp, Homo sapien
tggataatgggtacataactaaagccaggccaa

SEQ ID NO: 126038 - DNA, 33 bp, Homo sapien
tggataatgggtacatgactaaagccaggccaa

SEQ ID NO: 126039 - DNA, 33 bp, Homo sapien
aacggacaagtgattcacaagcgtcacagatcc

SEQ ID NO: 126040 - DNA, 33 bp, Homo sapien
aacggacaagtgattcgcaagcgtcacagatcc

SEQ ID NO: 126041 - DNA, 33 bp, Homo sapien
aataaaaggcatcaaacttaaaaataccatctt

SEQ ID NO: 126042 - DNA, 33 bp, Homo sapien
aataaaaggcatcaaatttaaaaataccatctt

SEQ ID NO: 126043 - DNA, 33 bp, Homo sapien
aagatctaaattctcaactctgcctaaccttgt

SEQ ID NO: 126044 - DNA, 33 bp, Homo sapien
aagatctaaattctcatctctgcctaaccttgt

SEQ ID NO: 126045 - DNA, 33 bp, Homo sapien
taatccattatgccaaactaagccttaaatcag

SEQ ID NO: 126046 - DNA, 33 bp, Homo sapien
taatccattatgccaagctaagccttaaatcag

SEQ ID NO: 126047 - DNA, 33 bp, Homo sapien
ggcattcaagagtgcactgaggttgtgtttact

SEQ ID NO: 126048 - DNA, 33 bp, Homo sapien
ggcattcaagagtgcattgaggttgtgtttact

SEQ ID NO: 126049 - DNA, 33 bp, Homo sapien
tgtttgtttcttgcaacaaattagttatcctgg

SEQ ID NO: 126050 - DNA, 33 bp, Homo sapien
tgtttgtttcttgcaataaattagttatcctgg

SEQ ID NO: 126051 - DNA, 33 bp, Homo sapien
attgcacaagtggttcaagcagtcaggataagt

SEQ ID NO: 126052 - DNA, 33 bp, Homo sapien
attgcacaagtggttccagcagtcaggataagt

SEQ ID NO: 126053 - DNA, 33 bp, Homo sapien
aatgtcctatgttacaatattgaagacataaat

SEQ ID NO: 126054 - DNA, 33 bp, Homo sapien
aatgtcctatgttacagtattgaagacataaat

SEQ ID NO: 126055 - DNA, 33 bp, Homo sapien
tcttcttgttctgaaacgccataaagagccagc

SEQ ID NO: 126056 - DNA, 33 bp, Homo sapien
tcttcttgttctgaaatgccataaagagccagc

SEQ ID NO: 126057 - DNA, 33 bp, Homo sapien
ctgatcataatttcccaaatctctcgctccatt

SEQ ID NO: 126058 - DNA, 33 bp, Homo sapien
ctgatcataatttcccgaatctctcgctccatt

SEQ ID NO: 126059 - DNA, 33 bp, Homo sapien
aataaattcagtgttacacttgcacatcttcat

SEQ ID NO: 126060 - DNA, 33 bp, Homo sapien
aataaattcagtgttatacttgcacatcttcat

SEQ ID NO: 126061 - DNA, 33 bp, Homo sapien
ttgagggcaagggctacatcttcatcttcaatc

SEQ ID NO: 126062 - DNA, 33 bp, Homo sapien
ttgagggcaagggctatatcttcatcttcaatc

SEQ ID NO: 126063 - DNA, 33 bp, Homo sapien
gagctgttgacaaaaaaacaaatgagagtcctt

SEQ ID NO: 126064 - DNA, 33 bp, Homo sapien
gagctgttgacaaaaagacaaatgagagtcctt

SEQ ID NO: 126065 - DNA, 33 bp, Homo sapien
aaggtctcactgggataatcagagactttgttg

SEQ ID NO: 126066 - DNA, 33 bp, Homo sapien
aaggtctcactgggatcatcagagactttgttg

SEQ ID NO: 126067 - DNA, 33 bp, Homo sapien
agaacacataaataagaagcaaatttctccaca

SEQ ID NO: 126068 - DNA, 33 bp, Homo sapien
agaacacataaataaggagcaaatttctccaca

SEQ ID NO: 126069 - DNA, 33 bp, Homo sapien
ttaacagctttgttacaagagtagaaggagtaa

SEQ ID NO: 126070 - DNA, 33 bp, Homo sapien
ttaacagctttgttacgagagtagaaggagtaa

SEQ ID NO: 126071 - DNA, 33 bp, Homo sapien
taaaacagtccatgtacccagggagcttgctaa

SEQ ID NO: 126072 - DNA, 33 bp, Homo sapien
taaaacagtccatgtatccagggagcttgctaa

SEQ ID NO: 126073 - DNA, 33 bp, Homo sapien
taatggcagtgctcacaatataggctgttatga

SEQ ID NO: 126074 - DNA, 33 bp, Homo sapien
taatggcagtgctcacgatataggctgttatga

SEQ ID NO: 126075 - DNA, 33 bp, Homo sapien
gcccaggttcctatgacgagggaagcagcagca

SEQ ID NO: 126076 - DNA, 33 bp, Homo sapien
gcccaggttcctatgatgagggaagcagcagca

SEQ ID NO: 126077 - DNA, 33 bp, Homo sapien
gcacgataggcatgaaaatggaagggatctgcc

SEQ ID NO: 126078 - DNA, 33 bp, Homo sapien
gcacgataggcatgaagatggaagggatctgcc

SEQ ID NO: 126079 - DNA, 33 bp, Homo sapien
acatatcatgcaagacaaactctcatcttgagt

SEQ ID NO: 126080 - DNA, 33 bp, Homo sapien
acatatcatgcaagaccaactctcatcttgagt

SEQ ID NO: 126081 - DNA, 33 bp, Homo sapien
agaaaagactcatttacgaaaggaaaagaagga

SEQ ID NO: 126082 - DNA, 33 bp, Homo sapien
agaaaagactcatttatgaaaggaaaagaagga

SEQ ID NO: 126083 - DNA, 33 bp, Homo sapien
tgcttgaaaaaaaaagcccacactattatcgct

SEQ ID NO: 126084 - DNA, 33 bp, Homo sapien
tgcttgaaaaaaaaaggccacactattatcgct

SEQ ID NO: 126085 - DNA, 33 bp, Homo sapien
aataacagtggtatgtaacagataacactgatc

SEQ ID NO: 126086 - DNA, 33 bp, Homo sapien
aataacagtggtatgtgacagataacactgatc

SEQ ID NO: 126087 - DNA, 33 bp, Homo sapien
ttagcctagtgtcaagcacacagaagatgatca

SEQ ID NO: 126088 - DNA, 33 bp, Homo sapien
ttagcctagtgtcaagtacacagaagatgatca

SEQ ID NO: 126089 - DNA, 33 bp, Homo sapien
aatatttgaaaatgacaaaatgtatgaaattat

SEQ ID NO: 126090 - DNA, 33 bp, Homo sapien
aatatttgaaaatgacgaaatgtatgaaattat

SEQ ID NO: 126091 - DNA, 33 bp, Homo sapien
aatgagttatctgtggaatttattctctgaaat

SEQ ID NO: 126092 - DNA, 33 bp, Homo sapien
aatgagttatctgtgggatttattctctgaaat

SEQ ID NO: 126093 - DNA, 33 bp, Homo sapien
atgagaatatttgacactattggtgctaatgtt

SEQ ID NO: 126094 - DNA, 33 bp, Homo sapien
atgagaatatttgacattattggtgctaatgtt

SEQ ID NO: 126095 - DNA, 33 bp, Homo sapien
aagttcaatgttatgacgctaataaaaacctag

SEQ ID NO: 126096 - DNA, 33 bp, Homo sapien
aagttcaatgttatgatgctaataaaaacctag

SEQ ID NO: 126097 - DNA, 33 bp, Homo sapien
atgagtccctacagctaaagtttgggtcagggg

SEQ ID NO: 126098 - DNA, 33 bp, Homo sapien
atgagtccctacagctgaagtttgggtcagggg

SEQ ID NO: 126099 - DNA, 33 bp, Homo sapien
ctccttatcacctctaaataccatctctcagat

SEQ ID NO: 126100 - DNA, 33 bp, Homo sapien
ctccttatcacctctagataccatctctcagat

SEQ ID NO: 126101 - DNA, 33 bp, Homo sapien
acaaactccaaagtagaagcagtagaagttttc

SEQ ID NO: 126102 - DNA, 33 bp, Homo sapien
acaaactccaaagtaggagcagtagaagttttc

SEQ ID NO: 126103 - DNA, 33 bp, Homo sapien
atatgacctttagaaaagatgtgccccatcagt

SEQ ID NO: 126104 - DNA, 33 bp, Homo sapien
atatgacctttagaaacgatgtgccccatcagt

SEQ ID NO: 126105 - DNA, 33 bp, Homo sapien
gaaccctcaggaatcacgaagaaaatcttaggt

SEQ ID NO: 126106 - DNA, 33 bp, Homo sapien
gaaccctcaggaatcatgaagaaaatcttaggt

SEQ ID NO: 126107 - DNA, 33 bp, Homo sapien
gaggaaggatcacactaagctggagtggctaca

SEQ ID NO: 126108 - DNA, 33 bp, Homo sapien
gaggaaggatcacactgagctggagtggctaca

SEQ ID NO: 126109 - DNA, 33 bp, Homo sapien
attcacttaatcttaaaatgcttttcttgtcct

SEQ ID NO: 126110 - DNA, 33 bp, Homo sapien
attcacttaatcttaagatgcttttcttgtcct

SEQ ID NO: 126111 - DNA, 33 bp, Homo sapien
agaaatgctctgaaacacaataacattattatg

SEQ ID NO: 126112 - DNA, 33 bp, Homo sapien
agaaatgctctgaaacgcaataacattattatg

SEQ ID NO: 126113 - DNA, 33 bp, Homo sapien
aacactagggccataactagtattcataaatgt

SEQ ID NO: 126114 - DNA, 33 bp, Homo sapien
aacactagggccataattagtattcataaatgt

SEQ ID NO: 126115 - DNA, 33 bp, Homo sapien
tactattgctcatcaggcaggctagctgagagg

SEQ ID NO: 126116 - DNA, 33 bp, Homo sapien
tactattgctcatcagtcaggctagctgagagg

SEQ ID NO: 126117 - DNA, 33 bp, Homo sapien
caacctaaggccataactagtactcataaatgt

SEQ ID NO: 126118 - DNA, 33 bp, Homo sapien
caacctaaggccataattagtactcataaatgt

SEQ ID NO: 126119 - DNA, 33 bp, Homo sapien
tcttttccactcataaaatcctatgctacattt

SEQ ID NO: 126120 - DNA, 33 bp, Homo sapien
tcttttccactcataatatcctatgctacattt

SEQ ID NO: 126121 - DNA, 33 bp, Homo sapien
tttatttggttttatacatagtgaattaccaca

SEQ ID NO: 126122 - DNA, 33 bp, Homo sapien
tttatttggttttatagatagtgaattaccaca

SEQ ID NO: 126123 - DNA, 33 bp, Homo sapien
cacagctttgaaccaacgaattttttaaatgag

SEQ ID NO: 126124 - DNA, 33 bp, Homo sapien
cacagctttgaaccaatgaattttttaaatgag

SEQ ID NO: 126125 - DNA, 33 bp, Homo sapien
acttaaagataattggaaggcactaattctaat

SEQ ID NO: 126126 - DNA, 33 bp, Homo sapien
acttaaagataattggcaggcactaattctaat

SEQ ID NO: 126127 - DNA, 33 bp, Homo sapien
acagtcgacttgcccaatgcttcaaagctattc

SEQ ID NO: 126128 - DNA, 33 bp, Homo sapien
acagtcgacttgcccagtgcttcaaagctattc

SEQ ID NO: 126129 - DNA, 33 bp, Homo sapien
gcataaataccagcagacccagtacaatggggg

SEQ ID NO: 126130 - DNA, 33 bp, Homo sapien
gcataaataccagcaggcccagtacaatggggg

SEQ ID NO: 126131 - DNA, 33 bp, Homo sapien
aaagcctaatgaacctaaaggaaagatcatact

SEQ ID NO: 126132 - DNA, 33 bp, Homo sapien
aaagcctaatgaacctgaaggaaagatcatact

SEQ ID NO: 126133 - DNA, 33 bp, Homo sapien
atgcttttctctcccacagttttgtgcttaaga

SEQ ID NO: 126134 - DNA, 33 bp, Homo sapien
atgcttttctctcccatagttttgtgcttaaga

SEQ ID NO: 126135 - DNA, 33 bp, Homo sapien
gaaacagaaggtgaataaagttagagatttgat

SEQ ID NO: 126136 - DNA, 33 bp, Homo sapien
gaaacagaaggtgaatgaagttagagatttgat

SEQ ID NO: 126137 - DNA, 33 bp, Homo sapien
tttatccttcaccaataaaaaggttaagaatta

SEQ ID NO: 126138 - DNA, 33 bp, Homo sapien
tttatccttcaccaattaaaaggttaagaatta

SEQ ID NO: 126139 - DNA, 33 bp, Homo sapien
ccagtgaagagtgacagcaaaaatcatagctga

SEQ ID NO: 126140 - DNA, 33 bp, Homo sapien
ccagtgaagagtgacatcaaaaatcatagctga

SEQ ID NO: 126141 - DNA, 33 bp, Homo sapien
ttaccttttctgctaccattctgatcaaagctg

SEQ ID NO: 126142 - DNA, 33 bp, Homo sapien
ttaccttttctgctacgattctgatcaaagctg

SEQ ID NO: 126143 - DNA, 33 bp, Homo sapien
gtaccaagcaaaaaacagacaatttgatctttg

SEQ ID NO: 126144 - DNA, 33 bp, Homo sapien
gtaccaagcaaaaaacggacaatttgatctttg

SEQ ID NO: 126145 - DNA, 33 bp, Homo sapien
gctcctagaactcttgaaacactttcatgcctt

SEQ ID NO: 126146 - DNA, 33 bp, Homo sapien
gctcctagaactcttggaacactttcatgcctt

SEQ ID NO: 126147 - DNA, 33 bp, Homo sapien
gtgacggctactgggcacgagtaggaaaaaagg

SEQ ID NO: 126148 - DNA, 33 bp, Homo sapien
gtgacggctactgggcccgagtaggaaaaaagg

SEQ ID NO: 126149 - DNA, 33 bp, Homo sapien
atgtaataattgaaaagtccatcgtttcttttc

SEQ ID NO: 126150 - DNA, 33 bp, Homo sapien
atgtaataattgaaaattccatcgtttcttttc

SEQ ID NO: 126151 - DNA, 33 bp, Homo sapien
gccaaagcaataattgacaatgtggtagcatta

SEQ ID NO: 126152 - DNA, 33 bp, Homo sapien
gccaaagcaataattggcaatgtggtagcatta

SEQ ID NO: 126153 - DNA, 33 bp, Homo sapien
cacaccgcagcaagagaagtctatacgtgttcc

SEQ ID NO: 126154 - DNA, 33 bp, Homo sapien
cacaccgcagcaagaggagtctatacgtgttcc

SEQ ID NO: 126155 - DNA, 33 bp, Homo sapien
aggggaacatttttcaagagggcttccttttac

SEQ ID NO: 126156 - DNA, 33 bp, Homo sapien
aggggaacatttttcaggagggcttccttttac

SEQ ID NO: 126157 - DNA, 33 bp, Homo sapien
acccagtgtttatatacacgtcatttttctttt

SEQ ID NO: 126158 - DNA, 33 bp, Homo sapien
acccagtgtttatatagacgtcatttttctttt

SEQ ID NO: 126159 - DNA, 33 bp, Homo sapien
agtaccaaccaatctaataactagagataccaa

SEQ ID NO: 126160 - DNA, 33 bp, Homo sapien
agtaccaaccaatctagtaactagagataccaa

SEQ ID NO: 126161 - DNA, 33 bp, Homo sapien
cattatatttcttttccacacattatctattcc

SEQ ID NO: 126162 - DNA, 33 bp, Homo sapien
cattatatttcttttctacacattatctattcc

SEQ ID NO: 126163 - DNA, 33 bp, Homo sapien
caaagataaattctacaaagtgaaatttggtgt

SEQ ID NO: 126164 - DNA, 33 bp, Homo sapien
caaagataaattctacgaagtgaaatttggtgt

SEQ ID NO: 126165 - DNA, 33 bp, Homo sapien
gtgagctatcccaatacgcttttttggtttcat

SEQ ID NO: 126166 - DNA, 33 bp, Homo sapien
gtgagctatcccaatatgcttttttggtttcat

SEQ ID NO: 126167 - DNA, 33 bp, Homo sapien
ccttgatctcctaccaaactgttgaactcacat

SEQ ID NO: 126168 - DNA, 33 bp, Homo sapien
ccttgatctcctaccacactgttgaactcacat

SEQ ID NO: 126169 - DNA, 33 bp, Homo sapien
taaagcatttatgttaagcattattctacacat

SEQ ID NO: 126170 - DNA, 33 bp, Homo sapien
taaagcatttatgttaggcattattctacacat

SEQ ID NO: 126171 - DNA, 33 bp, Homo sapien
cattggctgaattgaaatgaaaaccaaaagtca

SEQ ID NO: 126172 - DNA, 33 bp, Homo sapien
cattggctgaattgaactgaaaaccaaaagtca

SEQ ID NO: 126173 - DNA, 33 bp, Homo sapien
attaaaggagaaaaatgatcgccccccatctct

SEQ ID NO: 126174 - DNA, 33 bp, Homo sapien
attaaaggagaaaaattatcgccccccatctct

SEQ ID NO: 126175 - DNA, 33 bp, Homo sapien
caaacctggatttgaaagattattgaagctgaa

SEQ ID NO: 126176 - DNA, 33 bp, Homo sapien
caaacctggatttgaatgattattgaagctgaa

SEQ ID NO: 126177 - DNA, 33 bp, Homo sapien
tgctcctgtaccaacaactgctgaaggcggagt

SEQ ID NO: 126178 - DNA, 33 bp, Homo sapien
tgctcctgtaccaacagctgctgaaggcggagt

SEQ ID NO: 126179 - DNA, 33 bp, Homo sapien
aggtgtatgcataggaagacaagcagtggctac

SEQ ID NO: 126180 - DNA, 33 bp, Homo sapien
aggtgtatgcataggaggacaagcagtggctac

SEQ ID NO: 126181 - DNA, 33 bp, Homo sapien; identical to SEQ ID NO: 126179

SEQ ID NO: 126182 - DNA, 33 bp, Homo sapien; identical to SEQ ID NO: 126180

SEQ ID NO: 126183 - DNA, 33 bp, Homo sapien
ccaggtttgcctggcaccaaattttatctctta

SEQ ID NO: 126184 - DNA, 33 bp, Homo sapien
ccaggtttgcctggcatcaaattttatctctta

SEQ ID NO: 126185 - DNA, 33 bp, Homo sapien
tggagctgcaaaacacaggcaacaagaatttca

SEQ ID NO: 126186 - DNA, 33 bp, Homo sapien
tggagctgcaaaacacgggcaacaagaatttca

SEQ ID NO: 126187 - DNA, 33 bp, Homo sapien
tgtcaccgaaatcaccagaatactgggccttca

SEQ ID NO: 126188 - DNA, 33 bp, Homo sapien
tgtcaccgaaatcaccggaatactgggccttca

SEQ ID NO: 126189 - DNA, 33 bp, Homo sapien
ccttcacaaatactaacataaatctccagtaaa

SEQ ID NO: 126190 - DNA, 33 bp, Homo sapien
ccttcacaaatactaatataaatctccagtaaa

SEQ ID NO: 126191 - DNA, 33 bp, Homo sapien
ttatgcgtgtcattcccctgtgcaaatatttcc

SEQ ID NO: 126192 - DNA, 33 bp, Homo sapien
ttatgcgtgtcattcctctgtgcaaatatttcc

SEQ ID NO: 126193 - DNA, 33 bp, Homo sapien
gtgcacaactcttgtccaatccccaacatctat

SEQ ID NO: 126194 - DNA, 33 bp, Homo sapien
gtgcacaactcttgtctaatccccaacatctat

SEQ ID NO: 126195 - DNA, 33 bp, Homo sapien
ctgtaagatatgacaaagaaatgatagacaacg

SEQ ID NO: 126196 - DNA, 33 bp, Homo sapien
ctgtaagatatgacaatgaaatgatagacaacg

SEQ ID NO: 126197 - DNA, 33 bp, Homo sapien
ctgacttaagtctttacgctttatactcaattc

SEQ ID NO: 126198 - DNA, 33 bp, Homo sapien
ctgacttaagtctttatgctttatactcaattc

SEQ ID NO: 126199 - DNA, 33 bp, Homo sapien
ttataagctatccaaacgtactgaataaaaatc

SEQ ID NO: 126200 - DNA, 33 bp, Homo sapien
ttataagctatccaaatgtactgaataaaaatc

SEQ ID NO: 126201 - DNA, 33 bp, Homo sapien
ttttaaaatgtgatgaatattctacaggactct

SEQ ID NO: 126202 - DNA, 33 bp, Homo sapien
ttttaaaatgtgatgagtattctacaggactct

SEQ ID NO: 126203 - DNA, 33 bp, Homo sapien
atacataattctatgacggggaaagtggtggtg

SEQ ID NO: 126204 - DNA, 33 bp, Homo sapien
atacataattctatgatggggaaagtggtggtg

SEQ ID NO: 126205 - DNA, 33 bp, Homo sapien
gcactgattccttctcaactgttttggctgata

SEQ ID NO: 126206 - DNA, 33 bp, Homo sapien
gcactgattccttctccactgttttggctgata

SEQ ID NO: 126207 - DNA, 33 bp, Homo sapien
ggaattatttcaataaaattggcaccagctctt

SEQ ID NO: 126208 - DNA, 33 bp, Homo sapien
ggaattatttcaataagattggcaccagctctt

SEQ ID NO: 126209 - DNA, 33 bp, Homo sapien
tgtttatgtgatgcctcaaacatattgatttgc

SEQ ID NO: 126210 - DNA, 33 bp, Homo sapien
tgtttatgtgatgcctgaaacatattgatttgc

SEQ ID NO: 126211 - DNA, 33 bp, Homo sapien
tcatgaaatttttgcacctttatcatgaaattt

SEQ ID NO: 126212 - DNA, 33 bp, Homo sapien
tcatgaaatttttgcatctttatcatgaaattt

SEQ ID NO: 126213 - DNA, 33 bp, Homo sapien
ttgctgttggaacttccatcttagtaatgttgt

SEQ ID NO: 126214 - DNA, 33 bp, Homo sapien
ttgctgttggaacttcgatcttagtaatgttgt

SEQ ID NO: 126215 - DNA, 33 bp, Homo sapien
ctgatcgtgtcactccagaacatggacgttatc

SEQ ID NO: 126216 - DNA, 33 bp, Homo sapien
ctgatcgtgtcactccggaacatggacgttatc

SEQ ID NO: 126217 - DNA, 33 bp, Homo sapien
atggacgttatcaaggacagctgccggcactct

SEQ ID NO: 126218 - DNA, 33 bp, Homo sapien
atggacgttatcaaggtcagctgccggcactct

SEQ ID NO: 126219 - DNA, 33 bp, Homo sapien
tgtagagcatcctggaactttttgcttactttt

SEQ ID NO: 126220 - DNA, 33 bp, Homo sapien
tgtagagcatcctggatctttttgcttactttt

SEQ ID NO: 126221 - DNA, 33 bp, Homo sapien
aggagctatatgacttcaagcgtcaaagataat

SEQ ID NO: 126222 - DNA, 33 bp, Homo sapien
aggagctatatgactttaagcgtcaaagataat

SEQ ID NO: 126223 - DNA, 33 bp, Homo sapien
cactgattctcccacaagcaaagtatggcattt

SEQ ID NO: 126224 - DNA, 33 bp, Homo sapien
cactgattctcccacaggcaaagtatggcattt

SEQ ID NO: 126225 - DNA, 33 bp, Homo sapien
aattttgttagaaacactgcgtaagtatttatt

SEQ ID NO: 126226 - DNA, 33 bp, Homo sapien
aattttgttagaaacattgcgtaagtatttatt

SEQ ID NO: 126227 - DNA, 33 bp, Homo sapien
tgacttttgttttgaaataaaacctgcaaaata

SEQ ID NO: 126228 - DNA, 33 bp, Homo sapien
tgacttttgttttgaagtaaaacctgcaaaata

SEQ ID NO: 126229 - DNA, 33 bp, Homo sapien
aaatctttacttttgaacaagccaactttgaac

SEQ ID NO: 126230 - DNA, 33 bp, Homo sapien
aaatctttacttttgagcaagccaactttgaac

SEQ ID NO: 126231 - DNA, 33 bp, Homo sapien
atgctgtatgctaggacgaaaatagggctccta

SEQ ID NO: 126232 - DNA, 33 bp, Homo sapien
atgctgtatgctaggatgaaaatagggctccta

SEQ ID NO: 126233 - DNA, 33 bp, Homo sapien
atgactggggaaatgacgctgataatatgaaac

SEQ ID NO: 126234 - DNA, 33 bp, Homo sapien
atgactggggaaatgatgctgataatatgaaac

SEQ ID NO: 126235 - DNA, 33 bp, Homo sapien
aatgttatgtgaagagaagaaaatgaaactggt

SEQ ID NO: 126236 - DNA, 33 bp, Homo sapien
aatgttatgtgaagaggagaaaatgaaactggt

SEQ ID NO: 126237 - DNA, 33 bp, Homo sapien
attttctgtgctaataacttttgtaatctgtac

SEQ ID NO: 126238 - DNA, 33 bp, Homo sapien
attttctgtgctaataccttttgtaatctgtac

SEQ ID NO: 126239 - DNA, 33 bp, Homo sapien
tggcatttagagattgcaaaacagtgacgtggt

SEQ ID NO: 126240 - DNA, 33 bp, Homo sapien
tggcatttagagattgtaaaacagtgacgtggt

SEQ ID NO: 126241 - DNA, 33 bp, Homo sapien
aattgcaaaagagaaactggaatggaacatagt

SEQ ID NO: 126242 - DNA, 33 bp, Homo sapien
aattgcaaaagagaaattggaatggaacatagt

SEQ ID NO: 126243 - DNA, 33 bp, Homo sapien
aatgactcagagtaaacagaaaatcaaaattag

SEQ ID NO: 126244 - DNA, 33 bp, Homo sapien
aatgactcagagtaaatagaaaatcaaaattag

SEQ ID NO: 126245 - DNA, 33 bp, Homo sapien
tcaggctttgcataaacggactatgatctcctg

SEQ ID NO: 126246 - DNA, 33 bp, Homo sapien
tcaggctttgcataaatggactatgatctcctg

SEQ ID NO: 126247 - DNA, 33 bp, Homo sapien
ctgcgagggtggtcataaggttccacagagagg

SEQ ID NO: 126248 - DNA, 33 bp, Homo sapien
ctgcgagggtggtcatcaggttccacagagagg

SEQ ID NO: 126249 - DNA, 33 bp, Homo sapien
gggtgaggtgagggaagatcatcaactggccct

SEQ ID NO: 126250 - DNA, 33 bp, Homo sapien
gggtgaggtgagggaatatcatcaactggccct

SEQ ID NO: 126251 - DNA, 33 bp, Homo sapien
ctataaccccaggcaaatacctctccatcagat

SEQ ID NO: 126252 - DNA, 33 bp, Homo sapien
ctataaccccaggcaagtacctctccatcagat

SEQ ID NO: 126253 - DNA, 33 bp, Homo sapien
tcagtttattgcagggaaagcttatcaacattg

SEQ ID NO: 126254 - DNA, 33 bp, Homo sapien
tcagtttattgcagggcaagcttatcaacattg

SEQ ID NO: 126255 - DNA, 33 bp, Homo sapien
tctatctcaagcctacaaactgatattcatcct

SEQ ID NO: 126256 - DNA, 33 bp, Homo sapien
tctatctcaagcctactaactgatattcatcct

SEQ ID NO: 126257 - DNA, 33 bp, Homo sapien
gcctgggaatcccagacgaagccttaaagccac

SEQ ID NO: 126258 - DNA, 33 bp, Homo sapien
gcctgggaatcccagaggaagccttaaagccac

SEQ ID NO: 126259 - DNA, 33 bp, Homo sapien
aagttgtttgcatataagcttgccattgtgagt

SEQ ID NO: 126260 - DNA, 33 bp, Homo sapien
aagttgtttgcatatacgcttgccattgtgagt

SEQ ID NO: 126261 - DNA, 33 bp, Homo sapien
agctacaaattttccaaagaatgtctacatgta

SEQ ID NO: 126262 - DNA, 33 bp, Homo sapien
agctacaaattttccagagaatgtctacatgta

SEQ ID NO: 126263 - DNA, 33 bp, Homo sapien
ggccaccctattcaaaattgcagctctttgcta

SEQ ID NO: 126264 - DNA, 33 bp, Homo sapien
ggccaccctattcaaagttgcagctctttgcta

SEQ ID NO: 126265 - DNA, 33 bp, Homo sapien
tatcacgtagcaataactatcttcagtgaatat

SEQ ID NO: 126266 - DNA, 33 bp, Homo sapien
tatcacgtagcaataattatcttcagtgaatat

SEQ ID NO: 126267 - DNA, 33 bp, Homo sapien
atgaaggcagaattacagagagcagagacctag

SEQ ID NO: 126268 - DNA, 33 bp, Homo sapien
atgaaggcagaattacggagagcagagacctag

SEQ ID NO: 126269 - DNA, 33 bp, Homo sapien
gcttttatttgtaaaccgaaatctctagtggta

SEQ ID NO: 126270 - DNA, 33 bp, Homo sapien
gcttttatttgtaaactgaaatctctagtggta

SEQ ID NO: 126271 - DNA, 33 bp, Homo sapien
ctggatattgcacggagattaaaattttcccag

SEQ ID NO: 126272 - DNA, 33 bp, Homo sapien
ctggatattgcacggatattaaaattttcccag

SEQ ID NO: 126273 - DNA, 33 bp, Homo sapien
tatcctattactattaagactgattgcctttta

SEQ ID NO: 126274 - DNA, 33 bp, Homo sapien
tatcctattactattaggactgattgcctttta

SEQ ID NO: 126275 - DNA, 33 bp, Homo sapien
cagagggataagagacgggtttttcatttcaca

SEQ ID NO: 126276 - DNA, 33 bp, Homo sapien
cagagggataagagactggtttttcatttcaca

SEQ ID NO: 126277 - DNA, 33 bp, Homo sapien
tgaaaacaacaccttacgctcataaacaggaag

SEQ ID NO: 126278 - DNA, 33 bp, Homo sapien
tgaaaacaacaccttatgctcataaacaggaag

SEQ ID NO: 126279 - DNA, 33 bp, Homo sapien
tcctttacactggaccaagttctctgttctgct

SEQ ID NO: 126280 - DNA, 33 bp, Homo sapien
tcctttacactggaccgagttctctgttctgct

SEQ ID NO: 126281 - DNA, 33 bp, Homo sapien
tggataatcgtacacacggtagatgattaaggg

SEQ ID NO: 126282 - DNA, 33 bp, Homo sapien
tggataatcgtacacatggtagatgattaaggg

SEQ ID NO: 126283 - DNA, 33 bp, Homo sapien
tagtttccacttatgcaaggcactgtacctaaa

SEQ ID NO: 126284 - DNA, 33 bp, Homo sapien
tagtttccacttatgcgaggcactgtacctaaa

SEQ ID NO: 126285 - DNA, 33 bp, Homo sapien
tccctcagtttcctaaagagcgcacctcttaaa

SEQ ID NO: 126286 - DNA, 33 bp, Homo sapien
tccctcagtttcctaacgagcgcacctcttaaa

SEQ ID NO: 126287 - DNA, 33 bp, Homo sapien
gaaaattgatcattaccggacttttttatttat

SEQ ID NO: 126288 - DNA, 33 bp, Homo sapien
gaaaattgatcattactggacttttttatttat

SEQ ID NO: 126289 - DNA, 33 bp, Homo sapien
tcacaaggctctttaccggaatcattttgctcc

SEQ ID NO: 126290 - DNA, 33 bp, Homo sapien
tcacaaggctctttactggaatcattttgctcc

SEQ ID NO: 126291 - DNA, 33 bp, Homo sapien
ttcctgtaagcaagaactggcaagtaacaattc

SEQ ID NO: 126292 - DNA, 33 bp, Homo sapien
ttcctgtaagcaagaattggcaagtaacaattc

SEQ ID NO: 126293 - DNA, 33 bp, Homo sapien
gtactttagcgatatccatgagacatctaggtg

SEQ ID NO: 126294 - DNA, 33 bp, Homo sapien
gtactttagcgatatcgatgagacatctaggtg

SEQ ID NO: 126295 - DNA, 33 bp, Homo sapien
agaacagtggcagaacaccagagtggttaagac

SEQ ID NO: 126296 - DNA, 33 bp, Homo sapien
agaacagtggcagaacgccagagtggttaagac

SEQ ID NO: 126297 - DNA, 33 bp, Homo sapien
ctctagattggggacacagggttatcatttttc

SEQ ID NO: 126298 - DNA, 33 bp, Homo sapien
ctctagattggggacatagggttatcatttttc

SEQ ID NO: 126299 - DNA, 33 bp, Homo sapien
aagttattcttaggcacattacacaatgatgct

SEQ ID NO: 126300 - DNA, 33 bp, Homo sapien
aagttattcttaggcatattacacaatgatgct

SEQ ID NO: 126301 - DNA, 33 bp, Homo sapien
tgcttcacacaaagtacatactcaatacatatt

SEQ ID NO: 126302 - DNA, 33 bp, Homo sapien
tgcttcacacaaagtagatactcaatacatatt

SEQ ID NO: 126303 - DNA, 33 bp, Homo sapien
caaatctaaggaagcccaattcaaaattactat

SEQ ID NO: 126304 - DNA, 33 bp, Homo sapien
caaatctaaggaagcctaattcaaaattactat

SEQ ID NO: 126305 - DNA, 33 bp, Homo sapien
gacctcctctgtcaggaacacctagtttaaggc

SEQ ID NO: 126306 - DNA, 33 bp, Homo sapien
gacctcctctgtcaggtacacctagtttaaggc

SEQ ID NO: 126307 - DNA, 33 bp, Homo sapien
agaagaacattttggaccaagagggtacagggt

SEQ ID NO: 126308 - DNA, 33 bp, Homo sapien
agaagaacattttggatcaagagggtacagggt

SEQ ID NO: 126309 - DNA, 33 bp, Homo sapien
ccagacattgttctaaacactttgcatttacag

SEQ ID NO: 126310 - DNA, 33 bp, Homo sapien
ccagacattgttctaaccactttgcatttacag

SEQ ID NO: 126311 - DNA, 33 bp, Homo sapien
gagaagcagtggatgacaagtacttcaggatgg

SEQ ID NO: 126312 - DNA, 33 bp, Homo sapien
gagaagcagtggatgagaagtacttcaggatgg

SEQ ID NO: 126313 - DNA, 33 bp, Homo sapien
tttaatataaattctaaatttttgtgctatatc

SEQ ID NO: 126314 - DNA, 33 bp, Homo sapien
tttaatataaattctacatttttgtgctatatc

SEQ ID NO: 126315 - DNA, 33 bp, Homo sapien
atcacctcttttgtcacgggattcatatagcta

SEQ ID NO: 126316 - DNA, 33 bp, Homo sapien
atcacctcttttgtcatgggattcatatagcta

SEQ ID NO: 126317 - DNA, 33 bp, Homo sapien
tgactacaagggagaccgagaaagtgactatct

SEQ ID NO: 126318 - DNA, 33 bp, Homo sapien
tgactacaagggagactgagaaagtgactatct

SEQ ID NO: 126319 - DNA, 33 bp, Homo sapien
tctgtagaaagctataaaagaagtcaaggtaag

SEQ ID NO: 126320 - DNA, 33 bp, Homo sapien
tctgtagaaagctatagaagaagtcaaggtaag

SEQ ID NO: 126321 - DNA, 33 bp, Homo sapien
caaaacagccatgtcaaagtatcatgtttccta

SEQ ID NO: 126322 - DNA, 33 bp, Homo sapien
caaaacagccatgtcagagtatcatgtttccta

SEQ ID NO: 126323 - DNA, 33 bp, Homo sapien
gatcaaagtgacttgaactgtttggaaagtacc

SEQ ID NO: 126324 - DNA, 33 bp, Homo sapien
gatcaaagtgacttgatctgtttggaaagtacc

SEQ ID NO: 126325 - DNA, 33 bp, Homo sapien
gagattcccacatgggacaccactgtaggctat

SEQ ID NO: 126326 - DNA, 33 bp, Homo sapien
gagattcccacatgggtcaccactgtaggctat

SEQ ID NO: 126327 - DNA, 33 bp, Homo sapien
gagcaaacaaccttgacgttgattttccagtat

SEQ ID NO: 126328 - DNA, 33 bp, Homo sapien
gagcaaacaaccttgatgttgattttccagtat

SEQ ID NO: 126329 - DNA, 33 bp, Homo sapien
aatgatatgactcatgaaaagtgattagttcac

SEQ ID NO: 126330 - DNA, 33 bp, Homo sapien
aatgatatgactcatggaaagtgattagttcac

SEQ ID NO: 126331 - DNA, 33 bp, Homo sapien
ggagtcaggacctagacagtggtgccaagaatc

SEQ ID NO: 126332 - DNA, 33 bp, Homo sapien
ggagtcaggacctagagagtggtgccaagaatc

SEQ ID NO: 126333 - DNA, 33 bp, Homo sapien
gccagacacaacagctcacatattgtacaattc

SEQ ID NO: 126334 - DNA, 33 bp, Homo sapien
gccagacacaacagcttacatattgtacaattc

SEQ ID NO: 126335 - DNA, 33 bp, Homo sapien
ttcatggtgtatgatgaaagaattaaataatgc

SEQ ID NO: 126336 - DNA, 33 bp, Homo sapien
ttcatggtgtatgatgtaagaattaaataatgc

SEQ ID NO: 126337 - DNA, 33 bp, Homo sapien
catggtgacttatcacacccaattgtctcccag

SEQ ID NO: 126338 - DNA, 33 bp, Homo sapien
catggtgacttatcacgcccaattgtctcccag

SEQ ID NO: 126339 - DNA, 33 bp, Homo sapien
caagcccctttagctacattgcactgagaggga

SEQ ID NO: 126340 - DNA, 33 bp, Homo sapien
caagcccctttagctatattgcactgagaggga

SEQ ID NO: 126341 - DNA, 33 bp, Homo sapien
ctgagaaggtgctttaaattttaggggctgcaa

SEQ ID NO: 126342 - DNA, 33 bp, Homo sapien
ctgagaaggtgctttacattttaggggctgcaa

SEQ ID NO: 126343 - DNA, 33 bp, Homo sapien
acaaattagtagacaaagctaatgcaccaaaaa

SEQ ID NO: 126344 - DNA, 33 bp, Homo sapien
acaaattagtagacaaggctaatgcaccaaaaa

SEQ ID NO: 126345 - DNA, 33 bp, Homo sapien
ccaccatgggatggcacatcaagaaggccctca

SEQ ID NO: 126346 - DNA, 33 bp, Homo sapien
ccaccatgggatggcatatcaagaaggccctca

SEQ ID NO: 126347 - DNA, 33 bp, Homo sapien
tcttaagtgtctgctacgatcttaatatgtctc

SEQ ID NO: 126348 - DNA, 33 bp, Homo sapien
tcttaagtgtctgctatgatcttaatatgtctc

SEQ ID NO: 126349 - DNA, 33 bp, Homo sapien
tatctaccccaactcacaactaatatgtgccaa

SEQ ID NO: 126350 - DNA, 33 bp, Homo sapien
tatctaccccaactcagaactaatatgtgccaa

SEQ ID NO: 126351 - DNA, 33 bp, Homo sapien
aggagagcttcaatcactaggaagctggggcag

SEQ ID NO: 126352 - DNA, 33 bp, Homo sapien
aggagagcttcaatcagtaggaagctggggcag

SEQ ID NO: 126353 - DNA, 33 bp, Homo sapien
ttcttatttaggaggaccttctacctaaacaca

SEQ ID NO: 126354 - DNA, 33 bp, Homo sapien
ttcttatttaggaggatcttctacctaaacaca

SEQ ID NO: 126355 - DNA, 33 bp, Homo sapien
attaggaatgagactcaagccatataaagtcaa

SEQ ID NO: 126356 - DNA, 33 bp, Homo sapien
attaggaatgagactcgagccatataaagtcaa

SEQ ID NO: 126357 - DNA, 33 bp, Homo sapien
ctggatatcagatgcaatcagcgaacagcctga

SEQ ID NO: 126358 - DNA, 33 bp, Homo sapien
ctggatatcagatgcattcagcgaacagcctga

SEQ ID NO: 126359 - DNA, 33 bp, Homo sapien
cctggccaatgtcctaaataatgcaagacaaaa

SEQ ID NO: 126360 - DNA, 33 bp, Homo sapien
cctggccaatgtcctagataatgcaagacaaaa

SEQ ID NO: 126361 - DNA, 33 bp, Homo sapien
tttaagaaagaaagagaacatccctgggataag

SEQ ID NO: 126362 - DNA, 33 bp, Homo sapien
tttaagaaagaaagaggacatccctgggataag

SEQ ID NO: 126363 - DNA, 33 bp, Homo sapien
ttggacgataatctagcaacagacgtaagaacc

SEQ ID NO: 126364 - DNA, 33 bp, Homo sapien
ttggacgataatctagtaacagacgtaagaacc

SEQ ID NO: 126365 - DNA, 33 bp, Homo sapien
ctacagttgagactcaaaacttggaaggcctgc

SEQ ID NO: 126366 - DNA, 33 bp, Homo sapien
ctacagttgagactcagaacttggaaggcctgc

SEQ ID NO: 126367 - DNA, 33 bp, Homo sapien
aggatctaccataacaatagtggaactctgaaa

SEQ ID NO: 126368 - DNA, 33 bp, Homo sapien
aggatctaccataacattagtggaactctgaaa

SEQ ID NO: 126369 - DNA, 33 bp, Homo sapien
ataaatggttctacataaaattccaagattggc

SEQ ID NO: 126370 - DNA, 33 bp, Homo sapien
ataaatggttctacatgaaattccaagattggc

SEQ ID NO: 126371 - DNA, 33 bp, Homo sapien
tacctacaggatttaaagttggagattcatgag

SEQ ID NO: 126372 - DNA, 33 bp, Homo sapien
tacctacaggatttaaggttggagattcatgag

SEQ ID NO: 126373 - DNA, 33 bp, Homo sapien
tgctcttgtcatacccccaagtttctaagattt

SEQ ID NO: 126374 - DNA, 33 bp, Homo sapien
tgctcttgtcataccctcaagtttctaagattt

SEQ ID NO: 126375 - DNA, 33 bp, Homo sapien
agtgatcacagggttcactcattaatttctctt

SEQ ID NO: 126376 - DNA, 33 bp, Homo sapien
agtgatcacagggttcgctcattaatttctctt

SEQ ID NO: 126377 - DNA, 33 bp, Homo sapien
cacctcaactcgggaacgtggctgtgctcattg

SEQ ID NO: 126378 - DNA, 33 bp, Homo sapien
cacctcaactcgggaatgtggctgtgctcattg

SEQ ID NO: 126379 - DNA, 33 bp, Homo sapien
atacctaagcccaggccccacaaagttgtctct

SEQ ID NO: 126380 - DNA, 33 bp, Homo sapien
atacctaagcccaggctccacaaagttgtctct

SEQ ID NO: 126381 - DNA, 33 bp, Homo sapien
ggatcttcaagaaggtaaataatggaataagtt

SEQ ID NO: 126382 - DNA, 33 bp, Homo sapien
ggatcttcaagaaggttaataatggaataagtt

SEQ ID NO: 126383 - DNA, 33 bp, Homo sapien
gaaagccagcctacaaagtcagcatgaaatcac

SEQ ID NO: 126384 - DNA, 33 bp, Homo sapien
gaaagccagcctacaaggtcagcatgaaatcac

SEQ ID NO: 126385 - DNA, 33 bp, Homo sapien
tctagaagtgagaaaactaaggcccagaggagg

SEQ ID NO: 126386 - DNA, 33 bp, Homo sapien
tctagaagtgagaaaagtaaggcccagaggagg

SEQ ID NO: 126387 - DNA, 33 bp, Homo sapien
caaattgaaactcagacatggtaaatccaaagt

SEQ ID NO: 126388 - DNA, 33 bp, Homo sapien
caaattgaaactcagatatggtaaatccaaagt

SEQ ID NO: 126389 - DNA, 33 bp, Homo sapien
acataaatacagttcacgggtttttgttggaat

SEQ ID NO: 126390 - DNA, 33 bp, Homo sapien
acataaatacagttcatgggtttttgttggaat

SEQ ID NO: 126391 - DNA, 33 bp, Homo sapien
gctgtttcgcaatggtcaaatttttgtcccaca

SEQ ID NO: 126392 - DNA, 33 bp, Homo sapien
gctgtttcgcaatggttaaatttttgtcccaca

SEQ ID NO: 126393 - DNA, 33 bp, Homo sapien
atgtgatcgtccttccaagacccataaacccag

SEQ ID NO: 126394 - DNA, 33 bp, Homo sapien
atgtgatcgtccttccgagacccataaacccag

SEQ ID NO: 126395 - DNA, 33 bp, Homo sapien
aagttcacttggctcaacaataattccacttct

SEQ ID NO: 126396 - DNA, 33 bp, Homo sapien
aagttcacttggctcagcaataattccacttct

SEQ ID NO: 126397 - DNA, 33 bp, Homo sapien
ggaaaagtagtttttgaattggatacaaagctg

SEQ ID NO: 126398 - DNA, 33 bp, Homo sapien
ggaaaagtagtttttggattggatacaaagctg

SEQ ID NO: 126399 - DNA, 33 bp, Homo sapien
gaatacaggctcaggaaggttacgggcagacag

SEQ ID NO: 126400 - DNA, 33 bp, Homo sapien
gaatacaggctcaggacggttacgggcagacag

SEQ ID NO: 126401 - DNA, 33 bp, Homo sapien
tacttgtaacttataaactcactgaaggcaaat

SEQ ID NO: 126402 - DNA, 33 bp, Homo sapien
tacttgtaacttataatctcactgaaggcaaat

SEQ ID NO: 126403 - DNA, 33 bp, Homo sapien
taaacaggtcaaattaggcacttttaaatgaca

SEQ ID NO: 126404 - DNA, 33 bp, Homo sapien
taaacaggtcaaattatgcacttttaaatgaca

SEQ ID NO: 126405 - DNA, 33 bp, Homo sapien
gttcaagcagctatatcagaagtgtctacagct

SEQ ID NO: 126406 - DNA, 33 bp, Homo sapien
gttcaagcagctatattagaagtgtctacagct

SEQ ID NO: 126407 - DNA, 33 bp, Homo sapien
ctttcctcaaaaaacccagtaacatatgccact

SEQ ID NO: 126408 - DNA, 33 bp, Homo sapien
ctttcctcaaaaaaccgagtaacatatgccact

SEQ ID NO: 126409 - DNA, 33 bp, Homo sapien
ccccaaacctctacagaaaaatgagctcatctc

SEQ ID NO: 126410 - DNA, 33 bp, Homo sapien
ccccaaacctctacagcaaaatgagctcatctc

SEQ ID NO: 126411 - DNA, 33 bp, Homo sapien
atgtaccatccatttacagaagcttgtgatgag

SEQ ID NO: 126412 - DNA, 33 bp, Homo sapien
atgtaccatccatttagagaagcttgtgatgag

SEQ ID NO: 126413 - DNA, 33 bp, Homo sapien
tgcatgaatgcatgaacgtagattgcttcttca

SEQ ID NO: 126414 - DNA, 33 bp, Homo sapien
tgcatgaatgcatgaatgtagattgcttcttca

SEQ ID NO: 126415 - DNA, 33 bp, Homo sapien
cattcatgcaactaaacatcactaattgccaac

SEQ ID NO: 126416 - DNA, 33 bp, Homo sapien
cattcatgcaactaaatatcactaattgccaac

SEQ ID NO: 126417 - DNA, 33 bp, Homo sapien
ttcttcctacaatatcaactccaatctaagttt

SEQ ID NO: 126418 - DNA, 33 bp, Homo sapien
ttcttcctacaatatcgactccaatctaagttt

SEQ ID NO: 126419 - DNA, 33 bp, Homo sapien
acaaacttggattccaaatgcttcaaattatct

SEQ ID NO: 126420 - DNA, 33 bp, Homo sapien
acaaacttggattccagatgcttcaaattatct

SEQ ID NO: 126421 - DNA, 33 bp, Homo sapien
atatagcaatgaaataaaagtcaaggcctcaaa

SEQ ID NO: 126422 - DNA, 33 bp, Homo sapien
atatagcaatgaaatagaagtcaaggcctcaaa

SEQ ID NO: 126423 - DNA, 33 bp, Homo sapien
ctcttcttgactaatacattttatgctgcatct

SEQ ID NO: 126424 - DNA, 33 bp, Homo sapien
ctcttcttgactaatagattttatgctgcatct

SEQ ID NO: 126425 - DNA, 33 bp, Homo sapien
agactattttgtcatagagttggtaaggcttat

SEQ ID NO: 126426 - DNA, 33 bp, Homo sapien
agactattttgtcatatagttggtaaggcttat

SEQ ID NO: 126427 - DNA, 33 bp, Homo sapien
gattccaaagtgacctaaaggaaattcgaattt

SEQ ID NO: 126428 - DNA, 33 bp, Homo sapien
gattccaaagtgacctgaaggaaattcgaattt

SEQ ID NO: 126429 - DNA, 33 bp, Homo sapien
gaatttctagtggaaaatggcaaacagataaat

SEQ ID NO: 126430 - DNA, 33 bp, Homo sapien
gaatttctagtggaaagtggcaaacagataaat

SEQ ID NO: 126431 - DNA, 33 bp, Homo sapien
ctaaaacagctgcatccaagagaattgtaacca

SEQ ID NO: 126432 - DNA, 33 bp, Homo sapien
ctaaaacagctgcatcgaagagaattgtaacca

SEQ ID NO: 126433 - DNA, 33 bp, Homo sapien
cgggtcttcatccctaaactgacggctgcactg

SEQ ID NO: 126434 - DNA, 33 bp, Homo sapien
cgggtcttcatccctagactgacggctgcactg

SEQ ID NO: 126435 - DNA, 33 bp, Homo sapien
caataacaacaacacaatcccaatggcattttc

SEQ ID NO: 126436 - DNA, 33 bp, Homo sapien
caataacaacaacacagtcccaatggcattttc

SEQ ID NO: 126437 - DNA, 33 bp, Homo sapien
atattttctctggtataaattttgtcagagtca

SEQ ID NO: 126438 - DNA, 33 bp, Homo sapien
atattttctctggtatgaattttgtcagagtca

SEQ ID NO: 126439 - DNA, 33 bp, Homo sapien
gtacaaagaacaatagaagttcaaagaaggaga

SEQ ID NO: 126440 - DNA, 33 bp, Homo sapien
gtacaaagaacaataggagttcaaagaaggaga

SEQ ID NO: 126441 - DNA, 33 bp, Homo sapien
caatgagtcatttaaactcttgaaaagactctt

SEQ ID NO: 126442 - DNA, 33 bp, Homo sapien
caatgagtcatttaaattcttgaaaagactctt

SEQ ID NO: 126443 - DNA, 33 bp, Homo sapien
gtctttgttcaaaacccaaatgttcatctctgt

SEQ ID NO: 126444 - DNA, 33 bp, Homo sapien
gtctttgttcaaaaccgaaatgttcatctctgt

SEQ ID NO: 126445 - DNA, 33 bp, Homo sapien
tctttcaaaagttgagaacacaagaatgcagca

SEQ ID NO: 126446 - DNA, 33 bp, Homo sapien
tctttcaaaagttgaggacacaagaatgcagca

SEQ ID NO: 126447 - DNA, 33 bp, Homo sapien
tcccaatggcaatagccgaagttgagcaaaaag

SEQ ID NO: 126448 - DNA, 33 bp, Homo sapien
tcccaatggcaatagctgaagttgagcaaaaag

SEQ ID NO: 126449 - DNA, 33 bp, Homo sapien
tcagtctaactcctacacattctttaaggattc

SEQ ID NO: 126450 - DNA, 33 bp, Homo sapien
tcagtctaactcctactcattctttaaggattc

SEQ ID NO: 126451 - DNA, 33 bp, Homo sapien
tgcgtatccatctgcaaaatatgagagttccag

SEQ ID NO: 126452 - DNA, 33 bp, Homo sapien
tgcgtatccatctgcagaatatgagagttccag

SEQ ID NO: 126453 - DNA, 33 bp, Homo sapien
catttttcagcttccacgcataagtaataatat

SEQ ID NO: 126454 - DNA, 33 bp, Homo sapien
catttttcagcttccatgcataagtaataatat

SEQ ID NO: 126455 - DNA, 33 bp, Homo sapien
cacatgaaaatacacaccttcctttccttttta

SEQ ID NO: 126456 - DNA, 33 bp, Homo sapien
cacatgaaaatacacatcttcctttccttttta

SEQ ID NO: 126457 - DNA, 33 bp, Homo sapien
tacattagatagtgataagtgctaggaagaaaa

SEQ ID NO: 126458 - DNA, 33 bp, Homo sapien
tacattagatagtgatgagtgctaggaagaaaa

SEQ ID NO: 126459 - DNA, 33 bp, Homo sapien
aacaaatctactctacaaaaagtatgggcatgg

SEQ ID NO: 126460 - DNA, 33 bp, Homo sapien
aacaaatctactctacgaaaagtatgggcatgg

SEQ ID NO: 126461 - DNA, 33 bp, Homo sapien
acaaaagtgtgaaaaacgtggcactaaatagac

SEQ ID NO: 126462 - DNA, 33 bp, Homo sapien
acaaaagtgtgaaaaatgtggcactaaatagac

SEQ ID NO: 126463 - DNA, 33 bp, Homo sapien
tggtaacacggtcaaaaccctcaaccagagcag

SEQ ID NO: 126464 - DNA, 33 bp, Homo sapien
tggtaacacggtcaaagccctcaaccagagcag

SEQ ID NO: 126465 - DNA, 33 bp, Homo sapien
accactccggctacaacttcccttggtccactc

SEQ ID NO: 126466 - DNA, 33 bp, Homo sapien
accactccggctacaatttcccttggtccactc

SEQ ID NO: 126467 - DNA, 33 bp, Homo sapien
tactccataggtagtacactcaaggcaatagtg

SEQ ID NO: 126468 - DNA, 33 bp, Homo sapien
tactccataggtagtagactcaaggcaatagtg

SEQ ID NO: 126469 - DNA, 33 bp, Homo sapien
tcacagaaattctctaagcctcactgtcctcat

SEQ ID NO: 126470 - DNA, 33 bp, Homo sapien
tcacagaaattctctacgcctcactgtcctcat

SEQ ID NO: 126471 - DNA, 33 bp, Homo sapien
ggccctgaaaactcatcaagaaagccagcctgg

SEQ ID NO: 126472 - DNA, 33 bp, Homo sapien
ggccctgaaaactcattaagaaagccagcctgg

SEQ ID NO: 126473 - DNA, 33 bp, Homo sapien
acatctcagcatttcactctggtgcataagtct

SEQ ID NO: 126474 - DNA, 33 bp, Homo sapien
acatctcagcatttcattctggtgcataagtct

SEQ ID NO: 126475 - DNA, 33 bp, Homo sapien
actccagggagtaccacgtatattttcatgtat

SEQ ID NO: 126476 - DNA, 33 bp, Homo sapien
actccagggagtaccatgtatattttcatgtat

SEQ ID NO: 126477 - DNA, 33 bp, Homo sapien
taggccatgagtaaggcgacttgactttgaaag

SEQ ID NO: 126478 - DNA, 33 bp, Homo sapien
taggccatgagtaaggtgacttgactttgaaag

SEQ ID NO: 126479 - DNA, 33 bp, Homo sapien
tttgaaaggccaggaacgggctgctcccacagg

SEQ ID NO: 126480 - DNA, 33 bp, Homo sapien
tttgaaaggccaggaatgggctgctcccacagg

SEQ ID NO: 126481 - DNA, 33 bp, Homo sapien
ccttcctcttgcctctctctgactctccatcct

SEQ ID NO: 126482 - DNA, 33 bp, Homo sapien
ccttcctcttgcctctgtctgactctccatcct

SEQ ID NO: 126483 - DNA, 33 bp, Homo sapien
ttttggatgagagctgcataatttcccaaaatt

SEQ ID NO: 126484 - DNA, 33 bp, Homo sapien
ttttggatgagagctggataatttcccaaaatt

SEQ ID NO: 126485 - DNA, 33 bp, Homo sapien
agatgcatttgtttacaatggacagaagtaaga

SEQ ID NO: 126486 - DNA, 33 bp, Homo sapien
agatgcatttgtttacgatggacagaagtaaga

SEQ ID NO: 126487 - DNA, 33 bp, Homo sapien
gggacactattaaatcacaatgtcacaggaggg

SEQ ID NO: 126488 - DNA, 33 bp, Homo sapien
gggacactattaaatcgcaatgtcacaggaggg

SEQ ID NO: 126489 - DNA, 33 bp, Homo sapien
catggtttcattaatcaatgcctgagcttggtg

SEQ ID NO: 126490 - DNA, 33 bp, Homo sapien
catggtttcattaatcgatgcctgagcttggtg

SEQ ID NO: 126491 - DNA, 33 bp, Homo sapien
ttgaatagctatatgcaaaacaatgaacctaga

SEQ ID NO: 126492 - DNA, 33 bp, Homo sapien
ttgaatagctatatgcgaaacaatgaacctaga

SEQ ID NO: 126493 - DNA, 33 bp, Homo sapien
tacatgaatgttcataagagcatcactcaatat

SEQ ID NO: 126494 - DNA, 33 bp, Homo sapien
tacatgaatgttcataggagcatcactcaatat

SEQ ID NO: 126495 - DNA, 33 bp, Homo sapien
caccacctggaactgacaggttggcccccaggc

SEQ ID NO: 126496 - DNA, 33 bp, Homo sapien
caccacctggaactgataggttggcccccaggc

SEQ ID NO: 126497 - DNA, 33 bp, Homo sapien
tccaccttcattgtcccattttagggatatgta

SEQ ID NO: 126498 - DNA, 33 bp, Homo sapien
tccaccttcattgtcctattttagggatatgta

SEQ ID NO: 126499 - DNA, 33 bp, Homo sapien
atgatgtattgtgaaacggagaagtgataagtt

SEQ ID NO: 126500 - DNA, 33 bp, Homo sapien
atgatgtattgtgaaatggagaagtgataagtt

SEQ ID NO: 126501 - DNA, 33 bp, Homo sapien
ttagtcttcatttctaagacagggcacaaggtt

SEQ ID NO: 126502 - DNA, 33 bp, Homo sapien
ttagtcttcatttctatgacagggcacaaggtt

SEQ ID NO: 126503 - DNA, 33 bp, Homo sapien
gtcaaaggttttagccaatgtaaagacagataa

SEQ ID NO: 126504 - DNA, 33 bp, Homo sapien
gtcaaaggttttagccgatgtaaagacagataa

SEQ ID NO: 126505 - DNA, 33 bp, Homo sapien
actggtttcagcccacaagctgtagtgtgttaa

SEQ ID NO: 126506 - DNA, 33 bp, Homo sapien
actggtttcagcccacgagctgtagtgtgttaa

SEQ ID NO: 126507 - DNA, 33 bp, Homo sapien
tcagcagtgaatgagacggagggtcgagacagg

SEQ ID NO: 126508 - DNA, 33 bp, Homo sapien
tcagcagtgaatgagatggagggtcgagacagg

SEQ ID NO: 126509 - DNA, 33 bp, Homo sapien
gacaccataaggtgacaaaatatatgaattatc

SEQ ID NO: 126510 - DNA, 33 bp, Homo sapien
gacaccataaggtgaccaaatatatgaattatc

SEQ ID NO: 126511 - DNA, 33 bp, Homo sapien
cagtatctccaaaggcaaagggaaactgaaagg

SEQ ID NO: 126512 - DNA, 33 bp, Homo sapien
cagtatctccaaaggcgaagggaaactgaaagg

SEQ ID NO: 126513 - DNA, 33 bp, Homo sapien
tggctgcactgcgaagaacatctgttacacctg

SEQ ID NO: 126514 - DNA, 33 bp, Homo sapien
tggctgcactgcgaagtacatctgttacacctg

SEQ ID NO: 126515 - DNA, 33 bp, Homo sapien
cagatcagtatgaagaagcagagtattacttcc

SEQ ID NO: 126516 - DNA, 33 bp, Homo sapien
cagatcagtatgaagacgcagagtattacttcc

SEQ ID NO: 126517 - DNA, 33 bp, Homo sapien
atagctgtattattcacgatggccaaaaagtgg

SEQ ID NO: 126518 - DNA, 33 bp, Homo sapien
atagctgtattattcatgatggccaaaaagtgg

SEQ ID NO: 126519 - DNA, 33 bp, Homo sapien
atgactaatttgataacgaaggaattgttagct

SEQ ID NO: 126520 - DNA, 33 bp, Homo sapien
atgactaatttgataatgaaggaattgttagct

SEQ ID NO: 126521 - DNA, 33 bp, Homo sapien
ctcagcctctccagtcaatgagactataggcac

SEQ ID NO: 126522 - DNA, 33 bp, Homo sapien
ctcagcctctccagtcgatgagactataggcac

SEQ ID NO: 126523 - DNA, 33 bp, Homo sapien
gtttgtttagctatccaatgactctttattggg

SEQ ID NO: 126524 - DNA, 33 bp, Homo sapien
gtttgtttagctatcccatgactctttattggg

SEQ ID NO: 126525 - DNA, 33 bp, Homo sapien
ccttgtgatggtacaaaagtgataattccattc

SEQ ID NO: 126526 - DNA, 33 bp, Homo sapien
ccttgtgatggtacaacagtgataattccattc

SEQ ID NO: 126527 - DNA, 33 bp, Homo sapien
caagctggagaccaagaaaagttgatggtgtag

SEQ ID NO: 126528 - DNA, 33 bp, Homo sapien
caagctggagaccaaggaaagttgatggtgtag

SEQ ID NO: 126529 - DNA, 33 bp, Homo sapien
tcacttatagcttcagccatgtatttatatgta

SEQ ID NO: 126530 - DNA, 33 bp, Homo sapien
tcacttatagcttcaggcatgtatttatatgta

SEQ ID NO: 126531 - DNA, 33 bp, Homo sapien
gttagcctcttaatacggtataatgccttggca

SEQ ID NO: 126532 - DNA, 33 bp, Homo sapien
gttagcctcttaatactgtataatgccttggca

SEQ ID NO: 126533 - DNA, 33 bp, Homo sapien
gatcacaaatcatatcccagcccaggtccaggg

SEQ ID NO: 126534 - DNA, 33 bp, Homo sapien
gatcacaaatcatatcgcagcccaggtccaggg

SEQ ID NO: 126535 - DNA, 33 bp, Homo sapien
gattctgcagaaaacacgaaactgagctgtaca

SEQ ID NO: 126536 - DNA, 33 bp, Homo sapien
gattctgcagaaaacatgaaactgagctgtaca

SEQ ID NO: 126537 - DNA, 33 bp, Homo sapien
tgcccaactgctccggaacacagccaatagctg

SEQ ID NO: 126538 - DNA, 33 bp, Homo sapien
tgcccaactgctccgggacacagccaatagctg

SEQ ID NO: 126539 - DNA, 33 bp, Homo sapien
agagccaacagctacaatgaagaagtatgagag

SEQ ID NO: 126540 - DNA, 33 bp, Homo sapien
agagccaacagctacagtgaagaagtatgagag

SEQ ID NO: 126541 - DNA, 33 bp, Homo sapien
attgtgtggaaagaaaatcttacaaagggaaat

SEQ ID NO: 126542 - DNA, 33 bp, Homo sapien
attgtgtggaaagaaagtcttacaaagggaaat

SEQ ID NO: 126543 - DNA, 33 bp, Homo sapien
tctttctccaacctacacaatttcctatgagga

SEQ ID NO: 126544 - DNA, 33 bp, Homo sapien
tctttctccaacctacgcaatttcctatgagga

SEQ ID NO: 126545 - DNA, 33 bp, Homo sapien
tctgtcagtattgatcccagttttttccaatac

SEQ ID NO: 126546 - DNA, 33 bp, Homo sapien
tctgtcagtattgatctcagttttttccaatac

SEQ ID NO: 126547 - DNA, 33 bp, Homo sapien
gctcagaggctcagcaatctgaattcaaagcat

SEQ ID NO: 126548 - DNA, 33 bp, Homo sapien
gctcagaggctcagcagtctgaattcaaagcat

SEQ ID NO: 126549 - DNA, 33 bp, Homo sapien
tgactttgtcgcaatgaaaaaaaatagaaactc

SEQ ID NO: 126550 - DNA, 33 bp, Homo sapien
tgactttgtcgcaatggaaaaaaatagaaactc

SEQ ID NO: 126551 - DNA, 33 bp, Homo sapien
acttccattcaagaaacgggataacaaccttat

SEQ ID NO: 126552 - DNA, 33 bp, Homo sapien
acttccattcaagaaaggggataacaaccttat

SEQ ID NO: 126553 - DNA, 33 bp, Homo sapien
gatgctcaataagtctcaagttctagccacttc

SEQ ID NO: 126554 - DNA, 33 bp, Homo sapien
gatgctcaataagtctgaagttctagccacttc

SEQ ID NO: 126555 - DNA, 33 bp, Homo sapien
cttgagtttatctgtccagtgaacttgcagttg

SEQ ID NO: 126556 - DNA, 33 bp, Homo sapien
cttgagtttatctgtctagtgaacttgcagttg

SEQ ID NO: 126557 - DNA, 33 bp, Homo sapien
cactcaaaaaatacgcccatcaccctggaacat

SEQ ID NO: 126558 - DNA, 33 bp, Homo sapien
cactcaaaaaatacgcgcatcaccctggaacat

SEQ ID NO: 126559 - DNA, 33 bp, Homo sapien
actgagtgcccggccacgatggaatgtaaagtc

SEQ ID NO: 126560 - DNA, 33 bp, Homo sapien
actgagtgcccggccatgatggaatgtaaagtc

SEQ ID NO: 126561 - DNA, 33 bp, Homo sapien
gaactcactttctagcccttcttccctccccag

SEQ ID NO: 126562 - DNA, 33 bp, Homo sapien
gaactcactttctagctcttcttccctccccag

SEQ ID NO: 126563 - DNA, 33 bp, Homo sapien
agaacatagaacttagacattagcattagggtt

SEQ ID NO: 126564 - DNA, 33 bp, Homo sapien
agaacatagaacttaggcattagcattagggtt

SEQ ID NO: 126565 - DNA, 33 bp, Homo sapien
atcagcagagccatgcgccctttgaaactcccc

SEQ ID NO: 126566 - DNA, 33 bp, Homo sapien
atcagcagagccatgctccctttgaaactcccc

SEQ ID NO: 126567 - DNA, 33 bp, Homo sapien
gacaaaatgcatttgccgatatcatgatgttga

SEQ ID NO: 126568 - DNA, 33 bp, Homo sapien
gacaaaatgcatttgctgatatcatgatgttga

SEQ ID NO: 126569 - DNA, 33 bp, Homo sapien
tgaagtctgccttggcaatgctaacaatatgtt

SEQ ID NO: 126570 - DNA, 33 bp, Homo sapien
tgaagtctgccttggccatgctaacaatatgtt

SEQ ID NO: 126571 - DNA, 33 bp, Homo sapien
caaaatctcttctccccctacacaggtccatcc

SEQ ID NO: 126572 - DNA, 33 bp, Homo sapien
caaaatctcttctcccgctacacaggtccatcc

SEQ ID NO: 126573 - DNA, 33 bp, Homo sapien
aggtaaagggttttaacagttctcattatgccc

SEQ ID NO: 126574 - DNA, 33 bp, Homo sapien
aggtaaagggttttaatagttctcattatgccc

SEQ ID NO: 126575 - DNA, 33 bp, Homo sapien
agcaaacttggtcttccacagcagggctacgtg

SEQ ID NO: 126576 - DNA, 33 bp, Homo sapien
agcaaacttggtcttctacagcagggctacgtg

SEQ ID NO: 126577 - DNA, 33 bp, Homo sapien
tccttccttgaatagacgtggagatgggttttt

SEQ ID NO: 126578 - DNA, 33 bp, Homo sapien
tccttccttgaatagatgtggagatgggttttt

SEQ ID NO: 126579 - DNA, 33 bp, Homo sapien
gattcacaaaaatatacgttcctgtctgccact

SEQ ID NO: 126580 - DNA, 33 bp, Homo sapien
gattcacaaaaatatatgttcctgtctgccact

SEQ ID NO: 126581 - DNA, 33 bp, Homo sapien
gagggtaaccactcagaaaatacagacacctaa

SEQ ID NO: 126582 - DNA, 33 bp, Homo sapien
gagggtaaccactcaggaaatacagacacctaa

SEQ ID NO: 126583 - DNA, 33 bp, Homo sapien
ctactttgtcttttaaaataagaagcagaagag

SEQ ID NO: 126584 - DNA, 33 bp, Homo sapien
ctactttgtcttttaacataagaagcagaagag

SEQ ID NO: 126585 - DNA, 33 bp, Homo sapien
taattcctcgatttgaatatctgcttatggact

SEQ ID NO: 126586 - DNA, 33 bp, Homo sapien
taattcctcgatttgagtatctgcttatggact

SEQ ID NO: 126587 - DNA, 33 bp, Homo sapien
acttaatacgaattcaagaagtgataactacct

SEQ ID NO: 126588 - DNA, 33 bp, Homo sapien
acttaatacgaattcaggaagtgataactacct

SEQ ID NO: 126589 - DNA, 33 bp, Homo sapien
ggtggtctcataggctcacgtgaaaaaaatgac

SEQ ID NO: 126590 - DNA, 33 bp, Homo sapien
ggtggtctcataggcttacgtgaaaaaaatgac

SEQ ID NO: 126591 - DNA, 33 bp, Homo sapien
ttgtttcaccttttgacatagaaaggctaattt

SEQ ID NO: 126592 - DNA, 33 bp, Homo sapien
ttgtttcaccttttgatatagaaaggctaattt

SEQ ID NO: 126593 - DNA, 33 bp, Homo sapien
cgtactcagggaggcacataaaagccgagacca

SEQ ID NO: 126594 - DNA, 33 bp, Homo sapien
cgtactcagggaggcagataaaagccgagacca

SEQ ID NO: 126595 - DNA, 33 bp, Homo sapien
acctggccaacatgtacgctgaaggaggccagt

SEQ ID NO: 126596 - DNA, 33 bp, Homo sapien
acctggccaacatgtatgctgaaggaggccagt

SEQ ID NO: 126597 - DNA, 33 bp, Homo sapien
atttggacccatttcacagactttgagtcagtt

SEQ ID NO: 126598 - DNA, 33 bp, Homo sapien
atttggacccatttcagagactttgagtcagtt

SEQ ID NO: 126599 - DNA, 33 bp, Homo sapien
aggtcccatctctacacattgaaatctatcact

SEQ ID NO: 126600 - DNA, 33 bp, Homo sapien
aggtcccatctctacatattgaaatctatcact

SEQ ID NO: 126601 - DNA, 33 bp, Homo sapien
tgatactcattactggaaattcgaggattaatt

SEQ ID NO: 126602 - DNA, 33 bp, Homo sapien
tgatactcattactgggaattcgaggattaatt

SEQ ID NO: 126603 - DNA, 33 bp, Homo sapien
cttattttctcaaccacgacattattttctaag

SEQ ID NO: 126604 - DNA, 33 bp, Homo sapien
cttattttctcaaccatgacattattttctaag

SEQ ID NO: 126605 - DNA, 33 bp, Homo sapien
gcaggtcaggaacatggattcttatttattttt

SEQ ID NO: 126606 - DNA, 33 bp, Homo sapien
gcaggtcaggaacatgtattcttatttattttt

SEQ ID NO: 126607 - DNA, 33 bp, Homo sapien
ctaaattgttttggggaacttagtagtgtaacc

SEQ ID NO: 126608 - DNA, 33 bp, Homo sapien
ctaaattgttttggggtacttagtagtgtaacc

SEQ ID NO: 126609 - DNA, 33 bp, Homo sapien
tgtataggagacagagaaaaattttacagcaga

SEQ ID NO: 126610 - DNA, 33 bp, Homo sapien
tgtataggagacagagcaaaattttacagcaga

SEQ ID NO: 126611 - DNA, 33 bp, Homo sapien
ggttgctccaacagccaagttatgatcttggaa

SEQ ID NO: 126612 - DNA, 33 bp, Homo sapien
ggttgctccaacagcccagttatgatcttggaa

SEQ ID NO: 126613 - DNA, 33 bp, Homo sapien
catcaaataatccacaaattgtcatagttgaaa

SEQ ID NO: 126614 - DNA, 33 bp, Homo sapien
catcaaataatccacacattgtcatagttgaaa

SEQ ID NO: 126615 - DNA, 33 bp, Homo sapien
tgctgcttcattatctaaaggtatctttaatct

SEQ ID NO: 126616 - DNA, 33 bp, Homo sapien
tgctgcttcattatcttaaggtatctttaatct

SEQ ID NO: 126617 - DNA, 33 bp, Homo sapien
gtgaattgcagcctgacgtagctataaatgcag

SEQ ID NO: 126618 - DNA, 33 bp, Homo sapien
gtgaattgcagcctgatgtagctataaatgcag

SEQ ID NO: 126619 - DNA, 33 bp, Homo sapien
tgtaagttaactggtacaggtaagcactctcag

SEQ ID NO: 126620 - DNA, 33 bp, Homo sapien
tgtaagttaactggtataggtaagcactctcag

SEQ ID NO: 126621 - DNA, 33 bp, Homo sapien
cagagatctccaaaaacctggaagagggagatg

SEQ ID NO: 126622 - DNA, 33 bp, Homo sapien
cagagatctccaaaaatctggaagagggagatg

SEQ ID NO: 126623 - DNA, 33 bp, Homo sapien
cttactctacgcctaagaaatgaatgaaataag

SEQ ID NO: 126624 - DNA, 33 bp, Homo sapien
cttactctacgcctaataaatgaatgaaataag

SEQ ID NO: 126625 - DNA, 33 bp, Homo sapien
tttctcccaagttacacactcaaatttccaata

SEQ ID NO: 126626 - DNA, 33 bp, Homo sapien
tttctcccaagttacagactcaaatttccaata

SEQ ID NO: 126627 - DNA, 33 bp, Homo sapien
ggtgacaagacctaaaatacgtatatatctctt

SEQ ID NO: 126628 - DNA, 33 bp, Homo sapien
ggtgacaagacctaaactacgtatatatctctt

SEQ ID NO: 126629 - DNA, 33 bp, Homo sapien
ttaaactgctgttaggaaatggagaacttttgt

SEQ ID NO: 126630 - DNA, 33 bp, Homo sapien
ttaaactgctgttaggcaatggagaacttttgt

SEQ ID NO: 126631 - DNA, 33 bp, Homo sapien
caggtgaaagaagaaacgagtcagggcaaagaa

SEQ ID NO: 126632 - DNA, 33 bp, Homo sapien
caggtgaaagaagaaatgagtcagggcaaagaa

SEQ ID NO: 126633 - DNA, 33 bp, Homo sapien
catatagttatactaccagtgttttacaggcct

SEQ ID NO: 126634 - DNA, 33 bp, Homo sapien
catatagttatactacgagtgttttacaggcct

SEQ ID NO: 126635 - DNA, 33 bp, Homo sapien
ttttacaggcctaaacaaatgcatttttatctc

SEQ ID NO: 126636 - DNA, 33 bp, Homo sapien
ttttacaggcctaaaccaatgcatttttatctc

SEQ ID NO: 126637 - DNA, 33 bp, Homo sapien
atcccataaagtaaacaagaacacaaagatgta

SEQ ID NO: 126638 - DNA, 33 bp, Homo sapien
atcccataaagtaaacgagaacacaaagatgta

SEQ ID NO: 126639 - DNA, 33 bp, Homo sapien
tgcatttcagtttccagctgccaaatcatattg

SEQ ID NO: 126640 - DNA, 33 bp, Homo sapien
tgcatttcagtttccatctgccaaatcatattg

SEQ ID NO: 126641 - DNA, 33 bp, Homo sapien
aaagagtggtaaaatccgatgactaattttgag

SEQ ID NO: 126642 - DNA, 33 bp, Homo sapien
aaagagtggtaaaatctgatgactaattttgag

SEQ ID NO: 126643 - DNA, 33 bp, Homo sapien
tcctatacaccgataacagacagagagccaatt

SEQ ID NO: 126644 - DNA, 33 bp, Homo sapien
tcctatacaccgataagagacagagagccaatt

SEQ ID NO: 126645 - DNA, 33 bp, Homo sapien
tttctttctcctgttacggtactgattgtgatg

SEQ ID NO: 126646 - DNA, 33 bp, Homo sapien
tttctttctcctgttatggtactgattgtgatg

SEQ ID NO: 126647 - DNA, 33 bp, Homo sapien
ctctttccacctacccaacaatcctggccacag

SEQ ID NO: 126648 - DNA, 33 bp, Homo sapien
ctctttccacctacccgacaatcctggccacag

SEQ ID NO: 126649 - DNA, 33 bp, Homo sapien
tctgatccataagtgccatgcgtagaaaatgta

SEQ ID NO: 126650 - DNA, 33 bp, Homo sapien
tctgatccataagtgctatgcgtagaaaatgta

SEQ ID NO: 126651 - DNA, 33 bp, Homo sapien
aggcatcaaagttataaagttattaagaccgaa

SEQ ID NO: 126652 - DNA, 33 bp, Homo sapien
aggcatcaaagttatacagttattaagaccgaa

SEQ ID NO: 126653 - DNA, 33 bp, Homo sapien
aacttcctcttgggaaacagttgaggctgtgtt

SEQ ID NO: 126654 - DNA, 33 bp, Homo sapien
aacttcctcttgggaaccagttgaggctgtgtt

SEQ ID NO: 126655 - DNA, 33 bp, Homo sapien
tttacgagttcagtaactgtgggttgatgatgg

SEQ ID NO: 126656 - DNA, 33 bp, Homo sapien
tttacgagttcagtaattgtgggttgatgatgg

SEQ ID NO: 126657 - DNA, 33 bp, Homo sapien
tgaaattttgttctcaagactaattaagatttt

SEQ ID NO: 126658 - DNA, 33 bp, Homo sapien
tgaaattttgttctcatgactaattaagatttt

SEQ ID NO: 126659 - DNA, 33 bp, Homo sapien
cagcaccatttactaccgaataggagattgttt

SEQ ID NO: 126660 - DNA, 33 bp, Homo sapien
cagcaccatttactactgaataggagattgttt

SEQ ID NO: 126661 - DNA, 33 bp, Homo sapien
cctacctataatgtcacgctccaccttgccagc

SEQ ID NO: 126662 - DNA, 33 bp, Homo sapien
cctacctataatgtcaggctccaccttgccagc

SEQ ID NO: 126663 - DNA, 33 bp, Homo sapien
agtacctgcattagtacctgcagtttgatttaa

SEQ ID NO: 126664 - DNA, 33 bp, Homo sapien
agtacctgcattagtagctgcagtttgatttaa

SEQ ID NO: 126665 - DNA, 33 bp, Homo sapien
gagtgattgtggatgacgagaattagctctaag

SEQ ID NO: 126666 - DNA, 33 bp, Homo sapien
gagtgattgtggatgatgagaattagctctaag

SEQ ID NO: 126667 - DNA, 33 bp, Homo sapien
tttggaacttgggaataaaaacattttggtagc

SEQ ID NO: 126668 - DNA, 33 bp, Homo sapien
tttggaacttgggaatgaaaacattttggtagc

SEQ ID NO: 126669 - DNA, 33 bp, Homo sapien
cctgcttccagggcacacgtccttaaccttagc

SEQ ID NO: 126670 - DNA, 33 bp, Homo sapien
cctgcttccagggcacgcgtccttaaccttagc

SEQ ID NO: 126671 - DNA, 33 bp, Homo sapien
tcaaaatgactgatgacaagtagagacgagcag

SEQ ID NO: 126672 - DNA, 33 bp, Homo sapien
tcaaaatgactgatgataagtagagacgagcag

SEQ ID NO: 126673 - DNA, 33 bp, Homo sapien
aaggggtggagctggtgacatacaaagttgtat

SEQ ID NO: 126674 - DNA, 33 bp, Homo sapien
aaggggtggagctggttacatacaaagttgtat

SEQ ID NO: 126675 - DNA, 33 bp, Homo sapien
gtccactgaaatgtgaagaaaaggtctgagcat

SEQ ID NO: 126676 - DNA, 33 bp, Homo sapien
gtccactgaaatgtgaggaaaaggtctgagcat

SEQ ID NO: 126677 - DNA, 33 bp, Homo sapien
ttacctcattcaacgcacacatccgagcaatgg

SEQ ID NO: 126678 - DNA, 33 bp, Homo sapien
ttacctcattcaacgcgcacatccgagcaatgg

SEQ ID NO: 126679 - DNA, 33 bp, Homo sapien
cactcatttatcacaaatcatggaaatgtactg

SEQ ID NO: 126680 - DNA, 33 bp, Homo sapien
cactcatttatcacaagtcatggaaatgtactg

SEQ ID NO: 126681 - DNA, 33 bp, Homo sapien
gtctgctcaccctgtgcaagcacctctttcttg

SEQ ID NO: 126682 - DNA, 33 bp, Homo sapien
gtctgctcaccctgtgtaagcacctctttcttg

SEQ ID NO: 126683 - DNA, 33 bp, Homo sapien
ttgtatacctgcagaacggaattagttagaata

SEQ ID NO: 126684 - DNA, 33 bp, Homo sapien
ttgtatacctgcagaatggaattagttagaata

SEQ ID NO: 126685 - DNA, 33 bp, Homo sapien
gtttggggtgatccaaaagataataactccctg

SEQ ID NO: 126686 - DNA, 33 bp, Homo sapien
gtttggggtgatccaagagataataactccctg

SEQ ID NO: 126687 - DNA, 33 bp, Homo sapien
caacgtacagtttgtaagtactgccagtcagga

SEQ ID NO: 126688 - DNA, 33 bp, Homo sapien
caacgtacagtttgtatgtactgccagtcagga

SEQ ID NO: 126689 - DNA, 33 bp, Homo sapien
agagcaaatgggtagacagaagtaatcattttt

SEQ ID NO: 126690 - DNA, 33 bp, Homo sapien
agagcaaatgggtagatagaagtaatcattttt

SEQ ID NO: 126691 - DNA, 33 bp, Homo sapien
ttaacaaagacaaaccagacctaccattctgaa

SEQ ID NO: 126692 - DNA, 33 bp, Homo sapien
ttaacaaagacaaacccgacctaccattctgaa

SEQ ID NO: 126693 - DNA, 33 bp, Homo sapien
gaacacttctttgcacacatagcattcagcagc

SEQ ID NO: 126694 - DNA, 33 bp, Homo sapien
gaacacttctttgcacgcatagcattcagcagc

SEQ ID NO: 126695 - DNA, 33 bp, Homo sapien
cagaagttctcaatccagctgccttttagaatc

SEQ ID NO: 126696 - DNA, 33 bp, Homo sapien
cagaagttctcaatccggctgccttttagaatc

SEQ ID NO: 126697 - DNA, 33 bp, Homo sapien
tggagttcactgtgtacacttgatagctactgc

SEQ ID NO: 126698 - DNA, 33 bp, Homo sapien
tggagttcactgtgtatacttgatagctactgc

SEQ ID NO: 126699 - DNA, 33 bp, Homo sapien
tgcttgaaactgagcacagaactctgaggcaga

SEQ ID NO: 126700 - DNA, 33 bp, Homo sapien
tgcttgaaactgagcagagaactctgaggcaga

SEQ ID NO: 126701 - DNA, 33 bp, Homo sapien
cattctggtagcaccacgaagtgtattcttagc

SEQ ID NO: 126702 - DNA, 33 bp, Homo sapien
cattctggtagcaccatgaagtgtattcttagc

SEQ ID NO: 126703 - DNA, 33 bp, Homo sapien
aatctggcaggcaagaatattggtcttggttct

SEQ ID NO: 126704 - DNA, 33 bp, Homo sapien
aatctggcaggcaagagtattggtcttggttct

SEQ ID NO: 126705 - DNA, 33 bp, Homo sapien
ctagctacaattcagaagttcatacaggtccag

SEQ ID NO: 126706 - DNA, 33 bp, Homo sapien
ctagctacaattcagaggttcatacaggtccag

SEQ ID NO: 126707 - DNA, 33 bp, Homo sapien
gtgtagacacaattcaaccaaattccttgccac

SEQ ID NO: 126708 - DNA, 33 bp, Homo sapien
gtgtagacacaattcagccaaattccttgccac

SEQ ID NO: 126709 - DNA, 33 bp, Homo sapien
ttggaaagtggagtaaagaccagccttgttatg

SEQ ID NO: 126710 - DNA, 33 bp, Homo sapien
ttggaaagtggagtaaggaccagccttgttatg

SEQ ID NO: 126711 - DNA, 33 bp, Homo sapien
tccactcttttcatctaaagtgccatcacctca

SEQ ID NO: 126712 - DNA, 33 bp, Homo sapien
tccactcttttcatctgaagtgccatcacctca

SEQ ID NO: 126713 - DNA, 33 bp, Homo sapien
gttgtgtgctttaaacgcaaactttagtgtgtg

SEQ ID NO: 126714 - DNA, 33 bp, Homo sapien
gttgtgtgctttaaactcaaactttagtgtgtg

SEQ ID NO: 126715 - DNA, 33 bp, Homo sapien
aaagtgggcggcacaccgagggtgctctctcct

SEQ ID NO: 126716 - DNA, 33 bp, Homo sapien
aaagtgggcggcacactgagggtgctctctcct

SEQ ID NO: 126717 - DNA, 33 bp, Homo sapien
cgacaggggaacaaacaatgcttacagccgtat

SEQ ID NO: 126718 - DNA, 33 bp, Homo sapien
cgacaggggaacaaaccatgcttacagccgtat

SEQ ID NO: 126719 - DNA, 33 bp, Homo sapien
ttggaggctacagtaaactacgactgtgccact

SEQ ID NO: 126720 - DNA, 33 bp, Homo sapien
ttggaggctacagtaagctacgactgtgccact

SEQ ID NO: 126721 - DNA, 33 bp, Homo sapien
agcaacctggaagctcaccaaacttcatcaggt

SEQ ID NO: 126722 - DNA, 33 bp, Homo sapien
agcaacctggaagctcgccaaacttcatcaggt

SEQ ID NO: 126723 - DNA, 33 bp, Homo sapien
ccatgctacctaattaccaaaatctttattgag

SEQ ID NO: 126724 - DNA, 33 bp, Homo sapien
ccatgctacctaattatcaaaatctttattgag

SEQ ID NO: 126725 - DNA, 33 bp, Homo sapien
ttagaataggtagtgaaacactttggaaaacaa

SEQ ID NO: 126726 - DNA, 33 bp, Homo sapien
ttagaataggtagtgacacactttggaaaacaa

SEQ ID NO: 126727 - DNA, 33 bp, Homo sapien
attcctagcctctgtaactgtgagaaataaatt

SEQ ID NO: 126728 - DNA, 33 bp, Homo sapien
attcctagcctctgtatctgtgagaaataaatt

SEQ ID NO: 126729 - DNA, 33 bp, Homo sapien
gcagggtgattctaacactggagttcatgttca

SEQ ID NO: 126730 - DNA, 33 bp, Homo sapien
gcagggtgattctaactctggagttcatgttca

SEQ ID NO: 126731 - DNA, 33 bp, Homo sapien
cttagtcttctaaacaatcccataaggtagata

SEQ ID NO: 126732 - DNA, 33 bp, Homo sapien
cttagtcttctaaacagtcccataaggtagata

SEQ ID NO: 126733 - DNA, 33 bp, Homo sapien
atggcttgcccaatataatagagctgccaagta

SEQ ID NO: 126734 - DNA, 33 bp, Homo sapien
atggcttgcccaatatcatagagctgccaagta

SEQ ID NO: 126735 - DNA, 33 bp, Homo sapien
agggtacagtaaggacaggcaaagggtctgagc

SEQ ID NO: 126736 - DNA, 33 bp, Homo sapien
agggtacagtaaggacgggcaaagggtctgagc

SEQ ID NO: 126737 - DNA, 33 bp, Homo sapien
gactccagaagaagggcagcagctgttggagat

SEQ ID NO: 126738 - DNA, 33 bp, Homo sapien
gactccagaagaagggtagcagctgttggagat

SEQ ID NO: 126739 - DNA, 33 bp, Homo sapien
caaataggctgaagtgcaatcatctaatagctg

SEQ ID NO: 126740 - DNA, 33 bp, Homo sapien
caaataggctgaagtgtaatcatctaatagctg

SEQ ID NO: 126741 - DNA, 33 bp, Homo sapien
ccgcattggtccctcccatatatattttcaaat

SEQ ID NO: 126742 - DNA, 33 bp, Homo sapien
ccgcattggtccctcctatatatattttcaaat

SEQ ID NO: 126743 - DNA, 33 bp, Homo sapien
tttatctacaggataaaatgaaaaaatagaggc

SEQ ID NO: 126744 - DNA, 33 bp, Homo sapien
tttatctacaggataagatgaaaaaatagaggc

SEQ ID NO: 126745 - DNA, 33 bp, Homo sapien
acagaaagtagaaatggcatagcatatgccatc

SEQ ID NO: 126746 - DNA, 33 bp, Homo sapien
acagaaagtagaaatgtcatagcatatgccatc

SEQ ID NO: 126747 - DNA, 33 bp, Homo sapien
ctgtaccaatggcagagatcaacacatgaccac

SEQ ID NO: 126748 - DNA, 33 bp, Homo sapien
ctgtaccaatggcagatatcaacacatgaccac

SEQ ID NO: 126749 - DNA, 33 bp, Homo sapien
gccactactaagcaacgggaattcacactgtag

SEQ ID NO: 126750 - DNA, 33 bp, Homo sapien
gccactactaagcaactggaattcacactgtag

SEQ ID NO: 126751 - DNA, 33 bp, Homo sapien
gattaacagtctgtcccaccgatacctaaacta

SEQ ID NO: 126752 - DNA, 33 bp, Homo sapien
gattaacagtctgtcctaccgatacctaaacta

SEQ ID NO: 126753 - DNA, 33 bp, Homo sapien
cagtcatagaaacaagacccattcaattggaag

SEQ ID NO: 126754 - DNA, 33 bp, Homo sapien
cagtcatagaaacaagtcccattcaattggaag

SEQ ID NO: 126755 - DNA, 33 bp, Homo sapien
tggataatattgtggacgcaggacctaccctcc

SEQ ID NO: 126756 - DNA, 33 bp, Homo sapien
tggataatattgtggatgcaggacctaccctcc

SEQ ID NO: 126757 - DNA, 33 bp, Homo sapien
acatttttaaagtagaataacgcaatattaata

SEQ ID NO: 126758 - DNA, 33 bp, Homo sapien
acatttttaaagtagagtaacgcaatattaata

SEQ ID NO: 126759 - DNA, 33 bp, Homo sapien
cagcaataaccaggaacgaatgaaaaatagaaa

SEQ ID NO: 126760 - DNA, 33 bp, Homo sapien
cagcaataaccaggaatgaatgaaaaatagaaa

SEQ ID NO: 126761 - DNA, 33 bp, Homo sapien
tgaaatggctctgcaaagctgtctcctgtgggg

SEQ ID NO: 126762 - DNA, 33 bp, Homo sapien
tgaaatggctctgcaacgctgtctcctgtgggg

SEQ ID NO: 126763 - DNA, 33 bp, Homo sapien
tctcttatcagacctgaaaaggtattatgtaag

SEQ ID NO: 126764 - DNA, 33 bp, Homo sapien
tctcttatcagacctggaaaggtattatgtaag

SEQ ID NO: 126765 - DNA, 33 bp, Homo sapien
gttgttccctgtacctaaattctctcttctcca

SEQ ID NO: 126766 - DNA, 33 bp, Homo sapien
gttgttccctgtacctgaattctctcttctcca

SEQ ID NO: 126767 - DNA, 33 bp, Homo sapien
agtttcaaagtctggacagctgtagaactattt

SEQ ID NO: 126768 - DNA, 33 bp, Homo sapien
agtttcaaagtctggatagctgtagaactattt

SEQ ID NO: 126769 - DNA, 33 bp, Homo sapien
ttgcctattgctaatagagtaaaagccacaata

SEQ ID NO: 126770 - DNA, 33 bp, Homo sapien
ttgcctattgctaatatagtaaaagccacaata

SEQ ID NO: 126771 - DNA, 33 bp, Homo sapien
acattccatatcctaacgaacagttttaagcta

SEQ ID NO: 126772 - DNA, 33 bp, Homo sapien
acattccatatcctaatgaacagttttaagcta

SEQ ID NO: 126773 - DNA, 33 bp, Homo sapien
tgctcaatctcagggaactgtcaaatggttctg

SEQ ID NO: 126774 - DNA, 33 bp, Homo sapien
tgctcaatctcagggatctgtcaaatggttctg

SEQ ID NO: 126775 - DNA, 33 bp, Homo sapien
aacaccaaagatttaaatgtaaaggaactcaag

SEQ ID NO: 126776 - DNA, 33 bp, Homo sapien
aacaccaaagatttaagtgtaaaggaactcaag

SEQ ID NO: 126777 - DNA, 33 bp, Homo sapien
ccatgagctgaaaatactaaatagaaattccag

SEQ ID NO: 126778 - DNA, 33 bp, Homo sapien
ccatgagctgaaaatagtaaatagaaattccag

SEQ ID NO: 126779 - DNA, 33 bp, Homo sapien
ccctgataccatgacacgtgatctgataattga

SEQ ID NO: 126780 - DNA, 33 bp, Homo sapien
ccctgataccatgacaggtgatctgataattga

SEQ ID NO: 126781 - DNA, 33 bp, Homo sapien
aattttcaataaggtaaggacagtttttccact

SEQ ID NO: 126782 - DNA, 33 bp, Homo sapien
aattttcaataaggtagggacagtttttccact

SEQ ID NO: 126783 - DNA, 33 bp, Homo sapien
ttttaacacaggtggaatatcagaaaaatgtag

SEQ ID NO: 126784 - DNA, 33 bp, Homo sapien
ttttaacacaggtggagtatcagaaaaatgtag

SEQ ID NO: 126785 - DNA, 33 bp, Homo sapien
tcaatgtagtaaaaaacctcaggcatctttaat

SEQ ID NO: 126786 - DNA, 33 bp, Homo sapien
tcaatgtagtaaaaaatctcaggcatctttaat

SEQ ID NO: 126787 - DNA, 33 bp, Homo sapien
ctttttttttgctgtcaatcattatttcatgtt

SEQ ID NO: 126788 - DNA, 33 bp, Homo sapien
ctttttttttgctgtcgatcattatttcatgtt

SEQ ID NO: 126789 - DNA, 33 bp, Homo sapien
aaaaatcagaaagccaactgtattattaaaaaa

SEQ ID NO: 126790 - DNA, 33 bp, Homo sapien
aaaaatcagaaagccatctgtattattaaaaaa

SEQ ID NO: 126791 - DNA, 33 bp, Homo sapien
ccaaccaacataaaacacacaataaacaaaacc

SEQ ID NO: 126792 - DNA, 33 bp, Homo sapien
ccaaccaacataaaacgcacaataaacaaaacc

SEQ ID NO: 126793 - DNA, 33 bp, Homo sapien
ctattaattagaaaagactatgctagttcaaga

SEQ ID NO: 126794 - DNA, 33 bp, Homo sapien
ctattaattagaaaaggctatgctagttcaaga

SEQ ID NO: 126795 - DNA, 33 bp, Homo sapien
attcacgggaagaaagaagggttagatgagaat

SEQ ID NO: 126796 - DNA, 33 bp, Homo sapien
attcacgggaagaaaggagggttagatgagaat

SEQ ID NO: 126797 - DNA, 33 bp, Homo sapien
ggcagaatcaatccaaacctccaaattcatgca

SEQ ID NO: 126798 - DNA, 33 bp, Homo sapien
ggcagaatcaatccaagcctccaaattcatgca

SEQ ID NO: 126799 - DNA, 33 bp, Homo sapien
ctctccttttttgggcaccatttatcatccaaa

SEQ ID NO: 126800 - DNA, 33 bp, Homo sapien
ctctccttttttgggcgccatttatcatccaaa

SEQ ID NO: 126801 - DNA, 33 bp, Homo sapien
gctccctatcagattacagagtccaggacctag

SEQ ID NO: 126802 - DNA, 33 bp, Homo sapien
gctccctatcagattatagagtccaggacctag

SEQ ID NO: 126803 - DNA, 33 bp, Homo sapien
ctaagttatacatgaccctaatgctgtttggag

SEQ ID NO: 126804 - DNA, 33 bp, Homo sapien
ctaagttatacatgactctaatgctgtttggag

SEQ ID NO: 126805 - DNA, 33 bp, Homo sapien
acaagaacagtcacaaagctattaaataaaatt

SEQ ID NO: 126806 - DNA, 33 bp, Homo sapien
acaagaacagtcacaaggctattaaataaaatt

SEQ ID NO: 126807 - DNA, 33 bp, Homo sapien
ctctaggaaggattaacgatttttgtttttggc

SEQ ID NO: 126808 - DNA, 33 bp, Homo sapien
ctctaggaaggattaatgatttttgtttttggc

SEQ ID NO: 126809 - DNA, 33 bp, Homo sapien
tggatctccagagtcacaaagtagaaatcttca

SEQ ID NO: 126810 - DNA, 33 bp, Homo sapien
tggatctccagagtcataaagtagaaatcttca

SEQ ID NO: 126811 - DNA, 33 bp, Homo sapien
atcaccatcctagagcaaaaaatttcacattag

SEQ ID NO: 126812 - DNA, 33 bp, Homo sapien
atcaccatcctagagcgaaaaatttcacattag

SEQ ID NO: 126813 - DNA, 33 bp, Homo sapien
tgagtaccttttcatacaccattggccattgga

SEQ ID NO: 126814 - DNA, 33 bp, Homo sapien
tgagtaccttttcatataccattggccattgga

SEQ ID NO: 126815 - DNA, 33 bp, Homo sapien
tagaaatagaatggcccggatgaaatatttttg

SEQ ID NO: 126816 - DNA, 33 bp, Homo sapien
tagaaatagaatggcctggatgaaatatttttg

SEQ ID NO: 126817 - DNA, 33 bp, Homo sapien
actttcactttttatccactggactaaatagaa

SEQ ID NO: 126818 - DNA, 33 bp, Homo sapien
actttcactttttatctactggactaaatagaa

SEQ ID NO: 126819 - DNA, 33 bp, Homo sapien
cttcccatcaattcacaccatttcacaaattta

SEQ ID NO: 126820 - DNA, 33 bp, Homo sapien
cttcccatcaattcactccatttcacaaattta

SEQ ID NO: 126821 - DNA, 33 bp, Homo sapien
gccatggtagtttcaccatgataaagtcctcaa

SEQ ID NO: 126822 - DNA, 33 bp, Homo sapien
gccatggtagtttcactatgataaagtcctcaa

SEQ ID NO: 126823 - DNA, 33 bp, Homo sapien
caaagaatgccttccgcagggccgactcatcca

SEQ ID NO: 126824 - DNA, 33 bp, Homo sapien
caaagaatgccttccgtagggccgactcatcca

SEQ ID NO: 126825 - DNA, 33 bp, Homo sapien
ttatcgataaggatccaagaatattgatggcta

SEQ ID NO: 126826 - DNA, 33 bp, Homo sapien
ttatcgataaggatcccagaatattgatggcta

SEQ ID NO: 126827 - DNA, 33 bp, Homo sapien
gatgaccttctcttccactatgtcatctccttt

SEQ ID NO: 126828 - DNA, 33 bp, Homo sapien
gatgaccttctcttcctctatgtcatctccttt

SEQ ID NO: 126829 - DNA, 33 bp, Homo sapien
attctgtccatcaaaaacagggatctgctgacc

SEQ ID NO: 126830 - DNA, 33 bp, Homo sapien
attctgtccatcaaaagcagggatctgctgacc

SEQ ID NO: 126831 - DNA, 33 bp, Homo sapien
gcacatacattgctgagcataacacaaactacc

SEQ ID NO: 126832 - DNA, 33 bp, Homo sapien
gcacatacattgctgatcataacacaaactacc

SEQ ID NO: 126833 - DNA, 33 bp, Homo sapien
cacaaggaagattataccaaaggcacttagatc

SEQ ID NO: 126834 - DNA, 33 bp, Homo sapien
cacaaggaagattatatcaaaggcacttagatc

SEQ ID NO: 126835 - DNA, 33 bp, Homo sapien
cacagtaggaaggaaacttgtttatacagcatc

SEQ ID NO: 126836 - DNA, 33 bp, Homo sapien
cacagtaggaaggaaatttgtttatacagcatc

SEQ ID NO: 126837 - DNA, 33 bp, Homo sapien
tgacagaagagcttcaacgtatttttctttcca

SEQ ID NO: 126838 - DNA, 33 bp, Homo sapien
tgacagaagagcttcaccgtatttttctttcca

SEQ ID NO: 126839 - DNA, 33 bp, Homo sapien
tacccctaagggtatacgtgttggagtcctcgg

SEQ ID NO: 126840 - DNA, 33 bp, Homo sapien
tacccctaagggtatatgtgttggagtcctcgg

SEQ ID NO: 126841 - DNA, 33 bp, Homo sapien
tgactgccatttcatacataagaaattagaggc

SEQ ID NO: 126842 - DNA, 33 bp, Homo sapien
tgactgccatttcatagataagaaattagaggc

SEQ ID NO: 126843 - DNA, 33 bp, Homo sapien
tacacggaaaattgggaaactacagaaaaccac

SEQ ID NO: 126844 - DNA, 33 bp, Homo sapien
tacacggaaaattgggtaactacagaaaaccac

SEQ ID NO: 126845 - DNA, 33 bp, Homo sapien
agctatacattttttacgctctgagaaagatat

SEQ ID NO: 126846 - DNA, 33 bp, Homo sapien
agctatacattttttatgctctgagaaagatat

SEQ ID NO: 126847 - DNA, 33 bp, Homo sapien
taaacaatctctccacacttttgtcttctgagg

SEQ ID NO: 126848 - DNA, 33 bp, Homo sapien
taaacaatctctccacgcttttgtcttctgagg

SEQ ID NO: 126849 - DNA, 33 bp, Homo sapien
tatacacacctatagccaccatcttagtcaaga

SEQ ID NO: 126850 - DNA, 33 bp, Homo sapien
tatacacacctatagctaccatcttagtcaaga

SEQ ID NO: 126851 - DNA, 33 bp, Homo sapien
acattctggtgctttacaattctcatctgtgtc

SEQ ID NO: 126852 - DNA, 33 bp, Homo sapien
acattctggtgctttataattctcatctgtgtc

SEQ ID NO: 126853 - DNA, 33 bp, Homo sapien
tcctgttcagagaaaactggggactcacaaacc

SEQ ID NO: 126854 - DNA, 33 bp, Homo sapien
tcctgttcagagaaaattggggactcacaaacc

SEQ ID NO: 126855 - DNA, 33 bp, Homo sapien
gattagcatgtcacagaagcaaaagtacttttc

SEQ ID NO: 126856 - DNA, 33 bp, Homo sapien
gattagcatgtcacagtagcaaaagtacttttc

SEQ ID NO: 126857 - DNA, 33 bp, Homo sapien
gcatcaatcacttgtacattattttgattgcca

SEQ ID NO: 126858 - DNA, 33 bp, Homo sapien
gcatcaatcacttgtatattattttgattgcca

SEQ ID NO: 126859 - DNA, 33 bp, Homo sapien
cctcacagattgaacaaaattgccaaattgacc

SEQ ID NO: 126860 - DNA, 33 bp, Homo sapien
cctcacagattgaacacaattgccaaattgacc

SEQ ID NO: 126861 - DNA, 33 bp, Homo sapien
ggacagccaagcattcaatgtcttcagcttcac

SEQ ID NO: 126862 - DNA, 33 bp, Homo sapien
ggacagccaagcattcgatgtcttcagcttcac

SEQ ID NO: 126863 - DNA, 33 bp, Homo sapien
acatcaaattgattcaaagctataaccttactg

SEQ ID NO: 126864 - DNA, 33 bp, Homo sapien
acatcaaattgattcatagctataaccttactg

SEQ ID NO: 126865 - DNA, 33 bp, Homo sapien
ccaagaagcttacaaaaggtaggtaacataagt

SEQ ID NO: 126866 - DNA, 33 bp, Homo sapien
ccaagaagcttacaaacggtaggtaacataagt

SEQ ID NO: 126867 - DNA, 33 bp, Homo sapien
tctttgaactgagggagctgaacgactccttgg

SEQ ID NO: 126868 - DNA, 33 bp, Homo sapien
tctttgaactgagggatctgaacgactccttgg

SEQ ID NO: 126869 - DNA, 33 bp, Homo sapien
tggaaagtgaagacaaattcaatcaatcatcag

SEQ ID NO: 126870 - DNA, 33 bp, Homo sapien
tggaaagtgaagacaagttcaatcaatcatcag

SEQ ID NO: 126871 - DNA, 33 bp, Homo sapien
tatgacatagtgaatacgaaagcatctggaagt

SEQ ID NO: 126872 - DNA, 33 bp, Homo sapien
tatgacatagtgaatatgaaagcatctggaagt

SEQ ID NO: 126873 - DNA, 33 bp, Homo sapien
caataacaaaaagtcaaataagtccagtgcaat

SEQ ID NO: 126874 - DNA, 33 bp, Homo sapien
caataacaaaaagtcagataagtccagtgcaat

SEQ ID NO: 126875 - DNA, 33 bp, Homo sapien
agcctatttctcactaaacacatatcgtcgttt

SEQ ID NO: 126876 - DNA, 33 bp, Homo sapien
agcctatttctcactacacacatatcgtcgttt

SEQ ID NO: 126877 - DNA, 33 bp, Homo sapien
ggttaaatctccttccaatgcataggtctattc

SEQ ID NO: 126878 - DNA, 33 bp, Homo sapien
ggttaaatctccttccgatgcataggtctattc

SEQ ID NO: 126879 - DNA, 33 bp, Homo sapien
aagctaaaaaggtattcaacaggcaaggaaaga

SEQ ID NO: 126880 - DNA, 33 bp, Homo sapien
aagctaaaaaggtatttaacaggcaaggaaaga

SEQ ID NO: 126881 - DNA, 33 bp, Homo sapien
aaagagcagggattgcgattcttatatcaaaaa

SEQ ID NO: 126882 - DNA, 33 bp, Homo sapien
aaagagcagggattgctattcttatatcaaaaa

SEQ ID NO: 126883 - DNA, 33 bp, Homo sapien
acaaagaatcaacaaaacccaaagttggttctt

SEQ ID NO: 126884 - DNA, 33 bp, Homo sapien
acaaagaatcaacaaaccccaaagttggttctt

SEQ ID NO: 126885 - DNA, 33 bp, Homo sapien
aacaaaggaaaaagaggagatccaaataagcac

SEQ ID NO: 126886 - DNA, 33 bp, Homo sapien
aacaaaggaaaaagagtagatccaaataagcac

SEQ ID NO: 126887 - DNA, 33 bp, Homo sapien
acattttcttcatccaactgaacattgatgagt

SEQ ID NO: 126888 - DNA, 33 bp, Homo sapien
acattttcttcatccagctgaacattgatgagt

SEQ ID NO: 126889 - DNA, 33 bp, Homo sapien
tctttcatagcacctaagttattcatcttggat

SEQ ID NO: 126890 - DNA, 33 bp, Homo sapien
tctttcatagcacctacgttattcatcttggat

SEQ ID NO: 126891 - DNA, 33 bp, Homo sapien
gccaggcaggtctccaagcacctgaagcaccca

SEQ ID NO: 126892 - DNA, 33 bp, Homo sapien
gccaggcaggtctccaggcacctgaagcaccca

SEQ ID NO: 126893 - DNA, 33 bp, Homo sapien
agtgcagttgagattacgaaaagggaagagatg

SEQ ID NO: 126894 - DNA, 33 bp, Homo sapien
agtgcagttgagattatgaaaagggaagagatg

SEQ ID NO: 126895 - DNA, 33 bp, Homo sapien
ggaaattcttcattcactcaactcagtattctt

SEQ ID NO: 126896 - DNA, 33 bp, Homo sapien
ggaaattcttcattcagtcaactcagtattctt

SEQ ID NO: 126897 - DNA, 33 bp, Homo sapien
cgtctcatgagaaaacccactatgtgaactccc

SEQ ID NO: 126898 - DNA, 33 bp, Homo sapien
cgtctcatgagaaaacgcactatgtgaactccc

SEQ ID NO: 126899 - DNA, 33 bp, Homo sapien
tgaggtattgtgaggaggggctataagtgagtc

SEQ ID NO: 126900 - DNA, 33 bp, Homo sapien
tgaggtattgtgaggatgggctataagtgagtc

SEQ ID NO: 126901 - DNA, 33 bp, Homo sapien
ctgtcttaattactcaatgactgttcaaagaaa

SEQ ID NO: 126902 - DNA, 33 bp, Homo sapien
ctgtcttaattactcagtgactgttcaaagaaa

SEQ ID NO: 126903 - DNA, 33 bp, Homo sapien
atattcattgaaggcccatgttctctataatta

SEQ ID NO: 126904 - DNA, 33 bp, Homo sapien
atattcattgaaggcctatgttctctataatta

SEQ ID NO: 126905 - DNA, 33 bp, Homo sapien
ttttcaatgcgtgttacaactttattcaaatct

SEQ ID NO: 126906 - DNA, 33 bp, Homo sapien
ttttcaatgcgtgttagaactttattcaaatct

SEQ ID NO: 126907 - DNA, 33 bp, Homo sapien
ttttgctgaggcctacacagagctatctcttct

SEQ ID NO: 126908 - DNA, 33 bp, Homo sapien
ttttgctgaggcctacgcagagctatctcttct

SEQ ID NO: 126909 - DNA, 33 bp, Homo sapien
aggtctgtgaggtagaacctaaactatgacaat

SEQ ID NO: 126910 - DNA, 33 bp, Homo sapien
aggtctgtgaggtagatcctaaactatgacaat

SEQ ID NO: 126911 - DNA, 33 bp, Homo sapien
caagtgatagttatcacctctcaggcaatagtg

SEQ ID NO: 126912 - DNA, 33 bp, Homo sapien
caagtgatagttatcatctctcaggcaatagtg

SEQ ID NO: 126913 - DNA, 33 bp, Homo sapien
aactggcactcaaatcacaagacattgtctttc

SEQ ID NO: 126914 - DNA, 33 bp, Homo sapien
aactggcactcaaatcgcaagacattgtctttc

SEQ ID NO: 126915 - DNA, 33 bp, Homo sapien
caagtcattcgtctgacgcaactgatatatctg

SEQ ID NO: 126916 - DNA, 33 bp, Homo sapien
caagtcattcgtctgatgcaactgatatatctg

SEQ ID NO: 126917 - DNA, 33 bp, Homo sapien
ctggaagaaaaatgagaatgtagaaacacaaat

SEQ ID NO: 126918 - DNA, 33 bp, Homo sapien
ctggaagaaaaatgaggatgtagaaacacaaat

SEQ ID NO: 126919 - DNA, 33 bp, Homo sapien
gatagaatctgaactcacctttttcccttttct

SEQ ID NO: 126920 - DNA, 33 bp, Homo sapien
gatagaatctgaactcgcctttttcccttttct

SEQ ID NO: 126921 - DNA, 33 bp, Homo sapien
aatcatttatgctgaacctgttggtggctttgt

SEQ ID NO: 126922 - DNA, 33 bp, Homo sapien
aatcatttatgctgaatctgttggtggctttgt

SEQ ID NO: 126923 - DNA, 33 bp, Homo sapien
agccaaggtcttcagtaaacatgatgagtgata

SEQ ID NO: 126924 - DNA, 33 bp, Homo sapien
agccaaggtcttcagtgaacatgatgagtgata

SEQ ID NO: 126925 - DNA, 33 bp, Homo sapien
gctttccacttaggggaccaagattaaagatga

SEQ ID NO: 126926 - DNA, 33 bp, Homo sapien
gctttccacttaggggtccaagattaaagatga

SEQ ID NO: 126927 - DNA, 33 bp, Homo sapien
accttagtgtcctatccaccttcttgggtcaat

SEQ ID NO: 126928 - DNA, 33 bp, Homo sapien
accttagtgtcctatctaccttcttgggtcaat

SEQ ID NO: 126929 - DNA, 33 bp, Homo sapien
tattatatattattcccgatagatttctgcaca

SEQ ID NO: 126930 - DNA, 33 bp, Homo sapien
tattatatattattcctgatagatttctgcaca

SEQ ID NO: 126931 - DNA, 33 bp, Homo sapien
cctctctcctagcctacaacagtgcattgctca

SEQ ID NO: 126932 - DNA, 33 bp, Homo sapien
cctctctcctagcctagaacagtgcattgctca

SEQ ID NO: 126933 - DNA, 33 bp, Homo sapien
gcttcatctagtctcaaatccttccattaatgc

SEQ ID NO: 126934 - DNA, 33 bp, Homo sapien
gcttcatctagtctcatatccttccattaatgc

SEQ ID NO: 126935 - DNA, 33 bp, Homo sapien
aataggctacaagttacgctaaatctttggaat

SEQ ID NO: 126936 - DNA, 33 bp, Homo sapien
aataggctacaagttatgctaaatctttggaat

SEQ ID NO: 126937 - DNA, 33 bp, Homo sapien
cttacgtcttaaaaacacatacttcctcaaagt

SEQ ID NO: 126938 - DNA, 33 bp, Homo sapien
cttacgtcttaaaaacgcatacttcctcaaagt

SEQ ID NO: 126939 - DNA, 33 bp, Homo sapien
attcagcaacttgccgacagaattttgtgactg

SEQ ID NO: 126940 - DNA, 33 bp, Homo sapien
attcagcaacttgccggcagaattttgtgactg

SEQ ID NO: 126941 - DNA, 33 bp, Homo sapien
aatacgagtagctgcactattctgctagaacct

SEQ ID NO: 126942 - DNA, 33 bp, Homo sapien
aatacgagtagctgcattattctgctagaacct

SEQ ID NO: 126943 - DNA, 33 bp, Homo sapien
caacacaattatttcaggcaggaaaatgcctga

SEQ ID NO: 126944 - DNA, 33 bp, Homo sapien
caacacaattatttcatgcaggaaaatgcctga

SEQ ID NO: 126945 - DNA, 33 bp, Homo sapien
cctttttgttaagcacacttctctgttctacat

SEQ ID NO: 126946 - DNA, 33 bp, Homo sapien
cctttttgttaagcacgcttctctgttctacat

SEQ ID NO: 126947 - DNA, 33 bp, Homo sapien
tttacacatagctggcaaccatgacccttttca

SEQ ID NO: 126948 - DNA, 33 bp, Homo sapien
tttacacatagctggcgaccatgacccttttca

SEQ ID NO: 126949 - DNA, 33 bp, Homo sapien
tgaattactggatactcaagcacaactacctaa

SEQ ID NO: 126950 - DNA, 33 bp, Homo sapien
tgaattactggatacttaagcacaactacctaa

SEQ ID NO: 126951 - DNA, 33 bp, Homo sapien
tgggtgctatgctaatcacttggcttatgaaac

SEQ ID NO: 126952 - DNA, 33 bp, Homo sapien
tgggtgctatgctaattacttggcttatgaaac

SEQ ID NO: 126953 - DNA, 33 bp, Homo sapien
agatgatgcatttctcagaatgtgtccccacat

SEQ ID NO: 126954 - DNA, 33 bp, Homo sapien
agatgatgcatttctcggaatgtgtccccacat

SEQ ID NO: 126955 - DNA, 33 bp, Homo sapien
tacttttagcagtcacagaccccaagcccaaac

SEQ ID NO: 126956 - DNA, 33 bp, Homo sapien
tacttttagcagtcacggaccccaagcccaaac

SEQ ID NO: 126957 - DNA, 33 bp, Homo sapien
acagtcacaacctcaacagaatggctgacagat

SEQ ID NO: 126958 - DNA, 33 bp, Homo sapien
acagtcacaacctcaatagaatggctgacagat

SEQ ID NO: 126959 - DNA, 33 bp, Homo sapien
gagaccagcaaaagggacaattgattcattctt

SEQ ID NO: 126960 - DNA, 33 bp, Homo sapien
gagaccagcaaaaggggcaattgattcattctt

SEQ ID NO: 126961 - DNA, 33 bp, Homo sapien
tttaccacactcagaaagtataataagaataag

SEQ ID NO: 126962 - DNA, 33 bp, Homo sapien
tttaccacactcagaaggtataataagaataag

SEQ ID NO: 126963 - DNA, 33 bp, Homo sapien
tgtggcatgatagatgcagcactatccgaaatt

SEQ ID NO: 126964 - DNA, 33 bp, Homo sapien
tgtggcatgatagatggagcactatccgaaatt

SEQ ID NO: 126965 - DNA, 33 bp, Homo sapien
tgagtttgaccaatcacgtagaggaatacaact

SEQ ID NO: 126966 - DNA, 33 bp, Homo sapien
tgagtttgaccaatcatgtagaggaatacaact

SEQ ID NO: 126967 - DNA, 33 bp, Homo sapien
aatacctaatcaatcaataagtgtttgtctggc

SEQ ID NO: 126968 - DNA, 33 bp, Homo sapien
aatacctaatcaatcagtaagtgtttgtctggc

SEQ ID NO: 126969 - DNA, 33 bp, Homo sapien
atttcaagacccttccacattctgacctctctg

SEQ ID NO: 126970 - DNA, 33 bp, Homo sapien
atttcaagacccttccgcattctgacctctctg

SEQ ID NO: 126971 - DNA, 33 bp, Homo sapien
tccctcaaagagatcacaagagacttccccagt

SEQ ID NO: 126972 - DNA, 33 bp, Homo sapien
tccctcaaagagatcataagagacttccccagt

SEQ ID NO: 126973 - DNA, 33 bp, Homo sapien
tcagtaaggaaaggcaatgattcttaatctggg

SEQ ID NO: 126974 - DNA, 33 bp, Homo sapien
tcagtaaggaaaggcagtgattcttaatctggg

SEQ ID NO: 126975 - DNA, 33 bp, Homo sapien
agtggtgaattgatccagcttgacttattacat

SEQ ID NO: 126976 - DNA, 33 bp, Homo sapien
agtggtgaattgatccggcttgacttattacat

SEQ ID NO: 126977 - DNA, 33 bp, Homo sapien
ccacctcagaataagcacacagaaagataaata

SEQ ID NO: 126978 - DNA, 33 bp, Homo sapien
ccacctcagaataagcgcacagaaagataaata

SEQ ID NO: 126979 - DNA, 33 bp, Homo sapien
aaagatatgtacatcaacattggataactgggc

SEQ ID NO: 126980 - DNA, 33 bp, Homo sapien
aaagatatgtacatcagcattggataactgggc

SEQ ID NO: 126981 - DNA, 33 bp, Homo sapien
ccttgctgctaacttacagtccagtaatgtaag

SEQ ID NO: 126982 - DNA, 33 bp, Homo sapien
ccttgctgctaacttagagtccagtaatgtaag

SEQ ID NO: 126983 - DNA, 33 bp, Homo sapien
ggaatatagattgggaaacagaaaattcaaggc

SEQ ID NO: 126984 - DNA, 33 bp, Homo sapien
ggaatatagattgggagacagaaaattcaaggc

SEQ ID NO: 126985 - DNA, 33 bp, Homo sapien
gaattctgagaaaacactcctaggtcttagaac

SEQ ID NO: 126986 - DNA, 33 bp, Homo sapien
gaattctgagaaaacattcctaggtcttagaac

SEQ ID NO: 126987 - DNA, 33 bp, Homo sapien
caaaaagaatcctcaacgtgtgaaagccacata

SEQ ID NO: 126988 - DNA, 33 bp, Homo sapien
caaaaagaatcctcaatgtgtgaaagccacata

SEQ ID NO: 126989 - DNA, 33 bp, Homo sapien
caagttttgatcccagcattaagttgcctcttg

SEQ ID NO: 126990 - DNA, 33 bp, Homo sapien
caagttttgatcccagtattaagttgcctcttg

SEQ ID NO: 126991 - DNA, 33 bp, Homo sapien
actagcattactctaacacatgaagcaccaagt

SEQ ID NO: 126992 - DNA, 33 bp, Homo sapien
actagcattactctaatacatgaagcaccaagt

SEQ ID NO: 126993 - DNA, 33 bp, Homo sapien
caaaatactttcactgcacagatatatggggga

SEQ ID NO: 126994 - DNA, 33 bp, Homo sapien
caaaatactttcactggacagatatatggggga

SEQ ID NO: 126995 - DNA, 33 bp, Homo sapien
tttatcctcatggttacaacacatcaagaaaga

SEQ ID NO: 126996 - DNA, 33 bp, Homo sapien
tttatcctcatggttataacacatcaagaaaga

SEQ ID NO: 126997 - DNA, 33 bp, Homo sapien
agaaaagtgggtttaactggagagacagcaaac

SEQ ID NO: 126998 - DNA, 33 bp, Homo sapien
agaaaagtgggtttaattggagagacagcaaac

SEQ ID NO: 126999 - DNA, 33 bp, Homo sapien
attctgcaaatagagcaattttatattaccaga

SEQ ID NO: 127000 - DNA, 33 bp, Homo sapien
attctgcaaatagagcgattttatattaccaga

SEQ ID NO: 127001 - DNA, 33 bp, Homo sapien
aaatgtagacaactcacaattggataggtccat

SEQ ID NO: 127002 - DNA, 33 bp, Homo sapien
aaatgtagacaactcataattggataggtccat

SEQ ID NO: 127003 - DNA, 33 bp, Homo sapien
attgtctcatgggatcaatcatgtgtatatgta

SEQ ID NO: 127004 - DNA, 33 bp, Homo sapien
attgtctcatgggatcgatcatgtgtatatgta

SEQ ID NO: 127005 - DNA, 33 bp, Homo sapien
tacatatagtagtgtgaaaactcctttctacca

SEQ ID NO: 127006 - DNA, 33 bp, Homo sapien
tacatatagtagtgtggaaactcctttctacca

SEQ ID NO: 127007 - DNA, 33 bp, Homo sapien
tggaatgggtattgagaagggaaaagttatccc

SEQ ID NO: 127008 - DNA, 33 bp, Homo sapien
tggaatgggtattgagcagggaaaagttatccc

SEQ ID NO: 127009 - DNA, 33 bp, Homo sapien
actatggggaaaacagacctactcaaacactga

SEQ ID NO: 127010 - DNA, 33 bp, Homo sapien
actatggggaaaacagtcctactcaaacactga

SEQ ID NO: 127011 - DNA, 33 bp, Homo sapien
agacagttgaagaggtaaaaacagaataaaagg

SEQ ID NO: 127012 - DNA, 33 bp, Homo sapien
agacagttgaagaggtcaaaacagaataaaagg

SEQ ID NO: 127013 - DNA, 33 bp, Homo sapien
caatgttagtgttctacaagggtatgcaaatag

SEQ ID NO: 127014 - DNA, 33 bp, Homo sapien
caatgttagtgttctataagggtatgcaaatag

SEQ ID NO: 127015 - DNA, 33 bp, Homo sapien
cttaccacagtgtagacagagtcatctatctag

SEQ ID NO: 127016 - DNA, 33 bp, Homo sapien
cttaccacagtgtagagagagtcatctatctag

SEQ ID NO: 127017 - DNA, 33 bp, Homo sapien
acctacacaaaggctcaagtaacaaatataggg

SEQ ID NO: 127018 - DNA, 33 bp, Homo sapien
acctacacaaaggctcgagtaacaaatataggg

SEQ ID NO: 127019 - DNA, 33 bp, Homo sapien
ttattatttgacagtacagtatggagactacag

SEQ ID NO: 127020 - DNA, 33 bp, Homo sapien
ttattatttgacagtatagtatggagactacag

SEQ ID NO: 127021 - DNA, 33 bp, Homo sapien
cactgaccagacacaaagcatgcaaattctcct

SEQ ID NO: 127022 - DNA, 33 bp, Homo sapien
cactgaccagacacaaggcatgcaaattctcct

SEQ ID NO: 127023 - DNA, 33 bp, Homo sapien
cttcaaatgcattttcccggaatggttcacata

SEQ ID NO: 127024 - DNA, 33 bp, Homo sapien
cttcaaatgcattttctcggaatggttcacata

SEQ ID NO: 127025 - DNA, 33 bp, Homo sapien
agtctgagaagaaaagaatgcatcacagaaacc

SEQ ID NO: 127026 - DNA, 33 bp, Homo sapien
agtctgagaagaaaagcatgcatcacagaaacc

SEQ ID NO: 127027 - DNA, 33 bp, Homo sapien
gaaactgggtctaaaccactgtggcactctagc

SEQ ID NO: 127028 - DNA, 33 bp, Homo sapien
gaaactgggtctaaactactgtggcactctagc

SEQ ID NO: 127029 - DNA, 33 bp, Homo sapien
ctagttaaagaaaacacatgcaaatggcaggaa

SEQ ID NO: 127030 - DNA, 33 bp, Homo sapien
ctagttaaagaaaacagatgcaaatggcaggaa

SEQ ID NO: 127031 - DNA, 33 bp, Homo sapien
agaccaaaaataaaagaccatcgatcatagaga

SEQ ID NO: 127032 - DNA, 33 bp, Homo sapien
agaccaaaaataaaaggccatcgatcatagaga

SEQ ID NO: 127033 - DNA, 33 bp, Homo sapien
tctgccatagagtgtacagagagtagcctggta

SEQ ID NO: 127034 - DNA, 33 bp, Homo sapien
tctgccatagagtgtatagagagtagcctggta

SEQ ID NO: 127035 - DNA, 33 bp, Homo sapien
gacatttattcaatacaacagtgccatagcaaa

SEQ ID NO: 127036 - DNA, 33 bp, Homo sapien
gacatttattcaataccacagtgccatagcaaa

SEQ ID NO: 127037 - DNA, 33 bp, Homo sapien
ccactctggtttataaaatacctgaaatacctg

SEQ ID NO: 127038 - DNA, 33 bp, Homo sapien
ccactctggtttataagatacctgaaatacctg

SEQ ID NO: 127039 - DNA, 33 bp, Homo sapien
aaatgcaacacaatggaatagcgtaggaaaaga

SEQ ID NO: 127040 - DNA, 33 bp, Homo sapien
aaatgcaacacaatggcatagcgtaggaaaaga

SEQ ID NO: 127041 - DNA, 33 bp, Homo sapien
gggtacagtttttctacgtctcattaatattct

SEQ ID NO: 127042 - DNA, 33 bp, Homo sapien
gggtacagtttttctatgtctcattaatattct

SEQ ID NO: 127043 - DNA, 33 bp, Homo sapien
aattgtaagcccaaaccggagattcagctggag

SEQ ID NO: 127044 - DNA, 33 bp, Homo sapien
aattgtaagcccaaactggagattcagctggag

SEQ ID NO: 127045 - DNA, 33 bp, Homo sapien
agaccttgtaatgccacgctcaggaacttaaat

SEQ ID NO: 127046 - DNA, 33 bp, Homo sapien
agaccttgtaatgccatgctcaggaacttaaat

SEQ ID NO: 127047 - DNA, 33 bp, Homo sapien
attgtagtgggagactaaatagcctgaaataat

SEQ ID NO: 127048 - DNA, 33 bp, Homo sapien
attgtagtgggagactcaatagcctgaaataat

SEQ ID NO: 127049 - DNA, 33 bp, Homo sapien
gggagtggatgctgaaatcatcttcaaaggaga

SEQ ID NO: 127050 - DNA, 33 bp, Homo sapien
gggagtggatgctgaagtcatcttcaaaggaga

SEQ ID NO: 127051 - DNA, 33 bp, Homo sapien
aggagatacatatgaaagttctatgcctttgta

SEQ ID NO: 127052 - DNA, 33 bp, Homo sapien
aggagatacatatgaaggttctatgcctttgta

SEQ ID NO: 127053 - DNA, 33 bp, Homo sapien
gactaattacaggtgacgctcaggaatctatat

SEQ ID NO: 127054 - DNA, 33 bp, Homo sapien
gactaattacaggtgatgctcaggaatctatat

SEQ ID NO: 127055 - DNA, 33 bp, Homo sapien
agtgatttgggggatacggaatagggtacaagt

SEQ ID NO: 127056 - DNA, 33 bp, Homo sapien
agtgatttgggggatatggaatagggtacaagt

SEQ ID NO: 127057 - DNA, 33 bp, Homo sapien
aggttcaaatggaccaagttgtgagcaagttct

SEQ ID NO: 127058 - DNA, 33 bp, Homo sapien
aggttcaaatggaccacgttgtgagcaagttct

SEQ ID NO: 127059 - DNA, 33 bp, Homo sapien
cttaaacgttaataacacagagcatctcctgat

SEQ ID NO: 127060 - DNA, 33 bp, Homo sapien
cttaaacgttaataacccagagcatctcctgat

SEQ ID NO: 127061 - DNA, 33 bp, Homo sapien
gagtaacaggttgcaccgagacatcaccaaagt

SEQ ID NO: 127062 - DNA, 33 bp, Homo sapien
gagtaacaggttgcactgagacatcaccaaagt

SEQ ID NO: 127063 - DNA, 33 bp, Homo sapien
gtccatgttgcttaaaaaacacagtcaatacct

SEQ ID NO: 127064 - DNA, 33 bp, Homo sapien
gtccatgttgcttaaagaacacagtcaatacct

SEQ ID NO: 127065 - DNA, 33 bp, Homo sapien
gagtactattacaaagaaagtgaccagatttga

SEQ ID NO: 127066 - DNA, 33 bp, Homo sapien
gagtactattacaaaggaagtgaccagatttga

SEQ ID NO: 127067 - DNA, 33 bp, Homo sapien
taggtcaaggtcactaagtaaataataatacat

SEQ ID NO: 127068 - DNA, 33 bp, Homo sapien
taggtcaaggtcactaggtaaataataatacat

SEQ ID NO: 127069 - DNA, 33 bp, Homo sapien
ttaatccagatagataatacttggtgcttatta

SEQ ID NO: 127070 - DNA, 33 bp, Homo sapien
ttaatccagatagatagtacttggtgcttatta

SEQ ID NO: 127071 - DNA, 33 bp, Homo sapien
ttcccttcagccaataagtgagtctggttatga

SEQ ID NO: 127072 - DNA, 33 bp, Homo sapien
ttcccttcagccaataggtgagtctggttatga

SEQ ID NO: 127073 - DNA, 33 bp, Homo sapien
cctctcacttcctctacgtcacatactctcctt

SEQ ID NO: 127074 - DNA, 33 bp, Homo sapien
cctctcacttcctctatgtcacatactctcctt

SEQ ID NO: 127075 - DNA, 33 bp, Homo sapien
acagtgacccacttccactcgtgaaaaagcata

SEQ ID NO: 127076 - DNA, 33 bp, Homo sapien
acagtgacccacttcctctcgtgaaaaagcata

SEQ ID NO: 127077 - DNA, 33 bp, Homo sapien
ttcaagtaatgttacccaaaaacaacttatcct

SEQ ID NO: 127078 - DNA, 33 bp, Homo sapien
ttcaagtaatgttacctaaaaacaacttatcct

SEQ ID NO: 127079 - DNA, 33 bp, Homo sapien
aaaaggacatcaacaaatctagatacaaaatga

SEQ ID NO: 127080 - DNA, 33 bp, Homo sapien
aaaaggacatcaacaagtctagatacaaaatga

SEQ ID NO: 127081 - DNA, 33 bp, Homo sapien
ccaatcaactagtctcaagtgcttgaatttagc

SEQ ID NO: 127082 - DNA, 33 bp, Homo sapien
ccaatcaactagtctcgagtgcttgaatttagc

SEQ ID NO: 127083 - DNA, 33 bp, Homo sapien
gagagtgtagtgagtaagtgcccagctacctta

SEQ ID NO: 127084 - DNA, 33 bp, Homo sapien
gagagtgtagtgagtaggtgcccagctacctta

SEQ ID NO: 127085 - DNA, 33 bp, Homo sapien
ctcctcataaggtcccaagataaacttggagct

SEQ ID NO: 127086 - DNA, 33 bp, Homo sapien
ctcctcataaggtcccgagataaacttggagct

SEQ ID NO: 127087 - DNA, 33 bp, Homo sapien
ttagtagatttcatgacaccactagccacctct

SEQ ID NO: 127088 - DNA, 33 bp, Homo sapien
ttagtagatttcatgataccactagccacctct

SEQ ID NO: 127089 - DNA, 33 bp, Homo sapien
ctgtgtccgatattccccacactgtgtccaagt

SEQ ID NO: 127090 - DNA, 33 bp, Homo sapien
ctgtgtccgatattcctcacactgtgtccaagt

SEQ ID NO: 127091 - DNA, 33 bp, Homo sapien
gtaagacttttgaccactatgaatacccaccat

SEQ ID NO: 127092 - DNA, 33 bp, Homo sapien
gtaagacttttgaccattatgaatacccaccat

SEQ ID NO: 127093 - DNA, 33 bp, Homo sapien
caggacttatgtgagagacttctggagtactgg

SEQ ID NO: 127094 - DNA, 33 bp, Homo sapien
caggacttatgtgagatacttctggagtactgg

SEQ ID NO: 127095 - DNA, 33 bp, Homo sapien
cttctcaaaatattcaaaacagtcgaagagaag

SEQ ID NO: 127096 - DNA, 33 bp, Homo sapien
cttctcaaaatattcagaacagtcgaagagaag

SEQ ID NO: 127097 - DNA, 33 bp, Homo sapien
ggtcaaactggactaccattaggtcataaaaac

SEQ ID NO: 127098 - DNA, 33 bp, Homo sapien
ggtcaaactggactactattaggtcataaaaac

SEQ ID NO: 127099 - DNA, 33 bp, Homo sapien
tccaaacatgctattcaccatttaggaatgtaa

SEQ ID NO: 127100 - DNA, 33 bp, Homo sapien
tccaaacatgctattctccatttaggaatgtaa

SEQ ID NO: 127101 - DNA, 33 bp, Homo sapien
gtatctttcttcagaccattgtgggttgcttta

SEQ ID NO: 127102 - DNA, 33 bp, Homo sapien
gtatctttcttcagacgattgtgggttgcttta

SEQ ID NO: 127103 - DNA, 33 bp, Homo sapien
agctgttgaaattctgcatatcagtcagaggtt

SEQ ID NO: 127104 - DNA, 33 bp, Homo sapien
agctgttgaaattctgtatatcagtcagaggtt

SEQ ID NO: 127105 - DNA, 33 bp, Homo sapien
gtataggtttgcataggccttcccactgtgaaa

SEQ ID NO: 127106 - DNA, 33 bp, Homo sapien
gtataggtttgcatagtccttcccactgtgaaa

SEQ ID NO: 127107 - DNA, 33 bp, Homo sapien
cccccatgacatgacacgtaatttgcctatata

SEQ ID NO: 127108 - DNA, 33 bp, Homo sapien
cccccatgacatgacatgtaatttgcctatata

SEQ ID NO: 127109 - DNA, 33 bp, Homo sapien
agcctcagagcaataacgtcaaaagcttgattc

SEQ ID NO: 127110 - DNA, 33 bp, Homo sapien
agcctcagagcaataatgtcaaaagcttgattc

SEQ ID NO: 127111 - DNA, 33 bp, Homo sapien
gatactgctattgtctcacttatacagataaga

SEQ ID NO: 127112 - DNA, 33 bp, Homo sapien
gatactgctattgtctgacttatacagataaga

SEQ ID NO: 127113 - DNA, 33 bp, Homo sapien
agagtaggcacttgtacgtaaaagtgtatcttc

SEQ ID NO: 127114 - DNA, 33 bp, Homo sapien
agagtaggcacttgtatgtaaaagtgtatcttc

SEQ ID NO: 127115 - DNA, 33 bp, Homo sapien
agctgcttcactctgaaattatctagattgaaa

SEQ ID NO: 127116 - DNA, 33 bp, Homo sapien
agctgcttcactctgagattatctagattgaaa

SEQ ID NO: 127117 - DNA, 33 bp, Homo sapien
ttcaaataggctttagaattgtgccttgccagg

SEQ ID NO: 127118 - DNA, 33 bp, Homo sapien
ttcaaataggctttaggattgtgccttgccagg

SEQ ID NO: 127119 - DNA, 33 bp, Homo sapien
ttttgatctttctagtgacattgagaaaatgtt

SEQ ID NO: 127120 - DNA, 33 bp, Homo sapien
ttttgatctttctagttacattgagaaaatgtt

SEQ ID NO: 127121 - DNA, 33 bp, Homo sapien
ggttataccactaaacaccaattggaagaatat

SEQ ID NO: 127122 - DNA, 33 bp, Homo sapien
ggttataccactaaacgccaattggaagaatat

SEQ ID NO: 127123 - DNA, 33 bp, Homo sapien
attgagaaaacgtccacattaagtgggtgggaa

SEQ ID NO: 127124 - DNA, 33 bp, Homo sapien
attgagaaaacgtccatattaagtgggtgggaa

SEQ ID NO: 127125 - DNA, 33 bp, Homo sapien
ccaatgttatgtcaaactaaaatgtgctcactt

SEQ ID NO: 127126 - DNA, 33 bp, Homo sapien
ccaatgttatgtcaaattaaaatgtgctcactt

SEQ ID NO: 127127 - DNA, 33 bp, Homo sapien
cacagtcccccttggaacattgccaacattttt

SEQ ID NO: 127128 - DNA, 33 bp, Homo sapien
cacagtcccccttggagcattgccaacattttt

SEQ ID NO: 127129 - DNA, 33 bp, Homo sapien
agactggcagaaagcaataggtgcaaggccaga

SEQ ID NO: 127130 - DNA, 33 bp, Homo sapien
agactggcagaaagcagtaggtgcaaggccaga

SEQ ID NO: 127131 - DNA, 33 bp, Homo sapien
ttaagtcaaacatacacccaccctatgatccag

SEQ ID NO: 127132 - DNA, 33 bp, Homo sapien
ttaagtcaaacatacatccaccctatgatccag

SEQ ID NO: 127133 - DNA, 33 bp, Homo sapien
caggaccagacataaacagaaacaataaaaagt

SEQ ID NO: 127134 - DNA, 33 bp, Homo sapien
caggaccagacataaagagaaacaataaaaagt

SEQ ID NO: 127135 - DNA, 33 bp, Homo sapien
tccattatcttcttccacccagctgctaggggc

SEQ ID NO: 127136 - DNA, 33 bp, Homo sapien
tccattatcttcttccgcccagctgctaggggc

SEQ ID NO: 127137 - DNA, 33 bp, Homo sapien
ctttgaaccttccatacgtgaatgagataaaat

SEQ ID NO: 127138 - DNA, 33 bp, Homo sapien
ctttgaaccttccatatgtgaatgagataaaat

SEQ ID NO: 127139 - DNA, 33 bp, Homo sapien
tatcaacaatgtacatcatgggaatatagatgt

SEQ ID NO: 127140 - DNA, 33 bp, Homo sapien
tatcaacaatgtacatgatgggaatatagatgt

SEQ ID NO: 127141 - DNA, 33 bp, Homo sapien
tttcatcttcttgctcagaatatagtttaactc

SEQ ID NO: 127142 - DNA, 33 bp, Homo sapien
tttcatcttcttgctcggaatatagtttaactc

SEQ ID NO: 127143 - DNA, 33 bp, Homo sapien
tctctgttacataacaaggaccttcaagctacg

SEQ ID NO: 127144 - DNA, 33 bp, Homo sapien
tctctgttacataacagggaccttcaagctacg

SEQ ID NO: 127145 - DNA, 33 bp, Homo sapien
tatactttgggagggggattgagagagataggc

SEQ ID NO: 127146 - DNA, 33 bp, Homo sapien
tatactttgggaggggtattgagagagataggc

SEQ ID NO: 127147 - DNA, 33 bp, Homo sapien
tacaaccttatactgtcaagcaccaagcactaa

SEQ ID NO: 127148 - DNA, 33 bp, Homo sapien
tacaaccttatactgtgaagcaccaagcactaa

SEQ ID NO: 127149 - DNA, 33 bp, Homo sapien
aggctttgatgcaacccctgttctgattgtgtg

SEQ ID NO: 127150 - DNA, 33 bp, Homo sapien
aggctttgatgcaaccgctgttctgattgtgtg

SEQ ID NO: 127151 - DNA, 33 bp, Homo sapien
ttccagtgggtctgaaacatccacattttcttt

SEQ ID NO: 127152 - DNA, 33 bp, Homo sapien
ttccagtgggtctgaagcatccacattttcttt

SEQ ID NO: 127153 - DNA, 33 bp, Homo sapien
cttccagcccaggttacgcttacttaggggcag

SEQ ID NO: 127154 - DNA, 33 bp, Homo sapien
cttccagcccaggttatgcttacttaggggcag

SEQ ID NO: 127155 - DNA, 33 bp, Homo sapien
atttcttcccaagcagcaaggccaatggcagat

SEQ ID NO: 127156 - DNA, 33 bp, Homo sapien
atttcttcccaagcagtaaggccaatggcagat

SEQ ID NO: 127157 - DNA, 33 bp, Homo sapien
gaaattattatgacaaaaattggacaaaaacaa

SEQ ID NO: 127158 - DNA, 33 bp, Homo sapien
gaaattattatgacaagaattggacaaaaacaa

SEQ ID NO: 127159 - DNA, 33 bp, Homo sapien
tgaggcatggatattgccaacagatctataaca

SEQ ID NO: 127160 - DNA, 33 bp, Homo sapien
tgaggcatggatattgtcaacagatctataaca

SEQ ID NO: 127161 - DNA, 33 bp, Homo sapien
gccccaagacctaagactcctgggttaagggat

SEQ ID NO: 127162 - DNA, 33 bp, Homo sapien
gccccaagacctaagattcctgggttaagggat

SEQ ID NO: 127163 - DNA, 33 bp, Homo sapien
ttctgctccaccaataagcctacctgaacagct

SEQ ID NO: 127164 - DNA, 33 bp, Homo sapien
ttctgctccaccaatatgcctacctgaacagct

SEQ ID NO: 127165 - DNA, 33 bp, Homo sapien
atttattttagggaagcccagtccagatagttt

SEQ ID NO: 127166 - DNA, 33 bp, Homo sapien
atttattttagggaagtccagtccagatagttt

SEQ ID NO: 127167 - DNA, 33 bp, Homo sapien
ggacagactcatgtcacaatttagaacatccac

SEQ ID NO: 127168 - DNA, 33 bp, Homo sapien
ggacagactcatgtcataatttagaacatccac

SEQ ID NO: 127169 - DNA, 33 bp, Homo sapien
gacaatacggcatttacctaccacaggcaatga

SEQ ID NO: 127170 - DNA, 33 bp, Homo sapien
gacaatacggcatttatctaccacaggcaatga

SEQ ID NO: 127171 - DNA, 33 bp, Homo sapien
tcaccttgcacaatgacggctccctcatgtcgc

SEQ ID NO: 127172 - DNA, 33 bp, Homo sapien
tcaccttgcacaatgatggctccctcatgtcgc

SEQ ID NO: 127173 - DNA, 33 bp, Homo sapien
caaaaacacagcttggaatgattcatacaaagg

SEQ ID NO: 127174 - DNA, 33 bp, Homo sapien
caaaaacacagcttgggatgattcatacaaagg

SEQ ID NO: 127175 - DNA, 33 bp, Homo sapien
gtaaccacaagcctaaactgcatatgaagagca

SEQ ID NO: 127176 - DNA, 33 bp, Homo sapien
gtaaccacaagcctaacctgcatatgaagagca

SEQ ID NO: 127177 - DNA, 33 bp, Homo sapien
cagctggacatcttaacagaaccaggtgtttac

SEQ ID NO: 127178 - DNA, 33 bp, Homo sapien
cagctggacatcttaatagaaccaggtgtttac

SEQ ID NO: 127179 - DNA, 33 bp, Homo sapien
tcacatataacctggaaagaatatttacagaaa

SEQ ID NO: 127180 - DNA, 33 bp, Homo sapien
tcacatataacctggagagaatatttacagaaa

SEQ ID NO: 127181 - DNA, 33 bp, Homo sapien
attgtattatattaagccaaaggtgtatattgt

SEQ ID NO: 127182 - DNA, 33 bp, Homo sapien
attgtattatattaagtcaaaggtgtatattgt

SEQ ID NO: 127183 - DNA, 33 bp, Homo sapien
attcttaagcagcatacggtaaggtcttgcttt

SEQ ID NO: 127184 - DNA, 33 bp, Homo sapien
attcttaagcagcatatggtaaggtcttgcttt

SEQ ID NO: 127185 - DNA, 33 bp, Homo sapien
tgacaaatttctatgtgaattcaaaggagaaag

SEQ ID NO: 127186 - DNA, 33 bp, Homo sapien
tgacaaatttctatgttaattcaaaggagaaag

SEQ ID NO: 127187 - DNA, 33 bp, Homo sapien
ccatgcttgaaccaacaaaaatattgaaagtca

SEQ ID NO: 127188 - DNA, 33 bp, Homo sapien
ccatgcttgaaccaacgaaaatattgaaagtca

SEQ ID NO: 127189 - DNA, 33 bp, Homo sapien
ttgagttctctacgtacgtcatatgggtagtat

SEQ ID NO: 127190 - DNA, 33 bp, Homo sapien
ttgagttctctacgtatgtcatatgggtagtat

SEQ ID NO: 127191 - DNA, 33 bp, Homo sapien
tacctctccgaataggcaaagcatatgaagata

SEQ ID NO: 127192 - DNA, 33 bp, Homo sapien
tacctctccgaataggtaaagcatatgaagata

SEQ ID NO: 127193 - DNA, 33 bp, Homo sapien
caatttggatttgagcagcaacacattgctcat

SEQ ID NO: 127194 - DNA, 33 bp, Homo sapien
caatttggatttgagcggcaacacattgctcat

SEQ ID NO: 127195 - DNA, 33 bp, Homo sapien
cagcctgtggagccatcagccaattaattctca

SEQ ID NO: 127196 - DNA, 33 bp, Homo sapien
cagcctgtggagccatgagccaattaattctca

SEQ ID NO: 127197 - DNA, 33 bp, Homo sapien
acaatagctaagatacaaactcaacataaatgt

SEQ ID NO: 127198 - DNA, 33 bp, Homo sapien
acaatagctaagatacgaactcaacataaatgt

SEQ ID NO: 127199 - DNA, 33 bp, Homo sapien
tgctgaaaagacactcaatctcctgtcatatag

SEQ ID NO: 127200 - DNA, 33 bp, Homo sapien
tgctgaaaagacactcgatctcctgtcatatag

SEQ ID NO: 127201 - DNA, 33 bp, Homo sapien
cagtctttctctgtaaatctctatacggagtgc

SEQ ID NO: 127202 - DNA, 33 bp, Homo sapien
cagtctttctctgtaactctctatacggagtgc

SEQ ID NO: 127203 - DNA, 33 bp, Homo sapien
caaattagtttctcacaaatctagctatggctt

SEQ ID NO: 127204 - DNA, 33 bp, Homo sapien
caaattagtttctcacgaatctagctatggctt

SEQ ID NO: 127205 - DNA, 33 bp, Homo sapien
aggaatgttcttacagcgatgttaccaagcaca

SEQ ID NO: 127206 - DNA, 33 bp, Homo sapien
aggaatgttcttacagtgatgttaccaagcaca

SEQ ID NO: 127207 - DNA, 33 bp, Homo sapien
ctgctctaagaaagtaccagaagtaagaaacta

SEQ ID NO: 127208 - DNA, 33 bp, Homo sapien
ctgctctaagaaagtagcagaagtaagaaacta

SEQ ID NO: 127209 - DNA, 33 bp, Homo sapien
attaatatacagcaaaatacactgtcatatagg

SEQ ID NO: 127210 - DNA, 33 bp, Homo sapien
attaatatacagcaaactacactgtcatatagg

SEQ ID NO: 127211 - DNA, 33 bp, Homo sapien
acactgtcatataggacgaccatttcacaggct

SEQ ID NO: 127212 - DNA, 33 bp, Homo sapien
acactgtcatataggaggaccatttcacaggct

SEQ ID NO: 127213 - DNA, 33 bp, Homo sapien
tctctcaaatgaggaagaaagtagatctcaatc

SEQ ID NO: 127214 - DNA, 33 bp, Homo sapien
tctctcaaatgaggaataaagtagatctcaatc

SEQ ID NO: 127215 - DNA, 33 bp, Homo sapien
atccacaggttacacacgataagttttctttat

SEQ ID NO: 127216 - DNA, 33 bp, Homo sapien
atccacaggttacacatgataagttttctttat

SEQ ID NO: 127217 - DNA, 33 bp, Homo sapien
aataaaaagagaatcaaattcatgccaactcaa

SEQ ID NO: 127218 - DNA, 33 bp, Homo sapien
aataaaaagagaatcacattcatgccaactcaa

SEQ ID NO: 127219 - DNA, 33 bp, Homo sapien
tgggtttgctaaatgaaaacagcagtttgttga

SEQ ID NO: 127220 - DNA, 33 bp, Homo sapien
tgggtttgctaaatgagaacagcagtttgttga

SEQ ID NO: 127221 - DNA, 33 bp, Homo sapien
gaagtggtttagcaaaactggaagagtttccag

SEQ ID NO: 127222 - DNA, 33 bp, Homo sapien
gaagtggtttagcaaagctggaagagtttccag

SEQ ID NO: 127223 - DNA, 33 bp, Homo sapien
cttctacttcggattaaataaggtaatacattt

SEQ ID NO: 127224 - DNA, 33 bp, Homo sapien
cttctacttcggattagataaggtaatacattt

SEQ ID NO: 127225 - DNA, 33 bp, Homo sapien
tactaagtcagtcttcaatgcgcaggaatgatt

SEQ ID NO: 127226 - DNA, 33 bp, Homo sapien
tactaagtcagtcttcgatgcgcaggaatgatt

SEQ ID NO: 127227 - DNA, 33 bp, Homo sapien
agaaactgcagcaacacggtgggacaaaaaatg

SEQ ID NO: 127228 - DNA, 33 bp, Homo sapien
agaaactgcagcaacatggtgggacaaaaaatg

SEQ ID NO: 127229 - DNA, 33 bp, Homo sapien
ccgtggccaagtaaagcctgttttagtcttgag

SEQ ID NO: 127230 - DNA, 33 bp, Homo sapien
ccgtggccaagtaaagtctgttttagtcttgag

SEQ ID NO: 127231 - DNA, 33 bp, Homo sapien
tcaaccactgaaaataacaagacaggctcttcc

SEQ ID NO: 127232 - DNA, 33 bp, Homo sapien
tcaaccactgaaaatagcaagacaggctcttcc

SEQ ID NO: 127233 - DNA, 33 bp, Homo sapien
agttgtgggatagtaaagtcctaggtgctgatt

SEQ ID NO: 127234 - DNA, 33 bp, Homo sapien
agttgtgggatagtaacgtcctaggtgctgatt

SEQ ID NO: 127235 - DNA, 33 bp, Homo sapien
tttacattattctgtacagatatcacctggtgt

SEQ ID NO: 127236 - DNA, 33 bp, Homo sapien
tttacattattctgtatagatatcacctggtgt

SEQ ID NO: 127237 - DNA, 33 bp, Homo sapien
tcccagggcttagacaaacatcatggaataact

SEQ ID NO: 127238 - DNA, 33 bp, Homo sapien
tcccagggcttagacatacatcatggaataact

SEQ ID NO: 127239 - DNA, 33 bp, Homo sapien
cgtgtggtggatttgacatcctgcagggcctct

SEQ ID NO: 127240 - DNA, 33 bp, Homo sapien
cgtgtggtggatttgatatcctgcagggcctct

SEQ ID NO: 127241 - DNA, 33 bp, Homo sapien
ccacctagctgcaaggcaaatcaagaatgtagt

SEQ ID NO: 127242 - DNA, 33 bp, Homo sapien
ccacctagctgcaagggaaatcaagaatgtagt

SEQ ID NO: 127243 - DNA, 33 bp, Homo sapien
cctgctggccaacaacaattgtgagatgccatc

SEQ ID NO: 127244 - DNA, 33 bp, Homo sapien
cctgctggccaacaacgattgtgagatgccatc

SEQ ID NO: 127245 - DNA, 33 bp, Homo sapien
accgtgcttgctggaacgcttgctctgaagccc

SEQ ID NO: 127246 - DNA, 33 bp, Homo sapien
accgtgcttgctggaatgcttgctctgaagccc

SEQ ID NO: 127247 - DNA, 33 bp, Homo sapien
ccccgacatctggggcagaaaaggtaaaagaca

SEQ ID NO: 127248 - DNA, 33 bp, Homo sapien
ccccgacatctggggcggaaaaggtaaaagaca

SEQ ID NO: 127249 - DNA, 33 bp, Homo sapien
gaggggaggtgtcttgcagattatttttcagat

SEQ ID NO: 127250 - DNA, 33 bp, Homo sapien
gaggggaggtgtcttgtagattatttttcagat

SEQ ID NO: 127251 - DNA, 33 bp, Homo sapien
ctttcagtacaagttccctattacgcagaatta

SEQ ID NO: 127252 - DNA, 33 bp, Homo sapien
ctttcagtacaagttctctattacgcagaatta

SEQ ID NO: 127253 - DNA, 33 bp, Homo sapien
atttaagcatggattacaaggatgcacagtaac

SEQ ID NO: 127254 - DNA, 33 bp, Homo sapien
atttaagcatggattagaaggatgcacagtaac

SEQ ID NO: 127255 - DNA, 33 bp, Homo sapien
tctgtgattgtctgtgaatatggttatagctca

SEQ ID NO: 127256 - DNA, 33 bp, Homo sapien
tctgtgattgtctgtggatatggttatagctca

SEQ ID NO: 127257 - DNA, 33 bp, Homo sapien
gtcacaatatagtataataagtgctgtaacagg

SEQ ID NO: 127258 - DNA, 33 bp, Homo sapien
gtcacaatatagtatagtaagtgctgtaacagg

SEQ ID NO: 127259 - DNA, 33 bp, Homo sapien
aagggcagacattttacgtgtttgctaaaatcc

SEQ ID NO: 127260 - DNA, 33 bp, Homo sapien
aagggcagacattttatgtgtttgctaaaatcc

SEQ ID NO: 127261 - DNA, 33 bp, Homo sapien
gaaccgcaaatttgctaaagtgaccgtatatat

SEQ ID NO: 127262 - DNA, 33 bp, Homo sapien
gaaccgcaaatttgctgaagtgaccgtatatat

SEQ ID NO: 127263 - DNA, 33 bp, Homo sapien; identical to SEQ ID NO: 127261

SEQ ID NO: 127264 - DNA, 33 bp, Homo sapien; identical to SEQ ID NO: 127262

SEQ ID NO: 127265 - DNA, 33 bp, Homo sapien; identical to SEQ ID NO: 127261

SEQ ID NO: 127266 - DNA, 33 bp, Homo sapien; identical to SEQ ID NO: 127262

SEQ ID NO: 127267 - DNA, 33 bp, Homo sapien
agatggcattgtcagaccattttacacctactt

SEQ ID NO: 127268 - DNA, 33 bp, Homo sapien
agatggcattgtcagatcattttacacctactt

SEQ ID NO: 127269 - DNA, 33 bp, Homo sapien
aaaattagcatgcctgcaattcacaacctagta

SEQ ID NO: 127270 - DNA, 33 bp, Homo sapien
aaaattagcatgcctggaattcacaacctagta

SEQ ID NO: 127271 - DNA, 33 bp, Homo sapien
tgccagaatcatataaattaggaatctcagaat

SEQ ID NO: 127272 - DNA, 33 bp, Homo sapien
tgccagaatcatataatttaggaatctcagaat

SEQ ID NO: 127273 - DNA, 33 bp, Homo sapien
attatgggattttaaaggccaatgagttctttt

SEQ ID NO: 127274 - DNA, 33 bp, Homo sapien
attatgggattttaaatgccaatgagttctttt

SEQ ID NO: 127275 - DNA, 33 bp, Homo sapien
gttctccttacctgtcaccttctaattgcttga

SEQ ID NO: 127276 - DNA, 33 bp, Homo sapien
gttctccttacctgtcgccttctaattgcttga

SEQ ID NO: 127277 - DNA, 33 bp, Homo sapien
gtcatgtgtccccgaaatccactggccttgaac

SEQ ID NO: 127278 - DNA, 33 bp, Homo sapien
gtcatgtgtccccgaagtccactggccttgaac

SEQ ID NO: 127279 - DNA, 33 bp, Homo sapien
tatctctctgtttagcgctaacattttctttat

SEQ ID NO: 127280 - DNA, 33 bp, Homo sapien
tatctctctgtttagctctaacattttctttat

SEQ ID NO: 127281 - DNA, 33 bp, Homo sapien
atttaatcaggttacccagagtcagaacctgga

SEQ ID NO: 127282 - DNA, 33 bp, Homo sapien
atttaatcaggttacctagagtcagaacctgga

SEQ ID NO: 127283 - DNA, 33 bp, Homo sapien
cacccttacaggaagaccttaatgacagaacat

SEQ ID NO: 127284 - DNA, 33 bp, Homo sapien
cacccttacaggaagatcttaatgacagaacat

SEQ ID NO: 127285 - DNA, 33 bp, Homo sapien
cttatgataaggaagactaaccaacatagatta

SEQ ID NO: 127286 - DNA, 33 bp, Homo sapien
cttatgataaggaagagtaaccaacatagatta

SEQ ID NO: 127287 - DNA, 33 bp, Homo sapien
attatgtgagttatacaggatttatctttttgc

SEQ ID NO: 127288 - DNA, 33 bp, Homo sapien
attatgtgagttatacgggatttatctttttgc

SEQ ID NO: 127289 - DNA, 33 bp, Homo sapien
gcagtatgcaatgcaagtgtcctcaacacccaa

SEQ ID NO: 127290 - DNA, 33 bp, Homo sapien
gcagtatgcaatgcaattgtcctcaacacccaa

SEQ ID NO: 127291 - DNA, 33 bp, Homo sapien
atatcctcctcatataacaggcaatggctacaa

SEQ ID NO: 127292 - DNA, 33 bp, Homo sapien
atatcctcctcatatagcaggcaatggctacaa

SEQ ID NO: 127293 - DNA, 33 bp, Homo sapien
tggaagtcattgggctaaaatcctaagaaggct

SEQ ID NO: 127294 - DNA, 33 bp, Homo sapien
tggaagtcattgggctgaaatcctaagaaggct

SEQ ID NO: 127295 - DNA, 33 bp, Homo sapien
attttctgaaaaagacaggatgggagctctgaa

SEQ ID NO: 127296 - DNA, 33 bp, Homo sapien
attttctgaaaaagacgggatgggagctctgaa

SEQ ID NO: 127297 - DNA, 33 bp, Homo sapien
tatttattatagtactcactgttgcattatgct

SEQ ID NO: 127298 - DNA, 33 bp, Homo sapien
tatttattatagtacttactgttgcattatgct

SEQ ID NO: 127299 - DNA, 33 bp, Homo sapien
ttcaaaagagaactaccccaagacgagggtctt

SEQ ID NO: 127300 - DNA, 33 bp, Homo sapien
ttcaaaagagaactactccaagacgagggtctt

SEQ ID NO: 127301 - DNA, 33 bp, Homo sapien
gagtaattgaaatcacaggaatggatgagactc

SEQ ID NO: 127302 - DNA, 33 bp, Homo sapien
gagtaattgaaatcacgggaatggatgagactc

SEQ ID NO: 127303 - DNA, 33 bp, Homo sapien
caaaattacatatccaatcctgtcagaatcaga

SEQ ID NO: 127304 - DNA, 33 bp, Homo sapien
caaaattacatatccagtcctgtcagaatcaga

SEQ ID NO: 127305 - DNA, 33 bp, Homo sapien
tgtttgtctacataaagtatggaaatgtataca

SEQ ID NO: 127306 - DNA, 33 bp, Homo sapien
tgtttgtctacataaattatggaaatgtataca

SEQ ID NO: 127307 - DNA, 33 bp, Homo sapien
taatcaagtagagccacggatttattttcttct

SEQ ID NO: 127308 - DNA, 33 bp, Homo sapien
taatcaagtagagccatggatttattttcttct

SEQ ID NO: 127309 - DNA, 33 bp, Homo sapien
ttgagtgttggcaatacaatgcaattgattctt

SEQ ID NO: 127310 - DNA, 33 bp, Homo sapien
ttgagtgttggcaatataatgcaattgattctt

SEQ ID NO: 127311 - DNA, 33 bp, Homo sapien
gccctcctggaagagacgaatattaaaggaata

SEQ ID NO: 127312 - DNA, 33 bp, Homo sapien
gccctcctggaagagatgaatattaaaggaata

SEQ ID NO: 127313 - DNA, 33 bp, Homo sapien
aatagaaagtcactgacatcccttcctggacac

SEQ ID NO: 127314 - DNA, 33 bp, Homo sapien
aatagaaagtcactgagatcccttcctggacac

SEQ ID NO: 127315 - DNA, 33 bp, Homo sapien
aaggtagttcaagtaacggcagttcaagtaatg

SEQ ID NO: 127316 - DNA, 33 bp, Homo sapien
aaggtagttcaagtaatggcagttcaagtaatg

SEQ ID NO: 127317 - DNA, 33 bp, Homo sapien
taagtgatggtgtgtacggtatttcttgttgca

SEQ ID NO: 127318 - DNA, 33 bp, Homo sapien
taagtgatggtgtgtatggtatttcttgttgca

SEQ ID NO: 127319 - DNA, 33 bp, Homo sapien
cttgtcatcacaagaggaacaaagtggcaggcc

SEQ ID NO: 127320 - DNA, 33 bp, Homo sapien
cttgtcatcacaagagtaacaaagtggcaggcc

SEQ ID NO: 127321 - DNA, 33 bp, Homo sapien
gcacaacttctcaaaaggctgttttgtcctgac

SEQ ID NO: 127322 - DNA, 33 bp, Homo sapien
gcacaacttctcaaaatgctgttttgtcctgac

SEQ ID NO: 127323 - DNA, 33 bp, Homo sapien
tttatttccgcttttcactttgtaataaattag

SEQ ID NO: 127324 - DNA, 33 bp, Homo sapien
tttatttccgcttttcgctttgtaataaattag

SEQ ID NO: 127325 - DNA, 33 bp, Homo sapien
gcgtcagagacttggaaagatgtggaggtgggg

SEQ ID NO: 127326 - DNA, 33 bp, Homo sapien
gcgtcagagacttggagagatgtggaggtgggg

SEQ ID NO: 127327 - DNA, 33 bp, Homo sapien
gctgccatgcactgaagtggggaaggttttggg

SEQ ID NO: 127328 - DNA, 33 bp, Homo sapien
gctgccatgcactgaattggggaaggttttggg

SEQ ID NO: 127329 - DNA, 33 bp, Homo sapien
aggaaggcatgttgagcaagtagtataattata

SEQ ID NO: 127330 - DNA, 33 bp, Homo sapien
aggaaggcatgttgaggaagtagtataattata

SEQ ID NO: 127331 - DNA, 33 bp, Homo sapien
aaacaaggtgctacacaactggctttgaggatg

SEQ ID NO: 127332 - DNA, 33 bp, Homo sapien
aaacaaggtgctacaccactggctttgaggatg

SEQ ID NO: 127333 - DNA, 33 bp, Homo sapien
aagaaccagaaaaggcaaggaaggagattctcc

SEQ ID NO: 127334 - DNA, 33 bp, Homo sapien
aagaaccagaaaaggcgaggaaggagattctcc

SEQ ID NO: 127335 - DNA, 33 bp, Homo sapien
tttaaaacagggcaagaatggatccaagcaatg

SEQ ID NO: 127336 - DNA, 33 bp, Homo sapien
tttaaaacagggcaaggatggatccaagcaatg

SEQ ID NO: 127337 - DNA, 33 bp, Homo sapien
attttgaaacagccacaccttgttcaattcaaa

SEQ ID NO: 127338 - DNA, 33 bp, Homo sapien
attttgaaacagccacgccttgttcaattcaaa

SEQ ID NO: 127339 - DNA, 33 bp, Homo sapien
gacctgttgacttaaacacatcatttaagagag

SEQ ID NO: 127340 - DNA, 33 bp, Homo sapien
gacctgttgacttaaagacatcatttaagagag

SEQ ID NO: 127341 - DNA, 33 bp, Homo sapien
aatggaatggaaataccagtcaagagagaaaag

SEQ ID NO: 127342 - DNA, 33 bp, Homo sapien
aatggaatggaaatacgagtcaagagagaaaag

SEQ ID NO: 127343 - DNA, 33 bp, Homo sapien
tgcttgggaaacaccacaatgcttgggaaaaga

SEQ ID NO: 127344 - DNA, 33 bp, Homo sapien
tgcttgggaaacaccataatgcttgggaaaaga

SEQ ID NO: 127345 - DNA, 33 bp, Homo sapien
ctgaccagctctgcaaaacaactatgctcatcc

SEQ ID NO: 127346 - DNA, 33 bp, Homo sapien
ctgaccagctctgcaagacaactatgctcatcc

SEQ ID NO: 127347 - DNA, 33 bp, Homo sapien
tggagaaaaagccaacaagaattgctgatgggt

SEQ ID NO: 127348 - DNA, 33 bp, Homo sapien
tggagaaaaagccaacgagaattgctgatgggt

SEQ ID NO: 127349 - DNA, 33 bp, Homo sapien
aataagcattgcattacatcagagcagttctgg

SEQ ID NO: 127350 - DNA, 33 bp, Homo sapien
aataagcattgcattagatcagagcagttctgg

SEQ ID NO: 127351 - DNA, 33 bp, Homo sapien
cacagtgttacgaaaaacatggatccatgtgag

SEQ ID NO: 127352 - DNA, 33 bp, Homo sapien
cacagtgttacgaaaagcatggatccatgtgag

SEQ ID NO: 127353 - DNA, 33 bp, Homo sapien
tgtcacttccttaaagcattctctgtcagtagc

SEQ ID NO: 127354 - DNA, 33 bp, Homo sapien
tgtcacttccttaaaggattctctgtcagtagc

SEQ ID NO: 127355 - DNA, 33 bp, Homo sapien
tcttaaacaacaaaaccgtatagtctcacagtt

SEQ ID NO: 127356 - DNA, 33 bp, Homo sapien
tcttaaacaacaaaactgtatagtctcacagtt

SEQ ID NO: 127357 - DNA, 33 bp, Homo sapien
tgagaattttggcccaagatggataaacctggg

SEQ ID NO: 127358 - DNA, 33 bp, Homo sapien
tgagaattttggcccaggatggataaacctggg

SEQ ID NO: 127359 - DNA, 33 bp, Homo sapien
cacaaggggagttcccagctagggcttagttcc

SEQ ID NO: 127360 - DNA, 33 bp, Homo sapien
cacaaggggagttcccggctagggcttagttcc

SEQ ID NO: 127361 - DNA, 33 bp, Homo sapien
agtggtcccatcagcacggaggagaaaataagc

SEQ ID NO: 127362 - DNA, 33 bp, Homo sapien
agtggtcccatcagcagggaggagaaaataagc

SEQ ID NO: 127363 - DNA, 33 bp, Homo sapien
gccaaatgctattcgccaagacaggggaaaatg

SEQ ID NO: 127364 - DNA, 33 bp, Homo sapien
gccaaatgctattcgctaagacaggggaaaatg

SEQ ID NO: 127365 - DNA, 33 bp, Homo sapien
ttgaagattctcagcaaggaaagattccccttt

SEQ ID NO: 127366 - DNA, 33 bp, Homo sapien
ttgaagattctcagcatggaaagattccccttt

SEQ ID NO: 127367 - DNA, 33 bp, Homo sapien
gatcagctggataatacagtgagacctcgtctc

SEQ ID NO: 127368 - DNA, 33 bp, Homo sapien
gatcagctggataatatagtgagacctcgtctc

SEQ ID NO: 127369 - DNA, 33 bp, Homo sapien
tcatcattctgggatacccaccaccatcccttg

SEQ ID NO: 127370 - DNA, 33 bp, Homo sapien
tcatcattctgggatatccaccaccatcccttg

SEQ ID NO: 127371 - DNA, 33 bp, Homo sapien
agcaaaggagtgcgacagaaggaaggctgcttc

SEQ ID NO: 127372 - DNA, 33 bp, Homo sapien
agcaaaggagtgcgactgaaggaaggctgcttc

SEQ ID NO: 127373 - DNA, 33 bp, Homo sapien
tacccatatccacaacaaaaaatcgagggcact

SEQ ID NO: 127374 - DNA, 33 bp, Homo sapien
tacccatatccacaaccaaaaatcgagggcact

SEQ ID NO: 127375 - DNA, 33 bp, Homo sapien
caattgctagttgcagacaaatagctaacattg

SEQ ID NO: 127376 - DNA, 33 bp, Homo sapien
caattgctagttgcaggcaaatagctaacattg

SEQ ID NO: 127377 - DNA, 33 bp, Homo sapien
aatacaagaaagagcaaacctgtccaggagact

SEQ ID NO: 127378 - DNA, 33 bp, Homo sapien
aatacaagaaagagcacacctgtccaggagact

SEQ ID NO: 127379 - DNA, 33 bp, Homo sapien
attctcagggtcaacaataaatagggtagagag

SEQ ID NO: 127380 - DNA, 33 bp, Homo sapien
attctcagggtcaacagtaaatagggtagagag

SEQ ID NO: 127381 - DNA, 33 bp, Homo sapien
ctaaaagctcgtagccagcaatttccctgccaa

SEQ ID NO: 127382 - DNA, 33 bp, Homo sapien
ctaaaagctcgtagccggcaatttccctgccaa

SEQ ID NO: 127383 - DNA, 33 bp, Homo sapien
tgccatgaggattaataatatgttcaaacatag

SEQ ID NO: 127384 - DNA, 33 bp, Homo sapien
tgccatgaggattaatcatatgttcaaacatag

SEQ ID NO: 127385 - DNA, 33 bp, Homo sapien
tgtggccttatcagaacctcaaaatggagacgt

SEQ ID NO: 127386 - DNA, 33 bp, Homo sapien
tgtggccttatcagaagctcaaaatggagacgt

SEQ ID NO: 127387 - DNA, 33 bp, Homo sapien
aaagttattcaagataaagacaggcatctcttg

SEQ ID NO: 127388 - DNA, 33 bp, Homo sapien
aaagttattcaagatacagacaggcatctcttg

SEQ ID NO: 127389 - DNA, 33 bp, Homo sapien; identical to SEQ ID NO: 127387

SEQ ID NO: 127390 - DNA, 33 bp, Homo sapien; identical to SEQ ID NO: 127388

SEQ ID NO: 127391 - DNA, 33 bp, Homo sapien
ggatgaatagtctacaaagcaaactccttccat

SEQ ID NO: 127392 - DNA, 33 bp, Homo sapien
ggatgaatagtctacatagcaaactccttccat

SEQ ID NO: 127393 - DNA, 33 bp, Homo sapien
acctggcctgatagacaatatgatggagtgact

SEQ ID NO: 127394 - DNA, 33 bp, Homo sapien
acctggcctgatagacgatatgatggagtgact

SEQ ID NO: 127395 - DNA, 33 bp, Homo sapien
aacatgcaaaaactagaaagtgatccatttgta

SEQ ID NO: 127396 - DNA, 33 bp, Homo sapien
aacatgcaaaaactaggaagtgatccatttgta

SEQ ID NO: 127397 - DNA, 33 bp, Homo sapien
ctccaattgcaaacacggcccaattacaactaa

SEQ ID NO: 127398 - DNA, 33 bp, Homo sapien
ctccaattgcaaacactgcccaattacaactaa

SEQ ID NO: 127399 - DNA, 33 bp, Homo sapien
ggcatcttctcagacactctgcatcaaacagag

SEQ ID NO: 127400 - DNA, 33 bp, Homo sapien
ggcatcttctcagacattctgcatcaaacagag

SEQ ID NO: 127401 - DNA, 33 bp, Homo sapien
tggttttcactctccacggccaagtctagtcat

SEQ ID NO: 127402 - DNA, 33 bp, Homo sapien
tggttttcactctccatggccaagtctagtcat

SEQ ID NO: 127403 - DNA, 33 bp, Homo sapien
atgctacgttttcacacggaagagccctaagtc

SEQ ID NO: 127404 - DNA, 33 bp, Homo sapien
atgctacgttttcacatggaagagccctaagtc

SEQ ID NO: 127405 - DNA, 33 bp, Homo sapien
catcatccaattagcaactcctcatagtaccca

SEQ ID NO: 127406 - DNA, 33 bp, Homo sapien
catcatccaattagcagctcctcatagtaccca

SEQ ID NO: 127407 - DNA, 33 bp, Homo sapien
tggattgttaccttaaagcccaggtcaactctc

SEQ ID NO: 127408 - DNA, 33 bp, Homo sapien
tggattgttaccttaaggcccaggtcaactctc

SEQ ID NO: 127409 - DNA, 33 bp, Homo sapien
gcctagtgggagaaaacataagtaaatgagcaa

SEQ ID NO: 127410 - DNA, 33 bp, Homo sapien
gcctagtgggagaaaagataagtaaatgagcaa

SEQ ID NO: 127411 - DNA, 33 bp, Homo sapien
ggaaaagacattgcccaatataacgccggcaca

SEQ ID NO: 127412 - DNA, 33 bp, Homo sapien
ggaaaagacattgccccatataacgccggcaca

SEQ ID NO: 127413 - DNA, 33 bp, Homo sapien
acttcaatttacatgcaatgagataaaattgtt

SEQ ID NO: 127414 - DNA, 33 bp, Homo sapien
acttcaatttacatgcgatgagataaaattgtt

SEQ ID NO: 127415 - DNA, 33 bp, Homo sapien
atagacattatattctgacctgaaggcaatagt

SEQ ID NO: 127416 - DNA, 33 bp, Homo sapien
atagacattatattcttacctgaaggcaatagt

SEQ ID NO: 127417 - DNA, 33 bp, Homo sapien
catagaaccaattgaaatcagtctgctttttat

SEQ ID NO: 127418 - DNA, 33 bp, Homo sapien
catagaaccaattgaagtcagtctgctttttat

SEQ ID NO: 127419 - DNA, 33 bp, Homo sapien
tcaaaattgatgtttccaaaactagacaatgtt

SEQ ID NO: 127420 - DNA, 33 bp, Homo sapien
tcaaaattgatgtttctaaaactagacaatgtt

SEQ ID NO: 127421 - DNA, 33 bp, Homo sapien
accaaaagaaagtggagtcacagacaccaaaag

SEQ ID NO: 127422 - DNA, 33 bp, Homo sapien
accaaaagaaagtggattcacagacaccaaaag

SEQ ID NO: 127423 - DNA, 33 bp, Homo sapien
aaaggactagagataacgcaagtaaatctgaca

SEQ ID NO: 127424 - DNA, 33 bp, Homo sapien
aaaggactagagataatgcaagtaaatctgaca

SEQ ID NO: 127425 - DNA, 33 bp, Homo sapien
tcttgtacacctcccccaactaggaaagatgtg

SEQ ID NO: 127426 - DNA, 33 bp, Homo sapien
tcttgtacacctcccctaactaggaaagatgtg

SEQ ID NO: 127427 - DNA, 33 bp, Homo sapien
attctatggttacaaacacaacctttagtctct

SEQ ID NO: 127428 - DNA, 33 bp, Homo sapien
attctatggttacaaagacaacctttagtctct

SEQ ID NO: 127429 - DNA, 33 bp, Homo sapien
cacacatttaagtgtcactgggttaggacaaat

SEQ ID NO: 127430 - DNA, 33 bp, Homo sapien
cacacatttaagtgtcgctgggttaggacaaat

SEQ ID NO: 127431 - DNA, 33 bp, Homo sapien
tgtgtgataagacagcaacaaatgctttccctg

SEQ ID NO: 127432 - DNA, 33 bp, Homo sapien
tgtgtgataagacagcgacaaatgctttccctg

SEQ ID NO: 127433 - DNA, 33 bp, Homo sapien
tgcctacactcgcccaatattgactgaacttcc

SEQ ID NO: 127434 - DNA, 33 bp, Homo sapien
tgcctacactcgcccagtattgactgaacttcc

SEQ ID NO: 127435 - DNA, 33 bp, Homo sapien
tggtatttcttttcagaagccaattgatcctgc

SEQ ID NO: 127436 - DNA, 33 bp, Homo sapien
tggtatttcttttcagcagccaattgatcctgc

SEQ ID NO: 127437 - DNA, 33 bp, Homo sapien
aaatagattcctggccaaagaatggtttatagt

SEQ ID NO: 127438 - DNA, 33 bp, Homo sapien
aaatagattcctggcccaagaatggtttatagt

SEQ ID NO: 127439 - DNA, 33 bp, Homo sapien
aaaaggtagtagctgaaggcaaagagaatttag

SEQ ID NO: 127440 - DNA, 33 bp, Homo sapien
aaaaggtagtagctgagggcaaagagaatttag

SEQ ID NO: 127441 - DNA, 33 bp, Homo sapien
agaaaatcaaaggtccaagtcagggaagggata

SEQ ID NO: 127442 - DNA, 33 bp, Homo sapien
agaaaatcaaaggtccgagtcagggaagggata

SEQ ID NO: 127443 - DNA, 33 bp, Homo sapien
aattattgaagtataccaagccataataatcaa

SEQ ID NO: 127444 - DNA, 33 bp, Homo sapien
aattattgaagtatacgaagccataataatcaa

SEQ ID NO: 127445 - DNA, 33 bp, Homo sapien
atttcactgatagataagcaagttggaaagagc

SEQ ID NO: 127446 - DNA, 33 bp, Homo sapien
atttcactgatagataggcaagttggaaagagc

SEQ ID NO: 127447 - DNA, 33 bp, Homo sapien
caggtccagggcaaagaaccaacaggagttgtt

SEQ ID NO: 127448 - DNA, 33 bp, Homo sapien
caggtccagggcaaaggaccaacaggagttgtt

SEQ ID NO: 127449 - DNA, 33 bp, Homo sapien
acttagtgtggagtagccctgtaagaaactacc

SEQ ID NO: 127450 - DNA, 33 bp, Homo sapien
acttagtgtggagtaggcctgtaagaaactacc

SEQ ID NO: 127451 - DNA, 33 bp, Homo sapien
ctgtcagacttcctcaatatcttctcacttatt

SEQ ID NO: 127452 - DNA, 33 bp, Homo sapien
ctgtcagacttcctcagtatcttctcacttatt

SEQ ID NO: 127453 - DNA, 33 bp, Homo sapien
gtattctaccaattaccagggtgtgatcttggg

SEQ ID NO: 127454 - DNA, 33 bp, Homo sapien
gtattctaccaattactagggtgtgatcttggg

SEQ ID NO: 127455 - DNA, 33 bp, Homo sapien
taggaatctgagaagacgggaaggcctaaagaa

SEQ ID NO: 127456 - DNA, 33 bp, Homo sapien
taggaatctgagaagatgggaaggcctaaagaa

SEQ ID NO: 127457 - DNA, 33 bp, Homo sapien
cattaatatgaatgaaactaaaaagcaatactg

SEQ ID NO: 127458 - DNA, 33 bp, Homo sapien
cattaatatgaatgaatctaaaaagcaatactg

SEQ ID NO: 127459 - DNA, 33 bp, Homo sapien
gcagctctatcttgagactaggactggtgagat

SEQ ID NO: 127460 - DNA, 33 bp, Homo sapien
gcagctctatcttgaggctaggactggtgagat

SEQ ID NO: 127461 - DNA, 33 bp, Homo sapien
cattgcttttgcaccaactgtattaatccagca

SEQ ID NO: 127462 - DNA, 33 bp, Homo sapien
cattgcttttgcaccatctgtattaatccagca

SEQ ID NO: 127463 - DNA, 33 bp, Homo sapien
tgctactctgaaaataacagtgaaagagtattt

SEQ ID NO: 127464 - DNA, 33 bp, Homo sapien
tgctactctgaaaatagcagtgaaagagtattt

SEQ ID NO: 127465 - DNA, 33 bp, Homo sapien
aatgagccttcaccaccaattgaacctatcaat

SEQ ID NO: 127466 - DNA, 33 bp, Homo sapien
aatgagccttcaccactaattgaacctatcaat

SEQ ID NO: 127467 - DNA, 33 bp, Homo sapien
ttctactcataaaccactcaccacttctgacac

SEQ ID NO: 127468 - DNA, 33 bp, Homo sapien
ttctactcataaaccattcaccacttctgacac

SEQ ID NO: 127469 - DNA, 33 bp, Homo sapien
gtgactggaaattccacggtgacatttaaaaat

SEQ ID NO: 127470 - DNA, 33 bp, Homo sapien
gtgactggaaattccatggtgacatttaaaaat

SEQ ID NO: 127471 - DNA, 33 bp, Homo sapien
gcagcttaatctctcaaaagtttcagttttttc

SEQ ID NO: 127472 - DNA, 33 bp, Homo sapien
gcagcttaatctctcagaagtttcagttttttc

SEQ ID NO: 127473 - DNA, 33 bp, Homo sapien
gacttcaatcggcaaaaatgtagggaccagcct

SEQ ID NO: 127474 - DNA, 33 bp, Homo sapien
gacttcaatcggcaaagatgtagggaccagcct

SEQ ID NO: 127475 - DNA, 33 bp, Homo sapien
cagaaaattggaagtaaagatgctgtgagtatc

SEQ ID NO: 127476 - DNA, 33 bp, Homo sapien
cagaaaattggaagtagagatgctgtgagtatc

SEQ ID NO: 127477 - DNA, 33 bp, Homo sapien
aaattaagctcttaaacatcacagtgtgtgttg

SEQ ID NO: 127478 - DNA, 33 bp, Homo sapien
aaattaagctcttaaatatcacagtgtgtgttg

SEQ ID NO: 127479 - DNA, 33 bp, Homo sapien
gaaaggtacaatgatcaactgaaaaaggaattt

SEQ ID NO: 127480 - DNA, 33 bp, Homo sapien
gaaaggtacaatgatcgactgaaaaaggaattt

SEQ ID NO: 127481 - DNA, 33 bp, Homo sapien
gaggacaggatgggaagaatacaaaagatgttt

SEQ ID NO: 127482 - DNA, 33 bp, Homo sapien
gaggacaggatgggaataatacaaaagatgttt

SEQ ID NO: 127483 - DNA, 33 bp, Homo sapien
cagcatgtatgtgatgcagtttcagtttctgaa

SEQ ID NO: 127484 - DNA, 33 bp, Homo sapien
cagcatgtatgtgatggagtttcagtttctgaa

SEQ ID NO: 127485 - DNA, 33 bp, Homo sapien
ccaggcagagaatacacaatgtaaggcaaaggc

SEQ ID NO: 127486 - DNA, 33 bp, Homo sapien
ccaggcagagaatacagaatgtaaggcaaaggc

SEQ ID NO: 127487 - DNA, 33 bp, Homo sapien
aatgtcacctaactaaatccttctctcacctcc

SEQ ID NO: 127488 - DNA, 33 bp, Homo sapien
aatgtcacctaactaagtccttctctcacctcc

SEQ ID NO: 127489 - DNA, 33 bp, Homo sapien
tctgtggaccctggctgaagtaacaaagctgta

SEQ ID NO: 127490 - DNA, 33 bp, Homo sapien
tctgtggaccctggcttaagtaacaaagctgta

SEQ ID NO: 127491 - DNA, 33 bp, Homo sapien
cctggaacctcaactaccacctctatactaatg

SEQ ID NO: 127492 - DNA, 33 bp, Homo sapien
cctggaacctcaactatcacctctatactaatg

SEQ ID NO: 127493 - DNA, 33 bp, Homo sapien
aagcaaaatttcatgccactggcaacccaatga

SEQ ID NO: 127494 - DNA, 33 bp, Homo sapien
aagcaaaatttcatgctactggcaacccaatga

SEQ ID NO: 127495 - DNA, 33 bp, Homo sapien
aaatggttgaaatggcaaattttatgttacatt

SEQ ID NO: 127496 - DNA, 33 bp, Homo sapien
aaatggttgaaatggcgaattttatgttacatt

SEQ ID NO: 127497 - DNA, 33 bp, Homo sapien
tggatgatgagaagaaagcacaaactctcgcat

SEQ ID NO: 127498 - DNA, 33 bp, Homo sapien
tggatgatgagaagaaggcacaaactctcgcat

SEQ ID NO: 127499 - DNA, 33 bp, Homo sapien
actggtttctgcctaccacttcctcccctacca

SEQ ID NO: 127500 - DNA, 33 bp, Homo sapien
actggtttctgcctactacttcctcccctacca

SEQ ID NO: 127501 - DNA, 33 bp, Homo sapien
agatgttaggttaaaacgcatcatatgaacgct

SEQ ID NO: 127502 - DNA, 33 bp, Homo sapien
agatgttaggttaaaatgcatcatatgaacgct

SEQ ID NO: 127503 - DNA, 33 bp, Homo sapien
atccaacatatagttaaaactactcaacagatg

SEQ ID NO: 127504 - DNA, 33 bp, Homo sapien
atccaacatatagttagaactactcaacagatg

SEQ ID NO: 127505 - DNA, 33 bp, Homo sapien
gaaaggggcatttgtcaaaaacaattacaggca

SEQ ID NO: 127506 - DNA, 33 bp, Homo sapien
gaaaggggcatttgtccaaaacaattacaggca

SEQ ID NO: 127507 - DNA, 33 bp, Homo sapien
tttccacctgaatgataaaccatagctactgaa

SEQ ID NO: 127508 - DNA, 33 bp, Homo sapien
tttccacctgaatgatgaaccatagctactgaa

SEQ ID NO: 127509 - DNA, 33 bp, Homo sapien
gagtgacatggacgaaggcagcagtatcactaa

SEQ ID NO: 127510 - DNA, 33 bp, Homo sapien
gagtgacatggacgaatgcagcagtatcactaa

SEQ ID NO: 127511 - DNA, 33 bp, Homo sapien
ggtggcaatactgatacgaactgaaaaaatttt

SEQ ID NO: 127512 - DNA, 33 bp, Homo sapien
ggtggcaatactgatatgaactgaaaaaatttt

SEQ ID NO: 127513 - DNA, 33 bp, Homo sapien
ctttgcataacattgaaaattctaaacagggtc

SEQ ID NO: 127514 - DNA, 33 bp, Homo sapien
ctttgcataacattgagaattctaaacagggtc

SEQ ID NO: 127515 - DNA, 33 bp, Homo sapien
caacagttgatactaacaaacatttggatttga

SEQ ID NO: 127516 - DNA, 33 bp, Homo sapien
caacagttgatactaataaacatttggatttga

SEQ ID NO: 127517 - DNA, 33 bp, Homo sapien
atcagtcaagttttcaataatatgcagcagagg

SEQ ID NO: 127518 - DNA, 33 bp, Homo sapien
atcagtcaagttttcagtaatatgcagcagagg

SEQ ID NO: 127519 - DNA, 33 bp, Homo sapien
acaagaccaagagttgaattttttttggagatg

SEQ ID NO: 127520 - DNA, 33 bp, Homo sapien
acaagaccaagagttgcattttttttggagatg

SEQ ID NO: 127521 - DNA, 33 bp, Homo sapien
cacttctaagacctaaagcaactgtgacctctt

SEQ ID NO: 127522 - DNA, 33 bp, Homo sapien
cacttctaagacctaaggcaactgtgacctctt

SEQ ID NO: 127523 - DNA, 33 bp, Homo sapien
aaagagattgaaaacaacagtgctgtcttttag

SEQ ID NO: 127524 - DNA, 33 bp, Homo sapien
aaagagattgaaaacatcagtgctgtcttttag

SEQ ID NO: 127525 - DNA, 33 bp, Homo sapien
ggtggagacacagatacgtccctggtgattgtt

SEQ ID NO: 127526 - DNA, 33 bp, Homo sapien
ggtggagacacagatatgtccctggtgattgtt

SEQ ID NO: 127527 - DNA, 33 bp, Homo sapien
tggatttacttagctacgtagattaagagggag

SEQ ID NO: 127528 - DNA, 33 bp, Homo sapien
tggatttacttagctatgtagattaagagggag

SEQ ID NO: 127529 - DNA, 33 bp, Homo sapien
ttcctgtcttagcctacacatcattacctaata

SEQ ID NO: 127530 - DNA, 33 bp, Homo sapien
ttcctgtcttagcctatacatcattacctaata

SEQ ID NO: 127531 - DNA, 33 bp, Homo sapien
gttatcaatccaatcccggagcataaagttgcc

SEQ ID NO: 127532 - DNA, 33 bp, Homo sapien
gttatcaatccaatcctggagcataaagttgcc

SEQ ID NO: 127533 - DNA, 33 bp, Homo sapien
tttggataatacagagaagtataaagcaagaag

SEQ ID NO: 127534 - DNA, 33 bp, Homo sapien
tttggataatacagaggagtataaagcaagaag

SEQ ID NO: 127535 - DNA, 33 bp, Homo sapien
gactattgggatgacagtggagggagacgctta

SEQ ID NO: 127536 - DNA, 33 bp, Homo sapien
gactattgggatgacattggagggagacgctta

SEQ ID NO: 127537 - DNA, 33 bp, Homo sapien
gcttatgcatctcataaaagctaaaaagtaata

SEQ ID NO: 127538 - DNA, 33 bp, Homo sapien
gcttatgcatctcatagaagctaaaaagtaata

SEQ ID NO: 127539 - DNA, 33 bp, Homo sapien
gcaagaatgaaccaaaagtcactaaatgccaca

SEQ ID NO: 127540 - DNA, 33 bp, Homo sapien
gcaagaatgaaccaaaggtcactaaatgccaca

SEQ ID NO: 127541 - DNA, 33 bp, Homo sapien
atcatgggttctatgacattaatgtttataaaa

SEQ ID NO: 127542 - DNA, 33 bp, Homo sapien
atcatgggttctatgatattaatgtttataaaa

SEQ ID NO: 127543 - DNA, 33 bp, Homo sapien
gctcctgtgagaaatacggatgggaaaggtggc

SEQ ID NO: 127544 - DNA, 33 bp, Homo sapien
gctcctgtgagaaatatggatgggaaaggtggc

SEQ ID NO: 127545 - DNA, 33 bp, Homo sapien
aattctaaccaaaggaatcaagagtcagtagcc

SEQ ID NO: 127546 - DNA, 33 bp, Homo sapien
aattctaaccaaaggagtcaagagtcagtagcc

SEQ ID NO: 127547 - DNA, 33 bp, Homo sapien
gaaccatgacaacagaaaatgatgaagttggtg

SEQ ID NO: 127548 - DNA, 33 bp, Homo sapien
gaaccatgacaacagacaatgatgaagttggtg

SEQ ID NO: 127549 - DNA, 33 bp, Homo sapien
gtgtttatccctaaaacgaggaatacagtcccc

SEQ ID NO: 127550 - DNA, 33 bp, Homo sapien
gtgtttatccctaaaatgaggaatacagtcccc

SEQ ID NO: 127551 - DNA, 33 bp, Homo sapien
attttgactttgaataagagtgcagagatcaga

SEQ ID NO: 127552 - DNA, 33 bp, Homo sapien
attttgactttgaataggagtgcagagatcaga

SEQ ID NO: 127553 - DNA, 33 bp, Homo sapien
atatcatcaaacctacacatggtgagaattata

SEQ ID NO: 127554 - DNA, 33 bp, Homo sapien
atatcatcaaacctacgcatggtgagaattata

SEQ ID NO: 127555 - DNA, 33 bp, Homo sapien
gtaaattagacctttcacttgcacaaaaggaaa

SEQ ID NO: 127556 - DNA, 33 bp, Homo sapien
gtaaattagacctttcccttgcacaaaaggaaa

SEQ ID NO: 127557 - DNA, 33 bp, Homo sapien
aaacaccttttttggaaagttgtcgtcatttga

SEQ ID NO: 127558 - DNA, 33 bp, Homo sapien
aaacaccttttttggagagttgtcgtcatttga

SEQ ID NO: 127559 - DNA, 33 bp, Homo sapien
ggtgtggtatttttcaactttcattttcttatg

SEQ ID NO: 127560 - DNA, 33 bp, Homo sapien
ggtgtggtatttttcatctttcattttcttatg

SEQ ID NO: 127561 - DNA, 33 bp, Homo sapien
caaaaatgaggcaataaaaatactaacctataa

SEQ ID NO: 127562 - DNA, 33 bp, Homo sapien
caaaaatgaggcaatataaatactaacctataa

SEQ ID NO: 127563 - DNA, 33 bp, Homo sapien
aattagagtgtgaactaaaaggtgcctccttag

SEQ ID NO: 127564 - DNA, 33 bp, Homo sapien
aattagagtgtgaactcaaaggtgcctccttag

SEQ ID NO: 127565 - DNA, 33 bp, Homo sapien
aattatattttaagaaccatctgtgagaacagg

SEQ ID NO: 127566 - DNA, 33 bp, Homo sapien
aattatattttaagaatcatctgtgagaacagg

SEQ ID NO: 127567 - DNA, 33 bp, Homo sapien
aagattaattcaacataaacagaaaacaaatga

SEQ ID NO: 127568 - DNA, 33 bp, Homo sapien
aagattaattcaacatgaacagaaaacaaatga

SEQ ID NO: 127569 - DNA, 33 bp, Homo sapien
gatattttcttggcaacgtttactttacaaaga

SEQ ID NO: 127570 - DNA, 33 bp, Homo sapien
gatattttcttggcaatgtttactttacaaaga

SEQ ID NO: 127571 - DNA, 33 bp, Homo sapien
atacaaccacaaaacaacgccaagaattattat

SEQ ID NO: 127572 - DNA, 33 bp, Homo sapien
atacaaccacaaaacagcgccaagaattattat

SEQ ID NO: 127573 - DNA, 33 bp, Homo sapien
cctaaaagggcatgaacccttggcaatattttg

SEQ ID NO: 127574 - DNA, 33 bp, Homo sapien
cctaaaagggcatgaatccttggcaatattttg

SEQ ID NO: 127575 - DNA, 33 bp, Homo sapien
tgcatatggatttaaaacagagcaaaatgaaac

SEQ ID NO: 127576 - DNA, 33 bp, Homo sapien
tgcatatggatttaaaccagagcaaaatgaaac

SEQ ID NO: 127577 - DNA, 33 bp, Homo sapien
acactgcttgaactagaaaatcagctttttaat

SEQ ID NO: 127578 - DNA, 33 bp, Homo sapien
acactgcttgaactagcaaatcagctttttaat

SEQ ID NO: 127579 - DNA, 33 bp, Homo sapien
tcagaggtcaatgcataataaacaagggcagtt

SEQ ID NO: 127580 - DNA, 33 bp, Homo sapien
tcagaggtcaatgcatgataaacaagggcagtt

SEQ ID NO: 127581 - DNA, 33 bp, Homo sapien
cttcctgccttttccaacttccagatgctgccc

SEQ ID NO: 127582 - DNA, 33 bp, Homo sapien
cttcctgccttttccagcttccagatgctgccc

SEQ ID NO: 127583 - DNA, 33 bp, Homo sapien
tcagtgaatacatgggaaagactcagtatgcca

SEQ ID NO: 127584 - DNA, 33 bp, Homo sapien
tcagtgaatacatggggaagactcagtatgcca

SEQ ID NO: 127585 - DNA, 33 bp, Homo sapien
agaatataagccaaacggttaaccacattatcc

SEQ ID NO: 127586 - DNA, 33 bp, Homo sapien
agaatataagccaaactgttaaccacattatcc

SEQ ID NO: 127587 - DNA, 33 bp, Homo sapien
cagctggttaggaaatcatttccggcttcaaac

SEQ ID NO: 127588 - DNA, 33 bp, Homo sapien
cagctggttaggaaatgatttccggcttcaaac

SEQ ID NO: 127589 - DNA, 33 bp, Homo sapien
atgcccttttcgttacaatacaatgagtcaaag

SEQ ID NO: 127590 - DNA, 33 bp, Homo sapien
atgcccttttcgttacgatacaatgagtcaaag

SEQ ID NO: 127591 - DNA, 33 bp, Homo sapien
tgtgtgttctgcacaacgtcaggggtgtggttc

SEQ ID NO: 127592 - DNA, 33 bp, Homo sapien
tgtgtgttctgcacaatgtcaggggtgtggttc

SEQ ID NO: 127593 - DNA, 33 bp, Homo sapien
tggtgaccatagttaacgcacaaaagagagaat

SEQ ID NO: 127594 - DNA, 33 bp, Homo sapien
tggtgaccatagttaatgcacaaaagagagaat

SEQ ID NO: 127595 - DNA, 33 bp, Homo sapien
tttgctgtcctttggaaccatgctgctcagtaa

SEQ ID NO: 127596 - DNA, 33 bp, Homo sapien
tttgctgtcctttggagccatgctgctcagtaa

SEQ ID NO: 127597 - DNA, 33 bp, Homo sapien
ggagctccatttaccaactagaaattgcttccc

SEQ ID NO: 127598 - DNA, 33 bp, Homo sapien
ggagctccatttaccacctagaaattgcttccc

SEQ ID NO: 127599 - DNA, 33 bp, Homo sapien
agaaggaaccaatagcacttagtgactgcggaa

SEQ ID NO: 127600 - DNA, 33 bp, Homo sapien
agaaggaaccaatagcgcttagtgactgcggaa

SEQ ID NO: 127601 - DNA, 33 bp, Homo sapien
agactcagtttcaccaaaagctggagctgagca

SEQ ID NO: 127602 - DNA, 33 bp, Homo sapien
agactcagtttcaccataagctggagctgagca

SEQ ID NO: 127603 - DNA, 33 bp, Homo sapien
ttccctctgctagacacaggattctgatgttag

SEQ ID NO: 127604 - DNA, 33 bp, Homo sapien
ttccctctgctagacataggattctgatgttag

SEQ ID NO: 127605 - DNA, 33 bp, Homo sapien
cagggtgtttctggcacaagagggacaagacct

SEQ ID NO: 127606 - DNA, 33 bp, Homo sapien
cagggtgtttctggcagaagagggacaagacct

SEQ ID NO: 127607 - DNA, 33 bp, Homo sapien
tgggaaacataaaccaacaaattactctataaa

SEQ ID NO: 127608 - DNA, 33 bp, Homo sapien
tgggaaacataaaccagcaaattactctataaa

SEQ ID NO: 127609 - DNA, 33 bp, Homo sapien
ataatggaagagttgacaacatggaacttgtat

SEQ ID NO: 127610 - DNA, 33 bp, Homo sapien
ataatggaagagttgataacatggaacttgtat

SEQ ID NO: 127611 - DNA, 33 bp, Homo sapien
atcgagacgcaacccaatggataatcccaaaca

SEQ ID NO: 127612 - DNA, 33 bp, Homo sapien
atcgagacgcaacccagtggataatcccaaaca

SEQ ID NO: 127613 - DNA, 33 bp, Homo sapien
gttttagagtttgctgaatgaggacagggtgct

SEQ ID NO: 127614 - DNA, 33 bp, Homo sapien
gttttagagtttgctggatgaggacagggtgct

SEQ ID NO: 127615 - DNA, 33 bp, Homo sapien
atgctgtttttccataagctgtcataacataga

SEQ ID NO: 127616 - DNA, 33 bp, Homo sapien
atgctgtttttccatacgctgtcataacataga

SEQ ID NO: 127617 - DNA, 33 bp, Homo sapien
cagctcattaatgttgacaaagcaccttctcat

SEQ ID NO: 127618 - DNA, 33 bp, Homo sapien
cagctcattaatgttgccaaagcaccttctcat

SEQ ID NO: 127619 - DNA, 33 bp, Homo sapien
gttcctgcttcaggacaagtgtttctctgctaa

SEQ ID NO: 127620 - DNA, 33 bp, Homo sapien
gttcctgcttcaggactagtgtttctctgctaa

SEQ ID NO: 127621 - DNA, 33 bp, Homo sapien
gaggcgattgcaccagaagatggtaccatttcc

SEQ ID NO: 127622 - DNA, 33 bp, Homo sapien
gaggcgattgcaccaggagatggtaccatttcc

SEQ ID NO: 127623 - DNA, 33 bp, Homo sapien
aaaattggaataattcccggggtcatttctgca

SEQ ID NO: 127624 - DNA, 33 bp, Homo sapien
aaaattggaataattctcggggtcatttctgca

SEQ ID NO: 127625 - DNA, 33 bp, Homo sapien
caataagctcccaggcaatgctcatgcagctgg

SEQ ID NO: 127626 - DNA, 33 bp, Homo sapien
caataagctcccaggcgatgctcatgcagctgg

SEQ ID NO: 127627 - DNA, 33 bp, Homo sapien
ctgaggtcctcttcctaaaagttctttatcatc

SEQ ID NO: 127628 - DNA, 33 bp, Homo sapien
ctgaggtcctcttcctgaaagttctttatcatc

SEQ ID NO: 127629 - DNA, 33 bp, Homo sapien
caaagattgtcataacacccaggagccaaagtc

SEQ ID NO: 127630 - DNA, 33 bp, Homo sapien
caaagattgtcataactcccaggagccaaagtc

SEQ ID NO: 127631 - DNA, 33 bp, Homo sapien
gtacatatgtatttggcactggggaagagcatt

SEQ ID NO: 127632 - DNA, 33 bp, Homo sapien
gtacatatgtatttggtactggggaagagcatt

SEQ ID NO: 127633 - DNA, 33 bp, Homo sapien
gcagcaacttgatggaactatcgacacaaaagg

SEQ ID NO: 127634 - DNA, 33 bp, Homo sapien
gcagcaacttgatggagctatcgacacaaaagg

SEQ ID NO: 127635 - DNA, 33 bp, Homo sapien
aagatgggaaagagatgacttgttcagggggag

SEQ ID NO: 127636 - DNA, 33 bp, Homo sapien
aagatgggaaagagattacttgttcagggggag

SEQ ID NO: 127637 - DNA, 33 bp, Homo sapien
tgagaacatgtgatgacctaaactgagggatgt

SEQ ID NO: 127638 - DNA, 33 bp, Homo sapien
tgagaacatgtgatgatctaaactgagggatgt

SEQ ID NO: 127639 - DNA, 33 bp, Homo sapien
tttcagactctgaaaaagtatggaaagttcctc

SEQ ID NO: 127640 - DNA, 33 bp, Homo sapien
tttcagactctgaaaaggtatggaaagttcctc

SEQ ID NO: 127641 - DNA, 33 bp, Homo sapien
catgcctgttttcacacagagtaaggtgcaaga

SEQ ID NO: 127642 - DNA, 33 bp, Homo sapien
catgcctgttttcacatagagtaaggtgcaaga

SEQ ID NO: 127643 - DNA, 33 bp, Homo sapien
gtgagtgattaaatccaactgtccatatatcaa

SEQ ID NO: 127644 - DNA, 33 bp, Homo sapien
gtgagtgattaaatcccactgtccatatatcaa

SEQ ID NO: 127645 - DNA, 33 bp, Homo sapien
taggcactgtagaaacagaactgaatgaggcac

SEQ ID NO: 127646 - DNA, 33 bp, Homo sapien
taggcactgtagaaacggaactgaatgaggcac

SEQ ID NO: 127647 - DNA, 33 bp, Homo sapien
agataaatatgcattacaagagttagttgagaa

SEQ ID NO: 127648 - DNA, 33 bp, Homo sapien
agataaatatgcattataagagttagttgagaa

SEQ ID NO: 127649 - DNA, 33 bp, Homo sapien
cagggagccaatcaagaattgggaaggaatcat

SEQ ID NO: 127650 - DNA, 33 bp, Homo sapien
cagggagccaatcaagtattgggaaggaatcat

SEQ ID NO: 127651 - DNA, 33 bp, Homo sapien
gaacaaagatgagtgacgaccccaaaatgggaa

SEQ ID NO: 127652 - DNA, 33 bp, Homo sapien
gaacaaagatgagtgatgaccccaaaatgggaa

SEQ ID NO: 127653 - DNA, 33 bp, Homo sapien
atatttgattgttcgacgaggaaaggtctcccc

SEQ ID NO: 127654 - DNA, 33 bp, Homo sapien
atatttgattgttcgatgaggaaaggtctcccc

SEQ ID NO: 127655 - DNA, 33 bp, Homo sapien
tcattggttctcaaatcaacgctgtcctcacta

SEQ ID NO: 127656 - DNA, 33 bp, Homo sapien
tcattggttctcaaattaacgctgtcctcacta

SEQ ID NO: 127657 - DNA, 33 bp, Homo sapien
cctcagtagctcagaacatgactgtacttggag

SEQ ID NO: 127658 - DNA, 33 bp, Homo sapien
cctcagtagctcagaatatgactgtacttggag

SEQ ID NO: 127659 - DNA, 33 bp, Homo sapien
agaaatgagcagcgtccctcctggaacattgat

SEQ ID NO: 127660 - DNA, 33 bp, Homo sapien
agaaatgagcagcgtctctcctggaacattgat

SEQ ID NO: 127661 - DNA, 33 bp, Homo sapien
ccattacactgtatcacctagctccttgtacat

SEQ ID NO: 127662 - DNA, 33 bp, Homo sapien
ccattacactgtatcatctagctccttgtacat

SEQ ID NO: 127663 - DNA, 33 bp, Homo sapien
gaggtcacagtctagaagggaatgtagttaacc

SEQ ID NO: 127664 - DNA, 33 bp, Homo sapien
gaggtcacagtctagaggggaatgtagttaacc

SEQ ID NO: 127665 - DNA, 33 bp, Homo sapien
caggaacagaaaaccaactgctgattgttttca

SEQ ID NO: 127666 - DNA, 33 bp, Homo sapien
caggaacagaaaaccagctgctgattgttttca

SEQ ID NO: 127667 - DNA, 33 bp, Homo sapien
ctcaatgccctcccccaaaatatctgcttggag

SEQ ID NO: 127668 - DNA, 33 bp, Homo sapien
ctcaatgccctccccccaaatatctgcttggag

SEQ ID NO: 127669 - DNA, 33 bp, Homo sapien
aaaaggcaagtgacaacactggaaaaaataaag

SEQ ID NO: 127670 - DNA, 33 bp, Homo sapien
aaaaggcaagtgacaatactggaaaaaataaag

SEQ ID NO: 127671 - DNA, 33 bp, Homo sapien
ggggcaggcattccaacttcctttccttttcct

SEQ ID NO: 127672 - DNA, 33 bp, Homo sapien
ggggcaggcattccaatttcctttccttttcct

SEQ ID NO: 127673 - DNA, 33 bp, Homo sapien
tagcataaatgaaacaatgtacccaacagggtc

SEQ ID NO: 127674 - DNA, 33 bp, Homo sapien
tagcataaatgaaacagtgtacccaacagggtc

SEQ ID NO: 127675 - DNA, 33 bp, Homo sapien
tccttctttccttctcaattgtctgtcatacag

SEQ ID NO: 127676 - DNA, 33 bp, Homo sapien
tccttctttccttctctattgtctgtcatacag

SEQ ID NO: 127677 - DNA, 33 bp, Homo sapien
ttgatcatttggaagaatcttatgctatccaaa

SEQ ID NO: 127678 - DNA, 33 bp, Homo sapien
ttgatcatttggaagattcttatgctatccaaa

SEQ ID NO: 127679 - DNA, 33 bp, Homo sapien
ggcaatccttgtcataaagtggcagaaaacttg

SEQ ID NO: 127680 - DNA, 33 bp, Homo sapien
ggcaatccttgtcatagagtggcagaaaacttg

SEQ ID NO: 127681 - DNA, 33 bp, Homo sapien
ctgcccccgaccatacacagatatacacaagac

SEQ ID NO: 127682 - DNA, 33 bp, Homo sapien
ctgcccccgaccatacgcagatatacacaagac

SEQ ID NO: 127683 - DNA, 33 bp, Homo sapien
cacaaacctattttcacctgcagccttgccccc

SEQ ID NO: 127684 - DNA, 33 bp, Homo sapien
cacaaacctattttcatctgcagccttgccccc

SEQ ID NO: 127685 - DNA, 33 bp, Homo sapien
ctaagaggaaagcacactaacaagggagataat

SEQ ID NO: 127686 - DNA, 33 bp, Homo sapien
ctaagaggaaagcacattaacaagggagataat

SEQ ID NO: 127687 - DNA, 33 bp, Homo sapien
ggaagagagtccataacaatcattggcatttac

SEQ ID NO: 127688 - DNA, 33 bp, Homo sapien
ggaagagagtccataataatcattggcatttac

SEQ ID NO: 127689 - DNA, 33 bp, Homo sapien
gcagagactttggtagaaaggttttcataggaa

SEQ ID NO: 127690 - DNA, 33 bp, Homo sapien
gcagagactttggtaggaaggttttcataggaa

SEQ ID NO: 127691 - DNA, 33 bp, Homo sapien
taatacttccacttgtaaacataaaaaagtcat

SEQ ID NO: 127692 - DNA, 33 bp, Homo sapien
taatacttccacttgttaacataaaaaagtcat

SEQ ID NO: 127693 - DNA, 33 bp, Homo sapien
tacaaggccaagaaaacaccagatcaaagagct

SEQ ID NO: 127694 - DNA, 33 bp, Homo sapien
tacaaggccaagaaaataccagatcaaagagct

SEQ ID NO: 127695 - DNA, 33 bp, Homo sapien
cagagctgactctaaaatgctttctatccactg

SEQ ID NO: 127696 - DNA, 33 bp, Homo sapien
cagagctgactctaaagtgctttctatccactg

SEQ ID NO: 127697 - DNA, 33 bp, Homo sapien
gaaaacatttggcagactagaaacggcatataa

SEQ ID NO: 127698 - DNA, 33 bp, Homo sapien
gaaaacatttggcagattagaaacggcatataa

SEQ ID NO: 127699 - DNA, 33 bp, Homo sapien
ctcctagcgagacttgcacagcctgcttcaaaa

SEQ ID NO: 127700 - DNA, 33 bp, Homo sapien
ctcctagcgagacttggacagcctgcttcaaaa

SEQ ID NO: 127701 - DNA, 33 bp, Homo sapien
gacattctaagagatccattgaagctcagacta

SEQ ID NO: 127702 - DNA, 33 bp, Homo sapien
gacattctaagagatctattgaagctcagacta

SEQ ID NO: 127703 - DNA, 33 bp, Homo sapien
tgtatccaaaaaccaggccttcctcaagaatgt

SEQ ID NO: 127704 - DNA, 33 bp, Homo sapien
tgtatccaaaaaccagtccttcctcaagaatgt

SEQ ID NO: 127705 - DNA, 33 bp, Homo sapien
agtcactgaatgtctccgaacctcttttctcat

SEQ ID NO: 127706 - DNA, 33 bp, Homo sapien
agtcactgaatgtctctgaacctcttttctcat

SEQ ID NO: 127707 - DNA, 33 bp, Homo sapien
gggaacaaagaacatacggatcaaaggtttggg

SEQ ID NO: 127708 - DNA, 33 bp, Homo sapien
gggaacaaagaacatatggatcaaaggtttggg

SEQ ID NO: 127709 - DNA, 33 bp, Homo sapien
accacccagctcaaagacagcaactatcaactg

SEQ ID NO: 127710 - DNA, 33 bp, Homo sapien
accacccagctcaaaggcagcaactatcaactg

SEQ ID NO: 127711 - DNA, 33 bp, Homo sapien
gtcatcgtttaattggcagtatctttgtttttt

SEQ ID NO: 127712 - DNA, 33 bp, Homo sapien
gtcatcgtttaattggtagtatctttgtttttt

SEQ ID NO: 127713 - DNA, 33 bp, Homo sapien
gaaagagagagagatcaaactcagaactgtggg

SEQ ID NO: 127714 - DNA, 33 bp, Homo sapien
gaaagagagagagatcgaactcagaactgtggg

SEQ ID NO: 127715 - DNA, 33 bp, Homo sapien
tatattcagattgaccacattctttttggacag

SEQ ID NO: 127716 - DNA, 33 bp, Homo sapien
tatattcagattgaccgcattctttttggacag

SEQ ID NO: 127717 - DNA, 33 bp, Homo sapien
tgactataaatattggaatttagctgtcatgtg

SEQ ID NO: 127718 - DNA, 33 bp, Homo sapien
tgactataaatattgggatttagctgtcatgtg

SEQ ID NO: 127719 - DNA, 33 bp, Homo sapien
attttttttatgatgagtagtaccattttaaat

SEQ ID NO: 127720 - DNA, 33 bp, Homo sapien
attttttttatgatgattagtaccattttaaat

SEQ ID NO: 127721 - DNA, 33 bp, Homo sapien
aaagacacaaaacacaaaaaagcattataacaa

SEQ ID NO: 127722 - DNA, 33 bp, Homo sapien
aaagacacaaaacacataaaagcattataacaa

SEQ ID NO: 127723 - DNA, 33 bp, Homo sapien
tttttttatttcccagaaaacccagcacagaat

SEQ ID NO: 127724 - DNA, 33 bp, Homo sapien
tttttttatttcccaggaaacccagcacagaat

SEQ ID NO: 127725 - DNA, 33 bp, Homo sapien
taatataatagtcttaaagcaaccatactgtaa

SEQ ID NO: 127726 - DNA, 33 bp, Homo sapien
taatataatagtcttatagcaaccatactgtaa

SEQ ID NO: 127727 - DNA, 33 bp, Homo sapien
ttggttcattgagttaagtaaatcttccacagg

SEQ ID NO: 127728 - DNA, 33 bp, Homo sapien
ttggttcattgagttacgtaaatcttccacagg

SEQ ID NO: 127729 - DNA, 33 bp, Homo sapien
catacactcaaacttacatccacatcatttagg

SEQ ID NO: 127730 - DNA, 33 bp, Homo sapien
catacactcaaacttatatccacatcatttagg

SEQ ID NO: 127731 - DNA, 33 bp, Homo sapien
aacaactaagacgctcaatttgccatgggaagc

SEQ ID NO: 127732 - DNA, 33 bp, Homo sapien
aacaactaagacgctccatttgccatgggaagc

SEQ ID NO: 127733 - DNA, 33 bp, Homo sapien
tgactcctgtttcccactcagaagcaaccacac

SEQ ID NO: 127734 - DNA, 33 bp, Homo sapien
tgactcctgtttcccattcagaagcaaccacac

SEQ ID NO: 127735 - DNA, 33 bp, Homo sapien
caaatgctgaaaaggacacagaacaacaggaac

SEQ ID NO: 127736 - DNA, 33 bp, Homo sapien
caaatgctgaaaaggatacagaacaacaggaac

SEQ ID NO: 127737 - DNA, 33 bp, Homo sapien
tatgctctgacaaatacccatgtgcaggatttt

SEQ ID NO: 127738 - DNA, 33 bp, Homo sapien
tatgctctgacaaatatccatgtgcaggatttt

SEQ ID NO: 127739 - DNA, 33 bp, Homo sapien
gagtcagaagtcaggacgtggaaggagagcatg

SEQ ID NO: 127740 - DNA, 33 bp, Homo sapien
gagtcagaagtcaggatgtggaaggagagcatg

SEQ ID NO: 127741 - DNA, 33 bp, Homo sapien
atctactctgttagatcatacaaattcaggagg

SEQ ID NO: 127742 - DNA, 33 bp, Homo sapien
atctactctgttagatgatacaaattcaggagg

SEQ ID NO: 127743 - DNA, 33 bp, Homo sapien
agtcactgtcaagtccaagcaagttacttaagg

SEQ ID NO: 127744 - DNA, 33 bp, Homo sapien
agtcactgtcaagtccgagcaagttacttaagg

SEQ ID NO: 127745 - DNA, 33 bp, Homo sapien
cttggtaaacatttaaagtagcagccagttgta

SEQ ID NO: 127746 - DNA, 33 bp, Homo sapien
cttggtaaacatttaaggtagcagccagttgta

SEQ ID NO: 127747 - DNA, 33 bp, Homo sapien
aaggtgactctaaaaaaaggttgctggccaggt

SEQ ID NO: 127748 - DNA, 33 bp, Homo sapien
aaggtgactctaaaaagaggttgctggccaggt

SEQ ID NO: 127749 - DNA, 33 bp, Homo sapien
gcatcagaaatttgcaatcattaagcccaagac

SEQ ID NO: 127750 - DNA, 33 bp, Homo sapien
gcatcagaaatttgcattcattaagcccaagac

SEQ ID NO: 127751 - DNA, 33 bp, Homo sapien
tgaaaactgtaataagacagaatttgccaaaac

SEQ ID NO: 127752 - DNA, 33 bp, Homo sapien
tgaaaactgtaataaggcagaatttgccaaaac

SEQ ID NO: 127753 - DNA, 33 bp, Homo sapien
tactaaaatctaagaaattcaagtgggacaaag

SEQ ID NO: 127754 - DNA, 33 bp, Homo sapien
tactaaaatctaagaagttcaagtgggacaaag

SEQ ID NO: 127755 - DNA, 33 bp, Homo sapien
cttttcttccacaacaatatcagttttcttgta

SEQ ID NO: 127756 - DNA, 33 bp, Homo sapien
cttttcttccacaacagtatcagttttcttgta

SEQ ID NO: 127757 - DNA, 33 bp, Homo sapien
aacaagatgtcaatgtaaaaagtaaagtaatac

SEQ ID NO: 127758 - DNA, 33 bp, Homo sapien
aacaagatgtcaatgtcaaaagtaaagtaatac

SEQ ID NO: 127759 - DNA, 33 bp, Homo sapien
tttactgcatcataagaaagtttaggttggaag

SEQ ID NO: 127760 - DNA, 33 bp, Homo sapien
tttactgcatcataaggaagtttaggttggaag

SEQ ID NO: 127761 - DNA, 33 bp, Homo sapien
actccctaacgtggaaaactgtaaatcaaaatg

SEQ ID NO: 127762 - DNA, 33 bp, Homo sapien
actccctaacgtggaagactgtaaatcaaaatg

SEQ ID NO: 127763 - DNA, 33 bp, Homo sapien
gggcctagagagaaccagaggggattgaatttc

SEQ ID NO: 127764 - DNA, 33 bp, Homo sapien
gggcctagagagaaccggaggggattgaatttc

SEQ ID NO: 127765 - DNA, 33 bp, Homo sapien
aatcacatgtagagccaattaaaacatagattc

SEQ ID NO: 127766 - DNA, 33 bp, Homo sapien
aatcacatgtagagccgattaaaacatagattc

SEQ ID NO: 127767 - DNA, 33 bp, Homo sapien
agtttccagtttggggaaattataaataacatt

SEQ ID NO: 127768 - DNA, 33 bp, Homo sapien
agtttccagtttgggggaattataaataacatt

SEQ ID NO: 127769 - DNA, 33 bp, Homo sapien
ttcctggaatggtagaataggagaacataagat

SEQ ID NO: 127770 - DNA, 33 bp, Homo sapien
ttcctggaatggtagagtaggagaacataagat

SEQ ID NO: 127771 - DNA, 33 bp, Homo sapien
tctctaccatcaatgaatactcaagaaatcaaa

SEQ ID NO: 127772 - DNA, 33 bp, Homo sapien
tctctaccatcaatgagtactcaagaaatcaaa

SEQ ID NO: 127773 - DNA, 33 bp, Homo sapien
cacattactacaatgggcaaaggctctgatcat

SEQ ID NO: 127774 - DNA, 33 bp, Homo sapien
cacattactacaatggtcaaaggctctgatcat

SEQ ID NO: 127775 - DNA, 33 bp, Homo sapien
attgagccacatgcccaaccttaaatttttttt

SEQ ID NO: 127776 - DNA, 33 bp, Homo sapien
attgagccacatgcccgaccttaaatttttttt

SEQ ID NO: 127777 - DNA, 33 bp, Homo sapien
ggttgccatcatggaaacctctttctgtgtctg

SEQ ID NO: 127778 - DNA, 33 bp, Homo sapien
ggttgccatcatggaagcctctttctgtgtctg

SEQ ID NO: 127779 - DNA, 33 bp, Homo sapien
actcaaacctatgttacctttgcagagattctc

SEQ ID NO: 127780 - DNA, 33 bp, Homo sapien
actcaaacctatgttatctttgcagagattctc

SEQ ID NO: 127781 - DNA, 33 bp, Homo sapien
tttaaagcttattccacgcttgctttctatatt

SEQ ID NO: 127782 - DNA, 33 bp, Homo sapien
tttaaagcttattccatgcttgctttctatatt

SEQ ID NO: 127783 - DNA, 33 bp, Homo sapien
gtgctgaattctcaagacatacaaatttgctgg

SEQ ID NO: 127784 - DNA, 33 bp, Homo sapien
gtgctgaattctcaaggcatacaaatttgctgg

SEQ ID NO: 127785 - DNA, 33 bp, Homo sapien
tgttatgtaagttagaccttgacagtaataagt

SEQ ID NO: 127786 - DNA, 33 bp, Homo sapien
tgttatgtaagttagagcttgacagtaataagt

SEQ ID NO: 127787 - DNA, 33 bp, Homo sapien
aaaattaaatcaggcccattgcttaatcacctt

SEQ ID NO: 127788 - DNA, 33 bp, Homo sapien
aaaattaaatcaggcctattgcttaatcacctt

SEQ ID NO: 127789 - DNA, 33 bp, Homo sapien
aaggtgctagcctcatcaataggacaattaaaa

SEQ ID NO: 127790 - DNA, 33 bp, Homo sapien
aaggtgctagcctcatgaataggacaattaaaa

SEQ ID NO: 127791 - DNA, 33 bp, Homo sapien
cagagttgcacaatcaatactactaatttcaga

SEQ ID NO: 127792 - DNA, 33 bp, Homo sapien
cagagttgcacaatcagtactactaatttcaga

SEQ ID NO: 127793 - DNA, 33 bp, Homo sapien
tacattctccaaatgacacttttggtagaatgt

SEQ ID NO: 127794 - DNA, 33 bp, Homo sapien
tacattctccaaatgatacttttggtagaatgt

SEQ ID NO: 127795 - DNA, 33 bp, Homo sapien
gaataaagcctagtaaacatggcacgctagtga

SEQ ID NO: 127796 - DNA, 33 bp, Homo sapien
gaataaagcctagtaagcatggcacgctagtga

SEQ ID NO: 127797 - DNA, 33 bp, Homo sapien
agtttttacagcaagcacatcaaattaaagaga

SEQ ID NO: 127798 - DNA, 33 bp, Homo sapien
agtttttacagcaagcgcatcaaattaaagaga

SEQ ID NO: 127799 - DNA, 33 bp, Homo sapien
ccacagaaagattaaggcaggcttatcagctgc

SEQ ID NO: 127800 - DNA, 33 bp, Homo sapien
ccacagaaagattaagtcaggcttatcagctgc

SEQ ID NO: 127801 - DNA, 33 bp, Homo sapien
aatctttctgtggagcaacttctaccgctgatg

SEQ ID NO: 127802 - DNA, 33 bp, Homo sapien
aatctttctgtggagccacttctaccgctgatg

SEQ ID NO: 127803 - DNA, 33 bp, Homo sapien
aatcaatgggaaagcacgataaaagcactgact

SEQ ID NO: 127804 - DNA, 33 bp, Homo sapien
aatcaatgggaaagcatgataaaagcactgact

SEQ ID NO: 127805 - DNA, 33 bp, Homo sapien
tgagtctgcaatgagccaagatgtcaccactgc

SEQ ID NO: 127806 - DNA, 33 bp, Homo sapien
tgagtctgcaatgagcgaagatgtcaccactgc

SEQ ID NO: 127807 - DNA, 33 bp, Homo sapien
aaatcaaagagacccaagacagagtaaaagtag

SEQ ID NO: 127808 - DNA, 33 bp, Homo sapien
aaatcaaagagacccaggacagagtaaaagtag

SEQ ID NO: 127809 - DNA, 33 bp, Homo sapien
ttgaggagggtcagaacttcatagcctccagct

SEQ ID NO: 127810 - DNA, 33 bp, Homo sapien
ttgaggagggtcagaatttcatagcctccagct

SEQ ID NO: 127811 - DNA, 33 bp, Homo sapien
tgatggggtgggtaaaattctacttaattagat

SEQ ID NO: 127812 - DNA, 33 bp, Homo sapien
tgatggggtgggtaaagttctacttaattagat

SEQ ID NO: 127813 - DNA, 33 bp, Homo sapien
agtttgagctcttataataacatttaccatgct

SEQ ID NO: 127814 - DNA, 33 bp, Homo sapien
agtttgagctcttatagtaacatttaccatgct

SEQ ID NO: 127815 - DNA, 33 bp, Homo sapien
ggcacagcaagtgttcccagttttagatactgt

SEQ ID NO: 127816 - DNA, 33 bp, Homo sapien
ggcacagcaagtgttcgcagttttagatactgt

SEQ ID NO: 127817 - DNA, 33 bp, Homo sapien
agcatggtgtgataagaaacacattagagttta

SEQ ID NO: 127818 - DNA, 33 bp, Homo sapien
agcatggtgtgataaggaacacattagagttta

SEQ ID NO: 127819 - DNA, 33 bp, Homo sapien
ctcaacctaaacagtacagtgcaagtcatatat

SEQ ID NO: 127820 - DNA, 33 bp, Homo sapien
ctcaacctaaacagtatagtgcaagtcatatat

SEQ ID NO: 127821 - DNA, 33 bp, Homo sapien
cagaggaagccctttgcaagagaatttttctga

SEQ ID NO: 127822 - DNA, 33 bp, Homo sapien
cagaggaagccctttgtaagagaatttttctga

SEQ ID NO: 127823 - DNA, 33 bp, Homo sapien
ttattgtatccagtcaaaatccagctttccata

SEQ ID NO: 127824 - DNA, 33 bp, Homo sapien
ttattgtatccagtcagaatccagctttccata

SEQ ID NO: 127825 - DNA, 33 bp, Homo sapien
caagatctcaccactgcactcttgcactctagc

SEQ ID NO: 127826 - DNA, 33 bp, Homo sapien
caagatctcaccactgtactcttgcactctagc

SEQ ID NO: 127827 - DNA, 33 bp, Homo sapien
ggcataccaagagaaccaaccactgcttgggta

SEQ ID NO: 127828 - DNA, 33 bp, Homo sapien
ggcataccaagagaacgaaccactgcttgggta

SEQ ID NO: 127829 - DNA, 33 bp, Homo sapien
caatcaataactaaaccctgctgaatccttctt

SEQ ID NO: 127830 - DNA, 33 bp, Homo sapien
caatcaataactaaactctgctgaatccttctt

SEQ ID NO: 127831 - DNA, 33 bp, Homo sapien
catagcttgtcaattccaaatcttttatttatt

SEQ ID NO: 127832 - DNA, 33 bp, Homo sapien
catagcttgtcaattctaaatcttttatttatt

SEQ ID NO: 127833 - DNA, 33 bp, Homo sapien
tcaagattcagctaccaatttacaaagaaaata

SEQ ID NO: 127834 - DNA, 33 bp, Homo sapien
tcaagattcagctaccgatttacaaagaaaata

SEQ ID NO: 127835 - DNA, 33 bp, Homo sapien
gttagtgaacagtttaccatcactaatggaggt

SEQ ID NO: 127836 - DNA, 33 bp, Homo sapien
gttagtgaacagtttatcatcactaatggaggt

SEQ ID NO: 127837 - DNA, 33 bp, Homo sapien
cactgttcaacagaagaataatagaagccacat

SEQ ID NO: 127838 - DNA, 33 bp, Homo sapien
cactgttcaacagaagtataatagaagccacat

SEQ ID NO: 127839 - DNA, 33 bp, Homo sapien
tttattcctcttactaagcaatgttacttcagg

SEQ ID NO: 127840 - DNA, 33 bp, Homo sapien
tttattcctcttactaggcaatgttacttcagg

SEQ ID NO: 127841 - DNA, 33 bp, Homo sapien
aacaaaaccaaccttcaaagatgaagcaaaatg

SEQ ID NO: 127842 - DNA, 33 bp, Homo sapien
aacaaaaccaaccttcgaagatgaagcaaaatg

SEQ ID NO: 127843 - DNA, 33 bp, Homo sapien
gaaatggctgggaggggaaatagattcagtcat

SEQ ID NO: 127844 - DNA, 33 bp, Homo sapien
gaaatggctgggagggtaaatagattcagtcat

SEQ ID NO: 127845 - DNA, 33 bp, Homo sapien
aacccactatcttgacaatgaacccactcccgt

SEQ ID NO: 127846 - DNA, 33 bp, Homo sapien
aacccactatcttgacgatgaacccactcccgt

SEQ ID NO: 127847 - DNA, 33 bp, Homo sapien
tcgaatgttgattatacgttttctatcaaatta

SEQ ID NO: 127848 - DNA, 33 bp, Homo sapien
tcgaatgttgattatatgttttctatcaaatta

SEQ ID NO: 127849 - DNA, 33 bp, Homo sapien
gggaactgaattcctaaggctcacaagtccttc

SEQ ID NO: 127850 - DNA, 33 bp, Homo sapien
gggaactgaattcctatggctcacaagtccttc

SEQ ID NO: 127851 - DNA, 33 bp, Homo sapien
gttgtgggtatttctacaaccaaaagccatcct

SEQ ID NO: 127852 - DNA, 33 bp, Homo sapien
gttgtgggtatttctagaaccaaaagccatcct

SEQ ID NO: 127853 - DNA, 33 bp, Homo sapien
caaggtattggtaagccctgaactcatcacatg

SEQ ID NO: 127854 - DNA, 33 bp, Homo sapien
caaggtattggtaagctctgaactcatcacatg

SEQ ID NO: 127855 - DNA, 33 bp, Homo sapien
cacatgggaagacactaaagctgaatgaagcct

SEQ ID NO: 127856 - DNA, 33 bp, Homo sapien
cacatgggaagacactcaagctgaatgaagcct

SEQ ID NO: 127857 - DNA, 33 bp, Homo sapien
gcccactaggtcttccaatggatactatgacca

SEQ ID NO: 127858 - DNA, 33 bp, Homo sapien
gcccactaggtcttccgatggatactatgacca

SEQ ID NO: 127859 - DNA, 33 bp, Homo sapien
attgctttaccaaggccgacttttctgtcctcc

SEQ ID NO: 127860 - DNA, 33 bp, Homo sapien
attgctttaccaaggctgacttttctgtcctcc

SEQ ID NO: 127861 - DNA, 33 bp, Homo sapien
cctgatatatttgtatgaaggctgcagagaggt

SEQ ID NO: 127862 - DNA, 33 bp, Homo sapien
cctgatatatttgtattaaggctgcagagaggt

SEQ ID NO: 127863 - DNA, 33 bp, Homo sapien
cagaagcttctcaaaacgatggaataactgtat

SEQ ID NO: 127864 - DNA, 33 bp, Homo sapien
cagaagcttctcaaaaggatggaataactgtat

SEQ ID NO: 127865 - DNA, 33 bp, Homo sapien
attaactcatggccaaacttgtcccatgtaccc

SEQ ID NO: 127866 - DNA, 33 bp, Homo sapien
attaactcatggccaatcttgtcccatgtaccc

SEQ ID NO: 127867 - DNA, 33 bp, Homo sapien
catgctttaattcacccagctacaatcattaac

SEQ ID NO: 127868 - DNA, 33 bp, Homo sapien
catgctttaattcaccgagctacaatcattaac

SEQ ID NO: 127869 - DNA, 33 bp, Homo sapien
tccagctctagcaagtaaaaagaaggaacggca

SEQ ID NO: 127870 - DNA, 33 bp, Homo sapien
tccagctctagcaagtgaaaagaaggaacggca

SEQ ID NO: 127871 - DNA, 33 bp, Homo sapien
aatacaaccaattttcaaacacctcgagagatc

SEQ ID NO: 127872 - DNA, 33 bp, Homo sapien
aatacaaccaattttcgaacacctcgagagatc

SEQ ID NO: 127873 - DNA, 33 bp, Homo sapien
tttcccctgcacaccaccagtttgggaaaggcc

SEQ ID NO: 127874 - DNA, 33 bp, Homo sapien
tttcccctgcacaccatcagtttgggaaaggcc

SEQ ID NO: 127875 - DNA, 33 bp, Homo sapien
acaatgattcctaaacactgcctagggagaaat

SEQ ID NO: 127876 - DNA, 33 bp, Homo sapien
acaatgattcctaaaccctgcctagggagaaat

SEQ ID NO: 127877 - DNA, 33 bp, Homo sapien
atagtttgcctgcaggaaagttaatagatctta

SEQ ID NO: 127878 - DNA, 33 bp, Homo sapien
atagtttgcctgcagggaagttaatagatctta

SEQ ID NO: 127879 - DNA, 33 bp, Homo sapien
tttcccagagaaaaggccataatttgaggggtt

SEQ ID NO: 127880 - DNA, 33 bp, Homo sapien
tttcccagagaaaagggcataatttgaggggtt

SEQ ID NO: 127881 - DNA, 33 bp, Homo sapien
cagtccaagacctcacacccccgacaagttaat

SEQ ID NO: 127882 - DNA, 33 bp, Homo sapien
cagtccaagacctcacgcccccgacaagttaat

SEQ ID NO: 127883 - DNA, 33 bp, Homo sapien
tttcctgtctctaacagggggataataatagtg

SEQ ID NO: 127884 - DNA, 33 bp, Homo sapien
tttcctgtctctaacatggggataataatagtg

SEQ ID NO: 127885 - DNA, 33 bp, Homo sapien
tagagtttgaattggggaagaaaataccacggt

SEQ ID NO: 127886 - DNA, 33 bp, Homo sapien
tagagtttgaattgggtaagaaaataccacggt

SEQ ID NO: 127887 - DNA, 33 bp, Homo sapien
ttagtctgtagataaaaggcgcaaagttaagtt

SEQ ID NO: 127888 - DNA, 33 bp, Homo sapien
ttagtctgtagataaatggcgcaaagttaagtt

SEQ ID NO: 127889 - DNA, 33 bp, Homo sapien
tcccctcccacaaaaagaatgaaaagctaggtc

SEQ ID NO: 127890 - DNA, 33 bp, Homo sapien
tcccctcccacaaaaataatgaaaagctaggtc

SEQ ID NO: 127891 - DNA, 33 bp, Homo sapien
tttaaagaatgtgatcagaattgcactcaggaa

SEQ ID NO: 127892 - DNA, 33 bp, Homo sapien
tttaaagaatgtgatcggaattgcactcaggaa

SEQ ID NO: 127893 - DNA, 33 bp, Homo sapien
tgctttcttcattacactaacctttgtacttaa

SEQ ID NO: 127894 - DNA, 33 bp, Homo sapien
tgctttcttcattacagtaacctttgtacttaa

SEQ ID NO: 127895 - DNA, 33 bp, Homo sapien
tagttactaaccaagaagaaatcattttttccc

SEQ ID NO: 127896 - DNA, 33 bp, Homo sapien
tagttactaaccaagaggaaatcattttttccc

SEQ ID NO: 127897 - DNA, 33 bp, Homo sapien
aaggacatagctgaaccgaacagtaccatcaat

SEQ ID NO: 127898 - DNA, 33 bp, Homo sapien
aaggacatagctgaactgaacagtaccatcaat

SEQ ID NO: 127899 - DNA, 33 bp, Homo sapien
taatgataaaatggtcaattctccaagaagaca

SEQ ID NO: 127900 - DNA, 33 bp, Homo sapien
taatgataaaatggtcgattctccaagaagaca

SEQ ID NO: 127901 - DNA, 33 bp, Homo sapien
gttattgtttagaaaggattctatcagtgtttt

SEQ ID NO: 127902 - DNA, 33 bp, Homo sapien
gttattgtttagaaagtattctatcagtgtttt

SEQ ID NO: 127903 - DNA, 33 bp, Homo sapien
acaatgtcacagactacctcctaaatatcaaat

SEQ ID NO: 127904 - DNA, 33 bp, Homo sapien
acaatgtcacagactatctcctaaatatcaaat

SEQ ID NO: 127905 - DNA, 33 bp, Homo sapien
agaagagataatttaacgaaaggcacatttata

SEQ ID NO: 127906 - DNA, 33 bp, Homo sapien
agaagagataatttaatgaaaggcacatttata

SEQ ID NO: 127907 - DNA, 33 bp, Homo sapien
gactatcagagtacgtaaagaacatctcatgga

SEQ ID NO: 127908 - DNA, 33 bp, Homo sapien
gactatcagagtacgtgaagaacatctcatgga

SEQ ID NO: 127909 - DNA, 33 bp, Homo sapien
gtgatggtactttcaccgatataacaaggttgc

SEQ ID NO: 127910 - DNA, 33 bp, Homo sapien
gtgatggtactttcactgatataacaaggttgc

SEQ ID NO: 127911 - DNA, 33 bp, Homo sapien
actcttgtatgataaacacacaaagaagcagac

SEQ ID NO: 127912 - DNA, 33 bp, Homo sapien
actcttgtatgataaatacacaaagaagcagac

SEQ ID NO: 127913 - DNA, 33 bp, Homo sapien
tttgcaatttcagacaagagtcctttatcagat

SEQ ID NO: 127914 - DNA, 33 bp, Homo sapien
tttgcaatttcagacaggagtcctttatcagat

SEQ ID NO: 127915 - DNA, 33 bp, Homo sapien
caccgcacctggtcgactattgtattttctatc

SEQ ID NO: 127916 - DNA, 33 bp, Homo sapien
caccgcacctggtcgattattgtattttctatc

SEQ ID NO: 127917 - DNA, 33 bp, Homo sapien
cacttctgttgtctaaaccattagtgattctgg

SEQ ID NO: 127918 - DNA, 33 bp, Homo sapien
cacttctgttgtctaacccattagtgattctgg

SEQ ID NO: 127919 - DNA, 33 bp, Homo sapien
tattaatcagcttttgcagttagtacatgatag

SEQ ID NO: 127920 - DNA, 33 bp, Homo sapien
tattaatcagcttttgtagttagtacatgatag

SEQ ID NO: 127921 - DNA, 33 bp, Homo sapien
gccctaaatgtgaagccgagatatttttatctt

SEQ ID NO: 127922 - DNA, 33 bp, Homo sapien
gccctaaatgtgaagctgagatatttttatctt

SEQ ID NO: 127923 - DNA, 33 bp, Homo sapien
cacatggaatttggaagtgataaatgtttcaag

SEQ ID NO: 127924 - DNA, 33 bp, Homo sapien
cacatggaatttggaattgataaatgtttcaag

SEQ ID NO: 127925 - DNA, 33 bp, Homo sapien
tgtattttcttagtaacaggaagaatttctgtg

SEQ ID NO: 127926 - DNA, 33 bp, Homo sapien
tgtattttcttagtaataggaagaatttctgtg

SEQ ID NO: 127927 - DNA, 33 bp, Homo sapien
gtaagctgtgattataacaaaactatcttccaa

SEQ ID NO: 127928 - DNA, 33 bp, Homo sapien
gtaagctgtgattatagcaaaactatcttccaa

SEQ ID NO: 127929 - DNA, 33 bp, Homo sapien
ctatcatttaaccaaaaagctcaatgtcaaaat

SEQ ID NO: 127930 - DNA, 33 bp, Homo sapien
ctatcatttaaccaaagagctcaatgtcaaaat

SEQ ID NO: 127931 - DNA, 33 bp, Homo sapien
atcattacatcttaacagaaaaacgataagcaa

SEQ ID NO: 127932 - DNA, 33 bp, Homo sapien
atcattacatcttaactgaaaaacgataagcaa

SEQ ID NO: 127933 - DNA, 33 bp, Homo sapien
ttaactgaaaatggcccaggtagctgagttgcc

SEQ ID NO: 127934 - DNA, 33 bp, Homo sapien
ttaactgaaaatggcctaggtagctgagttgcc

SEQ ID NO: 127935 - DNA, 33 bp, Homo sapien
ccattttcagttaagacgtaatgatactagaga

SEQ ID NO: 127936 - DNA, 33 bp, Homo sapien
ccattttcagttaagatgtaatgatactagaga

SEQ ID NO: 127937 - DNA, 33 bp, Homo sapien
taaaatttaacagtaacgtacttcaatcaagta

SEQ ID NO: 127938 - DNA, 33 bp, Homo sapien
taaaatttaacagtaatgtacttcaatcaagta

SEQ ID NO: 127939 - DNA, 33 bp, Homo sapien
tgctttgctttgttgcaattcacagataatgtg

SEQ ID NO: 127940 - DNA, 33 bp, Homo sapien
tgctttgctttgttgcgattcacagataatgtg

SEQ ID NO: 127941 - DNA, 33 bp, Homo sapien
acgtggtgattgtccacgacatggcaaagtggt

SEQ ID NO: 127942 - DNA, 33 bp, Homo sapien
acgtggtgattgtccaggacatggcaaagtggt

SEQ ID NO: 127943 - DNA, 33 bp, Homo sapien
tctgtaaattcttctacagtcacttagattccc

SEQ ID NO: 127944 - DNA, 33 bp, Homo sapien
tctgtaaattcttctatagtcacttagattccc

SEQ ID NO: 127945 - DNA, 33 bp, Homo sapien
gggacctgcaagagaactgatctgtgctggcac

SEQ ID NO: 127946 - DNA, 33 bp, Homo sapien
gggacctgcaagagaattgatctgtgctggcac

SEQ ID NO: 127947 - DNA, 33 bp, Homo sapien
aacaaacaaaaatcctaaagcatctaccatcct

SEQ ID NO: 127948 - DNA, 33 bp, Homo sapien
aacaaacaaaaatcctgaagcatctaccatcct

SEQ ID NO: 127949 - DNA, 33 bp, Homo sapien
agaagtcacaatgaaaatagtagaaatcaagga

SEQ ID NO: 127950 - DNA, 33 bp, Homo sapien
agaagtcacaatgaaagtagtagaaatcaagga

SEQ ID NO: 127951 - DNA, 33 bp, Homo sapien
atccctcaaggtcaacagatgtctactgtatgc

SEQ ID NO: 127952 - DNA, 33 bp, Homo sapien
atccctcaaggtcaacggatgtctactgtatgc

SEQ ID NO: 127953 - DNA, 33 bp, Homo sapien
agacatgataccagaaatccaatctgttaaaga

SEQ ID NO: 127954 - DNA, 33 bp, Homo sapien
agacatgataccagaagtccaatctgttaaaga

SEQ ID NO: 127955 - DNA, 33 bp, Homo sapien
aggaattcagcccagaaaagagtcagtcagaaa

SEQ ID NO: 127956 - DNA, 33 bp, Homo sapien
aggaattcagcccagagaagagtcagtcagaaa

SEQ ID NO: 127957 - DNA, 33 bp, Homo sapien
gtccacaattaggtcacgtccagaatccaaaag

SEQ ID NO: 127958 - DNA, 33 bp, Homo sapien
gtccacaattaggtcatgtccagaatccaaaag

SEQ ID NO: 127959 - DNA, 33 bp, Homo sapien
taccggtaagattgtgaatcagtttcttaacct

SEQ ID NO: 127960 - DNA, 33 bp, Homo sapien
taccggtaagattgtggatcagtttcttaacct

SEQ ID NO: 127961 - DNA, 33 bp, Homo sapien
atgcctcttcttctagaccaaagagacaaagct

SEQ ID NO: 127962 - DNA, 33 bp, Homo sapien
atgcctcttcttctaggccaaagagacaaagct

SEQ ID NO: 127963 - DNA, 33 bp, Homo sapien
gtcagggctccactgcccactatctagtccatc

SEQ ID NO: 127964 - DNA, 33 bp, Homo sapien
gtcagggctccactgctcactatctagtccatc

SEQ ID NO: 127965 - DNA, 33 bp, Homo sapien
gtgatgatgttgagcccagcaaggccagattat

SEQ ID NO: 127966 - DNA, 33 bp, Homo sapien
gtgatgatgttgagcctagcaaggccagattat

SEQ ID NO: 127967 - DNA, 33 bp, Homo sapien
gtcatacctccattgaaagataaattaacacac

SEQ ID NO: 127968 - DNA, 33 bp, Homo sapien
gtcatacctccattgatagataaattaacacac

SEQ ID NO: 127969 - DNA, 33 bp, Homo sapien
ccagcctgaccagcacagtctctactaaaatac

SEQ ID NO: 127970 - DNA, 33 bp, Homo sapien
ccagcctgaccagcacggtctctactaaaatac

SEQ ID NO: 127971 - DNA, 33 bp, Homo sapien
aacaacagcaaggaaactcagcagggcttcaaa

SEQ ID NO: 127972 - DNA, 33 bp, Homo sapien
aacaacagcaaggaaagtcagcagggcttcaaa

SEQ ID NO: 127973 - DNA, 33 bp, Homo sapien
aaagatctatttaaaaccaaacaacagcaagga

SEQ ID NO: 127974 - DNA, 33 bp, Homo sapien
aaagatctatttaaaatcaaacaacagcaagga

SEQ ID NO: 127975 - DNA, 33 bp, Homo sapien
gctaagtgaagccttacgtgaacgactctggcc

SEQ ID NO: 127976 - DNA, 33 bp, Homo sapien
gctaagtgaagccttatgtgaacgactctggcc

SEQ ID NO: 127977 - DNA, 33 bp, Homo sapien
agtcaaatgggtttccaagatccagagttgctt

SEQ ID NO: 127978 - DNA, 33 bp, Homo sapien
agtcaaatgggtttccgagatccagagttgctt

SEQ ID NO: 127979 - DNA, 33 bp, Homo sapien
ttggtgaagtattatccgaagtcaaaaagcagg

SEQ ID NO: 127980 - DNA, 33 bp, Homo sapien
ttggtgaagtattatctgaagtcaaaaagcagg

SEQ ID NO: 127981 - DNA, 33 bp, Homo sapien
ggaagatcagccggaaaatcagccttctgaaga

SEQ ID NO: 127982 - DNA, 33 bp, Homo sapien
ggaagatcagccggaagatcagccttctgaaga

SEQ ID NO: 127983 - DNA, 33 bp, Homo sapien
aactcaccccaagaacacagttaggacatggtg

SEQ ID NO: 127984 - DNA, 33 bp, Homo sapien
aactcaccccaagaacgcagttaggacatggtg

SEQ ID NO: 127985 - DNA, 33 bp, Homo sapien
accagtagggttggtccaaattacctattctat

SEQ ID NO: 127986 - DNA, 33 bp, Homo sapien
accagtagggttggtctaaattacctattctat

SEQ ID NO: 127987 - DNA, 33 bp, Homo sapien
gttatcaatgtcgaacaggacttctcccttata

SEQ ID NO: 127988 - DNA, 33 bp, Homo sapien
gttatcaatgtcgaacgggacttctcccttata

SEQ ID NO: 127989 - DNA, 33 bp, Homo sapien
atgtttattcactttcaactatatttgtagaac

SEQ ID NO: 127990 - DNA, 33 bp, Homo sapien
atgtttattcactttccactatatttgtagaac

SEQ ID NO: 127991 - DNA, 33 bp, Homo sapien
aagccaattcctctgacgttaggccttacttta

SEQ ID NO: 127992 - DNA, 33 bp, Homo sapien
aagccaattcctctgatgttaggccttacttta

SEQ ID NO: 127993 - DNA, 33 bp, Homo sapien
ctagagtgtgtctgcactaagatcactggagcc

SEQ ID NO: 127994 - DNA, 33 bp, Homo sapien
ctagagtgtgtctgcattaagatcactggagcc

SEQ ID NO: 127995 - DNA, 33 bp, Homo sapien
atagactcctgtcctgaagactttgttgacatg

SEQ ID NO: 127996 - DNA, 33 bp, Homo sapien
atagactcctgtcctgcagactttgttgacatg

SEQ ID NO: 127997 - DNA, 33 bp, Homo sapien
gagatttccttgaatccatatggtagagccaaa

SEQ ID NO: 127998 - DNA, 33 bp, Homo sapien
gagatttccttgaatcgatatggtagagccaaa

SEQ ID NO: 127999 - DNA, 33 bp, Homo sapien
tatgctttaaataccgcacttctcagggtccaa

SEQ ID NO: 128000 - DNA, 33 bp, Homo sapien
tatgctttaaataccggacttctcagggtccaa

SEQ ID NO: 128001 - DNA, 33 bp, Homo sapien
gtggctaaaaatcacaatgtctttgatgtactt

SEQ ID NO: 128002 - DNA, 33 bp, Homo sapien
gtggctaaaaatcacagtgtctttgatgtactt

SEQ ID NO: 128003 - DNA, 33 bp, Homo sapien
tgaaattctgcttaaaagagccaaagcaataag

SEQ ID NO: 128004 - DNA, 33 bp, Homo sapien
tgaaattctgcttaaacgagccaaagcaataag

SEQ ID NO: 128005 - DNA, 33 bp, Homo sapien
aatctagttcacaatgcatgagcctttctctgc

SEQ ID NO: 128006 - DNA, 33 bp, Homo sapien
aatctagttcacaatgtatgagcctttctctgc

SEQ ID NO: 128007 - DNA, 33 bp, Homo sapien
ccagtaatttttttcaggaagatatgcacttag

SEQ ID NO: 128008 - DNA, 33 bp, Homo sapien
ccagtaatttttttcatgaagatatgcacttag

SEQ ID NO: 128009 - DNA, 33 bp, Homo sapien
agaatttgaagacttacgttaaaatcaccacag

SEQ ID NO: 128010 - DNA, 33 bp, Homo sapien
agaatttgaagacttatgttaaaatcaccacag

SEQ ID NO: 128011 - DNA, 33 bp, Homo sapien
ggtagctggccttcccaagtgtgcatttcaaat

SEQ ID NO: 128012 - DNA, 33 bp, Homo sapien
ggtagctggccttcccgagtgtgcatttcaaat

SEQ ID NO: 128013 - DNA, 33 bp, Homo sapien
ctgagctctaaataataacaatgcaaagagcta

SEQ ID NO: 128014 - DNA, 33 bp, Homo sapien
ctgagctctaaataatgacaatgcaaagagcta

SEQ ID NO: 128015 - DNA, 33 bp, Homo sapien
ttttttgctacccaaacgactgtggattaagag

SEQ ID NO: 128016 - DNA, 33 bp, Homo sapien
ttttttgctacccaaatgactgtggattaagag

SEQ ID NO: 128017 - DNA, 33 bp, Homo sapien
aagatgcttggcatcaaccaaagtgaccaatga

SEQ ID NO: 128018 - DNA, 33 bp, Homo sapien
aagatgcttggcatcatccaaagtgaccaatga

SEQ ID NO: 128019 - DNA, 33 bp, Homo sapien
aataatccacatacgcacttagaatataataag

SEQ ID NO: 128020 - DNA, 33 bp, Homo sapien
aataatccacatacgcccttagaatataataag

SEQ ID NO: 128021 - DNA, 33 bp, Homo sapien
gctgtgcagccttggaaaagttgcataacctct

SEQ ID NO: 128022 - DNA, 33 bp, Homo sapien
gctgtgcagccttggagaagttgcataacctct

SEQ ID NO: 128023 - DNA, 33 bp, Homo sapien
aaatgaccttggattggaaggacctcagagtag

SEQ ID NO: 128024 - DNA, 33 bp, Homo sapien
aaatgaccttggattgtaaggacctcagagtag

SEQ ID NO: 128025 - DNA, 33 bp, Homo sapien
cccgacccctttgggacgcagtcaaagctacag

SEQ ID NO: 128026 - DNA, 33 bp, Homo sapien
cccgacccctttgggatgcagtcaaagctacag

SEQ ID NO: 128027 - DNA, 33 bp, Homo sapien
gcctggccagcttcacacatattgttataatct

SEQ ID NO: 128028 - DNA, 33 bp, Homo sapien
gcctggccagcttcacgcatattgttataatct

SEQ ID NO: 128029 - DNA, 33 bp, Homo sapien
tgtgtgttaaaaacacgccctggctgctgtggg

SEQ ID NO: 128030 - DNA, 33 bp, Homo sapien
tgtgtgttaaaaacactccctggctgctgtggg

SEQ ID NO: 128031 - DNA, 33 bp, Homo sapien
ttcttggccccttcgacggactcacgacaggcg

SEQ ID NO: 128032 - DNA, 33 bp, Homo sapien
ttcttggccccttcgatggactcacgacaggcg

SEQ ID NO: 128033 - DNA, 33 bp, Homo sapien
agtacaaaaagacatacagtaaaactcagcctc

SEQ ID NO: 128034 - DNA, 33 bp, Homo sapien
agtacaaaaagacatatagtaaaactcagcctc

SEQ ID NO: 128035 - DNA, 33 bp, Homo sapien
ggttattgttaggattaaacatgatgaggatgc

SEQ ID NO: 128036 - DNA, 33 bp, Homo sapien
ggttattgttaggattcaacatgatgaggatgc

SEQ ID NO: 128037 - DNA, 33 bp, Homo sapien
tcagctcctttactaaggcagataataaaatcc

SEQ ID NO: 128038 - DNA, 33 bp, Homo sapien
tcagctcctttactaatgcagataataaaatcc

SEQ ID NO: 128039 - DNA, 33 bp, Homo sapien
ttttgttgtatgggcacatcacgttttgtttat

SEQ ID NO: 128040 - DNA, 33 bp, Homo sapien
ttttgttgtatgggcatatcacgttttgtttat

SEQ ID NO: 128041 - DNA, 33 bp, Homo sapien
taatgtcaaggaaaaactcaagcagaactgagg

SEQ ID NO: 128042 - DNA, 33 bp, Homo sapien
taatgtcaaggaaaaagtcaagcagaactgagg

SEQ ID NO: 128043 - DNA, 33 bp, Homo sapien
gcaatagatactatcactatctgcgttttaaga

SEQ ID NO: 128044 - DNA, 33 bp, Homo sapien
gcaatagatactatcattatctgcgttttaaga

SEQ ID NO: 128045 - DNA, 33 bp, Homo sapien
tcaacaggtgctgagaaagaagaaactagtctg

SEQ ID NO: 128046 - DNA, 33 bp, Homo sapien
tcaacaggtgctgagagagaagaaactagtctg

SEQ ID NO: 128047 - DNA, 33 bp, Homo sapien
ctcttgaataattaacacatatattttgagcac

SEQ ID NO: 128048 - DNA, 33 bp, Homo sapien
ctcttgaataattaacccatatattttgagcac

SEQ ID NO: 128049 - DNA, 33 bp, Homo sapien
actgtaggcctcttgccaagatttgcgcagtcc

SEQ ID NO: 128050 - DNA, 33 bp, Homo sapien
actgtaggcctcttgctaagatttgcgcagtcc

SEQ ID NO: 128051 - DNA, 33 bp, Homo sapien
gccactaggaatgggaaggaatgtgcttagtaa

SEQ ID NO: 128052 - DNA, 33 bp, Homo sapien
gccactaggaatgggacggaatgtgcttagtaa

SEQ ID NO: 128053 - DNA, 33 bp, Homo sapien
agctggacagggacacagaggagacagaaaaat

SEQ ID NO: 128054 - DNA, 33 bp, Homo sapien
agctggacagggacacggaggagacagaaaaat

SEQ ID NO: 128055 - DNA, 33 bp, Homo sapien
acaggaggtcagcaagactggtatcacaagtta

SEQ ID NO: 128056 - DNA, 33 bp, Homo sapien
acaggaggtcagcaagtctggtatcacaagtta

SEQ ID NO: 128057 - DNA, 33 bp, Homo sapien
accatgccacaggaacaagaacagtgtggactc

SEQ ID NO: 128058 - DNA, 33 bp, Homo sapien
accatgccacaggaacgagaacagtgtggactc

SEQ ID NO: 128059 - DNA, 33 bp, Homo sapien
gcaaagccaggaaaacacaagggccacttcaca

SEQ ID NO: 128060 - DNA, 33 bp, Homo sapien
gcaaagccaggaaaacgcaagggccacttcaca

SEQ ID NO: 128061 - DNA, 33 bp, Homo sapien
gattgtgaagacttccaatttgaagaggtggga

SEQ ID NO: 128062 - DNA, 33 bp, Homo sapien
gattgtgaagacttccgatttgaagaggtggga

SEQ ID NO: 128063 - DNA, 33 bp, Homo sapien
tacagggactgatacacaatcacagtagagagt

SEQ ID NO: 128064 - DNA, 33 bp, Homo sapien
tacagggactgatacataatcacagtagagagt

SEQ ID NO: 128065 - DNA, 33 bp, Homo sapien
gtgaatattaatgggaacttcacaaatgtagga

SEQ ID NO: 128066 - DNA, 33 bp, Homo sapien
gtgaatattaatgggagcttcacaaatgtagga

SEQ ID NO: 128067 - DNA, 33 bp, Homo sapien
tatatgtttccattcaaaaaggcaggacaactc

SEQ ID NO: 128068 - DNA, 33 bp, Homo sapien
tatatgtttccattcagaaaggcaggacaactc

SEQ ID NO: 128069 - DNA, 33 bp, Homo sapien
aaagtttattttgccaatctcttaactacctat

SEQ ID NO: 128070 - DNA, 33 bp, Homo sapien
aaagtttattttgccagtctcttaactacctat

SEQ ID NO: 128071 - DNA, 33 bp, Homo sapien
acaaacaatcctgtgaactggggtgagcttgga

SEQ ID NO: 128072 - DNA, 33 bp, Homo sapien
acaaacaatcctgtgagctggggtgagcttgga

SEQ ID NO: 128073 - DNA, 33 bp, Homo sapien
aaggctctttaacctacgacagcttcctaagat

SEQ ID NO: 128074 - DNA, 33 bp, Homo sapien
aaggctctttaacctatgacagcttcctaagat

SEQ ID NO: 128075 - DNA, 33 bp, Homo sapien
ttggaatggtcaaaaactagaagcccaggtggt

SEQ ID NO: 128076 - DNA, 33 bp, Homo sapien
ttggaatggtcaaaaagtagaagcccaggtggt

SEQ ID NO: 128077 - DNA, 33 bp, Homo sapien
tgtgcctctctcctgacaagaacgttctgttca

SEQ ID NO: 128078 - DNA, 33 bp, Homo sapien
tgtgcctctctcctgataagaacgttctgttca

SEQ ID NO: 128079 - DNA, 33 bp, Homo sapien
ggccttgagttgagtgaaaattgtgtctgtaga

SEQ ID NO: 128080 - DNA, 33 bp, Homo sapien
ggccttgagttgagtggaaattgtgtctgtaga

SEQ ID NO: 128081 - DNA, 33 bp, Homo sapien
gtgtacctgagctgtaaagatgtttagtcttag

SEQ ID NO: 128082 - DNA, 33 bp, Homo sapien
gtgtacctgagctgtagagatgtttagtcttag

SEQ ID NO: 128083 - DNA, 33 bp, Homo sapien
ccagtaatcttccttcaaattcatgaaacactg

SEQ ID NO: 128084 - DNA, 33 bp, Homo sapien
ccagtaatcttccttcgaattcatgaaacactg

SEQ ID NO: 128085 - DNA, 33 bp, Homo sapien
gctcaaacaatgataacattacagttcccaaaa

SEQ ID NO: 128086 - DNA, 33 bp, Homo sapien
gctcaaacaatgataatattacagttcccaaaa

SEQ ID NO: 128087 - DNA, 33 bp, Homo sapien
agaataccagtgatgccagctgctgtaaaaact

SEQ ID NO: 128088 - DNA, 33 bp, Homo sapien
agaataccagtgatgctagctgctgtaaaaact

SEQ ID NO: 128089 - DNA, 33 bp, Homo sapien
tctctgcggagaagaaagctaccccctaagact

SEQ ID NO: 128090 - DNA, 33 bp, Homo sapien
tctctgcggagaagaaggctaccccctaagact

SEQ ID NO: 128091 - DNA, 33 bp, Homo sapien
ctatgggtggagaatcaacatcctttgaaactg

SEQ ID NO: 128092 - DNA, 33 bp, Homo sapien
ctatgggtggagaatcgacatcctttgaaactg

SEQ ID NO: 128093 - DNA, 33 bp, Homo sapien
ccaggagagtccaatacgtagacagtgttggga

SEQ ID NO: 128094 - DNA, 33 bp, Homo sapien
ccaggagagtccaatatgtagacagtgttggga

SEQ ID NO: 128095 - DNA, 33 bp, Homo sapien
ctctcctaacatctaactgaggtacactgtgtt

SEQ ID NO: 128096 - DNA, 33 bp, Homo sapien
ctctcctaacatctaattgaggtacactgtgtt

SEQ ID NO: 128097 - DNA, 33 bp, Homo sapien
aattgctttaatcagcccgctctcctaacatct

SEQ ID NO: 128098 - DNA, 33 bp, Homo sapien
aattgctttaatcagctcgctctcctaacatct

SEQ ID NO: 128099 - DNA, 33 bp, Homo sapien
cacagtagttttggcccatgagattggaaattt

SEQ ID NO: 128100 - DNA, 33 bp, Homo sapien
cacagtagttttggcctatgagattggaaattt

SEQ ID NO: 128101 - DNA, 33 bp, Homo sapien
ttcgctttctagcaaacgatctttctcagactg

SEQ ID NO: 128102 - DNA, 33 bp, Homo sapien
ttcgctttctagcaaatgatctttctcagactg

SEQ ID NO: 128103 - DNA, 33 bp, Homo sapien
ctgtaaaatcagtactaacacttatgaaagttt

SEQ ID NO: 128104 - DNA, 33 bp, Homo sapien
ctgtaaaatcagtactcacacttatgaaagttt

SEQ ID NO: 128105 - DNA, 33 bp, Homo sapien
agaaatggtcaagacaaaactgaacttctaagg

SEQ ID NO: 128106 - DNA, 33 bp, Homo sapien
agaaatggtcaagacagaactgaacttctaagg

SEQ ID NO: 128107 - DNA, 33 bp, Homo sapien
accatctgcgctgctacgtctatcaagccagaa

SEQ ID NO: 128108 - DNA, 33 bp, Homo sapien
accatctgcgctgctatgtctatcaagccagaa

SEQ ID NO: 128109 - DNA, 33 bp, Homo sapien
tataatagattcaagtcacccatttatcagaaa

SEQ ID NO: 128110 - DNA, 33 bp, Homo sapien
tataatagattcaagtgacccatttatcagaaa

SEQ ID NO: 128111 - DNA, 33 bp, Homo sapien
agtcctgacctattaccactactagattatgct

SEQ ID NO: 128112 - DNA, 33 bp, Homo sapien
agtcctgacctattactactactagattatgct

SEQ ID NO: 128113 - DNA, 33 bp, Homo sapien
ccagttggccccatcacctgatgtttttcactc

SEQ ID NO: 128114 - DNA, 33 bp, Homo sapien
ccagttggccccatcatctgatgtttttcactc

SEQ ID NO: 128115 - DNA, 33 bp, Homo sapien
atcctcattactgagaaggagcaaccttgttaa

SEQ ID NO: 128116 - DNA, 33 bp, Homo sapien
atcctcattactgagagggagcaaccttgttaa

SEQ ID NO: 128117 - DNA, 33 bp, Homo sapien
aagagtttcattgagaaaaagctgagcagcccg

SEQ ID NO: 128118 - DNA, 33 bp, Homo sapien
aagagtttcattgagataaagctgagcagcccg

SEQ ID NO: 128119 - DNA, 33 bp, Homo sapien
attctttggacaacccacagaggaaagttacag

SEQ ID NO: 128120 - DNA, 33 bp, Homo sapien
attctttggacaacccgcagaggaaagttacag

SEQ ID NO: 128121 - DNA, 33 bp, Homo sapien
tttactgttactactaagtccagtttggcaatc

SEQ ID NO: 128122 - DNA, 33 bp, Homo sapien
tttactgttactactaggtccagtttggcaatc

SEQ ID NO: 128123 - DNA, 33 bp, Homo sapien
ctaaatggagagggaccgaagaccctgcaggct

SEQ ID NO: 128124 - DNA, 33 bp, Homo sapien
ctaaatggagagggactgaagaccctgcaggct

SEQ ID NO: 128125 - DNA, 33 bp, Homo sapien
ggcgcagcttcacctaacaaaagtccctcctac

SEQ ID NO: 128126 - DNA, 33 bp, Homo sapien
ggcgcagcttcacctagcaaaagtccctcctac

SEQ ID NO: 128127 - DNA, 33 bp, Homo sapien
gaagggaggctagagaacatttagctgaagcat

SEQ ID NO: 128128 - DNA, 33 bp, Homo sapien
gaagggaggctagagaccatttagctgaagcat

SEQ ID NO: 128129 - DNA, 33 bp, Homo sapien
aattattcaaacttcgaaaaaagtcctcactgg

SEQ ID NO: 128130 - DNA, 33 bp, Homo sapien
aattattcaaacttcgtaaaaagtcctcactgg

SEQ ID NO: 128131 - DNA, 33 bp, Homo sapien
tattgatcactgtactaagcactttcttgtgtt

SEQ ID NO: 128132 - DNA, 33 bp, Homo sapien
tattgatcactgtactgagcactttcttgtgtt

SEQ ID NO: 128133 - DNA, 33 bp, Homo sapien
agctatttaatcctcacgtcaactccagagaag

SEQ ID NO: 128134 - DNA, 33 bp, Homo sapien
agctatttaatcctcatgtcaactccagagaag

SEQ ID NO: 128135 - DNA, 33 bp, Homo sapien
gaatctgggcttgcacagtgatccagcggctcc

SEQ ID NO: 128136 - DNA, 33 bp, Homo sapien
gaatctgggcttgcacggtgatccagcggctcc

SEQ ID NO: 128137 - DNA, 33 bp, Homo sapien
tcctataaatggaatcactagaagcgatccctt

SEQ ID NO: 128138 - DNA, 33 bp, Homo sapien
tcctataaatggaatctctagaagcgatccctt

SEQ ID NO: 128139 - DNA, 33 bp, Homo sapien
tgagtgtccactttcacgtcttctgttttgtac

SEQ ID NO: 128140 - DNA, 33 bp, Homo sapien
tgagtgtccactttcaggtcttctgttttgtac

SEQ ID NO: 128141 - DNA, 33 bp, Homo sapien
acagagaggataagacagaaatgttgggtctca

SEQ ID NO: 128142 - DNA, 33 bp, Homo sapien
acagagaggataagacggaaatgttgggtctca

SEQ ID NO: 128143 - DNA, 33 bp, Homo sapien
tctggtgtttttgtgacaacttcttgatgatcc

SEQ ID NO: 128144 - DNA, 33 bp, Homo sapien
tctggtgtttttgtgataacttcttgatgatcc

SEQ ID NO: 128145 - DNA, 33 bp, Homo sapien
atcaaagaatagaagcacaaatactgtgttttt

SEQ ID NO: 128146 - DNA, 33 bp, Homo sapien
atcaaagaatagaagcgcaaatactgtgttttt

SEQ ID NO: 128147 - DNA, 33 bp, Homo sapien
gcttctgttcttcaaaagtcaatcacctctctt

SEQ ID NO: 128148 - DNA, 33 bp, Homo sapien
gcttctgttcttcaaaggtcaatcacctctctt

SEQ ID NO: 128149 - DNA, 33 bp, Homo sapien
tgggttcctccaagcaacgaagacgaacttcct

SEQ ID NO: 128150 - DNA, 33 bp, Homo sapien
tgggttcctccaagcagcgaagacgaacttcct

SEQ ID NO: 128151 - DNA, 33 bp, Homo sapien
ggggtatgattgaccccgactttttctcctgct

SEQ ID NO: 128152 - DNA, 33 bp, Homo sapien
ggggtatgattgaccctgactttttctcctgct

SEQ ID NO: 128153 - DNA, 33 bp, Homo sapien
aagcaaattggaaagacacaaaagatggcctct

SEQ ID NO: 128154 - DNA, 33 bp, Homo sapien
aagcaaattggaaagatacaaaagatggcctct

SEQ ID NO: 128155 - DNA, 33 bp, Homo sapien
tctccaataattataacgtcacttggtcaaatc

SEQ ID NO: 128156 - DNA, 33 bp, Homo sapien
tctccaataattataatgtcacttggtcaaatc

SEQ ID NO: 128157 - DNA, 33 bp, Homo sapien
tgttccaatatgtagaccagagcaaaggtacca

SEQ ID NO: 128158 - DNA, 33 bp, Homo sapien
tgttccaatatgtagatcagagcaaaggtacca

SEQ ID NO: 128159 - DNA, 33 bp, Homo sapien
tgttgatgaggtggccccttagcaaggatacac

SEQ ID NO: 128160 - DNA, 33 bp, Homo sapien
tgttgatgaggtggcctcttagcaaggatacac

SEQ ID NO: 128161 - DNA, 33 bp, Homo sapien
gtagaagttaaatgtacgacagcagcaggaaaa

SEQ ID NO: 128162 - DNA, 33 bp, Homo sapien
gtagaagttaaatgtatgacagcagcaggaaaa

SEQ ID NO: 128163 - DNA, 33 bp, Homo sapien
acactgcacacttgaacatgtactgatttgctt

SEQ ID NO: 128164 - DNA, 33 bp, Homo sapien
acactgcacacttgaatatgtactgatttgctt

SEQ ID NO: 128165 - DNA, 33 bp, Homo sapien
gggagctcacgtataccaagttgttcctctatg

SEQ ID NO: 128166 - DNA, 33 bp, Homo sapien
gggagctcacgtatacgaagttgttcctctatg

SEQ ID NO: 128167 - DNA, 33 bp, Homo sapien
tctgcctggctccagaatcccaactttcaaata

SEQ ID NO: 128168 - DNA, 33 bp, Homo sapien
tctgcctggctccagagtcccaactttcaaata

SEQ ID NO: 128169 - DNA, 33 bp, Homo sapien
tgttcattacagagctaacgcagggtcggcctt

SEQ ID NO: 128170 - DNA, 33 bp, Homo sapien
tgttcattacagagctgacgcagggtcggcctt

SEQ ID NO: 128171 - DNA, 33 bp, Homo sapien
acactgacttttggaccgaaggccatcagtgac

SEQ ID NO: 128172 - DNA, 33 bp, Homo sapien
acactgacttttggactgaaggccatcagtgac

SEQ ID NO: 128173 - DNA, 33 bp, Homo sapien
ctgcttaccggcatcaaaataagagagtctgca

SEQ ID NO: 128174 - DNA, 33 bp, Homo sapien
ctgcttaccggcatcagaataagagagtctgca

SEQ ID NO: 128175 - DNA, 33 bp, Homo sapien
tgtgagctcagataaacgtcttaactctttgag

SEQ ID NO: 128176 - DNA, 33 bp, Homo sapien
tgtgagctcagataaatgtcttaactctttgag

SEQ ID NO: 128177 - DNA, 33 bp, Homo sapien
ttagcatcaacctcacacaatgagtgccaggag

SEQ ID NO: 128178 - DNA, 33 bp, Homo sapien
ttagcatcaacctcacgcaatgagtgccaggag

SEQ ID NO: 128179 - DNA, 33 bp, Homo sapien
tggatgcgaccaagacaaagcactcagggctgc

SEQ ID NO: 128180 - DNA, 33 bp, Homo sapien
tggatgcgaccaagaccaagcactcagggctgc

SEQ ID NO: 128181 - DNA, 33 bp, Homo sapien
tctgttcagagagagaagaactgtttatgtgag

SEQ ID NO: 128182 - DNA, 33 bp, Homo sapien
tctgttcagagagagaggaactgtttatgtgag

SEQ ID NO: 128183 - DNA, 33 bp, Homo sapien
atgaggagaggggagcggacatgattctggctc

SEQ ID NO: 128184 - DNA, 33 bp, Homo sapien
atgaggagaggggagctgacatgattctggctc

SEQ ID NO: 128185 - DNA, 33 bp, Homo sapien
agatcacagacctcacaagagccagaatcatgt

SEQ ID NO: 128186 - DNA, 33 bp, Homo sapien
agatcacagacctcaccagagccagaatcatgt

SEQ ID NO: 128187 - DNA, 33 bp, Homo sapien
cctgcaaggcaggagacattattaagaacactg

SEQ ID NO: 128188 - DNA, 33 bp, Homo sapien
cctgcaaggcaggagatattattaagaacactg

SEQ ID NO: 128189 - DNA, 33 bp, Homo sapien
aactttttctgattgacaactgtgctcagacct

SEQ ID NO: 128190 - DNA, 33 bp, Homo sapien
aactttttctgattgagaactgtgctcagacct

SEQ ID NO: 128191 - DNA, 33 bp, Homo sapien
attcttaagtggaatcgcatagctttggagctt

SEQ ID NO: 128192 - DNA, 33 bp, Homo sapien
attcttaagtggaatctcatagctttggagctt

SEQ ID NO: 128193 - DNA, 33 bp, Homo sapien
ggaaaatggaagcctaaggcaagatccagcaaa

SEQ ID NO: 128194 - DNA, 33 bp, Homo sapien
ggaaaatggaagcctatggcaagatccagcaaa

SEQ ID NO: 128195 - DNA, 33 bp, Homo sapien
ttaaagtcagcctgcactaacagaaacgctgtg

SEQ ID NO: 128196 - DNA, 33 bp, Homo sapien
ttaaagtcagcctgcattaacagaaacgctgtg

SEQ ID NO: 128197 - DNA, 33 bp, Homo sapien
taaagcaaaaagaagcccaatgtttcttcatcc

SEQ ID NO: 128198 - DNA, 33 bp, Homo sapien
taaagcaaaaagaagctcaatgtttcttcatcc

SEQ ID NO: 128199 - DNA, 33 bp, Homo sapien
gaattcttctgtctccacgagtttctccaaggc

SEQ ID NO: 128200 - DNA, 33 bp, Homo sapien
gaattcttctgtctccgcgagtttctccaaggc

SEQ ID NO: 128201 - DNA, 33 bp, Homo sapien
atgcatactacataaacgtgacagtttaacaag

SEQ ID NO: 128202 - DNA, 33 bp, Homo sapien
atgcatactacataaatgtgacagtttaacaag

SEQ ID NO: 128203 - DNA, 33 bp, Homo sapien
ctttctgtatcccatcacccccaggatagctgt

SEQ ID NO: 128204 - DNA, 33 bp, Homo sapien
ctttctgtatcccatcgcccccaggatagctgt

SEQ ID NO: 128205 - DNA, 33 bp, Homo sapien
acagtacaatagtaaaatgtgtcaccaatggaa

SEQ ID NO: 128206 - DNA, 33 bp, Homo sapien
acagtacaatagtaaagtgtgtcaccaatggaa

SEQ ID NO: 128207 - DNA, 33 bp, Homo sapien
ccgttaccaatatctacggttaagtcctaacaa

SEQ ID NO: 128208 - DNA, 33 bp, Homo sapien
ccgttaccaatatctatggttaagtcctaacaa

SEQ ID NO: 128209 - DNA, 33 bp, Homo sapien
atccttgatctaattcactcaatcactgtggtt

SEQ ID NO: 128210 - DNA, 33 bp, Homo sapien
atccttgatctaattcgctcaatcactgtggtt

SEQ ID NO: 128211 - DNA, 33 bp, Homo sapien
tttgcattgggaaataggtgacaagattgcatt

SEQ ID NO: 128212 - DNA, 33 bp, Homo sapien
tttgcattgggaaatatgtgacaagattgcatt

SEQ ID NO: 128213 - DNA, 33 bp, Homo sapien
cagatatagtactaccacattgcttgaacagct

SEQ ID NO: 128214 - DNA, 33 bp, Homo sapien
cagatatagtactaccgcattgcttgaacagct

SEQ ID NO: 128215 - DNA, 33 bp, Homo sapien
gtaaatttagctgtagaatgtgatgaggaggga

SEQ ID NO: 128216 - DNA, 33 bp, Homo sapien
gtaaatttagctgtagtatgtgatgaggaggga

SEQ ID NO: 128217 - DNA, 33 bp, Homo sapien
ctccttaagaattacaagcaattgatgctgcac

SEQ ID NO: 128218 - DNA, 33 bp, Homo sapien
ctccttaagaattacatgcaattgatgctgcac

SEQ ID NO: 128219 - DNA, 33 bp, Homo sapien
aaagaaaatctgtctacagtgctgaagcagcta

SEQ ID NO: 128220 - DNA, 33 bp, Homo sapien
aaagaaaatctgtctagagtgctgaagcagcta

SEQ ID NO: 128221 - DNA, 33 bp, Homo sapien
ttcttggcagataaccacttacccttagggcat

SEQ ID NO: 128222 - DNA, 33 bp, Homo sapien
ttcttggcagataaccgcttacccttagggcat

SEQ ID NO: 128223 - DNA, 33 bp, Homo sapien
cagcttaaaacagttaacatagatgctaattcc

SEQ ID NO: 128224 - DNA, 33 bp, Homo sapien
cagcttaaaacagttatcatagatgctaattcc

SEQ ID NO: 128225 - DNA, 33 bp, Homo sapien
atactcatgggggaaaaccagttaaatatagaa

SEQ ID NO: 128226 - DNA, 33 bp, Homo sapien
atactcatgggggaaagccagttaaatatagaa

SEQ ID NO: 128227 - DNA, 33 bp, Homo sapien
tgtgtgtgcatgtccaacctccaacaaacccac

SEQ ID NO: 128228 - DNA, 33 bp, Homo sapien
tgtgtgtgcatgtccagcctccaacaaacccac

SEQ ID NO: 128229 - DNA, 33 bp, Homo sapien
aactctcgtcctcagacagaaggcagatggagg

SEQ ID NO: 128230 - DNA, 33 bp, Homo sapien
aactctcgtcctcagatagaaggcagatggagg

SEQ ID NO: 128231 - DNA, 33 bp, Homo sapien
ttctgtctatgcactccacaaaaacccctagct

SEQ ID NO: 128232 - DNA, 33 bp, Homo sapien
ttctgtctatgcactctacaaaaacccctagct

SEQ ID NO: 128233 - DNA, 33 bp, Homo sapien
ccaaatcaagcaaccacagaaagaaggaatggt

SEQ ID NO: 128234 - DNA, 33 bp, Homo sapien
ccaaatcaagcaaccatagaaagaaggaatggt

SEQ ID NO: 128235 - DNA, 33 bp, Homo sapien
ttttaataggtattacaggtaaatttgctgaag

SEQ ID NO: 128236 - DNA, 33 bp, Homo sapien
ttttaataggtattacgggtaaatttgctgaag

SEQ ID NO: 128237 - DNA, 33 bp, Homo sapien
catcacctgaaagggaaaagatttcttcagcaa

SEQ ID NO: 128238 - DNA, 33 bp, Homo sapien
catcacctgaaagggataagatttcttcagcaa

SEQ ID NO: 128239 - DNA, 33 bp, Homo sapien
ttcagcaaatatttaaaccatttgcaacaagca

SEQ ID NO: 128240 - DNA, 33 bp, Homo sapien
ttcagcaaatatttaacccatttgcaacaagca

SEQ ID NO: 128241 - DNA, 33 bp, Homo sapien
aaatacagtaagtaaactattttgaatgctgaa

SEQ ID NO: 128242 - DNA, 33 bp, Homo sapien
aaatacagtaagtaaattattttgaatgctgaa

SEQ ID NO: 128243 - DNA, 33 bp, Homo sapien
atgtgaggcttggaaccgtagcagtagagatgt

SEQ ID NO: 128244 - DNA, 33 bp, Homo sapien
atgtgaggcttggaactgtagcagtagagatgt

SEQ ID NO: 128245 - DNA, 33 bp, Homo sapien
gccaagttctgactaacaggaatgtgagcagag

SEQ ID NO: 128246 - DNA, 33 bp, Homo sapien
gccaagttctgactaataggaatgtgagcagag

SEQ ID NO: 128247 - DNA, 33 bp, Homo sapien
ggaagggcaattgacccaggaaaggaaacagca

SEQ ID NO: 128248 - DNA, 33 bp, Homo sapien
ggaagggcaattgaccgaggaaaggaaacagca

SEQ ID NO: 128249 - DNA, 33 bp, Homo sapien
ccttaaaaatccaaagaaccatcattcaagctg

SEQ ID NO: 128250 - DNA, 33 bp, Homo sapien
ccttaaaaatccaaaggaccatcattcaagctg

SEQ ID NO: 128251 - DNA, 33 bp, Homo sapien
ttataaaatacctgtacgcatacagacagcccc

SEQ ID NO: 128252 - DNA, 33 bp, Homo sapien
ttataaaatacctgtaggcatacagacagcccc

SEQ ID NO: 128253 - DNA, 33 bp, Homo sapien
cagtgatggatcagccaatgggtatctactgtc

SEQ ID NO: 128254 - DNA, 33 bp, Homo sapien
cagtgatggatcagccgatgggtatctactgtc

SEQ ID NO: 128255 - DNA, 33 bp, Homo sapien
caggctgatgtgatgagatagacacagagaggt

SEQ ID NO: 128256 - DNA, 33 bp, Homo sapien
caggctgatgtgatgatatagacacagagaggt

SEQ ID NO: 128257 - DNA, 33 bp, Homo sapien
atcaattttagctaaaaccgttcacaaaaggct

SEQ ID NO: 128258 - DNA, 33 bp, Homo sapien
atcaattttagctaaatccgttcacaaaaggct

SEQ ID NO: 128259 - DNA, 33 bp, Homo sapien
atttcacagatgagaaccagaggcacaccgaag

SEQ ID NO: 128260 - DNA, 33 bp, Homo sapien
atttcacagatgagaatcagaggcacaccgaag

SEQ ID NO: 128261 - DNA, 33 bp, Homo sapien
aggaggcctcataggcacattaagctttgaagg

SEQ ID NO: 128262 - DNA, 33 bp, Homo sapien
aggaggcctcataggcgcattaagctttgaagg

SEQ ID NO: 128263 - DNA, 33 bp, Homo sapien
agttatgtaaaaccaagcttcacagaaaaagct

SEQ ID NO: 128264 - DNA, 33 bp, Homo sapien
agttatgtaaaaccaatcttcacagaaaaagct

SEQ ID NO: 128265 - DNA, 33 bp, Homo sapien
aggctcaaagagcttaaaaaacttgcccaccag

SEQ ID NO: 128266 - DNA, 33 bp, Homo sapien
aggctcaaagagcttacaaaacttgcccaccag

SEQ ID NO: 128267 - DNA, 33 bp, Homo sapien
ctgctgtcagaatcagcccttgtgggtccccca

SEQ ID NO: 128268 - DNA, 33 bp, Homo sapien
ctgctgtcagaatcagtccttgtgggtccccca

SEQ ID NO: 128269 - DNA, 33 bp, Homo sapien
tctgagtaaggatatcactctaggcctaagcac

SEQ ID NO: 128270 - DNA, 33 bp, Homo sapien
tctgagtaaggatatcgctctaggcctaagcac

SEQ ID NO: 128271 - DNA, 33 bp, Homo sapien
tccaggtggccttacaacctctaacgctggggg

SEQ ID NO: 128272 - DNA, 33 bp, Homo sapien
tccaggtggccttacaccctctaacgctggggg

SEQ ID NO: 128273 - DNA, 33 bp, Homo sapien
catcagaaatagcattaaatctgttgcctggct

SEQ ID NO: 128274 - DNA, 33 bp, Homo sapien
catcagaaatagcattgaatctgttgcctggct

SEQ ID NO: 128275 - DNA, 33 bp, Homo sapien
ttgttttgtgctcttgcagaaagacctggacaa

SEQ ID NO: 128276 - DNA, 33 bp, Homo sapien
ttgttttgtgctcttgtagaaagacctggacaa

SEQ ID NO: 128277 - DNA, 33 bp, Homo sapien
tctaccctggatcaccaagcagagagagtctcc

SEQ ID NO: 128278 - DNA, 33 bp, Homo sapien
tctaccctggatcaccgagcagagagagtctcc

SEQ ID NO: 128279 - DNA, 33 bp, Homo sapien
caacaagtttgttagagccaatgtcagaagcca

SEQ ID NO: 128280 - DNA, 33 bp, Homo sapien
caacaagtttgttagatccaatgtcagaagcca

SEQ ID NO: 128281 - DNA, 33 bp, Homo sapien
ttgttaaaatcagtcacatggctgtaccagagg

SEQ ID NO: 128282 - DNA, 33 bp, Homo sapien
ttgttaaaatcagtcatatggctgtaccagagg

SEQ ID NO: 128283 - DNA, 33 bp, Homo sapien
gtgtgggcgcaggtgaaggaaagacttctcaca

SEQ ID NO: 128284 - DNA, 33 bp, Homo sapien
gtgtgggcgcaggtgagggaaagacttctcaca

SEQ ID NO: 128285 - DNA, 33 bp, Homo sapien
ggcttggctttcttcaatctagatcccgagtgg

SEQ ID NO: 128286 - DNA, 33 bp, Homo sapien
ggcttggctttcttcagtctagatcccgagtgg

SEQ ID NO: 128287 - DNA, 33 bp, Homo sapien
ttctcctgctgttagactcggttgtatccttcc

SEQ ID NO: 128288 - DNA, 33 bp, Homo sapien
ttctcctgctgttagattcggttgtatccttcc

SEQ ID NO: 128289 - DNA, 33 bp, Homo sapien
ggttcagactctagaaaatcattgtcgcccttt

SEQ ID NO: 128290 - DNA, 33 bp, Homo sapien
ggttcagactctagaatatcattgtcgcccttt

SEQ ID NO: 128291 - DNA, 33 bp, Homo sapien
tcacatttcagagcagcctgcattctcctgggc

SEQ ID NO: 128292 - DNA, 33 bp, Homo sapien
tcacatttcagagcaggctgcattctcctgggc

SEQ ID NO: 128293 - DNA, 33 bp, Homo sapien
ccaagcttccgccttcacgataacgttgctctt

SEQ ID NO: 128294 - DNA, 33 bp, Homo sapien
ccaagcttccgccttcgcgataacgttgctctt

SEQ ID NO: 128295 - DNA, 33 bp, Homo sapien
ggtgtgccacatccgactaatttttgtactttt

SEQ ID NO: 128296 - DNA, 33 bp, Homo sapien
ggtgtgccacatccgagtaatttttgtactttt

SEQ ID NO: 128297 - DNA, 33 bp, Homo sapien
aaacctggaggcaagacggcaacttcaatcctg

SEQ ID NO: 128298 - DNA, 33 bp, Homo sapien
aaacctggaggcaagatggcaacttcaatcctg

SEQ ID NO: 128299 - DNA, 33 bp, Homo sapien
actcaggaatgtaagactaaattgttattacct

SEQ ID NO: 128300 - DNA, 33 bp, Homo sapien
actcaggaatgtaagagtaaattgttattacct

SEQ ID NO: 128301 - DNA, 33 bp, Homo sapien
ttcactgctttgaggaatagaactgcctgtact

SEQ ID NO: 128302 - DNA, 33 bp, Homo sapien
ttcactgctttgaggactagaactgcctgtact

SEQ ID NO: 128303 - DNA, 33 bp, Homo sapien
aatgaatgagtggaaaacttgttagccaaattt

SEQ ID NO: 128304 - DNA, 33 bp, Homo sapien
aatgaatgagtggaaaccttgttagccaaattt

SEQ ID NO: 128305 - DNA, 33 bp, Homo sapien
catatcaaccgcatcaacctgccccattttaca

SEQ ID NO: 128306 - DNA, 33 bp, Homo sapien
catatcaaccgcatcagcctgccccattttaca

SEQ ID NO: 128307 - DNA, 33 bp, Homo sapien
tgcacctgtctccacaaaatgtcttcaacacaa

SEQ ID NO: 128308 - DNA, 33 bp, Homo sapien
tgcacctgtctccacataatgtcttcaacacaa

SEQ ID NO: 128309 - DNA, 33 bp, Homo sapien
ttttatagtgggcttacgtaacttttgcaacta

SEQ ID NO: 128310 - DNA, 33 bp, Homo sapien
ttttatagtgggcttatgtaacttttgcaacta

SEQ ID NO: 128311 - DNA, 33 bp, Homo sapien
cctaccatccagaaaccgatatttcattaacgt

SEQ ID NO: 128312 - DNA, 33 bp, Homo sapien
cctaccatccagaaactgatatttcattaacgt

SEQ ID NO: 128313 - DNA, 33 bp, Homo sapien
aggaatgaatcatggacatacacaacatgagta

SEQ ID NO: 128314 - DNA, 33 bp, Homo sapien
aggaatgaatcatggatatacacaacatgagta

SEQ ID NO: 128315 - DNA, 33 bp, Homo sapien
attttggttggaattccactcgctctatggatt

SEQ ID NO: 128316 - DNA, 33 bp, Homo sapien
attttggttggaattctactcgctctatggatt

SEQ ID NO: 128317 - DNA, 33 bp, Homo sapien
tcctgcccttcttccacggtactaggcagatag

SEQ ID NO: 128318 - DNA, 33 bp, Homo sapien
tcctgcccttcttccatggtactaggcagatag

SEQ ID NO: 128319 - DNA, 33 bp, Homo sapien
tgagagaatgtttgagacaacaaattggaagct

SEQ ID NO: 128320 - DNA, 33 bp, Homo sapien
tgagagaatgtttgagtcaacaaattggaagct

SEQ ID NO: 128321 - DNA, 33 bp, Homo sapien
tcttgagacctcttgccctaattaaagaatcac

SEQ ID NO: 128322 - DNA, 33 bp, Homo sapien
tcttgagacctcttgctctaattaaagaatcac

SEQ ID NO: 128323 - DNA, 33 bp, Homo sapien
atttcatgctacattacaaaactgcactcctga

SEQ ID NO: 128324 - DNA, 33 bp, Homo sapien
atttcatgctacattagaaaactgcactcctga

SEQ ID NO: 128325 - DNA, 33 bp, Homo sapien
gtagtttcttgattagcagtgagaccagctgga

SEQ ID NO: 128326 - DNA, 33 bp, Homo sapien
gtagtttcttgattagtagtgagaccagctgga

SEQ ID NO: 128327 - DNA, 33 bp, Homo sapien
atacatgactgtcttcactagactctgaacatt

SEQ ID NO: 128328 - DNA, 33 bp, Homo sapien
atacatgactgtcttcgctagactctgaacatt

SEQ ID NO: 128329 - DNA, 33 bp, Homo sapien
tgacctctttttaaaacttaagagcatacggtt

SEQ ID NO: 128330 - DNA, 33 bp, Homo sapien
tgacctctttttaaaagttaagagcatacggtt

SEQ ID NO: 128331 - DNA, 33 bp, Homo sapien
aataagtgccaatccaatccatgctggaacact

SEQ ID NO: 128332 - DNA, 33 bp, Homo sapien
aataagtgccaatccagtccatgctggaacact

SEQ ID NO: 128333 - DNA, 33 bp, Homo sapien
agaccaaagcaaggtggaattgagacatctctt

SEQ ID NO: 128334 - DNA, 33 bp, Homo sapien
agaccaaagcaaggtgtaattgagacatctctt

SEQ ID NO: 128335 - DNA, 33 bp, Homo sapien
ggctcctgacactttccattattacacatatga

SEQ ID NO: 128336 - DNA, 33 bp, Homo sapien
ggctcctgacactttctattattacacatatga

SEQ ID NO: 128337 - DNA, 33 bp, Homo sapien
aggtatgacttttttccaaaacagcagcatata

SEQ ID NO: 128338 - DNA, 33 bp, Homo sapien
aggtatgacttttttctaaaacagcagcatata

SEQ ID NO: 128339 - DNA, 33 bp, Homo sapien
acccccaatttatctcacctatcaatttatcct

SEQ ID NO: 128340 - DNA, 33 bp, Homo sapien
acccccaatttatctcccctatcaatttatcct

SEQ ID NO: 128341 - DNA, 33 bp, Homo sapien
aaagaaggtgacaacccggaaacaccaacaggc

SEQ ID NO: 128342 - DNA, 33 bp, Homo sapien
aaagaaggtgacaacctggaaacaccaacaggc

SEQ ID NO: 128343 - DNA, 33 bp, Homo sapien
tgtagtcaggcaattcaaaataaacagtaagta

SEQ ID NO: 128344 - DNA, 33 bp, Homo sapien
tgtagtcaggcaattcgaaataaacagtaagta

SEQ ID NO: 128345 - DNA, 33 bp, Homo sapien
tttcagtactaggacaactagccaaagagattt

SEQ ID NO: 128346 - DNA, 33 bp, Homo sapien
tttcagtactaggacagctagccaaagagattt

SEQ ID NO: 128347 - DNA, 33 bp, Homo sapien
atgctcctacactgttcaacaaaagttctgaca

SEQ ID NO: 128348 - DNA, 33 bp, Homo sapien
atgctcctacactgtttaacaaaagttctgaca

SEQ ID NO: 128349 - DNA, 33 bp, Homo sapien
cttccaaaccaccatcactaaaggcacagtcct

SEQ ID NO: 128350 - DNA, 33 bp, Homo sapien
cttccaaaccaccatcgctaaaggcacagtcct

SEQ ID NO: 128351 - DNA, 33 bp, Homo sapien
tgatattcctgcccagaaacttaagaactgccc

SEQ ID NO: 128352 - DNA, 33 bp, Homo sapien
tgatattcctgcccaggaacttaagaactgccc

SEQ ID NO: 128353 - DNA, 33 bp, Homo sapien
atcttctcaaccagcactgatattcctgcccag

SEQ ID NO: 128354 - DNA, 33 bp, Homo sapien
atcttctcaaccagcattgatattcctgcccag

SEQ ID NO: 128355 - DNA, 33 bp, Homo sapien
aagccctttgctcctgaaagacagtgatgggta

SEQ ID NO: 128356 - DNA, 33 bp, Homo sapien
aagccctttgctcctggaagacagtgatgggta

SEQ ID NO: 128357 - DNA, 33 bp, Homo sapien
agaactgagtgtggggacatggaggccgagagg

SEQ ID NO: 128358 - DNA, 33 bp, Homo sapien
agaactgagtgtggggtcatggaggccgagagg

SEQ ID NO: 128359 - DNA, 33 bp, Homo sapien
gccccaacttagtcaactctaccttattcacgt

SEQ ID NO: 128360 - DNA, 33 bp, Homo sapien
gccccaacttagtcaattctaccttattcacgt

SEQ ID NO: 128361 - DNA, 33 bp, Homo sapien
gcacctattaaactgcaaattccaagctccagt

SEQ ID NO: 128362 - DNA, 33 bp, Homo sapien
gcacctattaaactgccaattccaagctccagt

SEQ ID NO: 128363 - DNA, 33 bp, Homo sapien
gcaacctggtccaggccctaattaaccacatgt

SEQ ID NO: 128364 - DNA, 33 bp, Homo sapien
gcaacctggtccaggctctaattaaccacatgt

SEQ ID NO: 128365 - DNA, 33 bp, Homo sapien
acattcttaaaagccaatgctacagtgggaatg

SEQ ID NO: 128366 - DNA, 33 bp, Homo sapien
acattcttaaaagccagtgctacagtgggaatg

SEQ ID NO: 128367 - DNA, 33 bp, Homo sapien
gaacaatgtgcaaaaaacaatacaaggacccat

SEQ ID NO: 128368 - DNA, 33 bp, Homo sapien
gaacaatgtgcaaaaagcaatacaaggacccat

SEQ ID NO: 128369 - DNA, 33 bp, Homo sapien
aagtagtgaaggtaaaagttgcaaaaatattgg

SEQ ID NO: 128370 - DNA, 33 bp, Homo sapien
aagtagtgaaggtaaacgttgcaaaaatattgg

SEQ ID NO: 128371 - DNA, 33 bp, Homo sapien
ttgctctgttttcagaatctctcttttgctggt

SEQ ID NO: 128372 - DNA, 33 bp, Homo sapien
ttgctctgttttcagagtctctcttttgctggt

SEQ ID NO: 128373 - DNA, 33 bp, Homo sapien
caaagcattttgtacacgttgtgaggaaagaat

SEQ ID NO: 128374 - DNA, 33 bp, Homo sapien
caaagcattttgtacatgttgtgaggaaagaat

SEQ ID NO: 128375 - DNA, 33 bp, Homo sapien
acacactgggactaccactgctctgtgagacaa

SEQ ID NO: 128376 - DNA, 33 bp, Homo sapien
acacactgggactaccgctgctctgtgagacaa

SEQ ID NO: 128377 - DNA, 33 bp, Homo sapien
cttaggtcagagactaggtgttcctcacacttt

SEQ ID NO: 128378 - DNA, 33 bp, Homo sapien
cttaggtcagagactatgtgttcctcacacttt

SEQ ID NO: 128379 - DNA, 33 bp, Homo sapien
tttgaagatatgggaagggaaaagtctacatac

SEQ ID NO: 128380 - DNA, 33 bp, Homo sapien
tttgaagatatgggaatggaaaagtctacatac

SEQ ID NO: 128381 - DNA, 33 bp, Homo sapien
cttttatcaaaaatacaggcaataacagatgct

SEQ ID NO: 128382 - DNA, 33 bp, Homo sapien
cttttatcaaaaataccggcaataacagatgct

SEQ ID NO: 128383 - DNA, 33 bp, Homo sapien
gtggtgtgactgggggaagtgttagttagcaca

SEQ ID NO: 128384 - DNA, 33 bp, Homo sapien
gtggtgtgactggggggagtgttagttagcaca

SEQ ID NO: 128385 - DNA, 33 bp, Homo sapien
tcatttaacaagtgagcaccagaaacacaattt

SEQ ID NO: 128386 - DNA, 33 bp, Homo sapien
tcatttaacaagtgaggaccagaaacacaattt

SEQ ID NO: 128387 - DNA, 33 bp, Homo sapien
aaattttttctggtcacgtcggattcttacgtg

SEQ ID NO: 128388 - DNA, 33 bp, Homo sapien
aaattttttctggtcatgtcggattcttacgtg

SEQ ID NO: 128389 - DNA, 33 bp, Homo sapien
tgagtgctagtttgtgcagttacgagaattaat

SEQ ID NO: 128390 - DNA, 33 bp, Homo sapien
tgagtgctagtttgtgtagttacgagaattaat

SEQ ID NO: 128391 - DNA, 33 bp, Homo sapien
ggaggatcaccaataaactgtggtcccagagaa

SEQ ID NO: 128392 - DNA, 33 bp, Homo sapien
ggaggatcaccaataagctgtggtcccagagaa

SEQ ID NO: 128393 - DNA, 33 bp, Homo sapien
tcccagacctccacaccattagtccacgtgaat

SEQ ID NO: 128394 - DNA, 33 bp, Homo sapien
tcccagacctccacactattagtccacgtgaat

SEQ ID NO: 128395 - DNA, 33 bp, Homo sapien
tcgaatctcttgtgtcccacgctgacttcacat

SEQ ID NO: 128396 - DNA, 33 bp, Homo sapien
tcgaatctcttgtgtcgcacgctgacttcacat

SEQ ID NO: 128397 - DNA, 33 bp, Homo sapien
actaaaaaccaaggagaccaaatgtgaagtcag

SEQ ID NO: 128398 - DNA, 33 bp, Homo sapien
actaaaaaccaaggaggccaaatgtgaagtcag

SEQ ID NO: 128399 - DNA, 33 bp, Homo sapien
aaatacttattttggcaaagcagtacttaaatc

SEQ ID NO: 128400 - DNA, 33 bp, Homo sapien
aaatacttattttggctaagcagtacttaaatc

SEQ ID NO: 128401 - DNA, 33 bp, Homo sapien
atgtctgctaaaatggaaggcttttgttttcat

SEQ ID NO: 128402 - DNA, 33 bp, Homo sapien
atgtctgctaaaatgggaggcttttgttttcat

SEQ ID NO: 128403 - DNA, 33 bp, Homo sapien
tttgcctgtatttgaacgcattagtttcattta

SEQ ID NO: 128404 - DNA, 33 bp, Homo sapien
tttgcctgtatttgaatgcattagtttcattta

SEQ ID NO: 128405 - DNA, 33 bp, Homo sapien
agttggcattttgagaaccttgcattcaattac

SEQ ID NO: 128406 - DNA, 33 bp, Homo sapien
agttggcattttgagacccttgcattcaattac

SEQ ID NO: 128407 - DNA, 33 bp, Homo sapien
ttaatcctcaaatgaacactaagatgtaggttt

SEQ ID NO: 128408 - DNA, 33 bp, Homo sapien
ttaatcctcaaatgaatactaagatgtaggttt

SEQ ID NO: 128409 - DNA, 33 bp, Homo sapien
gagagggtccatgctcaaatgtttgctagtgtg

SEQ ID NO: 128410 - DNA, 33 bp, Homo sapien
gagagggtccatgctcgaatgtttgctagtgtg

SEQ ID NO: 128411 - DNA, 33 bp, Homo sapien
cacactattcgggtgacggttacaccaaaagcc

SEQ ID NO: 128412 - DNA, 33 bp, Homo sapien
cacactattcgggtgatggttacaccaaaagcc

SEQ ID NO: 128413 - DNA, 33 bp, Homo sapien
atggtaggtaaaattacgtgcaaagaatgctta

SEQ ID NO: 128414 - DNA, 33 bp, Homo sapien
atggtaggtaaaattatgtgcaaagaatgctta

SEQ ID NO: 128415 - DNA, 33 bp, Homo sapien
gaagagaacacaagggacatcttttggggtaat

SEQ ID NO: 128416 - DNA, 33 bp, Homo sapien
gaagagaacacaaggggcatcttttggggtaat

SEQ ID NO: 128417 - DNA, 33 bp, Homo sapien
tactcataaatgttcacaaagtgagatctccta

SEQ ID NO: 128418 - DNA, 33 bp, Homo sapien
tactcataaatgttcagaaagtgagatctccta

SEQ ID NO: 128419 - DNA, 33 bp, Homo sapien
tatggttcatcttaaacagtttctaagatgtga

SEQ ID NO: 128420 - DNA, 33 bp, Homo sapien
tatggttcatcttaaatagtttctaagatgtga

SEQ ID NO: 128421 - DNA, 33 bp, Homo sapien
aactgattgggaacacacaagcatcctgagttt

SEQ ID NO: 128422 - DNA, 33 bp, Homo sapien
aactgattgggaacacgcaagcatcctgagttt

SEQ ID NO: 128423 - DNA, 33 bp, Homo sapien
gaagccccatagctccaagtctgcagctctgtt

SEQ ID NO: 128424 - DNA, 33 bp, Homo sapien
gaagccccatagctccgagtctgcagctctgtt

SEQ ID NO: 128425 - DNA, 33 bp, Homo sapien
tgaattgcttttgagaagtttaggcatatatta

SEQ ID NO: 128426 - DNA, 33 bp, Homo sapien
tgaattgcttttgagaggtttaggcatatatta

SEQ ID NO: 128427 - DNA, 33 bp, Homo sapien
agaccagtgctccctacgtgcagcttggctcag

SEQ ID NO: 128428 - DNA, 33 bp, Homo sapien
agaccagtgctccctatgtgcagcttggctcag

SEQ ID NO: 128429 - DNA, 33 bp, Homo sapien
aaacccactctatgacgatcattattcacattt

SEQ ID NO: 128430 - DNA, 33 bp, Homo sapien
aaacccactctatgactatcattattcacattt

SEQ ID NO: 128431 - DNA, 33 bp, Homo sapien
aaaatagaggtattcaaagtaaccacctcctgg

SEQ ID NO: 128432 - DNA, 33 bp, Homo sapien
aaaatagaggtattcagagtaaccacctcctgg

SEQ ID NO: 128433 - DNA, 33 bp, Homo sapien
cactgttctagatgtacggatgaagttctgtca

SEQ ID NO: 128434 - DNA, 33 bp, Homo sapien
cactgttctagatgtatggatgaagttctgtca

SEQ ID NO: 128435 - DNA, 33 bp, Homo sapien
tgaatacagaacactaaataactattgtcagtt

SEQ ID NO: 128436 - DNA, 33 bp, Homo sapien
tgaatacagaacactacataactattgtcagtt

SEQ ID NO: 128437 - DNA, 33 bp, Homo sapien
tggttttccccagatgccaagaaatgccaaaaa

SEQ ID NO: 128438 - DNA, 33 bp, Homo sapien
tggttttccccagatgtcaagaaatgccaaaaa

SEQ ID NO: 128439 - DNA, 33 bp, Homo sapien
atgccagatacaatgaaagctgagaaattaact

SEQ ID NO: 128440 - DNA, 33 bp, Homo sapien
atgccagatacaatgagagctgagaaattaact

SEQ ID NO: 128441 - DNA, 33 bp, Homo sapien
ttgggatcattgtttacgggctgtgaataagaa

SEQ ID NO: 128442 - DNA, 33 bp, Homo sapien
ttgggatcattgtttatgggctgtgaataagaa

SEQ ID NO: 128443 - DNA, 33 bp, Homo sapien
ggagtgggagattgtaccatgaagggttctcaa

SEQ ID NO: 128444 - DNA, 33 bp, Homo sapien
ggagtgggagattgtagcatgaagggttctcaa

SEQ ID NO: 128445 - DNA, 33 bp, Homo sapien
taatttactcattgctaaagtgggatagtaata

SEQ ID NO: 128446 - DNA, 33 bp, Homo sapien
taatttactcattgctgaagtgggatagtaata

SEQ ID NO: 128447 - DNA, 33 bp, Homo sapien
tctgtctgtctgtcaaccttccctcataatctc

SEQ ID NO: 128448 - DNA, 33 bp, Homo sapien
tctgtctgtctgtcaatcttccctcataatctc

SEQ ID NO: 128449 - DNA, 33 bp, Homo sapien
gctaagtagggctagacatgaccaaatcctgca

SEQ ID NO: 128450 - DNA, 33 bp, Homo sapien
gctaagtagggctagatatgaccaaatcctgca

SEQ ID NO: 128451 - DNA, 33 bp, Homo sapien
cactagctgcttttcacgttctcaggccttcag

SEQ ID NO: 128452 - DNA, 33 bp, Homo sapien
cactagctgcttttcatgttctcaggccttcag

SEQ ID NO: 128453 - DNA, 33 bp, Homo sapien
actgaggaagagtctaaccaaacaaaccttact

SEQ ID NO: 128454 - DNA, 33 bp, Homo sapien
actgaggaagagtctacccaaacaaaccttact

SEQ ID NO: 128455 - DNA, 33 bp, Homo sapien
ggcggggacaacttcacaagggaaatttatctt

SEQ ID NO: 128456 - DNA, 33 bp, Homo sapien
ggcggggacaacttcagaagggaaatttatctt

SEQ ID NO: 128457 - DNA, 33 bp, Homo sapien
ttaacattttcctaaccagaaattgggagaatg

SEQ ID NO: 128458 - DNA, 33 bp, Homo sapien
ttaacattttcctaactagaaattgggagaatg

SEQ ID NO: 128459 - DNA, 33 bp, Homo sapien
tcgggtgctggaaggaacaaaactctgtgctgc

SEQ ID NO: 128460 - DNA, 33 bp, Homo sapien
tcgggtgctggaaggagcaaaactctgtgctgc

SEQ ID NO: 128461 - DNA, 33 bp, Homo sapien
tgtttatggggccatacgttaaataatgtttcc

SEQ ID NO: 128462 - DNA, 33 bp, Homo sapien
tgtttatggggccatatgttaaataatgtttcc

SEQ ID NO: 128463 - DNA, 33 bp, Homo sapien
caaagagatggaagaaaaattattagctaaaca

SEQ ID NO: 128464 - DNA, 33 bp, Homo sapien
caaagagatggaagaagaattattagctaaaca

SEQ ID NO: 128465 - DNA, 33 bp, Homo sapien
atatattctttggcccaggattcactaacagcc

SEQ ID NO: 128466 - DNA, 33 bp, Homo sapien
atatattctttggcccgggattcactaacagcc

SEQ ID NO: 128467 - DNA, 33 bp, Homo sapien
taagactgaccagaacccatttatatgttcttt

SEQ ID NO: 128468 - DNA, 33 bp, Homo sapien
taagactgaccagaactcatttatatgttcttt

SEQ ID NO: 128469 - DNA, 33 bp, Homo sapien
caagattctaaaactccaggacgaacatttttt

SEQ ID NO: 128470 - DNA, 33 bp, Homo sapien
caagattctaaaactctaggacgaacatttttt

SEQ ID NO: 128471 - DNA, 33 bp, Homo sapien
gtccctgaagaaagtaaggagatgtcttgggac

SEQ ID NO: 128472 - DNA, 33 bp, Homo sapien
gtccctgaagaaagtatggagatgtcttgggac

SEQ ID NO: 128473 - DNA, 33 bp, Homo sapien
catgttagagatacaaagagactttggtgacaa

SEQ ID NO: 128474 - DNA, 33 bp, Homo sapien
catgttagagatacaaggagactttggtgacaa

SEQ ID NO: 128475 - DNA, 33 bp, Homo sapien
aactttctaggtgccactgattctttcactgtg

SEQ ID NO: 128476 - DNA, 33 bp, Homo sapien
aactttctaggtgccattgattctttcactgtg

SEQ ID NO: 128477 - DNA, 33 bp, Homo sapien
ctcaagagagtaaataagcttaccgagtgcaat

SEQ ID NO: 128478 - DNA, 33 bp, Homo sapien
ctcaagagagtaaatatgcttaccgagtgcaat

SEQ ID NO: 128479 - DNA, 33 bp, Homo sapien
caccttctattctttcacttctagctcttgctc

SEQ ID NO: 128480 - DNA, 33 bp, Homo sapien
caccttctattctttcgcttctagctcttgctc

SEQ ID NO: 128481 - DNA, 33 bp, Homo sapien
cctccaagtttaccaacattttacatcaacagt

SEQ ID NO: 128482 - DNA, 33 bp, Homo sapien
cctccaagtttaccaagattttacatcaacagt

SEQ ID NO: 128483 - DNA, 33 bp, Homo sapien
acctgtaaatgaaaagcatgagatcaattagaa

SEQ ID NO: 128484 - DNA, 33 bp, Homo sapien
acctgtaaatgaaaagtatgagatcaattagaa

SEQ ID NO: 128485 - DNA, 33 bp, Homo sapien
gtgtgtggtcttctaaaaaataaatgaatggtg

SEQ ID NO: 128486 - DNA, 33 bp, Homo sapien
gtgtgtggtcttctaacaaataaatgaatggtg

SEQ ID NO: 128487 - DNA, 33 bp, Homo sapien
taaagtagcccacaagcctggttttatgttatg

SEQ ID NO: 128488 - DNA, 33 bp, Homo sapien
taaagtagcccacaagtctggttttatgttatg

SEQ ID NO: 128489 - DNA, 33 bp, Homo sapien
tacttgcataatagtccatccagtagtgaagca

SEQ ID NO: 128490 - DNA, 33 bp, Homo sapien
tacttgcataatagtctatccagtagtgaagca

SEQ ID NO: 128491 - DNA, 33 bp, Homo sapien
gttaagttatgagatacagtaacaataaattat

SEQ ID NO: 128492 - DNA, 33 bp, Homo sapien
gttaagttatgagatatagtaacaataaattat

SEQ ID NO: 128493 - DNA, 33 bp, Homo sapien
ttcatggagttaacaaatatactgtcttgtctt

SEQ ID NO: 128494 - DNA, 33 bp, Homo sapien
ttcatggagttaacaactatactgtcttgtctt

SEQ ID NO: 128495 - DNA, 33 bp, Homo sapien
gctggaataccgtacccgcaaaatgatagtttc

SEQ ID NO: 128496 - DNA, 33 bp, Homo sapien
gctggaataccgtacctgcaaaatgatagtttc

SEQ ID NO: 128497 - DNA, 33 bp, Homo sapien
tccttcttctgtaataagtgcagtagagggtgt

SEQ ID NO: 128498 - DNA, 33 bp, Homo sapien
tccttcttctgtaatatgtgcagtagagggtgt

SEQ ID NO: 128499 - DNA, 33 bp, Homo sapien
tcgtgaattgctataaagaaataactgaggctg

SEQ ID NO: 128500 - DNA, 33 bp, Homo sapien
tcgtgaattgctataaggaaataactgaggctg

SEQ ID NO: 128501 - DNA, 33 bp, Homo sapien
tagactcatgggtagaaggaaatgagtcttaga

SEQ ID NO: 128502 - DNA, 33 bp, Homo sapien
tagactcatgggtagagggaaatgagtcttaga

SEQ ID NO: 128503 - DNA, 33 bp, Homo sapien
ggaagagaggagcccaaaggatggtagggaaag

SEQ ID NO: 128504 - DNA, 33 bp, Homo sapien
ggaagagaggagcccagaggatggtagggaaag

SEQ ID NO: 128505 - DNA, 33 bp, Homo sapien
tggcatttaagctgaacgatggagtcaacagag

SEQ ID NO: 128506 - DNA, 33 bp, Homo sapien
tggcatttaagctgaatgatggagtcaacagag

SEQ ID NO: 128507 - DNA, 33 bp, Homo sapien
gatgttgtgatgctcacaggactccctctcctt

SEQ ID NO: 128508 - DNA, 33 bp, Homo sapien
gatgttgtgatgctcataggactccctctcctt

SEQ ID NO: 128509 - DNA, 33 bp, Homo sapien
aattcccaattgcaaaactcacaaggaaaggaa

SEQ ID NO: 128510 - DNA, 33 bp, Homo sapien
aattcccaattgcaaatctcacaaggaaaggaa

SEQ ID NO: 128511 - DNA, 33 bp, Homo sapien
gtcaggaatttgggacaaggcttatctgtctga

SEQ ID NO: 128512 - DNA, 33 bp, Homo sapien
gtcaggaatttgggacgaggcttatctgtctga

SEQ ID NO: 128513 - DNA, 33 bp, Homo sapien
ttgatatttagggtgaccgactgctctggtttg

SEQ ID NO: 128514 - DNA, 33 bp, Homo sapien
ttgatatttagggtgatcgactgctctggtttg

SEQ ID NO: 128515 - DNA, 33 bp, Homo sapien
caggaatgaaatgatccccccaacttacaacga

SEQ ID NO: 128516 - DNA, 33 bp, Homo sapien
caggaatgaaatgatctccccaacttacaacga

SEQ ID NO: 128517 - DNA, 33 bp, Homo sapien
tataatgtatgaatccaagaaaaaaaaatcgaa

SEQ ID NO: 128518 - DNA, 33 bp, Homo sapien
tataatgtatgaatccgagaaaaaaaaatcgaa

SEQ ID NO: 128519 - DNA, 33 bp, Homo sapien
cctgccaagtgaaggagggaaagaaactagact

SEQ ID NO: 128520 - DNA, 33 bp, Homo sapien
cctgccaagtgaaggatggaaagaaactagact

SEQ ID NO: 128521 - DNA, 33 bp, Homo sapien
aagagacagtataccaagttttatagctattct

SEQ ID NO: 128522 - DNA, 33 bp, Homo sapien
aagagacagtataccacgttttatagctattct

SEQ ID NO: 128523 - DNA, 33 bp, Homo sapien
caaggaacaagcaagacgtgaacaccaagtgct

SEQ ID NO: 128524 - DNA, 33 bp, Homo sapien
caaggaacaagcaagatgtgaacaccaagtgct

SEQ ID NO: 128525 - DNA, 33 bp, Homo sapien
gcccgtaggttaggccacataaaatcctgcact

SEQ ID NO: 128526 - DNA, 33 bp, Homo sapien
gcccgtaggttaggccgcataaaatcctgcact

SEQ ID NO: 128527 - DNA, 33 bp, Homo sapien
agactgcctggctctaaatcctgtctctactaa

SEQ ID NO: 128528 - DNA, 33 bp, Homo sapien
agactgcctggctctacatcctgtctctactaa

SEQ ID NO: 128529 - DNA, 33 bp, Homo sapien
ctttatttccaataacagaactggagcccccag

SEQ ID NO: 128530 - DNA, 33 bp, Homo sapien
ctttatttccaataacggaactggagcccccag

SEQ ID NO: 128531 - DNA, 33 bp, Homo sapien
tatttcatctaattccccaaacatccctggata

SEQ ID NO: 128532 - DNA, 33 bp, Homo sapien
tatttcatctaattcctcaaacatccctggata

SEQ ID NO: 128533 - DNA, 33 bp, Homo sapien
ttttcccattttgctcacttcctcccttctgtc

SEQ ID NO: 128534 - DNA, 33 bp, Homo sapien
ttttcccattttgctcgcttcctcccttctgtc

SEQ ID NO: 128535 - DNA, 33 bp, Homo sapien
gagctacttacttcacccctactcttgcctggt

SEQ ID NO: 128536 - DNA, 33 bp, Homo sapien
gagctacttacttcactcctactcttgcctggt

SEQ ID NO: 128537 - DNA, 33 bp, Homo sapien
tttttctaaggtatacaaaagctccattgagac

SEQ ID NO: 128538 - DNA, 33 bp, Homo sapien
tttttctaaggtataccaaagctccattgagac

SEQ ID NO: 128539 - DNA, 33 bp, Homo sapien
aaaatgatttgacacaataaaatgacttagaga

SEQ ID NO: 128540 - DNA, 33 bp, Homo sapien
aaaatgatttgacacagtaaaatgacttagaga

SEQ ID NO: 128541 - DNA, 33 bp, Homo sapien
agaagaaaaaaaagctcacaaccacatcacagc

SEQ ID NO: 128542 - DNA, 33 bp, Homo sapien
agaagaaaaaaaagctgacaaccacatcacagc

SEQ ID NO: 128543 - DNA, 33 bp, Homo sapien
ctgaggatgtaacctaaaggagagtgacaacaa

SEQ ID NO: 128544 - DNA, 33 bp, Homo sapien
ctgaggatgtaacctagaggagagtgacaacaa

SEQ ID NO: 128545 - DNA, 33 bp, Homo sapien
gtcttgaccaaatgtgaaaaacctttagggaca

SEQ ID NO: 128546 - DNA, 33 bp, Homo sapien
gtcttgaccaaatgtggaaaacctttagggaca

SEQ ID NO: 128547 - DNA, 33 bp, Homo sapien
tagatatgattcaccagctgtctcaaagtagta

SEQ ID NO: 128548 - DNA, 33 bp, Homo sapien
tagatatgattcaccatctgtctcaaagtagta

SEQ ID NO: 128549 - DNA, 33 bp, Homo sapien
taggcttagtaggttcaattattttagcaggct

SEQ ID NO: 128550 - DNA, 33 bp, Homo sapien
taggcttagtaggttcgattattttagcaggct

SEQ ID NO: 128551 - DNA, 33 bp, Homo sapien
gatgaaagaggccaaccgaaatttctagatact

SEQ ID NO: 128552 - DNA, 33 bp, Homo sapien
gatgaaagaggccaactgaaatttctagatact

SEQ ID NO: 128553 - DNA, 33 bp, Homo sapien
gaggaaagcaaacgcacgtttgggaatgtgaga

SEQ ID NO: 128554 - DNA, 33 bp, Homo sapien
gaggaaagcaaacgcaggtttgggaatgtgaga

SEQ ID NO: 128555 - DNA, 33 bp, Homo sapien
agaaggtggcagttcacgagatggaagtaccag

SEQ ID NO: 128556 - DNA, 33 bp, Homo sapien
agaaggtggcagttcatgagatggaagtaccag

SEQ ID NO: 128557 - DNA, 33 bp, Homo sapien
ttgacttgcatatcaactatgtatcttggtttt

SEQ ID NO: 128558 - DNA, 33 bp, Homo sapien
ttgacttgcatatcaattatgtatcttggtttt

SEQ ID NO: 128559 - DNA, 33 bp, Homo sapien
agaatataagggaaaaatggctcccagatgcct

SEQ ID NO: 128560 - DNA, 33 bp, Homo sapien
agaatataagggaaaagtggctcccagatgcct

SEQ ID NO: 128561 - DNA, 33 bp, Homo sapien
tttcttcctcacagaaccttccagttcaaaaaa

SEQ ID NO: 128562 - DNA, 33 bp, Homo sapien
tttcttcctcacagaatcttccagttcaaaaaa

SEQ ID NO: 128563 - DNA, 33 bp, Homo sapien
ttatatcttaatgtcacgcttcattgtcagaaa

SEQ ID NO: 128564 - DNA, 33 bp, Homo sapien
ttatatcttaatgtcatgcttcattgtcagaaa

SEQ ID NO: 128565 - DNA, 33 bp, Homo sapien
agggatgatactgatcccaaaagttttcatccc

SEQ ID NO: 128566 - DNA, 33 bp, Homo sapien
agggatgatactgatctcaaaagttttcatccc

SEQ ID NO: 128567 - DNA, 33 bp, Homo sapien
tctacggatccagcaacgaaaaaacaaataaaa

SEQ ID NO: 128568 - DNA, 33 bp, Homo sapien
tctacggatccagcaatgaaaaaacaaataaaa

SEQ ID NO: 128569 - DNA, 33 bp, Homo sapien
ataattatgaaagtgaaagtaaatttgaccttt

SEQ ID NO: 128570 - DNA, 33 bp, Homo sapien
ataattatgaaagtgacagtaaatttgaccttt

SEQ ID NO: 128571 - DNA, 33 bp, Homo sapien
atattaaaacgtgacaacttataccaataacaa

SEQ ID NO: 128572 - DNA, 33 bp, Homo sapien
atattaaaacgtgacatcttataccaataacaa

SEQ ID NO: 128573 - DNA, 33 bp, Homo sapien
attatgtagtagaaccacatagctaaaagttgg

SEQ ID NO: 128574 - DNA, 33 bp, Homo sapien
attatgtagtagaaccgcatagctaaaagttgg

SEQ ID NO: 128575 - DNA, 33 bp, Homo sapien
ggtcctacattaagtcaaagagaagtaggaaga

SEQ ID NO: 128576 - DNA, 33 bp, Homo sapien
ggtcctacattaagtcgaagagaagtaggaaga

SEQ ID NO: 128577 - DNA, 33 bp, Homo sapien
cctgcagaaggaacaaacagttcaagattcctg

SEQ ID NO: 128578 - DNA, 33 bp, Homo sapien
cctgcagaaggaacaaccagttcaagattcctg

SEQ ID NO: 128579 - DNA, 33 bp, Homo sapien
tacccaagccaggtaactggaaatgattaactt

SEQ ID NO: 128580 - DNA, 33 bp, Homo sapien
tacccaagccaggtaattggaaatgattaactt

SEQ ID NO: 128581 - DNA, 33 bp, Homo sapien
gtcaggctcatgacccagctctactgtttatta

SEQ ID NO: 128582 - DNA, 33 bp, Homo sapien
gtcaggctcatgacccggctctactgtttatta

SEQ ID NO: 128583 - DNA, 33 bp, Homo sapien
ggaaaaccaatacttacgtcctcttacacaatg

SEQ ID NO: 128584 - DNA, 33 bp, Homo sapien
ggaaaaccaatacttatgtcctcttacacaatg

SEQ ID NO: 128585 - DNA, 33 bp, Homo sapien
ttgtcctggtcacatcactgctgagttccagtg

SEQ ID NO: 128586 - DNA, 33 bp, Homo sapien
ttgtcctggtcacatccctgctgagttccagtg

SEQ ID NO: 128587 - DNA, 33 bp, Homo sapien
aaagacagaaaagagacaatgactcagattata

SEQ ID NO: 128588 - DNA, 33 bp, Homo sapien
aaagacagaaaagagagaatgactcagattata

SEQ ID NO: 128589 - DNA, 33 bp, Homo sapien
gtgctctcctctcttgcagcctgcatttcccag

SEQ ID NO: 128590 - DNA, 33 bp, Homo sapien
gtgctctcctctcttgtagcctgcatttcccag

SEQ ID NO: 128591 - DNA, 33 bp, Homo sapien
aaacagaaaggccttacggatgtgactgtggaa

SEQ ID NO: 128592 - DNA, 33 bp, Homo sapien
aaacagaaaggccttatggatgtgactgtggaa

SEQ ID NO: 128593 - DNA, 33 bp, Homo sapien
gggagcaagtggaatcccatctgaaactgacaa

SEQ ID NO: 128594 - DNA, 33 bp, Homo sapien
gggagcaagtggaatctcatctgaaactgacaa

SEQ ID NO: 128595 - DNA, 33 bp, Homo sapien
tagaatcattatgaacagtaaaggagatgtacg

SEQ ID NO: 128596 - DNA, 33 bp, Homo sapien
tagaatcattatgaacggtaaaggagatgtacg

SEQ ID NO: 128597 - DNA, 33 bp, Homo sapien
taaaatgaaaataaataagccaaaaactacaag

SEQ ID NO: 128598 - DNA, 33 bp, Homo sapien
taaaatgaaaataaattagccaaaaactacaag

SEQ ID NO: 128599 - DNA, 33 bp, Homo sapien
cagtgtaaccctgctacacctctgaaacaatgc

SEQ ID NO: 128600 - DNA, 33 bp, Homo sapien
cagtgtaaccctgctatacctctgaaacaatgc

SEQ ID NO: 128601 - DNA, 33 bp, Homo sapien
gagcagtttctgttccacgttcacttcgaagat

SEQ ID NO: 128602 - DNA, 33 bp, Homo sapien
gagcagtttctgttccgcgttcacttcgaagat

SEQ ID NO: 128603 - DNA, 33 bp, Homo sapien
gattggttataatttacggtatgactgtaagtg

SEQ ID NO: 128604 - DNA, 33 bp, Homo sapien
gattggttataatttatggtatgactgtaagtg

SEQ ID NO: 128605 - DNA, 33 bp, Homo sapien
aggtgatacaaatgtacagtgaaggttgctgtg

SEQ ID NO: 128606 - DNA, 33 bp, Homo sapien
aggtgatacaaatgtatagtgaaggttgctgtg

SEQ ID NO: 128607 - DNA, 33 bp, Homo sapien
ggtacaaagagcaggaatcacatgctttcagaa

SEQ ID NO: 128608 - DNA, 33 bp, Homo sapien
ggtacaaagagcaggagtcacatgctttcagaa

SEQ ID NO: 128609 - DNA, 33 bp, Homo sapien
gaatcttcttgccatccgaggagctgaatcaaa

SEQ ID NO: 128610 - DNA, 33 bp, Homo sapien
gaatcttcttgccatctgaggagctgaatcaaa

SEQ ID NO: 128611 - DNA, 33 bp, Homo sapien
ccatctgcctttatgacaatgaggaacttctga

SEQ ID NO: 128612 - DNA, 33 bp, Homo sapien
ccatctgcctttatgagaatgaggaacttctga

SEQ ID NO: 128613 - DNA, 33 bp, Homo sapien
agctcataagaaaagaagtttagagtttaggac

SEQ ID NO: 128614 - DNA, 33 bp, Homo sapien
agctcataagaaaagacgtttagagtttaggac

SEQ ID NO: 128615 - DNA, 33 bp, Homo sapien
agtacaatatatctataaaatggagcactataa

SEQ ID NO: 128616 - DNA, 33 bp, Homo sapien
agtacaatatatctatgaaatggagcactataa

SEQ ID NO: 128617 - DNA, 33 bp, Homo sapien
ttggaaataggactgacggctagaagatataga

SEQ ID NO: 128618 - DNA, 33 bp, Homo sapien
ttggaaataggactgatggctagaagatataga

SEQ ID NO: 128619 - DNA, 33 bp, Homo sapien
taatgattggcaaggacagcaatagatgaaaag

SEQ ID NO: 128620 - DNA, 33 bp, Homo sapien
taatgattggcaaggagagcaatagatgaaaag

SEQ ID NO: 128621 - DNA, 33 bp, Homo sapien
atctataaaatgggtccaatgatagtacctgta

SEQ ID NO: 128622 - DNA, 33 bp, Homo sapien
atctataaaatgggtctaatgatagtacctgta

SEQ ID NO: 128623 - DNA, 33 bp, Homo sapien
aatgacacacgtgccgaagtccctacactacca

SEQ ID NO: 128624 - DNA, 33 bp, Homo sapien
aatgacacacgtgccggagtccctacactacca

SEQ ID NO: 128625 - DNA, 33 bp, Homo sapien
ttcttcactcaatccactgccaagccccatttg

SEQ ID NO: 128626 - DNA, 33 bp, Homo sapien
ttcttcactcaatccattgccaagccccatttg

SEQ ID NO: 128627 - DNA, 33 bp, Homo sapien
tcaaaggcagcagagaaatctagtgaggttaaa

SEQ ID NO: 128628 - DNA, 33 bp, Homo sapien
tcaaaggcagcagagagatctagtgaggttaaa

SEQ ID NO: 128629 - DNA, 33 bp, Homo sapien
aaaacatccagaaccaaaacaaacctgctaagc

SEQ ID NO: 128630 - DNA, 33 bp, Homo sapien
aaaacatccagaaccagaacaaacctgctaagc

SEQ ID NO: 128631 - DNA, 33 bp, Homo sapien
ttcagtttttaaagagaagaaagcaggctggat

SEQ ID NO: 128632 - DNA, 33 bp, Homo sapien
ttcagtttttaaagaggagaaagcaggctggat

SEQ ID NO: 128633 - DNA, 33 bp, Homo sapien
catgttaagataaaaaagatgtggcttaaacac

SEQ ID NO: 128634 - DNA, 33 bp, Homo sapien
catgttaagataaaaaggatgtggcttaaacac

SEQ ID NO: 128635 - DNA, 33 bp, Homo sapien
cttactgaatgaacgaagggagaatttagacaa

SEQ ID NO: 128636 - DNA, 33 bp, Homo sapien
cttactgaatgaacgaggggagaatttagacaa

SEQ ID NO: 128637 - DNA, 33 bp, Homo sapien
atattgccacagtgggaattgcctttcaccata

SEQ ID NO: 128638 - DNA, 33 bp, Homo sapien
atattgccacagtggggattgcctttcaccata

SEQ ID NO: 128639 - DNA, 33 bp, Homo sapien
gaaagtttggataaagccaagtttgatgaaagc

SEQ ID NO: 128640 - DNA, 33 bp, Homo sapien
gaaagtttggataaagtcaagtttgatgaaagc

SEQ ID NO: 128641 - DNA, 33 bp, Homo sapien
aggagcattgggaccaaaattctttagtatgag

SEQ ID NO: 128642 - DNA, 33 bp, Homo sapien
aggagcattgggaccacaattctttagtatgag

SEQ ID NO: 128643 - DNA, 33 bp, Homo sapien
ctgtgaaatggagaaagagagctaaaaatagga

SEQ ID NO: 128644 - DNA, 33 bp, Homo sapien
ctgtgaaatggagaaatagagctaaaaatagga

SEQ ID NO: 128645 - DNA, 33 bp, Homo sapien
aattagttaaatgtagccaacagcaatgtcaga

SEQ ID NO: 128646 - DNA, 33 bp, Homo sapien
aattagttaaatgtagtcaacagcaatgtcaga

SEQ ID NO: 128647 - DNA, 33 bp, Homo sapien
aatggacagattttaaatgtacggtttgctgag

SEQ ID NO: 128648 - DNA, 33 bp, Homo sapien
aatggacagattttaagtgtacggtttgctgag

SEQ ID NO: 128649 - DNA, 33 bp, Homo sapien
atttcaaaattaaacacagttggcatttcgttt

SEQ ID NO: 128650 - DNA, 33 bp, Homo sapien
atttcaaaattaaacatagttggcatttcgttt

SEQ ID NO: 128651 - DNA, 33 bp, Homo sapien
gcctggcctagtcagaaattgtcactataattt

SEQ ID NO: 128652 - DNA, 33 bp, Homo sapien
gcctggcctagtcagagattgtcactataattt

SEQ ID NO: 128653 - DNA, 33 bp, Homo sapien
ggagacacaagacacagtaaacagtaattccaa

SEQ ID NO: 128654 - DNA, 33 bp, Homo sapien
ggagacacaagacacattaaacagtaattccaa

SEQ ID NO: 128655 - DNA, 33 bp, Homo sapien
atttcatctacagtaaaagaaatcatcttatta

SEQ ID NO: 128656 - DNA, 33 bp, Homo sapien
atttcatctacagtaagagaaatcatcttatta

SEQ ID NO: 128657 - DNA, 33 bp, Homo sapien
gctcttatttgctctacaatgcatacaggtata

SEQ ID NO: 128658 - DNA, 33 bp, Homo sapien
gctcttatttgctctataatgcatacaggtata

SEQ ID NO: 128659 - DNA, 33 bp, Homo sapien
gtatttctctgagtaagtagaagtgttcttttc

SEQ ID NO: 128660 - DNA, 33 bp, Homo sapien
gtatttctctgagtaattagaagtgttcttttc

SEQ ID NO: 128661 - DNA, 33 bp, Homo sapien
tgtaacattttagagcagaatgttcaggacctg

SEQ ID NO: 128662 - DNA, 33 bp, Homo sapien
tgtaacattttagagcggaatgttcaggacctg

SEQ ID NO: 128663 - DNA, 33 bp, Homo sapien
ggagtagctgggattaccagaacacaccaacat

SEQ ID NO: 128664 - DNA, 33 bp, Homo sapien
ggagtagctgggattatcagaacacaccaacat

SEQ ID NO: 128665 - DNA, 33 bp, Homo sapien
ttttaggtgcttataccacaaaaaagaagttaa

SEQ ID NO: 128666 - DNA, 33 bp, Homo sapien
ttttaggtgcttatactacaaaaaagaagttaa

SEQ ID NO: 128667 - DNA, 33 bp, Homo sapien
actgtcctcatgatagcaagtgagttttcatga

SEQ ID NO: 128668 - DNA, 33 bp, Homo sapien
actgtcctcatgataggaagtgagttttcatga

SEQ ID NO: 128669 - DNA, 33 bp, Homo sapien
gcactttatgtacttaccatgtgtatagatctg

SEQ ID NO: 128670 - DNA, 33 bp, Homo sapien
gcactttatgtacttatcatgtgtatagatctg

SEQ ID NO: 128671 - DNA, 33 bp, Homo sapien
tttcatctaaggcatgcattctgtcttttctca

SEQ ID NO: 128672 - DNA, 33 bp, Homo sapien
tttcatctaaggcatgtattctgtcttttctca

SEQ ID NO: 128673 - DNA, 33 bp, Homo sapien
tcaacaaatgtaccacaatcactcaatggggaa

SEQ ID NO: 128674 - DNA, 33 bp, Homo sapien
tcaacaaatgtaccacgatcactcaatggggaa

SEQ ID NO: 128675 - DNA, 33 bp, Homo sapien
cagttgactacaaacacgaggatttatttttag

SEQ ID NO: 128676 - DNA, 33 bp, Homo sapien
cagttgactacaaacatgaggatttatttttag

SEQ ID NO: 128677 - DNA, 33 bp, Homo sapien
atggatgattgttccagtatttccctacaggtt

SEQ ID NO: 128678 - DNA, 33 bp, Homo sapien
atggatgattgttccattatttccctacaggtt

SEQ ID NO: 128679 - DNA, 33 bp, Homo sapien
aaacacatggctaataaagtagaggacttattt

SEQ ID NO: 128680 - DNA, 33 bp, Homo sapien
aaacacatggctaatatagtagaggacttattt

SEQ ID NO: 128681 - DNA, 33 bp, Homo sapien; identical to SEQ ID NO: 128679

SEQ ID NO: 128682 - DNA, 33 bp, Homo sapien; identical to SEQ ID NO: 128680

SEQ ID NO: 128683 - DNA, 33 bp, Homo sapien
ccacttggaaatagcaaagtacataaagatcaa

SEQ ID NO: 128684 - DNA, 33 bp, Homo sapien
ccacttggaaatagcacagtacataaagatcaa

SEQ ID NO: 128685 - DNA, 33 bp, Homo sapien
tcccaccaacgttgtacaagggtccacttatct

SEQ ID NO: 128686 - DNA, 33 bp, Homo sapien
tcccaccaacgttgtagaagggtccacttatct

SEQ ID NO: 128687 - DNA, 33 bp, Homo sapien
tatcccaggttcttgccctagttactggagaaa

SEQ ID NO: 128688 - DNA, 33 bp, Homo sapien
tatcccaggttcttgctctagttactggagaaa

SEQ ID NO: 128689 - DNA, 33 bp, Homo sapien
atcctccagagagaaaaacctctaattcattgg

SEQ ID NO: 128690 - DNA, 33 bp, Homo sapien
atcctccagagagaaagacctctaattcattgg

SEQ ID NO: 128691 - DNA, 33 bp, Homo sapien
agtagcaatttaagtacgctttatgtttctcca

SEQ ID NO: 128692 - DNA, 33 bp, Homo sapien
agtagcaatttaagtatgctttatgtttctcca

SEQ ID NO: 128693 - DNA, 33 bp, Homo sapien
gcccactcagaaaagacaataagtgaatttagg

SEQ ID NO: 128694 - DNA, 33 bp, Homo sapien
gcccactcagaaaagagaataagtgaatttagg

SEQ ID NO: 128695 - DNA, 33 bp, Homo sapien
ctgaatgaccattgggacaacaaaaatattaag

SEQ ID NO: 128696 - DNA, 33 bp, Homo sapien
ctgaatgaccattggggcaacaaaaatattaag

SEQ ID NO: 128697 - DNA, 33 bp, Homo sapien
cttgtaaggtatctggcatcattccataggtta

SEQ ID NO: 128698 - DNA, 33 bp, Homo sapien
cttgtaaggtatctggtatcattccataggtta

SEQ ID NO: 128699 - DNA, 33 bp, Homo sapien
aacttacgtgacctccactatttctcatagcaa

SEQ ID NO: 128700 - DNA, 33 bp, Homo sapien
aacttacgtgacctccgctatttctcatagcaa

SEQ ID NO: 128701 - DNA, 33 bp, Homo sapien
agatccttggtgtcagccagatcaaagtttgta

SEQ ID NO: 128702 - DNA, 33 bp, Homo sapien
agatccttggtgtcagtcagatcaaagtttgta

SEQ ID NO: 128703 - DNA, 33 bp, Homo sapien
acaatacacataataacagccaatctaagagtt

SEQ ID NO: 128704 - DNA, 33 bp, Homo sapien
acaatacacataataatagccaatctaagagtt

SEQ ID NO: 128705 - DNA, 33 bp, Homo sapien
atatactgaaaactacaaatcactgatgaaaga

SEQ ID NO: 128706 - DNA, 33 bp, Homo sapien
atatactgaaaactaccaatcactgatgaaaga

SEQ ID NO: 128707 - DNA, 33 bp, Homo sapien
cacatctgggcaacaaagaagtttcagaaaagt

SEQ ID NO: 128708 - DNA, 33 bp, Homo sapien
cacatctgggcaacaaggaagtttcagaaaagt

SEQ ID NO: 128709 - DNA, 33 bp, Homo sapien
agggcaaagaaaagcaataacttggtccctgac

SEQ ID NO: 128710 - DNA, 33 bp, Homo sapien
agggcaaagaaaagcagtaacttggtccctgac

SEQ ID NO: 128711 - DNA, 33 bp, Homo sapien
tatccctagaggtacacgttacaagaggtaatg

SEQ ID NO: 128712 - DNA, 33 bp, Homo sapien
tatccctagaggtacatgttacaagaggtaatg

SEQ ID NO: 128713 - DNA, 33 bp, Homo sapien
tgctgaccagatcccacaataccttaccattta

SEQ ID NO: 128714 - DNA, 33 bp, Homo sapien
tgctgaccagatcccagaataccttaccattta

SEQ ID NO: 128715 - DNA, 33 bp, Homo sapien
cagccaaaccatactactaacacaaggccttca

SEQ ID NO: 128716 - DNA, 33 bp, Homo sapien
cagccaaaccatactagtaacacaaggccttca

SEQ ID NO: 128717 - DNA, 33 bp, Homo sapien
tgaatgagaaaagctacgataacaagtgccatg

SEQ ID NO: 128718 - DNA, 33 bp, Homo sapien
tgaatgagaaaagctatgataacaagtgccatg

SEQ ID NO: 128719 - DNA, 33 bp, Homo sapien
acaattcctaacaggaagagaaacgaaactagg

SEQ ID NO: 128720 - DNA, 33 bp, Homo sapien
acaattcctaacaggatgagaaacgaaactagg

SEQ ID NO: 128721 - DNA, 33 bp, Homo sapien
gcttcctcttgaacacagtcctcaatgctcctc

SEQ ID NO: 128722 - DNA, 33 bp, Homo sapien
gcttcctcttgaacacggtcctcaatgctcctc

SEQ ID NO: 128723 - DNA, 33 bp, Homo sapien; identical to SEQ ID NO: 128721

SEQ ID NO: 128724 - DNA, 33 bp, Homo sapien; identical to SEQ ID NO: 128722

SEQ ID NO: 128725 - DNA, 33 bp, Homo sapien
ggagaatagaaaaggactcacattgaaatatca

SEQ ID NO: 128726 - DNA, 33 bp, Homo sapien
ggagaatagaaaaggattcacattgaaatatca

SEQ ID NO: 128727 - DNA, 33 bp, Homo sapien
tgttttagtcacaaacacttggcccatgcctat

SEQ ID NO: 128728 - DNA, 33 bp, Homo sapien
tgttttagtcacaaactcttggcccatgcctat

SEQ ID NO: 128729 - DNA, 33 bp, Homo sapien
tgagatagctgggttaagaatgacaaaattatt

SEQ ID NO: 128730 - DNA, 33 bp, Homo sapien
tgagatagctgggttaggaatgacaaaattatt

SEQ ID NO: 128731 - DNA, 33 bp, Homo sapien
tgacaggtgagaaaagacattacagatagtgaa

SEQ ID NO: 128732 - DNA, 33 bp, Homo sapien
tgacaggtgagaaaaggcattacagatagtgaa

SEQ ID NO: 128733 - DNA, 33 bp, Homo sapien
ttccttcttttatgcaaaatgtaggtcagaaat

SEQ ID NO: 128734 - DNA, 33 bp, Homo sapien
ttccttcttttatgcataatgtaggtcagaaat

SEQ ID NO: 128735 - DNA, 33 bp, Homo sapien
gaaagagatgtaaggagatctggctcttcttgc

SEQ ID NO: 128736 - DNA, 33 bp, Homo sapien
gaaagagatgtaaggatatctggctcttcttgc

SEQ ID NO: 128737 - DNA, 33 bp, Homo sapien
gatgctacatacgaatgacaataaatgttagtc

SEQ ID NO: 128738 - DNA, 33 bp, Homo sapien
gatgctacatacgaattacaataaatgttagtc

SEQ ID NO: 128739 - DNA, 33 bp, Homo sapien
aagattttattaatgaaaacagatggtattttt

SEQ ID NO: 128740 - DNA, 33 bp, Homo sapien
aagattttattaatgataacagatggtattttt

SEQ ID NO: 128741 - DNA, 33 bp, Homo sapien
gtatccactatcattccacaggttagtttttaa

SEQ ID NO: 128742 - DNA, 33 bp, Homo sapien
gtatccactatcattctacaggttagtttttaa

SEQ ID NO: 128743 - DNA, 33 bp, Homo sapien
ttttgcatacataagcacactgttggctttatt

SEQ ID NO: 128744 - DNA, 33 bp, Homo sapien
ttttgcatacataagcgcactgttggctttatt

SEQ ID NO: 128745 - DNA, 33 bp, Homo sapien
aatatcaggcttggaacaggaaacaagaatgtg

SEQ ID NO: 128746 - DNA, 33 bp, Homo sapien
aatatcaggcttggaataggaaacaagaatgtg

SEQ ID NO: 128747 - DNA, 33 bp, Homo sapien
aaaagtggaaggaaaaatcatggaatatcaggc

SEQ ID NO: 128748 - DNA, 33 bp, Homo sapien
aaaagtggaaggaaaagtcatggaatatcaggc

SEQ ID NO: 128749 - DNA, 33 bp, Homo sapien
gtatgaccagagctgaaaacagattatgtgaaa

SEQ ID NO: 128750 - DNA, 33 bp, Homo sapien
gtatgaccagagctgagaacagattatgtgaaa

SEQ ID NO: 128751 - DNA, 33 bp, Homo sapien
ctgctttatatttggcactgtagataccaacat

SEQ ID NO: 128752 - DNA, 33 bp, Homo sapien
ctgctttatatttggccctgtagataccaacat

SEQ ID NO: 128753 - DNA, 33 bp, Homo sapien
tgctcttgatcatggacaaatagcaattctacc

SEQ ID NO: 128754 - DNA, 33 bp, Homo sapien
tgctcttgatcatggataaatagcaattctacc

SEQ ID NO: 128755 - DNA, 33 bp, Homo sapien
gtgctacatgatgacaaagaatttcctaatcca

SEQ ID NO: 128756 - DNA, 33 bp, Homo sapien
gtgctacatgatgacagagaatttcctaatcca

SEQ ID NO: 128757 - DNA, 33 bp, Homo sapien
acttctgaaatttccaaagtgctggtttggttc

SEQ ID NO: 128758 - DNA, 33 bp, Homo sapien
acttctgaaatttccatagtgctggtttggttc

SEQ ID NO: 128759 - DNA, 33 bp, Homo sapien
agtggagcaagatgacagaattgaatgcttcat

SEQ ID NO: 128760 - DNA, 33 bp, Homo sapien
agtggagcaagatgacggaattgaatgcttcat

SEQ ID NO: 128761 - DNA, 33 bp, Homo sapien
tttaatatctggaaagcctaacaagaaggatgt

SEQ ID NO: 128762 - DNA, 33 bp, Homo sapien
tttaatatctggaaagtctaacaagaaggatgt

SEQ ID NO: 128763 - DNA, 33 bp, Homo sapien
cagcttaattttaggacgtaagattggtccaga

SEQ ID NO: 128764 - DNA, 33 bp, Homo sapien
cagcttaattttaggatgtaagattggtccaga

SEQ ID NO: 128765 - DNA, 33 bp, Homo sapien
actatcacatgctaaaacttagttgaccctcca

SEQ ID NO: 128766 - DNA, 33 bp, Homo sapien
actatcacatgctaaatcttagttgaccctcca

SEQ ID NO: 128767 - DNA, 33 bp, Homo sapien
tcacagcacattggaaaaaccagggacttttaa

SEQ ID NO: 128768 - DNA, 33 bp, Homo sapien
tcacagcacattggaacaaccagggacttttaa

SEQ ID NO: 128769 - DNA, 33 bp, Homo sapien
ccctcaaggtcataaagtcccaactggtcatta

SEQ ID NO: 128770 - DNA, 33 bp, Homo sapien
ccctcaaggtcataaattcccaactggtcatta

SEQ ID NO: 128771 - DNA, 33 bp, Homo sapien
accctttccaaaggcaaaagagtctcactccat

SEQ ID NO: 128772 - DNA, 33 bp, Homo sapien
accctttccaaaggcagaagagtctcactccat

SEQ ID NO: 128773 - DNA, 33 bp, Homo sapien
aggcttactaggcatgccaaagatagaaataaa

SEQ ID NO: 128774 - DNA, 33 bp, Homo sapien
aggcttactaggcatggcaaagatagaaataaa

SEQ ID NO: 128775 - DNA, 33 bp, Homo sapien
agtaaccaaaaacttaataagtaagcagaacaa

SEQ ID NO: 128776 - DNA, 33 bp, Homo sapien
agtaaccaaaaacttattaagtaagcagaacaa

SEQ ID NO: 128777 - DNA, 33 bp, Homo sapien
atcttggcatagaacactgaatacgataaaaag

SEQ ID NO: 128778 - DNA, 33 bp, Homo sapien
atcttggcatagaacattgaatacgataaaaag

SEQ ID NO: 128779 - DNA, 33 bp, Homo sapien
gttgacaaatttagaaaagtgtatgaagttgat

SEQ ID NO: 128780 - DNA, 33 bp, Homo sapien
gttgacaaatttagaagagtgtatgaagttgat

SEQ ID NO: 128781 - DNA, 33 bp, Homo sapien
gtccaaatagaaacaacggcagtcagaggctcc

SEQ ID NO: 128782 - DNA, 33 bp, Homo sapien
gtccaaatagaaacaatggcagtcagaggctcc

SEQ ID NO: 128783 - DNA, 33 bp, Homo sapien
gtatgcaatgccacagaaattttacagttcagg

SEQ ID NO: 128784 - DNA, 33 bp, Homo sapien
gtatgcaatgccacagcaattttacagttcagg

SEQ ID NO: 128785 - DNA, 33 bp, Homo sapien
tttgaaaaatcacaacactgtctttcacagtgc

SEQ ID NO: 128786 - DNA, 33 bp, Homo sapien
tttgaaaaatcacaactctgtctttcacagtgc

SEQ ID NO: 128787 - DNA, 33 bp, Homo sapien
taccctgacaactatagtaaaatgaagatgcaa

SEQ ID NO: 128788 - DNA, 33 bp, Homo sapien
taccctgacaactatattaaaatgaagatgcaa

SEQ ID NO: 128789 - DNA, 33 bp, Homo sapien
aagtttctccaagtagccaaatcttttcttgct

SEQ ID NO: 128790 - DNA, 33 bp, Homo sapien
aagtttctccaagtagtcaaatcttttcttgct

SEQ ID NO: 128791 - DNA, 33 bp, Homo sapien
cattggtcaggtgtggacaaacaggcactcttg

SEQ ID NO: 128792 - DNA, 33 bp, Homo sapien
cattggtcaggtgtgggcaaacaggcactcttg

SEQ ID NO: 128793 - DNA, 33 bp, Homo sapien
cagtaggcctagtataagtataagtacatgata

SEQ ID NO: 128794 - DNA, 33 bp, Homo sapien
cagtaggcctagtataggtataagtacatgata

SEQ ID NO: 128795 - DNA, 33 bp, Homo sapien
gtgttctcttagattacgccttcttcctattgg

SEQ ID NO: 128796 - DNA, 33 bp, Homo sapien
gtgttctcttagattatgccttcttcctattgg

SEQ ID NO: 128797 - DNA, 33 bp, Homo sapien
taccccagcctttaccactatgcaatataggca

SEQ ID NO: 128798 - DNA, 33 bp, Homo sapien
taccccagcctttaccgctatgcaatataggca

SEQ ID NO: 128799 - DNA, 33 bp, Homo sapien
caaaagcacgggtaaccaatgcaaaaattgata

SEQ ID NO: 128800 - DNA, 33 bp, Homo sapien
caaaagcacgggtaacgaatgcaaaaattgata

SEQ ID NO: 128801 - DNA, 33 bp, Homo sapien
ttgattattatcttcactatttcagcaaaaagg

SEQ ID NO: 128802 - DNA, 33 bp, Homo sapien
ttgattattatcttcattatttcagcaaaaagg

SEQ ID NO: 128803 - DNA, 33 bp, Homo sapien
cataaagatggaaataatagacattggggaggc

SEQ ID NO: 128804 - DNA, 33 bp, Homo sapien
cataaagatggaaatagtagacattggggaggc

SEQ ID NO: 128805 - DNA, 33 bp, Homo sapien
gagggacacagtggaaaagacctgttcagtatc

SEQ ID NO: 128806 - DNA, 33 bp, Homo sapien
gagggacacagtggaagagacctgttcagtatc

SEQ ID NO: 128807 - DNA, 33 bp, Homo sapien
acttccaaactgttcaaatattcccagtatgat

SEQ ID NO: 128808 - DNA, 33 bp, Homo sapien
acttccaaactgttcagatattcccagtatgat

SEQ ID NO: 128809 - DNA, 33 bp, Homo sapien
attttatgttctgggtcaagatatggatttcaa

SEQ ID NO: 128810 - DNA, 33 bp, Homo sapien
attttatgttctgggttaagatatggatttcaa

SEQ ID NO: 128811 - DNA, 33 bp, Homo sapien
agttccatatggctcaagaaacatcctcactta

SEQ ID NO: 128812 - DNA, 33 bp, Homo sapien
agttccatatggctcaggaaacatcctcactta

SEQ ID NO: 128813 - DNA, 33 bp, Homo sapien
tgtgcttctggtgtaaaaacctttagctgaagc

SEQ ID NO: 128814 - DNA, 33 bp, Homo sapien
tgtgcttctggtgtaagaacctttagctgaagc

SEQ ID NO: 128815 - DNA, 33 bp, Homo sapien
agggaaaaccaaagtaagcagagaactttcaag

SEQ ID NO: 128816 - DNA, 33 bp, Homo sapien
agggaaaaccaaagtaggcagagaactttcaag

SEQ ID NO: 128817 - DNA, 33 bp, Homo sapien
gccaccctgagtgttacgtgtgcactgactgtg

SEQ ID NO: 128818 - DNA, 33 bp, Homo sapien
gccaccctgagtgttatgtgtgcactgactgtg

SEQ ID NO: 128819 - DNA, 33 bp, Homo sapien
aaaaatgcaacagagaagccagaaaggtcctgt

SEQ ID NO: 128820 - DNA, 33 bp, Homo sapien
aaaaatgcaacagagaggccagaaaggtcctgt

SEQ ID NO: 128821 - DNA, 33 bp, Homo sapien
cctgaaatgaggaaaacactgtcattggccagg

SEQ ID NO: 128822 - DNA, 33 bp, Homo sapien
cctgaaatgaggaaaatactgtcattggccagg

SEQ ID NO: 128823 - DNA, 33 bp, Homo sapien
cgcggggctgacagacaagggccttagctctct

SEQ ID NO: 128824 - DNA, 33 bp, Homo sapien
cgcggggctgacagacgagggccttagctctct

SEQ ID NO: 128825 - DNA, 33 bp, Homo sapien
aaccatgtattctaaacgccccttgttgccagg

SEQ ID NO: 128826 - DNA, 33 bp, Homo sapien
aaccatgtattctaaatgccccttgttgccagg

SEQ ID NO: 128827 - DNA, 33 bp, Homo sapien
agccccacaacaaggactcatatggcccaaaat

SEQ ID NO: 128828 - DNA, 33 bp, Homo sapien
agccccacaacaaggattcatatggcccaaaat

SEQ ID NO: 128829 - DNA, 33 bp, Homo sapien
aacagggccaaaccacacaagtgcccttagtgc

SEQ ID NO: 128830 - DNA, 33 bp, Homo sapien
aacagggccaaaccacgcaagtgcccttagtgc

SEQ ID NO: 128831 - DNA, 33 bp, Homo sapien
ctacaggcacgtcccaaaatgcccggctagttt

SEQ ID NO: 128832 - DNA, 33 bp, Homo sapien
ctacaggcacgtcccacaatgcccggctagttt

SEQ ID NO: 128833 - DNA, 33 bp, Homo sapien
caaggttttttctctcacatatccagccaacac

SEQ ID NO: 128834 - DNA, 33 bp, Homo sapien
caaggttttttctctcgcatatccagccaacac

SEQ ID NO: 128835 - DNA, 33 bp, Homo sapien
aatatacacaaacaacagaataatactctgcct

SEQ ID NO: 128836 - DNA, 33 bp, Homo sapien
aatatacacaaacaacggaataatactctgcct

SEQ ID NO: 128837 - DNA, 33 bp, Homo sapien
tatagcattgttattaagtgaagatacttttac

SEQ ID NO: 128838 - DNA, 33 bp, Homo sapien
tatagcattgttattaggtgaagatacttttac

SEQ ID NO: 128839 - DNA, 33 bp, Homo sapien
gttaaaggttactggccatttatcatagtaacc

SEQ ID NO: 128840 - DNA, 33 bp, Homo sapien
gttaaaggttactggctatttatcatagtaacc

SEQ ID NO: 128841 - DNA, 33 bp, Homo sapien
tctggaaaacacagacactaagacacattttga

SEQ ID NO: 128842 - DNA, 33 bp, Homo sapien
tctggaaaacacagacgctaagacacattttga

SEQ ID NO: 128843 - DNA, 33 bp, Homo sapien
cattacatgaaccaacagatctttttattatag

SEQ ID NO: 128844 - DNA, 33 bp, Homo sapien
cattacatgaaccaactgatctttttattatag

SEQ ID NO: 128845 - DNA, 33 bp, Homo sapien
tattttataacacacaaggaatgatttcgtttt

SEQ ID NO: 128846 - DNA, 33 bp, Homo sapien
tattttataacacacagggaatgatttcgtttt

SEQ ID NO: 128847 - DNA, 33 bp, Homo sapien
caatccaataatccaactactgagagatttatt

SEQ ID NO: 128848 - DNA, 33 bp, Homo sapien
caatccaataatccaagtactgagagatttatt

SEQ ID NO: 128849 - DNA, 33 bp, Homo sapien
aagacccttcactgtcactgctggtatctggct

SEQ ID NO: 128850 - DNA, 33 bp, Homo sapien
aagacccttcactgtctctgctggtatctggct

SEQ ID NO: 128851 - DNA, 33 bp, Homo sapien
cactccaagttcataacgcatctttaagacctg

SEQ ID NO: 128852 - DNA, 33 bp, Homo sapien
cactccaagttcataatgcatctttaagacctg

SEQ ID NO: 128853 - DNA, 33 bp, Homo sapien
tattgtaaatgtgtaactaagtgaaagacaagc

SEQ ID NO: 128854 - DNA, 33 bp, Homo sapien
tattgtaaatgtgtaagtaagtgaaagacaagc

SEQ ID NO: 128855 - DNA, 33 bp, Homo sapien
caatagaaactgggtccacatgagtgctaaagg

SEQ ID NO: 128856 - DNA, 33 bp, Homo sapien
caatagaaactgggtctacatgagtgctaaagg

SEQ ID NO: 128857 - DNA, 33 bp, Homo sapien
ccataccatataacccaacagttctcctagtta

SEQ ID NO: 128858 - DNA, 33 bp, Homo sapien
ccataccatataacccgacagttctcctagtta

SEQ ID NO: 128859 - DNA, 33 bp, Homo sapien
agcatgaaaataaccaggaagactgtgaagaga

SEQ ID NO: 128860 - DNA, 33 bp, Homo sapien
agcatgaaaataaccatgaagactgtgaagaga

SEQ ID NO: 128861 - DNA, 33 bp, Homo sapien
tctcaagcatccttgaatatcaaaaggagaaga

SEQ ID NO: 128862 - DNA, 33 bp, Homo sapien
tctcaagcatccttgagtatcaaaaggagaaga

SEQ ID NO: 128863 - DNA, 33 bp, Homo sapien
tgtgtcaattaagaataactccagctgcagtaa

SEQ ID NO: 128864 - DNA, 33 bp, Homo sapien
tgtgtcaattaagaattactccagctgcagtaa

SEQ ID NO: 128865 - DNA, 33 bp, Homo sapien
aagctggcaataacctcaaatacctgcatcatc

SEQ ID NO: 128866 - DNA, 33 bp, Homo sapien
aagctggcaataaccttaaatacctgcatcatc

SEQ ID NO: 128867 - DNA, 33 bp, Homo sapien
ctgcatcatcaatagacgatgggttaagtaagt

SEQ ID NO: 128868 - DNA, 33 bp, Homo sapien
ctgcatcatcaatagaggatgggttaagtaagt

SEQ ID NO: 128869 - DNA, 33 bp, Homo sapien
caagaagagagtctaacgtggcactcaatcctt

SEQ ID NO: 128870 - DNA, 33 bp, Homo sapien
caagaagagagtctaatgtggcactcaatcctt

SEQ ID NO: 128871 - DNA, 33 bp, Homo sapien
atggtaaatgattaagaatggaaaggagggtat

SEQ ID NO: 128872 - DNA, 33 bp, Homo sapien
atggtaaatgattaaggatggaaaggagggtat

SEQ ID NO: 128873 - DNA, 33 bp, Homo sapien
agaaacaatgaatgaccagaacaaacatatgcc

SEQ ID NO: 128874 - DNA, 33 bp, Homo sapien
agaaacaatgaatgacgagaacaaacatatgcc

SEQ ID NO: 128875 - DNA, 33 bp, Homo sapien
actgtaactgagatcagagttacctttcctccc

SEQ ID NO: 128876 - DNA, 33 bp, Homo sapien
actgtaactgagatcatagttacctttcctccc

SEQ ID NO: 128877 - DNA, 33 bp, Homo sapien
cccacactgcccaagaccaaatccctcactcaa

SEQ ID NO: 128878 - DNA, 33 bp, Homo sapien
cccacactgcccaagagcaaatccctcactcaa

SEQ ID NO: 128879 - DNA, 33 bp, Homo sapien
cctgaaggcttcaagcccaagaatgcaacaaga

SEQ ID NO: 128880 - DNA, 33 bp, Homo sapien
cctgaaggcttcaagctcaagaatgcaacaaga

SEQ ID NO: 128881 - DNA, 33 bp, Homo sapien
ggatggatctggttgccagaaggaaggtctcaa

SEQ ID NO: 128882 - DNA, 33 bp, Homo sapien
ggatggatctggttgctagaaggaaggtctcaa

SEQ ID NO: 128883 - DNA, 33 bp, Homo sapien
ctcatactcctcagaacattgtcccatggggtc

SEQ ID NO: 128884 - DNA, 33 bp, Homo sapien
ctcatactcctcagaatattgtcccatggggtc

SEQ ID NO: 128885 - DNA, 33 bp, Homo sapien
cccactatactagcaccgaaaccagtcagcaca

SEQ ID NO: 128886 - DNA, 33 bp, Homo sapien
cccactatactagcactgaaaccagtcagcaca

SEQ ID NO: 128887 - DNA, 33 bp, Homo sapien
tgactggaatcaattacctagcaaacaatttgg

SEQ ID NO: 128888 - DNA, 33 bp, Homo sapien
tgactggaatcaattatctagcaaacaatttgg

SEQ ID NO: 128889 - DNA, 33 bp, Homo sapien
taaaagatacggtgtacggtaatagcgtccaat

SEQ ID NO: 128890 - DNA, 33 bp, Homo sapien
taaaagatacggtgtatggtaatagcgtccaat

SEQ ID NO: 128891 - DNA, 33 bp, Homo sapien
tcccatgtatgccttaaagatgaccctcagttt

SEQ ID NO: 128892 - DNA, 33 bp, Homo sapien
tcccatgtatgccttagagatgaccctcagttt

SEQ ID NO: 128893 - DNA, 33 bp, Homo sapien
ccatatagaccagatcaaaagtattatttgcat

SEQ ID NO: 128894 - DNA, 33 bp, Homo sapien
ccatatagaccagatccaaagtattatttgcat

SEQ ID NO: 128895 - DNA, 33 bp, Homo sapien
taaatcttacaaagacgcctcaattcaaagaaa

SEQ ID NO: 128896 - DNA, 33 bp, Homo sapien
taaatcttacaaagactcctcaattcaaagaaa

SEQ ID NO: 128897 - DNA, 33 bp, Homo sapien
tttgcagtatattacacagccacctcctttagc

SEQ ID NO: 128898 - DNA, 33 bp, Homo sapien
tttgcagtatattacatagccacctcctttagc

SEQ ID NO: 128899 - DNA, 33 bp, Homo sapien
ctggtggcacttacttcagtgtctgagctttaa

SEQ ID NO: 128900 - DNA, 33 bp, Homo sapien
ctggtggcacttactttagtgtctgagctttaa

SEQ ID NO: 128901 - DNA, 33 bp, Homo sapien
ttagaaaggtcccaaaactgaggtaacagttcc

SEQ ID NO: 128902 - DNA, 33 bp, Homo sapien
ttagaaaggtcccaaagctgaggtaacagttcc

SEQ ID NO: 128903 - DNA, 33 bp, Homo sapien
ttctccctactcttacagaattgcctttatctc

SEQ ID NO: 128904 - DNA, 33 bp, Homo sapien
ttctccctactcttacggaattgcctttatctc

SEQ ID NO: 128905 - DNA, 33 bp, Homo sapien
aaaaccctaagaataacgctacctgggattaga

SEQ ID NO: 128906 - DNA, 33 bp, Homo sapien
aaaaccctaagaataatgctacctgggattaga

SEQ ID NO: 128907 - DNA, 33 bp, Homo sapien
aacataatcagtggaaatggacatcgaatgggg

SEQ ID NO: 128908 - DNA, 33 bp, Homo sapien
aacataatcagtggaagtggacatcgaatgggg

SEQ ID NO: 128909 - DNA, 33 bp, Homo sapien
tttccaattgtgctaacgggcaggttccggagg

SEQ ID NO: 128910 - DNA, 33 bp, Homo sapien
tttccaattgtgctaatgggcaggttccggagg

SEQ ID NO: 128911 - DNA, 33 bp, Homo sapien
ttaagatgcctgagaaacattcaggtggatgtc

SEQ ID NO: 128912 - DNA, 33 bp, Homo sapien
ttaagatgcctgagaagcattcaggtggatgtc

SEQ ID NO: 128913 - DNA, 33 bp, Homo sapien
agtcctgcttcttccccatctttgacacagctc

SEQ ID NO: 128914 - DNA, 33 bp, Homo sapien
agtcctgcttcttccctatctttgacacagctc

SEQ ID NO: 128915 - DNA, 33 bp, Homo sapien
agttgtaggtgagcaacgataaggcgggaggtg

SEQ ID NO: 128916 - DNA, 33 bp, Homo sapien
agttgtaggtgagcaatgataaggcgggaggtg

SEQ ID NO: 128917 - DNA, 33 bp, Homo sapien
ctcagcaggttcagggcagagccatatccagat

SEQ ID NO: 128918 - DNA, 33 bp, Homo sapien
ctcagcaggttcagggtagagccatatccagat

SEQ ID NO: 128919 - DNA, 33 bp, Homo sapien
tttttcctagtttagaccaggacctctggaagt

SEQ ID NO: 128920 - DNA, 33 bp, Homo sapien
tttttcctagtttagatcaggacctctggaagt

SEQ ID NO: 128921 - DNA, 33 bp, Homo sapien
cattaaacttacaacaatcttttggcaaatttc

SEQ ID NO: 128922 - DNA, 33 bp, Homo sapien
cattaaacttacaacagtcttttggcaaatttc

SEQ ID NO: 128923 - DNA, 33 bp, Homo sapien
atgtaagagcaagtcaaaatttcacaatgtaaa

SEQ ID NO: 128924 - DNA, 33 bp, Homo sapien
atgtaagagcaagtcagaatttcacaatgtaaa

SEQ ID NO: 128925 - DNA, 33 bp, Homo sapien
ttagttatgagcaaatgacctggtgagcacacc

SEQ ID NO: 128926 - DNA, 33 bp, Homo sapien
ttagttatgagcaaattacctggtgagcacacc

SEQ ID NO: 128927 - DNA, 33 bp, Homo sapien
tttgcatactgtgttcacatattcatagcaatg

SEQ ID NO: 128928 - DNA, 33 bp, Homo sapien
tttgcatactgtgttcccatattcatagcaatg

SEQ ID NO: 128929 - DNA, 33 bp, Homo sapien
caatacctggaaaacaacgatgatgaaggcttt

SEQ ID NO: 128930 - DNA, 33 bp, Homo sapien
caatacctggaaaacagcgatgatgaaggcttt

SEQ ID NO: 128931 - DNA, 33 bp, Homo sapien
ctcctgtccctcggatgactttgcatcactttg

SEQ ID NO: 128932 - DNA, 33 bp, Homo sapien
ctcctgtccctcggattactttgcatcactttg

SEQ ID NO: 128933 - DNA, 33 bp, Homo sapien
tgactgcccacatccaaatgatttcaaggcttg

SEQ ID NO: 128934 - DNA, 33 bp, Homo sapien
tgactgcccacatccagatgatttcaaggcttg

SEQ ID NO: 128935 - DNA, 33 bp, Homo sapien
agtggcatgaagttgcacagaaatcatgtagca

SEQ ID NO: 128936 - DNA, 33 bp, Homo sapien
agtggcatgaagttgcgcagaaatcatgtagca

SEQ ID NO: 128937 - DNA, 33 bp, Homo sapien
accgtcttccggtcaccgcccgatattcaatca

SEQ ID NO: 128938 - DNA, 33 bp, Homo sapien
accgtcttccggtcactgcccgatattcaatca

SEQ ID NO: 128939 - DNA, 33 bp, Homo sapien
cagctcagtcccattgaagaaaaatgctagatg

SEQ ID NO: 128940 - DNA, 33 bp, Homo sapien
cagctcagtcccattggagaaaaatgctagatg

SEQ ID NO: 128941 - DNA, 33 bp, Homo sapien
tctagctttgaatttcacagctcagtcccattg

SEQ ID NO: 128942 - DNA, 33 bp, Homo sapien
tctagctttgaatttcgcagctcagtcccattg

SEQ ID NO: 128943 - DNA, 33 bp, Homo sapien
cggagcctgacctcacaggagctgtttcgagta

SEQ ID NO: 128944 - DNA, 33 bp, Homo sapien
cggagcctgacctcacgggagctgtttcgagta

SEQ ID NO: 128945 - DNA, 33 bp, Homo sapien
tcaaaattcacttaccaatattgatcagactct

SEQ ID NO: 128946 - DNA, 33 bp, Homo sapien
tcaaaattcacttaccgatattgatcagactct

SEQ ID NO: 128947 - DNA, 33 bp, Homo sapien
ggtggcaaacagggagcaagtcagagaggaagc

SEQ ID NO: 128948 - DNA, 33 bp, Homo sapien
ggtggcaaacagggagtaagtcagagaggaagc

SEQ ID NO: 128949 - DNA, 33 bp, Homo sapien
ttgtcacagttaggatgacaggttgacattcag

SEQ ID NO: 128950 - DNA, 33 bp, Homo sapien
ttgtcacagttaggattacaggttgacattcag

SEQ ID NO: 128951 - DNA, 33 bp, Homo sapien
accccatccatgtgaactcatttatacaagaga

SEQ ID NO: 128952 - DNA, 33 bp, Homo sapien
accccatccatgtgaattcatttatacaagaga

SEQ ID NO: 128953 - DNA, 33 bp, Homo sapien
cattccataattagcacctcattttatcctgaa

SEQ ID NO: 128954 - DNA, 33 bp, Homo sapien
cattccataattagcatctcattttatcctgaa

SEQ ID NO: 128955 - DNA, 33 bp, Homo sapien
ggatgaaaaagcacccaaagaggatccgtttgt

SEQ ID NO: 128956 - DNA, 33 bp, Homo sapien
ggatgaaaaagcacccgaagaggatccgtttgt

SEQ ID NO: 128957 - DNA, 33 bp, Homo sapien
gaatgtcattgcctggcattcaaggccattttg

SEQ ID NO: 128958 - DNA, 33 bp, Homo sapien
gaatgtcattgcctggtattcaaggccattttg

SEQ ID NO: 128959 - DNA, 33 bp, Homo sapien
tgcttcagctggatcaatcactgtcttaacttg

SEQ ID NO: 128960 - DNA, 33 bp, Homo sapien
tgcttcagctggatcattcactgtcttaacttg

SEQ ID NO: 128961 - DNA, 33 bp, Homo sapien
ggagggagtgtgttgacatcttaagagacgaat

SEQ ID NO: 128962 - DNA, 33 bp, Homo sapien
ggagggagtgtgttgagatcttaagagacgaat

SEQ ID NO: 128963 - DNA, 33 bp, Homo sapien
tccctatccactggtcaatttatcaaagtctgt

SEQ ID NO: 128964 - DNA, 33 bp, Homo sapien
tccctatccactggtccatttatcaaagtctgt

SEQ ID NO: 128965 - DNA, 33 bp, Homo sapien
tcacattggctccacactggggctcttacaaat

SEQ ID NO: 128966 - DNA, 33 bp, Homo sapien
tcacattggctccacattggggctcttacaaat

SEQ ID NO: 128967 - DNA, 33 bp, Homo sapien
taattacccatattcaagagaaggaagcaaatg

SEQ ID NO: 128968 - DNA, 33 bp, Homo sapien
taattacccatattcatgagaaggaagcaaatg

SEQ ID NO: 128969 - DNA, 33 bp, Homo sapien
cagaagagggagatacactagtcacttgtcttc

SEQ ID NO: 128970 - DNA, 33 bp, Homo sapien
cagaagagggagataccctagtcacttgtcttc

SEQ ID NO: 128971 - DNA, 33 bp, Homo sapien
ggcaagcagaagaaccaacagagcattgaaaag

SEQ ID NO: 128972 - DNA, 33 bp, Homo sapien
ggcaagcagaagaaccgacagagcattgaaaag

SEQ ID NO: 128973 - DNA, 33 bp, Homo sapien
ctccccgcgtggtcagaacatagttttcctccc

SEQ ID NO: 128974 - DNA, 33 bp, Homo sapien
ctccccgcgtggtcaggacatagttttcctccc

SEQ ID NO: 128975 - DNA, 33 bp, Homo sapien
aatcccacagtaaaaacggcagaatcaagtaag

SEQ ID NO: 128976 - DNA, 33 bp, Homo sapien
aatcccacagtaaaaatggcagaatcaagtaag

SEQ ID NO: 128977 - DNA, 33 bp, Homo sapien
acggatcggagtaaaccggctccctgaatgcac

SEQ ID NO: 128978 - DNA, 33 bp, Homo sapien
acggatcggagtaaactggctccctgaatgcac

SEQ ID NO: 128979 - DNA, 33 bp, Homo sapien
cctgctatagtgtgcacgtctttctgttattaa

SEQ ID NO: 128980 - DNA, 33 bp, Homo sapien
cctgctatagtgtgcatgtctttctgttattaa

SEQ ID NO: 128981 - DNA, 33 bp, Homo sapien
atagatgaatgtctaacataagagtcaattcaa

SEQ ID NO: 128982 - DNA, 33 bp, Homo sapien
atagatgaatgtctaatataagagtcaattcaa

SEQ ID NO: 128983 - DNA, 33 bp, Homo sapien
tcatttttgatcagacactggagctctggaggg

SEQ ID NO: 128984 - DNA, 33 bp, Homo sapien
tcatttttgatcagacgctggagctctggaggg

SEQ ID NO: 128985 - DNA, 33 bp, Homo sapien
caggggagcatctaaccggaaaagcatctaacc

SEQ ID NO: 128986 - DNA, 33 bp, Homo sapien
caggggagcatctaactggaaaagcatctaacc

SEQ ID NO: 128987 - DNA, 33 bp, Homo sapien
caagccatgaaaatttaaaaggactagaatgaa

SEQ ID NO: 128988 - DNA, 33 bp, Homo sapien
caagccatgaaaattttaaaggactagaatgaa

SEQ ID NO: 128989 - DNA, 33 bp, Homo sapien
cccaaaaatacaaaaactgctgctagcctgctc

SEQ ID NO: 128990 - DNA, 33 bp, Homo sapien
cccaaaaatacaaaaattgctgctagcctgctc

SEQ ID NO: 128991 - DNA, 33 bp, Homo sapien
taccttctgcaccataaaccatagccccgagaa

SEQ ID NO: 128992 - DNA, 33 bp, Homo sapien
taccttctgcaccatacaccatagccccgagaa

SEQ ID NO: 128993 - DNA, 33 bp, Homo sapien
tgacaatggaccagataaaaagaaagtcaattt

SEQ ID NO: 128994 - DNA, 33 bp, Homo sapien
tgacaatggaccagatgaaaagaaagtcaattt

SEQ ID NO: 128995 - DNA, 33 bp, Homo sapien
aaaatgaacttttggcacatggcctgtttgtcg

SEQ ID NO: 128996 - DNA, 33 bp, Homo sapien
aaaatgaacttttggcgcatggcctgtttgtcg

SEQ ID NO: 128997 - DNA, 33 bp, Homo sapien
taatcagtaaccaacaggagacaaaagcccaag

SEQ ID NO: 128998 - DNA, 33 bp, Homo sapien
taatcagtaaccaacatgagacaaaagcccaag

SEQ ID NO: 128999 - DNA, 33 bp, Homo sapien
atgtactgagtgtctacatgtaccaagcaatag

SEQ ID NO: 129000 - DNA, 33 bp, Homo sapien
atgtactgagtgtctatatgtaccaagcaatag

SEQ ID NO: 129001 - DNA, 33 bp, Homo sapien
gtatgggttttgcagagtatagagctcaggagt

SEQ ID NO: 129002 - DNA, 33 bp, Homo sapien
gtatgggttttgcagattatagagctcaggagt

SEQ ID NO: 129003 - DNA, 33 bp, Homo sapien
tttccctcatttctccccactttcctgctcctg

SEQ ID NO: 129004 - DNA, 33 bp, Homo sapien
tttccctcatttctcctcactttcctgctcctg

SEQ ID NO: 129005 - DNA, 33 bp, Homo sapien
ctgcactactgtattcaagttatattccaagat

SEQ ID NO: 129006 - DNA, 33 bp, Homo sapien
ctgcactactgtattcgagttatattccaagat

SEQ ID NO: 129007 - DNA, 33 bp, Homo sapien
ctaatgaaaaagacaacggtgcatggaacacgg

SEQ ID NO: 129008 - DNA, 33 bp, Homo sapien
ctaatgaaaaagacaagggtgcatggaacacgg

SEQ ID NO: 129009 - DNA, 33 bp, Homo sapien
gaaattatatgttgtcaaaagaaaagttggagc

SEQ ID NO: 129010 - DNA, 33 bp, Homo sapien
gaaattatatgttgtcgaaagaaaagttggagc

SEQ ID NO: 129011 - DNA, 33 bp, Homo sapien
tataattttgccgggaaccattattggtctgta

SEQ ID NO: 129012 - DNA, 33 bp, Homo sapien
tataattttgccgggagccattattggtctgta

SEQ ID NO: 129013 - DNA, 33 bp, Homo sapien
gttctccaaacatccacagctagagaggggctt

SEQ ID NO: 129014 - DNA, 33 bp, Homo sapien
gttctccaaacatccagagctagagaggggctt

SEQ ID NO: 129015 - DNA, 33 bp, Homo sapien
ggaaaaaatatcctgaacataataaacacaaga

SEQ ID NO: 129016 - DNA, 33 bp, Homo sapien
ggaaaaaatatcctgaccataataaacacaaga

SEQ ID NO: 129017 - DNA, 33 bp, Homo sapien
agggatcccggacaggcatttttctaacttgag

SEQ ID NO: 129018 - DNA, 33 bp, Homo sapien
agggatcccggacaggtatttttctaacttgag

SEQ ID NO: 129019 - DNA, 33 bp, Homo sapien
ctgtgaagtaagtcggacccagatggtggagaa

SEQ ID NO: 129020 - DNA, 33 bp, Homo sapien
ctgtgaagtaagtcgggcccagatggtggagaa

SEQ ID NO: 129021 - DNA, 33 bp, Homo sapien
ggggtaactctgttacaaggagctatcttgtcc

SEQ ID NO: 129022 - DNA, 33 bp, Homo sapien
ggggtaactctgttacgaggagctatcttgtcc

SEQ ID NO: 129023 - DNA, 33 bp, Homo sapien
agtcatgtagacaaatcattatctgttgttcct

SEQ ID NO: 129024 - DNA, 33 bp, Homo sapien
agtcatgtagacaaatgattatctgttgttcct

SEQ ID NO: 129025 - DNA, 33 bp, Homo sapien
gggagccttccttcctgacctggttcgtgcctc

SEQ ID NO: 129026 - DNA, 33 bp, Homo sapien
gggagccttccttccttacctggttcgtgcctc

SEQ ID NO: 129027 - DNA, 33 bp, Homo sapien
tcagccctgtcagtaaatacctgagtcactttg

SEQ ID NO: 129028 - DNA, 33 bp, Homo sapien
tcagccctgtcagtaactacctgagtcactttg

SEQ ID NO: 129029 - DNA, 33 bp, Homo sapien
ctcagaaacttgtggaagaataaatcaacaaag

SEQ ID NO: 129030 - DNA, 33 bp, Homo sapien
ctcagaaacttgtggaggaataaatcaacaaag

SEQ ID NO: 129031 - DNA, 33 bp, Homo sapien
aaaacattcaaagcaccgatgaaaatccaagga

SEQ ID NO: 129032 - DNA, 33 bp, Homo sapien
aaaacattcaaagcactgatgaaaatccaagga

SEQ ID NO: 129033 - DNA, 33 bp, Homo sapien
gtaaatgcaaaactcaaaacacttttccatgga

SEQ ID NO: 129034 - DNA, 33 bp, Homo sapien
gtaaatgcaaaactcagaacacttttccatgga

SEQ ID NO: 129035 - DNA, 33 bp, Homo sapien
tctaccaacttgtccaatgaaaataaaataatt

SEQ ID NO: 129036 - DNA, 33 bp, Homo sapien
tctaccaacttgtccagtgaaaataaaataatt

SEQ ID NO: 129037 - DNA, 33 bp, Homo sapien
acgacaatggtgttaacagaataactgatgttc

SEQ ID NO: 129038 - DNA, 33 bp, Homo sapien
acgacaatggtgttaagagaataactgatgttc

SEQ ID NO: 129039 - DNA, 33 bp, Homo sapien
attcactgtgaataacacttcttctctggagga

SEQ ID NO: 129040 - DNA, 33 bp, Homo sapien
attcactgtgaataacccttcttctctggagga

SEQ ID NO: 129041 - DNA, 33 bp, Homo sapien
ttaggaagaagtaaaacaatcattcctgtattc

SEQ ID NO: 129042 - DNA, 33 bp, Homo sapien
ttaggaagaagtaaaataatcattcctgtattc

SEQ ID NO: 129043 - DNA, 33 bp, Homo sapien
cactgaggctagtacaaattgattcagtcttca

SEQ ID NO: 129044 - DNA, 33 bp, Homo sapien
cactgaggctagtacacattgattcagtcttca

SEQ ID NO: 129045 - DNA, 33 bp, Homo sapien
gcctgagcgtagccacagagatggtcaagtgaa

SEQ ID NO: 129046 - DNA, 33 bp, Homo sapien
gcctgagcgtagccacggagatggtcaagtgaa

SEQ ID NO: 129047 - DNA, 33 bp, Homo sapien
gttaatcactgacaacaaggaactctactagat

SEQ ID NO: 129048 - DNA, 33 bp, Homo sapien
gttaatcactgacaaccaggaactctactagat

SEQ ID NO: 129049 - DNA, 33 bp, Homo sapien
tccgaatctagtttgacggtacagcagggcggg

SEQ ID NO: 129050 - DNA, 33 bp, Homo sapien
tccgaatctagtttgatggtacagcagggcggg

SEQ ID NO: 129051 - DNA, 33 bp, Homo sapien
tgagaatttccttagaagtgactccaaagtgat

SEQ ID NO: 129052 - DNA, 33 bp, Homo sapien
tgagaatttccttagaggtgactccaaagtgat

SEQ ID NO: 129053 - DNA, 33 bp, Homo sapien
gggttgctgaatccagacattgcagatggattt

SEQ ID NO: 129054 - DNA, 33 bp, Homo sapien
gggttgctgaatccagccattgcagatggattt

SEQ ID NO: 129055 - DNA, 33 bp, Homo sapien
ctgaaatccaggcttccagacttttccttgcct

SEQ ID NO: 129056 - DNA, 33 bp, Homo sapien
ctgaaatccaggcttctagacttttccttgcct

SEQ ID NO: 129057 - DNA, 33 bp, Homo sapien
acagggaagtggattacaattcagtcttgggac

SEQ ID NO: 129058 - DNA, 33 bp, Homo sapien
acagggaagtggattataattcagtcttgggac

SEQ ID NO: 129059 - DNA, 33 bp, Homo sapien
cagtctggttcccaaactcttatcactgagcac

SEQ ID NO: 129060 - DNA, 33 bp, Homo sapien
cagtctggttcccaaattcttatcactgagcac

SEQ ID NO: 129061 - DNA, 33 bp, Homo sapien
acaccttacttttccaacttaggatctccaggc

SEQ ID NO: 129062 - DNA, 33 bp, Homo sapien
acaccttacttttccagcttaggatctccaggc

SEQ ID NO: 129063 - DNA, 33 bp, Homo sapien
tctgggtttgttaggacgcttttgactccatgt

SEQ ID NO: 129064 - DNA, 33 bp, Homo sapien
tctgggtttgttaggatgcttttgactccatgt

SEQ ID NO: 129065 - DNA, 33 bp, Homo sapien
atgacccagttctggccactgagatgagagggg

SEQ ID NO: 129066 - DNA, 33 bp, Homo sapien
atgacccagttctggctactgagatgagagggg

SEQ ID NO: 129067 - DNA, 33 bp, Homo sapien
acctttttaagacaccgcagagttgtgccatca

SEQ ID NO: 129068 - DNA, 33 bp, Homo sapien
acctttttaagacacctcagagttgtgccatca

SEQ ID NO: 129069 - DNA, 33 bp, Homo sapien
ataaattgattctagacagcattggaaaagaca

SEQ ID NO: 129070 - DNA, 33 bp, Homo sapien
ataaattgattctagatagcattggaaaagaca

SEQ ID NO: 129071 - DNA, 33 bp, Homo sapien
gagtaagtgaaatgtacaaacacaggaatctcc

SEQ ID NO: 129072 - DNA, 33 bp, Homo sapien
gagtaagtgaaatgtagaaacacaggaatctcc

SEQ ID NO: 129073 - DNA, 33 bp, Homo sapien
caagttacagaaagaaaactagagttcagtgaa

SEQ ID NO: 129074 - DNA, 33 bp, Homo sapien
caagttacagaaagaatactagagttcagtgaa

SEQ ID NO: 129075 - DNA, 33 bp, Homo sapien
ctcactttatgtcctaagaattgatgcttggac

SEQ ID NO: 129076 - DNA, 33 bp, Homo sapien
ctcactttatgtcctaggaattgatgcttggac

SEQ ID NO: 129077 - DNA, 33 bp, Homo sapien
tggctgttactgtttacgattctaaggaatggc

SEQ ID NO: 129078 - DNA, 33 bp, Homo sapien
tggctgttactgtttatgattctaaggaatggc

SEQ ID NO: 129079 - DNA, 33 bp, Homo sapien
cagtaaaataacttccagagatcctcttcctta

SEQ ID NO: 129080 - DNA, 33 bp, Homo sapien
cagtaaaataacttccggagatcctcttcctta

SEQ ID NO: 129081 - DNA, 33 bp, Homo sapien
ttaaaatctcattctcactaatagcagagttct

SEQ ID NO: 129082 - DNA, 33 bp, Homo sapien
ttaaaatctcattctccctaatagcagagttct

SEQ ID NO: 129083 - DNA, 33 bp, Homo sapien
cataactaccttaaggacacctcatttaagttt

SEQ ID NO: 129084 - DNA, 33 bp, Homo sapien
cataactaccttaagggcacctcatttaagttt

SEQ ID NO: 129085 - DNA, 33 bp, Homo sapien
gttacaatgtcttttccactagcacttctggca

SEQ ID NO: 129086 - DNA, 33 bp, Homo sapien
gttacaatgtcttttctactagcacttctggca

SEQ ID NO: 129087 - DNA, 33 bp, Homo sapien
actttcataaggaagacagaacaatgacactct

SEQ ID NO: 129088 - DNA, 33 bp, Homo sapien
actttcataaggaagagagaacaatgacactct

SEQ ID NO: 129089 - DNA, 33 bp, Homo sapien
ctctgaggatgttttaccagcacaagaatgatg

SEQ ID NO: 129090 - DNA, 33 bp, Homo sapien
ctctgaggatgttttatcagcacaagaatgatg

SEQ ID NO: 129091 - DNA, 33 bp, Homo sapien
catacaaaaatttcaaacatcactgctgtagat

SEQ ID NO: 129092 - DNA, 33 bp, Homo sapien
catacaaaaatttcaagcatcactgctgtagat

SEQ ID NO: 129093 - DNA, 33 bp, Homo sapien
cttggcaaagtccctaccggtagcaactatttt

SEQ ID NO: 129094 - DNA, 33 bp, Homo sapien
cttggcaaagtccctatcggtagcaactatttt

SEQ ID NO: 129095 - DNA, 33 bp, Homo sapien
ccgtttggcaatagcaatcttggctgatgtgca

SEQ ID NO: 129096 - DNA, 33 bp, Homo sapien
ccgtttggcaatagcagtcttggctgatgtgca

SEQ ID NO: 129097 - DNA, 33 bp, Homo sapien
gccctgtttttgtggcactgatattatagcagg

SEQ ID NO: 129098 - DNA, 33 bp, Homo sapien
gccctgtttttgtggcgctgatattatagcagg

SEQ ID NO: 129099 - DNA, 33 bp, Homo sapien
ctggttcaatagcatacagaccacatgactttg

SEQ ID NO: 129100 - DNA, 33 bp, Homo sapien
ctggttcaatagcatagagaccacatgactttg

SEQ ID NO: 129101 - DNA, 33 bp, Homo sapien
ctactggcatcctccaccattgaggctccagta

SEQ ID NO: 129102 - DNA, 33 bp, Homo sapien
ctactggcatcctccatcattgaggctccagta

SEQ ID NO: 129103 - DNA, 33 bp, Homo sapien
tggctcctgtagcctcaacaactgaactagtcc

SEQ ID NO: 129104 - DNA, 33 bp, Homo sapien
tggctcctgtagcctcgacaactgaactagtcc

SEQ ID NO: 129105 - DNA, 33 bp, Homo sapien
agggtacagggagtagcaatgtatatgtggcac

SEQ ID NO: 129106 - DNA, 33 bp, Homo sapien
agggtacagggagtaggaatgtatatgtggcac

SEQ ID NO: 129107 - DNA, 33 bp, Homo sapien
gacatctgaccacacaaaatataaaaacagcag

SEQ ID NO: 129108 - DNA, 33 bp, Homo sapien
gacatctgaccacacacaatataaaaacagcag

SEQ ID NO: 129109 - DNA, 33 bp, Homo sapien
gctcacaggcctgctgaagtgtcaagtctgctt

SEQ ID NO: 129110 - DNA, 33 bp, Homo sapien
gctcacaggcctgctggagtgtcaagtctgctt

SEQ ID NO: 129111 - DNA, 33 bp, Homo sapien
acatacacagacataaccaaatgttggaatgca

SEQ ID NO: 129112 - DNA, 33 bp, Homo sapien
acatacacagacataagcaaatgttggaatgca

SEQ ID NO: 129113 - DNA, 33 bp, Homo sapien
atctgtgtttttaccaatctggctgattcttcc

SEQ ID NO: 129114 - DNA, 33 bp, Homo sapien
atctgtgtttttaccagtctggctgattcttcc

SEQ ID NO: 129115 - DNA, 33 bp, Homo sapien
ggtttcagacatcagaaggaaaggacagtttag

SEQ ID NO: 129116 - DNA, 33 bp, Homo sapien
ggtttcagacatcagacggaaaggacagtttag

SEQ ID NO: 129117 - DNA, 33 bp, Homo sapien
ctggtatgaacattgacgtacaggattttgtgt

SEQ ID NO: 129118 - DNA, 33 bp, Homo sapien
ctggtatgaacattgatgtacaggattttgtgt

SEQ ID NO: 129119 - DNA, 33 bp, Homo sapien
cagccaaaaaatgagaacaacccagatgtcctt

SEQ ID NO: 129120 - DNA, 33 bp, Homo sapien
cagccaaaaaatgagagcaacccagatgtcctt

SEQ ID NO: 129121 - DNA, 33 bp, Homo sapien
ttagctggccgcacgccgactctcaggggcctg

SEQ ID NO: 129122 - DNA, 33 bp, Homo sapien
ttagctggccgcacgctgactctcaggggcctg

SEQ ID NO: 129123 - DNA, 33 bp, Homo sapien
ctggccatccttgtaacgtatgtggttctttca

SEQ ID NO: 129124 - DNA, 33 bp, Homo sapien
ctggccatccttgtaatgtatgtggttctttca

SEQ ID NO: 129125 - DNA, 33 bp, Homo sapien
tgtttttgtagctgcactcagactatcaactag

SEQ ID NO: 129126 - DNA, 33 bp, Homo sapien
tgtttttgtagctgcattcagactatcaactag

SEQ ID NO: 129127 - DNA, 33 bp, Homo sapien
cataatctaacccttacgtatcatcttctttga

SEQ ID NO: 129128 - DNA, 33 bp, Homo sapien
cataatctaacccttaggtatcatcttctttga

SEQ ID NO: 129129 - DNA, 33 bp, Homo sapien
gccatcagagagcctcaaaagtttccagaatag

SEQ ID NO: 129130 - DNA, 33 bp, Homo sapien
gccatcagagagcctcgaaagtttccagaatag

SEQ ID NO: 129131 - DNA, 33 bp, Homo sapien
gagatgaggggacaacaagctgcaaagaagagc

SEQ ID NO: 129132 - DNA, 33 bp, Homo sapien
gagatgaggggacaaccagctgcaaagaagagc

SEQ ID NO: 129133 - DNA, 33 bp, Homo sapien
gatgctgtccatgactaagatctactgcagacc

SEQ ID NO: 129134 - DNA, 33 bp, Homo sapien
gatgctgtccatgactgagatctactgcagacc

SEQ ID NO: 129135 - DNA, 33 bp, Homo sapien; identical to SEQ ID NO: 129133

SEQ ID NO: 129136 - DNA, 33 bp, Homo sapien; identical to SEQ ID NO: 129134

SEQ ID NO: 129137 - DNA, 33 bp, Homo sapien
tttatgcatggagcaaattccatcttaatccac

SEQ ID NO: 129138 - DNA, 33 bp, Homo sapien
tttatgcatggagcaagttccatcttaatccac

SEQ ID NO: 129139 - DNA, 33 bp, Homo sapien
ttagatttccctgtggaacttaacatcagatgt

SEQ ID NO: 129140 - DNA, 33 bp, Homo sapien
ttagatttccctgtgggacttaacatcagatgt

SEQ ID NO: 129141 - DNA, 33 bp, Homo sapien
agggaaatctaaggaaaccttgatattgctgcc

SEQ ID NO: 129142 - DNA, 33 bp, Homo sapien
agggaaatctaaggaatccttgatattgctgcc

SEQ ID NO: 129143 - DNA, 33 bp, Homo sapien
cctgtaaagcaaagacaaatttttgtgttttat

SEQ ID NO: 129144 - DNA, 33 bp, Homo sapien
cctgtaaagcaaagaccaatttttgtgttttat

SEQ ID NO: 129145 - DNA, 33 bp, Homo sapien
tttctctccctgatgaaatgtaaagagaatgag

SEQ ID NO: 129146 - DNA, 33 bp, Homo sapien
tttctctccctgatgacatgtaaagagaatgag

SEQ ID NO: 129147 - DNA, 33 bp, Homo sapien
tctctgttactttgcacggtgccacatggtata

SEQ ID NO: 129148 - DNA, 33 bp, Homo sapien
tctctgttactttgcatggtgccacatggtata

SEQ ID NO: 129149 - DNA, 33 bp, Homo sapien
aaaaaacttcctgcacaaagacatttattggaa

SEQ ID NO: 129150 - DNA, 33 bp, Homo sapien
aaaaaacttcctgcacgaagacatttattggaa

SEQ ID NO: 129151 - DNA, 33 bp, Homo sapien
acatatcatacgattcaccaacttaaagtcgac

SEQ ID NO: 129152 - DNA, 33 bp, Homo sapien
acatatcatacgattcgccaacttaaagtcgac

SEQ ID NO: 129153 - DNA, 33 bp, Homo sapien
gtaggtttggcctaaacagaatgtctagcatcc

SEQ ID NO: 129154 - DNA, 33 bp, Homo sapien
gtaggtttggcctaaatagaatgtctagcatcc

SEQ ID NO: 129155 - DNA, 33 bp, Homo sapien
gtgcagaataaagtagacagaaccaggcctctt

SEQ ID NO: 129156 - DNA, 33 bp, Homo sapien
gtgcagaataaagtaggcagaaccaggcctctt

SEQ ID NO: 129157 - DNA, 33 bp, Homo sapien
ctaacatttttggaacactttggaccatgttct

SEQ ID NO: 129158 - DNA, 33 bp, Homo sapien
ctaacatttttggaacgctttggaccatgttct

SEQ ID NO: 129159 - DNA, 33 bp, Homo sapien
taagttatagacacacacttaaagtgagacttt

SEQ ID NO: 129160 - DNA, 33 bp, Homo sapien
taagttatagacacacccttaaagtgagacttt

SEQ ID NO: 129161 - DNA, 33 bp, Homo sapien
caggatgaaatcaataaggcaagggggaaaatt

SEQ ID NO: 129162 - DNA, 33 bp, Homo sapien
caggatgaaatcaatacggcaagggggaaaatt

SEQ ID NO: 129163 - DNA, 33 bp, Homo sapien
gtctcactaaaagctacgtattgttagcaaatc

SEQ ID NO: 129164 - DNA, 33 bp, Homo sapien
gtctcactaaaagctatgtattgttagcaaatc

SEQ ID NO: 129165 - DNA, 33 bp, Homo sapien
gattgtctgtctgtataaaaccgggctacctat

SEQ ID NO: 129166 - DNA, 33 bp, Homo sapien
gattgtctgtctgtatgaaaccgggctacctat

SEQ ID NO: 129167 - DNA, 33 bp, Homo sapien
ggttgtggagaaaaaacaacgcttatacacaat

SEQ ID NO: 129168 - DNA, 33 bp, Homo sapien
ggttgtggagaaaaaagaacgcttatacacaat

SEQ ID NO: 129169 - DNA, 33 bp, Homo sapien
aaaggtaggagaactcaaagtgagggctaccag

SEQ ID NO: 129170 - DNA, 33 bp, Homo sapien
aaaggtaggagaactccaagtgagggctaccag

SEQ ID NO: 129171 - DNA, 33 bp, Homo sapien
agaagcacaagagactcaaaggagaccactgtg

SEQ ID NO: 129172 - DNA, 33 bp, Homo sapien
agaagcacaagagacttaaaggagaccactgtg

SEQ ID NO: 129173 - DNA, 33 bp, Homo sapien
taaagtggcaatgtccaatagaactttctacag

SEQ ID NO: 129174 - DNA, 33 bp, Homo sapien
taaagtggcaatgtcccatagaactttctacag

SEQ ID NO: 129175 - DNA, 33 bp, Homo sapien
gggataatgtgaaagacacttgggttgaccaga

SEQ ID NO: 129176 - DNA, 33 bp, Homo sapien
gggataatgtgaaagatacttgggttgaccaga

SEQ ID NO: 129177 - DNA, 33 bp, Homo sapien
aagacatgagttatcaatcactgagtgtctgca

SEQ ID NO: 129178 - DNA, 33 bp, Homo sapien
aagacatgagttatcagtcactgagtgtctgca

SEQ ID NO: 129179 - DNA, 33 bp, Homo sapien
aaaccaagttctgcccaacttcaagtctgcatc

SEQ ID NO: 129180 - DNA, 33 bp, Homo sapien
aaaccaagttctgcccgacttcaagtctgcatc

SEQ ID NO: 129181 - DNA, 33 bp, Homo sapien
agaaaagaggggcttcaaagacatagctcagac

SEQ ID NO: 129182 - DNA, 33 bp, Homo sapien
agaaaagaggggcttcgaagacatagctcagac

SEQ ID NO: 129183 - DNA, 33 bp, Homo sapien
caccctgcttttcatactatctattggagtcag

SEQ ID NO: 129184 - DNA, 33 bp, Homo sapien
caccctgcttttcatagtatctattggagtcag

SEQ ID NO: 129185 - DNA, 33 bp, Homo sapien
tgcaaagccaaagcagaaaagatgtttaaggtt

SEQ ID NO: 129186 - DNA, 33 bp, Homo sapien
tgcaaagccaaagcaggaaagatgtttaaggtt

SEQ ID NO: 129187 - DNA, 33 bp, Homo sapien
ccccagtttctggaagaataagtccataactag

SEQ ID NO: 129188 - DNA, 33 bp, Homo sapien
ccccagtttctggaaggataagtccataactag

SEQ ID NO: 129189 - DNA, 33 bp, Homo sapien
agagttcctttccacacctttattaagttttta

SEQ ID NO: 129190 - DNA, 33 bp, Homo sapien
agagttcctttccacagctttattaagttttta

SEQ ID NO: 129191 - DNA, 33 bp, Homo sapien
ttctttggtgagataaacagattatattttaca

SEQ ID NO: 129192 - DNA, 33 bp, Homo sapien
ttctttggtgagataagcagattatattttaca

SEQ ID NO: 129193 - DNA, 33 bp, Homo sapien
aataagtcttaacagccagacctgaaaggatca

SEQ ID NO: 129194 - DNA, 33 bp, Homo sapien
aataagtcttaacagcgagacctgaaaggatca

SEQ ID NO: 129195 - DNA, 33 bp, Homo sapien
taccgggcctagtagaaaatgggctcaaaggaa

SEQ ID NO: 129196 - DNA, 33 bp, Homo sapien
taccgggcctagtagagaatgggctcaaaggaa

SEQ ID NO: 129197 - DNA, 33 bp, Homo sapien
ccaattagacaataagcctggcatcttactgag

SEQ ID NO: 129198 - DNA, 33 bp, Homo sapien
ccaattagacaataaggctggcatcttactgag

SEQ ID NO: 129199 - DNA, 33 bp, Homo sapien
attatctgggttgttaccaagtatgacagagac

SEQ ID NO: 129200 - DNA, 33 bp, Homo sapien
attatctgggttgttatcaagtatgacagagac

SEQ ID NO: 129201 - DNA, 33 bp, Homo sapien
gatagaccccggcggcgaacagacttggcgcac

SEQ ID NO: 129202 - DNA, 33 bp, Homo sapien
gatagaccccggcggctaacagacttggcgcac

SEQ ID NO: 129203 - DNA, 33 bp, Homo sapien
gtcatgagaatcttcacgtttaaccacagtatt

SEQ ID NO: 129204 - DNA, 33 bp, Homo sapien
gtcatgagaatcttcatgtttaaccacagtatt

SEQ ID NO: 129205 - DNA, 33 bp, Homo sapien
ccctctatctctggataaagtgacttccagagg

SEQ ID NO: 129206 - DNA, 33 bp, Homo sapien
ccctctatctctggatgaagtgacttccagagg

SEQ ID NO: 129207 - DNA, 33 bp, Homo sapien
ttgtttcttatgtaccaaagaaaagcatttatg

SEQ ID NO: 129208 - DNA, 33 bp, Homo sapien
ttgtttcttatgtaccgaagaaaagcatttatg

SEQ ID NO: 129209 - DNA, 33 bp, Homo sapien
ggtatcaaaccagaacccaagtgaataactgtg

SEQ ID NO: 129210 - DNA, 33 bp, Homo sapien
ggtatcaaaccagaactcaagtgaataactgtg

SEQ ID NO: 129211 - DNA, 33 bp, Homo sapien
gaaacagtttttcttacacacactagttaatga

SEQ ID NO: 129212 - DNA, 33 bp, Homo sapien
gaaacagtttttcttatacacactagttaatga

SEQ ID NO: 129213 - DNA, 33 bp, Homo sapien
gaatttacatctgaaacggatacctccttctct

SEQ ID NO: 129214 - DNA, 33 bp, Homo sapien
gaatttacatctgaaatggatacctccttctct

SEQ ID NO: 129215 - DNA, 33 bp, Homo sapien
acttttcagtccttgaagggaaaatgagtgtga

SEQ ID NO: 129216 - DNA, 33 bp, Homo sapien
acttttcagtccttgaggggaaaatgagtgtga

SEQ ID NO: 129217 - DNA, 33 bp, Homo sapien
ggctatgttttccaacccagttttccaggagat

SEQ ID NO: 129218 - DNA, 33 bp, Homo sapien
ggctatgttttccaactcagttttccaggagat

SEQ ID NO: 129219 - DNA, 33 bp, Homo sapien
tgatgatcgaaattgggaacgggtaaagcttag

SEQ ID NO: 129220 - DNA, 33 bp, Homo sapien
tgatgatcgaaattggtaacgggtaaagcttag

SEQ ID NO: 129221 - DNA, 33 bp, Homo sapien
caactttttgcacttaagaagttaccccatcca

SEQ ID NO: 129222 - DNA, 33 bp, Homo sapien
caactttttgcacttaggaagttaccccatcca

SEQ ID NO: 129223 - DNA, 33 bp, Homo sapien
aacttctattgtttgacaaagcacattgtacta

SEQ ID NO: 129224 - DNA, 33 bp, Homo sapien
aacttctattgtttgagaaagcacattgtacta

SEQ ID NO: 129225 - DNA, 33 bp, Homo sapien
cccagaggaacattcaaggggagacaagtacaa

SEQ ID NO: 129226 - DNA, 33 bp, Homo sapien
cccagaggaacattcacggggagacaagtacaa

SEQ ID NO: 129227 - DNA, 33 bp, Homo sapien
cctttaaaaatgtaagactcacactggtagagt

SEQ ID NO: 129228 - DNA, 33 bp, Homo sapien
cctttaaaaatgtaagcctcacactggtagagt

SEQ ID NO: 129229 - DNA, 33 bp, Homo sapien
ttgctctcccaactaaagtcagtatcctattgg

SEQ ID NO: 129230 - DNA, 33 bp, Homo sapien
ttgctctcccaactaatgtcagtatcctattgg

SEQ ID NO: 129231 - DNA, 33 bp, Homo sapien
tcattctccttctgaaaaatttcacttcatact

SEQ ID NO: 129232 - DNA, 33 bp, Homo sapien
tcattctccttctgaagaatttcacttcatact

SEQ ID NO: 129233 - DNA, 33 bp, Homo sapien
atgacatagttatccagcttattgcctgaaaaa

SEQ ID NO: 129234 - DNA, 33 bp, Homo sapien
atgacatagttatccatcttattgcctgaaaaa

SEQ ID NO: 129235 - DNA, 33 bp, Homo sapien
caggacctcagtcagcgcaactaagtgtattcc

SEQ ID NO: 129236 - DNA, 33 bp, Homo sapien
caggacctcagtcagctcaactaagtgtattcc

SEQ ID NO: 129237 - DNA, 33 bp, Homo sapien
ttagaagccaacattaagcccagatgctaccac

SEQ ID NO: 129238 - DNA, 33 bp, Homo sapien
ttagaagccaacattaggcccagatgctaccac

SEQ ID NO: 129239 - DNA, 33 bp, Homo sapien
taacaagactacttacgatctctatacatatgg

SEQ ID NO: 129240 - DNA, 33 bp, Homo sapien
taacaagactacttactatctctatacatatgg

SEQ ID NO: 129241 - DNA, 33 bp, Homo sapien
tggttaactaaaccaacatcctggctctcaact

SEQ ID NO: 129242 - DNA, 33 bp, Homo sapien
tggttaactaaaccaatatcctggctctcaact

SEQ ID NO: 129243 - DNA, 33 bp, Homo sapien
cagactgccaaagaaaacttcattctttattca

SEQ ID NO: 129244 - DNA, 33 bp, Homo sapien
cagactgccaaagaaagcttcattctttattca

SEQ ID NO: 129245 - DNA, 33 bp, Homo sapien
aattcatcttgatgcgcattcaaattagacata

SEQ ID NO: 129246 - DNA, 33 bp, Homo sapien
aattcatcttgatgcgtattcaaattagacata

SEQ ID NO: 129247 - DNA, 33 bp, Homo sapien
ctgccaatacagggagaaaaactgatcaagggc

SEQ ID NO: 129248 - DNA, 33 bp, Homo sapien
ctgccaatacagggagcaaaactgatcaagggc

SEQ ID NO: 129249 - DNA, 33 bp, Homo sapien
cttgattgtggtgatagatgcataattctgtga

SEQ ID NO: 129250 - DNA, 33 bp, Homo sapien
cttgattgtggtgatatatgcataattctgtga

SEQ ID NO: 129251 - DNA, 33 bp, Homo sapien
ttaccttcaaagcttagcaggtaaaaccaataa

SEQ ID NO: 129252 - DNA, 33 bp, Homo sapien
ttaccttcaaagcttatcaggtaaaaccaataa

SEQ ID NO: 129253 - DNA, 33 bp, Homo sapien
caagagaaacaatgaaagtcagaggcaccataa

SEQ ID NO: 129254 - DNA, 33 bp, Homo sapien
caagagaaacaatgaacgtcagaggcaccataa

SEQ ID NO: 129255 - DNA, 33 bp, Homo sapien
ttatcaccagcaaacccacactaaaagatcaag

SEQ ID NO: 129256 - DNA, 33 bp, Homo sapien
ttatcaccagcaaacctacactaaaagatcaag

SEQ ID NO: 129257 - DNA, 33 bp, Homo sapien
agacataattgcataactgattcagatttactt

SEQ ID NO: 129258 - DNA, 33 bp, Homo sapien
agacataattgcataattgattcagatttactt

SEQ ID NO: 129259 - DNA, 33 bp, Homo sapien
gacaccatgtaacgaacagagtcaaaatgaacc

SEQ ID NO: 129260 - DNA, 33 bp, Homo sapien
gacaccatgtaacgaatagagtcaaaatgaacc

SEQ ID NO: 129261 - DNA, 33 bp, Homo sapien
atgtacttttcaattaccacagccacctaggaa

SEQ ID NO: 129262 - DNA, 33 bp, Homo sapien
atgtacttttcaattatcacagccacctaggaa

SEQ ID NO: 129263 - DNA, 33 bp, Homo sapien
gtatacacataagtataaccgtaaattaggaat

SEQ ID NO: 129264 - DNA, 33 bp, Homo sapien
gtatacacataagtatgaccgtaaattaggaat

SEQ ID NO: 129265 - DNA, 33 bp, Homo sapien
aagtgtcagaatattacaatgaaggtacatgat

SEQ ID NO: 129266 - DNA, 33 bp, Homo sapien
aagtgtcagaatattagaatgaaggtacatgat

SEQ ID NO: 129267 - DNA, 33 bp, Homo sapien
tccttcaggttagaacagacggaatctagtgaa

SEQ ID NO: 129268 - DNA, 33 bp, Homo sapien
tccttcaggttagaacggacggaatctagtgaa

SEQ ID NO: 129269 - DNA, 33 bp, Homo sapien
tgtgggcagagaattaccatgagtcgaattact

SEQ ID NO: 129270 - DNA, 33 bp, Homo sapien
tgtgggcagagaattatcatgagtcgaattact

SEQ ID NO: 129271 - DNA, 33 bp, Homo sapien
atggcactaaaattcacacagttccacaaccca

SEQ ID NO: 129272 - DNA, 33 bp, Homo sapien
atggcactaaaattcatacagttccacaaccca

SEQ ID NO: 129273 - DNA, 33 bp, Homo sapien
atgaacaacttaagcacagaaaaagaaatgtag

SEQ ID NO: 129274 - DNA, 33 bp, Homo sapien
atgaacaacttaagcatagaaaaagaaatgtag

SEQ ID NO: 129275 - DNA, 33 bp, Homo sapien
ctgcttgtaatcaaagccttcttacatactaca

SEQ ID NO: 129276 - DNA, 33 bp, Homo sapien
ctgcttgtaatcaaaggcttcttacatactaca

SEQ ID NO: 129277 - DNA, 33 bp, Homo sapien
acaaacctagatggtaaacctgttacacacttt

SEQ ID NO: 129278 - DNA, 33 bp, Homo sapien
acaaacctagatggtatacctgttacacacttt

SEQ ID NO: 129279 - DNA, 33 bp, Homo sapien
aaatccacttagccctcacttaagcttggtaac

SEQ ID NO: 129280 - DNA, 33 bp, Homo sapien
aaatccacttagcccttacttaagcttggtaac

SEQ ID NO: 129281 - DNA, 33 bp, Homo sapien
aaaaaatggcataacaataaggataaaagagac

SEQ ID NO: 129282 - DNA, 33 bp, Homo sapien
aaaaaatggcataacagtaaggataaaagagac

SEQ ID NO: 129283 - DNA, 33 bp, Homo sapien
ggaaaagcccttggcaaattagaacatacccat

SEQ ID NO: 129284 - DNA, 33 bp, Homo sapien
ggaaaagcccttggcagattagaacatacccat

SEQ ID NO: 129285 - DNA, 33 bp, Homo sapien
atataaaaatcttagcacttgagcgtacttacc

SEQ ID NO: 129286 - DNA, 33 bp, Homo sapien
atataaaaatcttagcgcttgagcgtacttacc

SEQ ID NO: 129287 - DNA, 33 bp, Homo sapien
actaaaagggaaaagccgcaaagttctgatgga

SEQ ID NO: 129288 - DNA, 33 bp, Homo sapien
actaaaagggaaaagctgcaaagttctgatgga

SEQ ID NO: 129289 - DNA, 33 bp, Homo sapien
gttcttaagactgaaaacaaatgatgtcgagaa

SEQ ID NO: 129290 - DNA, 33 bp, Homo sapien
gttcttaagactgaaagcaaatgatgtcgagaa

SEQ ID NO: 129291 - DNA, 33 bp, Homo sapien
ttattggtaaagctggcattagaattattgcaa

SEQ ID NO: 129292 - DNA, 33 bp, Homo sapien
ttattggtaaagctgggattagaattattgcaa

SEQ ID NO: 129293 - DNA, 33 bp, Homo sapien
ccacctctgcaagtggcattcttgatgagatta

SEQ ID NO: 129294 - DNA, 33 bp, Homo sapien
ccacctctgcaagtggtattcttgatgagatta

SEQ ID NO: 129295 - DNA, 33 bp, Homo sapien
gtacttgaagacaataaatttctggctttttaa

SEQ ID NO: 129296 - DNA, 33 bp, Homo sapien
gtacttgaagacaatacatttctggctttttaa

SEQ ID NO: 129297 - DNA, 33 bp, Homo sapien
tattgtcttcaagtaccggacactcaaagtcca

SEQ ID NO: 129298 - DNA, 33 bp, Homo sapien
tattgtcttcaagtactggacactcaaagtcca

SEQ ID NO: 129299 - DNA, 33 bp, Homo sapien
ttcagacagcagtgaaatgataaagcagctaat

SEQ ID NO: 129300 - DNA, 33 bp, Homo sapien
ttcagacagcagtgaagtgataaagcagctaat

SEQ ID NO: 129301 - DNA, 33 bp, Homo sapien
tctagaggactctcttaaactgggaaccatagc

SEQ ID NO: 129302 - DNA, 33 bp, Homo sapien
tctagaggactctcttgaactgggaaccatagc

SEQ ID NO: 129303 - DNA, 33 bp, Homo sapien
tccaccaaaggactgacggaacacactaatata

SEQ ID NO: 129304 - DNA, 33 bp, Homo sapien
tccaccaaaggactgagggaacacactaatata

SEQ ID NO: 129305 - DNA, 33 bp, Homo sapien
tttcctttgatcaaacacaaggattataccgtt

SEQ ID NO: 129306 - DNA, 33 bp, Homo sapien
tttcctttgatcaaacgcaaggattataccgtt

SEQ ID NO: 129307 - DNA, 33 bp, Homo sapien
ccaggggtccttggacaacacttttggaaccat

SEQ ID NO: 129308 - DNA, 33 bp, Homo sapien
ccaggggtccttggaccacacttttggaaccat

SEQ ID NO: 129309 - DNA, 33 bp, Homo sapien
aagacctcttgaaccacctgaaaggattttcga

SEQ ID NO: 129310 - DNA, 33 bp, Homo sapien
aagacctcttgaaccatctgaaaggattttcga

SEQ ID NO: 129311 - DNA, 33 bp, Homo sapien
tggtggaactacatgaagaaaattgggtttcat

SEQ ID NO: 129312 - DNA, 33 bp, Homo sapien
tggtggaactacatgaggaaaattgggtttcat

SEQ ID NO: 129313 - DNA, 33 bp, Homo sapien
tgggcttcaacataaagttcttacacttcaggt

SEQ ID NO: 129314 - DNA, 33 bp, Homo sapien
tgggcttcaacataaatttcttacacttcaggt

SEQ ID NO: 129315 - DNA, 33 bp, Homo sapien
catgtaccaagtcctcaataatccttggtaatg

SEQ ID NO: 129316 - DNA, 33 bp, Homo sapien
catgtaccaagtcctcgataatccttggtaatg

SEQ ID NO: 129317 - DNA, 33 bp, Homo sapien
gctcagtccttgtcgcggaggagagagccaaga

SEQ ID NO: 129318 - DNA, 33 bp, Homo sapien
gctcagtccttgtcgctgaggagagagccaaga

SEQ ID NO: 129319 - DNA, 33 bp, Homo sapien
gagaatttgcaaagaacgggagacacccttatt

SEQ ID NO: 129320 - DNA, 33 bp, Homo sapien
gagaatttgcaaagaatgggagacacccttatt

SEQ ID NO: 129321 - DNA, 33 bp, Homo sapien
atggaaggtactagaacgtggtggataaaagta

SEQ ID NO: 129322 - DNA, 33 bp, Homo sapien
atggaaggtactagaatgtggtggataaaagta

SEQ ID NO: 129323 - DNA, 33 bp, Homo sapien
taatcaaaatgactccggctaagtaatagggta

SEQ ID NO: 129324 - DNA, 33 bp, Homo sapien
taatcaaaatgactcctgctaagtaatagggta

SEQ ID NO: 129325 - DNA, 33 bp, Homo sapien
aaagaaggtggaggaaagaaagcaaggtggcga

SEQ ID NO: 129326 - DNA, 33 bp, Homo sapien
aaagaaggtggaggaacgaaagcaaggtggcga

SEQ ID NO: 129327 - DNA, 33 bp, Homo sapien
tgactgaaactttctagaccttggtcctggagg

SEQ ID NO: 129328 - DNA, 33 bp, Homo sapien
tgactgaaactttctataccttggtcctggagg

SEQ ID NO: 129329 - DNA, 33 bp, Homo sapien
tgggaggccttttgaaaatcttatttctgaatt

SEQ ID NO: 129330 - DNA, 33 bp, Homo sapien
tgggaggccttttgaagatcttatttctgaatt

SEQ ID NO: 129331 - DNA, 33 bp, Homo sapien
actggtgaaagtagtgcattagccatctaacta

SEQ ID NO: 129332 - DNA, 33 bp, Homo sapien
actggtgaaagtagtgtattagccatctaacta

SEQ ID NO: 129333 - DNA, 33 bp, Homo sapien
caatgctcaagatgacagtaacattactaaagc

SEQ ID NO: 129334 - DNA, 33 bp, Homo sapien
caatgctcaagatgacggtaacattactaaagc

SEQ ID NO: 129335 - DNA, 33 bp, Homo sapien
atagtccagaagggaaaatagattattgtatta

SEQ ID NO: 129336 - DNA, 33 bp, Homo sapien
atagtccagaagggaagatagattattgtatta

SEQ ID NO: 129337 - DNA, 33 bp, Homo sapien
tatcttaccttcttatcaacacttaccttacca

SEQ ID NO: 129338 - DNA, 33 bp, Homo sapien
tatcttaccttcttatgaacacttaccttacca

SEQ ID NO: 129339 - DNA, 33 bp, Homo sapien
catgagaaaataaggaccatgaagtgttggggg

SEQ ID NO: 129340 - DNA, 33 bp, Homo sapien
catgagaaaataaggagcatgaagtgttggggg

SEQ ID NO: 129341 - DNA, 33 bp, Homo sapien
ggcagaatgtatgaaacagaggctgttataaaa

SEQ ID NO: 129342 - DNA, 33 bp, Homo sapien
ggcagaatgtatgaaatagaggctgttataaaa

SEQ ID NO: 129343 - DNA, 33 bp, Homo sapien
agagtttttgatgtacaaggagttttgagatgc

SEQ ID NO: 129344 - DNA, 33 bp, Homo sapien
agagtttttgatgtacgaggagttttgagatgc

SEQ ID NO: 129345 - DNA, 33 bp, Homo sapien
attgctcaaacgtaaaatgggaacttaggctgc

SEQ ID NO: 129346 - DNA, 33 bp, Homo sapien
attgctcaaacgtaaattgggaacttaggctgc

SEQ ID NO: 129347 - DNA, 33 bp, Homo sapien
tcagaatttgtgtgaacgagatacagagagaga

SEQ ID NO: 129348 - DNA, 33 bp, Homo sapien
tcagaatttgtgtgaatgagatacagagagaga

SEQ ID NO: 129349 - DNA, 33 bp, Homo sapien
ctttgttacaactgccaaacttctgtgatctgg

SEQ ID NO: 129350 - DNA, 33 bp, Homo sapien
ctttgttacaactgccgaacttctgtgatctgg

SEQ ID NO: 129351 - DNA, 33 bp, Homo sapien
ctcatgtaacaaaataaaatgaagaacaaagct

SEQ ID NO: 129352 - DNA, 33 bp, Homo sapien
ctcatgtaacaaaatagaatgaagaacaaagct

SEQ ID NO: 129353 - DNA, 33 bp, Homo sapien
acggttaataagtggagagtaagaaacagccct

SEQ ID NO: 129354 - DNA, 33 bp, Homo sapien
acggttaataagtggatagtaagaaacagccct

SEQ ID NO: 129355 - DNA, 33 bp, Homo sapien
ggagtagggatgattccactaataccctgtgtc

SEQ ID NO: 129356 - DNA, 33 bp, Homo sapien
ggagtagggatgattctactaataccctgtgtc

SEQ ID NO: 129357 - DNA, 33 bp, Homo sapien
gatggcaaggaaatgacgctatacctgccttaa

SEQ ID NO: 129358 - DNA, 33 bp, Homo sapien
gatggcaaggaaatgatgctatacctgccttaa

SEQ ID NO: 129359 - DNA, 33 bp, Homo sapien
cactgcaaataactataagaatcacatacaaac

SEQ ID NO: 129360 - DNA, 33 bp, Homo sapien
cactgcaaataactatgagaatcacatacaaac

SEQ ID NO: 129361 - DNA, 33 bp, Homo sapien
atcctgtgctggtttccagtatacttcttgaga

SEQ ID NO: 129362 - DNA, 33 bp, Homo sapien
atcctgtgctggtttctagtatacttcttgaga

SEQ ID NO: 129363 - DNA, 33 bp, Homo sapien
cactgaatgactgcaccagttcccagaaaaatt

SEQ ID NO: 129364 - DNA, 33 bp, Homo sapien
cactgaatgactgcactagttcccagaaaaatt

SEQ ID NO: 129365 - DNA, 33 bp, Homo sapien
gtgaaatgaatagcaaatagagactgatcataa

SEQ ID NO: 129366 - DNA, 33 bp, Homo sapien
gtgaaatgaatagcaagtagagactgatcataa

SEQ ID NO: 129367 - DNA, 33 bp, Homo sapien
aaaatggtgccttaggaaaattaatcaggcaat

SEQ ID NO: 129368 - DNA, 33 bp, Homo sapien
aaaatggtgccttagggaaattaatcaggcaat

SEQ ID NO: 129369 - DNA, 33 bp, Homo sapien
ggacaaatttgaatagaacagttgggattttat

SEQ ID NO: 129370 - DNA, 33 bp, Homo sapien
ggacaaatttgaataggacagttgggattttat

SEQ ID NO: 129371 - DNA, 33 bp, Homo sapien
taataaacattttggaataaagactagaagtca

SEQ ID NO: 129372 - DNA, 33 bp, Homo sapien
taataaacattttggagtaaagactagaagtca

SEQ ID NO: 129373 - DNA, 33 bp, Homo sapien
tatatgttgggtgcctaacaagtacaagaaatt

SEQ ID NO: 129374 - DNA, 33 bp, Homo sapien
tatatgttgggtgcctgacaagtacaagaaatt

SEQ ID NO: 129375 - DNA, 33 bp, Homo sapien
aatatcttgtatcttccattcgtttcaaggtgt

SEQ ID NO: 129376 - DNA, 33 bp, Homo sapien
aatatcttgtatcttctattcgtttcaaggtgt

SEQ ID NO: 129377 - DNA, 33 bp, Homo sapien
tcactggtattgaaaacattaccaacaaaaatt

SEQ ID NO: 129378 - DNA, 33 bp, Homo sapien
tcactggtattgaaaagattaccaacaaaaatt

SEQ ID NO: 129379 - DNA, 33 bp, Homo sapien
atctgtggtgggcgagaatgactagccagctta

SEQ ID NO: 129380 - DNA, 33 bp, Homo sapien
atctgtggtgggcgaggatgactagccagctta

SEQ ID NO: 129381 - DNA, 33 bp, Homo sapien
cagtgaagagcttacacagaagttagaaaaaca

SEQ ID NO: 129382 - DNA, 33 bp, Homo sapien
cagtgaagagcttacatagaagttagaaaaaca

SEQ ID NO: 129383 - DNA, 33 bp, Homo sapien
caggatattaaaatcaatcgggagagaggggac

SEQ ID NO: 129384 - DNA, 33 bp, Homo sapien
caggatattaaaatcagtcgggagagaggggac

SEQ ID NO: 129385 - DNA, 33 bp, Homo sapien
cacctagcaccactaaagacaggtttctgtctc

SEQ ID NO: 129386 - DNA, 33 bp, Homo sapien
cacctagcaccactaaggacaggtttctgtctc

SEQ ID NO: 129387 - DNA, 33 bp, Homo sapien
cagaatcaccaatggaacttgtcaaaatgcata

SEQ ID NO: 129388 - DNA, 33 bp, Homo sapien
cagaatcaccaatggagcttgtcaaaatgcata

SEQ ID NO: 129389 - DNA, 33 bp, Homo sapien
taagacagttgcttaaaccatgtaagcatagct

SEQ ID NO: 129390 - DNA, 33 bp, Homo sapien
taagacagttgcttaatccatgtaagcatagct

SEQ ID NO: 129391 - DNA, 33 bp, Homo sapien
tttaagaagatgtgcacctatcaggaatgaaca

SEQ ID NO: 129392 - DNA, 33 bp, Homo sapien
tttaagaagatgtgcagctatcaggaatgaaca

SEQ ID NO: 129393 - DNA, 33 bp, Homo sapien
aaccttctatgttgcaaatcttaagcatagggc

SEQ ID NO: 129394 - DNA, 33 bp, Homo sapien
aaccttctatgttgcacatcttaagcatagggc

SEQ ID NO: 129395 - DNA, 33 bp, Homo sapien
attcctaacagtaaacagtcacttggtgggtaa

SEQ ID NO: 129396 - DNA, 33 bp, Homo sapien
attcctaacagtaaactgtcacttggtgggtaa

SEQ ID NO: 129397 - DNA, 33 bp, Homo sapien
agacagtgtcccttcacattatactgatgacca

SEQ ID NO: 129398 - DNA, 33 bp, Homo sapien
agacagtgtcccttcatattatactgatgacca

SEQ ID NO: 129399 - DNA, 33 bp, Homo sapien
gaaaagaaaaaatataccataaatgcaacttgt

SEQ ID NO: 129400 - DNA, 33 bp, Homo sapien
gaaaagaaaaaatatatcataaatgcaacttgt

SEQ ID NO: 129401 - DNA, 33 bp, Homo sapien
aaagaataggaaaaaaatgttgacaacactttc

SEQ ID NO: 129402 - DNA, 33 bp, Homo sapien
aaagaataggaaaaaattgttgacaacactttc

SEQ ID NO: 129403 - DNA, 33 bp, Homo sapien
gtctttccttcagcacaatggcagggagaatac

SEQ ID NO: 129404 - DNA, 33 bp, Homo sapien
gtctttccttcagcacgatggcagggagaatac

SEQ ID NO: 129405 - DNA, 33 bp, Homo sapien
tgtctagtttcattaaacctctccagtatttta

SEQ ID NO: 129406 - DNA, 33 bp, Homo sapien
tgtctagtttcattaatcctctccagtatttta

SEQ ID NO: 129407 - DNA, 33 bp, Homo sapien
gagggcaaaggttatacgacttcacaatctttc

SEQ ID NO: 129408 - DNA, 33 bp, Homo sapien
gagggcaaaggttatatgacttcacaatctttc

SEQ ID NO: 129409 - DNA, 33 bp, Homo sapien
gtttcttacaagttccaaattccaaatacagag

SEQ ID NO: 129410 - DNA, 33 bp, Homo sapien
gtttcttacaagttccgaattccaaatacagag

SEQ ID NO: 129411 - DNA, 33 bp, Homo sapien
tgcttgcctgataaaacagctaatcaccagcat

SEQ ID NO: 129412 - DNA, 33 bp, Homo sapien
tgcttgcctgataaaatagctaatcaccagcat

SEQ ID NO: 129413 - DNA, 33 bp, Homo sapien
agccttgcttgttttcaagtatgtgatgaaaca

SEQ ID NO: 129414 - DNA, 33 bp, Homo sapien
agccttgcttgttttcgagtatgtgatgaaaca

SEQ ID NO: 129415 - DNA, 33 bp, Homo sapien
tactctcttggttaacagctcatttctctgaga

SEQ ID NO: 129416 - DNA, 33 bp, Homo sapien
tactctcttggttaacggctcatttctctgaga

SEQ ID NO: 129417 - DNA, 33 bp, Homo sapien
agctgtgcgtgaaagacgagaagagggcagaca

SEQ ID NO: 129418 - DNA, 33 bp, Homo sapien
agctgtgcgtgaaagatgagaagagggcagaca

SEQ ID NO: 129419 - DNA, 33 bp, Homo sapien
tattacctgcctaagccaatagcatctccattt

SEQ ID NO: 129420 - DNA, 33 bp, Homo sapien
tattacctgcctaagctaatagcatctccattt

SEQ ID NO: 129421 - DNA, 33 bp, Homo sapien
cctggaaggacacctccgaaagaccgtctggga

SEQ ID NO: 129422 - DNA, 33 bp, Homo sapien
cctggaaggacacctctgaaagaccgtctggga

SEQ ID NO: 129423 - DNA, 33 bp, Homo sapien
tggatggtcttccctgcaacaaccggtcagctt

SEQ ID NO: 129424 - DNA, 33 bp, Homo sapien
tggatggtcttccctgtaacaaccggtcagctt

SEQ ID NO: 129425 - DNA, 33 bp, Homo sapien
acaaccggtcagcttaaaaaactggaccattct

SEQ ID NO: 129426 - DNA, 33 bp, Homo sapien
acaaccggtcagcttataaaactggaccattct

SEQ ID NO: 129427 - DNA, 33 bp, Homo sapien
aagtgttaaagattagaattgaagtcactgacc

SEQ ID NO: 129428 - DNA, 33 bp, Homo sapien
aagtgttaaagattaggattgaagtcactgacc

SEQ ID NO: 129429 - DNA, 33 bp, Homo sapien
taggcccactaaagaaatcaataatgagaacat

SEQ ID NO: 129430 - DNA, 33 bp, Homo sapien
taggcccactaaagaagtcaataatgagaacat

SEQ ID NO: 129431 - DNA, 33 bp, Homo sapien
aaacctcagaccctaaatgactggtttttgcat

SEQ ID NO: 129432 - DNA, 33 bp, Homo sapien
aaacctcagaccctaattgactggtttttgcat

SEQ ID NO: 129433 - DNA, 33 bp, Homo sapien
atgttggaaataataacagctcttccttcacag

SEQ ID NO: 129434 - DNA, 33 bp, Homo sapien
atgttggaaataataatagctcttccttcacag

SEQ ID NO: 129435 - DNA, 33 bp, Homo sapien
ctctcaccaataaacaacctgcaagtccctgcg

SEQ ID NO: 129436 - DNA, 33 bp, Homo sapien
ctctcaccaataaacatcctgcaagtccctgcg

SEQ ID NO: 129437 - DNA, 33 bp, Homo sapien
tctacagtcagaaaaaaccatttaaaaaatgtc

SEQ ID NO: 129438 - DNA, 33 bp, Homo sapien
tctacagtcagaaaaacccatttaaaaaatgtc

SEQ ID NO: 129439 - DNA, 33 bp, Homo sapien
aggtcctcgccgcaccgccttactcatgcacat

SEQ ID NO: 129440 - DNA, 33 bp, Homo sapien
aggtcctcgccgcacctccttactcatgcacat

SEQ ID NO: 129441 - DNA, 33 bp, Homo sapien
gcttccctgccatcacaagaatgactttagggg

SEQ ID NO: 129442 - DNA, 33 bp, Homo sapien
gcttccctgccatcaccagaatgactttagggg

SEQ ID NO: 129443 - DNA, 33 bp, Homo sapien
ttcaaggagacattaacaatggtgaacaagagc

SEQ ID NO: 129444 - DNA, 33 bp, Homo sapien
ttcaaggagacattaataatggtgaacaagagc

SEQ ID NO: 129445 - DNA, 33 bp, Homo sapien
tcaccctctaatatgacgtgacatgcaggacct

SEQ ID NO: 129446 - DNA, 33 bp, Homo sapien
tcaccctctaatatgatgtgacatgcaggacct

SEQ ID NO: 129447 - DNA, 33 bp, Homo sapien
caaaccctcctttacccagtgaaatgcaaccag

SEQ ID NO: 129448 - DNA, 33 bp, Homo sapien
caaaccctcctttaccgagtgaaatgcaaccag

SEQ ID NO: 129449 - DNA, 33 bp, Homo sapien
ctgtgtgtcctgcctacagccacagcatcttct

SEQ ID NO: 129450 - DNA, 33 bp, Homo sapien
ctgtgtgtcctgcctatagccacagcatcttct

SEQ ID NO: 129451 - DNA, 33 bp, Homo sapien
tcagataaaccatcaaacacttctcagcacagt

SEQ ID NO: 129452 - DNA, 33 bp, Homo sapien
tcagataaaccatcaatcacttctcagcacagt

SEQ ID NO: 129453 - DNA, 33 bp, Homo sapien
cccaagtcaaggaaagaagatgtctaatgcccc

SEQ ID NO: 129454 - DNA, 33 bp, Homo sapien
cccaagtcaaggaaagcagatgtctaatgcccc

SEQ ID NO: 129455 - DNA, 33 bp, Homo sapien
aggacatacaaattgaacaaaactgaaaacaca

SEQ ID NO: 129456 - DNA, 33 bp, Homo sapien
aggacatacaaattgaccaaaactgaaaacaca

SEQ ID NO: 129457 - DNA, 33 bp, Homo sapien
tatttgttgtttatccaaaattcaaatgtactg

SEQ ID NO: 129458 - DNA, 33 bp, Homo sapien
tatttgttgtttatccgaaattcaaatgtactg

SEQ ID NO: 129459 - DNA, 33 bp, Homo sapien
ctttatggttcactaacgtacttaaaataatta

SEQ ID NO: 129460 - DNA, 33 bp, Homo sapien
ctttatggttcactaatgtacttaaaataatta

SEQ ID NO: 129461 - DNA, 33 bp, Homo sapien
ctgggtgaagcagaaacggaaataattggtgca

SEQ ID NO: 129462 - DNA, 33 bp, Homo sapien
ctgggtgaagcagaaatggaaataattggtgca

SEQ ID NO: 129463 - DNA, 33 bp, Homo sapien
ggctgtcacattacctcactaagcaggacccga

SEQ ID NO: 129464 - DNA, 33 bp, Homo sapien
ggctgtcacattaccttactaagcaggacccga

SEQ ID NO: 129465 - DNA, 33 bp, Homo sapien
aacaaacaaacaaaaacctgatcttgcaatttg

SEQ ID NO: 129466 - DNA, 33 bp, Homo sapien
aacaaacaaacaaaaatctgatcttgcaatttg

SEQ ID NO: 129467 - DNA, 33 bp, Homo sapien
agctagttgaagaatacgattgccttacaaatg

SEQ ID NO: 129468 - DNA, 33 bp, Homo sapien
agctagttgaagaatatgattgccttacaaatg

SEQ ID NO: 129469 - DNA, 33 bp, Homo sapien
ctccttttcattaaaaatggcccagcagggact

SEQ ID NO: 129470 - DNA, 33 bp, Homo sapien
ctccttttcattaaaattggcccagcagggact

SEQ ID NO: 129471 - DNA, 33 bp, Homo sapien
ggaacttccagaactacgctgaatgacagtacg

SEQ ID NO: 129472 - DNA, 33 bp, Homo sapien
ggaacttccagaactatgctgaatgacagtacg

SEQ ID NO: 129473 - DNA, 33 bp, Homo sapien
cagtgttttccttatcaattagcattcagttca

SEQ ID NO: 129474 - DNA, 33 bp, Homo sapien
cagtgttttccttatccattagcattcagttca

SEQ ID NO: 129475 - DNA, 33 bp, Homo sapien
gaccttataaattagactccatagacactctgt

SEQ ID NO: 129476 - DNA, 33 bp, Homo sapien
gaccttataaattagattccatagacactctgt

SEQ ID NO: 129477 - DNA, 33 bp, Homo sapien
tgtctttcctcagatcaaatccactagccctac

SEQ ID NO: 129478 - DNA, 33 bp, Homo sapien
tgtctttcctcagatcgaatccactagccctac

SEQ ID NO: 129479 - DNA, 33 bp, Homo sapien
tgaaggattttcatcaaggttgcagtgcagggg

SEQ ID NO: 129480 - DNA, 33 bp, Homo sapien
tgaaggattttcatcagggttgcagtgcagggg

SEQ ID NO: 129481 - DNA, 33 bp, Homo sapien
agtgctgaagtgctgactagcggtgttcctaat

SEQ ID NO: 129482 - DNA, 33 bp, Homo sapien
agtgctgaagtgctgagtagcggtgttcctaat

SEQ ID NO: 129483 - DNA, 33 bp, Homo sapien
gaagctgcaggctcaaagcctcggaagacatga

SEQ ID NO: 129484 - DNA, 33 bp, Homo sapien
gaagctgcaggctcaatgcctcggaagacatga

SEQ ID NO: 129485 - DNA, 33 bp, Homo sapien
ggtttgcctgaggtcccgaagtctggtccatca

SEQ ID NO: 129486 - DNA, 33 bp, Homo sapien
ggtttgcctgaggtcctgaagtctggtccatca

SEQ ID NO: 129487 - DNA, 33 bp, Homo sapien
ctcagaaggcaagccagactcattaggtcatag

SEQ ID NO: 129488 - DNA, 33 bp, Homo sapien
ctcagaaggcaagccatactcattaggtcatag

SEQ ID NO: 129489 - DNA, 33 bp, Homo sapien
caccagtgcatacccaagagatacccaatgtcc

SEQ ID NO: 129490 - DNA, 33 bp, Homo sapien
caccagtgcatacccaggagatacccaatgtcc

SEQ ID NO: 129491 - DNA, 33 bp, Homo sapien
acaacgtgctgcatgacaagatgtccatgataa

SEQ ID NO: 129492 - DNA, 33 bp, Homo sapien
acaacgtgctgcatgagaagatgtccatgataa

SEQ ID NO: 129493 - DNA, 33 bp, Homo sapien
gctttggtgttgtctgaattttttacttaacac

SEQ ID NO: 129494 - DNA, 33 bp, Homo sapien
gctttggtgttgtctgcattttttacttaacac

SEQ ID NO: 129495 - DNA, 33 bp, Homo sapien
tctctggggtctggaaagttccttatcttggtg

SEQ ID NO: 129496 - DNA, 33 bp, Homo sapien
tctctggggtctggaatgttccttatcttggtg

SEQ ID NO: 129497 - DNA, 33 bp, Homo sapien
actttacttaagctctaactaaaggaagcatct

SEQ ID NO: 129498 - DNA, 33 bp, Homo sapien
actttacttaagctcttactaaaggaagcatct

SEQ ID NO: 129499 - DNA, 33 bp, Homo sapien
ctgtaaatgaacatgcagaaatttgggggttgc

SEQ ID NO: 129500 - DNA, 33 bp, Homo sapien
ctgtaaatgaacatgcggaaatttgggggttgc

SEQ ID NO: 129501 - DNA, 33 bp, Homo sapien
cgcctaggatggggaacgttccttcatgaggcc

SEQ ID NO: 129502 - DNA, 33 bp, Homo sapien
cgcctaggatggggaaggttccttcatgaggcc

SEQ ID NO: 129503 - DNA, 33 bp, Homo sapien
ccccaggtgaacaatacgaagactgcaggcaga

SEQ ID NO: 129504 - DNA, 33 bp, Homo sapien
ccccaggtgaacaatatgaagactgcaggcaga

SEQ ID NO: 129505 - DNA, 33 bp, Homo sapien
cagagtctaaacgccacgacaacaggctcccat

SEQ ID NO: 129506 - DNA, 33 bp, Homo sapien
cagagtctaaacgccatgacaacaggctcccat

SEQ ID NO: 129507 - DNA, 33 bp, Homo sapien
taaactgaagtgatcccaagccaggtgcagtgg

SEQ ID NO: 129508 - DNA, 33 bp, Homo sapien
taaactgaagtgatcctaagccaggtgcagtgg

SEQ ID NO: 129509 - DNA, 33 bp, Homo sapien
aagggctgctttcaaacgattctacattgcagg

SEQ ID NO: 129510 - DNA, 33 bp, Homo sapien
aagggctgctttcaaatgattctacattgcagg

SEQ ID NO: 129511 - DNA, 33 bp, Homo sapien
caggagagctgtgatcaattaggaatatctatc

SEQ ID NO: 129512 - DNA, 33 bp, Homo sapien
caggagagctgtgatcgattaggaatatctatc

SEQ ID NO: 129513 - DNA, 33 bp, Homo sapien
gacattggaaggataccgcaaatagaagagggg

SEQ ID NO: 129514 - DNA, 33 bp, Homo sapien
gacattggaaggatactgcaaatagaagagggg

SEQ ID NO: 129515 - DNA, 33 bp, Homo sapien
attctaaagagataacccacgatgtatataaac

SEQ ID NO: 129516 - DNA, 33 bp, Homo sapien
attctaaagagataactcacgatgtatataaac

SEQ ID NO: 129517 - DNA, 33 bp, Homo sapien
acaggcatgaacctcaatctttttgttttgctt

SEQ ID NO: 129518 - DNA, 33 bp, Homo sapien
acaggcatgaacctcagtctttttgttttgctt

SEQ ID NO: 129519 - DNA, 33 bp, Homo sapien
aggaatctgacaaggacgagagaattctggctt

SEQ ID NO: 129520 - DNA, 33 bp, Homo sapien
aggaatctgacaaggatgagagaattctggctt

SEQ ID NO: 129521 - DNA, 33 bp, Homo sapien
ataaagaggtccatccactctcaatggaaaaca

SEQ ID NO: 129522 - DNA, 33 bp, Homo sapien
ataaagaggtccatccgctctcaatggaaaaca

SEQ ID NO: 129523 - DNA, 33 bp, Homo sapien
tttgtaaatgtcaagacgttacctctctgggtc

SEQ ID NO: 129524 - DNA, 33 bp, Homo sapien
tttgtaaatgtcaagatgttacctctctgggtc

SEQ ID NO: 129525 - DNA, 33 bp, Homo sapien
cataatcgattctataactcactgaatgctggt

SEQ ID NO: 129526 - DNA, 33 bp, Homo sapien
cataatcgattctatacctcactgaatgctggt

SEQ ID NO: 129527 - DNA, 33 bp, Homo sapien
taatagatgattatgacagatccataaatagtg

SEQ ID NO: 129528 - DNA, 33 bp, Homo sapien
taatagatgattatgatagatccataaatagtg

SEQ ID NO: 129529 - DNA, 33 bp, Homo sapien
gcccatagcatatgcaaagctggtaagtgacaa

SEQ ID NO: 129530 - DNA, 33 bp, Homo sapien
gcccatagcatatgcagagctggtaagtgacaa

SEQ ID NO: 129531 - DNA, 33 bp, Homo sapien
taactctaaatggcacaatattcagaaagtgga

SEQ ID NO: 129532 - DNA, 33 bp, Homo sapien
taactctaaatggcacgatattcagaaagtgga

SEQ ID NO: 129533 - DNA, 33 bp, Homo sapien
cacaaaattgggataaatcacttgaataggaat

SEQ ID NO: 129534 - DNA, 33 bp, Homo sapien
cacaaaattgggataagtcacttgaataggaat

SEQ ID NO: 129535 - DNA, 33 bp, Homo sapien
gtgcctggcttgggaaatagtttcaaattttaa

SEQ ID NO: 129536 - DNA, 33 bp, Homo sapien
gtgcctggcttgggaagtagtttcaaattttaa

SEQ ID NO: 129537 - DNA, 33 bp, Homo sapien
tcacgaaatgccgccacctttaacttcaaaata

SEQ ID NO: 129538 - DNA, 33 bp, Homo sapien
tcacgaaatgccgccagctttaacttcaaaata

SEQ ID NO: 129539 - DNA, 33 bp, Homo sapien
acccaagagacactcacgacttggaggcactac

SEQ ID NO: 129540 - DNA, 33 bp, Homo sapien
acccaagagacactcaggacttggaggcactac

SEQ ID NO: 129541 - DNA, 33 bp, Homo sapien
tactgggcatatacccaaaaaattataaatcat

SEQ ID NO: 129542 - DNA, 33 bp, Homo sapien
tactgggcatataccccaaaaattataaatcat

SEQ ID NO: 129543 - DNA, 33 bp, Homo sapien
cacgttttgatgtgagaataccaattaaacaaa

SEQ ID NO: 129544 - DNA, 33 bp, Homo sapien
cacgttttgatgtgagcataccaattaaacaaa

SEQ ID NO: 129545 - DNA, 33 bp, Homo sapien
aagttaaccactgataatagtttgttataatct

SEQ ID NO: 129546 - DNA, 33 bp, Homo sapien
aagttaaccactgatagtagtttgttataatct

SEQ ID NO: 129547 - DNA, 33 bp, Homo sapien
aaatgctattgaaatcccaaagaaggaatgctc

SEQ ID NO: 129548 - DNA, 33 bp, Homo sapien
aaatgctattgaaatctcaaagaaggaatgctc

SEQ ID NO: 129549 - DNA, 33 bp, Homo sapien
aggctttaccatgttacgatctaaatgcttgtt

SEQ ID NO: 129550 - DNA, 33 bp, Homo sapien
aggctttaccatgttatgatctaaatgcttgtt

SEQ ID NO: 129551 - DNA, 33 bp, Homo sapien
catttagtatgtttaacggaatacctgccacat

SEQ ID NO: 129552 - DNA, 33 bp, Homo sapien
catttagtatgtttaatggaatacctgccacat

SEQ ID NO: 129553 - DNA, 33 bp, Homo sapien
aacttcacctcaataaatagaaaagaaggaaag

SEQ ID NO: 129554 - DNA, 33 bp, Homo sapien
aacttcacctcaataagtagaaaagaaggaaag

SEQ ID NO: 129555 - DNA, 33 bp, Homo sapien
gcaagccaaagcttgacaggcactagcaaactg

SEQ ID NO: 129556 - DNA, 33 bp, Homo sapien
gcaagccaaagcttgataggcactagcaaactg

SEQ ID NO: 129557 - DNA, 33 bp, Homo sapien
attcttgagagacgaccccaggaaaaggtcaat

SEQ ID NO: 129558 - DNA, 33 bp, Homo sapien
attcttgagagacgactccaggaaaaggtcaat

SEQ ID NO: 129559 - DNA, 33 bp, Homo sapien
attaaatgctagcagcacccccttcttgagttg

SEQ ID NO: 129560 - DNA, 33 bp, Homo sapien
attaaatgctagcagcgcccccttcttgagttg

SEQ ID NO: 129561 - DNA, 33 bp, Homo sapien
catacaaggctatttgaatctaaatttctccag

SEQ ID NO: 129562 - DNA, 33 bp, Homo sapien
catacaaggctatttggatctaaatttctccag

SEQ ID NO: 129563 - DNA, 33 bp, Homo sapien
ttctgcccaaccattcacttatctgtccgcaca

SEQ ID NO: 129564 - DNA, 33 bp, Homo sapien
ttctgcccaaccattcgcttatctgtccgcaca

SEQ ID NO: 129565 - DNA, 33 bp, Homo sapien
aggaaattaatcaagaaaaaagagcacttagct

SEQ ID NO: 129566 - DNA, 33 bp, Homo sapien
aggaaattaatcaagagaaaagagcacttagct

SEQ ID NO: 129567 - DNA, 33 bp, Homo sapien
tctgattactgaaaaagtatcaaaatccagtac

SEQ ID NO: 129568 - DNA, 33 bp, Homo sapien
tctgattactgaaaaattatcaaaatccagtac

SEQ ID NO: 129569 - DNA, 33 bp, Homo sapien
agaaggaagtactttacaaactgtaaggcattg

SEQ ID NO: 129570 - DNA, 33 bp, Homo sapien
agaaggaagtactttataaactgtaaggcattg

SEQ ID NO: 129571 - DNA, 33 bp, Homo sapien
gaaatgacttacccaacatcctatgctgaacag

SEQ ID NO: 129572 - DNA, 33 bp, Homo sapien
gaaatgacttacccaatatcctatgctgaacag

SEQ ID NO: 129573 - DNA, 33 bp, Homo sapien
attcattgcaccatccacttccccgtctcacct

SEQ ID NO: 129574 - DNA, 33 bp, Homo sapien
attcattgcaccatccgcttccccgtctcacct

SEQ ID NO: 129575 - DNA, 33 bp, Homo sapien
ccaccaggaccatagcaagaggccaaccttcag

SEQ ID NO: 129576 - DNA, 33 bp, Homo sapien
ccaccaggaccatagcgagaggccaaccttcag

SEQ ID NO: 129577 - DNA, 33 bp, Homo sapien
tgctccttgctctaagcctctctttttggccac

SEQ ID NO: 129578 - DNA, 33 bp, Homo sapien
tgctccttgctctaaggctctctttttggccac

SEQ ID NO: 129579 - DNA, 33 bp, Homo sapien
tatagagaagggacccagaagagttacagcaga

SEQ ID NO: 129580 - DNA, 33 bp, Homo sapien
tatagagaagggacccggaagagttacagcaga

SEQ ID NO: 129581 - DNA, 33 bp, Homo sapien
cctcaagtacctaacacatttggctgcttgtat

SEQ ID NO: 129582 - DNA, 33 bp, Homo sapien
cctcaagtacctaacatatttggctgcttgtat

SEQ ID NO: 129583 - DNA, 33 bp, Homo sapien
catgtgcctggagacactgaaaggagcaaagga

SEQ ID NO: 129584 - DNA, 33 bp, Homo sapien
catgtgcctggagacattgaaaggagcaaagga

SEQ ID NO: 129585 - DNA, 33 bp, Homo sapien
gtcagtggaagaagaaacttcaacatcaggatg

SEQ ID NO: 129586 - DNA, 33 bp, Homo sapien
gtcagtggaagaagaaccttcaacatcaggatg

SEQ ID NO: 129587 - DNA, 33 bp, Homo sapien
atgttttcatccatcaagtcatatttttgttgc

SEQ ID NO: 129588 - DNA, 33 bp, Homo sapien
atgttttcatccatcaggtcatatttttgttgc

SEQ ID NO: 129589 - DNA, 33 bp, Homo sapien
accaaatcacattgcactcatagtttattgtgg

SEQ ID NO: 129590 - DNA, 33 bp, Homo sapien
accaaatcacattgcattcatagtttattgtgg

SEQ ID NO: 129591 - DNA, 33 bp, Homo sapien
gatttctataacctacagggattcctaattcaa

SEQ ID NO: 129592 - DNA, 33 bp, Homo sapien
gatttctataacctacggggattcctaattcaa

SEQ ID NO: 129593 - DNA, 33 bp, Homo sapien
ctacagcccggatgccaaggaatggtgccagta

SEQ ID NO: 129594 - DNA, 33 bp, Homo sapien
ctacagcccggatgccgaggaatggtgccagta

SEQ ID NO: 129595 - DNA, 33 bp, Homo sapien
tacctaaatttgaacaacttctggggtgggaag

SEQ ID NO: 129596 - DNA, 33 bp, Homo sapien
tacctaaatttgaacaccttctggggtgggaag

SEQ ID NO: 129597 - DNA, 33 bp, Homo sapien
agagaggtacacaggacgctggaaaagaggaaa

SEQ ID NO: 129598 - DNA, 33 bp, Homo sapien
agagaggtacacaggatgctggaaaagaggaaa

SEQ ID NO: 129599 - DNA, 33 bp, Homo sapien
tttattatggcaacagaagaaaatgaatgcacg

SEQ ID NO: 129600 - DNA, 33 bp, Homo sapien
tttattatggcaacagtagaaaatgaatgcacg

SEQ ID NO: 129601 - DNA, 33 bp, Homo sapien
ccacttccttctctcaaacttaggcacccactc

SEQ ID NO: 129602 - DNA, 33 bp, Homo sapien
ccacttccttctctcagacttaggcacccactc

SEQ ID NO: 129603 - DNA, 33 bp, Homo sapien
agaaaagcaaagattcacctggaaaacatagca

SEQ ID NO: 129604 - DNA, 33 bp, Homo sapien
agaaaagcaaagattcgcctggaaaacatagca

SEQ ID NO: 129605 - DNA, 33 bp, Homo sapien
attctgtcatatggaaatactacattttattta

SEQ ID NO: 129606 - DNA, 33 bp, Homo sapien
attctgtcatatggaagtactacattttattta

SEQ ID NO: 129607 - DNA, 33 bp, Homo sapien
gacatttcataaaaacggattcataaattgtgg

SEQ ID NO: 129608 - DNA, 33 bp, Homo sapien
gacatttcataaaaactgattcataaattgtgg

SEQ ID NO: 129609 - DNA, 33 bp, Homo sapien
cttgagacaccttttagcagacctattaagtgg

SEQ ID NO: 129610 - DNA, 33 bp, Homo sapien
cttgagacaccttttatcagacctattaagtgg

SEQ ID NO: 129611 - DNA, 33 bp, Homo sapien
ggagctcacgtggtaacgcaaatgactgggagc

SEQ ID NO: 129612 - DNA, 33 bp, Homo sapien
ggagctcacgtggtaatgcaaatgactgggagc

SEQ ID NO: 129613 - DNA, 33 bp, Homo sapien
ctccattatactaaaagtcagagtaactcccca

SEQ ID NO: 129614 - DNA, 33 bp, Homo sapien
ctccattatactaaaattcagagtaactcccca

SEQ ID NO: 129615 - DNA, 33 bp, Homo sapien
atgaaatcacacagtaggtacacttgcttgtct

SEQ ID NO: 129616 - DNA, 33 bp, Homo sapien
atgaaatcacacagtatgtacacttgcttgtct

SEQ ID NO: 129617 - DNA, 33 bp, Homo sapien
cttctaagaatttccaaccaacatagggaagga

SEQ ID NO: 129618 - DNA, 33 bp, Homo sapien
cttctaagaatttccatccaacatagggaagga

SEQ ID NO: 129619 - DNA, 33 bp, Homo sapien
ttcacgcgttttgccacatcagcaacctgaact

SEQ ID NO: 129620 - DNA, 33 bp, Homo sapien
ttcacgcgttttgccatatcagcaacctgaact

SEQ ID NO: 129621 - DNA, 33 bp, Homo sapien
tgtaacagcaatggaaagcataacctccaaatg

SEQ ID NO: 129622 - DNA, 33 bp, Homo sapien
tgtaacagcaatggaaggcataacctccaaatg

SEQ ID NO: 129623 - DNA, 33 bp, Homo sapien
tatcaatttttgcctaacctatatccatttctg

SEQ ID NO: 129624 - DNA, 33 bp, Homo sapien
tatcaatttttgcctaccctatatccatttctg

SEQ ID NO: 129625 - DNA, 33 bp, Homo sapien
tggtctcaaagctcgcaacctcaagtgatcccc

SEQ ID NO: 129626 - DNA, 33 bp, Homo sapien
tggtctcaaagctcgcgacctcaagtgatcccc

SEQ ID NO: 129627 - DNA, 33 bp, Homo sapien
tttgtacatctctagcccaatttcttgctgctc

SEQ ID NO: 129628 - DNA, 33 bp, Homo sapien
tttgtacatctctagctcaatttcttgctgctc

SEQ ID NO: 129629 - DNA, 33 bp, Homo sapien
aaaacaaataattaccaactgatatagtaccag

SEQ ID NO: 129630 - DNA, 33 bp, Homo sapien
aaaacaaataattaccgactgatatagtaccag

SEQ ID NO: 129631 - DNA, 33 bp, Homo sapien
taaggattttcagtatcaacagtgaagcaactg

SEQ ID NO: 129632 - DNA, 33 bp, Homo sapien
taaggattttcagtattaacagtgaagcaactg

SEQ ID NO: 129633 - DNA, 33 bp, Homo sapien
aacgttgacatatggcaaagattatattaagca

SEQ ID NO: 129634 - DNA, 33 bp, Homo sapien
aacgttgacatatggcgaagattatattaagca

SEQ ID NO: 129635 - DNA, 33 bp, Homo sapien
gttctaagcataagcactgcattatcttttgtt

SEQ ID NO: 129636 - DNA, 33 bp, Homo sapien
gttctaagcataagcattgcattatcttttgtt

SEQ ID NO: 129637 - DNA, 33 bp, Homo sapien
cccctctactggccaaatgaaaattaaagacat

SEQ ID NO: 129638 - DNA, 33 bp, Homo sapien
cccctctactggccaactgaaaattaaagacat

SEQ ID NO: 129639 - DNA, 33 bp, Homo sapien
aagccatagtttgctacctttctgcatcttaag

SEQ ID NO: 129640 - DNA, 33 bp, Homo sapien
aagccatagtttgctatctttctgcatcttaag

SEQ ID NO: 129641 - DNA, 33 bp, Homo sapien
gttaagaacatggtaaacttagcaattacaaag

SEQ ID NO: 129642 - DNA, 33 bp, Homo sapien
gttaagaacatggtaagcttagcaattacaaag

SEQ ID NO: 129643 - DNA, 33 bp, Homo sapien
cagcgaaacacacaagaccccgtgtaattgagt

SEQ ID NO: 129644 - DNA, 33 bp, Homo sapien
cagcgaaacacacaaggccccgtgtaattgagt

SEQ ID NO: 129645 - DNA, 33 bp, Homo sapien
tttgttttcacaactaacaagaaagcagtttta

SEQ ID NO: 129646 - DNA, 33 bp, Homo sapien
tttgttttcacaactagcaagaaagcagtttta

SEQ ID NO: 129647 - DNA, 33 bp, Homo sapien
gaaattggagcacaccaactgcatgggttcagt

SEQ ID NO: 129648 - DNA, 33 bp, Homo sapien
gaaattggagcacaccgactgcatgggttcagt

SEQ ID NO: 129649 - DNA, 33 bp, Homo sapien
cccgttggctgcatacagactaccttgtaaggt

SEQ ID NO: 129650 - DNA, 33 bp, Homo sapien
cccgttggctgcataccgactaccttgtaaggt

SEQ ID NO: 129651 - DNA, 33 bp, Homo sapien
tggggtctgagagccaaaggatccaccccacag

SEQ ID NO: 129652 - DNA, 33 bp, Homo sapien
tggggtctgagagccataggatccaccccacag

SEQ ID NO: 129653 - DNA, 33 bp, Homo sapien
agaaaataggcctcaaaagaagaataaattgtc

SEQ ID NO: 129654 - DNA, 33 bp, Homo sapien
agaaaataggcctcaagagaagaataaattgtc

SEQ ID NO: 129655 - DNA, 33 bp, Homo sapien
ttcctgaaggtgctgaggttactgagaagccct

SEQ ID NO: 129656 - DNA, 33 bp, Homo sapien
ttcctgaaggtgctgatgttactgagaagccct

SEQ ID NO: 129657 - DNA, 33 bp, Homo sapien
cactttctacaagtaccgctaacctgatcttta

SEQ ID NO: 129658 - DNA, 33 bp, Homo sapien
cactttctacaagtactgctaacctgatcttta

SEQ ID NO: 129659 - DNA, 33 bp, Homo sapien
ctcataacataaaacgcacttcccggttcaatc

SEQ ID NO: 129660 - DNA, 33 bp, Homo sapien
ctcataacataaaacgtacttcccggttcaatc

SEQ ID NO: 129661 - DNA, 33 bp, Homo sapien
caaaatgcttccaagtaactgaatccatccagg

SEQ ID NO: 129662 - DNA, 33 bp, Homo sapien
caaaatgcttccaagtgactgaatccatccagg

SEQ ID NO: 129663 - DNA, 33 bp, Homo sapien
ctgagctgtgttccaccgtacaggcatggatgt

SEQ ID NO: 129664 - DNA, 33 bp, Homo sapien
ctgagctgtgttccactgtacaggcatggatgt

SEQ ID NO: 129665 - DNA, 33 bp, Homo sapien
atttgggacttatacccgggcaagtggcttcct

SEQ ID NO: 129666 - DNA, 33 bp, Homo sapien
atttgggacttatacctgggcaagtggcttcct

SEQ ID NO: 129667 - DNA, 33 bp, Homo sapien
aacacaaagaaaactcagaaatcatgactgagc

SEQ ID NO: 129668 - DNA, 33 bp, Homo sapien
aacacaaagaaaactcggaaatcatgactgagc

SEQ ID NO: 129669 - DNA, 33 bp, Homo sapien
gtagctggtctgaacccgctgtttgtcagagcc

SEQ ID NO: 129670 - DNA, 33 bp, Homo sapien
gtagctggtctgaacctgctgtttgtcagagcc

SEQ ID NO: 129671 - DNA, 33 bp, Homo sapien
ttttaaattagctacaaactctgcccccaggat

SEQ ID NO: 129672 - DNA, 33 bp, Homo sapien
ttttaaattagctacagactctgcccccaggat

SEQ ID NO: 129673 - DNA, 33 bp, Homo sapien
gaaatttcaacactaactagatactcaatgata

SEQ ID NO: 129674 - DNA, 33 bp, Homo sapien
gaaatttcaacactaattagatactcaatgata

SEQ ID NO: 129675 - DNA, 33 bp, Homo sapien
caaatgcaaaggaaaaagtttcatttcaaaata

SEQ ID NO: 129676 - DNA, 33 bp, Homo sapien
caaatgcaaaggaaaaggtttcatttcaaaata

SEQ ID NO: 129677 - DNA, 33 bp, Homo sapien
cccttcattcagcaagcatttcctgtgccaagc

SEQ ID NO: 129678 - DNA, 33 bp, Homo sapien
cccttcattcagcaagtatttcctgtgccaagc

SEQ ID NO: 129679 - DNA, 33 bp, Homo sapien
atatgtcttgagaggcgcatttcagtctttgcc

SEQ ID NO: 129680 - DNA, 33 bp, Homo sapien
atatgtcttgagaggctcatttcagtctttgcc

SEQ ID NO: 129681 - DNA, 33 bp, Homo sapien
ttaaagcagagaattaaatcatttattgagatg

SEQ ID NO: 129682 - DNA, 33 bp, Homo sapien
ttaaagcagagaattacatcatttattgagatg

SEQ ID NO: 129683 - DNA, 33 bp, Homo sapien
ggtggcttttctaaccagggggaatagcttcag

SEQ ID NO: 129684 - DNA, 33 bp, Homo sapien
ggtggcttttctaacccgggggaatagcttcag

SEQ ID NO: 129685 - DNA, 33 bp, Homo sapien
tgcccagctctatgacagacatcatgtggatgg

SEQ ID NO: 129686 - DNA, 33 bp, Homo sapien
tgcccagctctatgacggacatcatgtggatgg

SEQ ID NO: 129687 - DNA, 33 bp, Homo sapien
accaggtcctcaggcaaggatgttaggggacca

SEQ ID NO: 129688 - DNA, 33 bp, Homo sapien
accaggtcctcaggcagggatgttaggggacca

SEQ ID NO: 129689 - DNA, 33 bp, Homo sapien
ggagtttctaaaagtcaaaattgcacaaagaga

SEQ ID NO: 129690 - DNA, 33 bp, Homo sapien
ggagtttctaaaagtccaaattgcacaaagaga

SEQ ID NO: 129691 - DNA, 33 bp, Homo sapien
tgatgctaatgaaaataaactgacttttattat

SEQ ID NO: 129692 - DNA, 33 bp, Homo sapien
tgatgctaatgaaaatgaactgacttttattat

SEQ ID NO: 129693 - DNA, 33 bp, Homo sapien
acagtaagggaatggaactctctgtgcatcaat

SEQ ID NO: 129694 - DNA, 33 bp, Homo sapien
acagtaagggaatggacctctctgtgcatcaat

SEQ ID NO: 129695 - DNA, 33 bp, Homo sapien
cagccttctgctccccaagaggttgtcctgggc

SEQ ID NO: 129696 - DNA, 33 bp, Homo sapien
cagccttctgctccccgagaggttgtcctgggc

SEQ ID NO: 129697 - DNA, 33 bp, Homo sapien
acctcacaggttttaacgtgcatctacatcacc

SEQ ID NO: 129698 - DNA, 33 bp, Homo sapien
acctcacaggttttaatgtgcatctacatcacc

SEQ ID NO: 129699 - DNA, 33 bp, Homo sapien
atggtgatttatgttccctgctctcattacacc

SEQ ID NO: 129700 - DNA, 33 bp, Homo sapien
atggtgatttatgttctctgctctcattacacc

SEQ ID NO: 129701 - DNA, 33 bp, Homo sapien
cagaaagacaaccatacccggaatctggtccgg

SEQ ID NO: 129702 - DNA, 33 bp, Homo sapien
cagaaagacaaccatatccggaatctggtccgg

SEQ ID NO: 129703 - DNA, 33 bp, Homo sapien
cgggaaaatcagaaatcaggcctatgtggaaga

SEQ ID NO: 129704 - DNA, 33 bp, Homo sapien
cgggaaaatcagaaatgaggcctatgtggaaga

SEQ ID NO: 129705 - DNA, 33 bp, Homo sapien
aacacttgcgctgcaccgggcaataaacactaa

SEQ ID NO: 129706 - DNA, 33 bp, Homo sapien
aacacttgcgctgcactgggcaataaacactaa

SEQ ID NO: 129707 - DNA, 33 bp, Homo sapien
gtcgctgcagatgtggcatttctctcccaaaga

SEQ ID NO: 129708 - DNA, 33 bp, Homo sapien
gtcgctgcagatgtggtatttctctcccaaaga

SEQ ID NO: 129709 - DNA, 33 bp, Homo sapien
ctctgagctatcagtcacaatgcaagagggagc

SEQ ID NO: 129710 - DNA, 33 bp, Homo sapien
ctctgagctatcagtcgcaatgcaagagggagc

SEQ ID NO: 129711 - DNA, 33 bp, Homo sapien
gaaaggtctttgagaacaggaattggtccatga

SEQ ID NO: 129712 - DNA, 33 bp, Homo sapien
gaaaggtctttgagaataggaattggtccatga

SEQ ID NO: 129713 - DNA, 33 bp, Homo sapien
tcttcaagtagtcctccatggcttaaagagaaa

SEQ ID NO: 129714 - DNA, 33 bp, Homo sapien
tcttcaagtagtcctctatggcttaaagagaaa

SEQ ID NO: 129715 - DNA, 33 bp, Homo sapien
tacaggctgtggatgcagaaaggggagctcaga

SEQ ID NO: 129716 - DNA, 33 bp, Homo sapien
tacaggctgtggatgcggaaaggggagctcaga

SEQ ID NO: 129717 - DNA, 33 bp, Homo sapien
atcatgggctttggaaccaaagagttttgggtt

SEQ ID NO: 129718 - DNA, 33 bp, Homo sapien
atcatgggctttggaatcaaagagttttgggtt

SEQ ID NO: 129719 - DNA, 33 bp, Homo sapien
acacttgacatgaagaaaagttccagggacatg

SEQ ID NO: 129720 - DNA, 33 bp, Homo sapien
acacttgacatgaagagaagttccagggacatg

SEQ ID NO: 129721 - DNA, 33 bp, Homo sapien
tttccttcccccttaagaatgtgtgttctcctg

SEQ ID NO: 129722 - DNA, 33 bp, Homo sapien
tttccttcccccttaataatgtgtgttctcctg

SEQ ID NO: 129723 - DNA, 33 bp, Homo sapien
ccggttctgtcccaccaaaactattagatgtca

SEQ ID NO: 129724 - DNA, 33 bp, Homo sapien
ccggttctgtcccaccgaaactattagatgtca

SEQ ID NO: 129725 - DNA, 33 bp, Homo sapien
ttgttctcttggcccgcagtatgtacctccctg

SEQ ID NO: 129726 - DNA, 33 bp, Homo sapien
ttgttctcttggcccggagtatgtacctccctg

SEQ ID NO: 129727 - DNA, 33 bp, Homo sapien
tttatccgtggatgaacactgaggctgcttcca

SEQ ID NO: 129728 - DNA, 33 bp, Homo sapien
tttatccgtggatgaatactgaggctgcttcca

SEQ ID NO: 129729 - DNA, 33 bp, Homo sapien
gcgttttatagagtacagatgagcatgactggg

SEQ ID NO: 129730 - DNA, 33 bp, Homo sapien
gcgttttatagagtactgatgagcatgactggg

SEQ ID NO: 129731 - DNA, 33 bp, Homo sapien
tctccacagtgcttagaaaacatttaggaaaga

SEQ ID NO: 129732 - DNA, 33 bp, Homo sapien
tctccacagtgcttaggaaacatttaggaaaga

SEQ ID NO: 129733 - DNA, 33 bp, Homo sapien
gaccctggctcccgacaacagctccagcacgca

SEQ ID NO: 129734 - DNA, 33 bp, Homo sapien
gaccctggctcccgacgacagctccagcacgca

SEQ ID NO: 129735 - DNA, 33 bp, Homo sapien
gcacttcctttcagataagcatccacctcaaca

SEQ ID NO: 129736 - DNA, 33 bp, Homo sapien
gcacttcctttcagatgagcatccacctcaaca

SEQ ID NO: 129737 - DNA, 33 bp, Homo sapien
gggctgcaccaccctccgaagtagccctgatgt

SEQ ID NO: 129738 - DNA, 33 bp, Homo sapien
gggctgcaccaccctctgaagtagccctgatgt

SEQ ID NO: 129739 - DNA, 33 bp, Homo sapien
gtgaggttagtctgtccatttctttcctatgca

SEQ ID NO: 129740 - DNA, 33 bp, Homo sapien
gtgaggttagtctgtctatttctttcctatgca

SEQ ID NO: 129741 - DNA, 33 bp, Homo sapien
gatattcagaaataacgagaaatggccctcaca

SEQ ID NO: 129742 - DNA, 33 bp, Homo sapien
gatattcagaaataactagaaatggccctcaca

SEQ ID NO: 129743 - DNA, 33 bp, Homo sapien
ctcgctggcagtaacactgggagacattgcttg

SEQ ID NO: 129744 - DNA, 33 bp, Homo sapien
ctcgctggcagtaacagtgggagacattgcttg

SEQ ID NO: 129745 - DNA, 33 bp, Homo sapien
gctctccagtaacttacatatttctcagttttg

SEQ ID NO: 129746 - DNA, 33 bp, Homo sapien
gctctccagtaacttatatatttctcagttttg

SEQ ID NO: 129747 - DNA, 33 bp, Homo sapien
ctggcgggggagccgccgatattgttgtgtagg

SEQ ID NO: 129748 - DNA, 33 bp, Homo sapien
ctggcgggggagccgctgatattgttgtgtagg

SEQ ID NO: 129749 - DNA, 33 bp, Homo sapien
caccacatttccaagaagtgggtcttaccatca

SEQ ID NO: 129750 - DNA, 33 bp, Homo sapien
caccacatttccaagaggtgggtcttaccatca

SEQ ID NO: 129751 - DNA, 33 bp, Homo sapien
atgctccagtggcaaacggccctgatttccctc

SEQ ID NO: 129752 - DNA, 33 bp, Homo sapien
atgctccagtggcaaatggccctgatttccctc

SEQ ID NO: 129753 - DNA, 33 bp, Homo sapien
aggcttcaggcctccaatcaaacgccctcttct

SEQ ID NO: 129754 - DNA, 33 bp, Homo sapien
aggcttcaggcctccagtcaaacgccctcttct

SEQ ID NO: 129755 - DNA, 33 bp, Homo sapien
agacttaggttaagtagcgaggcgaagcgaggg

SEQ ID NO: 129756 - DNA, 33 bp, Homo sapien
agacttaggttaagtatcgaggcgaagcgaggg

SEQ ID NO: 129757 - DNA, 33 bp, Homo sapien
ggcagaacacagcatccagtccatcctgggcac

SEQ ID NO: 129758 - DNA, 33 bp, Homo sapien
ggcagaacacagcatctagtccatcctgggcac

SEQ ID NO: 129759 - DNA, 33 bp, Homo sapien
agatacaggaaacccaatgaacccaaagcacag

SEQ ID NO: 129760 - DNA, 33 bp, Homo sapien
agatacaggaaacccagtgaacccaaagcacag

SEQ ID NO: 129761 - DNA, 33 bp, Homo sapien
gttttgccagatatcacgtcttctttagctttc

SEQ ID NO: 129762 - DNA, 33 bp, Homo sapien
gttttgccagatatcatgtcttctttagctttc

SEQ ID NO: 129763 - DNA, 33 bp, Homo sapien
tctaggaggggtctaacggctgcagaaggtggc

SEQ ID NO: 129764 - DNA, 33 bp, Homo sapien
tctaggaggggtctaatggctgcagaaggtggc

SEQ ID NO: 129765 - DNA, 33 bp, Homo sapien
tttaaaacacttctcacagttgtaatagagaga

SEQ ID NO: 129766 - DNA, 33 bp, Homo sapien
tttaaaacacttctcatagttgtaatagagaga

SEQ ID NO: 129767 - DNA, 33 bp, Homo sapien
gcacaagagaggtgggaaggagctgtatagggc

SEQ ID NO: 129768 - DNA, 33 bp, Homo sapien
gcacaagagaggtgggtaggagctgtatagggc

SEQ ID NO: 129769 - DNA, 33 bp, Homo sapien
gctgacccacagccaaacttttctcagctatac

SEQ ID NO: 129770 - DNA, 33 bp, Homo sapien
gctgacccacagccaagcttttctcagctatac

SEQ ID NO: 129771 - DNA, 33 bp, Homo sapien
gtgagagagatttccacagaaagtgtttctgtg

SEQ ID NO: 129772 - DNA, 33 bp, Homo sapien
gtgagagagatttccatagaaagtgtttctgtg

SEQ ID NO: 129773 - DNA, 33 bp, Homo sapien
aagtattttgggaagaaatggcaaatccatatc

SEQ ID NO: 129774 - DNA, 33 bp, Homo sapien
aagtattttgggaagagatggcaaatccatatc

SEQ ID NO: 129775 - DNA, 33 bp, Homo sapien
ggaaaccaatttctccggagcgtaaatgtctta

SEQ ID NO: 129776 - DNA, 33 bp, Homo sapien
ggaaaccaatttctcctgagcgtaaatgtctta

SEQ ID NO: 129777 - DNA, 33 bp, Homo sapien
acctgcagcatagtgccaaaggggaaaaaggga

SEQ ID NO: 129778 - DNA, 33 bp, Homo sapien
acctgcagcatagtgctaaaggggaaaaaggga

SEQ ID NO: 129779 - DNA, 33 bp, Homo sapien
tgggcctctaatcctacgctgtcctttctcccc

SEQ ID NO: 129780 - DNA, 33 bp, Homo sapien
tgggcctctaatcctatgctgtcctttctcccc

SEQ ID NO: 129781 - DNA, 33 bp, Homo sapien
acagtcaaaatgtgaacagaccagtcaaatcct

SEQ ID NO: 129782 - DNA, 33 bp, Homo sapien
acagtcaaaatgtgaatagaccagtcaaatcct

SEQ ID NO: 129783 - DNA, 33 bp, Homo sapien
tagacgtgcttcatcccgaagtggtgctatggt

SEQ ID NO: 129784 - DNA, 33 bp, Homo sapien
tagacgtgcttcatcctgaagtggtgctatggt

SEQ ID NO: 129785 - DNA, 33 bp, Homo sapien
actgtcatttttcggaagatgagaagaacagga

SEQ ID NO: 129786 - DNA, 33 bp, Homo sapien
actgtcatttttcggaggatgagaagaacagga

SEQ ID NO: 129787 - DNA, 33 bp, Homo sapien
tacagagataagacaacatgtgaagtaaataca

SEQ ID NO: 129788 - DNA, 33 bp, Homo sapien
tacagagataagacaatatgtgaagtaaataca

SEQ ID NO: 129789 - DNA, 33 bp, Homo sapien
ttttcagtagtcaaaaccttacccattcttcaa

SEQ ID NO: 129790 - DNA, 33 bp, Homo sapien
ttttcagtagtcaaaatcttacccattcttcaa

SEQ ID NO: 129791 - DNA, 33 bp, Homo sapien
taataagtaggtgctaaatcagtggttctcatg

SEQ ID NO: 129792 - DNA, 33 bp, Homo sapien
taataagtaggtgctagatcagtggttctcatg

SEQ ID NO: 129793 - DNA, 33 bp, Homo sapien
cggtattgttgatgcaatcttttgtgtaggtac

SEQ ID NO: 129794 - DNA, 33 bp, Homo sapien
cggtattgttgatgcagtcttttgtgtaggtac

SEQ ID NO: 129795 - DNA, 33 bp, Homo sapien
ttccagtaagaactaactgcttcctccagcact

SEQ ID NO: 129796 - DNA, 33 bp, Homo sapien
ttccagtaagaactaattgcttcctccagcact

SEQ ID NO: 129797 - DNA, 33 bp, Homo sapien
aagaggaaaattgatacactgtcatctgtttta

SEQ ID NO: 129798 - DNA, 33 bp, Homo sapien
aagaggaaaattgatatactgtcatctgtttta

SEQ ID NO: 129799 - DNA, 33 bp, Homo sapien
tggagacattctataacagttcctaatatagcc

SEQ ID NO: 129800 - DNA, 33 bp, Homo sapien
tggagacattctataagagttcctaatatagcc

SEQ ID NO: 129801 - DNA, 33 bp, Homo sapien
agactaacacatagagaaacatttatctgacta

SEQ ID NO: 129802 - DNA, 33 bp, Homo sapien
agactaacacatagaggaacatttatctgacta

SEQ ID NO: 129803 - DNA, 33 bp, Homo sapien
cttcttcacagtttcacagatagatttattctt

SEQ ID NO: 129804 - DNA, 33 bp, Homo sapien
cttcttcacagtttcatagatagatttattctt

SEQ ID NO: 129805 - DNA, 33 bp, Homo sapien
gcaggataaaactacccagctgccacgtgtgct

SEQ ID NO: 129806 - DNA, 33 bp, Homo sapien
gcaggataaaactacctagctgccacgtgtgct

SEQ ID NO: 129807 - DNA, 33 bp, Homo sapien
aagatgaagttgcttccaattctaattggcttt

SEQ ID NO: 129808 - DNA, 33 bp, Homo sapien
aagatgaagttgcttctaattctaattggcttt

SEQ ID NO: 129809 - DNA, 33 bp, Homo sapien
tctctttttatgtacaactttcatgatactggc

SEQ ID NO: 129810 - DNA, 33 bp, Homo sapien
tctctttttatgtacagctttcatgatactggc

SEQ ID NO: 129811 - DNA, 33 bp, Homo sapien
gtctcaatattaataacggttgtatctatctgg

SEQ ID NO: 129812 - DNA, 33 bp, Homo sapien
gtctcaatattaataatggttgtatctatctgg

SEQ ID NO: 129813 - DNA, 33 bp, Homo sapien
gacagccattatgtgccagaaactgtggggagc

SEQ ID NO: 129814 - DNA, 33 bp, Homo sapien
gacagccattatgtgctagaaactgtggggagc

SEQ ID NO: 129815 - DNA, 33 bp, Homo sapien
ttgccaggcctgtgtcacttgcccactcctgta

SEQ ID NO: 129816 - DNA, 33 bp, Homo sapien
ttgccaggcctgtgtcgcttgcccactcctgta

SEQ ID NO: 129817 - DNA, 33 bp, Homo sapien
ctgcctgggcagcctaacagttgggggttgtga

SEQ ID NO: 129818 - DNA, 33 bp, Homo sapien
ctgcctgggcagcctatcagttgggggttgtga

SEQ ID NO: 129819 - DNA, 33 bp, Homo sapien
agtctaagtagaaacaataagcctggtatgcaa

SEQ ID NO: 129820 - DNA, 33 bp, Homo sapien
agtctaagtagaaacagtaagcctggtatgcaa

SEQ ID NO: 129821 - DNA, 33 bp, Homo sapien
ctctgtttctctgggcaagcagaaagcaaaagg

SEQ ID NO: 129822 - DNA, 33 bp, Homo sapien
ctctgtttctctgggcgagcagaaagcaaaagg

SEQ ID NO: 129823 - DNA, 33 bp, Homo sapien
ctctggtctgtttttacccacgcttcctcagca

SEQ ID NO: 129824 - DNA, 33 bp, Homo sapien
ctctggtctgtttttagccacgcttcctcagca

SEQ ID NO: 129825 - DNA, 33 bp, Homo sapien
aggtgtcggtgggcgcacggaagaacgcttttg

SEQ ID NO: 129826 - DNA, 33 bp, Homo sapien
aggtgtcggtgggcgcccggaagaacgcttttg

SEQ ID NO: 129827 - DNA, 33 bp, Homo sapien
aatagctagtacctaactgagcattcatgatgt

SEQ ID NO: 129828 - DNA, 33 bp, Homo sapien
aatagctagtacctaattgagcattcatgatgt

SEQ ID NO: 129829 - DNA, 33 bp, Homo sapien
gtatgtgctccaaaacacagagacccacgtgag

SEQ ID NO: 129830 - DNA, 33 bp, Homo sapien
gtatgtgctccaaaacgcagagacccacgtgag

SEQ ID NO: 129831 - DNA, 33 bp, Homo sapien
gtgagtatagcattgaagttctaaacagcccta

SEQ ID NO: 129832 - DNA, 33 bp, Homo sapien
gtgagtatagcattgatgttctaaacagcccta

SEQ ID NO: 129833 - DNA, 33 bp, Homo sapien
agtttttatccattcaaaccccctcaatctggc

SEQ ID NO: 129834 - DNA, 33 bp, Homo sapien
agtttttatccattcacaccccctcaatctggc

SEQ ID NO: 129835 - DNA, 33 bp, Homo sapien
gaacatctcctctgctgaagtacttgagggtag

SEQ ID NO: 129836 - DNA, 33 bp, Homo sapien
gaacatctcctctgcttaagtacttgagggtag

SEQ ID NO: 129837 - DNA, 33 bp, Homo sapien
gcatcatccagaaataccagctgttgtcatcgg

SEQ ID NO: 129838 - DNA, 33 bp, Homo sapien
gcatcatccagaaatagcagctgttgtcatcgg

SEQ ID NO: 129839 - DNA, 33 bp, Homo sapien
ttctgtatctgctaaactggaaggactgccctt

SEQ ID NO: 129840 - DNA, 33 bp, Homo sapien
ttctgtatctgctaaattggaaggactgccctt

SEQ ID NO: 129841 - DNA, 33 bp, Homo sapien
tgctggcctccaaaccaagtctgcgtcgtaact

SEQ ID NO: 129842 - DNA, 33 bp, Homo sapien
tgctggcctccaaaccgagtctgcgtcgtaact

SEQ ID NO: 129843 - DNA, 33 bp, Homo sapien
cctggggtaccgggtgaaagagattgtgctcag

SEQ ID NO: 129844 - DNA, 33 bp, Homo sapien
cctggggtaccgggtggaagagattgtgctcag

SEQ ID NO: 129845 - DNA, 33 bp, Homo sapien
gtagaacaaggagctcaatctgtaactgactgt

SEQ ID NO: 129846 - DNA, 33 bp, Homo sapien
gtagaacaaggagctcgatctgtaactgactgt

SEQ ID NO: 129847 - DNA, 33 bp, Homo sapien
ctcaaagcagaatcaaagtcaagttagccagaa

SEQ ID NO: 129848 - DNA, 33 bp, Homo sapien
ctcaaagcagaatcaaggtcaagttagccagaa

SEQ ID NO: 129849 - DNA, 33 bp, Homo sapien
ccaagcactatgtcagcatatgatgagacactc

SEQ ID NO: 129850 - DNA, 33 bp, Homo sapien
ccaagcactatgtcagtatatgatgagacactc

SEQ ID NO: 129851 - DNA, 33 bp, Homo sapien
aagaacagccaatggaagaatgagtacacagaa

SEQ ID NO: 129852 - DNA, 33 bp, Homo sapien
aagaacagccaatggaggaatgagtacacagaa

SEQ ID NO: 129853 - DNA, 33 bp, Homo sapien
ttgtccatttgaaccacaaaggcttgaggccaa

SEQ ID NO: 129854 - DNA, 33 bp, Homo sapien
ttgtccatttgaaccagaaaggcttgaggccaa

SEQ ID NO: 129855 - DNA, 33 bp, Homo sapien
ctctgggtgtaggatacggtggccaccagtcac

SEQ ID NO: 129856 - DNA, 33 bp, Homo sapien
ctctgggtgtaggatatggtggccaccagtcac

SEQ ID NO: 129857 - DNA, 33 bp, Homo sapien
ctttcatgattgacaccgaggtagcttcaggat

SEQ ID NO: 129858 - DNA, 33 bp, Homo sapien
ctttcatgattgacactgaggtagcttcaggat

SEQ ID NO: 129859 - DNA, 33 bp, Homo sapien
gttgagtttgagaagcactgctccaatgcaaaa

SEQ ID NO: 129860 - DNA, 33 bp, Homo sapien
gttgagtttgagaagcgctgctccaatgcaaaa

SEQ ID NO: 129861 - DNA, 33 bp, Homo sapien
cctgtagccttcagcactaaatacagtgttaag

SEQ ID NO: 129862 - DNA, 33 bp, Homo sapien
cctgtagccttcagcagtaaatacagtgttaag

SEQ ID NO: 129863 - DNA, 33 bp, Homo sapien
taccaattatgaaatacgaggaaagtaggcatt

SEQ ID NO: 129864 - DNA, 33 bp, Homo sapien
taccaattatgaaatatgaggaaagtaggcatt

SEQ ID NO: 129865 - DNA, 33 bp, Homo sapien
ggaaaaacatacaaacaaggagtcatccctgtc

SEQ ID NO: 129866 - DNA, 33 bp, Homo sapien
ggaaaaacatacaaacgaggagtcatccctgtc

SEQ ID NO: 129867 - DNA, 33 bp, Homo sapien
ctggaagtcttgggacaaggagcaaagggtgaa

SEQ ID NO: 129868 - DNA, 33 bp, Homo sapien
ctggaagtcttgggaccaggagcaaagggtgaa

SEQ ID NO: 129869 - DNA, 33 bp, Homo sapien
aaaagtcatacaagcaataagttatggccaaat

SEQ ID NO: 129870 - DNA, 33 bp, Homo sapien
aaaagtcatacaagcagtaagttatggccaaat

SEQ ID NO: 129871 - DNA, 33 bp, Homo sapien
tatgagtcatgcctaccggcccgaggctgcctc

SEQ ID NO: 129872 - DNA, 33 bp, Homo sapien
tatgagtcatgcctactggcccgaggctgcctc

SEQ ID NO: 129873 - DNA, 33 bp, Homo sapien
atgaacagaaatagccaaacgggctggagggca

SEQ ID NO: 129874 - DNA, 33 bp, Homo sapien
atgaacagaaatagccgaacgggctggagggca

SEQ ID NO: 129875 - DNA, 33 bp, Homo sapien
taaactctccagtcaacgacaagaacagctggg

SEQ ID NO: 129876 - DNA, 33 bp, Homo sapien
taaactctccagtcaaggacaagaacagctggg

SEQ ID NO: 129877 - DNA, 33 bp, Homo sapien
cagggcactctcctaaccactagaggaggagac

SEQ ID NO: 129878 - DNA, 33 bp, Homo sapien
cagggcactctcctaatcactagaggaggagac

SEQ ID NO: 129879 - DNA, 33 bp, Homo sapien
cttgacttttctctgacgatctttccacttaaa

SEQ ID NO: 129880 - DNA, 33 bp, Homo sapien
cttgacttttctctgatgatctttccacttaaa

SEQ ID NO: 129881 - DNA, 33 bp, Homo sapien
gaggtgatcttgtctacgtcttgcagagctcaa

SEQ ID NO: 129882 - DNA, 33 bp, Homo sapien
gaggtgatcttgtctatgtcttgcagagctcaa

SEQ ID NO: 129883 - DNA, 33 bp, Homo sapien
tcacttggtctgttcacgttgaggacatcaggg

SEQ ID NO: 129884 - DNA, 33 bp, Homo sapien
tcacttggtctgttcatgttgaggacatcaggg

SEQ ID NO: 129885 - DNA, 33 bp, Homo sapien
gcagcaaggaaaacacacggcaggagcaaggcg

SEQ ID NO: 129886 - DNA, 33 bp, Homo sapien
gcagcaaggaaaacacgcggcaggagcaaggcg

SEQ ID NO: 129887 - DNA, 33 bp, Homo sapien
cccggatcctctgtggccatgagagagacaaaa

SEQ ID NO: 129888 - DNA, 33 bp, Homo sapien
cccggatcctctgtggtcatgagagagacaaaa

SEQ ID NO: 129889 - DNA, 33 bp, Homo sapien
ggtaactgccaatgaaatataaccactgtttac

SEQ ID NO: 129890 - DNA, 33 bp, Homo sapien
ggtaactgccaatgaagtataaccactgtttac

SEQ ID NO: 129891 - DNA, 33 bp, Homo sapien
tgctaacacgggaaaaagtccaccatacagtga

SEQ ID NO: 129892 - DNA, 33 bp, Homo sapien
tgctaacacgggaaaacgtccaccatacagtga

SEQ ID NO: 129893 - DNA, 33 bp, Homo sapien
acggttccaacacaaacataacatgaggtgact

SEQ ID NO: 129894 - DNA, 33 bp, Homo sapien
acggttccaacacaaatataacatgaggtgact

SEQ ID NO: 129895 - DNA, 33 bp, Homo sapien
ctggcaaaacgtaatgcatggagaaatatgttt

SEQ ID NO: 129896 - DNA, 33 bp, Homo sapien
ctggcaaaacgtaatgtatggagaaatatgttt

SEQ ID NO: 129897 - DNA, 33 bp, Homo sapien
gcatctctttgagcaccgggctttcattccacc

SEQ ID NO: 129898 - DNA, 33 bp, Homo sapien
gcatctctttgagcactgggctttcattccacc

SEQ ID NO: 129899 - DNA, 33 bp, Homo sapien
ccctcacgatctctcccggaagacccaggtacc

SEQ ID NO: 129900 - DNA, 33 bp, Homo sapien
ccctcacgatctctcctggaagacccaggtacc

SEQ ID NO: 129901 - DNA, 33 bp, Homo sapien
gttccactcctatctaaccttagaagcatactt

SEQ ID NO: 129902 - DNA, 33 bp, Homo sapien
gttccactcctatctagccttagaagcatactt

SEQ ID NO: 129903 - DNA, 33 bp, Homo sapien
agcatgaggagtaacacatggaaaagctctgcc

SEQ ID NO: 129904 - DNA, 33 bp, Homo sapien
agcatgaggagtaacatatggaaaagctctgcc

SEQ ID NO: 129905 - DNA, 33 bp, Homo sapien
atgtagattttcaccacaaaagacacctttgcc

SEQ ID NO: 129906 - DNA, 33 bp, Homo sapien
atgtagattttcaccataaaagacacctttgcc

SEQ ID NO: 129907 - DNA, 33 bp, Homo sapien
gtatcattgctacaaacagtctgctgtgtcaac

SEQ ID NO: 129908 - DNA, 33 bp, Homo sapien
gtatcattgctacaaagagtctgctgtgtcaac

SEQ ID NO: 129909 - DNA, 33 bp, Homo sapien
aagttttagacaatggaatgtaagtagaagagt

SEQ ID NO: 129910 - DNA, 33 bp, Homo sapien
aagttttagacaatgggatgtaagtagaagagt

SEQ ID NO: 129911 - DNA, 33 bp, Homo sapien
ttcttggggtacatggcatcgaataaggctata

SEQ ID NO: 129912 - DNA, 33 bp, Homo sapien
ttcttggggtacatggtatcgaataaggctata

SEQ ID NO: 129913 - DNA, 33 bp, Homo sapien
ttcaggactaagtgtaagcctcagttcaattca

SEQ ID NO: 129914 - DNA, 33 bp, Homo sapien
ttcaggactaagtgtaggcctcagttcaattca

SEQ ID NO: 129915 - DNA, 33 bp, Homo sapien
tctgtgaacagaaatacaaagttagcagaaaaa

SEQ ID NO: 129916 - DNA, 33 bp, Homo sapien
tctgtgaacagaaatataaagttagcagaaaaa

SEQ ID NO: 129917 - DNA, 33 bp, Homo sapien
ccagtgaagtaacatccgagtcaaggtccacac

SEQ ID NO: 129918 - DNA, 33 bp, Homo sapien
ccagtgaagtaacatctgagtcaaggtccacac

SEQ ID NO: 129919 - DNA, 33 bp, Homo sapien
ttttcctgtctcattcaatgtgttcaatagtta

SEQ ID NO: 129920 - DNA, 33 bp, Homo sapien
ttttcctgtctcattccatgtgttcaatagtta

SEQ ID NO: 129921 - DNA, 33 bp, Homo sapien
gagtgctcaattgcgcaccatatttatatattg

SEQ ID NO: 129922 - DNA, 33 bp, Homo sapien
gagtgctcaattgcgcgccatatttatatattg

SEQ ID NO: 129923 - DNA, 33 bp, Homo sapien
gggaggtatgccgagacaactggatatacattg

SEQ ID NO: 129924 - DNA, 33 bp, Homo sapien
gggaggtatgccgagagaactggatatacattg

SEQ ID NO: 129925 - DNA, 33 bp, Homo sapien
cccggagtaaggctagcaagagagagcacggtg

SEQ ID NO: 129926 - DNA, 33 bp, Homo sapien
cccggagtaaggctagtaagagagagcacggtg

SEQ ID NO: 129927 - DNA, 33 bp, Homo sapien
ggtaaaaaataatagaaactatgactgcatttg

SEQ ID NO: 129928 - DNA, 33 bp, Homo sapien
ggtaaaaaataatagagactatgactgcatttg

SEQ ID NO: 129929 - DNA, 33 bp, Homo sapien
gaaagatgtcatgacccggcttggtggttcacg

SEQ ID NO: 129930 - DNA, 33 bp, Homo sapien
gaaagatgtcatgacctggcttggtggttcacg

SEQ ID NO: 129931 - DNA, 33 bp, Homo sapien
gccaagcactgaaccgaactgagctctttttag

SEQ ID NO: 129932 - DNA, 33 bp, Homo sapien
gccaagcactgaaccggactgagctctttttag

SEQ ID NO: 129933 - DNA, 33 bp, Homo sapien
gagtagctagtgtgtacaaggtcctgtgcaggc

SEQ ID NO: 129934 - DNA, 33 bp, Homo sapien
gagtagctagtgtgtataaggtcctgtgcaggc

SEQ ID NO: 129935 - DNA, 33 bp, Homo sapien
gaagccagacaacagacgggtattctgggatca

SEQ ID NO: 129936 - DNA, 33 bp, Homo sapien
gaagccagacaacagaggggtattctgggatca

SEQ ID NO: 129937 - DNA, 33 bp, Homo sapien
ggattttgctaaaggggatggaggaaacgttcc

SEQ ID NO: 129938 - DNA, 33 bp, Homo sapien
ggattttgctaaagggtatggaggaaacgttcc

SEQ ID NO: 129939 - DNA, 33 bp, Homo sapien
catgtagaataaaagcacatgcatattcctgaa

SEQ ID NO: 129940 - DNA, 33 bp, Homo sapien
catgtagaataaaagcgcatgcatattcctgaa

SEQ ID NO: 129941 - DNA, 33 bp, Homo sapien
tcaaagaaaacaataactggtttggaccaggtg

SEQ ID NO: 129942 - DNA, 33 bp, Homo sapien
tcaaagaaaacaataattggtttggaccaggtg

SEQ ID NO: 129943 - DNA, 33 bp, Homo sapien
tcccgggaatcgagccacgggcggaccagaagg

SEQ ID NO: 129944 - DNA, 33 bp, Homo sapien
tcccgggaatcgagccgcgggcggaccagaagg

SEQ ID NO: 129945 - DNA, 33 bp, Homo sapien
tgcacacctcgaggcacggctgtctactccatc

SEQ ID NO: 129946 - DNA, 33 bp, Homo sapien
tgcacacctcgaggcagggctgtctactccatc

SEQ ID NO: 129947 - DNA, 33 bp, Homo sapien
tgcagcagagcattccctactctatcctatggg

SEQ ID NO: 129948 - DNA, 33 bp, Homo sapien
tgcagcagagcattccttactctatcctatggg

SEQ ID NO: 129949 - DNA, 33 bp, Homo sapien
gtgagacagcaatgaacagaacaggcaaggtcc

SEQ ID NO: 129950 - DNA, 33 bp, Homo sapien
gtgagacagcaatgaagagaacaggcaaggtcc

SEQ ID NO: 129951 - DNA, 33 bp, Homo sapien
tcttaatcagaactgcccttagcttcaagagag

SEQ ID NO: 129952 - DNA, 33 bp, Homo sapien
tcttaatcagaactgctcttagcttcaagagag

SEQ ID NO: 129953 - DNA, 33 bp, Homo sapien
cccagacctaaggcaaccactagcaagaggact

SEQ ID NO: 129954 - DNA, 33 bp, Homo sapien
cccagacctaaggcaatcactagcaagaggact

SEQ ID NO: 129955 - DNA, 33 bp, Homo sapien
aggctggacatgctacacgggcccactgctctg

SEQ ID NO: 129956 - DNA, 33 bp, Homo sapien
aggctggacatgctacgcgggcccactgctctg

SEQ ID NO: 129957 - DNA, 33 bp, Homo sapien
tggggggctttagagaaggagtggataaagcta

SEQ ID NO: 129958 - DNA, 33 bp, Homo sapien
tggggggctttagagagggagtggataaagcta

SEQ ID NO: 129959 - DNA, 33 bp, Homo sapien
tctttatgattggaaccatgcctctccctatct

SEQ ID NO: 129960 - DNA, 33 bp, Homo sapien
tctttatgattggaacgatgcctctccctatct

SEQ ID NO: 129961 - DNA, 33 bp, Homo sapien
agtgacaggaaagcctcaatcccaaggaaggaa

SEQ ID NO: 129962 - DNA, 33 bp, Homo sapien
agtgacaggaaagccttaatcccaaggaaggaa

SEQ ID NO: 129963 - DNA, 33 bp, Homo sapien
aaggtcttactaactacgtggcatttgagcttg

SEQ ID NO: 129964 - DNA, 33 bp, Homo sapien
aaggtcttactaactatgtggcatttgagcttg

SEQ ID NO: 129965 - DNA, 33 bp, Homo sapien
caggcttctatctctaggtcaagacagcgtttc

SEQ ID NO: 129966 - DNA, 33 bp, Homo sapien
caggcttctatctctatgtcaagacagcgtttc

SEQ ID NO: 129967 - DNA, 33 bp, Homo sapien
caaagcactatcgcataagtgatctctttcaag

SEQ ID NO: 129968 - DNA, 33 bp, Homo sapien
caaagcactatcgcatgagtgatctctttcaag

SEQ ID NO: 129969 - DNA, 33 bp, Homo sapien
gtgtagcatgatgtctcactgtggttttaattt

SEQ ID NO: 129970 - DNA, 33 bp, Homo sapien
gtgtagcatgatgtcttactgtggttttaattt

SEQ ID NO: 129971 - DNA, 33 bp, Homo sapien
agggcttatccttcccactttgctgacatggaa

SEQ ID NO: 129972 - DNA, 33 bp, Homo sapien
agggcttatccttcccgctttgctgacatggaa

SEQ ID NO: 129973 - DNA, 33 bp, Homo sapien
ccttcacttaccattacatacctagagcgtagc

SEQ ID NO: 129974 - DNA, 33 bp, Homo sapien
ccttcacttaccattatatacctagagcgtagc

SEQ ID NO: 129975 - DNA, 33 bp, Homo sapien
gatgccttataagtgacaaccatgaatgccttc

SEQ ID NO: 129976 - DNA, 33 bp, Homo sapien
gatgccttataagtgataaccatgaatgccttc

SEQ ID NO: 129977 - DNA, 33 bp, Homo sapien
ccaatggagagccacaaaagtaaacagctgtcg

SEQ ID NO: 129978 - DNA, 33 bp, Homo sapien
ccaatggagagccacacaagtaaacagctgtcg

SEQ ID NO: 129979 - DNA, 33 bp, Homo sapien
tgggactccagatgccaagacaaccaccacatg

SEQ ID NO: 129980 - DNA, 33 bp, Homo sapien
tgggactccagatgcccagacaaccaccacatg

SEQ ID NO: 129981 - DNA, 33 bp, Homo sapien
ctaccttgtgagatgaacaatattatccccatg

SEQ ID NO: 129982 - DNA, 33 bp, Homo sapien
ctaccttgtgagatgagcaatattatccccatg

SEQ ID NO: 129983 - DNA, 33 bp, Homo sapien
taattaggtgccttgcaaaaagcttattcacaa

SEQ ID NO: 129984 - DNA, 33 bp, Homo sapien
taattaggtgccttgcgaaaagcttattcacaa

SEQ ID NO: 129985 - DNA, 33 bp, Homo sapien
ttatattttaaaacacacttagtcacactcatg

SEQ ID NO: 129986 - DNA, 33 bp, Homo sapien
ttatattttaaaacacgcttagtcacactcatg

SEQ ID NO: 129987 - DNA, 33 bp, Homo sapien
cagagcctcagagtggaaggtgttggtatttgc

SEQ ID NO: 129988 - DNA, 33 bp, Homo sapien
cagagcctcagagtgggaggtgttggtatttgc

SEQ ID NO: 129989 - DNA, 33 bp, Homo sapien
cctgccacccacagaaggcttctcccacactgc

SEQ ID NO: 129990 - DNA, 33 bp, Homo sapien
cctgccacccacagaatgcttctcccacactgc

SEQ ID NO: 129991 - DNA, 33 bp, Homo sapien
gaaaagaaccttccaaatagagatgagaaagag

SEQ ID NO: 129992 - DNA, 33 bp, Homo sapien
gaaaagaaccttccaagtagagatgagaaagag

SEQ ID NO: 129993 - DNA, 33 bp, Homo sapien
tccagttcctcctgtccatcccgagcaacattt

SEQ ID NO: 129994 - DNA, 33 bp, Homo sapien
tccagttcctcctgtctatcccgagcaacattt

SEQ ID NO: 129995 - DNA, 33 bp, Homo sapien
cttcctggcactgctacagagagcactgaagga

SEQ ID NO: 129996 - DNA, 33 bp, Homo sapien
cttcctggcactgctatagagagcactgaagga

SEQ ID NO: 129997 - DNA, 33 bp, Homo sapien
agtcttcatttcacagaaagaaacaggggctca

SEQ ID NO: 129998 - DNA, 33 bp, Homo sapien
agtcttcatttcacaggaagaaacaggggctca

SEQ ID NO: 129999 - DNA, 33 bp, Homo sapien
ctgccatgaaatcaaacccaaaatgcattgtta

SEQ ID NO: 130000 - DNA, 33 bp, Homo sapien
ctgccatgaaatcaaatccaaaatgcattgtta

SEQ ID NO: 130001 - DNA, 33 bp, Homo sapien
tggaaccatgagttggacatgctgtttgtgtag

SEQ ID NO: 130002 - DNA, 33 bp, Homo sapien
tggaaccatgagttgggcatgctgtttgtgtag

SEQ ID NO: 130003 - DNA, 33 bp, Homo sapien
ggggccacaacatgaacgtacaaggctttgcct

SEQ ID NO: 130004 - DNA, 33 bp, Homo sapien
ggggccacaacatgaatgtacaaggctttgcct

SEQ ID NO: 130005 - DNA, 33 bp, Homo sapien
tgtattcactgctttacagatattatcctaatc

SEQ ID NO: 130006 - DNA, 33 bp, Homo sapien
tgtattcactgctttatagatattatcctaatc

SEQ ID NO: 130007 - DNA, 33 bp, Homo sapien
agctcttgctggtcaccgctcatggggaaatgg

SEQ ID NO: 130008 - DNA, 33 bp, Homo sapien
agctcttgctggtcactgctcatggggaaatgg

SEQ ID NO: 130009 - DNA, 33 bp, Homo sapien
cctgaaagacggaagacaaagaatgcccccggg

SEQ ID NO: 130010 - DNA, 33 bp, Homo sapien
cctgaaagacggaagataaagaatgcccccggg

SEQ ID NO: 130011 - DNA, 33 bp, Homo sapien
tatatcggaatcacacagagggtttgttggaac

SEQ ID NO: 130012 - DNA, 33 bp, Homo sapien
tatatcggaatcacacggagggtttgttggaac

SEQ ID NO: 130013 - DNA, 33 bp, Homo sapien
gggagccttgtttccacgtcatgcaagaacacc

SEQ ID NO: 130014 - DNA, 33 bp, Homo sapien
gggagccttgtttccatgtcatgcaagaacacc

SEQ ID NO: 130015 - DNA, 33 bp, Homo sapien
caacaccagaaaaacaagaattacaaaatctta

SEQ ID NO: 130016 - DNA, 33 bp, Homo sapien
caacaccagaaaaacatgaattacaaaatctta

SEQ ID NO: 130017 - DNA, 33 bp, Homo sapien
gaaaagaacaaaggaaaacagatgagtaaagtc

SEQ ID NO: 130018 - DNA, 33 bp, Homo sapien
gaaaagaacaaaggaatacagatgagtaaagtc

SEQ ID NO: 130019 - DNA, 33 bp, Homo sapien
caatacaaggacttcaagacatgttaactctga

SEQ ID NO: 130020 - DNA, 33 bp, Homo sapien
caatacaaggacttcaggacatgttaactctga

SEQ ID NO: 130021 - DNA, 33 bp, Homo sapien
ctatgtccttttgccaatgagtttagtccactt

SEQ ID NO: 130022 - DNA, 33 bp, Homo sapien
ctatgtccttttgccagtgagtttagtccactt

SEQ ID NO: 130023 - DNA, 33 bp, Homo sapien
ggctgtgttttcttccagaggctcgagggataa

SEQ ID NO: 130024 - DNA, 33 bp, Homo sapien
ggctgtgttttcttccggaggctcgagggataa

SEQ ID NO: 130025 - DNA, 33 bp, Homo sapien
atagatatggtaaataataggtagatgtagtat

SEQ ID NO: 130026 - DNA, 33 bp, Homo sapien
atagatatggtaaatagtaggtagatgtagtat

SEQ ID NO: 130027 - DNA, 33 bp, Homo sapien
atttaaagggatgctacatactgtaaagcagtg

SEQ ID NO: 130028 - DNA, 33 bp, Homo sapien
atttaaagggatgctatatactgtaaagcagtg

SEQ ID NO: 130029 - DNA, 33 bp, Homo sapien
ctttacaaccactacaatctttccatttgagca

SEQ ID NO: 130030 - DNA, 33 bp, Homo sapien
ctttacaaccactacagtctttccatttgagca

SEQ ID NO: 130031 - DNA, 33 bp, Homo sapien
ctcctgaaaaccaacactgggttgcaaaaaaag

SEQ ID NO: 130032 - DNA, 33 bp, Homo sapien
ctcctgaaaaccaacattgggttgcaaaaaaag

SEQ ID NO: 130033 - DNA, 33 bp, Homo sapien
tctcaaattttaacacacattggaataatctga

SEQ ID NO: 130034 - DNA, 33 bp, Homo sapien
tctcaaattttaacacgcattggaataatctga

SEQ ID NO: 130035 - DNA, 33 bp, Homo sapien
ggtaaagcagcccagacaaggcgaagctaaata

SEQ ID NO: 130036 - DNA, 33 bp, Homo sapien
ggtaaagcagcccagagaaggcgaagctaaata

SEQ ID NO: 130037 - DNA, 33 bp, Homo sapien
acctttcagctctctacgtcaaagaaggggaac

SEQ ID NO: 130038 - DNA, 33 bp, Homo sapien
acctttcagctctctatgtcaaagaaggggaac

SEQ ID NO: 130039 - DNA, 33 bp, Homo sapien
tttctctgatgtcctcaatgtccatttgctcag

SEQ ID NO: 130040 - DNA, 33 bp, Homo sapien
tttctctgatgtcctcgatgtccatttgctcag

SEQ ID NO: 130041 - DNA, 33 bp, Homo sapien
cagtggggaatacagaaaacagacaagcaaaca

SEQ ID NO: 130042 - DNA, 33 bp, Homo sapien
cagtggggaatacagacaacagacaagcaaaca

SEQ ID NO: 130043 - DNA, 33 bp, Homo sapien
tgagggccctggctcacgttgctttgggtaatt

SEQ ID NO: 130044 - DNA, 33 bp, Homo sapien
tgagggccctggctcatgttgctttgggtaatt

SEQ ID NO: 130045 - DNA, 33 bp, Homo sapien
cagcctatccagatccaagtctcccaacctggc

SEQ ID NO: 130046 - DNA, 33 bp, Homo sapien
cagcctatccagatcccagtctcccaacctggc

SEQ ID NO: 130047 - DNA, 33 bp, Homo sapien
tactgcatacccagcactattccccacagagca

SEQ ID NO: 130048 - DNA, 33 bp, Homo sapien
tactgcatacccagcattattccccacagagca

SEQ ID NO: 130049 - DNA, 33 bp, Homo sapien
tggagctgatgtttgcagaacagccggaaatga

SEQ ID NO: 130050 - DNA, 33 bp, Homo sapien
tggagctgatgtttgccgaacagccggaaatga

SEQ ID NO: 130051 - DNA, 33 bp, Homo sapien
actttagcattgaaaacattcaagtccaattcc

SEQ ID NO: 130052 - DNA, 33 bp, Homo sapien
actttagcattgaaaagattcaagtccaattcc

SEQ ID NO: 130053 - DNA, 33 bp, Homo sapien
aaacaaatgggaatccaagtcatattttcaaga

SEQ ID NO: 130054 - DNA, 33 bp, Homo sapien
aaacaaatgggaatcccagtcatattttcaaga

SEQ ID NO: 130055 - DNA, 33 bp, Homo sapien
ctctctacaagctccacaagcaaactgtaaaga

SEQ ID NO: 130056 - DNA, 33 bp, Homo sapien
ctctctacaagctccataagcaaactgtaaaga

SEQ ID NO: 130057 - DNA, 33 bp, Homo sapien
tcatgatgacagcatacaacactccctccacac

SEQ ID NO: 130058 - DNA, 33 bp, Homo sapien
tcatgatgacagcatataacactccctccacac

SEQ ID NO: 130059 - DNA, 33 bp, Homo sapien
tctgccagttggaaagacaaaaacaggaagctt

SEQ ID NO: 130060 - DNA, 33 bp, Homo sapien
tctgccagttggaaaggcaaaaacaggaagctt

SEQ ID NO: 130061 - DNA, 33 bp, Homo sapien
aaagtgagcatgggacaagatgatatctagggt

SEQ ID NO: 130062 - DNA, 33 bp, Homo sapien
aaagtgagcatgggaccagatgatatctagggt

SEQ ID NO: 130063 - DNA, 33 bp, Homo sapien
aagtctagaatcagaacgggcagaacaagaaaa

SEQ ID NO: 130064 - DNA, 33 bp, Homo sapien
aagtctagaatcagaatgggcagaacaagaaaa

SEQ ID NO: 130065 - DNA, 33 bp, Homo sapien
cacattaaagtgatagaatcttgaaaggttttc

SEQ ID NO: 130066 - DNA, 33 bp, Homo sapien
cacattaaagtgatagtatcttgaaaggttttc

SEQ ID NO: 130067 - DNA, 33 bp, Homo sapien
cctgaaacaaaatttaactgtggatgtttcagt

SEQ ID NO: 130068 - DNA, 33 bp, Homo sapien
cctgaaacaaaatttagctgtggatgtttcagt

SEQ ID NO: 130069 - DNA, 33 bp, Homo sapien
gctactgttttaacaacgaccacgctatattct

SEQ ID NO: 130070 - DNA, 33 bp, Homo sapien
gctactgttttaacaatgaccacgctatattct

SEQ ID NO: 130071 - DNA, 33 bp, Homo sapien
gcattttctaaaagccactcaggtgaatctgct

SEQ ID NO: 130072 - DNA, 33 bp, Homo sapien
gcattttctaaaagccgctcaggtgaatctgct

SEQ ID NO: 130073 - DNA, 33 bp, Homo sapien
ctgccttctggacagcacacaataaggctctcc

SEQ ID NO: 130074 - DNA, 33 bp, Homo sapien
ctgccttctggacagcgcacaataaggctctcc

SEQ ID NO: 130075 - DNA, 33 bp, Homo sapien
aatctaacagggcaataaaatcttaaagcttca

SEQ ID NO: 130076 - DNA, 33 bp, Homo sapien
aatctaacagggcaatcaaatcttaaagcttca

SEQ ID NO: 130077 - DNA, 33 bp, Homo sapien
aaatggtttcataaacgagctaacaaggaaaaa

SEQ ID NO: 130078 - DNA, 33 bp, Homo sapien
aaatggtttcataaactagctaacaaggaaaaa

SEQ ID NO: 130079 - DNA, 33 bp, Homo sapien
cataatattgctaagccctacccctgaaatggg

SEQ ID NO: 130080 - DNA, 33 bp, Homo sapien
cataatattgctaagctctacccctgaaatggg

SEQ ID NO: 130081 - DNA, 33 bp, Homo sapien
gaaaatgttatcaggaaagcaggattaaataag

SEQ ID NO: 130082 - DNA, 33 bp, Homo sapien
gaaaatgttatcaggagagcaggattaaataag

SEQ ID NO: 130083 - DNA, 33 bp, Homo sapien
ccctgccctaatcaccaagcagacaggcaacat

SEQ ID NO: 130084 - DNA, 33 bp, Homo sapien
ccctgccctaatcaccgagcagacaggcaacat

SEQ ID NO: 130085 - DNA, 33 bp, Homo sapien
ctattgcagtaggctaagtgagaaataatgaaa

SEQ ID NO: 130086 - DNA, 33 bp, Homo sapien
ctattgcagtaggctaggtgagaaataatgaaa

SEQ ID NO: 130087 - DNA, 33 bp, Homo sapien
aacctggatagtgtcagagaaaataagtgataa

SEQ ID NO: 130088 - DNA, 33 bp, Homo sapien
aacctggatagtgtcatagaaaataagtgataa

SEQ ID NO: 130089 - DNA, 33 bp, Homo sapien
tggcatcatgttgacactcagaacattttagat

SEQ ID NO: 130090 - DNA, 33 bp, Homo sapien
tggcatcatgttgacattcagaacattttagat

SEQ ID NO: 130091 - DNA, 33 bp, Homo sapien
ttcatttttggcaggaataccgcaaagtattgt

SEQ ID NO: 130092 - DNA, 33 bp, Homo sapien
ttcatttttggcaggagtaccgcaaagtattgt

SEQ ID NO: 130093 - DNA, 33 bp, Homo sapien
acacacacacacgaacagatgttcaacttctag

SEQ ID NO: 130094 - DNA, 33 bp, Homo sapien
acacacacacacgaacggatgttcaacttctag

SEQ ID NO: 130095 - DNA, 33 bp, Homo sapien
gggtcctgcctataaccccaggacttctgggag

SEQ ID NO: 130096 - DNA, 33 bp, Homo sapien
gggtcctgcctataactccaggacttctgggag

SEQ ID NO: 130097 - DNA, 33 bp, Homo sapien
ctctttaacatatctgaactaaagagaaataag

SEQ ID NO: 130098 - DNA, 33 bp, Homo sapien
ctctttaacatatctggactaaagagaaataag

SEQ ID NO: 130099 - DNA, 33 bp, Homo sapien
aacattaagtagattcaatcactcatagttttt

SEQ ID NO: 130100 - DNA, 33 bp, Homo sapien
aacattaagtagattccatcactcatagttttt

SEQ ID NO: 130101 - DNA, 33 bp, Homo sapien
gatcttgggagaagacagaacatgagcagaaaa

SEQ ID NO: 130102 - DNA, 33 bp, Homo sapien
gatcttgggagaagacggaacatgagcagaaaa

SEQ ID NO: 130103 - DNA, 33 bp, Homo sapien
cccactgaacatattaccttgcaaactaggcag

SEQ ID NO: 130104 - DNA, 33 bp, Homo sapien
cccactgaacatattatcttgcaaactaggcag

SEQ ID NO: 130105 - DNA, 33 bp, Homo sapien
ttactggaacactttacccaacaactgcaggat

SEQ ID NO: 130106 - DNA, 33 bp, Homo sapien
ttactggaacactttatccaacaactgcaggat

SEQ ID NO: 130107 - DNA, 33 bp, Homo sapien
ttgctagacagcagaactcttcaagcgggagaa

SEQ ID NO: 130108 - DNA, 33 bp, Homo sapien
ttgctagacagcagaagtcttcaagcgggagaa

SEQ ID NO: 130109 - DNA, 33 bp, Homo sapien
taaagaaaaacatggaagacttagcattcagag

SEQ ID NO: 130110 - DNA, 33 bp, Homo sapien
taaagaaaaacatggaggacttagcattcagag

SEQ ID NO: 130111 - DNA, 33 bp, Homo sapien
tagttcaccaactttgcagttctggaaccggca

SEQ ID NO: 130112 - DNA, 33 bp, Homo sapien
tagttcaccaactttggagttctggaaccggca

SEQ ID NO: 130113 - DNA, 33 bp, Homo sapien
gcagagatagcagaaagcaagaaaaaggttgga

SEQ ID NO: 130114 - DNA, 33 bp, Homo sapien
gcagagatagcagaaatcaagaaaaaggttgga

SEQ ID NO: 130115 - DNA, 33 bp, Homo sapien
gatttagtgcccatgacgatgatgaattattag

SEQ ID NO: 130116 - DNA, 33 bp, Homo sapien
gatttagtgcccatgatgatgatgaattattag

SEQ ID NO: 130117 - DNA, 33 bp, Homo sapien
ccttgcagcctgattccagcattatggaggatc

SEQ ID NO: 130118 - DNA, 33 bp, Homo sapien
ccttgcagcctgattctagcattatggaggatc

SEQ ID NO: 130119 - DNA, 33 bp, Homo sapien
ggtcctgtggagtggaagtgatgctcaaagatg

SEQ ID NO: 130120 - DNA, 33 bp, Homo sapien
ggtcctgtggagtggaggtgatgctcaaagatg

SEQ ID NO: 130121 - DNA, 33 bp, Homo sapien
tcctgcagcttggataccctgtgatagcctcac

SEQ ID NO: 130122 - DNA, 33 bp, Homo sapien
tcctgcagcttggatagcctgtgatagcctcac

SEQ ID NO: 130123 - DNA, 33 bp, Homo sapien
aggcgtatgattcatgcagattcaatacacatt

SEQ ID NO: 130124 - DNA, 33 bp, Homo sapien
aggcgtatgattcatgtagattcaatacacatt

SEQ ID NO: 130125 - DNA, 33 bp, Homo sapien
gctgggacacagaaatgaagacatcgaacaccc

SEQ ID NO: 130126 - DNA, 33 bp, Homo sapien
gctgggacacagaaattaagacatcgaacaccc

SEQ ID NO: 130127 - DNA, 33 bp, Homo sapien
gagtgccacctacacacctgacactattttggg

SEQ ID NO: 130128 - DNA, 33 bp, Homo sapien
gagtgccacctacacatctgacactattttggg

SEQ ID NO: 130129 - DNA, 33 bp, Homo sapien
agggacctgaggccgacctgtcccatcctttct

SEQ ID NO: 130130 - DNA, 33 bp, Homo sapien
agggacctgaggccgatctgtcccatcctttct

SEQ ID NO: 130131 - DNA, 33 bp, Homo sapien
cggaggagttggaatcggagttaggcctgaagg

SEQ ID NO: 130132 - DNA, 33 bp, Homo sapien
cggaggagttggaatctgagttaggcctgaagg

SEQ ID NO: 130133 - DNA, 33 bp, Homo sapien
actttctgttattacaatctacgttccatcaag

SEQ ID NO: 130134 - DNA, 33 bp, Homo sapien
actttctgttattacagtctacgttccatcaag

SEQ ID NO: 130135 - DNA, 33 bp, Homo sapien
ctctctccagctaaaagatcaggaaaagggcag

SEQ ID NO: 130136 - DNA, 33 bp, Homo sapien
ctctctccagctaaaatatcaggaaaagggcag

SEQ ID NO: 130137 - DNA, 33 bp, Homo sapien
cattaccaggccattcactcaaacatgaccacc

SEQ ID NO: 130138 - DNA, 33 bp, Homo sapien
cattaccaggccattcgctcaaacatgaccacc

SEQ ID NO: 130139 - DNA, 33 bp, Homo sapien
ctcgttctttttcacggccatgtagattccata

SEQ ID NO: 130140 - DNA, 33 bp, Homo sapien
ctcgttctttttcacgtccatgtagattccata

SEQ ID NO: 130141 - DNA, 33 bp, Homo sapien
cttagcaacacaaggaacaaactactgatacag

SEQ ID NO: 130142 - DNA, 33 bp, Homo sapien
cttagcaacacaaggatcaaactactgatacag

SEQ ID NO: 130143 - DNA, 33 bp, Homo sapien
acgtcctatttacataaaagtcctcaaaggtgt

SEQ ID NO: 130144 - DNA, 33 bp, Homo sapien
acgtcctatttacatagaagtcctcaaaggtgt

SEQ ID NO: 130145 - DNA, 33 bp, Homo sapien
tttatgtaaaataaaacggggcttgacttagga

SEQ ID NO: 130146 - DNA, 33 bp, Homo sapien
tttatgtaaaataaaatggggcttgacttagga

SEQ ID NO: 130147 - DNA, 33 bp, Homo sapien
ttataacttgcagcataacaatgttttttagga

SEQ ID NO: 130148 - DNA, 33 bp, Homo sapien
ttataacttgcagcattacaatgttttttagga

SEQ ID NO: 130149 - DNA, 33 bp, Homo sapien
tgagacacaattaacactgacatacaatttttt

SEQ ID NO: 130150 - DNA, 33 bp, Homo sapien
tgagacacaattaacagtgacatacaatttttt

SEQ ID NO: 130151 - DNA, 33 bp, Homo sapien
aagacacttaaaaatcacggagctagattaaca

SEQ ID NO: 130152 - DNA, 33 bp, Homo sapien
aagacacttaaaaatcccggagctagattaaca

SEQ ID NO: 130153 - DNA, 33 bp, Homo sapien
aacagactccagcgaaaagagagtactcagtaa

SEQ ID NO: 130154 - DNA, 33 bp, Homo sapien
aacagactccagcgaacagagagtactcagtaa

SEQ ID NO: 130155 - DNA, 33 bp, Homo sapien
gtacatccgactgtgccgatctcacagatgagc

SEQ ID NO: 130156 - DNA, 33 bp, Homo sapien
gtacatccgactgtgctgatctcacagatgagc

SEQ ID NO: 130157 - DNA, 33 bp, Homo sapien
aggagcatgatagtaaaccaggtgcatctatac

SEQ ID NO: 130158 - DNA, 33 bp, Homo sapien
aggagcatgatagtaacccaggtgcatctatac

SEQ ID NO: 130159 - DNA, 33 bp, Homo sapien
caattcttcatgtgagaagctgaaaagtcacat

SEQ ID NO: 130160 - DNA, 33 bp, Homo sapien
caattcttcatgtgaggagctgaaaagtcacat

SEQ ID NO: 130161 - DNA, 33 bp, Homo sapien
ggtttctatactgaataagttaactgtcactac

SEQ ID NO: 130162 - DNA, 33 bp, Homo sapien
ggtttctatactgaatcagttaactgtcactac

SEQ ID NO: 130163 - DNA, 33 bp, Homo sapien
gagtcccccagcccggaagatgattttgttgat

SEQ ID NO: 130164 - DNA, 33 bp, Homo sapien
gagtcccccagcccggcagatgattttgttgat

SEQ ID NO: 130165 - DNA, 33 bp, Homo sapien
aggggccaggttttcccatataaacatccacac

SEQ ID NO: 130166 - DNA, 33 bp, Homo sapien
aggggccaggttttcctatataaacatccacac

SEQ ID NO: 130167 - DNA, 33 bp, Homo sapien
ttaccgagcatacactaacaatgtgccaggccc

SEQ ID NO: 130168 - DNA, 33 bp, Homo sapien
ttaccgagcatacactgacaatgtgccaggccc

SEQ ID NO: 130169 - DNA, 33 bp, Homo sapien
aggcagagagatccccaaagaaacagagaccaa

SEQ ID NO: 130170 - DNA, 33 bp, Homo sapien
aggcagagagatccccgaagaaacagagaccaa

SEQ ID NO: 130171 - DNA, 33 bp, Homo sapien
ttgtgtgtaccctccaggagatttgtttggctt

SEQ ID NO: 130172 - DNA, 33 bp, Homo sapien
ttgtgtgtaccctccatgagatttgtttggctt

SEQ ID NO: 130173 - DNA, 33 bp, Homo sapien
ttttctcttgaagacacatcctttcacttttgt

SEQ ID NO: 130174 - DNA, 33 bp, Homo sapien
ttttctcttgaagacatatcctttcacttttgt

SEQ ID NO: 130175 - DNA, 33 bp, Homo sapien
ctttctttcactcttacgacattttttcctgcc

SEQ ID NO: 130176 - DNA, 33 bp, Homo sapien
ctttctttcactcttatgacattttttcctgcc

SEQ ID NO: 130177 - DNA, 33 bp, Homo sapien
gactctgtctcagggtaaaaaaacaagtataca

SEQ ID NO: 130178 - DNA, 33 bp, Homo sapien
gactctgtctcagggtgaaaaaacaagtataca

SEQ ID NO: 130179 - DNA, 33 bp, Homo sapien
tggtcacgtgtgcttaaatactgaaataaaccc

SEQ ID NO: 130180 - DNA, 33 bp, Homo sapien
tggtcacgtgtgcttacatactgaaataaaccc

SEQ ID NO: 130181 - DNA, 33 bp, Homo sapien
tcacctgccaccagaacgtggtctcagaatagc

SEQ ID NO: 130182 - DNA, 33 bp, Homo sapien
tcacctgccaccagaatgtggtctcagaatagc

SEQ ID NO: 130183 - DNA, 33 bp, Homo sapien
ggatgcaaacccaggacgactggcttggccgcc

SEQ ID NO: 130184 - DNA, 33 bp, Homo sapien
ggatgcaaacccaggatgactggcttggccgcc

SEQ ID NO: 130185 - DNA, 33 bp, Homo sapien
agttaagagagttgtccaaagtggcatctagca

SEQ ID NO: 130186 - DNA, 33 bp, Homo sapien
agttaagagagttgtctaaagtggcatctagca

SEQ ID NO: 130187 - DNA, 33 bp, Homo sapien
ggccctggagggaagcagaggataatgggtttt

SEQ ID NO: 130188 - DNA, 33 bp, Homo sapien
ggccctggagggaagccgaggataatgggtttt

SEQ ID NO: 130189 - DNA, 33 bp, Homo sapien
aaaaaatcaaacctgaatataatgacatctgta

SEQ ID NO: 130190 - DNA, 33 bp, Homo sapien
aaaaaatcaaacctgagtataatgacatctgta

SEQ ID NO: 130191 - DNA, 33 bp, Homo sapien
ggtacttcttcatagcagcgtaagaatggacta

SEQ ID NO: 130192 - DNA, 33 bp, Homo sapien
ggtacttcttcatagctgcgtaagaatggacta

SEQ ID NO: 130193 - DNA, 33 bp, Homo sapien
agtgatctgagagagcaagcaacgccaaagcca

SEQ ID NO: 130194 - DNA, 33 bp, Homo sapien
agtgatctgagagagcgagcaacgccaaagcca

SEQ ID NO: 130195 - DNA, 33 bp, Homo sapien
atagtgaaaaggaccacaatgcctctctgtatc

SEQ ID NO: 130196 - DNA, 33 bp, Homo sapien
atagtgaaaaggaccataatgcctctctgtatc

SEQ ID NO: 130197 - DNA, 33 bp, Homo sapien
ggggacttgccgcctaacatcctaatgtgcaac

SEQ ID NO: 130198 - DNA, 33 bp, Homo sapien
ggggacttgccgcctagcatcctaatgtgcaac

SEQ ID NO: 130199 - DNA, 33 bp, Homo sapien
aaatccaatgctggtaaagccaggatccaaaca

SEQ ID NO: 130200 - DNA, 33 bp, Homo sapien
aaatccaatgctggtagagccaggatccaaaca

SEQ ID NO: 130201 - DNA, 33 bp, Homo sapien
ctatatgtgtctttgactaataagagaatcact

SEQ ID NO: 130202 - DNA, 33 bp, Homo sapien
ctatatgtgtctttgagtaataagagaatcact

SEQ ID NO: 130203 - DNA, 33 bp, Homo sapien
tgttggaaaaacagaactgtctgacttattgtg

SEQ ID NO: 130204 - DNA, 33 bp, Homo sapien
tgttggaaaaacagaattgtctgacttattgtg

SEQ ID NO: 130205 - DNA, 33 bp, Homo sapien
agacctcgatgcaatcaaacactggggtgccaa

SEQ ID NO: 130206 - DNA, 33 bp, Homo sapien
agacctcgatgcaatcgaacactggggtgccaa

SEQ ID NO: 130207 - DNA, 33 bp, Homo sapien
ctcctcttcttcctaacaccatctcatttctct

SEQ ID NO: 130208 - DNA, 33 bp, Homo sapien
ctcctcttcttcctaataccatctcatttctct

SEQ ID NO: 130209 - DNA, 33 bp, Homo sapien
cacgaaccaaaggagaagcatgagccagagaga

SEQ ID NO: 130210 - DNA, 33 bp, Homo sapien
cacgaaccaaaggagacgcatgagccagagaga

SEQ ID NO: 130211 - DNA, 33 bp, Homo sapien
tgatccattcctatgaacctgattcagaccatt

SEQ ID NO: 130212 - DNA, 33 bp, Homo sapien
tgatccattcctatgaccctgattcagaccatt

SEQ ID NO: 130213 - DNA, 33 bp, Homo sapien
tggtctctgcgataaaccatgaaaccacttaga

SEQ ID NO: 130214 - DNA, 33 bp, Homo sapien
tggtctctgcgataaatcatgaaaccacttaga

SEQ ID NO: 130215 - DNA, 33 bp, Homo sapien
taccaagcctggatataagctgagatgtagcat

SEQ ID NO: 130216 - DNA, 33 bp, Homo sapien
taccaagcctggatattagctgagatgtagcat

SEQ ID NO: 130217 - DNA, 33 bp, Homo sapien
tgtggcagggcccttacggaactcagtggctca

SEQ ID NO: 130218 - DNA, 33 bp, Homo sapien
tgtggcagggcccttatggaactcagtggctca

SEQ ID NO: 130219 - DNA, 33 bp, Homo sapien
tcggcgattgacacagaagtaggttacagtctg

SEQ ID NO: 130220 - DNA, 33 bp, Homo sapien
tcggcgattgacacaggagtaggttacagtctg

SEQ ID NO: 130221 - DNA, 33 bp, Homo sapien
gttcaccgcaaagtacaaagagccagagacgtg

SEQ ID NO: 130222 - DNA, 33 bp, Homo sapien
gttcaccgcaaagtaccaagagccagagacgtg

SEQ ID NO: 130223 - DNA, 33 bp, Homo sapien
tcaactccatgaaacaccagatcttcaaggagt

SEQ ID NO: 130224 - DNA, 33 bp, Homo sapien
tcaactccatgaaacatcagatcttcaaggagt

SEQ ID NO: 130225 - DNA, 33 bp, Homo sapien
tattttccacaatccacgcttttcattgccatt

SEQ ID NO: 130226 - DNA, 33 bp, Homo sapien
tattttccacaatccatgcttttcattgccatt

SEQ ID NO: 130227 - DNA, 33 bp, Homo sapien
attttggctcaagactaaagacacagaaggcga

SEQ ID NO: 130228 - DNA, 33 bp, Homo sapien
attttggctcaagactgaagacacagaaggcga

SEQ ID NO: 130229 - DNA, 33 bp, Homo sapien
gtgccatcgctttaaacgtggggaatagaagaa

SEQ ID NO: 130230 - DNA, 33 bp, Homo sapien
gtgccatcgctttaaatgtggggaatagaagaa

SEQ ID NO: 130231 - DNA, 33 bp, Homo sapien
gtagaaatccccctcccggaacagcagcgtggt

SEQ ID NO: 130232 - DNA, 33 bp, Homo sapien
gtagaaatccccctcctggaacagcagcgtggt

SEQ ID NO: 130233 - DNA, 33 bp, Homo sapien
tgaagctgagcctgtacccggagatgctgactc

SEQ ID NO: 130234 - DNA, 33 bp, Homo sapien
tgaagctgagcctgtatccggagatgctgactc

SEQ ID NO: 130235 - DNA, 33 bp, Homo sapien
ggccatgagatggggacagagtttgcaatggtg

SEQ ID NO: 130236 - DNA, 33 bp, Homo sapien
ggccatgagatggggagagagtttgcaatggtg

SEQ ID NO: 130237 - DNA, 33 bp, Homo sapien
tgcctctcttgtccacacttactgagtgctagt

SEQ ID NO: 130238 - DNA, 33 bp, Homo sapien
tgcctctcttgtccacgcttactgagtgctagt

SEQ ID NO: 130239 - DNA, 33 bp, Homo sapien; identical to SEQ ID NO: 130237

SEQ ID NO: 130240 - DNA, 33 bp, Homo sapien; identical to SEQ ID NO: 130238

SEQ ID NO: 130241 - DNA, 33 bp, Homo sapien
ctgtccagctttcacaatggctcctacttatca

SEQ ID NO: 130242 - DNA, 33 bp, Homo sapien
ctgtccagctttcacagtggctcctacttatca

SEQ ID NO: 130243 - DNA, 33 bp, Homo sapien
tggactcaaagttctacagcaaaggctgtccac

SEQ ID NO: 130244 - DNA, 33 bp, Homo sapien
tggactcaaagttctatagcaaaggctgtccac

SEQ ID NO: 130245 - DNA, 33 bp, Homo sapien
tttctgggtggtcttgaacaagttctttctcta

SEQ ID NO: 130246 - DNA, 33 bp, Homo sapien
tttctgggtggtcttggacaagttctttctcta

SEQ ID NO: 130247 - DNA, 33 bp, Homo sapien
gtactccaaagagagagagtgctaaaatgaatt

SEQ ID NO: 130248 - DNA, 33 bp, Homo sapien
gtactccaaagagagatagtgctaaaatgaatt

SEQ ID NO: 130249 - DNA, 33 bp, Homo sapien
ggtggatccctctgacaataaaaacacaagggg

SEQ ID NO: 130250 - DNA, 33 bp, Homo sapien
ggtggatccctctgacgataaaaacacaagggg

SEQ ID NO: 130251 - DNA, 33 bp, Homo sapien
atcctttgaacaatgcacatatttcttctgtga

SEQ ID NO: 130252 - DNA, 33 bp, Homo sapien
atcctttgaacaatgcgcatatttcttctgtga

SEQ ID NO: 130253 - DNA, 33 bp, Homo sapien
taagcacaggaggaacagcatacagcagatgta

SEQ ID NO: 130254 - DNA, 33 bp, Homo sapien
taagcacaggaggaacggcatacagcagatgta

SEQ ID NO: 130255 - DNA, 33 bp, Homo sapien
attagaccaaagaggaaggagagaattctgagc

SEQ ID NO: 130256 - DNA, 33 bp, Homo sapien
attagaccaaagaggagggagagaattctgagc

SEQ ID NO: 130257 - DNA, 33 bp, Homo sapien
gggaggctgcctaagacgcacacggagttaagg

SEQ ID NO: 130258 - DNA, 33 bp, Homo sapien
gggaggctgcctaagatgcacacggagttaagg

SEQ ID NO: 130259 - DNA, 33 bp, Homo sapien
atgcaataatgagtcccatactgtttttcctca

SEQ ID NO: 130260 - DNA, 33 bp, Homo sapien
atgcaataatgagtcctatactgtttttcctca

SEQ ID NO: 130261 - DNA, 33 bp, Homo sapien
gtgtagggattggaaaataactcagactttgta

SEQ ID NO: 130262 - DNA, 33 bp, Homo sapien
gtgtagggattggaaagtaactcagactttgta

SEQ ID NO: 130263 - DNA, 33 bp, Homo sapien
ctcccaaacaaaatgacccttgaacttctgtac

SEQ ID NO: 130264 - DNA, 33 bp, Homo sapien
ctcccaaacaaaatgagccttgaacttctgtac

SEQ ID NO: 130265 - DNA, 33 bp, Homo sapien
aggatgagatcactaaaggtttggaagtacaga

SEQ ID NO: 130266 - DNA, 33 bp, Homo sapien
aggatgagatcactaagggtttggaagtacaga

SEQ ID NO: 130267 - DNA, 33 bp, Homo sapien
acctcttttgtggagcaaagtaaatgaggtaat

SEQ ID NO: 130268 - DNA, 33 bp, Homo sapien
acctcttttgtggagcgaagtaaatgaggtaat

SEQ ID NO: 130269 - DNA, 33 bp, Homo sapien
tgataaattattaaaacgactctttcatccagt

SEQ ID NO: 130270 - DNA, 33 bp, Homo sapien
tgataaattattaaaatgactctttcatccagt

SEQ ID NO: 130271 - DNA, 33 bp, Homo sapien
cctctctgagaaatcacgtgccattaaggaagc

SEQ ID NO: 130272 - DNA, 33 bp, Homo sapien
cctctctgagaaatcatgtgccattaaggaagc

SEQ ID NO: 130273 - DNA, 33 bp, Homo sapien
gaatcccctaagcccaccagagtgactgtcaag

SEQ ID NO: 130274 - DNA, 33 bp, Homo sapien
gaatcccctaagcccatcagagtgactgtcaag

SEQ ID NO: 130275 - DNA, 33 bp, Homo sapien
tttaattttccttataactttgcaaataccaac

SEQ ID NO: 130276 - DNA, 33 bp, Homo sapien
tttaattttccttatacctttgcaaataccaac

SEQ ID NO: 130277 - DNA, 33 bp, Homo sapien
ccccagaaatttataccagcttcatcccctcaa

SEQ ID NO: 130278 - DNA, 33 bp, Homo sapien
ccccagaaatttatacgagcttcatcccctcaa

SEQ ID NO: 130279 - DNA, 33 bp, Homo sapien
aattggatgtgctaaacgctgttcttcctaagc

SEQ ID NO: 130280 - DNA, 33 bp, Homo sapien
aattggatgtgctaaatgctgttcttcctaagc

SEQ ID NO: 130281 - DNA, 33 bp, Homo sapien
agttatattgagaatacagaacactgttcatac

SEQ ID NO: 130282 - DNA, 33 bp, Homo sapien
agttatattgagaatagagaacactgttcatac

SEQ ID NO: 130283 - DNA, 33 bp, Homo sapien
caggaagagccatagaaagaaaagagagaaaca

SEQ ID NO: 130284 - DNA, 33 bp, Homo sapien
caggaagagccatagagagaaaagagagaaaca

SEQ ID NO: 130285 - DNA, 33 bp, Homo sapien
caccaaaatgcctcataacgtttactaaatagt

SEQ ID NO: 130286 - DNA, 33 bp, Homo sapien
caccaaaatgcctcatgacgtttactaaatagt

SEQ ID NO: 130287 - DNA, 33 bp, Homo sapien
agacttagctcctcaccacagaaaagactgagt

SEQ ID NO: 130288 - DNA, 33 bp, Homo sapien
agacttagctcctcactacagaaaagactgagt

SEQ ID NO: 130289 - DNA, 33 bp, Homo sapien
tgagatagggtatacaccattcgctacccactt

SEQ ID NO: 130290 - DNA, 33 bp, Homo sapien
tgagatagggtatacatcattcgctacccactt

SEQ ID NO: 130291 - DNA, 33 bp, Homo sapien
ctccgaaagaaaaacaagaaccaacagacagag

SEQ ID NO: 130292 - DNA, 33 bp, Homo sapien
ctccgaaagaaaaacaggaaccaacagacagag

SEQ ID NO: 130293 - DNA, 33 bp, Homo sapien
cctgcctgtttgtcacaatgaaatctggttgag

SEQ ID NO: 130294 - DNA, 33 bp, Homo sapien
cctgcctgtttgtcacgatgaaatctggttgag

SEQ ID NO: 130295 - DNA, 33 bp, Homo sapien
tacaatggtggacccacaagactataatagagc

SEQ ID NO: 130296 - DNA, 33 bp, Homo sapien
tacaatggtggacccagaagactataatagagc

SEQ ID NO: 130297 - DNA, 33 bp, Homo sapien
ctctggatgagtcaataaatgagtgttgagtga

SEQ ID NO: 130298 - DNA, 33 bp, Homo sapien
ctctggatgagtcaatgaatgagtgttgagtga

SEQ ID NO: 130299 - DNA, 33 bp, Homo sapien
ttgcaagctttctcaacaacctgtcttaatgtt

SEQ ID NO: 130300 - DNA, 33 bp, Homo sapien
ttgcaagctttctcaataacctgtcttaatgtt

SEQ ID NO: 130301 - DNA, 33 bp, Homo sapien
aagtatcatcatcaagaacaaggaataaattct

SEQ ID NO: 130302 - DNA, 33 bp, Homo sapien
aagtatcatcatcaaggacaaggaataaattct

SEQ ID NO: 130303 - DNA, 33 bp, Homo sapien
ttgttttgccgatgaagaaatgggtcaccaaga

SEQ ID NO: 130304 - DNA, 33 bp, Homo sapien
ttgttttgccgatgaataaatgggtcaccaaga

SEQ ID NO: 130305 - DNA, 33 bp, Homo sapien
agctatatagagaaaaagtggcatagctaggat

SEQ ID NO: 130306 - DNA, 33 bp, Homo sapien
agctatatagagaaaaggtggcatagctaggat

SEQ ID NO: 130307 - DNA, 33 bp, Homo sapien
tggctaactgtactcaaacactcgtagatgact

SEQ ID NO: 130308 - DNA, 33 bp, Homo sapien
tggctaactgtactcatacactcgtagatgact

SEQ ID NO: 130309 - DNA, 33 bp, Homo sapien
ttataagcttccccaccgactctgacacaggta

SEQ ID NO: 130310 - DNA, 33 bp, Homo sapien
ttataagcttccccactgactctgacacaggta

SEQ ID NO: 130311 - DNA, 33 bp, Homo sapien
cctgtctcacactacaataggaatccctttacc

SEQ ID NO: 130312 - DNA, 33 bp, Homo sapien
cctgtctcacactacagtaggaatccctttacc

SEQ ID NO: 130313 - DNA, 33 bp, Homo sapien
gcaacagggaaaagtcagaccagctgatacggg

SEQ ID NO: 130314 - DNA, 33 bp, Homo sapien
gcaacagggaaaagtccgaccagctgatacggg

SEQ ID NO: 130315 - DNA, 33 bp, Homo sapien
catggctgaaggtgggaatgaatactgctctag

SEQ ID NO: 130316 - DNA, 33 bp, Homo sapien
catggctgaaggtggggatgaatactgctctag

SEQ ID NO: 130317 - DNA, 33 bp, Homo sapien
cttctggggcttggccaacaggaagttatctcc

SEQ ID NO: 130318 - DNA, 33 bp, Homo sapien
cttctggggcttggccgacaggaagttatctcc

SEQ ID NO: 130319 - DNA, 33 bp, Homo sapien
taaaagtagagaaggacagaagaatgtaaagct

SEQ ID NO: 130320 - DNA, 33 bp, Homo sapien
taaaagtagagaaggatagaagaatgtaaagct

SEQ ID NO: 130321 - DNA, 33 bp, Homo sapien
cagttattttgtgtgagatttttatggaacttt

SEQ ID NO: 130322 - DNA, 33 bp, Homo sapien
cagttattttgtgtgatatttttatggaacttt

SEQ ID NO: 130323 - DNA, 33 bp, Homo sapien
aaatccccccaacaagactcagatgcctcaggt

SEQ ID NO: 130324 - DNA, 33 bp, Homo sapien
aaatccccccaacaaggctcagatgcctcaggt

SEQ ID NO: 130325 - DNA, 33 bp, Homo sapien
aggtggtacgtggccacgaacaggcaaggcctg

SEQ ID NO: 130326 - DNA, 33 bp, Homo sapien
aggtggtacgtggccatgaacaggcaaggcctg

SEQ ID NO: 130327 - DNA, 33 bp, Homo sapien
cagactaagtgaagtgcagggttctaagagagt

SEQ ID NO: 130328 - DNA, 33 bp, Homo sapien
cagactaagtgaagtggagggttctaagagagt

SEQ ID NO: 130329 - DNA, 33 bp, Homo sapien
gacagggattaatcgactatggttcctgacctc

SEQ ID NO: 130330 - DNA, 33 bp, Homo sapien
gacagggattaatcgagtatggttcctgacctc

SEQ ID NO: 130331 - DNA, 33 bp, Homo sapien
tcaagactaaaatacacagattacagcatggtg

SEQ ID NO: 130332 - DNA, 33 bp, Homo sapien
tcaagactaaaatacatagattacagcatggtg

SEQ ID NO: 130333 - DNA, 33 bp, Homo sapien
catggtgtagcagaaagggcactagatttgggg

SEQ ID NO: 130334 - DNA, 33 bp, Homo sapien
catggtgtagcagaaatggcactagatttgggg

SEQ ID NO: 130335 - DNA, 33 bp, Homo sapien
aattggttgcttaaaccgaggagcctatatgac

SEQ ID NO: 130336 - DNA, 33 bp, Homo sapien
aattggttgcttaaactgaggagcctatatgac

SEQ ID NO: 130337 - DNA, 33 bp, Homo sapien
tttatcttcctgaccaagagttttctggaatag

SEQ ID NO: 130338 - DNA, 33 bp, Homo sapien
tttatcttcctgaccaggagttttctggaatag

SEQ ID NO: 130339 - DNA, 33 bp, Homo sapien
ccagacttcaaaactcccataaatattctaact

SEQ ID NO: 130340 - DNA, 33 bp, Homo sapien
ccagacttcaaaactctcataaatattctaact

SEQ ID NO: 130341 - DNA, 33 bp, Homo sapien
ccattctaagatgctaccaagagtctgtttaga

SEQ ID NO: 130342 - DNA, 33 bp, Homo sapien
ccattctaagatgctatcaagagtctgtttaga

SEQ ID NO: 130343 - DNA, 33 bp, Homo sapien
gagtgagtagtaaaagcctcctgtagtactaag

SEQ ID NO: 130344 - DNA, 33 bp, Homo sapien
gagtgagtagtaaaaggctcctgtagtactaag

SEQ ID NO: 130345 - DNA, 33 bp, Homo sapien
aaggcttctagtgaaacattatgtcagacctcc

SEQ ID NO: 130346 - DNA, 33 bp, Homo sapien
aaggcttctagtgaaatattatgtcagacctcc

SEQ ID NO: 130347 - DNA, 33 bp, Homo sapien
ggcaggggaagattcaaaagactgctgtgatga

SEQ ID NO: 130348 - DNA, 33 bp, Homo sapien
ggcaggggaagattcagaagactgctgtgatga

SEQ ID NO: 130349 - DNA, 33 bp, Homo sapien
gcaggctctcatttcagggtaacacaaaaaata

SEQ ID NO: 130350 - DNA, 33 bp, Homo sapien
gcaggctctcatttcatggtaacacaaaaaata

SEQ ID NO: 130351 - DNA, 33 bp, Homo sapien
cctcttcaatatggaaagaagaacagttttata

SEQ ID NO: 130352 - DNA, 33 bp, Homo sapien
cctcttcaatatggaaggaagaacagttttata

SEQ ID NO: 130353 - DNA, 33 bp, Homo sapien
agactgtgcaacaagacgtcattggcagatatt

SEQ ID NO: 130354 - DNA, 33 bp, Homo sapien
agactgtgcaacaagatgtcattggcagatatt

SEQ ID NO: 130355 - DNA, 33 bp, Homo sapien
tgttacaatctttgagaaaattaggtataaaaa

SEQ ID NO: 130356 - DNA, 33 bp, Homo sapien
tgttacaatctttgagcaaattaggtataaaaa

SEQ ID NO: 130357 - DNA, 33 bp, Homo sapien
aaacagcaggagcctgaaactatggtaagattc

SEQ ID NO: 130358 - DNA, 33 bp, Homo sapien
aaacagcaggagcctggaactatggtaagattc

SEQ ID NO: 130359 - DNA, 33 bp, Homo sapien
gtatgcactgccaagccatggtgtggacacagg

SEQ ID NO: 130360 - DNA, 33 bp, Homo sapien
gtatgcactgccaagctatggtgtggacacagg

SEQ ID NO: 130361 - DNA, 33 bp, Homo sapien
ggcataattcacgcatcaaatgttagttataaa

SEQ ID NO: 130362 - DNA, 33 bp, Homo sapien
ggcataattcacgcattaaatgttagttataaa

SEQ ID NO: 130363 - DNA, 33 bp, Homo sapien
agtttattctgctccccatctctcttacctctt

SEQ ID NO: 130364 - DNA, 33 bp, Homo sapien
agtttattctgctcccgatctctcttacctctt

SEQ ID NO: 130365 - DNA, 33 bp, Homo sapien
gagtgctgagcaaatgccattcctctgctgatt

SEQ ID NO: 130366 - DNA, 33 bp, Homo sapien
gagtgctgagcaaatgtcattcctctgctgatt

SEQ ID NO: 130367 - DNA, 33 bp, Homo sapien
ttcccattccttcccaactcttgtgactaccat

SEQ ID NO: 130368 - DNA, 33 bp, Homo sapien
ttcccattccttcccatctcttgtgactaccat

SEQ ID NO: 130369 - DNA, 33 bp, Homo sapien
gataacaagttaaataaagcagttagcatctta

SEQ ID NO: 130370 - DNA, 33 bp, Homo sapien
gataacaagttaaatatagcagttagcatctta

SEQ ID NO: 130371 - DNA, 33 bp, Homo sapien
gaatgagcagaataaaccacctgaagtataaaa

SEQ ID NO: 130372 - DNA, 33 bp, Homo sapien
gaatgagcagaataaagcacctgaagtataaaa

SEQ ID NO: 130373 - DNA, 33 bp, Homo sapien
tttcaatgcgggagtgacaagattctggaaaag

SEQ ID NO: 130374 - DNA, 33 bp, Homo sapien
tttcaatgcgggagtggcaagattctggaaaag

SEQ ID NO: 130375 - DNA, 33 bp, Homo sapien
atcacgtgtcagagacaggagtgaacaagcctt

SEQ ID NO: 130376 - DNA, 33 bp, Homo sapien
atcacgtgtcagagacgggagtgaacaagcctt

SEQ ID NO: 130377 - DNA, 33 bp, Homo sapien
atgctagccattgagaagaagtaacagggatca

SEQ ID NO: 130378 - DNA, 33 bp, Homo sapien
atgctagccattgagaggaagtaacagggatca

SEQ ID NO: 130379 - DNA, 33 bp, Homo sapien
ttttgtggcttttcctcagagacttttccattc

SEQ ID NO: 130380 - DNA, 33 bp, Homo sapien
ttttgtggcttttccttagagacttttccattc

SEQ ID NO: 130381 - DNA, 33 bp, Homo sapien
cacagttactaggaaaccttttttggatcccac

SEQ ID NO: 130382 - DNA, 33 bp, Homo sapien
cacagttactaggaaatcttttttggatcccac

SEQ ID NO: 130383 - DNA, 33 bp, Homo sapien
ttgctaacttcactgaatacttgtgaggcatta

SEQ ID NO: 130384 - DNA, 33 bp, Homo sapien
ttgctaacttcactgagtacttgtgaggcatta

SEQ ID NO: 130385 - DNA, 33 bp, Homo sapien
gcattgttgcaaggtccctggttctacccccat

SEQ ID NO: 130386 - DNA, 33 bp, Homo sapien
gcattgttgcaaggtctctggttctacccccat

SEQ ID NO: 130387 - DNA, 33 bp, Homo sapien
gtacagctctttgttaacctggtaggcacccag

SEQ ID NO: 130388 - DNA, 33 bp, Homo sapien
gtacagctctttgttaccctggtaggcacccag

SEQ ID NO: 130389 - DNA, 33 bp, Homo sapien
caattacacgatcaaaattacaaaacaaaaagc

SEQ ID NO: 130390 - DNA, 33 bp, Homo sapien
caattacacgatcaaatttacaaaacaaaaagc

SEQ ID NO: 130391 - DNA, 33 bp, Homo sapien
ctgaggagatgaacaaactggcgtatgagacag

SEQ ID NO: 130392 - DNA, 33 bp, Homo sapien
ctgaggagatgaacaatctggcgtatgagacag

SEQ ID NO: 130393 - DNA, 33 bp, Homo sapien
agaaataacattaattaaaagccttccatgtgc

SEQ ID NO: 130394 - DNA, 33 bp, Homo sapien
agaaataacattaattgaaagccttccatgtgc

SEQ ID NO: 130395 - DNA, 33 bp, Homo sapien
caaaaatgtaaaccataaattctgaccaatatt

SEQ ID NO: 130396 - DNA, 33 bp, Homo sapien
caaaaatgtaaaccatgaattctgaccaatatt

SEQ ID NO: 130397 - DNA, 33 bp, Homo sapien
ttggcctttggctgaacggttttgcctttcttt

SEQ ID NO: 130398 - DNA, 33 bp, Homo sapien
ttggcctttggctgaatggttttgcctttcttt

SEQ ID NO: 130399 - DNA, 33 bp, Homo sapien
ccccagcccaggacaacctcttttgggtttggg

SEQ ID NO: 130400 - DNA, 33 bp, Homo sapien
ccccagcccaggacaatctcttttgggtttggg

SEQ ID NO: 130401 - DNA, 33 bp, Homo sapien
ctaatagtttagacaacattttctgaatcatca

SEQ ID NO: 130402 - DNA, 33 bp, Homo sapien
ctaatagtttagacaatattttctgaatcatca

SEQ ID NO: 130403 - DNA, 33 bp, Homo sapien
ggatgtagaaaaattgcaacccgtatacaatgc

SEQ ID NO: 130404 - DNA, 33 bp, Homo sapien
ggatgtagaaaaattggaacccgtatacaatgc

SEQ ID NO: 130405 - DNA, 33 bp, Homo sapien
ttccaaatctcttctcactatttggaatataca

SEQ ID NO: 130406 - DNA, 33 bp, Homo sapien
ttccaaatctcttctcgctatttggaatataca

SEQ ID NO: 130407 - DNA, 33 bp, Homo sapien
aatagaaaagtttgacgcataccagcaaaaaac

SEQ ID NO: 130408 - DNA, 33 bp, Homo sapien
aatagaaaagtttgactcataccagcaaaaaac

SEQ ID NO: 130409 - DNA, 33 bp, Homo sapien
tagagtgcagtggtacaactacagccaactgta

SEQ ID NO: 130410 - DNA, 33 bp, Homo sapien
tagagtgcagtggtacgactacagccaactgta

SEQ ID NO: 130411 - DNA, 33 bp, Homo sapien
tctttgaaagcagtgaatagtgtgggctacaga

SEQ ID NO: 130412 - DNA, 33 bp, Homo sapien
tctttgaaagcagtgattagtgtgggctacaga

SEQ ID NO: 130413 - DNA, 33 bp, Homo sapien
agcagtgagatgccaaaaaatggtatagctctt

SEQ ID NO: 130414 - DNA, 33 bp, Homo sapien
agcagtgagatgccaacaaatggtatagctctt

SEQ ID NO: 130415 - DNA, 33 bp, Homo sapien
ttaggttgtgatgagaacttaaagaatgagtag

SEQ ID NO: 130416 - DNA, 33 bp, Homo sapien
ttaggttgtgatgagaccttaaagaatgagtag

SEQ ID NO: 130417 - DNA, 33 bp, Homo sapien
cattatttgacagagacgattaacattttcttc

SEQ ID NO: 130418 - DNA, 33 bp, Homo sapien
cattatttgacagagaggattaacattttcttc

SEQ ID NO: 130419 - DNA, 33 bp, Homo sapien
ctccacccaacaacaacggaatatacattcttc

SEQ ID NO: 130420 - DNA, 33 bp, Homo sapien
ctccacccaacaacaatggaatatacattcttc

SEQ ID NO: 130421 - DNA, 33 bp, Homo sapien
catggtggtttcaatgacagttctgttattaaa

SEQ ID NO: 130422 - DNA, 33 bp, Homo sapien
catggtggtttcaatgtcagttctgttattaaa

SEQ ID NO: 130423 - DNA, 33 bp, Homo sapien
acaaaacaaaaagaaaatctgaccaattctcaa

SEQ ID NO: 130424 - DNA, 33 bp, Homo sapien
acaaaacaaaaagaaagtctgaccaattctcaa

SEQ ID NO: 130425 - DNA, 33 bp, Homo sapien
aaccccacaatattaaatcaatgtaattcacca

SEQ ID NO: 130426 - DNA, 33 bp, Homo sapien
aaccccacaatattaactcaatgtaattcacca

SEQ ID NO: 130427 - DNA, 33 bp, Homo sapien
ggtccttgctttcaagaaatttataggctgaga

SEQ ID NO: 130428 - DNA, 33 bp, Homo sapien
ggtccttgctttcaaggaatttataggctgaga

SEQ ID NO: 130429 - DNA, 33 bp, Homo sapien
ccttacggttattgccaagtccaaaactggcct

SEQ ID NO: 130430 - DNA, 33 bp, Homo sapien
ccttacggttattgcccagtccaaaactggcct

SEQ ID NO: 130431 - DNA, 33 bp, Homo sapien
gtccttgactggcagacagttacacaaatggtt

SEQ ID NO: 130432 - DNA, 33 bp, Homo sapien
gtccttgactggcagagagttacacaaatggtt

SEQ ID NO: 130433 - DNA, 33 bp, Homo sapien
tgttcagctgccagtaccggttacttaaggttg

SEQ ID NO: 130434 - DNA, 33 bp, Homo sapien
tgttcagctgccagtatcggttacttaaggttg

SEQ ID NO: 130435 - DNA, 33 bp, Homo sapien
tcttagtgaagatttaacagtagttcctagtac

SEQ ID NO: 130436 - DNA, 33 bp, Homo sapien
tcttagtgaagatttagcagtagttcctagtac

SEQ ID NO: 130437 - DNA, 33 bp, Homo sapien
ttagagagtaaacacaataacacaattgaccca

SEQ ID NO: 130438 - DNA, 33 bp, Homo sapien
ttagagagtaaacacagtaacacaattgaccca

SEQ ID NO: 130439 - DNA, 33 bp, Homo sapien
tgtagaaatattcagtaaagctaacatatccat

SEQ ID NO: 130440 - DNA, 33 bp, Homo sapien
tgtagaaatattcagtcaagctaacatatccat

SEQ ID NO: 130441 - DNA, 33 bp, Homo sapien
atgacacagagacaggaaaaacagccaaaatat

SEQ ID NO: 130442 - DNA, 33 bp, Homo sapien
atgacacagagacaggcaaaacagccaaaatat

SEQ ID NO: 130443 - DNA, 33 bp, Homo sapien
tcatttatatagttccaaagtcttgcattagca

SEQ ID NO: 130444 - DNA, 33 bp, Homo sapien
tcatttatatagttccgaagtcttgcattagca

SEQ ID NO: 130445 - DNA, 33 bp, Homo sapien
ctggagactgcttctacctcagggatgtatcta

SEQ ID NO: 130446 - DNA, 33 bp, Homo sapien
ctggagactgcttctatctcagggatgtatcta

SEQ ID NO: 130447 - DNA, 33 bp, Homo sapien
taaggcttagggagaacagagttttcaaattta

SEQ ID NO: 130448 - DNA, 33 bp, Homo sapien
taaggcttagggagaagagagttttcaaattta

SEQ ID NO: 130449 - DNA, 33 bp, Homo sapien
ctttaacacctcatctcacagcagcagtttttt

SEQ ID NO: 130450 - DNA, 33 bp, Homo sapien
ctttaacacctcatcttacagcagcagtttttt

SEQ ID NO: 130451 - DNA, 33 bp, Homo sapien
acctttcttaaacttcactaatggcccccaaaa

SEQ ID NO: 130452 - DNA, 33 bp, Homo sapien
acctttcttaaacttcgctaatggcccccaaaa

SEQ ID NO: 130453 - DNA, 33 bp, Homo sapien
gccatctgtgttcactcaaagctcaatgtctct

SEQ ID NO: 130454 - DNA, 33 bp, Homo sapien
gccatctgtgttcacttaaagctcaatgtctct

SEQ ID NO: 130455 - DNA, 33 bp, Homo sapien
gtagccaatatagcaccgtactggcttaaaaac

SEQ ID NO: 130456 - DNA, 33 bp, Homo sapien
gtagccaatatagcacggtactggcttaaaaac

SEQ ID NO: 130457 - DNA, 33 bp, Homo sapien
acataaaatatgctaaaaataatgacagttgat

SEQ ID NO: 130458 - DNA, 33 bp, Homo sapien
acataaaatatgctaacaataatgacagttgat

SEQ ID NO: 130459 - DNA, 33 bp, Homo sapien
atgggctggataaggccgaactcttgacaaaga

SEQ ID NO: 130460 - DNA, 33 bp, Homo sapien
atgggctggataaggctgaactcttgacaaaga

SEQ ID NO: 130461 - DNA, 33 bp, Homo sapien
ttgctttaagtgctgacagtaacaaataagatt

SEQ ID NO: 130462 - DNA, 33 bp, Homo sapien
ttgctttaagtgctgatagtaacaaataagatt

SEQ ID NO: 130463 - DNA, 33 bp, Homo sapien
aaatggttatgttcatcatatctttaaattgca

SEQ ID NO: 130464 - DNA, 33 bp, Homo sapien
aaatggttatgttcattatatctttaaattgca

SEQ ID NO: 130465 - DNA, 33 bp, Homo sapien
cttgtacctctgaattgaatatgttttattgca

SEQ ID NO: 130466 - DNA, 33 bp, Homo sapien
cttgtacctctgaatttaatatgttttattgca

SEQ ID NO: 130467 - DNA, 33 bp, Homo sapien
tttcctctttgtataacaatgtaaggaccatct

SEQ ID NO: 130468 - DNA, 33 bp, Homo sapien
tttcctctttgtataataatgtaaggaccatct

SEQ ID NO: 130469 - DNA, 33 bp, Homo sapien
tacctcaaggggttgaaatgatttgacatatat

SEQ ID NO: 130470 - DNA, 33 bp, Homo sapien
tacctcaaggggttgagatgatttgacatatat

SEQ ID NO: 130471 - DNA, 33 bp, Homo sapien
ttaattctaaaccttgaagtgattgtccccttt

SEQ ID NO: 130472 - DNA, 33 bp, Homo sapien
ttaattctaaaccttgcagtgattgtccccttt

SEQ ID NO: 130473 - DNA, 33 bp, Homo sapien
gaagtccttggttttacatcatgtatcccaaat

SEQ ID NO: 130474 - DNA, 33 bp, Homo sapien
gaagtccttggttttatatcatgtatcccaaat

SEQ ID NO: 130475 - DNA, 33 bp, Homo sapien
cagaagagataatcacaaactctactctcactg

SEQ ID NO: 130476 - DNA, 33 bp, Homo sapien
cagaagagataatcacgaactctactctcactg

SEQ ID NO: 130477 - DNA, 33 bp, Homo sapien
tgcatctcttaagtacaggaatacattctgaga

SEQ ID NO: 130478 - DNA, 33 bp, Homo sapien
tgcatctcttaagtacgggaatacattctgaga

SEQ ID NO: 130479 - DNA, 33 bp, Homo sapien
ttgcagttttattttcaccagaatataagccct

SEQ ID NO: 130480 - DNA, 33 bp, Homo sapien
ttgcagttttattttctccagaatataagccct

SEQ ID NO: 130481 - DNA, 33 bp, Homo sapien
cggctgttggtgtaaacgtttgcagttttattt

SEQ ID NO: 130482 - DNA, 33 bp, Homo sapien
cggctgttggtgtaaatgtttgcagttttattt

SEQ ID NO: 130483 - DNA, 33 bp, Homo sapien
tatgttctctacagtcaaattaaatgaagaaga

SEQ ID NO: 130484 - DNA, 33 bp, Homo sapien
tatgttctctacagtcgaattaaatgaagaaga

SEQ ID NO: 130485 - DNA, 33 bp, Homo sapien
tggtgtgtgttgttcactaatggggatttttaa

SEQ ID NO: 130486 - DNA, 33 bp, Homo sapien
tggtgtgtgttgttcattaatggggatttttaa

SEQ ID NO: 130487 - DNA, 33 bp, Homo sapien
catttgaactctttaccatttgacgattgaaac

SEQ ID NO: 130488 - DNA, 33 bp, Homo sapien
catttgaactctttactatttgacgattgaaac

SEQ ID NO: 130489 - DNA, 33 bp, Homo sapien
tgtgtgctttacctaggagtgacaacataatgc

SEQ ID NO: 130490 - DNA, 33 bp, Homo sapien
tgtgtgctttacctagtagtgacaacataatgc

SEQ ID NO: 130491 - DNA, 33 bp, Homo sapien
gggcatatataggaaaactgtggaacttgctct

SEQ ID NO: 130492 - DNA, 33 bp, Homo sapien
gggcatatataggaaatctgtggaacttgctct

SEQ ID NO: 130493 - DNA, 33 bp, Homo sapien
tttaatctatcctccaatctctctcactcatct

SEQ ID NO: 130494 - DNA, 33 bp, Homo sapien
tttaatctatcctccagtctctctcactcatct

SEQ ID NO: 130495 - DNA, 33 bp, Homo sapien
gtaatctacacagttaggcaacaaaaactagta

SEQ ID NO: 130496 - DNA, 33 bp, Homo sapien
gtaatctacacagttatgcaacaaaaactagta

SEQ ID NO: 130497 - DNA, 33 bp, Homo sapien
ctcctgcctttctccactagataagcatgcctt

SEQ ID NO: 130498 - DNA, 33 bp, Homo sapien
ctcctgcctttctccattagataagcatgcctt

SEQ ID NO: 130499 - DNA, 33 bp, Homo sapien
cccaaagttttctcacacctcttaccaactttt

SEQ ID NO: 130500 - DNA, 33 bp, Homo sapien
cccaaagttttctcacgcctcttaccaactttt

SEQ ID NO: 130501 - DNA, 33 bp, Homo sapien
atctccaatctgaaagaccatcccagctccaga

SEQ ID NO: 130502 - DNA, 33 bp, Homo sapien
atctccaatctgaaaggccatcccagctccaga

SEQ ID NO: 130503 - DNA, 33 bp, Homo sapien
ctggagctcaaagagcagactatgattatttaa

SEQ ID NO: 130504 - DNA, 33 bp, Homo sapien
ctggagctcaaagagccgactatgattatttaa

SEQ ID NO: 130505 - DNA, 33 bp, Homo sapien
gggagagtaaagagaaatcatccctcccccaaa

SEQ ID NO: 130506 - DNA, 33 bp, Homo sapien
gggagagtaaagagaagtcatccctcccccaaa

SEQ ID NO: 130507 - DNA, 33 bp, Homo sapien
caactctaagatgttcaataaaaggctccagct

SEQ ID NO: 130508 - DNA, 33 bp, Homo sapien
caactctaagatgttccataaaaggctccagct

SEQ ID NO: 130509 - DNA, 33 bp, Homo sapien
agaaaaaagtctgttacacatatgactcactta

SEQ ID NO: 130510 - DNA, 33 bp, Homo sapien
agaaaaaagtctgttatacatatgactcactta

SEQ ID NO: 130511 - DNA, 33 bp, Homo sapien
gtcacccacttttaaaaacatagatcacatgta

SEQ ID NO: 130512 - DNA, 33 bp, Homo sapien
gtcacccacttttaaacacatagatcacatgta

SEQ ID NO: 130513 - DNA, 33 bp, Homo sapien
ccccacttccaacaccagagaccacattttaac

SEQ ID NO: 130514 - DNA, 33 bp, Homo sapien
ccccacttccaacaccggagaccacattttaac

SEQ ID NO: 130515 - DNA, 33 bp, Homo sapien
gcttagattagtagaaaattaatgattcaataa

SEQ ID NO: 130516 - DNA, 33 bp, Homo sapien
gcttagattagtagaagattaatgattcaataa

SEQ ID NO: 130517 - DNA, 33 bp, Homo sapien
aaatgttattgtactacatattgctgcccgttt

SEQ ID NO: 130518 - DNA, 33 bp, Homo sapien
aaatgttattgtactatatattgctgcccgttt

SEQ ID NO: 130519 - DNA, 33 bp, Homo sapien
gttacggtttgtccacaaagactcaaatatgga

SEQ ID NO: 130520 - DNA, 33 bp, Homo sapien
gttacggtttgtccacgaagactcaaatatgga

SEQ ID NO: 130521 - DNA, 33 bp, Homo sapien
ctaaacaagcataaaacgtgaagagaaataaag

SEQ ID NO: 130522 - DNA, 33 bp, Homo sapien
ctaaacaagcataaaatgtgaagagaaataaag

SEQ ID NO: 130523 - DNA, 33 bp, Homo sapien
cacaatgatgacatccagaacagtattccatag

SEQ ID NO: 130524 - DNA, 33 bp, Homo sapien
cacaatgatgacatccggaacagtattccatag

SEQ ID NO: 130525 - DNA, 33 bp, Homo sapien
tttctcatgtagccaaaattgcaaaagcccatt

SEQ ID NO: 130526 - DNA, 33 bp, Homo sapien
tttctcatgtagccaagattgcaaaagcccatt

SEQ ID NO: 130527 - DNA, 33 bp, Homo sapien
agtttggaactaaatgaaggagaacctacgttt

SEQ ID NO: 130528 - DNA, 33 bp, Homo sapien
agtttggaactaaatggaggagaacctacgttt

SEQ ID NO: 130529 - DNA, 33 bp, Homo sapien
gtgcaaaacagtatcgaatgttgcatgcaaatc

SEQ ID NO: 130530 - DNA, 33 bp, Homo sapien
gtgcaaaacagtatcgtatgttgcatgcaaatc

SEQ ID NO: 130531 - DNA, 33 bp, Homo sapien
ctcatcacaaaaaagagaggtatgtgaggtgat

SEQ ID NO: 130532 - DNA, 33 bp, Homo sapien
ctcatcacaaaaaagataggtatgtgaggtgat

SEQ ID NO: 130533 - DNA, 33 bp, Homo sapien
atatgttgtgagacaaagttttaatttcattct

SEQ ID NO: 130534 - DNA, 33 bp, Homo sapien
atatgttgtgagacaaggttttaatttcattct

SEQ ID NO: 130535 - DNA, 33 bp, Homo sapien
aagttggaattcactcgagtttttgctgactgg

SEQ ID NO: 130536 - DNA, 33 bp, Homo sapien
aagttggaattcactctagtttttgctgactgg

SEQ ID NO: 130537 - DNA, 33 bp, Homo sapien
gtttggtctataggtaacagcttgatgactagg

SEQ ID NO: 130538 - DNA, 33 bp, Homo sapien
gtttggtctataggtaccagcttgatgactagg

SEQ ID NO: 130539 - DNA, 33 bp, Homo sapien
tagagctgttggacaaactttggctaataaaga

SEQ ID NO: 130540 - DNA, 33 bp, Homo sapien
tagagctgttggacaacctttggctaataaaga

SEQ ID NO: 130541 - DNA, 33 bp, Homo sapien
atgatccctacccacagtgaaaaagagatgtac

SEQ ID NO: 130542 - DNA, 33 bp, Homo sapien
atgatccctacccacattgaaaaagagatgtac

SEQ ID NO: 130543 - DNA, 33 bp, Homo sapien
gatatttattggttacaagagtagagacagggc

SEQ ID NO: 130544 - DNA, 33 bp, Homo sapien
gatatttattggttacgagagtagagacagggc

SEQ ID NO: 130545 - DNA, 33 bp, Homo sapien
cataaatacacagatacagaaaaacagacacat

SEQ ID NO: 130546 - DNA, 33 bp, Homo sapien
cataaatacacagatatagaaaaacagacacat

SEQ ID NO: 130547 - DNA, 33 bp, Homo sapien
accacctgtctttctaacaacacaagatgctcc

SEQ ID NO: 130548 - DNA, 33 bp, Homo sapien
accacctgtctttctagcaacacaagatgctcc

SEQ ID NO: 130549 - DNA, 33 bp, Homo sapien
gcaaggtccacaaatgcatgcttaaattagtgg

SEQ ID NO: 130550 - DNA, 33 bp, Homo sapien
gcaaggtccacaaatgtatgcttaaattagtgg

SEQ ID NO: 130551 - DNA, 33 bp, Homo sapien
caaaggatatgaattacgtatgtcaaagagata

SEQ ID NO: 130552 - DNA, 33 bp, Homo sapien
caaaggatatgaattatgtatgtcaaagagata

SEQ ID NO: 130553 - DNA, 33 bp, Homo sapien
aaagaggaggtctaatcaagtacaaacactcag

SEQ ID NO: 130554 - DNA, 33 bp, Homo sapien
aaagaggaggtctaatgaagtacaaacactcag

SEQ ID NO: 130555 - DNA, 33 bp, Homo sapien
ggaaagagttggaccaagtatctaatactccaa

SEQ ID NO: 130556 - DNA, 33 bp, Homo sapien
ggaaagagttggaccacgtatctaatactccaa

SEQ ID NO: 130557 - DNA, 33 bp, Homo sapien
agtttccactaaagccaatgctcttgccaaatg

SEQ ID NO: 130558 - DNA, 33 bp, Homo sapien
agtttccactaaagccgatgctcttgccaaatg

SEQ ID NO: 130559 - DNA, 33 bp, Homo sapien
accctaaatctaaaccgatcagaaaaaacaaaa

SEQ ID NO: 130560 - DNA, 33 bp, Homo sapien
accctaaatctaaacctatcagaaaaaacaaaa

SEQ ID NO: 130561 - DNA, 33 bp, Homo sapien
taattcatgggtcaaacggaaaatataagcaac

SEQ ID NO: 130562 - DNA, 33 bp, Homo sapien
taattcatgggtcaaatggaaaatataagcaac

SEQ ID NO: 130563 - DNA, 33 bp, Homo sapien
gcttgtatacaatggacggtggtcttaccttat

SEQ ID NO: 130564 - DNA, 33 bp, Homo sapien
gcttgtatacaatggatggtggtcttaccttat

SEQ ID NO: 130565 - DNA, 33 bp, Homo sapien
agctaaatggagtccaaaagaagtaagtcctta

SEQ ID NO: 130566 - DNA, 33 bp, Homo sapien
agctaaatggagtccagaagaagtaagtcctta

SEQ ID NO: 130567 - DNA, 33 bp, Homo sapien
cagattatttgatcaccgaggtattaaacctag

SEQ ID NO: 130568 - DNA, 33 bp, Homo sapien
cagattatttgatcactgaggtattaaacctag

SEQ ID NO: 130569 - DNA, 33 bp, Homo sapien
tataaaattatgtatacgtatgtgcttctatgt

SEQ ID NO: 130570 - DNA, 33 bp, Homo sapien
tataaaattatgtatatgtatgtgcttctatgt

SEQ ID NO: 130571 - DNA, 33 bp, Homo sapien
gatcacttgcctgtgactaggactgctcactat

SEQ ID NO: 130572 - DNA, 33 bp, Homo sapien
gatcacttgcctgtgattaggactgctcactat

SEQ ID NO: 130573 - DNA, 33 bp, Homo sapien
cttcaaaattacactacaaatcccatcaagtgt

SEQ ID NO: 130574 - DNA, 33 bp, Homo sapien
cttcaaaattacactataaatcccatcaagtgt

SEQ ID NO: 130575 - DNA, 33 bp, Homo sapien
tcaggagacaaggaaccatctacttcatttact

SEQ ID NO: 130576 - DNA, 33 bp, Homo sapien
tcaggagacaaggaactatctacttcatttact

SEQ ID NO: 130577 - DNA, 33 bp, Homo sapien
aagggagacaactgaactcgaacccataaaagt

SEQ ID NO: 130578 - DNA, 33 bp, Homo sapien
aagggagacaactgaattcgaacccataaaagt

SEQ ID NO: 130579 - DNA, 33 bp, Homo sapien
gctacaaggagaatcaacttttttcaaggctgc

SEQ ID NO: 130580 - DNA, 33 bp, Homo sapien
gctacaaggagaatcagcttttttcaaggctgc

SEQ ID NO: 130581 - DNA, 33 bp, Homo sapien
accagttttacatacaatcatttcttctatgtg

SEQ ID NO: 130582 - DNA, 33 bp, Homo sapien
accagttttacatacactcatttcttctatgtg

SEQ ID NO: 130583 - DNA, 33 bp, Homo sapien
ctgataccaaatacaaaagcagccatatgcaat

SEQ ID NO: 130584 - DNA, 33 bp, Homo sapien
ctgataccaaatacaagagcagccatatgcaat

SEQ ID NO: 130585 - DNA, 33 bp, Homo sapien
acccagcagaacaaacaacactctggcaggaac

SEQ ID NO: 130586 - DNA, 33 bp, Homo sapien
acccagcagaacaaacgacactctggcaggaac

SEQ ID NO: 130587 - DNA, 33 bp, Homo sapien
taggtttccaagatagaatggttaatctggttc

SEQ ID NO: 130588 - DNA, 33 bp, Homo sapien
taggtttccaagataggatggttaatctggttc

SEQ ID NO: 130589 - DNA, 33 bp, Homo sapien
aaactcacaagatcacaacactacatgcctcct

SEQ ID NO: 130590 - DNA, 33 bp, Homo sapien
aaactcacaagatcaccacactacatgcctcct

SEQ ID NO: 130591 - DNA, 33 bp, Homo sapien
tatctactaaatataccggaaacaacagcaaat

SEQ ID NO: 130592 - DNA, 33 bp, Homo sapien
tatctactaaatatactggaaacaacagcaaat

SEQ ID NO: 130593 - DNA, 33 bp, Homo sapien
attctagtaaataaaacgagatcactggaagag

SEQ ID NO: 130594 - DNA, 33 bp, Homo sapien
attctagtaaataaaatgagatcactggaagag

SEQ ID NO: 130595 - DNA, 33 bp, Homo sapien
ttggaatctgagaccacagggactggccaggtg

SEQ ID NO: 130596 - DNA, 33 bp, Homo sapien
ttggaatctgagaccatagggactggccaggtg

SEQ ID NO: 130597 - DNA, 33 bp, Homo sapien
ccagataaccttccctgaatctctggactgtct

SEQ ID NO: 130598 - DNA, 33 bp, Homo sapien
ccagataaccttcccttaatctctggactgtct

SEQ ID NO: 130599 - DNA, 33 bp, Homo sapien
cttcttgagcacatacagaaaattctccaggat

SEQ ID NO: 130600 - DNA, 33 bp, Homo sapien
cttcttgagcacatacggaaaattctccaggat

SEQ ID NO: 130601 - DNA, 33 bp, Homo sapien
tctccaggattggtcacatattaggccacaaac

SEQ ID NO: 130602 - DNA, 33 bp, Homo sapien
tctccaggattggtcatatattaggccacaaac

SEQ ID NO: 130603 - DNA, 33 bp, Homo sapien
gtcactgaatggtaaactttaaatggtatgtgc

SEQ ID NO: 130604 - DNA, 33 bp, Homo sapien
gtcactgaatggtaaattttaaatggtatgtgc

SEQ ID NO: 130605 - DNA, 33 bp, Homo sapien
cacatctgaagtcccaaaacgttgtgaggctaa

SEQ ID NO: 130606 - DNA, 33 bp, Homo sapien
cacatctgaagtcccagaacgttgtgaggctaa

SEQ ID NO: 130607 - DNA, 33 bp, Homo sapien
caactattttgtgtcacaacccacaagaccttt

SEQ ID NO: 130608 - DNA, 33 bp, Homo sapien
caactattttgtgtcataacccacaagaccttt

SEQ ID NO: 130609 - DNA, 33 bp, Homo sapien
ttgatatcactgagtccctgtggcacaactcat

SEQ ID NO: 130610 - DNA, 33 bp, Homo sapien
ttgatatcactgagtctctgtggcacaactcat

SEQ ID NO: 130611 - DNA, 33 bp, Homo sapien
gtccttcccttctccaatgaagtaaaataaaat

SEQ ID NO: 130612 - DNA, 33 bp, Homo sapien
gtccttcccttctccagtgaagtaaaataaaat

SEQ ID NO: 130613 - DNA, 33 bp, Homo sapien
ggggtttcaaactgaacttattagagtcaatca

SEQ ID NO: 130614 - DNA, 33 bp, Homo sapien
ggggtttcaaactgaagttattagagtcaatca

SEQ ID NO: 130615 - DNA, 33 bp, Homo sapien
taatacatgcaagacaataaatgtgatacacca

SEQ ID NO: 130616 - DNA, 33 bp, Homo sapien
taatacatgcaagacagtaaatgtgatacacca

SEQ ID NO: 130617 - DNA, 33 bp, Homo sapien
gcctagatttagaaccaaattttctcagataac

SEQ ID NO: 130618 - DNA, 33 bp, Homo sapien
gcctagatttagaacccaattttctcagataac

SEQ ID NO: 130619 - DNA, 33 bp, Homo sapien
tgccctttaaccatgacagagacaaaaagaagc

SEQ ID NO: 130620 - DNA, 33 bp, Homo sapien
tgccctttaaccatgagagagacaaaaagaagc

SEQ ID NO: 130621 - DNA, 33 bp, Homo sapien
taaatgtcccaagttaaataatacattatgtgg

SEQ ID NO: 130622 - DNA, 33 bp, Homo sapien
taaatgtcccaagttagataatacattatgtgg

SEQ ID NO: 130623 - DNA, 33 bp, Homo sapien
caaaactgcaaacttaataaattagggatagaa

SEQ ID NO: 130624 - DNA, 33 bp, Homo sapien
caaaactgcaaacttagtaaattagggatagaa

SEQ ID NO: 130625 - DNA, 33 bp, Homo sapien
ttctgatgataaatgaagatccagggaatccat

SEQ ID NO: 130626 - DNA, 33 bp, Homo sapien
ttctgatgataaatgacgatccagggaatccat

SEQ ID NO: 130627 - DNA, 33 bp, Homo sapien
ctttcttcttcctaacaggttctgtcttctatc

SEQ ID NO: 130628 - DNA, 33 bp, Homo sapien
ctttcttcttcctaactggttctgtcttctatc

SEQ ID NO: 130629 - DNA, 33 bp, Homo sapien
agtatgggatttttcaagaaagtcacgtctgtt

SEQ ID NO: 130630 - DNA, 33 bp, Homo sapien
agtatgggatttttcaggaaagtcacgtctgtt

SEQ ID NO: 130631 - DNA, 33 bp, Homo sapien
actaatgattggaatacgttttcatgtgcctgc

SEQ ID NO: 130632 - DNA, 33 bp, Homo sapien
actaatgattggaatatgttttcatgtgcctgc

SEQ ID NO: 130633 - DNA, 33 bp, Homo sapien
agaacatgatgttgaactggtagggtcacggtg

SEQ ID NO: 130634 - DNA, 33 bp, Homo sapien
agaacatgatgttgaattggtagggtcacggtg

SEQ ID NO: 130635 - DNA, 33 bp, Homo sapien
aaaaccaatggaggtcccatcctgaatttacaa

SEQ ID NO: 130636 - DNA, 33 bp, Homo sapien
aaaaccaatggaggtctcatcctgaatttacaa

SEQ ID NO: 130637 - DNA, 33 bp, Homo sapien
tgtgggtaattataacaagacacttgattgtga

SEQ ID NO: 130638 - DNA, 33 bp, Homo sapien
tgtgggtaattataacgagacacttgattgtga

SEQ ID NO: 130639 - DNA, 33 bp, Homo sapien
ggtccctcttgcaatacgtagatgacttattag

SEQ ID NO: 130640 - DNA, 33 bp, Homo sapien
ggtccctcttgcaatatgtagatgacttattag

SEQ ID NO: 130641 - DNA, 33 bp, Homo sapien
aagggtctccatgagtcaattcaaatggactaa

SEQ ID NO: 130642 - DNA, 33 bp, Homo sapien
aagggtctccatgagtgaattcaaatggactaa

SEQ ID NO: 130643 - DNA, 33 bp, Homo sapien
aaaattagtgaaaagacagtgatcaaacatcct

SEQ ID NO: 130644 - DNA, 33 bp, Homo sapien
aaaattagtgaaaagatagtgatcaaacatcct

SEQ ID NO: 130645 - DNA, 33 bp, Homo sapien
gggcataggctcaaaccgtagtaaaaaatctct

SEQ ID NO: 130646 - DNA, 33 bp, Homo sapien
gggcataggctcaaactgtagtaaaaaatctct

SEQ ID NO: 130647 - DNA, 33 bp, Homo sapien
tattcatagactctagaaaattccattctgctt

SEQ ID NO: 130648 - DNA, 33 bp, Homo sapien
tattcatagactctaggaaattccattctgctt

SEQ ID NO: 130649 - DNA, 33 bp, Homo sapien
tcctgacctccacaggacaaccataagacaact

SEQ ID NO: 130650 - DNA, 33 bp, Homo sapien
tcctgacctccacagggcaaccataagacaact

SEQ ID NO: 130651 - DNA, 33 bp, Homo sapien
caccatgcagcatttaaaacaccaaaccagcta

SEQ ID NO: 130652 - DNA, 33 bp, Homo sapien
caccatgcagcatttagaacaccaaaccagcta

SEQ ID NO: 130653 - DNA, 33 bp, Homo sapien
ttctgccagcacatgacaatgagacactatctt

SEQ ID NO: 130654 - DNA, 33 bp, Homo sapien
ttctgccagcacatgataatgagacactatctt

SEQ ID NO: 130655 - DNA, 33 bp, Homo sapien
gcagaagatgttttaaatgaaactcctgtgaac

SEQ ID NO: 130656 - DNA, 33 bp, Homo sapien
gcagaagatgttttaactgaaactcctgtgaac

SEQ ID NO: 130657 - DNA, 33 bp, Homo sapien
aatagttgttcgtcaccagaatctaagccagtt

SEQ ID NO: 130658 - DNA, 33 bp, Homo sapien
aatagttgttcgtcactagaatctaagccagtt

SEQ ID NO: 130659 - DNA, 33 bp, Homo sapien
ccttccatttcttttaccctgttatcagttaga

SEQ ID NO: 130660 - DNA, 33 bp, Homo sapien
ccttccatttcttttatcctgttatcagttaga

SEQ ID NO: 130661 - DNA, 33 bp, Homo sapien
tccaggcatttacagaatatgtgcccattgctc

SEQ ID NO: 130662 - DNA, 33 bp, Homo sapien
tccaggcatttacagagtatgtgcccattgctc

SEQ ID NO: 130663 - DNA, 33 bp, Homo sapien
ttcctagtttttgccacagtagtttctgtaata

SEQ ID NO: 130664 - DNA, 33 bp, Homo sapien
ttcctagtttttgccatagtagtttctgtaata

SEQ ID NO: 130665 - DNA, 33 bp, Homo sapien
gataagtttgggagaacgaatgaaataatcgag

SEQ ID NO: 130666 - DNA, 33 bp, Homo sapien
gataagtttgggagaatgaatgaaataatcgag

SEQ ID NO: 130667 - DNA, 33 bp, Homo sapien
tccagctttgctcttacaggctgtgtaacttca

SEQ ID NO: 130668 - DNA, 33 bp, Homo sapien
tccagctttgctcttataggctgtgtaacttca

SEQ ID NO: 130669 - DNA, 33 bp, Homo sapien
gtagtttgttagcagcaatggtagtttgaacaa

SEQ ID NO: 130670 - DNA, 33 bp, Homo sapien
gtagtttgttagcagcgatggtagtttgaacaa

SEQ ID NO: 130671 - DNA, 33 bp, Homo sapien
gcctttggatagaaacaggactacaggaaacac

SEQ ID NO: 130672 - DNA, 33 bp, Homo sapien
gcctttggatagaaacgggactacaggaaacac

SEQ ID NO: 130673 - DNA, 33 bp, Homo sapien
caaactaaggaccaaagtctgaaacgagttatc

SEQ ID NO: 130674 - DNA, 33 bp, Homo sapien
caaactaaggaccaaattctgaaacgagttatc

SEQ ID NO: 130675 - DNA, 33 bp, Homo sapien
ggttagggtctttctacctataaatagctgctg

SEQ ID NO: 130676 - DNA, 33 bp, Homo sapien
ggttagggtctttctatctataaatagctgctg

SEQ ID NO: 130677 - DNA, 33 bp, Homo sapien
gtggggcagtttatgaagccctggattagctgg

SEQ ID NO: 130678 - DNA, 33 bp, Homo sapien
gtggggcagtttatgaggccctggattagctgg

SEQ ID NO: 130679 - DNA, 33 bp, Homo sapien
aaccctgtaaaaaccaggcaattaaatggaagg

SEQ ID NO: 130680 - DNA, 33 bp, Homo sapien
aaccctgtaaaaaccatgcaattaaatggaagg

SEQ ID NO: 130681 - DNA, 33 bp, Homo sapien
ggtttgtcctcagtaacaagtgactgcaagatt

SEQ ID NO: 130682 - DNA, 33 bp, Homo sapien
ggtttgtcctcagtaagaagtgactgcaagatt

SEQ ID NO: 130683 - DNA, 33 bp, Homo sapien
catgtagaataaatgaatcagcacgtcagggtc

SEQ ID NO: 130684 - DNA, 33 bp, Homo sapien
catgtagaataaatgagtcagcacgtcagggtc

SEQ ID NO: 130685 - DNA, 33 bp, Homo sapien
ttttccatttctttccccacagatcacatgtcc

SEQ ID NO: 130686 - DNA, 33 bp, Homo sapien
ttttccatttctttcctcacagatcacatgtcc

SEQ ID NO: 130687 - DNA, 33 bp, Homo sapien
ggttatcagacaggccaagaaaggacatttttg

SEQ ID NO: 130688 - DNA, 33 bp, Homo sapien
ggttatcagacaggccgagaaaggacatttttg

SEQ ID NO: 130689 - DNA, 33 bp, Homo sapien
agattttgcaggagtgaatgccagaaatgagaa

SEQ ID NO: 130690 - DNA, 33 bp, Homo sapien
agattttgcaggagtgtatgccagaaatgagaa

SEQ ID NO: 130691 - DNA, 33 bp, Homo sapien
cttcctttagttcttccctaacctggacttgca

SEQ ID NO: 130692 - DNA, 33 bp, Homo sapien
cttcctttagttcttcgctaacctggacttgca

SEQ ID NO: 130693 - DNA, 33 bp, Homo sapien
gagctgatttcttagcacgttggtacaatggaa

SEQ ID NO: 130694 - DNA, 33 bp, Homo sapien
gagctgatttcttagcgcgttggtacaatggaa

SEQ ID NO: 130695 - DNA, 33 bp, Homo sapien
aaggagggctcatgggccataactcattgtcac

SEQ ID NO: 130696 - DNA, 33 bp, Homo sapien
aaggagggctcatgggtcataactcattgtcac

SEQ ID NO: 130697 - DNA, 33 bp, Homo sapien
atcagtaagaaaatgacgtagtatactaaagat

SEQ ID NO: 130698 - DNA, 33 bp, Homo sapien
atcagtaagaaaatgatgtagtatactaaagat

SEQ ID NO: 130699 - DNA, 33 bp, Homo sapien
aggaagaaactccccaacatggaatctctgttt

SEQ ID NO: 130700 - DNA, 33 bp, Homo sapien
aggaagaaactccccagcatggaatctctgttt

SEQ ID NO: 130701 - DNA, 33 bp, Homo sapien
agacaccttttgaaaaactgctaaaagctatgc

SEQ ID NO: 130702 - DNA, 33 bp, Homo sapien
agacaccttttgaaaatctgctaaaagctatgc

SEQ ID NO: 130703 - DNA, 33 bp, Homo sapien
gtttgtaactgtgaaccaggagaatcccaccac

SEQ ID NO: 130704 - DNA, 33 bp, Homo sapien
gtttgtaactgtgaactaggagaatcccaccac

SEQ ID NO: 130705 - DNA, 33 bp, Homo sapien
agtatttttaagtcacgctgagttatccagcac

SEQ ID NO: 130706 - DNA, 33 bp, Homo sapien
agtatttttaagtcactctgagttatccagcac

SEQ ID NO: 130707 - DNA, 33 bp, Homo sapien
caggcctcacacataccggccaaataaaaatgc

SEQ ID NO: 130708 - DNA, 33 bp, Homo sapien
caggcctcacacatactggccaaataaaaatgc

SEQ ID NO: 130709 - DNA, 33 bp, Homo sapien
tacttgatcctggttacgaatagtcagcttgtt

SEQ ID NO: 130710 - DNA, 33 bp, Homo sapien
tacttgatcctggttatgaatagtcagcttgtt

SEQ ID NO: 130711 - DNA, 33 bp, Homo sapien
ttctaagttgaaattacgtcagggcctcattcc

SEQ ID NO: 130712 - DNA, 33 bp, Homo sapien
ttctaagttgaaattatgtcagggcctcattcc

SEQ ID NO: 130713 - DNA, 33 bp, Homo sapien
tctatattttattttcactgtggttccacaaaa

SEQ ID NO: 130714 - DNA, 33 bp, Homo sapien
tctatattttattttcgctgtggttccacaaaa

SEQ ID NO: 130715 - DNA, 33 bp, Homo sapien
catgagctggcttgtacatatttttttaaatcc

SEQ ID NO: 130716 - DNA, 33 bp, Homo sapien
catgagctggcttgtatatatttttttaaatcc

SEQ ID NO: 130717 - DNA, 33 bp, Homo sapien
cgctttgacgtatagaaattttcaagtgatgga

SEQ ID NO: 130718 - DNA, 33 bp, Homo sapien
cgctttgacgtatagagattttcaagtgatgga

SEQ ID NO: 130719 - DNA, 33 bp, Homo sapien
acattatgaggaagaagatgaaactcaaaggta

SEQ ID NO: 130720 - DNA, 33 bp, Homo sapien
acattatgaggaagaatatgaaactcaaaggta

SEQ ID NO: 130721 - DNA, 33 bp, Homo sapien
ctcatctcttccaggcagattgctttgtaatgg

SEQ ID NO: 130722 - DNA, 33 bp, Homo sapien
ctcatctcttccaggcggattgctttgtaatgg

SEQ ID NO: 130723 - DNA, 33 bp, Homo sapien
cacattaggtacataaaatttcttcactgatca

SEQ ID NO: 130724 - DNA, 33 bp, Homo sapien
cacattaggtacataagatttcttcactgatca

SEQ ID NO: 130725 - DNA, 33 bp, Homo sapien
aaaacaattatctaccaactgtcaaaagaaaaa

SEQ ID NO: 130726 - DNA, 33 bp, Homo sapien
aaaacaattatctaccgactgtcaaaagaaaaa

SEQ ID NO: 130727 - DNA, 33 bp, Homo sapien
ccattttcatcttctccgaatgatcaaaatcag

SEQ ID NO: 130728 - DNA, 33 bp, Homo sapien
ccattttcatcttctctgaatgatcaaaatcag

SEQ ID NO: 130729 - DNA, 33 bp, Homo sapien
taaaaatcaactccaccctgttttcagcatgac

SEQ ID NO: 130730 - DNA, 33 bp, Homo sapien
taaaaatcaactccactctgttttcagcatgac

SEQ ID NO: 130731 - DNA, 33 bp, Homo sapien
cacatggcaaatgagaacaaatgagctgagcag

SEQ ID NO: 130732 - DNA, 33 bp, Homo sapien
cacatggcaaatgagaccaaatgagctgagcag

SEQ ID NO: 130733 - DNA, 33 bp, Homo sapien
taggcttgcctctctgaaaagaaacaaatagga

SEQ ID NO: 130734 - DNA, 33 bp, Homo sapien
taggcttgcctctctgcaaagaaacaaatagga

SEQ ID NO: 130735 - DNA, 33 bp, Homo sapien
cctataatttgtggcaagaaaatttatgacaca

SEQ ID NO: 130736 - DNA, 33 bp, Homo sapien
cctataatttgtggcaggaaaatttatgacaca

SEQ ID NO: 130737 - DNA, 33 bp, Homo sapien
cttagtaacactagaaagtcgcacacctgacct

SEQ ID NO: 130738 - DNA, 33 bp, Homo sapien
cttagtaacactagaaggtcgcacacctgacct

SEQ ID NO: 130739 - DNA, 33 bp, Homo sapien
caatcttttcaccagcaaagcatttttaaattt

SEQ ID NO: 130740 - DNA, 33 bp, Homo sapien
caatcttttcaccagccaagcatttttaaattt

SEQ ID NO: 130741 - DNA, 33 bp, Homo sapien
gggataggctagatcaaagatgccagggagaga

SEQ ID NO: 130742 - DNA, 33 bp, Homo sapien
gggataggctagatcagagatgccagggagaga

SEQ ID NO: 130743 - DNA, 33 bp, Homo sapien
cctctccattcccttcacattattgccagggcc

SEQ ID NO: 130744 - DNA, 33 bp, Homo sapien
cctctccattcccttcgcattattgccagggcc

SEQ ID NO: 130745 - DNA, 33 bp, Homo sapien
atgctttcagctcttaacacatctaatggcctt

SEQ ID NO: 130746 - DNA, 33 bp, Homo sapien
atgctttcagctcttatcacatctaatggcctt

SEQ ID NO: 130747 - DNA, 33 bp, Homo sapien
ttaaaagaagactgcaagagatggtggtacttt

SEQ ID NO: 130748 - DNA, 33 bp, Homo sapien
ttaaaagaagactgcaggagatggtggtacttt

SEQ ID NO: 130749 - DNA, 33 bp, Homo sapien
caagtttgaatcccaaatctgttctttagtgtg

SEQ ID NO: 130750 - DNA, 33 bp, Homo sapien
caagtttgaatcccaactctgttctttagtgtg

SEQ ID NO: 130751 - DNA, 33 bp, Homo sapien
ttctgcacatgtgtcagcttgattagccccaag

SEQ ID NO: 130752 - DNA, 33 bp, Homo sapien
ttctgcacatgtgtcatcttgattagccccaag

SEQ ID NO: 130753 - DNA, 33 bp, Homo sapien
tctgcttatcaattcacgtccctcggtttgcta

SEQ ID NO: 130754 - DNA, 33 bp, Homo sapien
tctgcttatcaattcatgtccctcggtttgcta

SEQ ID NO: 130755 - DNA, 33 bp, Homo sapien
caggaattttcacagacacattctccagtcact

SEQ ID NO: 130756 - DNA, 33 bp, Homo sapien
caggaattttcacagatacattctccagtcact

SEQ ID NO: 130757 - DNA, 33 bp, Homo sapien
aaaacaagaaatgatcactactcttcaggaatt

SEQ ID NO: 130758 - DNA, 33 bp, Homo sapien
aaaacaagaaatgatcgctactcttcaggaatt

SEQ ID NO: 130759 - DNA, 33 bp, Homo sapien
caatgtggtcttcaacaagtttctcttcttgtg

SEQ ID NO: 130760 - DNA, 33 bp, Homo sapien
caatgtggtcttcaacgagtttctcttcttgtg

SEQ ID NO: 130761 - DNA, 33 bp, Homo sapien
ctgaagtcttttcagaacctttgccagcacttt

SEQ ID NO: 130762 - DNA, 33 bp, Homo sapien
ctgaagtcttttcagagcctttgccagcacttt

SEQ ID NO: 130763 - DNA, 33 bp, Homo sapien
tgtctgatccactgacaggccattctgccctcc

SEQ ID NO: 130764 - DNA, 33 bp, Homo sapien
tgtctgatccactgacgggccattctgccctcc

SEQ ID NO: 130765 - DNA, 33 bp, Homo sapien
aatgacaaaatctagcagcagatctgtctaaac

SEQ ID NO: 130766 - DNA, 33 bp, Homo sapien
aatgacaaaatctagcggcagatctgtctaaac

SEQ ID NO: 130767 - DNA, 33 bp, Homo sapien
gctctgtgtccttgctcacacggaggctgccga

SEQ ID NO: 130768 - DNA, 33 bp, Homo sapien
gctctgtgtccttgcttacacggaggctgccga

SEQ ID NO: 130769 - DNA, 33 bp, Homo sapien
ggagtggcgctccctaagaaccaggtccaggct

SEQ ID NO: 130770 - DNA, 33 bp, Homo sapien
ggagtggcgctccctaggaaccaggtccaggct

SEQ ID NO: 130771 - DNA, 33 bp, Homo sapien
gtcacgttggcacaaacaccttcaaaccgtctg

SEQ ID NO: 130772 - DNA, 33 bp, Homo sapien
gtcacgttggcacaaataccttcaaaccgtctg

SEQ ID NO: 130773 - DNA, 33 bp, Homo sapien
atttttagtagtgggggaacagagaaagaaatg

SEQ ID NO: 130774 - DNA, 33 bp, Homo sapien
atttttagtagtggggtaacagagaaagaaatg

SEQ ID NO: 130775 - DNA, 33 bp, Homo sapien
taattcattcgaaccaaagcggctgcctgctct

SEQ ID NO: 130776 - DNA, 33 bp, Homo sapien
taattcattcgaaccagagcggctgcctgctct

SEQ ID NO: 130777 - DNA, 33 bp, Homo sapien
cagaaagttaaaagcacgctagcaacaacaaaa

SEQ ID NO: 130778 - DNA, 33 bp, Homo sapien
cagaaagttaaaagcaggctagcaacaacaaaa

SEQ ID NO: 130779 - DNA, 33 bp, Homo sapien
tgcagccttggttacacaattaaatgacaattt

SEQ ID NO: 130780 - DNA, 33 bp, Homo sapien
tgcagccttggttacataattaaatgacaattt

SEQ ID NO: 130781 - DNA, 33 bp, Homo sapien
gcaaatgccccagaagccgatggtaactggata

SEQ ID NO: 130782 - DNA, 33 bp, Homo sapien
gcaaatgccccagaaggcgatggtaactggata

SEQ ID NO: 130783 - DNA, 33 bp, Homo sapien
gctgctgtacaactaccgctctcgagttctcct

SEQ ID NO: 130784 - DNA, 33 bp, Homo sapien
gctgctgtacaactacggctctcgagttctcct

SEQ ID NO: 130785 - DNA, 33 bp, Homo sapien
ccagcgcctgatcgccaatacacgcccacagac

SEQ ID NO: 130786 - DNA, 33 bp, Homo sapien
ccagcgcctgatcgccgatacacgcccacagac

SEQ ID NO: 130787 - DNA, 33 bp, Homo sapien
tgaaccattgattcccgcgtggctgcaccttcc

SEQ ID NO: 130788 - DNA, 33 bp, Homo sapien
tgaaccattgattccctcgtggctgcaccttcc

SEQ ID NO: 130789 - DNA, 33 bp, Homo sapien
atggtcgcgcggaataaacattgttcccacgca

SEQ ID NO: 130790 - DNA, 33 bp, Homo sapien
atggtcgcgcggaatagacattgttcccacgca

SEQ ID NO: 130791 - DNA, 33 bp, Homo sapien
gaagtcgaattgggtcccagacgcgggtcctgg

SEQ ID NO: 130792 - DNA, 33 bp, Homo sapien
gaagtcgaattgggtcgcagacgcgggtcctgg

SEQ ID NO: 130793 - DNA, 33 bp, Homo sapien
gctacaagaattcacacagcttaataagaccca

SEQ ID NO: 130794 - DNA, 33 bp, Homo sapien
gctacaagaattcacatagcttaataagaccca

SEQ ID NO: 130795 - DNA, 33 bp, Homo sapien
gctcccatcacagaagcctaatgttcctccaag

SEQ ID NO: 130796 - DNA, 33 bp, Homo sapien
gctcccatcacagaaggctaatgttcctccaag

SEQ ID NO: 130797 - DNA, 33 bp, Homo sapien
aggtaagaaagatataccttacacaacagtgac

SEQ ID NO: 130798 - DNA, 33 bp, Homo sapien
aggtaagaaagatatagcttacacaacagtgac

SEQ ID NO: 130799 - DNA, 33 bp, Homo sapien
attatataactaaaataagtgctcaaaatacca

SEQ ID NO: 130800 - DNA, 33 bp, Homo sapien
attatataactaaaattagtgctcaaaatacca

SEQ ID NO: 130801 - DNA, 33 bp, Homo sapien
tggcatagtggatgtgaaacctatacacttgca

SEQ ID NO: 130802 - DNA, 33 bp, Homo sapien
tggcatagtggatgtggaacctatacacttgca

SEQ ID NO: 130803 - DNA, 33 bp, Homo sapien
gagagctagagacttacgtttgtatcttttaaa

SEQ ID NO: 130804 - DNA, 33 bp, Homo sapien
gagagctagagacttatgtttgtatcttttaaa

SEQ ID NO: 130805 - DNA, 33 bp, Homo sapien
ggggagcggtcatagacatggcttgtccagagt

SEQ ID NO: 130806 - DNA, 33 bp, Homo sapien
ggggagcggtcatagatatggcttgtccagagt

SEQ ID NO: 130807 - DNA, 33 bp, Homo sapien
tcacctctaatctccaggactgtgtgagcttgg

SEQ ID NO: 130808 - DNA, 33 bp, Homo sapien
tcacctctaatctccatgactgtgtgagcttgg

SEQ ID NO: 130809 - DNA, 33 bp, Homo sapien
tactcagtccggcaaggccatcctctctccaca

SEQ ID NO: 130810 - DNA, 33 bp, Homo sapien
tactcagtccggcaagtccatcctctctccaca

SEQ ID NO: 130811 - DNA, 33 bp, Homo sapien
ctgtgtctctctttgccctcttctcatcatttg

SEQ ID NO: 130812 - DNA, 33 bp, Homo sapien
ctgtgtctctctttgctctcttctcatcatttg

SEQ ID NO: 130813 - DNA, 33 bp, Homo sapien
gggctgctgcccatacaatgtttcctgacattc

SEQ ID NO: 130814 - DNA, 33 bp, Homo sapien
gggctgctgcccatactatgtttcctgacattc

SEQ ID NO: 130815 - DNA, 33 bp, Homo sapien
agataagtattcataaacaccttcctgctggcc

SEQ ID NO: 130816 - DNA, 33 bp, Homo sapien
agataagtattcataagcaccttcctgctggcc

SEQ ID NO: 130817 - DNA, 33 bp, Homo sapien
tatgttgaagaatgaacgaaagactgtggcccc

SEQ ID NO: 130818 - DNA, 33 bp, Homo sapien
tatgttgaagaatgaatgaaagactgtggcccc

SEQ ID NO: 130819 - DNA, 33 bp, Homo sapien
agctgctgcttagctgaaatcattgcattttac

SEQ ID NO: 130820 - DNA, 33 bp, Homo sapien
agctgctgcttagctggaatcattgcattttac

SEQ ID NO: 130821 - DNA, 33 bp, Homo sapien
atccatcaaactatcaccaaacatctagcagct

SEQ ID NO: 130822 - DNA, 33 bp, Homo sapien
atccatcaaactatcatcaaacatctagcagct

SEQ ID NO: 130823 - DNA, 33 bp, Homo sapien
tacctgaatagaaaagccgtgagtcatgaagaa

SEQ ID NO: 130824 - DNA, 33 bp, Homo sapien
tacctgaatagaaaaggcgtgagtcatgaagaa

SEQ ID NO: 130825 - DNA, 33 bp, Homo sapien
ttggagcaagggtagaaaatccataagattctt

SEQ ID NO: 130826 - DNA, 33 bp, Homo sapien
ttggagcaagggtagagaatccataagattctt

SEQ ID NO: 130827 - DNA, 33 bp, Homo sapien
aaaaatggagatatagaaaaagaacacaggaat

SEQ ID NO: 130828 - DNA, 33 bp, Homo sapien
aaaaatggagatataggaaaagaacacaggaat

SEQ ID NO: 130829 - DNA, 33 bp, Homo sapien
aaccatgatttagacaagaattatcaatggatg

SEQ ID NO: 130830 - DNA, 33 bp, Homo sapien
aaccatgatttagacaggaattatcaatggatg

SEQ ID NO: 130831 - DNA, 33 bp, Homo sapien
tctagagagacaaaacagtcagataagtgcaag

SEQ ID NO: 130832 - DNA, 33 bp, Homo sapien
tctagagagacaaaacggtcagataagtgcaag

SEQ ID NO: 130833 - DNA, 33 bp, Homo sapien
tactgcacatccagtaggttgatgtatatatca

SEQ ID NO: 130834 - DNA, 33 bp, Homo sapien
tactgcacatccagtatgttgatgtatatatca

SEQ ID NO: 130835 - DNA, 33 bp, Homo sapien
tcctggtctccaggccagatatcttcaatgcct

SEQ ID NO: 130836 - DNA, 33 bp, Homo sapien
tcctggtctccaggccggatatcttcaatgcct

SEQ ID NO: 130837 - DNA, 33 bp, Homo sapien
gaaacaggcaattacaaaacaaaatgacaggag

SEQ ID NO: 130838 - DNA, 33 bp, Homo sapien
gaaacaggcaattacagaacaaaatgacaggag

SEQ ID NO: 130839 - DNA, 33 bp, Homo sapien
agagctgaccaactcactgaggtcccccagtga

SEQ ID NO: 130840 - DNA, 33 bp, Homo sapien
agagctgaccaactcattgaggtcccccagtga

SEQ ID NO: 130841 - DNA, 33 bp, Homo sapien
tgtgttgaggtggggcaagaagttggcattgct

SEQ ID NO: 130842 - DNA, 33 bp, Homo sapien
tgtgttgaggtggggcgagaagttggcattgct

SEQ ID NO: 130843 - DNA, 33 bp, Homo sapien
ctcaaaatcctctggcgaagtacccacctatca

SEQ ID NO: 130844 - DNA, 33 bp, Homo sapien
ctcaaaatcctctggctaagtacccacctatca

SEQ ID NO: 130845 - DNA, 33 bp, Homo sapien
tggggggagcgctcatgaagctttgtgaatgac

SEQ ID NO: 130846 - DNA, 33 bp, Homo sapien
tggggggagcgctcattaagctttgtgaatgac

SEQ ID NO: 130847 - DNA, 33 bp, Homo sapien
actaatgacctatccaactctatgtcctttctc

SEQ ID NO: 130848 - DNA, 33 bp, Homo sapien
actaatgacctatccacctctatgtcctttctc

SEQ ID NO: 130849 - DNA, 33 bp, Homo sapien
aaaatagacgaagtcaagagaccagtgtttgaa

SEQ ID NO: 130850 - DNA, 33 bp, Homo sapien
aaaatagacgaagtcaggagaccagtgtttgaa

SEQ ID NO: 130851 - DNA, 33 bp, Homo sapien
cgtttttgtatgtcaaagatgatagacccttat

SEQ ID NO: 130852 - DNA, 33 bp, Homo sapien
cgtttttgtatgtcaaggatgatagacccttat

SEQ ID NO: 130853 - DNA, 33 bp, Homo sapien
ggtacagtatggcaaactctaaaagcccgtagt

SEQ ID NO: 130854 - DNA, 33 bp, Homo sapien
ggtacagtatggcaaattctaaaagcccgtagt

SEQ ID NO: 130855 - DNA, 33 bp, Homo sapien
cccctgaaaagtgatacgttaaattccaccaat

SEQ ID NO: 130856 - DNA, 33 bp, Homo sapien
cccctgaaaagtgatatgttaaattccaccaat

SEQ ID NO: 130857 - DNA, 33 bp, Homo sapien
cacacatggagacttcaaaaggaagagaaagaa

SEQ ID NO: 130858 - DNA, 33 bp, Homo sapien
cacacatggagacttcgaaaggaagagaaagaa

SEQ ID NO: 130859 - DNA, 33 bp, Homo sapien
atgtaccttatctatactaccttgatattgtca

SEQ ID NO: 130860 - DNA, 33 bp, Homo sapien
atgtaccttatctatagtaccttgatattgtca

SEQ ID NO: 130861 - DNA, 33 bp, Homo sapien
gcaaatcttcctaacactgatacatttcattct

SEQ ID NO: 130862 - DNA, 33 bp, Homo sapien
gcaaatcttcctaacattgatacatttcattct

SEQ ID NO: 130863 - DNA, 33 bp, Homo sapien
atatattttgttgtcaatctcttttaaggcatg

SEQ ID NO: 130864 - DNA, 33 bp, Homo sapien
atatattttgttgtcagtctcttttaaggcatg

SEQ ID NO: 130865 - DNA, 33 bp, Homo sapien
tccaagcaatgatcacaattggctattaccaca

SEQ ID NO: 130866 - DNA, 33 bp, Homo sapien
tccaagcaatgatcactattggctattaccaca

SEQ ID NO: 130867 - DNA, 33 bp, Homo sapien
caactttgtgaatgtacataactttgtgagttg

SEQ ID NO: 130868 - DNA, 33 bp, Homo sapien
caactttgtgaatgtatataactttgtgagttg

SEQ ID NO: 130869 - DNA, 33 bp, Homo sapien
cctcttaatacctcaaaccaaaagaaagatggg

SEQ ID NO: 130870 - DNA, 33 bp, Homo sapien
cctcttaatacctcaacccaaaagaaagatggg

SEQ ID NO: 130871 - DNA, 33 bp, Homo sapien
tgaatgtcctttccacaaatatgctcccacggc

SEQ ID NO: 130872 - DNA, 33 bp, Homo sapien
tgaatgtcctttccacgaatatgctcccacggc

SEQ ID NO: 130873 - DNA, 33 bp, Homo sapien
ggtaattgtggaatgagaatttcaaatacaaca

SEQ ID NO: 130874 - DNA, 33 bp, Homo sapien
ggtaattgtggaatgataatttcaaatacaaca

SEQ ID NO: 130875 - DNA, 33 bp, Homo sapien
attaccctggatattcgaattaccttgatttca

SEQ ID NO: 130876 - DNA, 33 bp, Homo sapien
attaccctggatattctaattaccttgatttca

SEQ ID NO: 130877 - DNA, 33 bp, Homo sapien
cattgaaagatgaagacgtacacagttgattca

SEQ ID NO: 130878 - DNA, 33 bp, Homo sapien
cattgaaagatgaagatgtacacagttgattca

SEQ ID NO: 130879 - DNA, 33 bp, Homo sapien
ttgggtgaaactgagcaacaaattaaaagagaa

SEQ ID NO: 130880 - DNA, 33 bp, Homo sapien
ttgggtgaaactgagccacaaattaaaagagaa

SEQ ID NO: 130881 - DNA, 33 bp, Homo sapien
caaaaatgtctagtaaccaataaagtaaaattc

SEQ ID NO: 130882 - DNA, 33 bp, Homo sapien
caaaaatgtctagtaagcaataaagtaaaattc

SEQ ID NO: 130883 - DNA, 33 bp, Homo sapien
ctgttgaaaacaactacccttatgctatgaacc

SEQ ID NO: 130884 - DNA, 33 bp, Homo sapien
ctgttgaaaacaactatccttatgctatgaacc

SEQ ID NO: 130885 - DNA, 33 bp, Homo sapien
attcctcagtgttttaagttatgcttgcttttg

SEQ ID NO: 130886 - DNA, 33 bp, Homo sapien
attcctcagtgttttaggttatgcttgcttttg

SEQ ID NO: 130887 - DNA, 33 bp, Homo sapien
gaaatagtctataaaacgaagcggcagtaggag

SEQ ID NO: 130888 - DNA, 33 bp, Homo sapien
gaaatagtctataaaatgaagcggcagtaggag

SEQ ID NO: 130889 - DNA, 33 bp, Homo sapien
agcggttagcactgaacgattgtgtgggtttca

SEQ ID NO: 130890 - DNA, 33 bp, Homo sapien
agcggttagcactgaatgattgtgtgggtttca

SEQ ID NO: 130891 - DNA, 33 bp, Homo sapien
cttctcttccttctaccagcaaagtatgcaaca

SEQ ID NO: 130892 - DNA, 33 bp, Homo sapien
cttctcttccttctactagcaaagtatgcaaca

SEQ ID NO: 130893 - DNA, 33 bp, Homo sapien
aggatatgtgaactcaaaatttttatacacagt

SEQ ID NO: 130894 - DNA, 33 bp, Homo sapien
aggatatgtgaactcagaatttttatacacagt

SEQ ID NO: 130895 - DNA, 33 bp, Homo sapien
tactgccactaaccgaagactgaggggagaagg

SEQ ID NO: 130896 - DNA, 33 bp, Homo sapien
tactgccactaaccgaggactgaggggagaagg

SEQ ID NO: 130897 - DNA, 33 bp, Homo sapien
gaacaagcatgaaaagaacagaaaggacctctc

SEQ ID NO: 130898 - DNA, 33 bp, Homo sapien
gaacaagcatgaaaagtacagaaaggacctctc

SEQ ID NO: 130899 - DNA, 33 bp, Homo sapien
agattagaaaaccaggaaactaagctggtaaga

SEQ ID NO: 130900 - DNA, 33 bp, Homo sapien
agattagaaaaccaggcaactaagctggtaaga

SEQ ID NO: 130901 - DNA, 33 bp, Homo sapien
ctacccgccacttggacctggctcagcccttag

SEQ ID NO: 130902 - DNA, 33 bp, Homo sapien
ctacccgccacttggatctggctcagcccttag

SEQ ID NO: 130903 - DNA, 33 bp, Homo sapien
ttcactgtttctccaacggtgtactccttcctg

SEQ ID NO: 130904 - DNA, 33 bp, Homo sapien
ttcactgtttctccaatggtgtactccttcctg

SEQ ID NO: 130905 - DNA, 33 bp, Homo sapien
tctctcggaggtcgtgaagcccaatggaagcaa

SEQ ID NO: 130906 - DNA, 33 bp, Homo sapien
tctctcggaggtcgtggagcccaatggaagcaa

SEQ ID NO: 130907 - DNA, 33 bp, Homo sapien
ccccaggtgagctctacaacttactcgggcaca

SEQ ID NO: 130908 - DNA, 33 bp, Homo sapien
ccccaggtgagctctagaacttactcgggcaca

SEQ ID NO: 130909 - DNA, 33 bp, Homo sapien
ttcaaagttctggaaacgacgtgtccatcctag

SEQ ID NO: 130910 - DNA, 33 bp, Homo sapien
ttcaaagttctggaaatgacgtgtccatcctag

SEQ ID NO: 130911 - DNA, 33 bp, Homo sapien
ggtccttttctggcataagccccaacagccccc

SEQ ID NO: 130912 - DNA, 33 bp, Homo sapien
ggtccttttctggcatgagccccaacagccccc

SEQ ID NO: 130913 - DNA, 33 bp, Homo sapien
acaacttggttgtcagaagattgtggatagcac

SEQ ID NO: 130914 - DNA, 33 bp, Homo sapien
acaacttggttgtcaggagattgtggatagcac

SEQ ID NO: 130915 - DNA, 33 bp, Homo sapien
aataactaagtagaaacgtctggccattccctc

SEQ ID NO: 130916 - DNA, 33 bp, Homo sapien
aataactaagtagaaatgtctggccattccctc

SEQ ID NO: 130917 - DNA, 33 bp, Homo sapien
ctcaatattcctctccacccatttttctactgc

SEQ ID NO: 130918 - DNA, 33 bp, Homo sapien
ctcaatattcctctccgcccatttttctactgc

SEQ ID NO: 130919 - DNA, 33 bp, Homo sapien
gtcacatgagtgtccacagtggtctcaggcatt

SEQ ID NO: 130920 - DNA, 33 bp, Homo sapien
gtcacatgagtgtccatagtggtctcaggcatt

SEQ ID NO: 130921 - DNA, 33 bp, Homo sapien
tggggatgtttgacccaggaagtaggtagtaag

SEQ ID NO: 130922 - DNA, 33 bp, Homo sapien
tggggatgtttgacccgggaagtaggtagtaag

SEQ ID NO: 130923 - DNA, 33 bp, Homo sapien
tatgaaagttattccacctcagatttatgtaac

SEQ ID NO: 130924 - DNA, 33 bp, Homo sapien
tatgaaagttattccatctcagatttatgtaac

SEQ ID NO: 130925 - DNA, 33 bp, Homo sapien
ccacagtgatatactacgcaattgtaaagaaca

SEQ ID NO: 130926 - DNA, 33 bp, Homo sapien
ccacagtgatatactatgcaattgtaaagaaca

SEQ ID NO: 130927 - DNA, 33 bp, Homo sapien
agagcagagggcttgcaaagaaggtttaaagga

SEQ ID NO: 130928 - DNA, 33 bp, Homo sapien
agagcagagggcttgcgaagaaggtttaaagga

SEQ ID NO: 130929 - DNA, 33 bp, Homo sapien
agataaaacttattcacatggacaaaaatacaa

SEQ ID NO: 130930 - DNA, 33 bp, Homo sapien
agataaaacttattcatatggacaaaaatacaa

SEQ ID NO: 130931 - DNA, 33 bp, Homo sapien
gggaatgggtcatgacactggcttacactagat

SEQ ID NO: 130932 - DNA, 33 bp, Homo sapien
gggaatgggtcatgacgctggcttacactagat

SEQ ID NO: 130933 - DNA, 33 bp, Homo sapien
ctgctgctcttaatcaagggcctcaacatacgt

SEQ ID NO: 130934 - DNA, 33 bp, Homo sapien
ctgctgctcttaatcaggggcctcaacatacgt

SEQ ID NO: 130935 - DNA, 33 bp, Homo sapien
acctttggttctcaggaaatgggttctgtttgc

SEQ ID NO: 130936 - DNA, 33 bp, Homo sapien
acctttggttctcagggaatgggttctgtttgc

SEQ ID NO: 130937 - DNA, 33 bp, Homo sapien
ctaattatagtagttgaaaacacaaagtaccag

SEQ ID NO: 130938 - DNA, 33 bp, Homo sapien
ctaattatagtagttggaaacacaaagtaccag

SEQ ID NO: 130939 - DNA, 33 bp, Homo sapien
gttgtgtcatacacagaaaatatgcaacggtat

SEQ ID NO: 130940 - DNA, 33 bp, Homo sapien
gttgtgtcatacacagtaaatatgcaacggtat

SEQ ID NO: 130941 - DNA, 33 bp, Homo sapien
agttcgtgcaaaacagcaagaaaacccaaggta

SEQ ID NO: 130942 - DNA, 33 bp, Homo sapien
agttcgtgcaaaacaggaagaaaacccaaggta

SEQ ID NO: 130943 - DNA, 33 bp, Homo sapien
cttatgtttctaacaactatagttcaccgcttc

SEQ ID NO: 130944 - DNA, 33 bp, Homo sapien
cttatgtttctaacaattatagttcaccgcttc

SEQ ID NO: 130945 - DNA, 33 bp, Homo sapien
attaccatattagtaaacatgtgttagaatttg

SEQ ID NO: 130946 - DNA, 33 bp, Homo sapien
attaccatattagtaagcatgtgttagaatttg

SEQ ID NO: 130947 - DNA, 33 bp, Homo sapien
ggaatctgtacagggcaaccccataggtccctg

SEQ ID NO: 130948 - DNA, 33 bp, Homo sapien
ggaatctgtacagggcgaccccataggtccctg

SEQ ID NO: 130949 - DNA, 33 bp, Homo sapien
tgtctcagctgagataccatttctactgggaaa

SEQ ID NO: 130950 - DNA, 33 bp, Homo sapien
tgtctcagctgagatatcatttctactgggaaa

SEQ ID NO: 130951 - DNA, 33 bp, Homo sapien
tttcttatctgtttcaagcacaaacttgtgttt

SEQ ID NO: 130952 - DNA, 33 bp, Homo sapien
tttcttatctgtttcaggcacaaacttgtgttt

SEQ ID NO: 130953 - DNA, 33 bp, Homo sapien
tggggataaaacattacgaagagtagctgggat

SEQ ID NO: 130954 - DNA, 33 bp, Homo sapien
tggggataaaacattatgaagagtagctgggat

SEQ ID NO: 130955 - DNA, 33 bp, Homo sapien
tgagaagatttgatcaacagatgtcaagatgcc

SEQ ID NO: 130956 - DNA, 33 bp, Homo sapien
tgagaagatttgatcaccagatgtcaagatgcc

SEQ ID NO: 130957 - DNA, 33 bp, Homo sapien
tccatgaaggcaaggaacttgtctgtgttggtc

SEQ ID NO: 130958 - DNA, 33 bp, Homo sapien
tccatgaaggcaaggatcttgtctgtgttggtc

SEQ ID NO: 130959 - DNA, 33 bp, Homo sapien
atgaaggacctttgagacatagcacagagtttg

SEQ ID NO: 130960 - DNA, 33 bp, Homo sapien
atgaaggacctttgagccatagcacagagtttg

SEQ ID NO: 130961 - DNA, 33 bp, Homo sapien
agcctgggtaacatgacgaaatcctttttctaa

SEQ ID NO: 130962 - DNA, 33 bp, Homo sapien
agcctgggtaacatgatgaaatcctttttctaa

SEQ ID NO: 130963 - DNA, 33 bp, Homo sapien
ctgtataagtgatctccacagtgcaccgtcaag

SEQ ID NO: 130964 - DNA, 33 bp, Homo sapien
ctgtataagtgatctctacagtgcaccgtcaag

SEQ ID NO: 130965 - DNA, 33 bp, Homo sapien
ccatataacaccaccgacagctttttgtccaac

SEQ ID NO: 130966 - DNA, 33 bp, Homo sapien
ccatataacaccaccggcagctttttgtccaac

SEQ ID NO: 130967 - DNA, 33 bp, Homo sapien
gatactgtcctagatcaaaggcttaatgtgtga

SEQ ID NO: 130968 - DNA, 33 bp, Homo sapien
gatactgtcctagatcgaaggcttaatgtgtga

SEQ ID NO: 130969 - DNA, 33 bp, Homo sapien
aaaacaacacaaaaaactaggtgcagaaagtat

SEQ ID NO: 130970 - DNA, 33 bp, Homo sapien
aaaacaacacaaaaaattaggtgcagaaagtat

SEQ ID NO: 130971 - DNA, 33 bp, Homo sapien
tccttccaacagggcaatcgttggttcagtgac

SEQ ID NO: 130972 - DNA, 33 bp, Homo sapien
tccttccaacagggcagtcgttggttcagtgac

SEQ ID NO: 130973 - DNA, 33 bp, Homo sapien
agattacaggtatgaaagaccatgccccgcctg

SEQ ID NO: 130974 - DNA, 33 bp, Homo sapien
agattacaggtatgaacgaccatgccccgcctg

SEQ ID NO: 130975 - DNA, 33 bp, Homo sapien
tatatctgataagaaacttgtatccagaatgta

SEQ ID NO: 130976 - DNA, 33 bp, Homo sapien
tatatctgataagaaagttgtatccagaatgta

SEQ ID NO: 130977 - DNA, 33 bp, Homo sapien
acagaaacagccgccaatctcacttacaaatat

SEQ ID NO: 130978 - DNA, 33 bp, Homo sapien
acagaaacagccgccagtctcacttacaaatat

SEQ ID NO: 130979 - DNA, 33 bp, Homo sapien
ctacaaattatctcccaatactggcaatgaaaa

SEQ ID NO: 130980 - DNA, 33 bp, Homo sapien
ctacaaattatctcccgatactggcaatgaaaa

SEQ ID NO: 130981 - DNA, 33 bp, Homo sapien
gtaaagggaataaaatcatgagtcagataatac

SEQ ID NO: 130982 - DNA, 33 bp, Homo sapien
gtaaagggaataaaatgatgagtcagataatac

SEQ ID NO: 130983 - DNA, 33 bp, Homo sapien
ttaaggccaactctggacatagtacttatgagt

SEQ ID NO: 130984 - DNA, 33 bp, Homo sapien
ttaaggccaactctgggcatagtacttatgagt

SEQ ID NO: 130985 - DNA, 33 bp, Homo sapien
ttactgttagaagcaacggcctggtactttttg

SEQ ID NO: 130986 - DNA, 33 bp, Homo sapien
ttactgttagaagcaatggcctggtactttttg

SEQ ID NO: 130987 - DNA, 33 bp, Homo sapien
catgatactcaggagaacaataggtgaaatgta

SEQ ID NO: 130988 - DNA, 33 bp, Homo sapien
catgatactcaggagagcaataggtgaaatgta

SEQ ID NO: 130989 - DNA, 33 bp, Homo sapien
ttctcaaatgaatcaccctgctttctgctttat

SEQ ID NO: 130990 - DNA, 33 bp, Homo sapien
ttctcaaatgaatcactctgctttctgctttat

SEQ ID NO: 130991 - DNA, 33 bp, Homo sapien
aacaactggactaacaacatacttgtaaatagg

SEQ ID NO: 130992 - DNA, 33 bp, Homo sapien
aacaactggactaacagcatacttgtaaatagg

SEQ ID NO: 130993 - DNA, 33 bp, Homo sapien
aggatgcatactacaacctgaaactttggtcaa

SEQ ID NO: 130994 - DNA, 33 bp, Homo sapien
aggatgcatactacaatctgaaactttggtcaa

SEQ ID NO: 130995 - DNA, 33 bp, Homo sapien
ggcttccagtgtctaacacaggttgagcatttc

SEQ ID NO: 130996 - DNA, 33 bp, Homo sapien
ggcttccagtgtctaatacaggttgagcatttc

SEQ ID NO: 130997 - DNA, 33 bp, Homo sapien
ctttcccctcaagccaatctagaagtgtaggag

SEQ ID NO: 130998 - DNA, 33 bp, Homo sapien
ctttcccctcaagccagtctagaagtgtaggag

SEQ ID NO: 130999 - DNA, 33 bp, Homo sapien
tgtacccaaataattagcagatgcaagctttcc

SEQ ID NO: 131000 - DNA, 33 bp, Homo sapien
tgtacccaaataattatcagatgcaagctttcc

SEQ ID NO: 131001 - DNA, 33 bp, Homo sapien
aatgtgtaagaactacagcttaccaacactgct

SEQ ID NO: 131002 - DNA, 33 bp, Homo sapien
aatgtgtaagaactactgcttaccaacactgct

SEQ ID NO: 131003 - DNA, 33 bp, Homo sapien
agtataaatgaccaataaatgtatcaaaagatg

SEQ ID NO: 131004 - DNA, 33 bp, Homo sapien
agtataaatgaccaatgaatgtatcaaaagatg

SEQ ID NO: 131005 - DNA, 33 bp, Homo sapien
gcagggctgatactgcaatccttagaaaggcct

SEQ ID NO: 131006 - DNA, 33 bp, Homo sapien
gcagggctgatactgcgatccttagaaaggcct

SEQ ID NO: 131007 - DNA, 33 bp, Homo sapien
tgggatgtaaggtcataataaatttcacataac

SEQ ID NO: 131008 - DNA, 33 bp, Homo sapien
tgggatgtaaggtcatgataaatttcacataac

SEQ ID NO: 131009 - DNA, 33 bp, Homo sapien
acttagacatatctcaaataggcatgatagtta

SEQ ID NO: 131010 - DNA, 33 bp, Homo sapien
acttagacatatctcagataggcatgatagtta

SEQ ID NO: 131011 - DNA, 33 bp, Homo sapien
gctatggtaggcgtcactacatattctgttcgt

SEQ ID NO: 131012 - DNA, 33 bp, Homo sapien
gctatggtaggcgtcattacatattctgttcgt

SEQ ID NO: 131013 - DNA, 33 bp, Homo sapien
ggaataatagcaactcaatgtcacattaaataa

SEQ ID NO: 131014 - DNA, 33 bp, Homo sapien
ggaataatagcaactccatgtcacattaaataa

SEQ ID NO: 131015 - DNA, 33 bp, Homo sapien
attattgtccaaagaaaataccagcatgatgca

SEQ ID NO: 131016 - DNA, 33 bp, Homo sapien
attattgtccaaagaatataccagcatgatgca

SEQ ID NO: 131017 - DNA, 33 bp, Homo sapien
caaattgtgtatactacggtagtcccataagat

SEQ ID NO: 131018 - DNA, 33 bp, Homo sapien
caaattgtgtatactatggtagtcccataagat

SEQ ID NO: 131019 - DNA, 33 bp, Homo sapien
aaatcaatgtgtattaccatatctcttacagat

SEQ ID NO: 131020 - DNA, 33 bp, Homo sapien
aaatcaatgtgtattagcatatctcttacagat

SEQ ID NO: 131021 - DNA, 33 bp, Homo sapien
cttactacaaaggtaaagcattaatccaagtcc

SEQ ID NO: 131022 - DNA, 33 bp, Homo sapien
cttactacaaaggtaaggcattaatccaagtcc

SEQ ID NO: 131023 - DNA, 33 bp, Homo sapien
tcaatacaaatgtaaacactattgatgagagtt

SEQ ID NO: 131024 - DNA, 33 bp, Homo sapien
tcaatacaaatgtaaagactattgatgagagtt

SEQ ID NO: 131025 - DNA, 33 bp, Homo sapien
acaaaaatatttcaagcctgagtgccaccactt

SEQ ID NO: 131026 - DNA, 33 bp, Homo sapien
acaaaaatatttcaagtctgagtgccaccactt

SEQ ID NO: 131027 - DNA, 33 bp, Homo sapien
ttgtaacagtatgaagacctctcatttgctgta

SEQ ID NO: 131028 - DNA, 33 bp, Homo sapien
ttgtaacagtatgaagccctctcatttgctgta

SEQ ID NO: 131029 - DNA, 33 bp, Homo sapien
tgttcctaagccttaacctgctgactaaattct

SEQ ID NO: 131030 - DNA, 33 bp, Homo sapien
tgttcctaagccttaagctgctgactaaattct

SEQ ID NO: 131031 - DNA, 33 bp, Homo sapien
gttttcagtgacatccagaggctgttttaccag

SEQ ID NO: 131032 - DNA, 33 bp, Homo sapien
gttttcagtgacatccggaggctgttttaccag

SEQ ID NO: 131033 - DNA, 33 bp, Homo sapien
tgggaacaatactgaacgcgtaaagatacttta

SEQ ID NO: 131034 - DNA, 33 bp, Homo sapien
tgggaacaatactgaatgcgtaaagatacttta

SEQ ID NO: 131035 - DNA, 33 bp, Homo sapien
ataaaggcaaaatatcaaatgaacagtgttcct

SEQ ID NO: 131036 - DNA, 33 bp, Homo sapien
ataaaggcaaaatatcgaatgaacagtgttcct

SEQ ID NO: 131037 - DNA, 33 bp, Homo sapien
ctgtaaggaaggatgagaaaatgaggccccttt

SEQ ID NO: 131038 - DNA, 33 bp, Homo sapien
ctgtaaggaaggatgataaaatgaggccccttt

SEQ ID NO: 131039 - DNA, 33 bp, Homo sapien
gtaggaggatcaagcaatgaacttggtagtgaa

SEQ ID NO: 131040 - DNA, 33 bp, Homo sapien
gtaggaggatcaagcagtgaacttggtagtgaa

SEQ ID NO: 131041 - DNA, 33 bp, Homo sapien
cccttcctatggcagacgaagaatcagacaaaa

SEQ ID NO: 131042 - DNA, 33 bp, Homo sapien
cccttcctatggcagaggaagaatcagacaaaa

SEQ ID NO: 131043 - DNA, 33 bp, Homo sapien
aaacataggtctttcaaaaatgttcttgcccca

SEQ ID NO: 131044 - DNA, 33 bp, Homo sapien
aaacataggtctttcagaaatgttcttgcccca

SEQ ID NO: 131045 - DNA, 33 bp, Homo sapien
attgagaaactaggccgatctattgtgagcagc

SEQ ID NO: 131046 - DNA, 33 bp, Homo sapien
attgagaaactaggcctatctattgtgagcagc

SEQ ID NO: 131047 - DNA, 33 bp, Homo sapien
gttggcctctagtaaacacctcatccatcaagc

SEQ ID NO: 131048 - DNA, 33 bp, Homo sapien
gttggcctctagtaaatacctcatccatcaagc

SEQ ID NO: 131049 - DNA, 33 bp, Homo sapien
tatgacctgttctgtgaaaacccatgccttttg

SEQ ID NO: 131050 - DNA, 33 bp, Homo sapien
tatgacctgttctgtggaaacccatgccttttg

SEQ ID NO: 131051 - DNA, 33 bp, Homo sapien
tccctcaccaagatgaccaccaggtccagtatg

SEQ ID NO: 131052 - DNA, 33 bp, Homo sapien
tccctcaccaagatgatcaccaggtccagtatg

SEQ ID NO: 131053 - DNA, 33 bp, Homo sapien
tcactctcccttctcaaatggttgttagtatca

SEQ ID NO: 131054 - DNA, 33 bp, Homo sapien
tcactctcccttctcagatggttgttagtatca

SEQ ID NO: 131055 - DNA, 33 bp, Homo sapien
agaaatgctggtttacacctttttcctcttact

SEQ ID NO: 131056 - DNA, 33 bp, Homo sapien
agaaatgctggtttacgcctttttcctcttact

SEQ ID NO: 131057 - DNA, 33 bp, Homo sapien
tgggcttccccagacacgaatggtacctgtctc

SEQ ID NO: 131058 - DNA, 33 bp, Homo sapien
tgggcttccccagacatgaatggtacctgtctc

SEQ ID NO: 131059 - DNA, 33 bp, Homo sapien
tctggaggttctgtctaaacttaaaatctcagc

SEQ ID NO: 131060 - DNA, 33 bp, Homo sapien
tctggaggttctgtctgaacttaaaatctcagc

SEQ ID NO: 131061 - DNA, 33 bp, Homo sapien
gtctgtctgcagtatcagaattgggagtgatta

SEQ ID NO: 131062 - DNA, 33 bp, Homo sapien
gtctgtctgcagtatcggaattgggagtgatta

SEQ ID NO: 131063 - DNA, 33 bp, Homo sapien
caaacagatgctattaaacttgtaggtaatgac

SEQ ID NO: 131064 - DNA, 33 bp, Homo sapien
caaacagatgctattagacttgtaggtaatgac

SEQ ID NO: 131065 - DNA, 33 bp, Homo sapien
gcaatcataggctagcacaagggaaactactca

SEQ ID NO: 131066 - DNA, 33 bp, Homo sapien
gcaatcataggctagcgcaagggaaactactca

SEQ ID NO: 131067 - DNA, 33 bp, Homo sapien
aactttctgacagctcactcttgaagggtagtt

SEQ ID NO: 131068 - DNA, 33 bp, Homo sapien
aactttctgacagctcgctcttgaagggtagtt

SEQ ID NO: 131069 - DNA, 33 bp, Homo sapien
aatgaaacattgttaacagtttctatcaaggcc

SEQ ID NO: 131070 - DNA, 33 bp, Homo sapien
aatgaaacattgttaagagtttctatcaaggcc

SEQ ID NO: 131071 - DNA, 33 bp, Homo sapien
aaaatgcagtcatgatcacgagttgcatgcctg

SEQ ID NO: 131072 - DNA, 33 bp, Homo sapien
aaaatgcagtcatgattacgagttgcatgcctg

SEQ ID NO: 131073 - DNA, 33 bp, Homo sapien
tctgcttttaggactcaacaagaatggcattag

SEQ ID NO: 131074 - DNA, 33 bp, Homo sapien
tctgcttttaggactcgacaagaatggcattag

SEQ ID NO: 131075 - DNA, 33 bp, Homo sapien
caatgtggcatagttacggacgtgctttaggaa

SEQ ID NO: 131076 - DNA, 33 bp, Homo sapien
caatgtggcatagttagggacgtgctttaggaa

SEQ ID NO: 131077 - DNA, 33 bp, Homo sapien
tggtagtaaagggccaacagcagttattttgat

SEQ ID NO: 131078 - DNA, 33 bp, Homo sapien
tggtagtaaagggccaccagcagttattttgat

SEQ ID NO: 131079 - DNA, 33 bp, Homo sapien
tagctcagtcatcaaaccagaagtctggctttg

SEQ ID NO: 131080 - DNA, 33 bp, Homo sapien
tagctcagtcatcaaagcagaagtctggctttg

SEQ ID NO: 131081 - DNA, 33 bp, Homo sapien
agctcttagaaacccaagtattgctcaagatgg

SEQ ID NO: 131082 - DNA, 33 bp, Homo sapien
agctcttagaaacccaggtattgctcaagatgg

SEQ ID NO: 131083 - DNA, 33 bp, Homo sapien
gtatttctaaactggcaatcaataatttgaaaa

SEQ ID NO: 131084 - DNA, 33 bp, Homo sapien
gtatttctaaactggcgatcaataatttgaaaa

SEQ ID NO: 131085 - DNA, 33 bp, Homo sapien
tacctcacaccatgtacaagtattaactcaaaa

SEQ ID NO: 131086 - DNA, 33 bp, Homo sapien
tacctcacaccatgtataagtattaactcaaaa

SEQ ID NO: 131087 - DNA, 33 bp, Homo sapien
ctaaaaaagagtgtataaaagaatgttgtccaa

SEQ ID NO: 131088 - DNA, 33 bp, Homo sapien
ctaaaaaagagtgtatgaaagaatgttgtccaa

SEQ ID NO: 131089 - DNA, 33 bp, Homo sapien
tatattgctgtgactacgcaaatattgttcaca

SEQ ID NO: 131090 - DNA, 33 bp, Homo sapien
tatattgctgtgactatgcaaatattgttcaca

SEQ ID NO: 131091 - DNA, 33 bp, Homo sapien
ccacttctttaccagcacttgatattatcagac

SEQ ID NO: 131092 - DNA, 33 bp, Homo sapien
ccacttctttaccagcgcttgatattatcagac

SEQ ID NO: 131093 - DNA, 33 bp, Homo sapien
tatttactattgccaacgtaacagaaagacttt

SEQ ID NO: 131094 - DNA, 33 bp, Homo sapien
tatttactattgccaatgtaacagaaagacttt

SEQ ID NO: 131095 - DNA, 33 bp, Homo sapien
aaagaaacattaggaaagtgtaatttaaaaagc

SEQ ID NO: 131096 - DNA, 33 bp, Homo sapien
aaagaaacattaggaaggtgtaatttaaaaagc

SEQ ID NO: 131097 - DNA, 33 bp, Homo sapien
cctcagatgtggtcacagaagtcatttctgaag

SEQ ID NO: 131098 - DNA, 33 bp, Homo sapien
cctcagatgtggtcacggaagtcatttctgaag

SEQ ID NO: 131099 - DNA, 33 bp, Homo sapien
attgaccatggtaagccaatttaattattccat

SEQ ID NO: 131100 - DNA, 33 bp, Homo sapien
attgaccatggtaagctaatttaattattccat

SEQ ID NO: 131101 - DNA, 33 bp, Homo sapien
gagtgttcttttgatcaactcaatctttctctg

SEQ ID NO: 131102 - DNA, 33 bp, Homo sapien
gagtgttcttttgatcgactcaatctttctctg

SEQ ID NO: 131103 - DNA, 33 bp, Homo sapien
gtgggatggaattctcaaagcccaacttccttg

SEQ ID NO: 131104 - DNA, 33 bp, Homo sapien
gtgggatggaattctcgaagcccaacttccttg

SEQ ID NO: 131105 - DNA, 33 bp, Homo sapien
gacacaggtgaaaagacagatgtacacagaagg

SEQ ID NO: 131106 - DNA, 33 bp, Homo sapien
gacacaggtgaaaagagagatgtacacagaagg

SEQ ID NO: 131107 - DNA, 33 bp, Homo sapien
ataccagacaggataacgtggacaatctattga

SEQ ID NO: 131108 - DNA, 33 bp, Homo sapien
ataccagacaggataatgtggacaatctattga

SEQ ID NO: 131109 - DNA, 33 bp, Homo sapien
gattcaggccagtaatcagaatgaagtttgggg

SEQ ID NO: 131110 - DNA, 33 bp, Homo sapien
gattcaggccagtaattagaatgaagtttgggg

SEQ ID NO: 131111 - DNA, 33 bp, Homo sapien
tactgcctttgctaatcaaccacagctccaata

SEQ ID NO: 131112 - DNA, 33 bp, Homo sapien
tactgcctttgctaattaaccacagctccaata

SEQ ID NO: 131113 - DNA, 33 bp, Homo sapien
agattccttcacaagcaaagcacaaatgttcgg

SEQ ID NO: 131114 - DNA, 33 bp, Homo sapien
agattccttcacaagcgaagcacaaatgttcgg

SEQ ID NO: 131115 - DNA, 33 bp, Homo sapien
ttggttgctaggaggaagtaggtcaggagaagg

SEQ ID NO: 131116 - DNA, 33 bp, Homo sapien
ttggttgctaggaggacgtaggtcaggagaagg

SEQ ID NO: 131117 - DNA, 33 bp, Homo sapien
ttctctgcagtaaggacacctggtacctgcccc

SEQ ID NO: 131118 - DNA, 33 bp, Homo sapien
ttctctgcagtaaggatacctggtacctgcccc

SEQ ID NO: 131119 - DNA, 33 bp, Homo sapien
tatttcaatgctatggaattgttttgaaggtca

SEQ ID NO: 131120 - DNA, 33 bp, Homo sapien
tatttcaatgctatgggattgttttgaaggtca

SEQ ID NO: 131121 - DNA, 33 bp, Homo sapien
tctatttgcagatttgcagacagcatgactgtc

SEQ ID NO: 131122 - DNA, 33 bp, Homo sapien
tctatttgcagatttgtagacagcatgactgtc

SEQ ID NO: 131123 - DNA, 33 bp, Homo sapien
accacagactctgtcagactaattgtttcatgt

SEQ ID NO: 131124 - DNA, 33 bp, Homo sapien
accacagactctgtcatactaattgtttcatgt

SEQ ID NO: 131125 - DNA, 33 bp, Homo sapien
gccccctgccctttgcacatgagaatttgacct

SEQ ID NO: 131126 - DNA, 33 bp, Homo sapien
gccccctgccctttgcgcatgagaatttgacct

SEQ ID NO: 131127 - DNA, 33 bp, Homo sapien
tctgaaggaagaaaggcaagtagctgactggtc

SEQ ID NO: 131128 - DNA, 33 bp, Homo sapien
tctgaaggaagaaagggaagtagctgactggtc

SEQ ID NO: 131129 - DNA, 33 bp, Homo sapien
gtacctggaaaggattaaagtcgagggctctga

SEQ ID NO: 131130 - DNA, 33 bp, Homo sapien
gtacctggaaaggattcaagtcgagggctctga

SEQ ID NO: 131131 - DNA, 33 bp, Homo sapien
gcaatagcagtgtcaggctgaatgcatgtgata

SEQ ID NO: 131132 - DNA, 33 bp, Homo sapien
gcaatagcagtgtcagtctgaatgcatgtgata

SEQ ID NO: 131133 - DNA, 33 bp, Homo sapien
tttgccaagttggagaaaagttaattctgggct

SEQ ID NO: 131134 - DNA, 33 bp, Homo sapien
tttgccaagttggagagaagttaattctgggct

SEQ ID NO: 131135 - DNA, 33 bp, Homo sapien
gttgccccatgtgcccaagtctacacaagagtc

SEQ ID NO: 131136 - DNA, 33 bp, Homo sapien
gttgccccatgtgcccgagtctacacaagagtc

SEQ ID NO: 131137 - DNA, 33 bp, Homo sapien
tagcttcccgactaggcccattccgcgtctgag

SEQ ID NO: 131138 - DNA, 33 bp, Homo sapien
tagcttcccgactagggccattccgcgtctgag

SEQ ID NO: 131139 - DNA, 33 bp, Homo sapien
gttcgtgctgattaacaggagaaattattctga

SEQ ID NO: 131140 - DNA, 33 bp, Homo sapien
gttcgtgctgattaacgggagaaattattctga

SEQ ID NO: 131141 - DNA, 33 bp, Homo sapien
gaatcagttaagataaactaggcttcaagccag

SEQ ID NO: 131142 - DNA, 33 bp, Homo sapien
gaatcagttaagataagctaggcttcaagccag

SEQ ID NO: 131143 - DNA, 33 bp, Homo sapien
gacccctgagggaaagactatgtcccagaatac

SEQ ID NO: 131144 - DNA, 33 bp, Homo sapien
gacccctgagggaaaggctatgtcccagaatac

SEQ ID NO: 131145 - DNA, 33 bp, Homo sapien
acacacgcacacattccgaagttgacagactaa

SEQ ID NO: 131146 - DNA, 33 bp, Homo sapien
acacacgcacacattctgaagttgacagactaa

SEQ ID NO: 131147 - DNA, 33 bp, Homo sapien
gaatgagtccttattacacctggagaagctgtt

SEQ ID NO: 131148 - DNA, 33 bp, Homo sapien
gaatgagtccttattatacctggagaagctgtt

SEQ ID NO: 131149 - DNA, 33 bp, Homo sapien
ctatgtgggccagacaagtcacgtgagtgagat

SEQ ID NO: 131150 - DNA, 33 bp, Homo sapien
ctatgtgggccagacaggtcacgtgagtgagat

SEQ ID NO: 131151 - DNA, 33 bp, Homo sapien
ttgcccaagcagtggacagtgatggtggagata

SEQ ID NO: 131152 - DNA, 33 bp, Homo sapien
ttgcccaagcagtggatagtgatggtggagata

SEQ ID NO: 131153 - DNA, 33 bp, Homo sapien
atgtcccaagcagaacacgactagtcagagaag

SEQ ID NO: 131154 - DNA, 33 bp, Homo sapien
atgtcccaagcagaacgcgactagtcagagaag

SEQ ID NO: 131155 - DNA, 33 bp, Homo sapien
gttgtaggtgtcattacgtgtgactgtcatagt

SEQ ID NO: 131156 - DNA, 33 bp, Homo sapien
gttgtaggtgtcattatgtgtgactgtcatagt

SEQ ID NO: 131157 - DNA, 33 bp, Homo sapien
gaatcctttaacaatccgactctgctcttcctt

SEQ ID NO: 131158 - DNA, 33 bp, Homo sapien
gaatcctttaacaatctgactctgctcttcctt

SEQ ID NO: 131159 - DNA, 33 bp, Homo sapien
tgcagagcttggaatgacacactgaaccatctt

SEQ ID NO: 131160 - DNA, 33 bp, Homo sapien
tgcagagcttggaatgccacactgaaccatctt

SEQ ID NO: 131161 - DNA, 33 bp, Homo sapien
gattaatgtgcagggaactctggagataagaac

SEQ ID NO: 131162 - DNA, 33 bp, Homo sapien
gattaatgtgcagggagctctggagataagaac

SEQ ID NO: 131163 - DNA, 33 bp, Homo sapien
aattgtgatcgagtgtaaagctatatgagacac

SEQ ID NO: 131164 - DNA, 33 bp, Homo sapien
aattgtgatcgagtgtcaagctatatgagacac

SEQ ID NO: 131165 - DNA, 33 bp, Homo sapien
ctaatatttcatctcaatctctagtttgtcttt

SEQ ID NO: 131166 - DNA, 33 bp, Homo sapien
ctaatatttcatctcagtctctagtttgtcttt

SEQ ID NO: 131167 - DNA, 33 bp, Homo sapien
actagatggtagaggcaagtttcttctggctga

SEQ ID NO: 131168 - DNA, 33 bp, Homo sapien
actagatggtagaggctagtttcttctggctga

SEQ ID NO: 131169 - DNA, 33 bp, Homo sapien
agtccctaagtgccacaaatgaaaagaagactc

SEQ ID NO: 131170 - DNA, 33 bp, Homo sapien
agtccctaagtgccacgaatgaaaagaagactc

SEQ ID NO: 131171 - DNA, 33 bp, Homo sapien
cccaaagatgccggacagataccccaagaggtg

SEQ ID NO: 131172 - DNA, 33 bp, Homo sapien
cccaaagatgccggacggataccccaagaggtg

SEQ ID NO: 131173 - DNA, 33 bp, Homo sapien
gaatcaggttctgatcaagatccacaaatttta

SEQ ID NO: 131174 - DNA, 33 bp, Homo sapien
gaatcaggttctgatcgagatccacaaatttta

SEQ ID NO: 131175 - DNA, 33 bp, Homo sapien
gcctcctgaccaacagaccctacatctgattct

SEQ ID NO: 131176 - DNA, 33 bp, Homo sapien
gcctcctgaccaacagtccctacatctgattct

SEQ ID NO: 131177 - DNA, 33 bp, Homo sapien
tctaacatcaaatgtcaaaacatcttaataccc

SEQ ID NO: 131178 - DNA, 33 bp, Homo sapien
tctaacatcaaatgtccaaacatcttaataccc

SEQ ID NO: 131179 - DNA, 33 bp, Homo sapien
tatccggttctggaaccagctccacctttcact

SEQ ID NO: 131180 - DNA, 33 bp, Homo sapien
tatccggttctggaactagctccacctttcact

SEQ ID NO: 131181 - DNA, 33 bp, Homo sapien
ctgcctgaaacccagcactaggtagtgtagcca

SEQ ID NO: 131182 - DNA, 33 bp, Homo sapien
ctgcctgaaacccagcgctaggtagtgtagcca

SEQ ID NO: 131183 - DNA, 33 bp, Homo sapien
tcactggattccagtgcacagattctggcctac

SEQ ID NO: 131184 - DNA, 33 bp, Homo sapien
tcactggattccagtgtacagattctggcctac

SEQ ID NO: 131185 - DNA, 33 bp, Homo sapien
taactaaatatccaagaccacacctccagagat

SEQ ID NO: 131186 - DNA, 33 bp, Homo sapien
taactaaatatccaaggccacacctccagagat

SEQ ID NO: 131187 - DNA, 33 bp, Homo sapien
aatacacactgggagccactgaagatttccaag

SEQ ID NO: 131188 - DNA, 33 bp, Homo sapien
aatacacactgggagcgactgaagatttccaag

SEQ ID NO: 131189 - DNA, 33 bp, Homo sapien
agcagaaacatacacaatgagaccatcaaactt

SEQ ID NO: 131190 - DNA, 33 bp, Homo sapien
agcagaaacatacacagtgagaccatcaaactt

SEQ ID NO: 131191 - DNA, 33 bp, Homo sapien
tattcatccattttcaatacattttcagatttc

SEQ ID NO: 131192 - DNA, 33 bp, Homo sapien
tattcatccattttcagtacattttcagatttc

SEQ ID NO: 131193 - DNA, 33 bp, Homo sapien
ccacatgaataactaccagggtgcgataggctg

SEQ ID NO: 131194 - DNA, 33 bp, Homo sapien
ccacatgaataactactagggtgcgataggctg

SEQ ID NO: 131195 - DNA, 33 bp, Homo sapien
gaatctcatctgctaacgattgtcagtgattcc

SEQ ID NO: 131196 - DNA, 33 bp, Homo sapien
gaatctcatctgctaatgattgtcagtgattcc

SEQ ID NO: 131197 - DNA, 33 bp, Homo sapien
gattttaatgcaatcaacaaaactaggcatgta

SEQ ID NO: 131198 - DNA, 33 bp, Homo sapien
gattttaatgcaatcagcaaaactaggcatgta

SEQ ID NO: 131199 - DNA, 33 bp, Homo sapien
ggggacttcagtataacgttggagactggccgg

SEQ ID NO: 131200 - DNA, 33 bp, Homo sapien
ggggacttcagtataatgttggagactggccgg

SEQ ID NO: 131201 - DNA, 33 bp, Homo sapien
ctgggacaagatgaaaagcaaaagttttcaaaa

SEQ ID NO: 131202 - DNA, 33 bp, Homo sapien
ctgggacaagatgaaacgcaaaagttttcaaaa

SEQ ID NO: 131203 - DNA, 33 bp, Homo sapien
caagttctgcaagcgaagttgtagaactcacat

SEQ ID NO: 131204 - DNA, 33 bp, Homo sapien
caagttctgcaagcgaggttgtagaactcacat

SEQ ID NO: 131205 - DNA, 33 bp, Homo sapien
gaaataattctggatgcaggtgacgcttgagat

SEQ ID NO: 131206 - DNA, 33 bp, Homo sapien
gaaataattctggatgtaggtgacgcttgagat

SEQ ID NO: 131207 - DNA, 33 bp, Homo sapien
tagacaattgctcagcgatgtaactagacgact

SEQ ID NO: 131208 - DNA, 33 bp, Homo sapien
tagacaattgctcagctatgtaactagacgact

SEQ ID NO: 131209 - DNA, 33 bp, Homo sapien
gttactgacaatcccccgagggtgctcttttgg

SEQ ID NO: 131210 - DNA, 33 bp, Homo sapien
gttactgacaatcccctgagggtgctcttttgg

SEQ ID NO: 131211 - DNA, 33 bp, Homo sapien
cactgctaggagaatgaatgtactcacctagag

SEQ ID NO: 131212 - DNA, 33 bp, Homo sapien
cactgctaggagaatgcatgtactcacctagag

SEQ ID NO: 131213 - DNA, 33 bp, Homo sapien
atattatatgataataaatggtgtgcaaaaact

SEQ ID NO: 131214 - DNA, 33 bp, Homo sapien
atattatatgataatacatggtgtgcaaaaact

SEQ ID NO: 131215 - DNA, 33 bp, Homo sapien
aacacagtgttaatagaagtttcatgcagggct

SEQ ID NO: 131216 - DNA, 33 bp, Homo sapien
aacacagtgttaataggagtttcatgcagggct

SEQ ID NO: 131217 - DNA, 33 bp, Homo sapien
agaccagctccctatcacctcatgcctcatgta

SEQ ID NO: 131218 - DNA, 33 bp, Homo sapien
agaccagctccctatcgcctcatgcctcatgta

SEQ ID NO: 131219 - DNA, 33 bp, Homo sapien
gtgcttctcatttccacggcttaatcccctcat

SEQ ID NO: 131220 - DNA, 33 bp, Homo sapien
gtgcttctcatttccatggcttaatcccctcat

SEQ ID NO: 131221 - DNA, 33 bp, Homo sapien
ggctgcataatcttccactgttcgatgtacatg

SEQ ID NO: 131222 - DNA, 33 bp, Homo sapien
ggctgcataatcttccgctgttcgatgtacatg

SEQ ID NO: 131223 - DNA, 33 bp, Homo sapien
caacagtgattttcctgaaatgtccttctcttt

SEQ ID NO: 131224 - DNA, 33 bp, Homo sapien
caacagtgattttccttaaatgtccttctcttt

SEQ ID NO: 131225 - DNA, 33 bp, Homo sapien
cagggcagaatctgaactgaagaaagcaaaatg

SEQ ID NO: 131226 - DNA, 33 bp, Homo sapien
cagggcagaatctgaattgaagaaagcaaaatg

SEQ ID NO: 131227 - DNA, 33 bp, Homo sapien
aacttcatgtagagaaagtgatcatgaatgttg

SEQ ID NO: 131228 - DNA, 33 bp, Homo sapien
aacttcatgtagagaaggtgatcatgaatgttg

SEQ ID NO: 131229 - DNA, 33 bp, Homo sapien
tcattttctgcctgcggatgaagactcagtttt

SEQ ID NO: 131230 - DNA, 33 bp, Homo sapien
tcattttctgcctgcgtatgaagactcagtttt

SEQ ID NO: 131231 - DNA, 33 bp, Homo sapien
ggccatatttgaccagaataaaagctgtgccac

SEQ ID NO: 131232 - DNA, 33 bp, Homo sapien
ggccatatttgaccagcataaaagctgtgccac

SEQ ID NO: 131233 - DNA, 33 bp, Homo sapien
tggataaaaaggactcagagaataaaatcccga

SEQ ID NO: 131234 - DNA, 33 bp, Homo sapien
tggataaaaaggactccgagaataaaatcccga

SEQ ID NO: 131235 - DNA, 33 bp, Homo sapien
atagctagggaaggataaatcactcagacgtgt

SEQ ID NO: 131236 - DNA, 33 bp, Homo sapien
atagctagggaaggatgaatcactcagacgtgt

SEQ ID NO: 131237 - DNA, 33 bp, Homo sapien
ttattattagagatcacagcatgctaaattgca

SEQ ID NO: 131238 - DNA, 33 bp, Homo sapien
ttattattagagatcagagcatgctaaattgca

SEQ ID NO: 131239 - DNA, 33 bp, Homo sapien
aggattgagactcaaactgcactgaacacctca

SEQ ID NO: 131240 - DNA, 33 bp, Homo sapien
aggattgagactcaaattgcactgaacacctca

SEQ ID NO: 131241 - DNA, 33 bp, Homo sapien
atttaagcagttctggaagacacacatgctctg

SEQ ID NO: 131242 - DNA, 33 bp, Homo sapien
atttaagcagttctgggagacacacatgctctg

SEQ ID NO: 131243 - DNA, 33 bp, Homo sapien
atctcccccatcttgaacttcagaaagctggca

SEQ ID NO: 131244 - DNA, 33 bp, Homo sapien
atctcccccatcttgaccttcagaaagctggca

SEQ ID NO: 131245 - DNA, 33 bp, Homo sapien
tccaagttctcacgacaagggcaacaagactct

SEQ ID NO: 131246 - DNA, 33 bp, Homo sapien
tccaagttctcacgacgagggcaacaagactct

SEQ ID NO: 131247 - DNA, 33 bp, Homo sapien
gctgtgcgggattggcaatttagagaccatgat

SEQ ID NO: 131248 - DNA, 33 bp, Homo sapien
gctgtgcgggattggcgatttagagaccatgat

SEQ ID NO: 131249 - DNA, 33 bp, Homo sapien
ctcatctataaaacaacaggttgaactgggaga

SEQ ID NO: 131250 - DNA, 33 bp, Homo sapien
ctcatctataaaacaagaggttgaactgggaga

SEQ ID NO: 131251 - DNA, 33 bp, Homo sapien
acagaagaggccatgacagtaattaacaagaga

SEQ ID NO: 131252 - DNA, 33 bp, Homo sapien
acagaagaggccatgatagtaattaacaagaga

SEQ ID NO: 131253 - DNA, 33 bp, Homo sapien
cataattcaagtctagacccagaatagtttgtt

SEQ ID NO: 131254 - DNA, 33 bp, Homo sapien
cataattcaagtctaggcccagaatagtttgtt

SEQ ID NO: 131255 - DNA, 33 bp, Homo sapien
ggactggggctactcagaagttaacatggcggg

SEQ ID NO: 131256 - DNA, 33 bp, Homo sapien
ggactggggctactcataagttaacatggcggg

SEQ ID NO: 131257 - DNA, 33 bp, Homo sapien
gccaggtagctggaatacattggtccaaccatg

SEQ ID NO: 131258 - DNA, 33 bp, Homo sapien
gccaggtagctggaatccattggtccaaccatg

SEQ ID NO: 131259 - DNA, 33 bp, Homo sapien
cgtacctctttttgaggcagggaaggagcagtg

SEQ ID NO: 131260 - DNA, 33 bp, Homo sapien
cgtacctctttttgagtcagggaaggagcagtg

SEQ ID NO: 131261 - DNA, 33 bp, Homo sapien
taggaaaaagagctgacgatttattagagggtc

SEQ ID NO: 131262 - DNA, 33 bp, Homo sapien
taggaaaaagagctgatgatttattagagggtc

SEQ ID NO: 131263 - DNA, 33 bp, Homo sapien
agaaagggccaagcagaagcaaaattcatgtgt

SEQ ID NO: 131264 - DNA, 33 bp, Homo sapien
agaaagggccaagcagcagcaaaattcatgtgt

SEQ ID NO: 131265 - DNA, 33 bp, Homo sapien
aaagagaacactatgagaaagagcacatgagac

SEQ ID NO: 131266 - DNA, 33 bp, Homo sapien
aaagagaacactatgataaagagcacatgagac

SEQ ID NO: 131267 - DNA, 33 bp, Homo sapien
ttgacctgacaatttcccttttaatgtatctta

SEQ ID NO: 131268 - DNA, 33 bp, Homo sapien
ttgacctgacaatttcgcttttaatgtatctta

SEQ ID NO: 131269 - DNA, 33 bp, Homo sapien
agggtcccgggtcaaactcttgcaaaggaaaaa

SEQ ID NO: 131270 - DNA, 33 bp, Homo sapien
agggtcccgggtcaaattcttgcaaaggaaaaa

SEQ ID NO: 131271 - DNA, 33 bp, Homo sapien
ccagagtaagaccttgaatcaaaatgagtaaat

SEQ ID NO: 131272 - DNA, 33 bp, Homo sapien
ccagagtaagaccttgtatcaaaatgagtaaat

SEQ ID NO: 131273 - DNA, 33 bp, Homo sapien
attatcctttaagaaaagtgttatcctggccca

SEQ ID NO: 131274 - DNA, 33 bp, Homo sapien
attatcctttaagaaaggtgttatcctggccca

SEQ ID NO: 131275 - DNA, 33 bp, Homo sapien
gatgcctttttaaacgcagctgtcccaacacca

SEQ ID NO: 131276 - DNA, 33 bp, Homo sapien
gatgcctttttaaacggagctgtcccaacacca

SEQ ID NO: 131277 - DNA, 33 bp, Homo sapien
aagcggaggatcccaaattcctctgcaaatagt

SEQ ID NO: 131278 - DNA, 33 bp, Homo sapien
aagcggaggatcccaatttcctctgcaaatagt

SEQ ID NO: 131279 - DNA, 33 bp, Homo sapien
ggatggacagtcaagacgattaaggctgaatga

SEQ ID NO: 131280 - DNA, 33 bp, Homo sapien
ggatggacagtcaagatgattaaggctgaatga

SEQ ID NO: 131281 - DNA, 33 bp, Homo sapien
ggtcatagagccatagaaggaagctgtcagccc

SEQ ID NO: 131282 - DNA, 33 bp, Homo sapien
ggtcatagagccatagtaggaagctgtcagccc

SEQ ID NO: 131283 - DNA, 33 bp, Homo sapien
ctacagccttgtcctccaattgataatgtatgt

SEQ ID NO: 131284 - DNA, 33 bp, Homo sapien
ctacagccttgtcctctaattgataatgtatgt

SEQ ID NO: 131285 - DNA, 33 bp, Homo sapien
cagcggcctcgcaggcaacctgtaagcagggca

SEQ ID NO: 131286 - DNA, 33 bp, Homo sapien
cagcggcctcgcaggcgacctgtaagcagggca

SEQ ID NO: 131287 - DNA, 33 bp, Homo sapien
cctcataataatcctacgaagctagaaatatcc

SEQ ID NO: 131288 - DNA, 33 bp, Homo sapien
cctcataataatcctatgaagctagaaatatcc

SEQ ID NO: 131289 - DNA, 33 bp, Homo sapien
ttgctgagagacagtaggtaaaaggcttagaaa

SEQ ID NO: 131290 - DNA, 33 bp, Homo sapien
ttgctgagagacagtatgtaaaaggcttagaaa

SEQ ID NO: 131291 - DNA, 33 bp, Homo sapien
cagcctcatatgtgcacacgctttaagtccatg

SEQ ID NO: 131292 - DNA, 33 bp, Homo sapien
cagcctcatatgtgcatacgctttaagtccatg

SEQ ID NO: 131293 - DNA, 33 bp, Homo sapien
cggttttggatcaaaacagggtgcagtctgagc

SEQ ID NO: 131294 - DNA, 33 bp, Homo sapien
cggttttggatcaaaagagggtgcagtctgagc

SEQ ID NO: 131295 - DNA, 33 bp, Homo sapien
agcagtgcaggtaagcagaacccccaggctgaa

SEQ ID NO: 131296 - DNA, 33 bp, Homo sapien
agcagtgcaggtaagcggaacccccaggctgaa

SEQ ID NO: 131297 - DNA, 33 bp, Homo sapien
gaactacctggctacaaagggaaagaaacccca

SEQ ID NO: 131298 - DNA, 33 bp, Homo sapien
gaactacctggctacacagggaaagaaacccca

SEQ ID NO: 131299 - DNA, 33 bp, Homo sapien
caacctgctctactacgacattcctttttgctg

SEQ ID NO: 131300 - DNA, 33 bp, Homo sapien
caacctgctctactactacattcctttttgctg

SEQ ID NO: 131301 - DNA, 33 bp, Homo sapien
cccacctgcaatgcccaaatgagcagcggctcc

SEQ ID NO: 131302 - DNA, 33 bp, Homo sapien
cccacctgcaatgcccgaatgagcagcggctcc

SEQ ID NO: 131303 - DNA, 33 bp, Homo sapien
atttccaggattatgcgcacatgcacatataat

SEQ ID NO: 131304 - DNA, 33 bp, Homo sapien
atttccaggattatgctcacatgcacatataat

SEQ ID NO: 131305 - DNA, 33 bp, Homo sapien
atcatcggaagtacacacagtctcagacacaaa

SEQ ID NO: 131306 - DNA, 33 bp, Homo sapien
atcatcggaagtacacgcagtctcagacacaaa

SEQ ID NO: 131307 - DNA, 33 bp, Homo sapien
atctataatctttctacgacctgaggaaccttg

SEQ ID NO: 131308 - DNA, 33 bp, Homo sapien
atctataatctttctatgacctgaggaaccttg

SEQ ID NO: 131309 - DNA, 33 bp, Homo sapien
cctggagaagtactgcaagttttgacagcatta

SEQ ID NO: 131310 - DNA, 33 bp, Homo sapien
cctggagaagtactgcgagttttgacagcatta

SEQ ID NO: 131311 - DNA, 33 bp, Homo sapien
agaaactatgcagaacaaaaagatgtccctaca

SEQ ID NO: 131312 - DNA, 33 bp, Homo sapien
agaaactatgcagaaccaaaagatgtccctaca

SEQ ID NO: 131313 - DNA, 33 bp, Homo sapien
atcctgaggttctccccatcctacaccatgtcc

SEQ ID NO: 131314 - DNA, 33 bp, Homo sapien
atcctgaggttctccctatcctacaccatgtcc

SEQ ID NO: 131315 - DNA, 33 bp, Homo sapien
tcagggtcttctatcaactcctgtctctcaggc

SEQ ID NO: 131316 - DNA, 33 bp, Homo sapien
tcagggtcttctatcagctcctgtctctcaggc

SEQ ID NO: 131317 - DNA, 33 bp, Homo sapien
tggtttctagtcctctcaacccatcaaggtgga

SEQ ID NO: 131318 - DNA, 33 bp, Homo sapien
tggtttctagtcctcttaacccatcaaggtgga

SEQ ID NO: 131319 - DNA, 33 bp, Homo sapien
ttttcttttttaggtaaagaggcggtctcgcca

SEQ ID NO: 131320 - DNA, 33 bp, Homo sapien
ttttcttttttaggtagagaggcggtctcgcca

SEQ ID NO: 131321 - DNA, 33 bp, Homo sapien
atgcgcatccaaatcacgaggggatcttgttaa

SEQ ID NO: 131322 - DNA, 33 bp, Homo sapien
atgcgcatccaaatcatgaggggatcttgttaa

SEQ ID NO: 131323 - DNA, 33 bp, Homo sapien
ctcctatccctaactccactgtggcaaaatccc

SEQ ID NO: 131324 - DNA, 33 bp, Homo sapien
ctcctatccctaactctactgtggcaaaatccc

SEQ ID NO: 131325 - DNA, 33 bp, Homo sapien
ctaacagtcacttacaacaggcagctctttgca

SEQ ID NO: 131326 - DNA, 33 bp, Homo sapien
ctaacagtcacttacatcaggcagctctttgca

SEQ ID NO: 131327 - DNA, 33 bp, Homo sapien
caccaccgctttacaacatttgcataattcccc

SEQ ID NO: 131328 - DNA, 33 bp, Homo sapien
caccaccgctttacaatatttgcataattcccc

SEQ ID NO: 131329 - DNA, 33 bp, Homo sapien
atttactctttcatgtaaaatgtagaatctttt

SEQ ID NO: 131330 - DNA, 33 bp, Homo sapien
atttactctttcatgtgaaatgtagaatctttt

SEQ ID NO: 131331 - DNA, 33 bp, Homo sapien
cccaaaagagggattaactgatcaaagaatatg

SEQ ID NO: 131332 - DNA, 33 bp, Homo sapien
cccaaaagagggattatctgatcaaagaatatg

SEQ ID NO: 131333 - DNA, 33 bp, Homo sapien
tccaggtcctctgggaagactcatagcccaggt

SEQ ID NO: 131334 - DNA, 33 bp, Homo sapien
tccaggtcctctgggatgactcatagcccaggt

SEQ ID NO: 131335 - DNA, 33 bp, Homo sapien
ataaatacacaaccaacccatacgccaagcatt

SEQ ID NO: 131336 - DNA, 33 bp, Homo sapien
ataaatacacaaccaatccatacgccaagcatt

SEQ ID NO: 131337 - DNA, 33 bp, Homo sapien
ccaggaaggaataggaaggttcttagaaagcag

SEQ ID NO: 131338 - DNA, 33 bp, Homo sapien
ccaggaaggaataggatggttcttagaaagcag

SEQ ID NO: 131339 - DNA, 33 bp, Homo sapien
aagaaaggcatatgtgaatattgggcagccaaa

SEQ ID NO: 131340 - DNA, 33 bp, Homo sapien
aagaaaggcatatgtggatattgggcagccaaa

SEQ ID NO: 131341 - DNA, 33 bp, Homo sapien
ttttttctcttgcatccaggaaagacagatagc

SEQ ID NO: 131342 - DNA, 33 bp, Homo sapien
ttttttctcttgcatctaggaaagacagatagc

SEQ ID NO: 131343 - DNA, 33 bp, Homo sapien
gtaagcttagacttggaagatgttgagtttatg

SEQ ID NO: 131344 - DNA, 33 bp, Homo sapien
gtaagcttagacttgggagatgttgagtttatg

SEQ ID NO: 131345 - DNA, 33 bp, Homo sapien
cttaaataaatgggccaaagatcaagaagaaag

SEQ ID NO: 131346 - DNA, 33 bp, Homo sapien
cttaaataaatgggcccaagatcaagaagaaag

SEQ ID NO: 131347 - DNA, 33 bp, Homo sapien
tgcccccatgttgaataatatttttggctgtcc

SEQ ID NO: 131348 - DNA, 33 bp, Homo sapien
tgcccccatgttgaatgatatttttggctgtcc

SEQ ID NO: 131349 - DNA, 33 bp, Homo sapien
agggtgtttagatgtgaagcggccacacacaca

SEQ ID NO: 131350 - DNA, 33 bp, Homo sapien
agggtgtttagatgtggagcggccacacacaca

SEQ ID NO: 131351 - DNA, 33 bp, Homo sapien
cctgtcctttcatccaactcatgccccaataga

SEQ ID NO: 131352 - DNA, 33 bp, Homo sapien
cctgtcctttcatccacctcatgccccaataga

SEQ ID NO: 131353 - DNA, 33 bp, Homo sapien
agatagagaaagcaacagtggcttaaaatgcaa

SEQ ID NO: 131354 - DNA, 33 bp, Homo sapien
agatagagaaagcaacggtggcttaaaatgcaa

SEQ ID NO: 131355 - DNA, 33 bp, Homo sapien
accctcctctttgcaactaagacagtgatgctc

SEQ ID NO: 131356 - DNA, 33 bp, Homo sapien
accctcctctttgcaagtaagacagtgatgctc

SEQ ID NO: 131357 - DNA, 33 bp, Homo sapien
aatgttgacaactttacacctattaggatgact

SEQ ID NO: 131358 - DNA, 33 bp, Homo sapien
aatgttgacaactttatacctattaggatgact

SEQ ID NO: 131359 - DNA, 33 bp, Homo sapien
cccaaggacatatgccaaatacaagatagtagg

SEQ ID NO: 131360 - DNA, 33 bp, Homo sapien
cccaaggacatatgccgaatacaagatagtagg

SEQ ID NO: 131361 - DNA, 33 bp, Homo sapien
gtgttccacatgtcacacatagcggggtgggtc

SEQ ID NO: 131362 - DNA, 33 bp, Homo sapien
gtgttccacatgtcacgcatagcggggtgggtc

SEQ ID NO: 131363 - DNA, 33 bp, Homo sapien
tgagaaggccacctccaacatttcttcccttct

SEQ ID NO: 131364 - DNA, 33 bp, Homo sapien
tgagaaggccacctccgacatttcttcccttct

SEQ ID NO: 131365 - DNA, 33 bp, Homo sapien
gccaggatggacgtacaacttgtgtgaattcag

SEQ ID NO: 131366 - DNA, 33 bp, Homo sapien
gccaggatggacgtaccacttgtgtgaattcag

SEQ ID NO: 131367 - DNA, 33 bp, Homo sapien
tctcctgcctcttggcaatggctgcgcctccga

SEQ ID NO: 131368 - DNA, 33 bp, Homo sapien
tctcctgcctcttggcgatggctgcgcctccga

SEQ ID NO: 131369 - DNA, 33 bp, Homo sapien
tcttgttagcaattgacaaaactttgcttaaga

SEQ ID NO: 131370 - DNA, 33 bp, Homo sapien
tcttgttagcaattgataaaactttgcttaaga

SEQ ID NO: 131371 - DNA, 33 bp, Homo sapien
gaacataaaggaggccaaagggctgtcagcaga

SEQ ID NO: 131372 - DNA, 33 bp, Homo sapien
gaacataaaggaggccgaagggctgtcagcaga

SEQ ID NO: 131373 - DNA, 33 bp, Homo sapien
gagttgtcagtcttcccatgtcccacacgaagg

SEQ ID NO: 131374 - DNA, 33 bp, Homo sapien
gagttgtcagtcttcctatgtcccacacgaagg

SEQ ID NO: 131375 - DNA, 33 bp, Homo sapien
ggttggagtgaagtagcacaatctaggctcact

SEQ ID NO: 131376 - DNA, 33 bp, Homo sapien
ggttggagtgaagtaggacaatctaggctcact

SEQ ID NO: 131377 - DNA, 33 bp, Homo sapien
acttcctccttaggtcccaacacaggcgactcc

SEQ ID NO: 131378 - DNA, 33 bp, Homo sapien
acttcctccttaggtctcaacacaggcgactcc

SEQ ID NO: 131379 - DNA, 33 bp, Homo sapien
agactgagattcctagaagagtatggattctag

SEQ ID NO: 131380 - DNA, 33 bp, Homo sapien
agactgagattcctaggagagtatggattctag

SEQ ID NO: 131381 - DNA, 33 bp, Homo sapien
gtagagaaaatttcaccggactctaagagagca

SEQ ID NO: 131382 - DNA, 33 bp, Homo sapien
gtagagaaaatttcactggactctaagagagca

SEQ ID NO: 131383 - DNA, 33 bp, Homo sapien
agagactatctacagaaaaaatcgggttggagg

SEQ ID NO: 131384 - DNA, 33 bp, Homo sapien
agagactatctacagacaaaatcgggttggagg

SEQ ID NO: 131385 - DNA, 33 bp, Homo sapien
agaccttgagtataaacgtccgaagtactggaa

SEQ ID NO: 131386 - DNA, 33 bp, Homo sapien
agaccttgagtataaatgtccgaagtactggaa

SEQ ID NO: 131387 - DNA, 33 bp, Homo sapien
ctccatgacagccttaagtctgcacattcatcg

SEQ ID NO: 131388 - DNA, 33 bp, Homo sapien
ctccatgacagccttaggtctgcacattcatcg

SEQ ID NO: 131389 - DNA, 33 bp, Homo sapien
tcagactcttgttgaaccagtgatctctgagac

SEQ ID NO: 131390 - DNA, 33 bp, Homo sapien
tcagactcttgttgaatcagtgatctctgagac

SEQ ID NO: 131391 - DNA, 33 bp, Homo sapien
aactgaccatgtcacaaccctttcaatggcacc

SEQ ID NO: 131392 - DNA, 33 bp, Homo sapien
aactgaccatgtcacagccctttcaatggcacc

SEQ ID NO: 131393 - DNA, 33 bp, Homo sapien
gaaagcccttttgatagaagccaaatacctcag

SEQ ID NO: 131394 - DNA, 33 bp, Homo sapien
gaaagcccttttgatataagccaaatacctcag

SEQ ID NO: 131395 - DNA, 33 bp, Homo sapien
acatccatgagggcaaatagcccaggccgagct

SEQ ID NO: 131396 - DNA, 33 bp, Homo sapien
acatccatgagggcaagtagcccaggccgagct

SEQ ID NO: 131397 - DNA, 33 bp, Homo sapien
aacagaaatgatttgcactgcacctgtcagcca

SEQ ID NO: 131398 - DNA, 33 bp, Homo sapien
aacagaaatgatttgcgctgcacctgtcagcca

SEQ ID NO: 131399 - DNA, 33 bp, Homo sapien
gctgagggcacaggtgcaaagcaaggggcactt

SEQ ID NO: 131400 - DNA, 33 bp, Homo sapien
gctgagggcacaggtgtaaagcaaggggcactt

SEQ ID NO: 131401 - DNA, 33 bp, Homo sapien
agttctagctagtcaaaaggctcaggcagaagg

SEQ ID NO: 131402 - DNA, 33 bp, Homo sapien
agttctagctagtcaagaggctcaggcagaagg

SEQ ID NO: 131403 - DNA, 33 bp, Homo sapien
taatgaaagaatctgccgatgtcaattatgtac

SEQ ID NO: 131404 - DNA, 33 bp, Homo sapien
taatgaaagaatctgctgatgtcaattatgtac

SEQ ID NO: 131405 - DNA, 33 bp, Homo sapien
cgctagtttaaaagaactggcatacaaactcag

SEQ ID NO: 131406 - DNA, 33 bp, Homo sapien
cgctagtttaaaagaattggcatacaaactcag

SEQ ID NO: 131407 - DNA, 33 bp, Homo sapien
gccttttcccatagtccgaataaggtgctgtgt

SEQ ID NO: 131408 - DNA, 33 bp, Homo sapien
gccttttcccatagtctgaataaggtgctgtgt

SEQ ID NO: 131409 - DNA, 33 bp, Homo sapien
gtgaagagtgtgggaaatgctatggtagcatcc

SEQ ID NO: 131410 - DNA, 33 bp, Homo sapien
gtgaagagtgtgggaactgctatggtagcatcc

SEQ ID NO: 131411 - DNA, 33 bp, Homo sapien
ctcacaaataaccacagtaacagtttggtgtag

SEQ ID NO: 131412 - DNA, 33 bp, Homo sapien
ctcacaaataaccacattaacagtttggtgtag

SEQ ID NO: 131413 - DNA, 33 bp, Homo sapien
attttgaaatattacccataattcagcaactca

SEQ ID NO: 131414 - DNA, 33 bp, Homo sapien
attttgaaatattaccgataattcagcaactca

SEQ ID NO: 131415 - DNA, 33 bp, Homo sapien
tgtactcaaattgttacgtgagagaaatatcag

SEQ ID NO: 131416 - DNA, 33 bp, Homo sapien
tgtactcaaattgttatgtgagagaaatatcag

SEQ ID NO: 131417 - DNA, 33 bp, Homo sapien
aacaggttatatcacacggcatttgtgtatagt

SEQ ID NO: 131418 - DNA, 33 bp, Homo sapien
aacaggttatatcacatggcatttgtgtatagt

SEQ ID NO: 131419 - DNA, 33 bp, Homo sapien
ttttagatctaattgccgatgactaatataatg

SEQ ID NO: 131420 - DNA, 33 bp, Homo sapien
ttttagatctaattgctgatgactaatataatg

SEQ ID NO: 131421 - DNA, 33 bp, Homo sapien
gagtcaattggggtgaagttaggtgggaactga

SEQ ID NO: 131422 - DNA, 33 bp, Homo sapien
gagtcaattggggtgacgttaggtgggaactga

SEQ ID NO: 131423 - DNA, 33 bp, Homo sapien
taaagccacctgcatgacatacagcaagcacag

SEQ ID NO: 131424 - DNA, 33 bp, Homo sapien
taaagccacctgcatggcatacagcaagcacag

SEQ ID NO: 131425 - DNA, 33 bp, Homo sapien
ggaaatgctgtacatacgcaattggttaagttt

SEQ ID NO: 131426 - DNA, 33 bp, Homo sapien
ggaaatgctgtacatatgcaattggttaagttt

SEQ ID NO: 131427 - DNA, 33 bp, Homo sapien
actagtttaagagagcaaagataaagatcaggg

SEQ ID NO: 131428 - DNA, 33 bp, Homo sapien
actagtttaagagagcgaagataaagatcaggg

SEQ ID NO: 131429 - DNA, 33 bp, Homo sapien
ggacatagtgattggaaacagttcacttcaccc

SEQ ID NO: 131430 - DNA, 33 bp, Homo sapien
ggacatagtgattggagacagttcacttcaccc

SEQ ID NO: 131431 - DNA, 33 bp, Homo sapien
cttggatctcaacactaaatgacagatattaga

SEQ ID NO: 131432 - DNA, 33 bp, Homo sapien
cttggatctcaacactgaatgacagatattaga

SEQ ID NO: 131433 - DNA, 33 bp, Homo sapien
tcactgaagaaatttacagaaacacggtagttc

SEQ ID NO: 131434 - DNA, 33 bp, Homo sapien
tcactgaagaaatttagagaaacacggtagttc

SEQ ID NO: 131435 - DNA, 33 bp, Homo sapien
taccacctacttcctacaattgtcatatgaaat

SEQ ID NO: 131436 - DNA, 33 bp, Homo sapien
taccacctacttcctagaattgtcatatgaaat

SEQ ID NO: 131437 - DNA, 33 bp, Homo sapien
cttacatggtagctcaacgctctaaggagtaag

SEQ ID NO: 131438 - DNA, 33 bp, Homo sapien
cttacatggtagctcagcgctctaaggagtaag

SEQ ID NO: 131439 - DNA, 33 bp, Homo sapien
gttatggaaaaaggtaaattgagcatatgagtg

SEQ ID NO: 131440 - DNA, 33 bp, Homo sapien
gttatggaaaaaggtagattgagcatatgagtg

SEQ ID NO: 131441 - DNA, 33 bp, Homo sapien
gggaatgctatttcagcaaaataggagtcttgt

SEQ ID NO: 131442 - DNA, 33 bp, Homo sapien
gggaatgctatttcaggaaaataggagtcttgt

SEQ ID NO: 131443 - DNA, 33 bp, Homo sapien
cagtggatacaaaccacggatcaatattaggta

SEQ ID NO: 131444 - DNA, 33 bp, Homo sapien
cagtggatacaaaccagggatcaatattaggta

SEQ ID NO: 131445 - DNA, 33 bp, Homo sapien
tcctgaccattctctcaataagcttcttccaca

SEQ ID NO: 131446 - DNA, 33 bp, Homo sapien
tcctgaccattctctcgataagcttcttccaca

SEQ ID NO: 131447 - DNA, 33 bp, Homo sapien
atattgatatacatcaacaacatgtagtgccac

SEQ ID NO: 131448 - DNA, 33 bp, Homo sapien
atattgatatacatcagcaacatgtagtgccac

SEQ ID NO: 131449 - DNA, 33 bp, Homo sapien
ccagtgtacctgcatacatgaaatgttaaagta

SEQ ID NO: 131450 - DNA, 33 bp, Homo sapien
ccagtgtacctgcatatatgaaatgttaaagta

SEQ ID NO: 131451 - DNA, 33 bp, Homo sapien
ttagcagcctaataaaatgctcttaattggcaa

SEQ ID NO: 131452 - DNA, 33 bp, Homo sapien
ttagcagcctaataaagtgctcttaattggcaa

SEQ ID NO: 131453 - DNA, 33 bp, Homo sapien
gcctgggaccacatctaaagttgcaggcattgg

SEQ ID NO: 131454 - DNA, 33 bp, Homo sapien
gcctgggaccacatctgaagttgcaggcattgg

SEQ ID NO: 131455 - DNA, 33 bp, Homo sapien
gaggagttagctgtacactatttctggtttgtt

SEQ ID NO: 131456 - DNA, 33 bp, Homo sapien
gaggagttagctgtaccctatttctggtttgtt

SEQ ID NO: 131457 - DNA, 33 bp, Homo sapien
gctttctggacctgggaaagagagcggtgacag

SEQ ID NO: 131458 - DNA, 33 bp, Homo sapien
gctttctggacctggggaagagagcggtgacag

SEQ ID NO: 131459 - DNA, 33 bp, Homo sapien
tttaacatataatcaaatcagagtgacagcaga

SEQ ID NO: 131460 - DNA, 33 bp, Homo sapien
tttaacatataatcaagtcagagtgacagcaga

SEQ ID NO: 131461 - DNA, 33 bp, Homo sapien
ttgtcagaacaaccaacaagaagtgagtagcgt

SEQ ID NO: 131462 - DNA, 33 bp, Homo sapien
ttgtcagaacaaccaataagaagtgagtagcgt

SEQ ID NO: 131463 - DNA, 33 bp, Homo sapien
aagtccattcatggaaacttggcctttgcttca

SEQ ID NO: 131464 - DNA, 33 bp, Homo sapien
aagtccattcatggaagcttggcctttgcttca

SEQ ID NO: 131465 - DNA, 33 bp, Homo sapien
aaagagacagtgcagacagaaaatttaaattca

SEQ ID NO: 131466 - DNA, 33 bp, Homo sapien
aaagagacagtgcagatagaaaatttaaattca

SEQ ID NO: 131467 - DNA, 33 bp, Homo sapien
aacaagaagcatgcaaaaagacaagctatacat

SEQ ID NO: 131468 - DNA, 33 bp, Homo sapien
aacaagaagcatgcaataagacaagctatacat

SEQ ID NO: 131469 - DNA, 33 bp, Homo sapien
tcataagacagaaataataatagtacctaggca

SEQ ID NO: 131470 - DNA, 33 bp, Homo sapien
tcataagacagaaatagtaatagtacctaggca

SEQ ID NO: 131471 - DNA, 33 bp, Homo sapien
aatcagaaattaggtacgaggaaaccaaagctt

SEQ ID NO: 131472 - DNA, 33 bp, Homo sapien
aatcagaaattaggtatgaggaaaccaaagctt

SEQ ID NO: 131473 - DNA, 33 bp, Homo sapien
ctccagtcatgccaacaaaaatgagatcatacc

SEQ ID NO: 131474 - DNA, 33 bp, Homo sapien
ctccagtcatgccaacgaaaatgagatcatacc

SEQ ID NO: 131475 - DNA, 33 bp, Homo sapien
aaggatgagttcaagaataaaaagaggaaaagt

SEQ ID NO: 131476 - DNA, 33 bp, Homo sapien
aaggatgagttcaagattaaaaagaggaaaagt

SEQ ID NO: 131477 - DNA, 33 bp, Homo sapien
tctcctgctattttccaccttgttgcagctgca

SEQ ID NO: 131478 - DNA, 33 bp, Homo sapien
tctcctgctattttccgccttgttgcagctgca

SEQ ID NO: 131479 - DNA, 33 bp, Homo sapien
tacacatgatgacaataaagaatacatgcatca

SEQ ID NO: 131480 - DNA, 33 bp, Homo sapien
tacacatgatgacaatgaagaatacatgcatca

SEQ ID NO: 131481 - DNA, 33 bp, Homo sapien
atgtattcagaagaaactctactacaacctcag

SEQ ID NO: 131482 - DNA, 33 bp, Homo sapien
atgtattcagaagaaagtctactacaacctcag

SEQ ID NO: 131483 - DNA, 33 bp, Homo sapien
gccttttatgggccacagctaccatccaagatg

SEQ ID NO: 131484 - DNA, 33 bp, Homo sapien
gccttttatgggccacggctaccatccaagatg

SEQ ID NO: 131485 - DNA, 33 bp, Homo sapien
catccctatcctggtactaatgactgttctgat

SEQ ID NO: 131486 - DNA, 33 bp, Homo sapien
catccctatcctggtagtaatgactgttctgat

SEQ ID NO: 131487 - DNA, 33 bp, Homo sapien
gcttagtgtctgatagaaatccctgtaaaattg

SEQ ID NO: 131488 - DNA, 33 bp, Homo sapien
gcttagtgtctgataggaatccctgtaaaattg

SEQ ID NO: 131489 - DNA, 33 bp, Homo sapien
acatatatgaactttaactcaaaggatataaga

SEQ ID NO: 131490 - DNA, 33 bp, Homo sapien
acatatatgaactttacctcaaaggatataaga

SEQ ID NO: 131491 - DNA, 33 bp, Homo sapien
ttaatgttttgtgtaactcggatgagaattcca

SEQ ID NO: 131492 - DNA, 33 bp, Homo sapien
ttaatgttttgtgtaattcggatgagaattcca

SEQ ID NO: 131493 - DNA, 33 bp, Homo sapien
aggtcaggaaccctgcaacatactctcttctcc

SEQ ID NO: 131494 - DNA, 33 bp, Homo sapien
aggtcaggaaccctgcgacatactctcttctcc

SEQ ID NO: 131495 - DNA, 33 bp, Homo sapien
aaatgctatggtgaaacagaaaatttggcagag

SEQ ID NO: 131496 - DNA, 33 bp, Homo sapien
aaatgctatggtgaaatagaaaatttggcagag

SEQ ID NO: 131497 - DNA, 33 bp, Homo sapien
gccttcctgtctagaaccttccctgcctccatt

SEQ ID NO: 131498 - DNA, 33 bp, Homo sapien
gccttcctgtctagaatcttccctgcctccatt

SEQ ID NO: 131499 - DNA, 33 bp, Homo sapien
tctagaaagagacacccgaatagggaaaggtga

SEQ ID NO: 131500 - DNA, 33 bp, Homo sapien
tctagaaagagacacctgaatagggaaaggtga

SEQ ID NO: 131501 - DNA, 33 bp, Homo sapien
ccaacacatgcaggaaagaaggagaggaagcaa

SEQ ID NO: 131502 - DNA, 33 bp, Homo sapien
ccaacacatgcaggaaggaaggagaggaagcaa

SEQ ID NO: 131503 - DNA, 33 bp, Homo sapien
ccccagaaattttccaaaccctcctcggtatcc

SEQ ID NO: 131504 - DNA, 33 bp, Homo sapien
ccccagaaattttccacaccctcctcggtatcc

SEQ ID NO: 131505 - DNA, 33 bp, Homo sapien
cctaagtaaaacaggaggcatacacatggagac

SEQ ID NO: 131506 - DNA, 33 bp, Homo sapien
cctaagtaaaacaggatgcatacacatggagac

SEQ ID NO: 131507 - DNA, 33 bp, Homo sapien
tcaggatggcgggagcaaacagcactggtatat

SEQ ID NO: 131508 - DNA, 33 bp, Homo sapien
tcaggatggcgggagcgaacagcactggtatat

SEQ ID NO: 131509 - DNA, 33 bp, Homo sapien
cttcagcttgtccctcactagtggcctgcaccc

SEQ ID NO: 131510 - DNA, 33 bp, Homo sapien
cttcagcttgtccctcgctagtggcctgcaccc

SEQ ID NO: 131511 - DNA, 33 bp, Homo sapien
gggtttctttcaggggcaacacaatattctaaa

SEQ ID NO: 131512 - DNA, 33 bp, Homo sapien
gggtttctttcagggggaacacaatattctaaa

SEQ ID NO: 131513 - DNA, 33 bp, Homo sapien
aaaagttgacactgataacaataaagcttttct

SEQ ID NO: 131514 - DNA, 33 bp, Homo sapien
aaaagttgacactgatgacaataaagcttttct

SEQ ID NO: 131515 - DNA, 33 bp, Homo sapien
ctacccagaggtcccacaagtacttcagacttg

SEQ ID NO: 131516 - DNA, 33 bp, Homo sapien
ctacccagaggtcccagaagtacttcagacttg

SEQ ID NO: 131517 - DNA, 33 bp, Homo sapien
tcatcctagtggtacaaagaaatagctgggaat

SEQ ID NO: 131518 - DNA, 33 bp, Homo sapien
tcatcctagtggtacacagaaatagctgggaat

SEQ ID NO: 131519 - DNA, 33 bp, Homo sapien
acctagctactccaaacgtagctttccagcact

SEQ ID NO: 131520 - DNA, 33 bp, Homo sapien
acctagctactccaaatgtagctttccagcact

SEQ ID NO: 131521 - DNA, 33 bp, Homo sapien
attcatggttcacctaaccctgggtccctgata

SEQ ID NO: 131522 - DNA, 33 bp, Homo sapien
attcatggttcacctatccctgggtccctgata

SEQ ID NO: 131523 - DNA, 33 bp, Homo sapien
cccagacttgcacaatcaggacaacaaattttt

SEQ ID NO: 131524 - DNA, 33 bp, Homo sapien
cccagacttgcacaattaggacaacaaattttt

SEQ ID NO: 131525 - DNA, 33 bp, Homo sapien
taaatttctctgatgaacttgctgcaataatca

SEQ ID NO: 131526 - DNA, 33 bp, Homo sapien
taaatttctctgatgatcttgctgcaataatca

SEQ ID NO: 131527 - DNA, 33 bp, Homo sapien
tgcagtgatttactaccctgtttggcacatctg

SEQ ID NO: 131528 - DNA, 33 bp, Homo sapien
tgcagtgatttactactctgtttggcacatctg

SEQ ID NO: 131529 - DNA, 33 bp, Homo sapien
aacaatggttgtcagaaattggaaaacaagcag

SEQ ID NO: 131530 - DNA, 33 bp, Homo sapien
aacaatggttgtcagacattggaaaacaagcag

SEQ ID NO: 131531 - DNA, 33 bp, Homo sapien
tcctccttttaggggaccacaattctatgctgc

SEQ ID NO: 131532 - DNA, 33 bp, Homo sapien
tcctccttttaggggatcacaattctatgctgc

SEQ ID NO: 131533 - DNA, 33 bp, Homo sapien
ggtggtgaaggagacaagagaggattctaaaga

SEQ ID NO: 131534 - DNA, 33 bp, Homo sapien
ggtggtgaaggagacatgagaggattctaaaga

SEQ ID NO: 131535 - DNA, 33 bp, Homo sapien
cccttttacttgacaaaatgctcatgggcctat

SEQ ID NO: 131536 - DNA, 33 bp, Homo sapien
cccttttacttgacaatatgctcatgggcctat

SEQ ID NO: 131537 - DNA, 33 bp, Homo sapien
atcatgtgtcacaacgaatgagatgaattccat

SEQ ID NO: 131538 - DNA, 33 bp, Homo sapien
atcatgtgtcacaacggatgagatgaattccat

SEQ ID NO: 131539 - DNA, 33 bp, Homo sapien
tggaaaatgacaacataaagtcttctcctcctg

SEQ ID NO: 131540 - DNA, 33 bp, Homo sapien
tggaaaatgacaacatgaagtcttctcctcctg

SEQ ID NO: 131541 - DNA, 33 bp, Homo sapien
aattctgatgaccattaaagtttgagaagtact

SEQ ID NO: 131542 - DNA, 33 bp, Homo sapien
aattctgatgaccattgaagtttgagaagtact

SEQ ID NO: 131543 - DNA, 33 bp, Homo sapien
acaataaactaggcagacatcactttacaaaaa

SEQ ID NO: 131544 - DNA, 33 bp, Homo sapien
acaataaactaggcaggcatcactttacaaaaa

SEQ ID NO: 131545 - DNA, 33 bp, Homo sapien
ttagaacttttgagtacgtagtctcccatccat

SEQ ID NO: 131546 - DNA, 33 bp, Homo sapien
ttagaacttttgagtatgtagtctcccatccat

SEQ ID NO: 131547 - DNA, 33 bp, Homo sapien
ttcaggacaaagggaccgcaaaaggggccaggc

SEQ ID NO: 131548 - DNA, 33 bp, Homo sapien
ttcaggacaaagggactgcaaaaggggccaggc

SEQ ID NO: 131549 - DNA, 33 bp, Homo sapien
gtcttcagaactggcccatactacaagtctagc

SEQ ID NO: 131550 - DNA, 33 bp, Homo sapien
gtcttcagaactggcctatactacaagtctagc

SEQ ID NO: 131551 - DNA, 33 bp, Homo sapien
agcaagggtgatgatccgagactacttactttc

SEQ ID NO: 131552 - DNA, 33 bp, Homo sapien
agcaagggtgatgatcggagactacttactttc

SEQ ID NO: 131553 - DNA, 33 bp, Homo sapien; identical to SEQ ID NO: 131551

SEQ ID NO: 131554 - DNA, 33 bp, Homo sapien; identical to SEQ ID NO: 131552

SEQ ID NO: 131555 - DNA, 33 bp, Homo sapien
catctgcacaggagaacataggttatgctgtct

SEQ ID NO: 131556 - DNA, 33 bp, Homo sapien
catctgcacaggagaagataggttatgctgtct

SEQ ID NO: 131557 - DNA, 33 bp, Homo sapien
attattattttctgacacagattttcgctcttg

SEQ ID NO: 131558 - DNA, 33 bp, Homo sapien
attattattttctgacgcagattttcgctcttg

SEQ ID NO: 131559 - DNA, 33 bp, Homo sapien
ttttgtaaataattacggatgcttactcaactc

SEQ ID NO: 131560 - DNA, 33 bp, Homo sapien
ttttgtaaataattactgatgcttactcaactc

SEQ ID NO: 131561 - DNA, 33 bp, Homo sapien
ctcatttccagagagaagatagaggcaggaagt

SEQ ID NO: 131562 - DNA, 33 bp, Homo sapien
ctcatttccagagagatgatagaggcaggaagt

SEQ ID NO: 131563 - DNA, 33 bp, Homo sapien
tcattctgtgcctgcactctaaaacagtaacaa

SEQ ID NO: 131564 - DNA, 33 bp, Homo sapien
tcattctgtgcctgcattctaaaacagtaacaa

SEQ ID NO: 131565 - DNA, 33 bp, Homo sapien
gatgtagatacagactcaaagggacagcctcag

SEQ ID NO: 131566 - DNA, 33 bp, Homo sapien
gatgtagatacagactgaaagggacagcctcag

SEQ ID NO: 131567 - DNA, 33 bp, Homo sapien
taaaaagcagttctaccaaaggcaagcactact

SEQ ID NO: 131568 - DNA, 33 bp, Homo sapien
taaaaagcagttctactaaaggcaagcactact

SEQ ID NO: 131569 - DNA, 33 bp, Homo sapien
tttactacatgcacacaacccattttgttgact

SEQ ID NO: 131570 - DNA, 33 bp, Homo sapien
tttactacatgcacactacccattttgttgact

SEQ ID NO: 131571 - DNA, 33 bp, Homo sapien
aagaggaagaggactactaaaattaccaagaag

SEQ ID NO: 131572 - DNA, 33 bp, Homo sapien
aagaggaagaggactattaaaattaccaagaag

SEQ ID NO: 131573 - DNA, 33 bp, Homo sapien
aactgccactgataagaactttatggagcatca

SEQ ID NO: 131574 - DNA, 33 bp, Homo sapien
aactgccactgataagtactttatggagcatca

SEQ ID NO: 131575 - DNA, 33 bp, Homo sapien
aaaggaattactgtgacaaacaaggtactgaga

SEQ ID NO: 131576 - DNA, 33 bp, Homo sapien
aaaggaattactgtgataaacaaggtactgaga

SEQ ID NO: 131577 - DNA, 33 bp, Homo sapien
tcccctttcttcctaaagcaggtatatgcagat

SEQ ID NO: 131578 - DNA, 33 bp, Homo sapien
tcccctttcttcctaaggcaggtatatgcagat

SEQ ID NO: 131579 - DNA, 33 bp, Homo sapien
aggtatagctattctccctctcctaaggtctga

SEQ ID NO: 131580 - DNA, 33 bp, Homo sapien
aggtatagctattctctctctcctaaggtctga

SEQ ID NO: 131581 - DNA, 33 bp, Homo sapien
ttgcagaagatagagaaggaaacgtgaaaaact

SEQ ID NO: 131582 - DNA, 33 bp, Homo sapien
ttgcagaagatagagatggaaacgtgaaaaact

SEQ ID NO: 131583 - DNA, 33 bp, Homo sapien
ttatggtagaacataaactatctcgggtctttc

SEQ ID NO: 131584 - DNA, 33 bp, Homo sapien
ttatggtagaacataagctatctcgggtctttc

SEQ ID NO: 131585 - DNA, 33 bp, Homo sapien
ctgtgcctgcacttaacgtttcgcagcaccttt

SEQ ID NO: 131586 - DNA, 33 bp, Homo sapien
ctgtgcctgcacttaatgtttcgcagcaccttt

SEQ ID NO: 131587 - DNA, 33 bp, Homo sapien
acatccatgctgaaaacgaggagcccctgtgcc

SEQ ID NO: 131588 - DNA, 33 bp, Homo sapien
acatccatgctgaaaatgaggagcccctgtgcc

SEQ ID NO: 131589 - DNA, 33 bp, Homo sapien
ggaaatagtttgtgtaacctagcacctagaaaa

SEQ ID NO: 131590 - DNA, 33 bp, Homo sapien
ggaaatagtttgtgtaccctagcacctagaaaa

SEQ ID NO: 131591 - DNA, 33 bp, Homo sapien
tgaaaactaaatgcaacgcataatcctggattg

SEQ ID NO: 131592 - DNA, 33 bp, Homo sapien
tgaaaactaaatgcaatgcataatcctggattg

SEQ ID NO: 131593 - DNA, 33 bp, Homo sapien
cacaagggagtgccccagaccttttccaggtgg

SEQ ID NO: 131594 - DNA, 33 bp, Homo sapien
cacaagggagtgccccggaccttttccaggtgg

SEQ ID NO: 131595 - DNA, 33 bp, Homo sapien
tgtgactaaggagtgacggagggggcatttcag

SEQ ID NO: 131596 - DNA, 33 bp, Homo sapien
tgtgactaaggagtgatggagggggcatttcag

SEQ ID NO: 131597 - DNA, 33 bp, Homo sapien
cctcaagtgagtttccaatcgcaagcttccctg

SEQ ID NO: 131598 - DNA, 33 bp, Homo sapien
cctcaagtgagtttccgatcgcaagcttccctg

SEQ ID NO: 131599 - DNA, 33 bp, Homo sapien
ttctcgtgttagcttaggaaagctgagaaccaa

SEQ ID NO: 131600 - DNA, 33 bp, Homo sapien
ttctcgtgttagcttatgaaagctgagaaccaa

SEQ ID NO: 131601 - DNA, 33 bp, Homo sapien
acagcctacattgagcaaaacaaaacttgattt

SEQ ID NO: 131602 - DNA, 33 bp, Homo sapien
acagcctacattgagccaaacaaaacttgattt

SEQ ID NO: 131603 - DNA, 33 bp, Homo sapien
taaaaggagattgttaggcctattttgcaaatc

SEQ ID NO: 131604 - DNA, 33 bp, Homo sapien
taaaaggagattgttatgcctattttgcaaatc

SEQ ID NO: 131605 - DNA, 33 bp, Homo sapien
gactgcagtgcgcttaaccaactcacctccctt

SEQ ID NO: 131606 - DNA, 33 bp, Homo sapien
gactgcagtgcgcttagccaactcacctccctt

SEQ ID NO: 131607 - DNA, 33 bp, Homo sapien; identical to SEQ ID NO: 131605

SEQ ID NO: 131608 - DNA, 33 bp, Homo sapien; identical to SEQ ID NO: 131606

SEQ ID NO: 131609 - DNA, 33 bp, Homo sapien
aggacgatgaactacccgcagtggtgatggcct

SEQ ID NO: 131610 - DNA, 33 bp, Homo sapien
aggacgatgaactacctgcagtggtgatggcct

SEQ ID NO: 131611 - DNA, 33 bp, Homo sapien; identical to SEQ ID NO: 131609

SEQ ID NO: 131612 - DNA, 33 bp, Homo sapien; identical to SEQ ID NO: 131610

SEQ ID NO: 131613 - DNA, 33 bp, Homo sapien
aagaggagaacttcaagtcaattctcagggtgc

SEQ ID NO: 131614 - DNA, 33 bp, Homo sapien
aagaggagaacttcaattcaattctcagggtgc

SEQ ID NO: 131615 - DNA, 33 bp, Homo sapien
atatgagttcttaaccactccaccttcctgatg

SEQ ID NO: 131616 - DNA, 33 bp, Homo sapien
atatgagttcttaaccgctccaccttcctgatg

SEQ ID NO: 131617 - DNA, 33 bp, Homo sapien
ctgtagcgtaactgaagcaaaggggcaaaccgt

SEQ ID NO: 131618 - DNA, 33 bp, Homo sapien
ctgtagcgtaactgaatcaaaggggcaaaccgt

SEQ ID NO: 131619 - DNA, 33 bp, Homo sapien
gggtcttctcccctaaaactaatgaagatggaa

SEQ ID NO: 131620 - DNA, 33 bp, Homo sapien
gggtcttctcccctaagactaatgaagatggaa

SEQ ID NO: 131621 - DNA, 33 bp, Homo sapien
atttctaaaggagtgactaactcaaaacatttt

SEQ ID NO: 131622 - DNA, 33 bp, Homo sapien
atttctaaaggagtgattaactcaaaacatttt

SEQ ID NO: 131623 - DNA, 33 bp, Homo sapien
tccccttatagataggaaagacgcaactcacgt

SEQ ID NO: 131624 - DNA, 33 bp, Homo sapien
tccccttatagatagggaagacgcaactcacgt

SEQ ID NO: 131625 - DNA, 33 bp, Homo sapien
aagcctggaaatcagacaatgtcaagctaaggc

SEQ ID NO: 131626 - DNA, 33 bp, Homo sapien
aagcctggaaatcagagaatgtcaagctaaggc

SEQ ID NO: 131627 - DNA, 33 bp, Homo sapien
ttctaagcttgccctgaagtttgggctcatagg

SEQ ID NO: 131628 - DNA, 33 bp, Homo sapien
ttctaagcttgccctggagtttgggctcatagg

SEQ ID NO: 131629 - DNA, 33 bp, Homo sapien
taagccttgggatggcaattttcattcaagttc

SEQ ID NO: 131630 - DNA, 33 bp, Homo sapien
taagccttgggatggccattttcattcaagttc

SEQ ID NO: 131631 - DNA, 33 bp, Homo sapien
ttgtgtggagttggcccaaaagcatgggtcatg

SEQ ID NO: 131632 - DNA, 33 bp, Homo sapien
ttgtgtggagttggccgaaaagcatgggtcatg

SEQ ID NO: 131633 - DNA, 33 bp, Homo sapien
agagcacattacctaaatatccagtgctttctt

SEQ ID NO: 131634 - DNA, 33 bp, Homo sapien
agagcacattacctaattatccagtgctttctt

SEQ ID NO: 131635 - DNA, 33 bp, Homo sapien
agataagatggtattaaaaagcaatgtgcctcc

SEQ ID NO: 131636 - DNA, 33 bp, Homo sapien
agataagatggtattacaaagcaatgtgcctcc

SEQ ID NO: 131637 - DNA, 33 bp, Homo sapien
gtaggaaatttcagaagcattttgtactttgcc

SEQ ID NO: 131638 - DNA, 33 bp, Homo sapien
gtaggaaatttcagaatcattttgtactttgcc

SEQ ID NO: 131639 - DNA, 33 bp, Homo sapien
tactggctggtggtaaatggggccagtggaatt

SEQ ID NO: 131640 - DNA, 33 bp, Homo sapien
tactggctggtggtaactggggccagtggaatt

SEQ ID NO: 131641 - DNA, 33 bp, Homo sapien
attacaacactatgtacgtaggcaggtatatct

SEQ ID NO: 131642 - DNA, 33 bp, Homo sapien
attacaacactatgtatgtaggcaggtatatct

SEQ ID NO: 131643 - DNA, 33 bp, Homo sapien
ctagctaattttttcaatcttttcactctaccc

SEQ ID NO: 131644 - DNA, 33 bp, Homo sapien
ctagctaattttttcagtcttttcactctaccc

SEQ ID NO: 131645 - DNA, 33 bp, Homo sapien
acatggccagacagaaataatctgtgtcctacc

SEQ ID NO: 131646 - DNA, 33 bp, Homo sapien
acatggccagacagaactaatctgtgtcctacc

SEQ ID NO: 131647 - DNA, 33 bp, Homo sapien
tgcgtatgtctggatagaatttgcagtattttg

SEQ ID NO: 131648 - DNA, 33 bp, Homo sapien
tgcgtatgtctggatataatttgcagtattttg

SEQ ID NO: 131649 - DNA, 33 bp, Homo sapien
gaaatactccggtaagcctgggtgcagttgctt

SEQ ID NO: 131650 - DNA, 33 bp, Homo sapien
gaaatactccggtaaggctgggtgcagttgctt

SEQ ID NO: 131651 - DNA, 33 bp, Homo sapien
tgtctctactagctaaaggcagtggaaagtttg

SEQ ID NO: 131652 - DNA, 33 bp, Homo sapien
tgtctctactagctaacggcagtggaaagtttg

SEQ ID NO: 131653 - DNA, 33 bp, Homo sapien
ttctttcagttcctcacctttcccttttagtga

SEQ ID NO: 131654 - DNA, 33 bp, Homo sapien
ttctttcagttcctcatctttcccttttagtga

SEQ ID NO: 131655 - DNA, 33 bp, Homo sapien
gagcgtgaagcttggcactgtgaaagccaaatg

SEQ ID NO: 131656 - DNA, 33 bp, Homo sapien
gagcgtgaagcttggcgctgtgaaagccaaatg

SEQ ID NO: 131657 - DNA, 33 bp, Homo sapien
tgagatgtgataatacaggggagaggagaaggc

SEQ ID NO: 131658 - DNA, 33 bp, Homo sapien
tgagatgtgataatacgggggagaggagaaggc

SEQ ID NO: 131659 - DNA, 33 bp, Homo sapien
gcacttcaagcaggtacgttactttagagagag

SEQ ID NO: 131660 - DNA, 33 bp, Homo sapien
gcacttcaagcaggtatgttactttagagagag

SEQ ID NO: 131661 - DNA, 33 bp, Homo sapien
gaagagccactggagaacaaaggctggacttcc

SEQ ID NO: 131662 - DNA, 33 bp, Homo sapien
gaagagccactggagagcaaaggctggacttcc

SEQ ID NO: 131663 - DNA, 33 bp, Homo sapien
agtaactctagttccaatcaggtcccagcaggc

SEQ ID NO: 131664 - DNA, 33 bp, Homo sapien
agtaactctagttccagtcaggtcccagcaggc

SEQ ID NO: 131665 - DNA, 33 bp, Homo sapien
agctgaaccattgagactccttttagccacaat

SEQ ID NO: 131666 - DNA, 33 bp, Homo sapien
agctgaaccattgagattccttttagccacaat

SEQ ID NO: 131667 - DNA, 33 bp, Homo sapien
gacaggtggttaaagacgaaatagatcagttta

SEQ ID NO: 131668 - DNA, 33 bp, Homo sapien
gacaggtggttaaagatgaaatagatcagttta

SEQ ID NO: 131669 - DNA, 33 bp, Homo sapien
cactgagtattgcctgcaaaagaggataaaggt

SEQ ID NO: 131670 - DNA, 33 bp, Homo sapien
cactgagtattgcctgtaaaagaggataaaggt

SEQ ID NO: 131671 - DNA, 33 bp, Homo sapien
actccctctgtcaacgaaatctccctcgggctt

SEQ ID NO: 131672 - DNA, 33 bp, Homo sapien
actccctctgtcaacggaatctccctcgggctt

SEQ ID NO: 131673 - DNA, 33 bp, Homo sapien
actcttcggtcaacagaatctgtgaaggcacaa

SEQ ID NO: 131674 - DNA, 33 bp, Homo sapien
actcttcggtcaacaggatctgtgaaggcacaa

SEQ ID NO: 131675 - DNA, 33 bp, Homo sapien
gggacctgttgtcaggaaaagtcaaacaagctt

SEQ ID NO: 131676 - DNA, 33 bp, Homo sapien
gggacctgttgtcagggaaagtcaaacaagctt

SEQ ID NO: 131677 - DNA, 33 bp, Homo sapien
agggatgggactgttacaatacttcaagatcac

SEQ ID NO: 131678 - DNA, 33 bp, Homo sapien
agggatgggactgttataatacttcaagatcac

SEQ ID NO: 131679 - DNA, 33 bp, Homo sapien
gggcccctctctccaaactgtgacctcacctca

SEQ ID NO: 131680 - DNA, 33 bp, Homo sapien
gggcccctctctccaagctgtgacctcacctca

SEQ ID NO: 131681 - DNA, 33 bp, Homo sapien
ctcgagtttttcccacaactggcttgagcacat

SEQ ID NO: 131682 - DNA, 33 bp, Homo sapien
ctcgagtttttcccacgactggcttgagcacat

SEQ ID NO: 131683 - DNA, 33 bp, Homo sapien
ctattgttaagcagtacaagacaggtctcttaa

SEQ ID NO: 131684 - DNA, 33 bp, Homo sapien
ctattgttaagcagtataagacaggtctcttaa

SEQ ID NO: 131685 - DNA, 33 bp, Homo sapien
ttttgaatctcaaaccacttcttgtcttctccc

SEQ ID NO: 131686 - DNA, 33 bp, Homo sapien
ttttgaatctcaaaccgcttcttgtcttctccc

SEQ ID NO: 131687 - DNA, 33 bp, Homo sapien
taggtgtgtgtaagtaaactgtatgatgttggc

SEQ ID NO: 131688 - DNA, 33 bp, Homo sapien
taggtgtgtgtaagtacactgtatgatgttggc

SEQ ID NO: 131689 - DNA, 33 bp, Homo sapien
acttaccattgttttacagttgcctgcagtatt

SEQ ID NO: 131690 - DNA, 33 bp, Homo sapien
acttaccattgttttatagttgcctgcagtatt

SEQ ID NO: 131691 - DNA, 33 bp, Homo sapien
ctgggagagcaagtcacggatgctgatctgagc

SEQ ID NO: 131692 - DNA, 33 bp, Homo sapien
ctgggagagcaagtcatggatgctgatctgagc

SEQ ID NO: 131693 - DNA, 33 bp, Homo sapien
tattttgttgtcaatacctatacttaactttac

SEQ ID NO: 131694 - DNA, 33 bp, Homo sapien
tattttgttgtcaatagctatacttaactttac

SEQ ID NO: 131695 - DNA, 33 bp, Homo sapien
atgagaaaacagtagacgctccaaatagtaagg

SEQ ID NO: 131696 - DNA, 33 bp, Homo sapien
atgagaaaacagtagatgctccaaatagtaagg

SEQ ID NO: 131697 - DNA, 33 bp, Homo sapien
tctctctgtgccgtccaattcagtagccactta

SEQ ID NO: 131698 - DNA, 33 bp, Homo sapien
tctctctgtgccgtccgattcagtagccactta

SEQ ID NO: 131699 - DNA, 33 bp, Homo sapien
ttgcaagaacaacataacattgtgaagtgtatg

SEQ ID NO: 131700 - DNA, 33 bp, Homo sapien
ttgcaagaacaacatagcattgtgaagtgtatg

SEQ ID NO: 131701 - DNA, 33 bp, Homo sapien
acaacaacaaagacccaacggctcaaacatcca

SEQ ID NO: 131702 - DNA, 33 bp, Homo sapien
acaacaacaaagacccgacggctcaaacatcca

SEQ ID NO: 131703 - DNA, 33 bp, Homo sapien
cccaggctggggagtaagctattcacaggaaag

SEQ ID NO: 131704 - DNA, 33 bp, Homo sapien
cccaggctggggagtaggctattcacaggaaag

SEQ ID NO: 131705 - DNA, 33 bp, Homo sapien
gacactggagagataacgatactgtgaacagat

SEQ ID NO: 131706 - DNA, 33 bp, Homo sapien
gacactggagagataatgatactgtgaacagat

SEQ ID NO: 131707 - DNA, 33 bp, Homo sapien
cacatgactgtagtcccagttgctggggagggt

SEQ ID NO: 131708 - DNA, 33 bp, Homo sapien
cacatgactgtagtcctagttgctggggagggt

SEQ ID NO: 131709 - DNA, 33 bp, Homo sapien
tcacaggaccaagcacaatgccttgcacaaagc

SEQ ID NO: 131710 - DNA, 33 bp, Homo sapien
tcacaggaccaagcacgatgccttgcacaaagc

SEQ ID NO: 131711 - DNA, 33 bp, Homo sapien
gactacaggcgtttaccacaatgcccaacttat

SEQ ID NO: 131712 - DNA, 33 bp, Homo sapien
gactacaggcgtttactacaatgcccaacttat

SEQ ID NO: 131713 - DNA, 33 bp, Homo sapien
catggggtggagtcagaaacctaggactctttc

SEQ ID NO: 131714 - DNA, 33 bp, Homo sapien
catggggtggagtcaggaacctaggactctttc

SEQ ID NO: 131715 - DNA, 33 bp, Homo sapien
gaaggaagatacagatcagaactttggggcttt

SEQ ID NO: 131716 - DNA, 33 bp, Homo sapien
gaaggaagatacagatgagaactttggggcttt

SEQ ID NO: 131717 - DNA, 33 bp, Homo sapien
atagataccttgtggaagagataagctctgtga

SEQ ID NO: 131718 - DNA, 33 bp, Homo sapien
atagataccttgtggaggagataagctctgtga

SEQ ID NO: 131719 - DNA, 33 bp, Homo sapien
tttctgctagcctgaaaaaatgggttctcctat

SEQ ID NO: 131720 - DNA, 33 bp, Homo sapien
tttctgctagcctgaagaaatgggttctcctat

SEQ ID NO: 131721 - DNA, 33 bp, Homo sapien
cactaggttgtagtaacatttgtataacatggc

SEQ ID NO: 131722 - DNA, 33 bp, Homo sapien
cactaggttgtagtaatatttgtataacatggc

SEQ ID NO: 131723 - DNA, 33 bp, Homo sapien
ttaccgcaggtccccaatgatggtcaaggtcac

SEQ ID NO: 131724 - DNA, 33 bp, Homo sapien
ttaccgcaggtccccagtgatggtcaaggtcac

SEQ ID NO: 131725 - DNA, 33 bp, Homo sapien
gaaaagtgctaggtggacaactctcccttgagt

SEQ ID NO: 131726 - DNA, 33 bp, Homo sapien
gaaaagtgctaggtgggcaactctcccttgagt

SEQ ID NO: 131727 - DNA, 33 bp, Homo sapien
catcctttgggaatgactagatcaaagtaagag

SEQ ID NO: 131728 - DNA, 33 bp, Homo sapien
catcctttgggaatgagtagatcaaagtaagag

SEQ ID NO: 131729 - DNA, 33 bp, Homo sapien
catgaaagaactaataaatcctacagtttatct

SEQ ID NO: 131730 - DNA, 33 bp, Homo sapien
catgaaagaactaatacatcctacagtttatct

SEQ ID NO: 131731 - DNA, 33 bp, Homo sapien
cccctggttatgtttacgtatattcaagcttga

SEQ ID NO: 131732 - DNA, 33 bp, Homo sapien
cccctggttatgtttatgtatattcaagcttga

SEQ ID NO: 131733 - DNA, 33 bp, Homo sapien
ttgggagggaccagaccagattgttccaggatg

SEQ ID NO: 131734 - DNA, 33 bp, Homo sapien
ttgggagggaccagactagattgttccaggatg

SEQ ID NO: 131735 - DNA, 33 bp, Homo sapien
ttcctggaactcagacaagacagtgtaggatgc

SEQ ID NO: 131736 - DNA, 33 bp, Homo sapien
ttcctggaactcagacgagacagtgtaggatgc

SEQ ID NO: 131737 - DNA, 33 bp, Homo sapien
ctgagattagtgtggccccggccaaggatagca

SEQ ID NO: 131738 - DNA, 33 bp, Homo sapien
ctgagattagtgtggcgccggccaaggatagca

SEQ ID NO: 131739 - DNA, 33 bp, Homo sapien
tgatgggtaacagggaaaaaaatcctctgtctg

SEQ ID NO: 131740 - DNA, 33 bp, Homo sapien
tgatgggtaacagggagaaaaatcctctgtctg

SEQ ID NO: 131741 - DNA, 33 bp, Homo sapien
taattctctgccttaactcccaacaggcgtgaa

SEQ ID NO: 131742 - DNA, 33 bp, Homo sapien
taattctctgccttaattcccaacaggcgtgaa

SEQ ID NO: 131743 - DNA, 33 bp, Homo sapien
gggtcacctgtgaacacagaccaaagggcagag

SEQ ID NO: 131744 - DNA, 33 bp, Homo sapien
gggtcacctgtgaacatagaccaaagggcagag

SEQ ID NO: 131745 - DNA, 33 bp, Homo sapien
ttgcccagcagtcagccctgttttttctgaagg

SEQ ID NO: 131746 - DNA, 33 bp, Homo sapien
ttgcccagcagtcagcgctgttttttctgaagg

SEQ ID NO: 131747 - DNA, 33 bp, Homo sapien
aatggtgtctgtttcagctttcaccatgttact

SEQ ID NO: 131748 - DNA, 33 bp, Homo sapien
aatggtgtctgtttcatctttcaccatgttact

SEQ ID NO: 131749 - DNA, 33 bp, Homo sapien
tacctttcaggcaagcggagtgaccttttagaa

SEQ ID NO: 131750 - DNA, 33 bp, Homo sapien
tacctttcaggcaagctgagtgaccttttagaa

SEQ ID NO: 131751 - DNA, 33 bp, Homo sapien
gcaccctgtcagcgaaaagaaccccaatgctgc

SEQ ID NO: 131752 - DNA, 33 bp, Homo sapien
gcaccctgtcagcgaacagaaccccaatgctgc

SEQ ID NO: 131753 - DNA, 33 bp, Homo sapien
gactactgtcctccataaaagctgctggggaga

SEQ ID NO: 131754 - DNA, 33 bp, Homo sapien
gactactgtcctccatgaaagctgctggggaga

SEQ ID NO: 131755 - DNA, 33 bp, Homo sapien
caacagcttcatggaaatctgggaaatgttcag

SEQ ID NO: 131756 - DNA, 33 bp, Homo sapien
caacagcttcatggaagtctgggaaatgttcag

SEQ ID NO: 131757 - DNA, 33 bp, Homo sapien
ctgcagcctgtgagacactaagtagatggccca

SEQ ID NO: 131758 - DNA, 33 bp, Homo sapien
ctgcagcctgtgagacgctaagtagatggccca

SEQ ID NO: 131759 - DNA, 33 bp, Homo sapien
tgtccctaaccaaagaaactgcacaccccagaa

SEQ ID NO: 131760 - DNA, 33 bp, Homo sapien
tgtccctaaccaaagagactgcacaccccagaa

SEQ ID NO: 131761 - DNA, 33 bp, Homo sapien
aaacacagaagtagccaagaaaaaaagaaacaa

SEQ ID NO: 131762 - DNA, 33 bp, Homo sapien
aaacacagaagtagccgagaaaaaaagaaacaa

SEQ ID NO: 131763 - DNA, 33 bp, Homo sapien
catttccacctgttctaacatttctggctactt

SEQ ID NO: 131764 - DNA, 33 bp, Homo sapien
catttccacctgttctcacatttctggctactt

SEQ ID NO: 131765 - DNA, 33 bp, Homo sapien
aagaaaatttgtgtgacaataccaaagcagtac

SEQ ID NO: 131766 - DNA, 33 bp, Homo sapien
aagaaaatttgtgtgataataccaaagcagtac

SEQ ID NO: 131767 - DNA, 33 bp, Homo sapien
aggacagaaacaagtaagaatcatgcctgatgt

SEQ ID NO: 131768 - DNA, 33 bp, Homo sapien
aggacagaaacaagtaggaatcatgcctgatgt

SEQ ID NO: 131769 - DNA, 33 bp, Homo sapien
gattacattgaccccacataacaaagaaaggaa

SEQ ID NO: 131770 - DNA, 33 bp, Homo sapien
gattacattgaccccagataacaaagaaaggaa

SEQ ID NO: 131771 - DNA, 33 bp, Homo sapien
attcatgtatgcagtacgccacattctgaaaag

SEQ ID NO: 131772 - DNA, 33 bp, Homo sapien
attcatgtatgcagtaggccacattctgaaaag

SEQ ID NO: 131773 - DNA, 33 bp, Homo sapien
ctaacttgagcatccccccaaggtctagaaagc

SEQ ID NO: 131774 - DNA, 33 bp, Homo sapien
ctaacttgagcatccctccaaggtctagaaagc

SEQ ID NO: 131775 - DNA, 33 bp, Homo sapien
aatagagtgaagtgctcagaaagataactgatg

SEQ ID NO: 131776 - DNA, 33 bp, Homo sapien
aatagagtgaagtgcttagaaagataactgatg

SEQ ID NO: 131777 - DNA, 33 bp, Homo sapien
taactgatttaagtccaacaccagtgaaaggag

SEQ ID NO: 131778 - DNA, 33 bp, Homo sapien
taactgatttaagtcccacaccagtgaaaggag

SEQ ID NO: 131779 - DNA, 33 bp, Homo sapien
gagggctccccgcgccaactccaccaggaatgt

SEQ ID NO: 131780 - DNA, 33 bp, Homo sapien
gagggctccccgcgccgactccaccaggaatgt

SEQ ID NO: 131781 - DNA, 33 bp, Homo sapien
tagaataagggaagagaagtcgttttagcattt

SEQ ID NO: 131782 - DNA, 33 bp, Homo sapien
tagaataagggaagaggagtcgttttagcattt

SEQ ID NO: 131783 - DNA, 33 bp, Homo sapien
tttaggttgacttacacagaacagagataaaat

SEQ ID NO: 131784 - DNA, 33 bp, Homo sapien
tttaggttgacttacatagaacagagataaaat

SEQ ID NO: 131785 - DNA, 33 bp, Homo sapien
tacagctggaattcaaattatttaccatccttg

SEQ ID NO: 131786 - DNA, 33 bp, Homo sapien
tacagctggaattcaagttatttaccatccttg

SEQ ID NO: 131787 - DNA, 33 bp, Homo sapien
cagaagctatagaaaacgtacttcgatctttga

SEQ ID NO: 131788 - DNA, 33 bp, Homo sapien
cagaagctatagaaaatgtacttcgatctttga

SEQ ID NO: 131789 - DNA, 33 bp, Homo sapien
ctatcaacggatgagcagataaacaactcaaaa

SEQ ID NO: 131790 - DNA, 33 bp, Homo sapien
ctatcaacggatgagcggataaacaactcaaaa

SEQ ID NO: 131791 - DNA, 33 bp, Homo sapien
caagagtactcattaccaactactactgtatgg

SEQ ID NO: 131792 - DNA, 33 bp, Homo sapien
caagagtactcattactaactactactgtatgg

SEQ ID NO: 131793 - DNA, 33 bp, Homo sapien
gctcatgtaatgcttaggagaaaacaacaaggg

SEQ ID NO: 131794 - DNA, 33 bp, Homo sapien
gctcatgtaatgcttatgagaaaacaacaaggg

SEQ ID NO: 131795 - DNA, 33 bp, Homo sapien
ggttacaagcacaacaccatttactcttctaca

SEQ ID NO: 131796 - DNA, 33 bp, Homo sapien
ggttacaagcacaacatcatttactcttctaca

SEQ ID NO: 131797 - DNA, 33 bp, Homo sapien
attttgctaagtgaaaatagccaaacaaaaaag

SEQ ID NO: 131798 - DNA, 33 bp, Homo sapien
attttgctaagtgaaagtagccaaacaaaaaag

SEQ ID NO: 131799 - DNA, 33 bp, Homo sapien
aaatgtttttgaggctcagccatggtgtagcat

SEQ ID NO: 131800 - DNA, 33 bp, Homo sapien
aaatgtttttgaggcttagccatggtgtagcat

SEQ ID NO: 131801 - DNA, 33 bp, Homo sapien
aggtcttcataagcccaaattaacaaattgcca

SEQ ID NO: 131802 - DNA, 33 bp, Homo sapien
aggtcttcataagcccgaattaacaaattgcca

SEQ ID NO: 131803 - DNA, 33 bp, Homo sapien
actacctcatttgttacaccacctagctatgtt

SEQ ID NO: 131804 - DNA, 33 bp, Homo sapien
actacctcatttgttataccacctagctatgtt

SEQ ID NO: 131805 - DNA, 33 bp, Homo sapien
cacataagtttctcaacgcacataagtaaacat

SEQ ID NO: 131806 - DNA, 33 bp, Homo sapien
cacataagtttctcaatgcacataagtaaacat

SEQ ID NO: 131807 - DNA, 33 bp, Homo sapien
aagattttgacataaagccagaacctccaaagg

SEQ ID NO: 131808 - DNA, 33 bp, Homo sapien
aagattttgacataaatccagaacctccaaagg

SEQ ID NO: 131809 - DNA, 33 bp, Homo sapien
gctttcagtagttacaacagcagtgcctctacc

SEQ ID NO: 131810 - DNA, 33 bp, Homo sapien
gctttcagtagttacatcagcagtgcctctacc

SEQ ID NO: 131811 - DNA, 33 bp, Homo sapien
cctcaattattttcaaactctccattgtataat

SEQ ID NO: 131812 - DNA, 33 bp, Homo sapien
cctcaattattttcaagctctccattgtataat

SEQ ID NO: 131813 - DNA, 33 bp, Homo sapien
taacaagattcccaggaaactgatgtgcacaat

SEQ ID NO: 131814 - DNA, 33 bp, Homo sapien
taacaagattcccagggaactgatgtgcacaat

SEQ ID NO: 131815 - DNA, 33 bp, Homo sapien
tattgaatctgtagataaacttgagaaagaact

SEQ ID NO: 131816 - DNA, 33 bp, Homo sapien
tattgaatctgtagatcaacttgagaaagaact

SEQ ID NO: 131817 - DNA, 33 bp, Homo sapien
ttataaatgggaactcaaaaaatcttgttttac

SEQ ID NO: 131818 - DNA, 33 bp, Homo sapien
ttataaatgggaactcgaaaaatcttgttttac

SEQ ID NO: 131819 - DNA, 33 bp, Homo sapien
tttgtgggtatggctagaaaagggaaataggaa

SEQ ID NO: 131820 - DNA, 33 bp, Homo sapien
tttgtgggtatggctataaaagggaaataggaa

SEQ ID NO: 131821 - DNA, 33 bp, Homo sapien
aaactggggaaaagtaaatgggatcttgagcaa

SEQ ID NO: 131822 - DNA, 33 bp, Homo sapien
aaactggggaaaagtacatgggatcttgagcaa

SEQ ID NO: 131823 - DNA, 33 bp, Homo sapien
ataagtacaaaggaaaactctagaaatgtggag

SEQ ID NO: 131824 - DNA, 33 bp, Homo sapien
ataagtacaaaggaaacctctagaaatgtggag

SEQ ID NO: 131825 - DNA, 33 bp, Homo sapien
ggtatgggtgatattacgtgtggaattaagagc

SEQ ID NO: 131826 - DNA, 33 bp, Homo sapien
ggtatgggtgatattatgtgtggaattaagagc

SEQ ID NO: 131827 - DNA, 33 bp, Homo sapien
aggaagtttagaaatacgacagaattcttgacg

SEQ ID NO: 131828 - DNA, 33 bp, Homo sapien
aggaagtttagaaatatgacagaattcttgacg

SEQ ID NO: 131829 - DNA, 33 bp, Homo sapien
agttagtacagatatcacaaggtaaagtttctg

SEQ ID NO: 131830 - DNA, 33 bp, Homo sapien
agttagtacagatatcgcaaggtaaagtttctg

SEQ ID NO: 131831 - DNA, 33 bp, Homo sapien
aaaatccttctcaggaaaaaacaggagactcag

SEQ ID NO: 131832 - DNA, 33 bp, Homo sapien
aaaatccttctcaggagaaaacaggagactcag

SEQ ID NO: 131833 - DNA, 33 bp, Homo sapien
cttgtctgaggcctcccgcagtaattctgagtc

SEQ ID NO: 131834 - DNA, 33 bp, Homo sapien
cttgtctgaggcctcctgcagtaattctgagtc

SEQ ID NO: 131835 - DNA, 33 bp, Homo sapien
caatgacaaactttcccgatagccgaagggcag

SEQ ID NO: 131836 - DNA, 33 bp, Homo sapien
caatgacaaactttcctgatagccgaagggcag

SEQ ID NO: 131837 - DNA, 33 bp, Homo sapien
ctgcaaatgccacggtcaaataaattcagtgga

SEQ ID NO: 131838 - DNA, 33 bp, Homo sapien
ctgcaaatgccacggttaaataaattcagtgga

SEQ ID NO: 131839 - DNA, 33 bp, Homo sapien
tactgaggactgaggacgcacgtttctaaggga

SEQ ID NO: 131840 - DNA, 33 bp, Homo sapien
tactgaggactgaggatgcacgtttctaaggga

SEQ ID NO: 131841 - DNA, 33 bp, Homo sapien
tttccataacatggaacgtgggtaaggttccta

SEQ ID NO: 131842 - DNA, 33 bp, Homo sapien
tttccataacatggaatgtgggtaaggttccta

SEQ ID NO: 131843 - DNA, 33 bp, Homo sapien
cattgtagaacaccagacaaccccttcttggtt

SEQ ID NO: 131844 - DNA, 33 bp, Homo sapien
cattgtagaacaccaggcaaccccttcttggtt

SEQ ID NO: 131845 - DNA, 33 bp, Homo sapien
ataagcctttaattcaccctcagtgactctggc

SEQ ID NO: 131846 - DNA, 33 bp, Homo sapien
ataagcctttaattcatcctcagtgactctggc

SEQ ID NO: 131847 - DNA, 33 bp, Homo sapien
tacggatgattttaaaagtgtcacaagccacag

SEQ ID NO: 131848 - DNA, 33 bp, Homo sapien
tacggatgattttaaacgtgtcacaagccacag

SEQ ID NO: 131849 - DNA, 33 bp, Homo sapien
ctctataataaatcagaaatgtgaaaaaagcat

SEQ ID NO: 131850 - DNA, 33 bp, Homo sapien
ctctataataaatcaggaatgtgaaaaaagcat

SEQ ID NO: 131851 - DNA, 33 bp, Homo sapien
ttcttgaactaagctacgctgtgtatatgcagt

SEQ ID NO: 131852 - DNA, 33 bp, Homo sapien
ttcttgaactaagctatgctgtgtatatgcagt

SEQ ID NO: 131853 - DNA, 33 bp, Homo sapien
taacacaactcaagacaccaacattctaaactt

SEQ ID NO: 131854 - DNA, 33 bp, Homo sapien
taacacaactcaagacgccaacattctaaactt

SEQ ID NO: 131855 - DNA, 33 bp, Homo sapien
gctctcttggcaaaaacttagcaacaactaata

SEQ ID NO: 131856 - DNA, 33 bp, Homo sapien
gctctcttggcaaaaatttagcaacaactaata

SEQ ID NO: 131857 - DNA, 33 bp, Homo sapien
ctttatttttttatccacagtgtacatcatata

SEQ ID NO: 131858 - DNA, 33 bp, Homo sapien
ctttatttttttatccgcagtgtacatcatata

SEQ ID NO: 131859 - DNA, 33 bp, Homo sapien
ttttccatatttgtcacggagtttcaatgactt

SEQ ID NO: 131860 - DNA, 33 bp, Homo sapien
ttttccatatttgtcatggagtttcaatgactt

SEQ ID NO: 131861 - DNA, 33 bp, Homo sapien
cttgcataattacacactgaaaatttgctacaa

SEQ ID NO: 131862 - DNA, 33 bp, Homo sapien
cttgcataattacacattgaaaatttgctacaa

SEQ ID NO: 131863 - DNA, 33 bp, Homo sapien
tggtgagtctgataacagtatacactcatgcaa

SEQ ID NO: 131864 - DNA, 33 bp, Homo sapien
tggtgagtctgataacggtatacactcatgcaa

SEQ ID NO: 131865 - DNA, 33 bp, Homo sapien
acagaagaggaaccataaacaaaaagcaaaatg

SEQ ID NO: 131866 - DNA, 33 bp, Homo sapien
acagaagaggaaccatgaacaaaaagcaaaatg

SEQ ID NO: 131867 - DNA, 33 bp, Homo sapien
agtcagcccacagaacaggagacaatattggaa

SEQ ID NO: 131868 - DNA, 33 bp, Homo sapien
agtcagcccacagaacgggagacaatattggaa

SEQ ID NO: 131869 - DNA, 33 bp, Homo sapien
ttaataataataggcaaaacacctaaacagaca

SEQ ID NO: 131870 - DNA, 33 bp, Homo sapien
ttaataataataggcagaacacctaaacagaca

SEQ ID NO: 131871 - DNA, 33 bp, Homo sapien
gcataaaggtataaacaagctgtacaattttta

SEQ ID NO: 131872 - DNA, 33 bp, Homo sapien
gcataaaggtataaaccagctgtacaattttta

SEQ ID NO: 131873 - DNA, 33 bp, Homo sapien
tttacttagcagctctcaaacaaactagataga

SEQ ID NO: 131874 - DNA, 33 bp, Homo sapien
tttacttagcagctctgaaacaaactagataga

SEQ ID NO: 131875 - DNA, 33 bp, Homo sapien
tacaaatgtgggcaccaggtataggaggtcagg

SEQ ID NO: 131876 - DNA, 33 bp, Homo sapien
tacaaatgtgggcaccgggtataggaggtcagg

SEQ ID NO: 131877 - DNA, 33 bp, Homo sapien
tgattcatgcagatcaaagtcacttcttttatt

SEQ ID NO: 131878 - DNA, 33 bp, Homo sapien
tgattcatgcagatcagagtcacttcttttatt

SEQ ID NO: 131879 - DNA, 33 bp, Homo sapien
gttaagagtagtactacagaaatagaaaaacaa

SEQ ID NO: 131880 - DNA, 33 bp, Homo sapien
gttaagagtagtactagagaaatagaaaaacaa

SEQ ID NO: 131881 - DNA, 33 bp, Homo sapien
gggatcctgttttacaagctgttactaaccttc

SEQ ID NO: 131882 - DNA, 33 bp, Homo sapien
gggatcctgttttacaggctgttactaaccttc

SEQ ID NO: 131883 - DNA, 33 bp, Homo sapien
tcttggctgatcctgcagaaaagggacagaggt

SEQ ID NO: 131884 - DNA, 33 bp, Homo sapien
tcttggctgatcctgcggaaaagggacagaggt

SEQ ID NO: 131885 - DNA, 33 bp, Homo sapien
tcatggaatgataggacgaggtgcggttcttgg

SEQ ID NO: 131886 - DNA, 33 bp, Homo sapien
tcatggaatgataggatgaggtgcggttcttgg

SEQ ID NO: 131887 - DNA, 33 bp, Homo sapien
ccttgagaagcctacaatacagtggatgagaga

SEQ ID NO: 131888 - DNA, 33 bp, Homo sapien
ccttgagaagcctacagtacagtggatgagaga

SEQ ID NO: 131889 - DNA, 33 bp, Homo sapien
aaactccgtatcaccacatagcaatgatttgta

SEQ ID NO: 131890 - DNA, 33 bp, Homo sapien
aaactccgtatcaccatatagcaatgatttgta

SEQ ID NO: 131891 - DNA, 33 bp, Homo sapien
tgtctgagtgtgccatcagaggaagatgaagac

SEQ ID NO: 131892 - DNA, 33 bp, Homo sapien
tgtctgagtgtgccattagaggaagatgaagac

SEQ ID NO: 131893 - DNA, 33 bp, Homo sapien
agaccggcattttagacagaggaaataacaagc

SEQ ID NO: 131894 - DNA, 33 bp, Homo sapien
agaccggcattttagatagaggaaataacaagc

SEQ ID NO: 131895 - DNA, 33 bp, Homo sapien
ggcatgactattcatcggatatggggttttatt

SEQ ID NO: 131896 - DNA, 33 bp, Homo sapien
ggcatgactattcatctgatatggggttttatt

SEQ ID NO: 131897 - DNA, 33 bp, Homo sapien
gtatggtttaagcaccaggatatatgctaccag

SEQ ID NO: 131898 - DNA, 33 bp, Homo sapien
gtatggtttaagcaccgggatatatgctaccag

SEQ ID NO: 131899 - DNA, 33 bp, Homo sapien
agagcaactttcaaaaacgagcgaaagaaaggc

SEQ ID NO: 131900 - DNA, 33 bp, Homo sapien
agagcaactttcaaaaccgagcgaaagaaaggc

SEQ ID NO: 131901 - DNA, 33 bp, Homo sapien
tcctgatgaagaatccagagaagaagtaccaca

SEQ ID NO: 131902 - DNA, 33 bp, Homo sapien
tcctgatgaagaatccggagaagaagtaccaca

SEQ ID NO: 131903 - DNA, 33 bp, Homo sapien
aatcttaatgcacctaaagatttacagaacggt

SEQ ID NO: 131904 - DNA, 33 bp, Homo sapien
aatcttaatgcacctagagatttacagaacggt

SEQ ID NO: 131905 - DNA, 33 bp, Homo sapien
taccccctttaactcacactctacttgcgctta

SEQ ID NO: 131906 - DNA, 33 bp, Homo sapien
taccccctttaactcatactctacttgcgctta

SEQ ID NO: 131907 - DNA, 33 bp, Homo sapien
gagtactgcccagcaccgaaacccttccttttt

SEQ ID NO: 131908 - DNA, 33 bp, Homo sapien
gagtactgcccagcactgaaacccttccttttt

SEQ ID NO: 131909 - DNA, 33 bp, Homo sapien
taagcactgataaatgcaccaccaaagacccct

SEQ ID NO: 131910 - DNA, 33 bp, Homo sapien
taagcactgataaatgtaccaccaaagacccct

SEQ ID NO: 131911 - DNA, 33 bp, Homo sapien
ttccttctttagagagaccttcctgaaccttct

SEQ ID NO: 131912 - DNA, 33 bp, Homo sapien
ttccttctttagagaggccttcctgaaccttct

SEQ ID NO: 131913 - DNA, 33 bp, Homo sapien
gggactggaacagccaatgcccatgcctccagt

SEQ ID NO: 131914 - DNA, 33 bp, Homo sapien
gggactggaacagccagtgcccatgcctccagt

SEQ ID NO: 131915 - DNA, 33 bp, Homo sapien
ccaggagtcccatcaaaccatgttccctgagct

SEQ ID NO: 131916 - DNA, 33 bp, Homo sapien
ccaggagtcccatcaagccatgttccctgagct

SEQ ID NO: 131917 - DNA, 33 bp, Homo sapien
tccagcgcgcttcacaaactttaatgtggactc

SEQ ID NO: 131918 - DNA, 33 bp, Homo sapien
tccagcgcgcttcacagactttaatgtggactc

SEQ ID NO: 131919 - DNA, 33 bp, Homo sapien
atttatgtgaacccacgacacacggagcaccac

SEQ ID NO: 131920 - DNA, 33 bp, Homo sapien
atttatgtgaacccactacacacggagcaccac

SEQ ID NO: 131921 - DNA, 33 bp, Homo sapien
taaatcctcagtgggaaaattctgagatgtgtt

SEQ ID NO: 131922 - DNA, 33 bp, Homo sapien
taaatcctcagtgggacaattctgagatgtgtt

SEQ ID NO: 131923 - DNA, 33 bp, Homo sapien
gatggagccaaggtagcatattttctggtcttg

SEQ ID NO: 131924 - DNA, 33 bp, Homo sapien
gatggagccaaggtagtatattttctggtcttg

SEQ ID NO: 131925 - DNA, 33 bp, Homo sapien
ttgagtatgcactaggcatcaggcacaggcact

SEQ ID NO: 131926 - DNA, 33 bp, Homo sapien
ttgagtatgcactaggtatcaggcacaggcact

SEQ ID NO: 131927 - DNA, 33 bp, Homo sapien
ctccttcgatgctgccagagtgattctcccaaa

SEQ ID NO: 131928 - DNA, 33 bp, Homo sapien
ctccttcgatgctgccggagtgattctcccaaa

SEQ ID NO: 131929 - DNA, 33 bp, Homo sapien
aatgctacaggggcaggataatacagcgatcac

SEQ ID NO: 131930 - DNA, 33 bp, Homo sapien
aatgctacaggggcagtataatacagcgatcac

SEQ ID NO: 131931 - DNA, 33 bp, Homo sapien
gcagcacaagttctataagggcagaaccatgtc

SEQ ID NO: 131932 - DNA, 33 bp, Homo sapien
gcagcacaagttctatgagggcagaaccatgtc

SEQ ID NO: 131933 - DNA, 33 bp, Homo sapien
tttcatggctgagctaaatgtttcactaggtgg

SEQ ID NO: 131934 - DNA, 33 bp, Homo sapien
tttcatggctgagctatatgtttcactaggtgg

SEQ ID NO: 131935 - DNA, 33 bp, Homo sapien
tggatcatgcagtaagacctcgtgtttgctgtt

SEQ ID NO: 131936 - DNA, 33 bp, Homo sapien
tggatcatgcagtaaggcctcgtgtttgctgtt

SEQ ID NO: 131937 - DNA, 33 bp, Homo sapien
tggggctttgcagctacgaagtgctctctctcc

SEQ ID NO: 131938 - DNA, 33 bp, Homo sapien
tggggctttgcagctatgaagtgctctctctcc

SEQ ID NO: 131939 - DNA, 33 bp, Homo sapien
ggttttcctttcagcccgatacagagacctggg

SEQ ID NO: 131940 - DNA, 33 bp, Homo sapien
ggttttcctttcagcctgatacagagacctggg

SEQ ID NO: 131941 - DNA, 33 bp, Homo sapien
aacataacacagccatcagaagaatatggtgtt

SEQ ID NO: 131942 - DNA, 33 bp, Homo sapien
aacataacacagccattagaagaatatggtgtt

SEQ ID NO: 131943 - DNA, 33 bp, Homo sapien
gaaacagttattggcacggagaggtgttcagat

SEQ ID NO: 131944 - DNA, 33 bp, Homo sapien
gaaacagttattggcatggagaggtgttcagat

SEQ ID NO: 131945 - DNA, 33 bp, Homo sapien
atgttcatcacacccaatctaattcataccagg

SEQ ID NO: 131946 - DNA, 33 bp, Homo sapien
atgttcatcacacccagtctaattcataccagg

SEQ ID NO: 131947 - DNA, 33 bp, Homo sapien
aaatttggccacagaaactggctaggaaaaaac

SEQ ID NO: 131948 - DNA, 33 bp, Homo sapien
aaatttggccacagaagctggctaggaaaaaac

SEQ ID NO: 131949 - DNA, 33 bp, Homo sapien
acacctattctgcaaaaactagtaataggaaaa

SEQ ID NO: 131950 - DNA, 33 bp, Homo sapien
acacctattctgcaaacactagtaataggaaaa

SEQ ID NO: 131951 - DNA, 33 bp, Homo sapien
catgcaaaggaactgcccgcccagaaataccca

SEQ ID NO: 131952 - DNA, 33 bp, Homo sapien
catgcaaaggaactgcgcgcccagaaataccca

SEQ ID NO: 131953 - DNA, 33 bp, Homo sapien
ctgagtcaaagccgaacgcagggatgtcatact

SEQ ID NO: 131954 - DNA, 33 bp, Homo sapien
ctgagtcaaagccgaatgcagggatgtcatact

SEQ ID NO: 131955 - DNA, 33 bp, Homo sapien
cctttgtttcaaggcccccctgtcacaagctcc

SEQ ID NO: 131956 - DNA, 33 bp, Homo sapien
cctttgtttcaaggccgccctgtcacaagctcc

SEQ ID NO: 131957 - DNA, 33 bp, Homo sapien
aaacatttagactgcccggcaaaagtgtccagc

SEQ ID NO: 131958 - DNA, 33 bp, Homo sapien
aaacatttagactgcctggcaaaagtgtccagc

SEQ ID NO: 131959 - DNA, 33 bp, Homo sapien
ccaggagagaggctgaaagaaaccaggggaggc

SEQ ID NO: 131960 - DNA, 33 bp, Homo sapien
ccaggagagaggctgagagaaaccaggggaggc

SEQ ID NO: 131961 - DNA, 33 bp, Homo sapien
tctgtcagtggacaagaaagtctcaactcccac

SEQ ID NO: 131962 - DNA, 33 bp, Homo sapien
tctgtcagtggacaaggaagtctcaactcccac

SEQ ID NO: 131963 - DNA, 33 bp, Homo sapien
ctagttccacattctacagggcatgccagggcc

SEQ ID NO: 131964 - DNA, 33 bp, Homo sapien
ctagttccacattctatagggcatgccagggcc

SEQ ID NO: 131965 - DNA, 33 bp, Homo sapien
cctgagagtactcccccagaagctcaagaaggg

SEQ ID NO: 131966 - DNA, 33 bp, Homo sapien
cctgagagtactccccgagaagctcaagaaggg

SEQ ID NO: 131967 - DNA, 33 bp, Homo sapien
gccactcatctcctgaatagtctgtcatctctc

SEQ ID NO: 131968 - DNA, 33 bp, Homo sapien
gccactcatctcctgattagtctgtcatctctc

SEQ ID NO: 131969 - DNA, 33 bp, Homo sapien
cagaaccgtgcgctatcaacatttttttttaag

SEQ ID NO: 131970 - DNA, 33 bp, Homo sapien
cagaaccgtgcgctattaacatttttttttaag

SEQ ID NO: 131971 - DNA, 33 bp, Homo sapien
atctcagtgttgttaccaggattagaggagcta

SEQ ID NO: 131972 - DNA, 33 bp, Homo sapien
atctcagtgttgttacgaggattagaggagcta

SEQ ID NO: 131973 - DNA, 33 bp, Homo sapien
aaaggccacactcaaaccagatactcccctagt

SEQ ID NO: 131974 - DNA, 33 bp, Homo sapien
aaaggccacactcaaatcagatactcccctagt

SEQ ID NO: 131975 - DNA, 33 bp, Homo sapien
agccatgttcagggaaactctttctacccgaca

SEQ ID NO: 131976 - DNA, 33 bp, Homo sapien
agccatgttcagggaagctctttctacccgaca

SEQ ID NO: 131977 - DNA, 33 bp, Homo sapien
gtccctgcccgcaaaggaagctagcaatgtcat

SEQ ID NO: 131978 - DNA, 33 bp, Homo sapien
gtccctgcccgcaaagtaagctagcaatgtcat

SEQ ID NO: 131979 - DNA, 33 bp, Homo sapien
catggggccaggagccaacaaactattaagaga

SEQ ID NO: 131980 - DNA, 33 bp, Homo sapien
catggggccaggagcctacaaactattaagaga

SEQ ID NO: 131981 - DNA, 33 bp, Homo sapien
atggccatatcggatactacagctcccagcgtc

SEQ ID NO: 131982 - DNA, 33 bp, Homo sapien
atggccatatcggatattacagctcccagcgtc

SEQ ID NO: 131983 - DNA, 33 bp, Homo sapien
agatgaaagggacaagcatccagagaccttgtg

SEQ ID NO: 131984 - DNA, 33 bp, Homo sapien
agatgaaagggacaagtatccagagaccttgtg

SEQ ID NO: 131985 - DNA, 33 bp, Homo sapien
gagatgatctagaaacacttgcatgaacacacg

SEQ ID NO: 131986 - DNA, 33 bp, Homo sapien
gagatgatctagaaacgcttgcatgaacacacg

SEQ ID NO: 131987 - DNA, 33 bp, Homo sapien
ggattggggtagaaagcccacccacacatgcct

SEQ ID NO: 131988 - DNA, 33 bp, Homo sapien
ggattggggtagaaagtccacccacacatgcct

SEQ ID NO: 131989 - DNA, 33 bp, Homo sapien
cccacattacagattacaaaacaggagctcaca

SEQ ID NO: 131990 - DNA, 33 bp, Homo sapien
cccacattacagattagaaaacaggagctcaca

SEQ ID NO: 131991 - DNA, 33 bp, Homo sapien
tcatgccatcgagaccactcagggctagcacag

SEQ ID NO: 131992 - DNA, 33 bp, Homo sapien
tcatgccatcgagaccgctcagggctagcacag

SEQ ID NO: 131993 - DNA, 33 bp, Homo sapien
ggtttcatttaactacaaaattctagctctatt

SEQ ID NO: 131994 - DNA, 33 bp, Homo sapien
ggtttcatttaactacgaaattctagctctatt

SEQ ID NO: 131995 - DNA, 33 bp, Homo sapien
tttttggttgcctgtcacttgattgctcacatg

SEQ ID NO: 131996 - DNA, 33 bp, Homo sapien
tttttggttgcctgtcgcttgattgctcacatg

SEQ ID NO: 131997 - DNA, 33 bp, Homo sapien
ctgggggaagcctatcagagaattaagtcaaca

SEQ ID NO: 131998 - DNA, 33 bp, Homo sapien
ctgggggaagcctatcggagaattaagtcaaca

SEQ ID NO: 131999 - DNA, 33 bp, Homo sapien
ctcaggttgcctctagaactcttgtgcccacag

SEQ ID NO: 132000 - DNA, 33 bp, Homo sapien
ctcaggttgcctctaggactcttgtgcccacag

SEQ ID NO: 132001 - DNA, 33 bp, Homo sapien
tcctccatcctcaaaaacagcgaaagatgtgag

SEQ ID NO: 132002 - DNA, 33 bp, Homo sapien
tcctccatcctcaaaagcagcgaaagatgtgag

SEQ ID NO: 132003 - DNA, 33 bp, Homo sapien
aggaccaactattcataagggatcagccctcat

SEQ ID NO: 132004 - DNA, 33 bp, Homo sapien
aggaccaactattcatgagggatcagccctcat

SEQ ID NO: 132005 - DNA, 33 bp, Homo sapien
aagggagttaggctacaaaaacttgacattttt

SEQ ID NO: 132006 - DNA, 33 bp, Homo sapien
aagggagttaggctaccaaaacttgacattttt

SEQ ID NO: 132007 - DNA, 33 bp, Homo sapien
tggctccttgatgtgaaggctgcagggtatgtg

SEQ ID NO: 132008 - DNA, 33 bp, Homo sapien
tggctccttgatgtgacggctgcagggtatgtg

SEQ ID NO: 132009 - DNA, 33 bp, Homo sapien
tgtgcttccgttttccgcggccagtggtccatg

SEQ ID NO: 132010 - DNA, 33 bp, Homo sapien
tgtgcttccgttttcctcggccagtggtccatg

SEQ ID NO: 132011 - DNA, 33 bp, Homo sapien
ctgaggcatggcttctaactatgtttatgtttt

SEQ ID NO: 132012 - DNA, 33 bp, Homo sapien
ctgaggcatggcttcttactatgtttatgtttt

SEQ ID NO: 132013 - DNA, 33 bp, Homo sapien
tttagcaagattgctaagtagttcatgtgcaca

SEQ ID NO: 132014 - DNA, 33 bp, Homo sapien
tttagcaagattgctaggtagttcatgtgcaca

SEQ ID NO: 132015 - DNA, 33 bp, Homo sapien
gtgtctggagttcagacaggcttgataagtgaa

SEQ ID NO: 132016 - DNA, 33 bp, Homo sapien
gtgtctggagttcagataggcttgataagtgaa

SEQ ID NO: 132017 - DNA, 33 bp, Homo sapien
acaggctctgcgagtacagccattttgcagatg

SEQ ID NO: 132018 - DNA, 33 bp, Homo sapien
acaggctctgcgagtatagccattttgcagatg

SEQ ID NO: 132019 - DNA, 33 bp, Homo sapien
taaaagtgtaaacatccgagccctcaaaaccca

SEQ ID NO: 132020 - DNA, 33 bp, Homo sapien
taaaagtgtaaacatctgagccctcaaaaccca

SEQ ID NO: 132021 - DNA, 33 bp, Homo sapien
cacttctctttgctaacgttcctcctcatcttg

SEQ ID NO: 132022 - DNA, 33 bp, Homo sapien
cacttctctttgctaatgttcctcctcatcttg

SEQ ID NO: 132023 - DNA, 33 bp, Homo sapien
tgtaaagcaaagcatacccccatttattataat

SEQ ID NO: 132024 - DNA, 33 bp, Homo sapien
tgtaaagcaaagcatatccccatttattataat

SEQ ID NO: 132025 - DNA, 33 bp, Homo sapien
tggctttaaccactgcccttacagggttgggag

SEQ ID NO: 132026 - DNA, 33 bp, Homo sapien
tggctttaaccactgctcttacagggttgggag

SEQ ID NO: 132027 - DNA, 33 bp, Homo sapien
gattcacgggtgaaccaaaacaatttcatgcct

SEQ ID NO: 132028 - DNA, 33 bp, Homo sapien
gattcacgggtgaaccgaaacaatttcatgcct

SEQ ID NO: 132029 - DNA, 33 bp, Homo sapien
caccacattctcagtgcaccgtgacttccttcc

SEQ ID NO: 132030 - DNA, 33 bp, Homo sapien
caccacattctcagtgtaccgtgacttccttcc

SEQ ID NO: 132031 - DNA, 33 bp, Homo sapien
cccaagctcattaaagaaagcagctcagcagct

SEQ ID NO: 132032 - DNA, 33 bp, Homo sapien
cccaagctcattaaagtaagcagctcagcagct

SEQ ID NO: 132033 - DNA, 33 bp, Homo sapien
aatgcttctgtccatgaaatataattctgccat

SEQ ID NO: 132034 - DNA, 33 bp, Homo sapien
aatgcttctgtccatgcaatataattctgccat

SEQ ID NO: 132035 - DNA, 33 bp, Homo sapien
gggatggtggatagcacggcactgtggtaggga

SEQ ID NO: 132036 - DNA, 33 bp, Homo sapien
gggatggtggatagcatggcactgtggtaggga

SEQ ID NO: 132037 - DNA, 33 bp, Homo sapien
cttgcccttacccagaacaacctctttccttct

SEQ ID NO: 132038 - DNA, 33 bp, Homo sapien
cttgcccttacccagagcaacctctttccttct

SEQ ID NO: 132039 - DNA, 33 bp, Homo sapien
cattatggaatgagtacggtgttgggcagatca

SEQ ID NO: 132040 - DNA, 33 bp, Homo sapien
cattatggaatgagtatggtgttgggcagatca

SEQ ID NO: 132041 - DNA, 33 bp, Homo sapien
taaacgagcttttctccaccacatgaattgata

SEQ ID NO: 132042 - DNA, 33 bp, Homo sapien
taaacgagcttttctctaccacatgaattgata

SEQ ID NO: 132043 - DNA, 33 bp, Homo sapien
aagccctccaaaaagacctttcttgtaacagca

SEQ ID NO: 132044 - DNA, 33 bp, Homo sapien
aagccctccaaaaagagctttcttgtaacagca

SEQ ID NO: 132045 - DNA, 33 bp, Homo sapien
tgctggaccagatgacacaaaagaaacaactct

SEQ ID NO: 132046 - DNA, 33 bp, Homo sapien
tgctggaccagatgacgcaaaagaaacaactct

SEQ ID NO: 132047 - DNA, 33 bp, Homo sapien
agttagtccaaagcccactgtctttcccctcca

SEQ ID NO: 132048 - DNA, 33 bp, Homo sapien
agttagtccaaagcccgctgtctttcccctcca

SEQ ID NO: 132049 - DNA, 33 bp, Homo sapien
ggtggggagtgggaaacagctttataatttttg

SEQ ID NO: 132050 - DNA, 33 bp, Homo sapien
ggtggggagtgggaaatagctttataatttttg

SEQ ID NO: 132051 - DNA, 33 bp, Homo sapien
ggagatggctacacaaatgtgaaaggatggttg

SEQ ID NO: 132052 - DNA, 33 bp, Homo sapien
ggagatggctacacaagtgtgaaaggatggttg

SEQ ID NO: 132053 - DNA, 33 bp, Homo sapien
ctccaccagaaaccacaaaggctaatgttctag

SEQ ID NO: 132054 - DNA, 33 bp, Homo sapien
ctccaccagaaaccacgaaggctaatgttctag

SEQ ID NO: 132055 - DNA, 33 bp, Homo sapien
cctgacttatgcaagaacctttttgctttataa

SEQ ID NO: 132056 - DNA, 33 bp, Homo sapien
cctgacttatgcaagagcctttttgctttataa

SEQ ID NO: 132057 - DNA, 33 bp, Homo sapien
atgcagactttttcaaacaaatgcagatggaaa

SEQ ID NO: 132058 - DNA, 33 bp, Homo sapien
atgcagactttttcaaccaaatgcagatggaaa

SEQ ID NO: 132059 - DNA, 33 bp, Homo sapien
agtttaaataaagaccaagttgtattcagactc

SEQ ID NO: 132060 - DNA, 33 bp, Homo sapien
agtttaaataaagaccgagttgtattcagactc

SEQ ID NO: 132061 - DNA, 33 bp, Homo sapien
actcacttggtcggagcaggcactgtgaatcac

SEQ ID NO: 132062 - DNA, 33 bp, Homo sapien
actcacttggtcggaggaggcactgtgaatcac

SEQ ID NO: 132063 - DNA, 33 bp, Homo sapien
ttttgaagactgtttcactcacatggttgccac

SEQ ID NO: 132064 - DNA, 33 bp, Homo sapien
ttttgaagactgtttctctcacatggttgccac

SEQ ID NO: 132065 - DNA, 33 bp, Homo sapien
tagcttgggctcttgactatagagaagcttgga

SEQ ID NO: 132066 - DNA, 33 bp, Homo sapien
tagcttgggctcttgattatagagaagcttgga

SEQ ID NO: 132067 - DNA, 33 bp, Homo sapien
acaggcagaagggaagacctgcaggagccagga

SEQ ID NO: 132068 - DNA, 33 bp, Homo sapien
acaggcagaagggaagccctgcaggagccagga

SEQ ID NO: 132069 - DNA, 33 bp, Homo sapien
ggtggtcctgaggacaatctccaaccaccaggt

SEQ ID NO: 132070 - DNA, 33 bp, Homo sapien
ggtggtcctgaggacagtctccaaccaccaggt

SEQ ID NO: 132071 - DNA, 33 bp, Homo sapien
aggcagcaggatgggcaagtcatgttcctgggt

SEQ ID NO: 132072 - DNA, 33 bp, Homo sapien
aggcagcaggatgggcgagtcatgttcctgggt

SEQ ID NO: 132073 - DNA, 33 bp, Homo sapien
aagagaggctgagttaagaaaacgcatttagaa

SEQ ID NO: 132074 - DNA, 33 bp, Homo sapien
aagagaggctgagttacgaaaacgcatttagaa

SEQ ID NO: 132075 - DNA, 33 bp, Homo sapien
gatcagtttttccatacgagtgacaagaaggca

SEQ ID NO: 132076 - DNA, 33 bp, Homo sapien
gatcagtttttccatatgagtgacaagaaggca

SEQ ID NO: 132077 - DNA, 33 bp, Homo sapien
gacaataatgaagatcaaaatggagggatactt

SEQ ID NO: 132078 - DNA, 33 bp, Homo sapien
gacaataatgaagatcgaaatggagggatactt

SEQ ID NO: 132079 - DNA, 33 bp, Homo sapien
aataagattacaaggaacatcctcaaatatcct

SEQ ID NO: 132080 - DNA, 33 bp, Homo sapien
aataagattacaaggagcatcctcaaatatcct

SEQ ID NO: 132081 - DNA, 33 bp, Homo sapien
gaggagggaggcgggagagattatacaggaaca

SEQ ID NO: 132082 - DNA, 33 bp, Homo sapien
gaggagggaggcgggatagattatacaggaaca

SEQ ID NO: 132083 - DNA, 33 bp, Homo sapien
gttttgtctgaaaatgacaagctaatgctgaat

SEQ ID NO: 132084 - DNA, 33 bp, Homo sapien
gttttgtctgaaaatggcaagctaatgctgaat

SEQ ID NO: 132085 - DNA, 33 bp, Homo sapien
atgactgtcattcaccaactttgttttcattaa

SEQ ID NO: 132086 - DNA, 33 bp, Homo sapien
atgactgtcattcaccgactttgttttcattaa

SEQ ID NO: 132087 - DNA, 33 bp, Homo sapien
gcgtgtgtgtttttaactgcttaagcgctgata

SEQ ID NO: 132088 - DNA, 33 bp, Homo sapien
gcgtgtgtgtttttaattgcttaagcgctgata

SEQ ID NO: 132089 - DNA, 33 bp, Homo sapien
tgactaactctgttgccaactgaaaaaataata

SEQ ID NO: 132090 - DNA, 33 bp, Homo sapien
tgactaactctgttgctaactgaaaaaataata

SEQ ID NO: 132091 - DNA, 33 bp, Homo sapien
gctggaggttgaaacccatttatgccggaggtt

SEQ ID NO: 132092 - DNA, 33 bp, Homo sapien
gctggaggttgaaacctatttatgccggaggtt

SEQ ID NO: 132093 - DNA, 33 bp, Homo sapien
tggaaggctattcaaaagacaaaatatattcag

SEQ ID NO: 132094 - DNA, 33 bp, Homo sapien
tggaaggctattcaaaggacaaaatatattcag

SEQ ID NO: 132095 - DNA, 33 bp, Homo sapien
acttttctaattcatacagtcttcgaaccatgt

SEQ ID NO: 132096 - DNA, 33 bp, Homo sapien
acttttctaattcatatagtcttcgaaccatgt

SEQ ID NO: 132097 - DNA, 33 bp, Homo sapien
taatgattgaccttatgacaactctatatgact

SEQ ID NO: 132098 - DNA, 33 bp, Homo sapien
taatgattgaccttattacaactctatatgact

SEQ ID NO: 132099 - DNA, 33 bp, Homo sapien
tctttcttaaaggtccaaagacaaccagcgaag

SEQ ID NO: 132100 - DNA, 33 bp, Homo sapien
tctttcttaaaggtccgaagacaaccagcgaag

SEQ ID NO: 132101 - DNA, 33 bp, Homo sapien
aaacttttaggacataaaaatagaggatggtat

SEQ ID NO: 132102 - DNA, 33 bp, Homo sapien
aaacttttaggacatacaaatagaggatggtat

SEQ ID NO: 132103 - DNA, 33 bp, Homo sapien
taaactgaagctacaactaataatatgctgaga

SEQ ID NO: 132104 - DNA, 33 bp, Homo sapien
taaactgaagctacaagtaataatatgctgaga

SEQ ID NO: 132105 - DNA, 33 bp, Homo sapien
caacactgaacaggtacgtagtcatctgtacaa

SEQ ID NO: 132106 - DNA, 33 bp, Homo sapien
caacactgaacaggtatgtagtcatctgtacaa

SEQ ID NO: 132107 - DNA, 33 bp, Homo sapien
gaaagggaactagaaactagaaggcccattagg

SEQ ID NO: 132108 - DNA, 33 bp, Homo sapien
gaaagggaactagaaattagaaggcccattagg

SEQ ID NO: 132109 - DNA, 33 bp, Homo sapien
gcttttagattgcaaactggaaatgtaaaactc

SEQ ID NO: 132110 - DNA, 33 bp, Homo sapien
gcttttagattgcaaattggaaatgtaaaactc

SEQ ID NO: 132111 - DNA, 33 bp, Homo sapien
tatttaggcacgtcagaaattacttttccttat

SEQ ID NO: 132112 - DNA, 33 bp, Homo sapien
tatttaggcacgtcaggaattacttttccttat

SEQ ID NO: 132113 - DNA, 33 bp, Homo sapien
agatcagtaggaagttaaaacatatcttgtggc

SEQ ID NO: 132114 - DNA, 33 bp, Homo sapien
agatcagtaggaagttgaaacatatcttgtggc

SEQ ID NO: 132115 - DNA, 33 bp, Homo sapien
ctggcctcactcgtcaggcaaaccttgtcctcg

SEQ ID NO: 132116 - DNA, 33 bp, Homo sapien
ctggcctcactcgtcatgcaaaccttgtcctcg

SEQ ID NO: 132117 - DNA, 33 bp, Homo sapien
gctgcagcacagccagaatgtcttcagaagaga

SEQ ID NO: 132118 - DNA, 33 bp, Homo sapien
gctgcagcacagccaggatgtcttcagaagaga

SEQ ID NO: 132119 - DNA, 33 bp, Homo sapien
accgagtgagccttccggcaattgactaatgtg

SEQ ID NO: 132120 - DNA, 33 bp, Homo sapien
accgagtgagccttcctgcaattgactaatgtg

SEQ ID NO: 132121 - DNA, 33 bp, Homo sapien
gagcagtgtttctctaggaatggttgagtgtgt

SEQ ID NO: 132122 - DNA, 33 bp, Homo sapien
gagcagtgtttctctatgaatggttgagtgtgt

SEQ ID NO: 132123 - DNA, 33 bp, Homo sapien
ctcttgtaatcccagaacttctctgacagctgc

SEQ ID NO: 132124 - DNA, 33 bp, Homo sapien
ctcttgtaatcccagaccttctctgacagctgc

SEQ ID NO: 132125 - DNA, 33 bp, Homo sapien
gcctctgccaagactcgacaatgtgttctaatg

SEQ ID NO: 132126 - DNA, 33 bp, Homo sapien
gcctctgccaagactctacaatgtgttctaatg

SEQ ID NO: 132127 - DNA, 33 bp, Homo sapien
gtttgctgcttcttgtaaataggttctgtttcc

SEQ ID NO: 132128 - DNA, 33 bp, Homo sapien
gtttgctgcttcttgttaataggttctgtttcc

SEQ ID NO: 132129 - DNA, 33 bp, Homo sapien
gtattttatctgacaactgcaggttcaggtact

SEQ ID NO: 132130 - DNA, 33 bp, Homo sapien
gtattttatctgacaattgcaggttcaggtact

SEQ ID NO: 132131 - DNA, 33 bp, Homo sapien
ggttttaaaatacaaggcagagtatggcctttg

SEQ ID NO: 132132 - DNA, 33 bp, Homo sapien
ggttttaaaatacaagtcagagtatggcctttg

SEQ ID NO: 132133 - DNA, 33 bp, Homo sapien
gcagcatctaagagaaacccagcaatgagccca

SEQ ID NO: 132134 - DNA, 33 bp, Homo sapien
gcagcatctaagagaagcccagcaatgagccca

SEQ ID NO: 132135 - DNA, 33 bp, Homo sapien
tcagagacaaggttcaatccatggcaatacctt

SEQ ID NO: 132136 - DNA, 33 bp, Homo sapien
tcagagacaaggttcagtccatggcaatacctt

SEQ ID NO: 132137 - DNA, 33 bp, Homo sapien
tcttgaggaggctttaactgactaccccatcta

SEQ ID NO: 132138 - DNA, 33 bp, Homo sapien
tcttgaggaggctttagctgactaccccatcta

SEQ ID NO: 132139 - DNA, 33 bp, Homo sapien
atacagattataaggaaagcaataagtaatgtg

SEQ ID NO: 132140 - DNA, 33 bp, Homo sapien
atacagattataaggacagcaataagtaatgtg

SEQ ID NO: 132141 - DNA, 33 bp, Homo sapien
caggtgaaggccaaagacttccagtcaagggca

SEQ ID NO: 132142 - DNA, 33 bp, Homo sapien
caggtgaaggccaaaggcttccagtcaagggca

SEQ ID NO: 132143 - DNA, 33 bp, Homo sapien
tattcccattgtcttacagagcctctcgttgtc

SEQ ID NO: 132144 - DNA, 33 bp, Homo sapien
tattcccattgtcttatagagcctctcgttgtc

SEQ ID NO: 132145 - DNA, 33 bp, Homo sapien
atgagtcaagcacacaaggaaggctgtcctgtc

SEQ ID NO: 132146 - DNA, 33 bp, Homo sapien
atgagtcaagcacacagggaaggctgtcctgtc

SEQ ID NO: 132147 - DNA, 33 bp, Homo sapien
ggcacctacgatgcaacgatcctggatgccaac

SEQ ID NO: 132148 - DNA, 33 bp, Homo sapien
ggcacctacgatgcaatgatcctggatgccaac

SEQ ID NO: 132149 - DNA, 33 bp, Homo sapien
aacttggaagttaggaatatgccaaccactcac

SEQ ID NO: 132150 - DNA, 33 bp, Homo sapien
aacttggaagttaggagtatgccaaccactcac

SEQ ID NO: 132151 - DNA, 33 bp, Homo sapien
ctgcctgagccctagaaaaactgaagttggcag

SEQ ID NO: 132152 - DNA, 33 bp, Homo sapien
ctgcctgagccctagagaaactgaagttggcag

SEQ ID NO: 132153 - DNA, 33 bp, Homo sapien
agaactatgaaaattcactctcagctgtgaaca

SEQ ID NO: 132154 - DNA, 33 bp, Homo sapien
agaactatgaaaattcgctctcagctgtgaaca

SEQ ID NO: 132155 - DNA, 33 bp, Homo sapien
atcctttcttaataaaacaaatgacaccacaca

SEQ ID NO: 132156 - DNA, 33 bp, Homo sapien
atcctttcttaataaagcaaatgacaccacaca

SEQ ID NO: 132157 - DNA, 33 bp, Homo sapien
tagttacaggtccaacagagttcactctaagac

SEQ ID NO: 132158 - DNA, 33 bp, Homo sapien
tagttacaggtccaacggagttcactctaagac

SEQ ID NO: 132159 - DNA, 33 bp, Homo sapien
ataagaagtgttgaaactcagttaagagaattt

SEQ ID NO: 132160 - DNA, 33 bp, Homo sapien
ataagaagtgttgaaagtcagttaagagaattt

SEQ ID NO: 132161 - DNA, 33 bp, Homo sapien
ggagaaagagaccacaaaggtaaaatgccctct

SEQ ID NO: 132162 - DNA, 33 bp, Homo sapien
ggagaaagagaccacagaggtaaaatgccctct

SEQ ID NO: 132163 - DNA, 33 bp, Homo sapien
gtgttactagatttcaacttttttctcccaatt

SEQ ID NO: 132164 - DNA, 33 bp, Homo sapien
gtgttactagatttcagcttttttctcccaatt

SEQ ID NO: 132165 - DNA, 33 bp, Homo sapien
tcagagagtctgggtaacatgcctaagtcagcc

SEQ ID NO: 132166 - DNA, 33 bp, Homo sapien
tcagagagtctgggtagcatgcctaagtcagcc

SEQ ID NO: 132167 - DNA, 33 bp, Homo sapien
atatagcaaccctgcaacatactagatttcttt

SEQ ID NO: 132168 - DNA, 33 bp, Homo sapien
atatagcaaccctgcagcatactagatttcttt

SEQ ID NO: 132169 - DNA, 33 bp, Homo sapien
aaaacagactaagacaaaaacctagccacttca

SEQ ID NO: 132170 - DNA, 33 bp, Homo sapien
aaaacagactaagacagaaacctagccacttca

SEQ ID NO: 132171 - DNA, 33 bp, Homo sapien
agcaaggagtggcaaacgtgttgtaattagaaa

SEQ ID NO: 132172 - DNA, 33 bp, Homo sapien
agcaaggagtggcaaatgtgttgtaattagaaa

SEQ ID NO: 132173 - DNA, 33 bp, Homo sapien
catagtacttatcaccgcctggctgagttcatt

SEQ ID NO: 132174 - DNA, 33 bp, Homo sapien
catagtacttatcacctcctggctgagttcatt

SEQ ID NO: 132175 - DNA, 33 bp, Homo sapien
agaatttgttttgatgcaattatggttttccta

SEQ ID NO: 132176 - DNA, 33 bp, Homo sapien
agaatttgttttgatggaattatggttttccta

SEQ ID NO: 132177 - DNA, 33 bp, Homo sapien
tcagaggtagggttgaaagaactcactgatgaa

SEQ ID NO: 132178 - DNA, 33 bp, Homo sapien
tcagaggtagggttgatagaactcactgatgaa

SEQ ID NO: 132179 - DNA, 33 bp, Homo sapien
tctagactggcagattcaaaccagcccagtctg

SEQ ID NO: 132180 - DNA, 33 bp, Homo sapien
tctagactggcagatttaaaccagcccagtctg

SEQ ID NO: 132181 - DNA, 33 bp, Homo sapien
catccaggtttacttccactctgttgagccatc

SEQ ID NO: 132182 - DNA, 33 bp, Homo sapien
catccaggtttacttctactctgttgagccatc

SEQ ID NO: 132183 - DNA, 33 bp, Homo sapien
aagagggcacaaccacaagtgatggaattggta

SEQ ID NO: 132184 - DNA, 33 bp, Homo sapien
aagagggcacaaccacgagtgatggaattggta

SEQ ID NO: 132185 - DNA, 33 bp, Homo sapien
taattgattcaagaaaatttatttagcaccaac

SEQ ID NO: 132186 - DNA, 33 bp, Homo sapien
taattgattcaagaaagtttatttagcaccaac

SEQ ID NO: 132187 - DNA, 33 bp, Homo sapien
tgaaccctgcactacactgaagatattattcca

SEQ ID NO: 132188 - DNA, 33 bp, Homo sapien
tgaaccctgcactacattgaagatattattcca

SEQ ID NO: 132189 - DNA, 33 bp, Homo sapien
tgtttgcagtaatatacggtagttcattatatc

SEQ ID NO: 132190 - DNA, 33 bp, Homo sapien
tgtttgcagtaatatatggtagttcattatatc

SEQ ID NO: 132191 - DNA, 33 bp, Homo sapien
tctacatctgacccaaactatgcagtttatctc

SEQ ID NO: 132192 - DNA, 33 bp, Homo sapien
tctacatctgacccaatctatgcagtttatctc

SEQ ID NO: 132193 - DNA, 33 bp, Homo sapien
gtgaagtccatcctaaagttgttacagaaatca

SEQ ID NO: 132194 - DNA, 33 bp, Homo sapien
gtgaagtccatcctaaggttgttacagaaatca

SEQ ID NO: 132195 - DNA, 33 bp, Homo sapien
ccattgggtaagaaacggtcctacttcatattc

SEQ ID NO: 132196 - DNA, 33 bp, Homo sapien
ccattgggtaagaaactgtcctacttcatattc

SEQ ID NO: 132197 - DNA, 33 bp, Homo sapien
gttaagaaaacaatcacggctaaaagcctgaga

SEQ ID NO: 132198 - DNA, 33 bp, Homo sapien
gttaagaaaacaatcatggctaaaagcctgaga

SEQ ID NO: 132199 - DNA, 33 bp, Homo sapien
cgaatgcaaacaaagaccaccatgttgctactg

SEQ ID NO: 132200 - DNA, 33 bp, Homo sapien
cgaatgcaaacaaagagcaccatgttgctactg

SEQ ID NO: 132201 - DNA, 33 bp, Homo sapien
ggactgtcctgattcacagcagttcatagaacc

SEQ ID NO: 132202 - DNA, 33 bp, Homo sapien
ggactgtcctgattcatagcagttcatagaacc

SEQ ID NO: 132203 - DNA, 33 bp, Homo sapien
gtttgcttgtcatagcaacatttagaaactcga

SEQ ID NO: 132204 - DNA, 33 bp, Homo sapien
gtttgcttgtcatagcgacatttagaaactcga

SEQ ID NO: 132205 - DNA, 33 bp, Homo sapien
atatgtatttacggcgcaagcaagtgttgtcta

SEQ ID NO: 132206 - DNA, 33 bp, Homo sapien
atatgtatttacggcggaagcaagtgttgtcta

SEQ ID NO: 132207 - DNA, 33 bp, Homo sapien
aggatgttctttcttcccgtcacaaggctgatt

SEQ ID NO: 132208 - DNA, 33 bp, Homo sapien
aggatgttctttcttctcgtcacaaggctgatt

SEQ ID NO: 132209 - DNA, 33 bp, Homo sapien
gatcaaggtctcagcaaggttggttcctactga

SEQ ID NO: 132210 - DNA, 33 bp, Homo sapien
gatcaaggtctcagcagggttggttcctactga

SEQ ID NO: 132211 - DNA, 33 bp, Homo sapien
tcctggcccctataagcatttgagtttgctcac

SEQ ID NO: 132212 - DNA, 33 bp, Homo sapien
tcctggcccctataaggatttgagtttgctcac

SEQ ID NO: 132213 - DNA, 33 bp, Homo sapien
tctgcaaagctaaaaacattaactgtctggtcc

SEQ ID NO: 132214 - DNA, 33 bp, Homo sapien
tctgcaaagctaaaaagattaactgtctggtcc

SEQ ID NO: 132215 - DNA, 33 bp, Homo sapien
ttgcatgaaagaagcccgacaaaagaatataca

SEQ ID NO: 132216 - DNA, 33 bp, Homo sapien
ttgcatgaaagaagcctgacaaaagaatataca

SEQ ID NO: 132217 - DNA, 33 bp, Homo sapien
gcttttgaattacgtgaaaatcattagcaaagg

SEQ ID NO: 132218 - DNA, 33 bp, Homo sapien
gcttttgaattacgtggaaatcattagcaaagg

SEQ ID NO: 132219 - DNA, 33 bp, Homo sapien
gtttttgttttgtgtgaaaagttcttccccttc

SEQ ID NO: 132220 - DNA, 33 bp, Homo sapien
gtttttgttttgtgtgcaaagttcttccccttc

SEQ ID NO: 132221 - DNA, 33 bp, Homo sapien
tttctgagatttgtcaaagaaagtaatttgtag

SEQ ID NO: 132222 - DNA, 33 bp, Homo sapien
tttctgagatttgtcatagaaagtaatttgtag

SEQ ID NO: 132223 - DNA, 33 bp, Homo sapien
gaagcagacagctctgcaagtaacctgattgaa

SEQ ID NO: 132224 - DNA, 33 bp, Homo sapien
gaagcagacagctctggaagtaacctgattgaa

SEQ ID NO: 132225 - DNA, 33 bp, Homo sapien
atgtgctagtcacttgaaaaaaatagaaaaaca

SEQ ID NO: 132226 - DNA, 33 bp, Homo sapien
atgtgctagtcacttggaaaaaatagaaaaaca

SEQ ID NO: 132227 - DNA, 33 bp, Homo sapien
atgagacatcctacacaatatgtttaagatgta

SEQ ID NO: 132228 - DNA, 33 bp, Homo sapien
atgagacatcctacacgatatgtttaagatgta

SEQ ID NO: 132229 - DNA, 33 bp, Homo sapien
ctgtcatgtgggatccacctctcaacactctcc

SEQ ID NO: 132230 - DNA, 33 bp, Homo sapien
ctgtcatgtgggatcctcctctcaacactctcc

SEQ ID NO: 132231 - DNA, 33 bp, Homo sapien
agagtctgacacatgggaactacttaattcttg

SEQ ID NO: 132232 - DNA, 33 bp, Homo sapien
agagtctgacacatggtaactacttaattcttg

SEQ ID NO: 132233 - DNA, 33 bp, Homo sapien
tgggagagttttacaaagtagtaacaagttaaa

SEQ ID NO: 132234 - DNA, 33 bp, Homo sapien
tgggagagttttacaaggtagtaacaagttaaa

SEQ ID NO: 132235 - DNA, 33 bp, Homo sapien
ttcttcttttaggccagcatagtcttctttatt

SEQ ID NO: 132236 - DNA, 33 bp, Homo sapien
ttcttcttttaggccatcatagtcttctttatt

SEQ ID NO: 132237 - DNA, 33 bp, Homo sapien
tgcaataacactatacacccaagagaatgccta

SEQ ID NO: 132238 - DNA, 33 bp, Homo sapien
tgcaataacactatacgcccaagagaatgccta

SEQ ID NO: 132239 - DNA, 33 bp, Homo sapien
caagacttgatcttcaagaaagatgatgtccaa

SEQ ID NO: 132240 - DNA, 33 bp, Homo sapien
caagacttgatcttcacgaaagatgatgtccaa

SEQ ID NO: 132241 - DNA, 33 bp, Homo sapien
aatatatactattccaactgtcatcctaaatta

SEQ ID NO: 132242 - DNA, 33 bp, Homo sapien
aatatatactattccacctgtcatcctaaatta

SEQ ID NO: 132243 - DNA, 33 bp, Homo sapien
ttgttgcgggattgtacgaccagtgttacctcc

SEQ ID NO: 132244 - DNA, 33 bp, Homo sapien
ttgttgcgggattgtatgaccagtgttacctcc

SEQ ID NO: 132245 - DNA, 33 bp, Homo sapien
gactccagcggcaacaatctcaaccagtatctt

SEQ ID NO: 132246 - DNA, 33 bp, Homo sapien
gactccagcggcaacagtctcaaccagtatctt

SEQ ID NO: 132247 - DNA, 33 bp, Homo sapien
cataatcttcgcactccattactttttacctga

SEQ ID NO: 132248 - DNA, 33 bp, Homo sapien
cataatcttcgcactcgattactttttacctga

SEQ ID NO: 132249 - DNA, 33 bp, Homo sapien
agggctgccttcagatcagtgcattctctccca

SEQ ID NO: 132250 - DNA, 33 bp, Homo sapien
agggctgccttcagattagtgcattctctccca

SEQ ID NO: 132251 - DNA, 33 bp, Homo sapien
ctaacctggtcactctaacaccagctttcacag

SEQ ID NO: 132252 - DNA, 33 bp, Homo sapien
ctaacctggtcactctgacaccagctttcacag

SEQ ID NO: 132253 - DNA, 33 bp, Homo sapien
aaagggtatatcagaaagctattgaaagaagta

SEQ ID NO: 132254 - DNA, 33 bp, Homo sapien
aaagggtatatcagaaggctattgaaagaagta

SEQ ID NO: 132255 - DNA, 33 bp, Homo sapien
cattttcctaattctccgactagtgtcaaccct

SEQ ID NO: 132256 - DNA, 33 bp, Homo sapien
cattttcctaattctctgactagtgtcaaccct

SEQ ID NO: 132257 - DNA, 33 bp, Homo sapien
ttcccttctgtgcaaacctggaaccttccagac

SEQ ID NO: 132258 - DNA, 33 bp, Homo sapien
ttcccttctgtgcaaatctggaaccttccagac

SEQ ID NO: 132259 - DNA, 33 bp, Homo sapien
ttttcactggtcagaccctgctgttttagtgcc

SEQ ID NO: 132260 - DNA, 33 bp, Homo sapien
ttttcactggtcagactctgctgttttagtgcc

SEQ ID NO: 132261 - DNA, 33 bp, Homo sapien
ggctctttcaaagctcaaccaggatatttagtt

SEQ ID NO: 132262 - DNA, 33 bp, Homo sapien
ggctctttcaaagctcgaccaggatatttagtt

SEQ ID NO: 132263 - DNA, 33 bp, Homo sapien
aaacctcaaccaagataagtggagagatggggg

SEQ ID NO: 132264 - DNA, 33 bp, Homo sapien
aaacctcaaccaagatgagtggagagatggggg

SEQ ID NO: 132265 - DNA, 33 bp, Homo sapien
aagttccttgtcctccaccagccctctggtgat

SEQ ID NO: 132266 - DNA, 33 bp, Homo sapien
aagttccttgtcctccgccagccctctggtgat

SEQ ID NO: 132267 - DNA, 33 bp, Homo sapien
aatgacaaagtaggccagagacccttgctgtct

SEQ ID NO: 132268 - DNA, 33 bp, Homo sapien
aatgacaaagtaggccggagacccttgctgtct

SEQ ID NO: 132269 - DNA, 33 bp, Homo sapien
aacctgaatacgcccacatttagcaacagctgt

SEQ ID NO: 132270 - DNA, 33 bp, Homo sapien
aacctgaatacgcccagatttagcaacagctgt

SEQ ID NO: 132271 - DNA, 33 bp, Homo sapien
ccctttgatgtttctccacagccccacaaagaa

SEQ ID NO: 132272 - DNA, 33 bp, Homo sapien
ccctttgatgtttctctacagccccacaaagaa

SEQ ID NO: 132273 - DNA, 33 bp, Homo sapien
agagacagaacaattacgtggatttgattttct

SEQ ID NO: 132274 - DNA, 33 bp, Homo sapien
agagacagaacaattatgtggatttgattttct

SEQ ID NO: 132275 - DNA, 33 bp, Homo sapien
ttagaccacagattccaagcaggctcattggct

SEQ ID NO: 132276 - DNA, 33 bp, Homo sapien
ttagaccacagattccgagcaggctcattggct

SEQ ID NO: 132277 - DNA, 33 bp, Homo sapien
cttgaatatgagcagaagatctacaagaatgct

SEQ ID NO: 132278 - DNA, 33 bp, Homo sapien
cttgaatatgagcagaggatctacaagaatgct

SEQ ID NO: 132279 - DNA, 33 bp, Homo sapien
cacttgccagggacaacctgcagaggtatcttt

SEQ ID NO: 132280 - DNA, 33 bp, Homo sapien
cacttgccagggacaatctgcagaggtatcttt

SEQ ID NO: 132281 - DNA, 33 bp, Homo sapien
gggttaaatgcaataactcaaggatagagacac

SEQ ID NO: 132282 - DNA, 33 bp, Homo sapien
gggttaaatgcaataattcaaggatagagacac

SEQ ID NO: 132283 - DNA, 33 bp, Homo sapien
tttctttctcggtgacagtaggagtggaaatga

SEQ ID NO: 132284 - DNA, 33 bp, Homo sapien
tttctttctcggtgaccgtaggagtggaaatga

SEQ ID NO: 132285 - DNA, 33 bp, Homo sapien
tcatcagctaagaagaacttaacagtttgcaga

SEQ ID NO: 132286 - DNA, 33 bp, Homo sapien
tcatcagctaagaagagcttaacagtttgcaga

SEQ ID NO: 132287 - DNA, 33 bp, Homo sapien
catgaagcagggagtaaaacctaatgaacttat

SEQ ID NO: 132288 - DNA, 33 bp, Homo sapien
catgaagcagggagtagaacctaatgaacttat

SEQ ID NO: 132289 - DNA, 33 bp, Homo sapien
atgagcagctccaaacaaactgctggaaagacc

SEQ ID NO: 132290 - DNA, 33 bp, Homo sapien
atgagcagctccaaactaactgctggaaagacc

SEQ ID NO: 132291 - DNA, 33 bp, Homo sapien
tgagaaagctcccagaagagggtgtacgaatca

SEQ ID NO: 132292 - DNA, 33 bp, Homo sapien
tgagaaagctcccagacgagggtgtacgaatca

SEQ ID NO: 132293 - DNA, 33 bp, Homo sapien
ccgtttgtttaaaggactcaggcacatcctttc

SEQ ID NO: 132294 - DNA, 33 bp, Homo sapien
ccgtttgtttaaaggagtcaggcacatcctttc

SEQ ID NO: 132295 - DNA, 33 bp, Homo sapien
tgcatttattcatcaacccaacacagttctcat

SEQ ID NO: 132296 - DNA, 33 bp, Homo sapien
tgcatttattcatcaatccaacacagttctcat

SEQ ID NO: 132297 - DNA, 33 bp, Homo sapien
aaagcaatcttaacacagaagaatttggaatgg

SEQ ID NO: 132298 - DNA, 33 bp, Homo sapien
aaagcaatcttaacacggaagaatttggaatgg

SEQ ID NO: 132299 - DNA, 33 bp, Homo sapien
aataaacagcttatccacaagatgagtaataaa

SEQ ID NO: 132300 - DNA, 33 bp, Homo sapien
aataaacagcttatcctcaagatgagtaataaa

SEQ ID NO: 132301 - DNA, 33 bp, Homo sapien
taagaatccatactgcacactggtaggaaacaa

SEQ ID NO: 132302 - DNA, 33 bp, Homo sapien
taagaatccatactgcgcactggtaggaaacaa

SEQ ID NO: 132303 - DNA, 33 bp, Homo sapien
tgttcacctctttaaccgcaactgaatggatca

SEQ ID NO: 132304 - DNA, 33 bp, Homo sapien
tgttcacctctttaactgcaactgaatggatca

SEQ ID NO: 132305 - DNA, 33 bp, Homo sapien
atacctagaattaacacatgacccaataatttc

SEQ ID NO: 132306 - DNA, 33 bp, Homo sapien
atacctagaattaacatatgacccaataatttc

SEQ ID NO: 132307 - DNA, 33 bp, Homo sapien
cttaccacaaaaaggcaatttcaaagagttcaa

SEQ ID NO: 132308 - DNA, 33 bp, Homo sapien
cttaccacaaaaaggctatttcaaagagttcaa

SEQ ID NO: 132309 - DNA, 33 bp, Homo sapien
acaactgactatcagcaatttcataaggttctt

SEQ ID NO: 132310 - DNA, 33 bp, Homo sapien
acaactgactatcagcgatttcataaggttctt

SEQ ID NO: 132311 - DNA, 33 bp, Homo sapien
ttttatgtacttacaacctttgaaggaagccaa

SEQ ID NO: 132312 - DNA, 33 bp, Homo sapien
ttttatgtacttacaatctttgaaggaagccaa

SEQ ID NO: 132313 - DNA, 33 bp, Homo sapien
ttcaaattaacatcaacgaaacaggagctttat

SEQ ID NO: 132314 - DNA, 33 bp, Homo sapien
ttcaaattaacatcaatgaaacaggagctttat

SEQ ID NO: 132315 - DNA, 33 bp, Homo sapien
agaaactgtttacaacaaattagagactgggta

SEQ ID NO: 132316 - DNA, 33 bp, Homo sapien
agaaactgtttacaaccaattagagactgggta

SEQ ID NO: 132317 - DNA, 33 bp, Homo sapien
tcatcttcattcatccccttcagcagacaaatc

SEQ ID NO: 132318 - DNA, 33 bp, Homo sapien
tcatcttcattcatccgcttcagcagacaaatc

SEQ ID NO: 132319 - DNA, 33 bp, Homo sapien
tatggttgtgacaggacgtcagtagttctctgc

SEQ ID NO: 132320 - DNA, 33 bp, Homo sapien
tatggttgtgacaggatgtcagtagttctctgc

SEQ ID NO: 132321 - DNA, 33 bp, Homo sapien
ccaagctccaaaggcacagttctcaattcctat

SEQ ID NO: 132322 - DNA, 33 bp, Homo sapien
ccaagctccaaaggcatagttctcaattcctat

SEQ ID NO: 132323 - DNA, 33 bp, Homo sapien
ccaccagtggtaataaaaataatggtagctact

SEQ ID NO: 132324 - DNA, 33 bp, Homo sapien
ccaccagtggtaataacaataatggtagctact

SEQ ID NO: 132325 - DNA, 33 bp, Homo sapien
acttgtacaatgagtacagaaaacaaaaatgct

SEQ ID NO: 132326 - DNA, 33 bp, Homo sapien
acttgtacaatgagtatagaaaacaaaaatgct

SEQ ID NO: 132327 - DNA, 33 bp, Homo sapien
ctctattctatctgcccgctgccatttcagtta

SEQ ID NO: 132328 - DNA, 33 bp, Homo sapien
ctctattctatctgcctgctgccatttcagtta

SEQ ID NO: 132329 - DNA, 33 bp, Homo sapien
agaaggtgtatgcttccacatgatgagtgctga

SEQ ID NO: 132330 - DNA, 33 bp, Homo sapien
agaaggtgtatgcttctacatgatgagtgctga

SEQ ID NO: 132331 - DNA, 33 bp, Homo sapien
aaataacttgttaaaaaatgcaatgtagcaatg

SEQ ID NO: 132332 - DNA, 33 bp, Homo sapien
aaataacttgttaaaacatgcaatgtagcaatg

SEQ ID NO: 132333 - DNA, 33 bp, Homo sapien
attggttttataacgaagatgtcagctaaactg

SEQ ID NO: 132334 - DNA, 33 bp, Homo sapien
attggttttataacgaggatgtcagctaaactg

SEQ ID NO: 132335 - DNA, 33 bp, Homo sapien
tattgaagagatcaagacaaagttgtacctcaa

SEQ ID NO: 132336 - DNA, 33 bp, Homo sapien
tattgaagagatcaaggcaaagttgtacctcaa

SEQ ID NO: 132337 - DNA, 33 bp, Homo sapien
acagtattagcttccaataatgctgttattaca

SEQ ID NO: 132338 - DNA, 33 bp, Homo sapien
acagtattagcttccagtaatgctgttattaca

SEQ ID NO: 132339 - DNA, 33 bp, Homo sapien
tctctccgttggacagcccatcagatgtgatta

SEQ ID NO: 132340 - DNA, 33 bp, Homo sapien
tctctccgttggacaggccatcagatgtgatta

SEQ ID NO: 132341 - DNA, 33 bp, Homo sapien
atgttgaaaaacaaaagttctcttcacattgtt

SEQ ID NO: 132342 - DNA, 33 bp, Homo sapien
atgttgaaaaacaaaatttctcttcacattgtt

SEQ ID NO: 132343 - DNA, 33 bp, Homo sapien
gaccattgagttagacacctgcttcatgtggaa

SEQ ID NO: 132344 - DNA, 33 bp, Homo sapien
gaccattgagttagacccctgcttcatgtggaa

SEQ ID NO: 132345 - DNA, 33 bp, Homo sapien
actagaagctgtaatcaaagtagttttcagtgg

SEQ ID NO: 132346 - DNA, 33 bp, Homo sapien
actagaagctgtaatcgaagtagttttcagtgg

SEQ ID NO: 132347 - DNA, 33 bp, Homo sapien
tcaaatcctggctcatcataacaacaggttgtt

SEQ ID NO: 132348 - DNA, 33 bp, Homo sapien
tcaaatcctggctcatgataacaacaggttgtt

SEQ ID NO: 132349 - DNA, 33 bp, Homo sapien
acttaaatgctgatataaaaaggaaataaaatg

SEQ ID NO: 132350 - DNA, 33 bp, Homo sapien
acttaaatgctgatatgaaaaggaaataaaatg

SEQ ID NO: 132351 - DNA, 33 bp, Homo sapien
gtaatagcaccacaaacgctagctgttattaac

SEQ ID NO: 132352 - DNA, 33 bp, Homo sapien
gtaatagcaccacaaatgctagctgttattaac

SEQ ID NO: 132353 - DNA, 33 bp, Homo sapien
tctctcttgatgaagaaaggagctcagagggca

SEQ ID NO: 132354 - DNA, 33 bp, Homo sapien
tctctcttgatgaagacaggagctcagagggca

SEQ ID NO: 132355 - DNA, 33 bp, Homo sapien
cccctgaagtccttagaatgatgccacaagaag

SEQ ID NO: 132356 - DNA, 33 bp, Homo sapien
cccctgaagtccttaggatgatgccacaagaag

SEQ ID NO: 132357 - DNA, 33 bp, Homo sapien
aaacctacaaagctgacgaggcaatggccccct

SEQ ID NO: 132358 - DNA, 33 bp, Homo sapien
aaacctacaaagctgatgaggcaatggccccct

SEQ ID NO: 132359 - DNA, 33 bp, Homo sapien
ctgttgtaaatgtccacgccagttatgtacctc

SEQ ID NO: 132360 - DNA, 33 bp, Homo sapien
ctgttgtaaatgtccatgccagttatgtacctc

SEQ ID NO: 132361 - DNA, 33 bp, Homo sapien
acatttacaacagaagccttctccagcaggaag

SEQ ID NO: 132362 - DNA, 33 bp, Homo sapien
acatttacaacagaaggcttctccagcaggaag

SEQ ID NO: 132363 - DNA, 33 bp, Homo sapien
ccaatgtattatgacaactttatcaagataaca

SEQ ID NO: 132364 - DNA, 33 bp, Homo sapien
ccaatgtattatgacagctttatcaagataaca

SEQ ID NO: 132365 - DNA, 33 bp, Homo sapien
cctttcaaataggaggccctatccagcttcccc

SEQ ID NO: 132366 - DNA, 33 bp, Homo sapien
cctttcaaataggaggtcctatccagcttcccc

SEQ ID NO: 132367 - DNA, 33 bp, Homo sapien
cctggttctcctggtccctctgttgactaatga

SEQ ID NO: 132368 - DNA, 33 bp, Homo sapien
cctggttctcctggtctctctgttgactaatga

SEQ ID NO: 132369 - DNA, 33 bp, Homo sapien
gcaatttggggcttcaactctaaagaagatctt

SEQ ID NO: 132370 - DNA, 33 bp, Homo sapien
gcaatttggggcttcatctctaaagaagatctt

SEQ ID NO: 132371 - DNA, 33 bp, Homo sapien
gatcaatgattttctccaaagttggaatcaact

SEQ ID NO: 132372 - DNA, 33 bp, Homo sapien
gatcaatgattttctctaaagttggaatcaact

SEQ ID NO: 132373 - DNA, 33 bp, Homo sapien
ttctttcagccaaagacggattgcacacctact

SEQ ID NO: 132374 - DNA, 33 bp, Homo sapien
ttctttcagccaaagatggattgcacacctact

SEQ ID NO: 132375 - DNA, 33 bp, Homo sapien
tggcagacaggaggcacctgctgacatttcttc

SEQ ID NO: 132376 - DNA, 33 bp, Homo sapien
tggcagacaggaggcatctgctgacatttcttc

SEQ ID NO: 132377 - DNA, 33 bp, Homo sapien
caactgggcagagaggcccaaactgttctgggg

SEQ ID NO: 132378 - DNA, 33 bp, Homo sapien
caactgggcagagaggtccaaactgttctgggg

SEQ ID NO: 132379 - DNA, 33 bp, Homo sapien
ctaatacttaaggagcacctgctttgtgcctgg

SEQ ID NO: 132380 - DNA, 33 bp, Homo sapien
ctaatacttaaggagcgcctgctttgtgcctgg

SEQ ID NO: 132381 - DNA, 33 bp, Homo sapien
actgtggaggagaggaaggtgtctcatctcccc

SEQ ID NO: 132382 - DNA, 33 bp, Homo sapien
actgtggaggagaggagggtgtctcatctcccc

SEQ ID NO: 132383 - DNA, 33 bp, Homo sapien
tatgacttcttattccaaaattacacttatgaa

SEQ ID NO: 132384 - DNA, 33 bp, Homo sapien
tatgacttcttattccgaaattacacttatgaa

SEQ ID NO: 132385 - DNA, 33 bp, Homo sapien
tgcagccctgcagaaggccaactgatacttgac

SEQ ID NO: 132386 - DNA, 33 bp, Homo sapien
tgcagccctgcagaagtccaactgatacttgac

SEQ ID NO: 132387 - DNA, 33 bp, Homo sapien
aaatatctgaaattaccggtcaaagctagtaag

SEQ ID NO: 132388 - DNA, 33 bp, Homo sapien
aaatatctgaaattactggtcaaagctagtaag

SEQ ID NO: 132389 - DNA, 33 bp, Homo sapien
ctgtttaatcttcgctaacaatgacacaattcg

SEQ ID NO: 132390 - DNA, 33 bp, Homo sapien
ctgtttaatcttcgctgacaatgacacaattcg

SEQ ID NO: 132391 - DNA, 33 bp, Homo sapien
aggttcccaataatgacaggagatatttcagca

SEQ ID NO: 132392 - DNA, 33 bp, Homo sapien
aggttcccaataatgagaggagatatttcagca

SEQ ID NO: 132393 - DNA, 33 bp, Homo sapien
tgcagctgccattcaaaccctctttgagttgag

SEQ ID NO: 132394 - DNA, 33 bp, Homo sapien
tgcagctgccattcaagccctctttgagttgag

SEQ ID NO: 132395 - DNA, 33 bp, Homo sapien
ttgatttcccagatcactagctgcatggtcctg

SEQ ID NO: 132396 - DNA, 33 bp, Homo sapien
ttgatttcccagatcattagctgcatggtcctg

SEQ ID NO: 132397 - DNA, 33 bp, Homo sapien
gaaagaggatgatgggaccataaaagttccaat

SEQ ID NO: 132398 - DNA, 33 bp, Homo sapien
gaaagaggatgatggggccataaaagttccaat

SEQ ID NO: 132399 - DNA, 33 bp, Homo sapien
acttggggatgggaacaagtcattaggcccgtc

SEQ ID NO: 132400 - DNA, 33 bp, Homo sapien
acttggggatgggaaccagtcattaggcccgtc

SEQ ID NO: 132401 - DNA, 33 bp, Homo sapien
gccaatcttcaatggcaaaagactgttttcatg

SEQ ID NO: 132402 - DNA, 33 bp, Homo sapien
gccaatcttcaatggcgaaagactgttttcatg

SEQ ID NO: 132403 - DNA, 33 bp, Homo sapien
tttcatacaaaaatgacgtggaaactaacagga

SEQ ID NO: 132404 - DNA, 33 bp, Homo sapien
tttcatacaaaaatgatgtggaaactaacagga

SEQ ID NO: 132405 - DNA, 33 bp, Homo sapien
tgttcattcctttaaaatctctctgacatcgat

SEQ ID NO: 132406 - DNA, 33 bp, Homo sapien
tgttcattcctttaaagtctctctgacatcgat

SEQ ID NO: 132407 - DNA, 33 bp, Homo sapien
tccattttacaggaagacattggggagccctct

SEQ ID NO: 132408 - DNA, 33 bp, Homo sapien
tccattttacaggaaggcattggggagccctct

SEQ ID NO: 132409 - DNA, 33 bp, Homo sapien
acccaggcaagccagaaccttgttggtcaatca

SEQ ID NO: 132410 - DNA, 33 bp, Homo sapien
acccaggcaagccagagccttgttggtcaatca

SEQ ID NO: 132411 - DNA, 33 bp, Homo sapien
ggaggtaacgtggctccaaagtagtagagctga

SEQ ID NO: 132412 - DNA, 33 bp, Homo sapien
ggaggtaacgtggctcgaaagtagtagagctga

SEQ ID NO: 132413 - DNA, 33 bp, Homo sapien
ccgtcttgagcgattgcaggtgctggctacaaa

SEQ ID NO: 132414 - DNA, 33 bp, Homo sapien
ccgtcttgagcgattgtaggtgctggctacaaa

SEQ ID NO: 132415 - DNA, 33 bp, Homo sapien
agattgggaccgctaaactgtctaattccagaa

SEQ ID NO: 132416 - DNA, 33 bp, Homo sapien
agattgggaccgctaacctgtctaattccagaa

SEQ ID NO: 132417 - DNA, 33 bp, Homo sapien
tggatatggtttgagaagaaatgaggtagaaga

SEQ ID NO: 132418 - DNA, 33 bp, Homo sapien
tggatatggtttgagatgaaatgaggtagaaga

SEQ ID NO: 132419 - DNA, 33 bp, Homo sapien
tgtaggcgctaaagacaatatcttactgcttcc

SEQ ID NO: 132420 - DNA, 33 bp, Homo sapien
tgtaggcgctaaagacgatatcttactgcttcc

SEQ ID NO: 132421 - DNA, 33 bp, Homo sapien
agaaagagagtcctgacggcacattctagttac

SEQ ID NO: 132422 - DNA, 33 bp, Homo sapien
agaaagagagtcctgatggcacattctagttac

SEQ ID NO: 132423 - DNA, 33 bp, Homo sapien
attggcaagatttctagagagttggaagaagtg

SEQ ID NO: 132424 - DNA, 33 bp, Homo sapien
attggcaagatttctatagagttggaagaagtg

SEQ ID NO: 132425 - DNA, 33 bp, Homo sapien
aataagtaaatggtaacgacaataacaacaaca

SEQ ID NO: 132426 - DNA, 33 bp, Homo sapien
aataagtaaatggtaatgacaataacaacaaca

SEQ ID NO: 132427 - DNA, 33 bp, Homo sapien
tttctgtcgcttgcaacgaaaagagttctaata

SEQ ID NO: 132428 - DNA, 33 bp, Homo sapien
tttctgtcgcttgcaatgaaaagagttctaata

SEQ ID NO: 132429 - DNA, 33 bp, Homo sapien
tcagcacttacatcaccccctaattgttccatt

SEQ ID NO: 132430 - DNA, 33 bp, Homo sapien
tcagcacttacatcactccctaattgttccatt

SEQ ID NO: 132431 - DNA, 33 bp, Homo sapien
gaaactgatgctgagacgggttagacaccaggt

SEQ ID NO: 132432 - DNA, 33 bp, Homo sapien
gaaactgatgctgagatgggttagacaccaggt

SEQ ID NO: 132433 - DNA, 33 bp, Homo sapien
cttctctgttatgcacaccttaacctgccactg

SEQ ID NO: 132434 - DNA, 33 bp, Homo sapien
cttctctgttatgcacgccttaacctgccactg

SEQ ID NO: 132435 - DNA, 33 bp, Homo sapien
aaagcttaacctaatggcagatcctcaataagt

SEQ ID NO: 132436 - DNA, 33 bp, Homo sapien
aaagcttaacctaatgtcagatcctcaataagt

SEQ ID NO: 132437 - DNA, 33 bp, Homo sapien
ccatcagagaaatcacagagcagataaataggc

SEQ ID NO: 132438 - DNA, 33 bp, Homo sapien
ccatcagagaaatcactgagcagataaataggc

SEQ ID NO: 132439 - DNA, 33 bp, Homo sapien
ccctcacaggcattaactccttgactcttccag

SEQ ID NO: 132440 - DNA, 33 bp, Homo sapien
ccctcacaggcattaattccttgactcttccag

SEQ ID NO: 132441 - DNA, 33 bp, Homo sapien
tgaaaaaaattgtacaacacgcctggaataaga

SEQ ID NO: 132442 - DNA, 33 bp, Homo sapien
tgaaaaaaattgtacatcacgcctggaataaga

SEQ ID NO: 132443 - DNA, 33 bp, Homo sapien
tgctgcctgccttaacacatttccaaaggtaac

SEQ ID NO: 132444 - DNA, 33 bp, Homo sapien
tgctgcctgccttaactcatttccaaaggtaac

SEQ ID NO: 132445 - DNA, 33 bp, Homo sapien
accttttggtgtaggaaaacccaagcagacagt

SEQ ID NO: 132446 - DNA, 33 bp, Homo sapien
accttttggtgtaggacaacccaagcagacagt

SEQ ID NO: 132447 - DNA, 33 bp, Homo sapien
gttagaggaacatcccaaatacattaaaacact

SEQ ID NO: 132448 - DNA, 33 bp, Homo sapien
gttagaggaacatcccgaatacattaaaacact

SEQ ID NO: 132449 - DNA, 33 bp, Homo sapien
ggtgtttaatgtttcaataatgaagatgatggt

SEQ ID NO: 132450 - DNA, 33 bp, Homo sapien
ggtgtttaatgtttcagtaatgaagatgatggt

SEQ ID NO: 132451 - DNA, 33 bp, Homo sapien
tttcctagccagtagaatatgatatgctcaaaa

SEQ ID NO: 132452 - DNA, 33 bp, Homo sapien
tttcctagccagtagagtatgatatgctcaaaa

SEQ ID NO: 132453 - DNA, 33 bp, Homo sapien
agggatattctacccaagagtcatttatttcga

SEQ ID NO: 132454 - DNA, 33 bp, Homo sapien
agggatattctacccaggagtcatttatttcga

SEQ ID NO: 132455 - DNA, 33 bp, Homo sapien
aggagctcagaaagcagcaaagtatattaggca

SEQ ID NO: 132456 - DNA, 33 bp, Homo sapien
aggagctcagaaagcatcaaagtatattaggca

SEQ ID NO: 132457 - DNA, 33 bp, Homo sapien
agggcttctgtttgtacagtgaatataaatata

SEQ ID NO: 132458 - DNA, 33 bp, Homo sapien
agggcttctgtttgtatagtgaatataaatata

SEQ ID NO: 132459 - DNA, 33 bp, Homo sapien
aagactacagtgggaggattggaagaagttgtt

SEQ ID NO: 132460 - DNA, 33 bp, Homo sapien
aagactacagtgggagtattggaagaagttgtt

SEQ ID NO: 132461 - DNA, 33 bp, Homo sapien
aaactaataaaatacaacctacattttcagagg

SEQ ID NO: 132462 - DNA, 33 bp, Homo sapien
aaactaataaaatacagcctacattttcagagg

SEQ ID NO: 132463 - DNA, 33 bp, Homo sapien
gatttcagataaacagcatttaaagtaactggg

SEQ ID NO: 132464 - DNA, 33 bp, Homo sapien
gatttcagataaacaggatttaaagtaactggg

SEQ ID NO: 132465 - DNA, 33 bp, Homo sapien
tttcctgcagtagataacatagggaagggtcag

SEQ ID NO: 132466 - DNA, 33 bp, Homo sapien
tttcctgcagtagataccatagggaagggtcag

SEQ ID NO: 132467 - DNA, 33 bp, Homo sapien
tgaccagttctggtgacccagttataagaggac

SEQ ID NO: 132468 - DNA, 33 bp, Homo sapien
tgaccagttctggtgatccagttataagaggac

SEQ ID NO: 132469 - DNA, 33 bp, Homo sapien
gtcttcttaatctgcaccttcatttactgagtc

SEQ ID NO: 132470 - DNA, 33 bp, Homo sapien
gtcttcttaatctgcatcttcatttactgagtc

SEQ ID NO: 132471 - DNA, 33 bp, Homo sapien
agctgtgagtaacttaaggacaggaacactcat

SEQ ID NO: 132472 - DNA, 33 bp, Homo sapien
agctgtgagtaacttagggacaggaacactcat

SEQ ID NO: 132473 - DNA, 33 bp, Homo sapien
tttagcccaagataaaagcttttaaacagcagc

SEQ ID NO: 132474 - DNA, 33 bp, Homo sapien
tttagcccaagataaaggcttttaaacagcagc

SEQ ID NO: 132475 - DNA, 33 bp, Homo sapien
gagaacactatcagtgaaagctatggagaggga

SEQ ID NO: 132476 - DNA, 33 bp, Homo sapien
gagaacactatcagtgcaagctatggagaggga

SEQ ID NO: 132477 - DNA, 33 bp, Homo sapien
catgacattttatatcaatccagccgaggcact

SEQ ID NO: 132478 - DNA, 33 bp, Homo sapien
catgacattttatatcgatccagccgaggcact

SEQ ID NO: 132479 - DNA, 33 bp, Homo sapien
atagacacgatattccaaactaagaaatgcata

SEQ ID NO: 132480 - DNA, 33 bp, Homo sapien
atagacacgatattccgaactaagaaatgcata

SEQ ID NO: 132481 - DNA, 33 bp, Homo sapien
attcgggtctttagtgcattcattctcctcttg

SEQ ID NO: 132482 - DNA, 33 bp, Homo sapien
attcgggtctttagtgtattcattctcctcttg

SEQ ID NO: 132483 - DNA, 33 bp, Homo sapien
gctgatggagagctcaaagagttcagcaggggt

SEQ ID NO: 132484 - DNA, 33 bp, Homo sapien
gctgatggagagctcagagagttcagcaggggt

SEQ ID NO: 132485 - DNA, 33 bp, Homo sapien
ttaaaatgccactgtaataatgtcattgtttgc

SEQ ID NO: 132486 - DNA, 33 bp, Homo sapien
ttaaaatgccactgtagtaatgtcattgtttgc

SEQ ID NO: 132487 - DNA, 33 bp, Homo sapien
acctgtggagaatgaaagctatccacctgggtg

SEQ ID NO: 132488 - DNA, 33 bp, Homo sapien
acctgtggagaatgaaggctatccacctgggtg

SEQ ID NO: 132489 - DNA, 33 bp, Homo sapien
ttgtcacagactcccaagtgtatttgtctattt

SEQ ID NO: 132490 - DNA, 33 bp, Homo sapien
ttgtcacagactcccaggtgtatttgtctattt

SEQ ID NO: 132491 - DNA, 33 bp, Homo sapien
aacagcccacaacacccccgtgggcacagcatc

SEQ ID NO: 132492 - DNA, 33 bp, Homo sapien
aacagcccacaacacctccgtgggcacagcatc

SEQ ID NO: 132493 - DNA, 33 bp, Homo sapien
tgcttggagccagggacatttagctgctggtgt

SEQ ID NO: 132494 - DNA, 33 bp, Homo sapien
tgcttggagccagggatatttagctgctggtgt

SEQ ID NO: 132495 - DNA, 33 bp, Homo sapien
tttgcagataaggagccgacacatacagggaaa

SEQ ID NO: 132496 - DNA, 33 bp, Homo sapien
tttgcagataaggagctgacacatacagggaaa

SEQ ID NO: 132497 - DNA, 33 bp, Homo sapien
cccacagtacccagcacgccttcttccagccca

SEQ ID NO: 132498 - DNA, 33 bp, Homo sapien
cccacagtacccagcatgccttcttccagccca

SEQ ID NO: 132499 - DNA, 33 bp, Homo sapien
agcagggacaggtgcacgagtatctgagaccac

SEQ ID NO: 132500 - DNA, 33 bp, Homo sapien
agcagggacaggtgcatgagtatctgagaccac

SEQ ID NO: 132501 - DNA, 33 bp, Homo sapien
agatgtatataagtcaagggcttcctgcttgca

SEQ ID NO: 132502 - DNA, 33 bp, Homo sapien
agatgtatataagtcaggggcttcctgcttgca

SEQ ID NO: 132503 - DNA, 33 bp, Homo sapien
gaataggaaagaaatacgggcaggagggaaaag

SEQ ID NO: 132504 - DNA, 33 bp, Homo sapien
gaataggaaagaaatatgggcaggagggaaaag

SEQ ID NO: 132505 - DNA, 33 bp, Homo sapien
ttcctgtttaatgtcaccattttgcaaataagg

SEQ ID NO: 132506 - DNA, 33 bp, Homo sapien
ttcctgtttaatgtcatcattttgcaaataagg

SEQ ID NO: 132507 - DNA, 33 bp, Homo sapien
gacagccaggttctcagtcactcatgcacttgt

SEQ ID NO: 132508 - DNA, 33 bp, Homo sapien
gacagccaggttctcattcactcatgcacttgt

SEQ ID NO: 132509 - DNA, 33 bp, Homo sapien
aagaggtgtccagagccgaagagcaggaagact

SEQ ID NO: 132510 - DNA, 33 bp, Homo sapien
aagaggtgtccagagctgaagagcaggaagact

SEQ ID NO: 132511 - DNA, 33 bp, Homo sapien
aagctgtaaagctccgcaactccatcttaattc

SEQ ID NO: 132512 - DNA, 33 bp, Homo sapien
aagctgtaaagctccgtaactccatcttaattc

SEQ ID NO: 132513 - DNA, 33 bp, Homo sapien
aatgctgccttagaaccggtaatacaaatgatc

SEQ ID NO: 132514 - DNA, 33 bp, Homo sapien
aatgctgccttagaactggtaatacaaatgatc

SEQ ID NO: 132515 - DNA, 33 bp, Homo sapien
cttaatattcacatcacaatccgcacatatgga

SEQ ID NO: 132516 - DNA, 33 bp, Homo sapien
cttaatattcacatcataatccgcacatatgga

SEQ ID NO: 132517 - DNA, 33 bp, Homo sapien
gccaccacagtactaaataacatgatgcagcag

SEQ ID NO: 132518 - DNA, 33 bp, Homo sapien
gccaccacagtactaagtaacatgatgcagcag

SEQ ID NO: 132519 - DNA, 33 bp, Homo sapien
tcttaaagtaagaacacagacattgtgtgagac

SEQ ID NO: 132520 - DNA, 33 bp, Homo sapien
tcttaaagtaagaacatagacattgtgtgagac

SEQ ID NO: 132521 - DNA, 33 bp, Homo sapien
atgccaccttgttgtaagtgctaggctgcaaag

SEQ ID NO: 132522 - DNA, 33 bp, Homo sapien
atgccaccttgttgtacgtgctaggctgcaaag

SEQ ID NO: 132523 - DNA, 33 bp, Homo sapien
tctgcataacaatcacagagaagctctttttaa

SEQ ID NO: 132524 - DNA, 33 bp, Homo sapien
tctgcataacaatcacggagaagctctttttaa

SEQ ID NO: 132525 - DNA, 33 bp, Homo sapien
aagccactatccataaccctattgtgtcacctg

SEQ ID NO: 132526 - DNA, 33 bp, Homo sapien
aagccactatccataatcctattgtgtcacctg

SEQ ID NO: 132527 - DNA, 33 bp, Homo sapien
tggactcagaactgtaacaccattgtttctgtc

SEQ ID NO: 132528 - DNA, 33 bp, Homo sapien
tggactcagaactgtagcaccattgtttctgtc

SEQ ID NO: 132529 - DNA, 33 bp, Homo sapien
aacatggttacatcagaagaacatcaaataaag

SEQ ID NO: 132530 - DNA, 33 bp, Homo sapien
aacatggttacatcaggagaacatcaaataaag

SEQ ID NO: 132531 - DNA, 33 bp, Homo sapien
caatcaaccaccaccacgataattactctaagt

SEQ ID NO: 132532 - DNA, 33 bp, Homo sapien
caatcaaccaccaccaggataattactctaagt

SEQ ID NO: 132533 - DNA, 33 bp, Homo sapien
ccactgctgtaaataacagtgaagtgaataccc

SEQ ID NO: 132534 - DNA, 33 bp, Homo sapien
ccactgctgtaaataatagtgaagtgaataccc

SEQ ID NO: 132535 - DNA, 33 bp, Homo sapien
cgcactgacagcctccacgatgggaagatcaca

SEQ ID NO: 132536 - DNA, 33 bp, Homo sapien
cgcactgacagcctccgcgatgggaagatcaca

SEQ ID NO: 132537 - DNA, 33 bp, Homo sapien
ttcaatttcagattgcactagtcaccgtcatgg

SEQ ID NO: 132538 - DNA, 33 bp, Homo sapien
ttcaatttcagattgcgctagtcaccgtcatgg

SEQ ID NO: 132539 - DNA, 33 bp, Homo sapien
ttctctgaaccccagactcatttatccagctca

SEQ ID NO: 132540 - DNA, 33 bp, Homo sapien
ttctctgaaccccagattcatttatccagctca

SEQ ID NO: 132541 - DNA, 33 bp, Homo sapien
ctgatggccccagaatcagaatgggactcaaac

SEQ ID NO: 132542 - DNA, 33 bp, Homo sapien
ctgatggccccagaatgagaatgggactcaaac

SEQ ID NO: 132543 - DNA, 33 bp, Homo sapien
agcccagtggccagaacatcatagtcatttaat

SEQ ID NO: 132544 - DNA, 33 bp, Homo sapien
agcccagtggccagaatatcatagtcatttaat

SEQ ID NO: 132545 - DNA, 33 bp, Homo sapien
tgctaccagttacaggcatgcattaaattaata

SEQ ID NO: 132546 - DNA, 33 bp, Homo sapien
tgctaccagttacagggatgcattaaattaata

SEQ ID NO: 132547 - DNA, 33 bp, Homo sapien
gaaagagggagcagtcacagtatctattaaata

SEQ ID NO: 132548 - DNA, 33 bp, Homo sapien
gaaagagggagcagtcgcagtatctattaaata

SEQ ID NO: 132549 - DNA, 33 bp, Homo sapien
gggagtttatcattcaatccacttcactaagtc

SEQ ID NO: 132550 - DNA, 33 bp, Homo sapien
gggagtttatcattcagtccacttcactaagtc

SEQ ID NO: 132551 - DNA, 33 bp, Homo sapien
ccaacgtaccaaccacacttttcctgagagcct

SEQ ID NO: 132552 - DNA, 33 bp, Homo sapien
ccaacgtaccaaccacgcttttcctgagagcct

SEQ ID NO: 132553 - DNA, 33 bp, Homo sapien
tcatggacctgataaaaccccagcttaggagcc

SEQ ID NO: 132554 - DNA, 33 bp, Homo sapien
tcatggacctgataaagccccagcttaggagcc

SEQ ID NO: 132555 - DNA, 33 bp, Homo sapien
ggaagggaaatcatacagctctaggctctaact

SEQ ID NO: 132556 - DNA, 33 bp, Homo sapien
ggaagggaaatcatacggctctaggctctaact

SEQ ID NO: 132557 - DNA, 33 bp, Homo sapien
ttgtgacattctttccagaataccttggtgctc

SEQ ID NO: 132558 - DNA, 33 bp, Homo sapien
ttgtgacattctttccggaataccttggtgctc

SEQ ID NO: 132559 - DNA, 33 bp, Homo sapien
ttcacaggctaggaacaaatcaccagtatggtg

SEQ ID NO: 132560 - DNA, 33 bp, Homo sapien
ttcacaggctaggaacgaatcaccagtatggtg

SEQ ID NO: 132561 - DNA, 33 bp, Homo sapien
tagggcagtggtcttaaaagggaatttgccaga

SEQ ID NO: 132562 - DNA, 33 bp, Homo sapien
tagggcagtggtcttacaagggaatttgccaga

SEQ ID NO: 132563 - DNA, 33 bp, Homo sapien
gctaaaacaaagaagaataaagtgagagtaatc

SEQ ID NO: 132564 - DNA, 33 bp, Homo sapien
gctaaaacaaagaagagtaaagtgagagtaatc

SEQ ID NO: 132565 - DNA, 33 bp, Homo sapien
atatatatgcctctaaatgatgatatatatata

SEQ ID NO: 132566 - DNA, 33 bp, Homo sapien
atatatatgcctctaattgatgatatatatata

SEQ ID NO: 132567 - DNA, 33 bp, Homo sapien
cacctgggtcttccaccgaggggactgtagatt

SEQ ID NO: 132568 - DNA, 33 bp, Homo sapien
cacctgggtcttccactgaggggactgtagatt

SEQ ID NO: 132569 - DNA, 33 bp, Homo sapien
gtagttattaagggaactgaactgagggggagt

SEQ ID NO: 132570 - DNA, 33 bp, Homo sapien
gtagttattaagggaattgaactgagggggagt

SEQ ID NO: 132571 - DNA, 33 bp, Homo sapien
tcaaggagacttaaacagatcctgctcctctgt

SEQ ID NO: 132572 - DNA, 33 bp, Homo sapien
tcaaggagacttaaacggatcctgctcctctgt

SEQ ID NO: 132573 - DNA, 33 bp, Homo sapien
cagctgctagacccagacaggctttcaacagac

SEQ ID NO: 132574 - DNA, 33 bp, Homo sapien
cagctgctagacccaggcaggctttcaacagac

SEQ ID NO: 132575 - DNA, 33 bp, Homo sapien
acagggtaccaacaaccaagtgtccatatgaag

SEQ ID NO: 132576 - DNA, 33 bp, Homo sapien
acagggtaccaacaactaagtgtccatatgaag

SEQ ID NO: 132577 - DNA, 33 bp, Homo sapien
tgtgctgtgatgggcaatatcagccagtggagt

SEQ ID NO: 132578 - DNA, 33 bp, Homo sapien
tgtgctgtgatgggcagtatcagccagtggagt

SEQ ID NO: 132579 - DNA, 33 bp, Homo sapien
gacaaagattaaggcacgggagatgaggtttat

SEQ ID NO: 132580 - DNA, 33 bp, Homo sapien
gacaaagattaaggcatgggagatgaggtttat

SEQ ID NO: 132581 - DNA, 33 bp, Homo sapien
atttacacattgtgaaacttttcagcctctaaa

SEQ ID NO: 132582 - DNA, 33 bp, Homo sapien
atttacacattgtgaatcttttcagcctctaaa

SEQ ID NO: 132583 - DNA, 33 bp, Homo sapien
ctagaactcacaccaccgacactcttggtttgg

SEQ ID NO: 132584 - DNA, 33 bp, Homo sapien
ctagaactcacaccactgacactcttggtttgg

SEQ ID NO: 132585 - DNA, 33 bp, Homo sapien
cgcatcctgatattccaacagagtcctgacttc

SEQ ID NO: 132586 - DNA, 33 bp, Homo sapien
cgcatcctgatattcctacagagtcctgacttc

SEQ ID NO: 132587 - DNA, 33 bp, Homo sapien
taaaagatgttcaagaaaatggttgacaaccta

SEQ ID NO: 132588 - DNA, 33 bp, Homo sapien
taaaagatgttcaagagaatggttgacaaccta

SEQ ID NO: 132589 - DNA, 33 bp, Homo sapien
agggctggtcaccttaagtcctttgacctccac

SEQ ID NO: 132590 - DNA, 33 bp, Homo sapien
agggctggtcaccttacgtcctttgacctccac

SEQ ID NO: 132591 - DNA, 33 bp, Homo sapien
aacagatatagttcaaatactcacctcttggat

SEQ ID NO: 132592 - DNA, 33 bp, Homo sapien
aacagatatagttcaagtactcacctcttggat

SEQ ID NO: 132593 - DNA, 33 bp, Homo sapien
aactgattggaacacagctgtactgtaggcaag

SEQ ID NO: 132594 - DNA, 33 bp, Homo sapien
aactgattggaacacatctgtactgtaggcaag

SEQ ID NO: 132595 - DNA, 33 bp, Homo sapien
tgtctgatactcctgactaagtatttttgagaa

SEQ ID NO: 132596 - DNA, 33 bp, Homo sapien
tgtctgatactcctgattaagtatttttgagaa

SEQ ID NO: 132597 - DNA, 33 bp, Homo sapien
atgtctgggtttccaccgagattcctttcttta

SEQ ID NO: 132598 - DNA, 33 bp, Homo sapien
atgtctgggtttccactgagattcctttcttta

SEQ ID NO: 132599 - DNA, 33 bp, Homo sapien
tgcagagtatggtttacagtcatgtacacacac

SEQ ID NO: 132600 - DNA, 33 bp, Homo sapien
tgcagagtatggtttatagtcatgtacacacac

SEQ ID NO: 132601 - DNA, 33 bp, Homo sapien
atgaatggatttccagcaaggatgatctggtca

SEQ ID NO: 132602 - DNA, 33 bp, Homo sapien
atgaatggatttccaggaaggatgatctggtca

SEQ ID NO: 132603 - DNA, 33 bp, Homo sapien
aatgggacttcaaaaccgtgtgtttgtcactct

SEQ ID NO: 132604 - DNA, 33 bp, Homo sapien
aatgggacttcaaaactgtgtgtttgtcactct

SEQ ID NO: 132605 - DNA, 33 bp, Homo sapien
ctgcagtccacaattaccattttttatcctgaa

SEQ ID NO: 132606 - DNA, 33 bp, Homo sapien
ctgcagtccacaattatcattttttatcctgaa

SEQ ID NO: 132607 - DNA, 33 bp, Homo sapien
actataagtcgatatccgagaagcacaaaaact

SEQ ID NO: 132608 - DNA, 33 bp, Homo sapien
actataagtcgatatctgagaagcacaaaaact

SEQ ID NO: 132609 - DNA, 33 bp, Homo sapien
actttgtttctctgtaaatttcccaaccatatg

SEQ ID NO: 132610 - DNA, 33 bp, Homo sapien
actttgtttctctgtatatttcccaaccatatg

SEQ ID NO: 132611 - DNA, 33 bp, Homo sapien
catgcccagctgattcactgtagctttagtggc

SEQ ID NO: 132612 - DNA, 33 bp, Homo sapien
catgcccagctgattcgctgtagctttagtggc

SEQ ID NO: 132613 - DNA, 33 bp, Homo sapien
caatatgtaagtaaatcagtacagttgcgtgcc

SEQ ID NO: 132614 - DNA, 33 bp, Homo sapien
caatatgtaagtaaatgagtacagttgcgtgcc

SEQ ID NO: 132615 - DNA, 33 bp, Homo sapien
gaccaggggacagtaaactttttctgtacaggg

SEQ ID NO: 132616 - DNA, 33 bp, Homo sapien
gaccaggggacagtaagctttttctgtacaggg

SEQ ID NO: 132617 - DNA, 33 bp, Homo sapien
aaggctgtggtaaccaatctactgagccagccc

SEQ ID NO: 132618 - DNA, 33 bp, Homo sapien
aaggctgtggtaaccagtctactgagccagccc

SEQ ID NO: 132619 - DNA, 33 bp, Homo sapien
gataaaatgtgcagccacccaatgaaggaacat

SEQ ID NO: 132620 - DNA, 33 bp, Homo sapien
gataaaatgtgcagccgcccaatgaaggaacat

SEQ ID NO: 132621 - DNA, 33 bp, Homo sapien
acttggcaaattttccgccaaccctcaacatct

SEQ ID NO: 132622 - DNA, 33 bp, Homo sapien
acttggcaaattttcctccaaccctcaacatct

SEQ ID NO: 132623 - DNA, 33 bp, Homo sapien
gttaactacctgtatgacactgagaagtcattt

SEQ ID NO: 132624 - DNA, 33 bp, Homo sapien
gttaactacctgtatggcactgagaagtcattt

SEQ ID NO: 132625 - DNA, 33 bp, Homo sapien
ctcattgtctgccataactgcagccttcaataa

SEQ ID NO: 132626 - DNA, 33 bp, Homo sapien
ctcattgtctgccatacctgcagccttcaataa

SEQ ID NO: 132627 - DNA, 33 bp, Homo sapien
gagaagtcaagtaatacgttcaaggtcacacag

SEQ ID NO: 132628 - DNA, 33 bp, Homo sapien
gagaagtcaagtaatatgttcaaggtcacacag

SEQ ID NO: 132629 - DNA, 33 bp, Homo sapien
ccctgcctgctacagaacacacaggcagatggg

SEQ ID NO: 132630 - DNA, 33 bp, Homo sapien
ccctgcctgctacagagcacacaggcagatggg

SEQ ID NO: 132631 - DNA, 33 bp, Homo sapien
attccagtttttgcacactggctttgtctggga

SEQ ID NO: 132632 - DNA, 33 bp, Homo sapien
attccagtttttgcacgctggctttgtctggga

SEQ ID NO: 132633 - DNA, 33 bp, Homo sapien
gaagaaaacgataaacaatcagaatgggacatt

SEQ ID NO: 132634 - DNA, 33 bp, Homo sapien
gaagaaaacgataaacgatcagaatgggacatt

SEQ ID NO: 132635 - DNA, 33 bp, Homo sapien
ttctatcagctaaggaaatgggtactagtatca

SEQ ID NO: 132636 - DNA, 33 bp, Homo sapien
ttctatcagctaaggagatgggtactagtatca

SEQ ID NO: 132637 - DNA, 33 bp, Homo sapien
tcaaagcgccctaatgccagggtcttctgtagc

SEQ ID NO: 132638 - DNA, 33 bp, Homo sapien
tcaaagcgccctaatgtcagggtcttctgtagc

SEQ ID NO: 132639 - DNA, 33 bp, Homo sapien
ggtcaaaggactgctccgagaattaatcatacg

SEQ ID NO: 132640 - DNA, 33 bp, Homo sapien
ggtcaaaggactgctctgagaattaatcatacg

SEQ ID NO: 132641 - DNA, 33 bp, Homo sapien
ataacctaggtcatcaacttcctagtgaggtaa

SEQ ID NO: 132642 - DNA, 33 bp, Homo sapien
ataacctaggtcatcagcttcctagtgaggtaa

SEQ ID NO: 132643 - DNA, 33 bp, Homo sapien
agtgggtcagagcctgaaatcctgagtcaatca

SEQ ID NO: 132644 - DNA, 33 bp, Homo sapien
agtgggtcagagcctgcaatcctgagtcaatca

SEQ ID NO: 132645 - DNA, 33 bp, Homo sapien
cttaaatccagccttcaccctgtttcccaaggg

SEQ ID NO: 132646 - DNA, 33 bp, Homo sapien
cttaaatccagccttcgccctgtttcccaaggg

SEQ ID NO: 132647 - DNA, 33 bp, Homo sapien
cttgctccatttcagacatacagttctataacc

SEQ ID NO: 132648 - DNA, 33 bp, Homo sapien
cttgctccatttcagatatacagttctataacc

SEQ ID NO: 132649 - DNA, 33 bp, Homo sapien
aacccacaaaatgtccaatcaaagcaggtgtac

SEQ ID NO: 132650 - DNA, 33 bp, Homo sapien
aacccacaaaatgtccgatcaaagcaggtgtac

SEQ ID NO: 132651 - DNA, 33 bp, Homo sapien
agcaggatgcaataaagaagctggtcaaaacct

SEQ ID NO: 132652 - DNA, 33 bp, Homo sapien
agcaggatgcaataaataagctggtcaaaacct

SEQ ID NO: 132653 - DNA, 33 bp, Homo sapien
cactttagaaaaccggcagtgtctcctaaagct

SEQ ID NO: 132654 - DNA, 33 bp, Homo sapien
cactttagaaaaccggtagtgtctcctaaagct

SEQ ID NO: 132655 - DNA, 33 bp, Homo sapien
caatctggaaccaactaacatatttgtcaacag

SEQ ID NO: 132656 - DNA, 33 bp, Homo sapien
caatctggaaccaactcacatatttgtcaacag

SEQ ID NO: 132657 - DNA, 33 bp, Homo sapien
atttccagaactcaaccaaaataacaccattaa

SEQ ID NO: 132658 - DNA, 33 bp, Homo sapien
atttccagaactcaacgaaaataacaccattaa

SEQ ID NO: 132659 - DNA, 33 bp, Homo sapien
ctctttgtaaacaataaaacccatctcctgctt

SEQ ID NO: 132660 - DNA, 33 bp, Homo sapien
ctctttgtaaacaatacaacccatctcctgctt

SEQ ID NO: 132661 - DNA, 33 bp, Homo sapien
agcattttatggatacaaggccctggaaagata

SEQ ID NO: 132662 - DNA, 33 bp, Homo sapien
agcattttatggataccaggccctggaaagata

SEQ ID NO: 132663 - DNA, 33 bp, Homo sapien
ttcaaagtgtgtagtactaagaaaagaagttaa

SEQ ID NO: 132664 - DNA, 33 bp, Homo sapien
ttcaaagtgtgtagtattaagaaaagaagttaa

SEQ ID NO: 132665 - DNA, 33 bp, Homo sapien
ccactggtgtaggagacggacactagatttgga

SEQ ID NO: 132666 - DNA, 33 bp, Homo sapien
ccactggtgtaggagatggacactagatttgga

SEQ ID NO: 132667 - DNA, 33 bp, Homo sapien
tacagagcaataaatgacacaaaagcatattag

SEQ ID NO: 132668 - DNA, 33 bp, Homo sapien
tacagagcaataaatggcacaaaagcatattag

SEQ ID NO: 132669 - DNA, 33 bp, Homo sapien
agttcaaggttgtcctaaaaagtttcagttgaa

SEQ ID NO: 132670 - DNA, 33 bp, Homo sapien
agttcaaggttgtcctgaaaagtttcagttgaa

SEQ ID NO: 132671 - DNA, 33 bp, Homo sapien
taaggtctacaaagtactacagagggctgagga

SEQ ID NO: 132672 - DNA, 33 bp, Homo sapien
taaggtctacaaagtagtacagagggctgagga

SEQ ID NO: 132673 - DNA, 33 bp, Homo sapien
aatgttcatgtgatacaatacttactgggcaat

SEQ ID NO: 132674 - DNA, 33 bp, Homo sapien
aatgttcatgtgatacgatacttactgggcaat

SEQ ID NO: 132675 - DNA, 33 bp, Homo sapien
aaatagaataggcaaccgaataaagtgacatat

SEQ ID NO: 132676 - DNA, 33 bp, Homo sapien
aaatagaataggcaactgaataaagtgacatat

SEQ ID NO: 132677 - DNA, 33 bp, Homo sapien
tggtgaggagtgaatcaatgtttccattattgt

SEQ ID NO: 132678 - DNA, 33 bp, Homo sapien
tggtgaggagtgaatcgatgtttccattattgt

SEQ ID NO: 132679 - DNA, 33 bp, Homo sapien
tgtagtgatgactgcacgggtgtattcatatca

SEQ ID NO: 132680 - DNA, 33 bp, Homo sapien
tgtagtgatgactgcatgggtgtattcatatca

SEQ ID NO: 132681 - DNA, 33 bp, Homo sapien
ggctgaactgttggcacaaacattttcaaagcc

SEQ ID NO: 132682 - DNA, 33 bp, Homo sapien
ggctgaactgttggcataaacattttcaaagcc

SEQ ID NO: 132683 - DNA, 33 bp, Homo sapien
gtcttcagacaggctaggcttcttgtgggcact

SEQ ID NO: 132684 - DNA, 33 bp, Homo sapien
gtcttcagacaggctatgcttcttgtgggcact

SEQ ID NO: 132685 - DNA, 33 bp, Homo sapien
tttcaacttaatagcaatcctgtggtattcata

SEQ ID NO: 132686 - DNA, 33 bp, Homo sapien
tttcaacttaatagcattcctgtggtattcata

SEQ ID NO: 132687 - DNA, 33 bp, Homo sapien
aggaagaggttgttacaataatccatgtgagag

SEQ ID NO: 132688 - DNA, 33 bp, Homo sapien
aggaagaggttgttacgataatccatgtgagag

SEQ ID NO: 132689 - DNA, 33 bp, Homo sapien
tgcaatcagaatcatgccaggccagcaatttct

SEQ ID NO: 132690 - DNA, 33 bp, Homo sapien
tgcaatcagaatcatggcaggccagcaatttct

SEQ ID NO: 132691 - DNA, 33 bp, Homo sapien
gattcagcttgagtaactctgggaagctttttt

SEQ ID NO: 132692 - DNA, 33 bp, Homo sapien
gattcagcttgagtaattctgggaagctttttt

SEQ ID NO: 132693 - DNA, 33 bp, Homo sapien
acaatgcaaatagacaaaaagcatatcactgtt

SEQ ID NO: 132694 - DNA, 33 bp, Homo sapien
acaatgcaaatagacagaaagcatatcactgtt

SEQ ID NO: 132695 - DNA, 33 bp, Homo sapien
acagggaatataaaaaatgatctcagtgagttc

SEQ ID NO: 132696 - DNA, 33 bp, Homo sapien
acagggaatataaaaagtgatctcagtgagttc

SEQ ID NO: 132697 - DNA, 33 bp, Homo sapien
atatagttgctccttcaaattctcccttgacta

SEQ ID NO: 132698 - DNA, 33 bp, Homo sapien
atatagttgctccttccaattctcccttgacta

SEQ ID NO: 132699 - DNA, 33 bp, Homo sapien
tatactgcaatgttcagagtgtgtgtcttaggc

SEQ ID NO: 132700 - DNA, 33 bp, Homo sapien
tatactgcaatgttcatagtgtgtgtcttaggc

SEQ ID NO: 132701 - DNA, 33 bp, Homo sapien
cgcttgaattctaaaacagcaaagaaaagatat

SEQ ID NO: 132702 - DNA, 33 bp, Homo sapien
cgcttgaattctaaaagagcaaagaaaagatat

SEQ ID NO: 132703 - DNA, 33 bp, Homo sapien
gcacaaggcaaaaagtaaaccctaatgcaaact

SEQ ID NO: 132704 - DNA, 33 bp, Homo sapien
gcacaaggcaaaaagtgaaccctaatgcaaact

SEQ ID NO: 132705 - DNA, 33 bp, Homo sapien
aaaccagtaaggacacccacaaaagcacagtag

SEQ ID NO: 132706 - DNA, 33 bp, Homo sapien
aaaccagtaaggacactcacaaaagcacagtag

SEQ ID NO: 132707 - DNA, 33 bp, Homo sapien
caaggttaagtatctacgtgtctctggtcacaa

SEQ ID NO: 132708 - DNA, 33 bp, Homo sapien
caaggttaagtatctatgtgtctctggtcacaa

SEQ ID NO: 132709 - DNA, 33 bp, Homo sapien
tagagagttcatggcacgtttgagaaactaaat

SEQ ID NO: 132710 - DNA, 33 bp, Homo sapien
tagagagttcatggcatgtttgagaaactaaat

SEQ ID NO: 132711 - DNA, 33 bp, Homo sapien
aatcaagatgttggcaagtgggggctatgctcc

SEQ ID NO: 132712 - DNA, 33 bp, Homo sapien
aatcaagatgttggcaggtgggggctatgctcc

SEQ ID NO: 132713 - DNA, 33 bp, Homo sapien
atgtcccagaaattatcacagttagtgttgaat

SEQ ID NO: 132714 - DNA, 33 bp, Homo sapien
atgtcccagaaattattacagttagtgttgaat

SEQ ID NO: 132715 - DNA, 33 bp, Homo sapien
ccctataagtgactaactaggagtattgggtat

SEQ ID NO: 132716 - DNA, 33 bp, Homo sapien
ccctataagtgactaagtaggagtattgggtat

SEQ ID NO: 132717 - DNA, 33 bp, Homo sapien
acttactttttgaatgaagagtctgaccccttt

SEQ ID NO: 132718 - DNA, 33 bp, Homo sapien
acttactttttgaatgtagagtctgaccccttt

SEQ ID NO: 132719 - DNA, 33 bp, Homo sapien
ttgtactcattccgtaactcttataaatatctt

SEQ ID NO: 132720 - DNA, 33 bp, Homo sapien
ttgtactcattccgtatctcttataaatatctt

SEQ ID NO: 132721 - DNA, 33 bp, Homo sapien
catcactgtagatgacagaacagacgagagaca

SEQ ID NO: 132722 - DNA, 33 bp, Homo sapien
catcactgtagatgacggaacagacgagagaca

SEQ ID NO: 132723 - DNA, 33 bp, Homo sapien
gcaggtttcctacaaacgtatattgtgtgacgt

SEQ ID NO: 132724 - DNA, 33 bp, Homo sapien
gcaggtttcctacaaaggtatattgtgtgacgt

SEQ ID NO: 132725 - DNA, 33 bp, Homo sapien
gaactttacaagataactggatttcctggattt

SEQ ID NO: 132726 - DNA, 33 bp, Homo sapien
gaactttacaagataagtggatttcctggattt

SEQ ID NO: 132727 - DNA, 33 bp, Homo sapien
ggaatttaaatggagcagaactcgggaatcaat

SEQ ID NO: 132728 - DNA, 33 bp, Homo sapien
ggaatttaaatggagctgaactcgggaatcaat

SEQ ID NO: 132729 - DNA, 33 bp, Homo sapien
tgccatttgctcattgaaaattaacaaaccctt

SEQ ID NO: 132730 - DNA, 33 bp, Homo sapien
tgccatttgctcattggaaattaacaaaccctt

SEQ ID NO: 132731 - DNA, 33 bp, Homo sapien
catggggaggcacagacaggaatgatgctgact

SEQ ID NO: 132732 - DNA, 33 bp, Homo sapien
catggggaggcacagagaggaatgatgctgact

SEQ ID NO: 132733 - DNA, 33 bp, Homo sapien
gcacggtgcatcaccaaatgtgctgtggagcca

SEQ ID NO: 132734 - DNA, 33 bp, Homo sapien
gcacggtgcatcaccagatgtgctgtggagcca

SEQ ID NO: 132735 - DNA, 33 bp, Homo sapien
acttcacctcctagcacgaaactggcactcaat

SEQ ID NO: 132736 - DNA, 33 bp, Homo sapien
acttcacctcctagcatgaaactggcactcaat

SEQ ID NO: 132737 - DNA, 33 bp, Homo sapien
tgggcatctgctttacgggttcatagtataagt

SEQ ID NO: 132738 - DNA, 33 bp, Homo sapien
tgggcatctgctttactggttcatagtataagt

SEQ ID NO: 132739 - DNA, 33 bp, Homo sapien
caggtctgtctacaccaatatcatgtaccaaaa

SEQ ID NO: 132740 - DNA, 33 bp, Homo sapien
caggtctgtctacaccgatatcatgtaccaaaa

SEQ ID NO: 132741 - DNA, 33 bp, Homo sapien
atcaaggtctttataccagtccagtgctctttc

SEQ ID NO: 132742 - DNA, 33 bp, Homo sapien
atcaaggtctttatactagtccagtgctctttc

SEQ ID NO: 132743 - DNA, 33 bp, Homo sapien
gctgtaaacaaatgggccatgtggtaggctgtg

SEQ ID NO: 132744 - DNA, 33 bp, Homo sapien
gctgtaaacaaatgggtcatgtggtaggctgtg

SEQ ID NO: 132745 - DNA, 33 bp, Homo sapien
cacactttgagaatcactaaccaggagtcaagt

SEQ ID NO: 132746 - DNA, 33 bp, Homo sapien
cacactttgagaatcattaaccaggagtcaagt

SEQ ID NO: 132747 - DNA, 33 bp, Homo sapien
actagatataagaagcccctgctactaagaagt

SEQ ID NO: 132748 - DNA, 33 bp, Homo sapien
actagatataagaagctcctgctactaagaagt

SEQ ID NO: 132749 - DNA, 33 bp, Homo sapien
tacatgaactggaagtcactcatattgaaggta

SEQ ID NO: 132750 - DNA, 33 bp, Homo sapien
tacatgaactggaagtgactcatattgaaggta

SEQ ID NO: 132751 - DNA, 33 bp, Homo sapien
gaagatgtggagttgaaacactgtccctccttt

SEQ ID NO: 132752 - DNA, 33 bp, Homo sapien
gaagatgtggagttgagacactgtccctccttt

SEQ ID NO: 132753 - DNA, 33 bp, Homo sapien
gggaaatcaaggttgcaatcaaataccatgttt

SEQ ID NO: 132754 - DNA, 33 bp, Homo sapien
gggaaatcaaggttgcgatcaaataccatgttt

SEQ ID NO: 132755 - DNA, 33 bp, Homo sapien
ttgaaaattgaaatgaggattaggacgggcttt

SEQ ID NO: 132756 - DNA, 33 bp, Homo sapien
ttgaaaattgaaatgatgattaggacgggcttt

SEQ ID NO: 132757 - DNA, 33 bp, Homo sapien
aacagcaagatgaggacgagagactttggtggg

SEQ ID NO: 132758 - DNA, 33 bp, Homo sapien
aacagcaagatgaggatgagagactttggtggg

SEQ ID NO: 132759 - DNA, 33 bp, Homo sapien
aacagatacttgttgacccctagaagtatgcca

SEQ ID NO: 132760 - DNA, 33 bp, Homo sapien
aacagatacttgttgagccctagaagtatgcca

SEQ ID NO: 132761 - DNA, 33 bp, Homo sapien
acagtagcgttctgaacggagcaaggagattgc

SEQ ID NO: 132762 - DNA, 33 bp, Homo sapien
acagtagcgttctgaatggagcaaggagattgc

SEQ ID NO: 132763 - DNA, 33 bp, Homo sapien
ctgcatcattaaccaaagaaaggcttaatggga

SEQ ID NO: 132764 - DNA, 33 bp, Homo sapien
ctgcatcattaaccaaggaaaggcttaatggga

SEQ ID NO: 132765 - DNA, 33 bp, Homo sapien
acacagcaaacaaacaaaagtctacacacactc

SEQ ID NO: 132766 - DNA, 33 bp, Homo sapien
acacagcaaacaaacacaagtctacacacactc

SEQ ID NO: 132767 - DNA, 33 bp, Homo sapien
cttccctctaatttggaacaacagctggtaagt

SEQ ID NO: 132768 - DNA, 33 bp, Homo sapien
cttccctctaatttgggacaacagctggtaagt

SEQ ID NO: 132769 - DNA, 33 bp, Homo sapien
acaagcaagccacaaaaaaagagccctgggaat

SEQ ID NO: 132770 - DNA, 33 bp, Homo sapien
acaagcaagccacaaacaaagagccctgggaat

SEQ ID NO: 132771 - DNA, 33 bp, Homo sapien
agaaagcttttgacacaagccactgtgaaattc

SEQ ID NO: 132772 - DNA, 33 bp, Homo sapien
agaaagcttttgacacgagccactgtgaaattc

SEQ ID NO: 132773 - DNA, 33 bp, Homo sapien
cgtctactgttgtcccaaaattcactcatgaga

SEQ ID NO: 132774 - DNA, 33 bp, Homo sapien
cgtctactgttgtcccgaaattcactcatgaga

SEQ ID NO: 132775 - DNA, 33 bp, Homo sapien
tcaatgctacattgtcacacagaagtgcttggt

SEQ ID NO: 132776 - DNA, 33 bp, Homo sapien
tcaatgctacattgtcgcacagaagtgcttggt

SEQ ID NO: 132777 - DNA, 33 bp, Homo sapien
agatctgaacacataggcaccattagttctcac

SEQ ID NO: 132778 - DNA, 33 bp, Homo sapien
agatctgaacacatagtcaccattagttctcac

SEQ ID NO: 132779 - DNA, 33 bp, Homo sapien
ataagcctttgcaccaagtttttccaagtctct

SEQ ID NO: 132780 - DNA, 33 bp, Homo sapien
ataagcctttgcaccacgtttttccaagtctct

SEQ ID NO: 132781 - DNA, 33 bp, Homo sapien
cctgagccttctagccagagataacagagttca

SEQ ID NO: 132782 - DNA, 33 bp, Homo sapien
cctgagccttctagccggagataacagagttca

SEQ ID NO: 132783 - DNA, 33 bp, Homo sapien
tacccagctgagacagaaatacagaatccaggt

SEQ ID NO: 132784 - DNA, 33 bp, Homo sapien
tacccagctgagacaggaatacagaatccaggt

SEQ ID NO: 132785 - DNA, 33 bp, Homo sapien
tcattctctgccaaacactacaaagctatggag

SEQ ID NO: 132786 - DNA, 33 bp, Homo sapien
tcattctctgccaaactctacaaagctatggag

SEQ ID NO: 132787 - DNA, 33 bp, Homo sapien
actctggtgagtattacagataaagtgatacat

SEQ ID NO: 132788 - DNA, 33 bp, Homo sapien
actctggtgagtattagagataaagtgatacat

SEQ ID NO: 132789 - DNA, 33 bp, Homo sapien
gacaatgaggatggaacagtcaaggaaatgtgt

SEQ ID NO: 132790 - DNA, 33 bp, Homo sapien
gacaatgaggatggaatagtcaaggaaatgtgt

SEQ ID NO: 132791 - DNA, 33 bp, Homo sapien
tttatagccttggttcaacatggaattgtttaa

SEQ ID NO: 132792 - DNA, 33 bp, Homo sapien
tttatagccttggttcgacatggaattgtttaa

SEQ ID NO: 132793 - DNA, 33 bp, Homo sapien
agggcaaaaggactgacagtcagagtggtaacg

SEQ ID NO: 132794 - DNA, 33 bp, Homo sapien
agggcaaaaggactgatagtcagagtggtaacg

SEQ ID NO: 132795 - DNA, 33 bp, Homo sapien
taatgacaacatcctgaatcaaagaaagattcc

SEQ ID NO: 132796 - DNA, 33 bp, Homo sapien
taatgacaacatcctgcatcaaagaaagattcc

SEQ ID NO: 132797 - DNA, 33 bp, Homo sapien
tacagagacgagcaaactgggaaaaaaacagat

SEQ ID NO: 132798 - DNA, 33 bp, Homo sapien
tacagagacgagcaaagtgggaaaaaaacagat

SEQ ID NO: 132799 - DNA, 33 bp, Homo sapien
acatagtagatcctcaataaatgcctgcataat

SEQ ID NO: 132800 - DNA, 33 bp, Homo sapien
acatagtagatcctcattaaatgcctgcataat

SEQ ID NO: 132801 - DNA, 33 bp, Homo sapien
agttcctactctctagacatggcttccttctcc

SEQ ID NO: 132802 - DNA, 33 bp, Homo sapien
agttcctactctctaggcatggcttccttctcc

SEQ ID NO: 132803 - DNA, 33 bp, Homo sapien
cccactatgcttaataccactggcttcagggag

SEQ ID NO: 132804 - DNA, 33 bp, Homo sapien
cccactatgcttaatatcactggcttcagggag

SEQ ID NO: 132805 - DNA, 33 bp, Homo sapien
agggaagaaaccaggccagctaagtctgtctgt

SEQ ID NO: 132806 - DNA, 33 bp, Homo sapien
agggaagaaaccaggcgagctaagtctgtctgt

SEQ ID NO: 132807 - DNA, 33 bp, Homo sapien
gccagataggcgtgaacgcaaaacagcatacaa

SEQ ID NO: 132808 - DNA, 33 bp, Homo sapien
gccagataggcgtgaatgcaaaacagcatacaa

SEQ ID NO: 132809 - DNA, 33 bp, Homo sapien
tatcatccttcctttaagtatctgccgatccgc

SEQ ID NO: 132810 - DNA, 33 bp, Homo sapien
tatcatccttcctttaggtatctgccgatccgc

SEQ ID NO: 132811 - DNA, 33 bp, Homo sapien
ttttggcgactttgggcaaattggtttttgtct

SEQ ID NO: 132812 - DNA, 33 bp, Homo sapien
ttttggcgactttgggtaaattggtttttgtct

SEQ ID NO: 132813 - DNA, 33 bp, Homo sapien
ctttcctgataagaaacgtttgaaccaattggc

SEQ ID NO: 132814 - DNA, 33 bp, Homo sapien
ctttcctgataagaaatgtttgaaccaattggc

SEQ ID NO: 132815 - DNA, 33 bp, Homo sapien
agttgtttacttagtaagatgagtgcctgctat

SEQ ID NO: 132816 - DNA, 33 bp, Homo sapien
agttgtttacttagtatgatgagtgcctgctat

SEQ ID NO: 132817 - DNA, 33 bp, Homo sapien
caattacctttatgtcaaaattccttactgttc

SEQ ID NO: 132818 - DNA, 33 bp, Homo sapien
caattacctttatgtcgaaattccttactgttc

SEQ ID NO: 132819 - DNA, 33 bp, Homo sapien
gtgacatattgatgtcaacctgaatattcagaa

SEQ ID NO: 132820 - DNA, 33 bp, Homo sapien
gtgacatattgatgtctacctgaatattcagaa

SEQ ID NO: 132821 - DNA, 33 bp, Homo sapien
taacctatatccaagacgtttcttctcattaaa

SEQ ID NO: 132822 - DNA, 33 bp, Homo sapien
taacctatatccaagatgtttcttctcattaaa

SEQ ID NO: 132823 - DNA, 33 bp, Homo sapien
aatattcaaagttattaaaatctggttgatcag

SEQ ID NO: 132824 - DNA, 33 bp, Homo sapien
aatattcaaagttattgaaatctggttgatcag

SEQ ID NO: 132825 - DNA, 33 bp, Homo sapien
gctgttggatctgcaacttgaatgccttaagtc

SEQ ID NO: 132826 - DNA, 33 bp, Homo sapien
gctgttggatctgcaatttgaatgccttaagtc

SEQ ID NO: 132827 - DNA, 33 bp, Homo sapien
ttgggattttggcataactaagttgcttaaaat

SEQ ID NO: 132828 - DNA, 33 bp, Homo sapien
ttgggattttggcatacctaagttgcttaaaat

SEQ ID NO: 132829 - DNA, 33 bp, Homo sapien
tgtctgggtgcaataaatgcacagtggctctga

SEQ ID NO: 132830 - DNA, 33 bp, Homo sapien
tgtctgggtgcaataagtgcacagtggctctga

SEQ ID NO: 132831 - DNA, 33 bp, Homo sapien
aggttacaggatacaacgttcatatataaaagt

SEQ ID NO: 132832 - DNA, 33 bp, Homo sapien
aggttacaggatacaaggttcatatataaaagt

SEQ ID NO: 132833 - DNA, 33 bp, Homo sapien
ggattcaatttgctaacgctttattgaggattt

SEQ ID NO: 132834 - DNA, 33 bp, Homo sapien
ggattcaatttgctaatgctttattgaggattt

SEQ ID NO: 132835 - DNA, 33 bp, Homo sapien
ctaatatatttgagtaaatgaaccttaaaatac

SEQ ID NO: 132836 - DNA, 33 bp, Homo sapien
ctaatatatttgagtagatgaaccttaaaatac

SEQ ID NO: 132837 - DNA, 33 bp, Homo sapien
catatactaccagcccactcctctgcgttttct

SEQ ID NO: 132838 - DNA, 33 bp, Homo sapien
catatactaccagccctctcctctgcgttttct

SEQ ID NO: 132839 - DNA, 33 bp, Homo sapien
ggtggcagacaaatttaaaacatgattctgtca

SEQ ID NO: 132840 - DNA, 33 bp, Homo sapien
ggtggcagacaaatttcaaacatgattctgtca

SEQ ID NO: 132841 - DNA, 33 bp, Homo sapien
cctcgctttactctgccattggtagcttaaaga

SEQ ID NO: 132842 - DNA, 33 bp, Homo sapien
cctcgctttactctgctattggtagcttaaaga

SEQ ID NO: 132843 - DNA, 33 bp, Homo sapien
atctctaactttcagcaagtaattctggaccca

SEQ ID NO: 132844 - DNA, 33 bp, Homo sapien
atctctaactttcagccagtaattctggaccca

SEQ ID NO: 132845 - DNA, 33 bp, Homo sapien
atgggagccatatgaccggcattaccgtcaggc

SEQ ID NO: 132846 - DNA, 33 bp, Homo sapien
atgggagccatatgactggcattaccgtcaggc

SEQ ID NO: 132847 - DNA, 33 bp, Homo sapien
tgccccgttctggagacagactagagtaggata

SEQ ID NO: 132848 - DNA, 33 bp, Homo sapien
tgccccgttctggagagagactagagtaggata

SEQ ID NO: 132849 - DNA, 33 bp, Homo sapien
ttcaaaagcctaagacagaagcttccagttctc

SEQ ID NO: 132850 - DNA, 33 bp, Homo sapien
ttcaaaagcctaagacggaagcttccagttctc

SEQ ID NO: 132851 - DNA, 33 bp, Homo sapien
actgaagtgtctgctagctttatttacaagctc

SEQ ID NO: 132852 - DNA, 33 bp, Homo sapien
actgaagtgtctgctatctttatttacaagctc

SEQ ID NO: 132853 - DNA, 33 bp, Homo sapien
taccgtcagagtaacactaaacctacagaatgg

SEQ ID NO: 132854 - DNA, 33 bp, Homo sapien
taccgtcagagtaacagtaaacctacagaatgg

SEQ ID NO: 132855 - DNA, 33 bp, Homo sapien
ctgagctataagtggacattattaagctaaatg

SEQ ID NO: 132856 - DNA, 33 bp, Homo sapien
ctgagctataagtggatattattaagctaaatg

SEQ ID NO: 132857 - DNA, 33 bp, Homo sapien
tactttctgcatcgataacatatgtggtaaagc

SEQ ID NO: 132858 - DNA, 33 bp, Homo sapien
tactttctgcatcgatgacatatgtggtaaagc

SEQ ID NO: 132859 - DNA, 33 bp, Homo sapien
atgtctcattaaagataaacggtgaccagtgcc

SEQ ID NO: 132860 - DNA, 33 bp, Homo sapien
atgtctcattaaagattaacggtgaccagtgcc

SEQ ID NO: 132861 - DNA, 33 bp, Homo sapien
gcccatgtgatagaaaaaaaggcataaatcatg

SEQ ID NO: 132862 - DNA, 33 bp, Homo sapien
gcccatgtgatagaaacaaaggcataaatcatg

SEQ ID NO: 132863 - DNA, 33 bp, Homo sapien
atctcactcttttgtacgtataaagcatagata

SEQ ID NO: 132864 - DNA, 33 bp, Homo sapien
atctcactcttttgtatgtataaagcatagata

SEQ ID NO: 132865 - DNA, 33 bp, Homo sapien
tgggcagaatcgaaaacgaaggagagagttaga

SEQ ID NO: 132866 - DNA, 33 bp, Homo sapien
tgggcagaatcgaaaatgaaggagagagttaga

SEQ ID NO: 132867 - DNA, 33 bp, Homo sapien
tattttatggtactctaacaattccttcagggc

SEQ ID NO: 132868 - DNA, 33 bp, Homo sapien
tattttatggtactctcacaattccttcagggc

SEQ ID NO: 132869 - DNA, 33 bp, Homo sapien
tgcttttagttatccacaaatcccacattcact

SEQ ID NO: 132870 - DNA, 33 bp, Homo sapien
tgcttttagttatccataaatcccacattcact

SEQ ID NO: 132871 - DNA, 33 bp, Homo sapien
aatttgtgttgttataaagaaaaattgaagtaa

SEQ ID NO: 132872 - DNA, 33 bp, Homo sapien
aatttgtgttgttatacagaaaaattgaagtaa

SEQ ID NO: 132873 - DNA, 33 bp, Homo sapien
cttatttaaaaaataactgagcaacctatgggt

SEQ ID NO: 132874 - DNA, 33 bp, Homo sapien
cttatttaaaaaataagtgagcaacctatgggt

SEQ ID NO: 132875 - DNA, 33 bp, Homo sapien
tctgcattaaaaccctaactgcaggattggtct

SEQ ID NO: 132876 - DNA, 33 bp, Homo sapien
tctgcattaaaaccctgactgcaggattggtct

SEQ ID NO: 132877 - DNA, 33 bp, Homo sapien
aacccaggacaagaacaattatcccagctcaca

SEQ ID NO: 132878 - DNA, 33 bp, Homo sapien
aacccaggacaagaaccattatcccagctcaca

SEQ ID NO: 132879 - DNA, 33 bp, Homo sapien
ccttatttatgtaatgcaagtatgactttcccc

SEQ ID NO: 132880 - DNA, 33 bp, Homo sapien
ccttatttatgtaatggaagtatgactttcccc

SEQ ID NO: 132881 - DNA, 33 bp, Homo sapien
ccctggactaggtacaaaaggctctatattaat

SEQ ID NO: 132882 - DNA, 33 bp, Homo sapien
ccctggactaggtacagaaggctctatattaat

SEQ ID NO: 132883 - DNA, 33 bp, Homo sapien
gatcaactaagaggaagtgtatagagaaataac

SEQ ID NO: 132884 - DNA, 33 bp, Homo sapien
gatcaactaagaggaattgtatagagaaataac

SEQ ID NO: 132885 - DNA, 33 bp, Homo sapien
ttttcattaaaaaaaaactggcaatatatgaga

SEQ ID NO: 132886 - DNA, 33 bp, Homo sapien
ttttcattaaaaaaaacctggcaatatatgaga

SEQ ID NO: 132887 - DNA, 33 bp, Homo sapien
tgtaaaaagcagctaaatgtaggcattgaatta

SEQ ID NO: 132888 - DNA, 33 bp, Homo sapien
tgtaaaaagcagctaattgtaggcattgaatta

SEQ ID NO: 132889 - DNA, 33 bp, Homo sapien
aaatatgacatagttaacaatctatctggctca

SEQ ID NO: 132890 - DNA, 33 bp, Homo sapien
aaatatgacatagttagcaatctatctggctca

SEQ ID NO: 132891 - DNA, 33 bp, Homo sapien
caagaatacaataccacatctcacaactttgaa

SEQ ID NO: 132892 - DNA, 33 bp, Homo sapien
caagaatacaataccatatctcacaactttgaa

SEQ ID NO: 132893 - DNA, 33 bp, Homo sapien
ccatgccaaagctaaaagagctgtcacttaaga

SEQ ID NO: 132894 - DNA, 33 bp, Homo sapien
ccatgccaaagctaaaggagctgtcacttaaga

SEQ ID NO: 132895 - DNA, 33 bp, Homo sapien
gttcatgctttgggcaataatacgcttacattt

SEQ ID NO: 132896 - DNA, 33 bp, Homo sapien
gttcatgctttgggcagtaatacgcttacattt

SEQ ID NO: 132897 - DNA, 33 bp, Homo sapien
gatttcacactttttacgaatgtgtagtattcc

SEQ ID NO: 132898 - DNA, 33 bp, Homo sapien
gatttcacactttttatgaatgtgtagtattcc

SEQ ID NO: 132899 - DNA, 33 bp, Homo sapien
aaaagactgcttctcaccctggagaaatctgga

SEQ ID NO: 132900 - DNA, 33 bp, Homo sapien
aaaagactgcttctcatcctggagaaatctgga

SEQ ID NO: 132901 - DNA, 33 bp, Homo sapien
tatacggtgacagttacgggtccagtttcattc

SEQ ID NO: 132902 - DNA, 33 bp, Homo sapien
tatacggtgacagttatgggtccagtttcattc

SEQ ID NO: 132903 - DNA, 33 bp, Homo sapien
ctcttaacaattttcaatagcataatgtcttct

SEQ ID NO: 132904 - DNA, 33 bp, Homo sapien
ctcttaacaattttcagtagcataatgtcttct

SEQ ID NO: 132905 - DNA, 33 bp, Homo sapien
aacatctcccctcaacaacctccttctctggta

SEQ ID NO: 132906 - DNA, 33 bp, Homo sapien
aacatctcccctcaaccacctccttctctggta

SEQ ID NO: 132907 - DNA, 33 bp, Homo sapien
aaaggttttcagaagacactcggttattggaag

SEQ ID NO: 132908 - DNA, 33 bp, Homo sapien
aaaggttttcagaagagactcggttattggaag

SEQ ID NO: 132909 - DNA, 33 bp, Homo sapien
cttgaaattatttttgaaaaggcaatcttcacc

SEQ ID NO: 132910 - DNA, 33 bp, Homo sapien
cttgaaattatttttggaaaggcaatcttcacc

SEQ ID NO: 132911 - DNA, 33 bp, Homo sapien
tctagtctaaatggaaagcagaattacacagtt

SEQ ID NO: 132912 - DNA, 33 bp, Homo sapien
tctagtctaaatggaaggcagaattacacagtt

SEQ ID NO: 132913 - DNA, 33 bp, Homo sapien
gtgcaaaactagataccacaggaagataacaag

SEQ ID NO: 132914 - DNA, 33 bp, Homo sapien
gtgcaaaactagatactacaggaagataacaag

SEQ ID NO: 132915 - DNA, 33 bp, Homo sapien
gacagagtgagacacaatctttaaacatttttt

SEQ ID NO: 132916 - DNA, 33 bp, Homo sapien
gacagagtgagacacagtctttaaacatttttt

SEQ ID NO: 132917 - DNA, 33 bp, Homo sapien
tatgtgaatgctacaccgatagcaagaacaact

SEQ ID NO: 132918 - DNA, 33 bp, Homo sapien
tatgtgaatgctacactgatagcaagaacaact

SEQ ID NO: 132919 - DNA, 33 bp, Homo sapien
ccttcaacaaccctgccacttggctcaattaca

SEQ ID NO: 132920 - DNA, 33 bp, Homo sapien
ccttcaacaaccctgctacttggctcaattaca

SEQ ID NO: 132921 - DNA, 33 bp, Homo sapien
tttacatctaatggagaaaatgctttgaatcag

SEQ ID NO: 132922 - DNA, 33 bp, Homo sapien
tttacatctaatggaggaaatgctttgaatcag

SEQ ID NO: 132923 - DNA, 33 bp, Homo sapien
cccttcttcttttccacgtttggagaagtttgt

SEQ ID NO: 132924 - DNA, 33 bp, Homo sapien
cccttcttcttttccatgtttggagaagtttgt

SEQ ID NO: 132925 - DNA, 33 bp, Homo sapien
aaggtaaatgagaaaacgagaggcttaattacc

SEQ ID NO: 132926 - DNA, 33 bp, Homo sapien
aaggtaaatgagaaaatgagaggcttaattacc

SEQ ID NO: 132927 - DNA, 33 bp, Homo sapien
aattgaggctttggtacctaggaatccaatcat

SEQ ID NO: 132928 - DNA, 33 bp, Homo sapien
aattgaggctttggtatctaggaatccaatcat

SEQ ID NO: 132929 - DNA, 33 bp, Homo sapien
tgtgagacaagggacaaatttcattcttctgca

SEQ ID NO: 132930 - DNA, 33 bp, Homo sapien
tgtgagacaagggacatatttcattcttctgca

SEQ ID NO: 132931 - DNA, 33 bp, Homo sapien
ggcaaatccatagagacaaaaggtagatttgtg

SEQ ID NO: 132932 - DNA, 33 bp, Homo sapien
ggcaaatccatagagataaaaggtagatttgtg

SEQ ID NO: 132933 - DNA, 33 bp, Homo sapien
gcatgacaaagcatcactgaaacccaacttaaa

SEQ ID NO: 132934 - DNA, 33 bp, Homo sapien
gcatgacaaagcatcattgaaacccaacttaaa

SEQ ID NO: 132935 - DNA, 33 bp, Homo sapien
tgcagaaccctgagtacaattgttctgccagca

SEQ ID NO: 132936 - DNA, 33 bp, Homo sapien
tgcagaaccctgagtataattgttctgccagca

SEQ ID NO: 132937 - DNA, 33 bp, Homo sapien
catatgagagccctgaacctcctttaagaatgt

SEQ ID NO: 132938 - DNA, 33 bp, Homo sapien
catatgagagccctgagcctcctttaagaatgt

SEQ ID NO: 132939 - DNA, 33 bp, Homo sapien
atgctggtgttgaaggaagcatcactctgactg

SEQ ID NO: 132940 - DNA, 33 bp, Homo sapien
atgctggtgttgaaggcagcatcactctgactg

SEQ ID NO: 132941 - DNA, 33 bp, Homo sapien
gaagttatagctgtgaacactaccatgaatgag

SEQ ID NO: 132942 - DNA, 33 bp, Homo sapien
gaagttatagctgtgatcactaccatgaatgag

SEQ ID NO: 132943 - DNA, 33 bp, Homo sapien
ggtgctgtgtgatactaaatgattcatttttct

SEQ ID NO: 132944 - DNA, 33 bp, Homo sapien
ggtgctgtgtgatactgaatgattcatttttct

SEQ ID NO: 132945 - DNA, 33 bp, Homo sapien
cacatgactctccttaacattacacaattcagt

SEQ ID NO: 132946 - DNA, 33 bp, Homo sapien
cacatgactctccttaccattacacaattcagt

SEQ ID NO: 132947 - DNA, 33 bp, Homo sapien
ccttttgaatatggaagtaagagaccaaatatg

SEQ ID NO: 132948 - DNA, 33 bp, Homo sapien
ccttttgaatatggaattaagagaccaaatatg

SEQ ID NO: 132949 - DNA, 33 bp, Homo sapien
tatttttggaagaagaaaaaagcagggtatgtt

SEQ ID NO: 132950 - DNA, 33 bp, Homo sapien
tatttttggaagaagacaaaagcagggtatgtt

SEQ ID NO: 132951 - DNA, 33 bp, Homo sapien
atttcctgggctagaccgaagcaatctatggat

SEQ ID NO: 132952 - DNA, 33 bp, Homo sapien
atttcctgggctagactgaagcaatctatggat

SEQ ID NO: 132953 - DNA, 33 bp, Homo sapien
tagaagcctatatgagaaaagagaggcatacaa

SEQ ID NO: 132954 - DNA, 33 bp, Homo sapien
tagaagcctatatgaggaaagagaggcatacaa

SEQ ID NO: 132955 - DNA, 33 bp, Homo sapien
gaagtaagtgttcaaacagcaacagtaataata

SEQ ID NO: 132956 - DNA, 33 bp, Homo sapien
gaagtaagtgttcaaatagcaacagtaataata

SEQ ID NO: 132957 - DNA, 33 bp, Homo sapien
aaggtatagtgatgaaccactgaaagtctacct

SEQ ID NO: 132958 - DNA, 33 bp, Homo sapien
aaggtatagtgatgaagcactgaaagtctacct

SEQ ID NO: 132959 - DNA, 33 bp, Homo sapien
caagatataatctaacagtggaaatgatgaact

SEQ ID NO: 132960 - DNA, 33 bp, Homo sapien
caagatataatctaactgtggaaatgatgaact

SEQ ID NO: 132961 - DNA, 33 bp, Homo sapien
tagcactttctgtatccagctgaagatcagctt

SEQ ID NO: 132962 - DNA, 33 bp, Homo sapien
tagcactttctgtatctagctgaagatcagctt

SEQ ID NO: 132963 - DNA, 33 bp, Homo sapien
aactagtcaactgtgacgatttcattaattaac

SEQ ID NO: 132964 - DNA, 33 bp, Homo sapien
aactagtcaactgtgatgatttcattaattaac

SEQ ID NO: 132965 - DNA, 33 bp, Homo sapien
atctattatctattaactctatcatctctcatc

SEQ ID NO: 132966 - DNA, 33 bp, Homo sapien
atctattatctattaagtctatcatctctcatc

SEQ ID NO: 132967 - DNA, 33 bp, Homo sapien
tgcaagaggtttcttcacataagggagacaggg

SEQ ID NO: 132968 - DNA, 33 bp, Homo sapien
tgcaagaggtttcttcgcataagggagacaggg

SEQ ID NO: 132969 - DNA, 33 bp, Homo sapien
tgttgatcacagcatacctctgtcatctggggc

SEQ ID NO: 132970 - DNA, 33 bp, Homo sapien
tgttgatcacagcatatctctgtcatctggggc

SEQ ID NO: 132971 - DNA, 33 bp, Homo sapien
aaagtattggtgcttacaaaatccaacatattt

SEQ ID NO: 132972 - DNA, 33 bp, Homo sapien
aaagtattggtgcttagaaaatccaacatattt

SEQ ID NO: 132973 - DNA, 33 bp, Homo sapien
gattaacaacagagataaatttgcaataaaatt

SEQ ID NO: 132974 - DNA, 33 bp, Homo sapien
gattaacaacagagattaatttgcaataaaatt

SEQ ID NO: 132975 - DNA, 33 bp, Homo sapien
taaagaaaaataatgcaatacatttgaaagata

SEQ ID NO: 132976 - DNA, 33 bp, Homo sapien
taaagaaaaataatgcgatacatttgaaagata

SEQ ID NO: 132977 - DNA, 33 bp, Homo sapien
accaataagaatataaagtgccaaagttgattc

SEQ ID NO: 132978 - DNA, 33 bp, Homo sapien
accaataagaatataacgtgccaaagttgattc

SEQ ID NO: 132979 - DNA, 33 bp, Homo sapien
aactacctgtgggaaacagatcttagattaacc

SEQ ID NO: 132980 - DNA, 33 bp, Homo sapien
aactacctgtgggaaagagatcttagattaacc

SEQ ID NO: 132981 - DNA, 33 bp, Homo sapien
ggagttttaacttgatgaagctgtcactcaaaa

SEQ ID NO: 132982 - DNA, 33 bp, Homo sapien
ggagttttaacttgattaagctgtcactcaaaa

SEQ ID NO: 132983 - DNA, 33 bp, Homo sapien
tcaaacttgacaccaaatagaaagagcggaaag

SEQ ID NO: 132984 - DNA, 33 bp, Homo sapien
tcaaacttgacaccaagtagaaagagcggaaag

SEQ ID NO: 132985 - DNA, 33 bp, Homo sapien
gtgaattgatgttccccaaagcagagtaaactt

SEQ ID NO: 132986 - DNA, 33 bp, Homo sapien
gtgaattgatgttccctaaagcagagtaaactt

SEQ ID NO: 132987 - DNA, 33 bp, Homo sapien
cagttgataggagagaatctctaaatgctcctt

SEQ ID NO: 132988 - DNA, 33 bp, Homo sapien
cagttgataggagagagtctctaaatgctcctt

SEQ ID NO: 132989 - DNA, 33 bp, Homo sapien
ggtacaactatgggaacggggcaactttccttc

SEQ ID NO: 132990 - DNA, 33 bp, Homo sapien
ggtacaactatgggaatggggcaactttccttc

SEQ ID NO: 132991 - DNA, 33 bp, Homo sapien
gccacagagccaaatcaaaaagcagatagagga

SEQ ID NO: 132992 - DNA, 33 bp, Homo sapien
gccacagagccaaatcgaaaagcagatagagga

SEQ ID NO: 132993 - DNA, 33 bp, Homo sapien
ttttctcaagctctccaggaagagaacaagaag

SEQ ID NO: 132994 - DNA, 33 bp, Homo sapien
ttttctcaagctctccgggaagagaacaagaag

SEQ ID NO: 132995 - DNA, 33 bp, Homo sapien
tcataaaacatgattgaagcacaataaatatgg

SEQ ID NO: 132996 - DNA, 33 bp, Homo sapien
tcataaaacatgattggagcacaataaatatgg

SEQ ID NO: 132997 - DNA, 33 bp, Homo sapien
tatgatgagacaagaacaaatttcagtatctaa

SEQ ID NO: 132998 - DNA, 33 bp, Homo sapien
tatgatgagacaagaataaatttcagtatctaa

SEQ ID NO: 132999 - DNA, 33 bp, Homo sapien
cagaacttcagttgaacgtgaggaaaaaaatgt

SEQ ID NO: 133000 - DNA, 33 bp, Homo sapien
cagaacttcagttgaatgtgaggaaaaaaatgt

SEQ ID NO: 133001 - DNA, 33 bp, Homo sapien
agtcatgtacagaaagaaaaagttaggtgcaga

SEQ ID NO: 133002 - DNA, 33 bp, Homo sapien
agtcatgtacagaaagcaaaagttaggtgcaga

SEQ ID NO: 133003 - DNA, 33 bp, Homo sapien
caaagaaaaaccaccaacctaggattctatatc

SEQ ID NO: 133004 - DNA, 33 bp, Homo sapien
caaagaaaaaccaccaccctaggattctatatc

SEQ ID NO: 133005 - DNA, 33 bp, Homo sapien
attcattagcaaaaataatctcaatcatcatta

SEQ ID NO: 133006 - DNA, 33 bp, Homo sapien
attcattagcaaaaatgatctcaatcatcatta

SEQ ID NO: 133007 - DNA, 33 bp, Homo sapien
tttctctactttcaaaacccaaattaagtctag

SEQ ID NO: 133008 - DNA, 33 bp, Homo sapien
tttctctactttcaaaccccaaattaagtctag

SEQ ID NO: 133009 - DNA, 33 bp, Homo sapien
gatcaccatgtgttaaactaccctctcattatt

SEQ ID NO: 133010 - DNA, 33 bp, Homo sapien
gatcaccatgtgttaatctaccctctcattatt

SEQ ID NO: 133011 - DNA, 33 bp, Homo sapien
taaccaaaggtgtcaacagcttttactcaccca

SEQ ID NO: 133012 - DNA, 33 bp, Homo sapien
taaccaaaggtgtcaatagcttttactcaccca

SEQ ID NO: 133013 - DNA, 33 bp, Homo sapien
gggcaccacaaacctcacacatgtaagatgaca

SEQ ID NO: 133014 - DNA, 33 bp, Homo sapien
gggcaccacaaacctcgcacatgtaagatgaca

SEQ ID NO: 133015 - DNA, 33 bp, Homo sapien
acccactactgtgaaccagatggaacaagtctg

SEQ ID NO: 133016 - DNA, 33 bp, Homo sapien
acccactactgtgaactagatggaacaagtctg

SEQ ID NO: 133017 - DNA, 33 bp, Homo sapien
atattcactgggattaaccaatcaattcccaat

SEQ ID NO: 133018 - DNA, 33 bp, Homo sapien
atattcactgggattacccaatcaattcccaat

SEQ ID NO: 133019 - DNA, 33 bp, Homo sapien
gatagtacggtggcttaaaactttatttatgat

SEQ ID NO: 133020 - DNA, 33 bp, Homo sapien
gatagtacggtggcttgaaactttatttatgat

SEQ ID NO: 133021 - DNA, 33 bp, Homo sapien
acctcacacattcaacgaaggttttcagggagt

SEQ ID NO: 133022 - DNA, 33 bp, Homo sapien
acctcacacattcaactaaggttttcagggagt

SEQ ID NO: 133023 - DNA, 33 bp, Homo sapien
gctggacaacaggcaacgaaaagtttaggtttg

SEQ ID NO: 133024 - DNA, 33 bp, Homo sapien
gctggacaacaggcaatgaaaagtttaggtttg

SEQ ID NO: 133025 - DNA, 33 bp, Homo sapien
aaatgacaactatttcaaatatgggtttagcat

SEQ ID NO: 133026 - DNA, 33 bp, Homo sapien
aaatgacaactatttccaatatgggtttagcat

SEQ ID NO: 133027 - DNA, 33 bp, Homo sapien
taaaaatcatatcctcaaattgcttataatcta

SEQ ID NO: 133028 - DNA, 33 bp, Homo sapien
taaaaatcatatcctcgaattgcttataatcta

SEQ ID NO: 133029 - DNA, 33 bp, Homo sapien
taagagaattgaagaacgagagagagaagggaa

SEQ ID NO: 133030 - DNA, 33 bp, Homo sapien
taagagaattgaagaatgagagagagaagggaa

SEQ ID NO: 133031 - DNA, 33 bp, Homo sapien
ttgggagatgggatagaatcagaatcacaccac

SEQ ID NO: 133032 - DNA, 33 bp, Homo sapien
ttgggagatgggataggatcagaatcacaccac

SEQ ID NO: 133033 - DNA, 33 bp, Homo sapien
acatcagtagagaacacgaattccagtgaatta

SEQ ID NO: 133034 - DNA, 33 bp, Homo sapien
acatcagtagagaacatgaattccagtgaatta

SEQ ID NO: 133035 - DNA, 33 bp, Homo sapien
ggaaagtagaaggaaccgccaaagaagtagaat

SEQ ID NO: 133036 - DNA, 33 bp, Homo sapien
ggaaagtagaaggaactgccaaagaagtagaat

SEQ ID NO: 133037 - DNA, 33 bp, Homo sapien
atcacgaaaaaagcacagaggaaccactcccat

SEQ ID NO: 133038 - DNA, 33 bp, Homo sapien
atcacgaaaaaagcacggaggaaccactcccat

SEQ ID NO: 133039 - DNA, 33 bp, Homo sapien
aaagcaaaggggaagcgagtatatcacatggtg

SEQ ID NO: 133040 - DNA, 33 bp, Homo sapien
aaagcaaaggggaagctagtatatcacatggtg

SEQ ID NO: 133041 - DNA, 33 bp, Homo sapien
ctgtgaaaatcttaagcagcataggagacacac

SEQ ID NO: 133042 - DNA, 33 bp, Homo sapien
ctgtgaaaatcttaagtagcataggagacacac

SEQ ID NO: 133043 - DNA, 33 bp, Homo sapien
ctgcttagaggagcaaaccaacacacatgacac

SEQ ID NO: 133044 - DNA, 33 bp, Homo sapien
ctgcttagaggagcaagccaacacacatgacac

SEQ ID NO: 133045 - DNA, 33 bp, Homo sapien
tcagaaaaggattgtgaaagtagaacacgaagg

SEQ ID NO: 133046 - DNA, 33 bp, Homo sapien
tcagaaaaggattgtggaagtagaacacgaagg

SEQ ID NO: 133047 - DNA, 33 bp, Homo sapien
ggagttggccaaatgccagttccttcaaggctt

SEQ ID NO: 133048 - DNA, 33 bp, Homo sapien
ggagttggccaaatgcgagttccttcaaggctt

SEQ ID NO: 133049 - DNA, 33 bp, Homo sapien
cttaataaatggatcacgagcataggcatttat

SEQ ID NO: 133050 - DNA, 33 bp, Homo sapien
cttaataaatggatcaggagcataggcatttat

SEQ ID NO: 133051 - DNA, 33 bp, Homo sapien
acttcttattaacacacgatgttggggaacatt

SEQ ID NO: 133052 - DNA, 33 bp, Homo sapien
acttcttattaacacatgatgttggggaacatt

SEQ ID NO: 133053 - DNA, 33 bp, Homo sapien
ttaacatgggcctaagcaggttgtttgaagatc

SEQ ID NO: 133054 - DNA, 33 bp, Homo sapien
ttaacatgggcctaagtaggttgtttgaagatc

SEQ ID NO: 133055 - DNA, 33 bp, Homo sapien
attcccggattggacaatatctgtggaaattct

SEQ ID NO: 133056 - DNA, 33 bp, Homo sapien
attcccggattggacagtatctgtggaaattct

SEQ ID NO: 133057 - DNA, 33 bp, Homo sapien
gtgctccagtgcaatgcatttcctaagattata

SEQ ID NO: 133058 - DNA, 33 bp, Homo sapien
gtgctccagtgcaatggatttcctaagattata

SEQ ID NO: 133059 - DNA, 33 bp, Homo sapien
acacccaaaagcaacaatgtatatgacttctgc

SEQ ID NO: 133060 - DNA, 33 bp, Homo sapien
acacccaaaagcaacagtgtatatgacttctgc

SEQ ID NO: 133061 - DNA, 33 bp, Homo sapien
aacctttctgtggattaaacttggacaaaggta

SEQ ID NO: 133062 - DNA, 33 bp, Homo sapien
aacctttctgtggattgaacttggacaaaggta

SEQ ID NO: 133063 - DNA, 33 bp, Homo sapien
tggcataaatgaatgacgaaaaaaacaaatgga

SEQ ID NO: 133064 - DNA, 33 bp, Homo sapien
tggcataaatgaatgatgaaaaaaacaaatgga

SEQ ID NO: 133065 - DNA, 33 bp, Homo sapien
aaagggcattctgttacagtttgacatccttgt

SEQ ID NO: 133066 - DNA, 33 bp, Homo sapien
aaagggcattctgttatagtttgacatccttgt

SEQ ID NO: 133067 - DNA, 33 bp, Homo sapien
caaatccatagaaacaaaacagaaagtggatta

SEQ ID NO: 133068 - DNA, 33 bp, Homo sapien
caaatccatagaaacacaacagaaagtggatta

SEQ ID NO: 133069 - DNA, 33 bp, Homo sapien
aggggaatgttttaagcagctcccaggaagaaa

SEQ ID NO: 133070 - DNA, 33 bp, Homo sapien
aggggaatgttttaagtagctcccaggaagaaa

SEQ ID NO: 133071 - DNA, 33 bp, Homo sapien
aatagaattgtaaagaagaccaagttagacata

SEQ ID NO: 133072 - DNA, 33 bp, Homo sapien
aatagaattgtaaagatgaccaagttagacata

SEQ ID NO: 133073 - DNA, 33 bp, Homo sapien
cttgaacaatcattaaagtaagtactcggtact

SEQ ID NO: 133074 - DNA, 33 bp, Homo sapien
cttgaacaatcattaaggtaagtactcggtact

SEQ ID NO: 133075 - DNA, 33 bp, Homo sapien
taagctctatgatggcaatgactttgtaataat

SEQ ID NO: 133076 - DNA, 33 bp, Homo sapien
taagctctatgatggccatgactttgtaataat

SEQ ID NO: 133077 - DNA, 33 bp, Homo sapien
catgtgtggcttacaggccagggtaggcatcag

SEQ ID NO: 133078 - DNA, 33 bp, Homo sapien
catgtgtggcttacagtccagggtaggcatcag

SEQ ID NO: 133079 - DNA, 33 bp, Homo sapien
tgagtgggtcagaaaaaagaggataaagccatc

SEQ ID NO: 133080 - DNA, 33 bp, Homo sapien
tgagtgggtcagaaaagagaggataaagccatc

SEQ ID NO: 133081 - DNA, 33 bp, Homo sapien
gtatgtgtgaaatatgaacctgagacaaaatta

SEQ ID NO: 133082 - DNA, 33 bp, Homo sapien
gtatgtgtgaaatatgtacctgagacaaaatta

SEQ ID NO: 133083 - DNA, 33 bp, Homo sapien
aaggcttgatctcttcacatgaaatagctacac

SEQ ID NO: 133084 - DNA, 33 bp, Homo sapien
aaggcttgatctcttcgcatgaaatagctacac

SEQ ID NO: 133085 - DNA, 33 bp, Homo sapien
agaaattctgagttgacgactgcaaatttgcat

SEQ ID NO: 133086 - DNA, 33 bp, Homo sapien
agaaattctgagttgatgactgcaaatttgcat

SEQ ID NO: 133087 - DNA, 33 bp, Homo sapien
ttctgtgttaaaatgcacatttcccaagagtgt

SEQ ID NO: 133088 - DNA, 33 bp, Homo sapien
ttctgtgttaaaatgcgcatttcccaagagtgt

SEQ ID NO: 133089 - DNA, 33 bp, Homo sapien
acacatgcgcacaagagcattaatatggaagac

SEQ ID NO: 133090 - DNA, 33 bp, Homo sapien
acacatgcgcacaagatcattaatatggaagac

SEQ ID NO: 133091 - DNA, 33 bp, Homo sapien
gacattgcaacattgacggtggctacaaacaca

SEQ ID NO: 133092 - DNA, 33 bp, Homo sapien
gacattgcaacattgatggtggctacaaacaca

SEQ ID NO: 133093 - DNA, 33 bp, Homo sapien
aagcacttaaattgggaagtccagagctacatg

SEQ ID NO: 133094 - DNA, 33 bp, Homo sapien
aagcacttaaattgggcagtccagagctacatg

SEQ ID NO: 133095 - DNA, 33 bp, Homo sapien
caaaagtatgcttaaaatattcacaaaaccatg

SEQ ID NO: 133096 - DNA, 33 bp, Homo sapien
caaaagtatgcttaaattattcacaaaaccatg

SEQ ID NO: 133097 - DNA, 33 bp, Homo sapien
tttctcctatttcacacgagtccatttctatga

SEQ ID NO: 133098 - DNA, 33 bp, Homo sapien
tttctcctatttcacatgagtccatttctatga

SEQ ID NO: 133099 - DNA, 33 bp, Homo sapien
ctactaaaataccaaaacatggactgggagcgt

SEQ ID NO: 133100 - DNA, 33 bp, Homo sapien
ctactaaaataccaaagcatggactgggagcgt

SEQ ID NO: 133101 - DNA, 33 bp, Homo sapien
acctcagtatatctgaagaagaagtgtattgcc

SEQ ID NO: 133102 - DNA, 33 bp, Homo sapien
acctcagtatatctgatgaagaagtgtattgcc

SEQ ID NO: 133103 - DNA, 33 bp, Homo sapien
attagctggcctttagaaaccatgtacggcctt

SEQ ID NO: 133104 - DNA, 33 bp, Homo sapien
attagctggcctttaggaaccatgtacggcctt

SEQ ID NO: 133105 - DNA, 33 bp, Homo sapien
cttgcctttattcaaactccatgctttattact

SEQ ID NO: 133106 - DNA, 33 bp, Homo sapien
cttgcctttattcaaattccatgctttattact

SEQ ID NO: 133107 - DNA, 33 bp, Homo sapien
atgggttgcccacggacagtagtttcccatctt

SEQ ID NO: 133108 - DNA, 33 bp, Homo sapien
atgggttgcccacggagagtagtttcccatctt

SEQ ID NO: 133109 - DNA, 33 bp, Homo sapien
ataagactcaaaaccacgaaactcctagaataa

SEQ ID NO: 133110 - DNA, 33 bp, Homo sapien
ataagactcaaaaccatgaaactcctagaataa

SEQ ID NO: 133111 - DNA, 33 bp, Homo sapien
ttacacctgtagcttccgaaagtatttttctag

SEQ ID NO: 133112 - DNA, 33 bp, Homo sapien
ttacacctgtagcttctgaaagtatttttctag

SEQ ID NO: 133113 - DNA, 33 bp, Homo sapien
caatattccatgatccaaaaagtccatcaactc

SEQ ID NO: 133114 - DNA, 33 bp, Homo sapien
caatattccatgatccgaaaagtccatcaactc

SEQ ID NO: 133115 - DNA, 33 bp, Homo sapien
tggatttctatagaacagcataatgccatgctt

SEQ ID NO: 133116 - DNA, 33 bp, Homo sapien
tggatttctatagaactgcataatgccatgctt

SEQ ID NO: 133117 - DNA, 33 bp, Homo sapien
aggtgatgctaggtagcagatgaaagcatttgc

SEQ ID NO: 133118 - DNA, 33 bp, Homo sapien
aggtgatgctaggtagtagatgaaagcatttgc

SEQ ID NO: 133119 - DNA, 33 bp, Homo sapien
aaaatccaacaacttacaaggtatgttcttttt

SEQ ID NO: 133120 - DNA, 33 bp, Homo sapien
aaaatccaacaacttataaggtatgttcttttt

SEQ ID NO: 133121 - DNA, 33 bp, Homo sapien
tgcaatctatacacccaataaaggactaatatc

SEQ ID NO: 133122 - DNA, 33 bp, Homo sapien
tgcaatctatacacccgataaaggactaatatc

SEQ ID NO: 133123 - DNA, 33 bp, Homo sapien
agtacaattctctagaaatgctacacaatttac

SEQ ID NO: 133124 - DNA, 33 bp, Homo sapien
agtacaattctctagacatgctacacaatttac

SEQ ID NO: 133125 - DNA, 33 bp, Homo sapien
atgtcttaggtatcccaaaaaaactgtaatttt

SEQ ID NO: 133126 - DNA, 33 bp, Homo sapien
atgtcttaggtatccccaaaaaactgtaatttt

SEQ ID NO: 133127 - DNA, 33 bp, Homo sapien
gctctttccatacccactagcttttgtttttcc

SEQ ID NO: 133128 - DNA, 33 bp, Homo sapien
gctctttccatacccagtagcttttgtttttcc

SEQ ID NO: 133129 - DNA, 33 bp, Homo sapien
gaaaagaacattgacaaatgcagttagagtcaa

SEQ ID NO: 133130 - DNA, 33 bp, Homo sapien
gaaaagaacattgacagatgcagttagagtcaa

SEQ ID NO: 133131 - DNA, 33 bp, Homo sapien
ctactaatggcaatggacatatggaacatggta

SEQ ID NO: 133132 - DNA, 33 bp, Homo sapien
ctactaatggcaatgggcatatggaacatggta

SEQ ID NO: 133133 - DNA, 33 bp, Homo sapien
gaatgaacattaggtccctttacttgaaggaat

SEQ ID NO: 133134 - DNA, 33 bp, Homo sapien
gaatgaacattaggtctctttacttgaaggaat

SEQ ID NO: 133135 - DNA, 33 bp, Homo sapien
tttgttatttttttgacgctacttcctaatttt

SEQ ID NO: 133136 - DNA, 33 bp, Homo sapien
tttgttatttttttgatgctacttcctaatttt

SEQ ID NO: 133137 - DNA, 33 bp, Homo sapien
actacatatagaaaagcaagattggactccaac

SEQ ID NO: 133138 - DNA, 33 bp, Homo sapien
actacatatagaaaaggaagattggactccaac

SEQ ID NO: 133139 - DNA, 33 bp, Homo sapien
gtcaagtcttcttcaacgtgaccttggttttcc

SEQ ID NO: 133140 - DNA, 33 bp, Homo sapien
gtcaagtcttcttcaatgtgaccttggttttcc

SEQ ID NO: 133141 - DNA, 33 bp, Homo sapien
tgaatttgctagggaaacaatgagtggttcatg

SEQ ID NO: 133142 - DNA, 33 bp, Homo sapien
tgaatttgctagggaagcaatgagtggttcatg

SEQ ID NO: 133143 - DNA, 33 bp, Homo sapien
gtgaatgtatgaataaattatctgtatgctatc

SEQ ID NO: 133144 - DNA, 33 bp, Homo sapien
gtgaatgtatgaataagttatctgtatgctatc

SEQ ID NO: 133145 - DNA, 33 bp, Homo sapien
ccctttttctttcaacaatgactcgaatttcta

SEQ ID NO: 133146 - DNA, 33 bp, Homo sapien
ccctttttctttcaaccatgactcgaatttcta

SEQ ID NO: 133147 - DNA, 33 bp, Homo sapien
tgattttctgctcagtcacaattttacttgaaa

SEQ ID NO: 133148 - DNA, 33 bp, Homo sapien
tgattttctgctcagtgacaattttacttgaaa

SEQ ID NO: 133149 - DNA, 33 bp, Homo sapien; identical to SEQ ID NO: 133147

SEQ ID NO: 133150 - DNA, 33 bp, Homo sapien; identical to SEQ ID NO: 133148

SEQ ID NO: 133151 - DNA, 33 bp, Homo sapien
tgctcaaggtctcatggaaagaatgtacagctg

SEQ ID NO: 133152 - DNA, 33 bp, Homo sapien
tgctcaaggtctcatgtaaagaatgtacagctg

SEQ ID NO: 133153 - DNA, 33 bp, Homo sapien
gatatttctaacactacagggttttctggattt

SEQ ID NO: 133154 - DNA, 33 bp, Homo sapien
gatatttctaacactatagggttttctggattt

SEQ ID NO: 133155 - DNA, 33 bp, Homo sapien
gtaccgtgtattcacagtagctagcagacatga

SEQ ID NO: 133156 - DNA, 33 bp, Homo sapien
gtaccgtgtattcacattagctagcagacatga

SEQ ID NO: 133157 - DNA, 33 bp, Homo sapien
cccttttcttttaatgacaggcagtaaaaaggg

SEQ ID NO: 133158 - DNA, 33 bp, Homo sapien
cccttttcttttaatgtcaggcagtaaaaaggg

SEQ ID NO: 133159 - DNA, 33 bp, Homo sapien
gactattacctttaacacattaggagaaaggga

SEQ ID NO: 133160 - DNA, 33 bp, Homo sapien
gactattacctttaacgcattaggagaaaggga

SEQ ID NO: 133161 - DNA, 33 bp, Homo sapien
aacagatcctcaaacaaaggatttctcaaacaa

SEQ ID NO: 133162 - DNA, 33 bp, Homo sapien
aacagatcctcaaacacaggatttctcaaacaa

SEQ ID NO: 133163 - DNA, 33 bp, Homo sapien
ccctctccgtttttaacggcatgcgaaaggcat

SEQ ID NO: 133164 - DNA, 33 bp, Homo sapien
ccctctccgtttttaatggcatgcgaaaggcat

SEQ ID NO: 133165 - DNA, 33 bp, Homo sapien
ttcatcaggggtagaacttccttttttagttgt

SEQ ID NO: 133166 - DNA, 33 bp, Homo sapien
ttcatcaggggtagaatttccttttttagttgt

SEQ ID NO: 133167 - DNA, 33 bp, Homo sapien
ctattgccatcaggtcaacctttttagctccca

SEQ ID NO: 133168 - DNA, 33 bp, Homo sapien
ctattgccatcaggtccacctttttagctccca

SEQ ID NO: 133169 - DNA, 33 bp, Homo sapien
ctaatgcagaaattccacaacccaggtgatttt

SEQ ID NO: 133170 - DNA, 33 bp, Homo sapien
ctaatgcagaaattccgcaacccaggtgatttt

SEQ ID NO: 133171 - DNA, 33 bp, Homo sapien
atcttaagggaaaatcaacaatagcctggcagt

SEQ ID NO: 133172 - DNA, 33 bp, Homo sapien
atcttaagggaaaatcgacaatagcctggcagt

SEQ ID NO: 133173 - DNA, 33 bp, Homo sapien
ataaaaagcagtgataaccaggttgtgtactgt

SEQ ID NO: 133174 - DNA, 33 bp, Homo sapien
ataaaaagcagtgatacccaggttgtgtactgt

SEQ ID NO: 133175 - DNA, 33 bp, Homo sapien
atcctgaactgccacaactcacatgaattttgc

SEQ ID NO: 133176 - DNA, 33 bp, Homo sapien
atcctgaactgccacacctcacatgaattttgc

SEQ ID NO: 133177 - DNA, 33 bp, Homo sapien
catagaatcagcaagacggctggatctagttac

SEQ ID NO: 133178 - DNA, 33 bp, Homo sapien
catagaatcagcaagatggctggatctagttac

SEQ ID NO: 133179 - DNA, 33 bp, Homo sapien
ttatgcatctggtatcaaataaaaattggaaag

SEQ ID NO: 133180 - DNA, 33 bp, Homo sapien
ttatgcatctggtatcgaataaaaattggaaag

SEQ ID NO: 133181 - DNA, 33 bp, Homo sapien
ataaagtacattgatactaacgctgttctcaag

SEQ ID NO: 133182 - DNA, 33 bp, Homo sapien
ataaagtacattgatattaacgctgttctcaag

SEQ ID NO: 133183 - DNA, 33 bp, Homo sapien
tgacctttttacattaacattctgctgaaaagt

SEQ ID NO: 133184 - DNA, 33 bp, Homo sapien
tgacctttttacattatcattctgctgaaaagt

SEQ ID NO: 133185 - DNA, 33 bp, Homo sapien
cataatcttccattgacagttgaagggaagggt

SEQ ID NO: 133186 - DNA, 33 bp, Homo sapien
cataatcttccattgatagttgaagggaagggt

SEQ ID NO: 133187 - DNA, 33 bp, Homo sapien
tcaaactttaaggatagaattcacttgtttttc

SEQ ID NO: 133188 - DNA, 33 bp, Homo sapien
tcaaactttaaggatataattcacttgtttttc

SEQ ID NO: 133189 - DNA, 33 bp, Homo sapien
aaactctattgttctccagtttcctcttttata

SEQ ID NO: 133190 - DNA, 33 bp, Homo sapien
aaactctattgttctctagtttcctcttttata

SEQ ID NO: 133191 - DNA, 33 bp, Homo sapien
taatccacttatccaagttacccagctagttaa

SEQ ID NO: 133192 - DNA, 33 bp, Homo sapien
taatccacttatccaatttacccagctagttaa

SEQ ID NO: 133193 - DNA, 33 bp, Homo sapien
tagttggagtttctggaatttatcatttatttt

SEQ ID NO: 133194 - DNA, 33 bp, Homo sapien
tagttggagtttctgggatttatcatttatttt

SEQ ID NO: 133195 - DNA, 33 bp, Homo sapien
ttagctggctttgaacaagttctctcttggaat

SEQ ID NO: 133196 - DNA, 33 bp, Homo sapien
ttagctggctttgaacgagttctctcttggaat

SEQ ID NO: 133197 - DNA, 33 bp, Homo sapien
aaataaatacggtcataagatatgtggttcaac

SEQ ID NO: 133198 - DNA, 33 bp, Homo sapien
aaataaatacggtcatgagatatgtggttcaac

SEQ ID NO: 133199 - DNA, 33 bp, Homo sapien
cattgctgaatccactcaaacctcagtgtactc

SEQ ID NO: 133200 - DNA, 33 bp, Homo sapien
cattgctgaatccacttaaacctcagtgtactc

SEQ ID NO: 133201 - DNA, 33 bp, Homo sapien
acactagtgctaacaaaaatactaccacataat

SEQ ID NO: 133202 - DNA, 33 bp, Homo sapien
acactagtgctaacaataatactaccacataat

SEQ ID NO: 133203 - DNA, 33 bp, Homo sapien
gtaaatcagcagagacaatcataaaaagacatt

SEQ ID NO: 133204 - DNA, 33 bp, Homo sapien
gtaaatcagcagagaccatcataaaaagacatt

SEQ ID NO: 133205 - DNA, 33 bp, Homo sapien
tttagcagaatagtgagtagatccatacaaaat

SEQ ID NO: 133206 - DNA, 33 bp, Homo sapien
tttagcagaatagtgattagatccatacaaaat

SEQ ID NO: 133207 - DNA, 33 bp, Homo sapien
tttgtgcgagtatttcgcaatgtgggcaattgt

SEQ ID NO: 133208 - DNA, 33 bp, Homo sapien
tttgtgcgagtatttctcaatgtgggcaattgt

SEQ ID NO: 133209 - DNA, 33 bp, Homo sapien
atgtaaatctgagtaaagactacacgacatttt

SEQ ID NO: 133210 - DNA, 33 bp, Homo sapien
atgtaaatctgagtaacgactacacgacatttt

SEQ ID NO: 133211 - DNA, 33 bp, Homo sapien
aaaacatttcccatacaaatgctaatcaaaaga

SEQ ID NO: 133212 - DNA, 33 bp, Homo sapien
aaaacatttcccatacgaatgctaatcaaaaga

SEQ ID NO: 133213 - DNA, 33 bp, Homo sapien
tcatagataaactagcagacagaatattggaaa

SEQ ID NO: 133214 - DNA, 33 bp, Homo sapien
tcatagataaactagcggacagaatattggaaa

SEQ ID NO: 133215 - DNA, 33 bp, Homo sapien
gactgaataccaccaaaaatcaatggcttctaa

SEQ ID NO: 133216 - DNA, 33 bp, Homo sapien
gactgaataccaccaataatcaatggcttctaa

SEQ ID NO: 133217 - DNA, 33 bp, Homo sapien
agacactctattgcccagaaattccaccccacc

SEQ ID NO: 133218 - DNA, 33 bp, Homo sapien
agacactctattgcccggaaattccaccccacc

SEQ ID NO: 133219 - DNA, 33 bp, Homo sapien
ttggatttggggatataatataaccaagtgggg

SEQ ID NO: 133220 - DNA, 33 bp, Homo sapien
ttggatttggggatatcatataaccaagtgggg

SEQ ID NO: 133221 - DNA, 33 bp, Homo sapien
acccatgtattcaccaatgacttctaacatttt

SEQ ID NO: 133222 - DNA, 33 bp, Homo sapien
acccatgtattcaccagtgacttctaacatttt

SEQ ID NO: 133223 - DNA, 33 bp, Homo sapien
cattttatatttgataactaagtcactgcttaa

SEQ ID NO: 133224 - DNA, 33 bp, Homo sapien
cattttatatttgatacctaagtcactgcttaa

SEQ ID NO: 133225 - DNA, 33 bp, Homo sapien
attgcgatagacaggaaagactagacattctgc

SEQ ID NO: 133226 - DNA, 33 bp, Homo sapien
attgcgatagacaggagagactagacattctgc

SEQ ID NO: 133227 - DNA, 33 bp, Homo sapien
atcataagataaggtccaagttttaggtttgaa

SEQ ID NO: 133228 - DNA, 33 bp, Homo sapien
atcataagataaggtctaagttttaggtttgaa

SEQ ID NO: 133229 - DNA, 33 bp, Homo sapien
atagtactgagcttcaaaggaagaatttctagt

SEQ ID NO: 133230 - DNA, 33 bp, Homo sapien
atagtactgagcttcagaggaagaatttctagt

SEQ ID NO: 133231 - DNA, 33 bp, Homo sapien
ggttctactcaaccacactttacttcctgcttt

SEQ ID NO: 133232 - DNA, 33 bp, Homo sapien
ggttctactcaaccacgctttacttcctgcttt

SEQ ID NO: 133233 - DNA, 33 bp, Homo sapien
gctgccaataagccaaagcattcattgcttgca

SEQ ID NO: 133234 - DNA, 33 bp, Homo sapien
gctgccaataagccaaggcattcattgcttgca

SEQ ID NO: 133235 - DNA, 33 bp, Homo sapien
gatagattttagagaaaccagtgtcatcaagag

SEQ ID NO: 133236 - DNA, 33 bp, Homo sapien
gatagattttagagaacccagtgtcatcaagag

SEQ ID NO: 133237 - DNA, 33 bp, Homo sapien
catgtgtagatatgtcccttgctttctcaaatc

SEQ ID NO: 133238 - DNA, 33 bp, Homo sapien
catgtgtagatatgtctcttgctttctcaaatc

SEQ ID NO: 133239 - DNA, 33 bp, Homo sapien
gatgattttcagacgaagttattttcaaattgc

SEQ ID NO: 133240 - DNA, 33 bp, Homo sapien
gatgattttcagacgatgttattttcaaattgc

SEQ ID NO: 133241 - DNA, 33 bp, Homo sapien
atagtatcagatgaaacaagacagtcatgttgg

SEQ ID NO: 133242 - DNA, 33 bp, Homo sapien
atagtatcagatgaaagaagacagtcatgttgg

SEQ ID NO: 133243 - DNA, 33 bp, Homo sapien
cctgggcagaggataggatgaaagtcagcacta

SEQ ID NO: 133244 - DNA, 33 bp, Homo sapien
cctgggcagaggatagtatgaaagtcagcacta

SEQ ID NO: 133245 - DNA, 33 bp, Homo sapien
ttaaatatccactttacgccatgtactattcta

SEQ ID NO: 133246 - DNA, 33 bp, Homo sapien
ttaaatatccactttatgccatgtactattcta

SEQ ID NO: 133247 - DNA, 33 bp, Homo sapien
gaactgggaaactgtccatcataatggcaccag

SEQ ID NO: 133248 - DNA, 33 bp, Homo sapien
gaactgggaaactgtctatcataatggcaccag

SEQ ID NO: 133249 - DNA, 33 bp, Homo sapien
gtacagatcataagtgaacattccttgattaat

SEQ ID NO: 133250 - DNA, 33 bp, Homo sapien
gtacagatcataagtgcacattccttgattaat

SEQ ID NO: 133251 - DNA, 33 bp, Homo sapien
cctcttatcaaaagtcacccaatacatgaagaa

SEQ ID NO: 133252 - DNA, 33 bp, Homo sapien
cctcttatcaaaagtcgcccaatacatgaagaa

SEQ ID NO: 133253 - DNA, 33 bp, Homo sapien
cttaagccgaaactcactaccatttctatcctg

SEQ ID NO: 133254 - DNA, 33 bp, Homo sapien
cttaagccgaaactcagtaccatttctatcctg

SEQ ID NO: 133255 - DNA, 33 bp, Homo sapien
taatgttgagcctctcgagtggattttatattt

SEQ ID NO: 133256 - DNA, 33 bp, Homo sapien
taatgttgagcctctctagtggattttatattt

SEQ ID NO: 133257 - DNA, 33 bp, Homo sapien
gcagacctaaacccaactatatcaataacaaca

SEQ ID NO: 133258 - DNA, 33 bp, Homo sapien
gcagacctaaacccaattatatcaataacaaca

SEQ ID NO: 133259 - DNA, 33 bp, Homo sapien
aaagcctaatatgaccaaaagagaaagttaaaa

SEQ ID NO: 133260 - DNA, 33 bp, Homo sapien
aaagcctaatatgaccgaaagagaaagttaaaa

SEQ ID NO: 133261 - DNA, 33 bp, Homo sapien
ggactgaaattgatgcagatgcaaaatagcatt

SEQ ID NO: 133262 - DNA, 33 bp, Homo sapien
ggactgaaattgatgcggatgcaaaatagcatt

SEQ ID NO: 133263 - DNA, 33 bp, Homo sapien
acttaatcgactactacagcctgaaatattcat

SEQ ID NO: 133264 - DNA, 33 bp, Homo sapien
acttaatcgactactatagcctgaaatattcat

SEQ ID NO: 133265 - DNA, 33 bp, Homo sapien
gtgttcctctgggcaacatttgatattcactga

SEQ ID NO: 133266 - DNA, 33 bp, Homo sapien
gtgttcctctgggcaagatttgatattcactga

SEQ ID NO: 133267 - DNA, 33 bp, Homo sapien
ttataaaattctgactaaaaaactagaatgtag

SEQ ID NO: 133268 - DNA, 33 bp, Homo sapien
ttataaaattctgactgaaaaactagaatgtag

SEQ ID NO: 133269 - DNA, 33 bp, Homo sapien
tatgatattactcaaccgtgtggaagcctgatt

SEQ ID NO: 133270 - DNA, 33 bp, Homo sapien
tatgatattactcaactgtgtggaagcctgatt

SEQ ID NO: 133271 - DNA, 33 bp, Homo sapien
gttttctacacctcaactggaatggtatggaat

SEQ ID NO: 133272 - DNA, 33 bp, Homo sapien
gttttctacacctcaattggaatggtatggaat

SEQ ID NO: 133273 - DNA, 33 bp, Homo sapien
tgtcttcacatttgaccatatgttaattgattc

SEQ ID NO: 133274 - DNA, 33 bp, Homo sapien
tgtcttcacatttgacgatatgttaattgattc

SEQ ID NO: 133275 - DNA, 33 bp, Homo sapien
ccccaaattagcaaaactagaaagttgttatca

SEQ ID NO: 133276 - DNA, 33 bp, Homo sapien
ccccaaattagcaaaagtagaaagttgttatca

SEQ ID NO: 133277 - DNA, 33 bp, Homo sapien
aacagacaccaggaccaccataccacacactgc

SEQ ID NO: 133278 - DNA, 33 bp, Homo sapien
aacagacaccaggaccgccataccacacactgc

SEQ ID NO: 133279 - DNA, 33 bp, Homo sapien
tcagcactccagaaaacgatgggtactacaact

SEQ ID NO: 133280 - DNA, 33 bp, Homo sapien
tcagcactccagaaaatgatgggtactacaact

SEQ ID NO: 133281 - DNA, 33 bp, Homo sapien
tgcaaggtcagtgcatcaaccgctaagaaggtc

SEQ ID NO: 133282 - DNA, 33 bp, Homo sapien
tgcaaggtcagtgcatgaaccgctaagaaggtc

SEQ ID NO: 133283 - DNA, 33 bp, Homo sapien
acttggagcccagtaacggaagatttttatgat

SEQ ID NO: 133284 - DNA, 33 bp, Homo sapien
acttggagcccagtaatggaagatttttatgat

SEQ ID NO: 133285 - DNA, 33 bp, Homo sapien
agttggcaattctgaccgactgttgtctgggag

SEQ ID NO: 133286 - DNA, 33 bp, Homo sapien
agttggcaattctgacggactgttgtctgggag

SEQ ID NO: 133287 - DNA, 33 bp, Homo sapien
cagtgcctcagtgtcacgggatgttgatccctc

SEQ ID NO: 133288 - DNA, 33 bp, Homo sapien
cagtgcctcagtgtcatgggatgttgatccctc

SEQ ID NO: 133289 - DNA, 33 bp, Homo sapien
gctaatcctttaacaacgcattctactgcttct

SEQ ID NO: 133290 - DNA, 33 bp, Homo sapien
gctaatcctttaacaatgcattctactgcttct

SEQ ID NO: 133291 - DNA, 33 bp, Homo sapien
ggggcaagcgtaaagacctgagacaaaaaagtt

SEQ ID NO: 133292 - DNA, 33 bp, Homo sapien
ggggcaagcgtaaagagctgagacaaaaaagtt

SEQ ID NO: 133293 - DNA, 33 bp, Homo sapien
ttccttcttcacttcactatgctgagcctaagc

SEQ ID NO: 133294 - DNA, 33 bp, Homo sapien
ttccttcttcacttcattatgctgagcctaagc

SEQ ID NO: 133295 - DNA, 33 bp, Homo sapien
ctctatctcattgtccagcagagagcctgatat

SEQ ID NO: 133296 - DNA, 33 bp, Homo sapien
ctctatctcattgtccggcagagagcctgatat

SEQ ID NO: 133297 - DNA, 33 bp, Homo sapien
aaacacatagatggtaaataaaggagataaggt

SEQ ID NO: 133298 - DNA, 33 bp, Homo sapien
aaacacatagatggtacataaaggagataaggt

SEQ ID NO: 133299 - DNA, 33 bp, Homo sapien
gatgaggggcgcagaacagggaagaagtgaaaa

SEQ ID NO: 133300 - DNA, 33 bp, Homo sapien
gatgaggggcgcagaatagggaagaagtgaaaa

SEQ ID NO: 133301 - DNA, 33 bp, Homo sapien
gccaaggaaagggagaaaacttatgattccctg

SEQ ID NO: 133302 - DNA, 33 bp, Homo sapien
gccaaggaaagggagacaacttatgattccctg

SEQ ID NO: 133303 - DNA, 33 bp, Homo sapien
atgtgtcaccatgtccaactggtctgtcttcct

SEQ ID NO: 133304 - DNA, 33 bp, Homo sapien
atgtgtcaccatgtcccactggtctgtcttcct

SEQ ID NO: 133305 - DNA, 33 bp, Homo sapien
taaacaatgggtcaaaagccagaagtaaatcag

SEQ ID NO: 133306 - DNA, 33 bp, Homo sapien
taaacaatgggtcaaacgccagaagtaaatcag

SEQ ID NO: 133307 - DNA, 33 bp, Homo sapien
ggaagccgaggtggaaggctagcttgagatcaa

SEQ ID NO: 133308 - DNA, 33 bp, Homo sapien
ggaagccgaggtggaatgctagcttgagatcaa

SEQ ID NO: 133309 - DNA, 33 bp, Homo sapien
caaaacaaatgaaacactaaacatcctggtaca

SEQ ID NO: 133310 - DNA, 33 bp, Homo sapien
caaaacaaatgaaacagtaaacatcctggtaca

SEQ ID NO: 133311 - DNA, 33 bp, Homo sapien
tttcttggtctagcaaaaaatcattggtgagaa

SEQ ID NO: 133312 - DNA, 33 bp, Homo sapien
tttcttggtctagcaagaaatcattggtgagaa

SEQ ID NO: 133313 - DNA, 33 bp, Homo sapien
tgctatggcagtaaaggccactagaatagattc

SEQ ID NO: 133314 - DNA, 33 bp, Homo sapien
tgctatggcagtaaagtccactagaatagattc

SEQ ID NO: 133315 - DNA, 33 bp, Homo sapien
gccttgaatgccaggcagaacattttcattggt

SEQ ID NO: 133316 - DNA, 33 bp, Homo sapien
gccttgaatgccaggcggaacattttcattggt

SEQ ID NO: 133317 - DNA, 33 bp, Homo sapien
tttttacatcctcaaaatctctataagtttctt

SEQ ID NO: 133318 - DNA, 33 bp, Homo sapien
tttttacatcctcaaactctctataagtttctt

SEQ ID NO: 133319 - DNA, 33 bp, Homo sapien
tgggtaagtatggttaaaaatcttgcttaattc

SEQ ID NO: 133320 - DNA, 33 bp, Homo sapien
tgggtaagtatggttacaaatcttgcttaattc

SEQ ID NO: 133321 - DNA, 33 bp, Homo sapien
ttccatgtgtactgcacccttgtgactcaatac

SEQ ID NO: 133322 - DNA, 33 bp, Homo sapien
ttccatgtgtactgcatccttgtgactcaatac

SEQ ID NO: 133323 - DNA, 33 bp, Homo sapien
gggaaaatgagtacataagccaggagaaagtgg

SEQ ID NO: 133324 - DNA, 33 bp, Homo sapien
gggaaaatgagtacatgagccaggagaaagtgg

SEQ ID NO: 133325 - DNA, 33 bp, Homo sapien
tagaaaatggtgatcacagagatttgaaattta

SEQ ID NO: 133326 - DNA, 33 bp, Homo sapien
tagaaaatggtgatcagagagatttgaaattta

SEQ ID NO: 133327 - DNA, 33 bp, Homo sapien
ttcccttaatggaacacagaaaagtacattagg

SEQ ID NO: 133328 - DNA, 33 bp, Homo sapien
ttcccttaatggaacagagaaaagtacattagg

SEQ ID NO: 133329 - DNA, 33 bp, Homo sapien
tttgtacaaacgtagcaatgccttctgaatatt

SEQ ID NO: 133330 - DNA, 33 bp, Homo sapien
tttgtacaaacgtagcgatgccttctgaatatt

SEQ ID NO: 133331 - DNA, 33 bp, Homo sapien
ttaactgagttatacacggggtcaaaggcctaa

SEQ ID NO: 133332 - DNA, 33 bp, Homo sapien
ttaactgagttatacatggggtcaaaggcctaa

SEQ ID NO: 133333 - DNA, 33 bp, Homo sapien
actagtggatcatcacaaataataaactagtga

SEQ ID NO: 133334 - DNA, 33 bp, Homo sapien
actagtggatcatcacgaataataaactagtga

SEQ ID NO: 133335 - DNA, 33 bp, Homo sapien
catttctgtaaatgctaacttaactgatacttt

SEQ ID NO: 133336 - DNA, 33 bp, Homo sapien
catttctgtaaatgctgacttaactgatacttt

SEQ ID NO: 133337 - DNA, 33 bp, Homo sapien
tcaatttttagtctcaatcaccaattatgtgtt

SEQ ID NO: 133338 - DNA, 33 bp, Homo sapien
tcaatttttagtctcagtcaccaattatgtgtt

SEQ ID NO: 133339 - DNA, 33 bp, Homo sapien
tgacttgacaaatatacctgtttaggagtttca

SEQ ID NO: 133340 - DNA, 33 bp, Homo sapien
tgacttgacaaatatatctgtttaggagtttca

SEQ ID NO: 133341 - DNA, 33 bp, Homo sapien
gaaaaaatgcttcatgcacacaggagatgaaat

SEQ ID NO: 133342 - DNA, 33 bp, Homo sapien
gaaaaaatgcttcatgtacacaggagatgaaat

SEQ ID NO: 133343 - DNA, 33 bp, Homo sapien
gagaaactcatttaataacctgtgtgagaacca

SEQ ID NO: 133344 - DNA, 33 bp, Homo sapien
gagaaactcatttaatgacctgtgtgagaacca

SEQ ID NO: 133345 - DNA, 33 bp, Homo sapien
cctctaataagcaagaagggctgaaggcagttt

SEQ ID NO: 133346 - DNA, 33 bp, Homo sapien
cctctaataagcaagatgggctgaaggcagttt

SEQ ID NO: 133347 - DNA, 33 bp, Homo sapien
aaattctaaagcaaaacacttatagtgactgaa

SEQ ID NO: 133348 - DNA, 33 bp, Homo sapien
aaattctaaagcaaaatacttatagtgactgaa

SEQ ID NO: 133349 - DNA, 33 bp, Homo sapien
taactaatgacttcaccctgggcgtagtactca

SEQ ID NO: 133350 - DNA, 33 bp, Homo sapien
taactaatgacttcacgctgggcgtagtactca

SEQ ID NO: 133351 - DNA, 33 bp, Homo sapien
taacaccacagaactgcagacctgagcaacttc

SEQ ID NO: 133352 - DNA, 33 bp, Homo sapien
taacaccacagaactggagacctgagcaacttc

SEQ ID NO: 133353 - DNA, 33 bp, Homo sapien
agaacacctcagaggagacccacagtggatagc

SEQ ID NO: 133354 - DNA, 33 bp, Homo sapien
agaacacctcagaggatacccacagtggatagc

SEQ ID NO: 133355 - DNA, 33 bp, Homo sapien
actaaagtatcgcacacataaaacactacaagc

SEQ ID NO: 133356 - DNA, 33 bp, Homo sapien
actaaagtatcgcacagataaaacactacaagc

SEQ ID NO: 133357 - DNA, 33 bp, Homo sapien
tttacaagaaaaaagcaaacagccctatcaaaa

SEQ ID NO: 133358 - DNA, 33 bp, Homo sapien
tttacaagaaaaaagcgaacagccctatcaaaa

SEQ ID NO: 133359 - DNA, 33 bp, Homo sapien
tagcaagaaacctgctaagacaatttagtgaga

SEQ ID NO: 133360 - DNA, 33 bp, Homo sapien
tagcaagaaacctgctgagacaatttagtgaga

SEQ ID NO: 133361 - DNA, 33 bp, Homo sapien
gtagaatttgtccttaaaagtcatgatggaatt

SEQ ID NO: 133362 - DNA, 33 bp, Homo sapien
gtagaatttgtccttagaagtcatgatggaatt

SEQ ID NO: 133363 - DNA, 33 bp, Homo sapien
tgctacagtcgcacaaggcgatagaaaccatag

SEQ ID NO: 133364 - DNA, 33 bp, Homo sapien
tgctacagtcgcacaatgcgatagaaaccatag

SEQ ID NO: 133365 - DNA, 33 bp, Homo sapien
ctggttcaccctcatccatggctggtattacag

SEQ ID NO: 133366 - DNA, 33 bp, Homo sapien
ctggttcaccctcatctatggctggtattacag

SEQ ID NO: 133367 - DNA, 33 bp, Homo sapien
tactatatgtttgtataaaagctaggatatatg

SEQ ID NO: 133368 - DNA, 33 bp, Homo sapien
tactatatgtttgtatgaaagctaggatatatg

SEQ ID NO: 133369 - DNA, 33 bp, Homo sapien
ttggtcttaatttatcccgtggctctgtatttt

SEQ ID NO: 133370 - DNA, 33 bp, Homo sapien
ttggtcttaatttatctcgtggctctgtatttt

SEQ ID NO: 133371 - DNA, 33 bp, Homo sapien
tctctcttacaatttccatttgaaacctcttca

SEQ ID NO: 133372 - DNA, 33 bp, Homo sapien
tctctcttacaatttctatttgaaacctcttca

SEQ ID NO: 133373 - DNA, 33 bp, Homo sapien
aattcatattttgtgacaagcttgcaaatgtga

SEQ ID NO: 133374 - DNA, 33 bp, Homo sapien
aattcatattttgtgataagcttgcaaatgtga

SEQ ID NO: 133375 - DNA, 33 bp, Homo sapien
gtagatagttgctgcgcattgttataaaatcaa

SEQ ID NO: 133376 - DNA, 33 bp, Homo sapien
gtagatagttgctgcgtattgttataaaatcaa

SEQ ID NO: 133377 - DNA, 33 bp, Homo sapien
ataaaatcaaatcagaactgtcataagtggtgt

SEQ ID NO: 133378 - DNA, 33 bp, Homo sapien
ataaaatcaaatcagagctgtcataagtggtgt

SEQ ID NO: 133379 - DNA, 33 bp, Homo sapien
tgcgctccactccaaaaagacacatagcttcat

SEQ ID NO: 133380 - DNA, 33 bp, Homo sapien
tgcgctccactccaaagagacacatagcttcat

SEQ ID NO: 133381 - DNA, 33 bp, Homo sapien
tgttagtttccacatacgttttccctgtgttgt

SEQ ID NO: 133382 - DNA, 33 bp, Homo sapien
tgttagtttccacatatgttttccctgtgttgt

SEQ ID NO: 133383 - DNA, 33 bp, Homo sapien
agttttactgtccactcagtgatctgaaggctt

SEQ ID NO: 133384 - DNA, 33 bp, Homo sapien
agttttactgtccacttagtgatctgaaggctt

SEQ ID NO: 133385 - DNA, 33 bp, Homo sapien
catggacctgtgttctcactttacactgagtga

SEQ ID NO: 133386 - DNA, 33 bp, Homo sapien
catggacctgtgttcttactttacactgagtga

SEQ ID NO: 133387 - DNA, 33 bp, Homo sapien
tgctcctgagtattctaaccctggtttatttat

SEQ ID NO: 133388 - DNA, 33 bp, Homo sapien
tgctcctgagtattctcaccctggtttatttat

SEQ ID NO: 133389 - DNA, 33 bp, Homo sapien
tactatcagttacaacacagctaggatcctacc

SEQ ID NO: 133390 - DNA, 33 bp, Homo sapien
tactatcagttacaacgcagctaggatcctacc

SEQ ID NO: 133391 - DNA, 33 bp, Homo sapien
tgaaatacctcagtgaagcagaaaacagaaacc

SEQ ID NO: 133392 - DNA, 33 bp, Homo sapien
tgaaatacctcagtgaggcagaaaacagaaacc

SEQ ID NO: 133393 - DNA, 33 bp, Homo sapien
agttattaatctgtaactgagtttctattaggt

SEQ ID NO: 133394 - DNA, 33 bp, Homo sapien
agttattaatctgtaattgagtttctattaggt

SEQ ID NO: 133395 - DNA, 33 bp, Homo sapien
gtcaggaagacatgggaagaactactattttag

SEQ ID NO: 133396 - DNA, 33 bp, Homo sapien
gtcaggaagacatggggagaactactattttag

SEQ ID NO: 133397 - DNA, 33 bp, Homo sapien
ctttatgggaaggttgaaactagaccagtgctt

SEQ ID NO: 133398 - DNA, 33 bp, Homo sapien
ctttatgggaaggttggaactagaccagtgctt

SEQ ID NO: 133399 - DNA, 33 bp, Homo sapien
tagacacagtattctccagaagtcctatcctac

SEQ ID NO: 133400 - DNA, 33 bp, Homo sapien
tagacacagtattctctagaagtcctatcctac

SEQ ID NO: 133401 - DNA, 33 bp, Homo sapien
atgcaaatctagagaggatataagtcaggagat

SEQ ID NO: 133402 - DNA, 33 bp, Homo sapien
atgcaaatctagagagtatataagtcaggagat

SEQ ID NO: 133403 - DNA, 33 bp, Homo sapien
aaataactgtctaataaggtaatgtttgagcag

SEQ ID NO: 133404 - DNA, 33 bp, Homo sapien
aaataactgtctaatagggtaatgtttgagcag

SEQ ID NO: 133405 - DNA, 33 bp, Homo sapien
acaactgggtaattgaagtctctattattattg

SEQ ID NO: 133406 - DNA, 33 bp, Homo sapien
acaactgggtaattgatgtctctattattattg

SEQ ID NO: 133407 - DNA, 33 bp, Homo sapien
ccactattaggtaagcacagggagttagttatt

SEQ ID NO: 133408 - DNA, 33 bp, Homo sapien
ccactattaggtaagcccagggagttagttatt

SEQ ID NO: 133409 - DNA, 33 bp, Homo sapien
ataatcttcagtccttatccacattttgccaaa

SEQ ID NO: 133410 - DNA, 33 bp, Homo sapien
ataatcttcagtccttgtccacattttgccaaa

SEQ ID NO: 133411 - DNA, 33 bp, Homo sapien
acacattaagggtagccaggatgagaattacca

SEQ ID NO: 133412 - DNA, 33 bp, Homo sapien
acacattaagggtagctaggatgagaattacca

SEQ ID NO: 133413 - DNA, 33 bp, Homo sapien
atcactcacagattgaacaaaaatttggtgcat

SEQ ID NO: 133414 - DNA, 33 bp, Homo sapien
atcactcacagattgagcaaaaatttggtgcat

SEQ ID NO: 133415 - DNA, 33 bp, Homo sapien
gctgaattttaataacccatttgagatctcaaa

SEQ ID NO: 133416 - DNA, 33 bp, Homo sapien
gctgaattttaataactcatttgagatctcaaa

SEQ ID NO: 133417 - DNA, 33 bp, Homo sapien
gatcacgatcaaatgtaaactggttgttcttgg

SEQ ID NO: 133418 - DNA, 33 bp, Homo sapien
gatcacgatcaaatgtgaactggttgttcttgg

SEQ ID NO: 133419 - DNA, 33 bp, Homo sapien
ccgaattaaagtaccaaggttaggcataaagaa

SEQ ID NO: 133420 - DNA, 33 bp, Homo sapien
ccgaattaaagtaccagggttaggcataaagaa

SEQ ID NO: 133421 - DNA, 33 bp, Homo sapien
gcttcatggaagaagacggcgtatgaaatttgc

SEQ ID NO: 133422 - DNA, 33 bp, Homo sapien
gcttcatggaagaagatggcgtatgaaatttgc

SEQ ID NO: 133423 - DNA, 33 bp, Homo sapien
tagattctatggtagcacctcctaacatactgg

SEQ ID NO: 133424 - DNA, 33 bp, Homo sapien
tagattctatggtagcgcctcctaacatactgg

SEQ ID NO: 133425 - DNA, 33 bp, Homo sapien
gagcagtctcacagggaaatcctttgctgggaa

SEQ ID NO: 133426 - DNA, 33 bp, Homo sapien
gagcagtctcacagggtaatcctttgctgggaa

SEQ ID NO: 133427 - DNA, 33 bp, Homo sapien
ttttaatgctaagtaacgatggaaaagatataa

SEQ ID NO: 133428 - DNA, 33 bp, Homo sapien
ttttaatgctaagtaatgatggaaaagatataa

SEQ ID NO: 133429 - DNA, 33 bp, Homo sapien
gagcagggcatgatgacggaaataaaaatcaaa

SEQ ID NO: 133430 - DNA, 33 bp, Homo sapien
gagcagggcatgatgatggaaataaaaatcaaa

SEQ ID NO: 133431 - DNA, 33 bp, Homo sapien
aaagttcattgaaaaactcccaagaggaaacaa

SEQ ID NO: 133432 - DNA, 33 bp, Homo sapien
aaagttcattgaaaaagtcccaagaggaaacaa

SEQ ID NO: 133433 - DNA, 33 bp, Homo sapien
cctcctgagactcttcactaacaggaggcttcc

SEQ ID NO: 133434 - DNA, 33 bp, Homo sapien
cctcctgagactcttcgctaacaggaggcttcc

SEQ ID NO: 133435 - DNA, 33 bp, Homo sapien
gtgacaaagcaggtaaatcatgacagcaacact

SEQ ID NO: 133436 - DNA, 33 bp, Homo sapien
gtgacaaagcaggtaattcatgacagcaacact

SEQ ID NO: 133437 - DNA, 33 bp, Homo sapien
tgggtcttgattatcacgagatcactgatggaa

SEQ ID NO: 133438 - DNA, 33 bp, Homo sapien
tgggtcttgattatcatgagatcactgatggaa

SEQ ID NO: 133439 - DNA, 33 bp, Homo sapien
gctctggagccatttccacactgactggaacca

SEQ ID NO: 133440 - DNA, 33 bp, Homo sapien
gctctggagccatttctacactgactggaacca

SEQ ID NO: 133441 - DNA, 33 bp, Homo sapien
tgaaacaaactacaacaatgcggtttttaattc

SEQ ID NO: 133442 - DNA, 33 bp, Homo sapien
tgaaacaaactacaacgatgcggtttttaattc

SEQ ID NO: 133443 - DNA, 33 bp, Homo sapien
ctggtccattcacgaagagaatttaatttgtct

SEQ ID NO: 133444 - DNA, 33 bp, Homo sapien
ctggtccattcacgaatagaatttaatttgtct

SEQ ID NO: 133445 - DNA, 33 bp, Homo sapien
taacctgaccagagacaatggctattcagtgac

SEQ ID NO: 133446 - DNA, 33 bp, Homo sapien
taacctgaccagagacgatggctattcagtgac

SEQ ID NO: 133447 - DNA, 33 bp, Homo sapien
aattttgagttttgaaagcagaaatgtataaga

SEQ ID NO: 133448 - DNA, 33 bp, Homo sapien
aattttgagttttgaatgcagaaatgtataaga

SEQ ID NO: 133449 - DNA, 33 bp, Homo sapien
gttataccaatggagaagtgatgaaattgggcc

SEQ ID NO: 133450 - DNA, 33 bp, Homo sapien
gttataccaatggagaggtgatgaaattgggcc

SEQ ID NO: 133451 - DNA, 33 bp, Homo sapien
gcctagccaattagacacactttaggcaatcca

SEQ ID NO: 133452 - DNA, 33 bp, Homo sapien
gcctagccaattagacgcactttaggcaatcca

SEQ ID NO: 133453 - DNA, 33 bp, Homo sapien
tataaggagataatgacagcaccaagtgaacaa

SEQ ID NO: 133454 - DNA, 33 bp, Homo sapien
tataaggagataatgatagcaccaagtgaacaa

SEQ ID NO: 133455 - DNA, 33 bp, Homo sapien
ctttcatttcagaaggcaacaatgaacggaatc

SEQ ID NO: 133456 - DNA, 33 bp, Homo sapien
ctttcatttcagaaggtaacaatgaacggaatc

SEQ ID NO: 133457 - DNA, 33 bp, Homo sapien
aaggttgggccacccacatattttgagagtagt

SEQ ID NO: 133458 - DNA, 33 bp, Homo sapien
aaggttgggccacccagatattttgagagtagt

SEQ ID NO: 133459 - DNA, 33 bp, Homo sapien
caaaaagctatgggaaaataacaaaaataataa

SEQ ID NO: 133460 - DNA, 33 bp, Homo sapien
caaaaagctatgggaagataacaaaaataataa

SEQ ID NO: 133461 - DNA, 33 bp, Homo sapien
ggtaaaatgactaaaacggcaagtgttaacttt

SEQ ID NO: 133462 - DNA, 33 bp, Homo sapien
ggtaaaatgactaaaatggcaagtgttaacttt

SEQ ID NO: 133463 - DNA, 33 bp, Homo sapien
aaaaacctaccaatgcaacaaatggtgctaagc

SEQ ID NO: 133464 - DNA, 33 bp, Homo sapien
aaaaacctaccaatgccacaaatggtgctaagc

SEQ ID NO: 133465 - DNA, 33 bp, Homo sapien
ggcagaagctccataaatcatctatcccagtaa

SEQ ID NO: 133466 - DNA, 33 bp, Homo sapien
ggcagaagctccataagtcatctatcccagtaa

SEQ ID NO: 133467 - DNA, 33 bp, Homo sapien
ggaatactgtgtcctgcaaccggagaaataaat

SEQ ID NO: 133468 - DNA, 33 bp, Homo sapien
ggaatactgtgtcctggaaccggagaaataaat

SEQ ID NO: 133469 - DNA, 33 bp, Homo sapien
gcagcctgttaagacaactacacagaggaaata

SEQ ID NO: 133470 - DNA, 33 bp, Homo sapien
gcagcctgttaagacacctacacagaggaaata

SEQ ID NO: 133471 - DNA, 33 bp, Homo sapien
aaactctcgaagtaggaatggttttcttctttt

SEQ ID NO: 133472 - DNA, 33 bp, Homo sapien
aaactctcgaagtaggtatggttttcttctttt

SEQ ID NO: 133473 - DNA, 33 bp, Homo sapien
aagtgcctacctactcactaatcgcaggtgcaa

SEQ ID NO: 133474 - DNA, 33 bp, Homo sapien
aagtgcctacctactcgctaatcgcaggtgcaa

SEQ ID NO: 133475 - DNA, 33 bp, Homo sapien
tgggaatgtacaaaaccgacaaagggctcagaa

SEQ ID NO: 133476 - DNA, 33 bp, Homo sapien
tgggaatgtacaaaactgacaaagggctcagaa

SEQ ID NO: 133477 - DNA, 33 bp, Homo sapien
aagcagaggtaagtcccggaaaaccatgtggga

SEQ ID NO: 133478 - DNA, 33 bp, Homo sapien
aagcagaggtaagtcctggaaaaccatgtggga

SEQ ID NO: 133479 - DNA, 33 bp, Homo sapien
taatcacccaggtaaaaaagttcaagaataagt

SEQ ID NO: 133480 - DNA, 33 bp, Homo sapien
taatcacccaggtaaagaagttcaagaataagt

SEQ ID NO: 133481 - DNA, 33 bp, Homo sapien
ttgccttcccctgggaaactgcatttctgacgc

SEQ ID NO: 133482 - DNA, 33 bp, Homo sapien
ttgccttcccctgggatactgcatttctgacgc

SEQ ID NO: 133483 - DNA, 33 bp, Homo sapien
gttgtggctgagattacattgtagtttctaaaa

SEQ ID NO: 133484 - DNA, 33 bp, Homo sapien
gttgtggctgagattatattgtagtttctaaaa

SEQ ID NO: 133485 - DNA, 33 bp, Homo sapien
cttattttggttttcaaattcacttccctgttt

SEQ ID NO: 133486 - DNA, 33 bp, Homo sapien
cttattttggttttcagattcacttccctgttt

SEQ ID NO: 133487 - DNA, 33 bp, Homo sapien
ctgaaccatcattagaacataatgcaataatca

SEQ ID NO: 133488 - DNA, 33 bp, Homo sapien
ctgaaccatcattagagcataatgcaataatca

SEQ ID NO: 133489 - DNA, 33 bp, Homo sapien
tttgttactcactatggaatcctgggaaagaca

SEQ ID NO: 133490 - DNA, 33 bp, Homo sapien
tttgttactcactatgtaatcctgggaaagaca

SEQ ID NO: 133491 - DNA, 33 bp, Homo sapien
aagccaagattgaaaccaatgttctgactggaa

SEQ ID NO: 133492 - DNA, 33 bp, Homo sapien
aagccaagattgaaactaatgttctgactggaa

SEQ ID NO: 133493 - DNA, 33 bp, Homo sapien
aaggcgttattttggcaactcactgaaggaaat

SEQ ID NO: 133494 - DNA, 33 bp, Homo sapien
aaggcgttattttggccactcactgaaggaaat

SEQ ID NO: 133495 - DNA, 33 bp, Homo sapien
tttccgctgagatttacagtacagccttcaaag

SEQ ID NO: 133496 - DNA, 33 bp, Homo sapien
tttccgctgagatttagagtacagccttcaaag

SEQ ID NO: 133497 - DNA, 33 bp, Homo sapien
gtctattttgttagaacacaggtttacgtaaat

SEQ ID NO: 133498 - DNA, 33 bp, Homo sapien
gtctattttgttagaatacaggtttacgtaaat

SEQ ID NO: 133499 - DNA, 33 bp, Homo sapien
tgagcagtaatttctaacctaatggacagctgg

SEQ ID NO: 133500 - DNA, 33 bp, Homo sapien
tgagcagtaatttctagcctaatggacagctgg

SEQ ID NO: 133501 - DNA, 33 bp, Homo sapien
attataaaatctaacacccagccatgaaaggaa

SEQ ID NO: 133502 - DNA, 33 bp, Homo sapien
attataaaatctaacatccagccatgaaaggaa

SEQ ID NO: 133503 - DNA, 33 bp, Homo sapien
ttagaactggtagaaacattggtaagtgcaaaa

SEQ ID NO: 133504 - DNA, 33 bp, Homo sapien
ttagaactggtagaaagattggtaagtgcaaaa

SEQ ID NO: 133505 - DNA, 33 bp, Homo sapien
ctggtggtgaaccagactcatgaagacctcata

SEQ ID NO: 133506 - DNA, 33 bp, Homo sapien
ctggtggtgaaccagagtcatgaagacctcata

SEQ ID NO: 133507 - DNA, 33 bp, Homo sapien
agactttttcactctccacagacttttctacta

SEQ ID NO: 133508 - DNA, 33 bp, Homo sapien
agactttttcactctctacagacttttctacta

SEQ ID NO: 133509 - DNA, 33 bp, Homo sapien
aaatgttctcaaggaccctgttatttccctctc

SEQ ID NO: 133510 - DNA, 33 bp, Homo sapien
aaatgttctcaaggactctgttatttccctctc

SEQ ID NO: 133511 - DNA, 33 bp, Homo sapien
agcagaaggcagctgactatattcctgctgtcg

SEQ ID NO: 133512 - DNA, 33 bp, Homo sapien
agcagaaggcagctgattatattcctgctgtcg

SEQ ID NO: 133513 - DNA, 33 bp, Homo sapien
taatacagttgagacaaatagaaaacaaatact

SEQ ID NO: 133514 - DNA, 33 bp, Homo sapien
taatacagttgagacagatagaaaacaaatact

SEQ ID NO: 133515 - DNA, 33 bp, Homo sapien
gcacacattttggatacgttggagtctaatata

SEQ ID NO: 133516 - DNA, 33 bp, Homo sapien
gcacacattttggatatgttggagtctaatata

SEQ ID NO: 133517 - DNA, 33 bp, Homo sapien
ggacatgacctcatcagtcctagctttggaata

SEQ ID NO: 133518 - DNA, 33 bp, Homo sapien
ggacatgacctcatcattcctagctttggaata

SEQ ID NO: 133519 - DNA, 33 bp, Homo sapien
gttaagagaactatcaagaggattgagaagcta

SEQ ID NO: 133520 - DNA, 33 bp, Homo sapien
gttaagagaactatcaggaggattgagaagcta

SEQ ID NO: 133521 - DNA, 33 bp, Homo sapien
aaggagcttgaatttcacacagtcacaccagga

SEQ ID NO: 133522 - DNA, 33 bp, Homo sapien
aaggagcttgaatttcgcacagtcacaccagga

SEQ ID NO: 133523 - DNA, 33 bp, Homo sapien
ctacgatggcatggctcaacaattagggtagag

SEQ ID NO: 133524 - DNA, 33 bp, Homo sapien
ctacgatggcatggcttaacaattagggtagag

SEQ ID NO: 133525 - DNA, 33 bp, Homo sapien
tattcaaattaaatgacgtctgcttccatcctg

SEQ ID NO: 133526 - DNA, 33 bp, Homo sapien
tattcaaattaaatgatgtctgcttccatcctg

SEQ ID NO: 133527 - DNA, 33 bp, Homo sapien
cattaattcctcatggaagaaggtacaaagaca

SEQ ID NO: 133528 - DNA, 33 bp, Homo sapien
cattaattcctcatgggagaaggtacaaagaca

SEQ ID NO: 133529 - DNA, 33 bp, Homo sapien
aacctatgcggctcataaagttacataattaga

SEQ ID NO: 133530 - DNA, 33 bp, Homo sapien
aacctatgcggctcatgaagttacataattaga

SEQ ID NO: 133531 - DNA, 33 bp, Homo sapien
tattgggcacaataataaccgatgccaggattt

SEQ ID NO: 133532 - DNA, 33 bp, Homo sapien
tattgggcacaataatgaccgatgccaggattt

SEQ ID NO: 133533 - DNA, 33 bp, Homo sapien
tcctgcatgcttccaaataaactctcagaaagg

SEQ ID NO: 133534 - DNA, 33 bp, Homo sapien
tcctgcatgcttccaagtaaactctcagaaagg

SEQ ID NO: 133535 - DNA, 33 bp, Homo sapien
cttttatagcaatgggccagtgaggtcttagca

SEQ ID NO: 133536 - DNA, 33 bp, Homo sapien
cttttatagcaatgggtcagtgaggtcttagca

SEQ ID NO: 133537 - DNA, 33 bp, Homo sapien
gacttgctgcattacactgccctttccagatct

SEQ ID NO: 133538 - DNA, 33 bp, Homo sapien
gacttgctgcattacagtgccctttccagatct

SEQ ID NO: 133539 - DNA, 33 bp, Homo sapien
ctcagattaatgtatcccagccctctgaaagcc

SEQ ID NO: 133540 - DNA, 33 bp, Homo sapien
ctcagattaatgtatctcagccctctgaaagcc

SEQ ID NO: 133541 - DNA, 33 bp, Homo sapien
attgacttggagataactattgtgactattagc

SEQ ID NO: 133542 - DNA, 33 bp, Homo sapien
attgacttggagataagtattgtgactattagc

SEQ ID NO: 133543 - DNA, 33 bp, Homo sapien
agggtcaaccagcttcaaatcccaattctttct

SEQ ID NO: 133544 - DNA, 33 bp, Homo sapien
agggtcaaccagcttcgaatcccaattctttct

SEQ ID NO: 133545 - DNA, 33 bp, Homo sapien
tccattaaaatccaaacgcgaaactgtcacaac

SEQ ID NO: 133546 - DNA, 33 bp, Homo sapien
tccattaaaatccaaatgcgaaactgtcacaac

SEQ ID NO: 133547 - DNA, 33 bp, Homo sapien
aaataattgtgcattacatttttcttgtgtttt

SEQ ID NO: 133548 - DNA, 33 bp, Homo sapien
aaataattgtgcattatatttttcttgtgtttt

SEQ ID NO: 133549 - DNA, 33 bp, Homo sapien
ttaccctgcccttctacgttcttcagtcttaat

SEQ ID NO: 133550 - DNA, 33 bp, Homo sapien
ttaccctgcccttctatgttcttcagtcttaat

SEQ ID NO: 133551 - DNA, 33 bp, Homo sapien
atgagccatgctgagacatgcagggtttgtcta

SEQ ID NO: 133552 - DNA, 33 bp, Homo sapien
atgagccatgctgagagatgcagggtttgtcta

SEQ ID NO: 133553 - DNA, 33 bp, Homo sapien
ctctacttcccatgccgcatattgctgttgagc

SEQ ID NO: 133554 - DNA, 33 bp, Homo sapien
ctctacttcccatgcctcatattgctgttgagc

SEQ ID NO: 133555 - DNA, 33 bp, Homo sapien
ggctgcacttcataataagggaccaagcactca

SEQ ID NO: 133556 - DNA, 33 bp, Homo sapien
ggctgcacttcataatgagggaccaagcactca

SEQ ID NO: 133557 - DNA, 33 bp, Homo sapien
actctgagaaggtcatcaaccaagctcagtttt

SEQ ID NO: 133558 - DNA, 33 bp, Homo sapien
actctgagaaggtcattaaccaagctcagtttt

SEQ ID NO: 133559 - DNA, 33 bp, Homo sapien
tgcttagcatggctgaagcataacagaaggcca

SEQ ID NO: 133560 - DNA, 33 bp, Homo sapien
tgcttagcatggctgaggcataacagaaggcca

SEQ ID NO: 133561 - DNA, 33 bp, Homo sapien
aaattctcaagtgacaatgatgctaggatcatg

SEQ ID NO: 133562 - DNA, 33 bp, Homo sapien
aaattctcaagtgacagtgatgctaggatcatg

SEQ ID NO: 133563 - DNA, 33 bp, Homo sapien
cttggggattaccacacctgcatgttatatgga

SEQ ID NO: 133564 - DNA, 33 bp, Homo sapien
cttggggattaccacatctgcatgttatatgga

SEQ ID NO: 133565 - DNA, 33 bp, Homo sapien
agagctcacctcccctcaaatatgggaacttca

SEQ ID NO: 133566 - DNA, 33 bp, Homo sapien
agagctcacctcccctgaaatatgggaacttca

SEQ ID NO: 133567 - DNA, 33 bp, Homo sapien
acacaggaaaaatcccccacttgccagtttggc

SEQ ID NO: 133568 - DNA, 33 bp, Homo sapien
acacaggaaaaatccctcacttgccagtttggc

SEQ ID NO: 133569 - DNA, 33 bp, Homo sapien
tgcctttatgttgaaccaggaaaatgaactccc

SEQ ID NO: 133570 - DNA, 33 bp, Homo sapien
tgcctttatgttgaactaggaaaatgaactccc

SEQ ID NO: 133571 - DNA, 33 bp, Homo sapien
tgactgaagttgaaaacaggcttctcagtgggg

SEQ ID NO: 133572 - DNA, 33 bp, Homo sapien
tgactgaagttgaaaataggcttctcagtgggg

SEQ ID NO: 133573 - DNA, 33 bp, Homo sapien
atataagttgtggaaaggcagtacagtacttac

SEQ ID NO: 133574 - DNA, 33 bp, Homo sapien
atataagttgtggaaatgcagtacagtacttac

SEQ ID NO: 133575 - DNA, 33 bp, Homo sapien
tagagataatagtaccaaataatacgattgttg

SEQ ID NO: 133576 - DNA, 33 bp, Homo sapien
tagagataatagtaccgaataatacgattgttg

SEQ ID NO: 133577 - DNA, 33 bp, Homo sapien
gatgtaatattagaacacactgttttgccagcc

SEQ ID NO: 133578 - DNA, 33 bp, Homo sapien
gatgtaatattagaacgcactgttttgccagcc

SEQ ID NO: 133579 - DNA, 33 bp, Homo sapien
gtataaggaatagagacggtacacatggagcac

SEQ ID NO: 133580 - DNA, 33 bp, Homo sapien
gtataaggaatagagatggtacacatggagcac

SEQ ID NO: 133581 - DNA, 33 bp, Homo sapien
atacctgagtggtccacaggctccagattcaag

SEQ ID NO: 133582 - DNA, 33 bp, Homo sapien
atacctgagtggtccagaggctccagattcaag

SEQ ID NO: 133583 - DNA, 33 bp, Homo sapien
gtggaagctggggctacaaagagagcctggaac

SEQ ID NO: 133584 - DNA, 33 bp, Homo sapien
gtggaagctggggctataaagagagcctggaac

SEQ ID NO: 133585 - DNA, 33 bp, Homo sapien
agggcctatgtgaggacgtgcctttggaaagcc

SEQ ID NO: 133586 - DNA, 33 bp, Homo sapien
agggcctatgtgaggatgtgcctttggaaagcc

SEQ ID NO: 133587 - DNA, 33 bp, Homo sapien
cctgccctgagacttaccgagtaaagacatagg

SEQ ID NO: 133588 - DNA, 33 bp, Homo sapien
cctgccctgagacttatcgagtaaagacatagg

SEQ ID NO: 133589 - DNA, 33 bp, Homo sapien
ggctatccaggcaccactagaatgactgaaagg

SEQ ID NO: 133590 - DNA, 33 bp, Homo sapien
ggctatccaggcaccagtagaatgactgaaagg

SEQ ID NO: 133591 - DNA, 33 bp, Homo sapien
taccgcagctcatatacggtctatcctgcaggc

SEQ ID NO: 133592 - DNA, 33 bp, Homo sapien
taccgcagctcatatagggtctatcctgcaggc

SEQ ID NO: 133593 - DNA, 33 bp, Homo sapien
tgccttaaaaaaacaaagaagccagcaaataaa

SEQ ID NO: 133594 - DNA, 33 bp, Homo sapien
tgccttaaaaaaacaaggaagccagcaaataaa

SEQ ID NO: 133595 - DNA, 33 bp, Homo sapien
aggtgggtcagtgatacggaaataaaagctgac

SEQ ID NO: 133596 - DNA, 33 bp, Homo sapien
aggtgggtcagtgatatggaaataaaagctgac

SEQ ID NO: 133597 - DNA, 33 bp, Homo sapien
cctgaccagctcagacagagtattagtcattta

SEQ ID NO: 133598 - DNA, 33 bp, Homo sapien
cctgaccagctcagacggagtattagtcattta

SEQ ID NO: 133599 - DNA, 33 bp, Homo sapien
ctttccaggtcacaagcagacagtctgttgcct

SEQ ID NO: 133600 - DNA, 33 bp, Homo sapien
ctttccaggtcacaagtagacagtctgttgcct

SEQ ID NO: 133601 - DNA, 33 bp, Homo sapien
gtatgtatgcccctgaataaataggttctgttg

SEQ ID NO: 133602 - DNA, 33 bp, Homo sapien
gtatgtatgcccctgagtaaataggttctgttg

SEQ ID NO: 133603 - DNA, 33 bp, Homo sapien
gtttctaaatctaagaacagaaattttcaagaa

SEQ ID NO: 133604 - DNA, 33 bp, Homo sapien
gtttctaaatctaagatcagaaattttcaagaa

SEQ ID NO: 133605 - DNA, 33 bp, Homo sapien
tcactttattcttcaagttcctgcaagaagcct

SEQ ID NO: 133606 - DNA, 33 bp, Homo sapien
tcactttattcttcaatttcctgcaagaagcct

SEQ ID NO: 133607 - DNA, 33 bp, Homo sapien
gatagtgaactaaagacgatgaaaggttccagt

SEQ ID NO: 133608 - DNA, 33 bp, Homo sapien
gatagtgaactaaagatgatgaaaggttccagt

SEQ ID NO: 133609 - DNA, 33 bp, Homo sapien
attatgagagtgataaggtgagcctggcttcag

SEQ ID NO: 133610 - DNA, 33 bp, Homo sapien
attatgagagtgataatgtgagcctggcttcag

SEQ ID NO: 133611 - DNA, 33 bp, Homo sapien
gagagggacctgcaaaagaaaatgtatgctttc

SEQ ID NO: 133612 - DNA, 33 bp, Homo sapien
gagagggacctgcaaatgaaaatgtatgctttc

SEQ ID NO: 133613 - DNA, 33 bp, Homo sapien
tagtgacttgtctgaaattacatgcagctgggg

SEQ ID NO: 133614 - DNA, 33 bp, Homo sapien
tagtgacttgtctgaagttacatgcagctgggg

SEQ ID NO: 133615 - DNA, 33 bp, Homo sapien
attttttaaaaatgacaaagagcctgaacagac

SEQ ID NO: 133616 - DNA, 33 bp, Homo sapien
attttttaaaaatgaccaagagcctgaacagac

SEQ ID NO: 133617 - DNA, 33 bp, Homo sapien
actatgacacctagagaacagcttacacttttt

SEQ ID NO: 133618 - DNA, 33 bp, Homo sapien
actatgacacctagaggacagcttacacttttt

SEQ ID NO: 133619 - DNA, 33 bp, Homo sapien
aaacaaccaggtgctcacattgggactaatcaa

SEQ ID NO: 133620 - DNA, 33 bp, Homo sapien
aaacaaccaggtgctcgcattgggactaatcaa

SEQ ID NO: 133621 - DNA, 33 bp, Homo sapien
cagtgtagattaagtacagtcaatagatgtctt

SEQ ID NO: 133622 - DNA, 33 bp, Homo sapien
cagtgtagattaagtatagtcaatagatgtctt

SEQ ID NO: 133623 - DNA, 33 bp, Homo sapien
accttacaagaaaagcaatcaggggtcaccctt

SEQ ID NO: 133624 - DNA, 33 bp, Homo sapien
accttacaagaaaagcgatcaggggtcaccctt

SEQ ID NO: 133625 - DNA, 33 bp, Homo sapien
gtcacccttccaaaaacagtcagtgccagggct

SEQ ID NO: 133626 - DNA, 33 bp, Homo sapien
gtcacccttccaaaaagagtcagtgccagggct

SEQ ID NO: 133627 - DNA, 33 bp, Homo sapien
cctggattatccaggccgacctgatataatctc

SEQ ID NO: 133628 - DNA, 33 bp, Homo sapien
cctggattatccaggctgacctgatataatctc

SEQ ID NO: 133629 - DNA, 33 bp, Homo sapien
catgtgctcctaaaggcagaagaaaaagagaga

SEQ ID NO: 133630 - DNA, 33 bp, Homo sapien
catgtgctcctaaaggtagaagaaaaagagaga

SEQ ID NO: 133631 - DNA, 33 bp, Homo sapien
tgtcactagagaccaacgggcttaacagcaaga

SEQ ID NO: 133632 - DNA, 33 bp, Homo sapien
tgtcactagagaccaatgggcttaacagcaaga

SEQ ID NO: 133633 - DNA, 33 bp, Homo sapien
cttccttcattggctacgcgagtttattccaca

SEQ ID NO: 133634 - DNA, 33 bp, Homo sapien
cttccttcattggctatgcgagtttattccaca

SEQ ID NO: 133635 - DNA, 33 bp, Homo sapien
gataagctgaaagataaaggatcctaaaaggca

SEQ ID NO: 133636 - DNA, 33 bp, Homo sapien
gataagctgaaagatagaggatcctaaaaggca

SEQ ID NO: 133637 - DNA, 33 bp, Homo sapien
cataaacttgtctgcacattttggttttggttt

SEQ ID NO: 133638 - DNA, 33 bp, Homo sapien
cataaacttgtctgcatattttggttttggttt

SEQ ID NO: 133639 - DNA, 33 bp, Homo sapien
ctaaactgagacttggaatagatcattaactgt

SEQ ID NO: 133640 - DNA, 33 bp, Homo sapien
ctaaactgagacttgggatagatcattaactgt

SEQ ID NO: 133641 - DNA, 33 bp, Homo sapien
ataatgaaaatgcaaacattgctgtcaaaaacg

SEQ ID NO: 133642 - DNA, 33 bp, Homo sapien
ataatgaaaatgcaaatattgctgtcaaaaacg

SEQ ID NO: 133643 - DNA, 33 bp, Homo sapien
ttggaataggacttaaaaagttatctaggtcaa

SEQ ID NO: 133644 - DNA, 33 bp, Homo sapien
ttggaataggacttaagaagttatctaggtcaa

SEQ ID NO: 133645 - DNA, 33 bp, Homo sapien
ccatccaatctaacaaaactcctgtataatctc

SEQ ID NO: 133646 - DNA, 33 bp, Homo sapien
ccatccaatctaacaagactcctgtataatctc

SEQ ID NO: 133647 - DNA, 33 bp, Homo sapien
aaagagtacaactcacaggacagaaaatgggaa

SEQ ID NO: 133648 - DNA, 33 bp, Homo sapien
aaagagtacaactcacgggacagaaaatgggaa

SEQ ID NO: 133649 - DNA, 33 bp, Homo sapien
atgattctgtttaatacgatttgcgctcttcaa

SEQ ID NO: 133650 - DNA, 33 bp, Homo sapien
atgattctgtttaatatgatttgcgctcttcaa

SEQ ID NO: 133651 - DNA, 33 bp, Homo sapien
atgtcacctggaacccgcctctgaaattcataa

SEQ ID NO: 133652 - DNA, 33 bp, Homo sapien
atgtcacctggaaccctcctctgaaattcataa

SEQ ID NO: 133653 - DNA, 33 bp, Homo sapien
ggatgaatagatcaaacacagaggacttccagg

SEQ ID NO: 133654 - DNA, 33 bp, Homo sapien
ggatgaatagatcaaatacagaggacttccagg

SEQ ID NO: 133655 - DNA, 33 bp, Homo sapien
gaagcaactcacagcactactgtcacctgtgtt

SEQ ID NO: 133656 - DNA, 33 bp, Homo sapien
gaagcaactcacagcattactgtcacctgtgtt

SEQ ID NO: 133657 - DNA, 33 bp, Homo sapien
gaagttgctattgatacctggtaaagttaatga

SEQ ID NO: 133658 - DNA, 33 bp, Homo sapien
gaagttgctattgatatctggtaaagttaatga

SEQ ID NO: 133659 - DNA, 33 bp, Homo sapien
tcatctgattggagcacatctgaatgttaacta

SEQ ID NO: 133660 - DNA, 33 bp, Homo sapien
tcatctgattggagcatatctgaatgttaacta

SEQ ID NO: 133661 - DNA, 33 bp, Homo sapien
gagggctaacaaacacacaggtgagttccctcc

SEQ ID NO: 133662 - DNA, 33 bp, Homo sapien
gagggctaacaaacacgcaggtgagttccctcc

SEQ ID NO: 133663 - DNA, 33 bp, Homo sapien
tctcctgagaaaatggaacagggctggctacca

SEQ ID NO: 133664 - DNA, 33 bp, Homo sapien
tctcctgagaaaatgggacagggctggctacca

SEQ ID NO: 133665 - DNA, 33 bp, Homo sapien
tgaggtggtagggtaggcaagaggccaagaggc

SEQ ID NO: 133666 - DNA, 33 bp, Homo sapien
tgaggtggtagggtagtcaagaggccaagaggc

SEQ ID NO: 133667 - DNA, 33 bp, Homo sapien
agttattgaagcagccacccggaaatgccagat

SEQ ID NO: 133668 - DNA, 33 bp, Homo sapien
agttattgaagcagccgcccggaaatgccagat

SEQ ID NO: 133669 - DNA, 33 bp, Homo sapien
ttgcctgaggtcatagcccccaatttttggcat

SEQ ID NO: 133670 - DNA, 33 bp, Homo sapien
ttgcctgaggtcatagtccccaatttttggcat

SEQ ID NO: 133671 - DNA, 33 bp, Homo sapien
cagttttgatccaagaagggttgaattaacaga

SEQ ID NO: 133672 - DNA, 33 bp, Homo sapien
cagttttgatccaagatgggttgaattaacaga

SEQ ID NO: 133673 - DNA, 33 bp, Homo sapien
caagcatcagtgaacacattcttaactttttaa

SEQ ID NO: 133674 - DNA, 33 bp, Homo sapien
caagcatcagtgaacatattcttaactttttaa

SEQ ID NO: 133675 - DNA, 33 bp, Homo sapien
cctgtcatctaaggccacccctctcctaaacta

SEQ ID NO: 133676 - DNA, 33 bp, Homo sapien
cctgtcatctaaggccgcccctctcctaaacta

SEQ ID NO: 133677 - DNA, 33 bp, Homo sapien
tgcttctttagcaaaacgtgagcatgtgtgagg

SEQ ID NO: 133678 - DNA, 33 bp, Homo sapien
tgcttctttagcaaaatgtgagcatgtgtgagg

SEQ ID NO: 133679 - DNA, 33 bp, Homo sapien
ggctggtgcttcgtgtaacacatgggaagactc

SEQ ID NO: 133680 - DNA, 33 bp, Homo sapien
ggctggtgcttcgtgtgacacatgggaagactc

SEQ ID NO: 133681 - DNA, 33 bp, Homo sapien
cctaaaattggagtgcaaagaaaacaatcaaaa

SEQ ID NO: 133682 - DNA, 33 bp, Homo sapien
cctaaaattggagtgccaagaaaacaatcaaaa

SEQ ID NO: 133683 - DNA, 33 bp, Homo sapien
aatacaaagtcataaacaaaacgagatctaaaa

SEQ ID NO: 133684 - DNA, 33 bp, Homo sapien
aatacaaagtcataaagaaaacgagatctaaaa

SEQ ID NO: 133685 - DNA, 33 bp, Homo sapien
taggagcaaggccaaacagagtatgtatggtgg

SEQ ID NO: 133686 - DNA, 33 bp, Homo sapien
taggagcaaggccaaatagagtatgtatggtgg

SEQ ID NO: 133687 - DNA, 33 bp, Homo sapien
aggaattatcagcctgcactaactgtcaggagt

SEQ ID NO: 133688 - DNA, 33 bp, Homo sapien
aggaattatcagcctgtactaactgtcaggagt

SEQ ID NO: 133689 - DNA, 33 bp, Homo sapien
gttctccaagatagaaggcaactaaaagtcatc

SEQ ID NO: 133690 - DNA, 33 bp, Homo sapien
gttctccaagatagaatgcaactaaaagtcatc

SEQ ID NO: 133691 - DNA, 33 bp, Homo sapien
tgcctgggaattggcaaagtaggaaaaatgcat

SEQ ID NO: 133692 - DNA, 33 bp, Homo sapien
tgcctgggaattggcagagtaggaaaaatgcat

SEQ ID NO: 133693 - DNA, 33 bp, Homo sapien
taaggtccactcacaaggtagttttcccagcag

SEQ ID NO: 133694 - DNA, 33 bp, Homo sapien
taaggtccactcacaatgtagttttcccagcag

SEQ ID NO: 133695 - DNA, 33 bp, Homo sapien
tagaaaataaaaaggtaaagactgagcaatcaa

SEQ ID NO: 133696 - DNA, 33 bp, Homo sapien
tagaaaataaaaaggtgaagactgagcaatcaa

SEQ ID NO: 133697 - DNA, 33 bp, Homo sapien
tcatgagaatgaggaagtggagtggtcttctgg

SEQ ID NO: 133698 - DNA, 33 bp, Homo sapien
tcatgagaatgaggaattggagtggtcttctgg

SEQ ID NO: 133699 - DNA, 33 bp, Homo sapien
gaaaaagggggtctgcaatatagatcattagga

SEQ ID NO: 133700 - DNA, 33 bp, Homo sapien
gaaaaagggggtctgcgatatagatcattagga

SEQ ID NO: 133701 - DNA, 33 bp, Homo sapien
gttgaagtcaggagtacagttagctttgacaga

SEQ ID NO: 133702 - DNA, 33 bp, Homo sapien
gttgaagtcaggagtatagttagctttgacaga

SEQ ID NO: 133703 - DNA, 33 bp, Homo sapien
tgatgatagagaactcaaacagaaacatattca

SEQ ID NO: 133704 - DNA, 33 bp, Homo sapien
tgatgatagagaactcgaacagaaacatattca

SEQ ID NO: 133705 - DNA, 33 bp, Homo sapien
tagctaaactctagccactttctttatactgtt

SEQ ID NO: 133706 - DNA, 33 bp, Homo sapien
tagctaaactctagccgctttctttatactgtt

SEQ ID NO: 133707 - DNA, 33 bp, Homo sapien
ttccatcttcacgtaccccataaaatattcatt

SEQ ID NO: 133708 - DNA, 33 bp, Homo sapien
ttccatcttcacgtacgccataaaatattcatt

SEQ ID NO: 133709 - DNA, 33 bp, Homo sapien
cacatcgtaggtgacaccattttttggatggag

SEQ ID NO: 133710 - DNA, 33 bp, Homo sapien
cacatcgtaggtgacatcattttttggatggag

SEQ ID NO: 133711 - DNA, 33 bp, Homo sapien
aggtaggattagcatcgaaaaagttgggttcaa

SEQ ID NO: 133712 - DNA, 33 bp, Homo sapien
aggtaggattagcatctaaaaagttgggttcaa

SEQ ID NO: 133713 - DNA, 33 bp, Homo sapien
ttgataatttatatggccacttttcttagaagc

SEQ ID NO: 133714 - DNA, 33 bp, Homo sapien
ttgataatttatatggtcacttttcttagaagc

SEQ ID NO: 133715 - DNA, 33 bp, Homo sapien
tatagtttcctacacaatcttatttttcaatgt

SEQ ID NO: 133716 - DNA, 33 bp, Homo sapien
tatagtttcctacacagtcttatttttcaatgt

SEQ ID NO: 133717 - DNA, 33 bp, Homo sapien
catggtagattaaagaccactgtgtcatctgtc

SEQ ID NO: 133718 - DNA, 33 bp, Homo sapien
catggtagattaaagatcactgtgtcatctgtc

SEQ ID NO: 133719 - DNA, 33 bp, Homo sapien
ggatggaaatgacaataaggatctgaagtttac

SEQ ID NO: 133720 - DNA, 33 bp, Homo sapien
ggatggaaatgacaatgaggatctgaagtttac

SEQ ID NO: 133721 - DNA, 33 bp, Homo sapien
gtcatgtacttagtgaagcctcagacgtagcaa

SEQ ID NO: 133722 - DNA, 33 bp, Homo sapien
gtcatgtacttagtgacgcctcagacgtagcaa

SEQ ID NO: 133723 - DNA, 33 bp, Homo sapien
gtagaatgggaagaacagtaaagatatcagact

SEQ ID NO: 133724 - DNA, 33 bp, Homo sapien
gtagaatgggaagaacggtaaagatatcagact

SEQ ID NO: 133725 - DNA, 33 bp, Homo sapien
attaagagtgctatctcaagtgttaacattaag

SEQ ID NO: 133726 - DNA, 33 bp, Homo sapien
attaagagtgctatctgaagtgttaacattaag

SEQ ID NO: 133727 - DNA, 33 bp, Homo sapien
tattctactatatccccgaagccacattttaca

SEQ ID NO: 133728 - DNA, 33 bp, Homo sapien
tattctactatatccctgaagccacattttaca

SEQ ID NO: 133729 - DNA, 33 bp, Homo sapien
cctcagtcacagtgtacaaattttaaatccact

SEQ ID NO: 133730 - DNA, 33 bp, Homo sapien
cctcagtcacagtgtataaattttaaatccact

SEQ ID NO: 133731 - DNA, 33 bp, Homo sapien
gccaggccacacattaacagaggccatattctt

SEQ ID NO: 133732 - DNA, 33 bp, Homo sapien
gccaggccacacattagcagaggccatattctt

SEQ ID NO: 133733 - DNA, 33 bp, Homo sapien
tcagtatggcctggatcaaacataagggagctt

SEQ ID NO: 133734 - DNA, 33 bp, Homo sapien
tcagtatggcctggatgaaacataagggagctt

SEQ ID NO: 133735 - DNA, 33 bp, Homo sapien
aggacttgtcattatcaagccttcattatttaa

SEQ ID NO: 133736 - DNA, 33 bp, Homo sapien
aggacttgtcattatcgagccttcattatttaa

SEQ ID NO: 133737 - DNA, 33 bp, Homo sapien
ttgcatgacttccctacatccagaggtcgtctc

SEQ ID NO: 133738 - DNA, 33 bp, Homo sapien
ttgcatgacttccctatatccagaggtcgtctc

SEQ ID NO: 133739 - DNA, 33 bp, Homo sapien
gtatattcagaagaatcaacaggagaaagaaac

SEQ ID NO: 133740 - DNA, 33 bp, Homo sapien
gtatattcagaagaatgaacaggagaaagaaac

SEQ ID NO: 133741 - DNA, 33 bp, Homo sapien
aagatgactaacttgaaaggcaaagcacgactg

SEQ ID NO: 133742 - DNA, 33 bp, Homo sapien
aagatgactaacttgagaggcaaagcacgactg

SEQ ID NO: 133743 - DNA, 33 bp, Homo sapien
ggtggatcctctgtaaggcagagcaacatgatt

SEQ ID NO: 133744 - DNA, 33 bp, Homo sapien
ggtggatcctctgtaatgcagagcaacatgatt

SEQ ID NO: 133745 - DNA, 33 bp, Homo sapien
ctgaccttctccggcactctacccttccctcct

SEQ ID NO: 133746 - DNA, 33 bp, Homo sapien
ctgaccttctccggcattctacccttccctcct

SEQ ID NO: 133747 - DNA, 33 bp, Homo sapien
tcatagattctgcaagcaaagtttggtggctga

SEQ ID NO: 133748 - DNA, 33 bp, Homo sapien
tcatagattctgcaaggaaagtttggtggctga

SEQ ID NO: 133749 - DNA, 33 bp, Homo sapien
agtgatgaagaaagtaaatgtcctctattcctt

SEQ ID NO: 133750 - DNA, 33 bp, Homo sapien
agtgatgaagaaagtagatgtcctctattcctt

SEQ ID NO: 133751 - DNA, 33 bp, Homo sapien
aaaactggcatcttacaaaaaagggccttgcaa

SEQ ID NO: 133752 - DNA, 33 bp, Homo sapien
aaaactggcatcttacgaaaaagggccttgcaa

SEQ ID NO: 133753 - DNA, 33 bp, Homo sapien
gtgtggccatgttccaataagattttatatcaa

SEQ ID NO: 133754 - DNA, 33 bp, Homo sapien
gtgtggccatgttccagtaagattttatatcaa

SEQ ID NO: 133755 - DNA, 33 bp, Homo sapien
gctaacaacctaagatcaacccaagacccaaga

SEQ ID NO: 133756 - DNA, 33 bp, Homo sapien
gctaacaacctaagatgaacccaagacccaaga

SEQ ID NO: 133757 - DNA, 33 bp, Homo sapien
ggggtaggagaaaaggccattagtgcctgtttt

SEQ ID NO: 133758 - DNA, 33 bp, Homo sapien
ggggtaggagaaaaggtcattagtgcctgtttt

SEQ ID NO: 133759 - DNA, 33 bp, Homo sapien
aagaacttataatcaaatcaagggcatagaaga

SEQ ID NO: 133760 - DNA, 33 bp, Homo sapien
aagaacttataatcaagtcaagggcatagaaga

SEQ ID NO: 133761 - DNA, 33 bp, Homo sapien
aacattttgagtcataacctttcctgctttttt

SEQ ID NO: 133762 - DNA, 33 bp, Homo sapien
aacattttgagtcatatcctttcctgctttttt

SEQ ID NO: 133763 - DNA, 33 bp, Homo sapien
cgagagaacctaaatgcagaaacagaaacaaca

SEQ ID NO: 133764 - DNA, 33 bp, Homo sapien
cgagagaacctaaatggagaaacagaaacaaca

SEQ ID NO: 133765 - DNA, 33 bp, Homo sapien
catatctagtggatagcagagtcggcaattaac

SEQ ID NO: 133766 - DNA, 33 bp, Homo sapien
catatctagtggatagtagagtcggcaattaac

SEQ ID NO: 133767 - DNA, 33 bp, Homo sapien
aagcactttgtatccaagatgtcgcctcctgag

SEQ ID NO: 133768 - DNA, 33 bp, Homo sapien
aagcactttgtatccacgatgtcgcctcctgag

SEQ ID NO: 133769 - DNA, 33 bp, Homo sapien
agataacgtaggaaataaggtgatgagtgttaa

SEQ ID NO: 133770 - DNA, 33 bp, Homo sapien
agataacgtaggaaatgaggtgatgagtgttaa

SEQ ID NO: 133771 - DNA, 33 bp, Homo sapien
aagcttaggaagctgacagattgtgatttgtct

SEQ ID NO: 133772 - DNA, 33 bp, Homo sapien
aagcttaggaagctgagagattgtgatttgtct

SEQ ID NO: 133773 - DNA, 33 bp, Homo sapien
ttccgcctgcctagaacgtccaccgtccaaccc

SEQ ID NO: 133774 - DNA, 33 bp, Homo sapien
ttccgcctgcctagaatgtccaccgtccaaccc

SEQ ID NO: 133775 - DNA, 33 bp, Homo sapien
gttgaaataaggagcacagggcctttatccaca

SEQ ID NO: 133776 - DNA, 33 bp, Homo sapien
gttgaaataaggagcatagggcctttatccaca

SEQ ID NO: 133777 - DNA, 33 bp, Homo sapien
tactttgtaaatcagacatatactctatgccag

SEQ ID NO: 133778 - DNA, 33 bp, Homo sapien
tactttgtaaatcagatatatactctatgccag

SEQ ID NO: 133779 - DNA, 33 bp, Homo sapien
tacaaagcttatatcacataagtactatcattc

SEQ ID NO: 133780 - DNA, 33 bp, Homo sapien
tacaaagcttatatcagataagtactatcattc

SEQ ID NO: 133781 - DNA, 33 bp, Homo sapien
caagcaattttgggaacaagtgtgcactttttt

SEQ ID NO: 133782 - DNA, 33 bp, Homo sapien
caagcaattttgggaataagtgtgcactttttt

SEQ ID NO: 133783 - DNA, 33 bp, Homo sapien
gtggggagtggttataacattctctttaacatt

SEQ ID NO: 133784 - DNA, 33 bp, Homo sapien
gtggggagtggttataccattctctttaacatt

SEQ ID NO: 133785 - DNA, 33 bp, Homo sapien
gccaaagtagccatcaaaaatcaagagacttag

SEQ ID NO: 133786 - DNA, 33 bp, Homo sapien
gccaaagtagccatcagaaatcaagagacttag

SEQ ID NO: 133787 - DNA, 33 bp, Homo sapien
gaatattatgccacagaagtctactgaattggg

SEQ ID NO: 133788 - DNA, 33 bp, Homo sapien
gaatattatgccacaggagtctactgaattggg

SEQ ID NO: 133789 - DNA, 33 bp, Homo sapien
atgcaattatattcacaaatgccacaaaaataa

SEQ ID NO: 133790 - DNA, 33 bp, Homo sapien
atgcaattatattcactaatgccacaaaaataa

SEQ ID NO: 133791 - DNA, 33 bp, Homo sapien
taaagcccaatctcacacagataaaggttgtgt

SEQ ID NO: 133792 - DNA, 33 bp, Homo sapien
taaagcccaatctcacgcagataaaggttgtgt

SEQ ID NO: 133793 - DNA, 33 bp, Homo sapien
tagagacacacaaaaaaagttgaaattcaaggc

SEQ ID NO: 133794 - DNA, 33 bp, Homo sapien
tagagacacacaaaaatagttgaaattcaaggc

SEQ ID NO: 133795 - DNA, 33 bp, Homo sapien
tcagttgttttcaacacggggattggtctgatt

SEQ ID NO: 133796 - DNA, 33 bp, Homo sapien
tcagttgttttcaacagggggattggtctgatt

SEQ ID NO: 133797 - DNA, 33 bp, Homo sapien
ggcaggaaagttgcagaaggatcacgactggca

SEQ ID NO: 133798 - DNA, 33 bp, Homo sapien
ggcaggaaagttgcaggaggatcacgactggca

SEQ ID NO: 133799 - DNA, 33 bp, Homo sapien
cttattaccttgtggacgttgcctaacctctcc

SEQ ID NO: 133800 - DNA, 33 bp, Homo sapien
cttattaccttgtggatgttgcctaacctctcc

SEQ ID NO: 133801 - DNA, 33 bp, Homo sapien
aggatgagtaggtgataaggtaaagaagagagg

SEQ ID NO: 133802 - DNA, 33 bp, Homo sapien
aggatgagtaggtgatcaggtaaagaagagagg

SEQ ID NO: 133803 - DNA, 33 bp, Homo sapien
gtaaaattatctttcagccaatagtcagtgtct

SEQ ID NO: 133804 - DNA, 33 bp, Homo sapien
gtaaaattatctttcatccaatagtcagtgtct

SEQ ID NO: 133805 - DNA, 33 bp, Homo sapien
aaagtgacataaatgaacttagcctgtaaaatt

SEQ ID NO: 133806 - DNA, 33 bp, Homo sapien
aaagtgacataaatgagcttagcctgtaaaatt

SEQ ID NO: 133807 - DNA, 33 bp, Homo sapien
atgtggacacttttggaatattattatgcatac

SEQ ID NO: 133808 - DNA, 33 bp, Homo sapien
atgtggacacttttgggatattattatgcatac

SEQ ID NO: 133809 - DNA, 33 bp, Homo sapien
tgtccaggtctgacagccaataaaggccaaaga

SEQ ID NO: 133810 - DNA, 33 bp, Homo sapien
tgtccaggtctgacagtcaataaaggccaaaga

SEQ ID NO: 133811 - DNA, 33 bp, Homo sapien
ccatcctgtgtggagcccagaatgttttgtgta

SEQ ID NO: 133812 - DNA, 33 bp, Homo sapien
ccatcctgtgtggagctcagaatgttttgtgta

SEQ ID NO: 133813 - DNA, 33 bp, Homo sapien
accaacaggatctctccctcttcaaaactgtaa

SEQ ID NO: 133814 - DNA, 33 bp, Homo sapien
accaacaggatctctctctcttcaaaactgtaa

SEQ ID NO: 133815 - DNA, 33 bp, Homo sapien
cgcagtattttaccaaatgctaaagtagacttc

SEQ ID NO: 133816 - DNA, 33 bp, Homo sapien
cgcagtattttaccaattgctaaagtagacttc

SEQ ID NO: 133817 - DNA, 33 bp, Homo sapien
gatagagtgagcaggagctggaccaattatttc

SEQ ID NO: 133818 - DNA, 33 bp, Homo sapien
gatagagtgagcaggatctggaccaattatttc

SEQ ID NO: 133819 - DNA, 33 bp, Homo sapien
gcatgagctgaggatgcacagagggcacgccac

SEQ ID NO: 133820 - DNA, 33 bp, Homo sapien
gcatgagctgaggatgtacagagggcacgccac

SEQ ID NO: 133821 - DNA, 33 bp, Homo sapien
gactttaatctccctcacctattgcaatattct

SEQ ID NO: 133822 - DNA, 33 bp, Homo sapien
gactttaatctccctcgcctattgcaatattct

SEQ ID NO: 133823 - DNA, 33 bp, Homo sapien
ctaattttcagaccacaaaatagaggctattaa

SEQ ID NO: 133824 - DNA, 33 bp, Homo sapien
ctaattttcagaccacgaaatagaggctattaa

SEQ ID NO: 133825 - DNA, 33 bp, Homo sapien
tttatatttgggatgaagctaaatgtgcatagg

SEQ ID NO: 133826 - DNA, 33 bp, Homo sapien
tttatatttgggatgaggctaaatgtgcatagg

SEQ ID NO: 133827 - DNA, 33 bp, Homo sapien
tttttactgtgctatcaaataccatcctctttc

SEQ ID NO: 133828 - DNA, 33 bp, Homo sapien
tttttactgtgctatccaataccatcctctttc

SEQ ID NO: 133829 - DNA, 33 bp, Homo sapien
gtgattttaacccagaaccatgtactacattca

SEQ ID NO: 133830 - DNA, 33 bp, Homo sapien
gtgattttaacccagagccatgtactacattca

SEQ ID NO: 133831 - DNA, 33 bp, Homo sapien
gagaaatatatgtctaactttatgagaaactac

SEQ ID NO: 133832 - DNA, 33 bp, Homo sapien
gagaaatatatgtctacctttatgagaaactac

SEQ ID NO: 133833 - DNA, 33 bp, Homo sapien
tcccagtccatctttccatccaatcaacaaagc

SEQ ID NO: 133834 - DNA, 33 bp, Homo sapien
tcccagtccatctttctatccaatcaacaaagc

SEQ ID NO: 133835 - DNA, 33 bp, Homo sapien
actatcactttacaacagcattttcttgtcaag

SEQ ID NO: 133836 - DNA, 33 bp, Homo sapien
actatcactttacaacggcattttcttgtcaag

SEQ ID NO: 133837 - DNA, 33 bp, Homo sapien
ttattgttatcctggaaaaagtgcctttttcca

SEQ ID NO: 133838 - DNA, 33 bp, Homo sapien
ttattgttatcctggagaaagtgcctttttcca

SEQ ID NO: 133839 - DNA, 33 bp, Homo sapien
ttttttatttttgatgcatgaaatgtctgcctg

SEQ ID NO: 133840 - DNA, 33 bp, Homo sapien
ttttttatttttgatgtatgaaatgtctgcctg

SEQ ID NO: 133841 - DNA, 33 bp, Homo sapien
atttgcagaactaggaaatgaggtacacgagag

SEQ ID NO: 133842 - DNA, 33 bp, Homo sapien
atttgcagaactaggagatgaggtacacgagag

SEQ ID NO: 133843 - DNA, 33 bp, Homo sapien
ggattcatttggtgacagatgaaaaatgttcaa

SEQ ID NO: 133844 - DNA, 33 bp, Homo sapien
ggattcatttggtgaccgatgaaaaatgttcaa

SEQ ID NO: 133845 - DNA, 33 bp, Homo sapien
gactggtgtaagatgacctctcattgcagtttt

SEQ ID NO: 133846 - DNA, 33 bp, Homo sapien
gactggtgtaagatgatctctcattgcagtttt

SEQ ID NO: 133847 - DNA, 33 bp, Homo sapien
atgtataaggaactcaataagacataaaaacaa

SEQ ID NO: 133848 - DNA, 33 bp, Homo sapien
atgtataaggaactcagtaagacataaaaacaa

SEQ ID NO: 133849 - DNA, 33 bp, Homo sapien
agttggttgagacacagggctttatatctgggt

SEQ ID NO: 133850 - DNA, 33 bp, Homo sapien
agttggttgagacacatggctttatatctgggt

SEQ ID NO: 133851 - DNA, 33 bp, Homo sapien
atcaaagcaacgtatcaaaagctatgggataca

SEQ ID NO: 133852 - DNA, 33 bp, Homo sapien
atcaaagcaacgtatcgaaagctatgggataca

SEQ ID NO: 133853 - DNA, 33 bp, Homo sapien
ccacatccactgcctacaggcccaagaaggcac

SEQ ID NO: 133854 - DNA, 33 bp, Homo sapien
ccacatccactgcctagaggcccaagaaggcac

SEQ ID NO: 133855 - DNA, 33 bp, Homo sapien
ttttgaggagtcataccggtgaattaaagagag

SEQ ID NO: 133856 - DNA, 33 bp, Homo sapien
ttttgaggagtcatactggtgaattaaagagag

SEQ ID NO: 133857 - DNA, 33 bp, Homo sapien
catgtataataccacaaaaaaaagaatatgtct

SEQ ID NO: 133858 - DNA, 33 bp, Homo sapien
catgtataataccacacaaaaaagaatatgtct

SEQ ID NO: 133859 - DNA, 33 bp, Homo sapien
aattaaaaaagactgcaataaatacaggggaat

SEQ ID NO: 133860 - DNA, 33 bp, Homo sapien
aattaaaaaagactgcgataaatacaggggaat

SEQ ID NO: 133861 - DNA, 33 bp, Homo sapien
aattcacccaaactcaatctgaatcaaagttat

SEQ ID NO: 133862 - DNA, 33 bp, Homo sapien
aattcacccaaactcagtctgaatcaaagttat

SEQ ID NO: 133863 - DNA, 33 bp, Homo sapien
aatgtcctcaatacaaagaaatgcaacataaaa

SEQ ID NO: 133864 - DNA, 33 bp, Homo sapien
aatgtcctcaatacaaggaaatgcaacataaaa

SEQ ID NO: 133865 - DNA, 33 bp, Homo sapien
caagttctcactcatacgcagaattttaaagtt

SEQ ID NO: 133866 - DNA, 33 bp, Homo sapien
caagttctcactcatatgcagaattttaaagtt

SEQ ID NO: 133867 - DNA, 33 bp, Homo sapien
tttaaagcaaggagaacgaacagtctataatta

SEQ ID NO: 133868 - DNA, 33 bp, Homo sapien
tttaaagcaaggagaatgaacagtctataatta

SEQ ID NO: 133869 - DNA, 33 bp, Homo sapien
ctttatatgagtgtaaactttttgtacaaacca

SEQ ID NO: 133870 - DNA, 33 bp, Homo sapien
ctttatatgagtgtaatctttttgtacaaacca

SEQ ID NO: 133871 - DNA, 33 bp, Homo sapien
atactgtaagaggaagaaccacatttaccttat

SEQ ID NO: 133872 - DNA, 33 bp, Homo sapien
atactgtaagaggaaggaccacatttaccttat

SEQ ID NO: 133873 - DNA, 33 bp, Homo sapien
gttcatctgtgttgcaaagcataaataggagca

SEQ ID NO: 133874 - DNA, 33 bp, Homo sapien
gttcatctgtgttgcagagcataaataggagca

SEQ ID NO: 133875 - DNA, 33 bp, Homo sapien
taattcatcaaccacaaaccactatttaagaaa

SEQ ID NO: 133876 - DNA, 33 bp, Homo sapien
taattcatcaaccacagaccactatttaagaaa

SEQ ID NO: 133877 - DNA, 33 bp, Homo sapien
tgttaaacgtctattacacatctggaacacaga

SEQ ID NO: 133878 - DNA, 33 bp, Homo sapien
tgttaaacgtctattagacatctggaacacaga

SEQ ID NO: 133879 - DNA, 33 bp, Homo sapien
cagaaaaccctggaacagattatggcaacgata

SEQ ID NO: 133880 - DNA, 33 bp, Homo sapien
cagaaaaccctggaacggattatggcaacgata

SEQ ID NO: 133881 - DNA, 33 bp, Homo sapien
gggaatgatttgtccaaggttaccgcactagtt

SEQ ID NO: 133882 - DNA, 33 bp, Homo sapien
gggaatgatttgtccacggttaccgcactagtt

SEQ ID NO: 133883 - DNA, 33 bp, Homo sapien
tttcatttttacatcacgagaagctatctgatt

SEQ ID NO: 133884 - DNA, 33 bp, Homo sapien
tttcatttttacatcatgagaagctatctgatt

SEQ ID NO: 133885 - DNA, 33 bp, Homo sapien
ccagacacactgtttggaattcagggatgaata

SEQ ID NO: 133886 - DNA, 33 bp, Homo sapien
ccagacacactgtttgtaattcagggatgaata

SEQ ID NO: 133887 - DNA, 33 bp, Homo sapien
agagttgtgctctcaaatagtacataatcagag

SEQ ID NO: 133888 - DNA, 33 bp, Homo sapien
agagttgtgctctcaagtagtacataatcagag

SEQ ID NO: 133889 - DNA, 33 bp, Homo sapien
gaagaccatcaagataagagacagagctggctt

SEQ ID NO: 133890 - DNA, 33 bp, Homo sapien
gaagaccatcaagataggagacagagctggctt

SEQ ID NO: 133891 - DNA, 33 bp, Homo sapien
cagacaaccacttactaacaacttctgtccact

SEQ ID NO: 133892 - DNA, 33 bp, Homo sapien
cagacaaccacttactgacaacttctgtccact

SEQ ID NO: 133893 - DNA, 33 bp, Homo sapien
aactttctagctttaaaatgcttacaatccaag

SEQ ID NO: 133894 - DNA, 33 bp, Homo sapien
aactttctagctttaacatgcttacaatccaag

SEQ ID NO: 133895 - DNA, 33 bp, Homo sapien
taacttttcaaatctaggactgttcaacgatga

SEQ ID NO: 133896 - DNA, 33 bp, Homo sapien
taacttttcaaatctatgactgttcaacgatga

SEQ ID NO: 133897 - DNA, 33 bp, Homo sapien
aataaaagattacagcacagcaaaaagtatata

SEQ ID NO: 133898 - DNA, 33 bp, Homo sapien
aataaaagattacagctcagcaaaaagtatata

SEQ ID NO: 133899 - DNA, 33 bp, Homo sapien
tatacaacagtgtggaaagcaaaactataggaa

SEQ ID NO: 133900 - DNA, 33 bp, Homo sapien
tatacaacagtgtggagagcaaaactataggaa

SEQ ID NO: 133901 - DNA, 33 bp, Homo sapien
ttactaacatttccaaaagtgatatttgatggc

SEQ ID NO: 133902 - DNA, 33 bp, Homo sapien
ttactaacatttccaacagtgatatttgatggc

SEQ ID NO: 133903 - DNA, 33 bp, Homo sapien
tctccttttttaaccaaatctacaggaaactta

SEQ ID NO: 133904 - DNA, 33 bp, Homo sapien
tctccttttttaaccagatctacaggaaactta

SEQ ID NO: 133905 - DNA, 33 bp, Homo sapien
tagattagatgattccccaatgtccctttcaac

SEQ ID NO: 133906 - DNA, 33 bp, Homo sapien
tagattagatgattcctcaatgtccctttcaac

SEQ ID NO: 133907 - DNA, 33 bp, Homo sapien
gaattttccagtgaagcacaggtctatctaaga

SEQ ID NO: 133908 - DNA, 33 bp, Homo sapien
gaattttccagtgaaggacaggtctatctaaga

SEQ ID NO: 133909 - DNA, 33 bp, Homo sapien
tgcaaataaatatacaaaaaggttagagatcag

SEQ ID NO: 133910 - DNA, 33 bp, Homo sapien
tgcaaataaatatacacaaaggttagagatcag

SEQ ID NO: 133911 - DNA, 33 bp, Homo sapien
agggaattggtactaccatgccaagactcctat

SEQ ID NO: 133912 - DNA, 33 bp, Homo sapien
agggaattggtactactatgccaagactcctat

SEQ ID NO: 133913 - DNA, 33 bp, Homo sapien
gaataactaagggtaccaggcttcctcttcctc

SEQ ID NO: 133914 - DNA, 33 bp, Homo sapien
gaataactaagggtactaggcttcctcttcctc

SEQ ID NO: 133915 - DNA, 33 bp, Homo sapien
agtcagaacacagggccatagttgaacacaact

SEQ ID NO: 133916 - DNA, 33 bp, Homo sapien
agtcagaacacagggctatagttgaacacaact

SEQ ID NO: 133917 - DNA, 33 bp, Homo sapien
tggataagaggcagaaatggaacagattctcag

SEQ ID NO: 133918 - DNA, 33 bp, Homo sapien
tggataagaggcagaagtggaacagattctcag

SEQ ID NO: 133919 - DNA, 33 bp, Homo sapien
cagttacagaagcttagcctcagagcagggcca

SEQ ID NO: 133920 - DNA, 33 bp, Homo sapien
cagttacagaagcttatcctcagagcagggcca

SEQ ID NO: 133921 - DNA, 33 bp, Homo sapien
ataacaaaatgatgtcaaaggaaatgatgttat

SEQ ID NO: 133922 - DNA, 33 bp, Homo sapien
ataacaaaatgatgtcgaaggaaatgatgttat

SEQ ID NO: 133923 - DNA, 33 bp, Homo sapien
tacttaatatgatcagacatcattaagagtggt

SEQ ID NO: 133924 - DNA, 33 bp, Homo sapien
tacttaatatgatcagccatcattaagagtggt

SEQ ID NO: 133925 - DNA, 33 bp, Homo sapien
tgtctgcagagctaaacgggtattatgtttaac

SEQ ID NO: 133926 - DNA, 33 bp, Homo sapien
tgtctgcagagctaaatgggtattatgtttaac

SEQ ID NO: 133927 - DNA, 33 bp, Homo sapien
tgttttcatgttgccacgtattttttcattttc

SEQ ID NO: 133928 - DNA, 33 bp, Homo sapien
tgttttcatgttgccatgtattttttcattttc

SEQ ID NO: 133929 - DNA, 33 bp, Homo sapien
tcttttctctaacagcaactggcacaatttttg

SEQ ID NO: 133930 - DNA, 33 bp, Homo sapien
tcttttctctaacagcgactggcacaatttttg

SEQ ID NO: 133931 - DNA, 33 bp, Homo sapien
ggtgaaaaggctgggaccttaagaaactcttta

SEQ ID NO: 133932 - DNA, 33 bp, Homo sapien
ggtgaaaaggctgggatcttaagaaactcttta

SEQ ID NO: 133933 - DNA, 33 bp, Homo sapien
tctgtaggttcattcacggcatttagcattctc

SEQ ID NO: 133934 - DNA, 33 bp, Homo sapien
tctgtaggttcattcatggcatttagcattctc

SEQ ID NO: 133935 - DNA, 33 bp, Homo sapien
attaaaatggactgcacgtgactcagacatgga

SEQ ID NO: 133936 - DNA, 33 bp, Homo sapien
attaaaatggactgcatgtgactcagacatgga

SEQ ID NO: 133937 - DNA, 33 bp, Homo sapien
tcagtaaactaaggtacatccacagaatggact

SEQ ID NO: 133938 - DNA, 33 bp, Homo sapien
tcagtaaactaaggtatatccacagaatggact

SEQ ID NO: 133939 - DNA, 33 bp, Homo sapien
ttcccttggctaagaacagtatgctttttctaa

SEQ ID NO: 133940 - DNA, 33 bp, Homo sapien
ttcccttggctaagaatagtatgctttttctaa

SEQ ID NO: 133941 - DNA, 33 bp, Homo sapien
ggctatccaattttcccagaaccatttattgta

SEQ ID NO: 133942 - DNA, 33 bp, Homo sapien
ggctatccaattttcctagaaccatttattgta

SEQ ID NO: 133943 - DNA, 33 bp, Homo sapien
cagaggatgactttgaaaccttgaggctcagct

SEQ ID NO: 133944 - DNA, 33 bp, Homo sapien
cagaggatgactttgagaccttgaggctcagct

SEQ ID NO: 133945 - DNA, 33 bp, Homo sapien
cattgcccaggtagccaaacattaaagggatgt

SEQ ID NO: 133946 - DNA, 33 bp, Homo sapien
cattgcccaggtagccgaacattaaagggatgt

SEQ ID NO: 133947 - DNA, 33 bp, Homo sapien
acattgccctggttgccctccggtttgaaacaa

SEQ ID NO: 133948 - DNA, 33 bp, Homo sapien
acattgccctggttgctctccggtttgaaacaa

SEQ ID NO: 133949 - DNA, 33 bp, Homo sapien
aaaatctgaattttaaaccatcttagcaaaagg

SEQ ID NO: 133950 - DNA, 33 bp, Homo sapien
aaaatctgaattttaagccatcttagcaaaagg

SEQ ID NO: 133951 - DNA, 33 bp, Homo sapien
agactctatctactgacgtctcctccgatatca

SEQ ID NO: 133952 - DNA, 33 bp, Homo sapien
agactctatctactgatgtctcctccgatatca

SEQ ID NO: 133953 - DNA, 33 bp, Homo sapien
gcatttcctcataaaaaatcgtgcagccttaaa

SEQ ID NO: 133954 - DNA, 33 bp, Homo sapien
gcatttcctcataaaatatcgtgcagccttaaa

SEQ ID NO: 133955 - DNA, 33 bp, Homo sapien
gtgaacattctgaaaacttaaagacgtgttttg

SEQ ID NO: 133956 - DNA, 33 bp, Homo sapien
gtgaacattctgaaaagttaaagacgtgttttg

SEQ ID NO: 133957 - DNA, 33 bp, Homo sapien
cctaattgtgataccaaggaagtatttaagatt

SEQ ID NO: 133958 - DNA, 33 bp, Homo sapien
cctaattgtgataccagggaagtatttaagatt

SEQ ID NO: 133959 - DNA, 33 bp, Homo sapien
aacaatgtgcgttaagccagccgggaataggaa

SEQ ID NO: 133960 - DNA, 33 bp, Homo sapien
aacaatgtgcgttaagtcagccgggaataggaa

SEQ ID NO: 133961 - DNA, 33 bp, Homo sapien
cctacatctctaccttcaaatggctgttaattc

SEQ ID NO: 133962 - DNA, 33 bp, Homo sapien
cctacatctctacctttaaatggctgttaattc

SEQ ID NO: 133963 - DNA, 33 bp, Homo sapien
atgacatttagctggacagatgccataatatag

SEQ ID NO: 133964 - DNA, 33 bp, Homo sapien
atgacatttagctggagagatgccataatatag

SEQ ID NO: 133965 - DNA, 33 bp, Homo sapien
tacagcatttgatacacaatatggatttctcct

SEQ ID NO: 133966 - DNA, 33 bp, Homo sapien
tacagcatttgatacataatatggatttctcct

SEQ ID NO: 133967 - DNA, 33 bp, Homo sapien
actcatttctgctaaaactgggcctggattttc

SEQ ID NO: 133968 - DNA, 33 bp, Homo sapien
actcatttctgctaaagctgggcctggattttc

SEQ ID NO: 133969 - DNA, 33 bp, Homo sapien
gctcttctgttggtcaatactcagctgtcagga

SEQ ID NO: 133970 - DNA, 33 bp, Homo sapien
gctcttctgttggtcagtactcagctgtcagga

SEQ ID NO: 133971 - DNA, 33 bp, Homo sapien
aaatcctgcgtgcttaagatgggaaatcggcct

SEQ ID NO: 133972 - DNA, 33 bp, Homo sapien
aaatcctgcgtgcttacgatgggaaatcggcct

SEQ ID NO: 133973 - DNA, 33 bp, Homo sapien
attgcagatactacctcaaggttaaagagcata

SEQ ID NO: 133974 - DNA, 33 bp, Homo sapien
attgcagatactacctgaaggttaaagagcata

SEQ ID NO: 133975 - DNA, 33 bp, Homo sapien
gcaattatttgtagacacaggagcttgagagaa

SEQ ID NO: 133976 - DNA, 33 bp, Homo sapien
gcaattatttgtagactcaggagcttgagagaa

SEQ ID NO: 133977 - DNA, 33 bp, Homo sapien
acaactgttagaactaataagtgcatttagcaa

SEQ ID NO: 133978 - DNA, 33 bp, Homo sapien
acaactgttagaactagtaagtgcatttagcaa

SEQ ID NO: 133979 - DNA, 33 bp, Homo sapien
aggataaccttagtgacaattaccctacacaat

SEQ ID NO: 133980 - DNA, 33 bp, Homo sapien
aggataaccttagtgataattaccctacacaat

SEQ ID NO: 133981 - DNA, 33 bp, Homo sapien
ggcatttgcttgtgaaattaaagtgacccatgt

SEQ ID NO: 133982 - DNA, 33 bp, Homo sapien
ggcatttgcttgtgaacttaaagtgacccatgt

SEQ ID NO: 133983 - DNA, 33 bp, Homo sapien
atgccaaagtggagctcagaggcatctttccca

SEQ ID NO: 133984 - DNA, 33 bp, Homo sapien
atgccaaagtggagcttagaggcatctttccca

SEQ ID NO: 133985 - DNA, 33 bp, Homo sapien
ataagatgattaatgaaaaataagttaattggc

SEQ ID NO: 133986 - DNA, 33 bp, Homo sapien
ataagatgattaatgacaaataagttaattggc

SEQ ID NO: 133987 - DNA, 33 bp, Homo sapien
ataaatcttttcatataactggagcattttcaa

SEQ ID NO: 133988 - DNA, 33 bp, Homo sapien
ataaatcttttcatatgactggagcattttcaa

SEQ ID NO: 133989 - DNA, 33 bp, Homo sapien
ggatctaagagttaggaagttgcaccatgtgag

SEQ ID NO: 133990 - DNA, 33 bp, Homo sapien
ggatctaagagttagggagttgcaccatgtgag

SEQ ID NO: 133991 - DNA, 33 bp, Homo sapien
ggctacccagaaacaggtggcatctttggtagt

SEQ ID NO: 133992 - DNA, 33 bp, Homo sapien
ggctacccagaaacagttggcatctttggtagt

SEQ ID NO: 133993 - DNA, 33 bp, Homo sapien
tccagagcctacaaccactaacatgattatcct

SEQ ID NO: 133994 - DNA, 33 bp, Homo sapien
tccagagcctacaaccgctaacatgattatcct

SEQ ID NO: 133995 - DNA, 33 bp, Homo sapien
cgacttaggctagaaagattgaggtgatgtatg

SEQ ID NO: 133996 - DNA, 33 bp, Homo sapien
cgacttaggctagaaatattgaggtgatgtatg

SEQ ID NO: 133997 - DNA, 33 bp, Homo sapien
acttgcacattaaaaaaggaatggacaactcat

SEQ ID NO: 133998 - DNA, 33 bp, Homo sapien
acttgcacattaaaaagggaatggacaactcat

SEQ ID NO: 133999 - DNA, 33 bp, Homo sapien
attattattatcactactaccagacctagcttt

SEQ ID NO: 134000 - DNA, 33 bp, Homo sapien
attattattatcactagtaccagacctagcttt

SEQ ID NO: 134001 - DNA, 33 bp, Homo sapien
gcgctctgttaaaaaaatggtggcaaaatggtc

SEQ ID NO: 134002 - DNA, 33 bp, Homo sapien
gcgctctgttaaaaaagtggtggcaaaatggtc

SEQ ID NO: 134003 - DNA, 33 bp, Homo sapien
gaactttagaggcaacaatttagtagactgaga

SEQ ID NO: 134004 - DNA, 33 bp, Homo sapien
gaactttagaggcaaccatttagtagactgaga

SEQ ID NO: 134005 - DNA, 33 bp, Homo sapien
tagatataaacagtaccgagaatggtgcctagc

SEQ ID NO: 134006 - DNA, 33 bp, Homo sapien
tagatataaacagtactgagaatggtgcctagc

SEQ ID NO: 134007 - DNA, 33 bp, Homo sapien
ttggagaaagcttataaatggcttaaaatctat

SEQ ID NO: 134008 - DNA, 33 bp, Homo sapien
ttggagaaagcttatagatggcttaaaatctat

SEQ ID NO: 134009 - DNA, 33 bp, Homo sapien
tgtgtgcgacaagaagaagagaagacttgtggc

SEQ ID NO: 134010 - DNA, 33 bp, Homo sapien
tgtgtgcgacaagaaggagagaagacttgtggc

SEQ ID NO: 134011 - DNA, 33 bp, Homo sapien
ttcttctattacttcagcttggtaggtcctgta

SEQ ID NO: 134012 - DNA, 33 bp, Homo sapien
ttcttctattacttcatcttggtaggtcctgta

SEQ ID NO: 134013 - DNA, 33 bp, Homo sapien
ataagtggttgccatgaacatggatggaggagg

SEQ ID NO: 134014 - DNA, 33 bp, Homo sapien
ataagtggttgccatggacatggatggaggagg

SEQ ID NO: 134015 - DNA, 33 bp, Homo sapien
atacatagttaggtcacaggggatttttaagat

SEQ ID NO: 134016 - DNA, 33 bp, Homo sapien
atacatagttaggtcataggggatttttaagat

SEQ ID NO: 134017 - DNA, 33 bp, Homo sapien
tagataagtgtgatataaaggtagcacttacta

SEQ ID NO: 134018 - DNA, 33 bp, Homo sapien
tagataagtgtgatatgaaggtagcacttacta

SEQ ID NO: 134019 - DNA, 33 bp, Homo sapien
gagaaataggaaatacactggcttatactaacc

SEQ ID NO: 134020 - DNA, 33 bp, Homo sapien
gagaaataggaaatacgctggcttatactaacc

SEQ ID NO: 134021 - DNA, 33 bp, Homo sapien
gcctgaggtatcaccccgagtcctttgtctcat

SEQ ID NO: 134022 - DNA, 33 bp, Homo sapien
gcctgaggtatcaccctgagtcctttgtctcat

SEQ ID NO: 134023 - DNA, 33 bp, Homo sapien
ggcaaccagactccaactcaaggctatccagaa

SEQ ID NO: 134024 - DNA, 33 bp, Homo sapien
ggcaaccagactccaattcaaggctatccagaa

SEQ ID NO: 134025 - DNA, 33 bp, Homo sapien
gaaataaagctgtatcaatgaaacaaaggagaa

SEQ ID NO: 134026 - DNA, 33 bp, Homo sapien
gaaataaagctgtatcgatgaaacaaaggagaa

SEQ ID NO: 134027 - DNA, 33 bp, Homo sapien
gtttgcttaataaaagcatggaagacaagcaag

SEQ ID NO: 134028 - DNA, 33 bp, Homo sapien
gtttgcttaataaaagtatggaagacaagcaag

SEQ ID NO: 134029 - DNA, 33 bp, Homo sapien
cttttgctttttcgaacatctcacttatgaaat

SEQ ID NO: 134030 - DNA, 33 bp, Homo sapien
cttttgctttttcgaatatctcacttatgaaat

SEQ ID NO: 134031 - DNA, 33 bp, Homo sapien
cagtaaagggaacttcacatatagcagaaaatt

SEQ ID NO: 134032 - DNA, 33 bp, Homo sapien
cagtaaagggaacttcgcatatagcagaaaatt

SEQ ID NO: 134033 - DNA, 33 bp, Homo sapien
aggaatatgctgacaacggagacttactttttg

SEQ ID NO: 134034 - DNA, 33 bp, Homo sapien
aggaatatgctgacaatggagacttactttttg

SEQ ID NO: 134035 - DNA, 33 bp, Homo sapien
gtgatttcttgattcaggttattttagcttctt

SEQ ID NO: 134036 - DNA, 33 bp, Homo sapien
gtgatttcttgattcatgttattttagcttctt

SEQ ID NO: 134037 - DNA, 33 bp, Homo sapien
agccagtgtctggaaacccacaccccacctggc

SEQ ID NO: 134038 - DNA, 33 bp, Homo sapien
agccagtgtctggaaatccacaccccacctggc

SEQ ID NO: 134039 - DNA, 33 bp, Homo sapien
tttatggtattttcaccggcaaattatattacc

SEQ ID NO: 134040 - DNA, 33 bp, Homo sapien
tttatggtattttcactggcaaattatattacc

SEQ ID NO: 134041 - DNA, 33 bp, Homo sapien
caatggcctaaccaaactgacataataaattaa

SEQ ID NO: 134042 - DNA, 33 bp, Homo sapien
caatggcctaaccaaattgacataataaattaa

SEQ ID NO: 134043 - DNA, 33 bp, Homo sapien
aggatttcaggggctccaagattgcagtagatc

SEQ ID NO: 134044 - DNA, 33 bp, Homo sapien
aggatttcaggggctctaagattgcagtagatc

SEQ ID NO: 134045 - DNA, 33 bp, Homo sapien
attcctgtcttggttcactcagcatcgattagc

SEQ ID NO: 134046 - DNA, 33 bp, Homo sapien
attcctgtcttggttcgctcagcatcgattagc

SEQ ID NO: 134047 - DNA, 33 bp, Homo sapien
cctcatgccttcctaacgtgctttaaagttctg

SEQ ID NO: 134048 - DNA, 33 bp, Homo sapien
cctcatgccttcctaatgtgctttaaagttctg

SEQ ID NO: 134049 - DNA, 33 bp, Homo sapien
cttacttaccaaatgacacaaaagactacctat

SEQ ID NO: 134050 - DNA, 33 bp, Homo sapien
cttacttaccaaatgatacaaaagactacctat

SEQ ID NO: 134051 - DNA, 33 bp, Homo sapien
atatgatgtttctgaactctggattttaatgtc

SEQ ID NO: 134052 - DNA, 33 bp, Homo sapien
atatgatgtttctgaagtctggattttaatgtc

SEQ ID NO: 134053 - DNA, 33 bp, Homo sapien
atgctaaagggaaagacagaatgtggtacagta

SEQ ID NO: 134054 - DNA, 33 bp, Homo sapien
atgctaaagggaaagatagaatgtggtacagta

SEQ ID NO: 134055 - DNA, 33 bp, Homo sapien
tgtgtagattcgcaatcaaattccagacagcct

SEQ ID NO: 134056 - DNA, 33 bp, Homo sapien
tgtgtagattcgcaatgaaattccagacagcct

SEQ ID NO: 134057 - DNA, 33 bp, Homo sapien
caaattatggttcaacagcaaaacaatggttct

SEQ ID NO: 134058 - DNA, 33 bp, Homo sapien
caaattatggttcaacggcaaaacaatggttct

SEQ ID NO: 134059 - DNA, 33 bp, Homo sapien
cccagcccccgaaaaaagtcagaagaggtcatt

SEQ ID NO: 134060 - DNA, 33 bp, Homo sapien
cccagcccccgaaaaatgtcagaagaggtcatt

SEQ ID NO: 134061 - DNA, 33 bp, Homo sapien
ccagtgataccaccaaccatgaactggggttat

SEQ ID NO: 134062 - DNA, 33 bp, Homo sapien
ccagtgataccaccaatcatgaactggggttat

SEQ ID NO: 134063 - DNA, 33 bp, Homo sapien
agatttaaggcatttacgatatgggggtggggg

SEQ ID NO: 134064 - DNA, 33 bp, Homo sapien
agatttaaggcatttatgatatgggggtggggg

SEQ ID NO: 134065 - DNA, 33 bp, Homo sapien
agaagagaagcctgcacgtgatctgattctttc

SEQ ID NO: 134066 - DNA, 33 bp, Homo sapien
agaagagaagcctgcatgtgatctgattctttc

SEQ ID NO: 134067 - DNA, 33 bp, Homo sapien
cttctgcaactaaccagcacactttaatatccg

SEQ ID NO: 134068 - DNA, 33 bp, Homo sapien
cttctgcaactaaccatcacactttaatatccg

SEQ ID NO: 134069 - DNA, 33 bp, Homo sapien
tgattgattaaaagcacctactaaaaactaaac

SEQ ID NO: 134070 - DNA, 33 bp, Homo sapien
tgattgattaaaagcatctactaaaaactaaac

SEQ ID NO: 134071 - DNA, 33 bp, Homo sapien
gcctcccaagtgactccgacaaagtaaccacca

SEQ ID NO: 134072 - DNA, 33 bp, Homo sapien
gcctcccaagtgactctgacaaagtaaccacca

SEQ ID NO: 134073 - DNA, 33 bp, Homo sapien
accttacaaatgtataaaactgcattactgaac

SEQ ID NO: 134074 - DNA, 33 bp, Homo sapien
accttacaaatgtatagaactgcattactgaac

SEQ ID NO: 134075 - DNA, 33 bp, Homo sapien
ggttttgccaacccagcagtgagtaccttccat

SEQ ID NO: 134076 - DNA, 33 bp, Homo sapien
ggttttgccaacccagtagtgagtaccttccat

SEQ ID NO: 134077 - DNA, 33 bp, Homo sapien
tttatggatttgcctacaagtgtttaacacatg

SEQ ID NO: 134078 - DNA, 33 bp, Homo sapien
tttatggatttgcctataagtgtttaacacatg

SEQ ID NO: 134079 - DNA, 33 bp, Homo sapien
gacacaatccagaaagcaacttgaggcaccaac

SEQ ID NO: 134080 - DNA, 33 bp, Homo sapien
gacacaatccagaaagtaacttgaggcaccaac

SEQ ID NO: 134081 - DNA, 33 bp, Homo sapien
aaaatattaaagttcacgtagattccaatgtct

SEQ ID NO: 134082 - DNA, 33 bp, Homo sapien
aaaatattaaagttcatgtagattccaatgtct

SEQ ID NO: 134083 - DNA, 33 bp, Homo sapien
tctaatgcagttgtgaagtcagagtcacttaaa

SEQ ID NO: 134084 - DNA, 33 bp, Homo sapien
tctaatgcagttgtgaggtcagagtcacttaaa

SEQ ID NO: 134085 - DNA, 33 bp, Homo sapien
tattgataggtaaataccactgaggaaaactca

SEQ ID NO: 134086 - DNA, 33 bp, Homo sapien
tattgataggtaaatatcactgaggaaaactca

SEQ ID NO: 134087 - DNA, 33 bp, Homo sapien
aatagtcgtttacataacattgatttatctctc

SEQ ID NO: 134088 - DNA, 33 bp, Homo sapien
aatagtcgtttacatagcattgatttatctctc

SEQ ID NO: 134089 - DNA, 33 bp, Homo sapien
ggacactgtaggctgtaaagcattttagagtaa

SEQ ID NO: 134090 - DNA, 33 bp, Homo sapien
ggacactgtaggctgtcaagcattttagagtaa

SEQ ID NO: 134091 - DNA, 33 bp, Homo sapien
gaagtatgcatagtaactaataggagttctctg

SEQ ID NO: 134092 - DNA, 33 bp, Homo sapien
gaagtatgcatagtaattaataggagttctctg

SEQ ID NO: 134093 - DNA, 33 bp, Homo sapien
gtgcccagaagttccaataactgggtttaacat

SEQ ID NO: 134094 - DNA, 33 bp, Homo sapien
gtgcccagaagttccagtaactgggtttaacat

SEQ ID NO: 134095 - DNA, 33 bp, Homo sapien
caggacgagacaggagaaaattaggatgacata

SEQ ID NO: 134096 - DNA, 33 bp, Homo sapien
caggacgagacaggaggaaattaggatgacata

SEQ ID NO: 134097 - DNA, 33 bp, Homo sapien
gtttgaggtcggtaaactcaaacgattctaggt

SEQ ID NO: 134098 - DNA, 33 bp, Homo sapien
gtttgaggtcggtaaagtcaaacgattctaggt

SEQ ID NO: 134099 - DNA, 33 bp, Homo sapien
tctctgggtttatggcaaaatttctaataaact

SEQ ID NO: 134100 - DNA, 33 bp, Homo sapien
tctctgggtttatggcgaaatttctaataaact

SEQ ID NO: 134101 - DNA, 33 bp, Homo sapien
ctaatttaaacataagaatagttcacttggtta

SEQ ID NO: 134102 - DNA, 33 bp, Homo sapien
ctaatttaaacataagcatagttcacttggtta

SEQ ID NO: 134103 - DNA, 33 bp, Homo sapien
ttttcccatctggaaaatcttattgcattattg

SEQ ID NO: 134104 - DNA, 33 bp, Homo sapien
ttttcccatctggaaagtcttattgcattattg

SEQ ID NO: 134105 - DNA, 33 bp, Homo sapien
ttaggaagacgttgcagcgagttttaatatttt

SEQ ID NO: 134106 - DNA, 33 bp, Homo sapien
ttaggaagacgttgcatcgagttttaatatttt

SEQ ID NO: 134107 - DNA, 33 bp, Homo sapien
tggttctgtactcctccctaatacctgttttac

SEQ ID NO: 134108 - DNA, 33 bp, Homo sapien
tggttctgtactcctcgctaatacctgttttac

SEQ ID NO: 134109 - DNA, 33 bp, Homo sapien
acttctggaggtgatgcataggtttgtggcata

SEQ ID NO: 134110 - DNA, 33 bp, Homo sapien
acttctggaggtgatggataggtttgtggcata

SEQ ID NO: 134111 - DNA, 33 bp, Homo sapien
ttcaattgtggtcttacagtggtctgctgcatc

SEQ ID NO: 134112 - DNA, 33 bp, Homo sapien
ttcaattgtggtcttatagtggtctgctgcatc

SEQ ID NO: 134113 - DNA, 33 bp, Homo sapien
atgtgtattcctggaccgattataacacccatc

SEQ ID NO: 134114 - DNA, 33 bp, Homo sapien
atgtgtattcctggactgattataacacccatc

SEQ ID NO: 134115 - DNA, 33 bp, Homo sapien
catggtgtatatctacaatattttattcatcca

SEQ ID NO: 134116 - DNA, 33 bp, Homo sapien
catggtgtatatctaccatattttattcatcca

SEQ ID NO: 134117 - DNA, 33 bp, Homo sapien
atgttactaagcaataagtaaatgactcagtta

SEQ ID NO: 134118 - DNA, 33 bp, Homo sapien
atgttactaagcaataggtaaatgactcagtta

SEQ ID NO: 134119 - DNA, 33 bp, Homo sapien
gtgataaactaaggcacggttctgaggtgaaga

SEQ ID NO: 134120 - DNA, 33 bp, Homo sapien
gtgataaactaaggcatggttctgaggtgaaga

SEQ ID NO: 134121 - DNA, 33 bp, Homo sapien
tgaggaaagactgccactgaagctaggatataa

SEQ ID NO: 134122 - DNA, 33 bp, Homo sapien
tgaggaaagactgccattgaagctaggatataa

SEQ ID NO: 134123 - DNA, 33 bp, Homo sapien
ctaaagcaaaaattgcacccctgcgttggtctc

SEQ ID NO: 134124 - DNA, 33 bp, Homo sapien
ctaaagcaaaaattgcgcccctgcgttggtctc

SEQ ID NO: 134125 - DNA, 33 bp, Homo sapien
tgcacaacaaacctcaccaaatttagtggctta

SEQ ID NO: 134126 - DNA, 33 bp, Homo sapien
tgcacaacaaacctcatcaaatttagtggctta

SEQ ID NO: 134127 - DNA, 33 bp, Homo sapien
gcttacctaagtcacaatcttggcgcccttggc

SEQ ID NO: 134128 - DNA, 33 bp, Homo sapien
gcttacctaagtcacagtcttggcgcccttggc

SEQ ID NO: 134129 - DNA, 33 bp, Homo sapien
cagcaaagcttaattaactgcatgaatggggac

SEQ ID NO: 134130 - DNA, 33 bp, Homo sapien
cagcaaagcttaattatctgcatgaatggggac

SEQ ID NO: 134131 - DNA, 33 bp, Homo sapien
ctaacttcctgggaccccaattgtctatacatt

SEQ ID NO: 134132 - DNA, 33 bp, Homo sapien
ctaacttcctgggaccgcaattgtctatacatt

SEQ ID NO: 134133 - DNA, 33 bp, Homo sapien
ttttaatatatccataaatgttgccccattcaa

SEQ ID NO: 134134 - DNA, 33 bp, Homo sapien
ttttaatatatccatagatgttgccccattcaa

SEQ ID NO: 134135 - DNA, 33 bp, Homo sapien
accaaaggtcatgtgacatttgcaactcaaccc

SEQ ID NO: 134136 - DNA, 33 bp, Homo sapien
accaaaggtcatgtgatatttgcaactcaaccc

SEQ ID NO: 134137 - DNA, 33 bp, Homo sapien
ctgacgcccagtcaaggagtggaccaggagaca

SEQ ID NO: 134138 - DNA, 33 bp, Homo sapien
ctgacgcccagtcaagtagtggaccaggagaca

SEQ ID NO: 134139 - DNA, 33 bp, Homo sapien
ttttaatgaaaagtgccaatgttttacctcatt

SEQ ID NO: 134140 - DNA, 33 bp, Homo sapien
ttttaatgaaaagtgctaatgttttacctcatt

SEQ ID NO: 134141 - DNA, 33 bp, Homo sapien
ccagcctatcaacccacgtctggtatccataat

SEQ ID NO: 134142 - DNA, 33 bp, Homo sapien
ccagcctatcaacccatgtctggtatccataat

SEQ ID NO: 134143 - DNA, 33 bp, Homo sapien
tttacagagtgaatgaaccaatattaagtttgg

SEQ ID NO: 134144 - DNA, 33 bp, Homo sapien
tttacagagtgaatgagccaatattaagtttgg

SEQ ID NO: 134145 - DNA, 33 bp, Homo sapien
cagaagcatgtatgccaatgatcatagtagcat

SEQ ID NO: 134146 - DNA, 33 bp, Homo sapien
cagaagcatgtatgccgatgatcatagtagcat

SEQ ID NO: 134147 - DNA, 33 bp, Homo sapien
gccatttatctgattgcatttcctgttaaactg

SEQ ID NO: 134148 - DNA, 33 bp, Homo sapien
gccatttatctgattgtatttcctgttaaactg

SEQ ID NO: 134149 - DNA, 33 bp, Homo sapien
acccacacatcatccactgcttccagacattca

SEQ ID NO: 134150 - DNA, 33 bp, Homo sapien
acccacacatcatccattgcttccagacattca

SEQ ID NO: 134151 - DNA, 33 bp, Homo sapien
ttcattaatgtcatcaatacttatagctgactt

SEQ ID NO: 134152 - DNA, 33 bp, Homo sapien
ttcattaatgtcatcagtacttatagctgactt

SEQ ID NO: 134153 - DNA, 33 bp, Homo sapien
tatttaataagcaaccaaggcaagtttgctggg

SEQ ID NO: 134154 - DNA, 33 bp, Homo sapien
tatttaataagcaaccgaggcaagtttgctggg

SEQ ID NO: 134155 - DNA, 33 bp, Homo sapien
ttgctgggttagaaaacgtactttgagaaatga

SEQ ID NO: 134156 - DNA, 33 bp, Homo sapien
ttgctgggttagaaaatgtactttgagaaatga

SEQ ID NO: 134157 - DNA, 33 bp, Homo sapien
tttaggagggtagaaacgggagtcaggtcactg

SEQ ID NO: 134158 - DNA, 33 bp, Homo sapien
tttaggagggtagaaatgggagtcaggtcactg

SEQ ID NO: 134159 - DNA, 33 bp, Homo sapien
tcgacttcctgtcctacgaaccaagagattgtg

SEQ ID NO: 134160 - DNA, 33 bp, Homo sapien
tcgacttcctgtcctatgaaccaagagattgtg

SEQ ID NO: 134161 - DNA, 33 bp, Homo sapien
aaattatctggaaaacaatcatggctacaccag

SEQ ID NO: 134162 - DNA, 33 bp, Homo sapien
aaattatctggaaaacgatcatggctacaccag

SEQ ID NO: 134163 - DNA, 33 bp, Homo sapien
atgcaagtgcttctgacacaagtagtgttaaaa

SEQ ID NO: 134164 - DNA, 33 bp, Homo sapien
atgcaagtgcttctgatacaagtagtgttaaaa

SEQ ID NO: 134165 - DNA, 33 bp, Homo sapien
acaacttttgttaccacgtaagtcataatttat

SEQ ID NO: 134166 - DNA, 33 bp, Homo sapien
acaacttttgttaccatgtaagtcataatttat

SEQ ID NO: 134167 - DNA, 33 bp, Homo sapien
gtaataacatctccaacttatgaatgaggaaac

SEQ ID NO: 134168 - DNA, 33 bp, Homo sapien
gtaataacatctccaatttatgaatgaggaaac

SEQ ID NO: 134169 - DNA, 33 bp, Homo sapien
tacagcatggctgccaagaaaattgaaaaaaat

SEQ ID NO: 134170 - DNA, 33 bp, Homo sapien
tacagcatggctgccacgaaaattgaaaaaaat

SEQ ID NO: 134171 - DNA, 33 bp, Homo sapien
tttctgttgggcagtagtaacagattaggctga

SEQ ID NO: 134172 - DNA, 33 bp, Homo sapien
tttctgttgggcagtattaacagattaggctga

SEQ ID NO: 134173 - DNA, 33 bp, Homo sapien
cacatgaaagggaaaacgtcaaaatgtataagg

SEQ ID NO: 134174 - DNA, 33 bp, Homo sapien
cacatgaaagggaaaatgtcaaaatgtataagg

SEQ ID NO: 134175 - DNA, 33 bp, Homo sapien
aatgacacccagaaggaaaattctctttagaaa

SEQ ID NO: 134176 - DNA, 33 bp, Homo sapien
aatgacacccagaagggaaattctctttagaaa

SEQ ID NO: 134177 - DNA, 33 bp, Homo sapien
cagaaactgaacacaaatgattgaaaggtcaat

SEQ ID NO: 134178 - DNA, 33 bp, Homo sapien
cagaaactgaacacaagtgattgaaaggtcaat

SEQ ID NO: 134179 - DNA, 33 bp, Homo sapien
aggtcaatggataaaacaaactgcccaggagat

SEQ ID NO: 134180 - DNA, 33 bp, Homo sapien
aggtcaatggataaaagaaactgcccaggagat

SEQ ID NO: 134181 - DNA, 33 bp, Homo sapien
ttgacagttccctttaagttgtgtgttgttagc

SEQ ID NO: 134182 - DNA, 33 bp, Homo sapien
ttgacagttccctttaggttgtgtgttgttagc

SEQ ID NO: 134183 - DNA, 33 bp, Homo sapien
gatttgagcctatgcaagaggctgactgtaggc

SEQ ID NO: 134184 - DNA, 33 bp, Homo sapien
gatttgagcctatgcaggaggctgactgtaggc

SEQ ID NO: 134185 - DNA, 33 bp, Homo sapien
attcttgccttattgacaatgtaggcctaatgg

SEQ ID NO: 134186 - DNA, 33 bp, Homo sapien
attcttgccttattgagaatgtaggcctaatgg

SEQ ID NO: 134187 - DNA, 33 bp, Homo sapien
tctgagatatcactaaccccaatgccagagaaa

SEQ ID NO: 134188 - DNA, 33 bp, Homo sapien
tctgagatatcactaatcccaatgccagagaaa

SEQ ID NO: 134189 - DNA, 33 bp, Homo sapien
caaggcatggccactgcagttttagctcagcca

SEQ ID NO: 134190 - DNA, 33 bp, Homo sapien
caaggcatggccactgtagttttagctcagcca

SEQ ID NO: 134191 - DNA, 33 bp, Homo sapien
ttaaaatggaacttcaacctattggtgtaaaat

SEQ ID NO: 134192 - DNA, 33 bp, Homo sapien
ttaaaatggaacttcatcctattggtgtaaaat

SEQ ID NO: 134193 - DNA, 33 bp, Homo sapien
aagatagacacacagaagagaagatagaagaga

SEQ ID NO: 134194 - DNA, 33 bp, Homo sapien
aagatagacacacagaggagaagatagaagaga

SEQ ID NO: 134195 - DNA, 33 bp, Homo sapien
attactatgtaaagtcaagggttccatacagag

SEQ ID NO: 134196 - DNA, 33 bp, Homo sapien
attactatgtaaagtctagggttccatacagag

SEQ ID NO: 134197 - DNA, 33 bp, Homo sapien
ctctgcagatgacagaaatgaagtctttaatgg

SEQ ID NO: 134198 - DNA, 33 bp, Homo sapien
ctctgcagatgacagagatgaagtctttaatgg

SEQ ID NO: 134199 - DNA, 33 bp, Homo sapien
aaacaactgtttctacggtaagcaaaagtcagc

SEQ ID NO: 134200 - DNA, 33 bp, Homo sapien
aaacaactgtttctactgtaagcaaaagtcagc

SEQ ID NO: 134201 - DNA, 33 bp, Homo sapien
tagggaccttctagaccggaatcctcacaccaa

SEQ ID NO: 134202 - DNA, 33 bp, Homo sapien
tagggaccttctagactggaatcctcacaccaa

SEQ ID NO: 134203 - DNA, 33 bp, Homo sapien
agaaacaatttacttcactgccaacatttgagt

SEQ ID NO: 134204 - DNA, 33 bp, Homo sapien
agaaacaatttacttcgctgccaacatttgagt

SEQ ID NO: 134205 - DNA, 33 bp, Homo sapien
ccaggtccttgagaacaacattcttggattgta

SEQ ID NO: 134206 - DNA, 33 bp, Homo sapien
ccaggtccttgagaacgacattcttggattgta

SEQ ID NO: 134207 - DNA, 33 bp, Homo sapien
ctacagtagagcctaacggttaagcttcatggt

SEQ ID NO: 134208 - DNA, 33 bp, Homo sapien
ctacagtagagcctaatggttaagcttcatggt

SEQ ID NO: 134209 - DNA, 33 bp, Homo sapien
agaggatgaaagtaacacaagaaacatcactgg

SEQ ID NO: 134210 - DNA, 33 bp, Homo sapien
agaggatgaaagtaacccaagaaacatcactgg

SEQ ID NO: 134211 - DNA, 33 bp, Homo sapien
cctgagtccttgttcacatcgaccctttgtcac

SEQ ID NO: 134212 - DNA, 33 bp, Homo sapien
cctgagtccttgttcatatcgaccctttgtcac

SEQ ID NO: 134213 - DNA, 33 bp, Homo sapien
ccttcacagtattagacgagtttaggtcttacc

SEQ ID NO: 134214 - DNA, 33 bp, Homo sapien
ccttcacagtattagatgagtttaggtcttacc

SEQ ID NO: 134215 - DNA, 33 bp, Homo sapien
tagtccaggctttctgacaattctcaagggcat

SEQ ID NO: 134216 - DNA, 33 bp, Homo sapien
tagtccaggctttctggcaattctcaagggcat

SEQ ID NO: 134217 - DNA, 33 bp, Homo sapien
ttacttccaacaattaacagccatcttttatta

SEQ ID NO: 134218 - DNA, 33 bp, Homo sapien
ttacttccaacaattatcagccatcttttatta

SEQ ID NO: 134219 - DNA, 33 bp, Homo sapien
aatggaaaaacctaataaagaaagcagcttaac

SEQ ID NO: 134220 - DNA, 33 bp, Homo sapien
aatggaaaaacctaattaagaaagcagcttaac

SEQ ID NO: 134221 - DNA, 33 bp, Homo sapien
tgtattagtatattagaaaaaattgtgactata

SEQ ID NO: 134222 - DNA, 33 bp, Homo sapien
tgtattagtatattaggaaaaattgtgactata

SEQ ID NO: 134223 - DNA, 33 bp, Homo sapien
cagaaacagatagtaaatcagaaacatggagat

SEQ ID NO: 134224 - DNA, 33 bp, Homo sapien
cagaaacagatagtaagtcagaaacatggagat

SEQ ID NO: 134225 - DNA, 33 bp, Homo sapien
agtatcagtcaccataccttagtttgtaatgca

SEQ ID NO: 134226 - DNA, 33 bp, Homo sapien
agtatcagtcaccatatcttagtttgtaatgca

SEQ ID NO: 134227 - DNA, 33 bp, Homo sapien
tatgcactgattatccagctcagtatcagtcac

SEQ ID NO: 134228 - DNA, 33 bp, Homo sapien
tatgcactgattatccggctcagtatcagtcac

SEQ ID NO: 134229 - DNA, 33 bp, Homo sapien
cccatcgcatcagtgaaaacaacggcacaattg

SEQ ID NO: 134230 - DNA, 33 bp, Homo sapien
cccatcgcatcagtgataacaacggcacaattg

SEQ ID NO: 134231 - DNA, 33 bp, Homo sapien
tccagactatcactaaataagtaagcaaacctc

SEQ ID NO: 134232 - DNA, 33 bp, Homo sapien
tccagactatcactaagtaagtaagcaaacctc

SEQ ID NO: 134233 - DNA, 33 bp, Homo sapien
ggcttgggctcatagcacagaccctttaacctg

SEQ ID NO: 134234 - DNA, 33 bp, Homo sapien
ggcttgggctcatagcgcagaccctttaacctg

SEQ ID NO: 134235 - DNA, 33 bp, Homo sapien
taggtatttattccccaccactcatttatcatt

SEQ ID NO: 134236 - DNA, 33 bp, Homo sapien
taggtatttattccccgccactcatttatcatt

SEQ ID NO: 134237 - DNA, 33 bp, Homo sapien
tgtgatgtcattaaaacatcccagatgataagc

SEQ ID NO: 134238 - DNA, 33 bp, Homo sapien
tgtgatgtcattaaaatatcccagatgataagc

SEQ ID NO: 134239 - DNA, 33 bp, Homo sapien
agcatctctaggaaataaaatctttggaggact

SEQ ID NO: 134240 - DNA, 33 bp, Homo sapien
agcatctctaggaaatcaaatctttggaggact

SEQ ID NO: 134241 - DNA, 33 bp, Homo sapien
caaaagacaaaagtccaagtttatgagaaaaat

SEQ ID NO: 134242 - DNA, 33 bp, Homo sapien
caaaagacaaaagtcccagtttatgagaaaaat

SEQ ID NO: 134243 - DNA, 33 bp, Homo sapien
cagtagcaaataaataaatccacttcagcctac

SEQ ID NO: 134244 - DNA, 33 bp, Homo sapien
cagtagcaaataaatacatccacttcagcctac

SEQ ID NO: 134245 - DNA, 33 bp, Homo sapien
ggtcctgaacctccaaagcccccacatgatgta

SEQ ID NO: 134246 - DNA, 33 bp, Homo sapien
ggtcctgaacctccaacgcccccacatgatgta

SEQ ID NO: 134247 - DNA, 33 bp, Homo sapien
gcctagagttagactgaatttaagttgaggatg

SEQ ID NO: 134248 - DNA, 33 bp, Homo sapien
gcctagagttagactggatttaagttgaggatg

SEQ ID NO: 134249 - DNA, 33 bp, Homo sapien
caaaagggtgatactacctctgtttagcagatg

SEQ ID NO: 134250 - DNA, 33 bp, Homo sapien
caaaagggtgatactatctctgtttagcagatg

SEQ ID NO: 134251 - DNA, 33 bp, Homo sapien
actagcttcttttctacgtctctcatttaggta

SEQ ID NO: 134252 - DNA, 33 bp, Homo sapien
actagcttcttttctatgtctctcatttaggta

SEQ ID NO: 134253 - DNA, 33 bp, Homo sapien
tcaagttttcatatgacacctcagttttaggta

SEQ ID NO: 134254 - DNA, 33 bp, Homo sapien
tcaagttttcatatgagacctcagttttaggta

SEQ ID NO: 134255 - DNA, 33 bp, Homo sapien
cttccatattgctgagacccagttggatcttta

SEQ ID NO: 134256 - DNA, 33 bp, Homo sapien
cttccatattgctgaggcccagttggatcttta

SEQ ID NO: 134257 - DNA, 33 bp, Homo sapien
gagtaaggggatggtaggacgtggaatttgaag

SEQ ID NO: 134258 - DNA, 33 bp, Homo sapien
gagtaaggggatggtatgacgtggaatttgaag

SEQ ID NO: 134259 - DNA, 33 bp, Homo sapien
tgcaacctggacaaaacatcccatggtcattgg

SEQ ID NO: 134260 - DNA, 33 bp, Homo sapien
tgcaacctggacaaaatatcccatggtcattgg

SEQ ID NO: 134261 - DNA, 33 bp, Homo sapien
ctttttagattgctgcagagaaagtgaggcact

SEQ ID NO: 134262 - DNA, 33 bp, Homo sapien
ctttttagattgctgccgagaaagtgaggcact

SEQ ID NO: 134263 - DNA, 33 bp, Homo sapien
tagccccatcacaacaagccatacaacctccag

SEQ ID NO: 134264 - DNA, 33 bp, Homo sapien
tagccccatcacaacaggccatacaacctccag

SEQ ID NO: 134265 - DNA, 33 bp, Homo sapien
tgatctgtgtttctaactcttgaataaaactgt

SEQ ID NO: 134266 - DNA, 33 bp, Homo sapien
tgatctgtgtttctaagtcttgaataaaactgt

SEQ ID NO: 134267 - DNA, 33 bp, Homo sapien
aaaaccactctttgtgcagaacatcagactatt

SEQ ID NO: 134268 - DNA, 33 bp, Homo sapien
aaaaccactctttgtgtagaacatcagactatt

SEQ ID NO: 134269 - DNA, 33 bp, Homo sapien
ttgacaaatgctcccactcaaacctcatctttt

SEQ ID NO: 134270 - DNA, 33 bp, Homo sapien
ttgacaaatgctcccattcaaacctcatctttt

SEQ ID NO: 134271 - DNA, 33 bp, Homo sapien
tctttattaagaagcaaacaagcaaggatctaa

SEQ ID NO: 134272 - DNA, 33 bp, Homo sapien
tctttattaagaagcacacaagcaaggatctaa

SEQ ID NO: 134273 - DNA, 33 bp, Homo sapien
tggtcaaatatggtaaaatatataaggatgatg

SEQ ID NO: 134274 - DNA, 33 bp, Homo sapien
tggtcaaatatggtaagatatataaggatgatg

SEQ ID NO: 134275 - DNA, 33 bp, Homo sapien
gatcatggccttttgacgctatagtcttttgct

SEQ ID NO: 134276 - DNA, 33 bp, Homo sapien
gatcatggccttttgatgctatagtcttttgct

SEQ ID NO: 134277 - DNA, 33 bp, Homo sapien
tttttcttcattatcaataagtcaacatataac

SEQ ID NO: 134278 - DNA, 33 bp, Homo sapien
tttttcttcattatcagtaagtcaacatataac

SEQ ID NO: 134279 - DNA, 33 bp, Homo sapien
taggaggaatcatagaacctttgaagttatagg

SEQ ID NO: 134280 - DNA, 33 bp, Homo sapien
taggaggaatcatagagcctttgaagttatagg

SEQ ID NO: 134281 - DNA, 33 bp, Homo sapien
tgggatccaggtagaaagacaagcagagacggg

SEQ ID NO: 134282 - DNA, 33 bp, Homo sapien
tgggatccaggtagaaggacaagcagagacggg

SEQ ID NO: 134283 - DNA, 33 bp, Homo sapien
ggggtattgaagggataaaatgcccagaggaaa

SEQ ID NO: 134284 - DNA, 33 bp, Homo sapien
ggggtattgaagggattaaatgcccagaggaaa

SEQ ID NO: 134285 - DNA, 33 bp, Homo sapien
tcagcacaggctgttacagtctagtgtcataaa

SEQ ID NO: 134286 - DNA, 33 bp, Homo sapien
tcagcacaggctgttatagtctagtgtcataaa

SEQ ID NO: 134287 - DNA, 33 bp, Homo sapien
tcaccaacccacaagacactgtccttctcactc

SEQ ID NO: 134288 - DNA, 33 bp, Homo sapien
tcaccaacccacaagatactgtccttctcactc

SEQ ID NO: 134289 - DNA, 33 bp, Homo sapien
gggcaaggactcaggacctgctgaacggcagga

SEQ ID NO: 134290 - DNA, 33 bp, Homo sapien
gggcaaggactcaggatctgctgaacggcagga

SEQ ID NO: 134291 - DNA, 33 bp, Homo sapien
tccttgccctgcttccaggaagaatgaagttac

SEQ ID NO: 134292 - DNA, 33 bp, Homo sapien
tccttgccctgcttccgggaagaatgaagttac

SEQ ID NO: 134293 - DNA, 33 bp, Homo sapien
caagattttttacttgcatgaaaggaaacacat

SEQ ID NO: 134294 - DNA, 33 bp, Homo sapien
caagattttttacttgtatgaaaggaaacacat

SEQ ID NO: 134295 - DNA, 33 bp, Homo sapien
tccaaggttggtgtaactgctgagtgattttat

SEQ ID NO: 134296 - DNA, 33 bp, Homo sapien
tccaaggttggtgtaagtgctgagtgattttat

SEQ ID NO: 134297 - DNA, 33 bp, Homo sapien
gggctgtagaagggtacaggtccaacttctgta

SEQ ID NO: 134298 - DNA, 33 bp, Homo sapien
gggctgtagaagggtagaggtccaacttctgta

SEQ ID NO: 134299 - DNA, 33 bp, Homo sapien
ctcttgacaaactagaacttccaaaggtcaggg

SEQ ID NO: 134300 - DNA, 33 bp, Homo sapien
ctcttgacaaactagagcttccaaaggtcaggg

SEQ ID NO: 134301 - DNA, 33 bp, Homo sapien
ccaggactcagccttaaaaaccagtagttgagg

SEQ ID NO: 134302 - DNA, 33 bp, Homo sapien
ccaggactcagccttagaaaccagtagttgagg

SEQ ID NO: 134303 - DNA, 33 bp, Homo sapien
agaaatgctttagggcaaagatcttggggtcca

SEQ ID NO: 134304 - DNA, 33 bp, Homo sapien
agaaatgctttagggcgaagatcttggggtcca

SEQ ID NO: 134305 - DNA, 33 bp, Homo sapien
tttacagttcctaacccgcacatgaattccagc

SEQ ID NO: 134306 - DNA, 33 bp, Homo sapien
tttacagttcctaacctgcacatgaattccagc

SEQ ID NO: 134307 - DNA, 33 bp, Homo sapien
tgactgaccatcagtgaaggtaaatattcagaa

SEQ ID NO: 134308 - DNA, 33 bp, Homo sapien
tgactgaccatcagtggaggtaaatattcagaa

SEQ ID NO: 134309 - DNA, 33 bp, Homo sapien
gaaaaacttataagcactctcatttgtgaatca

SEQ ID NO: 134310 - DNA, 33 bp, Homo sapien
gaaaaacttataagcattctcatttgtgaatca

SEQ ID NO: 134311 - DNA, 33 bp, Homo sapien
ctatgccaataaaatgacaacagaaaaacaaca

SEQ ID NO: 134312 - DNA, 33 bp, Homo sapien
ctatgccaataaaatggcaacagaaaaacaaca

SEQ ID NO: 134313 - DNA, 33 bp, Homo sapien
cttcctcaaagctcaaatgaacttagtcccagg

SEQ ID NO: 134314 - DNA, 33 bp, Homo sapien
cttcctcaaagctcaagtgaacttagtcccagg

SEQ ID NO: 134315 - DNA, 33 bp, Homo sapien
aggtaaggggtggaaccgcactatgaacagagg

SEQ ID NO: 134316 - DNA, 33 bp, Homo sapien
aggtaaggggtggaactgcactatgaacagagg

SEQ ID NO: 134317 - DNA, 33 bp, Homo sapien
agaagatacctctcaacaaaagattatatggcc

SEQ ID NO: 134318 - DNA, 33 bp, Homo sapien
agaagatacctctcaataaaagattatatggcc

SEQ ID NO: 134319 - DNA, 33 bp, Homo sapien
gattttttgctagaaagcctggcaatgttgtag

SEQ ID NO: 134320 - DNA, 33 bp, Homo sapien
gattttttgctagaaatcctggcaatgttgtag

SEQ ID NO: 134321 - DNA, 33 bp, Homo sapien
tgagaagctactaagaaataaaattaaacaaca

SEQ ID NO: 134322 - DNA, 33 bp, Homo sapien
tgagaagctactaagagataaaattaaacaaca

SEQ ID NO: 134323 - DNA, 33 bp, Homo sapien
ttcccagttactgtccggagtttaatatcttag

SEQ ID NO: 134324 - DNA, 33 bp, Homo sapien
ttcccagttactgtcctgagtttaatatcttag

SEQ ID NO: 134325 - DNA, 33 bp, Homo sapien
acatctgattgcaaaaacaaagtgcaaaggaca

SEQ ID NO: 134326 - DNA, 33 bp, Homo sapien
acatctgattgcaaaagcaaagtgcaaaggaca

SEQ ID NO: 134327 - DNA, 33 bp, Homo sapien
ctcccaaatgggagcaagtgctagttagttctt

SEQ ID NO: 134328 - DNA, 33 bp, Homo sapien
ctcccaaatgggagcaggtgctagttagttctt

SEQ ID NO: 134329 - DNA, 33 bp, Homo sapien
cactttattcccgaggaaactgtcacttgccta

SEQ ID NO: 134330 - DNA, 33 bp, Homo sapien
cactttattcccgaggtaactgtcacttgccta

SEQ ID NO: 134331 - DNA, 33 bp, Homo sapien
gcctgatataatgcacaaaaagaagcacatcac

SEQ ID NO: 134332 - DNA, 33 bp, Homo sapien
gcctgatataatgcactaaaagaagcacatcac

SEQ ID NO: 134333 - DNA, 33 bp, Homo sapien
gctagaaaaatagcaacagtagtgtttatttaa

SEQ ID NO: 134334 - DNA, 33 bp, Homo sapien
gctagaaaaatagcaatagtagtgtttatttaa

SEQ ID NO: 134335 - DNA, 33 bp, Homo sapien
atgttttaggtggtacactcggatgtgcaggct

SEQ ID NO: 134336 - DNA, 33 bp, Homo sapien
atgttttaggtggtaccctcggatgtgcaggct

SEQ ID NO: 134337 - DNA, 33 bp, Homo sapien
ttaatcacattactaactctgtggtcatataag

SEQ ID NO: 134338 - DNA, 33 bp, Homo sapien
ttaatcacattactaattctgtggtcatataag

SEQ ID NO: 134339 - DNA, 33 bp, Homo sapien
cacacacaccagtgacacagtcatcacaaattt

SEQ ID NO: 134340 - DNA, 33 bp, Homo sapien
cacacacaccagtgacgcagtcatcacaaattt

SEQ ID NO: 134341 - DNA, 33 bp, Homo sapien
cagttagtatttttagcattccaggcaatttac

SEQ ID NO: 134342 - DNA, 33 bp, Homo sapien
cagttagtatttttagtattccaggcaatttac

SEQ ID NO: 134343 - DNA, 33 bp, Homo sapien
ctaagaaatatgtgacaaacaaactgagataac

SEQ ID NO: 134344 - DNA, 33 bp, Homo sapien
ctaagaaatatgtgaccaacaaactgagataac

SEQ ID NO: 134345 - DNA, 33 bp, Homo sapien
ccatttgtccttccaaacttcaagacaagaaat

SEQ ID NO: 134346 - DNA, 33 bp, Homo sapien
ccatttgtccttccaagcttcaagacaagaaat

SEQ ID NO: 134347 - DNA, 33 bp, Homo sapien
agatttgaacaaagacaaagaatttacatttgc

SEQ ID NO: 134348 - DNA, 33 bp, Homo sapien
agatttgaacaaagactaagaatttacatttgc

SEQ ID NO: 134349 - DNA, 33 bp, Homo sapien
catctagacaggcttaaaaaattgtggtatact

SEQ ID NO: 134350 - DNA, 33 bp, Homo sapien
catctagacaggcttacaaaattgtggtatact

SEQ ID NO: 134351 - DNA, 33 bp, Homo sapien
ttagcacagaaaagcacaaccactgtaatcact

SEQ ID NO: 134352 - DNA, 33 bp, Homo sapien
ttagcacagaaaagcataaccactgtaatcact

SEQ ID NO: 134353 - DNA, 33 bp, Homo sapien
aaaatctaaaggggcaagtagacaaaagttgaa

SEQ ID NO: 134354 - DNA, 33 bp, Homo sapien
aaaatctaaaggggcaggtagacaaaagttgaa

SEQ ID NO: 134355 - DNA, 33 bp, Homo sapien
gtgacagggggatgtgaagattagacgtgctct

SEQ ID NO: 134356 - DNA, 33 bp, Homo sapien
gtgacagggggatgtgcagattagacgtgctct

SEQ ID NO: 134357 - DNA, 33 bp, Homo sapien
tgaggactttcacaaaaaggtcattgcagctgg

SEQ ID NO: 134358 - DNA, 33 bp, Homo sapien
tgaggactttcacaaagaggtcattgcagctgg

SEQ ID NO: 134359 - DNA, 33 bp, Homo sapien
aatgatctagaattgaagccacaacattcgtat

SEQ ID NO: 134360 - DNA, 33 bp, Homo sapien
aatgatctagaattgaggccacaacattcgtat

SEQ ID NO: 134361 - DNA, 33 bp, Homo sapien
gagcttcaaatggagaaccacaatagagttttc

SEQ ID NO: 134362 - DNA, 33 bp, Homo sapien
gagcttcaaatggagacccacaatagagttttc

SEQ ID NO: 134363 - DNA, 33 bp, Homo sapien
cttaataaaacatataacatcagttctgaggaa

SEQ ID NO: 134364 - DNA, 33 bp, Homo sapien
cttaataaaacatatatcatcagttctgaggaa

SEQ ID NO: 134365 - DNA, 33 bp, Homo sapien
aggatgcccaggattgcaagctatcagcagaaa

SEQ ID NO: 134366 - DNA, 33 bp, Homo sapien
aggatgcccaggattgtaagctatcagcagaaa

SEQ ID NO: 134367 - DNA, 33 bp, Homo sapien
ggctagtatggagatcagaggaatggtaagtaa

SEQ ID NO: 134368 - DNA, 33 bp, Homo sapien
ggctagtatggagatcggaggaatggtaagtaa

SEQ ID NO: 134369 - DNA, 33 bp, Homo sapien
tgaaatacagactgaaagttattggttacccat

SEQ ID NO: 134370 - DNA, 33 bp, Homo sapien
tgaaatacagactgaaggttattggttacccat

SEQ ID NO: 134371 - DNA, 33 bp, Homo sapien
caccagatagaagctgccaactttgggaacaaa

SEQ ID NO: 134372 - DNA, 33 bp, Homo sapien
caccagatagaagctgtcaactttgggaacaaa

SEQ ID NO: 134373 - DNA, 33 bp, Homo sapien
atcaatttctggtttcaagtagcaaatttagga

SEQ ID NO: 134374 - DNA, 33 bp, Homo sapien
atcaatttctggtttcgagtagcaaatttagga

SEQ ID NO: 134375 - DNA, 33 bp, Homo sapien
atcattattctagataaattaaccagcagtcaa

SEQ ID NO: 134376 - DNA, 33 bp, Homo sapien
atcattattctagatagattaaccagcagtcaa

SEQ ID NO: 134377 - DNA, 33 bp, Homo sapien
ttagaaaatcagggaaaatcaacatttggtctg

SEQ ID NO: 134378 - DNA, 33 bp, Homo sapien
ttagaaaatcagggaatatcaacatttggtctg

SEQ ID NO: 134379 - DNA, 33 bp, Homo sapien
taatgaaagcaccaggacactctcataaatatg

SEQ ID NO: 134380 - DNA, 33 bp, Homo sapien
taatgaaagcaccaggtcactctcataaatatg

SEQ ID NO: 134381 - DNA, 33 bp, Homo sapien
tatattgcaacagtgacggttttcaggtttgta

SEQ ID NO: 134382 - DNA, 33 bp, Homo sapien
tatattgcaacagtgatggttttcaggtttgta

SEQ ID NO: 134383 - DNA, 33 bp, Homo sapien
tgttttcacagggactaaattgcctaaagatgc

SEQ ID NO: 134384 - DNA, 33 bp, Homo sapien
tgttttcacagggacttaattgcctaaagatgc

SEQ ID NO: 134385 - DNA, 33 bp, Homo sapien
gctgccactttaacaactggttggagtacagaa

SEQ ID NO: 134386 - DNA, 33 bp, Homo sapien
gctgccactttaacaattggttggagtacagaa

SEQ ID NO: 134387 - DNA, 33 bp, Homo sapien
gagaacaaacacatataaaaagatctatgactg

SEQ ID NO: 134388 - DNA, 33 bp, Homo sapien
gagaacaaacacatatgaaaagatctatgactg

SEQ ID NO: 134389 - DNA, 33 bp, Homo sapien
ggagacacttgactataaatgattgtgaaggca

SEQ ID NO: 134390 - DNA, 33 bp, Homo sapien
ggagacacttgactatgaatgattgtgaaggca

SEQ ID NO: 134391 - DNA, 33 bp, Homo sapien
gtattagaggtagaaacttgagattcattatcc

SEQ ID NO: 134392 - DNA, 33 bp, Homo sapien
gtattagaggtagaaatttgagattcattatcc

SEQ ID NO: 134393 - DNA, 33 bp, Homo sapien
tcattgggtagatccaaatgtttccaagcataa

SEQ ID NO: 134394 - DNA, 33 bp, Homo sapien
tcattgggtagatccagatgtttccaagcataa

SEQ ID NO: 134395 - DNA, 33 bp, Homo sapien
gatacacacttccttcaccttacttgcaggcac

SEQ ID NO: 134396 - DNA, 33 bp, Homo sapien
gatacacacttccttcgccttacttgcaggcac

SEQ ID NO: 134397 - DNA, 33 bp, Homo sapien
tccaagcacttgtactgaccatctaaaaaaaca

SEQ ID NO: 134398 - DNA, 33 bp, Homo sapien
tccaagcacttgtacttaccatctaaaaaaaca

SEQ ID NO: 134399 - DNA, 33 bp, Homo sapien
ttacaaagcaactgtcaacaaaacaaaataagg

SEQ ID NO: 134400 - DNA, 33 bp, Homo sapien
ttacaaagcaactgtcgacaaaacaaaataagg

SEQ ID NO: 134401 - DNA, 33 bp, Homo sapien
caattaattcttagaccatctacactggcctat

SEQ ID NO: 134402 - DNA, 33 bp, Homo sapien
caattaattcttagactatctacactggcctat

SEQ ID NO: 134403 - DNA, 33 bp, Homo sapien
tcaaactcatttatgcactttttcctttcaaga

SEQ ID NO: 134404 - DNA, 33 bp, Homo sapien
tcaaactcatttatgcgctttttcctttcaaga

SEQ ID NO: 134405 - DNA, 33 bp, Homo sapien
gatgtctgtattaaaaactcactatcttcttca

SEQ ID NO: 134406 - DNA, 33 bp, Homo sapien
gatgtctgtattaaaagctcactatcttcttca

SEQ ID NO: 134407 - DNA, 33 bp, Homo sapien
aggccatttcattgtacgtttcttatcaaattt

SEQ ID NO: 134408 - DNA, 33 bp, Homo sapien
aggccatttcattgtatgtttcttatcaaattt

SEQ ID NO: 134409 - DNA, 33 bp, Homo sapien
taaactttgtcagtagaatgtccaaaatgcagg

SEQ ID NO: 134410 - DNA, 33 bp, Homo sapien
taaactttgtcagtaggatgtccaaaatgcagg

SEQ ID NO: 134411 - DNA, 33 bp, Homo sapien
tgtgatactatcactccccaacttacagggcat

SEQ ID NO: 134412 - DNA, 33 bp, Homo sapien
tgtgatactatcactctccaacttacagggcat

SEQ ID NO: 134413 - DNA, 33 bp, Homo sapien
aaattccactctcagaatagatctggaagggag

SEQ ID NO: 134414 - DNA, 33 bp, Homo sapien
aaattccactctcagagtagatctggaagggag

SEQ ID NO: 134415 - DNA, 33 bp, Homo sapien
tctgtgcaacagtaggccattgagaaagtacat

SEQ ID NO: 134416 - DNA, 33 bp, Homo sapien
tctgtgcaacagtagggcattgagaaagtacat

SEQ ID NO: 134417 - DNA, 33 bp, Homo sapien
aaaacatctagcagaaaccctggcatcgaataa

SEQ ID NO: 134418 - DNA, 33 bp, Homo sapien
aaaacatctagcagaatccctggcatcgaataa

SEQ ID NO: 134419 - DNA, 33 bp, Homo sapien
tggtgctgccactggcaaaacatatatggaatt

SEQ ID NO: 134420 - DNA, 33 bp, Homo sapien
tggtgctgccactggcgaaacatatatggaatt

SEQ ID NO: 134421 - DNA, 33 bp, Homo sapien
agtccatgagtttccactgctaaatcaaaaaga

SEQ ID NO: 134422 - DNA, 33 bp, Homo sapien
agtccatgagtttccattgctaaatcaaaaaga

SEQ ID NO: 134423 - DNA, 33 bp, Homo sapien
atgtacagtagatgccaaaatcctttaagatat

SEQ ID NO: 134424 - DNA, 33 bp, Homo sapien
atgtacagtagatgcccaaatcctttaagatat

SEQ ID NO: 134425 - DNA, 33 bp, Homo sapien
tccttccttacaattaccttaggcttgtcttct

SEQ ID NO: 134426 - DNA, 33 bp, Homo sapien
tccttccttacaattagcttaggcttgtcttct

SEQ ID NO: 134427 - DNA, 33 bp, Homo sapien
tagattccccgataagaaagtgtctttaaccaa

SEQ ID NO: 134428 - DNA, 33 bp, Homo sapien
tagattccccgataaggaagtgtctttaaccaa

SEQ ID NO: 134429 - DNA, 33 bp, Homo sapien
actgcatggagatagacggaggtagagacataa

SEQ ID NO: 134430 - DNA, 33 bp, Homo sapien
actgcatggagatagatggaggtagagacataa

SEQ ID NO: 134431 - DNA, 33 bp, Homo sapien
gaagtctgaaccccgcccatcattcagatctgc

SEQ ID NO: 134432 - DNA, 33 bp, Homo sapien
gaagtctgaaccccgcgcatcattcagatctgc

SEQ ID NO: 134433 - DNA, 33 bp, Homo sapien
actctggtccagatacaaggaaagtttattaaa

SEQ ID NO: 134434 - DNA, 33 bp, Homo sapien
actctggtccagatacgaggaaagtttattaaa

SEQ ID NO: 134435 - DNA, 33 bp, Homo sapien
aggaaaccaagcaaaaactatcatctccatatt

SEQ ID NO: 134436 - DNA, 33 bp, Homo sapien
aggaaaccaagcaaaacctatcatctccatatt

SEQ ID NO: 134437 - DNA, 33 bp, Homo sapien
gtgtggttagtaacaaagaagattacacaatga

SEQ ID NO: 134438 - DNA, 33 bp, Homo sapien
gtgtggttagtaacaaggaagattacacaatga

SEQ ID NO: 134439 - DNA, 33 bp, Homo sapien
tttttcatctacaagcagaccatggagaaatgt

SEQ ID NO: 134440 - DNA, 33 bp, Homo sapien
tttttcatctacaagcggaccatggagaaatgt

SEQ ID NO: 134441 - DNA, 33 bp, Homo sapien
catttcaacagcagacactaaattaggagaaat

SEQ ID NO: 134442 - DNA, 33 bp, Homo sapien
catttcaacagcagacgctaaattaggagaaat

SEQ ID NO: 134443 - DNA, 33 bp, Homo sapien
cagtttttatggaacaccacctctggaaattca

SEQ ID NO: 134444 - DNA, 33 bp, Homo sapien
cagtttttatggaacatcacctctggaaattca

SEQ ID NO: 134445 - DNA, 33 bp, Homo sapien
gtgttggtgagaatgacggtaattaaggtttta

SEQ ID NO: 134446 - DNA, 33 bp, Homo sapien
gtgttggtgagaatgagggtaattaaggtttta

SEQ ID NO: 134447 - DNA, 33 bp, Homo sapien
aatctttgaatttataagtttgaaagttcatga

SEQ ID NO: 134448 - DNA, 33 bp, Homo sapien
aatctttgaatttatatgtttgaaagttcatga

SEQ ID NO: 134449 - DNA, 33 bp, Homo sapien
atttggtataagaaacagtgaaaggactgttta

SEQ ID NO: 134450 - DNA, 33 bp, Homo sapien
atttggtataagaaaccgtgaaaggactgttta

SEQ ID NO: 134451 - DNA, 33 bp, Homo sapien
aattcaaaggcacataacaagttggaagaagta

SEQ ID NO: 134452 - DNA, 33 bp, Homo sapien
aattcaaaggcacatagcaagttggaagaagta

SEQ ID NO: 134453 - DNA, 33 bp, Homo sapien
aagagtatgtgtgagacattgagtaagaaatgc

SEQ ID NO: 134454 - DNA, 33 bp, Homo sapien
aagagtatgtgtgagagattgagtaagaaatgc

SEQ ID NO: 134455 - DNA, 33 bp, Homo sapien
tccataagttaacagacagaggtgtgacacggc

SEQ ID NO: 134456 - DNA, 33 bp, Homo sapien
tccataagttaacagatagaggtgtgacacggc

SEQ ID NO: 134457 - DNA, 33 bp, Homo sapien
tgtcagccccataaacaattatttgcccggcac

SEQ ID NO: 134458 - DNA, 33 bp, Homo sapien
tgtcagccccataaacgattatttgcccggcac

SEQ ID NO: 134459 - DNA, 33 bp, Homo sapien
actgatgtttctatgaacgataccattctccca

SEQ ID NO: 134460 - DNA, 33 bp, Homo sapien
actgatgtttctatgaccgataccattctccca

SEQ ID NO: 134461 - DNA, 33 bp, Homo sapien
tggctgattagataacaaaagcaccaagaccta

SEQ ID NO: 134462 - DNA, 33 bp, Homo sapien
tggctgattagataacgaaagcaccaagaccta

SEQ ID NO: 134463 - DNA, 33 bp, Homo sapien
aacaattgctgggtccaaagtacgtttacaaat

SEQ ID NO: 134464 - DNA, 33 bp, Homo sapien
aacaattgctgggtccgaagtacgtttacaaat

SEQ ID NO: 134465 - DNA, 33 bp, Homo sapien
cagcactctttgaggacagttagatagtatttg

SEQ ID NO: 134466 - DNA, 33 bp, Homo sapien
cagcactctttgaggatagttagatagtatttg

SEQ ID NO: 134467 - DNA, 33 bp, Homo sapien
tctgcttgtgttaaaggcctgaaacaagaaaat

SEQ ID NO: 134468 - DNA, 33 bp, Homo sapien
tctgcttgtgttaaagtcctgaaacaagaaaat

SEQ ID NO: 134469 - DNA, 33 bp, Homo sapien
aagcttctatgattgaactaaaataaaacctta

SEQ ID NO: 134470 - DNA, 33 bp, Homo sapien
aagcttctatgattgacctaaaataaaacctta

SEQ ID NO: 134471 - DNA, 33 bp, Homo sapien
accatactaatcacatcatgcaaaaggtgcaca

SEQ ID NO: 134472 - DNA, 33 bp, Homo sapien
accatactaatcacatgatgcaaaaggtgcaca

SEQ ID NO: 134473 - DNA, 33 bp, Homo sapien
attgtagtccccaaaaattctgatcaaccaaat

SEQ ID NO: 134474 - DNA, 33 bp, Homo sapien
attgtagtccccaaaatttctgatcaaccaaat

SEQ ID NO: 134475 - DNA, 33 bp, Homo sapien
cacagagatgtagagaaattttaaagcacctaa

SEQ ID NO: 134476 - DNA, 33 bp, Homo sapien
cacagagatgtagagagattttaaagcacctaa

SEQ ID NO: 134477 - DNA, 33 bp, Homo sapien
cttttaattttactaccactagggctcattaca

SEQ ID NO: 134478 - DNA, 33 bp, Homo sapien
cttttaattttactactactagggctcattaca

SEQ ID NO: 134479 - DNA, 33 bp, Homo sapien
tttttcaggacttttcaaaatacccatcatttt

SEQ ID NO: 134480 - DNA, 33 bp, Homo sapien
tttttcaggacttttcgaaatacccatcatttt

SEQ ID NO: 134481 - DNA, 33 bp, Homo sapien
tggcagatgctttatgcagtaaataatgttgat

SEQ ID NO: 134482 - DNA, 33 bp, Homo sapien
tggcagatgctttatgtagtaaataatgttgat

SEQ ID NO: 134483 - DNA, 33 bp, Homo sapien
ttgaagaacacataatgatcctcttgcctgctc

SEQ ID NO: 134484 - DNA, 33 bp, Homo sapien
ttgaagaacacataattatcctcttgcctgctc

SEQ ID NO: 134485 - DNA, 33 bp, Homo sapien
tgtatgagcaaagcaaaagatttttaaaacctg

SEQ ID NO: 134486 - DNA, 33 bp, Homo sapien
tgtatgagcaaagcaagagatttttaaaacctg

SEQ ID NO: 134487 - DNA, 33 bp, Homo sapien
ccatttagacaagcgcaattctgaaaatgatgc

SEQ ID NO: 134488 - DNA, 33 bp, Homo sapien
ccatttagacaagcgcgattctgaaaatgatgc

SEQ ID NO: 134489 - DNA, 33 bp, Homo sapien
ccaaggctatattgaaatctctttggtccagtt

SEQ ID NO: 134490 - DNA, 33 bp, Homo sapien
ccaaggctatattgaagtctctttggtccagtt

SEQ ID NO: 134491 - DNA, 33 bp, Homo sapien
ctaaacagctttggcacagcaaaaaaaaaaaaa

SEQ ID NO: 134492 - DNA, 33 bp, Homo sapien
ctaaacagctttggcagagcaaaaaaaaaaaaa

SEQ ID NO: 134493 - DNA, 33 bp, Homo sapien
gagccactatagataacggtatgaaggtttctc

SEQ ID NO: 134494 - DNA, 33 bp, Homo sapien
gagccactatagataatggtatgaaggtttctc

SEQ ID NO: 134495 - DNA, 33 bp, Homo sapien
gctgcagtgccaggtacagcctagagtggcctg

SEQ ID NO: 134496 - DNA, 33 bp, Homo sapien
gctgcagtgccaggtagagcctagagtggcctg

SEQ ID NO: 134497 - DNA, 33 bp, Homo sapien
tagaatgaacgaatgaaccctcgctaaaaccag

SEQ ID NO: 134498 - DNA, 33 bp, Homo sapien
tagaatgaacgaatgatccctcgctaaaaccag

SEQ ID NO: 134499 - DNA, 33 bp, Homo sapien
atttcaggttgacaacactaaaagcaggtgcta

SEQ ID NO: 134500 - DNA, 33 bp, Homo sapien
atttcaggttgacaacgctaaaagcaggtgcta

SEQ ID NO: 134501 - DNA, 33 bp, Homo sapien
agtggctcatggaagaaacccaagccatgaaaa

SEQ ID NO: 134502 - DNA, 33 bp, Homo sapien
agtggctcatggaagagacccaagccatgaaaa

SEQ ID NO: 134503 - DNA, 33 bp, Homo sapien
tttaccagccacaaaaactacaactccctgtcc

SEQ ID NO: 134504 - DNA, 33 bp, Homo sapien
tttaccagccacaaaatctacaactccctgtcc

SEQ ID NO: 134505 - DNA, 33 bp, Homo sapien
ggtggaaggcagatagcagtggactaaagaggt

SEQ ID NO: 134506 - DNA, 33 bp, Homo sapien
ggtggaaggcagatagtagtggactaaagaggt

SEQ ID NO: 134507 - DNA, 33 bp, Homo sapien
gacataacttggaaaaatcagggagagtcacta

SEQ ID NO: 134508 - DNA, 33 bp, Homo sapien
gacataacttggaaaagtcagggagagtcacta

SEQ ID NO: 134509 - DNA, 33 bp, Homo sapien
ccaggcttgtcaccataataggaaatacacaca

SEQ ID NO: 134510 - DNA, 33 bp, Homo sapien
ccaggcttgtcaccatgataggaaatacacaca

SEQ ID NO: 134511 - DNA, 33 bp, Homo sapien
aatagtgtatacctatcagacaacacatgtaaa

SEQ ID NO: 134512 - DNA, 33 bp, Homo sapien
aatagtgtatacctatgagacaacacatgtaaa

SEQ ID NO: 134513 - DNA, 33 bp, Homo sapien
ctgcctagatcttccaatcttctatctgccact

SEQ ID NO: 134514 - DNA, 33 bp, Homo sapien
ctgcctagatcttccagtcttctatctgccact

SEQ ID NO: 134515 - DNA, 33 bp, Homo sapien
gcactctcttgaataactggacatacagcaatt

SEQ ID NO: 134516 - DNA, 33 bp, Homo sapien
gcactctcttgaataattggacatacagcaatt

SEQ ID NO: 134517 - DNA, 33 bp, Homo sapien
cttttttcctttttcacgagtgctgacccagac

SEQ ID NO: 134518 - DNA, 33 bp, Homo sapien
cttttttcctttttcatgagtgctgacccagac

SEQ ID NO: 134519 - DNA, 33 bp, Homo sapien
ctgcagacactaatttcaaatgacagtgacaca

SEQ ID NO: 134520 - DNA, 33 bp, Homo sapien
ctgcagacactaattttaaatgacagtgacaca

SEQ ID NO: 134521 - DNA, 33 bp, Homo sapien
taaaatgtggccatcccataatatctggggaga

SEQ ID NO: 134522 - DNA, 33 bp, Homo sapien
taaaatgtggccatcctataatatctggggaga

SEQ ID NO: 134523 - DNA, 33 bp, Homo sapien
agatgagaatattgtgcagaatttaggatacct

SEQ ID NO: 134524 - DNA, 33 bp, Homo sapien
agatgagaatattgtggagaatttaggatacct

SEQ ID NO: 134525 - DNA, 33 bp, Homo sapien
cagttggttacattagccacagatactgatctg

SEQ ID NO: 134526 - DNA, 33 bp, Homo sapien
cagttggttacattagtcacagatactgatctg

SEQ ID NO: 134527 - DNA, 33 bp, Homo sapien
tttttggcagaaataccgtacatgtgtcctctt

SEQ ID NO: 134528 - DNA, 33 bp, Homo sapien
tttttggcagaaatactgtacatgtgtcctctt

SEQ ID NO: 134529 - DNA, 33 bp, Homo sapien
tagggaagcctccagaaatttacaatcatggaa

SEQ ID NO: 134530 - DNA, 33 bp, Homo sapien
tagggaagcctccagatatttacaatcatggaa

SEQ ID NO: 134531 - DNA, 33 bp, Homo sapien
tgtcctgaagtcaaggaaactgataacaggaac

SEQ ID NO: 134532 - DNA, 33 bp, Homo sapien
tgtcctgaagtcaagggaactgataacaggaac

SEQ ID NO: 134533 - DNA, 33 bp, Homo sapien
atcaagtgttcatatccgacctctcaacagaat

SEQ ID NO: 134534 - DNA, 33 bp, Homo sapien
atcaagtgttcatatctgacctctcaacagaat

SEQ ID NO: 134535 - DNA, 33 bp, Homo sapien
catgtatccaccattacacaaccatacagaata

SEQ ID NO: 134536 - DNA, 33 bp, Homo sapien
catgtatccaccattatacaaccatacagaata

SEQ ID NO: 134537 - DNA, 33 bp, Homo sapien
tacaggtacatataaaatgatttacaggtatct

SEQ ID NO: 134538 - DNA, 33 bp, Homo sapien
tacaggtacatataaattgatttacaggtatct

SEQ ID NO: 134539 - DNA, 33 bp, Homo sapien
tgagatttaggagggcaatatggtttgactgtg

SEQ ID NO: 134540 - DNA, 33 bp, Homo sapien
tgagatttaggagggcgatatggtttgactgtg

SEQ ID NO: 134541 - DNA, 33 bp, Homo sapien
agacatactggaatataaagtcttccttatccc

SEQ ID NO: 134542 - DNA, 33 bp, Homo sapien
agacatactggaatatgaagtcttccttatccc

SEQ ID NO: 134543 - DNA, 33 bp, Homo sapien
gagcaggcttcctgtaggtcatcaaactcaaag

SEQ ID NO: 134544 - DNA, 33 bp, Homo sapien
gagcaggcttcctgtatgtcatcaaactcaaag

SEQ ID NO: 134545 - DNA, 33 bp, Homo sapien
tgagtgagataagaataaatgctttgaattatg

SEQ ID NO: 134546 - DNA, 33 bp, Homo sapien
tgagtgagataagaatcaatgctttgaattatg

SEQ ID NO: 134547 - DNA, 33 bp, Homo sapien
agcaatgctcctattcacacttttttaagttag

SEQ ID NO: 134548 - DNA, 33 bp, Homo sapien
agcaatgctcctattcgcacttttttaagttag

SEQ ID NO: 134549 - DNA, 33 bp, Homo sapien
ctgtagatagtttgagaattatgaaatgtgact

SEQ ID NO: 134550 - DNA, 33 bp, Homo sapien
ctgtagatagtttgaggattatgaaatgtgact

SEQ ID NO: 134551 - DNA, 33 bp, Homo sapien
acagttactagacccacgaacaaattctagctc

SEQ ID NO: 134552 - DNA, 33 bp, Homo sapien
acagttactagacccatgaacaaattctagctc

SEQ ID NO: 134553 - DNA, 33 bp, Homo sapien
gagataaaatacagaaaccttaacatgataaac

SEQ ID NO: 134554 - DNA, 33 bp, Homo sapien
gagataaaatacagaatccttaacatgataaac

SEQ ID NO: 134555 - DNA, 33 bp, Homo sapien
aaataaatggaactgacgaatagagaataccat

SEQ ID NO: 134556 - DNA, 33 bp, Homo sapien
aaataaatggaactgatgaatagagaataccat

SEQ ID NO: 134557 - DNA, 33 bp, Homo sapien
ttgttctgactgctaacttacaacaaggccagt

SEQ ID NO: 134558 - DNA, 33 bp, Homo sapien
ttgttctgactgctaagttacaacaaggccagt

SEQ ID NO: 134559 - DNA, 33 bp, Homo sapien
tggttattaatgctggaagcggaatacttcaaa

SEQ ID NO: 134560 - DNA, 33 bp, Homo sapien
tggttattaatgctggcagcggaatacttcaaa

SEQ ID NO: 134561 - DNA, 33 bp, Homo sapien
gcagctctgaggcttcaaccaagctaatgggga

SEQ ID NO: 134562 - DNA, 33 bp, Homo sapien
gcagctctgaggcttccaccaagctaatgggga

SEQ ID NO: 134563 - DNA, 33 bp, Homo sapien
ttggctatattgtatacgactgagttccacatt

SEQ ID NO: 134564 - DNA, 33 bp, Homo sapien
ttggctatattgtatatgactgagttccacatt

SEQ ID NO: 134565 - DNA, 33 bp, Homo sapien
gcatagtttgtttacactgataatagagaatgg

SEQ ID NO: 134566 - DNA, 33 bp, Homo sapien
gcatagtttgtttacattgataatagagaatgg

SEQ ID NO: 134567 - DNA, 33 bp, Homo sapien
ggctgtccctgcttcaacaaacgtaagcatcaa

SEQ ID NO: 134568 - DNA, 33 bp, Homo sapien
ggctgtccctgcttcatcaaacgtaagcatcaa

SEQ ID NO: 134569 - DNA, 33 bp, Homo sapien
attctttttctctgcaatgaagtcaccaagctg

SEQ ID NO: 134570 - DNA, 33 bp, Homo sapien
attctttttctctgcagtgaagtcaccaagctg

SEQ ID NO: 134571 - DNA, 33 bp, Homo sapien
aggtatgtaacagttccacgttataacaaaaaa

SEQ ID NO: 134572 - DNA, 33 bp, Homo sapien
aggtatgtaacagttctacgttataacaaaaaa

SEQ ID NO: 134573 - DNA, 33 bp, Homo sapien
gacaagtttgtataaagcaatctgttctccttt

SEQ ID NO: 134574 - DNA, 33 bp, Homo sapien
gacaagtttgtataaatcaatctgttctccttt

SEQ ID NO: 134575 - DNA, 33 bp, Homo sapien
gactggatcccgaataaaaggtcattgtaacct

SEQ ID NO: 134576 - DNA, 33 bp, Homo sapien
gactggatcccgaatagaaggtcattgtaacct

SEQ ID NO: 134577 - DNA, 33 bp, Homo sapien
gagggcttacgtttataagaaagtcatcgtaga

SEQ ID NO: 134578 - DNA, 33 bp, Homo sapien
gagggcttacgtttatgagaaagtcatcgtaga

SEQ ID NO: 134579 - DNA, 33 bp, Homo sapien
cacagcctcatactacaggaaactgaagggtca

SEQ ID NO: 134580 - DNA, 33 bp, Homo sapien
cacagcctcatactacgggaaactgaagggtca

SEQ ID NO: 134581 - DNA, 33 bp, Homo sapien
tatggagttaatgtgacatcctaaacaattgtc

SEQ ID NO: 134582 - DNA, 33 bp, Homo sapien
tatggagttaatgtgagatcctaaacaattgtc

SEQ ID NO: 134583 - DNA, 33 bp, Homo sapien
tgggcacaactgcaaccgactcttagccagcag

SEQ ID NO: 134584 - DNA, 33 bp, Homo sapien
tgggcacaactgcaactgactcttagccagcag

SEQ ID NO: 134585 - DNA, 33 bp, Homo sapien
acactaacataaaaagcctgctgctaccagctc

SEQ ID NO: 134586 - DNA, 33 bp, Homo sapien
acactaacataaaaagtctgctgctaccagctc

SEQ ID NO: 134587 - DNA, 33 bp, Homo sapien
ggggtcagggaagactaacaatcgatctggatg

SEQ ID NO: 134588 - DNA, 33 bp, Homo sapien
ggggtcagggaagactcacaatcgatctggatg

SEQ ID NO: 134589 - DNA, 33 bp, Homo sapien
ctcagagtccaagctcacttgtcttgaagcaat

SEQ ID NO: 134590 - DNA, 33 bp, Homo sapien
ctcagagtccaagctctcttgtcttgaagcaat

SEQ ID NO: 134591 - DNA, 33 bp, Homo sapien
ttaaaactttgtttgacgtatagagcatttaag

SEQ ID NO: 134592 - DNA, 33 bp, Homo sapien
ttaaaactttgtttgatgtatagagcatttaag

SEQ ID NO: 134593 - DNA, 33 bp, Homo sapien
ttagagcaatgtattcaagtttctggtgagtaa

SEQ ID NO: 134594 - DNA, 33 bp, Homo sapien
ttagagcaatgtattcgagtttctggtgagtaa

SEQ ID NO: 134595 - DNA, 33 bp, Homo sapien
ctctctgcatttgcacaagctgtccccttacat

SEQ ID NO: 134596 - DNA, 33 bp, Homo sapien
ctctctgcatttgcacgagctgtccccttacat

SEQ ID NO: 134597 - DNA, 33 bp, Homo sapien
agtataccaccaggaacagcatatttttaatgg

SEQ ID NO: 134598 - DNA, 33 bp, Homo sapien
agtataccaccaggaagagcatatttttaatgg

SEQ ID NO: 134599 - DNA, 33 bp, Homo sapien
ttacaaatctccactgaaagaaatccttcacct

SEQ ID NO: 134600 - DNA, 33 bp, Homo sapien
ttacaaatctccactggaagaaatccttcacct

SEQ ID NO: 134601 - DNA, 33 bp, Homo sapien
tgttcagtatggacaaacctccttcaacaggtg

SEQ ID NO: 134602 - DNA, 33 bp, Homo sapien
tgttcagtatggacaagcctccttcaacaggtg

SEQ ID NO: 134603 - DNA, 33 bp, Homo sapien
aaaattccaaagaggactacttgttagaggaca

SEQ ID NO: 134604 - DNA, 33 bp, Homo sapien
aaaattccaaagaggattacttgttagaggaca

SEQ ID NO: 134605 - DNA, 33 bp, Homo sapien
atggtaaggcttgccacgcccactttgtctcat

SEQ ID NO: 134606 - DNA, 33 bp, Homo sapien
atggtaaggcttgccatgcccactttgtctcat

SEQ ID NO: 134607 - DNA, 33 bp, Homo sapien
ttggtaaatcactgaccaaaggattgtaattga

SEQ ID NO: 134608 - DNA, 33 bp, Homo sapien
ttggtaaatcactgactaaaggattgtaattga

SEQ ID NO: 134609 - DNA, 33 bp, Homo sapien
tatgacaaataccttacattcggatgacactat

SEQ ID NO: 134610 - DNA, 33 bp, Homo sapien
tatgacaaataccttatattcggatgacactat

SEQ ID NO: 134611 - DNA, 33 bp, Homo sapien
atttttaatgcagaaaaagaggtcaatttaaag

SEQ ID NO: 134612 - DNA, 33 bp, Homo sapien
atttttaatgcagaaagagaggtcaatttaaag

SEQ ID NO: 134613 - DNA, 33 bp, Homo sapien
cttaagtatgtcatcagctgtagtccctgtgat

SEQ ID NO: 134614 - DNA, 33 bp, Homo sapien
cttaagtatgtcatcatctgtagtccctgtgat

SEQ ID NO: 134615 - DNA, 33 bp, Homo sapien
catatgagatctacaacaggttttcaaatcatg

SEQ ID NO: 134616 - DNA, 33 bp, Homo sapien
catatgagatctacaataggttttcaaatcatg

SEQ ID NO: 134617 - DNA, 33 bp, Homo sapien
aagcttcctaataacaataggctaggattaacc

SEQ ID NO: 134618 - DNA, 33 bp, Homo sapien
aagcttcctaataacagtaggctaggattaacc

SEQ ID NO: 134619 - DNA, 33 bp, Homo sapien
gcaggttacctatcaagcaataatttgcccagt

SEQ ID NO: 134620 - DNA, 33 bp, Homo sapien
gcaggttacctatcaatcaataatttgcccagt

SEQ ID NO: 134621 - DNA, 33 bp, Homo sapien
actgatggctgactgaagaagggataggagaga

SEQ ID NO: 134622 - DNA, 33 bp, Homo sapien
actgatggctgactgatgaagggataggagaga

SEQ ID NO: 134623 - DNA, 33 bp, Homo sapien
ttatgatcccacacaaaaaaagcctatttcaat

SEQ ID NO: 134624 - DNA, 33 bp, Homo sapien
ttatgatcccacacaagaaaagcctatttcaat

SEQ ID NO: 134625 - DNA, 33 bp, Homo sapien
gctgttgatgacgaaacattgatcattcagcta

SEQ ID NO: 134626 - DNA, 33 bp, Homo sapien
gctgttgatgacgaaatattgatcattcagcta

SEQ ID NO: 134627 - DNA, 33 bp, Homo sapien
tgctcatagaggatgaagacagggtacagatgt

SEQ ID NO: 134628 - DNA, 33 bp, Homo sapien
tgctcatagaggatgacgacagggtacagatgt

SEQ ID NO: 134629 - DNA, 33 bp, Homo sapien
caccgtgatgacagggcattttgtctttttact

SEQ ID NO: 134630 - DNA, 33 bp, Homo sapien
caccgtgatgacaggggattttgtctttttact

SEQ ID NO: 134631 - DNA, 33 bp, Homo sapien
acacctgaaatttacaactcattgtctagcttt

SEQ ID NO: 134632 - DNA, 33 bp, Homo sapien
acacctgaaatttacagctcattgtctagcttt

SEQ ID NO: 134633 - DNA, 33 bp, Homo sapien
ccagcaaaatagattaactgtttctcagtggtt

SEQ ID NO: 134634 - DNA, 33 bp, Homo sapien
ccagcaaaatagattatctgtttctcagtggtt

SEQ ID NO: 134635 - DNA, 33 bp, Homo sapien
ttgctggcttaagatgaataagatgtaaacttt

SEQ ID NO: 134636 - DNA, 33 bp, Homo sapien
ttgctggcttaagatgtataagatgtaaacttt

SEQ ID NO: 134637 - DNA, 33 bp, Homo sapien
ttgacccaacgtggaaaaactcttctcagcaat

SEQ ID NO: 134638 - DNA, 33 bp, Homo sapien
ttgacccaacgtggaacaactcttctcagcaat

SEQ ID NO: 134639 - DNA, 33 bp, Homo sapien
aagcacagaaacctcacgcaacaaagtagaaga

SEQ ID NO: 134640 - DNA, 33 bp, Homo sapien
aagcacagaaacctcatgcaacaaagtagaaga

SEQ ID NO: 134641 - DNA, 33 bp, Homo sapien
gtccaaataaccaacaatcattgaaataaatta

SEQ ID NO: 134642 - DNA, 33 bp, Homo sapien
gtccaaataaccaacagtcattgaaataaatta

SEQ ID NO: 134643 - DNA, 33 bp, Homo sapien
gattggtgctctagtcccatctactctggagcc

SEQ ID NO: 134644 - DNA, 33 bp, Homo sapien
gattggtgctctagtctcatctactctggagcc

SEQ ID NO: 134645 - DNA, 33 bp, Homo sapien
aaatcctgggttgtcaaaatagtacttactagt

SEQ ID NO: 134646 - DNA, 33 bp, Homo sapien
aaatcctgggttgtcagaatagtacttactagt

SEQ ID NO: 134647 - DNA, 33 bp, Homo sapien
agatgttttgtgtggacaaaaaggatttgatgt

SEQ ID NO: 134648 - DNA, 33 bp, Homo sapien
agatgttttgtgtggataaaaaggatttgatgt

SEQ ID NO: 134649 - DNA, 33 bp, Homo sapien
tgtggatttccacctacgagaaagaatcaaaag

SEQ ID NO: 134650 - DNA, 33 bp, Homo sapien
tgtggatttccacctatgagaaagaatcaaaag

SEQ ID NO: 134651 - DNA, 33 bp, Homo sapien
cacaaggtttctgtgaagattaaagagactgcc

SEQ ID NO: 134652 - DNA, 33 bp, Homo sapien
cacaaggtttctgtgaggattaaagagactgcc

SEQ ID NO: 134653 - DNA, 33 bp, Homo sapien
cttctaaaggtttcaaccacacttccatcagaa

SEQ ID NO: 134654 - DNA, 33 bp, Homo sapien
cttctaaaggtttcaatcacacttccatcagaa

SEQ ID NO: 134655 - DNA, 33 bp, Homo sapien
ttaaataaaatgaacacagtgacaagcatatct

SEQ ID NO: 134656 - DNA, 33 bp, Homo sapien
ttaaataaaatgaacatagtgacaagcatatct

SEQ ID NO: 134657 - DNA, 33 bp, Homo sapien
ttttggatcctgcccacatgttaaagaagtgcc

SEQ ID NO: 134658 - DNA, 33 bp, Homo sapien
ttttggatcctgcccagatgttaaagaagtgcc

SEQ ID NO: 134659 - DNA, 33 bp, Homo sapien
atgggtggtgaaactaactaaccggagaggtgc

SEQ ID NO: 134660 - DNA, 33 bp, Homo sapien
atgggtggtgaaactagctaaccggagaggtgc

SEQ ID NO: 134661 - DNA, 33 bp, Homo sapien
agtagaatggacaccacaaaatataaagagcca

SEQ ID NO: 134662 - DNA, 33 bp, Homo sapien
agtagaatggacaccataaaatataaagagcca

SEQ ID NO: 134663 - DNA, 33 bp, Homo sapien
caaaagataggctacccaccaagaaacagttga

SEQ ID NO: 134664 - DNA, 33 bp, Homo sapien
caaaagataggctaccgaccaagaaacagttga

SEQ ID NO: 134665 - DNA, 33 bp, Homo sapien
gtgacttgcggagacactcagtttctccaagcc

SEQ ID NO: 134666 - DNA, 33 bp, Homo sapien
gtgacttgcggagacattcagtttctccaagcc

SEQ ID NO: 134667 - DNA, 33 bp, Homo sapien
acactaatacttaatacctacactaatactaat

SEQ ID NO: 134668 - DNA, 33 bp, Homo sapien
acactaatacttaatatctacactaatactaat

SEQ ID NO: 134669 - DNA, 33 bp, Homo sapien
gtcatcaaaatggtgactagaggagtgaactcc

SEQ ID NO: 134670 - DNA, 33 bp, Homo sapien
gtcatcaaaatggtgagtagaggagtgaactcc

SEQ ID NO: 134671 - DNA, 33 bp, Homo sapien
aaagcatgaggtctggaataagtcttgatgcca

SEQ ID NO: 134672 - DNA, 33 bp, Homo sapien
aaagcatgaggtctgggataagtcttgatgcca

SEQ ID NO: 134673 - DNA, 33 bp, Homo sapien
ttttaaattagcgcataatagttgtacatatgt

SEQ ID NO: 134674 - DNA, 33 bp, Homo sapien
ttttaaattagcgcattatagttgtacatatgt

SEQ ID NO: 134675 - DNA, 33 bp, Homo sapien
attgctatgataatagacagaaaacaggacatg

SEQ ID NO: 134676 - DNA, 33 bp, Homo sapien
attgctatgataataggcagaaaacaggacatg

SEQ ID NO: 134677 - DNA, 33 bp, Homo sapien
aattgaagtattttgaaagattgatttatagag

SEQ ID NO: 134678 - DNA, 33 bp, Homo sapien
aattgaagtattttgacagattgatttatagag

SEQ ID NO: 134679 - DNA, 33 bp, Homo sapien
aaaacaaaacaagaaaacattctctagtcctag

SEQ ID NO: 134680 - DNA, 33 bp, Homo sapien
aaaacaaaacaagaaagcattctctagtcctag

SEQ ID NO: 134681 - DNA, 33 bp, Homo sapien
gggaaactaccaattcaacaactgcagggacac

SEQ ID NO: 134682 - DNA, 33 bp, Homo sapien
gggaaactaccaattcgacaactgcagggacac

SEQ ID NO: 134683 - DNA, 33 bp, Homo sapien
gagactccacatagcaccgtgtaggtaattacc

SEQ ID NO: 134684 - DNA, 33 bp, Homo sapien
gagactccacatagcatcgtgtaggtaattacc

SEQ ID NO: 134685 - DNA, 33 bp, Homo sapien
ttgttcctcaaatatacatggttggacttccgc

SEQ ID NO: 134686 - DNA, 33 bp, Homo sapien
ttgttcctcaaatatagatggttggacttccgc

SEQ ID NO: 134687 - DNA, 33 bp, Homo sapien
aaacctaccactcacaatctgttactgatactc

SEQ ID NO: 134688 - DNA, 33 bp, Homo sapien
aaacctaccactcacagtctgttactgatactc

SEQ ID NO: 134689 - DNA, 33 bp, Homo sapien
ttttccatgtttaaaacgatacaatgagaaaat

SEQ ID NO: 134690 - DNA, 33 bp, Homo sapien
ttttccatgtttaaaatgatacaatgagaaaat

SEQ ID NO: 134691 - DNA, 33 bp, Homo sapien
catgattcccagatgacaagcttgtaatacctg

SEQ ID NO: 134692 - DNA, 33 bp, Homo sapien
catgattcccagatgagaagcttgtaatacctg

SEQ ID NO: 134693 - DNA, 33 bp, Homo sapien
tgggaatcatgttcaacacatttttcaccaact

SEQ ID NO: 134694 - DNA, 33 bp, Homo sapien
tgggaatcatgttcaatacatttttcaccaact

SEQ ID NO: 134695 - DNA, 33 bp, Homo sapien
aatctctctcattcacacatggcaatgaggctt

SEQ ID NO: 134696 - DNA, 33 bp, Homo sapien
aatctctctcattcacgcatggcaatgaggctt

SEQ ID NO: 134697 - DNA, 33 bp, Homo sapien
ttccaattgtagttaccgccgggtcagattgta

SEQ ID NO: 134698 - DNA, 33 bp, Homo sapien
ttccaattgtagttactgccgggtcagattgta

SEQ ID NO: 134699 - DNA, 33 bp, Homo sapien
ataacaatgaaaagagaaatgtactctagaatg

SEQ ID NO: 134700 - DNA, 33 bp, Homo sapien
ataacaatgaaaagaggaatgtactctagaatg

SEQ ID NO: 134701 - DNA, 33 bp, Homo sapien
gaaactagaattatcacgtggtacaagtaaata

SEQ ID NO: 134702 - DNA, 33 bp, Homo sapien
gaaactagaattatcatgtggtacaagtaaata

SEQ ID NO: 134703 - DNA, 33 bp, Homo sapien
gtctctctgggggacacagttttagttatttcc

SEQ ID NO: 134704 - DNA, 33 bp, Homo sapien
gtctctctgggggacagagttttagttatttcc

SEQ ID NO: 134705 - DNA, 33 bp, Homo sapien
gaagaccaatcacaaaactcttcatggttgcag

SEQ ID NO: 134706 - DNA, 33 bp, Homo sapien
gaagaccaatcacaaagctcttcatggttgcag

SEQ ID NO: 134707 - DNA, 33 bp, Homo sapien
gcatgcagtggtgaccagatgtgcccttattgt

SEQ ID NO: 134708 - DNA, 33 bp, Homo sapien
gcatgcagtggtgaccggatgtgcccttattgt

SEQ ID NO: 134709 - DNA, 33 bp, Homo sapien
ctatgagatgtttcagcagaaaagcaggcaacc

SEQ ID NO: 134710 - DNA, 33 bp, Homo sapien
ctatgagatgtttcagtagaaaagcaggcaacc

SEQ ID NO: 134711 - DNA, 33 bp, Homo sapien
gatggaataacaatccagacagtgctacttcgt

SEQ ID NO: 134712 - DNA, 33 bp, Homo sapien
gatggaataacaatccggacagtgctacttcgt

SEQ ID NO: 134713 - DNA, 33 bp, Homo sapien
gctgccattcccataactgatccccttgacata

SEQ ID NO: 134714 - DNA, 33 bp, Homo sapien
gctgccattcccataattgatccccttgacata

SEQ ID NO: 134715 - DNA, 33 bp, Homo sapien
ctatagtctattgcaaagtgtgtatggtttcat

SEQ ID NO: 134716 - DNA, 33 bp, Homo sapien
ctatagtctattgcaacgtgtgtatggtttcat

SEQ ID NO: 134717 - DNA, 33 bp, Homo sapien
agtgtgatatgacagaataaatactcaataaat

SEQ ID NO: 134718 - DNA, 33 bp, Homo sapien
agtgtgatatgacagagtaaatactcaataaat

SEQ ID NO: 134719 - DNA, 33 bp, Homo sapien
agtgcagcggtttccactgagaaagaggctgaa

SEQ ID NO: 134720 - DNA, 33 bp, Homo sapien
agtgcagcggtttccattgagaaagaggctgaa

SEQ ID NO: 134721 - DNA, 33 bp, Homo sapien
tttccttcatagacctaaaatactctctgatat

SEQ ID NO: 134722 - DNA, 33 bp, Homo sapien
tttccttcatagacctgaaatactctctgatat

SEQ ID NO: 134723 - DNA, 33 bp, Homo sapien
tgaccagatgtgtccaaatagttcccaatgata

SEQ ID NO: 134724 - DNA, 33 bp, Homo sapien
tgaccagatgtgtccagatagttcccaatgata

SEQ ID NO: 134725 - DNA, 33 bp, Homo sapien
ggaaaaaatgaatatcagaagcactctctttct

SEQ ID NO: 134726 - DNA, 33 bp, Homo sapien
ggaaaaaatgaatatcggaagcactctctttct

SEQ ID NO: 134727 - DNA, 33 bp, Homo sapien
gtgtacactgaaaaccactaaatgttattgaaa

SEQ ID NO: 134728 - DNA, 33 bp, Homo sapien
gtgtacactgaaaaccgctaaatgttattgaaa

SEQ ID NO: 134729 - DNA, 33 bp, Homo sapien
caatttcatttacagtaacataaaatacatact

SEQ ID NO: 134730 - DNA, 33 bp, Homo sapien
caatttcatttacagttacataaaatacatact

SEQ ID NO: 134731 - DNA, 33 bp, Homo sapien
gacttttgttatgatgaacaatttgtgcgtgtg

SEQ ID NO: 134732 - DNA, 33 bp, Homo sapien
gacttttgttatgatggacaatttgtgcgtgtg

SEQ ID NO: 134733 - DNA, 33 bp, Homo sapien
gttaatattttgaatccaagtgaatgttcacga

SEQ ID NO: 134734 - DNA, 33 bp, Homo sapien
gttaatattttgaatcgaagtgaatgttcacga

SEQ ID NO: 134735 - DNA, 33 bp, Homo sapien
gactaacagatattgaaattggtgagactattt

SEQ ID NO: 134736 - DNA, 33 bp, Homo sapien
gactaacagatattgagattggtgagactattt

SEQ ID NO: 134737 - DNA, 33 bp, Homo sapien
acatagagatggagaaagtgtttggtttattga

SEQ ID NO: 134738 - DNA, 33 bp, Homo sapien
acatagagatggagaatgtgtttggtttattga

SEQ ID NO: 134739 - DNA, 33 bp, Homo sapien
tgaattccaacaagtacatacggtgatgagcat

SEQ ID NO: 134740 - DNA, 33 bp, Homo sapien
tgaattccaacaagtatatacggtgatgagcat

SEQ ID NO: 134741 - DNA, 33 bp, Homo sapien
cgatctgaagagaaaccagagtactgacgatgg

SEQ ID NO: 134742 - DNA, 33 bp, Homo sapien
cgatctgaagagaaacgagagtactgacgatgg

SEQ ID NO: 134743 - DNA, 33 bp, Homo sapien
tccagcaagctaagaacgggtaagtttcttatg

SEQ ID NO: 134744 - DNA, 33 bp, Homo sapien
tccagcaagctaagaatgggtaagtttcttatg

SEQ ID NO: 134745 - DNA, 33 bp, Homo sapien
tcttgagccctacttaagagcttatgttcagac

SEQ ID NO: 134746 - DNA, 33 bp, Homo sapien
tcttgagccctacttaggagcttatgttcagac

SEQ ID NO: 134747 - DNA, 33 bp, Homo sapien
tgccatccactcaaaagctttcacatttacctg

SEQ ID NO: 134748 - DNA, 33 bp, Homo sapien
tgccatccactcaaaatctttcacatttacctg

SEQ ID NO: 134749 - DNA, 33 bp, Homo sapien
acccttcaaacacaccagagcactgagacaaac

SEQ ID NO: 134750 - DNA, 33 bp, Homo sapien
acccttcaaacacaccggagcactgagacaaac

SEQ ID NO: 134751 - DNA, 33 bp, Homo sapien
ttgatactttttgtccaccttgtgctcattttc

SEQ ID NO: 134752 - DNA, 33 bp, Homo sapien
ttgatactttttgtccgccttgtgctcattttc

SEQ ID NO: 134753 - DNA, 33 bp, Homo sapien
gctcacaagtttattacgtaaatgttgtagctg

SEQ ID NO: 134754 - DNA, 33 bp, Homo sapien
gctcacaagtttattatgtaaatgttgtagctg

SEQ ID NO: 134755 - DNA, 33 bp, Homo sapien
ttccaatttcagtaaacctgttctaatgtgtct

SEQ ID NO: 134756 - DNA, 33 bp, Homo sapien
ttccaatttcagtaaatctgttctaatgtgtct

SEQ ID NO: 134757 - DNA, 33 bp, Homo sapien
cagtactgaaaatctcacttgccgtaaaggagc

SEQ ID NO: 134758 - DNA, 33 bp, Homo sapien
cagtactgaaaatctctcttgccgtaaaggagc

SEQ ID NO: 134759 - DNA, 33 bp, Homo sapien
ataaataaaactctgacgtattttcacattcac

SEQ ID NO: 134760 - DNA, 33 bp, Homo sapien
ataaataaaactctgatgtattttcacattcac

SEQ ID NO: 134761 - DNA, 33 bp, Homo sapien
ttcaaaggacatgaatcactgggactctgcaaa

SEQ ID NO: 134762 - DNA, 33 bp, Homo sapien
ttcaaaggacatgaattactgggactctgcaaa

SEQ ID NO: 134763 - DNA, 33 bp, Homo sapien
gaggcacagggaaattaaataactcacttgagg

SEQ ID NO: 134764 - DNA, 33 bp, Homo sapien
gaggcacagggaaatttaataactcacttgagg

SEQ ID NO: 134765 - DNA, 33 bp, Homo sapien
atgcctaggtgcctgaacttcaacaggtattcc

SEQ ID NO: 134766 - DNA, 33 bp, Homo sapien
atgcctaggtgcctgaccttcaacaggtattcc

SEQ ID NO: 134767 - DNA, 33 bp, Homo sapien
tccagccgataccacccgatttttaataccttc

SEQ ID NO: 134768 - DNA, 33 bp, Homo sapien
tccagccgataccacctgatttttaataccttc

SEQ ID NO: 134769 - DNA, 33 bp, Homo sapien
gagaggtgacctctaccggtaacagagtattca

SEQ ID NO: 134770 - DNA, 33 bp, Homo sapien
gagaggtgacctctactggtaacagagtattca

SEQ ID NO: 134771 - DNA, 33 bp, Homo sapien
ctttccacttcaacaacgattgaactcttaaag

SEQ ID NO: 134772 - DNA, 33 bp, Homo sapien
ctttccacttcaacaaggattgaactcttaaag

SEQ ID NO: 134773 - DNA, 33 bp, Homo sapien
ttatgcaatttgaagagggaggagactagtggc

SEQ ID NO: 134774 - DNA, 33 bp, Homo sapien
ttatgcaatttgaagatggaggagactagtggc

SEQ ID NO: 134775 - DNA, 33 bp, Homo sapien
taggaatcataaagaaacatatgaaacctgaca

SEQ ID NO: 134776 - DNA, 33 bp, Homo sapien
taggaatcataaagaagcatatgaaacctgaca

SEQ ID NO: 134777 - DNA, 33 bp, Homo sapien
taaagatcattttcaccgaagcaagtacctaat

SEQ ID NO: 134778 - DNA, 33 bp, Homo sapien
taaagatcattttcactgaagcaagtacctaat

SEQ ID NO: 134779 - DNA, 33 bp, Homo sapien
tacctaataacttctcaaatgcgctgaagaaca

SEQ ID NO: 134780 - DNA, 33 bp, Homo sapien
tacctaataacttctcgaatgcgctgaagaaca

SEQ ID NO: 134781 - DNA, 33 bp, Homo sapien
ccctgcttatgaggaaacacctttttgttcctg

SEQ ID NO: 134782 - DNA, 33 bp, Homo sapien
ccctgcttatgaggaagcacctttttgttcctg

SEQ ID NO: 134783 - DNA, 33 bp, Homo sapien
tatataacctgctgaaaactctgtgtggaaatg

SEQ ID NO: 134784 - DNA, 33 bp, Homo sapien
tatataacctgctgaagactctgtgtggaaatg

SEQ ID NO: 134785 - DNA, 33 bp, Homo sapien
gagctctgctgtcttacagaaaaaaagaaaatc

SEQ ID NO: 134786 - DNA, 33 bp, Homo sapien
gagctctgctgtcttatagaaaaaaagaaaatc

SEQ ID NO: 134787 - DNA, 33 bp, Homo sapien
tggagaatctaatgacaccttggtattgtttgg

SEQ ID NO: 134788 - DNA, 33 bp, Homo sapien
tggagaatctaatgacgccttggtattgtttgg

SEQ ID NO: 134789 - DNA, 33 bp, Homo sapien
atcacacagtaagccaaaggttttcatcaacat

SEQ ID NO: 134790 - DNA, 33 bp, Homo sapien
atcacacagtaagccacaggttttcatcaacat

SEQ ID NO: 134791 - DNA, 33 bp, Homo sapien
gttaagagtacagagactatattaattccataa

SEQ ID NO: 134792 - DNA, 33 bp, Homo sapien
gttaagagtacagagagtatattaattccataa

SEQ ID NO: 134793 - DNA, 33 bp, Homo sapien
taaatgaatttctgccgcatgaaaccttaattt

SEQ ID NO: 134794 - DNA, 33 bp, Homo sapien
taaatgaatttctgcctcatgaaaccttaattt

SEQ ID NO: 134795 - DNA, 33 bp, Homo sapien
catgctaacctatgagacgagtgttattatttt

SEQ ID NO: 134796 - DNA, 33 bp, Homo sapien
catgctaacctatgagtcgagtgttattatttt

SEQ ID NO: 134797 - DNA, 33 bp, Homo sapien
cacattttctggcaaactgatttatatatacac

SEQ ID NO: 134798 - DNA, 33 bp, Homo sapien
cacattttctggcaaattgatttatatatacac

SEQ ID NO: 134799 - DNA, 33 bp, Homo sapien
ggacaatttgacttccccatttcttaattgaat

SEQ ID NO: 134800 - DNA, 33 bp, Homo sapien
ggacaatttgacttcctcatttcttaattgaat

SEQ ID NO: 134801 - DNA, 33 bp, Homo sapien
acttccattttcatcccatatctttttcatctt

SEQ ID NO: 134802 - DNA, 33 bp, Homo sapien
acttccattttcatcctatatctttttcatctt

SEQ ID NO: 134803 - DNA, 33 bp, Homo sapien
gattatgacttgaataactctttatgccctgca

SEQ ID NO: 134804 - DNA, 33 bp, Homo sapien
gattatgacttgaatacctctttatgccctgca

SEQ ID NO: 134805 - DNA, 33 bp, Homo sapien
ctcgaaatcagaaacacatactcaagggagata

SEQ ID NO: 134806 - DNA, 33 bp, Homo sapien
ctcgaaatcagaaacatatactcaagggagata

SEQ ID NO: 134807 - DNA, 33 bp, Homo sapien
tgtgggacccagaaaaaataatcactatgaccc

SEQ ID NO: 134808 - DNA, 33 bp, Homo sapien
tgtgggacccagaaaagataatcactatgaccc

SEQ ID NO: 134809 - DNA, 33 bp, Homo sapien
tggcttaaggccacaaccattttataagatctc

SEQ ID NO: 134810 - DNA, 33 bp, Homo sapien
tggcttaaggccacaagcattttataagatctc

SEQ ID NO: 134811 - DNA, 33 bp, Homo sapien
accatgcccagctgacagaatgtttcaagagac

SEQ ID NO: 134812 - DNA, 33 bp, Homo sapien
accatgcccagctgacggaatgtttcaagagac

SEQ ID NO: 134813 - DNA, 33 bp, Homo sapien
cctggctggaaatacaacacaggtgagccatag

SEQ ID NO: 134814 - DNA, 33 bp, Homo sapien
cctggctggaaatacatcacaggtgagccatag

SEQ ID NO: 134815 - DNA, 33 bp, Homo sapien
gaggcactaacagacaagcaggctttacccacg

SEQ ID NO: 134816 - DNA, 33 bp, Homo sapien
gaggcactaacagacaggcaggctttacccacg

SEQ ID NO: 134817 - DNA, 33 bp, Homo sapien
ggccatgtgaagatcacgcctgcttccccttca

SEQ ID NO: 134818 - DNA, 33 bp, Homo sapien
ggccatgtgaagatcatgcctgcttccccttca

SEQ ID NO: 134819 - DNA, 33 bp, Homo sapien
ttggtccaggatgaagaaccctgcctcgacagt

SEQ ID NO: 134820 - DNA, 33 bp, Homo sapien
ttggtccaggatgaagcaccctgcctcgacagt

SEQ ID NO: 134821 - DNA, 33 bp, Homo sapien
gcagccacagggataaaagaggatcagacagta

SEQ ID NO: 134822 - DNA, 33 bp, Homo sapien
gcagccacagggataacagaggatcagacagta

SEQ ID NO: 134823 - DNA, 33 bp, Homo sapien
aaggtactcttcaaaaagtgtgatcattgaaga

SEQ ID NO: 134824 - DNA, 33 bp, Homo sapien
aaggtactcttcaaaaggtgtgatcattgaaga

SEQ ID NO: 134825 - DNA, 33 bp, Homo sapien
tcagccactctttgacactctgttcataatctt

SEQ ID NO: 134826 - DNA, 33 bp, Homo sapien
tcagccactctttgacgctctgttcataatctt

SEQ ID NO: 134827 - DNA, 33 bp, Homo sapien
ctcatcttacataatcacagatactttgcttag

SEQ ID NO: 134828 - DNA, 33 bp, Homo sapien
ctcatcttacataatcgcagatactttgcttag

SEQ ID NO: 134829 - DNA, 33 bp, Homo sapien
tggaattcagataggaacattctaaaggcagtg

SEQ ID NO: 134830 - DNA, 33 bp, Homo sapien
tggaattcagataggatcattctaaaggcagtg

SEQ ID NO: 134831 - DNA, 33 bp, Homo sapien
tctgagctggaaaataaggtaaaatagtaccta

SEQ ID NO: 134832 - DNA, 33 bp, Homo sapien
tctgagctggaaaatagggtaaaatagtaccta

SEQ ID NO: 134833 - DNA, 33 bp, Homo sapien
gcttgtttgctatgtcaccccctgccactccac

SEQ ID NO: 134834 - DNA, 33 bp, Homo sapien
gcttgtttgctatgtctccccctgccactccac

SEQ ID NO: 134835 - DNA, 33 bp, Homo sapien
ctggtcattaggatcacagtgatgaaagagaat

SEQ ID NO: 134836 - DNA, 33 bp, Homo sapien
ctggtcattaggatcatagtgatgaaagagaat

SEQ ID NO: 134837 - DNA, 33 bp, Homo sapien
ggagttaattatcaaggcttcatgtttaccaat

SEQ ID NO: 134838 - DNA, 33 bp, Homo sapien
ggagttaattatcaagtcttcatgtttaccaat

SEQ ID NO: 134839 - DNA, 33 bp, Homo sapien
ttctcaaatggccttcaaatataaatgaatagt

SEQ ID NO: 134840 - DNA, 33 bp, Homo sapien
ttctcaaatggccttcgaatataaatgaatagt

SEQ ID NO: 134841 - DNA, 33 bp, Homo sapien
tgtctaaataatgcaaaatttcagtaattacta

SEQ ID NO: 134842 - DNA, 33 bp, Homo sapien
tgtctaaataatgcaacatttcagtaattacta

SEQ ID NO: 134843 - DNA, 33 bp, Homo sapien
ggggatgagcattcaaaatacactgagtgacaa

SEQ ID NO: 134844 - DNA, 33 bp, Homo sapien
ggggatgagcattcaagatacactgagtgacaa

SEQ ID NO: 134845 - DNA, 33 bp, Homo sapien
cttctttttgctggaaatgttagctcttggtgt

SEQ ID NO: 134846 - DNA, 33 bp, Homo sapien
cttctttttgctggaagtgttagctcttggtgt

SEQ ID NO: 134847 - DNA, 33 bp, Homo sapien
atacagtttggaatggccaatgaagccgttggc

SEQ ID NO: 134848 - DNA, 33 bp, Homo sapien
atacagtttggaatgggcaatgaagccgttggc

SEQ ID NO: 134849 - DNA, 33 bp, Homo sapien
cttccctcaccgtgcaatagagaaagacctgtc

SEQ ID NO: 134850 - DNA, 33 bp, Homo sapien
cttccctcaccgtgcagtagagaaagacctgtc

SEQ ID NO: 134851 - DNA, 33 bp, Homo sapien
gtccttttatcatttccctgaggctagctgaaa

SEQ ID NO: 134852 - DNA, 33 bp, Homo sapien
gtccttttatcatttctctgaggctagctgaaa

SEQ ID NO: 134853 - DNA, 33 bp, Homo sapien
cccaggagacgggtcactattttgaggaggtat

SEQ ID NO: 134854 - DNA, 33 bp, Homo sapien
cccaggagacgggtcattattttgaggaggtat

SEQ ID NO: 134855 - DNA, 33 bp, Homo sapien
atcatcacacgtaaaacggggcatatgagtaca

SEQ ID NO: 134856 - DNA, 33 bp, Homo sapien
atcatcacacgtaaaatggggcatatgagtaca

SEQ ID NO: 134857 - DNA, 33 bp, Homo sapien
ctttcagggtccagagacagcacattgacttta

SEQ ID NO: 134858 - DNA, 33 bp, Homo sapien
ctttcagggtccagagccagcacattgacttta

SEQ ID NO: 134859 - DNA, 33 bp, Homo sapien
aagaaatgaactatgaagccatacaaatcatag

SEQ ID NO: 134860 - DNA, 33 bp, Homo sapien
aagaaatgaactatgaggccatacaaatcatag

SEQ ID NO: 134861 - DNA, 33 bp, Homo sapien
aaggcagcccaggaaaacgtattgtatgattcc

SEQ ID NO: 134862 - DNA, 33 bp, Homo sapien
aaggcagcccaggaaagcgtattgtatgattcc

SEQ ID NO: 134863 - DNA, 33 bp, Homo sapien
ctacctaagagaattcactgtgacagctaggct

SEQ ID NO: 134864 - DNA, 33 bp, Homo sapien
ctacctaagagaattcgctgtgacagctaggct

SEQ ID NO: 134865 - DNA, 33 bp, Homo sapien
gagagaaattatcccaatgaaaagtcaaaatcc

SEQ ID NO: 134866 - DNA, 33 bp, Homo sapien
gagagaaattatcccagtgaaaagtcaaaatcc

SEQ ID NO: 134867 - DNA, 33 bp, Homo sapien
acctagaaccaattaactgaaaggaaggcctac

SEQ ID NO: 134868 - DNA, 33 bp, Homo sapien
acctagaaccaattaattgaaaggaaggcctac

SEQ ID NO: 134869 - DNA, 33 bp, Homo sapien
ccactttttcaggcggaaagaaggtatcccctc

SEQ ID NO: 134870 - DNA, 33 bp, Homo sapien
ccactttttcaggcgggaagaaggtatcccctc

SEQ ID NO: 134871 - DNA, 33 bp, Homo sapien
tcctgcacaaaacaaagaattagttcccattgc

SEQ ID NO: 134872 - DNA, 33 bp, Homo sapien
tcctgcacaaaacaaataattagttcccattgc

SEQ ID NO: 134873 - DNA, 33 bp, Homo sapien
tgttaatcaccaagacaataggtaaaatgtctc

SEQ ID NO: 134874 - DNA, 33 bp, Homo sapien
tgttaatcaccaagaccataggtaaaatgtctc

SEQ ID NO: 134875 - DNA, 33 bp, Homo sapien
gctgtgacacttacaccgacaaagcatacacaa

SEQ ID NO: 134876 - DNA, 33 bp, Homo sapien
gctgtgacacttacactgacaaagcatacacaa

SEQ ID NO: 134877 - DNA, 33 bp, Homo sapien
attgctaaagttctgcacaaagggtgatttttc

SEQ ID NO: 134878 - DNA, 33 bp, Homo sapien
attgctaaagttctgcgcaaagggtgatttttc

SEQ ID NO: 134879 - DNA, 33 bp, Homo sapien
atgtcaaaaaaagcgacgcatttatcaaaaagt

SEQ ID NO: 134880 - DNA, 33 bp, Homo sapien
atgtcaaaaaaagcgatgcatttatcaaaaagt

SEQ ID NO: 134881 - DNA, 33 bp, Homo sapien
gaattgatcatctatcacaggtttccactgaat

SEQ ID NO: 134882 - DNA, 33 bp, Homo sapien
gaattgatcatctatcgcaggtttccactgaat

SEQ ID NO: 134883 - DNA, 33 bp, Homo sapien
aataaccgagagcaaagtgttcaatccagcccc

SEQ ID NO: 134884 - DNA, 33 bp, Homo sapien
aataaccgagagcaaattgttcaatccagcccc

SEQ ID NO: 134885 - DNA, 33 bp, Homo sapien
attaccacatgattcaataatttcactcatagg

SEQ ID NO: 134886 - DNA, 33 bp, Homo sapien
attaccacatgattcagtaatttcactcatagg

SEQ ID NO: 134887 - DNA, 33 bp, Homo sapien
aaagttgatcctcaaaagtatacaaaattacaa

SEQ ID NO: 134888 - DNA, 33 bp, Homo sapien
aaagttgatcctcaaacgtatacaaaattacaa

SEQ ID NO: 134889 - DNA, 33 bp, Homo sapien
tatgacatattttaaaggaaggcacatcaaacc

SEQ ID NO: 134890 - DNA, 33 bp, Homo sapien
tatgacatattttaaatgaaggcacatcaaacc

SEQ ID NO: 134891 - DNA, 33 bp, Homo sapien
atgcatctataacttaaatgtttatgcagaagg

SEQ ID NO: 134892 - DNA, 33 bp, Homo sapien
atgcatctataacttagatgtttatgcagaagg

SEQ ID NO: 134893 - DNA, 33 bp, Homo sapien
tgagattcccttgagacgttatgtagagatgcc

SEQ ID NO: 134894 - DNA, 33 bp, Homo sapien
tgagattcccttgagatgttatgtagagatgcc

SEQ ID NO: 134895 - DNA, 33 bp, Homo sapien
tcccacatcttggaagaagacattcttgggtca

SEQ ID NO: 134896 - DNA, 33 bp, Homo sapien
tcccacatcttggaaggagacattcttgggtca

SEQ ID NO: 134897 - DNA, 33 bp, Homo sapien
tttgagaagtaaccatcaagaaagatagtgccc

SEQ ID NO: 134898 - DNA, 33 bp, Homo sapien
tttgagaagtaaccattaagaaagatagtgccc

SEQ ID NO: 134899 - DNA, 33 bp, Homo sapien
tttctctcactgtcataatctttgcaatgatgg

SEQ ID NO: 134900 - DNA, 33 bp, Homo sapien
tttctctcactgtcatgatctttgcaatgatgg

SEQ ID NO: 134901 - DNA, 33 bp, Homo sapien
ctcctacatggctagcacagcatcagttaaact

SEQ ID NO: 134902 - DNA, 33 bp, Homo sapien
ctcctacatggctagcccagcatcagttaaact

SEQ ID NO: 134903 - DNA, 33 bp, Homo sapien
gaaaaggacaatgtcaataatgtataactacat

SEQ ID NO: 134904 - DNA, 33 bp, Homo sapien
gaaaaggacaatgtcagtaatgtataactacat

SEQ ID NO: 134905 - DNA, 33 bp, Homo sapien
ttgatctatgttgctacaagttacaatagcagt

SEQ ID NO: 134906 - DNA, 33 bp, Homo sapien
ttgatctatgttgctagaagttacaatagcagt

SEQ ID NO: 134907 - DNA, 33 bp, Homo sapien
tatgcattcattcataagtgtttacctaattat

SEQ ID NO: 134908 - DNA, 33 bp, Homo sapien
tatgcattcattcatacgtgtttacctaattat

SEQ ID NO: 134909 - DNA, 33 bp, Homo sapien
tattaggcttcaaccactcaattgtgggagtat

SEQ ID NO: 134910 - DNA, 33 bp, Homo sapien
tattaggcttcaaccattcaattgtgggagtat

SEQ ID NO: 134911 - DNA, 33 bp, Homo sapien
acatgaataaaggacaaatggtactgtgtcact

SEQ ID NO: 134912 - DNA, 33 bp, Homo sapien
acatgaataaaggacagatggtactgtgtcact

SEQ ID NO: 134913 - DNA, 33 bp, Homo sapien
gcacctgggatgaagaggtgctagcttagtagc

SEQ ID NO: 134914 - DNA, 33 bp, Homo sapien
gcacctgggatgaagatgtgctagcttagtagc

SEQ ID NO: 134915 - DNA, 33 bp, Homo sapien
tatgattagaggttagaaaatcaacatgatttc

SEQ ID NO: 134916 - DNA, 33 bp, Homo sapien
tatgattagaggttagcaaatcaacatgatttc

SEQ ID NO: 134917 - DNA, 33 bp, Homo sapien
tctcagctcattgccaacatcagaacaaagctg

SEQ ID NO: 134918 - DNA, 33 bp, Homo sapien
tctcagctcattgccagcatcagaacaaagctg

SEQ ID NO: 134919 - DNA, 33 bp, Homo sapien
ggaaagaaagcctctggcacggacggctaagga

SEQ ID NO: 134920 - DNA, 33 bp, Homo sapien
ggaaagaaagcctctgtcacggacggctaagga

SEQ ID NO: 134921 - DNA, 33 bp, Homo sapien
gagaataaatataaaacgcctgaaacattggag

SEQ ID NO: 134922 - DNA, 33 bp, Homo sapien
gagaataaatataaaatgcctgaaacattggag

SEQ ID NO: 134923 - DNA, 33 bp, Homo sapien
actatttggttccatcacctgtttttgtatgag

SEQ ID NO: 134924 - DNA, 33 bp, Homo sapien
actatttggttccatcgcctgtttttgtatgag

SEQ ID NO: 134925 - DNA, 33 bp, Homo sapien
agataggaggaatcaactctagtgctccatagc

SEQ ID NO: 134926 - DNA, 33 bp, Homo sapien
agataggaggaatcaattctagtgctccatagc

SEQ ID NO: 134927 - DNA, 33 bp, Homo sapien
atcccaagtgaattaacgcagtatcagaaaacc

SEQ ID NO: 134928 - DNA, 33 bp, Homo sapien
atcccaagtgaattaatgcagtatcagaaaacc

SEQ ID NO: 134929 - DNA, 33 bp, Homo sapien
ttcttatactttaacaaattcacgattaagtta

SEQ ID NO: 134930 - DNA, 33 bp, Homo sapien
ttcttatactttaacatattcacgattaagtta

SEQ ID NO: 134931 - DNA, 33 bp, Homo sapien
gagctcctgaggtttagatcttacagctttggt

SEQ ID NO: 134932 - DNA, 33 bp, Homo sapien
gagctcctgaggtttatatcttacagctttggt

SEQ ID NO: 134933 - DNA, 33 bp, Homo sapien
tgcctgattgaatcaaatgaagtcccttattca

SEQ ID NO: 134934 - DNA, 33 bp, Homo sapien
tgcctgattgaatcaagtgaagtcccttattca

SEQ ID NO: 134935 - DNA, 33 bp, Homo sapien
cctagcactctctgtgcatagtgtgtttccatt

SEQ ID NO: 134936 - DNA, 33 bp, Homo sapien
cctagcactctctgtgtatagtgtgtttccatt

SEQ ID NO: 134937 - DNA, 33 bp, Homo sapien
cattaagtggccaagacagaatgcaaacctttt

SEQ ID NO: 134938 - DNA, 33 bp, Homo sapien
cattaagtggccaagatagaatgcaaacctttt

SEQ ID NO: 134939 - DNA, 33 bp, Homo sapien
gcattaactcatttaacacccatgaggcattct

SEQ ID NO: 134940 - DNA, 33 bp, Homo sapien
gcattaactcatttaatacccatgaggcattct

SEQ ID NO: 134941 - DNA, 33 bp, Homo sapien
aagaaacaaatggttacgttattctgagtttct

SEQ ID NO: 134942 - DNA, 33 bp, Homo sapien
aagaaacaaatggttatgttattctgagtttct

SEQ ID NO: 134943 - DNA, 33 bp, Homo sapien
agccaaaactaaatcagtccaggtttgagacag

SEQ ID NO: 134944 - DNA, 33 bp, Homo sapien
agccaaaactaaatcattccaggtttgagacag

SEQ ID NO: 134945 - DNA, 33 bp, Homo sapien
agccttagatataacactctccttcagctggcc

SEQ ID NO: 134946 - DNA, 33 bp, Homo sapien
agccttagatataacagtctccttcagctggcc

SEQ ID NO: 134947 - DNA, 33 bp, Homo sapien
ttggttctgttcactaactggataagctccatt

SEQ ID NO: 134948 - DNA, 33 bp, Homo sapien
ttggttctgttcactatctggataagctccatt

SEQ ID NO: 134949 - DNA, 33 bp, Homo sapien
cgttttagcaaaaatcccaggcccaattctaat

SEQ ID NO: 134950 - DNA, 33 bp, Homo sapien
cgttttagcaaaaatctcaggcccaattctaat

SEQ ID NO: 134951 - DNA, 33 bp, Homo sapien
gaagaatttgttatgacaggagcttttctttga

SEQ ID NO: 134952 - DNA, 33 bp, Homo sapien
gaagaatttgttatgataggagcttttctttga

SEQ ID NO: 134953 - DNA, 33 bp, Homo sapien
ggagcaaatgttagcacgggacgatacaatcaa

SEQ ID NO: 134954 - DNA, 33 bp, Homo sapien
ggagcaaatgttagcatgggacgatacaatcaa

SEQ ID NO: 134955 - DNA, 33 bp, Homo sapien
aatctttgttttctccagcttgagatataattg

SEQ ID NO: 134956 - DNA, 33 bp, Homo sapien
aatctttgttttctcctgcttgagatataattg

SEQ ID NO: 134957 - DNA, 33 bp, Homo sapien
aaatcatgattactcaatatcagccatggtaaa

SEQ ID NO: 134958 - DNA, 33 bp, Homo sapien
aaatcatgattactcagtatcagccatggtaaa

SEQ ID NO: 134959 - DNA, 33 bp, Homo sapien
gctccccatgatggataaactatggtcctagct

SEQ ID NO: 134960 - DNA, 33 bp, Homo sapien
gctccccatgatggatgaactatggtcctagct

SEQ ID NO: 134961 - DNA, 33 bp, Homo sapien
ctcaagctgggagtgacacttaactcctgtcac

SEQ ID NO: 134962 - DNA, 33 bp, Homo sapien
ctcaagctgggagtgatacttaactcctgtcac

SEQ ID NO: 134963 - DNA, 33 bp, Homo sapien
tctctaaatgtgcaaacgtaggtaggtttcatt

SEQ ID NO: 134964 - DNA, 33 bp, Homo sapien
tctctaaatgtgcaaatgtaggtaggtttcatt

SEQ ID NO: 134965 - DNA, 33 bp, Homo sapien
ttctctttagctcttcaaactctccatgttcct

SEQ ID NO: 134966 - DNA, 33 bp, Homo sapien
ttctctttagctcttcgaactctccatgttcct

SEQ ID NO: 134967 - DNA, 33 bp, Homo sapien
ccctggttagaaatgacgcaacaaaggagaaaa

SEQ ID NO: 134968 - DNA, 33 bp, Homo sapien
ccctggttagaaatgatgcaacaaaggagaaaa

SEQ ID NO: 134969 - DNA, 33 bp, Homo sapien
ttctccaacaaccaatcaacagatgtcttgaat

SEQ ID NO: 134970 - DNA, 33 bp, Homo sapien
ttctccaacaaccaattaacagatgtcttgaat

SEQ ID NO: 134971 - DNA, 33 bp, Homo sapien
aagaactggtgtaatgaaactcaattctggtgc

SEQ ID NO: 134972 - DNA, 33 bp, Homo sapien
aagaactggtgtaatgcaactcaattctggtgc

SEQ ID NO: 134973 - DNA, 33 bp, Homo sapien
tggttcagaatgaaaccaaaacttcatgccatg

SEQ ID NO: 134974 - DNA, 33 bp, Homo sapien
tggttcagaatgaaactaaaacttcatgccatg

SEQ ID NO: 134975 - DNA, 33 bp, Homo sapien
tgtagatagtgacagaggtaatggggtgatgga

SEQ ID NO: 134976 - DNA, 33 bp, Homo sapien
tgtagatagtgacagatgtaatggggtgatgga

SEQ ID NO: 134977 - DNA, 33 bp, Homo sapien
ttctgattttataagaaactgtgttaataccta

SEQ ID NO: 134978 - DNA, 33 bp, Homo sapien
ttctgattttataagacactgtgttaataccta

SEQ ID NO: 134979 - DNA, 33 bp, Homo sapien
taaaatcagaaaagtaagtaagtatatttgaga

SEQ ID NO: 134980 - DNA, 33 bp, Homo sapien
taaaatcagaaaagtaggtaagtatatttgaga

SEQ ID NO: 134981 - DNA, 33 bp, Homo sapien
atgcttcttccaaaaccactttatccaaaatca

SEQ ID NO: 134982 - DNA, 33 bp, Homo sapien
atgcttcttccaaaacgactttatccaaaatca

SEQ ID NO: 134983 - DNA, 33 bp, Homo sapien
ttgtattgtagcataccgtaagtttttgacctt

SEQ ID NO: 134984 - DNA, 33 bp, Homo sapien
ttgtattgtagcatactgtaagtttttgacctt

SEQ ID NO: 134985 - DNA, 33 bp, Homo sapien
ctgttttctgggtacccaccttttctctccttc

SEQ ID NO: 134986 - DNA, 33 bp, Homo sapien
ctgttttctgggtacctaccttttctctccttc

SEQ ID NO: 134987 - DNA, 33 bp, Homo sapien
ttctgctgcaagagaacttatacctccatgggt

SEQ ID NO: 134988 - DNA, 33 bp, Homo sapien
ttctgctgcaagagaatttatacctccatgggt

SEQ ID NO: 134989 - DNA, 33 bp, Homo sapien
catgaagaagctagcacctcttggtttcagata

SEQ ID NO: 134990 - DNA, 33 bp, Homo sapien
catgaagaagctagcatctcttggtttcagata

SEQ ID NO: 134991 - DNA, 33 bp, Homo sapien
ttactcctctcatgtaagaaggtgacctaagat

SEQ ID NO: 134992 - DNA, 33 bp, Homo sapien
ttactcctctcatgtaggaaggtgacctaagat

SEQ ID NO: 134993 - DNA, 33 bp, Homo sapien
atactttggtgttggaagacatacccagaacgg

SEQ ID NO: 134994 - DNA, 33 bp, Homo sapien
atactttggtgttggacgacatacccagaacgg

SEQ ID NO: 134995 - DNA, 33 bp, Homo sapien
tggtattgagaatccaagtgttgagtagttagc

SEQ ID NO: 134996 - DNA, 33 bp, Homo sapien
tggtattgagaatccaggtgttgagtagttagc

SEQ ID NO: 134997 - DNA, 33 bp, Homo sapien
ctaatcgccatctatgaatgactccttatagtc

SEQ ID NO: 134998 - DNA, 33 bp, Homo sapien
ctaatcgccatctatgcatgactccttatagtc

SEQ ID NO: 134999 - DNA, 33 bp, Homo sapien
gcacggtaggtccctaaacaacataggcaattg

SEQ ID NO: 135000 - DNA, 33 bp, Homo sapien
gcacggtaggtccctacacaacataggcaattg

SEQ ID NO: 135001 - DNA, 33 bp, Homo sapien
tgtaccaatttccccccacaagttgtaattatc

SEQ ID NO: 135002 - DNA, 33 bp, Homo sapien
tgtaccaatttcccccgacaagttgtaattatc

SEQ ID NO: 135003 - DNA, 33 bp, Homo sapien
gtgaaggatacaattgacaagagaagtatggag

SEQ ID NO: 135004 - DNA, 33 bp, Homo sapien
gtgaaggatacaattgccaagagaagtatggag

SEQ ID NO: 135005 - DNA, 33 bp, Homo sapien
tcaaatcctttttcacactataagtcctcatgc

SEQ ID NO: 135006 - DNA, 33 bp, Homo sapien
tcaaatcctttttcacgctataagtcctcatgc

SEQ ID NO: 135007 - DNA, 33 bp, Homo sapien
aatgcactggtggatacagcataccatgcattt

SEQ ID NO: 135008 - DNA, 33 bp, Homo sapien
aatgcactggtggatatagcataccatgcattt

SEQ ID NO: 135009 - DNA, 33 bp, Homo sapien
agcccagatcctacacactcaggggccaaattt

SEQ ID NO: 135010 - DNA, 33 bp, Homo sapien
agcccagatcctacacgctcaggggccaaattt

SEQ ID NO: 135011 - DNA, 33 bp, Homo sapien
tgtctattctctaaccagactgaggatatcaat

SEQ ID NO: 135012 - DNA, 33 bp, Homo sapien
tgtctattctctaaccggactgaggatatcaat

SEQ ID NO: 135013 - DNA, 33 bp, Homo sapien
tgcttatgaatattcactattagtgccaggatc

SEQ ID NO: 135014 - DNA, 33 bp, Homo sapien
tgcttatgaatattcattattagtgccaggatc

SEQ ID NO: 135015 - DNA, 33 bp, Homo sapien
tgaaataaaagttgaaacttgggataaaataaa

SEQ ID NO: 135016 - DNA, 33 bp, Homo sapien
tgaaataaaagttgaaccttgggataaaataaa

SEQ ID NO: 135017 - DNA, 33 bp, Homo sapien
tgttttcatttgtaacaaaacacaattggagaa

SEQ ID NO: 135018 - DNA, 33 bp, Homo sapien
tgttttcatttgtaacgaaacacaattggagaa

SEQ ID NO: 135019 - DNA, 33 bp, Homo sapien
atgtaaaagttccatacagctctaacttttaaa

SEQ ID NO: 135020 - DNA, 33 bp, Homo sapien
atgtaaaagttccatatagctctaacttttaaa

SEQ ID NO: 135021 - DNA, 33 bp, Homo sapien
ttgaattcagccatcacattgcaccagattttt

SEQ ID NO: 135022 - DNA, 33 bp, Homo sapien
ttgaattcagccatcatattgcaccagattttt

SEQ ID NO: 135023 - DNA, 33 bp, Homo sapien
caattaccctatgaagaatttactttggctggc

SEQ ID NO: 135024 - DNA, 33 bp, Homo sapien
caattaccctatgaagcatttactttggctggc

SEQ ID NO: 135025 - DNA, 33 bp, Homo sapien
actcagtgatagaacagcttagaggaagcctgc

SEQ ID NO: 135026 - DNA, 33 bp, Homo sapien
actcagtgatagaacatcttagaggaagcctgc

SEQ ID NO: 135027 - DNA, 33 bp, Homo sapien
tggctgcataaattcccgaaaaacaggttaatt

SEQ ID NO: 135028 - DNA, 33 bp, Homo sapien
tggctgcataaattcctgaaaaacaggttaatt

SEQ ID NO: 135029 - DNA, 33 bp, Homo sapien
aagttaaataggcaaccgaagaactaaacccat

SEQ ID NO: 135030 - DNA, 33 bp, Homo sapien
aagttaaataggcaactgaagaactaaacccat

SEQ ID NO: 135031 - DNA, 33 bp, Homo sapien
tcagacttcattacagaaagagattagtactga

SEQ ID NO: 135032 - DNA, 33 bp, Homo sapien
tcagacttcattacaggaagagattagtactga

SEQ ID NO: 135033 - DNA, 33 bp, Homo sapien; identical to SEQ ID NO: 135031

SEQ ID NO: 135034 - DNA, 33 bp, Homo sapien; identical to SEQ ID NO: 135032

SEQ ID NO: 135035 - DNA, 33 bp, Homo sapien
tcagcacattgtttacaagtgactagatgtcca

SEQ ID NO: 135036 - DNA, 33 bp, Homo sapien
tcagcacattgtttactagtgactagatgtcca

SEQ ID NO: 135037 - DNA, 33 bp, Homo sapien; identical to SEQ ID NO: 135035

SEQ ID NO: 135038 - DNA, 33 bp, Homo sapien; identical to SEQ ID NO: 135036

SEQ ID NO: 135039 - DNA, 33 bp, Homo sapien
agcacaagcaacgaaaaaaagatacacataaat

SEQ ID NO: 135040 - DNA, 33 bp, Homo sapien
agcacaagcaacgaaagaaagatacacataaat

SEQ ID NO: 135041 - DNA, 33 bp, Homo sapien
aaaaaagatgtatccaaaaaagcgaatctgatc

SEQ ID NO: 135042 - DNA, 33 bp, Homo sapien
aaaaaagatgtatccagaaaagcgaatctgatc

SEQ ID NO: 135043 - DNA, 33 bp, Homo sapien
tctgtccatctctagcacctgggacagaacctt

SEQ ID NO: 135044 - DNA, 33 bp, Homo sapien
tctgtccatctctagcgcctgggacagaacctt

SEQ ID NO: 135045 - DNA, 33 bp, Homo sapien
aaaggagtccaaaaaacaggagtaggaagagag

SEQ ID NO: 135046 - DNA, 33 bp, Homo sapien
aaaggagtccaaaaaataggagtaggaagagag

SEQ ID NO: 135047 - DNA, 33 bp, Homo sapien
aaatgaaaaagagctacagaaaagcaaggtttg

SEQ ID NO: 135048 - DNA, 33 bp, Homo sapien
aaatgaaaaagagctatagaaaagcaaggtttg

SEQ ID NO: 135049 - DNA, 33 bp, Homo sapien
tcagactgagaaaacaagctccagagtatgctt

SEQ ID NO: 135050 - DNA, 33 bp, Homo sapien
tcagactgagaaaacaggctccagagtatgctt

SEQ ID NO: 135051 - DNA, 33 bp, Homo sapien
ctttgcactagatgggaatcaatactacttaac

SEQ ID NO: 135052 - DNA, 33 bp, Homo sapien
ctttgcactagatggggatcaatactacttaac

SEQ ID NO: 135053 - DNA, 33 bp, Homo sapien
ctttctgtcttcccacaaataaatcaatcactg

SEQ ID NO: 135054 - DNA, 33 bp, Homo sapien
ctttctgtcttcccaccaataaatcaatcactg

SEQ ID NO: 135055 - DNA, 33 bp, Homo sapien
caaaatccatggcatcacttatgcaggcgatta

SEQ ID NO: 135056 - DNA, 33 bp, Homo sapien
caaaatccatggcatcgcttatgcaggcgatta

SEQ ID NO: 135057 - DNA, 33 bp, Homo sapien
atgagaggaaggagaggattgaaaagctattga

SEQ ID NO: 135058 - DNA, 33 bp, Homo sapien
atgagaggaaggagagtattgaaaagctattga

SEQ ID NO: 135059 - DNA, 33 bp, Homo sapien
catgggatattataaccagtaagtttggtgtga

SEQ ID NO: 135060 - DNA, 33 bp, Homo sapien
catgggatattataactagtaagtttggtgtga

SEQ ID NO: 135061 - DNA, 33 bp, Homo sapien
agtgtgcttcagttcaaagatttaagtcttttc

SEQ ID NO: 135062 - DNA, 33 bp, Homo sapien
agtgtgcttcagttcatagatttaagtcttttc

SEQ ID NO: 135063 - DNA, 33 bp, Homo sapien
cttccaatacaactctcaccctcagcaatgtct

SEQ ID NO: 135064 - DNA, 33 bp, Homo sapien
cttccaatacaactcttaccctcagcaatgtct

SEQ ID NO: 135065 - DNA, 33 bp, Homo sapien
cacagtgcatcactaactgggttcaaatggtgg

SEQ ID NO: 135066 - DNA, 33 bp, Homo sapien
cacagtgcatcactaagtgggttcaaatggtgg

SEQ ID NO: 135067 - DNA, 33 bp, Homo sapien
aaatcccagaaatccaactgcactctttcaaat

SEQ ID NO: 135068 - DNA, 33 bp, Homo sapien
aaatcccagaaatccagctgcactctttcaaat

SEQ ID NO: 135069 - DNA, 33 bp, Homo sapien
tactgagcttttcctaaaggccaattactgtcc

SEQ ID NO: 135070 - DNA, 33 bp, Homo sapien
tactgagcttttcctagaggccaattactgtcc

SEQ ID NO: 135071 - DNA, 33 bp, Homo sapien
ctcgggattcttatctcaaattccccagaagaa

SEQ ID NO: 135072 - DNA, 33 bp, Homo sapien
ctcgggattcttatctgaaattccccagaagaa

SEQ ID NO: 135073 - DNA, 33 bp, Homo sapien
tatgtttttgcagaaccgagtgatacctttaat

SEQ ID NO: 135074 - DNA, 33 bp, Homo sapien
tatgtttttgcagaactgagtgatacctttaat

SEQ ID NO: 135075 - DNA, 33 bp, Homo sapien
agaactgtatgttacaaaagagaaatgcatggt

SEQ ID NO: 135076 - DNA, 33 bp, Homo sapien
agaactgtatgttacagaagagaaatgcatggt

SEQ ID NO: 135077 - DNA, 33 bp, Homo sapien
attggctttgtatttacccaaacctaactcaat

SEQ ID NO: 135078 - DNA, 33 bp, Homo sapien
attggctttgtatttatccaaacctaactcaat

SEQ ID NO: 135079 - DNA, 33 bp, Homo sapien
agtggggacccaactgcattgacctttccctca

SEQ ID NO: 135080 - DNA, 33 bp, Homo sapien
agtggggacccaactggattgacctttccctca

SEQ ID NO: 135081 - DNA, 33 bp, Homo sapien
ttatctctgctgggaacatcaggtttctcaacc

SEQ ID NO: 135082 - DNA, 33 bp, Homo sapien
ttatctctgctgggaagatcaggtttctcaacc

SEQ ID NO: 135083 - DNA, 33 bp, Homo sapien
gtgccttctaggatgacgtgttaccagtgaagt

SEQ ID NO: 135084 - DNA, 33 bp, Homo sapien
gtgccttctaggatgatgtgttaccagtgaagt

SEQ ID NO: 135085 - DNA, 33 bp, Homo sapien
tctccaagacacctgacgaacaaatacaaagcc

SEQ ID NO: 135086 - DNA, 33 bp, Homo sapien
tctccaagacacctgaggaacaaatacaaagcc

SEQ ID NO: 135087 - DNA, 33 bp, Homo sapien
agctacctacctgtgccctcttgctgaggaaga

SEQ ID NO: 135088 - DNA, 33 bp, Homo sapien
agctacctacctgtgctctcttgctgaggaaga

SEQ ID NO: 135089 - DNA, 33 bp, Homo sapien
tatgtccattggagaaaaaaataaacagatgtg

SEQ ID NO: 135090 - DNA, 33 bp, Homo sapien
tatgtccattggagaataaaataaacagatgtg

SEQ ID NO: 135091 - DNA, 33 bp, Homo sapien
ccttgccttgcattataaatacttcatgcccct

SEQ ID NO: 135092 - DNA, 33 bp, Homo sapien
ccttgccttgcattatgaatacttcatgcccct

SEQ ID NO: 135093 - DNA, 33 bp, Homo sapien
tgtggtgtttatcttgcacttaatagttttacc

SEQ ID NO: 135094 - DNA, 33 bp, Homo sapien
tgtggtgtttatcttgtacttaatagttttacc

SEQ ID NO: 135095 - DNA, 33 bp, Homo sapien
ttatgttctatggaaccggggtcacctccacat

SEQ ID NO: 135096 - DNA, 33 bp, Homo sapien
ttatgttctatggaactggggtcacctccacat

SEQ ID NO: 135097 - DNA, 33 bp, Homo sapien
ccactcacgatgatcacacccaatacattgcct

SEQ ID NO: 135098 - DNA, 33 bp, Homo sapien
ccactcacgatgatcatacccaatacattgcct

SEQ ID NO: 135099 - DNA, 33 bp, Homo sapien
atgcctaggtgtttaacagactagcagcaccat

SEQ ID NO: 135100 - DNA, 33 bp, Homo sapien
atgcctaggtgtttaagagactagcagcaccat

SEQ ID NO: 135101 - DNA, 33 bp, Homo sapien
atattggctgttcagaaaaaagcaggatctcat

SEQ ID NO: 135102 - DNA, 33 bp, Homo sapien
atattggctgttcagagaaaagcaggatctcat

SEQ ID NO: 135103 - DNA, 33 bp, Homo sapien
cagtggtgctctgtcacagcaggaagcaaaacc

SEQ ID NO: 135104 - DNA, 33 bp, Homo sapien
cagtggtgctctgtcatagcaggaagcaaaacc

SEQ ID NO: 135105 - DNA, 33 bp, Homo sapien
cctcatcctcactgagaccaccttctcttttct

SEQ ID NO: 135106 - DNA, 33 bp, Homo sapien
cctcatcctcactgaggccaccttctcttttct

SEQ ID NO: 135107 - DNA, 33 bp, Homo sapien
ctgtctattttccctcaatgatccataggactg

SEQ ID NO: 135108 - DNA, 33 bp, Homo sapien
ctgtctattttccctctatgatccataggactg

SEQ ID NO: 135109 - DNA, 33 bp, Homo sapien
ttcaacctgtagaatgaaagtgttgagacctcc

SEQ ID NO: 135110 - DNA, 33 bp, Homo sapien
ttcaacctgtagaatggaagtgttgagacctcc

SEQ ID NO: 135111 - DNA, 33 bp, Homo sapien
aataaaaactctggacaccaacgctcgagtgag

SEQ ID NO: 135112 - DNA, 33 bp, Homo sapien
aataaaaactctggactccaacgctcgagtgag

SEQ ID NO: 135113 - DNA, 33 bp, Homo sapien
acagcctttaattttcccagcaacgatatgtga

SEQ ID NO: 135114 - DNA, 33 bp, Homo sapien
acagcctttaattttctcagcaacgatatgtga

SEQ ID NO: 135115 - DNA, 33 bp, Homo sapien
gattgaaagtcacaacaaggctgtgtaatttct

SEQ ID NO: 135116 - DNA, 33 bp, Homo sapien
gattgaaagtcacaacgaggctgtgtaatttct

SEQ ID NO: 135117 - DNA, 33 bp, Homo sapien
acctctgctatagaccaacctcattaggctagt

SEQ ID NO: 135118 - DNA, 33 bp, Homo sapien
acctctgctatagacccacctcattaggctagt

SEQ ID NO: 135119 - DNA, 33 bp, Homo sapien
aaggagactcttcagaagccttgttagggaaag

SEQ ID NO: 135120 - DNA, 33 bp, Homo sapien
aaggagactcttcagaggccttgttagggaaag

SEQ ID NO: 135121 - DNA, 33 bp, Homo sapien
gctctttattctgtgaacaaaggataaattttc

SEQ ID NO: 135122 - DNA, 33 bp, Homo sapien
gctctttattctgtgatcaaaggataaattttc

SEQ ID NO: 135123 - DNA, 33 bp, Homo sapien
gaatagggctggcttacgaatccaggagttaat

SEQ ID NO: 135124 - DNA, 33 bp, Homo sapien
gaatagggctggcttatgaatccaggagttaat

SEQ ID NO: 135125 - DNA, 33 bp, Homo sapien
aattttaaggtgaagaaatggagaaattaaaga

SEQ ID NO: 135126 - DNA, 33 bp, Homo sapien
aattttaaggtgaagagatggagaaattaaaga

SEQ ID NO: 135127 - DNA, 33 bp, Homo sapien
tttaaaacttattctaataattcctggctgtct

SEQ ID NO: 135128 - DNA, 33 bp, Homo sapien
tttaaaacttattctagtaattcctggctgtct

SEQ ID NO: 135129 - DNA, 33 bp, Homo sapien
tccagttgtgtgggccggcagacaaatcatttg

SEQ ID NO: 135130 - DNA, 33 bp, Homo sapien
tccagttgtgtgggcctgcagacaaatcatttg

SEQ ID NO: 135131 - DNA, 33 bp, Homo sapien
ctcatctgcacacagcacatactctaaaactga

SEQ ID NO: 135132 - DNA, 33 bp, Homo sapien
ctcatctgcacacagcgcatactctaaaactga

SEQ ID NO: 135133 - DNA, 33 bp, Homo sapien
cctaacatcacacgtaaagaaactagaaaaaca

SEQ ID NO: 135134 - DNA, 33 bp, Homo sapien
cctaacatcacacgtagagaaactagaaaaaca

SEQ ID NO: 135135 - DNA, 33 bp, Homo sapien
atcctagcccttagtcacagttcactggagctg

SEQ ID NO: 135136 - DNA, 33 bp, Homo sapien
atcctagcccttagtcgcagttcactggagctg

SEQ ID NO: 135137 - DNA, 33 bp, Homo sapien
tcctcatatgacacagaacgaaactgctgcccc

SEQ ID NO: 135138 - DNA, 33 bp, Homo sapien
tcctcatatgacacaggacgaaactgctgcccc

SEQ ID NO: 135139 - DNA, 33 bp, Homo sapien
taagattcaaagtaccacatacttgatacaaca

SEQ ID NO: 135140 - DNA, 33 bp, Homo sapien
taagattcaaagtaccgcatacttgatacaaca

SEQ ID NO: 135141 - DNA, 33 bp, Homo sapien
catgaatgaatatagacgatgttcctgcccttg

SEQ ID NO: 135142 - DNA, 33 bp, Homo sapien
catgaatgaatatagatgatgttcctgcccttg

SEQ ID NO: 135143 - DNA, 33 bp, Homo sapien
aattctggatacaaagcctcaaattgatgctct

SEQ ID NO: 135144 - DNA, 33 bp, Homo sapien
aattctggatacaaaggctcaaattgatgctct

SEQ ID NO: 135145 - DNA, 33 bp, Homo sapien
cttgggcacttaatcacctttttatggattaca

SEQ ID NO: 135146 - DNA, 33 bp, Homo sapien
cttgggcacttaatcatctttttatggattaca

SEQ ID NO: 135147 - DNA, 33 bp, Homo sapien
ctcaggccaatgaatacgtcaggaaacagacat

SEQ ID NO: 135148 - DNA, 33 bp, Homo sapien
ctcaggccaatgaatatgtcaggaaacagacat

SEQ ID NO: 135149 - DNA, 33 bp, Homo sapien
tgtggatctgtggagaaagtggagacggccagc

SEQ ID NO: 135150 - DNA, 33 bp, Homo sapien
tgtggatctgtggagagagtggagacggccagc

SEQ ID NO: 135151 - DNA, 33 bp, Homo sapien
cgtttctgaactagagaacaatttgtgaagaaa

SEQ ID NO: 135152 - DNA, 33 bp, Homo sapien
cgtttctgaactagaggacaatttgtgaagaaa

SEQ ID NO: 135153 - DNA, 33 bp, Homo sapien
gagaaaagagagcacaaaagagagccagacacc

SEQ ID NO: 135154 - DNA, 33 bp, Homo sapien
gagaaaagagagcacagaagagagccagacacc

SEQ ID NO: 135155 - DNA, 33 bp, Homo sapien
ggaggagctcttggaaaatggcatcaggttcct

SEQ ID NO: 135156 - DNA, 33 bp, Homo sapien
ggaggagctcttggaagatggcatcaggttcct

SEQ ID NO: 135157 - DNA, 33 bp, Homo sapien
gtctacaaggaggttaactgcggggatctgctc

SEQ ID NO: 135158 - DNA, 33 bp, Homo sapien
gtctacaaggaggttatctgcggggatctgctc

SEQ ID NO: 135159 - DNA, 33 bp, Homo sapien
gtttcacgttctggagccacacataataaattt

SEQ ID NO: 135160 - DNA, 33 bp, Homo sapien
gtttcacgttctggaggcacacataataaattt

SEQ ID NO: 135161 - DNA, 33 bp, Homo sapien
aggagaggacaaaccagatatgaaggtcacagg

SEQ ID NO: 135162 - DNA, 33 bp, Homo sapien
aggagaggacaaaccatatatgaaggtcacagg

SEQ ID NO: 135163 - DNA, 33 bp, Homo sapien
gaaaactacaggattacacatctgtccccattc

SEQ ID NO: 135164 - DNA, 33 bp, Homo sapien
gaaaactacaggattagacatctgtccccattc

SEQ ID NO: 135165 - DNA, 33 bp, Homo sapien
ctctcttggacaaacaaattcacttaggtgctc

SEQ ID NO: 135166 - DNA, 33 bp, Homo sapien
ctctcttggacaaacagattcacttaggtgctc

SEQ ID NO: 135167 - DNA, 33 bp, Homo sapien
agttcctgcagcttcaaaaaggaaagagggaca

SEQ ID NO: 135168 - DNA, 33 bp, Homo sapien
agttcctgcagcttcagaaaggaaagagggaca

SEQ ID NO: 135169 - DNA, 33 bp, Homo sapien
ttcactgggttcctaccgctttctgggaccagg

SEQ ID NO: 135170 - DNA, 33 bp, Homo sapien
ttcactgggttcctactgctttctgggaccagg

SEQ ID NO: 135171 - DNA, 33 bp, Homo sapien
tggcttctgttgccaaagactccttgcctttat

SEQ ID NO: 135172 - DNA, 33 bp, Homo sapien
tggcttctgttgccaatgactccttgcctttat

SEQ ID NO: 135173 - DNA, 33 bp, Homo sapien
tctgggccttgtcacacctttccctctggactg

SEQ ID NO: 135174 - DNA, 33 bp, Homo sapien
tctgggccttgtcacagctttccctctggactg

SEQ ID NO: 135175 - DNA, 33 bp, Homo sapien
gacccagaaagtttaactgacacttcagaattt

SEQ ID NO: 135176 - DNA, 33 bp, Homo sapien
gacccagaaagtttaattgacacttcagaattt

SEQ ID NO: 135177 - DNA, 33 bp, Homo sapien
tattctaatgaacacaaacgaacctcaccaagt

SEQ ID NO: 135178 - DNA, 33 bp, Homo sapien
tattctaatgaacacagacgaacctcaccaagt

SEQ ID NO: 135179 - DNA, 33 bp, Homo sapien
atagtacaggtgctgcagaaaacagtatggaag

SEQ ID NO: 135180 - DNA, 33 bp, Homo sapien
atagtacaggtgctgcggaaaacagtatggaag

SEQ ID NO: 135181 - DNA, 33 bp, Homo sapien
aaagctggtgattccaactctggttttatttga

SEQ ID NO: 135182 - DNA, 33 bp, Homo sapien
aaagctggtgattccagctctggttttatttga

SEQ ID NO: 135183 - DNA, 33 bp, Homo sapien
tagatatagatgaaacaagtttaagaatttcta

SEQ ID NO: 135184 - DNA, 33 bp, Homo sapien
tagatatagatgaaaccagtttaagaatttcta

SEQ ID NO: 135185 - DNA, 33 bp, Homo sapien
ttagtgctccaatatgccaggcacctaagtggc

SEQ ID NO: 135186 - DNA, 33 bp, Homo sapien
ttagtgctccaatatgtcaggcacctaagtggc

SEQ ID NO: 135187 - DNA, 33 bp, Homo sapien
aaacctagctgtggaaatgacctgcctaggctg

SEQ ID NO: 135188 - DNA, 33 bp, Homo sapien
aaacctagctgtggaagtgacctgcctaggctg

SEQ ID NO: 135189 - DNA, 33 bp, Homo sapien
acaaggtaaagtcaaaatcgtgtgttcaatatg

SEQ ID NO: 135190 - DNA, 33 bp, Homo sapien
acaaggtaaagtcaaagtcgtgtgttcaatatg

SEQ ID NO: 135191 - DNA, 33 bp, Homo sapien
tgagggttgatccagaagttaacaatgtcataa

SEQ ID NO: 135192 - DNA, 33 bp, Homo sapien
tgagggttgatccagaggttaacaatgtcataa

SEQ ID NO: 135193 - DNA, 33 bp, Homo sapien
aagccttcgagggataactacaagttcttctaa

SEQ ID NO: 135194 - DNA, 33 bp, Homo sapien
aagccttcgagggatatctacaagttcttctaa

SEQ ID NO: 135195 - DNA, 33 bp, Homo sapien
ttcaggaagcaagcaaacctctgggacataagc

SEQ ID NO: 135196 - DNA, 33 bp, Homo sapien
ttcaggaagcaagcaagcctctgggacataagc

SEQ ID NO: 135197 - DNA, 33 bp, Homo sapien
gggcacctgcatcaaacctgtgggcaggcagat

SEQ ID NO: 135198 - DNA, 33 bp, Homo sapien
gggcacctgcatcaaatctgtgggcaggcagat

SEQ ID NO: 135199 - DNA, 33 bp, Homo sapien
acccatgccctcctcaagaaagaaaacccaaag

SEQ ID NO: 135200 - DNA, 33 bp, Homo sapien
acccatgccctcctcaggaaagaaaacccaaag

SEQ ID NO: 135201 - DNA, 33 bp, Homo sapien
aatgaagccaatcaaacagaaggcagagcctag

SEQ ID NO: 135202 - DNA, 33 bp, Homo sapien
aatgaagccaatcaaagagaaggcagagcctag

SEQ ID NO: 135203 - DNA, 33 bp, Homo sapien
tagaagactcttatcacataacaagtgcttgcg

SEQ ID NO: 135204 - DNA, 33 bp, Homo sapien
tagaagactcttatcatataacaagtgcttgcg

SEQ ID NO: 135205 - DNA, 33 bp, Homo sapien
ggggttggccaagcaacctctttccatggatct

SEQ ID NO: 135206 - DNA, 33 bp, Homo sapien
ggggttggccaagcaatctctttccatggatct

SEQ ID NO: 135207 - DNA, 33 bp, Homo sapien
atatcccactcaagtcaacaaatacttgctcag

SEQ ID NO: 135208 - DNA, 33 bp, Homo sapien
atatcccactcaagtcgacaaatacttgctcag

SEQ ID NO: 135209 - DNA, 33 bp, Homo sapien
cagggaacaaaatccaagcagattaccgctcag

SEQ ID NO: 135210 - DNA, 33 bp, Homo sapien
cagggaacaaaatccaggcagattaccgctcag

SEQ ID NO: 135211 - DNA, 33 bp, Homo sapien
gagcagaagcctcagcagaaacagatccagcaa

SEQ ID NO: 135212 - DNA, 33 bp, Homo sapien
gagcagaagcctcagcggaaacagatccagcaa

SEQ ID NO: 135213 - DNA, 33 bp, Homo sapien
tcagtaaatggggatacgtggctaagaaggtaa

SEQ ID NO: 135214 - DNA, 33 bp, Homo sapien
tcagtaaatggggatatgtggctaagaaggtaa

SEQ ID NO: 135215 - DNA, 33 bp, Homo sapien
ctcatgaatgacaataactaacttttactgagc

SEQ ID NO: 135216 - DNA, 33 bp, Homo sapien
ctcatgaatgacaatagctaacttttactgagc

SEQ ID NO: 135217 - DNA, 33 bp, Homo sapien
catgctgcaaagtaaagattaaattctacctcc

SEQ ID NO: 135218 - DNA, 33 bp, Homo sapien
catgctgcaaagtaaatattaaattctacctcc

SEQ ID NO: 135219 - DNA, 33 bp, Homo sapien
cctgagctttgtgctacgactatgttgtccctc

SEQ ID NO: 135220 - DNA, 33 bp, Homo sapien
cctgagctttgtgctatgactatgttgtccctc

SEQ ID NO: 135221 - DNA, 33 bp, Homo sapien
ttgaaaatgcttgaagcagtgttttgtactgaa

SEQ ID NO: 135222 - DNA, 33 bp, Homo sapien
ttgaaaatgcttgaagtagtgttttgtactgaa

SEQ ID NO: 135223 - DNA, 33 bp, Homo sapien
gaccactgaacccacaccttgcaggttcatgcc

SEQ ID NO: 135224 - DNA, 33 bp, Homo sapien
gaccactgaacccacatcttgcaggttcatgcc

SEQ ID NO: 135225 - DNA, 33 bp, Homo sapien
tggacaccaagtaacaaaaaagacacaaaggaa

SEQ ID NO: 135226 - DNA, 33 bp, Homo sapien
tggacaccaagtaacagaaaagacacaaaggaa

SEQ ID NO: 135227 - DNA, 33 bp, Homo sapien
tctgtgtcactaacgacgaaggatattttattg

SEQ ID NO: 135228 - DNA, 33 bp, Homo sapien
tctgtgtcactaacgatgaaggatattttattg

SEQ ID NO: 135229 - DNA, 33 bp, Homo sapien
ccaaaaagacacaagcacaaatatgttcattgc

SEQ ID NO: 135230 - DNA, 33 bp, Homo sapien
ccaaaaagacacaagcgcaaatatgttcattgc

SEQ ID NO: 135231 - DNA, 33 bp, Homo sapien
atatcaattacaaatcaagcattataatctaag

SEQ ID NO: 135232 - DNA, 33 bp, Homo sapien
atatcaattacaaatcgagcattataatctaag

SEQ ID NO: 135233 - DNA, 33 bp, Homo sapien
cgtgtgcttgcagtagacatatgtaatactagg

SEQ ID NO: 135234 - DNA, 33 bp, Homo sapien
cgtgtgcttgcagtaggcatatgtaatactagg

SEQ ID NO: 135235 - DNA, 33 bp, Homo sapien
aactataagacaaaaaccctggcataaaaatgg

SEQ ID NO: 135236 - DNA, 33 bp, Homo sapien
aactataagacaaaaatcctggcataaaaatgg

SEQ ID NO: 135237 - DNA, 33 bp, Homo sapien
ttttgagatgttttgaagtaatctgaatagttt

SEQ ID NO: 135238 - DNA, 33 bp, Homo sapien
ttttgagatgttttgaggtaatctgaatagttt

SEQ ID NO: 135239 - DNA, 33 bp, Homo sapien
taaatcaagcccaaaaatacttcgaaggagttc

SEQ ID NO: 135240 - DNA, 33 bp, Homo sapien
taaatcaagcccaaaactacttcgaaggagttc

SEQ ID NO: 135241 - DNA, 33 bp, Homo sapien
tttggggggtttcacactgaccaattggagcaa

SEQ ID NO: 135242 - DNA, 33 bp, Homo sapien
tttggggggtttcacattgaccaattggagcaa

SEQ ID NO: 135243 - DNA, 33 bp, Homo sapien
aagcagggtgactaaccgacctgatttgcccgg

SEQ ID NO: 135244 - DNA, 33 bp, Homo sapien
aagcagggtgactaactgacctgatttgcccgg

SEQ ID NO: 135245 - DNA, 33 bp, Homo sapien
agactcaagagctaaacacaagcatattatttt

SEQ ID NO: 135246 - DNA, 33 bp, Homo sapien
agactcaagagctaaagacaagcatattatttt

SEQ ID NO: 135247 - DNA, 33 bp, Homo sapien
tttctgtattatggcaatatagctttttcacat

SEQ ID NO: 135248 - DNA, 33 bp, Homo sapien
tttctgtattatggcagtatagctttttcacat

SEQ ID NO: 135249 - DNA, 33 bp, Homo sapien
gcacagctgcccactagaataacctaggaagcc

SEQ ID NO: 135250 - DNA, 33 bp, Homo sapien
gcacagctgcccactataataacctaggaagcc

SEQ ID NO: 135251 - DNA, 33 bp, Homo sapien
ccagaggtagtgaagcagagagtaatgcatagg

SEQ ID NO: 135252 - DNA, 33 bp, Homo sapien
ccagaggtagtgaagcggagagtaatgcatagg

SEQ ID NO: 135253 - DNA, 33 bp, Homo sapien
gcctcatctattccccactcaccagccttttct

SEQ ID NO: 135254 - DNA, 33 bp, Homo sapien
gcctcatctattccccgctcaccagccttttct

SEQ ID NO: 135255 - DNA, 33 bp, Homo sapien
ccttctcagtaattaaccagcctctgtgtacat

SEQ ID NO: 135256 - DNA, 33 bp, Homo sapien
ccttctcagtaattaatcagcctctgtgtacat

SEQ ID NO: 135257 - DNA, 33 bp, Homo sapien
gtcaaatgaaatcccaagccgtccaaatccgag

SEQ ID NO: 135258 - DNA, 33 bp, Homo sapien
gtcaaatgaaatcccaggccgtccaaatccgag

SEQ ID NO: 135259 - DNA, 33 bp, Homo sapien
tctggatcagcgagagaaagtggttggcctatg

SEQ ID NO: 135260 - DNA, 33 bp, Homo sapien
tctggatcagcgagaggaagtggttggcctatg

SEQ ID NO: 135261 - DNA, 33 bp, Homo sapien
cttctctgagcttcaggattcttgattataaaa

SEQ ID NO: 135262 - DNA, 33 bp, Homo sapien
cttctctgagcttcagtattcttgattataaaa

SEQ ID NO: 135263 - DNA, 33 bp, Homo sapien
agatactgttttgttcaattttgtatcctcagt

SEQ ID NO: 135264 - DNA, 33 bp, Homo sapien
agatactgttttgttccattttgtatcctcagt

SEQ ID NO: 135265 - DNA, 33 bp, Homo sapien
tttctaccttacagaagtatgtaatagccttgc

SEQ ID NO: 135266 - DNA, 33 bp, Homo sapien
tttctaccttacagaattatgtaatagccttgc

SEQ ID NO: 135267 - DNA, 33 bp, Homo sapien
ttatctctcttcttcacggctcagtatacattc

SEQ ID NO: 135268 - DNA, 33 bp, Homo sapien
ttatctctcttcttcatggctcagtatacattc

SEQ ID NO: 135269 - DNA, 33 bp, Homo sapien
acatgcgattctacaaaaaagatgatattgtag

SEQ ID NO: 135270 - DNA, 33 bp, Homo sapien
acatgcgattctacaagaaagatgatattgtag

SEQ ID NO: 135271 - DNA, 33 bp, Homo sapien
gtgttgactctcatcaagagttaggttggagac

SEQ ID NO: 135272 - DNA, 33 bp, Homo sapien
gtgttgactctcatcaggagttaggttggagac

SEQ ID NO: 135273 - DNA, 33 bp, Homo sapien
acaatcaacaccaggacctccaaacagtataat

SEQ ID NO: 135274 - DNA, 33 bp, Homo sapien
acaatcaacaccaggatctccaaacagtataat

SEQ ID NO: 135275 - DNA, 33 bp, Homo sapien
tttgtacttcctgttacgtcagtattgtgtgta

SEQ ID NO: 135276 - DNA, 33 bp, Homo sapien
tttgtacttcctgttatgtcagtattgtgtgta

SEQ ID NO: 135277 - DNA, 33 bp, Homo sapien
tgatactcagaaagtacgtcgttttcatctgtg

SEQ ID NO: 135278 - DNA, 33 bp, Homo sapien
tgatactcagaaagtatgtcgttttcatctgtg

SEQ ID NO: 135279 - DNA, 33 bp, Homo sapien
ctcatcaaaaagccatcagagtgagttttataa

SEQ ID NO: 135280 - DNA, 33 bp, Homo sapien
ctcatcaaaaagccattagagtgagttttataa

SEQ ID NO: 135281 - DNA, 33 bp, Homo sapien
agagcatcagtgtcacaaaatacaataaaagcc

SEQ ID NO: 135282 - DNA, 33 bp, Homo sapien
agagcatcagtgtcacgaaatacaataaaagcc

SEQ ID NO: 135283 - DNA, 33 bp, Homo sapien
cctgcagatagcaaaactgaaagagcgcactgt

SEQ ID NO: 135284 - DNA, 33 bp, Homo sapien
cctgcagatagcaaaagtgaaagagcgcactgt

SEQ ID NO: 135285 - DNA, 33 bp, Homo sapien
tcaatggcaagagtacaatggaacaccagatat

SEQ ID NO: 135286 - DNA, 33 bp, Homo sapien
tcaatggcaagagtactatggaacaccagatat

SEQ ID NO: 135287 - DNA, 33 bp, Homo sapien
tgggctaagcaattcacgtgtaactttggtcac

SEQ ID NO: 135288 - DNA, 33 bp, Homo sapien
tgggctaagcaattcatgtgtaactttggtcac

SEQ ID NO: 135289 - DNA, 33 bp, Homo sapien
tgtttttaaaatcaaacacaccgagtggaaaaa

SEQ ID NO: 135290 - DNA, 33 bp, Homo sapien
tgtttttaaaatcaaatacaccgagtggaaaaa

SEQ ID NO: 135291 - DNA, 33 bp, Homo sapien
ttcagtcaacactgaccgcgtaccaagcactgg

SEQ ID NO: 135292 - DNA, 33 bp, Homo sapien
ttcagtcaacactgactgcgtaccaagcactgg

SEQ ID NO: 135293 - DNA, 33 bp, Homo sapien
gcaaacttgaaagcaccacccagtggaagtaca

SEQ ID NO: 135294 - DNA, 33 bp, Homo sapien
gcaaacttgaaagcactacccagtggaagtaca

SEQ ID NO: 135295 - DNA, 33 bp, Homo sapien
tggtagacttgagtagacattgttctgggggag

SEQ ID NO: 135296 - DNA, 33 bp, Homo sapien
tggtagacttgagtaggcattgttctgggggag

SEQ ID NO: 135297 - DNA, 33 bp, Homo sapien
agtaaaagtttcaacaacatccgctagggcttg

SEQ ID NO: 135298 - DNA, 33 bp, Homo sapien
agtaaaagtttcaacatcatccgctagggcttg

SEQ ID NO: 135299 - DNA, 33 bp, Homo sapien
cagctggatacagggaaagtcactcacacactc

SEQ ID NO: 135300 - DNA, 33 bp, Homo sapien
cagctggatacagggacagtcactcacacactc

SEQ ID NO: 135301 - DNA, 33 bp, Homo sapien
tcccttccaacaacaacgtgaagcacagagctc

SEQ ID NO: 135302 - DNA, 33 bp, Homo sapien
tcccttccaacaacaatgtgaagcacagagctc

SEQ ID NO: 135303 - DNA, 33 bp, Homo sapien
tgataaacctcacagtgaatgatccagctgccg

SEQ ID NO: 135304 - DNA, 33 bp, Homo sapien
tgataaacctcacagttaatgatccagctgccg

SEQ ID NO: 135305 - DNA, 33 bp, Homo sapien
tatcaacgtgtgcatcaaggcaactcatttcct

SEQ ID NO: 135306 - DNA, 33 bp, Homo sapien
tatcaacgtgtgcatcgaggcaactcatttcct

SEQ ID NO: 135307 - DNA, 33 bp, Homo sapien
gcctgactgagtaactgaaccgggctcataact

SEQ ID NO: 135308 - DNA, 33 bp, Homo sapien
gcctgactgagtaacttaaccgggctcataact

SEQ ID NO: 135309 - DNA, 33 bp, Homo sapien
gaatgttaggtcccagcctccagagaaaaatct

SEQ ID NO: 135310 - DNA, 33 bp, Homo sapien
gaatgttaggtcccaggctccagagaaaaatct

SEQ ID NO: 135311 - DNA, 33 bp, Homo sapien
aagattcaactgagaacagaaacactcttgcta

SEQ ID NO: 135312 - DNA, 33 bp, Homo sapien
aagattcaactgagaagagaaacactcttgcta

SEQ ID NO: 135313 - DNA, 33 bp, Homo sapien
cagctgatttttctcacaagggaaatttgagaa

SEQ ID NO: 135314 - DNA, 33 bp, Homo sapien
cagctgatttttctcataagggaaatttgagaa

SEQ ID NO: 135315 - DNA, 33 bp, Homo sapien
tggtgacgaagcccaacgcctgtgagatctttt

SEQ ID NO: 135316 - DNA, 33 bp, Homo sapien
tggtgacgaagcccaatgcctgtgagatctttt

SEQ ID NO: 135317 - DNA, 33 bp, Homo sapien
aaaaaacatcagaggaagtatgagcattgtttc

SEQ ID NO: 135318 - DNA, 33 bp, Homo sapien
aaaaaacatcagaggaggtatgagcattgtttc

SEQ ID NO: 135319 - DNA, 33 bp, Homo sapien
tgagctaggacttccccctttcctttcactgcc

SEQ ID NO: 135320 - DNA, 33 bp, Homo sapien
tgagctaggacttcccgctttcctttcactgcc

SEQ ID NO: 135321 - DNA, 33 bp, Homo sapien
gccatacaacagaatcactcgtgctgctttcca

SEQ ID NO: 135322 - DNA, 33 bp, Homo sapien
gccatacaacagaatcgctcgtgctgctttcca

SEQ ID NO: 135323 - DNA, 33 bp, Homo sapien
actgttaaatttctgaacaacgtcagactacaa

SEQ ID NO: 135324 - DNA, 33 bp, Homo sapien
actgttaaatttctgagcaacgtcagactacaa

SEQ ID NO: 135325 - DNA, 33 bp, Homo sapien
gagacgaggagggaaaccccaagtgtttgaagg

SEQ ID NO: 135326 - DNA, 33 bp, Homo sapien
gagacgaggagggaaagcccaagtgtttgaagg

SEQ ID NO: 135327 - DNA, 33 bp, Homo sapien
tttcccaaatccttgtcaagctgctcaccagat

SEQ ID NO: 135328 - DNA, 33 bp, Homo sapien
tttcccaaatccttgttaagctgctcaccagat

SEQ ID NO: 135329 - DNA, 33 bp, Homo sapien
ctgagctcggtgctaaaggaccaattagccagt

SEQ ID NO: 135330 - DNA, 33 bp, Homo sapien
ctgagctcggtgctaagggaccaattagccagt

SEQ ID NO: 135331 - DNA, 33 bp, Homo sapien
acccacagacatgaaagaactttgccactggta

SEQ ID NO: 135332 - DNA, 33 bp, Homo sapien
acccacagacatgaaataactttgccactggta

SEQ ID NO: 135333 - DNA, 33 bp, Homo sapien
taacagaaaccagtaggcaaatactattggtcc

SEQ ID NO: 135334 - DNA, 33 bp, Homo sapien
taacagaaaccagtagtcaaatactattggtcc

SEQ ID NO: 135335 - DNA, 33 bp, Homo sapien
ccattggcttcagaataagagtctcacttgctc

SEQ ID NO: 135336 - DNA, 33 bp, Homo sapien
ccattggcttcagaatgagagtctcacttgctc

SEQ ID NO: 135337 - DNA, 33 bp, Homo sapien
gaatctggctctgcagcaacatgggaacacagc

SEQ ID NO: 135338 - DNA, 33 bp, Homo sapien
gaatctggctctgcaggaacatgggaacacagc

SEQ ID NO: 135339 - DNA, 33 bp, Homo sapien
actccataaatgtataaagctattgtgtaccca

SEQ ID NO: 135340 - DNA, 33 bp, Homo sapien
actccataaatgtatacagctattgtgtaccca

SEQ ID NO: 135341 - DNA, 33 bp, Homo sapien
gacctgcttgttggaacggtgcaaatggaaact

SEQ ID NO: 135342 - DNA, 33 bp, Homo sapien
gacctgcttgttggaagggtgcaaatggaaact

SEQ ID NO: 135343 - DNA, 33 bp, Homo sapien
tattttggtaaaaaacactctcaaatagtcctc

SEQ ID NO: 135344 - DNA, 33 bp, Homo sapien
tattttggtaaaaaacgctctcaaatagtcctc

SEQ ID NO: 135345 - DNA, 33 bp, Homo sapien
gcatggtcattgttgaaaatgtgagaaatgcag

SEQ ID NO: 135346 - DNA, 33 bp, Homo sapien
gcatggtcattgttgagaatgtgagaaatgcag

SEQ ID NO: 135347 - DNA, 33 bp, Homo sapien
tttctccccaggtgccgcctaaaaagctggcca

SEQ ID NO: 135348 - DNA, 33 bp, Homo sapien
tttctccccaggtgcctcctaaaaagctggcca

SEQ ID NO: 135349 - DNA, 33 bp, Homo sapien
tgccggttagcttaggaaaacccctcagttgga

SEQ ID NO: 135350 - DNA, 33 bp, Homo sapien
tgccggttagcttagggaaacccctcagttgga

SEQ ID NO: 135351 - DNA, 33 bp, Homo sapien
aatgtacaattcacaacagcgtttgaactccta

SEQ ID NO: 135352 - DNA, 33 bp, Homo sapien
aatgtacaattcacaatagcgtttgaactccta

SEQ ID NO: 135353 - DNA, 33 bp, Homo sapien
actttaaaattgcagccctcaaggagttcatgc

SEQ ID NO: 135354 - DNA, 33 bp, Homo sapien
actttaaaattgcagctctcaaggagttcatgc

SEQ ID NO: 135355 - DNA, 33 bp, Homo sapien
cattgggagatgagaactggtggacgagagcct

SEQ ID NO: 135356 - DNA, 33 bp, Homo sapien
cattgggagatgagaattggtggacgagagcct

SEQ ID NO: 135357 - DNA, 33 bp, Homo sapien
gtgtgctcctggagagaaggaattttggtttac

SEQ ID NO: 135358 - DNA, 33 bp, Homo sapien
gtgtgctcctggagagtaggaattttggtttac

SEQ ID NO: 135359 - DNA, 33 bp, Homo sapien
attgagagtttcttggccacttctttttaaaat

SEQ ID NO: 135360 - DNA, 33 bp, Homo sapien
attgagagtttcttgggcacttctttttaaaat

SEQ ID NO: 135361 - DNA, 33 bp, Homo sapien
ctcccacatgtacgtacgtgattaaaatctgct

SEQ ID NO: 135362 - DNA, 33 bp, Homo sapien
ctcccacatgtacgtatgtgattaaaatctgct

SEQ ID NO: 135363 - DNA, 33 bp, Homo sapien
actacaggcgatcgccaccaagccttaagctcc

SEQ ID NO: 135364 - DNA, 33 bp, Homo sapien
actacaggcgatcgccgccaagccttaagctcc

SEQ ID NO: 135365 - DNA, 33 bp, Homo sapien
tgtcctcttatgttcacggattccccccactcc

SEQ ID NO: 135366 - DNA, 33 bp, Homo sapien
tgtcctcttatgttcatggattccccccactcc

SEQ ID NO: 135367 - DNA, 33 bp, Homo sapien
gtaatcattctagctaataagttacagatcatt

SEQ ID NO: 135368 - DNA, 33 bp, Homo sapien
gtaatcattctagctagtaagttacagatcatt

SEQ ID NO: 135369 - DNA, 33 bp, Homo sapien
atttcctatgtgtgagaaacactgttaagacat

SEQ ID NO: 135370 - DNA, 33 bp, Homo sapien
atttcctatgtgtgagcaacactgttaagacat

SEQ ID NO: 135371 - DNA, 33 bp, Homo sapien
ggggcggcatcagtaacgttacatattgcttag

SEQ ID NO: 135372 - DNA, 33 bp, Homo sapien
ggggcggcatcagtaatgttacatattgcttag

SEQ ID NO: 135373 - DNA, 33 bp, Homo sapien
ttgtttttctaaaccaatctagctaggttagga

SEQ ID NO: 135374 - DNA, 33 bp, Homo sapien
ttgtttttctaaaccattctagctaggttagga

SEQ ID NO: 135375 - DNA, 33 bp, Homo sapien
ataggggttacaaatcaatcatggaactgatga

SEQ ID NO: 135376 - DNA, 33 bp, Homo sapien
ataggggttacaaatcgatcatggaactgatga

SEQ ID NO: 135377 - DNA, 33 bp, Homo sapien; identical to SEQ ID NO: 135375

SEQ ID NO: 135378 - DNA, 33 bp, Homo sapien; identical to SEQ ID NO: 135376

SEQ ID NO: 135379 - DNA, 33 bp, Homo sapien
ttatatgaagattgagaaagtatagaggaaaaa

SEQ ID NO: 135380 - DNA, 33 bp, Homo sapien
ttatatgaagattgaggaagtatagaggaaaaa

SEQ ID NO: 135381 - DNA, 33 bp, Homo sapien
atccctgtagccttgcaattatgtggctgttat

SEQ ID NO: 135382 - DNA, 33 bp, Homo sapien
atccctgtagccttgcgattatgtggctgttat

SEQ ID NO: 135383 - DNA, 33 bp, Homo sapien
agcaggaaacaatacaacccagatttgtagaca

SEQ ID NO: 135384 - DNA, 33 bp, Homo sapien
agcaggaaacaatacagcccagatttgtagaca

SEQ ID NO: 135385 - DNA, 33 bp, Homo sapien
ctaacagtggtgctaacagagttcccatctggg

SEQ ID NO: 135386 - DNA, 33 bp, Homo sapien
ctaacagtggtgctaatagagttcccatctggg

SEQ ID NO: 135387 - DNA, 33 bp, Homo sapien
gagagaaggtgtcatgcagagttcagaggcatg

SEQ ID NO: 135388 - DNA, 33 bp, Homo sapien
gagagaaggtgtcatggagagttcagaggcatg

SEQ ID NO: 135389 - DNA, 33 bp, Homo sapien
ccttagatggtcaaccagaatcctcaggctgag

SEQ ID NO: 135390 - DNA, 33 bp, Homo sapien
ccttagatggtcaacctgaatcctcaggctgag

SEQ ID NO: 135391 - DNA, 33 bp, Homo sapien
tgttagaattagtagaaggcattaaaaccatga

SEQ ID NO: 135392 - DNA, 33 bp, Homo sapien
tgttagaattagtagagggcattaaaaccatga

SEQ ID NO: 135393 - DNA, 33 bp, Homo sapien
gttcctaaaatgtgcacaatgcctatcttgtat

SEQ ID NO: 135394 - DNA, 33 bp, Homo sapien
gttcctaaaatgtgcataatgcctatcttgtat

SEQ ID NO: 135395 - DNA, 33 bp, Homo sapien
tcttttgctttgttcaagtctacttttatgcct

SEQ ID NO: 135396 - DNA, 33 bp, Homo sapien
tcttttgctttgttcacgtctacttttatgcct

SEQ ID NO: 135397 - DNA, 33 bp, Homo sapien
gaagtgatggaggtacaaaatgaatgtgggaga

SEQ ID NO: 135398 - DNA, 33 bp, Homo sapien
gaagtgatggaggtacgaaatgaatgtgggaga

SEQ ID NO: 135399 - DNA, 33 bp, Homo sapien
ttgttcggtacctggcaacaaatcaacaactgc

SEQ ID NO: 135400 - DNA, 33 bp, Homo sapien
ttgttcggtacctggcgacaaatcaacaactgc

SEQ ID NO: 135401 - DNA, 33 bp, Homo sapien
aaaagagtacaatgtaaccctgaaaaagaagga

SEQ ID NO: 135402 - DNA, 33 bp, Homo sapien
aaaagagtacaatgtagccctgaaaaagaagga

SEQ ID NO: 135403 - DNA, 33 bp, Homo sapien
agctagtctctgccagacatactttttgaacca

SEQ ID NO: 135404 - DNA, 33 bp, Homo sapien
agctagtctctgccaggcatactttttgaacca

SEQ ID NO: 135405 - DNA, 33 bp, Homo sapien
ggttggagtaagtctcactgaggaatcgtgagc

SEQ ID NO: 135406 - DNA, 33 bp, Homo sapien
ggttggagtaagtctccctgaggaatcgtgagc

SEQ ID NO: 135407 - DNA, 33 bp, Homo sapien
gggcaatataggaagaccctatctctacaaaag

SEQ ID NO: 135408 - DNA, 33 bp, Homo sapien
gggcaatataggaagagcctatctctacaaaag

SEQ ID NO: 135409 - DNA, 33 bp, Homo sapien
atacagaaggaatgaacattagcattttgcaac

SEQ ID NO: 135410 - DNA, 33 bp, Homo sapien
atacagaaggaatgaatattagcattttgcaac

SEQ ID NO: 135411 - DNA, 33 bp, Homo sapien
acccagatctctctcaatccaaagcccaggatg

SEQ ID NO: 135412 - DNA, 33 bp, Homo sapien
acccagatctctctcagtccaaagcccaggatg

SEQ ID NO: 135413 - DNA, 33 bp, Homo sapien
ggctaatgaaaagatcaacactgccaggatgaa

SEQ ID NO: 135414 - DNA, 33 bp, Homo sapien
ggctaatgaaaagatcgacactgccaggatgaa

SEQ ID NO: 135415 - DNA, 33 bp, Homo sapien
gggtactgtgtcactcccactttaaagaggcag

SEQ ID NO: 135416 - DNA, 33 bp, Homo sapien
gggtactgtgtcactctcactttaaagaggcag

SEQ ID NO: 135417 - DNA, 33 bp, Homo sapien
tattgaattgtgatagccaaaaaaataggtagg

SEQ ID NO: 135418 - DNA, 33 bp, Homo sapien
tattgaattgtgatagtcaaaaaaataggtagg

SEQ ID NO: 135419 - DNA, 33 bp, Homo sapien
gcccacataccttacccgctggaagttggttga

SEQ ID NO: 135420 - DNA, 33 bp, Homo sapien
gcccacataccttaccggctggaagttggttga

SEQ ID NO: 135421 - DNA, 33 bp, Homo sapien
tcattgcaggtgactaccaagtaaactctacct

SEQ ID NO: 135422 - DNA, 33 bp, Homo sapien
tcattgcaggtgactatcaagtaaactctacct

SEQ ID NO: 135423 - DNA, 33 bp, Homo sapien
atttcatcttagagcaaagtttctcttccactg

SEQ ID NO: 135424 - DNA, 33 bp, Homo sapien
atttcatcttagagcacagtttctcttccactg

SEQ ID NO: 135425 - DNA, 33 bp, Homo sapien
aaatgtgcaggaacgcaagtgtaagaagtacta

SEQ ID NO: 135426 - DNA, 33 bp, Homo sapien
aaatgtgcaggaacgcgagtgtaagaagtacta

SEQ ID NO: 135427 - DNA, 33 bp, Homo sapien
aaatcccctctgactcaagtaaaacaattcaga

SEQ ID NO: 135428 - DNA, 33 bp, Homo sapien
aaatcccctctgactcgagtaaaacaattcaga

SEQ ID NO: 135429 - DNA, 33 bp, Homo sapien
ggagtctgaaagttcaagctcagcaatacagag

SEQ ID NO: 135430 - DNA, 33 bp, Homo sapien
ggagtctgaaagttcaggctcagcaatacagag

SEQ ID NO: 135431 - DNA, 33 bp, Homo sapien
tgatgcacctataccaagtttgatcagtaaggt

SEQ ID NO: 135432 - DNA, 33 bp, Homo sapien
tgatgcacctataccaggtttgatcagtaaggt

SEQ ID NO: 135433 - DNA, 33 bp, Homo sapien
tttttcacgaatgtaaaaagtcatgtctgtaat

SEQ ID NO: 135434 - DNA, 33 bp, Homo sapien
tttttcacgaatgtaacaagtcatgtctgtaat

SEQ ID NO: 135435 - DNA, 33 bp, Homo sapien
gactgaggtactgtcacattctggaggatgcta

SEQ ID NO: 135436 - DNA, 33 bp, Homo sapien
gactgaggtactgtcatattctggaggatgcta

SEQ ID NO: 135437 - DNA, 33 bp, Homo sapien
aatcagagagttttaactgggcttcagactgaa

SEQ ID NO: 135438 - DNA, 33 bp, Homo sapien
aatcagagagttttaattgggcttcagactgaa

SEQ ID NO: 135439 - DNA, 33 bp, Homo sapien
tccccagcctataataacttctctgtctttcct

SEQ ID NO: 135440 - DNA, 33 bp, Homo sapien
tccccagcctataatagcttctctgtctttcct

SEQ ID NO: 135441 - DNA, 33 bp, Homo sapien
cacttttaatgagtcaaaagacatatagtaaaa

SEQ ID NO: 135442 - DNA, 33 bp, Homo sapien
cacttttaatgagtcacaagacatatagtaaaa

SEQ ID NO: 135443 - DNA, 33 bp, Homo sapien
atacctatggttaagacggtgcttggtagaggg

SEQ ID NO: 135444 - DNA, 33 bp, Homo sapien
atacctatggttaagatggtgcttggtagaggg

SEQ ID NO: 135445 - DNA, 33 bp, Homo sapien
caatccctgcctttaaatatggttttgtttctt

SEQ ID NO: 135446 - DNA, 33 bp, Homo sapien
caatccctgcctttaagtatggttttgtttctt

SEQ ID NO: 135447 - DNA, 33 bp, Homo sapien
acttaacctttccagacccacgtgatgatggag

SEQ ID NO: 135448 - DNA, 33 bp, Homo sapien
acttaacctttccagatccacgtgatgatggag

SEQ ID NO: 135449 - DNA, 33 bp, Homo sapien
tatacttcccacccgcaagtcatttagtagcca

SEQ ID NO: 135450 - DNA, 33 bp, Homo sapien
tatacttcccacccgcgagtcatttagtagcca

SEQ ID NO: 135451 - DNA, 33 bp, Homo sapien
taaggcagagagctaacgggggattatcagaga

SEQ ID NO: 135452 - DNA, 33 bp, Homo sapien
taaggcagagagctaatgggggattatcagaga

SEQ ID NO: 135453 - DNA, 33 bp, Homo sapien
ccacactcagctgatacgctctcgactttaaag

SEQ ID NO: 135454 - DNA, 33 bp, Homo sapien
ccacactcagctgatatgctctcgactttaaag

SEQ ID NO: 135455 - DNA, 33 bp, Homo sapien
tggacacagcaaagaaactctagaatttattca

SEQ ID NO: 135456 - DNA, 33 bp, Homo sapien
tggacacagcaaagaacctctagaatttattca

SEQ ID NO: 135457 - DNA, 33 bp, Homo sapien
catatcaggtaactcacgcatttgtcatttatt

SEQ ID NO: 135458 - DNA, 33 bp, Homo sapien
catatcaggtaactcatgcatttgtcatttatt

SEQ ID NO: 135459 - DNA, 33 bp, Homo sapien
gtcctggttcaaaggcaacatgcagctttggct

SEQ ID NO: 135460 - DNA, 33 bp, Homo sapien
gtcctggttcaaaggcgacatgcagctttggct

SEQ ID NO: 135461 - DNA, 33 bp, Homo sapien
caggttcaatgtgagacaaacagctttggattc

SEQ ID NO: 135462 - DNA, 33 bp, Homo sapien
caggttcaatgtgagataaacagctttggattc

SEQ ID NO: 135463 - DNA, 33 bp, Homo sapien
gcgagcacacagtatacgctacagaagtgtctg

SEQ ID NO: 135464 - DNA, 33 bp, Homo sapien
gcgagcacacagtatatgctacagaagtgtctg

SEQ ID NO: 135465 - DNA, 33 bp, Homo sapien
tacagaacacaagtgaacaagatctgaactgag

SEQ ID NO: 135466 - DNA, 33 bp, Homo sapien
tacagaacacaagtgaccaagatctgaactgag

SEQ ID NO: 135467 - DNA, 33 bp, Homo sapien
ccatgagaaatagggagacactttcacaagcag

SEQ ID NO: 135468 - DNA, 33 bp, Homo sapien
ccatgagaaatagggatacactttcacaagcag

SEQ ID NO: 135469 - DNA, 33 bp, Homo sapien
tgctttggcttcagagaaagaatgtcccctccc

SEQ ID NO: 135470 - DNA, 33 bp, Homo sapien
tgctttggcttcagagcaagaatgtcccctccc

SEQ ID NO: 135471 - DNA, 33 bp, Homo sapien
tgattaacctgctgtgcagatgggaaagagcta

SEQ ID NO: 135472 - DNA, 33 bp, Homo sapien
tgattaacctgctgtgtagatgggaaagagcta

SEQ ID NO: 135473 - DNA, 33 bp, Homo sapien
ttaaggataaagcaaaagcaagacaatctgatt

SEQ ID NO: 135474 - DNA, 33 bp, Homo sapien
ttaaggataaagcaaaggcaagacaatctgatt

SEQ ID NO: 135475 - DNA, 33 bp, Homo sapien
aaacaaaacagtttcacacctcaaactcactat

SEQ ID NO: 135476 - DNA, 33 bp, Homo sapien
aaacaaaacagtttcatacctcaaactcactat

SEQ ID NO: 135477 - DNA, 33 bp, Homo sapien
gcttccaaatacctacacaaacgggtgtctttt

SEQ ID NO: 135478 - DNA, 33 bp, Homo sapien
gcttccaaatacctacccaaacgggtgtctttt

SEQ ID NO: 135479 - DNA, 33 bp, Homo sapien
ggtgtcttttggaggacgacactgcctctggat

SEQ ID NO: 135480 - DNA, 33 bp, Homo sapien
ggtgtcttttggaggatgacactgcctctggat

SEQ ID NO: 135481 - DNA, 33 bp, Homo sapien
ttttcttatcttttcactatacctgcgaatgtc

SEQ ID NO: 135482 - DNA, 33 bp, Homo sapien
ttttcttatcttttcattatacctgcgaatgtc

SEQ ID NO: 135483 - DNA, 33 bp, Homo sapien
ctttcagacctggagacgaaacacaattttttg

SEQ ID NO: 135484 - DNA, 33 bp, Homo sapien
ctttcagacctggagatgaaacacaattttttg

SEQ ID NO: 135485 - DNA, 33 bp, Homo sapien
ttggacataaagcctacgttttgctgtagggcc

SEQ ID NO: 135486 - DNA, 33 bp, Homo sapien
ttggacataaagcctatgttttgctgtagggcc

SEQ ID NO: 135487 - DNA, 33 bp, Homo sapien
cagggagcttacgaaacggtgcaacttggacta

SEQ ID NO: 135488 - DNA, 33 bp, Homo sapien
cagggagcttacgaaatggtgcaacttggacta

SEQ ID NO: 135489 - DNA, 33 bp, Homo sapien
atctggagagttctcaaaccaacacacctcaca

SEQ ID NO: 135490 - DNA, 33 bp, Homo sapien
atctggagagttctcagaccaacacacctcaca

SEQ ID NO: 135491 - DNA, 33 bp, Homo sapien
aagtcactttaactcaaaaaggagtcctcgggc

SEQ ID NO: 135492 - DNA, 33 bp, Homo sapien
aagtcactttaactcagaaaggagtcctcgggc

SEQ ID NO: 135493 - DNA, 33 bp, Homo sapien
caaactttccacacataacttaagagaagaaga

SEQ ID NO: 135494 - DNA, 33 bp, Homo sapien
caaactttccacacatgacttaagagaagaaga

SEQ ID NO: 135495 - DNA, 33 bp, Homo sapien
gcagaagtaacctctcactcttggctccttttg

SEQ ID NO: 135496 - DNA, 33 bp, Homo sapien
gcagaagtaacctctcgctcttggctccttttg

SEQ ID NO: 135497 - DNA, 33 bp, Homo sapien
cgattaagacaacaaaaaagaaagtgagtagta

SEQ ID NO: 135498 - DNA, 33 bp, Homo sapien
cgattaagacaacaaacaagaaagtgagtagta

SEQ ID NO: 135499 - DNA, 33 bp, Homo sapien
ttctgtgatgacatacaactctccaaaaagata

SEQ ID NO: 135500 - DNA, 33 bp, Homo sapien
ttctgtgatgacataccactctccaaaaagata

SEQ ID NO: 135501 - DNA, 33 bp, Homo sapien
actgaggatatgtcaccctgtggatccaacatg

SEQ ID NO: 135502 - DNA, 33 bp, Homo sapien
actgaggatatgtcacgctgtggatccaacatg

SEQ ID NO: 135503 - DNA, 33 bp, Homo sapien
gagtcaacactcaacacatacgagatgtttcaa

SEQ ID NO: 135504 - DNA, 33 bp, Homo sapien
gagtcaacactcaacagatacgagatgtttcaa

SEQ ID NO: 135505 - DNA, 33 bp, Homo sapien
catattttccagagcaactgcacatcacgtttg

SEQ ID NO: 135506 - DNA, 33 bp, Homo sapien
catattttccagagcacctgcacatcacgtttg

SEQ ID NO: 135507 - DNA, 33 bp, Homo sapien
tccttaagaacaaatgcataacctaccaagttt

SEQ ID NO: 135508 - DNA, 33 bp, Homo sapien
tccttaagaacaaatgtataacctaccaagttt

SEQ ID NO: 135509 - DNA, 33 bp, Homo sapien
tttggatgtttggtcacatggtctgtactctgg

SEQ ID NO: 135510 - DNA, 33 bp, Homo sapien
tttggatgtttggtcagatggtctgtactctgg

SEQ ID NO: 135511 - DNA, 33 bp, Homo sapien
cagctcaaaaaggacaatctaaatacacccaag

SEQ ID NO: 135512 - DNA, 33 bp, Homo sapien
cagctcaaaaaggacagtctaaatacacccaag

SEQ ID NO: 135513 - DNA, 33 bp, Homo sapien
cttgtgtagtattaagcagctgagctttagaaa

SEQ ID NO: 135514 - DNA, 33 bp, Homo sapien
cttgtgtagtattaagtagctgagctttagaaa

SEQ ID NO: 135515 - DNA, 33 bp, Homo sapien
atatgtgttgagcctacgcatgagcctgtcctc

SEQ ID NO: 135516 - DNA, 33 bp, Homo sapien
atatgtgttgagcctatgcatgagcctgtcctc

SEQ ID NO: 135517 - DNA, 33 bp, Homo sapien
gggacaactgtgagtacggaaacattttctcta

SEQ ID NO: 135518 - DNA, 33 bp, Homo sapien
gggacaactgtgagtatggaaacattttctcta

SEQ ID NO: 135519 - DNA, 33 bp, Homo sapien
ctccaagatggttgtgaaaactgcaaggtggct

SEQ ID NO: 135520 - DNA, 33 bp, Homo sapien
ctccaagatggttgtggaaactgcaaggtggct

SEQ ID NO: 135521 - DNA, 33 bp, Homo sapien
ggttgcaaattccgtacctatggatcttggctt

SEQ ID NO: 135522 - DNA, 33 bp, Homo sapien
ggttgcaaattccgtagctatggatcttggctt

SEQ ID NO: 135523 - DNA, 33 bp, Homo sapien
agagctgcaaagtgtacattccatcttcagtaa

SEQ ID NO: 135524 - DNA, 33 bp, Homo sapien
agagctgcaaagtgtagattccatcttcagtaa

SEQ ID NO: 135525 - DNA, 33 bp, Homo sapien
ttgtctaggctctgaaacataagggttttaaaa

SEQ ID NO: 135526 - DNA, 33 bp, Homo sapien
ttgtctaggctctgaagcataagggttttaaaa

SEQ ID NO: 135527 - DNA, 33 bp, Homo sapien
tctaatgacaagtctacgctgcttccttctgac

SEQ ID NO: 135528 - DNA, 33 bp, Homo sapien
tctaatgacaagtctaggctgcttccttctgac

SEQ ID NO: 135529 - DNA, 33 bp, Homo sapien
gaggtgttttggtggaaagtagagagagaatgt

SEQ ID NO: 135530 - DNA, 33 bp, Homo sapien
gaggtgttttggtggagagtagagagagaatgt

SEQ ID NO: 135531 - DNA, 33 bp, Homo sapien
tggcccatttggattacgttcctcatcctgaat

SEQ ID NO: 135532 - DNA, 33 bp, Homo sapien
tggcccatttggattatgttcctcatcctgaat

SEQ ID NO: 135533 - DNA, 33 bp, Homo sapien
cacagtgagaaaggcaaataaaatctcaatgtg

SEQ ID NO: 135534 - DNA, 33 bp, Homo sapien
cacagtgagaaaggcacataaaatctcaatgtg

SEQ ID NO: 135535 - DNA, 33 bp, Homo sapien
tgaacttcactaatacaaatatcataggaattt

SEQ ID NO: 135536 - DNA, 33 bp, Homo sapien
tgaacttcactaatacgaatatcataggaattt

SEQ ID NO: 135537 - DNA, 33 bp, Homo sapien
gaaaagccaagtccaggaatgtcaaccaggata

SEQ ID NO: 135538 - DNA, 33 bp, Homo sapien
gaaaagccaagtccagtaatgtcaaccaggata

SEQ ID NO: 135539 - DNA, 33 bp, Homo sapien
cagaggaaaataattacataacatcagcatggg

SEQ ID NO: 135540 - DNA, 33 bp, Homo sapien
cagaggaaaataattagataacatcagcatggg

SEQ ID NO: 135541 - DNA, 33 bp, Homo sapien
catgcataatcgtgggcaatggctataagcaga

SEQ ID NO: 135542 - DNA, 33 bp, Homo sapien
catgcataatcgtgggtaatggctataagcaga

SEQ ID NO: 135543 - DNA, 33 bp, Homo sapien
gtgaaatgaaaacataaattgtggcccagaagc

SEQ ID NO: 135544 - DNA, 33 bp, Homo sapien
gtgaaatgaaaacatacattgtggcccagaagc

SEQ ID NO: 135545 - DNA, 33 bp, Homo sapien
gataaccagaaccttaggcttcctttgtgttcc

SEQ ID NO: 135546 - DNA, 33 bp, Homo sapien
gataaccagaaccttatgcttcctttgtgttcc

SEQ ID NO: 135547 - DNA, 33 bp, Homo sapien
caccttacacacaactaaacagattcagagagg

SEQ ID NO: 135548 - DNA, 33 bp, Homo sapien
caccttacacacaactgaacagattcagagagg

SEQ ID NO: 135549 - DNA, 33 bp, Homo sapien
taactgccttaacatcactaaattcaaaaatgt

SEQ ID NO: 135550 - DNA, 33 bp, Homo sapien
taactgccttaacatcgctaaattcaaaaatgt

SEQ ID NO: 135551 - DNA, 33 bp, Homo sapien
gttggctgactgaattaaaaaaatcatatttaa

SEQ ID NO: 135552 - DNA, 33 bp, Homo sapien
gttggctgactgaatttaaaaaatcatatttaa

SEQ ID NO: 135553 - DNA, 33 bp, Homo sapien
ttccacattcaagttacggcttttctacagttg

SEQ ID NO: 135554 - DNA, 33 bp, Homo sapien
ttccacattcaagttatggcttttctacagttg

SEQ ID NO: 135555 - DNA, 33 bp, Homo sapien
tgcagtcaatatttggaagtttaaattagcaca

SEQ ID NO: 135556 - DNA, 33 bp, Homo sapien
tgcagtcaatatttggcagtttaaattagcaca

SEQ ID NO: 135557 - DNA, 33 bp, Homo sapien
ctgaattaaaatttcaatataagatgacttgct

SEQ ID NO: 135558 - DNA, 33 bp, Homo sapien
ctgaattaaaatttcagtataagatgacttgct

SEQ ID NO: 135559 - DNA, 33 bp, Homo sapien
gcatgacttcgtactaaacactgtgttgctatt

SEQ ID NO: 135560 - DNA, 33 bp, Homo sapien
gcatgacttcgtactatacactgtgttgctatt

SEQ ID NO: 135561 - DNA, 33 bp, Homo sapien
ttgcatctggcttttcaagtttttcttctgctc

SEQ ID NO: 135562 - DNA, 33 bp, Homo sapien
ttgcatctggcttttcgagtttttcttctgctc

SEQ ID NO: 135563 - DNA, 33 bp, Homo sapien
ttggtccaaagaatgacaaaacacccacaatta

SEQ ID NO: 135564 - DNA, 33 bp, Homo sapien
ttggtccaaagaatgagaaaacacccacaatta

SEQ ID NO: 135565 - DNA, 33 bp, Homo sapien
ttactcagtttcccaagactagaaagcaatgct

SEQ ID NO: 135566 - DNA, 33 bp, Homo sapien
ttactcagtttcccaatactagaaagcaatgct

SEQ ID NO: 135567 - DNA, 33 bp, Homo sapien
gttagaatagtgccctaaatatcagtagctctg

SEQ ID NO: 135568 - DNA, 33 bp, Homo sapien
gttagaatagtgccctgaatatcagtagctctg

SEQ ID NO: 135569 - DNA, 33 bp, Homo sapien
tgctcgtctgttataccgactctttgacttaac

SEQ ID NO: 135570 - DNA, 33 bp, Homo sapien
tgctcgtctgttatactgactctttgacttaac

SEQ ID NO: 135571 - DNA, 33 bp, Homo sapien
atttgtggctacctaaacttttgacctttattc

SEQ ID NO: 135572 - DNA, 33 bp, Homo sapien
atttgtggctacctaatcttttgacctttattc

SEQ ID NO: 135573 - DNA, 33 bp, Homo sapien
atactttattttagtacagcattataatatttc

SEQ ID NO: 135574 - DNA, 33 bp, Homo sapien
atactttattttagtagagcattataatatttc

SEQ ID NO: 135575 - DNA, 33 bp, Homo sapien
tgagacctgtctctaaacacttatttatatgta

SEQ ID NO: 135576 - DNA, 33 bp, Homo sapien
tgagacctgtctctaagcacttatttatatgta

SEQ ID NO: 135577 - DNA, 33 bp, Homo sapien
acagcatggttctgtgacaaggaaacaagctaa

SEQ ID NO: 135578 - DNA, 33 bp, Homo sapien
acagcatggttctgtgtcaaggaaacaagctaa

SEQ ID NO: 135579 - DNA, 33 bp, Homo sapien
ctgggccaaggaagagaaatatcagcatcccct

SEQ ID NO: 135580 - DNA, 33 bp, Homo sapien
ctgggccaaggaagagcaatatcagcatcccct

SEQ ID NO: 135581 - DNA, 33 bp, Homo sapien
tgatttttaatggctccacagtattccactaaa

SEQ ID NO: 135582 - DNA, 33 bp, Homo sapien
tgatttttaatggctctacagtattccactaaa

SEQ ID NO: 135583 - DNA, 33 bp, Homo sapien
agacaacaggccctgaagtgaacctttgttgca

SEQ ID NO: 135584 - DNA, 33 bp, Homo sapien
agacaacaggccctgaggtgaacctttgttgca

SEQ ID NO: 135585 - DNA, 33 bp, Homo sapien
atcctagagaatgttcactatgtgcttcagaag

SEQ ID NO: 135586 - DNA, 33 bp, Homo sapien
atcctagagaatgttccctatgtgcttcagaag

SEQ ID NO: 135587 - DNA, 33 bp, Homo sapien
ctttttggtattggccagaagcccttgcagaga

SEQ ID NO: 135588 - DNA, 33 bp, Homo sapien
ctttttggtattggccggaagcccttgcagaga

SEQ ID NO: 135589 - DNA, 33 bp, Homo sapien
ccagttgttggtttggacactcttgacctggag

SEQ ID NO: 135590 - DNA, 33 bp, Homo sapien
ccagttgttggtttggccactcttgacctggag

SEQ ID NO: 135591 - DNA, 33 bp, Homo sapien
caaccccagaggatccactgtgcctgctttgtg

SEQ ID NO: 135592 - DNA, 33 bp, Homo sapien
caaccccagaggatcccctgtgcctgctttgtg

SEQ ID NO: 135593 - DNA, 33 bp, Homo sapien
ctaacaggccacgggaactgacctggtgtgacg

SEQ ID NO: 135594 - DNA, 33 bp, Homo sapien
ctaacaggccacgggacctgacctggtgtgacg

SEQ ID NO: 135595 - DNA, 33 bp, Homo sapien
cttcagcatggggctaagaagagcttagatttt

SEQ ID NO: 135596 - DNA, 33 bp, Homo sapien
cttcagcatggggctatgaagagcttagatttt

SEQ ID NO: 135597 - DNA, 33 bp, Homo sapien
gactctgtaaatgccaataatctctgtaaatca

SEQ ID NO: 135598 - DNA, 33 bp, Homo sapien
gactctgtaaatgccagtaatctctgtaaatca

SEQ ID NO: 135599 - DNA, 33 bp, Homo sapien
gggctcaatagtggcacgtccttagtggctatc

SEQ ID NO: 135600 - DNA, 33 bp, Homo sapien
gggctcaatagtggcatgtccttagtggctatc

SEQ ID NO: 135601 - DNA, 33 bp, Homo sapien
caatcctgccttcaacactagcaatataatgaa

SEQ ID NO: 135602 - DNA, 33 bp, Homo sapien
caatcctgccttcaacgctagcaatataatgaa

SEQ ID NO: 135603 - DNA, 33 bp, Homo sapien
gtgccctgtatccccacgcaatcatttccagga

SEQ ID NO: 135604 - DNA, 33 bp, Homo sapien
gtgccctgtatccccatgcaatcatttccagga

SEQ ID NO: 135605 - DNA, 33 bp, Homo sapien
tggcctggagggaagagagcaggaaactggaga

SEQ ID NO: 135606 - DNA, 33 bp, Homo sapien
tggcctggagggaagatagcaggaaactggaga

SEQ ID NO: 135607 - DNA, 33 bp, Homo sapien
ttggtggtaatcattacgtttttcaccaaatgc

SEQ ID NO: 135608 - DNA, 33 bp, Homo sapien
ttggtggtaatcattatgtttttcaccaaatgc

SEQ ID NO: 135609 - DNA, 33 bp, Homo sapien
gagcatgtactacacacgagttttaccttcttt

SEQ ID NO: 135610 - DNA, 33 bp, Homo sapien
gagcatgtactacacatgagttttaccttcttt

SEQ ID NO: 135611 - DNA, 33 bp, Homo sapien
acagggaacccaggcagcgatctttcaagagat

SEQ ID NO: 135612 - DNA, 33 bp, Homo sapien
acagggaacccaggcatcgatctttcaagagat

SEQ ID NO: 135613 - DNA, 33 bp, Homo sapien
ttcatctctgcagagtcacaatggagttgctga

SEQ ID NO: 135614 - DNA, 33 bp, Homo sapien
ttcatctctgcagagtgacaatggagttgctga

SEQ ID NO: 135615 - DNA, 33 bp, Homo sapien
tagtaaaactaccagaccgttcttagctctttt

SEQ ID NO: 135616 - DNA, 33 bp, Homo sapien
tagtaaaactaccagatcgttcttagctctttt

SEQ ID NO: 135617 - DNA, 33 bp, Homo sapien
cttataagcaagtgaccagtgttcagacagggg

SEQ ID NO: 135618 - DNA, 33 bp, Homo sapien
cttataagcaagtgacgagtgttcagacagggg

SEQ ID NO: 135619 - DNA, 33 bp, Homo sapien
aaatgcaaaagccacaatgtgataacatctcac

SEQ ID NO: 135620 - DNA, 33 bp, Homo sapien
aaatgcaaaagccacagtgtgataacatctcac

SEQ ID NO: 135621 - DNA, 33 bp, Homo sapien
tcctgctaatttttcccagtatcatactcagca

SEQ ID NO: 135622 - DNA, 33 bp, Homo sapien
tcctgctaatttttcctagtatcatactcagca

SEQ ID NO: 135623 - DNA, 33 bp, Homo sapien
tagttcagacaagacaacttttctgccatagag

SEQ ID NO: 135624 - DNA, 33 bp, Homo sapien
tagttcagacaagacaccttttctgccatagag

SEQ ID NO: 135625 - DNA, 33 bp, Homo sapien
ttttatgagtcccagacgtttgctccaagtggt

SEQ ID NO: 135626 - DNA, 33 bp, Homo sapien
ttttatgagtcccagaggtttgctccaagtggt

SEQ ID NO: 135627 - DNA, 33 bp, Homo sapien
tttctaatgatacatagctgtcagagttctacc

SEQ ID NO: 135628 - DNA, 33 bp, Homo sapien
tttctaatgatacatatctgtcagagttctacc

SEQ ID NO: 135629 - DNA, 33 bp, Homo sapien
tgccaccacgtgacaacgagcaggggaatgaaa

SEQ ID NO: 135630 - DNA, 33 bp, Homo sapien
tgccaccacgtgacaatgagcaggggaatgaaa

SEQ ID NO: 135631 - DNA, 33 bp, Homo sapien
gtgagatataaacacacggaaagagaattctgc

SEQ ID NO: 135632 - DNA, 33 bp, Homo sapien
gtgagatataaacacatggaaagagaattctgc

SEQ ID NO: 135633 - DNA, 33 bp, Homo sapien
aggagtgtccaagatggattctttgtttgaatt

SEQ ID NO: 135634 - DNA, 33 bp, Homo sapien
aggagtgtccaagatgtattctttgtttgaatt

SEQ ID NO: 135635 - DNA, 33 bp, Homo sapien
taaagcaatagtataaaggggtataagcaccac

SEQ ID NO: 135636 - DNA, 33 bp, Homo sapien
taaagcaatagtataacggggtataagcaccac

SEQ ID NO: 135637 - DNA, 33 bp, Homo sapien
acagctctattgcatacgagttttattgcaaac

SEQ ID NO: 135638 - DNA, 33 bp, Homo sapien
acagctctattgcatatgagttttattgcaaac

SEQ ID NO: 135639 - DNA, 33 bp, Homo sapien
cattgataacttattacgtatgtatgtatgtat

SEQ ID NO: 135640 - DNA, 33 bp, Homo sapien
cattgataacttattatgtatgtatgtatgtat

SEQ ID NO: 135641 - DNA, 33 bp, Homo sapien
ctttaggcttgctatacctttcactgaaaagca

SEQ ID NO: 135642 - DNA, 33 bp, Homo sapien
ctttaggcttgctatatctttcactgaaaagca

SEQ ID NO: 135643 - DNA, 33 bp, Homo sapien
aatctatcatctgacgaaaggctaatatccaga

SEQ ID NO: 135644 - DNA, 33 bp, Homo sapien
aatctatcatctgacggaaggctaatatccaga

SEQ ID NO: 135645 - DNA, 33 bp, Homo sapien
tgccacagaggggaaactgcaagatcaacaatt

SEQ ID NO: 135646 - DNA, 33 bp, Homo sapien
tgccacagaggggaaattgcaagatcaacaatt

SEQ ID NO: 135647 - DNA, 33 bp, Homo sapien
gagattaatgcttaaactggtggatttaggaaa

SEQ ID NO: 135648 - DNA, 33 bp, Homo sapien
gagattaatgcttaaattggtggatttaggaaa

SEQ ID NO: 135649 - DNA, 33 bp, Homo sapien
gcaaagagagacaaggaaatgacacagagagtc

SEQ ID NO: 135650 - DNA, 33 bp, Homo sapien
gcaaagagagacaagggaatgacacagagagtc

SEQ ID NO: 135651 - DNA, 33 bp, Homo sapien
agcagtgctaagggaaagctcaatggtgttcct

SEQ ID NO: 135652 - DNA, 33 bp, Homo sapien
agcagtgctaagggaaggctcaatggtgttcct

SEQ ID NO: 135653 - DNA, 33 bp, Homo sapien
tcccagcaaccactaccgtacctgaaatttcca

SEQ ID NO: 135654 - DNA, 33 bp, Homo sapien
tcccagcaaccactacggtacctgaaatttcca

SEQ ID NO: 135655 - DNA, 33 bp, Homo sapien
tgaaatctggatttcagtcttggttttactgta

SEQ ID NO: 135656 - DNA, 33 bp, Homo sapien
tgaaatctggatttcattcttggttttactgta

SEQ ID NO: 135657 - DNA, 33 bp, Homo sapien
aacagatcaggaaagaactggccagataaagta

SEQ ID NO: 135658 - DNA, 33 bp, Homo sapien
aacagatcaggaaagacctggccagataaagta

SEQ ID NO: 135659 - DNA, 33 bp, Homo sapien
tgcaggaaatggattccctcctggaaaggattt

SEQ ID NO: 135660 - DNA, 33 bp, Homo sapien
tgcaggaaatggattctctcctggaaaggattt

SEQ ID NO: 135661 - DNA, 33 bp, Homo sapien
gggtcaactgtgattcaaaatgcctgtttatat

SEQ ID NO: 135662 - DNA, 33 bp, Homo sapien
gggtcaactgtgattcgaaatgcctgtttatat

SEQ ID NO: 135663 - DNA, 33 bp, Homo sapien
ttcctggcaatgtagaagctttacaaaaactaa

SEQ ID NO: 135664 - DNA, 33 bp, Homo sapien
ttcctggcaatgtagatgctttacaaaaactaa

SEQ ID NO: 135665 - DNA, 33 bp, Homo sapien
aggggtatgatgaacacgaaatacaattatttt

SEQ ID NO: 135666 - DNA, 33 bp, Homo sapien
aggggtatgatgaacaggaaatacaattatttt

SEQ ID NO: 135667 - DNA, 33 bp, Homo sapien
ctgattcagcagtccacgtcccgtctgttgtgc

SEQ ID NO: 135668 - DNA, 33 bp, Homo sapien
ctgattcagcagtccatgtcccgtctgttgtgc

SEQ ID NO: 135669 - DNA, 33 bp, Homo sapien
ctcagcccatggttataaaatggaagaggccac

SEQ ID NO: 135670 - DNA, 33 bp, Homo sapien
ctcagcccatggttatcaaatggaagaggccac

SEQ ID NO: 135671 - DNA, 33 bp, Homo sapien
cgaatttgtgaatatacctttagaggcataaaa

SEQ ID NO: 135672 - DNA, 33 bp, Homo sapien
cgaatttgtgaatatatctttagaggcataaaa

SEQ ID NO: 135673 - DNA, 33 bp, Homo sapien
gtaaaaatggccttcaaaaacaagacaaatcaa

SEQ ID NO: 135674 - DNA, 33 bp, Homo sapien
gtaaaaatggccttcagaaacaagacaaatcaa

SEQ ID NO: 135675 - DNA, 33 bp, Homo sapien
tttccgcccacatcaactgcatcagaatctcta

SEQ ID NO: 135676 - DNA, 33 bp, Homo sapien
tttccgcccacatcaattgcatcagaatctcta

SEQ ID NO: 135677 - DNA, 33 bp, Homo sapien
tgcagagaaacaaaaacgctaggtgcagggttt

SEQ ID NO: 135678 - DNA, 33 bp, Homo sapien
tgcagagaaacaaaaatgctaggtgcagggttt

SEQ ID NO: 135679 - DNA, 33 bp, Homo sapien
aaattaggattcaaggcaccctgcctgttcatg

SEQ ID NO: 135680 - DNA, 33 bp, Homo sapien
aaattaggattcaaggtaccctgcctgttcatg

SEQ ID NO: 135681 - DNA, 33 bp, Homo sapien
agtggcagatgctctaggcctgaccgtgtaaaa

SEQ ID NO: 135682 - DNA, 33 bp, Homo sapien
agtggcagatgctctatgcctgaccgtgtaaaa

SEQ ID NO: 135683 - DNA, 33 bp, Homo sapien
tcttttaccctgaaaaattcctacgtcatgttt

SEQ ID NO: 135684 - DNA, 33 bp, Homo sapien
tcttttaccctgaaaatttcctacgtcatgttt

SEQ ID NO: 135685 - DNA, 33 bp, Homo sapien
ccatctgctatctctaagcaatactttcagtaa

SEQ ID NO: 135686 - DNA, 33 bp, Homo sapien
ccatctgctatctctatgcaatactttcagtaa

SEQ ID NO: 135687 - DNA, 33 bp, Homo sapien
attgaaggagatagagaaaatacagaaataaat

SEQ ID NO: 135688 - DNA, 33 bp, Homo sapien
attgaaggagatagaggaaatacagaaataaat

SEQ ID NO: 135689 - DNA, 33 bp, Homo sapien
acattattccctgctgcatttgtccaacattcc

SEQ ID NO: 135690 - DNA, 33 bp, Homo sapien
acattattccctgctgtatttgtccaacattcc

SEQ ID NO: 135691 - DNA, 33 bp, Homo sapien
acctaagcagaatcaacggaatgttggacaaat

SEQ ID NO: 135692 - DNA, 33 bp, Homo sapien
acctaagcagaatcaatggaatgttggacaaat

SEQ ID NO: 135693 - DNA, 33 bp, Homo sapien
atatctgttccagtaaaagtcatgttttaatta

SEQ ID NO: 135694 - DNA, 33 bp, Homo sapien
atatctgttccagtaacagtcatgttttaatta

SEQ ID NO: 135695 - DNA, 33 bp, Homo sapien
caagtcagggatgggcactgggtttcatgacag

SEQ ID NO: 135696 - DNA, 33 bp, Homo sapien
caagtcagggatgggcgctgggtttcatgacag

SEQ ID NO: 135697 - DNA, 33 bp, Homo sapien
gcctgccgacttgagggaattagtctggtcttt

SEQ ID NO: 135698 - DNA, 33 bp, Homo sapien
gcctgccgacttgaggtaattagtctggtcttt

SEQ ID NO: 135699 - DNA, 33 bp, Homo sapien
tactatagggattcgaggatgagtatagaacag

SEQ ID NO: 135700 - DNA, 33 bp, Homo sapien
tactatagggattcgatgatgagtatagaacag

SEQ ID NO: 135701 - DNA, 33 bp, Homo sapien
taccaaaatgctgcaactgatttccacaagaga

SEQ ID NO: 135702 - DNA, 33 bp, Homo sapien
taccaaaatgctgcaattgatttccacaagaga

SEQ ID NO: 135703 - DNA, 33 bp, Homo sapien
atgatcactttatctgacacatcataagttatc

SEQ ID NO: 135704 - DNA, 33 bp, Homo sapien
atgatcactttatctggcacatcataagttatc

SEQ ID NO: 135705 - DNA, 33 bp, Homo sapien
atgacagtagtcaggaagaaaacattaaagaat

SEQ ID NO: 135706 - DNA, 33 bp, Homo sapien
atgacagtagtcaggatgaaaacattaaagaat

SEQ ID NO: 135707 - DNA, 33 bp, Homo sapien
tgtgtttaatgccaccaaactatgcttaaaaat

SEQ ID NO: 135708 - DNA, 33 bp, Homo sapien
tgtgtttaatgccaccgaactatgcttaaaaat

SEQ ID NO: 135709 - DNA, 33 bp, Homo sapien
cagcagaaacacaaaacctgtatccctgataag

SEQ ID NO: 135710 - DNA, 33 bp, Homo sapien
cagcagaaacacaaaagctgtatccctgataag

SEQ ID NO: 135711 - DNA, 33 bp, Homo sapien
cactgtgaaaagaaaacgtattgactagagttt

SEQ ID NO: 135712 - DNA, 33 bp, Homo sapien
cactgtgaaaagaaaatgtattgactagagttt

SEQ ID NO: 135713 - DNA, 33 bp, Homo sapien
ttttctaaggtgatggaaatgttctcttatctt

SEQ ID NO: 135714 - DNA, 33 bp, Homo sapien
ttttctaaggtgatggtaatgttctcttatctt

SEQ ID NO: 135715 - DNA, 33 bp, Homo sapien
cctttgcaatttaaagcaggttgagttgaattt

SEQ ID NO: 135716 - DNA, 33 bp, Homo sapien
cctttgcaatttaaagtaggttgagttgaattt

SEQ ID NO: 135717 - DNA, 33 bp, Homo sapien
ttgttactggaacttacaggccatttaaatctg

SEQ ID NO: 135718 - DNA, 33 bp, Homo sapien
ttgttactggaacttataggccatttaaatctg

SEQ ID NO: 135719 - DNA, 33 bp, Homo sapien
cagggaaaccacagtacctacccatcttcttct

SEQ ID NO: 135720 - DNA, 33 bp, Homo sapien
cagggaaaccacagtatctacccatcttcttct

SEQ ID NO: 135721 - DNA, 33 bp, Homo sapien
acaggatccgaagacaatccctgtctggtaatt

SEQ ID NO: 135722 - DNA, 33 bp, Homo sapien
acaggatccgaagacattccctgtctggtaatt

SEQ ID NO: 135723 - DNA, 33 bp, Homo sapien
ctaaatgatcaacatgcaactaaaaaaaagata

SEQ ID NO: 135724 - DNA, 33 bp, Homo sapien
ctaaatgatcaacatgtaactaaaaaaaagata

SEQ ID NO: 135725 - DNA, 33 bp, Homo sapien
atcaaatgatcacgtaccactttcaggcacagg

SEQ ID NO: 135726 - DNA, 33 bp, Homo sapien
atcaaatgatcacgtagcactttcaggcacagg

SEQ ID NO: 135727 - DNA, 33 bp, Homo sapien
tctgggagattttccacgttgaaacaattcctt

SEQ ID NO: 135728 - DNA, 33 bp, Homo sapien
tctgggagattttccatgttgaaacaattcctt

SEQ ID NO: 135729 - DNA, 33 bp, Homo sapien
ggtcagccaacccctagatattgtgttgcaggg

SEQ ID NO: 135730 - DNA, 33 bp, Homo sapien
ggtcagccaacccctatatattgtgttgcaggg

SEQ ID NO: 135731 - DNA, 33 bp, Homo sapien
gtggtggagatttttcacgtaagacactcattc

SEQ ID NO: 135732 - DNA, 33 bp, Homo sapien
gtggtggagatttttcgcgtaagacactcattc

SEQ ID NO: 135733 - DNA, 33 bp, Homo sapien
gtggaggtttcttcaccctattccatgtcttca

SEQ ID NO: 135734 - DNA, 33 bp, Homo sapien
gtggaggtttcttcactctattccatgtcttca

SEQ ID NO: 135735 - DNA, 33 bp, Homo sapien
tagtttattgatttaccaaagaaccagcagcca

SEQ ID NO: 135736 - DNA, 33 bp, Homo sapien
tagtttattgatttacgaaagaaccagcagcca

SEQ ID NO: 135737 - DNA, 33 bp, Homo sapien
tctaggatgctcggaacaggccagaaggcagca

SEQ ID NO: 135738 - DNA, 33 bp, Homo sapien
tctaggatgctcggaataggccagaaggcagca

SEQ ID NO: 135739 - DNA, 33 bp, Homo sapien
ccattattaatgctcccccatcagagaagtaca

SEQ ID NO: 135740 - DNA, 33 bp, Homo sapien
ccattattaatgctcctccatcagagaagtaca

SEQ ID NO: 135741 - DNA, 33 bp, Homo sapien
acctcatacaaacacaaggatgaaataagcatt

SEQ ID NO: 135742 - DNA, 33 bp, Homo sapien
acctcatacaaacacagggatgaaataagcatt

SEQ ID NO: 135743 - DNA, 33 bp, Homo sapien
gaaatccagtttcacacagggatagtttggaat

SEQ ID NO: 135744 - DNA, 33 bp, Homo sapien
gaaatccagtttcacatagggatagtttggaat

SEQ ID NO: 135745 - DNA, 33 bp, Homo sapien
gtcactcatttagtaaatagtagagcaacagtg

SEQ ID NO: 135746 - DNA, 33 bp, Homo sapien
gtcactcatttagtaagtagtagagcaacagtg

SEQ ID NO: 135747 - DNA, 33 bp, Homo sapien
acagcaccagaggacaaaatgaaataaagtata

SEQ ID NO: 135748 - DNA, 33 bp, Homo sapien
acagcaccagaggacagaatgaaataaagtata

SEQ ID NO: 135749 - DNA, 33 bp, Homo sapien
ctaacgatgccagagaaaaacattggtgaggaa

SEQ ID NO: 135750 - DNA, 33 bp, Homo sapien
ctaacgatgccagagacaaacattggtgaggaa

SEQ ID NO: 135751 - DNA, 33 bp, Homo sapien
cagtacatatagcttcacataaagatcagccat

SEQ ID NO: 135752 - DNA, 33 bp, Homo sapien
cagtacatatagcttcgcataaagatcagccat

SEQ ID NO: 135753 - DNA, 33 bp, Homo sapien
ttcttgccagctataacctctgcagctgggtcc

SEQ ID NO: 135754 - DNA, 33 bp, Homo sapien
ttcttgccagctataatctctgcagctgggtcc

SEQ ID NO: 135755 - DNA, 33 bp, Homo sapien
cagtaacttactaacaagtgtccttcaatatct

SEQ ID NO: 135756 - DNA, 33 bp, Homo sapien
cagtaacttactaacaggtgtccttcaatatct

SEQ ID NO: 135757 - DNA, 33 bp, Homo sapien
actgaaactactcaaactgggaagtcgtgcagg

SEQ ID NO: 135758 - DNA, 33 bp, Homo sapien
actgaaactactcaaattgggaagtcgtgcagg

SEQ ID NO: 135759 - DNA, 33 bp, Homo sapien
gagtagtttcagttagaattgtctaggtcaggg

SEQ ID NO: 135760 - DNA, 33 bp, Homo sapien
gagtagtttcagttaggattgtctaggtcaggg

SEQ ID NO: 135761 - DNA, 33 bp, Homo sapien
tttctgtaaagggcaaagtagtgaatattttta

SEQ ID NO: 135762 - DNA, 33 bp, Homo sapien
tttctgtaaagggcaaggtagtgaatattttta

SEQ ID NO: 135763 - DNA, 33 bp, Homo sapien
tcttttttggtgtttgcacagctaaggatgcag

SEQ ID NO: 135764 - DNA, 33 bp, Homo sapien
tcttttttggtgtttgtacagctaaggatgcag

SEQ ID NO: 135765 - DNA, 33 bp, Homo sapien
tgaggtcccatttcaacgggctgcaagtgcatt

SEQ ID NO: 135766 - DNA, 33 bp, Homo sapien
tgaggtcccatttcaaggggctgcaagtgcatt

SEQ ID NO: 135767 - DNA, 33 bp, Homo sapien
gcctgctctatgatataagtaggcgaagcctct

SEQ ID NO: 135768 - DNA, 33 bp, Homo sapien
gcctgctctatgatatgagtaggcgaagcctct

SEQ ID NO: 135769 - DNA, 33 bp, Homo sapien
tccttccctgctttaactgattgatctcatcat

SEQ ID NO: 135770 - DNA, 33 bp, Homo sapien
tccttccctgctttaattgattgatctcatcat

SEQ ID NO: 135771 - DNA, 33 bp, Homo sapien
atgaatggtgcataaaaggaaaggatcttctcc

SEQ ID NO: 135772 - DNA, 33 bp, Homo sapien
atgaatggtgcataaagggaaaggatcttctcc

SEQ ID NO: 135773 - DNA, 33 bp, Homo sapien
aggaaggtaagaaatacagcagtaaccaacagg

SEQ ID NO: 135774 - DNA, 33 bp, Homo sapien
aggaaggtaagaaatatagcagtaaccaacagg

SEQ ID NO: 135775 - DNA, 33 bp, Homo sapien
tgcttcacttaatgaacaaccaaactaatgaat

SEQ ID NO: 135776 - DNA, 33 bp, Homo sapien
tgcttcacttaatgaagaaccaaactaatgaat

SEQ ID NO: 135777 - DNA, 33 bp, Homo sapien
ttgggatgatgtgttaagaatccattgatacaa

SEQ ID NO: 135778 - DNA, 33 bp, Homo sapien
ttgggatgatgtgttatgaatccattgatacaa

SEQ ID NO: 135779 - DNA, 33 bp, Homo sapien
agacattgtttcaaaaccttaggaaaggaagaa

SEQ ID NO: 135780 - DNA, 33 bp, Homo sapien
agacattgtttcaaaatcttaggaaaggaagaa

SEQ ID NO: 135781 - DNA, 33 bp, Homo sapien
gaaggtggatttttcccaacaagggatgccttt

SEQ ID NO: 135782 - DNA, 33 bp, Homo sapien
gaaggtggatttttccgaacaagggatgccttt

SEQ ID NO: 135783 - DNA, 33 bp, Homo sapien
ggtctattggtgaacaaaatggacaaactctgt

SEQ ID NO: 135784 - DNA, 33 bp, Homo sapien
ggtctattggtgaacacaatggacaaactctgt

SEQ ID NO: 135785 - DNA, 33 bp, Homo sapien
ctcttgctataaactaccataatgaatcacctc

SEQ ID NO: 135786 - DNA, 33 bp, Homo sapien
ctcttgctataaactatcataatgaatcacctc

SEQ ID NO: 135787 - DNA, 33 bp, Homo sapien
ccatagtgatttaggccccatcaccgtctattt

SEQ ID NO: 135788 - DNA, 33 bp, Homo sapien
ccatagtgatttaggctccatcaccgtctattt

SEQ ID NO: 135789 - DNA, 33 bp, Homo sapien
tctttgggtatagtgtcaatagagttgatttgc

SEQ ID NO: 135790 - DNA, 33 bp, Homo sapien
tctttgggtatagtgtgaatagagttgatttgc

SEQ ID NO: 135791 - DNA, 33 bp, Homo sapien
acatgcagcaaagatacccttctcaaaataaaa

SEQ ID NO: 135792 - DNA, 33 bp, Homo sapien
acatgcagcaaagatagccttctcaaaataaaa

SEQ ID NO: 135793 - DNA, 33 bp, Homo sapien
gtatacagaaggaacacaatagcctgtggtgga

SEQ ID NO: 135794 - DNA, 33 bp, Homo sapien
gtatacagaaggaacagaatagcctgtggtgga

SEQ ID NO: 135795 - DNA, 33 bp, Homo sapien
attacctccccaaaagcactacatccaaattcc

SEQ ID NO: 135796 - DNA, 33 bp, Homo sapien
attacctccccaaaagtactacatccaaattcc

SEQ ID NO: 135797 - DNA, 33 bp, Homo sapien
catcatcaattctaacaattctgctttggttga

SEQ ID NO: 135798 - DNA, 33 bp, Homo sapien
catcatcaattctaacgattctgctttggttga

SEQ ID NO: 135799 - DNA, 33 bp, Homo sapien
ataaaagctgttttacactaaataaatctgaag

SEQ ID NO: 135800 - DNA, 33 bp, Homo sapien
ataaaagctgttttacgctaaataaatctgaag

SEQ ID NO: 135801 - DNA, 33 bp, Homo sapien
tgacagaagagggttacgtcaggagagccacac

SEQ ID NO: 135802 - DNA, 33 bp, Homo sapien
tgacagaagagggttatgtcaggagagccacac

SEQ ID NO: 135803 - DNA, 33 bp, Homo sapien
cataagacctggaaaaaacagtgaagaatcctg

SEQ ID NO: 135804 - DNA, 33 bp, Homo sapien
cataagacctggaaaagacagtgaagaatcctg

SEQ ID NO: 135805 - DNA, 33 bp, Homo sapien
gctgcctatcgggaatcatggagaagggcagag

SEQ ID NO: 135806 - DNA, 33 bp, Homo sapien
gctgcctatcgggaatgatggagaagggcagag

SEQ ID NO: 135807 - DNA, 33 bp, Homo sapien
actgctgtgaatagaaagtcctaaattccaaat

SEQ ID NO: 135808 - DNA, 33 bp, Homo sapien
actgctgtgaatagaaggtcctaaattccaaat

SEQ ID NO: 135809 - DNA, 33 bp, Homo sapien
ttggatcaagatcataataagattctctgggtt

SEQ ID NO: 135810 - DNA, 33 bp, Homo sapien
ttggatcaagatcatagtaagattctctgggtt

SEQ ID NO: 135811 - DNA, 33 bp, Homo sapien
acttgtatcctattgacatatcttgctaccatt

SEQ ID NO: 135812 - DNA, 33 bp, Homo sapien
acttgtatcctattgagatatcttgctaccatt

SEQ ID NO: 135813 - DNA, 33 bp, Homo sapien
gtattgacaatcaggacctacaaatgaggacaa

SEQ ID NO: 135814 - DNA, 33 bp, Homo sapien
gtattgacaatcaggatctacaaatgaggacaa

SEQ ID NO: 135815 - DNA, 33 bp, Homo sapien
cacattaactccttgaagtgtccctgaaattgt

SEQ ID NO: 135816 - DNA, 33 bp, Homo sapien
cacattaactccttgaggtgtccctgaaattgt

SEQ ID NO: 135817 - DNA, 33 bp, Homo sapien
gatggactcctaaaccaatctttatctaactgt

SEQ ID NO: 135818 - DNA, 33 bp, Homo sapien
gatggactcctaaaccgatctttatctaactgt

SEQ ID NO: 135819 - DNA, 33 bp, Homo sapien
tctcacctgaaaaataatatctacgtgtagaag

SEQ ID NO: 135820 - DNA, 33 bp, Homo sapien
tctcacctgaaaaatagtatctacgtgtagaag

SEQ ID NO: 135821 - DNA, 33 bp, Homo sapien
acatatgatactgcttcaaactgacttccaagt

SEQ ID NO: 135822 - DNA, 33 bp, Homo sapien
acatatgatactgctttaaactgacttccaagt

SEQ ID NO: 135823 - DNA, 33 bp, Homo sapien
ctgacagcctgaccatcagctaccctgagctca

SEQ ID NO: 135824 - DNA, 33 bp, Homo sapien
ctgacagcctgaccattagctaccctgagctca

SEQ ID NO: 135825 - DNA, 33 bp, Homo sapien
gtgagtacatcataatcaggagctacactgttt

SEQ ID NO: 135826 - DNA, 33 bp, Homo sapien
gtgagtacatcataatgaggagctacactgttt

SEQ ID NO: 135827 - DNA, 33 bp, Homo sapien
caactgaggtctgggagaagtcatttaccaagc

SEQ ID NO: 135828 - DNA, 33 bp, Homo sapien
caactgaggtctgggataagtcatttaccaagc

SEQ ID NO: 135829 - DNA, 33 bp, Homo sapien
agtctccttgcgacccaggatattgcatatctg

SEQ ID NO: 135830 - DNA, 33 bp, Homo sapien
agtctccttgcgacccgggatattgcatatctg

SEQ ID NO: 135831 - DNA, 33 bp, Homo sapien
aggagagacttcttcaacggcctggtgacagga

SEQ ID NO: 135832 - DNA, 33 bp, Homo sapien
aggagagacttcttcatcggcctggtgacagga

SEQ ID NO: 135833 - DNA, 33 bp, Homo sapien
agggggtatgtgtataaggtttgtttcaaggtg

SEQ ID NO: 135834 - DNA, 33 bp, Homo sapien
agggggtatgtgtatagggtttgtttcaaggtg

SEQ ID NO: 135835 - DNA, 33 bp, Homo sapien
acacaacggagctttacagatttttcaacattt

SEQ ID NO: 135836 - DNA, 33 bp, Homo sapien
acacaacggagctttatagatttttcaacattt

SEQ ID NO: 135837 - DNA, 33 bp, Homo sapien
cagactcctgcccaaactgaatcaactatcctg

SEQ ID NO: 135838 - DNA, 33 bp, Homo sapien
cagactcctgcccaaagtgaatcaactatcctg

SEQ ID NO: 135839 - DNA, 33 bp, Homo sapien
ctcccgaagacaagcgcattggaagctaaatct

SEQ ID NO: 135840 - DNA, 33 bp, Homo sapien
ctcccgaagacaagcgtattggaagctaaatct

SEQ ID NO: 135841 - DNA, 33 bp, Homo sapien
aagcagaaaaaaagtccagattatgagaggagt

SEQ ID NO: 135842 - DNA, 33 bp, Homo sapien
aagcagaaaaaaagtctagattatgagaggagt

SEQ ID NO: 135843 - DNA, 33 bp, Homo sapien
atcaaccaaacaaaagacgcttagagaaaatgg

SEQ ID NO: 135844 - DNA, 33 bp, Homo sapien
atcaaccaaacaaaaggcgcttagagaaaatgg

SEQ ID NO: 135845 - DNA, 33 bp, Homo sapien
tacatttccaagagaccattttctactgaaatg

SEQ ID NO: 135846 - DNA, 33 bp, Homo sapien
tacatttccaagagacgattttctactgaaatg

SEQ ID NO: 135847 - DNA, 33 bp, Homo sapien
agaccgagtgaaggaactggctgttgtgtgtca

SEQ ID NO: 135848 - DNA, 33 bp, Homo sapien
agaccgagtgaaggaattggctgttgtgtgtca

SEQ ID NO: 135849 - DNA, 33 bp, Homo sapien
ccagtattgacctcagcatgtggaggtgagcct

SEQ ID NO: 135850 - DNA, 33 bp, Homo sapien
ccagtattgacctcagtatgtggaggtgagcct

SEQ ID NO: 135851 - DNA, 33 bp, Homo sapien
agtaccatggaggagacataagatttgaaaaga

SEQ ID NO: 135852 - DNA, 33 bp, Homo sapien
agtaccatggaggagatataagatttgaaaaga

SEQ ID NO: 135853 - DNA, 33 bp, Homo sapien
aggtgtatacatccagcctatggtctgcctcct

SEQ ID NO: 135854 - DNA, 33 bp, Homo sapien
aggtgtatacatccaggctatggtctgcctcct

SEQ ID NO: 135855 - DNA, 33 bp, Homo sapien
gtagaggtattgggtaaatatagcagttccaaa

SEQ ID NO: 135856 - DNA, 33 bp, Homo sapien
gtagaggtattgggtagatatagcagttccaaa

SEQ ID NO: 135857 - DNA, 33 bp, Homo sapien
ctcaccctctaacgtcaaaggaagaaagaagat

SEQ ID NO: 135858 - DNA, 33 bp, Homo sapien
ctcaccctctaacgtcgaaggaagaaagaagat

SEQ ID NO: 135859 - DNA, 33 bp, Homo sapien
caaaccctggtatttacgctgccatgttgtccc

SEQ ID NO: 135860 - DNA, 33 bp, Homo sapien
caaaccctggtatttatgctgccatgttgtccc

SEQ ID NO: 135861 - DNA, 33 bp, Homo sapien
ctcccaagttaactcacgtggatcacaaggctt

SEQ ID NO: 135862 - DNA, 33 bp, Homo sapien
ctcccaagttaactcatgtggatcacaaggctt

SEQ ID NO: 135863 - DNA, 33 bp, Homo sapien
taaacttgtaatactgcatattgactttcacaa

SEQ ID NO: 135864 - DNA, 33 bp, Homo sapien
taaacttgtaatactgtatattgactttcacaa

SEQ ID NO: 135865 - DNA, 33 bp, Homo sapien
tttagttatcagagaacggtttcttactgttag

SEQ ID NO: 135866 - DNA, 33 bp, Homo sapien
tttagttatcagagaatggtttcttactgttag

SEQ ID NO: 135867 - DNA, 33 bp, Homo sapien
catgtatctttaaacaataattacacagttgaa

SEQ ID NO: 135868 - DNA, 33 bp, Homo sapien
catgtatctttaaacagtaattacacagttgaa

SEQ ID NO: 135869 - DNA, 33 bp, Homo sapien
atcatgttcagtgtacaattttcaactgtgtaa

SEQ ID NO: 135870 - DNA, 33 bp, Homo sapien
atcatgttcagtgtacgattttcaactgtgtaa

SEQ ID NO: 135871 - DNA, 33 bp, Homo sapien
tgtgtcccttatttcacagttcaattagcagtt

SEQ ID NO: 135872 - DNA, 33 bp, Homo sapien
tgtgtcccttatttcatagttcaattagcagtt

SEQ ID NO: 135873 - DNA, 33 bp, Homo sapien
aactgtaatggatggaaagacataaatagaata

SEQ ID NO: 135874 - DNA, 33 bp, Homo sapien
aactgtaatggatggatagacataaatagaata

SEQ ID NO: 135875 - DNA, 33 bp, Homo sapien
ttctggtctctctctcaaatgctattttcaggt

SEQ ID NO: 135876 - DNA, 33 bp, Homo sapien
ttctggtctctctctccaatgctattttcaggt

SEQ ID NO: 135877 - DNA, 33 bp, Homo sapien
atgtactgctatttcaaccagctgaggaagaca

SEQ ID NO: 135878 - DNA, 33 bp, Homo sapien
atgtactgctatttcagccagctgaggaagaca

SEQ ID NO: 135879 - DNA, 33 bp, Homo sapien
tcaacttgggctggaaactgatatttggcatga

SEQ ID NO: 135880 - DNA, 33 bp, Homo sapien
tcaacttgggctggaacctgatatttggcatga

SEQ ID NO: 135881 - DNA, 33 bp, Homo sapien
atacagcttgctaccaaagagagaataaagtca

SEQ ID NO: 135882 - DNA, 33 bp, Homo sapien
atacagcttgctaccagagagagaataaagtca

SEQ ID NO: 135883 - DNA, 33 bp, Homo sapien
cagaaaggctccaaagaatctgggcatctctca

SEQ ID NO: 135884 - DNA, 33 bp, Homo sapien
cagaaaggctccaaaggatctgggcatctctca

SEQ ID NO: 135885 - DNA, 33 bp, Homo sapien
gctgccccagctgatacctcagtatttggatgc

SEQ ID NO: 135886 - DNA, 33 bp, Homo sapien
gctgccccagctgatatctcagtatttggatgc

SEQ ID NO: 135887 - DNA, 33 bp, Homo sapien
aaagactagaaaaggagatgaggtcaaggaaat

SEQ ID NO: 135888 - DNA, 33 bp, Homo sapien
aaagactagaaaaggatatgaggtcaaggaaat

SEQ ID NO: 135889 - DNA, 33 bp, Homo sapien
gagtgcatcttaatacaaactttgaactttagg

SEQ ID NO: 135890 - DNA, 33 bp, Homo sapien
gagtgcatcttaatacgaactttgaactttagg

SEQ ID NO: 135891 - DNA, 33 bp, Homo sapien
tgagaaattatagaccaggagtattatggactt

SEQ ID NO: 135892 - DNA, 33 bp, Homo sapien
tgagaaattatagaccgggagtattatggactt

SEQ ID NO: 135893 - DNA, 33 bp, Homo sapien
aagcaggcttattgacagaatgtgggtatgttt

SEQ ID NO: 135894 - DNA, 33 bp, Homo sapien
aagcaggcttattgacggaatgtgggtatgttt

SEQ ID NO: 135895 - DNA, 33 bp, Homo sapien
gcttttagaccaggtcaaacaaaaagaggcaat

SEQ ID NO: 135896 - DNA, 33 bp, Homo sapien
gcttttagaccaggtcgaacaaaaagaggcaat

SEQ ID NO: 135897 - DNA, 33 bp, Homo sapien
tcctgccagtaaagagcaataaccctggcttac

SEQ ID NO: 135898 - DNA, 33 bp, Homo sapien
tcctgccagtaaagaggaataaccctggcttac

SEQ ID NO: 135899 - DNA, 33 bp, Homo sapien
tggtcagtgaatggcaactaccatgagatgcca

SEQ ID NO: 135900 - DNA, 33 bp, Homo sapien
tggtcagtgaatggcacctaccatgagatgcca

SEQ ID NO: 135901 - DNA, 33 bp, Homo sapien
aatgtctaaagagcaactgtaaggccaagatgc

SEQ ID NO: 135902 - DNA, 33 bp, Homo sapien
aatgtctaaagagcaattgtaaggccaagatgc

SEQ ID NO: 135903 - DNA, 33 bp, Homo sapien
tgggtattgaggtccaaaagaatgacacacagc

SEQ ID NO: 135904 - DNA, 33 bp, Homo sapien
tgggtattgaggtccacaagaatgacacacagc

SEQ ID NO: 135905 - DNA, 33 bp, Homo sapien
ctaccgtctggtaaataagagtggctggcaaga

SEQ ID NO: 135906 - DNA, 33 bp, Homo sapien
ctaccgtctggtaaatgagagtggctggcaaga

SEQ ID NO: 135907 - DNA, 33 bp, Homo sapien
atcgatgtcatcccaacgtacctaacaaccctc

SEQ ID NO: 135908 - DNA, 33 bp, Homo sapien
atcgatgtcatcccaatgtacctaacaaccctc

SEQ ID NO: 135909 - DNA, 33 bp, Homo sapien
tttcagaggttgtctaccaggataaattattct

SEQ ID NO: 135910 - DNA, 33 bp, Homo sapien
tttcagaggttgtctatcaggataaattattct

SEQ ID NO: 135911 - DNA, 33 bp, Homo sapien
ctctggacagaagaggccctaaccagatatcca

SEQ ID NO: 135912 - DNA, 33 bp, Homo sapien
ctctggacagaagaggtcctaaccagatatcca

SEQ ID NO: 135913 - DNA, 33 bp, Homo sapien
catgtgatgcttgcaggatgagtaaaagtttgt

SEQ ID NO: 135914 - DNA, 33 bp, Homo sapien
catgtgatgcttgcagtatgagtaaaagtttgt

SEQ ID NO: 135915 - DNA, 33 bp, Homo sapien
catggagagccgcaggaaacactgatgacatca

SEQ ID NO: 135916 - DNA, 33 bp, Homo sapien
catggagagccgcagggaacactgatgacatca

SEQ ID NO: 135917 - DNA, 33 bp, Homo sapien
agctgagttgagatcccgagaagctgtggaagc

SEQ ID NO: 135918 - DNA, 33 bp, Homo sapien
agctgagttgagatcctgagaagctgtggaagc

SEQ ID NO: 135919 - DNA, 33 bp, Homo sapien
ggcttctgtagccctaactcgtcttcctggttc

SEQ ID NO: 135920 - DNA, 33 bp, Homo sapien
ggcttctgtagccctagctcgtcttcctggttc

SEQ ID NO: 135921 - DNA, 33 bp, Homo sapien
tgcagcggtctgaatgaatcataggaatatatc

SEQ ID NO: 135922 - DNA, 33 bp, Homo sapien
tgcagcggtctgaatgcatcataggaatatatc

SEQ ID NO: 135923 - DNA, 33 bp, Homo sapien
aaaaatgagccccttccctgtcaggtaactcag

SEQ ID NO: 135924 - DNA, 33 bp, Homo sapien
aaaaatgagccccttctctgtcaggtaactcag

SEQ ID NO: 135925 - DNA, 33 bp, Homo sapien
ttcctctttacaactacaaaatgagatgaagac

SEQ ID NO: 135926 - DNA, 33 bp, Homo sapien
ttcctctttacaactataaaatgagatgaagac

SEQ ID NO: 135927 - DNA, 33 bp, Homo sapien
cctcaatggaagttcaatatgtattcaggatgg

SEQ ID NO: 135928 - DNA, 33 bp, Homo sapien
cctcaatggaagttcagtatgtattcaggatgg

SEQ ID NO: 135929 - DNA, 33 bp, Homo sapien
gaatagcaacaggaaggcttccatcccaccttc

SEQ ID NO: 135930 - DNA, 33 bp, Homo sapien
gaatagcaacaggaagtcttccatcccaccttc

SEQ ID NO: 135931 - DNA, 33 bp, Homo sapien
caccatcagcatatggaaaggcagagggggaaa

SEQ ID NO: 135932 - DNA, 33 bp, Homo sapien
caccatcagcatatgggaaggcagagggggaaa

SEQ ID NO: 135933 - DNA, 33 bp, Homo sapien
gagaaagctattgcaaaggatgatgttgaatac

SEQ ID NO: 135934 - DNA, 33 bp, Homo sapien
gagaaagctattgcaagggatgatgttgaatac

SEQ ID NO: 135935 - DNA, 33 bp, Homo sapien
tccatttacaacaccaacttggattgattactg

SEQ ID NO: 135936 - DNA, 33 bp, Homo sapien
tccatttacaacaccagcttggattgattactg

SEQ ID NO: 135937 - DNA, 33 bp, Homo sapien
taaagcaaccgttacaatccatatcacaacatt

SEQ ID NO: 135938 - DNA, 33 bp, Homo sapien
taaagcaaccgttacagtccatatcacaacatt

SEQ ID NO: 135939 - DNA, 33 bp, Homo sapien
tggacactcaaccagcacttccctggcatgcca

SEQ ID NO: 135940 - DNA, 33 bp, Homo sapien
tggacactcaaccagcgcttccctggcatgcca

SEQ ID NO: 135941 - DNA, 33 bp, Homo sapien
agccctagccaatggaccaagtctcttaggaga

SEQ ID NO: 135942 - DNA, 33 bp, Homo sapien
agccctagccaatggatcaagtctcttaggaga

SEQ ID NO: 135943 - DNA, 33 bp, Homo sapien
ttgatccagcaacttcactcctaggtatttagt

SEQ ID NO: 135944 - DNA, 33 bp, Homo sapien
ttgatccagcaacttcgctcctaggtatttagt

SEQ ID NO: 135945 - DNA, 33 bp, Homo sapien
acgattctaggaggtcacgcatagtcaactacc

SEQ ID NO: 135946 - DNA, 33 bp, Homo sapien
acgattctaggaggtcgcgcatagtcaactacc

SEQ ID NO: 135947 - DNA, 33 bp, Homo sapien
agggcttgattgtacacgcaaggctttcattcc

SEQ ID NO: 135948 - DNA, 33 bp, Homo sapien
agggcttgattgtacatgcaaggctttcattcc

SEQ ID NO: 135949 - DNA, 33 bp, Homo sapien
agactagggtgccacaaaatgagtttctggtga

SEQ ID NO: 135950 - DNA, 33 bp, Homo sapien
agactagggtgccacacaatgagtttctggtga

SEQ ID NO: 135951 - DNA, 33 bp, Homo sapien
ctttttattacttgccaaaactcacacactagg

SEQ ID NO: 135952 - DNA, 33 bp, Homo sapien
ctttttattacttgccgaaactcacacactagg

SEQ ID NO: 135953 - DNA, 33 bp, Homo sapien
gcctctcagtcctggaaaaatcagactttagac

SEQ ID NO: 135954 - DNA, 33 bp, Homo sapien
gcctctcagtcctggacaaatcagactttagac

SEQ ID NO: 135955 - DNA, 33 bp, Homo sapien
tctcaaaatttcatggacatagaagtcatctga

SEQ ID NO: 135956 - DNA, 33 bp, Homo sapien
tctcaaaatttcatgggcatagaagtcatctga

SEQ ID NO: 135957 - DNA, 33 bp, Homo sapien
aaaaagccaaacatgaaaaactgggaaaggata

SEQ ID NO: 135958 - DNA, 33 bp, Homo sapien
aaaaagccaaacatgacaaactgggaaaggata

SEQ ID NO: 135959 - DNA, 33 bp, Homo sapien
ttcttgagaactcatacaagtcctttgttgtaa

SEQ ID NO: 135960 - DNA, 33 bp, Homo sapien
ttcttgagaactcatataagtcctttgttgtaa

SEQ ID NO: 135961 - DNA, 33 bp, Homo sapien
tgtgtgtgtatgtatacggctatgtaacgtata

SEQ ID NO: 135962 - DNA, 33 bp, Homo sapien
tgtgtgtgtatgtatatggctatgtaacgtata

SEQ ID NO: 135963 - DNA, 33 bp, Homo sapien
agccacatggctctcaaaagaggacttattcct

SEQ ID NO: 135964 - DNA, 33 bp, Homo sapien
agccacatggctctcacaagaggacttattcct

SEQ ID NO: 135965 - DNA, 33 bp, Homo sapien
agcaccattcctgtacaaagtaggtaatggatg

SEQ ID NO: 135966 - DNA, 33 bp, Homo sapien
agcaccattcctgtaccaagtaggtaatggatg

SEQ ID NO: 135967 - DNA, 33 bp, Homo sapien
atttattcaaagatgacgctccctttggttaac

SEQ ID NO: 135968 - DNA, 33 bp, Homo sapien
atttattcaaagatgatgctccctttggttaac

SEQ ID NO: 135969 - DNA, 33 bp, Homo sapien
acattggaagataaaaagacaaaagctcagagg

SEQ ID NO: 135970 - DNA, 33 bp, Homo sapien
acattggaagataaaaggacaaaagctcagagg

SEQ ID NO: 135971 - DNA, 33 bp, Homo sapien
gcccaatggcttcatgaataaagttggcatggt

SEQ ID NO: 135972 - DNA, 33 bp, Homo sapien
gcccaatggcttcatggataaagttggcatggt

SEQ ID NO: 135973 - DNA, 33 bp, Homo sapien
accaacttttcaatcacgttcctttcatgtccc

SEQ ID NO: 135974 - DNA, 33 bp, Homo sapien
accaacttttcaatcatgttcctttcatgtccc

SEQ ID NO: 135975 - DNA, 33 bp, Homo sapien
gctgttcacttttggaaggtacctgcatattga

SEQ ID NO: 135976 - DNA, 33 bp, Homo sapien
gctgttcacttttggatggtacctgcatattga

SEQ ID NO: 135977 - DNA, 33 bp, Homo sapien
ctctgataaggctcagaagtaggccaagagcca

SEQ ID NO: 135978 - DNA, 33 bp, Homo sapien
ctctgataaggctcaggagtaggccaagagcca

SEQ ID NO: 135979 - DNA, 33 bp, Homo sapien
cattatgctgactggacctaataagtaaaacat

SEQ ID NO: 135980 - DNA, 33 bp, Homo sapien
cattatgctgactggatctaataagtaaaacat

SEQ ID NO: 135981 - DNA, 33 bp, Homo sapien
gcattactgtaatggccctgctcaggcagctgc

SEQ ID NO: 135982 - DNA, 33 bp, Homo sapien
gcattactgtaatggctctgctcaggcagctgc

SEQ ID NO: 135983 - DNA, 33 bp, Homo sapien
tattctgctcaaacaccagtgggaaggctactt

SEQ ID NO: 135984 - DNA, 33 bp, Homo sapien
tattctgctcaaacacgagtgggaaggctactt

SEQ ID NO: 135985 - DNA, 33 bp, Homo sapien
attgatttggaagaaacggattctaaaagttgg

SEQ ID NO: 135986 - DNA, 33 bp, Homo sapien
attgatttggaagaaatggattctaaaagttgg

SEQ ID NO: 135987 - DNA, 33 bp, Homo sapien
cagggtacacatagaaaatttcaggtaatttat

SEQ ID NO: 135988 - DNA, 33 bp, Homo sapien
cagggtacacatagaagatttcaggtaatttat

SEQ ID NO: 135989 - DNA, 33 bp, Homo sapien
cagacgtgatagcacaaacctatagtctcagat

SEQ ID NO: 135990 - DNA, 33 bp, Homo sapien
cagacgtgatagcacatacctatagtctcagat

SEQ ID NO: 135991 - DNA, 33 bp, Homo sapien
gctaatgatgtgatctaacaatgaagatatgca

SEQ ID NO: 135992 - DNA, 33 bp, Homo sapien
gctaatgatgtgatctgacaatgaagatatgca

SEQ ID NO: 135993 - DNA, 33 bp, Homo sapien
agctatcagtcctctccctactactaaaaatag

SEQ ID NO: 135994 - DNA, 33 bp, Homo sapien
agctatcagtcctctctctactactaaaaatag

SEQ ID NO: 135995 - DNA, 33 bp, Homo sapien
atgcttgcagatgatcaatgtgcctgggatttg

SEQ ID NO: 135996 - DNA, 33 bp, Homo sapien
atgcttgcagatgatcgatgtgcctgggatttg

SEQ ID NO: 135997 - DNA, 33 bp, Homo sapien
gggctgtggtttgtcaataggctcctggaggga

SEQ ID NO: 135998 - DNA, 33 bp, Homo sapien
gggctgtggtttgtcagtaggctcctggaggga

SEQ ID NO: 135999 - DNA, 33 bp, Homo sapien
caatggtgaattatacacagtcctcatcacaag

SEQ ID NO: 136000 - DNA, 33 bp, Homo sapien
caatggtgaattatacccagtcctcatcacaag

SEQ ID NO: 136001 - DNA, 33 bp, Homo sapien
acaggtacattgcaaagcattaggaggaaaagt

SEQ ID NO: 136002 - DNA, 33 bp, Homo sapien
acaggtacattgcaaatcattaggaggaaaagt

SEQ ID NO: 136003 - DNA, 33 bp, Homo sapien
atcagctaacctcatacccatttcattttaaag

SEQ ID NO: 136004 - DNA, 33 bp, Homo sapien
atcagctaacctcatatccatttcattttaaag

SEQ ID NO: 136005 - DNA, 33 bp, Homo sapien
aggagatggactaacccctgactatgtaatctg

SEQ ID NO: 136006 - DNA, 33 bp, Homo sapien
aggagatggactaacctctgactatgtaatctg

SEQ ID NO: 136007 - DNA, 33 bp, Homo sapien
ttacagatgcagcaaacattgactaaacacaat

SEQ ID NO: 136008 - DNA, 33 bp, Homo sapien
ttacagatgcagcaaatattgactaaacacaat

SEQ ID NO: 136009 - DNA, 33 bp, Homo sapien
ttcctaatgaaggtgaaatgcactggtggtaag

SEQ ID NO: 136010 - DNA, 33 bp, Homo sapien
ttcctaatgaaggtgatatgcactggtggtaag

SEQ ID NO: 136011 - DNA, 33 bp, Homo sapien
agtgtatattcacagacatgtgcaactattacc

SEQ ID NO: 136012 - DNA, 33 bp, Homo sapien
agtgtatattcacagatatgtgcaactattacc

SEQ ID NO: 136013 - DNA, 33 bp, Homo sapien
tagtagtctttttaccccgtacacaactaatct

SEQ ID NO: 136014 - DNA, 33 bp, Homo sapien
tagtagtctttttacctcgtacacaactaatct

SEQ ID NO: 136015 - DNA, 33 bp, Homo sapien
tatctcaaaagcagaactgataatgataacttc

SEQ ID NO: 136016 - DNA, 33 bp, Homo sapien
tatctcaaaagcagaagtgataatgataacttc

SEQ ID NO: 136017 - DNA, 33 bp, Homo sapien
tgaatttttggttcaacatacagaagggaaaca

SEQ ID NO: 136018 - DNA, 33 bp, Homo sapien
tgaatttttggttcaagatacagaagggaaaca

SEQ ID NO: 136019 - DNA, 33 bp, Homo sapien
cctctgggaaaattagccgtgagttatgtaaat

SEQ ID NO: 136020 - DNA, 33 bp, Homo sapien
cctctgggaaaattagtcgtgagttatgtaaat

SEQ ID NO: 136021 - DNA, 33 bp, Homo sapien
ccagcctttatcaactaaagaacaattgctgaa

SEQ ID NO: 136022 - DNA, 33 bp, Homo sapien
ccagcctttatcaactgaagaacaattgctgaa

SEQ ID NO: 136023 - DNA, 33 bp, Homo sapien
aataatgagcaagttgaaagtaatttgttggaa

SEQ ID NO: 136024 - DNA, 33 bp, Homo sapien
aataatgagcaagttggaagtaatttgttggaa

SEQ ID NO: 136025 - DNA, 33 bp, Homo sapien
gctcaactcctgaaatgatgaagggaaatcttt

SEQ ID NO: 136026 - DNA, 33 bp, Homo sapien
gctcaactcctgaaattatgaagggaaatcttt

SEQ ID NO: 136027 - DNA, 33 bp, Homo sapien
tgaaacaggtctcaacagttgaactctggcacc

SEQ ID NO: 136028 - DNA, 33 bp, Homo sapien
tgaaacaggtctcaaccgttgaactctggcacc

SEQ ID NO: 136029 - DNA, 33 bp, Homo sapien
tcttatatacttgccacgtaattcaaggttgcc

SEQ ID NO: 136030 - DNA, 33 bp, Homo sapien
tcttatatacttgccatgtaattcaaggttgcc

SEQ ID NO: 136031 - DNA, 33 bp, Homo sapien
agctgcttttacacaacggagacaggaaggata

SEQ ID NO: 136032 - DNA, 33 bp, Homo sapien
agctgcttttacacaatggagacaggaaggata

SEQ ID NO: 136033 - DNA, 33 bp, Homo sapien
tttcaagttagccaaaattactgatgacctatt

SEQ ID NO: 136034 - DNA, 33 bp, Homo sapien
tttcaagttagccaaacttactgatgacctatt

SEQ ID NO: 136035 - DNA, 33 bp, Homo sapien
agaaatctatagtctacgcttggggcaaactaa

SEQ ID NO: 136036 - DNA, 33 bp, Homo sapien
agaaatctatagtctatgcttggggcaaactaa

SEQ ID NO: 136037 - DNA, 33 bp, Homo sapien
cccaccatgcgtagaaagggatatgtttccaag

SEQ ID NO: 136038 - DNA, 33 bp, Homo sapien
cccaccatgcgtagaaggggatatgtttccaag

SEQ ID NO: 136039 - DNA, 33 bp, Homo sapien
cctctatttatgcataccgtgaccatctcatag

SEQ ID NO: 136040 - DNA, 33 bp, Homo sapien
cctctatttatgcatatcgtgaccatctcatag

SEQ ID NO: 136041 - DNA, 33 bp, Homo sapien
catggtgtggaaaagacctttattttttgagga

SEQ ID NO: 136042 - DNA, 33 bp, Homo sapien
catggtgtggaaaagagctttattttttgagga

SEQ ID NO: 136043 - DNA, 33 bp, Homo sapien
tgacaacagtgctcagaataatgcttgtatcca

SEQ ID NO: 136044 - DNA, 33 bp, Homo sapien
tgacaacagtgctcaggataatgcttgtatcca

SEQ ID NO: 136045 - DNA, 33 bp, Homo sapien
ggatctatttgtgctactaagtcaatttgaaaa

SEQ ID NO: 136046 - DNA, 33 bp, Homo sapien
ggatctatttgtgctattaagtcaatttgaaaa

SEQ ID NO: 136047 - DNA, 33 bp, Homo sapien
aagaaacctaccgtgaggctagtaatataaaag

SEQ ID NO: 136048 - DNA, 33 bp, Homo sapien
aagaaacctaccgtgatgctagtaatataaaag

SEQ ID NO: 136049 - DNA, 33 bp, Homo sapien
accatttcaaagcttaacttctttcaaatacca

SEQ ID NO: 136050 - DNA, 33 bp, Homo sapien
accatttcaaagcttatcttctttcaaatacca

SEQ ID NO: 136051 - DNA, 33 bp, Homo sapien
aattgattattgtgaacaggaacttgttgataa

SEQ ID NO: 136052 - DNA, 33 bp, Homo sapien
aattgattattgtgaagaggaacttgttgataa

SEQ ID NO: 136053 - DNA, 33 bp, Homo sapien
tgcttctggactatgaactttaaaattgatttt

SEQ ID NO: 136054 - DNA, 33 bp, Homo sapien
tgcttctggactatgagctttaaaattgatttt

SEQ ID NO: 136055 - DNA, 33 bp, Homo sapien
gtttagtgtatgacatcaatttggaaaaattct

SEQ ID NO: 136056 - DNA, 33 bp, Homo sapien
gtttagtgtatgacattaatttggaaaaattct

SEQ ID NO: 136057 - DNA, 33 bp, Homo sapien
attgacaacaaattccagaaattggatctcata

SEQ ID NO: 136058 - DNA, 33 bp, Homo sapien
attgacaacaaattcctgaaattggatctcata

SEQ ID NO: 136059 - DNA, 33 bp, Homo sapien
ttctgatactaccttcacaatttattaaattct

SEQ ID NO: 136060 - DNA, 33 bp, Homo sapien
ttctgatactaccttctcaatttattaaattct

SEQ ID NO: 136061 - DNA, 33 bp, Homo sapien
aggatctcataataggcatatggtcataatagg

SEQ ID NO: 136062 - DNA, 33 bp, Homo sapien
aggatctcataataggtatatggtcataatagg

SEQ ID NO: 136063 - DNA, 33 bp, Homo sapien
agtggcaattctgaagaacttacatggtagaca

SEQ ID NO: 136064 - DNA, 33 bp, Homo sapien
agtggcaattctgaaggacttacatggtagaca

SEQ ID NO: 136065 - DNA, 33 bp, Homo sapien
tatgagctcccattcaataaagctttcaaaagt

SEQ ID NO: 136066 - DNA, 33 bp, Homo sapien
tatgagctcccattcactaaagctttcaaaagt

SEQ ID NO: 136067 - DNA, 33 bp, Homo sapien
aaggagagaggatagcacaatgaactcccaatt

SEQ ID NO: 136068 - DNA, 33 bp, Homo sapien
aaggagagaggatagcgcaatgaactcccaatt

SEQ ID NO: 136069 - DNA, 33 bp, Homo sapien
gtctttatgtaaacaacgcaagtgcgctggtct

SEQ ID NO: 136070 - DNA, 33 bp, Homo sapien
gtctttatgtaaacaatgcaagtgcgctggtct

SEQ ID NO: 136071 - DNA, 33 bp, Homo sapien
ctagaggcagggaagccagtcaaacagcttcta

SEQ ID NO: 136072 - DNA, 33 bp, Homo sapien
ctagaggcagggaagcgagtcaaacagcttcta

SEQ ID NO: 136073 - DNA, 33 bp, Homo sapien
ttctaacattaaaataaaccgttgattacttat

SEQ ID NO: 136074 - DNA, 33 bp, Homo sapien
ttctaacattaaaatagaccgttgattacttat

SEQ ID NO: 136075 - DNA, 33 bp, Homo sapien
ggtccattcaggaagacagaacaatgtaagact

SEQ ID NO: 136076 - DNA, 33 bp, Homo sapien
ggtccattcaggaagatagaacaatgtaagact

SEQ ID NO: 136077 - DNA, 33 bp, Homo sapien
tcttactgtatttgcccaagttccaagacaatg

SEQ ID NO: 136078 - DNA, 33 bp, Homo sapien
tcttactgtatttgcctaagttccaagacaatg

SEQ ID NO: 136079 - DNA, 33 bp, Homo sapien
tagtattattttgatacattgctggattccatg

SEQ ID NO: 136080 - DNA, 33 bp, Homo sapien
tagtattattttgatatattgctggattccatg

SEQ ID NO: 136081 - DNA, 33 bp, Homo sapien
ttgccccacgtaagaacgtccagcaaatcttac

SEQ ID NO: 136082 - DNA, 33 bp, Homo sapien
ttgccccacgtaagaatgtccagcaaatcttac

SEQ ID NO: 136083 - DNA, 33 bp, Homo sapien
accctcaatgtgcagaatcagaggggtttcaga

SEQ ID NO: 136084 - DNA, 33 bp, Homo sapien
accctcaatgtgcagagtcagaggggtttcaga

SEQ ID NO: 136085 - DNA, 33 bp, Homo sapien
gtgttctcgttggagacaaaaatgtacattatt

SEQ ID NO: 136086 - DNA, 33 bp, Homo sapien
gtgttctcgttggagagaaaaatgtacattatt

SEQ ID NO: 136087 - DNA, 33 bp, Homo sapien
cagtttctaacttggcaaatttaccctggcctg

SEQ ID NO: 136088 - DNA, 33 bp, Homo sapien
cagtttctaacttggcgaatttaccctggcctg

SEQ ID NO: 136089 - DNA, 33 bp, Homo sapien
gcagagtagatcataaataccatgacacagaaa

SEQ ID NO: 136090 - DNA, 33 bp, Homo sapien
gcagagtagatcataagtaccatgacacagaaa

SEQ ID NO: 136091 - DNA, 33 bp, Homo sapien
tgtttgggaatctccccccacaacattttctac

SEQ ID NO: 136092 - DNA, 33 bp, Homo sapien
tgtttgggaatctccctccacaacattttctac

SEQ ID NO: 136093 - DNA, 33 bp, Homo sapien
cctccagcagcactggaaagttttgctattcac

SEQ ID NO: 136094 - DNA, 33 bp, Homo sapien
cctccagcagcactggcaagttttgctattcac

SEQ ID NO: 136095 - DNA, 33 bp, Homo sapien
gtttttaaaaattgccacattgtcaccctgcaa

SEQ ID NO: 136096 - DNA, 33 bp, Homo sapien
gtttttaaaaattgccgcattgtcaccctgcaa

SEQ ID NO: 136097 - DNA, 33 bp, Homo sapien
attgtcctgaaagccaatgctttgcactcacct

SEQ ID NO: 136098 - DNA, 33 bp, Homo sapien
attgtcctgaaagccattgctttgcactcacct

SEQ ID NO: 136099 - DNA, 33 bp, Homo sapien
ttatcatgaatcacaacgaacactttgcaagag

SEQ ID NO: 136100 - DNA, 33 bp, Homo sapien
ttatcatgaatcacaatgaacactttgcaagag

SEQ ID NO: 136101 - DNA, 33 bp, Homo sapien
tttggccaccattgtaaacatatttcaagttta

SEQ ID NO: 136102 - DNA, 33 bp, Homo sapien
tttggccaccattgtacacatatttcaagttta

SEQ ID NO: 136103 - DNA, 33 bp, Homo sapien
tttgctattagccttacaaccatgatcatcagg

SEQ ID NO: 136104 - DNA, 33 bp, Homo sapien
tttgctattagccttataaccatgatcatcagg

SEQ ID NO: 136105 - DNA, 33 bp, Homo sapien
cctttggctaatttcactccatgtcagtgtagc

SEQ ID NO: 136106 - DNA, 33 bp, Homo sapien
cctttggctaatttcattccatgtcagtgtagc

SEQ ID NO: 136107 - DNA, 33 bp, Homo sapien
aggtaaggatttagtacgataatgaatataaaa

SEQ ID NO: 136108 - DNA, 33 bp, Homo sapien
aggtaaggatttagtatgataatgaatataaaa

SEQ ID NO: 136109 - DNA, 33 bp, Homo sapien
cagccacattgcacaactaaaatatgctggaaa

SEQ ID NO: 136110 - DNA, 33 bp, Homo sapien
cagccacattgcacaattaaaatatgctggaaa

SEQ ID NO: 136111 - DNA, 33 bp, Homo sapien
taattggggccattaagtcagtcattctacaac

SEQ ID NO: 136112 - DNA, 33 bp, Homo sapien
taattggggccattaattcagtcattctacaac

SEQ ID NO: 136113 - DNA, 33 bp, Homo sapien
gaaaactgcttcaataaacagggagaaacccaa

SEQ ID NO: 136114 - DNA, 33 bp, Homo sapien
gaaaactgcttcaatatacagggagaaacccaa

SEQ ID NO: 136115 - DNA, 33 bp, Homo sapien
aaggtcatggccaataaggggaagagccagctt

SEQ ID NO: 136116 - DNA, 33 bp, Homo sapien
aaggtcatggccaatatggggaagagccagctt

SEQ ID NO: 136117 - DNA, 33 bp, Homo sapien
tgtcccatgtctgctacgaagaaatagtaaagc

SEQ ID NO: 136118 - DNA, 33 bp, Homo sapien
tgtcccatgtctgctatgaagaaatagtaaagc

SEQ ID NO: 136119 - DNA, 33 bp, Homo sapien
aatcagagcaatcccaataggtttaacaagatt

SEQ ID NO: 136120 - DNA, 33 bp, Homo sapien
aatcagagcaatcccattaggtttaacaagatt

SEQ ID NO: 136121 - DNA, 33 bp, Homo sapien
gccaaggacagcaccccaattcatcagtgcctg

SEQ ID NO: 136122 - DNA, 33 bp, Homo sapien
gccaaggacagcaccctaattcatcagtgcctg

SEQ ID NO: 136123 - DNA, 33 bp, Homo sapien
gtctcagctctttcagaaatgactgtgaaattt

SEQ ID NO: 136124 - DNA, 33 bp, Homo sapien
gtctcagctctttcagtaatgactgtgaaattt

SEQ ID NO: 136125 - DNA, 33 bp, Homo sapien
gggctgggtcactctgaatcttaactcaccaac

SEQ ID NO: 136126 - DNA, 33 bp, Homo sapien
gggctgggtcactctgcatcttaactcaccaac

SEQ ID NO: 136127 - DNA, 33 bp, Homo sapien
ctagtctaagaattcaatatggggtggctacta

SEQ ID NO: 136128 - DNA, 33 bp, Homo sapien
ctagtctaagaattcagtatggggtggctacta

SEQ ID NO: 136129 - DNA, 33 bp, Homo sapien
ttttttttaatagagaacatgtgcatcttctgt

SEQ ID NO: 136130 - DNA, 33 bp, Homo sapien
ttttttttaatagagagcatgtgcatcttctgt

SEQ ID NO: 136131 - DNA, 33 bp, Homo sapien
aaaaggttttatagacacatagtttattaagct

SEQ ID NO: 136132 - DNA, 33 bp, Homo sapien
aaaaggttttatagacgcatagtttattaagct

SEQ ID NO: 136133 - DNA, 33 bp, Homo sapien
aaataggaatgagatacggcatgctaagtgctt

SEQ ID NO: 136134 - DNA, 33 bp, Homo sapien
aaataggaatgagatatggcatgctaagtgctt

SEQ ID NO: 136135 - DNA, 33 bp, Homo sapien
tcttaaaattattgaacctggaacaaatattct

SEQ ID NO: 136136 - DNA, 33 bp, Homo sapien
tcttaaaattattgaatctggaacaaatattct

SEQ ID NO: 136137 - DNA, 33 bp, Homo sapien
tctcagcaaggatcacaatgacagcgtccactg

SEQ ID NO: 136138 - DNA, 33 bp, Homo sapien
tctcagcaaggatcaccatgacagcgtccactg

SEQ ID NO: 136139 - DNA, 33 bp, Homo sapien
aatcttaaaaacagaaactaaacatcagtgtct

SEQ ID NO: 136140 - DNA, 33 bp, Homo sapien
aatcttaaaaacagaagctaaacatcagtgtct

SEQ ID NO: 136141 - DNA, 33 bp, Homo sapien
taacatgttagttgccagagatgcagcaagtca

SEQ ID NO: 136142 - DNA, 33 bp, Homo sapien
taacatgttagttgccggagatgcagcaagtca

SEQ ID NO: 136143 - DNA, 33 bp, Homo sapien
gtatagaatacttgataacagtaataaacaact

SEQ ID NO: 136144 - DNA, 33 bp, Homo sapien
gtatagaatacttgattacagtaataaacaact

SEQ ID NO: 136145 - DNA, 33 bp, Homo sapien
gaaaaggcgaacgcaaacataataagttgtcag

SEQ ID NO: 136146 - DNA, 33 bp, Homo sapien
gaaaaggcgaacgcaagcataataagttgtcag

SEQ ID NO: 136147 - DNA, 33 bp, Homo sapien
tttagtaaaccaaaccaagaggcaaaactgctc

SEQ ID NO: 136148 - DNA, 33 bp, Homo sapien
tttagtaaaccaaaccgagaggcaaaactgctc

SEQ ID NO: 136149 - DNA, 33 bp, Homo sapien
agatgacttgtctcaactgtgcaaaatggctgc

SEQ ID NO: 136150 - DNA, 33 bp, Homo sapien
agatgacttgtctcaattgtgcaaaatggctgc

SEQ ID NO: 136151 - DNA, 33 bp, Homo sapien
tccttctcctggtgcactgatccatcttaactc

SEQ ID NO: 136152 - DNA, 33 bp, Homo sapien
tccttctcctggtgcattgatccatcttaactc

SEQ ID NO: 136153 - DNA, 33 bp, Homo sapien
caagatcacagaagaactgggtcttgaccatat

SEQ ID NO: 136154 - DNA, 33 bp, Homo sapien
caagatcacagaagaattgggtcttgaccatat

SEQ ID NO: 136155 - DNA, 33 bp, Homo sapien
agcctttcctagtctacatatatggagcatcca

SEQ ID NO: 136156 - DNA, 33 bp, Homo sapien
agcctttcctagtctatatatatggagcatcca

SEQ ID NO: 136157 - DNA, 33 bp, Homo sapien
gaagatggagaacaaactcaagagcttctgaca

SEQ ID NO: 136158 - DNA, 33 bp, Homo sapien
gaagatggagaacaaagtcaagagcttctgaca

SEQ ID NO: 136159 - DNA, 33 bp, Homo sapien
tgaagaactactgtaaaagatatggaaggaagg

SEQ ID NO: 136160 - DNA, 33 bp, Homo sapien
tgaagaactactgtaagagatatggaaggaagg

SEQ ID NO: 136161 - DNA, 33 bp, Homo sapien
gaccccaagtactcctcagaaaattactccttt

SEQ ID NO: 136162 - DNA, 33 bp, Homo sapien
gaccccaagtactcctgagaaaattactccttt

SEQ ID NO: 136163 - DNA, 33 bp, Homo sapien
cctctcccgagctccacatctcaatatccaaaa

SEQ ID NO: 136164 - DNA, 33 bp, Homo sapien
cctctcccgagctccatatctcaatatccaaaa

SEQ ID NO: 136165 - DNA, 33 bp, Homo sapien
atcaatacgtcctgatgacttgatttttgtttt

SEQ ID NO: 136166 - DNA, 33 bp, Homo sapien
atcaatacgtcctgattacttgatttttgtttt

SEQ ID NO: 136167 - DNA, 33 bp, Homo sapien
tcctgaaaattgttcacactgagagtaggatag

SEQ ID NO: 136168 - DNA, 33 bp, Homo sapien
tcctgaaaattgttcatactgagagtaggatag

SEQ ID NO: 136169 - DNA, 33 bp, Homo sapien
tgctactcaatagagacgtgatggctacagttc

SEQ ID NO: 136170 - DNA, 33 bp, Homo sapien
tgctactcaatagagatgtgatggctacagttc

SEQ ID NO: 136171 - DNA, 33 bp, Homo sapien
gcttctgagcttgagaggttcatgtgaagtctc

SEQ ID NO: 136172 - DNA, 33 bp, Homo sapien
gcttctgagcttgagatgttcatgtgaagtctc

SEQ ID NO: 136173 - DNA, 33 bp, Homo sapien
cctctttttatttgtacgttacccagtcttggg

SEQ ID NO: 136174 - DNA, 33 bp, Homo sapien
cctctttttatttgtatgttacccagtcttggg

SEQ ID NO: 136175 - DNA, 33 bp, Homo sapien
gagctataagattcaccgtgaaggtccgcagct

SEQ ID NO: 136176 - DNA, 33 bp, Homo sapien
gagctataagattcactgtgaaggtccgcagct

SEQ ID NO: 136177 - DNA, 33 bp, Homo sapien
ctctggctgtgttaagcatttttctctatcact

SEQ ID NO: 136178 - DNA, 33 bp, Homo sapien
ctctggctgtgttaagtatttttctctatcact

SEQ ID NO: 136179 - DNA, 33 bp, Homo sapien
attattgctatctttccaaatcaccaagtgtta

SEQ ID NO: 136180 - DNA, 33 bp, Homo sapien
attattgctatctttctaaatcaccaagtgtta

SEQ ID NO: 136181 - DNA, 33 bp, Homo sapien
acatatgagtagtttgcataacccataacaatt

SEQ ID NO: 136182 - DNA, 33 bp, Homo sapien
acatatgagtagtttgtataacccataacaatt

SEQ ID NO: 136183 - DNA, 33 bp, Homo sapien
caaaacctccttatgagaaatgttttgcaacaa

SEQ ID NO: 136184 - DNA, 33 bp, Homo sapien
caaaacctccttatgataaatgttttgcaacaa

SEQ ID NO: 136185 - DNA, 33 bp, Homo sapien
ttaatagcatactttaagcatataggaaggaca

SEQ ID NO: 136186 - DNA, 33 bp, Homo sapien
ttaatagcatactttaggcatataggaaggaca

SEQ ID NO: 136187 - DNA, 33 bp, Homo sapien
gaaactggcgaagagaagcctcactttattaat

SEQ ID NO: 136188 - DNA, 33 bp, Homo sapien
gaaactggcgaagagacgcctcactttattaat

SEQ ID NO: 136189 - DNA, 33 bp, Homo sapien
cacctcagcaccacaaactattctggtacaatt

SEQ ID NO: 136190 - DNA, 33 bp, Homo sapien
cacctcagcaccacaagctattctggtacaatt

SEQ ID NO: 136191 - DNA, 33 bp, Homo sapien
agttggaaaagtttacagcaaagatacgtaagg

SEQ ID NO: 136192 - DNA, 33 bp, Homo sapien
agttggaaaagtttacggcaaagatacgtaagg

SEQ ID NO: 136193 - DNA, 33 bp, Homo sapien
gccagtcttttagtaactcagtaacatcaggta

SEQ ID NO: 136194 - DNA, 33 bp, Homo sapien
gccagtcttttagtaattcagtaacatcaggta

SEQ ID NO: 136195 - DNA, 33 bp, Homo sapien
gaaactgagacctagaaaagaaaaatgtcgatt

SEQ ID NO: 136196 - DNA, 33 bp, Homo sapien
gaaactgagacctagagaagaaaaatgtcgatt

SEQ ID NO: 136197 - DNA, 33 bp, Homo sapien
aaaaccttttgctttcaatcagccaagaggcac

SEQ ID NO: 136198 - DNA, 33 bp, Homo sapien
aaaaccttttgctttcgatcagccaagaggcac

SEQ ID NO: 136199 - DNA, 33 bp, Homo sapien
ctccatttcacccaagaaaaagtcggtatgtgc

SEQ ID NO: 136200 - DNA, 33 bp, Homo sapien
ctccatttcacccaagtaaaagtcggtatgtgc

SEQ ID NO: 136201 - DNA, 33 bp, Homo sapien
gaggtttgtggctgtacgaagggcaaacatggg

SEQ ID NO: 136202 - DNA, 33 bp, Homo sapien
gaggtttgtggctgtatgaagggcaaacatggg

SEQ ID NO: 136203 - DNA, 33 bp, Homo sapien
agcagagacattggaaaaactaagaaaacctag

SEQ ID NO: 136204 - DNA, 33 bp, Homo sapien
agcagagacattggaagaactaagaaaacctag

SEQ ID NO: 136205 - DNA, 33 bp, Homo sapien
ctcagatctatttccaatctttaccttgaccta

SEQ ID NO: 136206 - DNA, 33 bp, Homo sapien
ctcagatctatttccagtctttaccttgaccta

SEQ ID NO: 136207 - DNA, 33 bp, Homo sapien
tatttttgccttctgacggaaacatttttctca

SEQ ID NO: 136208 - DNA, 33 bp, Homo sapien
tatttttgccttctgatggaaacatttttctca

SEQ ID NO: 136209 - DNA, 33 bp, Homo sapien
cttatgcaaattttgaaattctctttaatgcaa

SEQ ID NO: 136210 - DNA, 33 bp, Homo sapien
cttatgcaaattttgagattctctttaatgcaa

SEQ ID NO: 136211 - DNA, 33 bp, Homo sapien
gtcgaggctgtctgaccctagagcatatactta

SEQ ID NO: 136212 - DNA, 33 bp, Homo sapien
gtcgaggctgtctgactctagagcatatactta

SEQ ID NO: 136213 - DNA, 33 bp, Homo sapien
tctgtgtttctttgccgagactcactcagccac

SEQ ID NO: 136214 - DNA, 33 bp, Homo sapien
tctgtgtttctttgcctagactcactcagccac

SEQ ID NO: 136215 - DNA, 33 bp, Homo sapien
ggttattgaaacagccaaacagatttacctgtg

SEQ ID NO: 136216 - DNA, 33 bp, Homo sapien
ggttattgaaacagccgaacagatttacctgtg

SEQ ID NO: 136217 - DNA, 33 bp, Homo sapien
cagtgaataggtctccaaaggacagagtctgca

SEQ ID NO: 136218 - DNA, 33 bp, Homo sapien
cagtgaataggtctccgaaggacagagtctgca

SEQ ID NO: 136219 - DNA, 33 bp, Homo sapien
acttttactggaaccaatgacaaagatccactc

SEQ ID NO: 136220 - DNA, 33 bp, Homo sapien
acttttactggaaccattgacaaagatccactc

SEQ ID NO: 136221 - DNA, 33 bp, Homo sapien
ttctggattttggactaaactaaatgggagaag

SEQ ID NO: 136222 - DNA, 33 bp, Homo sapien
ttctggattttggactcaactaaatgggagaag

SEQ ID NO: 136223 - DNA, 33 bp, Homo sapien
acttgtgaaccctctgaacattcagtcgccaca

SEQ ID NO: 136224 - DNA, 33 bp, Homo sapien
acttgtgaaccctctggacattcagtcgccaca

SEQ ID NO: 136225 - DNA, 33 bp, Homo sapien
catgtattcaattgccacagggtcttttccaaa

SEQ ID NO: 136226 - DNA, 33 bp, Homo sapien
catgtattcaattgccgcagggtcttttccaaa

SEQ ID NO: 136227 - DNA, 33 bp, Homo sapien
ttaagtattgagggataagttacagtggaaata

SEQ ID NO: 136228 - DNA, 33 bp, Homo sapien
ttaagtattgagggatgagttacagtggaaata

SEQ ID NO: 136229 - DNA, 33 bp, Homo sapien
aacatagctttctttacgtttgttgctaaatag

SEQ ID NO: 136230 - DNA, 33 bp, Homo sapien
aacatagctttctttatgtttgttgctaaatag

SEQ ID NO: 136231 - DNA, 33 bp, Homo sapien
ctgtgactccatgaaggagccggtcagttggaa

SEQ ID NO: 136232 - DNA, 33 bp, Homo sapien
ctgtgactccatgaagtagccggtcagttggaa

SEQ ID NO: 136233 - DNA, 33 bp, Homo sapien
agagaattatccaacacagtaattggtgcctaa

SEQ ID NO: 136234 - DNA, 33 bp, Homo sapien
agagaattatccaacatagtaattggtgcctaa

SEQ ID NO: 136235 - DNA, 33 bp, Homo sapien
attactaattttcaaaactgatggcccattaga

SEQ ID NO: 136236 - DNA, 33 bp, Homo sapien
attactaattttcaaacctgatggcccattaga

SEQ ID NO: 136237 - DNA, 33 bp, Homo sapien
tggaaatatgaatggacggccaccagctatagg

SEQ ID NO: 136238 - DNA, 33 bp, Homo sapien
tggaaatatgaatggatggccaccagctatagg

SEQ ID NO: 136239 - DNA, 33 bp, Homo sapien
tctcagcttatatatcacctcttccaggaagtg

SEQ ID NO: 136240 - DNA, 33 bp, Homo sapien
tctcagcttatatatcccctcttccaggaagtg

SEQ ID NO: 136241 - DNA, 33 bp, Homo sapien
agtctcttggttgccaaaagcttactcaactag

SEQ ID NO: 136242 - DNA, 33 bp, Homo sapien
agtctcttggttgccacaagcttactcaactag

SEQ ID NO: 136243 - DNA, 33 bp, Homo sapien
gtactgaaaaatgcaacgctgtgtagttcttgc

SEQ ID NO: 136244 - DNA, 33 bp, Homo sapien
gtactgaaaaatgcaatgctgtgtagttcttgc

SEQ ID NO: 136245 - DNA, 33 bp, Homo sapien
taaacatcttacaggacaatctcctacgacaaa

SEQ ID NO: 136246 - DNA, 33 bp, Homo sapien
taaacatcttacaggataatctcctacgacaaa

SEQ ID NO: 136247 - DNA, 33 bp, Homo sapien
tgtgatttaatatgccaagactagcccttgata

SEQ ID NO: 136248 - DNA, 33 bp, Homo sapien
tgtgatttaatatgccgagactagcccttgata

SEQ ID NO: 136249 - DNA, 33 bp, Homo sapien
tatattgtggaaaaagactgtgatttaatatgc

SEQ ID NO: 136250 - DNA, 33 bp, Homo sapien
tatattgtggaaaaagtctgtgatttaatatgc

SEQ ID NO: 136251 - DNA, 33 bp, Homo sapien
agaaatcttcatttcactacaaacttctctaga

SEQ ID NO: 136252 - DNA, 33 bp, Homo sapien
agaaatcttcatttcattacaaacttctctaga

SEQ ID NO: 136253 - DNA, 33 bp, Homo sapien
caacgtattctaaaccactcttgcctggctaga

SEQ ID NO: 136254 - DNA, 33 bp, Homo sapien
caacgtattctaaaccgctcttgcctggctaga

SEQ ID NO: 136255 - DNA, 33 bp, Homo sapien
agagcgggttgagcaacggtaagagtggaggaa

SEQ ID NO: 136256 - DNA, 33 bp, Homo sapien
agagcgggttgagcaatggtaagagtggaggaa

SEQ ID NO: 136257 - DNA, 33 bp, Homo sapien
catcaaaagtttgtgacatttcaggttcttgat

SEQ ID NO: 136258 - DNA, 33 bp, Homo sapien
catcaaaagtttgtgatatttcaggttcttgat

SEQ ID NO: 136259 - DNA, 33 bp, Homo sapien
tgagaaaattaaatagaaagtaatggagcatac

SEQ ID NO: 136260 - DNA, 33 bp, Homo sapien
tgagaaaattaaataggaagtaatggagcatac

SEQ ID NO: 136261 - DNA, 33 bp, Homo sapien
aaagtggcatatgaaaaaaattaatttcattaa

SEQ ID NO: 136262 - DNA, 33 bp, Homo sapien
aaagtggcatatgaaacaaattaatttcattaa

SEQ ID NO: 136263 - DNA, 33 bp, Homo sapien
aatatatgaagctgtcagaaaagagccaccctg

SEQ ID NO: 136264 - DNA, 33 bp, Homo sapien
aatatatgaagctgtcggaaaagagccaccctg

SEQ ID NO: 136265 - DNA, 33 bp, Homo sapien
taaatgggaggagaaacggtgaaagactaaaag

SEQ ID NO: 136266 - DNA, 33 bp, Homo sapien
taaatgggaggagaaatggtgaaagactaaaag

SEQ ID NO: 136267 - DNA, 33 bp, Homo sapien
agaggaaattaacagaccttttagtctttcacc

SEQ ID NO: 136268 - DNA, 33 bp, Homo sapien
agaggaaattaacagatcttttagtctttcacc

SEQ ID NO: 136269 - DNA, 33 bp, Homo sapien
tcatgtaggacttttgaaattcaaatttaactc

SEQ ID NO: 136270 - DNA, 33 bp, Homo sapien
tcatgtaggacttttggaattcaaatttaactc

SEQ ID NO: 136271 - DNA, 33 bp, Homo sapien
ccaggtcagcttcactaaggcacctcactgact

SEQ ID NO: 136272 - DNA, 33 bp, Homo sapien
ccaggtcagcttcactgaggcacctcactgact

SEQ ID NO: 136273 - DNA, 33 bp, Homo sapien
aggactcatgaaggtaagatagaggagagagca

SEQ ID NO: 136274 - DNA, 33 bp, Homo sapien
aggactcatgaaggtaggatagaggagagagca

SEQ ID NO: 136275 - DNA, 33 bp, Homo sapien
tgttgaaggcagatcaagttagtaatatgtttc

SEQ ID NO: 136276 - DNA, 33 bp, Homo sapien
tgttgaaggcagatcaggttagtaatatgtttc

SEQ ID NO: 136277 - DNA, 33 bp, Homo sapien
accatattgtatttgccaatttttagtggatct

SEQ ID NO: 136278 - DNA, 33 bp, Homo sapien
accatattgtatttgctaatttttagtggatct

SEQ ID NO: 136279 - DNA, 33 bp, Homo sapien
aaccacagagaagagaagtatgtgtcaggtagt

SEQ ID NO: 136280 - DNA, 33 bp, Homo sapien
aaccacagagaagagaggtatgtgtcaggtagt

SEQ ID NO: 136281 - DNA, 33 bp, Homo sapien
ctgtgctctaacactgaacattcatgtagcttt

SEQ ID NO: 136282 - DNA, 33 bp, Homo sapien
ctgtgctctaacactgcacattcatgtagcttt

SEQ ID NO: 136283 - DNA, 33 bp, Homo sapien
aggcagcaggaggaaactgaagtgcagacatta

SEQ ID NO: 136284 - DNA, 33 bp, Homo sapien
aggcagcaggaggaaattgaagtgcagacatta

SEQ ID NO: 136285 - DNA, 33 bp, Homo sapien
agagactctgcacaaaatcctcgggctctcaac

SEQ ID NO: 136286 - DNA, 33 bp, Homo sapien
agagactctgcacaaagtcctcgggctctcaac

SEQ ID NO: 136287 - DNA, 33 bp, Homo sapien
agtcatatggtatagaagcctacttcctctcag

SEQ ID NO: 136288 - DNA, 33 bp, Homo sapien
agtcatatggtatagaggcctacttcctctcag

SEQ ID NO: 136289 - DNA, 33 bp, Homo sapien
cgaagcccacctttacacctaaattacactgca

SEQ ID NO: 136290 - DNA, 33 bp, Homo sapien
cgaagcccacctttacgcctaaattacactgca

SEQ ID NO: 136291 - DNA, 33 bp, Homo sapien
cacattcagtatctaccaagtcttagcccctca

SEQ ID NO: 136292 - DNA, 33 bp, Homo sapien
cacattcagtatctactaagtcttagcccctca

SEQ ID NO: 136293 - DNA, 33 bp, Homo sapien
tgattgtccaccaacccgcaagacaaaagagga

SEQ ID NO: 136294 - DNA, 33 bp, Homo sapien
tgattgtccaccaacctgcaagacaaaagagga

SEQ ID NO: 136295 - DNA, 33 bp, Homo sapien
ctagagcttgaggcaaatatctgatgaagactg

SEQ ID NO: 136296 - DNA, 33 bp, Homo sapien
ctagagcttgaggcaagtatctgatgaagactg

SEQ ID NO: 136297 - DNA, 33 bp, Homo sapien
gaactgttaactgagacggcttcgagtcttcct

SEQ ID NO: 136298 - DNA, 33 bp, Homo sapien
gaactgttaactgagatggcttcgagtcttcct

SEQ ID NO: 136299 - DNA, 33 bp, Homo sapien
aacatggtacaaggtaactgccaaagccttcca

SEQ ID NO: 136300 - DNA, 33 bp, Homo sapien
aacatggtacaaggtagctgccaaagccttcca

SEQ ID NO: 136301 - DNA, 33 bp, Homo sapien
gatggaaacggtatcacgatggtggaaaaccta

SEQ ID NO: 136302 - DNA, 33 bp, Homo sapien
gatggaaacggtatcatgatggtggaaaaccta

SEQ ID NO: 136303 - DNA, 33 bp, Homo sapien
acaaattaccaaactcaagcaataatcactcca

SEQ ID NO: 136304 - DNA, 33 bp, Homo sapien
acaaattaccaaactccagcaataatcactcca

SEQ ID NO: 136305 - DNA, 33 bp, Homo sapien
gtgatatcccaaagacggatgaacaatgtaaat

SEQ ID NO: 136306 - DNA, 33 bp, Homo sapien
gtgatatcccaaagactgatgaacaatgtaaat

SEQ ID NO: 136307 - DNA, 33 bp, Homo sapien
agctttaaataagagacgttagaggatgactgg

SEQ ID NO: 136308 - DNA, 33 bp, Homo sapien
agctttaaataagagatgttagaggatgactgg

SEQ ID NO: 136309 - DNA, 33 bp, Homo sapien
ggtggactagattttaacatggacaaacccaga

SEQ ID NO: 136310 - DNA, 33 bp, Homo sapien
ggtggactagattttatcatggacaaacccaga

SEQ ID NO: 136311 - DNA, 33 bp, Homo sapien
aagatagctgcagcaaagtaattgtcctcgtta

SEQ ID NO: 136312 - DNA, 33 bp, Homo sapien
aagatagctgcagcaaggtaattgtcctcgtta

SEQ ID NO: 136313 - DNA, 33 bp, Homo sapien
aggggtgttataggcactgatgagtcattttaa

SEQ ID NO: 136314 - DNA, 33 bp, Homo sapien
aggggtgttataggcattgatgagtcattttaa

SEQ ID NO: 136315 - DNA, 33 bp, Homo sapien
ggactggggttcaaaacttctgggtactgagta

SEQ ID NO: 136316 - DNA, 33 bp, Homo sapien
ggactggggttcaaaatttctgggtactgagta

SEQ ID NO: 136317 - DNA, 33 bp, Homo sapien
agaggttacaaccagcccttcggtcagagactt

SEQ ID NO: 136318 - DNA, 33 bp, Homo sapien
agaggttacaaccagctcttcggtcagagactt

SEQ ID NO: 136319 - DNA, 33 bp, Homo sapien
cactgatagcctctgaaataaccccactcccag

SEQ ID NO: 136320 - DNA, 33 bp, Homo sapien
cactgatagcctctgagataaccccactcccag

SEQ ID NO: 136321 - DNA, 33 bp, Homo sapien
aaaagagactttgcaagtatgaacaagttttgc

SEQ ID NO: 136322 - DNA, 33 bp, Homo sapien
aaaagagactttgcaattatgaacaagttttgc

SEQ ID NO: 136323 - DNA, 33 bp, Homo sapien
ccagcctgagaatacccgggcagtagctggtag

SEQ ID NO: 136324 - DNA, 33 bp, Homo sapien
ccagcctgagaatacctgggcagtagctggtag

SEQ ID NO: 136325 - DNA, 33 bp, Homo sapien
ctctctctctcttcaacgaaatgaatacacatg

SEQ ID NO: 136326 - DNA, 33 bp, Homo sapien
ctctctctctcttcaatgaaatgaatacacatg

SEQ ID NO: 136327 - DNA, 33 bp, Homo sapien
tacgtttgggatttcaagggagctgatagcatc

SEQ ID NO: 136328 - DNA, 33 bp, Homo sapien
tacgtttgggatttcaggggagctgatagcatc

SEQ ID NO: 136329 - DNA, 33 bp, Homo sapien
caccccttaatttacacgatcttagtgcttttc

SEQ ID NO: 136330 - DNA, 33 bp, Homo sapien
caccccttaatttacatgatcttagtgcttttc

SEQ ID NO: 136331 - DNA, 33 bp, Homo sapien
ttgttgcactcgaatgcaatctgtgctcatgca

SEQ ID NO: 136332 - DNA, 33 bp, Homo sapien
ttgttgcactcgaatggaatctgtgctcatgca

SEQ ID NO: 136333 - DNA, 33 bp, Homo sapien
caaatttgaattgcaaagagagcaaggtatttt

SEQ ID NO: 136334 - DNA, 33 bp, Homo sapien
caaatttgaattgcaatgagagcaaggtatttt

SEQ ID NO: 136335 - DNA, 33 bp, Homo sapien
ggtcatcggaaagcctcaataagaatggtgaca

SEQ ID NO: 136336 - DNA, 33 bp, Homo sapien
ggtcatcggaaagcctgaataagaatggtgaca

SEQ ID NO: 136337 - DNA, 33 bp, Homo sapien
tcatccagtatccacccccatagtctgcagaac

SEQ ID NO: 136338 - DNA, 33 bp, Homo sapien
tcatccagtatccacctccatagtctgcagaac

SEQ ID NO: 136339 - DNA, 33 bp, Homo sapien
agttgctccatgtgaaatagcggtgaaaaaaac

SEQ ID NO: 136340 - DNA, 33 bp, Homo sapien
agttgctccatgtgaagtagcggtgaaaaaaac

SEQ ID NO: 136341 - DNA, 33 bp, Homo sapien
cattttctcattcctgcagaagcatctccctac

SEQ ID NO: 136342 - DNA, 33 bp, Homo sapien
cattttctcattcctgtagaagcatctccctac

SEQ ID NO: 136343 - DNA, 33 bp, Homo sapien
ctcaggcaatggtcacactaggcaaaggcttct

SEQ ID NO: 136344 - DNA, 33 bp, Homo sapien
ctcaggcaatggtcacgctaggcaaaggcttct

SEQ ID NO: 136345 - DNA, 33 bp, Homo sapien
gatcttaacctccagaaggaaaacagtaggcaa

SEQ ID NO: 136346 - DNA, 33 bp, Homo sapien
gatcttaacctccagatggaaaacagtaggcaa

SEQ ID NO: 136347 - DNA, 33 bp, Homo sapien
aggaaaccgacagaacccacaaacacctgctgg

SEQ ID NO: 136348 - DNA, 33 bp, Homo sapien
aggaaaccgacagaacgcacaaacacctgctgg

SEQ ID NO: 136349 - DNA, 33 bp, Homo sapien
ctggtttcttttaaagccatgtgagcatactgg

SEQ ID NO: 136350 - DNA, 33 bp, Homo sapien
ctggtttcttttaaagtcatgtgagcatactgg

SEQ ID NO: 136351 - DNA, 33 bp, Homo sapien
tttataggaaagtgtcagaagttaattgaagaa

SEQ ID NO: 136352 - DNA, 33 bp, Homo sapien
tttataggaaagtgtcggaagttaattgaagaa

SEQ ID NO: 136353 - DNA, 33 bp, Homo sapien
cccaattgaagtctaacggctttccttcaacaa

SEQ ID NO: 136354 - DNA, 33 bp, Homo sapien
cccaattgaagtctaagggctttccttcaacaa

SEQ ID NO: 136355 - DNA, 33 bp, Homo sapien
ggaccaccacccttcaccgtgctgcccatgact

SEQ ID NO: 136356 - DNA, 33 bp, Homo sapien
ggaccaccacccttcatcgtgctgcccatgact

SEQ ID NO: 136357 - DNA, 33 bp, Homo sapien
cacagtgagctttaacaattgaacagatttgac

SEQ ID NO: 136358 - DNA, 33 bp, Homo sapien
cacagtgagctttaacgattgaacagatttgac

SEQ ID NO: 136359 - DNA, 33 bp, Homo sapien
cactgaaatctgaaacagtcaagccataacctc

SEQ ID NO: 136360 - DNA, 33 bp, Homo sapien
cactgaaatctgaaacggtcaagccataacctc

SEQ ID NO: 136361 - DNA, 33 bp, Homo sapien
aggttggggagtgaaccgctttcaaatcacatt

SEQ ID NO: 136362 - DNA, 33 bp, Homo sapien
aggttggggagtgaactgctttcaaatcacatt

SEQ ID NO: 136363 - DNA, 33 bp, Homo sapien
agataagggaataaaaagctgcgtgggctaaca

SEQ ID NO: 136364 - DNA, 33 bp, Homo sapien
agataagggaataaaaggctgcgtgggctaaca

SEQ ID NO: 136365 - DNA, 33 bp, Homo sapien
taattaaggtaccttacctaagatttcagcact

SEQ ID NO: 136366 - DNA, 33 bp, Homo sapien
taattaaggtaccttatctaagatttcagcact

SEQ ID NO: 136367 - DNA, 33 bp, Homo sapien
ccttccaaggctgttcaaaataccaaatacaaa

SEQ ID NO: 136368 - DNA, 33 bp, Homo sapien
ccttccaaggctgttcgaaataccaaatacaaa

SEQ ID NO: 136369 - DNA, 33 bp, Homo sapien
ctactgtcatttctaccgggcagctgagacctt

SEQ ID NO: 136370 - DNA, 33 bp, Homo sapien
ctactgtcatttctactgggcagctgagacctt

SEQ ID NO: 136371 - DNA, 33 bp, Homo sapien
gctgtattccgtatcacacaacaacagttgagg

SEQ ID NO: 136372 - DNA, 33 bp, Homo sapien
gctgtattccgtatcagacaacaacagttgagg

SEQ ID NO: 136373 - DNA, 33 bp, Homo sapien
aattaggacactaagacagagctggaagaactt

SEQ ID NO: 136374 - DNA, 33 bp, Homo sapien
aattaggacactaagagagagctggaagaactt

SEQ ID NO: 136375 - DNA, 33 bp, Homo sapien
cccgaactgaagagaaacttgctgtcatcaccc

SEQ ID NO: 136376 - DNA, 33 bp, Homo sapien
cccgaactgaagagaaccttgctgtcatcaccc

SEQ ID NO: 136377 - DNA, 33 bp, Homo sapien
gcagccctaagagccacgatcttccagtttgat

SEQ ID NO: 136378 - DNA, 33 bp, Homo sapien
gcagccctaagagccatgatcttccagtttgat

SEQ ID NO: 136379 - DNA, 33 bp, Homo sapien
ctgtttttgtttagtaatgatgccttgcagtcc

SEQ ID NO: 136380 - DNA, 33 bp, Homo sapien
ctgtttttgtttagtattgatgccttgcagtcc

SEQ ID NO: 136381 - DNA, 33 bp, Homo sapien
caatttgagagaaaggcaactagcgaggagagt

SEQ ID NO: 136382 - DNA, 33 bp, Homo sapien
caatttgagagaaaggtaactagcgaggagagt

SEQ ID NO: 136383 - DNA, 33 bp, Homo sapien
cactcaaaccctattcaaagtctgttcccatct

SEQ ID NO: 136384 - DNA, 33 bp, Homo sapien
cactcaaaccctattcgaagtctgttcccatct

SEQ ID NO: 136385 - DNA, 33 bp, Homo sapien
tgtactaaatactgcccgattgtacattttaaa

SEQ ID NO: 136386 - DNA, 33 bp, Homo sapien
tgtactaaatactgcctgattgtacattttaaa

SEQ ID NO: 136387 - DNA, 33 bp, Homo sapien
tgtgggggcaggaacaatcacaagaaaccctgg

SEQ ID NO: 136388 - DNA, 33 bp, Homo sapien
tgtgggggcaggaacagtcacaagaaaccctgg

SEQ ID NO: 136389 - DNA, 33 bp, Homo sapien
gtatttcacagaagagcaaatggacgctttggg

SEQ ID NO: 136390 - DNA, 33 bp, Homo sapien
gtatttcacagaagagtaaatggacgctttggg

SEQ ID NO: 136391 - DNA, 33 bp, Homo sapien
caagaagaggtaagacaggttgaggtctggtga

SEQ ID NO: 136392 - DNA, 33 bp, Homo sapien
caagaagaggtaagacgggttgaggtctggtga

SEQ ID NO: 136393 - DNA, 33 bp, Homo sapien
gagatggtagtggtaaaaggtcagatctcagtg

SEQ ID NO: 136394 - DNA, 33 bp, Homo sapien
gagatggtagtggtaagaggtcagatctcagtg

SEQ ID NO: 136395 - DNA, 33 bp, Homo sapien
aatgtaaattagtatcaaaagtgagagctataa

SEQ ID NO: 136396 - DNA, 33 bp, Homo sapien
aatgtaaattagtatccaaagtgagagctataa

SEQ ID NO: 136397 - DNA, 33 bp, Homo sapien
acggataaaagttacacggccagaatgtcaccc

SEQ ID NO: 136398 - DNA, 33 bp, Homo sapien
acggataaaagttacatggccagaatgtcaccc

SEQ ID NO: 136399 - DNA, 33 bp, Homo sapien
aacatctatctgaagactccgatggggcctgta

SEQ ID NO: 136400 - DNA, 33 bp, Homo sapien
aacatctatctgaagagtccgatggggcctgta

SEQ ID NO: 136401 - DNA, 33 bp, Homo sapien
tttcctggacatataagagaagctcaaatcctt

SEQ ID NO: 136402 - DNA, 33 bp, Homo sapien
tttcctggacatataatagaagctcaaatcctt

SEQ ID NO: 136403 - DNA, 33 bp, Homo sapien
ctaatacagacagcataacatcattgtgtggat

SEQ ID NO: 136404 - DNA, 33 bp, Homo sapien
ctaatacagacagcatgacatcattgtgtggat

SEQ ID NO: 136405 - DNA, 33 bp, Homo sapien
cagctgtatggacttcgaagtggataatatata

SEQ ID NO: 136406 - DNA, 33 bp, Homo sapien
cagctgtatggacttctaagtggataatatata

SEQ ID NO: 136407 - DNA, 33 bp, Homo sapien
ttcttctgatcactgacgacaggttcgctataa

SEQ ID NO: 136408 - DNA, 33 bp, Homo sapien
ttcttctgatcactgatgacaggttcgctataa

SEQ ID NO: 136409 - DNA, 33 bp, Homo sapien
catcaccttttaacacacaatattgatagaatc

SEQ ID NO: 136410 - DNA, 33 bp, Homo sapien
catcaccttttaacacgcaatattgatagaatc

SEQ ID NO: 136411 - DNA, 33 bp, Homo sapien
tcttgtaacttgcataacctggaaacgtttctt

SEQ ID NO: 136412 - DNA, 33 bp, Homo sapien
tcttgtaacttgcatagcctggaaacgtttctt

SEQ ID NO: 136413 - DNA, 33 bp, Homo sapien
aacagaaaggaagcaagaattgaagtgtaagat

SEQ ID NO: 136414 - DNA, 33 bp, Homo sapien
aacagaaaggaagcaataattgaagtgtaagat

SEQ ID NO: 136415 - DNA, 33 bp, Homo sapien
cagggcttggcataaccaatccactagactcag

SEQ ID NO: 136416 - DNA, 33 bp, Homo sapien
cagggcttggcataactaatccactagactcag

SEQ ID NO: 136417 - DNA, 33 bp, Homo sapien
gcctttcttatgactaacgtctatgtccctggg

SEQ ID NO: 136418 - DNA, 33 bp, Homo sapien
gcctttcttatgactatcgtctatgtccctggg

SEQ ID NO: 136419 - DNA, 33 bp, Homo sapien
cacaatcacctttcaactaataggcttcaattt

SEQ ID NO: 136420 - DNA, 33 bp, Homo sapien
cacaatcacctttcaattaataggcttcaattt

SEQ ID NO: 136421 - DNA, 33 bp, Homo sapien
gctttgttaaaacatacacatttggccaggcgc

SEQ ID NO: 136422 - DNA, 33 bp, Homo sapien
gctttgttaaaacatatacatttggccaggcgc

SEQ ID NO: 136423 - DNA, 33 bp, Homo sapien
ctacatgagcccaaaacactgtgcatttaatgc

SEQ ID NO: 136424 - DNA, 33 bp, Homo sapien
ctacatgagcccaaaagactgtgcatttaatgc

SEQ ID NO: 136425 - DNA, 33 bp, Homo sapien
tcagactcaaagggccacatgatttggatctat

SEQ ID NO: 136426 - DNA, 33 bp, Homo sapien
tcagactcaaagggccgcatgatttggatctat

SEQ ID NO: 136427 - DNA, 33 bp, Homo sapien
atggcatgtcagcatacgaaagttatcaaatat

SEQ ID NO: 136428 - DNA, 33 bp, Homo sapien
atggcatgtcagcatatgaaagttatcaaatat

SEQ ID NO: 136429 - DNA, 33 bp, Homo sapien
ataaaattattagacacgtgaagaagcaatgga

SEQ ID NO: 136430 - DNA, 33 bp, Homo sapien
ataaaattattagacatgtgaagaagcaatgga

SEQ ID NO: 136431 - DNA, 33 bp, Homo sapien
gaaaataaacagccagaaatacaatttgacgaa

SEQ ID NO: 136432 - DNA, 33 bp, Homo sapien
gaaaataaacagccaggaatacaatttgacgaa

SEQ ID NO: 136433 - DNA, 33 bp, Homo sapien
ttaaattgggactagaatagattttgccagaga

SEQ ID NO: 136434 - DNA, 33 bp, Homo sapien
ttaaattgggactagagtagattttgccagaga

SEQ ID NO: 136435 - DNA, 33 bp, Homo sapien
ttctctgctaggtttacgaggacttgaaatcat

SEQ ID NO: 136436 - DNA, 33 bp, Homo sapien
ttctctgctaggtttatgaggacttgaaatcat

SEQ ID NO: 136437 - DNA, 33 bp, Homo sapien
tcatacttcattgccaaatagttttaaatgcta

SEQ ID NO: 136438 - DNA, 33 bp, Homo sapien
tcatacttcattgccatatagttttaaatgcta

SEQ ID NO: 136439 - DNA, 33 bp, Homo sapien
acatcggatttgtagccaagctaggtaatggga

SEQ ID NO: 136440 - DNA, 33 bp, Homo sapien
acatcggatttgtagctaagctaggtaatggga

SEQ ID NO: 136441 - DNA, 33 bp, Homo sapien
tgccatcccgcacagccacgtttccacagtgga

SEQ ID NO: 136442 - DNA, 33 bp, Homo sapien
tgccatcccgcacagctacgtttccacagtgga

SEQ ID NO: 136443 - DNA, 33 bp, Homo sapien
tggcttctgtgaggaacgttttgtactttgtct

SEQ ID NO: 136444 - DNA, 33 bp, Homo sapien
tggcttctgtgaggaatgttttgtactttgtct

SEQ ID NO: 136445 - DNA, 33 bp, Homo sapien
ttttgcaatccaaatacctagaaggcaatgatt

SEQ ID NO: 136446 - DNA, 33 bp, Homo sapien
ttttgcaatccaaatatctagaaggcaatgatt

SEQ ID NO: 136447 - DNA, 33 bp, Homo sapien
tattgataatggccaaaggtacagcagttttct

SEQ ID NO: 136448 - DNA, 33 bp, Homo sapien
tattgataatggccaatggtacagcagttttct

SEQ ID NO: 136449 - DNA, 33 bp, Homo sapien
attgtgtgttttcaagaatgttaacgttcatct

SEQ ID NO: 136450 - DNA, 33 bp, Homo sapien
attgtgtgttttcaaggatgttaacgttcatct

SEQ ID NO: 136451 - DNA, 33 bp, Homo sapien
ttacatatccttatccgcatgagttagacatac

SEQ ID NO: 136452 - DNA, 33 bp, Homo sapien
ttacatatccttatcctcatgagttagacatac

SEQ ID NO: 136453 - DNA, 33 bp, Homo sapien
ctatgtcaccatgagacctggagaagggctcac

SEQ ID NO: 136454 - DNA, 33 bp, Homo sapien
ctatgtcaccatgagatctggagaagggctcac

SEQ ID NO: 136455 - DNA, 33 bp, Homo sapien
agtcattcttggaccaaaagtctttaaaatcac

SEQ ID NO: 136456 - DNA, 33 bp, Homo sapien
agtcattcttggaccacaagtctttaaaatcac

SEQ ID NO: 136457 - DNA, 33 bp, Homo sapien
catgattgattttctacgtgtggtagaccccct

SEQ ID NO: 136458 - DNA, 33 bp, Homo sapien
catgattgattttctatgtgtggtagaccccct

SEQ ID NO: 136459 - DNA, 33 bp, Homo sapien
gaggaagctgtataaagaatttgccaaggaaaa

SEQ ID NO: 136460 - DNA, 33 bp, Homo sapien
gaggaagctgtataaataatttgccaaggaaaa

SEQ ID NO: 136461 - DNA, 33 bp, Homo sapien
attcggaaagataagcacctgtcattttcttgt

SEQ ID NO: 136462 - DNA, 33 bp, Homo sapien
attcggaaagataagcgcctgtcattttcttgt

SEQ ID NO: 136463 - DNA, 33 bp, Homo sapien
atctccaacaaaaaataaatacatcttctggaa

SEQ ID NO: 136464 - DNA, 33 bp, Homo sapien
atctccaacaaaaaatgaatacatcttctggaa

SEQ ID NO: 136465 - DNA, 33 bp, Homo sapien
tacagggtctgtgaccaaatacattgagaaact

SEQ ID NO: 136466 - DNA, 33 bp, Homo sapien
tacagggtctgtgaccgaatacattgagaaact

SEQ ID NO: 136467 - DNA, 33 bp, Homo sapien
gtacagtgtggtggaacggttcccagattagga

SEQ ID NO: 136468 - DNA, 33 bp, Homo sapien
gtacagtgtggtggaatggttcccagattagga

SEQ ID NO: 136469 - DNA, 33 bp, Homo sapien
gggtgcttctttactaaatgagagtattcctca

SEQ ID NO: 136470 - DNA, 33 bp, Homo sapien
gggtgcttctttactacatgagagtattcctca

SEQ ID NO: 136471 - DNA, 33 bp, Homo sapien
agctaggcctagaactgaaaatcaatattccca

SEQ ID NO: 136472 - DNA, 33 bp, Homo sapien
agctaggcctagaacttaaaatcaatattccca

SEQ ID NO: 136473 - DNA, 33 bp, Homo sapien
agacctctcctctcaggactcaccatgttggtc

SEQ ID NO: 136474 - DNA, 33 bp, Homo sapien
agacctctcctctcagtactcaccatgttggtc

SEQ ID NO: 136475 - DNA, 33 bp, Homo sapien
ttctaggagtctcctacggacatttgccggagt

SEQ ID NO: 136476 - DNA, 33 bp, Homo sapien
ttctaggagtctcctatggacatttgccggagt

SEQ ID NO: 136477 - DNA, 33 bp, Homo sapien
ttctgaaaggttctaaatgctggcttaaacctt

SEQ ID NO: 136478 - DNA, 33 bp, Homo sapien
ttctgaaaggttctaagtgctggcttaaacctt

SEQ ID NO: 136479 - DNA, 33 bp, Homo sapien
aaagtgcttgcttttacaaaccacatttggccc

SEQ ID NO: 136480 - DNA, 33 bp, Homo sapien
aaagtgcttgcttttagaaaccacatttggccc

SEQ ID NO: 136481 - DNA, 33 bp, Homo sapien
tggggaagattgttcaagtgcaatctcttctga

SEQ ID NO: 136482 - DNA, 33 bp, Homo sapien
tggggaagattgttcaggtgcaatctcttctga

SEQ ID NO: 136483 - DNA, 33 bp, Homo sapien
gtccttatgtgttaaacggaaagcaacattcaa

SEQ ID NO: 136484 - DNA, 33 bp, Homo sapien
gtccttatgtgttaaatggaaagcaacattcaa

SEQ ID NO: 136485 - DNA, 33 bp, Homo sapien
gactaggatctattgggatactcatatagactg

SEQ ID NO: 136486 - DNA, 33 bp, Homo sapien
gactaggatctattggtatactcatatagactg

SEQ ID NO: 136487 - DNA, 33 bp, Homo sapien
ataacagtatgacaaaattgaatattgttgtgc

SEQ ID NO: 136488 - DNA, 33 bp, Homo sapien
ataacagtatgacaaatttgaatattgttgtgc

SEQ ID NO: 136489 - DNA, 33 bp, Homo sapien
aaaatcagagcattcaataaaaggctttggtac

SEQ ID NO: 136490 - DNA, 33 bp, Homo sapien
aaaatcagagcattcagtaaaaggctttggtac

SEQ ID NO: 136491 - DNA, 33 bp, Homo sapien
ttccccaggctaactcaaaagtaactctaacaa

SEQ ID NO: 136492 - DNA, 33 bp, Homo sapien
ttccccaggctaactcgaaagtaactctaacaa

SEQ ID NO: 136493 - DNA, 33 bp, Homo sapien
taatgataataacaaacacctcaatgtttcctg

SEQ ID NO: 136494 - DNA, 33 bp, Homo sapien
taatgataataacaaatacctcaatgtttcctg

SEQ ID NO: 136495 - DNA, 33 bp, Homo sapien
tcagaacgcaccagagcagtgcaagaagtattg

SEQ ID NO: 136496 - DNA, 33 bp, Homo sapien
tcagaacgcaccagagtagtgcaagaagtattg

SEQ ID NO: 136497 - DNA, 33 bp, Homo sapien
taaatatatcaactcacgtaactaaatagtcca

SEQ ID NO: 136498 - DNA, 33 bp, Homo sapien
taaatatatcaactcatgtaactaaatagtcca

SEQ ID NO: 136499 - DNA, 33 bp, Homo sapien
acccatccataagtgaactgagatgcgagacgg

SEQ ID NO: 136500 - DNA, 33 bp, Homo sapien
acccatccataagtgatctgagatgcgagacgg

SEQ ID NO: 136501 - DNA, 33 bp, Homo sapien
ttcggacatctttaaccgatttgggaattaaat

SEQ ID NO: 136502 - DNA, 33 bp, Homo sapien
ttcggacatctttaactgatttgggaattaaat

SEQ ID NO: 136503 - DNA, 33 bp, Homo sapien
ggaaaatgaattccgacgtgctagtttctttag

SEQ ID NO: 136504 - DNA, 33 bp, Homo sapien
ggaaaatgaattccgatgtgctagtttctttag

SEQ ID NO: 136505 - DNA, 33 bp, Homo sapien
acctatgttttaaaaaaaatctgtgcaggtgac

SEQ ID NO: 136506 - DNA, 33 bp, Homo sapien
acctatgttttaaaaagaatctgtgcaggtgac

SEQ ID NO: 136507 - DNA, 33 bp, Homo sapien
tctctctcacgagcacaagtgaaataccacagc

SEQ ID NO: 136508 - DNA, 33 bp, Homo sapien
tctctctcacgagcaccagtgaaataccacagc

SEQ ID NO: 136509 - DNA, 33 bp, Homo sapien
tcttagtgcagtgatacgtatattttaaaattg

SEQ ID NO: 136510 - DNA, 33 bp, Homo sapien
tcttagtgcagtgatatgtatattttaaaattg

SEQ ID NO: 136511 - DNA, 33 bp, Homo sapien
acattcatcaatcttccatcttttgtgttaggt

SEQ ID NO: 136512 - DNA, 33 bp, Homo sapien
acattcatcaatcttctatcttttgtgttaggt

SEQ ID NO: 136513 - DNA, 33 bp, Homo sapien
tagccaatatttgaaaatgactacaaatcatgt

SEQ ID NO: 136514 - DNA, 33 bp, Homo sapien
tagccaatatttgaaagtgactacaaatcatgt

SEQ ID NO: 136515 - DNA, 33 bp, Homo sapien
ttgagagtacagagaccgaagtaggtaagacta

SEQ ID NO: 136516 - DNA, 33 bp, Homo sapien
ttgagagtacagagactgaagtaggtaagacta

SEQ ID NO: 136517 - DNA, 33 bp, Homo sapien
tgcacttttgctaccaatgcgctacttcttcgt

SEQ ID NO: 136518 - DNA, 33 bp, Homo sapien
tgcacttttgctaccagtgcgctacttcttcgt

SEQ ID NO: 136519 - DNA, 33 bp, Homo sapien
acattctttaccgccaaagaaagcaggttcatt

SEQ ID NO: 136520 - DNA, 33 bp, Homo sapien
acattctttaccgccagagaaagcaggttcatt

SEQ ID NO: 136521 - DNA, 33 bp, Homo sapien
tacaggtctgtgtaaacaagttacattgattac

SEQ ID NO: 136522 - DNA, 33 bp, Homo sapien
tacaggtctgtgtaaagaagttacattgattac

SEQ ID NO: 136523 - DNA, 33 bp, Homo sapien
tccatgccatccaaaagttcttcagttcttact

SEQ ID NO: 136524 - DNA, 33 bp, Homo sapien
tccatgccatccaaaatttcttcagttcttact

SEQ ID NO: 136525 - DNA, 33 bp, Homo sapien
tctctaaccagatcgacgctacagtttgtgaga

SEQ ID NO: 136526 - DNA, 33 bp, Homo sapien
tctctaaccagatcgaggctacagtttgtgaga

SEQ ID NO: 136527 - DNA, 33 bp, Homo sapien
tcacaaggtgagttgcacgcagtgggagctgca

SEQ ID NO: 136528 - DNA, 33 bp, Homo sapien
tcacaaggtgagttgcgcgcagtgggagctgca

SEQ ID NO: 136529 - DNA, 33 bp, Homo sapien
agaaatggaaaactcaagttctagccaagtcct

SEQ ID NO: 136530 - DNA, 33 bp, Homo sapien
agaaatggaaaactcaggttctagccaagtcct

SEQ ID NO: 136531 - DNA, 33 bp, Homo sapien
ggctgtacaggtaatcaaacttgtgatgtcatt

SEQ ID NO: 136532 - DNA, 33 bp, Homo sapien
ggctgtacaggtaatcgaacttgtgatgtcatt

SEQ ID NO: 136533 - DNA, 33 bp, Homo sapien
ctatcagccttcccagcaaaacgtgcataatag

SEQ ID NO: 136534 - DNA, 33 bp, Homo sapien
ctatcagccttcccaggaaaacgtgcataatag

SEQ ID NO: 136535 - DNA, 33 bp, Homo sapien
cacgttcagctctggaatacaaggctttttggg

SEQ ID NO: 136536 - DNA, 33 bp, Homo sapien
cacgttcagctctggagtacaaggctttttggg

SEQ ID NO: 136537 - DNA, 33 bp, Homo sapien
acagaacaatccataacataaactgacaaatgc

SEQ ID NO: 136538 - DNA, 33 bp, Homo sapien
acagaacaatccataatataaactgacaaatgc

SEQ ID NO: 136539 - DNA, 33 bp, Homo sapien
gactgttgagtttacaatacgacagaactgtgt

SEQ ID NO: 136540 - DNA, 33 bp, Homo sapien
gactgttgagtttacagtacgacagaactgtgt

SEQ ID NO: 136541 - DNA, 33 bp, Homo sapien
gaatagtagaaagtcaatcgtcctaaccatgca

SEQ ID NO: 136542 - DNA, 33 bp, Homo sapien
gaatagtagaaagtcagtcgtcctaaccatgca

SEQ ID NO: 136543 - DNA, 33 bp, Homo sapien
aagtggccttgcaagacacttcactccctgttt

SEQ ID NO: 136544 - DNA, 33 bp, Homo sapien
aagtggccttgcaagatacttcactccctgttt

SEQ ID NO: 136545 - DNA, 33 bp, Homo sapien
gataagcctgaccttacagacaaatgttgaggg

SEQ ID NO: 136546 - DNA, 33 bp, Homo sapien
gataagcctgaccttatagacaaatgttgaggg

SEQ ID NO: 136547 - DNA, 33 bp, Homo sapien
aaattgctaggtacaactgagaaacacatgggg

SEQ ID NO: 136548 - DNA, 33 bp, Homo sapien
aaattgctaggtacaagtgagaaacacatgggg

SEQ ID NO: 136549 - DNA, 33 bp, Homo sapien
actcctagaccaaagcagagaggaagtgatggg

SEQ ID NO: 136550 - DNA, 33 bp, Homo sapien
actcctagaccaaagcggagaggaagtgatggg

SEQ ID NO: 136551 - DNA, 33 bp, Homo sapien
cctttcatcaagggccacagatcccagctacag

SEQ ID NO: 136552 - DNA, 33 bp, Homo sapien
cctttcatcaagggccgcagatcccagctacag

SEQ ID NO: 136553 - DNA, 33 bp, Homo sapien
tgtctttggggagaaacaaagagactgactttt

SEQ ID NO: 136554 - DNA, 33 bp, Homo sapien
tgtctttggggagaaataaagagactgactttt

SEQ ID NO: 136555 - DNA, 33 bp, Homo sapien
tcagaggacaaaatggaatcagtatgacaacag

SEQ ID NO: 136556 - DNA, 33 bp, Homo sapien
tcagaggacaaaatgggatcagtatgacaacag

SEQ ID NO: 136557 - DNA, 33 bp, Homo sapien
ctgttttgggattaacaaatggctgttctgtaa

SEQ ID NO: 136558 - DNA, 33 bp, Homo sapien
ctgttttgggattaacgaatggctgttctgtaa

SEQ ID NO: 136559 - DNA, 33 bp, Homo sapien
ctccaactaagctaacagtacctagagggcagg

SEQ ID NO: 136560 - DNA, 33 bp, Homo sapien
ctccaactaagctaacggtacctagagggcagg

SEQ ID NO: 136561 - DNA, 33 bp, Homo sapien
aaaaaaaaatcacagcaacaaagaaagggtgaa

SEQ ID NO: 136562 - DNA, 33 bp, Homo sapien
aaaaaaaaatcacagctacaaagaaagggtgaa

SEQ ID NO: 136563 - DNA, 33 bp, Homo sapien
gctagaggtcaaaggcagaaactcaatgacctc

SEQ ID NO: 136564 - DNA, 33 bp, Homo sapien
gctagaggtcaaaggcggaaactcaatgacctc

SEQ ID NO: 136565 - DNA, 33 bp, Homo sapien
attcaacctgggatcacgaactgcacttagttt

SEQ ID NO: 136566 - DNA, 33 bp, Homo sapien
attcaacctgggatcatgaactgcacttagttt

SEQ ID NO: 136567 - DNA, 33 bp, Homo sapien
aaacatggcagaagcacggtgttataagattta

SEQ ID NO: 136568 - DNA, 33 bp, Homo sapien
aaacatggcagaagcagggtgttataagattta

SEQ ID NO: 136569 - DNA, 33 bp, Homo sapien
agtcagttctcatcaccagtgttccttctctcc

SEQ ID NO: 136570 - DNA, 33 bp, Homo sapien
agtcagttctcatcactagtgttccttctctcc

SEQ ID NO: 136571 - DNA, 33 bp, Homo sapien
atgtccattggctgaagaataggtaaacaaaat

SEQ ID NO: 136572 - DNA, 33 bp, Homo sapien
atgtccattggctgaataataggtaaacaaaat

SEQ ID NO: 136573 - DNA, 33 bp, Homo sapien
attcaacatcattaccacctttgggacaccctc

SEQ ID NO: 136574 - DNA, 33 bp, Homo sapien
attcaacatcattaccgcctttgggacaccctc

SEQ ID NO: 136575 - DNA, 33 bp, Homo sapien
agtgtaaggaatataccggcagatttgctacag

SEQ ID NO: 136576 - DNA, 33 bp, Homo sapien
agtgtaaggaatatacgggcagatttgctacag

SEQ ID NO: 136577 - DNA, 33 bp, Homo sapien
ctaatttcagcatcacaagaacccatgagatag

SEQ ID NO: 136578 - DNA, 33 bp, Homo sapien
ctaatttcagcatcacgagaacccatgagatag

SEQ ID NO: 136579 - DNA, 33 bp, Homo sapien
ttctggcttatcttggcaaatcagaaggtctca

SEQ ID NO: 136580 - DNA, 33 bp, Homo sapien
ttctggcttatcttggtaaatcagaaggtctca

SEQ ID NO: 136581 - DNA, 33 bp, Homo sapien
caaaataagtgaaaaacagcaaagttgcggtaa

SEQ ID NO: 136582 - DNA, 33 bp, Homo sapien
caaaataagtgaaaaatagcaaagttgcggtaa

SEQ ID NO: 136583 - DNA, 33 bp, Homo sapien
cacgttaggaacatgcacttggataaaatccaa

SEQ ID NO: 136584 - DNA, 33 bp, Homo sapien
cacgttaggaacatgcgcttggataaaatccaa

SEQ ID NO: 136585 - DNA, 33 bp, Homo sapien
ggggttagatagattgcatgccctaactccact

SEQ ID NO: 136586 - DNA, 33 bp, Homo sapien
ggggttagatagattgtatgccctaactccact

SEQ ID NO: 136587 - DNA, 33 bp, Homo sapien
tgagctccgaagtggccctgaagatccttggag

SEQ ID NO: 136588 - DNA, 33 bp, Homo sapien
tgagctccgaagtggctctgaagatccttggag

SEQ ID NO: 136589 - DNA, 33 bp, Homo sapien
tgttcctggaaactacaccctactcagtggatg

SEQ ID NO: 136590 - DNA, 33 bp, Homo sapien
tgttcctggaaactaccccctactcagtggatg

SEQ ID NO: 136591 - DNA, 33 bp, Homo sapien
gtggaggcaagagaatgattacaaaaagcaagc

SEQ ID NO: 136592 - DNA, 33 bp, Homo sapien
gtggaggcaagagaattattacaaaaagcaagc

SEQ ID NO: 136593 - DNA, 33 bp, Homo sapien
catctggtaacaggcaactcattttaaagaact

SEQ ID NO: 136594 - DNA, 33 bp, Homo sapien
catctggtaacaggcatctcattttaaagaact

SEQ ID NO: 136595 - DNA, 33 bp, Homo sapien
gagactggtgatttacaggagctcacccagaag

SEQ ID NO: 136596 - DNA, 33 bp, Homo sapien
gagactggtgatttacgggagctcacccagaag

SEQ ID NO: 136597 - DNA, 33 bp, Homo sapien
ggaaaggaagtggaaacagaagaagagctggtg

SEQ ID NO: 136598 - DNA, 33 bp, Homo sapien
ggaaaggaagtggaaagagaagaagagctggtg

SEQ ID NO: 136599 - DNA, 33 bp, Homo sapien
actggagattgcaggcaaaatagtgagctttaa

SEQ ID NO: 136600 - DNA, 33 bp, Homo sapien
actggagattgcaggcgaaatagtgagctttaa

SEQ ID NO: 136601 - DNA, 33 bp, Homo sapien
gttgagattaggaagaaaacttacaaaacagca

SEQ ID NO: 136602 - DNA, 33 bp, Homo sapien
gttgagattaggaagagaacttacaaaacagca

SEQ ID NO: 136603 - DNA, 33 bp, Homo sapien
aaagatacatcttcgccagtcacggtagctcaa

SEQ ID NO: 136604 - DNA, 33 bp, Homo sapien
aaagatacatcttcgctagtcacggtagctcaa

SEQ ID NO: 136605 - DNA, 33 bp, Homo sapien
tgaactgagtcttgaaaaatagaagacttggat

SEQ ID NO: 136606 - DNA, 33 bp, Homo sapien
tgaactgagtcttgaacaatagaagacttggat

SEQ ID NO: 136607 - DNA, 33 bp, Homo sapien
actggggaaagtgacaacctactcaaaaggaaa

SEQ ID NO: 136608 - DNA, 33 bp, Homo sapien
actggggaaagtgacagcctactcaaaaggaaa

SEQ ID NO: 136609 - DNA, 33 bp, Homo sapien
tcctccataaagttgacaggaaaaatactaagt

SEQ ID NO: 136610 - DNA, 33 bp, Homo sapien
tcctccataaagttgataggaaaaatactaagt

SEQ ID NO: 136611 - DNA, 33 bp, Homo sapien
ctcccttaaagtaggcaactattcagcaatctc

SEQ ID NO: 136612 - DNA, 33 bp, Homo sapien
ctcccttaaagtaggcgactattcagcaatctc

SEQ ID NO: 136613 - DNA, 33 bp, Homo sapien
tatacagtgaagaaaaagactactgctacattg

SEQ ID NO: 136614 - DNA, 33 bp, Homo sapien
tatacagtgaagaaaacgactactgctacattg

SEQ ID NO: 136615 - DNA, 33 bp, Homo sapien
aaagctaaatacatagccgcccaaaagagaaag

SEQ ID NO: 136616 - DNA, 33 bp, Homo sapien
aaagctaaatacatagtcgcccaaaagagaaag

SEQ ID NO: 136617 - DNA, 33 bp, Homo sapien
gattctcatttagggactaggtcagtgtttcac

SEQ ID NO: 136618 - DNA, 33 bp, Homo sapien
gattctcatttagggattaggtcagtgtttcac

SEQ ID NO: 136619 - DNA, 33 bp, Homo sapien
gtgtttcacaagctcaagtatcacctggagggc

SEQ ID NO: 136620 - DNA, 33 bp, Homo sapien
gtgtttcacaagctcacgtatcacctggagggc

SEQ ID NO: 136621 - DNA, 33 bp, Homo sapien
aattagtgacagcaagacaggaatttgtggcct

SEQ ID NO: 136622 - DNA, 33 bp, Homo sapien
aattagtgacagcaaggcaggaatttgtggcct

SEQ ID NO: 136623 - DNA, 33 bp, Homo sapien
gtgagttcctacacaaaatagaaccacaagagg

SEQ ID NO: 136624 - DNA, 33 bp, Homo sapien
gtgagttcctacacaagatagaaccacaagagg

SEQ ID NO: 136625 - DNA, 33 bp, Homo sapien
ggtatcataaaatctacgggcttttgtgtctgt

SEQ ID NO: 136626 - DNA, 33 bp, Homo sapien
ggtatcataaaatctatgggcttttgtgtctgt

SEQ ID NO: 136627 - DNA, 33 bp, Homo sapien
cttgacaagggccccaaatcacttcggtcgcca

SEQ ID NO: 136628 - DNA, 33 bp, Homo sapien
cttgacaagggccccatatcacttcggtcgcca

SEQ ID NO: 136629 - DNA, 33 bp, Homo sapien
gcccagacatagcagcaatgagagggcctcagg

SEQ ID NO: 136630 - DNA, 33 bp, Homo sapien
gcccagacatagcagcgatgagagggcctcagg

SEQ ID NO: 136631 - DNA, 33 bp, Homo sapien
tgcaggcagcagcttagagtagtacacccagca

SEQ ID NO: 136632 - DNA, 33 bp, Homo sapien
tgcaggcagcagcttatagtagtacacccagca

SEQ ID NO: 136633 - DNA, 33 bp, Homo sapien
ttcaaccttgaaggataaaccatgtaaatgaag

SEQ ID NO: 136634 - DNA, 33 bp, Homo sapien
ttcaaccttgaaggatgaaccatgtaaatgaag

SEQ ID NO: 136635 - DNA, 33 bp, Homo sapien
atactgtcctctcttacctttcacaaggtcttg

SEQ ID NO: 136636 - DNA, 33 bp, Homo sapien
atactgtcctctcttatctttcacaaggtcttg

SEQ ID NO: 136637 - DNA, 33 bp, Homo sapien
gaagctttggacatctgacatagactctatcat

SEQ ID NO: 136638 - DNA, 33 bp, Homo sapien
gaagctttggacatcttacatagactctatcat

SEQ ID NO: 136639 - DNA, 33 bp, Homo sapien
caacatttataactaccagcagtatgtaagaga

SEQ ID NO: 136640 - DNA, 33 bp, Homo sapien
caacatttataactacgagcagtatgtaagaga

SEQ ID NO: 136641 - DNA, 33 bp, Homo sapien
catagagttaatcagcaagacaagaaatgacaa

SEQ ID NO: 136642 - DNA, 33 bp, Homo sapien
catagagttaatcagcgagacaagaaatgacaa

SEQ ID NO: 136643 - DNA, 33 bp, Homo sapien
gtgctctgctcttgcaaggctctatctaaatag

SEQ ID NO: 136644 - DNA, 33 bp, Homo sapien
gtgctctgctcttgcagggctctatctaaatag

SEQ ID NO: 136645 - DNA, 33 bp, Homo sapien
taagagggaaattggaaattgaagtttcaaaag

SEQ ID NO: 136646 - DNA, 33 bp, Homo sapien
taagagggaaattggagattgaagtttcaaaag

SEQ ID NO: 136647 - DNA, 33 bp, Homo sapien
ttttacctggacagcaaaaaaggtctcaggccc

SEQ ID NO: 136648 - DNA, 33 bp, Homo sapien
ttttacctggacagcagaaaaggtctcaggccc

SEQ ID NO: 136649 - DNA, 33 bp, Homo sapien
agtgggtatgcaagaccctggaaaataggaaat

SEQ ID NO: 136650 - DNA, 33 bp, Homo sapien
agtgggtatgcaagactctggaaaataggaaat

SEQ ID NO: 136651 - DNA, 33 bp, Homo sapien
ggccagaaatgatcccagcttctccgcgtctgt

SEQ ID NO: 136652 - DNA, 33 bp, Homo sapien
ggccagaaatgatcccggcttctccgcgtctgt

SEQ ID NO: 136653 - DNA, 33 bp, Homo sapien
tcagagtcttgggtaccgagaaaatcatacctt

SEQ ID NO: 136654 - DNA, 33 bp, Homo sapien
tcagagtcttgggtactgagaaaatcatacctt

SEQ ID NO: 136655 - DNA, 33 bp, Homo sapien
tgtctggttgagaaacagttctgaaactcaggg

SEQ ID NO: 136656 - DNA, 33 bp, Homo sapien
tgtctggttgagaaactgttctgaaactcaggg

SEQ ID NO: 136657 - DNA, 33 bp, Homo sapien
ttaagtgcccgagttcacagagaatgtttggga

SEQ ID NO: 136658 - DNA, 33 bp, Homo sapien
ttaagtgcccgagttcgcagagaatgtttggga

SEQ ID NO: 136659 - DNA, 33 bp, Homo sapien
ggcaaaatttcacagacggcagggagaatcatc

SEQ ID NO: 136660 - DNA, 33 bp, Homo sapien
ggcaaaatttcacagatggcagggagaatcatc

SEQ ID NO: 136661 - DNA, 33 bp, Homo sapien
gtgtgcaaaataataccgggagaggtgttagta

SEQ ID NO: 136662 - DNA, 33 bp, Homo sapien
gtgtgcaaaataatactgggagaggtgttagta

SEQ ID NO: 136663 - DNA, 33 bp, Homo sapien
tacatacccgctgacaggaaagaaagcagacca

SEQ ID NO: 136664 - DNA, 33 bp, Homo sapien
tacatacccgctgacatgaaagaaagcagacca

SEQ ID NO: 136665 - DNA, 33 bp, Homo sapien
aagttgtcctgagcaaatcttcctcttaaggaa

SEQ ID NO: 136666 - DNA, 33 bp, Homo sapien
aagttgtcctgagcaattcttcctcttaaggaa

SEQ ID NO: 136667 - DNA, 33 bp, Homo sapien
gcacttagcattccgcaaccatggtccccagag

SEQ ID NO: 136668 - DNA, 33 bp, Homo sapien
gcacttagcattccgcgaccatggtccccagag

SEQ ID NO: 136669 - DNA, 33 bp, Homo sapien
aatatgtaacacctaaaatggaggactcgacag

SEQ ID NO: 136670 - DNA, 33 bp, Homo sapien
aatatgtaacacctaacatggaggactcgacag

SEQ ID NO: 136671 - DNA, 33 bp, Homo sapien
ccagattatttgactaacttttgcaacttaaaa

SEQ ID NO: 136672 - DNA, 33 bp, Homo sapien
ccagattatttgactatcttttgcaacttaaaa

SEQ ID NO: 136673 - DNA, 33 bp, Homo sapien
atgggaagccaagaccagagaagggcctggaaa

SEQ ID NO: 136674 - DNA, 33 bp, Homo sapien
atgggaagccaagaccggagaagggcctggaaa

SEQ ID NO: 136675 - DNA, 33 bp, Homo sapien
agttctgttctaacccacggtggtacagtgaga

SEQ ID NO: 136676 - DNA, 33 bp, Homo sapien
agttctgttctaacccgcggtggtacagtgaga

SEQ ID NO: 136677 - DNA, 33 bp, Homo sapien
ctgcggaacctaatccagaacataaggtccttt

SEQ ID NO: 136678 - DNA, 33 bp, Homo sapien
ctgcggaacctaatccggaacataaggtccttt

SEQ ID NO: 136679 - DNA, 33 bp, Homo sapien
ttggagtgttatcagccatggttctgacaatat

SEQ ID NO: 136680 - DNA, 33 bp, Homo sapien
ttggagtgttatcagctatggttctgacaatat

SEQ ID NO: 136681 - DNA, 33 bp, Homo sapien
catttactgaaatctacgcccttttgtgtgatc

SEQ ID NO: 136682 - DNA, 33 bp, Homo sapien
catttactgaaatctaggcccttttgtgtgatc

SEQ ID NO: 136683 - DNA, 33 bp, Homo sapien
tggcagagatactggaggatagtgtgtttctga

SEQ ID NO: 136684 - DNA, 33 bp, Homo sapien
tggcagagatactggatgatagtgtgtttctga

SEQ ID NO: 136685 - DNA, 33 bp, Homo sapien
ataaatacagcaaaaggaatattcaaaactcat

SEQ ID NO: 136686 - DNA, 33 bp, Homo sapien
ataaatacagcaaaagtaatattcaaaactcat

SEQ ID NO: 136687 - DNA, 33 bp, Homo sapien
tttaagctagaagctaagtgatatacatcatgt

SEQ ID NO: 136688 - DNA, 33 bp, Homo sapien
tttaagctagaagctatgtgatatacatcatgt

SEQ ID NO: 136689 - DNA, 33 bp, Homo sapien
gagtcagagcagaatgaattgtgatgaagcaga

SEQ ID NO: 136690 - DNA, 33 bp, Homo sapien
gagtcagagcagaatgcattgtgatgaagcaga

SEQ ID NO: 136691 - DNA, 33 bp, Homo sapien
atgcgtacatgtatgacgagatgttcacccaat

SEQ ID NO: 136692 - DNA, 33 bp, Homo sapien
atgcgtacatgtatgatgagatgttcacccaat

SEQ ID NO: 136693 - DNA, 33 bp, Homo sapien
tggcaaaaatcctccaaccaggcccaggtgaca

SEQ ID NO: 136694 - DNA, 33 bp, Homo sapien
tggcaaaaatcctccacccaggcccaggtgaca

SEQ ID NO: 136695 - DNA, 33 bp, Homo sapien
atgtctgtctgcatacaacacaccaggatgggg

SEQ ID NO: 136696 - DNA, 33 bp, Homo sapien
atgtctgtctgcatacgacacaccaggatgggg

SEQ ID NO: 136697 - DNA, 33 bp, Homo sapien
ttgactagactcaaaacgaacctctttgattcc

SEQ ID NO: 136698 - DNA, 33 bp, Homo sapien
ttgactagactcaaaatgaacctctttgattcc

SEQ ID NO: 136699 - DNA, 33 bp, Homo sapien
agaacaaatattagaaagctaaaatacccacat

SEQ ID NO: 136700 - DNA, 33 bp, Homo sapien
agaacaaatattagaaggctaaaatacccacat

SEQ ID NO: 136701 - DNA, 33 bp, Homo sapien
ggagtggagtagaaacaagcctgtgcaaagatg

SEQ ID NO: 136702 - DNA, 33 bp, Homo sapien
ggagtggagtagaaaccagcctgtgcaaagatg

SEQ ID NO: 136703 - DNA, 33 bp, Homo sapien
tacccaactagtctcgcccatgccctgcagttt

SEQ ID NO: 136704 - DNA, 33 bp, Homo sapien
tacccaactagtctcgtccatgccctgcagttt

SEQ ID NO: 136705 - DNA, 33 bp, Homo sapien
ttccgtttgtgggtcaatatcccttcccccaag

SEQ ID NO: 136706 - DNA, 33 bp, Homo sapien
ttccgtttgtgggtcagtatcccttcccccaag

SEQ ID NO: 136707 - DNA, 33 bp, Homo sapien
aggctggttgataacccaagttaatcatatctt

SEQ ID NO: 136708 - DNA, 33 bp, Homo sapien
aggctggttgataaccgaagttaatcatatctt

SEQ ID NO: 136709 - DNA, 33 bp, Homo sapien
tgtgcgtgttccaaagcctatttatagtggaca

SEQ ID NO: 136710 - DNA, 33 bp, Homo sapien
tgtgcgtgttccaaaggctatttatagtggaca

SEQ ID NO: 136711 - DNA, 33 bp, Homo sapien
tgaattgtgaacaagaagggaagatcctgggtc

SEQ ID NO: 136712 - DNA, 33 bp, Homo sapien
tgaattgtgaacaagatgggaagatcctgggtc

SEQ ID NO: 136713 - DNA, 33 bp, Homo sapien
aaatggaataggatagaaacttctagttacccc

SEQ ID NO: 136714 - DNA, 33 bp, Homo sapien
aaatggaataggataggaacttctagttacccc

SEQ ID NO: 136715 - DNA, 33 bp, Homo sapien
caagattgaccgtggcgcttttcagttaatcca

SEQ ID NO: 136716 - DNA, 33 bp, Homo sapien
caagattgaccgtggctcttttcagttaatcca

SEQ ID NO: 136717 - DNA, 33 bp, Homo sapien
cagaggcacctgccaaatgacacagctcagact

SEQ ID NO: 136718 - DNA, 33 bp, Homo sapien
cagaggcacctgccaagtgacacagctcagact

SEQ ID NO: 136719 - DNA, 33 bp, Homo sapien
ttatccatctagtaagcatttgcattctttgtg

SEQ ID NO: 136720 - DNA, 33 bp, Homo sapien
ttatccatctagtaagtatttgcattctttgtg

SEQ ID NO: 136721 - DNA, 33 bp, Homo sapien
ggatgcaaccctgaagaagataggataaaaaaa

SEQ ID NO: 136722 - DNA, 33 bp, Homo sapien
ggatgcaaccctgaaggagataggataaaaaaa

SEQ ID NO: 136723 - DNA, 33 bp, Homo sapien
agctcctcaggcaaaaacgacagaaggaaacta

SEQ ID NO: 136724 - DNA, 33 bp, Homo sapien
agctcctcaggcaaaagcgacagaaggaaacta

SEQ ID NO: 136725 - DNA, 33 bp, Homo sapien
ccagggtagcagatacaacacccatgtgccaca

SEQ ID NO: 136726 - DNA, 33 bp, Homo sapien
ccagggtagcagatacgacacccatgtgccaca

SEQ ID NO: 136727 - DNA, 33 bp, Homo sapien
ccccaaaacacaaggcagaaattatggtttccc

SEQ ID NO: 136728 - DNA, 33 bp, Homo sapien
ccccaaaacacaaggcggaaattatggtttccc

SEQ ID NO: 136729 - DNA, 33 bp, Homo sapien
attttttgaggagctgaactcccagtgggcttg

SEQ ID NO: 136730 - DNA, 33 bp, Homo sapien
attttttgaggagctggactcccagtgggcttg

SEQ ID NO: 136731 - DNA, 33 bp, Homo sapien
tcatactattctccaccgcacaacaatgtcagt

SEQ ID NO: 136732 - DNA, 33 bp, Homo sapien
tcatactattctccactgcacaacaatgtcagt

SEQ ID NO: 136733 - DNA, 33 bp, Homo sapien
cacagaagaaaaggagaccagaagaggctcttg

SEQ ID NO: 136734 - DNA, 33 bp, Homo sapien
cacagaagaaaaggagcccagaagaggctcttg

SEQ ID NO: 136735 - DNA, 33 bp, Homo sapien
ctcaatctcactcaaccgccttgttccctgcat

SEQ ID NO: 136736 - DNA, 33 bp, Homo sapien
ctcaatctcactcaacggccttgttccctgcat

SEQ ID NO: 136737 - DNA, 33 bp, Homo sapien
atattttactctttgaagtctttggattcaaaa

SEQ ID NO: 136738 - DNA, 33 bp, Homo sapien
atattttactctttgaggtctttggattcaaaa

SEQ ID NO: 136739 - DNA, 33 bp, Homo sapien
caaacagtccataaaaacctgccttaaaataat

SEQ ID NO: 136740 - DNA, 33 bp, Homo sapien
caaacagtccataaaaccctgccttaaaataat

SEQ ID NO: 136741 - DNA, 33 bp, Homo sapien
tagcatgaattaaagaggtggtgagtctatgaa

SEQ ID NO: 136742 - DNA, 33 bp, Homo sapien
tagcatgaattaaagatgtggtgagtctatgaa

SEQ ID NO: 136743 - DNA, 33 bp, Homo sapien
caggaggacaggtttaaagggacaggcttctca

SEQ ID NO: 136744 - DNA, 33 bp, Homo sapien
caggaggacaggtttagagggacaggcttctca

SEQ ID NO: 136745 - DNA, 33 bp, Homo sapien
gtgtcaatggctccacaatgttcactctggtga

SEQ ID NO: 136746 - DNA, 33 bp, Homo sapien
gtgtcaatggctccacgatgttcactctggtga

SEQ ID NO: 136747 - DNA, 33 bp, Homo sapien
attaccagttcaaaaaaacctcaagccccagat

SEQ ID NO: 136748 - DNA, 33 bp, Homo sapien
attaccagttcaaaaagacctcaagccccagat

SEQ ID NO: 136749 - DNA, 33 bp, Homo sapien
aaccatgattctgggacggaattaacaagcagg

SEQ ID NO: 136750 - DNA, 33 bp, Homo sapien
aaccatgattctgggatggaattaacaagcagg

SEQ ID NO: 136751 - DNA, 33 bp, Homo sapien
tctactaacatgttcccactgcatcttctctgg

SEQ ID NO: 136752 - DNA, 33 bp, Homo sapien
tctactaacatgttcctactgcatcttctctgg

SEQ ID NO: 136753 - DNA, 33 bp, Homo sapien
gagtctgttactaagacggtaagaagttagagg

SEQ ID NO: 136754 - DNA, 33 bp, Homo sapien
gagtctgttactaagatggtaagaagttagagg

SEQ ID NO: 136755 - DNA, 33 bp, Homo sapien
cttctccattgggccacgctgagtatctggacc

SEQ ID NO: 136756 - DNA, 33 bp, Homo sapien
cttctccattgggccatgctgagtatctggacc

SEQ ID NO: 136757 - DNA, 33 bp, Homo sapien
tgtccaccggaccccaaaatcctctaggcagac

SEQ ID NO: 136758 - DNA, 33 bp, Homo sapien
tgtccaccggaccccagaatcctctaggcagac

SEQ ID NO: 136759 - DNA, 33 bp, Homo sapien
accatgcaactctagcacccatagctcactagc

SEQ ID NO: 136760 - DNA, 33 bp, Homo sapien
accatgcaactctagcgcccatagctcactagc

SEQ ID NO: 136761 - DNA, 33 bp, Homo sapien
gcatggcagagcaaaaatactgacagagtctga

SEQ ID NO: 136762 - DNA, 33 bp, Homo sapien
gcatggcagagcaaaagtactgacagagtctga

SEQ ID NO: 136763 - DNA, 33 bp, Homo sapien
atggagaactgagttaggattcaaaaatggttt

SEQ ID NO: 136764 - DNA, 33 bp, Homo sapien
atggagaactgagttatgattcaaaaatggttt

SEQ ID NO: 136765 - DNA, 33 bp, Homo sapien
tccacttctagaaccaactgaatcttatggctc

SEQ ID NO: 136766 - DNA, 33 bp, Homo sapien
tccacttctagaaccatctgaatcttatggctc

SEQ ID NO: 136767 - DNA, 33 bp, Homo sapien
catgagcaacatgagacagaataaagttggaga

SEQ ID NO: 136768 - DNA, 33 bp, Homo sapien
catgagcaacatgagatagaataaagttggaga

SEQ ID NO: 136769 - DNA, 33 bp, Homo sapien
ctgttgcagaggttgaaataaggaattgcaccc

SEQ ID NO: 136770 - DNA, 33 bp, Homo sapien
ctgttgcagaggttgagataaggaattgcaccc

SEQ ID NO: 136771 - DNA, 33 bp, Homo sapien
catagtgttgaaactcaaataacccaaagcagc

SEQ ID NO: 136772 - DNA, 33 bp, Homo sapien
catagtgttgaaactcgaataacccaaagcagc

SEQ ID NO: 136773 - DNA, 33 bp, Homo sapien
ataatagtagcaaaacgcagaatatcttcagtg

SEQ ID NO: 136774 - DNA, 33 bp, Homo sapien
ataatagtagcaaaactcagaatatcttcagtg

SEQ ID NO: 136775 - DNA, 33 bp, Homo sapien
taatctgtttcacacccgagtgttgtttttctt

SEQ ID NO: 136776 - DNA, 33 bp, Homo sapien
taatctgtttcacacctgagtgttgtttttctt

SEQ ID NO: 136777 - DNA, 33 bp, Homo sapien
tggacttgaagggccaacattgacttagacagg

SEQ ID NO: 136778 - DNA, 33 bp, Homo sapien
tggacttgaagggccagcattgacttagacagg

SEQ ID NO: 136779 - DNA, 33 bp, Homo sapien
tatatacaaccaaagccacacatgtatatcagg

SEQ ID NO: 136780 - DNA, 33 bp, Homo sapien
tatatacaaccaaagctacacatgtatatcagg

SEQ ID NO: 136781 - DNA, 33 bp, Homo sapien
atacaagtatacccaaccggtttggtcatttgc

SEQ ID NO: 136782 - DNA, 33 bp, Homo sapien
atacaagtatacccaatcggtttggtcatttgc

SEQ ID NO: 136783 - DNA, 33 bp, Homo sapien
tgaagaatatattaaaaattcctgatagcgacg

SEQ ID NO: 136784 - DNA, 33 bp, Homo sapien
tgaagaatatattaaacattcctgatagcgacg

SEQ ID NO: 136785 - DNA, 33 bp, Homo sapien
ttttatgactaagccactcactaatcccctcaa

SEQ ID NO: 136786 - DNA, 33 bp, Homo sapien
ttttatgactaagccattcactaatcccctcaa

SEQ ID NO: 136787 - DNA, 33 bp, Homo sapien
atggcatcacttttcaccactttctgcttagga

SEQ ID NO: 136788 - DNA, 33 bp, Homo sapien
atggcatcacttttcatcactttctgcttagga

SEQ ID NO: 136789 - DNA, 33 bp, Homo sapien
catcttctaatgataaacatgaggttgaggatc

SEQ ID NO: 136790 - DNA, 33 bp, Homo sapien
catcttctaatgataatcatgaggttgaggatc

SEQ ID NO: 136791 - DNA, 33 bp, Homo sapien
cacaagtcaaggcttaagcttctactgccattt

SEQ ID NO: 136792 - DNA, 33 bp, Homo sapien
cacaagtcaaggcttaggcttctactgccattt

SEQ ID NO: 136793 - DNA, 33 bp, Homo sapien
atgaagaaagaaacagaaatatggcgcatgcta

SEQ ID NO: 136794 - DNA, 33 bp, Homo sapien
atgaagaaagaaacagcaatatggcgcatgcta

SEQ ID NO: 136795 - DNA, 33 bp, Homo sapien
aattgcagaatagagcactcatcgggtcaaaga

SEQ ID NO: 136796 - DNA, 33 bp, Homo sapien
aattgcagaatagagcgctcatcgggtcaaaga

SEQ ID NO: 136797 - DNA, 33 bp, Homo sapien
ttcttgaaaaacaaagccactgtggcaataata

SEQ ID NO: 136798 - DNA, 33 bp, Homo sapien
ttcttgaaaaacaaagtcactgtggcaataata

SEQ ID NO: 136799 - DNA, 33 bp, Homo sapien
tatcgataaccaatgacggcacctaaagttcaa

SEQ ID NO: 136800 - DNA, 33 bp, Homo sapien
tatcgataaccaatgatggcacctaaagttcaa

SEQ ID NO: 136801 - DNA, 33 bp, Homo sapien
gagggatgtcacagatgaaaacacgagtttcac

SEQ ID NO: 136802 - DNA, 33 bp, Homo sapien
gagggatgtcacagattaaaacacgagtttcac

SEQ ID NO: 136803 - DNA, 33 bp, Homo sapien
cttctggccagaagtcactgagacaagtgcctg

SEQ ID NO: 136804 - DNA, 33 bp, Homo sapien
cttctggccagaagtccctgagacaagtgcctg

SEQ ID NO: 136805 - DNA, 33 bp, Homo sapien
gaagatgtgtctatacggctcccaagtttccgc

SEQ ID NO: 136806 - DNA, 33 bp, Homo sapien
gaagatgtgtctatactgctcccaagtttccgc

SEQ ID NO: 136807 - DNA, 33 bp, Homo sapien
aaggtccataaatacacgagttttcaagacaaa

SEQ ID NO: 136808 - DNA, 33 bp, Homo sapien
aaggtccataaatacatgagttttcaagacaaa

SEQ ID NO: 136809 - DNA, 33 bp, Homo sapien
cagttgcttctagtaaagtccaactgaatcaaa

SEQ ID NO: 136810 - DNA, 33 bp, Homo sapien
cagttgcttctagtaatgtccaactgaatcaaa

SEQ ID NO: 136811 - DNA, 33 bp, Homo sapien
gtgcaaggtaggaaaacaccaacaagcatttat

SEQ ID NO: 136812 - DNA, 33 bp, Homo sapien
gtgcaaggtaggaaaagaccaacaagcatttat

SEQ ID NO: 136813 - DNA, 33 bp, Homo sapien
gggctttttattgcaggacttcttggagccttt

SEQ ID NO: 136814 - DNA, 33 bp, Homo sapien
gggctttttattgcagtacttcttggagccttt

SEQ ID NO: 136815 - DNA, 33 bp, Homo sapien
aattcagaccagaaaacggagagtaaggaaggg

SEQ ID NO: 136816 - DNA, 33 bp, Homo sapien
aattcagaccagaaaatggagagtaaggaaggg

SEQ ID NO: 136817 - DNA, 33 bp, Homo sapien
cccctgattggcttgacacaatgagaccttcct

SEQ ID NO: 136818 - DNA, 33 bp, Homo sapien
cccctgattggcttgagacaatgagaccttcct

SEQ ID NO: 136819 - DNA, 33 bp, Homo sapien
agtcacatggactacgcatgcaactgatgtggc

SEQ ID NO: 136820 - DNA, 33 bp, Homo sapien
agtcacatggactacggatgcaactgatgtggc

SEQ ID NO: 136821 - DNA, 33 bp, Homo sapien
agcagtggaattgtggcccaaatatgccatttg

SEQ ID NO: 136822 - DNA, 33 bp, Homo sapien
agcagtggaattgtgggccaaatatgccatttg

SEQ ID NO: 136823 - DNA, 33 bp, Homo sapien
tttgtgctctgaacaccggagagaaagtatttg

SEQ ID NO: 136824 - DNA, 33 bp, Homo sapien
tttgtgctctgaacactggagagaaagtatttg

SEQ ID NO: 136825 - DNA, 33 bp, Homo sapien; identical to SEQ ID NO: 136823

SEQ ID NO: 136826 - DNA, 33 bp, Homo sapien; identical to SEQ ID NO: 136824

SEQ ID NO: 136827 - DNA, 33 bp, Homo sapien
agtatttggtgataaaggtccctgcttttacag

SEQ ID NO: 136828 - DNA, 33 bp, Homo sapien
agtatttggtgataaatgtccctgcttttacag

SEQ ID NO: 136829 - DNA, 33 bp, Homo sapien; identical to SEQ ID NO: 136827

SEQ ID NO: 136830 - DNA, 33 bp, Homo sapien; identical to SEQ ID NO: 136828

SEQ ID NO: 136831 - DNA, 33 bp, Homo sapien
atgcagccactaaaaccgacatcaattcagatt

SEQ ID NO: 136832 - DNA, 33 bp, Homo sapien
atgcagccactaaaacggacatcaattcagatt

SEQ ID NO: 136833 - DNA, 33 bp, Homo sapien
actctgggcagactacaaatcagtccttagggg

SEQ ID NO: 136834 - DNA, 33 bp, Homo sapien
actctgggcagactacgaatcagtccttagggg

SEQ ID NO: 136835 - DNA, 33 bp, Homo sapien
gacatcgtcaaaagagacattgttagcaaatga

SEQ ID NO: 136836 - DNA, 33 bp, Homo sapien
gacatcgtcaaaagaggcattgttagcaaatga

SEQ ID NO: 136837 - DNA, 33 bp, Homo sapien
tcagaagcagaattaccaagttaaaccagatgg

SEQ ID NO: 136838 - DNA, 33 bp, Homo sapien
tcagaagcagaattactaagttaaaccagatgg

SEQ ID NO: 136839 - DNA, 33 bp, Homo sapien
caatctatatgtgtcccgaatctttaaggaatc

SEQ ID NO: 136840 - DNA, 33 bp, Homo sapien
caatctatatgtgtcctgaatctttaaggaatc

SEQ ID NO: 136841 - DNA, 33 bp, Homo sapien
tttcttgatggtgttccacagttttcttaggtg

SEQ ID NO: 136842 - DNA, 33 bp, Homo sapien
tttcttgatggtgttctacagttttcttaggtg

SEQ ID NO: 136843 - DNA, 33 bp, Homo sapien
atttgagtattggcccaaaagagatggagtaaa

SEQ ID NO: 136844 - DNA, 33 bp, Homo sapien
atttgagtattggcccgaaagagatggagtaaa

SEQ ID NO: 136845 - DNA, 33 bp, Homo sapien
gctctctcggccactcactttctgaatagtgaa

SEQ ID NO: 136846 - DNA, 33 bp, Homo sapien
gctctctcggccactcgctttctgaatagtgaa

SEQ ID NO: 136847 - DNA, 33 bp, Homo sapien
aaagattgtgctccaacaggtaaaaatatcccc

SEQ ID NO: 136848 - DNA, 33 bp, Homo sapien
aaagattgtgctccaataggtaaaaatatcccc

SEQ ID NO: 136849 - DNA, 33 bp, Homo sapien
ttgaagagtctatttacccaggtttttatcaca

SEQ ID NO: 136850 - DNA, 33 bp, Homo sapien
ttgaagagtctatttatccaggtttttatcaca

SEQ ID NO: 136851 - DNA, 33 bp, Homo sapien
acagggagctctgagacgcttctctttggaggg

SEQ ID NO: 136852 - DNA, 33 bp, Homo sapien
acagggagctctgagatgcttctctttggaggg

SEQ ID NO: 136853 - DNA, 33 bp, Homo sapien
agaaagacaagaccgcggaggacaaatagagag

SEQ ID NO: 136854 - DNA, 33 bp, Homo sapien
agaaagacaagaccgctgaggacaaatagagag

SEQ ID NO: 136855 - DNA, 33 bp, Homo sapien
atgatctcagcttcccaagaatctggtggaatt

SEQ ID NO: 136856 - DNA, 33 bp, Homo sapien
atgatctcagcttcccgagaatctggtggaatt

SEQ ID NO: 136857 - DNA, 33 bp, Homo sapien
gctaactttcagggccaaatggggtcagtcagg

SEQ ID NO: 136858 - DNA, 33 bp, Homo sapien
gctaactttcagggccgaatggggtcagtcagg

SEQ ID NO: 136859 - DNA, 33 bp, Homo sapien
cacgtgggaagcatgacaagtgtgaaatgggtt

SEQ ID NO: 136860 - DNA, 33 bp, Homo sapien
cacgtgggaagcatgataagtgtgaaatgggtt

SEQ ID NO: 136861 - DNA, 33 bp, Homo sapien
tagtcctagctgcttacaaaactcctagctgtc

SEQ ID NO: 136862 - DNA, 33 bp, Homo sapien
tagtcctagctgcttataaaactcctagctgtc

SEQ ID NO: 136863 - DNA, 33 bp, Homo sapien
atatgtggaaggcctgaagttattacaaaaaga

SEQ ID NO: 136864 - DNA, 33 bp, Homo sapien
atatgtggaaggcctgcagttattacaaaaaga

SEQ ID NO: 136865 - DNA, 33 bp, Homo sapien
gtcacagccgtattgcgatttcattaatatttg

SEQ ID NO: 136866 - DNA, 33 bp, Homo sapien
gtcacagccgtattgctatttcattaatatttg

SEQ ID NO: 136867 - DNA, 33 bp, Homo sapien
gtgtcagccacaaatcgctggaaaactgtgtgt

SEQ ID NO: 136868 - DNA, 33 bp, Homo sapien
gtgtcagccacaaatctctggaaaactgtgtgt

SEQ ID NO: 136869 - DNA, 33 bp, Homo sapien
ttgtgaacttcaaacagaccgtgtcaacgtttc

SEQ ID NO: 136870 - DNA, 33 bp, Homo sapien
ttgtgaacttcaaacataccgtgtcaacgtttc

SEQ ID NO: 136871 - DNA, 33 bp, Homo sapien
tgtggatattgacttaccggaccaagtttggga

SEQ ID NO: 136872 - DNA, 33 bp, Homo sapien
tgtggatattgacttatcggaccaagtttggga

SEQ ID NO: 136873 - DNA, 33 bp, Homo sapien
gtcattctcattttacagacaagaaactaagca

SEQ ID NO: 136874 - DNA, 33 bp, Homo sapien
gtcattctcattttacggacaagaaactaagca

SEQ ID NO: 136875 - DNA, 33 bp, Homo sapien
aatcccagagctgtaacctcccagaggtgccat

SEQ ID NO: 136876 - DNA, 33 bp, Homo sapien
aatcccagagctgtaatctcccagaggtgccat

SEQ ID NO: 136877 - DNA, 33 bp, Homo sapien
tttgtgtggtatcaaaagtgtcaaaatgggcag

SEQ ID NO: 136878 - DNA, 33 bp, Homo sapien
tttgtgtggtatcaaaggtgtcaaaatgggcag

SEQ ID NO: 136879 - DNA, 33 bp, Homo sapien
tcagtcatgaatgaagccatcttcagaaattct

SEQ ID NO: 136880 - DNA, 33 bp, Homo sapien
tcagtcatgaatgaaggcatcttcagaaattct

SEQ ID NO: 136881 - DNA, 33 bp, Homo sapien
agtcccatttgttacaaccggagaatttccatt

SEQ ID NO: 136882 - DNA, 33 bp, Homo sapien
agtcccatttgttacatccggagaatttccatt

SEQ ID NO: 136883 - DNA, 33 bp, Homo sapien
ctgccagtcttgagacagcattgagcaatgtgt

SEQ ID NO: 136884 - DNA, 33 bp, Homo sapien
ctgccagtcttgagacggcattgagcaatgtgt

SEQ ID NO: 136885 - DNA, 33 bp, Homo sapien
agagctcaaggccagaacgagtagtggaggtgg

SEQ ID NO: 136886 - DNA, 33 bp, Homo sapien
agagctcaaggccagagcgagtagtggaggtgg

SEQ ID NO: 136887 - DNA, 33 bp, Homo sapien
tatgcagtactcaacccgaaaaagaaagtatta

SEQ ID NO: 136888 - DNA, 33 bp, Homo sapien
tatgcagtactcaacctgaaaaagaaagtatta

SEQ ID NO: 136889 - DNA, 33 bp, Homo sapien
aaaaacagttcaggttgaaacatagattatttg

SEQ ID NO: 136890 - DNA, 33 bp, Homo sapien
aaaaacagttcaggtttaaacatagattatttg

SEQ ID NO: 136891 - DNA, 33 bp, Homo sapien
tgatgagctctgtagcaatctagaaactcgtcc

SEQ ID NO: 136892 - DNA, 33 bp, Homo sapien
tgatgagctctgtagcgatctagaaactcgtcc

SEQ ID NO: 136893 - DNA, 33 bp, Homo sapien
aagtgtcatagctagacctcagatggcacctct

SEQ ID NO: 136894 - DNA, 33 bp, Homo sapien
aagtgtcatagctagatctcagatggcacctct

SEQ ID NO: 136895 - DNA, 33 bp, Homo sapien
tcctattgtctgcatacgtaacttgtcttgtga

SEQ ID NO: 136896 - DNA, 33 bp, Homo sapien
tcctattgtctgcatatgtaacttgtcttgtga

SEQ ID NO: 136897 - DNA, 33 bp, Homo sapien
gtgcaaggaaagtcacaaagatcctttccattt

SEQ ID NO: 136898 - DNA, 33 bp, Homo sapien
gtgcaaggaaagtcaccaagatcctttccattt

SEQ ID NO: 136899 - DNA, 33 bp, Homo sapien
atggggaagattctgaggtagatggtatggtgt

SEQ ID NO: 136900 - DNA, 33 bp, Homo sapien
atggggaagattctgatgtagatggtatggtgt

SEQ ID NO: 136901 - DNA, 33 bp, Homo sapien
tttctctgctttatcacgctagatggaggaaaa

SEQ ID NO: 136902 - DNA, 33 bp, Homo sapien
tttctctgctttatcatgctagatggaggaaaa

SEQ ID NO: 136903 - DNA, 33 bp, Homo sapien
ctcccttgaacttaggaaagccaactgtattat

SEQ ID NO: 136904 - DNA, 33 bp, Homo sapien
ctcccttgaacttaggtaagccaactgtattat

SEQ ID NO: 136905 - DNA, 33 bp, Homo sapien
aggcgagaaggaaccaagactgtctcccctcgg

SEQ ID NO: 136906 - DNA, 33 bp, Homo sapien
aggcgagaaggaaccacgactgtctcccctcgg

SEQ ID NO: 136907 - DNA, 33 bp, Homo sapien
agagagtaactactgaaccagaaactggggaaa

SEQ ID NO: 136908 - DNA, 33 bp, Homo sapien
agagagtaactactgagccagaaactggggaaa

SEQ ID NO: 136909 - DNA, 33 bp, Homo sapien
tccagttctctcaccacgtcacatacccaccaa

SEQ ID NO: 136910 - DNA, 33 bp, Homo sapien
tccagttctctcaccatgtcacatacccaccaa

SEQ ID NO: 136911 - DNA, 33 bp, Homo sapien
caacctccgtttcccacgtccaagcgattctcc

SEQ ID NO: 136912 - DNA, 33 bp, Homo sapien
caacctccgtttcccaggtccaagcgattctcc

SEQ ID NO: 136913 - DNA, 33 bp, Homo sapien
agggtgatagctctcaaaaacttaatactgctt

SEQ ID NO: 136914 - DNA, 33 bp, Homo sapien
agggtgatagctctcagaaacttaatactgctt

SEQ ID NO: 136915 - DNA, 33 bp, Homo sapien
tgtaaaaagcaaatcaaaatgggactggccctt

SEQ ID NO: 136916 - DNA, 33 bp, Homo sapien
tgtaaaaagcaaatcagaatgggactggccctt

SEQ ID NO: 136917 - DNA, 33 bp, Homo sapien
ctctgactccaacacccgatgccgtaaaccctg

SEQ ID NO: 136918 - DNA, 33 bp, Homo sapien
ctctgactccaacacctgatgccgtaaaccctg

SEQ ID NO: 136919 - DNA, 33 bp, Homo sapien
gaaatccacattgggcacagatcattttacaaa

SEQ ID NO: 136920 - DNA, 33 bp, Homo sapien
gaaatccacattgggcgcagatcattttacaaa

SEQ ID NO: 136921 - DNA, 33 bp, Homo sapien
ctttcttcctcccttcaatctctaacgtgcctg

SEQ ID NO: 136922 - DNA, 33 bp, Homo sapien
ctttcttcctcccttcgatctctaacgtgcctg

SEQ ID NO: 136923 - DNA, 33 bp, Homo sapien
cggcagatggaactgcacctttgagtgttcaaa

SEQ ID NO: 136924 - DNA, 33 bp, Homo sapien
cggcagatggaactgcgcctttgagtgttcaaa

SEQ ID NO: 136925 - DNA, 33 bp, Homo sapien
aaaacctcacctgtacaagagccatcttctttc

SEQ ID NO: 136926 - DNA, 33 bp, Homo sapien
aaaacctcacctgtacgagagccatcttctttc

SEQ ID NO: 136927 - DNA, 33 bp, Homo sapien
cctatctccaaatgtcaagatctttcttctgga

SEQ ID NO: 136928 - DNA, 33 bp, Homo sapien
cctatctccaaatgtcgagatctttcttctgga

SEQ ID NO: 136929 - DNA, 33 bp, Homo sapien
ctgtttttacaacaacaagatgtatgtaacctc

SEQ ID NO: 136930 - DNA, 33 bp, Homo sapien
ctgtttttacaacaaccagatgtatgtaacctc

SEQ ID NO: 136931 - DNA, 33 bp, Homo sapien
tggggaggtagagatagagttgacacaatggag

SEQ ID NO: 136932 - DNA, 33 bp, Homo sapien
tggggaggtagagatatagttgacacaatggag

SEQ ID NO: 136933 - DNA, 33 bp, Homo sapien
atttcaaacctgtgcacgagtctattacataac

SEQ ID NO: 136934 - DNA, 33 bp, Homo sapien
atttcaaacctgtgcatgagtctattacataac

SEQ ID NO: 136935 - DNA, 33 bp, Homo sapien
tccttctactatagcacactatcttctcccatc

SEQ ID NO: 136936 - DNA, 33 bp, Homo sapien
tccttctactatagcatactatcttctcccatc

SEQ ID NO: 136937 - DNA, 33 bp, Homo sapien
tgctccaagctgtgagcccaacttatgctgctc

SEQ ID NO: 136938 - DNA, 33 bp, Homo sapien
tgctccaagctgtgaggccaacttatgctgctc

SEQ ID NO: 136939 - DNA, 33 bp, Homo sapien
agacagacccagtttccaatcaagtcttccctg

SEQ ID NO: 136940 - DNA, 33 bp, Homo sapien
agacagacccagtttctaatcaagtcttccctg

SEQ ID NO: 136941 - DNA, 33 bp, Homo sapien
ccccacacttatgttacgcttcaccagtttaag

SEQ ID NO: 136942 - DNA, 33 bp, Homo sapien
ccccacacttatgttatgcttcaccagtttaag

SEQ ID NO: 136943 - DNA, 33 bp, Homo sapien
gctgactatgagaaaaataagttgaattacaca

SEQ ID NO: 136944 - DNA, 33 bp, Homo sapien
gctgactatgagaaaattaagttgaattacaca

SEQ ID NO: 136945 - DNA, 33 bp, Homo sapien
tgaatacggcatcatccgagaagcagtcttgac

SEQ ID NO: 136946 - DNA, 33 bp, Homo sapien
tgaatacggcatcatctgagaagcagtcttgac

SEQ ID NO: 136947 - DNA, 33 bp, Homo sapien
tggggtgtcagtcaccaagctgtacttcaactt

SEQ ID NO: 136948 - DNA, 33 bp, Homo sapien
tggggtgtcagtcaccgagctgtacttcaactt

SEQ ID NO: 136949 - DNA, 33 bp, Homo sapien
cctcttttttggtgaaatataagacgtatatag

SEQ ID NO: 136950 - DNA, 33 bp, Homo sapien
cctcttttttggtgaagtataagacgtatatag

SEQ ID NO: 136951 - DNA, 33 bp, Homo sapien
ccacctcaagacatcaaggactaggaattttcc

SEQ ID NO: 136952 - DNA, 33 bp, Homo sapien
ccacctcaagacatcagggactaggaattttcc

SEQ ID NO: 136953 - DNA, 33 bp, Homo sapien
tacaaattgccctttcaaatattaagaattatt

SEQ ID NO: 136954 - DNA, 33 bp, Homo sapien
tacaaattgccctttcgaatattaagaattatt

SEQ ID NO: 136955 - DNA, 33 bp, Homo sapien
cagagtaggaaccccacgacagtttgttcaaga

SEQ ID NO: 136956 - DNA, 33 bp, Homo sapien
cagagtaggaaccccaggacagtttgttcaaga

SEQ ID NO: 136957 - DNA, 33 bp, Homo sapien
caccttgcgaggcagactcctgggatttgaatc

SEQ ID NO: 136958 - DNA, 33 bp, Homo sapien
caccttgcgaggcagattcctgggatttgaatc

SEQ ID NO: 136959 - DNA, 33 bp, Homo sapien
caaatccaacaaaacactccacggcccattgtc

SEQ ID NO: 136960 - DNA, 33 bp, Homo sapien
caaatccaacaaaacattccacggcccattgtc

SEQ ID NO: 136961 - DNA, 33 bp, Homo sapien
atttctaaagttgtaccgatcccaaaggaaagc

SEQ ID NO: 136962 - DNA, 33 bp, Homo sapien
atttctaaagttgtactgatcccaaaggaaagc

SEQ ID NO: 136963 - DNA, 33 bp, Homo sapien
ctacttgtgaagggaacgctttggttgaaaact

SEQ ID NO: 136964 - DNA, 33 bp, Homo sapien
ctacttgtgaagggaatgctttggttgaaaact

SEQ ID NO: 136965 - DNA, 33 bp, Homo sapien
atagtcaacgtatcacagaataaaaaataaggc

SEQ ID NO: 136966 - DNA, 33 bp, Homo sapien
atagtcaacgtatcacggaataaaaaataaggc

SEQ ID NO: 136967 - DNA, 33 bp, Homo sapien
acatgggatcagatgaacatagacagcacaaaa

SEQ ID NO: 136968 - DNA, 33 bp, Homo sapien
acatgggatcagatgagcatagacagcacaaaa

SEQ ID NO: 136969 - DNA, 33 bp, Homo sapien
tgtcaaatgccacttaccaaataaagagaagac

SEQ ID NO: 136970 - DNA, 33 bp, Homo sapien
tgtcaaatgccacttatcaaataaagagaagac

SEQ ID NO: 136971 - DNA, 33 bp, Homo sapien
tggaacggaccttctaaagtggatgccattcgt

SEQ ID NO: 136972 - DNA, 33 bp, Homo sapien
tggaacggaccttctagagtggatgccattcgt

SEQ ID NO: 136973 - DNA, 33 bp, Homo sapien
ctgccatgaataaaagcatgaaggcagtgatgg

SEQ ID NO: 136974 - DNA, 33 bp, Homo sapien
ctgccatgaataaaagtatgaaggcagtgatgg

SEQ ID NO: 136975 - DNA, 33 bp, Homo sapien
agtataatttcacataggaataatctgtctttc

SEQ ID NO: 136976 - DNA, 33 bp, Homo sapien
agtataatttcacatatgaataatctgtctttc

SEQ ID NO: 136977 - DNA, 33 bp, Homo sapien
atatacacacatatacgctgtcacatagacgca

SEQ ID NO: 136978 - DNA, 33 bp, Homo sapien
atatacacacatatactctgtcacatagacgca

SEQ ID NO: 136979 - DNA, 33 bp, Homo sapien
ctgtaataaatgcaaacagcattctgaggtaaa

SEQ ID NO: 136980 - DNA, 33 bp, Homo sapien
ctgtaataaatgcaaagagcattctgaggtaaa

SEQ ID NO: 136981 - DNA, 33 bp, Homo sapien
tgagatggggaggtaaatatggaggccacattg

SEQ ID NO: 136982 - DNA, 33 bp, Homo sapien
tgagatggggaggtaagtatggaggccacattg

SEQ ID NO: 136983 - DNA, 33 bp, Homo sapien
tcaggtatttctataaggtgataaggtgacatt

SEQ ID NO: 136984 - DNA, 33 bp, Homo sapien
tcaggtatttctataatgtgataaggtgacatt

SEQ ID NO: 136985 - DNA, 33 bp, Homo sapien
ttccaactcgctgttacagtttataatttgtta

SEQ ID NO: 136986 - DNA, 33 bp, Homo sapien
ttccaactcgctgttatagtttataatttgtta

SEQ ID NO: 136987 - DNA, 33 bp, Homo sapien
actcagttacaccctacgcacatgaagacctag

SEQ ID NO: 136988 - DNA, 33 bp, Homo sapien
actcagttacaccctatgcacatgaagacctag

SEQ ID NO: 136989 - DNA, 33 bp, Homo sapien
gtgtggtgggtttcataaactagaatctgtgtg

SEQ ID NO: 136990 - DNA, 33 bp, Homo sapien
gtgtggtgggtttcatgaactagaatctgtgtg

SEQ ID NO: 136991 - DNA, 33 bp, Homo sapien
caacctgctcacacaccaagcacattgctacta

SEQ ID NO: 136992 - DNA, 33 bp, Homo sapien
caacctgctcacacacgaagcacattgctacta

SEQ ID NO: 136993 - DNA, 33 bp, Homo sapien
gggttcatcgtcactcaagattatatcacaaat

SEQ ID NO: 136994 - DNA, 33 bp, Homo sapien
gggttcatcgtcactcgagattatatcacaaat

SEQ ID NO: 136995 - DNA, 33 bp, Homo sapien
gtggacatcttccagcaaactcagtagtctgtc

SEQ ID NO: 136996 - DNA, 33 bp, Homo sapien
gtggacatcttccagctaactcagtagtctgtc

SEQ ID NO: 136997 - DNA, 33 bp, Homo sapien
tatatgatgacaacacaatataaccactatttt

SEQ ID NO: 136998 - DNA, 33 bp, Homo sapien
tatatgatgacaacaccatataaccactatttt

SEQ ID NO: 136999 - DNA, 33 bp, Homo sapien
aagagtttaatcaatgaagctattatattatta

SEQ ID NO: 137000 - DNA, 33 bp, Homo sapien
aagagtttaatcaatggagctattatattatta

SEQ ID NO: 137001 - DNA, 33 bp, Homo sapien
ttccatcaacttctccacttccacgggctctgg

SEQ ID NO: 137002 - DNA, 33 bp, Homo sapien
ttccatcaacttctccgcttccacgggctctgg

SEQ ID NO: 137003 - DNA, 33 bp, Homo sapien
gggcgttctcctgggacgatctccaataagtag

SEQ ID NO: 137004 - DNA, 33 bp, Homo sapien
gggcgttctcctgggatgatctccaataagtag

SEQ ID NO: 137005 - DNA, 33 bp, Homo sapien
ccacccgcccgtgtgacctgatccggtgagttg

SEQ ID NO: 137006 - DNA, 33 bp, Homo sapien
ccacccgcccgtgtgatctgatccggtgagttg

SEQ ID NO: 137007 - DNA, 33 bp, Homo sapien
actccaaattacagacaagctctgtatgtctaa

SEQ ID NO: 137008 - DNA, 33 bp, Homo sapien
actccaaattacagacgagctctgtatgtctaa

SEQ ID NO: 137009 - DNA, 33 bp, Homo sapien
aggagcacggaaaagacctggaaatcatgcaga

SEQ ID NO: 137010 - DNA, 33 bp, Homo sapien
aggagcacggaaaagagctggaaatcatgcaga

SEQ ID NO: 137011 - DNA, 33 bp, Homo sapien
ctttttgccaagtgcaaacatgactctaccact

SEQ ID NO: 137012 - DNA, 33 bp, Homo sapien
ctttttgccaagtgcacacatgactctaccact

SEQ ID NO: 137013 - DNA, 33 bp, Homo sapien
tttggcaataaaatcaagtaacataaaagtatc

SEQ ID NO: 137014 - DNA, 33 bp, Homo sapien
tttggcaataaaatcaggtaacataaaagtatc

SEQ ID NO: 137015 - DNA, 33 bp, Homo sapien
attctctgggaagttaaaccttacagataatga

SEQ ID NO: 137016 - DNA, 33 bp, Homo sapien
attctctgggaagttataccttacagataatga

SEQ ID NO: 137017 - DNA, 33 bp, Homo sapien
gattaagagactcctcaaggtcatatagcttgg

SEQ ID NO: 137018 - DNA, 33 bp, Homo sapien
gattaagagactcctcgaggtcatatagcttgg

SEQ ID NO: 137019 - DNA, 33 bp, Homo sapien
actatgaggtctgttaagtacctgaagatcatc

SEQ ID NO: 137020 - DNA, 33 bp, Homo sapien
actatgaggtctgttaggtacctgaagatcatc

SEQ ID NO: 137021 - DNA, 33 bp, Homo sapien
actaatggattatacaatcttgtggaggaagag

SEQ ID NO: 137022 - DNA, 33 bp, Homo sapien
actaatggattatacagtcttgtggaggaagag

SEQ ID NO: 137023 - DNA, 33 bp, Homo sapien
actccagttaacttgccaagaccacacaatgga

SEQ ID NO: 137024 - DNA, 33 bp, Homo sapien
actccagttaacttgcgaagaccacacaatgga

SEQ ID NO: 137025 - DNA, 33 bp, Homo sapien
cagccaccaacagcaactgagcaaaccatcatt

SEQ ID NO: 137026 - DNA, 33 bp, Homo sapien
cagccaccaacagcaattgagcaaaccatcatt

SEQ ID NO: 137027 - DNA, 33 bp, Homo sapien
gattagctgtgggtggcatattttaaagcagtg

SEQ ID NO: 137028 - DNA, 33 bp, Homo sapien
gattagctgtgggtggtatattttaaagcagtg

SEQ ID NO: 137029 - DNA, 33 bp, Homo sapien
cctcatggatttgataagaaatctcagggataa

SEQ ID NO: 137030 - DNA, 33 bp, Homo sapien
cctcatggatttgatacgaaatctcagggataa

SEQ ID NO: 137031 - DNA, 33 bp, Homo sapien
ttagcttgaaggaaaccgtggggcattttcaat

SEQ ID NO: 137032 - DNA, 33 bp, Homo sapien
ttagcttgaaggaaactgtggggcattttcaat

SEQ ID NO: 137033 - DNA, 33 bp, Homo sapien
tgaaacgtttcaggtggaagctgaggtaattaa

SEQ ID NO: 137034 - DNA, 33 bp, Homo sapien
tgaaacgtttcaggtgtaagctgaggtaattaa

SEQ ID NO: 137035 - DNA, 33 bp, Homo sapien
tcagaatttgtggatgccactaaagcagtactt

SEQ ID NO: 137036 - DNA, 33 bp, Homo sapien
tcagaatttgtggatgtcactaaagcagtactt

SEQ ID NO: 137037 - DNA, 33 bp, Homo sapien
caaagatattcaggaaacaacaaggtaaaattt

SEQ ID NO: 137038 - DNA, 33 bp, Homo sapien
caaagatattcaggaaccaacaaggtaaaattt

SEQ ID NO: 137039 - DNA, 33 bp, Homo sapien
caaatgtggaggtggcaaggccatttaagctac

SEQ ID NO: 137040 - DNA, 33 bp, Homo sapien
caaatgtggaggtggcgaggccatttaagctac

SEQ ID NO: 137041 - DNA, 33 bp, Homo sapien
atgactttcaaacaaaagatcaggaagatttca

SEQ ID NO: 137042 - DNA, 33 bp, Homo sapien
atgactttcaaacaaacgatcaggaagatttca

SEQ ID NO: 137043 - DNA, 33 bp, Homo sapien
cagaaggcattcagtaagggcttcctactgatc

SEQ ID NO: 137044 - DNA, 33 bp, Homo sapien
cagaaggcattcagtaggggcttcctactgatc

SEQ ID NO: 137045 - DNA, 33 bp, Homo sapien
gattgggaagcaacaagcttaaagataatcttt

SEQ ID NO: 137046 - DNA, 33 bp, Homo sapien
gattgggaagcaacaatcttaaagataatcttt

SEQ ID NO: 137047 - DNA, 33 bp, Homo sapien
cagagacattccatgccgcatcctgtatgtgtc

SEQ ID NO: 137048 - DNA, 33 bp, Homo sapien
cagagacattccatgctgcatcctgtatgtgtc

SEQ ID NO: 137049 - DNA, 33 bp, Homo sapien
cccctctgaatttctgcatctgcatcttaacaa

SEQ ID NO: 137050 - DNA, 33 bp, Homo sapien
cccctctgaatttctgtatctgcatcttaacaa

SEQ ID NO: 137051 - DNA, 33 bp, Homo sapien
gcaaatactcactgcaagaaggcaagattccca

SEQ ID NO: 137052 - DNA, 33 bp, Homo sapien
gcaaatactcactgcatgaaggcaagattccca

SEQ ID NO: 137053 - DNA, 33 bp, Homo sapien
atttcatttcctgttacccagattgttcggaaa

SEQ ID NO: 137054 - DNA, 33 bp, Homo sapien
atttcatttcctgttatccagattgttcggaaa

SEQ ID NO: 137055 - DNA, 33 bp, Homo sapien
aaagcacgtagagcaaaagtgggacaaagaaca

SEQ ID NO: 137056 - DNA, 33 bp, Homo sapien
aaagcacgtagagcaacagtgggacaaagaaca

SEQ ID NO: 137057 - DNA, 33 bp, Homo sapien
ttaaaagcagctggtaagataaggaatgaatgc

SEQ ID NO: 137058 - DNA, 33 bp, Homo sapien
ttaaaagcagctggtaggataaggaatgaatgc

SEQ ID NO: 137059 - DNA, 33 bp, Homo sapien
gtactagccatagcccggagcaagcgatgtatc

SEQ ID NO: 137060 - DNA, 33 bp, Homo sapien
gtactagccatagccctgagcaagcgatgtatc

SEQ ID NO: 137061 - DNA, 33 bp, Homo sapien
gtaccactgagtttgacctttagcctggaaaat

SEQ ID NO: 137062 - DNA, 33 bp, Homo sapien
gtaccactgagtttgatctttagcctggaaaat

SEQ ID NO: 137063 - DNA, 33 bp, Homo sapien
ctcaggaatttaaaacgagctgtttacatttca

SEQ ID NO: 137064 - DNA, 33 bp, Homo sapien
ctcaggaatttaaaactagctgtttacatttca

SEQ ID NO: 137065 - DNA, 33 bp, Homo sapien
agacacagtagagcacgagtgatattttgaaag

SEQ ID NO: 137066 - DNA, 33 bp, Homo sapien
agacacagtagagcactagtgatattttgaaag

SEQ ID NO: 137067 - DNA, 33 bp, Homo sapien
agagttctgggacctacggattaaagcagattc

SEQ ID NO: 137068 - DNA, 33 bp, Homo sapien
agagttctgggacctatggattaaagcagattc

SEQ ID NO: 137069 - DNA, 33 bp, Homo sapien
tttaggggctcaactccgacatcgccttagaga

SEQ ID NO: 137070 - DNA, 33 bp, Homo sapien
tttaggggctcaactctgacatcgccttagaga

SEQ ID NO: 137071 - DNA, 33 bp, Homo sapien
gaattcttaagctaaaacgttaatagaatttca

SEQ ID NO: 137072 - DNA, 33 bp, Homo sapien
gaattcttaagctaaaccgttaatagaatttca

SEQ ID NO: 137073 - DNA, 33 bp, Homo sapien
tcataaggtatattacaaggttaacagtcactg

SEQ ID NO: 137074 - DNA, 33 bp, Homo sapien
tcataaggtatattacgaggttaacagtcactg

SEQ ID NO: 137075 - DNA, 33 bp, Homo sapien
tctctgatgtttgcaactgtttatgtgtgactc

SEQ ID NO: 137076 - DNA, 33 bp, Homo sapien
tctctgatgtttgcaattgtttatgtgtgactc

SEQ ID NO: 137077 - DNA, 33 bp, Homo sapien
cataaaaaccactcaacaaacgcttgctaggga

SEQ ID NO: 137078 - DNA, 33 bp, Homo sapien
cataaaaaccactcaataaacgcttgctaggga

SEQ ID NO: 137079 - DNA, 33 bp, Homo sapien
tagttgatccaaagtgaaaatttgcagccaatg

SEQ ID NO: 137080 - DNA, 33 bp, Homo sapien
tagttgatccaaagtggaaatttgcagccaatg

SEQ ID NO: 137081 - DNA, 33 bp, Homo sapien
acttcaaaaattaagcactaatggcaaatatag

SEQ ID NO: 137082 - DNA, 33 bp, Homo sapien
acttcaaaaattaagcgctaatggcaaatatag

SEQ ID NO: 137083 - DNA, 33 bp, Homo sapien
aatgaacaatccctgcacagtgaacaaaaaaag

SEQ ID NO: 137084 - DNA, 33 bp, Homo sapien
aatgaacaatccctgcgcagtgaacaaaaaaag

SEQ ID NO: 137085 - DNA, 33 bp, Homo sapien
ttatgaaagattgagtaaatttggtcaggagct

SEQ ID NO: 137086 - DNA, 33 bp, Homo sapien
ttatgaaagattgagtcaatttggtcaggagct

SEQ ID NO: 137087 - DNA, 33 bp, Homo sapien
tgaataatcaaatcaaaagtgataagcctccta

SEQ ID NO: 137088 - DNA, 33 bp, Homo sapien
tgaataatcaaatcaatagtgataagcctccta

SEQ ID NO: 137089 - DNA, 33 bp, Homo sapien
tatatggctgcttgtacaggtagggaagtatgt

SEQ ID NO: 137090 - DNA, 33 bp, Homo sapien
tatatggctgcttgtataggtagggaagtatgt

SEQ ID NO: 137091 - DNA, 33 bp, Homo sapien
ataaaacaaaaaggataaatgccataacaaggt

SEQ ID NO: 137092 - DNA, 33 bp, Homo sapien
ataaaacaaaaaggatgaatgccataacaaggt

SEQ ID NO: 137093 - DNA, 33 bp, Homo sapien
acagttaggatagtcaaggaagtatggtactgg

SEQ ID NO: 137094 - DNA, 33 bp, Homo sapien
acagttaggatagtcagggaagtatggtactgg

SEQ ID NO: 137095 - DNA, 33 bp, Homo sapien
tctcaacataaaggagaaaaattcaggtctttt

SEQ ID NO: 137096 - DNA, 33 bp, Homo sapien
tctcaacataaaggaggaaaattcaggtctttt

SEQ ID NO: 137097 - DNA, 33 bp, Homo sapien
agataatatgaatgaactggaagtattattttt

SEQ ID NO: 137098 - DNA, 33 bp, Homo sapien
agataatatgaatgaattggaagtattattttt

SEQ ID NO: 137099 - DNA, 33 bp, Homo sapien
catggattatataaacaacttcagagcaagacc

SEQ ID NO: 137100 - DNA, 33 bp, Homo sapien
catggattatataaacgacttcagagcaagacc

SEQ ID NO: 137101 - DNA, 33 bp, Homo sapien
cccattcactgagcagaaaagataggagggcta

SEQ ID NO: 137102 - DNA, 33 bp, Homo sapien
cccattcactgagcaggaaagataggagggcta

SEQ ID NO: 137103 - DNA, 33 bp, Homo sapien
agcagccagaaggggaagagcggagatggtgag

SEQ ID NO: 137104 - DNA, 33 bp, Homo sapien
agcagccagaaggggaggagcggagatggtgag

SEQ ID NO: 137105 - DNA, 33 bp, Homo sapien
gggattgcacctgaacgcatacctgtgctgggt

SEQ ID NO: 137106 - DNA, 33 bp, Homo sapien
gggattgcacctgaactcatacctgtgctgggt

SEQ ID NO: 137107 - DNA, 33 bp, Homo sapien
atctatcacctgtctacctatcagtctatctac

SEQ ID NO: 137108 - DNA, 33 bp, Homo sapien
atctatcacctgtctatctatcagtctatctac

SEQ ID NO: 137109 - DNA, 33 bp, Homo sapien
tggcagcctgcacagacgaatacaggtgtccct

SEQ ID NO: 137110 - DNA, 33 bp, Homo sapien
tggcagcctgcacagatgaatacaggtgtccct

SEQ ID NO: 137111 - DNA, 33 bp, Homo sapien
ttcattaactatgtcacagagcaatttgaggct

SEQ ID NO: 137112 - DNA, 33 bp, Homo sapien
ttcattaactatgtcagagagcaatttgaggct

SEQ ID NO: 137113 - DNA, 33 bp, Homo sapien
gtgcataactcagatacatggcaggatgaaaaa

SEQ ID NO: 137114 - DNA, 33 bp, Homo sapien
gtgcataactcagatagatggcaggatgaaaaa

SEQ ID NO: 137115 - DNA, 33 bp, Homo sapien
tgtagcccattcctcccgaagctgcagcctttt

SEQ ID NO: 137116 - DNA, 33 bp, Homo sapien
tgtagcccattcctcctgaagctgcagcctttt

SEQ ID NO: 137117 - DNA, 33 bp, Homo sapien
gcctaccttccctccaataatccattatggttc

SEQ ID NO: 137118 - DNA, 33 bp, Homo sapien
gcctaccttccctccagtaatccattatggttc

SEQ ID NO: 137119 - DNA, 33 bp, Homo sapien
aagaatgctaattagacgactggcatgatctgc

SEQ ID NO: 137120 - DNA, 33 bp, Homo sapien
aagaatgctaattagatgactggcatgatctgc

SEQ ID NO: 137121 - DNA, 33 bp, Homo sapien
tacacctcgcttctcactgaatatcaccatgca

SEQ ID NO: 137122 - DNA, 33 bp, Homo sapien
tacacctcgcttctcattgaatatcaccatgca

SEQ ID NO: 137123 - DNA, 33 bp, Homo sapien
tatctaagctaacatcaattacttaatttgttt

SEQ ID NO: 137124 - DNA, 33 bp, Homo sapien
tatctaagctaacatcgattacttaatttgttt

SEQ ID NO: 137125 - DNA, 33 bp, Homo sapien
agtatttgtatctatcaaagtcctggtgaaaaa

SEQ ID NO: 137126 - DNA, 33 bp, Homo sapien
agtatttgtatctatctaagtcctggtgaaaaa

SEQ ID NO: 137127 - DNA, 33 bp, Homo sapien
ctggtgaaaaacaaacatcatgctcaaatgagg

SEQ ID NO: 137128 - DNA, 33 bp, Homo sapien
ctggtgaaaaacaaacgtcatgctcaaatgagg

SEQ ID NO: 137129 - DNA, 33 bp, Homo sapien
tcaaagttgttagcccaggatgcttgactatcc

SEQ ID NO: 137130 - DNA, 33 bp, Homo sapien
tcaaagttgttagcccgggatgcttgactatcc

SEQ ID NO: 137131 - DNA, 33 bp, Homo sapien
tatcagactctatgacacctcattcagaagatt

SEQ ID NO: 137132 - DNA, 33 bp, Homo sapien
tatcagactctatgacgcctcattcagaagatt

SEQ ID NO: 137133 - DNA, 33 bp, Homo sapien
cataactgaatgatcacgataagagtagtcggc

SEQ ID NO: 137134 - DNA, 33 bp, Homo sapien
cataactgaatgatcatgataagagtagtcggc

SEQ ID NO: 137135 - DNA, 33 bp, Homo sapien
tcaggtgaaggaaagaataaaacatcaatccat

SEQ ID NO: 137136 - DNA, 33 bp, Homo sapien
tcaggtgaaggaaagattaaaacatcaatccat

SEQ ID NO: 137137 - DNA, 33 bp, Homo sapien
catattcagtgcatcacctaattccacactgat

SEQ ID NO: 137138 - DNA, 33 bp, Homo sapien
catattcagtgcatcatctaattccacactgat

SEQ ID NO: 137139 - DNA, 33 bp, Homo sapien
ggcttattttgcaagacaggtcaagtactgcct

SEQ ID NO: 137140 - DNA, 33 bp, Homo sapien
ggcttattttgcaagagaggtcaagtactgcct

SEQ ID NO: 137141 - DNA, 33 bp, Homo sapien
agatcccttttccaacacaatcaagagacaaac

SEQ ID NO: 137142 - DNA, 33 bp, Homo sapien
agatcccttttccaacgcaatcaagagacaaac

SEQ ID NO: 137143 - DNA, 33 bp, Homo sapien
cactcttgggtcagtacgagtccaaagctattt

SEQ ID NO: 137144 - DNA, 33 bp, Homo sapien
cactcttgggtcagtaggagtccaaagctattt

SEQ ID NO: 137145 - DNA, 33 bp, Homo sapien
aggcagatcaaggatcagaaaatagctttggac

SEQ ID NO: 137146 - DNA, 33 bp, Homo sapien
aggcagatcaaggatccgaaaatagctttggac

SEQ ID NO: 137147 - DNA, 33 bp, Homo sapien
ttgattgaaagaacaaaccaaataataatgatg

SEQ ID NO: 137148 - DNA, 33 bp, Homo sapien
ttgattgaaagaacaagccaaataataatgatg

SEQ ID NO: 137149 - DNA, 33 bp, Homo sapien
acgagagattttgcaacacagtgtgtcacagtg

SEQ ID NO: 137150 - DNA, 33 bp, Homo sapien
acgagagattttgcaagacagtgtgtcacagtg

SEQ ID NO: 137151 - DNA, 33 bp, Homo sapien
ctagagccagccagagccagggcaaattttctg

SEQ ID NO: 137152 - DNA, 33 bp, Homo sapien
ctagagccagccagagtcagggcaaattttctg

SEQ ID NO: 137153 - DNA, 33 bp, Homo sapien
taatcaaatgtgactcacactgcagagccatca

SEQ ID NO: 137154 - DNA, 33 bp, Homo sapien
taatcaaatgtgactcgcactgcagagccatca

SEQ ID NO: 137155 - DNA, 33 bp, Homo sapien
tgctttgtgtaataagaccatttaaggtcacag

SEQ ID NO: 137156 - DNA, 33 bp, Homo sapien
tgctttgtgtaataaggccatttaaggtcacag

SEQ ID NO: 137157 - DNA, 33 bp, Homo sapien
aaagaaaatagggaaactgttagggtgtcaggg

SEQ ID NO: 137158 - DNA, 33 bp, Homo sapien
aaagaaaatagggaaagtgttagggtgtcaggg

SEQ ID NO: 137159 - DNA, 33 bp, Homo sapien
tgcaacgaccttcctcacaaaaagaagaaggct

SEQ ID NO: 137160 - DNA, 33 bp, Homo sapien
tgcaacgaccttcctcgcaaaaagaagaaggct

SEQ ID NO: 137161 - DNA, 33 bp, Homo sapien
attggtttgatgcagaaaattttgacaaccttg

SEQ ID NO: 137162 - DNA, 33 bp, Homo sapien
attggtttgatgcagataattttgacaaccttg

SEQ ID NO: 137163 - DNA, 33 bp, Homo sapien
aacaacccagggcagaagaatctttgtgttcag

SEQ ID NO: 137164 - DNA, 33 bp, Homo sapien
aacaacccagggcagaggaatctttgtgttcag

SEQ ID NO: 137165 - DNA, 33 bp, Homo sapien
gtcgcttccactttggaactattgtaaaaaatg

SEQ ID NO: 137166 - DNA, 33 bp, Homo sapien
gtcgcttccactttgggactattgtaaaaaatg

SEQ ID NO: 137167 - DNA, 33 bp, Homo sapien
attgcagggattggaccgcacaactgccggcac

SEQ ID NO: 137168 - DNA, 33 bp, Homo sapien
attgcagggattggactgcacaactgccggcac

SEQ ID NO: 137169 - DNA, 33 bp, Homo sapien
gctttttctgttagctaaaacaaggagagaaaa

SEQ ID NO: 137170 - DNA, 33 bp, Homo sapien
gctttttctgttagctgaaacaaggagagaaaa

SEQ ID NO: 137171 - DNA, 33 bp, Homo sapien
aggagttgttttctccagagatgatgaacgtgg

SEQ ID NO: 137172 - DNA, 33 bp, Homo sapien
aggagttgttttctccggagatgatgaacgtgg

SEQ ID NO: 137173 - DNA, 33 bp, Homo sapien
atcactgatggaaagacgtctcttagagatata

SEQ ID NO: 137174 - DNA, 33 bp, Homo sapien
atcactgatggaaagatgtctcttagagatata

SEQ ID NO: 137175 - DNA, 33 bp, Homo sapien
tttctttctcaaaaccacaatcactccgagcat

SEQ ID NO: 137176 - DNA, 33 bp, Homo sapien
tttctttctcaaaaccgcaatcactccgagcat

SEQ ID NO: 137177 - DNA, 33 bp, Homo sapien
ctttcaagtgtggtgacgtcctatccctccagc

SEQ ID NO: 137178 - DNA, 33 bp, Homo sapien
ctttcaagtgtggtgatgtcctatccctccagc

SEQ ID NO: 137179 - DNA, 33 bp, Homo sapien
ggtcatggctgcactaactgtaaagaagtggag

SEQ ID NO: 137180 - DNA, 33 bp, Homo sapien
ggtcatggctgcactagctgtaaagaagtggag

SEQ ID NO: 137181 - DNA, 33 bp, Homo sapien
gaaagtgtgcctttgacgcaatagaatggtgat

SEQ ID NO: 137182 - DNA, 33 bp, Homo sapien
gaaagtgtgcctttgatgcaatagaatggtgat

SEQ ID NO: 137183 - DNA, 33 bp, Homo sapien
atttctaggaacacttcaaatatcagagagttg

SEQ ID NO: 137184 - DNA, 33 bp, Homo sapien
atttctaggaacactttaaatatcagagagttg

SEQ ID NO: 137185 - DNA, 33 bp, Homo sapien
agtggaggaaacattaactacagtagcttcctg

SEQ ID NO: 137186 - DNA, 33 bp, Homo sapien
agtggaggaaacattagctacagtagcttcctg

SEQ ID NO: 137187 - DNA, 33 bp, Homo sapien
agttaaatgcgaaaacgatctaatacaccaaaa

SEQ ID NO: 137188 - DNA, 33 bp, Homo sapien
agttaaatgcgaaaactatctaatacaccaaaa

SEQ ID NO: 137189 - DNA, 33 bp, Homo sapien
tctaactcaacactgccatgatgccctgagtaa

SEQ ID NO: 137190 - DNA, 33 bp, Homo sapien
tctaactcaacactgcgatgatgccctgagtaa

SEQ ID NO: 137191 - DNA, 33 bp, Homo sapien
tccaggtgattattaacgatgcagaatccaatt

SEQ ID NO: 137192 - DNA, 33 bp, Homo sapien
tccaggtgattattaatgatgcagaatccaatt

SEQ ID NO: 137193 - DNA, 33 bp, Homo sapien
aggacggtgcacagagaccttctaaattcttct

SEQ ID NO: 137194 - DNA, 33 bp, Homo sapien
aggacggtgcacagaggccttctaaattcttct

SEQ ID NO: 137195 - DNA, 33 bp, Homo sapien
ttgcgttctgtcaagacctgacaccaaacagtt

SEQ ID NO: 137196 - DNA, 33 bp, Homo sapien
ttgcgttctgtcaagagctgacaccaaacagtt

SEQ ID NO: 137197 - DNA, 33 bp, Homo sapien
gttaccttagaaggacaagcttaaagttcagtg

SEQ ID NO: 137198 - DNA, 33 bp, Homo sapien
gttaccttagaaggactagcttaaagttcagtg

SEQ ID NO: 137199 - DNA, 33 bp, Homo sapien
gctctgagggtaaagacaagacccttctgtcga

SEQ ID NO: 137200 - DNA, 33 bp, Homo sapien
gctctgagggtaaagagaagacccttctgtcga

SEQ ID NO: 137201 - DNA, 33 bp, Homo sapien
ataaaaggtaatatacaaaagaaattcaatata

SEQ ID NO: 137202 - DNA, 33 bp, Homo sapien
ataaaaggtaatataccaaagaaattcaatata

SEQ ID NO: 137203 - DNA, 33 bp, Homo sapien
aggtggtacaggacaactgtgtaagaggcatgg

SEQ ID NO: 137204 - DNA, 33 bp, Homo sapien
aggtggtacaggacaattgtgtaagaggcatgg

SEQ ID NO: 137205 - DNA, 33 bp, Homo sapien
atttccacaaatctgaaatcattccaaaacaag

SEQ ID NO: 137206 - DNA, 33 bp, Homo sapien
atttccacaaatctgatatcattccaaaacaag

SEQ ID NO: 137207 - DNA, 33 bp, Homo sapien
agtaccgaacctagaacgcaggggctggcaaac

SEQ ID NO: 137208 - DNA, 33 bp, Homo sapien
agtaccgaacctagaatgcaggggctggcaaac

SEQ ID NO: 137209 - DNA, 33 bp, Homo sapien
tgagcatcagaaaacagattaacctggaaaaac

SEQ ID NO: 137210 - DNA, 33 bp, Homo sapien
tgagcatcagaaaacatattaacctggaaaaac

SEQ ID NO: 137211 - DNA, 33 bp, Homo sapien
atatactggtgacagaagtaccaacagggtcta

SEQ ID NO: 137212 - DNA, 33 bp, Homo sapien
atatactggtgacagaggtaccaacagggtcta

SEQ ID NO: 137213 - DNA, 33 bp, Homo sapien
ggacatgagaaagtccagatagaatgaaagttt

SEQ ID NO: 137214 - DNA, 33 bp, Homo sapien
ggacatgagaaagtccggatagaatgaaagttt

SEQ ID NO: 137215 - DNA, 33 bp, Homo sapien
tttaacatattgaactcagatatctgaaaaact

SEQ ID NO: 137216 - DNA, 33 bp, Homo sapien
tttaacatattgaacttagatatctgaaaaact

SEQ ID NO: 137217 - DNA, 33 bp, Homo sapien
gagtttgcagaacatcaagtaccaaatggaatg

SEQ ID NO: 137218 - DNA, 33 bp, Homo sapien
gagtttgcagaacatcgagtaccaaatggaatg

SEQ ID NO: 137219 - DNA, 33 bp, Homo sapien
tgacaatactgatacaagccaatttggttgctg

SEQ ID NO: 137220 - DNA, 33 bp, Homo sapien
tgacaatactgatacaggccaatttggttgctg

SEQ ID NO: 137221 - DNA, 33 bp, Homo sapien
ataaaacacccacatacagtcaacttgagacga

SEQ ID NO: 137222 - DNA, 33 bp, Homo sapien
ataaaacacccacatatagtcaacttgagacga

SEQ ID NO: 137223 - DNA, 33 bp, Homo sapien
tatttgtttttcttcaatctccatagacacaga

SEQ ID NO: 137224 - DNA, 33 bp, Homo sapien
tatttgtttttcttcagtctccatagacacaga

SEQ ID NO: 137225 - DNA, 33 bp, Homo sapien
tattctttctaaattacggtacgtttgaatgaa

SEQ ID NO: 137226 - DNA, 33 bp, Homo sapien
tattctttctaaattatggtacgtttgaatgaa

SEQ ID NO: 137227 - DNA, 33 bp, Homo sapien
caggccaagtgtccaacggtagaaagaaactgc

SEQ ID NO: 137228 - DNA, 33 bp, Homo sapien
caggccaagtgtccaatggtagaaagaaactgc

SEQ ID NO: 137229 - DNA, 33 bp, Homo sapien
atgtttcagatgtttcacctttcagattaggct

SEQ ID NO: 137230 - DNA, 33 bp, Homo sapien
atgtttcagatgtttcgcctttcagattaggct

SEQ ID NO: 137231 - DNA, 33 bp, Homo sapien
atcctctaactcacacaaaatgttaacattgta

SEQ ID NO: 137232 - DNA, 33 bp, Homo sapien
atcctctaactcacacgaaatgttaacattgta

SEQ ID NO: 137233 - DNA, 33 bp, Homo sapien
tatcccagagaaatccaggaattgcacagaata

SEQ ID NO: 137234 - DNA, 33 bp, Homo sapien
tatcccagagaaatccgggaattgcacagaata

SEQ ID NO: 137235 - DNA, 33 bp, Homo sapien
tcctcaccagcgggaccctaagctgccaaattc

SEQ ID NO: 137236 - DNA, 33 bp, Homo sapien
tcctcaccagcgggactctaagctgccaaattc

SEQ ID NO: 137237 - DNA, 33 bp, Homo sapien
aatgtgctttctggccaaatcaagtaaacatgg

SEQ ID NO: 137238 - DNA, 33 bp, Homo sapien
aatgtgctttctggccgaatcaagtaaacatgg

SEQ ID NO: 137239 - DNA, 33 bp, Homo sapien
tctcagttgtaaacacaagaggtataaacacag

SEQ ID NO: 137240 - DNA, 33 bp, Homo sapien
tctcagttgtaaacacgagaggtataaacacag

SEQ ID NO: 137241 - DNA, 33 bp, Homo sapien
ctccacttcagtctctcaatttccttctctcta

SEQ ID NO: 137242 - DNA, 33 bp, Homo sapien
ctccacttcagtctcttaatttccttctctcta

SEQ ID NO: 137243 - DNA, 33 bp, Homo sapien
tgatacacagatttaccggtacacaggggcact

SEQ ID NO: 137244 - DNA, 33 bp, Homo sapien
tgatacacagatttactggtacacaggggcact

SEQ ID NO: 137245 - DNA, 33 bp, Homo sapien
gtttttccagaggcgcacaagtttctgctcatt

SEQ ID NO: 137246 - DNA, 33 bp, Homo sapien
gtttttccagaggcgcccaagtttctgctcatt

SEQ ID NO: 137247 - DNA, 33 bp, Homo sapien
cctttgatcgtgtctggagagctcctgacatac

SEQ ID NO: 137248 - DNA, 33 bp, Homo sapien
cctttgatcgtgtctgtagagctcctgacatac

SEQ ID NO: 137249 - DNA, 33 bp, Homo sapien
gaagccacaagtcagaataaaccatcttaaatt

SEQ ID NO: 137250 - DNA, 33 bp, Homo sapien
gaagccacaagtcagactaaaccatcttaaatt

SEQ ID NO: 137251 - DNA, 33 bp, Homo sapien
ctacaactgaaacgaccagtatgggggctgaag

SEQ ID NO: 137252 - DNA, 33 bp, Homo sapien
ctacaactgaaacgactagtatgggggctgaag

SEQ ID NO: 137253 - DNA, 33 bp, Homo sapien
atataccaagagcagacagtgattccacaaatc

SEQ ID NO: 137254 - DNA, 33 bp, Homo sapien
atataccaagagcagagagtgattccacaaatc

SEQ ID NO: 137255 - DNA, 33 bp, Homo sapien
agtggtttcttcactacctcaaaacatactttt

SEQ ID NO: 137256 - DNA, 33 bp, Homo sapien
agtggtttcttcactatctcaaaacatactttt

SEQ ID NO: 137257 - DNA, 33 bp, Homo sapien
aaaaaatccaaccaaacaaagcagcagaacaaa

SEQ ID NO: 137258 - DNA, 33 bp, Homo sapien
aaaaaatccaaccaaagaaagcagcagaacaaa

SEQ ID NO: 137259 - DNA, 33 bp, Homo sapien
cagcgtggagggaaaagcaggggacttcgagag

SEQ ID NO: 137260 - DNA, 33 bp, Homo sapien
cagcgtggagggaaaatcaggggacttcgagag

SEQ ID NO: 137261 - DNA, 33 bp, Homo sapien
ttgttactgaaggaagaatcccaatgacagtat

SEQ ID NO: 137262 - DNA, 33 bp, Homo sapien
ttgttactgaaggaagtatcccaatgacagtat

SEQ ID NO: 137263 - DNA, 33 bp, Homo sapien
cttgcacttgcatgccacgtgcgatcttccaga

SEQ ID NO: 137264 - DNA, 33 bp, Homo sapien
cttgcacttgcatgccgcgtgcgatcttccaga

SEQ ID NO: 137265 - DNA, 33 bp, Homo sapien
ggcagccgagttgccacatctgggtctctctct

SEQ ID NO: 137266 - DNA, 33 bp, Homo sapien
ggcagccgagttgccatatctgggtctctctct

SEQ ID NO: 137267 - DNA, 33 bp, Homo sapien
tgatgggcaagcactaacctctggtggactggc

SEQ ID NO: 137268 - DNA, 33 bp, Homo sapien
tgatgggcaagcactagcctctggtggactggc

SEQ ID NO: 137269 - DNA, 33 bp, Homo sapien
tgcagaggattttgcggccctcgagggtggccg

SEQ ID NO: 137270 - DNA, 33 bp, Homo sapien
tgcagaggattttgcgtccctcgagggtggccg

SEQ ID NO: 137271 - DNA, 33 bp, Homo sapien
acgcctattcctccagccacaacctgcatgtca

SEQ ID NO: 137272 - DNA, 33 bp, Homo sapien
acgcctattcctccagtcacaacctgcatgtca

SEQ ID NO: 137273 - DNA, 33 bp, Homo sapien
catccacattaatggacatttaggtatggccta

SEQ ID NO: 137274 - DNA, 33 bp, Homo sapien
catccacattaatggatatttaggtatggccta

SEQ ID NO: 137275 - DNA, 33 bp, Homo sapien
aggggtcctgaactgacgcttaccatcttgggt

SEQ ID NO: 137276 - DNA, 33 bp, Homo sapien
aggggtcctgaactgatgcttaccatcttgggt

SEQ ID NO: 137277 - DNA, 33 bp, Homo sapien
cctatgcattcctcaaggacgagctacaattcc

SEQ ID NO: 137278 - DNA, 33 bp, Homo sapien
cctatgcattcctcaatgacgagctacaattcc

SEQ ID NO: 137279 - DNA, 33 bp, Homo sapien
ttctcccatcagagcaccatccaagagtgagat

SEQ ID NO: 137280 - DNA, 33 bp, Homo sapien
ttctcccatcagagcatcatccaagagtgagat

SEQ ID NO: 137281 - DNA, 33 bp, Homo sapien
agtactgagaatgaacaagtgaaggttttcaaa

SEQ ID NO: 137282 - DNA, 33 bp, Homo sapien
agtactgagaatgaacgagtgaaggttttcaaa

SEQ ID NO: 137283 - DNA, 33 bp, Homo sapien
accctgtctcaaaaaaaattgtttcaggtgtat

SEQ ID NO: 137284 - DNA, 33 bp, Homo sapien
accctgtctcaaaaaagattgtttcaggtgtat

SEQ ID NO: 137285 - DNA, 33 bp, Homo sapien
tggtcctgtgattccaccagaagagaatatatg

SEQ ID NO: 137286 - DNA, 33 bp, Homo sapien
tggtcctgtgattccagcagaagagaatatatg

SEQ ID NO: 137287 - DNA, 33 bp, Homo sapien
gtgcaagaaaatacacagggcaggatttagcta

SEQ ID NO: 137288 - DNA, 33 bp, Homo sapien
gtgcaagaaaatacacggggcaggatttagcta

SEQ ID NO: 137289 - DNA, 33 bp, Homo sapien
tttcccttaacttggacgaaacagcaaaattct

SEQ ID NO: 137290 - DNA, 33 bp, Homo sapien
tttcccttaacttggatgaaacagcaaaattct

SEQ ID NO: 137291 - DNA, 33 bp, Homo sapien
ggattgatgctctaaaacgttttgtggagaatc

SEQ ID NO: 137292 - DNA, 33 bp, Homo sapien
ggattgatgctctaaatcgttttgtggagaatc

SEQ ID NO: 137293 - DNA, 33 bp, Homo sapien
tatataaagcaacaatgaaaacatatgcaatga

SEQ ID NO: 137294 - DNA, 33 bp, Homo sapien
tatataaagcaacaattaaaacatatgcaatga

SEQ ID NO: 137295 - DNA, 33 bp, Homo sapien
agagcccctgccttcacggaccttctgtgtcat

SEQ ID NO: 137296 - DNA, 33 bp, Homo sapien
agagcccctgccttcatggaccttctgtgtcat

SEQ ID NO: 137297 - DNA, 33 bp, Homo sapien
ctataaactctgcgagcccaacccattctcact

SEQ ID NO: 137298 - DNA, 33 bp, Homo sapien
ctataaactctgcgagtccaacccattctcact

SEQ ID NO: 137299 - DNA, 33 bp, Homo sapien
aattcttttccgcttcaatgctaagcatgtttc

SEQ ID NO: 137300 - DNA, 33 bp, Homo sapien
aattcttttccgcttcgatgctaagcatgtttc

SEQ ID NO: 137301 - DNA, 33 bp, Homo sapien
gctcagtcagtgcttcaagtccctggcctatgt

SEQ ID NO: 137302 - DNA, 33 bp, Homo sapien
gctcagtcagtgcttcgagtccctggcctatgt

SEQ ID NO: 137303 - DNA, 33 bp, Homo sapien
gcctctctaacatcaacgctttcccccaacaaa

SEQ ID NO: 137304 - DNA, 33 bp, Homo sapien
gcctctctaacatcaatgctttcccccaacaaa

SEQ ID NO: 137305 - DNA, 33 bp, Homo sapien
ccaaccttgaccttgaaccttcatcttatacca

SEQ ID NO: 137306 - DNA, 33 bp, Homo sapien
ccaaccttgaccttgacccttcatcttatacca

SEQ ID NO: 137307 - DNA, 33 bp, Homo sapien
gccaaatcttccttaagtgttccttcaaggaag

SEQ ID NO: 137308 - DNA, 33 bp, Homo sapien
gccaaatcttccttaattgttccttcaaggaag

SEQ ID NO: 137309 - DNA, 33 bp, Homo sapien
ttcaaattctcagggcaaatctgatggtgtaac

SEQ ID NO: 137310 - DNA, 33 bp, Homo sapien
ttcaaattctcagggcgaatctgatggtgtaac

SEQ ID NO: 137311 - DNA, 33 bp, Homo sapien
tgtgaaatggggggaaataatatctgctgtcca

SEQ ID NO: 137312 - DNA, 33 bp, Homo sapien
tgtgaaatggggggaagtaatatctgctgtcca

SEQ ID NO: 137313 - DNA, 33 bp, Homo sapien
gtttttgtaagctgaacacttcctagaggtgta

SEQ ID NO: 137314 - DNA, 33 bp, Homo sapien
gtttttgtaagctgaatacttcctagaggtgta

SEQ ID NO: 137315 - DNA, 33 bp, Homo sapien
tatgagataaagacaaaagggaaatggtaggag

SEQ ID NO: 137316 - DNA, 33 bp, Homo sapien
tatgagataaagacaagagggaaatggtaggag

SEQ ID NO: 137317 - DNA, 33 bp, Homo sapien
tggctgcaacctcttccagctcctcagatcctg

SEQ ID NO: 137318 - DNA, 33 bp, Homo sapien
tggctgcaacctcttctagctcctcagatcctg

SEQ ID NO: 137319 - DNA, 33 bp, Homo sapien
aggggtaggaattcaactggcacttttaaggga

SEQ ID NO: 137320 - DNA, 33 bp, Homo sapien
aggggtaggaattcaattggcacttttaaggga

SEQ ID NO: 137321 - DNA, 33 bp, Homo sapien
ctatgacattatcacaatggtgggaagagttcc

SEQ ID NO: 137322 - DNA, 33 bp, Homo sapien
ctatgacattatcacagtggtgggaagagttcc

SEQ ID NO: 137323 - DNA, 33 bp, Homo sapien
cccatcagataagagcaagggtcagctggcttc

SEQ ID NO: 137324 - DNA, 33 bp, Homo sapien
cccatcagataagagcgagggtcagctggcttc

SEQ ID NO: 137325 - DNA, 33 bp, Homo sapien
gtgtctgctgagactacccaagacccagtcaca

SEQ ID NO: 137326 - DNA, 33 bp, Homo sapien
gtgtctgctgagactatccaagacccagtcaca

SEQ ID NO: 137327 - DNA, 33 bp, Homo sapien
tgggttattggacacacagtcctggaatatcct

SEQ ID NO: 137328 - DNA, 33 bp, Homo sapien
tgggttattggacacatagtcctggaatatcct

SEQ ID NO: 137329 - DNA, 33 bp, Homo sapien
tctgtcatagaatgggcacattagactgaaaac

SEQ ID NO: 137330 - DNA, 33 bp, Homo sapien
tctgtcatagaatggggacattagactgaaaac

SEQ ID NO: 137331 - DNA, 33 bp, Homo sapien
catggaataagcaagaagccactgagacaccaa

SEQ ID NO: 137332 - DNA, 33 bp, Homo sapien
catggaataagcaagaggccactgagacaccaa

SEQ ID NO: 137333 - DNA, 33 bp, Homo sapien
ataaatatatttattaagtagcgctgcggctaa

SEQ ID NO: 137334 - DNA, 33 bp, Homo sapien
ataaatatatttattatgtagcgctgcggctaa

SEQ ID NO: 137335 - DNA, 33 bp, Homo sapien
agatccttgctgtataagaacaggaatacagct

SEQ ID NO: 137336 - DNA, 33 bp, Homo sapien
agatccttgctgtataggaacaggaatacagct

SEQ ID NO: 137337 - DNA, 33 bp, Homo sapien
attaaacaccatgtccagagatacagaggtatt

SEQ ID NO: 137338 - DNA, 33 bp, Homo sapien
attaaacaccatgtccggagatacagaggtatt

SEQ ID NO: 137339 - DNA, 33 bp, Homo sapien
caccgaatccaagatcaatgccagtgaggcatc

SEQ ID NO: 137340 - DNA, 33 bp, Homo sapien
caccgaatccaagatcgatgccagtgaggcatc

SEQ ID NO: 137341 - DNA, 33 bp, Homo sapien
gttattggcgtatcacactgggtatgttaactc

SEQ ID NO: 137342 - DNA, 33 bp, Homo sapien
gttattggcgtatcacgctgggtatgttaactc

SEQ ID NO: 137343 - DNA, 33 bp, Homo sapien
aatgctgcagttgctaataacaaccacatctac

SEQ ID NO: 137344 - DNA, 33 bp, Homo sapien
aatgctgcagttgctagtaacaaccacatctac

SEQ ID NO: 137345 - DNA, 33 bp, Homo sapien
aaaggaatgaaaggaacggccaccatgaagggg

SEQ ID NO: 137346 - DNA, 33 bp, Homo sapien
aaaggaatgaaaggaatggccaccatgaagggg

SEQ ID NO: 137347 - DNA, 33 bp, Homo sapien
aataataaaagaatgaactggaccaacatattt

SEQ ID NO: 137348 - DNA, 33 bp, Homo sapien
aataataaaagaatgatctggaccaacatattt

SEQ ID NO: 137349 - DNA, 33 bp, Homo sapien
tgagctgggcatcaaacagtaagctcaccaggt

SEQ ID NO: 137350 - DNA, 33 bp, Homo sapien
tgagctgggcatcaaagagtaagctcaccaggt

SEQ ID NO: 137351 - DNA, 33 bp, Homo sapien
accatgtgctgctccacgtgtcatggccctgat

SEQ ID NO: 137352 - DNA, 33 bp, Homo sapien
accatgtgctgctccatgtgtcatggccctgat

SEQ ID NO: 137353 - DNA, 33 bp, Homo sapien
actgaggacggctgcaaaagcattgccgacaat

SEQ ID NO: 137354 - DNA, 33 bp, Homo sapien
actgaggacggctgcagaagcattgccgacaat

SEQ ID NO: 137355 - DNA, 33 bp, Homo sapien
gagataataattccaacgaccatgctgacattg

SEQ ID NO: 137356 - DNA, 33 bp, Homo sapien
gagataataattccaatgaccatgctgacattg

SEQ ID NO: 137357 - DNA, 33 bp, Homo sapien
tgtgcttcaagcttgcacagttggtcaatagaa

SEQ ID NO: 137358 - DNA, 33 bp, Homo sapien
tgtgcttcaagcttgcccagttggtcaatagaa

SEQ ID NO: 137359 - DNA, 33 bp, Homo sapien
ctttgaattacagagagtccctaaaagtagtcc

SEQ ID NO: 137360 - DNA, 33 bp, Homo sapien
ctttgaattacagagattccctaaaagtagtcc

SEQ ID NO: 137361 - DNA, 33 bp, Homo sapien
ctgattttagtccacaaagatgttaacaaatag

SEQ ID NO: 137362 - DNA, 33 bp, Homo sapien
ctgattttagtccacacagatgttaacaaatag

SEQ ID NO: 137363 - DNA, 33 bp, Homo sapien
tggtccaggaaactagcagcagaatggctgtca

SEQ ID NO: 137364 - DNA, 33 bp, Homo sapien
tggtccaggaaactaggagcagaatggctgtca

SEQ ID NO: 137365 - DNA, 33 bp, Homo sapien
atttttgtatttttggaagggtacatatggggt

SEQ ID NO: 137366 - DNA, 33 bp, Homo sapien
atttttgtatttttgggagggtacatatggggt

SEQ ID NO: 137367 - DNA, 33 bp, Homo sapien
aaatggcctaatcaaaagttacaaaaaacgaag

SEQ ID NO: 137368 - DNA, 33 bp, Homo sapien
aaatggcctaatcaaatgttacaaaaaacgaag

SEQ ID NO: 137369 - DNA, 33 bp, Homo sapien
ctgacttctttcactcaacactttgtgagaatt

SEQ ID NO: 137370 - DNA, 33 bp, Homo sapien
ctgacttctttcactcgacactttgtgagaatt

SEQ ID NO: 137371 - DNA, 33 bp, Homo sapien
tgagaatccatttggcaaagtgctgttaatatg

SEQ ID NO: 137372 - DNA, 33 bp, Homo sapien
tgagaatccatttggcgaagtgctgttaatatg

SEQ ID NO: 137373 - DNA, 33 bp, Homo sapien
tctaaacattcaactacagaacaagtacaaagg

SEQ ID NO: 137374 - DNA, 33 bp, Homo sapien
tctaaacattcaactatagaacaagtacaaagg

SEQ ID NO: 137375 - DNA, 33 bp, Homo sapien
cgcgctccttctcacccatcccctgctgcattg

SEQ ID NO: 137376 - DNA, 33 bp, Homo sapien
cgcgctccttctcaccgatcccctgctgcattg

SEQ ID NO: 137377 - DNA, 33 bp, Homo sapien
atttaatctagtctaaacctctgagagttgagg

SEQ ID NO: 137378 - DNA, 33 bp, Homo sapien
atttaatctagtctaaccctctgagagttgagg

SEQ ID NO: 137379 - DNA, 33 bp, Homo sapien
acattcctgtcctcaaaagcttagtatgcagag

SEQ ID NO: 137380 - DNA, 33 bp, Homo sapien
acattcctgtcctcaagagcttagtatgcagag

SEQ ID NO: 137381 - DNA, 33 bp, Homo sapien
gtatgcttatgacagggactatcatatccccga

SEQ ID NO: 137382 - DNA, 33 bp, Homo sapien
gtatgcttatgacaggtactatcatatccccga

SEQ ID NO: 137383 - DNA, 33 bp, Homo sapien
gggctgcataagccagaagaagatatttcaaca

SEQ ID NO: 137384 - DNA, 33 bp, Homo sapien
gggctgcataagccaggagaagatatttcaaca

SEQ ID NO: 137385 - DNA, 33 bp, Homo sapien
tccctaaaaaatttcgaaaatcatcctagtctt

SEQ ID NO: 137386 - DNA, 33 bp, Homo sapien
tccctaaaaaatttcgtaaatcatcctagtctt

SEQ ID NO: 137387 - DNA, 33 bp, Homo sapien
atggttctgtcacaccaattagatccagagtct

SEQ ID NO: 137388 - DNA, 33 bp, Homo sapien
atggttctgtcacaccgattagatccagagtct

SEQ ID NO: 137389 - DNA, 33 bp, Homo sapien
gtctgtgtctctgaaacgtgccctgctgggaag

SEQ ID NO: 137390 - DNA, 33 bp, Homo sapien
gtctgtgtctctgaaatgtgccctgctgggaag

SEQ ID NO: 137391 - DNA, 33 bp, Homo sapien
acaagagtaaatgaaaagggtgtgaaatcatgt

SEQ ID NO: 137392 - DNA, 33 bp, Homo sapien
acaagagtaaatgaaaggggtgtgaaatcatgt

SEQ ID NO: 137393 - DNA, 33 bp, Homo sapien
cagagtgctctctggaccgttttgtttgtggtt

SEQ ID NO: 137394 - DNA, 33 bp, Homo sapien
cagagtgctctctggatcgttttgtttgtggtt

SEQ ID NO: 137395 - DNA, 33 bp, Homo sapien
tgtgatcatcaattaaatggctcttaattcctt

SEQ ID NO: 137396 - DNA, 33 bp, Homo sapien
tgtgatcatcaattaagtggctcttaattcctt

SEQ ID NO: 137397 - DNA, 33 bp, Homo sapien
attggcccatgaccaaccagaggctgaagtttt

SEQ ID NO: 137398 - DNA, 33 bp, Homo sapien
attggcccatgaccaatcagaggctgaagtttt

SEQ ID NO: 137399 - DNA, 33 bp, Homo sapien
ctagaatcaggtaccacgtgagggctttgtaaa

SEQ ID NO: 137400 - DNA, 33 bp, Homo sapien
ctagaatcaggtaccatgtgagggctttgtaaa

SEQ ID NO: 137401 - DNA, 33 bp, Homo sapien
ctcaatggtatagataccacctgtgaagtcaga

SEQ ID NO: 137402 - DNA, 33 bp, Homo sapien
ctcaatggtatagatatcacctgtgaagtcaga

SEQ ID NO: 137403 - DNA, 33 bp, Homo sapien
cactctctccagcacaatgtcaggcttgagtga

SEQ ID NO: 137404 - DNA, 33 bp, Homo sapien
cactctctccagcacagtgtcaggcttgagtga

SEQ ID NO: 137405 - DNA, 33 bp, Homo sapien
tgaccaaaatttctgactaacctcttgcagccc

SEQ ID NO: 137406 - DNA, 33 bp, Homo sapien
tgaccaaaatttctgattaacctcttgcagccc

SEQ ID NO: 137407 - DNA, 33 bp, Homo sapien
gcttcattttacacaccggaaactaaggcctgg

SEQ ID NO: 137408 - DNA, 33 bp, Homo sapien
gcttcattttacacactggaaactaaggcctgg

SEQ ID NO: 137409 - DNA, 33 bp, Homo sapien
gacaaatcttcttttcacaaatgcccttgaacc

SEQ ID NO: 137410 - DNA, 33 bp, Homo sapien
gacaaatcttcttttctcaaatgcccttgaacc

SEQ ID NO: 137411 - DNA, 33 bp, Homo sapien
ggatggaaacccttgccgactggaactatctgt

SEQ ID NO: 137412 - DNA, 33 bp, Homo sapien
ggatggaaacccttgctgactggaactatctgt

SEQ ID NO: 137413 - DNA, 33 bp, Homo sapien
ctgcctcaaagatgtcaaaactgctgcccaact

SEQ ID NO: 137414 - DNA, 33 bp, Homo sapien
ctgcctcaaagatgtcgaaactgctgcccaact

SEQ ID NO: 137415 - DNA, 33 bp, Homo sapien
acagcctggatgaagaagaaggtcaacattcaa

SEQ ID NO: 137416 - DNA, 33 bp, Homo sapien
acagcctggatgaagatgaaggtcaacattcaa

SEQ ID NO: 137417 - DNA, 33 bp, Homo sapien
aagtcactcaaatgagcccacaattttcttttt

SEQ ID NO: 137418 - DNA, 33 bp, Homo sapien
aagtcactcaaatgagtccacaattttcttttt

SEQ ID NO: 137419 - DNA, 33 bp, Homo sapien
gggattcctgcgtaataaatagttaatcagtta

SEQ ID NO: 137420 - DNA, 33 bp, Homo sapien
gggattcctgcgtaatgaatagttaatcagtta

SEQ ID NO: 137421 - DNA, 33 bp, Homo sapien
cagccataaagaaatgaagtacagtcatgcacc

SEQ ID NO: 137422 - DNA, 33 bp, Homo sapien
cagccataaagaaatggagtacagtcatgcacc

SEQ ID NO: 137423 - DNA, 33 bp, Homo sapien
attgtgcttcatgttacggaggctacagtgtca

SEQ ID NO: 137424 - DNA, 33 bp, Homo sapien
attgtgcttcatgttatggaggctacagtgtca

SEQ ID NO: 137425 - DNA, 33 bp, Homo sapien
aagaaaccgcattggcacataaccaattgcatt

SEQ ID NO: 137426 - DNA, 33 bp, Homo sapien
aagaaaccgcattggcgcataaccaattgcatt

SEQ ID NO: 137427 - DNA, 33 bp, Homo sapien
gataggtagagaaatacgagcaaagtggatgga

SEQ ID NO: 137428 - DNA, 33 bp, Homo sapien
gataggtagagaaatatgagcaaagtggatgga

SEQ ID NO: 137429 - DNA, 33 bp, Homo sapien
aatatcctgttcagaaatgagtttgctcttctg

SEQ ID NO: 137430 - DNA, 33 bp, Homo sapien
aatatcctgttcagaagtgagtttgctcttctg

SEQ ID NO: 137431 - DNA, 33 bp, Homo sapien
atttatgtgaccttccaacaaataacagcagct

SEQ ID NO: 137432 - DNA, 33 bp, Homo sapien
atttatgtgaccttccgacaaataacagcagct

SEQ ID NO: 137433 - DNA, 33 bp, Homo sapien
tgccgaaagtgacacaacatcacaagtggagag

SEQ ID NO: 137434 - DNA, 33 bp, Homo sapien
tgccgaaagtgacacagcatcacaagtggagag

SEQ ID NO: 137435 - DNA, 33 bp, Homo sapien
aactcctggttcccttcaaagaattgctaagag

SEQ ID NO: 137436 - DNA, 33 bp, Homo sapien
aactcctggttcccttgaaagaattgctaagag

SEQ ID NO: 137437 - DNA, 33 bp, Homo sapien
gggggaaaataggctacaaattgatctttgtgg

SEQ ID NO: 137438 - DNA, 33 bp, Homo sapien
gggggaaaataggctagaaattgatctttgtgg

SEQ ID NO: 137439 - DNA, 33 bp, Homo sapien
tagaaaggcatagcaaatagatctccacttgaa

SEQ ID NO: 137440 - DNA, 33 bp, Homo sapien
tagaaaggcatagcaagtagatctccacttgaa

SEQ ID NO: 137441 - DNA, 33 bp, Homo sapien
taatagccgtttggaccgatgtgatatggtatc

SEQ ID NO: 137442 - DNA, 33 bp, Homo sapien
taatagccgtttggactgatgtgatatggtatc

SEQ ID NO: 137443 - DNA, 33 bp, Homo sapien
ggctgtgatgaacagaagagtacacgtgtcttt

SEQ ID NO: 137444 - DNA, 33 bp, Homo sapien
ggctgtgatgaacagacgagtacacgtgtcttt

SEQ ID NO: 137445 - DNA, 33 bp, Homo sapien
actttaaaaaagtagacaggattagaccaaaga

SEQ ID NO: 137446 - DNA, 33 bp, Homo sapien
actttaaaaaagtagataggattagaccaaaga

SEQ ID NO: 137447 - DNA, 33 bp, Homo sapien
cctcttacatagtaccactacccaaaggcagct

SEQ ID NO: 137448 - DNA, 33 bp, Homo sapien
cctcttacatagtaccgctacccaaaggcagct

SEQ ID NO: 137449 - DNA, 33 bp, Homo sapien
catcgcttcatcccacacgtttttcctctctct

SEQ ID NO: 137450 - DNA, 33 bp, Homo sapien
catcgcttcatcccacgcgtttttcctctctct

SEQ ID NO: 137451 - DNA, 33 bp, Homo sapien
gggatgaaataagaacggaatcttctgctcttt

SEQ ID NO: 137452 - DNA, 33 bp, Homo sapien
gggatgaaataagaactgaatcttctgctcttt

SEQ ID NO: 137453 - DNA, 33 bp, Homo sapien
aacatacatgtggtaacaaccagactgtcaaag

SEQ ID NO: 137454 - DNA, 33 bp, Homo sapien
aacatacatgtggtaataaccagactgtcaaag

SEQ ID NO: 137455 - DNA, 33 bp, Homo sapien
ttgactagtcagtacaatggaaagtgctgggag

SEQ ID NO: 137456 - DNA, 33 bp, Homo sapien
ttgactagtcagtacagtggaaagtgctgggag

SEQ ID NO: 137457 - DNA, 33 bp, Homo sapien
aagtgtgttacaccaacgcaaaatgttactaac

SEQ ID NO: 137458 - DNA, 33 bp, Homo sapien
aagtgtgttacaccaatgcaaaatgttactaac

SEQ ID NO: 137459 - DNA, 33 bp, Homo sapien
ggattattcatcaggaactaggcaagtgggaga

SEQ ID NO: 137460 - DNA, 33 bp, Homo sapien
ggattattcatcaggagctaggcaagtgggaga

SEQ ID NO: 137461 - DNA, 33 bp, Homo sapien
tagatggcttatctcacattagagtctaaaaaa

SEQ ID NO: 137462 - DNA, 33 bp, Homo sapien
tagatggcttatctcatattagagtctaaaaaa

SEQ ID NO: 137463 - DNA, 33 bp, Homo sapien
ctactagaagcccttcactatggctcattgcta

SEQ ID NO: 137464 - DNA, 33 bp, Homo sapien
ctactagaagcccttcgctatggctcattgcta

SEQ ID NO: 137465 - DNA, 33 bp, Homo sapien
ccatttcaatgacttacctgtgtttactttatc

SEQ ID NO: 137466 - DNA, 33 bp, Homo sapien
ccatttcaatgacttatctgtgtttactttatc

SEQ ID NO: 137467 - DNA, 33 bp, Homo sapien
cagcttaccgggtcccaaccgcatgccatatac

SEQ ID NO: 137468 - DNA, 33 bp, Homo sapien
cagcttaccgggtcccgaccgcatgccatatac

SEQ ID NO: 137469 - DNA, 33 bp, Homo sapien
gtcagaggaagccagacgggcgggaagagaata

SEQ ID NO: 137470 - DNA, 33 bp, Homo sapien
gtcagaggaagccagatgggcgggaagagaata

SEQ ID NO: 137471 - DNA, 33 bp, Homo sapien
aatcaatcattaattgcatcaccttattataca

SEQ ID NO: 137472 - DNA, 33 bp, Homo sapien
aatcaatcattaattggatcaccttattataca

SEQ ID NO: 137473 - DNA, 33 bp, Homo sapien
taaaatatgtaaaggacacaacttagattaact

SEQ ID NO: 137474 - DNA, 33 bp, Homo sapien
taaaatatgtaaaggagacaacttagattaact

SEQ ID NO: 137475 - DNA, 33 bp, Homo sapien
taaacacaggccaaaaagacattttgggggcat

SEQ ID NO: 137476 - DNA, 33 bp, Homo sapien
taaacacaggccaaaaggacattttgggggcat

SEQ ID NO: 137477 - DNA, 33 bp, Homo sapien
ttactcactcaaggaaataatttacatgggaac

SEQ ID NO: 137478 - DNA, 33 bp, Homo sapien
ttactcactcaaggaagtaatttacatgggaac

SEQ ID NO: 137479 - DNA, 33 bp, Homo sapien
atagcatcttcctggtaacattgagagtctgtg

SEQ ID NO: 137480 - DNA, 33 bp, Homo sapien
atagcatcttcctggtgacattgagagtctgtg

SEQ ID NO: 137481 - DNA, 33 bp, Homo sapien
ttgtttgtttgtcaagaaggtaatcgccctaaa

SEQ ID NO: 137482 - DNA, 33 bp, Homo sapien
ttgtttgtttgtcaaggaggtaatcgccctaaa

SEQ ID NO: 137483 - DNA, 33 bp, Homo sapien
agactcccataaagtaaattgctgttgccagga

SEQ ID NO: 137484 - DNA, 33 bp, Homo sapien
agactcccataaagtatattgctgttgccagga

SEQ ID NO: 137485 - DNA, 33 bp, Homo sapien
aaatgactaatgctgactatattgcaattctat

SEQ ID NO: 137486 - DNA, 33 bp, Homo sapien
aaatgactaatgctgattatattgcaattctat

SEQ ID NO: 137487 - DNA, 33 bp, Homo sapien
agaattggtacaggaaacagaaggcaattaacc

SEQ ID NO: 137488 - DNA, 33 bp, Homo sapien
agaattggtacaggaagcagaaggcaattaacc

SEQ ID NO: 137489 - DNA, 33 bp, Homo sapien
aggtggagaaggcccactctgaggatagagtta

SEQ ID NO: 137490 - DNA, 33 bp, Homo sapien
aggtggagaaggcccattctgaggatagagtta

SEQ ID NO: 137491 - DNA, 33 bp, Homo sapien
ggatgaatggaaaggaaatattcaaggggggag

SEQ ID NO: 137492 - DNA, 33 bp, Homo sapien
ggatgaatggaaaggacatattcaaggggggag

SEQ ID NO: 137493 - DNA, 33 bp, Homo sapien
tttagctccgtagctacacttatgttacattct

SEQ ID NO: 137494 - DNA, 33 bp, Homo sapien
tttagctccgtagctatacttatgttacattct

SEQ ID NO: 137495 - DNA, 33 bp, Homo sapien
tgcttaaatcatctgccaggatctacttgcttc

SEQ ID NO: 137496 - DNA, 33 bp, Homo sapien
tgcttaaatcatctgctaggatctacttgcttc

SEQ ID NO: 137497 - DNA, 33 bp, Homo sapien
aaaaattcatggaaaaaaatctgtggaaaggct

SEQ ID NO: 137498 - DNA, 33 bp, Homo sapien
aaaaattcatggaaaagaatctgtggaaaggct

SEQ ID NO: 137499 - DNA, 33 bp, Homo sapien
catgtccatttatttacgtattgtctacggctg

SEQ ID NO: 137500 - DNA, 33 bp, Homo sapien
catgtccatttatttatgtattgtctacggctg

SEQ ID NO: 137501 - DNA, 33 bp, Homo sapien
cagagggtggccccacacagtctcacaggctgc

SEQ ID NO: 137502 - DNA, 33 bp, Homo sapien
cagagggtggccccacgcagtctcacaggctgc

SEQ ID NO: 137503 - DNA, 33 bp, Homo sapien
actcctggtatgagacaagccgtggactttgag

SEQ ID NO: 137504 - DNA, 33 bp, Homo sapien
actcctggtatgagacgagccgtggactttgag

SEQ ID NO: 137505 - DNA, 33 bp, Homo sapien
agagattgttcgagtcactaactagaaaagcct

SEQ ID NO: 137506 - DNA, 33 bp, Homo sapien
agagattgttcgagtcgctaactagaaaagcct

SEQ ID NO: 137507 - DNA, 33 bp, Homo sapien
gcccagtcctaaagaaaatgaaaacaacctctc

SEQ ID NO: 137508 - DNA, 33 bp, Homo sapien
gcccagtcctaaagaacatgaaaacaacctctc

SEQ ID NO: 137509 - DNA, 33 bp, Homo sapien
aaggttttccatcatcaagaccgttgagttgca

SEQ ID NO: 137510 - DNA, 33 bp, Homo sapien
aaggttttccatcatcgagaccgttgagttgca

SEQ ID NO: 137511 - DNA, 33 bp, Homo sapien
acactggagtttgttacgtagtggaagagaaac

SEQ ID NO: 137512 - DNA, 33 bp, Homo sapien
acactggagtttgttatgtagtggaagagaaac

SEQ ID NO: 137513 - DNA, 33 bp, Homo sapien
tatttgtgttccattcaatcagtagaaaaggca

SEQ ID NO: 137514 - DNA, 33 bp, Homo sapien
tatttgtgttccattcgatcagtagaaaaggca

SEQ ID NO: 137515 - DNA, 33 bp, Homo sapien
aaaatgatctatgacacgggaatatttggagtt

SEQ ID NO: 137516 - DNA, 33 bp, Homo sapien
aaaatgatctatgacatgggaatatttggagtt

SEQ ID NO: 137517 - DNA, 33 bp, Homo sapien
gctgtgctattcttcagcctgtaaccggagcag

SEQ ID NO: 137518 - DNA, 33 bp, Homo sapien
gctgtgctattcttcatcctgtaaccggagcag

SEQ ID NO: 137519 - DNA, 33 bp, Homo sapien
tattatttagaccagacgattctaacttgaaaa

SEQ ID NO: 137520 - DNA, 33 bp, Homo sapien
tattatttagaccagatgattctaacttgaaaa

SEQ ID NO: 137521 - DNA, 33 bp, Homo sapien
catgtacaaaatgcaaatctaggcacttcaaag

SEQ ID NO: 137522 - DNA, 33 bp, Homo sapien
catgtacaaaatgcaattctaggcacttcaaag

SEQ ID NO: 137523 - DNA, 33 bp, Homo sapien
ttgtgctagcctactcaactggggacttcttga

SEQ ID NO: 137524 - DNA, 33 bp, Homo sapien
ttgtgctagcctactcgactggggacttcttga

SEQ ID NO: 137525 - DNA, 33 bp, Homo sapien
gaacagaggaaggataacagtgcatcctgattg

SEQ ID NO: 137526 - DNA, 33 bp, Homo sapien
gaacagaggaaggataccagtgcatcctgattg

SEQ ID NO: 137527 - DNA, 33 bp, Homo sapien
aacatcttgtatgtaacgccatcgtgccactgg

SEQ ID NO: 137528 - DNA, 33 bp, Homo sapien
aacatcttgtatgtaatgccatcgtgccactgg

SEQ ID NO: 137529 - DNA, 33 bp, Homo sapien
aacactaccagttagaaaggccacagtctcaat

SEQ ID NO: 137530 - DNA, 33 bp, Homo sapien
aacactaccagttagagaggccacagtctcaat

SEQ ID NO: 137531 - DNA, 33 bp, Homo sapien
tgttcatcagataaatcaataaaaatctatgtc

SEQ ID NO: 137532 - DNA, 33 bp, Homo sapien
tgttcatcagataaatgaataaaaatctatgtc

SEQ ID NO: 137533 - DNA, 33 bp, Homo sapien
agacttgtcttcccaaatcaaacaacaaaactg

SEQ ID NO: 137534 - DNA, 33 bp, Homo sapien
agacttgtcttcccaagtcaaacaacaaaactg

SEQ ID NO: 137535 - DNA, 33 bp, Homo sapien
taggtccatttagcaaaatctcaacacatcatg

SEQ ID NO: 137536 - DNA, 33 bp, Homo sapien
taggtccatttagcaagatctcaacacatcatg

SEQ ID NO: 137537 - DNA, 33 bp, Homo sapien
tccccaatgtggaaataaggaaacggaagcaaa

SEQ ID NO: 137538 - DNA, 33 bp, Homo sapien
tccccaatgtggaaatgaggaaacggaagcaaa

SEQ ID NO: 137539 - DNA, 33 bp, Homo sapien
ttgaaatcaatcagaaataaggtttttccattc

SEQ ID NO: 137540 - DNA, 33 bp, Homo sapien
ttgaaatcaatcagaactaaggtttttccattc

SEQ ID NO: 137541 - DNA, 33 bp, Homo sapien
actaaaaagaagacacaatgatttgagggcttt

SEQ ID NO: 137542 - DNA, 33 bp, Homo sapien
actaaaaagaagacacgatgatttgagggcttt

SEQ ID NO: 137543 - DNA, 33 bp, Homo sapien
tactcttcatgaatcactatagatccatatctg

SEQ ID NO: 137544 - DNA, 33 bp, Homo sapien
tactcttcatgaatcagtatagatccatatctg

SEQ ID NO: 137545 - DNA, 33 bp, Homo sapien
tttccttctcctcaggaaagatgtgcttacatt

SEQ ID NO: 137546 - DNA, 33 bp, Homo sapien
tttccttctcctcaggcaagatgtgcttacatt

SEQ ID NO: 137547 - DNA, 33 bp, Homo sapien
caaaagcacctggagaactttccccagcctctg

SEQ ID NO: 137548 - DNA, 33 bp, Homo sapien
caaaagcacctggagacctttccccagcctctg

SEQ ID NO: 137549 - DNA, 33 bp, Homo sapien
tcctgacacaaatgcactaagacttctctgtct

SEQ ID NO: 137550 - DNA, 33 bp, Homo sapien
tcctgacacaaatgcagtaagacttctctgtct

SEQ ID NO: 137551 - DNA, 33 bp, Homo sapien
ccaagaacatggtgtgaatcaggaacttacatc

SEQ ID NO: 137552 - DNA, 33 bp, Homo sapien
ccaagaacatggtgtggatcaggaacttacatc

SEQ ID NO: 137553 - DNA, 33 bp, Homo sapien
attttgcctttgttccagcggggtgttaactat

SEQ ID NO: 137554 - DNA, 33 bp, Homo sapien
attttgcctttgttccggcggggtgttaactat

SEQ ID NO: 137555 - DNA, 33 bp, Homo sapien
tcctatcataacatcacgcctagtgtgctagtt

SEQ ID NO: 137556 - DNA, 33 bp, Homo sapien
tcctatcataacatcatgcctagtgtgctagtt

SEQ ID NO: 137557 - DNA, 33 bp, Homo sapien
tgagtcatctcttccccctctcccttggcacct

SEQ ID NO: 137558 - DNA, 33 bp, Homo sapien
tgagtcatctcttccctctctcccttggcacct

SEQ ID NO: 137559 - DNA, 33 bp, Homo sapien
atagaactgatgacgaacctatgcctcaaagtg

SEQ ID NO: 137560 - DNA, 33 bp, Homo sapien
atagaactgatgacgaccctatgcctcaaagtg

SEQ ID NO: 137561 - DNA, 33 bp, Homo sapien
tctggcaaatactcaactgaacagggtaagtct

SEQ ID NO: 137562 - DNA, 33 bp, Homo sapien
tctggcaaatactcaagtgaacagggtaagtct

SEQ ID NO: 137563 - DNA, 33 bp, Homo sapien
agaagaggaaggtcataatataaaatcataagc

SEQ ID NO: 137564 - DNA, 33 bp, Homo sapien
agaagaggaaggtcatcatataaaatcataagc

SEQ ID NO: 137565 - DNA, 33 bp, Homo sapien
ttcagggtaagaatgcaataaacattagctgcc

SEQ ID NO: 137566 - DNA, 33 bp, Homo sapien
ttcagggtaagaatgccataaacattagctgcc

SEQ ID NO: 137567 - DNA, 33 bp, Homo sapien
attatttgagttatacactttgacttagaagac

SEQ ID NO: 137568 - DNA, 33 bp, Homo sapien
attatttgagttatacgctttgacttagaagac

SEQ ID NO: 137569 - DNA, 33 bp, Homo sapien
ccaaggagataaaaatcacttgtcaaagacaag

SEQ ID NO: 137570 - DNA, 33 bp, Homo sapien
ccaaggagataaaaattacttgtcaaagacaag

SEQ ID NO: 137571 - DNA, 33 bp, Homo sapien
ttattgaattatcacacggtagcccctaaatat

SEQ ID NO: 137572 - DNA, 33 bp, Homo sapien
ttattgaattatcacatggtagcccctaaatat

SEQ ID NO: 137573 - DNA, 33 bp, Homo sapien
ctaagctaactgaaaaaattggcatatcacagg

SEQ ID NO: 137574 - DNA, 33 bp, Homo sapien
ctaagctaactgaaaagattggcatatcacagg

SEQ ID NO: 137575 - DNA, 33 bp, Homo sapien
tctgctttgacataaacttctaaggccagacct

SEQ ID NO: 137576 - DNA, 33 bp, Homo sapien
tctgctttgacataaatttctaaggccagacct

SEQ ID NO: 137577 - DNA, 33 bp, Homo sapien
tgccatccacaatagggcagatgatttggaact

SEQ ID NO: 137578 - DNA, 33 bp, Homo sapien
tgccatccacaataggtcagatgatttggaact

SEQ ID NO: 137579 - DNA, 33 bp, Homo sapien
ttggcctttgagttgaagcctgtgtttctaacc

SEQ ID NO: 137580 - DNA, 33 bp, Homo sapien
ttggcctttgagttgaggcctgtgtttctaacc

SEQ ID NO: 137581 - DNA, 33 bp, Homo sapien
tgatctaagtataaaacgttgcttacctagagg

SEQ ID NO: 137582 - DNA, 33 bp, Homo sapien
tgatctaagtataaaatgttgcttacctagagg

SEQ ID NO: 137583 - DNA, 33 bp, Homo sapien
ctagattctacggggaaggtaacagaagaaaaa

SEQ ID NO: 137584 - DNA, 33 bp, Homo sapien
ctagattctacggggagggtaacagaagaaaaa

SEQ ID NO: 137585 - DNA, 33 bp, Homo sapien
tgccaaatgttaaagtaaaggtgagacaggatg

SEQ ID NO: 137586 - DNA, 33 bp, Homo sapien
tgccaaatgttaaagtgaaggtgagacaggatg

SEQ ID NO: 137587 - DNA, 33 bp, Homo sapien
tgaatcacagcttataataactcatgagatgcc

SEQ ID NO: 137588 - DNA, 33 bp, Homo sapien
tgaatcacagcttatagtaactcatgagatgcc

SEQ ID NO: 137589 - DNA, 33 bp, Homo sapien
tagcagcaacgtcagggattgaattcttagggc

SEQ ID NO: 137590 - DNA, 33 bp, Homo sapien
tagcagcaacgtcaggtattgaattcttagggc

SEQ ID NO: 137591 - DNA, 33 bp, Homo sapien
atgtcaagtaaaaataaatgaacaaagatgaat

SEQ ID NO: 137592 - DNA, 33 bp, Homo sapien
atgtcaagtaaaaatagatgaacaaagatgaat

SEQ ID NO: 137593 - DNA, 33 bp, Homo sapien
atcatgtattacaaaagaagctcccagaaatcg

SEQ ID NO: 137594 - DNA, 33 bp, Homo sapien
atcatgtattacaaaataagctcccagaaatcg

SEQ ID NO: 137595 - DNA, 33 bp, Homo sapien
ttacaaacatatacacaatactgtcttttgtct

SEQ ID NO: 137596 - DNA, 33 bp, Homo sapien
ttacaaacatatacacgatactgtcttttgtct

SEQ ID NO: 137597 - DNA, 33 bp, Homo sapien
tcctaggaagcaatgaataggttgcacggtgca

SEQ ID NO: 137598 - DNA, 33 bp, Homo sapien
tcctaggaagcaatgagtaggttgcacggtgca

SEQ ID NO: 137599 - DNA, 33 bp, Homo sapien
attgggcctattttaaacataagaaaactgaac

SEQ ID NO: 137600 - DNA, 33 bp, Homo sapien
attgggcctattttaagcataagaaaactgaac

SEQ ID NO: 137601 - DNA, 33 bp, Homo sapien
atggagtaaatagtaacactgactctgttctat

SEQ ID NO: 137602 - DNA, 33 bp, Homo sapien
atggagtaaatagtaatactgactctgttctat

SEQ ID NO: 137603 - DNA, 33 bp, Homo sapien
agggcacagctgtactgaggaagaactctggtt

SEQ ID NO: 137604 - DNA, 33 bp, Homo sapien
agggcacagctgtacttaggaagaactctggtt

SEQ ID NO: 137605 - DNA, 33 bp, Homo sapien
aaacagactttctatccacggtggtgatgataa

SEQ ID NO: 137606 - DNA, 33 bp, Homo sapien
aaacagactttctatcgacggtggtgatgataa

SEQ ID NO: 137607 - DNA, 33 bp, Homo sapien
ttgcatttttggtcacagagctacaagggtgag

SEQ ID NO: 137608 - DNA, 33 bp, Homo sapien
ttgcatttttggtcaccgagctacaagggtgag

SEQ ID NO: 137609 - DNA, 33 bp, Homo sapien
attatctgaattcaaccccagcattttagtggt

SEQ ID NO: 137610 - DNA, 33 bp, Homo sapien
attatctgaattcaacgccagcattttagtggt

SEQ ID NO: 137611 - DNA, 33 bp, Homo sapien
gagtgactctataaaacggaaaattgaatcaag

SEQ ID NO: 137612 - DNA, 33 bp, Homo sapien
gagtgactctataaaatggaaaattgaatcaag

SEQ ID NO: 137613 - DNA, 33 bp, Homo sapien
agctcagtcatttttaagatgaagaagataaaa

SEQ ID NO: 137614 - DNA, 33 bp, Homo sapien
agctcagtcatttttaggatgaagaagataaaa

SEQ ID NO: 137615 - DNA, 33 bp, Homo sapien
tctctggttattgttcaccctttggcttatatg

SEQ ID NO: 137616 - DNA, 33 bp, Homo sapien
tctctggttattgttcgccctttggcttatatg

SEQ ID NO: 137617 - DNA, 33 bp, Homo sapien
gtgttctttatccccaagagtatacataataaa

SEQ ID NO: 137618 - DNA, 33 bp, Homo sapien
gtgttctttatccccaggagtatacataataaa

SEQ ID NO: 137619 - DNA, 33 bp, Homo sapien
tcttttttataagagccattttaagaggtatga

SEQ ID NO: 137620 - DNA, 33 bp, Homo sapien
tcttttttataagagctattttaagaggtatga

SEQ ID NO: 137621 - DNA, 33 bp, Homo sapien
tacatctactaggttacgtttgtgaagcaacaa

SEQ ID NO: 137622 - DNA, 33 bp, Homo sapien
tacatctactaggttatgtttgtgaagcaacaa

SEQ ID NO: 137623 - DNA, 33 bp, Homo sapien
ttatataactcgacacagtcaattcctttaaac

SEQ ID NO: 137624 - DNA, 33 bp, Homo sapien
ttatataactcgacacggtcaattcctttaaac

SEQ ID NO: 137625 - DNA, 33 bp, Homo sapien
aaatctgttgaataaaataagaccaactgcaaa

SEQ ID NO: 137626 - DNA, 33 bp, Homo sapien
aaatctgttgaataaactaagaccaactgcaaa

SEQ ID NO: 137627 - DNA, 33 bp, Homo sapien
tgggaggatcatttcaacatggaaggtcaacgc

SEQ ID NO: 137628 - DNA, 33 bp, Homo sapien
tgggaggatcatttcagcatggaaggtcaacgc

SEQ ID NO: 137629 - DNA, 33 bp, Homo sapien
gcggcagacaacagaaaaaagattgtgcaggta

SEQ ID NO: 137630 - DNA, 33 bp, Homo sapien
gcggcagacaacagaagaaagattgtgcaggta

SEQ ID NO: 137631 - DNA, 33 bp, Homo sapien
tatataacccttgcaccacacattttgaaaact

SEQ ID NO: 137632 - DNA, 33 bp, Homo sapien
tatataacccttgcactacacattttgaaaact

SEQ ID NO: 137633 - DNA, 33 bp, Homo sapien
ttacccctcttgctctaaaaatctttattccca

SEQ ID NO: 137634 - DNA, 33 bp, Homo sapien
ttacccctcttgctcttaaaatctttattccca

SEQ ID NO: 137635 - DNA, 33 bp, Homo sapien
agagggagatccattcagaacaccactctctct

SEQ ID NO: 137636 - DNA, 33 bp, Homo sapien
agagggagatccattcggaacaccactctctct

SEQ ID NO: 137637 - DNA, 33 bp, Homo sapien
ggatatctgttgcctcaaacacatttgtgttgt

SEQ ID NO: 137638 - DNA, 33 bp, Homo sapien
ggatatctgttgcctcgaacacatttgtgttgt

SEQ ID NO: 137639 - DNA, 33 bp, Homo sapien
aaggatggctaggaaactactatgggtttattc

SEQ ID NO: 137640 - DNA, 33 bp, Homo sapien
aaggatggctaggaaagtactatgggtttattc

SEQ ID NO: 137641 - DNA, 33 bp, Homo sapien
aaacctaccaggagatgaatatatcagctaaca

SEQ ID NO: 137642 - DNA, 33 bp, Homo sapien
aaacctaccaggagattaatatatcagctaaca

SEQ ID NO: 137643 - DNA, 33 bp, Homo sapien
tcattggtgatcttgacaggaacagtttctgtg

SEQ ID NO: 137644 - DNA, 33 bp, Homo sapien
tcattggtgatcttgataggaacagtttctgtg

SEQ ID NO: 137645 - DNA, 33 bp, Homo sapien
tgatctgtccaatcctaaaaatgtgctgttgaa

SEQ ID NO: 137646 - DNA, 33 bp, Homo sapien
tgatctgtccaatcctgaaaatgtgctgttgaa

SEQ ID NO: 137647 - DNA, 33 bp, Homo sapien
aaactcagtgagatccaaaatagagtggtgatc

SEQ ID NO: 137648 - DNA, 33 bp, Homo sapien
aaactcagtgagatcccaaatagagtggtgatc

SEQ ID NO: 137649 - DNA, 33 bp, Homo sapien
acttagccaaaaattaccaaggccaatgtcaag

SEQ ID NO: 137650 - DNA, 33 bp, Homo sapien
acttagccaaaaattatcaaggccaatgtcaag

SEQ ID NO: 137651 - DNA, 33 bp, Homo sapien
gaataatgaaatataaccacttagtaaccatca

SEQ ID NO: 137652 - DNA, 33 bp, Homo sapien
gaataatgaaatataagcacttagtaaccatca

SEQ ID NO: 137653 - DNA, 33 bp, Homo sapien
gaacctgatgtgtgaagctaaaagcctaaccct

SEQ ID NO: 137654 - DNA, 33 bp, Homo sapien
gaacctgatgtgtgaatctaaaagcctaaccct

SEQ ID NO: 137655 - DNA, 33 bp, Homo sapien
ccaagacacttgaaaaagtcactactatgtcac

SEQ ID NO: 137656 - DNA, 33 bp, Homo sapien
ccaagacacttgaaaatgtcactactatgtcac

SEQ ID NO: 137657 - DNA, 33 bp, Homo sapien
atcagaacagataccaactacaaacaattggca

SEQ ID NO: 137658 - DNA, 33 bp, Homo sapien
atcagaacagataccagctacaaacaattggca

SEQ ID NO: 137659 - DNA, 33 bp, Homo sapien
ttaacatcgaaacatggaagtctcagttacaca

SEQ ID NO: 137660 - DNA, 33 bp, Homo sapien
ttaacatcgaaacatgtaagtctcagttacaca

SEQ ID NO: 137661 - DNA, 33 bp, Homo sapien
gttccacagcataataaagtgactatagtttaa

SEQ ID NO: 137662 - DNA, 33 bp, Homo sapien
gttccacagcataatacagtgactatagtttaa

SEQ ID NO: 137663 - DNA, 33 bp, Homo sapien
taaatcagttgtatcccctgtcaactacaatct

SEQ ID NO: 137664 - DNA, 33 bp, Homo sapien
taaatcagttgtatcctctgtcaactacaatct

SEQ ID NO: 137665 - DNA, 33 bp, Homo sapien
ttttatatcctgcttaaacattgatttggtatc

SEQ ID NO: 137666 - DNA, 33 bp, Homo sapien
ttttatatcctgcttacacattgatttggtatc

SEQ ID NO: 137667 - DNA, 33 bp, Homo sapien
ttaaaaaaatgcccacactatttatcaagtacc

SEQ ID NO: 137668 - DNA, 33 bp, Homo sapien
ttaaaaaaatgcccacgctatttatcaagtacc

SEQ ID NO: 137669 - DNA, 33 bp, Homo sapien
gcttctataaaatgaaagcagtcatgtatacta

SEQ ID NO: 137670 - DNA, 33 bp, Homo sapien
gcttctataaaatgaatgcagtcatgtatacta

SEQ ID NO: 137671 - DNA, 33 bp, Homo sapien
tgatactaaagaatacaccttcttcccactaca

SEQ ID NO: 137672 - DNA, 33 bp, Homo sapien
tgatactaaagaatacgccttcttcccactaca

SEQ ID NO: 137673 - DNA, 33 bp, Homo sapien
aattaaaagacatagaaaggcaaaccgaataaa

SEQ ID NO: 137674 - DNA, 33 bp, Homo sapien
aattaaaagacatagagaggcaaaccgaataaa

SEQ ID NO: 137675 - DNA, 33 bp, Homo sapien
tgaactaacactgaagcagaaaaccaagtacta

SEQ ID NO: 137676 - DNA, 33 bp, Homo sapien
tgaactaacactgaaggagaaaaccaagtacta

SEQ ID NO: 137677 - DNA, 33 bp, Homo sapien
tgtacatacgaacataaagaagggaacaacaga

SEQ ID NO: 137678 - DNA, 33 bp, Homo sapien
tgtacatacgaacatagagaagggaacaacaga

SEQ ID NO: 137679 - DNA, 33 bp, Homo sapien
tgcagtttgtttctcaaaaaattcacatataaa

SEQ ID NO: 137680 - DNA, 33 bp, Homo sapien
tgcagtttgtttctcagaaaattcacatataaa

SEQ ID NO: 137681 - DNA, 33 bp, Homo sapien
tgtcaaagcttctgaagtctctatgcctcagag

SEQ ID NO: 137682 - DNA, 33 bp, Homo sapien
tgtcaaagcttctgaattctctatgcctcagag

SEQ ID NO: 137683 - DNA, 33 bp, Homo sapien
gtcacgagaaaagaacccagaactcactaagct

SEQ ID NO: 137684 - DNA, 33 bp, Homo sapien
gtcacgagaaaagaactcagaactcactaagct

SEQ ID NO: 137685 - DNA, 33 bp, Homo sapien
gagatctagaacaaaagtagtaggagtattaat

SEQ ID NO: 137686 - DNA, 33 bp, Homo sapien
gagatctagaacaaaattagtaggagtattaat

SEQ ID NO: 137687 - DNA, 33 bp, Homo sapien
tgtatcatctcaggaccctgtaataattgcgtt

SEQ ID NO: 137688 - DNA, 33 bp, Homo sapien
tgtatcatctcaggacgctgtaataattgcgtt

SEQ ID NO: 137689 - DNA, 33 bp, Homo sapien
tggctctgttctgcccagctaactagcggtcag

SEQ ID NO: 137690 - DNA, 33 bp, Homo sapien
tggctctgttctgcccggctaactagcggtcag

SEQ ID NO: 137691 - DNA, 33 bp, Homo sapien
cttcaactggacaagacagtagaaagtaaaaca

SEQ ID NO: 137692 - DNA, 33 bp, Homo sapien
cttcaactggacaagatagtagaaagtaaaaca

SEQ ID NO: 137693 - DNA, 33 bp, Homo sapien
ctaataacgataacacaacaattataagcacta

SEQ ID NO: 137694 - DNA, 33 bp, Homo sapien
ctaataacgataacactacaattataagcacta

SEQ ID NO: 137695 - DNA, 33 bp, Homo sapien
tttcaggtctttaatgcacagactgattgatta

SEQ ID NO: 137696 - DNA, 33 bp, Homo sapien
tttcaggtctttaatgtacagactgattgatta

SEQ ID NO: 137697 - DNA, 33 bp, Homo sapien
taccagtaacagcaaaataatcctgtcatataa

SEQ ID NO: 137698 - DNA, 33 bp, Homo sapien
taccagtaacagcaaactaatcctgtcatataa

SEQ ID NO: 137699 - DNA, 33 bp, Homo sapien
tagatatttggagagccgaaagtagtttggcat

SEQ ID NO: 137700 - DNA, 33 bp, Homo sapien
tagatatttggagagctgaaagtagtttggcat

SEQ ID NO: 137701 - DNA, 33 bp, Homo sapien
tatacaaataatgaggccaagtataataaaaca

SEQ ID NO: 137702 - DNA, 33 bp, Homo sapien
tatacaaataatgaggtcaagtataataaaaca

SEQ ID NO: 137703 - DNA, 33 bp, Homo sapien
taattaagcttaaccactgagctcctttaaaaa

SEQ ID NO: 137704 - DNA, 33 bp, Homo sapien
taattaagcttaaccattgagctcctttaaaaa

SEQ ID NO: 137705 - DNA, 33 bp, Homo sapien
tgaggattgccattcacacaaaatccagaactg

SEQ ID NO: 137706 - DNA, 33 bp, Homo sapien
tgaggattgccattcagacaaaatccagaactg

SEQ ID NO: 137707 - DNA, 33 bp, Homo sapien
atatgaaattgtgtcactaatcagtctttattt

SEQ ID NO: 137708 - DNA, 33 bp, Homo sapien
atatgaaattgtgtcattaatcagtctttattt

SEQ ID NO: 137709 - DNA, 33 bp, Homo sapien
cacctaattgagacacaataacatctgtacctt

SEQ ID NO: 137710 - DNA, 33 bp, Homo sapien
cacctaattgagacacgataacatctgtacctt

SEQ ID NO: 137711 - DNA, 33 bp, Homo sapien
aagggttgtgccaagacgatcaaagaacagaaa

SEQ ID NO: 137712 - DNA, 33 bp, Homo sapien
aagggttgtgccaagatgatcaaagaacagaaa

SEQ ID NO: 137713 - DNA, 33 bp, Homo sapien
ctttcattaggctcaacctccaacgatgggtat

SEQ ID NO: 137714 - DNA, 33 bp, Homo sapien
ctttcattaggctcaatctccaacgatgggtat

SEQ ID NO: 137715 - DNA, 33 bp, Homo sapien
ctgatgttcatgtagggcattaaggaaagagga

SEQ ID NO: 137716 - DNA, 33 bp, Homo sapien
ctgatgttcatgtaggtcattaaggaaagagga

SEQ ID NO: 137717 - DNA, 33 bp, Homo sapien
aaagtaatcccatggaaaaagagcttattaaat

SEQ ID NO: 137718 - DNA, 33 bp, Homo sapien
aaagtaatcccatggacaaagagcttattaaat

SEQ ID NO: 137719 - DNA, 33 bp, Homo sapien
aaacatttatagggctcaaaagactagaccaca

SEQ ID NO: 137720 - DNA, 33 bp, Homo sapien
aaacatttatagggctgaaaagactagaccaca

SEQ ID NO: 137721 - DNA, 33 bp, Homo sapien
gggagctagattaggaacactttccagttttta

SEQ ID NO: 137722 - DNA, 33 bp, Homo sapien
gggagctagattaggatcactttccagttttta

SEQ ID NO: 137723 - DNA, 33 bp, Homo sapien
aatttgctactgcttccgaaaaagaaaatgtat

SEQ ID NO: 137724 - DNA, 33 bp, Homo sapien
aatttgctactgcttctgaaaaagaaaatgtat

SEQ ID NO: 137725 - DNA, 33 bp, Homo sapien
tatatttacagaaagaagattcggcacagaata

SEQ ID NO: 137726 - DNA, 33 bp, Homo sapien
tatatttacagaaagaggattcggcacagaata

SEQ ID NO: 137727 - DNA, 33 bp, Homo sapien
aaagccctgataacacggattggctatagagag

SEQ ID NO: 137728 - DNA, 33 bp, Homo sapien
aaagccctgataacactgattggctatagagag

SEQ ID NO: 137729 - DNA, 33 bp, Homo sapien
attagcgtaagtaatgcagaaaaagatgtatat

SEQ ID NO: 137730 - DNA, 33 bp, Homo sapien
attagcgtaagtaatgtagaaaaagatgtatat

SEQ ID NO: 137731 - DNA, 33 bp, Homo sapien
ggaggattttgattaccacttcaatcacttttt

SEQ ID NO: 137732 - DNA, 33 bp, Homo sapien
ggaggattttgattactacttcaatcacttttt

SEQ ID NO: 137733 - DNA, 33 bp, Homo sapien
tgacaaagaaggtcaacgataatcacagaaagt

SEQ ID NO: 137734 - DNA, 33 bp, Homo sapien
tgacaaagaaggtcaatgataatcacagaaagt

SEQ ID NO: 137735 - DNA, 33 bp, Homo sapien
tacaccatacattttagccatttagtgtatgat

SEQ ID NO: 137736 - DNA, 33 bp, Homo sapien
tacaccatacattttatccatttagtgtatgat

SEQ ID NO: 137737 - DNA, 33 bp, Homo sapien
actgggtaatttgtaacgagtagaaatgtattt

SEQ ID NO: 137738 - DNA, 33 bp, Homo sapien
actgggtaatttgtaatgagtagaaatgtattt

SEQ ID NO: 137739 - DNA, 33 bp, Homo sapien
ggggcatgcatctagcaagggctttattgctgc

SEQ ID NO: 137740 - DNA, 33 bp, Homo sapien
ggggcatgcatctagcgagggctttattgctgc

SEQ ID NO: 137741 - DNA, 33 bp, Homo sapien
agttacagaaatgctgcatttgtacttcccatt

SEQ ID NO: 137742 - DNA, 33 bp, Homo sapien
agttacagaaatgctgtatttgtacttcccatt

SEQ ID NO: 137743 - DNA, 33 bp, Homo sapien
attattgagatgtaaacggttcttatataatat

SEQ ID NO: 137744 - DNA, 33 bp, Homo sapien
attattgagatgtaaatggttcttatataatat

SEQ ID NO: 137745 - DNA, 33 bp, Homo sapien
tacttaaggaaacgtccatttgatggttacaaa

SEQ ID NO: 137746 - DNA, 33 bp, Homo sapien
tacttaaggaaacgtctatttgatggttacaaa

SEQ ID NO: 137747 - DNA, 33 bp, Homo sapien
ttggtatttcccaggcaatattagcatcttttg

SEQ ID NO: 137748 - DNA, 33 bp, Homo sapien
ttggtatttcccaggcgatattagcatcttttg

SEQ ID NO: 137749 - DNA, 33 bp, Homo sapien
gaacacacagacataactgatgttgattacagc

SEQ ID NO: 137750 - DNA, 33 bp, Homo sapien
gaacacacagacataagtgatgttgattacagc

SEQ ID NO: 137751 - DNA, 33 bp, Homo sapien
ctcagtggccaaatcaacataggttcattttaa

SEQ ID NO: 137752 - DNA, 33 bp, Homo sapien
ctcagtggccaaatcagcataggttcattttaa

SEQ ID NO: 137753 - DNA, 33 bp, Homo sapien
tagaaaatacagaaatcatgagaaatcgtaagt

SEQ ID NO: 137754 - DNA, 33 bp, Homo sapien
tagaaaatacagaaatgatgagaaatcgtaagt

SEQ ID NO: 137755 - DNA, 33 bp, Homo sapien
ttactggaatcaaagaagtttccccaattaagc

SEQ ID NO: 137756 - DNA, 33 bp, Homo sapien
ttactggaatcaaagaggtttccccaattaagc

SEQ ID NO: 137757 - DNA, 33 bp, Homo sapien
ttacttaccagccaaacgtgtcttttcaattgt

SEQ ID NO: 137758 - DNA, 33 bp, Homo sapien
ttacttaccagccaaatgtgtcttttcaattgt

SEQ ID NO: 137759 - DNA, 33 bp, Homo sapien
ttccactgtacacaaccggacaaagccttctta

SEQ ID NO: 137760 - DNA, 33 bp, Homo sapien
ttccactgtacacaactggacaaagccttctta

SEQ ID NO: 137761 - DNA, 33 bp, Homo sapien
tgcctattaccaaggacgctcaagatataattc

SEQ ID NO: 137762 - DNA, 33 bp, Homo sapien
tgcctattaccaaggatgctcaagatataattc

SEQ ID NO: 137763 - DNA, 33 bp, Homo sapien
cagtaggagaagcaagaatactttgagctgtta

SEQ ID NO: 137764 - DNA, 33 bp, Homo sapien
cagtaggagaagcaaggatactttgagctgtta

SEQ ID NO: 137765 - DNA, 33 bp, Homo sapien
ctagaaaacagtggtacctccattggtaaagat

SEQ ID NO: 137766 - DNA, 33 bp, Homo sapien
ctagaaaacagtggtatctccattggtaaagat

SEQ ID NO: 137767 - DNA, 33 bp, Homo sapien
gagtgtgtgcatagaacatttggtaagcattat

SEQ ID NO: 137768 - DNA, 33 bp, Homo sapien
gagtgtgtgcatagaatatttggtaagcattat

SEQ ID NO: 137769 - DNA, 33 bp, Homo sapien
acagtaagtcgagatcacaggaatccaggccgt

SEQ ID NO: 137770 - DNA, 33 bp, Homo sapien
acagtaagtcgagatcgcaggaatccaggccgt

SEQ ID NO: 137771 - DNA, 33 bp, Homo sapien
tccttcacttttacaactactgcacagtggatt

SEQ ID NO: 137772 - DNA, 33 bp, Homo sapien
tccttcacttttacaattactgcacagtggatt

SEQ ID NO: 137773 - DNA, 33 bp, Homo sapien
caaattgaaccatctcaagagtgtatttgtgtt

SEQ ID NO: 137774 - DNA, 33 bp, Homo sapien
caaattgaaccatctcgagagtgtatttgtgtt

SEQ ID NO: 137775 - DNA, 33 bp, Homo sapien
aattcccctcagttgactatgacatgataacta

SEQ ID NO: 137776 - DNA, 33 bp, Homo sapien
aattcccctcagttgattatgacatgataacta

SEQ ID NO: 137777 - DNA, 33 bp, Homo sapien
tggccttgcaagcagaaagtgagatcccctctc

SEQ ID NO: 137778 - DNA, 33 bp, Homo sapien
tggccttgcaagcagagagtgagatcccctctc

SEQ ID NO: 137779 - DNA, 33 bp, Homo sapien
taatttaatgctcatgaaactagttaaatgata

SEQ ID NO: 137780 - DNA, 33 bp, Homo sapien
taatttaatgctcatggaactagttaaatgata

SEQ ID NO: 137781 - DNA, 33 bp, Homo sapien
gaagcaggcaatctgacggccaaggtcataggt

SEQ ID NO: 137782 - DNA, 33 bp, Homo sapien
gaagcaggcaatctgatggccaaggtcataggt

SEQ ID NO: 137783 - DNA, 33 bp, Homo sapien
caatgacttaaaacaagttattcccttgcagtt

SEQ ID NO: 137784 - DNA, 33 bp, Homo sapien
caatgacttaaaacaatttattcccttgcagtt

SEQ ID NO: 137785 - DNA, 33 bp, Homo sapien
agcactcaccattcacaggaagagttgggattg

SEQ ID NO: 137786 - DNA, 33 bp, Homo sapien
agcactcaccattcaccggaagagttgggattg

SEQ ID NO: 137787 - DNA, 33 bp, Homo sapien
cttaaatcttcctggacacgtaaatgacccaca

SEQ ID NO: 137788 - DNA, 33 bp, Homo sapien
cttaaatcttcctggatacgtaaatgacccaca

SEQ ID NO: 137789 - DNA, 33 bp, Homo sapien
tttattcaccatggaaatcttgatatgagcaaa

SEQ ID NO: 137790 - DNA, 33 bp, Homo sapien
tttattcaccatggaagtcttgatatgagcaaa

SEQ ID NO: 137791 - DNA, 33 bp, Homo sapien
gctgtcgttctcgaagaagttgctggagggggt

SEQ ID NO: 137792 - DNA, 33 bp, Homo sapien
gctgtcgttctcgaagcagttgctggagggggt

SEQ ID NO: 137793 - DNA, 33 bp, Homo sapien
gagaagcaatataataaatatgcaaagcacagt

SEQ ID NO: 137794 - DNA, 33 bp, Homo sapien
gagaagcaatataatacatatgcaaagcacagt

SEQ ID NO: 137795 - DNA, 33 bp, Homo sapien
aaatgtttcaattctacagtttcttaacctttc

SEQ ID NO: 137796 - DNA, 33 bp, Homo sapien
aaatgtttcaattctagagtttcttaacctttc

SEQ ID NO: 137797 - DNA, 33 bp, Homo sapien
agtagaaagcaggtcaaaaacagattttataca

SEQ ID NO: 137798 - DNA, 33 bp, Homo sapien
agtagaaagcaggtcacaaacagattttataca

SEQ ID NO: 137799 - DNA, 33 bp, Homo sapien
taaaaatatgtgttgaaagtaatccaaatggac

SEQ ID NO: 137800 - DNA, 33 bp, Homo sapien
taaaaatatgtgttgatagtaatccaaatggac

SEQ ID NO: 137801 - DNA, 33 bp, Homo sapien
ataattttattcggaacgaaaaatgaagtaatg

SEQ ID NO: 137802 - DNA, 33 bp, Homo sapien
ataattttattcggaatgaaaaatgaagtaatg

SEQ ID NO: 137803 - DNA, 33 bp, Homo sapien
tattttgaagtgggaaagccctacttacactat

SEQ ID NO: 137804 - DNA, 33 bp, Homo sapien
tattttgaagtgggaaggccctacttacactat

SEQ ID NO: 137805 - DNA, 33 bp, Homo sapien
aatccagttgatgctacaaaatgctgccagtgt

SEQ ID NO: 137806 - DNA, 33 bp, Homo sapien
aatccagttgatgctagaaaatgctgccagtgt

SEQ ID NO: 137807 - DNA, 33 bp, Homo sapien
tgggtaaagatgaaaggacattttgagcctttc

SEQ ID NO: 137808 - DNA, 33 bp, Homo sapien
tgggtaaagatgaaagtacattttgagcctttc

SEQ ID NO: 137809 - DNA, 33 bp, Homo sapien
aaatgaagaatagagtaaaaggagatggataac

SEQ ID NO: 137810 - DNA, 33 bp, Homo sapien
aaatgaagaatagagtgaaaggagatggataac

SEQ ID NO: 137811 - DNA, 33 bp, Homo sapien
ttgcttattgaataaacgcctggaatatcatac

SEQ ID NO: 137812 - DNA, 33 bp, Homo sapien
ttgcttattgaataaatgcctggaatatcatac

SEQ ID NO: 137813 - DNA, 33 bp, Homo sapien
gtggcaacttccattaggcaaaacctacagttc

SEQ ID NO: 137814 - DNA, 33 bp, Homo sapien
gtggcaacttccattatgcaaaacctacagttc

SEQ ID NO: 137815 - DNA, 33 bp, Homo sapien
tactttaacagcgttaccttaatgttattgcta

SEQ ID NO: 137816 - DNA, 33 bp, Homo sapien
tactttaacagcgttatcttaatgttattgcta

SEQ ID NO: 137817 - DNA, 33 bp, Homo sapien
gggaaaactggatcgacaactcagtggtaatac

SEQ ID NO: 137818 - DNA, 33 bp, Homo sapien
gggaaaactggatcgataactcagtggtaatac

SEQ ID NO: 137819 - DNA, 33 bp, Homo sapien
ttgttgtagcagtccaaatggaataacacacct

SEQ ID NO: 137820 - DNA, 33 bp, Homo sapien
ttgttgtagcagtccagatggaataacacacct

SEQ ID NO: 137821 - DNA, 33 bp, Homo sapien
aagatgcagctgatcactaacattaatcaaatg

SEQ ID NO: 137822 - DNA, 33 bp, Homo sapien
aagatgcagctgatcagtaacattaatcaaatg

SEQ ID NO: 137823 - DNA, 33 bp, Homo sapien
aatcactgaaccctaccgcctataacagagttt

SEQ ID NO: 137824 - DNA, 33 bp, Homo sapien
aatcactgaaccctactgcctataacagagttt

SEQ ID NO: 137825 - DNA, 33 bp, Homo sapien
caacatcactgaacacaggtattattattccta

SEQ ID NO: 137826 - DNA, 33 bp, Homo sapien
caacatcactgaacaccggtattattattccta

SEQ ID NO: 137827 - DNA, 33 bp, Homo sapien
gtgcagtctttgaaacactacctcaaataggtc

SEQ ID NO: 137828 - DNA, 33 bp, Homo sapien
gtgcagtctttgaaacgctacctcaaataggtc

SEQ ID NO: 137829 - DNA, 33 bp, Homo sapien
aagacaatgtaagagaataagaagacaagttac

SEQ ID NO: 137830 - DNA, 33 bp, Homo sapien
aagacaatgtaagagagtaagaagacaagttac

SEQ ID NO: 137831 - DNA, 33 bp, Homo sapien
gagaaaacctagatgacctgcggtactgtaata

SEQ ID NO: 137832 - DNA, 33 bp, Homo sapien
gagaaaacctagatgatctgcggtactgtaata

SEQ ID NO: 137833 - DNA, 33 bp, Homo sapien
cagtctgacataataaaggtttaacatataaga

SEQ ID NO: 137834 - DNA, 33 bp, Homo sapien
cagtctgacataataacggtttaacatataaga

SEQ ID NO: 137835 - DNA, 33 bp, Homo sapien
taatcagttcagtgccaaacccttaaaaatggt

SEQ ID NO: 137836 - DNA, 33 bp, Homo sapien
taatcagttcagtgccgaacccttaaaaatggt

SEQ ID NO: 137837 - DNA, 33 bp, Homo sapien
tcctggtcaattgctaacattcttccaaatatt

SEQ ID NO: 137838 - DNA, 33 bp, Homo sapien
tcctggtcaattgctagcattcttccaaatatt

SEQ ID NO: 137839 - DNA, 33 bp, Homo sapien
tgcaacatctttcgaacaatgtctttctcactc

SEQ ID NO: 137840 - DNA, 33 bp, Homo sapien
tgcaacatctttcgaataatgtctttctcactc

SEQ ID NO: 137841 - DNA, 33 bp, Homo sapien
tcaacctcggaagtcacgagggaaatggaaaaa

SEQ ID NO: 137842 - DNA, 33 bp, Homo sapien
tcaacctcggaagtcatgagggaaatggaaaaa

SEQ ID NO: 137843 - DNA, 33 bp, Homo sapien
ttttcttaaatcacaaattacacgaagcttaac

SEQ ID NO: 137844 - DNA, 33 bp, Homo sapien
ttttcttaaatcacaagttacacgaagcttaac

SEQ ID NO: 137845 - DNA, 33 bp, Homo sapien
ccatttgtatctctcaacttttcctgttaatcg

SEQ ID NO: 137846 - DNA, 33 bp, Homo sapien
ccatttgtatctctcagcttttcctgttaatcg

SEQ ID NO: 137847 - DNA, 33 bp, Homo sapien
atagggtttttgcaacaagtaaactcaataact

SEQ ID NO: 137848 - DNA, 33 bp, Homo sapien
atagggtttttgcaacgagtaaactcaataact

SEQ ID NO: 137849 - DNA, 33 bp, Homo sapien
gttctacattgagcacactatgccgtgaaaagt

SEQ ID NO: 137850 - DNA, 33 bp, Homo sapien
gttctacattgagcacgctatgccgtgaaaagt

SEQ ID NO: 137851 - DNA, 33 bp, Homo sapien
cactgtccctgaatgcaaaataagggtgacctt

SEQ ID NO: 137852 - DNA, 33 bp, Homo sapien
cactgtccctgaatgcgaaataagggtgacctt

SEQ ID NO: 137853 - DNA, 33 bp, Homo sapien
actattgacctagccaaggagttagcaccaaga

SEQ ID NO: 137854 - DNA, 33 bp, Homo sapien
actattgacctagccatggagttagcaccaaga

SEQ ID NO: 137855 - DNA, 33 bp, Homo sapien
ggaggctgtcctcagcaagggggcatggccatt

SEQ ID NO: 137856 - DNA, 33 bp, Homo sapien
ggaggctgtcctcagcgagggggcatggccatt

SEQ ID NO: 137857 - DNA, 33 bp, Homo sapien
tggattccccaggaaacagattctgagattctg

SEQ ID NO: 137858 - DNA, 33 bp, Homo sapien
tggattccccaggaaatagattctgagattctg

SEQ ID NO: 137859 - DNA, 33 bp, Homo sapien
tttaataaagggacaccgcaagtttctaataga

SEQ ID NO: 137860 - DNA, 33 bp, Homo sapien
tttaataaagggacacggcaagtttctaataga

SEQ ID NO: 137861 - DNA, 33 bp, Homo sapien
gatgctcggatggaaacggacacgtgcagcaca

SEQ ID NO: 137862 - DNA, 33 bp, Homo sapien
gatgctcggatggaaatggacacgtgcagcaca

SEQ ID NO: 137863 - DNA, 33 bp, Homo sapien
gatttccaatacaaccaatatgtctttgcacct

SEQ ID NO: 137864 - DNA, 33 bp, Homo sapien
gatttccaatacaacccatatgtctttgcacct

SEQ ID NO: 137865 - DNA, 33 bp, Homo sapien
aatgatagtttactcacggtgtcatggatgtct

SEQ ID NO: 137866 - DNA, 33 bp, Homo sapien
aatgatagtttactcatggtgtcatggatgtct

SEQ ID NO: 137867 - DNA, 33 bp, Homo sapien
tccttcctccttgactctggatttaaagctttt

SEQ ID NO: 137868 - DNA, 33 bp, Homo sapien
tccttcctccttgactttggatttaaagctttt

SEQ ID NO: 137869 - DNA, 33 bp, Homo sapien
tgtgagggatctaggcggcaaactctttgtgag

SEQ ID NO: 137870 - DNA, 33 bp, Homo sapien
tgtgagggatctaggctgcaaactctttgtgag

SEQ ID NO: 137871 - DNA, 33 bp, Homo sapien
agtaattattaacagtcaattccagaaatacca

SEQ ID NO: 137872 - DNA, 33 bp, Homo sapien
agtaattattaacagtgaattccagaaatacca

SEQ ID NO: 137873 - DNA, 33 bp, Homo sapien
caagacaacttacaaaaccaaagaggaaaatca

SEQ ID NO: 137874 - DNA, 33 bp, Homo sapien
caagacaacttacaaagccaaagaggaaaatca

SEQ ID NO: 137875 - DNA, 33 bp, Homo sapien
cattgctgagtgtttacgcaaaggaatataaat

SEQ ID NO: 137876 - DNA, 33 bp, Homo sapien
cattgctgagtgtttatgcaaaggaatataaat

SEQ ID NO: 137877 - DNA, 33 bp, Homo sapien
gcatctgatgaatgtaagccatttctgaactgg

SEQ ID NO: 137878 - DNA, 33 bp, Homo sapien
gcatctgatgaatgtaggccatttctgaactgg

SEQ ID NO: 137879 - DNA, 33 bp, Homo sapien
atatctaaatgcacgcaattctttcctggaatt

SEQ ID NO: 137880 - DNA, 33 bp, Homo sapien
atatctaaatgcacgccattctttcctggaatt

SEQ ID NO: 137881 - DNA, 33 bp, Homo sapien
catcttcccaccttcaaggagctaacagtatta

SEQ ID NO: 137882 - DNA, 33 bp, Homo sapien
catcttcccaccttcacggagctaacagtatta

SEQ ID NO: 137883 - DNA, 33 bp, Homo sapien
tatgtatacttcttgcaacctgcattttagaag

SEQ ID NO: 137884 - DNA, 33 bp, Homo sapien
tatgtatacttcttgcgacctgcattttagaag

SEQ ID NO: 137885 - DNA, 33 bp, Homo sapien
gaattgctgaaagaatgactgtatagcagtcta

SEQ ID NO: 137886 - DNA, 33 bp, Homo sapien
gaattgctgaaagaattactgtatagcagtcta

SEQ ID NO: 137887 - DNA, 33 bp, Homo sapien
agggaagacaaaattcaaaagaccatcacaact

SEQ ID NO: 137888 - DNA, 33 bp, Homo sapien
agggaagacaaaattccaaagaccatcacaact

SEQ ID NO: 137889 - DNA, 33 bp, Homo sapien
acgaagttcaattatacggccttcactgtaaag

SEQ ID NO: 137890 - DNA, 33 bp, Homo sapien
acgaagttcaattatatggccttcactgtaaag

SEQ ID NO: 137891 - DNA, 33 bp, Homo sapien
ctcatcagcttgctaccgcagcttcctttttga

SEQ ID NO: 137892 - DNA, 33 bp, Homo sapien
ctcatcagcttgctactgcagcttcctttttga

SEQ ID NO: 137893 - DNA, 33 bp, Homo sapien
actccactgttgtaaaaatttattgagaaagaa

SEQ ID NO: 137894 - DNA, 33 bp, Homo sapien
actccactgttgtaaagatttattgagaaagaa

SEQ ID NO: 137895 - DNA, 33 bp, Homo sapien
ttaagcgttgtatttacagccattttgcttctt

SEQ ID NO: 137896 - DNA, 33 bp, Homo sapien
ttaagcgttgtatttatagccattttgcttctt

SEQ ID NO: 137897 - DNA, 33 bp, Homo sapien
gatgttatccatttaaataacctctctcgttga

SEQ ID NO: 137898 - DNA, 33 bp, Homo sapien
gatgttatccatttaagtaacctctctcgttga

SEQ ID NO: 137899 - DNA, 33 bp, Homo sapien
aactgacttttgaaaacgaaaactatcccacgc

SEQ ID NO: 137900 - DNA, 33 bp, Homo sapien
aactgacttttgaaaatgaaaactatcccacgc

SEQ ID NO: 137901 - DNA, 33 bp, Homo sapien
gcttctcacttgatgtgaatgaggatgacggtg

SEQ ID NO: 137902 - DNA, 33 bp, Homo sapien
gcttctcacttgatgttaatgaggatgacggtg

SEQ ID NO: 137903 - DNA, 33 bp, Homo sapien
tgtaaaaagtggcaaacgggccagcagggtaag

SEQ ID NO: 137904 - DNA, 33 bp, Homo sapien
tgtaaaaagtggcaaatgggccagcagggtaag

SEQ ID NO: 137905 - DNA, 33 bp, Homo sapien
agtattaggatgtaaacgattctgtgttctaat

SEQ ID NO: 137906 - DNA, 33 bp, Homo sapien
agtattaggatgtaaatgattctgtgttctaat

SEQ ID NO: 137907 - DNA, 33 bp, Homo sapien
tataatgagggtctacaccacaggacatgtgtt

SEQ ID NO: 137908 - DNA, 33 bp, Homo sapien
tataatgagggtctacgccacaggacatgtgtt

SEQ ID NO: 137909 - DNA, 33 bp, Homo sapien
catgttttaagagaaccactctggcttgctaag

SEQ ID NO: 137910 - DNA, 33 bp, Homo sapien
catgttttaagagaacgactctggcttgctaag

SEQ ID NO: 137911 - DNA, 33 bp, Homo sapien
catcggtctttagtaactgagtgtttccccatc

SEQ ID NO: 137912 - DNA, 33 bp, Homo sapien
catcggtctttagtaattgagtgtttccccatc

SEQ ID NO: 137913 - DNA, 33 bp, Homo sapien
cagcccttcgttaataaccactctcttttcaga

SEQ ID NO: 137914 - DNA, 33 bp, Homo sapien
cagcccttcgttaatagccactctcttttcaga

SEQ ID NO: 137915 - DNA, 33 bp, Homo sapien
ggacgtatgtgtacacaaaaacttgatcacaag

SEQ ID NO: 137916 - DNA, 33 bp, Homo sapien
ggacgtatgtgtacaccaaaacttgatcacaag

SEQ ID NO: 137917 - DNA, 33 bp, Homo sapien
ctacctcatgcaaacacacacaaatacaaatat

SEQ ID NO: 137918 - DNA, 33 bp, Homo sapien
ctacctcatgcaaacatacacaaatacaaatat

SEQ ID NO: 137919 - DNA, 33 bp, Homo sapien
agacttaagaaggagacaacttcatctgctgga

SEQ ID NO: 137920 - DNA, 33 bp, Homo sapien
agacttaagaaggagataacttcatctgctgga

SEQ ID NO: 137921 - DNA, 33 bp, Homo sapien
gcagcagccaggtctgaagatgaatgatccggg

SEQ ID NO: 137922 - DNA, 33 bp, Homo sapien
gcagcagccaggtctgtagatgaatgatccggg

SEQ ID NO: 137923 - DNA, 33 bp, Homo sapien
gagagattccagacataagaaagcttcaatgta

SEQ ID NO: 137924 - DNA, 33 bp, Homo sapien
gagagattccagacatgagaaagcttcaatgta

SEQ ID NO: 137925 - DNA, 33 bp, Homo sapien
tccatgtctggatataggcctaaaataattgaa

SEQ ID NO: 137926 - DNA, 33 bp, Homo sapien
tccatgtctggatatatgcctaaaataattgaa

SEQ ID NO: 137927 - DNA, 33 bp, Homo sapien
agagttaatgatggaaaaataaacttggtgtaa

SEQ ID NO: 137928 - DNA, 33 bp, Homo sapien
agagttaatgatggaacaataaacttggtgtaa

SEQ ID NO: 137929 - DNA, 33 bp, Homo sapien
aatctcagactccagaatactagaacatttcag

SEQ ID NO: 137930 - DNA, 33 bp, Homo sapien
aatctcagactccagattactagaacatttcag

SEQ ID NO: 137931 - DNA, 33 bp, Homo sapien
ctctccacaaacatgacggcccattaattaacc

SEQ ID NO: 137932 - DNA, 33 bp, Homo sapien
ctctccacaaacatgatggcccattaattaacc

SEQ ID NO: 137933 - DNA, 33 bp, Homo sapien
cagcattactgaataccgccaggaagtcagtga

SEQ ID NO: 137934 - DNA, 33 bp, Homo sapien
cagcattactgaatactgccaggaagtcagtga

SEQ ID NO: 137935 - DNA, 33 bp, Homo sapien
aaattttttgcaacaacgtgtacaagaagcaca

SEQ ID NO: 137936 - DNA, 33 bp, Homo sapien
aaattttttgcaacaatgtgtacaagaagcaca

SEQ ID NO: 137937 - DNA, 33 bp, Homo sapien
ctgcaaggggaatgtcaaagagtcaggagagat

SEQ ID NO: 137938 - DNA, 33 bp, Homo sapien
ctgcaaggggaatgtcgaagagtcaggagagat

SEQ ID NO: 137939 - DNA, 33 bp, Homo sapien
aggaagtccatatggcagagaataaatacacac

SEQ ID NO: 137940 - DNA, 33 bp, Homo sapien
aggaagtccatatggcggagaataaatacacac

SEQ ID NO: 137941 - DNA, 33 bp, Homo sapien
gaagcaacaacaatgaaccccttactgtgaact

SEQ ID NO: 137942 - DNA, 33 bp, Homo sapien
gaagcaacaacaatgacccccttactgtgaact

SEQ ID NO: 137943 - DNA, 33 bp, Homo sapien
ttcaagccaaaattaacgtataagcagatggcc

SEQ ID NO: 137944 - DNA, 33 bp, Homo sapien
ttcaagccaaaattaatgtataagcagatggcc

SEQ ID NO: 137945 - DNA, 33 bp, Homo sapien
agcaacatttatttgaacccactggcgaggagc

SEQ ID NO: 137946 - DNA, 33 bp, Homo sapien
agcaacatttatttgatcccactggcgaggagc

SEQ ID NO: 137947 - DNA, 33 bp, Homo sapien
tctttacagtgcctgcaattttactatgtaaga

SEQ ID NO: 137948 - DNA, 33 bp, Homo sapien
tctttacagtgcctgcgattttactatgtaaga

SEQ ID NO: 137949 - DNA, 33 bp, Homo sapien
tttgtcaggtataataaggagaataaggctttg

SEQ ID NO: 137950 - DNA, 33 bp, Homo sapien
tttgtcaggtataatacggagaataaggctttg

SEQ ID NO: 137951 - DNA, 33 bp, Homo sapien
aagccacagtggcaaacgctactgtctgtgttc

SEQ ID NO: 137952 - DNA, 33 bp, Homo sapien
aagccacagtggcaaatgctactgtctgtgttc

SEQ ID NO: 137953 - DNA, 33 bp, Homo sapien
aagtaataatctagaaagcctaaaccacaattc

SEQ ID NO: 137954 - DNA, 33 bp, Homo sapien
aagtaataatctagaaggcctaaaccacaattc

SEQ ID NO: 137955 - DNA, 33 bp, Homo sapien
tgcaacgaactctcaaagtaggtggtaaatcct

SEQ ID NO: 137956 - DNA, 33 bp, Homo sapien
tgcaacgaactctcaatgtaggtggtaaatcct

SEQ ID NO: 137957 - DNA, 33 bp, Homo sapien
cagtatggggcaggagaaggattttgaaataaa

SEQ ID NO: 137958 - DNA, 33 bp, Homo sapien
cagtatggggcaggaggaggattttgaaataaa

SEQ ID NO: 137959 - DNA, 33 bp, Homo sapien
aatcaatgaacgagggcatatgaggcactgtaa

SEQ ID NO: 137960 - DNA, 33 bp, Homo sapien
aatcaatgaacgagggtatatgaggcactgtaa

SEQ ID NO: 137961 - DNA, 33 bp, Homo sapien
agaaagttcactggagacctatcatgtgatgga

SEQ ID NO: 137962 - DNA, 33 bp, Homo sapien
agaaagttcactggaggcctatcatgtgatgga

SEQ ID NO: 137963 - DNA, 33 bp, Homo sapien
agaggaaattgtaaaccaggcaataagaaaaac

SEQ ID NO: 137964 - DNA, 33 bp, Homo sapien
agaggaaattgtaaactaggcaataagaaaaac

SEQ ID NO: 137965 - DNA, 33 bp, Homo sapien
ctttactgattttcaacggccctggttccctat

SEQ ID NO: 137966 - DNA, 33 bp, Homo sapien
ctttactgattttcaatggccctggttccctat

SEQ ID NO: 137967 - DNA, 33 bp, Homo sapien
gtcacagccaagttgcacctgagtgtcctagac

SEQ ID NO: 137968 - DNA, 33 bp, Homo sapien
gtcacagccaagttgcgcctgagtgtcctagac

SEQ ID NO: 137969 - DNA, 33 bp, Homo sapien
caggaggtaaatttcaatcttctagcacggagc

SEQ ID NO: 137970 - DNA, 33 bp, Homo sapien
caggaggtaaatttcagtcttctagcacggagc

SEQ ID NO: 137971 - DNA, 33 bp, Homo sapien
gttggcacaggctccaataaacagcacaagcca

SEQ ID NO: 137972 - DNA, 33 bp, Homo sapien
gttggcacaggctccagtaaacagcacaagcca

SEQ ID NO: 137973 - DNA, 33 bp, Homo sapien
agttaagcagtgtacaatgatgcaaaatagaga

SEQ ID NO: 137974 - DNA, 33 bp, Homo sapien
agttaagcagtgtacagtgatgcaaaatagaga

SEQ ID NO: 137975 - DNA, 33 bp, Homo sapien
cactaatatgactgccaattaatcctgaaatgg

SEQ ID NO: 137976 - DNA, 33 bp, Homo sapien
cactaatatgactgccgattaatcctgaaatgg

SEQ ID NO: 137977 - DNA, 33 bp, Homo sapien
aagcaccattctggaacgtttactctgctccat

SEQ ID NO: 137978 - DNA, 33 bp, Homo sapien
aagcaccattctggaatgtttactctgctccat

SEQ ID NO: 137979 - DNA, 33 bp, Homo sapien
caatgggcattcatcaaactccaaaagcacggt

SEQ ID NO: 137980 - DNA, 33 bp, Homo sapien
caatgggcattcatcagactccaaaagcacggt

SEQ ID NO: 137981 - DNA, 33 bp, Homo sapien
acactgcagtaagaacagattctgctttcaagc

SEQ ID NO: 137982 - DNA, 33 bp, Homo sapien
acactgcagtaagaacggattctgctttcaagc

SEQ ID NO: 137983 - DNA, 33 bp, Homo sapien
gatccgagagaagcagaatgggagaagagtgtg

SEQ ID NO: 137984 - DNA, 33 bp, Homo sapien
gatccgagagaagcaggatgggagaagagtgtg

SEQ ID NO: 137985 - DNA, 33 bp, Homo sapien
atttcctctgaaaaacaaatcctttagccaggc

SEQ ID NO: 137986 - DNA, 33 bp, Homo sapien
atttcctctgaaaaacgaatcctttagccaggc

SEQ ID NO: 137987 - DNA, 33 bp, Homo sapien
gaggttagactagaataaaagagtcagtagcag

SEQ ID NO: 137988 - DNA, 33 bp, Homo sapien
gaggttagactagaatgaaagagtcagtagcag

SEQ ID NO: 137989 - DNA, 33 bp, Homo sapien
gcccaccctgggttatcaatcacactgtaatca

SEQ ID NO: 137990 - DNA, 33 bp, Homo sapien
gcccaccctgggttatgaatcacactgtaatca

SEQ ID NO: 137991 - DNA, 33 bp, Homo sapien
ttctcggagaaaaacaatcagagctcatcattg

SEQ ID NO: 137992 - DNA, 33 bp, Homo sapien
ttctcggagaaaaacagtcagagctcatcattg

SEQ ID NO: 137993 - DNA, 33 bp, Homo sapien
gtattgtttctcaccaacatgtggccgctgtct

SEQ ID NO: 137994 - DNA, 33 bp, Homo sapien
gtattgtttctcaccagcatgtggccgctgtct

SEQ ID NO: 137995 - DNA, 33 bp, Homo sapien
gatgaaaggatcataaagctctcagatattcag

SEQ ID NO: 137996 - DNA, 33 bp, Homo sapien
gatgaaaggatcataaggctctcagatattcag

SEQ ID NO: 137997 - DNA, 33 bp, Homo sapien
cagcaaccactgggaagggggttaagatattca

SEQ ID NO: 137998 - DNA, 33 bp, Homo sapien
cagcaaccactgggaatggggttaagatattca

SEQ ID NO: 137999 - DNA, 33 bp, Homo sapien
caccctcttgggtagccagtaggttcttgtgag

SEQ ID NO: 138000 - DNA, 33 bp, Homo sapien
caccctcttgggtagcgagtaggttcttgtgag

SEQ ID NO: 138001 - DNA, 33 bp, Homo sapien
ttctttttggttaataacgcttgtagcttaaaa

SEQ ID NO: 138002 - DNA, 33 bp, Homo sapien
ttctttttggttaatagcgcttgtagcttaaaa

SEQ ID NO: 138003 - DNA, 33 bp, Homo sapien
actgagctgaatatgacggtgaaatcctttggc

SEQ ID NO: 138004 - DNA, 33 bp, Homo sapien
actgagctgaatatgatggtgaaatcctttggc

SEQ ID NO: 138005 - DNA, 33 bp, Homo sapien
cgaccgcacagctgacagtagatgctccaaggt

SEQ ID NO: 138006 - DNA, 33 bp, Homo sapien
cgaccgcacagctgacggtagatgctccaaggt

SEQ ID NO: 138007 - DNA, 33 bp, Homo sapien
ctttatggctcagcaactaagacagcatcagtg

SEQ ID NO: 138008 - DNA, 33 bp, Homo sapien
ctttatggctcagcaattaagacagcatcagtg

SEQ ID NO: 138009 - DNA, 33 bp, Homo sapien
tagagatagtggctgcaatcaagttaggaagct

SEQ ID NO: 138010 - DNA, 33 bp, Homo sapien
tagagatagtggctgcgatcaagttaggaagct

SEQ ID NO: 138011 - DNA, 33 bp, Homo sapien
ctcgttttcctcagcacgtctttcttcacctgc

SEQ ID NO: 138012 - DNA, 33 bp, Homo sapien
ctcgttttcctcagcatgtctttcttcacctgc

SEQ ID NO: 138013 - DNA, 33 bp, Homo sapien
cttttgagacttctaacattttgctattgagcc

SEQ ID NO: 138014 - DNA, 33 bp, Homo sapien
cttttgagacttctaatattttgctattgagcc

SEQ ID NO: 138015 - DNA, 33 bp, Homo sapien
atttatattcttgaaactcaacagttctctaga

SEQ ID NO: 138016 - DNA, 33 bp, Homo sapien
atttatattcttgaaagtcaacagttctctaga

SEQ ID NO: 138017 - DNA, 33 bp, Homo sapien
agtcaatacatggcacccagtaatacaggcctg

SEQ ID NO: 138018 - DNA, 33 bp, Homo sapien
agtcaatacatggcactcagtaatacaggcctg

SEQ ID NO: 138019 - DNA, 33 bp, Homo sapien
catcatcatgtaatacaatatgtctgaaacagt

SEQ ID NO: 138020 - DNA, 33 bp, Homo sapien
catcatcatgtaatacgatatgtctgaaacagt

SEQ ID NO: 138021 - DNA, 33 bp, Homo sapien
ttgcacaccacttacacgagatatccaattttt

SEQ ID NO: 138022 - DNA, 33 bp, Homo sapien
ttgcacaccacttacaggagatatccaattttt

SEQ ID NO: 138023 - DNA, 33 bp, Homo sapien
atttgtggtccttctacagacaaaattcacaat

SEQ ID NO: 138024 - DNA, 33 bp, Homo sapien
atttgtggtccttctatagacaaaattcacaat

SEQ ID NO: 138025 - DNA, 33 bp, Homo sapien
cacgtgaaacatgggcaaagaaaaccttcctgt

SEQ ID NO: 138026 - DNA, 33 bp, Homo sapien
cacgtgaaacatgggcgaagaaaaccttcctgt

SEQ ID NO: 138027 - DNA, 33 bp, Homo sapien
cttggatatttaaatcagagcatacccaactgc

SEQ ID NO: 138028 - DNA, 33 bp, Homo sapien
cttggatatttaaatcggagcatacccaactgc

SEQ ID NO: 138029 - DNA, 33 bp, Homo sapien
gctgtatcacgcctgacgacttagaggatggta

SEQ ID NO: 138030 - DNA, 33 bp, Homo sapien
gctgtatcacgcctgatgacttagaggatggta

SEQ ID NO: 138031 - DNA, 33 bp, Homo sapien
caaggatgcgagtaccacttggagaggtggtcg

SEQ ID NO: 138032 - DNA, 33 bp, Homo sapien
caaggatgcgagtaccgcttggagaggtggtcg

SEQ ID NO: 138033 - DNA, 33 bp, Homo sapien
taccgtgtgcattccactctgaaaagggaagct

SEQ ID NO: 138034 - DNA, 33 bp, Homo sapien
taccgtgtgcattccattctgaaaagggaagct

SEQ ID NO: 138035 - DNA, 33 bp, Homo sapien
agcttccccttcccaccgtctgtccagcagagg

SEQ ID NO: 138036 - DNA, 33 bp, Homo sapien
agcttccccttcccactgtctgtccagcagagg

SEQ ID NO: 138037 - DNA, 33 bp, Homo sapien
aagagactcaccaccacggttatctgctatgtg

SEQ ID NO: 138038 - DNA, 33 bp, Homo sapien
aagagactcaccaccatggttatctgctatgtg

SEQ ID NO: 138039 - DNA, 33 bp, Homo sapien
atgcatttatttccgacgtaggtacatgagatc

SEQ ID NO: 138040 - DNA, 33 bp, Homo sapien
atgcatttatttccgatgtaggtacatgagatc

SEQ ID NO: 138041 - DNA, 33 bp, Homo sapien
ttaaattgaaaatggacgcctagactgatttgg

SEQ ID NO: 138042 - DNA, 33 bp, Homo sapien
ttaaattgaaaatggatgcctagactgatttgg

SEQ ID NO: 138043 - DNA, 33 bp, Homo sapien
tacctattgctttcaccgtatgcctttccaata

SEQ ID NO: 138044 - DNA, 33 bp, Homo sapien
tacctattgctttcactgtatgcctttccaata

SEQ ID NO: 138045 - DNA, 33 bp, Homo sapien
gaagcaaagctagcgagaaaattctggatgggg

SEQ ID NO: 138046 - DNA, 33 bp, Homo sapien
gaagcaaagctagcgataaaattctggatgggg

SEQ ID NO: 138047 - DNA, 33 bp, Homo sapien
cttttcctcagagggaacaagtacagcaagtgt

SEQ ID NO: 138048 - DNA, 33 bp, Homo sapien
cttttcctcagagggagcaagtacagcaagtgt

SEQ ID NO: 138049 - DNA, 33 bp, Homo sapien
cccagcgggtaaaacaactttcctcatgcttct

SEQ ID NO: 138050 - DNA, 33 bp, Homo sapien
cccagcgggtaaaacagctttcctcatgcttct

SEQ ID NO: 138051 - DNA, 33 bp, Homo sapien
ttggtgtattcatgtacgtttcttttcccaaat

SEQ ID NO: 138052 - DNA, 33 bp, Homo sapien
ttggtgtattcatgtatgtttcttttcccaaat

SEQ ID NO: 138053 - DNA, 33 bp, Homo sapien
ggtcaaagctctctataagaagacaaatgctcc

SEQ ID NO: 138054 - DNA, 33 bp, Homo sapien
ggtcaaagctctctatgagaagacaaatgctcc

SEQ ID NO: 138055 - DNA, 33 bp, Homo sapien
agtctccaaatatcctcaaaacattttaaagcg

SEQ ID NO: 138056 - DNA, 33 bp, Homo sapien
agtctccaaatatcctgaaaacattttaaagcg

SEQ ID NO: 138057 - DNA, 33 bp, Homo sapien
gaacattggtaatccacagatgtagggtaattc

SEQ ID NO: 138058 - DNA, 33 bp, Homo sapien
gaacattggtaatccatagatgtagggtaattc

SEQ ID NO: 138059 - DNA, 33 bp, Homo sapien
ttagaaaagaaacaaaaccactgagcaacttta

SEQ ID NO: 138060 - DNA, 33 bp, Homo sapien
ttagaaaagaaacaaacccactgagcaacttta

SEQ ID NO: 138061 - DNA, 33 bp, Homo sapien
ggaaatagggttagtcaatgtcttagttcatct

SEQ ID NO: 138062 - DNA, 33 bp, Homo sapien
ggaaatagggttagtcgatgtcttagttcatct

SEQ ID NO: 138063 - DNA, 33 bp, Homo sapien
ctgttctttttccttaataaacagccgtgggtg

SEQ ID NO: 138064 - DNA, 33 bp, Homo sapien
ctgttctttttccttattaaacagccgtgggtg

SEQ ID NO: 138065 - DNA, 33 bp, Homo sapien
cccctactatgtgctcaacactgcactgggtgc

SEQ ID NO: 138066 - DNA, 33 bp, Homo sapien
cccctactatgtgctcgacactgcactgggtgc

SEQ ID NO: 138067 - DNA, 33 bp, Homo sapien
tgcatagaaacaagacactatgcaattggcctc

SEQ ID NO: 138068 - DNA, 33 bp, Homo sapien
tgcatagaaacaagacgctatgcaattggcctc

SEQ ID NO: 138069 - DNA, 33 bp, Homo sapien
attcacatttaaaaataaccactctggatgctg

SEQ ID NO: 138070 - DNA, 33 bp, Homo sapien
attcacatttaaaaatgaccactctggatgctg

SEQ ID NO: 138071 - DNA, 33 bp, Homo sapien
tatatttagggagctgcacacggttctcacagt

SEQ ID NO: 138072 - DNA, 33 bp, Homo sapien
tatatttagggagctgtacacggttctcacagt

SEQ ID NO: 138073 - DNA, 33 bp, Homo sapien
aaggattatggccaccagatctcaatgacctgg

SEQ ID NO: 138074 - DNA, 33 bp, Homo sapien
aaggattatggccaccggatctcaatgacctgg

SEQ ID NO: 138075 - DNA, 33 bp, Homo sapien
gtgcctttgcaaaatagaagggaaagttcatct

SEQ ID NO: 138076 - DNA, 33 bp, Homo sapien
gtgcctttgcaaaatataagggaaagttcatct

SEQ ID NO: 138077 - DNA, 33 bp, Homo sapien
atgatgaatagaaaaccctgaatatactaaaat

SEQ ID NO: 138078 - DNA, 33 bp, Homo sapien
atgatgaatagaaaactctgaatatactaaaat

SEQ ID NO: 138079 - DNA, 33 bp, Homo sapien
gccacagctaggcaagccaatctcacaaatgca

SEQ ID NO: 138080 - DNA, 33 bp, Homo sapien
gccacagctaggcaagtcaatctcacaaatgca

SEQ ID NO: 138081 - DNA, 33 bp, Homo sapien
cttgaggcatcttcaaattatagcagttgttac

SEQ ID NO: 138082 - DNA, 33 bp, Homo sapien
cttgaggcatcttcaacttatagcagttgttac

SEQ ID NO: 138083 - DNA, 33 bp, Homo sapien
aatgtaagccattgagaaagaagaagatgatca

SEQ ID NO: 138084 - DNA, 33 bp, Homo sapien
aatgtaagccattgaggaagaagaagatgatca

SEQ ID NO: 138085 - DNA, 33 bp, Homo sapien
aatcctaacagttaccccttccctcatatgaga

SEQ ID NO: 138086 - DNA, 33 bp, Homo sapien
aatcctaacagttacctcttccctcatatgaga

SEQ ID NO: 138087 - DNA, 33 bp, Homo sapien
ttttatggttcaaccacagagctgaatgctaca

SEQ ID NO: 138088 - DNA, 33 bp, Homo sapien
ttttatggttcaaccagagagctgaatgctaca

SEQ ID NO: 138089 - DNA, 33 bp, Homo sapien
cagagagttctcaatgaaaccactatatatatt

SEQ ID NO: 138090 - DNA, 33 bp, Homo sapien
cagagagttctcaatggaaccactatatatatt

SEQ ID NO: 138091 - DNA, 33 bp, Homo sapien
gtatcttcctcatcaactgttttattcaaaacg

SEQ ID NO: 138092 - DNA, 33 bp, Homo sapien
gtatcttcctcatcaattgttttattcaaaacg

SEQ ID NO: 138093 - DNA, 33 bp, Homo sapien
acagcctactatttgaagaaagatcgtaaaaga

SEQ ID NO: 138094 - DNA, 33 bp, Homo sapien
acagcctactatttgacgaaagatcgtaaaaga

SEQ ID NO: 138095 - DNA, 33 bp, Homo sapien
tcctgttaacagaagaagggagataaaacatca

SEQ ID NO: 138096 - DNA, 33 bp, Homo sapien
tcctgttaacagaagaggggagataaaacatca

SEQ ID NO: 138097 - DNA, 33 bp, Homo sapien
ccactaaggagtttaccatatgccagagtaaat

SEQ ID NO: 138098 - DNA, 33 bp, Homo sapien
ccactaaggagtttactatatgccagagtaaat

SEQ ID NO: 138099 - DNA, 33 bp, Homo sapien
aatgacttaaatatgacggtgcatttgaacaga

SEQ ID NO: 138100 - DNA, 33 bp, Homo sapien
aatgacttaaatatgatggtgcatttgaacaga

SEQ ID NO: 138101 - DNA, 33 bp, Homo sapien
gggaggacacacaggaaaaagtgcgccggtgca

SEQ ID NO: 138102 - DNA, 33 bp, Homo sapien
gggaggacacacaggagaaagtgcgccggtgca

SEQ ID NO: 138103 - DNA, 33 bp, Homo sapien
cctgggagcggatctgcagaaactgggatgggg

SEQ ID NO: 138104 - DNA, 33 bp, Homo sapien
cctgggagcggatctgtagaaactgggatgggg

SEQ ID NO: 138105 - DNA, 33 bp, Homo sapien
cttaggtggtcacatacgtttgtctgtacctct

SEQ ID NO: 138106 - DNA, 33 bp, Homo sapien
cttaggtggtcacatatgtttgtctgtacctct

SEQ ID NO: 138107 - DNA, 33 bp, Homo sapien
caagtatatatagccaccacaaattatatgtct

SEQ ID NO: 138108 - DNA, 33 bp, Homo sapien
caagtatatatagccatcacaaattatatgtct

SEQ ID NO: 138109 - DNA, 33 bp, Homo sapien
cacagcccacttctggaatgtcaggatgagatc

SEQ ID NO: 138110 - DNA, 33 bp, Homo sapien
cacagcccacttctggtatgtcaggatgagatc

SEQ ID NO: 138111 - DNA, 33 bp, Homo sapien
ataatactggcttaaacatgacaagtttatttg

SEQ ID NO: 138112 - DNA, 33 bp, Homo sapien
ataatactggcttaaatatgacaagtttatttg

SEQ ID NO: 138113 - DNA, 33 bp, Homo sapien
tgcttagtatgattacaaggcatgtcaataatt

SEQ ID NO: 138114 - DNA, 33 bp, Homo sapien
tgcttagtatgattaccaggcatgtcaataatt

SEQ ID NO: 138115 - DNA, 33 bp, Homo sapien
attgcaaaggcagtaaatagcacaccaagaaat

SEQ ID NO: 138116 - DNA, 33 bp, Homo sapien
attgcaaaggcagtaagtagcacaccaagaaat

SEQ ID NO: 138117 - DNA, 33 bp, Homo sapien
tccagagctggatgaacgttgagacattatgct

SEQ ID NO: 138118 - DNA, 33 bp, Homo sapien
tccagagctggatgaaggttgagacattatgct

SEQ ID NO: 138119 - DNA, 33 bp, Homo sapien
gcagcaattattacagacaagctggcctgtcca

SEQ ID NO: 138120 - DNA, 33 bp, Homo sapien
gcagcaattattacagtcaagctggcctgtcca

SEQ ID NO: 138121 - DNA, 33 bp, Homo sapien
tccttcctttctttgaagaagctcccaggattc

SEQ ID NO: 138122 - DNA, 33 bp, Homo sapien
tccttcctttctttgaggaagctcccaggattc

SEQ ID NO: 138123 - DNA, 33 bp, Homo sapien
tcagttgaaatgagtcaaatctgaaaacccttg

SEQ ID NO: 138124 - DNA, 33 bp, Homo sapien
tcagttgaaatgagtcgaatctgaaaacccttg

SEQ ID NO: 138125 - DNA, 33 bp, Homo sapien
tgaaactcttctctaaagagctggttatgggca

SEQ ID NO: 138126 - DNA, 33 bp, Homo sapien
tgaaactcttctctaatgagctggttatgggca

SEQ ID NO: 138127 - DNA, 33 bp, Homo sapien
tcaactcttattttacagactagcacaacatgc

SEQ ID NO: 138128 - DNA, 33 bp, Homo sapien
tcaactcttattttacggactagcacaacatgc

SEQ ID NO: 138129 - DNA, 33 bp, Homo sapien
ctgttggggctgacaaagtttttttttgttttt

SEQ ID NO: 138130 - DNA, 33 bp, Homo sapien
ctgttggggctgacaaggtttttttttgttttt

SEQ ID NO: 138131 - DNA, 33 bp, Homo sapien
ggaaaaggtaaggaaaagaattgcctctcagag

SEQ ID NO: 138132 - DNA, 33 bp, Homo sapien
ggaaaaggtaaggaaaggaattgcctctcagag

SEQ ID NO: 138133 - DNA, 33 bp, Homo sapien
atacgtgggtgatctacgaagactatcagtagg

SEQ ID NO: 138134 - DNA, 33 bp, Homo sapien
atacgtgggtgatctaggaagactatcagtagg

SEQ ID NO: 138135 - DNA, 33 bp, Homo sapien
tacacttagtagagccccaataaatggttgtta

SEQ ID NO: 138136 - DNA, 33 bp, Homo sapien
tacacttagtagagcctcaataaatggttgtta

SEQ ID NO: 138137 - DNA, 33 bp, Homo sapien
atattttataaccaaccctgaggatcctggaaa

SEQ ID NO: 138138 - DNA, 33 bp, Homo sapien
atattttataaccaactctgaggatcctggaaa

SEQ ID NO: 138139 - DNA, 33 bp, Homo sapien
caagatggtatgtataggtgcataaagatttta

SEQ ID NO: 138140 - DNA, 33 bp, Homo sapien
caagatggtatgtatatgtgcataaagatttta

SEQ ID NO: 138141 - DNA, 33 bp, Homo sapien
taatcctctaacaatccaggagaagctaggaat

SEQ ID NO: 138142 - DNA, 33 bp, Homo sapien
taatcctctaacaatctaggagaagctaggaat

SEQ ID NO: 138143 - DNA, 33 bp, Homo sapien
agcacagagagtagtgccaagagtcatggggaa

SEQ ID NO: 138144 - DNA, 33 bp, Homo sapien
agcacagagagtagtgtcaagagtcatggggaa

SEQ ID NO: 138145 - DNA, 33 bp, Homo sapien
tcatcttctatgagaacaatgcctttgtatatg

SEQ ID NO: 138146 - DNA, 33 bp, Homo sapien
tcatcttctatgagaataatgcctttgtatatg

SEQ ID NO: 138147 - DNA, 33 bp, Homo sapien
ggaatacttggcaataaaaatgactaattctac

SEQ ID NO: 138148 - DNA, 33 bp, Homo sapien
ggaatacttggcaatataaatgactaattctac

SEQ ID NO: 138149 - DNA, 33 bp, Homo sapien
ctatctttgacctccacaacatcttgtcctgga

SEQ ID NO: 138150 - DNA, 33 bp, Homo sapien
ctatctttgacctccataacatcttgtcctgga

SEQ ID NO: 138151 - DNA, 33 bp, Homo sapien
ttcaataacaacatcaacttaattttggccttc

SEQ ID NO: 138152 - DNA, 33 bp, Homo sapien
ttcaataacaacatcagcttaattttggccttc

SEQ ID NO: 138153 - DNA, 33 bp, Homo sapien
cagcactgctttactacatgacattaatgcatt

SEQ ID NO: 138154 - DNA, 33 bp, Homo sapien
cagcactgctttactatatgacattaatgcatt

SEQ ID NO: 138155 - DNA, 33 bp, Homo sapien
aggaccaacagtgtgaactctatgaccaactta

SEQ ID NO: 138156 - DNA, 33 bp, Homo sapien
aggaccaacagtgtgacctctatgaccaactta

SEQ ID NO: 138157 - DNA, 33 bp, Homo sapien
gcacatactgtagttaataaagcttcaaagcaa

SEQ ID NO: 138158 - DNA, 33 bp, Homo sapien
gcacatactgtagttattaaagcttcaaagcaa

SEQ ID NO: 138159 - DNA, 33 bp, Homo sapien
aatatgagctaaaaataatcatccatgaaataa

SEQ ID NO: 138160 - DNA, 33 bp, Homo sapien
aatatgagctaaaaatgatcatccatgaaataa

SEQ ID NO: 138161 - DNA, 33 bp, Homo sapien
aatttgtttaaatcaacggctctcttatctttt

SEQ ID NO: 138162 - DNA, 33 bp, Homo sapien
aatttgtttaaatcaatggctctcttatctttt

SEQ ID NO: 138163 - DNA, 33 bp, Homo sapien
gccaagataatccttaagacaatgtggtataat

SEQ ID NO: 138164 - DNA, 33 bp, Homo sapien
gccaagataatccttatgacaatgtggtataat

SEQ ID NO: 138165 - DNA, 33 bp, Homo sapien
acaggaaaaggtagacaaagcctcaagatgaca

SEQ ID NO: 138166 - DNA, 33 bp, Homo sapien
acaggaaaaggtagacgaagcctcaagatgaca

SEQ ID NO: 138167 - DNA, 33 bp, Homo sapien
tgaacagagcacaaaaagtactaaccattaaaa

SEQ ID NO: 138168 - DNA, 33 bp, Homo sapien
tgaacagagcacaaaaggtactaaccattaaaa

SEQ ID NO: 138169 - DNA, 33 bp, Homo sapien
ttgcaattgacagatcactagataaaagagttt

SEQ ID NO: 138170 - DNA, 33 bp, Homo sapien
ttgcaattgacagatcgctagataaaagagttt

SEQ ID NO: 138171 - DNA, 33 bp, Homo sapien
ctttctgccagtgtaacatggacaaaattagta

SEQ ID NO: 138172 - DNA, 33 bp, Homo sapien
ctttctgccagtgtaatatggacaaaattagta

SEQ ID NO: 138173 - DNA, 33 bp, Homo sapien
aagcctgggccagcaacgatgtttcaggcataa

SEQ ID NO: 138174 - DNA, 33 bp, Homo sapien
aagcctgggccagcaatgatgtttcaggcataa

SEQ ID NO: 138175 - DNA, 33 bp, Homo sapien
cctgaaaaatgtcccacacaggagttaacaata

SEQ ID NO: 138176 - DNA, 33 bp, Homo sapien
cctgaaaaatgtcccatacaggagttaacaata

SEQ ID NO: 138177 - DNA, 33 bp, Homo sapien
acaacgattgcagcaaacatttatggattcact

SEQ ID NO: 138178 - DNA, 33 bp, Homo sapien
acaacgattgcagcaagcatttatggattcact

SEQ ID NO: 138179 - DNA, 33 bp, Homo sapien
agaaaaatcaccctctaaaagcttcactagtta

SEQ ID NO: 138180 - DNA, 33 bp, Homo sapien
agaaaaatcaccctctgaaagcttcactagtta

SEQ ID NO: 138181 - DNA, 33 bp, Homo sapien
cgggctctgaaaacaagaatgataactcccata

SEQ ID NO: 138182 - DNA, 33 bp, Homo sapien
cgggctctgaaaacaataatgataactcccata

SEQ ID NO: 138183 - DNA, 33 bp, Homo sapien
atgctctgcaaagtaaataaaattatcggggtg

SEQ ID NO: 138184 - DNA, 33 bp, Homo sapien
atgctctgcaaagtaagtaaaattatcggggtg

SEQ ID NO: 138185 - DNA, 33 bp, Homo sapien
acaatccaaattccaaacatctaagctgatttt

SEQ ID NO: 138186 - DNA, 33 bp, Homo sapien
acaatccaaattccaagcatctaagctgatttt

SEQ ID NO: 138187 - DNA, 33 bp, Homo sapien
tcttcatgcccaccaaacctcttggctgatgac

SEQ ID NO: 138188 - DNA, 33 bp, Homo sapien
tcttcatgcccaccaatcctcttggctgatgac

SEQ ID NO: 138189 - DNA, 33 bp, Homo sapien
tttaagagcctttgcacggttccacagttgcat

SEQ ID NO: 138190 - DNA, 33 bp, Homo sapien
tttaagagcctttgcatggttccacagttgcat

SEQ ID NO: 138191 - DNA, 33 bp, Homo sapien
ttttagaaagccatgacccaactatgaagtcac

SEQ ID NO: 138192 - DNA, 33 bp, Homo sapien
ttttagaaagccatgatccaactatgaagtcac

SEQ ID NO: 138193 - DNA, 33 bp, Homo sapien
tacagaataggttatcaagaggaagggttaatt

SEQ ID NO: 138194 - DNA, 33 bp, Homo sapien
tacagaataggttatcgagaggaagggttaatt

SEQ ID NO: 138195 - DNA, 33 bp, Homo sapien
gctacatggtcattagaacatcccttcctctac

SEQ ID NO: 138196 - DNA, 33 bp, Homo sapien
gctacatggtcattaggacatcccttcctctac

SEQ ID NO: 138197 - DNA, 33 bp, Homo sapien
tgagtctcagatgagaactttgactttgagctt

SEQ ID NO: 138198 - DNA, 33 bp, Homo sapien
tgagtctcagatgagacctttgactttgagctt

SEQ ID NO: 138199 - DNA, 33 bp, Homo sapien
gtctaggtaaacctcactctttgcattactggt

SEQ ID NO: 138200 - DNA, 33 bp, Homo sapien
gtctaggtaaacctcattctttgcattactggt

SEQ ID NO: 138201 - DNA, 33 bp, Homo sapien
aaagtggatgacatcactacccaagaagaatgt

SEQ ID NO: 138202 - DNA, 33 bp, Homo sapien
aaagtggatgacatcattacccaagaagaatgt

SEQ ID NO: 138203 - DNA, 33 bp, Homo sapien
tgatggggaaaaaacaagtcattggtttcactt

SEQ ID NO: 138204 - DNA, 33 bp, Homo sapien
tgatggggaaaaaacatgtcattggtttcactt

SEQ ID NO: 138205 - DNA, 33 bp, Homo sapien
aggtcagtgcttctgaagtaactggatctttac

SEQ ID NO: 138206 - DNA, 33 bp, Homo sapien
aggtcagtgcttctgacgtaactggatctttac

SEQ ID NO: 138207 - DNA, 33 bp, Homo sapien
actttcccttgatgatcagagttttatgttctg

SEQ ID NO: 138208 - DNA, 33 bp, Homo sapien
actttcccttgatgattagagttttatgttctg

SEQ ID NO: 138209 - DNA, 33 bp, Homo sapien
ttatgttaaagtaccaatgcaattcagcgacag

SEQ ID NO: 138210 - DNA, 33 bp, Homo sapien
ttatgttaaagtaccagtgcaattcagcgacag

SEQ ID NO: 138211 - DNA, 33 bp, Homo sapien
aatgaactttcattgacgatttcaacaaagaga

SEQ ID NO: 138212 - DNA, 33 bp, Homo sapien
aatgaactttcattgatgatttcaacaaagaga

SEQ ID NO: 138213 - DNA, 33 bp, Homo sapien
tcagctacaattctaagagctttgggcattttc

SEQ ID NO: 138214 - DNA, 33 bp, Homo sapien
tcagctacaattctaatagctttgggcattttc

SEQ ID NO: 138215 - DNA, 33 bp, Homo sapien
tttcatgacaaccctaagaggtatatacagatg

SEQ ID NO: 138216 - DNA, 33 bp, Homo sapien
tttcatgacaaccctatgaggtatatacagatg

SEQ ID NO: 138217 - DNA, 33 bp, Homo sapien
acaagagtgataagaaccaaaaaaaatctggaa

SEQ ID NO: 138218 - DNA, 33 bp, Homo sapien
acaagagtgataagaatcaaaaaaaatctggaa

SEQ ID NO: 138219 - DNA, 33 bp, Homo sapien
gccatggcaatgaaccactttaatgacaaggca

SEQ ID NO: 138220 - DNA, 33 bp, Homo sapien
gccatggcaatgaaccgctttaatgacaaggca

SEQ ID NO: 138221 - DNA, 33 bp, Homo sapien
cagcatcatagggaagcatttgcgttctaaata

SEQ ID NO: 138222 - DNA, 33 bp, Homo sapien
cagcatcatagggaaggatttgcgttctaaata

SEQ ID NO: 138223 - DNA, 33 bp, Homo sapien
aatggaactaaatgaacggtgatgctccaaaac

SEQ ID NO: 138224 - DNA, 33 bp, Homo sapien
aatggaactaaatgaatggtgatgctccaaaac

SEQ ID NO: 138225 - DNA, 33 bp, Homo sapien
tggagcaggccaatcacgcggtagggcttgtta

SEQ ID NO: 138226 - DNA, 33 bp, Homo sapien
tggagcaggccaatcatgcggtagggcttgtta

SEQ ID NO: 138227 - DNA, 33 bp, Homo sapien
agctaaacagtttaaacgctgatggtggaattg

SEQ ID NO: 138228 - DNA, 33 bp, Homo sapien
agctaaacagtttaaatgctgatggtggaattg

SEQ ID NO: 138229 - DNA, 33 bp, Homo sapien
ctctgaggatggaatcaatcctttggcctcagc

SEQ ID NO: 138230 - DNA, 33 bp, Homo sapien
ctctgaggatggaatctatcctttggcctcagc

SEQ ID NO: 138231 - DNA, 33 bp, Homo sapien
gattctttctagtgaagtggggatgtaacaaac

SEQ ID NO: 138232 - DNA, 33 bp, Homo sapien
gattctttctagtgaattggggatgtaacaaac

SEQ ID NO: 138233 - DNA, 33 bp, Homo sapien
ttttttatttttatgcactcatcattcaactga

SEQ ID NO: 138234 - DNA, 33 bp, Homo sapien
ttttttatttttatgcgctcatcattcaactga

SEQ ID NO: 138235 - DNA, 33 bp, Homo sapien
aaaaacttctggtcacaacgggaaccttaagtg

SEQ ID NO: 138236 - DNA, 33 bp, Homo sapien
aaaaacttctggtcacgacgggaaccttaagtg

SEQ ID NO: 138237 - DNA, 33 bp, Homo sapien
tatcttgatatatgcgcaccagaaattatggcc

SEQ ID NO: 138238 - DNA, 33 bp, Homo sapien
tatcttgatatatgcgtaccagaaattatggcc

SEQ ID NO: 138239 - DNA, 33 bp, Homo sapien
atcccatacatagaccaaattataaagctggat

SEQ ID NO: 138240 - DNA, 33 bp, Homo sapien
atcccatacatagacccaattataaagctggat

SEQ ID NO: 138241 - DNA, 33 bp, Homo sapien
tccatctataaaagacaaatgttatagaagcta

SEQ ID NO: 138242 - DNA, 33 bp, Homo sapien
tccatctataaaagacgaatgttatagaagcta

SEQ ID NO: 138243 - DNA, 33 bp, Homo sapien
cagggaaaacaaagaaagaatgactgcagactt

SEQ ID NO: 138244 - DNA, 33 bp, Homo sapien
cagggaaaacaaagaaggaatgactgcagactt

SEQ ID NO: 138245 - DNA, 33 bp, Homo sapien
gtttagaaatgggctacacagagaagtgagcca

SEQ ID NO: 138246 - DNA, 33 bp, Homo sapien
gtttagaaatgggctatacagagaagtgagcca

SEQ ID NO: 138247 - DNA, 33 bp, Homo sapien
ttgctctccatacaagcatcaaaacggttgatt

SEQ ID NO: 138248 - DNA, 33 bp, Homo sapien
ttgctctccatacaagtatcaaaacggttgatt

SEQ ID NO: 138249 - DNA, 33 bp, Homo sapien
tctgaaagttcaacaaagggtttggctgaagag

SEQ ID NO: 138250 - DNA, 33 bp, Homo sapien
tctgaaagttcaacaaggggtttggctgaagag

SEQ ID NO: 138251 - DNA, 33 bp, Homo sapien
aaaaccacagcaaaaaatgtcctgaaaatacaa

SEQ ID NO: 138252 - DNA, 33 bp, Homo sapien
aaaaccacagcaaaaattgtcctgaaaatacaa

SEQ ID NO: 138253 - DNA, 33 bp, Homo sapien
ctgactttaaaaactacgtaagatgtgttatac

SEQ ID NO: 138254 - DNA, 33 bp, Homo sapien
ctgactttaaaaactatgtaagatgtgttatac

SEQ ID NO: 138255 - DNA, 33 bp, Homo sapien
caggtattcattcctcaatcaacatttatttat

SEQ ID NO: 138256 - DNA, 33 bp, Homo sapien
caggtattcattcctctatcaacatttatttat

SEQ ID NO: 138257 - DNA, 33 bp, Homo sapien
acatttgcaacacagcgaatgagtttgagaaac

SEQ ID NO: 138258 - DNA, 33 bp, Homo sapien
acatttgcaacacagctaatgagtttgagaaac

SEQ ID NO: 138259 - DNA, 33 bp, Homo sapien
catattttcattgccccaaagactctatccatg

SEQ ID NO: 138260 - DNA, 33 bp, Homo sapien
catattttcattgcccgaaagactctatccatg

SEQ ID NO: 138261 - DNA, 33 bp, Homo sapien
agaggacaaaaatgaacgcaacctcacagacga

SEQ ID NO: 138262 - DNA, 33 bp, Homo sapien
agaggacaaaaatgaaggcaacctcacagacga

SEQ ID NO: 138263 - DNA, 33 bp, Homo sapien
cagcaggacttgggggaccaaattgggcagtga

SEQ ID NO: 138264 - DNA, 33 bp, Homo sapien
cagcaggacttggggggccaaattgggcagtga

SEQ ID NO: 138265 - DNA, 33 bp, Homo sapien
tggatggatgggtagacgaaaggatggataagg

SEQ ID NO: 138266 - DNA, 33 bp, Homo sapien
tggatggatgggtagatgaaaggatggataagg

SEQ ID NO: 138267 - DNA, 33 bp, Homo sapien
taacagaagagggcaaagtgaaagtcactgtaa

SEQ ID NO: 138268 - DNA, 33 bp, Homo sapien
taacagaagagggcaacgtgaaagtcactgtaa

SEQ ID NO: 138269 - DNA, 33 bp, Homo sapien
taatagattattcaaaattgattgagtataaag

SEQ ID NO: 138270 - DNA, 33 bp, Homo sapien
taatagattattcaaacttgattgagtataaag

SEQ ID NO: 138271 - DNA, 33 bp, Homo sapien
tcggctccccttgaccaaaaagttctgctttac

SEQ ID NO: 138272 - DNA, 33 bp, Homo sapien
tcggctccccttgaccgaaaagttctgctttac

SEQ ID NO: 138273 - DNA, 33 bp, Homo sapien
tctactttctgggttcacatttcagaaatgatt

SEQ ID NO: 138274 - DNA, 33 bp, Homo sapien
tctactttctgggttcgcatttcagaaatgatt

SEQ ID NO: 138275 - DNA, 33 bp, Homo sapien
gctaaatgctgaatacacatggacacaaaaatg

SEQ ID NO: 138276 - DNA, 33 bp, Homo sapien
gctaaatgctgaatacgcatggacacaaaaatg

SEQ ID NO: 138277 - DNA, 33 bp, Homo sapien
cttacaagtaatgacaacaatgacacccacagg

SEQ ID NO: 138278 - DNA, 33 bp, Homo sapien
cttacaagtaatgacaccaatgacacccacagg

SEQ ID NO: 138279 - DNA, 33 bp, Homo sapien
acaaaagagcttgaagaaaatatgataaagcat

SEQ ID NO: 138280 - DNA, 33 bp, Homo sapien
acaaaagagcttgaaggaaatatgataaagcat

SEQ ID NO: 138281 - DNA, 33 bp, Homo sapien
tatgataaagcattcaactttgctaattacagg

SEQ ID NO: 138282 - DNA, 33 bp, Homo sapien
tatgataaagcattcacctttgctaattacagg

SEQ ID NO: 138283 - DNA, 33 bp, Homo sapien
ggggcccacaacttaacgacgaaagccacgcac

SEQ ID NO: 138284 - DNA, 33 bp, Homo sapien
ggggcccacaacttaatgacgaaagccacgcac

SEQ ID NO: 138285 - DNA, 33 bp, Homo sapien
agtgaaaagcactagaagacagcaatagcgaca

SEQ ID NO: 138286 - DNA, 33 bp, Homo sapien
agtgaaaagcactagacgacagcaatagcgaca

SEQ ID NO: 138287 - DNA, 33 bp, Homo sapien
cttccatctaggagagaaaccgtccgtgtgagt

SEQ ID NO: 138288 - DNA, 33 bp, Homo sapien
cttccatctaggagaggaaccgtccgtgtgagt

SEQ ID NO: 138289 - DNA, 33 bp, Homo sapien
caaccagccattaggaccagagtgaggttgggc

SEQ ID NO: 138290 - DNA, 33 bp, Homo sapien
caaccagccattaggatcagagtgaggttgggc

SEQ ID NO: 138291 - DNA, 33 bp, Homo sapien
cctggaatatcacccaagtactattcctcctga

SEQ ID NO: 138292 - DNA, 33 bp, Homo sapien
cctggaatatcacccacgtactattcctcctga

SEQ ID NO: 138293 - DNA, 33 bp, Homo sapien
tggcctggtatgcagaagaagcacttaatgcct

SEQ ID NO: 138294 - DNA, 33 bp, Homo sapien
tggcctggtatgcagaggaagcacttaatgcct

SEQ ID NO: 138295 - DNA, 33 bp, Homo sapien
acctgccaatcacaccaggctatagcggtaagt

SEQ ID NO: 138296 - DNA, 33 bp, Homo sapien
acctgccaatcacaccgggctatagcggtaagt

SEQ ID NO: 138297 - DNA, 33 bp, Homo sapien
cacttttgtacctatgaaaactagctgctcctc

SEQ ID NO: 138298 - DNA, 33 bp, Homo sapien
cacttttgtacctatggaaactagctgctcctc

SEQ ID NO: 138299 - DNA, 33 bp, Homo sapien
agggggagtatcattaagaatttgaggatttaa

SEQ ID NO: 138300 - DNA, 33 bp, Homo sapien
agggggagtatcattaggaatttgaggatttaa

SEQ ID NO: 138301 - DNA, 33 bp, Homo sapien
cacctcgggctctggacattctagcgggtggat

SEQ ID NO: 138302 - DNA, 33 bp, Homo sapien
cacctcgggctctggatattctagcgggtggat

SEQ ID NO: 138303 - DNA, 33 bp, Homo sapien
gttgatttattgctgactcactcattgggtctg

SEQ ID NO: 138304 - DNA, 33 bp, Homo sapien
gttgatttattgctgagtcactcattgggtctg

SEQ ID NO: 138305 - DNA, 33 bp, Homo sapien
cgacttcgcctgatgacaagttatttgtgagtg

SEQ ID NO: 138306 - DNA, 33 bp, Homo sapien
cgacttcgcctgatgagaagttatttgtgagtg

SEQ ID NO: 138307 - DNA, 33 bp, Homo sapien
aggcagaattagcaaaaacggagagtgttctgt

SEQ ID NO: 138308 - DNA, 33 bp, Homo sapien
aggcagaattagcaaagacggagagtgttctgt

SEQ ID NO: 138309 - DNA, 33 bp, Homo sapien
gtataggactggagacagaatatgttaagtgct

SEQ ID NO: 138310 - DNA, 33 bp, Homo sapien
gtataggactggagacggaatatgttaagtgct

SEQ ID NO: 138311 - DNA, 33 bp, Homo sapien
caagggactgtgtccacagctgagaaaaaatag

SEQ ID NO: 138312 - DNA, 33 bp, Homo sapien
caagggactgtgtccatagctgagaaaaaatag

SEQ ID NO: 138313 - DNA, 33 bp, Homo sapien
aactctagtaggctccagaaacgtgttaaataa

SEQ ID NO: 138314 - DNA, 33 bp, Homo sapien
aactctagtaggctccggaaacgtgttaaataa

SEQ ID NO: 138315 - DNA, 33 bp, Homo sapien
ccactttgtcctaagactctccagaagacaggc

SEQ ID NO: 138316 - DNA, 33 bp, Homo sapien
ccactttgtcctaagattctccagaagacaggc

SEQ ID NO: 138317 - DNA, 33 bp, Homo sapien
cttaagtgcaacaggaaccagctctgtcctgtc

SEQ ID NO: 138318 - DNA, 33 bp, Homo sapien
cttaagtgcaacaggagccagctctgtcctgtc

SEQ ID NO: 138319 - DNA, 33 bp, Homo sapien
atgagtgacgtggccaccgggatagtagtagag

SEQ ID NO: 138320 - DNA, 33 bp, Homo sapien
atgagtgacgtggccatcgggatagtagtagag

SEQ ID NO: 138321 - DNA, 33 bp, Homo sapien
aaccttgtgaatatacaaaaacccactgaacta

SEQ ID NO: 138322 - DNA, 33 bp, Homo sapien
aaccttgtgaatatacgaaaacccactgaacta

SEQ ID NO: 138323 - DNA, 33 bp, Homo sapien
ggagaaaccttgaaaacgccatgtgaagtgaaa

SEQ ID NO: 138324 - DNA, 33 bp, Homo sapien
ggagaaaccttgaaaatgccatgtgaagtgaaa

SEQ ID NO: 138325 - DNA, 33 bp, Homo sapien
agcagctactagagacacaacttcagttaaaaa

SEQ ID NO: 138326 - DNA, 33 bp, Homo sapien
agcagctactagagacgcaacttcagttaaaaa

SEQ ID NO: 138327 - DNA, 33 bp, Homo sapien
caattggaggcccacgaaccaatgcatgaacct

SEQ ID NO: 138328 - DNA, 33 bp, Homo sapien
caattggaggcccacggaccaatgcatgaacct

SEQ ID NO: 138329 - DNA, 33 bp, Homo sapien
caagtaatctaagccaatcatggcaagcctcct

SEQ ID NO: 138330 - DNA, 33 bp, Homo sapien
caagtaatctaagccagtcatggcaagcctcct

SEQ ID NO: 138331 - DNA, 33 bp, Homo sapien
atgagatgccatctaaataataataggtacact

SEQ ID NO: 138332 - DNA, 33 bp, Homo sapien
atgagatgccatctaagtaataataggtacact

SEQ ID NO: 138333 - DNA, 33 bp, Homo sapien
tgaaagaatgagtgaacacacgtggccttccag

SEQ ID NO: 138334 - DNA, 33 bp, Homo sapien
tgaaagaatgagtgaagacacgtggccttccag

SEQ ID NO: 138335 - DNA, 33 bp, Homo sapien
tcttgggacacaaaacccagaactactcccagc

SEQ ID NO: 138336 - DNA, 33 bp, Homo sapien
tcttgggacacaaaactcagaactactcccagc

SEQ ID NO: 138337 - DNA, 33 bp, Homo sapien
agttgcattctgtaaacggagtcctatgccggt

SEQ ID NO: 138338 - DNA, 33 bp, Homo sapien
agttgcattctgtaaatggagtcctatgccggt

SEQ ID NO: 138339 - DNA, 33 bp, Homo sapien
tgtctatcgcctttacaccatcatgaagttaag

SEQ ID NO: 138340 - DNA, 33 bp, Homo sapien
tgtctatcgcctttacgccatcatgaagttaag

SEQ ID NO: 138341 - DNA, 33 bp, Homo sapien
cccataggagataacacagtcatcggtaccagg

SEQ ID NO: 138342 - DNA, 33 bp, Homo sapien
cccataggagataacatagtcatcggtaccagg

SEQ ID NO: 138343 - DNA, 33 bp, Homo sapien
aatggtccagtaaataaataatggaggctgggc

SEQ ID NO: 138344 - DNA, 33 bp, Homo sapien
aatggtccagtaaatacataatggaggctgggc

SEQ ID NO: 138345 - DNA, 33 bp, Homo sapien
cttggctcttataaaaatgccgtggagaaatgg

SEQ ID NO: 138346 - DNA, 33 bp, Homo sapien
cttggctcttataaaagtgccgtggagaaatgg

SEQ ID NO: 138347 - DNA, 33 bp, Homo sapien
tttctcagcatctaacgggtgtgtcctgcccca

SEQ ID NO: 138348 - DNA, 33 bp, Homo sapien
tttctcagcatctaactggtgtgtcctgcccca

SEQ ID NO: 138349 - DNA, 33 bp, Homo sapien
gatgagccacccttcacgcaaccaggtcctgtt

SEQ ID NO: 138350 - DNA, 33 bp, Homo sapien
gatgagccacccttcatgcaaccaggtcctgtt

SEQ ID NO: 138351 - DNA, 33 bp, Homo sapien
gccctggttgaaaaaccgaaattcttgcaaccc

SEQ ID NO: 138352 - DNA, 33 bp, Homo sapien
gccctggttgaaaaactgaaattcttgcaaccc

SEQ ID NO: 138353 - DNA, 33 bp, Homo sapien
gttcagcaccctgccccaaggacaaactctctc

SEQ ID NO: 138354 - DNA, 33 bp, Homo sapien
gttcagcaccctgccctaaggacaaactctctc

SEQ ID NO: 138355 - DNA, 33 bp, Homo sapien
ttttctggtgggtgaacgaaggggtgcacagaa

SEQ ID NO: 138356 - DNA, 33 bp, Homo sapien
ttttctggtgggtgaatgaaggggtgcacagaa

SEQ ID NO: 138357 - DNA, 33 bp, Homo sapien
acaaaaacaattagaaaatgctgagtttgtttt

SEQ ID NO: 138358 - DNA, 33 bp, Homo sapien
acaaaaacaattagaagatgctgagtttgtttt

SEQ ID NO: 138359 - DNA, 33 bp, Homo sapien
ttcatgaaagaaaaaaactactagcaatcagca

SEQ ID NO: 138360 - DNA, 33 bp, Homo sapien
ttcatgaaagaaaaaacctactagcaatcagca

SEQ ID NO: 138361 - DNA, 33 bp, Homo sapien
gaaggaagttccagaaaccgaataacgctgggc

SEQ ID NO: 138362 - DNA, 33 bp, Homo sapien
gaaggaagttccagaagccgaataacgctgggc

SEQ ID NO: 138363 - DNA, 33 bp, Homo sapien
tccacagcctttcccacgtaatccacacaggca

SEQ ID NO: 138364 - DNA, 33 bp, Homo sapien
tccacagcctttcccatgtaatccacacaggca

SEQ ID NO: 138365 - DNA, 33 bp, Homo sapien
agctttctaaatatgccaacacgacagtatccc

SEQ ID NO: 138366 - DNA, 33 bp, Homo sapien
agctttctaaatatgctaacacgacagtatccc

SEQ ID NO: 138367 - DNA, 33 bp, Homo sapien
tagctttggtatttccagattgctctgcaaagg

SEQ ID NO: 138368 - DNA, 33 bp, Homo sapien
tagctttggtatttccggattgctctgcaaagg

SEQ ID NO: 138369 - DNA, 33 bp, Homo sapien
tcagaattctatcatcaagaggataatattttt

SEQ ID NO: 138370 - DNA, 33 bp, Homo sapien
tcagaattctatcatcgagaggataatattttt

SEQ ID NO: 138371 - DNA, 33 bp, Homo sapien
gatgccaaccttttctcaacaatttagttgcat

SEQ ID NO: 138372 - DNA, 33 bp, Homo sapien
gatgccaaccttttcttaacaatttagttgcat

SEQ ID NO: 138373 - DNA, 33 bp, Homo sapien
ccactcttacttccaaactttctatgtccttaa

SEQ ID NO: 138374 - DNA, 33 bp, Homo sapien
ccactcttacttccaacctttctatgtccttaa

SEQ ID NO: 138375 - DNA, 33 bp, Homo sapien
gctaggctgtcttccaatagtacagaggatgat

SEQ ID NO: 138376 - DNA, 33 bp, Homo sapien
gctaggctgtcttccagtagtacagaggatgat

SEQ ID NO: 138377 - DNA, 33 bp, Homo sapien
aatgcagtattgacacactgttcagtagaagaa

SEQ ID NO: 138378 - DNA, 33 bp, Homo sapien
aatgcagtattgacacgctgttcagtagaagaa

SEQ ID NO: 138379 - DNA, 33 bp, Homo sapien
ctaggaggtttaataacgttctctattaggagc

SEQ ID NO: 138380 - DNA, 33 bp, Homo sapien
ctaggaggtttaataatgttctctattaggagc

SEQ ID NO: 138381 - DNA, 33 bp, Homo sapien
tatggggtgttctttacggcatggttgtcattg

SEQ ID NO: 138382 - DNA, 33 bp, Homo sapien
tatggggtgttctttatggcatggttgtcattg

SEQ ID NO: 138383 - DNA, 33 bp, Homo sapien
ccggtggcttactccaaacatgctttatttctt

SEQ ID NO: 138384 - DNA, 33 bp, Homo sapien
ccggtggcttactccacacatgctttatttctt

SEQ ID NO: 138385 - DNA, 33 bp, Homo sapien
caggcattctaataaagcacaaaaacaatcact

SEQ ID NO: 138386 - DNA, 33 bp, Homo sapien
caggcattctaataaatcacaaaaacaatcact

SEQ ID NO: 138387 - DNA, 33 bp, Homo sapien
gagaaccactgggttagaccatctgcagagacc

SEQ ID NO: 138388 - DNA, 33 bp, Homo sapien
gagaaccactgggttataccatctgcagagacc

SEQ ID NO: 138389 - DNA, 33 bp, Homo sapien
actgaggcttggagaaagaaaggaactcgcatg

SEQ ID NO: 138390 - DNA, 33 bp, Homo sapien
actgaggcttggagaaggaaaggaactcgcatg

SEQ ID NO: 138391 - DNA, 33 bp, Homo sapien
ttcttgtgtgattcccaatcattcagtctgtgg

SEQ ID NO: 138392 - DNA, 33 bp, Homo sapien
ttcttgtgtgattccccatcattcagtctgtgg

SEQ ID NO: 138393 - DNA, 33 bp, Homo sapien
caaagaggaaaaagaacgtgtgatacggtctca

SEQ ID NO: 138394 - DNA, 33 bp, Homo sapien
caaagaggaaaaagaatgtgtgatacggtctca

SEQ ID NO: 138395 - DNA, 33 bp, Homo sapien
caaggcacatttgacaaagccaatgtaccacca

SEQ ID NO: 138396 - DNA, 33 bp, Homo sapien
caaggcacatttgacagagccaatgtaccacca

SEQ ID NO: 138397 - DNA, 33 bp, Homo sapien
aggagtgtgtgctttacaaaggtagcacagatc

SEQ ID NO: 138398 - DNA, 33 bp, Homo sapien
aggagtgtgtgctttataaaggtagcacagatc

SEQ ID NO: 138399 - DNA, 33 bp, Homo sapien
tgtcagcaaattgaaccgaacagtgctcagaaa

SEQ ID NO: 138400 - DNA, 33 bp, Homo sapien
tgtcagcaaattgaactgaacagtgctcagaaa

SEQ ID NO: 138401 - DNA, 33 bp, Homo sapien
tcacctgtcggaggaaaatgaaaccatcactaa

SEQ ID NO: 138402 - DNA, 33 bp, Homo sapien
tcacctgtcggaggaagatgaaaccatcactaa

SEQ ID NO: 138403 - DNA, 33 bp, Homo sapien
taagctttagaatgaacgttttcctgtgtatca

SEQ ID NO: 138404 - DNA, 33 bp, Homo sapien
taagctttagaatgaatgttttcctgtgtatca

SEQ ID NO: 138405 - DNA, 33 bp, Homo sapien
tgactggcactgaaacactatacctcctccagt

SEQ ID NO: 138406 - DNA, 33 bp, Homo sapien
tgactggcactgaaacgctatacctcctccagt

SEQ ID NO: 138407 - DNA, 33 bp, Homo sapien
atggaaagataatggacgtatatttgtacttga

SEQ ID NO: 138408 - DNA, 33 bp, Homo sapien
atggaaagataatggatgtatatttgtacttga

SEQ ID NO: 138409 - DNA, 33 bp, Homo sapien
cactaaaagttcatcaatgacggagtatatata

SEQ ID NO: 138410 - DNA, 33 bp, Homo sapien
cactaaaagttcatcagtgacggagtatatata

SEQ ID NO: 138411 - DNA, 33 bp, Homo sapien
agagtaaataagatgcccccaaataacaacctt

SEQ ID NO: 138412 - DNA, 33 bp, Homo sapien
agagtaaataagatgctcccaaataacaacctt

SEQ ID NO: 138413 - DNA, 33 bp, Homo sapien
ttttcattgggttgaaagtgaatgagaggttct

SEQ ID NO: 138414 - DNA, 33 bp, Homo sapien
ttttcattgggttgaatgtgaatgagaggttct

SEQ ID NO: 138415 - DNA, 33 bp, Homo sapien
tgacagagactggggaaaaactagagctgcacc

SEQ ID NO: 138416 - DNA, 33 bp, Homo sapien
tgacagagactggggacaaactagagctgcacc

SEQ ID NO: 138417 - DNA, 33 bp, Homo sapien
atgagttttcagttcaatcaacatccatgtatt

SEQ ID NO: 138418 - DNA, 33 bp, Homo sapien
atgagttttcagttcagtcaacatccatgtatt

SEQ ID NO: 138419 - DNA, 33 bp, Homo sapien
tctcagtccaaagaacaatctccctgtcctgaa

SEQ ID NO: 138420 - DNA, 33 bp, Homo sapien
tctcagtccaaagaacgatctccctgtcctgaa

SEQ ID NO: 138421 - DNA, 33 bp, Homo sapien
ttagtgccagtccataagcactaagacactaat

SEQ ID NO: 138422 - DNA, 33 bp, Homo sapien
ttagtgccagtccatacgcactaagacactaat

SEQ ID NO: 138423 - DNA, 33 bp, Homo sapien
tggtgctagtgtggttcaaattagtgtcttagt

SEQ ID NO: 138424 - DNA, 33 bp, Homo sapien
tggtgctagtgtggttgaaattagtgtcttagt

SEQ ID NO: 138425 - DNA, 33 bp, Homo sapien
ctggacctcttccttacgtaaatcttatacaaa

SEQ ID NO: 138426 - DNA, 33 bp, Homo sapien
ctggacctcttccttatgtaaatcttatacaaa

SEQ ID NO: 138427 - DNA, 33 bp, Homo sapien
gttaacccagaatgagaaggtagaagtttgagg

SEQ ID NO: 138428 - DNA, 33 bp, Homo sapien
gttaacccagaatgaggaggtagaagtttgagg

SEQ ID NO: 138429 - DNA, 33 bp, Homo sapien
atcttccttcaacctacagtatgcacacaaatt

SEQ ID NO: 138430 - DNA, 33 bp, Homo sapien
atcttccttcaacctatagtatgcacacaaatt

SEQ ID NO: 138431 - DNA, 33 bp, Homo sapien
aacttaccagtttgaactaaggatctgctggtt

SEQ ID NO: 138432 - DNA, 33 bp, Homo sapien
aacttaccagtttgaattaaggatctgctggtt

SEQ ID NO: 138433 - DNA, 33 bp, Homo sapien
ccttgcagacgacataacagacaaattcttgag

SEQ ID NO: 138434 - DNA, 33 bp, Homo sapien
ccttgcagacgacatatcagacaaattcttgag

SEQ ID NO: 138435 - DNA, 33 bp, Homo sapien
gaagaaagaagaacaccaaaagagaaagagagt

SEQ ID NO: 138436 - DNA, 33 bp, Homo sapien
gaagaaagaagaacacgaaaagagaaagagagt

SEQ ID NO: 138437 - DNA, 33 bp, Homo sapien
aacactgggaacctcactcaagccctggggtac

SEQ ID NO: 138438 - DNA, 33 bp, Homo sapien
aacactgggaacctcattcaagccctggggtac

SEQ ID NO: 138439 - DNA, 33 bp, Homo sapien
tgaaaggatggccatacgtatttgctgatgtca

SEQ ID NO: 138440 - DNA, 33 bp, Homo sapien
tgaaaggatggccatatgtatttgctgatgtca

SEQ ID NO: 138441 - DNA, 33 bp, Homo sapien
ccagaaatcagacttacgtgtgtattttaaaga

SEQ ID NO: 138442 - DNA, 33 bp, Homo sapien
ccagaaatcagacttatgtgtgtattttaaaga

SEQ ID NO: 138443 - DNA, 33 bp, Homo sapien
gctaaaattaatggaccaatattgatacactgc

SEQ ID NO: 138444 - DNA, 33 bp, Homo sapien
gctaaaattaatggactaatattgatacactgc

SEQ ID NO: 138445 - DNA, 33 bp, Homo sapien
ttatgtgttcttaaaaattattatgctgtgcaa

SEQ ID NO: 138446 - DNA, 33 bp, Homo sapien
ttatgtgttcttaaaacttattatgctgtgcaa

SEQ ID NO: 138447 - DNA, 33 bp, Homo sapien
acaacactgatggaaccggaactcatgttaagt

SEQ ID NO: 138448 - DNA, 33 bp, Homo sapien
acaacactgatggaactggaactcatgttaagt

SEQ ID NO: 138449 - DNA, 33 bp, Homo sapien
atgtgtcagaagctaaaatttcttctagtgtcc

SEQ ID NO: 138450 - DNA, 33 bp, Homo sapien
atgtgtcagaagctaacatttcttctagtgtcc

SEQ ID NO: 138451 - DNA, 33 bp, Homo sapien
ggaagttctagctaccacaatgaggtaagaaaa

SEQ ID NO: 138452 - DNA, 33 bp, Homo sapien
ggaagttctagctaccgcaatgaggtaagaaaa

SEQ ID NO: 138453 - DNA, 33 bp, Homo sapien
ttctgtaagctgaaaagagttatagaaatggat

SEQ ID NO: 138454 - DNA, 33 bp, Homo sapien
ttctgtaagctgaaaatagttatagaaatggat

SEQ ID NO: 138455 - DNA, 33 bp, Homo sapien
catatttgtaatagccaaaaaccgaaaacaaca

SEQ ID NO: 138456 - DNA, 33 bp, Homo sapien
catatttgtaatagcccaaaaccgaaaacaaca

SEQ ID NO: 138457 - DNA, 33 bp, Homo sapien
tgttgatagatataaaaggaagctctttgtggg

SEQ ID NO: 138458 - DNA, 33 bp, Homo sapien
tgttgatagatataaagggaagctctttgtggg

SEQ ID NO: 138459 - DNA, 33 bp, Homo sapien
aattggattcctataccagttcagcattaattg

SEQ ID NO: 138460 - DNA, 33 bp, Homo sapien
aattggattcctatactagttcagcattaattg

SEQ ID NO: 138461 - DNA, 33 bp, Homo sapien
gcccataatggaccccaaagtcaatattaagca

SEQ ID NO: 138462 - DNA, 33 bp, Homo sapien
gcccataatggaccccgaagtcaatattaagca

SEQ ID NO: 138463 - DNA, 33 bp, Homo sapien
tcattgcagaatatataagacttttttgaatgg

SEQ ID NO: 138464 - DNA, 33 bp, Homo sapien
tcattgcagaatatatgagacttttttgaatgg

SEQ ID NO: 138465 - DNA, 33 bp, Homo sapien
gacactgaggatgcaacagtgaccaagaaaagc

SEQ ID NO: 138466 - DNA, 33 bp, Homo sapien
gacactgaggatgcaatagtgaccaagaaaagc

SEQ ID NO: 138467 - DNA, 33 bp, Homo sapien
ggagtggtcaggaagacaccagagatattatag

SEQ ID NO: 138468 - DNA, 33 bp, Homo sapien
ggagtggtcaggaagataccagagatattatag

SEQ ID NO: 138469 - DNA, 33 bp, Homo sapien
actttctgcttatgaaactcaagatttactttg

SEQ ID NO: 138470 - DNA, 33 bp, Homo sapien
actttctgcttatgaatctcaagatttactttg

SEQ ID NO: 138471 - DNA, 33 bp, Homo sapien
aagtgtgttgaaatcaccaactgtaatactgga

SEQ ID NO: 138472 - DNA, 33 bp, Homo sapien
aagtgtgttgaaatcagcaactgtaatactgga

SEQ ID NO: 138473 - DNA, 33 bp, Homo sapien
ctatgagctgaagaaagtattacatatgagccc

SEQ ID NO: 138474 - DNA, 33 bp, Homo sapien
ctatgagctgaagaaattattacatatgagccc

SEQ ID NO: 138475 - DNA, 33 bp, Homo sapien
ccttagaattgttgaaaaatttcagctctgtca

SEQ ID NO: 138476 - DNA, 33 bp, Homo sapien
ccttagaattgttgaagaatttcagctctgtca

SEQ ID NO: 138477 - DNA, 33 bp, Homo sapien
atttaggactctataaatattggctgctattct

SEQ ID NO: 138478 - DNA, 33 bp, Homo sapien
atttaggactctataagtattggctgctattct

SEQ ID NO: 138479 - DNA, 33 bp, Homo sapien
gtctccatcagcaggaagaagcgtttgggggaa

SEQ ID NO: 138480 - DNA, 33 bp, Homo sapien
gtctccatcagcaggaggaagcgtttgggggaa

SEQ ID NO: 138481 - DNA, 33 bp, Homo sapien
ttactctttatgacaaactgatagacatttatt

SEQ ID NO: 138482 - DNA, 33 bp, Homo sapien
ttactctttatgacaacctgatagacatttatt

SEQ ID NO: 138483 - DNA, 33 bp, Homo sapien
agagccattgtccaggaagccaaaacattactg

SEQ ID NO: 138484 - DNA, 33 bp, Homo sapien
agagccattgtccagggagccaaaacattactg

SEQ ID NO: 138485 - DNA, 33 bp, Homo sapien
tggtgtgacagaggaactcacgaaggactcagt

SEQ ID NO: 138486 - DNA, 33 bp, Homo sapien
tggtgtgacagaggaattcacgaaggactcagt

SEQ ID NO: 138487 - DNA, 33 bp, Homo sapien
ttaaagcctagccccaaacagaacaagcacaac

SEQ ID NO: 138488 - DNA, 33 bp, Homo sapien
ttaaagcctagccccagacagaacaagcacaac

SEQ ID NO: 138489 - DNA, 33 bp, Homo sapien
tcgatatttaatccctcacaaaagctgtttatg

SEQ ID NO: 138490 - DNA, 33 bp, Homo sapien
tcgatatttaatcccttacaaaagctgtttatg

SEQ ID NO: 138491 - DNA, 33 bp, Homo sapien
ttttgacctcggccataagtataccacagtact

SEQ ID NO: 138492 - DNA, 33 bp, Homo sapien
ttttgacctcggccatcagtataccacagtact

SEQ ID NO: 138493 - DNA, 33 bp, Homo sapien
ataaaaaatcaatggccaagactggctacctga

SEQ ID NO: 138494 - DNA, 33 bp, Homo sapien
ataaaaaatcaatggctaagactggctacctga

SEQ ID NO: 138495 - DNA, 33 bp, Homo sapien
ttctggaaaatctcaactatgacaaaatagctc

SEQ ID NO: 138496 - DNA, 33 bp, Homo sapien
ttctggaaaatctcaagtatgacaaaatagctc

SEQ ID NO: 138497 - DNA, 33 bp, Homo sapien
ttgagatagagataaaagatgccaagatttcta

SEQ ID NO: 138498 - DNA, 33 bp, Homo sapien
ttgagatagagataaatgatgccaagatttcta

SEQ ID NO: 138499 - DNA, 33 bp, Homo sapien
tcacaacagcctcgacagaagtagatgtttaag

SEQ ID NO: 138500 - DNA, 33 bp, Homo sapien
tcacaacagcctcgaccgaagtagatgtttaag

SEQ ID NO: 138501 - DNA, 33 bp, Homo sapien
ctgctcaccttctgaacggctggaactttctat

SEQ ID NO: 138502 - DNA, 33 bp, Homo sapien
ctgctcaccttctgaatggctggaactttctat

SEQ ID NO: 138503 - DNA, 33 bp, Homo sapien
gaggaagaacaattcagctggaatctgaagaat

SEQ ID NO: 138504 - DNA, 33 bp, Homo sapien
gaggaagaacaattcatctggaatctgaagaat

SEQ ID NO: 138505 - DNA, 33 bp, Homo sapien
gctggacattaagtacacaagaacaatagtagc

SEQ ID NO: 138506 - DNA, 33 bp, Homo sapien
gctggacattaagtacgcaagaacaatagtagc

SEQ ID NO: 138507 - DNA, 33 bp, Homo sapien
attctcttttatagaccctttgacagattatct

SEQ ID NO: 138508 - DNA, 33 bp, Homo sapien
attctcttttatagactctttgacagattatct

SEQ ID NO: 138509 - DNA, 33 bp, Homo sapien
cttctagaaaggactcactgtgcagctttgatg

SEQ ID NO: 138510 - DNA, 33 bp, Homo sapien
cttctagaaaggactcgctgtgcagctttgatg

SEQ ID NO: 138511 - DNA, 33 bp, Homo sapien
tctcacctaatcctcacaagaagcctcacaaga

SEQ ID NO: 138512 - DNA, 33 bp, Homo sapien
tctcacctaatcctcataagaagcctcacaaga

SEQ ID NO: 138513 - DNA, 33 bp, Homo sapien
agctgggtctagaatcaatgtgtgtagactccc

SEQ ID NO: 138514 - DNA, 33 bp, Homo sapien
agctgggtctagaatcgatgtgtgtagactccc

SEQ ID NO: 138515 - DNA, 33 bp, Homo sapien
gccattctcttaaagccgaacaagtctagcagg

SEQ ID NO: 138516 - DNA, 33 bp, Homo sapien
gccattctcttaaagctgaacaagtctagcagg

SEQ ID NO: 138517 - DNA, 33 bp, Homo sapien
tcgcctggcttaaaccacaaggagaatgtcacc

SEQ ID NO: 138518 - DNA, 33 bp, Homo sapien
tcgcctggcttaaaccgcaaggagaatgtcacc

SEQ ID NO: 138519 - DNA, 33 bp, Homo sapien
tccacaggctctaagacggaatcactgtgaggg

SEQ ID NO: 138520 - DNA, 33 bp, Homo sapien
tccacaggctctaagagggaatcactgtgaggg

SEQ ID NO: 138521 - DNA, 33 bp, Homo sapien
ggaccacattttgacaaccattgcaatagatca

SEQ ID NO: 138522 - DNA, 33 bp, Homo sapien
ggaccacattttgacagccattgcaatagatca

SEQ ID NO: 138523 - DNA, 33 bp, Homo sapien
gaattgatgcttgcccactccagaagatctagc

SEQ ID NO: 138524 - DNA, 33 bp, Homo sapien
gaattgatgcttgcccgctccagaagatctagc

SEQ ID NO: 138525 - DNA, 33 bp, Homo sapien
tggctgcctggttgtcgctgattgaatggtcct

SEQ ID NO: 138526 - DNA, 33 bp, Homo sapien
tggctgcctggttgtctctgattgaatggtcct

SEQ ID NO: 138527 - DNA, 33 bp, Homo sapien
tttctgtttttcctaacactgtgcacactgctg

SEQ ID NO: 138528 - DNA, 33 bp, Homo sapien
tttctgtttttcctaatactgtgcacactgctg

SEQ ID NO: 138529 - DNA, 33 bp, Homo sapien
tgggagaagatgtaaaaaagtcagtatgtgaac

SEQ ID NO: 138530 - DNA, 33 bp, Homo sapien
tgggagaagatgtaaacaagtcagtatgtgaac

SEQ ID NO: 138531 - DNA, 33 bp, Homo sapien
agtgatttttgcaagactcaagcaagatctagt

SEQ ID NO: 138532 - DNA, 33 bp, Homo sapien
agtgatttttgcaagattcaagcaagatctagt

SEQ ID NO: 138533 - DNA, 33 bp, Homo sapien
ggttccaacctcatgacgtcatctacagctaat

SEQ ID NO: 138534 - DNA, 33 bp, Homo sapien
ggttccaacctcatgatgtcatctacagctaat

SEQ ID NO: 138535 - DNA, 33 bp, Homo sapien
agtcgaaccatatcaacgagcaagagaccgagt

SEQ ID NO: 138536 - DNA, 33 bp, Homo sapien
agtcgaaccatatcaatgagcaagagaccgagt

SEQ ID NO: 138537 - DNA, 33 bp, Homo sapien
aaaacaaaagattatccataaaatgcacggtcc

SEQ ID NO: 138538 - DNA, 33 bp, Homo sapien
aaaacaaaagattatcgataaaatgcacggtcc

SEQ ID NO: 138539 - DNA, 33 bp, Homo sapien
atcacaagacatacaaaggaggtgctattatga

SEQ ID NO: 138540 - DNA, 33 bp, Homo sapien
atcacaagacatacaagggaggtgctattatga

SEQ ID NO: 138541 - DNA, 33 bp, Homo sapien
ctgtgaggctcccggcacttctccattcattgt

SEQ ID NO: 138542 - DNA, 33 bp, Homo sapien
ctgtgaggctcccggcgcttctccattcattgt

SEQ ID NO: 138543 - DNA, 33 bp, Homo sapien
gcataggtgtgaaagaagtgatcatggagattg

SEQ ID NO: 138544 - DNA, 33 bp, Homo sapien
gcataggtgtgaaagatgtgatcatggagattg

SEQ ID NO: 138545 - DNA, 33 bp, Homo sapien
cttgtggcattattcaccatggacaatggcatt

SEQ ID NO: 138546 - DNA, 33 bp, Homo sapien
cttgtggcattattcatcatggacaatggcatt

SEQ ID NO: 138547 - DNA, 33 bp, Homo sapien
aaagaaatgagtgaatcaagcactattttaagc

SEQ ID NO: 138548 - DNA, 33 bp, Homo sapien
aaagaaatgagtgaatgaagcactattttaagc

SEQ ID NO: 138549 - DNA, 33 bp, Homo sapien
tctaagtattacactgaacggctagtaacgttc

SEQ ID NO: 138550 - DNA, 33 bp, Homo sapien
tctaagtattacactgtacggctagtaacgttc

SEQ ID NO: 138551 - DNA, 33 bp, Homo sapien
tctcataatttccaagcccagtagatatgaatt

SEQ ID NO: 138552 - DNA, 33 bp, Homo sapien
tctcataatttccaagtccagtagatatgaatt

SEQ ID NO: 138553 - DNA, 33 bp, Homo sapien
ttggcacagtttacataaaaagactgtttgcaa

SEQ ID NO: 138554 - DNA, 33 bp, Homo sapien
ttggcacagtttacatcaaaagactgtttgcaa

SEQ ID NO: 138555 - DNA, 33 bp, Homo sapien
ccaggcagaactgctgaagacccagtgagttgc

SEQ ID NO: 138556 - DNA, 33 bp, Homo sapien
ccaggcagaactgctggagacccagtgagttgc

SEQ ID NO: 138557 - DNA, 33 bp, Homo sapien
tgtagtgatgacctggacaatagcacactttcc

SEQ ID NO: 138558 - DNA, 33 bp, Homo sapien
tgtagtgatgacctggccaatagcacactttcc

SEQ ID NO: 138559 - DNA, 33 bp, Homo sapien
gatattccacaccaaacgactggcttgggaaag

SEQ ID NO: 138560 - DNA, 33 bp, Homo sapien
gatattccacaccaaatgactggcttgggaaag

SEQ ID NO: 138561 - DNA, 33 bp, Homo sapien
tttgcaagcaaaaagaactgctttcaaatatac

SEQ ID NO: 138562 - DNA, 33 bp, Homo sapien
tttgcaagcaaaaagagctgctttcaaatatac

SEQ ID NO: 138563 - DNA, 33 bp, Homo sapien
gtctttttcagctaccagagaattccagggggc

SEQ ID NO: 138564 - DNA, 33 bp, Homo sapien
gtctttttcagctaccggagaattccagggggc

SEQ ID NO: 138565 - DNA, 33 bp, Homo sapien
aaaaagacaagcagaaactaagaattttgacaa

SEQ ID NO: 138566 - DNA, 33 bp, Homo sapien
aaaaagacaagcagaacctaagaattttgacaa

SEQ ID NO: 138567 - DNA, 33 bp, Homo sapien
ggattttaacaatgcacgtatggaataaacgaa

SEQ ID NO: 138568 - DNA, 33 bp, Homo sapien
ggattttaacaatgcatgtatggaataaacgaa

SEQ ID NO: 138569 - DNA, 33 bp, Homo sapien
ccaaattcaaggctacaggcataccctgagtgt

SEQ ID NO: 138570 - DNA, 33 bp, Homo sapien
ccaaattcaaggctacgggcataccctgagtgt

SEQ ID NO: 138571 - DNA, 33 bp, Homo sapien
taattcacctccccgaacctcagtgttgatcct

SEQ ID NO: 138572 - DNA, 33 bp, Homo sapien
taattcacctccccgagcctcagtgttgatcct

SEQ ID NO: 138573 - DNA, 33 bp, Homo sapien
acctaccagccacagaagagcaggacgagccga

SEQ ID NO: 138574 - DNA, 33 bp, Homo sapien
acctaccagccacagaggagcaggacgagccga

SEQ ID NO: 138575 - DNA, 33 bp, Homo sapien
ttgttgactttgtctgcatgtataattcttggt

SEQ ID NO: 138576 - DNA, 33 bp, Homo sapien
ttgttgactttgtctgtatgtataattcttggt

SEQ ID NO: 138577 - DNA, 33 bp, Homo sapien
ttcaatgcggaggacacgttcaaggccactgct

SEQ ID NO: 138578 - DNA, 33 bp, Homo sapien
ttcaatgcggaggacaggttcaaggccactgct

SEQ ID NO: 138579 - DNA, 33 bp, Homo sapien
actctaaatcatctcggaaagtcttgaacttgt

SEQ ID NO: 138580 - DNA, 33 bp, Homo sapien
actctaaatcatctcgtaaagtcttgaacttgt

SEQ ID NO: 138581 - DNA, 33 bp, Homo sapien
ggggccgtacagttagcaacctgcaactctgcc

SEQ ID NO: 138582 - DNA, 33 bp, Homo sapien
ggggccgtacagttagtaacctgcaactctgcc

SEQ ID NO: 138583 - DNA, 33 bp, Homo sapien
gacaaaagagcaacaccgatgctaatctatgta

SEQ ID NO: 138584 - DNA, 33 bp, Homo sapien
gacaaaagagcaacactgatgctaatctatgta

SEQ ID NO: 138585 - DNA, 33 bp, Homo sapien
ctccgtggtagttagacgagcacagaggatggc

SEQ ID NO: 138586 - DNA, 33 bp, Homo sapien
ctccgtggtagttagatgagcacagaggatggc

SEQ ID NO: 138587 - DNA, 33 bp, Homo sapien
agttgcatatctgggaacccaattaagtcaata

SEQ ID NO: 138588 - DNA, 33 bp, Homo sapien
agttgcatatctgggagcccaattaagtcaata

SEQ ID NO: 138589 - DNA, 33 bp, Homo sapien
ccttactggaactaaacctgtagagcaatgaag

SEQ ID NO: 138590 - DNA, 33 bp, Homo sapien
ccttactggaactaaatctgtagagcaatgaag

SEQ ID NO: 138591 - DNA, 33 bp, Homo sapien
ccagtaaggttgctgactatccttattgtttac

SEQ ID NO: 138592 - DNA, 33 bp, Homo sapien
ccagtaaggttgctgattatccttattgtttac

SEQ ID NO: 138593 - DNA, 33 bp, Homo sapien
tctaggattcttaaagaagtagtcagtatgtca

SEQ ID NO: 138594 - DNA, 33 bp, Homo sapien
tctaggattcttaaagtagtagtcagtatgtca

SEQ ID NO: 138595 - DNA, 33 bp, Homo sapien
tgccttttactcacaacagttctcagaggtaag

SEQ ID NO: 138596 - DNA, 33 bp, Homo sapien
tgccttttactcacaatagttctcagaggtaag

SEQ ID NO: 138597 - DNA, 33 bp, Homo sapien
aagggcctagtatccaaaaaacatataaattct

SEQ ID NO: 138598 - DNA, 33 bp, Homo sapien
aagggcctagtatccagaaaacatataaattct

SEQ ID NO: 138599 - DNA, 33 bp, Homo sapien
taataaatctctgaaaagataagtgagaaacca

SEQ ID NO: 138600 - DNA, 33 bp, Homo sapien
taataaatctctgaaaggataagtgagaaacca

SEQ ID NO: 138601 - DNA, 33 bp, Homo sapien
agaaggtagcttttgaaccaaaccaagaaaggt

SEQ ID NO: 138602 - DNA, 33 bp, Homo sapien
agaaggtagcttttgagccaaaccaagaaaggt

SEQ ID NO: 138603 - DNA, 33 bp, Homo sapien
tagaaacaggagaaaaccactgagcatcgcctg

SEQ ID NO: 138604 - DNA, 33 bp, Homo sapien
tagaaacaggagaaaagcactgagcatcgcctg

SEQ ID NO: 138605 - DNA, 33 bp, Homo sapien
aaacctaaaggcactaccaagaacaatggaggt

SEQ ID NO: 138606 - DNA, 33 bp, Homo sapien
aaacctaaaggcactatcaagaacaatggaggt

SEQ ID NO: 138607 - DNA, 33 bp, Homo sapien
ccttacaacctccaaactaggcatcagcacact

SEQ ID NO: 138608 - DNA, 33 bp, Homo sapien
ccttacaacctccaaattaggcatcagcacact

SEQ ID NO: 138609 - DNA, 33 bp, Homo sapien
tgatggtcccagttcacggctgtttgtcttcct

SEQ ID NO: 138610 - DNA, 33 bp, Homo sapien
tgatggtcccagttcatggctgtttgtcttcct

SEQ ID NO: 138611 - DNA, 33 bp, Homo sapien
agaacaggaaagaataagagtttggatttgccc

SEQ ID NO: 138612 - DNA, 33 bp, Homo sapien
agaacaggaaagaataggagtttggatttgccc

SEQ ID NO: 138613 - DNA, 33 bp, Homo sapien
ctcttctatttggaaacacaattctgctcaatt

SEQ ID NO: 138614 - DNA, 33 bp, Homo sapien
ctcttctatttggaaatacaattctgctcaatt

SEQ ID NO: 138615 - DNA, 33 bp, Homo sapien
taaaaaagaaatgccacgtgggacagtacccaa

SEQ ID NO: 138616 - DNA, 33 bp, Homo sapien
taaaaaagaaatgccatgtgggacagtacccaa

SEQ ID NO: 138617 - DNA, 33 bp, Homo sapien
tatttcttaccttttagcctcaaaacaaaggct

SEQ ID NO: 138618 - DNA, 33 bp, Homo sapien
tatttcttaccttttatcctcaaaacaaaggct

SEQ ID NO: 138619 - DNA, 33 bp, Homo sapien
tgcacagcccacaatacgaactgtttatagatt

SEQ ID NO: 138620 - DNA, 33 bp, Homo sapien
tgcacagcccacaatatgaactgtttatagatt

SEQ ID NO: 138621 - DNA, 33 bp, Homo sapien
taaatggtggcctccaaaaagatatgtccaact

SEQ ID NO: 138622 - DNA, 33 bp, Homo sapien
taaatggtggcctccagaaagatatgtccaact

SEQ ID NO: 138623 - DNA, 33 bp, Homo sapien
ttggatccgtattgaaactcaaatcttgttaca

SEQ ID NO: 138624 - DNA, 33 bp, Homo sapien
ttggatccgtattgaatctcaaatcttgttaca

SEQ ID NO: 138625 - DNA, 33 bp, Homo sapien
ccccttctcaggatgaacctcagatacatagga

SEQ ID NO: 138626 - DNA, 33 bp, Homo sapien
ccccttctcaggatgagcctcagatacatagga

SEQ ID NO: 138627 - DNA, 33 bp, Homo sapien
catgctgggcatgggaactaacgagatggctta

SEQ ID NO: 138628 - DNA, 33 bp, Homo sapien
catgctgggcatgggacctaacgagatggctta

SEQ ID NO: 138629 - DNA, 33 bp, Homo sapien
aattgtcctgggacacagtctagtaggcaagaa

SEQ ID NO: 138630 - DNA, 33 bp, Homo sapien
aattgtcctgggacacggtctagtaggcaagaa

SEQ ID NO: 138631 - DNA, 33 bp, Homo sapien
ggctttcgtcgttaggccacgctgcctctccag

SEQ ID NO: 138632 - DNA, 33 bp, Homo sapien
ggctttcgtcgttaggtcacgctgcctctccag

SEQ ID NO: 138633 - DNA, 33 bp, Homo sapien
ggcattcttgttctcacgttacagacaaggaaa

SEQ ID NO: 138634 - DNA, 33 bp, Homo sapien
ggcattcttgttctcatgttacagacaaggaaa

SEQ ID NO: 138635 - DNA, 33 bp, Homo sapien
aagaaattggtggcagacattcttcaagattgt

SEQ ID NO: 138636 - DNA, 33 bp, Homo sapien
aagaaattggtggcagtcattcttcaagattgt

SEQ ID NO: 138637 - DNA, 33 bp, Homo sapien
tctgctctttgggctacgattttttcttgcaca

SEQ ID NO: 138638 - DNA, 33 bp, Homo sapien
tctgctctttgggctatgattttttcttgcaca

SEQ ID NO: 138639 - DNA, 33 bp, Homo sapien
gccccattgttcttggcatacatggcccacaga

SEQ ID NO: 138640 - DNA, 33 bp, Homo sapien
gccccattgttcttgggatacatggcccacaga

SEQ ID NO: 138641 - DNA, 33 bp, Homo sapien
ctggaaattcagctccgcagctttggtttccac

SEQ ID NO: 138642 - DNA, 33 bp, Homo sapien
ctggaaattcagctcctcagctttggtttccac

SEQ ID NO: 138643 - DNA, 33 bp, Homo sapien
acccaacctatgctcacgcaactggcgctttct

SEQ ID NO: 138644 - DNA, 33 bp, Homo sapien
acccaacctatgctcaggcaactggcgctttct

SEQ ID NO: 138645 - DNA, 33 bp, Homo sapien
gtgttgcctcaatcacacttttcctgtgtcatg

SEQ ID NO: 138646 - DNA, 33 bp, Homo sapien
gtgttgcctcaatcacgcttttcctgtgtcatg

SEQ ID NO: 138647 - DNA, 33 bp, Homo sapien
aggatctaaaaggagcactgggtgatacccgga

SEQ ID NO: 138648 - DNA, 33 bp, Homo sapien
aggatctaaaaggagcgctgggtgatacccgga

SEQ ID NO: 138649 - DNA, 33 bp, Homo sapien
tgatgacatttatatgaagtatccaggatcaaa

SEQ ID NO: 138650 - DNA, 33 bp, Homo sapien
tgatgacatttatatgcagtatccaggatcaaa

SEQ ID NO: 138651 - DNA, 33 bp, Homo sapien
taatggatgttttggcaagcttagcaaagaagt

SEQ ID NO: 138652 - DNA, 33 bp, Homo sapien
taatggatgttttggcgagcttagcaaagaagt

SEQ ID NO: 138653 - DNA, 33 bp, Homo sapien
tgatcttagcacttcgacatctttcccagccat

SEQ ID NO: 138654 - DNA, 33 bp, Homo sapien
tgatcttagcacttcggcatctttcccagccat

SEQ ID NO: 138655 - DNA, 33 bp, Homo sapien
gataaatgcatcatggacaatttggcctgtcac

SEQ ID NO: 138656 - DNA, 33 bp, Homo sapien
gataaatgcatcatgggcaatttggcctgtcac

SEQ ID NO: 138657 - DNA, 33 bp, Homo sapien
ctccacctcagcatggacaaactaaaaaagaaa

SEQ ID NO: 138658 - DNA, 33 bp, Homo sapien
ctccacctcagcatgggcaaactaaaaaagaaa

SEQ ID NO: 138659 - DNA, 33 bp, Homo sapien
tcgaagatgctggggacagtgattgcctctgag

SEQ ID NO: 138660 - DNA, 33 bp, Homo sapien
tcgaagatgctggggagagtgattgcctctgag

SEQ ID NO: 138661 - DNA, 33 bp, Homo sapien
gagggctgcccttcccccactttacaaagaggc

SEQ ID NO: 138662 - DNA, 33 bp, Homo sapien
gagggctgcccttccctcactttacaaagaggc

SEQ ID NO: 138663 - DNA, 33 bp, Homo sapien
ccaaaaggaatgccagaaagcagcatggctcaa

SEQ ID NO: 138664 - DNA, 33 bp, Homo sapien
ccaaaaggaatgccagcaagcagcatggctcaa

SEQ ID NO: 138665 - DNA, 33 bp, Homo sapien
ctgtaggacagacaggccagtctcgtggggtag

SEQ ID NO: 138666 - DNA, 33 bp, Homo sapien
ctgtaggacagacaggtcagtctcgtggggtag

SEQ ID NO: 138667 - DNA, 33 bp, Homo sapien
ataactttctcattgaaaccatgcacattttca

SEQ ID NO: 138668 - DNA, 33 bp, Homo sapien
ataactttctcattgagaccatgcacattttca

SEQ ID NO: 138669 - DNA, 33 bp, Homo sapien
gagggccacgaggaaacgtcatggtactgatca

SEQ ID NO: 138670 - DNA, 33 bp, Homo sapien
gagggccacgaggaaaggtcatggtactgatca

SEQ ID NO: 138671 - DNA, 33 bp, Homo sapien
ttcattcactcagccaagagatatttctggagc

SEQ ID NO: 138672 - DNA, 33 bp, Homo sapien
ttcattcactcagccaggagatatttctggagc

SEQ ID NO: 138673 - DNA, 33 bp, Homo sapien
tctcggctaataactcaacatctgtatgccagc

SEQ ID NO: 138674 - DNA, 33 bp, Homo sapien
tctcggctaataactcgacatctgtatgccagc

SEQ ID NO: 138675 - DNA, 33 bp, Homo sapien
accattgttctggactaaaaactgcctttgcaa

SEQ ID NO: 138676 - DNA, 33 bp, Homo sapien
accattgttctggactgaaaactgcctttgcaa

SEQ ID NO: 138677 - DNA, 33 bp, Homo sapien
atggagacccattcaaactgcctttcccgggac

SEQ ID NO: 138678 - DNA, 33 bp, Homo sapien
atggagacccattcaagctgcctttcccgggac

SEQ ID NO: 138679 - DNA, 33 bp, Homo sapien
ctacagggataaagcacagccaatgtggataac

SEQ ID NO: 138680 - DNA, 33 bp, Homo sapien
ctacagggataaagcatagccaatgtggataac

SEQ ID NO: 138681 - DNA, 33 bp, Homo sapien
ttgtgctcccacaatcgagcaaagcacctggca

SEQ ID NO: 138682 - DNA, 33 bp, Homo sapien
ttgtgctcccacaatctagcaaagcacctggca

SEQ ID NO: 138683 - DNA, 33 bp, Homo sapien
ttaagaaggtgaaagtaacacaggtggtgaccc

SEQ ID NO: 138684 - DNA, 33 bp, Homo sapien
ttaagaaggtgaaagtcacacaggtggtgaccc

SEQ ID NO: 138685 - DNA, 33 bp, Homo sapien
gatcaggcacttctgagaccttgtctgtggggt

SEQ ID NO: 138686 - DNA, 33 bp, Homo sapien
gatcaggcacttctgataccttgtctgtggggt

SEQ ID NO: 138687 - DNA, 33 bp, Homo sapien
gctacagcaaccccaacccccacggtcacgtgc

SEQ ID NO: 138688 - DNA, 33 bp, Homo sapien
gctacagcaaccccaatccccacggtcacgtgc

SEQ ID NO: 138689 - DNA, 33 bp, Homo sapien
ttgtgctgcccctaaacggcaagtatagaaagt

SEQ ID NO: 138690 - DNA, 33 bp, Homo sapien
ttgtgctgcccctaaatggcaagtatagaaagt

SEQ ID NO: 138691 - DNA, 33 bp, Homo sapien
gcaaattaggtgctgaaccaaaggtgtaattaa

SEQ ID NO: 138692 - DNA, 33 bp, Homo sapien
gcaaattaggtgctgatccaaaggtgtaattaa

SEQ ID NO: 138693 - DNA, 33 bp, Homo sapien
ccctgcctgtgctaagcccagacctcgaagcca

SEQ ID NO: 138694 - DNA, 33 bp, Homo sapien
ccctgcctgtgctaagtccagacctcgaagcca

SEQ ID NO: 138695 - DNA, 33 bp, Homo sapien
cacttgccttgttcacacaatatgtcatgcata

SEQ ID NO: 138696 - DNA, 33 bp, Homo sapien
cacttgccttgttcacgcaatatgtcatgcata

SEQ ID NO: 138697 - DNA, 33 bp, Homo sapien
gagagggtgtcggtaaagcatcttgcacataag

SEQ ID NO: 138698 - DNA, 33 bp, Homo sapien
gagagggtgtcggtaacgcatcttgcacataag

SEQ ID NO: 138699 - DNA, 33 bp, Homo sapien
caggacatcgattaggaaatgcacttaggaaca

SEQ ID NO: 138700 - DNA, 33 bp, Homo sapien
caggacatcgattagggaatgcacttaggaaca

SEQ ID NO: 138701 - DNA, 33 bp, Homo sapien
ttcctagtatttatggaaaagccacttaaccca

SEQ ID NO: 138702 - DNA, 33 bp, Homo sapien
ttcctagtatttatgggaaagccacttaaccca

SEQ ID NO: 138703 - DNA, 33 bp, Homo sapien
gtggtggtacctggaagtggtggtactgacagc

SEQ ID NO: 138704 - DNA, 33 bp, Homo sapien
gtggtggtacctggaattggtggtactgacagc

SEQ ID NO: 138705 - DNA, 33 bp, Homo sapien
cctgtgtcaatatataactttctctttatgcat

SEQ ID NO: 138706 - DNA, 33 bp, Homo sapien
cctgtgtcaatatatagctttctctttatgcat

SEQ ID NO: 138707 - DNA, 33 bp, Homo sapien
aatgctttagccatggaactttgtattatctgc

SEQ ID NO: 138708 - DNA, 33 bp, Homo sapien
aatgctttagccatgggactttgtattatctgc

SEQ ID NO: 138709 - DNA, 33 bp, Homo sapien
tggattcccccattaccactattttggccccca

SEQ ID NO: 138710 - DNA, 33 bp, Homo sapien
tggattcccccattactactattttggccccca

SEQ ID NO: 138711 - DNA, 33 bp, Homo sapien
gtccctggcgcagtcaacttctgggaccatgca

SEQ ID NO: 138712 - DNA, 33 bp, Homo sapien
gtccctggcgcagtcaccttctgggaccatgca

SEQ ID NO: 138713 - DNA, 33 bp, Homo sapien
ctcctttgattctcataaccctgtgagcaggtg

SEQ ID NO: 138714 - DNA, 33 bp, Homo sapien
ctcctttgattctcatgaccctgtgagcaggtg

SEQ ID NO: 138715 - DNA, 33 bp, Homo sapien
ctgtgccctgagcacaaagatggcaggatgtgg

SEQ ID NO: 138716 - DNA, 33 bp, Homo sapien
ctgtgccctgagcacagagatggcaggatgtgg

SEQ ID NO: 138717 - DNA, 33 bp, Homo sapien
agagcagaactcacaccaagtatataggatccc

SEQ ID NO: 138718 - DNA, 33 bp, Homo sapien
agagcagaactcacactaagtatataggatccc

SEQ ID NO: 138719 - DNA, 33 bp, Homo sapien
tgctttgggtaaaaccgcttattgctaaaatct

SEQ ID NO: 138720 - DNA, 33 bp, Homo sapien
tgctttgggtaaaacctcttattgctaaaatct

SEQ ID NO: 138721 - DNA, 33 bp, Homo sapien
cttgtttcaggccagaatcatccatggaggcta

SEQ ID NO: 138722 - DNA, 33 bp, Homo sapien
cttgtttcaggccagattcatccatggaggcta

SEQ ID NO: 138723 - DNA, 33 bp, Homo sapien
aacttcagggtatcccaagagcaaagactgatc

SEQ ID NO: 138724 - DNA, 33 bp, Homo sapien
aacttcagggtatcccgagagcaaagactgatc

SEQ ID NO: 138725 - DNA, 33 bp, Homo sapien
taagggtcccttgctcacctgtgaatttctctt

SEQ ID NO: 138726 - DNA, 33 bp, Homo sapien
taagggtcccttgctcgcctgtgaatttctctt

SEQ ID NO: 138727 - DNA, 33 bp, Homo sapien
tatgacttggttggcacgattcttgaccagcat

SEQ ID NO: 138728 - DNA, 33 bp, Homo sapien
tatgacttggttggcatgattcttgaccagcat

SEQ ID NO: 138729 - DNA, 33 bp, Homo sapien
tacatggccctccaaaaccagagtaggtgagct

SEQ ID NO: 138730 - DNA, 33 bp, Homo sapien
tacatggccctccaaacccagagtaggtgagct

SEQ ID NO: 138731 - DNA, 33 bp, Homo sapien
agcggtctgaagactcaattatggaaaaactgc

SEQ ID NO: 138732 - DNA, 33 bp, Homo sapien
agcggtctgaagactcgattatggaaaaactgc

SEQ ID NO: 138733 - DNA, 33 bp, Homo sapien
tcaccttagatagatgccacatagctggtggaa

SEQ ID NO: 138734 - DNA, 33 bp, Homo sapien
tcaccttagatagatgtcacatagctggtggaa

SEQ ID NO: 138735 - DNA, 33 bp, Homo sapien
tctcaggtttgcaggacatcacctggtgacgaa

SEQ ID NO: 138736 - DNA, 33 bp, Homo sapien
tctcaggtttgcaggatatcacctggtgacgaa

SEQ ID NO: 138737 - DNA, 33 bp, Homo sapien
ttcagctattgttacaataaaacagggagtttc

SEQ ID NO: 138738 - DNA, 33 bp, Homo sapien
ttcagctattgttacagtaaaacagggagtttc

SEQ ID NO: 138739 - DNA, 33 bp, Homo sapien
cataaggaatagatgccagttttagaaaattta

SEQ ID NO: 138740 - DNA, 33 bp, Homo sapien
cataaggaatagatgctagttttagaaaattta

SEQ ID NO: 138741 - DNA, 33 bp, Homo sapien
aatccatgcgcgatgacgagggaatgtatccaa

SEQ ID NO: 138742 - DNA, 33 bp, Homo sapien
aatccatgcgcgatgatgagggaatgtatccaa

SEQ ID NO: 138743 - DNA, 33 bp, Homo sapien
aaaaattgcataacaaaaaaggaaacaaaaaat

SEQ ID NO: 138744 - DNA, 33 bp, Homo sapien
aaaaattgcataacaagaaaggaaacaaaaaat

SEQ ID NO: 138745 - DNA, 33 bp, Homo sapien
ttattgtgctattctcgctactcgtcaaagttt

SEQ ID NO: 138746 - DNA, 33 bp, Homo sapien
ttattgtgctattctctctactcgtcaaagttt

SEQ ID NO: 138747 - DNA, 33 bp, Homo sapien
agaaggaatgaagaaaataggaaatcgctctct

SEQ ID NO: 138748 - DNA, 33 bp, Homo sapien
agaaggaatgaagaaagtaggaaatcgctctct

SEQ ID NO: 138749 - DNA, 33 bp, Homo sapien
aagtactgaaaatggaaggctaagtgtgataat

SEQ ID NO: 138750 - DNA, 33 bp, Homo sapien
aagtactgaaaatggagggctaagtgtgataat

SEQ ID NO: 138751 - DNA, 33 bp, Homo sapien
tcatggttgagatgaccatacagtgaccagcaa

SEQ ID NO: 138752 - DNA, 33 bp, Homo sapien
tcatggttgagatgactatacagtgaccagcaa

SEQ ID NO: 138753 - DNA, 33 bp, Homo sapien
tgacagtgttactgtaaagtggtctacgacata

SEQ ID NO: 138754 - DNA, 33 bp, Homo sapien
tgacagtgttactgtagagtggtctacgacata

SEQ ID NO: 138755 - DNA, 33 bp, Homo sapien
agtagtgtctttaaaaaaatgattgcacattga

SEQ ID NO: 138756 - DNA, 33 bp, Homo sapien
agtagtgtctttaaaataatgattgcacattga

SEQ ID NO: 138757 - DNA, 33 bp, Homo sapien
ggaggaccattttaaccgtgccattctgggaag

SEQ ID NO: 138758 - DNA, 33 bp, Homo sapien
ggaggaccattttaactgtgccattctgggaag

SEQ ID NO: 138759 - DNA, 33 bp, Homo sapien
cgagagcctcaccagagattgagaagtacaagc

SEQ ID NO: 138760 - DNA, 33 bp, Homo sapien
cgagagcctcaccagatattgagaagtacaagc

SEQ ID NO: 138761 - DNA, 33 bp, Homo sapien
aaccaggatcctcaaaccgttggacaaatcctc

SEQ ID NO: 138762 - DNA, 33 bp, Homo sapien
aaccaggatcctcaaatcgttggacaaatcctc

SEQ ID NO: 138763 - DNA, 33 bp, Homo sapien
ttctggtttccacaaacagtctcttctgttgct

SEQ ID NO: 138764 - DNA, 33 bp, Homo sapien
ttctggtttccacaaagagtctcttctgttgct

SEQ ID NO: 138765 - DNA, 33 bp, Homo sapien
gcatatgtgacgagctcaatcatcctcaccatc

SEQ ID NO: 138766 - DNA, 33 bp, Homo sapien
gcatatgtgacgagcttaatcatcctcaccatc

SEQ ID NO: 138767 - DNA, 33 bp, Homo sapien
acactgtaaaagccccagatgtttgggtctctg

SEQ ID NO: 138768 - DNA, 33 bp, Homo sapien
acactgtaaaagccccggatgtttgggtctctg

SEQ ID NO: 138769 - DNA, 33 bp, Homo sapien
aaaggaatgcaccaaaaccacgtggaaatgatg

SEQ ID NO: 138770 - DNA, 33 bp, Homo sapien
aaaggaatgcaccaaagccacgtggaaatgatg

SEQ ID NO: 138771 - DNA, 33 bp, Homo sapien
aaactaggtctgtcgaaaagataaaacgacacc

SEQ ID NO: 138772 - DNA, 33 bp, Homo sapien
aaactaggtctgtcgagaagataaaacgacacc

SEQ ID NO: 138773 - DNA, 33 bp, Homo sapien
agtctcagattcttcacccgcaaaatgggaatt

SEQ ID NO: 138774 - DNA, 33 bp, Homo sapien
agtctcagattcttcatccgcaaaatgggaatt

SEQ ID NO: 138775 - DNA, 33 bp, Homo sapien
acaaatgcatcatttcaacccacagtccattgg

SEQ ID NO: 138776 - DNA, 33 bp, Homo sapien
acaaatgcatcatttccacccacagtccattgg

SEQ ID NO: 138777 - DNA, 33 bp, Homo sapien
aacatttgattgcctgcatgagatactattctt

SEQ ID NO: 138778 - DNA, 33 bp, Homo sapien
aacatttgattgcctgtatgagatactattctt

SEQ ID NO: 138779 - DNA, 33 bp, Homo sapien
gagatactattcttccgctgtttcagcaaaaac

SEQ ID NO: 138780 - DNA, 33 bp, Homo sapien
gagatactattcttcctctgtttcagcaaaaac

SEQ ID NO: 138781 - DNA, 33 bp, Homo sapien
aagatcctgacaggggcacttgcagatgagtaa

SEQ ID NO: 138782 - DNA, 33 bp, Homo sapien
aagatcctgacagggggacttgcagatgagtaa

SEQ ID NO: 138783 - DNA, 33 bp, Homo sapien
cattcatttttttacacaatgtcattgagaact

SEQ ID NO: 138784 - DNA, 33 bp, Homo sapien
cattcatttttttacataatgtcattgagaact

SEQ ID NO: 138785 - DNA, 33 bp, Homo sapien
actgagagactgtgtacaaaaaaatccatccat

SEQ ID NO: 138786 - DNA, 33 bp, Homo sapien
actgagagactgtgtataaaaaaatccatccat

SEQ ID NO: 138787 - DNA, 33 bp, Homo sapien
agcaagcagaggtacaaatccaagggcaagtcc

SEQ ID NO: 138788 - DNA, 33 bp, Homo sapien
agcaagcagaggtacagatccaagggcaagtcc

SEQ ID NO: 138789 - DNA, 33 bp, Homo sapien
tttcccttgcttttaaaacaccttgtaatcatc

SEQ ID NO: 138790 - DNA, 33 bp, Homo sapien
tttcccttgcttttaagacaccttgtaatcatc

SEQ ID NO: 138791 - DNA, 33 bp, Homo sapien
ttgaatttctggcctccagaaccatgagagaat

SEQ ID NO: 138792 - DNA, 33 bp, Homo sapien
ttgaatttctggcctcgagaaccatgagagaat

SEQ ID NO: 138793 - DNA, 33 bp, Homo sapien
acacaagatgaccagaacttgccagtcctccct

SEQ ID NO: 138794 - DNA, 33 bp, Homo sapien
acacaagatgaccagaccttgccagtcctccct

SEQ ID NO: 138795 - DNA, 33 bp, Homo sapien
gcacatgctcaaatgcaaacctctttcactgac

SEQ ID NO: 138796 - DNA, 33 bp, Homo sapien
gcacatgctcaaatgcgaacctctttcactgac

SEQ ID NO: 138797 - DNA, 33 bp, Homo sapien
gtctaattccctctcacgtatccgtcctgggag

SEQ ID NO: 138798 - DNA, 33 bp, Homo sapien
gtctaattccctctcatgtatccgtcctgggag

SEQ ID NO: 138799 - DNA, 33 bp, Homo sapien
tgtccatggtcaaaataaagtgatcaccacgtt

SEQ ID NO: 138800 - DNA, 33 bp, Homo sapien
tgtccatggtcaaaatcaagtgatcaccacgtt

SEQ ID NO: 138801 - DNA, 33 bp, Homo sapien
ggtcaacagtccagaaatagcgcctcacctcca

SEQ ID NO: 138802 - DNA, 33 bp, Homo sapien
ggtcaacagtccagaactagcgcctcacctcca

SEQ ID NO: 138803 - DNA, 33 bp, Homo sapien
tcaagggtgcatgagaaccagacaagggtttgg

SEQ ID NO: 138804 - DNA, 33 bp, Homo sapien
tcaagggtgcatgagagccagacaagggtttgg

SEQ ID NO: 138805 - DNA, 33 bp, Homo sapien
gcaattggagaaaaaaatctcagagcaaaatcc

SEQ ID NO: 138806 - DNA, 33 bp, Homo sapien
gcaattggagaaaaaagtctcagagcaaaatcc

SEQ ID NO: 138807 - DNA, 33 bp, Homo sapien
ctttaaaggacgttaaaatgtttgcctgcaatg

SEQ ID NO: 138808 - DNA, 33 bp, Homo sapien
ctttaaaggacgttaagatgtttgcctgcaatg

SEQ ID NO: 138809 - DNA, 33 bp, Homo sapien
ctttaaaagtgataaaggatttggaatctaccc

SEQ ID NO: 138810 - DNA, 33 bp, Homo sapien
ctttaaaagtgataaatgatttggaatctaccc

SEQ ID NO: 138811 - DNA, 33 bp, Homo sapien
gagcgaatgttggccgcattaacctgttatcaa

SEQ ID NO: 138812 - DNA, 33 bp, Homo sapien
gagcgaatgttggccggattaacctgttatcaa

SEQ ID NO: 138813 - DNA, 33 bp, Homo sapien
gaggttgtggggaggaatcactcaagatatatg

SEQ ID NO: 138814 - DNA, 33 bp, Homo sapien
gaggttgtggggaggagtcactcaagatatatg

SEQ ID NO: 138815 - DNA, 33 bp, Homo sapien
gtaactggattgggagcagtcaattatgcaata

SEQ ID NO: 138816 - DNA, 33 bp, Homo sapien
gtaactggattgggaggagtcaattatgcaata

SEQ ID NO: 138817 - DNA, 33 bp, Homo sapien
tgaatggtgtttgccaaagaataagcaggcaat

SEQ ID NO: 138818 - DNA, 33 bp, Homo sapien
tgaatggtgtttgccacagaataagcaggcaat

SEQ ID NO: 138819 - DNA, 33 bp, Homo sapien
tccttccagcatcaaaatgcagcaattccatgc

SEQ ID NO: 138820 - DNA, 33 bp, Homo sapien
tccttccagcatcaaagtgcagcaattccatgc

SEQ ID NO: 138821 - DNA, 33 bp, Homo sapien
cacctcacatggctgacaatggtcccttgtgac

SEQ ID NO: 138822 - DNA, 33 bp, Homo sapien
cacctcacatggctgataatggtcccttgtgac

SEQ ID NO: 138823 - DNA, 33 bp, Homo sapien
gagctgtttaacactcaaaagcgtagcgtctaa

SEQ ID NO: 138824 - DNA, 33 bp, Homo sapien
gagctgtttaacactcgaaagcgtagcgtctaa

SEQ ID NO: 138825 - DNA, 33 bp, Homo sapien
tcaggccaggatctccagaattcatgagattcc

SEQ ID NO: 138826 - DNA, 33 bp, Homo sapien
tcaggccaggatctcccgaattcatgagattcc

SEQ ID NO: 138827 - DNA, 33 bp, Homo sapien
ttctctgcggcatctcaatatatttgacatttc

SEQ ID NO: 138828 - DNA, 33 bp, Homo sapien
ttctctgcggcatctcgatatatttgacatttc

SEQ ID NO: 138829 - DNA, 33 bp, Homo sapien
agtttctaggtgtccacaggacctttggaagat

SEQ ID NO: 138830 - DNA, 33 bp, Homo sapien
agtttctaggtgtccataggacctttggaagat

SEQ ID NO: 138831 - DNA, 33 bp, Homo sapien
tgcagacaagggtccccaaccacacagctcact

SEQ ID NO: 138832 - DNA, 33 bp, Homo sapien
tgcagacaagggtccctaaccacacagctcact

SEQ ID NO: 138833 - DNA, 33 bp, Homo sapien
agtcccctactccaaccagatgggtggtacaga

SEQ ID NO: 138834 - DNA, 33 bp, Homo sapien
agtcccctactccaactagatgggtggtacaga

SEQ ID NO: 138835 - DNA, 33 bp, Homo sapien
ttgatcaagaacacacagccgagaacaatgaag

SEQ ID NO: 138836 - DNA, 33 bp, Homo sapien
ttgatcaagaacacaccgccgagaacaatgaag

SEQ ID NO: 138837 - DNA, 33 bp, Homo sapien
gctctagttacacagacagatattcattcaaac

SEQ ID NO: 138838 - DNA, 33 bp, Homo sapien
gctctagttacacagatagatattcattcaaac

SEQ ID NO: 138839 - DNA, 33 bp, Homo sapien
aattccattccactgacgacaaaatggaggcca

SEQ ID NO: 138840 - DNA, 33 bp, Homo sapien
aattccattccactgatgacaaaatggaggcca

SEQ ID NO: 138841 - DNA, 33 bp, Homo sapien
atggacgatgtcccaaactcccaagctccgagc

SEQ ID NO: 138842 - DNA, 33 bp, Homo sapien
atggacgatgtcccaacctcccaagctccgagc

SEQ ID NO: 138843 - DNA, 33 bp, Homo sapien
tgatgggtgagaagaaaaaaaccacaaatgctt

SEQ ID NO: 138844 - DNA, 33 bp, Homo sapien
tgatgggtgagaagaagaaaaccacaaatgctt

SEQ ID NO: 138845 - DNA, 33 bp, Homo sapien
catgaatgcgcttagaacccttacattagatac

SEQ ID NO: 138846 - DNA, 33 bp, Homo sapien
catgaatgcgcttagagcccttacattagatac

SEQ ID NO: 138847 - DNA, 33 bp, Homo sapien
tcacttggtttcttgcaaaaggtaggtaagtag

SEQ ID NO: 138848 - DNA, 33 bp, Homo sapien
tcacttggtttcttgcgaaaggtaggtaagtag

SEQ ID NO: 138849 - DNA, 33 bp, Homo sapien
cagaagggggaatccactctctttctggccacc

SEQ ID NO: 138850 - DNA, 33 bp, Homo sapien
cagaagggggaatccattctctttctggccacc

SEQ ID NO: 138851 - DNA, 33 bp, Homo sapien
atcacagatatccacagggtatgtctcgcctca

SEQ ID NO: 138852 - DNA, 33 bp, Homo sapien
atcacagatatccacatggtatgtctcgcctca

SEQ ID NO: 138853 - DNA, 33 bp, Homo sapien
agaacctgaaaccagggaaagtgcttcctagaa

SEQ ID NO: 138854 - DNA, 33 bp, Homo sapien
agaacctgaaaccaggtaaagtgcttcctagaa

SEQ ID NO: 138855 - DNA, 33 bp, Homo sapien
ttcaggttctctatcccacactcagctctgcac

SEQ ID NO: 138856 - DNA, 33 bp, Homo sapien
ttcaggttctctatccgacactcagctctgcac

SEQ ID NO: 138857 - DNA, 33 bp, Homo sapien
ttttatcagaattgacaattttaagggcatatt

SEQ ID NO: 138858 - DNA, 33 bp, Homo sapien
ttttatcagaattgaccattttaagggcatatt

SEQ ID NO: 138859 - DNA, 33 bp, Homo sapien
gtaataaatgctgcaaaggaaacagacaaagtg

SEQ ID NO: 138860 - DNA, 33 bp, Homo sapien
gtaataaatgctgcaagggaaacagacaaagtg

SEQ ID NO: 138861 - DNA, 33 bp, Homo sapien
tgaattagtctggccgaaccatgtatcgaagca

SEQ ID NO: 138862 - DNA, 33 bp, Homo sapien
tgaattagtctggccggaccatgtatcgaagca

SEQ ID NO: 138863 - DNA, 33 bp, Homo sapien
tctcctcaaccttaacccactgaactccttaca

SEQ ID NO: 138864 - DNA, 33 bp, Homo sapien
tctcctcaaccttaactcactgaactccttaca

SEQ ID NO: 138865 - DNA, 33 bp, Homo sapien
tccaaactcttcgtaacagcattttaagtgcta

SEQ ID NO: 138866 - DNA, 33 bp, Homo sapien
tccaaactcttcgtaatagcattttaagtgcta

SEQ ID NO: 138867 - DNA, 33 bp, Homo sapien
caatcttccctgtttacgggtggtgtaaagatg

SEQ ID NO: 138868 - DNA, 33 bp, Homo sapien
caatcttccctgtttaggggtggtgtaaagatg

SEQ ID NO: 138869 - DNA, 33 bp, Homo sapien
cttccattatgctccacgacactaaaagaggtt

SEQ ID NO: 138870 - DNA, 33 bp, Homo sapien
cttccattatgctccatgacactaaaagaggtt

SEQ ID NO: 138871 - DNA, 33 bp, Homo sapien
ccacactttgagtagaaaggcccggatgactca

SEQ ID NO: 138872 - DNA, 33 bp, Homo sapien
ccacactttgagtagagaggcccggatgactca

SEQ ID NO: 138873 - DNA, 33 bp, Homo sapien
tttttacccagtgaccaagcctcgtagagtggg

SEQ ID NO: 138874 - DNA, 33 bp, Homo sapien
tttttacccagtgaccgagcctcgtagagtggg

SEQ ID NO: 138875 - DNA, 33 bp, Homo sapien
ttcttctgtggcttacaaagagattgagaggct

SEQ ID NO: 138876 - DNA, 33 bp, Homo sapien
ttcttctgtggcttacgaagagattgagaggct

SEQ ID NO: 138877 - DNA, 33 bp, Homo sapien
tcttcatgcgaggagaactcagcaacacataca

SEQ ID NO: 138878 - DNA, 33 bp, Homo sapien
tcttcatgcgaggagacctcagcaacacataca

SEQ ID NO: 138879 - DNA, 33 bp, Homo sapien
tttgtgatagtctgaacgtgttttgtcaataac

SEQ ID NO: 138880 - DNA, 33 bp, Homo sapien
tttgtgatagtctgaatgtgttttgtcaataac

SEQ ID NO: 138881 - DNA, 33 bp, Homo sapien
gcttgaatttgtggacggagatttttacctgct

SEQ ID NO: 138882 - DNA, 33 bp, Homo sapien
gcttgaatttgtggactgagatttttacctgct

SEQ ID NO: 138883 - DNA, 33 bp, Homo sapien
tggttacaaaataggcactaagctctcagtaca

SEQ ID NO: 138884 - DNA, 33 bp, Homo sapien
tggttacaaaataggcgctaagctctcagtaca

SEQ ID NO: 138885 - DNA, 33 bp, Homo sapien
ccctcagaagtgaatgaaaaagcaagccttcaa

SEQ ID NO: 138886 - DNA, 33 bp, Homo sapien
ccctcagaagtgaatggaaaagcaagccttcaa

SEQ ID NO: 138887 - DNA, 33 bp, Homo sapien
tcctcccttcctacgacactgcctctggaggcc

SEQ ID NO: 138888 - DNA, 33 bp, Homo sapien
tcctcccttcctacgatactgcctctggaggcc

SEQ ID NO: 138889 - DNA, 33 bp, Homo sapien
cctgcttctgaggaagccacagccaaatagtgt

SEQ ID NO: 138890 - DNA, 33 bp, Homo sapien
cctgcttctgaggaagtcacagccaaatagtgt

SEQ ID NO: 138891 - DNA, 33 bp, Homo sapien
aatatgaagacaaagcaattttgacattagtaa

SEQ ID NO: 138892 - DNA, 33 bp, Homo sapien
aatatgaagacaaagcgattttgacattagtaa

SEQ ID NO: 138893 - DNA, 33 bp, Homo sapien
ttcttaaactttcccacgtgctcctatatgagg

SEQ ID NO: 138894 - DNA, 33 bp, Homo sapien
ttcttaaactttcccatgtgctcctatatgagg

SEQ ID NO: 138895 - DNA, 33 bp, Homo sapien
ctcagtagtaacagtccaatacgtcagtgaatc

SEQ ID NO: 138896 - DNA, 33 bp, Homo sapien
ctcagtagtaacagtcgaatacgtcagtgaatc

SEQ ID NO: 138897 - DNA, 33 bp, Homo sapien
ttcttatattcaaaaacgatcagtcctaagcaa

SEQ ID NO: 138898 - DNA, 33 bp, Homo sapien
ttcttatattcaaaaatgatcagtcctaagcaa

SEQ ID NO: 138899 - DNA, 33 bp, Homo sapien
taaagatggaacatggaatacctaacaggactt

SEQ ID NO: 138900 - DNA, 33 bp, Homo sapien
taaagatggaacatgggatacctaacaggactt

SEQ ID NO: 138901 - DNA, 33 bp, Homo sapien
agcagagctgtgttcccccgtacaagagcttat

SEQ ID NO: 138902 - DNA, 33 bp, Homo sapien
agcagagctgtgttccgccgtacaagagcttat

SEQ ID NO: 138903 - DNA, 33 bp, Homo sapien
aacatgaactatttgaaacttgaggagaatggg

SEQ ID NO: 138904 - DNA, 33 bp, Homo sapien
aacatgaactatttgagacttgaggagaatggg

SEQ ID NO: 138905 - DNA, 33 bp, Homo sapien
tgtgggccaaacaaaacgccacttcagttgagt

SEQ ID NO: 138906 - DNA, 33 bp, Homo sapien
tgtgggccaaacaaaatgccacttcagttgagt

SEQ ID NO: 138907 - DNA, 33 bp, Homo sapien
ctataccacatgatccgccattcaaaaaggaaa

SEQ ID NO: 138908 - DNA, 33 bp, Homo sapien
ctataccacatgatcctccattcaaaaaggaaa

SEQ ID NO: 138909 - DNA, 33 bp, Homo sapien
atggcgaaaattcaaacgcaaaacgtttggggg

SEQ ID NO: 138910 - DNA, 33 bp, Homo sapien
atggcgaaaattcaaatgcaaaacgtttggggg

SEQ ID NO: 138911 - DNA, 33 bp, Homo sapien
ctctccaccagcctgacgggtggcttagttttc

SEQ ID NO: 138912 - DNA, 33 bp, Homo sapien
ctctccaccagcctgatgggtggcttagttttc

SEQ ID NO: 138913 - DNA, 33 bp, Homo sapien
tggttgaagccatccaatatgcggtatgttgtt

SEQ ID NO: 138914 - DNA, 33 bp, Homo sapien
tggttgaagccatccagtatgcggtatgttgtt

SEQ ID NO: 138915 - DNA, 33 bp, Homo sapien
acaaaaatgcaaggaacgaatccagaggatggt

SEQ ID NO: 138916 - DNA, 33 bp, Homo sapien
acaaaaatgcaaggaatgaatccagaggatggt

SEQ ID NO: 138917 - DNA, 33 bp, Homo sapien
aaatattgaaggaaagaatctcacaggggaagc

SEQ ID NO: 138918 - DNA, 33 bp, Homo sapien
aaatattgaaggaaagcatctcacaggggaagc

SEQ ID NO: 138919 - DNA, 33 bp, Homo sapien
atttaccagagcaattaaagctgcaagtcaagg

SEQ ID NO: 138920 - DNA, 33 bp, Homo sapien
atttaccagagcaattgaagctgcaagtcaagg

SEQ ID NO: 138921 - DNA, 33 bp, Homo sapien
agagtatcaggcttccaatcatagcaatgccac

SEQ ID NO: 138922 - DNA, 33 bp, Homo sapien
agagtatcaggcttcccatcatagcaatgccac

SEQ ID NO: 138923 - DNA, 33 bp, Homo sapien
cttgggaccatattacaaaggctgtgaaatcca

SEQ ID NO: 138924 - DNA, 33 bp, Homo sapien
cttgggaccatattacgaaggctgtgaaatcca

SEQ ID NO: 138925 - DNA, 33 bp, Homo sapien
gcaatgtcaatcaagactccggactaatcctat

SEQ ID NO: 138926 - DNA, 33 bp, Homo sapien
gcaatgtcaatcaagagtccggactaatcctat

SEQ ID NO: 138927 - DNA, 33 bp, Homo sapien
tgagcccagaataaaacctcagtgcagcatgca

SEQ ID NO: 138928 - DNA, 33 bp, Homo sapien
tgagcccagaataaaatctcagtgcagcatgca

SEQ ID NO: 138929 - DNA, 33 bp, Homo sapien
gttaacatcatgcgcacgtctcccaaagcaagg

SEQ ID NO: 138930 - DNA, 33 bp, Homo sapien
gttaacatcatgcgcaggtctcccaaagcaagg

SEQ ID NO: 138931 - DNA, 33 bp, Homo sapien
ctggtgtgtctgataacccaaagcagcgggcag

SEQ ID NO: 138932 - DNA, 33 bp, Homo sapien
ctggtgtgtctgataatccaaagcagcgggcag

SEQ ID NO: 138933 - DNA, 33 bp, Homo sapien
actctgttttagtaaacggcaataaagctcttt

SEQ ID NO: 138934 - DNA, 33 bp, Homo sapien
actctgttttagtaaatggcaataaagctcttt

SEQ ID NO: 138935 - DNA, 33 bp, Homo sapien
ggaggaagaggcaaaacggaggattgtgttaag

SEQ ID NO: 138936 - DNA, 33 bp, Homo sapien
ggaggaagaggcaaaatggaggattgtgttaag

SEQ ID NO: 138937 - DNA, 33 bp, Homo sapien
aggggtcttggcagcacgaattcacggcttata

SEQ ID NO: 138938 - DNA, 33 bp, Homo sapien
aggggtcttggcagcaggaattcacggcttata

SEQ ID NO: 138939 - DNA, 33 bp, Homo sapien
atattcatttaaactcagaaggtggtggatggg

SEQ ID NO: 138940 - DNA, 33 bp, Homo sapien
atattcatttaaactcggaaggtggtggatggg

SEQ ID NO: 138941 - DNA, 33 bp, Homo sapien
tgaaaccacgcttttgaagaactgactgcttac

SEQ ID NO: 138942 - DNA, 33 bp, Homo sapien
tgaaaccacgcttttgtagaactgactgcttac

SEQ ID NO: 138943 - DNA, 33 bp, Homo sapien
atccacctagtctcacaccttctccaaatgact

SEQ ID NO: 138944 - DNA, 33 bp, Homo sapien
atccacctagtctcactccttctccaaatgact

SEQ ID NO: 138945 - DNA, 33 bp, Homo sapien
gcttcagagttgaccaaaattgtgtcctagtgc

SEQ ID NO: 138946 - DNA, 33 bp, Homo sapien
gcttcagagttgaccataattgtgtcctagtgc

SEQ ID NO: 138947 - DNA, 33 bp, Homo sapien
gtgaaagataaaattgcaaagaaactttgagtc

SEQ ID NO: 138948 - DNA, 33 bp, Homo sapien
gtgaaagataaaattggaaagaaactttgagtc

SEQ ID NO: 138949 - DNA, 33 bp, Homo sapien
gccaagtttaaaatgaaagtggaaagatcacag

SEQ ID NO: 138950 - DNA, 33 bp, Homo sapien
gccaagtttaaaatgagagtggaaagatcacag

SEQ ID NO: 138951 - DNA, 33 bp, Homo sapien
agataattagattgcccacttctcaggtttgtg

SEQ ID NO: 138952 - DNA, 33 bp, Homo sapien
agataattagattgccgacttctcaggtttgtg

SEQ ID NO: 138953 - DNA, 33 bp, Homo sapien
agggacacagacattcactctgtccattgcact

SEQ ID NO: 138954 - DNA, 33 bp, Homo sapien
agggacacagacattcgctctgtccattgcact

SEQ ID NO: 138955 - DNA, 33 bp, Homo sapien
ctgtgtgacccaataacagaaatgcctggacac

SEQ ID NO: 138956 - DNA, 33 bp, Homo sapien
ctgtgtgacccaataagagaaatgcctggacac

SEQ ID NO: 138957 - DNA, 33 bp, Homo sapien
gtgacaccctcaaatcacccatgtggcttcgct

SEQ ID NO: 138958 - DNA, 33 bp, Homo sapien
gtgacaccctcaaatcgcccatgtggcttcgct

SEQ ID NO: 138959 - DNA, 33 bp, Homo sapien
agggaggtctgtagtaactgctatttcttttta

SEQ ID NO: 138960 - DNA, 33 bp, Homo sapien
agggaggtctgtagtagctgctatttcttttta

SEQ ID NO: 138961 - DNA, 33 bp, Homo sapien
gcctgaggattgagcaaactgtgtctttggtac

SEQ ID NO: 138962 - DNA, 33 bp, Homo sapien
gcctgaggattgagcagactgtgtctttggtac

SEQ ID NO: 138963 - DNA, 33 bp, Homo sapien
gatgagactggcatcaaagtagaaaaaacgcac

SEQ ID NO: 138964 - DNA, 33 bp, Homo sapien
gatgagactggcatcagagtagaaaaaacgcac

SEQ ID NO: 138965 - DNA, 33 bp, Homo sapien
aagtgcgtgctttataagtttacatttttacag

SEQ ID NO: 138966 - DNA, 33 bp, Homo sapien
aagtgcgtgctttatacgtttacatttttacag

SEQ ID NO: 138967 - DNA, 33 bp, Homo sapien
gttaaccttcatgcgacgttatgaaaagcaaga

SEQ ID NO: 138968 - DNA, 33 bp, Homo sapien
gttaaccttcatgcgatgttatgaaaagcaaga

SEQ ID NO: 138969 - DNA, 33 bp, Homo sapien
agtttgctgttttatacagagtggtcgctctgc

SEQ ID NO: 138970 - DNA, 33 bp, Homo sapien
agtttgctgttttatatagagtggtcgctctgc

SEQ ID NO: 138971 - DNA, 33 bp, Homo sapien
atcaggaacagtacaaagaaaagagcttgccaa

SEQ ID NO: 138972 - DNA, 33 bp, Homo sapien
atcaggaacagtacaaggaaaagagcttgccaa

SEQ ID NO: 138973 - DNA, 33 bp, Homo sapien
ctctccctccttgccaactaaagtcctggtctc

SEQ ID NO: 138974 - DNA, 33 bp, Homo sapien
ctctccctccttgccatctaaagtcctggtctc

SEQ ID NO: 138975 - DNA, 33 bp, Homo sapien
gaggagagtgaagcaaatatgcattaaaatagg

SEQ ID NO: 138976 - DNA, 33 bp, Homo sapien
gaggagagtgaagcaactatgcattaaaatagg

SEQ ID NO: 138977 - DNA, 33 bp, Homo sapien
agtagaccgaggactaagtggaaaggggaaaaa

SEQ ID NO: 138978 - DNA, 33 bp, Homo sapien
agtagaccgaggactaggtggaaaggggaaaaa

SEQ ID NO: 138979 - DNA, 33 bp, Homo sapien
ttcctctcgtatattcaacattttctcaaatgg

SEQ ID NO: 138980 - DNA, 33 bp, Homo sapien
ttcctctcgtatattcgacattttctcaaatgg

SEQ ID NO: 138981 - DNA, 33 bp, Homo sapien
gggtcaacaggcataacttaagaaaaagtatga

SEQ ID NO: 138982 - DNA, 33 bp, Homo sapien
gggtcaacaggcataatttaagaaaaagtatga

SEQ ID NO: 138983 - DNA, 33 bp, Homo sapien
actgcaagaagcacaactgaattcatatctggt

SEQ ID NO: 138984 - DNA, 33 bp, Homo sapien
actgcaagaagcacaagtgaattcatatctggt

SEQ ID NO: 138985 - DNA, 33 bp, Homo sapien
aagtcagtggaaaacgaactcttcatcctatga

SEQ ID NO: 138986 - DNA, 33 bp, Homo sapien
aagtcagtggaaaacggactcttcatcctatga

SEQ ID NO: 138987 - DNA, 33 bp, Homo sapien
ttaatcactccttagcacctagaaggccataga

SEQ ID NO: 138988 - DNA, 33 bp, Homo sapien
ttaatcactccttagcgcctagaaggccataga

SEQ ID NO: 138989 - DNA, 33 bp, Homo sapien
agatttcttttggaacacaggtaagcaaaacca

SEQ ID NO: 138990 - DNA, 33 bp, Homo sapien
agatttcttttggaacgcaggtaagcaaaacca

SEQ ID NO: 138991 - DNA, 33 bp, Homo sapien
aggttgtgagaagtccaaaacagtgtgaaatta

SEQ ID NO: 138992 - DNA, 33 bp, Homo sapien
aggttgtgagaagtcctaaacagtgtgaaatta

SEQ ID NO: 138993 - DNA, 33 bp, Homo sapien
tttgtaaattgaaggaagctcccagttttccat

SEQ ID NO: 138994 - DNA, 33 bp, Homo sapien
tttgtaaattgaaggaggctcccagttttccat

SEQ ID NO: 138995 - DNA, 33 bp, Homo sapien
actttggatctctttccctctgcttagtaaacc

SEQ ID NO: 138996 - DNA, 33 bp, Homo sapien
actttggatctctttctctctgcttagtaaacc

SEQ ID NO: 138997 - DNA, 33 bp, Homo sapien
gtgcgtgtgtgttgggaaaattcacaaagaact

SEQ ID NO: 138998 - DNA, 33 bp, Homo sapien
gtgcgtgtgtgttggggaaattcacaaagaact

SEQ ID NO: 138999 - DNA, 33 bp, Homo sapien
tggctttaactggtaaccacataaatttcctaa

SEQ ID NO: 139000 - DNA, 33 bp, Homo sapien
tggctttaactggtaatcacataaatttcctaa

SEQ ID NO: 139001 - DNA, 33 bp, Homo sapien
agttcgatctctaagaggcaacatgatagctca

SEQ ID NO: 139002 - DNA, 33 bp, Homo sapien
agttcgatctctaagatgcaacatgatagctca

SEQ ID NO: 139003 - DNA, 33 bp, Homo sapien
ttgaatttctaatataaactgcctggggcccac

SEQ ID NO: 139004 - DNA, 33 bp, Homo sapien
ttgaatttctaatatagactgcctggggcccac

SEQ ID NO: 139005 - DNA, 33 bp, Homo sapien
gcttcaaatgaaaaaacgctgaaagtttggaga

SEQ ID NO: 139006 - DNA, 33 bp, Homo sapien
gcttcaaatgaaaaaatgctgaaagtttggaga

SEQ ID NO: 139007 - DNA, 33 bp, Homo sapien
ccattatttatggaagccttcacttactttcca

SEQ ID NO: 139008 - DNA, 33 bp, Homo sapien
ccattatttatggaaggcttcacttactttcca

SEQ ID NO: 139009 - DNA, 33 bp, Homo sapien
caaggcaaaagggagcacaaaatcaaagctgtg

SEQ ID NO: 139010 - DNA, 33 bp, Homo sapien
caaggcaaaagggagcgcaaaatcaaagctgtg

SEQ ID NO: 139011 - DNA, 33 bp, Homo sapien
attgaatggcccattaaatcatggtggtgtagc

SEQ ID NO: 139012 - DNA, 33 bp, Homo sapien
attgaatggcccattagatcatggtggtgtagc

SEQ ID NO: 139013 - DNA, 33 bp, Homo sapien
tgcctgacagctcagcagcatttgttcctgttg

SEQ ID NO: 139014 - DNA, 33 bp, Homo sapien
tgcctgacagctcagcggcatttgttcctgttg

SEQ ID NO: 139015 - DNA, 33 bp, Homo sapien
atggcataataagcaccgcctttgcctcactga

SEQ ID NO: 139016 - DNA, 33 bp, Homo sapien
atggcataataagcactgcctttgcctcactga

SEQ ID NO: 139017 - DNA, 33 bp, Homo sapien
gggattcttttcggcccattttatttgtttgta

SEQ ID NO: 139018 - DNA, 33 bp, Homo sapien
gggattcttttcggcctattttatttgtttgta

SEQ ID NO: 139019 - DNA, 33 bp, Homo sapien
ttgaactgcagaaaaaatctacagtataaactg

SEQ ID NO: 139020 - DNA, 33 bp, Homo sapien
ttgaactgcagaaaaattctacagtataaactg

SEQ ID NO: 139021 - DNA, 33 bp, Homo sapien
ataagctgtgacttcccaagtaagagagggcct

SEQ ID NO: 139022 - DNA, 33 bp, Homo sapien
ataagctgtgacttcctaagtaagagagggcct

SEQ ID NO: 139023 - DNA, 33 bp, Homo sapien
gctacagactgcattacacttcttcaagctcag

SEQ ID NO: 139024 - DNA, 33 bp, Homo sapien
gctacagactgcattatacttcttcaagctcag

SEQ ID NO: 139025 - DNA, 33 bp, Homo sapien
tattttctatgttccccaagcacccccttctgg

SEQ ID NO: 139026 - DNA, 33 bp, Homo sapien
tattttctatgttccctaagcacccccttctgg

SEQ ID NO: 139027 - DNA, 33 bp, Homo sapien
gtatttatttgtctgggagtattcatacctaat

SEQ ID NO: 139028 - DNA, 33 bp, Homo sapien
gtatttatttgtctggtagtattcatacctaat

SEQ ID NO: 139029 - DNA, 33 bp, Homo sapien
ttggtcagagtatcaacgtatttatttgtctgg

SEQ ID NO: 139030 - DNA, 33 bp, Homo sapien
ttggtcagagtatcaatgtatttatttgtctgg

SEQ ID NO: 139031 - DNA, 33 bp, Homo sapien
aactatggggctagaacgcaattttcctcaatc

SEQ ID NO: 139032 - DNA, 33 bp, Homo sapien
aactatggggctagaatgcaattttcctcaatc

SEQ ID NO: 139033 - DNA, 33 bp, Homo sapien
ctatcagagttaacacaagctgtgctgttaaaa

SEQ ID NO: 139034 - DNA, 33 bp, Homo sapien
ctatcagagttaacacgagctgtgctgttaaaa

SEQ ID NO: 139035 - DNA, 33 bp, Homo sapien
acttaaattcactctccgaccacctaaactcca

SEQ ID NO: 139036 - DNA, 33 bp, Homo sapien
acttaaattcactctctgaccacctaaactcca

SEQ ID NO: 139037 - DNA, 33 bp, Homo sapien
gactatgtccggtgtgaaataagactgctgtgg

SEQ ID NO: 139038 - DNA, 33 bp, Homo sapien
gactatgtccggtgtggaataagactgctgtgg

SEQ ID NO: 139039 - DNA, 33 bp, Homo sapien
agagactggaaacatacaggtccataggatccg

SEQ ID NO: 139040 - DNA, 33 bp, Homo sapien
agagactggaaacatagaggtccataggatccg

SEQ ID NO: 139041 - DNA, 33 bp, Homo sapien
tcacagctggagctgagacttggaagaaaattc

SEQ ID NO: 139042 - DNA, 33 bp, Homo sapien
tcacagctggagctgatacttggaagaaaattc

SEQ ID NO: 139043 - DNA, 33 bp, Homo sapien
gatcttttacggccacacatggtaaatggtcat

SEQ ID NO: 139044 - DNA, 33 bp, Homo sapien
gatcttttacggccacgcatggtaaatggtcat

SEQ ID NO: 139045 - DNA, 33 bp, Homo sapien
cccagactgacttgtaagagggttccaatattt

SEQ ID NO: 139046 - DNA, 33 bp, Homo sapien
cccagactgacttgtaggagggttccaatattt

SEQ ID NO: 139047 - DNA, 33 bp, Homo sapien
tataacatcgctaaagccaacttgagttgtatt

SEQ ID NO: 139048 - DNA, 33 bp, Homo sapien
tataacatcgctaaagtcaacttgagttgtatt

SEQ ID NO: 139049 - DNA, 33 bp, Homo sapien
cccaagagactgaaacaatagagttttagagaa

SEQ ID NO: 139050 - DNA, 33 bp, Homo sapien
cccaagagactgaaacgatagagttttagagaa

SEQ ID NO: 139051 - DNA, 33 bp, Homo sapien
agtctttgtgtctctagatagctctgccgattc

SEQ ID NO: 139052 - DNA, 33 bp, Homo sapien
agtctttgtgtctctatatagctctgccgattc

SEQ ID NO: 139053 - DNA, 33 bp, Homo sapien
gacaaattatcttccacagcccatggagaatcg

SEQ ID NO: 139054 - DNA, 33 bp, Homo sapien
gacaaattatcttccagagcccatggagaatcg

SEQ ID NO: 139055 - DNA, 33 bp, Homo sapien
actgttttgagaaataccggtcaggcattttgt

SEQ ID NO: 139056 - DNA, 33 bp, Homo sapien
actgttttgagaaatagcggtcaggcattttgt

SEQ ID NO: 139057 - DNA, 33 bp, Homo sapien
tggtttcctctaggaaaaagccagaggcaacgc

SEQ ID NO: 139058 - DNA, 33 bp, Homo sapien
tggtttcctctaggaagaagccagaggcaacgc

SEQ ID NO: 139059 - DNA, 33 bp, Homo sapien
ttgcaaagcactaaataaatggagagatgcgcc

SEQ ID NO: 139060 - DNA, 33 bp, Homo sapien
ttgcaaagcactaaatgaatggagagatgcgcc

SEQ ID NO: 139061 - DNA, 33 bp, Homo sapien
tattgatgagaaatacaccattgagggatactt

SEQ ID NO: 139062 - DNA, 33 bp, Homo sapien
tattgatgagaaatacgccattgagggatactt

SEQ ID NO: 139063 - DNA, 33 bp, Homo sapien
cattcttggcttttgaacttgagaagtcagagg

SEQ ID NO: 139064 - DNA, 33 bp, Homo sapien
cattcttggcttttgatcttgagaagtcagagg

SEQ ID NO: 139065 - DNA, 33 bp, Homo sapien
ttctccacagtctcgaagggttcttgcctggaa

SEQ ID NO: 139066 - DNA, 33 bp, Homo sapien
ttctccacagtctcgacgggttcttgcctggaa

SEQ ID NO: 139067 - DNA, 33 bp, Homo sapien
aggagacatcttaggacggaaaagaaggatcaa

SEQ ID NO: 139068 - DNA, 33 bp, Homo sapien
aggagacatcttaggatggaaaagaaggatcaa

SEQ ID NO: 139069 - DNA, 33 bp, Homo sapien
agtcaggaacttgcaccgctgccgaggcaatgc

SEQ ID NO: 139070 - DNA, 33 bp, Homo sapien
agtcaggaacttgcactgctgccgaggcaatgc

SEQ ID NO: 139071 - DNA, 33 bp, Homo sapien
caagaaacagttgacaataagaagctgaagtct

SEQ ID NO: 139072 - DNA, 33 bp, Homo sapien
caagaaacagttgacagtaagaagctgaagtct

SEQ ID NO: 139073 - DNA, 33 bp, Homo sapien
accatgtggccatgtacgttggttcaggttgat

SEQ ID NO: 139074 - DNA, 33 bp, Homo sapien
accatgtggccatgtatgttggttcaggttgat

SEQ ID NO: 139075 - DNA, 33 bp, Homo sapien
aatattttagtccctgaattcctttctgatctt

SEQ ID NO: 139076 - DNA, 33 bp, Homo sapien
aatattttagtccctggattcctttctgatctt

SEQ ID NO: 139077 - DNA, 33 bp, Homo sapien
ctaaaatgaccatataaaatgcaaaacctcacc

SEQ ID NO: 139078 - DNA, 33 bp, Homo sapien
ctaaaatgaccatatagaatgcaaaacctcacc

SEQ ID NO: 139079 - DNA, 33 bp, Homo sapien
ataacatcattttgtaacccataaatctataca

SEQ ID NO: 139080 - DNA, 33 bp, Homo sapien
ataacatcattttgtaccccataaatctataca

SEQ ID NO: 139081 - DNA, 33 bp, Homo sapien
agcattttgccgaggaaggatgagtttgggttg

SEQ ID NO: 139082 - DNA, 33 bp, Homo sapien
agcattttgccgaggagggatgagtttgggttg

SEQ ID NO: 139083 - DNA, 33 bp, Homo sapien
ggcaggttgcagccaccctgattggttagtatc

SEQ ID NO: 139084 - DNA, 33 bp, Homo sapien
ggcaggttgcagccactctgattggttagtatc

SEQ ID NO: 139085 - DNA, 33 bp, Homo sapien
cagttcatcagggttaaggacacagcaatgatt

SEQ ID NO: 139086 - DNA, 33 bp, Homo sapien
cagttcatcagggttagggacacagcaatgatt

SEQ ID NO: 139087 - DNA, 33 bp, Homo sapien
aagctttgaaagtatacgtgtttgaatagaagg

SEQ ID NO: 139088 - DNA, 33 bp, Homo sapien
aagctttgaaagtatatgtgtttgaatagaagg

SEQ ID NO: 139089 - DNA, 33 bp, Homo sapien
gtgtccagtaaataaacggatgaacaataacgt

SEQ ID NO: 139090 - DNA, 33 bp, Homo sapien
gtgtccagtaaataaatggatgaacaataacgt

SEQ ID NO: 139091 - DNA, 33 bp, Homo sapien
ggaattttgtagccaaatgtccactaaggtaca

SEQ ID NO: 139092 - DNA, 33 bp, Homo sapien
ggaattttgtagccaattgtccactaaggtaca

SEQ ID NO: 139093 - DNA, 33 bp, Homo sapien
gggagtggtttccacactaaccaagttcagcat

SEQ ID NO: 139094 - DNA, 33 bp, Homo sapien
gggagtggtttccacattaaccaagttcagcat

SEQ ID NO: 139095 - DNA, 33 bp, Homo sapien
tcacaatggaaagtacactgcttatagcagttc

SEQ ID NO: 139096 - DNA, 33 bp, Homo sapien
tcacaatggaaagtacgctgcttatagcagttc

SEQ ID NO: 139097 - DNA, 33 bp, Homo sapien
aaaccactcggcaagaaattcctcctccttatt

SEQ ID NO: 139098 - DNA, 33 bp, Homo sapien
aaaccactcggcaagagattcctcctccttatt

SEQ ID NO: 139099 - DNA, 33 bp, Homo sapien
gctgaaaccaagaccaatcagaaaagacacaca

SEQ ID NO: 139100 - DNA, 33 bp, Homo sapien
gctgaaaccaagaccattcagaaaagacacaca

SEQ ID NO: 139101 - DNA, 33 bp, Homo sapien
ctgccttttctctcccaacatacagctgaaacc

SEQ ID NO: 139102 - DNA, 33 bp, Homo sapien
ctgccttttctctcccgacatacagctgaaacc

SEQ ID NO: 139103 - DNA, 33 bp, Homo sapien
agccatattcaggaatgaagattctagaaaccc

SEQ ID NO: 139104 - DNA, 33 bp, Homo sapien
agccatattcaggaattaagattctagaaaccc

SEQ ID NO: 139105 - DNA, 33 bp, Homo sapien
gcccactggccaaacacggaacaatttgagtac

SEQ ID NO: 139106 - DNA, 33 bp, Homo sapien
gcccactggccaaacatggaacaatttgagtac

SEQ ID NO: 139107 - DNA, 33 bp, Homo sapien
cctgctgggttacaccaagatggttacatgaaa

SEQ ID NO: 139108 - DNA, 33 bp, Homo sapien
cctgctgggttacaccgagatggttacatgaaa

SEQ ID NO: 139109 - DNA, 33 bp, Homo sapien
atgtcaggattttagtcaatttgattagtaaac

SEQ ID NO: 139110 - DNA, 33 bp, Homo sapien
atgtcaggattttagttaatttgattagtaaac

SEQ ID NO: 139111 - DNA, 33 bp, Homo sapien
aaaaaaaagctcaaagacctcgtaggatgtgaa

SEQ ID NO: 139112 - DNA, 33 bp, Homo sapien
aaaaaaaagctcaaagccctcgtaggatgtgaa

SEQ ID NO: 139113 - DNA, 33 bp, Homo sapien
ccagaaagtttcatagcacataaactgagctaa

SEQ ID NO: 139114 - DNA, 33 bp, Homo sapien
ccagaaagtttcataggacataaactgagctaa

SEQ ID NO: 139115 - DNA, 33 bp, Homo sapien
atgaaagctaaactcagcaattttatttggatg

SEQ ID NO: 139116 - DNA, 33 bp, Homo sapien
atgaaagctaaactcatcaattttatttggatg

SEQ ID NO: 139117 - DNA, 33 bp, Homo sapien
agcattcaggccacaaagtgatggctgacaggc

SEQ ID NO: 139118 - DNA, 33 bp, Homo sapien
agcattcaggccacaaggtgatggctgacaggc

SEQ ID NO: 139119 - DNA, 33 bp, Homo sapien
caagactgggtgaacccgaacaaatttaattct

SEQ ID NO: 139120 - DNA, 33 bp, Homo sapien
caagactgggtgaacctgaacaaatttaattct

SEQ ID NO: 139121 - DNA, 33 bp, Homo sapien
actctgaagttgtcccaaaaattcccttccttc

SEQ ID NO: 139122 - DNA, 33 bp, Homo sapien
actctgaagttgtcccgaaaattcccttccttc

SEQ ID NO: 139123 - DNA, 33 bp, Homo sapien
actattccaaaaaaccaaaaatgatgtgcaaac

SEQ ID NO: 139124 - DNA, 33 bp, Homo sapien
actattccaaaaaaccgaaaatgatgtgcaaac

SEQ ID NO: 139125 - DNA, 33 bp, Homo sapien
tttgcaaaagcacctcgagacagaaatcccaaa

SEQ ID NO: 139126 - DNA, 33 bp, Homo sapien
tttgcaaaagcacctctagacagaaatcccaaa

SEQ ID NO: 139127 - DNA, 33 bp, Homo sapien
taaaagcacctttgaccgagagttccaggaaat

SEQ ID NO: 139128 - DNA, 33 bp, Homo sapien
taaaagcacctttgactgagagttccaggaaat

SEQ ID NO: 139129 - DNA, 33 bp, Homo sapien
ctggtggatgactaagcagggtgatgacaacat

SEQ ID NO: 139130 - DNA, 33 bp, Homo sapien
ctggtggatgactaagtagggtgatgacaacat

SEQ ID NO: 139131 - DNA, 33 bp, Homo sapien
tgaaaaactacacacaacaaatggtcatttcta

SEQ ID NO: 139132 - DNA, 33 bp, Homo sapien
tgaaaaactacacacagcaaatggtcatttcta

SEQ ID NO: 139133 - DNA, 33 bp, Homo sapien
taagttccaaatatgactcacacactgtgtacc

SEQ ID NO: 139134 - DNA, 33 bp, Homo sapien
taagttccaaatatgagtcacacactgtgtacc

SEQ ID NO: 139135 - DNA, 33 bp, Homo sapien
tccctggaaaacaaaaagtgtaggcataaagta

SEQ ID NO: 139136 - DNA, 33 bp, Homo sapien
tccctggaaaacaaaatgtgtaggcataaagta

SEQ ID NO: 139137 - DNA, 33 bp, Homo sapien
ctacagactggatctaaactgatgcagggtgtc

SEQ ID NO: 139138 - DNA, 33 bp, Homo sapien
ctacagactggatctagactgatgcagggtgtc

SEQ ID NO: 139139 - DNA, 33 bp, Homo sapien
cctcataaaaggtcacggaaatgccaaagaatg

SEQ ID NO: 139140 - DNA, 33 bp, Homo sapien
cctcataaaaggtcactgaaatgccaaagaatg

SEQ ID NO: 139141 - DNA, 33 bp, Homo sapien
tgtaaattgagaaggaacttttgatagagaaga

SEQ ID NO: 139142 - DNA, 33 bp, Homo sapien
tgtaaattgagaaggatcttttgatagagaaga

SEQ ID NO: 139143 - DNA, 33 bp, Homo sapien
tctttcttgctttctcaccactgccctaaaggc

SEQ ID NO: 139144 - DNA, 33 bp, Homo sapien
tctttcttgctttctcgccactgccctaaaggc

SEQ ID NO: 139145 - DNA, 33 bp, Homo sapien
ttcaaatagccctacccagaactcatcaatttc

SEQ ID NO: 139146 - DNA, 33 bp, Homo sapien
ttcaaatagccctacctagaactcatcaatttc

SEQ ID NO: 139147 - DNA, 33 bp, Homo sapien
tgcccggccacagtcaaatatttttctttctgg

SEQ ID NO: 139148 - DNA, 33 bp, Homo sapien
tgcccggccacagtcagatatttttctttctgg

SEQ ID NO: 139149 - DNA, 33 bp, Homo sapien
ctgcccatcttgggaggagacgttcttgctgac

SEQ ID NO: 139150 - DNA, 33 bp, Homo sapien
ctgcccatcttgggagtagacgttcttgctgac

SEQ ID NO: 139151 - DNA, 33 bp, Homo sapien
tattggaataacctcaagtccatatgctcagca

SEQ ID NO: 139152 - DNA, 33 bp, Homo sapien
tattggaataacctcaggtccatatgctcagca

SEQ ID NO: 139153 - DNA, 33 bp, Homo sapien
gtctaattgtacaccacgacaggttccatttcc

SEQ ID NO: 139154 - DNA, 33 bp, Homo sapien
gtctaattgtacaccatgacaggttccatttcc

SEQ ID NO: 139155 - DNA, 33 bp, Homo sapien
acagttggcatagagacccagataggcaccagg

SEQ ID NO: 139156 - DNA, 33 bp, Homo sapien
acagttggcatagagagccagataggcaccagg

SEQ ID NO: 139157 - DNA, 33 bp, Homo sapien
aagccacagggctacacaacaggtacaagcctg

SEQ ID NO: 139158 - DNA, 33 bp, Homo sapien
aagccacagggctacagaacaggtacaagcctg

SEQ ID NO: 139159 - DNA, 33 bp, Homo sapien
attcctgagtctttggaaaggttccctgtcagt

SEQ ID NO: 139160 - DNA, 33 bp, Homo sapien
attcctgagtctttgggaaggttccctgtcagt

SEQ ID NO: 139161 - DNA, 33 bp, Homo sapien
cagtgcaagaatgttacggtcagctgtagcaga

SEQ ID NO: 139162 - DNA, 33 bp, Homo sapien
cagtgcaagaatgttatggtcagctgtagcaga

SEQ ID NO: 139163 - DNA, 33 bp, Homo sapien
gcctcaaacctcagggaataacatctgaccagg

SEQ ID NO: 139164 - DNA, 33 bp, Homo sapien
gcctcaaacctcagggtataacatctgaccagg

SEQ ID NO: 139165 - DNA, 33 bp, Homo sapien
accacagcatgaaagcagcagtagacaatacat

SEQ ID NO: 139166 - DNA, 33 bp, Homo sapien
accacagcatgaaagcggcagtagacaatacat

SEQ ID NO: 139167 - DNA, 33 bp, Homo sapien
tccgtctccatagccaaggtgaaaagcgctctc

SEQ ID NO: 139168 - DNA, 33 bp, Homo sapien
tccgtctccatagccagggtgaaaagcgctctc

SEQ ID NO: 139169 - DNA, 33 bp, Homo sapien
gagccaggaaggaaaacgaggttctgtgttcag

SEQ ID NO: 139170 - DNA, 33 bp, Homo sapien
gagccaggaaggaaaatgaggttctgtgttcag

SEQ ID NO: 139171 - DNA, 33 bp, Homo sapien
tttccaggaaccacacacttggttttatattag

SEQ ID NO: 139172 - DNA, 33 bp, Homo sapien
tttccaggaaccacacgcttggttttatattag

SEQ ID NO: 139173 - DNA, 33 bp, Homo sapien
tagtattctatatttacggtaaccaagcagttg

SEQ ID NO: 139174 - DNA, 33 bp, Homo sapien
tagtattctatatttatggtaaccaagcagttg

SEQ ID NO: 139175 - DNA, 33 bp, Homo sapien
aaaggatagaattagaaagatagacaattccac

SEQ ID NO: 139176 - DNA, 33 bp, Homo sapien
aaaggatagaattagagagatagacaattccac

SEQ ID NO: 139177 - DNA, 33 bp, Homo sapien
catattgttttattgacgattactctagagatt

SEQ ID NO: 139178 - DNA, 33 bp, Homo sapien
catattgttttattgatgattactctagagatt

SEQ ID NO: 139179 - DNA, 33 bp, Homo sapien
aatggctgatttgtaaactactactggattgaa

SEQ ID NO: 139180 - DNA, 33 bp, Homo sapien
aatggctgatttgtaagctactactggattgaa

SEQ ID NO: 139181 - DNA, 33 bp, Homo sapien
aggcttcttcatgtagcaactggctttcatgaa

SEQ ID NO: 139182 - DNA, 33 bp, Homo sapien
aggcttcttcatgtagtaactggctttcatgaa

SEQ ID NO: 139183 - DNA, 33 bp, Homo sapien
tccctaccatgccctaagatgctgctgtggagg

SEQ ID NO: 139184 - DNA, 33 bp, Homo sapien
tccctaccatgccctacgatgctgctgtggagg

SEQ ID NO: 139185 - DNA, 33 bp, Homo sapien
agcagctggtacctataaagatagatgtcttca

SEQ ID NO: 139186 - DNA, 33 bp, Homo sapien
agcagctggtacctatgaagatagatgtcttca

SEQ ID NO: 139187 - DNA, 33 bp, Homo sapien
gaggtgattagatcataagggtagagcactcat

SEQ ID NO: 139188 - DNA, 33 bp, Homo sapien
gaggtgattagatcatgagggtagagcactcat

SEQ ID NO: 139189 - DNA, 33 bp, Homo sapien
gttaaacagaagttttaaaaaattgtctgggcc

SEQ ID NO: 139190 - DNA, 33 bp, Homo sapien
gttaaacagaagtttttaaaaattgtctgggcc

SEQ ID NO: 139191 - DNA, 33 bp, Homo sapien
aaccaaacaggcatgcagacatttgaaatcgtt

SEQ ID NO: 139192 - DNA, 33 bp, Homo sapien
aaccaaacaggcatgcggacatttgaaatcgtt

SEQ ID NO: 139193 - DNA, 33 bp, Homo sapien
actggaagagaattcacgacttgttctaagtca

SEQ ID NO: 139194 - DNA, 33 bp, Homo sapien
actggaagagaattcatgacttgttctaagtca

SEQ ID NO: 139195 - DNA, 33 bp, Homo sapien
tgaattagatagtagaatagcactgggcctagc

SEQ ID NO: 139196 - DNA, 33 bp, Homo sapien
tgaattagatagtagactagcactgggcctagc

SEQ ID NO: 139197 - DNA, 33 bp, Homo sapien
tttaaaattatcccaaccttacagacaaggaaa

SEQ ID NO: 139198 - DNA, 33 bp, Homo sapien
tttaaaattatcccaatcttacagacaaggaaa

SEQ ID NO: 139199 - DNA, 33 bp, Homo sapien
atgcctgctttacaagactgttggattccaaaa

SEQ ID NO: 139200 - DNA, 33 bp, Homo sapien
atgcctgctttacaaggctgttggattccaaaa

SEQ ID NO: 139201 - DNA, 33 bp, Homo sapien
gaatgaggggattgaaccagatgttccctcatg

SEQ ID NO: 139202 - DNA, 33 bp, Homo sapien
gaatgaggggattgaatcagatgttccctcatg

SEQ ID NO: 139203 - DNA, 33 bp, Homo sapien
tccttccattggagtgcaaaataaccagtagca

SEQ ID NO: 139204 - DNA, 33 bp, Homo sapien
tccttccattggagtggaaaataaccagtagca

SEQ ID NO: 139205 - DNA, 33 bp, Homo sapien
ggatgagaggctatgcaaggaagggatgagtgg

SEQ ID NO: 139206 - DNA, 33 bp, Homo sapien
ggatgagaggctatgcgaggaagggatgagtgg

SEQ ID NO: 139207 - DNA, 33 bp, Homo sapien
gtcaaccagtccccaaaaactcaccaggagacg

SEQ ID NO: 139208 - DNA, 33 bp, Homo sapien
gtcaaccagtccccaacaactcaccaggagacg

SEQ ID NO: 139209 - DNA, 33 bp, Homo sapien
atgtgactatgcctcaaaacaatggaggttgac

SEQ ID NO: 139210 - DNA, 33 bp, Homo sapien
atgtgactatgcctcagaacaatggaggttgac

SEQ ID NO: 139211 - DNA, 33 bp, Homo sapien
tctataagcaaaatcacgaggtttctaaaatgt

SEQ ID NO: 139212 - DNA, 33 bp, Homo sapien
tctataagcaaaatcatgaggtttctaaaatgt

SEQ ID NO: 139213 - DNA, 33 bp, Homo sapien
actctcttttgcttaacgaattgtaagagctca

SEQ ID NO: 139214 - DNA, 33 bp, Homo sapien
actctcttttgcttaatgaattgtaagagctca

SEQ ID NO: 139215 - DNA, 33 bp, Homo sapien
tactggagtgtctgctcagatgcactgactcag

SEQ ID NO: 139216 - DNA, 33 bp, Homo sapien
tactggagtgtctgcttagatgcactgactcag

SEQ ID NO: 139217 - DNA, 33 bp, Homo sapien
ctgcttttctaagagaacccaaatacagagtag

SEQ ID NO: 139218 - DNA, 33 bp, Homo sapien
ctgcttttctaagagaccccaaatacagagtag

SEQ ID NO: 139219 - DNA, 33 bp, Homo sapien
ggacaccacttgccgacaccagcttggttgggg

SEQ ID NO: 139220 - DNA, 33 bp, Homo sapien
ggacaccacttgccgagaccagcttggttgggg

SEQ ID NO: 139221 - DNA, 33 bp, Homo sapien
gacatggcggcttacacgttaataggtagattc

SEQ ID NO: 139222 - DNA, 33 bp, Homo sapien
gacatggcggcttacatgttaataggtagattc

SEQ ID NO: 139223 - DNA, 33 bp, Homo sapien
agaaacaacttggggacatatagtaagatgttg

SEQ ID NO: 139224 - DNA, 33 bp, Homo sapien
agaaacaacttggggatatatagtaagatgttg

SEQ ID NO: 139225 - DNA, 33 bp, Homo sapien
aggatgttaacagctactaatttaagtggtgac

SEQ ID NO: 139226 - DNA, 33 bp, Homo sapien
aggatgttaacagctattaatttaagtggtgac

SEQ ID NO: 139227 - DNA, 33 bp, Homo sapien
aagcaagagaaactaacgctggagaatgtaaac

SEQ ID NO: 139228 - DNA, 33 bp, Homo sapien
aagcaagagaaactaatgctggagaatgtaaac

SEQ ID NO: 139229 - DNA, 33 bp, Homo sapien
caagggtatcgattgcagaagtgataagtgtcc

SEQ ID NO: 139230 - DNA, 33 bp, Homo sapien
caagggtatcgattgcggaagtgataagtgtcc

SEQ ID NO: 139231 - DNA, 33 bp, Homo sapien
agctgctgagacacacagtcggtggtccttgtc

SEQ ID NO: 139232 - DNA, 33 bp, Homo sapien
agctgctgagacacacggtcggtggtccttgtc

SEQ ID NO: 139233 - DNA, 33 bp, Homo sapien
ggtcacatgccatcaccggagctcagggagtag

SEQ ID NO: 139234 - DNA, 33 bp, Homo sapien
ggtcacatgccatcacgggagctcagggagtag

SEQ ID NO: 139235 - DNA, 33 bp, Homo sapien
gggaatacacacgccacaataaacagtgtgtgt

SEQ ID NO: 139236 - DNA, 33 bp, Homo sapien
gggaatacacacgccataataaacagtgtgtgt

SEQ ID NO: 139237 - DNA, 33 bp, Homo sapien
cccaagaagtaggtaccctgattattctgtttt

SEQ ID NO: 139238 - DNA, 33 bp, Homo sapien
cccaagaagtaggtactctgattattctgtttt

SEQ ID NO: 139239 - DNA, 33 bp, Homo sapien
aacatctacccccaaacgctgctcagactggct

SEQ ID NO: 139240 - DNA, 33 bp, Homo sapien
aacatctacccccaaatgctgctcagactggct

SEQ ID NO: 139241 - DNA, 33 bp, Homo sapien
tttagcctgttaatagaaagcgaacatctaccc

SEQ ID NO: 139242 - DNA, 33 bp, Homo sapien
tttagcctgttaataggaagcgaacatctaccc

SEQ ID NO: 139243 - DNA, 33 bp, Homo sapien
taacaggctaaattgcagaagtggctcagagtt

SEQ ID NO: 139244 - DNA, 33 bp, Homo sapien
taacaggctaaattgcggaagtggctcagagtt

SEQ ID NO: 139245 - DNA, 33 bp, Homo sapien
gagctggatgctgtcacatcatctttccggggt

SEQ ID NO: 139246 - DNA, 33 bp, Homo sapien
gagctggatgctgtcatatcatctttccggggt

SEQ ID NO: 139247 - DNA, 33 bp, Homo sapien
cctatccaacagagaacgctgctaacagcccac

SEQ ID NO: 139248 - DNA, 33 bp, Homo sapien
cctatccaacagagaatgctgctaacagcccac

SEQ ID NO: 139249 - DNA, 33 bp, Homo sapien
gttccagctttctcaacggaaaatgaggctgtt

SEQ ID NO: 139250 - DNA, 33 bp, Homo sapien
gttccagctttctcaatggaaaatgaggctgtt

SEQ ID NO: 139251 - DNA, 33 bp, Homo sapien
actacggtttcacagcagagtaaactgaagctc

SEQ ID NO: 139252 - DNA, 33 bp, Homo sapien
actacggtttcacagcggagtaaactgaagctc

SEQ ID NO: 139253 - DNA, 33 bp, Homo sapien
gggtagaaaaaccatacactgtactggcaagaa

SEQ ID NO: 139254 - DNA, 33 bp, Homo sapien
gggtagaaaaaccatatactgtactggcaagaa

SEQ ID NO: 139255 - DNA, 33 bp, Homo sapien
ttgtcaacggtaacaccacagaagataactact

SEQ ID NO: 139256 - DNA, 33 bp, Homo sapien
ttgtcaacggtaacactacagaagataactact

SEQ ID NO: 139257 - DNA, 33 bp, Homo sapien
acagataccaaacttccacccctcgccaatcaa

SEQ ID NO: 139258 - DNA, 33 bp, Homo sapien
acagataccaaacttctacccctcgccaatcaa

SEQ ID NO: 139259 - DNA, 33 bp, Homo sapien
ctgagcagtcattttacggtttatgcctaacca

SEQ ID NO: 139260 - DNA, 33 bp, Homo sapien
ctgagcagtcattttatggtttatgcctaacca

SEQ ID NO: 139261 - DNA, 33 bp, Homo sapien
aaaaatggtaagtcatcagaatctccaaggatt

SEQ ID NO: 139262 - DNA, 33 bp, Homo sapien
aaaaatggtaagtcatgagaatctccaaggatt

SEQ ID NO: 139263 - DNA, 33 bp, Homo sapien
tttgtcatactgcactcagatgctttcaaagga

SEQ ID NO: 139264 - DNA, 33 bp, Homo sapien
tttgtcatactgcacttagatgctttcaaagga

SEQ ID NO: 139265 - DNA, 33 bp, Homo sapien
ataccaagatcccatcgctactgaaaaaaaaaa

SEQ ID NO: 139266 - DNA, 33 bp, Homo sapien
ataccaagatcccatctctactgaaaaaaaaaa

SEQ ID NO: 139267 - DNA, 33 bp, Homo sapien
atccaaaaaatagtgacatagaaggtaactgat

SEQ ID NO: 139268 - DNA, 33 bp, Homo sapien
atccaaaaaatagtgatatagaaggtaactgat

SEQ ID NO: 139269 - DNA, 33 bp, Homo sapien
aagaggcagcaagttacattatgctgtcatgta

SEQ ID NO: 139270 - DNA, 33 bp, Homo sapien
aagaggcagcaagttagattatgctgtcatgta

SEQ ID NO: 139271 - DNA, 33 bp, Homo sapien
ttgatgcagatagtcgaaatcttacacactgtg

SEQ ID NO: 139272 - DNA, 33 bp, Homo sapien
ttgatgcagatagtcggaatcttacacactgtg

SEQ ID NO: 139273 - DNA, 33 bp, Homo sapien
aaacaacagaaaccaacgccagttaactaaagt

SEQ ID NO: 139274 - DNA, 33 bp, Homo sapien
aaacaacagaaaccaatgccagttaactaaagt

SEQ ID NO: 139275 - DNA, 33 bp, Homo sapien
ctgggtaataggacaagagcatttaggtcagac

SEQ ID NO: 139276 - DNA, 33 bp, Homo sapien
ctgggtaataggacaatagcatttaggtcagac

SEQ ID NO: 139277 - DNA, 33 bp, Homo sapien
ggtcttcttctgatcccgaaaagactggctgag

SEQ ID NO: 139278 - DNA, 33 bp, Homo sapien
ggtcttcttctgatcctgaaaagactggctgag

SEQ ID NO: 139279 - DNA, 33 bp, Homo sapien
tgtggtaagaagcccactacatttttgagggca

SEQ ID NO: 139280 - DNA, 33 bp, Homo sapien
tgtggtaagaagcccagtacatttttgagggca

SEQ ID NO: 139281 - DNA, 33 bp, Homo sapien
gccccacttggaaaccactgatttgctttatca

SEQ ID NO: 139282 - DNA, 33 bp, Homo sapien
gccccacttggaaaccgctgatttgctttatca

SEQ ID NO: 139283 - DNA, 33 bp, Homo sapien
gaagatactgtctattaaactgaaatatatcac

SEQ ID NO: 139284 - DNA, 33 bp, Homo sapien
gaagatactgtctattgaactgaaatatatcac

SEQ ID NO: 139285 - DNA, 33 bp, Homo sapien
cttctggacttgcccaactttctccttcctctg

SEQ ID NO: 139286 - DNA, 33 bp, Homo sapien
cttctggacttgcccagctttctccttcctctg

SEQ ID NO: 139287 - DNA, 33 bp, Homo sapien
aaacattaagtgggtaacctcctgcttgatgct

SEQ ID NO: 139288 - DNA, 33 bp, Homo sapien
aaacattaagtgggtagcctcctgcttgatgct

SEQ ID NO: 139289 - DNA, 33 bp, Homo sapien
tgtgttctctaaagtccagccgtgtcactccat

SEQ ID NO: 139290 - DNA, 33 bp, Homo sapien
tgtgttctctaaagtctagccgtgtcactccat

SEQ ID NO: 139291 - DNA, 33 bp, Homo sapien
cttacaataaccccaactgctggctgcctggcc

SEQ ID NO: 139292 - DNA, 33 bp, Homo sapien
cttacaataaccccaagtgctggctgcctggcc

SEQ ID NO: 139293 - DNA, 33 bp, Homo sapien
ggttcaggtcatctcagggaatgcagttgcccc

SEQ ID NO: 139294 - DNA, 33 bp, Homo sapien
ggttcaggtcatctcatggaatgcagttgcccc

SEQ ID NO: 139295 - DNA, 33 bp, Homo sapien
gtcaccacatgaaacacgcaggagcaactcaca

SEQ ID NO: 139296 - DNA, 33 bp, Homo sapien
gtcaccacatgaaacaggcaggagcaactcaca

SEQ ID NO: 139297 - DNA, 33 bp, Homo sapien
ctgagactcctggagaaaggaaagccgagagca

SEQ ID NO: 139298 - DNA, 33 bp, Homo sapien
ctgagactcctggagagaggaaagccgagagca

SEQ ID NO: 139299 - DNA, 33 bp, Homo sapien
agaaaaccctgggcaaattcttcacacccaaat

SEQ ID NO: 139300 - DNA, 33 bp, Homo sapien
agaaaaccctgggcaagttcttcacacccaaat

SEQ ID NO: 139301 - DNA, 33 bp, Homo sapien
gtgacaggcatggaaaagaaaggcagctggcaa

SEQ ID NO: 139302 - DNA, 33 bp, Homo sapien
gtgacaggcatggaaaggaaaggcagctggcaa

SEQ ID NO: 139303 - DNA, 33 bp, Homo sapien
gtcgacgtccctcgagccaggcccagcacacag

SEQ ID NO: 139304 - DNA, 33 bp, Homo sapien
gtcgacgtccctcgagtcaggcccagcacacag

SEQ ID NO: 139305 - DNA, 33 bp, Homo sapien
ccaaatacttcttacacgaccccaacacggagg

SEQ ID NO: 139306 - DNA, 33 bp, Homo sapien
ccaaatacttcttacatgaccccaacacggagg

SEQ ID NO: 139307 - DNA, 33 bp, Homo sapien
ggattgtcttttgttacgtagagtaaggaggga

SEQ ID NO: 139308 - DNA, 33 bp, Homo sapien
ggattgtcttttgttatgtagagtaaggaggga

SEQ ID NO: 139309 - DNA, 33 bp, Homo sapien
gctggggagaagaagcggaatggaaaggatcct

SEQ ID NO: 139310 - DNA, 33 bp, Homo sapien
gctggggagaagaagctgaatggaaaggatcct

SEQ ID NO: 139311 - DNA, 33 bp, Homo sapien
tgccccagcagaaataacatgaccggagacaga

SEQ ID NO: 139312 - DNA, 33 bp, Homo sapien
tgccccagcagaaatagcatgaccggagacaga

SEQ ID NO: 139313 - DNA, 33 bp, Homo sapien
ggtgttggatatcttcaaattcttgacctttac

SEQ ID NO: 139314 - DNA, 33 bp, Homo sapien
ggtgttggatatcttcgaattcttgacctttac

SEQ ID NO: 139315 - DNA, 33 bp, Homo sapien
ttcatggtatctccaaacttcagggcatcactg

SEQ ID NO: 139316 - DNA, 33 bp, Homo sapien
ttcatggtatctccaaccttcagggcatcactg

SEQ ID NO: 139317 - DNA, 33 bp, Homo sapien
gacacaaatgtatcaacattcatctactagttt

SEQ ID NO: 139318 - DNA, 33 bp, Homo sapien
gacacaaatgtatcaatattcatctactagttt

SEQ ID NO: 139319 - DNA, 33 bp, Homo sapien
attgatcattgttaaaccttgatgatggaaaca

SEQ ID NO: 139320 - DNA, 33 bp, Homo sapien
attgatcattgttaaagcttgatgatggaaaca

SEQ ID NO: 139321 - DNA, 33 bp, Homo sapien
ggactataaaatgacacggccactttagaaaac

SEQ ID NO: 139322 - DNA, 33 bp, Homo sapien
ggactataaaatgacatggccactttagaaaac

SEQ ID NO: 139323 - DNA, 33 bp, Homo sapien
ttgagacattagtggaaaagtcactgcagatgt

SEQ ID NO: 139324 - DNA, 33 bp, Homo sapien
ttgagacattagtggagaagtcactgcagatgt

SEQ ID NO: 139325 - DNA, 33 bp, Homo sapien
tccagctcagactgaaatctgcagcctacctcc

SEQ ID NO: 139326 - DNA, 33 bp, Homo sapien
tccagctcagactgaactctgcagcctacctcc

SEQ ID NO: 139327 - DNA, 33 bp, Homo sapien
ttcttaaatatctggaaattaagcaacactctc

SEQ ID NO: 139328 - DNA, 33 bp, Homo sapien
ttcttaaatatctggacattaagcaacactctc

SEQ ID NO: 139329 - DNA, 33 bp, Homo sapien
cactactccgtgataaaaagaacaatagattca

SEQ ID NO: 139330 - DNA, 33 bp, Homo sapien
cactactccgtgataacaagaacaatagattca

SEQ ID NO: 139331 - DNA, 33 bp, Homo sapien
aagtacattcactgctaaagtatgtttatactt

SEQ ID NO: 139332 - DNA, 33 bp, Homo sapien
aagtacattcactgctgaagtatgtttatactt

SEQ ID NO: 139333 - DNA, 33 bp, Homo sapien
gaaaaggcccctcccaatatggtgccttggagc

SEQ ID NO: 139334 - DNA, 33 bp, Homo sapien
gaaaaggcccctcccattatggtgccttggagc

SEQ ID NO: 139335 - DNA, 33 bp, Homo sapien
atctggccatcaatcaataaccagtgggtactc

SEQ ID NO: 139336 - DNA, 33 bp, Homo sapien
atctggccatcaatcagtaaccagtgggtactc

SEQ ID NO: 139337 - DNA, 33 bp, Homo sapien
ccgttaaacagaggacagacttaccctcttctg

SEQ ID NO: 139338 - DNA, 33 bp, Homo sapien
ccgttaaacagaggacggacttaccctcttctg

SEQ ID NO: 139339 - DNA, 33 bp, Homo sapien
atccagctctcttccacgactggttcctatgac

SEQ ID NO: 139340 - DNA, 33 bp, Homo sapien
atccagctctcttccatgactggttcctatgac

SEQ ID NO: 139341 - DNA, 33 bp, Homo sapien
caccatatggccccacaataaatgagagagtca

SEQ ID NO: 139342 - DNA, 33 bp, Homo sapien
caccatatggccccacgataaatgagagagtca

SEQ ID NO: 139343 - DNA, 33 bp, Homo sapien
aaaaatagtgacaacaccaaattcttacaagga

SEQ ID NO: 139344 - DNA, 33 bp, Homo sapien
aaaaatagtgacaacatcaaattcttacaagga

SEQ ID NO: 139345 - DNA, 33 bp, Homo sapien
gtaacatcttgtaaaactatagtgtacgatatc

SEQ ID NO: 139346 - DNA, 33 bp, Homo sapien
gtaacatcttgtaaaagtatagtgtacgatatc

SEQ ID NO: 139347 - DNA, 33 bp, Homo sapien
tgacatgatatccaaaacagctttctttgacat

SEQ ID NO: 139348 - DNA, 33 bp, Homo sapien
tgacatgatatccaaagcagctttctttgacat

SEQ ID NO: 139349 - DNA, 33 bp, Homo sapien
ataataagtctgatccacgaacataggatgttt

SEQ ID NO: 139350 - DNA, 33 bp, Homo sapien
ataataagtctgatccgcgaacataggatgttt

SEQ ID NO: 139351 - DNA, 33 bp, Homo sapien
agaaagtgtgaaataaaatagaagtgggctttc

SEQ ID NO: 139352 - DNA, 33 bp, Homo sapien
agaaagtgtgaaataagatagaagtgggctttc

SEQ ID NO: 139353 - DNA, 33 bp, Homo sapien
tctccgcctctgctcaacccttggctctgtctg

SEQ ID NO: 139354 - DNA, 33 bp, Homo sapien
tctccgcctctgctcagcccttggctctgtctg

SEQ ID NO: 139355 - DNA, 33 bp, Homo sapien
attggaaaacctgacccaaagccagatgtggtc

SEQ ID NO: 139356 - DNA, 33 bp, Homo sapien
attggaaaacctgacctaaagccagatgtggtc

SEQ ID NO: 139357 - DNA, 33 bp, Homo sapien
tcacctttccattgtacgcaggtgagtcctttt

SEQ ID NO: 139358 - DNA, 33 bp, Homo sapien
tcacctttccattgtatgcaggtgagtcctttt

SEQ ID NO: 139359 - DNA, 33 bp, Homo sapien
aaagtgtgtcccatccaaatacctaatgcatat

SEQ ID NO: 139360 - DNA, 33 bp, Homo sapien
aaagtgtgtcccatccgaatacctaatgcatat

SEQ ID NO: 139361 - DNA, 33 bp, Homo sapien
cactgctggaatggaactgctgagccaagcagg

SEQ ID NO: 139362 - DNA, 33 bp, Homo sapien
cactgctggaatggaattgctgagccaagcagg

SEQ ID NO: 139363 - DNA, 33 bp, Homo sapien
tgtcagctgtcaaaataataaaattcatggtga

SEQ ID NO: 139364 - DNA, 33 bp, Homo sapien
tgtcagctgtcaaaatcataaaattcatggtga

SEQ ID NO: 139365 - DNA, 33 bp, Homo sapien
acactacgaactccaacaaaccacacaggcaga

SEQ ID NO: 139366 - DNA, 33 bp, Homo sapien
acactacgaactccaataaaccacacaggcaga

SEQ ID NO: 139367 - DNA, 33 bp, Homo sapien
attaaagcctatgacactcaaaagcaattggat

SEQ ID NO: 139368 - DNA, 33 bp, Homo sapien
attaaagcctatgacattcaaaagcaattggat

SEQ ID NO: 139369 - DNA, 33 bp, Homo sapien
gcttgtctgtgcctagcagtccagggtttttat

SEQ ID NO: 139370 - DNA, 33 bp, Homo sapien
gcttgtctgtgcctaggagtccagggtttttat

SEQ ID NO: 139371 - DNA, 33 bp, Homo sapien
agacagatctcaatcaatatagaaaagcttatt

SEQ ID NO: 139372 - DNA, 33 bp, Homo sapien
agacagatctcaatcactatagaaaagcttatt

SEQ ID NO: 139373 - DNA, 33 bp, Homo sapien
gccagggtgaaattcaacggaactggtttatgg

SEQ ID NO: 139374 - DNA, 33 bp, Homo sapien
gccagggtgaaattcagcggaactggtttatgg

SEQ ID NO: 139375 - DNA, 33 bp, Homo sapien
acacacgtaagcacaacttaacctataatttag

SEQ ID NO: 139376 - DNA, 33 bp, Homo sapien
acacacgtaagcacaatttaacctataatttag

SEQ ID NO: 139377 - DNA, 33 bp, Homo sapien
ccctgagtgctatgggaatggcctgttttgacc

SEQ ID NO: 139378 - DNA, 33 bp, Homo sapien
ccctgagtgctatggggatggcctgttttgacc

SEQ ID NO: 139379 - DNA, 33 bp, Homo sapien
gaggctgctcctagcccgaagacgggtttccat

SEQ ID NO: 139380 - DNA, 33 bp, Homo sapien
gaggctgctcctagcctgaagacgggtttccat

SEQ ID NO: 139381 - DNA, 33 bp, Homo sapien
tgccatcctggacagaacacaagtgaaggccac

SEQ ID NO: 139382 - DNA, 33 bp, Homo sapien
tgccatcctggacagaccacaagtgaaggccac

SEQ ID NO: 139383 - DNA, 33 bp, Homo sapien
tcatgggaggagcaaaaattttctaattggaat

SEQ ID NO: 139384 - DNA, 33 bp, Homo sapien
tcatgggaggagcaaacattttctaattggaat

SEQ ID NO: 139385 - DNA, 33 bp, Homo sapien
aaagaaaagaaaatgacgagcacactagttggt

SEQ ID NO: 139386 - DNA, 33 bp, Homo sapien
aaagaaaagaaaatgaggagcacactagttggt

SEQ ID NO: 139387 - DNA, 33 bp, Homo sapien
cactcggctacttctacggatagtactgtggga

SEQ ID NO: 139388 - DNA, 33 bp, Homo sapien
cactcggctacttctatggatagtactgtggga

SEQ ID NO: 139389 - DNA, 33 bp, Homo sapien
agaggaggtggtgttaaacatacactcggctac

SEQ ID NO: 139390 - DNA, 33 bp, Homo sapien
agaggaggtggtgttagacatacactcggctac

SEQ ID NO: 139391 - DNA, 33 bp, Homo sapien
tcagcctcttcctagacggctgggcttctgagg

SEQ ID NO: 139392 - DNA, 33 bp, Homo sapien
tcagcctcttcctagatggctgggcttctgagg

SEQ ID NO: 139393 - DNA, 33 bp, Homo sapien
agtgaggacatgaagaaactggaactttttttt

SEQ ID NO: 139394 - DNA, 33 bp, Homo sapien
agtgaggacatgaagacactggaactttttttt

SEQ ID NO: 139395 - DNA, 33 bp, Homo sapien
cacactacctaccaaactaaagtggttgtagta

SEQ ID NO: 139396 - DNA, 33 bp, Homo sapien
cacactacctaccaaattaaagtggttgtagta

SEQ ID NO: 139397 - DNA, 33 bp, Homo sapien
gtaaagtatcttctaacgaaatcagtatattat

SEQ ID NO: 139398 - DNA, 33 bp, Homo sapien
gtaaagtatcttctaatgaaatcagtatattat

SEQ ID NO: 139399 - DNA, 33 bp, Homo sapien
ggcttccctggaccgcaatggaagaactgtctt

SEQ ID NO: 139400 - DNA, 33 bp, Homo sapien
ggcttccctggaccgcgatggaagaactgtctt

SEQ ID NO: 139401 - DNA, 33 bp, Homo sapien
atattttttgtacttacaacaatatgaagccct

SEQ ID NO: 139402 - DNA, 33 bp, Homo sapien
atattttttgtacttataacaatatgaagccct

SEQ ID NO: 139403 - DNA, 33 bp, Homo sapien
ggatgcttataaggagaaagtgttagaatgttg

SEQ ID NO: 139404 - DNA, 33 bp, Homo sapien
ggatgcttataaggaggaagtgttagaatgttg

SEQ ID NO: 139405 - DNA, 33 bp, Homo sapien
atttgactcataggaaactgggattggaacacc

SEQ ID NO: 139406 - DNA, 33 bp, Homo sapien
atttgactcataggaacctgggattggaacacc

SEQ ID NO: 139407 - DNA, 33 bp, Homo sapien
tcaattcacaacttgacggaaaaaaagtagaga

SEQ ID NO: 139408 - DNA, 33 bp, Homo sapien
tcaattcacaacttgagggaaaaaaagtagaga

SEQ ID NO: 139409 - DNA, 33 bp, Homo sapien
gacgatgaatgtctaacgtgcatttatcaccag

SEQ ID NO: 139410 - DNA, 33 bp, Homo sapien
gacgatgaatgtctaatgtgcatttatcaccag

SEQ ID NO: 139411 - DNA, 33 bp, Homo sapien
tatatgtactatcaaaataagagtctttgtcct

SEQ ID NO: 139412 - DNA, 33 bp, Homo sapien
tatatgtactatcaaagtaagagtctttgtcct

SEQ ID NO: 139413 - DNA, 33 bp, Homo sapien
gaccctcctggcaaaaaaattattaacaacaac

SEQ ID NO: 139414 - DNA, 33 bp, Homo sapien
gaccctcctggcaaaacaattattaacaacaac

SEQ ID NO: 139415 - DNA, 33 bp, Homo sapien
cccttatgcttactaagacatgcttcaaaaaga

SEQ ID NO: 139416 - DNA, 33 bp, Homo sapien
cccttatgcttactaatacatgcttcaaaaaga

SEQ ID NO: 139417 - DNA, 33 bp, Homo sapien
tccagccccaggttatcagtcaggcatctagat

SEQ ID NO: 139418 - DNA, 33 bp, Homo sapien
tccagccccaggttatgagtcaggcatctagat

SEQ ID NO: 139419 - DNA, 33 bp, Homo sapien
tattctccacctcaacaccttctgtcacagcac

SEQ ID NO: 139420 - DNA, 33 bp, Homo sapien
tattctccacctcaaccccttctgtcacagcac

SEQ ID NO: 139421 - DNA, 33 bp, Homo sapien
tgtgttgttcacagaccaaaagtgctacctaga

SEQ ID NO: 139422 - DNA, 33 bp, Homo sapien
tgtgttgttcacagactaaaagtgctacctaga

SEQ ID NO: 139423 - DNA, 33 bp, Homo sapien
aattcacagagttagaaggcagaatagaggttc

SEQ ID NO: 139424 - DNA, 33 bp, Homo sapien
aattcacagagttagacggcagaatagaggttc

SEQ ID NO: 139425 - DNA, 33 bp, Homo sapien
ccgaaacttctgaaaacggtgctaggttggtaa

SEQ ID NO: 139426 - DNA, 33 bp, Homo sapien
ccgaaacttctgaaaatggtgctaggttggtaa

SEQ ID NO: 139427 - DNA, 33 bp, Homo sapien; identical to SEQ ID NO: 139425

SEQ ID NO: 139428 - DNA, 33 bp, Homo sapien; identical to SEQ ID NO: 139426

SEQ ID NO: 139429 - DNA, 33 bp, Homo sapien
tcccttccggaagtcaagcaattttactttata

SEQ ID NO: 139430 - DNA, 33 bp, Homo sapien
tcccttccggaagtcatgcaattttactttata

SEQ ID NO: 139431 - DNA, 33 bp, Homo sapien
ccaaacgtccaccgccggcagaatagataagca

SEQ ID NO: 139432 - DNA, 33 bp, Homo sapien
ccaaacgtccaccgcctgcagaatagataagca

SEQ ID NO: 139433 - DNA, 33 bp, Homo sapien
tacttctttacatctacagtgcaagccagtgga

SEQ ID NO: 139434 - DNA, 33 bp, Homo sapien
tacttctttacatctatagtgcaagccagtgga

SEQ ID NO: 139435 - DNA, 33 bp, Homo sapien
gcaaagacgagggaggaatatgtttccaagatc

SEQ ID NO: 139436 - DNA, 33 bp, Homo sapien
gcaaagacgagggagggatatgtttccaagatc

SEQ ID NO: 139437 - DNA, 33 bp, Homo sapien
ccttcagtcaccagtccaggaaaactttctaat

SEQ ID NO: 139438 - DNA, 33 bp, Homo sapien
ccttcagtcaccagtctaggaaaactttctaat

SEQ ID NO: 139439 - DNA, 33 bp, Homo sapien
tgttctaccatttcaacgttttccttagaaaaa

SEQ ID NO: 139440 - DNA, 33 bp, Homo sapien
tgttctaccatttcaaggttttccttagaaaaa

SEQ ID NO: 139441 - DNA, 33 bp, Homo sapien
aaatagtttacctcaaatcgtacagggattcct

SEQ ID NO: 139442 - DNA, 33 bp, Homo sapien
aaatagtttacctcaagtcgtacagggattcct

SEQ ID NO: 139443 - DNA, 33 bp, Homo sapien
ttacacttggtgactccacaatgatgtgccatt

SEQ ID NO: 139444 - DNA, 33 bp, Homo sapien
ttacacttggtgactctacaatgatgtgccatt

SEQ ID NO: 139445 - DNA, 33 bp, Homo sapien
atcttaggtcagtaaacgctttattccgaggct

SEQ ID NO: 139446 - DNA, 33 bp, Homo sapien
atcttaggtcagtaaatgctttattccgaggct

SEQ ID NO: 139447 - DNA, 33 bp, Homo sapien
tcaaaagatgaaaaaacacacattttaggcctt

SEQ ID NO: 139448 - DNA, 33 bp, Homo sapien
tcaaaagatgaaaaaagacacattttaggcctt

SEQ ID NO: 139449 - DNA, 33 bp, Homo sapien
cacacagaacagttaccaccaagctgtgctggc

SEQ ID NO: 139450 - DNA, 33 bp, Homo sapien
cacacagaacagttactaccaagctgtgctggc

SEQ ID NO: 139451 - DNA, 33 bp, Homo sapien
ctattcaagtcgatggcccaatcctttgtcctt

SEQ ID NO: 139452 - DNA, 33 bp, Homo sapien
ctattcaagtcgatggtccaatcctttgtcctt

SEQ ID NO: 139453 - DNA, 33 bp, Homo sapien
gcagagcgtacaattaagtcacgaatttgggat

SEQ ID NO: 139454 - DNA, 33 bp, Homo sapien
gcagagcgtacaattatgtcacgaatttgggat

SEQ ID NO: 139455 - DNA, 33 bp, Homo sapien
accttctagcatctacacacctaaagcagggtt

SEQ ID NO: 139456 - DNA, 33 bp, Homo sapien
accttctagcatctacgcacctaaagcagggtt

SEQ ID NO: 139457 - DNA, 33 bp, Homo sapien
tctcaggaagtgataacagcacctgaggctttc

SEQ ID NO: 139458 - DNA, 33 bp, Homo sapien
tctcaggaagtgataatagcacctgaggctttc

SEQ ID NO: 139459 - DNA, 33 bp, Homo sapien
tacagaggaagaaaaacatacagtgaacccttt

SEQ ID NO: 139460 - DNA, 33 bp, Homo sapien
tacagaggaagaaaaatatacagtgaacccttt

SEQ ID NO: 139461 - DNA, 33 bp, Homo sapien
ccctgtgggacacagcaacattggataagggac

SEQ ID NO: 139462 - DNA, 33 bp, Homo sapien
ccctgtgggacacagcgacattggataagggac

SEQ ID NO: 139463 - DNA, 33 bp, Homo sapien
tgctcacatggacaccccttcaccttcctctca

SEQ ID NO: 139464 - DNA, 33 bp, Homo sapien
tgctcacatggacacctcttcaccttcctctca

SEQ ID NO: 139465 - DNA, 33 bp, Homo sapien
aacagctcctggaagaatatctgttcccggctg

SEQ ID NO: 139466 - DNA, 33 bp, Homo sapien
aacagctcctggaagactatctgttcccggctg

SEQ ID NO: 139467 - DNA, 33 bp, Homo sapien
tttgctgacatcgtgacgattttaaagctgcat

SEQ ID NO: 139468 - DNA, 33 bp, Homo sapien
tttgctgacatcgtgatgattttaaagctgcat

SEQ ID NO: 139469 - DNA, 33 bp, Homo sapien
ccgaattggtgataccacaaatccaaaggagcc

SEQ ID NO: 139470 - DNA, 33 bp, Homo sapien
ccgaattggtgataccgcaaatccaaaggagcc

SEQ ID NO: 139471 - DNA, 33 bp, Homo sapien
tatctcccatttaacacacaagagacttgaggt

SEQ ID NO: 139472 - DNA, 33 bp, Homo sapien
tatctcccatttaacagacaagagacttgaggt

SEQ ID NO: 139473 - DNA, 33 bp, Homo sapien
atgtggtctgcaaagacaaagcctctttataga

SEQ ID NO: 139474 - DNA, 33 bp, Homo sapien
atgtggtctgcaaagataaagcctctttataga

SEQ ID NO: 139475 - DNA, 33 bp, Homo sapien
ggttgaatgtgcacaccgcagggagcatgggga

SEQ ID NO: 139476 - DNA, 33 bp, Homo sapien
ggttgaatgtgcacactgcagggagcatgggga

SEQ ID NO: 139477 - DNA, 33 bp, Homo sapien
gaattgagagtaaaaccctagttggacgagatc

SEQ ID NO: 139478 - DNA, 33 bp, Homo sapien
gaattgagagtaaaacgctagttggacgagatc

SEQ ID NO: 139479 - DNA, 33 bp, Homo sapien
gtggagatagtttgaaaggggcaagaacggagg

SEQ ID NO: 139480 - DNA, 33 bp, Homo sapien
gtggagatagtttgaagggggcaagaacggagg

SEQ ID NO: 139481 - DNA, 33 bp, Homo sapien
aaaagtgattctggaaatgtgtatctagcagag

SEQ ID NO: 139482 - DNA, 33 bp, Homo sapien
aaaagtgattctggaagtgtgtatctagcagag

SEQ ID NO: 139483 - DNA, 33 bp, Homo sapien
gtgaggaagcaggtgacggcctgaccactgtac

SEQ ID NO: 139484 - DNA, 33 bp, Homo sapien
gtgaggaagcaggtgatggcctgaccactgtac

SEQ ID NO: 139485 - DNA, 33 bp, Homo sapien
atccaggagcccctgaccaagtttcagaaaatc

SEQ ID NO: 139486 - DNA, 33 bp, Homo sapien
atccaggagcccctgagcaagtttcagaaaatc

SEQ ID NO: 139487 - DNA, 33 bp, Homo sapien
ggggccacagaaactaccacccccatttccaga

SEQ ID NO: 139488 - DNA, 33 bp, Homo sapien
ggggccacagaaactatcacccccatttccaga

SEQ ID NO: 139489 - DNA, 33 bp, Homo sapien
cactgattcttaagcacgggccaagcacttgtc

SEQ ID NO: 139490 - DNA, 33 bp, Homo sapien
cactgattcttaagcatgggccaagcacttgtc

SEQ ID NO: 139491 - DNA, 33 bp, Homo sapien
agggcacctgctggagaacatcgctggcagctg

SEQ ID NO: 139492 - DNA, 33 bp, Homo sapien
agggcacctgctggaggacatcgctggcagctg

SEQ ID NO: 139493 - DNA, 33 bp, Homo sapien
atgaatcaggggacacaccatcttgctgttgtc

SEQ ID NO: 139494 - DNA, 33 bp, Homo sapien
atgaatcaggggacacgccatcttgctgttgtc

SEQ ID NO: 139495 - DNA, 33 bp, Homo sapien
ccatctgagtcaggaaagttgggtttatttcat

SEQ ID NO: 139496 - DNA, 33 bp, Homo sapien
ccatctgagtcaggaaggttgggtttatttcat

SEQ ID NO: 139497 - DNA, 33 bp, Homo sapien
gagatcggaagtctgacgcactctcagtgagtt

SEQ ID NO: 139498 - DNA, 33 bp, Homo sapien
gagatcggaagtctgatgcactctcagtgagtt

SEQ ID NO: 139499 - DNA, 33 bp, Homo sapien
caaggatgtggttaaacattgcgctgtgcacag

SEQ ID NO: 139500 - DNA, 33 bp, Homo sapien
caaggatgtggttaaatattgcgctgtgcacag

SEQ ID NO: 139501 - DNA, 33 bp, Homo sapien
cacacgtcatctgagcaaggtacactgtagcta

SEQ ID NO: 139502 - DNA, 33 bp, Homo sapien
cacacgtcatctgagcgaggtacactgtagcta

SEQ ID NO: 139503 - DNA, 33 bp, Homo sapien
ttagtctcacctccccactacggccggaagctc

SEQ ID NO: 139504 - DNA, 33 bp, Homo sapien
ttagtctcacctccccgctacggccggaagctc

SEQ ID NO: 139505 - DNA, 33 bp, Homo sapien
gcttattttcaagatcacttaaaggaagaattc

SEQ ID NO: 139506 - DNA, 33 bp, Homo sapien
gcttattttcaagatcgcttaaaggaagaattc

SEQ ID NO: 139507 - DNA, 33 bp, Homo sapien
tgcaataccctccacacgggcccgagaggaggc

SEQ ID NO: 139508 - DNA, 33 bp, Homo sapien
tgcaataccctccacatgggcccgagaggaggc

SEQ ID NO: 139509 - DNA, 33 bp, Homo sapien
tggggggtggtcactgaaggagaaagggacaag

SEQ ID NO: 139510 - DNA, 33 bp, Homo sapien
tggggggtggtcactggaggagaaagggacaag

SEQ ID NO: 139511 - DNA, 33 bp, Homo sapien
tggatcgttttgggaaataagcaggcaatgaat

SEQ ID NO: 139512 - DNA, 33 bp, Homo sapien
tggatcgttttgggaagtaagcaggcaatgaat

SEQ ID NO: 139513 - DNA, 33 bp, Homo sapien
atatcaaagagttaccaccattacagtatttac

SEQ ID NO: 139514 - DNA, 33 bp, Homo sapien
atatcaaagagttacccccattacagtatttac

SEQ ID NO: 139515 - DNA, 33 bp, Homo sapien
ctctgaaccagtccccagaacaacattggcaac

SEQ ID NO: 139516 - DNA, 33 bp, Homo sapien
ctctgaaccagtccccggaacaacattggcaac

SEQ ID NO: 139517 - DNA, 33 bp, Homo sapien
atgaaaccagggactaccaagagtaaatgctgt

SEQ ID NO: 139518 - DNA, 33 bp, Homo sapien
atgaaaccagggactagcaagagtaaatgctgt

SEQ ID NO: 139519 - DNA, 33 bp, Homo sapien
gcatttccatctcccaaatcatggtcctgtctg

SEQ ID NO: 139520 - DNA, 33 bp, Homo sapien
gcatttccatctcccacatcatggtcctgtctg

SEQ ID NO: 139521 - DNA, 33 bp, Homo sapien
attaaggttaaatgaagtcttcagggtggggcc

SEQ ID NO: 139522 - DNA, 33 bp, Homo sapien
attaaggttaaatgaattcttcagggtggggcc

SEQ ID NO: 139523 - DNA, 33 bp, Homo sapien
ctgaaccctgctttgcaccctacactgtgctag

SEQ ID NO: 139524 - DNA, 33 bp, Homo sapien
ctgaaccctgctttgcgccctacactgtgctag

SEQ ID NO: 139525 - DNA, 33 bp, Homo sapien
gcagctgtgcttttagaagagctgttttcccct

SEQ ID NO: 139526 - DNA, 33 bp, Homo sapien
gcagctgtgcttttaggagagctgttttcccct

SEQ ID NO: 139527 - DNA, 33 bp, Homo sapien
tgtttcctttttgccccggctcttaaagcacca

SEQ ID NO: 139528 - DNA, 33 bp, Homo sapien
tgtttcctttttgccctggctcttaaagcacca

SEQ ID NO: 139529 - DNA, 33 bp, Homo sapien
tatctttagtggcttacaatgagaataggctaa

SEQ ID NO: 139530 - DNA, 33 bp, Homo sapien
tatctttagtggcttataatgagaataggctaa

SEQ ID NO: 139531 - DNA, 33 bp, Homo sapien
tgctgggagtttataacggccttgtttccatac

SEQ ID NO: 139532 - DNA, 33 bp, Homo sapien
tgctgggagtttataatggccttgtttccatac

SEQ ID NO: 139533 - DNA, 33 bp, Homo sapien
tgtagaggagctaagacaccatcccccctagaa

SEQ ID NO: 139534 - DNA, 33 bp, Homo sapien
tgtagaggagctaagataccatcccccctagaa

SEQ ID NO: 139535 - DNA, 33 bp, Homo sapien
aggctctctggagcacagaacactaggccatcg

SEQ ID NO: 139536 - DNA, 33 bp, Homo sapien
aggctctctggagcacggaacactaggccatcg

SEQ ID NO: 139537 - DNA, 33 bp, Homo sapien
ttggctcaaaggaaaaaatagatctcatgggtt

SEQ ID NO: 139538 - DNA, 33 bp, Homo sapien
ttggctcaaaggaaaagatagatctcatgggtt

SEQ ID NO: 139539 - DNA, 33 bp, Homo sapien
gtgagtttattcctcactcttctaacccatgag

SEQ ID NO: 139540 - DNA, 33 bp, Homo sapien
gtgagtttattcctcagtcttctaacccatgag

SEQ ID NO: 139541 - DNA, 33 bp, Homo sapien
ctccactttatagcaacagcaactaaggtccag

SEQ ID NO: 139542 - DNA, 33 bp, Homo sapien
ctccactttatagcaatagcaactaaggtccag

SEQ ID NO: 139543 - DNA, 33 bp, Homo sapien
actccgggaaggccaacggtgaaaaggtgggca

SEQ ID NO: 139544 - DNA, 33 bp, Homo sapien
actccgggaaggccaatggtgaaaaggtgggca

SEQ ID NO: 139545 - DNA, 33 bp, Homo sapien
catcactcaactgttacgtgtggcactgtgggc

SEQ ID NO: 139546 - DNA, 33 bp, Homo sapien
catcactcaactgttaggtgtggcactgtgggc

SEQ ID NO: 139547 - DNA, 33 bp, Homo sapien
cagggacaagtgacacacctggtcagcacaatg

SEQ ID NO: 139548 - DNA, 33 bp, Homo sapien
cagggacaagtgacacgcctggtcagcacaatg

SEQ ID NO: 139549 - DNA, 33 bp, Homo sapien
agttgctatagttaccaccattgtgattattac

SEQ ID NO: 139550 - DNA, 33 bp, Homo sapien
agttgctatagttaccgccattgtgattattac

SEQ ID NO: 139551 - DNA, 33 bp, Homo sapien
ttcaagtcaaggaggacgggccgtgaccactgc

SEQ ID NO: 139552 - DNA, 33 bp, Homo sapien
ttcaagtcaaggaggatgggccgtgaccactgc

SEQ ID NO: 139553 - DNA, 33 bp, Homo sapien
tctgctggctctccccccatcctgggaatgcag

SEQ ID NO: 139554 - DNA, 33 bp, Homo sapien
tctgctggctctcccctcatcctgggaatgcag

SEQ ID NO: 139555 - DNA, 33 bp, Homo sapien
ctcgtgcacatactcaactaatttgcagagttg

SEQ ID NO: 139556 - DNA, 33 bp, Homo sapien
ctcgtgcacatactcagctaatttgcagagttg

SEQ ID NO: 139557 - DNA, 33 bp, Homo sapien
tgttcatgcactcaacactatgtggtttcctgg

SEQ ID NO: 139558 - DNA, 33 bp, Homo sapien
tgttcatgcactcaacgctatgtggtttcctgg

SEQ ID NO: 139559 - DNA, 33 bp, Homo sapien
tagtcatcgcattggaactattcctctaccttc

SEQ ID NO: 139560 - DNA, 33 bp, Homo sapien
tagtcatcgcattggagctattcctctaccttc

SEQ ID NO: 139561 - DNA, 33 bp, Homo sapien
tcctgttccttctggcacatgcattgctttgtg

SEQ ID NO: 139562 - DNA, 33 bp, Homo sapien
tcctgttccttctggctcatgcattgctttgtg

SEQ ID NO: 139563 - DNA, 33 bp, Homo sapien
attttttttcaccagacgttcactgacttcgtg

SEQ ID NO: 139564 - DNA, 33 bp, Homo sapien
attttttttcaccagatgttcactgacttcgtg

SEQ ID NO: 139565 - DNA, 33 bp, Homo sapien
aaaccctgttccatcccgagtgtctttaccaga

SEQ ID NO: 139566 - DNA, 33 bp, Homo sapien
aaaccctgttccatcctgagtgtctttaccaga

SEQ ID NO: 139567 - DNA, 33 bp, Homo sapien
gagtcagggagtaagacagaagtattagaatta

SEQ ID NO: 139568 - DNA, 33 bp, Homo sapien
gagtcagggagtaagagagaagtattagaatta

SEQ ID NO: 139569 - DNA, 33 bp, Homo sapien
tagactaaaccagggaagaaggataggcactat

SEQ ID NO: 139570 - DNA, 33 bp, Homo sapien
tagactaaaccagggaggaaggataggcactat

SEQ ID NO: 139571 - DNA, 33 bp, Homo sapien
ttctataaagtaggtaaagttgaatctcctaag

SEQ ID NO: 139572 - DNA, 33 bp, Homo sapien
ttctataaagtaggtagagttgaatctcctaag

SEQ ID NO: 139573 - DNA, 33 bp, Homo sapien
gcacttttaaaagacccattgaattgtttgtga

SEQ ID NO: 139574 - DNA, 33 bp, Homo sapien
gcacttttaaaagacctattgaattgtttgtga

SEQ ID NO: 139575 - DNA, 33 bp, Homo sapien
aagcaaagaaagtcacagaaagaaaccagagtg

SEQ ID NO: 139576 - DNA, 33 bp, Homo sapien
aagcaaagaaagtcacggaaagaaaccagagtg

SEQ ID NO: 139577 - DNA, 33 bp, Homo sapien
gccaccgtgttcctgacgtagctgtcacatgat

SEQ ID NO: 139578 - DNA, 33 bp, Homo sapien
gccaccgtgttcctgatgtagctgtcacatgat

SEQ ID NO: 139579 - DNA, 33 bp, Homo sapien
ttcttctgtttccccaacactctgaaggagagc

SEQ ID NO: 139580 - DNA, 33 bp, Homo sapien
ttcttctgtttccccagcactctgaaggagagc

SEQ ID NO: 139581 - DNA, 33 bp, Homo sapien
ctgaaggagagcccaacaccaagttctaataat

SEQ ID NO: 139582 - DNA, 33 bp, Homo sapien
ctgaaggagagcccaataccaagttctaataat

SEQ ID NO: 139583 - DNA, 33 bp, Homo sapien
ggaaatatataactccacaagttttttttgctt

SEQ ID NO: 139584 - DNA, 33 bp, Homo sapien
ggaaatatataactccgcaagttttttttgctt

SEQ ID NO: 139585 - DNA, 33 bp, Homo sapien
ttctcaattgcagaacacccctctgaggtgtga

SEQ ID NO: 139586 - DNA, 33 bp, Homo sapien
ttctcaattgcagaactcccctctgaggtgtga

SEQ ID NO: 139587 - DNA, 33 bp, Homo sapien
ccatgcctacacttaaaagcagattttgggccg

SEQ ID NO: 139588 - DNA, 33 bp, Homo sapien
ccatgcctacacttaacagcagattttgggccg

SEQ ID NO: 139589 - DNA, 33 bp, Homo sapien
gaaatgtgccagaggaaaattttgttttaaatc

SEQ ID NO: 139590 - DNA, 33 bp, Homo sapien
gaaatgtgccagaggagaattttgttttaaatc

SEQ ID NO: 139591 - DNA, 33 bp, Homo sapien
gaaagtggggctaacaagaaaatgccctttgct

SEQ ID NO: 139592 - DNA, 33 bp, Homo sapien
gaaagtggggctaacaggaaaatgccctttgct

SEQ ID NO: 139593 - DNA, 33 bp, Homo sapien
tatcaaaatagctccacagactgtttcttcttt

SEQ ID NO: 139594 - DNA, 33 bp, Homo sapien
tatcaaaatagctccagagactgtttcttcttt

SEQ ID NO: 139595 - DNA, 33 bp, Homo sapien
gtggaagagaagtcggacatccttccaggccac

SEQ ID NO: 139596 - DNA, 33 bp, Homo sapien
gtggaagagaagtcggccatccttccaggccac

SEQ ID NO: 139597 - DNA, 33 bp, Homo sapien
gcacctgccaggacagcctcagatgctggacac

SEQ ID NO: 139598 - DNA, 33 bp, Homo sapien
gcacctgccaggacagtctcagatgctggacac

SEQ ID NO: 139599 - DNA, 33 bp, Homo sapien
ttctttagaaaaacagacggtactaggtggaat

SEQ ID NO: 139600 - DNA, 33 bp, Homo sapien
ttctttagaaaaacaggcggtactaggtggaat

SEQ ID NO: 139601 - DNA, 33 bp, Homo sapien
aggcagccctcaagtcacactcaaaccctcctc

SEQ ID NO: 139602 - DNA, 33 bp, Homo sapien
aggcagccctcaagtcgcactcaaaccctcctc

SEQ ID NO: 139603 - DNA, 33 bp, Homo sapien
gtactctctgactcacaacactgagaagtctcc

SEQ ID NO: 139604 - DNA, 33 bp, Homo sapien
gtactctctgactcacgacactgagaagtctcc

SEQ ID NO: 139605 - DNA, 33 bp, Homo sapien
catctcagctcagttacgacccgtgggcgcggt

SEQ ID NO: 139606 - DNA, 33 bp, Homo sapien
catctcagctcagttatgacccgtgggcgcggt

SEQ ID NO: 139607 - DNA, 33 bp, Homo sapien
aaaactcatttgtgtaataagattagggtgggg

SEQ ID NO: 139608 - DNA, 33 bp, Homo sapien
aaaactcatttgtgtagtaagattagggtgggg

SEQ ID NO: 139609 - DNA, 33 bp, Homo sapien
ataaaatgttctaggacatccactaggagatac

SEQ ID NO: 139610 - DNA, 33 bp, Homo sapien
ataaaatgttctaggagatccactaggagatac

SEQ ID NO: 139611 - DNA, 33 bp, Homo sapien; identical to SEQ ID NO: 139609

SEQ ID NO: 139612 - DNA, 33 bp, Homo sapien; identical to SEQ ID NO: 139610

SEQ ID NO: 139613 - DNA, 33 bp, Homo sapien
atatataaagccataaatcagattttgaagata

SEQ ID NO: 139614 - DNA, 33 bp, Homo sapien
atatataaagccataactcagattttgaagata

SEQ ID NO: 139615 - DNA, 33 bp, Homo sapien
gtagaacccatattgccaaataaaaacatacct

SEQ ID NO: 139616 - DNA, 33 bp, Homo sapien
gtagaacccatattgctaaataaaaacatacct

SEQ ID NO: 139617 - DNA, 33 bp, Homo sapien
aatgagactacacattaaatcatcttagcttgc

SEQ ID NO: 139618 - DNA, 33 bp, Homo sapien
aatgagactacacatttaatcatcttagcttgc

SEQ ID NO: 139619 - DNA, 33 bp, Homo sapien
ccatattgggtttgtacgattgcttttgctcac

SEQ ID NO: 139620 - DNA, 33 bp, Homo sapien
ccatattgggtttgtatgattgcttttgctcac

SEQ ID NO: 139621 - DNA, 33 bp, Homo sapien
attaccaattagaaaacgatttgaacttgagat

SEQ ID NO: 139622 - DNA, 33 bp, Homo sapien
attaccaattagaaaatgatttgaacttgagat

SEQ ID NO: 139623 - DNA, 33 bp, Homo sapien
gtatagtagcaggataactcaagcattagtgtg

SEQ ID NO: 139624 - DNA, 33 bp, Homo sapien
gtatagtagcaggatagctcaagcattagtgtg

SEQ ID NO: 139625 - DNA, 33 bp, Homo sapien
gatttaggcagtatcagtgagaagagtctgaag

SEQ ID NO: 139626 - DNA, 33 bp, Homo sapien
gatttaggcagtatcattgagaagagtctgaag

SEQ ID NO: 139627 - DNA, 33 bp, Homo sapien
tagccaaagagaaacaactgagaattttccaga

SEQ ID NO: 139628 - DNA, 33 bp, Homo sapien
tagccaaagagaaacagctgagaattttccaga

SEQ ID NO: 139629 - DNA, 33 bp, Homo sapien
tttcacactggaagaacagtcagcaaggtggca

SEQ ID NO: 139630 - DNA, 33 bp, Homo sapien
tttcacactggaagaagagtcagcaaggtggca

SEQ ID NO: 139631 - DNA, 33 bp, Homo sapien
ctcttacccttgcttcaaatatcctttccacct

SEQ ID NO: 139632 - DNA, 33 bp, Homo sapien
ctcttacccttgcttcgaatatcctttccacct

SEQ ID NO: 139633 - DNA, 33 bp, Homo sapien
cggatgtctgccgcgccgcaggtgctcagcaca

SEQ ID NO: 139634 - DNA, 33 bp, Homo sapien
cggatgtctgccgcgctgcaggtgctcagcaca

SEQ ID NO: 139635 - DNA, 33 bp, Homo sapien
tcagataagcggcaaaattacaagccctggcac

SEQ ID NO: 139636 - DNA, 33 bp, Homo sapien
tcagataagcggcaaacttacaagccctggcac

SEQ ID NO: 139637 - DNA, 33 bp, Homo sapien
cctggatcgttcaagccgattacaggaaacggt

SEQ ID NO: 139638 - DNA, 33 bp, Homo sapien
cctggatcgttcaagctgattacaggaaacggt

SEQ ID NO: 139639 - DNA, 33 bp, Homo sapien
aaaacaaaaagtctcaaagagctctgggcaggc

SEQ ID NO: 139640 - DNA, 33 bp, Homo sapien
aaaacaaaaagtctcagagagctctgggcaggc

SEQ ID NO: 139641 - DNA, 33 bp, Homo sapien
tgatagcaactcagaaaggaagccgggtccaag

SEQ ID NO: 139642 - DNA, 33 bp, Homo sapien
tgatagcaactcagaagggaagccgggtccaag

SEQ ID NO: 139643 - DNA, 33 bp, Homo sapien
ccagccaattcagaaaataacatctggaaaaga

SEQ ID NO: 139644 - DNA, 33 bp, Homo sapien
ccagccaattcagaaactaacatctggaaaaga

SEQ ID NO: 139645 - DNA, 33 bp, Homo sapien
cagggaagaatgtagacagttaaatagctaaac

SEQ ID NO: 139646 - DNA, 33 bp, Homo sapien
cagggaagaatgtagagagttaaatagctaaac

SEQ ID NO: 139647 - DNA, 33 bp, Homo sapien
tgagtccatctttgtacagttaatcagaaatgt

SEQ ID NO: 139648 - DNA, 33 bp, Homo sapien
tgagtccatctttgtatagttaatcagaaatgt

SEQ ID NO: 139649 - DNA, 33 bp, Homo sapien
aaaaggacctctctcaactgctacatttccatg

SEQ ID NO: 139650 - DNA, 33 bp, Homo sapien
aaaaggacctctctcatctgctacatttccatg

SEQ ID NO: 139651 - DNA, 33 bp, Homo sapien
tccgtaggtgtgtgagaaagcctaaaggtccgc

SEQ ID NO: 139652 - DNA, 33 bp, Homo sapien
tccgtaggtgtgtgaggaagcctaaaggtccgc

SEQ ID NO: 139653 - DNA, 33 bp, Homo sapien
gctgccacctgtccacactgtttatctggctga

SEQ ID NO: 139654 - DNA, 33 bp, Homo sapien
gctgccacctgtccacgctgtttatctggctga

SEQ ID NO: 139655 - DNA, 33 bp, Homo sapien
ccctccgcactctgcaacttttgctgggctgat

SEQ ID NO: 139656 - DNA, 33 bp, Homo sapien
ccctccgcactctgcagcttttgctgggctgat

SEQ ID NO: 139657 - DNA, 33 bp, Homo sapien
agcttggcagaacttaaatacctgggaccagct

SEQ ID NO: 139658 - DNA, 33 bp, Homo sapien
agcttggcagaacttacatacctgggaccagct

SEQ ID NO: 139659 - DNA, 33 bp, Homo sapien
cagtgtgtcaccttccactcagttacccactcc

SEQ ID NO: 139660 - DNA, 33 bp, Homo sapien
cagtgtgtcaccttccgctcagttacccactcc

SEQ ID NO: 139661 - DNA, 33 bp, Homo sapien
atgagcagaatgggcccgcagagtggagtgggt

SEQ ID NO: 139662 - DNA, 33 bp, Homo sapien
atgagcagaatgggcctgcagagtggagtgggt

SEQ ID NO: 139663 - DNA, 33 bp, Homo sapien
ttgacggttttgaagaacacaggctgtggaaca

SEQ ID NO: 139664 - DNA, 33 bp, Homo sapien
ttgacggttttgaagagcacaggctgtggaaca

SEQ ID NO: 139665 - DNA, 33 bp, Homo sapien
acggggttaaacttctcaaacaacaagcaactt

SEQ ID NO: 139666 - DNA, 33 bp, Homo sapien
acggggttaaacttctgaaacaacaagcaactt

SEQ ID NO: 139667 - DNA, 33 bp, Homo sapien
actttcaggcagcacaaaaaaagctccagcagg

SEQ ID NO: 139668 - DNA, 33 bp, Homo sapien
actttcaggcagcacagaaaaagctccagcagg

SEQ ID NO: 139669 - DNA, 33 bp, Homo sapien
tggtctgaggcagtttaaaaattgagagacagt

SEQ ID NO: 139670 - DNA, 33 bp, Homo sapien
tggtctgaggcagtttcaaaattgagagacagt

SEQ ID NO: 139671 - DNA, 33 bp, Homo sapien
attgatacctactatacggcagacattattcta

SEQ ID NO: 139672 - DNA, 33 bp, Homo sapien
attgatacctactatatggcagacattattcta

SEQ ID NO: 139673 - DNA, 33 bp, Homo sapien
ttagttcctctttagaccctggatgtggagaag

SEQ ID NO: 139674 - DNA, 33 bp, Homo sapien
ttagttcctctttagatcctggatgtggagaag

SEQ ID NO: 139675 - DNA, 33 bp, Homo sapien
tactgtttgaaattcaaaagcacttgtcaagca

SEQ ID NO: 139676 - DNA, 33 bp, Homo sapien
tactgtttgaaattcacaagcacttgtcaagca

SEQ ID NO: 139677 - DNA, 33 bp, Homo sapien
aaattccaccatacatcacaaggactaaaatta

SEQ ID NO: 139678 - DNA, 33 bp, Homo sapien
aaattccaccatacattacaaggactaaaatta

SEQ ID NO: 139679 - DNA, 33 bp, Homo sapien
gtgaatattagcctaacgaaaactggtgtcact

SEQ ID NO: 139680 - DNA, 33 bp, Homo sapien
gtgaatattagcctaatgaaaactggtgtcact

SEQ ID NO: 139681 - DNA, 33 bp, Homo sapien
gaggcttcgctgaataccttttactactattta

SEQ ID NO: 139682 - DNA, 33 bp, Homo sapien
gaggcttcgctgaatagcttttactactattta

SEQ ID NO: 139683 - DNA, 33 bp, Homo sapien
cttctgcatttatgaaacgcttaaagcatatct

SEQ ID NO: 139684 - DNA, 33 bp, Homo sapien
cttctgcatttatgaagcgcttaaagcatatct

SEQ ID NO: 139685 - DNA, 33 bp, Homo sapien
aaatgaaagttgatcaatacttggggaataaat

SEQ ID NO: 139686 - DNA, 33 bp, Homo sapien
aaatgaaagttgatcagtacttggggaataaat

SEQ ID NO: 139687 - DNA, 33 bp, Homo sapien
gatggagcatgaagacggagaagagagttaagg

SEQ ID NO: 139688 - DNA, 33 bp, Homo sapien
gatggagcatgaagactgagaagagagttaagg

SEQ ID NO: 139689 - DNA, 33 bp, Homo sapien
tggcctgaccatttcacaccctctccctgttca

SEQ ID NO: 139690 - DNA, 33 bp, Homo sapien
tggcctgaccatttcataccctctccctgttca

SEQ ID NO: 139691 - DNA, 33 bp, Homo sapien
gaccagcttgcttaaccgatgttgggaagttgt

SEQ ID NO: 139692 - DNA, 33 bp, Homo sapien
gaccagcttgcttaactgatgttgggaagttgt

SEQ ID NO: 139693 - DNA, 33 bp, Homo sapien
gaccaatcaagtttcaaatgaaacccaatcaga

SEQ ID NO: 139694 - DNA, 33 bp, Homo sapien
gaccaatcaagtttcagatgaaacccaatcaga

SEQ ID NO: 139695 - DNA, 33 bp, Homo sapien
tcagttttgctgacaccgatgatgagccatgaa

SEQ ID NO: 139696 - DNA, 33 bp, Homo sapien
tcagttttgctgacactgatgatgagccatgaa

SEQ ID NO: 139697 - DNA, 33 bp, Homo sapien
ggcaggcgatacccccacaaatctaatacctag

SEQ ID NO: 139698 - DNA, 33 bp, Homo sapien
ggcaggcgatacccccgcaaatctaatacctag

SEQ ID NO: 139699 - DNA, 33 bp, Homo sapien
tcccaccaggatacagcacttacactgtggaga

SEQ ID NO: 139700 - DNA, 33 bp, Homo sapien
tcccaccaggatacaggacttacactgtggaga

SEQ ID NO: 139701 - DNA, 33 bp, Homo sapien
agcctagtcaactatcaactgttagcctcagtg

SEQ ID NO: 139702 - DNA, 33 bp, Homo sapien
agcctagtcaactatcgactgttagcctcagtg

SEQ ID NO: 139703 - DNA, 33 bp, Homo sapien
gttagaaaattgccaaaaaagtaataactgatt

SEQ ID NO: 139704 - DNA, 33 bp, Homo sapien
gttagaaaattgccaacaaagtaataactgatt

SEQ ID NO: 139705 - DNA, 33 bp, Homo sapien
tacccaatcttgcagagagtaaatgaccagact

SEQ ID NO: 139706 - DNA, 33 bp, Homo sapien
tacccaatcttgcagatagtaaatgaccagact

SEQ ID NO: 139707 - DNA, 33 bp, Homo sapien
ggaagagtaactcaaacaggtggcttagaatgg

SEQ ID NO: 139708 - DNA, 33 bp, Homo sapien
ggaagagtaactcaaagaggtggcttagaatgg

SEQ ID NO: 139709 - DNA, 33 bp, Homo sapien
agtaaagaattcggaacggactggaaataaaaa

SEQ ID NO: 139710 - DNA, 33 bp, Homo sapien
agtaaagaattcggaatggactggaaataaaaa

SEQ ID NO: 139711 - DNA, 33 bp, Homo sapien
tgtctgggtgcacgaaaagctggtaaatacagt

SEQ ID NO: 139712 - DNA, 33 bp, Homo sapien
tgtctgggtgcacgaagagctggtaaatacagt

SEQ ID NO: 139713 - DNA, 33 bp, Homo sapien
cgcacaggagccgaaactacgggtagctagtca

SEQ ID NO: 139714 - DNA, 33 bp, Homo sapien
cgcacaggagccgaaattacgggtagctagtca

SEQ ID NO: 139715 - DNA, 33 bp, Homo sapien
ctatagtcaagcatacaatgaaatatcttcctc

SEQ ID NO: 139716 - DNA, 33 bp, Homo sapien
ctatagtcaagcatacgatgaaatatcttcctc

SEQ ID NO: 139717 - DNA, 33 bp, Homo sapien
ttaaggaatgattagcaacttcttaggaatagt

SEQ ID NO: 139718 - DNA, 33 bp, Homo sapien
ttaaggaatgattagctacttcttaggaatagt

SEQ ID NO: 139719 - DNA, 33 bp, Homo sapien
tggctgtattcactcaacttatgtttcctagta

SEQ ID NO: 139720 - DNA, 33 bp, Homo sapien
tggctgtattcactcaccttatgtttcctagta

SEQ ID NO: 139721 - DNA, 33 bp, Homo sapien
ctgctactgagaaacaaatgaaagagctttgca

SEQ ID NO: 139722 - DNA, 33 bp, Homo sapien
ctgctactgagaaacagatgaaagagctttgca

SEQ ID NO: 139723 - DNA, 33 bp, Homo sapien
gctgaggcactccgtacatttgacattgaaaag

SEQ ID NO: 139724 - DNA, 33 bp, Homo sapien
gctgaggcactccgtatatttgacattgaaaag

SEQ ID NO: 139725 - DNA, 33 bp, Homo sapien
gcattttaaagactcaatctgagaggttttctt

SEQ ID NO: 139726 - DNA, 33 bp, Homo sapien
gcattttaaagactcactctgagaggttttctt

SEQ ID NO: 139727 - DNA, 33 bp, Homo sapien
gagctgtccttaaaaactagatgaatactgatt

SEQ ID NO: 139728 - DNA, 33 bp, Homo sapien
gagctgtccttaaaaattagatgaatactgatt

SEQ ID NO: 139729 - DNA, 33 bp, Homo sapien
ctttgaaagaatcagacacaaaatgctgagctc

SEQ ID NO: 139730 - DNA, 33 bp, Homo sapien
ctttgaaagaatcagagacaaaatgctgagctc

SEQ ID NO: 139731 - DNA, 33 bp, Homo sapien
ctttctttggtgctgacagaacatcatcaacat

SEQ ID NO: 139732 - DNA, 33 bp, Homo sapien
ctttctttggtgctgagagaacatcatcaacat

SEQ ID NO: 139733 - DNA, 33 bp, Homo sapien
ttttcactaggcaaaaatatgatcttaatgtga

SEQ ID NO: 139734 - DNA, 33 bp, Homo sapien
ttttcactaggcaaaagtatgatcttaatgtga

SEQ ID NO: 139735 - DNA, 33 bp, Homo sapien
gccaagtcaatatagaccatagagggaagggcc

SEQ ID NO: 139736 - DNA, 33 bp, Homo sapien
gccaagtcaatatagatcatagagggaagggcc

SEQ ID NO: 139737 - DNA, 33 bp, Homo sapien
aatagaaaaaactcgaaactccatagacctata

SEQ ID NO: 139738 - DNA, 33 bp, Homo sapien
aatagaaaaaactcgagactccatagacctata

SEQ ID NO: 139739 - DNA, 33 bp, Homo sapien
tttagaaggagatatacgttgcaggtgttacag

SEQ ID NO: 139740 - DNA, 33 bp, Homo sapien
tttagaaggagatatatgttgcaggtgttacag

SEQ ID NO: 139741 - DNA, 33 bp, Homo sapien
gtgttttctgattcagccaatagtcctactgta

SEQ ID NO: 139742 - DNA, 33 bp, Homo sapien
gtgttttctgattcaggcaatagtcctactgta

SEQ ID NO: 139743 - DNA, 33 bp, Homo sapien
taatctttcaatcataagaagtcagactctaaa

SEQ ID NO: 139744 - DNA, 33 bp, Homo sapien
taatctttcaatcataggaagtcagactctaaa

SEQ ID NO: 139745 - DNA, 33 bp, Homo sapien
tcttttcattccctgcactggtgcctgctttgg

SEQ ID NO: 139746 - DNA, 33 bp, Homo sapien
tcttttcattccctgcgctggtgcctgctttgg

SEQ ID NO: 139747 - DNA, 33 bp, Homo sapien
caaacacgtaaactaacggaacagaatagagaa

SEQ ID NO: 139748 - DNA, 33 bp, Homo sapien
caaacacgtaaactaatggaacagaatagagaa

SEQ ID NO: 139749 - DNA, 33 bp, Homo sapien
gcctcttttctaaggacattactcccatttatg

SEQ ID NO: 139750 - DNA, 33 bp, Homo sapien
gcctcttttctaaggatattactcccatttatg

SEQ ID NO: 139751 - DNA, 33 bp, Homo sapien
tggcaaacagtcaaaacagggagccacgctgct

SEQ ID NO: 139752 - DNA, 33 bp, Homo sapien
tggcaaacagtcaaaatagggagccacgctgct

SEQ ID NO: 139753 - DNA, 33 bp, Homo sapien
gtcagcatgaaacaaccgagcttgctgggacca

SEQ ID NO: 139754 - DNA, 33 bp, Homo sapien
gtcagcatgaaacaactgagcttgctgggacca

SEQ ID NO: 139755 - DNA, 33 bp, Homo sapien
tggaactggtcatgtcacaagcaaatatgtcaa

SEQ ID NO: 139756 - DNA, 33 bp, Homo sapien
tggaactggtcatgtcgcaagcaaatatgtcaa

SEQ ID NO: 139757 - DNA, 33 bp, Homo sapien
ttctctgtactgttccactggtctatgtggata

SEQ ID NO: 139758 - DNA, 33 bp, Homo sapien
ttctctgtactgttcctctggtctatgtggata

SEQ ID NO: 139759 - DNA, 33 bp, Homo sapien
cttcaggcagctcagaaataaaactctaatgaa

SEQ ID NO: 139760 - DNA, 33 bp, Homo sapien
cttcaggcagctcagatataaaactctaatgaa

SEQ ID NO: 139761 - DNA, 33 bp, Homo sapien
tgttctgcagagagatcacaatttaacacctag

SEQ ID NO: 139762 - DNA, 33 bp, Homo sapien
tgttctgcagagagattacaatttaacacctag

SEQ ID NO: 139763 - DNA, 33 bp, Homo sapien
tcatagccaaggtcacactgtcaatcaaagaca

SEQ ID NO: 139764 - DNA, 33 bp, Homo sapien
tcatagccaaggtcacgctgtcaatcaaagaca

SEQ ID NO: 139765 - DNA, 33 bp, Homo sapien
aaggctgagtcaggtcagaagggcatcagtgtt

SEQ ID NO: 139766 - DNA, 33 bp, Homo sapien
aaggctgagtcaggtcggaagggcatcagtgtt

SEQ ID NO: 139767 - DNA, 33 bp, Homo sapien
aactggtgtccttacaagaagcgagaagtttga

SEQ ID NO: 139768 - DNA, 33 bp, Homo sapien
aactggtgtccttacaggaagcgagaagtttga

SEQ ID NO: 139769 - DNA, 33 bp, Homo sapien
gacaagtgcttagggagcatggggggagtagca

SEQ ID NO: 139770 - DNA, 33 bp, Homo sapien
gacaagtgcttagggatcatggggggagtagca

SEQ ID NO: 139771 - DNA, 33 bp, Homo sapien
cagagagtgtaggttacgtggagaatagacaac

SEQ ID NO: 139772 - DNA, 33 bp, Homo sapien
cagagagtgtaggttatgtggagaatagacaac

SEQ ID NO: 139773 - DNA, 33 bp, Homo sapien
gcggaagagggggtcagaggtcataacgtctct

SEQ ID NO: 139774 - DNA, 33 bp, Homo sapien
gcggaagagggggtcataggtcataacgtctct

SEQ ID NO: 139775 - DNA, 33 bp, Homo sapien
cagaaactgaatgcaaatctgaaagctacactt

SEQ ID NO: 139776 - DNA, 33 bp, Homo sapien
cagaaactgaatgcaagtctgaaagctacactt

SEQ ID NO: 139777 - DNA, 33 bp, Homo sapien
cacatgaatgaagaaacgaaatgttatcagcat

SEQ ID NO: 139778 - DNA, 33 bp, Homo sapien
cacatgaatgaagaaatgaaatgttatcagcat

SEQ ID NO: 139779 - DNA, 33 bp, Homo sapien
ctccaccagcacaaaagagagaaatcatcattt

SEQ ID NO: 139780 - DNA, 33 bp, Homo sapien
ctccaccagcacaaaatagagaaatcatcattt

SEQ ID NO: 139781 - DNA, 33 bp, Homo sapien
catctaggcaaactcactaggttggatgctcca

SEQ ID NO: 139782 - DNA, 33 bp, Homo sapien
catctaggcaaactcattaggttggatgctcca

SEQ ID NO: 139783 - DNA, 33 bp, Homo sapien
gccagggacaaagaaaacacacagtggcttcca

SEQ ID NO: 139784 - DNA, 33 bp, Homo sapien
gccagggacaaagaaatcacacagtggcttcca

SEQ ID NO: 139785 - DNA, 33 bp, Homo sapien
aggttctggatgttgaagaatgagaggggaagt

SEQ ID NO: 139786 - DNA, 33 bp, Homo sapien
aggttctggatgttgaggaatgagaggggaagt

SEQ ID NO: 139787 - DNA, 33 bp, Homo sapien
tttgattcaaagggtaaacgtgcaaatttgtca

SEQ ID NO: 139788 - DNA, 33 bp, Homo sapien
tttgattcaaagggtacacgtgcaaatttgtca

SEQ ID NO: 139789 - DNA, 33 bp, Homo sapien
taaggattattttgagacaaaggcaactgagaa

SEQ ID NO: 139790 - DNA, 33 bp, Homo sapien
taaggattattttgagccaaaggcaactgagaa

SEQ ID NO: 139791 - DNA, 33 bp, Homo sapien
ataatccttatattaaagtggcatattttgggg

SEQ ID NO: 139792 - DNA, 33 bp, Homo sapien
ataatccttatattaaggtggcatattttgggg

SEQ ID NO: 139793 - DNA, 33 bp, Homo sapien
agatcttcttaaaaagcaactgtctgggtgatg

SEQ ID NO: 139794 - DNA, 33 bp, Homo sapien
agatcttcttaaaaaggaactgtctgggtgatg

SEQ ID NO: 139795 - DNA, 33 bp, Homo sapien
aacggcagatagactcaacaccaaaaatcaatg

SEQ ID NO: 139796 - DNA, 33 bp, Homo sapien
aacggcagatagactcgacaccaaaaatcaatg

SEQ ID NO: 139797 - DNA, 33 bp, Homo sapien
tcaacatcttctgtgccatctgagctgttttta

SEQ ID NO: 139798 - DNA, 33 bp, Homo sapien
tcaacatcttctgtgctatctgagctgttttta

SEQ ID NO: 139799 - DNA, 33 bp, Homo sapien
agaaaatatttacaaacggtgcgtctgaaatag

SEQ ID NO: 139800 - DNA, 33 bp, Homo sapien
agaaaatatttacaaatggtgcgtctgaaatag

SEQ ID NO: 139801 - DNA, 33 bp, Homo sapien
ttctccacaaacttaccggcatctgtcattttt

SEQ ID NO: 139802 - DNA, 33 bp, Homo sapien
ttctccacaaacttactggcatctgtcattttt

SEQ ID NO: 139803 - DNA, 33 bp, Homo sapien
tccttctctgtaggaacgtgctaacagtatgta

SEQ ID NO: 139804 - DNA, 33 bp, Homo sapien
tccttctctgtaggaatgtgctaacagtatgta

SEQ ID NO: 139805 - DNA, 33 bp, Homo sapien
cttttctaaaatcaaaactatcgttgtaggtct

SEQ ID NO: 139806 - DNA, 33 bp, Homo sapien
cttttctaaaatcaaatctatcgttgtaggtct

SEQ ID NO: 139807 - DNA, 33 bp, Homo sapien
tttaatgtgaataaagcacagtttgatgagttt

SEQ ID NO: 139808 - DNA, 33 bp, Homo sapien
tttaatgtgaataaagtacagtttgatgagttt

SEQ ID NO: 139809 - DNA, 33 bp, Homo sapien
actttgaagtgcataacgctgtgttgttaacta

SEQ ID NO: 139810 - DNA, 33 bp, Homo sapien
actttgaagtgcataatgctgtgttgttaacta

SEQ ID NO: 139811 - DNA, 33 bp, Homo sapien
catcaaaaaaacaaaaagtgaatgttggcaaga

SEQ ID NO: 139812 - DNA, 33 bp, Homo sapien
catcaaaaaaacaaaaggtgaatgttggcaaga

SEQ ID NO: 139813 - DNA, 33 bp, Homo sapien
ggatatctgactccaaactagccaccgtgcttc

SEQ ID NO: 139814 - DNA, 33 bp, Homo sapien
ggatatctgactccaatctagccaccgtgcttc

SEQ ID NO: 139815 - DNA, 33 bp, Homo sapien
agctgtcccagcttcactaaacatggacacctg

SEQ ID NO: 139816 - DNA, 33 bp, Homo sapien
agctgtcccagcttcagtaaacatggacacctg

SEQ ID NO: 139817 - DNA, 33 bp, Homo sapien
ggctcaggacacaacaccccaaaatgtgacaat

SEQ ID NO: 139818 - DNA, 33 bp, Homo sapien
ggctcaggacacaacatcccaaaatgtgacaat

SEQ ID NO: 139819 - DNA, 33 bp, Homo sapien
tgttgcccctcctaccactttctgtagcttagg

SEQ ID NO: 139820 - DNA, 33 bp, Homo sapien
tgttgcccctcctaccgctttctgtagcttagg

SEQ ID NO: 139821 - DNA, 33 bp, Homo sapien
caacatgaactggatccaaatggaattctctct

SEQ ID NO: 139822 - DNA, 33 bp, Homo sapien
caacatgaactggatctaaatggaattctctct

SEQ ID NO: 139823 - DNA, 33 bp, Homo sapien
aagaaaggagaagatgacaatgcacttaacagt

SEQ ID NO: 139824 - DNA, 33 bp, Homo sapien
aagaaaggagaagatggcaatgcacttaacagt

SEQ ID NO: 139825 - DNA, 33 bp, Homo sapien
ttctgattcaaacggaaagtgtagcttcttggc

SEQ ID NO: 139826 - DNA, 33 bp, Homo sapien
ttctgattcaaacggacagtgtagcttcttggc

SEQ ID NO: 139827 - DNA, 33 bp, Homo sapien
ctcccaagactccagcaacgtgctcatattttt

SEQ ID NO: 139828 - DNA, 33 bp, Homo sapien
ctcccaagactccagcgacgtgctcatattttt

SEQ ID NO: 139829 - DNA, 33 bp, Homo sapien
aactcattaatggatgaaaaaaaggtggcatat

SEQ ID NO: 139830 - DNA, 33 bp, Homo sapien
aactcattaatggatggaaaaaaggtggcatat

SEQ ID NO: 139831 - DNA, 33 bp, Homo sapien
tttattgaactaatggaccatacatttgatata

SEQ ID NO: 139832 - DNA, 33 bp, Homo sapien
tttattgaactaatgggccatacatttgatata

SEQ ID NO: 139833 - DNA, 33 bp, Homo sapien
tgctgcaactactaaactttaccattgcccgca

SEQ ID NO: 139834 - DNA, 33 bp, Homo sapien
tgctgcaactactaaagtttaccattgcccgca

SEQ ID NO: 139835 - DNA, 33 bp, Homo sapien
gaccacagactcaagaaggacataattggattt

SEQ ID NO: 139836 - DNA, 33 bp, Homo sapien
gaccacagactcaagacggacataattggattt

SEQ ID NO: 139837 - DNA, 33 bp, Homo sapien
tgctgagtgatgtgtacacaaatgatgaactgg

SEQ ID NO: 139838 - DNA, 33 bp, Homo sapien
tgctgagtgatgtgtatacaaatgatgaactgg

SEQ ID NO: 139839 - DNA, 33 bp, Homo sapien
ttgctggtgccctatacgatgtgtcagatgctg

SEQ ID NO: 139840 - DNA, 33 bp, Homo sapien
ttgctggtgccctatatgatgtgtcagatgctg

SEQ ID NO: 139841 - DNA, 33 bp, Homo sapien
tgtcactgtgtccgaccctcccaactgcacacc

SEQ ID NO: 139842 - DNA, 33 bp, Homo sapien
tgtcactgtgtccgactctcccaactgcacacc

SEQ ID NO: 139843 - DNA, 33 bp, Homo sapien
tattcttgtctatttgaagagcttattttttga

SEQ ID NO: 139844 - DNA, 33 bp, Homo sapien
tattcttgtctatttggagagcttattttttga

SEQ ID NO: 139845 - DNA, 33 bp, Homo sapien
gccctgtgcctgctcccaaaatattagaagcaa

SEQ ID NO: 139846 - DNA, 33 bp, Homo sapien
gccctgtgcctgctcctaaaatattagaagcaa

SEQ ID NO: 139847 - DNA, 33 bp, Homo sapien
gggaagagcaggatagcaatccaaggcgctaaa

SEQ ID NO: 139848 - DNA, 33 bp, Homo sapien
gggaagagcaggataggaatccaaggcgctaaa

SEQ ID NO: 139849 - DNA, 33 bp, Homo sapien
tctatttcaataggccaagaaaaggaagcataa

SEQ ID NO: 139850 - DNA, 33 bp, Homo sapien
tctatttcaataggccgagaaaaggaagcataa

SEQ ID NO: 139851 - DNA, 33 bp, Homo sapien
tttcattttcttgctaaacagtggctagtcaca

SEQ ID NO: 139852 - DNA, 33 bp, Homo sapien
tttcattttcttgctagacagtggctagtcaca

SEQ ID NO: 139853 - DNA, 33 bp, Homo sapien
agcattgtcaactccaagtagatcacgcccatc

SEQ ID NO: 139854 - DNA, 33 bp, Homo sapien
agcattgtcaactccaggtagatcacgcccatc

SEQ ID NO: 139855 - DNA, 33 bp, Homo sapien
cttgatttagactcacaaagaattaaagggaaa

SEQ ID NO: 139856 - DNA, 33 bp, Homo sapien
cttgatttagactcacgaagaattaaagggaaa

SEQ ID NO: 139857 - DNA, 33 bp, Homo sapien
tcagtcttttggtcaaacaattttataaagtga

SEQ ID NO: 139858 - DNA, 33 bp, Homo sapien
tcagtcttttggtcaagcaattttataaagtga

SEQ ID NO: 139859 - DNA, 33 bp, Homo sapien
ctttgctgttatggaaacttggttctctcatgg

SEQ ID NO: 139860 - DNA, 33 bp, Homo sapien
ctttgctgttatggaaccttggttctctcatgg

SEQ ID NO: 139861 - DNA, 33 bp, Homo sapien
tgagcatgaaggttcccgagtatgagattttat

SEQ ID NO: 139862 - DNA, 33 bp, Homo sapien
tgagcatgaaggttcctgagtatgagattttat

SEQ ID NO: 139863 - DNA, 33 bp, Homo sapien
gagagggttctggaagaagattgggcaagaagt

SEQ ID NO: 139864 - DNA, 33 bp, Homo sapien
gagagggttctggaaggagattgggcaagaagt

SEQ ID NO: 139865 - DNA, 33 bp, Homo sapien
ggcataatgtggcagccgaatttctgaagatac

SEQ ID NO: 139866 - DNA, 33 bp, Homo sapien
ggcataatgtggcagctgaatttctgaagatac

SEQ ID NO: 139867 - DNA, 33 bp, Homo sapien
aaccagtcctcaaaccccatataatggttcttt

SEQ ID NO: 139868 - DNA, 33 bp, Homo sapien
aaccagtcctcaaacctcatataatggttcttt

SEQ ID NO: 139869 - DNA, 33 bp, Homo sapien
aatctctctcccttgacccttgagatggcttca

SEQ ID NO: 139870 - DNA, 33 bp, Homo sapien
aatctctctcccttgagccttgagatggcttca

SEQ ID NO: 139871 - DNA, 33 bp, Homo sapien
ctggctcctgatttcaatcacctaagaagtttt

SEQ ID NO: 139872 - DNA, 33 bp, Homo sapien
ctggctcctgatttcagtcacctaagaagtttt

SEQ ID NO: 139873 - DNA, 33 bp, Homo sapien
atttttagattcacagaaatattgtgaagagct

SEQ ID NO: 139874 - DNA, 33 bp, Homo sapien
atttttagattcacagtaatattgtgaagagct

SEQ ID NO: 139875 - DNA, 33 bp, Homo sapien
actacctgcaccaagtaacaaatgttaatatca

SEQ ID NO: 139876 - DNA, 33 bp, Homo sapien
actacctgcaccaagtgacaaatgttaatatca

SEQ ID NO: 139877 - DNA, 33 bp, Homo sapien
aagaaagtaactttacaatgaagacctcaaaca

SEQ ID NO: 139878 - DNA, 33 bp, Homo sapien
aagaaagtaactttacgatgaagacctcaaaca

SEQ ID NO: 139879 - DNA, 33 bp, Homo sapien
ttctccttaagtttgaactgcttatagcaactt

SEQ ID NO: 139880 - DNA, 33 bp, Homo sapien
ttctccttaagtttgagctgcttatagcaactt

SEQ ID NO: 139881 - DNA, 33 bp, Homo sapien
ttgaagagtttgaggcaaatttgtgtaatcaga

SEQ ID NO: 139882 - DNA, 33 bp, Homo sapien
ttgaagagtttgaggctaatttgtgtaatcaga

SEQ ID NO: 139883 - DNA, 33 bp, Homo sapien
tatgggcatgagctaccatgcccagtccaggac

SEQ ID NO: 139884 - DNA, 33 bp, Homo sapien
tatgggcatgagctacgatgcccagtccaggac

SEQ ID NO: 139885 - DNA, 33 bp, Homo sapien
gatgagaaagcctgatcaataggatctagaatg

SEQ ID NO: 139886 - DNA, 33 bp, Homo sapien
gatgagaaagcctgattaataggatctagaatg

SEQ ID NO: 139887 - DNA, 33 bp, Homo sapien
acgcctcaaacacccacggagtctgtattcttg

SEQ ID NO: 139888 - DNA, 33 bp, Homo sapien
acgcctcaaacacccatggagtctgtattcttg

SEQ ID NO: 139889 - DNA, 33 bp, Homo sapien
tgttccgaagtttaccacattccccaggcaaaa

SEQ ID NO: 139890 - DNA, 33 bp, Homo sapien
tgttccgaagtttaccgcattccccaggcaaaa

SEQ ID NO: 139891 - DNA, 33 bp, Homo sapien
ctggagttcaatcccaatgcagctgttaggagt

SEQ ID NO: 139892 - DNA, 33 bp, Homo sapien
ctggagttcaatcccagtgcagctgttaggagt

SEQ ID NO: 139893 - DNA, 33 bp, Homo sapien
gattcattctactttacgaatctgactactata

SEQ ID NO: 139894 - DNA, 33 bp, Homo sapien
gattcattctactttatgaatctgactactata

SEQ ID NO: 139895 - DNA, 33 bp, Homo sapien
gggtcttattaggagccacatacagtggagaga

SEQ ID NO: 139896 - DNA, 33 bp, Homo sapien
gggtcttattaggagctacatacagtggagaga

SEQ ID NO: 139897 - DNA, 33 bp, Homo sapien
tcgcatgaattggttacggcaaagacgtttctt

SEQ ID NO: 139898 - DNA, 33 bp, Homo sapien
tcgcatgaattggttatggcaaagacgtttctt

SEQ ID NO: 139899 - DNA, 33 bp, Homo sapien
ctttgctgtatgtattcaaatgatcgtataatt

SEQ ID NO: 139900 - DNA, 33 bp, Homo sapien
ctttgctgtatgtattgaaatgatcgtataatt

SEQ ID NO: 139901 - DNA, 33 bp, Homo sapien
ttatgtgagcatccaaaagtctgttttctcttc

SEQ ID NO: 139902 - DNA, 33 bp, Homo sapien
ttatgtgagcatccaacagtctgttttctcttc

SEQ ID NO: 139903 - DNA, 33 bp, Homo sapien
tcagtgtcccaaatgaagttaagtccaggtcaa

SEQ ID NO: 139904 - DNA, 33 bp, Homo sapien
tcagtgtcccaaatgaggttaagtccaggtcaa

SEQ ID NO: 139905 - DNA, 33 bp, Homo sapien
aaagcaacacagagacaataaaccacaaaaggt

SEQ ID NO: 139906 - DNA, 33 bp, Homo sapien
aaagcaacacagagacgataaaccacaaaaggt

SEQ ID NO: 139907 - DNA, 33 bp, Homo sapien
gaaggcaacagggagacggagaaagtggagttt

SEQ ID NO: 139908 - DNA, 33 bp, Homo sapien
gaaggcaacagggagatggagaaagtggagttt

SEQ ID NO: 139909 - DNA, 33 bp, Homo sapien
ctgaagatgccttaacagaacctccattcccaa

SEQ ID NO: 139910 - DNA, 33 bp, Homo sapien
ctgaagatgccttaacggaacctccattcccaa

SEQ ID NO: 139911 - DNA, 33 bp, Homo sapien
tgtttctgccagaagcaacacggctccagctaa

SEQ ID NO: 139912 - DNA, 33 bp, Homo sapien
tgtttctgccagaagcgacacggctccagctaa

SEQ ID NO: 139913 - DNA, 33 bp, Homo sapien
ctaatctagaggaaggccctgactttaattcta

SEQ ID NO: 139914 - DNA, 33 bp, Homo sapien
ctaatctagaggaaggtcctgactttaattcta

SEQ ID NO: 139915 - DNA, 33 bp, Homo sapien
atgcttgggcaatgacaacaggcgttttggacc

SEQ ID NO: 139916 - DNA, 33 bp, Homo sapien
atgcttgggcaatgaccacaggcgttttggacc

SEQ ID NO: 139917 - DNA, 33 bp, Homo sapien
tattttcttttggatacagagtcagtaatggaa

SEQ ID NO: 139918 - DNA, 33 bp, Homo sapien
tattttcttttggatatagagtcagtaatggaa

SEQ ID NO: 139919 - DNA, 33 bp, Homo sapien
gtttcccgatggcacagtctcctgctcaagctc

SEQ ID NO: 139920 - DNA, 33 bp, Homo sapien
gtttcccgatggcacattctcctgctcaagctc

SEQ ID NO: 139921 - DNA, 33 bp, Homo sapien
ggtcgccgaagtagaactgcgtattaagccagt

SEQ ID NO: 139922 - DNA, 33 bp, Homo sapien
ggtcgccgaagtagaattgcgtattaagccagt

SEQ ID NO: 139923 - DNA, 33 bp, Homo sapien
taatttatccaccttccaagcaatgaatgtgct

SEQ ID NO: 139924 - DNA, 33 bp, Homo sapien
taatttatccaccttctaagcaatgaatgtgct

SEQ ID NO: 139925 - DNA, 33 bp, Homo sapien
gagactgattttttaacgcttatgtggcatcac

SEQ ID NO: 139926 - DNA, 33 bp, Homo sapien
gagactgattttttaatgcttatgtggcatcac

SEQ ID NO: 139927 - DNA, 33 bp, Homo sapien
tattattacacccctacgaaactgttcatattt

SEQ ID NO: 139928 - DNA, 33 bp, Homo sapien
tattattacacccctatgaaactgttcatattt

SEQ ID NO: 139929 - DNA, 33 bp, Homo sapien
ccatctttaacagcataaaattggtgctctttt

SEQ ID NO: 139930 - DNA, 33 bp, Homo sapien
ccatctttaacagcatcaaattggtgctctttt

SEQ ID NO: 139931 - DNA, 33 bp, Homo sapien
acagtgacaatacaaaagaatctcataaacata

SEQ ID NO: 139932 - DNA, 33 bp, Homo sapien
acagtgacaatacaaatgaatctcataaacata

SEQ ID NO: 139933 - DNA, 33 bp, Homo sapien
aaaatgtcaaacccgacgattcctagttcaagc

SEQ ID NO: 139934 - DNA, 33 bp, Homo sapien
aaaatgtcaaacccgaggattcctagttcaagc

SEQ ID NO: 139935 - DNA, 33 bp, Homo sapien
tagctctcaggtatgacgattttataattctta

SEQ ID NO: 139936 - DNA, 33 bp, Homo sapien
tagctctcaggtatgatgattttataattctta

SEQ ID NO: 139937 - DNA, 33 bp, Homo sapien
gagaccacattctcagacaatatgcttacaagg

SEQ ID NO: 139938 - DNA, 33 bp, Homo sapien
gagaccacattctcaggcaatatgcttacaagg

SEQ ID NO: 139939 - DNA, 33 bp, Homo sapien
acattcagggaccatactatgaccaaaaaaaaa

SEQ ID NO: 139940 - DNA, 33 bp, Homo sapien
acattcagggaccatattatgaccaaaaaaaaa

SEQ ID NO: 139941 - DNA, 33 bp, Homo sapien
ttttatattaagtcatcatgaactgaattttct

SEQ ID NO: 139942 - DNA, 33 bp, Homo sapien
ttttatattaagtcatgatgaactgaattttct

SEQ ID NO: 139943 - DNA, 33 bp, Homo sapien
cagctgtttggaataccctaactccctgacttc

SEQ ID NO: 139944 - DNA, 33 bp, Homo sapien
cagctgtttggaatactctaactccctgacttc

SEQ ID NO: 139945 - DNA, 33 bp, Homo sapien
aaatcatacaactaggcatatggcaaactcagg

SEQ ID NO: 139946 - DNA, 33 bp, Homo sapien
aaatcatacaactagggatatggcaaactcagg

SEQ ID NO: 139947 - DNA, 33 bp, Homo sapien
attccagtggcaggtacagataaaacaagataa

SEQ ID NO: 139948 - DNA, 33 bp, Homo sapien
attccagtggcaggtatagataaaacaagataa

SEQ ID NO: 139949 - DNA, 33 bp, Homo sapien
ttgttccacctggatcactggaagagtgaaaga

SEQ ID NO: 139950 - DNA, 33 bp, Homo sapien
ttgttccacctggatcgctggaagagtgaaaga

SEQ ID NO: 139951 - DNA, 33 bp, Homo sapien
tttaatgctgacagaaatatggacaatgaaggc

SEQ ID NO: 139952 - DNA, 33 bp, Homo sapien
tttaatgctgacagaagtatggacaatgaaggc

SEQ ID NO: 139953 - DNA, 33 bp, Homo sapien
gctaagtgctaacatacatgacatgcaaaaaag

SEQ ID NO: 139954 - DNA, 33 bp, Homo sapien
gctaagtgctaacatatatgacatgcaaaaaag

SEQ ID NO: 139955 - DNA, 33 bp, Homo sapien
aaaacacactaatgcaagagttaatgctgaata

SEQ ID NO: 139956 - DNA, 33 bp, Homo sapien
aaaacacactaatgcaggagttaatgctgaata

SEQ ID NO: 139957 - DNA, 33 bp, Homo sapien
gtttatttttcaaaaaaccatcatcaaatattt

SEQ ID NO: 139958 - DNA, 33 bp, Homo sapien
gtttatttttcaaaaacccatcatcaaatattt

SEQ ID NO: 139959 - DNA, 33 bp, Homo sapien
gtgtcatggaacagaacggagacaccatgagat

SEQ ID NO: 139960 - DNA, 33 bp, Homo sapien
gtgtcatggaacagaatggagacaccatgagat

SEQ ID NO: 139961 - DNA, 33 bp, Homo sapien
agatattaaagctatacggcttactttgtggga

SEQ ID NO: 139962 - DNA, 33 bp, Homo sapien
agatattaaagctatatggcttactttgtggga

SEQ ID NO: 139963 - DNA, 33 bp, Homo sapien
aaatacagagttcctaaggagtattaataaaga

SEQ ID NO: 139964 - DNA, 33 bp, Homo sapien
aaatacagagttcctatggagtattaataaaga

SEQ ID NO: 139965 - DNA, 33 bp, Homo sapien
aaaataggacatttaaactttttcttgaatggc

SEQ ID NO: 139966 - DNA, 33 bp, Homo sapien
aaaataggacatttaagctttttcttgaatggc

SEQ ID NO: 139967 - DNA, 33 bp, Homo sapien
taaaggcctagactagcagtttggcctaaaaga

SEQ ID NO: 139968 - DNA, 33 bp, Homo sapien
taaaggcctagactaggagtttggcctaaaaga

SEQ ID NO: 139969 - DNA, 33 bp, Homo sapien
taggaggaaaaaaagaaaagctactggctcctc

SEQ ID NO: 139970 - DNA, 33 bp, Homo sapien
taggaggaaaaaaagagaagctactggctcctc

SEQ ID NO: 139971 - DNA, 33 bp, Homo sapien
ataccatggtgcctcaagtcaacagagagctag

SEQ ID NO: 139972 - DNA, 33 bp, Homo sapien
ataccatggtgcctcaggtcaacagagagctag

SEQ ID NO: 139973 - DNA, 33 bp, Homo sapien
gagcactgtcattagaacccaaccgaagaggac

SEQ ID NO: 139974 - DNA, 33 bp, Homo sapien
gagcactgtcattagagcccaaccgaagaggac

SEQ ID NO: 139975 - DNA, 33 bp, Homo sapien
aagggaggaaatgcaaaaattaagaatatttag

SEQ ID NO: 139976 - DNA, 33 bp, Homo sapien
aagggaggaaatgcaacaattaagaatatttag

SEQ ID NO: 139977 - DNA, 33 bp, Homo sapien
gaaagatgtgtgaaaactgtagaatgacccagg

SEQ ID NO: 139978 - DNA, 33 bp, Homo sapien
gaaagatgtgtgaaaattgtagaatgacccagg

SEQ ID NO: 139979 - DNA, 33 bp, Homo sapien
aatgattttttaggacagtaggaatattataga

SEQ ID NO: 139980 - DNA, 33 bp, Homo sapien
aatgattttttaggacggtaggaatattataga

SEQ ID NO: 139981 - DNA, 33 bp, Homo sapien
agaatacacattcttcccaaatacacacggagc

SEQ ID NO: 139982 - DNA, 33 bp, Homo sapien
agaatacacattcttctcaaatacacacggagc

SEQ ID NO: 139983 - DNA, 33 bp, Homo sapien
tctggctatccagaagacaactctagtagtgtt

SEQ ID NO: 139984 - DNA, 33 bp, Homo sapien
tctggctatccagaaggcaactctagtagtgtt

SEQ ID NO: 139985 - DNA, 33 bp, Homo sapien
ctatttccacaaaacactggctaagctctgtat

SEQ ID NO: 139986 - DNA, 33 bp, Homo sapien
ctatttccacaaaacattggctaagctctgtat

SEQ ID NO: 139987 - DNA, 33 bp, Homo sapien
aagaggccgagccccacagagacgtggaaggta

SEQ ID NO: 139988 - DNA, 33 bp, Homo sapien
aagaggccgagccccagagagacgtggaaggta

SEQ ID NO: 139989 - DNA, 33 bp, Homo sapien
tatattcattccaggaaaaaggaacaagcccaa

SEQ ID NO: 139990 - DNA, 33 bp, Homo sapien
tatattcattccaggataaaggaacaagcccaa

SEQ ID NO: 139991 - DNA, 33 bp, Homo sapien
atctgggaataattcaacagcttagagatgctt

SEQ ID NO: 139992 - DNA, 33 bp, Homo sapien
atctgggaataattcagcagcttagagatgctt

SEQ ID NO: 139993 - DNA, 33 bp, Homo sapien
ataactcagtaacccaagaatggaaaagaaatg

SEQ ID NO: 139994 - DNA, 33 bp, Homo sapien
ataactcagtaacccaggaatggaaaagaaatg

SEQ ID NO: 139995 - DNA, 33 bp, Homo sapien
ttaattatatacacaacgatactttctccaaat

SEQ ID NO: 139996 - DNA, 33 bp, Homo sapien
ttaattatatacacaatgatactttctccaaat

SEQ ID NO: 139997 - DNA, 33 bp, Homo sapien
catgttggccccccaaaaaatatacatcctcat

SEQ ID NO: 139998 - DNA, 33 bp, Homo sapien
catgttggccccccaagaaatatacatcctcat

SEQ ID NO: 139999 - DNA, 33 bp, Homo sapien
tagatggggacaaagcaactcatctctttcttc

SEQ ID NO: 140000 - DNA, 33 bp, Homo sapien
tagatggggacaaagcgactcatctctttcttc

SEQ ID NO: 140001 - DNA, 33 bp, Homo sapien
aggtgtcttgaatgaaataagatctccataaat

SEQ ID NO: 140002 - DNA, 33 bp, Homo sapien
aggtgtcttgaatgaagtaagatctccataaat

SEQ ID NO: 140003 - DNA, 33 bp, Homo sapien
gcgatttgttttcgcaatgacacaaaacttaca

SEQ ID NO: 140004 - DNA, 33 bp, Homo sapien
gcgatttgttttcgcagtgacacaaaacttaca

SEQ ID NO: 140005 - DNA, 33 bp, Homo sapien
ttcattacaacaccaccgattcacttgggattg

SEQ ID NO: 140006 - DNA, 33 bp, Homo sapien
ttcattacaacaccactgattcacttgggattg

SEQ ID NO: 140007 - DNA, 33 bp, Homo sapien
gtttagccaaagatgacgataagttgtctagca

SEQ ID NO: 140008 - DNA, 33 bp, Homo sapien
gtttagccaaagatgatgataagttgtctagca

SEQ ID NO: 140009 - DNA, 33 bp, Homo sapien
cagggaacaagacacaaaggtgcctgctctctc

SEQ ID NO: 140010 - DNA, 33 bp, Homo sapien
cagggaacaagacacacaggtgcctgctctctc

SEQ ID NO: 140011 - DNA, 33 bp, Homo sapien
ctgaataactggacacaaccacccatccatgtt

SEQ ID NO: 140012 - DNA, 33 bp, Homo sapien
ctgaataactggacacgaccacccatccatgtt

SEQ ID NO: 140013 - DNA, 33 bp, Homo sapien
atgcaggttacttggcccatccacactcctgaa

SEQ ID NO: 140014 - DNA, 33 bp, Homo sapien
atgcaggttacttggctcatccacactcctgaa

SEQ ID NO: 140015 - DNA, 33 bp, Homo sapien
gggagaaggctgctccaaggcattgtcattgct

SEQ ID NO: 140016 - DNA, 33 bp, Homo sapien
gggagaaggctgctccgaggcattgtcattgct

SEQ ID NO: 140017 - DNA, 33 bp, Homo sapien
gattcctagactcacacaaactgaatcacaatc

SEQ ID NO: 140018 - DNA, 33 bp, Homo sapien
gattcctagactcacataaactgaatcacaatc

SEQ ID NO: 140019 - DNA, 33 bp, Homo sapien
gttctccaaaatcctaacccacagaattgagca

SEQ ID NO: 140020 - DNA, 33 bp, Homo sapien
gttctccaaaatcctagcccacagaattgagca

SEQ ID NO: 140021 - DNA, 33 bp, Homo sapien
agttctcccaaagcacacatagtttttctcatt

SEQ ID NO: 140022 - DNA, 33 bp, Homo sapien
agttctcccaaagcacgcatagtttttctcatt

SEQ ID NO: 140023 - DNA, 33 bp, Homo sapien
agaggcgagcaatggacgaaaggagggaaaatc

SEQ ID NO: 140024 - DNA, 33 bp, Homo sapien
agaggcgagcaatggaggaaaggagggaaaatc

SEQ ID NO: 140025 - DNA, 33 bp, Homo sapien
ggacaacttcaggataacaccctgggacaattt

SEQ ID NO: 140026 - DNA, 33 bp, Homo sapien
ggacaacttcaggatagcaccctgggacaattt

SEQ ID NO: 140027 - DNA, 33 bp, Homo sapien
gccaaaagacaggtgcaaatgttgatggtttct

SEQ ID NO: 140028 - DNA, 33 bp, Homo sapien
gccaaaagacaggtgccaatgttgatggtttct

SEQ ID NO: 140029 - DNA, 33 bp, Homo sapien
tctcattcccgaataacgtgaggaactggggag

SEQ ID NO: 140030 - DNA, 33 bp, Homo sapien
tctcattcccgaataatgtgaggaactggggag

SEQ ID NO: 140031 - DNA, 33 bp, Homo sapien
caagtggaaaactaaacacaagactggcagtcc

SEQ ID NO: 140032 - DNA, 33 bp, Homo sapien
caagtggaaaactaaatacaagactggcagtcc

SEQ ID NO: 140033 - DNA, 33 bp, Homo sapien
ttgaaggtagagaaacaatgtcaacaaaataga

SEQ ID NO: 140034 - DNA, 33 bp, Homo sapien
ttgaaggtagagaaacgatgtcaacaaaataga

SEQ ID NO: 140035 - DNA, 33 bp, Homo sapien
cattctcctgacctaaccagtacctggcatgta

SEQ ID NO: 140036 - DNA, 33 bp, Homo sapien
cattctcctgacctaatcagtacctggcatgta

SEQ ID NO: 140037 - DNA, 33 bp, Homo sapien
ctctggtcatttgcagaatcaaatccaaactcc

SEQ ID NO: 140038 - DNA, 33 bp, Homo sapien
ctctggtcatttgcaggatcaaatccaaactcc

SEQ ID NO: 140039 - DNA, 33 bp, Homo sapien
ttttagtaaattacaccaaggcaaacatagtgt

SEQ ID NO: 140040 - DNA, 33 bp, Homo sapien
ttttagtaaattacacgaaggcaaacatagtgt

SEQ ID NO: 140041 - DNA, 33 bp, Homo sapien
gagggcaggcattacaactgctatgttatccat

SEQ ID NO: 140042 - DNA, 33 bp, Homo sapien
gagggcaggcattacatctgctatgttatccat

SEQ ID NO: 140043 - DNA, 33 bp, Homo sapien
cattatgttaactaccactgttttaaatcattt

SEQ ID NO: 140044 - DNA, 33 bp, Homo sapien
cattatgttaactaccgctgttttaaatcattt

SEQ ID NO: 140045 - DNA, 33 bp, Homo sapien
ttcatcttccaaggataagattacaagtatcct

SEQ ID NO: 140046 - DNA, 33 bp, Homo sapien
ttcatcttccaaggatcagattacaagtatcct

SEQ ID NO: 140047 - DNA, 33 bp, Homo sapien
ttgtgcatacttctaagacagggtgagtcatag

SEQ ID NO: 140048 - DNA, 33 bp, Homo sapien
ttgtgcatacttctaatacagggtgagtcatag

SEQ ID NO: 140049 - DNA, 33 bp, Homo sapien
aagtgctggagatgcaaggtgaatagaaaacag

SEQ ID NO: 140050 - DNA, 33 bp, Homo sapien
aagtgctggagatgcagggtgaatagaaaacag

SEQ ID NO: 140051 - DNA, 33 bp, Homo sapien
tatgtgttgaatggagaaatcaatgagtcaatc

SEQ ID NO: 140052 - DNA, 33 bp, Homo sapien
tatgtgttgaatggaggaatcaatgagtcaatc

SEQ ID NO: 140053 - DNA, 33 bp, Homo sapien
ctacgagaaatttccacactcacttctagatct

SEQ ID NO: 140054 - DNA, 33 bp, Homo sapien
ctacgagaaatttccagactcacttctagatct

SEQ ID NO: 140055 - DNA, 33 bp, Homo sapien
ataggttttatgctacaaatagagacattttga

SEQ ID NO: 140056 - DNA, 33 bp, Homo sapien
ataggttttatgctacgaatagagacattttga

SEQ ID NO: 140057 - DNA, 33 bp, Homo sapien
atttagattaccccaaaagtgagatgtaagtat

SEQ ID NO: 140058 - DNA, 33 bp, Homo sapien
atttagattaccccaatagtgagatgtaagtat

SEQ ID NO: 140059 - DNA, 33 bp, Homo sapien
atgtgactaaaattcaacgaaccaaaaatggtt

SEQ ID NO: 140060 - DNA, 33 bp, Homo sapien
atgtgactaaaattcatcgaaccaaaaatggtt

SEQ ID NO: 140061 - DNA, 33 bp, Homo sapien
aactggccaggtgaataaggatgcaatcagggc

SEQ ID NO: 140062 - DNA, 33 bp, Homo sapien
aactggccaggtgaatgaggatgcaatcagggc

SEQ ID NO: 140063 - DNA, 33 bp, Homo sapien
gcgtagagatgagtggacattttgatccagtga

SEQ ID NO: 140064 - DNA, 33 bp, Homo sapien
gcgtagagatgagtgggcattttgatccagtga

SEQ ID NO: 140065 - DNA, 33 bp, Homo sapien
aacacatttttatgaaatctagtacacagcaat

SEQ ID NO: 140066 - DNA, 33 bp, Homo sapien
aacacatttttatgaagtctagtacacagcaat

SEQ ID NO: 140067 - DNA, 33 bp, Homo sapien
agatactaactggagaacatctgactccagcgc

SEQ ID NO: 140068 - DNA, 33 bp, Homo sapien
agatactaactggagaccatctgactccagcgc

SEQ ID NO: 140069 - DNA, 33 bp, Homo sapien
gtcagccagagaaaacaagaaggtgaaaaatgc

SEQ ID NO: 140070 - DNA, 33 bp, Homo sapien
gtcagccagagaaaacgagaaggtgaaaaatgc

SEQ ID NO: 140071 - DNA, 33 bp, Homo sapien
ctgtaggaacaagaagacagatgagaacggtag

SEQ ID NO: 140072 - DNA, 33 bp, Homo sapien
ctgtaggaacaagaagtcagatgagaacggtag

SEQ ID NO: 140073 - DNA, 33 bp, Homo sapien
taaggcttttctttcacggcgataacttcatcc

SEQ ID NO: 140074 - DNA, 33 bp, Homo sapien
taaggcttttctttcagggcgataacttcatcc

SEQ ID NO: 140075 - DNA, 33 bp, Homo sapien
aggacagctccacacagctccctacctgcactc

SEQ ID NO: 140076 - DNA, 33 bp, Homo sapien
aggacagctccacacatctccctacctgcactc

SEQ ID NO: 140077 - DNA, 33 bp, Homo sapien
ggagagaaccagtataccatccacccaacatct

SEQ ID NO: 140078 - DNA, 33 bp, Homo sapien
ggagagaaccagtatatcatccacccaacatct

SEQ ID NO: 140079 - DNA, 33 bp, Homo sapien
agtaactagaatccagcaatattagggcaagaa

SEQ ID NO: 140080 - DNA, 33 bp, Homo sapien
agtaactagaatccaggaatattagggcaagaa

SEQ ID NO: 140081 - DNA, 33 bp, Homo sapien
tttctagtcagacttgaacttgagagggtgtaa

SEQ ID NO: 140082 - DNA, 33 bp, Homo sapien
tttctagtcagacttgcacttgagagggtgtaa

SEQ ID NO: 140083 - DNA, 33 bp, Homo sapien
atttaagaaaagacaactgaaaagtccaatgga

SEQ ID NO: 140084 - DNA, 33 bp, Homo sapien
atttaagaaaagacaattgaaaagtccaatgga

SEQ ID NO: 140085 - DNA, 33 bp, Homo sapien
ttagaaaaagcaagacacgcataagcaataatt

SEQ ID NO: 140086 - DNA, 33 bp, Homo sapien
ttagaaaaagcaagacgcgcataagcaataatt

SEQ ID NO: 140087 - DNA, 33 bp, Homo sapien
agagaaatcacatggaataccttttgcatgaag

SEQ ID NO: 140088 - DNA, 33 bp, Homo sapien
agagaaatcacatggagtaccttttgcatgaag

SEQ ID NO: 140089 - DNA, 33 bp, Homo sapien
ctttgggaaatacttaggtgcagtctagcgaat

SEQ ID NO: 140090 - DNA, 33 bp, Homo sapien
ctttgggaaatacttatgtgcagtctagcgaat

SEQ ID NO: 140091 - DNA, 33 bp, Homo sapien
ctttttttgttgaatacgtttttgagatttatc

SEQ ID NO: 140092 - DNA, 33 bp, Homo sapien
ctttttttgttgaatatgtttttgagatttatc

SEQ ID NO: 140093 - DNA, 33 bp, Homo sapien
agcgtgtgctctttcacgtgactttttttgttg

SEQ ID NO: 140094 - DNA, 33 bp, Homo sapien
agcgtgtgctctttcatgtgactttttttgttg

SEQ ID NO: 140095 - DNA, 33 bp, Homo sapien
tgtgcactgttcataactatacagctgcccaga

SEQ ID NO: 140096 - DNA, 33 bp, Homo sapien
tgtgcactgttcataattatacagctgcccaga

SEQ ID NO: 140097 - DNA, 33 bp, Homo sapien
taatccaagaaaaagaaattgccagtatataag

SEQ ID NO: 140098 - DNA, 33 bp, Homo sapien
taatccaagaaaaagagattgccagtatataag

SEQ ID NO: 140099 - DNA, 33 bp, Homo sapien
actaatccagtagttacaggttgaataaggagt

SEQ ID NO: 140100 - DNA, 33 bp, Homo sapien
actaatccagtagttagaggttgaataaggagt

SEQ ID NO: 140101 - DNA, 33 bp, Homo sapien
ggggatacagctcagaccacaagcagacaagaa

SEQ ID NO: 140102 - DNA, 33 bp, Homo sapien
ggggatacagctcagatcacaagcagacaagaa

SEQ ID NO: 140103 - DNA, 33 bp, Homo sapien
gggccacacatttccacactgtccactcaccaa

SEQ ID NO: 140104 - DNA, 33 bp, Homo sapien
gggccacacatttccatactgtccactcaccaa

SEQ ID NO: 140105 - DNA, 33 bp, Homo sapien
acaaaatcaaacaaagaccgaaaactgtctagt

SEQ ID NO: 140106 - DNA, 33 bp, Homo sapien
acaaaatcaaacaaagcccgaaaactgtctagt

SEQ ID NO: 140107 - DNA, 33 bp, Homo sapien
catctgaagtggtgctaaacttagttcctcagg

SEQ ID NO: 140108 - DNA, 33 bp, Homo sapien
catctgaagtggtgctgaacttagttcctcagg

SEQ ID NO: 140109 - DNA, 33 bp, Homo sapien
gggcatatcccagaaacgttaagcaagactttt

SEQ ID NO: 140110 - DNA, 33 bp, Homo sapien
gggcatatcccagaaatgttaagcaagactttt

SEQ ID NO: 140111 - DNA, 33 bp, Homo sapien
caaaaagtataccaaaaagcaacaactaatacc

SEQ ID NO: 140112 - DNA, 33 bp, Homo sapien
caaaaagtataccaaagagcaacaactaatacc

SEQ ID NO: 140113 - DNA, 33 bp, Homo sapien
ggatggtactctaatacaaaatggaatctgaaa

SEQ ID NO: 140114 - DNA, 33 bp, Homo sapien
ggatggtactctaatagaaaatggaatctgaaa

SEQ ID NO: 140115 - DNA, 33 bp, Homo sapien
tcatcatcatcaacaacagtaaacatttcttga

SEQ ID NO: 140116 - DNA, 33 bp, Homo sapien
tcatcatcatcaacaagagtaaacatttcttga

SEQ ID NO: 140117 - DNA, 33 bp, Homo sapien
aaagccagaaatgaagacactttgggcccattg

SEQ ID NO: 140118 - DNA, 33 bp, Homo sapien
aaagccagaaatgaaggcactttgggcccattg

SEQ ID NO: 140119 - DNA, 33 bp, Homo sapien
gagcatccccaccttacgtccctctgtacatct

SEQ ID NO: 140120 - DNA, 33 bp, Homo sapien
gagcatccccaccttatgtccctctgtacatct

SEQ ID NO: 140121 - DNA, 33 bp, Homo sapien
cactggtttcaattcaatctgctttgctgagtg

SEQ ID NO: 140122 - DNA, 33 bp, Homo sapien
cactggtttcaattcagtctgctttgctgagtg

SEQ ID NO: 140123 - DNA, 33 bp, Homo sapien
aagagtagagtctttaaacaaacggactaaact

SEQ ID NO: 140124 - DNA, 33 bp, Homo sapien
aagagtagagtctttatacaaacggactaaact

SEQ ID NO: 140125 - DNA, 33 bp, Homo sapien
gtttggattagacaggaaagttgccaactgtag

SEQ ID NO: 140126 - DNA, 33 bp, Homo sapien
gtttggattagacagggaagttgccaactgtag

SEQ ID NO: 140127 - DNA, 33 bp, Homo sapien
agttatccgaagcagaaagaatgggagggacac

SEQ ID NO: 140128 - DNA, 33 bp, Homo sapien
agttatccgaagcagagagaatgggagggacac

SEQ ID NO: 140129 - DNA, 33 bp, Homo sapien
aatattaactgttcaacactagctgagatttat

SEQ ID NO: 140130 - DNA, 33 bp, Homo sapien
aatattaactgttcaatactagctgagatttat

SEQ ID NO: 140131 - DNA, 33 bp, Homo sapien
catatactgcatggatgaaataagataatttat

SEQ ID NO: 140132 - DNA, 33 bp, Homo sapien
catatactgcatggattaaataagataatttat

SEQ ID NO: 140133 - DNA, 33 bp, Homo sapien
agaatagggcctgtcaacgagacattagctggg

SEQ ID NO: 140134 - DNA, 33 bp, Homo sapien
agaatagggcctgtcagcgagacattagctggg

SEQ ID NO: 140135 - DNA, 33 bp, Homo sapien
agcgaaaggattacgacagtcaaacaagttacc

SEQ ID NO: 140136 - DNA, 33 bp, Homo sapien
agcgaaaggattacgatagtcaaacaagttacc

SEQ ID NO: 140137 - DNA, 33 bp, Homo sapien
atcccggtaaggtacagcattgtggactttaga

SEQ ID NO: 140138 - DNA, 33 bp, Homo sapien
atcccggtaaggtacatcattgtggactttaga

SEQ ID NO: 140139 - DNA, 33 bp, Homo sapien
tactctcagtgaccgacagaataagacacacac

SEQ ID NO: 140140 - DNA, 33 bp, Homo sapien
tactctcagtgaccgatagaataagacacacac

SEQ ID NO: 140141 - DNA, 33 bp, Homo sapien
gcacttttgtctaatgaaacactagaggaagct

SEQ ID NO: 140142 - DNA, 33 bp, Homo sapien
gcacttttgtctaatgcaacactagaggaagct

SEQ ID NO: 140143 - DNA, 33 bp, Homo sapien
attggttagtggttgcacccataccgacagagg

SEQ ID NO: 140144 - DNA, 33 bp, Homo sapien
attggttagtggttgcgcccataccgacagagg

SEQ ID NO: 140145 - DNA, 33 bp, Homo sapien
tccaaaatgtttatgaaagatgggatttggaat

SEQ ID NO: 140146 - DNA, 33 bp, Homo sapien
tccaaaatgtttatgagagatgggatttggaat

SEQ ID NO: 140147 - DNA, 33 bp, Homo sapien
cgctgctgagtaattacgtggtaaaagcttttt

SEQ ID NO: 140148 - DNA, 33 bp, Homo sapien
cgctgctgagtaattatgtggtaaaagcttttt

SEQ ID NO: 140149 - DNA, 33 bp, Homo sapien
ttgctagggaagtctacgccagaagaagagaag

SEQ ID NO: 140150 - DNA, 33 bp, Homo sapien
ttgctagggaagtctatgccagaagaagagaag

SEQ ID NO: 140151 - DNA, 33 bp, Homo sapien
ttttctgggcctgctacgagaaggtaaaagtga

SEQ ID NO: 140152 - DNA, 33 bp, Homo sapien
ttttctgggcctgctatgagaaggtaaaagtga

SEQ ID NO: 140153 - DNA, 33 bp, Homo sapien
tcctagaaacctttgagtatcaagatccacatt

SEQ ID NO: 140154 - DNA, 33 bp, Homo sapien
tcctagaaacctttgattatcaagatccacatt

SEQ ID NO: 140155 - DNA, 33 bp, Homo sapien
attttattcagtacaacgtgaaacttcttgacc

SEQ ID NO: 140156 - DNA, 33 bp, Homo sapien
attttattcagtacaatgtgaaacttcttgacc

SEQ ID NO: 140157 - DNA, 33 bp, Homo sapien
aagtcctttttatctaaactgtctcacatggcc

SEQ ID NO: 140158 - DNA, 33 bp, Homo sapien
aagtcctttttatctacactgtctcacatggcc

SEQ ID NO: 140159 - DNA, 33 bp, Homo sapien
taagattcaaacctcggcactagatgttacttt

SEQ ID NO: 140160 - DNA, 33 bp, Homo sapien
taagattcaaacctcgtcactagatgttacttt

SEQ ID NO: 140161 - DNA, 33 bp, Homo sapien
tatcctaatctatccaaggagatttgtcttatt

SEQ ID NO: 140162 - DNA, 33 bp, Homo sapien
tatcctaatctatccagggagatttgtcttatt

SEQ ID NO: 140163 - DNA, 33 bp, Homo sapien
tccagtaactacctgacgaagaatgagactcta

SEQ ID NO: 140164 - DNA, 33 bp, Homo sapien
tccagtaactacctgaggaagaatgagactcta

SEQ ID NO: 140165 - DNA, 33 bp, Homo sapien
gtcgttgtgcttgctacgttggtggccagatag

SEQ ID NO: 140166 - DNA, 33 bp, Homo sapien
gtcgttgtgcttgctaggttggtggccagatag

SEQ ID NO: 140167 - DNA, 33 bp, Homo sapien
aagctgcaggttgttcactgtttggtactatag

SEQ ID NO: 140168 - DNA, 33 bp, Homo sapien
aagctgcaggttgttcgctgtttggtactatag

SEQ ID NO: 140169 - DNA, 33 bp, Homo sapien
ctcaatgccaatacacaagcaactttaagagac

SEQ ID NO: 140170 - DNA, 33 bp, Homo sapien
ctcaatgccaatacaccagcaactttaagagac

SEQ ID NO: 140171 - DNA, 33 bp, Homo sapien
gaccattgttgtaagcccttcccaacttaaatc

SEQ ID NO: 140172 - DNA, 33 bp, Homo sapien
gaccattgttgtaagcgcttcccaacttaaatc

SEQ ID NO: 140173 - DNA, 33 bp, Homo sapien
ctggttaaaaccaagacagctgacagaacaact

SEQ ID NO: 140174 - DNA, 33 bp, Homo sapien
ctggttaaaaccaagagagctgacagaacaact

SEQ ID NO: 140175 - DNA, 33 bp, Homo sapien
agaagctcaagcgatgcaatcatgtgaacgagg

SEQ ID NO: 140176 - DNA, 33 bp, Homo sapien
agaagctcaagcgatgtaatcatgtgaacgagg

SEQ ID NO: 140177 - DNA, 33 bp, Homo sapien
tacttctgtctccttacgtagcactgatgccat

SEQ ID NO: 140178 - DNA, 33 bp, Homo sapien
tacttctgtctccttatgtagcactgatgccat

SEQ ID NO: 140179 - DNA, 33 bp, Homo sapien
ttcaacaactgatgaacacagtgtgactgagca

SEQ ID NO: 140180 - DNA, 33 bp, Homo sapien
ttcaacaactgatgaatacagtgtgactgagca

SEQ ID NO: 140181 - DNA, 33 bp, Homo sapien
gagtggggagggactactaacatgtgtaactgg

SEQ ID NO: 140182 - DNA, 33 bp, Homo sapien
gagtggggagggactattaacatgtgtaactgg

SEQ ID NO: 140183 - DNA, 33 bp, Homo sapien
cccatcatgctcaaacaaagaaagaaaggagcc

SEQ ID NO: 140184 - DNA, 33 bp, Homo sapien
cccatcatgctcaaacgaagaaagaaaggagcc

SEQ ID NO: 140185 - DNA, 33 bp, Homo sapien
ctagccaatgcaagtaaaggggatatttctcag

SEQ ID NO: 140186 - DNA, 33 bp, Homo sapien
ctagccaatgcaagtagaggggatatttctcag

SEQ ID NO: 140187 - DNA, 33 bp, Homo sapien
tcgttcatccaatttccaccactttacagatga

SEQ ID NO: 140188 - DNA, 33 bp, Homo sapien
tcgttcatccaatttctaccactttacagatga

SEQ ID NO: 140189 - DNA, 33 bp, Homo sapien
gtgatagtctgcttacacattcagttaggttac

SEQ ID NO: 140190 - DNA, 33 bp, Homo sapien
gtgatagtctgcttacgcattcagttaggttac

SEQ ID NO: 140191 - DNA, 33 bp, Homo sapien
cattcatgggattatcaagacccagataccacc

SEQ ID NO: 140192 - DNA, 33 bp, Homo sapien
cattcatgggattatcgagacccagataccacc

SEQ ID NO: 140193 - DNA, 33 bp, Homo sapien
agtctcaggataatgaaacagcatttgcacact

SEQ ID NO: 140194 - DNA, 33 bp, Homo sapien
agtctcaggataatgagacagcatttgcacact

SEQ ID NO: 140195 - DNA, 33 bp, Homo sapien
tgataatatacacaacaaccaagatcatcctag

SEQ ID NO: 140196 - DNA, 33 bp, Homo sapien
tgataatatacacaaccaccaagatcatcctag

SEQ ID NO: 140197 - DNA, 33 bp, Homo sapien
gaactctggaaatgtaactatgaggggttcaac

SEQ ID NO: 140198 - DNA, 33 bp, Homo sapien
gaactctggaaatgtacctatgaggggttcaac

SEQ ID NO: 140199 - DNA, 33 bp, Homo sapien
agttaagaccaacagcagcaaaactagtgtgca

SEQ ID NO: 140200 - DNA, 33 bp, Homo sapien
agttaagaccaacagcggcaaaactagtgtgca

SEQ ID NO: 140201 - DNA, 33 bp, Homo sapien
cctgaatggacactaacgagagtggagatctct

SEQ ID NO: 140202 - DNA, 33 bp, Homo sapien
cctgaatggacactaatgagagtggagatctct

SEQ ID NO: 140203 - DNA, 33 bp, Homo sapien
taaaacaggatttcacaaatggtttggcacagg

SEQ ID NO: 140204 - DNA, 33 bp, Homo sapien
taaaacaggatttcacgaatggtttggcacagg

SEQ ID NO: 140205 - DNA, 33 bp, Homo sapien
caggttcctaatcaccagcattgtgaggtcaac

SEQ ID NO: 140206 - DNA, 33 bp, Homo sapien
caggttcctaatcaccggcattgtgaggtcaac

SEQ ID NO: 140207 - DNA, 33 bp, Homo sapien
gaagtggctggcgcacaatagatatttgctaaa

SEQ ID NO: 140208 - DNA, 33 bp, Homo sapien
gaagtggctggcgcacgatagatatttgctaaa

SEQ ID NO: 140209 - DNA, 33 bp, Homo sapien
accagctcctttatctaactcacacacaaagct

SEQ ID NO: 140210 - DNA, 33 bp, Homo sapien
accagctcctttatctgactcacacacaaagct

SEQ ID NO: 140211 - DNA, 33 bp, Homo sapien
ccctacatggcctgtacggtacgggatgcccct

SEQ ID NO: 140212 - DNA, 33 bp, Homo sapien
ccctacatggcctgtatggtacgggatgcccct

SEQ ID NO: 140213 - DNA, 33 bp, Homo sapien
atggattcctgtgtaacgatatgatgcatagtt

SEQ ID NO: 140214 - DNA, 33 bp, Homo sapien
atggattcctgtgtaatgatatgatgcatagtt

SEQ ID NO: 140215 - DNA, 33 bp, Homo sapien
tcagatccattctctaagacttcatgcttggct

SEQ ID NO: 140216 - DNA, 33 bp, Homo sapien
tcagatccattctctaggacttcatgcttggct

SEQ ID NO: 140217 - DNA, 33 bp, Homo sapien
agtggcacataagacccagctcattgtattgac

SEQ ID NO: 140218 - DNA, 33 bp, Homo sapien
agtggcacataagacctagctcattgtattgac

SEQ ID NO: 140219 - DNA, 33 bp, Homo sapien
tttattacttcttatacggtcaaatcaaagtca

SEQ ID NO: 140220 - DNA, 33 bp, Homo sapien
tttattacttcttatatggtcaaatcaaagtca

SEQ ID NO: 140221 - DNA, 33 bp, Homo sapien
ttatgtttctgagagaaagagacgctaaataat

SEQ ID NO: 140222 - DNA, 33 bp, Homo sapien
ttatgtttctgagagagagagacgctaaataat

SEQ ID NO: 140223 - DNA, 33 bp, Homo sapien
agacataactgacatacaataagttgcacatat

SEQ ID NO: 140224 - DNA, 33 bp, Homo sapien
agacataactgacatataataagttgcacatat

SEQ ID NO: 140225 - DNA, 33 bp, Homo sapien
tggaaaagattacaaacggacaagaggaagcct

SEQ ID NO: 140226 - DNA, 33 bp, Homo sapien
tggaaaagattacaaatggacaagaggaagcct

SEQ ID NO: 140227 - DNA, 33 bp, Homo sapien
tccaaacagagattatgagcctacagaagaggc

SEQ ID NO: 140228 - DNA, 33 bp, Homo sapien
tccaaacagagattattagcctacagaagaggc

SEQ ID NO: 140229 - DNA, 33 bp, Homo sapien
ctgaacatttcacttgcagaggaactcattcct

SEQ ID NO: 140230 - DNA, 33 bp, Homo sapien
ctgaacatttcacttgtagaggaactcattcct

SEQ ID NO: 140231 - DNA, 33 bp, Homo sapien
ttttaatcaaccatacaaaaatatagcaaccat

SEQ ID NO: 140232 - DNA, 33 bp, Homo sapien
ttttaatcaaccatacgaaaatatagcaaccat

SEQ ID NO: 140233 - DNA, 33 bp, Homo sapien
aaatcttgaccataggcagttctgtacagttat

SEQ ID NO: 140234 - DNA, 33 bp, Homo sapien
aaatcttgaccataggtagttctgtacagttat

SEQ ID NO: 140235 - DNA, 33 bp, Homo sapien
agtgtgaatttattgaaggaaattaagtccctg

SEQ ID NO: 140236 - DNA, 33 bp, Homo sapien
agtgtgaatttattgagggaaattaagtccctg

SEQ ID NO: 140237 - DNA, 33 bp, Homo sapien
tttaaatagacaccacaagaagtggctaccata

SEQ ID NO: 140238 - DNA, 33 bp, Homo sapien
tttaaatagacaccacgagaagtggctaccata

SEQ ID NO: 140239 - DNA, 33 bp, Homo sapien
taaaataaactcatataaaaataagcagcaaat

SEQ ID NO: 140240 - DNA, 33 bp, Homo sapien
taaaataaactcatatgaaaataagcagcaaat

SEQ ID NO: 140241 - DNA, 33 bp, Homo sapien
tgtgatgagagggctaacagtaattgagaaacg

SEQ ID NO: 140242 - DNA, 33 bp, Homo sapien
tgtgatgagagggctagcagtaattgagaaacg

SEQ ID NO: 140243 - DNA, 33 bp, Homo sapien
ggtactgcctcatagaaggtatggcagaactga

SEQ ID NO: 140244 - DNA, 33 bp, Homo sapien
ggtactgcctcatagagggtatggcagaactga

SEQ ID NO: 140245 - DNA, 33 bp, Homo sapien
attcatggcataagaaatagtttataagtccac

SEQ ID NO: 140246 - DNA, 33 bp, Homo sapien
attcatggcataagaagtagtttataagtccac

SEQ ID NO: 140247 - DNA, 33 bp, Homo sapien
acaacctacagaatgacataaaagttttgcaat

SEQ ID NO: 140248 - DNA, 33 bp, Homo sapien
acaacctacagaatgagataaaagttttgcaat

SEQ ID NO: 140249 - DNA, 33 bp, Homo sapien
ctccctggtttggaaacagccctgctcacagaa

SEQ ID NO: 140250 - DNA, 33 bp, Homo sapien
ctccctggtttggaaatagccctgctcacagaa

SEQ ID NO: 140251 - DNA, 33 bp, Homo sapien
gcctaacctcatactacatcagcagaataaatt

SEQ ID NO: 140252 - DNA, 33 bp, Homo sapien
gcctaacctcatactatatcagcagaataaatt

SEQ ID NO: 140253 - DNA, 33 bp, Homo sapien
taagaacaattagtcactaaggttctattccag

SEQ ID NO: 140254 - DNA, 33 bp, Homo sapien
taagaacaattagtcattaaggttctattccag

SEQ ID NO: 140255 - DNA, 33 bp, Homo sapien
ggtgtggaggtgaatacaagtaagtagctaata

SEQ ID NO: 140256 - DNA, 33 bp, Homo sapien
ggtgtggaggtgaatataagtaagtagctaata

SEQ ID NO: 140257 - DNA, 33 bp, Homo sapien
gtaggagccatgtctaatacaaatcctctcact

SEQ ID NO: 140258 - DNA, 33 bp, Homo sapien
gtaggagccatgtctagtacaaatcctctcact

SEQ ID NO: 140259 - DNA, 33 bp, Homo sapien
gtgcttgtgtaattaaagagatattcgccagct

SEQ ID NO: 140260 - DNA, 33 bp, Homo sapien
gtgcttgtgtaattaaggagatattcgccagct

SEQ ID NO: 140261 - DNA, 33 bp, Homo sapien
tttgtccattggccacactttgataaataaata

SEQ ID NO: 140262 - DNA, 33 bp, Homo sapien
tttgtccattggccaccctttgataaataaata

SEQ ID NO: 140263 - DNA, 33 bp, Homo sapien
ggctgcactgaggttacagaaatggtgccttca

SEQ ID NO: 140264 - DNA, 33 bp, Homo sapien
ggctgcactgaggttagagaaatggtgccttca

SEQ ID NO: 140265 - DNA, 33 bp, Homo sapien
tagtttcaatttttccaccatttggtcatctta

SEQ ID NO: 140266 - DNA, 33 bp, Homo sapien
tagtttcaatttttcctccatttggtcatctta

SEQ ID NO: 140267 - DNA, 33 bp, Homo sapien
cagaagaaagcaaatcaacttagctgaaggctt

SEQ ID NO: 140268 - DNA, 33 bp, Homo sapien
cagaagaaagcaaatcgacttagctgaaggctt

SEQ ID NO: 140269 - DNA, 33 bp, Homo sapien
gaaattcacagtgaagaccatccatcaccacca

SEQ ID NO: 140270 - DNA, 33 bp, Homo sapien
gaaattcacagtgaagtccatccatcaccacca

SEQ ID NO: 140271 - DNA, 33 bp, Homo sapien
atgactgattttgacactccttgggtctcttct

SEQ ID NO: 140272 - DNA, 33 bp, Homo sapien
atgactgattttgacattccttgggtctcttct

SEQ ID NO: 140273 - DNA, 33 bp, Homo sapien
tgtgcatgattccgtgaactgatgtttgtcatc

SEQ ID NO: 140274 - DNA, 33 bp, Homo sapien
tgtgcatgattccgtgcactgatgtttgtcatc

SEQ ID NO: 140275 - DNA, 33 bp, Homo sapien
tggaaggtctcaataacggtattcaaatgactg

SEQ ID NO: 140276 - DNA, 33 bp, Homo sapien
tggaaggtctcaataatggtattcaaatgactg

SEQ ID NO: 140277 - DNA, 33 bp, Homo sapien
tgtgatgctatttcaaatgtcatgattttcaca

SEQ ID NO: 140278 - DNA, 33 bp, Homo sapien
tgtgatgctatttcaattgtcatgattttcaca

SEQ ID NO: 140279 - DNA, 33 bp, Homo sapien
agtcaaaggtataccccgggccatctattcatc

SEQ ID NO: 140280 - DNA, 33 bp, Homo sapien
agtcaaaggtataccctgggccatctattcatc

SEQ ID NO: 140281 - DNA, 33 bp, Homo sapien
gcttgcaaatactgagcctcaaaatttgttagg

SEQ ID NO: 140282 - DNA, 33 bp, Homo sapien
gcttgcaaatactgaggctcaaaatttgttagg

SEQ ID NO: 140283 - DNA, 33 bp, Homo sapien
caacaagcatggctgaataacttctggggctca

SEQ ID NO: 140284 - DNA, 33 bp, Homo sapien
caacaagcatggctgactaacttctggggctca

SEQ ID NO: 140285 - DNA, 33 bp, Homo sapien
actagatcgtatttccaagaaagggagactttt

SEQ ID NO: 140286 - DNA, 33 bp, Homo sapien
actagatcgtatttccgagaaagggagactttt

SEQ ID NO: 140287 - DNA, 33 bp, Homo sapien
cattgaaaacgtgttacctctcaccacctctta

SEQ ID NO: 140288 - DNA, 33 bp, Homo sapien
cattgaaaacgtgttatctctcaccacctctta

SEQ ID NO: 140289 - DNA, 33 bp, Homo sapien
cacacaaatctccataaaatgaaccagatttct

SEQ ID NO: 140290 - DNA, 33 bp, Homo sapien
cacacaaatctccatataatgaaccagatttct

SEQ ID NO: 140291 - DNA, 33 bp, Homo sapien
attaactcggaaagaactgatacttttgatagg

SEQ ID NO: 140292 - DNA, 33 bp, Homo sapien
attaactcggaaagaagtgatacttttgatagg

SEQ ID NO: 140293 - DNA, 33 bp, Homo sapien
aaggaacacttacacactaatggtgagagtgta

SEQ ID NO: 140294 - DNA, 33 bp, Homo sapien
aaggaacacttacacagtaatggtgagagtgta

SEQ ID NO: 140295 - DNA, 33 bp, Homo sapien
atagccatgacaatacaaagtaaacactctcaa

SEQ ID NO: 140296 - DNA, 33 bp, Homo sapien
atagccatgacaatacgaagtaaacactctcaa

SEQ ID NO: 140297 - DNA, 33 bp, Homo sapien
ggaagtggttgattcccgatagaaacatctgaa

SEQ ID NO: 140298 - DNA, 33 bp, Homo sapien
ggaagtggttgattcctgatagaaacatctgaa

SEQ ID NO: 140299 - DNA, 33 bp, Homo sapien
gattttggtgttctaaccagaagttcataggca

SEQ ID NO: 140300 - DNA, 33 bp, Homo sapien
gattttggtgttctaatcagaagttcataggca

SEQ ID NO: 140301 - DNA, 33 bp, Homo sapien
ccacagcttccatgtcaaaaggcaggtctctcc

SEQ ID NO: 140302 - DNA, 33 bp, Homo sapien
ccacagcttccatgtccaaaggcaggtctctcc

SEQ ID NO: 140303 - DNA, 33 bp, Homo sapien
agattaattgaactgccaaaatgatgaagttat

SEQ ID NO: 140304 - DNA, 33 bp, Homo sapien
agattaattgaactgctaaaatgatgaagttat

SEQ ID NO: 140305 - DNA, 33 bp, Homo sapien
ttatggtaagatgttgaaaaaatatacattttc

SEQ ID NO: 140306 - DNA, 33 bp, Homo sapien
ttatggtaagatgttggaaaaatatacattttc

SEQ ID NO: 140307 - DNA, 33 bp, Homo sapien
ttcaagatcagagtcaataagtgataaaactag

SEQ ID NO: 140308 - DNA, 33 bp, Homo sapien
ttcaagatcagagtcagtaagtgataaaactag

SEQ ID NO: 140309 - DNA, 33 bp, Homo sapien
aagacaactggaccacgggctataaagaactgt

SEQ ID NO: 140310 - DNA, 33 bp, Homo sapien
aagacaactggaccactggctataaagaactgt

SEQ ID NO: 140311 - DNA, 33 bp, Homo sapien
gaggcaaacaacagccaggatcatcctgtacag

SEQ ID NO: 140312 - DNA, 33 bp, Homo sapien
gaggcaaacaacagccgggatcatcctgtacag

SEQ ID NO: 140313 - DNA, 33 bp, Homo sapien
tcctattatcacatcaaattgcactcctaaaag

SEQ ID NO: 140314 - DNA, 33 bp, Homo sapien
tcctattatcacatcatattgcactcctaaaag

SEQ ID NO: 140315 - DNA, 33 bp, Homo sapien
aaactgtagtctgactcagccagctctttctct

SEQ ID NO: 140316 - DNA, 33 bp, Homo sapien
aaactgtagtctgacttagccagctctttctct

SEQ ID NO: 140317 - DNA, 33 bp, Homo sapien
aggttgtgtatgctgcaaatggcggtgaagctt

SEQ ID NO: 140318 - DNA, 33 bp, Homo sapien
aggttgtgtatgctgcgaatggcggtgaagctt

SEQ ID NO: 140319 - DNA, 33 bp, Homo sapien
tgtattaaattatgccacatagtctcgcatgtg

SEQ ID NO: 140320 - DNA, 33 bp, Homo sapien
tgtattaaattatgccgcatagtctcgcatgtg

SEQ ID NO: 140321 - DNA, 33 bp, Homo sapien
atggaagccagggtgactcaacgatgacttgca

SEQ ID NO: 140322 - DNA, 33 bp, Homo sapien
atggaagccagggtgattcaacgatgacttgca

SEQ ID NO: 140323 - DNA, 33 bp, Homo sapien
attaatatcccaacaacactttacttagagtgt

SEQ ID NO: 140324 - DNA, 33 bp, Homo sapien
attaatatcccaacaatactttacttagagtgt

SEQ ID NO: 140325 - DNA, 33 bp, Homo sapien
tttgcaagcttagaacactgccctaacaaacac

SEQ ID NO: 140326 - DNA, 33 bp, Homo sapien
tttgcaagcttagaacgctgccctaacaaacac

SEQ ID NO: 140327 - DNA, 33 bp, Homo sapien
ctaacagcctggagtaccctctttactgtcccc

SEQ ID NO: 140328 - DNA, 33 bp, Homo sapien
ctaacagcctggagtatcctctttactgtcccc

SEQ ID NO: 140329 - DNA, 33 bp, Homo sapien
aaccttttgtaactcaatagtttgactaggaat

SEQ ID NO: 140330 - DNA, 33 bp, Homo sapien
aaccttttgtaactcagtagtttgactaggaat

SEQ ID NO: 140331 - DNA, 33 bp, Homo sapien
tccaaatttcatcttcgcataaggacacaagtc

SEQ ID NO: 140332 - DNA, 33 bp, Homo sapien
tccaaatttcatcttctcataaggacacaagtc

SEQ ID NO: 140333 - DNA, 33 bp, Homo sapien
taggcacataatagaaactgagtaaatactgcg

SEQ ID NO: 140334 - DNA, 33 bp, Homo sapien
taggcacataatagaagctgagtaaatactgcg

SEQ ID NO: 140335 - DNA, 33 bp, Homo sapien
aagtggatattactacacaattataccccactt

SEQ ID NO: 140336 - DNA, 33 bp, Homo sapien
aagtggatattactacgcaattataccccactt

SEQ ID NO: 140337 - DNA, 33 bp, Homo sapien
tctaacggtatttttgcacccattggagagtga

SEQ ID NO: 140338 - DNA, 33 bp, Homo sapien
tctaacggtatttttgtacccattggagagtga

SEQ ID NO: 140339 - DNA, 33 bp, Homo sapien
tattagagtgatccagacctgctatgccttact

SEQ ID NO: 140340 - DNA, 33 bp, Homo sapien
tattagagtgatccagtcctgctatgccttact

SEQ ID NO: 140341 - DNA, 33 bp, Homo sapien
gaaatgctttctatgccctgactataaggttgt

SEQ ID NO: 140342 - DNA, 33 bp, Homo sapien
gaaatgctttctatgctctgactataaggttgt

SEQ ID NO: 140343 - DNA, 33 bp, Homo sapien
catggatcttatggaacgtgaattatacctcaa

SEQ ID NO: 140344 - DNA, 33 bp, Homo sapien
catggatcttatggaatgtgaattatacctcaa

SEQ ID NO: 140345 - DNA, 33 bp, Homo sapien
aaagcctatagagccaccagtcaggaacaaaac

SEQ ID NO: 140346 - DNA, 33 bp, Homo sapien
aaagcctatagagccatcagtcaggaacaaaac

SEQ ID NO: 140347 - DNA, 33 bp, Homo sapien
gactcagaaccaaacaaagaagggaattctgag

SEQ ID NO: 140348 - DNA, 33 bp, Homo sapien
gactcagaaccaaacagagaagggaattctgag

SEQ ID NO: 140349 - DNA, 33 bp, Homo sapien
ggtgtcagtcaggatgaagcgatgcacagaacc

SEQ ID NO: 140350 - DNA, 33 bp, Homo sapien
ggtgtcagtcaggatggagcgatgcacagaacc

SEQ ID NO: 140351 - DNA, 33 bp, Homo sapien
aaactgaggttcagagaagtagtattatgtcca

SEQ ID NO: 140352 - DNA, 33 bp, Homo sapien
aaactgaggttcagagtagtagtattatgtcca

SEQ ID NO: 140353 - DNA, 33 bp, Homo sapien
ttgtcaagatgttccccaagttagtggctgcgt

SEQ ID NO: 140354 - DNA, 33 bp, Homo sapien
ttgtcaagatgttcccgaagttagtggctgcgt

SEQ ID NO: 140355 - DNA, 33 bp, Homo sapien
gataaatttgacaaaaatgcctgctctttgggg

SEQ ID NO: 140356 - DNA, 33 bp, Homo sapien
gataaatttgacaaaagtgcctgctctttgggg

SEQ ID NO: 140357 - DNA, 33 bp, Homo sapien
acttcttaatactcacacattgggtcttagatt

SEQ ID NO: 140358 - DNA, 33 bp, Homo sapien
acttcttaatactcacgcattgggtcttagatt

SEQ ID NO: 140359 - DNA, 33 bp, Homo sapien
gggctgctagcaatacagaaaggagcacaaatt

SEQ ID NO: 140360 - DNA, 33 bp, Homo sapien
gggctgctagcaatacggaaaggagcacaaatt

SEQ ID NO: 140361 - DNA, 33 bp, Homo sapien
gttggacctcagcttgaagagttaaaagcatat

SEQ ID NO: 140362 - DNA, 33 bp, Homo sapien
gttggacctcagcttgcagagttaaaagcatat

SEQ ID NO: 140363 - DNA, 33 bp, Homo sapien
tcaaatgatgaactttcaaaaatagcgaaactg

SEQ ID NO: 140364 - DNA, 33 bp, Homo sapien
tcaaatgatgaactttgaaaaatagcgaaactg

SEQ ID NO: 140365 - DNA, 33 bp, Homo sapien
tagacatagaagcaagcctggccacgatgatag

SEQ ID NO: 140366 - DNA, 33 bp, Homo sapien
tagacatagaagcaaggctggccacgatgatag

SEQ ID NO: 140367 - DNA, 33 bp, Homo sapien
atattcaatcacttcaaaaattttatatgtgaa

SEQ ID NO: 140368 - DNA, 33 bp, Homo sapien
atattcaatcacttcagaaattttatatgtgaa

SEQ ID NO: 140369 - DNA, 33 bp, Homo sapien
tataatgtgcctatcactgacctagtccctgga

SEQ ID NO: 140370 - DNA, 33 bp, Homo sapien
tataatgtgcctatcattgacctagtccctgga

SEQ ID NO: 140371 - DNA, 33 bp, Homo sapien
acatgctacagtctaaaaaaccttaatcaccat

SEQ ID NO: 140372 - DNA, 33 bp, Homo sapien
acatgctacagtctaataaaccttaatcaccat

SEQ ID NO: 140373 - DNA, 33 bp, Homo sapien
ttgctaaactctgtgaatataccaaaacacagc

SEQ ID NO: 140374 - DNA, 33 bp, Homo sapien
ttgctaaactctgtgactataccaaaacacagc

SEQ ID NO: 140375 - DNA, 33 bp, Homo sapien
agaatatagctaccacaaataacaagaattgac

SEQ ID NO: 140376 - DNA, 33 bp, Homo sapien
agaatatagctaccacgaataacaagaattgac

SEQ ID NO: 140377 - DNA, 33 bp, Homo sapien
atttacctactcactaaaatttgcaacctcaaa

SEQ ID NO: 140378 - DNA, 33 bp, Homo sapien
atttacctactcactataatttgcaacctcaaa

SEQ ID NO: 140379 - DNA, 33 bp, Homo sapien
tctctgcaagaaaaaacttgcttaggcttattt

SEQ ID NO: 140380 - DNA, 33 bp, Homo sapien
tctctgcaagaaaaaatttgcttaggcttattt

SEQ ID NO: 140381 - DNA, 33 bp, Homo sapien
aacactggactaaagacgggaatgattcctgga

SEQ ID NO: 140382 - DNA, 33 bp, Homo sapien
aacactggactaaagatgggaatgattcctgga

SEQ ID NO: 140383 - DNA, 33 bp, Homo sapien
ttaaggaaatctgtaactgttactgtagatgtt

SEQ ID NO: 140384 - DNA, 33 bp, Homo sapien
ttaaggaaatctgtaattgttactgtagatgtt

SEQ ID NO: 140385 - DNA, 33 bp, Homo sapien
ctataaaagtctaccagctatgaactcaaatat

SEQ ID NO: 140386 - DNA, 33 bp, Homo sapien
ctataaaagtctaccatctatgaactcaaatat

SEQ ID NO: 140387 - DNA, 33 bp, Homo sapien
gacaatcacagttctccaaccagggtcctttat

SEQ ID NO: 140388 - DNA, 33 bp, Homo sapien
gacaatcacagttctcgaaccagggtcctttat

SEQ ID NO: 140389 - DNA, 33 bp, Homo sapien
gaggaaacaagcactcccatccattgctaacag

SEQ ID NO: 140390 - DNA, 33 bp, Homo sapien
gaggaaacaagcactctcatccattgctaacag

SEQ ID NO: 140391 - DNA, 33 bp, Homo sapien
acacaagcaggctatacgtgctcttttacactt

SEQ ID NO: 140392 - DNA, 33 bp, Homo sapien
acacaagcaggctatatgtgctcttttacactt

SEQ ID NO: 140393 - DNA, 33 bp, Homo sapien
atgctcagactaccccaagtttgacaggagaag

SEQ ID NO: 140394 - DNA, 33 bp, Homo sapien
atgctcagactacccccagtttgacaggagaag

SEQ ID NO: 140395 - DNA, 33 bp, Homo sapien
tttggttttggccttacgtgaccttttcatttt

SEQ ID NO: 140396 - DNA, 33 bp, Homo sapien
tttggttttggccttatgtgaccttttcatttt

SEQ ID NO: 140397 - DNA, 33 bp, Homo sapien
ggataattgcacagtccagagttgatgtggatc

SEQ ID NO: 140398 - DNA, 33 bp, Homo sapien
ggataattgcacagtctagagttgatgtggatc

SEQ ID NO: 140399 - DNA, 33 bp, Homo sapien
taaaaagaacgtgcccagctccaaattctcctg

SEQ ID NO: 140400 - DNA, 33 bp, Homo sapien
taaaaagaacgtgcccggctccaaattctcctg

SEQ ID NO: 140401 - DNA, 33 bp, Homo sapien
gtactttttctgcaaaacacagactctaacggg

SEQ ID NO: 140402 - DNA, 33 bp, Homo sapien
gtactttttctgcaaagcacagactctaacggg

SEQ ID NO: 140403 - DNA, 33 bp, Homo sapien
taagaatttgaagcaaagtgcagtgagcagcag

SEQ ID NO: 140404 - DNA, 33 bp, Homo sapien
taagaatttgaagcaacgtgcagtgagcagcag

SEQ ID NO: 140405 - DNA, 33 bp, Homo sapien
ctttctgagaccaacgcaggatacaaacttact

SEQ ID NO: 140406 - DNA, 33 bp, Homo sapien
ctttctgagaccaacgtaggatacaaacttact

SEQ ID NO: 140407 - DNA, 33 bp, Homo sapien
tctgagcctaaaattaaaaaacttagcaactgc

SEQ ID NO: 140408 - DNA, 33 bp, Homo sapien
tctgagcctaaaattacaaaacttagcaactgc

SEQ ID NO: 140409 - DNA, 33 bp, Homo sapien
attttaggctcagaggaccataggaggttttaa

SEQ ID NO: 140410 - DNA, 33 bp, Homo sapien
attttaggctcagaggcccataggaggttttaa

SEQ ID NO: 140411 - DNA, 33 bp, Homo sapien
gcagctgaaattgggaataagactgagaattac

SEQ ID NO: 140412 - DNA, 33 bp, Homo sapien
gcagctgaaattgggagtaagactgagaattac

SEQ ID NO: 140413 - DNA, 33 bp, Homo sapien
ggaggaaaaaggtaacagtgagcagtaggaaat

SEQ ID NO: 140414 - DNA, 33 bp, Homo sapien
ggaggaaaaaggtaacggtgagcagtaggaaat

SEQ ID NO: 140415 - DNA, 33 bp, Homo sapien
ggacatgaggcttgtaggaatctgctctgttat

SEQ ID NO: 140416 - DNA, 33 bp, Homo sapien
ggacatgaggcttgtatgaatctgctctgttat

SEQ ID NO: 140417 - DNA, 33 bp, Homo sapien
tgtgagagcctcagtcactcatcatctctcagc

SEQ ID NO: 140418 - DNA, 33 bp, Homo sapien
tgtgagagcctcagtcgctcatcatctctcagc

SEQ ID NO: 140419 - DNA, 33 bp, Homo sapien
atcaacagatgattgaaaagtttaactccaagt

SEQ ID NO: 140420 - DNA, 33 bp, Homo sapien
atcaacagatgattgagaagtttaactccaagt

SEQ ID NO: 140421 - DNA, 33 bp, Homo sapien
aaaatatttgataatgaaacggcacttggagtt

SEQ ID NO: 140422 - DNA, 33 bp, Homo sapien
aaaatatttgataatggaacggcacttggagtt

SEQ ID NO: 140423 - DNA, 33 bp, Homo sapien
taagaactatctgcccaacaacacaattcagtc

SEQ ID NO: 140424 - DNA, 33 bp, Homo sapien
taagaactatctgcccgacaacacaattcagtc

SEQ ID NO: 140425 - DNA, 33 bp, Homo sapien
ccccaggtagacaagcacctggttacagagcac

SEQ ID NO: 140426 - DNA, 33 bp, Homo sapien
ccccaggtagacaagcgcctggttacagagcac

SEQ ID NO: 140427 - DNA, 33 bp, Homo sapien
cagggacagcatatccaaagtccagagatgggg

SEQ ID NO: 140428 - DNA, 33 bp, Homo sapien
cagggacagcatatccgaagtccagagatgggg

SEQ ID NO: 140429 - DNA, 33 bp, Homo sapien
ccccatttgaacagaaaggttaagggaagcctc

SEQ ID NO: 140430 - DNA, 33 bp, Homo sapien
ccccatttgaacagaagggttaagggaagcctc

SEQ ID NO: 140431 - DNA, 33 bp, Homo sapien
ataattgctattgttaccatttttgaaaaattg

SEQ ID NO: 140432 - DNA, 33 bp, Homo sapien
ataattgctattgttatcatttttgaaaaattg

SEQ ID NO: 140433 - DNA, 33 bp, Homo sapien
catctgatggcagacacaatcaagggcagggat

SEQ ID NO: 140434 - DNA, 33 bp, Homo sapien
catctgatggcagacataatcaagggcagggat

SEQ ID NO: 140435 - DNA, 33 bp, Homo sapien
ggccagagattgtccaagtctggttgggcaaac

SEQ ID NO: 140436 - DNA, 33 bp, Homo sapien
ggccagagattgtccaggtctggttgggcaaac

SEQ ID NO: 140437 - DNA, 33 bp, Homo sapien
ccacccctaatttgacagtatcttccacaatac

SEQ ID NO: 140438 - DNA, 33 bp, Homo sapien
ccacccctaatttgacggtatcttccacaatac

SEQ ID NO: 140439 - DNA, 33 bp, Homo sapien
gccacttaaagagccaaactaatggtgattcct

SEQ ID NO: 140440 - DNA, 33 bp, Homo sapien
gccacttaaagagccagactaatggtgattcct

SEQ ID NO: 140441 - DNA, 33 bp, Homo sapien
ctctgacaccgtggaccacatactattgcctag

SEQ ID NO: 140442 - DNA, 33 bp, Homo sapien
ctctgacaccgtggactacatactattgcctag

SEQ ID NO: 140443 - DNA, 33 bp, Homo sapien
cactgtttcaagcagactacaaattatatactt

SEQ ID NO: 140444 - DNA, 33 bp, Homo sapien
cactgtttcaagcagattacaaattatatactt

SEQ ID NO: 140445 - DNA, 33 bp, Homo sapien
gacgtgcttgaagcataactagctccatccaat

SEQ ID NO: 140446 - DNA, 33 bp, Homo sapien
gacgtgcttgaagcatgactagctccatccaat

SEQ ID NO: 140447 - DNA, 33 bp, Homo sapien
atgttagaggttgttacacactttggatcccag

SEQ ID NO: 140448 - DNA, 33 bp, Homo sapien
atgttagaggttgttatacactttggatcccag

SEQ ID NO: 140449 - DNA, 33 bp, Homo sapien
acaaaaacagtatgatcagaggctcacagggac

SEQ ID NO: 140450 - DNA, 33 bp, Homo sapien
acaaaaacagtatgatgagaggctcacagggac

SEQ ID NO: 140451 - DNA, 33 bp, Homo sapien
cactatcacttatgcacgaacaagcttatctaa

SEQ ID NO: 140452 - DNA, 33 bp, Homo sapien
cactatcacttatgcatgaacaagcttatctaa

SEQ ID NO: 140453 - DNA, 33 bp, Homo sapien
ttacaccactcttagaaaatttggctgcttgaa

SEQ ID NO: 140454 - DNA, 33 bp, Homo sapien
ttacaccactcttagagaatttggctgcttgaa

SEQ ID NO: 140455 - DNA, 33 bp, Homo sapien
gagggtctaaaagcaaatgttttctgctcataa

SEQ ID NO: 140456 - DNA, 33 bp, Homo sapien
gagggtctaaaagcaagtgttttctgctcataa

SEQ ID NO: 140457 - DNA, 33 bp, Homo sapien
aatcttgtctgcttaaagtgcacccagctgaga

SEQ ID NO: 140458 - DNA, 33 bp, Homo sapien
aatcttgtctgcttaacgtgcacccagctgaga

SEQ ID NO: 140459 - DNA, 33 bp, Homo sapien
tggcaagaaggagagcagcagagaagaccaaga

SEQ ID NO: 140460 - DNA, 33 bp, Homo sapien
tggcaagaaggagagcggcagagaagaccaaga

SEQ ID NO: 140461 - DNA, 33 bp, Homo sapien
cccaactgtggtcagaaggagacgtgatcacac

SEQ ID NO: 140462 - DNA, 33 bp, Homo sapien
cccaactgtggtcagagggagacgtgatcacac

SEQ ID NO: 140463 - DNA, 33 bp, Homo sapien
gcatatgtggttcaataaaggaccttgagatgg

SEQ ID NO: 140464 - DNA, 33 bp, Homo sapien
gcatatgtggttcaatgaaggaccttgagatgg

SEQ ID NO: 140465 - DNA, 33 bp, Homo sapien
accttctcacctccaaactcaacacaaatttct

SEQ ID NO: 140466 - DNA, 33 bp, Homo sapien
accttctcacctccaatctcaacacaaatttct

SEQ ID NO: 140467 - DNA, 33 bp, Homo sapien
ctaaagctgccaatcaagttccagaagcaaaca

SEQ ID NO: 140468 - DNA, 33 bp, Homo sapien
ctaaagctgccaatcacgttccagaagcaaaca

SEQ ID NO: 140469 - DNA, 33 bp, Homo sapien
gcacaaaatgggcatcccctgaatcacaagtgg

SEQ ID NO: 140470 - DNA, 33 bp, Homo sapien
gcacaaaatgggcatctcctgaatcacaagtgg

SEQ ID NO: 140471 - DNA, 33 bp, Homo sapien
tcaccatagactttcactctaccactctggagt

SEQ ID NO: 140472 - DNA, 33 bp, Homo sapien
tcaccatagactttcattctaccactctggagt

SEQ ID NO: 140473 - DNA, 33 bp, Homo sapien
cctatggagagagagacgctccagaaacctagc

SEQ ID NO: 140474 - DNA, 33 bp, Homo sapien
cctatggagagagagatgctccagaaacctagc

SEQ ID NO: 140475 - DNA, 33 bp, Homo sapien
tttatcctatgagaaacagtggtcataataatt

SEQ ID NO: 140476 - DNA, 33 bp, Homo sapien
tttatcctatgagaaagagtggtcataataatt

SEQ ID NO: 140477 - DNA, 33 bp, Homo sapien
ctttttaaagacaagactagaataagtgcaaag

SEQ ID NO: 140478 - DNA, 33 bp, Homo sapien
ctttttaaagacaagagtagaataagtgcaaag

SEQ ID NO: 140479 - DNA, 33 bp, Homo sapien
aagtgagaaaaagaagcaaatttgaacctctct

SEQ ID NO: 140480 - DNA, 33 bp, Homo sapien
aagtgagaaaaagaagtaaatttgaacctctct

SEQ ID NO: 140481 - DNA, 33 bp, Homo sapien
tactgctcttgtgagacgataaaaagcctacat

SEQ ID NO: 140482 - DNA, 33 bp, Homo sapien
tactgctcttgtgagatgataaaaagcctacat

SEQ ID NO: 140483 - DNA, 33 bp, Homo sapien
ctgattaataaaactacaagccaattatttcca

SEQ ID NO: 140484 - DNA, 33 bp, Homo sapien
ctgattaataaaactagaagccaattatttcca

SEQ ID NO: 140485 - DNA, 33 bp, Homo sapien
aaaacaggggcaccgacggtgtaaacccagtaa

SEQ ID NO: 140486 - DNA, 33 bp, Homo sapien
aaaacaggggcaccgatggtgtaaacccagtaa

SEQ ID NO: 140487 - DNA, 33 bp, Homo sapien
ggacagtgagatgacacaatccacatttagaaa

SEQ ID NO: 140488 - DNA, 33 bp, Homo sapien
ggacagtgagatgacataatccacatttagaaa

SEQ ID NO: 140489 - DNA, 33 bp, Homo sapien
gtcattctaaagaccaggtagtttctatctttt

SEQ ID NO: 140490 - DNA, 33 bp, Homo sapien
gtcattctaaagaccatgtagtttctatctttt

SEQ ID NO: 140491 - DNA, 33 bp, Homo sapien
aatatagtgatgcagacaaacataactttatta

SEQ ID NO: 140492 - DNA, 33 bp, Homo sapien
aatatagtgatgcagataaacataactttatta

SEQ ID NO: 140493 - DNA, 33 bp, Homo sapien
tattatttgtgccttgaacaattaccttttaaa

SEQ ID NO: 140494 - DNA, 33 bp, Homo sapien
tattatttgtgccttgtacaattaccttttaaa

SEQ ID NO: 140495 - DNA, 33 bp, Homo sapien
gtcatctgcaaatggaagtagttttgtgtcttc

SEQ ID NO: 140496 - DNA, 33 bp, Homo sapien
gtcatctgcaaatggaggtagttttgtgtcttc

SEQ ID NO: 140497 - DNA, 33 bp, Homo sapien
tggttgccttgtgcacaaattcaagcctggggc

SEQ ID NO: 140498 - DNA, 33 bp, Homo sapien
tggttgccttgtgcaccaattcaagcctggggc

SEQ ID NO: 140499 - DNA, 33 bp, Homo sapien
caagactcgaatgataacatagatgtaaaatgc

SEQ ID NO: 140500 - DNA, 33 bp, Homo sapien
caagactcgaatgatagcatagatgtaaaatgc

SEQ ID NO: 140501 - DNA, 33 bp, Homo sapien
caagtgatttccaagacggcatcctaaacttat

SEQ ID NO: 140502 - DNA, 33 bp, Homo sapien
caagtgatttccaagatggcatcctaaacttat

SEQ ID NO: 140503 - DNA, 33 bp, Homo sapien
cacttgaaacggccaaatctgaggttctgtgtg

SEQ ID NO: 140504 - DNA, 33 bp, Homo sapien
cacttgaaacggccaattctgaggttctgtgtg

SEQ ID NO: 140505 - DNA, 33 bp, Homo sapien
ataagagccagcacaaatcctacgttaaactaa

SEQ ID NO: 140506 - DNA, 33 bp, Homo sapien
ataagagccagcacaattcctacgttaaactaa

SEQ ID NO: 140507 - DNA, 33 bp, Homo sapien
tgggaggcaccttagcaattttccaggccaaca

SEQ ID NO: 140508 - DNA, 33 bp, Homo sapien
tgggaggcaccttagcgattttccaggccaaca

SEQ ID NO: 140509 - DNA, 33 bp, Homo sapien
aacttagggtgcttggaacaaagactagtgaaa

SEQ ID NO: 140510 - DNA, 33 bp, Homo sapien
aacttagggtgcttgggacaaagactagtgaaa

SEQ ID NO: 140511 - DNA, 33 bp, Homo sapien
cctccagaagactccactacaccccatgatccc

SEQ ID NO: 140512 - DNA, 33 bp, Homo sapien
cctccagaagactccattacaccccatgatccc

SEQ ID NO: 140513 - DNA, 33 bp, Homo sapien
ccatcttagctgaacagagtttttgctgtgtcg

SEQ ID NO: 140514 - DNA, 33 bp, Homo sapien
ccatcttagctgaacatagtttttgctgtgtcg

SEQ ID NO: 140515 - DNA, 33 bp, Homo sapien
acaggcactataccaacctgaatgtaaatccag

SEQ ID NO: 140516 - DNA, 33 bp, Homo sapien
acaggcactataccaatctgaatgtaaatccag

SEQ ID NO: 140517 - DNA, 33 bp, Homo sapien
ttgttttgaccagcagaatgcagcataagttgt

SEQ ID NO: 140518 - DNA, 33 bp, Homo sapien
ttgttttgaccagcagtatgcagcataagttgt

SEQ ID NO: 140519 - DNA, 33 bp, Homo sapien
agtatctgatagcccacatcagcaaggaatttt

SEQ ID NO: 140520 - DNA, 33 bp, Homo sapien
agtatctgatagcccagatcagcaaggaatttt

SEQ ID NO: 140521 - DNA, 33 bp, Homo sapien
ttcctcagttgaataccagacaacatttttggc

SEQ ID NO: 140522 - DNA, 33 bp, Homo sapien
ttcctcagttgaatactagacaacatttttggc

SEQ ID NO: 140523 - DNA, 33 bp, Homo sapien
gaagtgagtgactaaaggccccacctcctgggt

SEQ ID NO: 140524 - DNA, 33 bp, Homo sapien
gaagtgagtgactaaatgccccacctcctgggt

SEQ ID NO: 140525 - DNA, 33 bp, Homo sapien
ttcagcttaccaactgcagatctcggcacttct

SEQ ID NO: 140526 - DNA, 33 bp, Homo sapien
ttcagcttaccaactgtagatctcggcacttct

SEQ ID NO: 140527 - DNA, 33 bp, Homo sapien
gcagggaaaccagaaccgattctaggatttagg

SEQ ID NO: 140528 - DNA, 33 bp, Homo sapien
gcagggaaaccagaactgattctaggatttagg

SEQ ID NO: 140529 - DNA, 33 bp, Homo sapien
taatatttagattggacatatgtatgtaagcac

SEQ ID NO: 140530 - DNA, 33 bp, Homo sapien
taatatttagattggatatatgtatgtaagcac

SEQ ID NO: 140531 - DNA, 33 bp, Homo sapien
gaaatatactgaatgacggttgtggatttgggt

SEQ ID NO: 140532 - DNA, 33 bp, Homo sapien
gaaatatactgaatgatggttgtggatttgggt

SEQ ID NO: 140533 - DNA, 33 bp, Homo sapien
ggaaatgcagcttagcaatcatacatatggaat

SEQ ID NO: 140534 - DNA, 33 bp, Homo sapien
ggaaatgcagcttagctatcatacatatggaat

SEQ ID NO: 140535 - DNA, 33 bp, Homo sapien
tagccatagatcaagaaaggccctttgcaaaat

SEQ ID NO: 140536 - DNA, 33 bp, Homo sapien
tagccatagatcaagagaggccctttgcaaaat

SEQ ID NO: 140537 - DNA, 33 bp, Homo sapien
gcacgttatggatgtccagtaaatatttgttga

SEQ ID NO: 140538 - DNA, 33 bp, Homo sapien
gcacgttatggatgtctagtaaatatttgttga

SEQ ID NO: 140539 - DNA, 33 bp, Homo sapien
atttttcttctattgaacctgctacagtatttc

SEQ ID NO: 140540 - DNA, 33 bp, Homo sapien
atttttcttctattgaccctgctacagtatttc

SEQ ID NO: 140541 - DNA, 33 bp, Homo sapien
gtggccattttgccatcatgagatgagtcggct

SEQ ID NO: 140542 - DNA, 33 bp, Homo sapien
gtggccattttgccattatgagatgagtcggct

SEQ ID NO: 140543 - DNA, 33 bp, Homo sapien
tttttttaaagcaataacactaagataagatgt

SEQ ID NO: 140544 - DNA, 33 bp, Homo sapien
tttttttaaagcaatagcactaagataagatgt

SEQ ID NO: 140545 - DNA, 33 bp, Homo sapien
gtgagatctatgtttacacgatttttccttgag

SEQ ID NO: 140546 - DNA, 33 bp, Homo sapien
gtgagatctatgtttatacgatttttccttgag

SEQ ID NO: 140547 - DNA, 33 bp, Homo sapien
agtagttggtttgagacactagaaaattaagtt

SEQ ID NO: 140548 - DNA, 33 bp, Homo sapien
agtagttggtttgagatactagaaaattaagtt

SEQ ID NO: 140549 - DNA, 33 bp, Homo sapien
gtagatgatggagtaccattatactgcaacttt

SEQ ID NO: 140550 - DNA, 33 bp, Homo sapien
gtagatgatggagtactattatactgcaacttt

SEQ ID NO: 140551 - DNA, 33 bp, Homo sapien
tttcatcatcagattggcaaagattgaaacaca

SEQ ID NO: 140552 - DNA, 33 bp, Homo sapien
tttcatcatcagattgtcaaagattgaaacaca

SEQ ID NO: 140553 - DNA, 33 bp, Homo sapien
gtaaatgggtatatgcactgcaaattatgattg

SEQ ID NO: 140554 - DNA, 33 bp, Homo sapien
gtaaatgggtatatgcgctgcaaattatgattg

SEQ ID NO: 140555 - DNA, 33 bp, Homo sapien
caataagctcctcaataaaaaaaactctccctt

SEQ ID NO: 140556 - DNA, 33 bp, Homo sapien
caataagctcctcaattaaaaaaactctccctt

SEQ ID NO: 140557 - DNA, 33 bp, Homo sapien
gagaaatccagacttcaaaattccaaacaaaat

SEQ ID NO: 140558 - DNA, 33 bp, Homo sapien
gagaaatccagacttccaaattccaaacaaaat

SEQ ID NO: 140559 - DNA, 33 bp, Homo sapien
taaaatggggataatccagtacctacctcttaa

SEQ ID NO: 140560 - DNA, 33 bp, Homo sapien
taaaatggggataatctagtacctacctcttaa

SEQ ID NO: 140561 - DNA, 33 bp, Homo sapien
aaggagaggtgagatacaatctagtttccaaaa

SEQ ID NO: 140562 - DNA, 33 bp, Homo sapien
aaggagaggtgagatagaatctagtttccaaaa

SEQ ID NO: 140563 - DNA, 33 bp, Homo sapien
gccgaggatggttactaaactggagagaagcgg

SEQ ID NO: 140564 - DNA, 33 bp, Homo sapien
gccgaggatggttactcaactggagagaagcgg

SEQ ID NO: 140565 - DNA, 33 bp, Homo sapien
tgagaaaactgaaacaaaaagatcttaataact

SEQ ID NO: 140566 - DNA, 33 bp, Homo sapien
tgagaaaactgaaacagaaagatcttaataact

SEQ ID NO: 140567 - DNA, 33 bp, Homo sapien
agcagggaatatgaataaaccaacgtgtatgtc

SEQ ID NO: 140568 - DNA, 33 bp, Homo sapien
agcagggaatatgaatgaaccaacgtgtatgtc

SEQ ID NO: 140569 - DNA, 33 bp, Homo sapien
atctaagataagttaagacaatccttttatctt

SEQ ID NO: 140570 - DNA, 33 bp, Homo sapien
atctaagataagttaatacaatccttttatctt

SEQ ID NO: 140571 - DNA, 33 bp, Homo sapien
taactgttgaagagaaagggagtggcttcccca

SEQ ID NO: 140572 - DNA, 33 bp, Homo sapien
taactgttgaagagaacgggagtggcttcccca

SEQ ID NO: 140573 - DNA, 33 bp, Homo sapien
catcatggaccagaaactgagttaagtgtgtta

SEQ ID NO: 140574 - DNA, 33 bp, Homo sapien
catcatggaccagaaattgagttaagtgtgtta

SEQ ID NO: 140575 - DNA, 33 bp, Homo sapien
ccattgagcgaacataacaattggtggtgtagg

SEQ ID NO: 140576 - DNA, 33 bp, Homo sapien
ccattgagcgaacatagcaattggtggtgtagg

SEQ ID NO: 140577 - DNA, 33 bp, Homo sapien
ttattcctgtcactagaagcacactcccatttc

SEQ ID NO: 140578 - DNA, 33 bp, Homo sapien
ttattcctgtcactaggagcacactcccatttc

SEQ ID NO: 140579 - DNA, 33 bp, Homo sapien
atgccatgaaatctgacgtcagcctccccatga

SEQ ID NO: 140580 - DNA, 33 bp, Homo sapien
atgccatgaaatctgaggtcagcctccccatga

SEQ ID NO: 140581 - DNA, 33 bp, Homo sapien
tccccatgaattgttcaaatccctatcttcaaa

SEQ ID NO: 140582 - DNA, 33 bp, Homo sapien
tccccatgaattgttcgaatccctatcttcaaa

SEQ ID NO: 140583 - DNA, 33 bp, Homo sapien
cttcccttaggataccagagcacttgctgatat

SEQ ID NO: 140584 - DNA, 33 bp, Homo sapien
cttcccttaggataccggagcacttgctgatat

SEQ ID NO: 140585 - DNA, 33 bp, Homo sapien
tagtgaaatgtttgagcatatactagtggtaag

SEQ ID NO: 140586 - DNA, 33 bp, Homo sapien
tagtgaaatgtttgaggatatactagtggtaag

SEQ ID NO: 140587 - DNA, 33 bp, Homo sapien
caatgactcattcaaccgagaaggaaatagttc

SEQ ID NO: 140588 - DNA, 33 bp, Homo sapien
caatgactcattcaactgagaaggaaatagttc

SEQ ID NO: 140589 - DNA, 33 bp, Homo sapien
gtgcttgatagtttagaaggttgacaagacaat

SEQ ID NO: 140590 - DNA, 33 bp, Homo sapien
gtgcttgatagtttaggaggttgacaagacaat

SEQ ID NO: 140591 - DNA, 33 bp, Homo sapien
agagacagttgttcaaacccccagctcactcac

SEQ ID NO: 140592 - DNA, 33 bp, Homo sapien
agagacagttgttcaagcccccagctcactcac

SEQ ID NO: 140593 - DNA, 33 bp, Homo sapien
gggtttcagaaacatcaatcagagcagagcccg

SEQ ID NO: 140594 - DNA, 33 bp, Homo sapien
gggtttcagaaacatcgatcagagcagagcccg

SEQ ID NO: 140595 - DNA, 33 bp, Homo sapien
taaatgaatgaatgaacggcccaaagtcaaagt

SEQ ID NO: 140596 - DNA, 33 bp, Homo sapien
taaatgaatgaatgaatggcccaaagtcaaagt

SEQ ID NO: 140597 - DNA, 33 bp, Homo sapien
tgcattttccaggccactataattggttcagga

SEQ ID NO: 140598 - DNA, 33 bp, Homo sapien
tgcattttccaggccattataattggttcagga

SEQ ID NO: 140599 - DNA, 33 bp, Homo sapien
ttcgatcattcagtaagtatgtattgggtccct

SEQ ID NO: 140600 - DNA, 33 bp, Homo sapien
ttcgatcattcagtaattatgtattgggtccct

SEQ ID NO: 140601 - DNA, 33 bp, Homo sapien
ttgagatcaatctacaaagtgctacaagagtgg

SEQ ID NO: 140602 - DNA, 33 bp, Homo sapien
ttgagatcaatctacagagtgctacaagagtgg

SEQ ID NO: 140603 - DNA, 33 bp, Homo sapien
ctcctgcaaagggtgacgtttgcatcagacacc

SEQ ID NO: 140604 - DNA, 33 bp, Homo sapien
ctcctgcaaagggtgatgtttgcatcagacacc

SEQ ID NO: 140605 - DNA, 33 bp, Homo sapien
tacatgaattaaatgacataatgtgtgtccagc

SEQ ID NO: 140606 - DNA, 33 bp, Homo sapien
tacatgaattaaatgatataatgtgtgtccagc

SEQ ID NO: 140607 - DNA, 33 bp, Homo sapien
tccagaaatattggaagcatttaaagatcagga

SEQ ID NO: 140608 - DNA, 33 bp, Homo sapien
tccagaaatattggaatcatttaaagatcagga

SEQ ID NO: 140609 - DNA, 33 bp, Homo sapien
tgcttagttcttcaggaaaaattcattcagaag

SEQ ID NO: 140610 - DNA, 33 bp, Homo sapien
tgcttagttcttcaggcaaaattcattcagaag

SEQ ID NO: 140611 - DNA, 33 bp, Homo sapien
tgtttttgtctgttccaccaaacatgtgcttgg

SEQ ID NO: 140612 - DNA, 33 bp, Homo sapien
tgtttttgtctgttcccccaaacatgtgcttgg

SEQ ID NO: 140613 - DNA, 33 bp, Homo sapien
atgtgtcttcctataaccagtcacagactgtta

SEQ ID NO: 140614 - DNA, 33 bp, Homo sapien
atgtgtcttcctataatcagtcacagactgtta

SEQ ID NO: 140615 - DNA, 33 bp, Homo sapien
ttctcaaggtctgtccacttaaaaggcctggaa

SEQ ID NO: 140616 - DNA, 33 bp, Homo sapien
ttctcaaggtctgtccgcttaaaaggcctggaa

SEQ ID NO: 140617 - DNA, 33 bp, Homo sapien
ttatgtaaaacatttgcatgattccaaaaccaa

SEQ ID NO: 140618 - DNA, 33 bp, Homo sapien
ttatgtaaaacatttgtatgattccaaaaccaa

SEQ ID NO: 140619 - DNA, 33 bp, Homo sapien
tgcaaaagcccagttgcaaatggcaatgatgca

SEQ ID NO: 140620 - DNA, 33 bp, Homo sapien
tgcaaaagcccagttggaaatggcaatgatgca

SEQ ID NO: 140621 - DNA, 33 bp, Homo sapien
ggggaattaaaggctaaatgtattctgctgact

SEQ ID NO: 140622 - DNA, 33 bp, Homo sapien
ggggaattaaaggctagatgtattctgctgact

SEQ ID NO: 140623 - DNA, 33 bp, Homo sapien
catcaagtttctcctcccctttggaatcttgat

SEQ ID NO: 140624 - DNA, 33 bp, Homo sapien
catcaagtttctcctctcctttggaatcttgat

SEQ ID NO: 140625 - DNA, 33 bp, Homo sapien
gaagaatactttgctacgtaggtgaatttaaaa

SEQ ID NO: 140626 - DNA, 33 bp, Homo sapien
gaagaatactttgctatgtaggtgaatttaaaa

SEQ ID NO: 140627 - DNA, 33 bp, Homo sapien
aatacagcggcataagaccctctccaaaagaca

SEQ ID NO: 140628 - DNA, 33 bp, Homo sapien
aatacagcggcataaggccctctccaaaagaca

SEQ ID NO: 140629 - DNA, 33 bp, Homo sapien
ttttacaggttacaagcactcaagcatttcttt

SEQ ID NO: 140630 - DNA, 33 bp, Homo sapien
ttttacaggttacaaggactcaagcatttcttt

SEQ ID NO: 140631 - DNA, 33 bp, Homo sapien
ttaattcttgagtcatgaagggcaaggaacttg

SEQ ID NO: 140632 - DNA, 33 bp, Homo sapien
ttaattcttgagtcattaagggcaaggaacttg

SEQ ID NO: 140633 - DNA, 33 bp, Homo sapien
ttgagtcttcattacaagcatcaaacagtggat

SEQ ID NO: 140634 - DNA, 33 bp, Homo sapien
ttgagtcttcattacaggcatcaaacagtggat

SEQ ID NO: 140635 - DNA, 33 bp, Homo sapien
gcctcctgagttgttaaagctacaggtacatgc

SEQ ID NO: 140636 - DNA, 33 bp, Homo sapien
gcctcctgagttgttagagctacaggtacatgc

SEQ ID NO: 140637 - DNA, 33 bp, Homo sapien
ctctaattccaagtgccctgttatgaaaagccc

SEQ ID NO: 140638 - DNA, 33 bp, Homo sapien
ctctaattccaagtgctctgttatgaaaagccc

SEQ ID NO: 140639 - DNA, 33 bp, Homo sapien
acttgtcttctcaatacgccaaaaacctcccaa

SEQ ID NO: 140640 - DNA, 33 bp, Homo sapien
acttgtcttctcaatatgccaaaaacctcccaa

SEQ ID NO: 140641 - DNA, 33 bp, Homo sapien
aaaggactagaaagaacggagtcatgtgataca

SEQ ID NO: 140642 - DNA, 33 bp, Homo sapien
aaaggactagaaagaatggagtcatgtgataca

SEQ ID NO: 140643 - DNA, 33 bp, Homo sapien
tgctaagcagaatgcaatattctaaaatctgaa

SEQ ID NO: 140644 - DNA, 33 bp, Homo sapien
tgctaagcagaatgcagtattctaaaatctgaa

SEQ ID NO: 140645 - DNA, 33 bp, Homo sapien
aaactcaaaatccgaaatgctccaatgagcatt

SEQ ID NO: 140646 - DNA, 33 bp, Homo sapien
aaactcaaaatccgaagtgctccaatgagcatt

SEQ ID NO: 140647 - DNA, 33 bp, Homo sapien
cgcatgcctaagtgaacggccatcagacccctt

SEQ ID NO: 140648 - DNA, 33 bp, Homo sapien
cgcatgcctaagtgaatggccatcagacccctt

SEQ ID NO: 140649 - DNA, 33 bp, Homo sapien
gtttcaaagaggaaaaagaagaagacatctctt

SEQ ID NO: 140650 - DNA, 33 bp, Homo sapien
gtttcaaagaggaaaaggaagaagacatctctt

SEQ ID NO: 140651 - DNA, 33 bp, Homo sapien
aatattcttccctcgacctttgcatggcggact

SEQ ID NO: 140652 - DNA, 33 bp, Homo sapien
aatattcttccctcgagctttgcatggcggact

SEQ ID NO: 140653 - DNA, 33 bp, Homo sapien
ctgctatggagccaaactctaaggacattgata

SEQ ID NO: 140654 - DNA, 33 bp, Homo sapien
ctgctatggagccaaattctaaggacattgata

SEQ ID NO: 140655 - DNA, 33 bp, Homo sapien
ttgattagacccatgaacagcatcatttattgt

SEQ ID NO: 140656 - DNA, 33 bp, Homo sapien
ttgattagacccatgagcagcatcatttattgt

SEQ ID NO: 140657 - DNA, 33 bp, Homo sapien
ccaggctctgtacctaaaatctgtaaccacctc

SEQ ID NO: 140658 - DNA, 33 bp, Homo sapien
ccaggctctgtacctagaatctgtaaccacctc

SEQ ID NO: 140659 - DNA, 33 bp, Homo sapien
tgagcttgctgttgaaaccaattcaatggtaca

SEQ ID NO: 140660 - DNA, 33 bp, Homo sapien
tgagcttgctgttgaagccaattcaatggtaca

SEQ ID NO: 140661 - DNA, 33 bp, Homo sapien
gcttaggtctccaaacagagttgattcgctctg

SEQ ID NO: 140662 - DNA, 33 bp, Homo sapien
gcttaggtctccaaacggagttgattcgctctg

SEQ ID NO: 140663 - DNA, 33 bp, Homo sapien
gggcatcgccaataagaccaagtcctgtgccca

SEQ ID NO: 140664 - DNA, 33 bp, Homo sapien
gggcatcgccaataaggccaagtcctgtgccca

SEQ ID NO: 140665 - DNA, 33 bp, Homo sapien
ttgggatttatattagaagtaccacaaactggg

SEQ ID NO: 140666 - DNA, 33 bp, Homo sapien
ttgggatttatattaggagtaccacaaactggg

SEQ ID NO: 140667 - DNA, 33 bp, Homo sapien
tttctgaattgtgaccgagtttgcctagcacag

SEQ ID NO: 140668 - DNA, 33 bp, Homo sapien
tttctgaattgtgacctagtttgcctagcacag

SEQ ID NO: 140669 - DNA, 33 bp, Homo sapien
tctgagaaacaaaacaaagcaactcaaggaata

SEQ ID NO: 140670 - DNA, 33 bp, Homo sapien
tctgagaaacaaaacagagcaactcaaggaata

SEQ ID NO: 140671 - DNA, 33 bp, Homo sapien
cttcaaagatggaagcactgtgatacatgtcta

SEQ ID NO: 140672 - DNA, 33 bp, Homo sapien
cttcaaagatggaagcgctgtgatacatgtcta

SEQ ID NO: 140673 - DNA, 33 bp, Homo sapien
actgtgacaaacagaaacaccccctgatttggg

SEQ ID NO: 140674 - DNA, 33 bp, Homo sapien
actgtgacaaacagaaccaccccctgatttggg

SEQ ID NO: 140675 - DNA, 33 bp, Homo sapien
ggctaagctcccaaaggcttcatctcacatcct

SEQ ID NO: 140676 - DNA, 33 bp, Homo sapien
ggctaagctcccaaagtcttcatctcacatcct

SEQ ID NO: 140677 - DNA, 33 bp, Homo sapien
tgggtcaaagggtaagccaatttagaaatgtat

SEQ ID NO: 140678 - DNA, 33 bp, Homo sapien
tgggtcaaagggtaagtcaatttagaaatgtat

SEQ ID NO: 140679 - DNA, 33 bp, Homo sapien
ccaggcagcgcagcaccacacctttaaaatgaa

SEQ ID NO: 140680 - DNA, 33 bp, Homo sapien
ccaggcagcgcagcactacacctttaaaatgaa

SEQ ID NO: 140681 - DNA, 33 bp, Homo sapien
gagctgcccctggtgaatactcacagaccaaga

SEQ ID NO: 140682 - DNA, 33 bp, Homo sapien
gagctgcccctggtgactactcacagaccaaga

SEQ ID NO: 140683 - DNA, 33 bp, Homo sapien
cctcctatctcaggcacccaaacaaagtactgg

SEQ ID NO: 140684 - DNA, 33 bp, Homo sapien
cctcctatctcaggcatccaaacaaagtactgg

SEQ ID NO: 140685 - DNA, 33 bp, Homo sapien
gggtttttgatacagaaggaggtaatagtctaa

SEQ ID NO: 140686 - DNA, 33 bp, Homo sapien
gggtttttgatacagagggaggtaatagtctaa

SEQ ID NO: 140687 - DNA, 33 bp, Homo sapien
atagggatctgctttccaagcccagtgataaca

SEQ ID NO: 140688 - DNA, 33 bp, Homo sapien
atagggatctgctttctaagcccagtgataaca

SEQ ID NO: 140689 - DNA, 33 bp, Homo sapien
agcccagtgataacaccaggccctttttacctt

SEQ ID NO: 140690 - DNA, 33 bp, Homo sapien
agcccagtgataacacgaggccctttttacctt

SEQ ID NO: 140691 - DNA, 33 bp, Homo sapien
cggtcattgtgcctgggatttaactgctttcga

SEQ ID NO: 140692 - DNA, 33 bp, Homo sapien
cggtcattgtgcctggtatttaactgctttcga

SEQ ID NO: 140693 - DNA, 33 bp, Homo sapien
ggggtgtgttgtagctaaattaagggtaacatg

SEQ ID NO: 140694 - DNA, 33 bp, Homo sapien
ggggtgtgttgtagctgaattaagggtaacatg

SEQ ID NO: 140695 - DNA, 33 bp, Homo sapien
gacccagagtggagaaataacttgcgcaatgac

SEQ ID NO: 140696 - DNA, 33 bp, Homo sapien
gacccagagtggagaagtaacttgcgcaatgac

SEQ ID NO: 140697 - DNA, 33 bp, Homo sapien
tagttcttacctcactaagcattaactattcta

SEQ ID NO: 140698 - DNA, 33 bp, Homo sapien
tagttcttacctcactgagcattaactattcta

SEQ ID NO: 140699 - DNA, 33 bp, Homo sapien
gctacctgagggttaaaggcagagagagaaagc

SEQ ID NO: 140700 - DNA, 33 bp, Homo sapien
gctacctgagggttaatggcagagagagaaagc

SEQ ID NO: 140701 - DNA, 33 bp, Homo sapien
gaagtataaaaagttgcaggcaataggtaattg

SEQ ID NO: 140702 - DNA, 33 bp, Homo sapien
gaagtataaaaagttgtaggcaataggtaattg

SEQ ID NO: 140703 - DNA, 33 bp, Homo sapien
caaagaaacgtaaaagaattgcaaattatcata

SEQ ID NO: 140704 - DNA, 33 bp, Homo sapien
caaagaaacgtaaaagcattgcaaattatcata

SEQ ID NO: 140705 - DNA, 33 bp, Homo sapien
atgcctttggtgctgcaatcacactggtctcag

SEQ ID NO: 140706 - DNA, 33 bp, Homo sapien
atgcctttggtgctgcgatcacactggtctcag

SEQ ID NO: 140707 - DNA, 33 bp, Homo sapien
acaacaaaggctcaaacgaggatttttgttcca

SEQ ID NO: 140708 - DNA, 33 bp, Homo sapien
acaacaaaggctcaaatgaggatttttgttcca

SEQ ID NO: 140709 - DNA, 33 bp, Homo sapien
taacacgaagaaaccaaggagctgctttttaaa

SEQ ID NO: 140710 - DNA, 33 bp, Homo sapien
taacacgaagaaaccagggagctgctttttaaa

SEQ ID NO: 140711 - DNA, 33 bp, Homo sapien
tttcttcgtgttatgacaatgttgccctcttta

SEQ ID NO: 140712 - DNA, 33 bp, Homo sapien
tttcttcgtgttatgagaatgttgccctcttta

SEQ ID NO: 140713 - DNA, 33 bp, Homo sapien
gctgcaaacatctggacagctttcccagcaact

SEQ ID NO: 140714 - DNA, 33 bp, Homo sapien
gctgcaaacatctggagagctttcccagcaact

SEQ ID NO: 140715 - DNA, 33 bp, Homo sapien
ctgtcaagttcacagaagactgatatttgagtt

SEQ ID NO: 140716 - DNA, 33 bp, Homo sapien
ctgtcaagttcacagaggactgatatttgagtt

SEQ ID NO: 140717 - DNA, 33 bp, Homo sapien
gactgatatttgagttcaacaagaagagggtgt

SEQ ID NO: 140718 - DNA, 33 bp, Homo sapien
gactgatatttgagttgaacaagaagagggtgt

SEQ ID NO: 140719 - DNA, 33 bp, Homo sapien
catcaagttcatccccaactggctgccagaaaa

SEQ ID NO: 140720 - DNA, 33 bp, Homo sapien
catcaagttcatcccccactggctgccagaaaa

SEQ ID NO: 140721 - DNA, 33 bp, Homo sapien
cctcttctccaaaacacctagaactaactagga

SEQ ID NO: 140722 - DNA, 33 bp, Homo sapien
cctcttctccaaaacatctagaactaactagga

SEQ ID NO: 140723 - DNA, 33 bp, Homo sapien
tcagcgctctgagcgcagcatttacttacccat

SEQ ID NO: 140724 - DNA, 33 bp, Homo sapien
tcagcgctctgagcgccgcatttacttacccat

SEQ ID NO: 140725 - DNA, 33 bp, Homo sapien
agtagctggtggcagacagaattagaatccagg

SEQ ID NO: 140726 - DNA, 33 bp, Homo sapien
agtagctggtggcagatagaattagaatccagg

SEQ ID NO: 140727 - DNA, 33 bp, Homo sapien
tgaagaaatgcacaacggcttcaacactggagg

SEQ ID NO: 140728 - DNA, 33 bp, Homo sapien
tgaagaaatgcacaactgcttcaacactggagg

SEQ ID NO: 140729 - DNA, 33 bp, Homo sapien
aatattagttagctataaaaaggaacaaagacc

SEQ ID NO: 140730 - DNA, 33 bp, Homo sapien
aatattagttagctatgaaaaggaacaaagacc

SEQ ID NO: 140731 - DNA, 33 bp, Homo sapien
tcgttaggattaagaaacctcaatctagtagca

SEQ ID NO: 140732 - DNA, 33 bp, Homo sapien
tcgttaggattaagaaccctcaatctagtagca

SEQ ID NO: 140733 - DNA, 33 bp, Homo sapien
cggtctctgtttggcaatacagtcttcataacc

SEQ ID NO: 140734 - DNA, 33 bp, Homo sapien
cggtctctgtttggcagtacagtcttcataacc

SEQ ID NO: 140735 - DNA, 33 bp, Homo sapien
ctgcacacaaactccacggttcagagctttaga

SEQ ID NO: 140736 - DNA, 33 bp, Homo sapien
ctgcacacaaactccatggttcagagctttaga

SEQ ID NO: 140737 - DNA, 33 bp, Homo sapien
gaacaaacaattggaacgagtggaagatttcaa

SEQ ID NO: 140738 - DNA, 33 bp, Homo sapien
gaacaaacaattggaatgagtggaagatttcaa

SEQ ID NO: 140739 - DNA, 33 bp, Homo sapien
cattgaaactttttcacggtaaagtgttaggag

SEQ ID NO: 140740 - DNA, 33 bp, Homo sapien
cattgaaactttttcatggtaaagtgttaggag

SEQ ID NO: 140741 - DNA, 33 bp, Homo sapien
tgttatatcaactttgaaaatcatgatactact

SEQ ID NO: 140742 - DNA, 33 bp, Homo sapien
tgttatatcaactttgcaaatcatgatactact

SEQ ID NO: 140743 - DNA, 33 bp, Homo sapien
atgtttgtcctcagaaataccattgttgatgtg

SEQ ID NO: 140744 - DNA, 33 bp, Homo sapien
atgtttgtcctcagaactaccattgttgatgtg

SEQ ID NO: 140745 - DNA, 33 bp, Homo sapien
ctgcacacacctgaaactttaaggaggcctttc

SEQ ID NO: 140746 - DNA, 33 bp, Homo sapien
ctgcacacacctgaaagtttaaggaggcctttc

SEQ ID NO: 140747 - DNA, 33 bp, Homo sapien
ttaagaggaactaccaagtggcagtgcaatgtt

SEQ ID NO: 140748 - DNA, 33 bp, Homo sapien
ttaagaggaactaccatgtggcagtgcaatgtt

SEQ ID NO: 140749 - DNA, 33 bp, Homo sapien
tggttcttccagaggacagatttgatcatgtga

SEQ ID NO: 140750 - DNA, 33 bp, Homo sapien
tggttcttccagaggatagatttgatcatgtga

SEQ ID NO: 140751 - DNA, 33 bp, Homo sapien
ctatgaactgagattccaatggtaagaaaacac

SEQ ID NO: 140752 - DNA, 33 bp, Homo sapien
ctatgaactgagattctaatggtaagaaaacac

SEQ ID NO: 140753 - DNA, 33 bp, Homo sapien
tgacagcatcagctacagaagcctctcatctcc

SEQ ID NO: 140754 - DNA, 33 bp, Homo sapien
tgacagcatcagctacggaagcctctcatctcc

SEQ ID NO: 140755 - DNA, 33 bp, Homo sapien
tgcttgacccgcaacaagatttacatattgaat

SEQ ID NO: 140756 - DNA, 33 bp, Homo sapien
tgcttgacccgcaacaggatttacatattgaat

SEQ ID NO: 140757 - DNA, 33 bp, Homo sapien
tggcgagattttagaaatgggggaagttctcac

SEQ ID NO: 140758 - DNA, 33 bp, Homo sapien
tggcgagattttagaagtgggggaagttctcac

SEQ ID NO: 140759 - DNA, 33 bp, Homo sapien
cgaaaataaactcaaccactaattctttcagca

SEQ ID NO: 140760 - DNA, 33 bp, Homo sapien
cgaaaataaactcaactactaattctttcagca

SEQ ID NO: 140761 - DNA, 33 bp, Homo sapien
gataagagaagaatgcaccttttgatatttact

SEQ ID NO: 140762 - DNA, 33 bp, Homo sapien
gataagagaagaatgcgccttttgatatttact

SEQ ID NO: 140763 - DNA, 33 bp, Homo sapien
cttgtcaacacctaataaagttgaagatgttct

SEQ ID NO: 140764 - DNA, 33 bp, Homo sapien
cttgtcaacacctaatgaagttgaagatgttct

SEQ ID NO: 140765 - DNA, 33 bp, Homo sapien
attatcactattattcacctccaggctacagtt

SEQ ID NO: 140766 - DNA, 33 bp, Homo sapien
attatcactattattcgcctccaggctacagtt

SEQ ID NO: 140767 - DNA, 33 bp, Homo sapien
cttccaatcaagaggcaataaaataaaagcttc

SEQ ID NO: 140768 - DNA, 33 bp, Homo sapien
cttccaatcaagaggccataaaataaaagcttc

SEQ ID NO: 140769 - DNA, 33 bp, Homo sapien
aatttggcaattcctaataaagcaacatagaca

SEQ ID NO: 140770 - DNA, 33 bp, Homo sapien
aatttggcaattcctattaaagcaacatagaca

SEQ ID NO: 140771 - DNA, 33 bp, Homo sapien
aacgctgtaagttttcacaggtgccaatatttt

SEQ ID NO: 140772 - DNA, 33 bp, Homo sapien
aacgctgtaagttttctcaggtgccaatatttt

SEQ ID NO: 140773 - DNA, 33 bp, Homo sapien
ataggattatatccagcctgcttcagttcatcc

SEQ ID NO: 140774 - DNA, 33 bp, Homo sapien
ataggattatatccagtctgcttcagttcatcc

SEQ ID NO: 140775 - DNA, 33 bp, Homo sapien
ctttgcagatgggtaacattttggacacttcag

SEQ ID NO: 140776 - DNA, 33 bp, Homo sapien
ctttgcagatgggtaatattttggacacttcag

SEQ ID NO: 140777 - DNA, 33 bp, Homo sapien
tgcgatacgctgataaaaatagcttgaccaatg

SEQ ID NO: 140778 - DNA, 33 bp, Homo sapien
tgcgatacgctgataagaatagcttgaccaatg

SEQ ID NO: 140779 - DNA, 33 bp, Homo sapien
cagaaaaacaaagcagcaaaaatcaggctggga

SEQ ID NO: 140780 - DNA, 33 bp, Homo sapien
cagaaaaacaaagcaggaaaaatcaggctggga

SEQ ID NO: 140781 - DNA, 33 bp, Homo sapien
aatggtagattagacacagcagatgaaaaatta

SEQ ID NO: 140782 - DNA, 33 bp, Homo sapien
aatggtagattagacatagcagatgaaaaatta

SEQ ID NO: 140783 - DNA, 33 bp, Homo sapien
aagggagcagtctttaagtctttacacaaatta

SEQ ID NO: 140784 - DNA, 33 bp, Homo sapien
aagggagcagtctttacgtctttacacaaatta

SEQ ID NO: 140785 - DNA, 33 bp, Homo sapien
aatgcggccaacttacagatttatatggcttat

SEQ ID NO: 140786 - DNA, 33 bp, Homo sapien
aatgcggccaacttacggatttatatggcttat

SEQ ID NO: 140787 - DNA, 33 bp, Homo sapien
ttttgaattctgatcactctggcactagtaact

SEQ ID NO: 140788 - DNA, 33 bp, Homo sapien
ttttgaattctgatcattctggcactagtaact

SEQ ID NO: 140789 - DNA, 33 bp, Homo sapien
ttcactcacaaccaaaatgtccctgattagaac

SEQ ID NO: 140790 - DNA, 33 bp, Homo sapien
ttcactcacaaccaaagtgtccctgattagaac

SEQ ID NO: 140791 - DNA, 33 bp, Homo sapien
atagtcaacgtgcactaagctcttactgcttgc

SEQ ID NO: 140792 - DNA, 33 bp, Homo sapien
atagtcaacgtgcactgagctcttactgcttgc

SEQ ID NO: 140793 - DNA, 33 bp, Homo sapien
tctctgaagcatttcaaattcctcaggaataat

SEQ ID NO: 140794 - DNA, 33 bp, Homo sapien
tctctgaagcatttcagattcctcaggaataat

SEQ ID NO: 140795 - DNA, 33 bp, Homo sapien
ctactagtgaatcctcaaactctcagcctgttg

SEQ ID NO: 140796 - DNA, 33 bp, Homo sapien
ctactagtgaatcctcgaactctcagcctgttg

SEQ ID NO: 140797 - DNA, 33 bp, Homo sapien
tatgtatgtgcttgtaaagtatgtgtgtgtatg

SEQ ID NO: 140798 - DNA, 33 bp, Homo sapien
tatgtatgtgcttgtacagtatgtgtgtgtatg

SEQ ID NO: 140799 - DNA, 33 bp, Homo sapien
tgggaactgatcagacacagaaatgaagctaag

SEQ ID NO: 140800 - DNA, 33 bp, Homo sapien
tgggaactgatcagactcagaaatgaagctaag

SEQ ID NO: 140801 - DNA, 33 bp, Homo sapien
aagcctgattggtggccaatacaagactatttc

SEQ ID NO: 140802 - DNA, 33 bp, Homo sapien
aagcctgattggtggctaatacaagactatttc

SEQ ID NO: 140803 - DNA, 33 bp, Homo sapien
acaggttctcaccttccattgcaaagtcacttt

SEQ ID NO: 140804 - DNA, 33 bp, Homo sapien
acaggttctcaccttctattgcaaagtcacttt

SEQ ID NO: 140805 - DNA, 33 bp, Homo sapien
aacctcccagcatctgaaaacaccatattatct

SEQ ID NO: 140806 - DNA, 33 bp, Homo sapien
aacctcccagcatctggaaacaccatattatct

SEQ ID NO: 140807 - DNA, 33 bp, Homo sapien
tgtgtctgggaccacaaaacaaactcctcttca

SEQ ID NO: 140808 - DNA, 33 bp, Homo sapien
tgtgtctgggaccacacaacaaactcctcttca

SEQ ID NO: 140809 - DNA, 33 bp, Homo sapien
tagtgtttgtcctgccagcgtaactgtttgaca

SEQ ID NO: 140810 - DNA, 33 bp, Homo sapien
tagtgtttgtcctgccggcgtaactgtttgaca

SEQ ID NO: 140811 - DNA, 33 bp, Homo sapien
tttctgctgcaggtgaaccctgtaccacttaag

SEQ ID NO: 140812 - DNA, 33 bp, Homo sapien
tttctgctgcaggtgatccctgtaccacttaag

SEQ ID NO: 140813 - DNA, 33 bp, Homo sapien
tggtcccctaaggccagcggatctgctctgtag

SEQ ID NO: 140814 - DNA, 33 bp, Homo sapien
tggtcccctaaggccatcggatctgctctgtag

SEQ ID NO: 140815 - DNA, 33 bp, Homo sapien
actgcagcatgaagcaagctgtacgcagcccca

SEQ ID NO: 140816 - DNA, 33 bp, Homo sapien
actgcagcatgaagcaggctgtacgcagcccca

SEQ ID NO: 140817 - DNA, 33 bp, Homo sapien
tccagacttgcagcaactgaaatgtcactgcct

SEQ ID NO: 140818 - DNA, 33 bp, Homo sapien
tccagacttgcagcaattgaaatgtcactgcct

SEQ ID NO: 140819 - DNA, 33 bp, Homo sapien
accacctgcaacatgccaagctactttggttgt

SEQ ID NO: 140820 - DNA, 33 bp, Homo sapien
accacctgcaacatgctaagctactttggttgt

SEQ ID NO: 140821 - DNA, 33 bp, Homo sapien
agaaatggatggaacaaaaagaaagcccaaaat

SEQ ID NO: 140822 - DNA, 33 bp, Homo sapien
agaaatggatggaacacaaagaaagcccaaaat

SEQ ID NO: 140823 - DNA, 33 bp, Homo sapien
caggagatgcggatgaagccagtttaaaactca

SEQ ID NO: 140824 - DNA, 33 bp, Homo sapien
caggagatgcggatgaggccagtttaaaactca

SEQ ID NO: 140825 - DNA, 33 bp, Homo sapien
cctgagtcccgctccacaactcctgatttagaa

SEQ ID NO: 140826 - DNA, 33 bp, Homo sapien
cctgagtcccgctccataactcctgatttagaa

SEQ ID NO: 140827 - DNA, 33 bp, Homo sapien
gtgaatttgggaagcaccaatttctttttcttt

SEQ ID NO: 140828 - DNA, 33 bp, Homo sapien
gtgaatttgggaagcatcaatttctttttcttt

SEQ ID NO: 140829 - DNA, 33 bp, Homo sapien
cccatacaggtcttgcacaattattagttgaaa

SEQ ID NO: 140830 - DNA, 33 bp, Homo sapien
cccatacaggtcttgcccaattattagttgaaa

SEQ ID NO: 140831 - DNA, 33 bp, Homo sapien
tcaaggtaactcataaccacagggagggcacca

SEQ ID NO: 140832 - DNA, 33 bp, Homo sapien
tcaaggtaactcataagcacagggagggcacca

SEQ ID NO: 140833 - DNA, 33 bp, Homo sapien
cttctagcttttccacccaacacccggtatcat

SEQ ID NO: 140834 - DNA, 33 bp, Homo sapien
cttctagcttttccacgcaacacccggtatcat

SEQ ID NO: 140835 - DNA, 33 bp, Homo sapien
ttccccaggaagaaatcaggatgttgttactaa

SEQ ID NO: 140836 - DNA, 33 bp, Homo sapien
ttccccaggaagaaattaggatgttgttactaa

SEQ ID NO: 140837 - DNA, 33 bp, Homo sapien
ctccatctccagagaaatgcagttcccccgtcc

SEQ ID NO: 140838 - DNA, 33 bp, Homo sapien
ctccatctccagagaagtgcagttcccccgtcc

SEQ ID NO: 140839 - DNA, 33 bp, Homo sapien
atgaaatgagaaaaaacgctgggaagacgcacc

SEQ ID NO: 140840 - DNA, 33 bp, Homo sapien
atgaaatgagaaaaaatgctgggaagacgcacc

SEQ ID NO: 140841 - DNA, 33 bp, Homo sapien
ttgtgtccaggcaaacgaaggcggttccaacac

SEQ ID NO: 140842 - DNA, 33 bp, Homo sapien
ttgtgtccaggcaaactaaggcggttccaacac

SEQ ID NO: 140843 - DNA, 33 bp, Homo sapien
agaccacagggccggcaaagctgaaaatattta

SEQ ID NO: 140844 - DNA, 33 bp, Homo sapien
agaccacagggccggcgaagctgaaaatattta

SEQ ID NO: 140845 - DNA, 33 bp, Homo sapien
tttgtcctaaatggaaccgtttttcttgagcat

SEQ ID NO: 140846 - DNA, 33 bp, Homo sapien
tttgtcctaaatggaagcgtttttcttgagcat

SEQ ID NO: 140847 - DNA, 33 bp, Homo sapien
acagaagctggtgttacaaaacttcattgtatt

SEQ ID NO: 140848 - DNA, 33 bp, Homo sapien
acagaagctggtgttagaaaacttcattgtatt

SEQ ID NO: 140849 - DNA, 33 bp, Homo sapien
ggacaaggggcttctaaaaggaagttcttacct

SEQ ID NO: 140850 - DNA, 33 bp, Homo sapien
ggacaaggggcttctagaaggaagttcttacct

SEQ ID NO: 140851 - DNA, 33 bp, Homo sapien
caggggccttcaaaaacgagatacatcaggaga

SEQ ID NO: 140852 - DNA, 33 bp, Homo sapien
caggggccttcaaaaatgagatacatcaggaga

SEQ ID NO: 140853 - DNA, 33 bp, Homo sapien
ttgtaggtctatataggaattggtgaacttttt

SEQ ID NO: 140854 - DNA, 33 bp, Homo sapien
ttgtaggtctatatagtaattggtgaacttttt

SEQ ID NO: 140855 - DNA, 33 bp, Homo sapien
aatatgatcacaactccccagttcagttatata

SEQ ID NO: 140856 - DNA, 33 bp, Homo sapien
aatatgatcacaactctccagttcagttatata

SEQ ID NO: 140857 - DNA, 33 bp, Homo sapien
atggaaatgtacgaaaagcacatttacttaaaa

SEQ ID NO: 140858 - DNA, 33 bp, Homo sapien
atggaaatgtacgaaacgcacatttacttaaaa

SEQ ID NO: 140859 - DNA, 33 bp, Homo sapien
tgtgttcagtagggccaaggagtataacagaag

SEQ ID NO: 140860 - DNA, 33 bp, Homo sapien
tgtgttcagtagggccgaggagtataacagaag

SEQ ID NO: 140861 - DNA, 33 bp, Homo sapien
ccccttagctttaaaacgtttgactgaaatcta

SEQ ID NO: 140862 - DNA, 33 bp, Homo sapien
ccccttagctttaaaatgtttgactgaaatcta

SEQ ID NO: 140863 - DNA, 33 bp, Homo sapien
tgaaatctatcaaaaacgatccagttaaccaac

SEQ ID NO: 140864 - DNA, 33 bp, Homo sapien
tgaaatctatcaaaaatgatccagttaaccaac

SEQ ID NO: 140865 - DNA, 33 bp, Homo sapien
ctttttagatggtgaaagttgatgaaacctgcc

SEQ ID NO: 140866 - DNA, 33 bp, Homo sapien
ctttttagatggtgaaggttgatgaaacctgcc

SEQ ID NO: 140867 - DNA, 33 bp, Homo sapien
tgtatataagttctgagaaatgtacgaatgact

SEQ ID NO: 140868 - DNA, 33 bp, Homo sapien
tgtatataagttctgataaatgtacgaatgact

SEQ ID NO: 140869 - DNA, 33 bp, Homo sapien
tcatttaggtaacttacatgtgatgagacctat

SEQ ID NO: 140870 - DNA, 33 bp, Homo sapien
tcatttaggtaacttatatgtgatgagacctat

SEQ ID NO: 140871 - DNA, 33 bp, Homo sapien
agggtacagtgagccaagtttgacaatgcagtg

SEQ ID NO: 140872 - DNA, 33 bp, Homo sapien
agggtacagtgagccacgtttgacaatgcagtg

SEQ ID NO: 140873 - DNA, 33 bp, Homo sapien
ttatgtacccactcgaggtttcaagttatgtca

SEQ ID NO: 140874 - DNA, 33 bp, Homo sapien
ttatgtacccactcgatgtttcaagttatgtca

SEQ ID NO: 140875 - DNA, 33 bp, Homo sapien
aggcccccacatagtaaatgcgcaagggtggta

SEQ ID NO: 140876 - DNA, 33 bp, Homo sapien
aggcccccacatagtagatgcgcaagggtggta

SEQ ID NO: 140877 - DNA, 33 bp, Homo sapien
agcagaacttttacacacaggcccataggtggg

SEQ ID NO: 140878 - DNA, 33 bp, Homo sapien
agcagaacttttacacgcaggcccataggtggg

SEQ ID NO: 140879 - DNA, 33 bp, Homo sapien
cccacggtgcaagccacgtacatgatcatcttc

SEQ ID NO: 140880 - DNA, 33 bp, Homo sapien
cccacggtgcaagccaggtacatgatcatcttc

SEQ ID NO: 140881 - DNA, 33 bp, Homo sapien
agaaacactcagaggaaacgaataaattgctgt

SEQ ID NO: 140882 - DNA, 33 bp, Homo sapien
agaaacactcagaggacacgaataaattgctgt

SEQ ID NO: 140883 - DNA, 33 bp, Homo sapien
ctgggatgagttggtcaccctaaaacaagttgg

SEQ ID NO: 140884 - DNA, 33 bp, Homo sapien
ctgggatgagttggtcgccctaaaacaagttgg

SEQ ID NO: 140885 - DNA, 33 bp, Homo sapien
ccctgatctggaatccaagagcaatgaacaccc

SEQ ID NO: 140886 - DNA, 33 bp, Homo sapien
ccctgatctggaatccgagagcaatgaacaccc

SEQ ID NO: 140887 - DNA, 33 bp, Homo sapien
gggaaactcttttgtaaatgaaatctgatgcag

SEQ ID NO: 140888 - DNA, 33 bp, Homo sapien
gggaaactcttttgtacatgaaatctgatgcag

SEQ ID NO: 140889 - DNA, 33 bp, Homo sapien
agcatagtggctaagaaggattaagatgttggc

SEQ ID NO: 140890 - DNA, 33 bp, Homo sapien
agcatagtggctaagagggattaagatgttggc

SEQ ID NO: 140891 - DNA, 33 bp, Homo sapien
tttctgaaacaaacacactgaaagaagacaggg

SEQ ID NO: 140892 - DNA, 33 bp, Homo sapien
tttctgaaacaaacacgctgaaagaagacaggg

SEQ ID NO: 140893 - DNA, 33 bp, Homo sapien
ttcatttctcccttaaatcctggaaaatcacta

SEQ ID NO: 140894 - DNA, 33 bp, Homo sapien
ttcatttctcccttaagtcctggaaaatcacta

SEQ ID NO: 140895 - DNA, 33 bp, Homo sapien
caggctgtgttcaaaacccggttcaaacaatca

SEQ ID NO: 140896 - DNA, 33 bp, Homo sapien
caggctgtgttcaaaagccggttcaaacaatca

SEQ ID NO: 140897 - DNA, 33 bp, Homo sapien
aggtctgatcggcccacgctttgatgaagagag

SEQ ID NO: 140898 - DNA, 33 bp, Homo sapien
aggtctgatcggcccatgctttgatgaagagag

SEQ ID NO: 140899 - DNA, 33 bp, Homo sapien
atggtgcagccacccaatgatagaatgcatctt

SEQ ID NO: 140900 - DNA, 33 bp, Homo sapien
atggtgcagccacccagtgatagaatgcatctt

SEQ ID NO: 140901 - DNA, 33 bp, Homo sapien
attattaatgttataaattaggccattggaaaa

SEQ ID NO: 140902 - DNA, 33 bp, Homo sapien
attattaatgttataatttaggccattggaaaa

SEQ ID NO: 140903 - DNA, 33 bp, Homo sapien
ctgttcactaacccacggtctcaaaggcggctt

SEQ ID NO: 140904 - DNA, 33 bp, Homo sapien
ctgttcactaacccactgtctcaaaggcggctt

SEQ ID NO: 140905 - DNA, 33 bp, Homo sapien
tgggggcatctgtgcacggtgatcttgatttac

SEQ ID NO: 140906 - DNA, 33 bp, Homo sapien
tgggggcatctgtgcatggtgatcttgatttac

SEQ ID NO: 140907 - DNA, 33 bp, Homo sapien
aacgttttgagctgaaggatggagaacaaatta

SEQ ID NO: 140908 - DNA, 33 bp, Homo sapien
aacgttttgagctgaatgatggagaacaaatta

SEQ ID NO: 140909 - DNA, 33 bp, Homo sapien
acaaacaaatagcacactgccttgggcagagta

SEQ ID NO: 140910 - DNA, 33 bp, Homo sapien
acaaacaaatagcacattgccttgggcagagta

SEQ ID NO: 140911 - DNA, 33 bp, Homo sapien
agtccagaatcacacactacatttagttaccat

SEQ ID NO: 140912 - DNA, 33 bp, Homo sapien
agtccagaatcacacagtacatttagttaccat

SEQ ID NO: 140913 - DNA, 33 bp, Homo sapien
gtggtgaatcaggtcacagatcagtgctgaccc

SEQ ID NO: 140914 - DNA, 33 bp, Homo sapien
gtggtgaatcaggtcatagatcagtgctgaccc

SEQ ID NO: 140915 - DNA, 33 bp, Homo sapien
gcctctcttccatgctgactataatctgcttac

SEQ ID NO: 140916 - DNA, 33 bp, Homo sapien
gcctctcttccatgcttactataatctgcttac

SEQ ID NO: 140917 - DNA, 33 bp, Homo sapien
agattggtaccatccaataaaacaggcacaggg

SEQ ID NO: 140918 - DNA, 33 bp, Homo sapien
agattggtaccatccactaaaacaggcacaggg

SEQ ID NO: 140919 - DNA, 33 bp, Homo sapien
tgacagcttgcaaatacgtgttgattggatggc

SEQ ID NO: 140920 - DNA, 33 bp, Homo sapien
tgacagcttgcaaatatgtgttgattggatggc

SEQ ID NO: 140921 - DNA, 33 bp, Homo sapien
gtggccgtgaccataagagatctcaagatgttc

SEQ ID NO: 140922 - DNA, 33 bp, Homo sapien
gtggccgtgaccataatagatctcaagatgttc

SEQ ID NO: 140923 - DNA, 33 bp, Homo sapien
ggaatatgggcatttcaaagaacacagtcagga

SEQ ID NO: 140924 - DNA, 33 bp, Homo sapien
ggaatatgggcatttcgaagaacacagtcagga

SEQ ID NO: 140925 - DNA, 33 bp, Homo sapien
catattccagggtcaacgctgctcatatgctca

SEQ ID NO: 140926 - DNA, 33 bp, Homo sapien
catattccagggtcaatgctgctcatatgctca

SEQ ID NO: 140927 - DNA, 33 bp, Homo sapien
tcctgtgatgtcagcaatattgttactcttgtt

SEQ ID NO: 140928 - DNA, 33 bp, Homo sapien
tcctgtgatgtcagcactattgttactcttgtt

SEQ ID NO: 140929 - DNA, 33 bp, Homo sapien
gaaggcattcaagacaacaggaagaaccctttg

SEQ ID NO: 140930 - DNA, 33 bp, Homo sapien
gaaggcattcaagacagcaggaagaaccctttg

SEQ ID NO: 140931 - DNA, 33 bp, Homo sapien
aggtaagcaggactcaaaaaggctggagacaac

SEQ ID NO: 140932 - DNA, 33 bp, Homo sapien
aggtaagcaggactcagaaaggctggagacaac

SEQ ID NO: 140933 - DNA, 33 bp, Homo sapien
tcacatagaccatgaaaaagaatgagagaaaca

SEQ ID NO: 140934 - DNA, 33 bp, Homo sapien
tcacatagaccatgaagaagaatgagagaaaca

SEQ ID NO: 140935 - DNA, 33 bp, Homo sapien
atctctgcaatatgcccccaaatcaactaggag

SEQ ID NO: 140936 - DNA, 33 bp, Homo sapien
atctctgcaatatgcctccaaatcaactaggag

SEQ ID NO: 140937 - DNA, 33 bp, Homo sapien
taggagaggagatgtaaaaacctgagaagggga

SEQ ID NO: 140938 - DNA, 33 bp, Homo sapien
taggagaggagatgtagaaacctgagaagggga

SEQ ID NO: 140939 - DNA, 33 bp, Homo sapien
cactcggatgttcccacgaagaggaagggaagg

SEQ ID NO: 140940 - DNA, 33 bp, Homo sapien
cactcggatgttcccaggaagaggaagggaagg

SEQ ID NO: 140941 - DNA, 33 bp, Homo sapien
aaagggctgtcaggccaagattgtaaatacacc

SEQ ID NO: 140942 - DNA, 33 bp, Homo sapien
aaagggctgtcaggccgagattgtaaatacacc

SEQ ID NO: 140943 - DNA, 33 bp, Homo sapien
tgttccaagctctttacaaatatcaccctactg

SEQ ID NO: 140944 - DNA, 33 bp, Homo sapien
tgttccaagctctttagaaatatcaccctactg

SEQ ID NO: 140945 - DNA, 33 bp, Homo sapien
ttgtaccatgaggttcaaactaagattggcaga

SEQ ID NO: 140946 - DNA, 33 bp, Homo sapien
ttgtaccatgaggttcgaactaagattggcaga

SEQ ID NO: 140947 - DNA, 33 bp, Homo sapien
caaatggactccatccacttgcttgttcactta

SEQ ID NO: 140948 - DNA, 33 bp, Homo sapien
caaatggactccatccgcttgcttgttcactta

SEQ ID NO: 140949 - DNA, 33 bp, Homo sapien
tcttgcaaaataatcacgtatccggacatacct

SEQ ID NO: 140950 - DNA, 33 bp, Homo sapien
tcttgcaaaataatcatgtatccggacatacct

SEQ ID NO: 140951 - DNA, 33 bp, Homo sapien
gagaagatggtgaggaaaaccttaataacaacc

SEQ ID NO: 140952 - DNA, 33 bp, Homo sapien
gagaagatggtgaggataaccttaataacaacc

SEQ ID NO: 140953 - DNA, 33 bp, Homo sapien
caaataatcatagcccacagtctacagccacaa

SEQ ID NO: 140954 - DNA, 33 bp, Homo sapien
caaataatcatagcccgcagtctacagccacaa

SEQ ID NO: 140955 - DNA, 33 bp, Homo sapien
acaggtaagatgagagccattcctgatggggct

SEQ ID NO: 140956 - DNA, 33 bp, Homo sapien
acaggtaagatgagagtcattcctgatggggct

SEQ ID NO: 140957 - DNA, 33 bp, Homo sapien
cttctgtaaccaaatcgcatagcaacaggcagc

SEQ ID NO: 140958 - DNA, 33 bp, Homo sapien
cttctgtaaccaaatctcatagcaacaggcagc

SEQ ID NO: 140959 - DNA, 33 bp, Homo sapien
acgtggcatagcattaccttctagattttgtga

SEQ ID NO: 140960 - DNA, 33 bp, Homo sapien
acgtggcatagcattatcttctagattttgtga

SEQ ID NO: 140961 - DNA, 33 bp, Homo sapien
aatttctctagcaataaggactcccaaaagagg

SEQ ID NO: 140962 - DNA, 33 bp, Homo sapien
aatttctctagcaatagggactcccaaaagagg

SEQ ID NO: 140963 - DNA, 33 bp, Homo sapien
cagatgacattttcaacaggctgaattcagtct

SEQ ID NO: 140964 - DNA, 33 bp, Homo sapien
cagatgacattttcaagaggctgaattcagtct

SEQ ID NO: 140965 - DNA, 33 bp, Homo sapien
ggatttggcaggagccagaaggtctggaacagt

SEQ ID NO: 140966 - DNA, 33 bp, Homo sapien
ggatttggcaggagccggaaggtctggaacagt

SEQ ID NO: 140967 - DNA, 33 bp, Homo sapien
agctcttacagtcaaacgcaactcttgcggagg

SEQ ID NO: 140968 - DNA, 33 bp, Homo sapien
agctcttacagtcaaatgcaactcttgcggagg

SEQ ID NO: 140969 - DNA, 33 bp, Homo sapien
taaatggtgagcctgagagtagacacggctatg

SEQ ID NO: 140970 - DNA, 33 bp, Homo sapien
taaatggtgagcctgatagtagacacggctatg

SEQ ID NO: 140971 - DNA, 33 bp, Homo sapien
agtaaagggatcctgacgtgaaagacagcctgc

SEQ ID NO: 140972 - DNA, 33 bp, Homo sapien
agtaaagggatcctgatgtgaaagacagcctgc

SEQ ID NO: 140973 - DNA, 33 bp, Homo sapien
tttgaactctgtataaatggaacatacagcagg

SEQ ID NO: 140974 - DNA, 33 bp, Homo sapien
tttgaactctgtataagtggaacatacagcagg

SEQ ID NO: 140975 - DNA, 33 bp, Homo sapien
aggcttaggatttgtgcacattccaccctagac

SEQ ID NO: 140976 - DNA, 33 bp, Homo sapien
aggcttaggatttgtggacattccaccctagac

SEQ ID NO: 140977 - DNA, 33 bp, Homo sapien
tgaatacaggaacatacagcactactggggatt

SEQ ID NO: 140978 - DNA, 33 bp, Homo sapien
tgaatacaggaacatagagcactactggggatt

SEQ ID NO: 140979 - DNA, 33 bp, Homo sapien
agctctgtgcaaaacccaagtcacacctatatg

SEQ ID NO: 140980 - DNA, 33 bp, Homo sapien
agctctgtgcaaaaccgaagtcacacctatatg

SEQ ID NO: 140981 - DNA, 33 bp, Homo sapien
cagaattcacttttaacgaggcttcagaaaaca

SEQ ID NO: 140982 - DNA, 33 bp, Homo sapien
cagaattcacttttaatgaggcttcagaaaaca

SEQ ID NO: 140983 - DNA, 33 bp, Homo sapien
tatcttgatcaaagcacgtatcaaccaaaaaag

SEQ ID NO: 140984 - DNA, 33 bp, Homo sapien
tatcttgatcaaagcaggtatcaaccaaaaaag

SEQ ID NO: 140985 - DNA, 33 bp, Homo sapien
gcaacagttaacttccaaagtacagtctggcca

SEQ ID NO: 140986 - DNA, 33 bp, Homo sapien
gcaacagttaacttccgaagtacagtctggcca

SEQ ID NO: 140987 - DNA, 33 bp, Homo sapien
aacaaagtgtgatgaactggatttcatgaagta

SEQ ID NO: 140988 - DNA, 33 bp, Homo sapien
aacaaagtgtgatgaattggatttcatgaagta

SEQ ID NO: 140989 - DNA, 33 bp, Homo sapien
ttggatgttgagtttccagagatttcagtttta

SEQ ID NO: 140990 - DNA, 33 bp, Homo sapien
ttggatgttgagtttctagagatttcagtttta

SEQ ID NO: 140991 - DNA, 33 bp, Homo sapien
aaagtggggactaaaaacggcttgctggccaaa

SEQ ID NO: 140992 - DNA, 33 bp, Homo sapien
aaagtggggactaaaaccggcttgctggccaaa

SEQ ID NO: 140993 - DNA, 33 bp, Homo sapien
tcccctcttctgctaccagctatttggccagca

SEQ ID NO: 140994 - DNA, 33 bp, Homo sapien
tcccctcttctgctactagctatttggccagca

SEQ ID NO: 140995 - DNA, 33 bp, Homo sapien
cttcccctgttgttaaatggcttacattttttt

SEQ ID NO: 140996 - DNA, 33 bp, Homo sapien
cttcccctgttgttaactggcttacattttttt

SEQ ID NO: 140997 - DNA, 33 bp, Homo sapien
agaatgttctacactacacctttgccgtttttc

SEQ ID NO: 140998 - DNA, 33 bp, Homo sapien
agaatgttctacactatacctttgccgtttttc

SEQ ID NO: 140999 - DNA, 33 bp, Homo sapien
catgtttattactcaacgtctgaattctcaaat

SEQ ID NO: 141000 - DNA, 33 bp, Homo sapien
catgtttattactcaatgtctgaattctcaaat

SEQ ID NO: 141001 - DNA, 33 bp, Homo sapien
agttttttaaatagcgacaaagcaatttgtagt

SEQ ID NO: 141002 - DNA, 33 bp, Homo sapien
agttttttaaatagcggcaaagcaatttgtagt

SEQ ID NO: 141003 - DNA, 33 bp, Homo sapien
atgtatgattccagaacacccaagttagtgtgt

SEQ ID NO: 141004 - DNA, 33 bp, Homo sapien
atgtatgattccagaagacccaagttagtgtgt

SEQ ID NO: 141005 - DNA, 33 bp, Homo sapien
acattacacaaatgtaagatgtatgattccaga

SEQ ID NO: 141006 - DNA, 33 bp, Homo sapien
acattacacaaatgtatgatgtatgattccaga

SEQ ID NO: 141007 - DNA, 33 bp, Homo sapien
cttttcatttaccaaacggttctaatgctgcca

SEQ ID NO: 141008 - DNA, 33 bp, Homo sapien
cttttcatttaccaaatggttctaatgctgcca

SEQ ID NO: 141009 - DNA, 33 bp, Homo sapien
ctctatttttaagccacgattctagtcccacta

SEQ ID NO: 141010 - DNA, 33 bp, Homo sapien
ctctatttttaagccatgattctagtcccacta

SEQ ID NO: 141011 - DNA, 33 bp, Homo sapien
tcttcaccaagattgtcaaatgatgtttctcag

SEQ ID NO: 141012 - DNA, 33 bp, Homo sapien
tcttcaccaagattgttaaatgatgtttctcag

SEQ ID NO: 141013 - DNA, 33 bp, Homo sapien
gaagcccagagtgtggaatcaagaaagccacag

SEQ ID NO: 141014 - DNA, 33 bp, Homo sapien
gaagcccagagtgtgggatcaagaaagccacag

SEQ ID NO: 141015 - DNA, 33 bp, Homo sapien
atttgacggggtgtagaaggtcagggaaatctg

SEQ ID NO: 141016 - DNA, 33 bp, Homo sapien
atttgacggggtgtaggaggtcagggaaatctg

SEQ ID NO: 141017 - DNA, 33 bp, Homo sapien
cacactcaagggcagaagcattaacactcagtg

SEQ ID NO: 141018 - DNA, 33 bp, Homo sapien
cacactcaagggcagaggcattaacactcagtg

SEQ ID NO: 141019 - DNA, 33 bp, Homo sapien
tctctccaaaagcagaacttgcaacacggcctt

SEQ ID NO: 141020 - DNA, 33 bp, Homo sapien
tctctccaaaagcagatcttgcaacacggcctt

SEQ ID NO: 141021 - DNA, 33 bp, Homo sapien
gagagaaactaagctaagacagtctccttaaca

SEQ ID NO: 141022 - DNA, 33 bp, Homo sapien
gagagaaactaagctaggacagtctccttaaca

SEQ ID NO: 141023 - DNA, 33 bp, Homo sapien
cactataaaataaacacaacttcacataccttc

SEQ ID NO: 141024 - DNA, 33 bp, Homo sapien
cactataaaataaacagaacttcacataccttc

SEQ ID NO: 141025 - DNA, 33 bp, Homo sapien
tcgcagacagacataacagtccaagatttaaat

SEQ ID NO: 141026 - DNA, 33 bp, Homo sapien
tcgcagacagacataatagtccaagatttaaat

SEQ ID NO: 141027 - DNA, 33 bp, Homo sapien
ttccacatttgattgaacattttcgtgccttgt

SEQ ID NO: 141028 - DNA, 33 bp, Homo sapien
ttccacatttgattgagcattttcgtgccttgt

SEQ ID NO: 141029 - DNA, 33 bp, Homo sapien
ctgggactatactggaagggtacgccagagata

SEQ ID NO: 141030 - DNA, 33 bp, Homo sapien
ctgggactatactggaggggtacgccagagata

SEQ ID NO: 141031 - DNA, 33 bp, Homo sapien
gtcaaatgactttccacagaagttgtgccattt

SEQ ID NO: 141032 - DNA, 33 bp, Homo sapien
gtcaaatgactttccatagaagttgtgccattt

SEQ ID NO: 141033 - DNA, 33 bp, Homo sapien
agactggtcgtctaccactttatcctcctccat

SEQ ID NO: 141034 - DNA, 33 bp, Homo sapien
agactggtcgtctaccgctttatcctcctccat

SEQ ID NO: 141035 - DNA, 33 bp, Homo sapien
tttgattcgtaccacaccttccgtgcacagtac

SEQ ID NO: 141036 - DNA, 33 bp, Homo sapien
tttgattcgtaccacatcttccgtgcacagtac

SEQ ID NO: 141037 - DNA, 33 bp, Homo sapien
aagcacctacaaaaaaatggaattaacagagct

SEQ ID NO: 141038 - DNA, 33 bp, Homo sapien
aagcacctacaaaaaagtggaattaacagagct

SEQ ID NO: 141039 - DNA, 33 bp, Homo sapien
aaacgtctcaaatccactcagttcaattcaaga

SEQ ID NO: 141040 - DNA, 33 bp, Homo sapien
aaacgtctcaaatccattcagttcaattcaaga

SEQ ID NO: 141041 - DNA, 33 bp, Homo sapien
aggctatatcctgcacaattccaattataggca

SEQ ID NO: 141042 - DNA, 33 bp, Homo sapien
aggctatatcctgcacgattccaattataggca

SEQ ID NO: 141043 - DNA, 33 bp, Homo sapien
tgtgtaacttcccttacgtgtgaagctgtctgt

SEQ ID NO: 141044 - DNA, 33 bp, Homo sapien
tgtgtaacttcccttatgtgtgaagctgtctgt

SEQ ID NO: 141045 - DNA, 33 bp, Homo sapien
atccatccaacagagaccataaatgaaatctac

SEQ ID NO: 141046 - DNA, 33 bp, Homo sapien
atccatccaacagagatcataaatgaaatctac

SEQ ID NO: 141047 - DNA, 33 bp, Homo sapien
gttctacaactttagccatagatcacaagtaaa

SEQ ID NO: 141048 - DNA, 33 bp, Homo sapien
gttctacaactttagctatagatcacaagtaaa

SEQ ID NO: 141049 - DNA, 33 bp, Homo sapien
ttctatttgtcccacaagttttttgttcacttt

SEQ ID NO: 141050 - DNA, 33 bp, Homo sapien
ttctatttgtcccacatgttttttgttcacttt

SEQ ID NO: 141051 - DNA, 33 bp, Homo sapien
aaagaatccaagaccacaaagcttgcattttaa

SEQ ID NO: 141052 - DNA, 33 bp, Homo sapien
aaagaatccaagaccagaaagcttgcattttaa

SEQ ID NO: 141053 - DNA, 33 bp, Homo sapien
aattgcaagcaacgtaccagaaaggattgtttg

SEQ ID NO: 141054 - DNA, 33 bp, Homo sapien
aattgcaagcaacgtagcagaaaggattgtttg

SEQ ID NO: 141055 - DNA, 33 bp, Homo sapien
ttaagtaaaagaagacaggagagtgtatgctgt

SEQ ID NO: 141056 - DNA, 33 bp, Homo sapien
ttaagtaaaagaagactggagagtgtatgctgt

SEQ ID NO: 141057 - DNA, 33 bp, Homo sapien
cccagaggttaactacccttctatcactgtaga

SEQ ID NO: 141058 - DNA, 33 bp, Homo sapien
cccagaggttaactactcttctatcactgtaga

SEQ ID NO: 141059 - DNA, 33 bp, Homo sapien
gatatatcttagcaatcatctagttcacctctt

SEQ ID NO: 141060 - DNA, 33 bp, Homo sapien
gatatatcttagcaattatctagttcacctctt

SEQ ID NO: 141061 - DNA, 33 bp, Homo sapien
gtgagattccataaacagagagaagcagtcacc

SEQ ID NO: 141062 - DNA, 33 bp, Homo sapien
gtgagattccataaactgagagaagcagtcacc

SEQ ID NO: 141063 - DNA, 33 bp, Homo sapien
tgcttaactcattgtacgtaaattgctcaacac

SEQ ID NO: 141064 - DNA, 33 bp, Homo sapien
tgcttaactcattgtatgtaaattgctcaacac

SEQ ID NO: 141065 - DNA, 33 bp, Homo sapien
taggaagttactgaccaaaaggaactttgagtt

SEQ ID NO: 141066 - DNA, 33 bp, Homo sapien
taggaagttactgaccgaaaggaactttgagtt

SEQ ID NO: 141067 - DNA, 33 bp, Homo sapien
ataaatgtcttgtcacagaccttgacacagact

SEQ ID NO: 141068 - DNA, 33 bp, Homo sapien
ataaatgtcttgtcacggaccttgacacagact

SEQ ID NO: 141069 - DNA, 33 bp, Homo sapien
atatagataattcacaaaatgaaagagtctaat

SEQ ID NO: 141070 - DNA, 33 bp, Homo sapien
atatagataattcacagaatgaaagagtctaat

SEQ ID NO: 141071 - DNA, 33 bp, Homo sapien
acacttccggtgggaacggtaaatgatttcact

SEQ ID NO: 141072 - DNA, 33 bp, Homo sapien
acacttccggtgggaatggtaaatgatttcact

SEQ ID NO: 141073 - DNA, 33 bp, Homo sapien
gatgactgaccttataaaccactactttcaggt

SEQ ID NO: 141074 - DNA, 33 bp, Homo sapien
gatgactgaccttatataccactactttcaggt

SEQ ID NO: 141075 - DNA, 33 bp, Homo sapien
ccgtctgcctcgtctaaggtttcttttcatgac

SEQ ID NO: 141076 - DNA, 33 bp, Homo sapien
ccgtctgcctcgtctagggtttcttttcatgac

SEQ ID NO: 141077 - DNA, 33 bp, Homo sapien
actctgattaactacaactgaactaatgagacc

SEQ ID NO: 141078 - DNA, 33 bp, Homo sapien
actctgattaactacagctgaactaatgagacc

SEQ ID NO: 141079 - DNA, 33 bp, Homo sapien
tttttagtgagagataccttaagtgaaaaaaat

SEQ ID NO: 141080 - DNA, 33 bp, Homo sapien
tttttagtgagagatatcttaagtgaaaaaaat

SEQ ID NO: 141081 - DNA, 33 bp, Homo sapien
catagtagtagcagtacatgactgtattaatga

SEQ ID NO: 141082 - DNA, 33 bp, Homo sapien
catagtagtagcagtatatgactgtattaatga

SEQ ID NO: 141083 - DNA, 33 bp, Homo sapien
gaacctcccctttagccagaaatttcaacattt

SEQ ID NO: 141084 - DNA, 33 bp, Homo sapien
gaacctcccctttagctagaaatttcaacattt

SEQ ID NO: 141085 - DNA, 33 bp, Homo sapien
tgtggagccttctgaccggcttgatctgaacag

SEQ ID NO: 141086 - DNA, 33 bp, Homo sapien
tgtggagccttctgactggcttgatctgaacag

SEQ ID NO: 141087 - DNA, 33 bp, Homo sapien
tgcttcaaaatgttaacgcacttttcacatttt

SEQ ID NO: 141088 - DNA, 33 bp, Homo sapien
tgcttcaaaatgttaatgcacttttcacatttt

SEQ ID NO: 141089 - DNA, 33 bp, Homo sapien
aagaatgtcaaaactcacctcaaaaatttattt

SEQ ID NO: 141090 - DNA, 33 bp, Homo sapien
aagaatgtcaaaactctcctcaaaaatttattt

SEQ ID NO: 141091 - DNA, 33 bp, Homo sapien
catatagttctttcccacctacttggattgtaa

SEQ ID NO: 141092 - DNA, 33 bp, Homo sapien
catatagttctttcccgcctacttggattgtaa

SEQ ID NO: 141093 - DNA, 33 bp, Homo sapien
ggtcatgtaatggttcaaaagcattaaattacg

SEQ ID NO: 141094 - DNA, 33 bp, Homo sapien
ggtcatgtaatggttcgaaagcattaaattacg

SEQ ID NO: 141095 - DNA, 33 bp, Homo sapien
cctcatgctgttatgacgccttttgcttccacc

SEQ ID NO: 141096 - DNA, 33 bp, Homo sapien
cctcatgctgttatgatgccttttgcttccacc

SEQ ID NO: 141097 - DNA, 33 bp, Homo sapien
ctgcactcagcctcaaccattcggagtctgtca

SEQ ID NO: 141098 - DNA, 33 bp, Homo sapien
ctgcactcagcctcaatcattcggagtctgtca

SEQ ID NO: 141099 - DNA, 33 bp, Homo sapien
aaggcaatgggaaatccgagtaatatgacaagt

SEQ ID NO: 141100 - DNA, 33 bp, Homo sapien
aaggcaatgggaaatctgagtaatatgacaagt

SEQ ID NO: 141101 - DNA, 33 bp, Homo sapien
gtactgatattaatgacaagcaaaaatcaattt

SEQ ID NO: 141102 - DNA, 33 bp, Homo sapien
gtactgatattaatgataagcaaaaatcaattt

SEQ ID NO: 141103 - DNA, 33 bp, Homo sapien
aagccccaagaataaggctcatgtggtccctac

SEQ ID NO: 141104 - DNA, 33 bp, Homo sapien
aagccccaagaataagtctcatgtggtccctac

SEQ ID NO: 141105 - DNA, 33 bp, Homo sapien
atcctcagcaatgactaaaaatatacgttctag

SEQ ID NO: 141106 - DNA, 33 bp, Homo sapien
atcctcagcaatgactgaaaatatacgttctag

SEQ ID NO: 141107 - DNA, 33 bp, Homo sapien
gataaaaaaagatgaactgtaggcaaatttggg

SEQ ID NO: 141108 - DNA, 33 bp, Homo sapien
gataaaaaaagatgaattgtaggcaaatttggg

SEQ ID NO: 141109 - DNA, 33 bp, Homo sapien
actgggcaaataggaactaatatgaaataaaat

SEQ ID NO: 141110 - DNA, 33 bp, Homo sapien
actgggcaaataggaagtaatatgaaataaaat

SEQ ID NO: 141111 - DNA, 33 bp, Homo sapien
aggatcagagagaaagcaagaaaataggagaca

SEQ ID NO: 141112 - DNA, 33 bp, Homo sapien
aggatcagagagaaagtaagaaaataggagaca

SEQ ID NO: 141113 - DNA, 33 bp, Homo sapien
ttcaaggtattttatacatgctgaaatgcagac

SEQ ID NO: 141114 - DNA, 33 bp, Homo sapien
ttcaaggtattttatatatgctgaaatgcagac

SEQ ID NO: 141115 - DNA, 33 bp, Homo sapien
ctcagagagagttttcactaacatcaggctact

SEQ ID NO: 141116 - DNA, 33 bp, Homo sapien
ctcagagagagttttcgctaacatcaggctact

SEQ ID NO: 141117 - DNA, 33 bp, Homo sapien
ttaaaggaatagtaaagtgagttcactccattc

SEQ ID NO: 141118 - DNA, 33 bp, Homo sapien
ttaaaggaatagtaaattgagttcactccattc

SEQ ID NO: 141119 - DNA, 33 bp, Homo sapien
ttggagatgacaagcaataactaataaccggcc

SEQ ID NO: 141120 - DNA, 33 bp, Homo sapien
ttggagatgacaagcagtaactaataaccggcc

SEQ ID NO: 141121 - DNA, 33 bp, Homo sapien
tttgtttgtattaaaacgggaacatgataacag

SEQ ID NO: 141122 - DNA, 33 bp, Homo sapien
tttgtttgtattaaaatgggaacatgataacag

SEQ ID NO: 141123 - DNA, 33 bp, Homo sapien
cactgaattcagtcaccggagaaagaagctgag

SEQ ID NO: 141124 - DNA, 33 bp, Homo sapien
cactgaattcagtcactggagaaagaagctgag

SEQ ID NO: 141125 - DNA, 33 bp, Homo sapien
tttggaaggtaccatcccatgtgatccctctct

SEQ ID NO: 141126 - DNA, 33 bp, Homo sapien
tttggaaggtaccatctcatgtgatccctctct

SEQ ID NO: 141127 - DNA, 33 bp, Homo sapien
tgccaacaactagaaaaccatgctctgttataa

SEQ ID NO: 141128 - DNA, 33 bp, Homo sapien
tgccaacaactagaaagccatgctctgttataa

SEQ ID NO: 141129 - DNA, 33 bp, Homo sapien
ctggctatttcctatcaatgggatcgtaaaatc

SEQ ID NO: 141130 - DNA, 33 bp, Homo sapien
ctggctatttcctatccatgggatcgtaaaatc

SEQ ID NO: 141131 - DNA, 33 bp, Homo sapien
gtgccaatctctcttacgtcagttttagaagac

SEQ ID NO: 141132 - DNA, 33 bp, Homo sapien
gtgccaatctctcttatgtcagttttagaagac

SEQ ID NO: 141133 - DNA, 33 bp, Homo sapien
tctcgttcaaggaactcaatgtcattaatccaa

SEQ ID NO: 141134 - DNA, 33 bp, Homo sapien
tctcgttcaaggaactgaatgtcattaatccaa

SEQ ID NO: 141135 - DNA, 33 bp, Homo sapien
ccagactaatcttcaaatccaggactgaagcta

SEQ ID NO: 141136 - DNA, 33 bp, Homo sapien
ccagactaatcttcaactccaggactgaagcta

SEQ ID NO: 141137 - DNA, 33 bp, Homo sapien
aaccacatggaaatatcacaacacacctatcag

SEQ ID NO: 141138 - DNA, 33 bp, Homo sapien
aaccacatggaaatattacaacacacctatcag

SEQ ID NO: 141139 - DNA, 33 bp, Homo sapien
catgggtgaaccttgacggcattacgctttagt

SEQ ID NO: 141140 - DNA, 33 bp, Homo sapien
catgggtgaaccttgagggcattacgctttagt

SEQ ID NO: 141141 - DNA, 33 bp, Homo sapien
cagaatttcctttctccataaggccgaatgata

SEQ ID NO: 141142 - DNA, 33 bp, Homo sapien
cagaatttcctttctctataaggccgaatgata

SEQ ID NO: 141143 - DNA, 33 bp, Homo sapien
aaagcaaatactgtcgaaataaactgccggctc

SEQ ID NO: 141144 - DNA, 33 bp, Homo sapien
aaagcaaatactgtcggaataaactgccggctc

SEQ ID NO: 141145 - DNA, 33 bp, Homo sapien
ttcaatccttagagcccgatgttatagctaaga

SEQ ID NO: 141146 - DNA, 33 bp, Homo sapien
ttcaatccttagagcctgatgttatagctaaga

SEQ ID NO: 141147 - DNA, 33 bp, Homo sapien
caaatatccatctttcccttaagacagttgtgc

SEQ ID NO: 141148 - DNA, 33 bp, Homo sapien
caaatatccatctttctcttaagacagttgtgc

SEQ ID NO: 141149 - DNA, 33 bp, Homo sapien
tgaagacagcacaagacctcatttctttctacc

SEQ ID NO: 141150 - DNA, 33 bp, Homo sapien
tgaagacagcacaagagctcatttctttctacc

SEQ ID NO: 141151 - DNA, 33 bp, Homo sapien
acattagcatagtaaaaattctgagttctacag

SEQ ID NO: 141152 - DNA, 33 bp, Homo sapien
acattagcatagtaaagattctgagttctacag

SEQ ID NO: 141153 - DNA, 33 bp, Homo sapien
tgttgtaacttagcccagcgtagttcaaccatc

SEQ ID NO: 141154 - DNA, 33 bp, Homo sapien
tgttgtaacttagcccggcgtagttcaaccatc

SEQ ID NO: 141155 - DNA, 33 bp, Homo sapien
ataaagcctaattttaacgcatttaaatgttgt

SEQ ID NO: 141156 - DNA, 33 bp, Homo sapien
ataaagcctaattttagcgcatttaaatgttgt

SEQ ID NO: 141157 - DNA, 33 bp, Homo sapien
agagaaggaggtgatacaggaactgcgtctgga

SEQ ID NO: 141158 - DNA, 33 bp, Homo sapien
agagaaggaggtgatataggaactgcgtctgga

SEQ ID NO: 141159 - DNA, 33 bp, Homo sapien
gtccagtctagagaaacgcatgcaaatgaataa

SEQ ID NO: 141160 - DNA, 33 bp, Homo sapien
gtccagtctagagaaaggcatgcaaatgaataa

SEQ ID NO: 141161 - DNA, 33 bp, Homo sapien
tgtgtctagtccttctaaaattctgtttcctgt

SEQ ID NO: 141162 - DNA, 33 bp, Homo sapien
tgtgtctagtccttcttaaattctgtttcctgt

SEQ ID NO: 141163 - DNA, 33 bp, Homo sapien
tgcctttttctcagtacagcttttagtaggatg

SEQ ID NO: 141164 - DNA, 33 bp, Homo sapien
tgcctttttctcagtagagcttttagtaggatg

SEQ ID NO: 141165 - DNA, 33 bp, Homo sapien
tggttgtgaatggtcaaaattctctccagcact

SEQ ID NO: 141166 - DNA, 33 bp, Homo sapien
tggttgtgaatggtcagaattctctccagcact

SEQ ID NO: 141167 - DNA, 33 bp, Homo sapien
cccagggagctcgtcacgtggcaaatagctgcg

SEQ ID NO: 141168 - DNA, 33 bp, Homo sapien
cccagggagctcgtcatgtggcaaatagctgcg

SEQ ID NO: 141169 - DNA, 33 bp, Homo sapien
cactgagaactcagaaatgttgggaaagtctct

SEQ ID NO: 141170 - DNA, 33 bp, Homo sapien
cactgagaactcagaagtgttgggaaagtctct

SEQ ID NO: 141171 - DNA, 33 bp, Homo sapien
atttcattatgtcccaaccattaactgaagtca

SEQ ID NO: 141172 - DNA, 33 bp, Homo sapien
atttcattatgtcccacccattaactgaagtca

SEQ ID NO: 141173 - DNA, 33 bp, Homo sapien
ttatataaaaccctccaattcacaaatggtcac

SEQ ID NO: 141174 - DNA, 33 bp, Homo sapien
ttatataaaaccctccgattcacaaatggtcac

SEQ ID NO: 141175 - DNA, 33 bp, Homo sapien
actcatctttatctaacgcctgttcctgcacat

SEQ ID NO: 141176 - DNA, 33 bp, Homo sapien
actcatctttatctaatgcctgttcctgcacat

SEQ ID NO: 141177 - DNA, 33 bp, Homo sapien
catttctgtattttaaatcactcaagttgtggt

SEQ ID NO: 141178 - DNA, 33 bp, Homo sapien
catttctgtattttaagtcactcaagttgtggt

SEQ ID NO: 141179 - DNA, 33 bp, Homo sapien
cttccagcactggggacggcagcaatctcttgg

SEQ ID NO: 141180 - DNA, 33 bp, Homo sapien
cttccagcactggggatggcagcaatctcttgg

SEQ ID NO: 141181 - DNA, 33 bp, Homo sapien
aagagaaccatgcttcaatgttgttttctcttt

SEQ ID NO: 141182 - DNA, 33 bp, Homo sapien
aagagaaccatgcttcgatgttgttttctcttt

SEQ ID NO: 141183 - DNA, 33 bp, Homo sapien
gatttctcagattagagtatttcaatagttatg

SEQ ID NO: 141184 - DNA, 33 bp, Homo sapien
gatttctcagattagattatttcaatagttatg

SEQ ID NO: 141185 - DNA, 33 bp, Homo sapien
gctcccagcaaggaaccagtatgctctgtgtct

SEQ ID NO: 141186 - DNA, 33 bp, Homo sapien
gctcccagcaaggaactagtatgctctgtgtct

SEQ ID NO: 141187 - DNA, 33 bp, Homo sapien
ccagactgccaatgcccaatttcatcccttatc

SEQ ID NO: 141188 - DNA, 33 bp, Homo sapien
ccagactgccaatgccgaatttcatcccttatc

SEQ ID NO: 141189 - DNA, 33 bp, Homo sapien
tcccctattgaggtcgcagtccttggttcataa

SEQ ID NO: 141190 - DNA, 33 bp, Homo sapien
tcccctattgaggtcgtagtccttggttcataa

SEQ ID NO: 141191 - DNA, 33 bp, Homo sapien
gcagaacagattttcggcagttcttgttgaatc

SEQ ID NO: 141192 - DNA, 33 bp, Homo sapien
gcagaacagattttcgtcagttcttgttgaatc

SEQ ID NO: 141193 - DNA, 33 bp, Homo sapien
cagaccctggtaacaccattagactttctattt

SEQ ID NO: 141194 - DNA, 33 bp, Homo sapien
cagaccctggtaacactattagactttctattt

SEQ ID NO: 141195 - DNA, 33 bp, Homo sapien
taatgagcccaaggaccgaattttacggcaagc

SEQ ID NO: 141196 - DNA, 33 bp, Homo sapien
taatgagcccaaggactgaattttacggcaagc

SEQ ID NO: 141197 - DNA, 33 bp, Homo sapien
tggcgtgctgagagccaagtgggtgctgcctcc

SEQ ID NO: 141198 - DNA, 33 bp, Homo sapien
tggcgtgctgagagccgagtgggtgctgcctcc

SEQ ID NO: 141199 - DNA, 33 bp, Homo sapien
actcatgatgtgcgacaaagagggagtggcgtg

SEQ ID NO: 141200 - DNA, 33 bp, Homo sapien
actcatgatgtgcgacgaagagggagtggcgtg

SEQ ID NO: 141201 - DNA, 33 bp, Homo sapien
tgaccagtcatgcgaacgtttctgtagcaaggt

SEQ ID NO: 141202 - DNA, 33 bp, Homo sapien
tgaccagtcatgcgaatgtttctgtagcaaggt

SEQ ID NO: 141203 - DNA, 33 bp, Homo sapien
ctaggctgggcatgaccgaactgaccagttaga

SEQ ID NO: 141204 - DNA, 33 bp, Homo sapien
ctaggctgggcatgacggaactgaccagttaga

SEQ ID NO: 141205 - DNA, 33 bp, Homo sapien
cagcgtgaaggagctgcactcataaaggtcatg

SEQ ID NO: 141206 - DNA, 33 bp, Homo sapien
cagcgtgaaggagctgtactcataaaggtcatg

SEQ ID NO: 141207 - DNA, 33 bp, Homo sapien
tgtctcaaaaaagtcaaggaagtgtttatgatt

SEQ ID NO: 141208 - DNA, 33 bp, Homo sapien
tgtctcaaaaaagtcagggaagtgtttatgatt

SEQ ID NO: 141209 - DNA, 33 bp, Homo sapien
cctaaactctttggaacggaattatttttcaaa

SEQ ID NO: 141210 - DNA, 33 bp, Homo sapien
cctaaactctttggaatggaattatttttcaaa

SEQ ID NO: 141211 - DNA, 33 bp, Homo sapien
tgattccagttgtgatcagcatatttgcccatg

SEQ ID NO: 141212 - DNA, 33 bp, Homo sapien
tgattccagttgtgatgagcatatttgcccatg

SEQ ID NO: 141213 - DNA, 33 bp, Homo sapien
cgtgcctggcctcctacaagttttcaatgtgtt

SEQ ID NO: 141214 - DNA, 33 bp, Homo sapien
cgtgcctggcctcctagaagttttcaatgtgtt

SEQ ID NO: 141215 - DNA, 33 bp, Homo sapien
gatattctagaataccaggtaacagtagggtgg

SEQ ID NO: 141216 - DNA, 33 bp, Homo sapien
gatattctagaataccgggtaacagtagggtgg

SEQ ID NO: 141217 - DNA, 33 bp, Homo sapien
ccactctcattggtaaccattaggccgtaggcc

SEQ ID NO: 141218 - DNA, 33 bp, Homo sapien
ccactctcattggtaatcattaggccgtaggcc

SEQ ID NO: 141219 - DNA, 33 bp, Homo sapien
atcccggttgattctacgccacggactattcgg

SEQ ID NO: 141220 - DNA, 33 bp, Homo sapien
atcccggttgattctatgccacggactattcgg

SEQ ID NO: 141221 - DNA, 33 bp, Homo sapien
agcaaatgctcaatcaacgttggtgaatggatg

SEQ ID NO: 141222 - DNA, 33 bp, Homo sapien
agcaaatgctcaatcagcgttggtgaatggatg

SEQ ID NO: 141223 - DNA, 33 bp, Homo sapien
cttctcagggtcagctcaaggatgccagtgagt

SEQ ID NO: 141224 - DNA, 33 bp, Homo sapien
cttctcagggtcagcttaaggatgccagtgagt

SEQ ID NO: 141225 - DNA, 33 bp, Homo sapien
acagagctgtacttgcagacacagacgagaaag

SEQ ID NO: 141226 - DNA, 33 bp, Homo sapien
acagagctgtacttgcggacacagacgagaaag

SEQ ID NO: 141227 - DNA, 33 bp, Homo sapien
tgcctacgatcttaagaccagtttatacacaca

SEQ ID NO: 141228 - DNA, 33 bp, Homo sapien
tgcctacgatcttaagcccagtttatacacaca

SEQ ID NO: 141229 - DNA, 33 bp, Homo sapien
agctctctctcacaacaattccttaagctcagc

SEQ ID NO: 141230 - DNA, 33 bp, Homo sapien
agctctctctcacaacgattccttaagctcagc

SEQ ID NO: 141231 - DNA, 33 bp, Homo sapien
gtagagggaattatacagacagggcctctcggc

SEQ ID NO: 141232 - DNA, 33 bp, Homo sapien
gtagagggaattataccgacagggcctctcggc

SEQ ID NO: 141233 - DNA, 33 bp, Homo sapien
gatgccgtaaatagatcagccctttgcaaggag

SEQ ID NO: 141234 - DNA, 33 bp, Homo sapien
gatgccgtaaatagattagccctttgcaaggag

SEQ ID NO: 141235 - DNA, 33 bp, Homo sapien
gacaacaccatctcacggctgtcaaaaacacaa

SEQ ID NO: 141236 - DNA, 33 bp, Homo sapien
gacaacaccatctcactgctgtcaaaaacacaa

SEQ ID NO: 141237 - DNA, 33 bp, Homo sapien
tcctatctggcaaagaagttcttgtagcaatag

SEQ ID NO: 141238 - DNA, 33 bp, Homo sapien
tcctatctggcaaagaggttcttgtagcaatag

SEQ ID NO: 141239 - DNA, 33 bp, Homo sapien
ttgcaaattctttgtcccatgaggaaatgcaat

SEQ ID NO: 141240 - DNA, 33 bp, Homo sapien
ttgcaaattctttgtcgcatgaggaaatgcaat

SEQ ID NO: 141241 - DNA, 33 bp, Homo sapien
gaggctggaacagagaaaaagtcaactgcattt

SEQ ID NO: 141242 - DNA, 33 bp, Homo sapien
gaggctggaacagagagaaagtcaactgcattt

SEQ ID NO: 141243 - DNA, 33 bp, Homo sapien
gtaagcaagtctgccaagatcgaagatggacaa

SEQ ID NO: 141244 - DNA, 33 bp, Homo sapien
gtaagcaagtctgccacgatcgaagatggacaa

SEQ ID NO: 141245 - DNA, 33 bp, Homo sapien
aaagaagatgcaagaaatcaaagagcagtcagc

SEQ ID NO: 141246 - DNA, 33 bp, Homo sapien
aaagaagatgcaagaactcaaagagcagtcagc

SEQ ID NO: 141247 - DNA, 33 bp, Homo sapien
gacaccagagtgtaccaaagaaagggcgagctc

SEQ ID NO: 141248 - DNA, 33 bp, Homo sapien
gacaccagagtgtaccgaagaaagggcgagctc

SEQ ID NO: 141249 - DNA, 33 bp, Homo sapien
caagtggaaagagcaccgcagattgaggagtcc

SEQ ID NO: 141250 - DNA, 33 bp, Homo sapien
caagtggaaagagcactgcagattgaggagtcc

SEQ ID NO: 141251 - DNA, 33 bp, Homo sapien
actgccatctaagaaaaagatggatgttgtgcg

SEQ ID NO: 141252 - DNA, 33 bp, Homo sapien
actgccatctaagaaagagatggatgttgtgcg

SEQ ID NO: 141253 - DNA, 33 bp, Homo sapien
ggcactcgttgtgctccaagtggctgtttgtgg

SEQ ID NO: 141254 - DNA, 33 bp, Homo sapien
ggcactcgttgtgctctaagtggctgtttgtgg

SEQ ID NO: 141255 - DNA, 33 bp, Homo sapien
ggtactccaggagaaaggttgctatgagcaaag

SEQ ID NO: 141256 - DNA, 33 bp, Homo sapien
ggtactccaggagaaatgttgctatgagcaaag

SEQ ID NO: 141257 - DNA, 33 bp, Homo sapien
agcaattcatgctcccaactgcaaatctctggg

SEQ ID NO: 141258 - DNA, 33 bp, Homo sapien
agcaattcatgctcccgactgcaaatctctggg

SEQ ID NO: 141259 - DNA, 33 bp, Homo sapien
agttcggggtcctcaaagagaacctcctgaatc

SEQ ID NO: 141260 - DNA, 33 bp, Homo sapien
agttcggggtcctcaaggagaacctcctgaatc

SEQ ID NO: 141261 - DNA, 33 bp, Homo sapien
caactgggtgaccaccaaagagtcactgagact

SEQ ID NO: 141262 - DNA, 33 bp, Homo sapien
caactgggtgaccaccgaagagtcactgagact

SEQ ID NO: 141263 - DNA, 33 bp, Homo sapien
cccctttacagcaagacatttaccgtttgtctg

SEQ ID NO: 141264 - DNA, 33 bp, Homo sapien
cccctttacagcaagatatttaccgtttgtctg

SEQ ID NO: 141265 - DNA, 33 bp, Homo sapien
tttcttcaggctatataagaagtctctagacag

SEQ ID NO: 141266 - DNA, 33 bp, Homo sapien
tttcttcaggctatatgagaagtctctagacag

SEQ ID NO: 141267 - DNA, 33 bp, Homo sapien
gcgatgccctcggagacgtgtggcacacaggag

SEQ ID NO: 141268 - DNA, 33 bp, Homo sapien
gcgatgccctcggagatgtgtggcacacaggag

SEQ ID NO: 141269 - DNA, 33 bp, Homo sapien
atttatgcaagagtgacgctttcagctttttgg

SEQ ID NO: 141270 - DNA, 33 bp, Homo sapien
atttatgcaagagtgatgctttcagctttttgg

SEQ ID NO: 141271 - DNA, 33 bp, Homo sapien
aggctagcctaagatgacaaagttggatagaaa

SEQ ID NO: 141272 - DNA, 33 bp, Homo sapien
aggctagcctaagatggcaaagttggatagaaa

SEQ ID NO: 141273 - DNA, 33 bp, Homo sapien
aacttggaagccaggcaaaaagatttctgcatg

SEQ ID NO: 141274 - DNA, 33 bp, Homo sapien
aacttggaagccaggcgaaaagatttctgcatg

SEQ ID NO: 141275 - DNA, 33 bp, Homo sapien
aagccactagaatcacaaattgaaatgtgaaat

SEQ ID NO: 141276 - DNA, 33 bp, Homo sapien
aagccactagaatcacgaattgaaatgtgaaat

SEQ ID NO: 141277 - DNA, 33 bp, Homo sapien
ttcctttattgaaaacaccaggtggccgggatg

SEQ ID NO: 141278 - DNA, 33 bp, Homo sapien
ttcctttattgaaaactccaggtggccgggatg

SEQ ID NO: 141279 - DNA, 33 bp, Homo sapien
tgagtttgatggtgacaaatgttgttttcattt

SEQ ID NO: 141280 - DNA, 33 bp, Homo sapien
tgagtttgatggtgactaatgttgttttcattt

SEQ ID NO: 141281 - DNA, 33 bp, Homo sapien
cagcgaacctctaccccagttatcaatactaga

SEQ ID NO: 141282 - DNA, 33 bp, Homo sapien
cagcgaacctctaccctagttatcaatactaga

SEQ ID NO: 141283 - DNA, 33 bp, Homo sapien
tagttgtcaaccaataccacctttggctaggta

SEQ ID NO: 141284 - DNA, 33 bp, Homo sapien
tagttgtcaaccaatatcacctttggctaggta

SEQ ID NO: 141285 - DNA, 33 bp, Homo sapien
gttattcaaaactaggaaaacatagactagaat

SEQ ID NO: 141286 - DNA, 33 bp, Homo sapien
gttattcaaaactaggcaaacatagactagaat

SEQ ID NO: 141287 - DNA, 33 bp, Homo sapien
attggctttggagaaaagacgtcttcacacatc

SEQ ID NO: 141288 - DNA, 33 bp, Homo sapien
attggctttggagaaaggacgtcttcacacatc

SEQ ID NO: 141289 - DNA, 33 bp, Homo sapien
agtatgacaaacagggcatcttagtgcttttgt

SEQ ID NO: 141290 - DNA, 33 bp, Homo sapien
agtatgacaaacaggggatcttagtgcttttgt

SEQ ID NO: 141291 - DNA, 33 bp, Homo sapien
atagtagcctcaggaagagtgaagaggccaaca

SEQ ID NO: 141292 - DNA, 33 bp, Homo sapien
atagtagcctcaggaatagtgaagaggccaaca

SEQ ID NO: 141293 - DNA, 33 bp, Homo sapien
gacgtggttatgatcacggcttcaggcttggct

SEQ ID NO: 141294 - DNA, 33 bp, Homo sapien
gacgtggttatgatcatggcttcaggcttggct

SEQ ID NO: 141295 - DNA, 33 bp, Homo sapien
catccatgctggtaccaaggacatgactttgtt

SEQ ID NO: 141296 - DNA, 33 bp, Homo sapien
catccatgctggtacctaggacatgactttgtt

SEQ ID NO: 141297 - DNA, 33 bp, Homo sapien
agaagctaaccttgacagaaatagctccgtgtt

SEQ ID NO: 141298 - DNA, 33 bp, Homo sapien
agaagctaaccttgacggaaatagctccgtgtt

SEQ ID NO: 141299 - DNA, 33 bp, Homo sapien
gctcatgaagcatgaactcgtcttcaggagcag

SEQ ID NO: 141300 - DNA, 33 bp, Homo sapien
gctcatgaagcatgaattcgtcttcaggagcag

SEQ ID NO: 141301 - DNA, 33 bp, Homo sapien
gtgccagatccaaaagcaggaaacctgcgcaca

SEQ ID NO: 141302 - DNA, 33 bp, Homo sapien
gtgccagatccaaaaggaggaaacctgcgcaca

SEQ ID NO: 141303 - DNA, 33 bp, Homo sapien
gacggtcatattgcacgcaacagttaagtccaa

SEQ ID NO: 141304 - DNA, 33 bp, Homo sapien
gacggtcatattgcactcaacagttaagtccaa

SEQ ID NO: 141305 - DNA, 33 bp, Homo sapien
catttctgagaatgcaatcgaggtcagaatcca

SEQ ID NO: 141306 - DNA, 33 bp, Homo sapien
catttctgagaatgcagtcgaggtcagaatcca

SEQ ID NO: 141307 - DNA, 33 bp, Homo sapien
tccattgtgaaaaaatcagaaaacaggtaagaa

SEQ ID NO: 141308 - DNA, 33 bp, Homo sapien
tccattgtgaaaaaattagaaaacaggtaagaa

SEQ ID NO: 141309 - DNA, 33 bp, Homo sapien
caatcattttctctaaccttcatagtagttgca

SEQ ID NO: 141310 - DNA, 33 bp, Homo sapien
caatcattttctctaatcttcatagtagttgca

SEQ ID NO: 141311 - DNA, 33 bp, Homo sapien
ggaaaatacaaatccaaattacaataagctatc

SEQ ID NO: 141312 - DNA, 33 bp, Homo sapien
ggaaaatacaaatccagattacaataagctatc

SEQ ID NO: 141313 - DNA, 33 bp, Homo sapien
aacaactcatgttaaacagtacagtaggaccgc

SEQ ID NO: 141314 - DNA, 33 bp, Homo sapien
aacaactcatgttaaagagtacagtaggaccgc

SEQ ID NO: 141315 - DNA, 33 bp, Homo sapien
gggtttgagagtgagacgacagggtttcatggt

SEQ ID NO: 141316 - DNA, 33 bp, Homo sapien
gggtttgagagtgagatgacagggtttcatggt

SEQ ID NO: 141317 - DNA, 33 bp, Homo sapien
cacctctggaagctaccagaacagccaaagatg

SEQ ID NO: 141318 - DNA, 33 bp, Homo sapien
cacctctggaagctactagaacagccaaagatg

SEQ ID NO: 141319 - DNA, 33 bp, Homo sapien
gcactcaagcaggtacacaggcagagtggtggt

SEQ ID NO: 141320 - DNA, 33 bp, Homo sapien
gcactcaagcaggtacgcaggcagagtggtggt

SEQ ID NO: 141321 - DNA, 33 bp, Homo sapien
gggctgaggcgggagacaaattcaggggtacct

SEQ ID NO: 141322 - DNA, 33 bp, Homo sapien
gggctgaggcgggagataaattcaggggtacct

SEQ ID NO: 141323 - DNA, 33 bp, Homo sapien
acataggggctaatctgagaaagcaggttagtg

SEQ ID NO: 141324 - DNA, 33 bp, Homo sapien
acataggggctaatcttagaaagcaggttagtg

SEQ ID NO: 141325 - DNA, 33 bp, Homo sapien
ctaaggaactcggcaacggaaaagtgttggcca

SEQ ID NO: 141326 - DNA, 33 bp, Homo sapien
ctaaggaactcggcaatggaaaagtgttggcca

SEQ ID NO: 141327 - DNA, 33 bp, Homo sapien
ttagctcagtgactcacagagatttagttcttg

SEQ ID NO: 141328 - DNA, 33 bp, Homo sapien
ttagctcagtgactcatagagatttagttcttg

SEQ ID NO: 141329 - DNA, 33 bp, Homo sapien
ggcacaattacatacccgaaatagacgagaagc

SEQ ID NO: 141330 - DNA, 33 bp, Homo sapien
ggcacaattacatacctgaaatagacgagaagc

SEQ ID NO: 141331 - DNA, 33 bp, Homo sapien
acttccttgcgagtaccctaatctttttgtgcc

SEQ ID NO: 141332 - DNA, 33 bp, Homo sapien
acttccttgcgagtactctaatctttttgtgcc

SEQ ID NO: 141333 - DNA, 33 bp, Homo sapien
acaacctcacacacaaaaaaagtactgcgagga

SEQ ID NO: 141334 - DNA, 33 bp, Homo sapien
acaacctcacacacaagaaaagtactgcgagga

SEQ ID NO: 141335 - DNA, 33 bp, Homo sapien
cagcatccccgcaccaagcattgcaatgggacc

SEQ ID NO: 141336 - DNA, 33 bp, Homo sapien
cagcatccccgcaccaggcattgcaatgggacc

SEQ ID NO: 141337 - DNA, 33 bp, Homo sapien
ccatgaactcaactaccctcacaaacatcagtg

SEQ ID NO: 141338 - DNA, 33 bp, Homo sapien
ccatgaactcaactactctcacaaacatcagtg

SEQ ID NO: 141339 - DNA, 33 bp, Homo sapien
ctttggaaaatatggcacaaggtccatgaactc

SEQ ID NO: 141340 - DNA, 33 bp, Homo sapien
ctttggaaaatatggcgcaaggtccatgaactc

SEQ ID NO: 141341 - DNA, 33 bp, Homo sapien
ttatgagccagctatcagaaagcctacagtttt

SEQ ID NO: 141342 - DNA, 33 bp, Homo sapien
ttatgagccagctatccgaaagcctacagtttt

SEQ ID NO: 141343 - DNA, 33 bp, Homo sapien
caatgtcctcgttccacgaagcttttcctcatt

SEQ ID NO: 141344 - DNA, 33 bp, Homo sapien
caatgtcctcgttccatgaagcttttcctcatt

SEQ ID NO: 141345 - DNA, 33 bp, Homo sapien
atctgttttgagaccacggtcactctagcagtc

SEQ ID NO: 141346 - DNA, 33 bp, Homo sapien
atctgttttgagaccagggtcactctagcagtc

SEQ ID NO: 141347 - DNA, 33 bp, Homo sapien
tgggatgagataacaccgtggagccttactctt

SEQ ID NO: 141348 - DNA, 33 bp, Homo sapien
tgggatgagataacactgtggagccttactctt

SEQ ID NO: 141349 - DNA, 33 bp, Homo sapien
gagactaatttgaccacgaccttctatttacta

SEQ ID NO: 141350 - DNA, 33 bp, Homo sapien
gagactaatttgaccatgaccttctatttacta

SEQ ID NO: 141351 - DNA, 33 bp, Homo sapien
tgcagctaatgagccaaacctttcattccactg

SEQ ID NO: 141352 - DNA, 33 bp, Homo sapien
tgcagctaatgagccacacctttcattccactg

SEQ ID NO: 141353 - DNA, 33 bp, Homo sapien
aaggatacattttagaataagtgcaagaggtac

SEQ ID NO: 141354 - DNA, 33 bp, Homo sapien
aaggatacattttagagtaagtgcaagaggtac

SEQ ID NO: 141355 - DNA, 33 bp, Homo sapien
cagaagtcagaagagaagcacttaaaacctgaa

SEQ ID NO: 141356 - DNA, 33 bp, Homo sapien
cagaagtcagaagagaggcacttaaaacctgaa

SEQ ID NO: 141357 - DNA, 33 bp, Homo sapien
atgaaggatctattcactgaacacataccgtgt

SEQ ID NO: 141358 - DNA, 33 bp, Homo sapien
atgaaggatctattcattgaacacataccgtgt

SEQ ID NO: 141359 - DNA, 33 bp, Homo sapien
aagagtcagaaccatacagagatttgaagatgc

SEQ ID NO: 141360 - DNA, 33 bp, Homo sapien
aagagtcagaaccatagagagatttgaagatgc

SEQ ID NO: 141361 - DNA, 33 bp, Homo sapien
acaaaccaagtggttcaaaacaacacgaattta

SEQ ID NO: 141362 - DNA, 33 bp, Homo sapien
acaaaccaagtggttcgaaacaacacgaattta

SEQ ID NO: 141363 - DNA, 33 bp, Homo sapien
gaaaaaaaagtctgacagagactcacagtccag

SEQ ID NO: 141364 - DNA, 33 bp, Homo sapien
gaaaaaaaagtctgacggagactcacagtccag

SEQ ID NO: 141365 - DNA, 33 bp, Homo sapien
tattgccagaaaaacacgctgtagagtgtagag

SEQ ID NO: 141366 - DNA, 33 bp, Homo sapien
tattgccagaaaaacaggctgtagagtgtagag

SEQ ID NO: 141367 - DNA, 33 bp, Homo sapien
gtaaacagtatcctgacctcttttactaccaat

SEQ ID NO: 141368 - DNA, 33 bp, Homo sapien
gtaaacagtatcctgatctcttttactaccaat

SEQ ID NO: 141369 - DNA, 33 bp, Homo sapien
tgggggtggctttatcagacattctagtaggag

SEQ ID NO: 141370 - DNA, 33 bp, Homo sapien
tgggggtggctttatcggacattctagtaggag

SEQ ID NO: 141371 - DNA, 33 bp, Homo sapien
tgcttgcgtctgcacgacatcaccaaaggtaag

SEQ ID NO: 141372 - DNA, 33 bp, Homo sapien
tgcttgcgtctgcacggcatcaccaaaggtaag

SEQ ID NO: 141373 - DNA, 33 bp, Homo sapien
ccctggaggctacctcaagaactattgttaaag

SEQ ID NO: 141374 - DNA, 33 bp, Homo sapien
ccctggaggctacctcgagaactattgttaaag

SEQ ID NO: 141375 - DNA, 33 bp, Homo sapien
gtatggtgggggctccaatgacaactgactcag

SEQ ID NO: 141376 - DNA, 33 bp, Homo sapien
gtatggtgggggctccgatgacaactgactcag

SEQ ID NO: 141377 - DNA, 33 bp, Homo sapien
tcttgagatgtctgtacacttcagggtgtcaga

SEQ ID NO: 141378 - DNA, 33 bp, Homo sapien
tcttgagatgtctgtagacttcagggtgtcaga

SEQ ID NO: 141379 - DNA, 33 bp, Homo sapien
cctgaatatacaagaccgctaaggaatcatggc

SEQ ID NO: 141380 - DNA, 33 bp, Homo sapien
cctgaatatacaagactgctaaggaatcatggc

SEQ ID NO: 141381 - DNA, 33 bp, Homo sapien
gcctccttgagctagacggcctagttgcctctg

SEQ ID NO: 141382 - DNA, 33 bp, Homo sapien
gcctccttgagctagatggcctagttgcctctg

SEQ ID NO: 141383 - DNA, 33 bp, Homo sapien
tgcaaggcaccccaacagaggagccattcacaa

SEQ ID NO: 141384 - DNA, 33 bp, Homo sapien
tgcaaggcaccccaactgaggagccattcacaa

SEQ ID NO: 141385 - DNA, 33 bp, Homo sapien
tgagtcactgaatgcaagacaggatagacatag

SEQ ID NO: 141386 - DNA, 33 bp, Homo sapien
tgagtcactgaatgcaggacaggatagacatag

SEQ ID NO: 141387 - DNA, 33 bp, Homo sapien
atcatatcttcaggacaaaaagcctaaatggat

SEQ ID NO: 141388 - DNA, 33 bp, Homo sapien
atcatatcttcaggacgaaaagcctaaatggat

SEQ ID NO: 141389 - DNA, 33 bp, Homo sapien
ttgaaaagcactcccaatgattctaatgtgcag

SEQ ID NO: 141390 - DNA, 33 bp, Homo sapien
ttgaaaagcactcccagtgattctaatgtgcag

SEQ ID NO: 141391 - DNA, 33 bp, Homo sapien
gtcatccaaacatacgaactcttgctccaatgt

SEQ ID NO: 141392 - DNA, 33 bp, Homo sapien
gtcatccaaacatacggactcttgctccaatgt

SEQ ID NO: 141393 - DNA, 33 bp, Homo sapien
cagtagttcctttttacggtagagcagtattcc

SEQ ID NO: 141394 - DNA, 33 bp, Homo sapien
cagtagttcctttttatggtagagcagtattcc

SEQ ID NO: 141395 - DNA, 33 bp, Homo sapien
tttagtaggtatgttacagtatcttgtggtttt

SEQ ID NO: 141396 - DNA, 33 bp, Homo sapien
tttagtaggtatgttatagtatcttgtggtttt

SEQ ID NO: 141397 - DNA, 33 bp, Homo sapien
gctcacttaccattccaaaaaaaatcctagagc

SEQ ID NO: 141398 - DNA, 33 bp, Homo sapien
gctcacttaccattccgaaaaaaatcctagagc

SEQ ID NO: 141399 - DNA, 33 bp, Homo sapien
ttagacatttgtttgaaaaagcttcatcaggcc

SEQ ID NO: 141400 - DNA, 33 bp, Homo sapien
ttagacatttgtttgagaaagcttcatcaggcc

SEQ ID NO: 141401 - DNA, 33 bp, Homo sapien
agttcacacattctacagtaatgccttgtcctc

SEQ ID NO: 141402 - DNA, 33 bp, Homo sapien
agttcacacattctacggtaatgccttgtcctc

SEQ ID NO: 141403 - DNA, 33 bp, Homo sapien
atattagaacacacacaggaagtacgtgagctg

SEQ ID NO: 141404 - DNA, 33 bp, Homo sapien
atattagaacacacaccggaagtacgtgagctg

SEQ ID NO: 141405 - DNA, 33 bp, Homo sapien
tatgttttaaacctcaagtaagacacatgttga

SEQ ID NO: 141406 - DNA, 33 bp, Homo sapien
tatgttttaaacctcaggtaagacacatgttga

SEQ ID NO: 141407 - DNA, 33 bp, Homo sapien
ccaatactgcaatcatcatcttttccatcaaac

SEQ ID NO: 141408 - DNA, 33 bp, Homo sapien
ccaatactgcaatcatgatcttttccatcaaac

SEQ ID NO: 141409 - DNA, 33 bp, Homo sapien
actaaaaaaaaatgaacaatatggtgaccagta

SEQ ID NO: 141410 - DNA, 33 bp, Homo sapien
actaaaaaaaaatgaataatatggtgaccagta

SEQ ID NO: 141411 - DNA, 33 bp, Homo sapien
gatctgcaaatgaccaatgacatcaggtaaaca

SEQ ID NO: 141412 - DNA, 33 bp, Homo sapien
gatctgcaaatgaccagtgacatcaggtaaaca

SEQ ID NO: 141413 - DNA, 33 bp, Homo sapien
tccagcacagactctcacagagtggaaatgaag

SEQ ID NO: 141414 - DNA, 33 bp, Homo sapien
tccagcacagactctcgcagagtggaaatgaag

SEQ ID NO: 141415 - DNA, 33 bp, Homo sapien
tcagtgtggattttagaagctgggatcatggag

SEQ ID NO: 141416 - DNA, 33 bp, Homo sapien
tcagtgtggattttagcagctgggatcatggag

SEQ ID NO: 141417 - DNA, 33 bp, Homo sapien
ctcctctaacaacccgaacgagaagcaggctga

SEQ ID NO: 141418 - DNA, 33 bp, Homo sapien
ctcctctaacaacccggacgagaagcaggctga

SEQ ID NO: 141419 - DNA, 33 bp, Homo sapien
taggcaaaatggtttaacattgaatcaaggaca

SEQ ID NO: 141420 - DNA, 33 bp, Homo sapien
taggcaaaatggtttaccattgaatcaaggaca

SEQ ID NO: 141421 - DNA, 33 bp, Homo sapien
gtatttgaattgccaacagtgaaaatgactctc

SEQ ID NO: 141422 - DNA, 33 bp, Homo sapien
gtatttgaattgccaatagtgaaaatgactctc

SEQ ID NO: 141423 - DNA, 33 bp, Homo sapien
cttcttttttttttaacggcagagaaggtggag

SEQ ID NO: 141424 - DNA, 33 bp, Homo sapien
cttcttttttttttaatggcagagaaggtggag

SEQ ID NO: 141425 - DNA, 33 bp, Homo sapien
tgatgttctggaccaaagcatctgcccttggac

SEQ ID NO: 141426 - DNA, 33 bp, Homo sapien
tgatgttctggaccaacgcatctgcccttggac

SEQ ID NO: 141427 - DNA, 33 bp, Homo sapien
atttttcagaggacagaaggactatatgtttgg

SEQ ID NO: 141428 - DNA, 33 bp, Homo sapien
atttttcagaggacaggaggactatatgtttgg

SEQ ID NO: 141429 - DNA, 33 bp, Homo sapien
gtgccaatgtgtgctgaaagtcgaggccaggct

SEQ ID NO: 141430 - DNA, 33 bp, Homo sapien
gtgccaatgtgtgctgcaagtcgaggccaggct

SEQ ID NO: 141431 - DNA, 33 bp, Homo sapien
aataattcctgcttgtaaattcagtgtatttta

SEQ ID NO: 141432 - DNA, 33 bp, Homo sapien
aataattcctgcttgtgaattcagtgtatttta

SEQ ID NO: 141433 - DNA, 33 bp, Homo sapien
cagcagaaacagaagccagaccttgcacattcc

SEQ ID NO: 141434 - DNA, 33 bp, Homo sapien
cagcagaaacagaagcgagaccttgcacattcc

SEQ ID NO: 141435 - DNA, 33 bp, Homo sapien
ggatgcaggattaacaatctaaccttcccttcc

SEQ ID NO: 141436 - DNA, 33 bp, Homo sapien
ggatgcaggattaacagtctaaccttcccttcc

SEQ ID NO: 141437 - DNA, 33 bp, Homo sapien
gccttactggggaccacgaaaaaatgactgcac

SEQ ID NO: 141438 - DNA, 33 bp, Homo sapien
gccttactggggaccatgaaaaaatgactgcac

SEQ ID NO: 141439 - DNA, 33 bp, Homo sapien
gtgactgccagaaatccaacttcatatggaatc

SEQ ID NO: 141440 - DNA, 33 bp, Homo sapien
gtgactgccagaaatctaacttcatatggaatc

SEQ ID NO: 141441 - DNA, 33 bp, Homo sapien
aatttaacaaattcagaacagtatcatattatt

SEQ ID NO: 141442 - DNA, 33 bp, Homo sapien
aatttaacaaattcaggacagtatcatattatt

SEQ ID NO: 141443 - DNA, 33 bp, Homo sapien
tacacacaaactgtcacataaacacctatacac

SEQ ID NO: 141444 - DNA, 33 bp, Homo sapien
tacacacaaactgtcatataaacacctatacac

SEQ ID NO: 141445 - DNA, 33 bp, Homo sapien
cttagcctactactccagctcctaatcttgcca

SEQ ID NO: 141446 - DNA, 33 bp, Homo sapien
cttagcctactactccggctcctaatcttgcca

SEQ ID NO: 141447 - DNA, 33 bp, Homo sapien
gccaccacccgtgccacgaaaatgggagcccag

SEQ ID NO: 141448 - DNA, 33 bp, Homo sapien
gccaccacccgtgccatgaaaatgggagcccag

SEQ ID NO: 141449 - DNA, 33 bp, Homo sapien
ctcaggctcctttacggccagtcttcagaaaac

SEQ ID NO: 141450 - DNA, 33 bp, Homo sapien
ctcaggctcctttacgtccagtcttcagaaaac

SEQ ID NO: 141451 - DNA, 33 bp, Homo sapien
actgggttactcttaaatggctttgcaggaggc

SEQ ID NO: 141452 - DNA, 33 bp, Homo sapien
actgggttactcttaagtggctttgcaggaggc

SEQ ID NO: 141453 - DNA, 33 bp, Homo sapien
ggttctaataaactcacgaggaaatgacagttt

SEQ ID NO: 141454 - DNA, 33 bp, Homo sapien
ggttctaataaactcatgaggaaatgacagttt

SEQ ID NO: 141455 - DNA, 33 bp, Homo sapien
gatgtatggaggagacacaagttagacttgacc

SEQ ID NO: 141456 - DNA, 33 bp, Homo sapien
gatgtatggaggagacgcaagttagacttgacc

SEQ ID NO: 141457 - DNA, 33 bp, Homo sapien
tcaccttctctaatctaaatcccaagcttctca

SEQ ID NO: 141458 - DNA, 33 bp, Homo sapien
tcaccttctctaatctgaatcccaagcttctca

SEQ ID NO: 141459 - DNA, 33 bp, Homo sapien
cccacggcgcgtgtccagcatcttcccagagct

SEQ ID NO: 141460 - DNA, 33 bp, Homo sapien
cccacggcgcgtgtccggcatcttcccagagct

SEQ ID NO: 141461 - DNA, 33 bp, Homo sapien
cttgtggctgtgagaacaggctgaggttgattg

SEQ ID NO: 141462 - DNA, 33 bp, Homo sapien
cttgtggctgtgagaataggctgaggttgattg

SEQ ID NO: 141463 - DNA, 33 bp, Homo sapien
accaggctgataactcaaaggctcacagacagc

SEQ ID NO: 141464 - DNA, 33 bp, Homo sapien
accaggctgataactcgaaggctcacagacagc

SEQ ID NO: 141465 - DNA, 33 bp, Homo sapien
ggtgagaaagctcacgaagggagaaagggatat

SEQ ID NO: 141466 - DNA, 33 bp, Homo sapien
ggtgagaaagctcacggagggagaaagggatat

SEQ ID NO: 141467 - DNA, 33 bp, Homo sapien
tgccttcctcggagccaagcagacctcccgagt

SEQ ID NO: 141468 - DNA, 33 bp, Homo sapien
tgccttcctcggagccgagcagacctcccgagt

SEQ ID NO: 141469 - DNA, 33 bp, Homo sapien
taaagccagggtgtccaagcagagttgttcata

SEQ ID NO: 141470 - DNA, 33 bp, Homo sapien
taaagccagggtgtccgagcagagttgttcata

SEQ ID NO: 141471 - DNA, 33 bp, Homo sapien
gagagtatgctgtttacgccaagagcagcgggt

SEQ ID NO: 141472 - DNA, 33 bp, Homo sapien
gagagtatgctgtttatgccaagagcagcgggt

SEQ ID NO: 141473 - DNA, 33 bp, Homo sapien
gagggtcttgaatctcatgtaggaagaaattca

SEQ ID NO: 141474 - DNA, 33 bp, Homo sapien
gagggtcttgaatctcgtgtaggaagaaattca

SEQ ID NO: 141475 - DNA, 33 bp, Homo sapien
gcccactgattaatggacactccagtttttcac

SEQ ID NO: 141476 - DNA, 33 bp, Homo sapien
gcccactgattaatgggcactccagtttttcac

SEQ ID NO: 141477 - DNA, 33 bp, Homo sapien
agtgtacagggaagagcctagaaaaatcctggc

SEQ ID NO: 141478 - DNA, 33 bp, Homo sapien
agtgtacagggaagaggctagaaaaatcctggc

SEQ ID NO: 141479 - DNA, 33 bp, Homo sapien
cctacgtgagggaggaaaaatgtggcccagtca

SEQ ID NO: 141480 - DNA, 33 bp, Homo sapien
cctacgtgagggaggacaaatgtggcccagtca

SEQ ID NO: 141481 - DNA, 33 bp, Homo sapien
aactatagacacatgaagaacccaggtgagatc

SEQ ID NO: 141482 - DNA, 33 bp, Homo sapien
aactatagacacatgaggaacccaggtgagatc

SEQ ID NO: 141483 - DNA, 33 bp, Homo sapien
tacagttgctgtctccagactacaaacaagcaa

SEQ ID NO: 141484 - DNA, 33 bp, Homo sapien
tacagttgctgtctccggactacaaacaagcaa

SEQ ID NO: 141485 - DNA, 33 bp, Homo sapien
cagagggctagtgacaaaatggtgcaagaaagg

SEQ ID NO: 141486 - DNA, 33 bp, Homo sapien
cagagggctagtgacacaatggtgcaagaaagg

SEQ ID NO: 141487 - DNA, 33 bp, Homo sapien
atttgaatttcagatacgtctcatttacttata

SEQ ID NO: 141488 - DNA, 33 bp, Homo sapien
atttgaatttcagatatgtctcatttacttata

SEQ ID NO: 141489 - DNA, 33 bp, Homo sapien
aaaagaatgctactacaaaaggaagctgtaaaa

SEQ ID NO: 141490 - DNA, 33 bp, Homo sapien
aaaagaatgctactacgaaaggaagctgtaaaa

SEQ ID NO: 141491 - DNA, 33 bp, Homo sapien
aagagtgaacaaaccaacttctgttgattcttt

SEQ ID NO: 141492 - DNA, 33 bp, Homo sapien
aagagtgaacaaaccagcttctgttgattcttt

SEQ ID NO: 141493 - DNA, 33 bp, Homo sapien
gatggcaaagcagaaaatgcagctcagaaaaac

SEQ ID NO: 141494 - DNA, 33 bp, Homo sapien
gatggcaaagcagaaagtgcagctcagaaaaac

SEQ ID NO: 141495 - DNA, 33 bp, Homo sapien
tattttcgacaacttactaaagctaaaatttat

SEQ ID NO: 141496 - DNA, 33 bp, Homo sapien
tattttcgacaacttattaaagctaaaatttat

SEQ ID NO: 141497 - DNA, 33 bp, Homo sapien
gcactccaggaatctgcataattagcaagccct

SEQ ID NO: 141498 - DNA, 33 bp, Homo sapien
gcactccaggaatctggataattagcaagccct

SEQ ID NO: 141499 - DNA, 33 bp, Homo sapien
atacaggtaaaatgcccggcacagagggaacac

SEQ ID NO: 141500 - DNA, 33 bp, Homo sapien
atacaggtaaaatgcctggcacagagggaacac

SEQ ID NO: 141501 - DNA, 33 bp, Homo sapien
atctagcattcttcccaatatgattatctttga

SEQ ID NO: 141502 - DNA, 33 bp, Homo sapien
atctagcattcttcccgatatgattatctttga

SEQ ID NO: 141503 - DNA, 33 bp, Homo sapien
attaacagttgcatcaataatgaaagcaaagtt

SEQ ID NO: 141504 - DNA, 33 bp, Homo sapien
attaacagttgcatcagtaatgaaagcaaagtt

SEQ ID NO: 141505 - DNA, 33 bp, Homo sapien
cacatattcttcattaacccatttgtttcacct

SEQ ID NO: 141506 - DNA, 33 bp, Homo sapien
cacatattcttcattagcccatttgtttcacct

SEQ ID NO: 141507 - DNA, 33 bp, Homo sapien
tttgagaggaaaggaacaagaggaccctgagat

SEQ ID NO: 141508 - DNA, 33 bp, Homo sapien
tttgagaggaaaggaagaagaggaccctgagat

SEQ ID NO: 141509 - DNA, 33 bp, Homo sapien
tccatcacctccaaaaatttccttatgtctctt

SEQ ID NO: 141510 - DNA, 33 bp, Homo sapien
tccatcacctccaaaagtttccttatgtctctt

SEQ ID NO: 141511 - DNA, 33 bp, Homo sapien
ttgcctattcagaaacaaggagtctatttgaga

SEQ ID NO: 141512 - DNA, 33 bp, Homo sapien
ttgcctattcagaaacgaggagtctatttgaga

SEQ ID NO: 141513 - DNA, 33 bp, Homo sapien
aagtgacattgggcatcacacacatggtcctta

SEQ ID NO: 141514 - DNA, 33 bp, Homo sapien
aagtgacattgggcattacacacatggtcctta

SEQ ID NO: 141515 - DNA, 33 bp, Homo sapien
gttagatctgacttcactagtttgctatgatac

SEQ ID NO: 141516 - DNA, 33 bp, Homo sapien
gttagatctgacttcattagtttgctatgatac

SEQ ID NO: 141517 - DNA, 33 bp, Homo sapien
gctttatgatgttcacaggtattttacacacac

SEQ ID NO: 141518 - DNA, 33 bp, Homo sapien
gctttatgatgttcaccggtattttacacacac

SEQ ID NO: 141519 - DNA, 33 bp, Homo sapien
acgagcactggcacaaatcaactaaacaactcg

SEQ ID NO: 141520 - DNA, 33 bp, Homo sapien
acgagcactggcacaagtcaactaaacaactcg

SEQ ID NO: 141521 - DNA, 33 bp, Homo sapien
atcacacaccttgaaactgaaagaatttacagc

SEQ ID NO: 141522 - DNA, 33 bp, Homo sapien
atcacacaccttgaaagtgaaagaatttacagc

SEQ ID NO: 141523 - DNA, 33 bp, Homo sapien
attctggatatcaggaagtaactattacctgta

SEQ ID NO: 141524 - DNA, 33 bp, Homo sapien
attctggatatcaggacgtaactattacctgta

SEQ ID NO: 141525 - DNA, 33 bp, Homo sapien
atagaatggatccttacaaacccatggatcctt

SEQ ID NO: 141526 - DNA, 33 bp, Homo sapien
atagaatggatccttataaacccatggatcctt

SEQ ID NO: 141527 - DNA, 33 bp, Homo sapien
taatcaagagatcaaaatctatgaggttattta

SEQ ID NO: 141528 - DNA, 33 bp, Homo sapien
taatcaagagatcaaagtctatgaggttattta

SEQ ID NO: 141529 - DNA, 33 bp, Homo sapien
agtcttgcctaattatcacagtggaaaatataa

SEQ ID NO: 141530 - DNA, 33 bp, Homo sapien
agtcttgcctaattattacagtggaaaatataa

SEQ ID NO: 141531 - DNA, 33 bp, Homo sapien
cctagacaaattgagtcactactgatgtgagtt

SEQ ID NO: 141532 - DNA, 33 bp, Homo sapien
cctagacaaattgagttactactgatgtgagtt

SEQ ID NO: 141533 - DNA, 33 bp, Homo sapien
accacattcatctatcactagttagagcataat

SEQ ID NO: 141534 - DNA, 33 bp, Homo sapien
accacattcatctatcgctagttagagcataat

SEQ ID NO: 141535 - DNA, 33 bp, Homo sapien
agcaattaggtctgccagaagtttctgtccctc

SEQ ID NO: 141536 - DNA, 33 bp, Homo sapien
agcaattaggtctgccggaagtttctgtccctc

SEQ ID NO: 141537 - DNA, 33 bp, Homo sapien
gtgtgagctatctgcaacactgccaattctgta

SEQ ID NO: 141538 - DNA, 33 bp, Homo sapien
gtgtgagctatctgcagcactgccaattctgta

SEQ ID NO: 141539 - DNA, 33 bp, Homo sapien
aagacttgtaagatgaagtaggaggtgatcttt

SEQ ID NO: 141540 - DNA, 33 bp, Homo sapien
aagacttgtaagatgaggtaggaggtgatcttt

SEQ ID NO: 141541 - DNA, 33 bp, Homo sapien
tgttacagatgccaaacaaaggtgatgttgatc

SEQ ID NO: 141542 - DNA, 33 bp, Homo sapien
tgttacagatgccaaagaaaggtgatgttgatc

SEQ ID NO: 141543 - DNA, 33 bp, Homo sapien
tactgaacaactactacgtgtcaatatgttttc

SEQ ID NO: 141544 - DNA, 33 bp, Homo sapien
tactgaacaactactatgtgtcaatatgttttc

SEQ ID NO: 141545 - DNA, 33 bp, Homo sapien
aacaggacaagttatgaaagctccctaagcctc

SEQ ID NO: 141546 - DNA, 33 bp, Homo sapien
aacaggacaagttatgcaagctccctaagcctc

SEQ ID NO: 141547 - DNA, 33 bp, Homo sapien
gattctaaacctcacaatcttttttacatcagg

SEQ ID NO: 141548 - DNA, 33 bp, Homo sapien
gattctaaacctcacagtcttttttacatcagg

SEQ ID NO: 141549 - DNA, 33 bp, Homo sapien
cttcaacaacctaggaaaaaacttcattgctta

SEQ ID NO: 141550 - DNA, 33 bp, Homo sapien
cttcaacaacctaggataaaacttcattgctta

SEQ ID NO: 141551 - DNA, 33 bp, Homo sapien
tgacacacagactgtacgtgagcaacacttaaa

SEQ ID NO: 141552 - DNA, 33 bp, Homo sapien
tgacacacagactgtatgtgagcaacacttaaa

SEQ ID NO: 141553 - DNA, 33 bp, Homo sapien
tgcacttcaaattacacgtcacggttagcaggt

SEQ ID NO: 141554 - DNA, 33 bp, Homo sapien
tgcacttcaaattacaggtcacggttagcaggt

SEQ ID NO: 141555 - DNA, 33 bp, Homo sapien
aataaatgcgtataacaatggaactaaaacctt

SEQ ID NO: 141556 - DNA, 33 bp, Homo sapien
aataaatgcgtataacgatggaactaaaacctt

SEQ ID NO: 141557 - DNA, 33 bp, Homo sapien
gaggaatagtgtatgcaaaaaggccatgaaaca

SEQ ID NO: 141558 - DNA, 33 bp, Homo sapien
gaggaatagtgtatgcgaaaaggccatgaaaca

SEQ ID NO: 141559 - DNA, 33 bp, Homo sapien
tggaggacacctctttaaaaactgagaaggagc

SEQ ID NO: 141560 - DNA, 33 bp, Homo sapien
tggaggacacctctttgaaaactgagaaggagc

SEQ ID NO: 141561 - DNA, 33 bp, Homo sapien
gtcataacatcccctgacagatcagtgtccttt

SEQ ID NO: 141562 - DNA, 33 bp, Homo sapien
gtcataacatcccctgccagatcagtgtccttt

SEQ ID NO: 141563 - DNA, 33 bp, Homo sapien
tttgggttctgatgaactgtaggtaaagggaaa

SEQ ID NO: 141564 - DNA, 33 bp, Homo sapien
tttgggttctgatgaattgtaggtaaagggaaa

SEQ ID NO: 141565 - DNA, 33 bp, Homo sapien
attttaaacggtaagagaattttcatacacaca

SEQ ID NO: 141566 - DNA, 33 bp, Homo sapien
attttaaacggtaagataattttcatacacaca

SEQ ID NO: 141567 - DNA, 33 bp, Homo sapien
ctcctcttactttgcaaaacatttagaagatgc

SEQ ID NO: 141568 - DNA, 33 bp, Homo sapien
ctcctcttactttgcagaacatttagaagatgc

SEQ ID NO: 141569 - DNA, 33 bp, Homo sapien
acagtcatgatggaacacaattcagtgcatgcc

SEQ ID NO: 141570 - DNA, 33 bp, Homo sapien
acagtcatgatggaacgcaattcagtgcatgcc

SEQ ID NO: 141571 - DNA, 33 bp, Homo sapien
ggggaagcaattttgaaggaacagacaatggat

SEQ ID NO: 141572 - DNA, 33 bp, Homo sapien
ggggaagcaattttgacggaacagacaatggat

SEQ ID NO: 141573 - DNA, 33 bp, Homo sapien
ggaaatactaatttacactgcaactaaattcat

SEQ ID NO: 141574 - DNA, 33 bp, Homo sapien
ggaaatactaatttactctgcaactaaattcat

SEQ ID NO: 141575 - DNA, 33 bp, Homo sapien
aatggcattgaaaagagcataaaagccagtgtt

SEQ ID NO: 141576 - DNA, 33 bp, Homo sapien
aatggcattgaaaagatcataaaagccagtgtt

SEQ ID NO: 141577 - DNA, 33 bp, Homo sapien
ctctcttctccctatcaaccttcttctcagcca

SEQ ID NO: 141578 - DNA, 33 bp, Homo sapien
ctctcttctccctatcgaccttcttctcagcca

SEQ ID NO: 141579 - DNA, 33 bp, Homo sapien
ctttcacattttaggccagaattgctctgatca

SEQ ID NO: 141580 - DNA, 33 bp, Homo sapien
ctttcacattttaggcgagaattgctctgatca

SEQ ID NO: 141581 - DNA, 33 bp, Homo sapien
taatatttttgtttaaatgttcctcatgtatat

SEQ ID NO: 141582 - DNA, 33 bp, Homo sapien
taatatttttgtttaagtgttcctcatgtatat

SEQ ID NO: 141583 - DNA, 33 bp, Homo sapien
atttggatttaaacaacagtaagcagcctttga

SEQ ID NO: 141584 - DNA, 33 bp, Homo sapien
atttggatttaaacaatagtaagcagcctttga

SEQ ID NO: 141585 - DNA, 33 bp, Homo sapien
ttttcacagatccaataaccaaaagagcagcat

SEQ ID NO: 141586 - DNA, 33 bp, Homo sapien
ttttcacagatccaatcaccaaaagagcagcat

SEQ ID NO: 141587 - DNA, 33 bp, Homo sapien
ttgtgacttgcagtataagcaacctctaagctt

SEQ ID NO: 141588 - DNA, 33 bp, Homo sapien
ttgtgacttgcagtatgagcaacctctaagctt

SEQ ID NO: 141589 - DNA, 33 bp, Homo sapien
gacagttgttctaaaacgaggcactgccttgac

SEQ ID NO: 141590 - DNA, 33 bp, Homo sapien
gacagttgttctaaaatgaggcactgccttgac

SEQ ID NO: 141591 - DNA, 33 bp, Homo sapien
aatggatcgtcatttaaaatcggtcccctgaca

SEQ ID NO: 141592 - DNA, 33 bp, Homo sapien
aatggatcgtcatttagaatcggtcccctgaca

SEQ ID NO: 141593 - DNA, 33 bp, Homo sapien
gggctcatttgatttcactactaaagctggggt

SEQ ID NO: 141594 - DNA, 33 bp, Homo sapien
gggctcatttgatttcgctactaaagctggggt

SEQ ID NO: 141595 - DNA, 33 bp, Homo sapien
aaaggtggagtagctacatcaatttcagaagaa

SEQ ID NO: 141596 - DNA, 33 bp, Homo sapien
aaaggtggagtagctatatcaatttcagaagaa

SEQ ID NO: 141597 - DNA, 33 bp, Homo sapien
tgttttctattagttgcatttgttccttgtttg

SEQ ID NO: 141598 - DNA, 33 bp, Homo sapien
tgttttctattagttgtatttgttccttgtttg

SEQ ID NO: 141599 - DNA, 33 bp, Homo sapien
tctgatttaaagatagcattttcaccaaactgg

SEQ ID NO: 141600 - DNA, 33 bp, Homo sapien
tctgatttaaagatagtattttcaccaaactgg

SEQ ID NO: 141601 - DNA, 33 bp, Homo sapien
taccattggtgtttcccgattgcaggcttttcc

SEQ ID NO: 141602 - DNA, 33 bp, Homo sapien
taccattggtgtttcctgattgcaggcttttcc

SEQ ID NO: 141603 - DNA, 33 bp, Homo sapien
acacatgaaaacatagaatctaatcaccctaga

SEQ ID NO: 141604 - DNA, 33 bp, Homo sapien
acacatgaaaacataggatctaatcaccctaga

SEQ ID NO: 141605 - DNA, 33 bp, Homo sapien
accaccagcgatgacaagcataatcactgtatg

SEQ ID NO: 141606 - DNA, 33 bp, Homo sapien
accaccagcgatgacaggcataatcactgtatg

SEQ ID NO: 141607 - DNA, 33 bp, Homo sapien
tcctgagctcaatccaatcctcttgccctaccc

SEQ ID NO: 141608 - DNA, 33 bp, Homo sapien
tcctgagctcaatccagtcctcttgccctaccc

SEQ ID NO: 141609 - DNA, 33 bp, Homo sapien
gtgtatgagagaggcaaggagagttcggagtaa

SEQ ID NO: 141610 - DNA, 33 bp, Homo sapien
gtgtatgagagaggcagggagagttcggagtaa

SEQ ID NO: 141611 - DNA, 33 bp, Homo sapien
ataaataacgcaagtaaagaactccttgtagat

SEQ ID NO: 141612 - DNA, 33 bp, Homo sapien
ataaataacgcaagtagagaactccttgtagat

SEQ ID NO: 141613 - DNA, 33 bp, Homo sapien
tgagctctcaacataaacagtgtactgcagata

SEQ ID NO: 141614 - DNA, 33 bp, Homo sapien
tgagctctcaacataaccagtgtactgcagata

SEQ ID NO: 141615 - DNA, 33 bp, Homo sapien
ccatgaagagactaggaatggcaaatgtgtgtg

SEQ ID NO: 141616 - DNA, 33 bp, Homo sapien
ccatgaagagactagggatggcaaatgtgtgtg

SEQ ID NO: 141617 - DNA, 33 bp, Homo sapien
cctctgggattgagtaaatagtgagggccagga

SEQ ID NO: 141618 - DNA, 33 bp, Homo sapien
cctctgggattgagtagatagtgagggccagga

SEQ ID NO: 141619 - DNA, 33 bp, Homo sapien
attaggggcttacaaacgggagagtccagtggc

SEQ ID NO: 141620 - DNA, 33 bp, Homo sapien
attaggggcttacaaatgggagagtccagtggc

SEQ ID NO: 141621 - DNA, 33 bp, Homo sapien
gtgcctggccatccaacgtatctttaaaggtga

SEQ ID NO: 141622 - DNA, 33 bp, Homo sapien
gtgcctggccatccaaggtatctttaaaggtga

SEQ ID NO: 141623 - DNA, 33 bp, Homo sapien
acagtctagctgccgaagcccagattttcttaa

SEQ ID NO: 141624 - DNA, 33 bp, Homo sapien
acagtctagctgccgacgcccagattttcttaa

SEQ ID NO: 141625 - DNA, 33 bp, Homo sapien
ttctgtaattggtaacagaaattgctaacagtc

SEQ ID NO: 141626 - DNA, 33 bp, Homo sapien
ttctgtaattggtaaccgaaattgctaacagtc

SEQ ID NO: 141627 - DNA, 33 bp, Homo sapien
ggaaatagaaaaagccaacatgaagctgtggtt

SEQ ID NO: 141628 - DNA, 33 bp, Homo sapien
ggaaatagaaaaagccgacatgaagctgtggtt

SEQ ID NO: 141629 - DNA, 33 bp, Homo sapien
tttacttaaatggagaagagatcttgctacatt

SEQ ID NO: 141630 - DNA, 33 bp, Homo sapien
tttacttaaatggagatgagatcttgctacatt

SEQ ID NO: 141631 - DNA, 33 bp, Homo sapien
ctcccaaagttttccactctgtgaagttcactc

SEQ ID NO: 141632 - DNA, 33 bp, Homo sapien
ctcccaaagttttccagtctgtgaagttcactc

SEQ ID NO: 141633 - DNA, 33 bp, Homo sapien
tgtttgctaaagagatgactgctataagggagc

SEQ ID NO: 141634 - DNA, 33 bp, Homo sapien
tgtttgctaaagagattactgctataagggagc

SEQ ID NO: 141635 - DNA, 33 bp, Homo sapien
gcctcttccacagtcactcaatttctgttgttt

SEQ ID NO: 141636 - DNA, 33 bp, Homo sapien
gcctcttccacagtcattcaatttctgttgttt

SEQ ID NO: 141637 - DNA, 33 bp, Homo sapien
aagaaagcctggtgggaaaattaagtgaaaaca

SEQ ID NO: 141638 - DNA, 33 bp, Homo sapien
aagaaagcctggtgggcaaattaagtgaaaaca

SEQ ID NO: 141639 - DNA, 33 bp, Homo sapien
acaaaccctcagcaaactaggaatagaggagtg

SEQ ID NO: 141640 - DNA, 33 bp, Homo sapien
acaaaccctcagcaaagtaggaatagaggagtg

SEQ ID NO: 141641 - DNA, 33 bp, Homo sapien
agaagttctaaaacttgaacgtctagctacggg

SEQ ID NO: 141642 - DNA, 33 bp, Homo sapien
agaagttctaaaactttaacgtctagctacggg

SEQ ID NO: 141643 - DNA, 33 bp, Homo sapien
gggtccctcagaacgacagaaagaggctgtaca

SEQ ID NO: 141644 - DNA, 33 bp, Homo sapien
gggtccctcagaacgatagaaagaggctgtaca

SEQ ID NO: 141645 - DNA, 33 bp, Homo sapien
agaagaaacagtacaactgaaatattctagtaa

SEQ ID NO: 141646 - DNA, 33 bp, Homo sapien
agaagaaacagtacaattgaaatattctagtaa

SEQ ID NO: 141647 - DNA, 33 bp, Homo sapien
gatggtactgctaatcacagatctcactttagc

SEQ ID NO: 141648 - DNA, 33 bp, Homo sapien
gatggtactgctaatcccagatctcactttagc

SEQ ID NO: 141649 - DNA, 33 bp, Homo sapien
gttcgaataaatgggaaagttactccatttttc

SEQ ID NO: 141650 - DNA, 33 bp, Homo sapien
gttcgaataaatgggacagttactccatttttc

SEQ ID NO: 141651 - DNA, 33 bp, Homo sapien
actccagatgccatcaaattgggggttagaatt

SEQ ID NO: 141652 - DNA, 33 bp, Homo sapien
actccagatgccatcagattgggggttagaatt

SEQ ID NO: 141653 - DNA, 33 bp, Homo sapien
tcttcagtctcataaacgggaagctgttgatca

SEQ ID NO: 141654 - DNA, 33 bp, Homo sapien
tcttcagtctcataaatgggaagctgttgatca

SEQ ID NO: 141655 - DNA, 33 bp, Homo sapien
tctttggaatgacacacctcttaacctgagaac

SEQ ID NO: 141656 - DNA, 33 bp, Homo sapien
tctttggaatgacacatctcttaacctgagaac

SEQ ID NO: 141657 - DNA, 33 bp, Homo sapien
atctgaacccattccaaccttctgcaaaactgt

SEQ ID NO: 141658 - DNA, 33 bp, Homo sapien
atctgaacccattccacccttctgcaaaactgt

SEQ ID NO: 141659 - DNA, 33 bp, Homo sapien
agggtgatagcaccgacgatcagaaaggaagac

SEQ ID NO: 141660 - DNA, 33 bp, Homo sapien
agggtgatagcaccgatgatcagaaaggaagac

SEQ ID NO: 141661 - DNA, 33 bp, Homo sapien
agaagtaatctagataaactgttgaaaatgaag

SEQ ID NO: 141662 - DNA, 33 bp, Homo sapien
agaagtaatctagatagactgttgaaaatgaag

SEQ ID NO: 141663 - DNA, 33 bp, Homo sapien
taccccatgcttacaaaacctgatccagcccca

SEQ ID NO: 141664 - DNA, 33 bp, Homo sapien
taccccatgcttacaatacctgatccagcccca

SEQ ID NO: 141665 - DNA, 33 bp, Homo sapien
cagtcgaataaaggaaatagtttcagaataaca

SEQ ID NO: 141666 - DNA, 33 bp, Homo sapien
cagtcgaataaaggaagtagtttcagaataaca

SEQ ID NO: 141667 - DNA, 33 bp, Homo sapien
ccgacttggtattacactggtagtaaacttaag

SEQ ID NO: 141668 - DNA, 33 bp, Homo sapien
ccgacttggtattacattggtagtaaacttaag

SEQ ID NO: 141669 - DNA, 33 bp, Homo sapien
tgccaggagcgtcccccacttctaagttgtggc

SEQ ID NO: 141670 - DNA, 33 bp, Homo sapien
tgccaggagcgtcccctacttctaagttgtggc

SEQ ID NO: 141671 - DNA, 33 bp, Homo sapien
acttggctgaaaaagtcaaggtgaaagagcctg

SEQ ID NO: 141672 - DNA, 33 bp, Homo sapien
acttggctgaaaaagtgaaggtgaaagagcctg

SEQ ID NO: 141673 - DNA, 33 bp, Homo sapien
ctgtttccttattacactgaaatcagcataagg

SEQ ID NO: 141674 - DNA, 33 bp, Homo sapien
ctgtttccttattacattgaaatcagcataagg

SEQ ID NO: 141675 - DNA, 33 bp, Homo sapien
ctagtatggatagttaaaagaacacttagattt

SEQ ID NO: 141676 - DNA, 33 bp, Homo sapien
ctagtatggatagttagaagaacacttagattt

SEQ ID NO: 141677 - DNA, 33 bp, Homo sapien
cagtgccactaacagtaaatccatgttgctgaa

SEQ ID NO: 141678 - DNA, 33 bp, Homo sapien
cagtgccactaacagtgaatccatgttgctgaa

SEQ ID NO: 141679 - DNA, 33 bp, Homo sapien
ataaagcagaatggtacgtatcggattgtttta

SEQ ID NO: 141680 - DNA, 33 bp, Homo sapien
ataaagcagaatggtatgtatcggattgtttta

SEQ ID NO: 141681 - DNA, 33 bp, Homo sapien
tattggttttgtaacaacgaatacaatccaata

SEQ ID NO: 141682 - DNA, 33 bp, Homo sapien
tattggttttgtaacatcgaatacaatccaata

SEQ ID NO: 141683 - DNA, 33 bp, Homo sapien
tttttgctttcaggtacaaattgggccatttgc

SEQ ID NO: 141684 - DNA, 33 bp, Homo sapien
tttttgctttcaggtataaattgggccatttgc

SEQ ID NO: 141685 - DNA, 33 bp, Homo sapien
ccatccccaaagtccaagttcctttccaacttc

SEQ ID NO: 141686 - DNA, 33 bp, Homo sapien
ccatccccaaagtccacgttcctttccaacttc

SEQ ID NO: 141687 - DNA, 33 bp, Homo sapien
cctattttggggtggaaaactgtgaacacattg

SEQ ID NO: 141688 - DNA, 33 bp, Homo sapien
cctattttggggtggagaactgtgaacacattg

SEQ ID NO: 141689 - DNA, 33 bp, Homo sapien
tagggttggtacaatgaagtattaatgcgtaaa

SEQ ID NO: 141690 - DNA, 33 bp, Homo sapien
tagggttggtacaatggagtattaatgcgtaaa

SEQ ID NO: 141691 - DNA, 33 bp, Homo sapien
accattggaacacaaaaagacagaaggagggaa

SEQ ID NO: 141692 - DNA, 33 bp, Homo sapien
accattggaacacaaagagacagaaggagggaa

SEQ ID NO: 141693 - DNA, 33 bp, Homo sapien
actcgaataaagacaacgagtaaacgaaaagag

SEQ ID NO: 141694 - DNA, 33 bp, Homo sapien
actcgaataaagacaatgagtaaacgaaaagag

SEQ ID NO: 141695 - DNA, 33 bp, Homo sapien
cgaattgttttggaccactcattaattttcatg

SEQ ID NO: 141696 - DNA, 33 bp, Homo sapien
cgaattgttttggacctctcattaattttcatg

SEQ ID NO: 141697 - DNA, 33 bp, Homo sapien
gatgctttcttcaggccagcttctctgctttct

SEQ ID NO: 141698 - DNA, 33 bp, Homo sapien
gatgctttcttcaggcgagcttctctgctttct

SEQ ID NO: 141699 - DNA, 33 bp, Homo sapien
aagcactttggcttccactccaagatgatctgc

SEQ ID NO: 141700 - DNA, 33 bp, Homo sapien
aagcactttggcttccgctccaagatgatctgc

SEQ ID NO: 141701 - DNA, 33 bp, Homo sapien
tgaagttcacacattaaagtggaaaaatagccc

SEQ ID NO: 141702 - DNA, 33 bp, Homo sapien
tgaagttcacacattagagtggaaaaatagccc

SEQ ID NO: 141703 - DNA, 33 bp, Homo sapien
agccacgatctggtacaaccacccatttaaccg

SEQ ID NO: 141704 - DNA, 33 bp, Homo sapien
agccacgatctggtaccaccacccatttaaccg

SEQ ID NO: 141705 - DNA, 33 bp, Homo sapien
gagtcttgagggaaaaacaggagctccctgagc

SEQ ID NO: 141706 - DNA, 33 bp, Homo sapien
gagtcttgagggaaaagcaggagctccctgagc

SEQ ID NO: 141707 - DNA, 33 bp, Homo sapien
tagcaattatttggcaaagaatctcaagtacct

SEQ ID NO: 141708 - DNA, 33 bp, Homo sapien
tagcaattatttggcagagaatctcaagtacct

SEQ ID NO: 141709 - DNA, 33 bp, Homo sapien
ctggaagctgcctttaagtttgcactaaagcaa

SEQ ID NO: 141710 - DNA, 33 bp, Homo sapien
ctggaagctgcctttaggtttgcactaaagcaa

SEQ ID NO: 141711 - DNA, 33 bp, Homo sapien
aggccagcatcttcaaatctcttggctctgtct

SEQ ID NO: 141712 - DNA, 33 bp, Homo sapien
aggccagcatcttcaagtctcttggctctgtct

SEQ ID NO: 141713 - DNA, 33 bp, Homo sapien
aaccaggtgcagggaaatcttcctacagacaca

SEQ ID NO: 141714 - DNA, 33 bp, Homo sapien
aaccaggtgcagggaactcttcctacagacaca

SEQ ID NO: 141715 - DNA, 33 bp, Homo sapien
cagtgttggaaggcataaacaaagctccccaag

SEQ ID NO: 141716 - DNA, 33 bp, Homo sapien
cagtgttggaaggcatcaacaaagctccccaag

SEQ ID NO: 141717 - DNA, 33 bp, Homo sapien
tagaaaggcagtcaggccaaaggaagaggggag

SEQ ID NO: 141718 - DNA, 33 bp, Homo sapien
tagaaaggcagtcaggtcaaaggaagaggggag

SEQ ID NO: 141719 - DNA, 33 bp, Homo sapien
atctggaattgggacagtgtcagcctagaggtg

SEQ ID NO: 141720 - DNA, 33 bp, Homo sapien
atctggaattgggacattgtcagcctagaggtg

SEQ ID NO: 141721 - DNA, 33 bp, Homo sapien
taatatcgactctttacgctccactgagaaagc

SEQ ID NO: 141722 - DNA, 33 bp, Homo sapien
taatatcgactctttatgctccactgagaaagc

SEQ ID NO: 141723 - DNA, 33 bp, Homo sapien
aaatgaccctcgcagaagattactcagctgctt

SEQ ID NO: 141724 - DNA, 33 bp, Homo sapien
aaatgaccctcgcagatgattactcagctgctt

SEQ ID NO: 141725 - DNA, 33 bp, Homo sapien
atatgaactgttgaagcaaatccatttgaaagg

SEQ ID NO: 141726 - DNA, 33 bp, Homo sapien
atatgaactgttgaaggaaatccatttgaaagg

SEQ ID NO: 141727 - DNA, 33 bp, Homo sapien
agatatggtgtaggtcactaagatggagctttc

SEQ ID NO: 141728 - DNA, 33 bp, Homo sapien
agatatggtgtaggtctctaagatggagctttc

SEQ ID NO: 141729 - DNA, 33 bp, Homo sapien
ctgtttaacttaggaagtcagtttatcactggc

SEQ ID NO: 141730 - DNA, 33 bp, Homo sapien
ctgtttaacttaggaattcagtttatcactggc

SEQ ID NO: 141731 - DNA, 33 bp, Homo sapien
agggagtgaataatggaaatgcaatgtgagagg

SEQ ID NO: 141732 - DNA, 33 bp, Homo sapien
agggagtgaataatggcaatgcaatgtgagagg

SEQ ID NO: 141733 - DNA, 33 bp, Homo sapien
tgacgccccaggaccgaaaaacaaaatctacct

SEQ ID NO: 141734 - DNA, 33 bp, Homo sapien
tgacgccccaggaccggaaaacaaaatctacct

SEQ ID NO: 141735 - DNA, 33 bp, Homo sapien
gagctgtctaactaacgctttaatgggggcaag

SEQ ID NO: 141736 - DNA, 33 bp, Homo sapien
gagctgtctaactaactctttaatgggggcaag

SEQ ID NO: 141737 - DNA, 33 bp, Homo sapien
cacacacacaactttgcatttggatttaaatgt

SEQ ID NO: 141738 - DNA, 33 bp, Homo sapien
cacacacacaactttgtatttggatttaaatgt

SEQ ID NO: 141739 - DNA, 33 bp, Homo sapien
tatgaaatgacttactcaaatttttttggtgac

SEQ ID NO: 141740 - DNA, 33 bp, Homo sapien
tatgaaatgacttactgaaatttttttggtgac

SEQ ID NO: 141741 - DNA, 33 bp, Homo sapien
acagtggaaccaagtgcagtaatgagaggactt

SEQ ID NO: 141742 - DNA, 33 bp, Homo sapien
acagtggaaccaagtggagtaatgagaggactt

SEQ ID NO: 141743 - DNA, 33 bp, Homo sapien
gtgctttactagtgccagcgcagtagtgcttag

SEQ ID NO: 141744 - DNA, 33 bp, Homo sapien
gtgctttactagtgccggcgcagtagtgcttag

SEQ ID NO: 141745 - DNA, 33 bp, Homo sapien
tgtggagagctggttaaggggtatgtagagatg

SEQ ID NO: 141746 - DNA, 33 bp, Homo sapien
tgtggagagctggttacggggtatgtagagatg

SEQ ID NO: 141747 - DNA, 33 bp, Homo sapien
aaaaaagaatctaaaaagtcagctaataattat

SEQ ID NO: 141748 - DNA, 33 bp, Homo sapien
aaaaaagaatctaaaaggtcagctaataattat

SEQ ID NO: 141749 - DNA, 33 bp, Homo sapien
tgtgcttagctcaccaatcaccacagtactgtc

SEQ ID NO: 141750 - DNA, 33 bp, Homo sapien
tgtgcttagctcaccagtcaccacagtactgtc

SEQ ID NO: 141751 - DNA, 33 bp, Homo sapien
ttcattcatctcttgaacctaacatttctgacc

SEQ ID NO: 141752 - DNA, 33 bp, Homo sapien
ttcattcatctcttgagcctaacatttctgacc

SEQ ID NO: 141753 - DNA, 33 bp, Homo sapien
aaatggcttataatacacttgcaaataactttc

SEQ ID NO: 141754 - DNA, 33 bp, Homo sapien
aaatggcttataatacgcttgcaaataactttc

SEQ ID NO: 141755 - DNA, 33 bp, Homo sapien
ttattgttgttatgatgactacctcacctttta

SEQ ID NO: 141756 - DNA, 33 bp, Homo sapien
ttattgttgttatgattactacctcacctttta

SEQ ID NO: 141757 - DNA, 33 bp, Homo sapien
ttatgagtgagcatcaaaggaaatcaagagtgt

SEQ ID NO: 141758 - DNA, 33 bp, Homo sapien
ttatgagtgagcatcagaggaaatcaagagtgt

SEQ ID NO: 141759 - DNA, 33 bp, Homo sapien
aatcagtgagctgagtaaagaagatctgccctc

SEQ ID NO: 141760 - DNA, 33 bp, Homo sapien
aatcagtgagctgagtgaagaagatctgccctc

SEQ ID NO: 141761 - DNA, 33 bp, Homo sapien
aaataaagtccaaaaagttacagtacatagttc

SEQ ID NO: 141762 - DNA, 33 bp, Homo sapien
aaataaagtccaaaaatttacagtacatagttc

SEQ ID NO: 141763 - DNA, 33 bp, Homo sapien
caaatggccttcacagacaacatttgaaagatg

SEQ ID NO: 141764 - DNA, 33 bp, Homo sapien
caaatggccttcacagtcaacatttgaaagatg

SEQ ID NO: 141765 - DNA, 33 bp, Homo sapien
aggcagattatagacccaaatgtaaaaggcaaa

SEQ ID NO: 141766 - DNA, 33 bp, Homo sapien
aggcagattatagacctaaatgtaaaaggcaaa

SEQ ID NO: 141767 - DNA, 33 bp, Homo sapien
ttaaaacaccattgtaagtggaatttatcaagg

SEQ ID NO: 141768 - DNA, 33 bp, Homo sapien
ttaaaacaccattgtatgtggaatttatcaagg

SEQ ID NO: 141769 - DNA, 33 bp, Homo sapien
gtgcattatgtaagtggcacgtgatgccaattt

SEQ ID NO: 141770 - DNA, 33 bp, Homo sapien
gtgcattatgtaagtgtcacgtgatgccaattt

SEQ ID NO: 141771 - DNA, 33 bp, Homo sapien
aaaaaagcaacttccaaatcaaccattgctctc

SEQ ID NO: 141772 - DNA, 33 bp, Homo sapien
aaaaaagcaacttccagatcaaccattgctctc

SEQ ID NO: 141773 - DNA, 33 bp, Homo sapien
caagtactttcacatacgattgtttttgatgac

SEQ ID NO: 141774 - DNA, 33 bp, Homo sapien
caagtactttcacatatgattgtttttgatgac

SEQ ID NO: 141775 - DNA, 33 bp, Homo sapien
aagttacacttggtggaaactttattaccacat

SEQ ID NO: 141776 - DNA, 33 bp, Homo sapien
aagttacacttggtgggaactttattaccacat

SEQ ID NO: 141777 - DNA, 33 bp, Homo sapien
caagctctttggtaccagcttgacaggtgtaga

SEQ ID NO: 141778 - DNA, 33 bp, Homo sapien
caagctctttggtaccggcttgacaggtgtaga

SEQ ID NO: 141779 - DNA, 33 bp, Homo sapien
aggaaacagagagttacacctagagaagagatt

SEQ ID NO: 141780 - DNA, 33 bp, Homo sapien
aggaaacagagagttatacctagagaagagatt

SEQ ID NO: 141781 - DNA, 33 bp, Homo sapien
ggtaccccttgatgacaagaatctctccgtacc

SEQ ID NO: 141782 - DNA, 33 bp, Homo sapien
ggtaccccttgatgaccagaatctctccgtacc

SEQ ID NO: 141783 - DNA, 33 bp, Homo sapien
gcaagtggaaggcacacagatgagtgggatgca

SEQ ID NO: 141784 - DNA, 33 bp, Homo sapien
gcaagtggaaggcacatagatgagtgggatgca

SEQ ID NO: 141785 - DNA, 33 bp, Homo sapien
cttcctttcatttgaactggctcaatggatgcc

SEQ ID NO: 141786 - DNA, 33 bp, Homo sapien
cttcctttcatttgaattggctcaatggatgcc

SEQ ID NO: 141787 - DNA, 33 bp, Homo sapien
catccttactgacctacgttttcttcccatccc

SEQ ID NO: 141788 - DNA, 33 bp, Homo sapien
catccttactgacctatgttttcttcccatccc

SEQ ID NO: 141789 - DNA, 33 bp, Homo sapien
aacttgctgagatatcagagggtaccagggcag

SEQ ID NO: 141790 - DNA, 33 bp, Homo sapien
aacttgctgagatatcggagggtaccagggcag

SEQ ID NO: 141791 - DNA, 33 bp, Homo sapien
ggtttgctatgaggatcaaatgaactaatgtgt

SEQ ID NO: 141792 - DNA, 33 bp, Homo sapien
ggtttgctatgaggattaaatgaactaatgtgt

SEQ ID NO: 141793 - DNA, 33 bp, Homo sapien
ccagtacattgggagagtatttagtctgcagtt

SEQ ID NO: 141794 - DNA, 33 bp, Homo sapien
ccagtacattgggagattatttagtctgcagtt

SEQ ID NO: 141795 - DNA, 33 bp, Homo sapien
cagagaggggacttagcagcattgtgaaggaaa

SEQ ID NO: 141796 - DNA, 33 bp, Homo sapien
cagagaggggacttagtagcattgtgaaggaaa

SEQ ID NO: 141797 - DNA, 33 bp, Homo sapien
tctgaagacaataagaagatttgttgagaatga

SEQ ID NO: 141798 - DNA, 33 bp, Homo sapien
tctgaagacaataagaggatttgttgagaatga

SEQ ID NO: 141799 - DNA, 33 bp, Homo sapien
tatatgaaccaaaggccgcctcttactattgca

SEQ ID NO: 141800 - DNA, 33 bp, Homo sapien
tatatgaaccaaaggctgcctcttactattgca

SEQ ID NO: 141801 - DNA, 33 bp, Homo sapien
gcaacaacaaaatggtaacaaatttatgagtga

SEQ ID NO: 141802 - DNA, 33 bp, Homo sapien
gcaacaacaaaatggttacaaatttatgagtga

SEQ ID NO: 141803 - DNA, 33 bp, Homo sapien
aatactatataatcataagctattgcacatctc

SEQ ID NO: 141804 - DNA, 33 bp, Homo sapien
aatactatataatcatgagctattgcacatctc

SEQ ID NO: 141805 - DNA, 33 bp, Homo sapien
tagcaggaattctgcaagccaaattgtgaacac

SEQ ID NO: 141806 - DNA, 33 bp, Homo sapien
tagcaggaattctgcaggccaaattgtgaacac

SEQ ID NO: 141807 - DNA, 33 bp, Homo sapien
acaaaaggtgaagggagaatttgtcctttcttc

SEQ ID NO: 141808 - DNA, 33 bp, Homo sapien
acaaaaggtgaagggataatttgtcctttcttc

SEQ ID NO: 141809 - DNA, 33 bp, Homo sapien
caaccaactatccaaccgaaaatacatttgtgg

SEQ ID NO: 141810 - DNA, 33 bp, Homo sapien
caaccaactatccaactgaaaatacatttgtgg

SEQ ID NO: 141811 - DNA, 33 bp, Homo sapien
gacaggaacaaagtctcacacatctctcttccc

SEQ ID NO: 141812 - DNA, 33 bp, Homo sapien
gacaggaacaaagtctgacacatctctcttccc

SEQ ID NO: 141813 - DNA, 33 bp, Homo sapien
ttgcaatgagaggagacattttggagactagaa

SEQ ID NO: 141814 - DNA, 33 bp, Homo sapien
ttgcaatgagaggagatattttggagactagaa

SEQ ID NO: 141815 - DNA, 33 bp, Homo sapien
gactccggcgatgatcaaacagggaacaaaatg

SEQ ID NO: 141816 - DNA, 33 bp, Homo sapien
gactccggcgatgatcgaacagggaacaaaatg

SEQ ID NO: 141817 - DNA, 33 bp, Homo sapien
gttcctcgggtcatgcagagttgtgaaaggctg

SEQ ID NO: 141818 - DNA, 33 bp, Homo sapien
gttcctcgggtcatgcggagttgtgaaaggctg

SEQ ID NO: 141819 - DNA, 33 bp, Homo sapien
agaatattaaggagccagcaattagtaatgaag

SEQ ID NO: 141820 - DNA, 33 bp, Homo sapien
agaatattaaggagccggcaattagtaatgaag

SEQ ID NO: 141821 - DNA, 33 bp, Homo sapien
tagtaatgaagaagacaatgaccttggcaatta

SEQ ID NO: 141822 - DNA, 33 bp, Homo sapien
tagtaatgaagaagacgatgaccttggcaatta

SEQ ID NO: 141823 - DNA, 33 bp, Homo sapien
aaacacatcgaatcgaacaaccgatttatcttt

SEQ ID NO: 141824 - DNA, 33 bp, Homo sapien
aaacacatcgaatcgagcaaccgatttatcttt

SEQ ID NO: 141825 - DNA, 33 bp, Homo sapien
cacacccaatgcattaactggtattgcaacttg

SEQ ID NO: 141826 - DNA, 33 bp, Homo sapien
cacacccaatgcattatctggtattgcaacttg

SEQ ID NO: 141827 - DNA, 33 bp, Homo sapien
tgtttgcttaaactcaagatgtttggagtcagg

SEQ ID NO: 141828 - DNA, 33 bp, Homo sapien
tgtttgcttaaactcaggatgtttggagtcagg

SEQ ID NO: 141829 - DNA, 33 bp, Homo sapien
cgtaaggaacaagaacgccaagaagtgtttggg

SEQ ID NO: 141830 - DNA, 33 bp, Homo sapien
cgtaaggaacaagaactccaagaagtgtttggg

SEQ ID NO: 141831 - DNA, 33 bp, Homo sapien
agacaagatcaggaaccggagtccctggaaaat

SEQ ID NO: 141832 - DNA, 33 bp, Homo sapien
agacaagatcaggaactggagtccctggaaaat

SEQ ID NO: 141833 - DNA, 33 bp, Homo sapien
gtgtagtgtttctatgcacaggaggctatgatg

SEQ ID NO: 141834 - DNA, 33 bp, Homo sapien
gtgtagtgtttctatgtacaggaggctatgatg

SEQ ID NO: 141835 - DNA, 33 bp, Homo sapien
atgaagaagtatagagccagtgtagacaacatg

SEQ ID NO: 141836 - DNA, 33 bp, Homo sapien
atgaagaagtatagagtcagtgtagacaacatg

SEQ ID NO: 141837 - DNA, 33 bp, Homo sapien
accatctaaactgccaacttttcaaggattcct

SEQ ID NO: 141838 - DNA, 33 bp, Homo sapien
accatctaaactgccagcttttcaaggattcct

SEQ ID NO: 141839 - DNA, 33 bp, Homo sapien
gtttcttcaatggaaaagaggatacactgtaaa

SEQ ID NO: 141840 - DNA, 33 bp, Homo sapien
gtttcttcaatggaaaggaggatacactgtaaa

SEQ ID NO: 141841 - DNA, 33 bp, Homo sapien
catgtatcttcagaccagccacataaaagggaa

SEQ ID NO: 141842 - DNA, 33 bp, Homo sapien
catgtatcttcagaccggccacataaaagggaa

SEQ ID NO: 141843 - DNA, 33 bp, Homo sapien
tctgattcatgaaattcaacatgtgtgtgaaaa

SEQ ID NO: 141844 - DNA, 33 bp, Homo sapien
tctgattcatgaaatttaacatgtgtgtgaaaa

SEQ ID NO: 141845 - DNA, 33 bp, Homo sapien
ccccaaatcttctccaaacttaacacccttagt

SEQ ID NO: 141846 - DNA, 33 bp, Homo sapien
ccccaaatcttctccagacttaacacccttagt

SEQ ID NO: 141847 - DNA, 33 bp, Homo sapien
tctcttcacaaccttacaattccatgtctctgt

SEQ ID NO: 141848 - DNA, 33 bp, Homo sapien
tctcttcacaaccttataattccatgtctctgt

SEQ ID NO: 141849 - DNA, 33 bp, Homo sapien
gctaaattaaaaagaccgatgatatgaagtgtt

SEQ ID NO: 141850 - DNA, 33 bp, Homo sapien
gctaaattaaaaagactgatgatatgaagtgtt

SEQ ID NO: 141851 - DNA, 33 bp, Homo sapien
aaaacatatgtccacaagaaggcttgtacaaga

SEQ ID NO: 141852 - DNA, 33 bp, Homo sapien
aaaacatatgtccacaggaaggcttgtacaaga

SEQ ID NO: 141853 - DNA, 33 bp, Homo sapien
accatcaaattcaaaacatggaacattttcatc

SEQ ID NO: 141854 - DNA, 33 bp, Homo sapien
accatcaaattcaaaatatggaacattttcatc

SEQ ID NO: 141855 - DNA, 33 bp, Homo sapien
cctggacttgctggacagatgtacacatattgc

SEQ ID NO: 141856 - DNA, 33 bp, Homo sapien
cctggacttgctggaccgatgtacacatattgc

SEQ ID NO: 141857 - DNA, 33 bp, Homo sapien
tgcacatggtaaggaaaatactctcttttcatc

SEQ ID NO: 141858 - DNA, 33 bp, Homo sapien
tgcacatggtaaggaagatactctcttttcatc

SEQ ID NO: 141859 - DNA, 33 bp, Homo sapien
aagacctcaccttcctaacaataacagctgaga

SEQ ID NO: 141860 - DNA, 33 bp, Homo sapien
aagacctcaccttcctcacaataacagctgaga

SEQ ID NO: 141861 - DNA, 33 bp, Homo sapien
tgtattagaaaccatcaagttgtgcaaagcggg

SEQ ID NO: 141862 - DNA, 33 bp, Homo sapien
tgtattagaaaccatcgagttgtgcaaagcggg

SEQ ID NO: 141863 - DNA, 33 bp, Homo sapien
tcagcaggggtttcacggaagacagggtggagt

SEQ ID NO: 141864 - DNA, 33 bp, Homo sapien
tcagcaggggtttcactgaagacagggtggagt

SEQ ID NO: 141865 - DNA, 33 bp, Homo sapien
gtacccattttacgaaggaagggtcagacccaa

SEQ ID NO: 141866 - DNA, 33 bp, Homo sapien
gtacccattttacgaatgaagggtcagacccaa

SEQ ID NO: 141867 - DNA, 33 bp, Homo sapien
actttaggtgcttgagaatttttcataaattca

SEQ ID NO: 141868 - DNA, 33 bp, Homo sapien
actttaggtgcttgagtatttttcataaattca

SEQ ID NO: 141869 - DNA, 33 bp, Homo sapien
ccctgcagtctctaaaagcatgctcacctctgc

SEQ ID NO: 141870 - DNA, 33 bp, Homo sapien
ccctgcagtctctaaaggcatgctcacctctgc

SEQ ID NO: 141871 - DNA, 33 bp, Homo sapien
acccctccccactcaacgtacttgcataacatc

SEQ ID NO: 141872 - DNA, 33 bp, Homo sapien
acccctccccactcaatgtacttgcataacatc

SEQ ID NO: 141873 - DNA, 33 bp, Homo sapien
gcttccttaccaagtcccacgtggtgacggctg

SEQ ID NO: 141874 - DNA, 33 bp, Homo sapien
gcttccttaccaagtctcacgtggtgacggctg

SEQ ID NO: 141875 - DNA, 33 bp, Homo sapien
gcttctccctaccaagcaaatgttcattagtgt

SEQ ID NO: 141876 - DNA, 33 bp, Homo sapien
gcttctccctaccaagtaaatgttcattagtgt

SEQ ID NO: 141877 - DNA, 33 bp, Homo sapien
tccctttctattcaacagcgttatcatggggta

SEQ ID NO: 141878 - DNA, 33 bp, Homo sapien
tccctttctattcaacggcgttatcatggggta

SEQ ID NO: 141879 - DNA, 33 bp, Homo sapien
tggagtgacttcacaacccgcagtgaatttggg

SEQ ID NO: 141880 - DNA, 33 bp, Homo sapien
tggagtgacttcacaatccgcagtgaatttggg

SEQ ID NO: 141881 - DNA, 33 bp, Homo sapien
caacaggtcagggaagcctccaagttgctgttt

SEQ ID NO: 141882 - DNA, 33 bp, Homo sapien
caacaggtcagggaaggctccaagttgctgttt

SEQ ID NO: 141883 - DNA, 33 bp, Homo sapien
tactgtcaatctgatcacttaccgtgcttcata

SEQ ID NO: 141884 - DNA, 33 bp, Homo sapien
tactgtcaatctgatcgcttaccgtgcttcata

SEQ ID NO: 141885 - DNA, 33 bp, Homo sapien
catctaattctaacaaacatcatagtagtcccc

SEQ ID NO: 141886 - DNA, 33 bp, Homo sapien
catctaattctaacaagcatcatagtagtcccc

SEQ ID NO: 141887 - DNA, 33 bp, Homo sapien
ccagcaaagcagaaccaaaggaacgggttggca

SEQ ID NO: 141888 - DNA, 33 bp, Homo sapien
ccagcaaagcagaaccgaaggaacgggttggca

SEQ ID NO: 141889 - DNA, 33 bp, Homo sapien
ggggttggttacgtgacggtctactgtgtaggt

SEQ ID NO: 141890 - DNA, 33 bp, Homo sapien
ggggttggttacgtgatggtctactgtgtaggt

SEQ ID NO: 141891 - DNA, 33 bp, Homo sapien
tatcttcatgacggtcactatcatggctgggtt

SEQ ID NO: 141892 - DNA, 33 bp, Homo sapien
tatcttcatgacggtcgctatcatggctgggtt

SEQ ID NO: 141893 - DNA, 33 bp, Homo sapien
atacaaccaacacgccaccatgatgctggctgc

SEQ ID NO: 141894 - DNA, 33 bp, Homo sapien
atacaaccaacacgccgccatgatgctggctgc

SEQ ID NO: 141895 - DNA, 33 bp, Homo sapien
aaaccatgtaaaaaggaatactcagagaaatct

SEQ ID NO: 141896 - DNA, 33 bp, Homo sapien
aaaccatgtaaaaaggtatactcagagaaatct

SEQ ID NO: 141897 - DNA, 33 bp, Homo sapien
tcttctgctgcctatactagaagatggaagaag

SEQ ID NO: 141898 - DNA, 33 bp, Homo sapien
tcttctgctgcctatattagaagatggaagaag

SEQ ID NO: 141899 - DNA, 33 bp, Homo sapien
tgactcattacggtgcaagagctatagggcaga

SEQ ID NO: 141900 - DNA, 33 bp, Homo sapien
tgactcattacggtgccagagctatagggcaga

SEQ ID NO: 141901 - DNA, 33 bp, Homo sapien
tggacaggagccagaacatccaggccaacccag

SEQ ID NO: 141902 - DNA, 33 bp, Homo sapien
tggacaggagccagaatatccaggccaacccag

SEQ ID NO: 141903 - DNA, 33 bp, Homo sapien
aatagggtgagaagcaacaggaactatcatgac

SEQ ID NO: 141904 - DNA, 33 bp, Homo sapien
aatagggtgagaagcaccaggaactatcatgac

SEQ ID NO: 141905 - DNA, 33 bp, Homo sapien
aagtgacacaatgtgacctaacgcgtgtaaagc

SEQ ID NO: 141906 - DNA, 33 bp, Homo sapien
aagtgacacaatgtgatctaacgcgtgtaaagc

SEQ ID NO: 141907 - DNA, 33 bp, Homo sapien
gttttctcatctgtaaagacgatagctcacttc

SEQ ID NO: 141908 - DNA, 33 bp, Homo sapien
gttttctcatctgtaaggacgatagctcacttc

SEQ ID NO: 141909 - DNA, 33 bp, Homo sapien
ggtatgtgacttgctaactgtaaaatgatgagt

SEQ ID NO: 141910 - DNA, 33 bp, Homo sapien
ggtatgtgacttgctacctgtaaaatgatgagt

SEQ ID NO: 141911 - DNA, 33 bp, Homo sapien
gagatagacatgttcaatatcttgatggcacag

SEQ ID NO: 141912 - DNA, 33 bp, Homo sapien
gagatagacatgttcattatcttgatggcacag

SEQ ID NO: 141913 - DNA, 33 bp, Homo sapien
cagggtagctaagatgacatcaggaacattgtg

SEQ ID NO: 141914 - DNA, 33 bp, Homo sapien
cagggtagctaagatgtcatcaggaacattgtg

SEQ ID NO: 141915 - DNA, 33 bp, Homo sapien
tttcacttcagcttcaacactgaggcaactttc

SEQ ID NO: 141916 - DNA, 33 bp, Homo sapien
tttcacttcagcttcagcactgaggcaactttc

SEQ ID NO: 141917 - DNA, 33 bp, Homo sapien
cattttagcacatttacgagattctgcagccac

SEQ ID NO: 141918 - DNA, 33 bp, Homo sapien
cattttagcacatttatgagattctgcagccac

SEQ ID NO: 141919 - DNA, 33 bp, Homo sapien
actccatagaaacagaaacttgtctgactcatc

SEQ ID NO: 141920 - DNA, 33 bp, Homo sapien
actccatagaaacagagacttgtctgactcatc

SEQ ID NO: 141921 - DNA, 33 bp, Homo sapien
cttttgggtgctccaaccttggcaggctctaca

SEQ ID NO: 141922 - DNA, 33 bp, Homo sapien
cttttgggtgctccaatcttggcaggctctaca

SEQ ID NO: 141923 - DNA, 33 bp, Homo sapien
cacatcagtgaccgatcagactgtggtaaggta

SEQ ID NO: 141924 - DNA, 33 bp, Homo sapien
cacatcagtgaccgattagactgtggtaaggta

SEQ ID NO: 141925 - DNA, 33 bp, Homo sapien
atatggccaacaggagcccactggcccactttt

SEQ ID NO: 141926 - DNA, 33 bp, Homo sapien
atatggccaacaggagtccactggcccactttt

SEQ ID NO: 141927 - DNA, 33 bp, Homo sapien
ctcttaagggggcccacgtttcaagtgatgtgc

SEQ ID NO: 141928 - DNA, 33 bp, Homo sapien
ctcttaagggggcccatgtttcaagtgatgtgc

SEQ ID NO: 141929 - DNA, 33 bp, Homo sapien
gtaaggttttatatcacaacgtattgatttata

SEQ ID NO: 141930 - DNA, 33 bp, Homo sapien
gtaaggttttatatcagaacgtattgatttata

SEQ ID NO: 141931 - DNA, 33 bp, Homo sapien
agaagcatcaaggaagcccatgtaactgaaatt

SEQ ID NO: 141932 - DNA, 33 bp, Homo sapien
agaagcatcaaggaagtccatgtaactgaaatt

SEQ ID NO: 141933 - DNA, 33 bp, Homo sapien
aagagctacaaaccaacacaaagaaaaatgtta

SEQ ID NO: 141934 - DNA, 33 bp, Homo sapien
aagagctacaaaccaatacaaagaaaaatgtta

SEQ ID NO: 141935 - DNA, 33 bp, Homo sapien
ttcagtctcaaagaggaccgaagaggcatggcc

SEQ ID NO: 141936 - DNA, 33 bp, Homo sapien
ttcagtctcaaagagggccgaagaggcatggcc

SEQ ID NO: 141937 - DNA, 33 bp, Homo sapien
ccacgcctcctgtaacggaaacagcactccttt

SEQ ID NO: 141938 - DNA, 33 bp, Homo sapien
ccacgcctcctgtaactgaaacagcactccttt

SEQ ID NO: 141939 - DNA, 33 bp, Homo sapien
tgtggttctaatgcacgaattaaatatctgtct

SEQ ID NO: 141940 - DNA, 33 bp, Homo sapien
tgtggttctaatgcactaattaaatatctgtct

SEQ ID NO: 141941 - DNA, 33 bp, Homo sapien
tcatcctctcagttgacgtgaagaaagccactg

SEQ ID NO: 141942 - DNA, 33 bp, Homo sapien
tcatcctctcagttgatgtgaagaaagccactg

SEQ ID NO: 141943 - DNA, 33 bp, Homo sapien
tcctgactacctgataacaacaggctctcccac

SEQ ID NO: 141944 - DNA, 33 bp, Homo sapien
tcctgactacctgatagcaacaggctctcccac

SEQ ID NO: 141945 - DNA, 33 bp, Homo sapien
tttttctgatcattaaagttgttgagtaaatat

SEQ ID NO: 141946 - DNA, 33 bp, Homo sapien
tttttctgatcattaacgttgttgagtaaatat

SEQ ID NO: 141947 - DNA, 33 bp, Homo sapien
ccaacctcattcattcaataactactcatcagg

SEQ ID NO: 141948 - DNA, 33 bp, Homo sapien
ccaacctcattcattcgataactactcatcagg

SEQ ID NO: 141949 - DNA, 33 bp, Homo sapien
gcaactgaggctgttacgactgttaaaggtggg

SEQ ID NO: 141950 - DNA, 33 bp, Homo sapien
gcaactgaggctgttatgactgttaaaggtggg

SEQ ID NO: 141951 - DNA, 33 bp, Homo sapien
ggcaccccctgctcccaattgctctgaggggaa

SEQ ID NO: 141952 - DNA, 33 bp, Homo sapien
ggcaccccctgctcccgattgctctgaggggaa

SEQ ID NO: 141953 - DNA, 33 bp, Homo sapien
gcttggactggaagataagccacttaggaaaat

SEQ ID NO: 141954 - DNA, 33 bp, Homo sapien
gcttggactggaagatgagccacttaggaaaat

SEQ ID NO: 141955 - DNA, 33 bp, Homo sapien
acttctctggacttcacatctttgcgaatttac

SEQ ID NO: 141956 - DNA, 33 bp, Homo sapien
acttctctggacttcatatctttgcgaatttac

SEQ ID NO: 141957 - DNA, 33 bp, Homo sapien
gatcgtctccaatcaacaactctcagaaagggc

SEQ ID NO: 141958 - DNA, 33 bp, Homo sapien
gatcgtctccaatcaagaactctcagaaagggc

SEQ ID NO: 141959 - DNA, 33 bp, Homo sapien
ttgaattctgaccctacctttgtctctcaccag

SEQ ID NO: 141960 - DNA, 33 bp, Homo sapien
ttgaattctgaccctagctttgtctctcaccag

SEQ ID NO: 141961 - DNA, 33 bp, Homo sapien
gtgtgaaaggagaagcgaattctggcagatgaa

SEQ ID NO: 141962 - DNA, 33 bp, Homo sapien
gtgtgaaaggagaagctaattctggcagatgaa

SEQ ID NO: 141963 - DNA, 33 bp, Homo sapien
ggtcctgggttttaaactcctggttcacttgtc

SEQ ID NO: 141964 - DNA, 33 bp, Homo sapien
ggtcctgggttttaaattcctggttcacttgtc

SEQ ID NO: 141965 - DNA, 33 bp, Homo sapien
aagctaattctgactccgacctttcatcgaagt

SEQ ID NO: 141966 - DNA, 33 bp, Homo sapien
aagctaattctgactctgacctttcatcgaagt

SEQ ID NO: 141967 - DNA, 33 bp, Homo sapien
caacacatagaacttccagcttaacggagggtc

SEQ ID NO: 141968 - DNA, 33 bp, Homo sapien
caacacatagaacttctagcttaacggagggtc

SEQ ID NO: 141969 - DNA, 33 bp, Homo sapien
aagaataaattcagcaagagagtctgcggtgag

SEQ ID NO: 141970 - DNA, 33 bp, Homo sapien
aagaataaattcagcaggagagtctgcggtgag

SEQ ID NO: 141971 - DNA, 33 bp, Homo sapien
ttctttctgtaaaaaactcacgcctaatctgct

SEQ ID NO: 141972 - DNA, 33 bp, Homo sapien
ttctttctgtaaaaaattcacgcctaatctgct

SEQ ID NO: 141973 - DNA, 33 bp, Homo sapien
taagaggttatgacccaaaaatgaacacaaacc

SEQ ID NO: 141974 - DNA, 33 bp, Homo sapien
taagaggttatgaccccaaaatgaacacaaacc

SEQ ID NO: 141975 - DNA, 33 bp, Homo sapien
tgtctacagttcagtgaacaggcagtgatgggc

SEQ ID NO: 141976 - DNA, 33 bp, Homo sapien
tgtctacagttcagtggacaggcagtgatgggc

SEQ ID NO: 141977 - DNA, 33 bp, Homo sapien
gctgcatgcctcgtccactggtttggagaacag

SEQ ID NO: 141978 - DNA, 33 bp, Homo sapien
gctgcatgcctcgtccgctggtttggagaacag

SEQ ID NO: 141979 - DNA, 33 bp, Homo sapien
tctttgtctctccaataatcacaaagttaagct

SEQ ID NO: 141980 - DNA, 33 bp, Homo sapien
tctttgtctctccaatgatcacaaagttaagct

SEQ ID NO: 141981 - DNA, 33 bp, Homo sapien
agatgggtttggtgagaatgaaaacaacactta

SEQ ID NO: 141982 - DNA, 33 bp, Homo sapien
agatgggtttggtgaggatgaaaacaacactta

SEQ ID NO: 141983 - DNA, 33 bp, Homo sapien
tgggcttttctcaaaacgatggctgacagccgt

SEQ ID NO: 141984 - DNA, 33 bp, Homo sapien
tgggcttttctcaaaaggatggctgacagccgt

SEQ ID NO: 141985 - DNA, 33 bp, Homo sapien
tttactagctcaaaccgctgaagctcagaatga

SEQ ID NO: 141986 - DNA, 33 bp, Homo sapien
tttactagctcaaacctctgaagctcagaatga

SEQ ID NO: 141987 - DNA, 33 bp, Homo sapien
aaatttatgaatgacacgtattaggttgagcca

SEQ ID NO: 141988 - DNA, 33 bp, Homo sapien
aaatttatgaatgacaggtattaggttgagcca

SEQ ID NO: 141989 - DNA, 33 bp, Homo sapien
caataaacacaggaaaacagtcagcatagaaat

SEQ ID NO: 141990 - DNA, 33 bp, Homo sapien
caataaacacaggaaagcagtcagcatagaaat

SEQ ID NO: 141991 - DNA, 33 bp, Homo sapien
catcaggtagtcccaaattccaaattcagctgc

SEQ ID NO: 141992 - DNA, 33 bp, Homo sapien
catcaggtagtcccaagttccaaattcagctgc

SEQ ID NO: 141993 - DNA, 33 bp, Homo sapien
ccataagggaccataccgcacttcatcttctta

SEQ ID NO: 141994 - DNA, 33 bp, Homo sapien
ccataagggaccatacggcacttcatcttctta

SEQ ID NO: 141995 - DNA, 33 bp, Homo sapien
ttcttgcttcaggaataacaaaccagtaactgc

SEQ ID NO: 141996 - DNA, 33 bp, Homo sapien
ttcttgcttcaggaatcacaaaccagtaactgc

SEQ ID NO: 141997 - DNA, 33 bp, Homo sapien
gagtttttttaccttgaaggcatattatgaata

SEQ ID NO: 141998 - DNA, 33 bp, Homo sapien
gagtttttttaccttgcaggcatattatgaata

SEQ ID NO: 141999 - DNA, 33 bp, Homo sapien
atatgaattatagatcaagggcacttccaagct

SEQ ID NO: 142000 - DNA, 33 bp, Homo sapien
atatgaattatagatccagggcacttccaagct

SEQ ID NO: 142001 - DNA, 33 bp, Homo sapien
ataaatgtggtatcaccgggcagactagcctga

SEQ ID NO: 142002 - DNA, 33 bp, Homo sapien
ataaatgtggtatcactgggcagactagcctga

SEQ ID NO: 142003 - DNA, 33 bp, Homo sapien
ctcagggatgggaaaactgctgtggaaagatgt

SEQ ID NO: 142004 - DNA, 33 bp, Homo sapien
ctcagggatgggaaaagtgctgtggaaagatgt

SEQ ID NO: 142005 - DNA, 33 bp, Homo sapien
gctctgagaaaaaagacgattcaagccatatgc

SEQ ID NO: 142006 - DNA, 33 bp, Homo sapien
gctctgagaaaaaagatgattcaagccatatgc

SEQ ID NO: 142007 - DNA, 33 bp, Homo sapien
gaatatttccataataaaaggcttaacctcagg

SEQ ID NO: 142008 - DNA, 33 bp, Homo sapien
gaatatttccataatacaaggcttaacctcagg

SEQ ID NO: 142009 - DNA, 33 bp, Homo sapien
agccccaacaacatcacctgggaattcaggctt

SEQ ID NO: 142010 - DNA, 33 bp, Homo sapien
agccccaacaacatcatctgggaattcaggctt

SEQ ID NO: 142011 - DNA, 33 bp, Homo sapien
ttgtgaaagacatgaccaagaggtgtgctagac

SEQ ID NO: 142012 - DNA, 33 bp, Homo sapien
ttgtgaaagacatgactaagaggtgtgctagac

SEQ ID NO: 142013 - DNA, 33 bp, Homo sapien
gactacagtgtgaaaaatgcctatgagtatgat

SEQ ID NO: 142014 - DNA, 33 bp, Homo sapien
gactacagtgtgaaaagtgcctatgagtatgat

SEQ ID NO: 142015 - DNA, 33 bp, Homo sapien
cccacatacagtgctcaataaagttttaaacct

SEQ ID NO: 142016 - DNA, 33 bp, Homo sapien
cccacatacagtgctcgataaagttttaaacct

SEQ ID NO: 142017 - DNA, 33 bp, Homo sapien
atccgagacaggaacccggtcccctggctcagg

SEQ ID NO: 142018 - DNA, 33 bp, Homo sapien
atccgagacaggaacctggtcccctggctcagg

SEQ ID NO: 142019 - DNA, 33 bp, Homo sapien
gccttcaaagaacctacaagcctcatattacag

SEQ ID NO: 142020 - DNA, 33 bp, Homo sapien
gccttcaaagaacctataagcctcatattacag

SEQ ID NO: 142021 - DNA, 33 bp, Homo sapien
tttcccacattgaagaagtggagcctgtttcct

SEQ ID NO: 142022 - DNA, 33 bp, Homo sapien
tttcccacattgaagaggtggagcctgtttcct

SEQ ID NO: 142023 - DNA, 33 bp, Homo sapien
caggttcccaaagacacagctgacaagcctcac

SEQ ID NO: 142024 - DNA, 33 bp, Homo sapien
caggttcccaaagacatagctgacaagcctcac

SEQ ID NO: 142025 - DNA, 33 bp, Homo sapien
agagctggacagaacaacaccaacagggaggca

SEQ ID NO: 142026 - DNA, 33 bp, Homo sapien
agagctggacagaacaccaccaacagggaggca

SEQ ID NO: 142027 - DNA, 33 bp, Homo sapien
agggcaagatctggaaatgaaccttcaaaggaa

SEQ ID NO: 142028 - DNA, 33 bp, Homo sapien
agggcaagatctggaactgaaccttcaaaggaa

SEQ ID NO: 142029 - DNA, 33 bp, Homo sapien
agtggtgtgctggcaaatgtcttaaacccagct

SEQ ID NO: 142030 - DNA, 33 bp, Homo sapien
agtggtgtgctggcaagtgtcttaaacccagct

SEQ ID NO: 142031 - DNA, 33 bp, Homo sapien
gcctccactttaaatgccaggaaaccacaaggc

SEQ ID NO: 142032 - DNA, 33 bp, Homo sapien
gcctccactttaaatgtcaggaaaccacaaggc

SEQ ID NO: 142033 - DNA, 33 bp, Homo sapien
ttctaggtcttggagacagagcttacaaataac

SEQ ID NO: 142034 - DNA, 33 bp, Homo sapien
ttctaggtcttggagatagagcttacaaataac

SEQ ID NO: 142035 - DNA, 33 bp, Homo sapien
agacacagaggagcgaatacctgggcctactga

SEQ ID NO: 142036 - DNA, 33 bp, Homo sapien
agacacagaggagcgagtacctgggcctactga

SEQ ID NO: 142037 - DNA, 33 bp, Homo sapien
aatgctgtggacgccgaccaaacagcttagcaa

SEQ ID NO: 142038 - DNA, 33 bp, Homo sapien
aatgctgtggacgccggccaaacagcttagcaa

SEQ ID NO: 142039 - DNA, 33 bp, Homo sapien
ctttccattgccctggaatctatcttgcccaga

SEQ ID NO: 142040 - DNA, 33 bp, Homo sapien
ctttccattgccctgggatctatcttgcccaga

SEQ ID NO: 142041 - DNA, 33 bp, Homo sapien
aaatcagactaatacggcctgagaggaaattta

SEQ ID NO: 142042 - DNA, 33 bp, Homo sapien
aaatcagactaatacgtcctgagaggaaattta

SEQ ID NO: 142043 - DNA, 33 bp, Homo sapien
catctcagctgcttcccacataggcatatcctg

SEQ ID NO: 142044 - DNA, 33 bp, Homo sapien
catctcagctgcttcctacataggcatatcctg

SEQ ID NO: 142045 - DNA, 33 bp, Homo sapien
tgtgtgacagtctcatgataaactaagaattca

SEQ ID NO: 142046 - DNA, 33 bp, Homo sapien
tgtgtgacagtctcattataaactaagaattca

SEQ ID NO: 142047 - DNA, 33 bp, Homo sapien
aagctgagactcgtgcacttcatctgcctgcag

SEQ ID NO: 142048 - DNA, 33 bp, Homo sapien
aagctgagactcgtgcgcttcatctgcctgcag

SEQ ID NO: 142049 - DNA, 33 bp, Homo sapien
ttttatgtccttataacgtatatcactggtttt

SEQ ID NO: 142050 - DNA, 33 bp, Homo sapien
ttttatgtccttataatgtatatcactggtttt

SEQ ID NO: 142051 - DNA, 33 bp, Homo sapien
tgcagctagggcttcaccgtatagatgggaagt

SEQ ID NO: 142052 - DNA, 33 bp, Homo sapien
tgcagctagggcttcatcgtatagatgggaagt

SEQ ID NO: 142053 - DNA, 33 bp, Homo sapien
gagagaaaggcaagtgcatcaaaggcgacccag

SEQ ID NO: 142054 - DNA, 33 bp, Homo sapien
gagagaaaggcaagtgtatcaaaggcgacccag

SEQ ID NO: 142055 - DNA, 33 bp, Homo sapien
gacagataaggcaaaaggttctgacctaagtaa

SEQ ID NO: 142056 - DNA, 33 bp, Homo sapien
gacagataaggcaaaatgttctgacctaagtaa

SEQ ID NO: 142057 - DNA, 33 bp, Homo sapien
gatctttggaagcctacgtagaactaataggct

SEQ ID NO: 142058 - DNA, 33 bp, Homo sapien
gatctttggaagcctatgtagaactaataggct

SEQ ID NO: 142059 - DNA, 33 bp, Homo sapien
gtgtaatcaacatcacaatcaagatatagaaca

SEQ ID NO: 142060 - DNA, 33 bp, Homo sapien
gtgtaatcaacatcacgatcaagatatagaaca

SEQ ID NO: 142061 - DNA, 33 bp, Homo sapien
aggaatctacccagcaatgcaaacaatgagcca

SEQ ID NO: 142062 - DNA, 33 bp, Homo sapien
aggaatctacccagcattgcaaacaatgagcca

SEQ ID NO: 142063 - DNA, 33 bp, Homo sapien
taatcgcagactttgaaagggtaagaatgtcct

SEQ ID NO: 142064 - DNA, 33 bp, Homo sapien
taatcgcagactttgagagggtaagaatgtcct

SEQ ID NO: 142065 - DNA, 33 bp, Homo sapien
aacccaacgcagtctcactgggctaacatcatg

SEQ ID NO: 142066 - DNA, 33 bp, Homo sapien
aacccaacgcagtctctctgggctaacatcatg

SEQ ID NO: 142067 - DNA, 33 bp, Homo sapien
tatggaaaagttgagacaatagtacaaaaacag

SEQ ID NO: 142068 - DNA, 33 bp, Homo sapien
tatggaaaagttgagagaatagtacaaaaacag

SEQ ID NO: 142069 - DNA, 33 bp, Homo sapien
caagccatacaaactcgctggacctcagtgtgt

SEQ ID NO: 142070 - DNA, 33 bp, Homo sapien
caagccatacaaactctctggacctcagtgtgt

SEQ ID NO: 142071 - DNA, 33 bp, Homo sapien
gtatgtgatgtaggtgccaccagtagcggtaga

SEQ ID NO: 142072 - DNA, 33 bp, Homo sapien
gtatgtgatgtaggtgtcaccagtagcggtaga

SEQ ID NO: 142073 - DNA, 33 bp, Homo sapien
actggatgaattctaaaacttcactactgtcca

SEQ ID NO: 142074 - DNA, 33 bp, Homo sapien
actggatgaattctaacacttcactactgtcca

SEQ ID NO: 142075 - DNA, 33 bp, Homo sapien
tgtctggagctagagacaccagttaggataagg

SEQ ID NO: 142076 - DNA, 33 bp, Homo sapien
tgtctggagctagagataccagttaggataagg

SEQ ID NO: 142077 - DNA, 33 bp, Homo sapien
gagcagccgcagtgaggagagcttcctatccca

SEQ ID NO: 142078 - DNA, 33 bp, Homo sapien
gagcagccgcagtgagtagagcttcctatccca

SEQ ID NO: 142079 - DNA, 33 bp, Homo sapien
atctggatatagagaaatgtcattccacctcca

SEQ ID NO: 142080 - DNA, 33 bp, Homo sapien
atctggatatagagaactgtcattccacctcca

SEQ ID NO: 142081 - DNA, 33 bp, Homo sapien
agccaattttacagccagagtttccgaaaagtc

SEQ ID NO: 142082 - DNA, 33 bp, Homo sapien
agccaattttacagccggagtttccgaaaagtc

SEQ ID NO: 142083 - DNA, 33 bp, Homo sapien
tgggaatgctgcttaacctctttgaatctcagt

SEQ ID NO: 142084 - DNA, 33 bp, Homo sapien
tgggaatgctgcttaatctctttgaatctcagt

SEQ ID NO: 142085 - DNA, 33 bp, Homo sapien
ttcgtgacagagtcaacgtgaatcactaaatgc

SEQ ID NO: 142086 - DNA, 33 bp, Homo sapien
ttcgtgacagagtcaatgtgaatcactaaatgc

SEQ ID NO: 142087 - DNA, 33 bp, Homo sapien
gctagcaatatcatcaacccttggccccctcat

SEQ ID NO: 142088 - DNA, 33 bp, Homo sapien
gctagcaatatcatcatcccttggccccctcat

SEQ ID NO: 142089 - DNA, 33 bp, Homo sapien
ccctgggcaacttactcaacatccctgaggcta

SEQ ID NO: 142090 - DNA, 33 bp, Homo sapien
ccctgggcaacttacttaacatccctgaggcta

SEQ ID NO: 142091 - DNA, 33 bp, Homo sapien
tgcttggcttactttacctagtggcttgaggcc

SEQ ID NO: 142092 - DNA, 33 bp, Homo sapien
tgcttggcttactttatctagtggcttgaggcc

SEQ ID NO: 142093 - DNA, 33 bp, Homo sapien
tcttttctctctccaacgagactgggcctggag

SEQ ID NO: 142094 - DNA, 33 bp, Homo sapien
tcttttctctctccaatgagactgggcctggag

SEQ ID NO: 142095 - DNA, 33 bp, Homo sapien
ctagcggaacatttcaagtgacacccgtgcctg

SEQ ID NO: 142096 - DNA, 33 bp, Homo sapien
ctagcggaacatttcaggtgacacccgtgcctg

SEQ ID NO: 142097 - DNA, 33 bp, Homo sapien
tgcttgtgaggagaagccaattaatggtaagga

SEQ ID NO: 142098 - DNA, 33 bp, Homo sapien
tgcttgtgaggagaagtcaattaatggtaagga

SEQ ID NO: 142099 - DNA, 33 bp, Homo sapien
cagagtaccgcaaaccaagcggctctaacacag

SEQ ID NO: 142100 - DNA, 33 bp, Homo sapien
cagagtaccgcaaaccgagcggctctaacacag

SEQ ID NO: 142101 - DNA, 33 bp, Homo sapien
agaagagctcactccacccattccccgagctcc

SEQ ID NO: 142102 - DNA, 33 bp, Homo sapien
agaagagctcactccatccattccccgagctcc

SEQ ID NO: 142103 - DNA, 33 bp, Homo sapien
atagggccttacactgaagacttctgctctgcg

SEQ ID NO: 142104 - DNA, 33 bp, Homo sapien
atagggccttacactggagacttctgctctgcg

SEQ ID NO: 142105 - DNA, 33 bp, Homo sapien
cacctttttgtttttcacatgagacatgcaggt

SEQ ID NO: 142106 - DNA, 33 bp, Homo sapien
cacctttttgtttttcccatgagacatgcaggt

SEQ ID NO: 142107 - DNA, 33 bp, Homo sapien
ctgagtattcacaagtcaatttgaaatggtaga

SEQ ID NO: 142108 - DNA, 33 bp, Homo sapien
ctgagtattcacaagttaatttgaaatggtaga

SEQ ID NO: 142109 - DNA, 33 bp, Homo sapien
aaagatttctacccagaccaacagttcaccaga

SEQ ID NO: 142110 - DNA, 33 bp, Homo sapien
aaagatttctacccagtccaacagttcaccaga

SEQ ID NO: 142111 - DNA, 33 bp, Homo sapien
tgcctttttaagtcaccctgcaactattccggc

SEQ ID NO: 142112 - DNA, 33 bp, Homo sapien
tgcctttttaagtcacgctgcaactattccggc

SEQ ID NO: 142113 - DNA, 33 bp, Homo sapien
gtaaaagggtgacaaccgggacatgaacctggc

SEQ ID NO: 142114 - DNA, 33 bp, Homo sapien
gtaaaagggtgacaactgggacatgaacctggc

SEQ ID NO: 142115 - DNA, 33 bp, Homo sapien
tgggaaaaagaggtccaagtcatatttagggct

SEQ ID NO: 142116 - DNA, 33 bp, Homo sapien
tgggaaaaagaggtccgagtcatatttagggct

SEQ ID NO: 142117 - DNA, 33 bp, Homo sapien
ttgattgggtgacccaagatggtcagtttccta

SEQ ID NO: 142118 - DNA, 33 bp, Homo sapien
ttgattgggtgacccacgatggtcagtttccta

SEQ ID NO: 142119 - DNA, 33 bp, Homo sapien
ttaatagtaaccaaaccctctgctctaacaacc

SEQ ID NO: 142120 - DNA, 33 bp, Homo sapien
ttaatagtaaccaaactctctgctctaacaacc

SEQ ID NO: 142121 - DNA, 33 bp, Homo sapien
tctgtcttcactctgactcaatcaccaggggat

SEQ ID NO: 142122 - DNA, 33 bp, Homo sapien
tctgtcttcactctgattcaatcaccaggggat

SEQ ID NO: 142123 - DNA, 33 bp, Homo sapien
agaggtgcatttctacgaagaccggggtgcaga

SEQ ID NO: 142124 - DNA, 33 bp, Homo sapien
agaggtgcatttctactaagaccggggtgcaga

SEQ ID NO: 142125 - DNA, 33 bp, Homo sapien
gtgaaatcagttatcaaataacaaacaagtgct

SEQ ID NO: 142126 - DNA, 33 bp, Homo sapien
gtgaaatcagttatcagataacaaacaagtgct

SEQ ID NO: 142127 - DNA, 33 bp, Homo sapien
gttggagttaggactcacctttaacgttgatag

SEQ ID NO: 142128 - DNA, 33 bp, Homo sapien
gttggagttaggactcgcctttaacgttgatag

SEQ ID NO: 142129 - DNA, 33 bp, Homo sapien
caacagttacagtctcaaagtgactttctccac

SEQ ID NO: 142130 - DNA, 33 bp, Homo sapien
caacagttacagtctcgaagtgactttctccac

SEQ ID NO: 142131 - DNA, 33 bp, Homo sapien
ggtgccagataccacaactctgggaaaggcctc

SEQ ID NO: 142132 - DNA, 33 bp, Homo sapien
ggtgccagataccacatctctgggaaaggcctc

SEQ ID NO: 142133 - DNA, 33 bp, Homo sapien
tgggacatttctttgcactgagctgatgaagcc

SEQ ID NO: 142134 - DNA, 33 bp, Homo sapien
tgggacatttctttgcgctgagctgatgaagcc

SEQ ID NO: 142135 - DNA, 33 bp, Homo sapien
ttaccaggcactgtgcaaggctcaggggataaa

SEQ ID NO: 142136 - DNA, 33 bp, Homo sapien
ttaccaggcactgtgcgaggctcaggggataaa

SEQ ID NO: 142137 - DNA, 33 bp, Homo sapien
tgttgagactatgctaaaaacaacactaataga

SEQ ID NO: 142138 - DNA, 33 bp, Homo sapien
tgttgagactatgctagaaacaacactaataga

SEQ ID NO: 142139 - DNA, 33 bp, Homo sapien
aatgcttttcactggaaccccatgacatgcaag

SEQ ID NO: 142140 - DNA, 33 bp, Homo sapien
aatgcttttcactggagccccatgacatgcaag

SEQ ID NO: 142141 - DNA, 33 bp, Homo sapien
cctacaccagtcagaacgcctgttgttcaaaag

SEQ ID NO: 142142 - DNA, 33 bp, Homo sapien
cctacaccagtcagaatgcctgttgttcaaaag

SEQ ID NO: 142143 - DNA, 33 bp, Homo sapien
gaacgtattgctgtccaacactttgctttactg

SEQ ID NO: 142144 - DNA, 33 bp, Homo sapien
gaacgtattgctgtccgacactttgctttactg

SEQ ID NO: 142145 - DNA, 33 bp, Homo sapien
gaaatcagtaactagacgggaaaaatgcaattt

SEQ ID NO: 142146 - DNA, 33 bp, Homo sapien
gaaatcagtaactagatgggaaaaatgcaattt

SEQ ID NO: 142147 - DNA, 33 bp, Homo sapien
gatgaacctgctcagcaaacatgagacacaggg

SEQ ID NO: 142148 - DNA, 33 bp, Homo sapien
gatgaacctgctcagcgaacatgagacacaggg

SEQ ID NO: 142149 - DNA, 33 bp, Homo sapien
acacaaccggcacaacagagtgggctgtcaacc

SEQ ID NO: 142150 - DNA, 33 bp, Homo sapien
acacaaccggcacaacggagtgggctgtcaacc

SEQ ID NO: 142151 - DNA, 33 bp, Homo sapien
tttttgctccaaaggagaagtggcacattttaa

SEQ ID NO: 142152 - DNA, 33 bp, Homo sapien
tttttgctccaaaggataagtggcacattttaa

SEQ ID NO: 142153 - DNA, 33 bp, Homo sapien
cccaaagaaggaaaaacagactcacacccttct

SEQ ID NO: 142154 - DNA, 33 bp, Homo sapien
cccaaagaaggaaaaatagactcacacccttct

SEQ ID NO: 142155 - DNA, 33 bp, Homo sapien
tatcttagctgtaagacctattctgttcttggg

SEQ ID NO: 142156 - DNA, 33 bp, Homo sapien
tatcttagctgtaagagctattctgttcttggg

SEQ ID NO: 142157 - DNA, 33 bp, Homo sapien
ctatattttagacaagcatattgcaagctcaaa

SEQ ID NO: 142158 - DNA, 33 bp, Homo sapien
ctatattttagacaagtatattgcaagctcaaa

SEQ ID NO: 142159 - DNA, 33 bp, Homo sapien
tgatgaccaggaaagacaataagaggtatggga

SEQ ID NO: 142160 - DNA, 33 bp, Homo sapien
tgatgaccaggaaagataataagaggtatggga

SEQ ID NO: 142161 - DNA, 33 bp, Homo sapien
agacaagtgagagtgtaaagaatgcacaggctg

SEQ ID NO: 142162 - DNA, 33 bp, Homo sapien
agacaagtgagagtgtgaagaatgcacaggctg

SEQ ID NO: 142163 - DNA, 33 bp, Homo sapien
tcaacccaccataaaagttgcaacagatttgtt

SEQ ID NO: 142164 - DNA, 33 bp, Homo sapien
tcaacccaccataaaatttgcaacagatttgtt

SEQ ID NO: 142165 - DNA, 33 bp, Homo sapien
gcctggtggctcatcacgaactaggcaatgaat

SEQ ID NO: 142166 - DNA, 33 bp, Homo sapien
gcctggtggctcatcatgaactaggcaatgaat

SEQ ID NO: 142167 - DNA, 33 bp, Homo sapien
catctcagagttgggaaaacagagtcttgaaga

SEQ ID NO: 142168 - DNA, 33 bp, Homo sapien
catctcagagttgggacaacagagtcttgaaga

SEQ ID NO: 142169 - DNA, 33 bp, Homo sapien
cacatcaagacaaacccggcttgttcattccat

SEQ ID NO: 142170 - DNA, 33 bp, Homo sapien
cacatcaagacaaaccgggcttgttcattccat

SEQ ID NO: 142171 - DNA, 33 bp, Homo sapien
atgtgtgtgtagtcacaatattcactcatttat

SEQ ID NO: 142172 - DNA, 33 bp, Homo sapien
atgtgtgtgtagtcacgatattcactcatttat

SEQ ID NO: 142173 - DNA, 33 bp, Homo sapien
tcacatatcgacccaaacactgaaaacacagct

SEQ ID NO: 142174 - DNA, 33 bp, Homo sapien
tcacatatcgacccaagcactgaaaacacagct

SEQ ID NO: 142175 - DNA, 33 bp, Homo sapien
ctttcttgtgtggacaaaatgccagttgcactc

SEQ ID NO: 142176 - DNA, 33 bp, Homo sapien
ctttcttgtgtggacagaatgccagttgcactc

SEQ ID NO: 142177 - DNA, 33 bp, Homo sapien
agaagcaaaggtaaatcaatgtttcgtgagaaa

SEQ ID NO: 142178 - DNA, 33 bp, Homo sapien
agaagcaaaggtaaatgaatgtttcgtgagaaa

SEQ ID NO: 142179 - DNA, 33 bp, Homo sapien
gtatctgccaatgacaaataaacgtgttctccc

SEQ ID NO: 142180 - DNA, 33 bp, Homo sapien
gtatctgccaatgacagataaacgtgttctccc

SEQ ID NO: 142181 - DNA, 33 bp, Homo sapien
gggactttagtagcccaattgttcactgtgctt

SEQ ID NO: 142182 - DNA, 33 bp, Homo sapien
gggactttagtagcccgattgttcactgtgctt

SEQ ID NO: 142183 - DNA, 33 bp, Homo sapien
gatatacaaatgtgtacgtaactgtttgcactg

SEQ ID NO: 142184 - DNA, 33 bp, Homo sapien
gatatacaaatgtgtatgtaactgtttgcactg

SEQ ID NO: 142185 - DNA, 33 bp, Homo sapien
gataaaaggatacatccatcaagaatggctaaa

SEQ ID NO: 142186 - DNA, 33 bp, Homo sapien
gataaaaggatacatctatcaagaatggctaaa

SEQ ID NO: 142187 - DNA, 33 bp, Homo sapien
ggtccacttaccataaatagggtttcctggtac

SEQ ID NO: 142188 - DNA, 33 bp, Homo sapien
ggtccacttaccataattagggtttcctggtac

SEQ ID NO: 142189 - DNA, 33 bp, Homo sapien
gggagatttgctgcagacaacctgtagtgctgg

SEQ ID NO: 142190 - DNA, 33 bp, Homo sapien
gggagatttgctgcagtcaacctgtagtgctgg

SEQ ID NO: 142191 - DNA, 33 bp, Homo sapien
ccgcctttgtgcaagaaaaacaaacacaagaca

SEQ ID NO: 142192 - DNA, 33 bp, Homo sapien
ccgcctttgtgcaagagaaacaaacacaagaca

SEQ ID NO: 142193 - DNA, 33 bp, Homo sapien
gtccttgtctccataaacatcacacagcagtct

SEQ ID NO: 142194 - DNA, 33 bp, Homo sapien
gtccttgtctccataagcatcacacagcagtct

SEQ ID NO: 142195 - DNA, 33 bp, Homo sapien
gcaactgggaaccagaacactactaaaagtgac

SEQ ID NO: 142196 - DNA, 33 bp, Homo sapien
gcaactgggaaccagatcactactaaaagtgac

SEQ ID NO: 142197 - DNA, 33 bp, Homo sapien
ggcatgagctctcagacggggaaatctctgaaa

SEQ ID NO: 142198 - DNA, 33 bp, Homo sapien
ggcatgagctctcagatggggaaatctctgaaa

SEQ ID NO: 142199 - DNA, 33 bp, Homo sapien
ccctgcattgctgaaacttaacataaaatgcag

SEQ ID NO: 142200 - DNA, 33 bp, Homo sapien
ccctgcattgctgaaatttaacataaaatgcag

SEQ ID NO: 142201 - DNA, 33 bp, Homo sapien
tctgtcaatgggctaaatggacctaacttacta

SEQ ID NO: 142202 - DNA, 33 bp, Homo sapien
tctgtcaatgggctaagtggacctaacttacta

SEQ ID NO: 142203 - DNA, 33 bp, Homo sapien
ccagctgttggacctacaccacttctatctgtt

SEQ ID NO: 142204 - DNA, 33 bp, Homo sapien
ccagctgttggacctataccacttctatctgtt

SEQ ID NO: 142205 - DNA, 33 bp, Homo sapien
gtatttgacctttacacgggctatagtttgtca

SEQ ID NO: 142206 - DNA, 33 bp, Homo sapien
gtatttgacctttacatgggctatagtttgtca

SEQ ID NO: 142207 - DNA, 33 bp, Homo sapien
tttcagaatccaacctgaaaggcaggaagtcag

SEQ ID NO: 142208 - DNA, 33 bp, Homo sapien
tttcagaatccaaccttaaaggcaggaagtcag

SEQ ID NO: 142209 - DNA, 33 bp, Homo sapien
aagggagatttgggaacgttatgaatattttgg

SEQ ID NO: 142210 - DNA, 33 bp, Homo sapien
aagggagatttgggaatgttatgaatattttgg

SEQ ID NO: 142211 - DNA, 33 bp, Homo sapien
tagcaagaaaaacgtcaaatgaattctgaagcc

SEQ ID NO: 142212 - DNA, 33 bp, Homo sapien
tagcaagaaaaacgtccaatgaattctgaagcc

SEQ ID NO: 142213 - DNA, 33 bp, Homo sapien
tctattattatgtgtacaaaatagcaagaaaaa

SEQ ID NO: 142214 - DNA, 33 bp, Homo sapien
tctattattatgtgtagaaaatagcaagaaaaa

SEQ ID NO: 142215 - DNA, 33 bp, Homo sapien
ttaggtagaaaggtgccattaaaatctgaggct

SEQ ID NO: 142216 - DNA, 33 bp, Homo sapien
ttaggtagaaaggtgctattaaaatctgaggct

SEQ ID NO: 142217 - DNA, 33 bp, Homo sapien
ccacagttctgtctgacgtagccacaatgaccc

SEQ ID NO: 142218 - DNA, 33 bp, Homo sapien
ccacagttctgtctgatgtagccacaatgaccc

SEQ ID NO: 142219 - DNA, 33 bp, Homo sapien
tttattataaagtctacggtaaaggacacagat

SEQ ID NO: 142220 - DNA, 33 bp, Homo sapien
tttattataaagtctatggtaaaggacacagat

SEQ ID NO: 142221 - DNA, 33 bp, Homo sapien
atagttgaagaggcaaagaatcaaatattaata

SEQ ID NO: 142222 - DNA, 33 bp, Homo sapien
atagttgaagaggcaaggaatcaaatattaata

SEQ ID NO: 142223 - DNA, 33 bp, Homo sapien
tccagcagcatatgccaacaaggactgcaaaca

SEQ ID NO: 142224 - DNA, 33 bp, Homo sapien
tccagcagcatatgcccacaaggactgcaaaca

SEQ ID NO: 142225 - DNA, 33 bp, Homo sapien
tctggagcaaggtgacaggtggcccttaggatc

SEQ ID NO: 142226 - DNA, 33 bp, Homo sapien
tctggagcaaggtgaccggtggcccttaggatc

SEQ ID NO: 142227 - DNA, 33 bp, Homo sapien
caccccagcagactagaaccaaactggaaccca

SEQ ID NO: 142228 - DNA, 33 bp, Homo sapien
caccccagcagactaggaccaaactggaaccca

SEQ ID NO: 142229 - DNA, 33 bp, Homo sapien
aactcttactgtgtcccaggaattgtgctgagt

SEQ ID NO: 142230 - DNA, 33 bp, Homo sapien
aactcttactgtgtcctaggaattgtgctgagt

SEQ ID NO: 142231 - DNA, 33 bp, Homo sapien
ttgatcaaagctgaaggattagggcaagtcact

SEQ ID NO: 142232 - DNA, 33 bp, Homo sapien
ttgatcaaagctgaagtattagggcaagtcact

SEQ ID NO: 142233 - DNA, 33 bp, Homo sapien
ctgcacccagaagataaaatttttcagcacatg

SEQ ID NO: 142234 - DNA, 33 bp, Homo sapien
ctgcacccagaagatataatttttcagcacatg

SEQ ID NO: 142235 - DNA, 33 bp, Homo sapien
ctgacttttagacaacactaaaggtaggtgtaa

SEQ ID NO: 142236 - DNA, 33 bp, Homo sapien
ctgacttttagacaacgctaaaggtaggtgtaa

SEQ ID NO: 142237 - DNA, 33 bp, Homo sapien
cactgcacccatggaaaaatgctgagccttcca

SEQ ID NO: 142238 - DNA, 33 bp, Homo sapien
cactgcacccatggaacaatgctgagccttcca

SEQ ID NO: 142239 - DNA, 33 bp, Homo sapien
ctagggtatcaaggagccagtttgagaaaggct

SEQ ID NO: 142240 - DNA, 33 bp, Homo sapien
ctagggtatcaaggagtcagtttgagaaaggct

SEQ ID NO: 142241 - DNA, 33 bp, Homo sapien
agtgaactcactacctcacttcctgtgagtcac

SEQ ID NO: 142242 - DNA, 33 bp, Homo sapien
agtgaactcactaccttacttcctgtgagtcac

SEQ ID NO: 142243 - DNA, 33 bp, Homo sapien
ccccaaagacaacctacatgagtgaagagccaa

SEQ ID NO: 142244 - DNA, 33 bp, Homo sapien
ccccaaagacaacctagatgagtgaagagccaa

SEQ ID NO: 142245 - DNA, 33 bp, Homo sapien
cacatgaacacacagaaagaatcagccatcagc

SEQ ID NO: 142246 - DNA, 33 bp, Homo sapien
cacatgaacacacagagagaatcagccatcagc

SEQ ID NO: 142247 - DNA, 33 bp, Homo sapien
cagcgcctctacctacaaggtcacccccaaggc

SEQ ID NO: 142248 - DNA, 33 bp, Homo sapien
cagcgcctctacctacgaggtcacccccaaggc

SEQ ID NO: 142249 - DNA, 33 bp, Homo sapien
gcatttctgtacatcaatatcatccaagttgag

SEQ ID NO: 142250 - DNA, 33 bp, Homo sapien
gcatttctgtacatcagtatcatccaagttgag

SEQ ID NO: 142251 - DNA, 33 bp, Homo sapien
gcatctgtagtaagaacaaattttgcagaacaa

SEQ ID NO: 142252 - DNA, 33 bp, Homo sapien
gcatctgtagtaagaataaattttgcagaacaa

SEQ ID NO: 142253 - DNA, 33 bp, Homo sapien
actacagatgctagcacatggtgggtgtgagcc

SEQ ID NO: 142254 - DNA, 33 bp, Homo sapien
actacagatgctagcatatggtgggtgtgagcc

SEQ ID NO: 142255 - DNA, 33 bp, Homo sapien
gtcattcccagtttataagcgtgggcttcacgg

SEQ ID NO: 142256 - DNA, 33 bp, Homo sapien
gtcattcccagtttattagcgtgggcttcacgg

SEQ ID NO: 142257 - DNA, 33 bp, Homo sapien
gcgatttgctttatccaacaacagaggaggaga

SEQ ID NO: 142258 - DNA, 33 bp, Homo sapien
gcgatttgctttatccgacaacagaggaggaga

SEQ ID NO: 142259 - DNA, 33 bp, Homo sapien
gagggtccaagctcccaccgtggcttccacact

SEQ ID NO: 142260 - DNA, 33 bp, Homo sapien
gagggtccaagctcccgccgtggcttccacact

SEQ ID NO: 142261 - DNA, 33 bp, Homo sapien
ggagcaggaccaagagcaagggggaagtgccac

SEQ ID NO: 142262 - DNA, 33 bp, Homo sapien
ggagcaggaccaagaggaagggggaagtgccac

SEQ ID NO: 142263 - DNA, 33 bp, Homo sapien
ggtgagcagcacgaggcagatcctccagggacc

SEQ ID NO: 142264 - DNA, 33 bp, Homo sapien
ggtgagcagcacgaggtagatcctccagggacc

SEQ ID NO: 142265 - DNA, 33 bp, Homo sapien
aagcaatagtatggtacgaccagttcaaaggaa

SEQ ID NO: 142266 - DNA, 33 bp, Homo sapien
aagcaatagtatggtatgaccagttcaaaggaa

SEQ ID NO: 142267 - DNA, 33 bp, Homo sapien
ctcagatgccctgccaaatgctaaaattaccta

SEQ ID NO: 142268 - DNA, 33 bp, Homo sapien
ctcagatgccctgccagatgctaaaattaccta

SEQ ID NO: 142269 - DNA, 33 bp, Homo sapien
cacccacagggaactaagacgactaattatggt

SEQ ID NO: 142270 - DNA, 33 bp, Homo sapien
cacccacagggaactaggacgactaattatggt

SEQ ID NO: 142271 - DNA, 33 bp, Homo sapien
gtatttcttgcattcacgtgtatttcattctta

SEQ ID NO: 142272 - DNA, 33 bp, Homo sapien
gtatttcttgcattcatgtgtatttcattctta

SEQ ID NO: 142273 - DNA, 33 bp, Homo sapien
tttttcataaacccacccattaacagccatgag

SEQ ID NO: 142274 - DNA, 33 bp, Homo sapien
tttttcataaacccactcattaacagccatgag

SEQ ID NO: 142275 - DNA, 33 bp, Homo sapien
aatctcaattgctaaacacagtaaagttttaag

SEQ ID NO: 142276 - DNA, 33 bp, Homo sapien
aatctcaattgctaaatacagtaaagttttaag

SEQ ID NO: 142277 - DNA, 33 bp, Homo sapien
caaaagccaacacactaagaacggctgaacaga

SEQ ID NO: 142278 - DNA, 33 bp, Homo sapien
caaaagccaacacactgagaacggctgaacaga

SEQ ID NO: 142279 - DNA, 33 bp, Homo sapien
agaagacagtcttagacgtgacattattagatc

SEQ ID NO: 142280 - DNA, 33 bp, Homo sapien
agaagacagtcttagatgtgacattattagatc

SEQ ID NO: 142281 - DNA, 33 bp, Homo sapien
atggccggatgagaaaatagagttgagtacagc

SEQ ID NO: 142282 - DNA, 33 bp, Homo sapien
atggccggatgagaaagtagagttgagtacagc

SEQ ID NO: 142283 - DNA, 33 bp, Homo sapien
ctgcttgagcatcctcacagtatggtgcctggc

SEQ ID NO: 142284 - DNA, 33 bp, Homo sapien
ctgcttgagcatcctctcagtatggtgcctggc

SEQ ID NO: 142285 - DNA, 33 bp, Homo sapien
agtccagctccgacaactgtttccaaaaacaca

SEQ ID NO: 142286 - DNA, 33 bp, Homo sapien
agtccagctccgacaattgtttccaaaaacaca

SEQ ID NO: 142287 - DNA, 33 bp, Homo sapien
atgggaatgtttataaccatccaggctctggaa

SEQ ID NO: 142288 - DNA, 33 bp, Homo sapien
atgggaatgtttataatcatccaggctctggaa

SEQ ID NO: 142289 - DNA, 33 bp, Homo sapien
agaggcagaagcgatgacaagccttgagcccag

SEQ ID NO: 142290 - DNA, 33 bp, Homo sapien
agaggcagaagcgatggcaagccttgagcccag

SEQ ID NO: 142291 - DNA, 33 bp, Homo sapien
ccatcacccatggtcaaagtctgtgcttccaaa

SEQ ID NO: 142292 - DNA, 33 bp, Homo sapien
ccatcacccatggtcagagtctgtgcttccaaa

SEQ ID NO: 142293 - DNA, 33 bp, Homo sapien
caaccacacaaccccactcagaggaaaagaggg

SEQ ID NO: 142294 - DNA, 33 bp, Homo sapien
caaccacacaaccccattcagaggaaaagaggg

SEQ ID NO: 142295 - DNA, 33 bp, Homo sapien
aaggcacttgactcagcagtgataaaaatgcga

SEQ ID NO: 142296 - DNA, 33 bp, Homo sapien
aaggcacttgactcagtagtgataaaaatgcga

SEQ ID NO: 142297 - DNA, 33 bp, Homo sapien
ccagctttctgtgtaacccatgtagacagacaa

SEQ ID NO: 142298 - DNA, 33 bp, Homo sapien
ccagctttctgtgtaatccatgtagacagacaa

SEQ ID NO: 142299 - DNA, 33 bp, Homo sapien
cagggccctgacaacacgtaaccttttgctttc

SEQ ID NO: 142300 - DNA, 33 bp, Homo sapien
cagggccctgacaacatgtaaccttttgctttc

SEQ ID NO: 142301 - DNA, 33 bp, Homo sapien
aggtggttgtgaaacaaggatgagccagtcagc

SEQ ID NO: 142302 - DNA, 33 bp, Homo sapien
aggtggttgtgaaacagggatgagccagtcagc

SEQ ID NO: 142303 - DNA, 33 bp, Homo sapien
ctcccctctagcctacaggaacttctagggcta

SEQ ID NO: 142304 - DNA, 33 bp, Homo sapien
ctcccctctagcctacgggaacttctagggcta

SEQ ID NO: 142305 - DNA, 33 bp, Homo sapien
tgtgttttcaaagaaacgtgatacctcctgttt

SEQ ID NO: 142306 - DNA, 33 bp, Homo sapien
tgtgttttcaaagaaatgtgatacctcctgttt

SEQ ID NO: 142307 - DNA, 33 bp, Homo sapien
catgttggtccagttacggttatggttacggtc

SEQ ID NO: 142308 - DNA, 33 bp, Homo sapien
catgttggtccagttatggttatggttacggtc

SEQ ID NO: 142309 - DNA, 33 bp, Homo sapien
tccccgtttggaaagcaattctgcaacatggaa

SEQ ID NO: 142310 - DNA, 33 bp, Homo sapien
tccccgtttggaaagcgattctgcaacatggaa

SEQ ID NO: 142311 - DNA, 33 bp, Homo sapien
gaagctggcatcctgaaaatttagtgccccttc

SEQ ID NO: 142312 - DNA, 33 bp, Homo sapien
gaagctggcatcctgataatttagtgccccttc

SEQ ID NO: 142313 - DNA, 33 bp, Homo sapien
catggcggcaggagacagaatgagagccaagtg

SEQ ID NO: 142314 - DNA, 33 bp, Homo sapien
catggcggcaggagacggaatgagagccaagtg

SEQ ID NO: 142315 - DNA, 33 bp, Homo sapien
ggagaaaatggcttaaagaagaaggtgagatgt

SEQ ID NO: 142316 - DNA, 33 bp, Homo sapien
ggagaaaatggcttaaggaagaaggtgagatgt

SEQ ID NO: 142317 - DNA, 33 bp, Homo sapien
gtgagtggatgttggaactgagtctggctctaa

SEQ ID NO: 142318 - DNA, 33 bp, Homo sapien
gtgagtggatgttggagctgagtctggctctaa

SEQ ID NO: 142319 - DNA, 33 bp, Homo sapien
aaagtgcactgtggtcacctttggaaaatagaa

SEQ ID NO: 142320 - DNA, 33 bp, Homo sapien
aaagtgcactgtggtcgcctttggaaaatagaa

SEQ ID NO: 142321 - DNA, 33 bp, Homo sapien
atgctggctgcccacaacatggacgtaatgacc

SEQ ID NO: 142322 - DNA, 33 bp, Homo sapien
atgctggctgcccacaccatggacgtaatgacc

SEQ ID NO: 142323 - DNA, 33 bp, Homo sapien
ttcagacaagcagggacccggtgatttcttggt

SEQ ID NO: 142324 - DNA, 33 bp, Homo sapien
ttcagacaagcagggagccggtgatttcttggt

SEQ ID NO: 142325 - DNA, 33 bp, Homo sapien
ggagatcagggaagaacttaacacccgtggcca

SEQ ID NO: 142326 - DNA, 33 bp, Homo sapien
ggagatcagggaagaatttaacacccgtggcca

SEQ ID NO: 142327 - DNA, 33 bp, Homo sapien
tccattctatggagcgaccacattttgcttatt

SEQ ID NO: 142328 - DNA, 33 bp, Homo sapien
tccattctatggagcgtccacattttgcttatt

SEQ ID NO: 142329 - DNA, 33 bp, Homo sapien
gccaacaaatagagccggagaaagaagtcaaca

SEQ ID NO: 142330 - DNA, 33 bp, Homo sapien
gccaacaaatagagcctgagaaagaagtcaaca

SEQ ID NO: 142331 - DNA, 33 bp, Homo sapien
cttcattcactcaaacacttattgcttaaacca

SEQ ID NO: 142332 - DNA, 33 bp, Homo sapien
cttcattcactcaaactcttattgcttaaacca

SEQ ID NO: 142333 - DNA, 33 bp, Homo sapien
ctccatctcacattgaaccatttccagtagtct

SEQ ID NO: 142334 - DNA, 33 bp, Homo sapien
ctccatctcacattgagccatttccagtagtct

SEQ ID NO: 142335 - DNA, 33 bp, Homo sapien
gcgggatttcagctggaaacactggtgcaggtc

SEQ ID NO: 142336 - DNA, 33 bp, Homo sapien
gcgggatttcagctgggaacactggtgcaggtc

SEQ ID NO: 142337 - DNA, 33 bp, Homo sapien
aaagacacagtgacaaacctgaaaggatacatt

SEQ ID NO: 142338 - DNA, 33 bp, Homo sapien
aaagacacagtgacaaccctgaaaggatacatt

SEQ ID NO: 142339 - DNA, 33 bp, Homo sapien
tctaatcaaaaatcccacaaggatctttatctt

SEQ ID NO: 142340 - DNA, 33 bp, Homo sapien
tctaatcaaaaatcccgcaaggatctttatctt

SEQ ID NO: 142341 - DNA, 33 bp, Homo sapien
tgtgtagaagagatggaagaaggatgacacagg

SEQ ID NO: 142342 - DNA, 33 bp, Homo sapien
tgtgtagaagagatggtagaaggatgacacagg

SEQ ID NO: 142343 - DNA, 33 bp, Homo sapien
gggggaggtagaactcactgaatctgagctgtt

SEQ ID NO: 142344 - DNA, 33 bp, Homo sapien
gggggaggtagaactcgctgaatctgagctgtt

SEQ ID NO: 142345 - DNA, 33 bp, Homo sapien
ccagggaccataaagccctgcatggccagcggg

SEQ ID NO: 142346 - DNA, 33 bp, Homo sapien
ccagggaccataaagctctgcatggccagcggg

SEQ ID NO: 142347 - DNA, 33 bp, Homo sapien
attatttcacttaaaactattgctatgtgtggt

SEQ ID NO: 142348 - DNA, 33 bp, Homo sapien
attatttcacttaaaattattgctatgtgtggt

SEQ ID NO: 142349 - DNA, 33 bp, Homo sapien
aggacaggaatcaaggaacacgaggctgacgga

SEQ ID NO: 142350 - DNA, 33 bp, Homo sapien
aggacaggaatcaagggacacgaggctgacgga

SEQ ID NO: 142351 - DNA, 33 bp, Homo sapien
gagcctcaagcagaaaagagcttccattttcag

SEQ ID NO: 142352 - DNA, 33 bp, Homo sapien
gagcctcaagcagaaaggagcttccattttcag

SEQ ID NO: 142353 - DNA, 33 bp, Homo sapien
aagacagagacagagaagagagtggcatagctg

SEQ ID NO: 142354 - DNA, 33 bp, Homo sapien
aagacagagacagagatgagagtggcatagctg

SEQ ID NO: 142355 - DNA, 33 bp, Homo sapien
tctggaaggaggaaaagatgtgatgtgatgtct

SEQ ID NO: 142356 - DNA, 33 bp, Homo sapien
tctggaaggaggaaaatatgtgatgtgatgtct

SEQ ID NO: 142357 - DNA, 33 bp, Homo sapien
aggaaggtggtctcgaagactggagtgctaccc

SEQ ID NO: 142358 - DNA, 33 bp, Homo sapien
aggaaggtggtctcgaggactggagtgctaccc

SEQ ID NO: 142359 - DNA, 33 bp, Homo sapien
gttgagaaaagggcaccaggaaggtggtctcga

SEQ ID NO: 142360 - DNA, 33 bp, Homo sapien
gttgagaaaagggcacgaggaaggtggtctcga

SEQ ID NO: 142361 - DNA, 33 bp, Homo sapien
agtcagcgctggccacacaaaggtgacgaggca

SEQ ID NO: 142362 - DNA, 33 bp, Homo sapien
agtcagcgctggccacgcaaaggtgacgaggca

SEQ ID NO: 142363 - DNA, 33 bp, Homo sapien
cagagagaaccctggacgccgggacactcattt

SEQ ID NO: 142364 - DNA, 33 bp, Homo sapien
cagagagaaccctggatgccgggacactcattt

SEQ ID NO: 142365 - DNA, 33 bp, Homo sapien
actgagggccctctcccgactcaagcacagtct

SEQ ID NO: 142366 - DNA, 33 bp, Homo sapien
actgagggccctctccggactcaagcacagtct

SEQ ID NO: 142367 - DNA, 33 bp, Homo sapien
ggactcagaagaatgcgcttagacaggtgaaaa

SEQ ID NO: 142368 - DNA, 33 bp, Homo sapien
ggactcagaagaatgctcttagacaggtgaaaa

SEQ ID NO: 142369 - DNA, 33 bp, Homo sapien
tttaggaatgttaaacactaattcttaattcaa

SEQ ID NO: 142370 - DNA, 33 bp, Homo sapien
tttaggaatgttaaacgctaattcttaattcaa

SEQ ID NO: 142371 - DNA, 33 bp, Homo sapien
gccgtttgctttgtaacgtaactaaataatgta

SEQ ID NO: 142372 - DNA, 33 bp, Homo sapien
gccgtttgctttgtaatgtaactaaataatgta

SEQ ID NO: 142373 - DNA, 33 bp, Homo sapien
acttgttctcagtagcaatcaattagtttccaa

SEQ ID NO: 142374 - DNA, 33 bp, Homo sapien
acttgttctcagtagcgatcaattagtttccaa

SEQ ID NO: 142375 - DNA, 33 bp, Homo sapien
gagctgagcactatgacgctagtgaaatacctc

SEQ ID NO: 142376 - DNA, 33 bp, Homo sapien
gagctgagcactatgatgctagtgaaatacctc

SEQ ID NO: 142377 - DNA, 33 bp, Homo sapien
gatctgcatagcccacccgttgtttttctggcc

SEQ ID NO: 142378 - DNA, 33 bp, Homo sapien
gatctgcatagcccacgcgttgtttttctggcc

SEQ ID NO: 142379 - DNA, 33 bp, Homo sapien
ctctagaaaattaccaagtaggaagtgttaata

SEQ ID NO: 142380 - DNA, 33 bp, Homo sapien
ctctagaaaattaccatgtaggaagtgttaata

SEQ ID NO: 142381 - DNA, 33 bp, Homo sapien
gttgaagagtcgaaagcaataaatggtggccca

SEQ ID NO: 142382 - DNA, 33 bp, Homo sapien
gttgaagagtcgaaagtaataaatggtggccca

SEQ ID NO: 142383 - DNA, 33 bp, Homo sapien
ttgagacaagaaggcaactgtagccaggggcgg

SEQ ID NO: 142384 - DNA, 33 bp, Homo sapien
ttgagacaagaaggcacctgtagccaggggcgg

SEQ ID NO: 142385 - DNA, 33 bp, Homo sapien
gtgcttgctgtctccactagtaatatgtctata

SEQ ID NO: 142386 - DNA, 33 bp, Homo sapien
gtgcttgctgtctccattagtaatatgtctata

SEQ ID NO: 142387 - DNA, 33 bp, Homo sapien
gacacccccagctagacaaatctgcaggagcca

SEQ ID NO: 142388 - DNA, 33 bp, Homo sapien
gacacccccagctagataaatctgcaggagcca

SEQ ID NO: 142389 - DNA, 33 bp, Homo sapien
ataacaaaacctcccagatcacgggtgtgatgt

SEQ ID NO: 142390 - DNA, 33 bp, Homo sapien
ataacaaaacctcccatatcacgggtgtgatgt

SEQ ID NO: 142391 - DNA, 33 bp, Homo sapien
atcggaggacccatcaccacagaaaatccaaga

SEQ ID NO: 142392 - DNA, 33 bp, Homo sapien
atcggaggacccatcatcacagaaaatccaaga

SEQ ID NO: 142393 - DNA, 33 bp, Homo sapien
cagctaaggaagcaaaaccttgtcatccctccg

SEQ ID NO: 142394 - DNA, 33 bp, Homo sapien
cagctaaggaagcaaacccttgtcatccctccg

SEQ ID NO: 142395 - DNA, 33 bp, Homo sapien
cggcacctgcttacaaacccagaaaaggggcct

SEQ ID NO: 142396 - DNA, 33 bp, Homo sapien
cggcacctgcttacaagcccagaaaaggggcct

SEQ ID NO: 142397 - DNA, 33 bp, Homo sapien
ccccacagagtccaaactgatacagctgggcca

SEQ ID NO: 142398 - DNA, 33 bp, Homo sapien
ccccacagagtccaaagtgatacagctgggcca

SEQ ID NO: 142399 - DNA, 33 bp, Homo sapien
gctctgtctctaaaaaatgtttccaggtaacag

SEQ ID NO: 142400 - DNA, 33 bp, Homo sapien
gctctgtctctaaaaagtgtttccaggtaacag

SEQ ID NO: 142401 - DNA, 33 bp, Homo sapien
actaataaccactttaaaattgttttcaacttt

SEQ ID NO: 142402 - DNA, 33 bp, Homo sapien
actaataaccactttacaattgttttcaacttt

SEQ ID NO: 142403 - DNA, 33 bp, Homo sapien
gagttttcagtctgcactcagaatagatataac

SEQ ID NO: 142404 - DNA, 33 bp, Homo sapien
gagttttcagtctgcattcagaatagatataac

SEQ ID NO: 142405 - DNA, 33 bp, Homo sapien
cagattgctggtattacgctaatagattggaaa

SEQ ID NO: 142406 - DNA, 33 bp, Homo sapien
cagattgctggtattatgctaatagattggaaa

SEQ ID NO: 142407 - DNA, 33 bp, Homo sapien
gcccagtacacaacacagtacggttctcccttt

SEQ ID NO: 142408 - DNA, 33 bp, Homo sapien
gcccagtacacaacacggtacggttctcccttt

SEQ ID NO: 142409 - DNA, 33 bp, Homo sapien
acggatggatatggacagtagtggccgcacgtg

SEQ ID NO: 142410 - DNA, 33 bp, Homo sapien
acggatggatatggacggtagtggccgcacgtg

SEQ ID NO: 142411 - DNA, 33 bp, Homo sapien
tacaaacaaatcaaaacgtctgacattttaaat

SEQ ID NO: 142412 - DNA, 33 bp, Homo sapien
tacaaacaaatcaaaaggtctgacattttaaat

SEQ ID NO: 142413 - DNA, 33 bp, Homo sapien
aggcgagctccgcatcgcggctttatttacaca

SEQ ID NO: 142414 - DNA, 33 bp, Homo sapien
aggcgagctccgcatctcggctttatttacaca

SEQ ID NO: 142415 - DNA, 33 bp, Homo sapien
aggatccaggcaggccaaagaagaggtggtggg

SEQ ID NO: 142416 - DNA, 33 bp, Homo sapien
aggatccaggcaggccgaagaagaggtggtggg

SEQ ID NO: 142417 - DNA, 33 bp, Homo sapien
tttggcttgctcccgaatattttgcccagaggc

SEQ ID NO: 142418 - DNA, 33 bp, Homo sapien
tttggcttgctcccgagtattttgcccagaggc

SEQ ID NO: 142419 - DNA, 33 bp, Homo sapien
ctgtctggaaccaggaaagaggaagcggtagtg

SEQ ID NO: 142420 - DNA, 33 bp, Homo sapien
ctgtctggaaccaggagagaggaagcggtagtg

SEQ ID NO: 142421 - DNA, 33 bp, Homo sapien
gctcccaggatctctcaaggtagctggacggtg

SEQ ID NO: 142422 - DNA, 33 bp, Homo sapien
gctcccaggatctctcgaggtagctggacggtg

SEQ ID NO: 142423 - DNA, 33 bp, Homo sapien
ctaaaaataattcaacccctccaatatttagag

SEQ ID NO: 142424 - DNA, 33 bp, Homo sapien
ctaaaaataattcaactcctccaatatttagag

SEQ ID NO: 142425 - DNA, 33 bp, Homo sapien
cagaaaatcacaaagaaaataatccacaatccc

SEQ ID NO: 142426 - DNA, 33 bp, Homo sapien
cagaaaatcacaaagacaataatccacaatccc

SEQ ID NO: 142427 - DNA, 33 bp, Homo sapien
gaaaacatgaaaaccacagtgaaagagcagcgt

SEQ ID NO: 142428 - DNA, 33 bp, Homo sapien
gaaaacatgaaaaccatagtgaaagagcagcgt

SEQ ID NO: 142429 - DNA, 33 bp, Homo sapien
gaagtgaaatgagcaaagtgcaaagaggaacag

SEQ ID NO: 142430 - DNA, 33 bp, Homo sapien
gaagtgaaatgagcaaggtgcaaagaggaacag

SEQ ID NO: 142431 - DNA, 33 bp, Homo sapien
cactcactgttacaagccagcatctgagattat

SEQ ID NO: 142432 - DNA, 33 bp, Homo sapien
cactcactgttacaaggcagcatctgagattat

SEQ ID NO: 142433 - DNA, 33 bp, Homo sapien
atagcatataaattagcaaagggatcgtcctga

SEQ ID NO: 142434 - DNA, 33 bp, Homo sapien
atagcatataaattagtaaagggatcgtcctga

SEQ ID NO: 142435 - DNA, 33 bp, Homo sapien
tttaagctggccttccaagctgataatgagcgc

SEQ ID NO: 142436 - DNA, 33 bp, Homo sapien
tttaagctggccttccgagctgataatgagcgc

SEQ ID NO: 142437 - DNA, 33 bp, Homo sapien
ccaagtggggttctcacgtggggagcatatggg

SEQ ID NO: 142438 - DNA, 33 bp, Homo sapien
ccaagtggggttctcatgtggggagcatatggg

SEQ ID NO: 142439 - DNA, 33 bp, Homo sapien
gtaacctctgagtggcaatgaagtcctgactct

SEQ ID NO: 142440 - DNA, 33 bp, Homo sapien
gtaacctctgagtggcgatgaagtcctgactct

SEQ ID NO: 142441 - DNA, 33 bp, Homo sapien
cgctgagttctgtcgcagaaagtctgagggcag

SEQ ID NO: 142442 - DNA, 33 bp, Homo sapien
cgctgagttctgtcgcggaaagtctgagggcag

SEQ ID NO: 142443 - DNA, 33 bp, Homo sapien
tcctggaagctaccaaagagattgaagccaggg

SEQ ID NO: 142444 - DNA, 33 bp, Homo sapien
tcctggaagctaccaaggagattgaagccaggg

SEQ ID NO: 142445 - DNA, 33 bp, Homo sapien
cagttcatttatgagaccatggacctcttatac

SEQ ID NO: 142446 - DNA, 33 bp, Homo sapien
cagttcatttatgagatcatggacctcttatac

SEQ ID NO: 142447 - DNA, 33 bp, Homo sapien
caaaaaaacacaaaaaatctgtagtataagagg

SEQ ID NO: 142448 - DNA, 33 bp, Homo sapien
caaaaaaacacaaaaagtctgtagtataagagg

SEQ ID NO: 142449 - DNA, 33 bp, Homo sapien
cccttgggtgttggagaaagacactcaggtggc

SEQ ID NO: 142450 - DNA, 33 bp, Homo sapien
cccttgggtgttggaggaagacactcaggtggc

SEQ ID NO: 142451 - DNA, 33 bp, Homo sapien
catgcacactgatacacgccctgagtgcgtggg

SEQ ID NO: 142452 - DNA, 33 bp, Homo sapien
catgcacactgatacatgccctgagtgcgtggg

SEQ ID NO: 142453 - DNA, 33 bp, Homo sapien
atgtgtgaggtgttcacagaggaaactggatga

SEQ ID NO: 142454 - DNA, 33 bp, Homo sapien
atgtgtgaggtgttcatagaggaaactggatga

SEQ ID NO: 142455 - DNA, 33 bp, Homo sapien
ctcctccactctggcaacattgggacttgaatc

SEQ ID NO: 142456 - DNA, 33 bp, Homo sapien
ctcctccactctggcagcattgggacttgaatc

SEQ ID NO: 142457 - DNA, 33 bp, Homo sapien
tatcagcagggagcaacctgtgaaggcttcctg

SEQ ID NO: 142458 - DNA, 33 bp, Homo sapien
tatcagcagggagcaatctgtgaaggcttcctg

SEQ ID NO: 142459 - DNA, 33 bp, Homo sapien
tgaaggactggcgggacgcaaacggttaccact

SEQ ID NO: 142460 - DNA, 33 bp, Homo sapien
tgaaggactggcgggatgcaaacggttaccact

SEQ ID NO: 142461 - DNA, 33 bp, Homo sapien
tgccagactattcaaaagcagctgcaccatttt

SEQ ID NO: 142462 - DNA, 33 bp, Homo sapien
tgccagactattcaaaggcagctgcaccatttt

SEQ ID NO: 142463 - DNA, 33 bp, Homo sapien
ccctagacaagtcagcactcaagtttatatgga

SEQ ID NO: 142464 - DNA, 33 bp, Homo sapien
ccctagacaagtcagcgctcaagtttatatgga

SEQ ID NO: 142465 - DNA, 33 bp, Homo sapien
gaacaataagagaaggcaagccctatgggatgg

SEQ ID NO: 142466 - DNA, 33 bp, Homo sapien
gaacaataagagaaggtaagccctatgggatgg

SEQ ID NO: 142467 - DNA, 33 bp, Homo sapien
tgtgtggaccccatcaaagcacccatcaatctg

SEQ ID NO: 142468 - DNA, 33 bp, Homo sapien
tgtgtggaccccatcacagcacccatcaatctg

SEQ ID NO: 142469 - DNA, 33 bp, Homo sapien
ggcccattgtggtatcactgatgtcctggaggc

SEQ ID NO: 142470 - DNA, 33 bp, Homo sapien
ggcccattgtggtatcgctgatgtcctggaggc

SEQ ID NO: 142471 - DNA, 33 bp, Homo sapien
cagagaggacgtcagaaccgggccgcggcctca

SEQ ID NO: 142472 - DNA, 33 bp, Homo sapien
cagagaggacgtcagacccgggccgcggcctca

SEQ ID NO: 142473 - DNA, 33 bp, Homo sapien
tggccctatctggaacaaggcagtccagggcaa

SEQ ID NO: 142474 - DNA, 33 bp, Homo sapien
tggccctatctggaacgaggcagtccagggcaa

SEQ ID NO: 142475 - DNA, 33 bp, Homo sapien
cctcttgactggcctacacctgagccaggacag

SEQ ID NO: 142476 - DNA, 33 bp, Homo sapien
cctcttgactggcctagacctgagccaggacag

SEQ ID NO: 142477 - DNA, 33 bp, Homo sapien
aagccaggttgccaggacctgaaaatagggaaa

SEQ ID NO: 142478 - DNA, 33 bp, Homo sapien
aagccaggttgccagggcctgaaaatagggaaa

SEQ ID NO: 142479 - DNA, 33 bp, Homo sapien
agcgaggtggtttcacaagtcctgtcctgagtg

SEQ ID NO: 142480 - DNA, 33 bp, Homo sapien
agcgaggtggtttcacgagtcctgtcctgagtg

SEQ ID NO: 142481 - DNA, 33 bp, Homo sapien
aaaacacaagcgatcacgtgaataggattttgg

SEQ ID NO: 142482 - DNA, 33 bp, Homo sapien
aaaacacaagcgatcatgtgaataggattttgg

SEQ ID NO: 142483 - DNA, 33 bp, Homo sapien
tggctgaatgaaggaccgaaatgatgatccatt

SEQ ID NO: 142484 - DNA, 33 bp, Homo sapien
tggctgaatgaaggactgaaatgatgatccatt

SEQ ID NO: 142485 - DNA, 33 bp, Homo sapien
atcattcttaaatccacgtgtttcttcctgtgc

SEQ ID NO: 142486 - DNA, 33 bp, Homo sapien
atcattcttaaatccatgtgtttcttcctgtgc

SEQ ID NO: 142487 - DNA, 33 bp, Homo sapien
agcctcagctgccacacgagtgcattggtgaca

SEQ ID NO: 142488 - DNA, 33 bp, Homo sapien
agcctcagctgccacatgagtgcattggtgaca

SEQ ID NO: 142489 - DNA, 33 bp, Homo sapien
cagcaaaaggagccccaaacaggcgggacaggt

SEQ ID NO: 142490 - DNA, 33 bp, Homo sapien
cagcaaaaggagccccgaacaggcgggacaggt

SEQ ID NO: 142491 - DNA, 33 bp, Homo sapien
ataccttgtgttatgcaacggagggcagacatg

SEQ ID NO: 142492 - DNA, 33 bp, Homo sapien
ataccttgtgttatgcgacggagggcagacatg

SEQ ID NO: 142493 - DNA, 33 bp, Homo sapien
acttaaaatgaatggcacgtttcctgggactta

SEQ ID NO: 142494 - DNA, 33 bp, Homo sapien
acttaaaatgaatggcgcgtttcctgggactta

SEQ ID NO: 142495 - DNA, 33 bp, Homo sapien
atcgataattatgtcacctgtacctgtcgccag

SEQ ID NO: 142496 - DNA, 33 bp, Homo sapien
atcgataattatgtcatctgtacctgtcgccag

SEQ ID NO: 142497 - DNA, 33 bp, Homo sapien
cctctctccacaccagaacagaaactggaccac

SEQ ID NO: 142498 - DNA, 33 bp, Homo sapien
cctctctccacaccaggacagaaactggaccac

SEQ ID NO: 142499 - DNA, 33 bp, Homo sapien
gcatctttggggacccagaaatgtgttagaaag

SEQ ID NO: 142500 - DNA, 33 bp, Homo sapien
gcatctttggggacccggaaatgtgttagaaag

SEQ ID NO: 142501 - DNA, 33 bp, Homo sapien
aagctccattaccacaagctcatctcctctagc

SEQ ID NO: 142502 - DNA, 33 bp, Homo sapien
aagctccattaccacaggctcatctcctctagc

SEQ ID NO: 142503 - DNA, 33 bp, Homo sapien
ctagcgtgtacaagaccccatccttacctgcaa

SEQ ID NO: 142504 - DNA, 33 bp, Homo sapien
ctagcgtgtacaagacgccatccttacctgcaa

SEQ ID NO: 142505 - DNA, 33 bp, Homo sapien
gctttgcagcatgacaagccctgggccattttt

SEQ ID NO: 142506 - DNA, 33 bp, Homo sapien
gctttgcagcatgacaggccctgggccattttt

SEQ ID NO: 142507 - DNA, 33 bp, Homo sapien
gtgtggctgttacttaccacatcctccgggccc

SEQ ID NO: 142508 - DNA, 33 bp, Homo sapien
gtgtggctgttacttatcacatcctccgggccc

SEQ ID NO: 142509 - DNA, 33 bp, Homo sapien
tgagaggcctctaccacgtggcaataaggcaaa

SEQ ID NO: 142510 - DNA, 33 bp, Homo sapien
tgagaggcctctaccaggtggcaataaggcaaa

SEQ ID NO: 142511 - DNA, 33 bp, Homo sapien
cacagggaccaagagaacttcagtttcctcaag

SEQ ID NO: 142512 - DNA, 33 bp, Homo sapien
cacagggaccaagagatcttcagtttcctcaag

SEQ ID NO: 142513 - DNA, 33 bp, Homo sapien
aaatatatataggctcaagaaaatagtactaac

SEQ ID NO: 142514 - DNA, 33 bp, Homo sapien
aaatatatataggctcgagaaaatagtactaac

SEQ ID NO: 142515 - DNA, 33 bp, Homo sapien
gagaagtagatgtgtaagcagatcagtaattaa

SEQ ID NO: 142516 - DNA, 33 bp, Homo sapien
gagaagtagatgtgtacgcagatcagtaattaa

SEQ ID NO: 142517 - DNA, 33 bp, Homo sapien
ctcttgatggacagccactagcaaaggccttag

SEQ ID NO: 142518 - DNA, 33 bp, Homo sapien
ctcttgatggacagcctctagcaaaggccttag

SEQ ID NO: 142519 - DNA, 33 bp, Homo sapien
ctcagctcagatttgacgtcatctggtgaatga

SEQ ID NO: 142520 - DNA, 33 bp, Homo sapien
ctcagctcagatttgaggtcatctggtgaatga

SEQ ID NO: 142521 - DNA, 33 bp, Homo sapien
aatggcctggtggatacaacaacaaattggggt

SEQ ID NO: 142522 - DNA, 33 bp, Homo sapien
aatggcctggtggatagaacaacaaattggggt

SEQ ID NO: 142523 - DNA, 33 bp, Homo sapien
ctctccgataacccaccatcatttcccaccaaa

SEQ ID NO: 142524 - DNA, 33 bp, Homo sapien
ctctccgataacccacgatcatttcccaccaaa

SEQ ID NO: 142525 - DNA, 33 bp, Homo sapien
agtgactcctttgcaccgtaagagcccaagagt

SEQ ID NO: 142526 - DNA, 33 bp, Homo sapien
agtgactcctttgcactgtaagagcccaagagt

SEQ ID NO: 142527 - DNA, 33 bp, Homo sapien
aatacacatttccagaatccagctaaattacag

SEQ ID NO: 142528 - DNA, 33 bp, Homo sapien
aatacacatttccagagtccagctaaattacag

SEQ ID NO: 142529 - DNA, 33 bp, Homo sapien
gagagattaagatttacgttcacacacaaatgt

SEQ ID NO: 142530 - DNA, 33 bp, Homo sapien
gagagattaagatttatgttcacacacaaatgt

SEQ ID NO: 142531 - DNA, 33 bp, Homo sapien
tgactgtagttgaaccagcaaatctcatgtact

SEQ ID NO: 142532 - DNA, 33 bp, Homo sapien
tgactgtagttgaaccggcaaatctcatgtact

SEQ ID NO: 142533 - DNA, 33 bp, Homo sapien
aaatgaaaggaaagacaagcctcatatgccagg

SEQ ID NO: 142534 - DNA, 33 bp, Homo sapien
aaatgaaaggaaagacgagcctcatatgccagg

SEQ ID NO: 142535 - DNA, 33 bp, Homo sapien
aggaacaatggtataacccatcaggcccaaatg

SEQ ID NO: 142536 - DNA, 33 bp, Homo sapien
aggaacaatggtataatccatcaggcccaaatg

SEQ ID NO: 142537 - DNA, 33 bp, Homo sapien
gtcccagtgtggggagaatccaaatctgggaga

SEQ ID NO: 142538 - DNA, 33 bp, Homo sapien
gtcccagtgtggggaggatccaaatctgggaga

SEQ ID NO: 142539 - DNA, 33 bp, Homo sapien
gaacagcccaggtccgaagtgcagagtattcat

SEQ ID NO: 142540 - DNA, 33 bp, Homo sapien
gaacagcccaggtccggagtgcagagtattcat

SEQ ID NO: 142541 - DNA, 33 bp, Homo sapien
gcagcagggtgtggtacaaagaatacagggctg

SEQ ID NO: 142542 - DNA, 33 bp, Homo sapien
gcagcagggtgtggtagaaagaatacagggctg

SEQ ID NO: 142543 - DNA, 33 bp, Homo sapien
tgactctcccagggtcccgtagccagttgtcaa

SEQ ID NO: 142544 - DNA, 33 bp, Homo sapien
tgactctcccagggtcgcgtagccagttgtcaa

SEQ ID NO: 142545 - DNA, 33 bp, Homo sapien
agttgctttttgggacgggcatttatgtatgtg

SEQ ID NO: 142546 - DNA, 33 bp, Homo sapien
agttgctttttgggactggcatttatgtatgtg

SEQ ID NO: 142547 - DNA, 33 bp, Homo sapien
ccctttggacttgcacacgcacttcctacacac

SEQ ID NO: 142548 - DNA, 33 bp, Homo sapien
ccctttggacttgcacgcgcacttcctacacac

SEQ ID NO: 142549 - DNA, 33 bp, Homo sapien
gacctgtggagcaacaaaaaaattgacatttca

SEQ ID NO: 142550 - DNA, 33 bp, Homo sapien
gacctgtggagcaacagaaaaattgacatttca

SEQ ID NO: 142551 - DNA, 33 bp, Homo sapien
taacagataacacaatcactttggctgcagagt

SEQ ID NO: 142552 - DNA, 33 bp, Homo sapien
taacagataacacaattactttggctgcagagt

SEQ ID NO: 142553 - DNA, 33 bp, Homo sapien
aatcgttccttatcaccgaaaagataaaaccag

SEQ ID NO: 142554 - DNA, 33 bp, Homo sapien
aatcgttccttatcactgaaaagataaaaccag

SEQ ID NO: 142555 - DNA, 33 bp, Homo sapien
aatagtctgtgtgaaaaattggccgagaaacat

SEQ ID NO: 142556 - DNA, 33 bp, Homo sapien
aatagtctgtgtgaaacattggccgagaaacat

SEQ ID NO: 142557 - DNA, 33 bp, Homo sapien
tgtttccactgggcaacactaactttcacattc

SEQ ID NO: 142558 - DNA, 33 bp, Homo sapien
tgtttccactgggcaatactaactttcacattc

SEQ ID NO: 142559 - DNA, 33 bp, Homo sapien
agctttatctgaacaccgcaaattttgtatttg

SEQ ID NO: 142560 - DNA, 33 bp, Homo sapien
agctttatctgaacactgcaaattttgtatttg

SEQ ID NO: 142561 - DNA, 33 bp, Homo sapien
gctgcacgtaggtccaatcttggatggtgcctt

SEQ ID NO: 142562 - DNA, 33 bp, Homo sapien
gctgcacgtaggtccattcttggatggtgcctt

SEQ ID NO: 142563 - DNA, 33 bp, Homo sapien
tatttatgctatttgacgatttgacaaattgaa

SEQ ID NO: 142564 - DNA, 33 bp, Homo sapien
tatttatgctatttgatgatttgacaaattgaa

SEQ ID NO: 142565 - DNA, 33 bp, Homo sapien
aaagacttttctgtaagcgcaaaaatgcagccc

SEQ ID NO: 142566 - DNA, 33 bp, Homo sapien
aaagacttttctgtaatcgcaaaaatgcagccc

SEQ ID NO: 142567 - DNA, 33 bp, Homo sapien
atttttgccacccttaccccagcagtctaagag

SEQ ID NO: 142568 - DNA, 33 bp, Homo sapien
atttttgccacccttatcccagcagtctaagag

SEQ ID NO: 142569 - DNA, 33 bp, Homo sapien
gaagcttttgctacagaatctcttaaaatacag

SEQ ID NO: 142570 - DNA, 33 bp, Homo sapien
gaagcttttgctacagcatctcttaaaatacag

SEQ ID NO: 142571 - DNA, 33 bp, Homo sapien
tgttttaatctgaaaagcaatcagctagagagg

SEQ ID NO: 142572 - DNA, 33 bp, Homo sapien
tgttttaatctgaaaatcaatcagctagagagg

SEQ ID NO: 142573 - DNA, 33 bp, Homo sapien
cctgctcctacagcaaagctaggtggaactggg

SEQ ID NO: 142574 - DNA, 33 bp, Homo sapien
cctgctcctacagcaaggctaggtggaactggg

SEQ ID NO: 142575 - DNA, 33 bp, Homo sapien
ttgggaaaaactgaaacgaaagccagaacaaac

SEQ ID NO: 142576 - DNA, 33 bp, Homo sapien
ttgggaaaaactgaaatgaaagccagaacaaac

SEQ ID NO: 142577 - DNA, 33 bp, Homo sapien
aacatcctctacagggaaaagaagtatgctgat

SEQ ID NO: 142578 - DNA, 33 bp, Homo sapien
aacatcctctacagggcaaagaagtatgctgat

SEQ ID NO: 142579 - DNA, 33 bp, Homo sapien
gaattcagaagatcaaacaacgtctattttatc

SEQ ID NO: 142580 - DNA, 33 bp, Homo sapien
gaattcagaagatcaagcaacgtctattttatc

SEQ ID NO: 142581 - DNA, 33 bp, Homo sapien
ctttcattattaacaacggctctgacctcctct

SEQ ID NO: 142582 - DNA, 33 bp, Homo sapien
ctttcattattaacaatggctctgacctcctct

SEQ ID NO: 142583 - DNA, 33 bp, Homo sapien
tgtggttttggcatacactattttatgagtttc

SEQ ID NO: 142584 - DNA, 33 bp, Homo sapien
tgtggttttggcatacgctattttatgagtttc

SEQ ID NO: 142585 - DNA, 33 bp, Homo sapien
ttaagtcagacagactaaggctgatgccagagg

SEQ ID NO: 142586 - DNA, 33 bp, Homo sapien
ttaagtcagacagactgaggctgatgccagagg

SEQ ID NO: 142587 - DNA, 33 bp, Homo sapien
agcagaccatagtcccaagagcctcaggaccat

SEQ ID NO: 142588 - DNA, 33 bp, Homo sapien
agcagaccatagtcccgagagcctcaggaccat

SEQ ID NO: 142589 - DNA, 33 bp, Homo sapien
gtctcttgtcaaattacaactctttagcctcag

SEQ ID NO: 142590 - DNA, 33 bp, Homo sapien
gtctcttgtcaaattagaactctttagcctcag

SEQ ID NO: 142591 - DNA, 33 bp, Homo sapien
agcctctgtggaatgaaggcagttgctggaatt

SEQ ID NO: 142592 - DNA, 33 bp, Homo sapien
agcctctgtggaatgagggcagttgctggaatt

SEQ ID NO: 142593 - DNA, 33 bp, Homo sapien
ggagacaaaaccacacaaactccagaggccggg

SEQ ID NO: 142594 - DNA, 33 bp, Homo sapien
ggagacaaaaccacacgaactccagaggccggg

SEQ ID NO: 142595 - DNA, 33 bp, Homo sapien
ggaagaacagcagggggacaggtcaatgaggaa

SEQ ID NO: 142596 - DNA, 33 bp, Homo sapien
ggaagaacagcaggggtacaggtcaatgaggaa

SEQ ID NO: 142597 - DNA, 33 bp, Homo sapien
ggtcaatgaggaaggaaggaagaagtgaacaag

SEQ ID NO: 142598 - DNA, 33 bp, Homo sapien
ggtcaatgaggaaggacggaagaagtgaacaag

SEQ ID NO: 142599 - DNA, 33 bp, Homo sapien
tgagctgaaaaccagacagcaaagaagctggtg

SEQ ID NO: 142600 - DNA, 33 bp, Homo sapien
tgagctgaaaaccagatagcaaagaagctggtg

SEQ ID NO: 142601 - DNA, 33 bp, Homo sapien
cttggacaccagctcaataacctctctgaagaa

SEQ ID NO: 142602 - DNA, 33 bp, Homo sapien
cttggacaccagctcagtaacctctctgaagaa

SEQ ID NO: 142603 - DNA, 33 bp, Homo sapien
tgggcggatgtcttcagactcaccacttttttc

SEQ ID NO: 142604 - DNA, 33 bp, Homo sapien
tgggcggatgtcttcatactcaccacttttttc

SEQ ID NO: 142605 - DNA, 33 bp, Homo sapien
ataatgtatagcaacactatgaatcccattttt

SEQ ID NO: 142606 - DNA, 33 bp, Homo sapien
ataatgtatagcaacattatgaatcccattttt

SEQ ID NO: 142607 - DNA, 33 bp, Homo sapien
gttccttatacgtatgaatgacctttcttgggg

SEQ ID NO: 142608 - DNA, 33 bp, Homo sapien
gttccttatacgtatggatgacctttcttgggg

SEQ ID NO: 142609 - DNA, 33 bp, Homo sapien
tacaatctggtgaacccatactgtggaatagtc

SEQ ID NO: 142610 - DNA, 33 bp, Homo sapien
tacaatctggtgaacctatactgtggaatagtc

SEQ ID NO: 142611 - DNA, 33 bp, Homo sapien
agcaagtcctgccaaaattctctgagtgtgtcc

SEQ ID NO: 142612 - DNA, 33 bp, Homo sapien
agcaagtcctgccaaagttctctgagtgtgtcc

SEQ ID NO: 142613 - DNA, 33 bp, Homo sapien
ggcacatctgcagatacggtgccagttaacagg

SEQ ID NO: 142614 - DNA, 33 bp, Homo sapien
ggcacatctgcagatatggtgccagttaacagg

SEQ ID NO: 142615 - DNA, 33 bp, Homo sapien
tagcggcagaatttgaactgccctaaattgttg

SEQ ID NO: 142616 - DNA, 33 bp, Homo sapien
tagcggcagaatttgacctgccctaaattgttg

SEQ ID NO: 142617 - DNA, 33 bp, Homo sapien
taaagccaggattctgcacagattgctgcccct

SEQ ID NO: 142618 - DNA, 33 bp, Homo sapien
taaagccaggattctggacagattgctgcccct

SEQ ID NO: 142619 - DNA, 33 bp, Homo sapien
ggctttattaaaaagcgccaagtcaacccaagc

SEQ ID NO: 142620 - DNA, 33 bp, Homo sapien
ggctttattaaaaagctccaagtcaacccaagc

SEQ ID NO: 142621 - DNA, 33 bp, Homo sapien
acttcattctgggggaagaatttgagaatggac

SEQ ID NO: 142622 - DNA, 33 bp, Homo sapien
acttcattctgggggaggaatttgagaatggac

SEQ ID NO: 142623 - DNA, 33 bp, Homo sapien
gtctgctgttatgttcacttaccccagatgctt

SEQ ID NO: 142624 - DNA, 33 bp, Homo sapien
gtctgctgttatgttcgcttaccccagatgctt

SEQ ID NO: 142625 - DNA, 33 bp, Homo sapien
ccagtgaggtggggaaacttgtgaaactgaaat

SEQ ID NO: 142626 - DNA, 33 bp, Homo sapien
ccagtgaggtggggaagcttgtgaaactgaaat

SEQ ID NO: 142627 - DNA, 33 bp, Homo sapien
aaagacagtgacatacaaggtgaaaaactggac

SEQ ID NO: 142628 - DNA, 33 bp, Homo sapien
aaagacagtgacatacgaggtgaaaaactggac

SEQ ID NO: 142629 - DNA, 33 bp, Homo sapien
tttaagtcattactaacggttggatgcaataaa

SEQ ID NO: 142630 - DNA, 33 bp, Homo sapien
tttaagtcattactaatggttggatgcaataaa

SEQ ID NO: 142631 - DNA, 33 bp, Homo sapien
gaggcggattgcaaacagctgccgagttccaag

SEQ ID NO: 142632 - DNA, 33 bp, Homo sapien
gaggcggattgcaaacggctgccgagttccaag

SEQ ID NO: 142633 - DNA, 33 bp, Homo sapien
gcgttgaagcatcccaaagacctcttgtgctta

SEQ ID NO: 142634 - DNA, 33 bp, Homo sapien
gcgttgaagcatcccagagacctcttgtgctta

SEQ ID NO: 142635 - DNA, 33 bp, Homo sapien
aatcaagaaaatttgtaaagccacataagctgt

SEQ ID NO: 142636 - DNA, 33 bp, Homo sapien
aatcaagaaaatttgtgaagccacataagctgt

SEQ ID NO: 142637 - DNA, 33 bp, Homo sapien
cctccccatttcctggaacaatactccaaggac

SEQ ID NO: 142638 - DNA, 33 bp, Homo sapien
cctccccatttcctgggacaatactccaaggac

SEQ ID NO: 142639 - DNA, 33 bp, Homo sapien
ctgaaaagggacaaaagatcacaggagatcctg

SEQ ID NO: 142640 - DNA, 33 bp, Homo sapien
ctgaaaagggacaaaatatcacaggagatcctg

SEQ ID NO: 142641 - DNA, 33 bp, Homo sapien
agagacattctttgtaagtttataactcttgat

SEQ ID NO: 142642 - DNA, 33 bp, Homo sapien
agagacattctttgtatgtttataactcttgat

SEQ ID NO: 142643 - DNA, 33 bp, Homo sapien
aacagtggccagaaaccgttcttggaggctcta

SEQ ID NO: 142644 - DNA, 33 bp, Homo sapien
aacagtggccagaaactgttcttggaggctcta

SEQ ID NO: 142645 - DNA, 33 bp, Homo sapien
tctcagaacagcacacaggattagaaaggacat

SEQ ID NO: 142646 - DNA, 33 bp, Homo sapien
tctcagaacagcacacgggattagaaaggacat

SEQ ID NO: 142647 - DNA, 33 bp, Homo sapien
tgttttgtgatgtcctaacctcaaaactaggtg

SEQ ID NO: 142648 - DNA, 33 bp, Homo sapien
tgttttgtgatgtcctgacctcaaaactaggtg

SEQ ID NO: 142649 - DNA, 33 bp, Homo sapien
ctcgctggggtataaaagtaatatggaaaccag

SEQ ID NO: 142650 - DNA, 33 bp, Homo sapien
ctcgctggggtataaaggtaatatggaaaccag

SEQ ID NO: 142651 - DNA, 33 bp, Homo sapien
acttggcaagaacagacgtcagatttgaaccta

SEQ ID NO: 142652 - DNA, 33 bp, Homo sapien
acttggcaagaacagaggtcagatttgaaccta

SEQ ID NO: 142653 - DNA, 33 bp, Homo sapien
gagaagcagcccgaacagtgacatttatacata

SEQ ID NO: 142654 - DNA, 33 bp, Homo sapien
gagaagcagcccgaacggtgacatttatacata

SEQ ID NO: 142655 - DNA, 33 bp, Homo sapien
agtgtttttggttaaacgctcataaatgagggg

SEQ ID NO: 142656 - DNA, 33 bp, Homo sapien
agtgtttttggttaaatgctcataaatgagggg

SEQ ID NO: 142657 - DNA, 33 bp, Homo sapien
cagaatgaaagctcaacgtgccagatggctttg

SEQ ID NO: 142658 - DNA, 33 bp, Homo sapien
cagaatgaaagctcaatgtgccagatggctttg

SEQ ID NO: 142659 - DNA, 33 bp, Homo sapien
ctgtgtgtgcataggaagtagttcggatgatgt

SEQ ID NO: 142660 - DNA, 33 bp, Homo sapien
ctgtgtgtgcataggaggtagttcggatgatgt

SEQ ID NO: 142661 - DNA, 33 bp, Homo sapien
ccggcttgaaattccacgaaatgtcacctcctc

SEQ ID NO: 142662 - DNA, 33 bp, Homo sapien
ccggcttgaaattccatgaaatgtcacctcctc

SEQ ID NO: 142663 - DNA, 33 bp, Homo sapien
cctgtcccagtgaacgacgacagcttatttagt

SEQ ID NO: 142664 - DNA, 33 bp, Homo sapien
cctgtcccagtgaacggcgacagcttatttagt

SEQ ID NO: 142665 - DNA, 33 bp, Homo sapien
atttaaaaacaaatgaagtgagaaccaaatggc

SEQ ID NO: 142666 - DNA, 33 bp, Homo sapien
atttaaaaacaaatgacgtgagaaccaaatggc

SEQ ID NO: 142667 - DNA, 33 bp, Homo sapien
aagggctgtttcttcacgtttcagtcaatgtac

SEQ ID NO: 142668 - DNA, 33 bp, Homo sapien
aagggctgtttcttcatgtttcagtcaatgtac

SEQ ID NO: 142669 - DNA, 33 bp, Homo sapien
cagtttgctcaaagaaagttctggagttggcgt

SEQ ID NO: 142670 - DNA, 33 bp, Homo sapien
cagtttgctcaaagaaggttctggagttggcgt

SEQ ID NO: 142671 - DNA, 33 bp, Homo sapien
atttcagccctcttctcaactttaggaaagcaa

SEQ ID NO: 142672 - DNA, 33 bp, Homo sapien
atttcagccctcttctgaactttaggaaagcaa

SEQ ID NO: 142673 - DNA, 33 bp, Homo sapien
tcataaaaagcaaacacccccgctggaacttaa

SEQ ID NO: 142674 - DNA, 33 bp, Homo sapien
tcataaaaagcaaacatccccgctggaacttaa

SEQ ID NO: 142675 - DNA, 33 bp, Homo sapien
accagagtgatggggacgcgaatgtttcctaac

SEQ ID NO: 142676 - DNA, 33 bp, Homo sapien
accagagtgatggggatgcgaatgtttcctaac

SEQ ID NO: 142677 - DNA, 33 bp, Homo sapien
tcccatctgagggctccgaaaaaaatgtaaggt

SEQ ID NO: 142678 - DNA, 33 bp, Homo sapien
tcccatctgagggctctgaaaaaaatgtaaggt

SEQ ID NO: 142679 - DNA, 33 bp, Homo sapien
agcctcaagaggtccacagtctgagtcaagccc

SEQ ID NO: 142680 - DNA, 33 bp, Homo sapien
agcctcaagaggtccatagtctgagtcaagccc

SEQ ID NO: 142681 - DNA, 33 bp, Homo sapien
attttccctgagtaaaccatctgaagcggagct

SEQ ID NO: 142682 - DNA, 33 bp, Homo sapien
attttccctgagtaaatcatctgaagcggagct

SEQ ID NO: 142683 - DNA, 33 bp, Homo sapien
aaacaggtctccttccacttcactccacctgga

SEQ ID NO: 142684 - DNA, 33 bp, Homo sapien
aaacaggtctccttccgcttcactccacctgga

SEQ ID NO: 142685 - DNA, 33 bp, Homo sapien
atgaatagagtcagcccattttaagtgccccct

SEQ ID NO: 142686 - DNA, 33 bp, Homo sapien
atgaatagagtcagcctattttaagtgccccct

SEQ ID NO: 142687 - DNA, 33 bp, Homo sapien
gaggaacgattttaacagcagatagtaagagtt

SEQ ID NO: 142688 - DNA, 33 bp, Homo sapien
gaggaacgattttaacggcagatagtaagagtt

SEQ ID NO: 142689 - DNA, 33 bp, Homo sapien
catttcatgtgcccaccaaaagttttcagcagg

SEQ ID NO: 142690 - DNA, 33 bp, Homo sapien
catttcatgtgcccactaaaagttttcagcagg

SEQ ID NO: 142691 - DNA, 33 bp, Homo sapien
aaagttttcagcagggaaagttcacacaagcat

SEQ ID NO: 142692 - DNA, 33 bp, Homo sapien
aaagttttcagcagggtaagttcacacaagcat

SEQ ID NO: 142693 - DNA, 33 bp, Homo sapien
tgctgcttttccctgacagattaacagagggac

SEQ ID NO: 142694 - DNA, 33 bp, Homo sapien
tgctgcttttccctgatagattaacagagggac

SEQ ID NO: 142695 - DNA, 33 bp, Homo sapien
gatgttgagggtcagacgggggatgcacggatc

SEQ ID NO: 142696 - DNA, 33 bp, Homo sapien
gatgttgagggtcagatgggggatgcacggatc

SEQ ID NO: 142697 - DNA, 33 bp, Homo sapien
ttcttcttggaaaacaagcgggatcagaaaagt

SEQ ID NO: 142698 - DNA, 33 bp, Homo sapien
ttcttcttggaaaacaggcgggatcagaaaagt

SEQ ID NO: 142699 - DNA, 33 bp, Homo sapien
ccacgacattgggggaactgtaaagtgagatta

SEQ ID NO: 142700 - DNA, 33 bp, Homo sapien
ccacgacattgggggagctgtaaagtgagatta

SEQ ID NO: 142701 - DNA, 33 bp, Homo sapien
cggaagtgacattcatcacccctgtcatatcct

SEQ ID NO: 142702 - DNA, 33 bp, Homo sapien
cggaagtgacattcattacccctgtcatatcct

SEQ ID NO: 142703 - DNA, 33 bp, Homo sapien
gaaagaaaactctgccagaagagggagcatcag

SEQ ID NO: 142704 - DNA, 33 bp, Homo sapien
gaaagaaaactctgccggaagagggagcatcag

SEQ ID NO: 142705 - DNA, 33 bp, Homo sapien
tcactttcagccctcaccaagatttaaaccaag

SEQ ID NO: 142706 - DNA, 33 bp, Homo sapien
tcactttcagccctcatcaagatttaaaccaag

SEQ ID NO: 142707 - DNA, 33 bp, Homo sapien
attcattgcaaggatagagttccagtttcttat

SEQ ID NO: 142708 - DNA, 33 bp, Homo sapien
attcattgcaaggatatagttccagtttcttat

SEQ ID NO: 142709 - DNA, 33 bp, Homo sapien
ccagatcactggccaaacaggcagaaggtgctg

SEQ ID NO: 142710 - DNA, 33 bp, Homo sapien
ccagatcactggccaagcaggcagaaggtgctg

SEQ ID NO: 142711 - DNA, 33 bp, Homo sapien
gtctgggcctcagggacgtgagtttaaccacag

SEQ ID NO: 142712 - DNA, 33 bp, Homo sapien
gtctgggcctcagggatgtgagtttaaccacag

SEQ ID NO: 142713 - DNA, 33 bp, Homo sapien
aaaatggccttacccaagtgagagtcaacagcg

SEQ ID NO: 142714 - DNA, 33 bp, Homo sapien
aaaatggccttacccacgtgagagtcaacagcg

SEQ ID NO: 142715 - DNA, 33 bp, Homo sapien
ggacttgggctccagaaggtgtccgcttcttct

SEQ ID NO: 142716 - DNA, 33 bp, Homo sapien
ggacttgggctccagatggtgtccgcttcttct

SEQ ID NO: 142717 - DNA, 33 bp, Homo sapien
ccttcaatgcaaaggacagaaaagaagccatgt

SEQ ID NO: 142718 - DNA, 33 bp, Homo sapien
ccttcaatgcaaaggatagaaaagaagccatgt

SEQ ID NO: 142719 - DNA, 33 bp, Homo sapien
tgctggatatcactccagaaagaaactagcagc

SEQ ID NO: 142720 - DNA, 33 bp, Homo sapien
tgctggatatcactccggaaagaaactagcagc

SEQ ID NO: 142721 - DNA, 33 bp, Homo sapien
taatgaattgaaaaaaaaacagccttgtggctc

SEQ ID NO: 142722 - DNA, 33 bp, Homo sapien
taatgaattgaaaaaacaacagccttgtggctc

SEQ ID NO: 142723 - DNA, 33 bp, Homo sapien
aaatggagaaggtcaggataatgatgtcttcct

SEQ ID NO: 142724 - DNA, 33 bp, Homo sapien
aaatggagaaggtcagtataatgatgtcttcct

SEQ ID NO: 142725 - DNA, 33 bp, Homo sapien
aaatgttattactgatcactctctgttatggtt

SEQ ID NO: 142726 - DNA, 33 bp, Homo sapien
aaatgttattactgattactctctgttatggtt

SEQ ID NO: 142727 - DNA, 33 bp, Homo sapien
atttacataaaacaaacacgtccttaaattgag

SEQ ID NO: 142728 - DNA, 33 bp, Homo sapien
atttacataaaacaaatacgtccttaaattgag

SEQ ID NO: 142729 - DNA, 33 bp, Homo sapien
gtgctcaggagtccaacacctgggttcaagtcc

SEQ ID NO: 142730 - DNA, 33 bp, Homo sapien
gtgctcaggagtccaagacctgggttcaagtcc

SEQ ID NO: 142731 - DNA, 33 bp, Homo sapien
tcagcaggaaggcctcaagggagcggtgcccat

SEQ ID NO: 142732 - DNA, 33 bp, Homo sapien
tcagcaggaaggcctcgagggagcggtgcccat

SEQ ID NO: 142733 - DNA, 33 bp, Homo sapien
aaaaagaaatctcccccctacattgaggaattt

SEQ ID NO: 142734 - DNA, 33 bp, Homo sapien
aaaaagaaatctccccgctacattgaggaattt

SEQ ID NO: 142735 - DNA, 33 bp, Homo sapien
gtttccacatctctaacggtaatagcacattga

SEQ ID NO: 142736 - DNA, 33 bp, Homo sapien
gtttccacatctctaatggtaatagcacattga

SEQ ID NO: 142737 - DNA, 33 bp, Homo sapien
tggaaatgaatcttgcaaagctactaacatttt

SEQ ID NO: 142738 - DNA, 33 bp, Homo sapien
tggaaatgaatcttgcgaagctactaacatttt

SEQ ID NO: 142739 - DNA, 33 bp, Homo sapien
actttagctccagccacgtggttaaggttctat

SEQ ID NO: 142740 - DNA, 33 bp, Homo sapien
actttagctccagccatgtggttaaggttctat

SEQ ID NO: 142741 - DNA, 33 bp, Homo sapien
ctgcatgataatagtacggtgtcaaggttaaat

SEQ ID NO: 142742 - DNA, 33 bp, Homo sapien
ctgcatgataatagtatggtgtcaaggttaaat

SEQ ID NO: 142743 - DNA, 33 bp, Homo sapien
atttctcgtgttgggcaagaggattgagagctc

SEQ ID NO: 142744 - DNA, 33 bp, Homo sapien
atttctcgtgttgggcgagaggattgagagctc

SEQ ID NO: 142745 - DNA, 33 bp, Homo sapien
ggtgttagtggctcacagtagatgtctgtgtca

SEQ ID NO: 142746 - DNA, 33 bp, Homo sapien
ggtgttagtggctcacggtagatgtctgtgtca

SEQ ID NO: 142747 - DNA, 33 bp, Homo sapien
ttaaactgctctaacccccttttgggtatccca

SEQ ID NO: 142748 - DNA, 33 bp, Homo sapien
ttaaactgctctaacctccttttgggtatccca

SEQ ID NO: 142749 - DNA, 33 bp, Homo sapien
tcgcgttcttaagcaccgaattagttttggaca

SEQ ID NO: 142750 - DNA, 33 bp, Homo sapien
tcgcgttcttaagcactgaattagttttggaca

SEQ ID NO: 142751 - DNA, 33 bp, Homo sapien
tatgtcatagagtgtcaagtacttcatacctca

SEQ ID NO: 142752 - DNA, 33 bp, Homo sapien
tatgtcatagagtgtcgagtacttcatacctca

SEQ ID NO: 142753 - DNA, 33 bp, Homo sapien
cacagagaaaaggccacgaagacatagtgataa

SEQ ID NO: 142754 - DNA, 33 bp, Homo sapien
cacagagaaaaggccatgaagacatagtgataa

SEQ ID NO: 142755 - DNA, 33 bp, Homo sapien
aaaacaaaacattggaccatttaatacattttc

SEQ ID NO: 142756 - DNA, 33 bp, Homo sapien
aaaacaaaacattggatcatttaatacattttc

SEQ ID NO: 142757 - DNA, 33 bp, Homo sapien
tcttgacaaatctggtgagttctcaaggagtat

SEQ ID NO: 142758 - DNA, 33 bp, Homo sapien
tcttgacaaatctggttagttctcaaggagtat

SEQ ID NO: 142759 - DNA, 33 bp, Homo sapien
aaagaattcctataccaataagagaaagataca

SEQ ID NO: 142760 - DNA, 33 bp, Homo sapien
aaagaattcctatacccataagagaaagataca

SEQ ID NO: 142761 - DNA, 33 bp, Homo sapien
aggaatttatggtgaacactaagtttttggcct

SEQ ID NO: 142762 - DNA, 33 bp, Homo sapien
aggaatttatggtgaatactaagtttttggcct

SEQ ID NO: 142763 - DNA, 33 bp, Homo sapien
ttagtggtaagccaacaagcaaacgtgttccct

SEQ ID NO: 142764 - DNA, 33 bp, Homo sapien
ttagtggtaagccaacgagcaaacgtgttccct

SEQ ID NO: 142765 - DNA, 33 bp, Homo sapien
tgatggatgccttcagaagcacctactcggtca

SEQ ID NO: 142766 - DNA, 33 bp, Homo sapien
tgatggatgccttcagcagcacctactcggtca

SEQ ID NO: 142767 - DNA, 33 bp, Homo sapien
ggcgaggacgcctctcagaaccacattagcgtc

SEQ ID NO: 142768 - DNA, 33 bp, Homo sapien
ggcgaggacgcctctcggaaccacattagcgtc

SEQ ID NO: 142769 - DNA, 33 bp, Homo sapien
acagttgctaagctaacgagaaaacactaatca

SEQ ID NO: 142770 - DNA, 33 bp, Homo sapien
acagttgctaagctaatgagaaaacactaatca

SEQ ID NO: 142771 - DNA, 33 bp, Homo sapien
atggtgaaataggagcaaaatgacaaaattaca

SEQ ID NO: 142772 - DNA, 33 bp, Homo sapien
atggtgaaataggagcgaaatgacaaaattaca

SEQ ID NO: 142773 - DNA, 33 bp, Homo sapien
taatgtggcagacaagaaaccctgaaatacata

SEQ ID NO: 142774 - DNA, 33 bp, Homo sapien
taatgtggcagacaagtaaccctgaaatacata

SEQ ID NO: 142775 - DNA, 33 bp, Homo sapien
aacagaccagaccatcaagtaaaacagcacact

SEQ ID NO: 142776 - DNA, 33 bp, Homo sapien
aacagaccagaccatcgagtaaaacagcacact

SEQ ID NO: 142777 - DNA, 33 bp, Homo sapien
gattagggttgtaggcgatattgattgctggga

SEQ ID NO: 142778 - DNA, 33 bp, Homo sapien
gattagggttgtaggctatattgattgctggga

SEQ ID NO: 142779 - DNA, 33 bp, Homo sapien
agaaagttatttcaagaccaaattttcagttct

SEQ ID NO: 142780 - DNA, 33 bp, Homo sapien
agaaagttatttcaaggccaaattttcagttct

SEQ ID NO: 142781 - DNA, 33 bp, Homo sapien
tgctggcagttcaagacggtcttttcttccctc

SEQ ID NO: 142782 - DNA, 33 bp, Homo sapien
tgctggcagttcaagatggtcttttcttccctc

SEQ ID NO: 142783 - DNA, 33 bp, Homo sapien
acccgacccaccatgccaaagactctgctagtt

SEQ ID NO: 142784 - DNA, 33 bp, Homo sapien
acccgacccaccatgctaaagactctgctagtt

SEQ ID NO: 142785 - DNA, 33 bp, Homo sapien
agggagatttaaaaccaactgctggtctccttc

SEQ ID NO: 142786 - DNA, 33 bp, Homo sapien
agggagatttaaaacccactgctggtctccttc

SEQ ID NO: 142787 - DNA, 33 bp, Homo sapien
caggatggaggctacacagtactttgttaataa

SEQ ID NO: 142788 - DNA, 33 bp, Homo sapien
caggatggaggctacatagtactttgttaataa

SEQ ID NO: 142789 - DNA, 33 bp, Homo sapien
ccttccctgtctggtaacaaaacaataaacagc

SEQ ID NO: 142790 - DNA, 33 bp, Homo sapien
ccttccctgtctggtaccaaaacaataaacagc

SEQ ID NO: 142791 - DNA, 33 bp, Homo sapien
tccgtgctatcctgtacggcagcctgaggtgat

SEQ ID NO: 142792 - DNA, 33 bp, Homo sapien
tccgtgctatcctgtatggcagcctgaggtgat

SEQ ID NO: 142793 - DNA, 33 bp, Homo sapien
caaactactcatagtcaaaatgcatgttattta

SEQ ID NO: 142794 - DNA, 33 bp, Homo sapien
caaactactcatagtccaaatgcatgttattta

SEQ ID NO: 142795 - DNA, 33 bp, Homo sapien
acactgccagtaagacaagaacctggattcttc

SEQ ID NO: 142796 - DNA, 33 bp, Homo sapien
acactgccagtaagacgagaacctggattcttc

SEQ ID NO: 142797 - DNA, 33 bp, Homo sapien
gagagaggccgaggggaatagaaaaggtgaaag

SEQ ID NO: 142798 - DNA, 33 bp, Homo sapien
gagagaggccgaggggtatagaaaaggtgaaag

SEQ ID NO: 142799 - DNA, 33 bp, Homo sapien
ctcagatcgtttccagcctgaggatgctttacg

SEQ ID NO: 142800 - DNA, 33 bp, Homo sapien
ctcagatcgtttccaggctgaggatgctttacg

SEQ ID NO: 142801 - DNA, 33 bp, Homo sapien
ccagctttattgtggacgaaaacctgctagaga

SEQ ID NO: 142802 - DNA, 33 bp, Homo sapien
ccagctttattgtggatgaaaacctgctagaga

SEQ ID NO: 142803 - DNA, 33 bp, Homo sapien
atcagcagagtcctaccaatgggcttcttcggt

SEQ ID NO: 142804 - DNA, 33 bp, Homo sapien
atcagcagagtcctactaatgggcttcttcggt

SEQ ID NO: 142805 - DNA, 33 bp, Homo sapien
actttacatatatctccacttctgcaaatatat

SEQ ID NO: 142806 - DNA, 33 bp, Homo sapien
actttacatatatctcgacttctgcaaatatat

SEQ ID NO: 142807 - DNA, 33 bp, Homo sapien
ctggaagaagctagaaatggagtaatcaatatc

SEQ ID NO: 142808 - DNA, 33 bp, Homo sapien
ctggaagaagctagaagtggagtaatcaatatc

SEQ ID NO: 142809 - DNA, 33 bp, Homo sapien
aaatggttctgtttccccaacaggacccctgct

SEQ ID NO: 142810 - DNA, 33 bp, Homo sapien
aaatggttctgtttccgcaacaggacccctgct

SEQ ID NO: 142811 - DNA, 33 bp, Homo sapien
taacgagggaattcggcaagaggaaagccactg

SEQ ID NO: 142812 - DNA, 33 bp, Homo sapien
taacgagggaattcggtaagaggaaagccactg

SEQ ID NO: 142813 - DNA, 33 bp, Homo sapien
aaattgcatttctggactatagttttaaaacat

SEQ ID NO: 142814 - DNA, 33 bp, Homo sapien
aaattgcatttctggattatagttttaaaacat

SEQ ID NO: 142815 - DNA, 33 bp, Homo sapien
agtgcacctccagccaatctggtatgctgtccc

SEQ ID NO: 142816 - DNA, 33 bp, Homo sapien
agtgcacctccagccagtctggtatgctgtccc

SEQ ID NO: 142817 - DNA, 33 bp, Homo sapien
aggccacttgtatctacccttcagctcactttc

SEQ ID NO: 142818 - DNA, 33 bp, Homo sapien
aggccacttgtatctatccttcagctcactttc

SEQ ID NO: 142819 - DNA, 33 bp, Homo sapien
gttaatcttggtgcaacctggacattttatatc

SEQ ID NO: 142820 - DNA, 33 bp, Homo sapien
gttaatcttggtgcaatctggacattttatatc

SEQ ID NO: 142821 - DNA, 33 bp, Homo sapien
aaaagtggaatctaaacctgatatcctagcacc

SEQ ID NO: 142822 - DNA, 33 bp, Homo sapien
aaaagtggaatctaaatctgatatcctagcacc

SEQ ID NO: 142823 - DNA, 33 bp, Homo sapien
aagctatacgaattcaatagatagaaactgtac

SEQ ID NO: 142824 - DNA, 33 bp, Homo sapien
aagctatacgaattcagtagatagaaactgtac

SEQ ID NO: 142825 - DNA, 33 bp, Homo sapien
tttatagatgatgtaaatgaaggatatggcttg

SEQ ID NO: 142826 - DNA, 33 bp, Homo sapien
tttatagatgatgtaagtgaaggatatggcttg

SEQ ID NO: 142827 - DNA, 33 bp, Homo sapien
gaaagatgcatgcacaagttgacaaacaaaaag

SEQ ID NO: 142828 - DNA, 33 bp, Homo sapien
gaaagatgcatgcacaggttgacaaacaaaaag

SEQ ID NO: 142829 - DNA, 33 bp, Homo sapien
gcactcaccgctagagacaaagcaggatggccg

SEQ ID NO: 142830 - DNA, 33 bp, Homo sapien
gcactcaccgctagaggcaaagcaggatggccg

SEQ ID NO: 142831 - DNA, 33 bp, Homo sapien
tataaattccagtatacgttctcctaattcatg

SEQ ID NO: 142832 - DNA, 33 bp, Homo sapien
tataaattccagtatatgttctcctaattcatg

SEQ ID NO: 142833 - DNA, 33 bp, Homo sapien
tggaaaaaacgctgtcactgaggctatcaatgt

SEQ ID NO: 142834 - DNA, 33 bp, Homo sapien
tggaaaaaacgctgtcgctgaggctatcaatgt

SEQ ID NO: 142835 - DNA, 33 bp, Homo sapien
caccttgctctctgccaggatgatggatggcca

SEQ ID NO: 142836 - DNA, 33 bp, Homo sapien
caccttgctctctgccgggatgatggatggcca

SEQ ID NO: 142837 - DNA, 33 bp, Homo sapien
tttcatattttggggagaattggttttgtttgt

SEQ ID NO: 142838 - DNA, 33 bp, Homo sapien
tttcatattttggggataattggttttgtttgt

SEQ ID NO: 142839 - DNA, 33 bp, Homo sapien
ttacatatgactattacccaattccagagtaac

SEQ ID NO: 142840 - DNA, 33 bp, Homo sapien
ttacatatgactattagccaattccagagtaac

SEQ ID NO: 142841 - DNA, 33 bp, Homo sapien
cactccagcccggggacgtgtgctctgatcagc

SEQ ID NO: 142842 - DNA, 33 bp, Homo sapien
cactccagcccggggaggtgtgctctgatcagc

SEQ ID NO: 142843 - DNA, 33 bp, Homo sapien
tgcatttgactcgagcaacaatcacagagaggt

SEQ ID NO: 142844 - DNA, 33 bp, Homo sapien
tgcatttgactcgagcgacaatcacagagaggt

SEQ ID NO: 142845 - DNA, 33 bp, Homo sapien
tctgggtatctgtggaagtaacgatgcggtgaa

SEQ ID NO: 142846 - DNA, 33 bp, Homo sapien
tctgggtatctgtggaggtaacgatgcggtgaa

SEQ ID NO: 142847 - DNA, 33 bp, Homo sapien
gagtggggtcacttcccgatgaggtgcacccgt

SEQ ID NO: 142848 - DNA, 33 bp, Homo sapien
gagtggggtcacttcctgatgaggtgcacccgt

SEQ ID NO: 142849 - DNA, 33 bp, Homo sapien
cgctcccagccggagaacactaaaacagctgtc

SEQ ID NO: 142850 - DNA, 33 bp, Homo sapien
cgctcccagccggagagcactaaaacagctgtc

SEQ ID NO: 142851 - DNA, 33 bp, Homo sapien
tgtgggcagtgagttgaaaccctgtctgtatca

SEQ ID NO: 142852 - DNA, 33 bp, Homo sapien
tgtgggcagtgagttgcaaccctgtctgtatca

SEQ ID NO: 142853 - DNA, 33 bp, Homo sapien
atggaacaaatttggaacacctactttgggcca

SEQ ID NO: 142854 - DNA, 33 bp, Homo sapien
atggaacaaatttggagcacctactttgggcca

SEQ ID NO: 142855 - DNA, 33 bp, Homo sapien
gatctccatttctttcacttccaatgctatagg

SEQ ID NO: 142856 - DNA, 33 bp, Homo sapien
gatctccatttctttcgcttccaatgctatagg

SEQ ID NO: 142857 - DNA, 33 bp, Homo sapien
ccgtgttcacacttggcatgtataaggagagct

SEQ ID NO: 142858 - DNA, 33 bp, Homo sapien
ccgtgttcacacttgggatgtataaggagagct

SEQ ID NO: 142859 - DNA, 33 bp, Homo sapien
cccccaggaggttgaaactgactctatctctac

SEQ ID NO: 142860 - DNA, 33 bp, Homo sapien
cccccaggaggttgaagctgactctatctctac

SEQ ID NO: 142861 - DNA, 33 bp, Homo sapien
tgttgttgactttgaaaatgcagggagccacat

SEQ ID NO: 142862 - DNA, 33 bp, Homo sapien
tgttgttgactttgaagatgcagggagccacat

SEQ ID NO: 142863 - DNA, 33 bp, Homo sapien
agaacacacttgagacagtacaaaacacttcag

SEQ ID NO: 142864 - DNA, 33 bp, Homo sapien
agaacacacttgagacggtacaaaacacttcag

SEQ ID NO: 142865 - DNA, 33 bp, Homo sapien
aagataagagatatgacggttttgtgaagtttg

SEQ ID NO: 142866 - DNA, 33 bp, Homo sapien
aagataagagatatgatggttttgtgaagtttg

SEQ ID NO: 142867 - DNA, 33 bp, Homo sapien
ataagaagagaaggccccaaatccgtagatgtg

SEQ ID NO: 142868 - DNA, 33 bp, Homo sapien
ataagaagagaaggcctcaaatccgtagatgtg

SEQ ID NO: 142869 - DNA, 33 bp, Homo sapien
ccctaaaagctgactccgagagaagtaggtgag

SEQ ID NO: 142870 - DNA, 33 bp, Homo sapien
ccctaaaagctgactctgagagaagtaggtgag

SEQ ID NO: 142871 - DNA, 33 bp, Homo sapien
ggagtggaagatttgaggtctctgaggcctgct

SEQ ID NO: 142872 - DNA, 33 bp, Homo sapien
ggagtggaagatttgatgtctctgaggcctgct

SEQ ID NO: 142873 - DNA, 33 bp, Homo sapien
gctgccacattaaaggaaaatatccctcagact

SEQ ID NO: 142874 - DNA, 33 bp, Homo sapien
gctgccacattaaagggaaatatccctcagact

SEQ ID NO: 142875 - DNA, 33 bp, Homo sapien
acaaagaaaagttgacaagagcagagtaaacaa

SEQ ID NO: 142876 - DNA, 33 bp, Homo sapien
acaaagaaaagttgacgagagcagagtaaacaa

SEQ ID NO: 142877 - DNA, 33 bp, Homo sapien
aaaccaaccagcctcacaaatattgtccaggat

SEQ ID NO: 142878 - DNA, 33 bp, Homo sapien
aaaccaaccagcctcataaatattgtccaggat

SEQ ID NO: 142879 - DNA, 33 bp, Homo sapien
gctggttggtttatccaaaaggtctattttgtc

SEQ ID NO: 142880 - DNA, 33 bp, Homo sapien
gctggttggtttatccgaaaggtctattttgtc

SEQ ID NO: 142881 - DNA, 33 bp, Homo sapien
catgagctcagtggttaaacaatattctttggc

SEQ ID NO: 142882 - DNA, 33 bp, Homo sapien
catgagctcagtggttcaacaatattctttggc

SEQ ID NO: 142883 - DNA, 33 bp, Homo sapien
ctatggcaaatgaggacgtgtctctgtcatgag

SEQ ID NO: 142884 - DNA, 33 bp, Homo sapien
ctatggcaaatgaggatgtgtctctgtcatgag

SEQ ID NO: 142885 - DNA, 33 bp, Homo sapien
tgtgtgactcgttgaccgtagctgctcctatga

SEQ ID NO: 142886 - DNA, 33 bp, Homo sapien
tgtgtgactcgttgactgtagctgctcctatga

SEQ ID NO: 142887 - DNA, 33 bp, Homo sapien
cagacaagtttttccacgtcagattcccaaccc

SEQ ID NO: 142888 - DNA, 33 bp, Homo sapien
cagacaagtttttccatgtcagattcccaaccc

SEQ ID NO: 142889 - DNA, 33 bp, Homo sapien
aaagcttctgctcattaaaaaaaaaacaccata

SEQ ID NO: 142890 - DNA, 33 bp, Homo sapien
aaagcttctgctcattgaaaaaaaaacaccata

SEQ ID NO: 142891 - DNA, 33 bp, Homo sapien
gatacctgctgtcataacactttgcacaatggc

SEQ ID NO: 142892 - DNA, 33 bp, Homo sapien
gatacctgctgtcatagcactttgcacaatggc

SEQ ID NO: 142893 - DNA, 33 bp, Homo sapien
tagcttttgacccaagaaggacaaatcctaggg

SEQ ID NO: 142894 - DNA, 33 bp, Homo sapien
tagcttttgacccaagtaggacaaatcctaggg

SEQ ID NO: 142895 - DNA, 33 bp, Homo sapien
aagctatgaacatttacagggctgctgagatat

SEQ ID NO: 142896 - DNA, 33 bp, Homo sapien
aagctatgaacatttatagggctgctgagatat

SEQ ID NO: 142897 - DNA, 33 bp, Homo sapien
cttcgctcattttgtcaagagaaatggaaactc

SEQ ID NO: 142898 - DNA, 33 bp, Homo sapien
cttcgctcattttgtcgagagaaatggaaactc

SEQ ID NO: 142899 - DNA, 33 bp, Homo sapien
atggctcctcaaagaaagaaaaatcgaattacc

SEQ ID NO: 142900 - DNA, 33 bp, Homo sapien
atggctcctcaaagaacgaaaaatcgaattacc

SEQ ID NO: 142901 - DNA, 33 bp, Homo sapien
ttattttgatgttctgaatcagttcatagttta

SEQ ID NO: 142902 - DNA, 33 bp, Homo sapien
ttattttgatgttctggatcagttcatagttta

SEQ ID NO: 142903 - DNA, 33 bp, Homo sapien
gtcatgcttaaagtcactcagaaaaaaaaatct

SEQ ID NO: 142904 - DNA, 33 bp, Homo sapien
gtcatgcttaaagtcattcagaaaaaaaaatct

SEQ ID NO: 142905 - DNA, 33 bp, Homo sapien
ttgtcttttgttcaatgaatattttgttcaaca

SEQ ID NO: 142906 - DNA, 33 bp, Homo sapien
ttgtcttttgttcaattaatattttgttcaaca

SEQ ID NO: 142907 - DNA, 33 bp, Homo sapien
caaatatacaaataaacaatgccatcgcattgt

SEQ ID NO: 142908 - DNA, 33 bp, Homo sapien
caaatatacaaataaataatgccatcgcattgt

SEQ ID NO: 142909 - DNA, 33 bp, Homo sapien
gacctggatgtttctcaaggataaaacaggaat

SEQ ID NO: 142910 - DNA, 33 bp, Homo sapien
gacctggatgtttctcgaggataaaacaggaat

SEQ ID NO: 142911 - DNA, 33 bp, Homo sapien
gtgccaggcggtaacacctagaatatcaaagcc

SEQ ID NO: 142912 - DNA, 33 bp, Homo sapien
gtgccaggcggtaacatctagaatatcaaagcc

SEQ ID NO: 142913 - DNA, 33 bp, Homo sapien
gcgtcatcagtcctcaataactcttctgtcccc

SEQ ID NO: 142914 - DNA, 33 bp, Homo sapien
gcgtcatcagtcctcagtaactcttctgtcccc

SEQ ID NO: 142915 - DNA, 33 bp, Homo sapien
aggggagaagtcctgaaagaggaaattacccaa

SEQ ID NO: 142916 - DNA, 33 bp, Homo sapien
aggggagaagtcctgagagaggaaattacccaa

SEQ ID NO: 142917 - DNA, 33 bp, Homo sapien
atgtgcataacacataaacttttcaacattact

SEQ ID NO: 142918 - DNA, 33 bp, Homo sapien
atgtgcataacacatagacttttcaacattact

SEQ ID NO: 142919 - DNA, 33 bp, Homo sapien
agtaattatcaggttcacacgtaaggtgctgag

SEQ ID NO: 142920 - DNA, 33 bp, Homo sapien
agtaattatcaggttcgcacgtaaggtgctgag

SEQ ID NO: 142921 - DNA, 33 bp, Homo sapien
tgaggccgtgtagaccaactctgtcatctggcc

SEQ ID NO: 142922 - DNA, 33 bp, Homo sapien
tgaggccgtgtagacccactctgtcatctggcc

SEQ ID NO: 142923 - DNA, 33 bp, Homo sapien
aagttaggctcctccacgaacaagaagcaacac

SEQ ID NO: 142924 - DNA, 33 bp, Homo sapien
aagttaggctcctccatgaacaagaagcaacac

SEQ ID NO: 142925 - DNA, 33 bp, Homo sapien
cagtgctacgtcaaaacagccccagagtccaca

SEQ ID NO: 142926 - DNA, 33 bp, Homo sapien
cagtgctacgtcaaaagagccccagagtccaca

SEQ ID NO: 142927 - DNA, 33 bp, Homo sapien
cctttgtggaagctgaatattaaaacagttgaa

SEQ ID NO: 142928 - DNA, 33 bp, Homo sapien
cctttgtggaagctgagtattaaaacagttgaa

SEQ ID NO: 142929 - DNA, 33 bp, Homo sapien
cacaatgccacttggtaaagtcagctccatcct

SEQ ID NO: 142930 - DNA, 33 bp, Homo sapien
cacaatgccacttggtgaagtcagctccatcct

SEQ ID NO: 142931 - DNA, 33 bp, Homo sapien
ctgagtgctgtgcccaatacaagaaggatggag

SEQ ID NO: 142932 - DNA, 33 bp, Homo sapien
ctgagtgctgtgcccagtacaagaaggatggag

SEQ ID NO: 142933 - DNA, 33 bp, Homo sapien
ttggtgttctcggcgtcaagggactgcagccgc

SEQ ID NO: 142934 - DNA, 33 bp, Homo sapien
ttggtgttctcggcgttaagggactgcagccgc

SEQ ID NO: 142935 - DNA, 33 bp, Homo sapien
aaatttcctttgaagcactggaacttgccacca

SEQ ID NO: 142936 - DNA, 33 bp, Homo sapien
aaatttcctttgaagctctggaacttgccacca

SEQ ID NO: 142937 - DNA, 33 bp, Homo sapien
aaaactttccctttccagcttcacgctctcccc

SEQ ID NO: 142938 - DNA, 33 bp, Homo sapien
aaaactttccctttccggcttcacgctctcccc

SEQ ID NO: 142939 - DNA, 33 bp, Homo sapien
ggcccttagatgtgacaccggagatgcacaggt

SEQ ID NO: 142940 - DNA, 33 bp, Homo sapien
ggcccttagatgtgacgccggagatgcacaggt

SEQ ID NO: 142941 - DNA, 33 bp, Homo sapien
gtgatatttgttgaagcagagattggctcagtg

SEQ ID NO: 142942 - DNA, 33 bp, Homo sapien
gtgatatttgttgaaggagagattggctcagtg

SEQ ID NO: 142943 - DNA, 33 bp, Homo sapien
tcaagacaagaaagacaaaaccagttgaaagat

SEQ ID NO: 142944 - DNA, 33 bp, Homo sapien
tcaagacaagaaagacgaaaccagttgaaagat

SEQ ID NO: 142945 - DNA, 33 bp, Homo sapien
accacattgagccttaccatgttgccttctgca

SEQ ID NO: 142946 - DNA, 33 bp, Homo sapien
accacattgagccttatcatgttgccttctgca

SEQ ID NO: 142947 - DNA, 33 bp, Homo sapien
tttcttttcctacccccctcatgtttgctttgg

SEQ ID NO: 142948 - DNA, 33 bp, Homo sapien
tttcttttcctacccctctcatgtttgctttgg

SEQ ID NO: 142949 - DNA, 33 bp, Homo sapien
atccaaaagatgaattcaatgccatgttttgtc

SEQ ID NO: 142950 - DNA, 33 bp, Homo sapien
atccaaaagatgaattgaatgccatgttttgtc

SEQ ID NO: 142951 - DNA, 33 bp, Homo sapien
aataaaatgagtacaacgtcagtatcagtgttc

SEQ ID NO: 142952 - DNA, 33 bp, Homo sapien
aataaaatgagtacaatgtcagtatcagtgttc

SEQ ID NO: 142953 - DNA, 33 bp, Homo sapien
agagcactgaaccctgcaggccagaaaccatga

SEQ ID NO: 142954 - DNA, 33 bp, Homo sapien
agagcactgaaccctgtaggccagaaaccatga

SEQ ID NO: 142955 - DNA, 33 bp, Homo sapien
caccgacatgcctgaacagcagacattagtgac

SEQ ID NO: 142956 - DNA, 33 bp, Homo sapien
caccgacatgcctgaagagcagacattagtgac

SEQ ID NO: 142957 - DNA, 33 bp, Homo sapien
ggaaaactcacaaacactctaagaagaattctg

SEQ ID NO: 142958 - DNA, 33 bp, Homo sapien
ggaaaactcacaaacagtctaagaagaattctg

SEQ ID NO: 142959 - DNA, 33 bp, Homo sapien
atttgcataccttttgaatatgtgaatacaaag

SEQ ID NO: 142960 - DNA, 33 bp, Homo sapien
atttgcataccttttggatatgtgaatacaaag

SEQ ID NO: 142961 - DNA, 33 bp, Homo sapien
caaaataccagctcataaagtattagtgtattt

SEQ ID NO: 142962 - DNA, 33 bp, Homo sapien
caaaataccagctcatgaagtattagtgtattt

SEQ ID NO: 142963 - DNA, 33 bp, Homo sapien
aattttaatgccaagcactcattaataattaac

SEQ ID NO: 142964 - DNA, 33 bp, Homo sapien
aattttaatgccaagctctcattaataattaac

SEQ ID NO: 142965 - DNA, 33 bp, Homo sapien
ggcctggatctaatcacagggagacggtatgtt

SEQ ID NO: 142966 - DNA, 33 bp, Homo sapien
ggcctggatctaatcatagggagacggtatgtt

SEQ ID NO: 142967 - DNA, 33 bp, Homo sapien
ttatatgataggttacagaaagactttcccagc

SEQ ID NO: 142968 - DNA, 33 bp, Homo sapien
ttatatgataggttacggaaagactttcccagc

SEQ ID NO: 142969 - DNA, 33 bp, Homo sapien
tgagcagatgtcctcccgagagtgcagactgac

SEQ ID NO: 142970 - DNA, 33 bp, Homo sapien
tgagcagatgtcctcctgagagtgcagactgac

SEQ ID NO: 142971 - DNA, 33 bp, Homo sapien
gaaaagcctaactaccaactcacgggctaggac

SEQ ID NO: 142972 - DNA, 33 bp, Homo sapien
gaaaagcctaactaccgactcacgggctaggac

SEQ ID NO: 142973 - DNA, 33 bp, Homo sapien
acagaaaacaagatcaatccttgccatgagact

SEQ ID NO: 142974 - DNA, 33 bp, Homo sapien
acagaaaacaagatcagtccttgccatgagact

SEQ ID NO: 142975 - DNA, 33 bp, Homo sapien
ggacaaaccaaatgcaaaaaggccaggcaggct

SEQ ID NO: 142976 - DNA, 33 bp, Homo sapien
ggacaaaccaaatgcagaaaggccaggcaggct

SEQ ID NO: 142977 - DNA, 33 bp, Homo sapien
ctatgtgacaggaaaacgcatgcaggtgacagc

SEQ ID NO: 142978 - DNA, 33 bp, Homo sapien
ctatgtgacaggaaaaggcatgcaggtgacagc

SEQ ID NO: 142979 - DNA, 33 bp, Homo sapien
gtacaagaactgattaagccgtggactttccca

SEQ ID NO: 142980 - DNA, 33 bp, Homo sapien
gtacaagaactgattaggccgtggactttccca

SEQ ID NO: 142981 - DNA, 33 bp, Homo sapien
cagagaagcacagggccaaccgtctttactagc

SEQ ID NO: 142982 - DNA, 33 bp, Homo sapien
cagagaagcacagggctaaccgtctttactagc

SEQ ID NO: 142983 - DNA, 33 bp, Homo sapien
tgggctaaacctcacaaagtatagacatacaca

SEQ ID NO: 142984 - DNA, 33 bp, Homo sapien
tgggctaaacctcacacagtatagacatacaca

SEQ ID NO: 142985 - DNA, 33 bp, Homo sapien
catacacaaatacaaacaggctatgctcccaga

SEQ ID NO: 142986 - DNA, 33 bp, Homo sapien
catacacaaatacaaataggctatgctcccaga

SEQ ID NO: 142987 - DNA, 33 bp, Homo sapien
aagggtccagtgaataacaagggatttcggtgt

SEQ ID NO: 142988 - DNA, 33 bp, Homo sapien
aagggtccagtgaatagcaagggatttcggtgt

SEQ ID NO: 142989 - DNA, 33 bp, Homo sapien
tccctgggaggtttgactaacttgtcccaggtc

SEQ ID NO: 142990 - DNA, 33 bp, Homo sapien
tccctgggaggtttgagtaacttgtcccaggtc

SEQ ID NO: 142991 - DNA, 33 bp, Homo sapien
tagggactggctccaccgaacactatgggtagt

SEQ ID NO: 142992 - DNA, 33 bp, Homo sapien
tagggactggctccactgaacactatgggtagt

SEQ ID NO: 142993 - DNA, 33 bp, Homo sapien
aagcttgcttggggcacggtgacgggggacaca

SEQ ID NO: 142994 - DNA, 33 bp, Homo sapien
aagcttgcttggggcatggtgacgggggacaca

SEQ ID NO: 142995 - DNA, 33 bp, Homo sapien
ttgtaaaagaaatctaaatctacaaaggaaatc

SEQ ID NO: 142996 - DNA, 33 bp, Homo sapien
ttgtaaaagaaatctacatctacaaaggaaatc

SEQ ID NO: 142997 - DNA, 33 bp, Homo sapien
ttgtcgttttttaatccgacacaactccccagt

SEQ ID NO: 142998 - DNA, 33 bp, Homo sapien
ttgtcgttttttaatctgacacaactccccagt

SEQ ID NO: 142999 - DNA, 33 bp, Homo sapien
tggcagatcttggtgacataggagatgaggaag

SEQ ID NO: 143000 - DNA, 33 bp, Homo sapien
tggcagatcttggtgatataggagatgaggaag

SEQ ID NO: 143001 - DNA, 33 bp, Homo sapien
gttattctatctctgcacttttctcttaatagt

SEQ ID NO: 143002 - DNA, 33 bp, Homo sapien
gttattctatctctgcgcttttctcttaatagt

SEQ ID NO: 143003 - DNA, 33 bp, Homo sapien
cacatttgcaatattacgtcagttagaaacaag

SEQ ID NO: 143004 - DNA, 33 bp, Homo sapien
cacatttgcaatattatgtcagttagaaacaag

SEQ ID NO: 143005 - DNA, 33 bp, Homo sapien
aaaatatattctggacacagttcgctttatcac

SEQ ID NO: 143006 - DNA, 33 bp, Homo sapien
aaaatatattctggacgcagttcgctttatcac

SEQ ID NO: 143007 - DNA, 33 bp, Homo sapien
aacattagcagcaatcactttagcattttgtgt

SEQ ID NO: 143008 - DNA, 33 bp, Homo sapien
aacattagcagcaatcgctttagcattttgtgt

SEQ ID NO: 143009 - DNA, 33 bp, Homo sapien
aggttcttgtgcataacatcaagcagtggggta

SEQ ID NO: 143010 - DNA, 33 bp, Homo sapien
aggttcttgtgcataagatcaagcagtggggta

SEQ ID NO: 143011 - DNA, 33 bp, Homo sapien
gtatcctaccatttctcactgtgaatatatttt

SEQ ID NO: 143012 - DNA, 33 bp, Homo sapien
gtatcctaccatttcttactgtgaatatatttt

SEQ ID NO: 143013 - DNA, 33 bp, Homo sapien
agggtacgaacttacaaagatgctatgattata

SEQ ID NO: 143014 - DNA, 33 bp, Homo sapien
agggtacgaacttacacagatgctatgattata

SEQ ID NO: 143015 - DNA, 33 bp, Homo sapien
ccaactctattttacccaggagtccatccaaca

SEQ ID NO: 143016 - DNA, 33 bp, Homo sapien
ccaactctattttacctaggagtccatccaaca

SEQ ID NO: 143017 - DNA, 33 bp, Homo sapien
ataattgaagctgggtaacagatacaagaggat

SEQ ID NO: 143018 - DNA, 33 bp, Homo sapien
ataattgaagctgggtgacagatacaagaggat

SEQ ID NO: 143019 - DNA, 33 bp, Homo sapien
cctcagtgaacacacacacgtgtcagcaatgga

SEQ ID NO: 143020 - DNA, 33 bp, Homo sapien
cctcagtgaacacacatacgtgtcagcaatgga

SEQ ID NO: 143021 - DNA, 33 bp, Homo sapien
ctttttttttaaatgaacaatgcagtaaatctg

SEQ ID NO: 143022 - DNA, 33 bp, Homo sapien
ctttttttttaaatgagcaatgcagtaaatctg

SEQ ID NO: 143023 - DNA, 33 bp, Homo sapien
acataggacattactacagttttcagcagttta

SEQ ID NO: 143024 - DNA, 33 bp, Homo sapien
acataggacattactatagttttcagcagttta

SEQ ID NO: 143025 - DNA, 33 bp, Homo sapien
gaagttcttaaatccacaatccaaacatcaggt

SEQ ID NO: 143026 - DNA, 33 bp, Homo sapien
gaagttcttaaatccataatccaaacatcaggt

SEQ ID NO: 143027 - DNA, 33 bp, Homo sapien
ttctttcttcttatccaactaaactccatgtat

SEQ ID NO: 143028 - DNA, 33 bp, Homo sapien
ttctttcttcttatccgactaaactccatgtat

SEQ ID NO: 143029 - DNA, 33 bp, Homo sapien
tttctatctcccaaaccgtaccatatgatggct

SEQ ID NO: 143030 - DNA, 33 bp, Homo sapien
tttctatctcccaaactgtaccatatgatggct

SEQ ID NO: 143031 - DNA, 33 bp, Homo sapien
tggtttatgttacttccatcatcatataccagg

SEQ ID NO: 143032 - DNA, 33 bp, Homo sapien
tggtttatgttacttctatcatcatataccagg

SEQ ID NO: 143033 - DNA, 33 bp, Homo sapien
tgtaatgtgaaaggaacaaatgcattgaaagga

SEQ ID NO: 143034 - DNA, 33 bp, Homo sapien
tgtaatgtgaaaggaataaatgcattgaaagga

SEQ ID NO: 143035 - DNA, 33 bp, Homo sapien
agaagctacttacctacatgtgaatgtgccatt

SEQ ID NO: 143036 - DNA, 33 bp, Homo sapien
agaagctacttacctatatgtgaatgtgccatt

SEQ ID NO: 143037 - DNA, 33 bp, Homo sapien
aaatccacgctgtgaaatgtaacctcctgtgtg

SEQ ID NO: 143038 - DNA, 33 bp, Homo sapien
aaatccacgctgtgaagtgtaacctcctgtgtg

SEQ ID NO: 143039 - DNA, 33 bp, Homo sapien
ctctgctggctcctggaaagtgaccctgcctaa

SEQ ID NO: 143040 - DNA, 33 bp, Homo sapien
ctctgctggctcctggtaagtgaccctgcctaa

SEQ ID NO: 143041 - DNA, 33 bp, Homo sapien
tggaagaacttcagtgcatttcgcggagccttc

SEQ ID NO: 143042 - DNA, 33 bp, Homo sapien
tggaagaacttcagtgtatttcgcggagccttc

SEQ ID NO: 143043 - DNA, 33 bp, Homo sapien
ctgagaaatgactctaagcagattgctcacaca

SEQ ID NO: 143044 - DNA, 33 bp, Homo sapien
ctgagaaatgactctaggcagattgctcacaca

SEQ ID NO: 143045 - DNA, 33 bp, Homo sapien
aaaacagtcaacgcagaattctatatccagcaa

SEQ ID NO: 143046 - DNA, 33 bp, Homo sapien
aaaacagtcaacgcaggattctatatccagcaa

SEQ ID NO: 143047 - DNA, 33 bp, Homo sapien
ccccaccaaatctggaatagaaggatcgatttt

SEQ ID NO: 143048 - DNA, 33 bp, Homo sapien
ccccaccaaatctggagtagaaggatcgatttt

SEQ ID NO: 143049 - DNA, 33 bp, Homo sapien
tcgtacccctcacttacgccatgtcattcttgc

SEQ ID NO: 143050 - DNA, 33 bp, Homo sapien
tcgtacccctcacttatgccatgtcattcttgc

SEQ ID NO: 143051 - DNA, 33 bp, Homo sapien
gggtcctggagagacactaagcaagaatgacat

SEQ ID NO: 143052 - DNA, 33 bp, Homo sapien
gggtcctggagagacattaagcaagaatgacat

SEQ ID NO: 143053 - DNA, 33 bp, Homo sapien
ctggagaagaaggtagcagaaagggcggtgaac

SEQ ID NO: 143054 - DNA, 33 bp, Homo sapien
ctggagaagaaggtaggagaaagggcggtgaac

SEQ ID NO: 143055 - DNA, 33 bp, Homo sapien
agcaaactgaatggcaatgaaacaaactggaga

SEQ ID NO: 143056 - DNA, 33 bp, Homo sapien
agcaaactgaatggcattgaaacaaactggaga

SEQ ID NO: 143057 - DNA, 33 bp, Homo sapien
gcactgtttctgcagacgtgcctggtaggctgg

SEQ ID NO: 143058 - DNA, 33 bp, Homo sapien
gcactgtttctgcagatgtgcctggtaggctgg

SEQ ID NO: 143059 - DNA, 33 bp, Homo sapien
gtgcattttatgcccacgatgtcatcccctcct

SEQ ID NO: 143060 - DNA, 33 bp, Homo sapien
gtgcattttatgcccatgatgtcatcccctcct

SEQ ID NO: 143061 - DNA, 33 bp, Homo sapien
tttgatacagtgatgaaattcatacccattcag

SEQ ID NO: 143062 - DNA, 33 bp, Homo sapien
tttgatacagtgatgacattcatacccattcag

SEQ ID NO: 143063 - DNA, 33 bp, Homo sapien
agttaagaaaagtgtcacaggctaaggaactgg

SEQ ID NO: 143064 - DNA, 33 bp, Homo sapien
agttaagaaaagtgtcgcaggctaaggaactgg

SEQ ID NO: 143065 - DNA, 33 bp, Homo sapien
ttcatgaagagtttcaaaataacatttcaaact

SEQ ID NO: 143066 - DNA, 33 bp, Homo sapien
ttcatgaagagtttcagaataacatttcaaact

SEQ ID NO: 143067 - DNA, 33 bp, Homo sapien
aaatatttcaaacacaataactgctctatttaa

SEQ ID NO: 143068 - DNA, 33 bp, Homo sapien
aaatatttcaaacacactaactgctctatttaa

SEQ ID NO: 143069 - DNA, 33 bp, Homo sapien
ttaggcctttgaggaacgactgcactgttttcc

SEQ ID NO: 143070 - DNA, 33 bp, Homo sapien
ttaggcctttgaggaatgactgcactgttttcc

SEQ ID NO: 143071 - DNA, 33 bp, Homo sapien
tagaaacaaacatccccctgcagcaaggaggcc

SEQ ID NO: 143072 - DNA, 33 bp, Homo sapien
tagaaacaaacatccctctgcagcaaggaggcc

SEQ ID NO: 143073 - DNA, 33 bp, Homo sapien
ccctctttgctgggaaccgtcatgttgtacata

SEQ ID NO: 143074 - DNA, 33 bp, Homo sapien
ccctctttgctgggaatcgtcatgttgtacata

SEQ ID NO: 143075 - DNA, 33 bp, Homo sapien
acatcgcttctgatggccaggatgccgacactc

SEQ ID NO: 143076 - DNA, 33 bp, Homo sapien
acatcgcttctgatggtcaggatgccgacactc

SEQ ID NO: 143077 - DNA, 33 bp, Homo sapien
ggacaaatcaggtccccaataggagctgagtgt

SEQ ID NO: 143078 - DNA, 33 bp, Homo sapien
ggacaaatcaggtccctaataggagctgagtgt

SEQ ID NO: 143079 - DNA, 33 bp, Homo sapien
ccatgacacaattcaaatatgtcagttgataca

SEQ ID NO: 143080 - DNA, 33 bp, Homo sapien
ccatgacacaattcaagtatgtcagttgataca

SEQ ID NO: 143081 - DNA, 33 bp, Homo sapien
gggaggagagttggacaaggttggactggggag

SEQ ID NO: 143082 - DNA, 33 bp, Homo sapien
gggaggagagttggacgaggttggactggggag

SEQ ID NO: 143083 - DNA, 33 bp, Homo sapien
caacagggattgaagacgctgcaaatgtactgg

SEQ ID NO: 143084 - DNA, 33 bp, Homo sapien
caacagggattgaagaggctgcaaatgtactgg

SEQ ID NO: 143085 - DNA, 33 bp, Homo sapien
cttctgttatgttatcactggaaatcttgtttc

SEQ ID NO: 143086 - DNA, 33 bp, Homo sapien
cttctgttatgttatcgctggaaatcttgtttc

SEQ ID NO: 143087 - DNA, 33 bp, Homo sapien
cctgctctgcgacatccaaaaggtgtggctgag

SEQ ID NO: 143088 - DNA, 33 bp, Homo sapien
cctgctctgcgacatctaaaaggtgtggctgag

SEQ ID NO: 143089 - DNA, 33 bp, Homo sapien
aacacatctgctatgcactggcccgaggcagca

SEQ ID NO: 143090 - DNA, 33 bp, Homo sapien
aacacatctgctatgcgctggcccgaggcagca

SEQ ID NO: 143091 - DNA, 33 bp, Homo sapien
aagtggaaatccagagacatagaaaagataaac

SEQ ID NO: 143092 - DNA, 33 bp, Homo sapien
aagtggaaatccagagtcatagaaaagataaac

SEQ ID NO: 143093 - DNA, 33 bp, Homo sapien
ggtcagaagagacaaactgtgccaagtgcccag

SEQ ID NO: 143094 - DNA, 33 bp, Homo sapien
ggtcagaagagacaaagtgtgccaagtgcccag

SEQ ID NO: 143095 - DNA, 33 bp, Homo sapien
caggtacgtggccgccacaagctcggcatcagg

SEQ ID NO: 143096 - DNA, 33 bp, Homo sapien
caggtacgtggccgccgcaagctcggcatcagg

SEQ ID NO: 143097 - DNA, 33 bp, Homo sapien
ccaaaggagcagagaacgtccgtagaccccagg

SEQ ID NO: 143098 - DNA, 33 bp, Homo sapien
ccaaaggagcagagaatgtccgtagaccccagg

SEQ ID NO: 143099 - DNA, 33 bp, Homo sapien
tggtatggtctcacttacaatggaatatcatcc

SEQ ID NO: 143100 - DNA, 33 bp, Homo sapien
tggtatggtctcacttgcaatggaatatcatcc

SEQ ID NO: 143101 - DNA, 33 bp, Homo sapien
tacctatttgtgtcgtaacaataaaaaatgcaa

SEQ ID NO: 143102 - DNA, 33 bp, Homo sapien
tacctatttgtgtcgtgacaataaaaaatgcaa

SEQ ID NO: 143103 - DNA, 33 bp, Homo sapien
gcctctgatgggctgaagtccttttaatatgga

SEQ ID NO: 143104 - DNA, 33 bp, Homo sapien
gcctctgatgggctgaggtccttttaatatgga

SEQ ID NO: 143105 - DNA, 33 bp, Homo sapien
tcctccaacaacccccacacaaattcagcagtc

SEQ ID NO: 143106 - DNA, 33 bp, Homo sapien
tcctccaacaaccccctcacaaattcagcagtc

SEQ ID NO: 143107 - DNA, 33 bp, Homo sapien
atagaaattcaatgtaacgggaaagtccacact

SEQ ID NO: 143108 - DNA, 33 bp, Homo sapien
atagaaattcaatgtagcgggaaagtccacact

SEQ ID NO: 143109 - DNA, 33 bp, Homo sapien
cacagcactccttccaacctgcaatttattact

SEQ ID NO: 143110 - DNA, 33 bp, Homo sapien
cacagcactccttccatcctgcaatttattact

SEQ ID NO: 143111 - DNA, 33 bp, Homo sapien
gatggctcccatgaaacgacaatcccctgatga

SEQ ID NO: 143112 - DNA, 33 bp, Homo sapien
gatggctcccatgaaaggacaatcccctgatga

SEQ ID NO: 143113 - DNA, 33 bp, Homo sapien
gtctctgaagtcggtagcttgggggtttgtagt

SEQ ID NO: 143114 - DNA, 33 bp, Homo sapien
gtctctgaagtcggtatcttgggggtttgtagt

SEQ ID NO: 143115 - DNA, 33 bp, Homo sapien
ctcttccattgaatgaagcaaaaagtcatcctg

SEQ ID NO: 143116 - DNA, 33 bp, Homo sapien
ctcttccattgaatgaggcaaaaagtcatcctg

SEQ ID NO: 143117 - DNA, 33 bp, Homo sapien
ttataaaccagctataacttattcttgctggct

SEQ ID NO: 143118 - DNA, 33 bp, Homo sapien
ttataaaccagctatatcttattcttgctggct

SEQ ID NO: 143119 - DNA, 33 bp, Homo sapien
aggggaaccagctcccaatgcccttggcttacc

SEQ ID NO: 143120 - DNA, 33 bp, Homo sapien
aggggaaccagctcccgatgcccttggcttacc

SEQ ID NO: 143121 - DNA, 33 bp, Homo sapien
attgcaggaatatccaacagaatttttaaatat

SEQ ID NO: 143122 - DNA, 33 bp, Homo sapien
attgcaggaatatccagcagaatttttaaatat

SEQ ID NO: 143123 - DNA, 33 bp, Homo sapien
tgctcacggtgaaactcaacttacctttgagga

SEQ ID NO: 143124 - DNA, 33 bp, Homo sapien
tgctcacggtgaaactgaacttacctttgagga

SEQ ID NO: 143125 - DNA, 33 bp, Homo sapien
cctttcctaaccgaaactggagctcaacttaca

SEQ ID NO: 143126 - DNA, 33 bp, Homo sapien
cctttcctaaccgaaattggagctcaacttaca

SEQ ID NO: 143127 - DNA, 33 bp, Homo sapien
tcggccaggtgtcagacgctgtatcctgtgtgg

SEQ ID NO: 143128 - DNA, 33 bp, Homo sapien
tcggccaggtgtcagaggctgtatcctgtgtgg

SEQ ID NO: 143129 - DNA, 33 bp, Homo sapien
atattacttttacccacgagttgctccaaaaaa

SEQ ID NO: 143130 - DNA, 33 bp, Homo sapien
atattacttttacccaggagttgctccaaaaaa

SEQ ID NO: 143131 - DNA, 33 bp, Homo sapien
gggcaaggggtctttgcatgtctagcctagtgt

SEQ ID NO: 143132 - DNA, 33 bp, Homo sapien
gggcaaggggtctttgtatgtctagcctagtgt

SEQ ID NO: 143133 - DNA, 33 bp, Homo sapien
gtccagaaggtccacaacacctcgagtctataa

SEQ ID NO: 143134 - DNA, 33 bp, Homo sapien
gtccagaaggtccacaccacctcgagtctataa

SEQ ID NO: 143135 - DNA, 33 bp, Homo sapien
tttaaagtgcagtagaacatatgaaggaggaaa

SEQ ID NO: 143136 - DNA, 33 bp, Homo sapien
tttaaagtgcagtagatcatatgaaggaggaaa

SEQ ID NO: 143137 - DNA, 33 bp, Homo sapien
gatctagttttgcccactatcactgagaggcca

SEQ ID NO: 143138 - DNA, 33 bp, Homo sapien
gatctagttttgcccattatcactgagaggcca

SEQ ID NO: 143139 - DNA, 33 bp, Homo sapien
aggcccctgaggatgccatgccttagttggctg

SEQ ID NO: 143140 - DNA, 33 bp, Homo sapien
aggcccctgaggatgctatgccttagttggctg

SEQ ID NO: 143141 - DNA, 33 bp, Homo sapien
acacttggaaagggaaatccacactttactatt

SEQ ID NO: 143142 - DNA, 33 bp, Homo sapien
acacttggaaagggaagtccacactttactatt

SEQ ID NO: 143143 - DNA, 33 bp, Homo sapien
atattcccagagcagcaaggtggccagcataac

SEQ ID NO: 143144 - DNA, 33 bp, Homo sapien
atattcccagagcagcgaggtggccagcataac

SEQ ID NO: 143145 - DNA, 33 bp, Homo sapien
tgagccctttagatgaggtaggtagcatatcag

SEQ ID NO: 143146 - DNA, 33 bp, Homo sapien
tgagccctttagatgatgtaggtagcatatcag

SEQ ID NO: 143147 - DNA, 33 bp, Homo sapien
gaactaaatgtttgtaacctcagagtcctgggt

SEQ ID NO: 143148 - DNA, 33 bp, Homo sapien
gaactaaatgtttgtatcctcagagtcctgggt

SEQ ID NO: 143149 - DNA, 33 bp, Homo sapien
acatttagttcacaaactcgataagcaaatcca

SEQ ID NO: 143150 - DNA, 33 bp, Homo sapien
acatttagttcacaaattcgataagcaaatcca

SEQ ID NO: 143151 - DNA, 33 bp, Homo sapien
agcataacctttgctcaatgataaaattaacct

SEQ ID NO: 143152 - DNA, 33 bp, Homo sapien
agcataacctttgctcgatgataaaattaacct

SEQ ID NO: 143153 - DNA, 33 bp, Homo sapien
ctcaacagaataataaatgtccctgcaacccct

SEQ ID NO: 143154 - DNA, 33 bp, Homo sapien
ctcaacagaataataattgtccctgcaacccct

SEQ ID NO: 143155 - DNA, 33 bp, Homo sapien
gggaatggaaagtgaccgctaatgaatatgaga

SEQ ID NO: 143156 - DNA, 33 bp, Homo sapien
gggaatggaaagtgactgctaatgaatatgaga

SEQ ID NO: 143157 - DNA, 33 bp, Homo sapien
ttaagctacacaataacccattgagatctcagt

SEQ ID NO: 143158 - DNA, 33 bp, Homo sapien
ttaagctacacaataatccattgagatctcagt

SEQ ID NO: 143159 - DNA, 33 bp, Homo sapien
atgttataaaaactcaatcacatttgtttaaac

SEQ ID NO: 143160 - DNA, 33 bp, Homo sapien
atgttataaaaactcagtcacatttgtttaaac

SEQ ID NO: 143161 - DNA, 33 bp, Homo sapien
ttataacataagtcaaaacacagataatttcgc

SEQ ID NO: 143162 - DNA, 33 bp, Homo sapien
ttataacataagtcaatacacagataatttcgc

SEQ ID NO: 143163 - DNA, 33 bp, Homo sapien
aactctcagtggactacaaggaaaggcatttta

SEQ ID NO: 143164 - DNA, 33 bp, Homo sapien
aactctcagtggactagaaggaaaggcatttta

SEQ ID NO: 143165 - DNA, 33 bp, Homo sapien
acaccgagcctggcacgcagtcggggctttggg

SEQ ID NO: 143166 - DNA, 33 bp, Homo sapien
acaccgagcctggcactcagtcggggctttggg

SEQ ID NO: 143167 - DNA, 33 bp, Homo sapien
cacaagccagagtccaactacccaggttcgaat

SEQ ID NO: 143168 - DNA, 33 bp, Homo sapien
cacaagccagagtccagctacccaggttcgaat

SEQ ID NO: 143169 - DNA, 33 bp, Homo sapien
tgttatgggcacattacgtcatatgttgttaga

SEQ ID NO: 143170 - DNA, 33 bp, Homo sapien
tgttatgggcacattatgtcatatgttgttaga

SEQ ID NO: 143171 - DNA, 33 bp, Homo sapien
agtatcttctacaaccagcttggactaaacacg

SEQ ID NO: 143172 - DNA, 33 bp, Homo sapien
agtatcttctacaaccggcttggactaaacacg

SEQ ID NO: 143173 - DNA, 33 bp, Homo sapien
tggtcctcaggtcctacacgctatgactttcat

SEQ ID NO: 143174 - DNA, 33 bp, Homo sapien
tggtcctcaggtcctatacgctatgactttcat

SEQ ID NO: 143175 - DNA, 33 bp, Homo sapien
ggaaggaagtgtttagaagctgatgaaagtcat

SEQ ID NO: 143176 - DNA, 33 bp, Homo sapien
ggaaggaagtgtttaggagctgatgaaagtcat

SEQ ID NO: 143177 - DNA, 33 bp, Homo sapien
acgaaaaacaatgcaaagcctcggactctcctt

SEQ ID NO: 143178 - DNA, 33 bp, Homo sapien
acgaaaaacaatgcaaggcctcggactctcctt

SEQ ID NO: 143179 - DNA, 33 bp, Homo sapien
tgtgcctcttaagcagaatttatatgctgagga

SEQ ID NO: 143180 - DNA, 33 bp, Homo sapien
tgtgcctcttaagcaggatttatatgctgagga

SEQ ID NO: 143181 - DNA, 33 bp, Homo sapien
gtgcacccagtgtgcgaatgaaggaatgaggtg

SEQ ID NO: 143182 - DNA, 33 bp, Homo sapien
gtgcacccagtgtgcgcatgaaggaatgaggtg

SEQ ID NO: 143183 - DNA, 33 bp, Homo sapien
tgcacacacttgcaaacgcacacatttgtcaca

SEQ ID NO: 143184 - DNA, 33 bp, Homo sapien
tgcacacacttgcaaaggcacacatttgtcaca

SEQ ID NO: 143185 - DNA, 33 bp, Homo sapien
aaatgctaaaagcagcaatgtatgtatgaggtg

SEQ ID NO: 143186 - DNA, 33 bp, Homo sapien
aaatgctaaaagcagcgatgtatgtatgaggtg

SEQ ID NO: 143187 - DNA, 33 bp, Homo sapien
ctggtcccttacttcaagagaaagctagtcaga

SEQ ID NO: 143188 - DNA, 33 bp, Homo sapien
ctggtcccttacttcaggagaaagctagtcaga

SEQ ID NO: 143189 - DNA, 33 bp, Homo sapien
aaatcagttagaccccaatggcaggtctccgct

SEQ ID NO: 143190 - DNA, 33 bp, Homo sapien
aaatcagttagaccccgatggcaggtctccgct

SEQ ID NO: 143191 - DNA, 33 bp, Homo sapien
tgcttggagctctggaaagttcttaagcactgt

SEQ ID NO: 143192 - DNA, 33 bp, Homo sapien
tgcttggagctctggagagttcttaagcactgt

SEQ ID NO: 143193 - DNA, 33 bp, Homo sapien
gaggaaagccagcaaaaattcatgctcagcata

SEQ ID NO: 143194 - DNA, 33 bp, Homo sapien
gaggaaagccagcaaagattcatgctcagcata

SEQ ID NO: 143195 - DNA, 33 bp, Homo sapien
ggtctggtagcgccacacagtggttaagagcac

SEQ ID NO: 143196 - DNA, 33 bp, Homo sapien
ggtctggtagcgccacgcagtggttaagagcac

SEQ ID NO: 143197 - DNA, 33 bp, Homo sapien
ttctgacagccacacaaatgagacttggagggg

SEQ ID NO: 143198 - DNA, 33 bp, Homo sapien
ttctgacagccacacagatgagacttggagggg

SEQ ID NO: 143199 - DNA, 33 bp, Homo sapien
tgcaaaaactcattctcacgaagacagcaccaa

SEQ ID NO: 143200 - DNA, 33 bp, Homo sapien
tgcaaaaactcattcttacgaagacagcaccaa

SEQ ID NO: 143201 - DNA, 33 bp, Homo sapien
atgatgtgggaggacacgtgacaactggtgagt

SEQ ID NO: 143202 - DNA, 33 bp, Homo sapien
atgatgtgggaggacatgtgacaactggtgagt

SEQ ID NO: 143203 - DNA, 33 bp, Homo sapien
cttttatgactttgaacatgaaatccgacctca

SEQ ID NO: 143204 - DNA, 33 bp, Homo sapien
cttttatgactttgaatatgaaatccgacctca

SEQ ID NO: 143205 - DNA, 33 bp, Homo sapien
attttatatgaggaaactccagcatgaggtcgg

SEQ ID NO: 143206 - DNA, 33 bp, Homo sapien
attttatatgaggaaattccagcatgaggtcgg

SEQ ID NO: 143207 - DNA, 33 bp, Homo sapien
cctggccacgatggtacggaaatttgcagagca

SEQ ID NO: 143208 - DNA, 33 bp, Homo sapien
cctggccacgatggtatggaaatttgcagagca

SEQ ID NO: 143209 - DNA, 33 bp, Homo sapien
aaaaaaatagctaatacgttgaggaggagggag

SEQ ID NO: 143210 - DNA, 33 bp, Homo sapien
aaaaaaatagctaatatgttgaggaggagggag

SEQ ID NO: 143211 - DNA, 33 bp, Homo sapien
gacttcatgccattgcccctcttaacacttcaa

SEQ ID NO: 143212 - DNA, 33 bp, Homo sapien
gacttcatgccattgctcctcttaacacttcaa

SEQ ID NO: 143213 - DNA, 33 bp, Homo sapien
cggcgaatcttaacaccggctgaatctgggctt

SEQ ID NO: 143214 - DNA, 33 bp, Homo sapien
cggcgaatcttaacactggctgaatctgggctt

SEQ ID NO: 143215 - DNA, 33 bp, Homo sapien
ttgggagagagttaccagcatcttgggggtgga

SEQ ID NO: 143216 - DNA, 33 bp, Homo sapien
ttgggagagagttaccggcatcttgggggtgga

SEQ ID NO: 143217 - DNA, 33 bp, Homo sapien
aaaaacaatcgaggaacggtacaaggagttctg

SEQ ID NO: 143218 - DNA, 33 bp, Homo sapien
aaaaacaatcgaggaatggtacaaggagttctg

SEQ ID NO: 143219 - DNA, 33 bp, Homo sapien
attttagaagtgcggacgacatgttgacttatc

SEQ ID NO: 143220 - DNA, 33 bp, Homo sapien
attttagaagtgcggatgacatgttgacttatc

SEQ ID NO: 143221 - DNA, 33 bp, Homo sapien
gcagaaaaaccctatcaatcaatatacttagca

SEQ ID NO: 143222 - DNA, 33 bp, Homo sapien
gcagaaaaaccctatcgatcaatatacttagca

SEQ ID NO: 143223 - DNA, 33 bp, Homo sapien
gaaaaagccttcaagactcagtgtggtctcatt

SEQ ID NO: 143224 - DNA, 33 bp, Homo sapien
gaaaaagccttcaagattcagtgtggtctcatt

SEQ ID NO: 143225 - DNA, 33 bp, Homo sapien
gtcattgagccaatcaaagttgctcagtaaatg

SEQ ID NO: 143226 - DNA, 33 bp, Homo sapien
gtcattgagccaatcagagttgctcagtaaatg

SEQ ID NO: 143227 - DNA, 33 bp, Homo sapien
catttagttcccagcaatgagaaattccctgac

SEQ ID NO: 143228 - DNA, 33 bp, Homo sapien
catttagttcccagcagtgagaaattccctgac

SEQ ID NO: 143229 - DNA, 33 bp, Homo sapien
agacctggagatacaacggtgaaatgaagaaag

SEQ ID NO: 143230 - DNA, 33 bp, Homo sapien
agacctggagatacaatggtgaaatgaagaaag

SEQ ID NO: 143231 - DNA, 33 bp, Homo sapien
acacaagcgtcaaagtaaaagaggtgactcctc

SEQ ID NO: 143232 - DNA, 33 bp, Homo sapien
acacaagcgtcaaagtgaaagaggtgactcctc

SEQ ID NO: 143233 - DNA, 33 bp, Homo sapien
tggtacttgccagccacgtaatcttataattgc

SEQ ID NO: 143234 - DNA, 33 bp, Homo sapien
tggtacttgccagccatgtaatcttataattgc

SEQ ID NO: 143235 - DNA, 33 bp, Homo sapien
accatgtgatgctgaacccgcaaatagtcatct

SEQ ID NO: 143236 - DNA, 33 bp, Homo sapien
accatgtgatgctgaatccgcaaatagtcatct

SEQ ID NO: 143237 - DNA, 33 bp, Homo sapien
gttcaaatgcaaaactcaagcctgcaatgaaaa

SEQ ID NO: 143238 - DNA, 33 bp, Homo sapien
gttcaaatgcaaaactgaagcctgcaatgaaaa

SEQ ID NO: 143239 - DNA, 33 bp, Homo sapien
gctgtcactcattaaacgtgcccaatggtggca

SEQ ID NO: 143240 - DNA, 33 bp, Homo sapien
gctgtcactcattaaatgtgcccaatggtggca

SEQ ID NO: 143241 - DNA, 33 bp, Homo sapien
acacagggccaagggaaaaaagcctatgtcagc

SEQ ID NO: 143242 - DNA, 33 bp, Homo sapien
acacagggccaagggagaaaagcctatgtcagc

SEQ ID NO: 143243 - DNA, 33 bp, Homo sapien
ctttctaaatctccaaagaacgcaggaacaatt

SEQ ID NO: 143244 - DNA, 33 bp, Homo sapien
ctttctaaatctccaaggaacgcaggaacaatt

SEQ ID NO: 143245 - DNA, 33 bp, Homo sapien
agccaaaatggaaggagcagtaagaattagcca

SEQ ID NO: 143246 - DNA, 33 bp, Homo sapien
agccaaaatggaaggatcagtaagaattagcca

SEQ ID NO: 143247 - DNA, 33 bp, Homo sapien
tgtctgctggacattcaagtagaaatgtcagaa

SEQ ID NO: 143248 - DNA, 33 bp, Homo sapien
tgtctgctggacattcgagtagaaatgtcagaa

SEQ ID NO: 143249 - DNA, 33 bp, Homo sapien
atctccagctccttcacgtaatcacatcagcaa

SEQ ID NO: 143250 - DNA, 33 bp, Homo sapien
atctccagctccttcatgtaatcacatcagcaa

SEQ ID NO: 143251 - DNA, 33 bp, Homo sapien
accaagaacacgtacaatattatgcttaaatat

SEQ ID NO: 143252 - DNA, 33 bp, Homo sapien
accaagaacacgtacagtattatgcttaaatat

SEQ ID NO: 143253 - DNA, 33 bp, Homo sapien
agtcctcagctatgtacacactgagtgggaggc

SEQ ID NO: 143254 - DNA, 33 bp, Homo sapien
agtcctcagctatgtagacactgagtgggaggc

SEQ ID NO: 143255 - DNA, 33 bp, Homo sapien
tactatataactgcacggacaccagatgtctaa

SEQ ID NO: 143256 - DNA, 33 bp, Homo sapien
tactatataactgcactgacaccagatgtctaa

SEQ ID NO: 143257 - DNA, 33 bp, Homo sapien
ataaacagaaaattgaacattggcccaatagag

SEQ ID NO: 143258 - DNA, 33 bp, Homo sapien
ataaacagaaaattgagcattggcccaatagag

SEQ ID NO: 143259 - DNA, 33 bp, Homo sapien
atcacccctgaacatacaatatggaacaatggg

SEQ ID NO: 143260 - DNA, 33 bp, Homo sapien
atcacccctgaacatataatatggaacaatggg

SEQ ID NO: 143261 - DNA, 33 bp, Homo sapien
tgtttttacaacttgacagagtctggggagaaa

SEQ ID NO: 143262 - DNA, 33 bp, Homo sapien
tgtttttacaacttgatagagtctggggagaaa

SEQ ID NO: 143263 - DNA, 33 bp, Homo sapien
cctcagacaccacctccctactcctgtcttggg

SEQ ID NO: 143264 - DNA, 33 bp, Homo sapien
cctcagacaccacctctctactcctgtcttggg

SEQ ID NO: 143265 - DNA, 33 bp, Homo sapien
actcatacacaataagcaggccactgataaaca

SEQ ID NO: 143266 - DNA, 33 bp, Homo sapien
actcatacacaataagtaggccactgataaaca

SEQ ID NO: 143267 - DNA, 33 bp, Homo sapien
ccagggcataccgaccacaaggcccttcaaagt

SEQ ID NO: 143268 - DNA, 33 bp, Homo sapien
ccagggcataccgaccgcaaggcccttcaaagt

SEQ ID NO: 143269 - DNA, 33 bp, Homo sapien
aaaggtcgaggaccagaccacttggggatcttg

SEQ ID NO: 143270 - DNA, 33 bp, Homo sapien
aaaggtcgaggaccaggccacttggggatcttg

SEQ ID NO: 143271 - DNA, 33 bp, Homo sapien
caagagcaactgacaaaacttccttctcaggat

SEQ ID NO: 143272 - DNA, 33 bp, Homo sapien
caagagcaactgacaacacttccttctcaggat

SEQ ID NO: 143273 - DNA, 33 bp, Homo sapien
tttagcaaaggaactcaatctgactcaatacaa

SEQ ID NO: 143274 - DNA, 33 bp, Homo sapien
tttagcaaaggaactcgatctgactcaatacaa

SEQ ID NO: 143275 - DNA, 33 bp, Homo sapien
tttctgcattcaagtacgttctcactttaacca

SEQ ID NO: 143276 - DNA, 33 bp, Homo sapien
tttctgcattcaagtatgttctcactttaacca

SEQ ID NO: 143277 - DNA, 33 bp, Homo sapien
agaaaattactgaggccgaacatcttagagtgg

SEQ ID NO: 143278 - DNA, 33 bp, Homo sapien
agaaaattactgaggctgaacatcttagagtgg

SEQ ID NO: 143279 - DNA, 33 bp, Homo sapien
atggagccccagaaaaccatctgatccagtctc

SEQ ID NO: 143280 - DNA, 33 bp, Homo sapien
atggagccccagaaaatcatctgatccagtctc

SEQ ID NO: 143281 - DNA, 33 bp, Homo sapien
gggattgacctggtctaaccatcaaaatgaagg

SEQ ID NO: 143282 - DNA, 33 bp, Homo sapien
gggattgacctggtctgaccatcaaaatgaagg

SEQ ID NO: 143283 - DNA, 33 bp, Homo sapien
ttgtgaatgccgctgccacgaatgtgggtgtac

SEQ ID NO: 143284 - DNA, 33 bp, Homo sapien
ttgtgaatgccgctgctacgaatgtgggtgtac

SEQ ID NO: 143285 - DNA, 33 bp, Homo sapien
ggtagcatcatcattaaaaagctgggcttcatc

SEQ ID NO: 143286 - DNA, 33 bp, Homo sapien
ggtagcatcatcattacaaagctgggcttcatc

SEQ ID NO: 143287 - DNA, 33 bp, Homo sapien
tccccattaaatctcaccttgttagttttggcc

SEQ ID NO: 143288 - DNA, 33 bp, Homo sapien
tccccattaaatctcatcttgttagttttggcc

SEQ ID NO: 143289 - DNA, 33 bp, Homo sapien
gagctagggggaataactgtgcttggcacggca

SEQ ID NO: 143290 - DNA, 33 bp, Homo sapien
gagctagggggaataattgtgcttggcacggca

SEQ ID NO: 143291 - DNA, 33 bp, Homo sapien
caaatatttatacccaagtttagccattttaaa

SEQ ID NO: 143292 - DNA, 33 bp, Homo sapien
caaatatttatacccatgtttagccattttaaa

SEQ ID NO: 143293 - DNA, 33 bp, Homo sapien
cttaagagactgggaccgctttaatttaggttg

SEQ ID NO: 143294 - DNA, 33 bp, Homo sapien
cttaagagactgggactgctttaatttaggttg

SEQ ID NO: 143295 - DNA, 33 bp, Homo sapien
ctatgaaacaggataccatacaacaatttaaaa

SEQ ID NO: 143296 - DNA, 33 bp, Homo sapien
ctatgaaacaggatacgatacaacaatttaaaa

SEQ ID NO: 143297 - DNA, 33 bp, Homo sapien
tcaatcaggatgaacaactgaccaatcagaagg

SEQ ID NO: 143298 - DNA, 33 bp, Homo sapien
tcaatcaggatgaacagctgaccaatcagaagg

SEQ ID NO: 143299 - DNA, 33 bp, Homo sapien
ctttcttaggttgaccacatcgtttattccctc

SEQ ID NO: 143300 - DNA, 33 bp, Homo sapien
ctttcttaggttgaccgcatcgtttattccctc

SEQ ID NO: 143301 - DNA, 33 bp, Homo sapien
actagtaaaggagaaaccaatagagagggagaa

SEQ ID NO: 143302 - DNA, 33 bp, Homo sapien
actagtaaaggagaaatcaatagagagggagaa

SEQ ID NO: 143303 - DNA, 33 bp, Homo sapien
cctgggcttgccatctcaaggggagtctgccaa

SEQ ID NO: 143304 - DNA, 33 bp, Homo sapien
cctgggcttgccatcttaaggggagtctgccaa

SEQ ID NO: 143305 - DNA, 33 bp, Homo sapien
acttggctagggcatcacagtgaactggctgta

SEQ ID NO: 143306 - DNA, 33 bp, Homo sapien
acttggctagggcatcccagtgaactggctgta

SEQ ID NO: 143307 - DNA, 33 bp, Homo sapien
ctcctcagaagaacagaatggaagtccattttc

SEQ ID NO: 143308 - DNA, 33 bp, Homo sapien
ctcctcagaagaacagtatggaagtccattttc

SEQ ID NO: 143309 - DNA, 33 bp, Homo sapien
agtttatggagatgcaacaattcctcctctttt

SEQ ID NO: 143310 - DNA, 33 bp, Homo sapien
agtttatggagatgcagcaattcctcctctttt

SEQ ID NO: 143311 - DNA, 33 bp, Homo sapien
gggcataataaatgacacttcaaaaatttttca

SEQ ID NO: 143312 - DNA, 33 bp, Homo sapien
gggcataataaatgacgcttcaaaaatttttca

SEQ ID NO: 143313 - DNA, 33 bp, Homo sapien
aagtttttcataagtacgtctgggcttcatgac

SEQ ID NO: 143314 - DNA, 33 bp, Homo sapien
aagtttttcataagtatgtctgggcttcatgac

SEQ ID NO: 143315 - DNA, 33 bp, Homo sapien
accagggtttcttagcaatgacactgttaacat

SEQ ID NO: 143316 - DNA, 33 bp, Homo sapien
accagggtttcttagcgatgacactgttaacat

SEQ ID NO: 143317 - DNA, 33 bp, Homo sapien
aaaaaatcactaagtacctcaagcatgtataag

SEQ ID NO: 143318 - DNA, 33 bp, Homo sapien
aaaaaatcactaagtatctcaagcatgtataag

SEQ ID NO: 143319 - DNA, 33 bp, Homo sapien
tctttctaacaagagaacttgaacactaaggaa

SEQ ID NO: 143320 - DNA, 33 bp, Homo sapien
tctttctaacaagagagcttgaacactaaggaa

SEQ ID NO: 143321 - DNA, 33 bp, Homo sapien
ttttggatatatttaacacactcctcatgctct

SEQ ID NO: 143322 - DNA, 33 bp, Homo sapien
ttttggatatatttaagacactcctcatgctct

SEQ ID NO: 143323 - DNA, 33 bp, Homo sapien
gcctctcatgaggcaaccttcttacttcctaag

SEQ ID NO: 143324 - DNA, 33 bp, Homo sapien
gcctctcatgaggcaagcttcttacttcctaag

SEQ ID NO: 143325 - DNA, 33 bp, Homo sapien
gggtgacaggcatacacctactgcactaaagaa

SEQ ID NO: 143326 - DNA, 33 bp, Homo sapien
gggtgacaggcatacatctactgcactaaagaa

SEQ ID NO: 143327 - DNA, 33 bp, Homo sapien
cagaggtccccactcccaacagaggcactgaca

SEQ ID NO: 143328 - DNA, 33 bp, Homo sapien
cagaggtccccactccgaacagaggcactgaca

SEQ ID NO: 143329 - DNA, 33 bp, Homo sapien
agtcctgtggatggtacgacccttgacgtgatg

SEQ ID NO: 143330 - DNA, 33 bp, Homo sapien
agtcctgtggatggtatgacccttgacgtgatg

SEQ ID NO: 143331 - DNA, 33 bp, Homo sapien
ctggcaggctgaattacgaagatgtaggcaggt

SEQ ID NO: 143332 - DNA, 33 bp, Homo sapien
ctggcaggctgaattatgaagatgtaggcaggt

SEQ ID NO: 143333 - DNA, 33 bp, Homo sapien
aaacaacagtgaaaaacaagtcattctgcatct

SEQ ID NO: 143334 - DNA, 33 bp, Homo sapien
aaacaacagtgaaaaataagtcattctgcatct

SEQ ID NO: 143335 - DNA, 33 bp, Homo sapien
atacaaaaattcactaagtgtggtggtatgcac

SEQ ID NO: 143336 - DNA, 33 bp, Homo sapien
atacaaaaattcactaggtgtggtggtatgcac

SEQ ID NO: 143337 - DNA, 33 bp, Homo sapien
aattgctattatggtcacttagttctctgttct

SEQ ID NO: 143338 - DNA, 33 bp, Homo sapien
aattgctattatggtcccttagttctctgttct

SEQ ID NO: 143339 - DNA, 33 bp, Homo sapien
tcaggctactatgatgacaattgctattatggt

SEQ ID NO: 143340 - DNA, 33 bp, Homo sapien
tcaggctactatgatggcaattgctattatggt

SEQ ID NO: 143341 - DNA, 33 bp, Homo sapien
tgtgagtttgcaagtccacgtggcacagagaca

SEQ ID NO: 143342 - DNA, 33 bp, Homo sapien
tgtgagtttgcaagtctacgtggcacagagaca

SEQ ID NO: 143343 - DNA, 33 bp, Homo sapien
aggtcacatgcctagaactgaaagatgttacgg

SEQ ID NO: 143344 - DNA, 33 bp, Homo sapien
aggtcacatgcctagatctgaaagatgttacgg

SEQ ID NO: 143345 - DNA, 33 bp, Homo sapien
aatattttgataagggaaaatccatgaatgaat

SEQ ID NO: 143346 - DNA, 33 bp, Homo sapien
aatattttgataaggggaaatccatgaatgaat

SEQ ID NO: 143347 - DNA, 33 bp, Homo sapien
aaatacgtccatgtcacctgagttaacaaacat

SEQ ID NO: 143348 - DNA, 33 bp, Homo sapien
aaatacgtccatgtcatctgagttaacaaacat

SEQ ID NO: 143349 - DNA, 33 bp, Homo sapien
tacagctacaaggtgacgcagctgagattatgc

SEQ ID NO: 143350 - DNA, 33 bp, Homo sapien
tacagctacaaggtgatgcagctgagattatgc

SEQ ID NO: 143351 - DNA, 33 bp, Homo sapien
acccaaagaatcattaccagagatgtctagttc

SEQ ID NO: 143352 - DNA, 33 bp, Homo sapien
acccaaagaatcattatcagagatgtctagttc

SEQ ID NO: 143353 - DNA, 33 bp, Homo sapien
gtgagcatatctctcaaaagcaatgtctccatc

SEQ ID NO: 143354 - DNA, 33 bp, Homo sapien
gtgagcatatctctcacaagcaatgtctccatc

SEQ ID NO: 143355 - DNA, 33 bp, Homo sapien
taatcagtttagatgagccattcttagaaatgt

SEQ ID NO: 143356 - DNA, 33 bp, Homo sapien
taatcagtttagatgatccattcttagaaatgt

SEQ ID NO: 143357 - DNA, 33 bp, Homo sapien
ttttgcaaaatgttgaacatgtcatggttttcc

SEQ ID NO: 143358 - DNA, 33 bp, Homo sapien
ttttgcaaaatgttgaccatgtcatggttttcc

SEQ ID NO: 143359 - DNA, 33 bp, Homo sapien
tggttcctgagtgttacgatttagagccttaaa

SEQ ID NO: 143360 - DNA, 33 bp, Homo sapien
tggttcctgagtgttatgatttagagccttaaa

SEQ ID NO: 143361 - DNA, 33 bp, Homo sapien
ggcttcttgaactctcaaacacaattccaaatc

SEQ ID NO: 143362 - DNA, 33 bp, Homo sapien
ggcttcttgaactctccaacacaattccaaatc

SEQ ID NO: 143363 - DNA, 33 bp, Homo sapien
tttgacaaatgacgtacgacttccctctgaaag

SEQ ID NO: 143364 - DNA, 33 bp, Homo sapien
tttgacaaatgacgtatgacttccctctgaaag

SEQ ID NO: 143365 - DNA, 33 bp, Homo sapien
ggcacaagcatttcccagatctcacaagtagct

SEQ ID NO: 143366 - DNA, 33 bp, Homo sapien
ggcacaagcatttcccggatctcacaagtagct

SEQ ID NO: 143367 - DNA, 33 bp, Homo sapien
gctggcataaaaacaaatagactgatggaacag

SEQ ID NO: 143368 - DNA, 33 bp, Homo sapien
gctggcataaaaacaagtagactgatggaacag

SEQ ID NO: 143369 - DNA, 33 bp, Homo sapien
aggtgatctggagggacgcaagaataccaagat

SEQ ID NO: 143370 - DNA, 33 bp, Homo sapien
aggtgatctggagggatgcaagaataccaagat

SEQ ID NO: 143371 - DNA, 33 bp, Homo sapien
ctgtcactgctagagacgtgggaaggtggctca

SEQ ID NO: 143372 - DNA, 33 bp, Homo sapien
ctgtcactgctagagaggtgggaaggtggctca

SEQ ID NO: 143373 - DNA, 33 bp, Homo sapien
aagtaaagctctcatcaacacataaatacggca

SEQ ID NO: 143374 - DNA, 33 bp, Homo sapien
aagtaaagctctcatcgacacataaatacggca

SEQ ID NO: 143375 - DNA, 33 bp, Homo sapien
tcttgttattaggaaacgggcatgagtgtgtgc

SEQ ID NO: 143376 - DNA, 33 bp, Homo sapien
tcttgttattaggaaatgggcatgagtgtgtgc

SEQ ID NO: 143377 - DNA, 33 bp, Homo sapien
tttaacgcggacttccggagttatttctcttcg

SEQ ID NO: 143378 - DNA, 33 bp, Homo sapien
tttaacgcggacttcctgagttatttctcttcg

SEQ ID NO: 143379 - DNA, 33 bp, Homo sapien
tgagaagtatataaaccggtccattatatggct

SEQ ID NO: 143380 - DNA, 33 bp, Homo sapien
tgagaagtatataaactggtccattatatggct

SEQ ID NO: 143381 - DNA, 33 bp, Homo sapien
cactagcctcctcatacgggtgctaaggtctat

SEQ ID NO: 143382 - DNA, 33 bp, Homo sapien
cactagcctcctcatatgggtgctaaggtctat

SEQ ID NO: 143383 - DNA, 33 bp, Homo sapien
atttatctttggaacactgatagctgcttatgt

SEQ ID NO: 143384 - DNA, 33 bp, Homo sapien
atttatctttggaacattgatagctgcttatgt

SEQ ID NO: 143385 - DNA, 33 bp, Homo sapien
aaatactggacaaaaactgatacaaccgatcat

SEQ ID NO: 143386 - DNA, 33 bp, Homo sapien
aaatactggacaaaaattgatacaaccgatcat

SEQ ID NO: 143387 - DNA, 33 bp, Homo sapien
gactacacgtctggaccgagccctgaagccaca

SEQ ID NO: 143388 - DNA, 33 bp, Homo sapien
gactacacgtctggactgagccctgaagccaca

SEQ ID NO: 143389 - DNA, 33 bp, Homo sapien
cccttgaaattccctcaagccatgtcctgaccc

SEQ ID NO: 143390 - DNA, 33 bp, Homo sapien
cccttgaaattccctcgagccatgtcctgaccc

SEQ ID NO: 143391 - DNA, 33 bp, Homo sapien
gcaaaattgaagcacacatgtagggggaccctg

SEQ ID NO: 143392 - DNA, 33 bp, Homo sapien
gcaaaattgaagcacagatgtagggggaccctg

SEQ ID NO: 143393 - DNA, 33 bp, Homo sapien
ttccccactgctgaagcaaaaggggaaatgtga

SEQ ID NO: 143394 - DNA, 33 bp, Homo sapien
ttccccactgctgaaggaaaaggggaaatgtga

SEQ ID NO: 143395 - DNA, 33 bp, Homo sapien
agggagcgttccatgacagcactgtgctgagcc

SEQ ID NO: 143396 - DNA, 33 bp, Homo sapien
agggagcgttccatgatagcactgtgctgagcc

SEQ ID NO: 143397 - DNA, 33 bp, Homo sapien
ttcttagtcttcccagaaggattcctgtccccg

SEQ ID NO: 143398 - DNA, 33 bp, Homo sapien
ttcttagtcttcccagcaggattcctgtccccg

SEQ ID NO: 143399 - DNA, 33 bp, Homo sapien
catcttcctcatccgcaaggcaaggagtgcacg

SEQ ID NO: 143400 - DNA, 33 bp, Homo sapien
catcttcctcatccgcgaggcaaggagtgcacg

SEQ ID NO: 143401 - DNA, 33 bp, Homo sapien
accctgttgcagcatgaatctcccttaggggga

SEQ ID NO: 143402 - DNA, 33 bp, Homo sapien
accctgttgcagcatggatctcccttaggggga

SEQ ID NO: 143403 - DNA, 33 bp, Homo sapien
agaaaagacaaacagcccagttataaaatgagc

SEQ ID NO: 143404 - DNA, 33 bp, Homo sapien
agaaaagacaaacagctcagttataaaatgagc

SEQ ID NO: 143405 - DNA, 33 bp, Homo sapien
tactcaaatgagtttcaccaccacgcttcagaa

SEQ ID NO: 143406 - DNA, 33 bp, Homo sapien
tactcaaatgagtttcgccaccacgcttcagaa

SEQ ID NO: 143407 - DNA, 33 bp, Homo sapien
gcttgtgccaaactcacgtttcttggctgcttg

SEQ ID NO: 143408 - DNA, 33 bp, Homo sapien
gcttgtgccaaactcaggtttcttggctgcttg

SEQ ID NO: 143409 - DNA, 33 bp, Homo sapien
ttcacttttggaatgcacagcaacccatttgaa

SEQ ID NO: 143410 - DNA, 33 bp, Homo sapien
ttcacttttggaatgcgcagcaacccatttgaa

SEQ ID NO: 143411 - DNA, 33 bp, Homo sapien
ctgtgagtggaatccacgctagggttctgttcc

SEQ ID NO: 143412 - DNA, 33 bp, Homo sapien
ctgtgagtggaatccatgctagggttctgttcc

SEQ ID NO: 143413 - DNA, 33 bp, Homo sapien
tttaactagcatggtaaatggcagtagcttctt

SEQ ID NO: 143414 - DNA, 33 bp, Homo sapien
tttaactagcatggtacatggcagtagcttctt

SEQ ID NO: 143415 - DNA, 33 bp, Homo sapien
gtgaatagaagaatcaataaaatgcatttattc

SEQ ID NO: 143416 - DNA, 33 bp, Homo sapien
gtgaatagaagaatcactaaaatgcatttattc

SEQ ID NO: 143417 - DNA, 33 bp, Homo sapien
tgccatactgcatatcaaaacctacactaaggc

SEQ ID NO: 143418 - DNA, 33 bp, Homo sapien
tgccatactgcatatcgaaacctacactaaggc

SEQ ID NO: 143419 - DNA, 33 bp, Homo sapien
cttggcagtatctattaaaatgtacaatgtaca

SEQ ID NO: 143420 - DNA, 33 bp, Homo sapien
cttggcagtatctattgaaatgtacaatgtaca

SEQ ID NO: 143421 - DNA, 33 bp, Homo sapien
ctgtacggagttcacaagaaacacatatatgta

SEQ ID NO: 143422 - DNA, 33 bp, Homo sapien
ctgtacggagttcacacgaaacacatatatgta

SEQ ID NO: 143423 - DNA, 33 bp, Homo sapien
cccctcagactctgcaatatcctcttcactctc

SEQ ID NO: 143424 - DNA, 33 bp, Homo sapien
cccctcagactctgcagtatcctcttcactctc

SEQ ID NO: 143425 - DNA, 33 bp, Homo sapien
agtgaatgctgaaattaaaaatgaagactcgga

SEQ ID NO: 143426 - DNA, 33 bp, Homo sapien
agtgaatgctgaaattgaaaatgaagactcgga

SEQ ID NO: 143427 - DNA, 33 bp, Homo sapien
acctctgagctaagcacgttttctacatttaaa

SEQ ID NO: 143428 - DNA, 33 bp, Homo sapien
acctctgagctaagcatgttttctacatttaaa

SEQ ID NO: 143429 - DNA, 33 bp, Homo sapien
gccaaaggtaccataacagctggaaaaaaatca

SEQ ID NO: 143430 - DNA, 33 bp, Homo sapien
gccaaaggtaccataatagctggaaaaaaatca

SEQ ID NO: 143431 - DNA, 33 bp, Homo sapien
taaagattcttccagaagtctcctgattttttt

SEQ ID NO: 143432 - DNA, 33 bp, Homo sapien
taaagattcttccagacgtctcctgattttttt

SEQ ID NO: 143433 - DNA, 33 bp, Homo sapien
cctttggtgggtaatacgcctctcagtatgggt

SEQ ID NO: 143434 - DNA, 33 bp, Homo sapien
cctttggtgggtaatatgcctctcagtatgggt

SEQ ID NO: 143435 - DNA, 33 bp, Homo sapien
aaattcaagaaagtgacggtagatttcagtaag

SEQ ID NO: 143436 - DNA, 33 bp, Homo sapien
aaattcaagaaagtgatggtagatttcagtaag

SEQ ID NO: 143437 - DNA, 33 bp, Homo sapien
cagaggctacatgagacggaggaatgagaaagc

SEQ ID NO: 143438 - DNA, 33 bp, Homo sapien
cagaggctacatgagatggaggaatgagaaagc

SEQ ID NO: 143439 - DNA, 33 bp, Homo sapien
atagtctgactctacagccattttcctaggaac

SEQ ID NO: 143440 - DNA, 33 bp, Homo sapien
atagtctgactctacatccattttcctaggaac

SEQ ID NO: 143441 - DNA, 33 bp, Homo sapien
ttctgcaggttggtcaacttcctcacaggcata

SEQ ID NO: 143442 - DNA, 33 bp, Homo sapien
ttctgcaggttggtcatcttcctcacaggcata

SEQ ID NO: 143443 - DNA, 33 bp, Homo sapien
tcctggggttagcctacagtctgctgccatggc

SEQ ID NO: 143444 - DNA, 33 bp, Homo sapien
tcctggggttagcctatagtctgctgccatggc

SEQ ID NO: 143445 - DNA, 33 bp, Homo sapien
gaagtgtggaaaacaaagagggtggatgtgcat

SEQ ID NO: 143446 - DNA, 33 bp, Homo sapien
gaagtgtggaaaacaaggagggtggatgtgcat

SEQ ID NO: 143447 - DNA, 33 bp, Homo sapien
tttactggtgtcccgcaagtagaggttagggat

SEQ ID NO: 143448 - DNA, 33 bp, Homo sapien
tttactggtgtcccgcgagtagaggttagggat

SEQ ID NO: 143449 - DNA, 33 bp, Homo sapien
aaattgatagtgttcaatctcataaatatgaaa

SEQ ID NO: 143450 - DNA, 33 bp, Homo sapien
aaattgatagtgttcactctcataaatatgaaa

SEQ ID NO: 143451 - DNA, 33 bp, Homo sapien
ccattcaggagagatgcactttgctcacgtgtg

SEQ ID NO: 143452 - DNA, 33 bp, Homo sapien
ccattcaggagagatgtactttgctcacgtgtg

SEQ ID NO: 143453 - DNA, 33 bp, Homo sapien
gtgtatttcctaatagccagccttaattattca

SEQ ID NO: 143454 - DNA, 33 bp, Homo sapien
gtgtatttcctaataggcagccttaattattca

SEQ ID NO: 143455 - DNA, 33 bp, Homo sapien
tctatcagatctgtaactaagctactcttggag

SEQ ID NO: 143456 - DNA, 33 bp, Homo sapien
tctatcagatctgtaattaagctactcttggag

SEQ ID NO: 143457 - DNA, 33 bp, Homo sapien
gaaaggaatggatgaaaactagggagtcaggct

SEQ ID NO: 143458 - DNA, 33 bp, Homo sapien
gaaaggaatggatgaagactagggagtcaggct

SEQ ID NO: 143459 - DNA, 33 bp, Homo sapien
acagaagatatctacgccctcctctgtgctcaa

SEQ ID NO: 143460 - DNA, 33 bp, Homo sapien
acagaagatatctacgtcctcctctgtgctcaa

SEQ ID NO: 143461 - DNA, 33 bp, Homo sapien
atttacttaactatagaagccattttagtatct

SEQ ID NO: 143462 - DNA, 33 bp, Homo sapien
atttacttaactatagtagccattttagtatct

SEQ ID NO: 143463 - DNA, 33 bp, Homo sapien
gctcagccacttttgacgagcttgagtacctct

SEQ ID NO: 143464 - DNA, 33 bp, Homo sapien
gctcagccacttttgatgagcttgagtacctct

SEQ ID NO: 143465 - DNA, 33 bp, Homo sapien
agtgcttatctatcaacaggtactggggaaaca

SEQ ID NO: 143466 - DNA, 33 bp, Homo sapien
agtgcttatctatcaataggtactggggaaaca

SEQ ID NO: 143467 - DNA, 33 bp, Homo sapien
gaggtcttggatacccaaaaccagcaaaggaca

SEQ ID NO: 143468 - DNA, 33 bp, Homo sapien
gaggtcttggatacccgaaaccagcaaaggaca

SEQ ID NO: 143469 - DNA, 33 bp, Homo sapien
ccctgcaatggctagaagtggagctgagaactg

SEQ ID NO: 143470 - DNA, 33 bp, Homo sapien
ccctgcaatggctagatgtggagctgagaactg

SEQ ID NO: 143471 - DNA, 33 bp, Homo sapien
tgaacataataatcaaaagtgtactaccatcta

SEQ ID NO: 143472 - DNA, 33 bp, Homo sapien
tgaacataataatcaagagtgtactaccatcta

SEQ ID NO: 143473 - DNA, 33 bp, Homo sapien
tctcctgtaagtcaaacgacctcagttcctttt

SEQ ID NO: 143474 - DNA, 33 bp, Homo sapien
tctcctgtaagtcaaatgacctcagttcctttt

SEQ ID NO: 143475 - DNA, 33 bp, Homo sapien
aatattggaaagcttcacacgaaatattaagaa

SEQ ID NO: 143476 - DNA, 33 bp, Homo sapien
aatattggaaagcttcgcacgaaatattaagaa

SEQ ID NO: 143477 - DNA, 33 bp, Homo sapien
ttttagcttatactcacggtgaagtccaaagcc

SEQ ID NO: 143478 - DNA, 33 bp, Homo sapien
ttttagcttatactcatggtgaagtccaaagcc

SEQ ID NO: 143479 - DNA, 33 bp, Homo sapien
ttttgagaaatcaaccagcactattcatcttaa

SEQ ID NO: 143480 - DNA, 33 bp, Homo sapien
ttttgagaaatcaaccggcactattcatcttaa

SEQ ID NO: 143481 - DNA, 33 bp, Homo sapien
tatagtttgggtataactccatgcacttttttt

SEQ ID NO: 143482 - DNA, 33 bp, Homo sapien
tatagtttgggtataattccatgcacttttttt

SEQ ID NO: 143483 - DNA, 33 bp, Homo sapien
cctgggctccattcaacgttcccagtgaccacc

SEQ ID NO: 143484 - DNA, 33 bp, Homo sapien
cctgggctccattcaatgttcccagtgaccacc

SEQ ID NO: 143485 - DNA, 33 bp, Homo sapien
gagggcaggagtgaacactggaaacacatcaga

SEQ ID NO: 143486 - DNA, 33 bp, Homo sapien
gagggcaggagtgaacgctggaaacacatcaga

SEQ ID NO: 143487 - DNA, 33 bp, Homo sapien
aagaacgagacagtcacgaaagaaccacaacgt

SEQ ID NO: 143488 - DNA, 33 bp, Homo sapien
aagaacgagacagtcatgaaagaaccacaacgt

SEQ ID NO: 143489 - DNA, 33 bp, Homo sapien
aagtcacaccaaaaataatgcataagcccaact

SEQ ID NO: 143490 - DNA, 33 bp, Homo sapien
aagtcacaccaaaaattatgcataagcccaact

SEQ ID NO: 143491 - DNA, 33 bp, Homo sapien
gctcctccatccaaaccacaagctccgcaagag

SEQ ID NO: 143492 - DNA, 33 bp, Homo sapien
gctcctccatccaaactacaagctccgcaagag

SEQ ID NO: 143493 - DNA, 33 bp, Homo sapien
gccctcctggtgaaagacctaacatcgaggtcc

SEQ ID NO: 143494 - DNA, 33 bp, Homo sapien
gccctcctggtgaaaggcctaacatcgaggtcc

SEQ ID NO: 143495 - DNA, 33 bp, Homo sapien
agttactcagcgtaaacttattccataaaaggc

SEQ ID NO: 143496 - DNA, 33 bp, Homo sapien
agttactcagcgtaaagttattccataaaaggc

SEQ ID NO: 143497 - DNA, 33 bp, Homo sapien
tcttggtttgctcttaaacaagggtgcttttgg

SEQ ID NO: 143498 - DNA, 33 bp, Homo sapien
tcttggtttgctcttagacaagggtgcttttgg

SEQ ID NO: 143499 - DNA, 33 bp, Homo sapien
tcctgggttacctctaccaatgaataaaaggaa

SEQ ID NO: 143500 - DNA, 33 bp, Homo sapien
tcctgggttacctctagcaatgaataaaaggaa

SEQ ID NO: 143501 - DNA, 33 bp, Homo sapien
ttccattgagtgtaaaaattcatacattttatt

SEQ ID NO: 143502 - DNA, 33 bp, Homo sapien
ttccattgagtgtaaatattcatacattttatt

SEQ ID NO: 143503 - DNA, 33 bp, Homo sapien
aaccgaaatttatcacagccacacaatactaca

SEQ ID NO: 143504 - DNA, 33 bp, Homo sapien
aaccgaaatttatcacggccacacaatactaca

SEQ ID NO: 143505 - DNA, 33 bp, Homo sapien
cctccaagtaagaaaacgtggttcctgctgatg

SEQ ID NO: 143506 - DNA, 33 bp, Homo sapien
cctccaagtaagaaaatgtggttcctgctgatg

SEQ ID NO: 143507 - DNA, 33 bp, Homo sapien
ttatcgaatgggtgaacatgtgaacttgctcat

SEQ ID NO: 143508 - DNA, 33 bp, Homo sapien
ttatcgaatgggtgaatatgtgaacttgctcat

SEQ ID NO: 143509 - DNA, 33 bp, Homo sapien
ttacttcttactctgacgtatggattgactctg

SEQ ID NO: 143510 - DNA, 33 bp, Homo sapien
ttacttcttactctgatgtatggattgactctg

SEQ ID NO: 143511 - DNA, 33 bp, Homo sapien
tattgctaaggacatcgaatccctgcaggccct

SEQ ID NO: 143512 - DNA, 33 bp, Homo sapien
tattgctaaggacatctaatccctgcaggccct

SEQ ID NO: 143513 - DNA, 33 bp, Homo sapien
tttgctcagtagctgcaaagtccagaacttcta

SEQ ID NO: 143514 - DNA, 33 bp, Homo sapien
tttgctcagtagctgcgaagtccagaacttcta

SEQ ID NO: 143515 - DNA, 33 bp, Homo sapien
tgacagcagggaagccagagtgaatacacagaa

SEQ ID NO: 143516 - DNA, 33 bp, Homo sapien
tgacagcagggaagccggagtgaatacacagaa

SEQ ID NO: 143517 - DNA, 33 bp, Homo sapien
agactgctgtttaataactgccaagaatttagg

SEQ ID NO: 143518 - DNA, 33 bp, Homo sapien
agactgctgtttaatacctgccaagaatttagg

SEQ ID NO: 143519 - DNA, 33 bp, Homo sapien
tgtgatcctcctctaacagacatccatgaaata

SEQ ID NO: 143520 - DNA, 33 bp, Homo sapien
tgtgatcctcctctaatagacatccatgaaata

SEQ ID NO: 143521 - DNA, 33 bp, Homo sapien
aaaatacatccctcagaaactaagcaataaaca

SEQ ID NO: 143522 - DNA, 33 bp, Homo sapien
aaaatacatccctcaggaactaagcaataaaca

SEQ ID NO: 143523 - DNA, 33 bp, Homo sapien
cctgttttatcagcgacgtctttatgacctgta

SEQ ID NO: 143524 - DNA, 33 bp, Homo sapien
cctgttttatcagcgatgtctttatgacctgta

SEQ ID NO: 143525 - DNA, 33 bp, Homo sapien
tccgtaaacaagtagacgaatacatacagtaag

SEQ ID NO: 143526 - DNA, 33 bp, Homo sapien
tccgtaaacaagtagatgaatacatacagtaag

SEQ ID NO: 143527 - DNA, 33 bp, Homo sapien
tagtggataaaagttgcaggtggtacaggatat

SEQ ID NO: 143528 - DNA, 33 bp, Homo sapien
tagtggataaaagttggaggtggtacaggatat

SEQ ID NO: 143529 - DNA, 33 bp, Homo sapien
gatggttttgggatgactcaaatgcattacact

SEQ ID NO: 143530 - DNA, 33 bp, Homo sapien
gatggttttgggatgattcaaatgcattacact

SEQ ID NO: 143531 - DNA, 33 bp, Homo sapien
gctctgctggagacagaaatgaccttgtataaa

SEQ ID NO: 143532 - DNA, 33 bp, Homo sapien
gctctgctggagacagtaatgaccttgtataaa

SEQ ID NO: 143533 - DNA, 33 bp, Homo sapien
gattaggacatgagcaactctgggggccatcat

SEQ ID NO: 143534 - DNA, 33 bp, Homo sapien
gattaggacatgagcatctctgggggccatcat

SEQ ID NO: 143535 - DNA, 33 bp, Homo sapien
gaactgaagttgcagacgaattaatgttactaa

SEQ ID NO: 143536 - DNA, 33 bp, Homo sapien
gaactgaagttgcagatgaattaatgttactaa

SEQ ID NO: 143537 - DNA, 33 bp, Homo sapien
tctattaagatatccaacaagaaaggatttaag

SEQ ID NO: 143538 - DNA, 33 bp, Homo sapien
tctattaagatatccagcaagaaaggatttaag

SEQ ID NO: 143539 - DNA, 33 bp, Homo sapien
catcttagaacctaaccctgtcacctcttcatc

SEQ ID NO: 143540 - DNA, 33 bp, Homo sapien
catcttagaacctaactctgtcacctcttcatc

SEQ ID NO: 143541 - DNA, 33 bp, Homo sapien
cttaatacgcaagtgcactgtaaccttttcaga

SEQ ID NO: 143542 - DNA, 33 bp, Homo sapien
cttaatacgcaagtgcgctgtaaccttttcaga

SEQ ID NO: 143543 - DNA, 33 bp, Homo sapien
gtcaagaacacaccggaaaaatctcagacaaga

SEQ ID NO: 143544 - DNA, 33 bp, Homo sapien
gtcaagaacacaccgggaaaatctcagacaaga

SEQ ID NO: 143545 - DNA, 33 bp, Homo sapien
tgatgacttcctaaaacggctagttaggaggta

SEQ ID NO: 143546 - DNA, 33 bp, Homo sapien
tgatgacttcctaaaatggctagttaggaggta

SEQ ID NO: 143547 - DNA, 33 bp, Homo sapien
cggaataatagcagcaagcccaaacgacaacaa

SEQ ID NO: 143548 - DNA, 33 bp, Homo sapien
cggaataatagcagcaggcccaaacgacaacaa

SEQ ID NO: 143549 - DNA, 33 bp, Homo sapien
ccctttcttgtgataactaacctactctagtga

SEQ ID NO: 143550 - DNA, 33 bp, Homo sapien
ccctttcttgtgataattaacctactctagtga

SEQ ID NO: 143551 - DNA, 33 bp, Homo sapien
aagacactctccaacccggagcacccatgactg

SEQ ID NO: 143552 - DNA, 33 bp, Homo sapien
aagacactctccaacctggagcacccatgactg

SEQ ID NO: 143553 - DNA, 33 bp, Homo sapien
ggagcacccatgactgcaacttcctctgaccaa

SEQ ID NO: 143554 - DNA, 33 bp, Homo sapien
ggagcacccatgactgtaacttcctctgaccaa

SEQ ID NO: 143555 - DNA, 33 bp, Homo sapien
atggctgaaagaagagaaaaatattggaaaact

SEQ ID NO: 143556 - DNA, 33 bp, Homo sapien
atggctgaaagaagaggaaaatattggaaaact

SEQ ID NO: 143557 - DNA, 33 bp, Homo sapien
aagtgcttgcttaaaccggacaccagcgtcctc

SEQ ID NO: 143558 - DNA, 33 bp, Homo sapien
aagtgcttgcttaaactggacaccagcgtcctc

SEQ ID NO: 143559 - DNA, 33 bp, Homo sapien
ccccaaaaccaactgcaaagagaagattactcc

SEQ ID NO: 143560 - DNA, 33 bp, Homo sapien
ccccaaaaccaactgcgaagagaagattactcc

SEQ ID NO: 143561 - DNA, 33 bp, Homo sapien
tatgctgctagaaaaactggacagccatattca

SEQ ID NO: 143562 - DNA, 33 bp, Homo sapien
tatgctgctagaaaaattggacagccatattca

SEQ ID NO: 143563 - DNA, 33 bp, Homo sapien
tctcacagcaaagccactgattgaagaggcagg

SEQ ID NO: 143564 - DNA, 33 bp, Homo sapien
tctcacagcaaagccattgattgaagaggcagg

SEQ ID NO: 143565 - DNA, 33 bp, Homo sapien
atgcttttgaagttaaatgaatttttgcatgtt

SEQ ID NO: 143566 - DNA, 33 bp, Homo sapien
atgcttttgaagttaagtgaatttttgcatgtt

SEQ ID NO: 143567 - DNA, 33 bp, Homo sapien
aaaactgttacattcacggttatcatttactac

SEQ ID NO: 143568 - DNA, 33 bp, Homo sapien
aaaactgttacattcatggttatcatttactac

SEQ ID NO: 143569 - DNA, 33 bp, Homo sapien
aaaacagtgctggtgacggaagcaaaacatcta

SEQ ID NO: 143570 - DNA, 33 bp, Homo sapien
aaaacagtgctggtgatggaagcaaaacatcta

SEQ ID NO: 143571 - DNA, 33 bp, Homo sapien
gccagccacttggatacgctaggtcttggtttc

SEQ ID NO: 143572 - DNA, 33 bp, Homo sapien
gccagccacttggatatgctaggtcttggtttc

SEQ ID NO: 143573 - DNA, 33 bp, Homo sapien
actgctatgagcataacggagtcctaatgaccc

SEQ ID NO: 143574 - DNA, 33 bp, Homo sapien
actgctatgagcataatggagtcctaatgaccc

SEQ ID NO: 143575 - DNA, 33 bp, Homo sapien
gaggctgatgcatcctcagcctgtttgaattca

SEQ ID NO: 143576 - DNA, 33 bp, Homo sapien
gaggctgatgcatccttagcctgtttgaattca

SEQ ID NO: 143577 - DNA, 33 bp, Homo sapien
tatagcctgtctattcacacttagtaatatatt

SEQ ID NO: 143578 - DNA, 33 bp, Homo sapien
tatagcctgtctattcgcacttagtaatatatt

SEQ ID NO: 143579 - DNA, 33 bp, Homo sapien
aacttgaagaagggaggctcattagcttttgga

SEQ ID NO: 143580 - DNA, 33 bp, Homo sapien
aacttgaagaagggagtctcattagcttttgga

SEQ ID NO: 143581 - DNA, 33 bp, Homo sapien
atacagaggcgttccaggtttaacttgccaaac

SEQ ID NO: 143582 - DNA, 33 bp, Homo sapien
atacagaggcgttccatgtttaacttgccaaac

SEQ ID NO: 143583 - DNA, 33 bp, Homo sapien
aaagcagccttattaccaacagccaaaaagtaa

SEQ ID NO: 143584 - DNA, 33 bp, Homo sapien
aaagcagccttattactaacagccaaaaagtaa

SEQ ID NO: 143585 - DNA, 33 bp, Homo sapien
ctcatggctgcctaggcactggggataggacag

SEQ ID NO: 143586 - DNA, 33 bp, Homo sapien
ctcatggctgcctagggactggggataggacag

SEQ ID NO: 143587 - DNA, 33 bp, Homo sapien
gtagaatcagggtggacgtccattttctggcct

SEQ ID NO: 143588 - DNA, 33 bp, Homo sapien
gtagaatcagggtggatgtccattttctggcct

SEQ ID NO: 143589 - DNA, 33 bp, Homo sapien
gattccaaattcatacaagacaaagctaacagt

SEQ ID NO: 143590 - DNA, 33 bp, Homo sapien
gattccaaattcataccagacaaagctaacagt

SEQ ID NO: 143591 - DNA, 33 bp, Homo sapien
aaataagggatgtatgaaagcatttaacctaca

SEQ ID NO: 143592 - DNA, 33 bp, Homo sapien
aaataagggatgtatggaagcatttaacctaca

SEQ ID NO: 143593 - DNA, 33 bp, Homo sapien
ccaggacatccaagtaactctgtgcctatgctt

SEQ ID NO: 143594 - DNA, 33 bp, Homo sapien
ccaggacatccaagtacctctgtgcctatgctt

SEQ ID NO: 143595 - DNA, 33 bp, Homo sapien
acagtcaagagcttcaataacagatgagaccaa

SEQ ID NO: 143596 - DNA, 33 bp, Homo sapien
acagtcaagagcttcagtaacagatgagaccaa

SEQ ID NO: 143597 - DNA, 33 bp, Homo sapien
ccacttagaagccttacgacaagcagggaatgg

SEQ ID NO: 143598 - DNA, 33 bp, Homo sapien
ccacttagaagccttatgacaagcagggaatgg

SEQ ID NO: 143599 - DNA, 33 bp, Homo sapien
tcttcacttttaggtacactttgttggtgacca

SEQ ID NO: 143600 - DNA, 33 bp, Homo sapien
tcttcacttttaggtatactttgttggtgacca

SEQ ID NO: 143601 - DNA, 33 bp, Homo sapien
gatatgtctgaggtcacccagaagataaaagtg

SEQ ID NO: 143602 - DNA, 33 bp, Homo sapien
gatatgtctgaggtcatccagaagataaaagtg

SEQ ID NO: 143603 - DNA, 33 bp, Homo sapien
ttcatattctctttcacataacctttcacaaaa

SEQ ID NO: 143604 - DNA, 33 bp, Homo sapien
ttcatattctctttcatataacctttcacaaaa

SEQ ID NO: 143605 - DNA, 33 bp, Homo sapien
cacacattcctgcaaccgtacccctgtagtccc

SEQ ID NO: 143606 - DNA, 33 bp, Homo sapien
cacacattcctgcaactgtacccctgtagtccc

SEQ ID NO: 143607 - DNA, 33 bp, Homo sapien
caacagctcgtacctacgttttgcctgttaatt

SEQ ID NO: 143608 - DNA, 33 bp, Homo sapien
caacagctcgtacctatgttttgcctgttaatt

SEQ ID NO: 143609 - DNA, 33 bp, Homo sapien
atgaaccgtaagaaccacatagcattgggtgtt

SEQ ID NO: 143610 - DNA, 33 bp, Homo sapien
atgaaccgtaagaaccgcatagcattgggtgtt

SEQ ID NO: 143611 - DNA, 33 bp, Homo sapien
aagtagaagaaaccagaaggatctaaaataagg

SEQ ID NO: 143612 - DNA, 33 bp, Homo sapien
aagtagaagaaaccaggaggatctaaaataagg

SEQ ID NO: 143613 - DNA, 33 bp, Homo sapien
ctgctttctatgttcaagttaaacaacaagccc

SEQ ID NO: 143614 - DNA, 33 bp, Homo sapien
ctgctttctatgttcaggttaaacaacaagccc

SEQ ID NO: 143615 - DNA, 33 bp, Homo sapien
tatttgttttgtagccacgttcccttaacaaga

SEQ ID NO: 143616 - DNA, 33 bp, Homo sapien
tatttgttttgtagccgcgttcccttaacaaga

SEQ ID NO: 143617 - DNA, 33 bp, Homo sapien
tgagccactgtccctaacttgcacatgctcctg

SEQ ID NO: 143618 - DNA, 33 bp, Homo sapien
tgagccactgtccctatcttgcacatgctcctg

SEQ ID NO: 143619 - DNA, 33 bp, Homo sapien
ccaggctctagagctacgagagaataaacttgt

SEQ ID NO: 143620 - DNA, 33 bp, Homo sapien
ccaggctctagagctatgagagaataaacttgt

SEQ ID NO: 143621 - DNA, 33 bp, Homo sapien
caaggtcagatcagaaacaggtgcacgagacac

SEQ ID NO: 143622 - DNA, 33 bp, Homo sapien
caaggtcagatcagaatcaggtgcacgagacac

SEQ ID NO: 143623 - DNA, 33 bp, Homo sapien
aatgagatagtccgttaaaaagtgcttagtaca

SEQ ID NO: 143624 - DNA, 33 bp, Homo sapien
aatgagatagtccgtttaaaagtgcttagtaca

SEQ ID NO: 143625 - DNA, 33 bp, Homo sapien
gtcccgggttgtggaaaacttgccagaggtggt

SEQ ID NO: 143626 - DNA, 33 bp, Homo sapien
gtcccgggttgtggaagacttgccagaggtggt

SEQ ID NO: 143627 - DNA, 33 bp, Homo sapien
cttagcccatacttacactggtaataaagacat

SEQ ID NO: 143628 - DNA, 33 bp, Homo sapien
cttagcccatacttacgctggtaataaagacat

SEQ ID NO: 143629 - DNA, 33 bp, Homo sapien
tggctggtagagcgccaaggccttctctttatg

SEQ ID NO: 143630 - DNA, 33 bp, Homo sapien
tggctggtagagcgcccaggccttctctttatg

SEQ ID NO: 143631 - DNA, 33 bp, Homo sapien
cggggcaggttccccaataccgttccacacgcc

SEQ ID NO: 143632 - DNA, 33 bp, Homo sapien
cggggcaggttccccagtaccgttccacacgcc

SEQ ID NO: 143633 - DNA, 33 bp, Homo sapien
tccacagttccgagaccgcgccggggcccagca

SEQ ID NO: 143634 - DNA, 33 bp, Homo sapien
tccacagttccgagactgcgccggggcccagca

SEQ ID NO: 143635 - DNA, 33 bp, Homo sapien
gaggtgtgattcaaggaagtccaacacacaaac

SEQ ID NO: 143636 - DNA, 33 bp, Homo sapien
gaggtgtgattcaagggagtccaacacacaaac

SEQ ID NO: 143637 - DNA, 33 bp, Homo sapien
gactctggatgaaacaatggttttcctacgctg

SEQ ID NO: 143638 - DNA, 33 bp, Homo sapien
gactctggatgaaacagtggttttcctacgctg

SEQ ID NO: 143639 - DNA, 33 bp, Homo sapien
agactctgtgaattcaatatgttacatggcaaa

SEQ ID NO: 143640 - DNA, 33 bp, Homo sapien
agactctgtgaattcagtatgttacatggcaaa

SEQ ID NO: 143641 - DNA, 33 bp, Homo sapien
ccagcaactgtgcttccaaacataggatcttct

SEQ ID NO: 143642 - DNA, 33 bp, Homo sapien
ccagcaactgtgcttctaaacataggatcttct

SEQ ID NO: 143643 - DNA, 33 bp, Homo sapien
gctaatgatcggcagtcacaaagaattggatcc

SEQ ID NO: 143644 - DNA, 33 bp, Homo sapien
gctaatgatcggcagttacaaagaattggatcc

SEQ ID NO: 143645 - DNA, 33 bp, Homo sapien
ccatgagctcctgatactaaagcgcttttctga

SEQ ID NO: 143646 - DNA, 33 bp, Homo sapien
ccatgagctcctgatattaaagcgcttttctga

SEQ ID NO: 143647 - DNA, 33 bp, Homo sapien
tttattccagcaaataaaactccaagaagcaaa

SEQ ID NO: 143648 - DNA, 33 bp, Homo sapien
tttattccagcaaatagaactccaagaagcaaa

SEQ ID NO: 143649 - DNA, 33 bp, Homo sapien
gcttttgtccctcagaacaacgggctgacggcc

SEQ ID NO: 143650 - DNA, 33 bp, Homo sapien
gcttttgtccctcagagcaacgggctgacggcc

SEQ ID NO: 143651 - DNA, 33 bp, Homo sapien
gtttctttacactattaaaaaggcaaacctcag

SEQ ID NO: 143652 - DNA, 33 bp, Homo sapien
gtttctttacactattgaaaaggcaaacctcag

SEQ ID NO: 143653 - DNA, 33 bp, Homo sapien
tgtatctgcagatgaaactctgaatttaggaaa

SEQ ID NO: 143654 - DNA, 33 bp, Homo sapien
tgtatctgcagatgaagctctgaatttaggaaa

SEQ ID NO: 143655 - DNA, 33 bp, Homo sapien
ttcccacaatgcctcccgaaaccacagtatttc

SEQ ID NO: 143656 - DNA, 33 bp, Homo sapien
ttcccacaatgcctcctgaaaccacagtatttc

SEQ ID NO: 143657 - DNA, 33 bp, Homo sapien
taaatccaagctttacagagattataaatttgt

SEQ ID NO: 143658 - DNA, 33 bp, Homo sapien
taaatccaagctttactgagattataaatttgt

SEQ ID NO: 143659 - DNA, 33 bp, Homo sapien
gaggccatatgagaaccatcatgcaagagacca

SEQ ID NO: 143660 - DNA, 33 bp, Homo sapien
gaggccatatgagaacgatcatgcaagagacca

SEQ ID NO: 143661 - DNA, 33 bp, Homo sapien
cattacctatttatgcactcgttttcatcaaat

SEQ ID NO: 143662 - DNA, 33 bp, Homo sapien
cattacctatttatgcgctcgttttcatcaaat

SEQ ID NO: 143663 - DNA, 33 bp, Homo sapien
ccacctcatacgtcaaagtaagatgaaagaggc

SEQ ID NO: 143664 - DNA, 33 bp, Homo sapien
ccacctcatacgtcaaggtaagatgaaagaggc

SEQ ID NO: 143665 - DNA, 33 bp, Homo sapien
ccttgaagaatgacaaagtttcaagaatggctc

SEQ ID NO: 143666 - DNA, 33 bp, Homo sapien
ccttgaagaatgacaaggtttcaagaatggctc

SEQ ID NO: 143667 - DNA, 33 bp, Homo sapien
taagtgcacccaaagacgcttagttgaattggc

SEQ ID NO: 143668 - DNA, 33 bp, Homo sapien
taagtgcacccaaagatgcttagttgaattggc

SEQ ID NO: 143669 - DNA, 33 bp, Homo sapien
catagccagggtagtacctcatgtttattctga

SEQ ID NO: 143670 - DNA, 33 bp, Homo sapien
catagccagggtagtatctcatgtttattctga

SEQ ID NO: 143671 - DNA, 33 bp, Homo sapien
acggcagatggacccccacaccctgcgagtcag

SEQ ID NO: 143672 - DNA, 33 bp, Homo sapien
acggcagatggaccccgacaccctgcgagtcag

SEQ ID NO: 143673 - DNA, 33 bp, Homo sapien
agaaggccttgacgtcaccagtcatcaccgctc

SEQ ID NO: 143674 - DNA, 33 bp, Homo sapien
agaaggccttgacgtcgccagtcatcaccgctc

SEQ ID NO: 143675 - DNA, 33 bp, Homo sapien
tgcagatacaggtcaaagaatcccaaataactt

SEQ ID NO: 143676 - DNA, 33 bp, Homo sapien
tgcagatacaggtcaaggaatcccaaataactt

SEQ ID NO: 143677 - DNA, 33 bp, Homo sapien
ttgcgggaaagcaaaaatgtgaggcttcagaac

SEQ ID NO: 143678 - DNA, 33 bp, Homo sapien
ttgcgggaaagcaaaagtgtgaggcttcagaac

SEQ ID NO: 143679 - DNA, 33 bp, Homo sapien
ttaatggagcaaaaaacggtttcattagcacga

SEQ ID NO: 143680 - DNA, 33 bp, Homo sapien
ttaatggagcaaaaaatggtttcattagcacga

SEQ ID NO: 143681 - DNA, 33 bp, Homo sapien
agccccaccctgacgacatctatgctgtagcag

SEQ ID NO: 143682 - DNA, 33 bp, Homo sapien
agccccaccctgacgatatctatgctgtagcag

SEQ ID NO: 143683 - DNA, 33 bp, Homo sapien
attgtcccaaatatgaatatgtctcagttccca

SEQ ID NO: 143684 - DNA, 33 bp, Homo sapien
attgtcccaaatatgagtatgtctcagttccca

SEQ ID NO: 143685 - DNA, 33 bp, Homo sapien
gagcttgttaaaagacaggagcgtaattttgag

SEQ ID NO: 143686 - DNA, 33 bp, Homo sapien
gagcttgttaaaagacgggagcgtaattttgag

SEQ ID NO: 143687 - DNA, 33 bp, Homo sapien
aaaactgacaagaaaaacaaggattttgaaaat

SEQ ID NO: 143688 - DNA, 33 bp, Homo sapien
aaaactgacaagaaaagcaaggattttgaaaat

SEQ ID NO: 143689 - DNA, 33 bp, Homo sapien
ccagggttcagaaggacgtgtgacaataatggt

SEQ ID NO: 143690 - DNA, 33 bp, Homo sapien
ccagggttcagaaggatgtgtgacaataatggt

SEQ ID NO: 143691 - DNA, 33 bp, Homo sapien
aagctccttaagtctcaccagctgcagagtaat

SEQ ID NO: 143692 - DNA, 33 bp, Homo sapien
aagctccttaagtctcgccagctgcagagtaat

SEQ ID NO: 143693 - DNA, 33 bp, Homo sapien
atggcgtctaagcatcaactcccacattctcat

SEQ ID NO: 143694 - DNA, 33 bp, Homo sapien
atggcgtctaagcatcgactcccacattctcat

SEQ ID NO: 143695 - DNA, 33 bp, Homo sapien
gatatgaaagaagtacaagatgtgattcctctt

SEQ ID NO: 143696 - DNA, 33 bp, Homo sapien
gatatgaaagaagtaccagatgtgattcctctt

SEQ ID NO: 143697 - DNA, 33 bp, Homo sapien
aaaggtgtaaaggccacgtctagggatgaataa

SEQ ID NO: 143698 - DNA, 33 bp, Homo sapien
aaaggtgtaaaggccatgtctagggatgaataa

SEQ ID NO: 143699 - DNA, 33 bp, Homo sapien
tggctggccattaacaaccccgtggcctcaagt

SEQ ID NO: 143700 - DNA, 33 bp, Homo sapien
tggctggccattaacagccccgtggcctcaagt

SEQ ID NO: 143701 - DNA, 33 bp, Homo sapien
ttcatatactgatagacggaaaccaaataaaag

SEQ ID NO: 143702 - DNA, 33 bp, Homo sapien
ttcatatactgatagatggaaaccaaataaaag

SEQ ID NO: 143703 - DNA, 33 bp, Homo sapien
agatccttgagggaaaacttcaatccacaccaa

SEQ ID NO: 143704 - DNA, 33 bp, Homo sapien
agatccttgagggaaagcttcaatccacaccaa

SEQ ID NO: 143705 - DNA, 33 bp, Homo sapien
ttttctttggctttcaaaatggtctattgtgtt

SEQ ID NO: 143706 - DNA, 33 bp, Homo sapien
ttttctttggctttcagaatggtctattgtgtt

SEQ ID NO: 143707 - DNA, 33 bp, Homo sapien
aatctgtcttgccaaacagcaaagagagaagca

SEQ ID NO: 143708 - DNA, 33 bp, Homo sapien
aatctgtcttgccaaatagcaaagagagaagca

SEQ ID NO: 143709 - DNA, 33 bp, Homo sapien
gtcagcccagtgaaaaccgccataactaggata

SEQ ID NO: 143710 - DNA, 33 bp, Homo sapien
gtcagcccagtgaaaatcgccataactaggata

SEQ ID NO: 143711 - DNA, 33 bp, Homo sapien
ttatcctgcaataaatgacttctgaagttcctc

SEQ ID NO: 143712 - DNA, 33 bp, Homo sapien
ttatcctgcaataaattacttctgaagttcctc

SEQ ID NO: 143713 - DNA, 33 bp, Homo sapien
tttctcgtggtaattacgcttgaattttttgaa

SEQ ID NO: 143714 - DNA, 33 bp, Homo sapien
tttctcgtggtaattatgcttgaattttttgaa

SEQ ID NO: 143715 - DNA, 33 bp, Homo sapien
taagggaaggtagtaacatttgtggacttgaaa

SEQ ID NO: 143716 - DNA, 33 bp, Homo sapien
taagggaaggtagtaatatttgtggacttgaaa

SEQ ID NO: 143717 - DNA, 33 bp, Homo sapien
ggttggtttgctccagaccctgattcgtcaggt

SEQ ID NO: 143718 - DNA, 33 bp, Homo sapien
ggttggtttgctccaggccctgattcgtcaggt

SEQ ID NO: 143719 - DNA, 33 bp, Homo sapien
gagactctcaaatagactcctgactcatgccca

SEQ ID NO: 143720 - DNA, 33 bp, Homo sapien
gagactctcaaatagattcctgactcatgccca

SEQ ID NO: 143721 - DNA, 33 bp, Homo sapien
cagatgcggtggtttgaatgaggaccgtctagg

SEQ ID NO: 143722 - DNA, 33 bp, Homo sapien
cagatgcggtggtttggatgaggaccgtctagg

SEQ ID NO: 143723 - DNA, 33 bp, Homo sapien
tgcacactagattctaagaagtttccagtcctg

SEQ ID NO: 143724 - DNA, 33 bp, Homo sapien
tgcacactagattctatgaagtttccagtcctg

SEQ ID NO: 143725 - DNA, 33 bp, Homo sapien
aatgcaacagtagctgaaatgaaaatcatctct

SEQ ID NO: 143726 - DNA, 33 bp, Homo sapien
aatgcaacagtagctgcaatgaaaatcatctct

SEQ ID NO: 143727 - DNA, 33 bp, Homo sapien
tgggcatgcactagaactggaagaaaaccaata

SEQ ID NO: 143728 - DNA, 33 bp, Homo sapien
tgggcatgcactagaattggaagaaaaccaata

SEQ ID NO: 143729 - DNA, 33 bp, Homo sapien
gtaaaccaaaaactacacaggttgcaagcataa

SEQ ID NO: 143730 - DNA, 33 bp, Homo sapien
gtaaaccaaaaactacgcaggttgcaagcataa

SEQ ID NO: 143731 - DNA, 33 bp, Homo sapien
gctgataaattgagaacttcctgacagcaagtg

SEQ ID NO: 143732 - DNA, 33 bp, Homo sapien
gctgataaattgagaatttcctgacagcaagtg

SEQ ID NO: 143733 - DNA, 33 bp, Homo sapien
caggagcaaaatgccaaaggtgcttaagaattc

SEQ ID NO: 143734 - DNA, 33 bp, Homo sapien
caggagcaaaatgccagaggtgcttaagaattc

SEQ ID NO: 143735 - DNA, 33 bp, Homo sapien
aaagtttcagtctgaaagagtcagagttgctga

SEQ ID NO: 143736 - DNA, 33 bp, Homo sapien
aaagtttcagtctgaaggagtcagagttgctga

SEQ ID NO: 143737 - DNA, 33 bp, Homo sapien
atgaggctttgcgagacgaatgcaaaaatataa

SEQ ID NO: 143738 - DNA, 33 bp, Homo sapien
atgaggctttgcgagaggaatgcaaaaatataa

SEQ ID NO: 143739 - DNA, 33 bp, Homo sapien
cctgctcacaaagacacggagacagcaaagcac

SEQ ID NO: 143740 - DNA, 33 bp, Homo sapien
cctgctcacaaagacatggagacagcaaagcac

SEQ ID NO: 143741 - DNA, 33 bp, Homo sapien
catgacaagttggtaccggggaacctgagggcc

SEQ ID NO: 143742 - DNA, 33 bp, Homo sapien
catgacaagttggtactggggaacctgagggcc

SEQ ID NO: 143743 - DNA, 33 bp, Homo sapien
gaactgattctactcaatatttgccacaatgaa

SEQ ID NO: 143744 - DNA, 33 bp, Homo sapien
gaactgattctactcagtatttgccacaatgaa

SEQ ID NO: 143745 - DNA, 33 bp, Homo sapien
ttttaatcgtaggaccaccaaaacaggagaagg

SEQ ID NO: 143746 - DNA, 33 bp, Homo sapien
ttttaatcgtaggaccgccaaaacaggagaagg

SEQ ID NO: 143747 - DNA, 33 bp, Homo sapien
acaaagaatgctcaaacaatgctaacttctcac

SEQ ID NO: 143748 - DNA, 33 bp, Homo sapien
acaaagaatgctcaaagaatgctaacttctcac

SEQ ID NO: 143749 - DNA, 33 bp, Homo sapien
tctgtccaaatagaaaaaaaatgattactaaaa

SEQ ID NO: 143750 - DNA, 33 bp, Homo sapien
tctgtccaaatagaaagaaaatgattactaaaa

SEQ ID NO: 143751 - DNA, 33 bp, Homo sapien
tctcctttctcccctaggatcaattcattcaat

SEQ ID NO: 143752 - DNA, 33 bp, Homo sapien
tctcctttctcccctatgatcaattcattcaat

SEQ ID NO: 143753 - DNA, 33 bp, Homo sapien
gctgttcatgctttaaaataggtcattgtaggg

SEQ ID NO: 143754 - DNA, 33 bp, Homo sapien
gctgttcatgctttaagataggtcattgtaggg

SEQ ID NO: 143755 - DNA, 33 bp, Homo sapien
caatgagttcagaatcccgtcccatggaaatga

SEQ ID NO: 143756 - DNA, 33 bp, Homo sapien
caatgagttcagaatctcgtcccatggaaatga

SEQ ID NO: 143757 - DNA, 33 bp, Homo sapien
aaggcaggcaaatttacgtttatgtaataatgg

SEQ ID NO: 143758 - DNA, 33 bp, Homo sapien
aaggcaggcaaatttatgtttatgtaataatgg

SEQ ID NO: 143759 - DNA, 33 bp, Homo sapien
catggatacgacatgacagaaaatagaaaggtg

SEQ ID NO: 143760 - DNA, 33 bp, Homo sapien
catggatacgacatgatagaaaatagaaaggtg

SEQ ID NO: 143761 - DNA, 33 bp, Homo sapien
ctgctccttcaatctccgaccctccagcagaag

SEQ ID NO: 143762 - DNA, 33 bp, Homo sapien
ctgctccttcaatctctgaccctccagcagaag

SEQ ID NO: 143763 - DNA, 33 bp, Homo sapien
tctgttttagttctaaatgttttgattctacaa

SEQ ID NO: 143764 - DNA, 33 bp, Homo sapien
tctgttttagttctaagtgttttgattctacaa

SEQ ID NO: 143765 - DNA, 33 bp, Homo sapien
ccccaggcactatctgaacaagccgctgtctca

SEQ ID NO: 143766 - DNA, 33 bp, Homo sapien
ccccaggcactatctggacaagccgctgtctca

SEQ ID NO: 143767 - DNA, 33 bp, Homo sapien
aggaaggatacaaagtcacggtgaatcatttct

SEQ ID NO: 143768 - DNA, 33 bp, Homo sapien
aggaaggatacaaagttacggtgaatcatttct

SEQ ID NO: 143769 - DNA, 33 bp, Homo sapien
catcatctccactaaacgtagcagtgatagttc

SEQ ID NO: 143770 - DNA, 33 bp, Homo sapien
catcatctccactaaatgtagcagtgatagttc

SEQ ID NO: 143771 - DNA, 33 bp, Homo sapien
cagatgcctcaaatcaaatgccttcccaatgcc

SEQ ID NO: 143772 - DNA, 33 bp, Homo sapien
cagatgcctcaaatcagatgccttcccaatgcc

SEQ ID NO: 143773 - DNA, 33 bp, Homo sapien
tggacacaaaataatacccagaaaatacacatc

SEQ ID NO: 143774 - DNA, 33 bp, Homo sapien
tggacacaaaataatatccagaaaatacacatc

SEQ ID NO: 143775 - DNA, 33 bp, Homo sapien
ctgcagtttttgtgacaccactgcaggaatgat

SEQ ID NO: 143776 - DNA, 33 bp, Homo sapien
ctgcagtttttgtgacgccactgcaggaatgat

SEQ ID NO: 143777 - DNA, 33 bp, Homo sapien
gctgtctcttctcgataactaagccatcattta

SEQ ID NO: 143778 - DNA, 33 bp, Homo sapien
gctgtctcttctcgatgactaagccatcattta

SEQ ID NO: 143779 - DNA, 33 bp, Homo sapien
tagcaaagtccattaaagtctatgattagaaca

SEQ ID NO: 143780 - DNA, 33 bp, Homo sapien
tagcaaagtccattaaggtctatgattagaaca

SEQ ID NO: 143781 - DNA, 33 bp, Homo sapien
caagatttgtcacttgcattcaaactcatgggc

SEQ ID NO: 143782 - DNA, 33 bp, Homo sapien
caagatttgtcacttgtattcaaactcatgggc

SEQ ID NO: 143783 - DNA, 33 bp, Homo sapien
ctcgttcttctctttcacatctgttagaaaccc

SEQ ID NO: 143784 - DNA, 33 bp, Homo sapien
ctcgttcttctctttcgcatctgttagaaaccc

SEQ ID NO: 143785 - DNA, 33 bp, Homo sapien
ccacttcactctccgacgttgtgagtatgcatt

SEQ ID NO: 143786 - DNA, 33 bp, Homo sapien
ccacttcactctccgatgttgtgagtatgcatt

SEQ ID NO: 143787 - DNA, 33 bp, Homo sapien
atctgtgacaccttctcaactggtctccaactc

SEQ ID NO: 143788 - DNA, 33 bp, Homo sapien
atctgtgacaccttctgaactggtctccaactc

SEQ ID NO: 143789 - DNA, 33 bp, Homo sapien
ggaaggtagatggatacgcagatggctttgttc

SEQ ID NO: 143790 - DNA, 33 bp, Homo sapien
ggaaggtagatggatatgcagatggctttgttc

SEQ ID NO: 143791 - DNA, 33 bp, Homo sapien
tgtaaaaaggccctcacgccatcagcctgtgct

SEQ ID NO: 143792 - DNA, 33 bp, Homo sapien
tgtaaaaaggccctcatgccatcagcctgtgct

SEQ ID NO: 143793 - DNA, 33 bp, Homo sapien
tcttggatgctatggacgcgttgaacagcatcc

SEQ ID NO: 143794 - DNA, 33 bp, Homo sapien
tcttggatgctatggatgcgttgaacagcatcc

SEQ ID NO: 143795 - DNA, 33 bp, Homo sapien
cccagtggtctggggaacttctgtaaatcttac

SEQ ID NO: 143796 - DNA, 33 bp, Homo sapien
cccagtggtctggggagcttctgtaaatcttac

SEQ ID NO: 143797 - DNA, 33 bp, Homo sapien
gcacctccactcaaggaaagaaaaatggatttg

SEQ ID NO: 143798 - DNA, 33 bp, Homo sapien
gcacctccactcaaggtaagaaaaatggatttg

SEQ ID NO: 143799 - DNA, 33 bp, Homo sapien
tttaccttaattttcaaaatcagtgccttgtct

SEQ ID NO: 143800 - DNA, 33 bp, Homo sapien
tttaccttaattttcagaatcagtgccttgtct

SEQ ID NO: 143801 - DNA, 33 bp, Homo sapien
gaaactgttaagtgaactcaaaatttaataact

SEQ ID NO: 143802 - DNA, 33 bp, Homo sapien
gaaactgttaagtgaagtcaaaatttaataact

SEQ ID NO: 143803 - DNA, 33 bp, Homo sapien
gtgagctttgaaaaaccactgcttcatttcagc

SEQ ID NO: 143804 - DNA, 33 bp, Homo sapien
gtgagctttgaaaaactactgcttcatttcagc

SEQ ID NO: 143805 - DNA, 33 bp, Homo sapien
atggtgaagagccaaactgaaagtcactttgca

SEQ ID NO: 143806 - DNA, 33 bp, Homo sapien
atggtgaagagccaaattgaaagtcactttgca

SEQ ID NO: 143807 - DNA, 33 bp, Homo sapien
caaaaactctaatcaccagtcacatggtgaaga

SEQ ID NO: 143808 - DNA, 33 bp, Homo sapien
caaaaactctaatcactagtcacatggtgaaga

SEQ ID NO: 143809 - DNA, 33 bp, Homo sapien
ttgcatgaatttctccacatgacgtgacagtct

SEQ ID NO: 143810 - DNA, 33 bp, Homo sapien
ttgcatgaatttctccgcatgacgtgacagtct

SEQ ID NO: 143811 - DNA, 33 bp, Homo sapien
ctaataagagtacgaacgctattgtgaactgtg

SEQ ID NO: 143812 - DNA, 33 bp, Homo sapien
ctaataagagtacgaatgctattgtgaactgtg

SEQ ID NO: 143813 - DNA, 33 bp, Homo sapien
cctggaaaagtcaggactccaattagtactttg

SEQ ID NO: 143814 - DNA, 33 bp, Homo sapien
cctggaaaagtcaggattccaattagtactttg

SEQ ID NO: 143815 - DNA, 33 bp, Homo sapien
tttttgtccttttcacgcattgcatttgatgat

SEQ ID NO: 143816 - DNA, 33 bp, Homo sapien
tttttgtccttttcactcattgcatttgatgat

SEQ ID NO: 143817 - DNA, 33 bp, Homo sapien
gattggtctcttcaaaaaaactgaaaagcaatg

SEQ ID NO: 143818 - DNA, 33 bp, Homo sapien
gattggtctcttcaaagaaactgaaaagcaatg

SEQ ID NO: 143819 - DNA, 33 bp, Homo sapien
gaaatgaaaagacaaccgagaactgtcttagaa

SEQ ID NO: 143820 - DNA, 33 bp, Homo sapien
gaaatgaaaagacaactgagaactgtcttagaa

SEQ ID NO: 143821 - DNA, 33 bp, Homo sapien
ttgttgcccaattatacccacatatacctctcc

SEQ ID NO: 143822 - DNA, 33 bp, Homo sapien
ttgttgcccaattatagccacatatacctctcc

SEQ ID NO: 143823 - DNA, 33 bp, Homo sapien
catttatgccacagaaacgaactcatgttcacc

SEQ ID NO: 143824 - DNA, 33 bp, Homo sapien
catttatgccacagaaccgaactcatgttcacc

SEQ ID NO: 143825 - DNA, 33 bp, Homo sapien
atctagtaagaggcaaactatatatacacatat

SEQ ID NO: 143826 - DNA, 33 bp, Homo sapien
atctagtaagaggcaatctatatatacacatat

SEQ ID NO: 143827 - DNA, 33 bp, Homo sapien
aagattaattgattgcagatagaacaaaaccaa

SEQ ID NO: 143828 - DNA, 33 bp, Homo sapien
aagattaattgattgccgatagaacaaaaccaa

SEQ ID NO: 143829 - DNA, 33 bp, Homo sapien
aacaggaaagaaaacaagcagtcctcctgactt

SEQ ID NO: 143830 - DNA, 33 bp, Homo sapien
aacaggaaagaaaacacgcagtcctcctgactt

SEQ ID NO: 143831 - DNA, 33 bp, Homo sapien
aaagacctgcactgaaacctctttcctccatgc

SEQ ID NO: 143832 - DNA, 33 bp, Homo sapien
aaagacctgcactgaagcctctttcctccatgc

SEQ ID NO: 143833 - DNA, 33 bp, Homo sapien
ggaaccagagcccctacagagatgacttgtgtc

SEQ ID NO: 143834 - DNA, 33 bp, Homo sapien
ggaaccagagcccctagagagatgacttgtgtc

SEQ ID NO: 143835 - DNA, 33 bp, Homo sapien
ttctataactaatgaacgtaatgcatcggaagg

SEQ ID NO: 143836 - DNA, 33 bp, Homo sapien
ttctataactaatgaatgtaatgcatcggaagg

SEQ ID NO: 143837 - DNA, 33 bp, Homo sapien
taccataacttgtcagcacattgtatcattttc

SEQ ID NO: 143838 - DNA, 33 bp, Homo sapien
taccataacttgtcagtacattgtatcattttc

SEQ ID NO: 143839 - DNA, 33 bp, Homo sapien
ggggattgcagtagacccatcgggctgagccca

SEQ ID NO: 143840 - DNA, 33 bp, Homo sapien
ggggattgcagtagacgcatcgggctgagccca

SEQ ID NO: 143841 - DNA, 33 bp, Homo sapien
gcagtcgaggatgcaaagccccagctgtcctat

SEQ ID NO: 143842 - DNA, 33 bp, Homo sapien
gcagtcgaggatgcaaggccccagctgtcctat

SEQ ID NO: 143843 - DNA, 33 bp, Homo sapien
ttcctgcgaaatcaaccgctaacaatttttatg

SEQ ID NO: 143844 - DNA, 33 bp, Homo sapien
ttcctgcgaaatcaactgctaacaatttttatg

SEQ ID NO: 143845 - DNA, 33 bp, Homo sapien
tgatctcctagacctacgtactttggagctagc

SEQ ID NO: 143846 - DNA, 33 bp, Homo sapien
tgatctcctagacctatgtactttggagctagc

SEQ ID NO: 143847 - DNA, 33 bp, Homo sapien
cttcccagagcacttcccgcatgtgtttatggg

SEQ ID NO: 143848 - DNA, 33 bp, Homo sapien
cttcccagagcacttctcgcatgtgtttatggg

SEQ ID NO: 143849 - DNA, 33 bp, Homo sapien
gggacagtggcgagcccgaaactagacatgggg

SEQ ID NO: 143850 - DNA, 33 bp, Homo sapien
gggacagtggcgagcctgaaactagacatgggg

SEQ ID NO: 143851 - DNA, 33 bp, Homo sapien
tctattagtgaatgcaaaagagaccatatggcc

SEQ ID NO: 143852 - DNA, 33 bp, Homo sapien
tctattagtgaatgcagaagagaccatatggcc

SEQ ID NO: 143853 - DNA, 33 bp, Homo sapien
ctgatcatttacagaaaaagtgtactgatccct

SEQ ID NO: 143854 - DNA, 33 bp, Homo sapien
ctgatcatttacagaagaagtgtactgatccct

SEQ ID NO: 143855 - DNA, 33 bp, Homo sapien
tcttctaaaagccaaacgtcgttatccacaaag

SEQ ID NO: 143856 - DNA, 33 bp, Homo sapien
tcttctaaaagccaaaggtcgttatccacaaag

SEQ ID NO: 143857 - DNA, 33 bp, Homo sapien
catttttcacagttgccaaaaggtagaagtact

SEQ ID NO: 143858 - DNA, 33 bp, Homo sapien
catttttcacagttgcgaaaaggtagaagtact

SEQ ID NO: 143859 - DNA, 33 bp, Homo sapien
agagaaagtggaattaagtttatcatctgtgac

SEQ ID NO: 143860 - DNA, 33 bp, Homo sapien
agagaaagtggaattaggtttatcatctgtgac

SEQ ID NO: 143861 - DNA, 33 bp, Homo sapien
aaaaggaattatctccagaagctgaaattctgt

SEQ ID NO: 143862 - DNA, 33 bp, Homo sapien
aaaaggaattatctccggaagctgaaattctgt

SEQ ID NO: 143863 - DNA, 33 bp, Homo sapien
tgccaagaaggaaccccgatagctctaactccc

SEQ ID NO: 143864 - DNA, 33 bp, Homo sapien
tgccaagaaggaaccctgatagctctaactccc

SEQ ID NO: 143865 - DNA, 33 bp, Homo sapien
agatctccctggacgacaggaagtgtgcctcct

SEQ ID NO: 143866 - DNA, 33 bp, Homo sapien
agatctccctggacgataggaagtgtgcctcct

SEQ ID NO: 143867 - DNA, 33 bp, Homo sapien
tgcgctcttctgtaatcagtgctttccttctca

SEQ ID NO: 143868 - DNA, 33 bp, Homo sapien
tgcgctcttctgtaattagtgctttccttctca

SEQ ID NO: 143869 - DNA, 33 bp, Homo sapien
gtgcctagacgctaacaacatgcatggaaccaa

SEQ ID NO: 143870 - DNA, 33 bp, Homo sapien
gtgcctagacgctaacgacatgcatggaaccaa

SEQ ID NO: 143871 - DNA, 33 bp, Homo sapien
tcccagcatctttacactaccctctaggaatct

SEQ ID NO: 143872 - DNA, 33 bp, Homo sapien
tcccagcatctttacagtaccctctaggaatct

SEQ ID NO: 143873 - DNA, 33 bp, Homo sapien
tgtgtctgagcacagggactcaaggctgagtga

SEQ ID NO: 143874 - DNA, 33 bp, Homo sapien
tgtgtctgagcacaggtactcaaggctgagtga

SEQ ID NO: 143875 - DNA, 33 bp, Homo sapien
tacatccaagttccaacatacatgcagacatcc

SEQ ID NO: 143876 - DNA, 33 bp, Homo sapien
tacatccaagttccaatatacatgcagacatcc

SEQ ID NO: 143877 - DNA, 33 bp, Homo sapien
agagaagtaactggcacgtgcaaagtaatgatg

SEQ ID NO: 143878 - DNA, 33 bp, Homo sapien
agagaagtaactggcatgtgcaaagtaatgatg

SEQ ID NO: 143879 - DNA, 33 bp, Homo sapien
tcctgatttgtcccggaatgttaggaggtgtca

SEQ ID NO: 143880 - DNA, 33 bp, Homo sapien
tcctgatttgtcccgggatgttaggaggtgtca

SEQ ID NO: 143881 - DNA, 33 bp, Homo sapien
aagccaattaaactagaagccaccaggatggag

SEQ ID NO: 143882 - DNA, 33 bp, Homo sapien
aagccaattaaactaggagccaccaggatggag

SEQ ID NO: 143883 - DNA, 33 bp, Homo sapien
aaatagttactgcataccttaatcagaagaact

SEQ ID NO: 143884 - DNA, 33 bp, Homo sapien
aaatagttactgcatatcttaatcagaagaact

SEQ ID NO: 143885 - DNA, 33 bp, Homo sapien
tctcacacatgctccgaatcctccttttggctc

SEQ ID NO: 143886 - DNA, 33 bp, Homo sapien
tctcacacatgctccgtatcctccttttggctc

SEQ ID NO: 143887 - DNA, 33 bp, Homo sapien
gcggaacctctgttcacctgggttccgagccaa

SEQ ID NO: 143888 - DNA, 33 bp, Homo sapien
gcggaacctctgttcatctgggttccgagccaa

SEQ ID NO: 143889 - DNA, 33 bp, Homo sapien
tctggtttctaataaaatggcctctggatcaca

SEQ ID NO: 143890 - DNA, 33 bp, Homo sapien
tctggtttctaataaagtggcctctggatcaca

SEQ ID NO: 143891 - DNA, 33 bp, Homo sapien
gcgtgaactgcttcaaagatgcccaaacctcag

SEQ ID NO: 143892 - DNA, 33 bp, Homo sapien
gcgtgaactgcttcaaggatgcccaaacctcag

SEQ ID NO: 143893 - DNA, 33 bp, Homo sapien
ttgctgcagagctatacagatttgcggccagta

SEQ ID NO: 143894 - DNA, 33 bp, Homo sapien
ttgctgcagagctatatagatttgcggccagta

SEQ ID NO: 143895 - DNA, 33 bp, Homo sapien
agccagggaaaaggaaccgtagggtgaagagag

SEQ ID NO: 143896 - DNA, 33 bp, Homo sapien
agccagggaaaaggaatcgtagggtgaagagag

SEQ ID NO: 143897 - DNA, 33 bp, Homo sapien
ttaaggcttctatgaacaaattgtacgtaaaca

SEQ ID NO: 143898 - DNA, 33 bp, Homo sapien
ttaaggcttctatgaataaattgtacgtaaaca

SEQ ID NO: 143899 - DNA, 33 bp, Homo sapien
ggataatgatgtccacactttttcttgtttttg

SEQ ID NO: 143900 - DNA, 33 bp, Homo sapien
ggataatgatgtccacgctttttcttgtttttg

SEQ ID NO: 143901 - DNA, 33 bp, Homo sapien
gcgacgatattaaaaactctcctggccagtata

SEQ ID NO: 143902 - DNA, 33 bp, Homo sapien
gcgacgatattaaaaattctcctggccagtata

SEQ ID NO: 143903 - DNA, 33 bp, Homo sapien
ccttctaaaatgcaaacattcaggccacactca

SEQ ID NO: 143904 - DNA, 33 bp, Homo sapien
ccttctaaaatgcaaatattcaggccacactca

SEQ ID NO: 143905 - DNA, 33 bp, Homo sapien
ctcactcaaatatggacagttgactcaggaggt

SEQ ID NO: 143906 - DNA, 33 bp, Homo sapien
ctcactcaaatatggatagttgactcaggaggt

SEQ ID NO: 143907 - DNA, 33 bp, Homo sapien
tggtccttcacatgccccacaaagccttagata

SEQ ID NO: 143908 - DNA, 33 bp, Homo sapien
tggtccttcacatgccgcacaaagccttagata

SEQ ID NO: 143909 - DNA, 33 bp, Homo sapien
acgtggcaggtgctcacgggctcatccctgggg

SEQ ID NO: 143910 - DNA, 33 bp, Homo sapien
acgtggcaggtgctcatgggctcatccctgggg

SEQ ID NO: 143911 - DNA, 33 bp, Homo sapien
gacatctggacttttcacactggatatacaata

SEQ ID NO: 143912 - DNA, 33 bp, Homo sapien
gacatctggacttttcgcactggatatacaata

SEQ ID NO: 143913 - DNA, 33 bp, Homo sapien
atttggattttgcctcaaactaaaaaaaaagac

SEQ ID NO: 143914 - DNA, 33 bp, Homo sapien
atttggattttgcctccaactaaaaaaaaagac

SEQ ID NO: 143915 - DNA, 33 bp, Homo sapien
atgtacagatttgaccactgtatgaccttcttg

SEQ ID NO: 143916 - DNA, 33 bp, Homo sapien
atgtacagatttgaccgctgtatgaccttcttg

SEQ ID NO: 143917 - DNA, 33 bp, Homo sapien
tagttacattgtcacacgttagctacagaggga

SEQ ID NO: 143918 - DNA, 33 bp, Homo sapien
tagttacattgtcacaggttagctacagaggga

SEQ ID NO: 143919 - DNA, 33 bp, Homo sapien
tgaagctgagcttggcccttggtgtaactggag

SEQ ID NO: 143920 - DNA, 33 bp, Homo sapien
tgaagctgagcttggctcttggtgtaactggag

SEQ ID NO: 143921 - DNA, 33 bp, Homo sapien; identical to SEQ ID NO: 143919

SEQ ID NO: 143922 - DNA, 33 bp, Homo sapien; identical to SEQ ID NO: 143920

SEQ ID NO: 143923 - DNA, 33 bp, Homo sapien
ctgtcactctcattgaacagcctcaggcttgta

SEQ ID NO: 143924 - DNA, 33 bp, Homo sapien
ctgtcactctcattgatcagcctcaggcttgta

SEQ ID NO: 143925 - DNA, 33 bp, Homo sapien
agcttagtggcaacaactaaagacagagttgcc

SEQ ID NO: 143926 - DNA, 33 bp, Homo sapien
agcttagtggcaacaattaaagacagagttgcc

SEQ ID NO: 143927 - DNA, 33 bp, Homo sapien
ctagtaaatacaaaaaggacctaatgcttaaca

SEQ ID NO: 143928 - DNA, 33 bp, Homo sapien
ctagtaaatacaaaaatgacctaatgcttaaca

SEQ ID NO: 143929 - DNA, 33 bp, Homo sapien
tacccttaagttagacaatagtgttctgtgatt

SEQ ID NO: 143930 - DNA, 33 bp, Homo sapien
tacccttaagttagacgatagtgttctgtgatt

SEQ ID NO: 143931 - DNA, 33 bp, Homo sapien
cgaaaatttaactgaacgtgtgagggcaaaatt

SEQ ID NO: 143932 - DNA, 33 bp, Homo sapien
cgaaaatttaactgaatgtgtgagggcaaaatt

SEQ ID NO: 143933 - DNA, 33 bp, Homo sapien
acctagtttcatatgcactttcatcaaatcttt

SEQ ID NO: 143934 - DNA, 33 bp, Homo sapien
acctagtttcatatgcgctttcatcaaatcttt

SEQ ID NO: 143935 - DNA, 33 bp, Homo sapien
gaccattttgatcatccgaaggaaaaatcctgt

SEQ ID NO: 143936 - DNA, 33 bp, Homo sapien
gaccattttgatcatctgaaggaaaaatcctgt

SEQ ID NO: 143937 - DNA, 33 bp, Homo sapien
tctccaaagttcctccaggagacgacaggcaat

SEQ ID NO: 143938 - DNA, 33 bp, Homo sapien
tctccaaagttcctccgggagacgacaggcaat

SEQ ID NO: 143939 - DNA, 33 bp, Homo sapien
gcattttgcaggaagcgccttatttgatattaa

SEQ ID NO: 143940 - DNA, 33 bp, Homo sapien
gcattttgcaggaagctccttatttgatattaa

SEQ ID NO: 143941 - DNA, 33 bp, Homo sapien
tctttattcatcataacactccatgtgagcctg

SEQ ID NO: 143942 - DNA, 33 bp, Homo sapien
tctttattcatcataatactccatgtgagcctg

SEQ ID NO: 143943 - DNA, 33 bp, Homo sapien
gaatggccacacagtaagccaagtcacatagct

SEQ ID NO: 143944 - DNA, 33 bp, Homo sapien
gaatggccacacagtacgccaagtcacatagct

SEQ ID NO: 143945 - DNA, 33 bp, Homo sapien
aaagccctactagtcaacttaaaaacaggcttt

SEQ ID NO: 143946 - DNA, 33 bp, Homo sapien
aaagccctactagtcagcttaaaaacaggcttt

SEQ ID NO: 143947 - DNA, 33 bp, Homo sapien
cagcaagggatgtcccgacccctgcacagaata

SEQ ID NO: 143948 - DNA, 33 bp, Homo sapien
cagcaagggatgtccctacccctgcacagaata

SEQ ID NO: 143949 - DNA, 33 bp, Homo sapien
ccataattctagaaccaacatggagggagcagc

SEQ ID NO: 143950 - DNA, 33 bp, Homo sapien
ccataattctagaaccgacatggagggagcagc

SEQ ID NO: 143951 - DNA, 33 bp, Homo sapien
gctaaaagaagaatcaccatggagagaactgct

SEQ ID NO: 143952 - DNA, 33 bp, Homo sapien
gctaaaagaagaatcagcatggagagaactgct

SEQ ID NO: 143953 - DNA, 33 bp, Homo sapien
aaatattgcactgcacggaaactgtaactaaaa

SEQ ID NO: 143954 - DNA, 33 bp, Homo sapien
aaatattgcactgcactgaaactgtaactaaaa

SEQ ID NO: 143955 - DNA, 33 bp, Homo sapien
ccagggctaagagccacgtggagcaaacttggg

SEQ ID NO: 143956 - DNA, 33 bp, Homo sapien
ccagggctaagagccatgtggagcaaacttggg

SEQ ID NO: 143957 - DNA, 33 bp, Homo sapien
gaaccccaaagaaggaatccccgcaggagatga

SEQ ID NO: 143958 - DNA, 33 bp, Homo sapien
gaaccccaaagaaggattccccgcaggagatga

SEQ ID NO: 143959 - DNA, 33 bp, Homo sapien
atgtctccttgaacaactgagctgccagattaa

SEQ ID NO: 143960 - DNA, 33 bp, Homo sapien
atgtctccttgaacaattgagctgccagattaa

SEQ ID NO: 143961 - DNA, 33 bp, Homo sapien
ggaaagaagcagctgcacagaggaggaaggaac

SEQ ID NO: 143962 - DNA, 33 bp, Homo sapien
ggaaagaagcagctgcgcagaggaggaaggaac

SEQ ID NO: 143963 - DNA, 33 bp, Homo sapien
tcattgtggatattccccttacagactacataa

SEQ ID NO: 143964 - DNA, 33 bp, Homo sapien
tcattgtggatattcctcttacagactacataa

SEQ ID NO: 143965 - DNA, 33 bp, Homo sapien
gacatgagaatggagaaagtgccggatcgttac

SEQ ID NO: 143966 - DNA, 33 bp, Homo sapien
gacatgagaatggagacagtgccggatcgttac

SEQ ID NO: 143967 - DNA, 33 bp, Homo sapien
ttcctttttggagcataaagagaggcttctcag

SEQ ID NO: 143968 - DNA, 33 bp, Homo sapien
ttcctttttggagcatgaagagaggcttctcag

SEQ ID NO: 143969 - DNA, 33 bp, Homo sapien
tgcctttcagctactacgaatcatgctgctatg

SEQ ID NO: 143970 - DNA, 33 bp, Homo sapien
tgcctttcagctactatgaatcatgctgctatg

SEQ ID NO: 143971 - DNA, 33 bp, Homo sapien
catgggtttcagttaacggcaactttagagaca

SEQ ID NO: 143972 - DNA, 33 bp, Homo sapien
catgggtttcagttaatggcaactttagagaca

SEQ ID NO: 143973 - DNA, 33 bp, Homo sapien
tctaaatagaaatgtgcatttgattgtggaaag

SEQ ID NO: 143974 - DNA, 33 bp, Homo sapien
tctaaatagaaatgtgtatttgattgtggaaag

SEQ ID NO: 143975 - DNA, 33 bp, Homo sapien
tcttgaaaactcagacaaggccacggttcccag

SEQ ID NO: 143976 - DNA, 33 bp, Homo sapien
tcttgaaaactcagacgaggccacggttcccag

SEQ ID NO: 143977 - DNA, 33 bp, Homo sapien
gctagcagaggatggcaatgggatttgaacccc

SEQ ID NO: 143978 - DNA, 33 bp, Homo sapien
gctagcagaggatggcgatgggatttgaacccc

SEQ ID NO: 143979 - DNA, 33 bp, Homo sapien
cacgaaacactgggctaacactttcaaaaagca

SEQ ID NO: 143980 - DNA, 33 bp, Homo sapien
cacgaaacactgggctgacactttcaaaaagca

SEQ ID NO: 143981 - DNA, 33 bp, Homo sapien
ggaattccaaagccctcaggatgagaggccggg

SEQ ID NO: 143982 - DNA, 33 bp, Homo sapien
ggaattccaaagcccttaggatgagaggccggg

SEQ ID NO: 143983 - DNA, 33 bp, Homo sapien
gatgattttgaaaggggatggcacttccaaaaa

SEQ ID NO: 143984 - DNA, 33 bp, Homo sapien
gatgattttgaaagggtatggcacttccaaaaa

SEQ ID NO: 143985 - DNA, 33 bp, Homo sapien
gtctcaaatcactaacacagacaaaatgggacc

SEQ ID NO: 143986 - DNA, 33 bp, Homo sapien
gtctcaaatcactaacgcagacaaaatgggacc

SEQ ID NO: 143987 - DNA, 33 bp, Homo sapien
ggaaaattccagagagcaaaaggttagaatggc

SEQ ID NO: 143988 - DNA, 33 bp, Homo sapien
ggaaaattccagagaggaaaaggttagaatggc

SEQ ID NO: 143989 - DNA, 33 bp, Homo sapien
atttatcactaattcaatcccaagttctctaat

SEQ ID NO: 143990 - DNA, 33 bp, Homo sapien
atttatcactaattcattcccaagttctctaat

SEQ ID NO: 143991 - DNA, 33 bp, Homo sapien
tgtctactctctagaactggcaggagatgacag

SEQ ID NO: 143992 - DNA, 33 bp, Homo sapien
tgtctactctctagaattggcaggagatgacag

SEQ ID NO: 143993 - DNA, 33 bp, Homo sapien
gagaaccaagctcacaagattagagccaagttg

SEQ ID NO: 143994 - DNA, 33 bp, Homo sapien
gagaaccaagctcacaggattagagccaagttg

SEQ ID NO: 143995 - DNA, 33 bp, Homo sapien
catttctttctttgggaaactgccatttgcatg

SEQ ID NO: 143996 - DNA, 33 bp, Homo sapien
catttctttctttggggaactgccatttgcatg

SEQ ID NO: 143997 - DNA, 33 bp, Homo sapien
aatatttccctttgcaagagccaaccctaaata

SEQ ID NO: 143998 - DNA, 33 bp, Homo sapien
aatatttccctttgcaggagccaaccctaaata

SEQ ID NO: 143999 - DNA, 33 bp, Homo sapien
tcttccaccactaagcaccctacactctcctac

SEQ ID NO: 144000 - DNA, 33 bp, Homo sapien
tcttccaccactaagcgccctacactctcctac

SEQ ID NO: 144001 - DNA, 33 bp, Homo sapien
tggatttatcgccataagattttgaaaattgtt

SEQ ID NO: 144002 - DNA, 33 bp, Homo sapien
tggatttatcgccatacgattttgaaaattgtt

SEQ ID NO: 144003 - DNA, 33 bp, Homo sapien
ctgcccactctttgcactgaaactcctgacact

SEQ ID NO: 144004 - DNA, 33 bp, Homo sapien
ctgcccactctttgcattgaaactcctgacact

SEQ ID NO: 144005 - DNA, 33 bp, Homo sapien
tggtagaaacttcagaactgtcaagtagaagct

SEQ ID NO: 144006 - DNA, 33 bp, Homo sapien
tggtagaaacttcagacctgtcaagtagaagct

SEQ ID NO: 144007 - DNA, 33 bp, Homo sapien
tgtgatgtccaactacccacagtataatctcaa

SEQ ID NO: 144008 - DNA, 33 bp, Homo sapien
tgtgatgtccaactactcacagtataatctcaa

SEQ ID NO: 144009 - DNA, 33 bp, Homo sapien
acacagacaaaccctacgaaggagaagcttgct

SEQ ID NO: 144010 - DNA, 33 bp, Homo sapien
acacagacaaaccctatgaaggagaagcttgct

SEQ ID NO: 144011 - DNA, 33 bp, Homo sapien
gttatatcagtgtttaccaagtgcgtgggcagc

SEQ ID NO: 144012 - DNA, 33 bp, Homo sapien
gttatatcagtgtttatcaagtgcgtgggcagc

SEQ ID NO: 144013 - DNA, 33 bp, Homo sapien
cagcagcagcatcacaatcctggaaaccatgtt

SEQ ID NO: 144014 - DNA, 33 bp, Homo sapien
cagcagcagcatcacagtcctggaaaccatgtt

SEQ ID NO: 144015 - DNA, 33 bp, Homo sapien
gataataacacagaaaatttaaatgtgtgagtg

SEQ ID NO: 144016 - DNA, 33 bp, Homo sapien
gataataacacagaaattttaaatgtgtgagtg

SEQ ID NO: 144017 - DNA, 33 bp, Homo sapien
tcactttgatcctttacggcacttagtttcctg

SEQ ID NO: 144018 - DNA, 33 bp, Homo sapien
tcactttgatcctttatggcacttagtttcctg

SEQ ID NO: 144019 - DNA, 33 bp, Homo sapien
tggagcaaactctaaccaaactttgcaatatca

SEQ ID NO: 144020 - DNA, 33 bp, Homo sapien
tggagcaaactctaactaaactttgcaatatca

SEQ ID NO: 144021 - DNA, 33 bp, Homo sapien
aaaattgcttagcacacagtcagttccacagta

SEQ ID NO: 144022 - DNA, 33 bp, Homo sapien
aaaattgcttagcacagagtcagttccacagta

SEQ ID NO: 144023 - DNA, 33 bp, Homo sapien
atattaaatgataatacgtggcatctggagaac

SEQ ID NO: 144024 - DNA, 33 bp, Homo sapien
atattaaatgataataggtggcatctggagaac

SEQ ID NO: 144025 - DNA, 33 bp, Homo sapien
agaaataggctgtacacgtatgaatataactat

SEQ ID NO: 144026 - DNA, 33 bp, Homo sapien
agaaataggctgtacatgtatgaatataactat

SEQ ID NO: 144027 - DNA, 33 bp, Homo sapien
tggactggaaggagaagaatcctcatggaggtg

SEQ ID NO: 144028 - DNA, 33 bp, Homo sapien
tggactggaaggagaataatcctcatggaggtg

SEQ ID NO: 144029 - DNA, 33 bp, Homo sapien
caaatcatgtgtcccaccaaacccaagctaaat

SEQ ID NO: 144030 - DNA, 33 bp, Homo sapien
caaatcatgtgtcccagcaaacccaagctaaat

SEQ ID NO: 144031 - DNA, 33 bp, Homo sapien
tctaagctgattggagcatatttgactcaggca

SEQ ID NO: 144032 - DNA, 33 bp, Homo sapien
tctaagctgattggagtatatttgactcaggca

SEQ ID NO: 144033 - DNA, 33 bp, Homo sapien
ataattttctgagccaatcactgcttttgtggc

SEQ ID NO: 144034 - DNA, 33 bp, Homo sapien
ataattttctgagccagtcactgcttttgtggc

SEQ ID NO: 144035 - DNA, 33 bp, Homo sapien
cctctgttccttttacccatcacctcacatcac

SEQ ID NO: 144036 - DNA, 33 bp, Homo sapien
cctctgttccttttactcatcacctcacatcac

SEQ ID NO: 144037 - DNA, 33 bp, Homo sapien
agtaagaaaacctaaactgtaactgaggaattg

SEQ ID NO: 144038 - DNA, 33 bp, Homo sapien
agtaagaaaacctaaattgtaactgaggaattg

SEQ ID NO: 144039 - DNA, 33 bp, Homo sapien
gtattccagaattataacatctcataaatgtgt

SEQ ID NO: 144040 - DNA, 33 bp, Homo sapien
gtattccagaattatatcatctcataaatgtgt

SEQ ID NO: 144041 - DNA, 33 bp, Homo sapien
tgtaaagggatattaccgccatgtttatcctaa

SEQ ID NO: 144042 - DNA, 33 bp, Homo sapien
tgtaaagggatattactgccatgtttatcctaa

SEQ ID NO: 144043 - DNA, 33 bp, Homo sapien
agagctcacaagagcacattagatgctgcaaag

SEQ ID NO: 144044 - DNA, 33 bp, Homo sapien
agagctcacaagagcagattagatgctgcaaag

SEQ ID NO: 144045 - DNA, 33 bp, Homo sapien
agaacacagatgaagaatacaaagaaatcagaa

SEQ ID NO: 144046 - DNA, 33 bp, Homo sapien
agaacacagatgaagattacaaagaaatcagaa

SEQ ID NO: 144047 - DNA, 33 bp, Homo sapien
accattggtacctgagaaatcctcttggggggc

SEQ ID NO: 144048 - DNA, 33 bp, Homo sapien
accattggtacctgagcaatcctcttggggggc

SEQ ID NO: 144049 - DNA, 33 bp, Homo sapien
agttctgcaaatgcttaaagatacactccagta

SEQ ID NO: 144050 - DNA, 33 bp, Homo sapien
agttctgcaaatgcttgaagatacactccagta

SEQ ID NO: 144051 - DNA, 33 bp, Homo sapien
tttctacagctatataatacttctttggatggg

SEQ ID NO: 144052 - DNA, 33 bp, Homo sapien
tttctacagctatatagtacttctttggatggg

SEQ ID NO: 144053 - DNA, 33 bp, Homo sapien
ctcatttccctgatgactattcctaccaagctt

SEQ ID NO: 144054 - DNA, 33 bp, Homo sapien
ctcatttccctgatgagtattcctaccaagctt

SEQ ID NO: 144055 - DNA, 33 bp, Homo sapien
gaggctaagaaaggagaactaatctctatggct

SEQ ID NO: 144056 - DNA, 33 bp, Homo sapien
gaggctaagaaaggaggactaatctctatggct

SEQ ID NO: 144057 - DNA, 33 bp, Homo sapien
gggaatatgtgacttagatttatcctctagttc

SEQ ID NO: 144058 - DNA, 33 bp, Homo sapien
gggaatatgtgacttatatttatcctctagttc

SEQ ID NO: 144059 - DNA, 33 bp, Homo sapien
ctgacattaaagcctaaattatagtgtaagtca

SEQ ID NO: 144060 - DNA, 33 bp, Homo sapien
ctgacattaaagcctacattatagtgtaagtca

SEQ ID NO: 144061 - DNA, 33 bp, Homo sapien
ctggtgcctcttttgcactttaaaaaatgttat

SEQ ID NO: 144062 - DNA, 33 bp, Homo sapien
ctggtgcctcttttgcgctttaaaaaatgttat

SEQ ID NO: 144063 - DNA, 33 bp, Homo sapien
caggccacagcatggacggatgccacagacata

SEQ ID NO: 144064 - DNA, 33 bp, Homo sapien
caggccacagcatggatggatgccacagacata

SEQ ID NO: 144065 - DNA, 33 bp, Homo sapien
ttcaggcagtcatttaaatttatccaacaattc

SEQ ID NO: 144066 - DNA, 33 bp, Homo sapien
ttcaggcagtcatttacatttatccaacaattc

SEQ ID NO: 144067 - DNA, 33 bp, Homo sapien
accacaattggagtgaaatacatgcggatttaa

SEQ ID NO: 144068 - DNA, 33 bp, Homo sapien
accacaattggagtgagatacatgcggatttaa

SEQ ID NO: 144069 - DNA, 33 bp, Homo sapien
cttaagagcaacagtaacctcctggtatagagt

SEQ ID NO: 144070 - DNA, 33 bp, Homo sapien
cttaagagcaacagtagcctcctggtatagagt

SEQ ID NO: 144071 - DNA, 33 bp, Homo sapien
agtaacacattcactgaaaatcaaagagaatcc

SEQ ID NO: 144072 - DNA, 33 bp, Homo sapien
agtaacacattcactggaaatcaaagagaatcc

SEQ ID NO: 144073 - DNA, 33 bp, Homo sapien
ttcacagcagttgtagacctaattcattgccag

SEQ ID NO: 144074 - DNA, 33 bp, Homo sapien
ttcacagcagttgtaggcctaattcattgccag

SEQ ID NO: 144075 - DNA, 33 bp, Homo sapien
aatcgacaccagaaacaactgaactgacgagag

SEQ ID NO: 144076 - DNA, 33 bp, Homo sapien
aatcgacaccagaaaccactgaactgacgagag

SEQ ID NO: 144077 - DNA, 33 bp, Homo sapien
cattcttcaggtctcaacttaaaagtcactcct

SEQ ID NO: 144078 - DNA, 33 bp, Homo sapien
cattcttcaggtctcatcttaaaagtcactcct

SEQ ID NO: 144079 - DNA, 33 bp, Homo sapien
gcctggatactccacaacaaggttcttctatcc

SEQ ID NO: 144080 - DNA, 33 bp, Homo sapien
gcctggatactccacagcaaggttcttctatcc

SEQ ID NO: 144081 - DNA, 33 bp, Homo sapien
agaaattagatgcacaaagtaaaaaacgttaag

SEQ ID NO: 144082 - DNA, 33 bp, Homo sapien
agaaattagatgcacagagtaaaaaacgttaag

SEQ ID NO: 144083 - DNA, 33 bp, Homo sapien
gatacaacatctctgaaaggtatcagggaacaa

SEQ ID NO: 144084 - DNA, 33 bp, Homo sapien
gatacaacatctctgagaggtatcagggaacaa

SEQ ID NO: 144085 - DNA, 33 bp, Homo sapien
aacaggtaactccctgcatcgttggcattatat

SEQ ID NO: 144086 - DNA, 33 bp, Homo sapien
aacaggtaactccctggatcgttggcattatat

SEQ ID NO: 144087 - DNA, 33 bp, Homo sapien
ctgctttccccttcccgaggactcctgcacaca

SEQ ID NO: 144088 - DNA, 33 bp, Homo sapien
ctgctttccccttccctaggactcctgcacaca

SEQ ID NO: 144089 - DNA, 33 bp, Homo sapien
gacgcctcaggtaacaccagaaccaaaaggatc

SEQ ID NO: 144090 - DNA, 33 bp, Homo sapien
gacgcctcaggtaacatcagaaccaaaaggatc

SEQ ID NO: 144091 - DNA, 33 bp, Homo sapien
gaacacactaataacaactttaagaattgaaag

SEQ ID NO: 144092 - DNA, 33 bp, Homo sapien
gaacacactaataacatctttaagaattgaaag

SEQ ID NO: 144093 - DNA, 33 bp, Homo sapien
gtgtggtgcctcggaacgaactggtcaaccttg

SEQ ID NO: 144094 - DNA, 33 bp, Homo sapien
gtgtggtgcctcggaatgaactggtcaaccttg

SEQ ID NO: 144095 - DNA, 33 bp, Homo sapien
gtgccgtggagatacacagatgattgccatatt

SEQ ID NO: 144096 - DNA, 33 bp, Homo sapien
gtgccgtggagatacatagatgattgccatatt

SEQ ID NO: 144097 - DNA, 33 bp, Homo sapien
gttgtatctccacagacaagcagaccctttcag

SEQ ID NO: 144098 - DNA, 33 bp, Homo sapien
gttgtatctccacagataagcagaccctttcag

SEQ ID NO: 144099 - DNA, 33 bp, Homo sapien
attatttaacacatacagggaagaatagaaata

SEQ ID NO: 144100 - DNA, 33 bp, Homo sapien
attatttaacacatacggggaagaatagaaata

SEQ ID NO: 144101 - DNA, 33 bp, Homo sapien
gatgcttatatcatcaaaaattgggtcatgtgg

SEQ ID NO: 144102 - DNA, 33 bp, Homo sapien
gatgcttatatcatcacaaattgggtcatgtgg

SEQ ID NO: 144103 - DNA, 33 bp, Homo sapien
aacagtgatactcaggcactacatcagggtctt

SEQ ID NO: 144104 - DNA, 33 bp, Homo sapien
aacagtgatactcaggtactacatcagggtctt

SEQ ID NO: 144105 - DNA, 33 bp, Homo sapien
gcaagcctgagaggcaaaagaccctgatgtagt

SEQ ID NO: 144106 - DNA, 33 bp, Homo sapien
gcaagcctgagaggcacaagaccctgatgtagt

SEQ ID NO: 144107 - DNA, 33 bp, Homo sapien
ttagatggatgccgaaatgtttaagggtaaaaa

SEQ ID NO: 144108 - DNA, 33 bp, Homo sapien
ttagatggatgccgaagtgtttaagggtaaaaa

SEQ ID NO: 144109 - DNA, 33 bp, Homo sapien
agcaacattaggcctacgtagactctcaggaac

SEQ ID NO: 144110 - DNA, 33 bp, Homo sapien
agcaacattaggcctatgtagactctcaggaac

SEQ ID NO: 144111 - DNA, 33 bp, Homo sapien
atattacctttattacaatggtctggaaccaaa

SEQ ID NO: 144112 - DNA, 33 bp, Homo sapien
atattacctttattacgatggtctggaaccaaa

SEQ ID NO: 144113 - DNA, 33 bp, Homo sapien
agcgttctccagtgaccagatgttttgtcaatg

SEQ ID NO: 144114 - DNA, 33 bp, Homo sapien
agcgttctccagtgactagatgttttgtcaatg

SEQ ID NO: 144115 - DNA, 33 bp, Homo sapien
gccatagtgtggataacatattgggagggacaa

SEQ ID NO: 144116 - DNA, 33 bp, Homo sapien
gccatagtgtggataatatattgggagggacaa

SEQ ID NO: 144117 - DNA, 33 bp, Homo sapien
gggaatcattggttaacgcaggagttctccatg

SEQ ID NO: 144118 - DNA, 33 bp, Homo sapien
gggaatcattggttaatgcaggagttctccatg

SEQ ID NO: 144119 - DNA, 33 bp, Homo sapien
ctggagacacctcaaaagggatgtgggctgaag

SEQ ID NO: 144120 - DNA, 33 bp, Homo sapien
ctggagacacctcaaacgggatgtgggctgaag

SEQ ID NO: 144121 - DNA, 33 bp, Homo sapien
aagaaaatcaaatgaaacttcctgtaatttcct

SEQ ID NO: 144122 - DNA, 33 bp, Homo sapien
aagaaaatcaaatgaaccttcctgtaatttcct

SEQ ID NO: 144123 - DNA, 33 bp, Homo sapien
gagtcaaggggctaaaagatctccagaagctaa

SEQ ID NO: 144124 - DNA, 33 bp, Homo sapien
gagtcaaggggctaaatgatctccagaagctaa

SEQ ID NO: 144125 - DNA, 33 bp, Homo sapien
caagcaaaattcaaacaaactttgaactcgttt

SEQ ID NO: 144126 - DNA, 33 bp, Homo sapien
caagcaaaattcaaaccaactttgaactcgttt

SEQ ID NO: 144127 - DNA, 33 bp, Homo sapien
ttggactggacctgcaccattggctctcctggt

SEQ ID NO: 144128 - DNA, 33 bp, Homo sapien
ttggactggacctgcatcattggctctcctggt

SEQ ID NO: 144129 - DNA, 33 bp, Homo sapien
atatcacgtcgggtcacctcctctgggcctccc

SEQ ID NO: 144130 - DNA, 33 bp, Homo sapien
atatcacgtcgggtcatctcctctgggcctccc

SEQ ID NO: 144131 - DNA, 33 bp, Homo sapien
ttaaggtacacatgacagtacttaaaaatgtct

SEQ ID NO: 144132 - DNA, 33 bp, Homo sapien
ttaaggtacacatgacggtacttaaaaatgtct

SEQ ID NO: 144133 - DNA, 33 bp, Homo sapien
gtaatgaatggatagacaaactcaatagaggaa

SEQ ID NO: 144134 - DNA, 33 bp, Homo sapien
gtaatgaatggatagagaaactcaatagaggaa

SEQ ID NO: 144135 - DNA, 33 bp, Homo sapien
acaggaaaccagacttcaaaaacaaattctgct

SEQ ID NO: 144136 - DNA, 33 bp, Homo sapien
acaggaaaccagacttgaaaaacaaattctgct

SEQ ID NO: 144137 - DNA, 33 bp, Homo sapien
atacatttgaattataaaactgagcagtctaga

SEQ ID NO: 144138 - DNA, 33 bp, Homo sapien
atacatttgaattatagaactgagcagtctaga

SEQ ID NO: 144139 - DNA, 33 bp, Homo sapien
ctattgacagtcaacaatgaggggagttgtctc

SEQ ID NO: 144140 - DNA, 33 bp, Homo sapien
ctattgacagtcaacagtgaggggagttgtctc

SEQ ID NO: 144141 - DNA, 33 bp, Homo sapien
gagtttgtttcttatcacagttataacactcat

SEQ ID NO: 144142 - DNA, 33 bp, Homo sapien
gagtttgtttcttatctcagttataacactcat

SEQ ID NO: 144143 - DNA, 33 bp, Homo sapien
acaatgtgtaagcaaacgctaagatgtatgcat

SEQ ID NO: 144144 - DNA, 33 bp, Homo sapien
acaatgtgtaagcaaaggctaagatgtatgcat

SEQ ID NO: 144145 - DNA, 33 bp, Homo sapien
actgagcaacagcataaaagagggttcattttt

SEQ ID NO: 144146 - DNA, 33 bp, Homo sapien
actgagcaacagcatacaagagggttcattttt

SEQ ID NO: 144147 - DNA, 33 bp, Homo sapien
tgagaaaccatgagccgccagagagacaaaaaa

SEQ ID NO: 144148 - DNA, 33 bp, Homo sapien
tgagaaaccatgagcctccagagagacaaaaaa

SEQ ID NO: 144149 - DNA, 33 bp, Homo sapien
ttaattttatgcaaaaaccaaaagtgctttaca

SEQ ID NO: 144150 - DNA, 33 bp, Homo sapien
ttaattttatgcaaaagccaaaagtgctttaca

SEQ ID NO: 144151 - DNA, 33 bp, Homo sapien
tgtatcaagcacataacattaagacatagtcat

SEQ ID NO: 144152 - DNA, 33 bp, Homo sapien
tgtatcaagcacataagattaagacatagtcat

SEQ ID NO: 144153 - DNA, 33 bp, Homo sapien
catcatgccagcatgaactgtgggcaaaacatg

SEQ ID NO: 144154 - DNA, 33 bp, Homo sapien
catcatgccagcatgatctgtgggcaaaacatg

SEQ ID NO: 144155 - DNA, 33 bp, Homo sapien
cccataatgagctgccaagaactgtgatacaca

SEQ ID NO: 144156 - DNA, 33 bp, Homo sapien
cccataatgagctgccgagaactgtgatacaca

SEQ ID NO: 144157 - DNA, 33 bp, Homo sapien
cttgccccctattttgaagtaattgatctaaga

SEQ ID NO: 144158 - DNA, 33 bp, Homo sapien
cttgccccctattttgtagtaattgatctaaga

SEQ ID NO: 144159 - DNA, 33 bp, Homo sapien
acacttcctcttcataccttctgtccttccagt

SEQ ID NO: 144160 - DNA, 33 bp, Homo sapien
acacttcctcttcatatcttctgtccttccagt

SEQ ID NO: 144161 - DNA, 33 bp, Homo sapien
gtgctctcaggactaaggtccttcaggtcccag

SEQ ID NO: 144162 - DNA, 33 bp, Homo sapien
gtgctctcaggactaatgtccttcaggtcccag

SEQ ID NO: 144163 - DNA, 33 bp, Homo sapien
acaaatacttctttccagctgactttgctcaga

SEQ ID NO: 144164 - DNA, 33 bp, Homo sapien
acaaatacttctttccggctgactttgctcaga

SEQ ID NO: 144165 - DNA, 33 bp, Homo sapien
tctgcttctcaaaaagaccagaggccttgagtc

SEQ ID NO: 144166 - DNA, 33 bp, Homo sapien
tctgcttctcaaaaagtccagaggccttgagtc

SEQ ID NO: 144167 - DNA, 33 bp, Homo sapien
acttccagccttgatgaaaatgttctgttacct

SEQ ID NO: 144168 - DNA, 33 bp, Homo sapien
acttccagccttgatggaaatgttctgttacct

SEQ ID NO: 144169 - DNA, 33 bp, Homo sapien
gaaatcccaggtcttaacaccttagaatatgag

SEQ ID NO: 144170 - DNA, 33 bp, Homo sapien
gaaatcccaggtcttagcaccttagaatatgag

SEQ ID NO: 144171 - DNA, 33 bp, Homo sapien
gaaaaaggatgtgtaccgagttgaatcgtgtct

SEQ ID NO: 144172 - DNA, 33 bp, Homo sapien
gaaaaaggatgtgtactgagttgaatcgtgtct

SEQ ID NO: 144173 - DNA, 33 bp, Homo sapien
ttctcagtccctgagcaattacaggactctatt

SEQ ID NO: 144174 - DNA, 33 bp, Homo sapien
ttctcagtccctgagcgattacaggactctatt

SEQ ID NO: 144175 - DNA, 33 bp, Homo sapien
gttggctgaatccatgaaacccacaggtgtgta

SEQ ID NO: 144176 - DNA, 33 bp, Homo sapien
gttggctgaatccatggaacccacaggtgtgta

SEQ ID NO: 144177 - DNA, 33 bp, Homo sapien
tgtgtctgtctgacaggctccatcagcaatagg

SEQ ID NO: 144178 - DNA, 33 bp, Homo sapien
tgtgtctgtctgacagtctccatcagcaatagg

SEQ ID NO: 144179 - DNA, 33 bp, Homo sapien
ggtgaatgtattacacacagaaatctaaaaaca

SEQ ID NO: 144180 - DNA, 33 bp, Homo sapien
ggtgaatgtattacacgcagaaatctaaaaaca

SEQ ID NO: 144181 - DNA, 33 bp, Homo sapien
cttttgcatcaactgaacatattcatagatatg

SEQ ID NO: 144182 - DNA, 33 bp, Homo sapien
cttttgcatcaactgagcatattcatagatatg

SEQ ID NO: 144183 - DNA, 33 bp, Homo sapien
aaaagccaattgataaacgggcttcttatcgcc

SEQ ID NO: 144184 - DNA, 33 bp, Homo sapien
aaaagccaattgataagcgggcttcttatcgcc

SEQ ID NO: 144185 - DNA, 33 bp, Homo sapien
ccctacctgagacccaatctctgcagaaaggaa

SEQ ID NO: 144186 - DNA, 33 bp, Homo sapien
ccctacctgagacccattctctgcagaaaggaa

SEQ ID NO: 144187 - DNA, 33 bp, Homo sapien
cggaccacacttggaaacatttatcctttagat

SEQ ID NO: 144188 - DNA, 33 bp, Homo sapien
cggaccacacttggaagcatttatcctttagat

SEQ ID NO: 144189 - DNA, 33 bp, Homo sapien
gaggtaaaaaaggctacatatgcatttctaaag

SEQ ID NO: 144190 - DNA, 33 bp, Homo sapien
gaggtaaaaaaggctatatatgcatttctaaag

SEQ ID NO: 144191 - DNA, 33 bp, Homo sapien
tgctgactgctggaaacgtggaaatacatgaag

SEQ ID NO: 144192 - DNA, 33 bp, Homo sapien
tgctgactgctggaaatgtggaaatacatgaag

SEQ ID NO: 144193 - DNA, 33 bp, Homo sapien
gagaccattgtgtgtaaagtccaatagtccaat

SEQ ID NO: 144194 - DNA, 33 bp, Homo sapien
gagaccattgtgtgtagagtccaatagtccaat

SEQ ID NO: 144195 - DNA, 33 bp, Homo sapien
tgtgttttaaggcagaagataatgaaactacac

SEQ ID NO: 144196 - DNA, 33 bp, Homo sapien
tgtgttttaaggcagaggataatgaaactacac

SEQ ID NO: 144197 - DNA, 33 bp, Homo sapien
gaaacacattctttgaaagtttgcattttatat

SEQ ID NO: 144198 - DNA, 33 bp, Homo sapien
gaaacacattctttgagagtttgcattttatat

SEQ ID NO: 144199 - DNA, 33 bp, Homo sapien
ttcaggcctgtgttaaaatgcgtcacctggagc

SEQ ID NO: 144200 - DNA, 33 bp, Homo sapien
ttcaggcctgtgttaagatgcgtcacctggagc

SEQ ID NO: 144201 - DNA, 33 bp, Homo sapien
cctccacatgacaagagtccacttggtctccac

SEQ ID NO: 144202 - DNA, 33 bp, Homo sapien
cctccacatgacaagattccacttggtctccac

SEQ ID NO: 144203 - DNA, 33 bp, Homo sapien
tactggttgttggatgccagttagagataccag

SEQ ID NO: 144204 - DNA, 33 bp, Homo sapien
tactggttgttggatgtcagttagagataccag

SEQ ID NO: 144205 - DNA, 33 bp, Homo sapien
gagaatactccagaaacgtgggctgttaatcat

SEQ ID NO: 144206 - DNA, 33 bp, Homo sapien
gagaatactccagaaatgtgggctgttaatcat

SEQ ID NO: 144207 - DNA, 33 bp, Homo sapien
ttttgaacagaaattaaatctccagaactttgg

SEQ ID NO: 144208 - DNA, 33 bp, Homo sapien
ttttgaacagaaattagatctccagaactttgg

SEQ ID NO: 144209 - DNA, 33 bp, Homo sapien
tttgaacaatgttgtacgcaagtattatacagg

SEQ ID NO: 144210 - DNA, 33 bp, Homo sapien
tttgaacaatgttgtatgcaagtattatacagg

SEQ ID NO: 144211 - DNA, 33 bp, Homo sapien
gacagatgatcagctaattccacaaataagtta

SEQ ID NO: 144212 - DNA, 33 bp, Homo sapien
gacagatgatcagctagttccacaaataagtta

SEQ ID NO: 144213 - DNA, 33 bp, Homo sapien
ttaaccagtcagatccaggatattgccaggagc

SEQ ID NO: 144214 - DNA, 33 bp, Homo sapien
ttaaccagtcagatccgggatattgccaggagc

SEQ ID NO: 144215 - DNA, 33 bp, Homo sapien
aagaaaaatttctcaagtcatgttactgaaaaa

SEQ ID NO: 144216 - DNA, 33 bp, Homo sapien
aagaaaaatttctcaattcatgttactgaaaaa

SEQ ID NO: 144217 - DNA, 33 bp, Homo sapien
ctgaaaggaagattcaaaagaaggaagtcatgc

SEQ ID NO: 144218 - DNA, 33 bp, Homo sapien
ctgaaaggaagattcagaagaaggaagtcatgc

SEQ ID NO: 144219 - DNA, 33 bp, Homo sapien
gccctcattttggggcaaataagtaaggatata

SEQ ID NO: 144220 - DNA, 33 bp, Homo sapien
gccctcattttggggccaataagtaaggatata

SEQ ID NO: 144221 - DNA, 33 bp, Homo sapien
ctttaaatttgcctggcaatcactttctttgca

SEQ ID NO: 144222 - DNA, 33 bp, Homo sapien
ctttaaatttgcctggtaatcactttctttgca

SEQ ID NO: 144223 - DNA, 33 bp, Homo sapien
tcctttgttaatatgaacatgtgattaactggc

SEQ ID NO: 144224 - DNA, 33 bp, Homo sapien
tcctttgttaatatgagcatgtgattaactggc

SEQ ID NO: 144225 - DNA, 33 bp, Homo sapien
accatgattctccagacgtataattttgtaaca

SEQ ID NO: 144226 - DNA, 33 bp, Homo sapien
accatgattctccagatgtataattttgtaaca

SEQ ID NO: 144227 - DNA, 33 bp, Homo sapien
atgtgattattaggtaacaaggcagtgctacat

SEQ ID NO: 144228 - DNA, 33 bp, Homo sapien
atgtgattattaggtagcaaggcagtgctacat

SEQ ID NO: 144229 - DNA, 33 bp, Homo sapien
tagaggagggtaaagcccaggtaaggacagaaa

SEQ ID NO: 144230 - DNA, 33 bp, Homo sapien
tagaggagggtaaagcgcaggtaaggacagaaa

SEQ ID NO: 144231 - DNA, 33 bp, Homo sapien
cagagagtgtatggaacattctggaaatggcaa

SEQ ID NO: 144232 - DNA, 33 bp, Homo sapien
cagagagtgtatggaatattctggaaatggcaa

SEQ ID NO: 144233 - DNA, 33 bp, Homo sapien
tcagtggatgaatttaactcgcttgttttgttc

SEQ ID NO: 144234 - DNA, 33 bp, Homo sapien
tcagtggatgaatttagctcgcttgttttgttc

SEQ ID NO: 144235 - DNA, 33 bp, Homo sapien
gtgttctctctctggacctttcatagtggtgtg

SEQ ID NO: 144236 - DNA, 33 bp, Homo sapien
gtgttctctctctggatctttcatagtggtgtg

SEQ ID NO: 144237 - DNA, 33 bp, Homo sapien
ctgctggaacgtaaggaagagcctcattccagg

SEQ ID NO: 144238 - DNA, 33 bp, Homo sapien
ctgctggaacgtaagggagagcctcattccagg

SEQ ID NO: 144239 - DNA, 33 bp, Homo sapien
acttcgatgatgacgtgaagttgtctgcaaatc

SEQ ID NO: 144240 - DNA, 33 bp, Homo sapien
acttcgatgatgacgttaagttgtctgcaaatc

SEQ ID NO: 144241 - DNA, 33 bp, Homo sapien
acgtccctgttccttccgaaagactcaaaattg

SEQ ID NO: 144242 - DNA, 33 bp, Homo sapien
acgtccctgttccttctgaaagactcaaaattg

SEQ ID NO: 144243 - DNA, 33 bp, Homo sapien
aattagaacccccagacattgctggtaagaatt

SEQ ID NO: 144244 - DNA, 33 bp, Homo sapien
aattagaacccccagatattgctggtaagaatt

SEQ ID NO: 144245 - DNA, 33 bp, Homo sapien
tcaacctttctgggcaatgagtacacaccaggc

SEQ ID NO: 144246 - DNA, 33 bp, Homo sapien
tcaacctttctgggcactgagtacacaccaggc

SEQ ID NO: 144247 - DNA, 33 bp, Homo sapien
actgatggtgcagaccactggatttctggagaa

SEQ ID NO: 144248 - DNA, 33 bp, Homo sapien
actgatggtgcagaccgctggatttctggagaa

SEQ ID NO: 144249 - DNA, 33 bp, Homo sapien
cataagccaaccagcaagtactcttgagtctac

SEQ ID NO: 144250 - DNA, 33 bp, Homo sapien
cataagccaaccagcaggtactcttgagtctac

SEQ ID NO: 144251 - DNA, 33 bp, Homo sapien
tctgtgggtaggtttacgctacacttttgattt

SEQ ID NO: 144252 - DNA, 33 bp, Homo sapien
tctgtgggtaggtttatgctacacttttgattt

SEQ ID NO: 144253 - DNA, 33 bp, Homo sapien
tgagccaggtaaggaacgtagccttgctcaggt

SEQ ID NO: 144254 - DNA, 33 bp, Homo sapien
tgagccaggtaaggaatgtagccttgctcaggt

SEQ ID NO: 144255 - DNA, 33 bp, Homo sapien
actgttgaggggagtaaatatacaacctgcttt

SEQ ID NO: 144256 - DNA, 33 bp, Homo sapien
actgttgaggggagtagatatacaacctgcttt

SEQ ID NO: 144257 - DNA, 33 bp, Homo sapien
ttttgcaagtgtgacagctgggttatcatgttg

SEQ ID NO: 144258 - DNA, 33 bp, Homo sapien
ttttgcaagtgtgacatctgggttatcatgttg

SEQ ID NO: 144259 - DNA, 33 bp, Homo sapien
ggacagccaatcacacaatatttattggccagt

SEQ ID NO: 144260 - DNA, 33 bp, Homo sapien
ggacagccaatcacacgatatttattggccagt

SEQ ID NO: 144261 - DNA, 33 bp, Homo sapien
gatctggctgatgagaccatcactttggccaca

SEQ ID NO: 144262 - DNA, 33 bp, Homo sapien
gatctggctgatgagatcatcactttggccaca

SEQ ID NO: 144263 - DNA, 33 bp, Homo sapien
tcacatttcatactaacgctacattttcttcca

SEQ ID NO: 144264 - DNA, 33 bp, Homo sapien
tcacatttcatactaatgctacattttcttcca

SEQ ID NO: 144265 - DNA, 33 bp, Homo sapien
gaatggcctgcagtcacggggagctgcaaggca

SEQ ID NO: 144266 - DNA, 33 bp, Homo sapien
gaatggcctgcagtcatggggagctgcaaggca

SEQ ID NO: 144267 - DNA, 33 bp, Homo sapien
attagccatcaggaagacttaaggctgaaggga

SEQ ID NO: 144268 - DNA, 33 bp, Homo sapien
attagccatcaggaagtcttaaggctgaaggga

SEQ ID NO: 144269 - DNA, 33 bp, Homo sapien
attcaaggttatctgacgcaagtattaacaagc

SEQ ID NO: 144270 - DNA, 33 bp, Homo sapien
attcaaggttatctgatgcaagtattaacaagc

SEQ ID NO: 144271 - DNA, 33 bp, Homo sapien
tcaggatttaaagatacagtcattggcataatt

SEQ ID NO: 144272 - DNA, 33 bp, Homo sapien
tcaggatttaaagatagagtcattggcataatt

SEQ ID NO: 144273 - DNA, 33 bp, Homo sapien
attaataaaatcactacgtaaagccaactcttt

SEQ ID NO: 144274 - DNA, 33 bp, Homo sapien
attaataaaatcactaggtaaagccaactcttt

SEQ ID NO: 144275 - DNA, 33 bp, Homo sapien
tgatctgggaatggaaatcccacactatcgtga

SEQ ID NO: 144276 - DNA, 33 bp, Homo sapien
tgatctgggaatggaagtcccacactatcgtga

SEQ ID NO: 144277 - DNA, 33 bp, Homo sapien
cacctgaggcactgtccccgttcattacaaatg

SEQ ID NO: 144278 - DNA, 33 bp, Homo sapien
cacctgaggcactgtctccgttcattacaaatg

SEQ ID NO: 144279 - DNA, 33 bp, Homo sapien
actaaacaacagtctacgtaggcataaacagat

SEQ ID NO: 144280 - DNA, 33 bp, Homo sapien
actaaacaacagtctatgtaggcataaacagat

SEQ ID NO: 144281 - DNA, 33 bp, Homo sapien
gatacttgcttaaaaaattgtcactggtcctgt

SEQ ID NO: 144282 - DNA, 33 bp, Homo sapien
gatacttgcttaaaaacttgtcactggtcctgt

SEQ ID NO: 144283 - DNA, 33 bp, Homo sapien
tggggccagtgatggacgaagtgtactttggag

SEQ ID NO: 144284 - DNA, 33 bp, Homo sapien
tggggccagtgatggatgaagtgtactttggag

SEQ ID NO: 144285 - DNA, 33 bp, Homo sapien
tgggtggaaagatgccaaacagctagcttagcc

SEQ ID NO: 144286 - DNA, 33 bp, Homo sapien
tgggtggaaagatgccgaacagctagcttagcc

SEQ ID NO: 144287 - DNA, 33 bp, Homo sapien
agatattggctatcaacagaatagaaacgtaga

SEQ ID NO: 144288 - DNA, 33 bp, Homo sapien
agatattggctatcaagagaatagaaacgtaga

SEQ ID NO: 144289 - DNA, 33 bp, Homo sapien
cccctgttgcctatcactgaggttttgaggcca

SEQ ID NO: 144290 - DNA, 33 bp, Homo sapien
cccctgttgcctatcattgaggttttgaggcca

SEQ ID NO: 144291 - DNA, 33 bp, Homo sapien
attaaaatccacagaaccttttctatgcaggga

SEQ ID NO: 144292 - DNA, 33 bp, Homo sapien
attaaaatccacagaatcttttctatgcaggga

SEQ ID NO: 144293 - DNA, 33 bp, Homo sapien
ccttattttcagggaccgagtcttgtaatttgt

SEQ ID NO: 144294 - DNA, 33 bp, Homo sapien
ccttattttcagggactgagtcttgtaatttgt

SEQ ID NO: 144295 - DNA, 33 bp, Homo sapien; identical to SEQ ID NO: 144293

SEQ ID NO: 144296 - DNA, 33 bp, Homo sapien; identical to SEQ ID NO: 144294

SEQ ID NO: 144297 - DNA, 33 bp, Homo sapien; identical to SEQ ID NO: 144293

SEQ ID NO: 144298 - DNA, 33 bp, Homo sapien; identical to SEQ ID NO: 144294

SEQ ID NO: 144299 - DNA, 33 bp, Homo sapien
gtctcgagtttcactacctaagcatggatctct

SEQ ID NO: 144300 - DNA, 33 bp, Homo sapien
gtctcgagtttcactatctaagcatggatctct

SEQ ID NO: 144301 - DNA, 33 bp, Homo sapien
tccaaaggttcagatgaagaacagacaggccat

SEQ ID NO: 144302 - DNA, 33 bp, Homo sapien
tccaaaggttcagatggagaacagacaggccat

SEQ ID NO: 144303 - DNA, 33 bp, Homo sapien
tggctgtagcagaataccggaaaagatctgcct

SEQ ID NO: 144304 - DNA, 33 bp, Homo sapien
tggctgtagcagaatatcggaaaagatctgcct

SEQ ID NO: 144305 - DNA, 33 bp, Homo sapien
tctgctctaagaaggcagagatcggagtttgtg

SEQ ID NO: 144306 - DNA, 33 bp, Homo sapien
tctgctctaagaaggcggagatcggagtttgtg

SEQ ID NO: 144307 - DNA, 33 bp, Homo sapien
agtaaatgatggttaccatttacttgattgaac

SEQ ID NO: 144308 - DNA, 33 bp, Homo sapien
agtaaatgatggttactatttacttgattgaac

SEQ ID NO: 144309 - DNA, 33 bp, Homo sapien
aataatgatgggttgccgagctctgaaaagccc

SEQ ID NO: 144310 - DNA, 33 bp, Homo sapien
aataatgatgggttgctgagctctgaaaagccc

SEQ ID NO: 144311 - DNA, 33 bp, Homo sapien
tggggcatttctaaggacacatgcttctgcagc

SEQ ID NO: 144312 - DNA, 33 bp, Homo sapien
tggggcatttctaagggcacatgcttctgcagc

SEQ ID NO: 144313 - DNA, 33 bp, Homo sapien
tcctggtgtcttctaaagaaagtgacatctgct

SEQ ID NO: 144314 - DNA, 33 bp, Homo sapien
tcctggtgtcttctaatgaaagtgacatctgct

SEQ ID NO: 144315 - DNA, 33 bp, Homo sapien
tttgaaatagatgaaactgatcaagtaggatat

SEQ ID NO: 144316 - DNA, 33 bp, Homo sapien
tttgaaatagatgaaattgatcaagtaggatat

SEQ ID NO: 144317 - DNA, 33 bp, Homo sapien
atatatatatagtcacaacccacttaacagcag

SEQ ID NO: 144318 - DNA, 33 bp, Homo sapien
atatatatatagtcacgacccacttaacagcag

SEQ ID NO: 144319 - DNA, 33 bp, Homo sapien
acaggaacatagtagacaatcaattgtgttcac

SEQ ID NO: 144320 - DNA, 33 bp, Homo sapien
acaggaacatagtagataatcaattgtgttcac

SEQ ID NO: 144321 - DNA, 33 bp, Homo sapien
cagctttgtgagcaccaaacttaggtacaaagg

SEQ ID NO: 144322 - DNA, 33 bp, Homo sapien
cagctttgtgagcaccgaacttaggtacaaagg

SEQ ID NO: 144323 - DNA, 33 bp, Homo sapien
aagcttgggaatgtaccgatggggtgttctgca

SEQ ID NO: 144324 - DNA, 33 bp, Homo sapien
aagcttgggaatgtactgatggggtgttctgca

SEQ ID NO: 144325 - DNA, 33 bp, Homo sapien
acagcctgggggcaaagatgcacttgtgaaaaa

SEQ ID NO: 144326 - DNA, 33 bp, Homo sapien
acagcctgggggcaaatatgcacttgtgaaaaa

SEQ ID NO: 144327 - DNA, 33 bp, Homo sapien
aaggaagtcagtgctcaaaaagcagaatgctaa

SEQ ID NO: 144328 - DNA, 33 bp, Homo sapien
aaggaagtcagtgctcgaaaagcagaatgctaa

SEQ ID NO: 144329 - DNA, 33 bp, Homo sapien
ggacagcctggaaagaaggaaaaagagtcactt

SEQ ID NO: 144330 - DNA, 33 bp, Homo sapien
ggacagcctggaaagagggaaaaagagtcactt

SEQ ID NO: 144331 - DNA, 33 bp, Homo sapien
gggctctttgcttgcaaaccagttcatcatacc

SEQ ID NO: 144332 - DNA, 33 bp, Homo sapien
gggctctttgcttgcagaccagttcatcatacc

SEQ ID NO: 144333 - DNA, 33 bp, Homo sapien
gttattcagggacaaaagctgtatagagtttcc

SEQ ID NO: 144334 - DNA, 33 bp, Homo sapien
gttattcagggacaaaggctgtatagagtttcc

SEQ ID NO: 144335 - DNA, 33 bp, Homo sapien
tgttatctgtgaatgaaaacagttttacttctt

SEQ ID NO: 144336 - DNA, 33 bp, Homo sapien
tgttatctgtgaatgagaacagttttacttctt

SEQ ID NO: 144337 - DNA, 33 bp, Homo sapien
ccagctgatttcacaacaaacaccactgatttc

SEQ ID NO: 144338 - DNA, 33 bp, Homo sapien
ccagctgatttcacaataaacaccactgatttc

SEQ ID NO: 144339 - DNA, 33 bp, Homo sapien
gatttcagagccctggcattgcagccactggtc

SEQ ID NO: 144340 - DNA, 33 bp, Homo sapien
gatttcagagccctggtattgcagccactggtc

SEQ ID NO: 144341 - DNA, 33 bp, Homo sapien
gtccagccattctgaaaagttgctcagcccctc

SEQ ID NO: 144342 - DNA, 33 bp, Homo sapien
gtccagccattctgaacagttgctcagcccctc

SEQ ID NO: 144343 - DNA, 33 bp, Homo sapien
aggagggatgatgagacgtttccctccttcaca

SEQ ID NO: 144344 - DNA, 33 bp, Homo sapien
aggagggatgatgagatgtttccctccttcaca

SEQ ID NO: 144345 - DNA, 33 bp, Homo sapien
tgcctataagtcaatcacaacagactttccaac

SEQ ID NO: 144346 - DNA, 33 bp, Homo sapien
tgcctataagtcaatcgcaacagactttccaac

SEQ ID NO: 144347 - DNA, 33 bp, Homo sapien
gttagatcatttctgaagtgcttttcaaccctg

SEQ ID NO: 144348 - DNA, 33 bp, Homo sapien
gttagatcatttctgaggtgcttttcaaccctg

SEQ ID NO: 144349 - DNA, 33 bp, Homo sapien
cagttcatgggcctcacgtggagattcactgat

SEQ ID NO: 144350 - DNA, 33 bp, Homo sapien
cagttcatgggcctcatgtggagattcactgat

SEQ ID NO: 144351 - DNA, 33 bp, Homo sapien
aaatcttatcatcaaacgagagagggacagaac

SEQ ID NO: 144352 - DNA, 33 bp, Homo sapien
aaatcttatcatcaaatgagagagggacagaac

SEQ ID NO: 144353 - DNA, 33 bp, Homo sapien
ggagccccttctacaacgcgctgaaaaagacac

SEQ ID NO: 144354 - DNA, 33 bp, Homo sapien
ggagccccttctacaatgcgctgaaaaagacac

SEQ ID NO: 144355 - DNA, 33 bp, Homo sapien
gagagaataatagaaaccttctcatgatcctcc

SEQ ID NO: 144356 - DNA, 33 bp, Homo sapien
gagagaataatagaaagcttctcatgatcctcc

SEQ ID NO: 144357 - DNA, 33 bp, Homo sapien
actgcactgagcccccaactctttttaaagctt

SEQ ID NO: 144358 - DNA, 33 bp, Homo sapien
actgcactgagcccccgactctttttaaagctt

SEQ ID NO: 144359 - DNA, 33 bp, Homo sapien
ttatgcagtttgacaacagtgtatttgggctga

SEQ ID NO: 144360 - DNA, 33 bp, Homo sapien
ttatgcagtttgacaagagtgtatttgggctga

SEQ ID NO: 144361 - DNA, 33 bp, Homo sapien
caccccatggtgccgaatcataaacagaaagaa

SEQ ID NO: 144362 - DNA, 33 bp, Homo sapien
caccccatggtgccgagtcataaacagaaagaa

SEQ ID NO: 144363 - DNA, 33 bp, Homo sapien
acagataattgcaatacgagactggctctaaga

SEQ ID NO: 144364 - DNA, 33 bp, Homo sapien
acagataattgcaataggagactggctctaaga

SEQ ID NO: 144365 - DNA, 33 bp, Homo sapien
tgtggtcctctggttcacctgccacctgagccc

SEQ ID NO: 144366 - DNA, 33 bp, Homo sapien
tgtggtcctctggttcgcctgccacctgagccc

SEQ ID NO: 144367 - DNA, 33 bp, Homo sapien
agaaaaaaattaaggacacttgacaatgataat

SEQ ID NO: 144368 - DNA, 33 bp, Homo sapien
agaaaaaaattaaggagacttgacaatgataat

SEQ ID NO: 144369 - DNA, 33 bp, Homo sapien
ggcacattttatggtacgctaattgcacctcaa

SEQ ID NO: 144370 - DNA, 33 bp, Homo sapien
ggcacattttatggtatgctaattgcacctcaa

SEQ ID NO: 144371 - DNA, 33 bp, Homo sapien
tgcagagtaattccacagaccaaagagaaaagg

SEQ ID NO: 144372 - DNA, 33 bp, Homo sapien
tgcagagtaattccacggaccaaagagaaaagg

SEQ ID NO: 144373 - DNA, 33 bp, Homo sapien
catctccagggacaagcctcgaattgctcacac

SEQ ID NO: 144374 - DNA, 33 bp, Homo sapien
catctccagggacaagtctcgaattgctcacac

SEQ ID NO: 144375 - DNA, 33 bp, Homo sapien
tgagtaaatcagccaacaatctctgccttagac

SEQ ID NO: 144376 - DNA, 33 bp, Homo sapien
tgagtaaatcagccaagaatctctgccttagac

SEQ ID NO: 144377 - DNA, 33 bp, Homo sapien
cacagcttaaatacacagtctctaaaaagctca

SEQ ID NO: 144378 - DNA, 33 bp, Homo sapien
cacagcttaaatacacggtctctaaaaagctca

SEQ ID NO: 144379 - DNA, 33 bp, Homo sapien
ttaaaagagagaactgaaagtattgtgctctct

SEQ ID NO: 144380 - DNA, 33 bp, Homo sapien
ttaaaagagagaactgtaagtattgtgctctct

SEQ ID NO: 144381 - DNA, 33 bp, Homo sapien
ctcaattctcagggccaaagtcctaactgggct

SEQ ID NO: 144382 - DNA, 33 bp, Homo sapien
ctcaattctcagggccgaagtcctaactgggct

SEQ ID NO: 144383 - DNA, 33 bp, Homo sapien
ctcaggagggatgctcgctttctcactgatcag

SEQ ID NO: 144384 - DNA, 33 bp, Homo sapien
ctcaggagggatgctctctttctcactgatcag

SEQ ID NO: 144385 - DNA, 33 bp, Homo sapien
tttggctatgacaccacaaatgccatgaccaca

SEQ ID NO: 144386 - DNA, 33 bp, Homo sapien
tttggctatgacaccagaaatgccatgaccaca

SEQ ID NO: 144387 - DNA, 33 bp, Homo sapien
ctttatttttttctacacttagcatccaacaaa

SEQ ID NO: 144388 - DNA, 33 bp, Homo sapien
ctttatttttttctacgcttagcatccaacaaa

SEQ ID NO: 144389 - DNA, 33 bp, Homo sapien
ttgccactagtcaaataagtgatgtcccaggct

SEQ ID NO: 144390 - DNA, 33 bp, Homo sapien
ttgccactagtcaaatgagtgatgtcccaggct

SEQ ID NO: 144391 - DNA, 33 bp, Homo sapien
tcattgttgcatgaccaagcatctcctggtttg

SEQ ID NO: 144392 - DNA, 33 bp, Homo sapien
tcattgttgcatgaccgagcatctcctggtttg

SEQ ID NO: 144393 - DNA, 33 bp, Homo sapien
tgagaggtgtcaaggaagtattgaataaataga

SEQ ID NO: 144394 - DNA, 33 bp, Homo sapien
tgagaggtgtcaaggatgtattgaataaataga

SEQ ID NO: 144395 - DNA, 33 bp, Homo sapien
taatcagggtaaacaacgtatttatcgcctcaa

SEQ ID NO: 144396 - DNA, 33 bp, Homo sapien
taatcagggtaaacaatgtatttatcgcctcaa

SEQ ID NO: 144397 - DNA, 33 bp, Homo sapien
aattgtatggttcaaaaaatttatttcctatcc

SEQ ID NO: 144398 - DNA, 33 bp, Homo sapien
aattgtatggttcaaagaatttatttcctatcc

SEQ ID NO: 144399 - DNA, 33 bp, Homo sapien
tatttaagtattttacactaaagcagggtgaac

SEQ ID NO: 144400 - DNA, 33 bp, Homo sapien
tatttaagtattttacgctaaagcagggtgaac

SEQ ID NO: 144401 - DNA, 33 bp, Homo sapien
caaaaatgacaaattcaaacagcttgttggcta

SEQ ID NO: 144402 - DNA, 33 bp, Homo sapien
caaaaatgacaaattcgaacagcttgttggcta

SEQ ID NO: 144403 - DNA, 33 bp, Homo sapien
tttgacctaattatgacggctgtgagggaaggg

SEQ ID NO: 144404 - DNA, 33 bp, Homo sapien
tttgacctaattatgatggctgtgagggaaggg

SEQ ID NO: 144405 - DNA, 33 bp, Homo sapien
ctagagttccacaaaacacagctcagaaactgt

SEQ ID NO: 144406 - DNA, 33 bp, Homo sapien
ctagagttccacaaaatacagctcagaaactgt

SEQ ID NO: 144407 - DNA, 33 bp, Homo sapien
tagcaaactaagaaaccatgagctgggctaatc

SEQ ID NO: 144408 - DNA, 33 bp, Homo sapien
tagcaaactaagaaacgatgagctgggctaatc

SEQ ID NO: 144409 - DNA, 33 bp, Homo sapien
tgtatgcaataaggccagaccttttggttgcat

SEQ ID NO: 144410 - DNA, 33 bp, Homo sapien
tgtatgcaataaggccggaccttttggttgcat

SEQ ID NO: 144411 - DNA, 33 bp, Homo sapien
atctcaggatatgttacctgcgcgctcgccacc

SEQ ID NO: 144412 - DNA, 33 bp, Homo sapien
atctcaggatatgttatctgcgcgctcgccacc

SEQ ID NO: 144413 - DNA, 33 bp, Homo sapien
atttagttctcatctgcacctatccactccagt

SEQ ID NO: 144414 - DNA, 33 bp, Homo sapien
atttagttctcatctggacctatccactccagt

SEQ ID NO: 144415 - DNA, 33 bp, Homo sapien
ttgccatcattcatccagaaagaagacaagagc

SEQ ID NO: 144416 - DNA, 33 bp, Homo sapien
ttgccatcattcatccggaaagaagacaagagc

SEQ ID NO: 144417 - DNA, 33 bp, Homo sapien
aaggatgtactcattaaaatgatgcacataaaa

SEQ ID NO: 144418 - DNA, 33 bp, Homo sapien
aaggatgtactcattacaatgatgcacataaaa

SEQ ID NO: 144419 - DNA, 33 bp, Homo sapien
gtgtgaagggtttgaaatagaccacaacctagc

SEQ ID NO: 144420 - DNA, 33 bp, Homo sapien
gtgtgaagggtttgaagtagaccacaacctagc

SEQ ID NO: 144421 - DNA, 33 bp, Homo sapien
aaacgggctgctgatacatgtaacaagcctgag

SEQ ID NO: 144422 - DNA, 33 bp, Homo sapien
aaacgggctgctgatatatgtaacaagcctgag

SEQ ID NO: 144423 - DNA, 33 bp, Homo sapien
taagatgcccaaatacacaaagaatattttgga

SEQ ID NO: 144424 - DNA, 33 bp, Homo sapien
taagatgcccaaatacgcaaagaatattttgga

SEQ ID NO: 144425 - DNA, 33 bp, Homo sapien
actaatgccagtatgcaatatatttcttgccag

SEQ ID NO: 144426 - DNA, 33 bp, Homo sapien
actaatgccagtatgcgatatatttcttgccag

SEQ ID NO: 144427 - DNA, 33 bp, Homo sapien
ggtttagaataattcccctagtgctggctcatg

SEQ ID NO: 144428 - DNA, 33 bp, Homo sapien
ggtttagaataattcctctagtgctggctcatg

SEQ ID NO: 144429 - DNA, 33 bp, Homo sapien
tggtgaaaattcaaatcatgacaaatgcaaatg

SEQ ID NO: 144430 - DNA, 33 bp, Homo sapien
tggtgaaaattcaaattatgacaaatgcaaatg

SEQ ID NO: 144431 - DNA, 33 bp, Homo sapien
gcacttttagtcatcaccccatacctagtatta

SEQ ID NO: 144432 - DNA, 33 bp, Homo sapien
gcacttttagtcatcatcccatacctagtatta

SEQ ID NO: 144433 - DNA, 33 bp, Homo sapien
aaaaaaaagaatccaactctcaatcccatgaca

SEQ ID NO: 144434 - DNA, 33 bp, Homo sapien
aaaaaaaagaatccaagtctcaatcccatgaca

SEQ ID NO: 144435 - DNA, 33 bp, Homo sapien
tacctacacagtgagacgcgagagagctaggct

SEQ ID NO: 144436 - DNA, 33 bp, Homo sapien
tacctacacagtgagatgcgagagagctaggct

SEQ ID NO: 144437 - DNA, 33 bp, Homo sapien
accaatagaatagcaaagaaggttccaaactga

SEQ ID NO: 144438 - DNA, 33 bp, Homo sapien
accaatagaatagcaacgaaggttccaaactga

SEQ ID NO: 144439 - DNA, 33 bp, Homo sapien
actgtctacatctcagccataccaatagaatag

SEQ ID NO: 144440 - DNA, 33 bp, Homo sapien
actgtctacatctcagtcataccaatagaatag

SEQ ID NO: 144441 - DNA, 33 bp, Homo sapien
atttgtgaatcattaactgggctaaggacagat

SEQ ID NO: 144442 - DNA, 33 bp, Homo sapien
atttgtgaatcattaattgggctaaggacagat

SEQ ID NO: 144443 - DNA, 33 bp, Homo sapien
tcacatctacccttgtaaacggatgctagattt

SEQ ID NO: 144444 - DNA, 33 bp, Homo sapien
tcacatctacccttgttaacggatgctagattt

SEQ ID NO: 144445 - DNA, 33 bp, Homo sapien
ctcttaaccttggatcaaccttgggcttaaccg

SEQ ID NO: 144446 - DNA, 33 bp, Homo sapien
ctcttaaccttggatcgaccttgggcttaaccg

SEQ ID NO: 144447 - DNA, 33 bp, Homo sapien
actttctaggaatgcgccacatggccgcttcca

SEQ ID NO: 144448 - DNA, 33 bp, Homo sapien
actttctaggaatgcgtcacatggccgcttcca

SEQ ID NO: 144449 - DNA, 33 bp, Homo sapien
gtggcttgaaatgtcaaggttattcctccatct

SEQ ID NO: 144450 - DNA, 33 bp, Homo sapien
gtggcttgaaatgtcatggttattcctccatct
